United States Patent Application Publication US 2014/0004565 A1 - sequence listing, part 39

SEQ ID NO: 886188 - RNA, 19 nt, Artificial Sequence
  Description of Artificial Sequence: Synthetic oligonucleotide
aaccucacagccagauacu

SEQ ID NO: 886189 - RNA, 19 nt, Artificial Sequence
  Description of Artificial Sequence: Synthetic oligonucleotide
cuguaauuagcagagcacu

SEQ ID NO: 886190 - RNA, 19 nt, Artificial Sequence
  Description of Artificial Sequence: Synthetic oligonucleotide
uagucaugguguucuucaa

SEQ ID NO: 886191 - RNA, 19 nt, Artificial Sequence
  Description of Artificial Sequence: Synthetic oligonucleotide
aguucauaaagaaccucuu

SEQ ID NO: 886192 - RNA, 19 nt, Artificial Sequence
  Description of Artificial Sequence: Synthetic oligonucleotide
aucuugucuaacauucuuu

SEQ ID NO: 886193 - RNA, 19 nt, Artificial Sequence
  Description of Artificial Sequence: Synthetic oligonucleotide
uggcuagcacucucucuug

SEQ ID NO: 886194 - RNA, 19 nt, Artificial Sequence
  Description of Artificial Sequence: Synthetic oligonucleotide
  modified_base (5)..(5): a, c, u, g, unknown or other
guggnucccaaacuaucaa

SEQ ID NO: 886195 - RNA, 19 nt, Artificial Sequence
  Description of Artificial Sequence: Synthetic oligonucleotide
uccauggguuuguucacuu

SEQ ID NO: 886196 - RNA, 19 nt, Artificial Sequence
  Description of Artificial Sequence: Synthetic oligonucleotide
cuguguguggaugcauuac

SEQ ID NO: 886197 - RNA, 19 nt, Artificial Sequence
  Description of Artificial Sequence: Synthetic oligonucleotide
ccauuuaauacagugaacu

SEQ ID NO: 886198 - RNA, 19 nt, Artificial Sequence
  Description of Artificial Sequence: Synthetic oligonucleotide
ccauaaguguuggaugggg

SEQ ID NO: 886199 - RNA, 19 nt, Artificial Sequence
  Description of Artificial Sequence: Synthetic oligonucleotide
caugaagauacuacaguuu

SEQ ID NO: 886200 - RNA, 19 nt, Artificial Sequence
  Description of Artificial Sequence: Synthetic oligonucleotide
cuguaucgagguucaucug

SEQ ID NO: 886201 - RNA, 19 nt, Artificial Sequence
  Description of Artificial Sequence: Synthetic oligonucleotide
  modified_base (17)..(17): a, c, u, g, unknown or other
gcauaaagccuuguggnuc

SEQ ID NO: 886202 - RNA, 19 nt, Artificial Sequence
  Description of Artificial Sequence: Synthetic oligonucleotide
ucgcuguaaucuguucaug

SEQ ID NO: 886203 - RNA, 19 nt, Artificial Sequence
  Description of Artificial Sequence: Synthetic oligonucleotide
guauuucucacugaccaau

SEQ ID NO: 886204 - RNA, 19 nt, Artificial Sequence
  Description of Artificial Sequence: Synthetic oligonucleotide
ugccacuguugcauuguua

SEQ ID NO: 886205 - RNA, 19 nt, Artificial Sequence
  Description of Artificial Sequence: Synthetic oligonucleotide
cuuauuugugcuccuuggu

SEQ ID NO: 886206 - RNA, 19 nt, Artificial Sequence
  Description of Artificial Sequence: Synthetic oligonucleotide
cugcacagaaccgauguaa

SEQ ID NO: 886207 - RNA, 19 nt, Artificial Sequence
  Description of Artificial Sequence: Synthetic oligonucleotide
gcugagugccugcugguug

SEQ ID NO: 886208 - RNA, 19 nt, Artificial Sequence
  Description of Artificial Sequence: Synthetic oligonucleotide
aguaaugauggugcaucuu

SEQ ID NO: 886209 - RNA, 19 nt, Artificial Sequence
  Description of Artificial Sequence: Synthetic oligonucleotide
auacuacaguuuauauaga

SEQ ID NO: 886210 - RNA, 19 nt, Artificial Sequence
  Description of Artificial Sequence: Synthetic oligonucleotide
guggcauuaccugaagucu

SEQ ID NO: 886211 - RNA, 19 nt, Artificial Sequence
  Description of Artificial Sequence: Synthetic oligonucleotide
aaugugcaacugaggaaua

SEQ ID NO: 886212 - RNA, 19 nt, Artificial Sequence
  Description of Artificial Sequence: Synthetic oligonucleotide
caucuaggugaaaccacaa

SEQ ID NO: 886213 - RNA, 19 nt, Artificial Sequence
  Description of Artificial Sequence: Synthetic oligonucleotide
accgauguaaacacuccuu

SEQ ID NO: 886214 - RNA, 19 nt, Artificial Sequence
  Description of Artificial Sequence: Synthetic oligonucleotide
agcccuuccucaaugcuau

SEQ ID NO: 886215 - RNA, 19 nt, Artificial Sequence
  Description of Artificial Sequence: Synthetic oligonucleotide
gcaaucugcacagaaccga

SEQ ID NO: 886216 - RNA, 19 nt, Artificial Sequence
  Description of Artificial Sequence: Synthetic oligonucleotide
cugacucuucugcagaccu

SEQ ID NO: 886217 - RNA, 19 nt, Artificial Sequence
  Description of Artificial Sequence: Synthetic oligonucleotide
uugcuucgaaguucuucua

SEQ ID NO: 886218 - RNA, 19 nt, Artificial Sequence
  Description of Artificial Sequence: Synthetic oligonucleotide
gcuagguccugcuuccuga

SEQ ID NO: 886219 - RNA, 19 nt, Artificial Sequence
  Description of Artificial Sequence: Synthetic oligonucleotide
gugaaagauggcuucucau

SEQ ID NO: 886220 - RNA, 19 nt, Artificial Sequence
  Description of Artificial Sequence: Synthetic oligonucleotide
gucuaacauucuuuaggcu

SEQ ID NO: 886221 - RNA, 19 nt, Artificial Sequence
  Description of Artificial Sequence: Synthetic oligonucleotide
  modified_base (8)..(8): a, c, u, g, unknown or other
cuuguggnucccaaacuau

SEQ ID NO: 886222 - RNA, 19 nt, Artificial Sequence
  Description of Artificial Sequence: Synthetic oligonucleotide
cuucaaacgaaagcagccu

SEQ ID NO: 886223 - RNA, 19 nt, Artificial Sequence
  Description of Artificial Sequence: Synthetic oligonucleotide
auggugcaucuuuaauauu

SEQ ID NO: 886224 - RNA, 19 nt, Artificial Sequence
  Description of Artificial Sequence: Synthetic oligonucleotide
ggaugcauuacuacagugu

SEQ ID NO: 886225 - RNA, 19 nt, Artificial Sequence
  Description of Artificial Sequence: Synthetic oligonucleotide
uucuugccucgcuguaauc

SEQ ID NO: 886226 - RNA, 19 nt, Artificial Sequence
  Description of Artificial Sequence: Synthetic oligonucleotide
uccggccucagugaucuuu

SEQ ID NO: 886227 - RNA, 19 nt, Artificial Sequence
  Description of Artificial Sequence: Synthetic oligonucleotide
aucccagaucuguccguga

SEQ ID NO: 886228 - RNA, 19 nt, Artificial Sequence
  Description of Artificial Sequence: Synthetic oligonucleotide
uauugccuccugagguguu

SEQ ID NO: 886229 - RNA, 19 nt, Artificial Sequence
  Description of Artificial Sequence: Synthetic oligonucleotide
ggcuucucauaguguaaac

SEQ ID NO: 886230 - RNA, 19 nt, Artificial Sequence
  Description of Artificial Sequence: Synthetic oligonucleotide
cagaccugucuuacuauua

SEQ ID NO: 886231 - RNA, 19 nt, Artificial Sequence
  Description of Artificial Sequence: Synthetic oligonucleotide
ucaucacgacuuggguaga

SEQ ID NO: 886232 - RNA, 19 nt, Artificial Sequence
  Description of Artificial Sequence: Synthetic oligonucleotide
aucuguccgugaaaguaau

SEQ ID NO: 886233 - RNA, 19 nt, Artificial Sequence
  Description of Artificial Sequence: Synthetic oligonucleotide
cacuagcaccauccauuac

SEQ ID NO: 886234 - RNA, 19 nt, Artificial Sequence
  Description of Artificial Sequence: Synthetic oligonucleotide
gcuauggcugagugccugc

SEQ ID NO: 886235 - RNA, 19 nt, Artificial Sequence
  Description of Artificial Sequence: Synthetic oligonucleotide
gucaucugauguuuugguu

SEQ ID NO: 886236 - RNA, 19 nt, Artificial Sequence
  Description of Artificial Sequence: Synthetic oligonucleotide
guaucgagguucaucuggu

SEQ ID NO: 886237 - RNA, 19 nt, Artificial Sequence
  Description of Artificial Sequence: Synthetic oligonucleotide
guguguggaugcauuacua

SEQ ID NO: 886238 - RNA, 19 nt, Artificial Sequence
  Description of Artificial Sequence: Synthetic oligonucleotide
ggcuguaucgagguucauc

SEQ ID NO: 886239 - RNA, 19 nt, Artificial Sequence
  Description of Artificial Sequence: Synthetic oligonucleotide
uguagacaucuaggugaaa

SEQ ID NO: 886240 - RNA, 19 nt, Artificial Sequence
  Description of Artificial Sequence: Synthetic oligonucleotide
gccaucuguuauugccucc

SEQ ID NO: 886241 - RNA, 19 nt, Artificial Sequence
  Description of Artificial Sequence: Synthetic oligonucleotide
cagcccuuccucaaugcua

SEQ ID NO: 886242 - RNA, 19 nt, Artificial Sequence
  Description of Artificial Sequence: Synthetic oligonucleotide
guuugugcacugucauccu

SEQ ID NO: 886243 - RNA, 19 nt, Artificial Sequence
  Description of Artificial Sequence: Synthetic oligonucleotide
aucacgacuuggguagauu

SEQ ID NO: 886244 - RNA, 19 nt, Artificial Sequence
  Description of Artificial Sequence: Synthetic oligonucleotide
  modified_base (9)..(9): a, c, u, g, unknown or other
ccuuguggnucccaaacua

SEQ ID NO: 886245 - RNA, 19 nt, Artificial Sequence
  Description of Artificial Sequence: Synthetic oligonucleotide
gcuauguaaaugguauacu

SEQ ID NO: 886246 - RNA, 19 nt, Artificial Sequence
  Description of Artificial Sequence: Synthetic oligonucleotide
caacauauccaagcaaauu

SEQ ID NO: 886247 - RNA, 19 nt, Artificial Sequence
  Description of Artificial Sequence: Synthetic oligonucleotide
cagaaauucuaagcuuaua

SEQ ID NO: 886248 - RNA, 19 nt, Artificial Sequence
  Description of Artificial Sequence: Synthetic oligonucleotide
agucuggcucagaaagaaa

SEQ ID NO: 886249 - RNA, 19 nt, Artificial Sequence
  Description of Artificial Sequence: Synthetic oligonucleotide
cuucuugccucgcuguaau

SEQ ID NO: 886250 - RNA, 19 nt, Artificial Sequence
  Description of Artificial Sequence: Synthetic oligonucleotide
gcauuacuacagugugaac

SEQ ID NO: 886251 - RNA, 19 nt, Artificial Sequence
  Description of Artificial Sequence: Synthetic oligonucleotide
cgacuuggguagauuuugc

SEQ ID NO: 886252 - RNA, 19 nt, Artificial Sequence
  Description of Artificial Sequence: Synthetic oligonucleotide
gguucguuuguugcuaggu

SEQ ID NO: 886253 - RNA, 19 nt, Artificial Sequence
  Description of Artificial Sequence: Synthetic oligonucleotide
aucugauguuuugguucgu

SEQ ID NO: 886254 - RNA, 19 nt, Artificial Sequence
  Description of Artificial Sequence: Synthetic oligonucleotide
ggcuagcacucucucuuga

SEQ ID NO: 886255 - RNA, 19 nt, Artificial Sequence
  Description of Artificial Sequence: Synthetic oligonucleotide
cagaaccgauguaaacacu

SEQ ID NO: 886256 - RNA, 19 nt, Artificial Sequence
  Description of Artificial Sequence: Synthetic oligonucleotide
uugcuagguccugcuuccu

SEQ ID NO: 886257 - RNA, 19 nt, Artificial Sequence
  Description of Artificial Sequence: Synthetic oligonucleotide
aggagccauuuaauacagu

SEQ ID NO: 886258 - RNA, 19 nt, Artificial Sequence
  Description of Artificial Sequence: Synthetic oligonucleotide
cacuucuaagggcugugau

SEQ ID NO: 886259 - RNA, 19 nt, Artificial Sequence
  Description of Artificial Sequence: Synthetic oligonucleotide
cucaaugcuauggcugagu

SEQ ID NO: 886260 - RNA, 19 nt, Artificial Sequence
  Description of Artificial Sequence: Synthetic oligonucleotide
gguccggccucagugaucu

SEQ ID NO: 886261 - RNA, 19 nt, Artificial Sequence
  Description of Artificial Sequence: Synthetic oligonucleotide
gccacuucuaagggcugug

SEQ ID NO: 886262 - RNA, 19 nt, Artificial Sequence
  Description of Artificial Sequence: Synthetic oligonucleotide
cacgacuuggguagauuuu

SEQ ID NO: 886263 - RNA, 19 nt, Artificial Sequence
  Description of Artificial Sequence: Synthetic oligonucleotide
ccaugaccagaaauucuaa

SEQ ID NO: 886264 - RNA, 19 nt, Artificial Sequence
  Description of Artificial Sequence: Synthetic oligonucleotide
uccguacagguagggcauu

SEQ ID NO: 886265 - RNA, 19 nt, Artificial Sequence
  Description of Artificial Sequence: Synthetic oligonucleotide
cucggucuucaugaagaua

SEQ ID NO: 886266 - RNA, 19 nt, Artificial Sequence
  Description of Artificial Sequence: Synthetic oligonucleotide
ugagugccugcugguuguu

SEQ ID NO: 886267 - RNA, 19 nt, Artificial Sequence
  Description of Artificial Sequence: Synthetic oligonucleotide
ccucaaugcuauggcugag

SEQ ID NO: 886268 - RNA, 19 nt, Artificial Sequence
  Description of Artificial Sequence: Synthetic oligonucleotide
gccagauacuuggauaaau

SEQ ID NO: 886269 - RNA, 19 nt, Artificial Sequence
  Description of Artificial Sequence: Synthetic oligonucleotide
agcuaaccucacagccaga

SEQ ID NO: 886270 - RNA, 19 nt, Artificial Sequence
  Description of Artificial Sequence: Synthetic oligonucleotide
caauugccacuguugcauu

SEQ ID NO: 886271 - RNA, 19 nt, Artificial Sequence
  Description of Artificial Sequence: Synthetic oligonucleotide
gcuagcacucucucuugau

SEQ ID NO: 886272 - RNA, 19 nt, Artificial Sequence
  Description of Artificial Sequence: Synthetic oligonucleotide
cuauggcugagugccugcu

SEQ ID NO: 886273 - RNA, 19 nt, Artificial Sequence
  Description of Artificial Sequence: Synthetic oligonucleotide
cuggaucaauugccacugu

SEQ ID NO: 886274 - RNA, 19 nt, Artificial Sequence
  Description of Artificial Sequence: Synthetic oligonucleotide
uggcuguaucgagguucau

SEQ ID NO: 886275 - RNA, 19 nt, Artificial Sequence
  Description of Artificial Sequence: Synthetic oligonucleotide
ggcauuaccugaagucuuu

SEQ ID NO: 886276 - RNA, 19 nt, Artificial Sequence
  Description of Artificial Sequence: Synthetic oligonucleotide
gcagagcacuaaauuuaua

SEQ ID NO: 886277 - RNA, 19 nt, Artificial Sequence
  Description of Artificial Sequence: Synthetic oligonucleotide
ccguacagguagggcauuc

SEQ ID NO: 886278 - RNA, 19 nt, Artificial Sequence
  Description of Artificial Sequence: Synthetic oligonucleotide
gggaugcuuugaacauauc

SEQ ID NO: 886279 - RNA, 19 nt, Artificial Sequence
  Description of Artificial Sequence: Synthetic oligonucleotide
cccagagucaucugauguu

SEQ ID NO: 886280 - RNA, 19 nt, Artificial Sequence
  Description of Artificial Sequence: Synthetic oligonucleotide
caucacgacuuggguagau

SEQ ID NO: 886281 - RNA, 19 nt, Artificial Sequence
  Description of Artificial Sequence: Synthetic oligonucleotide
ccgugaaaguaaugauggu

SEQ ID NO: 886282 - RNA, 19 nt, Artificial Sequence
  Description of Artificial Sequence: Synthetic oligonucleotide
caagcaaauugggcacauu

SEQ ID NO: 886283 - RNA, 19 nt, Artificial Sequence
  Description of Artificial Sequence: Synthetic oligonucleotide
ggguccggccucagugauc

SEQ ID NO: 886284 - RNA, 19 nt, Artificial Sequence
  Description of Artificial Sequence: Synthetic oligonucleotide
gcauuaccugaagucuuuu

SEQ ID NO: 886285 - RNA, 19 nt, Artificial Sequence
  Description of Artificial Sequence: Synthetic oligonucleotide
gccuguaucuucagcccuu

SEQ ID NO: 886286 - RNA, 19 nt, Artificial Sequence
  Description of Artificial Sequence: Synthetic oligonucleotide
ggcugagugccugcugguu

SEQ ID NO: 886287 - RNA, 19 nt, Artificial Sequence
  Description of Artificial Sequence: Synthetic oligonucleotide
guccggccucagugaucuu

SEQ ID NO: 886288 - RNA, 19 nt, Artificial Sequence
  Description of Artificial Sequence: Synthetic oligonucleotide
auagauaaacauuuaaugc

SEQ ID NO: 886289 - RNA, 19 nt, Artificial Sequence
  Description of Artificial Sequence: Synthetic oligonucleotide
cauaguaucuauaaaaugg

SEQ ID NO: 886290 - RNA, 19 nt, Artificial Sequence
  Description of Artificial Sequence: Synthetic oligonucleotide
ucuaauaucuacuauccgg

SEQ ID NO: 886291 - RNA, 19 nt, Artificial Sequence
  Description of Artificial Sequence: Synthetic oligonucleotide
gaucauaugccguacaugg

SEQ ID NO: 886292 - RNA, 19 nt, Artificial Sequence
  Description of Artificial Sequence: Synthetic oligonucleotide
aucaacuaaacauucgugc

SEQ ID NO: 886293 - RNA, 19 nt, Artificial Sequence
  Description of Artificial Sequence: Synthetic oligonucleotide
aaugagagaucauaugccg

SEQ ID NO: 886294 - RNA, 19 nt, Artificial Sequence
  Description of Artificial Sequence: Synthetic oligonucleotide
cuuaguaugaacaguauag

SEQ ID NO: 886295 - RNA, 19 nt, Artificial Sequence
  Description of Artificial Sequence: Synthetic oligonucleotide
guaagaauccuuuucaccg

SEQ ID NO: 886296 - RNA, 19 nt, Artificial Sequence
  Description of Artificial Sequence: Synthetic oligonucleotide
aaauggaacagacauaccu

SEQ ID NO: 886297 - RNA, 19 nt, Artificial Sequence
  Description of Artificial Sequence: Synthetic oligonucleotide
uaaagcuccguccaaagcg

SEQ ID NO: 886298 - RNA, 19 nt, Artificial Sequence
  Description of Artificial Sequence: Synthetic oligonucleotide
aauaucuacuauccggugg

SEQ ID NO: 886299 - RNA, 19 nt, Artificial Sequence
  Description of Artificial Sequence: Synthetic oligonucleotide
ucuaauucaucauugucag

SEQ ID NO: 886300 - RNA, 19 nt, Artificial Sequence
  Description of Artificial Sequence: Synthetic oligonucleotide
aaaguagcuaacuguaaag

SEQ ID NO: 886301 - RNA, 19 nt, Artificial Sequence
  Description of Artificial Sequence: Synthetic oligonucleotide
cauaucauugugcagacgc

SEQ ID NO: 886302 - RNA, 19 nt, Artificial Sequence
  Description of Artificial Sequence: Synthetic oligonucleotide
uaaguaaugagacgacagg

SEQ ID NO: 886303 - RNA, 19 nt, Artificial Sequence
  Description of Artificial Sequence: Synthetic oligonucleotide
aguagcuaacuguaaagac

SEQ ID NO: 886304 - RNA, 19 nt, Artificial Sequence
  Description of Artificial Sequence: Synthetic oligonucleotide
ugucugacaaacaaacugc

SEQ ID NO: 886305 - RNA, 19 nt, Artificial Sequence
  Description of Artificial Sequence: Synthetic oligonucleotide
acuuacagacauccgaggc

SEQ ID NO: 886306 - RNA, 19 nt, Artificial Sequence
  Description of Artificial Sequence: Synthetic oligonucleotide
uguucaaccacuaaauuuu

SEQ ID NO: 886307 - RNA, 19 nt, Artificial Sequence
  Description of Artificial Sequence: Synthetic oligonucleotide
aaguauacagaugaacauc

SEQ ID NO: 886308 - RNA, 19 nt, Artificial Sequence
  Description of Artificial Sequence: Synthetic oligonucleotide
auaguguucucucaaauga

SEQ ID NO: 886309 - RNA, 19 nt, Artificial Sequence
  Description of Artificial Sequence: Synthetic oligonucleotide
aaugccgacaucuuccuca

SEQ ID NO: 886310 - RNA, 19 nt, Artificial Sequence
  Description of Artificial Sequence: Synthetic oligonucleotide
ucagugucuaaauagcuca

SEQ ID NO: 886311 - RNA, 19 nt, Artificial Sequence
  Description of Artificial Sequence: Synthetic oligonucleotide
augucugacaaacaaacug

SEQ ID NO: 886312 - RNA, 19 nt, Artificial Sequence
  Description of Artificial Sequence: Synthetic oligonucleotide
uaguuaaaguaaaagggac

SEQ ID NO: 886313 - RNA, 19 nt, Artificial Sequence
  Description of Artificial Sequence: Synthetic oligonucleotide
auuugguaaugacuguccc

SEQ ID NO: 886314 - RNA, 19 nt, Artificial Sequence
  Description of Artificial Sequence: Synthetic oligonucleotide
cuaaguaaugagacgacag

SEQ ID NO: 886315 - RNA, 19 nt, Artificial Sequence
  Description of Artificial Sequence: Synthetic oligonucleotide
uuaauaauguugaagucuu

SEQ ID NO: 886316 - RNA, 19 nt, Artificial Sequence
  Description of Artificial Sequence: Synthetic oligonucleotide
acauauuccacaaguauac

SEQ ID NO: 886317 - RNA, 19 nt, Artificial Sequence
  Description of Artificial Sequence: Synthetic oligonucleotide
aguuaaaguaaaagggacc

SEQ ID NO: 886318 - RNA, 19 nt, Artificial Sequence
  Description of Artificial Sequence: Synthetic oligonucleotide
aaugacaccgcugauaaaa

SEQ ID NO: 886319 - RNA, 19 nt, Artificial Sequence
  Description of Artificial Sequence: Synthetic oligonucleotide
auauuccacaaguauacag

SEQ ID NO: 886320 - RNA, 19 nt, Artificial Sequence
  Description of Artificial Sequence: Synthetic oligonucleotide
aaagcgacgugacacacgu

SEQ ID NO: 886321 - RNA, 19 nt, Artificial Sequence
  Description of Artificial Sequence: Synthetic oligonucleotide
ucaacuaaacauucgugca

SEQ ID NO: 886322 - RNA, 19 nt, Artificial Sequence
  Description of Artificial Sequence: Synthetic oligonucleotide
auauuuucgaugugcuugg

SEQ ID NO: 886323 - RNA, 19 nt, Artificial Sequence
  Description of Artificial Sequence: Synthetic oligonucleotide
auucgugcaguagaaagcc

SEQ ID NO: 886324 - RNA, 19 nt, Artificial Sequence
  Description of Artificial Sequence: Synthetic oligonucleotide
acauucgugcaguagaaag

SEQ ID NO: 886325 - RNA, 19 nt, Artificial Sequence
  Description of Artificial Sequence: Synthetic oligonucleotide
agaccuggcauauagucuc

SEQ ID NO: 886326 - RNA, 19 nt, Artificial Sequence
  Description of Artificial Sequence: Synthetic oligonucleotide
uauaguguucucucaaaug

SEQ ID NO: 886327 - RNA, 19 nt, Artificial Sequence
  Description of Artificial Sequence: Synthetic oligonucleotide
aaccacuaaauuuucaguu

SEQ ID NO: 886328 - RNA, 19 nt, Artificial Sequence
  Description of Artificial Sequence: Synthetic oligonucleotide
gaguagauaguuuggacac

SEQ ID NO: 886329 - RNA, 19 nt, Artificial Sequence
  Description of Artificial Sequence: Synthetic oligonucleotide
uaucaacuaaacauucgug

SEQ ID NO: 886330 - RNA, 19 nt, Artificial Sequence
  Description of Artificial Sequence: Synthetic oligonucleotide
aggaaaaguagcuaacugu

SEQ ID NO: 886331 - RNA, 19 nt, Artificial Sequence
  Description of Artificial Sequence: Synthetic oligonucleotide
acauaguaucuauaaaaug

SEQ ID NO: 886332 - RNA, 19 nt, Artificial Sequence
  Description of Artificial Sequence: Synthetic oligonucleotide
agcgacgugacacacguuc

SEQ ID NO: 886333 - RNA, 19 nt, Artificial Sequence
  Description of Artificial Sequence: Synthetic oligonucleotide
cugagcauguuccugaagc

SEQ ID NO: 886334 - RNA, 19 nt, Artificial Sequence
  Description of Artificial Sequence: Synthetic oligonucleotide
aaaagggaccuugaaaucu

SEQ ID NO: 886335 - RNA, 19 nt, Artificial Sequence
  Description of Artificial Sequence: Synthetic oligonucleotide
aaacgcugaccacaauugg

SEQ ID NO: 886336 - RNA, 19 nt, Artificial Sequence
  Description of Artificial Sequence: Synthetic oligonucleotide
aggaaugucuguuagugca

SEQ ID NO: 886337 - RNA, 19 nt, Artificial Sequence
  Description of Artificial Sequence: Synthetic oligonucleotide
uagcuaacuguaaagacuc

SEQ ID NO: 886338 - RNA, 19 nt, Artificial Sequence
  Description of Artificial Sequence: Synthetic oligonucleotide
uaggcagcuagacauaugu

SEQ ID NO: 886339 - RNA, 19 nt, Artificial Sequence
  Description of Artificial Sequence: Synthetic oligonucleotide
uguaaagacucuucaucag

SEQ ID NO: 886340 - RNA, 19 nt, Artificial Sequence
  Description of Artificial Sequence: Synthetic oligonucleotide
ucuacuauccggugguaag

SEQ ID NO: 886341 - RNA, 19 nt, Artificial Sequence
  Description of Artificial Sequence: Synthetic oligonucleotide
uacuuaagguccuaaacaa

SEQ ID NO: 886342 - RNA, 19 nt, Artificial Sequence
  Description of Artificial Sequence: Synthetic oligonucleotide
caaaugcuuggcauuauag

SEQ ID NO: 886343 - RNA, 19 nt, Artificial Sequence
  Description of Artificial Sequence: Synthetic oligonucleotide
acaaguauacagaugaaca

SEQ ID NO: 886344 - RNA, 19 nt, Artificial Sequence
  Description of Artificial Sequence: Synthetic oligonucleotide
uucguugccguuucuagcc

SEQ ID NO: 886345 - RNA, 19 nt, Artificial Sequence
  Description of Artificial Sequence: Synthetic oligonucleotide
ucauaugccguacaugguc

SEQ ID NO: 886346 - RNA, 19 nt, Artificial Sequence
  Description of Artificial Sequence: Synthetic oligonucleotide
auaguuaaaguaaaaggga

SEQ ID NO: 886347 - RNA, 19 nt, Artificial Sequence
  Description of Artificial Sequence: Synthetic oligonucleotide
aaguaaugagacgacaggu

SEQ ID NO: 886348 - RNA, 19 nt, Artificial Sequence
  Description of Artificial Sequence: Synthetic oligonucleotide
aagaauccuuuucaccgag

SEQ ID NO: 886349 - RNA, 19 nt, Artificial Sequence
  Description of Artificial Sequence: Synthetic oligonucleotide
uuggcuaaguaaugagacg

SEQ ID NO: 886350 - RNA, 19 nt, Artificial Sequence
  Description of Artificial Sequence: Synthetic oligonucleotide
uaaugccuaaaauauacuu

SEQ ID NO: 886351 - RNA, 19 nt, Artificial Sequence
  Description of Artificial Sequence: Synthetic oligonucleotide
agauaguuuggacacagaa

SEQ ID NO: 886352 - RNA, 19 nt, Artificial Sequence
  Description of Artificial Sequence: Synthetic oligonucleotide
auaucuacuauccgguggu

SEQ ID NO: 886353 - RNA, 19 nt, Artificial Sequence
  Description of Artificial Sequence: Synthetic oligonucleotide
aaugagacgacagguccuc

SEQ ID NO: 886354 - RNA, 19 nt, Artificial Sequence
  Description of Artificial Sequence: Synthetic oligonucleotide
uggcauuauagugugaucu

SEQ ID NO: 886355 - RNA, 19 nt, Artificial Sequence
  Description of Artificial Sequence: Synthetic oligonucleotide
uuaaacauauccuggucua

SEQ ID NO: 886356 - RNA, 19 nt, Artificial Sequence
  Description of Artificial Sequence: Synthetic oligonucleotide
gacauccgaggcuuuaggg

SEQ ID NO: 886357 - RNA, 19 nt, Artificial Sequence
  Description of Artificial Sequence: Synthetic oligonucleotide
uugugcgggguauucaccg

SEQ ID NO: 886358 - RNA, 19 nt, Artificial Sequence
  Description of Artificial Sequence: Synthetic oligonucleotide
cauucgugcaguagaaagc

SEQ ID NO: 886359 - RNA, 19 nt, Artificial Sequence
  Description of Artificial Sequence: Synthetic oligonucleotide
uggcuaaguaaugagacga

SEQ ID NO: 886360 - RNA, 19 nt, Artificial Sequence
  Description of Artificial Sequence: Synthetic oligonucleotide
uguucugccuaucaacuaa

SEQ ID NO: 886361 - RNA, 19 nt, Artificial Sequence
  Description of Artificial Sequence: Synthetic oligonucleotide
acucguugcagucuuuauc

SEQ ID NO: 886362 - RNA, 19 nt, Artificial Sequence
  Description of Artificial Sequence: Synthetic oligonucleotide
ugcgcagauauuuucgaug

SEQ ID NO: 886363 - RNA, 19 nt, Artificial Sequence
  Description of Artificial Sequence: Synthetic oligonucleotide
uaaugacugucccugaaau

SEQ ID NO: 886364 - RNA, 19 nt, Artificial Sequence
  Description of Artificial Sequence: Synthetic oligonucleotide
ggcacucuuaaacauaucc

SEQ ID NO: 886365 - RNA, 19 nt, Artificial Sequence
  Description of Artificial Sequence: Synthetic oligonucleotide
cuaacuguaaagacucuuc

SEQ ID NO: 886366 - RNA, 19 nt, Artificial Sequence
  Description of Artificial Sequence: Synthetic oligonucleotide
uugucaguggacucguugc

SEQ ID NO: 886367 - RNA, 19 nt, Artificial Sequence
  Description of Artificial Sequence: Synthetic oligonucleotide
aacgcugaccacaauuggg

SEQ ID NO: 886368 - RNA, 19 nt, Artificial Sequence
  Description of Artificial Sequence: Synthetic oligonucleotide
uauucaccguugaacuggg

SEQ ID NO: 886369 - RNA, 19 nt, Artificial Sequence
  Description of Artificial Sequence: Synthetic oligonucleotide
gauaguuuggacacagaac

SEQ ID NO: 886370 - RNA, 19 nt, Artificial Sequence
  Description of Artificial Sequence: Synthetic oligonucleotide
ugguaggaaugucuguuag

SEQ ID NO: 886371 - RNA, 19 nt, Artificial Sequence
  Description of Artificial Sequence: Synthetic oligonucleotide
agauaaacauuuaaugccu

SEQ ID NO: 886372 - RNA, 19 nt, Artificial Sequence
  Description of Artificial Sequence: Synthetic oligonucleotide
cuugacaaguauuugucca

SEQ ID NO: 886373 - RNA, 19 nt, Artificial Sequence
  Description of Artificial Sequence: Synthetic oligonucleotide
auugucaguggacucguug

SEQ ID NO: 886374 - RNA, 19 nt, Artificial Sequence
  Description of Artificial Sequence: Synthetic oligonucleotide
uggcauauagucucaccag

SEQ ID NO: 886375 - RNA, 19 nt, Artificial Sequence
  Description of Artificial Sequence: Synthetic oligonucleotide
aggcagaauguuuaaauaa

SEQ ID NO: 886376 - RNA, 19 nt, Artificial Sequence
  Description of Artificial Sequence: Synthetic oligonucleotide
  modified_base (12)..(12): a, c, u, g, unknown or other
ucugucugugcngaaaaug

SEQ ID NO: 886377 - RNA, 19 nt, Artificial Sequence
  Description of Artificial Sequence: Synthetic oligonucleotide
  modified_base (19)..(19): a, c, u, g, unknown or other
guauuugucugucugugcn

SEQ ID NO: 886378 - RNA, 19 nt, Artificial Sequence
  Description of Artificial Sequence: Synthetic oligonucleotide
caguggucgaagcugaacc

SEQ ID NO: 886379 - RNA, 19 nt, Artificial Sequence
  Description of Artificial Sequence: Synthetic oligonucleotide
ucuagcaacaccaccgguu

SEQ ID NO: 886380 - RNA, 19 nt, Artificial Sequence
  Description of Artificial Sequence: Synthetic oligonucleotide
ucauugugcagacgcaacu

SEQ ID NO: 886381 - RNA, 19 nt, Artificial Sequence
  Description of Artificial Sequence: Synthetic oligonucleotide
cuguaaagacucuucauca

SEQ ID NO: 886382 - RNA, 19 nt, Artificial Sequence
  Description of Artificial Sequence: Synthetic oligonucleotide
aaauagcucauauccuuuu

SEQ ID NO: 886383 - RNA, 19 nt, Artificial Sequence
  Description of Artificial Sequence: Synthetic oligonucleotide
uuaaacuuugcuccacaua

SEQ ID NO: 886384 - RNA, 19 nt, Artificial Sequence
  Description of Artificial Sequence: Synthetic oligonucleotide
cuguuuauuugguaaugac

SEQ ID NO: 886385 - RNA, 19 nt, Artificial Sequence
  Description of Artificial Sequence: Synthetic oligonucleotide
uaagaauccuuuucaccga

SEQ ID NO: 886386 - RNA, 19 nt, Artificial Sequence
  Description of Artificial Sequence: Synthetic oligonucleotide
ugcuuggcuaaguaaugag

SEQ ID NO: 886387 - RNA, 19 nt, Artificial Sequence
  Description of Artificial Sequence: Synthetic oligonucleotide
agacauaccuggccaugcc

SEQ ID NO: 886388 - RNA, 19 nt, Artificial Sequence
  Description of Artificial Sequence: Synthetic oligonucleotide
guagauaguuuggacacag

SEQ ID NO: 886389 - RNA, 19 nt, Artificial Sequence
  Description of Artificial Sequence: Synthetic oligonucleotide
uauugugcgggguauucac

SEQ ID NO: 886390 - RNA, 19 nt, Artificial Sequence
  Description of Artificial Sequence: Synthetic oligonucleotide
uaauaucuacuauccggug

SEQ ID NO: 886391 - RNA, 19 nt, Artificial Sequence
  Description of Artificial Sequence: Synthetic oligonucleotide
gaauaucugaaagcagacc

SEQ ID NO: 886392 - RNA, 19 nt, Artificial Sequence
  Description of Artificial Sequence: Synthetic oligonucleotide
uaucacagguaaagcuccg

SEQ ID NO: 886393 - RNA, 19 nt, Artificial Sequence
  Description of Artificial Sequence: Synthetic oligonucleotide
ucaugcuuuccaaaccacu

SEQ ID NO: 886394 - RNA, 19 nt, Artificial Sequence
  Description of Artificial Sequence: Synthetic oligonucleotide
acugccgcuacucuuaaaa

SEQ ID NO: 886395 - RNA, 19 nt, Artificial Sequence
  Description of Artificial Sequence: Synthetic oligonucleotide
uuaccacaugcgcagauau

SEQ ID NO: 886396 - RNA, 19 nt, Artificial Sequence
  Description of Artificial Sequence: Synthetic oligonucleotide
acaagaugcauugucggug

SEQ ID NO: 886397 - RNA, 19 nt, Artificial Sequence
  Description of Artificial Sequence: Synthetic oligonucleotide
uaaugagacgacagguccu

SEQ ID NO: 886398 - RNA, 19 nt, Artificial Sequence
  Description of Artificial Sequence: Synthetic oligonucleotide
uaaauagcucauauccuuu

SEQ ID NO: 886399 - RNA, 19 nt, Artificial Sequence
  Description of Artificial Sequence: Synthetic oligonucleotide
ugagagaucauaugccgua

SEQ ID NO: 886400 - RNA, 19 nt, Artificial Sequence
  Description of Artificial Sequence: Synthetic oligonucleotide
ucucucaaaugacaccgcu

SEQ ID NO: 886401 - RNA, 19 nt, Artificial Sequence
  Description of Artificial Sequence: Synthetic oligonucleotide
auaaacauuuaaugccuaa

SEQ ID NO: 886402 - RNA, 19 nt, Artificial Sequence
  Description of Artificial Sequence: Synthetic oligonucleotide
gaaugucuguuagugcagg

SEQ ID NO: 886403 - RNA, 19 nt, Artificial Sequence
  Description of Artificial Sequence: Synthetic oligonucleotide
ugucuaaauagcucauauc

SEQ ID NO: 886404 - RNA, 19 nt, Artificial Sequence
  Description of Artificial Sequence: Synthetic oligonucleotide
uccaacuguucauuauuug

SEQ ID NO: 886405 - RNA, 19 nt, Artificial Sequence
  Description of Artificial Sequence: Synthetic oligonucleotide
  modified_base (8)..(8): a, c, u, g, unknown or other
ucugugcngaaaauguuuu

SEQ ID NO: 886406 - RNA, 19 nt, Artificial Sequence
  Description of Artificial Sequence: Synthetic oligonucleotide
ugccuaucaacuaaacauu

SEQ ID NO: 886407 - RNA, 19 nt, Artificial Sequence
  Description of Artificial Sequence: Synthetic oligonucleotide
cuagcaacaccaccgguug

SEQ ID NO: 886408 - RNA, 19 nt, Artificial Sequence
  Description of Artificial Sequence: Synthetic oligonucleotide
caccgaaaaggacaggcag

SEQ ID NO: 886409 - RNA, 19 nt, Artificial Sequence
  Description of Artificial Sequence: Synthetic oligonucleotide
cacaaguauacagaugaac

SEQ ID NO: 886410 - RNA, 19 nt, Artificial Sequence
  Description of Artificial Sequence: Synthetic oligonucleotide
ggaguagauaguuuggaca

SEQ ID NO: 886411 - RNA, 19 nt, Artificial Sequence
  Description of Artificial Sequence: Synthetic oligonucleotide
auacuguuuauuugguaau

SEQ ID NO: 886412 - RNA, 19 nt, Artificial Sequence
  Description of Artificial Sequence: Synthetic oligonucleotide
uacuguuuauuugguaaug

SEQ ID NO: 886413 - RNA, 19 nt, Artificial Sequence
  Description of Artificial Sequence: Synthetic oligonucleotide
uguucauuauuugggaaua

SEQ ID NO: 886414 - RNA, 19 nt, Artificial Sequence
  Description of Artificial Sequence: Synthetic oligonucleotide
cacauuuaccacaugcgca

SEQ ID NO: 886415 - RNA, 19 nt, Artificial Sequence
  Description of Artificial Sequence: Synthetic oligonucleotide
gacacacguucuuuuggag

SEQ ID NO: 886416 - RNA, 19 nt, Artificial Sequence
  Description of Artificial Sequence: Synthetic oligonucleotide
acacuuacagacauccgag

SEQ ID NO: 886417 - RNA, 19 nt, Artificial Sequence
  Description of Artificial Sequence: Synthetic oligonucleotide
cuaauaucuacuauccggu

SEQ ID NO: 886418 - RNA, 19 nt, Artificial Sequence
  Description of Artificial Sequence: Synthetic oligonucleotide
agcauuuccuagcccguuc

SEQ ID NO: 886419 - RNA, 19 nt, Artificial Sequence
  Description of Artificial Sequence: Synthetic oligonucleotide
cuggauuggacugcuauug

SEQ ID NO: 886420 - RNA, 19 nt, Artificial Sequence
  Description of Artificial Sequence: Synthetic oligonucleotide
cuucuuaugaaaucagugu

SEQ ID NO: 886421 - RNA, 19 nt, Artificial Sequence
  Description of Artificial Sequence: Synthetic oligonucleotide
cacacuuacagacauccga

SEQ ID NO: 886422 - RNA, 19 nt, Artificial Sequence
  Description of Artificial Sequence: Synthetic oligonucleotide
acacacguucuuuuggagu

SEQ ID NO: 886423 - RNA, 19 nt, Artificial Sequence
  Description of Artificial Sequence: Synthetic oligonucleotide
ucaaaugacaccgcugaua

SEQ ID NO: 886424 - RNA, 19 nt, Artificial Sequence
  Description of Artificial Sequence: Synthetic oligonucleotide
uccucaacauaguaucuau

SEQ ID NO: 886425 - RNA, 19 nt, Artificial Sequence
  Description of Artificial Sequence: Synthetic oligonucleotide
uccuggauuggacugcuau

SEQ ID NO: 886426 - RNA, 19 nt, Artificial Sequence
  Description of Artificial Sequence: Synthetic oligonucleotide
cuucguugccguuucuagc

SEQ ID NO: 886427 - RNA, 19 nt, Artificial Sequence
  Description of Artificial Sequence: Synthetic oligonucleotide
cacuuacagacauccgagg

SEQ ID NO: 886428 - RNA, 19 nt, Artificial Sequence
  Description of Artificial Sequence: Synthetic oligonucleotide
cuggcauauagucucacca

SEQ ID NO: 886429 - RNA, 19 nt, Artificial Sequence
  Description of Artificial Sequence: Synthetic oligonucleotide
agcuagacauauguucaac

SEQ ID NO: 886430 - RNA, 19 nt, Artificial Sequence
  Description of Artificial Sequence: Synthetic oligonucleotide
guaaagcuccguccaaagc

SEQ ID NO: 886431 - RNA, 19 nt, Artificial Sequence
  Description of Artificial Sequence: Synthetic oligonucleotide
gaccacaauugggacaccg

SEQ ID NO: 886432 - RNA, 19 nt, Artificial Sequence
  Description of Artificial Sequence: Synthetic oligonucleotide
gcuagacauauguucaacc

SEQ ID NO: 886433 - RNA, 19 nt, Artificial Sequence
  Description of Artificial Sequence: Synthetic oligonucleotide
acuguuuauuugguaauga

SEQ ID NO: 886434 - RNA, 19 nt, Artificial Sequence
  Description of Artificial Sequence: Synthetic oligonucleotide
accgagcucagcuuugaug

SEQ ID NO: 886435 - RNA, 19 nt, Artificial Sequence
  Description of Artificial Sequence: Synthetic oligonucleotide
gcagauauuuucgaugugc

SEQ ID NO: 886436 - RNA, 19 nt, Artificial Sequence
  Description of Artificial Sequence: Synthetic oligonucleotide
uuucuagccacugugucuu

SEQ ID NO: 886437 - RNA, 19 nt, Artificial Sequence
  Description of Artificial Sequence: Synthetic oligonucleotide
aaagcuccguccaaagcga

SEQ ID NO: 886438 - RNA, 19 nt, Artificial Sequence
  Description of Artificial Sequence: Synthetic oligonucleotide
augucuguuagugcagguc

SEQ ID NO: 886439 - RNA, 19 nt, Artificial Sequence
  Description of Artificial Sequence: Synthetic oligonucleotide
uucucucaaaugacaccgc

SEQ ID NO: 886440 - RNA, 19 nt, Artificial Sequence
  Description of Artificial Sequence: Synthetic oligonucleotide
acauauccuggucuaggca

SEQ ID NO: 886441 - RNA, 19 nt, Artificial Sequence
  Description of Artificial Sequence: Synthetic oligonucleotide
cucucaaaugacaccgcug

SEQ ID NO: 886442 - RNA, 19 nt, Artificial Sequence
  Description of Artificial Sequence: Synthetic oligonucleotide
caaagcgacgugacacacg

SEQ ID NO: 886443 - RNA, 19 nt, Artificial Sequence
  Description of Artificial Sequence: Synthetic oligonucleotide
ggcauauagucucaccagc

SEQ ID NO: 886444 - RNA, 19 nt, Artificial Sequence
  Description of Artificial Sequence: Synthetic oligonucleotide
acuauccggugguaagcuc

SEQ ID NO: 886445 - RNA, 19 nt, Artificial Sequence
  Description of Artificial Sequence: Synthetic oligonucleotide
ugcuauuguuaggaggucu

SEQ ID NO: 886446 - RNA, 19 nt, Artificial Sequence
  Description of Artificial Sequence: Synthetic oligonucleotide
acuaaauuuucaguuucaa

SEQ ID NO: 886447 - RNA, 19 nt, Artificial Sequence
  Description of Artificial Sequence: Synthetic oligonucleotide
uuaggaggucucaugcuuu

SEQ ID NO: 886448 - RNA, 19 nt, Artificial Sequence
  Description of Artificial Sequence: Synthetic oligonucleotide
uggauuggacugcuauugu

SEQ ID NO: 886449 - RNA, 19 nt, Artificial Sequence
  Description of Artificial Sequence: Synthetic oligonucleotide
auugugcgggguauucacc

SEQ ID NO: 886450 - RNA, 19 nt, Artificial Sequence
  Description of Artificial Sequence: Synthetic oligonucleotide
uuucaccgagcucagcuuu

SEQ ID NO: 886451 - RNA, 19 nt, Artificial Sequence
  Description of Artificial Sequence: Synthetic oligonucleotide
cauaugccguacaugguca

SEQ ID NO: 886452 - RNA, 19 nt, Artificial Sequence
  Description of Artificial Sequence: Synthetic oligonucleotide
agcagauaaaugagagauc

SEQ ID NO: 886453 - RNA, 19 nt, Artificial Sequence
  Description of Artificial Sequence: Synthetic oligonucleotide
uucggaaguugccuugauc

SEQ ID NO: 886454 - RNA, 19 nt, Artificial Sequence
  Description of Artificial Sequence: Synthetic oligonucleotide
gauuggacugcuauuguua

SEQ ID NO: 886455 - RNA, 19 nt, Artificial Sequence
  Description of Artificial Sequence: Synthetic oligonucleotide
caccgguuggcuucguugc

SEQ ID NO: 886456 - RNA, 19 nt, Artificial Sequence
  Description of Artificial Sequence: Synthetic oligonucleotide
uucgugcaguagaaagccc

SEQ ID NO: 886457 - RNA, 19 nt, Artificial Sequence
  Description of Artificial Sequence: Synthetic oligonucleotide
cacaugcgcagauauuuuc

SEQ ID NO: 886458 - RNA, 19 nt, Artificial Sequence
  Description of Artificial Sequence: Synthetic oligonucleotide
uucugccuaucaacuaaac

SEQ ID NO: 886459 - RNA, 19 nt, Artificial Sequence
  Description of Artificial Sequence: Synthetic oligonucleotide
ugagacgacagguccuccu

SEQ ID NO: 886460 - RNA, 19 nt, Artificial Sequence
  Description of Artificial Sequence: Synthetic oligonucleotide
cuacuauccggugguaagc

SEQ ID NO: 886461 - RNA, 19 nt, Artificial Sequence
  Description of Artificial Sequence: Synthetic oligonucleotide
agaauccuuuucaccgagc

SEQ ID NO: 886462 - RNA, 19 nt, Artificial Sequence
  Description of Artificial Sequence: Synthetic oligonucleotide
uuuucgucugugaucucuu

SEQ ID NO: 886463 - RNA, 19 nt, Artificial Sequence
  Description of Artificial Sequence: Synthetic oligonucleotide
uucaccgagcucagcuuug

SEQ ID NO: 886464 - RNA, 19 nt, Artificial Sequence
  Description of Artificial Sequence: Synthetic oligonucleotide
accgguuggcuucguugcc

SEQ ID NO: 886465 - RNA, 19 nt, Artificial Sequence
  Description of Artificial Sequence: Synthetic oligonucleotide
guagcuaacuguaaagacu

SEQ ID NO: 886466 - RNA, 19 nt, Artificial Sequence
  Description of Artificial Sequence: Synthetic oligonucleotide
ucguugcagucuuuaucag

SEQ ID NO: 886467 - RNA, 19 nt, Artificial Sequence
  Description of Artificial Sequence: Synthetic oligonucleotide
augcuuggcauuauagugu

SEQ ID NO: 886468 - RNA, 19 nt, Artificial Sequence
  Description of Artificial Sequence: Synthetic oligonucleotide
ucgaacagcggcucaggaa

SEQ ID NO: 886469 - RNA, 19 nt, Artificial Sequence
  Description of Artificial Sequence: Synthetic oligonucleotide
aggguuuuccuaccacucu

SEQ ID NO: 886470 - RNA, 19 nt, Artificial Sequence
  Description of Artificial Sequence: Synthetic oligonucleotide
aacagcggcucaggaaaag

SEQ ID NO: 886471 - RNA, 19 nt, Artificial Sequence
  Description of Artificial Sequence: Synthetic oligonucleotide
cugcuuuuccuuaguauga

SEQ ID NO: 886472 - RNA, 19 nt, Artificial Sequence
  Description of Artificial Sequence: Synthetic oligonucleotide
ugacaccgcugauaaaauc

SEQ ID NO: 886473 - RNA, 19 nt, Artificial Sequence
  Description of Artificial Sequence: Synthetic oligonucleotide
ugcgggguauucaccguug

SEQ ID NO: 886474 - RNA, 19 nt, Artificial Sequence
  Description of Artificial Sequence: Synthetic oligonucleotide
agcggcucaggaaaaguag

SEQ ID NO: 886475 - RNA, 19 nt, Artificial Sequence
  Description of Artificial Sequence: Synthetic oligonucleotide
cacuaaauuuucaguuuca

SEQ ID NO: 886476 - RNA, 19 nt, Artificial Sequence
  Description of Artificial Sequence: Synthetic oligonucleotide
uuuucaccgagcucagcuu

SEQ ID NO: 886477 - RNA, 19 nt, Artificial Sequence
  Description of Artificial Sequence: Synthetic oligonucleotide
uacuauccggugguaagcu

SEQ ID NO: 886478 - RNA, 19 nt, Artificial Sequence
  Description of Artificial Sequence: Synthetic oligonucleotide
uucgaugugcuuggcuaag

SEQ ID NO: 886479 - RNA, 19 nt, Artificial Sequence
  Description of Artificial Sequence: Synthetic oligonucleotide
uuggcauuauagugugauc

SEQ ID NO: 886480 - RNA, 19 nt, Artificial Sequence
  Description of Artificial Sequence: Synthetic oligonucleotide
ucgucagauccugagguuc

SEQ ID NO: 886481 - RNA, 19 nt, Artificial Sequence
  Description of Artificial Sequence: Synthetic oligonucleotide
gguauucaccguugaacug

SEQ ID NO: 886482 - RNA, 19 nt, Artificial Sequence
  Description of Artificial Sequence: Synthetic oligonucleotide
ucuaggcagcuagacauau

SEQ ID NO: 886483 - RNA, 19 nt, Artificial Sequence
  Description of Artificial Sequence: Synthetic oligonucleotide
uuggcuucguugccguuuc

SEQ ID NO: 886484 - RNA, 19 nt, Artificial Sequence
  Description of Artificial Sequence: Synthetic oligonucleotide
acaucgaacagcggcucag

SEQ ID NO: 886485 - RNA, 19 nt, Artificial Sequence
  Description of Artificial Sequence: Synthetic oligonucleotide
ccuugacaaguauuugucc

SEQ ID NO: 886486 - RNA, 19 nt, Artificial Sequence
  Description of Artificial Sequence: Synthetic oligonucleotide
aaagggaccuugaaaucuu

SEQ ID NO: 886487 - RNA, 19 nt, Artificial Sequence
  Description of Artificial Sequence: Synthetic oligonucleotide
agcacauguucaucuagua

SEQ ID NO: 886488 - RNA, 19 nt, Artificial Sequence
  Description of Artificial Sequence: Synthetic oligonucleotide
gaggcuuuaggguuuuccu

SEQ ID NO: 886489 - RNA, 19 nt, Artificial Sequence
  Description of Artificial Sequence: Synthetic oligonucleotide
gcuucguugccguuucuag

SEQ ID NO: 886490 - RNA, 19 nt, Artificial Sequence
  Description of Artificial Sequence: Synthetic oligonucleotide
uugucgguguccuccugga

SEQ ID NO: 886491 - RNA, 19 nt, Artificial Sequence
  Description of Artificial Sequence: Synthetic oligonucleotide
caaguauacagaugaacau

SEQ ID NO: 886492 - RNA, 19 nt, Artificial Sequence
  Description of Artificial Sequence: Synthetic oligonucleotide
aacauucgugcaguagaaa

SEQ ID NO: 886493 - RNA, 19 nt, Artificial Sequence
  Description of Artificial Sequence: Synthetic oligonucleotide
ugacugucccugaaaucau

SEQ ID NO: 886494 - RNA, 19 nt, Artificial Sequence
  Description of Artificial Sequence: Synthetic oligonucleotide
acacaucgaacagcggcuc

SEQ ID NO: 886495 - RNA, 19 nt, Artificial Sequence
  Description of Artificial Sequence: Synthetic oligonucleotide
uccuagcccguucaucguc

SEQ ID NO: 886496 - RNA, 19 nt, Artificial Sequence
  Description of Artificial Sequence: Synthetic oligonucleotide
agcccguucaucgucagau

SEQ ID NO: 886497 - RNA, 19 nt, Artificial Sequence
  Description of Artificial Sequence: Synthetic oligonucleotide
ccacuaaauuuucaguuuc

SEQ ID NO: 886498 - RNA, 19 nt, Artificial Sequence
  Description of Artificial Sequence: Synthetic oligonucleotide
ugguaaugacugucccuga

SEQ ID NO: 886499 - RNA, 19 nt, Artificial Sequence
  Description of Artificial Sequence: Synthetic oligonucleotide
ugcuugcaguggucgaagc

SEQ ID NO: 886500 - RNA, 19 nt, Artificial Sequence
  Description of Artificial Sequence: Synthetic oligonucleotide
guuucuagccacugugucu

SEQ ID NO: 886501 - RNA, 19 nt, Artificial Sequence
  Description of Artificial Sequence: Synthetic oligonucleotide
uagugugaucucauaucuu

SEQ ID NO: 886502 - RNA, 19 nt, Artificial Sequence
  Description of Artificial Sequence: Synthetic oligonucleotide
caguuucaaaacgcugacc

SEQ ID NO: 886503 - RNA, 19 nt, Artificial Sequence
  Description of Artificial Sequence: Synthetic oligonucleotide
ugggcucuagcaacaccac

SEQ ID NO: 886504 - RNA, 19 nt, Artificial Sequence
  Description of Artificial Sequence: Synthetic oligonucleotide
gccgacaucuuccucaaca

SEQ ID NO: 886505 - RNA, 19 nt, Artificial Sequence
  Description of Artificial Sequence: Synthetic oligonucleotide
aggcuuuaggguuuuccua

SEQ ID NO: 886506 - RNA, 19 nt, Artificial Sequence
  Description of Artificial Sequence: Synthetic oligonucleotide
aagcuccguccaaagcgac

SEQ ID NO: 886507 - RNA, 19 nt, Artificial Sequence
  Description of Artificial Sequence: Synthetic oligonucleotide
aggacaggcagaauguuua

SEQ ID NO: 886508 - RNA, 19 nt, Artificial Sequence
  Description of Artificial Sequence: Synthetic oligonucleotide
ggugguaagcucuugcugu

SEQ ID NO: 886509 - RNA, 19 nt, Artificial Sequence
  Description of Artificial Sequence: Synthetic oligonucleotide
cuuacagacauccgaggcu

SEQ ID NO: 886510 - RNA, 19 nt, Artificial Sequence
  Description of Artificial Sequence: Synthetic oligonucleotide
acgcugaccacaauuggga

SEQ ID NO: 886511 - RNA, 19 nt, Artificial Sequence
  Description of Artificial Sequence: Synthetic oligonucleotide
aguagauaguuuggacaca

SEQ ID NO: 886512 - RNA, 19 nt, Artificial Sequence
  Description of Artificial Sequence: Synthetic oligonucleotide
acagacauaccuggccaug

SEQ ID NO: 886513 - RNA, 19 nt, Artificial Sequence
  Description of Artificial Sequence: Synthetic oligonucleotide
gcucacaagaugcauuguc

SEQ ID NO: 886514 - RNA, 19 nt, Artificial Sequence
  Description of Artificial Sequence: Synthetic oligonucleotide
caucgucagauccugaggu

SEQ ID NO: 886515 - RNA, 19 nt, Artificial Sequence
  Description of Artificial Sequence: Synthetic oligonucleotide
ucguugccguuucuagcca

SEQ ID NO: 886516 - RNA, 19 nt, Artificial Sequence
  Description of Artificial Sequence: Synthetic oligonucleotide
ucucuauugugcgggguau

SEQ ID NO: 886517 - RNA, 19 nt, Artificial Sequence
  Description of Artificial Sequence: Synthetic oligonucleotide
ggcauuauagugugaucuc

SEQ ID NO: 886518 - RNA, 19 nt, Artificial Sequence
  Description of Artificial Sequence: Synthetic oligonucleotide
gauggcacucuuaaacaua

SEQ ID NO: 886519 - RNA, 19 nt, Artificial Sequence
  Description of Artificial Sequence: Synthetic oligonucleotide
uauuuucgaugugcuuggc

SEQ ID NO: 886520 - RNA, 19 nt, Artificial Sequence
  Description of Artificial Sequence: Synthetic oligonucleotide
acuaaacauucgugcagua

SEQ ID NO: 886521 - RNA, 19 nt, Artificial Sequence
  Description of Artificial Sequence: Synthetic oligonucleotide
gcagcuagacauauguuca

SEQ ID NO: 886522 - RNA, 19 nt, Artificial Sequence
  Description of Artificial Sequence: Synthetic oligonucleotide
aucagcgccuggcuggcgu

SEQ ID NO: 886523 - RNA, 19 nt, Artificial Sequence
  Description of Artificial Sequence: Synthetic oligonucleotide
augagacgacagguccucc

SEQ ID NO: 886524 - RNA, 19 nt, Artificial Sequence
  Description of Artificial Sequence: Synthetic oligonucleotide
cuaggcagcuagacauaug

SEQ ID NO: 886525 - RNA, 19 nt, Artificial Sequence
  Description of Artificial Sequence: Synthetic oligonucleotide
guauaguguucucucaaau

SEQ ID NO: 886526 - RNA, 19 nt, Artificial Sequence
  Description of Artificial Sequence: Synthetic oligonucleotide
ugcccuugacaaguauuug

SEQ ID NO: 886527 - RNA, 19 nt, Artificial Sequence
  Description of Artificial Sequence: Synthetic oligonucleotide
acuuaagguccuaaacaaa

SEQ ID NO: 886528 - RNA, 19 nt, Artificial Sequence
  Description of Artificial Sequence: Synthetic oligonucleotide
ugccguuucuagccacugu

SEQ ID NO: 886529 - RNA, 19 nt, Artificial Sequence
  Description of Artificial Sequence: Synthetic oligonucleotide
caucgaacagcggcucagg

SEQ ID NO: 886530 - RNA, 19 nt, Artificial Sequence
  Description of Artificial Sequence: Synthetic oligonucleotide
cuauccggugguaagcucu

SEQ ID NO: 886531 - RNA, 19 nt, Artificial Sequence
  Description of Artificial Sequence: Synthetic oligonucleotide
gggacaccgaaaaggacag

SEQ ID NO: 886532 - RNA, 19 nt, Artificial Sequence
  Description of Artificial Sequence: Synthetic oligonucleotide
ugugcgggguauucaccgu

SEQ ID NO: 886533 - RNA, 19 nt, Artificial Sequence
  Description of Artificial Sequence: Synthetic oligonucleotide
uaaugccgacaucuuccuc

SEQ ID NO: 886534 - RNA, 19 nt, Artificial Sequence
  Description of Artificial Sequence: Synthetic oligonucleotide
uuucggaaguugccuugau

SEQ ID NO: 886535 - RNA, 19 nt, Artificial Sequence
  Description of Artificial Sequence: Synthetic oligonucleotide
gccuugaucacaaauggaa

SEQ ID NO: 886536 - RNA, 19 nt, Artificial Sequence
  Description of Artificial Sequence: Synthetic oligonucleotide
acaccgcugauaaaauccu

SEQ ID NO: 886537 - RNA, 19 nt, Artificial Sequence
  Description of Artificial Sequence: Synthetic oligonucleotide
uugcuaucuuuuccaucuc

SEQ ID NO: 886538 - RNA, 19 nt, Artificial Sequence
  Description of Artificial Sequence: Synthetic oligonucleotide
ggaaugucuguuagugcag

SEQ ID NO: 886539 - RNA, 19 nt, Artificial Sequence
  Description of Artificial Sequence: Synthetic oligonucleotide
aguggacucguugcagucu

SEQ ID NO: 886540 - RNA, 19 nt, Artificial Sequence
  Description of Artificial Sequence: Synthetic oligonucleotide
auaugccguacauggucau

SEQ ID NO: 886541 - RNA, 19 nt, Artificial Sequence
  Description of Artificial Sequence: Synthetic oligonucleotide
uauccggugguaagcucuu

SEQ ID NO: 886542 - RNA, 19 nt, Artificial Sequence
  Description of Artificial Sequence: Synthetic oligonucleotide
uuccuagcccguucaucgu

SEQ ID NO: 886543 - RNA, 19 nt, Artificial Sequence
  Description of Artificial Sequence: Synthetic oligonucleotide
agugucuaaauagcucaua

SEQ ID NO: 886544 - RNA, 19 nt, Artificial Sequence
  Description of Artificial Sequence: Synthetic oligonucleotide
gcuuuaggguuuuccuacc

SEQ ID NO: 886545 - RNA, 19 nt, Artificial Sequence
  Description of Artificial Sequence: Synthetic oligonucleotide
accuggcauauagucucac

SEQ ID NO: 886546 - RNA, 19 nt, Artificial Sequence
  Description of Artificial Sequence: Synthetic oligonucleotide
aucuacuauccggugguaa

SEQ ID NO: 886547 - RNA, 19 nt, Artificial Sequence
  Description of Artificial Sequence: Synthetic oligonucleotide
acaccgaaaaggacaggca

SEQ ID NO: 886548 - RNA, 19 nt, Artificial Sequence
  Description of Artificial Sequence: Synthetic oligonucleotide
cuagcccguucaucgucag

SEQ ID NO: 886549 - RNA, 19 nt, Artificial Sequence
  Description of Artificial Sequence: Synthetic oligonucleotide
uuucgucugugaucucuuu

SEQ ID NO: 886550 - RNA, 19 nt, Artificial Sequence
  Description of Artificial Sequence: Synthetic oligonucleotide
aucgucagauccugagguu

SEQ ID NO: 886551 - RNA, 19 nt, Artificial Sequence
  Description of Artificial Sequence: Synthetic oligonucleotide
caagaugcauugucggugu

SEQ ID NO: 886552 - RNA, 19 nt, Artificial Sequence
  Description of Artificial Sequence: Synthetic oligonucleotide
gcucauauccuuuugcuuu

SEQ ID NO: 886553 - RNA, 19 nt, Artificial Sequence
  Description of Artificial Sequence: Synthetic oligonucleotide
acagcggcucaggaaaagu

SEQ ID NO: 886554 - RNA, 19 nt, Artificial Sequence
  Description of Artificial Sequence: Synthetic oligonucleotide
cucuuaucucagacugcuc

SEQ ID NO: 886555 - RNA, 19 nt, Artificial Sequence
  Description of Artificial Sequence: Synthetic oligonucleotide
gugugaucucauaucuuuc

SEQ ID NO: 886556 - RNA, 19 nt, Artificial Sequence
  Description of Artificial Sequence: Synthetic oligonucleotide
gcuaaguaaugagacgaca

SEQ ID NO: 886557 - RNA, 19 nt, Artificial Sequence
  Description of Artificial Sequence: Synthetic oligonucleotide
aucauaugccguacauggu

SEQ ID NO: 886558 - RNA, 19 nt, Artificial Sequence
  Description of Artificial Sequence: Synthetic oligonucleotide
agguaaagcuccguccaaa

SEQ ID NO: 886559 - RNA, 19 nt, Artificial Sequence
  Description of Artificial Sequence: Synthetic oligonucleotide
agcuccguccaaagcgacg

SEQ ID NO: 886560 - RNA, 19 nt, Artificial Sequence
  Description of Artificial Sequence: Synthetic oligonucleotide
agacgcaacugccgcuacu

SEQ ID NO: 886561 - RNA, 19 nt, Artificial Sequence
  Description of Artificial Sequence: Synthetic oligonucleotide
gguaaugacugucccugaa

SEQ ID NO: 886562 - RNA, 19 nt, Artificial Sequence
  Description of Artificial Sequence: Synthetic oligonucleotide
agucucaccagcagauaaa

SEQ ID NO: 886563 - RNA, 19 nt, Artificial Sequence
  Description of Artificial Sequence: Synthetic oligonucleotide
ucaccgagcucagcuuuga

SEQ ID NO: 886564 - RNA, 19 nt, Artificial Sequence
  Description of Artificial Sequence: Synthetic oligonucleotide
ccucaguuauugugagucc

SEQ ID NO: 886565 - RNA, 19 nt, Artificial Sequence
  Description of Artificial Sequence: Synthetic oligonucleotide
gcuauuguuaggaggucuc

SEQ ID NO: 886566 - RNA, 19 nt, Artificial Sequence
  Description of Artificial Sequence: Synthetic oligonucleotide
auaccuggccaugccuuug

SEQ ID NO: 886567 - RNA, 19 nt, Artificial Sequence
  Description of Artificial Sequence: Synthetic oligonucleotide
cucucuauugugcggggua

SEQ ID NO: 886568 - RNA, 19 nt, Artificial Sequence
  Description of Artificial Sequence: Synthetic oligonucleotide
uggcuggcgucuucucugu

SEQ ID NO: 886569 - RNA, 19 nt, Artificial Sequence
  Description of Artificial Sequence: Synthetic oligonucleotide
cacaagaugcauugucggu

SEQ ID NO: 886570 - RNA, 19 nt, Artificial Sequence
  Description of Artificial Sequence: Synthetic oligonucleotide
uagcccguucaucgucaga

SEQ ID NO: 886571 - RNA, 19 nt, Artificial Sequence
  Description of Artificial Sequence: Synthetic oligonucleotide
aacugccgcuacucuuaaa

SEQ ID NO: 886572 - RNA, 19 nt, Artificial Sequence
  Description of Artificial Sequence: Synthetic oligonucleotide
uagugcaggucagcacaug

SEQ ID NO: 886573 - RNA, 19 nt, Artificial Sequence
  Description of Artificial Sequence: Synthetic oligonucleotide
acgacagguccuccucagu

SEQ ID NO: 886574 - RNA, 19 nt, Artificial Sequence
  Description of Artificial Sequence: Synthetic oligonucleotide
ccucaaauuaaacuuugcu

SEQ ID NO: 886575 - RNA, 19 nt, Artificial Sequence
  Description of Artificial Sequence: Synthetic oligonucleotide
augacaccgcugauaaaau

SEQ ID NO: 886576 - RNA, 19 nt, Artificial Sequence
  Description of Artificial Sequence: Synthetic oligonucleotide
gucugacaaacaaacugcu

SEQ ID NO: 886577 - RNA, 19 nt, Artificial Sequence
  Description of Artificial Sequence: Synthetic oligonucleotide
gcgcagauauuuucgaugu

SEQ ID NO: 886578 - RNA, 19 nt, Artificial Sequence
  Description of Artificial Sequence: Synthetic oligonucleotide
gcugucugcccuugacaag

SEQ ID NO: 886579 - RNA, 19 nt, Artificial Sequence
  Description of Artificial Sequence: Synthetic oligonucleotide
gucagcacauguucaucua

SEQ ID NO: 886580 - RNA, 19 nt, Artificial Sequence
  Description of Artificial Sequence: Synthetic oligonucleotide
ccgagcucagcuuugaugu

SEQ ID NO: 886581 - RNA, 19 nt, Artificial Sequence
  Description of Artificial Sequence: Synthetic oligonucleotide
gggcucuagcaacaccacc

SEQ ID NO: 886582 - RNA, 19 nt, Artificial Sequence
  Description of Artificial Sequence: Synthetic oligonucleotide
ggcuaaguaaugagacgac

SEQ ID NO: 886583 - RNA, 19 nt, Artificial Sequence
  Description of Artificial Sequence: Synthetic oligonucleotide
guucugccuaucaacuaaa

SEQ ID NO: 886584 - RNA, 19 nt, Artificial Sequence
  Description of Artificial Sequence: Synthetic oligonucleotide
ccaccgguuggcuucguug

SEQ ID NO: 886585 - RNA, 19 nt, Artificial Sequence
  Description of Artificial Sequence: Synthetic oligonucleotide
gcggcucaggaaaaguagc

SEQ ID NO: 886586 - RNA, 19 nt, Artificial Sequence
  Description of Artificial Sequence: Synthetic oligonucleotide
cagcuagacauauguucaa

SEQ ID NO: 886587 - RNA, 19 nt, Artificial Sequence
  Description of Artificial Sequence: Synthetic oligonucleotide
  modified_base (9)..(9): a, c, u, g, unknown or other
gucugugcngaaaauguuu

SEQ ID NO: 886588 - RNA, 19 nt, Artificial Sequence
  Description of Artificial Sequence: Synthetic oligonucleotide
uaucuacuauccgguggua

SEQ ID NO: 886589 - RNA, 19 nt, Artificial Sequence
  Description of Artificial Sequence: Synthetic oligonucleotide
auagucucaccagcagaua

SEQ ID NO: 886590 - RNA, 19 nt, Artificial Sequence
  Description of Artificial Sequence: Synthetic oligonucleotide
cgaacagcggcucaggaaa

SEQ ID NO: 886591 - RNA, 19 nt, Artificial Sequence
  Description of Artificial Sequence: Synthetic oligonucleotide
gcccuugacaaguauuugu

SEQ ID NO: 886592 - RNA, 19 nt, Artificial Sequence
  Description of Artificial Sequence: Synthetic oligonucleotide
gcacucuuaaacauauccu

SEQ ID NO: 886593 - RNA, 19 nt, Artificial Sequence
  Description of Artificial Sequence: Synthetic oligonucleotide
ccguccaaagcgacgugac

SEQ ID NO: 886594 - RNA, 19 nt, Artificial Sequence
  Description of Artificial Sequence: Synthetic oligonucleotide
ccacaacuaucacagguaa

SEQ ID NO: 886595 - RNA, 19 nt, Artificial Sequence
  Description of Artificial Sequence: Synthetic oligonucleotide
gaccuggcauauagucuca

SEQ ID NO: 886596 - RNA, 19 nt, Artificial Sequence
  Description of Artificial Sequence: Synthetic oligonucleotide
guuuggacacagaacuuuu

SEQ ID NO: 886597 - RNA, 19 nt, Artificial Sequence
  Description of Artificial Sequence: Synthetic oligonucleotide
gaacagcggcucaggaaaa

SEQ ID NO: 886598 - RNA, 19 nt, Artificial Sequence
  Description of Artificial Sequence: Synthetic oligonucleotide
uggacucguugcagucuuu

SEQ ID NO: 886599 - RNA, 19 nt, Artificial Sequence
  Description of Artificial Sequence: Synthetic oligonucleotide
cagguaaagcuccguccaa

SEQ ID NO: 886600 - RNA, 19 nt, Artificial Sequence
  Description of Artificial Sequence: Synthetic oligonucleotide
gcaguggucgaagcugaac

SEQ ID NO: 886601 - RNA, 19 nt, Artificial Sequence
  Description of Artificial Sequence: Synthetic oligonucleotide
gacgugacacacguucuuu

SEQ ID NO: 886602 - RNA, 19 nt, Artificial Sequence
  Description of Artificial Sequence: Synthetic oligonucleotide
caggucagcacauguucau

SEQ ID NO: 886603 - RNA, 19 nt, Artificial Sequence
  Description of Artificial Sequence: Synthetic oligonucleotide
ggauuggacugcuauuguu

SEQ ID NO: 886604 - RNA, 19 nt, Artificial Sequence
  Description of Artificial Sequence: Synthetic oligonucleotide
ggacaccgaaaaggacagg

SEQ ID NO: 886605 - RNA, 19 nt, Artificial Sequence
  Description of Artificial Sequence: Synthetic oligonucleotide
ccgaaaaggacaggcagaa

SEQ ID NO: 886606 - RNA, 19 nt, Artificial Sequence
  Description of Artificial Sequence: Synthetic oligonucleotide
guggacucguugcagucuu

SEQ ID NO: 886607 - RNA, 19 nt, Artificial Sequence
  Description of Artificial Sequence: Synthetic oligonucleotide
ccuagcccguucaucguca

SEQ ID NO: 886608 - RNA, 19 nt, Artificial Sequence
  Description of Artificial Sequence: Synthetic oligonucleotide
ccguacauggucauguuuu

SEQ ID NO: 886609 - RNA, 19 nt, Artificial Sequence
  Description of Artificial Sequence: Synthetic oligonucleotide
guugccguuucuagccacu

SEQ ID NO: 886610 - RNA, 19 nt, Artificial Sequence
  Description of Artificial Sequence: Synthetic oligonucleotide
gcgucuucucuguauuugu

SEQ ID NO: 886611 - RNA, 19 nt, Artificial Sequence
  Description of Artificial Sequence: Synthetic oligonucleotide
gcuaacuguaaagacucuu

SEQ ID NO: 886612 - RNA, 19 nt, Artificial Sequence
  Description of Artificial Sequence: Synthetic oligonucleotide
cucuagcaacaccaccggu

SEQ ID NO: 886613 - RNA, 19 nt, Artificial Sequence
  Description of Artificial Sequence: Synthetic oligonucleotide
ccucaacauaguaucuaua

SEQ ID NO: 886614 - RNA, 19 nt, Artificial Sequence
  Description of Artificial Sequence: Synthetic oligonucleotide
caccguugaacugggcucu

SEQ ID NO: 886615 - RNA, 19 nt, Artificial Sequence
  Description of Artificial Sequence: Synthetic oligonucleotide
gcuccguccaaagcgacgu

SEQ ID NO: 886616 - RNA, 19 nt, Artificial Sequence
  Description of Artificial Sequence: Synthetic oligonucleotide
cguugccguuucuagccac

SEQ ID NO: 886617 - RNA, 19 nt, Artificial Sequence
  Description of Artificial Sequence: Synthetic oligonucleotide
ggacucguugcagucuuua

SEQ ID NO: 886618 - RNA, 19 nt, Artificial Sequence
  Description of Artificial Sequence: Synthetic oligonucleotide
ccacaaguauacagaugaa

SEQ ID NO: 886619 - RNA, 19 nt, Artificial Sequence
  Description of Artificial Sequence: Synthetic oligonucleotide
gcgggguauucaccguuga

SEQ ID NO: 886620 - RNA, 19 nt, Artificial Sequence
  Description of Artificial Sequence: Synthetic oligonucleotide
gcuggcgucuucucuguau

SEQ ID NO: 886621 - RNA, 19 nt, Artificial Sequence
  Description of Artificial Sequence: Synthetic oligonucleotide
ccaugauggcacucuuaaa

SEQ ID NO: 886622 - RNA, 19 nt, Artificial Sequence
  Description of Artificial Sequence: Synthetic oligonucleotide
aagcgacgugacacacguu

SEQ ID NO: 886623 - RNA, 19 nt, Artificial Sequence
  Description of Artificial Sequence: Synthetic oligonucleotide
ggcuucguugccguuucua

SEQ ID NO: 886624 - RNA, 19 nt, Artificial Sequence
  Description of Artificial Sequence: Synthetic oligonucleotide
caccgcugauaaaauccuu

SEQ ID NO: 886625 - RNA, 19 nt, Artificial Sequence
  Description of Artificial Sequence: Synthetic oligonucleotide
cguugcagucuuuaucagu

SEQ ID NO: 886626 - RNA, 19 nt, Artificial Sequence
  Description of Artificial Sequence: Synthetic oligonucleotide
ccguugaacugggcucuag

SEQ ID NO: 886627 - RNA, 19 nt, Artificial Sequence
  Description of Artificial Sequence: Synthetic oligonucleotide
accguugaacugggcucua

SEQ ID NO: 886628 - RNA, 19 nt, Artificial Sequence
  Description of Artificial Sequence: Synthetic oligonucleotide
ccggugguaagcucuugcu

SEQ ID NO: 886629 - RNA, 19 nt, Artificial Sequence
  Description of Artificial Sequence: Synthetic oligonucleotide
gccguacauggucauguuu

SEQ ID NO: 886630 - RNA, 19 nt, Artificial Sequence
  Description of Artificial Sequence: Synthetic oligonucleotide
ccgcugauaaaauccuuuu

SEQ ID NO: 886631 - RNA, 19 nt, Artificial Sequence
  Description of Artificial Sequence: Synthetic oligonucleotide
ccuggauuggacugcuauu

SEQ ID NO: 886632 - RNA, 19 nt, Artificial Sequence
  Description of Artificial Sequence: Synthetic oligonucleotide
cguccaaagcgacgugaca

SEQ ID NO: 886633 - RNA, 19 nt, Artificial Sequence
  Description of Artificial Sequence: Synthetic oligonucleotide
gcgacgugacacacguucu

SEQ ID NO: 886634 - RNA, 19 nt, Artificial Sequence
  Description of Artificial Sequence: Synthetic oligonucleotide
cauugucaguggacucguu

SEQ ID NO: 886635 - RNA, 19 nt, Artificial Sequence
  Description of Artificial Sequence: Synthetic oligonucleotide
agcgccuggcuggcgucuu

SEQ ID NO: 886636 - RNA, 19 nt, Artificial Sequence
  Description of Artificial Sequence: Synthetic oligonucleotide
gcucucuauugugcggggu

SEQ ID NO: 886637 - RNA, 19 nt, Artificial Sequence
  Description of Artificial Sequence: Synthetic oligonucleotide
ccacaugcgcagauauuuu

SEQ ID NO: 886638 - RNA, 19 nt, Artificial Sequence
  Description of Artificial Sequence: Synthetic oligonucleotide
cgggguauucaccguugaa

SEQ ID NO: 886639 - RNA, 19 nt, Artificial Sequence
  Description of Artificial Sequence: Synthetic oligonucleotide
cgacgugacacacguucuu

SEQ ID NO: 886640 - RNA, 19 nt, Artificial Sequence
  Description of Artificial Sequence: Synthetic oligonucleotide
caccaccgguuggcuucgu

SEQ ID NO: 886641 - RNA, 19 nt, Artificial Sequence
  Description of Artificial Sequence: Synthetic oligonucleotide
aaagaaccaauccagaggc

SEQ ID NO: 886642 - RNA, 19 nt, Artificial Sequence
  Description of Artificial Sequence: Synthetic oligonucleotide
aaguuaaccucaugggucc

SEQ ID NO: 886643 - RNA, 19 nt, Artificial Sequence
  Description of Artificial Sequence: Synthetic oligonucleotide
aguuugaggaagcaugucc

SEQ ID NO: 886644 - RNA, 19 nt, Artificial Sequence
  Description of Artificial Sequence: Synthetic oligonucleotide
aauagauuugugcauuuca

SEQ ID NO: 886645 - RNA, 19 nt, Artificial Sequence
  Description of Artificial Sequence: Synthetic oligonucleotide
cuuaaguuaaccucauggg

SEQ ID NO: 886646 - RNA, 19 nt, Artificial Sequence
  Description of Artificial Sequence: Synthetic oligonucleotide
aacaagauccuuucgaaaa

SEQ ID NO: 886647 - RNA, 19 nt, Artificial Sequence
  Description of Artificial Sequence: Synthetic oligonucleotide
uacaaguggaaaaugagaa

SEQ ID NO: 886648 - RNA, 19 nt, Artificial Sequence
  Description of Artificial Sequence: Synthetic oligonucleotide
auaggugucagccucaaug

SEQ ID NO: 886649 - RNA, 19 nt, Artificial Sequence
  Description of Artificial Sequence: Synthetic oligonucleotide
ucuuauaugaagcaucuuu

SEQ ID NO: 886650 - RNA, 19 nt, Artificial Sequence
  Description of Artificial Sequence: Synthetic oligonucleotide
aaaugagaaaagccccucg

SEQ ID NO: 886651 - RNA, 19 nt, Artificial Sequence
  Description of Artificial Sequence: Synthetic oligonucleotide
gacagaauagauuugugca

SEQ ID NO: 886652 - RNA, 19 nt, Artificial Sequence
  Description of Artificial Sequence: Synthetic oligonucleotide
gaagcuaggauucucuccc

SEQ ID NO: 886653 - RNA, 19 nt, Artificial Sequence
  Description of Artificial Sequence: Synthetic oligonucleotide
ucauuugaaucccaggcug

SEQ ID NO: 886654 - RNA, 19 nt, Artificial Sequence
  Description of Artificial Sequence: Synthetic oligonucleotide
uaaguuaaccucauggguc

SEQ ID NO: 886655 - RNA, 19 nt, Artificial Sequence
  Description of Artificial Sequence: Synthetic oligonucleotide
uggucauuuuccaagcggg

SEQ ID NO: 886656 - RNA, 19 nt, Artificial Sequence
  Description of Artificial Sequence: Synthetic oligonucleotide
ugcucaugcaccaauaggu

SEQ ID NO: 886657 - RNA, 19 nt, Artificial Sequence
  Description of Artificial Sequence: Synthetic oligonucleotide
aaggauagugcuucaccac

SEQ ID NO: 886658 - RNA, 19 nt, Artificial Sequence
  Description of Artificial Sequence: Synthetic oligonucleotide
gcuuaaguuaaccucaugg

SEQ ID NO: 886659 - RNA, 19 nt, Artificial Sequence
  Description of Artificial Sequence: Synthetic oligonucleotide
uuggguugaagaaucagug

SEQ ID NO: 886660 - RNA, 19 nt, Artificial Sequence
  Description of Artificial Sequence: Synthetic oligonucleotide
uuucuuauaugaagcaucu

SEQ ID NO: 886661 - RNA, 19 nt, Artificial Sequence
  Description of Artificial Sequence: Synthetic oligonucleotide
ugucggauagcccauauaa

SEQ ID NO: 886662 - RNA, 19 nt, Artificial Sequence
  Description of Artificial Sequence: Synthetic oligonucleotide
uuaaacgcaggacuguggc

SEQ ID NO: 886663 - RNA, 19 nt, Artificial Sequence
  Description of Artificial Sequence: Synthetic oligonucleotide
uuuauuucguguuucuaac

SEQ ID NO: 886664 - RNA, 19 nt, Artificial Sequence
  Description of Artificial Sequence: Synthetic oligonucleotide
aaagguaggcauuuggcaa

SEQ ID NO: 886665 - RNA, 19 nt, Artificial Sequence
  Description of Artificial Sequence: Synthetic oligonucleotide
uauuucguguuucuaacac

SEQ ID NO: 886666 - RNA, 19 nt, Artificial Sequence
  Description of Artificial Sequence: Synthetic oligonucleotide
uucgugcccguccagaugg

SEQ ID NO: 886667 - RNA, 19 nt, Artificial Sequence
  Description of Artificial Sequence: Synthetic oligonucleotide
ucugcuaggccacaccagg

SEQ ID NO: 886668 - RNA, 19 nt, Artificial Sequence
  Description of Artificial Sequence: Synthetic oligonucleotide
cugcacaacacuuugcugc

SEQ ID NO: 886669 - RNA, 19 nt, Artificial Sequence
  Description of Artificial Sequence: Synthetic oligonucleotide
cucaauguugcgaagcacc

SEQ ID NO: 886670 - RNA, 19 nt, Artificial Sequence
  Description of Artificial Sequence: Synthetic oligonucleotide
gucguuuauccccugaacg

SEQ ID NO: 886671 - RNA, 19 nt, Artificial Sequence
  Description of Artificial Sequence: Synthetic oligonucleotide
gaacggagugaccaggucg

SEQ ID NO: 886672 - RNA, 19 nt, Artificial Sequence
  Description of Artificial Sequence: Synthetic oligonucleotide
ucugcgaaggcaaacuuga

SEQ ID NO: 886673 - RNA, 19 nt, Artificial Sequence
  Description of Artificial Sequence: Synthetic oligonucleotide
uuugguaucucgucaaacu

SEQ ID NO: 886674 - RNA, 19 nt, Artificial Sequence
  Description of Artificial Sequence: Synthetic oligonucleotide
aacguauccacuggcaggg

SEQ ID NO: 886675 - RNA, 19 nt, Artificial Sequence
  Description of Artificial Sequence: Synthetic oligonucleotide
cuaaagguaggcauuuggc

SEQ ID NO: 886676 - RNA, 19 nt, Artificial Sequence
  Description of Artificial Sequence: Synthetic oligonucleotide
aauacauucagggcuuaag

SEQ ID NO: 886677 - RNA, 19 nt, Artificial Sequence
  Description of Artificial Sequence: Synthetic oligonucleotide
ugaauagaagcagacacac

SEQ ID NO: 886678 - RNA, 19 nt, Artificial Sequence
  Description of Artificial Sequence: Synthetic oligonucleotide
ugggcuuaaacgcaggacu

SEQ ID NO: 886679 - RNA, 19 nt, Artificial Sequence
  Description of Artificial Sequence: Synthetic oligonucleotide
ugaacguauccacuggcag

SEQ ID NO: 886680 - RNA, 19 nt, Artificial Sequence
  Description of Artificial Sequence: Synthetic oligonucleotide
ucggauagcccauauaaac

SEQ ID NO: 886681 - RNA, 19 nt, Artificial Sequence
  Description of Artificial Sequence: Synthetic oligonucleotide
agaucuauauggcccuacc

SEQ ID NO: 886682 - RNA, 19 nt, Artificial Sequence
  Description of Artificial Sequence: Synthetic oligonucleotide
uuucguguuucuaacacau

SEQ ID NO: 886683 - RNA, 19 nt, Artificial Sequence
  Description of Artificial Sequence: Synthetic oligonucleotide
gaacguauccacuggcagg

SEQ ID NO: 886684 - RNA, 19 nt, Artificial Sequence
  Description of Artificial Sequence: Synthetic oligonucleotide
uugcucaugcaccaauagg

SEQ ID NO: 886685 - RNA, 19 nt, Artificial Sequence
  Description of Artificial Sequence: Synthetic oligonucleotide
aucuauauggcccuacccu

SEQ ID NO: 886686 - RNA, 19 nt, Artificial Sequence
  Description of Artificial Sequence: Synthetic oligonucleotide
uacucgcaaaugaagacca

SEQ ID NO: 886687 - RNA, 19 nt, Artificial Sequence
  Description of Artificial Sequence: Synthetic oligonucleotide
ugaucugaauagaagcaga

SEQ ID NO: 886688 - RNA, 19 nt, Artificial Sequence
  Description of Artificial Sequence: Synthetic oligonucleotide
agguaucgcacuucgugcc

SEQ ID NO: 886689 - RNA, 19 nt, Artificial Sequence
  Description of Artificial Sequence: Synthetic oligonucleotide
ucaucaauccggcuuacaa

SEQ ID NO: 886690 - RNA, 19 nt, Artificial Sequence
  Description of Artificial Sequence: Synthetic oligonucleotide
gauccuuucgaaaaucuac

SEQ ID NO: 886691 - RNA, 19 nt, Artificial Sequence
  Description of Artificial Sequence: Synthetic oligonucleotide
uuucacuugacagaauaga

SEQ ID NO: 886692 - RNA, 19 nt, Artificial Sequence
  Description of Artificial Sequence: Synthetic oligonucleotide
gaaggauagugcuucacca

SEQ ID NO: 886693 - RNA, 19 nt, Artificial Sequence
  Description of Artificial Sequence: Synthetic oligonucleotide
ugaagcuaggauucucucc

SEQ ID NO: 886694 - RNA, 19 nt, Artificial Sequence
  Description of Artificial Sequence: Synthetic oligonucleotide
ucgcaaaugaagaccacga

SEQ ID NO: 886695 - RNA, 19 nt, Artificial Sequence
  Description of Artificial Sequence: Synthetic oligonucleotide
ucugaagcuaggauucucu

SEQ ID NO: 886696 - RNA, 19 nt, Artificial Sequence
  Description of Artificial Sequence: Synthetic oligonucleotide
auacauucagggcuuaagu

SEQ ID NO: 886697 - RNA, 19 nt, Artificial Sequence
  Description of Artificial Sequence: Synthetic oligonucleotide
gaucuauauggcccuaccc

SEQ ID NO: 886698 - RNA, 19 nt, Artificial Sequence
  Description of Artificial Sequence: Synthetic oligonucleotide
uuauaugaagcaucuuuau

SEQ ID NO: 886699 - RNA, 19 nt, Artificial Sequence
  Description of Artificial Sequence: Synthetic oligonucleotide
ugguaucucgucaaacuga

SEQ ID NO: 886700 - RNA, 19 nt, Artificial Sequence
  Description of Artificial Sequence: Synthetic oligonucleotide
uugugcauuucagagcagg

SEQ ID NO: 886701 - RNA, 19 nt, Artificial Sequence
  Description of Artificial Sequence: Synthetic oligonucleotide
caucucacgaggaaagcag

SEQ ID NO: 886702 - RNA, 19 nt, Artificial Sequence
  Description of Artificial Sequence: Synthetic oligonucleotide
aaacgcaggacuguggcca

SEQ ID NO: 886703 - RNA, 19 nt, Artificial Sequence
  Description of Artificial Sequence: Synthetic oligonucleotide
auagauuugugcauuucag

SEQ ID NO: 886704 - RNA, 19 nt, Artificial Sequence
  Description of Artificial Sequence: Synthetic oligonucleotide
cuuaaacgcaggacugugg

SEQ ID NO: 886705 - RNA, 19 nt, Artificial Sequence
  Description of Artificial Sequence: Synthetic oligonucleotide
cauuugaaucccaggcugg

SEQ ID NO: 886706 - RNA, 19 nt, Artificial Sequence
  Description of Artificial Sequence: Synthetic oligonucleotide
uuauuucguguuucuaaca

SEQ ID NO: 886707 - RNA, 19 nt, Artificial Sequence
  Description of Artificial Sequence: Synthetic oligonucleotide
ucguuuauccccugaacgu

SEQ ID NO: 886708 - RNA, 19 nt, Artificial Sequence
  Description of Artificial Sequence: Synthetic oligonucleotide
ucaauguugcgaagcaccu

SEQ ID NO: 886709 - RNA, 19 nt, Artificial Sequence
  Description of Artificial Sequence: Synthetic oligonucleotide
caucaauccggcuuacaag

SEQ ID NO: 886710 - RNA, 19 nt, Artificial Sequence
  Description of Artificial Sequence: Synthetic oligonucleotide
cacacuggagacaucgacc

SEQ ID NO: 886711 - RNA, 19 nt, Artificial Sequence
  Description of Artificial Sequence: Synthetic oligonucleotide
acauucagggcuuaaguua

SEQ ID NO: 886712 - RNA, 19 nt, Artificial Sequence
  Description of Artificial Sequence: Synthetic oligonucleotide
uuugucugaggggugaucu

SEQ ID NO: 886713 - RNA, 19 nt, Artificial Sequence
  Description of Artificial Sequence: Synthetic oligonucleotide
aauuguccugaaugccauc

SEQ ID NO: 886714 - RNA, 19 nt, Artificial Sequence
  Description of Artificial Sequence: Synthetic oligonucleotide
uguccuagugccugggcag

SEQ ID NO: 886715 - RNA, 19 nt, Artificial Sequence
  Description of Artificial Sequence: Synthetic oligonucleotide
ucacgaggaaagcagcaca

SEQ ID NO: 886716 - RNA, 19 nt, Artificial Sequence
  Description of Artificial Sequence: Synthetic oligonucleotide
acacuggagacaucgaccu

SEQ ID NO: 886717 - RNA, 19 nt, Artificial Sequence
  Description of Artificial Sequence: Synthetic oligonucleotide
gaagaacggagugaccagg

SEQ ID NO: 886718 - RNA, 19 nt, Artificial Sequence
  Description of Artificial Sequence: Synthetic oligonucleotide
auagacugccugcacaaca

SEQ ID NO: 886719 - RNA, 19 nt, Artificial Sequence
  Description of Artificial Sequence: Synthetic oligonucleotide
acagaauagauuugugcau

SEQ ID NO: 886720 - RNA, 19 nt, Artificial Sequence
  Description of Artificial Sequence: Synthetic oligonucleotide
uggguugaagaaucagugc

SEQ ID NO: 886721 - RNA, 19 nt, Artificial Sequence
  Description of Artificial Sequence: Synthetic oligonucleotide
uccuuucgaaaaucuacug

SEQ ID NO: 886722 - RNA, 19 nt, Artificial Sequence
  Description of Artificial Sequence: Synthetic oligonucleotide
gcuaaagguaggcauuugg

SEQ ID NO: 886723 - RNA, 19 nt, Artificial Sequence
  Description of Artificial Sequence: Synthetic oligonucleotide
uaauuguccugaaugccau

SEQ ID NO: 886724 - RNA, 19 nt, Artificial Sequence
  Description of Artificial Sequence: Synthetic oligonucleotide
gacucgcucaucaauccgg

SEQ ID NO: 886725 - RNA, 19 nt, Artificial Sequence
  Description of Artificial Sequence: Synthetic oligonucleotide
auuucguguuucuaacaca

SEQ ID NO: 886726 - RNA, 19 nt, Artificial Sequence
  Description of Artificial Sequence: Synthetic oligonucleotide
acgaagaacggagugacca

SEQ ID NO: 886727 - RNA, 19 nt, Artificial Sequence
  Description of Artificial Sequence: Synthetic oligonucleotide
uucggggcucauccgaggg

SEQ ID NO: 886728 - RNA, 19 nt, Artificial Sequence
  Description of Artificial Sequence: Synthetic oligonucleotide
auucugcuaggccacacca

SEQ ID NO: 886729 - RNA, 19 nt, Artificial Sequence
  Description of Artificial Sequence: Synthetic oligonucleotide
aggauagugcuucaccaca

SEQ ID NO: 886730 - RNA, 19 nt, Artificial Sequence
  Description of Artificial Sequence: Synthetic oligonucleotide
acauacaaguggaaaauga

SEQ ID NO: 886731 - RNA, 19 nt, Artificial Sequence
  Description of Artificial Sequence: Synthetic oligonucleotide
cagguaucgcacuucgugc

SEQ ID NO: 886732 - RNA, 19 nt, Artificial Sequence
  Description of Artificial Sequence: Synthetic oligonucleotide
ucuauauggcccuacccuu

SEQ ID NO: 886733 - RNA, 19 nt, Artificial Sequence
  Description of Artificial Sequence: Synthetic oligonucleotide
aagcuaggauucucucccg

SEQ ID NO: 886734 - RNA, 19 nt, Artificial Sequence
  Description of Artificial Sequence: Synthetic oligonucleotide
cuaggauucucucccgggc

SEQ ID NO: 886735 - RNA, 19 nt, Artificial Sequence
  Description of Artificial Sequence: Synthetic oligonucleotide
ucucacgaggaaagcagca

SEQ ID NO: 886736 - RNA, 19 nt, Artificial Sequence
  Description of Artificial Sequence: Synthetic oligonucleotide
cagggcuuaaguuaaccuc

SEQ ID NO: 886737 - RNA, 19 nt, Artificial Sequence
  Description of Artificial Sequence: Synthetic oligonucleotide
cuugcucaugcaccaauag

SEQ ID NO: 886738 - RNA, 19 nt, Artificial Sequence
  Description of Artificial Sequence: Synthetic oligonucleotide
acugccaugggccccaggu

SEQ ID NO: 886739 - RNA, 19 nt, Artificial Sequence
  Description of Artificial Sequence: Synthetic oligonucleotide
cucgcaaaugaagaccacg

SEQ ID NO: 886740 - RNA, 19 nt, Artificial Sequence
  Description of Artificial Sequence: Synthetic oligonucleotide
guugcgaagcaccucugcc

SEQ ID NO: 886741 - RNA, 19 nt, Artificial Sequence
  Description of Artificial Sequence: Synthetic oligonucleotide
ugccccuuacccaggacag

SEQ ID NO: 886742 - RNA, 19 nt, Artificial Sequence
  Description of Artificial Sequence: Synthetic oligonucleotide
agacaucgaccucauccac

SEQ ID NO: 886743 - RNA, 19 nt, Artificial Sequence
  Description of Artificial Sequence: Synthetic oligonucleotide
acaucgaccucauccacgu

SEQ ID NO: 886744 - RNA, 19 nt, Artificial Sequence
  Description of Artificial Sequence: Synthetic oligonucleotide
ugucaugcccuaucugacc

SEQ ID NO: 886745 - RNA, 19 nt, Artificial Sequence
  Description of Artificial Sequence: Synthetic oligonucleotide
uguugcgaagcaccucugc

SEQ ID NO: 886746 - RNA, 19 nt, Artificial Sequence
  Description of Artificial Sequence: Synthetic oligonucleotide
ucucuggacaguguccuag

SEQ ID NO: 886747 - RNA, 19 nt, Artificial Sequence
  Description of Artificial Sequence: Synthetic oligonucleotide
aagaaccaauccagaggcc

SEQ ID NO: 886748 - RNA, 19 nt, Artificial Sequence
  Description of Artificial Sequence: Synthetic oligonucleotide
gacaucgaccucauccacg

SEQ ID NO: 886749 - RNA, 19 nt, Artificial Sequence
  Description of Artificial Sequence: Synthetic oligonucleotide
gaugcuuggggcauuccug

SEQ ID NO: 886750 - RNA, 19 nt, Artificial Sequence
  Description of Artificial Sequence: Synthetic oligonucleotide
uggacucgcucaucaaucc

SEQ ID NO: 886751 - RNA, 19 nt, Artificial Sequence
  Description of Artificial Sequence: Synthetic oligonucleotide
uauggcccuacccuuuugu

SEQ ID NO: 886752 - RNA, 19 nt, Artificial Sequence
  Description of Artificial Sequence: Synthetic oligonucleotide
uggaucuggcgauaugugu

SEQ ID NO: 886753 - RNA, 19 nt, Artificial Sequence
  Description of Artificial Sequence: Synthetic oligonucleotide
cacaaagccgcagaggcac

SEQ ID NO: 886754 - RNA, 19 nt, Artificial Sequence
  Description of Artificial Sequence: Synthetic oligonucleotide
uucugcuaggccacaccag

SEQ ID NO: 886755 - RNA, 19 nt, Artificial Sequence
  Description of Artificial Sequence: Synthetic oligonucleotide
aucucacgaggaaagcagc

SEQ ID NO: 886756 - RNA, 19 nt, Artificial Sequence
  Description of Artificial Sequence: Synthetic oligonucleotide
uaggauucucucccgggcu

SEQ ID NO: 886757 - RNA, 19 nt, Artificial Sequence
  Description of Artificial Sequence: Synthetic oligonucleotide
auagcccauauaaacaaga

SEQ ID NO: 886758 - RNA, 19 nt, Artificial Sequence
  Description of Artificial Sequence: Synthetic oligonucleotide
cugaauagaagcagacaca

SEQ ID NO: 886759 - RNA, 19 nt, Artificial Sequence
  Description of Artificial Sequence: Synthetic oligonucleotide
aagcauuugaacacaugaa

SEQ ID NO: 886760 - RNA, 19 nt, Artificial Sequence
  Description of Artificial Sequence: Synthetic oligonucleotide
ugcacaacacuuugcugcu

SEQ ID NO: 886761 - RNA, 19 nt, Artificial Sequence
  Description of Artificial Sequence: Synthetic oligonucleotide
agcuaggauucucucccgg

SEQ ID NO: 886762 - RNA, 19 nt, Artificial Sequence
  Description of Artificial Sequence: Synthetic oligonucleotide
ugcaccaauaggugucagc

SEQ ID NO: 886763 - RNA, 19 nt, Artificial Sequence
  Description of Artificial Sequence: Synthetic oligonucleotide
uagcccauauaaacaagau

SEQ ID NO: 886764 - RNA, 19 nt, Artificial Sequence
  Description of Artificial Sequence: Synthetic oligonucleotide
aacugaggcugacuauccu

SEQ ID NO: 886765 - RNA, 19 nt, Artificial Sequence
  Description of Artificial Sequence: Synthetic oligonucleotide
agaacggagugaccagguc

SEQ ID NO: 886766 - RNA, 19 nt, Artificial Sequence
  Description of Artificial Sequence: Synthetic oligonucleotide
aacggagugaccaggucgu

SEQ ID NO: 886767 - RNA, 19 nt, Artificial Sequence
  Description of Artificial Sequence: Synthetic oligonucleotide
caacaguggguaacugagg

SEQ ID NO: 886768 - RNA, 19 nt, Artificial Sequence
  Description of Artificial Sequence: Synthetic oligonucleotide
aggauucucucccgggcuc

SEQ ID NO: 886769 - RNA, 19 nt, Artificial Sequence
  Description of Artificial Sequence: Synthetic oligonucleotide
agggcuuaaguuaaccuca

SEQ ID NO: 886770 - RNA, 19 nt, Artificial Sequence
  Description of Artificial Sequence: Synthetic oligonucleotide
auguacucgcaaaugaaga

SEQ ID NO: 886771 - RNA, 19 nt, Artificial Sequence
  Description of Artificial Sequence: Synthetic oligonucleotide
aaucagugcuucggggcuc

SEQ ID NO: 886772 - RNA, 19 nt, Artificial Sequence
  Description of Artificial Sequence: Synthetic oligonucleotide
gcagguaucgcacuucgug

SEQ ID NO: 886773 - RNA, 19 nt, Artificial Sequence
  Description of Artificial Sequence: Synthetic oligonucleotide
ucgcucaucaauccggcuu

SEQ ID NO: 886774 - RNA, 19 nt, Artificial Sequence
  Description of Artificial Sequence: Synthetic oligonucleotide
cuacugucaccuuggguug

SEQ ID NO: 886775 - RNA, 19 nt, Artificial Sequence
  Description of Artificial Sequence: Synthetic oligonucleotide
acuauccugccaguucugg

SEQ ID NO: 886776 - RNA, 19 nt, Artificial Sequence
  Description of Artificial Sequence: Synthetic oligonucleotide
cauucagggcuuaaguuaa

SEQ ID NO: 886777 - RNA, 19 nt, Artificial Sequence
  Description of Artificial Sequence: Synthetic oligonucleotide
caagcgggucaguaggggc

SEQ ID NO: 886778 - RNA, 19 nt, Artificial Sequence
  Description of Artificial Sequence: Synthetic oligonucleotide
cauucugcuaggccacacc

SEQ ID NO: 886779 - RNA, 19 nt, Artificial Sequence
  Description of Artificial Sequence: Synthetic oligonucleotide
ccuuguguccccuacaguc

SEQ ID NO: 886780 - RNA, 19 nt, Artificial Sequence
  Description of Artificial Sequence: Synthetic oligonucleotide
gguaucucgucaaacugag

SEQ ID NO: 886781 - RNA, 19 nt, Artificial Sequence
  Description of Artificial Sequence: Synthetic oligonucleotide
uuugugcauuucagagcag

SEQ ID NO: 886782 - RNA, 19 nt, Artificial Sequence
  Description of Artificial Sequence: Synthetic oligonucleotide
auggcccuacccuuuuguc

SEQ ID NO: 886783 - RNA, 19 nt, Artificial Sequence
  Description of Artificial Sequence: Synthetic oligonucleotide
ucuuugguaucucgucaaa

SEQ ID NO: 886784 - RNA, 19 nt, Artificial Sequence
  Description of Artificial Sequence: Synthetic oligonucleotide
cuuugguaucucgucaaac

SEQ ID NO: 886785 - RNA, 19 nt, Artificial Sequence
  Description of Artificial Sequence: Synthetic oligonucleotide
acaacacuuugcugcuguc

SEQ ID NO: 886786 - RNA, 19 nt, Artificial Sequence
  Description of Artificial Sequence: Synthetic oligonucleotide
auccuuucgaaaaucuacu

SEQ ID NO: 886787 - RNA, 19 nt, Artificial Sequence
  Description of Artificial Sequence: Synthetic oligonucleotide
gcaccaauaggugucagcc

SEQ ID NO: 886788 - RNA, 19 nt, Artificial Sequence
  Description of Artificial Sequence: Synthetic oligonucleotide
uggcccuacccuuuugucu

SEQ ID NO: 886789 - RNA, 19 nt, Artificial Sequence
  Description of Artificial Sequence: Synthetic oligonucleotide
uuuauccccugaacguauc

SEQ ID NO: 886790 - RNA, 19 nt, Artificial Sequence
  Description of Artificial Sequence: Synthetic oligonucleotide
ugcuaggccacaccaggaa

SEQ ID NO: 886791 - RNA, 19 nt, Artificial Sequence
  Description of Artificial Sequence: Synthetic oligonucleotide
acucgcucaucaauccggc

SEQ ID NO: 886792 - RNA, 19 nt, Artificial Sequence
  Description of Artificial Sequence: Synthetic oligonucleotide
ggauagcccauauaaacaa

SEQ ID NO: 886793 - RNA, 19 nt, Artificial Sequence
  Description of Artificial Sequence: Synthetic oligonucleotide
gucuauguacucgcaaaug

SEQ ID NO: 886794 - RNA, 19 nt, Artificial Sequence
  Description of Artificial Sequence: Synthetic oligonucleotide
aauguggaucuggcgauau

SEQ ID NO: 886795 - RNA, 19 nt, Artificial Sequence
  Description of Artificial Sequence: Synthetic oligonucleotide
caauccggcuuacaaguuc

SEQ ID NO: 886796 - RNA, 19 nt, Artificial Sequence
  Description of Artificial Sequence: Synthetic oligonucleotide
gcugucaugcccuaucuga

SEQ ID NO: 886797 - RNA, 19 nt, Artificial Sequence
  Description of Artificial Sequence: Synthetic oligonucleotide
aagaacggagugaccaggu

SEQ ID NO: 886798 - RNA, 19 nt, Artificial Sequence
  Description of Artificial Sequence: Synthetic oligonucleotide
ucgcacuucgugcccgucc

SEQ ID NO: 886799 - RNA, 19 nt, Artificial Sequence
  Description of Artificial Sequence: Synthetic oligonucleotide
ugacguccuggucauuuuc

SEQ ID NO: 886800 - RNA, 19 nt, Artificial Sequence
  Description of Artificial Sequence: Synthetic oligonucleotide
aagacagucugagggcccu

SEQ ID NO: 886801 - RNA, 19 nt, Artificial Sequence
  Description of Artificial Sequence: Synthetic oligonucleotide
uucuagaaucucucuccuc

SEQ ID NO: 886802 - RNA, 19 nt, Artificial Sequence
  Description of Artificial Sequence: Synthetic oligonucleotide
aggacauagacugccugca

SEQ ID NO: 886803 - RNA, 19 nt, Artificial Sequence
  Description of Artificial Sequence: Synthetic oligonucleotide
cagugcucagcauuuuguc

SEQ ID NO: 886804 - RNA, 19 nt, Artificial Sequence
  Description of Artificial Sequence: Synthetic oligonucleotide
uaaccugcgugccccuuac

SEQ ID NO: 886805 - RNA, 19 nt, Artificial Sequence
  Description of Artificial Sequence: Synthetic oligonucleotide
cugcgugccccuuacccag

SEQ ID NO: 886806 - RNA, 19 nt, Artificial Sequence
  Description of Artificial Sequence: Synthetic oligonucleotide
ccggcuuacaaguuccucc

SEQ ID NO: 886807 - RNA, 19 nt, Artificial Sequence
  Description of Artificial Sequence: Synthetic oligonucleotide
gaagacagucugagggccc

SEQ ID NO: 886808 - RNA, 19 nt, Artificial Sequence
  Description of Artificial Sequence: Synthetic oligonucleotide
gaaucagugcuucggggcu

SEQ ID NO: 886809 - RNA, 19 nt, Artificial Sequence
  Description of Artificial Sequence: Synthetic oligonucleotide
uucguguuucuaacacauc

SEQ ID NO: 886810 - RNA, 19 nt, Artificial Sequence
  Description of Artificial Sequence: Synthetic oligonucleotide
aagcgggucaguaggggca

SEQ ID NO: 886811 - RNA, 19 nt, Artificial Sequence
  Description of Artificial Sequence: Synthetic oligonucleotide
aucugcgaaggcaaacuug

SEQ ID NO: 886812 - RNA, 19 nt, Artificial Sequence
  Description of Artificial Sequence: Synthetic oligonucleotide
aauaggugucagccucaau

SEQ ID NO: 886813 - RNA, 19 nt, Artificial Sequence
  Description of Artificial Sequence: Synthetic oligonucleotide
uaucugacccaggaugauc

SEQ ID NO: 886814 - RNA, 19 nt, Artificial Sequence
  Description of Artificial Sequence: Synthetic oligonucleotide
uggugcaacgcaggggcag

SEQ ID NO: 886815 - RNA, 19 nt, Artificial Sequence
  Description of Artificial Sequence: Synthetic oligonucleotide
gucauuuuccaagcggguc

SEQ ID NO: 886816 - RNA, 19 nt, Artificial Sequence
  Description of Artificial Sequence: Synthetic oligonucleotide
gcuucugaagcuaggauuc

SEQ ID NO: 886817 - RNA, 19 nt, Artificial Sequence
  Description of Artificial Sequence: Synthetic oligonucleotide
caggaugaucugaauagaa

SEQ ID NO: 886818 - RNA, 19 nt, Artificial Sequence
  Description of Artificial Sequence: Synthetic oligonucleotide
cugaacguauccacuggca

SEQ ID NO: 886819 - RNA, 19 nt, Artificial Sequence
  Description of Artificial Sequence: Synthetic oligonucleotide
guaucgcacuucgugcccg

SEQ ID NO: 886820 - RNA, 19 nt, Artificial Sequence
  Description of Artificial Sequence: Synthetic oligonucleotide
gaucuccaccauggaaggg

SEQ ID NO: 886821 - RNA, 19 nt, Artificial Sequence
  Description of Artificial Sequence: Synthetic oligonucleotide
cucacgaggaaagcagcac

SEQ ID NO: 886822 - RNA, 19 nt, Artificial Sequence
  Description of Artificial Sequence: Synthetic oligonucleotide
guguccuagugccugggca

SEQ ID NO: 886823 - RNA, 19 nt, Artificial Sequence
  Description of Artificial Sequence: Synthetic oligonucleotide
cuucggggcucauccgagg

SEQ ID NO: 886824 - RNA, 19 nt, Artificial Sequence
  Description of Artificial Sequence: Synthetic oligonucleotide
cacccauacagcaggccuc

SEQ ID NO: 886825 - RNA, 19 nt, Artificial Sequence
  Description of Artificial Sequence: Synthetic oligonucleotide
ggacucgcucaucaauccg

SEQ ID NO: 886826 - RNA, 19 nt, Artificial Sequence
  Description of Artificial Sequence: Synthetic oligonucleotide
aggucguuuauccccugaa

SEQ ID NO: 886827 - RNA, 19 nt, Artificial Sequence
  Description of Artificial Sequence: Synthetic oligonucleotide
caugcccuaucugacccag

SEQ ID NO: 886828 - RNA, 19 nt, Artificial Sequence
  Description of Artificial Sequence: Synthetic oligonucleotide
caguggguaacugagggaa

SEQ ID NO: 886829 - RNA, 19 nt, Artificial Sequence
  Description of Artificial Sequence: Synthetic oligonucleotide
guccccuacagucucugga

SEQ ID NO: 886830 - RNA, 19 nt, Artificial Sequence
  Description of Artificial Sequence: Synthetic oligonucleotide
acguccuccuggucuaugu

SEQ ID NO: 886831 - RNA, 19 nt, Artificial Sequence
  Description of Artificial Sequence: Synthetic oligonucleotide
cuuacacccagucaagcau

SEQ ID NO: 886832 - RNA, 19 nt, Artificial Sequence
  Description of Artificial Sequence: Synthetic oligonucleotide
ggaucuggcgauauguguc

SEQ ID NO: 886833 - RNA, 19 nt, Artificial Sequence
  Description of Artificial Sequence: Synthetic oligonucleotide
ggcauuuggcaaggaaggg

SEQ ID NO: 886834 - RNA, 19 nt, Artificial Sequence
  Description of Artificial Sequence: Synthetic oligonucleotide
auauggcccuacccuuuug

SEQ ID NO: 886835 - RNA, 19 nt, Artificial Sequence
  Description of Artificial Sequence: Synthetic oligonucleotide
ugcgugccccuuacccagg

SEQ ID NO: 886836 - RNA, 19 nt, Artificial Sequence
  Description of Artificial Sequence: Synthetic oligonucleotide
ccugaacguauccacuggc

SEQ ID NO: 886837 - RNA, 19 nt, Artificial Sequence
  Description of Artificial Sequence: Synthetic oligonucleotide
cugcgaaggcaaacuugag

SEQ ID NO: 886838 - RNA, 19 nt, Artificial Sequence
  Description of Artificial Sequence: Synthetic oligonucleotide
guaucucgucaaacugagg

SEQ ID NO: 886839 - RNA, 19 nt, Artificial Sequence
  Description of Artificial Sequence: Synthetic oligonucleotide
ggucguuuauccccugaac

SEQ ID NO: 886840 - RNA, 19 nt, Artificial Sequence
  Description of Artificial Sequence: Synthetic oligonucleotide
gguaucgcacuucgugccc

SEQ ID NO: 886841 - RNA, 19 nt, Artificial Sequence
  Description of Artificial Sequence: Synthetic oligonucleotide
ucggggcucauccgaggga

SEQ ID NO: 886842 - RNA, 19 nt, Artificial Sequence
  Description of Artificial Sequence: Synthetic oligonucleotide
uggguaacugagggaagaa

SEQ ID NO: 886843 - RNA, 19 nt, Artificial Sequence
  Description of Artificial Sequence: Synthetic oligonucleotide
aguggguaacugagggaag

SEQ ID NO: 886844 - RNA, 19 nt, Artificial Sequence
  Description of Artificial Sequence: Synthetic oligonucleotide
acucgcaaaugaagaccac

SEQ ID NO: 886845 - RNA, 19 nt, Artificial Sequence
  Description of Artificial Sequence: Synthetic oligonucleotide
cuauccugccaguucugga

SEQ ID NO: 886846 - RNA, 19 nt, Artificial Sequence
  Description of Artificial Sequence: Synthetic oligonucleotide
guggguaacugagggaaga

SEQ ID NO: 886847 - RNA, 19 nt, Artificial Sequence
  Description of Artificial Sequence: Synthetic oligonucleotide
agcacacauccugccuggc

SEQ ID NO: 886848 - RNA, 19 nt, Artificial Sequence
  Description of Artificial Sequence: Synthetic oligonucleotide
gcuuaaacgcaggacugug

SEQ ID NO: 886849 - RNA, 19 nt, Artificial Sequence
  Description of Artificial Sequence: Synthetic oligonucleotide
cagaucuauauggcccuac

SEQ ID NO: 886850 - RNA, 19 nt, Artificial Sequence
  Description of Artificial Sequence: Synthetic oligonucleotide
gggucaggaaggauagugc

SEQ ID NO: 886851 - RNA, 19 nt, Artificial Sequence
  Description of Artificial Sequence: Synthetic oligonucleotide
ccuaucugacccaggauga

SEQ ID NO: 886852 - RNA, 19 nt, Artificial Sequence
  Description of Artificial Sequence: Synthetic oligonucleotide
cucgucaaacugaggcuga

SEQ ID NO: 886853 - RNA, 19 nt, Artificial Sequence
  Description of Artificial Sequence: Synthetic oligonucleotide
uaucgcacuucgugcccgu

SEQ ID NO: 886854 - RNA, 19 nt, Artificial Sequence
  Description of Artificial Sequence: Synthetic oligonucleotide
cauagacugccugcacaac

SEQ ID NO: 886855 - RNA, 19 nt, Artificial Sequence
  Description of Artificial Sequence: Synthetic oligonucleotide
uucuuauaugaagcaucuu

SEQ ID NO: 886856 - RNA, 19 nt, Artificial Sequence
  Description of Artificial Sequence: Synthetic oligonucleotide
gaagcaccucugccggcac

SEQ ID NO: 886857 - RNA, 19 nt, Artificial Sequence
  Description of Artificial Sequence: Synthetic oligonucleotide
agcggaaggcaaacugcag

SEQ ID NO: 886858 - RNA, 19 nt, Artificial Sequence
  Description of Artificial Sequence: Synthetic oligonucleotide
ucgucaaacugaggcugac

SEQ ID NO: 886859 - RNA, 19 nt, Artificial Sequence
  Description of Artificial Sequence: Synthetic oligonucleotide
gaaaagccccucggguuca

SEQ ID NO: 886860 - RNA, 19 nt, Artificial Sequence
  Description of Artificial Sequence: Synthetic oligonucleotide
gugcuucggggcucauccg

SEQ ID NO: 886861 - RNA, 19 nt, Artificial Sequence
  Description of Artificial Sequence: Synthetic oligonucleotide
uacugucaccuuggguuga

SEQ ID NO: 886862 - RNA, 19 nt, Artificial Sequence
  Description of Artificial Sequence: Synthetic oligonucleotide
uccggcuuacaaguuccuc

SEQ ID NO: 886863 - RNA, 19 nt, Artificial Sequence
  Description of Artificial Sequence: Synthetic oligonucleotide
ccuuacccaggacaggcac

SEQ ID NO: 886864 - RNA, 19 nt, Artificial Sequence
  Description of Artificial Sequence: Synthetic oligonucleotide
cuggucuauguacucgcaa

SEQ ID NO: 886865 - RNA, 19 nt, Artificial Sequence
  Description of Artificial Sequence: Synthetic oligonucleotide
cccugaacguauccacugg

SEQ ID NO: 886866 - RNA, 19 nt, Artificial Sequence
  Description of Artificial Sequence: Synthetic oligonucleotide
aggcugacguccuggucau

SEQ ID NO: 886867 - RNA, 19 nt, Artificial Sequence
  Description of Artificial Sequence: Synthetic oligonucleotide
ggcuuaaguuaaccucaug

SEQ ID NO: 886868 - RNA, 19 nt, Artificial Sequence
  Description of Artificial Sequence: Synthetic oligonucleotide
cagccucaauguugcgaag

SEQ ID NO: 886869 - RNA, 19 nt, Artificial Sequence
  Description of Artificial Sequence: Synthetic oligonucleotide
gucggauagcccauauaaa

SEQ ID NO: 886870 - RNA, 19 nt, Artificial Sequence
  Description of Artificial Sequence: Synthetic oligonucleotide
aguuaaccucauggguccu

SEQ ID NO: 886871 - RNA, 19 nt, Artificial Sequence
  Description of Artificial Sequence: Synthetic oligonucleotide
ccccugaacguauccacug

SEQ ID NO: 886872 - RNA, 19 nt, Artificial Sequence
  Description of Artificial Sequence: Synthetic oligonucleotide
cugcuaggccacaccagga

SEQ ID NO: 886873 - RNA, 19 nt, Artificial Sequence
  Description of Artificial Sequence: Synthetic oligonucleotide
aucagugcuucggggcuca

SEQ ID NO: 886874 - RNA, 19 nt, Artificial Sequence
  Description of Artificial Sequence: Synthetic oligonucleotide
cggauagcccauauaaaca

SEQ ID NO: 886875 - RNA, 19 nt, Artificial Sequence
  Description of Artificial Sequence: Synthetic oligonucleotide
cgaagaacggagugaccag

SEQ ID NO: 886876 - RNA, 19 nt, Artificial Sequence
  Description of Artificial Sequence: Synthetic oligonucleotide
ggcagaucuauauggcccu

SEQ ID NO: 886877 - RNA, 19 nt, Artificial Sequence
  Description of Artificial Sequence: Synthetic oligonucleotide
aaagccgcagaggcaccuu

SEQ ID NO: 886878 - RNA, 19 nt, Artificial Sequence
  Description of Artificial Sequence: Synthetic oligonucleotide
ccuacccuuuugucugagg

SEQ ID NO: 886879 - RNA, 19 nt, Artificial Sequence
  Description of Artificial Sequence: Synthetic oligonucleotide
gguucacuucuuguaguga

SEQ ID NO: 886880 - RNA, 19 nt, Artificial Sequence
  Description of Artificial Sequence: Synthetic oligonucleotide
ucgugcccguccagauggc

SEQ ID NO: 886881 - RNA, 19 nt, Artificial Sequence
  Description of Artificial Sequence: Synthetic oligonucleotide
guuuauccccugaacguau

SEQ ID NO: 886882 - RNA, 19 nt, Artificial Sequence
  Description of Artificial Sequence: Synthetic oligonucleotide
ggucuauguacucgcaaau

SEQ ID NO: 886883 - RNA, 19 nt, Artificial Sequence
  Description of Artificial Sequence: Synthetic oligonucleotide
ccuuucgaaaaucuacugu

SEQ ID NO: 886884 - RNA, 19 nt, Artificial Sequence
  Description of Artificial Sequence: Synthetic oligonucleotide
cucauccgagggaugucaa

SEQ ID NO: 886885 - RNA, 19 nt, Artificial Sequence
  Description of Artificial Sequence: Synthetic oligonucleotide
accuuggguugaagaauca

SEQ ID NO: 886886 - RNA, 19 nt, Artificial Sequence
  Description of Artificial Sequence: Synthetic oligonucleotide
aucgcacuucgugcccguc

SEQ ID NO: 886887 - RNA, 19 nt, Artificial Sequence
  Description of Artificial Sequence: Synthetic oligonucleotide
ccaagcgggucaguagggg

SEQ ID NO: 886888 - RNA, 19 nt, Artificial Sequence
  Description of Artificial Sequence: Synthetic oligonucleotide
caggucguuuauccccuga

SEQ ID NO: 886889 - RNA, 19 nt, Artificial Sequence
  Description of Artificial Sequence: Synthetic oligonucleotide
cuauauggcccuacccuuu

SEQ ID NO: 886890 - RNA, 19 nt, Artificial Sequence
  Description of Artificial Sequence: Synthetic oligonucleotide
gcaacucuuggaaaucucu

SEQ ID NO: 886891 - RNA, 19 nt, Artificial Sequence
  Description of Artificial Sequence: Synthetic oligonucleotide
auccagcggaaggcaaacu

SEQ ID NO: 886892 - RNA, 19 nt, Artificial Sequence
  Description of Artificial Sequence: Synthetic oligonucleotide
gcuucggggcucauccgag

SEQ ID NO: 886893 - RNA, 19 nt, Artificial Sequence
  Description of Artificial Sequence: Synthetic oligonucleotide
gugucggauagcccauaua

SEQ ID NO: 886894 - RNA, 19 nt, Artificial Sequence
  Description of Artificial Sequence: Synthetic oligonucleotide
ccuagugccugggcagugg

SEQ ID NO: 886895 - RNA, 19 nt, Artificial Sequence
  Description of Artificial Sequence: Synthetic oligonucleotide
cacuucgugcccguccaga

SEQ ID NO: 886896 - RNA, 19 nt, Artificial Sequence
  Description of Artificial Sequence: Synthetic oligonucleotide
cucaucaauccggcuuaca

SEQ ID NO: 886897 - RNA, 19 nt, Artificial Sequence
  Description of Artificial Sequence: Synthetic oligonucleotide
cccguccagauggcgaugg

SEQ ID NO: 886898 - RNA, 19 nt, Artificial Sequence
  Description of Artificial Sequence: Synthetic oligonucleotide
caccaauaggugucagccu

SEQ ID NO: 886899 - RNA, 19 nt, Artificial Sequence
  Description of Artificial Sequence: Synthetic oligonucleotide
ccucaauguugcgaagcac

SEQ ID NO: 886900 - RNA, 19 nt, Artificial Sequence
  Description of Artificial Sequence: Synthetic oligonucleotide
ccaucucacgaggaaagca

SEQ ID NO: 886901 - RNA, 19 nt, Artificial Sequence
  Description of Artificial Sequence: Synthetic oligonucleotide
gagggaugucaauguggau

SEQ ID NO: 886902 - RNA, 19 nt, Artificial Sequence
  Description of Artificial Sequence: Synthetic oligonucleotide
ccuuuugucugagggguga

SEQ ID NO: 886903 - RNA, 19 nt, Artificial Sequence
  Description of Artificial Sequence: Synthetic oligonucleotide
gccccagguucacuucuug

SEQ ID NO: 886904 - RNA, 19 nt, Artificial Sequence
  Description of Artificial Sequence: Synthetic oligonucleotide
gcaucuguccagacaggga

SEQ ID NO: 886905 - RNA, 19 nt, Artificial Sequence
  Description of Artificial Sequence: Synthetic oligonucleotide
auggugcaacgcaggggca

SEQ ID NO: 886906 - RNA, 19 nt, Artificial Sequence
  Description of Artificial Sequence: Synthetic oligonucleotide
ccagugcucagcauuuugu

SEQ ID NO: 886907 - RNA, 19 nt, Artificial Sequence
  Description of Artificial Sequence: Synthetic oligonucleotide
cacuaguuugaggaagcau

SEQ ID NO: 886908 - RNA, 19 nt, Artificial Sequence
  Description of Artificial Sequence: Synthetic oligonucleotide
caucugcgaaggcaaacuu

SEQ ID NO: 886909 - RNA, 19 nt, Artificial Sequence
  Description of Artificial Sequence: Synthetic oligonucleotide
ggucauuuuccaagcgggu

SEQ ID NO: 886910 - RNA, 19 nt, Artificial Sequence
  Description of Artificial Sequence: Synthetic oligonucleotide
ccuggucuauguacucgca

SEQ ID NO: 886911 - RNA, 19 nt, Artificial Sequence
  Description of Artificial Sequence: Synthetic oligonucleotide
acguauccacuggcagggu

SEQ ID NO: 886912 - RNA, 19 nt, Artificial Sequence
  Description of Artificial Sequence: Synthetic oligonucleotide
gcuugcucaugcaccaaua

SEQ ID NO: 886913 - RNA, 19 nt, Artificial Sequence
  Description of Artificial Sequence: Synthetic oligonucleotide
ggugucggauagcccauau

SEQ ID NO: 886914 - RNA, 19 nt, Artificial Sequence
  Description of Artificial Sequence: Synthetic oligonucleotide
ccagcgucccuuacaccca

SEQ ID NO: 886915 - RNA, 19 nt, Artificial Sequence
  Description of Artificial Sequence: Synthetic oligonucleotide
guuaaccucauggguccuu

SEQ ID NO: 886916 - RNA, 19 nt, Artificial Sequence
  Description of Artificial Sequence: Synthetic oligonucleotide
gcucaucaauccggcuuac

SEQ ID NO: 886917 - RNA, 19 nt, Artificial Sequence
  Description of Artificial Sequence: Synthetic oligonucleotide
cuaucugacccaggaugau

SEQ ID NO: 886918 - RNA, 19 nt, Artificial Sequence
  Description of Artificial Sequence: Synthetic oligonucleotide
cccuacagguggccuggug

SEQ ID NO: 886919 - RNA, 19 nt, Artificial Sequence
  Description of Artificial Sequence: Synthetic oligonucleotide
gggcucauccgagggaugu

SEQ ID NO: 886920 - RNA, 19 nt, Artificial Sequence
  Description of Artificial Sequence: Synthetic oligonucleotide
gcugacguccuggucauuu

SEQ ID NO: 886921 - RNA, 19 nt, Artificial Sequence
  Description of Artificial Sequence: Synthetic oligonucleotide
ccaggucguuuauccccug

SEQ ID NO: 886922 - RNA, 19 nt, Artificial Sequence
  Description of Artificial Sequence: Synthetic oligonucleotide
cugagggaagaagccugcu

SEQ ID NO: 886923 - RNA, 19 nt, Artificial Sequence
  Description of Artificial Sequence: Synthetic oligonucleotide
agauggcgauggacucgcu

SEQ ID NO: 886924 - RNA, 19 nt, Artificial Sequence
  Description of Artificial Sequence: Synthetic oligonucleotide
cccuuacccaggacaggca

SEQ ID NO: 886925 - RNA, 19 nt, Artificial Sequence
  Description of Artificial Sequence: Synthetic oligonucleotide
cguuuauccccugaacgua

SEQ ID NO: 886926 - RNA, 19 nt, Artificial Sequence
  Description of Artificial Sequence: Synthetic oligonucleotide
ggcgauggacucgcucauc

SEQ ID NO: 886927 - RNA, 19 nt, Artificial Sequence
  Description of Artificial Sequence: Synthetic oligonucleotide
acggagugaccaggucguu

SEQ ID NO: 886928 - RNA, 19 nt, Artificial Sequence
  Description of Artificial Sequence: Synthetic oligonucleotide
ggggcucauccgagggaug

SEQ ID NO: 886929 - RNA, 19 nt, Artificial Sequence
  Description of Artificial Sequence: Synthetic oligonucleotide
ggugcaacgcaggggcagu

SEQ ID NO: 886930 - RNA, 19 nt, Artificial Sequence
  Description of Artificial Sequence: Synthetic oligonucleotide
cgaagcaccucugccggca

SEQ ID NO: 886931 - RNA, 19 nt, Artificial Sequence
  Description of Artificial Sequence: Synthetic oligonucleotide
cugccaugggccccagguu

SEQ ID NO: 886932 - RNA, 19 nt, Artificial Sequence
  Description of Artificial Sequence: Synthetic oligonucleotide
cacagaggccaggaugcuu

SEQ ID NO: 886933 - RNA, 19 nt, Artificial Sequence
  Description of Artificial Sequence: Synthetic oligonucleotide
gggcuuaaguuaaccucau

SEQ ID NO: 886934 - RNA, 19 nt, Artificial Sequence
  Description of Artificial Sequence: Synthetic oligonucleotide
cccgggcucucuuugguau

SEQ ID NO: 886935 - RNA, 19 nt, Artificial Sequence
  Description of Artificial Sequence: Synthetic oligonucleotide
gcccguccagauggcgaug

SEQ ID NO: 886936 - RNA, 19 nt, Artificial Sequence
  Description of Artificial Sequence: Synthetic oligonucleotide
cacuggcagggugucggau

SEQ ID NO: 886937 - RNA, 19 nt, Artificial Sequence
  Description of Artificial Sequence: Synthetic oligonucleotide
gggugucggauagcccaua

SEQ ID NO: 886938 - RNA, 19 nt, Artificial Sequence
  Description of Artificial Sequence: Synthetic oligonucleotide
ccguccagauggcgaugga

SEQ ID NO: 886939 - RNA, 19 nt, Artificial Sequence
  Description of Artificial Sequence: Synthetic oligonucleotide
cgggcucucuuugguaucu

SEQ ID NO: 886940 - RNA, 19 nt, Artificial Sequence
  Description of Artificial Sequence: Synthetic oligonucleotide
cggagugaccaggucguuu

SEQ ID NO: 886941 - RNA, 19 nt, Artificial Sequence
  Description of Artificial Sequence: Synthetic oligonucleotide
ggcugacguccuggucauu

SEQ ID NO: 886942 - RNA, 19 nt, Artificial Sequence
  Description of Artificial Sequence: Synthetic oligonucleotide
gaaaucaugucuuucacug

SEQ ID NO: 886943 - RNA, 19 nt, Artificial Sequence
  Description of Artificial Sequence: Synthetic oligonucleotide
ucauuauuccacaccaccg

SEQ ID NO: 886944 - RNA, 19 nt, Artificial Sequence
  Description of Artificial Sequence: Synthetic oligonucleotide
uaguguguaggauagauga

SEQ ID NO: 886945 - RNA, 19 nt, Artificial Sequence
  Description of Artificial Sequence: Synthetic oligonucleotide
gagucuuauauucugacac

SEQ ID NO: 886946 - RNA, 19 nt, Artificial Sequence
  Description of Artificial Sequence: Synthetic oligonucleotide
uguguaguguguaggauag

SEQ ID NO: 886947 - RNA, 19 nt, Artificial Sequence
  Description of Artificial Sequence: Synthetic oligonucleotide
ucaacaggcagcaucuuag

SEQ ID NO: 886948 - RNA, 19 nt, Artificial Sequence
  Description of Artificial Sequence: Synthetic oligonucleotide
guuguaguggcugagaaag

SEQ ID NO: 886949 - RNA, 19 nt, Artificial Sequence
  Description of Artificial Sequence: Synthetic oligonucleotide
gaucacauaagccaguguc

SEQ ID NO: 886950 - RNA, 19 nt, Artificial Sequence
  Description of Artificial Sequence: Synthetic oligonucleotide
aguuggaauaagcugcgcg

SEQ ID NO: 886951 - RNA, 19 nt, Artificial Sequence
  Description of Artificial Sequence: Synthetic oligonucleotide
ugcucauuauuccacacca

SEQ ID NO: 886952 - RNA, 19 nt, Artificial Sequence
  Description of Artificial Sequence: Synthetic oligonucleotide
ucagagcucgucacgagcg

SEQ ID NO: 886953 - RNA, 19 nt, Artificial Sequence
  Description of Artificial Sequence: Synthetic oligonucleotide
agggagaucacauaagcca

SEQ ID NO: 886954 - RNA, 19 nt, Artificial Sequence
  Description of Artificial Sequence: Synthetic oligonucleotide
ucgucaaaggaccaggugu

SEQ ID NO: 886955 - RNA, 19 nt, Artificial Sequence
  Description of Artificial Sequence: Synthetic oligonucleotide
uguccaguaggaguaaucg

SEQ ID NO: 886956 - RNA, 19 nt, Artificial Sequence
  Description of Artificial Sequence: Synthetic oligonucleotide
aggucgaugagaaaggugg

SEQ ID NO: 886957 - RNA, 19 nt, Artificial Sequence
  Description of Artificial Sequence: Synthetic oligonucleotide
aagaucucaaaacgcaggu

SEQ ID NO: 886958 - RNA, 19 nt, Artificial Sequence
  Description of Artificial Sequence: Synthetic oligonucleotide
gaugaucagaucaaucacc

SEQ ID NO: 886959 - RNA, 19 nt, Artificial Sequence
  Description of Artificial Sequence: Synthetic oligonucleotide
uuugccggcuccuucagag

SEQ ID NO: 886960 - RNA, 19 nt, Artificial Sequence
  Description of Artificial Sequence: Synthetic oligonucleotide
uuauuccacaccaccgagg

SEQ ID NO: 886961 - RNA, 19 nt, Artificial Sequence
  Description of Artificial Sequence: Synthetic oligonucleotide
uacuaagaaaccuuccuuc

SEQ ID NO: 886962 - RNA, 19 nt, Artificial Sequence
  Description of Artificial Sequence: Synthetic oligonucleotide
ugugucacugacauagcca

SEQ ID NO: 886963 - RNA, 19 nt, Artificial Sequence
  Description of Artificial Sequence: Synthetic oligonucleotide
ugcugaacaagacauggaa

SEQ ID NO: 886964 - RNA, 19 nt, Artificial Sequence
  Description of Artificial Sequence: Synthetic oligonucleotide
ugcacgugcaugaagcucu

SEQ ID NO: 886965 - RNA, 19 nt, Artificial Sequence
  Description of Artificial Sequence: Synthetic oligonucleotide
ucagcgaugagaagacuca

SEQ ID NO: 886966 - RNA, 19 nt, Artificial Sequence
  Description of Artificial Sequence: Synthetic oligonucleotide
auuauuccacaccaccgag

SEQ ID NO: 886967 - RNA, 19 nt, Artificial Sequence
  Description of Artificial Sequence: Synthetic oligonucleotide
aucacauaagccagugucc

SEQ ID NO: 886968 - RNA, 19 nt, Artificial Sequence
  Description of Artificial Sequence: Synthetic oligonucleotide
ugaguucuuggccucucgg

SEQ ID NO: 886969 - RNA, 19 nt, Artificial Sequence
  Description of Artificial Sequence: Synthetic oligonucleotide
aaaccuuccuucagggugg

SEQ ID NO: 886970 - RNA, 19 nt, Artificial Sequence
  Description of Artificial Sequence: Synthetic oligonucleotide
uguucagcccuguuccugg

SEQ ID NO: 886971 - RNA, 19 nt, Artificial Sequence
  Description of Artificial Sequence: Synthetic oligonucleotide
cauaccgggagucagacca

SEQ ID NO: 886972 - RNA, 19 nt, Artificial Sequence
  Description of Artificial Sequence: Synthetic oligonucleotide
aaugcugccuguauacaag

SEQ ID NO: 886973 - RNA, 19 nt, Artificial Sequence
  Description of Artificial Sequence: Synthetic oligonucleotide
guguguaggauagaugagg

SEQ ID NO: 886974 - RNA, 19 nt, Artificial Sequence
  Description of Artificial Sequence: Synthetic oligonucleotide
agcaccaagcagcuugcgc

SEQ ID NO: 886975 - RNA, 19 nt, Artificial Sequence
  Description of Artificial Sequence: Synthetic oligonucleotide
ucuuucacugcccuacuaa

SEQ ID NO: 886976 - RNA, 19 nt, Artificial Sequence
  Description of Artificial Sequence: Synthetic oligonucleotide
auagaugaggagaggcucc

SEQ ID NO: 886977 - RNA, 19 nt, Artificial Sequence
  Description of Artificial Sequence: Synthetic oligonucleotide
ugagucuuauauucugaca

SEQ ID NO: 886978 - RNA, 19 nt, Artificial Sequence
  Description of Artificial Sequence: Synthetic oligonucleotide
aaacccuucacagccacca

SEQ ID NO: 886979 - RNA, 19 nt, Artificial Sequence
  Description of Artificial Sequence: Synthetic oligonucleotide
uggguguuugucaaacaug

SEQ ID NO: 886980 - RNA, 19 nt, Artificial Sequence
  Description of Artificial Sequence: Synthetic oligonucleotide
acaaacccuucacagccac

SEQ ID NO: 886981 - RNA, 19 nt, Artificial Sequence
  Description of Artificial Sequence: Synthetic oligonucleotide
uuggaauaagcugcgcggg

SEQ ID NO: 886982 - RNA, 19 nt, Artificial Sequence
  Description of Artificial Sequence: Synthetic oligonucleotide
ucagaucaaucacccauga

SEQ ID NO: 886983 - RNA, 19 nt, Artificial Sequence
  Description of Artificial Sequence: Synthetic oligonucleotide
cuuucacugcccuacuaag

SEQ ID NO: 886984 - RNA, 19 nt, Artificial Sequence
  Description of Artificial Sequence: Synthetic oligonucleotide
cuugcaugcgcuuccggcc

SEQ ID NO: 886985 - RNA, 19 nt, Artificial Sequence
  Description of Artificial Sequence: Synthetic oligonucleotide
uucagagcucgucacgagc

SEQ ID NO: 886986 - RNA, 19 nt, Artificial Sequence
  Description of Artificial Sequence: Synthetic oligonucleotide
cuaagaaaccuuccuucag

SEQ ID NO: 886987 - RNA, 19 nt, Artificial Sequence
  Description of Artificial Sequence: Synthetic oligonucleotide
uucucagcgaugagaagac

SEQ ID NO: 886988 - RNA, 19 nt, Artificial Sequence
  Description of Artificial Sequence: Synthetic oligonucleotide
gaacaagacauggaagcug

SEQ ID NO: 886989 - RNA, 19 nt, Artificial Sequence
  Description of Artificial Sequence: Synthetic oligonucleotide
caaaggaccagguguaguc

SEQ ID NO: 886990 - RNA, 19 nt, Artificial Sequence
  Description of Artificial Sequence: Synthetic oligonucleotide
ucgaaguauggcugaagug

SEQ ID NO: 886991 - RNA, 19 nt, Artificial Sequence
  Description of Artificial Sequence: Synthetic oligonucleotide
guaaucggccuccaccagg

SEQ ID NO: 886992 - RNA, 19 nt, Artificial Sequence
  Description of Artificial Sequence: Synthetic oligonucleotide
gucgccacuccacagagug

SEQ ID NO: 886993 - RNA, 19 nt, Artificial Sequence
  Description of Artificial Sequence: Synthetic oligonucleotide
ugaggggaaaucaugucuu

SEQ ID NO: 886994 - RNA, 19 nt, Artificial Sequence
  Description of Artificial Sequence: Synthetic oligonucleotide
agucuuauauucugacacu

SEQ ID NO: 886995 - RNA, 19 nt, Artificial Sequence
  Description of Artificial Sequence: Synthetic oligonucleotide
gaugagaaagguggagugc

SEQ ID NO: 886996 - RNA, 19 nt, Artificial Sequence
  Description of Artificial Sequence: Synthetic oligonucleotide
gaucagaucaaucacccau

SEQ ID NO: 886997 - RNA, 19 nt, Artificial Sequence
  Description of Artificial Sequence: Synthetic oligonucleotide
cugacauagccaucguccc

SEQ ID NO: 886998 - RNA, 19 nt, Artificial Sequence
  Description of Artificial Sequence: Synthetic oligonucleotide
acacgagggacuucuguag

SEQ ID NO: 886999 - RNA, 19 nt, Artificial Sequence
  Description of Artificial Sequence: Synthetic oligonucleotide
ggaguaaucggccuccacc

SEQ ID NO: 887000 - RNA, 19 nt, Artificial Sequence
  Description of Artificial Sequence: Synthetic oligonucleotide
cucagcgaugagaagacuc

SEQ ID NO: 887001 - RNA, 19 nt, Artificial Sequence
  Description of Artificial Sequence: Synthetic oligonucleotide
aucaaucacccaugagggg

SEQ ID NO: 887002 - RNA, 19 nt, Artificial Sequence
  Description of Artificial Sequence: Synthetic oligonucleotide
caggguggacacaacagag

SEQ ID NO: 887003 - RNA, 19 nt, Artificial Sequence
  Description of Artificial Sequence: Synthetic oligonucleotide
uaaucggccuccaccaggu

SEQ ID NO: 887004 - RNA, 19 nt, Artificial Sequence
  Description of Artificial Sequence: Synthetic oligonucleotide
aaguuggaauaagcugcgc

SEQ ID NO: 887005 - RNA, 19 nt, Artificial Sequence
  Description of Artificial Sequence: Synthetic oligonucleotide
ugacacuggguguuuguca

SEQ ID NO: 887006 - RNA, 19 nt, Artificial Sequence
  Description of Artificial Sequence: Synthetic oligonucleotide
cuuggcgcaacuucaugac

SEQ ID NO: 887007 - RNA, 19 nt, Artificial Sequence
  Description of Artificial Sequence: Synthetic oligonucleotide
aguguuuggggcccuccuc

SEQ ID NO: 887008 - RNA, 19 nt, Artificial Sequence
  Description of Artificial Sequence: Synthetic oligonucleotide
uggcgcaacuucaugacau

SEQ ID NO: 887009 - RNA, 19 nt, Artificial Sequence
  Description of Artificial Sequence: Synthetic oligonucleotide
cuugcgcgcgccuugcagg

SEQ ID NO: 887010 - RNA, 19 nt, Artificial Sequence
  Description of Artificial Sequence: Synthetic oligonucleotide
gacacaacagagacugggc

SEQ ID NO: 887011 - RNA, 19 nt, Artificial Sequence
  Description of Artificial Sequence: Synthetic oligonucleotide
gaugucgucaaaggaccag

SEQ ID NO: 887012 - RNA, 19 nt, Artificial Sequence
  Description of Artificial Sequence: Synthetic oligonucleotide
gagugcaccaugggaaccg

SEQ ID NO: 887013 - RNA, 19 nt, Artificial Sequence
  Description of Artificial Sequence: Synthetic oligonucleotide
gcuauagagcccucugugg

SEQ ID NO: 887014 - RNA, 19 nt, Artificial Sequence
  Description of Artificial Sequence: Synthetic oligonucleotide
augucgucaaaggaccagg

SEQ ID NO: 887015 - RNA, 19 nt, Artificial Sequence
  Description of Artificial Sequence: Synthetic oligonucleotide
uguaguccccgcuccacca

SEQ ID NO: 887016 - RNA, 19 nt, Artificial Sequence
  Description of Artificial Sequence: Synthetic oligonucleotide
cauuauuccacaccaccga

SEQ ID NO: 887017 - RNA, 19 nt, Artificial Sequence
  Description of Artificial Sequence: Synthetic oligonucleotide
acgagggacuucuguaguc

SEQ ID NO: 887018 - RNA, 19 nt, Artificial Sequence
  Description of Artificial Sequence: Synthetic oligonucleotide
ugguguucauggcuuugcc

SEQ ID NO: 887019 - RNA, 19 nt, Artificial Sequence
  Description of Artificial Sequence: Synthetic oligonucleotide
ugcagcaugcguucccgcc

SEQ ID NO: 887020 - RNA, 19 nt, Artificial Sequence
  Description of Artificial Sequence: Synthetic oligonucleotide
auaagcugcgcgggagucc

SEQ ID NO: 887021 - RNA, 19 nt, Artificial Sequence
  Description of Artificial Sequence: Synthetic oligonucleotide
uguuguaguggcugagaaa

SEQ ID NO: 887022 - RNA, 19 nt, Artificial Sequence
  Description of Artificial Sequence: Synthetic oligonucleotide
uugcaugcgcuuccggccc

SEQ ID NO: 887023 - RNA, 19 nt, Artificial Sequence
  Description of Artificial Sequence: Synthetic oligonucleotide
uauagagcccucugugguc

SEQ ID NO: 887024 - RNA, 19 nt, Artificial Sequence
  Description of Artificial Sequence: Synthetic oligonucleotide
acauaagccaguguccagu

SEQ ID NO: 887025 - RNA, 19 nt, Artificial Sequence
  Description of Artificial Sequence: Synthetic oligonucleotide
ugucgucaaaggaccaggu

SEQ ID NO: 887026 - RNA, 19 nt, Artificial Sequence
  Description of Artificial Sequence: Synthetic oligonucleotide
gacacuggguguuugucaa

SEQ ID NO: 887027 - RNA, 19 nt, Artificial Sequence
  Description of Artificial Sequence: Synthetic oligonucleotide
ugcccuacuaagaaaccuu

SEQ ID NO: 887028 - RNA, 19 nt, Artificial Sequence
  Description of Artificial Sequence: Synthetic oligonucleotide
uuccuggcauacaguaagc

SEQ ID NO: 887029 - RNA, 19 nt, Artificial Sequence
  Description of Artificial Sequence: Synthetic oligonucleotide
ucacgagcggcgcugucca

SEQ ID NO: 887030 - RNA, 19 nt, Artificial Sequence
  Description of Artificial Sequence: Synthetic oligonucleotide
ugccggcuccuucagagcu

SEQ ID NO: 887031 - RNA, 19 nt, Artificial Sequence
  Description of Artificial Sequence: Synthetic oligonucleotide
accuccuuauugcacacau

SEQ ID NO: 887032 - RNA, 19 nt, Artificial Sequence
  Description of Artificial Sequence: Synthetic oligonucleotide
acugcccuacuaagaaacc

SEQ ID NO: 887033 - RNA, 19 nt, Artificial Sequence
  Description of Artificial Sequence: Synthetic oligonucleotide
acggggcacagccuuuucg

SEQ ID NO: 887034 - RNA, 19 nt, Artificial Sequence
  Description of Artificial Sequence: Synthetic oligonucleotide
uuggcgcaacuucaugaca

SEQ ID NO: 887035 - RNA, 19 nt, Artificial Sequence
  Description of Artificial Sequence: Synthetic oligonucleotide
aguaaucggccuccaccag

SEQ ID NO: 887036 - RNA, 19 nt, Artificial Sequence
  Description of Artificial Sequence: Synthetic oligonucleotide
ugugcacgcagcggcacgg

SEQ ID NO: 887037 - RNA, 19 nt, Artificial Sequence
  Description of Artificial Sequence: Synthetic oligonucleotide
uggagugcaccaugggaac

SEQ ID NO: 887038 - RNA, 19 nt, Artificial Sequence
  Description of Artificial Sequence: Synthetic oligonucleotide
guguucauggcuuugccgu

SEQ ID NO: 887039 - RNA, 19 nt, Artificial Sequence
  Description of Artificial Sequence: Synthetic oligonucleotide
aggaguaaucggccuccac

SEQ ID NO: 887040 - RNA, 19 nt, Artificial Sequence
  Description of Artificial Sequence: Synthetic oligonucleotide
cuggaagccgccuugcgca

SEQ ID NO: 887041 - RNA, 19 nt, Artificial Sequence
  Description of Artificial Sequence: Synthetic oligonucleotide
gagugguacaaacccuuca

SEQ ID NO: 887042 - RNA, 19 nt, Artificial Sequence
  Description of Artificial Sequence: Synthetic oligonucleotide
guaguguguaggauagaug

SEQ ID NO: 887043 - RNA, 19 nt, Artificial Sequence
  Description of Artificial Sequence: Synthetic oligonucleotide
uccggcccacauaaaugag

SEQ ID NO: 887044 - RNA, 19 nt, Artificial Sequence
  Description of Artificial Sequence: Synthetic oligonucleotide
agugagucuuauauucuga

SEQ ID NO: 887045 - RNA, 19 nt, Artificial Sequence
  Description of Artificial Sequence: Synthetic oligonucleotide
ggucauuccgcaccagaag

SEQ ID NO: 887046 - RNA, 19 nt, Artificial Sequence
  Description of Artificial Sequence: Synthetic oligonucleotide
aguguguaggauagaugag

SEQ ID NO: 887047 - RNA, 19 nt, Artificial Sequence
  Description of Artificial Sequence: Synthetic oligonucleotide
aaaaggcgcgcagguugcg

SEQ ID NO: 887048 - RNA, 19 nt, Artificial Sequence
  Description of Artificial Sequence: Synthetic oligonucleotide
acgucucuugaagaagauc

SEQ ID NO: 887049 - RNA, 19 nt, Artificial Sequence
  Description of Artificial Sequence: Synthetic oligonucleotide
aaacgcaggucauccucaa

SEQ ID NO: 887050 - RNA, 19 nt, Artificial Sequence
  Description of Artificial Sequence: Synthetic oligonucleotide
ucauuccgcaccagaaguu

SEQ ID NO: 887051 - RNA, 19 nt, Artificial Sequence
  Description of Artificial Sequence: Synthetic oligonucleotide
uugcgcgcgccuugcaggg

SEQ ID NO: 887052 - RNA, 19 nt, Artificial Sequence
  Description of Artificial Sequence: Synthetic oligonucleotide
gggagaucacauaagccag

SEQ ID NO: 887053 - RNA, 19 nt, Artificial Sequence
  Description of Artificial Sequence: Synthetic oligonucleotide
ggugaucaaguugucacug

SEQ ID NO: 887054 - RNA, 19 nt, Artificial Sequence
  Description of Artificial Sequence: Synthetic oligonucleotide
gucgucaaaggaccaggug

SEQ ID NO: 887055 - RNA, 19 nt, Artificial Sequence
  Description of Artificial Sequence: Synthetic oligonucleotide
agacgucucuugaagaaga

SEQ ID NO: 887056 - RNA, 19 nt, Artificial Sequence
  Description of Artificial Sequence: Synthetic oligonucleotide
accaccgaggucucugugu

SEQ ID NO: 887057 - RNA, 19 nt, Artificial Sequence
  Description of Artificial Sequence: Synthetic oligonucleotide
caggucgaugagaaaggug

SEQ ID NO: 887058 - RNA, 19 nt, Artificial Sequence
  Description of Artificial Sequence: Synthetic oligonucleotide
uuucggggugcuccacuug

SEQ ID NO: 887059 - RNA, 19 nt, Artificial Sequence
  Description of Artificial Sequence: Synthetic oligonucleotide
cuucagagcucgucacgag

SEQ ID NO: 887060 - RNA, 19 nt, Artificial Sequence
  Description of Artificial Sequence: Synthetic oligonucleotide
ggggcuuagcaccaagcag

SEQ ID NO: 887061 - RNA, 19 nt, Artificial Sequence
  Description of Artificial Sequence: Synthetic oligonucleotide
ugaguggucgcccguggua

SEQ ID NO: 887062 - RNA, 19 nt, Artificial Sequence
  Description of Artificial Sequence: Synthetic oligonucleotide
uucuguaguccccgcucca

SEQ ID NO: 887063 - RNA, 19 nt, Artificial Sequence
  Description of Artificial Sequence: Synthetic oligonucleotide
ucacacggggcacagccuu

SEQ ID NO: 887064 - RNA, 19 nt, Artificial Sequence
  Description of Artificial Sequence: Synthetic oligonucleotide
cacggaaaaggcgcgcagg

SEQ ID NO: 887065 - RNA, 19 nt, Artificial Sequence
  Description of Artificial Sequence: Synthetic oligonucleotide
gucauuccgcaccagaagu

SEQ ID NO: 887066 - RNA, 19 nt, Artificial Sequence
  Description of Artificial Sequence: Synthetic oligonucleotide
caccaagcagcuugcgcgc

SEQ ID NO: 887067 - RNA, 19 nt, Artificial Sequence
  Description of Artificial Sequence: Synthetic oligonucleotide
uuuugccggcuccuucaga

SEQ ID NO: 887068 - RNA, 19 nt, Artificial Sequence
  Description of Artificial Sequence: Synthetic oligonucleotide
cuguguaguguguaggaua

SEQ ID NO: 887069 - RNA, 19 nt, Artificial Sequence
  Description of Artificial Sequence: Synthetic oligonucleotide
ggaauaagcugcgcgggag

SEQ ID NO: 887070 - RNA, 19 nt, Artificial Sequence
  Description of Artificial Sequence: Synthetic oligonucleotide
ugggaaccgcgaagcagcc

SEQ ID NO: 887071 - RNA, 19 nt, Artificial Sequence
  Description of Artificial Sequence: Synthetic oligonucleotide
ucauaccgggagucagacc

SEQ ID NO: 887072 - RNA, 19 nt, Artificial Sequence
  Description of Artificial Sequence: Synthetic oligonucleotide
uuuucggggugcuccacuu

SEQ ID NO: 887073 - RNA, 19 nt, Artificial Sequence
  Description of Artificial Sequence: Synthetic oligonucleotide
guggagugcaccaugggaa

SEQ ID NO: 887074 - RNA, 19 nt, Artificial Sequence
  Description of Artificial Sequence: Synthetic oligonucleotide
ccucacacggggcacagcc

SEQ ID NO: 887075 - RNA, 19 nt, Artificial Sequence
  Description of Artificial Sequence: Synthetic oligonucleotide
ugugaaggcuuggccucgg

SEQ ID NO: 887076 - RNA, 19 nt, Artificial Sequence
  Description of Artificial Sequence: Synthetic oligonucleotide
acagagugguacaaacccu

SEQ ID NO: 887077 - RNA, 19 nt, Artificial Sequence
  Description of Artificial Sequence: Synthetic oligonucleotide
uccacggaaaaggcgcgca

SEQ ID NO: 887078 - RNA, 19 nt, Artificial Sequence
  Description of Artificial Sequence: Synthetic oligonucleotide
gguggagugcaccauggga

SEQ ID NO: 887079 - RNA, 19 nt, Artificial Sequence
  Description of Artificial Sequence: Synthetic oligonucleotide
ugcgcgggaguccagcauu

SEQ ID NO: 887080 - RNA, 19 nt, Artificial Sequence
  Description of Artificial Sequence: Synthetic oligonucleotide
gaagugagucuuauauucu

SEQ ID NO: 887081 - RNA, 19 nt, Artificial Sequence
  Description of Artificial Sequence: Synthetic oligonucleotide
cuauagagcccucuguggu

SEQ ID NO: 887082 - RNA, 19 nt, Artificial Sequence
  Description of Artificial Sequence: Synthetic oligonucleotide
ugucccgagcagacuucag

SEQ ID NO: 887083 - RNA, 19 nt, Artificial Sequence
  Description of Artificial Sequence: Synthetic oligonucleotide
gacauagccaucguccccu

SEQ ID NO: 887084 - RNA, 19 nt, Artificial Sequence
  Description of Artificial Sequence: Synthetic oligonucleotide
ugccuacguggcccuacag

SEQ ID NO: 887085 - RNA, 19 nt, Artificial Sequence
  Description of Artificial Sequence: Synthetic oligonucleotide
cacgcagcggcacgggcag

SEQ ID NO: 887086 - RNA, 19 nt, Artificial Sequence
  Description of Artificial Sequence: Synthetic oligonucleotide
gucacgagcggcgcugucc

SEQ ID NO: 887087 - RNA, 19 nt, Artificial Sequence
  Description of Artificial Sequence: Synthetic oligonucleotide
ggacugaagcacaucugag

SEQ ID NO: 887088 - RNA, 19 nt, Artificial Sequence
  Description of Artificial Sequence: Synthetic oligonucleotide
ccggcccacauaaaugagg

SEQ ID NO: 887089 - RNA, 19 nt, Artificial Sequence
  Description of Artificial Sequence: Synthetic oligonucleotide
gugucaggguuggugauca

SEQ ID NO: 887090 - RNA, 19 nt, Artificial Sequence
  Description of Artificial Sequence: Synthetic oligonucleotide
ugccuguuugcaggagaag

SEQ ID NO: 887091 - RNA, 19 nt, Artificial Sequence
  Description of Artificial Sequence: Synthetic oligonucleotide
aggaccagguguagucagg

SEQ ID NO: 887092 - RNA, 19 nt, Artificial Sequence
  Description of Artificial Sequence: Synthetic oligonucleotide
guuugcaggagaaggcaaa

SEQ ID NO: 887093 - RNA, 19 nt, Artificial Sequence
  Description of Artificial Sequence: Synthetic oligonucleotide
aggcaagcaugugaaggcu

SEQ ID NO: 887094 - RNA, 19 nt, Artificial Sequence
  Description of Artificial Sequence: Synthetic oligonucleotide
ucugccuacguggcccuac

SEQ ID NO: 887095 - RNA, 19 nt, Artificial Sequence
  Description of Artificial Sequence: Synthetic oligonucleotide
acgggcaggaagccauaca

SEQ ID NO: 887096 - RNA, 19 nt, Artificial Sequence
  Description of Artificial Sequence: Synthetic oligonucleotide
cacuugcaugcgcuuccgg

SEQ ID NO: 887097 - RNA, 19 nt, Artificial Sequence
  Description of Artificial Sequence: Synthetic oligonucleotide
ggcccuacaguuucaggca

SEQ ID NO: 887098 - RNA, 19 nt, Artificial Sequence
  Description of Artificial Sequence: Synthetic oligonucleotide
caagcagcuugcgcgcgcc

SEQ ID NO: 887099 - RNA, 19 nt, Artificial Sequence
  Description of Artificial Sequence: Synthetic oligonucleotide
cauaagccaguguccagua

SEQ ID NO: 887100 - RNA, 19 nt, Artificial Sequence
  Description of Artificial Sequence: Synthetic oligonucleotide
acaccaccgaggucucugu

SEQ ID NO: 887101 - RNA, 19 nt, Artificial Sequence
  Description of Artificial Sequence: Synthetic oligonucleotide
caucguccccuguguagug

SEQ ID NO: 887102 - RNA, 19 nt, Artificial Sequence
  Description of Artificial Sequence: Synthetic oligonucleotide
accaagcagcuugcgcgcg

SEQ ID NO: 887103 - RNA, 19 nt, Artificial Sequence
  Description of Artificial Sequence: Synthetic oligonucleotide
ucgcccgugguaggggucc

SEQ ID NO: 887104 - RNA, 19 nt, Artificial Sequence
  Description of Artificial Sequence: Synthetic oligonucleotide
cagcgccugcuguucacgc

SEQ ID NO: 887105 - RNA, 19 nt, Artificial Sequence
  Description of Artificial Sequence: Synthetic oligonucleotide
aucucaaaacgcaggucau

SEQ ID NO: 887106 - RNA, 19 nt, Artificial Sequence
  Description of Artificial Sequence: Synthetic oligonucleotide
cucgucacgagcggcgcug

SEQ ID NO: 887107 - RNA, 19 nt, Artificial Sequence
  Description of Artificial Sequence: Synthetic oligonucleotide
ucucagcgaugagaagacu

SEQ ID NO: 887108 - RNA, 19 nt, Artificial Sequence
  Description of Artificial Sequence: Synthetic oligonucleotide
guguccaguaggaguaauc

SEQ ID NO: 887109 - RNA, 19 nt, Artificial Sequence
  Description of Artificial Sequence: Synthetic oligonucleotide
cugcacgugcaugaagcuc

SEQ ID NO: 887110 - RNA, 19 nt, Artificial Sequence
  Description of Artificial Sequence: Synthetic oligonucleotide
ggcgcaacuucaugacaug

SEQ ID NO: 887111 - RNA, 19 nt, Artificial Sequence
  Description of Artificial Sequence: Synthetic oligonucleotide
gcgccuugcagggagauca

SEQ ID NO: 887112 - RNA, 19 nt, Artificial Sequence
  Description of Artificial Sequence: Synthetic oligonucleotide
augucccgagcagacuuca

SEQ ID NO: 887113 - RNA, 19 nt, Artificial Sequence
  Description of Artificial Sequence: Synthetic oligonucleotide
ucuuagccaggggcuuagc

SEQ ID NO: 887114 - RNA, 19 nt, Artificial Sequence
  Description of Artificial Sequence: Synthetic oligonucleotide
gcuugcgcgcgccuugcag

SEQ ID NO: 887115 - RNA, 19 nt, Artificial Sequence
  Description of Artificial Sequence: Synthetic oligonucleotide
uaccgggagucagaccagu

SEQ ID NO: 887116 - RNA, 19 nt, Artificial Sequence
  Description of Artificial Sequence: Synthetic oligonucleotide
cuacaguuucaggcaagca

SEQ ID NO: 887117 - RNA, 19 nt, Artificial Sequence
  Description of Artificial Sequence: Synthetic oligonucleotide
ucccgccuucggaugggga

SEQ ID NO: 887118 - RNA, 19 nt, Artificial Sequence
  Description of Artificial Sequence: Synthetic oligonucleotide
auaccgggagucagaccag

SEQ ID NO: 887119 - RNA, 19 nt, Artificial Sequence
  Description of Artificial Sequence: Synthetic oligonucleotide
caagacauggaagcugccu

SEQ ID NO: 887120 - RNA, 19 nt, Artificial Sequence
  Description of Artificial Sequence: Synthetic oligonucleotide
cuccacggaaaaggcgcgc

SEQ ID NO: 887121 - RNA, 19 nt, Artificial Sequence
  Description of Artificial Sequence: Synthetic oligonucleotide
gaacugggacagcugcacu

SEQ ID NO: 887122 - RNA, 19 nt, Artificial Sequence
  Description of Artificial Sequence: Synthetic oligonucleotide
gugaaggcuuggccucggc

SEQ ID NO: 887123 - RNA, 19 nt, Artificial Sequence
  Description of Artificial Sequence: Synthetic oligonucleotide
gcgcaacuucaugacaugc

SEQ ID NO: 887124 - RNA, 19 nt, Artificial Sequence
  Description of Artificial Sequence: Synthetic oligonucleotide
ugcgcaggucgaugagaaa

SEQ ID NO: 887125 - RNA, 19 nt, Artificial Sequence
  Description of Artificial Sequence: Synthetic oligonucleotide
gagcggcgcuguccagugg

SEQ ID NO: 887126 - RNA, 19 nt, Artificial Sequence
  Description of Artificial Sequence: Synthetic oligonucleotide
aucguccccuguguagugu

SEQ ID NO: 887127 - RNA, 19 nt, Artificial Sequence
  Description of Artificial Sequence: Synthetic oligonucleotide
acccaugaggggaaaucau

SEQ ID NO: 887128 - RNA, 19 nt, Artificial Sequence
  Description of Artificial Sequence: Synthetic oligonucleotide
gucuuucacugcccuacua

SEQ ID NO: 887129 - RNA, 19 nt, Artificial Sequence
  Description of Artificial Sequence: Synthetic oligonucleotide
acgagcggcgcuguccagu

SEQ ID NO: 887130 - RNA, 19 nt, Artificial Sequence
  Description of Artificial Sequence: Synthetic oligonucleotide
cgcgaagcagccucugcgg

SEQ ID NO: 887131 - RNA, 19 nt, Artificial Sequence
  Description of Artificial Sequence: Synthetic oligonucleotide
gcuccacggaaaaggcgcg

SEQ ID NO: 887132 - RNA, 19 nt, Artificial Sequence
  Description of Artificial Sequence: Synthetic oligonucleotide
accaguguuuggggcccuc

SEQ ID NO: 887133 - RNA, 19 nt, Artificial Sequence
  Description of Artificial Sequence: Synthetic oligonucleotide
cccuacaguuucaggcaag

SEQ ID NO: 887134 - RNA, 19 nt, Artificial Sequence
  Description of Artificial Sequence: Synthetic oligonucleotide
ggggugcgcuuguaguagc

SEQ ID NO: 887135 - RNA, 19 nt, Artificial Sequence
  Description of Artificial Sequence: Synthetic oligonucleotide
ccaaucucucaguguucag

SEQ ID NO: 887136 - RNA, 19 nt, Artificial Sequence
  Description of Artificial Sequence: Synthetic oligonucleotide
ggccgcuuggcgcaacuuc

SEQ ID NO: 887137 - RNA, 19 nt, Artificial Sequence
  Description of Artificial Sequence: Synthetic oligonucleotide
agccaucguccccugugua

SEQ ID NO: 887138 - RNA, 19 nt, Artificial Sequence
  Description of Artificial Sequence: Synthetic oligonucleotide
cgagggacuucuguagucc

SEQ ID NO: 887139 - RNA, 19 nt, Artificial Sequence
  Description of Artificial Sequence: Synthetic oligonucleotide
gcccuacuaagaaaccuuc

SEQ ID NO: 887140 - RNA, 19 nt, Artificial Sequence
  Description of Artificial Sequence: Synthetic oligonucleotide
ugucaggguuggugaucaa

SEQ ID NO: 887141 - RNA, 19 nt, Artificial Sequence
  Description of Artificial Sequence: Synthetic oligonucleotide
cugccugcuauagagcccu

SEQ ID NO: 887142 - RNA, 19 nt, Artificial Sequence
  Description of Artificial Sequence: Synthetic oligonucleotide
gaccagguguagucagggu

SEQ ID NO: 887143 - RNA, 19 nt, Artificial Sequence
  Description of Artificial Sequence: Synthetic oligonucleotide
accgggagucagaccagug

SEQ ID NO: 887144 - RNA, 19 nt, Artificial Sequence
  Description of Artificial Sequence: Synthetic oligonucleotide
gcgcuuccggcccacauaa

SEQ ID NO: 887145 - RNA, 19 nt, Artificial Sequence
  Description of Artificial Sequence: Synthetic oligonucleotide
aagccgccuugcgcagguc

SEQ ID NO: 887146 - RNA, 19 nt, Artificial Sequence
  Description of Artificial Sequence: Synthetic oligonucleotide
gcccaucuugucugcaguc

SEQ ID NO: 887147 - RNA, 19 nt, Artificial Sequence
  Description of Artificial Sequence: Synthetic oligonucleotide
ccacggaaaaggcgcgcag

SEQ ID NO: 887148 - RNA, 19 nt, Artificial Sequence
  Description of Artificial Sequence: Synthetic oligonucleotide
cagcuugcgcgcgccuugc

SEQ ID NO: 887149 - RNA, 19 nt, Artificial Sequence
  Description of Artificial Sequence: Synthetic oligonucleotide
ucgucacgagcggcgcugu

SEQ ID NO: 887150 - RNA, 19 nt, Artificial Sequence
  Description of Artificial Sequence: Synthetic oligonucleotide
gcuuccggcccacauaaau

SEQ ID NO: 887151 - RNA, 19 nt, Artificial Sequence
  Description of Artificial Sequence: Synthetic oligonucleotide
gguugaucaugaagaccuc

SEQ ID NO: 887152 - RNA, 19 nt, Artificial Sequence
  Description of Artificial Sequence: Synthetic oligonucleotide
gccggucgccacuccacag

SEQ ID NO: 887153 - RNA, 19 nt, Artificial Sequence
  Description of Artificial Sequence: Synthetic oligonucleotide
agcuugcgcgcgccuugca

SEQ ID NO: 887154 - RNA, 19 nt, Artificial Sequence
  Description of Artificial Sequence: Synthetic oligonucleotide
ccaagcagcuugcgcgcgc

SEQ ID NO: 887155 - RNA, 19 nt, Artificial Sequence
  Description of Artificial Sequence: Synthetic oligonucleotide
gccgcuuggcgcaacuuca

SEQ ID NO: 887156 - RNA, 19 nt, Artificial Sequence
  Description of Artificial Sequence: Synthetic oligonucleotide
cugccuacguggcccuaca

SEQ ID NO: 887157 - RNA, 19 nt, Artificial Sequence
  Description of Artificial Sequence: Synthetic oligonucleotide
gucccgccuucggaugggg

SEQ ID NO: 887158 - RNA, 19 nt, Artificial Sequence
  Description of Artificial Sequence: Synthetic oligonucleotide
gggugcgcuuguaguagcc

SEQ ID NO: 887159 - RNA, 19 nt, Artificial Sequence
  Description of Artificial Sequence: Synthetic oligonucleotide
ccuacguggcccuacaguu

SEQ ID NO: 887160 - RNA, 19 nt, Artificial Sequence
  Description of Artificial Sequence: Synthetic oligonucleotide
agcaugcguucccgccggu

SEQ ID NO: 887161 - RNA, 19 nt, Artificial Sequence
  Description of Artificial Sequence: Synthetic oligonucleotide
cacgagcggcgcuguccag

SEQ ID NO: 887162 - RNA, 19 nt, Artificial Sequence
  Description of Artificial Sequence: Synthetic oligonucleotide
guguaguguguaggauaga

SEQ ID NO: 887163 - RNA, 19 nt, Artificial Sequence
  Description of Artificial Sequence: Synthetic oligonucleotide
cacggggcacagccuuuuc

SEQ ID NO: 887164 - RNA, 19 nt, Artificial Sequence
  Description of Artificial Sequence: Synthetic oligonucleotide
ugccugcuauagagcccuc

SEQ ID NO: 887165 - RNA, 19 nt, Artificial Sequence
  Description of Artificial Sequence: Synthetic oligonucleotide
gccuacguggcccuacagu

SEQ ID NO: 887166 - RNA, 19 nt, Artificial Sequence
  Description of Artificial Sequence: Synthetic oligonucleotide
acacggggcacagccuuuu

SEQ ID NO: 887167 - RNA, 19 nt, Artificial Sequence
  Description of Artificial Sequence: Synthetic oligonucleotide
gcaccaugggaaccgcgaa

SEQ ID NO: 887168 - RNA, 19 nt, Artificial Sequence
  Description of Artificial Sequence: Synthetic oligonucleotide
ccaguguuuggggcccucc

SEQ ID NO: 887169 - RNA, 19 nt, Artificial Sequence
  Description of Artificial Sequence: Synthetic oligonucleotide
ggucccgccuucggauggg

SEQ ID NO: 887170 - RNA, 19 nt, Artificial Sequence
  Description of Artificial Sequence: Synthetic oligonucleotide
cuacguggcccuacaguuu

SEQ ID NO: 887171 - RNA, 19 nt, Artificial Sequence
  Description of Artificial Sequence: Synthetic oligonucleotide
gcggucccgccuucggaug

SEQ ID NO: 887172 - RNA, 19 nt, Artificial Sequence
  Description of Artificial Sequence: Synthetic oligonucleotide
gaaccgcgaagcagccucu

SEQ ID NO: 887173 - RNA, 19 nt, Artificial Sequence
  Description of Artificial Sequence: Synthetic oligonucleotide
cccacaugucccgagcaga

SEQ ID NO: 887174 - RNA, 19 nt, Artificial Sequence
  Description of Artificial Sequence: Synthetic oligonucleotide
ugcgcgcgccuugcaggga

SEQ ID NO: 887175 - RNA, 19 nt, Artificial Sequence
  Description of Artificial Sequence: Synthetic oligonucleotide
cgagcggcgcuguccagug

SEQ ID NO: 887176 - RNA, 19 nt, Artificial Sequence
  Description of Artificial Sequence: Synthetic oligonucleotide
acgcaucuucugggacuug

SEQ ID NO: 887177 - RNA, 19 nt, Artificial Sequence
  Description of Artificial Sequence: Synthetic oligonucleotide
cagccuuuucggggugcuc

SEQ ID NO: 887178 - RNA, 19 nt, Artificial Sequence
  Description of Artificial Sequence: Synthetic oligonucleotide
cggucccgccuucggaugg

SEQ ID NO: 887179 - RNA, 19 nt, Artificial Sequence
  Description of Artificial Sequence: Synthetic oligonucleotide
ccgccuucggauggggaug

SEQ ID NO: 887180 - RNA, 19 nt, Artificial Sequence
  Description of Artificial Sequence: Synthetic oligonucleotide
gcaggucgaugagaaaggu

SEQ ID NO: 887181 - RNA, 19 nt, Artificial Sequence
  Description of Artificial Sequence: Synthetic oligonucleotide
acguggcccuacaguuuca

SEQ ID NO: 887182 - RNA, 19 nt, Artificial Sequence
  Description of Artificial Sequence: Synthetic oligonucleotide
cguggcccuacaguuucag

SEQ ID NO: 887183 - RNA, 19 nt, Artificial Sequence
  Description of Artificial Sequence: Synthetic oligonucleotide
cggcccacauaaaugaggu

SEQ ID NO: 887184 - RNA, 19 nt, Artificial Sequence
  Description of Artificial Sequence: Synthetic oligonucleotide
cacgcaucuucugggacuu

SEQ ID NO: 887185 - RNA, 19 nt, Artificial Sequence
  Description of Artificial Sequence: Synthetic oligonucleotide
gucgcccgugguagggguc

SEQ ID NO: 887186 - RNA, 19 nt, Artificial Sequence
  Description of Artificial Sequence: Synthetic oligonucleotide
gcgcgggaguccagcauug

SEQ ID NO: 887187 - RNA, 19 nt, Artificial Sequence
  Description of Artificial Sequence: Synthetic oligonucleotide
gcgcgcagguugcggggag

SEQ ID NO: 887188 - RNA, 19 nt, Artificial Sequence
  Description of Artificial Sequence: Synthetic oligonucleotide
ggucgcccgugguaggggu

SEQ ID NO: 887189 - RNA, 19 nt, Artificial Sequence
  Description of Artificial Sequence: Synthetic oligonucleotide
gcgccugcuguucacgcau

SEQ ID NO: 887190 - RNA, 19 nt, Artificial Sequence
  Description of Artificial Sequence: Synthetic oligonucleotide
gcaugcguucccgccgguc

SEQ ID NO: 887191 - RNA, 19 nt, Artificial Sequence
  Description of Artificial Sequence: Synthetic oligonucleotide
cagucuuaaccugcucauu

SEQ ID NO: 887192 - RNA, 19 nt, Artificial Sequence
  Description of Artificial Sequence: Synthetic oligonucleotide
gggagucagaccaguguuu

SEQ ID NO: 887193 - RNA, 19 nt, Artificial Sequence
  Description of Artificial Sequence: Synthetic oligonucleotide
caugcgcuuccggcccaca

SEQ ID NO: 887194 - RNA, 19 nt, Artificial Sequence
  Description of Artificial Sequence: Synthetic oligonucleotide
gaccaguguuuggggcccu

SEQ ID NO: 887195 - RNA, 19 nt, Artificial Sequence
  Description of Artificial Sequence: Synthetic oligonucleotide
cacacggggcacagccuuu

SEQ ID NO: 887196 - RNA, 19 nt, Artificial Sequence
  Description of Artificial Sequence: Synthetic oligonucleotide
cgcgggaguccagcauugg

SEQ ID NO: 887197 - RNA, 19 nt, Artificial Sequence
  Description of Artificial Sequence: Synthetic oligonucleotide
ccuguguaguguguaggau

SEQ ID NO: 887198 - RNA, 19 nt, Artificial Sequence
  Description of Artificial Sequence: Synthetic oligonucleotide
cccgccuucggauggggau

SEQ ID NO: 887199 - RNA, 19 nt, Artificial Sequence
  Description of Artificial Sequence: Synthetic oligonucleotide
gccugcuauagagcccucu

SEQ ID NO: 887200 - RNA, 19 nt, Artificial Sequence
  Description of Artificial Sequence: Synthetic oligonucleotide
gccucugcggucccgccuu

SEQ ID NO: 887201 - RNA, 19 nt, Artificial Sequence
  Description of Artificial Sequence: Synthetic oligonucleotide
gcucgucacgagcggcgcu

SEQ ID NO: 887202 - RNA, 19 nt, Artificial Sequence
  Description of Artificial Sequence: Synthetic oligonucleotide
cgccuugcgcaggucgaug

SEQ ID NO: 887203 - RNA, 19 nt, Artificial Sequence
  Description of Artificial Sequence: Synthetic oligonucleotide
ccggucccgccuccucuuc

SEQ ID NO: 887204 - RNA, 19 nt, Artificial Sequence
  Description of Artificial Sequence: Synthetic oligonucleotide
gucugccuacguggcccua

SEQ ID NO: 887205 - RNA, 19 nt, Artificial Sequence
  Description of Artificial Sequence: Synthetic oligonucleotide
ccucugcggucccgccuuc

SEQ ID NO: 887206 - RNA, 19 nt, Artificial Sequence
  Description of Artificial Sequence: Synthetic oligonucleotide
ggucgccacuccacagagu

SEQ ID NO: 887207 - RNA, 19 nt, Artificial Sequence
  Description of Artificial Sequence: Synthetic oligonucleotide
gccaggggcuuagcaccaa

SEQ ID NO: 887208 - RNA, 19 nt, Artificial Sequence
  Description of Artificial Sequence: Synthetic oligonucleotide
cgucacgagcggcgcuguc

SEQ ID NO: 887209 - RNA, 19 nt, Artificial Sequence
  Description of Artificial Sequence: Synthetic oligonucleotide
ccgccggucccgccuccuc

SEQ ID NO: 887210 - RNA, 19 nt, Artificial Sequence
  Description of Artificial Sequence: Synthetic oligonucleotide
ccgcuuggcgcaacuucau

SEQ ID NO: 887211 - RNA, 19 nt, Artificial Sequence
  Description of Artificial Sequence: Synthetic oligonucleotide
ccgaggucucugugucacu

SEQ ID NO: 887212 - RNA, 19 nt, Artificial Sequence
  Description of Artificial Sequence: Synthetic oligonucleotide
cgcgcagguugcggggaga

SEQ ID NO: 887213 - RNA, 19 nt, Artificial Sequence
  Description of Artificial Sequence: Synthetic oligonucleotide
gggccgcuuggcgcaacuu

SEQ ID NO: 887214 - RNA, 19 nt, Artificial Sequence
  Description of Artificial Sequence: Synthetic oligonucleotide
aauaaccccaguuuuaugg

SEQ ID NO: 887215 - RNA, 19 nt, Artificial Sequence
  Description of Artificial Sequence: Synthetic oligonucleotide
agaaucucaauccuuaucc

SEQ ID NO: 887216 - RNA, 19 nt, Artificial Sequence
  Description of Artificial Sequence: Synthetic oligonucleotide
ucaaauauaaugaagccuc

SEQ ID NO: 887217 - RNA, 19 nt, Artificial Sequence
  Description of Artificial Sequence: Synthetic oligonucleotide
aaaagcuaagggaaaaucc

SEQ ID NO: 887218 - RNA, 19 nt, Artificial Sequence
  Description of Artificial Sequence: Synthetic oligonucleotide
uuaaacuuaggaaagcuca

SEQ ID NO: 887219 - RNA, 19 nt, Artificial Sequence
  Description of Artificial Sequence: Synthetic oligonucleotide
aacuuaggaaagcucaggc

SEQ ID NO: 887220 - RNA, 19 nt, Artificial Sequence
  Description of Artificial Sequence: Synthetic oligonucleotide
uaagggaaaauccugacug

SEQ ID NO: 887221 - RNA, 19 nt, Artificial Sequence
  Description of Artificial Sequence: Synthetic oligonucleotide
aaggaaaugaccacagucc

SEQ ID NO: 887222 - RNA, 19 nt, Artificial Sequence
  Description of Artificial Sequence: Synthetic oligonucleotide
acauuauuuccucaugucc

SEQ ID NO: 887223 - RNA, 19 nt, Artificial Sequence
  Description of Artificial Sequence: Synthetic oligonucleotide
auaaagaugguacagugug

SEQ ID NO: 887224 - RNA, 19 nt, Artificial Sequence
  Description of Artificial Sequence: Synthetic oligonucleotide
agguaaaucuaauaacccc

SEQ ID NO: 887225 - RNA, 19 nt, Artificial Sequence
  Description of Artificial Sequence: Synthetic oligonucleotide
uuguauauuaaacugaauu

SEQ ID NO: 887226 - RNA, 19 nt, Artificial Sequence
  Description of Artificial Sequence: Synthetic oligonucleotide
uuauuaauuuauacaacug

SEQ ID NO: 887227 - RNA, 19 nt, Artificial Sequence
  Description of Artificial Sequence: Synthetic oligonucleotide
uuauuguauauuaaacuga

SEQ ID NO: 887228 - RNA, 19 nt, Artificial Sequence
  Description of Artificial Sequence: Synthetic oligonucleotide
aguguguuaagaaauuucc

SEQ ID NO: 887229 - RNA, 19 nt, Artificial Sequence
  Description of Artificial Sequence: Synthetic oligonucleotide
gaauuagagagguaaagac

SEQ ID NO: 887230 - RNA, 19 nt, Artificial Sequence
  Description of Artificial Sequence: Synthetic oligonucleotide
aauauucagaaugcacacc

SEQ ID NO: 887231 - RNA, 19 nt, Artificial Sequence
  Description of Artificial Sequence: Synthetic oligonucleotide
aaugcacaccccuguagcc

SEQ ID NO: 887232 - RNA, 19 nt, Artificial Sequence
  Description of Artificial Sequence: Synthetic oligonucleotide
aacccaagacuuuacuugg

SEQ ID NO: 887233 - RNA, 19 nt, Artificial Sequence
  Description of Artificial Sequence: Synthetic oligonucleotide
ucuuucaacaacacuacac

SEQ ID NO: 887234 - RNA, 19 nt, Artificial Sequence
  Description of Artificial Sequence: Synthetic oligonucleotide
ugugguuuaaucuuucaac

SEQ ID NO: 887235 - RNA, 19 nt, Artificial Sequence
  Description of Artificial Sequence: Synthetic oligonucleotide
ucuaucucccaacaaaaca

SEQ ID NO: 887236 - RNA, 19 nt, Artificial Sequence
  Description of Artificial Sequence: Synthetic oligonucleotide
ucauaaagaugguacagug

SEQ ID NO: 887237 - RNA, 19 nt, Artificial Sequence
  Description of Artificial Sequence: Synthetic oligonucleotide
gauaugagcuucaaugagg

SEQ ID NO: 887238 - RNA, 19 nt, Artificial Sequence
  Description of Artificial Sequence: Synthetic oligonucleotide
uguuaagaaauuucccaag

SEQ ID NO: 887239 - RNA, 19 nt, Artificial Sequence
  Description of Artificial Sequence: Synthetic oligonucleotide
uuuuccaauacagagugug

SEQ ID NO: 887240 - RNA, 19 nt, Artificial Sequence
  Description of Artificial Sequence: Synthetic oligonucleotide
uggguaaaagcuaagggaa

SEQ ID NO: 887241 - RNA, 19 nt, Artificial Sequence
  Description of Artificial Sequence: Synthetic oligonucleotide
auuagagagguaaagacug

SEQ ID NO: 887242 - RNA, 19 nt, Artificial Sequence
  Description of Artificial Sequence: Synthetic oligonucleotide
cuaucucccaacaaaacac

SEQ ID NO: 887243 - RNA, 19 nt, Artificial Sequence
  Description of Artificial Sequence: Synthetic oligonucleotide
aaaauuuccagcggcagcu

SEQ ID NO: 887244 - RNA, 19 nt, Artificial Sequence
  Description of Artificial Sequence: Synthetic oligonucleotide
uuugagacuagccuguauc

SEQ ID NO: 887245 - RNA, 19 nt, Artificial Sequence
  Description of Artificial Sequence: Synthetic oligonucleotide
gaauauucagaaugcacac

SEQ ID NO: 887246 - RNA, 19 nt, Artificial Sequence
  Description of Artificial Sequence: Synthetic oligonucleotide
uccuuauccacuagugagg

SEQ ID NO: 887247 - RNA, 19 nt, Artificial Sequence
  Description of Artificial Sequence: Synthetic oligonucleotide
aagucuguucccugagggc

SEQ ID NO: 887248 - RNA, 19 nt, Artificial Sequence
  Description of Artificial Sequence: Synthetic oligonucleotide
aauuagagagguaaagacu

SEQ ID NO: 887249 - RNA, 19 nt, Artificial Sequence
  Description of Artificial Sequence: Synthetic oligonucleotide
gaaaugaccacaguccugc

SEQ ID NO: 887250 - RNA, 19 nt, Artificial Sequence
  Description of Artificial Sequence: Synthetic oligonucleotide
uguagcccaucuaaguggg

SEQ ID NO: 887251 - RNA, 19 nt, Artificial Sequence
  Description of Artificial Sequence: Synthetic oligonucleotide
caugauccaaaucacuggg

SEQ ID NO: 887252 - RNA, 19 nt, Artificial Sequence
  Description of Artificial Sequence: Synthetic oligonucleotide
gugggcaaaauuuccagcg

SEQ ID NO: 887253 - RNA, 19 nt, Artificial Sequence
  Description of Artificial Sequence: Synthetic oligonucleotide
acgauuagggacuucagca

SEQ ID NO: 887254 - RNA, 19 nt, Artificial Sequence
  Description of Artificial Sequence: Synthetic oligonucleotide
gaggucucuaauuuaaaac

SEQ ID NO: 887255 - RNA, 19 nt, Artificial Sequence
  Description of Artificial Sequence: Synthetic oligonucleotide
aguacuggauaaauuaaac

SEQ ID NO: 887256 - RNA, 19 nt, Artificial Sequence
  Description of Artificial Sequence: Synthetic oligonucleotide
ucuuuagacaaaccuuuug

SEQ ID NO: 887257 - RNA, 19 nt, Artificial Sequence
  Description of Artificial Sequence: Synthetic oligonucleotide
agaauauucagaaugcaca

SEQ ID NO: 887258 - RNA, 19 nt, Artificial Sequence
  Description of Artificial Sequence: Synthetic oligonucleotide
uccuguucacuuauuaggc

SEQ ID NO: 887259 - RNA, 19 nt, Artificial Sequence
  Description of Artificial Sequence: Synthetic oligonucleotide
aaagcuaagggaaaauccu

SEQ ID NO: 887260 - RNA, 19 nt, Artificial Sequence
  Description of Artificial Sequence: Synthetic oligonucleotide
uuaaaaugcacagccagac

SEQ ID NO: 887261 - RNA, 19 nt, Artificial Sequence
  Description of Artificial Sequence: Synthetic oligonucleotide
agugggcaaaauuuccagc

SEQ ID NO: 887262 - RNA, 19 nt, Artificial Sequence
  Description of Artificial Sequence: Synthetic oligonucleotide
ucacuuauuaggcuggauc

SEQ ID NO: 887263 - RNA, 19 nt, Artificial Sequence
  Description of Artificial Sequence: Synthetic oligonucleotide
ggauaaauuaaacuuagga

SEQ ID NO: 887264 - RNA, 19 nt, Artificial Sequence
  Description of Artificial Sequence: Synthetic oligonucleotide
guaacgugaggccacagag

SEQ ID NO: 887265 - RNA, 19 nt, Artificial Sequence
  Description of Artificial Sequence: Synthetic oligonucleotide
auuugagucaccaagaguu

SEQ ID NO: 887266 - RNA, 19 nt, Artificial Sequence
  Description of Artificial Sequence: Synthetic oligonucleotide
aguucagacacacauacua

SEQ ID NO: 887267 - RNA, 19 nt, Artificial Sequence
  Description of Artificial Sequence: Synthetic oligonucleotide
auauacucacgauuacuuc

SEQ ID NO: 887268 - RNA, 19 nt, Artificial Sequence
  Description of Artificial Sequence: Synthetic oligonucleotide
ucacgauuacuucaaauau

SEQ ID NO: 887269 - RNA, 19 nt, Artificial Sequence
  Description of Artificial Sequence: Synthetic oligonucleotide
aauccuuauccacuaguga

SEQ ID NO: 887270 - RNA, 19 nt, Artificial Sequence
  Description of Artificial Sequence: Synthetic oligonucleotide
aaacuuaggaaagcucagg

SEQ ID NO: 887271 - RNA, 19 nt, Artificial Sequence
  Description of Artificial Sequence: Synthetic oligonucleotide
agauuccugaguuuugcuc

SEQ ID NO: 887272 - RNA, 19 nt, Artificial Sequence
  Description of Artificial Sequence: Synthetic oligonucleotide
uuuagacaaaccuuuugaa

SEQ ID NO: 887273 - RNA, 19 nt, Artificial Sequence
  Description of Artificial Sequence: Synthetic oligonucleotide
agggguagguguuugacag

SEQ ID NO: 887274 - RNA, 19 nt, Artificial Sequence
  Description of Artificial Sequence: Synthetic oligonucleotide
gauuagggacuucagcaag

SEQ ID NO: 887275 - RNA, 19 nt, Artificial Sequence
  Description of Artificial Sequence: Synthetic oligonucleotide
uaucuuuucagaugacucu

SEQ ID NO: 887276 - RNA, 19 nt, Artificial Sequence
  Description of Artificial Sequence: Synthetic oligonucleotide
cauuaggugacgguaaugc

SEQ ID NO: 887277 - RNA, 19 nt, Artificial Sequence
  Description of Artificial Sequence: Synthetic oligonucleotide
acuuggguuugucucagcg

SEQ ID NO: 887278 - RNA, 19 nt, Artificial Sequence
  Description of Artificial Sequence: Synthetic oligonucleotide
acaagcaugccagagcugg

SEQ ID NO: 887279 - RNA, 19 nt, Artificial Sequence
  Description of Artificial Sequence: Synthetic oligonucleotide
uguuucuagagcagggcug

SEQ ID NO: 887280 - RNA, 19 nt, Artificial Sequence
  Description of Artificial Sequence: Synthetic oligonucleotide
uggagaauuagagagguaa

SEQ ID NO: 887281 - RNA, 19 nt, Artificial Sequence
  Description of Artificial Sequence: Synthetic oligonucleotide
auaaccccaguuuuauggg

SEQ ID NO: 887282 - RNA, 19 nt, Artificial Sequence
  Description of Artificial Sequence: Synthetic oligonucleotide
gaguacacagcaaaguacc

SEQ ID NO: 887283 - RNA, 19 nt, Artificial Sequence
  Description of Artificial Sequence: Synthetic oligonucleotide
accuuuugaaagcaccuuc

SEQ ID NO: 887284 - RNA, 19 nt, Artificial Sequence
  Description of Artificial Sequence: Synthetic oligonucleotide
ucuagaauuggugaggcau

SEQ ID NO: 887285 - RNA, 19 nt, Artificial Sequence
  Description of Artificial Sequence: Synthetic oligonucleotide
auuaaacuuaggaaagcuc

SEQ ID NO: 887286 - RNA, 19 nt, Artificial Sequence
  Description of Artificial Sequence: Synthetic oligonucleotide
acaacuguaaaauguguaa

SEQ ID NO: 887287 - RNA, 19 nt, Artificial Sequence
  Description of Artificial Sequence: Synthetic oligonucleotide
acauacuagccacaaacca

SEQ ID NO: 887288 - RNA, 19 nt, Artificial Sequence
  Description of Artificial Sequence: Synthetic oligonucleotide
uaggugacgguaaugcuga

SEQ ID NO: 887289 - RNA, 19 nt, Artificial Sequence
  Description of Artificial Sequence: Synthetic oligonucleotide
aucugaacugcauuccauc

SEQ ID NO: 887290 - RNA, 19 nt, Artificial Sequence
  Description of Artificial Sequence: Synthetic oligonucleotide
uuaggaaagcucaggcacc

SEQ ID NO: 887291 - RNA, 19 nt, Artificial Sequence
  Description of Artificial Sequence: Synthetic oligonucleotide
cagcgcaacacuuugggcc

SEQ ID NO: 887292 - RNA, 19 nt, Artificial Sequence
  Description of Artificial Sequence: Synthetic oligonucleotide
gaaugcacaccccuguagc

SEQ ID NO: 887293 - RNA, 19 nt, Artificial Sequence
  Description of Artificial Sequence: Synthetic oligonucleotide
ugauuuuccaguacuggau

SEQ ID NO: 887294 - RNA, 19 nt, Artificial Sequence
  Description of Artificial Sequence: Synthetic oligonucleotide
ugucuaucucccaacaaaa

SEQ ID NO: 887295 - RNA, 19 nt, Artificial Sequence
  Description of Artificial Sequence: Synthetic oligonucleotide
uguguaugcuuuauauacu

SEQ ID NO: 887296 - RNA, 19 nt, Artificial Sequence
  Description of Artificial Sequence: Synthetic oligonucleotide
gaagccauaggguuggcuc

SEQ ID NO: 887297 - RNA, 19 nt, Artificial Sequence
  Description of Artificial Sequence: Synthetic oligonucleotide
aacuauucauaaaaucuga

SEQ ID NO: 887298 - RNA, 19 nt, Artificial Sequence
  Description of Artificial Sequence: Synthetic oligonucleotide
acauuugagucaccaagag

SEQ ID NO: 887299 - RNA, 19 nt, Artificial Sequence
  Description of Artificial Sequence: Synthetic oligonucleotide
cugcugaucggucugacag

SEQ ID NO: 887300 - RNA, 19 nt, Artificial Sequence
  Description of Artificial Sequence: Synthetic oligonucleotide
uuauauacucacgauuacu

SEQ ID NO: 887301 - RNA, 19 nt, Artificial Sequence
  Description of Artificial Sequence: Synthetic oligonucleotide
uuugucucagcgcaacacu

SEQ ID NO: 887302 - RNA, 19 nt, Artificial Sequence
  Description of Artificial Sequence: Synthetic oligonucleotide
agaaauuucccaagaguuc

SEQ ID NO: 887303 - RNA, 19 nt, Artificial Sequence
  Description of Artificial Sequence: Synthetic oligonucleotide
gaugguacaguguguuaag

SEQ ID NO: 887304 - RNA, 19 nt, Artificial Sequence
  Description of Artificial Sequence: Synthetic oligonucleotide
auauaaugaagccuccaaa

SEQ ID NO: 887305 - RNA, 19 nt, Artificial Sequence
  Description of Artificial Sequence: Synthetic oligonucleotide
gacgauuagggacuucagc

SEQ ID NO: 887306 - RNA, 19 nt, Artificial Sequence
  Description of Artificial Sequence: Synthetic oligonucleotide
agucaccaagaguucagac

SEQ ID NO: 887307 - RNA, 19 nt, Artificial Sequence
  Description of Artificial Sequence: Synthetic oligonucleotide
gugguuuaaucuuucaaca

SEQ ID NO: 887308 - RNA, 19 nt, Artificial Sequence
  Description of Artificial Sequence: Synthetic oligonucleotide
ugagucaccaagaguucag

SEQ ID NO: 887309 - RNA, 19 nt, Artificial Sequence
  Description of Artificial Sequence: Synthetic oligonucleotide
uuuuacacauuaggugacg

SEQ ID NO: 887310 - RNA, 19 nt, Artificial Sequence
  Description of Artificial Sequence: Synthetic oligonucleotide
cuagccuguaucuuuucag

SEQ ID NO: 887311 - RNA, 19 nt, Artificial Sequence
  Description of Artificial Sequence: Synthetic oligonucleotide
uguccugccaacuauucau

SEQ ID NO: 887312 - RNA, 19 nt, Artificial Sequence
  Description of Artificial Sequence: Synthetic oligonucleotide
uucgcaggaagguucauaa

SEQ ID NO: 887313 - RNA, 19 nt, Artificial Sequence
  Description of Artificial Sequence: Synthetic oligonucleotide
caauccuuauccacuagug

SEQ ID NO: 887314 - RNA, 19 nt, Artificial Sequence
  Description of Artificial Sequence: Synthetic oligonucleotide
ugaucggucugacaguggu

SEQ ID NO: 887315 - RNA, 19 nt, Artificial Sequence
  Description of Artificial Sequence: Synthetic oligonucleotide
gacauuauuuccucauguc

SEQ ID NO: 887316 - RNA, 19 nt, Artificial Sequence
  Description of Artificial Sequence: Synthetic oligonucleotide
uuauuaggcuggaucagaa

SEQ ID NO: 887317 - RNA, 19 nt, Artificial Sequence
  Description of Artificial Sequence: Synthetic oligonucleotide
auuugagugggcuuccuaa

SEQ ID NO: 887318 - RNA, 19 nt, Artificial Sequence
  Description of Artificial Sequence: Synthetic oligonucleotide
cuuuuacacauuaggugac

SEQ ID NO: 887319 - RNA, 19 nt, Artificial Sequence
  Description of Artificial Sequence: Synthetic oligonucleotide
aaagaugguacaguguguu

SEQ ID NO: 887320 - RNA, 19 nt, Artificial Sequence
  Description of Artificial Sequence: Synthetic oligonucleotide
uugagacuagccuguaucu

SEQ ID NO: 887321 - RNA, 19 nt, Artificial Sequence
  Description of Artificial Sequence: Synthetic oligonucleotide
uauucagaaugcacacccc

SEQ ID NO: 887322 - RNA, 19 nt, Artificial Sequence
  Description of Artificial Sequence: Synthetic oligonucleotide
cucagcgcaacacuuuggg

SEQ ID NO: 887323 - RNA, 19 nt, Artificial Sequence
  Description of Artificial Sequence: Synthetic oligonucleotide
cauccuguucacuuauuag

SEQ ID NO: 887324 - RNA, 19 nt, Artificial Sequence
  Description of Artificial Sequence: Synthetic oligonucleotide
aaaccuuuugaaagcaccu

SEQ ID NO: 887325 - RNA, 19 nt, Artificial Sequence
  Description of Artificial Sequence: Synthetic oligonucleotide
uaaagaugguacagugugu

SEQ ID NO: 887326 - RNA, 19 nt, Artificial Sequence
  Description of Artificial Sequence: Synthetic oligonucleotide
cacuuauuaggcuggauca

SEQ ID NO: 887327 - RNA, 19 nt, Artificial Sequence
  Description of Artificial Sequence: Synthetic oligonucleotide
uaaaaugcacagccagacu

SEQ ID NO: 887328 - RNA, 19 nt, Artificial Sequence
  Description of Artificial Sequence: Synthetic oligonucleotide
caacuguaaaauguguaag

SEQ ID NO: 887329 - RNA, 19 nt, Artificial Sequence
  Description of Artificial Sequence: Synthetic oligonucleotide
caaaucacugggacaagug

SEQ ID NO: 887330 - RNA, 19 nt, Artificial Sequence
  Description of Artificial Sequence: Synthetic oligonucleotide
cuggaucagaaucucaauc

SEQ ID NO: 887331 - RNA, 19 nt, Artificial Sequence
  Description of Artificial Sequence: Synthetic oligonucleotide
cagagugugggcagugucg

SEQ ID NO: 887332 - RNA, 19 nt, Artificial Sequence
  Description of Artificial Sequence: Synthetic oligonucleotide
aaacgcuggaggaagagaa

SEQ ID NO: 887333 - RNA, 19 nt, Artificial Sequence
  Description of Artificial Sequence: Synthetic oligonucleotide
aagccauaggguuggcuca

SEQ ID NO: 887334 - RNA, 19 nt, Artificial Sequence
  Description of Artificial Sequence: Synthetic oligonucleotide
acgauuacuucaaauauaa

SEQ ID NO: 887335 - RNA, 19 nt, Artificial Sequence
  Description of Artificial Sequence: Synthetic oligonucleotide
caguguguuaagaaauuuc

SEQ ID NO: 887336 - RNA, 19 nt, Artificial Sequence
  Description of Artificial Sequence: Synthetic oligonucleotide
aguuuuaugggcagccauc

SEQ ID NO: 887337 - RNA, 19 nt, Artificial Sequence
  Description of Artificial Sequence: Synthetic oligonucleotide
agaggucucuaauuuaaaa

SEQ ID NO: 887338 - RNA, 19 nt, Artificial Sequence
  Description of Artificial Sequence: Synthetic oligonucleotide
agccaagcuaugguaauac

SEQ ID NO: 887339 - RNA, 19 nt, Artificial Sequence
  Description of Artificial Sequence: Synthetic oligonucleotide
uaggguuggcucaacauuu

SEQ ID NO: 887340 - RNA, 19 nt, Artificial Sequence
  Description of Artificial Sequence: Synthetic oligonucleotide
aaccucuauuaauucccug

SEQ ID NO: 887341 - RNA, 19 nt, Artificial Sequence
  Description of Artificial Sequence: Synthetic oligonucleotide
uacacauuaggugacggua

SEQ ID NO: 887342 - RNA, 19 nt, Artificial Sequence
  Description of Artificial Sequence: Synthetic oligonucleotide
aagcuaagggaaaauccug

SEQ ID NO: 887343 - RNA, 19 nt, Artificial Sequence
  Description of Artificial Sequence: Synthetic oligonucleotide
ccaaccucuauuaauuccc

SEQ ID NO: 887344 - RNA, 19 nt, Artificial Sequence
  Description of Artificial Sequence: Synthetic oligonucleotide
aauugccuucgcaggaagg

SEQ ID NO: 887345 - RNA, 19 nt, Artificial Sequence
  Description of Artificial Sequence: Synthetic oligonucleotide
auaugagcuucaaugaggu

SEQ ID NO: 887346 - RNA, 19 nt, Artificial Sequence
  Description of Artificial Sequence: Synthetic oligonucleotide
cucacgauuacuucaaaua

SEQ ID NO: 887347 - RNA, 19 nt, Artificial Sequence
  Description of Artificial Sequence: Synthetic oligonucleotide
aucucccaacaaaacaccc

SEQ ID NO: 887348 - RNA, 19 nt, Artificial Sequence
  Description of Artificial Sequence: Synthetic oligonucleotide
uuugagucaccaagaguuc

SEQ ID NO: 887349 - RNA, 19 nt, Artificial Sequence
  Description of Artificial Sequence: Synthetic oligonucleotide
auuagggacuucagcaagg

SEQ ID NO: 887350 - RNA, 19 nt, Artificial Sequence
  Description of Artificial Sequence: Synthetic oligonucleotide
gguaaaacgcuggaggaag

SEQ ID NO: 887351 - RNA, 19 nt, Artificial Sequence
  Description of Artificial Sequence: Synthetic oligonucleotide
accagcuaaugucugguga

SEQ ID NO: 887352 - RNA, 19 nt, Artificial Sequence
  Description of Artificial Sequence: Synthetic oligonucleotide
auuaggugacgguaaugcu

SEQ ID NO: 887353 - RNA, 19 nt, Artificial Sequence
  Description of Artificial Sequence: Synthetic oligonucleotide
uuacacauuaggugacggu

SEQ ID NO: 887354 - RNA, 19 nt, Artificial Sequence
  Description of Artificial Sequence: Synthetic oligonucleotide
ugcuuuauauacucacgau

SEQ ID NO: 887355 - RNA, 19 nt, Artificial Sequence
  Description of Artificial Sequence: Synthetic oligonucleotide
gucaccaagaguucagaca

SEQ ID NO: 887356 - RNA, 19 nt, Artificial Sequence
  Description of Artificial Sequence: Synthetic oligonucleotide
uaauaaccccaguuuuaug

SEQ ID NO: 887357 - RNA, 19 nt, Artificial Sequence
  Description of Artificial Sequence: Synthetic oligonucleotide
cuuccagggaagcagacga

SEQ ID NO: 887358 - RNA, 19 nt, Artificial Sequence
  Description of Artificial Sequence: Synthetic oligonucleotide
aauacagagugugggcagu

SEQ ID NO: 887359 - RNA, 19 nt, Artificial Sequence
  Description of Artificial Sequence: Synthetic oligonucleotide
gacgguaaugcugaugaca

SEQ ID NO: 887360 - RNA, 19 nt, Artificial Sequence
  Description of Artificial Sequence: Synthetic oligonucleotide
aguaacgugaggccacaga

SEQ ID NO: 887361 - RNA, 19 nt, Artificial Sequence
  Description of Artificial Sequence: Synthetic oligonucleotide
uuugagugggcuuccuaaa

SEQ ID NO: 887362 - RNA, 19 nt, Artificial Sequence
  Description of Artificial Sequence: Synthetic oligonucleotide
acagcaaaccaaagggcgg

SEQ ID NO: 887363 - RNA, 19 nt, Artificial Sequence
  Description of Artificial Sequence: Synthetic oligonucleotide
agggaagcagacgauuagg

SEQ ID NO: 887364 - RNA, 19 nt, Artificial Sequence
  Description of Artificial Sequence: Synthetic oligonucleotide
cacuuugggccuuugagga

SEQ ID NO: 887365 - RNA, 19 nt, Artificial Sequence
  Description of Artificial Sequence: Synthetic oligonucleotide
ugccggacagccaagcuau

SEQ ID NO: 887366 - RNA, 19 nt, Artificial Sequence
  Description of Artificial Sequence: Synthetic oligonucleotide
augcacaccccuguagccc

SEQ ID NO: 887367 - RNA, 19 nt, Artificial Sequence
  Description of Artificial Sequence: Synthetic oligonucleotide
uaacgugaggccacagagu

SEQ ID NO: 887368 - RNA, 19 nt, Artificial Sequence
  Description of Artificial Sequence: Synthetic oligonucleotide
acguaggggaccuuguuau

SEQ ID NO: 887369 - RNA, 19 nt, Artificial Sequence
  Description of Artificial Sequence: Synthetic oligonucleotide
uagaauuggugaggcauug

SEQ ID NO: 887370 - RNA, 19 nt, Artificial Sequence
  Description of Artificial Sequence: Synthetic oligonucleotide
aagacugccaugauccaaa

SEQ ID NO: 887371 - RNA, 19 nt, Artificial Sequence
  Description of Artificial Sequence: Synthetic oligonucleotide
uugagucaccaagaguuca

SEQ ID NO: 887372 - RNA, 19 nt, Artificial Sequence
  Description of Artificial Sequence: Synthetic oligonucleotide
ccaagcuaugguaauacug

SEQ ID NO: 887373 - RNA, 19 nt, Artificial Sequence
  Description of Artificial Sequence: Synthetic oligonucleotide
acaaaccuuuugaaagcac

SEQ ID NO: 887374 - RNA, 19 nt, Artificial Sequence
  Description of Artificial Sequence: Synthetic oligonucleotide
aucggucugacagugguca

SEQ ID NO: 887375 - RNA, 19 nt, Artificial Sequence
  Description of Artificial Sequence: Synthetic oligonucleotide
acucacgauuacuucaaau

SEQ ID NO: 887376 - RNA, 19 nt, Artificial Sequence
  Description of Artificial Sequence: Synthetic oligonucleotide
ugaggauaugagcuucaau

SEQ ID NO: 887377 - RNA, 19 nt, Artificial Sequence
  Description of Artificial Sequence: Synthetic oligonucleotide
agauguagaggcucuugaa

SEQ ID NO: 887378 - RNA, 19 nt, Artificial Sequence
  Description of Artificial Sequence: Synthetic oligonucleotide
gguucauaaagaugguaca

SEQ ID NO: 887379 - RNA, 19 nt, Artificial Sequence
  Description of Artificial Sequence: Synthetic oligonucleotide
cuaugguaauacugcugag

SEQ ID NO: 887380 - RNA, 19 nt, Artificial Sequence
  Description of Artificial Sequence: Synthetic oligonucleotide
agcgcaacacuuugggccu

SEQ ID NO: 887381 - RNA, 19 nt, Artificial Sequence
  Description of Artificial Sequence: Synthetic oligonucleotide
gacaaaccuuuugaaagca

SEQ ID NO: 887382 - RNA, 19 nt, Artificial Sequence
  Description of Artificial Sequence: Synthetic oligonucleotide
cuauuaauucccugaaacu

SEQ ID NO: 887383 - RNA, 19 nt, Artificial Sequence
  Description of Artificial Sequence: Synthetic oligonucleotide
uuuuaugggcagccauccu

SEQ ID NO: 887384 - RNA, 19 nt, Artificial Sequence
  Description of Artificial Sequence: Synthetic oligonucleotide
auugccuucgcaggaaggu

SEQ ID NO: 887385 - RNA, 19 nt, Artificial Sequence
  Description of Artificial Sequence: Synthetic oligonucleotide
uuagggacuucagcaagga

SEQ ID NO: 887386 - RNA, 19 nt, Artificial Sequence
  Description of Artificial Sequence: Synthetic oligonucleotide
ucagaaucucaauccuuau

SEQ ID NO: 887387 - RNA, 19 nt, Artificial Sequence
  Description of Artificial Sequence: Synthetic oligonucleotide
ugccuucgcaggaagguuc

SEQ ID NO: 887388 - RNA, 19 nt, Artificial Sequence
  Description of Artificial Sequence: Synthetic oligonucleotide
cuuauccacuagugagggg

SEQ ID NO: 887389 - RNA, 19 nt, Artificial Sequence
  Description of Artificial Sequence: Synthetic oligonucleotide
auacuagccacaaaccaau

SEQ ID NO: 887390 - RNA, 19 nt, Artificial Sequence
  Description of Artificial Sequence: Synthetic oligonucleotide
uugucucagcgcaacacuu

SEQ ID NO: 887391 - RNA, 19 nt, Artificial Sequence
  Description of Artificial Sequence: Synthetic oligonucleotide
agaauuggugaggcauugg

SEQ ID NO: 887392 - RNA, 19 nt, Artificial Sequence
  Description of Artificial Sequence: Synthetic oligonucleotide
aaaccccaaccucuauuaa

SEQ ID NO: 887393 - RNA, 19 nt, Artificial Sequence
  Description of Artificial Sequence: Synthetic oligonucleotide
agcaccuuggacagucugg

SEQ ID NO: 887394 - RNA, 19 nt, Artificial Sequence
  Description of Artificial Sequence: Synthetic oligonucleotide
gggacaagugacauguugc

SEQ ID NO: 887395 - RNA, 19 nt, Artificial Sequence
  Description of Artificial Sequence: Synthetic oligonucleotide
acuauucauaaaaucugaa

SEQ ID NO: 887396 - RNA, 19 nt, Artificial Sequence
  Description of Artificial Sequence: Synthetic oligonucleotide
guuugucucagcgcaacac

SEQ ID NO: 887397 - RNA, 19 nt, Artificial Sequence
  Description of Artificial Sequence: Synthetic oligonucleotide
aaaccaaagggcggcgcca

SEQ ID NO: 887398 - RNA, 19 nt, Artificial Sequence
  Description of Artificial Sequence: Synthetic oligonucleotide
uccuaaagcugugugguuu

SEQ ID NO: 887399 - RNA, 19 nt, Artificial Sequence
  Description of Artificial Sequence: Synthetic oligonucleotide
agcuaagggaaaauccuga

SEQ ID NO: 887400 - RNA, 19 nt, Artificial Sequence
  Description of Artificial Sequence: Synthetic oligonucleotide
ucauguccugccaacuauu

SEQ ID NO: 887401 - RNA, 19 nt, Artificial Sequence
  Description of Artificial Sequence: Synthetic oligonucleotide
aggauccuuccagggaagc

SEQ ID NO: 887402 - RNA, 19 nt, Artificial Sequence
  Description of Artificial Sequence: Synthetic oligonucleotide
ggauugcacacacaaggac

SEQ ID NO: 887403 - RNA, 19 nt, Artificial Sequence
  Description of Artificial Sequence: Synthetic oligonucleotide
uaggggaccuuguuauuaa

SEQ ID NO: 887404 - RNA, 19 nt, Artificial Sequence
  Description of Artificial Sequence: Synthetic oligonucleotide
cuucaaugagguaaaucua

SEQ ID NO: 887405 - RNA, 19 nt, Artificial Sequence
  Description of Artificial Sequence: Synthetic oligonucleotide
uccaaguguguguaugcuu

SEQ ID NO: 887406 - RNA, 19 nt, Artificial Sequence
  Description of Artificial Sequence: Synthetic oligonucleotide
uauccacuagugaggggaa

SEQ ID NO: 887407 - RNA, 19 nt, Artificial Sequence
  Description of Artificial Sequence: Synthetic oligonucleotide
guagguguuugacagcugu

SEQ ID NO: 887408 - RNA, 19 nt, Artificial Sequence
  Description of Artificial Sequence: Synthetic oligonucleotide
cacgauuacuucaaauaua

SEQ ID NO: 887409 - RNA, 19 nt, Artificial Sequence
  Description of Artificial Sequence: Synthetic oligonucleotide
agcuaugguaauacugcug

SEQ ID NO: 887410 - RNA, 19 nt, Artificial Sequence
  Description of Artificial Sequence: Synthetic oligonucleotide
cauaaagaugguacagugu

SEQ ID NO: 887411 - RNA, 19 nt, Artificial Sequence
  Description of Artificial Sequence: Synthetic oligonucleotide
cccaaccucuauuaauucc

SEQ ID NO: 887412 - RNA, 19 nt, Artificial Sequence
  Description of Artificial Sequence: Synthetic oligonucleotide
ugcaggucaccagcuaaug

SEQ ID NO: 887413 - RNA, 19 nt, Artificial Sequence
  Description of Artificial Sequence: Synthetic oligonucleotide
aaagggcggcgccacuggu

SEQ ID NO: 887414 - RNA, 19 nt, Artificial Sequence
  Description of Artificial Sequence: Synthetic oligonucleotide
aggauugcacacacaagga

SEQ ID NO: 887415 - RNA, 19 nt, Artificial Sequence
  Description of Artificial Sequence: Synthetic oligonucleotide
ugcugaucggucugacagu

SEQ ID NO: 887416 - RNA, 19 nt, Artificial Sequence
  Description of Artificial Sequence: Synthetic oligonucleotide
ccuuauccacuagugaggg

SEQ ID NO: 887417 - RNA, 19 nt, Artificial Sequence
  Description of Artificial Sequence: Synthetic oligonucleotide
gcuaagggaaaauccugac

SEQ ID NO: 887418 - RNA, 19 nt, Artificial Sequence
  Description of Artificial Sequence: Synthetic oligonucleotide
ggcaaaguggauuuucugu

SEQ ID NO: 887419 - RNA, 19 nt, Artificial Sequence
  Description of Artificial Sequence: Synthetic oligonucleotide
aggucaccagcuaaugucu

SEQ ID NO: 887420 - RNA, 19 nt, Artificial Sequence
  Description of Artificial Sequence: Synthetic oligonucleotide
acccuccagauaaugaaca

SEQ ID NO: 887421 - RNA, 19 nt, Artificial Sequence
  Description of Artificial Sequence: Synthetic oligonucleotide
agcaaaccaaagggcggcg

SEQ ID NO: 887422 - RNA, 19 nt, Artificial Sequence
  Description of Artificial Sequence: Synthetic oligonucleotide
gucuaucucccaacaaaac

SEQ ID NO: 887423 - RNA, 19 nt, Artificial Sequence
  Description of Artificial Sequence: Synthetic oligonucleotide
cugaucggucugacagugg

SEQ ID NO: 887424 - RNA, 19 nt, Artificial Sequence
  Description of Artificial Sequence: Synthetic oligonucleotide
auacucacgauuacuucaa

SEQ ID NO: 887425 - RNA, 19 nt, Artificial Sequence
  Description of Artificial Sequence: Synthetic oligonucleotide
gacaccaccuuuggucagc

SEQ ID NO: 887426 - RNA, 19 nt, Artificial Sequence
  Description of Artificial Sequence: Synthetic oligonucleotide
gagacuagccuguaucuuu

SEQ ID NO: 887427 - RNA, 19 nt, Artificial Sequence
  Description of Artificial Sequence: Synthetic oligonucleotide
ugguaauacugcugagauu

SEQ ID NO: 887428 - RNA, 19 nt, Artificial Sequence
  Description of Artificial Sequence: Synthetic oligonucleotide
uacucacgauuacuucaaa

SEQ ID NO: 887429 - RNA, 19 nt, Artificial Sequence
  Description of Artificial Sequence: Synthetic oligonucleotide
cuaagggaaaauccugacu

SEQ ID NO: 887430 - RNA, 19 nt, Artificial Sequence
  Description of Artificial Sequence: Synthetic oligonucleotide
acacauuaggugacgguaa

SEQ ID NO: 887431 - RNA, 19 nt, Artificial Sequence
  Description of Artificial Sequence: Synthetic oligonucleotide
ggcuuccuaaagcugugug

SEQ ID NO: 887432 - RNA, 19 nt, Artificial Sequence
  Description of Artificial Sequence: Synthetic oligonucleotide
uguuuccaaguguguguau

SEQ ID NO: 887433 - RNA, 19 nt, Artificial Sequence
  Description of Artificial Sequence: Synthetic oligonucleotide
ugacgguaaugcugaugac

SEQ ID NO: 887434 - RNA, 19 nt, Artificial Sequence
  Description of Artificial Sequence: Synthetic oligonucleotide
cagucuggguacuuuuaca

SEQ ID NO: 887435 - RNA, 19 nt, Artificial Sequence
  Description of Artificial Sequence: Synthetic oligonucleotide
accccaaccucuauuaauu

SEQ ID NO: 887436 - RNA, 19 nt, Artificial Sequence
  Description of Artificial Sequence: Synthetic oligonucleotide
agacgauuagggacuucag

SEQ ID NO: 887437 - RNA, 19 nt, Artificial Sequence
  Description of Artificial Sequence: Synthetic oligonucleotide
auacagagugugggcagug

SEQ ID NO: 887438 - RNA, 19 nt, Artificial Sequence
  Description of Artificial Sequence: Synthetic oligonucleotide
gcuuuauauacucacgauu

SEQ ID NO: 887439 - RNA, 19 nt, Artificial Sequence
  Description of Artificial Sequence: Synthetic oligonucleotide
gagauuccugaguuuugcu

SEQ ID NO: 887440 - RNA, 19 nt, Artificial Sequence
  Description of Artificial Sequence: Synthetic oligonucleotide
caccagcuaaugucuggug

SEQ ID NO: 887441 - RNA, 19 nt, Artificial Sequence
  Description of Artificial Sequence: Synthetic oligonucleotide
aacagauguagaggcucuu

SEQ ID NO: 887442 - RNA, 19 nt, Artificial Sequence
  Description of Artificial Sequence: Synthetic oligonucleotide
ggugacguaggggaccuug

SEQ ID NO: 887443 - RNA, 19 nt, Artificial Sequence
  Description of Artificial Sequence: Synthetic oligonucleotide
uuccuaaagcugugugguu

SEQ ID NO: 887444 - RNA, 19 nt, Artificial Sequence
  Description of Artificial Sequence: Synthetic oligonucleotide
ucgcaggaagguucauaaa

SEQ ID NO: 887445 - RNA, 19 nt, Artificial Sequence
  Description of Artificial Sequence: Synthetic oligonucleotide
aggaacagauguagaggcu

SEQ ID NO: 887446 - RNA, 19 nt, Artificial Sequence
  Description of Artificial Sequence: Synthetic oligonucleotide
guaaaacgcuggaggaaga

SEQ ID NO: 887447 - RNA, 19 nt, Artificial Sequence
  Description of Artificial Sequence: Synthetic oligonucleotide
guaggggaccuuguuauua

SEQ ID NO: 887448 - RNA, 19 nt, Artificial Sequence
  Description of Artificial Sequence: Synthetic oligonucleotide
gucuagaauuggugaggca

SEQ ID NO: 887449 - RNA, 19 nt, Artificial Sequence
  Description of Artificial Sequence: Synthetic oligonucleotide
gaacagauguagaggcucu

SEQ ID NO: 887450 - RNA, 19 nt, Artificial Sequence
  Description of Artificial Sequence: Synthetic oligonucleotide
guaaaagcuaagggaaaau

SEQ ID NO: 887451 - RNA, 19 nt, Artificial Sequence
  Description of Artificial Sequence: Synthetic oligonucleotide
ggguacuuuuacacauuag

SEQ ID NO: 887452 - RNA, 19 nt, Artificial Sequence
  Description of Artificial Sequence: Synthetic oligonucleotide
caaugggcaaaguggauuu

SEQ ID NO: 887453 - RNA, 19 nt, Artificial Sequence
  Description of Artificial Sequence: Synthetic oligonucleotide
acaguccugcuggauauua

SEQ ID NO: 887454 - RNA, 19 nt, Artificial Sequence
  Description of Artificial Sequence: Synthetic oligonucleotide
ccauaacaauguucauagc

SEQ ID NO: 887455 - RNA, 19 nt, Artificial Sequence
  Description of Artificial Sequence: Synthetic oligonucleotide
accagcccggcugcccugc

SEQ ID NO: 887456 - RNA, 19 nt, Artificial Sequence
  Description of Artificial Sequence: Synthetic oligonucleotide
cagugucguggagaauuag

SEQ ID NO: 887457 - RNA, 19 nt, Artificial Sequence
  Description of Artificial Sequence: Synthetic oligonucleotide
agacuagccuguaucuuuu

SEQ ID NO: 887458 - RNA, 19 nt, Artificial Sequence
  Description of Artificial Sequence: Synthetic oligonucleotide
ggugacgguaaugcugaug

SEQ ID NO: 887459 - RNA, 19 nt, Artificial Sequence
  Description of Artificial Sequence: Synthetic oligonucleotide
cuagaauuggugaggcauu

SEQ ID NO: 887460 - RNA, 19 nt, Artificial Sequence
  Description of Artificial Sequence: Synthetic oligonucleotide
ucggucugacaguggucaa

SEQ ID NO: 887461 - RNA, 19 nt, Artificial Sequence
  Description of Artificial Sequence: Synthetic oligonucleotide
guucacuuauuaggcugga

SEQ ID NO: 887462 - RNA, 19 nt, Artificial Sequence
  Description of Artificial Sequence: Synthetic oligonucleotide
caaccucuauuaauucccu

SEQ ID NO: 887463 - RNA, 19 nt, Artificial Sequence
  Description of Artificial Sequence: Synthetic oligonucleotide
cucauguccugccaacuau

SEQ ID NO: 887464 - RNA, 19 nt, Artificial Sequence
  Description of Artificial Sequence: Synthetic oligonucleotide
gggguagguguuugacagc

SEQ ID NO: 887465 - RNA, 19 nt, Artificial Sequence
  Description of Artificial Sequence: Synthetic oligonucleotide
caaguguguguaugcuuua

SEQ ID NO: 887466 - RNA, 19 nt, Artificial Sequence
  Description of Artificial Sequence: Synthetic oligonucleotide
gguuugucucagcgcaaca

SEQ ID NO: 887467 - RNA, 19 nt, Artificial Sequence
  Description of Artificial Sequence: Synthetic oligonucleotide
cugccggacagccaagcua

SEQ ID NO: 887468 - RNA, 19 nt, Artificial Sequence
  Description of Artificial Sequence: Synthetic oligonucleotide
agcucuggaaugggccaca

SEQ ID NO: 887469 - RNA, 19 nt, Artificial Sequence
  Description of Artificial Sequence: Synthetic oligonucleotide
accaaugggcaaaguggau

SEQ ID NO: 887470 - RNA, 19 nt, Artificial Sequence
  Description of Artificial Sequence: Synthetic oligonucleotide
gcaaaccaaagggcggcgc

SEQ ID NO: 887471 - RNA, 19 nt, Artificial Sequence
  Description of Artificial Sequence: Synthetic oligonucleotide
ccggacagccaagcuaugg

SEQ ID NO: 887472 - RNA, 19 nt, Artificial Sequence
  Description of Artificial Sequence: Synthetic oligonucleotide
caguaacgugaggccacag

SEQ ID NO: 887473 - RNA, 19 nt, Artificial Sequence
  Description of Artificial Sequence: Synthetic oligonucleotide
gcagggguagguguuugac

SEQ ID NO: 887474 - RNA, 19 nt, Artificial Sequence
  Description of Artificial Sequence: Synthetic oligonucleotide
ggucaccagcuaaugucug

SEQ ID NO: 887475 - RNA, 19 nt, Artificial Sequence
  Description of Artificial Sequence: Synthetic oligonucleotide
ggguagguguuugacagcu

SEQ ID NO: 887476 - RNA, 19 nt, Artificial Sequence
  Description of Artificial Sequence: Synthetic oligonucleotide
gaguucagacacacauacu

SEQ ID NO: 887477 - RNA, 19 nt, Artificial Sequence
  Description of Artificial Sequence: Synthetic oligonucleotide
guagcccaucuaagugggc

SEQ ID NO: 887478 - RNA, 19 nt, Artificial Sequence
  Description of Artificial Sequence: Synthetic oligonucleotide
guaccauaacaauguucau

SEQ ID NO: 887479 - RNA, 19 nt, Artificial Sequence
  Description of Artificial Sequence: Synthetic oligonucleotide
ggguaaaacgcuggaggaa

SEQ ID NO: 887480 - RNA, 19 nt, Artificial Sequence
  Description of Artificial Sequence: Synthetic oligonucleotide
ccccaaccucuauuaauuc

SEQ ID NO: 887481 - RNA, 19 nt, Artificial Sequence
  Description of Artificial Sequence: Synthetic oligonucleotide
cuucgcaggaagguucaua

SEQ ID NO: 887482 - RNA, 19 nt, Artificial Sequence
  Description of Artificial Sequence: Synthetic oligonucleotide
ugagggccccuggaggauu

SEQ ID NO: 887483 - RNA, 19 nt, Artificial Sequence
  Description of Artificial Sequence: Synthetic oligonucleotide
ccaaguguguguaugcuuu

SEQ ID NO: 887484 - RNA, 19 nt, Artificial Sequence
  Description of Artificial Sequence: Synthetic oligonucleotide
gguagguguuugacagcug

SEQ ID NO: 887485 - RNA, 19 nt, Artificial Sequence
  Description of Artificial Sequence: Synthetic oligonucleotide
acucugccggacagccaag

SEQ ID NO: 887486 - RNA, 19 nt, Artificial Sequence
  Description of Artificial Sequence: Synthetic oligonucleotide
cgauuagggacuucagcaa

SEQ ID NO: 887487 - RNA, 19 nt, Artificial Sequence
  Description of Artificial Sequence: Synthetic oligonucleotide
gcaggucaccagcuaaugu

SEQ ID NO: 887488 - RNA, 19 nt, Artificial Sequence
  Description of Artificial Sequence: Synthetic oligonucleotide
aggugacgguaaugcugau

SEQ ID NO: 887489 - RNA, 19 nt, Artificial Sequence
  Description of Artificial Sequence: Synthetic oligonucleotide
uugggccuuugaggauaug

SEQ ID NO: 887490 - RNA, 19 nt, Artificial Sequence
  Description of Artificial Sequence: Synthetic oligonucleotide
agacucugccggacagcca

SEQ ID NO: 887491 - RNA, 19 nt, Artificial Sequence
  Description of Artificial Sequence: Synthetic oligonucleotide
ccagcuaaugucuggugau

SEQ ID NO: 887492 - RNA, 19 nt, Artificial Sequence
  Description of Artificial Sequence: Synthetic oligonucleotide
cagccaagcuaugguaaua

SEQ ID NO: 887493 - RNA, 19 nt, Artificial Sequence
  Description of Artificial Sequence: Synthetic oligonucleotide
gccaagcuaugguaauacu

SEQ ID NO: 887494 - RNA, 19 nt, Artificial Sequence
  Description of Artificial Sequence: Synthetic oligonucleotide
cccuguagcccaucuaagu

SEQ ID NO: 887495 - RNA, 19 nt, Artificial Sequence
  Description of Artificial Sequence: Synthetic oligonucleotide
cccaagacuuuacuugggu

SEQ ID NO: 887496 - RNA, 19 nt, Artificial Sequence
  Description of Artificial Sequence: Synthetic oligonucleotide
gccuucgcaggaagguuca

SEQ ID NO: 887497 - RNA, 19 nt, Artificial Sequence
  Description of Artificial Sequence: Synthetic oligonucleotide
gcagugucguggagaauua

SEQ ID NO: 887498 - RNA, 19 nt, Artificial Sequence
  Description of Artificial Sequence: Synthetic oligonucleotide
cagcuaaugucuggugauu

SEQ ID NO: 887499 - RNA, 19 nt, Artificial Sequence
  Description of Artificial Sequence: Synthetic oligonucleotide
gccggacagccaagcuaug

SEQ ID NO: 887500 - RNA, 19 nt, Artificial Sequence
  Description of Artificial Sequence: Synthetic oligonucleotide
cccggcugcccugcugauc

SEQ ID NO: 887501 - RNA, 19 nt, Artificial Sequence
  Description of Artificial Sequence: Synthetic oligonucleotide
gcggcgccacuggugacgu

SEQ ID NO: 887502 - RNA, 19 nt, Artificial Sequence
  Description of Artificial Sequence: Synthetic oligonucleotide
cguaggggaccuuguuauu

SEQ ID NO: 887503 - RNA, 19 nt, Artificial Sequence
  Description of Artificial Sequence: Synthetic oligonucleotide
ccuucgcaggaagguucau

SEQ ID NO: 887504 - RNA, 19 nt, Artificial Sequence
  Description of Artificial Sequence: Synthetic oligonucleotide
gcgcaacacuuugggccuu

SEQ ID NO: 887505 - RNA, 19 nt, Artificial Sequence
  Description of Artificial Sequence: Synthetic oligonucleotide
acaauuaggacccaauacc

SEQ ID NO: 887506 - RNA, 19 nt, Artificial Sequence
  Description of Artificial Sequence: Synthetic oligonucleotide
uguugcuacacucagaccu

SEQ ID NO: 887507 - RNA, 19 nt, Artificial Sequence
  Description of Artificial Sequence: Synthetic oligonucleotide
ugcacauacacaucaaggg

SEQ ID NO: 887508 - RNA, 19 nt, Artificial Sequence
  Description of Artificial Sequence: Synthetic oligonucleotide
uauaggacuaccacaauca

SEQ ID NO: 887509 - RNA, 19 nt, Artificial Sequence
  Description of Artificial Sequence: Synthetic oligonucleotide
aucaagggaaacuuugggc

SEQ ID NO: 887510 - RNA, 19 nt, Artificial Sequence
  Description of Artificial Sequence: Synthetic oligonucleotide
ucaagauugauuugaaaac

SEQ ID NO: 887511 - RNA, 19 nt, Artificial Sequence
  Description of Artificial Sequence: Synthetic oligonucleotide
aagaaugagguuucucuuc

SEQ ID NO: 887512 - RNA, 19 nt, Artificial Sequence
  Description of Artificial Sequence: Synthetic oligonucleotide
aggaaauuagaaugaggcc

SEQ ID NO: 887513 - RNA, 19 nt, Artificial Sequence
  Description of Artificial Sequence: Synthetic oligonucleotide
ucuaagucuauccaggcaa

SEQ ID NO: 887514 - RNA, 19 nt, Artificial Sequence
  Description of Artificial Sequence: Synthetic oligonucleotide
aaaacuaaagcuggcaugu

SEQ ID NO: 887515 - RNA, 19 nt, Artificial Sequence
  Description of Artificial Sequence: Synthetic oligonucleotide
cuaucuacgcccauagugg

SEQ ID NO: 887516 - RNA, 19 nt, Artificial Sequence
  Description of Artificial Sequence: Synthetic oligonucleotide
gaaguuagcaagcacgcug

SEQ ID NO: 887517 - RNA, 19 nt, Artificial Sequence
  Description of Artificial Sequence: Synthetic oligonucleotide
cauaaacacacacacacug

SEQ ID NO: 887518 - RNA, 19 nt, Artificial Sequence
  Description of Artificial Sequence: Synthetic oligonucleotide
aacuaaagcuggcauguag

SEQ ID NO: 887519 - RNA, 19 nt, Artificial Sequence
  Description of Artificial Sequence: Synthetic oligonucleotide
aacaaccgcagccaggcuc

SEQ ID NO: 887520 - RNA, 19 nt, Artificial Sequence
  Description of Artificial Sequence: Synthetic oligonucleotide
uaaacacacacacacugca

SEQ ID NO: 887521 - RNA, 19 nt, Artificial Sequence
  Description of Artificial Sequence: Synthetic oligonucleotide
agggcugaaaacuaaagcu

SEQ ID NO: 887522 - RNA, 19 nt, Artificial Sequence
  Description of Artificial Sequence: Synthetic oligonucleotide
gaaaacuaaagcuggcaug

SEQ ID NO: 887523 - RNA, 19 nt, Artificial Sequence
  Description of Artificial Sequence: Synthetic oligonucleotide
aagucuauccaggcaagcc

SEQ ID NO: 887524 - RNA, 19 nt, Artificial Sequence
  Description of Artificial Sequence: Synthetic oligonucleotide
ucaauguucacaccuuucu

SEQ ID NO: 887525 - RNA, 19 nt, Artificial Sequence
  Description of Artificial Sequence: Synthetic oligonucleotide
aauagggaugaugacuagg

SEQ ID NO: 887526 - RNA, 19 nt, Artificial Sequence
  Description of Artificial Sequence: Synthetic oligonucleotide
aacacacacacacugcaca

SEQ ID NO: 887527 - RNA, 19 nt, Artificial Sequence
  Description of Artificial Sequence: Synthetic oligonucleotide
aaccugaggaaugagaaca

SEQ ID NO: 887528 - RNA, 19 nt, Artificial Sequence
  Description of Artificial Sequence: Synthetic oligonucleotide
auuaggacccaauacccag

SEQ ID NO: 887529 - RNA, 19 nt, Artificial Sequence
  Description of Artificial Sequence: Synthetic oligonucleotide
uuauaggacuaccacaauc

SEQ ID NO: 887530 - RNA, 19 nt, Artificial Sequence
  Description of Artificial Sequence: Synthetic oligonucleotide
gaugaccagacccggaggg

SEQ ID NO: 887531 - RNA, 19 nt, Artificial Sequence
  Description of Artificial Sequence: Synthetic oligonucleotide
uuagaaugaggccucccag

SEQ ID NO: 887532 - RNA, 19 nt, Artificial Sequence
  Description of Artificial Sequence: Synthetic oligonucleotide
ucucaugagccuaaagccc

SEQ ID NO: 887533 - RNA, 19 nt, Artificial Sequence
  Description of Artificial Sequence: Synthetic oligonucleotide
aaagguagggucaucccgg

SEQ ID NO: 887534 - RNA, 19 nt, Artificial Sequence
  Description of Artificial Sequence: Synthetic oligonucleotide
acuuuauaggacuaccaca

SEQ ID NO: 887535 - RNA, 19 nt, Artificial Sequence
  Description of Artificial Sequence: Synthetic oligonucleotide
aauuagaaugaggccuccc

SEQ ID NO: 887536 - RNA, 19 nt, Artificial Sequence
  Description of Artificial Sequence: Synthetic oligonucleotide
cucucugauuccaagaaug

SEQ ID NO: 887537 - RNA, 19 nt, Artificial Sequence
  Description of Artificial Sequence: Synthetic oligonucleotide
uugaugaccagacccggag

SEQ ID NO: 887538 - RNA, 19 nt, Artificial Sequence
  Description of Artificial Sequence: Synthetic oligonucleotide
ucuugggcuaucuacgccc

SEQ ID NO: 887539 - RNA, 19 nt, Artificial Sequence
  Description of Artificial Sequence: Synthetic oligonucleotide
gaauucaagauugauuuga

SEQ ID NO: 887540 - RNA, 19 nt, Artificial Sequence
  Description of Artificial Sequence: Synthetic oligonucleotide
aaguuagcaagcacgcugg

SEQ ID NO: 887541 - RNA, 19 nt, Artificial Sequence
  Description of Artificial Sequence: Synthetic oligonucleotide
auaaacacacacacacugc

SEQ ID NO: 887542 - RNA, 19 nt, Artificial Sequence
  Description of Artificial Sequence: Synthetic oligonucleotide
cuggcauguaguauguugc

SEQ ID NO: 887543 - RNA, 19 nt, Artificial Sequence
  Description of Artificial Sequence: Synthetic oligonucleotide
cuuuauaggacuaccacaa

SEQ ID NO: 887544 - RNA, 19 nt, Artificial Sequence
  Description of Artificial Sequence: Synthetic oligonucleotide
acguuguccguccagggcg

SEQ ID NO: 887545 - RNA, 19 nt, Artificial Sequence
  Description of Artificial Sequence: Synthetic oligonucleotide
ucuggugacuuuauaggac

SEQ ID NO: 887546 - RNA, 19 nt, Artificial Sequence
  Description of Artificial Sequence: Synthetic oligonucleotide
uaucuacgcccauaguggg

SEQ ID NO: 887547 - RNA, 19 nt, Artificial Sequence
  Description of Artificial Sequence: Synthetic oligonucleotide
guuuucagauggcugaaug

SEQ ID NO: 887548 - RNA, 19 nt, Artificial Sequence
  Description of Artificial Sequence: Synthetic oligonucleotide
uugcgauccacacaccagc

SEQ ID NO: 887549 - RNA, 19 nt, Artificial Sequence
  Description of Artificial Sequence: Synthetic oligonucleotide
caggcaagccagaaaaugc

SEQ ID NO: 887550 - RNA, 19 nt, Artificial Sequence
  Description of Artificial Sequence: Synthetic oligonucleotide
caucaagggaaacuuuggg

SEQ ID NO: 887551 - RNA, 19 nt, Artificial Sequence
  Description of Artificial Sequence: Synthetic oligonucleotide
ucuugcgauccacacacca

SEQ ID NO: 887552 - RNA, 19 nt, Artificial Sequence
  Description of Artificial Sequence: Synthetic oligonucleotide
acugcacauacacaucaag

SEQ ID NO: 887553 - RNA, 19 nt, Artificial Sequence
  Description of Artificial Sequence: Synthetic oligonucleotide
gcuaucuacgcccauagug

SEQ ID NO: 887554 - RNA, 19 nt, Artificial Sequence
  Description of Artificial Sequence: Synthetic oligonucleotide
caggcuuaccccaugggcc

SEQ ID NO: 887555 - RNA, 19 nt, Artificial Sequence
  Description of Artificial Sequence: Synthetic oligonucleotide
cccauaaacacacacacac

SEQ ID NO: 887556 - RNA, 19 nt, Artificial Sequence
  Description of Artificial Sequence: Synthetic oligonucleotide
uucgccauaugcuucugca

SEQ ID NO: 887557 - RNA, 19 nt, Artificial Sequence
  Description of Artificial Sequence: Synthetic oligonucleotide
aaacacacacacacugcac

SEQ ID NO: 887558 - RNA, 19 nt, Artificial Sequence
  Description of Artificial Sequence: Synthetic oligonucleotide
ugaugaccagacccggagg

SEQ ID NO: 887559 - RNA, 19 nt, Artificial Sequence
  Description of Artificial Sequence: Synthetic oligonucleotide
agucuauccaggcaagcca

SEQ ID NO: 887560 - RNA, 19 nt, Artificial Sequence
  Description of Artificial Sequence: Synthetic oligonucleotide
gaccaaaacuccaugccag

SEQ ID NO: 887561 - RNA, 19 nt, Artificial Sequence
  Description of Artificial Sequence: Synthetic oligonucleotide
gaaauuagaaugaggccuc

SEQ ID NO: 887562 - RNA, 19 nt, Artificial Sequence
  Description of Artificial Sequence: Synthetic oligonucleotide
cagggcugaaaacuaaagc

SEQ ID NO: 887563 - RNA, 19 nt, Artificial Sequence
  Description of Artificial Sequence: Synthetic oligonucleotide
aggacucggaccaaaacuc

SEQ ID NO: 887564 - RNA, 19 nt, Artificial Sequence
  Description of Artificial Sequence: Synthetic oligonucleotide
auaggacuaccacaaucag

SEQ ID NO: 887565 - RNA, 19 nt, Artificial Sequence
  Description of Artificial Sequence: Synthetic oligonucleotide
auuuucgccauaugcuucu

SEQ ID NO: 887566 - RNA, 19 nt, Artificial Sequence
  Description of Artificial Sequence: Synthetic oligonucleotide
uaguggguacucuagguuc

SEQ ID NO: 887567 - RNA, 19 nt, Artificial Sequence
  Description of Artificial Sequence: Synthetic oligonucleotide
uccgaucucgcauuuucgc

SEQ ID NO: 887568 - RNA, 19 nt, Artificial Sequence
  Description of Artificial Sequence: Synthetic oligonucleotide
ucggaccaaaacuccaugc

SEQ ID NO: 887569 - RNA, 19 nt, Artificial Sequence
  Description of Artificial Sequence: Synthetic oligonucleotide
caggucucuaagucuaucc

SEQ ID NO: 887570 - RNA, 19 nt, Artificial Sequence
  Description of Artificial Sequence: Synthetic oligonucleotide
gaaacuuugggcagggcca

SEQ ID NO: 887571 - RNA, 19 nt, Artificial Sequence
  Description of Artificial Sequence: Synthetic oligonucleotide
acaaguggcgcaacaaccg

SEQ ID NO: 887572 - RNA, 19 nt, Artificial Sequence
  Description of Artificial Sequence: Synthetic oligonucleotide
agcagagcgagccuggcca

SEQ ID NO: 887573 - RNA, 19 nt, Artificial Sequence
  Description of Artificial Sequence: Synthetic oligonucleotide
ucgaucuccgacagcuccg

SEQ ID NO: 887574 - RNA, 19 nt, Artificial Sequence
  Description of Artificial Sequence: Synthetic oligonucleotide
aguagggagcacugaggac

SEQ ID NO: 887575 - RNA, 19 nt, Artificial Sequence
  Description of Artificial Sequence: Synthetic oligonucleotide
uggcgcaacaaccgcagcc

SEQ ID NO: 887576 - RNA, 19 nt, Artificial Sequence
  Description of Artificial Sequence: Synthetic oligonucleotide
cuaagucuauccaggcaag

SEQ ID NO: 887577 - RNA, 19 nt, Artificial Sequence
  Description of Artificial Sequence: Synthetic oligonucleotide
cuagguuggagagggagag

SEQ ID NO: 887578 - RNA, 19 nt, Artificial Sequence
  Description of Artificial Sequence: Synthetic oligonucleotide
auaugcuucugcaggcacc

SEQ ID NO: 887579 - RNA, 19 nt, Artificial Sequence
  Description of Artificial Sequence: Synthetic oligonucleotide
cucgaucuccgacagcucc

SEQ ID NO: 887580 - RNA, 19 nt, Artificial Sequence
  Description of Artificial Sequence: Synthetic oligonucleotide
acaaccgcagccaggcucc

SEQ ID NO: 887581 - RNA, 19 nt, Artificial Sequence
  Description of Artificial Sequence: Synthetic oligonucleotide
cuugcgauccacacaccag

SEQ ID NO: 887582 - RNA, 19 nt, Artificial Sequence
  Description of Artificial Sequence: Synthetic oligonucleotide
auagggaugaugacuaggu

SEQ ID NO: 887583 - RNA, 19 nt, Artificial Sequence
  Description of Artificial Sequence: Synthetic oligonucleotide
cacagaaggggagagcggg

SEQ ID NO: 887584 - RNA, 19 nt, Artificial Sequence
  Description of Artificial Sequence: Synthetic oligonucleotide
uuaggacccaauacccaga

SEQ ID NO: 887585 - RNA, 19 nt, Artificial Sequence
  Description of Artificial Sequence: Synthetic oligonucleotide
ugagccuaaagcccucuuc

SEQ ID NO: 887586 - RNA, 19 nt, Artificial Sequence
  Description of Artificial Sequence: Synthetic oligonucleotide
acauacuggggcuuccugu

SEQ ID NO: 887587 - RNA, 19 nt, Artificial Sequence
  Description of Artificial Sequence: Synthetic oligonucleotide
ugaccagacccggagggcg

SEQ ID NO: 887588 - RNA, 19 nt, Artificial Sequence
  Description of Artificial Sequence: Synthetic oligonucleotide
auacauguuuucagauggc

SEQ ID NO: 887589 - RNA, 19 nt, Artificial Sequence
  Description of Artificial Sequence: Synthetic oligonucleotide
cuugccacguuguccgucc

SEQ ID NO: 887590 - RNA, 19 nt, Artificial Sequence
  Description of Artificial Sequence: Synthetic oligonucleotide
cauuuucgccauaugcuuc

SEQ ID NO: 887591 - RNA, 19 nt, Artificial Sequence
  Description of Artificial Sequence: Synthetic oligonucleotide
ggaaauuagaaugaggccu

SEQ ID NO: 887592 - RNA, 19 nt, Artificial Sequence
  Description of Artificial Sequence: Synthetic oligonucleotide
uggcauguaguauguugcc

SEQ ID NO: 887593 - RNA, 19 nt, Artificial Sequence
  Description of Artificial Sequence: Synthetic oligonucleotide
guuugaugaccagacccgg

SEQ ID NO: 887594 - RNA, 19 nt, Artificial Sequence
  Description of Artificial Sequence: Synthetic oligonucleotide
gaaccugaggaaugagaac

SEQ ID NO: 887595 - RNA, 19 nt, Artificial Sequence
  Description of Artificial Sequence: Synthetic oligonucleotide
cucccagugcguuugauga

SEQ ID NO: 887596 - RNA, 19 nt, Artificial Sequence
  Description of Artificial Sequence: Synthetic oligonucleotide
cugcaagggacccggaggc

SEQ ID NO: 887597 - RNA, 19 nt, Artificial Sequence
  Description of Artificial Sequence: Synthetic oligonucleotide
uuuauaggacuaccacaau

SEQ ID NO: 887598 - RNA, 19 nt, Artificial Sequence
  Description of Artificial Sequence: Synthetic oligonucleotide
aucccggugacgucaugac

SEQ ID NO: 887599 - RNA, 19 nt, Artificial Sequence
  Description of Artificial Sequence: Synthetic oligonucleotide
auuugugcccauaaacaca

SEQ ID NO: 887600 - RNA, 19 nt, Artificial Sequence
  Description of Artificial Sequence: Synthetic oligonucleotide
auaguggguacucuagguu

SEQ ID NO: 887601 - RNA, 19 nt, Artificial Sequence
  Description of Artificial Sequence: Synthetic oligonucleotide
ugcguuugaugaccagacc

SEQ ID NO: 887602 - RNA, 19 nt, Artificial Sequence
  Description of Artificial Sequence: Synthetic oligonucleotide
agaacaaagcuuggcauaa

SEQ ID NO: 887603 - RNA, 19 nt, Artificial Sequence
  Description of Artificial Sequence: Synthetic oligonucleotide
ucgcgagagggcugcaagg

SEQ ID NO: 887604 - RNA, 19 nt, Artificial Sequence
  Description of Artificial Sequence: Synthetic oligonucleotide
cuccgaucucgcauuuucg

SEQ ID NO: 887605 - RNA, 19 nt, Artificial Sequence
  Description of Artificial Sequence: Synthetic oligonucleotide
gcaccuaugaucaugggca

SEQ ID NO: 887606 - RNA, 19 nt, Artificial Sequence
  Description of Artificial Sequence: Synthetic oligonucleotide
ggguacucuagguucaggc

SEQ ID NO: 887607 - RNA, 19 nt, Artificial Sequence
  Description of Artificial Sequence: Synthetic oligonucleotide
ugcgauccacacaccagca

SEQ ID NO: 887608 - RNA, 19 nt, Artificial Sequence
  Description of Artificial Sequence: Synthetic oligonucleotide
ggcaccuaugaucaugggc

SEQ ID NO: 887609 - RNA, 19 nt, Artificial Sequence
  Description of Artificial Sequence: Synthetic oligonucleotide
gucuauccaggcaagccag

SEQ ID NO: 887610 - RNA, 19 nt, Artificial Sequence
  Description of Artificial Sequence: Synthetic oligonucleotide
agugcguuugaugaccaga

SEQ ID NO: 887611 - RNA, 19 nt, Artificial Sequence
  Description of Artificial Sequence: Synthetic oligonucleotide
gcaguggauggcuucgucg

SEQ ID NO: 887612 - RNA, 19 nt, Artificial Sequence
  Description of Artificial Sequence: Synthetic oligonucleotide
guaguauguugccaauaca

SEQ ID NO: 887613 - RNA, 19 nt, Artificial Sequence
  Description of Artificial Sequence: Synthetic oligonucleotide
gaaaaugcccaggagggua

SEQ ID NO: 887614 - RNA, 19 nt, Artificial Sequence
  Description of Artificial Sequence: Synthetic oligonucleotide
ugugcgcagggguuucucc

SEQ ID NO: 887615 - RNA, 19 nt, Artificial Sequence
  Description of Artificial Sequence: Synthetic oligonucleotide
gguagggucaucccgguga

SEQ ID NO: 887616 - RNA, 19 nt, Artificial Sequence
  Description of Artificial Sequence: Synthetic oligonucleotide
auacccagacccaaagaug

SEQ ID NO: 887617 - RNA, 19 nt, Artificial Sequence
  Description of Artificial Sequence: Synthetic oligonucleotide
ucuauccaggcaagccaga

SEQ ID NO: 887618 - RNA, 19 nt, Artificial Sequence
  Description of Artificial Sequence: Synthetic oligonucleotide
ucuacgcccauagugggua

SEQ ID NO: 887619 - RNA, 19 nt, Artificial Sequence
  Description of Artificial Sequence: Synthetic oligonucleotide
cuacuggcaggccucacuc

SEQ ID NO: 887620 - RNA, 19 nt, Artificial Sequence
  Description of Artificial Sequence: Synthetic oligonucleotide
caucuugcuccgaucucgc

SEQ ID NO: 887621 - RNA, 19 nt, Artificial Sequence
  Description of Artificial Sequence: Synthetic oligonucleotide
guguacaccccgcagggca

SEQ ID NO: 887622 - RNA, 19 nt, Artificial Sequence
  Description of Artificial Sequence: Synthetic oligonucleotide
ucacucuuggaagcuguca

SEQ ID NO: 887623 - RNA, 19 nt, Artificial Sequence
  Description of Artificial Sequence: Synthetic oligonucleotide
acacacacacacugcacau

SEQ ID NO: 887624 - RNA, 19 nt, Artificial Sequence
  Description of Artificial Sequence: Synthetic oligonucleotide
gggcugaaaacuaaagcug

SEQ ID NO: 887625 - RNA, 19 nt, Artificial Sequence
  Description of Artificial Sequence: Synthetic oligonucleotide
aagcacgcuggagcagagc

SEQ ID NO: 887626 - RNA, 19 nt, Artificial Sequence
  Description of Artificial Sequence: Synthetic oligonucleotide
cguuugaugaccagacccg

SEQ ID NO: 887627 - RNA, 19 nt, Artificial Sequence
  Description of Artificial Sequence: Synthetic oligonucleotide
aagcaggucucuaagucua

SEQ ID NO: 887628 - RNA, 19 nt, Artificial Sequence
  Description of Artificial Sequence: Synthetic oligonucleotide
cucuugggcuaucuacgcc

SEQ ID NO: 887629 - RNA, 19 nt, Artificial Sequence
  Description of Artificial Sequence: Synthetic oligonucleotide
aggcuuaccccaugggcca

SEQ ID NO: 887630 - RNA, 19 nt, Artificial Sequence
  Description of Artificial Sequence: Synthetic oligonucleotide
gccaauacauguuuucaga

SEQ ID NO: 887631 - RNA, 19 nt, Artificial Sequence
  Description of Artificial Sequence: Synthetic oligonucleotide
cacguuguccguccagggc

SEQ ID NO: 887632 - RNA, 19 nt, Artificial Sequence
  Description of Artificial Sequence: Synthetic oligonucleotide
cucgcgagagggcugcaag

SEQ ID NO: 887633 - RNA, 19 nt, Artificial Sequence
  Description of Artificial Sequence: Synthetic oligonucleotide
uucaccccugucuugcgau

SEQ ID NO: 887634 - RNA, 19 nt, Artificial Sequence
  Description of Artificial Sequence: Synthetic oligonucleotide
ggaaagguagggucauccc

SEQ ID NO: 887635 - RNA, 19 nt, Artificial Sequence
  Description of Artificial Sequence: Synthetic oligonucleotide
gcaacaaccgcagccaggc

SEQ ID NO: 887636 - RNA, 19 nt, Artificial Sequence
  Description of Artificial Sequence: Synthetic oligonucleotide
uccucgcaacccacagggg

SEQ ID NO: 887637 - RNA, 19 nt, Artificial Sequence
  Description of Artificial Sequence: Synthetic oligonucleotide
gugcguuugaugaccagac

SEQ ID NO: 887638 - RNA, 19 nt, Artificial Sequence
  Description of Artificial Sequence: Synthetic oligonucleotide
gggaaguuagcaagcacgc

SEQ ID NO: 887639 - RNA, 19 nt, Artificial Sequence
  Description of Artificial Sequence: Synthetic oligonucleotide
gagcgggcucgcgagaggg

SEQ ID NO: 887640 - RNA, 19 nt, Artificial Sequence
  Description of Artificial Sequence: Synthetic oligonucleotide
ugggcccugucccucaauc

SEQ ID NO: 887641 - RNA, 19 nt, Artificial Sequence
  Description of Artificial Sequence: Synthetic oligonucleotide
agauugauuugaaaacaua

SEQ ID NO: 887642 - RNA, 19 nt, Artificial Sequence
  Description of Artificial Sequence: Synthetic oligonucleotide
cuaaagcuggcauguagua

SEQ ID NO: 887643 - RNA, 19 nt, Artificial Sequence
  Description of Artificial Sequence: Synthetic oligonucleotide
cucggaccaaaacuccaug

SEQ ID NO: 887644 - RNA, 19 nt, Artificial Sequence
  Description of Artificial Sequence: Synthetic oligonucleotide
cauacacaucaagggaaac

SEQ ID NO: 887645 - RNA, 19 nt, Artificial Sequence
  Description of Artificial Sequence: Synthetic oligonucleotide
guuguugggauggucgcuc

SEQ ID NO: 887646 - RNA, 19 nt, Artificial Sequence
  Description of Artificial Sequence: Synthetic oligonucleotide
uguacaccccgcagggcau

SEQ ID NO: 887647 - RNA, 19 nt, Artificial Sequence
  Description of Artificial Sequence: Synthetic oligonucleotide
ucucgcauuuucgccauau

SEQ ID NO: 887648 - RNA, 19 nt, Artificial Sequence
  Description of Artificial Sequence: Synthetic oligonucleotide
acuagguuggagagggaga

SEQ ID NO: 887649 - RNA, 19 nt, Artificial Sequence
  Description of Artificial Sequence: Synthetic oligonucleotide
gcggccacgaggccgaagg

SEQ ID NO: 887650 - RNA, 19 nt, Artificial Sequence
  Description of Artificial Sequence: Synthetic oligonucleotide
gaaugaauucaagauugau

SEQ ID NO: 887651 - RNA, 19 nt, Artificial Sequence
  Description of Artificial Sequence: Synthetic oligonucleotide
uggguacucuagguucagg

SEQ ID NO: 887652 - RNA, 19 nt, Artificial Sequence
  Description of Artificial Sequence: Synthetic oligonucleotide
gggcuaucuacgcccauag

SEQ ID NO: 887653 - RNA, 19 nt, Artificial Sequence
  Description of Artificial Sequence: Synthetic oligonucleotide
ucaugagccuaaagcccuc

SEQ ID NO: 887654 - RNA, 19 nt, Artificial Sequence
  Description of Artificial Sequence: Synthetic oligonucleotide
ugccacguuguccguccag

SEQ ID NO: 887655 - RNA, 19 nt, Artificial Sequence
  Description of Artificial Sequence: Synthetic oligonucleotide
gcauguaguauguugccaa

SEQ ID NO: 887656 - RNA, 19 nt, Artificial Sequence
  Description of Artificial Sequence: Synthetic oligonucleotide
gggagaguggucaauguuc

SEQ ID NO: 887657 - RNA, 19 nt, Artificial Sequence
  Description of Artificial Sequence: Synthetic oligonucleotide
ggcugaaugaaugaaugaa

SEQ ID NO: 887658 - RNA, 19 nt, Artificial Sequence
  Description of Artificial Sequence: Synthetic oligonucleotide
aguggguacucuagguuca

SEQ ID NO: 887659 - RNA, 19 nt, Artificial Sequence
  Description of Artificial Sequence: Synthetic oligonucleotide
agcuggaaagguaggguca

SEQ ID NO: 887660 - RNA, 19 nt, Artificial Sequence
  Description of Artificial Sequence: Synthetic oligonucleotide
gagagcgggcucgcgagag

SEQ ID NO: 887661 - RNA, 19 nt, Artificial Sequence
  Description of Artificial Sequence: Synthetic oligonucleotide
cauaguggguacucuaggu

SEQ ID NO: 887662 - RNA, 19 nt, Artificial Sequence
  Description of Artificial Sequence: Synthetic oligonucleotide
uccgugcacacgccuugcc

SEQ ID NO: 887663 - RNA, 19 nt, Artificial Sequence
  Description of Artificial Sequence: Synthetic oligonucleotide
gagaguggucaauguucac

SEQ ID NO: 887664 - RNA, 19 nt, Artificial Sequence
  Description of Artificial Sequence: Synthetic oligonucleotide
acuugccacguuguccguc

SEQ ID NO: 887665 - RNA, 19 nt, Artificial Sequence
  Description of Artificial Sequence: Synthetic oligonucleotide
caggacucggaccaaaacu

SEQ ID NO: 887666 - RNA, 19 nt, Artificial Sequence
  Description of Artificial Sequence: Synthetic oligonucleotide
gauggcugaaugaaugaau

SEQ ID NO: 887667 - RNA, 19 nt, Artificial Sequence
  Description of Artificial Sequence: Synthetic oligonucleotide
aguuagcaagcacgcugga

SEQ ID NO: 887668 - RNA, 19 nt, Artificial Sequence
  Description of Artificial Sequence: Synthetic oligonucleotide
gacggggcuccucccgagg

SEQ ID NO: 887669 - RNA, 19 nt, Artificial Sequence
  Description of Artificial Sequence: Synthetic oligonucleotide
ucccgagguguccccacca

SEQ ID NO: 887670 - RNA, 19 nt, Artificial Sequence
  Description of Artificial Sequence: Synthetic oligonucleotide
cuuggguccggcucugaga

SEQ ID NO: 887671 - RNA, 19 nt, Artificial Sequence
  Description of Artificial Sequence: Synthetic oligonucleotide
gagggcgcggggacaaggg

SEQ ID NO: 887672 - RNA, 19 nt, Artificial Sequence
  Description of Artificial Sequence: Synthetic oligonucleotide
aggacgaagauggggcaca

SEQ ID NO: 887673 - RNA, 19 nt, Artificial Sequence
  Description of Artificial Sequence: Synthetic oligonucleotide
caguugugaugggaagggg

SEQ ID NO: 887674 - RNA, 19 nt, Artificial Sequence
  Description of Artificial Sequence: Synthetic oligonucleotide
agagcgggcucgcgagagg

SEQ ID NO: 887675 - RNA, 19 nt, Artificial Sequence
  Description of Artificial Sequence: Synthetic oligonucleotide
guugcuacacucagaccuc

SEQ ID NO: 887676 - RNA, 19 nt, Artificial Sequence
  Description of Artificial Sequence: Synthetic oligonucleotide
aggcaccuaugaucauggg

SEQ ID NO: 887677 - RNA, 19 nt, Artificial Sequence
  Description of Artificial Sequence: Synthetic oligonucleotide
gaggacgaagauggggcac

SEQ ID NO: 887678 - RNA, 19 nt, Artificial Sequence
  Description of Artificial Sequence: Synthetic oligonucleotide
caagcaggucucuaagucu

SEQ ID NO: 887679 - RNA, 19 nt, Artificial Sequence
  Description of Artificial Sequence: Synthetic oligonucleotide
guacucuagguucaggcuu

SEQ ID NO: 887680 - RNA, 19 nt, Artificial Sequence
  Description of Artificial Sequence: Synthetic oligonucleotide
cucgcauuuucgccauaug

SEQ ID NO: 887681 - RNA, 19 nt, Artificial Sequence
  Description of Artificial Sequence: Synthetic oligonucleotide
ccgaucucgcauuuucgcc

SEQ ID NO: 887682 - RNA, 19 nt, Artificial Sequence
  Description of Artificial Sequence: Synthetic oligonucleotide
accacaauuaggacccaau

SEQ ID NO: 887683 - RNA, 19 nt, Artificial Sequence
  Description of Artificial Sequence: Synthetic oligonucleotide
acgcccauaguggguacuc

SEQ ID NO: 887684 - RNA, 19 nt, Artificial Sequence
  Description of Artificial Sequence: Synthetic oligonucleotide
aaacuaaagcuggcaugua

SEQ ID NO: 887685 - RNA, 19 nt, Artificial Sequence
  Description of Artificial Sequence: Synthetic oligonucleotide
cagcgcaugccugagccac

SEQ ID NO: 887686 - RNA, 19 nt, Artificial Sequence
  Description of Artificial Sequence: Synthetic oligonucleotide
acaaggggcggccccggca

SEQ ID NO: 887687 - RNA, 19 nt, Artificial Sequence
  Description of Artificial Sequence: Synthetic oligonucleotide
caagcacgcuggagcagag

SEQ ID NO: 887688 - RNA, 19 nt, Artificial Sequence
  Description of Artificial Sequence: Synthetic oligonucleotide
cgugcacacgccuugcccg

SEQ ID NO: 887689 - RNA, 19 nt, Artificial Sequence
  Description of Artificial Sequence: Synthetic oligonucleotide
gguagcagcgcaugccuga

SEQ ID NO: 887690 - RNA, 19 nt, Artificial Sequence
  Description of Artificial Sequence: Synthetic oligonucleotide
cacucagaccucuugggcu

SEQ ID NO: 887691 - RNA, 19 nt, Artificial Sequence
  Description of Artificial Sequence: Synthetic oligonucleotide
gacccaaagaugggcccug

SEQ ID NO: 887692 - RNA, 19 nt, Artificial Sequence
  Description of Artificial Sequence: Synthetic oligonucleotide
cccggugacgucaugacca

SEQ ID NO: 887693 - RNA, 19 nt, Artificial Sequence
  Description of Artificial Sequence: Synthetic oligonucleotide
ugacuagguuggagaggga

SEQ ID NO: 887694 - RNA, 19 nt, Artificial Sequence
  Description of Artificial Sequence: Synthetic oligonucleotide
uagcagcgcaugccugagc

SEQ ID NO: 887695 - RNA, 19 nt, Artificial Sequence
  Description of Artificial Sequence: Synthetic oligonucleotide
gcuccgaucucgcauuuuc

SEQ ID NO: 887696 - RNA, 19 nt, Artificial Sequence
  Description of Artificial Sequence: Synthetic oligonucleotide
uuguccguccagggcgggg

SEQ ID NO: 887697 - RNA, 19 nt, Artificial Sequence
  Description of Artificial Sequence: Synthetic oligonucleotide
ugggcuaucuacgcccaua

SEQ ID NO: 887698 - RNA, 19 nt, Artificial Sequence
  Description of Artificial Sequence: Synthetic oligonucleotide
ccucuugggcuaucuacgc

SEQ ID NO: 887699 - RNA, 19 nt, Artificial Sequence
  Description of Artificial Sequence: Synthetic oligonucleotide
caccccugucuugcgaucc

SEQ ID NO: 887700 - RNA, 19 nt, Artificial Sequence
  Description of Artificial Sequence: Synthetic oligonucleotide
gugacgucaugaccagaga

SEQ ID NO: 887701 - RNA, 19 nt, Artificial Sequence
  Description of Artificial Sequence: Synthetic oligonucleotide
gaucuccgacagcuccgug

SEQ ID NO: 887702 - RNA, 19 nt, Artificial Sequence
  Description of Artificial Sequence: Synthetic oligonucleotide
auggucgcucucauccuug

SEQ ID NO: 887703 - RNA, 19 nt, Artificial Sequence
  Description of Artificial Sequence: Synthetic oligonucleotide
gcuucgucgcccaggcucg

SEQ ID NO: 887704 - RNA, 19 nt, Artificial Sequence
  Description of Artificial Sequence: Synthetic oligonucleotide
cagugcguuugaugaccag

SEQ ID NO: 887705 - RNA, 19 nt, Artificial Sequence
  Description of Artificial Sequence: Synthetic oligonucleotide
aggacggggcuccucccga

SEQ ID NO: 887706 - RNA, 19 nt, Artificial Sequence
  Description of Artificial Sequence: Synthetic oligonucleotide
gcaggcaccuaugaucaug

SEQ ID NO: 887707 - RNA, 19 nt, Artificial Sequence
  Description of Artificial Sequence: Synthetic oligonucleotide
ggacucggaccaaaacucc

SEQ ID NO: 887708 - RNA, 19 nt, Artificial Sequence
  Description of Artificial Sequence: Synthetic oligonucleotide
accuaugaucaugggcacu

SEQ ID NO: 887709 - RNA, 19 nt, Artificial Sequence
  Description of Artificial Sequence: Synthetic oligonucleotide
caccccgcagggcaucccc

SEQ ID NO: 887710 - RNA, 19 nt, Artificial Sequence
  Description of Artificial Sequence: Synthetic oligonucleotide
ucaccccugucuugcgauc

SEQ ID NO: 887711 - RNA, 19 nt, Artificial Sequence
  Description of Artificial Sequence: Synthetic oligonucleotide
gccauugcggucacaguug

SEQ ID NO: 887712 - RNA, 19 nt, Artificial Sequence
  Description of Artificial Sequence: Synthetic oligonucleotide
agggcacaaguggcgcaac

SEQ ID NO: 887713 - RNA, 19 nt, Artificial Sequence
  Description of Artificial Sequence: Synthetic oligonucleotide
cuacgcccauaguggguac

SEQ ID NO: 887714 - RNA, 19 nt, Artificial Sequence
  Description of Artificial Sequence: Synthetic oligonucleotide
ggaccccaccuacuggcag

SEQ ID NO: 887715 - RNA, 19 nt, Artificial Sequence
  Description of Artificial Sequence: Synthetic oligonucleotide
uacgcccauaguggguacu

SEQ ID NO: 887716 - RNA, 19 nt, Artificial Sequence
  Description of Artificial Sequence: Synthetic oligonucleotide
cucccgagguguccccacc

SEQ ID NO: 887717 - RNA, 19 nt, Artificial Sequence
  Description of Artificial Sequence: Synthetic oligonucleotide
uugccacguuguccgucca

SEQ ID NO: 887718 - RNA, 19 nt, Artificial Sequence
  Description of Artificial Sequence: Synthetic oligonucleotide
augagccuaaagcccucuu

SEQ ID NO: 887719 - RNA, 19 nt, Artificial Sequence
  Description of Artificial Sequence: Synthetic oligonucleotide
ggcauguaguauguugcca

SEQ ID NO: 887720 - RNA, 19 nt, Artificial Sequence
  Description of Artificial Sequence: Synthetic oligonucleotide
cacuccccggggaggguag

SEQ ID NO: 887721 - RNA, 19 nt, Artificial Sequence
  Description of Artificial Sequence: Synthetic oligonucleotide
aucuacgcccauagugggu

SEQ ID NO: 887722 - RNA, 19 nt, Artificial Sequence
  Description of Artificial Sequence: Synthetic oligonucleotide
cuucaccccugucuugcga

SEQ ID NO: 887723 - RNA, 19 nt, Artificial Sequence
  Description of Artificial Sequence: Synthetic oligonucleotide
aggggccuaguagggagca

SEQ ID NO: 887724 - RNA, 19 nt, Artificial Sequence
  Description of Artificial Sequence: Synthetic oligonucleotide
gauggucgcucucauccuu

SEQ ID NO: 887725 - RNA, 19 nt, Artificial Sequence
  Description of Artificial Sequence: Synthetic oligonucleotide
ggcgcaacaaccgcagcca

SEQ ID NO: 887726 - RNA, 19 nt, Artificial Sequence
  Description of Artificial Sequence: Synthetic oligonucleotide
cauacuggggcuuccuguu

SEQ ID NO: 887727 - RNA, 19 nt, Artificial Sequence
  Description of Artificial Sequence: Synthetic oligonucleotide
gcgugggguguacaccccg

SEQ ID NO: 887728 - RNA, 19 nt, Artificial Sequence
  Description of Artificial Sequence: Synthetic oligonucleotide
gcggcagcgggccagcuuc

SEQ ID NO: 887729 - RNA, 19 nt, Artificial Sequence
  Description of Artificial Sequence: Synthetic oligonucleotide
cuugcuccgaucucgcauu

SEQ ID NO: 887730 - RNA, 19 nt, Artificial Sequence
  Description of Artificial Sequence: Synthetic oligonucleotide
agcgggcucgcgagagggc

SEQ ID NO: 887731 - RNA, 19 nt, Artificial Sequence
  Description of Artificial Sequence: Synthetic oligonucleotide
gaccacaauuaggacccaa

SEQ ID NO: 887732 - RNA, 19 nt, Artificial Sequence
  Description of Artificial Sequence: Synthetic oligonucleotide
guggcgcaacaaccgcagc

SEQ ID NO: 887733 - RNA, 19 nt, Artificial Sequence
  Description of Artificial Sequence: Synthetic oligonucleotide
gcuccgugcacacgccuug

SEQ ID NO: 887734 - RNA, 19 nt, Artificial Sequence
  Description of Artificial Sequence: Synthetic oligonucleotide
gcccgugcaucagugugcg

SEQ ID NO: 887735 - RNA, 19 nt, Artificial Sequence
  Description of Artificial Sequence: Synthetic oligonucleotide
ggagggcgcggggacaagg

SEQ ID NO: 887736 - RNA, 19 nt, Artificial Sequence
  Description of Artificial Sequence: Synthetic oligonucleotide
accuacuggcaggccucac

SEQ ID NO: 887737 - RNA, 19 nt, Artificial Sequence
  Description of Artificial Sequence: Synthetic oligonucleotide
ggccacgaggccgaagggc

SEQ ID NO: 887738 - RNA, 19 nt, Artificial Sequence
  Description of Artificial Sequence: Synthetic oligonucleotide
cuccucccgaggugucccc

SEQ ID NO: 887739 - RNA, 19 nt, Artificial Sequence
  Description of Artificial Sequence: Synthetic oligonucleotide
ccgugcacacgccuugccc

SEQ ID NO: 887740 - RNA, 19 nt, Artificial Sequence
  Description of Artificial Sequence: Synthetic oligonucleotide
ccuaaagcccucuucuacu

SEQ ID NO: 887741 - RNA, 19 nt, Artificial Sequence
  Description of Artificial Sequence: Synthetic oligonucleotide
gcaagcacgcuggagcaga

SEQ ID NO: 887742 - RNA, 19 nt, Artificial Sequence
  Description of Artificial Sequence: Synthetic oligonucleotide
guuguccguccagggcggg

SEQ ID NO: 887743 - RNA, 19 nt, Artificial Sequence
  Description of Artificial Sequence: Synthetic oligonucleotide
caaggggcggccccggcaa

SEQ ID NO: 887744 - RNA, 19 nt, Artificial Sequence
  Description of Artificial Sequence: Synthetic oligonucleotide
cgugcaucagugugcgcag

SEQ ID NO: 887745 - RNA, 19 nt, Artificial Sequence
  Description of Artificial Sequence: Synthetic oligonucleotide
ugcaggcaccuaugaucau

SEQ ID NO: 887746 - RNA, 19 nt, Artificial Sequence
  Description of Artificial Sequence: Synthetic oligonucleotide
cagagcgagccuggccacc

SEQ ID NO: 887747 - RNA, 19 nt, Artificial Sequence
  Description of Artificial Sequence: Synthetic oligonucleotide
ccaccuacuggcaggccuc

SEQ ID NO: 887748 - RNA, 19 nt, Artificial Sequence
  Description of Artificial Sequence: Synthetic oligonucleotide
acgcuggagcagagcgagc

SEQ ID NO: 887749 - RNA, 19 nt, Artificial Sequence
  Description of Artificial Sequence: Synthetic oligonucleotide
ucgcucuggcaggaacccu

SEQ ID NO: 887750 - RNA, 19 nt, Artificial Sequence
  Description of Artificial Sequence: Synthetic oligonucleotide
ggcacaaguggcgcaacaa

SEQ ID NO: 887751 - RNA, 19 nt, Artificial Sequence
  Description of Artificial Sequence: Synthetic oligonucleotide
uggcuucgucgcccaggcu

SEQ ID NO: 887752 - RNA, 19 nt, Artificial Sequence
  Description of Artificial Sequence: Synthetic oligonucleotide
gucuugcgauccacacacc

SEQ ID NO: 887753 - RNA, 19 nt, Artificial Sequence
  Description of Artificial Sequence: Synthetic oligonucleotide
gaugggcccugucccucaa

SEQ ID NO: 887754 - RNA, 19 nt, Artificial Sequence
  Description of Artificial Sequence: Synthetic oligonucleotide
cgcgagagggcugcaaggg

SEQ ID NO: 887755 - RNA, 19 nt, Artificial Sequence
  Description of Artificial Sequence: Synthetic oligonucleotide
cagggacggagcuggggaa

SEQ ID NO: 887756 - RNA, 19 nt, Artificial Sequence
  Description of Artificial Sequence: Synthetic oligonucleotide
ccggugacgucaugaccag

SEQ ID NO: 887757 - RNA, 19 nt, Artificial Sequence
  Description of Artificial Sequence: Synthetic oligonucleotide
acacgccuugcccgugcau

SEQ ID NO: 887758 - RNA, 19 nt, Artificial Sequence
  Description of Artificial Sequence: Synthetic oligonucleotide
ggcgcugcgcugcauccuc

SEQ ID NO: 887759 - RNA, 19 nt, Artificial Sequence
  Description of Artificial Sequence: Synthetic oligonucleotide
ucagaccucuugggcuauc

SEQ ID NO: 887760 - RNA, 19 nt, Artificial Sequence
  Description of Artificial Sequence: Synthetic oligonucleotide
ggacggggcuccucccgag

SEQ ID NO: 887761 - RNA, 19 nt, Artificial Sequence
  Description of Artificial Sequence: Synthetic oligonucleotide
cuucgucgcccaggcucgg

SEQ ID NO: 887762 - RNA, 19 nt, Artificial Sequence
  Description of Artificial Sequence: Synthetic oligonucleotide
ccauaaacacacacacacu

SEQ ID NO: 887763 - RNA, 19 nt, Artificial Sequence
  Description of Artificial Sequence: Synthetic oligonucleotide
acccaaagaugggcccugu

SEQ ID NO: 887764 - RNA, 19 nt, Artificial Sequence
  Description of Artificial Sequence: Synthetic oligonucleotide
accgaggcgcugcgcugca

SEQ ID NO: 887765 - RNA, 19 nt, Artificial Sequence
  Description of Artificial Sequence: Synthetic oligonucleotide
gugggucucaugagccuaa

SEQ ID NO: 887766 - RNA, 19 nt, Artificial Sequence
  Description of Artificial Sequence: Synthetic oligonucleotide
uuaccccaugggccacauu

SEQ ID NO: 887767 - RNA, 19 nt, Artificial Sequence
  Description of Artificial Sequence: Synthetic oligonucleotide
gucgcccaggcucggccga

SEQ ID NO: 887768 - RNA, 19 nt, Artificial Sequence
  Description of Artificial Sequence: Synthetic oligonucleotide
gcgagccuggccaccgagg

SEQ ID NO: 887769 - RNA, 19 nt, Artificial Sequence
  Description of Artificial Sequence: Synthetic oligonucleotide
ucgcccaggcucggccgag

SEQ ID NO: 887770 - RNA, 19 nt, Artificial Sequence
  Description of Artificial Sequence: Synthetic oligonucleotide
ccgacagcuccgugcacac

SEQ ID NO: 887771 - RNA, 19 nt, Artificial Sequence
  Description of Artificial Sequence: Synthetic oligonucleotide
gcgagagggcugcaaggga

SEQ ID NO: 887772 - RNA, 19 nt, Artificial Sequence
  Description of Artificial Sequence: Synthetic oligonucleotide
gggcacaaguggcgcaaca

SEQ ID NO: 887773 - RNA, 19 nt, Artificial Sequence
  Description of Artificial Sequence: Synthetic oligonucleotide
cagggcacaaguggcgcaa

SEQ ID NO: 887774 - RNA, 19 nt, Artificial Sequence
  Description of Artificial Sequence: Synthetic oligonucleotide
gcccauaguggguacucua

SEQ ID NO: 887775 - RNA, 19 nt, Artificial Sequence
  Description of Artificial Sequence: Synthetic oligonucleotide
agcuccgugcacacgccuu

SEQ ID NO: 887776 - RNA, 19 nt, Artificial Sequence
  Description of Artificial Sequence: Synthetic oligonucleotide
gcaggucucuaagucuauc

SEQ ID NO: 887777 - RNA, 19 nt, Artificial Sequence
  Description of Artificial Sequence: Synthetic oligonucleotide
ggugggucucaugagccua

SEQ ID NO: 887778 - RNA, 19 nt, Artificial Sequence
  Description of Artificial Sequence: Synthetic oligonucleotide
ggguagcagcgcaugccug

SEQ ID NO: 887779 - RNA, 19 nt, Artificial Sequence
  Description of Artificial Sequence: Synthetic oligonucleotide
gcgcaugccugagccacag

SEQ ID NO: 887780 - RNA, 19 nt, Artificial Sequence
  Description of Artificial Sequence: Synthetic oligonucleotide
ugcuccgaucucgcauuuu

SEQ ID NO: 887781 - RNA, 19 nt, Artificial Sequence
  Description of Artificial Sequence: Synthetic oligonucleotide
ggucgcucucauccuuguc

SEQ ID NO: 887782 - RNA, 19 nt, Artificial Sequence
  Description of Artificial Sequence: Synthetic oligonucleotide
aucucgcauuuucgccaua

SEQ ID NO: 887783 - RNA, 19 nt, Artificial Sequence
  Description of Artificial Sequence: Synthetic oligonucleotide
gagcgagccuggccaccga

SEQ ID NO: 887784 - RNA, 19 nt, Artificial Sequence
  Description of Artificial Sequence: Synthetic oligonucleotide
guacaccccgcagggcauc

SEQ ID NO: 887785 - RNA, 19 nt, Artificial Sequence
  Description of Artificial Sequence: Synthetic oligonucleotide
agcgcaugccugagccaca

SEQ ID NO: 887786 - RNA, 19 nt, Artificial Sequence
  Description of Artificial Sequence: Synthetic oligonucleotide
cccaauacccagacccaaa

SEQ ID NO: 887787 - RNA, 19 nt, Artificial Sequence
  Description of Artificial Sequence: Synthetic oligonucleotide
cacacgccuugcccgugca

SEQ ID NO: 887788 - RNA, 19 nt, Artificial Sequence
  Description of Artificial Sequence: Synthetic oligonucleotide
ggauggucgcucucauccu

SEQ ID NO: 887789 - RNA, 19 nt, Artificial Sequence
  Description of Artificial Sequence: Synthetic oligonucleotide
aggcgcugcgcugcauccu

SEQ ID NO: 887790 - RNA, 19 nt, Artificial Sequence
  Description of Artificial Sequence: Synthetic oligonucleotide
ggccucccagggcugaaaa

SEQ ID NO: 887791 - RNA, 19 nt, Artificial Sequence
  Description of Artificial Sequence: Synthetic oligonucleotide
ccagggcggggugacacug

SEQ ID NO: 887792 - RNA, 19 nt, Artificial Sequence
  Description of Artificial Sequence: Synthetic oligonucleotide
caaccgcagccaggcuccc

SEQ ID NO: 887793 - RNA, 19 nt, Artificial Sequence
  Description of Artificial Sequence: Synthetic oligonucleotide
gcagcgcaugccugagcca

SEQ ID NO: 887794 - RNA, 19 nt, Artificial Sequence
  Description of Artificial Sequence: Synthetic oligonucleotide
cgucgcccaggcucggccg

SEQ ID NO: 887795 - RNA, 19 nt, Artificial Sequence
  Description of Artificial Sequence: Synthetic oligonucleotide
cccgagguguccccaccac

SEQ ID NO: 887796 - RNA, 19 nt, Artificial Sequence
  Description of Artificial Sequence: Synthetic oligonucleotide
gccuaguagggagcacuga

SEQ ID NO: 887797 - RNA, 19 nt, Artificial Sequence
  Description of Artificial Sequence: Synthetic oligonucleotide
ggcccggugcagcucgcuc

SEQ ID NO: 887798 - RNA, 19 nt, Artificial Sequence
  Description of Artificial Sequence: Synthetic oligonucleotide
ggcuaucuacgcccauagu

SEQ ID NO: 887799 - RNA, 19 nt, Artificial Sequence
  Description of Artificial Sequence: Synthetic oligonucleotide
ccuacuggcaggccucacu

SEQ ID NO: 887800 - RNA, 19 nt, Artificial Sequence
  Description of Artificial Sequence: Synthetic oligonucleotide
gcgcugcauccucggcccg

SEQ ID NO: 887801 - RNA, 19 nt, Artificial Sequence
  Description of Artificial Sequence: Synthetic oligonucleotide
gcgcugcgcugcauccucg

SEQ ID NO: 887802 - RNA, 19 nt, Artificial Sequence
  Description of Artificial Sequence: Synthetic oligonucleotide
ggcuuaccccaugggccac

SEQ ID NO: 887803 - RNA, 19 nt, Artificial Sequence
  Description of Artificial Sequence: Synthetic oligonucleotide
caacaaccgcagccaggcu

SEQ ID NO: 887804 - RNA, 19 nt, Artificial Sequence
  Description of Artificial Sequence: Synthetic oligonucleotide
gcuuaccccaugggccaca

SEQ ID NO: 887805 - RNA, 19 nt, Artificial Sequence
  Description of Artificial Sequence: Synthetic oligonucleotide
cagcuccgugcacacgccu

SEQ ID NO: 887806 - RNA, 19 nt, Artificial Sequence
  Description of Artificial Sequence: Synthetic oligonucleotide
cuuaccccaugggccacau

SEQ ID NO: 887807 - RNA, 19 nt, Artificial Sequence
  Description of Artificial Sequence: Synthetic oligonucleotide
gucaucccggugacgucau

SEQ ID NO: 887808 - RNA, 19 nt, Artificial Sequence
  Description of Artificial Sequence: Synthetic oligonucleotide
ggggccuaguagggagcac

SEQ ID NO: 887809 - RNA, 19 nt, Artificial Sequence
  Description of Artificial Sequence: Synthetic oligonucleotide
ccguccagggcggggugac

SEQ ID NO: 887810 - RNA, 19 nt, Artificial Sequence
  Description of Artificial Sequence: Synthetic oligonucleotide
gcgcggggacaaggggcgg

SEQ ID NO: 887811 - RNA, 19 nt, Artificial Sequence
  Description of Artificial Sequence: Synthetic oligonucleotide
cucagaccucuugggcuau

SEQ ID NO: 887812 - RNA, 19 nt, Artificial Sequence
  Description of Artificial Sequence: Synthetic oligonucleotide
gcucgcgagagggcugcaa

SEQ ID NO: 887813 - RNA, 19 nt, Artificial Sequence
  Description of Artificial Sequence: Synthetic oligonucleotide
ggccgaagggcagcauggu

SEQ ID NO: 887814 - RNA, 19 nt, Artificial Sequence
  Description of Artificial Sequence: Synthetic oligonucleotide
cccggcccagcaggcggcg

SEQ ID NO: 887815 - RNA, 19 nt, Artificial Sequence
  Description of Artificial Sequence: Synthetic oligonucleotide
cgaucuccgacagcuccgu

SEQ ID NO: 887816 - RNA, 19 nt, Artificial Sequence
  Description of Artificial Sequence: Synthetic oligonucleotide
cccggagggcgcggggaca

SEQ ID NO: 887817 - RNA, 19 nt, Artificial Sequence
  Description of Artificial Sequence: Synthetic oligonucleotide
cggugacgucaugaccaga

SEQ ID NO: 887818 - RNA, 19 nt, Artificial Sequence
  Description of Artificial Sequence: Synthetic oligonucleotide
cggagggcgcggggacaag

SEQ ID NO: 887819 - RNA, 19 nt, Artificial Sequence
  Description of Artificial Sequence: Synthetic oligonucleotide
cgcccauaguggguacucu

SEQ ID NO: 887820 - RNA, 19 nt, Artificial Sequence
  Description of Artificial Sequence: Synthetic oligonucleotide
ccgaggcgcugcgcugcau

SEQ ID NO: 887821 - RNA, 19 nt, Artificial Sequence
  Description of Artificial Sequence: Synthetic oligonucleotide
aauaauuacauuuauacag

SEQ ID NO: 887822 - RNA, 19 nt, Artificial Sequence
  Description of Artificial Sequence: Synthetic oligonucleotide
aauaucuauagauuguuuc

SEQ ID NO: 887823 - RNA, 19 nt, Artificial Sequence
  Description of Artificial Sequence: Synthetic oligonucleotide
aauaugaggaaacuuauuu

SEQ ID NO: 887824 - RNA, 19 nt, Artificial Sequence
  Description of Artificial Sequence: Synthetic oligonucleotide
ugaaagguccuuuaagugg

SEQ ID NO: 887825 - RNA, 19 nt, Artificial Sequence
  Description of Artificial Sequence: Synthetic oligonucleotide
uugaauucaaccccgaaca

SEQ ID NO: 887826 - RNA, 19 nt, Artificial Sequence
  Description of Artificial Sequence: Synthetic oligonucleotide
caucuaauaggcaugaggc

SEQ ID NO: 887827 - RNA, 19 nt, Artificial Sequence
  Description of Artificial Sequence: Synthetic oligonucleotide
ugauauuuaaugaugucga

SEQ ID NO: 887828 - RNA, 19 nt, Artificial Sequence
  Description of Artificial Sequence: Synthetic oligonucleotide
ugguauuacacuaucacca

SEQ ID NO: 887829 - RNA, 19 nt, Artificial Sequence
  Description of Artificial Sequence: Synthetic oligonucleotide
aacuuauuugaagauaggg

SEQ ID NO: 887830 - RNA, 19 nt, Artificial Sequence
  Description of Artificial Sequence: Synthetic oligonucleotide
auugaauucaaccccgaac

SEQ ID NO: 887831 - RNA, 19 nt, Artificial Sequence
  Description of Artificial Sequence: Synthetic oligonucleotide
ucaaugauuacuauacaga

SEQ ID NO: 887832 - RNA, 19 nt, Artificial Sequence
  Description of Artificial Sequence: Synthetic oligonucleotide
uuuguguaaugaaaggucc

SEQ ID NO: 887833 - RNA, 19 nt, Artificial Sequence
  Description of Artificial Sequence: Synthetic oligonucleotide
acuuauuugaagauagggc

SEQ ID NO: 887834 - RNA, 19 nt, Artificial Sequence
  Description of Artificial Sequence: Synthetic oligonucleotide
aagauugcuguucggauag

SEQ ID NO: 887835 - RNA, 19 nt, Artificial Sequence
  Description of Artificial Sequence: Synthetic oligonucleotide
ugugugacacaccucaggg

SEQ ID NO: 887836 - RNA, 19 nt, Artificial Sequence
  Description of Artificial Sequence: Synthetic oligonucleotide
uauacaaccaugagaagac

SEQ ID NO: 887837 - RNA, 19 nt, Artificial Sequence
  Description of Artificial Sequence: Synthetic oligonucleotide
uguaacaucuaauaggcau

SEQ ID NO: 887838 - RNA, 19 nt, Artificial Sequence
  Description of Artificial Sequence: Synthetic oligonucleotide
aagaugugaggacagccac

SEQ ID NO: 887839 - RNA, 19 nt, Artificial Sequence
  Description of Artificial Sequence: Synthetic oligonucleotide
aaccccgaacaacugaacc

SEQ ID NO: 887840 - RNA, 19 nt, Artificial Sequence
  Description of Artificial Sequence: Synthetic oligonucleotide
gaguuagucuucuaugugg

SEQ ID NO: 887841 - RNA, 19 nt, Artificial Sequence
  Description of Artificial Sequence: Synthetic oligonucleotide
uugagaauuucuaaauuca

SEQ ID NO: 887842 - RNA, 19 nt, Artificial Sequence
  Description of Artificial Sequence: Synthetic oligonucleotide
uuaauggacuuucucaucu

SEQ ID NO: 887843 - RNA, 19 nt, Artificial Sequence
  Description of Artificial Sequence: Synthetic oligonucleotide
uaaugaugucgauagacag

SEQ ID NO: 887844 - RNA, 19 nt, Artificial Sequence
  Description of Artificial Sequence: Synthetic oligonucleotide
uuuuguguaaugaaagguc

SEQ ID NO: 887845 - RNA, 19 nt, Artificial Sequence
  Description of Artificial Sequence: Synthetic oligonucleotide
gaugucgauagacagcagg

SEQ ID NO: 887846 - RNA, 19 nt, Artificial Sequence
  Description of Artificial Sequence: Synthetic oligonucleotide
ugugguauuacacuaucac

SEQ ID NO: 887847 - RNA, 19 nt, Artificial Sequence
  Description of Artificial Sequence: Synthetic oligonucleotide
guucggauaguguaaaagg

SEQ ID NO: 887848 - RNA, 19 nt, Artificial Sequence
  Description of Artificial Sequence: Synthetic oligonucleotide
uuuaaugaugucgauagac

SEQ ID NO: 887849 - RNA, 19 nt, Artificial Sequence
  Description of Artificial Sequence: Synthetic oligonucleotide
aucucgguaaaccuuuacc

SEQ ID NO: 887850 - RNA, 19 nt, Artificial Sequence
  Description of Artificial Sequence: Synthetic oligonucleotide
uuaaugaugucgauagaca

SEQ ID NO: 887851 - RNA, 19 nt, Artificial Sequence
  Description of Artificial Sequence: Synthetic oligonucleotide
aaugcuuagggcacaauuc

SEQ ID NO: 887852 - RNA, 19 nt, Artificial Sequence
  Description of Artificial Sequence: Synthetic oligonucleotide
aaaucagauguguuuacgu

SEQ ID NO: 887853 - RNA, 19 nt, Artificial Sequence
  Description of Artificial Sequence: Synthetic oligonucleotide
gauuacuauacagagagca

SEQ ID NO: 887854 - RNA, 19 nt, Artificial Sequence
  Description of Artificial Sequence: Synthetic oligonucleotide
aacuacagaucuccccucc

SEQ ID NO: 887855 - RNA, 19 nt, Artificial Sequence
  Description of Artificial Sequence: Synthetic oligonucleotide
ugauauauacaaccaugag

SEQ ID NO: 887856 - RNA, 19 nt, Artificial Sequence
  Description of Artificial Sequence: Synthetic oligonucleotide
uucggauaguguaaaaggc

SEQ ID NO: 887857 - RNA, 19 nt, Artificial Sequence
  Description of Artificial Sequence: Synthetic oligonucleotide
uucuaaauucacauaguac

SEQ ID NO: 887858 - RNA, 19 nt, Artificial Sequence
  Description of Artificial Sequence: Synthetic oligonucleotide
aguauuucaguaucaaagu

SEQ ID NO: 887859 - RNA, 19 nt, Artificial Sequence
  Description of Artificial Sequence: Synthetic oligonucleotide
aaugaauugugcuggguau

SEQ ID NO: 887860 - RNA, 19 nt, Artificial Sequence
  Description of Artificial Sequence: Synthetic oligonucleotide
ucucgguaaaccuuuacca

SEQ ID NO: 887861 - RNA, 19 nt, Artificial Sequence
  Description of Artificial Sequence: Synthetic oligonucleotide
aaagguaaaucagaugugu

SEQ ID NO: 887862 - RNA, 19 nt, Artificial Sequence
  Description of Artificial Sequence: Synthetic oligonucleotide
ucgguaaaccuuuaccagg

SEQ ID NO: 887863 - RNA, 19 nt, Artificial Sequence
  Description of Artificial Sequence: Synthetic oligonucleotide
uauaguuacuggcauauuu

SEQ ID NO: 887864 - RNA, 19 nt, Artificial Sequence
  Description of Artificial Sequence: Synthetic oligonucleotide
aguuuugugguucggcacg

SEQ ID NO: 887865 - RNA, 19 nt, Artificial Sequence
  Description of Artificial Sequence: Synthetic oligonucleotide
uuugaaucagaacagcauu

SEQ ID NO: 887866 - RNA, 19 nt, Artificial Sequence
  Description of Artificial Sequence: Synthetic oligonucleotide
cucuccauacuuuacgagg

SEQ ID NO: 887867 - RNA, 19 nt, Artificial Sequence
  Description of Artificial Sequence: Synthetic oligonucleotide
uaacacauggcucuuugga

SEQ ID NO: 887868 - RNA, 19 nt, Artificial Sequence
  Description of Artificial Sequence: Synthetic oligonucleotide
ucgauagacagcagggcgg

SEQ ID NO: 887869 - RNA, 19 nt, Artificial Sequence
  Description of Artificial Sequence: Synthetic oligonucleotide
ucuccauacuuuacgaggc

SEQ ID NO: 887870 - RNA, 19 nt, Artificial Sequence
  Description of Artificial Sequence: Synthetic oligonucleotide
acacauggcucuuuggaac

SEQ ID NO: 887871 - RNA, 19 nt, Artificial Sequence
  Description of Artificial Sequence: Synthetic oligonucleotide
uggguauguauagagagag

SEQ ID NO: 887872 - RNA, 19 nt, Artificial Sequence
  Description of Artificial Sequence: Synthetic oligonucleotide
aaauuuagcgccaagccau

SEQ ID NO: 887873 - RNA, 19 nt, Artificial Sequence
  Description of Artificial Sequence: Synthetic oligonucleotide
agaacuacagaucuccccu

SEQ ID NO: 887874 - RNA, 19 nt, Artificial Sequence
  Description of Artificial Sequence: Synthetic oligonucleotide
uauucgcacaacuauggug

SEQ ID NO: 887875 - RNA, 19 nt, Artificial Sequence
  Description of Artificial Sequence: Synthetic oligonucleotide
agaaacaccacaggaggcc

SEQ ID NO: 887876 - RNA, 19 nt, Artificial Sequence
  Description of Artificial Sequence: Synthetic oligonucleotide
uuucaguacagacaucuaa

SEQ ID NO: 887877 - RNA, 19 nt, Artificial Sequence
  Description of Artificial Sequence: Synthetic oligonucleotide
aaucagaacagcauuucug

SEQ ID NO: 887878 - RNA, 19 nt, Artificial Sequence
  Description of Artificial Sequence: Synthetic oligonucleotide
aaaccaguuuugugguucg

SEQ ID NO: 887879 - RNA, 19 nt, Artificial Sequence
  Description of Artificial Sequence: Synthetic oligonucleotide
uucagaucaggguuggacc

SEQ ID NO: 887880 - RNA, 19 nt, Artificial Sequence
  Description of Artificial Sequence: Synthetic oligonucleotide
agagcaaaugauguguaac

SEQ ID NO: 887881 - RNA, 19 nt, Artificial Sequence
  Description of Artificial Sequence: Synthetic oligonucleotide
aguaguuugagguuuguuu

SEQ ID NO: 887882 - RNA, 19 nt, Artificial Sequence
  Description of Artificial Sequence: Synthetic oligonucleotide
uaaaucagauguguuuacg

SEQ ID NO: 887883 - RNA, 19 nt, Artificial Sequence
  Description of Artificial Sequence: Synthetic oligonucleotide
uuuauacaggaaaauugaa

SEQ ID NO: 887884 - RNA, 19 nt, Artificial Sequence
  Description of Artificial Sequence: Synthetic oligonucleotide
uucaguacagacaucuaaa

SEQ ID NO: 887885 - RNA, 19 nt, Artificial Sequence
  Description of Artificial Sequence: Synthetic oligonucleotide
uguucggauaguguaaaag

SEQ ID NO: 887886 - RNA, 19 nt, Artificial Sequence
  Description of Artificial Sequence: Synthetic oligonucleotide
ggcaacacaauaucuauag

SEQ ID NO: 887887 - RNA, 19 nt, Artificial Sequence
  Description of Artificial Sequence: Synthetic oligonucleotide
gagaggaugcugaauaucc

SEQ ID NO: 887888 - RNA, 19 nt, Artificial Sequence
  Description of Artificial Sequence: Synthetic oligonucleotide
aagacaacagacaaucccu

SEQ ID NO: 887889 - RNA, 19 nt, Artificial Sequence
  Description of Artificial Sequence: Synthetic oligonucleotide
augaaagguccuuuaagug

SEQ ID NO: 887890 - RNA, 19 nt, Artificial Sequence
  Description of Artificial Sequence: Synthetic oligonucleotide
aucuauagauuguuucuag

SEQ ID NO: 887891 - RNA, 19 nt, Artificial Sequence
  Description of Artificial Sequence: Synthetic oligonucleotide
cuuggcacuaguaauucug

SEQ ID NO: 887892 - RNA, 19 nt, Artificial Sequence
  Description of Artificial Sequence: Synthetic oligonucleotide
gucgauagacagcagggcg

SEQ ID NO: 887893 - RNA, 19 nt, Artificial Sequence
  Description of Artificial Sequence: Synthetic oligonucleotide
cuuuacgaggcccaguuug

SEQ ID NO: 887894 - RNA, 19 nt, Artificial Sequence
  Description of Artificial Sequence: Synthetic oligonucleotide
aacugaaccaagucuccug

SEQ ID NO: 887895 - RNA, 19 nt, Artificial Sequence
  Description of Artificial Sequence: Synthetic oligonucleotide
agacaaucccuuuaaguca

SEQ ID NO: 887896 - RNA, 19 nt, Artificial Sequence
  Description of Artificial Sequence: Synthetic oligonucleotide
cauacuaugagaugugaga

SEQ ID NO: 887897 - RNA, 19 nt, Artificial Sequence
  Description of Artificial Sequence: Synthetic oligonucleotide
ugcgaauugcccauucacc

SEQ ID NO: 887898 - RNA, 19 nt, Artificial Sequence
  Description of Artificial Sequence: Synthetic oligonucleotide
gaauauccucgccagagac

SEQ ID NO: 887899 - RNA, 19 nt, Artificial Sequence
  Description of Artificial Sequence: Synthetic oligonucleotide
ugggacuccccucaagagg

SEQ ID NO: 887900 - RNA, 19 nt, Artificial Sequence
  Description of Artificial Sequence: Synthetic oligonucleotide
ucuaauaggcaugaggcau

SEQ ID NO: 887901 - RNA, 19 nt, Artificial Sequence
  Description of Artificial Sequence: Synthetic oligonucleotide
ugcuauucgcacaacuaug

SEQ ID NO: 887902 - RNA, 19 nt, Artificial Sequence
  Description of Artificial Sequence: Synthetic oligonucleotide
uuacguuugagaauuucua

SEQ ID NO: 887903 - RNA, 19 nt, Artificial Sequence
  Description of Artificial Sequence: Synthetic oligonucleotide
aguacaucuucacagggaa

SEQ ID NO: 887904 - RNA, 19 nt, Artificial Sequence
  Description of Artificial Sequence: Synthetic oligonucleotide
aacgauuuuaccugauaua

SEQ ID NO: 887905 - RNA, 19 nt, Artificial Sequence
  Description of Artificial Sequence: Synthetic oligonucleotide
acuaucaccaguaaauagu

SEQ ID NO: 887906 - RNA, 19 nt, Artificial Sequence
  Description of Artificial Sequence: Synthetic oligonucleotide
acuaguaauucuggcacac

SEQ ID NO: 887907 - RNA, 19 nt, Artificial Sequence
  Description of Artificial Sequence: Synthetic oligonucleotide
caguuuugaaucagaacag

SEQ ID NO: 887908 - RNA, 19 nt, Artificial Sequence
  Description of Artificial Sequence: Synthetic oligonucleotide
gucaaguguugucugagag

SEQ ID NO: 887909 - RNA, 19 nt, Artificial Sequence
  Description of Artificial Sequence: Synthetic oligonucleotide
gugguauuacacuaucacc

SEQ ID NO: 887910 - RNA, 19 nt, Artificial Sequence
  Description of Artificial Sequence: Synthetic oligonucleotide
aauauccucgccagagacg

SEQ ID NO: 887911 - RNA, 19 nt, Artificial Sequence
  Description of Artificial Sequence: Synthetic oligonucleotide
aacacaauaucuauagauu

SEQ ID NO: 887912 - RNA, 19 nt, Artificial Sequence
  Description of Artificial Sequence: Synthetic oligonucleotide
uguacuuagggugauccac

SEQ ID NO: 887913 - RNA, 19 nt, Artificial Sequence
  Description of Artificial Sequence: Synthetic oligonucleotide
uuuacgaggcccaguuugc

SEQ ID NO: 887914 - RNA, 19 nt, Artificial Sequence
  Description of Artificial Sequence: Synthetic oligonucleotide
augaugucgauagacagca

SEQ ID NO: 887915 - RNA, 19 nt, Artificial Sequence
  Description of Artificial Sequence: Synthetic oligonucleotide
ucugggacuccccucaaga

SEQ ID NO: 887916 - RNA, 19 nt, Artificial Sequence
  Description of Artificial Sequence: Synthetic oligonucleotide
auucgcacaacuauggugu

SEQ ID NO: 887917 - RNA, 19 nt, Artificial Sequence
  Description of Artificial Sequence: Synthetic oligonucleotide
uucggcacggcuuaaugga

SEQ ID NO: 887918 - RNA, 19 nt, Artificial Sequence
  Description of Artificial Sequence: Synthetic oligonucleotide
cucgguuauggcaggaagg

SEQ ID NO: 887919 - RNA, 19 nt, Artificial Sequence
  Description of Artificial Sequence: Synthetic oligonucleotide
uuagucuucuauguggagu

SEQ ID NO: 887920 - RNA, 19 nt, Artificial Sequence
  Description of Artificial Sequence: Synthetic oligonucleotide
aauugcccauucaccaacc

SEQ ID NO: 887921 - RNA, 19 nt, Artificial Sequence
  Description of Artificial Sequence: Synthetic oligonucleotide
cucgguaaaccuuuaccag

SEQ ID NO: 887922 - RNA, 19 nt, Artificial Sequence
  Description of Artificial Sequence: Synthetic oligonucleotide
uauagagagaggacucacu

SEQ ID NO: 887923 - RNA, 19 nt, Artificial Sequence
  Description of Artificial Sequence: Synthetic oligonucleotide
aucccuuuaagucaaugau

SEQ ID NO: 887924 - RNA, 19 nt, Artificial Sequence
  Description of Artificial Sequence: Synthetic oligonucleotide
gcuggguauguauagagag

SEQ ID NO: 887925 - RNA, 19 nt, Artificial Sequence
  Description of Artificial Sequence: Synthetic oligonucleotide
uugcgaauugcccauucac

SEQ ID NO: 887926 - RNA, 19 nt, Artificial Sequence
  Description of Artificial Sequence: Synthetic oligonucleotide
cacuaucaccaguaaauag

SEQ ID NO: 887927 - RNA, 19 nt, Artificial Sequence
  Description of Artificial Sequence: Synthetic oligonucleotide
agaguuagucuucuaugug

SEQ ID NO: 887928 - RNA, 19 nt, Artificial Sequence
  Description of Artificial Sequence: Synthetic oligonucleotide
aaccaugagaagacaacag

SEQ ID NO: 887929 - RNA, 19 nt, Artificial Sequence
  Description of Artificial Sequence: Synthetic oligonucleotide
ucacauaguacaucuucac

SEQ ID NO: 887930 - RNA, 19 nt, Artificial Sequence
  Description of Artificial Sequence: Synthetic oligonucleotide
acgauuuuaccugauauau

SEQ ID NO: 887931 - RNA, 19 nt, Artificial Sequence
  Description of Artificial Sequence: Synthetic oligonucleotide
ucuaaacugagaccagcaa

SEQ ID NO: 887932 - RNA, 19 nt, Artificial Sequence
  Description of Artificial Sequence: Synthetic oligonucleotide
uacuauacagagagcaaau

SEQ ID NO: 887933 - RNA, 19 nt, Artificial Sequence
  Description of Artificial Sequence: Synthetic oligonucleotide
gaagguaggugaucuggcc

SEQ ID NO: 887934 - RNA, 19 nt, Artificial Sequence
  Description of Artificial Sequence: Synthetic oligonucleotide
ggaaaauugaagauugcug

SEQ ID NO: 887935 - RNA, 19 nt, Artificial Sequence
  Description of Artificial Sequence: Synthetic oligonucleotide
uccagucuaaacugagacc

SEQ ID NO: 887936 - RNA, 19 nt, Artificial Sequence
  Description of Artificial Sequence: Synthetic oligonucleotide
aaggcgaguccaaagaacu

SEQ ID NO: 887937 - RNA, 19 nt, Artificial Sequence
  Description of Artificial Sequence: Synthetic oligonucleotide
uacguuugagaauuucuaa

SEQ ID NO: 887938 - RNA, 19 nt, Artificial Sequence
  Description of Artificial Sequence: Synthetic oligonucleotide
uuguuucuagcuuuagaaa

SEQ ID NO: 887939 - RNA, 19 nt, Artificial Sequence
  Description of Artificial Sequence: Synthetic oligonucleotide
cugaauauccucgccagag

SEQ ID NO: 887940 - RNA, 19 nt, Artificial Sequence
  Description of Artificial Sequence: Synthetic oligonucleotide
gaauugcccauucaccaac

SEQ ID NO: 887941 - RNA, 19 nt, Artificial Sequence
  Description of Artificial Sequence: Synthetic oligonucleotide
uuuaggacacuuccuggaa

SEQ ID NO: 887942 - RNA, 19 nt, Artificial Sequence
  Description of Artificial Sequence: Synthetic oligonucleotide
guaacaucuaauaggcaug

SEQ ID NO: 887943 - RNA, 19 nt, Artificial Sequence
  Description of Artificial Sequence: Synthetic oligonucleotide
ucaaccccgaacaacugaa

SEQ ID NO: 887944 - RNA, 19 nt, Artificial Sequence
  Description of Artificial Sequence: Synthetic oligonucleotide
guucggcacggcuuaaugg

SEQ ID NO: 887945 - RNA, 19 nt, Artificial Sequence
  Description of Artificial Sequence: Synthetic oligonucleotide
caccugauauuuaaugaug

SEQ ID NO: 887946 - RNA, 19 nt, Artificial Sequence
  Description of Artificial Sequence: Synthetic oligonucleotide
ugaagauugcuguucggau

SEQ ID NO: 887947 - RNA, 19 nt, Artificial Sequence
  Description of Artificial Sequence: Synthetic oligonucleotide
uucaaccccgaacaacuga

SEQ ID NO: 887948 - RNA, 19 nt, Artificial Sequence
  Description of Artificial Sequence: Synthetic oligonucleotide
gaaugaauugugcugggua

SEQ ID NO: 887949 - RNA, 19 nt, Artificial Sequence
  Description of Artificial Sequence: Synthetic oligonucleotide
ucaguacagacaucuaaau

SEQ ID NO: 887950 - RNA, 19 nt, Artificial Sequence
  Description of Artificial Sequence: Synthetic oligonucleotide
gucaaaucuacauugaauu

SEQ ID NO: 887951 - RNA, 19 nt, Artificial Sequence
  Description of Artificial Sequence: Synthetic oligonucleotide
acuauaguuacuggcauau

SEQ ID NO: 887952 - RNA, 19 nt, Artificial Sequence
  Description of Artificial Sequence: Synthetic oligonucleotide
uaacaucuaauaggcauga

SEQ ID NO: 887953 - RNA, 19 nt, Artificial Sequence
  Description of Artificial Sequence: Synthetic oligonucleotide
ugaauauccucgccagaga

SEQ ID NO: 887954 - RNA, 19 nt, Artificial Sequence
  Description of Artificial Sequence: Synthetic oligonucleotide
agguaaaucagauguguuu

SEQ ID NO: 887955 - RNA, 19 nt, Artificial Sequence
  Description of Artificial Sequence: Synthetic oligonucleotide
ucccauugaccauaauggc

SEQ ID NO: 887956 - RNA, 19 nt, Artificial Sequence
  Description of Artificial Sequence: Synthetic oligonucleotide
uuugcgaauugcccauuca

SEQ ID NO: 887957 - RNA, 19 nt, Artificial Sequence
  Description of Artificial Sequence: Synthetic oligonucleotide
guaaaccuuuaccagguuc

SEQ ID NO: 887958 - RNA, 19 nt, Artificial Sequence
  Description of Artificial Sequence: Synthetic oligonucleotide
uuuagcgccaagccaucca

SEQ ID NO: 887959 - RNA, 19 nt, Artificial Sequence
  Description of Artificial Sequence: Synthetic oligonucleotide
acguuugagaauuucuaaa

SEQ ID NO: 887960 - RNA, 19 nt, Artificial Sequence
  Description of Artificial Sequence: Synthetic oligonucleotide
uuccauacuaugagaugug

SEQ ID NO: 887961 - RNA, 19 nt, Artificial Sequence
  Description of Artificial Sequence: Synthetic oligonucleotide
uacuuuacgaggcccaguu

SEQ ID NO: 887962 - RNA, 19 nt, Artificial Sequence
  Description of Artificial Sequence: Synthetic oligonucleotide
acugaaccaagucuccugu

SEQ ID NO: 887963 - RNA, 19 nt, Artificial Sequence
  Description of Artificial Sequence: Synthetic oligonucleotide
aucagauguguuuacguuu

SEQ ID NO: 887964 - RNA, 19 nt, Artificial Sequence
  Description of Artificial Sequence: Synthetic oligonucleotide
gaugugagaacuacagauc

SEQ ID NO: 887965 - RNA, 19 nt, Artificial Sequence
  Description of Artificial Sequence: Synthetic oligonucleotide
accaguuuugugguucggc

SEQ ID NO: 887966 - RNA, 19 nt, Artificial Sequence
  Description of Artificial Sequence: Synthetic oligonucleotide
aucuaauaggcaugaggca

SEQ ID NO: 887967 - RNA, 19 nt, Artificial Sequence
  Description of Artificial Sequence: Synthetic oligonucleotide
aacuaugguguaaccaucu

SEQ ID NO: 887968 - RNA, 19 nt, Artificial Sequence
  Description of Artificial Sequence: Synthetic oligonucleotide
gguauuacacuaucaccag

SEQ ID NO: 887969 - RNA, 19 nt, Artificial Sequence
  Description of Artificial Sequence: Synthetic oligonucleotide
uguauagagagaggacuca

SEQ ID NO: 887970 - RNA, 19 nt, Artificial Sequence
  Description of Artificial Sequence: Synthetic oligonucleotide
auauccucgccagagacga

SEQ ID NO: 887971 - RNA, 19 nt, Artificial Sequence
  Description of Artificial Sequence: Synthetic oligonucleotide
uuagcgccaagccauccac

SEQ ID NO: 887972 - RNA, 19 nt, Artificial Sequence
  Description of Artificial Sequence: Synthetic oligonucleotide
gaauucaaccccgaacaac

SEQ ID NO: 887973 - RNA, 19 nt, Artificial Sequence
  Description of Artificial Sequence: Synthetic oligonucleotide
uuagggcacaauuccacaa

SEQ ID NO: 887974 - RNA, 19 nt, Artificial Sequence
  Description of Artificial Sequence: Synthetic oligonucleotide
uuugugguucggcacggcu

SEQ ID NO: 887975 - RNA, 19 nt, Artificial Sequence
  Description of Artificial Sequence: Synthetic oligonucleotide
ugcaacaguuuugaaucag

SEQ ID NO: 887976 - RNA, 19 nt, Artificial Sequence
  Description of Artificial Sequence: Synthetic oligonucleotide
agacaucuaaauacaguag

SEQ ID NO: 887977 - RNA, 19 nt, Artificial Sequence
  Description of Artificial Sequence: Synthetic oligonucleotide
cuuaauggacuuucucauc

SEQ ID NO: 887978 - RNA, 19 nt, Artificial Sequence
  Description of Artificial Sequence: Synthetic oligonucleotide
gugugugacacaccucagg

SEQ ID NO: 887979 - RNA, 19 nt, Artificial Sequence
  Description of Artificial Sequence: Synthetic oligonucleotide
auuuugucaccugauauuu

SEQ ID NO: 887980 - RNA, 19 nt, Artificial Sequence
  Description of Artificial Sequence: Synthetic oligonucleotide
ugaaucagaacagcauuuc

SEQ ID NO: 887981 - RNA, 19 nt, Artificial Sequence
  Description of Artificial Sequence: Synthetic oligonucleotide
ugaauucaaccccgaacaa

SEQ ID NO: 887982 - RNA, 19 nt, Artificial Sequence
  Description of Artificial Sequence: Synthetic oligonucleotide
uccacgugcucucucccag

SEQ ID NO: 887983 - RNA, 19 nt, Artificial Sequence
  Description of Artificial Sequence: Synthetic oligonucleotide
uugcuguucggauagugua

SEQ ID NO: 887984 - RNA, 19 nt, Artificial Sequence
  Description of Artificial Sequence: Synthetic oligonucleotide
aauuuagcgccaagccauc

SEQ ID NO: 887985 - RNA, 19 nt, Artificial Sequence
  Description of Artificial Sequence: Synthetic oligonucleotide
cuucagaucaggguuggac

SEQ ID NO: 887986 - RNA, 19 nt, Artificial Sequence
  Description of Artificial Sequence: Synthetic oligonucleotide
auauuuaaugaugucgaua

SEQ ID NO: 887987 - RNA, 19 nt, Artificial Sequence
  Description of Artificial Sequence: Synthetic oligonucleotide
gaacgauuuuaccugauau

SEQ ID NO: 887988 - RNA, 19 nt, Artificial Sequence
  Description of Artificial Sequence: Synthetic oligonucleotide
ugcuggguauguauagaga

SEQ ID NO: 887989 - RNA, 19 nt, Artificial Sequence
  Description of Artificial Sequence: Synthetic oligonucleotide
uggaugugucaccaggaaa

SEQ ID NO: 887990 - RNA, 19 nt, Artificial Sequence
  Description of Artificial Sequence: Synthetic oligonucleotide
gcuauucgcacaacuaugg

SEQ ID NO: 887991 - RNA, 19 nt, Artificial Sequence
  Description of Artificial Sequence: Synthetic oligonucleotide
guuauggcaggaagguagg

SEQ ID NO: 887992 - RNA, 19 nt, Artificial Sequence
  Description of Artificial Sequence: Synthetic oligonucleotide
ugaauugugcuggguaugu

SEQ ID NO: 887993 - RNA, 19 nt, Artificial Sequence
  Description of Artificial Sequence: Synthetic oligonucleotide
ggcuuaauggacuuucuca

SEQ ID NO: 887994 - RNA, 19 nt, Artificial Sequence
  Description of Artificial Sequence: Synthetic oligonucleotide
accccgaacaacugaacca

SEQ ID NO: 887995 - RNA, 19 nt, Artificial Sequence
  Description of Artificial Sequence: Synthetic oligonucleotide
ugaucuggcccucguaaaa

SEQ ID NO: 887996 - RNA, 19 nt, Artificial Sequence
  Description of Artificial Sequence: Synthetic oligonucleotide
auuuagcgccaagccaucc

SEQ ID NO: 887997 - RNA, 19 nt, Artificial Sequence
  Description of Artificial Sequence: Synthetic oligonucleotide
augaggcauauacuuucag

SEQ ID NO: 887998 - RNA, 19 nt, Artificial Sequence
  Description of Artificial Sequence: Synthetic oligonucleotide
agcagggcggcuuucacaa

SEQ ID NO: 887999 - RNA, 19 nt, Artificial Sequence
  Description of Artificial Sequence: Synthetic oligonucleotide
agguaggugaucuggcccu

SEQ ID NO: 888000 - RNA, 19 nt, Artificial Sequence
  Description of Artificial Sequence: Synthetic oligonucleotide
agauguguuuacguuugag

SEQ ID NO: 888001 - RNA, 19 nt, Artificial Sequence
  Description of Artificial Sequence: Synthetic oligonucleotide
cagaaugaauugugcuggg

SEQ ID NO: 888002 - RNA, 19 nt, Artificial Sequence
  Description of Artificial Sequence: Synthetic oligonucleotide
ugcuguucggauaguguaa

SEQ ID NO: 888003 - RNA, 19 nt, Artificial Sequence
  Description of Artificial Sequence: Synthetic oligonucleotide
ggcauauacuuucaguaca

SEQ ID NO: 888004 - RNA, 19 nt, Artificial Sequence
  Description of Artificial Sequence: Synthetic oligonucleotide
uaucaccaguaaauaguaa

SEQ ID NO: 888005 - RNA, 19 nt, Artificial Sequence
  Description of Artificial Sequence: Synthetic oligonucleotide
ucaucacuuugguccuugg

SEQ ID NO: 888006 - RNA, 19 nt, Artificial Sequence
  Description of Artificial Sequence: Synthetic oligonucleotide
uccauacuaugagauguga

SEQ ID NO: 888007 - RNA, 19 nt, Artificial Sequence
  Description of Artificial Sequence: Synthetic oligonucleotide
ucacacauggcaccauuuu

SEQ ID NO: 888008 - RNA, 19 nt, Artificial Sequence
  Description of Artificial Sequence: Synthetic oligonucleotide
cucaucaaagagagaacca

SEQ ID NO: 888009 - RNA, 19 nt, Artificial Sequence
  Description of Artificial Sequence: Synthetic oligonucleotide
cccauugaccauaauggcc

SEQ ID NO: 888010 - RNA, 19 nt, Artificial Sequence
  Description of Artificial Sequence: Synthetic oligonucleotide
caguuuugugguucggcac

SEQ ID NO: 888011 - RNA, 19 nt, Artificial Sequence
  Description of Artificial Sequence: Synthetic oligonucleotide
cuaucaccaguaaauagua

SEQ ID NO: 888012 - RNA, 19 nt, Artificial Sequence
  Description of Artificial Sequence: Synthetic oligonucleotide
uuacgaggcccaguuugcg

SEQ ID NO: 888013 - RNA, 19 nt, Artificial Sequence
  Description of Artificial Sequence: Synthetic oligonucleotide
caacuaugguguaaccauc

SEQ ID NO: 888014 - RNA, 19 nt, Artificial Sequence
  Description of Artificial Sequence: Synthetic oligonucleotide
caucacuuugguccuuggc

SEQ ID NO: 888015 - RNA, 19 nt, Artificial Sequence
  Description of Artificial Sequence: Synthetic oligonucleotide
gguuggacccugcuauucg

SEQ ID NO: 888016 - RNA, 19 nt, Artificial Sequence
  Description of Artificial Sequence: Synthetic oligonucleotide
ccauuauauaacacauggc

SEQ ID NO: 888017 - RNA, 19 nt, Artificial Sequence
  Description of Artificial Sequence: Synthetic oligonucleotide
gacagaguuagucuucuau

SEQ ID NO: 888018 - RNA, 19 nt, Artificial Sequence
  Description of Artificial Sequence: Synthetic oligonucleotide
aaacaccacaggaggcccg

SEQ ID NO: 888019 - RNA, 19 nt, Artificial Sequence
  Description of Artificial Sequence: Synthetic oligonucleotide
uuggacccugcuauucgca

SEQ ID NO: 888020 - RNA, 19 nt, Artificial Sequence
  Description of Artificial Sequence: Synthetic oligonucleotide
agcagggcuuuagucacac

SEQ ID NO: 888021 - RNA, 19 nt, Artificial Sequence
  Description of Artificial Sequence: Synthetic oligonucleotide
ggcacuaguaauucuggca

SEQ ID NO: 888022 - RNA, 19 nt, Artificial Sequence
  Description of Artificial Sequence: Synthetic oligonucleotide
auuacuauacagagagcaa

SEQ ID NO: 888023 - RNA, 19 nt, Artificial Sequence
  Description of Artificial Sequence: Synthetic oligonucleotide
ccucccauugaccauaaug

SEQ ID NO: 888024 - RNA, 19 nt, Artificial Sequence
  Description of Artificial Sequence: Synthetic oligonucleotide
gacaaucccuuuaagucaa

SEQ ID NO: 888025 - RNA, 19 nt, Artificial Sequence
  Description of Artificial Sequence: Synthetic oligonucleotide
cuuagggcacaauuccaca

SEQ ID NO: 888026 - RNA, 19 nt, Artificial Sequence
  Description of Artificial Sequence: Synthetic oligonucleotide
aagguaaaucagauguguu

SEQ ID NO: 888027 - RNA, 19 nt, Artificial Sequence
  Description of Artificial Sequence: Synthetic oligonucleotide
cauacuuuacgaggcccag

SEQ ID NO: 888028 - RNA, 19 nt, Artificial Sequence
  Description of Artificial Sequence: Synthetic oligonucleotide
gugugacacaccucagggc

SEQ ID NO: 888029 - RNA, 19 nt, Artificial Sequence
  Description of Artificial Sequence: Synthetic oligonucleotide
aaccuuuaccagguucuga

SEQ ID NO: 888030 - RNA, 19 nt, Artificial Sequence
  Description of Artificial Sequence: Synthetic oligonucleotide
cugggacuccccucaagag

SEQ ID NO: 888031 - RNA, 19 nt, Artificial Sequence
  Description of Artificial Sequence: Synthetic oligonucleotide
augcaacaguuuugaauca

SEQ ID NO: 888032 - RNA, 19 nt, Artificial Sequence
  Description of Artificial Sequence: Synthetic oligonucleotide
aaaagggaugcaacaguuu

SEQ ID NO: 888033 - RNA, 19 nt, Artificial Sequence
  Description of Artificial Sequence: Synthetic oligonucleotide
ugaugucgauagacagcag

SEQ ID NO: 888034 - RNA, 19 nt, Artificial Sequence
  Description of Artificial Sequence: Synthetic oligonucleotide
uugugguucggcacggcuu

SEQ ID NO: 888035 - RNA, 19 nt, Artificial Sequence
  Description of Artificial Sequence: Synthetic oligonucleotide
gaacuacagaucuccccuc

SEQ ID NO: 888036 - RNA, 19 nt, Artificial Sequence
  Description of Artificial Sequence: Synthetic oligonucleotide
agaugaguagguuccucuu

SEQ ID NO: 888037 - RNA, 19 nt, Artificial Sequence
  Description of Artificial Sequence: Synthetic oligonucleotide
acuacagaucuccccuccu

SEQ ID NO: 888038 - RNA, 19 nt, Artificial Sequence
  Description of Artificial Sequence: Synthetic oligonucleotide
gguaaaucagauguguuua

SEQ ID NO: 888039 - RNA, 19 nt, Artificial Sequence
  Description of Artificial Sequence: Synthetic oligonucleotide
cacaacuaugguguaacca

SEQ ID NO: 888040 - RNA, 19 nt, Artificial Sequence
  Description of Artificial Sequence: Synthetic oligonucleotide
gcgaauugcccauucacca

SEQ ID NO: 888041 - RNA, 19 nt, Artificial Sequence
  Description of Artificial Sequence: Synthetic oligonucleotide
ucuccgagcuuuggggucc

SEQ ID NO: 888042 - RNA, 19 nt, Artificial Sequence
  Description of Artificial Sequence: Synthetic oligonucleotide
ccgccuaucaaugccaugg

SEQ ID NO: 888043 - RNA, 19 nt, Artificial Sequence
  Description of Artificial Sequence: Synthetic oligonucleotide
cauguuucgguguuucucu

SEQ ID NO: 888044 - RNA, 19 nt, Artificial Sequence
  Description of Artificial Sequence: Synthetic oligonucleotide
cagucuaaacugagaccag

SEQ ID NO: 888045 - RNA, 19 nt, Artificial Sequence
  Description of Artificial Sequence: Synthetic oligonucleotide
cuggguauguauagagaga

SEQ ID NO: 888046 - RNA, 19 nt, Artificial Sequence
  Description of Artificial Sequence: Synthetic oligonucleotide
uggacccugcuauucgcac

SEQ ID NO: 888047 - RNA, 19 nt, Artificial Sequence
  Description of Artificial Sequence: Synthetic oligonucleotide
cagaguuagucuucuaugu

SEQ ID NO: 888048 - RNA, 19 nt, Artificial Sequence
  Description of Artificial Sequence: Synthetic oligonucleotide
gacucacuuucuuuugucu

SEQ ID NO: 888049 - RNA, 19 nt, Artificial Sequence
  Description of Artificial Sequence: Synthetic oligonucleotide
agaaugaauugugcugggu

SEQ ID NO: 888050 - RNA, 19 nt, Artificial Sequence
  Description of Artificial Sequence: Synthetic oligonucleotide
ucggcacggcuuaauggac

SEQ ID NO: 888051 - RNA, 19 nt, Artificial Sequence
  Description of Artificial Sequence: Synthetic oligonucleotide
cacggcuuaauggacuuuc

SEQ ID NO: 888052 - RNA, 19 nt, Artificial Sequence
  Description of Artificial Sequence: Synthetic oligonucleotide
agguccuuuaaguggucau

SEQ ID NO: 888053 - RNA, 19 nt, Artificial Sequence
  Description of Artificial Sequence: Synthetic oligonucleotide
uaauaggcaugaggcauau

SEQ ID NO: 888054 - RNA, 19 nt, Artificial Sequence
  Description of Artificial Sequence: Synthetic oligonucleotide
auacuuggucaaguguugu

SEQ ID NO: 888055 - RNA, 19 nt, Artificial Sequence
  Description of Artificial Sequence: Synthetic oligonucleotide
guuugcgaauugcccauuc

SEQ ID NO: 888056 - RNA, 19 nt, Artificial Sequence
  Description of Artificial Sequence: Synthetic oligonucleotide
caacagacaaucccuuuaa

SEQ ID NO: 888057 - RNA, 19 nt, Artificial Sequence
  Description of Artificial Sequence: Synthetic oligonucleotide
aagaacuccuggacaggcu

SEQ ID NO: 888058 - RNA, 19 nt, Artificial Sequence
  Description of Artificial Sequence: Synthetic oligonucleotide
agggcuuuagucacacaug

SEQ ID NO: 888059 - RNA, 19 nt, Artificial Sequence
  Description of Artificial Sequence: Synthetic oligonucleotide
caucucgguaaaccuuuac

SEQ ID NO: 888060 - RNA, 19 nt, Artificial Sequence
  Description of Artificial Sequence: Synthetic oligonucleotide
caaucccuuuaagucaaug

SEQ ID NO: 888061 - RNA, 19 nt, Artificial Sequence
  Description of Artificial Sequence: Synthetic oligonucleotide
cuaauaggcaugaggcaua

SEQ ID NO: 888062 - RNA, 19 nt, Artificial Sequence
  Description of Artificial Sequence: Synthetic oligonucleotide
uguuucgguguuucucuuu

SEQ ID NO: 888063 - RNA, 19 nt, Artificial Sequence
  Description of Artificial Sequence: Synthetic oligonucleotide
agggaauaugaggaaacuu

SEQ ID NO: 888064 - RNA, 19 nt, Artificial Sequence
  Description of Artificial Sequence: Synthetic oligonucleotide
cuaucaaugccauggccgu

SEQ ID NO: 888065 - RNA, 19 nt, Artificial Sequence
  Description of Artificial Sequence: Synthetic oligonucleotide
guguuuacguuugagaauu

SEQ ID NO: 888066 - RNA, 19 nt, Artificial Sequence
  Description of Artificial Sequence: Synthetic oligonucleotide
guacuuagggugauccaca

SEQ ID NO: 888067 - RNA, 19 nt, Artificial Sequence
  Description of Artificial Sequence: Synthetic oligonucleotide
cacuuccuggaaaggcgag

SEQ ID NO: 888068 - RNA, 19 nt, Artificial Sequence
  Description of Artificial Sequence: Synthetic oligonucleotide
acacuaucaccaguaaaua

SEQ ID NO: 888069 - RNA, 19 nt, Artificial Sequence
  Description of Artificial Sequence: Synthetic oligonucleotide
gcucgguuauggcaggaag

SEQ ID NO: 888070 - RNA, 19 nt, Artificial Sequence
  Description of Artificial Sequence: Synthetic oligonucleotide
ggaugcaacaguuuugaau

SEQ ID NO: 888071 - RNA, 19 nt, Artificial Sequence
  Description of Artificial Sequence: Synthetic oligonucleotide
guaaguuuuccaagauuaa

SEQ ID NO: 888072 - RNA, 19 nt, Artificial Sequence
  Description of Artificial Sequence: Synthetic oligonucleotide
gccuccacuauaguuacug

SEQ ID NO: 888073 - RNA, 19 nt, Artificial Sequence
  Description of Artificial Sequence: Synthetic oligonucleotide
gguucggcacggcuuaaug

SEQ ID NO: 888074 - RNA, 19 nt, Artificial Sequence
  Description of Artificial Sequence: Synthetic oligonucleotide
uagcgccaagccauccaca

SEQ ID NO: 888075 - RNA, 19 nt, Artificial Sequence
  Description of Artificial Sequence: Synthetic oligonucleotide
uuauggcaggaagguaggu

SEQ ID NO: 888076 - RNA, 19 nt, Artificial Sequence
  Description of Artificial Sequence: Synthetic oligonucleotide
uguuuacguuugagaauuu

SEQ ID NO: 888077 - RNA, 19 nt, Artificial Sequence
  Description of Artificial Sequence: Synthetic oligonucleotide
ccaguuugcgaauugccca

SEQ ID NO: 888078 - RNA, 19 nt, Artificial Sequence
  Description of Artificial Sequence: Synthetic oligonucleotide
caaccccgaacaacugaac

SEQ ID NO: 888079 - RNA, 19 nt, Artificial Sequence
  Description of Artificial Sequence: Synthetic oligonucleotide
guauuacacuaucaccagu

SEQ ID NO: 888080 - RNA, 19 nt, Artificial Sequence
  Description of Artificial Sequence: Synthetic oligonucleotide
guuggacgcugccaaggca

SEQ ID NO: 888081 - RNA, 19 nt, Artificial Sequence
  Description of Artificial Sequence: Synthetic oligonucleotide
augugucaccaggaaacca

SEQ ID NO: 888082 - RNA, 19 nt, Artificial Sequence
  Description of Artificial Sequence: Synthetic oligonucleotide
uuuugugguucggcacggc

SEQ ID NO: 888083 - RNA, 19 nt, Artificial Sequence
  Description of Artificial Sequence: Synthetic oligonucleotide
gccuaucaaugccauggcc

SEQ ID NO: 888084 - RNA, 19 nt, Artificial Sequence
  Description of Artificial Sequence: Synthetic oligonucleotide
auucaaccccgaacaacug

SEQ ID NO: 888085 - RNA, 19 nt, Artificial Sequence
  Description of Artificial Sequence: Synthetic oligonucleotide
aggcgaguccaaagaacuc

SEQ ID NO: 888086 - RNA, 19 nt, Artificial Sequence
  Description of Artificial Sequence: Synthetic oligonucleotide
cgaacaacugaaccaaguc

SEQ ID NO: 888087 - RNA, 19 nt, Artificial Sequence
  Description of Artificial Sequence: Synthetic oligonucleotide
auacuuuacgaggcccagu

SEQ ID NO: 888088 - RNA, 19 nt, Artificial Sequence
  Description of Artificial Sequence: Synthetic oligonucleotide
ggguauguauagagagagg

SEQ ID NO: 888089 - RNA, 19 nt, Artificial Sequence
  Description of Artificial Sequence: Synthetic oligonucleotide
gcuuagggcacaauuccac

SEQ ID NO: 888090 - RNA, 19 nt, Artificial Sequence
  Description of Artificial Sequence: Synthetic oligonucleotide
acauugaauucaaccccga

SEQ ID NO: 888091 - RNA, 19 nt, Artificial Sequence
  Description of Artificial Sequence: Synthetic oligonucleotide
ccuccacuauaguuacugg

SEQ ID NO: 888092 - RNA, 19 nt, Artificial Sequence
  Description of Artificial Sequence: Synthetic oligonucleotide
cuaugagaugugagaacua

SEQ ID NO: 888093 - RNA, 19 nt, Artificial Sequence
  Description of Artificial Sequence: Synthetic oligonucleotide
cuguacuuagggugaucca

SEQ ID NO: 888094 - RNA, 19 nt, Artificial Sequence
  Description of Artificial Sequence: Synthetic oligonucleotide
caaugcuuagggcacaauu

SEQ ID NO: 888095 - RNA, 19 nt, Artificial Sequence
  Description of Artificial Sequence: Synthetic oligonucleotide
cacgugcucucucccaguc

SEQ ID NO: 888096 - RNA, 19 nt, Artificial Sequence
  Description of Artificial Sequence: Synthetic oligonucleotide
cacuauaguuacuggcaua

SEQ ID NO: 888097 - RNA, 19 nt, Artificial Sequence
  Description of Artificial Sequence: Synthetic oligonucleotide
auguuucgguguuucucuu

SEQ ID NO: 888098 - RNA, 19 nt, Artificial Sequence
  Description of Artificial Sequence: Synthetic oligonucleotide
agacaacagacaaucccuu

SEQ ID NO: 888099 - RNA, 19 nt, Artificial Sequence
  Description of Artificial Sequence: Synthetic oligonucleotide
cugcuauucgcacaacuau

SEQ ID NO: 888100 - RNA, 19 nt, Artificial Sequence
  Description of Artificial Sequence: Synthetic oligonucleotide
ccaguuuugugguucggca

SEQ ID NO: 888101 - RNA, 19 nt, Artificial Sequence
  Description of Artificial Sequence: Synthetic oligonucleotide
agucuucuauguggagucu

SEQ ID NO: 888102 - RNA, 19 nt, Artificial Sequence
  Description of Artificial Sequence: Synthetic oligonucleotide
cuuucaguacagacaucua

SEQ ID NO: 888103 - RNA, 19 nt, Artificial Sequence
  Description of Artificial Sequence: Synthetic oligonucleotide
ucgcacaacuaugguguaa

SEQ ID NO: 888104 - RNA, 19 nt, Artificial Sequence
  Description of Artificial Sequence: Synthetic oligonucleotide
acgugcucucucccaguca

SEQ ID NO: 888105 - RNA, 19 nt, Artificial Sequence
  Description of Artificial Sequence: Synthetic oligonucleotide
gcaacaguuuugaaucaga

SEQ ID NO: 888106 - RNA, 19 nt, Artificial Sequence
  Description of Artificial Sequence: Synthetic oligonucleotide
ggucaaguguugucugaga

SEQ ID NO: 888107 - RNA, 19 nt, Artificial Sequence
  Description of Artificial Sequence: Synthetic oligonucleotide
uccccucaagagggcaaag

SEQ ID NO: 888108 - RNA, 19 nt, Artificial Sequence
  Description of Artificial Sequence: Synthetic oligonucleotide
acgcugccaaggcaccuga

SEQ ID NO: 888109 - RNA, 19 nt, Artificial Sequence
  Description of Artificial Sequence: Synthetic oligonucleotide
uauccucgccagagacgac

SEQ ID NO: 888110 - RNA, 19 nt, Artificial Sequence
  Description of Artificial Sequence: Synthetic oligonucleotide
ccauacuuuacgaggccca

SEQ ID NO: 888111 - RNA, 19 nt, Artificial Sequence
  Description of Artificial Sequence: Synthetic oligonucleotide
cuauucgcacaacuauggu

SEQ ID NO: 888112 - RNA, 19 nt, Artificial Sequence
  Description of Artificial Sequence: Synthetic oligonucleotide
caccaaccuugccaacuuc

SEQ ID NO: 888113 - RNA, 19 nt, Artificial Sequence
  Description of Artificial Sequence: Synthetic oligonucleotide
gacuccccucaagagggca

SEQ ID NO: 888114 - RNA, 19 nt, Artificial Sequence
  Description of Artificial Sequence: Synthetic oligonucleotide
aggcaacacaauaucuaua

SEQ ID NO: 888115 - RNA, 19 nt, Artificial Sequence
  Description of Artificial Sequence: Synthetic oligonucleotide
ugccuccacuauaguuacu

SEQ ID NO: 888116 - RNA, 19 nt, Artificial Sequence
  Description of Artificial Sequence: Synthetic oligonucleotide
acggcuuaauggacuuucu

SEQ ID NO: 888117 - RNA, 19 nt, Artificial Sequence
  Description of Artificial Sequence: Synthetic oligonucleotide
ggaggcccgccuaucaaug

SEQ ID NO: 888118 - RNA, 19 nt, Artificial Sequence
  Description of Artificial Sequence: Synthetic oligonucleotide
cgcacaacuaugguguaac

SEQ ID NO: 888119 - RNA, 19 nt, Artificial Sequence
  Description of Artificial Sequence: Synthetic oligonucleotide
ccugcuauucgcacaacua

SEQ ID NO: 888120 - RNA, 19 nt, Artificial Sequence
  Description of Artificial Sequence: Synthetic oligonucleotide
uccuguacuuagggugauc

SEQ ID NO: 888121 - RNA, 19 nt, Artificial Sequence
  Description of Artificial Sequence: Synthetic oligonucleotide
cagcauuucugugguauua

SEQ ID NO: 888122 - RNA, 19 nt, Artificial Sequence
  Description of Artificial Sequence: Synthetic oligonucleotide
cuguucggauaguguaaaa

SEQ ID NO: 888123 - RNA, 19 nt, Artificial Sequence
  Description of Artificial Sequence: Synthetic oligonucleotide
caguuugcgaauugcccau

SEQ ID NO: 888124 - RNA, 19 nt, Artificial Sequence
  Description of Artificial Sequence: Synthetic oligonucleotide
agcucgguuauggcaggaa

SEQ ID NO: 888125 - RNA, 19 nt, Artificial Sequence
  Description of Artificial Sequence: Synthetic oligonucleotide
gcuguucggauaguguaaa

SEQ ID NO: 888126 - RNA, 19 nt, Artificial Sequence
  Description of Artificial Sequence: Synthetic oligonucleotide
acccugcuauucgcacaac

SEQ ID NO: 888127 - RNA, 19 nt, Artificial Sequence
  Description of Artificial Sequence: Synthetic oligonucleotide
aguuugcgaauugcccauu

SEQ ID NO: 888128 - RNA, 19 nt, Artificial Sequence
  Description of Artificial Sequence: Synthetic oligonucleotide
ugguucggcacggcuuaau

SEQ ID NO: 888129 - RNA, 19 nt, Artificial Sequence
  Description of Artificial Sequence: Synthetic oligonucleotide
cguuugagaauuucuaaau

SEQ ID NO: 888130 - RNA, 19 nt, Artificial Sequence
  Description of Artificial Sequence: Synthetic oligonucleotide
agccucagaugaguagguu

SEQ ID NO: 888131 - RNA, 19 nt, Artificial Sequence
  Description of Artificial Sequence: Synthetic oligonucleotide
ggguuggacccugcuauuc

SEQ ID NO: 888132 - RNA, 19 nt, Artificial Sequence
  Description of Artificial Sequence: Synthetic oligonucleotide
caggaggcccgccuaucaa

SEQ ID NO: 888133 - RNA, 19 nt, Artificial Sequence
  Description of Artificial Sequence: Synthetic oligonucleotide
cuacagaucuccccuccuu

SEQ ID NO: 888134 - RNA, 19 nt, Artificial Sequence
  Description of Artificial Sequence: Synthetic oligonucleotide
ccgaacaacugaaccaagu

SEQ ID NO: 888135 - RNA, 19 nt, Artificial Sequence
  Description of Artificial Sequence: Synthetic oligonucleotide
cgccuaucaaugccauggc

SEQ ID NO: 888136 - RNA, 19 nt, Artificial Sequence
  Description of Artificial Sequence: Synthetic oligonucleotide
cggcuuaauggacuuucuc

SEQ ID NO: 888137 - RNA, 19 nt, Artificial Sequence
  Description of Artificial Sequence: Synthetic oligonucleotide
cauugaccauaauggccau

SEQ ID NO: 888138 - RNA, 19 nt, Artificial Sequence
  Description of Artificial Sequence: Synthetic oligonucleotide
gggaugcaacaguuuugaa

SEQ ID NO: 888139 - RNA, 19 nt, Artificial Sequence
  Description of Artificial Sequence: Synthetic oligonucleotide
cgauuuuaccugauauaua

SEQ ID NO: 888140 - RNA, 19 nt, Artificial Sequence
  Description of Artificial Sequence: Synthetic oligonucleotide
ggcccgccuaucaaugcca

SEQ ID NO: 888141 - RNA, 19 nt, Artificial Sequence
  Description of Artificial Sequence: Synthetic oligonucleotide
cgguaaaccuuuaccaggu

SEQ ID NO: 888142 - RNA, 19 nt, Artificial Sequence
  Description of Artificial Sequence: Synthetic oligonucleotide
ggcaugaggcauauacuuu

SEQ ID NO: 888143 - RNA, 19 nt, Artificial Sequence
  Description of Artificial Sequence: Synthetic oligonucleotide
ccacuauaguuacuggcau

SEQ ID NO: 888144 - RNA, 19 nt, Artificial Sequence
  Description of Artificial Sequence: Synthetic oligonucleotide
gcgaguccaaagaacuccu

SEQ ID NO: 888145 - RNA, 19 nt, Artificial Sequence
  Description of Artificial Sequence: Synthetic oligonucleotide
ggcacggcuuaauggacuu

SEQ ID NO: 888146 - RNA, 19 nt, Artificial Sequence
  Description of Artificial Sequence: Synthetic oligonucleotide
gccguggaaagcuuccguu

SEQ ID NO: 888147 - RNA, 19 nt, Artificial Sequence
  Description of Artificial Sequence: Synthetic oligonucleotide
cccgccuaucaaugccaug

SEQ ID NO: 888148 - RNA, 19 nt, Artificial Sequence
  Description of Artificial Sequence: Synthetic oligonucleotide
ccgagcuuugggguccaug

SEQ ID NO: 888149 - RNA, 19 nt, Artificial Sequence
  Description of Artificial Sequence: Synthetic oligonucleotide
cuauaguuacuggcauauu

SEQ ID NO: 888150 - RNA, 19 nt, Artificial Sequence
  Description of Artificial Sequence: Synthetic oligonucleotide
caguaguuugagguuuguu

SEQ ID NO: 888151 - RNA, 19 nt, Artificial Sequence
  Description of Artificial Sequence: Synthetic oligonucleotide
cagcucgguuauggcagga

SEQ ID NO: 888152 - RNA, 19 nt, Artificial Sequence
  Description of Artificial Sequence: Synthetic oligonucleotide
cccugcuauucgcacaacu

SEQ ID NO: 888153 - RNA, 19 nt, Artificial Sequence
  Description of Artificial Sequence: Synthetic oligonucleotide
uccgagcuuugggguccau

SEQ ID NO: 888154 - RNA, 19 nt, Artificial Sequence
  Description of Artificial Sequence: Synthetic oligonucleotide
cuccgagcuuuggggucca

SEQ ID NO: 888155 - RNA, 19 nt, Artificial Sequence
  Description of Artificial Sequence: Synthetic oligonucleotide
cgguuauggcaggaaggua

SEQ ID NO: 888156 - RNA, 19 nt, Artificial Sequence
  Description of Artificial Sequence: Synthetic oligonucleotide
gcccgccuaucaaugccau

SEQ ID NO: 888157 - RNA, 19 nt, Artificial Sequence
  Description of Artificial Sequence: Synthetic oligonucleotide
gcacggcuuaauggacuuu

SEQ ID NO: 888158 - RNA, 19 nt, Artificial Sequence
  Description of Artificial Sequence: Synthetic oligonucleotide
aagagaauccuuuagacgc

SEQ ID NO: 888159 - RNA, 19 nt, Artificial Sequence
  Description of Artificial Sequence: Synthetic oligonucleotide
auaacuaaaaucaacaugg

SEQ ID NO: 888160 - RNA, 19 nt, Artificial Sequence
  Description of Artificial Sequence: Synthetic oligonucleotide
uuguaauuuaucaagaacc

SEQ ID NO: 888161 - RNA, 19 nt, Artificial Sequence
  Description of Artificial Sequence: Synthetic oligonucleotide
aauuguuccuguuaguucg

SEQ ID NO: 888162 - RNA, 19 nt, Artificial Sequence
  Description of Artificial Sequence: Synthetic oligonucleotide
ucaauuuugcagaugauag

SEQ ID NO: 888163 - RNA, 19 nt, Artificial Sequence
  Description of Artificial Sequence: Synthetic oligonucleotide
aauacccucauuugcaucg

SEQ ID NO: 888164 - RNA, 19 nt, Artificial Sequence
  Description of Artificial Sequence: Synthetic oligonucleotide
uucagauuggucuacaggg

SEQ ID NO: 888165 - RNA, 19 nt, Artificial Sequence
  Description of Artificial Sequence: Synthetic oligonucleotide
ugugcaaugauacugaaau

SEQ ID NO: 888166 - RNA, 19 nt, Artificial Sequence
  Description of Artificial Sequence: Synthetic oligonucleotide
agaagcauuauacuccugc

SEQ ID NO: 888167 - RNA, 19 nt, Artificial Sequence
  Description of Artificial Sequence: Synthetic oligonucleotide
uaauuuaugaguuggcugc

SEQ ID NO: 888168 - RNA, 19 nt, Artificial Sequence
  Description of Artificial Sequence: Synthetic oligonucleotide
cuuuguauggaacaguggg

SEQ ID NO: 888169 - RNA, 19 nt, Artificial Sequence
  Description of Artificial Sequence: Synthetic oligonucleotide
aagccugucagcuaaagug

SEQ ID NO: 888170 - RNA, 19 nt, Artificial Sequence
  Description of Artificial Sequence: Synthetic oligonucleotide
uugcauauccagaagacag

SEQ ID NO: 888171 - RNA, 19 nt, Artificial Sequence
  Description of Artificial Sequence: Synthetic oligonucleotide
aaugagguuuaaaagguac

SEQ ID NO: 888172 - RNA, 19 nt, Artificial Sequence
  Description of Artificial Sequence: Synthetic oligonucleotide
uuuagacgcucacauaugg

SEQ ID NO: 888173 - RNA, 19 nt, Artificial Sequence
  Description of Artificial Sequence: Synthetic oligonucleotide
agacaugucagguuucucc

SEQ ID NO: 888174 - RNA, 19 nt, Artificial Sequence
  Description of Artificial Sequence: Synthetic oligonucleotide
ucgucaaaauaacagaagc

SEQ ID NO: 888175 - RNA, 19 nt, Artificial Sequence
  Description of Artificial Sequence: Synthetic oligonucleotide
uauaacuggaauuacugac

SEQ ID NO: 888176 - RNA, 19 nt, Artificial Sequence
  Description of Artificial Sequence: Synthetic oligonucleotide
gaagagaauccuuuagacg

SEQ ID NO: 888177 - RNA, 19 nt, Artificial Sequence
  Description of Artificial Sequence: Synthetic oligonucleotide
gacaauugugcuucaaagg

SEQ ID NO: 888178 - RNA, 19 nt, Artificial Sequence
  Description of Artificial Sequence: Synthetic oligonucleotide
agaaauuugcuacagucug

SEQ ID NO: 888179 - RNA, 19 nt, Artificial Sequence
  Description of Artificial Sequence: Synthetic oligonucleotide
auaaucaaaacuugcauau

SEQ ID NO: 888180 - RNA, 19 nt, Artificial Sequence
  Description of Artificial Sequence: Synthetic oligonucleotide
uuaagcauaacucuauuuu

SEQ ID NO: 888181 - RNA, 19 nt, Artificial Sequence
  Description of Artificial Sequence: Synthetic oligonucleotide
ucgaccaccaguaaaacac

SEQ ID NO: 888182 - RNA, 19 nt, Artificial Sequence
  Description of Artificial Sequence: Synthetic oligonucleotide
uuuguauggaacagugggg

SEQ ID NO: 888183 - RNA, 19 nt, Artificial Sequence
  Description of Artificial Sequence: Synthetic oligonucleotide
aaaacaacugguuccaaau

SEQ ID NO: 888184 - RNA, 19 nt, Artificial Sequence
  Description of Artificial Sequence: Synthetic oligonucleotide
gaaaucuagacaugucagg

SEQ ID NO: 888185 - RNA, 19 nt, Artificial Sequence
  Description of Artificial Sequence: Synthetic oligonucleotide
ugacaauugugcuucaaag

SEQ ID NO: 888186 - RNA, 19 nt, Artificial Sequence
  Description of Artificial Sequence: Synthetic oligonucleotide
aaucagaaagcccaccugu

SEQ ID NO: 888187 - RNA, 19 nt, Artificial Sequence
  Description of Artificial Sequence: Synthetic oligonucleotide
cuauacuggucaaaggugg

SEQ ID NO: 888188 - RNA, 19 nt, Artificial Sequence
  Description of Artificial Sequence: Synthetic oligonucleotide
uggaugauuauguaaauau

SEQ ID NO: 888189 - RNA, 19 nt, Artificial Sequence
  Description of Artificial Sequence: Synthetic oligonucleotide
guuucgcugauuuaaaccc

SEQ ID NO: 888190 - RNA, 19 nt, Artificial Sequence
  Description of Artificial Sequence: Synthetic oligonucleotide
uguuaguucgagaagccug

SEQ ID NO: 888191 - RNA, 19 nt, Artificial Sequence
  Description of Artificial Sequence: Synthetic oligonucleotide
uuuaaacccaggcaagggc

SEQ ID NO: 888192 - RNA, 19 nt, Artificial Sequence
  Description of Artificial Sequence: Synthetic oligonucleotide
cagacuacuaucccgaugc

SEQ ID NO: 888193 - RNA, 19 nt, Artificial Sequence
  Description of Artificial Sequence: Synthetic oligonucleotide
aaugucaccaccauaacau

SEQ ID NO: 888194 - RNA, 19 nt, Artificial Sequence
  Description of Artificial Sequence: Synthetic oligonucleotide
uauaauguaucuccuauuu

SEQ ID NO: 888195 - RNA, 19 nt, Artificial Sequence
  Description of Artificial Sequence: Synthetic oligonucleotide
aaucaaauaccaaugcucu

SEQ ID NO: 888196 - RNA, 19 nt, Artificial Sequence
  Description of Artificial Sequence: Synthetic oligonucleotide
aguaaaacaccuuggcaag

SEQ ID NO: 888197 - RNA, 19 nt, Artificial Sequence
  Description of Artificial Sequence: Synthetic oligonucleotide
aaaugccuacuucauuaac

SEQ ID NO: 888198 - RNA, 19 nt, Artificial Sequence
  Description of Artificial Sequence: Synthetic oligonucleotide
aacuugcauauccagaaga

SEQ ID NO: 888199 - RNA, 19 nt, Artificial Sequence
  Description of Artificial Sequence: Synthetic oligonucleotide
uccuauuugugcuucagug

SEQ ID NO: 888200 - RNA, 19 nt, Artificial Sequence
  Description of Artificial Sequence: Synthetic oligonucleotide
ucagcuaaagugcuuuugc

SEQ ID NO: 888201 - RNA, 19 nt, Artificial Sequence
  Description of Artificial Sequence: Synthetic oligonucleotide
uugaauacccucauuugca

SEQ ID NO: 888202 - RNA, 19 nt, Artificial Sequence
  Description of Artificial Sequence: Synthetic oligonucleotide
aagcauuauacuccugcuc

SEQ ID NO: 888203 - RNA, 19 nt, Artificial Sequence
  Description of Artificial Sequence: Synthetic oligonucleotide
aacaguguaugcuuucucu

SEQ ID NO: 888204 - RNA, 19 nt, Artificial Sequence
  Description of Artificial Sequence: Synthetic oligonucleotide
cuucauaaucaaaacuugc

SEQ ID NO: 888205 - RNA, 19 nt, Artificial Sequence
  Description of Artificial Sequence: Synthetic oligonucleotide
aguguauucaguuggugug

SEQ ID NO: 888206 - RNA, 19 nt, Artificial Sequence
  Description of Artificial Sequence: Synthetic oligonucleotide
uuuuauaaguucugcaguc

SEQ ID NO: 888207 - RNA, 19 nt, Artificial Sequence
  Description of Artificial Sequence: Synthetic oligonucleotide
ugauuuaaacccaggcaag

SEQ ID NO: 888208 - RNA, 19 nt, Artificial Sequence
  Description of Artificial Sequence: Synthetic oligonucleotide
uuggcaagcagauagugac

SEQ ID NO: 888209 - RNA, 19 nt, Artificial Sequence
  Description of Artificial Sequence: Synthetic oligonucleotide
uauuauauucagauugguc

SEQ ID NO: 888210 - RNA, 19 nt, Artificial Sequence
  Description of Artificial Sequence: Synthetic oligonucleotide
agcauuauacuccugcucu

SEQ ID NO: 888211 - RNA, 19 nt, Artificial Sequence
  Description of Artificial Sequence: Synthetic oligonucleotide
aaaucuagacaugucaggu

SEQ ID NO: 888212 - RNA, 19 nt, Artificial Sequence
  Description of Artificial Sequence: Synthetic oligonucleotide
ugcauauaauuuaugaguu

SEQ ID NO: 888213 - RNA, 19 nt, Artificial Sequence
  Description of Artificial Sequence: Synthetic oligonucleotide
uuugucuuaucaauuguuc

SEQ ID NO: 888214 - RNA, 19 nt, Artificial Sequence
  Description of Artificial Sequence: Synthetic oligonucleotide
agaucaaucuuguuuauaa

SEQ ID NO: 888215 - RNA, 19 nt, Artificial Sequence
  Description of Artificial Sequence: Synthetic oligonucleotide
aucuuaauacauucaucac

SEQ ID NO: 888216 - RNA, 19 nt, Artificial Sequence
  Description of Artificial Sequence: Synthetic oligonucleotide
aguucgagaagccugucag

SEQ ID NO: 888217 - RNA, 19 nt, Artificial Sequence
  Description of Artificial Sequence: Synthetic oligonucleotide
uguaucuccuauuugugcu

SEQ ID NO: 888218 - RNA, 19 nt, Artificial Sequence
  Description of Artificial Sequence: Synthetic oligonucleotide
ugucuuaucaauuguuccu

SEQ ID NO: 888219 - RNA, 19 nt, Artificial Sequence
  Description of Artificial Sequence: Synthetic oligonucleotide
uugucuuaucaauuguucc

SEQ ID NO: 888220 - RNA, 19 nt, Artificial Sequence
  Description of Artificial Sequence: Synthetic oligonucleotide
auaccaaugcucucagugg

SEQ ID NO: 888221 - RNA, 19 nt, Artificial Sequence
  Description of Artificial Sequence: Synthetic oligonucleotide
aggaaaucuagacauguca

SEQ ID NO: 888222 - RNA, 19 nt, Artificial Sequence
  Description of Artificial Sequence: Synthetic oligonucleotide
ucuuguuuauaacuggaau

SEQ ID NO: 888223 - RNA, 19 nt, Artificial Sequence
  Description of Artificial Sequence: Synthetic oligonucleotide
agacagagacuucaaagag

SEQ ID NO: 888224 - RNA, 19 nt, Artificial Sequence
  Description of Artificial Sequence: Synthetic oligonucleotide
uauagcacucuucagguua

SEQ ID NO: 888225 - RNA, 19 nt, Artificial Sequence
  Description of Artificial Sequence: Synthetic oligonucleotide
uuccaugugcaaaaguccc

SEQ ID NO: 888226 - RNA, 19 nt, Artificial Sequence
  Description of Artificial Sequence: Synthetic oligonucleotide
uuaaacccaggcaagggcu

SEQ ID NO: 888227 - RNA, 19 nt, Artificial Sequence
  Description of Artificial Sequence: Synthetic oligonucleotide
acagagacuucaaagaguc

SEQ ID NO: 888228 - RNA, 19 nt, Artificial Sequence
  Description of Artificial Sequence: Synthetic oligonucleotide
uauuuaagcauaacucuau

SEQ ID NO: 888229 - RNA, 19 nt, Artificial Sequence
  Description of Artificial Sequence: Synthetic oligonucleotide
uacagucugagcuugaaua

SEQ ID NO: 888230 - RNA, 19 nt, Artificial Sequence
  Description of Artificial Sequence: Synthetic oligonucleotide
uuauguaccacagucacua

SEQ ID NO: 888231 - RNA, 19 nt, Artificial Sequence
  Description of Artificial Sequence: Synthetic oligonucleotide
gauuuaaacccaggcaagg

SEQ ID NO: 888232 - RNA, 19 nt, Artificial Sequence
  Description of Artificial Sequence: Synthetic oligonucleotide
auagaacagcuuuguaugg

SEQ ID NO: 888233 - RNA, 19 nt, Artificial Sequence
  Description of Artificial Sequence: Synthetic oligonucleotide
ucauuuaaggucaguuucu

SEQ ID NO: 888234 - RNA, 19 nt, Artificial Sequence
  Description of Artificial Sequence: Synthetic oligonucleotide
auuugcaucgaccaccagu

SEQ ID NO: 888235 - RNA, 19 nt, Artificial Sequence
  Description of Artificial Sequence: Synthetic oligonucleotide
uuuaugaguuggcugcuca

SEQ ID NO: 888236 - RNA, 19 nt, Artificial Sequence
  Description of Artificial Sequence: Synthetic oligonucleotide
cuuaauacauucaucacua

SEQ ID NO: 888237 - RNA, 19 nt, Artificial Sequence
  Description of Artificial Sequence: Synthetic oligonucleotide
uuacuuugcuuccaacagc

SEQ ID NO: 888238 - RNA, 19 nt, Artificial Sequence
  Description of Artificial Sequence: Synthetic oligonucleotide
ugagguuuaaaagguacug

SEQ ID NO: 888239 - RNA, 19 nt, Artificial Sequence
  Description of Artificial Sequence: Synthetic oligonucleotide
auacuccugcucuagccgc

SEQ ID NO: 888240 - RNA, 19 nt, Artificial Sequence
  Description of Artificial Sequence: Synthetic oligonucleotide
aacagugcuauguuggcua

SEQ ID NO: 888241 - RNA, 19 nt, Artificial Sequence
  Description of Artificial Sequence: Synthetic oligonucleotide
auacugaaauuucuaauau

SEQ ID NO: 888242 - RNA, 19 nt, Artificial Sequence
  Description of Artificial Sequence: Synthetic oligonucleotide
ugcuauguuggcuaucaca

SEQ ID NO: 888243 - RNA, 19 nt, Artificial Sequence
  Description of Artificial Sequence: Synthetic oligonucleotide
uuggcuaucacaccucuau

SEQ ID NO: 888244 - RNA, 19 nt, Artificial Sequence
  Description of Artificial Sequence: Synthetic oligonucleotide
ucagaaagcccaccugucc

SEQ ID NO: 888245 - RNA, 19 nt, Artificial Sequence
  Description of Artificial Sequence: Synthetic oligonucleotide
auaauguaucuccuauuug

SEQ ID NO: 888246 - RNA, 19 nt, Artificial Sequence
  Description of Artificial Sequence: Synthetic oligonucleotide
aaaacaccuuggcaagcag

SEQ ID NO: 888247 - RNA, 19 nt, Artificial Sequence
  Description of Artificial Sequence: Synthetic oligonucleotide
ugcagaugauagaacagcu

SEQ ID NO: 888248 - RNA, 19 nt, Artificial Sequence
  Description of Artificial Sequence: Synthetic oligonucleotide
gcuguuugugcuuucacgg

SEQ ID NO: 888249 - RNA, 19 nt, Artificial Sequence
  Description of Artificial Sequence: Synthetic oligonucleotide
cugauuuaaacccaggcaa

SEQ ID NO: 888250 - RNA, 19 nt, Artificial Sequence
  Description of Artificial Sequence: Synthetic oligonucleotide
agucugagcuugaauaccc

SEQ ID NO: 888251 - RNA, 19 nt, Artificial Sequence
  Description of Artificial Sequence: Synthetic oligonucleotide
ugacuuaucagggaacugu

SEQ ID NO: 888252 - RNA, 19 nt, Artificial Sequence
  Description of Artificial Sequence: Synthetic oligonucleotide
uucgcugauuuaaacccag

SEQ ID NO: 888253 - RNA, 19 nt, Artificial Sequence
  Description of Artificial Sequence: Synthetic oligonucleotide
auuuaaacccaggcaaggg

SEQ ID NO: 888254 - RNA, 19 nt, Artificial Sequence
  Description of Artificial Sequence: Synthetic oligonucleotide
uggucuacaggguacacuc

SEQ ID NO: 888255 - RNA, 19 nt, Artificial Sequence
  Description of Artificial Sequence: Synthetic oligonucleotide
uuuucggguaaugucacca

SEQ ID NO: 888256 - RNA, 19 nt, Artificial Sequence
  Description of Artificial Sequence: Synthetic oligonucleotide
auuacugacaauugugcuu

SEQ ID NO: 888257 - RNA, 19 nt, Artificial Sequence
  Description of Artificial Sequence: Synthetic oligonucleotide
ucuuucucguuccacuugu

SEQ ID NO: 888258 - RNA, 19 nt, Artificial Sequence
  Description of Artificial Sequence: Synthetic oligonucleotide
aagcauaacucuauuuuca

SEQ ID NO: 888259 - RNA, 19 nt, Artificial Sequence
  Description of Artificial Sequence: Synthetic oligonucleotide
agucacuagcucuuccacg

SEQ ID NO: 888260 - RNA, 19 nt, Artificial Sequence
  Description of Artificial Sequence: Synthetic oligonucleotide
agcuugaauacccucauuu

SEQ ID NO: 888261 - RNA, 19 nt, Artificial Sequence
  Description of Artificial Sequence: Synthetic oligonucleotide
aggagguauucuuucaaug

SEQ ID NO: 888262 - RNA, 19 nt, Artificial Sequence
  Description of Artificial Sequence: Synthetic oligonucleotide
ucugguaaccugcaucuuc

SEQ ID NO: 888263 - RNA, 19 nt, Artificial Sequence
  Description of Artificial Sequence: Synthetic oligonucleotide
acuugcauauccagaagac

SEQ ID NO: 888264 - RNA, 19 nt, Artificial Sequence
  Description of Artificial Sequence: Synthetic oligonucleotide
uucaguuggugugacaaca

SEQ ID NO: 888265 - RNA, 19 nt, Artificial Sequence
  Description of Artificial Sequence: Synthetic oligonucleotide
uccgcagugcugaagggcc

SEQ ID NO: 888266 - RNA, 19 nt, Artificial Sequence
  Description of Artificial Sequence: Synthetic oligonucleotide
gaucaaucuuguuuauaac

SEQ ID NO: 888267 - RNA, 19 nt, Artificial Sequence
  Description of Artificial Sequence: Synthetic oligonucleotide
agagauauuuaagcauaac

SEQ ID NO: 888268 - RNA, 19 nt, Artificial Sequence
  Description of Artificial Sequence: Synthetic oligonucleotide
guuggugugacaacagugc

SEQ ID NO: 888269 - RNA, 19 nt, Artificial Sequence
  Description of Artificial Sequence: Synthetic oligonucleotide
auugguuucgcugauuuaa

SEQ ID NO: 888270 - RNA, 19 nt, Artificial Sequence
  Description of Artificial Sequence: Synthetic oligonucleotide
acuaucccgaugcacuguc

SEQ ID NO: 888271 - RNA, 19 nt, Artificial Sequence
  Description of Artificial Sequence: Synthetic oligonucleotide
auauuuuccugaguugcuc

SEQ ID NO: 888272 - RNA, 19 nt, Artificial Sequence
  Description of Artificial Sequence: Synthetic oligonucleotide
ugcauauccagaagacaga

SEQ ID NO: 888273 - RNA, 19 nt, Artificial Sequence
  Description of Artificial Sequence: Synthetic oligonucleotide
gguuucgcugauuuaaacc

SEQ ID NO: 888274 - RNA, 19 nt, Artificial Sequence
  Description of Artificial Sequence: Synthetic oligonucleotide
uguccugcauauaauuuau

SEQ ID NO: 888275 - RNA, 19 nt, Artificial Sequence
  Description of Artificial Sequence: Synthetic oligonucleotide
auuaggauucaaaaugccu

SEQ ID NO: 888276 - RNA, 19 nt, Artificial Sequence
  Description of Artificial Sequence: Synthetic oligonucleotide
gaagagauauuuaagcaua

SEQ ID NO: 888277 - RNA, 19 nt, Artificial Sequence
  Description of Artificial Sequence: Synthetic oligonucleotide
uuuauguaccacagucacu

SEQ ID NO: 888278 - RNA, 19 nt, Artificial Sequence
  Description of Artificial Sequence: Synthetic oligonucleotide
acuacuaucccgaugcacu

SEQ ID NO: 888279 - RNA, 19 nt, Artificial Sequence
  Description of Artificial Sequence: Synthetic oligonucleotide
uuauuauauucagauuggu

SEQ ID NO: 888280 - RNA, 19 nt, Artificial Sequence
  Description of Artificial Sequence: Synthetic oligonucleotide
agccugucagcuaaagugc

SEQ ID NO: 888281 - RNA, 19 nt, Artificial Sequence
  Description of Artificial Sequence: Synthetic oligonucleotide
ugccaugauccacaugugc

SEQ ID NO: 888282 - RNA, 19 nt, Artificial Sequence
  Description of Artificial Sequence: Synthetic oligonucleotide
caacugguuccaaauauuc

SEQ ID NO: 888283 - RNA, 19 nt, Artificial Sequence
  Description of Artificial Sequence: Synthetic oligonucleotide
uuucgcugauuuaaaccca

SEQ ID NO: 888284 - RNA, 19 nt, Artificial Sequence
  Description of Artificial Sequence: Synthetic oligonucleotide
aucuagacaugucagguuu

SEQ ID NO: 888285 - RNA, 19 nt, Artificial Sequence
  Description of Artificial Sequence: Synthetic oligonucleotide
aaucuagacaugucagguu

SEQ ID NO: 888286 - RNA, 19 nt, Artificial Sequence
  Description of Artificial Sequence: Synthetic oligonucleotide
uguaggcuuucacaguuuc

SEQ ID NO: 888287 - RNA, 19 nt, Artificial Sequence
  Description of Artificial Sequence: Synthetic oligonucleotide
ucucguuccacuuguaauu

SEQ ID NO: 888288 - RNA, 19 nt, Artificial Sequence
  Description of Artificial Sequence: Synthetic oligonucleotide
uauacuggucaaaggugga

SEQ ID NO: 888289 - RNA, 19 nt, Artificial Sequence
  Description of Artificial Sequence: Synthetic oligonucleotide
aucacuagggauaucaaau

SEQ ID NO: 888290 - RNA, 19 nt, Artificial Sequence
  Description of Artificial Sequence: Synthetic oligonucleotide
uugcaauuacuuugcuucc

SEQ ID NO: 888291 - RNA, 19 nt, Artificial Sequence
  Description of Artificial Sequence: Synthetic oligonucleotide
cacuagggauaucaaauac

SEQ ID NO: 888292 - RNA, 19 nt, Artificial Sequence
  Description of Artificial Sequence: Synthetic oligonucleotide
uuugcuacagucugagcuu

SEQ ID NO: 888293 - RNA, 19 nt, Artificial Sequence
  Description of Artificial Sequence: Synthetic oligonucleotide
aauccuuuagacgcucaca

SEQ ID NO: 888294 - RNA, 19 nt, Artificial Sequence
  Description of Artificial Sequence: Synthetic oligonucleotide
ucaguggguuuucacgaug

SEQ ID NO: 888295 - RNA, 19 nt, Artificial Sequence
  Description of Artificial Sequence: Synthetic oligonucleotide
accucuauacuggucaaag

SEQ ID NO: 888296 - RNA, 19 nt, Artificial Sequence
  Description of Artificial Sequence: Synthetic oligonucleotide
uguuuauaacuggaauuac

SEQ ID NO: 888297 - RNA, 19 nt, Artificial Sequence
  Description of Artificial Sequence: Synthetic oligonucleotide
uucucguuccacuuguaau

SEQ ID NO: 888298 - RNA, 19 nt, Artificial Sequence
  Description of Artificial Sequence: Synthetic oligonucleotide
cuccuuuagaaaccacucc

SEQ ID NO: 888299 - RNA, 19 nt, Artificial Sequence
  Description of Artificial Sequence: Synthetic oligonucleotide
uuagacgcucacauauggu

SEQ ID NO: 888300 - RNA, 19 nt, Artificial Sequence
  Description of Artificial Sequence: Synthetic oligonucleotide
uagacgcucacauaugguu

SEQ ID NO: 888301 - RNA, 19 nt, Artificial Sequence
  Description of Artificial Sequence: Synthetic oligonucleotide
ugcaucgaccaccaguaaa

SEQ ID NO: 888302 - RNA, 19 nt, Artificial Sequence
  Description of Artificial Sequence: Synthetic oligonucleotide
acuaucucaaacagcuguc

SEQ ID NO: 888303 - RNA, 19 nt, Artificial Sequence
  Description of Artificial Sequence: Synthetic oligonucleotide
auuuaaggucaguuucucu

SEQ ID NO: 888304 - RNA, 19 nt, Artificial Sequence
  Description of Artificial Sequence: Synthetic oligonucleotide
ccugcauauaauuuaugag

SEQ ID NO: 888305 - RNA, 19 nt, Artificial Sequence
  Description of Artificial Sequence: Synthetic oligonucleotide
acuuaucagggaacugugc

SEQ ID NO: 888306 - RNA, 19 nt, Artificial Sequence
  Description of Artificial Sequence: Synthetic oligonucleotide
uaucccgaugcacugucac

SEQ ID NO: 888307 - RNA, 19 nt, Artificial Sequence
  Description of Artificial Sequence: Synthetic oligonucleotide
agauuggucuacaggguac

SEQ ID NO: 888308 - RNA, 19 nt, Artificial Sequence
  Description of Artificial Sequence: Synthetic oligonucleotide
uauauucagauuggucuac

SEQ ID NO: 888309 - RNA, 19 nt, Artificial Sequence
  Description of Artificial Sequence: Synthetic oligonucleotide
cagcuaaagugcuuuugcc

SEQ ID NO: 888310 - RNA, 19 nt, Artificial Sequence
  Description of Artificial Sequence: Synthetic oligonucleotide
ucuuaucaauuguuccugu

SEQ ID NO: 888311 - RNA, 19 nt, Artificial Sequence
  Description of Artificial Sequence: Synthetic oligonucleotide
aauuuaugaguuggcugcu

SEQ ID NO: 888312 - RNA, 19 nt, Artificial Sequence
  Description of Artificial Sequence: Synthetic oligonucleotide
ugugugcagauacaauuuu

SEQ ID NO: 888313 - RNA, 19 nt, Artificial Sequence
  Description of Artificial Sequence: Synthetic oligonucleotide
ugagcuugaauacccucau

SEQ ID NO: 888314 - RNA, 19 nt, Artificial Sequence
  Description of Artificial Sequence: Synthetic oligonucleotide
agugcuauguuggcuauca

SEQ ID NO: 888315 - RNA, 19 nt, Artificial Sequence
  Description of Artificial Sequence: Synthetic oligonucleotide
agcaaucagaaagcccacc

SEQ ID NO: 888316 - RNA, 19 nt, Artificial Sequence
  Description of Artificial Sequence: Synthetic oligonucleotide
ucuacaggguacacuccug

SEQ ID NO: 888317 - RNA, 19 nt, Artificial Sequence
  Description of Artificial Sequence: Synthetic oligonucleotide
gaauccuuuagacgcucac

SEQ ID NO: 888318 - RNA, 19 nt, Artificial Sequence
  Description of Artificial Sequence: Synthetic oligonucleotide
gucgucaaaauaacagaag

SEQ ID NO: 888319 - RNA, 19 nt, Artificial Sequence
  Description of Artificial Sequence: Synthetic oligonucleotide
cuuuagacgcucacauaug

SEQ ID NO: 888320 - RNA, 19 nt, Artificial Sequence
  Description of Artificial Sequence: Synthetic oligonucleotide
acuagggauaucaaauacu

SEQ ID NO: 888321 - RNA, 19 nt, Artificial Sequence
  Description of Artificial Sequence: Synthetic oligonucleotide
uccaugugcaaaaguccca

SEQ ID NO: 888322 - RNA, 19 nt, Artificial Sequence
  Description of Artificial Sequence: Synthetic oligonucleotide
ugaauacccucauuugcau

SEQ ID NO: 888323 - RNA, 19 nt, Artificial Sequence
  Description of Artificial Sequence: Synthetic oligonucleotide
uaguucgagaagccuguca

SEQ ID NO: 888324 - RNA, 19 nt, Artificial Sequence
  Description of Artificial Sequence: Synthetic oligonucleotide
cuauguuggcuaucacacc

SEQ ID NO: 888325 - RNA, 19 nt, Artificial Sequence
  Description of Artificial Sequence: Synthetic oligonucleotide
gcuauguuggcuaucacac

SEQ ID NO: 888326 - RNA, 19 nt, Artificial Sequence
  Description of Artificial Sequence: Synthetic oligonucleotide
augauuauguaaauauaau

SEQ ID NO: 888327 - RNA, 19 nt, Artificial Sequence
  Description of Artificial Sequence: Synthetic oligonucleotide
acgauguuuccauucagua

SEQ ID NO: 888328 - RNA, 19 nt, Artificial Sequence
  Description of Artificial Sequence: Synthetic oligonucleotide
gacuuaucagggaacugug

SEQ ID NO: 888329 - RNA, 19 nt, Artificial Sequence
  Description of Artificial Sequence: Synthetic oligonucleotide
ucgcugauuuaaacccagg

SEQ ID NO: 888330 - RNA, 19 nt, Artificial Sequence
  Description of Artificial Sequence: Synthetic oligonucleotide
cauuauacuccugcucuag

SEQ ID NO: 888331 - RNA, 19 nt, Artificial Sequence
  Description of Artificial Sequence: Synthetic oligonucleotide
aaaguaucuuuuggaauuu

SEQ ID NO: 888332 - RNA, 19 nt, Artificial Sequence
  Description of Artificial Sequence: Synthetic oligonucleotide
gaugcacugucacacugga

SEQ ID NO: 888333 - RNA, 19 nt, Artificial Sequence
  Description of Artificial Sequence: Synthetic oligonucleotide
augccuacuucauuaacuu

SEQ ID NO: 888334 - RNA, 19 nt, Artificial Sequence
  Description of Artificial Sequence: Synthetic oligonucleotide
gguacacuccugcaaauac

SEQ ID NO: 888335 - RNA, 19 nt, Artificial Sequence
  Description of Artificial Sequence: Synthetic oligonucleotide
ggggucgucaaaauaacag

SEQ ID NO: 888336 - RNA, 19 nt, Artificial Sequence
  Description of Artificial Sequence: Synthetic oligonucleotide
agaugauagaacagcuuug

SEQ ID NO: 888337 - RNA, 19 nt, Artificial Sequence
  Description of Artificial Sequence: Synthetic oligonucleotide
ugguuucgcugauuuaaac

SEQ ID NO: 888338 - RNA, 19 nt, Artificial Sequence
  Description of Artificial Sequence: Synthetic oligonucleotide
gcugauuuaaacccaggca

SEQ ID NO: 888339 - RNA, 19 nt, Artificial Sequence
  Description of Artificial Sequence: Synthetic oligonucleotide
caaucagaaagcccaccug

SEQ ID NO: 888340 - RNA, 19 nt, Artificial Sequence
  Description of Artificial Sequence: Synthetic oligonucleotide
uggcaagcagauagugacc

SEQ ID NO: 888341 - RNA, 19 nt, Artificial Sequence
  Description of Artificial Sequence: Synthetic oligonucleotide
uugguuucgcugauuuaaa

SEQ ID NO: 888342 - RNA, 19 nt, Artificial Sequence
  Description of Artificial Sequence: Synthetic oligonucleotide
uuucaauguugccaaucuu

SEQ ID NO: 888343 - RNA, 19 nt, Artificial Sequence
  Description of Artificial Sequence: Synthetic oligonucleotide
uauguaccacagucacuag

SEQ ID NO: 888344 - RNA, 19 nt, Artificial Sequence
  Description of Artificial Sequence: Synthetic oligonucleotide
uuucggguaaugucaccac

SEQ ID NO: 888345 - RNA, 19 nt, Artificial Sequence
  Description of Artificial Sequence: Synthetic oligonucleotide
aagagauauuuaagcauaa

SEQ ID NO: 888346 - RNA, 19 nt, Artificial Sequence
  Description of Artificial Sequence: Synthetic oligonucleotide
aucgaccaccaguaaaaca

SEQ ID NO: 888347 - RNA, 19 nt, Artificial Sequence
  Description of Artificial Sequence: Synthetic oligonucleotide
cuuguuuauaacuggaauu

SEQ ID NO: 888348 - RNA, 19 nt, Artificial Sequence
  Description of Artificial Sequence: Synthetic oligonucleotide
ugugacaacagugcccaaa

SEQ ID NO: 888349 - RNA, 19 nt, Artificial Sequence
  Description of Artificial Sequence: Synthetic oligonucleotide
gaauacccucauuugcauc

SEQ ID NO: 888350 - RNA, 19 nt, Artificial Sequence
  Description of Artificial Sequence: Synthetic oligonucleotide
gaugauagaacagcuuugu

SEQ ID NO: 888351 - RNA, 19 nt, Artificial Sequence
  Description of Artificial Sequence: Synthetic oligonucleotide
cuagccgcugguugaaaac

SEQ ID NO: 888352 - RNA, 19 nt, Artificial Sequence
  Description of Artificial Sequence: Synthetic oligonucleotide
ucccgaugcacugucacac

SEQ ID NO: 888353 - RNA, 19 nt, Artificial Sequence
  Description of Artificial Sequence: Synthetic oligonucleotide
cuacuaucccgaugcacug

SEQ ID NO: 888354 - RNA, 19 nt, Artificial Sequence
  Description of Artificial Sequence: Synthetic oligonucleotide
ugcaauuacuuugcuucca

SEQ ID NO: 888355 - RNA, 19 nt, Artificial Sequence
  Description of Artificial Sequence: Synthetic oligonucleotide
gaaauuugcuacagucuga

SEQ ID NO: 888356 - RNA, 19 nt, Artificial Sequence
  Description of Artificial Sequence: Synthetic oligonucleotide
gcauauaauuuaugaguug

SEQ ID NO: 888357 - RNA, 19 nt, Artificial Sequence
  Description of Artificial Sequence: Synthetic oligonucleotide
uaaucaaaacuugcauauc

SEQ ID NO: 888358 - RNA, 19 nt, Artificial Sequence
  Description of Artificial Sequence: Synthetic oligonucleotide
acaugugcaaugauacuga

SEQ ID NO: 888359 - RNA, 19 nt, Artificial Sequence
  Description of Artificial Sequence: Synthetic oligonucleotide
uguauucaguuggugugac

SEQ ID NO: 888360 - RNA, 19 nt, Artificial Sequence
  Description of Artificial Sequence: Synthetic oligonucleotide
gaagcauuauacuccugcu

SEQ ID NO: 888361 - RNA, 19 nt, Artificial Sequence
  Description of Artificial Sequence: Synthetic oligonucleotide
augaguuggcugcucauua

SEQ ID NO: 888362 - RNA, 19 nt, Artificial Sequence
  Description of Artificial Sequence: Synthetic oligonucleotide
ugaaaacuuccaugugcaa

SEQ ID NO: 888363 - RNA, 19 nt, Artificial Sequence
  Description of Artificial Sequence: Synthetic oligonucleotide
gcagauagugaccuggaca

SEQ ID NO: 888364 - RNA, 19 nt, Artificial Sequence
  Description of Artificial Sequence: Synthetic oligonucleotide
guacacuccugcaaauacc

SEQ ID NO: 888365 - RNA, 19 nt, Artificial Sequence
  Description of Artificial Sequence: Synthetic oligonucleotide
guuuucacgauguacuuuu

SEQ ID NO: 888366 - RNA, 19 nt, Artificial Sequence
  Description of Artificial Sequence: Synthetic oligonucleotide
agguuauuauauucagauu

SEQ ID NO: 888367 - RNA, 19 nt, Artificial Sequence
  Description of Artificial Sequence: Synthetic oligonucleotide
gacaugucagguuucuccu

SEQ ID NO: 888368 - RNA, 19 nt, Artificial Sequence
  Description of Artificial Sequence: Synthetic oligonucleotide
accauaacauuuugccaaa

SEQ ID NO: 888369 - RNA, 19 nt, Artificial Sequence
  Description of Artificial Sequence: Synthetic oligonucleotide
gugcagauacaauuuuauc

SEQ ID NO: 888370 - RNA, 19 nt, Artificial Sequence
  Description of Artificial Sequence: Synthetic oligonucleotide
uuaugaguuggcugcucau

SEQ ID NO: 888371 - RNA, 19 nt, Artificial Sequence
  Description of Artificial Sequence: Synthetic oligonucleotide
cuagggauaucaaauacuu

SEQ ID NO: 888372 - RNA, 19 nt, Artificial Sequence
  Description of Artificial Sequence: Synthetic oligonucleotide
uucaaagggaagagauauu

SEQ ID NO: 888373 - RNA, 19 nt, Artificial Sequence
  Description of Artificial Sequence: Synthetic oligonucleotide
uucacggugaugccucuuu

SEQ ID NO: 888374 - RNA, 19 nt, Artificial Sequence
  Description of Artificial Sequence: Synthetic oligonucleotide
augagguuuaaaagguacu

SEQ ID NO: 888375 - RNA, 19 nt, Artificial Sequence
  Description of Artificial Sequence: Synthetic oligonucleotide
auuggucuacaggguacac

SEQ ID NO: 888376 - RNA, 19 nt, Artificial Sequence
  Description of Artificial Sequence: Synthetic oligonucleotide
uagggauaucaaauacuuu

SEQ ID NO: 888377 - RNA, 19 nt, Artificial Sequence
  Description of Artificial Sequence: Synthetic oligonucleotide
ugcuuuugccaugauccac

SEQ ID NO: 888378 - RNA, 19 nt, Artificial Sequence
  Description of Artificial Sequence: Synthetic oligonucleotide
cagucugagcuugaauacc

SEQ ID NO: 888379 - RNA, 19 nt, Artificial Sequence
  Description of Artificial Sequence: Synthetic oligonucleotide
guucgagaagccugucagc

SEQ ID NO: 888380 - RNA, 19 nt, Artificial Sequence
  Description of Artificial Sequence: Synthetic oligonucleotide
guuuauaacuggaauuacu

SEQ ID NO: 888381 - RNA, 19 nt, Artificial Sequence
  Description of Artificial Sequence: Synthetic oligonucleotide
acucuucagguuauuauau

SEQ ID NO: 888382 - RNA, 19 nt, Artificial Sequence
  Description of Artificial Sequence: Synthetic oligonucleotide
gacuacuaucccgaugcac

SEQ ID NO: 888383 - RNA, 19 nt, Artificial Sequence
  Description of Artificial Sequence: Synthetic oligonucleotide
gaacagcuuuguauggaac

SEQ ID NO: 888384 - RNA, 19 nt, Artificial Sequence
  Description of Artificial Sequence: Synthetic oligonucleotide
aguuucucuugcaauuacu

SEQ ID NO: 888385 - RNA, 19 nt, Artificial Sequence
  Description of Artificial Sequence: Synthetic oligonucleotide
agugcccaaaacaacuggu

SEQ ID NO: 888386 - RNA, 19 nt, Artificial Sequence
  Description of Artificial Sequence: Synthetic oligonucleotide
uuggucuacaggguacacu

SEQ ID NO: 888387 - RNA, 19 nt, Artificial Sequence
  Description of Artificial Sequence: Synthetic oligonucleotide
gauuggucuacaggguaca

SEQ ID NO: 888388 - RNA, 19 nt, Artificial Sequence
  Description of Artificial Sequence: Synthetic oligonucleotide
gccuacuucauuaacuuca

SEQ ID NO: 888389 - RNA, 19 nt, Artificial Sequence
  Description of Artificial Sequence: Synthetic oligonucleotide
ggugugacaacagugccca

SEQ ID NO: 888390 - RNA, 19 nt, Artificial Sequence
  Description of Artificial Sequence: Synthetic oligonucleotide
auagugaccuggacacuuc

SEQ ID NO: 888391 - RNA, 19 nt, Artificial Sequence
  Description of Artificial Sequence: Synthetic oligonucleotide
caaugacugccugaagaac

SEQ ID NO: 888392 - RNA, 19 nt, Artificial Sequence
  Description of Artificial Sequence: Synthetic oligonucleotide
uaugaguuggcugcucauu

SEQ ID NO: 888393 - RNA, 19 nt, Artificial Sequence
  Description of Artificial Sequence: Synthetic oligonucleotide
cacuagcucuuccacgaug

SEQ ID NO: 888394 - RNA, 19 nt, Artificial Sequence
  Description of Artificial Sequence: Synthetic oligonucleotide
cugacaauugugcuucaaa

SEQ ID NO: 888395 - RNA, 19 nt, Artificial Sequence
  Description of Artificial Sequence: Synthetic oligonucleotide
gggccagacuacuaucccg

SEQ ID NO: 888396 - RNA, 19 nt, Artificial Sequence
  Description of Artificial Sequence: Synthetic oligonucleotide
auauucagauuggucuaca

SEQ ID NO: 888397 - RNA, 19 nt, Artificial Sequence
  Description of Artificial Sequence: Synthetic oligonucleotide
aucccaaccuccagccagc

SEQ ID NO: 888398 - RNA, 19 nt, Artificial Sequence
  Description of Artificial Sequence: Synthetic oligonucleotide
aagcagauagugaccugga

SEQ ID NO: 888399 - RNA, 19 nt, Artificial Sequence
  Description of Artificial Sequence: Synthetic oligonucleotide
cagaugauagaacagcuuu

SEQ ID NO: 888400 - RNA, 19 nt, Artificial Sequence
  Description of Artificial Sequence: Synthetic oligonucleotide
ccuguuaguucgagaagcc

SEQ ID NO: 888401 - RNA, 19 nt, Artificial Sequence
  Description of Artificial Sequence: Synthetic oligonucleotide
cauucaaagggaagagaua

SEQ ID NO: 888402 - RNA, 19 nt, Artificial Sequence
  Description of Artificial Sequence: Synthetic oligonucleotide
ucacggugaugccucuuuc

SEQ ID NO: 888403 - RNA, 19 nt, Artificial Sequence
  Description of Artificial Sequence: Synthetic oligonucleotide
gacagagacuucaaagagu

SEQ ID NO: 888404 - RNA, 19 nt, Artificial Sequence
  Description of Artificial Sequence: Synthetic oligonucleotide
caguguauucaguuggugu

SEQ ID NO: 888405 - RNA, 19 nt, Artificial Sequence
  Description of Artificial Sequence: Synthetic oligonucleotide
uccuuuagacgcucacaua

SEQ ID NO: 888406 - RNA, 19 nt, Artificial Sequence
  Description of Artificial Sequence: Synthetic oligonucleotide
ggucgucaaaauaacagaa

SEQ ID NO: 888407 - RNA, 19 nt, Artificial Sequence
  Description of Artificial Sequence: Synthetic oligonucleotide
gcuuuguauggaacagugg

SEQ ID NO: 888408 - RNA, 19 nt, Artificial Sequence
  Description of Artificial Sequence: Synthetic oligonucleotide
aucccgaugcacugucaca

SEQ ID NO: 888409 - RNA, 19 nt, Artificial Sequence
  Description of Artificial Sequence: Synthetic oligonucleotide
gagaauccuuuagacgcuc

SEQ ID NO: 888410 - RNA, 19 nt, Artificial Sequence
  Description of Artificial Sequence: Synthetic oligonucleotide
cuccgcagugcugaagggc

SEQ ID NO: 888411 - RNA, 19 nt, Artificial Sequence
  Description of Artificial Sequence: Synthetic oligonucleotide
cagcaaucagaaagcccac

SEQ ID NO: 888412 - RNA, 19 nt, Artificial Sequence
  Description of Artificial Sequence: Synthetic oligonucleotide
auguacuuuuggaggaggu

SEQ ID NO: 888413 - RNA, 19 nt, Artificial Sequence
  Description of Artificial Sequence: Synthetic oligonucleotide
cagguuucuccuugagcuc

SEQ ID NO: 888414 - RNA, 19 nt, Artificial Sequence
  Description of Artificial Sequence: Synthetic oligonucleotide
gaagccugucagcuaaagu

SEQ ID NO: 888415 - RNA, 19 nt, Artificial Sequence
  Description of Artificial Sequence: Synthetic oligonucleotide
ggacacuucauaacuaaaa

SEQ ID NO: 888416 - RNA, 19 nt, Artificial Sequence
  Description of Artificial Sequence: Synthetic oligonucleotide
guuaguucgagaagccugu

SEQ ID NO: 888417 - RNA, 19 nt, Artificial Sequence
  Description of Artificial Sequence: Synthetic oligonucleotide
aagggcuccacuggaugau

SEQ ID NO: 888418 - RNA, 19 nt, Artificial Sequence
  Description of Artificial Sequence: Synthetic oligonucleotide
gagucauuuaaggucaguu

SEQ ID NO: 888419 - RNA, 19 nt, Artificial Sequence
  Description of Artificial Sequence: Synthetic oligonucleotide
guguauucaguugguguga

SEQ ID NO: 888420 - RNA, 19 nt, Artificial Sequence
  Description of Artificial Sequence: Synthetic oligonucleotide
ccuauuugugcuucaguga

SEQ ID NO: 888421 - RNA, 19 nt, Artificial Sequence
  Description of Artificial Sequence: Synthetic oligonucleotide
gauagugaccuggacacuu

SEQ ID NO: 888422 - RNA, 19 nt, Artificial Sequence
  Description of Artificial Sequence: Synthetic oligonucleotide
caaugagguuuaaaaggua

SEQ ID NO: 888423 - RNA, 19 nt, Artificial Sequence
  Description of Artificial Sequence: Synthetic oligonucleotide
uacuaucccgaugcacugu

SEQ ID NO: 888424 - RNA, 19 nt, Artificial Sequence
  Description of Artificial Sequence: Synthetic oligonucleotide
agacuacuaucccgaugca

SEQ ID NO: 888425 - RNA, 19 nt, Artificial Sequence
  Description of Artificial Sequence: Synthetic oligonucleotide
cgcugauuuaaacccaggc

SEQ ID NO: 888426 - RNA, 19 nt, Artificial Sequence
  Description of Artificial Sequence: Synthetic oligonucleotide
gaggagguauucuuucaau

SEQ ID NO: 888427 - RNA, 19 nt, Artificial Sequence
  Description of Artificial Sequence: Synthetic oligonucleotide
caucgaccaccaguaaaac

SEQ ID NO: 888428 - RNA, 19 nt, Artificial Sequence
  Description of Artificial Sequence: Synthetic oligonucleotide
acaccucuauacuggucaa

SEQ ID NO: 888429 - RNA, 19 nt, Artificial Sequence
  Description of Artificial Sequence: Synthetic oligonucleotide
uaucaagaaccugcugauu

SEQ ID NO: 888430 - RNA, 19 nt, Artificial Sequence
  Description of Artificial Sequence: Synthetic oligonucleotide
ucgagaagccugucagcua

SEQ ID NO: 888431 - RNA, 19 nt, Artificial Sequence
  Description of Artificial Sequence: Synthetic oligonucleotide
uucuuagugugugcagaua

SEQ ID NO: 888432 - RNA, 19 nt, Artificial Sequence
  Description of Artificial Sequence: Synthetic oligonucleotide
ucaacccuuucaggaucag

SEQ ID NO: 888433 - RNA, 19 nt, Artificial Sequence
  Description of Artificial Sequence: Synthetic oligonucleotide
guauucaguuggugugaca

SEQ ID NO: 888434 - RNA, 19 nt, Artificial Sequence
  Description of Artificial Sequence: Synthetic oligonucleotide
ucguuccacuuguaauuua

SEQ ID NO: 888435 - RNA, 19 nt, Artificial Sequence
  Description of Artificial Sequence: Synthetic oligonucleotide
agacgcucacauaugguuu

SEQ ID NO: 888436 - RNA, 19 nt, Artificial Sequence
  Description of Artificial Sequence: Synthetic oligonucleotide
caaguuuugcagaaaucuu

SEQ ID NO: 888437 - RNA, 19 nt, Artificial Sequence
  Description of Artificial Sequence: Synthetic oligonucleotide
ccaugugcaaaagucccag

SEQ ID NO: 888438 - RNA, 19 nt, Artificial Sequence
  Description of Artificial Sequence: Synthetic oligonucleotide
ggugaugccucuuucucgu

SEQ ID NO: 888439 - RNA, 19 nt, Artificial Sequence
  Description of Artificial Sequence: Synthetic oligonucleotide
gaagaacacugucaacauu

SEQ ID NO: 888440 - RNA, 19 nt, Artificial Sequence
  Description of Artificial Sequence: Synthetic oligonucleotide
cacgauguuuccauucagu

SEQ ID NO: 888441 - RNA, 19 nt, Artificial Sequence
  Description of Artificial Sequence: Synthetic oligonucleotide
uuaguucgagaagccuguc

SEQ ID NO: 888442 - RNA, 19 nt, Artificial Sequence
  Description of Artificial Sequence: Synthetic oligonucleotide
uugcaucgaccaccaguaa

SEQ ID NO: 888443 - RNA, 19 nt, Artificial Sequence
  Description of Artificial Sequence: Synthetic oligonucleotide
gcuaucacaccucuauacu

SEQ ID NO: 888444 - RNA, 19 nt, Artificial Sequence
  Description of Artificial Sequence: Synthetic oligonucleotide
agaauccuuuagacgcuca

SEQ ID NO: 888445 - RNA, 19 nt, Artificial Sequence
  Description of Artificial Sequence: Synthetic oligonucleotide
gcaucgaccaccaguaaaa

SEQ ID NO: 888446 - RNA, 19 nt, Artificial Sequence
  Description of Artificial Sequence: Synthetic oligonucleotide
ugguaaccugcaucuucau

SEQ ID NO: 888447 - RNA, 19 nt, Artificial Sequence
  Description of Artificial Sequence: Synthetic oligonucleotide
auucaucacuagggauauc

SEQ ID NO: 888448 - RNA, 19 nt, Artificial Sequence
  Description of Artificial Sequence: Synthetic oligonucleotide
ccuuuagacgcucacauau

SEQ ID NO: 888449 - RNA, 19 nt, Artificial Sequence
  Description of Artificial Sequence: Synthetic oligonucleotide
acugacaauugugcuucaa

SEQ ID NO: 888450 - RNA, 19 nt, Artificial Sequence
  Description of Artificial Sequence: Synthetic oligonucleotide
gugugcagauacaauuuua

SEQ ID NO: 888451 - RNA, 19 nt, Artificial Sequence
  Description of Artificial Sequence: Synthetic oligonucleotide
ccaccauaacauuuugcca

SEQ ID NO: 888452 - RNA, 19 nt, Artificial Sequence
  Description of Artificial Sequence: Synthetic oligonucleotide
ggauucaaaaugccuacuu

SEQ ID NO: 888453 - RNA, 19 nt, Artificial Sequence
  Description of Artificial Sequence: Synthetic oligonucleotide
auacccucauuugcaucga

SEQ ID NO: 888454 - RNA, 19 nt, Artificial Sequence
  Description of Artificial Sequence: Synthetic oligonucleotide
augcucucaguggguuuuc

SEQ ID NO: 888455 - RNA, 19 nt, Artificial Sequence
  Description of Artificial Sequence: Synthetic oligonucleotide
ccagacuacuaucccgaug

SEQ ID NO: 888456 - RNA, 19 nt, Artificial Sequence
  Description of Artificial Sequence: Synthetic oligonucleotide
gguaaccugcaucuucaua

SEQ ID NO: 888457 - RNA, 19 nt, Artificial Sequence
  Description of Artificial Sequence: Synthetic oligonucleotide
cuaucccgaugcacuguca

SEQ ID NO: 888458 - RNA, 19 nt, Artificial Sequence
  Description of Artificial Sequence: Synthetic oligonucleotide
ggccagacuacuaucccga

SEQ ID NO: 888459 - RNA, 19 nt, Artificial Sequence
  Description of Artificial Sequence: Synthetic oligonucleotide
ugagcuccgcagugcugaa

SEQ ID NO: 888460 - RNA, 19 nt, Artificial Sequence
  Description of Artificial Sequence: Synthetic oligonucleotide
ggcaagcagauagugaccu

SEQ ID NO: 888461 - RNA, 19 nt, Artificial Sequence
  Description of Artificial Sequence: Synthetic oligonucleotide
gccaacaguguaugcuuuc

SEQ ID NO: 888462 - RNA, 19 nt, Artificial Sequence
  Description of Artificial Sequence: Synthetic oligonucleotide
accaccaguaaaacaccuu

SEQ ID NO: 888463 - RNA, 19 nt, Artificial Sequence
  Description of Artificial Sequence: Synthetic oligonucleotide
ccgaugcacugucacacug

SEQ ID NO: 888464 - RNA, 19 nt, Artificial Sequence
  Description of Artificial Sequence: Synthetic oligonucleotide
acgcucacauaugguuuug

SEQ ID NO: 888465 - RNA, 19 nt, Artificial Sequence
  Description of Artificial Sequence: Synthetic oligonucleotide
gagcuccgcagugcugaag

SEQ ID NO: 888466 - RNA, 19 nt, Artificial Sequence
  Description of Artificial Sequence: Synthetic oligonucleotide
guaucuccuauuugugcuu

SEQ ID NO: 888467 - RNA, 19 nt, Artificial Sequence
  Description of Artificial Sequence: Synthetic oligonucleotide
ccaucaaacagugcuaugu

SEQ ID NO: 888468 - RNA, 19 nt, Artificial Sequence
  Description of Artificial Sequence: Synthetic oligonucleotide
ggucuacaggguacacucc

SEQ ID NO: 888469 - RNA, 19 nt, Artificial Sequence
  Description of Artificial Sequence: Synthetic oligonucleotide
cacggugaugccucuuucu

SEQ ID NO: 888470 - RNA, 19 nt, Artificial Sequence
  Description of Artificial Sequence: Synthetic oligonucleotide
ggugugucaaugagguuua

SEQ ID NO: 888471 - RNA, 19 nt, Artificial Sequence
  Description of Artificial Sequence: Synthetic oligonucleotide
cgauguuuccauucaguaa

SEQ ID NO: 888472 - RNA, 19 nt, Artificial Sequence
  Description of Artificial Sequence: Synthetic oligonucleotide
gugcaaugauacugaaauu

SEQ ID NO: 888473 - RNA, 19 nt, Artificial Sequence
  Description of Artificial Sequence: Synthetic oligonucleotide
cuuucucguuccacuugua

SEQ ID NO: 888474 - RNA, 19 nt, Artificial Sequence
  Description of Artificial Sequence: Synthetic oligonucleotide
cuguuaguucgagaagccu

SEQ ID NO: 888475 - RNA, 19 nt, Artificial Sequence
  Description of Artificial Sequence: Synthetic oligonucleotide
cuccaucaaacagugcuau

SEQ ID NO: 888476 - RNA, 19 nt, Artificial Sequence
  Description of Artificial Sequence: Synthetic oligonucleotide
cuacagucugagcuugaau

SEQ ID NO: 888477 - RNA, 19 nt, Artificial Sequence
  Description of Artificial Sequence: Synthetic oligonucleotide
caugauccacaugugcaau

SEQ ID NO: 888478 - RNA, 19 nt, Artificial Sequence
  Description of Artificial Sequence: Synthetic oligonucleotide
cagugcuauguuggcuauc

SEQ ID NO: 888479 - RNA, 19 nt, Artificial Sequence
  Description of Artificial Sequence: Synthetic oligonucleotide
ccuuuagaaaccacuccau

SEQ ID NO: 888480 - RNA, 19 nt, Artificial Sequence
  Description of Artificial Sequence: Synthetic oligonucleotide
gagcuugaauacccucauu

SEQ ID NO: 888481 - RNA, 19 nt, Artificial Sequence
  Description of Artificial Sequence: Synthetic oligonucleotide
cuuucacggugaugccucu

SEQ ID NO: 888482 - RNA, 19 nt, Artificial Sequence
  Description of Artificial Sequence: Synthetic oligonucleotide
ggguuccaaggcagccacg

SEQ ID NO: 888483 - RNA, 19 nt, Artificial Sequence
  Description of Artificial Sequence: Synthetic oligonucleotide
cucguuccacuuguaauuu

SEQ ID NO: 888484 - RNA, 19 nt, Artificial Sequence
  Description of Artificial Sequence: Synthetic oligonucleotide
caccucuauacuggucaaa

SEQ ID NO: 888485 - RNA, 19 nt, Artificial Sequence
  Description of Artificial Sequence: Synthetic oligonucleotide
gcagaugauagaacagcuu

SEQ ID NO: 888486 - RNA, 19 nt, Artificial Sequence
  Description of Artificial Sequence: Synthetic oligonucleotide
ccaacaguguaugcuuucu

SEQ ID NO: 888487 - RNA, 19 nt, Artificial Sequence
  Description of Artificial Sequence: Synthetic oligonucleotide
gccugucagcuaaagugcu

SEQ ID NO: 888488 - RNA, 19 nt, Artificial Sequence
  Description of Artificial Sequence: Synthetic oligonucleotide
gcggguggccccggguucc

SEQ ID NO: 888489 - RNA, 19 nt, Artificial Sequence
  Description of Artificial Sequence: Synthetic oligonucleotide
ccaaucuuccucagucuuu

SEQ ID NO: 888490 - RNA, 19 nt, Artificial Sequence
  Description of Artificial Sequence: Synthetic oligonucleotide
cucuagccgcugguugaaa

SEQ ID NO: 888491 - RNA, 19 nt, Artificial Sequence
  Description of Artificial Sequence: Synthetic oligonucleotide
ccauaacauuuugccaaaa

SEQ ID NO: 888492 - RNA, 19 nt, Artificial Sequence
  Description of Artificial Sequence: Synthetic oligonucleotide
acccagggccagacuacua

SEQ ID NO: 888493 - RNA, 19 nt, Artificial Sequence
  Description of Artificial Sequence: Synthetic oligonucleotide
gugaugccucuuucucguu

SEQ ID NO: 888494 - RNA, 19 nt, Artificial Sequence
  Description of Artificial Sequence: Synthetic oligonucleotide
gccuggcaaagugccauua

SEQ ID NO: 888495 - RNA, 19 nt, Artificial Sequence
  Description of Artificial Sequence: Synthetic oligonucleotide
cacccagggccagacuacu

SEQ ID NO: 888496 - RNA, 19 nt, Artificial Sequence
  Description of Artificial Sequence: Synthetic oligonucleotide
cugcggguggccccggguu

SEQ ID NO: 888497 - RNA, 19 nt, Artificial Sequence
  Description of Artificial Sequence: Synthetic oligonucleotide
gccagacuacuaucccgau

SEQ ID NO: 888498 - RNA, 19 nt, Artificial Sequence
  Description of Artificial Sequence: Synthetic oligonucleotide
ccugucagcuaaagugcuu

SEQ ID NO: 888499 - RNA, 19 nt, Artificial Sequence
  Description of Artificial Sequence: Synthetic oligonucleotide
cccgaugcacugucacacu

SEQ ID NO: 888500 - RNA, 19 nt, Artificial Sequence
  Description of Artificial Sequence: Synthetic oligonucleotide
ccgcagugcugaagggccu

SEQ ID NO: 888501 - RNA, 19 nt, Artificial Sequence
  Description of Artificial Sequence: Synthetic oligonucleotide
gauuaaagcaaugagaugg

SEQ ID NO: 888502 - RNA, 19 nt, Artificial Sequence
  Description of Artificial Sequence: Synthetic oligonucleotide
aauugcgucacccucacuc

SEQ ID NO: 888503 - RNA, 19 nt, Artificial Sequence
  Description of Artificial Sequence: Synthetic oligonucleotide
aauccgguagcccaugucc

SEQ ID NO: 888504 - RNA, 19 nt, Artificial Sequence
  Description of Artificial Sequence: Synthetic oligonucleotide
uuaccaagcuacaagagag

SEQ ID NO: 888505 - RNA, 19 nt, Artificial Sequence
  Description of Artificial Sequence: Synthetic oligonucleotide
ugagauuaaagcaaugaga

SEQ ID NO: 888506 - RNA, 19 nt, Artificial Sequence
  Description of Artificial Sequence: Synthetic oligonucleotide
aaucaauugcgucacccuc

SEQ ID NO: 888507 - RNA, 19 nt, Artificial Sequence
  Description of Artificial Sequence: Synthetic oligonucleotide
auaggaaaggcaaagcccc

SEQ ID NO: 888508 - RNA, 19 nt, Artificial Sequence
  Description of Artificial Sequence: Synthetic oligonucleotide
cugaaagccagcaaguugc

SEQ ID NO: 888509 - RNA, 19 nt, Artificial Sequence
  Description of Artificial Sequence: Synthetic oligonucleotide
ucaagggacaauuagccca

SEQ ID NO: 888510 - RNA, 19 nt, Artificial Sequence
  Description of Artificial Sequence: Synthetic oligonucleotide
aauaggccaaggcaagccg

SEQ ID NO: 888511 - RNA, 19 nt, Artificial Sequence
  Description of Artificial Sequence: Synthetic oligonucleotide
auacacuucauuaccaagc

SEQ ID NO: 888512 - RNA, 19 nt, Artificial Sequence
  Description of Artificial Sequence: Synthetic oligonucleotide
cauaggaaaggcaaagccc

SEQ ID NO: 888513 - RNA, 19 nt, Artificial Sequence
  Description of Artificial Sequence: Synthetic oligonucleotide
aaaggcucggcuccugccc

SEQ ID NO: 888514 - RNA, 19 nt, Artificial Sequence
  Description of Artificial Sequence: Synthetic oligonucleotide
ucauuaccaagcuacaaga

SEQ ID NO: 888515 - RNA, 19 nt, Artificial Sequence
  Description of Artificial Sequence: Synthetic oligonucleotide
acaagcuugacugagagga

SEQ ID NO: 888516 - RNA, 19 nt, Artificial Sequence
  Description of Artificial Sequence: Synthetic oligonucleotide
aggaccaucuagcugggcc

SEQ ID NO: 888517 - RNA, 19 nt, Artificial Sequence
  Description of Artificial Sequence: Synthetic oligonucleotide
guuuuaaucaauugcguca

SEQ ID NO: 888518 - RNA, 19 nt, Artificial Sequence
  Description of Artificial Sequence: Synthetic oligonucleotide
ugaaccaacucccaccucu

SEQ ID NO: 888519 - RNA, 19 nt, Artificial Sequence
  Description of Artificial Sequence: Synthetic oligonucleotide
ucugaaagccagcaaguug

SEQ ID NO: 888520 - RNA, 19 nt, Artificial Sequence
  Description of Artificial Sequence: Synthetic oligonucleotide
ugcuuuucugcucagggcu

SEQ ID NO: 888521 - RNA, 19 nt, Artificial Sequence
  Description of Artificial Sequence: Synthetic oligonucleotide
aauggcagguggcuugaac

SEQ ID NO: 888522 - RNA, 19 nt, Artificial Sequence
  Description of Artificial Sequence: Synthetic oligonucleotide
uuaggaaagcgccaccuca

SEQ ID NO: 888523 - RNA, 19 nt, Artificial Sequence
  Description of Artificial Sequence: Synthetic oligonucleotide
agcaaguugcagcaauccc

SEQ ID NO: 888524 - RNA, 19 nt, Artificial Sequence
  Description of Artificial Sequence: Synthetic oligonucleotide
cugagauuaaagcaaugag

SEQ ID NO: 888525 - RNA, 19 nt, Artificial Sequence
  Description of Artificial Sequence: Synthetic oligonucleotide
auuaccaagcuacaagaga

SEQ ID NO: 888526 - RNA, 19 nt, Artificial Sequence
  Description of Artificial Sequence: Synthetic oligonucleotide
aggacaguaaggcuuaugu

SEQ ID NO: 888527 - RNA, 19 nt, Artificial Sequence
  Description of Artificial Sequence: Synthetic oligonucleotide
ugggcuaggaccaucuagc

SEQ ID NO: 888528 - RNA, 19 nt, Artificial Sequence
  Description of Artificial Sequence: Synthetic oligonucleotide
ugucgcugagauuaaagca

SEQ ID NO: 888529 - RNA, 19 nt, Artificial Sequence
  Description of Artificial Sequence: Synthetic oligonucleotide
ugugucgcugagauuaaag

SEQ ID NO: 888530 - RNA, 19 nt, Artificial Sequence
  Description of Artificial Sequence: Synthetic oligonucleotide
uguccucgucaucagacgg

SEQ ID NO: 888531 - RNA, 19 nt, Artificial Sequence
  Description of Artificial Sequence: Synthetic oligonucleotide
uuuuaaucaauugcgucac

SEQ ID NO: 888532 - RNA, 19 nt, Artificial Sequence
  Description of Artificial Sequence: Synthetic oligonucleotide
aacucccaccucuagagca

SEQ ID NO: 888533 - RNA, 19 nt, Artificial Sequence
  Description of Artificial Sequence: Synthetic oligonucleotide
ucuucuuaaaacugugaaa

SEQ ID NO: 888534 - RNA, 19 nt, Artificial Sequence
  Description of Artificial Sequence: Synthetic oligonucleotide
uuuccuucaccaauaaaua

SEQ ID NO: 888535 - RNA, 19 nt, Artificial Sequence
  Description of Artificial Sequence: Synthetic oligonucleotide
aaggcaagccguugccagc

SEQ ID NO: 888536 - RNA, 19 nt, Artificial Sequence
  Description of Artificial Sequence: Synthetic oligonucleotide
cuggguugaaccaacuccc

SEQ ID NO: 888537 - RNA, 19 nt, Artificial Sequence
  Description of Artificial Sequence: Synthetic oligonucleotide
agggguuuugagaagggcc

SEQ ID NO: 888538 - RNA, 19 nt, Artificial Sequence
  Description of Artificial Sequence: Synthetic oligonucleotide
aggccuguaauccgguagc

SEQ ID NO: 888539 - RNA, 19 nt, Artificial Sequence
  Description of Artificial Sequence: Synthetic oligonucleotide
auggcgcagaaguacuugc

SEQ ID NO: 888540 - RNA, 19 nt, Artificial Sequence
  Description of Artificial Sequence: Synthetic oligonucleotide
cagucaagggacaauuagc

SEQ ID NO: 888541 - RNA, 19 nt, Artificial Sequence
  Description of Artificial Sequence: Synthetic oligonucleotide
ugguuuuaaucaauugcgu

SEQ ID NO: 888542 - RNA, 19 nt, Artificial Sequence
  Description of Artificial Sequence: Synthetic oligonucleotide
uuccuucaccaauaaauac

SEQ ID NO: 888543 - RNA, 19 nt, Artificial Sequence
  Description of Artificial Sequence: Synthetic oligonucleotide
uuaugugucucuccacacu

SEQ ID NO: 888544 - RNA, 19 nt, Artificial Sequence
  Description of Artificial Sequence: Synthetic oligonucleotide
cauuaccaagcuacaagag

SEQ ID NO: 888545 - RNA, 19 nt, Artificial Sequence
  Description of Artificial Sequence: Synthetic oligonucleotide
ucacaucauaggaaaggca

SEQ ID NO: 888546 - RNA, 19 nt, Artificial Sequence
  Description of Artificial Sequence: Synthetic oligonucleotide
acaguaaggcuuauguguc

SEQ ID NO: 888547 - RNA, 19 nt, Artificial Sequence
  Description of Artificial Sequence: Synthetic oligonucleotide
gugucgcugagauuaaagc

SEQ ID NO: 888548 - RNA, 19 nt, Artificial Sequence
  Description of Artificial Sequence: Synthetic oligonucleotide
gagcuagcccuguaggcgg

SEQ ID NO: 888549 - RNA, 19 nt, Artificial Sequence
  Description of Artificial Sequence: Synthetic oligonucleotide
ggaaaccagguccaggagg

SEQ ID NO: 888550 - RNA, 19 nt, Artificial Sequence
  Description of Artificial Sequence: Synthetic oligonucleotide
augccaaacuaacaaacaa

SEQ ID NO: 888551 - RNA, 19 nt, Artificial Sequence
  Description of Artificial Sequence: Synthetic oligonucleotide
caccucuagagcaggagcc

SEQ ID NO: 888552 - RNA, 19 nt, Artificial Sequence
  Description of Artificial Sequence: Synthetic oligonucleotide
caagggauuggcauucaug

SEQ ID NO: 888553 - RNA, 19 nt, Artificial Sequence
  Description of Artificial Sequence: Synthetic oligonucleotide
cuuaugugucucuccacac

SEQ ID NO: 888554 - RNA, 19 nt, Artificial Sequence
  Description of Artificial Sequence: Synthetic oligonucleotide
gauggguugggagacagga

SEQ ID NO: 888555 - RNA, 19 nt, Artificial Sequence
  Description of Artificial Sequence: Synthetic oligonucleotide
cuacaagagaggagugggg

SEQ ID NO: 888556 - RNA, 19 nt, Artificial Sequence
  Description of Artificial Sequence: Synthetic oligonucleotide
cucgucaucagacggcccc

SEQ ID NO: 888557 - RNA, 19 nt, Artificial Sequence
  Description of Artificial Sequence: Synthetic oligonucleotide
gcuggguugaaccaacucc

SEQ ID NO: 888558 - RNA, 19 nt, Artificial Sequence
  Description of Artificial Sequence: Synthetic oligonucleotide
gguugaaccaacucccacc

SEQ ID NO: 888559 - RNA, 19 nt, Artificial Sequence
  Description of Artificial Sequence: Synthetic oligonucleotide
agggauuggcauucaugcg

SEQ ID NO: 888560 - RNA, 19 nt, Artificial Sequence
  Description of Artificial Sequence: Synthetic oligonucleotide
cuugaagacaacuucggcu

SEQ ID NO: 888561 - RNA, 19 nt, Artificial Sequence
  Description of Artificial Sequence: Synthetic oligonucleotide
ggagggauagcugagcuag

SEQ ID NO: 888562 - RNA, 19 nt, Artificial Sequence
  Description of Artificial Sequence: Synthetic oligonucleotide
ggauagcugagcuagggac

SEQ ID NO: 888563 - RNA, 19 nt, Artificial Sequence
  Description of Artificial Sequence: Synthetic oligonucleotide
gguuuuaaucaauugcguc

SEQ ID NO: 888564 - RNA, 19 nt, Artificial Sequence
  Description of Artificial Sequence: Synthetic oligonucleotide
aacauggccuccugucucu

SEQ ID NO: 888565 - RNA, 19 nt, Artificial Sequence
  Description of Artificial Sequence: Synthetic oligonucleotide
caaggcaagccguugccag

SEQ ID NO: 888566 - RNA, 19 nt, Artificial Sequence
  Description of Artificial Sequence: Synthetic oligonucleotide
uccugucacaucauaggaa

SEQ ID NO: 888567 - RNA, 19 nt, Artificial Sequence
  Description of Artificial Sequence: Synthetic oligonucleotide
ucaauugcgucacccucac

SEQ ID NO: 888568 - RNA, 19 nt, Artificial Sequence
  Description of Artificial Sequence: Synthetic oligonucleotide
agcuugacugagaggaggc

SEQ ID NO: 888569 - RNA, 19 nt, Artificial Sequence
  Description of Artificial Sequence: Synthetic oligonucleotide
guaggcgggagcgagagug

SEQ ID NO: 888570 - RNA, 19 nt, Artificial Sequence
  Description of Artificial Sequence: Synthetic oligonucleotide
ugccccaaaggccuagccc

SEQ ID NO: 888571 - RNA, 19 nt, Artificial Sequence
  Description of Artificial Sequence: Synthetic oligonucleotide
accugugucgcugagauua

SEQ ID NO: 888572 - RNA, 19 nt, Artificial Sequence
  Description of Artificial Sequence: Synthetic oligonucleotide
agcuacaagagaggagugg

SEQ ID NO: 888573 - RNA, 19 nt, Artificial Sequence
  Description of Artificial Sequence: Synthetic oligonucleotide
gcuacaagagaggaguggg

SEQ ID NO: 888574 - RNA, 19 nt, Artificial Sequence
  Description of Artificial Sequence: Synthetic oligonucleotide
aacacucccucucgcccuc

SEQ ID NO: 888575 - RNA, 19 nt, Artificial Sequence
  Description of Artificial Sequence: Synthetic oligonucleotide
gagcuagggacuuucccac

SEQ ID NO: 888576 - RNA, 19 nt, Artificial Sequence
  Description of Artificial Sequence: Synthetic oligonucleotide
gagaaggggccuuaggaaa

SEQ ID NO: 888577 - RNA, 19 nt, Artificial Sequence
  Description of Artificial Sequence: Synthetic oligonucleotide
caucagacggccccgugcc

SEQ ID NO: 888578 - RNA, 19 nt, Artificial Sequence
  Description of Artificial Sequence: Synthetic oligonucleotide
gcaauccccacccacaaug

SEQ ID NO: 888579 - RNA, 19 nt, Artificial Sequence
  Description of Artificial Sequence: Synthetic oligonucleotide
agcuagggacuuucccacc

SEQ ID NO: 888580 - RNA, 19 nt, Artificial Sequence
  Description of Artificial Sequence: Synthetic oligonucleotide
caauaggccaaggcaagcc

SEQ ID NO: 888581 - RNA, 19 nt, Artificial Sequence
  Description of Artificial Sequence: Synthetic oligonucleotide
aaccaacucccaccucuag

SEQ ID NO: 888582 - RNA, 19 nt, Artificial Sequence
  Description of Artificial Sequence: Synthetic oligonucleotide
cugagcuagggacuuuccc

SEQ ID NO: 888583 - RNA, 19 nt, Artificial Sequence
  Description of Artificial Sequence: Synthetic oligonucleotide
cacuucuuuggucuuggug

SEQ ID NO: 888584 - RNA, 19 nt, Artificial Sequence
  Description of Artificial Sequence: Synthetic oligonucleotide
agggauagcugagcuaggg

SEQ ID NO: 888585 - RNA, 19 nt, Artificial Sequence
  Description of Artificial Sequence: Synthetic oligonucleotide
auugcgucacccucacucu

SEQ ID NO: 888586 - RNA, 19 nt, Artificial Sequence
  Description of Artificial Sequence: Synthetic oligonucleotide
cuugacugagaggaggcac

SEQ ID NO: 888587 - RNA, 19 nt, Artificial Sequence
  Description of Artificial Sequence: Synthetic oligonucleotide
auuaaagcaaugagauggu

SEQ ID NO: 888588 - RNA, 19 nt, Artificial Sequence
  Description of Artificial Sequence: Synthetic oligonucleotide
gcaaguugcagcaaucccc

SEQ ID NO: 888589 - RNA, 19 nt, Artificial Sequence
  Description of Artificial Sequence: Synthetic oligonucleotide
caauuagcccaagagucug

SEQ ID NO: 888590 - RNA, 19 nt, Artificial Sequence
  Description of Artificial Sequence: Synthetic oligonucleotide
agggcagguggccugaccu

SEQ ID NO: 888591 - RNA, 19 nt, Artificial Sequence
  Description of Artificial Sequence: Synthetic oligonucleotide
agcccaacacucccucucg

SEQ ID NO: 888592 - RNA, 19 nt, Artificial Sequence
  Description of Artificial Sequence: Synthetic oligonucleotide
caauccccacccacaaugc

SEQ ID NO: 888593 - RNA, 19 nt, Artificial Sequence
  Description of Artificial Sequence: Synthetic oligonucleotide
ccaacucccaccucuagag

SEQ ID NO: 888594 - RNA, 19 nt, Artificial Sequence
  Description of Artificial Sequence: Synthetic oligonucleotide
agacaacuucggcuggcuc

SEQ ID NO: 888595 - RNA, 19 nt, Artificial Sequence
  Description of Artificial Sequence: Synthetic oligonucleotide
acaauuagcccaagagucu

SEQ ID NO: 888596 - RNA, 19 nt, Artificial Sequence
  Description of Artificial Sequence: Synthetic oligonucleotide
uggccuccugucucuaggg

SEQ ID NO: 888597 - RNA, 19 nt, Artificial Sequence
  Description of Artificial Sequence: Synthetic oligonucleotide
caguucuugugccccaaag

SEQ ID NO: 888598 - RNA, 19 nt, Artificial Sequence
  Description of Artificial Sequence: Synthetic oligonucleotide
ucgcugagauuaaagcaau

SEQ ID NO: 888599 - RNA, 19 nt, Artificial Sequence
  Description of Artificial Sequence: Synthetic oligonucleotide
ggagcuagcccuguaggcg

SEQ ID NO: 888600 - RNA, 19 nt, Artificial Sequence
  Description of Artificial Sequence: Synthetic oligonucleotide
agcccuguaggcgggagcg

SEQ ID NO: 888601 - RNA, 19 nt, Artificial Sequence
  Description of Artificial Sequence: Synthetic oligonucleotide
gacaacuucggcuggcucu

SEQ ID NO: 888602 - RNA, 19 nt, Artificial Sequence
  Description of Artificial Sequence: Synthetic oligonucleotide
aggcuaggcagauggguug

SEQ ID NO: 888603 - RNA, 19 nt, Artificial Sequence
  Description of Artificial Sequence: Synthetic oligonucleotide
cgcagaaguacuugcaugg

SEQ ID NO: 888604 - RNA, 19 nt, Artificial Sequence
  Description of Artificial Sequence: Synthetic oligonucleotide
gagcgagaguggcaauagg

SEQ ID NO: 888605 - RNA, 19 nt, Artificial Sequence
  Description of Artificial Sequence: Synthetic oligonucleotide
uucaugcgccgcugguugg

SEQ ID NO: 888606 - RNA, 19 nt, Artificial Sequence
  Description of Artificial Sequence: Synthetic oligonucleotide
accaacucccaccucuaga

SEQ ID NO: 888607 - RNA, 19 nt, Artificial Sequence
  Description of Artificial Sequence: Synthetic oligonucleotide
uccucgucaucagacggcc

SEQ ID NO: 888608 - RNA, 19 nt, Artificial Sequence
  Description of Artificial Sequence: Synthetic oligonucleotide
uggguugaaccaacuccca

SEQ ID NO: 888609 - RNA, 19 nt, Artificial Sequence
  Description of Artificial Sequence: Synthetic oligonucleotide
cuugaacauaggaaagcaa

SEQ ID NO: 888610 - RNA, 19 nt, Artificial Sequence
  Description of Artificial Sequence: Synthetic oligonucleotide
uggcgcagaaguacuugca

SEQ ID NO: 888611 - RNA, 19 nt, Artificial Sequence
  Description of Artificial Sequence: Synthetic oligonucleotide
aucaauugcgucacccuca

SEQ ID NO: 888612 - RNA, 19 nt, Artificial Sequence
  Description of Artificial Sequence: Synthetic oligonucleotide
uaauccgguagcccauguc

SEQ ID NO: 888613 - RNA, 19 nt, Artificial Sequence
  Description of Artificial Sequence: Synthetic oligonucleotide
cuuaggaaagcgccaccuc

SEQ ID NO: 888614 - RNA, 19 nt, Artificial Sequence
  Description of Artificial Sequence: Synthetic oligonucleotide
caagcuugacugagaggag

SEQ ID NO: 888615 - RNA, 19 nt, Artificial Sequence
  Description of Artificial Sequence: Synthetic oligonucleotide
uggaguggccgcugugucc

SEQ ID NO: 888616 - RNA, 19 nt, Artificial Sequence
  Description of Artificial Sequence: Synthetic oligonucleotide
uaaggcuuaugugucucuc

SEQ ID NO: 888617 - RNA, 19 nt, Artificial Sequence
  Description of Artificial Sequence: Synthetic oligonucleotide
guugaaccaacucccaccu

SEQ ID NO: 888618 - RNA, 19 nt, Artificial Sequence
  Description of Artificial Sequence: Synthetic oligonucleotide
aggcaagccguugccagcg

SEQ ID NO: 888619 - RNA, 19 nt, Artificial Sequence
  Description of Artificial Sequence: Synthetic oligonucleotide
aauuagcccaagagucuga

SEQ ID NO: 888620 - RNA, 19 nt, Artificial Sequence
  Description of Artificial Sequence: Synthetic oligonucleotide
uguaauccgguagcccaug

SEQ ID NO: 888621 - RNA, 19 nt, Artificial Sequence
  Description of Artificial Sequence: Synthetic oligonucleotide
gcuuaugugucucuccaca

SEQ ID NO: 888622 - RNA, 19 nt, Artificial Sequence
  Description of Artificial Sequence: Synthetic oligonucleotide
cuagggacuuucccacccc

SEQ ID NO: 888623 - RNA, 19 nt, Artificial Sequence
  Description of Artificial Sequence: Synthetic oligonucleotide
agacggaggggcuuccccu

SEQ ID NO: 888624 - RNA, 19 nt, Artificial Sequence
  Description of Artificial Sequence: Synthetic oligonucleotide
acggaggggcuuccccucc

SEQ ID NO: 888625 - RNA, 19 nt, Artificial Sequence
  Description of Artificial Sequence: Synthetic oligonucleotide
caaugagauggugccagac

SEQ ID NO: 888626 - RNA, 19 nt, Artificial Sequence
  Description of Artificial Sequence: Synthetic oligonucleotide
gaccaucuagcugggccgg

SEQ ID NO: 888627 - RNA, 19 nt, Artificial Sequence
  Description of Artificial Sequence: Synthetic oligonucleotide
ucgucaucagacggccccg

SEQ ID NO: 888628 - RNA, 19 nt, Artificial Sequence
  Description of Artificial Sequence: Synthetic oligonucleotide
agcagcagcagcagcagca

SEQ ID NO: 888629 - RNA, 19 nt, Artificial Sequence
  Description of Artificial Sequence: Synthetic oligonucleotide
agcagcagcagcagcagcu

SEQ ID NO: 888630 - RNA, 19 nt, Artificial Sequence
  Description of Artificial Sequence: Synthetic oligonucleotide
ugucucuagggcugcucac

SEQ ID NO: 888631 - RNA, 19 nt, Artificial Sequence
  Description of Artificial Sequence: Synthetic oligonucleotide
ggacaauuagcccaagagu

SEQ ID NO: 888632 - RNA, 19 nt, Artificial Sequence
  Description of Artificial Sequence: Synthetic oligonucleotide
acuucauuaccaagcuaca

SEQ ID NO: 888633 - RNA, 19 nt, Artificial Sequence
  Description of Artificial Sequence: Synthetic oligonucleotide
cuguaggcgggagcgagag

SEQ ID NO: 888634 - RNA, 19 nt, Artificial Sequence
  Description of Artificial Sequence: Synthetic oligonucleotide
gaggagcaccccaggagag

SEQ ID NO: 888635 - RNA, 19 nt, Artificial Sequence
  Description of Artificial Sequence: Synthetic oligonucleotide
aaggucacagugaggccga

SEQ ID NO: 888636 - RNA, 19 nt, Artificial Sequence
  Description of Artificial Sequence: Synthetic oligonucleotide
gcuagggacuuucccaccc

SEQ ID NO: 888637 - RNA, 19 nt, Artificial Sequence
  Description of Artificial Sequence: Synthetic oligonucleotide
ggggccuuaggaaagcgcc

SEQ ID NO: 888638 - RNA, 19 nt, Artificial Sequence
  Description of Artificial Sequence: Synthetic oligonucleotide
cagcccucugaucuccugc

SEQ ID NO: 888639 - RNA, 19 nt, Artificial Sequence
  Description of Artificial Sequence: Synthetic oligonucleotide
agcccucugaucuccugca

SEQ ID NO: 888640 - RNA, 19 nt, Artificial Sequence
  Description of Artificial Sequence: Synthetic oligonucleotide
gauagcugagcuagggacu

SEQ ID NO: 888641 - RNA, 19 nt, Artificial Sequence
  Description of Artificial Sequence: Synthetic oligonucleotide
gagaguggcaauaggccaa

SEQ ID NO: 888642 - RNA, 19 nt, Artificial Sequence
  Description of Artificial Sequence: Synthetic oligonucleotide
caagggacaauuagcccaa

SEQ ID NO: 888643 - RNA, 19 nt, Artificial Sequence
  Description of Artificial Sequence: Synthetic oligonucleotide
cucagcagaguaggccugg

SEQ ID NO: 888644 - RNA, 19 nt, Artificial Sequence
  Description of Artificial Sequence: Synthetic oligonucleotide
cagacggaggggcuucccc

SEQ ID NO: 888645 - RNA, 19 nt, Artificial Sequence
  Description of Artificial Sequence: Synthetic oligonucleotide
gcuugaacauaggaaagca

SEQ ID NO: 888646 - RNA, 19 nt, Artificial Sequence
  Description of Artificial Sequence: Synthetic oligonucleotide
gaaauggcagguggcuuga

SEQ ID NO: 888647 - RNA, 19 nt, Artificial Sequence
  Description of Artificial Sequence: Synthetic oligonucleotide
gcgagaguggcaauaggcc

SEQ ID NO: 888648 - RNA, 19 nt, Artificial Sequence
  Description of Artificial Sequence: Synthetic oligonucleotide
auuagcccaagagucugaa

SEQ ID NO: 888649 - RNA, 19 nt, Artificial Sequence
  Description of Artificial Sequence: Synthetic oligonucleotide
ggaagcuccacugccacca

SEQ ID NO: 888650 - RNA, 19 nt, Artificial Sequence
  Description of Artificial Sequence: Synthetic oligonucleotide
gggagcuagcccuguaggc

SEQ ID NO: 888651 - RNA, 19 nt, Artificial Sequence
  Description of Artificial Sequence: Synthetic oligonucleotide
aagagacaggggagcaagu

SEQ ID NO: 888652 - RNA, 19 nt, Artificial Sequence
  Description of Artificial Sequence: Synthetic oligonucleotide
gagggauagcugagcuagg

SEQ ID NO: 888653 - RNA, 19 nt, Artificial Sequence
  Description of Artificial Sequence: Synthetic oligonucleotide
aagccguugccagcgggga

SEQ ID NO: 888654 - RNA, 19 nt, Artificial Sequence
  Description of Artificial Sequence: Synthetic oligonucleotide
gcgcagaaguacuugcaug

SEQ ID NO: 888655 - RNA, 19 nt, Artificial Sequence
  Description of Artificial Sequence: Synthetic oligonucleotide
ggcauucaugcgccgcugg

SEQ ID NO: 888656 - RNA, 19 nt, Artificial Sequence
  Description of Artificial Sequence: Synthetic oligonucleotide
acucccaccucuagagcag

SEQ ID NO: 888657 - RNA, 19 nt, Artificial Sequence
  Description of Artificial Sequence: Synthetic oligonucleotide
ggagcgagaguggcaauag

SEQ ID NO: 888658 - RNA, 19 nt, Artificial Sequence
  Description of Artificial Sequence: Synthetic oligonucleotide
guccaguguaaagcuuggg

SEQ ID NO: 888659 - RNA, 19 nt, Artificial Sequence
  Description of Artificial Sequence: Synthetic oligonucleotide
gagggacuucuccccggag

SEQ ID NO: 888660 - RNA, 19 nt, Artificial Sequence
  Description of Artificial Sequence: Synthetic oligonucleotide
aggaccuggggugggcagg

SEQ ID NO: 888661 - RNA, 19 nt, Artificial Sequence
  Description of Artificial Sequence: Synthetic oligonucleotide
ggcuaggaccaucuagcug

SEQ ID NO: 888662 - RNA, 19 nt, Artificial Sequence
  Description of Artificial Sequence: Synthetic oligonucleotide
cuucauuaccaagcuacaa

SEQ ID NO: 888663 - RNA, 19 nt, Artificial Sequence
  Description of Artificial Sequence: Synthetic oligonucleotide
caucuagcugggccggcac

SEQ ID NO: 888664 - RNA, 19 nt, Artificial Sequence
  Description of Artificial Sequence: Synthetic oligonucleotide
aagggacaauuagcccaag

SEQ ID NO: 888665 - RNA, 19 nt, Artificial Sequence
  Description of Artificial Sequence: Synthetic oligonucleotide
gggguuuugagaagggcca

SEQ ID NO: 888666 - RNA, 19 nt, Artificial Sequence
  Description of Artificial Sequence: Synthetic oligonucleotide
agacagccuaggaaaccag

SEQ ID NO: 888667 - RNA, 19 nt, Artificial Sequence
  Description of Artificial Sequence: Synthetic oligonucleotide
gacggaggggcuuccccuc

SEQ ID NO: 888668 - RNA, 19 nt, Artificial Sequence
  Description of Artificial Sequence: Synthetic oligonucleotide
cuguguccaguguaaagcu

SEQ ID NO: 888669 - RNA, 19 nt, Artificial Sequence
  Description of Artificial Sequence: Synthetic oligonucleotide
gagagacacccuccauauc

SEQ ID NO: 888670 - RNA, 19 nt, Artificial Sequence
  Description of Artificial Sequence: Synthetic oligonucleotide
uugugccccaaaggccuag

SEQ ID NO: 888671 - RNA, 19 nt, Artificial Sequence
  Description of Artificial Sequence: Synthetic oligonucleotide
ggguugaaccaacucccac

SEQ ID NO: 888672 - RNA, 19 nt, Artificial Sequence
  Description of Artificial Sequence: Synthetic oligonucleotide
ugugccccaaaggccuagc

SEQ ID NO: 888673 - RNA, 19 nt, Artificial Sequence
  Description of Artificial Sequence: Synthetic oligonucleotide
uggcauucaugcgccgcug

SEQ ID NO: 888674 - RNA, 19 nt, Artificial Sequence
  Description of Artificial Sequence: Synthetic oligonucleotide
uugccagcggggaguucca

SEQ ID NO: 888675 - RNA, 19 nt, Artificial Sequence
  Description of Artificial Sequence: Synthetic oligonucleotide
gugccccaaaggccuagcc

SEQ ID NO: 888676 - RNA, 19 nt, Artificial Sequence
  Description of Artificial Sequence: Synthetic oligonucleotide
ggagcaccccaggagagug

SEQ ID NO: 888677 - RNA, 19 nt, Artificial Sequence
  Description of Artificial Sequence: Synthetic oligonucleotide
gcaagccguugccagcggg

SEQ ID NO: 888678 - RNA, 19 nt, Artificial Sequence
  Description of Artificial Sequence: Synthetic oligonucleotide
uggccauggcgcagaagua

SEQ ID NO: 888679 - RNA, 19 nt, Artificial Sequence
  Description of Artificial Sequence: Synthetic oligonucleotide
guggaguggccgcuguguc

SEQ ID NO: 888680 - RNA, 19 nt, Artificial Sequence
  Description of Artificial Sequence: Synthetic oligonucleotide
agcaauccccacccacaau

SEQ ID NO: 888681 - RNA, 19 nt, Artificial Sequence
  Description of Artificial Sequence: Synthetic oligonucleotide
aggaaauggcagguggcuu

SEQ ID NO: 888682 - RNA, 19 nt, Artificial Sequence
  Description of Artificial Sequence: Synthetic oligonucleotide
cucccaccucuagagcagg

SEQ ID NO: 888683 - RNA, 19 nt, Artificial Sequence
  Description of Artificial Sequence: Synthetic oligonucleotide
ccgcugguuggccugagag

SEQ ID NO: 888684 - RNA, 19 nt, Artificial Sequence
  Description of Artificial Sequence: Synthetic oligonucleotide
uccaagggauuggcauuca

SEQ ID NO: 888685 - RNA, 19 nt, Artificial Sequence
  Description of Artificial Sequence: Synthetic oligonucleotide
ugggccggcacugcaccug

SEQ ID NO: 888686 - RNA, 19 nt, Artificial Sequence
  Description of Artificial Sequence: Synthetic oligonucleotide
ucucgcccucccuggcuug

SEQ ID NO: 888687 - RNA, 19 nt, Artificial Sequence
  Description of Artificial Sequence: Synthetic oligonucleotide
guaaggcuuaugugucucu

SEQ ID NO: 888688 - RNA, 19 nt, Artificial Sequence
  Description of Artificial Sequence: Synthetic oligonucleotide
cagcagcagcagcagcagc

SEQ ID NO: 888689 - RNA, 19 nt, Artificial Sequence
  Description of Artificial Sequence: Synthetic oligonucleotide
ggcuuaugugucucuccac

SEQ ID NO: 888690 - RNA, 19 nt, Artificial Sequence
  Description of Artificial Sequence: Synthetic oligonucleotide
ccgaggagcaccccaggag

SEQ ID NO: 888691 - RNA, 19 nt, Artificial Sequence
  Description of Artificial Sequence: Synthetic oligonucleotide
agaccacaggggagcuagc

SEQ ID NO: 888692 - RNA, 19 nt, Artificial Sequence
  Description of Artificial Sequence: Synthetic oligonucleotide
cuagcccuguaggcgggag

SEQ ID NO: 888693 - RNA, 19 nt, Artificial Sequence
  Description of Artificial Sequence: Synthetic oligonucleotide
ggaguggccgcugugucca

SEQ ID NO: 888694 - RNA, 19 nt, Artificial Sequence
  Description of Artificial Sequence: Synthetic oligonucleotide
agagccuuccagagacaca

SEQ ID NO: 888695 - RNA, 19 nt, Artificial Sequence
  Description of Artificial Sequence: Synthetic oligonucleotide
gcugggccggcacugcacc

SEQ ID NO: 888696 - RNA, 19 nt, Artificial Sequence
  Description of Artificial Sequence: Synthetic oligonucleotide
agcuagcccuguaggcggg

SEQ ID NO: 888697 - RNA, 19 nt, Artificial Sequence
  Description of Artificial Sequence: Synthetic oligonucleotide
ggccuuaggaaagcgccac

SEQ ID NO: 888698 - RNA, 19 nt, Artificial Sequence
  Description of Artificial Sequence: Synthetic oligonucleotide
gaaccaacucccaccucua

SEQ ID NO: 888699 - RNA, 19 nt, Artificial Sequence
  Description of Artificial Sequence: Synthetic oligonucleotide
aaauggcagguggcuugaa

SEQ ID NO: 888700 - RNA, 19 nt, Artificial Sequence
  Description of Artificial Sequence: Synthetic oligonucleotide
uggggaugaggugccccac

SEQ ID NO: 888701 - RNA, 19 nt, Artificial Sequence
  Description of Artificial Sequence: Synthetic oligonucleotide
cagcaauccccacccacaa

SEQ ID NO: 888702 - RNA, 19 nt, Artificial Sequence
  Description of Artificial Sequence: Synthetic oligonucleotide
aggccaaggcaagccguug

SEQ ID NO: 888703 - RNA, 19 nt, Artificial Sequence
  Description of Artificial Sequence: Synthetic oligonucleotide
cccagcagcagcagcagca

SEQ ID NO: 888704 - RNA, 19 nt, Artificial Sequence
  Description of Artificial Sequence: Synthetic oligonucleotide
gcagcaauccccacccaca

SEQ ID NO: 888705 - RNA, 19 nt, Artificial Sequence
  Description of Artificial Sequence: Synthetic oligonucleotide
cgagaguggcaauaggcca

SEQ ID NO: 888706 - RNA, 19 nt, Artificial Sequence
  Description of Artificial Sequence: Synthetic oligonucleotide
gggacagagaaaagccauc

SEQ ID NO: 888707 - RNA, 19 nt, Artificial Sequence
  Description of Artificial Sequence: Synthetic oligonucleotide
ccuagcccaacacucccuc

SEQ ID NO: 888708 - RNA, 19 nt, Artificial Sequence
  Description of Artificial Sequence: Synthetic oligonucleotide
gcagcagcagcagcagcag

SEQ ID NO: 888709 - RNA, 19 nt, Artificial Sequence
  Description of Artificial Sequence: Synthetic oligonucleotide
gccuuaggaaagcgccacc

SEQ ID NO: 888710 - RNA, 19 nt, Artificial Sequence
  Description of Artificial Sequence: Synthetic oligonucleotide
ccugaccuugccacuccag

SEQ ID NO: 888711 - RNA, 19 nt, Artificial Sequence
  Description of Artificial Sequence: Synthetic oligonucleotide
guaauccgguagcccaugu

SEQ ID NO: 888712 - RNA, 19 nt, Artificial Sequence
  Description of Artificial Sequence: Synthetic oligonucleotide
gggccggcacugcaccugg

SEQ ID NO: 888713 - RNA, 19 nt, Artificial Sequence
  Description of Artificial Sequence: Synthetic oligonucleotide
ccggcacugcaccuggccc

SEQ ID NO: 888714 - RNA, 19 nt, Artificial Sequence
  Description of Artificial Sequence: Synthetic oligonucleotide
ggccuguaauccgguagcc

SEQ ID NO: 888715 - RNA, 19 nt, Artificial Sequence
  Description of Artificial Sequence: Synthetic oligonucleotide
ccuaacacugguggcugug

SEQ ID NO: 888716 - RNA, 19 nt, Artificial Sequence
  Description of Artificial Sequence: Synthetic oligonucleotide
gcagcagcagcagcagcug

SEQ ID NO: 888717 - RNA, 19 nt, Artificial Sequence
  Description of Artificial Sequence: Synthetic oligonucleotide
ccucagcagaguaggccug

SEQ ID NO: 888718 - RNA, 19 nt, Artificial Sequence
  Description of Artificial Sequence: Synthetic oligonucleotide
acaggggagcuagcccugu

SEQ ID NO: 888719 - RNA, 19 nt, Artificial Sequence
  Description of Artificial Sequence: Synthetic oligonucleotide
ggcggcucagcacaugggu

SEQ ID NO: 888720 - RNA, 19 nt, Artificial Sequence
  Description of Artificial Sequence: Synthetic oligonucleotide
cuguaauccgguagcccau

SEQ ID NO: 888721 - RNA, 19 nt, Artificial Sequence
  Description of Artificial Sequence: Synthetic oligonucleotide
ccagcagcagcagcagcag

SEQ ID NO: 888722 - RNA, 19 nt, Artificial Sequence
  Description of Artificial Sequence: Synthetic oligonucleotide
gcccaacacucccucucgc

SEQ ID NO: 888723 - RNA, 19 nt, Artificial Sequence
  Description of Artificial Sequence: Synthetic oligonucleotide
ggggacagagaaaagccau

SEQ ID NO: 888724 - RNA, 19 nt, Artificial Sequence
  Description of Artificial Sequence: Synthetic oligonucleotide
cgaggagcaccccaggaga

SEQ ID NO: 888725 - RNA, 19 nt, Artificial Sequence
  Description of Artificial Sequence: Synthetic oligonucleotide
ggcgcagaaguacuugcau

SEQ ID NO: 888726 - RNA, 19 nt, Artificial Sequence
  Description of Artificial Sequence: Synthetic oligonucleotide
ggacagucaagggacaauu

SEQ ID NO: 888727 - RNA, 19 nt, Artificial Sequence
  Description of Artificial Sequence: Synthetic oligonucleotide
cccuguaggcgggagcgag

SEQ ID NO: 888728 - RNA, 19 nt, Artificial Sequence
  Description of Artificial Sequence: Synthetic oligonucleotide
cuugcaugggcaggugggu

SEQ ID NO: 888729 - RNA, 19 nt, Artificial Sequence
  Description of Artificial Sequence: Synthetic oligonucleotide
gcucuggcagaaaggucac

SEQ ID NO: 888730 - RNA, 19 nt, Artificial Sequence
  Description of Artificial Sequence: Synthetic oligonucleotide
gcuugacugagaggaggca

SEQ ID NO: 888731 - RNA, 19 nt, Artificial Sequence
  Description of Artificial Sequence: Synthetic oligonucleotide
ggaugggcuaggaccaucu

SEQ ID NO: 888732 - RNA, 19 nt, Artificial Sequence
  Description of Artificial Sequence: Synthetic oligonucleotide
ccucgucaucagacggccc

SEQ ID NO: 888733 - RNA, 19 nt, Artificial Sequence
  Description of Artificial Sequence: Synthetic oligonucleotide
ugccagcggggaguuccac

SEQ ID NO: 888734 - RNA, 19 nt, Artificial Sequence
  Description of Artificial Sequence: Synthetic oligonucleotide
gcgggagcgagaguggcaa

SEQ ID NO: 888735 - RNA, 19 nt, Artificial Sequence
  Description of Artificial Sequence: Synthetic oligonucleotide
gggcuaggaccaucuagcu

SEQ ID NO: 888736 - RNA, 19 nt, Artificial Sequence
  Description of Artificial Sequence: Synthetic oligonucleotide
ccaccugugucgcugagau

SEQ ID NO: 888737 - RNA, 19 nt, Artificial Sequence
  Description of Artificial Sequence: Synthetic oligonucleotide
gcauucaugcgccgcuggu

SEQ ID NO: 888738 - RNA, 19 nt, Artificial Sequence
  Description of Artificial Sequence: Synthetic oligonucleotide
cauucaugcgccgcugguu

SEQ ID NO: 888739 - RNA, 19 nt, Artificial Sequence
  Description of Artificial Sequence: Synthetic oligonucleotide
cucuggcagaaaggucaca

SEQ ID NO: 888740 - RNA, 19 nt, Artificial Sequence
  Description of Artificial Sequence: Synthetic oligonucleotide
ggaguuccacucccucucu

SEQ ID NO: 888741 - RNA, 19 nt, Artificial Sequence
  Description of Artificial Sequence: Synthetic oligonucleotide
cugugucgcugagauuaaa

SEQ ID NO: 888742 - RNA, 19 nt, Artificial Sequence
  Description of Artificial Sequence: Synthetic oligonucleotide
ccuuaggaaagcgccaccu

SEQ ID NO: 888743 - RNA, 19 nt, Artificial Sequence
  Description of Artificial Sequence: Synthetic oligonucleotide
gggaugggcuaggaccauc

SEQ ID NO: 888744 - RNA, 19 nt, Artificial Sequence
  Description of Artificial Sequence: Synthetic oligonucleotide
gccgcuguguccaguguaa

SEQ ID NO: 888745 - RNA, 19 nt, Artificial Sequence
  Description of Artificial Sequence: Synthetic oligonucleotide
ggcagacggaggggcuucc

SEQ ID NO: 888746 - RNA, 19 nt, Artificial Sequence
  Description of Artificial Sequence: Synthetic oligonucleotide
gcagacggaggggcuuccc

SEQ ID NO: 888747 - RNA, 19 nt, Artificial Sequence
  Description of Artificial Sequence: Synthetic oligonucleotide
ccuguaggcgggagcgaga

SEQ ID NO: 888748 - RNA, 19 nt, Artificial Sequence
  Description of Artificial Sequence: Synthetic oligonucleotide
gcccauguccagcagcauu

SEQ ID NO: 888749 - RNA, 19 nt, Artificial Sequence
  Description of Artificial Sequence: Synthetic oligonucleotide
cucucgcccucccuggcuu

SEQ ID NO: 888750 - RNA, 19 nt, Artificial Sequence
  Description of Artificial Sequence: Synthetic oligonucleotide
ccugugucgcugagauuaa

SEQ ID NO: 888751 - RNA, 19 nt, Artificial Sequence
  Description of Artificial Sequence: Synthetic oligonucleotide
gcgccaccucagcagagua

SEQ ID NO: 888752 - RNA, 19 nt, Artificial Sequence
  Description of Artificial Sequence: Synthetic oligonucleotide
gccguugccagcggggagu

SEQ ID NO: 888753 - RNA, 19 nt, Artificial Sequence
  Description of Artificial Sequence: Synthetic oligonucleotide
caggggagcuagcccugua

SEQ ID NO: 888754 - RNA, 19 nt, Artificial Sequence
  Description of Artificial Sequence: Synthetic oligonucleotide
caauugcgucacccucacu

SEQ ID NO: 888755 - RNA, 19 nt, Artificial Sequence
  Description of Artificial Sequence: Synthetic oligonucleotide
cugggccggcacugcaccu

SEQ ID NO: 888756 - RNA, 19 nt, Artificial Sequence
  Description of Artificial Sequence: Synthetic oligonucleotide
gcgucacccucacucuccu

SEQ ID NO: 888757 - RNA, 19 nt, Artificial Sequence
  Description of Artificial Sequence: Synthetic oligonucleotide
cacccuccugucacaucau

SEQ ID NO: 888758 - RNA, 19 nt, Artificial Sequence
  Description of Artificial Sequence: Synthetic oligonucleotide
gcuagcccuguaggcggga

SEQ ID NO: 888759 - RNA, 19 nt, Artificial Sequence
  Description of Artificial Sequence: Synthetic oligonucleotide
caccugugucgcugagauu

SEQ ID NO: 888760 - RNA, 19 nt, Artificial Sequence
  Description of Artificial Sequence: Synthetic oligonucleotide
cccuaacacugguggcugu

SEQ ID NO: 888761 - RNA, 19 nt, Artificial Sequence
  Description of Artificial Sequence: Synthetic oligonucleotide
ccgcuguguccaguguaaa

SEQ ID NO: 888762 - RNA, 19 nt, Artificial Sequence
  Description of Artificial Sequence: Synthetic oligonucleotide
gcggggaguuccacucccu

SEQ ID NO: 888763 - RNA, 19 nt, Artificial Sequence
  Description of Artificial Sequence: Synthetic oligonucleotide
gcauugccuccaagggauu

SEQ ID NO: 888764 - RNA, 19 nt, Artificial Sequence
  Description of Artificial Sequence: Synthetic oligonucleotide
cccacugcucaggccugua

SEQ ID NO: 888765 - RNA, 19 nt, Artificial Sequence
  Description of Artificial Sequence: Synthetic oligonucleotide
aauaacucaaucuugcggg

SEQ ID NO: 888766 - RNA, 19 nt, Artificial Sequence
  Description of Artificial Sequence: Synthetic oligonucleotide
aguacugguauauugagcc

SEQ ID NO: 888767 - RNA, 19 nt, Artificial Sequence
  Description of Artificial Sequence: Synthetic oligonucleotide
aguugauuaguuuucaccc

SEQ ID NO: 888768 - RNA, 19 nt, Artificial Sequence
  Description of Artificial Sequence: Synthetic oligonucleotide
aauucuuagguuuagagau

SEQ ID NO: 888769 - RNA, 19 nt, Artificial Sequence
  Description of Artificial Sequence: Synthetic oligonucleotide
auagucacaaaauucuugc

SEQ ID NO: 888770 - RNA, 19 nt, Artificial Sequence
  Description of Artificial Sequence: Synthetic oligonucleotide
gauacugacguccagguag

SEQ ID NO: 888771 - RNA, 19 nt, Artificial Sequence
  Description of Artificial Sequence: Synthetic oligonucleotide
ucugguuuaugacuggugg

SEQ ID NO: 888772 - RNA, 19 nt, Artificial Sequence
  Description of Artificial Sequence: Synthetic oligonucleotide
uugauaauccgucugaagu

SEQ ID NO: 888773 - RNA, 19 nt, Artificial Sequence
  Description of Artificial Sequence: Synthetic oligonucleotide
uuaaccaguggccuguucg

SEQ ID NO: 888774 - RNA, 19 nt, Artificial Sequence
  Description of Artificial Sequence: Synthetic oligonucleotide
uuaaggucccauaugguag

SEQ ID NO: 888775 - RNA, 19 nt, Artificial Sequence
  Description of Artificial Sequence: Synthetic oligonucleotide
uccuugauuucuuagcugg

SEQ ID NO: 888776 - RNA, 19 nt, Artificial Sequence
  Description of Artificial Sequence: Synthetic oligonucleotide
uuuaccucaaucaacuccu

SEQ ID NO: 888777 - RNA, 19 nt, Artificial Sequence
  Description of Artificial Sequence: Synthetic oligonucleotide
caaaagacuuucuaucucc

SEQ ID NO: 888778 - RNA, 19 nt, Artificial Sequence
  Description of Artificial Sequence: Synthetic oligonucleotide
uucaucugguuuaugacug

SEQ ID NO: 888779 - RNA, 19 nt, Artificial Sequence
  Description of Artificial Sequence: Synthetic oligonucleotide
uguugugguauuuaauagc

SEQ ID NO: 888780 - RNA, 19 nt, Artificial Sequence
  Description of Artificial Sequence: Synthetic oligonucleotide
uguguggucguccaaauaa

SEQ ID NO: 888781 - RNA, 19 nt, Artificial Sequence
  Description of Artificial Sequence: Synthetic oligonucleotide
aaacauguguuaaggaagg

SEQ ID NO: 888782 - RNA, 19 nt, Artificial Sequence
  Description of Artificial Sequence: Synthetic oligonucleotide
cuguuaaggucccauaugg

SEQ ID NO: 888783 - RNA, 19 nt, Artificial Sequence
  Description of Artificial Sequence: Synthetic oligonucleotide
aaauuugcccaagauacug

SEQ ID NO: 888784 - RNA, 19 nt, Artificial Sequence
  Description of Artificial Sequence: Synthetic oligonucleotide
aaaccagaugcuaaagaac

SEQ ID NO: 888785 - RNA, 19 nt, Artificial Sequence
  Description of Artificial Sequence: Synthetic oligonucleotide
cuuuaccucaaucaacucc

SEQ ID NO: 888786 - RNA, 19 nt, Artificial Sequence
  Description of Artificial Sequence: Synthetic oligonucleotide
ugauaauccgucugaagug

SEQ ID NO: 888787 - RNA, 19 nt, Artificial Sequence
  Description of Artificial Sequence: Synthetic oligonucleotide
uugcccaagauacugacgu

SEQ ID NO: 888788 - RNA, 19 nt, Artificial Sequence
  Description of Artificial Sequence: Synthetic oligonucleotide
aaggcuuucuaccccaucu

SEQ ID NO: 888789 - RNA, 19 nt, Artificial Sequence
  Description of Artificial Sequence: Synthetic oligonucleotide
uggauuuccuuaaaucuca

SEQ ID NO: 888790 - RNA, 19 nt, Artificial Sequence
  Description of Artificial Sequence: Synthetic oligonucleotide
uauccauguggaaacaugu

SEQ ID NO: 888791 - RNA, 19 nt, Artificial Sequence
  Description of Artificial Sequence: Synthetic oligonucleotide
ugcuucuauaaauucuuag

SEQ ID NO: 888792 - RNA, 19 nt, Artificial Sequence
  Description of Artificial Sequence: Synthetic oligonucleotide
guguaucccauccaguugg

SEQ ID NO: 888793 - RNA, 19 nt, Artificial Sequence
  Description of Artificial Sequence: Synthetic oligonucleotide
uaucacuacggaagguugg

SEQ ID NO: 888794 - RNA, 19 nt, Artificial Sequence
  Description of Artificial Sequence: Synthetic oligonucleotide
aaccagaugcuaaagaacu

SEQ ID NO: 888795 - RNA, 19 nt, Artificial Sequence
  Description of Artificial Sequence: Synthetic oligonucleotide
uuaaggaaggagcaaucac

SEQ ID NO: 888796 - RNA, 19 nt, Artificial Sequence
  Description of Artificial Sequence: Synthetic oligonucleotide
aauccgucugaagugcagc

SEQ ID NO: 888797 - RNA, 19 nt, Artificial Sequence
  Description of Artificial Sequence: Synthetic oligonucleotide
uccucuuaagguauggccu

SEQ ID NO: 888798 - RNA, 19 nt, Artificial Sequence
  Description of Artificial Sequence: Synthetic oligonucleotide
cuuuccgugguuuaaccag

SEQ ID NO: 888799 - RNA, 19 nt, Artificial Sequence
  Description of Artificial Sequence: Synthetic oligonucleotide
guuuccaagaguaauccag

SEQ ID NO: 888800 - RNA, 19 nt, Artificial Sequence
  Description of Artificial Sequence: Synthetic oligonucleotide
ucuguuaaggucccauaug

SEQ ID NO: 888801 - RNA, 19 nt, Artificial Sequence
  Description of Artificial Sequence: Synthetic oligonucleotide
ccaagaguaauccaguugg

SEQ ID NO: 888802 - RNA, 19 nt, Artificial Sequence
  Description of Artificial Sequence: Synthetic oligonucleotide
ugaacauauuugcagguau

SEQ ID NO: 888803 - RNA, 19 nt, Artificial Sequence
  Description of Artificial Sequence: Synthetic oligonucleotide
aacacucugcguaagagca

SEQ ID NO: 888804 - RNA, 19 nt, Artificial Sequence
  Description of Artificial Sequence: Synthetic oligonucleotide
uuaagguauggccugcaga

SEQ ID NO: 888805 - RNA, 19 nt, Artificial Sequence
  Description of Artificial Sequence: Synthetic oligonucleotide
gucagcguaaguuacaaga

SEQ ID NO: 888806 - RNA, 19 nt, Artificial Sequence
  Description of Artificial Sequence: Synthetic oligonucleotide
ugcuuauugauaauccguc

SEQ ID NO: 888807 - RNA, 19 nt, Artificial Sequence
  Description of Artificial Sequence: Synthetic oligonucleotide
acuacggaagguuggggac

SEQ ID NO: 888808 - RNA, 19 nt, Artificial Sequence
  Description of Artificial Sequence: Synthetic oligonucleotide
aguugugcugggcuuaggg

SEQ ID NO: 888809 - RNA, 19 nt, Artificial Sequence
  Description of Artificial Sequence: Synthetic oligonucleotide
gcaaauuugcccaagauac

SEQ ID NO: 888810 - RNA, 19 nt, Artificial Sequence
  Description of Artificial Sequence: Synthetic oligonucleotide
aauaucccaagguggguca

SEQ ID NO: 888811 - RNA, 19 nt, Artificial Sequence
  Description of Artificial Sequence: Synthetic oligonucleotide
agugugcuuauugauaauc

SEQ ID NO: 888812 - RNA, 19 nt, Artificial Sequence
  Description of Artificial Sequence: Synthetic oligonucleotide
uggucguccaaauaacuca

SEQ ID NO: 888813 - RNA, 19 nt, Artificial Sequence
  Description of Artificial Sequence: Synthetic oligonucleotide
ucuaacucagggucuguag

SEQ ID NO: 888814 - RNA, 19 nt, Artificial Sequence
  Description of Artificial Sequence: Synthetic oligonucleotide
ugcuaaagaacuggcaaag

SEQ ID NO: 888815 - RNA, 19 nt, Artificial Sequence
  Description of Artificial Sequence: Synthetic oligonucleotide
ucaaaagacuuucuaucuc

SEQ ID NO: 888816 - RNA, 19 nt, Artificial Sequence
  Description of Artificial Sequence: Synthetic oligonucleotide
gauaauccgucugaagugc

SEQ ID NO: 888817 - RNA, 19 nt, Artificial Sequence
  Description of Artificial Sequence: Synthetic oligonucleotide
ucaccuaaagacucaucag

SEQ ID NO: 888818 - RNA, 19 nt, Artificial Sequence
  Description of Artificial Sequence: Synthetic oligonucleotide
uugacaccaaccaaacagu

SEQ ID NO: 888819 - RNA, 19 nt, Artificial Sequence
  Description of Artificial Sequence: Synthetic oligonucleotide
uucauaaccccagagguuc

SEQ ID NO: 888820 - RNA, 19 nt, Artificial Sequence
  Description of Artificial Sequence: Synthetic oligonucleotide
ugguauuuaauagcucuag

SEQ ID NO: 888821 - RNA, 19 nt, Artificial Sequence
  Description of Artificial Sequence: Synthetic oligonucleotide
cuccucuuaagguauggcc

SEQ ID NO: 888822 - RNA, 19 nt, Artificial Sequence
  Description of Artificial Sequence: Synthetic oligonucleotide
gguauauugagccugcgca

SEQ ID NO: 888823 - RNA, 19 nt, Artificial Sequence
  Description of Artificial Sequence: Synthetic oligonucleotide
guagguguaucccauccag

SEQ ID NO: 888824 - RNA, 19 nt, Artificial Sequence
  Description of Artificial Sequence: Synthetic oligonucleotide
ggaacuauagaaguugugc

SEQ ID NO: 888825 - RNA, 19 nt, Artificial Sequence
  Description of Artificial Sequence: Synthetic oligonucleotide
uuaguagacuguugguuca

SEQ ID NO: 888826 - RNA, 19 nt, Artificial Sequence
  Description of Artificial Sequence: Synthetic oligonucleotide
cuaacucagggucuguagc

SEQ ID NO: 888827 - RNA, 19 nt, Artificial Sequence
  Description of Artificial Sequence: Synthetic oligonucleotide
caaaauucuugcaccuggg

SEQ ID NO: 888828 - RNA, 19 nt, Artificial Sequence
  Description of Artificial Sequence: Synthetic oligonucleotide
ugggcuuagggccaguaga

SEQ ID NO: 888829 - RNA, 19 nt, Artificial Sequence
  Description of Artificial Sequence: Synthetic oligonucleotide
aguaauccaguuggguugc

SEQ ID NO: 888830 - RNA, 19 nt, Artificial Sequence
  Description of Artificial Sequence: Synthetic oligonucleotide
cuuucuaccccaucuugag

SEQ ID NO: 888831 - RNA, 19 nt, Artificial Sequence
  Description of Artificial Sequence: Synthetic oligonucleotide
agcaaucaccuaaagacuc

SEQ ID NO: 888832 - RNA, 19 nt, Artificial Sequence
  Description of Artificial Sequence: Synthetic oligonucleotide
uacaagagugggaugugca

SEQ ID NO: 888833 - RNA, 19 nt, Artificial Sequence
  Description of Artificial Sequence: Synthetic oligonucleotide
ugacugaccuucuugcucu

SEQ ID NO: 888834 - RNA, 19 nt, Artificial Sequence
  Description of Artificial Sequence: Synthetic oligonucleotide
gcagcuuucgacaaggccg

SEQ ID NO: 888835 - RNA, 19 nt, Artificial Sequence
  Description of Artificial Sequence: Synthetic oligonucleotide
auaugguaguuccauguga

SEQ ID NO: 888836 - RNA, 19 nt, Artificial Sequence
  Description of Artificial Sequence: Synthetic oligonucleotide
agguuuagagaugauacca

SEQ ID NO: 888837 - RNA, 19 nt, Artificial Sequence
  Description of Artificial Sequence: Synthetic oligonucleotide
uggaacgaaccucugcuac

SEQ ID NO: 888838 - RNA, 19 nt, Artificial Sequence
  Description of Artificial Sequence: Synthetic oligonucleotide
ugguauauugagccugcgc

SEQ ID NO: 888839 - RNA, 19 nt, Artificial Sequence
  Description of Artificial Sequence: Synthetic oligonucleotide
uucuuagguuuagagauga

SEQ ID NO: 888840 - RNA, 19 nt, Artificial Sequence
  Description of Artificial Sequence: Synthetic oligonucleotide
cuuuguaaggaagugcuuc

SEQ ID NO: 888841 - RNA, 19 nt, Artificial Sequence
  Description of Artificial Sequence: Synthetic oligonucleotide
acaauggauuguucuuugg

SEQ ID NO: 888842 - RNA, 19 nt, Artificial Sequence
  Description of Artificial Sequence: Synthetic oligonucleotide
ugguuuccaagaguaaucc

SEQ ID NO: 888843 - RNA, 19 nt, Artificial Sequence
  Description of Artificial Sequence: Synthetic oligonucleotide
uccaugugaauaucccaag

SEQ ID NO: 888844 - RNA, 19 nt, Artificial Sequence
  Description of Artificial Sequence: Synthetic oligonucleotide
acauguguuaaggaaggag

SEQ ID NO: 888845 - RNA, 19 nt, Artificial Sequence
  Description of Artificial Sequence: Synthetic oligonucleotide
uguaaggaagugcuucuau

SEQ ID NO: 888846 - RNA, 19 nt, Artificial Sequence
  Description of Artificial Sequence: Synthetic oligonucleotide
agcguaaguuacaagagug

SEQ ID NO: 888847 - RNA, 19 nt, Artificial Sequence
  Description of Artificial Sequence: Synthetic oligonucleotide
cuaucacuacggaagguug

SEQ ID NO: 888848 - RNA, 19 nt, Artificial Sequence
  Description of Artificial Sequence: Synthetic oligonucleotide
gguguaugcucuuugcugc

SEQ ID NO: 888849 - RNA, 19 nt, Artificial Sequence
  Description of Artificial Sequence: Synthetic oligonucleotide
ucgagagcggaacuuuuca

SEQ ID NO: 888850 - RNA, 19 nt, Artificial Sequence
  Description of Artificial Sequence: Synthetic oligonucleotide
uguggucguccaaauaacu

SEQ ID NO: 888851 - RNA, 19 nt, Artificial Sequence
  Description of Artificial Sequence: Synthetic oligonucleotide
uaugacugguggaacgaac

SEQ ID NO: 888852 - RNA, 19 nt, Artificial Sequence
  Description of Artificial Sequence: Synthetic oligonucleotide
ucuaccccaucuugagugg

SEQ ID NO: 888853 - RNA, 19 nt, Artificial Sequence
  Description of Artificial Sequence: Synthetic oligonucleotide
gaacuauagaaguugugcu

SEQ ID NO: 888854 - RNA, 19 nt, Artificial Sequence
  Description of Artificial Sequence: Synthetic oligonucleotide
uauuugcagguauccaugu

SEQ ID NO: 888855 - RNA, 19 nt, Artificial Sequence
  Description of Artificial Sequence: Synthetic oligonucleotide
aaggagcaaucaccuaaag

SEQ ID NO: 888856 - RNA, 19 nt, Artificial Sequence
  Description of Artificial Sequence: Synthetic oligonucleotide
uguuaaggucccauauggu

SEQ ID NO: 888857 - RNA, 19 nt, Artificial Sequence
  Description of Artificial Sequence: Synthetic oligonucleotide
ucuggcguagagauggcaa

SEQ ID NO: 888858 - RNA, 19 nt, Artificial Sequence
  Description of Artificial Sequence: Synthetic oligonucleotide
uaauccgucugaagugcag

SEQ ID NO: 888859 - RNA, 19 nt, Artificial Sequence
  Description of Artificial Sequence: Synthetic oligonucleotide
aagguauggccugcagagc

SEQ ID NO: 888860 - RNA, 19 nt, Artificial Sequence
  Description of Artificial Sequence: Synthetic oligonucleotide
cugguucugauguugaaga

SEQ ID NO: 888861 - RNA, 19 nt, Artificial Sequence
  Description of Artificial Sequence: Synthetic oligonucleotide
ucugcguaagagcaagcuc

SEQ ID NO: 888862 - RNA, 19 nt, Artificial Sequence
  Description of Artificial Sequence: Synthetic oligonucleotide
gcuaauucaggaacuauag

SEQ ID NO: 888863 - RNA, 19 nt, Artificial Sequence
  Description of Artificial Sequence: Synthetic oligonucleotide
uaggagaccucgcuuuacc

SEQ ID NO: 888864 - RNA, 19 nt, Artificial Sequence
  Description of Artificial Sequence: Synthetic oligonucleotide
caccguuguauaaacacuc

SEQ ID NO: 888865 - RNA, 19 nt, Artificial Sequence
  Description of Artificial Sequence: Synthetic oligonucleotide
uaucccauccaguugguuu

SEQ ID NO: 888866 - RNA, 19 nt, Artificial Sequence
  Description of Artificial Sequence: Synthetic oligonucleotide
uguccuaaugaugcgcugc

SEQ ID NO: 888867 - RNA, 19 nt, Artificial Sequence
  Description of Artificial Sequence: Synthetic oligonucleotide
uguucggccuguccuaaug

SEQ ID NO: 888868 - RNA, 19 nt, Artificial Sequence
  Description of Artificial Sequence: Synthetic oligonucleotide
caagaguaauccaguuggg

SEQ ID NO: 888869 - RNA, 19 nt, Artificial Sequence
  Description of Artificial Sequence: Synthetic oligonucleotide
aggagcaaucaccuaaaga

SEQ ID NO: 888870 - RNA, 19 nt, Artificial Sequence
  Description of Artificial Sequence: Synthetic oligonucleotide
aguggucagcguaaguuac

SEQ ID NO: 888871 - RNA, 19 nt, Artificial Sequence
  Description of Artificial Sequence: Synthetic oligonucleotide
uagcggauaucacaacaga

SEQ ID NO: 888872 - RNA, 19 nt, Artificial Sequence
  Description of Artificial Sequence: Synthetic oligonucleotide
ugauuaguuuucacccaga

SEQ ID NO: 888873 - RNA, 19 nt, Artificial Sequence
  Description of Artificial Sequence: Synthetic oligonucleotide
aaguuacaagagugggaug

SEQ ID NO: 888874 - RNA, 19 nt, Artificial Sequence
  Description of Artificial Sequence: Synthetic oligonucleotide
cauaugguaguuccaugug

SEQ ID NO: 888875 - RNA, 19 nt, Artificial Sequence
  Description of Artificial Sequence: Synthetic oligonucleotide
gagaccucgcuuuaccuca

SEQ ID NO: 888876 - RNA, 19 nt, Artificial Sequence
  Description of Artificial Sequence: Synthetic oligonucleotide
agaugauaccaucuggaua

SEQ ID NO: 888877 - RNA, 19 nt, Artificial Sequence
  Description of Artificial Sequence: Synthetic oligonucleotide
auauuugcagguauccaug

SEQ ID NO: 888878 - RNA, 19 nt, Artificial Sequence
  Description of Artificial Sequence: Synthetic oligonucleotide
cacugggcuaucacuacgg

SEQ ID NO: 888879 - RNA, 19 nt, Artificial Sequence
  Description of Artificial Sequence: Synthetic oligonucleotide
aucugaggcagcguguuuc

SEQ ID NO: 888880 - RNA, 19 nt, Artificial Sequence
  Description of Artificial Sequence: Synthetic oligonucleotide
uggcaagacggauggauac

SEQ ID NO: 888881 - RNA, 19 nt, Artificial Sequence
  Description of Artificial Sequence: Synthetic oligonucleotide
aggggacaaucucucaauc

SEQ ID NO: 888882 - RNA, 19 nt, Artificial Sequence
  Description of Artificial Sequence: Synthetic oligonucleotide
ucgcuuuaccucaaucaac

SEQ ID NO: 888883 - RNA, 19 nt, Artificial Sequence
  Description of Artificial Sequence: Synthetic oligonucleotide
aguugcuucuuaugggccu

SEQ ID NO: 888884 - RNA, 19 nt, Artificial Sequence
  Description of Artificial Sequence: Synthetic oligonucleotide
guagcggauaucacaacag

SEQ ID NO: 888885 - RNA, 19 nt, Artificial Sequence
  Description of Artificial Sequence: Synthetic oligonucleotide
aaccaguggccuguucggc

SEQ ID NO: 888886 - RNA, 19 nt, Artificial Sequence
  Description of Artificial Sequence: Synthetic oligonucleotide
gaugugcaucgucuuguag

SEQ ID NO: 888887 - RNA, 19 nt, Artificial Sequence
  Description of Artificial Sequence: Synthetic oligonucleotide
acccagaugauuucaucca

SEQ ID NO: 888888 - RNA, 19 nt, Artificial Sequence
  Description of Artificial Sequence: Synthetic oligonucleotide
accguuguauaaacacucc

SEQ ID NO: 888889 - RNA, 19 nt, Artificial Sequence
  Description of Artificial Sequence: Synthetic oligonucleotide
uggucccauagucacaaaa

SEQ ID NO: 888890 - RNA, 19 nt, Artificial Sequence
  Description of Artificial Sequence: Synthetic oligonucleotide
uuacaagagugggaugugc

SEQ ID NO: 888891 - RNA, 19 nt, Artificial Sequence
  Description of Artificial Sequence: Synthetic oligonucleotide
guugugcugggcuuagggc

SEQ ID NO: 888892 - RNA, 19 nt, Artificial Sequence
  Description of Artificial Sequence: Synthetic oligonucleotide
aucacuacggaagguuggg

SEQ ID NO: 888893 - RNA, 19 nt, Artificial Sequence
  Description of Artificial Sequence: Synthetic oligonucleotide
cagagguucagacacucuc

SEQ ID NO: 888894 - RNA, 19 nt, Artificial Sequence
  Description of Artificial Sequence: Synthetic oligonucleotide
uaaugaugcgcugcaguug

SEQ ID NO: 888895 - RNA, 19 nt, Artificial Sequence
  Description of Artificial Sequence: Synthetic oligonucleotide
cacguguccgacauccuag

SEQ ID NO: 888896 - RNA, 19 nt, Artificial Sequence
  Description of Artificial Sequence: Synthetic oligonucleotide
augcuaaagaacuggcaaa

SEQ ID NO: 888897 - RNA, 19 nt, Artificial Sequence
  Description of Artificial Sequence: Synthetic oligonucleotide
cagucucucgcgaagcgag

SEQ ID NO: 888898 - RNA, 19 nt, Artificial Sequence
  Description of Artificial Sequence: Synthetic oligonucleotide
ugacugguggaacgaaccu

SEQ ID NO: 888899 - RNA, 19 nt, Artificial Sequence
  Description of Artificial Sequence: Synthetic oligonucleotide
auacugacguccagguagc

SEQ ID NO: 888900 - RNA, 19 nt, Artificial Sequence
  Description of Artificial Sequence: Synthetic oligonucleotide
auaacucaaucuugcgggu

SEQ ID NO: 888901 - RNA, 19 nt, Artificial Sequence
  Description of Artificial Sequence: Synthetic oligonucleotide
gaauaucccaagguggguc

SEQ ID NO: 888902 - RNA, 19 nt, Artificial Sequence
  Description of Artificial Sequence: Synthetic oligonucleotide
aaccccagagguucagaca

SEQ ID NO: 888903 - RNA, 19 nt, Artificial Sequence
  Description of Artificial Sequence: Synthetic oligonucleotide
ggcaccguuguauaaacac

SEQ ID NO: 888904 - RNA, 19 nt, Artificial Sequence
  Description of Artificial Sequence: Synthetic oligonucleotide
aacacuccucuuaagguau

SEQ ID NO: 888905 - RNA, 19 nt, Artificial Sequence
  Description of Artificial Sequence: Synthetic oligonucleotide
uuaaaccgggcaaccacau

SEQ ID NO: 888906 - RNA, 19 nt, Artificial Sequence
  Description of Artificial Sequence: Synthetic oligonucleotide
uguaugcucuuugcugccg

SEQ ID NO: 888907 - RNA, 19 nt, Artificial Sequence
  Description of Artificial Sequence: Synthetic oligonucleotide
guugcacauuguguggucg

SEQ ID NO: 888908 - RNA, 19 nt, Artificial Sequence
  Description of Artificial Sequence: Synthetic oligonucleotide
aucgucuuguaggagaccu

SEQ ID NO: 888909 - RNA, 19 nt, Artificial Sequence
  Description of Artificial Sequence: Synthetic oligonucleotide
guaugcucuuugcugccgg

SEQ ID NO: 888910 - RNA, 19 nt, Artificial Sequence
  Description of Artificial Sequence: Synthetic oligonucleotide
gcaucacuggcuuucauac

SEQ ID NO: 888911 - RNA, 19 nt, Artificial Sequence
  Description of Artificial Sequence: Synthetic oligonucleotide
uaccaucuggauaccuuug

SEQ ID NO: 888912 - RNA, 19 nt, Artificial Sequence
  Description of Artificial Sequence: Synthetic oligonucleotide
uauugauaauccgucugaa

SEQ ID NO: 888913 - RNA, 19 nt, Artificial Sequence
  Description of Artificial Sequence: Synthetic oligonucleotide
cuuaaaccgggcaaccaca

SEQ ID NO: 888914 - RNA, 19 nt, Artificial Sequence
  Description of Artificial Sequence: Synthetic oligonucleotide
auagcucuaggaucuccug

SEQ ID NO: 888915 - RNA, 19 nt, Artificial Sequence
  Description of Artificial Sequence: Synthetic oligonucleotide
ugguuuaaccaguggccug

SEQ ID NO: 888916 - RNA, 19 nt, Artificial Sequence
  Description of Artificial Sequence: Synthetic oligonucleotide
uguuguucuuuaguagacu

SEQ ID NO: 888917 - RNA, 19 nt, Artificial Sequence
  Description of Artificial Sequence: Synthetic oligonucleotide
cuccacguguccgacaucc

SEQ ID NO: 888918 - RNA, 19 nt, Artificial Sequence
  Description of Artificial Sequence: Synthetic oligonucleotide
ucaacuccugagcugcaaa

SEQ ID NO: 888919 - RNA, 19 nt, Artificial Sequence
  Description of Artificial Sequence: Synthetic oligonucleotide
agcguguuuccuugauuuc

SEQ ID NO: 888920 - RNA, 19 nt, Artificial Sequence
  Description of Artificial Sequence: Synthetic oligonucleotide
ucggccuguccuaaugaug

SEQ ID NO: 888921 - RNA, 19 nt, Artificial Sequence
  Description of Artificial Sequence: Synthetic oligonucleotide
cugcaaauuucuguagaag

SEQ ID NO: 888922 - RNA, 19 nt, Artificial Sequence
  Description of Artificial Sequence: Synthetic oligonucleotide
cuuaagguauggccugcag

SEQ ID NO: 888923 - RNA, 19 nt, Artificial Sequence
  Description of Artificial Sequence: Synthetic oligonucleotide
cggauaucacaacagaucc

SEQ ID NO: 888924 - RNA, 19 nt, Artificial Sequence
  Description of Artificial Sequence: Synthetic oligonucleotide
agguguaucccauccaguu

SEQ ID NO: 888925 - RNA, 19 nt, Artificial Sequence
  Description of Artificial Sequence: Synthetic oligonucleotide
cuuucgacaaggccgguca

SEQ ID NO: 888926 - RNA, 19 nt, Artificial Sequence
  Description of Artificial Sequence: Synthetic oligonucleotide
guauccauguggaaacaug

SEQ ID NO: 888927 - RNA, 19 nt, Artificial Sequence
  Description of Artificial Sequence: Synthetic oligonucleotide
ucucucgcgaagcgagucc

SEQ ID NO: 888928 - RNA, 19 nt, Artificial Sequence
  Description of Artificial Sequence: Synthetic oligonucleotide
cugacguccagguagcgga

SEQ ID NO: 888929 - RNA, 19 nt, Artificial Sequence
  Description of Artificial Sequence: Synthetic oligonucleotide
ggauaccuuugcuuaaacc

SEQ ID NO: 888930 - RNA, 19 nt, Artificial Sequence
  Description of Artificial Sequence: Synthetic oligonucleotide
caacagauccacugaggug

SEQ ID NO: 888931 - RNA, 19 nt, Artificial Sequence
  Description of Artificial Sequence: Synthetic oligonucleotide
caguugcuucuuaugggcc

SEQ ID NO: 888932 - RNA, 19 nt, Artificial Sequence
  Description of Artificial Sequence: Synthetic oligonucleotide
ugcguaagagcaagcuccu

SEQ ID NO: 888933 - RNA, 19 nt, Artificial Sequence
  Description of Artificial Sequence: Synthetic oligonucleotide
gaugcgcugcaguugauua

SEQ ID NO: 888934 - RNA, 19 nt, Artificial Sequence
  Description of Artificial Sequence: Synthetic oligonucleotide
gcaguacugguauauugag

SEQ ID NO: 888935 - RNA, 19 nt, Artificial Sequence
  Description of Artificial Sequence: Synthetic oligonucleotide
caaucuugcgggugccagg

SEQ ID NO: 888936 - RNA, 19 nt, Artificial Sequence
  Description of Artificial Sequence: Synthetic oligonucleotide
cugacugaccuucuugcuc

SEQ ID NO: 888937 - RNA, 19 nt, Artificial Sequence
  Description of Artificial Sequence: Synthetic oligonucleotide
guguccgacauccuaguuc

SEQ ID NO: 888938 - RNA, 19 nt, Artificial Sequence
  Description of Artificial Sequence: Synthetic oligonucleotide
ucgacaaggccggucagca

SEQ ID NO: 888939 - RNA, 19 nt, Artificial Sequence
  Description of Artificial Sequence: Synthetic oligonucleotide
acugguggaacgaaccucu

SEQ ID NO: 888940 - RNA, 19 nt, Artificial Sequence
  Description of Artificial Sequence: Synthetic oligonucleotide
cuaauucaggaacuauaga

SEQ ID NO: 888941 - RNA, 19 nt, Artificial Sequence
  Description of Artificial Sequence: Synthetic oligonucleotide
cucugcacgccguuucugc

SEQ ID NO: 888942 - RNA, 19 nt, Artificial Sequence
  Description of Artificial Sequence: Synthetic oligonucleotide
gggucuaguagguguaucc

SEQ ID NO: 888943 - RNA, 19 nt, Artificial Sequence
  Description of Artificial Sequence: Synthetic oligonucleotide
ucugcacgccguuucugcc

SEQ ID NO: 888944 - RNA, 19 nt, Artificial Sequence
  Description of Artificial Sequence: Synthetic oligonucleotide
gagucgaucugcacuggag

SEQ ID NO: 888945 - RNA, 19 nt, Artificial Sequence
  Description of Artificial Sequence: Synthetic oligonucleotide
guagguacaggaggcacug

SEQ ID NO: 888946 - RNA, 19 nt, Artificial Sequence
  Description of Artificial Sequence: Synthetic oligonucleotide
aagagucgaucugcacugg

SEQ ID NO: 888947 - RNA, 19 nt, Artificial Sequence
  Description of Artificial Sequence: Synthetic oligonucleotide
acugacguccagguagcgg

SEQ ID NO: 888948 - RNA, 19 nt, Artificial Sequence
  Description of Artificial Sequence: Synthetic oligonucleotide
cacccaaaugccccgaguc

SEQ ID NO: 888949 - RNA, 19 nt, Artificial Sequence
  Description of Artificial Sequence: Synthetic oligonucleotide
agguagcggauaucacaac

SEQ ID NO: 888950 - RNA, 19 nt, Artificial Sequence
  Description of Artificial Sequence: Synthetic oligonucleotide
uuaccucaaucaacuccug

SEQ ID NO: 888951 - RNA, 19 nt, Artificial Sequence
  Description of Artificial Sequence: Synthetic oligonucleotide
ucgaucugcacuggaguca

SEQ ID NO: 888952 - RNA, 19 nt, Artificial Sequence
  Description of Artificial Sequence: Synthetic oligonucleotide
ucauaaccccagagguuca

SEQ ID NO: 888953 - RNA, 19 nt, Artificial Sequence
  Description of Artificial Sequence: Synthetic oligonucleotide
gguagcggauaucacaaca

SEQ ID NO: 888954 - RNA, 19 nt, Artificial Sequence
  Description of Artificial Sequence: Synthetic oligonucleotide
cagcuuuguaaggaagugc

SEQ ID NO: 888955 - RNA, 19 nt, Artificial Sequence
  Description of Artificial Sequence: Synthetic oligonucleotide
gucuaguagguguauccca

SEQ ID NO: 888956 - RNA, 19 nt, Artificial Sequence
  Description of Artificial Sequence: Synthetic oligonucleotide
ugcgcugcaguugauuagu

SEQ ID NO: 888957 - RNA, 19 nt, Artificial Sequence
  Description of Artificial Sequence: Synthetic oligonucleotide
gugggcaagguuaaggcca

SEQ ID NO: 888958 - RNA, 19 nt, Artificial Sequence
  Description of Artificial Sequence: Synthetic oligonucleotide
gguggaaagagucgaucug

SEQ ID NO: 888959 - RNA, 19 nt, Artificial Sequence
  Description of Artificial Sequence: Synthetic oligonucleotide
agcggaacuuuucaacaau

SEQ ID NO: 888960 - RNA, 19 nt, Artificial Sequence
  Description of Artificial Sequence: Synthetic oligonucleotide
cauauuugcagguauccau

SEQ ID NO: 888961 - RNA, 19 nt, Artificial Sequence
  Description of Artificial Sequence: Synthetic oligonucleotide
uguaggagaccucgcuuua

SEQ ID NO: 888962 - RNA, 19 nt, Artificial Sequence
  Description of Artificial Sequence: Synthetic oligonucleotide
aacauguguuaaggaagga

SEQ ID NO: 888963 - RNA, 19 nt, Artificial Sequence
  Description of Artificial Sequence: Synthetic oligonucleotide
cguaagagcaagcuccugg

SEQ ID NO: 888964 - RNA, 19 nt, Artificial Sequence
  Description of Artificial Sequence: Synthetic oligonucleotide
ggacccucagaauccaugc

SEQ ID NO: 888965 - RNA, 19 nt, Artificial Sequence
  Description of Artificial Sequence: Synthetic oligonucleotide
augcgcugcaguugauuag

SEQ ID NO: 888966 - RNA, 19 nt, Artificial Sequence
  Description of Artificial Sequence: Synthetic oligonucleotide
auccaugcaagcaucaauu

SEQ ID NO: 888967 - RNA, 19 nt, Artificial Sequence
  Description of Artificial Sequence: Synthetic oligonucleotide
cacccguucauaaccccag

SEQ ID NO: 888968 - RNA, 19 nt, Artificial Sequence
  Description of Artificial Sequence: Synthetic oligonucleotide
cacucugcguaagagcaag

SEQ ID NO: 888969 - RNA, 19 nt, Artificial Sequence
  Description of Artificial Sequence: Synthetic oligonucleotide
ugcucagcuuuguaaggaa

SEQ ID NO: 888970 - RNA, 19 nt, Artificial Sequence
  Description of Artificial Sequence: Synthetic oligonucleotide
auucuuagguuuagagaug

SEQ ID NO: 888971 - RNA, 19 nt, Artificial Sequence
  Description of Artificial Sequence: Synthetic oligonucleotide
agcuaauucaggaacuaua

SEQ ID NO: 888972 - RNA, 19 nt, Artificial Sequence
  Description of Artificial Sequence: Synthetic oligonucleotide
cgugguuuaaccaguggcc

SEQ ID NO: 888973 - RNA, 19 nt, Artificial Sequence
  Description of Artificial Sequence: Synthetic oligonucleotide
gucgaucugcacuggaguc

SEQ ID NO: 888974 - RNA, 19 nt, Artificial Sequence
  Description of Artificial Sequence: Synthetic oligonucleotide
gcuuaaaccgggcaaccac

SEQ ID NO: 888975 - RNA, 19 nt, Artificial Sequence
  Description of Artificial Sequence: Synthetic oligonucleotide
agcuccacguguccgacau

SEQ ID NO: 888976 - RNA, 19 nt, Artificial Sequence
  Description of Artificial Sequence: Synthetic oligonucleotide
ugagguggaaagagucgau

SEQ ID NO: 888977 - RNA, 19 nt, Artificial Sequence
  Description of Artificial Sequence: Synthetic oligonucleotide
uuuaaccaguggccuguuc

SEQ ID NO: 888978 - RNA, 19 nt, Artificial Sequence
  Description of Artificial Sequence: Synthetic oligonucleotide
cucgcuuuaccucaaucaa

SEQ ID NO: 888979 - RNA, 19 nt, Artificial Sequence
  Description of Artificial Sequence: Synthetic oligonucleotide
ccguucauaaccccagagg

SEQ ID NO: 888980 - RNA, 19 nt, Artificial Sequence
  Description of Artificial Sequence: Synthetic oligonucleotide
gaguggucagcguaaguua

SEQ ID NO: 888981 - RNA, 19 nt, Artificial Sequence
  Description of Artificial Sequence: Synthetic oligonucleotide
gguguaucccauccaguug

SEQ ID NO: 888982 - RNA, 19 nt, Artificial Sequence
  Description of Artificial Sequence: Synthetic oligonucleotide
cguaaguuacaagaguggg

SEQ ID NO: 888983 - RNA, 19 nt, Artificial Sequence
  Description of Artificial Sequence: Synthetic oligonucleotide
aaaugccccgaguccugcu

SEQ ID NO: 888984 - RNA, 19 nt, Artificial Sequence
  Description of Artificial Sequence: Synthetic oligonucleotide
uguaucccauccaguuggu

SEQ ID NO: 888985 - RNA, 19 nt, Artificial Sequence
  Description of Artificial Sequence: Synthetic oligonucleotide
uaccccaucuugaguggca

SEQ ID NO: 888986 - RNA, 19 nt, Artificial Sequence
  Description of Artificial Sequence: Synthetic oligonucleotide
uucgacaaggccggucagc

SEQ ID NO: 888987 - RNA, 19 nt, Artificial Sequence
  Description of Artificial Sequence: Synthetic oligonucleotide
agaaagccaucauccugca

SEQ ID NO: 888988 - RNA, 19 nt, Artificial Sequence
  Description of Artificial Sequence: Synthetic oligonucleotide
cacuacggaagguugggga

SEQ ID NO: 888989 - RNA, 19 nt, Artificial Sequence
  Description of Artificial Sequence: Synthetic oligonucleotide
ccgugguuuaaccaguggc

SEQ ID NO: 888990 - RNA, 19 nt, Artificial Sequence
  Description of Artificial Sequence: Synthetic oligonucleotide
ucuuaagguauggccugca

SEQ ID NO: 888991 - RNA, 19 nt, Artificial Sequence
  Description of Artificial Sequence: Synthetic oligonucleotide
uccacccguucauaacccc

SEQ ID NO: 888992 - RNA, 19 nt, Artificial Sequence
  Description of Artificial Sequence: Synthetic oligonucleotide
ugcacgccguuucugcccu

SEQ ID NO: 888993 - RNA, 19 nt, Artificial Sequence
  Description of Artificial Sequence: Synthetic oligonucleotide
gcguaaguuacaagagugg

SEQ ID NO: 888994 - RNA, 19 nt, Artificial Sequence
  Description of Artificial Sequence: Synthetic oligonucleotide
uuaugacugguggaacgaa

SEQ ID NO: 888995 - RNA, 19 nt, Artificial Sequence
  Description of Artificial Sequence: Synthetic oligonucleotide
auggagcuccacguguccg

SEQ ID NO: 888996 - RNA, 19 nt, Artificial Sequence
  Description of Artificial Sequence: Synthetic oligonucleotide
cuaguagguguaucccauc

SEQ ID NO: 888997 - RNA, 19 nt, Artificial Sequence
  Description of Artificial Sequence: Synthetic oligonucleotide
cucgagagcggaacuuuuc

SEQ ID NO: 888998 - RNA, 19 nt, Artificial Sequence
  Description of Artificial Sequence: Synthetic oligonucleotide
uggucagcguaaguuacaa

SEQ ID NO: 888999 - RNA, 19 nt, Artificial Sequence
  Description of Artificial Sequence: Synthetic oligonucleotide
cuugcgggugccaggggac

SEQ ID NO: 889000 - RNA, 19 nt, Artificial Sequence
  Description of Artificial Sequence: Synthetic oligonucleotide
cggaacuuuucaacaaugg

SEQ ID NO: 889001 - RNA, 19 nt, Artificial Sequence
  Description of Artificial Sequence: Synthetic oligonucleotide
cugcacgccguuucugccc

SEQ ID NO: 889002 - RNA, 19 nt, Artificial Sequence
  Description of Artificial Sequence: Synthetic oligonucleotide
uaaaccgggcaaccacauc

SEQ ID NO: 889003 - RNA, 19 nt, Artificial Sequence
  Description of Artificial Sequence: Synthetic oligonucleotide
ucaacaucugaggcagcgu

SEQ ID NO: 889004 - RNA, 19 nt, Artificial Sequence
  Description of Artificial Sequence: Synthetic oligonucleotide
agcggauaucacaacagau

SEQ ID NO: 889005 - RNA, 19 nt, Artificial Sequence
  Description of Artificial Sequence: Synthetic oligonucleotide
uucggccuguccuaaugau

SEQ ID NO: 889006 - RNA, 19 nt, Artificial Sequence
  Description of Artificial Sequence: Synthetic oligonucleotide
aggaacuauagaaguugug

SEQ ID NO: 889007 - RNA, 19 nt, Artificial Sequence
  Description of Artificial Sequence: Synthetic oligonucleotide
gacugguggaacgaaccuc

SEQ ID NO: 889008 - RNA, 19 nt, Artificial Sequence
  Description of Artificial Sequence: Synthetic oligonucleotide
guggucguccaaauaacuc

SEQ ID NO: 889009 - RNA, 19 nt, Artificial Sequence
  Description of Artificial Sequence: Synthetic oligonucleotide
ucucgcgaagcgaguccag

SEQ ID NO: 889010 - RNA, 19 nt, Artificial Sequence
  Description of Artificial Sequence: Synthetic oligonucleotide
gguaguuccaugugaauau

SEQ ID NO: 889011 - RNA, 19 nt, Artificial Sequence
  Description of Artificial Sequence: Synthetic oligonucleotide
acugggcuaucacuacgga

SEQ ID NO: 889012 - RNA, 19 nt, Artificial Sequence
  Description of Artificial Sequence: Synthetic oligonucleotide
uaauccaguuggguugcac

SEQ ID NO: 889013 - RNA, 19 nt, Artificial Sequence
  Description of Artificial Sequence: Synthetic oligonucleotide
guccuaaugaugcgcugca

SEQ ID NO: 889014 - RNA, 19 nt, Artificial Sequence
  Description of Artificial Sequence: Synthetic oligonucleotide
uuguguggucguccaaaua

SEQ ID NO: 889015 - RNA, 19 nt, Artificial Sequence
  Description of Artificial Sequence: Synthetic oligonucleotide
gcguagagauggcaagacg

SEQ ID NO: 889016 - RNA, 19 nt, Artificial Sequence
  Description of Artificial Sequence: Synthetic oligonucleotide
cacauuguguggucgucca

SEQ ID NO: 889017 - RNA, 19 nt, Artificial Sequence
  Description of Artificial Sequence: Synthetic oligonucleotide
ggucuaguagguguauccc

SEQ ID NO: 889018 - RNA, 19 nt, Artificial Sequence
  Description of Artificial Sequence: Synthetic oligonucleotide
cucuuaagguauggccugc

SEQ ID NO: 889019 - RNA, 19 nt, Artificial Sequence
  Description of Artificial Sequence: Synthetic oligonucleotide
gcaagacggauggauacag

SEQ ID NO: 889020 - RNA, 19 nt, Artificial Sequence
  Description of Artificial Sequence: Synthetic oligonucleotide
aaccgggcaaccacaucug

SEQ ID NO: 889021 - RNA, 19 nt, Artificial Sequence
  Description of Artificial Sequence: Synthetic oligonucleotide
gcggauaucacaacagauc

SEQ ID NO: 889022 - RNA, 19 nt, Artificial Sequence
  Description of Artificial Sequence: Synthetic oligonucleotide
cggccuguccuaaugaugc

SEQ ID NO: 889023 - RNA, 19 nt, Artificial Sequence
  Description of Artificial Sequence: Synthetic oligonucleotide
aacgaaccucugcuacaau

SEQ ID NO: 889024 - RNA, 19 nt, Artificial Sequence
  Description of Artificial Sequence: Synthetic oligonucleotide
gagcaaucaccuaaagacu

SEQ ID NO: 889025 - RNA, 19 nt, Artificial Sequence
  Description of Artificial Sequence: Synthetic oligonucleotide
cuuugacaccaaccaaaca

SEQ ID NO: 889026 - RNA, 19 nt, Artificial Sequence
  Description of Artificial Sequence: Synthetic oligonucleotide
ggggacaaucucucaauca

SEQ ID NO: 889027 - RNA, 19 nt, Artificial Sequence
  Description of Artificial Sequence: Synthetic oligonucleotide
gcccaagauacugacgucc

SEQ ID NO: 889028 - RNA, 19 nt, Artificial Sequence
  Description of Artificial Sequence: Synthetic oligonucleotide
gacccucagaauccaugca

SEQ ID NO: 889029 - RNA, 19 nt, Artificial Sequence
  Description of Artificial Sequence: Synthetic oligonucleotide
guucggccuguccuaauga

SEQ ID NO: 889030 - RNA, 19 nt, Artificial Sequence
  Description of Artificial Sequence: Synthetic oligonucleotide
uaucccaaggugggucagc

SEQ ID NO: 889031 - RNA, 19 nt, Artificial Sequence
  Description of Artificial Sequence: Synthetic oligonucleotide
cuguccuaaugaugcgcug

SEQ ID NO: 889032 - RNA, 19 nt, Artificial Sequence
  Description of Artificial Sequence: Synthetic oligonucleotide
acguguccgacauccuagu

SEQ ID NO: 889033 - RNA, 19 nt, Artificial Sequence
  Description of Artificial Sequence: Synthetic oligonucleotide
ggacaaucucucaaucaug

SEQ ID NO: 889034 - RNA, 19 nt, Artificial Sequence
  Description of Artificial Sequence: Synthetic oligonucleotide
guguggucguccaaauaac

SEQ ID NO: 889035 - RNA, 19 nt, Artificial Sequence
  Description of Artificial Sequence: Synthetic oligonucleotide
aguuuucacccagaugauu

SEQ ID NO: 889036 - RNA, 19 nt, Artificial Sequence
  Description of Artificial Sequence: Synthetic oligonucleotide
acggauggauacagcauca

SEQ ID NO: 889037 - RNA, 19 nt, Artificial Sequence
  Description of Artificial Sequence: Synthetic oligonucleotide
agauacugacguccaggua

SEQ ID NO: 889038 - RNA, 19 nt, Artificial Sequence
  Description of Artificial Sequence: Synthetic oligonucleotide
uacugacguccagguagcg

SEQ ID NO: 889039 - RNA, 19 nt, Artificial Sequence
  Description of Artificial Sequence: Synthetic oligonucleotide
auaauccgucugaagugca

SEQ ID NO: 889040 - RNA, 19 nt, Artificial Sequence
  Description of Artificial Sequence: Synthetic oligonucleotide
ccucgcuuuaccucaauca

SEQ ID NO: 889041 - RNA, 19 nt, Artificial Sequence
  Description of Artificial Sequence: Synthetic oligonucleotide
gaggucaaaccagaugcua

SEQ ID NO: 889042 - RNA, 19 nt, Artificial Sequence
  Description of Artificial Sequence: Synthetic oligonucleotide
gaauccaugcaagcaucaa

SEQ ID NO: 889043 - RNA, 19 nt, Artificial Sequence
  Description of Artificial Sequence: Synthetic oligonucleotide
gcgaagcgaguccaguugc

SEQ ID NO: 889044 - RNA, 19 nt, Artificial Sequence
  Description of Artificial Sequence: Synthetic oligonucleotide
ggaacgaaccucugcuaca

SEQ ID NO: 889045 - RNA, 19 nt, Artificial Sequence
  Description of Artificial Sequence: Synthetic oligonucleotide
caaaugccccgaguccugc

SEQ ID NO: 889046 - RNA, 19 nt, Artificial Sequence
  Description of Artificial Sequence: Synthetic oligonucleotide
gguuaaggccagaucugag

SEQ ID NO: 889047 - RNA, 19 nt, Artificial Sequence
  Description of Artificial Sequence: Synthetic oligonucleotide
cauuguguggucguccaaa

SEQ ID NO: 889048 - RNA, 19 nt, Artificial Sequence
  Description of Artificial Sequence: Synthetic oligonucleotide
cucacccaaaugccccgag

SEQ ID NO: 889049 - RNA, 19 nt, Artificial Sequence
  Description of Artificial Sequence: Synthetic oligonucleotide
ugcacauuguguggucguc

SEQ ID NO: 889050 - RNA, 19 nt, Artificial Sequence
  Description of Artificial Sequence: Synthetic oligonucleotide
ccuugauuucuuagcuggc

SEQ ID NO: 889051 - RNA, 19 nt, Artificial Sequence
  Description of Artificial Sequence: Synthetic oligonucleotide
cuaccccaucuugaguggc

SEQ ID NO: 889052 - RNA, 19 nt, Artificial Sequence
  Description of Artificial Sequence: Synthetic oligonucleotide
cuccuggcuugguguaugc

SEQ ID NO: 889053 - RNA, 19 nt, Artificial Sequence
  Description of Artificial Sequence: Synthetic oligonucleotide
gguuuaugacugguggaac

SEQ ID NO: 889054 - RNA, 19 nt, Artificial Sequence
  Description of Artificial Sequence: Synthetic oligonucleotide
cuuuaguagacuguugguu

SEQ ID NO: 889055 - RNA, 19 nt, Artificial Sequence
  Description of Artificial Sequence: Synthetic oligonucleotide
gggacaaucucucaaucau

SEQ ID NO: 889056 - RNA, 19 nt, Artificial Sequence
  Description of Artificial Sequence: Synthetic oligonucleotide
ucgcgaagcgaguccaguu

SEQ ID NO: 889057 - RNA, 19 nt, Artificial Sequence
  Description of Artificial Sequence: Synthetic oligonucleotide
uaguagacuguugguucaa

SEQ ID NO: 889058 - RNA, 19 nt, Artificial Sequence
  Description of Artificial Sequence: Synthetic oligonucleotide
aucuugcgggugccagggg

SEQ ID NO: 889059 - RNA, 19 nt, Artificial Sequence
  Description of Artificial Sequence: Synthetic oligonucleotide
agacggauggauacagcau

SEQ ID NO: 889060 - RNA, 19 nt, Artificial Sequence
  Description of Artificial Sequence: Synthetic oligonucleotide
ggucagcguaaguuacaag

SEQ ID NO: 889061 - RNA, 19 nt, Artificial Sequence
  Description of Artificial Sequence: Synthetic oligonucleotide
auaaccccagagguucaga

SEQ ID NO: 889062 - RNA, 19 nt, Artificial Sequence
  Description of Artificial Sequence: Synthetic oligonucleotide
caucuggcguagagauggc

SEQ ID NO: 889063 - RNA, 19 nt, Artificial Sequence
  Description of Artificial Sequence: Synthetic oligonucleotide
gcugccgggacccucagaa

SEQ ID NO: 889064 - RNA, 19 nt, Artificial Sequence
  Description of Artificial Sequence: Synthetic oligonucleotide
ugggucuaguagguguauc

SEQ ID NO: 889065 - RNA, 19 nt, Artificial Sequence
  Description of Artificial Sequence: Synthetic oligonucleotide
uauugagccugcgcaucuc

SEQ ID NO: 889066 - RNA, 19 nt, Artificial Sequence
  Description of Artificial Sequence: Synthetic oligonucleotide
gcucagcuuuguaaggaag

SEQ ID NO: 889067 - RNA, 19 nt, Artificial Sequence
  Description of Artificial Sequence: Synthetic oligonucleotide
caggaacuauagaaguugu

SEQ ID NO: 889068 - RNA, 19 nt, Artificial Sequence
  Description of Artificial Sequence: Synthetic oligonucleotide
ugacguccagguagcggau

SEQ ID NO: 889069 - RNA, 19 nt, Artificial Sequence
  Description of Artificial Sequence: Synthetic oligonucleotide
guguuaaggaaggagcaau

SEQ ID NO: 889070 - RNA, 19 nt, Artificial Sequence
  Description of Artificial Sequence: Synthetic oligonucleotide
ggcaaagguagccacugua

SEQ ID NO: 889071 - RNA, 19 nt, Artificial Sequence
  Description of Artificial Sequence: Synthetic oligonucleotide
gaucaacaucugaggcagc

SEQ ID NO: 889072 - RNA, 19 nt, Artificial Sequence
  Description of Artificial Sequence: Synthetic oligonucleotide
ggggcaccguuguauaaac

SEQ ID NO: 889073 - RNA, 19 nt, Artificial Sequence
  Description of Artificial Sequence: Synthetic oligonucleotide
gugguuuaaccaguggccu

SEQ ID NO: 889074 - RNA, 19 nt, Artificial Sequence
  Description of Artificial Sequence: Synthetic oligonucleotide
aguugguuuccaagaguaa

SEQ ID NO: 889075 - RNA, 19 nt, Artificial Sequence
  Description of Artificial Sequence: Synthetic oligonucleotide
ucccaaggugggucagcca

SEQ ID NO: 889076 - RNA, 19 nt, Artificial Sequence
  Description of Artificial Sequence: Synthetic oligonucleotide
gcuuagggccaguagaggu

SEQ ID NO: 889077 - RNA, 19 nt, Artificial Sequence
  Description of Artificial Sequence: Synthetic oligonucleotide
auggcaagacggauggaua

SEQ ID NO: 889078 - RNA, 19 nt, Artificial Sequence
  Description of Artificial Sequence: Synthetic oligonucleotide
cuacggaagguuggggaca

SEQ ID NO: 889079 - RNA, 19 nt, Artificial Sequence
  Description of Artificial Sequence: Synthetic oligonucleotide
cccguucauaaccccagag

SEQ ID NO: 889080 - RNA, 19 nt, Artificial Sequence
  Description of Artificial Sequence: Synthetic oligonucleotide
aucuggcguagagauggca

SEQ ID NO: 889081 - RNA, 19 nt, Artificial Sequence
  Description of Artificial Sequence: Synthetic oligonucleotide
gggacccucagaauccaug

SEQ ID NO: 889082 - RNA, 19 nt, Artificial Sequence
  Description of Artificial Sequence: Synthetic oligonucleotide
cagcguaaguuacaagagu

SEQ ID NO: 889083 - RNA, 19 nt, Artificial Sequence
  Description of Artificial Sequence: Synthetic oligonucleotide
gcacauuguguggucgucc

SEQ ID NO: 889084 - RNA, 19 nt, Artificial Sequence
  Description of Artificial Sequence: Synthetic oligonucleotide
ggcguagagauggcaagac

SEQ ID NO: 889085 - RNA, 19 nt, Artificial Sequence
  Description of Artificial Sequence: Synthetic oligonucleotide
ccagacccugguugaagcc

SEQ ID NO: 889086 - RNA, 19 nt, Artificial Sequence
  Description of Artificial Sequence: Synthetic oligonucleotide
aucaacuccugagcugcaa

SEQ ID NO: 889087 - RNA, 19 nt, Artificial Sequence
  Description of Artificial Sequence: Synthetic oligonucleotide
gguugcacauugugugguc

SEQ ID NO: 889088 - RNA, 19 nt, Artificial Sequence
  Description of Artificial Sequence: Synthetic oligonucleotide
gucucucgcgaagcgaguc

SEQ ID NO: 889089 - RNA, 19 nt, Artificial Sequence
  Description of Artificial Sequence: Synthetic oligonucleotide
aguguuccuuuccgugguu

SEQ ID NO: 889090 - RNA, 19 nt, Artificial Sequence
  Description of Artificial Sequence: Synthetic oligonucleotide
uggcccuuccugugaccca

SEQ ID NO: 889091 - RNA, 19 nt, Artificial Sequence
  Description of Artificial Sequence: Synthetic oligonucleotide
gcuuuaccucaaucaacuc

SEQ ID NO: 889092 - RNA, 19 nt, Artificial Sequence
  Description of Artificial Sequence: Synthetic oligonucleotide
accucgagagcggaacuuu

SEQ ID NO: 889093 - RNA, 19 nt, Artificial Sequence
  Description of Artificial Sequence: Synthetic oligonucleotide
ggucguccaaauaacucaa

SEQ ID NO: 889094 - RNA, 19 nt, Artificial Sequence
  Description of Artificial Sequence: Synthetic oligonucleotide
guggucagcguaaguuaca

SEQ ID NO: 889095 - RNA, 19 nt, Artificial Sequence
  Description of Artificial Sequence: Synthetic oligonucleotide
uuccgccuccgcugcaguc

SEQ ID NO: 889096 - RNA, 19 nt, Artificial Sequence
  Description of Artificial Sequence: Synthetic oligonucleotide
cucucgcgaagcgagucca

SEQ ID NO: 889097 - RNA, 19 nt, Artificial Sequence
  Description of Artificial Sequence: Synthetic oligonucleotide
ggaagugcuucuauaaauu

SEQ ID NO: 889098 - RNA, 19 nt, Artificial Sequence
  Description of Artificial Sequence: Synthetic oligonucleotide
cuuugcugccgggacccuc

SEQ ID NO: 889099 - RNA, 19 nt, Artificial Sequence
  Description of Artificial Sequence: Synthetic oligonucleotide
ggcccuuccugugacccag

SEQ ID NO: 889100 - RNA, 19 nt, Artificial Sequence
  Description of Artificial Sequence: Synthetic oligonucleotide
acacuccucuuaagguaug

SEQ ID NO: 889101 - RNA, 19 nt, Artificial Sequence
  Description of Artificial Sequence: Synthetic oligonucleotide
gagaggugguguagcaacu

SEQ ID NO: 889102 - RNA, 19 nt, Artificial Sequence
  Description of Artificial Sequence: Synthetic oligonucleotide
cucugcguaagagcaagcu

SEQ ID NO: 889103 - RNA, 19 nt, Artificial Sequence
  Description of Artificial Sequence: Synthetic oligonucleotide
gccggucagcaucacuggc

SEQ ID NO: 889104 - RNA, 19 nt, Artificial Sequence
  Description of Artificial Sequence: Synthetic oligonucleotide
gccgggacccucagaaucc

SEQ ID NO: 889105 - RNA, 19 nt, Artificial Sequence
  Description of Artificial Sequence: Synthetic oligonucleotide
cccaagauacugacgucca

SEQ ID NO: 889106 - RNA, 19 nt, Artificial Sequence
  Description of Artificial Sequence: Synthetic oligonucleotide
gacccugguugaagccuug

SEQ ID NO: 889107 - RNA, 19 nt, Artificial Sequence
  Description of Artificial Sequence: Synthetic oligonucleotide
ggcaagacggauggauaca

SEQ ID NO: 889108 - RNA, 19 nt, Artificial Sequence
  Description of Artificial Sequence: Synthetic oligonucleotide
ccaauuccauggcccuucc

SEQ ID NO: 889109 - RNA, 19 nt, Artificial Sequence
  Description of Artificial Sequence: Synthetic oligonucleotide
guucauaaccccagagguu

SEQ ID NO: 889110 - RNA, 19 nt, Artificial Sequence
  Description of Artificial Sequence: Synthetic oligonucleotide
cgcuuuaccucaaucaacu

SEQ ID NO: 889111 - RNA, 19 nt, Artificial Sequence
  Description of Artificial Sequence: Synthetic oligonucleotide
agccugcgcaucucaucau

SEQ ID NO: 889112 - RNA, 19 nt, Artificial Sequence
  Description of Artificial Sequence: Synthetic oligonucleotide
cugagaggugguguagcaa

SEQ ID NO: 889113 - RNA, 19 nt, Artificial Sequence
  Description of Artificial Sequence: Synthetic oligonucleotide
gucccauaugguaguucca

SEQ ID NO: 889114 - RNA, 19 nt, Artificial Sequence
  Description of Artificial Sequence: Synthetic oligonucleotide
agucucucgcgaagcgagu

SEQ ID NO: 889115 - RNA, 19 nt, Artificial Sequence
  Description of Artificial Sequence: Synthetic oligonucleotide
cccaauuccauggcccuuc

SEQ ID NO: 889116 - RNA, 19 nt, Artificial Sequence
  Description of Artificial Sequence: Synthetic oligonucleotide
acacucugcguaagagcaa

SEQ ID NO: 889117 - RNA, 19 nt, Artificial Sequence
  Description of Artificial Sequence: Synthetic oligonucleotide
ccaggggacaaucucucaa

SEQ ID NO: 889118 - RNA, 19 nt, Artificial Sequence
  Description of Artificial Sequence: Synthetic oligonucleotide
ggccuguucggccuguccu

SEQ ID NO: 889119 - RNA, 19 nt, Artificial Sequence
  Description of Artificial Sequence: Synthetic oligonucleotide
caaucaccuaaagacucau

SEQ ID NO: 889120 - RNA, 19 nt, Artificial Sequence
  Description of Artificial Sequence: Synthetic oligonucleotide
ccgaccucgagagcggaac

SEQ ID NO: 889121 - RNA, 19 nt, Artificial Sequence
  Description of Artificial Sequence: Synthetic oligonucleotide
ccaaggugggucagccauc

SEQ ID NO: 889122 - RNA, 19 nt, Artificial Sequence
  Description of Artificial Sequence: Synthetic oligonucleotide
ccuguccuaaugaugcgcu

SEQ ID NO: 889123 - RNA, 19 nt, Artificial Sequence
  Description of Artificial Sequence: Synthetic oligonucleotide
caguggccuguucggccug

SEQ ID NO: 889124 - RNA, 19 nt, Artificial Sequence
  Description of Artificial Sequence: Synthetic oligonucleotide
aguggccuguucggccugu

SEQ ID NO: 889125 - RNA, 19 nt, Artificial Sequence
  Description of Artificial Sequence: Synthetic oligonucleotide
ccacccguucauaacccca

SEQ ID NO: 889126 - RNA, 19 nt, Artificial Sequence
  Description of Artificial Sequence: Synthetic oligonucleotide
gcuuucgacaaggccgguc

SEQ ID NO: 889127 - RNA, 19 nt, Artificial Sequence
  Description of Artificial Sequence: Synthetic oligonucleotide
cgaucugcacuggagucac

SEQ ID NO: 889128 - RNA, 19 nt, Artificial Sequence
  Description of Artificial Sequence: Synthetic oligonucleotide
gguauccauguggaaacau

SEQ ID NO: 889129 - RNA, 19 nt, Artificial Sequence
  Description of Artificial Sequence: Synthetic oligonucleotide
ccguuguauaaacacuccu

SEQ ID NO: 889130 - RNA, 19 nt, Artificial Sequence
  Description of Artificial Sequence: Synthetic oligonucleotide
ggcccgaccucgagagcgg

SEQ ID NO: 889131 - RNA, 19 nt, Artificial Sequence
  Description of Artificial Sequence: Synthetic oligonucleotide
guccgacauccuaguuccc

SEQ ID NO: 889132 - RNA, 19 nt, Artificial Sequence
  Description of Artificial Sequence: Synthetic oligonucleotide
agaccucgcuuuaccucaa

SEQ ID NO: 889133 - RNA, 19 nt, Artificial Sequence
  Description of Artificial Sequence: Synthetic oligonucleotide
ggguugcacauuguguggu

SEQ ID NO: 889134 - RNA, 19 nt, Artificial Sequence
  Description of Artificial Sequence: Synthetic oligonucleotide
agcuuucgacaaggccggu

SEQ ID NO: 889135 - RNA, 19 nt, Artificial Sequence
  Description of Artificial Sequence: Synthetic oligonucleotide
gcguaagagcaagcuccug

SEQ ID NO: 889136 - RNA, 19 nt, Artificial Sequence
  Description of Artificial Sequence: Synthetic oligonucleotide
cagugugcuuauugauaau

SEQ ID NO: 889137 - RNA, 19 nt, Artificial Sequence
  Description of Artificial Sequence: Synthetic oligonucleotide
cucgcgaagcgaguccagu

SEQ ID NO: 889138 - RNA, 19 nt, Artificial Sequence
  Description of Artificial Sequence: Synthetic oligonucleotide
gucguccaaauaacucaau

SEQ ID NO: 889139 - RNA, 19 nt, Artificial Sequence
  Description of Artificial Sequence: Synthetic oligonucleotide
gggcaccguuguauaaaca

SEQ ID NO: 889140 - RNA, 19 nt, Artificial Sequence
  Description of Artificial Sequence: Synthetic oligonucleotide
ccaaccaaacaguguuccu

SEQ ID NO: 889141 - RNA, 19 nt, Artificial Sequence
  Description of Artificial Sequence: Synthetic oligonucleotide
gaccucgcuuuaccucaau

SEQ ID NO: 889142 - RNA, 19 nt, Artificial Sequence
  Description of Artificial Sequence: Synthetic oligonucleotide
acggaagguuggggacagu

SEQ ID NO: 889143 - RNA, 19 nt, Artificial Sequence
  Description of Artificial Sequence: Synthetic oligonucleotide
cugcccugugauagucccu

SEQ ID NO: 889144 - RNA, 19 nt, Artificial Sequence
  Description of Artificial Sequence: Synthetic oligonucleotide
guaucccauccaguugguu

SEQ ID NO: 889145 - RNA, 19 nt, Artificial Sequence
  Description of Artificial Sequence: Synthetic oligonucleotide
cugggucuaguagguguau

SEQ ID NO: 889146 - RNA, 19 nt, Artificial Sequence
  Description of Artificial Sequence: Synthetic oligonucleotide
cacgccguuucugcccugu

SEQ ID NO: 889147 - RNA, 19 nt, Artificial Sequence
  Description of Artificial Sequence: Synthetic oligonucleotide
gcacgccguuucugcccug

SEQ ID NO: 889148 - RNA, 19 nt, Artificial Sequence
  Description of Artificial Sequence: Synthetic oligonucleotide
ccucgagagcggaacuuuu

SEQ ID NO: 889149 - RNA, 19 nt, Artificial Sequence
  Description of Artificial Sequence: Synthetic oligonucleotide
ccgggacccucagaaucca

SEQ ID NO: 889150 - RNA, 19 nt, Artificial Sequence
  Description of Artificial Sequence: Synthetic oligonucleotide
cccgaccucgagagcggaa

SEQ ID NO: 889151 - RNA, 19 nt, Artificial Sequence
  Description of Artificial Sequence: Synthetic oligonucleotide
cgcugcaguugauuaguuu

SEQ ID NO: 889152 - RNA, 19 nt, Artificial Sequence
  Description of Artificial Sequence: Synthetic oligonucleotide
gcgcugcaguugauuaguu

SEQ ID NO: 889153 - RNA, 19 nt, Artificial Sequence
  Description of Artificial Sequence: Synthetic oligonucleotide
gcgggugccaggggacaau

SEQ ID NO: 889154 - RNA, 19 nt, Artificial Sequence
  Description of Artificial Sequence: Synthetic oligonucleotide
cguguccgacauccuaguu

SEQ ID NO: 889155 - RNA, 19 nt, Artificial Sequence
  Description of Artificial Sequence: Synthetic oligonucleotide
cgacaaggccggucagcau

SEQ ID NO: 889156 - RNA, 19 nt, Artificial Sequence
  Description of Artificial Sequence: Synthetic oligonucleotide
uccaguuacacuaacauag

SEQ ID NO: 889157 - RNA, 19 nt, Artificial Sequence
  Description of Artificial Sequence: Synthetic oligonucleotide
uauuagaccaaccagacaa

SEQ ID NO: 889158 - RNA, 19 nt, Artificial Sequence
  Description of Artificial Sequence: Synthetic oligonucleotide
aaagcaucaaaacaguaug

SEQ ID NO: 889159 - RNA, 19 nt, Artificial Sequence
  Description of Artificial Sequence: Synthetic oligonucleotide
uuaagaauauuccaguugu

SEQ ID NO: 889160 - RNA, 19 nt, Artificial Sequence
  Description of Artificial Sequence: Synthetic oligonucleotide
uuuuaauuaccuaaagucu

SEQ ID NO: 889161 - RNA, 19 nt, Artificial Sequence
  Description of Artificial Sequence: Synthetic oligonucleotide
uguuguuuaagaauauucc

SEQ ID NO: 889162 - RNA, 19 nt, Artificial Sequence
  Description of Artificial Sequence: Synthetic oligonucleotide
uuaccuaaagucuucaaag

SEQ ID NO: 889163 - RNA, 19 nt, Artificial Sequence
  Description of Artificial Sequence: Synthetic oligonucleotide
aaaacuacccauuaagaau

SEQ ID NO: 889164 - RNA, 19 nt, Artificial Sequence
  Description of Artificial Sequence: Synthetic oligonucleotide
gauuaaguacaaaagacag

SEQ ID NO: 889165 - RNA, 19 nt, Artificial Sequence
  Description of Artificial Sequence: Synthetic oligonucleotide
uuuguuagcucuuuaagga

SEQ ID NO: 889166 - RNA, 19 nt, Artificial Sequence
  Description of Artificial Sequence: Synthetic oligonucleotide
auugcaaauauguacagga

SEQ ID NO: 889167 - RNA, 19 nt, Artificial Sequence
  Description of Artificial Sequence: Synthetic oligonucleotide
aaacuacccauuaagaauc

SEQ ID NO: 889168 - RNA, 19 nt, Artificial Sequence
  Description of Artificial Sequence: Synthetic oligonucleotide
uggagauuaaguacaaaag

SEQ ID NO: 889169 - RNA, 19 nt, Artificial Sequence
  Description of Artificial Sequence: Synthetic oligonucleotide
ugaaugaccaauacaggag

SEQ ID NO: 889170 - RNA, 19 nt, Artificial Sequence
  Description of Artificial Sequence: Synthetic oligonucleotide
aguguagcaauuuuaagca

SEQ ID NO: 889171 - RNA, 19 nt, Artificial Sequence
  Description of Artificial Sequence: Synthetic oligonucleotide
ugucaaaacccaaauaacu

SEQ ID NO: 889172 - RNA, 19 nt, Artificial Sequence
  Description of Artificial Sequence: Synthetic oligonucleotide
acccaaauaacuccuaaac

SEQ ID NO: 889173 - RNA, 19 nt, Artificial Sequence
  Description of Artificial Sequence: Synthetic oligonucleotide
aaagacagacuuuguuagc

SEQ ID NO: 889174 - RNA, 19 nt, Artificial Sequence
  Description of Artificial Sequence: Synthetic oligonucleotide
auaucucgaggccaggucc

SEQ ID NO: 889175 - RNA, 19 nt, Artificial Sequence
  Description of Artificial Sequence: Synthetic oligonucleotide
ugcaaggucauacagcuga

SEQ ID NO: 889176 - RNA, 19 nt, Artificial Sequence
  Description of Artificial Sequence: Synthetic oligonucleotide
uauaugauuacaguugaug

SEQ ID NO: 889177 - RNA, 19 nt, Artificial Sequence
  Description of Artificial Sequence: Synthetic oligonucleotide
auaugauuacaguugauga

SEQ ID NO: 889178 - RNA, 19 nt, Artificial Sequence
  Description of Artificial Sequence: Synthetic oligonucleotide
aacgaucugaggcuuacag

SEQ ID NO: 889179 - RNA, 19 nt, Artificial Sequence
  Description of Artificial Sequence: Synthetic oligonucleotide
uuuaauuaccuaaagucuu

SEQ ID NO: 889180 - RNA, 19 nt, Artificial Sequence
  Description of Artificial Sequence: Synthetic oligonucleotide
uuuuaagcaucucauuucu

SEQ ID NO: 889181 - RNA, 19 nt, Artificial Sequence
  Description of Artificial Sequence: Synthetic oligonucleotide
ucucacaacaguuuuccag

SEQ ID NO: 889182 - RNA, 19 nt, Artificial Sequence
  Description of Artificial Sequence: Synthetic oligonucleotide
uucgauaucuugucaaugc

SEQ ID NO: 889183 - RNA, 19 nt, Artificial Sequence
  Description of Artificial Sequence: Synthetic oligonucleotide
aacuccuaaacuaagaaau

SEQ ID NO: 889184 - RNA, 19 nt, Artificial Sequence
  Description of Artificial Sequence: Synthetic oligonucleotide
guuacacuaacauagcuuc

SEQ ID NO: 889185 - RNA, 19 nt, Artificial Sequence
  Description of Artificial Sequence: Synthetic oligonucleotide
ucagccuaauggaaggugg

SEQ ID NO: 889186 - RNA, 19 nt, Artificial Sequence
  Description of Artificial Sequence: Synthetic oligonucleotide
aaucagaggugacagcaag

SEQ ID NO: 889187 - RNA, 19 nt, Artificial Sequence
  Description of Artificial Sequence: Synthetic oligonucleotide
gagauuaaguacaaaagac

SEQ ID NO: 889188 - RNA, 19 nt, Artificial Sequence
  Description of Artificial Sequence: Synthetic oligonucleotide
aaagcagaaacuugaaauu

SEQ ID NO: 889189 - RNA, 19 nt, Artificial Sequence
  Description of Artificial Sequence: Synthetic oligonucleotide
ugugcauagagcucuaugu

SEQ ID NO: 889190 - RNA, 19 nt, Artificial Sequence
  Description of Artificial Sequence: Synthetic oligonucleotide
uagucuaugacgcugggaa

SEQ ID NO: 889191 - RNA, 19 nt, Artificial Sequence
  Description of Artificial Sequence: Synthetic oligonucleotide
uccaguuguacaacgaucu

SEQ ID NO: 889192 - RNA, 19 nt, Artificial Sequence
  Description of Artificial Sequence: Synthetic oligonucleotide
uuuaaggagaacaucccaa

SEQ ID NO: 889193 - RNA, 19 nt, Artificial Sequence
  Description of Artificial Sequence: Synthetic oligonucleotide
uuaaggagaacaucccaag

SEQ ID NO: 889194 - RNA, 19 nt, Artificial Sequence
  Description of Artificial Sequence: Synthetic oligonucleotide
ucgaugucggcauagaggu

SEQ ID NO: 889195 - RNA, 19 nt, Artificial Sequence
  Description of Artificial Sequence: Synthetic oligonucleotide
aacgcaauccaguuguaca

SEQ ID NO: 889196 - RNA, 19 nt, Artificial Sequence
  Description of Artificial Sequence: Synthetic oligonucleotide
uguacaacgaucugaggcu

SEQ ID NO: 889197 - RNA, 19 nt, Artificial Sequence
  Description of Artificial Sequence: Synthetic oligonucleotide
aauccagucaaagugugug

SEQ ID NO: 889198 - RNA, 19 nt, Artificial Sequence
  Description of Artificial Sequence: Synthetic oligonucleotide
uucacaguaaugagguaag

SEQ ID NO: 889199 - RNA, 19 nt, Artificial Sequence
  Description of Artificial Sequence: Synthetic oligonucleotide
aagcgcacgaacaugcacc

SEQ ID NO: 889200 - RNA, 19 nt, Artificial Sequence
  Description of Artificial Sequence: Synthetic oligonucleotide
caaaccagacaucaguggg

SEQ ID NO: 889201 - RNA, 19 nt, Artificial Sequence
  Description of Artificial Sequence: Synthetic oligonucleotide
uggcacaugggugagaggg

SEQ ID NO: 889202 - RNA, 19 nt, Artificial Sequence
  Description of Artificial Sequence: Synthetic oligonucleotide
uguagcaauuuuaagcauc

SEQ ID NO: 889203 - RNA, 19 nt, Artificial Sequence
  Description of Artificial Sequence: Synthetic oligonucleotide
cuagguacugugcauagag

SEQ ID NO: 889204 - RNA, 19 nt, Artificial Sequence
  Description of Artificial Sequence: Synthetic oligonucleotide
cucaguaccgugaaugacc

SEQ ID NO: 889205 - RNA, 19 nt, Artificial Sequence
  Description of Artificial Sequence: Synthetic oligonucleotide
aaccaauacaaguagugua

SEQ ID NO: 889206 - RNA, 19 nt, Artificial Sequence
  Description of Artificial Sequence: Synthetic oligonucleotide
aguucauuguuguagccug

SEQ ID NO: 889207 - RNA, 19 nt, Artificial Sequence
  Description of Artificial Sequence: Synthetic oligonucleotide
uguuagcucuuuaaggaga

SEQ ID NO: 889208 - RNA, 19 nt, Artificial Sequence
  Description of Artificial Sequence: Synthetic oligonucleotide
uuggcuaguaauaaauuua

SEQ ID NO: 889209 - RNA, 19 nt, Artificial Sequence
  Description of Artificial Sequence: Synthetic oligonucleotide
uggcuaguaauaaauuuac

SEQ ID NO: 889210 - RNA, 19 nt, Artificial Sequence
  Description of Artificial Sequence: Synthetic oligonucleotide
uuguuuuagucguucuagg

SEQ ID NO: 889211 - RNA, 19 nt, Artificial Sequence
  Description of Artificial Sequence: Synthetic oligonucleotide
uacccauuaagaaucugug

SEQ ID NO: 889212 - RNA, 19 nt, Artificial Sequence
  Description of Artificial Sequence: Synthetic oligonucleotide
gacgcugggaaacaguccc

SEQ ID NO: 889213 - RNA, 19 nt, Artificial Sequence
  Description of Artificial Sequence: Synthetic oligonucleotide
uuaccaaccaccgugccgc

SEQ ID NO: 889214 - RNA, 19 nt, Artificial Sequence
  Description of Artificial Sequence: Synthetic oligonucleotide
auuaccaaccaccgugccg

SEQ ID NO: 889215 - RNA, 19 nt, Artificial Sequence
  Description of Artificial Sequence: Synthetic oligonucleotide
accaacgcaauccaguugu

SEQ ID NO: 889216 - RNA, 19 nt, Artificial Sequence
  Description of Artificial Sequence: Synthetic oligonucleotide
agaccaaaccaccccaaac

SEQ ID NO: 889217 - RNA, 19 nt, Artificial Sequence
  Description of Artificial Sequence: Synthetic oligonucleotide
uuguuagcucuuuaaggag

SEQ ID NO: 889218 - RNA, 19 nt, Artificial Sequence
  Description of Artificial Sequence: Synthetic oligonucleotide
acgcuuuagucuaugacgc

SEQ ID NO: 889219 - RNA, 19 nt, Artificial Sequence
  Description of Artificial Sequence: Synthetic oligonucleotide
uaccuaaagucuucaaagc

SEQ ID NO: 889220 - RNA, 19 nt, Artificial Sequence
  Description of Artificial Sequence: Synthetic oligonucleotide
cugcagaucaaacacuggc

SEQ ID NO: 889221 - RNA, 19 nt, Artificial Sequence
  Description of Artificial Sequence: Synthetic oligonucleotide
uguuuuagucguucuaggu

SEQ ID NO: 889222 - RNA, 19 nt, Artificial Sequence
  Description of Artificial Sequence: Synthetic oligonucleotide
agauuaaguacaaaagaca

SEQ ID NO: 889223 - RNA, 19 nt, Artificial Sequence
  Description of Artificial Sequence: Synthetic oligonucleotide
uuauggaggauuucucaca

SEQ ID NO: 889224 - RNA, 19 nt, Artificial Sequence
  Description of Artificial Sequence: Synthetic oligonucleotide
aaacaaggaaucugcaguu

SEQ ID NO: 889225 - RNA, 19 nt, Artificial Sequence
  Description of Artificial Sequence: Synthetic oligonucleotide
aguuccaguaaacuacucu

SEQ ID NO: 889226 - RNA, 19 nt, Artificial Sequence
  Description of Artificial Sequence: Synthetic oligonucleotide
accuaaagucuucaaagca

SEQ ID NO: 889227 - RNA, 19 nt, Artificial Sequence
  Description of Artificial Sequence: Synthetic oligonucleotide
aagcucgugagauaugaau

SEQ ID NO: 889228 - RNA, 19 nt, Artificial Sequence
  Description of Artificial Sequence: Synthetic oligonucleotide
aaaccagacaucagugggg

SEQ ID NO: 889229 - RNA, 19 nt, Artificial Sequence
  Description of Artificial Sequence: Synthetic oligonucleotide
caguaaugagguaaggcug

SEQ ID NO: 889230 - RNA, 19 nt, Artificial Sequence
  Description of Artificial Sequence: Synthetic oligonucleotide
ucaguaccgugaaugacca

SEQ ID NO: 889231 - RNA, 19 nt, Artificial Sequence
  Description of Artificial Sequence: Synthetic oligonucleotide
ccgugaaugaccaauacag

SEQ ID NO: 889232 - RNA, 19 nt, Artificial Sequence
  Description of Artificial Sequence: Synthetic oligonucleotide
ugaccaauacaggagaggu

SEQ ID NO: 889233 - RNA, 19 nt, Artificial Sequence
  Description of Artificial Sequence: Synthetic oligonucleotide
uuuagucuaugacgcuggg

SEQ ID NO: 889234 - RNA, 19 nt, Artificial Sequence
  Description of Artificial Sequence: Synthetic oligonucleotide
accaauacaaguaguguag

SEQ ID NO: 889235 - RNA, 19 nt, Artificial Sequence
  Description of Artificial Sequence: Synthetic oligonucleotide
guggagauuaaguacaaaa

SEQ ID NO: 889236 - RNA, 19 nt, Artificial Sequence
  Description of Artificial Sequence: Synthetic oligonucleotide
uugaucacgcuuuagucua

SEQ ID NO: 889237 - RNA, 19 nt, Artificial Sequence
  Description of Artificial Sequence: Synthetic oligonucleotide
uuauuagaccaaccagaca

SEQ ID NO: 889238 - RNA, 19 nt, Artificial Sequence
  Description of Artificial Sequence: Synthetic oligonucleotide
agcgcacgaacaugcaccc

SEQ ID NO: 889239 - RNA, 19 nt, Artificial Sequence
  Description of Artificial Sequence: Synthetic oligonucleotide
acuuucgauaucuugucaa

SEQ ID NO: 889240 - RNA, 19 nt, Artificial Sequence
  Description of Artificial Sequence: Synthetic oligonucleotide
ucgauaucuugucaaugcu

SEQ ID NO: 889241 - RNA, 19 nt, Artificial Sequence
  Description of Artificial Sequence: Synthetic oligonucleotide
ucguucuagguacugugca

SEQ ID NO: 889242 - RNA, 19 nt, Artificial Sequence
  Description of Artificial Sequence: Synthetic oligonucleotide
cuugccggagcucacgccg

SEQ ID NO: 889243 - RNA, 19 nt, Artificial Sequence
  Description of Artificial Sequence: Synthetic oligonucleotide
uggaucucacccauggcac

SEQ ID NO: 889244 - RNA, 19 nt, Artificial Sequence
  Description of Artificial Sequence: Synthetic oligonucleotide
uugcaaauauguacaggac

SEQ ID NO: 889245 - RNA, 19 nt, Artificial Sequence
  Description of Artificial Sequence: Synthetic oligonucleotide
cuaaagucuucaaagcaga

SEQ ID NO: 889246 - RNA, 19 nt, Artificial Sequence
  Description of Artificial Sequence: Synthetic oligonucleotide
uaaaacucuuggcuaguaa

SEQ ID NO: 889247 - RNA, 19 nt, Artificial Sequence
  Description of Artificial Sequence: Synthetic oligonucleotide
cacaguaaugagguaaggc

SEQ ID NO: 889248 - RNA, 19 nt, Artificial Sequence
  Description of Artificial Sequence: Synthetic oligonucleotide
caaacuggcaaccaacgca

SEQ ID NO: 889249 - RNA, 19 nt, Artificial Sequence
  Description of Artificial Sequence: Synthetic oligonucleotide
gcuuacaguacauuuuaag

SEQ ID NO: 889250 - RNA, 19 nt, Artificial Sequence
  Description of Artificial Sequence: Synthetic oligonucleotide
acuggcaaccaacgcaauc

SEQ ID NO: 889251 - RNA, 19 nt, Artificial Sequence
  Description of Artificial Sequence: Synthetic oligonucleotide
gagcucacgccguagcccg

SEQ ID NO: 889252 - RNA, 19 nt, Artificial Sequence
  Description of Artificial Sequence: Synthetic oligonucleotide
ugaauuguuuuagucguuc

SEQ ID NO: 889253 - RNA, 19 nt, Artificial Sequence
  Description of Artificial Sequence: Synthetic oligonucleotide
aguuuauggaggauuucuc

SEQ ID NO: 889254 - RNA, 19 nt, Artificial Sequence
  Description of Artificial Sequence: Synthetic oligonucleotide
ugacuuucgauaucuuguc

SEQ ID NO: 889255 - RNA, 19 nt, Artificial Sequence
  Description of Artificial Sequence: Synthetic oligonucleotide
agccugacaaaagaaaacu

SEQ ID NO: 889256 - RNA, 19 nt, Artificial Sequence
  Description of Artificial Sequence: Synthetic oligonucleotide
caucccaaggacugggccc

SEQ ID NO: 889257 - RNA, 19 nt, Artificial Sequence
  Description of Artificial Sequence: Synthetic oligonucleotide
caccgugccgcauucaggc

SEQ ID NO: 889258 - RNA, 19 nt, Artificial Sequence
  Description of Artificial Sequence: Synthetic oligonucleotide
ucuuggcuaguaauaaauu

SEQ ID NO: 889259 - RNA, 19 nt, Artificial Sequence
  Description of Artificial Sequence: Synthetic oligonucleotide
uaauuaccuaaagucuuca

SEQ ID NO: 889260 - RNA, 19 nt, Artificial Sequence
  Description of Artificial Sequence: Synthetic oligonucleotide
uaugacgcugggaaacagu

SEQ ID NO: 889261 - RNA, 19 nt, Artificial Sequence
  Description of Artificial Sequence: Synthetic oligonucleotide
cuguccauagaggauaaug

SEQ ID NO: 889262 - RNA, 19 nt, Artificial Sequence
  Description of Artificial Sequence: Synthetic oligonucleotide
aaccccaguuuccuguugu

SEQ ID NO: 889263 - RNA, 19 nt, Artificial Sequence
  Description of Artificial Sequence: Synthetic oligonucleotide
aggguaauuuuaauuaccu

SEQ ID NO: 889264 - RNA, 19 nt, Artificial Sequence
  Description of Artificial Sequence: Synthetic oligonucleotide
augaccaauacaggagagg

SEQ ID NO: 889265 - RNA, 19 nt, Artificial Sequence
  Description of Artificial Sequence: Synthetic oligonucleotide
aguaccgugaaugaccaau

SEQ ID NO: 889266 - RNA, 19 nt, Artificial Sequence
  Description of Artificial Sequence: Synthetic oligonucleotide
cauugccaggccaugggag

SEQ ID NO: 889267 - RNA, 19 nt, Artificial Sequence
  Description of Artificial Sequence: Synthetic oligonucleotide
auuaaguacaaaagacaga

SEQ ID NO: 889268 - RNA, 19 nt, Artificial Sequence
  Description of Artificial Sequence: Synthetic oligonucleotide
ggggaauggaggaugaccg

SEQ ID NO: 889269 - RNA, 19 nt, Artificial Sequence
  Description of Artificial Sequence: Synthetic oligonucleotide
guuuuagucguucuaggua

SEQ ID NO: 889270 - RNA, 19 nt, Artificial Sequence
  Description of Artificial Sequence: Synthetic oligonucleotide
accgugaaugaccaauaca

SEQ ID NO: 889271 - RNA, 19 nt, Artificial Sequence
  Description of Artificial Sequence: Synthetic oligonucleotide
aagcaucaaaacaguaugu

SEQ ID NO: 889272 - RNA, 19 nt, Artificial Sequence
  Description of Artificial Sequence: Synthetic oligonucleotide
uuauaugauuacaguugau

SEQ ID NO: 889273 - RNA, 19 nt, Artificial Sequence
  Description of Artificial Sequence: Synthetic oligonucleotide
cuuuaaggagaacauccca

SEQ ID NO: 889274 - RNA, 19 nt, Artificial Sequence
  Description of Artificial Sequence: Synthetic oligonucleotide
aggucauacagcugagacu

SEQ ID NO: 889275 - RNA, 19 nt, Artificial Sequence
  Description of Artificial Sequence: Synthetic oligonucleotide
caugcggcgucgaugucgg

SEQ ID NO: 889276 - RNA, 19 nt, Artificial Sequence
  Description of Artificial Sequence: Synthetic oligonucleotide
agaggugacuuucgauauc

SEQ ID NO: 889277 - RNA, 19 nt, Artificial Sequence
  Description of Artificial Sequence: Synthetic oligonucleotide
uccucaguaccgugaauga

SEQ ID NO: 889278 - RNA, 19 nt, Artificial Sequence
  Description of Artificial Sequence: Synthetic oligonucleotide
uuuagucguucuagguacu

SEQ ID NO: 889279 - RNA, 19 nt, Artificial Sequence
  Description of Artificial Sequence: Synthetic oligonucleotide
ugccaugcggcgucgaugu

SEQ ID NO: 889280 - RNA, 19 nt, Artificial Sequence
  Description of Artificial Sequence: Synthetic oligonucleotide
uaauccagucaaagugugu

SEQ ID NO: 889281 - RNA, 19 nt, Artificial Sequence
  Description of Artificial Sequence: Synthetic oligonucleotide
uaucucgaggccaggucca

SEQ ID NO: 889282 - RNA, 19 nt, Artificial Sequence
  Description of Artificial Sequence: Synthetic oligonucleotide
ccaaauaacuccuaaacua

SEQ ID NO: 889283 - RNA, 19 nt, Artificial Sequence
  Description of Artificial Sequence: Synthetic oligonucleotide
aaguaguguagcaauuuua

SEQ ID NO: 889284 - RNA, 19 nt, Artificial Sequence
  Description of Artificial Sequence: Synthetic oligonucleotide
acaaggauccucgcuucac

SEQ ID NO: 889285 - RNA, 19 nt, Artificial Sequence
  Description of Artificial Sequence: Synthetic oligonucleotide
uuccaguaaacuacucuuu

SEQ ID NO: 889286 - RNA, 19 nt, Artificial Sequence
  Description of Artificial Sequence: Synthetic oligonucleotide
ugacgcugggaaacagucc

SEQ ID NO: 889287 - RNA, 19 nt, Artificial Sequence
  Description of Artificial Sequence: Synthetic oligonucleotide
uaccgugaaugaccaauac

SEQ ID NO: 889288 - RNA, 19 nt, Artificial Sequence
  Description of Artificial Sequence: Synthetic oligonucleotide
aacacgcaaaccagacauc

SEQ ID NO: 889289 - RNA, 19 nt, Artificial Sequence
  Description of Artificial Sequence: Synthetic oligonucleotide
cuaacauagcuucacaaau

SEQ ID NO: 889290 - RNA, 19 nt, Artificial Sequence
  Description of Artificial Sequence: Synthetic oligonucleotide
cucgaggccagguccacag

SEQ ID NO: 889291 - RNA, 19 nt, Artificial Sequence
  Description of Artificial Sequence: Synthetic oligonucleotide
ggacucacgccauaccggg

SEQ ID NO: 889292 - RNA, 19 nt, Artificial Sequence
  Description of Artificial Sequence: Synthetic oligonucleotide
uggagggcgcgcaagcgca

SEQ ID NO: 889293 - RNA, 19 nt, Artificial Sequence
  Description of Artificial Sequence: Synthetic oligonucleotide
ugggaagcucgugagauau

SEQ ID NO: 889294 - RNA, 19 nt, Artificial Sequence
  Description of Artificial Sequence: Synthetic oligonucleotide
aaucagcuuaggguaauuu

SEQ ID NO: 889295 - RNA, 19 nt, Artificial Sequence
  Description of Artificial Sequence: Synthetic oligonucleotide
acgcaauccaguuguacaa

SEQ ID NO: 889296 - RNA, 19 nt, Artificial Sequence
  Description of Artificial Sequence: Synthetic oligonucleotide
ucuaugacgcugggaaaca

SEQ ID NO: 889297 - RNA, 19 nt, Artificial Sequence
  Description of Artificial Sequence: Synthetic oligonucleotide
ucgaugaccucguccucag

SEQ ID NO: 889298 - RNA, 19 nt, Artificial Sequence
  Description of Artificial Sequence: Synthetic oligonucleotide
uuauuucauguguguggga

SEQ ID NO: 889299 - RNA, 19 nt, Artificial Sequence
  Description of Artificial Sequence: Synthetic oligonucleotide
ugcaaacaaggauccucgc

SEQ ID NO: 889300 - RNA, 19 nt, Artificial Sequence
  Description of Artificial Sequence: Synthetic oligonucleotide
agagugcugcagaucaaac

SEQ ID NO: 889301 - RNA, 19 nt, Artificial Sequence
  Description of Artificial Sequence: Synthetic oligonucleotide
gucuaugacgcugggaaac

SEQ ID NO: 889302 - RNA, 19 nt, Artificial Sequence
  Description of Artificial Sequence: Synthetic oligonucleotide
acgaucugaggcuuacagu

SEQ ID NO: 889303 - RNA, 19 nt, Artificial Sequence
  Description of Artificial Sequence: Synthetic oligonucleotide
gcucgugagauaugaauug

SEQ ID NO: 889304 - RNA, 19 nt, Artificial Sequence
  Description of Artificial Sequence: Synthetic oligonucleotide
cuugaucacgcuuuagucu

SEQ ID NO: 889305 - RNA, 19 nt, Artificial Sequence
  Description of Artificial Sequence: Synthetic oligonucleotide
aagaguugggaagcucgug

SEQ ID NO: 889306 - RNA, 19 nt, Artificial Sequence
  Description of Artificial Sequence: Synthetic oligonucleotide
uggggaaucagaggugaca

SEQ ID NO: 889307 - RNA, 19 nt, Artificial Sequence
  Description of Artificial Sequence: Synthetic oligonucleotide
accaccgugccgcauucag

SEQ ID NO: 889308 - RNA, 19 nt, Artificial Sequence
  Description of Artificial Sequence: Synthetic oligonucleotide
gacuuucgauaucuuguca

SEQ ID NO: 889309 - RNA, 19 nt, Artificial Sequence
  Description of Artificial Sequence: Synthetic oligonucleotide
cauaucucgaggccagguc

SEQ ID NO: 889310 - RNA, 19 nt, Artificial Sequence
  Description of Artificial Sequence: Synthetic oligonucleotide
uuagucguucuagguacug

SEQ ID NO: 889311 - RNA, 19 nt, Artificial Sequence
  Description of Artificial Sequence: Synthetic oligonucleotide
gauuacaguugaugaagcu

SEQ ID NO: 889312 - RNA, 19 nt, Artificial Sequence
  Description of Artificial Sequence: Synthetic oligonucleotide
uccaugcguccuuuauucc

SEQ ID NO: 889313 - RNA, 19 nt, Artificial Sequence
  Description of Artificial Sequence: Synthetic oligonucleotide
agagggugauccugcacca

SEQ ID NO: 889314 - RNA, 19 nt, Artificial Sequence
  Description of Artificial Sequence: Synthetic oligonucleotide
cauguuaacacaaguuuau

SEQ ID NO: 889315 - RNA, 19 nt, Artificial Sequence
  Description of Artificial Sequence: Synthetic oligonucleotide
accgcugcacacucauauc

SEQ ID NO: 889316 - RNA, 19 nt, Artificial Sequence
  Description of Artificial Sequence: Synthetic oligonucleotide
aagucggccaggcuuuauu

SEQ ID NO: 889317 - RNA, 19 nt, Artificial Sequence
  Description of Artificial Sequence: Synthetic oligonucleotide
uuccauuaccaaccaccgu

SEQ ID NO: 889318 - RNA, 19 nt, Artificial Sequence
  Description of Artificial Sequence: Synthetic oligonucleotide
cauuucugauguucaccug

SEQ ID NO: 889319 - RNA, 19 nt, Artificial Sequence
  Description of Artificial Sequence: Synthetic oligonucleotide
acaaguaguguagcaauuu

SEQ ID NO: 889320 - RNA, 19 nt, Artificial Sequence
  Description of Artificial Sequence: Synthetic oligonucleotide
uuaaaacucuuggcuagua

SEQ ID NO: 889321 - RNA, 19 nt, Artificial Sequence
  Description of Artificial Sequence: Synthetic oligonucleotide
uccugguaucuggaaaagc

SEQ ID NO: 889322 - RNA, 19 nt, Artificial Sequence
  Description of Artificial Sequence: Synthetic oligonucleotide
caagcgcacgaacaugcac

SEQ ID NO: 889323 - RNA, 19 nt, Artificial Sequence
  Description of Artificial Sequence: Synthetic oligonucleotide
cauuaccaaccaccgugcc

SEQ ID NO: 889324 - RNA, 19 nt, Artificial Sequence
  Description of Artificial Sequence: Synthetic oligonucleotide
aaaagccgacaaggaggac

SEQ ID NO: 889325 - RNA, 19 nt, Artificial Sequence
  Description of Artificial Sequence: Synthetic oligonucleotide
acagcacggggacagcgcu

SEQ ID NO: 889326 - RNA, 19 nt, Artificial Sequence
  Description of Artificial Sequence: Synthetic oligonucleotide
caacacgcaaaccagacau

SEQ ID NO: 889327 - RNA, 19 nt, Artificial Sequence
  Description of Artificial Sequence: Synthetic oligonucleotide
cuuggcuaguaauaaauuu

SEQ ID NO: 889328 - RNA, 19 nt, Artificial Sequence
  Description of Artificial Sequence: Synthetic oligonucleotide
aacuacccauuaagaaucu

SEQ ID NO: 889329 - RNA, 19 nt, Artificial Sequence
  Description of Artificial Sequence: Synthetic oligonucleotide
gccgcauucaggcaacagc

SEQ ID NO: 889330 - RNA, 19 nt, Artificial Sequence
  Description of Artificial Sequence: Synthetic oligonucleotide
agcucgugagauaugaauu

SEQ ID NO: 889331 - RNA, 19 nt, Artificial Sequence
  Description of Artificial Sequence: Synthetic oligonucleotide
gcuuuagucuaugacgcug

SEQ ID NO: 889332 - RNA, 19 nt, Artificial Sequence
  Description of Artificial Sequence: Synthetic oligonucleotide
auaccgggugcgcagcgcu

SEQ ID NO: 889333 - RNA, 19 nt, Artificial Sequence
  Description of Artificial Sequence: Synthetic oligonucleotide
gaggugacuuucgauaucu

SEQ ID NO: 889334 - RNA, 19 nt, Artificial Sequence
  Description of Artificial Sequence: Synthetic oligonucleotide
uccucgcuucacaguaaug

SEQ ID NO: 889335 - RNA, 19 nt, Artificial Sequence
  Description of Artificial Sequence: Synthetic oligonucleotide
cucuuggcuaguaauaaau

SEQ ID NO: 889336 - RNA, 19 nt, Artificial Sequence
  Description of Artificial Sequence: Synthetic oligonucleotide
gucguucuagguacugugc

SEQ ID NO: 889337 - RNA, 19 nt, Artificial Sequence
  Description of Artificial Sequence: Synthetic oligonucleotide
uucaagaguugggaagcuc

SEQ ID NO: 889338 - RNA, 19 nt, Artificial Sequence
  Description of Artificial Sequence: Synthetic oligonucleotide
ccaguuacacuaacauagc

SEQ ID NO: 889339 - RNA, 19 nt, Artificial Sequence
  Description of Artificial Sequence: Synthetic oligonucleotide
cuggagggcgcgcaagcgc

SEQ ID NO: 889340 - RNA, 19 nt, Artificial Sequence
  Description of Artificial Sequence: Synthetic oligonucleotide
ugcggcgucgaugucggca

SEQ ID NO: 889341 - RNA, 19 nt, Artificial Sequence
  Description of Artificial Sequence: Synthetic oligonucleotide
uaguuccaguaaacuacuc

SEQ ID NO: 889342 - RNA, 19 nt, Artificial Sequence
  Description of Artificial Sequence: Synthetic oligonucleotide
agucuaugacgcugggaaa

SEQ ID NO: 889343 - RNA, 19 nt, Artificial Sequence
  Description of Artificial Sequence: Synthetic oligonucleotide
aggauccucgcuucacagu

SEQ ID NO: 889344 - RNA, 19 nt, Artificial Sequence
  Description of Artificial Sequence: Synthetic oligonucleotide
agcucucauucccacuccu

SEQ ID NO: 889345 - RNA, 19 nt, Artificial Sequence
  Description of Artificial Sequence: Synthetic oligonucleotide
agucggccaggcuuuauua

SEQ ID NO: 889346 - RNA, 19 nt, Artificial Sequence
  Description of Artificial Sequence: Synthetic oligonucleotide
uagucguucuagguacugu

SEQ ID NO: 889347 - RNA, 19 nt, Artificial Sequence
  Description of Artificial Sequence: Synthetic oligonucleotide
cgugaaugaccaauacagg

SEQ ID NO: 889348 - RNA, 19 nt, Artificial Sequence
  Description of Artificial Sequence: Synthetic oligonucleotide
uucaugugugugggaaaga

SEQ ID NO: 889349 - RNA, 19 nt, Artificial Sequence
  Description of Artificial Sequence: Synthetic oligonucleotide
gugagauaugaauuguuuu

SEQ ID NO: 889350 - RNA, 19 nt, Artificial Sequence
  Description of Artificial Sequence: Synthetic oligonucleotide
guugaugcgcgagcccagg

SEQ ID NO: 889351 - RNA, 19 nt, Artificial Sequence
  Description of Artificial Sequence: Synthetic oligonucleotide
aagccgacaaggaggacuu

SEQ ID NO: 889352 - RNA, 19 nt, Artificial Sequence
  Description of Artificial Sequence: Synthetic oligonucleotide
gaucacgcuuuagucuaug

SEQ ID NO: 889353 - RNA, 19 nt, Artificial Sequence
  Description of Artificial Sequence: Synthetic oligonucleotide
cuaugacgcugggaaacag

SEQ ID NO: 889354 - RNA, 19 nt, Artificial Sequence
  Description of Artificial Sequence: Synthetic oligonucleotide
cguccuuuauuccauuacc

SEQ ID NO: 889355 - RNA, 19 nt, Artificial Sequence
  Description of Artificial Sequence: Synthetic oligonucleotide
uugccaugcggcgucgaug

SEQ ID NO: 889356 - RNA, 19 nt, Artificial Sequence
  Description of Artificial Sequence: Synthetic oligonucleotide
cucaggacucacgccauac

SEQ ID NO: 889357 - RNA, 19 nt, Artificial Sequence
  Description of Artificial Sequence: Synthetic oligonucleotide
cuguuaauccagucaaagu

SEQ ID NO: 889358 - RNA, 19 nt, Artificial Sequence
  Description of Artificial Sequence: Synthetic oligonucleotide
ggaagcucgugagauauga

SEQ ID NO: 889359 - RNA, 19 nt, Artificial Sequence
  Description of Artificial Sequence: Synthetic oligonucleotide
caacgcaauccaguuguac

SEQ ID NO: 889360 - RNA, 19 nt, Artificial Sequence
  Description of Artificial Sequence: Synthetic oligonucleotide
auccucgcuucacaguaau

SEQ ID NO: 889361 - RNA, 19 nt, Artificial Sequence
  Description of Artificial Sequence: Synthetic oligonucleotide
gccaggcuuuauuagacca

SEQ ID NO: 889362 - RNA, 19 nt, Artificial Sequence
  Description of Artificial Sequence: Synthetic oligonucleotide
acuacccauuaagaaucug

SEQ ID NO: 889363 - RNA, 19 nt, Artificial Sequence
  Description of Artificial Sequence: Synthetic oligonucleotide
ugaucacgcuuuagucuau

SEQ ID NO: 889364 - RNA, 19 nt, Artificial Sequence
  Description of Artificial Sequence: Synthetic oligonucleotide
auacaggagaggugacuuu

SEQ ID NO: 889365 - RNA, 19 nt, Artificial Sequence
  Description of Artificial Sequence: Synthetic oligonucleotide
caaggauccucgcuucaca

SEQ ID NO: 889366 - RNA, 19 nt, Artificial Sequence
  Description of Artificial Sequence: Synthetic oligonucleotide
ggauccucgcuucacagua

SEQ ID NO: 889367 - RNA, 19 nt, Artificial Sequence
  Description of Artificial Sequence: Synthetic oligonucleotide
cacucauaucucgaggcca

SEQ ID NO: 889368 - RNA, 19 nt, Artificial Sequence
  Description of Artificial Sequence: Synthetic oligonucleotide
cgcaagcgcacgaacaugc

SEQ ID NO: 889369 - RNA, 19 nt, Artificial Sequence
  Description of Artificial Sequence: Synthetic oligonucleotide
ggugauccugcaccaguug

SEQ ID NO: 889370 - RNA, 19 nt, Artificial Sequence
  Description of Artificial Sequence: Synthetic oligonucleotide
gcaauuuuaagcaucucau

SEQ ID NO: 889371 - RNA, 19 nt, Artificial Sequence
  Description of Artificial Sequence: Synthetic oligonucleotide
guucuagguacugugcaua

SEQ ID NO: 889372 - RNA, 19 nt, Artificial Sequence
  Description of Artificial Sequence: Synthetic oligonucleotide
caguugaugcgcgagccca

SEQ ID NO: 889373 - RNA, 19 nt, Artificial Sequence
  Description of Artificial Sequence: Synthetic oligonucleotide
acggcauugccgugcgaga

SEQ ID NO: 889374 - RNA, 19 nt, Artificial Sequence
  Description of Artificial Sequence: Synthetic oligonucleotide
ugccgcauucaggcaacag

SEQ ID NO: 889375 - RNA, 19 nt, Artificial Sequence
  Description of Artificial Sequence: Synthetic oligonucleotide
ucacgccguagcccgagua

SEQ ID NO: 889376 - RNA, 19 nt, Artificial Sequence
  Description of Artificial Sequence: Synthetic oligonucleotide
caguauguuuuccugguau

SEQ ID NO: 889377 - RNA, 19 nt, Artificial Sequence
  Description of Artificial Sequence: Synthetic oligonucleotide
gggaauggaggaugaccgc

SEQ ID NO: 889378 - RNA, 19 nt, Artificial Sequence
  Description of Artificial Sequence: Synthetic oligonucleotide
cugcacacucauaucucga

SEQ ID NO: 889379 - RNA, 19 nt, Artificial Sequence
  Description of Artificial Sequence: Synthetic oligonucleotide
gcaagggagacagacuuga

SEQ ID NO: 889380 - RNA, 19 nt, Artificial Sequence
  Description of Artificial Sequence: Synthetic oligonucleotide
ccgcauucaggcaacagca

SEQ ID NO: 889381 - RNA, 19 nt, Artificial Sequence
  Description of Artificial Sequence: Synthetic oligonucleotide
cuuucgauaucuugucaau

SEQ ID NO: 889382 - RNA, 19 nt, Artificial Sequence
  Description of Artificial Sequence: Synthetic oligonucleotide
gcguccuuuauuccauuac

SEQ ID NO: 889383 - RNA, 19 nt, Artificial Sequence
  Description of Artificial Sequence: Synthetic oligonucleotide
gcauguuaacacaaguuua

SEQ ID NO: 889384 - RNA, 19 nt, Artificial Sequence
  Description of Artificial Sequence: Synthetic oligonucleotide
gguuauugggcaucacugu

SEQ ID NO: 889385 - RNA, 19 nt, Artificial Sequence
  Description of Artificial Sequence: Synthetic oligonucleotide
caguuacacuaacauagcu

SEQ ID NO: 889386 - RNA, 19 nt, Artificial Sequence
  Description of Artificial Sequence: Synthetic oligonucleotide
aucucgaggccagguccac

SEQ ID NO: 889387 - RNA, 19 nt, Artificial Sequence
  Description of Artificial Sequence: Synthetic oligonucleotide
gcuuaggguaauuuuaauu

SEQ ID NO: 889388 - RNA, 19 nt, Artificial Sequence
  Description of Artificial Sequence: Synthetic oligonucleotide
cgaucugaggcuuacagua

SEQ ID NO: 889389 - RNA, 19 nt, Artificial Sequence
  Description of Artificial Sequence: Synthetic oligonucleotide
ccgacaaggaggacuuuac

SEQ ID NO: 889390 - RNA, 19 nt, Artificial Sequence
  Description of Artificial Sequence: Synthetic oligonucleotide
ggccaggcuuuauuagacc

SEQ ID NO: 889391 - RNA, 19 nt, Artificial Sequence
  Description of Artificial Sequence: Synthetic oligonucleotide
gugcacaaugucauugcaa

SEQ ID NO: 889392 - RNA, 19 nt, Artificial Sequence
  Description of Artificial Sequence: Synthetic oligonucleotide
gugugggaaagacuggcau

SEQ ID NO: 889393 - RNA, 19 nt, Artificial Sequence
  Description of Artificial Sequence: Synthetic oligonucleotide
cauaccgggugcgcagcgc

SEQ ID NO: 889394 - RNA, 19 nt, Artificial Sequence
  Description of Artificial Sequence: Synthetic oligonucleotide
ccaugcggcgucgaugucg

SEQ ID NO: 889395 - RNA, 19 nt, Artificial Sequence
  Description of Artificial Sequence: Synthetic oligonucleotide
gccgauguagaagcuacac

SEQ ID NO: 889396 - RNA, 19 nt, Artificial Sequence
  Description of Artificial Sequence: Synthetic oligonucleotide
aaagucggccaggcuuuau

SEQ ID NO: 889397 - RNA, 19 nt, Artificial Sequence
  Description of Artificial Sequence: Synthetic oligonucleotide
gugcgcagcgcuugccaug

SEQ ID NO: 889398 - RNA, 19 nt, Artificial Sequence
  Description of Artificial Sequence: Synthetic oligonucleotide
cuaugucauugugcccagc

SEQ ID NO: 889399 - RNA, 19 nt, Artificial Sequence
  Description of Artificial Sequence: Synthetic oligonucleotide
agcgcuugccaugcggcgu

SEQ ID NO: 889400 - RNA, 19 nt, Artificial Sequence
  Description of Artificial Sequence: Synthetic oligonucleotide
gaagcucgugagauaugaa

SEQ ID NO: 889401 - RNA, 19 nt, Artificial Sequence
  Description of Artificial Sequence: Synthetic oligonucleotide
gcaacacgcaaaccagaca

SEQ ID NO: 889402 - RNA, 19 nt, Artificial Sequence
  Description of Artificial Sequence: Synthetic oligonucleotide
gcaguugaugcgcgagccc

SEQ ID NO: 889403 - RNA, 19 nt, Artificial Sequence
  Description of Artificial Sequence: Synthetic oligonucleotide
ccaugcguccuuuauucca

SEQ ID NO: 889404 - RNA, 19 nt, Artificial Sequence
  Description of Artificial Sequence: Synthetic oligonucleotide
ggaugaccgcugcacacuc

SEQ ID NO: 889405 - RNA, 19 nt, Artificial Sequence
  Description of Artificial Sequence: Synthetic oligonucleotide
gccuaauggaagguggaga

SEQ ID NO: 889406 - RNA, 19 nt, Artificial Sequence
  Description of Artificial Sequence: Synthetic oligonucleotide
caaccaccgugccgcauuc

SEQ ID NO: 889407 - RNA, 19 nt, Artificial Sequence
  Description of Artificial Sequence: Synthetic oligonucleotide
ucucgaggccagguccaca

SEQ ID NO: 889408 - RNA, 19 nt, Artificial Sequence
  Description of Artificial Sequence: Synthetic oligonucleotide
caagaguugggaagcucgu

SEQ ID NO: 889409 - RNA, 19 nt, Artificial Sequence
  Description of Artificial Sequence: Synthetic oligonucleotide
augaauuguuuuagucguu

SEQ ID NO: 889410 - RNA, 19 nt, Artificial Sequence
  Description of Artificial Sequence: Synthetic oligonucleotide
gccaugggagaaaucgaug

SEQ ID NO: 889411 - RNA, 19 nt, Artificial Sequence
  Description of Artificial Sequence: Synthetic oligonucleotide
guaccgugaaugaccaaua

SEQ ID NO: 889412 - RNA, 19 nt, Artificial Sequence
  Description of Artificial Sequence: Synthetic oligonucleotide
gucauacagcugagacucc

SEQ ID NO: 889413 - RNA, 19 nt, Artificial Sequence
  Description of Artificial Sequence: Synthetic oligonucleotide
gaugaccgcugcacacuca

SEQ ID NO: 889414 - RNA, 19 nt, Artificial Sequence
  Description of Artificial Sequence: Synthetic oligonucleotide
auugggcaucacuguuaau

SEQ ID NO: 889415 - RNA, 19 nt, Artificial Sequence
  Description of Artificial Sequence: Synthetic oligonucleotide
caaccaacgcaauccaguu

SEQ ID NO: 889416 - RNA, 19 nt, Artificial Sequence
  Description of Artificial Sequence: Synthetic oligonucleotide
accgugccgcauucaggca

SEQ ID NO: 889417 - RNA, 19 nt, Artificial Sequence
  Description of Artificial Sequence: Synthetic oligonucleotide
agguggagauuaaguacaa

SEQ ID NO: 889418 - RNA, 19 nt, Artificial Sequence
  Description of Artificial Sequence: Synthetic oligonucleotide
cagcguguagcggcuggag

SEQ ID NO: 889419 - RNA, 19 nt, Artificial Sequence
  Description of Artificial Sequence: Synthetic oligonucleotide
gggacagucccaaugcucu

SEQ ID NO: 889420 - RNA, 19 nt, Artificial Sequence
  Description of Artificial Sequence: Synthetic oligonucleotide
ugaccgcugcacacucaua

SEQ ID NO: 889421 - RNA, 19 nt, Artificial Sequence
  Description of Artificial Sequence: Synthetic oligonucleotide
aacuggcaaccaacgcaau

SEQ ID NO: 889422 - RNA, 19 nt, Artificial Sequence
  Description of Artificial Sequence: Synthetic oligonucleotide
ccaccgugccgcauucagg

SEQ ID NO: 889423 - RNA, 19 nt, Artificial Sequence
  Description of Artificial Sequence: Synthetic oligonucleotide
accgggugcgcagcgcuug

SEQ ID NO: 889424 - RNA, 19 nt, Artificial Sequence
  Description of Artificial Sequence: Synthetic oligonucleotide
ggcgucgaugucggcauag

SEQ ID NO: 889425 - RNA, 19 nt, Artificial Sequence
  Description of Artificial Sequence: Synthetic oligonucleotide
gauccucgcuucacaguaa

SEQ ID NO: 889426 - RNA, 19 nt, Artificial Sequence
  Description of Artificial Sequence: Synthetic oligonucleotide
ccgauguagaagcuacaca

SEQ ID NO: 889427 - RNA, 19 nt, Artificial Sequence
  Description of Artificial Sequence: Synthetic oligonucleotide
cacgccguagcccgaguaa

SEQ ID NO: 889428 - RNA, 19 nt, Artificial Sequence
  Description of Artificial Sequence: Synthetic oligonucleotide
acgccguagcccgaguaau

SEQ ID NO: 889429 - RNA, 19 nt, Artificial Sequence
  Description of Artificial Sequence: Synthetic oligonucleotide
cagacuugaucacgcuuua

SEQ ID NO: 889430 - RNA, 19 nt, Artificial Sequence
  Description of Artificial Sequence: Synthetic oligonucleotide
aaccaccgugccgcauuca

SEQ ID NO: 889431 - RNA, 19 nt, Artificial Sequence
  Description of Artificial Sequence: Synthetic oligonucleotide
acgccauaccgggugcgca

SEQ ID NO: 889432 - RNA, 19 nt, Artificial Sequence
  Description of Artificial Sequence: Synthetic oligonucleotide
gcuugccggagcucacgcc

SEQ ID NO: 889433 - RNA, 19 nt, Artificial Sequence
  Description of Artificial Sequence: Synthetic oligonucleotide
augcggcgucgaugucggc

SEQ ID NO: 889434 - RNA, 19 nt, Artificial Sequence
  Description of Artificial Sequence: Synthetic oligonucleotide
gucagcucucauucccacu

SEQ ID NO: 889435 - RNA, 19 nt, Artificial Sequence
  Description of Artificial Sequence: Synthetic oligonucleotide
gcacgaacaugcaccccag

SEQ ID NO: 889436 - RNA, 19 nt, Artificial Sequence
  Description of Artificial Sequence: Synthetic oligonucleotide
cagcacggggacagcgcuc

SEQ ID NO: 889437 - RNA, 19 nt, Artificial Sequence
  Description of Artificial Sequence: Synthetic oligonucleotide
gccugacaaaagaaaacua

SEQ ID NO: 889438 - RNA, 19 nt, Artificial Sequence
  Description of Artificial Sequence: Synthetic oligonucleotide
ccauaccgggugcgcagcg

SEQ ID NO: 889439 - RNA, 19 nt, Artificial Sequence
  Description of Artificial Sequence: Synthetic oligonucleotide
ggcgcgcaagcgcacgaac

SEQ ID NO: 889440 - RNA, 19 nt, Artificial Sequence
  Description of Artificial Sequence: Synthetic oligonucleotide
gggcuugccggagcucacg

SEQ ID NO: 889441 - RNA, 19 nt, Artificial Sequence
  Description of Artificial Sequence: Synthetic oligonucleotide
gggugcgcagcgcuugcca

SEQ ID NO: 889442 - RNA, 19 nt, Artificial Sequence
  Description of Artificial Sequence: Synthetic oligonucleotide
gaaagucggccaggcuuua

SEQ ID NO: 889443 - RNA, 19 nt, Artificial Sequence
  Description of Artificial Sequence: Synthetic oligonucleotide
caacgaucugaggcuuaca

SEQ ID NO: 889444 - RNA, 19 nt, Artificial Sequence
  Description of Artificial Sequence: Synthetic oligonucleotide
guacaacgaucugaggcuu

SEQ ID NO: 889445 - RNA, 19 nt, Artificial Sequence
  Description of Artificial Sequence: Synthetic oligonucleotide
ggaaagucggccaggcuuu

SEQ ID NO: 889446 - RNA, 19 nt, Artificial Sequence
  Description of Artificial Sequence: Synthetic oligonucleotide
ccccucucugugguuauug

SEQ ID NO: 889447 - RNA, 19 nt, Artificial Sequence
  Description of Artificial Sequence: Synthetic oligonucleotide
gggaagcucgugagauaug

SEQ ID NO: 889448 - RNA, 19 nt, Artificial Sequence
  Description of Artificial Sequence: Synthetic oligonucleotide
gcgcaagcgcacgaacaug

SEQ ID NO: 889449 - RNA, 19 nt, Artificial Sequence
  Description of Artificial Sequence: Synthetic oligonucleotide
cgugccgcauucaggcaac

SEQ ID NO: 889450 - RNA, 19 nt, Artificial Sequence
  Description of Artificial Sequence: Synthetic oligonucleotide
gccauaccgggugcgcagc

SEQ ID NO: 889451 - RNA, 19 nt, Artificial Sequence
  Description of Artificial Sequence: Synthetic oligonucleotide
ugcgcgagcccaggccgau

SEQ ID NO: 889452 - RNA, 19 nt, Artificial Sequence
  Description of Artificial Sequence: Synthetic oligonucleotide
gcucacgccguagcccgag

SEQ ID NO: 889453 - RNA, 19 nt, Artificial Sequence
  Description of Artificial Sequence: Synthetic oligonucleotide
ccgcugcacacucauaucu

SEQ ID NO: 889454 - RNA, 19 nt, Artificial Sequence
  Description of Artificial Sequence: Synthetic oligonucleotide
cgccauaccgggugcgcag

SEQ ID NO: 889455 - RNA, 19 nt, Artificial Sequence
  Description of Artificial Sequence: Synthetic oligonucleotide
gccgacaaggaggacuuua

SEQ ID NO: 889456 - RNA, 19 nt, Artificial Sequence
  Description of Artificial Sequence: Synthetic oligonucleotide
gcgcgcaagcgcacgaaca

SEQ ID NO: 889457 - RNA, 19 nt, Artificial Sequence
  Description of Artificial Sequence: Synthetic oligonucleotide
gcaagcgcacgaacaugca

SEQ ID NO: 889458 - RNA, 19 nt, Artificial Sequence
  Description of Artificial Sequence: Synthetic oligonucleotide
gacucacgccauaccgggu

SEQ ID NO: 889459 - RNA, 19 nt, Artificial Sequence
  Description of Artificial Sequence: Synthetic oligonucleotide
gcuacacaucuggcccaag

SEQ ID NO: 889460 - RNA, 19 nt, Artificial Sequence
  Description of Artificial Sequence: Synthetic oligonucleotide
caguaccgugaaugaccaa

SEQ ID NO: 889461 - RNA, 19 nt, Artificial Sequence
  Description of Artificial Sequence: Synthetic oligonucleotide
cacggggacagcgcucaua

SEQ ID NO: 889462 - RNA, 19 nt, Artificial Sequence
  Description of Artificial Sequence: Synthetic oligonucleotide
agcucacgccguagcccga

SEQ ID NO: 889463 - RNA, 19 nt, Artificial Sequence
  Description of Artificial Sequence: Synthetic oligonucleotide
ccgggugcgcagcgcuugc

SEQ ID NO: 889464 - RNA, 19 nt, Artificial Sequence
  Description of Artificial Sequence: Synthetic oligonucleotide
ccuguuguuuaagaauauu

SEQ ID NO: 889465 - RNA, 19 nt, Artificial Sequence
  Description of Artificial Sequence: Synthetic oligonucleotide
ggagggcgcgcaagcgcac

SEQ ID NO: 889466 - RNA, 19 nt, Artificial Sequence
  Description of Artificial Sequence: Synthetic oligonucleotide
cguucuagguacugugcau

SEQ ID NO: 889467 - RNA, 19 nt, Artificial Sequence
  Description of Artificial Sequence: Synthetic oligonucleotide
agccgacaaggaggacuuu

SEQ ID NO: 889468 - RNA, 19 nt, Artificial Sequence
  Description of Artificial Sequence: Synthetic oligonucleotide
gggugauccugcaccaguu

SEQ ID NO: 889469 - RNA, 19 nt, Artificial Sequence
  Description of Artificial Sequence: Synthetic oligonucleotide
ccaacgcaauccaguugua

SEQ ID NO: 889470 - RNA, 19 nt, Artificial Sequence
  Description of Artificial Sequence: Synthetic oligonucleotide
cucacgccguagcccgagu

SEQ ID NO: 889471 - RNA, 19 nt, Artificial Sequence
  Description of Artificial Sequence: Synthetic oligonucleotide
gccaugcggcgucgauguc

SEQ ID NO: 889472 - RNA, 19 nt, Artificial Sequence
  Description of Artificial Sequence: Synthetic oligonucleotide
cgcuuuagucuaugacgcu

SEQ ID NO: 889473 - RNA, 19 nt, Artificial Sequence
  Description of Artificial Sequence: Synthetic oligonucleotide
cgcgcaagcgcacgaacau

SEQ ID NO: 889474 - RNA, 19 nt, Artificial Sequence
  Description of Artificial Sequence: Synthetic oligonucleotide
gggcgcgcaagcgcacgaa

SEQ ID NO: 889475 - RNA, 19 nt, Artificial Sequence
  Description of Artificial Sequence: Synthetic oligonucleotide
cgggugcgcagcgcuugcc

SEQ ID NO: 889476 - RNA, 19 nt, Artificial Sequence
  Description of Artificial Sequence: Synthetic oligonucleotide
cgaugucggcauagagguu

SEQ ID NO: 889477 - RNA, 19 nt, Artificial Sequence
  Description of Artificial Sequence: Synthetic oligonucleotide
gcacggggacagcgcucau

SEQ ID NO: 889478 - RNA, 19 nt, Artificial Sequence
  Description of Artificial Sequence: Synthetic oligonucleotide
gccccucucugugguuauu

SEQ ID NO: 889479 - RNA, 19 nt, Artificial Sequence
  Description of Artificial Sequence: Synthetic oligonucleotide
cggcgucgaugucggcaua

SEQ ID NO: 889480 - RNA, 19 nt, Artificial Sequence
  Description of Artificial Sequence: Synthetic oligonucleotide
uguguguuaaaugugagcg

SEQ ID NO: 889481 - RNA, 19 nt, Artificial Sequence
  Description of Artificial Sequence: Synthetic oligonucleotide
aggacuuuagugcaaaccc

SEQ ID NO: 889482 - RNA, 19 nt, Artificial Sequence
  Description of Artificial Sequence: Synthetic oligonucleotide
uguacauuaacaaccuuag

SEQ ID NO: 889483 - RNA, 19 nt, Artificial Sequence
  Description of Artificial Sequence: Synthetic oligonucleotide
cuuuucaagauuauagcgg

SEQ ID NO: 889484 - RNA, 19 nt, Artificial Sequence
  Description of Artificial Sequence: Synthetic oligonucleotide
aauguaucuaacucuacgu

SEQ ID NO: 889485 - RNA, 19 nt, Artificial Sequence
  Description of Artificial Sequence: Synthetic oligonucleotide
ugagucaugcgacuuaacg

SEQ ID NO: 889486 - RNA, 19 nt, Artificial Sequence
  Description of Artificial Sequence: Synthetic oligonucleotide
aauaaugggguuuuguaau

SEQ ID NO: 889487 - RNA, 19 nt, Artificial Sequence
  Description of Artificial Sequence: Synthetic oligonucleotide
agucaugcgacuuaacgcg

SEQ ID NO: 889488 - RNA, 19 nt, Artificial Sequence
  Description of Artificial Sequence: Synthetic oligonucleotide
ucacucuacuuaaaggugg

SEQ ID NO: 889489 - RNA, 19 nt, Artificial Sequence
  Description of Artificial Sequence: Synthetic oligonucleotide
aucauugagcuccuaacac

SEQ ID NO: 889490 - RNA, 19 nt, Artificial Sequence
  Description of Artificial Sequence: Synthetic oligonucleotide
aaaccggcaaagcaaguuc

SEQ ID NO: 889491 - RNA, 19 nt, Artificial Sequence
  Description of Artificial Sequence: Synthetic oligonucleotide
uuuucaagauuauagcggu

SEQ ID NO: 889492 - RNA, 19 nt, Artificial Sequence
  Description of Artificial Sequence: Synthetic oligonucleotide
uaugaaaccggcaaagcaa

SEQ ID NO: 889493 - RNA, 19 nt, Artificial Sequence
  Description of Artificial Sequence: Synthetic oligonucleotide
aaucauugagcuccuaaca

SEQ ID NO: 889494 - RNA, 19 nt, Artificial Sequence
  Description of Artificial Sequence: Synthetic oligonucleotide
uguaucuaacucuacguca

SEQ ID NO: 889495 - RNA, 19 nt, Artificial Sequence
  Description of Artificial Sequence: Synthetic oligonucleotide
gucaucgggagccugaugg

SEQ ID NO: 889496 - RNA, 19 nt, Artificial Sequence
  Description of Artificial Sequence: Synthetic oligonucleotide
uaguagaguaucuucgucc

SEQ ID NO: 889497 - RNA, 19 nt, Artificial Sequence
  Description of Artificial Sequence: Synthetic oligonucleotide
aagggauaaugccagcaag

SEQ ID NO: 889498 - RNA, 19 nt, Artificial Sequence
  Description of Artificial Sequence: Synthetic oligonucleotide
agucaggugucccugacgg

SEQ ID NO: 889499 - RNA, 19 nt, Artificial Sequence
  Description of Artificial Sequence: Synthetic oligonucleotide
ucgugugagaccuuggcag

SEQ ID NO: 889500 - RNA, 19 nt, Artificial Sequence
  Description of Artificial Sequence: Synthetic oligonucleotide
auaugaaaccggcaaagca

SEQ ID NO: 889501 - RNA, 19 nt, Artificial Sequence
  Description of Artificial Sequence: Synthetic oligonucleotide
auaguagaguaucuucguc

SEQ ID NO: 889502 - RNA, 19 nt, Artificial Sequence
  Description of Artificial Sequence: Synthetic oligonucleotide
ucggaaaccgggauuagca

SEQ ID NO: 889503 - RNA, 19 nt, Artificial Sequence
  Description of Artificial Sequence: Synthetic oligonucleotide
ugucccuaaauggagauga

SEQ ID NO: 889504 - RNA, 19 nt, Artificial Sequence
  Description of Artificial Sequence: Synthetic oligonucleotide
aaaccgaagccugauuagg

SEQ ID NO: 889505 - RNA, 19 nt, Artificial Sequence
  Description of Artificial Sequence: Synthetic oligonucleotide
aaugugagcgggaauucuc

SEQ ID NO: 889506 - RNA, 19 nt, Artificial Sequence
  Description of Artificial Sequence: Synthetic oligonucleotide
ucuacgucaguuuuauauc

SEQ ID NO: 889507 - RNA, 19 nt, Artificial Sequence
  Description of Artificial Sequence: Synthetic oligonucleotide
agggauaaugccagcaagc

SEQ ID NO: 889508 - RNA, 19 nt, Artificial Sequence
  Description of Artificial Sequence: Synthetic oligonucleotide
ucccugacggcauacagga

SEQ ID NO: 889509 - RNA, 19 nt, Artificial Sequence
  Description of Artificial Sequence: Synthetic oligonucleotide
uuuaccauuuggucuguac

SEQ ID NO: 889510 - RNA, 19 nt, Artificial Sequence
  Description of Artificial Sequence: Synthetic oligonucleotide
auuauagcggugacucucc

SEQ ID NO: 889511 - RNA, 19 nt, Artificial Sequence
  Description of Artificial Sequence: Synthetic oligonucleotide
gacauuaccagguggaacu

SEQ ID NO: 889512 - RNA, 19 nt, Artificial Sequence
  Description of Artificial Sequence: Synthetic oligonucleotide
auagcaauaaccacauaca

SEQ ID NO: 889513 - RNA, 19 nt, Artificial Sequence
  Description of Artificial Sequence: Synthetic oligonucleotide
acauuuuagucaggugucc

SEQ ID NO: 889514 - RNA, 19 nt, Artificial Sequence
  Description of Artificial Sequence: Synthetic oligonucleotide
acucguucguuuuggccgc

SEQ ID NO: 889515 - RNA, 19 nt, Artificial Sequence
  Description of Artificial Sequence: Synthetic oligonucleotide
guaucuaacucuacgucag

SEQ ID NO: 889516 - RNA, 19 nt, Artificial Sequence
  Description of Artificial Sequence: Synthetic oligonucleotide
agcuagacucgugugagac

SEQ ID NO: 889517 - RNA, 19 nt, Artificial Sequence
  Description of Artificial Sequence: Synthetic oligonucleotide
acaaccuuagcaucuagua

SEQ ID NO: 889518 - RNA, 19 nt, Artificial Sequence
  Description of Artificial Sequence: Synthetic oligonucleotide
cauuguguguuaaauguga

SEQ ID NO: 889519 - RNA, 19 nt, Artificial Sequence
  Description of Artificial Sequence: Synthetic oligonucleotide
auuaggugaacaaacugga

SEQ ID NO: 889520 - RNA, 19 nt, Artificial Sequence
  Description of Artificial Sequence: Synthetic oligonucleotide
uucguuuuggccgccgccg

SEQ ID NO: 889521 - RNA, 19 nt, Artificial Sequence
  Description of Artificial Sequence: Synthetic oligonucleotide
guguguuaaaugugagcgg

SEQ ID NO: 889522 - RNA, 19 nt, Artificial Sequence
  Description of Artificial Sequence: Synthetic oligonucleotide
uauaucauuguguguuaaa

SEQ ID NO: 889523 - RNA, 19 nt, Artificial Sequence
  Description of Artificial Sequence: Synthetic oligonucleotide
ucuccguccgccgagacca

SEQ ID NO: 889524 - RNA, 19 nt, Artificial Sequence
  Description of Artificial Sequence: Synthetic oligonucleotide
uuagaguauuaaagucagc

SEQ ID NO: 889525 - RNA, 19 nt, Artificial Sequence
  Description of Artificial Sequence: Synthetic oligonucleotide
auaucauuguguguuaaau

SEQ ID NO: 889526 - RNA, 19 nt, Artificial Sequence
  Description of Artificial Sequence: Synthetic oligonucleotide
uuucaagauuauagcggug

SEQ ID NO: 889527 - RNA, 19 nt, Artificial Sequence
  Description of Artificial Sequence: Synthetic oligonucleotide
uaacgcgcugcugagcugg

SEQ ID NO: 889528 - RNA, 19 nt, Artificial Sequence
  Description of Artificial Sequence: Synthetic oligonucleotide
gaagcuccgucggaaaccg

SEQ ID NO: 889529 - RNA, 19 nt, Artificial Sequence
  Description of Artificial Sequence: Synthetic oligonucleotide
cacucuacuuaaagguggg

SEQ ID NO: 889530 - RNA, 19 nt, Artificial Sequence
  Description of Artificial Sequence: Synthetic oligonucleotide
aaccgggauuagcaucucg

SEQ ID NO: 889531 - RNA, 19 nt, Artificial Sequence
  Description of Artificial Sequence: Synthetic oligonucleotide
uagaguaucuucguccgcu

SEQ ID NO: 889532 - RNA, 19 nt, Artificial Sequence
  Description of Artificial Sequence: Synthetic oligonucleotide
ccugauuaggugaacaaac

SEQ ID NO: 889533 - RNA, 19 nt, Artificial Sequence
  Description of Artificial Sequence: Synthetic oligonucleotide
agcauguacaacuucugua

SEQ ID NO: 889534 - RNA, 19 nt, Artificial Sequence
  Description of Artificial Sequence: Synthetic oligonucleotide
ucuaacucuacgucaguuu

SEQ ID NO: 889535 - RNA, 19 nt, Artificial Sequence
  Description of Artificial Sequence: Synthetic oligonucleotide
guuaugcaaauaaagaggu

SEQ ID NO: 889536 - RNA, 19 nt, Artificial Sequence
  Description of Artificial Sequence: Synthetic oligonucleotide
aaguaaaucccagcugaga

SEQ ID NO: 889537 - RNA, 19 nt, Artificial Sequence
  Description of Artificial Sequence: Synthetic oligonucleotide
ugauggguggcgcucgcgc

SEQ ID NO: 889538 - RNA, 19 nt, Artificial Sequence
  Description of Artificial Sequence: Synthetic oligonucleotide
caguagcaaagccucgucg

SEQ ID NO: 889539 - RNA, 19 nt, Artificial Sequence
  Description of Artificial Sequence: Synthetic oligonucleotide
aaaugugagcgggaauucu

SEQ ID NO: 889540 - RNA, 19 nt, Artificial Sequence
  Description of Artificial Sequence: Synthetic oligonucleotide
uuaggugaacaaacuggaa

SEQ ID NO: 889541 - RNA, 19 nt, Artificial Sequence
  Description of Artificial Sequence: Synthetic oligonucleotide
auacccaaucauugagcuc

SEQ ID NO: 889542 - RNA, 19 nt, Artificial Sequence
  Description of Artificial Sequence: Synthetic oligonucleotide
cuacgucaguuuuauauca

SEQ ID NO: 889543 - RNA, 19 nt, Artificial Sequence
  Description of Artificial Sequence: Synthetic oligonucleotide
augaaaccggcaaagcaag

SEQ ID NO: 889544 - RNA, 19 nt, Artificial Sequence
  Description of Artificial Sequence: Synthetic oligonucleotide
gguagcaaaugcuagcauc

SEQ ID NO: 889545 - RNA, 19 nt, Artificial Sequence
  Description of Artificial Sequence: Synthetic oligonucleotide
aacaaccuuagcaucuagu

SEQ ID NO: 889546 - RNA, 19 nt, Artificial Sequence
  Description of Artificial Sequence: Synthetic oligonucleotide
gauggguggcgcucgcgcg

SEQ ID NO: 889547 - RNA, 19 nt, Artificial Sequence
  Description of Artificial Sequence: Synthetic oligonucleotide
uauagcggugacucucccc

SEQ ID NO: 889548 - RNA, 19 nt, Artificial Sequence
  Description of Artificial Sequence: Synthetic oligonucleotide
uggggaucccauccuaaca

SEQ ID NO: 889549 - RNA, 19 nt, Artificial Sequence
  Description of Artificial Sequence: Synthetic oligonucleotide
gacuuaacgcgcugcugag

SEQ ID NO: 889550 - RNA, 19 nt, Artificial Sequence
  Description of Artificial Sequence: Synthetic oligonucleotide
gggcaauuggaacaaauuc

SEQ ID NO: 889551 - RNA, 19 nt, Artificial Sequence
  Description of Artificial Sequence: Synthetic oligonucleotide
agcaagcuagacucgugug

SEQ ID NO: 889552 - RNA, 19 nt, Artificial Sequence
  Description of Artificial Sequence: Synthetic oligonucleotide
aaaucacucuuaccauaau

SEQ ID NO: 889553 - RNA, 19 nt, Artificial Sequence
  Description of Artificial Sequence: Synthetic oligonucleotide
uucgcggcacaguagggcu

SEQ ID NO: 889554 - RNA, 19 nt, Artificial Sequence
  Description of Artificial Sequence: Synthetic oligonucleotide
uccgugucggugucgucgg

SEQ ID NO: 889555 - RNA, 19 nt, Artificial Sequence
  Description of Artificial Sequence: Synthetic oligonucleotide
agcaaaugcuagcaucuaa

SEQ ID NO: 889556 - RNA, 19 nt, Artificial Sequence
  Description of Artificial Sequence: Synthetic oligonucleotide
ggugucgucggacuccacg

SEQ ID NO: 889557 - RNA, 19 nt, Artificial Sequence
  Description of Artificial Sequence: Synthetic oligonucleotide
uuauagcggugacucuccc

SEQ ID NO: 889558 - RNA, 19 nt, Artificial Sequence
  Description of Artificial Sequence: Synthetic oligonucleotide
ugcgacuuaacgcgcugcu

SEQ ID NO: 889559 - RNA, 19 nt, Artificial Sequence
  Description of Artificial Sequence: Synthetic oligonucleotide
ucucguccacugcucaccc

SEQ ID NO: 889560 - RNA, 19 nt, Artificial Sequence
  Description of Artificial Sequence: Synthetic oligonucleotide
caucucgacgucgucgucg

SEQ ID NO: 889561 - RNA, 19 nt, Artificial Sequence
  Description of Artificial Sequence: Synthetic oligonucleotide
ugcucaccccguuaucgag

SEQ ID NO: 889562 - RNA, 19 nt, Artificial Sequence
  Description of Artificial Sequence: Synthetic oligonucleotide
acuuaacgcgcugcugagc

SEQ ID NO: 889563 - RNA, 19 nt, Artificial Sequence
  Description of Artificial Sequence: Synthetic oligonucleotide
auaaugggguuuuguaauu

SEQ ID NO: 889564 - RNA, 19 nt, Artificial Sequence
  Description of Artificial Sequence: Synthetic oligonucleotide
aaccggcaaagcaaguuca

SEQ ID NO: 889565 - RNA, 19 nt, Artificial Sequence
  Description of Artificial Sequence: Synthetic oligonucleotide
cucgggacgaccucgucuc

SEQ ID NO: 889566 - RNA, 19 nt, Artificial Sequence
  Description of Artificial Sequence: Synthetic oligonucleotide
auuagcaucucgacgucgu

SEQ ID NO: 889567 - RNA, 19 nt, Artificial Sequence
  Description of Artificial Sequence: Synthetic oligonucleotide
agcuccgucggaaaccggg

SEQ ID NO: 889568 - RNA, 19 nt, Artificial Sequence
  Description of Artificial Sequence: Synthetic oligonucleotide
gaaaccgggauuagcaucu

SEQ ID NO: 889569 - RNA, 19 nt, Artificial Sequence
  Description of Artificial Sequence: Synthetic oligonucleotide
acucgggacgaccucgucu

SEQ ID NO: 889570 - RNA, 19 nt, Artificial Sequence
  Description of Artificial Sequence: Synthetic oligonucleotide
ugccagcaagcuagacucg

SEQ ID NO: 889571 - RNA, 19 nt, Artificial Sequence
  Description of Artificial Sequence: Synthetic oligonucleotide
cuagcaucuaaagggauaa

SEQ ID NO: 889572 - RNA, 19 nt, Artificial Sequence
  Description of Artificial Sequence: Synthetic oligonucleotide
ucgucacucguucguuuug

SEQ ID NO: 889573 - RNA, 19 nt, Artificial Sequence
  Description of Artificial Sequence: Synthetic oligonucleotide
augcgacuuaacgcgcugc

SEQ ID NO: 889574 - RNA, 19 nt, Artificial Sequence
  Description of Artificial Sequence: Synthetic oligonucleotide
uccgguaucugcgcggugu

SEQ ID NO: 889575 - RNA, 19 nt, Artificial Sequence
  Description of Artificial Sequence: Synthetic oligonucleotide
cuucguccgcuuaauucug

SEQ ID NO: 889576 - RNA, 19 nt, Artificial Sequence
  Description of Artificial Sequence: Synthetic oligonucleotide
uccgcuuaauucugucccu

SEQ ID NO: 889577 - RNA, 19 nt, Artificial Sequence
  Description of Artificial Sequence: Synthetic oligonucleotide
cugacucgggacgaccucg

SEQ ID NO: 889578 - RNA, 19 nt, Artificial Sequence
  Description of Artificial Sequence: Synthetic oligonucleotide
aagcuagacucgugugaga

SEQ ID NO: 889579 - RNA, 19 nt, Artificial Sequence
  Description of Artificial Sequence: Synthetic oligonucleotide
agccugauuaggugaacaa

SEQ ID NO: 889580 - RNA, 19 nt, Artificial Sequence
  Description of Artificial Sequence: Synthetic oligonucleotide
agcgggaauucucuucccu

SEQ ID NO: 889581 - RNA, 19 nt, Artificial Sequence
  Description of Artificial Sequence: Synthetic oligonucleotide
acucuacuuaaaggugggg

SEQ ID NO: 889582 - RNA, 19 nt, Artificial Sequence
  Description of Artificial Sequence: Synthetic oligonucleotide
gcucgcgcgaccuagugug

SEQ ID NO: 889583 - RNA, 19 nt, Artificial Sequence
  Description of Artificial Sequence: Synthetic oligonucleotide
guguccgguaucugcgcgg

SEQ ID NO: 889584 - RNA, 19 nt, Artificial Sequence
  Description of Artificial Sequence: Synthetic oligonucleotide
ugucgucggacuccacgga

SEQ ID NO: 889585 - RNA, 19 nt, Artificial Sequence
  Description of Artificial Sequence: Synthetic oligonucleotide
ggaaaccgggauuagcauc

SEQ ID NO: 889586 - RNA, 19 nt, Artificial Sequence
  Description of Artificial Sequence: Synthetic oligonucleotide
cccacgguggcguucacgg

SEQ ID NO: 889587 - RNA, 19 nt, Artificial Sequence
  Description of Artificial Sequence: Synthetic oligonucleotide
guagaguaucuucguccgc

SEQ ID NO: 889588 - RNA, 19 nt, Artificial Sequence
  Description of Artificial Sequence: Synthetic oligonucleotide
cuuaacgcgcugcugagcu

SEQ ID NO: 889589 - RNA, 19 nt, Artificial Sequence
  Description of Artificial Sequence: Synthetic oligonucleotide
cacggcgagccucagguuc

SEQ ID NO: 889590 - RNA, 19 nt, Artificial Sequence
  Description of Artificial Sequence: Synthetic oligonucleotide
uuagcaucucgacgucguc

SEQ ID NO: 889591 - RNA, 19 nt, Artificial Sequence
  Description of Artificial Sequence: Synthetic oligonucleotide
ucguuuuggccgccgccgc

SEQ ID NO: 889592 - RNA, 19 nt, Artificial Sequence
  Description of Artificial Sequence: Synthetic oligonucleotide
uggcguucacggcugcgug

SEQ ID NO: 889593 - RNA, 19 nt, Artificial Sequence
  Description of Artificial Sequence: Synthetic oligonucleotide
cuggggaucccauccuaac

SEQ ID NO: 889594 - RNA, 19 nt, Artificial Sequence
  Description of Artificial Sequence: Synthetic oligonucleotide
guagggcugucuaaacccc

SEQ ID NO: 889595 - RNA, 19 nt, Artificial Sequence
  Description of Artificial Sequence: Synthetic oligonucleotide
ucugacucgggacgaccuc

SEQ ID NO: 889596 - RNA, 19 nt, Artificial Sequence
  Description of Artificial Sequence: Synthetic oligonucleotide
aucucgacgucgucgucgu

SEQ ID NO: 889597 - RNA, 19 nt, Artificial Sequence
  Description of Artificial Sequence: Synthetic oligonucleotide
cauaguagaguaucuucgu

SEQ ID NO: 889598 - RNA, 19 nt, Artificial Sequence
  Description of Artificial Sequence: Synthetic oligonucleotide
gccucuaagcaaguguccg

SEQ ID NO: 889599 - RNA, 19 nt, Artificial Sequence
  Description of Artificial Sequence: Synthetic oligonucleotide
uucguccgcuuaauucugu

SEQ ID NO: 889600 - RNA, 19 nt, Artificial Sequence
  Description of Artificial Sequence: Synthetic oligonucleotide
uuaacgcgcugcugagcug

SEQ ID NO: 889601 - RNA, 19 nt, Artificial Sequence
  Description of Artificial Sequence: Synthetic oligonucleotide
aggcccugagucaugcgac

SEQ ID NO: 889602 - RNA, 19 nt, Artificial Sequence
  Description of Artificial Sequence: Synthetic oligonucleotide
ggcaauuggaacaaauucu

SEQ ID NO: 889603 - RNA, 19 nt, Artificial Sequence
  Description of Artificial Sequence: Synthetic oligonucleotide
accgggauuagcaucucga

SEQ ID NO: 889604 - RNA, 19 nt, Artificial Sequence
  Description of Artificial Sequence: Synthetic oligonucleotide
uaucuucguccgcuuaauu

SEQ ID NO: 889605 - RNA, 19 nt, Artificial Sequence
  Description of Artificial Sequence: Synthetic oligonucleotide
guucgcggcacaguagggc

SEQ ID NO: 889606 - RNA, 19 nt, Artificial Sequence
  Description of Artificial Sequence: Synthetic oligonucleotide
aaaccgggauuagcaucuc

SEQ ID NO: 889607 - RNA, 19 nt, Artificial Sequence
  Description of Artificial Sequence: Synthetic oligonucleotide
aggugauuauguggguuug

SEQ ID NO: 889608 - RNA, 19 nt, Artificial Sequence
  Description of Artificial Sequence: Synthetic oligonucleotide
gucuaaaccccugcccuug

SEQ ID NO: 889609 - RNA, 19 nt, Artificial Sequence
  Description of Artificial Sequence: Synthetic oligonucleotide
guuaccggcucugcccgcg

SEQ ID NO: 889610 - RNA, 19 nt, Artificial Sequence
  Description of Artificial Sequence: Synthetic oligonucleotide
agaggugauuauguggguu

SEQ ID NO: 889611 - RNA, 19 nt, Artificial Sequence
  Description of Artificial Sequence: Synthetic oligonucleotide
caaaccccuguacuggaga

SEQ ID NO: 889612 - RNA, 19 nt, Artificial Sequence
  Description of Artificial Sequence: Synthetic oligonucleotide
caugcgacuuaacgcgcug

SEQ ID NO: 889613 - RNA, 19 nt, Artificial Sequence
  Description of Artificial Sequence: Synthetic oligonucleotide
uccgucggaaaccgggauu

SEQ ID NO: 889614 - RNA, 19 nt, Artificial Sequence
  Description of Artificial Sequence: Synthetic oligonucleotide
ugucggugucgucggacuc

SEQ ID NO: 889615 - RNA, 19 nt, Artificial Sequence
  Description of Artificial Sequence: Synthetic oligonucleotide
ugacucgggacgaccucgu

SEQ ID NO: 889616 - RNA, 19 nt, Artificial Sequence
  Description of Artificial Sequence: Synthetic oligonucleotide
cucgugugagaccuuggca

SEQ ID NO: 889617 - RNA, 19 nt, Artificial Sequence
  Description of Artificial Sequence: Synthetic oligonucleotide
augugagcgggaauucucu

SEQ ID NO: 889618 - RNA, 19 nt, Artificial Sequence
  Description of Artificial Sequence: Synthetic oligonucleotide
aucugcgcggugugcacca

SEQ ID NO: 889619 - RNA, 19 nt, Artificial Sequence
  Description of Artificial Sequence: Synthetic oligonucleotide
gcugagagcgcacggcgag

SEQ ID NO: 889620 - RNA, 19 nt, Artificial Sequence
  Description of Artificial Sequence: Synthetic oligonucleotide
ucguccgcuuaauucuguc

SEQ ID NO: 889621 - RNA, 19 nt, Artificial Sequence
  Description of Artificial Sequence: Synthetic oligonucleotide
cuaacucuacgucaguuuu

SEQ ID NO: 889622 - RNA, 19 nt, Artificial Sequence
  Description of Artificial Sequence: Synthetic oligonucleotide
ucuuaccauaaugcaguuu

SEQ ID NO: 889623 - RNA, 19 nt, Artificial Sequence
  Description of Artificial Sequence: Synthetic oligonucleotide
gagcgggaauucucuuccc

SEQ ID NO: 889624 - RNA, 19 nt, Artificial Sequence
  Description of Artificial Sequence: Synthetic oligonucleotide
gcgguuaccggcucugccc

SEQ ID NO: 889625 - RNA, 19 nt, Artificial Sequence
  Description of Artificial Sequence: Synthetic oligonucleotide
ggugaaggcgacuccuuuc

SEQ ID NO: 889626 - RNA, 19 nt, Artificial Sequence
  Description of Artificial Sequence: Synthetic oligonucleotide
agaguaucuucguccgcuu

SEQ ID NO: 889627 - RNA, 19 nt, Artificial Sequence
  Description of Artificial Sequence: Synthetic oligonucleotide
uguccgguaucugcgcggu

SEQ ID NO: 889628 - RNA, 19 nt, Artificial Sequence
  Description of Artificial Sequence: Synthetic oligonucleotide
cucgucuccguccgccgag

SEQ ID NO: 889629 - RNA, 19 nt, Artificial Sequence
  Description of Artificial Sequence: Synthetic oligonucleotide
gucggugucgucggacucc

SEQ ID NO: 889630 - RNA, 19 nt, Artificial Sequence
  Description of Artificial Sequence: Synthetic oligonucleotide
cugagucaugcgacuuaac

SEQ ID NO: 889631 - RNA, 19 nt, Artificial Sequence
  Description of Artificial Sequence: Synthetic oligonucleotide
ggggccgucgcgguuaccg

SEQ ID NO: 889632 - RNA, 19 nt, Artificial Sequence
  Description of Artificial Sequence: Synthetic oligonucleotide
cgggauuagcaucucgacg

SEQ ID NO: 889633 - RNA, 19 nt, Artificial Sequence
  Description of Artificial Sequence: Synthetic oligonucleotide
gcuagacucgugugagacc

SEQ ID NO: 889634 - RNA, 19 nt, Artificial Sequence
  Description of Artificial Sequence: Synthetic oligonucleotide
ucguucguuuuggccgccg

SEQ ID NO: 889635 - RNA, 19 nt, Artificial Sequence
  Description of Artificial Sequence: Synthetic oligonucleotide
auggguggcgcucgcgcga

SEQ ID NO: 889636 - RNA, 19 nt, Artificial Sequence
  Description of Artificial Sequence: Synthetic oligonucleotide
ggcguucacggcugcgugg

SEQ ID NO: 889637 - RNA, 19 nt, Artificial Sequence
  Description of Artificial Sequence: Synthetic oligonucleotide
ccaacgaccccgaguggcg

SEQ ID NO: 889638 - RNA, 19 nt, Artificial Sequence
  Description of Artificial Sequence: Synthetic oligonucleotide
ucgcgcgaccuagugugag

SEQ ID NO: 889639 - RNA, 19 nt, Artificial Sequence
  Description of Artificial Sequence: Synthetic oligonucleotide
gggauuaagcccugagcaa

SEQ ID NO: 889640 - RNA, 19 nt, Artificial Sequence
  Description of Artificial Sequence: Synthetic oligonucleotide
gacggcauacaggacagau

SEQ ID NO: 889641 - RNA, 19 nt, Artificial Sequence
  Description of Artificial Sequence: Synthetic oligonucleotide
cgugugagaccuuggcagg

SEQ ID NO: 889642 - RNA, 19 nt, Artificial Sequence
  Description of Artificial Sequence: Synthetic oligonucleotide
caaccuuagcaucuaguau

SEQ ID NO: 889643 - RNA, 19 nt, Artificial Sequence
  Description of Artificial Sequence: Synthetic oligonucleotide
ccgaguggcgcgaucuugc

SEQ ID NO: 889644 - RNA, 19 nt, Artificial Sequence
  Description of Artificial Sequence: Synthetic oligonucleotide
ccgccucuaagcaaguguc

SEQ ID NO: 889645 - RNA, 19 nt, Artificial Sequence
  Description of Artificial Sequence: Synthetic oligonucleotide
ucgggacgaccucgucucc

SEQ ID NO: 889646 - RNA, 19 nt, Artificial Sequence
  Description of Artificial Sequence: Synthetic oligonucleotide
agggcugucuaaaccccug

SEQ ID NO: 889647 - RNA, 19 nt, Artificial Sequence
  Description of Artificial Sequence: Synthetic oligonucleotide
guguuaaaugugagcggga

SEQ ID NO: 889648 - RNA, 19 nt, Artificial Sequence
  Description of Artificial Sequence: Synthetic oligonucleotide
gcguucacggcugcguggg

SEQ ID NO: 889649 - RNA, 19 nt, Artificial Sequence
  Description of Artificial Sequence: Synthetic oligonucleotide
cugauggguggcgcucgcg

SEQ ID NO: 889650 - RNA, 19 nt, Artificial Sequence
  Description of Artificial Sequence: Synthetic oligonucleotide
caacgaccccgaguggcgc

SEQ ID NO: 889651 - RNA, 19 nt, Artificial Sequence
  Description of Artificial Sequence: Synthetic oligonucleotide
gcgaccuagugugagccgc

SEQ ID NO: 889652 - RNA, 19 nt, Artificial Sequence
  Description of Artificial Sequence: Synthetic oligonucleotide
ccaaucauugagcuccuaa

SEQ ID NO: 889653 - RNA, 19 nt, Artificial Sequence
  Description of Artificial Sequence: Synthetic oligonucleotide
cucuaagcaaguguccggu

SEQ ID NO: 889654 - RNA, 19 nt, Artificial Sequence
  Description of Artificial Sequence: Synthetic oligonucleotide
gccgccgccucuaagcaag

SEQ ID NO: 889655 - RNA, 19 nt, Artificial Sequence
  Description of Artificial Sequence: Synthetic oligonucleotide
gaccuagugugagccgcac

SEQ ID NO: 889656 - RNA, 19 nt, Artificial Sequence
  Description of Artificial Sequence: Synthetic oligonucleotide
gggcugucuaaaccccugc

SEQ ID NO: 889657 - RNA, 19 nt, Artificial Sequence
  Description of Artificial Sequence: Synthetic oligonucleotide
gucgcgguuaccggcucug

SEQ ID NO: 889658 - RNA, 19 nt, Artificial Sequence
  Description of Artificial Sequence: Synthetic oligonucleotide
gcaauuggaacaaauucuu

SEQ ID NO: 889659 - RNA, 19 nt, Artificial Sequence
  Description of Artificial Sequence: Synthetic oligonucleotide
ccauccuaacacaguagca

SEQ ID NO: 889660 - RNA, 19 nt, Artificial Sequence
  Description of Artificial Sequence: Synthetic oligonucleotide
ggauuaagcccugagcaau

SEQ ID NO: 889661 - RNA, 19 nt, Artificial Sequence
  Description of Artificial Sequence: Synthetic oligonucleotide
cucaccccguuaucgagcu

SEQ ID NO: 889662 - RNA, 19 nt, Artificial Sequence
  Description of Artificial Sequence: Synthetic oligonucleotide
ggucugacucgggacgacc

SEQ ID NO: 889663 - RNA, 19 nt, Artificial Sequence
  Description of Artificial Sequence: Synthetic oligonucleotide
cgacuuaacgcgcugcuga

SEQ ID NO: 889664 - RNA, 19 nt, Artificial Sequence
  Description of Artificial Sequence: Synthetic oligonucleotide
cuagugugagccgcaccca

SEQ ID NO: 889665 - RNA, 19 nt, Artificial Sequence
  Description of Artificial Sequence: Synthetic oligonucleotide
acggcauacaggacagaua

SEQ ID NO: 889666 - RNA, 19 nt, Artificial Sequence
  Description of Artificial Sequence: Synthetic oligonucleotide
ucgucgucacucguucguu

SEQ ID NO: 889667 - RNA, 19 nt, Artificial Sequence
  Description of Artificial Sequence: Synthetic oligonucleotide
acggcgagccucagguucu

SEQ ID NO: 889668 - RNA, 19 nt, Artificial Sequence
  Description of Artificial Sequence: Synthetic oligonucleotide
gcgcgaccuagugugagcc

SEQ ID NO: 889669 - RNA, 19 nt, Artificial Sequence
  Description of Artificial Sequence: Synthetic oligonucleotide
cucgucgucacucguucgu

SEQ ID NO: 889670 - RNA, 19 nt, Artificial Sequence
  Description of Artificial Sequence: Synthetic oligonucleotide
gccucgucgucacucguuc

SEQ ID NO: 889671 - RNA, 19 nt, Artificial Sequence
  Description of Artificial Sequence: Synthetic oligonucleotide
gacucgggacgaccucguc

SEQ ID NO: 889672 - RNA, 19 nt, Artificial Sequence
  Description of Artificial Sequence: Synthetic oligonucleotide
gcucaccccguuaucgagc

SEQ ID NO: 889673 - RNA, 19 nt, Artificial Sequence
  Description of Artificial Sequence: Synthetic oligonucleotide
cgguuaccggcucugcccg

SEQ ID NO: 889674 - RNA, 19 nt, Artificial Sequence
  Description of Artificial Sequence: Synthetic oligonucleotide
ggacuuuagugcaaacccu

SEQ ID NO: 889675 - RNA, 19 nt, Artificial Sequence
  Description of Artificial Sequence: Synthetic oligonucleotide
gccugauuaggugaacaaa

SEQ ID NO: 889676 - RNA, 19 nt, Artificial Sequence
  Description of Artificial Sequence: Synthetic oligonucleotide
accggcaaagcaaguucaa

SEQ ID NO: 889677 - RNA, 19 nt, Artificial Sequence
  Description of Artificial Sequence: Synthetic oligonucleotide
ccucgucgucacucguucg

SEQ ID NO: 889678 - RNA, 19 nt, Artificial Sequence
  Description of Artificial Sequence: Synthetic oligonucleotide
uggcgcgaucuugcgaaau

SEQ ID NO: 889679 - RNA, 19 nt, Artificial Sequence
  Description of Artificial Sequence: Synthetic oligonucleotide
ucgcgguuaccggcucugc

SEQ ID NO: 889680 - RNA, 19 nt, Artificial Sequence
  Description of Artificial Sequence: Synthetic oligonucleotide
ccggcaaagcaaguucaag

SEQ ID NO: 889681 - RNA, 19 nt, Artificial Sequence
  Description of Artificial Sequence: Synthetic oligonucleotide
cugcgcggugugcaccaug

SEQ ID NO: 889682 - RNA, 19 nt, Artificial Sequence
  Description of Artificial Sequence: Synthetic oligonucleotide
gcgaucuugcgaaauuaaa

SEQ ID NO: 889683 - RNA, 19 nt, Artificial Sequence
  Description of Artificial Sequence: Synthetic oligonucleotide
caucgggagccugauggaa

SEQ ID NO: 889684 - RNA, 19 nt, Artificial Sequence
  Description of Artificial Sequence: Synthetic oligonucleotide
gggccgucgcgguuaccgg

SEQ ID NO: 889685 - RNA, 19 nt, Artificial Sequence
  Description of Artificial Sequence: Synthetic oligonucleotide
gguggcguucacggcugcg

SEQ ID NO: 889686 - RNA, 19 nt, Artificial Sequence
  Description of Artificial Sequence: Synthetic oligonucleotide
ccguccgccgagaccaaag

SEQ ID NO: 889687 - RNA, 19 nt, Artificial Sequence
  Description of Artificial Sequence: Synthetic oligonucleotide
cauuaccagguggaacuua

SEQ ID NO: 889688 - RNA, 19 nt, Artificial Sequence
  Description of Artificial Sequence: Synthetic oligonucleotide
uggguggcgcucgcgcgac

SEQ ID NO: 889689 - RNA, 19 nt, Artificial Sequence
  Description of Artificial Sequence: Synthetic oligonucleotide
gucgucacucguucguuuu

SEQ ID NO: 889690 - RNA, 19 nt, Artificial Sequence
  Description of Artificial Sequence: Synthetic oligonucleotide
gcgacuuaacgcgcugcug

SEQ ID NO: 889691 - RNA, 19 nt, Artificial Sequence
  Description of Artificial Sequence: Synthetic oligonucleotide
gccgccucuaagcaagugu

SEQ ID NO: 889692 - RNA, 19 nt, Artificial Sequence
  Description of Artificial Sequence: Synthetic oligonucleotide
guaucuucguccgcuuaau

SEQ ID NO: 889693 - RNA, 19 nt, Artificial Sequence
  Description of Artificial Sequence: Synthetic oligonucleotide
cucguucguuuuggccgcc

SEQ ID NO: 889694 - RNA, 19 nt, Artificial Sequence
  Description of Artificial Sequence: Synthetic oligonucleotide
gucugacucgggacgaccu

SEQ ID NO: 889695 - RNA, 19 nt, Artificial Sequence
  Description of Artificial Sequence: Synthetic oligonucleotide
gagccugauggaaguaaau

SEQ ID NO: 889696 - RNA, 19 nt, Artificial Sequence
  Description of Artificial Sequence: Synthetic oligonucleotide
cgaguggcgcgaucuugcg

SEQ ID NO: 889697 - RNA, 19 nt, Artificial Sequence
  Description of Artificial Sequence: Synthetic oligonucleotide
gguuaccggcucugcccgc

SEQ ID NO: 889698 - RNA, 19 nt, Artificial Sequence
  Description of Artificial Sequence: Synthetic oligonucleotide
guaucccuccucuccguuu

SEQ ID NO: 889699 - RNA, 19 nt, Artificial Sequence
  Description of Artificial Sequence: Synthetic oligonucleotide
gucccuaaauggagaugaa

SEQ ID NO: 889700 - RNA, 19 nt, Artificial Sequence
  Description of Artificial Sequence: Synthetic oligonucleotide
guccgguaucugcgcggug

SEQ ID NO: 889701 - RNA, 19 nt, Artificial Sequence
  Description of Artificial Sequence: Synthetic oligonucleotide
cucgcgcgaccuaguguga

SEQ ID NO: 889702 - RNA, 19 nt, Artificial Sequence
  Description of Artificial Sequence: Synthetic oligonucleotide
cggcaaagcaaguucaagu

SEQ ID NO: 889703 - RNA, 19 nt, Artificial Sequence
  Description of Artificial Sequence: Synthetic oligonucleotide
cucugcccgcggguucgcg

SEQ ID NO: 889704 - RNA, 19 nt, Artificial Sequence
  Description of Artificial Sequence: Synthetic oligonucleotide
gcggguucgcggcacagua

SEQ ID NO: 889705 - RNA, 19 nt, Artificial Sequence
  Description of Artificial Sequence: Synthetic oligonucleotide
cguucguuuuggccgccgc

SEQ ID NO: 889706 - RNA, 19 nt, Artificial Sequence
  Description of Artificial Sequence: Synthetic oligonucleotide
uccguccgccgagaccaaa

SEQ ID NO: 889707 - RNA, 19 nt, Artificial Sequence
  Description of Artificial Sequence: Synthetic oligonucleotide
gaccccgaguggcgcgauc

SEQ ID NO: 889708 - RNA, 19 nt, Artificial Sequence
  Description of Artificial Sequence: Synthetic oligonucleotide
ggggcaauuggaacaaauu

SEQ ID NO: 889709 - RNA, 19 nt, Artificial Sequence
  Description of Artificial Sequence: Synthetic oligonucleotide
cgcgguuaccggcucugcc

SEQ ID NO: 889710 - RNA, 19 nt, Artificial Sequence
  Description of Artificial Sequence: Synthetic oligonucleotide
caggggccgucgcgguuac

SEQ ID NO: 889711 - RNA, 19 nt, Artificial Sequence
  Description of Artificial Sequence: Synthetic oligonucleotide
cgcgaccuagugugagccg

SEQ ID NO: 889712 - RNA, 19 nt, Artificial Sequence
  Description of Artificial Sequence: Synthetic oligonucleotide
cguuuuggccgccgccgcc

SEQ ID NO: 889713 - RNA, 19 nt, Artificial Sequence
  Description of Artificial Sequence: Synthetic oligonucleotide
gcgcucgcgcgaccuagug

SEQ ID NO: 889714 - RNA, 19 nt, Artificial Sequence
  Description of Artificial Sequence: Synthetic oligonucleotide
guggcgcgaucuugcgaaa

SEQ ID NO: 889715 - RNA, 19 nt, Artificial Sequence
  Description of Artificial Sequence: Synthetic oligonucleotide
cgcgcgaccuagugugagc

SEQ ID NO: 889716 - RNA, 19 nt, Artificial Sequence
  Description of Artificial Sequence: Synthetic oligonucleotide
gcuccgucggaaaccggga

SEQ ID NO: 889717 - RNA, 19 nt, Artificial Sequence
  Description of Artificial Sequence: Synthetic oligonucleotide
aggggccgucgcgguuacc

SEQ ID NO: 889718 - RNA, 19 nt, Artificial Sequence
  Description of Artificial Sequence: Synthetic oligonucleotide
cccgaguggcgcgaucuug

SEQ ID NO: 889719 - RNA, 19 nt, Artificial Sequence
  Description of Artificial Sequence: Synthetic oligonucleotide
ugcccacgguggcguucac

SEQ ID NO: 889720 - RNA, 19 nt, Artificial Sequence
  Description of Artificial Sequence: Synthetic oligonucleotide
cggguucgcggcacaguag

SEQ ID NO: 889721 - RNA, 19 nt, Artificial Sequence
  Description of Artificial Sequence: Synthetic oligonucleotide
gcgcgaucuugcgaaauua

SEQ ID NO: 889722 - RNA, 19 nt, Artificial Sequence
  Description of Artificial Sequence: Synthetic oligonucleotide
ccgccgagaccaaagccaa

SEQ ID NO: 889723 - RNA, 19 nt, Artificial Sequence
  Description of Artificial Sequence: Synthetic oligonucleotide
ccgucggaaaccgggauua

SEQ ID NO: 889724 - RNA, 19 nt, Artificial Sequence
  Description of Artificial Sequence: Synthetic oligonucleotide
gcgcggugugcaccaugcc

SEQ ID NO: 889725 - RNA, 19 nt, Artificial Sequence
  Description of Artificial Sequence: Synthetic oligonucleotide
ggcgcgaucuugcgaaauu

SEQ ID NO: 889726 - RNA, 19 nt, Artificial Sequence
  Description of Artificial Sequence: Synthetic oligonucleotide
cgggacgaccucgucuccg

SEQ ID NO: 889727 - RNA, 19 nt, Artificial Sequence
  Description of Artificial Sequence: Synthetic oligonucleotide
cuccgucggaaaccgggau

SEQ ID NO: 889728 - RNA, 19 nt, Artificial Sequence
  Description of Artificial Sequence: Synthetic oligonucleotide
cccugacggcauacaggac

SEQ ID NO: 889729 - RNA, 19 nt, Artificial Sequence
  Description of Artificial Sequence: Synthetic oligonucleotide
cgcacggcgagccucaggu

SEQ ID NO: 889730 - RNA, 19 nt, Artificial Sequence
  Description of Artificial Sequence: Synthetic oligonucleotide
ccgcuggucugacucggga

SEQ ID NO: 889731 - RNA, 19 nt, Artificial Sequence
  Description of Artificial Sequence: Synthetic oligonucleotide
gguggcgcucgcgcgaccu

SEQ ID NO: 889732 - RNA, 19 nt, Artificial Sequence
  Description of Artificial Sequence: Synthetic oligonucleotide
cgucaucgggagccugaug

SEQ ID NO: 889733 - RNA, 19 nt, Artificial Sequence
  Description of Artificial Sequence: Synthetic oligonucleotide
cgaccuagugugagccgca

SEQ ID NO: 889734 - RNA, 19 nt, Artificial Sequence
  Description of Artificial Sequence: Synthetic oligonucleotide
cgucggaaaccgggauuag

SEQ ID NO: 889735 - RNA, 19 nt, Artificial Sequence
  Description of Artificial Sequence: Synthetic oligonucleotide
cgccgagaccaaagccaac

SEQ ID NO: 889736 - RNA, 19 nt, Artificial Sequence
  Description of Artificial Sequence: Synthetic oligonucleotide
cuccguccgccgagaccaa

SEQ ID NO: 889737 - RNA, 19 nt, Artificial Sequence
  Description of Artificial Sequence: Synthetic oligonucleotide
cggaaaccgggauuagcau

SEQ ID NO: 889738 - RNA, 19 nt, Artificial Sequence
  Description of Artificial Sequence: Synthetic oligonucleotide
cgguggcguucacggcugc

SEQ ID NO: 889739 - RNA, 19 nt, Artificial Sequence
  Description of Artificial Sequence: Synthetic oligonucleotide
cgucgucacucguucguuu

SEQ ID NO: 889740 - RNA, 19 nt, Artificial Sequence
  Description of Artificial Sequence: Synthetic oligonucleotide
gcacggcgagccucagguu

SEQ ID NO: 889741 - RNA, 19 nt, Artificial Sequence
  Description of Artificial Sequence: Synthetic oligonucleotide
ccgugucggugucgucgga

SEQ ID NO: 889742 - RNA, 19 nt, Artificial Sequence
  Description of Artificial Sequence: Synthetic oligonucleotide
cccaaucauugagcuccua

SEQ ID NO: 889743 - RNA, 19 nt, Artificial Sequence
  Description of Artificial Sequence: Synthetic oligonucleotide
cgcucgcgcgaccuagugu

SEQ ID NO: 889744 - RNA, 19 nt, Artificial Sequence
  Description of Artificial Sequence: Synthetic oligonucleotide
cggugucgucggacuccac

SEQ ID NO: 889745 - RNA, 19 nt, Artificial Sequence
  Description of Artificial Sequence: Synthetic oligonucleotide
cggugaaggcgacuccuuu

SEQ ID NO: 889746 - RNA, 19 nt, Artificial Sequence
  Description of Artificial Sequence: Synthetic oligonucleotide
cagcccgcucccgccguau

SEQ ID NO: 889747 - RNA, 19 nt, Artificial Sequence
  Description of Artificial Sequence: Synthetic oligonucleotide
ccccguuaucgagcugucu

SEQ ID NO: 889748 - RNA, 19 nt, Artificial Sequence
  Description of Artificial Sequence: Synthetic oligonucleotide
ccgucaucgggagccugau

SEQ ID NO: 889749 - RNA, 19 nt, Artificial Sequence
  Description of Artificial Sequence: Synthetic oligonucleotide
cgucgcgguuaccggcucu

SEQ ID NO: 889750 - RNA, 19 nt, Artificial Sequence
  Description of Artificial Sequence: Synthetic oligonucleotide
ccccgaguggcgcgaucuu

SEQ ID NO: 889751 - RNA, 19 nt, Artificial Sequence
  Description of Artificial Sequence: Synthetic oligonucleotide
cgaccccgaguggcgcgau

SEQ ID NO: 889752 - RNA, 19 nt, Artificial Sequence
  Description of Artificial Sequence: Synthetic oligonucleotide
ucaaugaaaagauuuaagg

SEQ ID NO: 889753 - RNA, 19 nt, Artificial Sequence
  Description of Artificial Sequence: Synthetic oligonucleotide
auuagcaacacuuuccucc

SEQ ID NO: 889754 - RNA, 19 nt, Artificial Sequence
  Description of Artificial Sequence: Synthetic oligonucleotide
auaaguaggucuuaguuac

SEQ ID NO: 889755 - RNA, 19 nt, Artificial Sequence
  Description of Artificial Sequence: Synthetic oligonucleotide
gauacauuaaacuagcuga

SEQ ID NO: 889756 - RNA, 19 nt, Artificial Sequence
  Description of Artificial Sequence: Synthetic oligonucleotide
aaaacuacauauuuguaca

SEQ ID NO: 889757 - RNA, 19 nt, Artificial Sequence
  Description of Artificial Sequence: Synthetic oligonucleotide
aacugcauaucacacuucc

SEQ ID NO: 889758 - RNA, 19 nt, Artificial Sequence
  Description of Artificial Sequence: Synthetic oligonucleotide
aaguacuaaaauugagacc

SEQ ID NO: 889759 - RNA, 19 nt, Artificial Sequence
  Description of Artificial Sequence: Synthetic oligonucleotide
uugaauacaaugacaagag

SEQ ID NO: 889760 - RNA, 19 nt, Artificial Sequence
  Description of Artificial Sequence: Synthetic oligonucleotide
aacucaaguguaccgaggc

SEQ ID NO: 889761 - RNA, 19 nt, Artificial Sequence
  Description of Artificial Sequence: Synthetic oligonucleotide
uauguuacuagauacauua

SEQ ID NO: 889762 - RNA, 19 nt, Artificial Sequence
  Description of Artificial Sequence: Synthetic oligonucleotide
ucuuauaaaccacagcuga

SEQ ID NO: 889763 - RNA, 19 nt, Artificial Sequence
  Description of Artificial Sequence: Synthetic oligonucleotide
uuaaugcuaaauuagaaua

SEQ ID NO: 889764 - RNA, 19 nt, Artificial Sequence
  Description of Artificial Sequence: Synthetic oligonucleotide
ucacaaaccaguaguaggg

SEQ ID NO: 889765 - RNA, 19 nt, Artificial Sequence
  Description of Artificial Sequence: Synthetic oligonucleotide
uuaaacuuuaagaacugca

SEQ ID NO: 889766 - RNA, 19 nt, Artificial Sequence
  Description of Artificial Sequence: Synthetic oligonucleotide
cauguauucaucacaaacc

SEQ ID NO: 889767 - RNA, 19 nt, Artificial Sequence
  Description of Artificial Sequence: Synthetic oligonucleotide
uccaccaacauuaaucugc

SEQ ID NO: 889768 - RNA, 19 nt, Artificial Sequence
  Description of Artificial Sequence: Synthetic oligonucleotide
ucagauaugaaccccucag

SEQ ID NO: 889769 - RNA, 19 nt, Artificial Sequence
  Description of Artificial Sequence: Synthetic oligonucleotide
uaugauauuggccaacuuc

SEQ ID NO: 889770 - RNA, 19 nt, Artificial Sequence
  Description of Artificial Sequence: Synthetic oligonucleotide
guaacuuuaacauuuggga

SEQ ID NO: 889771 - RNA, 19 nt, Artificial Sequence
  Description of Artificial Sequence: Synthetic oligonucleotide
aguaggggacccuauauac

SEQ ID NO: 889772 - RNA, 19 nt, Artificial Sequence
  Description of Artificial Sequence: Synthetic oligonucleotide
uuauauguucaucugcagc

SEQ ID NO: 889773 - RNA, 19 nt, Artificial Sequence
  Description of Artificial Sequence: Synthetic oligonucleotide
uaaccuaagaaaaguauac

SEQ ID NO: 889774 - RNA, 19 nt, Artificial Sequence
  Description of Artificial Sequence: Synthetic oligonucleotide
ugauagaaaacuacaguga

SEQ ID NO: 889775 - RNA, 19 nt, Artificial Sequence
  Description of Artificial Sequence: Synthetic oligonucleotide
aaauuaaacugcauaucac

SEQ ID NO: 889776 - RNA, 19 nt, Artificial Sequence
  Description of Artificial Sequence: Synthetic oligonucleotide
ucagcaguaacuuuaacau

SEQ ID NO: 889777 - RNA, 19 nt, Artificial Sequence
  Description of Artificial Sequence: Synthetic oligonucleotide
cuaacucagacuaugguac

SEQ ID NO: 889778 - RNA, 19 nt, Artificial Sequence
  Description of Artificial Sequence: Synthetic oligonucleotide
gaugaaucauuguucaagc

SEQ ID NO: 889779 - RNA, 19 nt, Artificial Sequence
  Description of Artificial Sequence: Synthetic oligonucleotide
auaugaaccccucagauaa

SEQ ID NO: 889780 - RNA, 19 nt, Artificial Sequence
  Description of Artificial Sequence: Synthetic oligonucleotide
ugucgaugcagcuugauga

SEQ ID NO: 889781 - RNA, 19 nt, Artificial Sequence
  Description of Artificial Sequence: Synthetic oligonucleotide
uaaacuuuaagaacugcaa

SEQ ID NO: 889782 - RNA, 19 nt, Artificial Sequence
  Description of Artificial Sequence: Synthetic oligonucleotide
guucuauguugucagaugg

SEQ ID NO: 889783 - RNA, 19 nt, Artificial Sequence
  Description of Artificial Sequence: Synthetic oligonucleotide
ugucauuuaauaaaaccau

SEQ ID NO: 889784 - RNA, 19 nt, Artificial Sequence
  Description of Artificial Sequence: Synthetic oligonucleotide
aguaacuuuaacauuuggg

SEQ ID NO: 889785 - RNA, 19 nt, Artificial Sequence
  Description of Artificial Sequence: Synthetic oligonucleotide
auuaaugcuaaauuagaau

SEQ ID NO: 889786 - RNA, 19 nt, Artificial Sequence
  Description of Artificial Sequence: Synthetic oligonucleotide
uguguuuguaaauuacccc

SEQ ID NO: 889787 - RNA, 19 nt, Artificial Sequence
  Description of Artificial Sequence: Synthetic oligonucleotide
acuagauacauuaaacuag

SEQ ID NO: 889788 - RNA, 19 nt, Artificial Sequence
  Description of Artificial Sequence: Synthetic oligonucleotide
aaaguaagagccacucagc

SEQ ID NO: 889789 - RNA, 19 nt, Artificial Sequence
  Description of Artificial Sequence: Synthetic oligonucleotide
  modified_base (5)..(5): a, c, u, g, unknown or other
uuguncaggggucugagga

SEQ ID NO: 889790 - RNA, 19 nt, Artificial Sequence
  Description of Artificial Sequence: Synthetic oligonucleotide
auaaaauugaguugccaca

SEQ ID NO: 889791 - RNA, 19 nt, Artificial Sequence
  Description of Artificial Sequence: Synthetic oligonucleotide
uuucagcuaacucagacua

SEQ ID NO: 889792 - RNA, 19 nt, Artificial Sequence
  Description of Artificial Sequence: Synthetic oligonucleotide
uagaaaguacuaaaauuga

SEQ ID NO: 889793 - RNA, 19 nt, Artificial Sequence
  Description of Artificial Sequence: Synthetic oligonucleotide
agugacaguacaaagugac

SEQ ID NO: 889794 - RNA, 19 nt, Artificial Sequence
  Description of Artificial Sequence: Synthetic oligonucleotide
auaaauguagggucagguc

SEQ ID NO: 889795 - RNA, 19 nt, Artificial Sequence
  Description of Artificial Sequence: Synthetic oligonucleotide
uuuccuaccauaauucaaa

SEQ ID NO: 889796 - RNA, 19 nt, Artificial Sequence
  Description of Artificial Sequence: Synthetic oligonucleotide
aagagauauuacuaccucu

SEQ ID NO: 889797 - RNA, 19 nt, Artificial Sequence
  Description of Artificial Sequence: Synthetic oligonucleotide
uuagaauacagugacagua

SEQ ID NO: 889798 - RNA, 19 nt, Artificial Sequence
  Description of Artificial Sequence: Synthetic oligonucleotide
uaaggaaacaucgauuucu

SEQ ID NO: 889799 - RNA, 19 nt, Artificial Sequence
  Description of Artificial Sequence: Synthetic oligonucleotide
cauuuuacaaugcuucgag

SEQ ID NO: 889800 - RNA, 19 nt, Artificial Sequence
  Description of Artificial Sequence: Synthetic oligonucleotide
aauggauuuuggaauggac

SEQ ID NO: 889801 - RNA, 19 nt, Artificial Sequence
  Description of Artificial Sequence: Synthetic oligonucleotide
auacaauaguuuauguggc

SEQ ID NO: 889802 - RNA, 19 nt, Artificial Sequence
  Description of Artificial Sequence: Synthetic oligonucleotide
uuauaaaccacagcugagc

SEQ ID NO: 889803 - RNA, 19 nt, Artificial Sequence
  Description of Artificial Sequence: Synthetic oligonucleotide
aaaccaguaguaggggacc

SEQ ID NO: 889804 - RNA, 19 nt, Artificial Sequence
  Description of Artificial Sequence: Synthetic oligonucleotide
aaagguacagcugucacaa

SEQ ID NO: 889805 - RNA, 19 nt, Artificial Sequence
  Description of Artificial Sequence: Synthetic oligonucleotide
agaaagguacagcugucac

SEQ ID NO: 889806 - RNA, 19 nt, Artificial Sequence
  Description of Artificial Sequence: Synthetic oligonucleotide
uauuaacuuuaugauauug

SEQ ID NO: 889807 - RNA, 19 nt, Artificial Sequence
  Description of Artificial Sequence: Synthetic oligonucleotide
aaaguauccuguuugugua

SEQ ID NO: 889808 - RNA, 19 nt, Artificial Sequence
  Description of Artificial Sequence: Synthetic oligonucleotide
guuacuagauacauuaaac

SEQ ID NO: 889809 - RNA, 19 nt, Artificial Sequence
  Description of Artificial Sequence: Synthetic oligonucleotide
uuauguggcauaaguaggu

SEQ ID NO: 889810 - RNA, 19 nt, Artificial Sequence
  Description of Artificial Sequence: Synthetic oligonucleotide
cuuggugccaauucuuccg

SEQ ID NO: 889811 - RNA, 19 nt, Artificial Sequence
  Description of Artificial Sequence: Synthetic oligonucleotide
ucuuuaauauccccugccu

SEQ ID NO: 889812 - RNA, 19 nt, Artificial Sequence
  Description of Artificial Sequence: Synthetic oligonucleotide
uaaucugcccuaaaacuac

SEQ ID NO: 889813 - RNA, 19 nt, Artificial Sequence
  Description of Artificial Sequence: Synthetic oligonucleotide
ucaacuuggugccaauucu

SEQ ID NO: 889814 - RNA, 19 nt, Artificial Sequence
  Description of Artificial Sequence: Synthetic oligonucleotide
aauuccacggagccccuuc

SEQ ID NO: 889815 - RNA, 19 nt, Artificial Sequence
  Description of Artificial Sequence: Synthetic oligonucleotide
uuaaacugcauaucacacu

SEQ ID NO: 889816 - RNA, 19 nt, Artificial Sequence
  Description of Artificial Sequence: Synthetic oligonucleotide
gaauucacaguuugucugc

SEQ ID NO: 889817 - RNA, 19 nt, Artificial Sequence
  Description of Artificial Sequence: Synthetic oligonucleotide
uaugccuaauuccugacua

SEQ ID NO: 889818 - RNA, 19 nt, Artificial Sequence
  Description of Artificial Sequence: Synthetic oligonucleotide
augaacgaaaucccgaggu

SEQ ID NO: 889819 - RNA, 19 nt, Artificial Sequence
  Description of Artificial Sequence: Synthetic oligonucleotide
gucacacuaauucuucggg

SEQ ID NO: 889820 - RNA, 19 nt, Artificial Sequence
  Description of Artificial Sequence: Synthetic oligonucleotide
auaauugugacaaaucaau

SEQ ID NO: 889821 - RNA, 19 nt, Artificial Sequence
  Description of Artificial Sequence: Synthetic oligonucleotide
ucgauuucuuuuauaauua

SEQ ID NO: 889822 - RNA, 19 nt, Artificial Sequence
  Description of Artificial Sequence: Synthetic oligonucleotide
uuugucugcauaaacugua

SEQ ID NO: 889823 - RNA, 19 nt, Artificial Sequence
  Description of Artificial Sequence: Synthetic oligonucleotide
aaguaucacccucaacuug

SEQ ID NO: 889824 - RNA, 19 nt, Artificial Sequence
  Description of Artificial Sequence: Synthetic oligonucleotide
gacccuauauacuguaagc

SEQ ID NO: 889825 - RNA, 19 nt, Artificial Sequence
  Description of Artificial Sequence: Synthetic oligonucleotide
accuaagaaaaguauacaa

SEQ ID NO: 889826 - RNA, 19 nt, Artificial Sequence
  Description of Artificial Sequence: Synthetic oligonucleotide
uggcuauucuauauuuucc

SEQ ID NO: 889827 - RNA, 19 nt, Artificial Sequence
  Description of Artificial Sequence: Synthetic oligonucleotide
uauguugucagauggugau

SEQ ID NO: 889828 - RNA, 19 nt, Artificial Sequence
  Description of Artificial Sequence: Synthetic oligonucleotide
ucuauguugucagauggug

SEQ ID NO: 889829 - RNA, 19 nt, Artificial Sequence
  Description of Artificial Sequence: Synthetic oligonucleotide
cuuauaaaccacagcugag

SEQ ID NO: 889830 - RNA, 19 nt, Artificial Sequence
  Description of Artificial Sequence: Synthetic oligonucleotide
uaggggacccuauauacug

SEQ ID NO: 889831 - RNA, 19 nt, Artificial Sequence
  Description of Artificial Sequence: Synthetic oligonucleotide
auaauccucaucucggggu

SEQ ID NO: 889832 - RNA, 19 nt, Artificial Sequence
  Description of Artificial Sequence: Synthetic oligonucleotide
ucugccgacauuaaugcua

SEQ ID NO: 889833 - RNA, 19 nt, Artificial Sequence
  Description of Artificial Sequence: Synthetic oligonucleotide
aaucccgaggucuccuuuc

SEQ ID NO: 889834 - RNA, 19 nt, Artificial Sequence
  Description of Artificial Sequence: Synthetic oligonucleotide
ugagugcucaaguaucacc

SEQ ID NO: 889835 - RNA, 19 nt, Artificial Sequence
  Description of Artificial Sequence: Synthetic oligonucleotide
acauucacugugcuacugg

SEQ ID NO: 889836 - RNA, 19 nt, Artificial Sequence
  Description of Artificial Sequence: Synthetic oligonucleotide
agagucagauaugaacccc

SEQ ID NO: 889837 - RNA, 19 nt, Artificial Sequence
  Description of Artificial Sequence: Synthetic oligonucleotide
uuaccagugucgaugcagc

SEQ ID NO: 889838 - RNA, 19 nt, Artificial Sequence
  Description of Artificial Sequence: Synthetic oligonucleotide
uuaaacuagcugauagaaa

SEQ ID NO: 889839 - RNA, 19 nt, Artificial Sequence
  Description of Artificial Sequence: Synthetic oligonucleotide
cacuuauauguucaucugc

SEQ ID NO: 889840 - RNA, 19 nt, Artificial Sequence
  Description of Artificial Sequence: Synthetic oligonucleotide
agauaugaaccccucagau

SEQ ID NO: 889841 - RNA, 19 nt, Artificial Sequence
  Description of Artificial Sequence: Synthetic oligonucleotide
gagugcucaaguaucaccc

SEQ ID NO: 889842 - RNA, 19 nt, Artificial Sequence
  Description of Artificial Sequence: Synthetic oligonucleotide
cacaauuccacggagcccc

SEQ ID NO: 889843 - RNA, 19 nt, Artificial Sequence
  Description of Artificial Sequence: Synthetic oligonucleotide
ucuauguuacuagauacau

SEQ ID NO: 889844 - RNA, 19 nt, Artificial Sequence
  Description of Artificial Sequence: Synthetic oligonucleotide
auucuuccgaacucaagug

SEQ ID NO: 889845 - RNA, 19 nt, Artificial Sequence
  Description of Artificial Sequence: Synthetic oligonucleotide
agcgauucagugcagggug

SEQ ID NO: 889846 - RNA, 19 nt, Artificial Sequence
  Description of Artificial Sequence: Synthetic oligonucleotide
uggauuuuggaauggacuu

SEQ ID NO: 889847 - RNA, 19 nt, Artificial Sequence
  Description of Artificial Sequence: Synthetic oligonucleotide
cuuugaauacaaugacaag

SEQ ID NO: 889848 - RNA, 19 nt, Artificial Sequence
  Description of Artificial Sequence: Synthetic oligonucleotide
agagauauuacuaccucug

SEQ ID NO: 889849 - RNA, 19 nt, Artificial Sequence
  Description of Artificial Sequence: Synthetic oligonucleotide
gaaacaucgauuucuuuua

SEQ ID NO: 889850 - RNA, 19 nt, Artificial Sequence
  Description of Artificial Sequence: Synthetic oligonucleotide
  modified_base (4)..(4): a, c, u, g, unknown or other
uguncaggggucugaggag

SEQ ID NO: 889851 - RNA, 19 nt, Artificial Sequence
  Description of Artificial Sequence: Synthetic oligonucleotide
uggaagucacacuaauucu

SEQ ID NO: 889852 - RNA, 19 nt, Artificial Sequence
  Description of Artificial Sequence: Synthetic oligonucleotide
aaaacuacagugaguuaug

SEQ ID NO: 889853 - RNA, 19 nt, Artificial Sequence
  Description of Artificial Sequence: Synthetic oligonucleotide
uuuacaaugcuucgagguu

SEQ ID NO: 889854 - RNA, 19 nt, Artificial Sequence
  Description of Artificial Sequence: Synthetic oligonucleotide
agaaaguacuaaaauugag

SEQ ID NO: 889855 - RNA, 19 nt, Artificial Sequence
  Description of Artificial Sequence: Synthetic oligonucleotide
agaaaaguauacaauaguu

SEQ ID NO: 889856 - RNA, 19 nt, Artificial Sequence
  Description of Artificial Sequence: Synthetic oligonucleotide
ugaauacaaugacaagagu

SEQ ID NO: 889857 - RNA, 19 nt, Artificial Sequence
  Description of Artificial Sequence: Synthetic oligonucleotide
augauauuggccaacuuca

SEQ ID NO: 889858 - RNA, 19 nt, Artificial Sequence
  Description of Artificial Sequence: Synthetic oligonucleotide
uuagcaacacuuuccucca

SEQ ID NO: 889859 - RNA, 19 nt, Artificial Sequence
  Description of Artificial Sequence: Synthetic oligonucleotide
augggauucauggacaucu

SEQ ID NO: 889860 - RNA, 19 nt, Artificial Sequence
  Description of Artificial Sequence: Synthetic oligonucleotide
caaaccaguaguaggggac

SEQ ID NO: 889861 - RNA, 19 nt, Artificial Sequence
  Description of Artificial Sequence: Synthetic oligonucleotide
cuuauauguucaucugcag

SEQ ID NO: 889862 - RNA, 19 nt, Artificial Sequence
  Description of Artificial Sequence: Synthetic oligonucleotide
ucacauuuuaaaguauccu

SEQ ID NO: 889863 - RNA, 19 nt, Artificial Sequence
  Description of Artificial Sequence: Synthetic oligonucleotide
agcuugaugaaucauuguu

SEQ ID NO: 889864 - RNA, 19 nt, Artificial Sequence
  Description of Artificial Sequence: Synthetic oligonucleotide
acauuaaucugcccuaaaa

SEQ ID NO: 889865 - RNA, 19 nt, Artificial Sequence
  Description of Artificial Sequence: Synthetic oligonucleotide
acuuauauguucaucugca

SEQ ID NO: 889866 - RNA, 19 nt, Artificial Sequence
  Description of Artificial Sequence: Synthetic oligonucleotide
cauaauccucaucucgggg

SEQ ID NO: 889867 - RNA, 19 nt, Artificial Sequence
  Description of Artificial Sequence: Synthetic oligonucleotide
uuaaaguauccuguuugug

SEQ ID NO: 889868 - RNA, 19 nt, Artificial Sequence
  Description of Artificial Sequence: Synthetic oligonucleotide
uucuuccgaacucaagugu

SEQ ID NO: 889869 - RNA, 19 nt, Artificial Sequence
  Description of Artificial Sequence: Synthetic oligonucleotide
gacaagagugcuuucuaca

SEQ ID NO: 889870 - RNA, 19 nt, Artificial Sequence
  Description of Artificial Sequence: Synthetic oligonucleotide
uucgguggaacaacugggc

SEQ ID NO: 889871 - RNA, 19 nt, Artificial Sequence
  Description of Artificial Sequence: Synthetic oligonucleotide
acagcgauucagugcaggg

SEQ ID NO: 889872 - RNA, 19 nt, Artificial Sequence
  Description of Artificial Sequence: Synthetic oligonucleotide
gauaauugugacaaaucaa

SEQ ID NO: 889873 - RNA, 19 nt, Artificial Sequence
  Description of Artificial Sequence: Synthetic oligonucleotide
cagauaauugugacaaauc

SEQ ID NO: 889874 - RNA, 19 nt, Artificial Sequence
  Description of Artificial Sequence: Synthetic oligonucleotide
aaguaggucuuaguuacca

SEQ ID NO: 889875 - RNA, 19 nt, Artificial Sequence
  Description of Artificial Sequence: Synthetic oligonucleotide
ugcaugggauucauggaca

SEQ ID NO: 889876 - RNA, 19 nt, Artificial Sequence
  Description of Artificial Sequence: Synthetic oligonucleotide
ugcucaaguaucacccuca

SEQ ID NO: 889877 - RNA, 19 nt, Artificial Sequence
  Description of Artificial Sequence: Synthetic oligonucleotide
ggucuauguuacuagauac

SEQ ID NO: 889878 - RNA, 19 nt, Artificial Sequence
  Description of Artificial Sequence: Synthetic oligonucleotide
agauauuacuaccucugau

SEQ ID NO: 889879 - RNA, 19 nt, Artificial Sequence
  Description of Artificial Sequence: Synthetic oligonucleotide
uggcauacauucacugugc

SEQ ID NO: 889880 - RNA, 19 nt, Artificial Sequence
  Description of Artificial Sequence: Synthetic oligonucleotide
aacugguauuaacuuuaug

SEQ ID NO: 889881 - RNA, 19 nt, Artificial Sequence
  Description of Artificial Sequence: Synthetic oligonucleotide
cucacagcgauucagugca

SEQ ID NO: 889882 - RNA, 19 nt, Artificial Sequence
  Description of Artificial Sequence: Synthetic oligonucleotide
aacgaaaucccgaggucuc

SEQ ID NO: 889883 - RNA, 19 nt, Artificial Sequence
  Description of Artificial Sequence: Synthetic oligonucleotide
agaaugucauuuaauaaaa

SEQ ID NO: 889884 - RNA, 19 nt, Artificial Sequence
  Description of Artificial Sequence: Synthetic oligonucleotide
ggcaauauucuuugaauac

SEQ ID NO: 889885 - RNA, 19 nt, Artificial Sequence
  Description of Artificial Sequence: Synthetic oligonucleotide
ucaggucuauguuacuaga

SEQ ID NO: 889886 - RNA, 19 nt, Artificial Sequence
  Description of Artificial Sequence: Synthetic oligonucleotide
cauuaaugcuaaauuagaa

SEQ ID NO: 889887 - RNA, 19 nt, Artificial Sequence
  Description of Artificial Sequence: Synthetic oligonucleotide
ggcuauucuauauuuuccc

SEQ ID NO: 889888 - RNA, 19 nt, Artificial Sequence
  Description of Artificial Sequence: Synthetic oligonucleotide
acauuaaugcuaaauuaga

SEQ ID NO: 889889 - RNA, 19 nt, Artificial Sequence
  Description of Artificial Sequence: Synthetic oligonucleotide
agcaguaacuuuaacauuu

SEQ ID NO: 889890 - RNA, 19 nt, Artificial Sequence
  Description of Artificial Sequence: Synthetic oligonucleotide
ucagaaaguaagagccacu

SEQ ID NO: 889891 - RNA, 19 nt, Artificial Sequence
  Description of Artificial Sequence: Synthetic oligonucleotide
cuagaucaggaucaguuca

SEQ ID NO: 889892 - RNA, 19 nt, Artificial Sequence
  Description of Artificial Sequence: Synthetic oligonucleotide
ugaaccccucagauaauug

SEQ ID NO: 889893 - RNA, 19 nt, Artificial Sequence
  Description of Artificial Sequence: Synthetic oligonucleotide
uacuaaaauugagaccagc

SEQ ID NO: 889894 - RNA, 19 nt, Artificial Sequence
  Description of Artificial Sequence: Synthetic oligonucleotide
uccuaccauaauucaaaug

SEQ ID NO: 889895 - RNA, 19 nt, Artificial Sequence
  Description of Artificial Sequence: Synthetic oligonucleotide
ggcugguuaacacaugugc

SEQ ID NO: 889896 - RNA, 19 nt, Artificial Sequence
  Description of Artificial Sequence: Synthetic oligonucleotide
caugauaugccuaauuccu

SEQ ID NO: 889897 - RNA, 19 nt, Artificial Sequence
  Description of Artificial Sequence: Synthetic oligonucleotide
aaauggauuuuggaaugga

SEQ ID NO: 889898 - RNA, 19 nt, Artificial Sequence
  Description of Artificial Sequence: Synthetic oligonucleotide
uauuacuaccucugauugu

SEQ ID NO: 889899 - RNA, 19 nt, Artificial Sequence
  Description of Artificial Sequence: Synthetic oligonucleotide
uguacagcgcauuucuuuu

SEQ ID NO: 889900 - RNA, 19 nt, Artificial Sequence
  Description of Artificial Sequence: Synthetic oligonucleotide
ugacaagagugcuuucuac

SEQ ID NO: 889901 - RNA, 19 nt, Artificial Sequence
  Description of Artificial Sequence: Synthetic oligonucleotide
uucuacaaacccaguuuac

SEQ ID NO: 889902 - RNA, 19 nt, Artificial Sequence
  Description of Artificial Sequence: Synthetic oligonucleotide
auggauuuuggaauggacu

SEQ ID NO: 889903 - RNA, 19 nt, Artificial Sequence
  Description of Artificial Sequence: Synthetic oligonucleotide
gcaugauaugccuaauucc

SEQ ID NO: 889904 - RNA, 19 nt, Artificial Sequence
  Description of Artificial Sequence: Synthetic oligonucleotide
agcugauagaaaacuacag

SEQ ID NO: 889905 - RNA, 19 nt, Artificial Sequence
  Description of Artificial Sequence: Synthetic oligonucleotide
aguaggucuuaguuaccag

SEQ ID NO: 889906 - RNA, 19 nt, Artificial Sequence
  Description of Artificial Sequence: Synthetic oligonucleotide
cauaaguaggucuuaguua

SEQ ID NO: 889907 - RNA, 19 nt, Artificial Sequence
  Description of Artificial Sequence: Synthetic oligonucleotide
ucgguggaacaacugggcc

SEQ ID NO: 889908 - RNA, 19 nt, Artificial Sequence
  Description of Artificial Sequence: Synthetic oligonucleotide
uuuggaagucacacuaauu

SEQ ID NO: 889909 - RNA, 19 nt, Artificial Sequence
  Description of Artificial Sequence: Synthetic oligonucleotide
aaacaucgauuucuuuuau

SEQ ID NO: 889910 - RNA, 19 nt, Artificial Sequence
  Description of Artificial Sequence: Synthetic oligonucleotide
ugaacgaaaucccgagguc

SEQ ID NO: 889911 - RNA, 19 nt, Artificial Sequence
  Description of Artificial Sequence: Synthetic oligonucleotide
ugucugcauaaacuguaac

SEQ ID NO: 889912 - RNA, 19 nt, Artificial Sequence
  Description of Artificial Sequence: Synthetic oligonucleotide
auaaccuaagaaaaguaua

SEQ ID NO: 889913 - RNA, 19 nt, Artificial Sequence
  Description of Artificial Sequence: Synthetic oligonucleotide
cauuaaacuagcugauaga

SEQ ID NO: 889914 - RNA, 19 nt, Artificial Sequence
  Description of Artificial Sequence: Synthetic oligonucleotide
ugacuacuacaaaucacau

SEQ ID NO: 889915 - RNA, 19 nt, Artificial Sequence
  Description of Artificial Sequence: Synthetic oligonucleotide
uggacuugcauuuggcaua

SEQ ID NO: 889916 - RNA, 19 nt, Artificial Sequence
  Description of Artificial Sequence: Synthetic oligonucleotide
auaaagagaucaugaguuu

SEQ ID NO: 889917 - RNA, 19 nt, Artificial Sequence
  Description of Artificial Sequence: Synthetic oligonucleotide
augaaucauuguucaagca

SEQ ID NO: 889918 - RNA, 19 nt, Artificial Sequence
  Description of Artificial Sequence: Synthetic oligonucleotide
cucaacuuggugccaauuc

SEQ ID NO: 889919 - RNA, 19 nt, Artificial Sequence
  Description of Artificial Sequence: Synthetic oligonucleotide
gaacucaaguguaccgagg

SEQ ID NO: 889920 - RNA, 19 nt, Artificial Sequence
  Description of Artificial Sequence: Synthetic oligonucleotide
  modified_base (11)..(11): a, c, u, g, unknown or other
ucucacuuguncagggguc

SEQ ID NO: 889921 - RNA, 19 nt, Artificial Sequence
  Description of Artificial Sequence: Synthetic oligonucleotide
agcuaacucagacuauggu

SEQ ID NO: 889922 - RNA, 19 nt, Artificial Sequence
  Description of Artificial Sequence: Synthetic oligonucleotide
uaaguaggucuuaguuacc

SEQ ID NO: 889923 - RNA, 19 nt, Artificial Sequence
  Description of Artificial Sequence: Synthetic oligonucleotide
aaccccucagauaauugug

SEQ ID NO: 889924 - RNA, 19 nt, Artificial Sequence
  Description of Artificial Sequence: Synthetic oligonucleotide
auaugccuaauuccugacu

SEQ ID NO: 889925 - RNA, 19 nt, Artificial Sequence
  Description of Artificial Sequence: Synthetic oligonucleotide
acccuauauacuguaagca

SEQ ID NO: 889926 - RNA, 19 nt, Artificial Sequence
  Description of Artificial Sequence: Synthetic oligonucleotide
gguauuaacuuuaugauau

SEQ ID NO: 889927 - RNA, 19 nt, Artificial Sequence
  Description of Artificial Sequence: Synthetic oligonucleotide
agugcagggugguugagaa

SEQ ID NO: 889928 - RNA, 19 nt, Artificial Sequence
  Description of Artificial Sequence: Synthetic oligonucleotide
uuucuggcuauucuauauu

SEQ ID NO: 889929 - RNA, 19 nt, Artificial Sequence
  Description of Artificial Sequence: Synthetic oligonucleotide
ugcauaucacacuucccau

SEQ ID NO: 889930 - RNA, 19 nt, Artificial Sequence
  Description of Artificial Sequence: Synthetic oligonucleotide
ccuaccauaauucaaaugu

SEQ ID NO: 889931 - RNA, 19 nt, Artificial Sequence
  Description of Artificial Sequence: Synthetic oligonucleotide
ugcccuaaaacuacauauu

SEQ ID NO: 889932 - RNA, 19 nt, Artificial Sequence
  Description of Artificial Sequence: Synthetic oligonucleotide
cagcuaacucagacuaugg

SEQ ID NO: 889933 - RNA, 19 nt, Artificial Sequence
  Description of Artificial Sequence: Synthetic oligonucleotide
gugcuuucuacaaacccag

SEQ ID NO: 889934 - RNA, 19 nt, Artificial Sequence
  Description of Artificial Sequence: Synthetic oligonucleotide
acggagccccuucauaauc

SEQ ID NO: 889935 - RNA, 19 nt, Artificial Sequence
  Description of Artificial Sequence: Synthetic oligonucleotide
  modified_base (7)..(7): a, c, u, g, unknown or other
acuuguncaggggucugag

SEQ ID NO: 889936 - RNA, 19 nt, Artificial Sequence
  Description of Artificial Sequence: Synthetic oligonucleotide
guugagaaagguacagcug

SEQ ID NO: 889937 - RNA, 19 nt, Artificial Sequence
  Description of Artificial Sequence: Synthetic oligonucleotide
acauuuuacaaugcuucga

SEQ ID NO: 889938 - RNA, 19 nt, Artificial Sequence
  Description of Artificial Sequence: Synthetic oligonucleotide
aacaacugggccagguucu

SEQ ID NO: 889939 - RNA, 19 nt, Artificial Sequence
  Description of Artificial Sequence: Synthetic oligonucleotide
ggucugccgacauuaaugc

SEQ ID NO: 889940 - RNA, 19 nt, Artificial Sequence
  Description of Artificial Sequence: Synthetic oligonucleotide
ugauauuggccaacuucaa

SEQ ID NO: 889941 - RNA, 19 nt, Artificial Sequence
  Description of Artificial Sequence: Synthetic oligonucleotide
aggucuauguuacuagaua

SEQ ID NO: 889942 - RNA, 19 nt, Artificial Sequence
  Description of Artificial Sequence: Synthetic oligonucleotide
uuacaaugcuucgagguuu

SEQ ID NO: 889943 - RNA, 19 nt, Artificial Sequence
  Description of Artificial Sequence: Synthetic oligonucleotide
aaguguaccgaggcaucuc

SEQ ID NO: 889944 - RNA, 19 nt, Artificial Sequence
  Description of Artificial Sequence: Synthetic oligonucleotide
ggacccuauauacuguaag

SEQ ID NO: 889945 - RNA, 19 nt, Artificial Sequence
  Description of Artificial Sequence: Synthetic oligonucleotide
ccaaacuagaucaggauca

SEQ ID NO: 889946 - RNA, 19 nt, Artificial Sequence
  Description of Artificial Sequence: Synthetic oligonucleotide
auacaaugacaagagugcu

SEQ ID NO: 889947 - RNA, 19 nt, Artificial Sequence
  Description of Artificial Sequence: Synthetic oligonucleotide
agguacagcugucacaauu

SEQ ID NO: 889948 - RNA, 19 nt, Artificial Sequence
  Description of Artificial Sequence: Synthetic oligonucleotide
aaacugcauaucacacuuc

SEQ ID NO: 889949 - RNA, 19 nt, Artificial Sequence
  Description of Artificial Sequence: Synthetic oligonucleotide
ugccaauucuuccgaacuc

SEQ ID NO: 889950 - RNA, 19 nt, Artificial Sequence
  Description of Artificial Sequence: Synthetic oligonucleotide
gguucuauguugucagaug

SEQ ID NO: 889951 - RNA, 19 nt, Artificial Sequence
  Description of Artificial Sequence: Synthetic oligonucleotide
ucaucucgggguugugucc

SEQ ID NO: 889952 - RNA, 19 nt, Artificial Sequence
  Description of Artificial Sequence: Synthetic oligonucleotide
cuuccgaacucaaguguac

SEQ ID NO: 889953 - RNA, 19 nt, Artificial Sequence
  Description of Artificial Sequence: Synthetic oligonucleotide
uaguaggggacccuauaua

SEQ ID NO: 889954 - RNA, 19 nt, Artificial Sequence
  Description of Artificial Sequence: Synthetic oligonucleotide
uacaaugcuucgagguuuc

SEQ ID NO: 889955 - RNA, 19 nt, Artificial Sequence
  Description of Artificial Sequence: Synthetic oligonucleotide
cuuuaugauauuggccaac

SEQ ID NO: 889956 - RNA, 19 nt, Artificial Sequence
  Description of Artificial Sequence: Synthetic oligonucleotide
caauaaccuaagaaaagua

SEQ ID NO: 889957 - RNA, 19 nt, Artificial Sequence
  Description of Artificial Sequence: Synthetic oligonucleotide
guaccgaggcaucucacac

SEQ ID NO: 889958 - RNA, 19 nt, Artificial Sequence
  Description of Artificial Sequence: Synthetic oligonucleotide
cucaucucgggguuguguc

SEQ ID NO: 889959 - RNA, 19 nt, Artificial Sequence
  Description of Artificial Sequence: Synthetic oligonucleotide
cauuuccuaccauaauuca

SEQ ID NO: 889960 - RNA, 19 nt, Artificial Sequence
  Description of Artificial Sequence: Synthetic oligonucleotide
aaucauuguucaagcaaaa

SEQ ID NO: 889961 - RNA, 19 nt, Artificial Sequence
  Description of Artificial Sequence: Synthetic oligonucleotide
ccuuuaaacuuuaagaacu

SEQ ID NO: 889962 - RNA, 19 nt, Artificial Sequence
  Description of Artificial Sequence: Synthetic oligonucleotide
ugguugagaaagguacagc

SEQ ID NO: 889963 - RNA, 19 nt, Artificial Sequence
  Description of Artificial Sequence: Synthetic oligonucleotide
cacugugcuacuggcaagg

SEQ ID NO: 889964 - RNA, 19 nt, Artificial Sequence
  Description of Artificial Sequence: Synthetic oligonucleotide
ccauaauucaaauguucac

SEQ ID NO: 889965 - RNA, 19 nt, Artificial Sequence
  Description of Artificial Sequence: Synthetic oligonucleotide
gaguuaugccuuugguuuc

SEQ ID NO: 889966 - RNA, 19 nt, Artificial Sequence
  Description of Artificial Sequence: Synthetic oligonucleotide
gacaguacaaagugacugu

SEQ ID NO: 889967 - RNA, 19 nt, Artificial Sequence
  Description of Artificial Sequence: Synthetic oligonucleotide
aaauguagggucaggucua

SEQ ID NO: 889968 - RNA, 19 nt, Artificial Sequence
  Description of Artificial Sequence: Synthetic oligonucleotide
cacaaaccaguaguagggg

SEQ ID NO: 889969 - RNA, 19 nt, Artificial Sequence
  Description of Artificial Sequence: Synthetic oligonucleotide
uggcugguuaacacaugug

SEQ ID NO: 889970 - RNA, 19 nt, Artificial Sequence
  Description of Artificial Sequence: Synthetic oligonucleotide
caccuucagaaaguaagag

SEQ ID NO: 889971 - RNA, 19 nt, Artificial Sequence
  Description of Artificial Sequence: Synthetic oligonucleotide
ugccuaauuccugacuacu

SEQ ID NO: 889972 - RNA, 19 nt, Artificial Sequence
  Description of Artificial Sequence: Synthetic oligonucleotide
uggacaucugccuguacuu

SEQ ID NO: 889973 - RNA, 19 nt, Artificial Sequence
  Description of Artificial Sequence: Synthetic oligonucleotide
uuaugcuguugagugcagc

SEQ ID NO: 889974 - RNA, 19 nt, Artificial Sequence
  Description of Artificial Sequence: Synthetic oligonucleotide
auacauuaaacuagcugau

SEQ ID NO: 889975 - RNA, 19 nt, Artificial Sequence
  Description of Artificial Sequence: Synthetic oligonucleotide
aguuuauguggcauaagua

SEQ ID NO: 889976 - RNA, 19 nt, Artificial Sequence
  Description of Artificial Sequence: Synthetic oligonucleotide
gguugagaaagguacagcu

SEQ ID NO: 889977 - RNA, 19 nt, Artificial Sequence
  Description of Artificial Sequence: Synthetic oligonucleotide
uuccggugagugcucaagu

SEQ ID NO: 889978 - RNA, 19 nt, Artificial Sequence
  Description of Artificial Sequence: Synthetic oligonucleotide
caaacuagaucaggaucag

SEQ ID NO: 889979 - RNA, 19 nt, Artificial Sequence
  Description of Artificial Sequence: Synthetic oligonucleotide
uacauucacugugcuacug

SEQ ID NO: 889980 - RNA, 19 nt, Artificial Sequence
  Description of Artificial Sequence: Synthetic oligonucleotide
uuccuaccauaauucaaau

SEQ ID NO: 889981 - RNA, 19 nt, Artificial Sequence
  Description of Artificial Sequence: Synthetic oligonucleotide
cccuauauacuguaagcac

SEQ ID NO: 889982 - RNA, 19 nt, Artificial Sequence
  Description of Artificial Sequence: Synthetic oligonucleotide
auuuccuaccauaauucaa

SEQ ID NO: 889983 - RNA, 19 nt, Artificial Sequence
  Description of Artificial Sequence: Synthetic oligonucleotide
agugcucaaguaucacccu

SEQ ID NO: 889984 - RNA, 19 nt, Artificial Sequence
  Description of Artificial Sequence: Synthetic oligonucleotide
gaaccccucagauaauugu

SEQ ID NO: 889985 - RNA, 19 nt, Artificial Sequence
  Description of Artificial Sequence: Synthetic oligonucleotide
ugggauucauggacaucug

SEQ ID NO: 889986 - RNA, 19 nt, Artificial Sequence
  Description of Artificial Sequence: Synthetic oligonucleotide
ucacaauuccacggagccc

SEQ ID NO: 889987 - RNA, 19 nt, Artificial Sequence
  Description of Artificial Sequence: Synthetic oligonucleotide
aguaguaggggacccuaua

SEQ ID NO: 889988 - RNA, 19 nt, Artificial Sequence
  Description of Artificial Sequence: Synthetic oligonucleotide
auacauucacugugcuacu

SEQ ID NO: 889989 - RNA, 19 nt, Artificial Sequence
  Description of Artificial Sequence: Synthetic oligonucleotide
uauguggcauaaguagguc

SEQ ID NO: 889990 - RNA, 19 nt, Artificial Sequence
  Description of Artificial Sequence: Synthetic oligonucleotide
guaggucuuaguuaccagu

SEQ ID NO: 889991 - RNA, 19 nt, Artificial Sequence
  Description of Artificial Sequence: Synthetic oligonucleotide
gucuauguuacuagauaca

SEQ ID NO: 889992 - RNA, 19 nt, Artificial Sequence
  Description of Artificial Sequence: Synthetic oligonucleotide
ggucuuaguuaccaguguc

SEQ ID NO: 889993 - RNA, 19 nt, Artificial Sequence
  Description of Artificial Sequence: Synthetic oligonucleotide
aaaccauacugcauuucuu

SEQ ID NO: 889994 - RNA, 19 nt, Artificial Sequence
  Description of Artificial Sequence: Synthetic oligonucleotide
gcuaacucagacuauggua

SEQ ID NO: 889995 - RNA, 19 nt, Artificial Sequence
  Description of Artificial Sequence: Synthetic oligonucleotide
cugcccuaaaacuacauau

SEQ ID NO: 889996 - RNA, 19 nt, Artificial Sequence
  Description of Artificial Sequence: Synthetic oligonucleotide
gaacgaaaucccgaggucu

SEQ ID NO: 889997 - RNA, 19 nt, Artificial Sequence
  Description of Artificial Sequence: Synthetic oligonucleotide
aggagugaaucaagaaaug

SEQ ID NO: 889998 - RNA, 19 nt, Artificial Sequence
  Description of Artificial Sequence: Synthetic oligonucleotide
uuaauauccccugccucua

SEQ ID NO: 889999 - RNA, 19 nt, Artificial Sequence
  Description of Artificial Sequence: Synthetic oligonucleotide
aaucugcccuaaaacuaca

SEQ ID NO: 890000 - RNA, 19 nt, Artificial Sequence
  Description of Artificial Sequence: Synthetic oligonucleotide
ccugacuacuacaaaucac

SEQ ID NO: 890001 - RNA, 19 nt, Artificial Sequence
  Description of Artificial Sequence: Synthetic oligonucleotide
cacacuaauucuucgggcu

SEQ ID NO: 890002 - RNA, 19 nt, Artificial Sequence
  Description of Artificial Sequence: Synthetic oligonucleotide
aguuaugccuuugguuuca

SEQ ID NO: 890003 - RNA, 19 nt, Artificial Sequence
  Description of Artificial Sequence: Synthetic oligonucleotide
agaagcccuuaacuucucu

SEQ ID NO: 890004 - RNA, 19 nt, Artificial Sequence
  Description of Artificial Sequence: Synthetic oligonucleotide
cagauaugaaccccucaga

SEQ ID NO: 890005 - RNA, 19 nt, Artificial Sequence
  Description of Artificial Sequence: Synthetic oligonucleotide
ugcuuucuacaaacccagu

SEQ ID NO: 890006 - RNA, 19 nt, Artificial Sequence
  Description of Artificial Sequence: Synthetic oligonucleotide
cacagcgauucagugcagg

SEQ ID NO: 890007 - RNA, 19 nt, Artificial Sequence
  Description of Artificial Sequence: Synthetic oligonucleotide
gucagauaugaaccccuca

SEQ ID NO: 890008 - RNA, 19 nt, Artificial Sequence
  Description of Artificial Sequence: Synthetic oligonucleotide
gcugauagaaaacuacagu

SEQ ID NO: 890009 - RNA, 19 nt, Artificial Sequence
  Description of Artificial Sequence: Synthetic oligonucleotide
uccggugagugcucaagua

SEQ ID NO: 890010 - RNA, 19 nt, Artificial Sequence
  Description of Artificial Sequence: Synthetic oligonucleotide
cccaaacuagaucaggauc

SEQ ID NO: 890011 - RNA, 19 nt, Artificial Sequence
  Description of Artificial Sequence: Synthetic oligonucleotide
gacuaugguacaaaguauu

SEQ ID NO: 890012 - RNA, 19 nt, Artificial Sequence
  Description of Artificial Sequence: Synthetic oligonucleotide
gauggcuucgguggaacaa

SEQ ID NO: 890013 - RNA, 19 nt, Artificial Sequence
  Description of Artificial Sequence: Synthetic oligonucleotide
uaugaaccccucagauaau

SEQ ID NO: 890014 - RNA, 19 nt, Artificial Sequence
  Description of Artificial Sequence: Synthetic oligonucleotide
acauauuuguacagcgcau

SEQ ID NO: 890015 - RNA, 19 nt, Artificial Sequence
  Description of Artificial Sequence: Synthetic oligonucleotide
aauguagggucaggucuau

SEQ ID NO: 890016 - RNA, 19 nt, Artificial Sequence
  Description of Artificial Sequence: Synthetic oligonucleotide
  modified_base (2)..(2): a, c, u, g, unknown or other
uncaggggucugaggaguc

SEQ ID NO: 890017 - RNA, 19 nt, Artificial Sequence
  Description of Artificial Sequence: Synthetic oligonucleotide
ucagauggugauggagcac

SEQ ID NO: 890018 - RNA, 19 nt, Artificial Sequence
  Description of Artificial Sequence: Synthetic oligonucleotide
gugcucaaguaucacccuc

SEQ ID NO: 890019 - RNA, 19 nt, Artificial Sequence
  Description of Artificial Sequence: Synthetic oligonucleotide
uccacggagccccuucaua

SEQ ID NO: 890020 - RNA, 19 nt, Artificial Sequence
  Description of Artificial Sequence: Synthetic oligonucleotide
ccaaguaagucugcucugg

SEQ ID NO: 890021 - RNA, 19 nt, Artificial Sequence
  Description of Artificial Sequence: Synthetic oligonucleotide
  modified_base (9)..(9): a, c, u, g, unknown or other
ucacuuguncaggggucug

SEQ ID NO: 890022 - RNA, 19 nt, Artificial Sequence
  Description of Artificial Sequence: Synthetic oligonucleotide
gggcaauauucuuugaaua

SEQ ID NO: 890023 - RNA, 19 nt, Artificial Sequence
  Description of Artificial Sequence: Synthetic oligonucleotide
aaauugagaccagcuccuu

SEQ ID NO: 890024 - RNA, 19 nt, Artificial Sequence
  Description of Artificial Sequence: Synthetic oligonucleotide
ucgggguuguguccucgga

SEQ ID NO: 890025 - RNA, 19 nt, Artificial Sequence
  Description of Artificial Sequence: Synthetic oligonucleotide
ccacuuauauguucaucug

SEQ ID NO: 890026 - RNA, 19 nt, Artificial Sequence
  Description of Artificial Sequence: Synthetic oligonucleotide
gucgaugcagcuugaugaa

SEQ ID NO: 890027 - RNA, 19 nt, Artificial Sequence
  Description of Artificial Sequence: Synthetic oligonucleotide
auguugucagauggugaug

SEQ ID NO: 890028 - RNA, 19 nt, Artificial Sequence
  Description of Artificial Sequence: Synthetic oligonucleotide
ccuauauacuguaagcacu

SEQ ID NO: 890029 - RNA, 19 nt, Artificial Sequence
  Description of Artificial Sequence: Synthetic oligonucleotide
cugccgacauuaaugcuaa

SEQ ID NO: 890030 - RNA, 19 nt, Artificial Sequence
  Description of Artificial Sequence: Synthetic oligonucleotide
caaguaagucugcucugga

SEQ ID NO: 890031 - RNA, 19 nt, Artificial Sequence
  Description of Artificial Sequence: Synthetic oligonucleotide
cauaucacacuucccauuu

SEQ ID NO: 890032 - RNA, 19 nt, Artificial Sequence
  Description of Artificial Sequence: Synthetic oligonucleotide
guaguaggggacccuauau

SEQ ID NO: 890033 - RNA, 19 nt, Artificial Sequence
  Description of Artificial Sequence: Synthetic oligonucleotide
augaaccccucagauaauu

SEQ ID NO: 890034 - RNA, 19 nt, Artificial Sequence
  Description of Artificial Sequence: Synthetic oligonucleotide
gcauaaguaggucuuaguu

SEQ ID NO: 890035 - RNA, 19 nt, Artificial Sequence
  Description of Artificial Sequence: Synthetic oligonucleotide
uuccuccaccaacauuaau

SEQ ID NO: 890036 - RNA, 19 nt, Artificial Sequence
  Description of Artificial Sequence: Synthetic oligonucleotide
gcuauucuauauuuucccu

SEQ ID NO: 890037 - RNA, 19 nt, Artificial Sequence
  Description of Artificial Sequence: Synthetic oligonucleotide
gcccuuaacuucucuguac

SEQ ID NO: 890038 - RNA, 19 nt, Artificial Sequence
  Description of Artificial Sequence: Synthetic oligonucleotide
gcauaaacuguaacauuuc

SEQ ID NO: 890039 - RNA, 19 nt, Artificial Sequence
  Description of Artificial Sequence: Synthetic oligonucleotide
auguuacuagauacauuaa

SEQ ID NO: 890040 - RNA, 19 nt, Artificial Sequence
  Description of Artificial Sequence: Synthetic oligonucleotide
caaaauucaagagggcaau

SEQ ID NO: 890041 - RNA, 19 nt, Artificial Sequence
  Description of Artificial Sequence: Synthetic oligonucleotide
aggaucaguucaaaacauu

SEQ ID NO: 890042 - RNA, 19 nt, Artificial Sequence
  Description of Artificial Sequence: Synthetic oligonucleotide
ggugagugcucaaguauca

SEQ ID NO: 890043 - RNA, 19 nt, Artificial Sequence
  Description of Artificial Sequence: Synthetic oligonucleotide
ucgaugcagcuugaugaau

SEQ ID NO: 890044 - RNA, 19 nt, Artificial Sequence
  Description of Artificial Sequence: Synthetic oligonucleotide
gugagugcucaaguaucac

SEQ ID NO: 890045 - RNA, 19 nt, Artificial Sequence
  Description of Artificial Sequence: Synthetic oligonucleotide
cugugcuacuggcaaggca

SEQ ID NO: 890046 - RNA, 19 nt, Artificial Sequence
  Description of Artificial Sequence: Synthetic oligonucleotide
uuccacggagccccuucau

SEQ ID NO: 890047 - RNA, 19 nt, Artificial Sequence
  Description of Artificial Sequence: Synthetic oligonucleotide
cucaaguguaccgaggcau

SEQ ID NO: 890048 - RNA, 19 nt, Artificial Sequence
  Description of Artificial Sequence: Synthetic oligonucleotide
caggaucaguucaaaacau

SEQ ID NO: 890049 - RNA, 19 nt, Artificial Sequence
  Description of Artificial Sequence: Synthetic oligonucleotide
gccaauucuuccgaacuca

SEQ ID NO: 890050 - RNA, 19 nt, Artificial Sequence
  Description of Artificial Sequence: Synthetic oligonucleotide
caugggauucauggacauc

SEQ ID NO: 890051 - RNA, 19 nt, Artificial Sequence
  Description of Artificial Sequence: Synthetic oligonucleotide
gcacuucuuauaaaccaca

SEQ ID NO: 890052 - RNA, 19 nt, Artificial Sequence
  Description of Artificial Sequence: Synthetic oligonucleotide
accagugucgaugcagcuu

SEQ ID NO: 890053 - RNA, 19 nt, Artificial Sequence
  Description of Artificial Sequence: Synthetic oligonucleotide
ggugguugagaaagguaca

SEQ ID NO: 890054 - RNA, 19 nt, Artificial Sequence
  Description of Artificial Sequence: Synthetic oligonucleotide
ggacuugcauuuggcauac

SEQ ID NO: 890055 - RNA, 19 nt, Artificial Sequence
  Description of Artificial Sequence: Synthetic oligonucleotide
cuauguuacuagauacauu

SEQ ID NO: 890056 - RNA, 19 nt, Artificial Sequence
  Description of Artificial Sequence: Synthetic oligonucleotide
guauuaacuuuaugauauu

SEQ ID NO: 890057 - RNA, 19 nt, Artificial Sequence
  Description of Artificial Sequence: Synthetic oligonucleotide
caacauuaaucugcccuaa

SEQ ID NO: 890058 - RNA, 19 nt, Artificial Sequence
  Description of Artificial Sequence: Synthetic oligonucleotide
ggaucaguucaaaacauuu

SEQ ID NO: 890059 - RNA, 19 nt, Artificial Sequence
  Description of Artificial Sequence: Synthetic oligonucleotide
uccuuccggugagugcuca

SEQ ID NO: 890060 - RNA, 19 nt, Artificial Sequence
  Description of Artificial Sequence: Synthetic oligonucleotide
cagaagcccuuaacuucuc

SEQ ID NO: 890061 - RNA, 19 nt, Artificial Sequence
  Description of Artificial Sequence: Synthetic oligonucleotide
gcgauucagugcagggugg

SEQ ID NO: 890062 - RNA, 19 nt, Artificial Sequence
  Description of Artificial Sequence: Synthetic oligonucleotide
  modified_base (3)..(3): a, c, u, g, unknown or other
guncaggggucugaggagu

SEQ ID NO: 890063 - RNA, 19 nt, Artificial Sequence
  Description of Artificial Sequence: Synthetic oligonucleotide
cuuaguuaccagugucgau

SEQ ID NO: 890064 - RNA, 19 nt, Artificial Sequence
  Description of Artificial Sequence: Synthetic oligonucleotide
cagguucuauguugucaga

SEQ ID NO: 890065 - RNA, 19 nt, Artificial Sequence
  Description of Artificial Sequence: Synthetic oligonucleotide
caggucuauguuacuagau

SEQ ID NO: 890066 - RNA, 19 nt, Artificial Sequence
  Description of Artificial Sequence: Synthetic oligonucleotide
gugaccaaguaagucugcu

SEQ ID NO: 890067 - RNA, 19 nt, Artificial Sequence
  Description of Artificial Sequence: Synthetic oligonucleotide
guaggggacccuauauacu

SEQ ID NO: 890068 - RNA, 19 nt, Artificial Sequence
  Description of Artificial Sequence: Synthetic oligonucleotide
ggguuguguccucggaguc

SEQ ID NO: 890069 - RNA, 19 nt, Artificial Sequence
  Description of Artificial Sequence: Synthetic oligonucleotide
gaacugguauuaacuuuau

SEQ ID NO: 890070 - RNA, 19 nt, Artificial Sequence
  Description of Artificial Sequence: Synthetic oligonucleotide
ccgacauuaaugcuaaauu

SEQ ID NO: 890071 - RNA, 19 nt, Artificial Sequence
  Description of Artificial Sequence: Synthetic oligonucleotide
gccuguacuuuggaaguca

SEQ ID NO: 890072 - RNA, 19 nt, Artificial Sequence
  Description of Artificial Sequence: Synthetic oligonucleotide
  modified_base (8)..(8): a, c, u, g, unknown or other
cacuuguncaggggucuga

SEQ ID NO: 890073 - RNA, 19 nt, Artificial Sequence
  Description of Artificial Sequence: Synthetic oligonucleotide
cuacuggcaaggcaugguu

SEQ ID NO: 890074 - RNA, 19 nt, Artificial Sequence
  Description of Artificial Sequence: Synthetic oligonucleotide
uccuuuccuuccggugagu

SEQ ID NO: 890075 - RNA, 19 nt, Artificial Sequence
  Description of Artificial Sequence: Synthetic oligonucleotide
ggggacccuauauacugua

SEQ ID NO: 890076 - RNA, 19 nt, Artificial Sequence
  Description of Artificial Sequence: Synthetic oligonucleotide
gucugccgacauuaaugcu

SEQ ID NO: 890077 - RNA, 19 nt, Artificial Sequence
  Description of Artificial Sequence: Synthetic oligonucleotide
gccgacauuaaugcuaaau

SEQ ID NO: 890078 - RNA, 19 nt, Artificial Sequence
  Description of Artificial Sequence: Synthetic oligonucleotide
ugccgacauuaaugcuaaa

SEQ ID NO: 890079 - RNA, 19 nt, Artificial Sequence
  Description of Artificial Sequence: Synthetic oligonucleotide
ccgaacucaaguguaccga

SEQ ID NO: 890080 - RNA, 19 nt, Artificial Sequence
  Description of Artificial Sequence: Synthetic oligonucleotide
gccuaauuccugacuacua

SEQ ID NO: 890081 - RNA, 19 nt, Artificial Sequence
  Description of Artificial Sequence: Synthetic oligonucleotide
cagcgauucagugcagggu

SEQ ID NO: 890082 - RNA, 19 nt, Artificial Sequence
  Description of Artificial Sequence: Synthetic oligonucleotide
cuucgagguuucuggcuau

SEQ ID NO: 890083 - RNA, 19 nt, Artificial Sequence
  Description of Artificial Sequence: Synthetic oligonucleotide
gauucagugcagggugguu

SEQ ID NO: 890084 - RNA, 19 nt, Artificial Sequence
  Description of Artificial Sequence: Synthetic oligonucleotide
cacuaauucuucgggcuuu

SEQ ID NO: 890085 - RNA, 19 nt, Artificial Sequence
  Description of Artificial Sequence: Synthetic oligonucleotide
caguaguaggggacccuau

SEQ ID NO: 890086 - RNA, 19 nt, Artificial Sequence
  Description of Artificial Sequence: Synthetic oligonucleotide
gggacccuauauacuguaa

SEQ ID NO: 890087 - RNA, 19 nt, Artificial Sequence
  Description of Artificial Sequence: Synthetic oligonucleotide
gggcaugauaugccuaauu

SEQ ID NO: 890088 - RNA, 19 nt, Artificial Sequence
  Description of Artificial Sequence: Synthetic oligonucleotide
cacggagccccuucauaau

SEQ ID NO: 890089 - RNA, 19 nt, Artificial Sequence
  Description of Artificial Sequence: Synthetic oligonucleotide
gcuacuggcaaggcauggu

SEQ ID NO: 890090 - RNA, 19 nt, Artificial Sequence
  Description of Artificial Sequence: Synthetic oligonucleotide
cagccacuuauauguucau

SEQ ID NO: 890091 - RNA, 19 nt, Artificial Sequence
  Description of Artificial Sequence: Synthetic oligonucleotide
ccggugagugcucaaguau

SEQ ID NO: 890092 - RNA, 19 nt, Artificial Sequence
  Description of Artificial Sequence: Synthetic oligonucleotide
ccccugccucuacuucuuc

SEQ ID NO: 890093 - RNA, 19 nt, Artificial Sequence
  Description of Artificial Sequence: Synthetic oligonucleotide
cgauucagugcaggguggu

SEQ ID NO: 890094 - RNA, 19 nt, Artificial Sequence
  Description of Artificial Sequence: Synthetic oligonucleotide
ccucaacuuggugccaauu

SEQ ID NO: 890095 - RNA, 19 nt, Artificial Sequence
  Description of Artificial Sequence: Synthetic oligonucleotide
cccucaacuuggugccaau

SEQ ID NO: 890096 - RNA, 19 nt, Artificial Sequence
  Description of Artificial Sequence: Synthetic oligonucleotide
aaaggcaucacacucgacc

SEQ ID NO: 890097 - RNA, 19 nt, Artificial Sequence
  Description of Artificial Sequence: Synthetic oligonucleotide
aauaugaugacagucaaug

SEQ ID NO: 890098 - RNA, 19 nt, Artificial Sequence
  Description of Artificial Sequence: Synthetic oligonucleotide
aguaauucuacucucuuac

SEQ ID NO: 890099 - RNA, 19 nt, Artificial Sequence
  Description of Artificial Sequence: Synthetic oligonucleotide
aagaaauuauuccacauga

SEQ ID NO: 890100 - RNA, 19 nt, Artificial Sequence
  Description of Artificial Sequence: Synthetic oligonucleotide
agucuauugauucauuagc

SEQ ID NO: 890101 - RNA, 19 nt, Artificial Sequence
  Description of Artificial Sequence: Synthetic oligonucleotide
aggauaaucagcuucaucu

SEQ ID NO: 890102 - RNA, 19 nt, Artificial Sequence
  Description of Artificial Sequence: Synthetic oligonucleotide
ugaaguauuugucaggccc

SEQ ID NO: 890103 - RNA, 19 nt, Artificial Sequence
  Description of Artificial Sequence: Synthetic oligonucleotide
aaagaguucgaucccgccc

SEQ ID NO: 890104 - RNA, 19 nt, Artificial Sequence
  Description of Artificial Sequence: Synthetic oligonucleotide
agaagauaaauauaggccu

SEQ ID NO: 890105 - RNA, 19 nt, Artificial Sequence
  Description of Artificial Sequence: Synthetic oligonucleotide
aagacuguguccaaagugc

SEQ ID NO: 890106 - RNA, 19 nt, Artificial Sequence
  Description of Artificial Sequence: Synthetic oligonucleotide
auuagcuuaacaaagaaca

SEQ ID NO: 890107 - RNA, 19 nt, Artificial Sequence
  Description of Artificial Sequence: Synthetic oligonucleotide
aaauauuugaccgucuuca

SEQ ID NO: 890108 - RNA, 19 nt, Artificial Sequence
  Description of Artificial Sequence: Synthetic oligonucleotide
aauauuagauuuaauagaa

SEQ ID NO: 890109 - RNA, 19 nt, Artificial Sequence
  Description of Artificial Sequence: Synthetic oligonucleotide
aagacccacauacucgucc

SEQ ID NO: 890110 - RNA, 19 nt, Artificial Sequence
  Description of Artificial Sequence: Synthetic oligonucleotide
uacucguccauguugaagg

SEQ ID NO: 890111 - RNA, 19 nt, Artificial Sequence
  Description of Artificial Sequence: Synthetic oligonucleotide
uuccuaauguacuuggccg

SEQ ID NO: 890112 - RNA, 19 nt, Artificial Sequence
  Description of Artificial Sequence: Synthetic oligonucleotide
aagaguucgaucccgcccg

SEQ ID NO: 890113 - RNA, 19 nt, Artificial Sequence
  Description of Artificial Sequence: Synthetic oligonucleotide
gauaaucagcuucaucucg

SEQ ID NO: 890114 - RNA, 19 nt, Artificial Sequence
  Description of Artificial Sequence: Synthetic oligonucleotide
ucgaggaagacccacauac

SEQ ID NO: 890115 - RNA, 19 nt, Artificial Sequence
  Description of Artificial Sequence: Synthetic oligonucleotide
aagaaucuagcauuggcca

SEQ ID NO: 890116 - RNA, 19 nt, Artificial Sequence
  Description of Artificial Sequence: Synthetic oligonucleotide
uuuagaacaaauguucuca

SEQ ID NO: 890117 - RNA, 19 nt, Artificial Sequence
  Description of Artificial Sequence: Synthetic oligonucleotide
ugauucauuagcuuaacaa

SEQ ID NO: 890118 - RNA, 19 nt, Artificial Sequence
  Description of Artificial Sequence: Synthetic oligonucleotide
uuguaaacaagucuauuga

SEQ ID NO: 890119 - RNA, 19 nt, Artificial Sequence
  Description of Artificial Sequence: Synthetic oligonucleotide
aaacuaaacaaagaugcug

SEQ ID NO: 890120 - RNA, 19 nt, Artificial Sequence
  Description of Artificial Sequence: Synthetic oligonucleotide
uguauugaagcaaaguaau

SEQ ID NO: 890121 - RNA, 19 nt, Artificial Sequence
  Description of Artificial Sequence: Synthetic oligonucleotide
aaggugaaguauuugucag

SEQ ID NO: 890122 - RNA, 19 nt, Artificial Sequence
  Description of Artificial Sequence: Synthetic oligonucleotide
uuauaguacucaaucagcu

SEQ ID NO: 890123 - RNA, 19 nt, Artificial Sequence
  Description of Artificial Sequence: Synthetic oligonucleotide
cuuauaguacucaaucagc

SEQ ID NO: 890124 - RNA, 19 nt, Artificial Sequence
  Description of Artificial Sequence: Synthetic oligonucleotide
aaccuguuuguagaaaggc

SEQ ID NO: 890125 - RNA, 19 nt, Artificial Sequence
  Description of Artificial Sequence: Synthetic oligonucleotide
acaagaccuaacuaacccc

SEQ ID NO: 890126 - RNA, 19 nt, Artificial Sequence
  Description of Artificial Sequence: Synthetic oligonucleotide
caacuuguuaugaacaagc

SEQ ID NO: 890127 - RNA, 19 nt, Artificial Sequence
  Description of Artificial Sequence: Synthetic oligonucleotide
aaauauaggccuagcaggg

SEQ ID NO: 890128 - RNA, 19 nt, Artificial Sequence
  Description of Artificial Sequence: Synthetic oligonucleotide
aaacacaguacggggaugc

SEQ ID NO: 890129 - RNA, 19 nt, Artificial Sequence
  Description of Artificial Sequence: Synthetic oligonucleotide
uucccauccagaauguggg

SEQ ID NO: 890130 - RNA, 19 nt, Artificial Sequence
  Description of Artificial Sequence: Synthetic oligonucleotide
uaguguuccaggauaauca

SEQ ID NO: 890131 - RNA, 19 nt, Artificial Sequence
  Description of Artificial Sequence: Synthetic oligonucleotide
ugaacaagcauuaaaccuu

SEQ ID NO: 890132 - RNA, 19 nt, Artificial Sequence
  Description of Artificial Sequence: Synthetic oligonucleotide
ccaacaaagaguucgaucc

SEQ ID NO: 890133 - RNA, 19 nt, Artificial Sequence
  Description of Artificial Sequence: Synthetic oligonucleotide
cuaaagaggaggcacacac

SEQ ID NO: 890134 - RNA, 19 nt, Artificial Sequence
  Description of Artificial Sequence: Synthetic oligonucleotide
aguguauugaagcaaagua

SEQ ID NO: 890135 - RNA, 19 nt, Artificial Sequence
  Description of Artificial Sequence: Synthetic oligonucleotide
agaagauccaggcuauggg

SEQ ID NO: 890136 - RNA, 19 nt, Artificial Sequence
  Description of Artificial Sequence: Synthetic oligonucleotide
aagcggagaagauaaauau

SEQ ID NO: 890137 - RNA, 19 nt, Artificial Sequence
  Description of Artificial Sequence: Synthetic oligonucleotide
augggagcaagugauaggc

SEQ ID NO: 890138 - RNA, 19 nt, Artificial Sequence
  Description of Artificial Sequence: Synthetic oligonucleotide
uuccuugugcauaauucgg

SEQ ID NO: 890139 - RNA, 19 nt, Artificial Sequence
  Description of Artificial Sequence: Synthetic oligonucleotide
cuugguuccuacaggaagg

SEQ ID NO: 890140 - RNA, 19 nt, Artificial Sequence
  Description of Artificial Sequence: Synthetic oligonucleotide
uaauucuacucucuuacaa

SEQ ID NO: 890141 - RNA, 19 nt, Artificial Sequence
  Description of Artificial Sequence: Synthetic oligonucleotide
aguacggggaugcuguugg

SEQ ID NO: 890142 - RNA, 19 nt, Artificial Sequence
  Description of Artificial Sequence: Synthetic oligonucleotide
uauugauucauuagcuuaa

SEQ ID NO: 890143 - RNA, 19 nt, Artificial Sequence
  Description of Artificial Sequence: Synthetic oligonucleotide
aagaagauccaggcuaugg

SEQ ID NO: 890144 - RNA, 19 nt, Artificial Sequence
  Description of Artificial Sequence: Synthetic oligonucleotide
auaauucggguucuggaag

SEQ ID NO: 890145 - RNA, 19 nt, Artificial Sequence
  Description of Artificial Sequence: Synthetic oligonucleotide
gaugaugcgguuccuaaug

SEQ ID NO: 890146 - RNA, 19 nt, Artificial Sequence
  Description of Artificial Sequence: Synthetic oligonucleotide
uugcuagccagaaaagaag

SEQ ID NO: 890147 - RNA, 19 nt, Artificial Sequence
  Description of Artificial Sequence: Synthetic oligonucleotide
ucuagcauuggccaggaua

SEQ ID NO: 890148 - RNA, 19 nt, Artificial Sequence
  Description of Artificial Sequence: Synthetic oligonucleotide
augacagucaaugaugaag

SEQ ID NO: 890149 - RNA, 19 nt, Artificial Sequence
  Description of Artificial Sequence: Synthetic oligonucleotide
uccuugugcauaauucggg

SEQ ID NO: 890150 - RNA, 19 nt, Artificial Sequence
  Description of Artificial Sequence: Synthetic oligonucleotide
caagugauaggcuucuccc

SEQ ID NO: 890151 - RNA, 19 nt, Artificial Sequence
  Description of Artificial Sequence: Synthetic oligonucleotide
uccuugauacuguacagug

SEQ ID NO: 890152 - RNA, 19 nt, Artificial Sequence
  Description of Artificial Sequence: Synthetic oligonucleotide
agcucaguagagcaccugc

SEQ ID NO: 890153 - RNA, 19 nt, Artificial Sequence
  Description of Artificial Sequence: Synthetic oligonucleotide
aagugcacaagaccuaacu

SEQ ID NO: 890154 - RNA, 19 nt, Artificial Sequence
  Description of Artificial Sequence: Synthetic oligonucleotide
uauuugaccgucuucacuu

SEQ ID NO: 890155 - RNA, 19 nt, Artificial Sequence
  Description of Artificial Sequence: Synthetic oligonucleotide
ugugaauaguguuccagga

SEQ ID NO: 890156 - RNA, 19 nt, Artificial Sequence
  Description of Artificial Sequence: Synthetic oligonucleotide
agcaacauguccgucaggg

SEQ ID NO: 890157 - RNA, 19 nt, Artificial Sequence
  Description of Artificial Sequence: Synthetic oligonucleotide
guuaaacuggaugaugcgg

SEQ ID NO: 890158 - RNA, 19 nt, Artificial Sequence
  Description of Artificial Sequence: Synthetic oligonucleotide
aagauaaauauaggccuag

SEQ ID NO: 890159 - RNA, 19 nt, Artificial Sequence
  Description of Artificial Sequence: Synthetic oligonucleotide
aagaacaagugggcgaagg

SEQ ID NO: 890160 - RNA, 19 nt, Artificial Sequence
  Description of Artificial Sequence: Synthetic oligonucleotide
agaugcugguacuaagcac

SEQ ID NO: 890161 - RNA, 19 nt, Artificial Sequence
  Description of Artificial Sequence: Synthetic oligonucleotide
agaccuaacuaaccccugc

SEQ ID NO: 890162 - RNA, 19 nt, Artificial Sequence
  Description of Artificial Sequence: Synthetic oligonucleotide
uugugcauaauucggguuc

SEQ ID NO: 890163 - RNA, 19 nt, Artificial Sequence
  Description of Artificial Sequence: Synthetic oligonucleotide
aaaguaauucuacucucuu

SEQ ID NO: 890164 - RNA, 19 nt, Artificial Sequence
  Description of Artificial Sequence: Synthetic oligonucleotide
uucucaauggucaggccug

SEQ ID NO: 890165 - RNA, 19 nt, Artificial Sequence
  Description of Artificial Sequence: Synthetic oligonucleotide
cacacaaacacaguacggg

SEQ ID NO: 890166 - RNA, 19 nt, Artificial Sequence
  Description of Artificial Sequence: Synthetic oligonucleotide
cugugaauaguguuccagg

SEQ ID NO: 890167 - RNA, 19 nt, Artificial Sequence
  Description of Artificial Sequence: Synthetic oligonucleotide
ugcacaagaccuaacuaac

SEQ ID NO: 890168 - RNA, 19 nt, Artificial Sequence
  Description of Artificial Sequence: Synthetic oligonucleotide
accuaacuaaccccugccc

SEQ ID NO: 890169 - RNA, 19 nt, Artificial Sequence
  Description of Artificial Sequence: Synthetic oligonucleotide
uacucaagugacuuggcac

SEQ ID NO: 890170 - RNA, 19 nt, Artificial Sequence
  Description of Artificial Sequence: Synthetic oligonucleotide
guuccuaauguacuuggcc

SEQ ID NO: 890171 - RNA, 19 nt, Artificial Sequence
  Description of Artificial Sequence: Synthetic oligonucleotide
uuagcuuaacaaagaacaa

SEQ ID NO: 890172 - RNA, 19 nt, Artificial Sequence
  Description of Artificial Sequence: Synthetic oligonucleotide
cuagccaagggucugcagc

SEQ ID NO: 890173 - RNA, 19 nt, Artificial Sequence
  Description of Artificial Sequence: Synthetic oligonucleotide
cuuacaauuuccagaaaga

SEQ ID NO: 890174 - RNA, 19 nt, Artificial Sequence
  Description of Artificial Sequence: Synthetic oligonucleotide
uacucucuuacaauuucca

SEQ ID NO: 890175 - RNA, 19 nt, Artificial Sequence
  Description of Artificial Sequence: Synthetic oligonucleotide
acaagcauuaaaccuuuga

SEQ ID NO: 890176 - RNA, 19 nt, Artificial Sequence
  Description of Artificial Sequence: Synthetic oligonucleotide
aauaaugauaaggggcaga

SEQ ID NO: 890177 - RNA, 19 nt, Artificial Sequence
  Description of Artificial Sequence: Synthetic oligonucleotide
agccaguauguuccuagcc

SEQ ID NO: 890178 - RNA, 19 nt, Artificial Sequence
  Description of Artificial Sequence: Synthetic oligonucleotide
uacuaagcacaguacuucc

SEQ ID NO: 890179 - RNA, 19 nt, Artificial Sequence
  Description of Artificial Sequence: Synthetic oligonucleotide
aauauaggccuagcagggg

SEQ ID NO: 890180 - RNA, 19 nt, Artificial Sequence
  Description of Artificial Sequence: Synthetic oligonucleotide
guauuugucaggcccuggg

SEQ ID NO: 890181 - RNA, 19 nt, Artificial Sequence
  Description of Artificial Sequence: Synthetic oligonucleotide
guuaugaacaagcauuaaa

SEQ ID NO: 890182 - RNA, 19 nt, Artificial Sequence
  Description of Artificial Sequence: Synthetic oligonucleotide
aacccggcucauugaaagc

SEQ ID NO: 890183 - RNA, 19 nt, Artificial Sequence
  Description of Artificial Sequence: Synthetic oligonucleotide
aaccccaguacugaaaaga

SEQ ID NO: 890184 - RNA, 19 nt, Artificial Sequence
  Description of Artificial Sequence: Synthetic oligonucleotide
acucaagugacuuggcaca

SEQ ID NO: 890185 - RNA, 19 nt, Artificial Sequence
  Description of Artificial Sequence: Synthetic oligonucleotide
ucaaucagcuucugguagc

SEQ ID NO: 890186 - RNA, 19 nt, Artificial Sequence
  Description of Artificial Sequence: Synthetic oligonucleotide
aguauguuccuagccaagg

SEQ ID NO: 890187 - RNA, 19 nt, Artificial Sequence
  Description of Artificial Sequence: Synthetic oligonucleotide
auagugggcaccuuggcaa

SEQ ID NO: 890188 - RNA, 19 nt, Artificial Sequence
  Description of Artificial Sequence: Synthetic oligonucleotide
uaugauucacgccuuccuc

SEQ ID NO: 890189 - RNA, 19 nt, Artificial Sequence
  Description of Artificial Sequence: Synthetic oligonucleotide
guauguuccuagccaaggg

SEQ ID NO: 890190 - RNA, 19 nt, Artificial Sequence
  Description of Artificial Sequence: Synthetic oligonucleotide
aggcuagucacuguauggc

SEQ ID NO: 890191 - RNA, 19 nt, Artificial Sequence
  Description of Artificial Sequence: Synthetic oligonucleotide
agaauaugaugacagucaa

SEQ ID NO: 890192 - RNA, 19 nt, Artificial Sequence
  Description of Artificial Sequence: Synthetic oligonucleotide
cuguuuguagaaaggcuag

SEQ ID NO: 890193 - RNA, 19 nt, Artificial Sequence
  Description of Artificial Sequence: Synthetic oligonucleotide
cauagcucaguagagcacc

SEQ ID NO: 890194 - RNA, 19 nt, Artificial Sequence
  Description of Artificial Sequence: Synthetic oligonucleotide
caggauaguguccauugcc

SEQ ID NO: 890195 - RNA, 19 nt, Artificial Sequence
  Description of Artificial Sequence: Synthetic oligonucleotide
ggcaagaucgccaucaaag

SEQ ID NO: 890196 - RNA, 19 nt, Artificial Sequence
  Description of Artificial Sequence: Synthetic oligonucleotide
cuucaucucgucacgcgcg

SEQ ID NO: 890197 - RNA, 19 nt, Artificial Sequence
  Description of Artificial Sequence: Synthetic oligonucleotide
auaugauucacgccuuccu

SEQ ID NO: 890198 - RNA, 19 nt, Artificial Sequence
  Description of Artificial Sequence: Synthetic oligonucleotide
uccacauaugauucacgcc

SEQ ID NO: 890199 - RNA, 19 nt, Artificial Sequence
  Description of Artificial Sequence: Synthetic oligonucleotide
aggugaaguauuugucagg

SEQ ID NO: 890200 - RNA, 19 nt, Artificial Sequence
  Description of Artificial Sequence: Synthetic oligonucleotide
aaguaauucuacucucuua

SEQ ID NO: 890201 - RNA, 19 nt, Artificial Sequence
  Description of Artificial Sequence: Synthetic oligonucleotide
auuauuccacaugaaggag

SEQ ID NO: 890202 - RNA, 19 nt, Artificial Sequence
  Description of Artificial Sequence: Synthetic oligonucleotide
aagugggcgaagguuguac

SEQ ID NO: 890203 - RNA, 19 nt, Artificial Sequence
  Description of Artificial Sequence: Synthetic oligonucleotide
accauaguguauugaagca

SEQ ID NO: 890204 - RNA, 19 nt, Artificial Sequence
  Description of Artificial Sequence: Synthetic oligonucleotide
aagaucgccaucaaagaau

SEQ ID NO: 890205 - RNA, 19 nt, Artificial Sequence
  Description of Artificial Sequence: Synthetic oligonucleotide
uauaggccuagcaggggag

SEQ ID NO: 890206 - RNA, 19 nt, Artificial Sequence
  Description of Artificial Sequence: Synthetic oligonucleotide
gaaguguguucuuuagaac

SEQ ID NO: 890207 - RNA, 19 nt, Artificial Sequence
  Description of Artificial Sequence: Synthetic oligonucleotide
acuuguuaugaacaagcau

SEQ ID NO: 890208 - RNA, 19 nt, Artificial Sequence
  Description of Artificial Sequence: Synthetic oligonucleotide
cucucuuacaauuuccaga

SEQ ID NO: 890209 - RNA, 19 nt, Artificial Sequence
  Description of Artificial Sequence: Synthetic oligonucleotide
auucuacucucuuacaauu

SEQ ID NO: 890210 - RNA, 19 nt, Artificial Sequence
  Description of Artificial Sequence: Synthetic oligonucleotide
cucagugggagugugcugg

SEQ ID NO: 890211 - RNA, 19 nt, Artificial Sequence
  Description of Artificial Sequence: Synthetic oligonucleotide
gcggagaagauaaauauag

SEQ ID NO: 890212 - RNA, 19 nt, Artificial Sequence
  Description of Artificial Sequence: Synthetic oligonucleotide
accccugcccacuaaagag

SEQ ID NO: 890213 - RNA, 19 nt, Artificial Sequence
  Description of Artificial Sequence: Synthetic oligonucleotide
gaaggagauuccuugugca

SEQ ID NO: 890214 - RNA, 19 nt, Artificial Sequence
  Description of Artificial Sequence: Synthetic oligonucleotide
cacaguccacauaugauuc

SEQ ID NO: 890215 - RNA, 19 nt, Artificial Sequence
  Description of Artificial Sequence: Synthetic oligonucleotide
cuauugcuagccagaaaag

SEQ ID NO: 890216 - RNA, 19 nt, Artificial Sequence
  Description of Artificial Sequence: Synthetic oligonucleotide
uucacgccuuccucaaugg

SEQ ID NO: 890217 - RNA, 19 nt, Artificial Sequence
  Description of Artificial Sequence: Synthetic oligonucleotide
cagaaaaccuguuuguaga

SEQ ID NO: 890218 - RNA, 19 nt, Artificial Sequence
  Description of Artificial Sequence: Synthetic oligonucleotide
auauaggccuagcagggga

SEQ ID NO: 890219 - RNA, 19 nt, Artificial Sequence
  Description of Artificial Sequence: Synthetic oligonucleotide
augauucacgccuuccuca

SEQ ID NO: 890220 - RNA, 19 nt, Artificial Sequence
  Description of Artificial Sequence: Synthetic oligonucleotide
caggcuagucacuguaugg

SEQ ID NO: 890221 - RNA, 19 nt, Artificial Sequence
  Description of Artificial Sequence: Synthetic oligonucleotide
gcuauugcuagccagaaaa

SEQ ID NO: 890222 - RNA, 19 nt, Artificial Sequence
  Description of Artificial Sequence: Synthetic oligonucleotide
uucacacggguccuggaca

SEQ ID NO: 890223 - RNA, 19 nt, Artificial Sequence
  Description of Artificial Sequence: Synthetic oligonucleotide
uguccgucagggccgaugc

SEQ ID NO: 890224 - RNA, 19 nt, Artificial Sequence
  Description of Artificial Sequence: Synthetic oligonucleotide
acacaguccacauaugauu

SEQ ID NO: 890225 - RNA, 19 nt, Artificial Sequence
  Description of Artificial Sequence: Synthetic oligonucleotide
aggaagacccacauacucg

SEQ ID NO: 890226 - RNA, 19 nt, Artificial Sequence
  Description of Artificial Sequence: Synthetic oligonucleotide
guccaaagugcacaagacc

SEQ ID NO: 890227 - RNA, 19 nt, Artificial Sequence
  Description of Artificial Sequence: Synthetic oligonucleotide
uaauucggguucuggaagu

SEQ ID NO: 890228 - RNA, 19 nt, Artificial Sequence
  Description of Artificial Sequence: Synthetic oligonucleotide
uggaaguguguucuuuaga

SEQ ID NO: 890229 - RNA, 19 nt, Artificial Sequence
  Description of Artificial Sequence: Synthetic oligonucleotide
agaucgccaucaaagaauc

SEQ ID NO: 890230 - RNA, 19 nt, Artificial Sequence
  Description of Artificial Sequence: Synthetic oligonucleotide
uauuugucaggcccugggu

SEQ ID NO: 890231 - RNA, 19 nt, Artificial Sequence
  Description of Artificial Sequence: Synthetic oligonucleotide
cuaugggagcaagugauag

SEQ ID NO: 890232 - RNA, 19 nt, Artificial Sequence
  Description of Artificial Sequence: Synthetic oligonucleotide
gguuaaacuggaugaugcg

SEQ ID NO: 890233 - RNA, 19 nt, Artificial Sequence
  Description of Artificial Sequence: Synthetic oligonucleotide
acaaacacaguacggggau

SEQ ID NO: 890234 - RNA, 19 nt, Artificial Sequence
  Description of Artificial Sequence: Synthetic oligonucleotide
acagugccuacacccaccg

SEQ ID NO: 890235 - RNA, 19 nt, Artificial Sequence
  Description of Artificial Sequence: Synthetic oligonucleotide
acagcacaaucacauauaa

SEQ ID NO: 890236 - RNA, 19 nt, Artificial Sequence
  Description of Artificial Sequence: Synthetic oligonucleotide
uacaguggguccaccaacu

SEQ ID NO: 890237 - RNA, 19 nt, Artificial Sequence
  Description of Artificial Sequence: Synthetic oligonucleotide
gaccuaacuaaccccugcc

SEQ ID NO: 890238 - RNA, 19 nt, Artificial Sequence
  Description of Artificial Sequence: Synthetic oligonucleotide
gauaguguccauugccaga

SEQ ID NO: 890239 - RNA, 19 nt, Artificial Sequence
  Description of Artificial Sequence: Synthetic oligonucleotide
ucguccauguugaagguuu

SEQ ID NO: 890240 - RNA, 19 nt, Artificial Sequence
  Description of Artificial Sequence: Synthetic oligonucleotide
agcuucaucucgucacgcg

SEQ ID NO: 890241 - RNA, 19 nt, Artificial Sequence
  Description of Artificial Sequence: Synthetic oligonucleotide
acaaagaguucgaucccgc

SEQ ID NO: 890242 - RNA, 19 nt, Artificial Sequence
  Description of Artificial Sequence: Synthetic oligonucleotide
acauaugauucacgccuuc

SEQ ID NO: 890243 - RNA, 19 nt, Artificial Sequence
  Description of Artificial Sequence: Synthetic oligonucleotide
ucccuaagguacuugguuc

SEQ ID NO: 890244 - RNA, 19 nt, Artificial Sequence
  Description of Artificial Sequence: Synthetic oligonucleotide
aggcuagcuauugcuagcc

SEQ ID NO: 890245 - RNA, 19 nt, Artificial Sequence
  Description of Artificial Sequence: Synthetic oligonucleotide
ugcccacuaaagaggaggc

SEQ ID NO: 890246 - RNA, 19 nt, Artificial Sequence
  Description of Artificial Sequence: Synthetic oligonucleotide
ucgaccugcaggucagccg

SEQ ID NO: 890247 - RNA, 19 nt, Artificial Sequence
  Description of Artificial Sequence: Synthetic oligonucleotide
aaccccugcccacuaaaga

SEQ ID NO: 890248 - RNA, 19 nt, Artificial Sequence
  Description of Artificial Sequence: Synthetic oligonucleotide
aaggagauuccuugugcau

SEQ ID NO: 890249 - RNA, 19 nt, Artificial Sequence
  Description of Artificial Sequence: Synthetic oligonucleotide
aaagugcacaagaccuaac

SEQ ID NO: 890250 - RNA, 19 nt, Artificial Sequence
  Description of Artificial Sequence: Synthetic oligonucleotide
uucgaucccgcccgcagcc

SEQ ID NO: 890251 - RNA, 19 nt, Artificial Sequence
  Description of Artificial Sequence: Synthetic oligonucleotide
ugagcgccugugaugagga

SEQ ID NO: 890252 - RNA, 19 nt, Artificial Sequence
  Description of Artificial Sequence: Synthetic oligonucleotide
aggaaggagauuccuugug

SEQ ID NO: 890253 - RNA, 19 nt, Artificial Sequence
  Description of Artificial Sequence: Synthetic oligonucleotide
auguuccuagccaaggguc

SEQ ID NO: 890254 - RNA, 19 nt, Artificial Sequence
  Description of Artificial Sequence: Synthetic oligonucleotide
agaacaagugggcgaaggu

SEQ ID NO: 890255 - RNA, 19 nt, Artificial Sequence
  Description of Artificial Sequence: Synthetic oligonucleotide
gugcacaagaccuaacuaa

SEQ ID NO: 890256 - RNA, 19 nt, Artificial Sequence
  Description of Artificial Sequence: Synthetic oligonucleotide
cuagucacuguauggcuuc

SEQ ID NO: 890257 - RNA, 19 nt, Artificial Sequence
  Description of Artificial Sequence: Synthetic oligonucleotide
guguccaaagugcacaaga

SEQ ID NO: 890258 - RNA, 19 nt, Artificial Sequence
  Description of Artificial Sequence: Synthetic oligonucleotide
cauaauucggguucuggaa

SEQ ID NO: 890259 - RNA, 19 nt, Artificial Sequence
  Description of Artificial Sequence: Synthetic oligonucleotide
cauaugauucacgccuucc

SEQ ID NO: 890260 - RNA, 19 nt, Artificial Sequence
  Description of Artificial Sequence: Synthetic oligonucleotide
caaagaguucgaucccgcc

SEQ ID NO: 890261 - RNA, 19 nt, Artificial Sequence
  Description of Artificial Sequence: Synthetic oligonucleotide
cagaagguuggggacauag

SEQ ID NO: 890262 - RNA, 19 nt, Artificial Sequence
  Description of Artificial Sequence: Synthetic oligonucleotide
uggccugugaauaguguuc

SEQ ID NO: 890263 - RNA, 19 nt, Artificial Sequence
  Description of Artificial Sequence: Synthetic oligonucleotide
uuugucaggcccuggguua

SEQ ID NO: 890264 - RNA, 19 nt, Artificial Sequence
  Description of Artificial Sequence: Synthetic oligonucleotide
aaggcaacugucacuucag

SEQ ID NO: 890265 - RNA, 19 nt, Artificial Sequence
  Description of Artificial Sequence: Synthetic oligonucleotide
guguucuuuagaacaaaug

SEQ ID NO: 890266 - RNA, 19 nt, Artificial Sequence
  Description of Artificial Sequence: Synthetic oligonucleotide
ggaaggagauuccuugugc

SEQ ID NO: 890267 - RNA, 19 nt, Artificial Sequence
  Description of Artificial Sequence: Synthetic oligonucleotide
aguucgaucccgcccgcag

SEQ ID NO: 890268 - RNA, 19 nt, Artificial Sequence
  Description of Artificial Sequence: Synthetic oligonucleotide
uaaacucaauguuccccac

SEQ ID NO: 890269 - RNA, 19 nt, Artificial Sequence
  Description of Artificial Sequence: Synthetic oligonucleotide
cugguacuaagcacaguac

SEQ ID NO: 890270 - RNA, 19 nt, Artificial Sequence
  Description of Artificial Sequence: Synthetic oligonucleotide
accgucagggccauagugg

SEQ ID NO: 890271 - RNA, 19 nt, Artificial Sequence
  Description of Artificial Sequence: Synthetic oligonucleotide
agugcacaagaccuaacua

SEQ ID NO: 890272 - RNA, 19 nt, Artificial Sequence
  Description of Artificial Sequence: Synthetic oligonucleotide
uucaucucgucacgcgcgc

SEQ ID NO: 890273 - RNA, 19 nt, Artificial Sequence
  Description of Artificial Sequence: Synthetic oligonucleotide
uuuaaaggacaggucccca

SEQ ID NO: 890274 - RNA, 19 nt, Artificial Sequence
  Description of Artificial Sequence: Synthetic oligonucleotide
caccaacuuguuaugaaca

SEQ ID NO: 890275 - RNA, 19 nt, Artificial Sequence
  Description of Artificial Sequence: Synthetic oligonucleotide
guacuaagcacaguacuuc

SEQ ID NO: 890276 - RNA, 19 nt, Artificial Sequence
  Description of Artificial Sequence: Synthetic oligonucleotide
uaaaggacagguccccauu

SEQ ID NO: 890277 - RNA, 19 nt, Artificial Sequence
  Description of Artificial Sequence: Synthetic oligonucleotide
aauucggguucuggaagug

SEQ ID NO: 890278 - RNA, 19 nt, Artificial Sequence
  Description of Artificial Sequence: Synthetic oligonucleotide
ggagaauaugaugacaguc

SEQ ID NO: 890279 - RNA, 19 nt, Artificial Sequence
  Description of Artificial Sequence: Synthetic oligonucleotide
acauagcucaguagagcac

SEQ ID NO: 890280 - RNA, 19 nt, Artificial Sequence
  Description of Artificial Sequence: Synthetic oligonucleotide
ugugcauaauucggguucu

SEQ ID NO: 890281 - RNA, 19 nt, Artificial Sequence
  Description of Artificial Sequence: Synthetic oligonucleotide
uugauacuguacagugggu

SEQ ID NO: 890282 - RNA, 19 nt, Artificial Sequence
  Description of Artificial Sequence: Synthetic oligonucleotide
agacccgccugucuucuuc

SEQ ID NO: 890283 - RNA, 19 nt, Artificial Sequence
  Description of Artificial Sequence: Synthetic oligonucleotide
ugauucacgccuuccucaa

SEQ ID NO: 890284 - RNA, 19 nt, Artificial Sequence
  Description of Artificial Sequence: Synthetic oligonucleotide
caucaaagaaucuagcauu

SEQ ID NO: 890285 - RNA, 19 nt, Artificial Sequence
  Description of Artificial Sequence: Synthetic oligonucleotide
gaagauaaauauaggccua

SEQ ID NO: 890286 - RNA, 19 nt, Artificial Sequence
  Description of Artificial Sequence: Synthetic oligonucleotide
gaagcggagaagauaaaua

SEQ ID NO: 890287 - RNA, 19 nt, Artificial Sequence
  Description of Artificial Sequence: Synthetic oligonucleotide
guaauucuacucucuuaca

SEQ ID NO: 890288 - RNA, 19 nt, Artificial Sequence
  Description of Artificial Sequence: Synthetic oligonucleotide
auaggccuagcaggggagc

SEQ ID NO: 890289 - RNA, 19 nt, Artificial Sequence
  Description of Artificial Sequence: Synthetic oligonucleotide
uguugaagguuuucacaua

SEQ ID NO: 890290 - RNA, 19 nt, Artificial Sequence
  Description of Artificial Sequence: Synthetic oligonucleotide
ugcagcaaccauaguguau

SEQ ID NO: 890291 - RNA, 19 nt, Artificial Sequence
  Description of Artificial Sequence: Synthetic oligonucleotide
acacucgaccugcagguca

SEQ ID NO: 890292 - RNA, 19 nt, Artificial Sequence
  Description of Artificial Sequence: Synthetic oligonucleotide
gcuaaacucaauguucccc

SEQ ID NO: 890293 - RNA, 19 nt, Artificial Sequence
  Description of Artificial Sequence: Synthetic oligonucleotide
agacccacauacucgucca

SEQ ID NO: 890294 - RNA, 19 nt, Artificial Sequence
  Description of Artificial Sequence: Synthetic oligonucleotide
aucgccaucaaagaaucua

SEQ ID NO: 890295 - RNA, 19 nt, Artificial Sequence
  Description of Artificial Sequence: Synthetic oligonucleotide
cuucacacggguccuggac

SEQ ID NO: 890296 - RNA, 19 nt, Artificial Sequence
  Description of Artificial Sequence: Synthetic oligonucleotide
aggauaguguccauugcca

SEQ ID NO: 890297 - RNA, 19 nt, Artificial Sequence
  Description of Artificial Sequence: Synthetic oligonucleotide
ucacacggguccuggacac

SEQ ID NO: 890298 - RNA, 19 nt, Artificial Sequence
  Description of Artificial Sequence: Synthetic oligonucleotide
guucucaauggucaggccu

SEQ ID NO: 890299 - RNA, 19 nt, Artificial Sequence
  Description of Artificial Sequence: Synthetic oligonucleotide
aaucuagcauuggccagga

SEQ ID NO: 890300 - RNA, 19 nt, Artificial Sequence
  Description of Artificial Sequence: Synthetic oligonucleotide
agaguucgaucccgcccgc

SEQ ID NO: 890301 - RNA, 19 nt, Artificial Sequence
  Description of Artificial Sequence: Synthetic oligonucleotide
caagucuauugauucauua

SEQ ID NO: 890302 - RNA, 19 nt, Artificial Sequence
  Description of Artificial Sequence: Synthetic oligonucleotide
caguauguuccuagccaag

SEQ ID NO: 890303 - RNA, 19 nt, Artificial Sequence
  Description of Artificial Sequence: Synthetic oligonucleotide
aguauuugucaggcccugg

SEQ ID NO: 890304 - RNA, 19 nt, Artificial Sequence
  Description of Artificial Sequence: Synthetic oligonucleotide
guggguguuuucagggugg

SEQ ID NO: 890305 - RNA, 19 nt, Artificial Sequence
  Description of Artificial Sequence: Synthetic oligonucleotide
agugggcgaagguuguacu

SEQ ID NO: 890306 - RNA, 19 nt, Artificial Sequence
  Description of Artificial Sequence: Synthetic oligonucleotide
gcaaccauaguguauugaa

SEQ ID NO: 890307 - RNA, 19 nt, Artificial Sequence
  Description of Artificial Sequence: Synthetic oligonucleotide
ccuugauacuguacagugg

SEQ ID NO: 890308 - RNA, 19 nt, Artificial Sequence
  Description of Artificial Sequence: Synthetic oligonucleotide
ucgucacgcgcgcuucccg

SEQ ID NO: 890309 - RNA, 19 nt, Artificial Sequence
  Description of Artificial Sequence: Synthetic oligonucleotide
ggcaacugucacuucagac

SEQ ID NO: 890310 - RNA, 19 nt, Artificial Sequence
  Description of Artificial Sequence: Synthetic oligonucleotide
aagaccuaacuaaccccug

SEQ ID NO: 890311 - RNA, 19 nt, Artificial Sequence
  Description of Artificial Sequence: Synthetic oligonucleotide
caagaccuaacuaaccccu

SEQ ID NO: 890312 - RNA, 19 nt, Artificial Sequence
  Description of Artificial Sequence: Synthetic oligonucleotide
caagaucgccaucaaagaa

SEQ ID NO: 890313 - RNA, 19 nt, Artificial Sequence
  Description of Artificial Sequence: Synthetic oligonucleotide
uccgucagggccgaugccu

SEQ ID NO: 890314 - RNA, 19 nt, Artificial Sequence
  Description of Artificial Sequence: Synthetic oligonucleotide
gugagcgccugugaugagg

SEQ ID NO: 890315 - RNA, 19 nt, Artificial Sequence
  Description of Artificial Sequence: Synthetic oligonucleotide
gaccgucuucacuuucagc

SEQ ID NO: 890316 - RNA, 19 nt, Artificial Sequence
  Description of Artificial Sequence: Synthetic oligonucleotide
agggccgaugccuccaaca

SEQ ID NO: 890317 - RNA, 19 nt, Artificial Sequence
  Description of Artificial Sequence: Synthetic oligonucleotide
caggauaaucagcuucauc

SEQ ID NO: 890318 - RNA, 19 nt, Artificial Sequence
  Description of Artificial Sequence: Synthetic oligonucleotide
gaaaaccuguuuguagaaa

SEQ ID NO: 890319 - RNA, 19 nt, Artificial Sequence
  Description of Artificial Sequence: Synthetic oligonucleotide
ugggagcaagugauaggcu

SEQ ID NO: 890320 - RNA, 19 nt, Artificial Sequence
  Description of Artificial Sequence: Synthetic oligonucleotide
gcauaauucggguucugga

SEQ ID NO: 890321 - RNA, 19 nt, Artificial Sequence
  Description of Artificial Sequence: Synthetic oligonucleotide
cuaauguacuuggccgccc

SEQ ID NO: 890322 - RNA, 19 nt, Artificial Sequence
  Description of Artificial Sequence: Synthetic oligonucleotide
gucuauugauucauuagcu

SEQ ID NO: 890323 - RNA, 19 nt, Artificial Sequence
  Description of Artificial Sequence: Synthetic oligonucleotide
cacucgaccugcaggucag

SEQ ID NO: 890324 - RNA, 19 nt, Artificial Sequence
  Description of Artificial Sequence: Synthetic oligonucleotide
ugggcgaagguuguacuuc

SEQ ID NO: 890325 - RNA, 19 nt, Artificial Sequence
  Description of Artificial Sequence: Synthetic oligonucleotide
cacuaaagaggaggcacac

SEQ ID NO: 890326 - RNA, 19 nt, Artificial Sequence
  Description of Artificial Sequence: Synthetic oligonucleotide
gaaaggcuagcuauugcua

SEQ ID NO: 890327 - RNA, 19 nt, Artificial Sequence
  Description of Artificial Sequence: Synthetic oligonucleotide
caccgucagggccauagug

SEQ ID NO: 890328 - RNA, 19 nt, Artificial Sequence
  Description of Artificial Sequence: Synthetic oligonucleotide
gaggcagcaaccacuccac

SEQ ID NO: 890329 - RNA, 19 nt, Artificial Sequence
  Description of Artificial Sequence: Synthetic oligonucleotide
cucaagugacuuggcacag

SEQ ID NO: 890330 - RNA, 19 nt, Artificial Sequence
  Description of Artificial Sequence: Synthetic oligonucleotide
guccccauucuuauaguac

SEQ ID NO: 890331 - RNA, 19 nt, Artificial Sequence
  Description of Artificial Sequence: Synthetic oligonucleotide
ccaaggugaaguauuuguc

SEQ ID NO: 890332 - RNA, 19 nt, Artificial Sequence
  Description of Artificial Sequence: Synthetic oligonucleotide
cacuggccugugaauagug

SEQ ID NO: 890333 - RNA, 19 nt, Artificial Sequence
  Description of Artificial Sequence: Synthetic oligonucleotide
aacuucucagugggagugu

SEQ ID NO: 890334 - RNA, 19 nt, Artificial Sequence
  Description of Artificial Sequence: Synthetic oligonucleotide
ggacauagcucaguagagc

SEQ ID NO: 890335 - RNA, 19 nt, Artificial Sequence
  Description of Artificial Sequence: Synthetic oligonucleotide
ccaccaacuuguuaugaac

SEQ ID NO: 890336 - RNA, 19 nt, Artificial Sequence
  Description of Artificial Sequence: Synthetic oligonucleotide
acuaaagaggaggcacaca

SEQ ID NO: 890337 - RNA, 19 nt, Artificial Sequence
  Description of Artificial Sequence: Synthetic oligonucleotide
caucacacucgaccugcag

SEQ ID NO: 890338 - RNA, 19 nt, Artificial Sequence
  Description of Artificial Sequence: Synthetic oligonucleotide
gcaagaucgccaucaaaga

SEQ ID NO: 890339 - RNA, 19 nt, Artificial Sequence
  Description of Artificial Sequence: Synthetic oligonucleotide
agcaaccauaguguauuga

SEQ ID NO: 890340 - RNA, 19 nt, Artificial Sequence
  Description of Artificial Sequence: Synthetic oligonucleotide
guucgaucccgcccgcagc

SEQ ID NO: 890341 - RNA, 19 nt, Artificial Sequence
  Description of Artificial Sequence: Synthetic oligonucleotide
cuaaacaaagaugcuggua

SEQ ID NO: 890342 - RNA, 19 nt, Artificial Sequence
  Description of Artificial Sequence: Synthetic oligonucleotide
aggagauuccuugugcaua

SEQ ID NO: 890343 - RNA, 19 nt, Artificial Sequence
  Description of Artificial Sequence: Synthetic oligonucleotide
ggggcuugaagaacaagug

SEQ ID NO: 890344 - RNA, 19 nt, Artificial Sequence
  Description of Artificial Sequence: Synthetic oligonucleotide
ucucgucacgcgcgcuucc

SEQ ID NO: 890345 - RNA, 19 nt, Artificial Sequence
  Description of Artificial Sequence: Synthetic oligonucleotide
agccuggcuuuucugaauu

SEQ ID NO: 890346 - RNA, 19 nt, Artificial Sequence
  Description of Artificial Sequence: Synthetic oligonucleotide
aagccuugugagcgccugu

SEQ ID NO: 890347 - RNA, 19 nt, Artificial Sequence
  Description of Artificial Sequence: Synthetic oligonucleotide
cauugccagagucuucaca

SEQ ID NO: 890348 - RNA, 19 nt, Artificial Sequence
  Description of Artificial Sequence: Synthetic oligonucleotide
gucacgcgcgcuucccgcg

SEQ ID NO: 890349 - RNA, 19 nt, Artificial Sequence
  Description of Artificial Sequence: Synthetic oligonucleotide
aacuaaccccugcccacua

SEQ ID NO: 890350 - RNA, 19 nt, Artificial Sequence
  Description of Artificial Sequence: Synthetic oligonucleotide
ccacauaugauucacgccu

SEQ ID NO: 890351 - RNA, 19 nt, Artificial Sequence
  Description of Artificial Sequence: Synthetic oligonucleotide
ggcaucacacucgaccugc

SEQ ID NO: 890352 - RNA, 19 nt, Artificial Sequence
  Description of Artificial Sequence: Synthetic oligonucleotide
cggagaagauaaauauagg

SEQ ID NO: 890353 - RNA, 19 nt, Artificial Sequence
  Description of Artificial Sequence: Synthetic oligonucleotide
ggugcucucgaggaagacc

SEQ ID NO: 890354 - RNA, 19 nt, Artificial Sequence
  Description of Artificial Sequence: Synthetic oligonucleotide
gccauagugggcaccuugg

SEQ ID NO: 890355 - RNA, 19 nt, Artificial Sequence
  Description of Artificial Sequence: Synthetic oligonucleotide
aggcaacugucacuucaga

SEQ ID NO: 890356 - RNA, 19 nt, Artificial Sequence
  Description of Artificial Sequence: Synthetic oligonucleotide
ccaacuuguuaugaacaag

SEQ ID NO: 890357 - RNA, 19 nt, Artificial Sequence
  Description of Artificial Sequence: Synthetic oligonucleotide
cucgaccugcaggucagcc

SEQ ID NO: 890358 - RNA, 19 nt, Artificial Sequence
  Description of Artificial Sequence: Synthetic oligonucleotide
ggaagacccacauacucgu

SEQ ID NO: 890359 - RNA, 19 nt, Artificial Sequence
  Description of Artificial Sequence: Synthetic oligonucleotide
caaacacaguacggggaug

SEQ ID NO: 890360 - RNA, 19 nt, Artificial Sequence
  Description of Artificial Sequence: Synthetic oligonucleotide
auucggguucuggaagugu

SEQ ID NO: 890361 - RNA, 19 nt, Artificial Sequence
  Description of Artificial Sequence: Synthetic oligonucleotide
cagccaaguggggugcucc

SEQ ID NO: 890362 - RNA, 19 nt, Artificial Sequence
  Description of Artificial Sequence: Synthetic oligonucleotide
gugaauaguguuccaggau

SEQ ID NO: 890363 - RNA, 19 nt, Artificial Sequence
  Description of Artificial Sequence: Synthetic oligonucleotide
ugugagcgccugugaugag

SEQ ID NO: 890364 - RNA, 19 nt, Artificial Sequence
  Description of Artificial Sequence: Synthetic oligonucleotide
acacggguccuggacacca

SEQ ID NO: 890365 - RNA, 19 nt, Artificial Sequence
  Description of Artificial Sequence: Synthetic oligonucleotide
cucucgaggaagacccaca

SEQ ID NO: 890366 - RNA, 19 nt, Artificial Sequence
  Description of Artificial Sequence: Synthetic oligonucleotide
ugcucucgaggaagaccca

SEQ ID NO: 890367 - RNA, 19 nt, Artificial Sequence
  Description of Artificial Sequence: Synthetic oligonucleotide
cagcaaccauaguguauug

SEQ ID NO: 890368 - RNA, 19 nt, Artificial Sequence
  Description of Artificial Sequence: Synthetic oligonucleotide
ccuaacuaaccccugccca

SEQ ID NO: 890369 - RNA, 19 nt, Artificial Sequence
  Description of Artificial Sequence: Synthetic oligonucleotide
gcacaagaccuaacuaacc

SEQ ID NO: 890370 - RNA, 19 nt, Artificial Sequence
  Description of Artificial Sequence: Synthetic oligonucleotide
cgguuccuaauguacuugg

SEQ ID NO: 890371 - RNA, 19 nt, Artificial Sequence
  Description of Artificial Sequence: Synthetic oligonucleotide
uggguguuuucagggugga

SEQ ID NO: 890372 - RNA, 19 nt, Artificial Sequence
  Description of Artificial Sequence: Synthetic oligonucleotide
uagcucaguagagcaccug

SEQ ID NO: 890373 - RNA, 19 nt, Artificial Sequence
  Description of Artificial Sequence: Synthetic oligonucleotide
acuaaccccugcccacuaa

SEQ ID NO: 890374 - RNA, 19 nt, Artificial Sequence
  Description of Artificial Sequence: Synthetic oligonucleotide
gguuccuaauguacuuggc

SEQ ID NO: 890375 - RNA, 19 nt, Artificial Sequence
  Description of Artificial Sequence: Synthetic oligonucleotide
gaacaagugggcgaagguu

SEQ ID NO: 890376 - RNA, 19 nt, Artificial Sequence
  Description of Artificial Sequence: Synthetic oligonucleotide
ccuaauguacuuggccgcc

SEQ ID NO: 890377 - RNA, 19 nt, Artificial Sequence
  Description of Artificial Sequence: Synthetic oligonucleotide
auagcucaguagagcaccu

SEQ ID NO: 890378 - RNA, 19 nt, Artificial Sequence
  Description of Artificial Sequence: Synthetic oligonucleotide
gaacaagcauuaaaccuuu

SEQ ID NO: 890379 - RNA, 19 nt, Artificial Sequence
  Description of Artificial Sequence: Synthetic oligonucleotide
cacagaagcggagaagaua

SEQ ID NO: 890380 - RNA, 19 nt, Artificial Sequence
  Description of Artificial Sequence: Synthetic oligonucleotide
gaauaugaugacagucaau

SEQ ID NO: 890381 - RNA, 19 nt, Artificial Sequence
  Description of Artificial Sequence: Synthetic oligonucleotide
cagcacaaucacauauaaa

SEQ ID NO: 890382 - RNA, 19 nt, Artificial Sequence
  Description of Artificial Sequence: Synthetic oligonucleotide
gccagagucuucacacggg

SEQ ID NO: 890383 - RNA, 19 nt, Artificial Sequence
  Description of Artificial Sequence: Synthetic oligonucleotide
ggcuuucaagacuccaaaa

SEQ ID NO: 890384 - RNA, 19 nt, Artificial Sequence
  Description of Artificial Sequence: Synthetic oligonucleotide
gugccuacacccaccguca

SEQ ID NO: 890385 - RNA, 19 nt, Artificial Sequence
  Description of Artificial Sequence: Synthetic oligonucleotide
ucagggccgaugccuccaa

SEQ ID NO: 890386 - RNA, 19 nt, Artificial Sequence
  Description of Artificial Sequence: Synthetic oligonucleotide
gaagacccacauacucguc

SEQ ID NO: 890387 - RNA, 19 nt, Artificial Sequence
  Description of Artificial Sequence: Synthetic oligonucleotide
caguacggggaugcuguug

SEQ ID NO: 890388 - RNA, 19 nt, Artificial Sequence
  Description of Artificial Sequence: Synthetic oligonucleotide
agccccaaggugaaguauu

SEQ ID NO: 890389 - RNA, 19 nt, Artificial Sequence
  Description of Artificial Sequence: Synthetic oligonucleotide
cuggaacccggcucauuga

SEQ ID NO: 890390 - RNA, 19 nt, Artificial Sequence
  Description of Artificial Sequence: Synthetic oligonucleotide
ccaguauguuccuagccaa

SEQ ID NO: 890391 - RNA, 19 nt, Artificial Sequence
  Description of Artificial Sequence: Synthetic oligonucleotide
cucgucacgcgcgcuuccc

SEQ ID NO: 890392 - RNA, 19 nt, Artificial Sequence
  Description of Artificial Sequence: Synthetic oligonucleotide
guguguucuuuagaacaaa

SEQ ID NO: 890393 - RNA, 19 nt, Artificial Sequence
  Description of Artificial Sequence: Synthetic oligonucleotide
cagcaaccacuccacagaa

SEQ ID NO: 890394 - RNA, 19 nt, Artificial Sequence
  Description of Artificial Sequence: Synthetic oligonucleotide
gccgcauucccauccagaa

SEQ ID NO: 890395 - RNA, 19 nt, Artificial Sequence
  Description of Artificial Sequence: Synthetic oligonucleotide
cuugugcauaauucggguu

SEQ ID NO: 890396 - RNA, 19 nt, Artificial Sequence
  Description of Artificial Sequence: Synthetic oligonucleotide
gagugguagcucucugggu

SEQ ID NO: 890397 - RNA, 19 nt, Artificial Sequence
  Description of Artificial Sequence: Synthetic oligonucleotide
agccgcauucccauccaga

SEQ ID NO: 890398 - RNA, 19 nt, Artificial Sequence
  Description of Artificial Sequence: Synthetic oligonucleotide
ugcugguacuaagcacagu

SEQ ID NO: 890399 - RNA, 19 nt, Artificial Sequence
  Description of Artificial Sequence: Synthetic oligonucleotide
ggguucuggaaguguguuc

SEQ ID NO: 890400 - RNA, 19 nt, Artificial Sequence
  Description of Artificial Sequence: Synthetic oligonucleotide
gguccccauucuuauagua

SEQ ID NO: 890401 - RNA, 19 nt, Artificial Sequence
  Description of Artificial Sequence: Synthetic oligonucleotide
cccaaggugaaguauuugu

SEQ ID NO: 890402 - RNA, 19 nt, Artificial Sequence
  Description of Artificial Sequence: Synthetic oligonucleotide
uagcauuggccaggauagu

SEQ ID NO: 890403 - RNA, 19 nt, Artificial Sequence
  Description of Artificial Sequence: Synthetic oligonucleotide
cagcuccaagguggcaucc

SEQ ID NO: 890404 - RNA, 19 nt, Artificial Sequence
  Description of Artificial Sequence: Synthetic oligonucleotide
cccaccgucagggccauag

SEQ ID NO: 890405 - RNA, 19 nt, Artificial Sequence
  Description of Artificial Sequence: Synthetic oligonucleotide
cagccgcauucccauccag

SEQ ID NO: 890406 - RNA, 19 nt, Artificial Sequence
  Description of Artificial Sequence: Synthetic oligonucleotide
cucccuaagguacuugguu

SEQ ID NO: 890407 - RNA, 19 nt, Artificial Sequence
  Description of Artificial Sequence: Synthetic oligonucleotide
gguacuaagcacaguacuu

SEQ ID NO: 890408 - RNA, 19 nt, Artificial Sequence
  Description of Artificial Sequence: Synthetic oligonucleotide
gggagcaagugauaggcuu

SEQ ID NO: 890409 - RNA, 19 nt, Artificial Sequence
  Description of Artificial Sequence: Synthetic oligonucleotide
aagacccgccugucuucuu

SEQ ID NO: 890410 - RNA, 19 nt, Artificial Sequence
  Description of Artificial Sequence: Synthetic oligonucleotide
cugcagcaaccauagugua

SEQ ID NO: 890411 - RNA, 19 nt, Artificial Sequence
  Description of Artificial Sequence: Synthetic oligonucleotide
acaguacggggaugcuguu

SEQ ID NO: 890412 - RNA, 19 nt, Artificial Sequence
  Description of Artificial Sequence: Synthetic oligonucleotide
ggcuagucacuguauggcu

SEQ ID NO: 890413 - RNA, 19 nt, Artificial Sequence
  Description of Artificial Sequence: Synthetic oligonucleotide
auggaacuucucaguggga

SEQ ID NO: 890414 - RNA, 19 nt, Artificial Sequence
  Description of Artificial Sequence: Synthetic oligonucleotide
cuccuugauacuguacagu

SEQ ID NO: 890415 - RNA, 19 nt, Artificial Sequence
  Description of Artificial Sequence: Synthetic oligonucleotide
gucaggcccuggguuaaac

SEQ ID NO: 890416 - RNA, 19 nt, Artificial Sequence
  Description of Artificial Sequence: Synthetic oligonucleotide
gugcaaggcccuagguuca

SEQ ID NO: 890417 - RNA, 19 nt, Artificial Sequence
  Description of Artificial Sequence: Synthetic oligonucleotide
gcagcaaccauaguguauu

SEQ ID NO: 890418 - RNA, 19 nt, Artificial Sequence
  Description of Artificial Sequence: Synthetic oligonucleotide
ucgaucccgcccgcagccc

SEQ ID NO: 890419 - RNA, 19 nt, Artificial Sequence
  Description of Artificial Sequence: Synthetic oligonucleotide
cuaagguacuugguuccua

SEQ ID NO: 890420 - RNA, 19 nt, Artificial Sequence
  Description of Artificial Sequence: Synthetic oligonucleotide
cuacaggaaggagauuccu

SEQ ID NO: 890421 - RNA, 19 nt, Artificial Sequence
  Description of Artificial Sequence: Synthetic oligonucleotide
guccgucagggccgaugcc

SEQ ID NO: 890422 - RNA, 19 nt, Artificial Sequence
  Description of Artificial Sequence: Synthetic oligonucleotide
cacauaugauucacgccuu

SEQ ID NO: 890423 - RNA, 19 nt, Artificial Sequence
  Description of Artificial Sequence: Synthetic oligonucleotide
ccagaauguggguguuuuc

SEQ ID NO: 890424 - RNA, 19 nt, Artificial Sequence
  Description of Artificial Sequence: Synthetic oligonucleotide
acauguccgucagggccga

SEQ ID NO: 890425 - RNA, 19 nt, Artificial Sequence
  Description of Artificial Sequence: Synthetic oligonucleotide
ucuuagcagccuggcuuuu

SEQ ID NO: 890426 - RNA, 19 nt, Artificial Sequence
  Description of Artificial Sequence: Synthetic oligonucleotide
cacacggguccuggacacc

SEQ ID NO: 890427 - RNA, 19 nt, Artificial Sequence
  Description of Artificial Sequence: Synthetic oligonucleotide
gcucucgaggaagacccac

SEQ ID NO: 890428 - RNA, 19 nt, Artificial Sequence
  Description of Artificial Sequence: Synthetic oligonucleotide
gauucacgccuuccucaau

SEQ ID NO: 890429 - RNA, 19 nt, Artificial Sequence
  Description of Artificial Sequence: Synthetic oligonucleotide
cacacucgaccugcagguc

SEQ ID NO: 890430 - RNA, 19 nt, Artificial Sequence
  Description of Artificial Sequence: Synthetic oligonucleotide
ccuugugcauaauucgggu

SEQ ID NO: 890431 - RNA, 19 nt, Artificial Sequence
  Description of Artificial Sequence: Synthetic oligonucleotide
gaguucgaucccgcccgca

SEQ ID NO: 890432 - RNA, 19 nt, Artificial Sequence
  Description of Artificial Sequence: Synthetic oligonucleotide
cucccaguggggagcccca

SEQ ID NO: 890433 - RNA, 19 nt, Artificial Sequence
  Description of Artificial Sequence: Synthetic oligonucleotide
gugggcgaagguuguacuu

SEQ ID NO: 890434 - RNA, 19 nt, Artificial Sequence
  Description of Artificial Sequence: Synthetic oligonucleotide
ggaugaugcgguuccuaau

SEQ ID NO: 890435 - RNA, 19 nt, Artificial Sequence
  Description of Artificial Sequence: Synthetic oligonucleotide
cacaggcuagucacuguau

SEQ ID NO: 890436 - RNA, 19 nt, Artificial Sequence
  Description of Artificial Sequence: Synthetic oligonucleotide
cagggccgaugccuccaac

SEQ ID NO: 890437 - RNA, 19 nt, Artificial Sequence
  Description of Artificial Sequence: Synthetic oligonucleotide
ugucaggcccuggguuaaa

SEQ ID NO: 890438 - RNA, 19 nt, Artificial Sequence
  Description of Artificial Sequence: Synthetic oligonucleotide
uuccuacaggaaggagauu

SEQ ID NO: 890439 - RNA, 19 nt, Artificial Sequence
  Description of Artificial Sequence: Synthetic oligonucleotide
cucaauggucaggccugca

SEQ ID NO: 890440 - RNA, 19 nt, Artificial Sequence
  Description of Artificial Sequence: Synthetic oligonucleotide
cgucacgcgcgcuucccgc

SEQ ID NO: 890441 - RNA, 19 nt, Artificial Sequence
  Description of Artificial Sequence: Synthetic oligonucleotide
cacucacuggccugugaau

SEQ ID NO: 890442 - RNA, 19 nt, Artificial Sequence
  Description of Artificial Sequence: Synthetic oligonucleotide
gccugugaauaguguucca

SEQ ID NO: 890443 - RNA, 19 nt, Artificial Sequence
  Description of Artificial Sequence: Synthetic oligonucleotide
agacuggaacccggcucau

SEQ ID NO: 890444 - RNA, 19 nt, Artificial Sequence
  Description of Artificial Sequence: Synthetic oligonucleotide
ggaacccggcucauugaaa

SEQ ID NO: 890445 - RNA, 19 nt, Artificial Sequence
  Description of Artificial Sequence: Synthetic oligonucleotide
ccgucagggccgaugccuc

SEQ ID NO: 890446 - RNA, 19 nt, Artificial Sequence
  Description of Artificial Sequence: Synthetic oligonucleotide
ccagagucuucacacgggu

SEQ ID NO: 890447 - RNA, 19 nt, Artificial Sequence
  Description of Artificial Sequence: Synthetic oligonucleotide
gcuaugggagcaagugaua

SEQ ID NO: 890448 - RNA, 19 nt, Artificial Sequence
  Description of Artificial Sequence: Synthetic oligonucleotide
ccccaaggugaaguauuug

SEQ ID NO: 890449 - RNA, 19 nt, Artificial Sequence
  Description of Artificial Sequence: Synthetic oligonucleotide
caagugggcgaagguugua

SEQ ID NO: 890450 - RNA, 19 nt, Artificial Sequence
  Description of Artificial Sequence: Synthetic oligonucleotide
gggugcucucgaggaagac

SEQ ID NO: 890451 - RNA, 19 nt, Artificial Sequence
  Description of Artificial Sequence: Synthetic oligonucleotide
ccuuggcaagaucgccauc

SEQ ID NO: 890452 - RNA, 19 nt, Artificial Sequence
  Description of Artificial Sequence: Synthetic oligonucleotide
ccgcccacucacuggccug

SEQ ID NO: 890453 - RNA, 19 nt, Artificial Sequence
  Description of Artificial Sequence: Synthetic oligonucleotide
gccuagcaggggagccugg

SEQ ID NO: 890454 - RNA, 19 nt, Artificial Sequence
  Description of Artificial Sequence: Synthetic oligonucleotide
ccgaugccuccaacaaaga

SEQ ID NO: 890455 - RNA, 19 nt, Artificial Sequence
  Description of Artificial Sequence: Synthetic oligonucleotide
gcccgcagcccgaaucuuc

SEQ ID NO: 890456 - RNA, 19 nt, Artificial Sequence
  Description of Artificial Sequence: Synthetic oligonucleotide
gcaucacacucgaccugca

SEQ ID NO: 890457 - RNA, 19 nt, Artificial Sequence
  Description of Artificial Sequence: Synthetic oligonucleotide
gagcgccugugaugaggau

SEQ ID NO: 890458 - RNA, 19 nt, Artificial Sequence
  Description of Artificial Sequence: Synthetic oligonucleotide
cagugccuacacccaccgu

SEQ ID NO: 890459 - RNA, 19 nt, Artificial Sequence
  Description of Artificial Sequence: Synthetic oligonucleotide
ccgcccgcagcccgaaucu

SEQ ID NO: 890460 - RNA, 19 nt, Artificial Sequence
  Description of Artificial Sequence: Synthetic oligonucleotide
gcagaagguuggggacaua

SEQ ID NO: 890461 - RNA, 19 nt, Artificial Sequence
  Description of Artificial Sequence: Synthetic oligonucleotide
ccaccgucagggccauagu

SEQ ID NO: 890462 - RNA, 19 nt, Artificial Sequence
  Description of Artificial Sequence: Synthetic oligonucleotide
cacccaccgucagggccau

SEQ ID NO: 890463 - RNA, 19 nt, Artificial Sequence
  Description of Artificial Sequence: Synthetic oligonucleotide
acccaccgucagggccaua

SEQ ID NO: 890464 - RNA, 19 nt, Artificial Sequence
  Description of Artificial Sequence: Synthetic oligonucleotide
cauguccgucagggccgau

SEQ ID NO: 890465 - RNA, 19 nt, Artificial Sequence
  Description of Artificial Sequence: Synthetic oligonucleotide
cgcccgcagcccgaaucuu

SEQ ID NO: 890466 - RNA, 19 nt, Artificial Sequence
  Description of Artificial Sequence: Synthetic oligonucleotide
ucaacaaauacguauauac

SEQ ID NO: 890467 - RNA, 19 nt, Artificial Sequence
  Description of Artificial Sequence: Synthetic oligonucleotide
aaaucauucggucacggcu

SEQ ID NO: 890468 - RNA, 19 nt, Artificial Sequence
  Description of Artificial Sequence: Synthetic oligonucleotide
guagaagucguccugaagc

SEQ ID NO: 890469 - RNA, 19 nt, Artificial Sequence
  Description of Artificial Sequence: Synthetic oligonucleotide
caggcaauagccuucacgg

SEQ ID NO: 890470 - RNA, 19 nt, Artificial Sequence
  Description of Artificial Sequence: Synthetic oligonucleotide
ugcaaaaucauucggucac

SEQ ID NO: 890471 - RNA, 19 nt, Artificial Sequence
  Description of Artificial Sequence: Synthetic oligonucleotide
aucuuggagaucuugcgcg

SEQ ID NO: 890472 - RNA, 19 nt, Artificial Sequence
  Description of Artificial Sequence: Synthetic oligonucleotide
acaccgacgggccacagcc

SEQ ID NO: 890473 - RNA, 19 nt, Artificial Sequence
  Description of Artificial Sequence: Synthetic oligonucleotide
aaggacacgguaugagugg

SEQ ID NO: 890474 - RNA, 19 nt, Artificial Sequence
  Description of Artificial Sequence: Synthetic oligonucleotide
uuuguguguuccuacugcg

SEQ ID NO: 890475 - RNA, 19 nt, Artificial Sequence
  Description of Artificial Sequence: Synthetic oligonucleotide
uucagaagcgcagaguagg

SEQ ID NO: 890476 - RNA, 19 nt, Artificial Sequence
  Description of Artificial Sequence: Synthetic oligonucleotide
uuaagggaggaccagucca

SEQ ID NO: 890477 - RNA, 19 nt, Artificial Sequence
  Description of Artificial Sequence: Synthetic oligonucleotide
agcacguuaagggaggacc

SEQ ID NO: 890478 - RNA, 19 nt, Artificial Sequence
  Description of Artificial Sequence: Synthetic oligonucleotide
caaauacguauauacacac

SEQ ID NO: 890479 - RNA, 19 nt, Artificial Sequence
  Description of Artificial Sequence: Synthetic oligonucleotide
aacugguccgcauuccagg

SEQ ID NO: 890480 - RNA, 19 nt, Artificial Sequence
  Description of Artificial Sequence: Synthetic oligonucleotide
uaagggauggguauuucca

SEQ ID NO: 890481 - RNA, 19 nt, Artificial Sequence
  Description of Artificial Sequence: Synthetic oligonucleotide
gauugcacaccugugagcc

SEQ ID NO: 890482 - RNA, 19 nt, Artificial Sequence
  Description of Artificial Sequence: Synthetic oligonucleotide
gaugaucugucgcaggagc

SEQ ID NO: 890483 - RNA, 19 nt, Artificial Sequence
  Description of Artificial Sequence: Synthetic oligonucleotide
accggaugacaacuggucc

SEQ ID NO: 890484 - RNA, 19 nt, Artificial Sequence
  Description of Artificial Sequence: Synthetic oligonucleotide
gaaaacauuccagaaccgc

SEQ ID NO: 890485 - RNA, 19 nt, Artificial Sequence
  Description of Artificial Sequence: Synthetic oligonucleotide
acgcugagcacguuaaggg

SEQ ID NO: 890486 - RNA, 19 nt, Artificial Sequence
  Description of Artificial Sequence: Synthetic oligonucleotide
cacaacgaggcauuuaaug

SEQ ID NO: 890487 - RNA, 19 nt, Artificial Sequence
  Description of Artificial Sequence: Synthetic oligonucleotide
uguagagcguguuuugcug

SEQ ID NO: 890488 - RNA, 19 nt, Artificial Sequence
  Description of Artificial Sequence: Synthetic oligonucleotide
uaaaggacacgguaugagu

SEQ ID NO: 890489 - RNA, 19 nt, Artificial Sequence
  Description of Artificial Sequence: Synthetic oligonucleotide
cuuaccgucgagugguucc

SEQ ID NO: 890490 - RNA, 19 nt, Artificial Sequence
  Description of Artificial Sequence: Synthetic oligonucleotide
cauacguccugguccaugg

SEQ ID NO: 890491 - RNA, 19 nt, Artificial Sequence
  Description of Artificial Sequence: Synthetic oligonucleotide
aaggaauaaggggacacgu

SEQ ID NO: 890492 - RNA, 19 nt, Artificial Sequence
  Description of Artificial Sequence: Synthetic oligonucleotide
acugguccgcauuccaggc

SEQ ID NO: 890493 - RNA, 19 nt, Artificial Sequence
  Description of Artificial Sequence: Synthetic oligonucleotide
ugaagcgaguagcugguga

SEQ ID NO: 890494 - RNA, 19 nt, Artificial Sequence
  Description of Artificial Sequence: Synthetic oligonucleotide
uccuacugcgaccagguuc

SEQ ID NO: 890495 - RNA, 19 nt, Artificial Sequence
  Description of Artificial Sequence: Synthetic oligonucleotide
ucaggguguuccagaagcg

SEQ ID NO: 890496 - RNA, 19 nt, Artificial Sequence
  Description of Artificial Sequence: Synthetic oligonucleotide
ucguucuucagaagcgcag

SEQ ID NO: 890497 - RNA, 19 nt, Artificial Sequence
  Description of Artificial Sequence: Synthetic oligonucleotide
uccuccgcaucucugagac

SEQ ID NO: 890498 - RNA, 19 nt, Artificial Sequence
  Description of Artificial Sequence: Synthetic oligonucleotide
agcguguuuugcugaaaac

SEQ ID NO: 890499 - RNA, 19 nt, Artificial Sequence
  Description of Artificial Sequence: Synthetic oligonucleotide
gguaugaguggccagugag

SEQ ID NO: 890500 - RNA, 19 nt, Artificial Sequence
  Description of Artificial Sequence: Synthetic oligonucleotide
ucguccugaagcucaggcg

SEQ ID NO: 890501 - RNA, 19 nt, Artificial Sequence
  Description of Artificial Sequence: Synthetic oligonucleotide
ugugaguagccaugugugc

SEQ ID NO: 890502 - RNA, 19 nt, Artificial Sequence
  Description of Artificial Sequence: Synthetic oligonucleotide
ucugcacgaagccuuugug

SEQ ID NO: 890503 - RNA, 19 nt, Artificial Sequence
  Description of Artificial Sequence: Synthetic oligonucleotide
uagaagucguccugaagcu

SEQ ID NO: 890504 - RNA, 19 nt, Artificial Sequence
  Description of Artificial Sequence: Synthetic oligonucleotide
ugcgucccagaucugcacg

SEQ ID NO: 890505 - RNA, 19 nt, Artificial Sequence
  Description of Artificial Sequence: Synthetic oligonucleotide
uguguuccuacugcgacca

SEQ ID NO: 890506 - RNA, 19 nt, Artificial Sequence
  Description of Artificial Sequence: Synthetic oligonucleotide
ugugcucgggcguggacgg

SEQ ID NO: 890507 - RNA, 19 nt, Artificial Sequence
  Description of Artificial Sequence: Synthetic oligonucleotide
aauaaggggacacgucauu

SEQ ID NO: 890508 - RNA, 19 nt, Artificial Sequence
  Description of Artificial Sequence: Synthetic oligonucleotide
ucagaagcgcagaguaggc

SEQ ID NO: 890509 - RNA, 19 nt, Artificial Sequence
  Description of Artificial Sequence: Synthetic oligonucleotide
agacauggccaaguaaagg

SEQ ID NO: 890510 - RNA, 19 nt, Artificial Sequence
  Description of Artificial Sequence: Synthetic oligonucleotide
cauucggucacggcuaccg

SEQ ID NO: 890511 - RNA, 19 nt, Artificial Sequence
  Description of Artificial Sequence: Synthetic oligonucleotide
agcucguuggcaugcuugg

SEQ ID NO: 890512 - RNA, 19 nt, Artificial Sequence
  Description of Artificial Sequence: Synthetic oligonucleotide
ggcaauagccuucacggcc

SEQ ID NO: 890513 - RNA, 19 nt, Artificial Sequence
  Description of Artificial Sequence: Synthetic oligonucleotide
cagcucguucuucagaagc

SEQ ID NO: 890514 - RNA, 19 nt, Artificial Sequence
  Description of Artificial Sequence: Synthetic oligonucleotide
cuuuguagagcguguuuug

SEQ ID NO: 890515 - RNA, 19 nt, Artificial Sequence
  Description of Artificial Sequence: Synthetic oligonucleotide
gauggguauuuccacacaa

SEQ ID NO: 890516 - RNA, 19 nt, Artificial Sequence
  Description of Artificial Sequence: Synthetic oligonucleotide
acacggauuccuuuguaga

SEQ ID NO: 890517 - RNA, 19 nt, Artificial Sequence
  Description of Artificial Sequence: Synthetic oligonucleotide
acagagccgggucaccugg

SEQ ID NO: 890518 - RNA, 19 nt, Artificial Sequence
  Description of Artificial Sequence: Synthetic oligonucleotide
ggaauaaggggacacguca

SEQ ID NO: 890519 - RNA, 19 nt, Artificial Sequence
  Description of Artificial Sequence: Synthetic oligonucleotide
guuaagggaggaccagucc

SEQ ID NO: 890520 - RNA, 19 nt, Artificial Sequence
  Description of Artificial Sequence: Synthetic oligonucleotide
uaucggauccgggugaaga

SEQ ID NO: 890521 - RNA, 19 nt, Artificial Sequence
  Description of Artificial Sequence: Synthetic oligonucleotide
acggcuaccggaugacaac

SEQ ID NO: 890522 - RNA, 19 nt, Artificial Sequence
  Description of Artificial Sequence: Synthetic oligonucleotide
agcaccuuaaaggggaucu

SEQ ID NO: 890523 - RNA, 19 nt, Artificial Sequence
  Description of Artificial Sequence: Synthetic oligonucleotide
aacgaggcauuuaaugaga

SEQ ID NO: 890524 - RNA, 19 nt, Artificial Sequence
  Description of Artificial Sequence: Synthetic oligonucleotide
ggaccaugcaugcugacug

SEQ ID NO: 890525 - RNA, 19 nt, Artificial Sequence
  Description of Artificial Sequence: Synthetic oligonucleotide
uaccggaugacaacugguc

SEQ ID NO: 890526 - RNA, 19 nt, Artificial Sequence
  Description of Artificial Sequence: Synthetic oligonucleotide
cuccgcaucucugagacac

SEQ ID NO: 890527 - RNA, 19 nt, Artificial Sequence
  Description of Artificial Sequence: Synthetic oligonucleotide
ccuacugcgaccagguucc

SEQ ID NO: 890528 - RNA, 19 nt, Artificial Sequence
  Description of Artificial Sequence: Synthetic oligonucleotide
aaugagacucuggggucuc

SEQ ID NO: 890529 - RNA, 19 nt, Artificial Sequence
  Description of Artificial Sequence: Synthetic oligonucleotide
uggacggcugcaaccgccg

SEQ ID NO: 890530 - RNA, 19 nt, Artificial Sequence
  Description of Artificial Sequence: Synthetic oligonucleotide
cuucagaagcgcagaguag

SEQ ID NO: 890531 - RNA, 19 nt, Artificial Sequence
  Description of Artificial Sequence: Synthetic oligonucleotide
uuguguguuccuacugcga

SEQ ID NO: 890532 - RNA, 19 nt, Artificial Sequence
  Description of Artificial Sequence: Synthetic oligonucleotide
aggacacgguaugaguggc

SEQ ID NO: 890533 - RNA, 19 nt, Artificial Sequence
  Description of Artificial Sequence: Synthetic oligonucleotide
cacgcugagcacguuaagg

SEQ ID NO: 890534 - RNA, 19 nt, Artificial Sequence
  Description of Artificial Sequence: Synthetic oligonucleotide
cucacaacgaggcauuuaa

SEQ ID NO: 890535 - RNA, 19 nt, Artificial Sequence
  Description of Artificial Sequence: Synthetic oligonucleotide
ucggauccgggugaagagg

SEQ ID NO: 890536 - RNA, 19 nt, Artificial Sequence
  Description of Artificial Sequence: Synthetic oligonucleotide
cucguuggcaugcuuggac

SEQ ID NO: 890537 - RNA, 19 nt, Artificial Sequence
  Description of Artificial Sequence: Synthetic oligonucleotide
ugcgcaucccgcccgcccg

SEQ ID NO: 890538 - RNA, 19 nt, Artificial Sequence
  Description of Artificial Sequence: Synthetic oligonucleotide
ugaguagccaugugugcuc

SEQ ID NO: 890539 - RNA, 19 nt, Artificial Sequence
  Description of Artificial Sequence: Synthetic oligonucleotide
uaaugagacucuggggucu

SEQ ID NO: 890540 - RNA, 19 nt, Artificial Sequence
  Description of Artificial Sequence: Synthetic oligonucleotide
agcucguucuucagaagcg

SEQ ID NO: 890541 - RNA, 19 nt, Artificial Sequence
  Description of Artificial Sequence: Synthetic oligonucleotide
uucggucacggcuaccgga

SEQ ID NO: 890542 - RNA, 19 nt, Artificial Sequence
  Description of Artificial Sequence: Synthetic oligonucleotide
cuguggaaguucacacucc

SEQ ID NO: 890543 - RNA, 19 nt, Artificial Sequence
  Description of Artificial Sequence: Synthetic oligonucleotide
uccuguggaaguucacacu

SEQ ID NO: 890544 - RNA, 19 nt, Artificial Sequence
  Description of Artificial Sequence: Synthetic oligonucleotide
gauccgggugaagagguug

SEQ ID NO: 890545 - RNA, 19 nt, Artificial Sequence
  Description of Artificial Sequence: Synthetic oligonucleotide
auacguccugguccauggc

SEQ ID NO: 890546 - RNA, 19 nt, Artificial Sequence
  Description of Artificial Sequence: Synthetic oligonucleotide
gucaaugcacuggaguggc

SEQ ID NO: 890547 - RNA, 19 nt, Artificial Sequence
  Description of Artificial Sequence: Synthetic oligonucleotide
aggaauaaggggacacguc

SEQ ID NO: 890548 - RNA, 19 nt, Artificial Sequence
  Description of Artificial Sequence: Synthetic oligonucleotide
acguauauacacacgugca

SEQ ID NO: 890549 - RNA, 19 nt, Artificial Sequence
  Description of Artificial Sequence: Synthetic oligonucleotide
uauggcucaggcagugguc

SEQ ID NO: 890550 - RNA, 19 nt, Artificial Sequence
  Description of Artificial Sequence: Synthetic oligonucleotide
ucgagugguuccacacaag

SEQ ID NO: 890551 - RNA, 19 nt, Artificial Sequence
  Description of Artificial Sequence: Synthetic oligonucleotide
cuccacagcucacaacgag

SEQ ID NO: 890552 - RNA, 19 nt, Artificial Sequence
  Description of Artificial Sequence: Synthetic oligonucleotide
guaugaguggccagugagc

SEQ ID NO: 890553 - RNA, 19 nt, Artificial Sequence
  Description of Artificial Sequence: Synthetic oligonucleotide
ggacuugagcgcuugcugc

SEQ ID NO: 890554 - RNA, 19 nt, Artificial Sequence
  Description of Artificial Sequence: Synthetic oligonucleotide
ugucccgcugcaaaaucau

SEQ ID NO: 890555 - RNA, 19 nt, Artificial Sequence
  Description of Artificial Sequence: Synthetic oligonucleotide
auucggucacggcuaccgg

SEQ ID NO: 890556 - RNA, 19 nt, Artificial Sequence
  Description of Artificial Sequence: Synthetic oligonucleotide
cugcaaaaucauucgguca

SEQ ID NO: 890557 - RNA, 19 nt, Artificial Sequence
  Description of Artificial Sequence: Synthetic oligonucleotide
agaagucguccugaagcuc

SEQ ID NO: 890558 - RNA, 19 nt, Artificial Sequence
  Description of Artificial Sequence: Synthetic oligonucleotide
uuccguggugaccgaagca

SEQ ID NO: 890559 - RNA, 19 nt, Artificial Sequence
  Description of Artificial Sequence: Synthetic oligonucleotide
gaccaugcaugcugacugc

SEQ ID NO: 890560 - RNA, 19 nt, Artificial Sequence
  Description of Artificial Sequence: Synthetic oligonucleotide
cauugucugagguggcauc

SEQ ID NO: 890561 - RNA, 19 nt, Artificial Sequence
  Description of Artificial Sequence: Synthetic oligonucleotide
guguguuccuacugcgacc

SEQ ID NO: 890562 - RNA, 19 nt, Artificial Sequence
  Description of Artificial Sequence: Synthetic oligonucleotide
cagcucguuggcaugcuug

SEQ ID NO: 890563 - RNA, 19 nt, Artificial Sequence
  Description of Artificial Sequence: Synthetic oligonucleotide
gaagcgcagaguaggccag

SEQ ID NO: 890564 - RNA, 19 nt, Artificial Sequence
  Description of Artificial Sequence: Synthetic oligonucleotide
auggguauuuccacacaag

SEQ ID NO: 890565 - RNA, 19 nt, Artificial Sequence
  Description of Artificial Sequence: Synthetic oligonucleotide
ccggaugacaacugguccg

SEQ ID NO: 890566 - RNA, 19 nt, Artificial Sequence
  Description of Artificial Sequence: Synthetic oligonucleotide
uugaugggaucuugggcau

SEQ ID NO: 890567 - RNA, 19 nt, Artificial Sequence
  Description of Artificial Sequence: Synthetic oligonucleotide
ucggucacggcuaccggau

SEQ ID NO: 890568 - RNA, 19 nt, Artificial Sequence
  Description of Artificial Sequence: Synthetic oligonucleotide
ucauacguccugguccaug

SEQ ID NO: 890569 - RNA, 19 nt, Artificial Sequence
  Description of Artificial Sequence: Synthetic oligonucleotide
ugaagcggucaccaugcuu

SEQ ID NO: 890570 - RNA, 19 nt, Artificial Sequence
  Description of Artificial Sequence: Synthetic oligonucleotide
ggucuaucggauccgggug

SEQ ID NO: 890571 - RNA, 19 nt, Artificial Sequence
  Description of Artificial Sequence: Synthetic oligonucleotide
aauacgugaagaggcccuu

SEQ ID NO: 890572 - RNA, 19 nt, Artificial Sequence
  Description of Artificial Sequence: Synthetic oligonucleotide
uggcaugcuuggaccaggc

SEQ ID NO: 890573 - RNA, 19 nt, Artificial Sequence
  Description of Artificial Sequence: Synthetic oligonucleotide
ggaggaccaguccaccagg

SEQ ID NO: 890574 - RNA, 19 nt, Artificial Sequence
  Description of Artificial Sequence: Synthetic oligonucleotide
auagccuucacggccgcca

SEQ ID NO: 890575 - RNA, 19 nt, Artificial Sequence
  Description of Artificial Sequence: Synthetic oligonucleotide
cccgcugcaaaaucauucg

SEQ ID NO: 890576 - RNA, 19 nt, Artificial Sequence
  Description of Artificial Sequence: Synthetic oligonucleotide
ucacaacgaggcauuuaau

SEQ ID NO: 890577 - RNA, 19 nt, Artificial Sequence
  Description of Artificial Sequence: Synthetic oligonucleotide
uucucgaugcccgcgccca

SEQ ID NO: 890578 - RNA, 19 nt, Artificial Sequence
  Description of Artificial Sequence: Synthetic oligonucleotide
gcugagcacguuaagggag

SEQ ID NO: 890579 - RNA, 19 nt, Artificial Sequence
  Description of Artificial Sequence: Synthetic oligonucleotide
gagugguuccacacaagca

SEQ ID NO: 890580 - RNA, 19 nt, Artificial Sequence
  Description of Artificial Sequence: Synthetic oligonucleotide
gucgagugguuccacacaa

SEQ ID NO: 890581 - RNA, 19 nt, Artificial Sequence
  Description of Artificial Sequence: Synthetic oligonucleotide
uggugugcggaugucccgc

SEQ ID NO: 890582 - RNA, 19 nt, Artificial Sequence
  Description of Artificial Sequence: Synthetic oligonucleotide
cuggugucaggguccuccg

SEQ ID NO: 890583 - RNA, 19 nt, Artificial Sequence
  Description of Artificial Sequence: Synthetic oligonucleotide
agcggaugcagcggucggc

SEQ ID NO: 890584 - RNA, 19 nt, Artificial Sequence
  Description of Artificial Sequence: Synthetic oligonucleotide
accgccgaucuucugucug

SEQ ID NO: 890585 - RNA, 19 nt, Artificial Sequence
  Description of Artificial Sequence: Synthetic oligonucleotide
cugucugcggauccugcac

SEQ ID NO: 890586 - RNA, 19 nt, Artificial Sequence
  Description of Artificial Sequence: Synthetic oligonucleotide
acggcugcaaccgccgauc

SEQ ID NO: 890587 - RNA, 19 nt, Artificial Sequence
  Description of Artificial Sequence: Synthetic oligonucleotide
gggauggguauuuccacac

SEQ ID NO: 890588 - RNA, 19 nt, Artificial Sequence
  Description of Artificial Sequence: Synthetic oligonucleotide
cagagaggucacagagccg

SEQ ID NO: 890589 - RNA, 19 nt, Artificial Sequence
  Description of Artificial Sequence: Synthetic oligonucleotide
ggaauacgugaagaggccc

SEQ ID NO: 890590 - RNA, 19 nt, Artificial Sequence
  Description of Artificial Sequence: Synthetic oligonucleotide
uuaccgucgagugguucca

SEQ ID NO: 890591 - RNA, 19 nt, Artificial Sequence
  Description of Artificial Sequence: Synthetic oligonucleotide
acgugcacacaccgacggg

SEQ ID NO: 890592 - RNA, 19 nt, Artificial Sequence
  Description of Artificial Sequence: Synthetic oligonucleotide
gucuaucggauccggguga

SEQ ID NO: 890593 - RNA, 19 nt, Artificial Sequence
  Description of Artificial Sequence: Synthetic oligonucleotide
cagcccacagaagucacug

SEQ ID NO: 890594 - RNA, 19 nt, Artificial Sequence
  Description of Artificial Sequence: Synthetic oligonucleotide
aggagccugcgcucauacg

SEQ ID NO: 890595 - RNA, 19 nt, Artificial Sequence
  Description of Artificial Sequence: Synthetic oligonucleotide
aggcauuuaaugagacucu

SEQ ID NO: 890596 - RNA, 19 nt, Artificial Sequence
  Description of Artificial Sequence: Synthetic oligonucleotide
caaccgccgaucuucuguc

SEQ ID NO: 890597 - RNA, 19 nt, Artificial Sequence
  Description of Artificial Sequence: Synthetic oligonucleotide
cuguguccaauauggcuca

SEQ ID NO: 890598 - RNA, 19 nt, Artificial Sequence
  Description of Artificial Sequence: Synthetic oligonucleotide
guuggcaugcuuggaccag

SEQ ID NO: 890599 - RNA, 19 nt, Artificial Sequence
  Description of Artificial Sequence: Synthetic oligonucleotide
gaccacuugaggccacaca

SEQ ID NO: 890600 - RNA, 19 nt, Artificial Sequence
  Description of Artificial Sequence: Synthetic oligonucleotide
ggccuugcgguucuggcug

SEQ ID NO: 890601 - RNA, 19 nt, Artificial Sequence
  Description of Artificial Sequence: Synthetic oligonucleotide
aggauacuggggaguuggc

SEQ ID NO: 890602 - RNA, 19 nt, Artificial Sequence
  Description of Artificial Sequence: Synthetic oligonucleotide
ucuccggccggcucccgcc

SEQ ID NO: 890603 - RNA, 19 nt, Artificial Sequence
  Description of Artificial Sequence: Synthetic oligonucleotide
gcugagggaauacgugaag

SEQ ID NO: 890604 - RNA, 19 nt, Artificial Sequence
  Description of Artificial Sequence: Synthetic oligonucleotide
caccagaugccagcagucc

SEQ ID NO: 890605 - RNA, 19 nt, Artificial Sequence
  Description of Artificial Sequence: Synthetic oligonucleotide
gaggcccuugugcucgggc

SEQ ID NO: 890606 - RNA, 19 nt, Artificial Sequence
  Description of Artificial Sequence: Synthetic oligonucleotide
aaccgccgaucuucugucu

SEQ ID NO: 890607 - RNA, 19 nt, Artificial Sequence
  Description of Artificial Sequence: Synthetic oligonucleotide
uccggccccggugacaaug

SEQ ID NO: 890608 - RNA, 19 nt, Artificial Sequence
  Description of Artificial Sequence: Synthetic oligonucleotide
cacguuaagggaggaccag

SEQ ID NO: 890609 - RNA, 19 nt, Artificial Sequence
  Description of Artificial Sequence: Synthetic oligonucleotide
acguuaagggaggaccagu

SEQ ID NO: 890610 - RNA, 19 nt, Artificial Sequence
  Description of Artificial Sequence: Synthetic oligonucleotide
cuguagucgccgcucugac

SEQ ID NO: 890611 - RNA, 19 nt, Artificial Sequence
  Description of Artificial Sequence: Synthetic oligonucleotide
cgagugguuccacacaagc

SEQ ID NO: 890612 - RNA, 19 nt, Artificial Sequence
  Description of Artificial Sequence: Synthetic oligonucleotide
gguggugugcggauguccc

SEQ ID NO: 890613 - RNA, 19 nt, Artificial Sequence
  Description of Artificial Sequence: Synthetic oligonucleotide
ucuaucggauccgggugaa

SEQ ID NO: 890614 - RNA, 19 nt, Artificial Sequence
  Description of Artificial Sequence: Synthetic oligonucleotide
gcggucaccaugcuugcug

SEQ ID NO: 890615 - RNA, 19 nt, Artificial Sequence
  Description of Artificial Sequence: Synthetic oligonucleotide
caguccgugcugguguggg

SEQ ID NO: 890616 - RNA, 19 nt, Artificial Sequence
  Description of Artificial Sequence: Synthetic oligonucleotide
acgaagccuuuguguguuc

SEQ ID NO: 890617 - RNA, 19 nt, Artificial Sequence
  Description of Artificial Sequence: Synthetic oligonucleotide
cugcggauccugcaccuuc

SEQ ID NO: 890618 - RNA, 19 nt, Artificial Sequence
  Description of Artificial Sequence: Synthetic oligonucleotide
agaguaggccaggccaucu

SEQ ID NO: 890619 - RNA, 19 nt, Artificial Sequence
  Description of Artificial Sequence: Synthetic oligonucleotide
ccgcauuccaggcuagugc

SEQ ID NO: 890620 - RNA, 19 nt, Artificial Sequence
  Description of Artificial Sequence: Synthetic oligonucleotide
gcucauacguccuggucca

SEQ ID NO: 890621 - RNA, 19 nt, Artificial Sequence
  Description of Artificial Sequence: Synthetic oligonucleotide
ccaaguaaaggacacggua

SEQ ID NO: 890622 - RNA, 19 nt, Artificial Sequence
  Description of Artificial Sequence: Synthetic oligonucleotide
acgguaugaguggccagug

SEQ ID NO: 890623 - RNA, 19 nt, Artificial Sequence
  Description of Artificial Sequence: Synthetic oligonucleotide
uguguccaauauggcucag

SEQ ID NO: 890624 - RNA, 19 nt, Artificial Sequence
  Description of Artificial Sequence: Synthetic oligonucleotide
agacacggauuccuuugua

SEQ ID NO: 890625 - RNA, 19 nt, Artificial Sequence
  Description of Artificial Sequence: Synthetic oligonucleotide
auacgugaagaggcccuug

SEQ ID NO: 890626 - RNA, 19 nt, Artificial Sequence
  Description of Artificial Sequence: Synthetic oligonucleotide
accgucgagugguuccaca

SEQ ID NO: 890627 - RNA, 19 nt, Artificial Sequence
  Description of Artificial Sequence: Synthetic oligonucleotide
ccugucgccagccgguucc

SEQ ID NO: 890628 - RNA, 19 nt, Artificial Sequence
  Description of Artificial Sequence: Synthetic oligonucleotide
cacggcuaccggaugacaa

SEQ ID NO: 890629 - RNA, 19 nt, Artificial Sequence
  Description of Artificial Sequence: Synthetic oligonucleotide
uccgugcugguguggggac

SEQ ID NO: 890630 - RNA, 19 nt, Artificial Sequence
  Description of Artificial Sequence: Synthetic oligonucleotide
agguacacgcaggugccca

SEQ ID NO: 890631 - RNA, 19 nt, Artificial Sequence
  Description of Artificial Sequence: Synthetic oligonucleotide
guggacggcugcaaccgcc

SEQ ID NO: 890632 - RNA, 19 nt, Artificial Sequence
  Description of Artificial Sequence: Synthetic oligonucleotide
ugcguaagggauggguauu

SEQ ID NO: 890633 - RNA, 19 nt, Artificial Sequence
  Description of Artificial Sequence: Synthetic oligonucleotide
gugaguagccaugugugcu

SEQ ID NO: 890634 - RNA, 19 nt, Artificial Sequence
  Description of Artificial Sequence: Synthetic oligonucleotide
ucuugcgcgugggcuuccg

SEQ ID NO: 890635 - RNA, 19 nt, Artificial Sequence
  Description of Artificial Sequence: Synthetic oligonucleotide
caugcugacugcuccgucu

SEQ ID NO: 890636 - RNA, 19 nt, Artificial Sequence
  Description of Artificial Sequence: Synthetic oligonucleotide
gaguagccaugugugcuca

SEQ ID NO: 890637 - RNA, 19 nt, Artificial Sequence
  Description of Artificial Sequence: Synthetic oligonucleotide
cacacuccaguuggccccg

SEQ ID NO: 890638 - RNA, 19 nt, Artificial Sequence
  Description of Artificial Sequence: Synthetic oligonucleotide
cacaccgacgggccacagc

SEQ ID NO: 890639 - RNA, 19 nt, Artificial Sequence
  Description of Artificial Sequence: Synthetic oligonucleotide
gcucugacuguaggggugg

SEQ ID NO: 890640 - RNA, 19 nt, Artificial Sequence
  Description of Artificial Sequence: Synthetic oligonucleotide
gguacacgcaggugcccag

SEQ ID NO: 890641 - RNA, 19 nt, Artificial Sequence
  Description of Artificial Sequence: Synthetic oligonucleotide
aguggccagugagcuuggc

SEQ ID NO: 890642 - RNA, 19 nt, Artificial Sequence
  Description of Artificial Sequence: Synthetic oligonucleotide
aggcgcauccagcaccuua

SEQ ID NO: 890643 - RNA, 19 nt, Artificial Sequence
  Description of Artificial Sequence: Synthetic oligonucleotide
gcguggacggcugcaaccg

SEQ ID NO: 890644 - RNA, 19 nt, Artificial Sequence
  Description of Artificial Sequence: Synthetic oligonucleotide
ucacggcuaccggaugaca

SEQ ID NO: 890645 - RNA, 19 nt, Artificial Sequence
  Description of Artificial Sequence: Synthetic oligonucleotide
guuccuacugcgaccaggu

SEQ ID NO: 890646 - RNA, 19 nt, Artificial Sequence
  Description of Artificial Sequence: Synthetic oligonucleotide
cuugagcgcuugcugcuga

SEQ ID NO: 890647 - RNA, 19 nt, Artificial Sequence
  Description of Artificial Sequence: Synthetic oligonucleotide
ccgucucugccccaugggg

SEQ ID NO: 890648 - RNA, 19 nt, Artificial Sequence
  Description of Artificial Sequence: Synthetic oligonucleotide
cuggugaucuguggaccac

SEQ ID NO: 890649 - RNA, 19 nt, Artificial Sequence
  Description of Artificial Sequence: Synthetic oligonucleotide
agucguccugaagcucagg

SEQ ID NO: 890650 - RNA, 19 nt, Artificial Sequence
  Description of Artificial Sequence: Synthetic oligonucleotide
ggucacggcuaccggauga

SEQ ID NO: 890651 - RNA, 19 nt, Artificial Sequence
  Description of Artificial Sequence: Synthetic oligonucleotide
ucauucggucacggcuacc

SEQ ID NO: 890652 - RNA, 19 nt, Artificial Sequence
  Description of Artificial Sequence: Synthetic oligonucleotide
gcuggugaucuguggacca

SEQ ID NO: 890653 - RNA, 19 nt, Artificial Sequence
  Description of Artificial Sequence: Synthetic oligonucleotide
ccgcugcaaaaucauucgg

SEQ ID NO: 890654 - RNA, 19 nt, Artificial Sequence
  Description of Artificial Sequence: Synthetic oligonucleotide
aggggacacgucauugcca

SEQ ID NO: 890655 - RNA, 19 nt, Artificial Sequence
  Description of Artificial Sequence: Synthetic oligonucleotide
gagcacguuaagggaggac

SEQ ID NO: 890656 - RNA, 19 nt, Artificial Sequence
  Description of Artificial Sequence: Synthetic oligonucleotide
auccgggugaagagguuga

SEQ ID NO: 890657 - RNA, 19 nt, Artificial Sequence
  Description of Artificial Sequence: Synthetic oligonucleotide
cguuaagggaggaccaguc

SEQ ID NO: 890658 - RNA, 19 nt, Artificial Sequence
  Description of Artificial Sequence: Synthetic oligonucleotide
aggaccaguccaccagguu

SEQ ID NO: 890659 - RNA, 19 nt, Artificial Sequence
  Description of Artificial Sequence: Synthetic oligonucleotide
guacacgcaggugcccagc

SEQ ID NO: 890660 - RNA, 19 nt, Artificial Sequence
  Description of Artificial Sequence: Synthetic oligonucleotide
ugucgccagccgguucccg

SEQ ID NO: 890661 - RNA, 19 nt, Artificial Sequence
  Description of Artificial Sequence: Synthetic oligonucleotide
ggauggguauuuccacaca

SEQ ID NO: 890662 - RNA, 19 nt, Artificial Sequence
  Description of Artificial Sequence: Synthetic oligonucleotide
gucacggcuaccggaugac

SEQ ID NO: 890663 - RNA, 19 nt, Artificial Sequence
  Description of Artificial Sequence: Synthetic oligonucleotide
gggucuaucggauccgggu

SEQ ID NO: 890664 - RNA, 19 nt, Artificial Sequence
  Description of Artificial Sequence: Synthetic oligonucleotide
uccugucgccagccgguuc

SEQ ID NO: 890665 - RNA, 19 nt, Artificial Sequence
  Description of Artificial Sequence: Synthetic oligonucleotide
ccucgaggggaugaagcgg

SEQ ID NO: 890666 - RNA, 19 nt, Artificial Sequence
  Description of Artificial Sequence: Synthetic oligonucleotide
cccgccagaugucucuggg

SEQ ID NO: 890667 - RNA, 19 nt, Artificial Sequence
  Description of Artificial Sequence: Synthetic oligonucleotide
acgugacacuggguuuggg

SEQ ID NO: 890668 - RNA, 19 nt, Artificial Sequence
  Description of Artificial Sequence: Synthetic oligonucleotide
guccgugcuggugugggga

SEQ ID NO: 890669 - RNA, 19 nt, Artificial Sequence
  Description of Artificial Sequence: Synthetic oligonucleotide
uagucgccgcucugacugu

SEQ ID NO: 890670 - RNA, 19 nt, Artificial Sequence
  Description of Artificial Sequence: Synthetic oligonucleotide
ggcaugcuuggaccaggcc

SEQ ID NO: 890671 - RNA, 19 nt, Artificial Sequence
  Description of Artificial Sequence: Synthetic oligonucleotide
cuaucggauccgggugaag

SEQ ID NO: 890672 - RNA, 19 nt, Artificial Sequence
  Description of Artificial Sequence: Synthetic oligonucleotide
ccgucgagugguuccacac

SEQ ID NO: 890673 - RNA, 19 nt, Artificial Sequence
  Description of Artificial Sequence: Synthetic oligonucleotide
ggucggcugugccaccacc

SEQ ID NO: 890674 - RNA, 19 nt, Artificial Sequence
  Description of Artificial Sequence: Synthetic oligonucleotide
gccgaucuucugucugcgg

SEQ ID NO: 890675 - RNA, 19 nt, Artificial Sequence
  Description of Artificial Sequence: Synthetic oligonucleotide
cugcguaagggauggguau

SEQ ID NO: 890676 - RNA, 19 nt, Artificial Sequence
  Description of Artificial Sequence: Synthetic oligonucleotide
ccgaucuucugucugcgga

SEQ ID NO: 890677 - RNA, 19 nt, Artificial Sequence
  Description of Artificial Sequence: Synthetic oligonucleotide
acucucgccguguggccuu

SEQ ID NO: 890678 - RNA, 19 nt, Artificial Sequence
  Description of Artificial Sequence: Synthetic oligonucleotide
gcccucgaggggaugaagc

SEQ ID NO: 890679 - RNA, 19 nt, Artificial Sequence
  Description of Artificial Sequence: Synthetic oligonucleotide
ccgcgggucuaucggaucc

SEQ ID NO: 890680 - RNA, 19 nt, Artificial Sequence
  Description of Artificial Sequence: Synthetic oligonucleotide
ucgggcguggacggcugca

SEQ ID NO: 890681 - RNA, 19 nt, Artificial Sequence
  Description of Artificial Sequence: Synthetic oligonucleotide
gcacguuaagggaggacca

SEQ ID NO: 890682 - RNA, 19 nt, Artificial Sequence
  Description of Artificial Sequence: Synthetic oligonucleotide
ccgccagaugucucugggg

SEQ ID NO: 890683 - RNA, 19 nt, Artificial Sequence
  Description of Artificial Sequence: Synthetic oligonucleotide
ggguggugugcggaugucc

SEQ ID NO: 890684 - RNA, 19 nt, Artificial Sequence
  Description of Artificial Sequence: Synthetic oligonucleotide
ccgccgaucuucugucugc

SEQ ID NO: 890685 - RNA, 19 nt, Artificial Sequence
  Description of Artificial Sequence: Synthetic oligonucleotide
gucgccgcucugacuguag

SEQ ID NO: 890686 - RNA, 19 nt, Artificial Sequence
  Description of Artificial Sequence: Synthetic oligonucleotide
gcgaguagcuggugaucug

SEQ ID NO: 890687 - RNA, 19 nt, Artificial Sequence
  Description of Artificial Sequence: Synthetic oligonucleotide
gcucccgcccgccagaugu

SEQ ID NO: 890688 - RNA, 19 nt, Artificial Sequence
  Description of Artificial Sequence: Synthetic oligonucleotide
gcggaugucccgcugcaaa

SEQ ID NO: 890689 - RNA, 19 nt, Artificial Sequence
  Description of Artificial Sequence: Synthetic oligonucleotide
caguuggccccggcccucg

SEQ ID NO: 890690 - RNA, 19 nt, Artificial Sequence
  Description of Artificial Sequence: Synthetic oligonucleotide
ggucucgucuccggccccg

SEQ ID NO: 890691 - RNA, 19 nt, Artificial Sequence
  Description of Artificial Sequence: Synthetic oligonucleotide
ggccccggugacaauggcc

SEQ ID NO: 890692 - RNA, 19 nt, Artificial Sequence
  Description of Artificial Sequence: Synthetic oligonucleotide
gggcuuaccgucgaguggu

SEQ ID NO: 890693 - RNA, 19 nt, Artificial Sequence
  Description of Artificial Sequence: Synthetic oligonucleotide
cagacacggauuccuuugu

SEQ ID NO: 890694 - RNA, 19 nt, Artificial Sequence
  Description of Artificial Sequence: Synthetic oligonucleotide
uaccgucgagugguuccac

SEQ ID NO: 890695 - RNA, 19 nt, Artificial Sequence
  Description of Artificial Sequence: Synthetic oligonucleotide
gccuugcgguucuggcugg

SEQ ID NO: 890696 - RNA, 19 nt, Artificial Sequence
  Description of Artificial Sequence: Synthetic oligonucleotide
ccugcguaagggaugggua

SEQ ID NO: 890697 - RNA, 19 nt, Artificial Sequence
  Description of Artificial Sequence: Synthetic oligonucleotide
ccuucucgaugcccgcgcc

SEQ ID NO: 890698 - RNA, 19 nt, Artificial Sequence
  Description of Artificial Sequence: Synthetic oligonucleotide
cuggugcacgcgcuccaca

SEQ ID NO: 890699 - RNA, 19 nt, Artificial Sequence
  Description of Artificial Sequence: Synthetic oligonucleotide
gacggcugcaaccgccgau

SEQ ID NO: 890700 - RNA, 19 nt, Artificial Sequence
  Description of Artificial Sequence: Synthetic oligonucleotide
gcgggucuaucggauccgg

SEQ ID NO: 890701 - RNA, 19 nt, Artificial Sequence
  Description of Artificial Sequence: Synthetic oligonucleotide
cggggcuuaccgucgagug

SEQ ID NO: 890702 - RNA, 19 nt, Artificial Sequence
  Description of Artificial Sequence: Synthetic oligonucleotide
cuccggccggcucccgccc

SEQ ID NO: 890703 - RNA, 19 nt, Artificial Sequence
  Description of Artificial Sequence: Synthetic oligonucleotide
cugucgccagccgguuccc

SEQ ID NO: 890704 - RNA, 19 nt, Artificial Sequence
  Description of Artificial Sequence: Synthetic oligonucleotide
cacacgugacacuggguuu

SEQ ID NO: 890705 - RNA, 19 nt, Artificial Sequence
  Description of Artificial Sequence: Synthetic oligonucleotide
ccacucucgccguguggcc

SEQ ID NO: 890706 - RNA, 19 nt, Artificial Sequence
  Description of Artificial Sequence: Synthetic oligonucleotide
cccgcccgcgggucuaucg

SEQ ID NO: 890707 - RNA, 19 nt, Artificial Sequence
  Description of Artificial Sequence: Synthetic oligonucleotide
ccggugacaauggccuccc

SEQ ID NO: 890708 - RNA, 19 nt, Artificial Sequence
  Description of Artificial Sequence: Synthetic oligonucleotide
cuacugcgaccagguuccc

SEQ ID NO: 890709 - RNA, 19 nt, Artificial Sequence
  Description of Artificial Sequence: Synthetic oligonucleotide
cucgccguguggccuucca

SEQ ID NO: 890710 - RNA, 19 nt, Artificial Sequence
  Description of Artificial Sequence: Synthetic oligonucleotide
gcacgaagccuuugugugu

SEQ ID NO: 890711 - RNA, 19 nt, Artificial Sequence
  Description of Artificial Sequence: Synthetic oligonucleotide
ccacgcugagcacguuaag

SEQ ID NO: 890712 - RNA, 19 nt, Artificial Sequence
  Description of Artificial Sequence: Synthetic oligonucleotide
gacgggccacagccaccac

SEQ ID NO: 890713 - RNA, 19 nt, Artificial Sequence
  Description of Artificial Sequence: Synthetic oligonucleotide
gccccggugacaauggccu

SEQ ID NO: 890714 - RNA, 19 nt, Artificial Sequence
  Description of Artificial Sequence: Synthetic oligonucleotide
ccacacgugacacuggguu

SEQ ID NO: 890715 - RNA, 19 nt, Artificial Sequence
  Description of Artificial Sequence: Synthetic oligonucleotide
cacgaagccuuuguguguu

SEQ ID NO: 890716 - RNA, 19 nt, Artificial Sequence
  Description of Artificial Sequence: Synthetic oligonucleotide
cgggucuaucggauccggg

SEQ ID NO: 890717 - RNA, 19 nt, Artificial Sequence
  Description of Artificial Sequence: Synthetic oligonucleotide
gggcguggacggcugcaac

SEQ ID NO: 890718 - RNA, 19 nt, Artificial Sequence
  Description of Artificial Sequence: Synthetic oligonucleotide
ggcccucgaggggaugaag

SEQ ID NO: 890719 - RNA, 19 nt, Artificial Sequence
  Description of Artificial Sequence: Synthetic oligonucleotide
cgcucagaccagcccacag

SEQ ID NO: 890720 - RNA, 19 nt, Artificial Sequence
  Description of Artificial Sequence: Synthetic oligonucleotide
gcuuaccgucgagugguuc

SEQ ID NO: 890721 - RNA, 19 nt, Artificial Sequence
  Description of Artificial Sequence: Synthetic oligonucleotide
ggcugcgcaucccgcccgc

SEQ ID NO: 890722 - RNA, 19 nt, Artificial Sequence
  Description of Artificial Sequence: Synthetic oligonucleotide
caccugcguaagggauggg

SEQ ID NO: 890723 - RNA, 19 nt, Artificial Sequence
  Description of Artificial Sequence: Synthetic oligonucleotide
cugcaaccgccgaucuucu

SEQ ID NO: 890724 - RNA, 19 nt, Artificial Sequence
  Description of Artificial Sequence: Synthetic oligonucleotide
gggucucgucuccggcccc

SEQ ID NO: 890725 - RNA, 19 nt, Artificial Sequence
  Description of Artificial Sequence: Synthetic oligonucleotide
cacaaggaucugguucugu

SEQ ID NO: 890726 - RNA, 19 nt, Artificial Sequence
  Description of Artificial Sequence: Synthetic oligonucleotide
ccacagguacacgcaggug

SEQ ID NO: 890727 - RNA, 19 nt, Artificial Sequence
  Description of Artificial Sequence: Synthetic oligonucleotide
cgccgaucuucugucugcg

SEQ ID NO: 890728 - RNA, 19 nt, Artificial Sequence
  Description of Artificial Sequence: Synthetic oligonucleotide
gcgugggcuuccgugguga

SEQ ID NO: 890729 - RNA, 19 nt, Artificial Sequence
  Description of Artificial Sequence: Synthetic oligonucleotide
cuugcugggugaggauacu

SEQ ID NO: 890730 - RNA, 19 nt, Artificial Sequence
  Description of Artificial Sequence: Synthetic oligonucleotide
cguaagggauggguauuuc

SEQ ID NO: 890731 - RNA, 19 nt, Artificial Sequence
  Description of Artificial Sequence: Synthetic oligonucleotide
gucuccggccccggugaca

SEQ ID NO: 890732 - RNA, 19 nt, Artificial Sequence
  Description of Artificial Sequence: Synthetic oligonucleotide
gcucacaacgaggcauuua

SEQ ID NO: 890733 - RNA, 19 nt, Artificial Sequence
  Description of Artificial Sequence: Synthetic oligonucleotide
ccagaaccgcagggucucg

SEQ ID NO: 890734 - RNA, 19 nt, Artificial Sequence
  Description of Artificial Sequence: Synthetic oligonucleotide
cgucgagugguuccacaca

SEQ ID NO: 890735 - RNA, 19 nt, Artificial Sequence
  Description of Artificial Sequence: Synthetic oligonucleotide
ggugugcggaugucccgcu

SEQ ID NO: 890736 - RNA, 19 nt, Artificial Sequence
  Description of Artificial Sequence: Synthetic oligonucleotide
cacucucgccguguggccu

SEQ ID NO: 890737 - RNA, 19 nt, Artificial Sequence
  Description of Artificial Sequence: Synthetic oligonucleotide
ggacggcugcaaccgccga

SEQ ID NO: 890738 - RNA, 19 nt, Artificial Sequence
  Description of Artificial Sequence: Synthetic oligonucleotide
cccuguagucgccgcucug

SEQ ID NO: 890739 - RNA, 19 nt, Artificial Sequence
  Description of Artificial Sequence: Synthetic oligonucleotide
cguggacggcugcaaccgc

SEQ ID NO: 890740 - RNA, 19 nt, Artificial Sequence
  Description of Artificial Sequence: Synthetic oligonucleotide
cccgcgggucuaucggauc

SEQ ID NO: 890741 - RNA, 19 nt, Artificial Sequence
  Description of Artificial Sequence: Synthetic oligonucleotide
guguggggaccaggcaaua

SEQ ID NO: 890742 - RNA, 19 nt, Artificial Sequence
  Description of Artificial Sequence: Synthetic oligonucleotide
gcacggggcuuaccgucga

SEQ ID NO: 890743 - RNA, 19 nt, Artificial Sequence
  Description of Artificial Sequence: Synthetic oligonucleotide
cucucgccguguggccuuc

SEQ ID NO: 890744 - RNA, 19 nt, Artificial Sequence
  Description of Artificial Sequence: Synthetic oligonucleotide
cgcgggucuaucggauccg

SEQ ID NO: 890745 - RNA, 19 nt, Artificial Sequence
  Description of Artificial Sequence: Synthetic oligonucleotide
gugcucgggcguggacggc

SEQ ID NO: 890746 - RNA, 19 nt, Artificial Sequence
  Description of Artificial Sequence: Synthetic oligonucleotide
gcgcaucccgcccgcccgc

SEQ ID NO: 890747 - RNA, 19 nt, Artificial Sequence
  Description of Artificial Sequence: Synthetic oligonucleotide
cuugcgcgugggcuuccgu

SEQ ID NO: 890748 - RNA, 19 nt, Artificial Sequence
  Description of Artificial Sequence: Synthetic oligonucleotide
cggaugucccgcugcaaaa

SEQ ID NO: 890749 - RNA, 19 nt, Artificial Sequence
  Description of Artificial Sequence: Synthetic oligonucleotide
cagaaccgcagggucucgu

SEQ ID NO: 890750 - RNA, 19 nt, Artificial Sequence
  Description of Artificial Sequence: Synthetic oligonucleotide
gcucgggcguggacggcug

SEQ ID NO: 890751 - RNA, 19 nt, Artificial Sequence
  Description of Artificial Sequence: Synthetic oligonucleotide
ccgcagggucucgucuccg

SEQ ID NO: 890752 - RNA, 19 nt, Artificial Sequence
  Description of Artificial Sequence: Synthetic oligonucleotide
cgugggcuuccguggugac

SEQ ID NO: 890753 - RNA, 19 nt, Artificial Sequence
  Description of Artificial Sequence: Synthetic oligonucleotide
ggcucccgcccgccagaug

SEQ ID NO: 890754 - RNA, 19 nt, Artificial Sequence
  Description of Artificial Sequence: Synthetic oligonucleotide
gcggucggcugugccacca

SEQ ID NO: 890755 - RNA, 19 nt, Artificial Sequence
  Description of Artificial Sequence: Synthetic oligonucleotide
cgaucuucugucugcggau

SEQ ID NO: 890756 - RNA, 19 nt, Artificial Sequence
  Description of Artificial Sequence: Synthetic oligonucleotide
ccgcucugacuguaggggu

SEQ ID NO: 890757 - RNA, 19 nt, Artificial Sequence
  Description of Artificial Sequence: Synthetic oligonucleotide
ccgccaggugcucugugua

SEQ ID NO: 890758 - RNA, 19 nt, Artificial Sequence
  Description of Artificial Sequence: Synthetic oligonucleotide
cccgcccgccagaugucuc

SEQ ID NO: 890759 - RNA, 19 nt, Artificial Sequence
  Description of Artificial Sequence: Synthetic oligonucleotide
gcguaagggauggguauuu

SEQ ID NO: 890760 - RNA, 19 nt, Artificial Sequence
  Description of Artificial Sequence: Synthetic oligonucleotide
ggcuuccguggugaccgaa

SEQ ID NO: 890761 - RNA, 19 nt, Artificial Sequence
  Description of Artificial Sequence: Synthetic oligonucleotide
cucugacuguagggguggu

SEQ ID NO: 890762 - RNA, 19 nt, Artificial Sequence
  Description of Artificial Sequence: Synthetic oligonucleotide
cggucacggcuaccggaug

SEQ ID NO: 890763 - RNA, 19 nt, Artificial Sequence
  Description of Artificial Sequence: Synthetic oligonucleotide
cgcgugggcuuccguggug

SEQ ID NO: 890764 - RNA, 19 nt, Artificial Sequence
  Description of Artificial Sequence: Synthetic oligonucleotide
ggcugcaaccgccgaucuu

SEQ ID NO: 890765 - RNA, 19 nt, Artificial Sequence
  Description of Artificial Sequence: Synthetic oligonucleotide
gcgcgugggcuuccguggu

SEQ ID NO: 890766 - RNA, 19 nt, Artificial Sequence
  Description of Artificial Sequence: Synthetic oligonucleotide
ccgcccgccagaugucucu

SEQ ID NO: 890767 - RNA, 19 nt, Artificial Sequence
  Description of Artificial Sequence: Synthetic oligonucleotide
cucauacguccugguccau

SEQ ID NO: 890768 - RNA, 19 nt, Artificial Sequence
  Description of Artificial Sequence: Synthetic oligonucleotide
cggucggcugugccaccac

SEQ ID NO: 890769 - RNA, 19 nt, Artificial Sequence
  Description of Artificial Sequence: Synthetic oligonucleotide
cgcccgcgggucuaucgga

SEQ ID NO: 890770 - RNA, 19 nt, Artificial Sequence
  Description of Artificial Sequence: Synthetic oligonucleotide
cggcuaccggaugacaacu

SEQ ID NO: 890771 - RNA, 19 nt, Artificial Sequence
  Description of Artificial Sequence: Synthetic oligonucleotide
cuccugucgccagccgguu

SEQ ID NO: 890772 - RNA, 19 nt, Artificial Sequence
  Description of Artificial Sequence: Synthetic oligonucleotide
cguugauccuguggaaguu

SEQ ID NO: 890773 - RNA, 19 nt, Artificial Sequence
  Description of Artificial Sequence: Synthetic oligonucleotide
ccgcucagaccagcccaca

SEQ ID NO: 890774 - RNA, 19 nt, Artificial Sequence
  Description of Artificial Sequence: Synthetic oligonucleotide
ggcuuaccgucgagugguu

SEQ ID NO: 890775 - RNA, 19 nt, Artificial Sequence
  Description of Artificial Sequence: Synthetic oligonucleotide
ccagccgguucccgccggu

SEQ ID NO: 890776 - RNA, 19 nt, Artificial Sequence
  Description of Artificial Sequence: Synthetic oligonucleotide
cggcugcaaccgccgaucu

SEQ ID NO: 890777 - RNA, 19 nt, Artificial Sequence
  Description of Artificial Sequence: Synthetic oligonucleotide
caggcgcauccagcaccuu

SEQ ID NO: 890778 - RNA, 19 nt, Artificial Sequence
  Description of Artificial Sequence: Synthetic oligonucleotide
cggcccucgaggggaugaa

SEQ ID NO: 890779 - RNA, 19 nt, Artificial Sequence
  Description of Artificial Sequence: Synthetic oligonucleotide
cggcucccgcccgccagau

SEQ ID NO: 890780 - RNA, 19 nt, Artificial Sequence
  Description of Artificial Sequence: Synthetic oligonucleotide
uacgguauacaccagaggc

SEQ ID NO: 890781 - RNA, 19 nt, Artificial Sequence
  Description of Artificial Sequence: Synthetic oligonucleotide
ucuauaugacauccaagcg

SEQ ID NO: 890782 - RNA, 19 nt, Artificial Sequence
  Description of Artificial Sequence: Synthetic oligonucleotide
uaacacucgcacaagagcc

SEQ ID NO: 890783 - RNA, 19 nt, Artificial Sequence
  Description of Artificial Sequence: Synthetic oligonucleotide
uagaucacuagcaacguca

SEQ ID NO: 890784 - RNA, 19 nt, Artificial Sequence
  Description of Artificial Sequence: Synthetic oligonucleotide
uuaacacucgcacaagagc

SEQ ID NO: 890785 - RNA, 19 nt, Artificial Sequence
  Description of Artificial Sequence: Synthetic oligonucleotide
uuuuguuugucccucccag

SEQ ID NO: 890786 - RNA, 19 nt, Artificial Sequence
  Description of Artificial Sequence: Synthetic oligonucleotide
cucaaggagauuuuaagug

SEQ ID NO: 890787 - RNA, 19 nt, Artificial Sequence
  Description of Artificial Sequence: Synthetic oligonucleotide
aaacgggaguuguacaagg

SEQ ID NO: 890788 - RNA, 19 nt, Artificial Sequence
  Description of Artificial Sequence: Synthetic oligonucleotide
ucucgaaacucuauuacca

SEQ ID NO: 890789 - RNA, 19 nt, Artificial Sequence
  Description of Artificial Sequence: Synthetic oligonucleotide
agauuuuaagugcuugagg

SEQ ID NO: 890790 - RNA, 19 nt, Artificial Sequence
  Description of Artificial Sequence: Synthetic oligonucleotide
agauucauggggccaaggc

SEQ ID NO: 890791 - RNA, 19 nt, Artificial Sequence
  Description of Artificial Sequence: Synthetic oligonucleotide
aguaacuagcugcugcccc

SEQ ID NO: 890792 - RNA, 19 nt, Artificial Sequence
  Description of Artificial Sequence: Synthetic oligonucleotide
ugguuuguugcuguaaucg

SEQ ID NO: 890793 - RNA, 19 nt, Artificial Sequence
  Description of Artificial Sequence: Synthetic oligonucleotide
agggucucuagucugaagg

SEQ ID NO: 890794 - RNA, 19 nt, Artificial Sequence
  Description of Artificial Sequence: Synthetic oligonucleotide
uucggcaguaacuagcugc

SEQ ID NO: 890795 - RNA, 19 nt, Artificial Sequence
  Description of Artificial Sequence: Synthetic oligonucleotide
caaugcacaaccuucccgg

SEQ ID NO: 890796 - RNA, 19 nt, Artificial Sequence
  Description of Artificial Sequence: Synthetic oligonucleotide
agcccauuacugcugagcc

SEQ ID NO: 890797 - RNA, 19 nt, Artificial Sequence
  Description of Artificial Sequence: Synthetic oligonucleotide
agccaacuugucuagacac

SEQ ID NO: 890798 - RNA, 19 nt, Artificial Sequence
  Description of Artificial Sequence: Synthetic oligonucleotide
caugaagaccugaaggccg

SEQ ID NO: 890799 - RNA, 19 nt, Artificial Sequence
  Description of Artificial Sequence: Synthetic oligonucleotide
aacgucaaggcguaguuau

SEQ ID NO: 890800 - RNA, 19 nt, Artificial Sequence
  Description of Artificial Sequence: Synthetic oligonucleotide
acugagaggcucuagguug

SEQ ID NO: 890801 - RNA, 19 nt, Artificial Sequence
  Description of Artificial Sequence: Synthetic oligonucleotide
auucauggggccaaggcgc

SEQ ID NO: 890802 - RNA, 19 nt, Artificial Sequence
  Description of Artificial Sequence: Synthetic oligonucleotide
ugcacaaccuucccggagg

SEQ ID NO: 890803 - RNA, 19 nt, Artificial Sequence
  Description of Artificial Sequence: Synthetic oligonucleotide
aguuguacaaggccagccg

SEQ ID NO: 890804 - RNA, 19 nt, Artificial Sequence
  Description of Artificial Sequence: Synthetic oligonucleotide
uccuuuaacacucgcacaa

SEQ ID NO: 890805 - RNA, 19 nt, Artificial Sequence
  Description of Artificial Sequence: Synthetic oligonucleotide
uuggagagaaguuggagac

SEQ ID NO: 890806 - RNA, 19 nt, Artificial Sequence
  Description of Artificial Sequence: Synthetic oligonucleotide
aacgaucugaggaaagggg

SEQ ID NO: 890807 - RNA, 19 nt, Artificial Sequence
  Description of Artificial Sequence: Synthetic oligonucleotide
aagaccugaaggccgauga

SEQ ID NO: 890808 - RNA, 19 nt, Artificial Sequence
  Description of Artificial Sequence: Synthetic oligonucleotide
aaggcguaguuauugagaa

SEQ ID NO: 890809 - RNA, 19 nt, Artificial Sequence
  Description of Artificial Sequence: Synthetic oligonucleotide
ucuagucugaaggaaguag

SEQ ID NO: 890810 - RNA, 19 nt, Artificial Sequence
  Description of Artificial Sequence: Synthetic oligonucleotide
agaagacgugguuucaagg

SEQ ID NO: 890811 - RNA, 19 nt, Artificial Sequence
  Description of Artificial Sequence: Synthetic oligonucleotide
guugcuguaaucgucuccg

SEQ ID NO: 890812 - RNA, 19 nt, Artificial Sequence
  Description of Artificial Sequence: Synthetic oligonucleotide
ucuagguuggugcugggcu

SEQ ID NO: 890813 - RNA, 19 nt, Artificial Sequence
  Description of Artificial Sequence: Synthetic oligonucleotide
agacagaugccacaaaggu

SEQ ID NO: 890814 - RNA, 19 nt, Artificial Sequence
  Description of Artificial Sequence: Synthetic oligonucleotide
acgggaguuguacaaggcc

SEQ ID NO: 890815 - RNA, 19 nt, Artificial Sequence
  Description of Artificial Sequence: Synthetic oligonucleotide
ucgcacaagagccguaacg

SEQ ID NO: 890816 - RNA, 19 nt, Artificial Sequence
  Description of Artificial Sequence: Synthetic oligonucleotide
ucuuggacugguaccacag

SEQ ID NO: 890817 - RNA, 19 nt, Artificial Sequence
  Description of Artificial Sequence: Synthetic oligonucleotide
aacuaccagcuuuauuguc

SEQ ID NO: 890818 - RNA, 19 nt, Artificial Sequence
  Description of Artificial Sequence: Synthetic oligonucleotide
agcagcguacgguauacac

SEQ ID NO: 890819 - RNA, 19 nt, Artificial Sequence
  Description of Artificial Sequence: Synthetic oligonucleotide
ucucucgaaacucuauuac

SEQ ID NO: 890820 - RNA, 19 nt, Artificial Sequence
  Description of Artificial Sequence: Synthetic oligonucleotide
agccguaacgaucugagga

SEQ ID NO: 890821 - RNA, 19 nt, Artificial Sequence
  Description of Artificial Sequence: Synthetic oligonucleotide
acucaaggagauuuuaagu

SEQ ID NO: 890822 - RNA, 19 nt, Artificial Sequence
  Description of Artificial Sequence: Synthetic oligonucleotide
uuggggaaacuacaguccc

SEQ ID NO: 890823 - RNA, 19 nt, Artificial Sequence
  Description of Artificial Sequence: Synthetic oligonucleotide
gagauuuuaagugcuugag

SEQ ID NO: 890824 - RNA, 19 nt, Artificial Sequence
  Description of Artificial Sequence: Synthetic oligonucleotide
ggcguaguuauugagaagg

SEQ ID NO: 890825 - RNA, 19 nt, Artificial Sequence
  Description of Artificial Sequence: Synthetic oligonucleotide
uaacgaucugaggaaaggg

SEQ ID NO: 890826 - RNA, 19 nt, Artificial Sequence
  Description of Artificial Sequence: Synthetic oligonucleotide
ucugaccugggccucuugg

SEQ ID NO: 890827 - RNA, 19 nt, Artificial Sequence
  Description of Artificial Sequence: Synthetic oligonucleotide
cucccaaagaucagaaggc

SEQ ID NO: 890828 - RNA, 19 nt, Artificial Sequence
  Description of Artificial Sequence: Synthetic oligonucleotide
ucacuagcaacgucaaggc

SEQ ID NO: 890829 - RNA, 19 nt, Artificial Sequence
  Description of Artificial Sequence: Synthetic oligonucleotide
ugcuguaaucgucuccggg

SEQ ID NO: 890830 - RNA, 19 nt, Artificial Sequence
  Description of Artificial Sequence: Synthetic oligonucleotide
uuuguuugucccucccagg

SEQ ID NO: 890831 - RNA, 19 nt, Artificial Sequence
  Description of Artificial Sequence: Synthetic oligonucleotide
gguuucaagguccagggcc

SEQ ID NO: 890832 - RNA, 19 nt, Artificial Sequence
  Description of Artificial Sequence: Synthetic oligonucleotide
gacucgaccauccaucuca

SEQ ID NO: 890833 - RNA, 19 nt, Artificial Sequence
  Description of Artificial Sequence: Synthetic oligonucleotide
cucucgaaacucuauuacc

SEQ ID NO: 890834 - RNA, 19 nt, Artificial Sequence
  Description of Artificial Sequence: Synthetic oligonucleotide
aagugcugaguccacagau

SEQ ID NO: 890835 - RNA, 19 nt, Artificial Sequence
  Description of Artificial Sequence: Synthetic oligonucleotide
aggugugauguuuccuucc

SEQ ID NO: 890836 - RNA, 19 nt, Artificial Sequence
  Description of Artificial Sequence: Synthetic oligonucleotide
gagacagaugccacaaagg

SEQ ID NO: 890837 - RNA, 19 nt, Artificial Sequence
  Description of Artificial Sequence: Synthetic oligonucleotide
gaaggaacgcugcugguac

SEQ ID NO: 890838 - RNA, 19 nt, Artificial Sequence
  Description of Artificial Sequence: Synthetic oligonucleotide
ucaaggcguaguuauugag

SEQ ID NO: 890839 - RNA, 19 nt, Artificial Sequence
  Description of Artificial Sequence: Synthetic oligonucleotide
agugacagugucagaaccc

SEQ ID NO: 890840 - RNA, 19 nt, Artificial Sequence
  Description of Artificial Sequence: Synthetic oligonucleotide
ugaaggaaguagaucacua

SEQ ID NO: 890841 - RNA, 19 nt, Artificial Sequence
  Description of Artificial Sequence: Synthetic oligonucleotide
acaaccuucccggagggac

SEQ ID NO: 890842 - RNA, 19 nt, Artificial Sequence
  Description of Artificial Sequence: Synthetic oligonucleotide
cacaguuuggacucuguac

SEQ ID NO: 890843 - RNA, 19 nt, Artificial Sequence
  Description of Artificial Sequence: Synthetic oligonucleotide
ugagacgucucucgaaacu

SEQ ID NO: 890844 - RNA, 19 nt, Artificial Sequence
  Description of Artificial Sequence: Synthetic oligonucleotide
ucucuagucugaaggaagu

SEQ ID NO: 890845 - RNA, 19 nt, Artificial Sequence
  Description of Artificial Sequence: Synthetic oligonucleotide
acuagcaacgucaaggcgu

SEQ ID NO: 890846 - RNA, 19 nt, Artificial Sequence
  Description of Artificial Sequence: Synthetic oligonucleotide
gcaguggugaaacuggagg

SEQ ID NO: 890847 - RNA, 19 nt, Artificial Sequence
  Description of Artificial Sequence: Synthetic oligonucleotide
ucucuugcccaucuagucu

SEQ ID NO: 890848 - RNA, 19 nt, Artificial Sequence
  Description of Artificial Sequence: Synthetic oligonucleotide
guaacgaucugaggaaagg

SEQ ID NO: 890849 - RNA, 19 nt, Artificial Sequence
  Description of Artificial Sequence: Synthetic oligonucleotide
agacgugguuucaaggucc

SEQ ID NO: 890850 - RNA, 19 nt, Artificial Sequence
  Description of Artificial Sequence: Synthetic oligonucleotide
gagaagacgugguuucaag

SEQ ID NO: 890851 - RNA, 19 nt, Artificial Sequence
  Description of Artificial Sequence: Synthetic oligonucleotide
ucccuguucuauaugacau

SEQ ID NO: 890852 - RNA, 19 nt, Artificial Sequence
  Description of Artificial Sequence: Synthetic oligonucleotide
aacgggaguuguacaaggc

SEQ ID NO: 890853 - RNA, 19 nt, Artificial Sequence
  Description of Artificial Sequence: Synthetic oligonucleotide
caaagcagaaucugguguc

SEQ ID NO: 890854 - RNA, 19 nt, Artificial Sequence
  Description of Artificial Sequence: Synthetic oligonucleotide
agauucaggaaacgggagu

SEQ ID NO: 890855 - RNA, 19 nt, Artificial Sequence
  Description of Artificial Sequence: Synthetic oligonucleotide
agucuagaggagaagcugg

SEQ ID NO: 890856 - RNA, 19 nt, Artificial Sequence
  Description of Artificial Sequence: Synthetic oligonucleotide
uuggacucuguacacucca

SEQ ID NO: 890857 - RNA, 19 nt, Artificial Sequence
  Description of Artificial Sequence: Synthetic oligonucleotide
acgguauacaccagaggcc

SEQ ID NO: 890858 - RNA, 19 nt, Artificial Sequence
  Description of Artificial Sequence: Synthetic oligonucleotide
agaaucuggugucuguggu

SEQ ID NO: 890859 - RNA, 19 nt, Artificial Sequence
  Description of Artificial Sequence: Synthetic oligonucleotide
aacugagaggcucuagguu

SEQ ID NO: 890860 - RNA, 19 nt, Artificial Sequence
  Description of Artificial Sequence: Synthetic oligonucleotide
agagauucaggaaacggga

SEQ ID NO: 890861 - RNA, 19 nt, Artificial Sequence
  Description of Artificial Sequence: Synthetic oligonucleotide
acgagcuuccauugccagc

SEQ ID NO: 890862 - RNA, 19 nt, Artificial Sequence
  Description of Artificial Sequence: Synthetic oligonucleotide
ucgggacgcauccuugggg

SEQ ID NO: 890863 - RNA, 19 nt, Artificial Sequence
  Description of Artificial Sequence: Synthetic oligonucleotide
aucgucuccgggcacgccg

SEQ ID NO: 890864 - RNA, 19 nt, Artificial Sequence
  Description of Artificial Sequence: Synthetic oligonucleotide
acaagagccguaacgaucu

SEQ ID NO: 890865 - RNA, 19 nt, Artificial Sequence
  Description of Artificial Sequence: Synthetic oligonucleotide
ugguaaggggaugagcuug

SEQ ID NO: 890866 - RNA, 19 nt, Artificial Sequence
  Description of Artificial Sequence: Synthetic oligonucleotide
cuagucugaaggaaguaga

SEQ ID NO: 890867 - RNA, 19 nt, Artificial Sequence
  Description of Artificial Sequence: Synthetic oligonucleotide
ggaaucuuggacugguacc

SEQ ID NO: 890868 - RNA, 19 nt, Artificial Sequence
  Description of Artificial Sequence: Synthetic oligonucleotide
gaaacgggaguuguacaag

SEQ ID NO: 890869 - RNA, 19 nt, Artificial Sequence
  Description of Artificial Sequence: Synthetic oligonucleotide
aaucuuggacugguaccac

SEQ ID NO: 890870 - RNA, 19 nt, Artificial Sequence
  Description of Artificial Sequence: Synthetic oligonucleotide
gacagaugccacaaaggug

SEQ ID NO: 890871 - RNA, 19 nt, Artificial Sequence
  Description of Artificial Sequence: Synthetic oligonucleotide
gaaucuggugucuguggug

SEQ ID NO: 890872 - RNA, 19 nt, Artificial Sequence
  Description of Artificial Sequence: Synthetic oligonucleotide
gugagucuagaggagaagc

SEQ ID NO: 890873 - RNA, 19 nt, Artificial Sequence
  Description of Artificial Sequence: Synthetic oligonucleotide
gaagacgugguuucaaggu

SEQ ID NO: 890874 - RNA, 19 nt, Artificial Sequence
  Description of Artificial Sequence: Synthetic oligonucleotide
guacgguauacaccagagg

SEQ ID NO: 890875 - RNA, 19 nt, Artificial Sequence
  Description of Artificial Sequence: Synthetic oligonucleotide
aggaaguagaucacuagca

SEQ ID NO: 890876 - RNA, 19 nt, Artificial Sequence
  Description of Artificial Sequence: Synthetic oligonucleotide
cacaagagccguaacgauc

SEQ ID NO: 890877 - RNA, 19 nt, Artificial Sequence
  Description of Artificial Sequence: Synthetic oligonucleotide
guucuauaugacauccaag

SEQ ID NO: 890878 - RNA, 19 nt, Artificial Sequence
  Description of Artificial Sequence: Synthetic oligonucleotide
agcgccugaggauccaggg

SEQ ID NO: 890879 - RNA, 19 nt, Artificial Sequence
  Description of Artificial Sequence: Synthetic oligonucleotide
cagcaaugcacaaccuucc

SEQ ID NO: 890880 - RNA, 19 nt, Artificial Sequence
  Description of Artificial Sequence: Synthetic oligonucleotide
cugagaggcucuagguugg

SEQ ID NO: 890881 - RNA, 19 nt, Artificial Sequence
  Description of Artificial Sequence: Synthetic oligonucleotide
ugugaggucgccuccucac

SEQ ID NO: 890882 - RNA, 19 nt, Artificial Sequence
  Description of Artificial Sequence: Synthetic oligonucleotide
uagucugaaggaaguagau

SEQ ID NO: 890883 - RNA, 19 nt, Artificial Sequence
  Description of Artificial Sequence: Synthetic oligonucleotide
caagcgcuuccuuuaacac

SEQ ID NO: 890884 - RNA, 19 nt, Artificial Sequence
  Description of Artificial Sequence: Synthetic oligonucleotide
cagcguacgguauacacca

SEQ ID NO: 890885 - RNA, 19 nt, Artificial Sequence
  Description of Artificial Sequence: Synthetic oligonucleotide
ugguacuggaggcuucggc

SEQ ID NO: 890886 - RNA, 19 nt, Artificial Sequence
  Description of Artificial Sequence: Synthetic oligonucleotide
gcuguaaucgucuccgggc

SEQ ID NO: 890887 - RNA, 19 nt, Artificial Sequence
  Description of Artificial Sequence: Synthetic oligonucleotide
ugcccaauuuccccucucc

SEQ ID NO: 890888 - RNA, 19 nt, Artificial Sequence
  Description of Artificial Sequence: Synthetic oligonucleotide
acuacagucccagccauca

SEQ ID NO: 890889 - RNA, 19 nt, Artificial Sequence
  Description of Artificial Sequence: Synthetic oligonucleotide
uugucugugaggucgccuc

SEQ ID NO: 890890 - RNA, 19 nt, Artificial Sequence
  Description of Artificial Sequence: Synthetic oligonucleotide
gucacacgagcuuccauug

SEQ ID NO: 890891 - RNA, 19 nt, Artificial Sequence
  Description of Artificial Sequence: Synthetic oligonucleotide
uguuugucccucccaggga

SEQ ID NO: 890892 - RNA, 19 nt, Artificial Sequence
  Description of Artificial Sequence: Synthetic oligonucleotide
agucgggacgcauccuugg

SEQ ID NO: 890893 - RNA, 19 nt, Artificial Sequence
  Description of Artificial Sequence: Synthetic oligonucleotide
aggagauuuuaagugcuug

SEQ ID NO: 890894 - RNA, 19 nt, Artificial Sequence
  Description of Artificial Sequence: Synthetic oligonucleotide
gucucuagucugaaggaag

SEQ ID NO: 890895 - RNA, 19 nt, Artificial Sequence
  Description of Artificial Sequence: Synthetic oligonucleotide
uggagagaaguuggagacg

SEQ ID NO: 890896 - RNA, 19 nt, Artificial Sequence
  Description of Artificial Sequence: Synthetic oligonucleotide
ggagauguccccaugaaga

SEQ ID NO: 890897 - RNA, 19 nt, Artificial Sequence
  Description of Artificial Sequence: Synthetic oligonucleotide
uccugcaguggugaaacug

SEQ ID NO: 890898 - RNA, 19 nt, Artificial Sequence
  Description of Artificial Sequence: Synthetic oligonucleotide
guaaucgucuccgggcacg

SEQ ID NO: 890899 - RNA, 19 nt, Artificial Sequence
  Description of Artificial Sequence: Synthetic oligonucleotide
aggccgaugacagaacuug

SEQ ID NO: 890900 - RNA, 19 nt, Artificial Sequence
  Description of Artificial Sequence: Synthetic oligonucleotide
caaggcguaguuauugaga

SEQ ID NO: 890901 - RNA, 19 nt, Artificial Sequence
  Description of Artificial Sequence: Synthetic oligonucleotide
aagcacagcgccagcucgc

SEQ ID NO: 890902 - RNA, 19 nt, Artificial Sequence
  Description of Artificial Sequence: Synthetic oligonucleotide
uggacucuguacacuccag

SEQ ID NO: 890903 - RNA, 19 nt, Artificial Sequence
  Description of Artificial Sequence: Synthetic oligonucleotide
ucgaaacucuauuaccauu

SEQ ID NO: 890904 - RNA, 19 nt, Artificial Sequence
  Description of Artificial Sequence: Synthetic oligonucleotide
auaaacuaccagcuuuauu

SEQ ID NO: 890905 - RNA, 19 nt, Artificial Sequence
  Description of Artificial Sequence: Synthetic oligonucleotide
cuuuaacacucgcacaaga

SEQ ID NO: 890906 - RNA, 19 nt, Artificial Sequence
  Description of Artificial Sequence: Synthetic oligonucleotide
cagcuuuauugucugugag

SEQ ID NO: 890907 - RNA, 19 nt, Artificial Sequence
  Description of Artificial Sequence: Synthetic oligonucleotide
cacccggcugguuacauug

SEQ ID NO: 890908 - RNA, 19 nt, Artificial Sequence
  Description of Artificial Sequence: Synthetic oligonucleotide
uuaagugcuugagggagaa

SEQ ID NO: 890909 - RNA, 19 nt, Artificial Sequence
  Description of Artificial Sequence: Synthetic oligonucleotide
ucccaaagaucagaaggca

SEQ ID NO: 890910 - RNA, 19 nt, Artificial Sequence
  Description of Artificial Sequence: Synthetic oligonucleotide
ucacacgagcuuccauugc

SEQ ID NO: 890911 - RNA, 19 nt, Artificial Sequence
  Description of Artificial Sequence: Synthetic oligonucleotide
agcccgaaagaucccagca

SEQ ID NO: 890912 - RNA, 19 nt, Artificial Sequence
  Description of Artificial Sequence: Synthetic oligonucleotide
gcugaguccacagauggag

SEQ ID NO: 890913 - RNA, 19 nt, Artificial Sequence
  Description of Artificial Sequence: Synthetic oligonucleotide
cacuagcaacgucaaggcg

SEQ ID NO: 890914 - RNA, 19 nt, Artificial Sequence
  Description of Artificial Sequence: Synthetic oligonucleotide
uugguuuguugcuguaauc

SEQ ID NO: 890915 - RNA, 19 nt, Artificial Sequence
  Description of Artificial Sequence: Synthetic oligonucleotide
uguaaucgucuccgggcac

SEQ ID NO: 890916 - RNA, 19 nt, Artificial Sequence
  Description of Artificial Sequence: Synthetic oligonucleotide
ggcaguaguccccaguccc

SEQ ID NO: 890917 - RNA, 19 nt, Artificial Sequence
  Description of Artificial Sequence: Synthetic oligonucleotide
uuacauuggcugcaacauu

SEQ ID NO: 890918 - RNA, 19 nt, Artificial Sequence
  Description of Artificial Sequence: Synthetic oligonucleotide
gucuagacacuuccaaguc

SEQ ID NO: 890919 - RNA, 19 nt, Artificial Sequence
  Description of Artificial Sequence: Synthetic oligonucleotide
gguucccuguucuauauga

SEQ ID NO: 890920 - RNA, 19 nt, Artificial Sequence
  Description of Artificial Sequence: Synthetic oligonucleotide
uggggaaacuacaguccca

SEQ ID NO: 890921 - RNA, 19 nt, Artificial Sequence
  Description of Artificial Sequence: Synthetic oligonucleotide
caacauugugacucagguc

SEQ ID NO: 890922 - RNA, 19 nt, Artificial Sequence
  Description of Artificial Sequence: Synthetic oligonucleotide
augcacaaccuucccggag

SEQ ID NO: 890923 - RNA, 19 nt, Artificial Sequence
  Description of Artificial Sequence: Synthetic oligonucleotide
uccccugcacaucccugcg

SEQ ID NO: 890924 - RNA, 19 nt, Artificial Sequence
  Description of Artificial Sequence: Synthetic oligonucleotide
ugaggucgccuccucacuc

SEQ ID NO: 890925 - RNA, 19 nt, Artificial Sequence
  Description of Artificial Sequence: Synthetic oligonucleotide
gguacuggaggcuucggca

SEQ ID NO: 890926 - RNA, 19 nt, Artificial Sequence
  Description of Artificial Sequence: Synthetic oligonucleotide
uggcaguaguccccagucc

SEQ ID NO: 890927 - RNA, 19 nt, Artificial Sequence
  Description of Artificial Sequence: Synthetic oligonucleotide
ggagauuuuaagugcuuga

SEQ ID NO: 890928 - RNA, 19 nt, Artificial Sequence
  Description of Artificial Sequence: Synthetic oligonucleotide
guaacuagcugcugcccca

SEQ ID NO: 890929 - RNA, 19 nt, Artificial Sequence
  Description of Artificial Sequence: Synthetic oligonucleotide
ugaaggccgaugacagaac

SEQ ID NO: 890930 - RNA, 19 nt, Artificial Sequence
  Description of Artificial Sequence: Synthetic oligonucleotide
caguuuggacucuguacac

SEQ ID NO: 890931 - RNA, 19 nt, Artificial Sequence
  Description of Artificial Sequence: Synthetic oligonucleotide
uuugcccaauuuccccucu

SEQ ID NO: 890932 - RNA, 19 nt, Artificial Sequence
  Description of Artificial Sequence: Synthetic oligonucleotide
gagauucauggggccaagg

SEQ ID NO: 890933 - RNA, 19 nt, Artificial Sequence
  Description of Artificial Sequence: Synthetic oligonucleotide
gaacugagaggcucuaggu

SEQ ID NO: 890934 - RNA, 19 nt, Artificial Sequence
  Description of Artificial Sequence: Synthetic oligonucleotide
aaucgucuccgggcacgcc

SEQ ID NO: 890935 - RNA, 19 nt, Artificial Sequence
  Description of Artificial Sequence: Synthetic oligonucleotide
guuugucccucccagggaa

SEQ ID NO: 890936 - RNA, 19 nt, Artificial Sequence
  Description of Artificial Sequence: Synthetic oligonucleotide
cuccagucgggacgcaucc

SEQ ID NO: 890937 - RNA, 19 nt, Artificial Sequence
  Description of Artificial Sequence: Synthetic oligonucleotide
ccugacagcccauuacugc

SEQ ID NO: 890938 - RNA, 19 nt, Artificial Sequence
  Description of Artificial Sequence: Synthetic oligonucleotide
ucaggaaacgggaguugua

SEQ ID NO: 890939 - RNA, 19 nt, Artificial Sequence
  Description of Artificial Sequence: Synthetic oligonucleotide
ugguucccuguucuauaug

SEQ ID NO: 890940 - RNA, 19 nt, Artificial Sequence
  Description of Artificial Sequence: Synthetic oligonucleotide
cugucucacccugagacuc

SEQ ID NO: 890941 - RNA, 19 nt, Artificial Sequence
  Description of Artificial Sequence: Synthetic oligonucleotide
aggcguaguuauugagaag

SEQ ID NO: 890942 - RNA, 19 nt, Artificial Sequence
  Description of Artificial Sequence: Synthetic oligonucleotide
uccccuucaccugaucucu

SEQ ID NO: 890943 - RNA, 19 nt, Artificial Sequence
  Description of Artificial Sequence: Synthetic oligonucleotide
aguuuggacucuguacacu

SEQ ID NO: 890944 - RNA, 19 nt, Artificial Sequence
  Description of Artificial Sequence: Synthetic oligonucleotide
ggaaguagaucacuagcaa

SEQ ID NO: 890945 - RNA, 19 nt, Artificial Sequence
  Description of Artificial Sequence: Synthetic oligonucleotide
ggccucagaaucuuggaga

SEQ ID NO: 890946 - RNA, 19 nt, Artificial Sequence
  Description of Artificial Sequence: Synthetic oligonucleotide
ccgaugacagaacuugacc

SEQ ID NO: 890947 - RNA, 19 nt, Artificial Sequence
  Description of Artificial Sequence: Synthetic oligonucleotide
ugucucacccugagacucu

SEQ ID NO: 890948 - RNA, 19 nt, Artificial Sequence
  Description of Artificial Sequence: Synthetic oligonucleotide
cacagauggagccucugga

SEQ ID NO: 890949 - RNA, 19 nt, Artificial Sequence
  Description of Artificial Sequence: Synthetic oligonucleotide
gucaaggcguaguuauuga

SEQ ID NO: 890950 - RNA, 19 nt, Artificial Sequence
  Description of Artificial Sequence: Synthetic oligonucleotide
cugagacgucucucgaaac

SEQ ID NO: 890951 - RNA, 19 nt, Artificial Sequence
  Description of Artificial Sequence: Synthetic oligonucleotide
ggucuuugguccugggacc

SEQ ID NO: 890952 - RNA, 19 nt, Artificial Sequence
  Description of Artificial Sequence: Synthetic oligonucleotide
gucgggacgcauccuuggg

SEQ ID NO: 890953 - RNA, 19 nt, Artificial Sequence
  Description of Artificial Sequence: Synthetic oligonucleotide
acagucccagccaucaacu

SEQ ID NO: 890954 - RNA, 19 nt, Artificial Sequence
  Description of Artificial Sequence: Synthetic oligonucleotide
uccaagcgcuuccuuuaac

SEQ ID NO: 890955 - RNA, 19 nt, Artificial Sequence
  Description of Artificial Sequence: Synthetic oligonucleotide
cuuugcccaauuuccccuc

SEQ ID NO: 890956 - RNA, 19 nt, Artificial Sequence
  Description of Artificial Sequence: Synthetic oligonucleotide
cuguaaucgucuccgggca

SEQ ID NO: 890957 - RNA, 19 nt, Artificial Sequence
  Description of Artificial Sequence: Synthetic oligonucleotide
gaggcuucggcaguaacua

SEQ ID NO: 890958 - RNA, 19 nt, Artificial Sequence
  Description of Artificial Sequence: Synthetic oligonucleotide
aguuggagacggugagucu

SEQ ID NO: 890959 - RNA, 19 nt, Artificial Sequence
  Description of Artificial Sequence: Synthetic oligonucleotide
agcaacgucaaggcguagu

SEQ ID NO: 890960 - RNA, 19 nt, Artificial Sequence
  Description of Artificial Sequence: Synthetic oligonucleotide
agaaucuuggagagaaguu

SEQ ID NO: 890961 - RNA, 19 nt, Artificial Sequence
  Description of Artificial Sequence: Synthetic oligonucleotide
uguagccucuguugcucac

SEQ ID NO: 890962 - RNA, 19 nt, Artificial Sequence
  Description of Artificial Sequence: Synthetic oligonucleotide
cugaaggccgaugacagaa

SEQ ID NO: 890963 - RNA, 19 nt, Artificial Sequence
  Description of Artificial Sequence: Synthetic oligonucleotide
gucucucgaaacucuauua

SEQ ID NO: 890964 - RNA, 19 nt, Artificial Sequence
  Description of Artificial Sequence: Synthetic oligonucleotide
ggugagcugggccacagga

SEQ ID NO: 890965 - RNA, 19 nt, Artificial Sequence
  Description of Artificial Sequence: Synthetic oligonucleotide
ggagacggugagucuagag

SEQ ID NO: 890966 - RNA, 19 nt, Artificial Sequence
  Description of Artificial Sequence: Synthetic oligonucleotide
ugcugagcccagcagcgua

SEQ ID NO: 890967 - RNA, 19 nt, Artificial Sequence
  Description of Artificial Sequence: Synthetic oligonucleotide
cucgcugaugagaggugug

SEQ ID NO: 890968 - RNA, 19 nt, Artificial Sequence
  Description of Artificial Sequence: Synthetic oligonucleotide
agggagauguccccaugaa

SEQ ID NO: 890969 - RNA, 19 nt, Artificial Sequence
  Description of Artificial Sequence: Synthetic oligonucleotide
cuguacacuccagggacac

SEQ ID NO: 890970 - RNA, 19 nt, Artificial Sequence
  Description of Artificial Sequence: Synthetic oligonucleotide
gacgcauccuuggggaaac

SEQ ID NO: 890971 - RNA, 19 nt, Artificial Sequence
  Description of Artificial Sequence: Synthetic oligonucleotide
ucccagcaagaaacacaag

SEQ ID NO: 890972 - RNA, 19 nt, Artificial Sequence
  Description of Artificial Sequence: Synthetic oligonucleotide
ugguuacauuggcugcaac

SEQ ID NO: 890973 - RNA, 19 nt, Artificial Sequence
  Description of Artificial Sequence: Synthetic oligonucleotide
uaaucgucuccgggcacgc

SEQ ID NO: 890974 - RNA, 19 nt, Artificial Sequence
  Description of Artificial Sequence: Synthetic oligonucleotide
gucuuugguccugggaccc

SEQ ID NO: 890975 - RNA, 19 nt, Artificial Sequence
  Description of Artificial Sequence: Synthetic oligonucleotide
uauugucugugaggucgcc

SEQ ID NO: 890976 - RNA, 19 nt, Artificial Sequence
  Description of Artificial Sequence: Synthetic oligonucleotide
cguacgguauacaccagag

SEQ ID NO: 890977 - RNA, 19 nt, Artificial Sequence
  Description of Artificial Sequence: Synthetic oligonucleotide
acuucggguuccaugggcu

SEQ ID NO: 890978 - RNA, 19 nt, Artificial Sequence
  Description of Artificial Sequence: Synthetic oligonucleotide
uauacaccagaggccggac

SEQ ID NO: 890979 - RNA, 19 nt, Artificial Sequence
  Description of Artificial Sequence: Synthetic oligonucleotide
aggaacgcugcugguacug

SEQ ID NO: 890980 - RNA, 19 nt, Artificial Sequence
  Description of Artificial Sequence: Synthetic oligonucleotide
ugcacaucccugcgacuuc

SEQ ID NO: 890981 - RNA, 19 nt, Artificial Sequence
  Description of Artificial Sequence: Synthetic oligonucleotide
aggcuucggcaguaacuag

SEQ ID NO: 890982 - RNA, 19 nt, Artificial Sequence
  Description of Artificial Sequence: Synthetic oligonucleotide
ucugugaggucgccuccuc

SEQ ID NO: 890983 - RNA, 19 nt, Artificial Sequence
  Description of Artificial Sequence: Synthetic oligonucleotide
agagaagacgugguuucaa

SEQ ID NO: 890984 - RNA, 19 nt, Artificial Sequence
  Description of Artificial Sequence: Synthetic oligonucleotide
cuagcaacgucaaggcgua

SEQ ID NO: 890985 - RNA, 19 nt, Artificial Sequence
  Description of Artificial Sequence: Synthetic oligonucleotide
agcagggagcccgaaagau

SEQ ID NO: 890986 - RNA, 19 nt, Artificial Sequence
  Description of Artificial Sequence: Synthetic oligonucleotide
agccgguuacuggagggag

SEQ ID NO: 890987 - RNA, 19 nt, Artificial Sequence
  Description of Artificial Sequence: Synthetic oligonucleotide
guuggagacggugagucua

SEQ ID NO: 890988 - RNA, 19 nt, Artificial Sequence
  Description of Artificial Sequence: Synthetic oligonucleotide
uagacacuuccaagucauc

SEQ ID NO: 890989 - RNA, 19 nt, Artificial Sequence
  Description of Artificial Sequence: Synthetic oligonucleotide
cucuagguuggugcugggc

SEQ ID NO: 890990 - RNA, 19 nt, Artificial Sequence
  Description of Artificial Sequence: Synthetic oligonucleotide
cugacagcccauuacugcu

SEQ ID NO: 890991 - RNA, 19 nt, Artificial Sequence
  Description of Artificial Sequence: Synthetic oligonucleotide
ucccugcgacuucucauuc

SEQ ID NO: 890992 - RNA, 19 nt, Artificial Sequence
  Description of Artificial Sequence: Synthetic oligonucleotide
ggcuucggcaguaacuagc

SEQ ID NO: 890993 - RNA, 19 nt, Artificial Sequence
  Description of Artificial Sequence: Synthetic oligonucleotide
acggugagucuagaggaga

SEQ ID NO: 890994 - RNA, 19 nt, Artificial Sequence
  Description of Artificial Sequence: Synthetic oligonucleotide
cagaugccacaaaggugag

SEQ ID NO: 890995 - RNA, 19 nt, Artificial Sequence
  Description of Artificial Sequence: Synthetic oligonucleotide
agcaaggcccugcccugag

SEQ ID NO: 890996 - RNA, 19 nt, Artificial Sequence
  Description of Artificial Sequence: Synthetic oligonucleotide
ggagaaaaccuuguaggaa

SEQ ID NO: 890997 - RNA, 19 nt, Artificial Sequence
  Description of Artificial Sequence: Synthetic oligonucleotide
aggcccugcccugagacgu

SEQ ID NO: 890998 - RNA, 19 nt, Artificial Sequence
  Description of Artificial Sequence: Synthetic oligonucleotide
uucaagguccagggccuca

SEQ ID NO: 890999 - RNA, 19 nt, Artificial Sequence
  Description of Artificial Sequence: Synthetic oligonucleotide
gcagcguacgguauacacc

SEQ ID NO: 891000 - RNA, 19 nt, Artificial Sequence
  Description of Artificial Sequence: Synthetic oligonucleotide
agaucacuagcaacgucaa

SEQ ID NO: 891001 - RNA, 19 nt, Artificial Sequence
  Description of Artificial Sequence: Synthetic oligonucleotide
agacgucucucgaaacucu

SEQ ID NO: 891002 - RNA, 19 nt, Artificial Sequence
  Description of Artificial Sequence: Synthetic oligonucleotide
ggccugauggugcagagcu

SEQ ID NO: 891003 - RNA, 19 nt, Artificial Sequence
  Description of Artificial Sequence: Synthetic oligonucleotide
gcguaguuauugagaaggg

SEQ ID NO: 891004 - RNA, 19 nt, Artificial Sequence
  Description of Artificial Sequence: Synthetic oligonucleotide
gcagagaacugagaggcuc

SEQ ID NO: 891005 - RNA, 19 nt, Artificial Sequence
  Description of Artificial Sequence: Synthetic oligonucleotide
uugcccaauuuccccucuc

SEQ ID NO: 891006 - RNA, 19 nt, Artificial Sequence
  Description of Artificial Sequence: Synthetic oligonucleotide
cuucggcaguaacuagcug

SEQ ID NO: 891007 - RNA, 19 nt, Artificial Sequence
  Description of Artificial Sequence: Synthetic oligonucleotide
gcacaaccuucccggaggg

SEQ ID NO: 891008 - RNA, 19 nt, Artificial Sequence
  Description of Artificial Sequence: Synthetic oligonucleotide
ccagccgguuacuggaggg

SEQ ID NO: 891009 - RNA, 19 nt, Artificial Sequence
  Description of Artificial Sequence: Synthetic oligonucleotide
acacucgcacaagagccgu

SEQ ID NO: 891010 - RNA, 19 nt, Artificial Sequence
  Description of Artificial Sequence: Synthetic oligonucleotide
cagaggccggacucgacca

SEQ ID NO: 891011 - RNA, 19 nt, Artificial Sequence
  Description of Artificial Sequence: Synthetic oligonucleotide
acucgcacaagagccguaa

SEQ ID NO: 891012 - RNA, 19 nt, Artificial Sequence
  Description of Artificial Sequence: Synthetic oligonucleotide
caagugcugaguccacaga

SEQ ID NO: 891013 - RNA, 19 nt, Artificial Sequence
  Description of Artificial Sequence: Synthetic oligonucleotide
ccaagcgcuuccuuuaaca

SEQ ID NO: 891014 - RNA, 19 nt, Artificial Sequence
  Description of Artificial Sequence: Synthetic oligonucleotide
gagaggcucuagguuggug

SEQ ID NO: 891015 - RNA, 19 nt, Artificial Sequence
  Description of Artificial Sequence: Synthetic oligonucleotide
gggucucuagucugaagga

SEQ ID NO: 891016 - RNA, 19 nt, Artificial Sequence
  Description of Artificial Sequence: Synthetic oligonucleotide
guuacuggagggagauguc

SEQ ID NO: 891017 - RNA, 19 nt, Artificial Sequence
  Description of Artificial Sequence: Synthetic oligonucleotide
accugaucucugggugagc

SEQ ID NO: 891018 - RNA, 19 nt, Artificial Sequence
  Description of Artificial Sequence: Synthetic oligonucleotide
cguaacgaucugaggaaag

SEQ ID NO: 891019 - RNA, 19 nt, Artificial Sequence
  Description of Artificial Sequence: Synthetic oligonucleotide
gcccaauuuccccucuccc

SEQ ID NO: 891020 - RNA, 19 nt, Artificial Sequence
  Description of Artificial Sequence: Synthetic oligonucleotide
cugagcccagcagcguacg

SEQ ID NO: 891021 - RNA, 19 nt, Artificial Sequence
  Description of Artificial Sequence: Synthetic oligonucleotide
gcaguaguccccagucccg

SEQ ID NO: 891022 - RNA, 19 nt, Artificial Sequence
  Description of Artificial Sequence: Synthetic oligonucleotide
acucgaccauccaucucag

SEQ ID NO: 891023 - RNA, 19 nt, Artificial Sequence
  Description of Artificial Sequence: Synthetic oligonucleotide
gacgugguuucaaggucca

SEQ ID NO: 891024 - RNA, 19 nt, Artificial Sequence
  Description of Artificial Sequence: Synthetic oligonucleotide
gguuuguugcuguaaucgu

SEQ ID NO: 891025 - RNA, 19 nt, Artificial Sequence
  Description of Artificial Sequence: Synthetic oligonucleotide
uggccugauggugcagagc

SEQ ID NO: 891026 - RNA, 19 nt, Artificial Sequence
  Description of Artificial Sequence: Synthetic oligonucleotide
agggagcccgaaagauccc

SEQ ID NO: 891027 - RNA, 19 nt, Artificial Sequence
  Description of Artificial Sequence: Synthetic oligonucleotide
caaccuucccggagggaca

SEQ ID NO: 891028 - RNA, 19 nt, Artificial Sequence
  Description of Artificial Sequence: Synthetic oligonucleotide
gccguaacgaucugaggaa

SEQ ID NO: 891029 - RNA, 19 nt, Artificial Sequence
  Description of Artificial Sequence: Synthetic oligonucleotide
cacugugguccccugcaca

SEQ ID NO: 891030 - RNA, 19 nt, Artificial Sequence
  Description of Artificial Sequence: Synthetic oligonucleotide
cucgaaacucuauuaccau

SEQ ID NO: 891031 - RNA, 19 nt, Artificial Sequence
  Description of Artificial Sequence: Synthetic oligonucleotide
ggaacgcugcugguacugg

SEQ ID NO: 891032 - RNA, 19 nt, Artificial Sequence
  Description of Artificial Sequence: Synthetic oligonucleotide
ugggucacacgagcuucca

SEQ ID NO: 891033 - RNA, 19 nt, Artificial Sequence
  Description of Artificial Sequence: Synthetic oligonucleotide
uggugccacaaagcacagc

SEQ ID NO: 891034 - RNA, 19 nt, Artificial Sequence
  Description of Artificial Sequence: Synthetic oligonucleotide
caggugguaaggggaugag

SEQ ID NO: 891035 - RNA, 19 nt, Artificial Sequence
  Description of Artificial Sequence: Synthetic oligonucleotide
ugccacacuuggugccaca

SEQ ID NO: 891036 - RNA, 19 nt, Artificial Sequence
  Description of Artificial Sequence: Synthetic oligonucleotide
gcgccugaggauccagggg

SEQ ID NO: 891037 - RNA, 19 nt, Artificial Sequence
  Description of Artificial Sequence: Synthetic oligonucleotide
cuggagauucauggggcca

SEQ ID NO: 891038 - RNA, 19 nt, Artificial Sequence
  Description of Artificial Sequence: Synthetic oligonucleotide
cugaaggaaguagaucacu

SEQ ID NO: 891039 - RNA, 19 nt, Artificial Sequence
  Description of Artificial Sequence: Synthetic oligonucleotide
cucacucaaggagauuuua

SEQ ID NO: 891040 - RNA, 19 nt, Artificial Sequence
  Description of Artificial Sequence: Synthetic oligonucleotide
ccuuuaacacucgcacaag

SEQ ID NO: 891041 - RNA, 19 nt, Artificial Sequence
  Description of Artificial Sequence: Synthetic oligonucleotide
gcugguuacauuggcugca

SEQ ID NO: 891042 - RNA, 19 nt, Artificial Sequence
  Description of Artificial Sequence: Synthetic oligonucleotide
ucccggccccggaaggaac

SEQ ID NO: 891043 - RNA, 19 nt, Artificial Sequence
  Description of Artificial Sequence: Synthetic oligonucleotide
gccgaugacagaacuugac

SEQ ID NO: 891044 - RNA, 19 nt, Artificial Sequence
  Description of Artificial Sequence: Synthetic oligonucleotide
uggagacggugagucuaga

SEQ ID NO: 891045 - RNA, 19 nt, Artificial Sequence
  Description of Artificial Sequence: Synthetic oligonucleotide
gcguacgguauacaccaga

SEQ ID NO: 891046 - RNA, 19 nt, Artificial Sequence
  Description of Artificial Sequence: Synthetic oligonucleotide
ggucacacgagcuuccauu

SEQ ID NO: 891047 - RNA, 19 nt, Artificial Sequence
  Description of Artificial Sequence: Synthetic oligonucleotide
gacgucucucgaaacucua

SEQ ID NO: 891048 - RNA, 19 nt, Artificial Sequence
  Description of Artificial Sequence: Synthetic oligonucleotide
cgucaaggcguaguuauug

SEQ ID NO: 891049 - RNA, 19 nt, Artificial Sequence
  Description of Artificial Sequence: Synthetic oligonucleotide
guacaaggccagccgguua

SEQ ID NO: 891050 - RNA, 19 nt, Artificial Sequence
  Description of Artificial Sequence: Synthetic oligonucleotide
cgggaguuguacaaggcca

SEQ ID NO: 891051 - RNA, 19 nt, Artificial Sequence
  Description of Artificial Sequence: Synthetic oligonucleotide
agcacagcgccagcucgcu

SEQ ID NO: 891052 - RNA, 19 nt, Artificial Sequence
  Description of Artificial Sequence: Synthetic oligonucleotide
caaggcgcagccccuccca

SEQ ID NO: 891053 - RNA, 19 nt, Artificial Sequence
  Description of Artificial Sequence: Synthetic oligonucleotide
ggucucuagucugaaggaa

SEQ ID NO: 891054 - RNA, 19 nt, Artificial Sequence
  Description of Artificial Sequence: Synthetic oligonucleotide
ccugagacgucucucgaaa

SEQ ID NO: 891055 - RNA, 19 nt, Artificial Sequence
  Description of Artificial Sequence: Synthetic oligonucleotide
gaggccggacucgaccauc

SEQ ID NO: 891056 - RNA, 19 nt, Artificial Sequence
  Description of Artificial Sequence: Synthetic oligonucleotide
cagagcucagcaaggcccu

SEQ ID NO: 891057 - RNA, 19 nt, Artificial Sequence
  Description of Artificial Sequence: Synthetic oligonucleotide
acgugguuucaagguccag

SEQ ID NO: 891058 - RNA, 19 nt, Artificial Sequence
  Description of Artificial Sequence: Synthetic oligonucleotide
caucaggggcaacuggccu

SEQ ID NO: 891059 - RNA, 19 nt, Artificial Sequence
  Description of Artificial Sequence: Synthetic oligonucleotide
caucccugcgacuucucau

SEQ ID NO: 891060 - RNA, 19 nt, Artificial Sequence
  Description of Artificial Sequence: Synthetic oligonucleotide
uagcaacgucaaggcguag

SEQ ID NO: 891061 - RNA, 19 nt, Artificial Sequence
  Description of Artificial Sequence: Synthetic oligonucleotide
agcguacgguauacaccag

SEQ ID NO: 891062 - RNA, 19 nt, Artificial Sequence
  Description of Artificial Sequence: Synthetic oligonucleotide
cugcccugagacgucucuc

SEQ ID NO: 891063 - RNA, 19 nt, Artificial Sequence
  Description of Artificial Sequence: Synthetic oligonucleotide
cccggcugguuacauuggc

SEQ ID NO: 891064 - RNA, 19 nt, Artificial Sequence
  Description of Artificial Sequence: Synthetic oligonucleotide
cucuagucugaaggaagua

SEQ ID NO: 891065 - RNA, 19 nt, Artificial Sequence
  Description of Artificial Sequence: Synthetic oligonucleotide
gcccgaaagaucccagcaa

SEQ ID NO: 891066 - RNA, 19 nt, Artificial Sequence
  Description of Artificial Sequence: Synthetic oligonucleotide
cuuggacugguaccacagu

SEQ ID NO: 891067 - RNA, 19 nt, Artificial Sequence
  Description of Artificial Sequence: Synthetic oligonucleotide
ccccauuuucacugugguc

SEQ ID NO: 891068 - RNA, 19 nt, Artificial Sequence
  Description of Artificial Sequence: Synthetic oligonucleotide
gcagggagcccgaaagauc

SEQ ID NO: 891069 - RNA, 19 nt, Artificial Sequence
  Description of Artificial Sequence: Synthetic oligonucleotide
cugguuacauuggcugcaa

SEQ ID NO: 891070 - RNA, 19 nt, Artificial Sequence
  Description of Artificial Sequence: Synthetic oligonucleotide
cuguugcucacugucuggu

SEQ ID NO: 891071 - RNA, 19 nt, Artificial Sequence
  Description of Artificial Sequence: Synthetic oligonucleotide
gugguaaggggaugagcuu

SEQ ID NO: 891072 - RNA, 19 nt, Artificial Sequence
  Description of Artificial Sequence: Synthetic oligonucleotide
gugaggucgccuccucacu

SEQ ID NO: 891073 - RNA, 19 nt, Artificial Sequence
  Description of Artificial Sequence: Synthetic oligonucleotide
cucgaccauccaucucaga

SEQ ID NO: 891074 - RNA, 19 nt, Artificial Sequence
  Description of Artificial Sequence: Synthetic oligonucleotide
caacgucaaggcguaguua

SEQ ID NO: 891075 - RNA, 19 nt, Artificial Sequence
  Description of Artificial Sequence: Synthetic oligonucleotide
gcugagcccagcagcguac

SEQ ID NO: 891076 - RNA, 19 nt, Artificial Sequence
  Description of Artificial Sequence: Synthetic oligonucleotide
cugugguccccugcacauc

SEQ ID NO: 891077 - RNA, 19 nt, Artificial Sequence
  Description of Artificial Sequence: Synthetic oligonucleotide
ggacucgaccauccaucuc

SEQ ID NO: 891078 - RNA, 19 nt, Artificial Sequence
  Description of Artificial Sequence: Synthetic oligonucleotide
cuacagucccagccaucaa

SEQ ID NO: 891079 - RNA, 19 nt, Artificial Sequence
  Description of Artificial Sequence: Synthetic oligonucleotide
guagccucuguugcucacu

SEQ ID NO: 891080 - RNA, 19 nt, Artificial Sequence
  Description of Artificial Sequence: Synthetic oligonucleotide
gcuucggcaguaacuagcu

SEQ ID NO: 891081 - RNA, 19 nt, Artificial Sequence
  Description of Artificial Sequence: Synthetic oligonucleotide
gcaacgucaaggcguaguu

SEQ ID NO: 891082 - RNA, 19 nt, Artificial Sequence
  Description of Artificial Sequence: Synthetic oligonucleotide
gcugccccacaacaguucu

SEQ ID NO: 891083 - RNA, 19 nt, Artificial Sequence
  Description of Artificial Sequence: Synthetic oligonucleotide
ccaaggcgcagccccuccc

SEQ ID NO: 891084 - RNA, 19 nt, Artificial Sequence
  Description of Artificial Sequence: Synthetic oligonucleotide
cagccgguuacuggaggga

SEQ ID NO: 891085 - RNA, 19 nt, Artificial Sequence
  Description of Artificial Sequence: Synthetic oligonucleotide
acgucaaggcguaguuauu

SEQ ID NO: 891086 - RNA, 19 nt, Artificial Sequence
  Description of Artificial Sequence: Synthetic oligonucleotide
caccagaggccggacucga

SEQ ID NO: 891087 - RNA, 19 nt, Artificial Sequence
  Description of Artificial Sequence: Synthetic oligonucleotide
cgggacgcauccuugggga

SEQ ID NO: 891088 - RNA, 19 nt, Artificial Sequence
  Description of Artificial Sequence: Synthetic oligonucleotide
gcgcuuccuuuaacacucg

SEQ ID NO: 891089 - RNA, 19 nt, Artificial Sequence
  Description of Artificial Sequence: Synthetic oligonucleotide
cuucggguuccaugggcuu

SEQ ID NO: 891090 - RNA, 19 nt, Artificial Sequence
  Description of Artificial Sequence: Synthetic oligonucleotide
gcagccccucccaaagauc

SEQ ID NO: 891091 - RNA, 19 nt, Artificial Sequence
  Description of Artificial Sequence: Synthetic oligonucleotide
ccugaucucugggugagcu

SEQ ID NO: 891092 - RNA, 19 nt, Artificial Sequence
  Description of Artificial Sequence: Synthetic oligonucleotide
ccuucccggagggacagca

SEQ ID NO: 891093 - RNA, 19 nt, Artificial Sequence
  Description of Artificial Sequence: Synthetic oligonucleotide
acgcauccuuggggaaacu

SEQ ID NO: 891094 - RNA, 19 nt, Artificial Sequence
  Description of Artificial Sequence: Synthetic oligonucleotide
gccaacuugucuagacacu

SEQ ID NO: 891095 - RNA, 19 nt, Artificial Sequence
  Description of Artificial Sequence: Synthetic oligonucleotide
cacucgcacaagagccgua

SEQ ID NO: 891096 - RNA, 19 nt, Artificial Sequence
  Description of Artificial Sequence: Synthetic oligonucleotide
gcucgcugaugagaggugu

SEQ ID NO: 891097 - RNA, 19 nt, Artificial Sequence
  Description of Artificial Sequence: Synthetic oligonucleotide
gccacacuuggugccacaa

SEQ ID NO: 891098 - RNA, 19 nt, Artificial Sequence
  Description of Artificial Sequence: Synthetic oligonucleotide
gccgguuacuggagggaga

SEQ ID NO: 891099 - RNA, 19 nt, Artificial Sequence
  Description of Artificial Sequence: Synthetic oligonucleotide
ucuggccacccggcugguu

SEQ ID NO: 891100 - RNA, 19 nt, Artificial Sequence
  Description of Artificial Sequence: Synthetic oligonucleotide
cagcagcguacgguauaca

SEQ ID NO: 891101 - RNA, 19 nt, Artificial Sequence
  Description of Artificial Sequence: Synthetic oligonucleotide
gucccggccccggaaggaa

SEQ ID NO: 891102 - RNA, 19 nt, Artificial Sequence
  Description of Artificial Sequence: Synthetic oligonucleotide
ccugucucacccugagacu

SEQ ID NO: 891103 - RNA, 19 nt, Artificial Sequence
  Description of Artificial Sequence: Synthetic oligonucleotide
cggugagucuagaggagaa

SEQ ID NO: 891104 - RNA, 19 nt, Artificial Sequence
  Description of Artificial Sequence: Synthetic oligonucleotide
ccagcgccugaggauccag

SEQ ID NO: 891105 - RNA, 19 nt, Artificial Sequence
  Description of Artificial Sequence: Synthetic oligonucleotide
ccguaacgaucugaggaaa

SEQ ID NO: 891106 - RNA, 19 nt, Artificial Sequence
  Description of Artificial Sequence: Synthetic oligonucleotide
cacagggcgccgggcagaa

SEQ ID NO: 891107 - RNA, 19 nt, Artificial Sequence
  Description of Artificial Sequence: Synthetic oligonucleotide
ggcacaguuuggacucugu

SEQ ID NO: 891108 - RNA, 19 nt, Artificial Sequence
  Description of Artificial Sequence: Synthetic oligonucleotide
gcgccuggucagcuuggga

SEQ ID NO: 891109 - RNA, 19 nt, Artificial Sequence
  Description of Artificial Sequence: Synthetic oligonucleotide
gggucacacgagcuuccau

SEQ ID NO: 891110 - RNA, 19 nt, Artificial Sequence
  Description of Artificial Sequence: Synthetic oligonucleotide
ccgguuacuggagggagau

SEQ ID NO: 891111 - RNA, 19 nt, Artificial Sequence
  Description of Artificial Sequence: Synthetic oligonucleotide
ccagucgggacgcauccuu

SEQ ID NO: 891112 - RNA, 19 nt, Artificial Sequence
  Description of Artificial Sequence: Synthetic oligonucleotide
cgucucucgaaacucuauu

SEQ ID NO: 891113 - RNA, 19 nt, Artificial Sequence
  Description of Artificial Sequence: Synthetic oligonucleotide
ccccugcacaucccugcga

SEQ ID NO: 891114 - RNA, 19 nt, Artificial Sequence
  Description of Artificial Sequence: Synthetic oligonucleotide
gucuccgggcacgccgccu

SEQ ID NO: 891115 - RNA, 19 nt, Artificial Sequence
  Description of Artificial Sequence: Synthetic oligonucleotide
ggcccugcccugagacguc

SEQ ID NO: 891116 - RNA, 19 nt, Artificial Sequence
  Description of Artificial Sequence: Synthetic oligonucleotide
cccagucccggccccggaa

SEQ ID NO: 891117 - RNA, 19 nt, Artificial Sequence
  Description of Artificial Sequence: Synthetic oligonucleotide
cgguuacuggagggagaug

SEQ ID NO: 891118 - RNA, 19 nt, Artificial Sequence
  Description of Artificial Sequence: Synthetic oligonucleotide
ggccacccggcugguuaca

SEQ ID NO: 891119 - RNA, 19 nt, Artificial Sequence
  Description of Artificial Sequence: Synthetic oligonucleotide
cgcauccuuggggaaacua

SEQ ID NO: 891120 - RNA, 19 nt, Artificial Sequence
  Description of Artificial Sequence: Synthetic oligonucleotide
ggcuccagucgggacgcau

SEQ ID NO: 891121 - RNA, 19 nt, Artificial Sequence
  Description of Artificial Sequence: Synthetic oligonucleotide
gccacccggcugguuacau

SEQ ID NO: 891122 - RNA, 19 nt, Artificial Sequence
  Description of Artificial Sequence: Synthetic oligonucleotide
ccacccggcugguuacauu

SEQ ID NO: 891123 - RNA, 19 nt, Artificial Sequence
  Description of Artificial Sequence: Synthetic oligonucleotide
cccucugaccugggccucu

SEQ ID NO: 891124 - RNA, 19 nt, Artificial Sequence
  Description of Artificial Sequence: Synthetic oligonucleotide
cgggcacgccgccuccccu

SEQ ID NO: 891125 - RNA, 19 nt, Artificial Sequence
  Description of Artificial Sequence: Synthetic oligonucleotide
gauaauagaauccagguac

SEQ ID NO: 891126 - RNA, 19 nt, Artificial Sequence
  Description of Artificial Sequence: Synthetic oligonucleotide
aaagucgcagaucuggucc

SEQ ID NO: 891127 - RNA, 19 nt, Artificial Sequence
  Description of Artificial Sequence: Synthetic oligonucleotide
aaagagacuugccagcacc

SEQ ID NO: 891128 - RNA, 19 nt, Artificial Sequence
  Description of Artificial Sequence: Synthetic oligonucleotide
uguaauuccagauagcaca

SEQ ID NO: 891129 - RNA, 19 nt, Artificial Sequence
  Description of Artificial Sequence: Synthetic oligonucleotide
acuaacagagucgagaugc

SEQ ID NO: 891130 - RNA, 19 nt, Artificial Sequence
  Description of Artificial Sequence: Synthetic oligonucleotide
aaugauaauagaauccagg

SEQ ID NO: 891131 - RNA, 19 nt, Artificial Sequence
  Description of Artificial Sequence: Synthetic oligonucleotide
gauaucacggcgaauaugg

SEQ ID NO: 891132 - RNA, 19 nt, Artificial Sequence
  Description of Artificial Sequence: Synthetic oligonucleotide
guaugcuucagcuauagcc

SEQ ID NO: 891133 - RNA, 19 nt, Artificial Sequence
  Description of Artificial Sequence: Synthetic oligonucleotide
uucagcuauagccucaggg

SEQ ID NO: 891134 - RNA, 19 nt, Artificial Sequence
  Description of Artificial Sequence: Synthetic oligonucleotide
acaccuaugggccagagcu

SEQ ID NO: 891135 - RNA, 19 nt, Artificial Sequence
  Description of Artificial Sequence: Synthetic oligonucleotide
auagaauccagguacaaaa

SEQ ID NO: 891136 - RNA, 19 nt, Artificial Sequence
  Description of Artificial Sequence: Synthetic oligonucleotide
acgacaaggcagcacaugc

SEQ ID NO: 891137 - RNA, 19 nt, Artificial Sequence
  Description of Artificial Sequence: Synthetic oligonucleotide
augauaauagaauccaggu

SEQ ID NO: 891138 - RNA, 19 nt, Artificial Sequence
  Description of Artificial Sequence: Synthetic oligonucleotide
ucaaaaucuaaggagcugc

SEQ ID NO: 891139 - RNA, 19 nt, Artificial Sequence
  Description of Artificial Sequence: Synthetic oligonucleotide
aucacggcgaauauggucc

SEQ ID NO: 891140 - RNA, 19 nt, Artificial Sequence
  Description of Artificial Sequence: Synthetic oligonucleotide
aaaccuuuccucuggccuc

SEQ ID NO: 891141 - RNA, 19 nt, Artificial Sequence
  Description of Artificial Sequence: Synthetic oligonucleotide
aaggcauggaaguucauau

SEQ ID NO: 891142 - RNA, 19 nt, Artificial Sequence
  Description of Artificial Sequence: Synthetic oligonucleotide
uacaguaaaugauaauaga

SEQ ID NO: 891143 - RNA, 19 nt, Artificial Sequence
  Description of Artificial Sequence: Synthetic oligonucleotide
ugcgaaaggccauagauau

SEQ ID NO: 891144 - RNA, 19 nt, Artificial Sequence
  Description of Artificial Sequence: Synthetic oligonucleotide
ucucucaccacagacaggc

SEQ ID NO: 891145 - RNA, 19 nt, Artificial Sequence
  Description of Artificial Sequence: Synthetic oligonucleotide
auaggugcauggcagcagc

SEQ ID NO: 891146 - RNA, 19 nt, Artificial Sequence
  Description of Artificial Sequence: Synthetic oligonucleotide
gagucgagaugccagaaag

SEQ ID NO: 891147 - RNA, 19 nt, Artificial Sequence
  Description of Artificial Sequence: Synthetic oligonucleotide
aaggccaacucgcugaacu

SEQ ID NO: 891148 - RNA, 19 nt, Artificial Sequence
  Description of Artificial Sequence: Synthetic oligonucleotide
uucauauguagauacuuuc

SEQ ID NO: 891149 - RNA, 19 nt, Artificial Sequence
  Description of Artificial Sequence: Synthetic oligonucleotide
uucacgagccuguacacag

SEQ ID NO: 891150 - RNA, 19 nt, Artificial Sequence
  Description of Artificial Sequence: Synthetic oligonucleotide
uuuuggucauacccgagug

SEQ ID NO: 891151 - RNA, 19 nt, Artificial Sequence
  Description of Artificial Sequence: Synthetic oligonucleotide
uuuggucauacccgagugg

SEQ ID NO: 891152 - RNA, 19 nt, Artificial Sequence
  Description of Artificial Sequence: Synthetic oligonucleotide
uccacaacugggaaaggcc

SEQ ID NO: 891153 - RNA, 19 nt, Artificial Sequence
  Description of Artificial Sequence: Synthetic oligonucleotide
guacaguaaaugauaauag

SEQ ID NO: 891154 - RNA, 19 nt, Artificial Sequence
  Description of Artificial Sequence: Synthetic oligonucleotide
ugagcaaggucuucaacug

SEQ ID NO: 891155 - RNA, 19 nt, Artificial Sequence
  Description of Artificial Sequence: Synthetic oligonucleotide
caaacacgcagguagcagg

SEQ ID NO: 891156 - RNA, 19 nt, Artificial Sequence
  Description of Artificial Sequence: Synthetic oligonucleotide
uucgaguacaguaaaugau

SEQ ID NO: 891157 - RNA, 19 nt, Artificial Sequence
  Description of Artificial Sequence: Synthetic oligonucleotide
ugcgcauacagcagugccg

SEQ ID NO: 891158 - RNA, 19 nt, Artificial Sequence
  Description of Artificial Sequence: Synthetic oligonucleotide
acuugguccaagcaugcag

SEQ ID NO: 891159 - RNA, 19 nt, Artificial Sequence
  Description of Artificial Sequence: Synthetic oligonucleotide
aaaagcggucaccuugcag

SEQ ID NO: 891160 - RNA, 19 nt, Artificial Sequence
  Description of Artificial Sequence: Synthetic oligonucleotide
caacacccgaccaaggccg

SEQ ID NO: 891161 - RNA, 19 nt, Artificial Sequence
  Description of Artificial Sequence: Synthetic oligonucleotide
acaagcacccuugugcccc

SEQ ID NO: 891162 - RNA, 19 nt, Artificial Sequence
  Description of Artificial Sequence: Synthetic oligonucleotide
uagauauuugguguagaug

SEQ ID NO: 891163 - RNA, 19 nt, Artificial Sequence
  Description of Artificial Sequence: Synthetic oligonucleotide
auccaugagugacagggag

SEQ ID NO: 891164 - RNA, 19 nt, Artificial Sequence
  Description of Artificial Sequence: Synthetic oligonucleotide
uguccuuucuucgaguaca

SEQ ID NO: 891165 - RNA, 19 nt, Artificial Sequence
  Description of Artificial Sequence: Synthetic oligonucleotide
aaggccauagauauuuggu

SEQ ID NO: 891166 - RNA, 19 nt, Artificial Sequence
  Description of Artificial Sequence: Synthetic oligonucleotide
gacaaggcagcacaugcac

SEQ ID NO: 891167 - RNA, 19 nt, Artificial Sequence
  Description of Artificial Sequence: Synthetic oligonucleotide
aaacacgcagguagcaggg

SEQ ID NO: 891168 - RNA, 19 nt, Artificial Sequence
  Description of Artificial Sequence: Synthetic oligonucleotide
agaagcgccgguccugccc

SEQ ID NO: 891169 - RNA, 19 nt, Artificial Sequence
  Description of Artificial Sequence: Synthetic oligonucleotide
auaugguccucccaguccu

SEQ ID NO: 891170 - RNA, 19 nt, Artificial Sequence
  Description of Artificial Sequence: Synthetic oligonucleotide
agugcagccacccguucgg

SEQ ID NO: 891171 - RNA, 19 nt, Artificial Sequence
  Description of Artificial Sequence: Synthetic oligonucleotide
uagcacagcccgaacaucu

SEQ ID NO: 891172 - RNA, 19 nt, Artificial Sequence
  Description of Artificial Sequence: Synthetic oligonucleotide
ugccuuaccuuuucaagac

SEQ ID NO: 891173 - RNA, 19 nt, Artificial Sequence
  Description of Artificial Sequence: Synthetic oligonucleotide
aggcgaaggcaauuggagg

SEQ ID NO: 891174 - RNA, 19 nt, Artificial Sequence
  Description of Artificial Sequence: Synthetic oligonucleotide
uaccguagacugcacuggg

SEQ ID NO: 891175 - RNA, 19 nt, Artificial Sequence
  Description of Artificial Sequence: Synthetic oligonucleotide
uuucuucgaguacaguaaa

SEQ ID NO: 891176 - RNA, 19 nt, Artificial Sequence
  Description of Artificial Sequence: Synthetic oligonucleotide
uuugugggcgugucuacgc

SEQ ID NO: 891177 - RNA, 19 nt, Artificial Sequence
  Description of Artificial Sequence: Synthetic oligonucleotide
agcacuaacagagucgaga

SEQ ID NO: 891178 - RNA, 19 nt, Artificial Sequence
  Description of Artificial Sequence: Synthetic oligonucleotide
uuggucauacccgagugga

SEQ ID NO: 891179 - RNA, 19 nt, Artificial Sequence
  Description of Artificial Sequence: Synthetic oligonucleotide
gacaggguccacaacuggg

SEQ ID NO: 891180 - RNA, 19 nt, Artificial Sequence
  Description of Artificial Sequence: Synthetic oligonucleotide
ugggcauaggugcauggca

SEQ ID NO: 891181 - RNA, 19 nt, Artificial Sequence
  Description of Artificial Sequence: Synthetic oligonucleotide
cagcuauagccucagggcc

SEQ ID NO: 891182 - RNA, 19 nt, Artificial Sequence
  Description of Artificial Sequence: Synthetic oligonucleotide
cuucgaguacaguaaauga

SEQ ID NO: 891183 - RNA, 19 nt, Artificial Sequence
  Description of Artificial Sequence: Synthetic oligonucleotide
uaucacggcgaauaugguc

SEQ ID NO: 891184 - RNA, 19 nt, Artificial Sequence
  Description of Artificial Sequence: Synthetic oligonucleotide
agcccgaacaucuggccgg

SEQ ID NO: 891185 - RNA, 19 nt, Artificial Sequence
  Description of Artificial Sequence: Synthetic oligonucleotide
uacgcaguucccaaagguc

SEQ ID NO: 891186 - RNA, 19 nt, Artificial Sequence
  Description of Artificial Sequence: Synthetic oligonucleotide
aguguagaugacagugggc

SEQ ID NO: 891187 - RNA, 19 nt, Artificial Sequence
  Description of Artificial Sequence: Synthetic oligonucleotide
uucaacugguugcugcgcu

SEQ ID NO: 891188 - RNA, 19 nt, Artificial Sequence
  Description of Artificial Sequence: Synthetic oligonucleotide
gagcuggcggauaucacgg

SEQ ID NO: 891189 - RNA, 19 nt, Artificial Sequence
  Description of Artificial Sequence: Synthetic oligonucleotide
acuugugucuuuagguggg

SEQ ID NO: 891190 - RNA, 19 nt, Artificial Sequence
  Description of Artificial Sequence: Synthetic oligonucleotide
guucgguguccuuucuucg

SEQ ID NO: 891191 - RNA, 19 nt, Artificial Sequence
  Description of Artificial Sequence: Synthetic oligonucleotide
acggcgaauaugguccucc

SEQ ID NO: 891192 - RNA, 19 nt, Artificial Sequence
  Description of Artificial Sequence: Synthetic oligonucleotide
uagagagcccgccguacag

SEQ ID NO: 891193 - RNA, 19 nt, Artificial Sequence
  Description of Artificial Sequence: Synthetic oligonucleotide
gaggcaauugaguggccug

SEQ ID NO: 891194 - RNA, 19 nt, Artificial Sequence
  Description of Artificial Sequence: Synthetic oligonucleotide
agugggcauaggugcaugg

SEQ ID NO: 891195 - RNA, 19 nt, Artificial Sequence
  Description of Artificial Sequence: Synthetic oligonucleotide
uucuagacaggguccacaa

SEQ ID NO: 891196 - RNA, 19 nt, Artificial Sequence
  Description of Artificial Sequence: Synthetic oligonucleotide
gucuacgcaguucccaaag

SEQ ID NO: 891197 - RNA, 19 nt, Artificial Sequence
  Description of Artificial Sequence: Synthetic oligonucleotide
cuaacagagucgagaugcc

SEQ ID NO: 891198 - RNA, 19 nt, Artificial Sequence
  Description of Artificial Sequence: Synthetic oligonucleotide
gaaagucgcagaucugguc

SEQ ID NO: 891199 - RNA, 19 nt, Artificial Sequence
  Description of Artificial Sequence: Synthetic oligonucleotide
ccguacagaggacagaucc

SEQ ID NO: 891200 - RNA, 19 nt, Artificial Sequence
  Description of Artificial Sequence: Synthetic oligonucleotide
uauaccugggcuggguagc

SEQ ID NO: 891201 - RNA, 19 nt, Artificial Sequence
  Description of Artificial Sequence: Synthetic oligonucleotide
cuaaggagcugcugccccg

SEQ ID NO: 891202 - RNA, 19 nt, Artificial Sequence
  Description of Artificial Sequence: Synthetic oligonucleotide
caggaacaggugacaaugg

SEQ ID NO: 891203 - RNA, 19 nt, Artificial Sequence
  Description of Artificial Sequence: Synthetic oligonucleotide
caggucaccaggacugugc

SEQ ID NO: 891204 - RNA, 19 nt, Artificial Sequence
  Description of Artificial Sequence: Synthetic oligonucleotide
uccagguacaaaagcgguc

SEQ ID NO: 891205 - RNA, 19 nt, Artificial Sequence
  Description of Artificial Sequence: Synthetic oligonucleotide
gaccucgucaaugcaggcg

SEQ ID NO: 891206 - RNA, 19 nt, Artificial Sequence
  Description of Artificial Sequence: Synthetic oligonucleotide
gagagcccgccguacagag

SEQ ID NO: 891207 - RNA, 19 nt, Artificial Sequence
  Description of Artificial Sequence: Synthetic oligonucleotide
aauacaggguguauuuguu

SEQ ID NO: 891208 - RNA, 19 nt, Artificial Sequence
  Description of Artificial Sequence: Synthetic oligonucleotide
uugguccaagcaugcagcc

SEQ ID NO: 891209 - RNA, 19 nt, Artificial Sequence
  Description of Artificial Sequence: Synthetic oligonucleotide
uggguacuugguccaagca

SEQ ID NO: 891210 - RNA, 19 nt, Artificial Sequence
  Description of Artificial Sequence: Synthetic oligonucleotide
agcgccgaggguguaauuc

SEQ ID NO: 891211 - RNA, 19 nt, Artificial Sequence
  Description of Artificial Sequence: Synthetic oligonucleotide
aaggccggacgacaaggca

SEQ ID NO: 891212 - RNA, 19 nt, Artificial Sequence
  Description of Artificial Sequence: Synthetic oligonucleotide
gucauacccgaguggaggc

SEQ ID NO: 891213 - RNA, 19 nt, Artificial Sequence
  Description of Artificial Sequence: Synthetic oligonucleotide
cugccuuaccuuuucaaga

SEQ ID NO: 891214 - RNA, 19 nt, Artificial Sequence
  Description of Artificial Sequence: Synthetic oligonucleotide
cuagacaggguccacaacu

SEQ ID NO: 891215 - RNA, 19 nt, Artificial Sequence
  Description of Artificial Sequence: Synthetic oligonucleotide
ggucauacccgaguggagg

SEQ ID NO: 891216 - RNA, 19 nt, Artificial Sequence
  Description of Artificial Sequence: Synthetic oligonucleotide
cugcgcauacagcagugcc

SEQ ID NO: 891217 - RNA, 19 nt, Artificial Sequence
  Description of Artificial Sequence: Synthetic oligonucleotide
gcugccuuaccuuuucaag

SEQ ID NO: 891218 - RNA, 19 nt, Artificial Sequence
  Description of Artificial Sequence: Synthetic oligonucleotide
acagcccguccagaaaacc

SEQ ID NO: 891219 - RNA, 19 nt, Artificial Sequence
  Description of Artificial Sequence: Synthetic oligonucleotide
uucuucgaguacaguaaau

SEQ ID NO: 891220 - RNA, 19 nt, Artificial Sequence
  Description of Artificial Sequence: Synthetic oligonucleotide
uggucauacccgaguggag

SEQ ID NO: 891221 - RNA, 19 nt, Artificial Sequence
  Description of Artificial Sequence: Synthetic oligonucleotide
ucuagacaggguccacaac

SEQ ID NO: 891222 - RNA, 19 nt, Artificial Sequence
  Description of Artificial Sequence: Synthetic oligonucleotide
ggcgugucuacgcaguucc

SEQ ID NO: 891223 - RNA, 19 nt, Artificial Sequence
  Description of Artificial Sequence: Synthetic oligonucleotide
aggcaauugaguggccugg

SEQ ID NO: 891224 - RNA, 19 nt, Artificial Sequence
  Description of Artificial Sequence: Synthetic oligonucleotide
ucauacccgaguggaggcg

SEQ ID NO: 891225 - RNA, 19 nt, Artificial Sequence
  Description of Artificial Sequence: Synthetic oligonucleotide
agccuguacacagcuguac

SEQ ID NO: 891226 - RNA, 19 nt, Artificial Sequence
  Description of Artificial Sequence: Synthetic oligonucleotide
ggcaauuggaggcaauuga

SEQ ID NO: 891227 - RNA, 19 nt, Artificial Sequence
  Description of Artificial Sequence: Synthetic oligonucleotide
cacucgucgccguuccugg

SEQ ID NO: 891228 - RNA, 19 nt, Artificial Sequence
  Description of Artificial Sequence: Synthetic oligonucleotide
gaggguguaauuccagaua

SEQ ID NO: 891229 - RNA, 19 nt, Artificial Sequence
  Description of Artificial Sequence: Synthetic oligonucleotide
guggguacuugguccaagc

SEQ ID NO: 891230 - RNA, 19 nt, Artificial Sequence
  Description of Artificial Sequence: Synthetic oligonucleotide
aucacguccugcacggccg

SEQ ID NO: 891231 - RNA, 19 nt, Artificial Sequence
  Description of Artificial Sequence: Synthetic oligonucleotide
uguguagcacagcccgaac

SEQ ID NO: 891232 - RNA, 19 nt, Artificial Sequence
  Description of Artificial Sequence: Synthetic oligonucleotide
cagaucccagcccauugag

SEQ ID NO: 891233 - RNA, 19 nt, Artificial Sequence
  Description of Artificial Sequence: Synthetic oligonucleotide
cauacccgaguggaggcgg

SEQ ID NO: 891234 - RNA, 19 nt, Artificial Sequence
  Description of Artificial Sequence: Synthetic oligonucleotide
uugcacucgucgccguucc

SEQ ID NO: 891235 - RNA, 19 nt, Artificial Sequence
  Description of Artificial Sequence: Synthetic oligonucleotide
gucgagaugccagaaagaa

SEQ ID NO: 891236 - RNA, 19 nt, Artificial Sequence
  Description of Artificial Sequence: Synthetic oligonucleotide
uccugcacggccgauggcu

SEQ ID NO: 891237 - RNA, 19 nt, Artificial Sequence
  Description of Artificial Sequence: Synthetic oligonucleotide
uugugggcgugucuacgca

SEQ ID NO: 891238 - RNA, 19 nt, Artificial Sequence
  Description of Artificial Sequence: Synthetic oligonucleotide
guguaauuccagauagcac

SEQ ID NO: 891239 - RNA, 19 nt, Artificial Sequence
  Description of Artificial Sequence: Synthetic oligonucleotide
gacaccuaugggccagagc

SEQ ID NO: 891240 - RNA, 19 nt, Artificial Sequence
  Description of Artificial Sequence: Synthetic oligonucleotide
uugguguagaugggccagg

SEQ ID NO: 891241 - RNA, 19 nt, Artificial Sequence
  Description of Artificial Sequence: Synthetic oligonucleotide
cuuucuccagaagcgccgg

SEQ ID NO: 891242 - RNA, 19 nt, Artificial Sequence
  Description of Artificial Sequence: Synthetic oligonucleotide
acugggaaugcccgcuugu

SEQ ID NO: 891243 - RNA, 19 nt, Artificial Sequence
  Description of Artificial Sequence: Synthetic oligonucleotide
caaggccggacgacaaggc

SEQ ID NO: 891244 - RNA, 19 nt, Artificial Sequence
  Description of Artificial Sequence: Synthetic oligonucleotide
ccuguucuagacagggucc

SEQ ID NO: 891245 - RNA, 19 nt, Artificial Sequence
  Description of Artificial Sequence: Synthetic oligonucleotide
guguagcacagcccgaaca

SEQ ID NO: 891246 - RNA, 19 nt, Artificial Sequence
  Description of Artificial Sequence: Synthetic oligonucleotide
agcagaguuucaauagccu

SEQ ID NO: 891247 - RNA, 19 nt, Artificial Sequence
  Description of Artificial Sequence: Synthetic oligonucleotide
agagucgagaugccagaaa

SEQ ID NO: 891248 - RNA, 19 nt, Artificial Sequence
  Description of Artificial Sequence: Synthetic oligonucleotide
gacgacaaggcagcacaug

SEQ ID NO: 891249 - RNA, 19 nt, Artificial Sequence
  Description of Artificial Sequence: Synthetic oligonucleotide
ggcauggaaguucauaugu

SEQ ID NO: 891250 - RNA, 19 nt, Artificial Sequence
  Description of Artificial Sequence: Synthetic oligonucleotide
acggccgauggcuugcaca

SEQ ID NO: 891251 - RNA, 19 nt, Artificial Sequence
  Description of Artificial Sequence: Synthetic oligonucleotide
acccguucgguguccuuuc

SEQ ID NO: 891252 - RNA, 19 nt, Artificial Sequence
  Description of Artificial Sequence: Synthetic oligonucleotide
cauaggugcauggcagcag

SEQ ID NO: 891253 - RNA, 19 nt, Artificial Sequence
  Description of Artificial Sequence: Synthetic oligonucleotide
agggacuugcaaugccaug

SEQ ID NO: 891254 - RNA, 19 nt, Artificial Sequence
  Description of Artificial Sequence: Synthetic oligonucleotide
ucgaaguuuggaggcaguc

SEQ ID NO: 891255 - RNA, 19 nt, Artificial Sequence
  Description of Artificial Sequence: Synthetic oligonucleotide
ggcuucgcugcgcauacag

SEQ ID NO: 891256 - RNA, 19 nt, Artificial Sequence
  Description of Artificial Sequence: Synthetic oligonucleotide
gaagcgccgguccugccca

SEQ ID NO: 891257 - RNA, 19 nt, Artificial Sequence
  Description of Artificial Sequence: Synthetic oligonucleotide
caaaguaguggcugagcaa

SEQ ID NO: 891258 - RNA, 19 nt, Artificial Sequence
  Description of Artificial Sequence: Synthetic oligonucleotide
aaccuuuccucuggccuca

SEQ ID NO: 891259 - RNA, 19 nt, Artificial Sequence
  Description of Artificial Sequence: Synthetic oligonucleotide
ucgucgccguuccuggcug

SEQ ID NO: 891260 - RNA, 19 nt, Artificial Sequence
  Description of Artificial Sequence: Synthetic oligonucleotide
aggccggacgacaaggcag

SEQ ID NO: 891261 - RNA, 19 nt, Artificial Sequence
  Description of Artificial Sequence: Synthetic oligonucleotide
ccaacacccgaccaaggcc

SEQ ID NO: 891262 - RNA, 19 nt, Artificial Sequence
  Description of Artificial Sequence: Synthetic oligonucleotide
ugucuacgcaguucccaaa

SEQ ID NO: 891263 - RNA, 19 nt, Artificial Sequence
  Description of Artificial Sequence: Synthetic oligonucleotide
ugccagcaugguaugcuuc

SEQ ID NO: 891264 - RNA, 19 nt, Artificial Sequence
  Description of Artificial Sequence: Synthetic oligonucleotide
ucgcagaucugguccuucu

SEQ ID NO: 891265 - RNA, 19 nt, Artificial Sequence
  Description of Artificial Sequence: Synthetic oligonucleotide
aaugcccgcuuguggccca

SEQ ID NO: 891266 - RNA, 19 nt, Artificial Sequence
  Description of Artificial Sequence: Synthetic oligonucleotide
ggucauccaugagugacag

SEQ ID NO: 891267 - RNA, 19 nt, Artificial Sequence
  Description of Artificial Sequence: Synthetic oligonucleotide
cuucgcccaacacccgacc

SEQ ID NO: 891268 - RNA, 19 nt, Artificial Sequence
  Description of Artificial Sequence: Synthetic oligonucleotide
gaacaucuggccgguccag

SEQ ID NO: 891269 - RNA, 19 nt, Artificial Sequence
  Description of Artificial Sequence: Synthetic oligonucleotide
ucgcccaacacccgaccaa

SEQ ID NO: 891270 - RNA, 19 nt, Artificial Sequence
  Description of Artificial Sequence: Synthetic oligonucleotide
gguacaaaagcggucaccu

SEQ ID NO: 891271 - RNA, 19 nt, Artificial Sequence
  Description of Artificial Sequence: Synthetic oligonucleotide
guagcagggccggaaguug

SEQ ID NO: 891272 - RNA, 19 nt, Artificial Sequence
  Description of Artificial Sequence: Synthetic oligonucleotide
cuacuguggccacuaccac

SEQ ID NO: 891273 - RNA, 19 nt, Artificial Sequence
  Description of Artificial Sequence: Synthetic oligonucleotide
gcgcauacagcagugccgg

SEQ ID NO: 891274 - RNA, 19 nt, Artificial Sequence
  Description of Artificial Sequence: Synthetic oligonucleotide
agggcccuucgcccaacac

SEQ ID NO: 891275 - RNA, 19 nt, Artificial Sequence
  Description of Artificial Sequence: Synthetic oligonucleotide
ccagaaaaccuuuccucug

SEQ ID NO: 891276 - RNA, 19 nt, Artificial Sequence
  Description of Artificial Sequence: Synthetic oligonucleotide
caccuugcagcagugucac

SEQ ID NO: 891277 - RNA, 19 nt, Artificial Sequence
  Description of Artificial Sequence: Synthetic oligonucleotide
ggagagaccaccaguguga

SEQ ID NO: 891278 - RNA, 19 nt, Artificial Sequence
  Description of Artificial Sequence: Synthetic oligonucleotide
ucagacaugcaggcagguc

SEQ ID NO: 891279 - RNA, 19 nt, Artificial Sequence
  Description of Artificial Sequence: Synthetic oligonucleotide
uggcggauaucacggcgaa

SEQ ID NO: 891280 - RNA, 19 nt, Artificial Sequence
  Description of Artificial Sequence: Synthetic oligonucleotide
acccgaccaaggccggacg

SEQ ID NO: 891281 - RNA, 19 nt, Artificial Sequence
  Description of Artificial Sequence: Synthetic oligonucleotide
guguccuuucuucgaguac

SEQ ID NO: 891282 - RNA, 19 nt, Artificial Sequence
  Description of Artificial Sequence: Synthetic oligonucleotide
guagagagcccgccguaca

SEQ ID NO: 891283 - RNA, 19 nt, Artificial Sequence
  Description of Artificial Sequence: Synthetic oligonucleotide
gaagcucggucugcccagg

SEQ ID NO: 891284 - RNA, 19 nt, Artificial Sequence
  Description of Artificial Sequence: Synthetic oligonucleotide
ggauaucacggcgaauaug

SEQ ID NO: 891285 - RNA, 19 nt, Artificial Sequence
  Description of Artificial Sequence: Synthetic oligonucleotide
cugcgaaaggccauagaua

SEQ ID NO: 891286 - RNA, 19 nt, Artificial Sequence
  Description of Artificial Sequence: Synthetic oligonucleotide
agucgagaugccagaaaga

SEQ ID NO: 891287 - RNA, 19 nt, Artificial Sequence
  Description of Artificial Sequence: Synthetic oligonucleotide
gggcauaggugcauggcag

SEQ ID NO: 891288 - RNA, 19 nt, Artificial Sequence
  Description of Artificial Sequence: Synthetic oligonucleotide
guucuagacaggguccaca

SEQ ID NO: 891289 - RNA, 19 nt, Artificial Sequence
  Description of Artificial Sequence: Synthetic oligonucleotide
ugucuuuagguggguacuu

SEQ ID NO: 891290 - RNA, 19 nt, Artificial Sequence
  Description of Artificial Sequence: Synthetic oligonucleotide
ccgcuuguggcccaggcag

SEQ ID NO: 891291 - RNA, 19 nt, Artificial Sequence
  Description of Artificial Sequence: Synthetic oligonucleotide
ugguccaagcaugcagcca

SEQ ID NO: 891292 - RNA, 19 nt, Artificial Sequence
  Description of Artificial Sequence: Synthetic oligonucleotide
uacuugguccaagcaugca

SEQ ID NO: 891293 - RNA, 19 nt, Artificial Sequence
  Description of Artificial Sequence: Synthetic oligonucleotide
aguuuggaggcagucccau

SEQ ID NO: 891294 - RNA, 19 nt, Artificial Sequence
  Description of Artificial Sequence: Synthetic oligonucleotide
cccgacuugugucuuuagg

SEQ ID NO: 891295 - RNA, 19 nt, Artificial Sequence
  Description of Artificial Sequence: Synthetic oligonucleotide
gcaaacacgcagguagcag

SEQ ID NO: 891296 - RNA, 19 nt, Artificial Sequence
  Description of Artificial Sequence: Synthetic oligonucleotide
gugggcauaggugcauggc

SEQ ID NO: 891297 - RNA, 19 nt, Artificial Sequence
  Description of Artificial Sequence: Synthetic oligonucleotide
cccgaaguacuuugcaaac

SEQ ID NO: 891298 - RNA, 19 nt, Artificial Sequence
  Description of Artificial Sequence: Synthetic oligonucleotide
aguggaggcgggcugccuu

SEQ ID NO: 891299 - RNA, 19 nt, Artificial Sequence
  Description of Artificial Sequence: Synthetic oligonucleotide
gguaugcuucagcuauagc

SEQ ID NO: 891300 - RNA, 19 nt, Artificial Sequence
  Description of Artificial Sequence: Synthetic oligonucleotide
gcugcgaaaggccauagau

SEQ ID NO: 891301 - RNA, 19 nt, Artificial Sequence
  Description of Artificial Sequence: Synthetic oligonucleotide
gcagcacuaacagagucga

SEQ ID NO: 891302 - RNA, 19 nt, Artificial Sequence
  Description of Artificial Sequence: Synthetic oligonucleotide
uggaggcaauugaguggcc

SEQ ID NO: 891303 - RNA, 19 nt, Artificial Sequence
  Description of Artificial Sequence: Synthetic oligonucleotide
ugugaggcaggggcuucgc

SEQ ID NO: 891304 - RNA, 19 nt, Artificial Sequence
  Description of Artificial Sequence: Synthetic oligonucleotide
ugccccguggugcaccuuu

SEQ ID NO: 891305 - RNA, 19 nt, Artificial Sequence
  Description of Artificial Sequence: Synthetic oligonucleotide
cuacgcaguucccaaaggu

SEQ ID NO: 891306 - RNA, 19 nt, Artificial Sequence
  Description of Artificial Sequence: Synthetic oligonucleotide
ggcgcaucaaggcauggaa

SEQ ID NO: 891307 - RNA, 19 nt, Artificial Sequence
  Description of Artificial Sequence: Synthetic oligonucleotide
ccguccagaaaaccuuucc

SEQ ID NO: 891308 - RNA, 19 nt, Artificial Sequence
  Description of Artificial Sequence: Synthetic oligonucleotide
gccgguccugcccauauac

SEQ ID NO: 891309 - RNA, 19 nt, Artificial Sequence
  Description of Artificial Sequence: Synthetic oligonucleotide
ccaaggccggacgacaagg

SEQ ID NO: 891310 - RNA, 19 nt, Artificial Sequence
  Description of Artificial Sequence: Synthetic oligonucleotide
cauguguagcacagcccga

SEQ ID NO: 891311 - RNA, 19 nt, Artificial Sequence
  Description of Artificial Sequence: Synthetic oligonucleotide
acgcccauauguucccgaa

SEQ ID NO: 891312 - RNA, 19 nt, Artificial Sequence
  Description of Artificial Sequence: Synthetic oligonucleotide
guugcacucgucgccguuc

SEQ ID NO: 891313 - RNA, 19 nt, Artificial Sequence
  Description of Artificial Sequence: Synthetic oligonucleotide
ggccaacucgcugaacucc

SEQ ID NO: 891314 - RNA, 19 nt, Artificial Sequence
  Description of Artificial Sequence: Synthetic oligonucleotide
ggaaguucauauguagaua

SEQ ID NO: 891315 - RNA, 19 nt, Artificial Sequence
  Description of Artificial Sequence: Synthetic oligonucleotide
gcggauaucacggcgaaua

SEQ ID NO: 891316 - RNA, 19 nt, Artificial Sequence
  Description of Artificial Sequence: Synthetic oligonucleotide
auaucacggcgaauauggu

SEQ ID NO: 891317 - RNA, 19 nt, Artificial Sequence
  Description of Artificial Sequence: Synthetic oligonucleotide
agagagcccgccguacaga

SEQ ID NO: 891318 - RNA, 19 nt, Artificial Sequence
  Description of Artificial Sequence: Synthetic oligonucleotide
gacaggagcuggcggauau

SEQ ID NO: 891319 - RNA, 19 nt, Artificial Sequence
  Description of Artificial Sequence: Synthetic oligonucleotide
gcgccgaggguguaauucc

SEQ ID NO: 891320 - RNA, 19 nt, Artificial Sequence
  Description of Artificial Sequence: Synthetic oligonucleotide
cagcacuaacagagucgag

SEQ ID NO: 891321 - RNA, 19 nt, Artificial Sequence
  Description of Artificial Sequence: Synthetic oligonucleotide
gccuguacacagcuguaca

SEQ ID NO: 891322 - RNA, 19 nt, Artificial Sequence
  Description of Artificial Sequence: Synthetic oligonucleotide
cagguccggagcagugcag

SEQ ID NO: 891323 - RNA, 19 nt, Artificial Sequence
  Description of Artificial Sequence: Synthetic oligonucleotide
gguguccuuucuucgagua

SEQ ID NO: 891324 - RNA, 19 nt, Artificial Sequence
  Description of Artificial Sequence: Synthetic oligonucleotide
cgaaguuuggaggcagucc

SEQ ID NO: 891325 - RNA, 19 nt, Artificial Sequence
  Description of Artificial Sequence: Synthetic oligonucleotide
cagcccauugagucugcca

SEQ ID NO: 891326 - RNA, 19 nt, Artificial Sequence
  Description of Artificial Sequence: Synthetic oligonucleotide
gguccggagcagugcagcc

SEQ ID NO: 891327 - RNA, 19 nt, Artificial Sequence
  Description of Artificial Sequence: Synthetic oligonucleotide
auaccugggcuggguagca

SEQ ID NO: 891328 - RNA, 19 nt, Artificial Sequence
  Description of Artificial Sequence: Synthetic oligonucleotide
agcacccuugugccccgug

SEQ ID NO: 891329 - RNA, 19 nt, Artificial Sequence
  Description of Artificial Sequence: Synthetic oligonucleotide
gcacuaacagagucgagau

SEQ ID NO: 891330 - RNA, 19 nt, Artificial Sequence
  Description of Artificial Sequence: Synthetic oligonucleotide
cuaccacccgcagguggcc

SEQ ID NO: 891331 - RNA, 19 nt, Artificial Sequence
  Description of Artificial Sequence: Synthetic oligonucleotide
gguagagagcccgccguac

SEQ ID NO: 891332 - RNA, 19 nt, Artificial Sequence
  Description of Artificial Sequence: Synthetic oligonucleotide
cugcacggccgauggcuug

SEQ ID NO: 891333 - RNA, 19 nt, Artificial Sequence
  Description of Artificial Sequence: Synthetic oligonucleotide
cuaugggccagagcuugca

SEQ ID NO: 891334 - RNA, 19 nt, Artificial Sequence
  Description of Artificial Sequence: Synthetic oligonucleotide
aggcgcaucaaggcaugga

SEQ ID NO: 891335 - RNA, 19 nt, Artificial Sequence
  Description of Artificial Sequence: Synthetic oligonucleotide
ugggcgugucuacgcaguu

SEQ ID NO: 891336 - RNA, 19 nt, Artificial Sequence
  Description of Artificial Sequence: Synthetic oligonucleotide
agcccguccagaaaaccuu

SEQ ID NO: 891337 - RNA, 19 nt, Artificial Sequence
  Description of Artificial Sequence: Synthetic oligonucleotide
gguggguacuugguccaag

SEQ ID NO: 891338 - RNA, 19 nt, Artificial Sequence
  Description of Artificial Sequence: Synthetic oligonucleotide
gcauacagcagugccggca

SEQ ID NO: 891339 - RNA, 19 nt, Artificial Sequence
  Description of Artificial Sequence: Synthetic oligonucleotide
ugcacucgucgccguuccu

SEQ ID NO: 891340 - RNA, 19 nt, Artificial Sequence
  Description of Artificial Sequence: Synthetic oligonucleotide
accguagacugcacuggga

SEQ ID NO: 891341 - RNA, 19 nt, Artificial Sequence
  Description of Artificial Sequence: Synthetic oligonucleotide
ggcgaauaugguccuccca

SEQ ID NO: 891342 - RNA, 19 nt, Artificial Sequence
  Description of Artificial Sequence: Synthetic oligonucleotide
gccggaaguugugugacca

SEQ ID NO: 891343 - RNA, 19 nt, Artificial Sequence
  Description of Artificial Sequence: Synthetic oligonucleotide
cguccugcacggccgaugg

SEQ ID NO: 891344 - RNA, 19 nt, Artificial Sequence
  Description of Artificial Sequence: Synthetic oligonucleotide
cacccgaccaaggccggac

SEQ ID NO: 891345 - RNA, 19 nt, Artificial Sequence
  Description of Artificial Sequence: Synthetic oligonucleotide
acgcugcgaaaggccauag

SEQ ID NO: 891346 - RNA, 19 nt, Artificial Sequence
  Description of Artificial Sequence: Synthetic oligonucleotide
cagugggcauaggugcaug

SEQ ID NO: 891347 - RNA, 19 nt, Artificial Sequence
  Description of Artificial Sequence: Synthetic oligonucleotide
cacgagccuguacacagcu

SEQ ID NO: 891348 - RNA, 19 nt, Artificial Sequence
  Description of Artificial Sequence: Synthetic oligonucleotide
ggccggacgacaaggcagc

SEQ ID NO: 891349 - RNA, 19 nt, Artificial Sequence
  Description of Artificial Sequence: Synthetic oligonucleotide
agcggucaccuugcagcag

SEQ ID NO: 891350 - RNA, 19 nt, Artificial Sequence
  Description of Artificial Sequence: Synthetic oligonucleotide
cccgccguacagaggacag

SEQ ID NO: 891351 - RNA, 19 nt, Artificial Sequence
  Description of Artificial Sequence: Synthetic oligonucleotide
caggcgcaucaaggcaugg

SEQ ID NO: 891352 - RNA, 19 nt, Artificial Sequence
  Description of Artificial Sequence: Synthetic oligonucleotide
cuuugcaaacacgcaggua

SEQ ID NO: 891353 - RNA, 19 nt, Artificial Sequence
  Description of Artificial Sequence: Synthetic oligonucleotide
gaccaaggccggacgacaa

SEQ ID NO: 891354 - RNA, 19 nt, Artificial Sequence
  Description of Artificial Sequence: Synthetic oligonucleotide
gccuuaccuuuucaagaca

SEQ ID NO: 891355 - RNA, 19 nt, Artificial Sequence
  Description of Artificial Sequence: Synthetic oligonucleotide
ccuaugggccagagcuugc

SEQ ID NO: 891356 - RNA, 19 nt, Artificial Sequence
  Description of Artificial Sequence: Synthetic oligonucleotide
cggacgacaaggcagcaca

SEQ ID NO: 891357 - RNA, 19 nt, Artificial Sequence
  Description of Artificial Sequence: Synthetic oligonucleotide
caccagugugaggcagggg

SEQ ID NO: 891358 - RNA, 19 nt, Artificial Sequence
  Description of Artificial Sequence: Synthetic oligonucleotide
ggccacgcugcgaaaggcc

SEQ ID NO: 891359 - RNA, 19 nt, Artificial Sequence
  Description of Artificial Sequence: Synthetic oligonucleotide
ccgguccugcccauauacc

SEQ ID NO: 891360 - RNA, 19 nt, Artificial Sequence
  Description of Artificial Sequence: Synthetic oligonucleotide
acgagccuguacacagcug

SEQ ID NO: 891361 - RNA, 19 nt, Artificial Sequence
  Description of Artificial Sequence: Synthetic oligonucleotide
ccaccagugugaggcaggg

SEQ ID NO: 891362 - RNA, 19 nt, Artificial Sequence
  Description of Artificial Sequence: Synthetic oligonucleotide
ccuucgcccaacacccgac

SEQ ID NO: 891363 - RNA, 19 nt, Artificial Sequence
  Description of Artificial Sequence: Synthetic oligonucleotide
guccggagcagugcagcca

SEQ ID NO: 891364 - RNA, 19 nt, Artificial Sequence
  Description of Artificial Sequence: Synthetic oligonucleotide
ccguagacugcacugggaa

SEQ ID NO: 891365 - RNA, 19 nt, Artificial Sequence
  Description of Artificial Sequence: Synthetic oligonucleotide
gucgcagaucugguccuuc

SEQ ID NO: 891366 - RNA, 19 nt, Artificial Sequence
  Description of Artificial Sequence: Synthetic oligonucleotide
cuguaccguagacugcacu

SEQ ID NO: 891367 - RNA, 19 nt, Artificial Sequence
  Description of Artificial Sequence: Synthetic oligonucleotide
gcugcgcauacagcagugc

SEQ ID NO: 891368 - RNA, 19 nt, Artificial Sequence
  Description of Artificial Sequence: Synthetic oligonucleotide
gcuucgcugcgcauacagc

SEQ ID NO: 891369 - RNA, 19 nt, Artificial Sequence
  Description of Artificial Sequence: Synthetic oligonucleotide
gcaugguaugcuucagcua

SEQ ID NO: 891370 - RNA, 19 nt, Artificial Sequence
  Description of Artificial Sequence: Synthetic oligonucleotide
gccgaggguguaauuccag

SEQ ID NO: 891371 - RNA, 19 nt, Artificial Sequence
  Description of Artificial Sequence: Synthetic oligonucleotide
gcauggaaguucauaugua

SEQ ID NO: 891372 - RNA, 19 nt, Artificial Sequence
  Description of Artificial Sequence: Synthetic oligonucleotide
cagagucgagaugccagaa

SEQ ID NO: 891373 - RNA, 19 nt, Artificial Sequence
  Description of Artificial Sequence: Synthetic oligonucleotide
gggccggaaguugugugac

SEQ ID NO: 891374 - RNA, 19 nt, Artificial Sequence
  Description of Artificial Sequence: Synthetic oligonucleotide
augguaugcuucagcuaua

SEQ ID NO: 891375 - RNA, 19 nt, Artificial Sequence
  Description of Artificial Sequence: Synthetic oligonucleotide
guccugcacggccgauggc

SEQ ID NO: 891376 - RNA, 19 nt, Artificial Sequence
  Description of Artificial Sequence: Synthetic oligonucleotide
uggccgguccagccccauc

SEQ ID NO: 891377 - RNA, 19 nt, Artificial Sequence
  Description of Artificial Sequence: Synthetic oligonucleotide
cuugugccccguggugcac

SEQ ID NO: 891378 - RNA, 19 nt, Artificial Sequence
  Description of Artificial Sequence: Synthetic oligonucleotide
ccgaggguguaauuccaga

SEQ ID NO: 891379 - RNA, 19 nt, Artificial Sequence
  Description of Artificial Sequence: Synthetic oligonucleotide
ggaggcaauugaguggccu

SEQ ID NO: 891380 - RNA, 19 nt, Artificial Sequence
  Description of Artificial Sequence: Synthetic oligonucleotide
ucgccguuccuggcugcac

SEQ ID NO: 891381 - RNA, 19 nt, Artificial Sequence
  Description of Artificial Sequence: Synthetic oligonucleotide
ccggaaguugugugaccac

SEQ ID NO: 891382 - RNA, 19 nt, Artificial Sequence
  Description of Artificial Sequence: Synthetic oligonucleotide
ugcccgcuuguggcccagg

SEQ ID NO: 891383 - RNA, 19 nt, Artificial Sequence
  Description of Artificial Sequence: Synthetic oligonucleotide
ccgaaguacuuugcaaaca

SEQ ID NO: 891384 - RNA, 19 nt, Artificial Sequence
  Description of Artificial Sequence: Synthetic oligonucleotide
cucggucugcccaggcucu

SEQ ID NO: 891385 - RNA, 19 nt, Artificial Sequence
  Description of Artificial Sequence: Synthetic oligonucleotide
gccacgcugcgaaaggcca

SEQ ID NO: 891386 - RNA, 19 nt, Artificial Sequence
  Description of Artificial Sequence: Synthetic oligonucleotide
ugccccgacuugugucuuu

SEQ ID NO: 891387 - RNA, 19 nt, Artificial Sequence
  Description of Artificial Sequence: Synthetic oligonucleotide
cacggccgauggcuugcac

SEQ ID NO: 891388 - RNA, 19 nt, Artificial Sequence
  Description of Artificial Sequence: Synthetic oligonucleotide
ccuguaccguagacugcac

SEQ ID NO: 891389 - RNA, 19 nt, Artificial Sequence
  Description of Artificial Sequence: Synthetic oligonucleotide
agcccgccguacagaggac

SEQ ID NO: 891390 - RNA, 19 nt, Artificial Sequence
  Description of Artificial Sequence: Synthetic oligonucleotide
cccauauaccugggcuggg

SEQ ID NO: 891391 - RNA, 19 nt, Artificial Sequence
  Description of Artificial Sequence: Synthetic oligonucleotide
gcacgcccauauguucccg

SEQ ID NO: 891392 - RNA, 19 nt, Artificial Sequence
  Description of Artificial Sequence: Synthetic oligonucleotide
agucgcagaucugguccuu

SEQ ID NO: 891393 - RNA, 19 nt, Artificial Sequence
  Description of Artificial Sequence: Synthetic oligonucleotide
gcgggcugccuucagacau

SEQ ID NO: 891394 - RNA, 19 nt, Artificial Sequence
  Description of Artificial Sequence: Synthetic oligonucleotide
cgagccuguacacagcugu

SEQ ID NO: 891395 - RNA, 19 nt, Artificial Sequence
  Description of Artificial Sequence: Synthetic oligonucleotide
aagcacccuugugccccgu

SEQ ID NO: 891396 - RNA, 19 nt, Artificial Sequence
  Description of Artificial Sequence: Synthetic oligonucleotide
cacggcgaauaugguccuc

SEQ ID NO: 891397 - RNA, 19 nt, Artificial Sequence
  Description of Artificial Sequence: Synthetic oligonucleotide
cacccuugugccccguggu

SEQ ID NO: 891398 - RNA, 19 nt, Artificial Sequence
  Description of Artificial Sequence: Synthetic oligonucleotide
acacccgaccaaggccgga

SEQ ID NO: 891399 - RNA, 19 nt, Artificial Sequence
  Description of Artificial Sequence: Synthetic oligonucleotide
cacgcugcgaaaggccaua

SEQ ID NO: 891400 - RNA, 19 nt, Artificial Sequence
  Description of Artificial Sequence: Synthetic oligonucleotide
cggcgaauaugguccuccc

SEQ ID NO: 891401 - RNA, 19 nt, Artificial Sequence
  Description of Artificial Sequence: Synthetic oligonucleotide
gucgccguuccuggcugca

SEQ ID NO: 891402 - RNA, 19 nt, Artificial Sequence
  Description of Artificial Sequence: Synthetic oligonucleotide
ccgaccaaggccggacgac

SEQ ID NO: 891403 - RNA, 19 nt, Artificial Sequence
  Description of Artificial Sequence: Synthetic oligonucleotide
gggcgugucuacgcaguuc

SEQ ID NO: 891404 - RNA, 19 nt, Artificial Sequence
  Description of Artificial Sequence: Synthetic oligonucleotide
cgugucuacgcaguuccca

SEQ ID NO: 891405 - RNA, 19 nt, Artificial Sequence
  Description of Artificial Sequence: Synthetic oligonucleotide
ccccgacuugugucuuuag

SEQ ID NO: 891406 - RNA, 19 nt, Artificial Sequence
  Description of Artificial Sequence: Synthetic oligonucleotide
ccggacgacaaggcagcac

SEQ ID NO: 891407 - RNA, 19 nt, Artificial Sequence
  Description of Artificial Sequence: Synthetic oligonucleotide
gcgugucuacgcaguuccc

SEQ ID NO: 891408 - RNA, 19 nt, Artificial Sequence
  Description of Artificial Sequence: Synthetic oligonucleotide
caccuaugggccagagcuu

SEQ ID NO: 891409 - RNA, 19 nt, Artificial Sequence
  Description of Artificial Sequence: Synthetic oligonucleotide
gccguacagaggacagauc

SEQ ID NO: 891410 - RNA, 19 nt, Artificial Sequence
  Description of Artificial Sequence: Synthetic oligonucleotide
gcccuucgcccaacacccg

SEQ ID NO: 891411 - RNA, 19 nt, Artificial Sequence
  Description of Artificial Sequence: Synthetic oligonucleotide
cccgaccaaggccggacga

SEQ ID NO: 891412 - RNA, 19 nt, Artificial Sequence
  Description of Artificial Sequence: Synthetic oligonucleotide
gcccgccguacagaggaca

SEQ ID NO: 891413 - RNA, 19 nt, Artificial Sequence
  Description of Artificial Sequence: Synthetic oligonucleotide
cagcaccugugggcagcac

SEQ ID NO: 891414 - RNA, 19 nt, Artificial Sequence
  Description of Artificial Sequence: Synthetic oligonucleotide
ggcaguggaccucgucaau

SEQ ID NO: 891415 - RNA, 19 nt, Artificial Sequence
  Description of Artificial Sequence: Synthetic oligonucleotide
cgccgaggguguaauucca

SEQ ID NO: 891416 - RNA, 19 nt, Artificial Sequence
  Description of Artificial Sequence: Synthetic oligonucleotide
cguagacugcacugggaau

SEQ ID NO: 891417 - RNA, 19 nt, Artificial Sequence
  Description of Artificial Sequence: Synthetic oligonucleotide
gccccgacuugugucuuua

SEQ ID NO: 891418 - RNA, 19 nt, Artificial Sequence
  Description of Artificial Sequence: Synthetic oligonucleotide
gugcagccacccguucggu

SEQ ID NO: 891419 - RNA, 19 nt, Artificial Sequence
  Description of Artificial Sequence: Synthetic oligonucleotide
cgcugcgaaaggccauaga

SEQ ID NO: 891420 - RNA, 19 nt, Artificial Sequence
  Description of Artificial Sequence: Synthetic oligonucleotide
gccagcgccgaggguguaa

SEQ ID NO: 891421 - RNA, 19 nt, Artificial Sequence
  Description of Artificial Sequence: Synthetic oligonucleotide
gccggacgacaaggcagca

SEQ ID NO: 891422 - RNA, 19 nt, Artificial Sequence
  Description of Artificial Sequence: Synthetic oligonucleotide
gccccguggugcaccuuuc

SEQ ID NO: 891423 - RNA, 19 nt, Artificial Sequence
  Description of Artificial Sequence: Synthetic oligonucleotide
cggauaucacggcgaauau

SEQ ID NO: 891424 - RNA, 19 nt, Artificial Sequence
  Description of Artificial Sequence: Synthetic oligonucleotide
gcgaaaggccauagauauu

SEQ ID NO: 891425 - RNA, 19 nt, Artificial Sequence
  Description of Artificial Sequence: Synthetic oligonucleotide
gggcuucgcugcgcauaca

SEQ ID NO: 891426 - RNA, 19 nt, Artificial Sequence
  Description of Artificial Sequence: Synthetic oligonucleotide
ccugcacggccgauggcuu

SEQ ID NO: 891427 - RNA, 19 nt, Artificial Sequence
  Description of Artificial Sequence: Synthetic oligonucleotide
ggcggauaucacggcgaau

SEQ ID NO: 891428 - RNA, 19 nt, Artificial Sequence
  Description of Artificial Sequence: Synthetic oligonucleotide
ccacgcugcgaaaggccau

SEQ ID NO: 891429 - RNA, 19 nt, Artificial Sequence
  Description of Artificial Sequence: Synthetic oligonucleotide
cgguguccuuucuucgagu

SEQ ID NO: 891430 - RNA, 19 nt, Artificial Sequence
  Description of Artificial Sequence: Synthetic oligonucleotide
gcccgaacaucuggccggu

SEQ ID NO: 891431 - RNA, 19 nt, Artificial Sequence
  Description of Artificial Sequence: Synthetic oligonucleotide
cccgaacaucuggccgguc

SEQ ID NO: 891432 - RNA, 19 nt, Artificial Sequence
  Description of Artificial Sequence: Synthetic oligonucleotide
cagcgccgaggguguaauu

SEQ ID NO: 891433 - RNA, 19 nt, Artificial Sequence
  Description of Artificial Sequence: Synthetic oligonucleotide
cccguucgguguccuuucu

SEQ ID NO: 891434 - RNA, 19 nt, Artificial Sequence
  Description of Artificial Sequence: Synthetic oligonucleotide
cugccccgacuugugucuu

SEQ ID NO: 891435 - RNA, 19 nt, Artificial Sequence
  Description of Artificial Sequence: Synthetic oligonucleotide
ccagcgccgaggguguaau

SEQ ID NO: 891436 - RNA, 19 nt, Artificial Sequence
  Description of Artificial Sequence: Synthetic oligonucleotide
ccguucgguguccuuucuu

SEQ ID NO: 891437 - RNA, 19 nt, Artificial Sequence
  Description of Artificial Sequence: Synthetic oligonucleotide
gugccccguggugcaccuu

SEQ ID NO: 891438 - RNA, 19 nt, Artificial Sequence
  Description of Artificial Sequence: Synthetic oligonucleotide
aacacgguaaugcacaagg

SEQ ID NO: 891439 - RNA, 19 nt, Artificial Sequence
  Description of Artificial Sequence: Synthetic oligonucleotide
aguauagaaaaugaagucc

SEQ ID NO: 891440 - RNA, 19 nt, Artificial Sequence
  Description of Artificial Sequence: Synthetic oligonucleotide
uuagauguggaguagaucu

SEQ ID NO: 891441 - RNA, 19 nt, Artificial Sequence
  Description of Artificial Sequence: Synthetic oligonucleotide
aaaagaaguugacuuugcc

SEQ ID NO: 891442 - RNA, 19 nt, Artificial Sequence
  Description of Artificial Sequence: Synthetic oligonucleotide
uaaucaaaauuguagagug

SEQ ID NO: 891443 - RNA, 19 nt, Artificial Sequence
  Description of Artificial Sequence: Synthetic oligonucleotide
aauuguagagugcugaggu

SEQ ID NO: 891444 - RNA, 19 nt, Artificial Sequence
  Description of Artificial Sequence: Synthetic oligonucleotide
uguaaucaaaauuguagag

SEQ ID NO: 891445 - RNA, 19 nt, Artificial Sequence
  Description of Artificial Sequence: Synthetic oligonucleotide
uguccaaaggggaaggugg

SEQ ID NO: 891446 - RNA, 19 nt, Artificial Sequence
  Description of Artificial Sequence: Synthetic oligonucleotide
auccgcauauuucugagcc

SEQ ID NO: 891447 - RNA, 19 nt, Artificial Sequence
  Description of Artificial Sequence: Synthetic oligonucleotide
uugucauuauaccagaccu

SEQ ID NO: 891448 - RNA, 19 nt, Artificial Sequence
  Description of Artificial Sequence: Synthetic oligonucleotide
cuuuaggugauauagaaga

SEQ ID NO: 891449 - RNA, 19 nt, Artificial Sequence
  Description of Artificial Sequence: Synthetic oligonucleotide
ucugauauaucuguggcag

SEQ ID NO: 891450 - RNA, 19 nt, Artificial Sequence
  Description of Artificial Sequence: Synthetic oligonucleotide
aaaauuguagagugcugag

SEQ ID NO: 891451 - RNA, 19 nt, Artificial Sequence
  Description of Artificial Sequence: Synthetic oligonucleotide
aguguugccuucuaggcgg

SEQ ID NO: 891452 - RNA, 19 nt, Artificial Sequence
  Description of Artificial Sequence: Synthetic oligonucleotide
auaggcuaaaggcucauuc

SEQ ID NO: 891453 - RNA, 19 nt, Artificial Sequence
  Description of Artificial Sequence: Synthetic oligonucleotide
uaaaggcucauucuugaag

SEQ ID NO: 891454 - RNA, 19 nt, Artificial Sequence
  Description of Artificial Sequence: Synthetic oligonucleotide
uaucaggcgaguuucaccc

SEQ ID NO: 891455 - RNA, 19 nt, Artificial Sequence
  Description of Artificial Sequence: Synthetic oligonucleotide
uauuuggucacugccaggg

SEQ ID NO: 891456 - RNA, 19 nt, Artificial Sequence
  Description of Artificial Sequence: Synthetic oligonucleotide
ugucugauauaucuguggc

SEQ ID NO: 891457 - RNA, 19 nt, Artificial Sequence
  Description of Artificial Sequence: Synthetic oligonucleotide
aagaagccuacgaaguucc

SEQ ID NO: 891458 - RNA, 19 nt, Artificial Sequence
  Description of Artificial Sequence: Synthetic oligonucleotide
agugucauaguaguggacg

SEQ ID NO: 891459 - RNA, 19 nt, Artificial Sequence
  Description of Artificial Sequence: Synthetic oligonucleotide
aaucaaaauuguagagugc

SEQ ID NO: 891460 - RNA, 19 nt, Artificial Sequence
  Description of Artificial Sequence: Synthetic oligonucleotide
ugcgcauucaauaucugca

SEQ ID NO: 891461 - RNA, 19 nt, Artificial Sequence
  Description of Artificial Sequence: Synthetic oligonucleotide
cuggacacuaaucucauag

SEQ ID NO: 891462 - RNA, 19 nt, Artificial Sequence
  Description of Artificial Sequence: Synthetic oligonucleotide
ucaucaggaaaucaugcac

SEQ ID NO: 891463 - RNA, 19 nt, Artificial Sequence
  Description of Artificial Sequence: Synthetic oligonucleotide
aaauuguagagugcugagg

SEQ ID NO: 891464 - RNA, 19 nt, Artificial Sequence
  Description of Artificial Sequence: Synthetic oligonucleotide
ugcucuauacuccaguccu

SEQ ID NO: 891465 - RNA, 19 nt, Artificial Sequence
  Description of Artificial Sequence: Synthetic oligonucleotide
caugcuccagccuaggucc

SEQ ID NO: 891466 - RNA, 19 nt, Artificial Sequence
  Description of Artificial Sequence: Synthetic oligonucleotide
uucaauaucugcagcccag

SEQ ID NO: 891467 - RNA, 19 nt, Artificial Sequence
  Description of Artificial Sequence: Synthetic oligonucleotide
ugcugcaacgcucagacuc

SEQ ID NO: 891468 - RNA, 19 nt, Artificial Sequence
  Description of Artificial Sequence: Synthetic oligonucleotide
ucagacucccaguauuugg

SEQ ID NO: 891469 - RNA, 19 nt, Artificial Sequence
  Description of Artificial Sequence: Synthetic oligonucleotide
aguuggugaguuaucaggc

SEQ ID NO: 891470 - RNA, 19 nt, Artificial Sequence
  Description of Artificial Sequence: Synthetic oligonucleotide
ucuaggugucuuuagguga

SEQ ID NO: 891471 - RNA, 19 nt, Artificial Sequence
  Description of Artificial Sequence: Synthetic oligonucleotide
gaagcuccagccuuuguag

SEQ ID NO: 891472 - RNA, 19 nt, Artificial Sequence
  Description of Artificial Sequence: Synthetic oligonucleotide
ugauucacguggcagggcc

SEQ ID NO: 891473 - RNA, 19 nt, Artificial Sequence
  Description of Artificial Sequence: Synthetic oligonucleotide
ucuaggacauccuucuucu

SEQ ID NO: 891474 - RNA, 19 nt, Artificial Sequence
  Description of Artificial Sequence: Synthetic oligonucleotide
acgguaaugcacaaggugg

SEQ ID NO: 891475 - RNA, 19 nt, Artificial Sequence
  Description of Artificial Sequence: Synthetic oligonucleotide
ucucauaggcuaaaggcuc

SEQ ID NO: 891476 - RNA, 19 nt, Artificial Sequence
  Description of Artificial Sequence: Synthetic oligonucleotide
uuugccuggaaagucagug

SEQ ID NO: 891477 - RNA, 19 nt, Artificial Sequence
  Description of Artificial Sequence: Synthetic oligonucleotide
uugccuaaaaccugcauuc

SEQ ID NO: 891478 - RNA, 19 nt, Artificial Sequence
  Description of Artificial Sequence: Synthetic oligonucleotide
agaugggccuaacaggcac

SEQ ID NO: 891479 - RNA, 19 nt, Artificial Sequence
  Description of Artificial Sequence: Synthetic oligonucleotide
gagaaucccacugucaccc

SEQ ID NO: 891480 - RNA, 19 nt, Artificial Sequence
  Description of Artificial Sequence: Synthetic oligonucleotide
gaugcagagagccugugga

SEQ ID NO: 891481 - RNA, 19 nt, Artificial Sequence
  Description of Artificial Sequence: Synthetic oligonucleotide
gcagaguuuguccaaaggg

SEQ ID NO: 891482 - RNA, 19 nt, Artificial Sequence
  Description of Artificial Sequence: Synthetic oligonucleotide
aaacucuaggacauccuuc

SEQ ID NO: 891483 - RNA, 19 nt, Artificial Sequence
  Description of Artificial Sequence: Synthetic oligonucleotide
ugcuaaagagcaggaaugg

SEQ ID NO: 891484 - RNA, 19 nt, Artificial Sequence
  Description of Artificial Sequence: Synthetic oligonucleotide
uagagcuugucauuauacc

SEQ ID NO: 891485 - RNA, 19 nt, Artificial Sequence
  Description of Artificial Sequence: Synthetic oligonucleotide
auaauggacaggcccauca

SEQ ID NO: 891486 - RNA, 19 nt, Artificial Sequence
  Description of Artificial Sequence: Synthetic oligonucleotide
auagacaacaugggcuucc

SEQ ID NO: 891487 - RNA, 19 nt, Artificial Sequence
  Description of Artificial Sequence: Synthetic oligonucleotide
uacucugccauagucaucu

SEQ ID NO: 891488 - RNA, 19 nt, Artificial Sequence
  Description of Artificial Sequence: Synthetic oligonucleotide
gacaguugacgccaggggc

SEQ ID NO: 891489 - RNA, 19 nt, Artificial Sequence
  Description of Artificial Sequence: Synthetic oligonucleotide
uggacggcaucaaggaagg

SEQ ID NO: 891490 - RNA, 19 nt, Artificial Sequence
  Description of Artificial Sequence: Synthetic oligonucleotide
uggaguagaucuguaggcg

SEQ ID NO: 891491 - RNA, 19 nt, Artificial Sequence
  Description of Artificial Sequence: Synthetic oligonucleotide
augccguuaguauagaaaa

SEQ ID NO: 891492 - RNA, 19 nt, Artificial Sequence
  Description of Artificial Sequence: Synthetic oligonucleotide
uuugugacugcucuguguu

SEQ ID NO: 891493 - RNA, 19 nt, Artificial Sequence
  Description of Artificial Sequence: Synthetic oligonucleotide
acacuaaucucauaggcua

SEQ ID NO: 891494 - RNA, 19 nt, Artificial Sequence
  Description of Artificial Sequence: Synthetic oligonucleotide
uuguagagugcugagguug

SEQ ID NO: 891495 - RNA, 19 nt, Artificial Sequence
  Description of Artificial Sequence: Synthetic oligonucleotide
cuguggauaauggacaggc

SEQ ID NO: 891496 - RNA, 19 nt, Artificial Sequence
  Description of Artificial Sequence: Synthetic oligonucleotide
cugcuaaagagcaggaaug

SEQ ID NO: 891497 - RNA, 19 nt, Artificial Sequence
  Description of Artificial Sequence: Synthetic oligonucleotide
gucauuauaccagaccugc

SEQ ID NO: 891498 - RNA, 19 nt, Artificial Sequence
  Description of Artificial Sequence: Synthetic oligonucleotide
uuaucaggcgaguuucacc

SEQ ID NO: 891499 - RNA, 19 nt, Artificial Sequence
  Description of Artificial Sequence: Synthetic oligonucleotide
uggggacaauuucagaaug

SEQ ID NO: 891500 - RNA, 19 nt, Artificial Sequence
  Description of Artificial Sequence: Synthetic oligonucleotide
uugaagugcgcauucaaua

SEQ ID NO: 891501 - RNA, 19 nt, Artificial Sequence
  Description of Artificial Sequence: Synthetic oligonucleotide
caucuguagaaccaagaug

SEQ ID NO: 891502 - RNA, 19 nt, Artificial Sequence
  Description of Artificial Sequence: Synthetic oligonucleotide
ugucuuuaggugauauaga

SEQ ID NO: 891503 - RNA, 19 nt, Artificial Sequence
  Description of Artificial Sequence: Synthetic oligonucleotide
guugaaaggccugagcaag

SEQ ID NO: 891504 - RNA, 19 nt, Artificial Sequence
  Description of Artificial Sequence: Synthetic oligonucleotide
aaugaggcccaugugagaa

SEQ ID NO: 891505 - RNA, 19 nt, Artificial Sequence
  Description of Artificial Sequence: Synthetic oligonucleotide
cauuauaccagaccugcuc

SEQ ID NO: 891506 - RNA, 19 nt, Artificial Sequence
  Description of Artificial Sequence: Synthetic oligonucleotide
uuuaggugauauagaagaa

SEQ ID NO: 891507 - RNA, 19 nt, Artificial Sequence
  Description of Artificial Sequence: Synthetic oligonucleotide
guaguggacggcaucaagg

SEQ ID NO: 891508 - RNA, 19 nt, Artificial Sequence
  Description of Artificial Sequence: Synthetic oligonucleotide
ugucuaggugucuuuaggu

SEQ ID NO: 891509 - RNA, 19 nt, Artificial Sequence
  Description of Artificial Sequence: Synthetic oligonucleotide
ugaagugcgcauucaauau

SEQ ID NO: 891510 - RNA, 19 nt, Artificial Sequence
  Description of Artificial Sequence: Synthetic oligonucleotide
auauaucuguggcaguugu

SEQ ID NO: 891511 - RNA, 19 nt, Artificial Sequence
  Description of Artificial Sequence: Synthetic oligonucleotide
acggcaucaaggaaggugg

SEQ ID NO: 891512 - RNA, 19 nt, Artificial Sequence
  Description of Artificial Sequence: Synthetic oligonucleotide
aaucaugcacagcuuguau

SEQ ID NO: 891513 - RNA, 19 nt, Artificial Sequence
  Description of Artificial Sequence: Synthetic oligonucleotide
ugaguuaucaggcgaguuu

SEQ ID NO: 891514 - RNA, 19 nt, Artificial Sequence
  Description of Artificial Sequence: Synthetic oligonucleotide
ucccgugacaucugaaaag

SEQ ID NO: 891515 - RNA, 19 nt, Artificial Sequence
  Description of Artificial Sequence: Synthetic oligonucleotide
guggaguagaucuguaggc

SEQ ID NO: 891516 - RNA, 19 nt, Artificial Sequence
  Description of Artificial Sequence: Synthetic oligonucleotide
ucuguaggcgguagcugcg

SEQ ID NO: 891517 - RNA, 19 nt, Artificial Sequence
  Description of Artificial Sequence: Synthetic oligonucleotide
acaguugacgccaggggcc

SEQ ID NO: 891518 - RNA, 19 nt, Artificial Sequence
  Description of Artificial Sequence: Synthetic oligonucleotide
ccuaaaaccugcauucugg

SEQ ID NO: 891519 - RNA, 19 nt, Artificial Sequence
  Description of Artificial Sequence: Synthetic oligonucleotide
caucugugcuccaugauuc

SEQ ID NO: 891520 - RNA, 19 nt, Artificial Sequence
  Description of Artificial Sequence: Synthetic oligonucleotide
uccccagucauuuacuguc

SEQ ID NO: 891521 - RNA, 19 nt, Artificial Sequence
  Description of Artificial Sequence: Synthetic oligonucleotide
gugucauaguaguggacgg

SEQ ID NO: 891522 - RNA, 19 nt, Artificial Sequence
  Description of Artificial Sequence: Synthetic oligonucleotide
auaucuguggcaguugugu

SEQ ID NO: 891523 - RNA, 19 nt, Artificial Sequence
  Description of Artificial Sequence: Synthetic oligonucleotide
gugucuaggugucuuuagg

SEQ ID NO: 891524 - RNA, 19 nt, Artificial Sequence
  Description of Artificial Sequence: Synthetic oligonucleotide
uggacaguugacgccaggg

SEQ ID NO: 891525 - RNA, 19 nt, Artificial Sequence
  Description of Artificial Sequence: Synthetic oligonucleotide
ugaagucccagauguaauc

SEQ ID NO: 891526 - RNA, 19 nt, Artificial Sequence
  Description of Artificial Sequence: Synthetic oligonucleotide
uaguggacggcaucaagga

SEQ ID NO: 891527 - RNA, 19 nt, Artificial Sequence
  Description of Artificial Sequence: Synthetic oligonucleotide
cuauacuccaguccuggac

SEQ ID NO: 891528 - RNA, 19 nt, Artificial Sequence
  Description of Artificial Sequence: Synthetic oligonucleotide
gucuuuaggugauauagaa

SEQ ID NO: 891529 - RNA, 19 nt, Artificial Sequence
  Description of Artificial Sequence: Synthetic oligonucleotide
ggacacuaaucucauaggc

SEQ ID NO: 891530 - RNA, 19 nt, Artificial Sequence
  Description of Artificial Sequence: Synthetic oligonucleotide
agaaugaggcccaugugag

SEQ ID NO: 891531 - RNA, 19 nt, Artificial Sequence
  Description of Artificial Sequence: Synthetic oligonucleotide
ucuugaagugcgcauucaa

SEQ ID NO: 891532 - RNA, 19 nt, Artificial Sequence
  Description of Artificial Sequence: Synthetic oligonucleotide
cacgguaaugcacaaggug

SEQ ID NO: 891533 - RNA, 19 nt, Artificial Sequence
  Description of Artificial Sequence: Synthetic oligonucleotide
ugccauagucaucuguaga

SEQ ID NO: 891534 - RNA, 19 nt, Artificial Sequence
  Description of Artificial Sequence: Synthetic oligonucleotide
ugagaaucccacugucacc

SEQ ID NO: 891535 - RNA, 19 nt, Artificial Sequence
  Description of Artificial Sequence: Synthetic oligonucleotide
ggaaaucaugcacagcuug

SEQ ID NO: 891536 - RNA, 19 nt, Artificial Sequence
  Description of Artificial Sequence: Synthetic oligonucleotide
gacggcaucaaggaaggug

SEQ ID NO: 891537 - RNA, 19 nt, Artificial Sequence
  Description of Artificial Sequence: Synthetic oligonucleotide
agaugcagagagccugugg

SEQ ID NO: 891538 - RNA, 19 nt, Artificial Sequence
  Description of Artificial Sequence: Synthetic oligonucleotide
uggggucuuaggcugccgg

SEQ ID NO: 891539 - RNA, 19 nt, Artificial Sequence
  Description of Artificial Sequence: Synthetic oligonucleotide
uagauguggaguagaucug

SEQ ID NO: 891540 - RNA, 19 nt, Artificial Sequence
  Description of Artificial Sequence: Synthetic oligonucleotide
gucuaggugucuuuaggug

SEQ ID NO: 891541 - RNA, 19 nt, Artificial Sequence
  Description of Artificial Sequence: Synthetic oligonucleotide
aguaguggacggcaucaag

SEQ ID NO: 891542 - RNA, 19 nt, Artificial Sequence
  Description of Artificial Sequence: Synthetic oligonucleotide
aaguuccuagcugaggcca

SEQ ID NO: 891543 - RNA, 19 nt, Artificial Sequence
  Description of Artificial Sequence: Synthetic oligonucleotide
caucaggaaaucaugcaca

SEQ ID NO: 891544 - RNA, 19 nt, Artificial Sequence
  Description of Artificial Sequence: Synthetic oligonucleotide
guagguauauccuguggca

SEQ ID NO: 891545 - RNA, 19 nt, Artificial Sequence
  Description of Artificial Sequence: Synthetic oligonucleotide
aggcgaguuucacccaacc

SEQ ID NO: 891546 - RNA, 19 nt, Artificial Sequence
  Description of Artificial Sequence: Synthetic oligonucleotide
agguauauccuguggcaug

SEQ ID NO: 891547 - RNA, 19 nt, Artificial Sequence
  Description of Artificial Sequence: Synthetic oligonucleotide
cagaaugaggcccauguga

SEQ ID NO: 891548 - RNA, 19 nt, Artificial Sequence
  Description of Artificial Sequence: Synthetic oligonucleotide
uguguccccagauauccgu

SEQ ID NO: 891549 - RNA, 19 nt, Artificial Sequence
  Description of Artificial Sequence: Synthetic oligonucleotide
agaucaugccguuaguaua

SEQ ID NO: 891550 - RNA, 19 nt, Artificial Sequence
  Description of Artificial Sequence: Synthetic oligonucleotide
ggcgcuaaagaaaauagac

SEQ ID NO: 891551 - RNA, 19 nt, Artificial Sequence
  Description of Artificial Sequence: Synthetic oligonucleotide
caaacucggugacauuggg

SEQ ID NO: 891552 - RNA, 19 nt, Artificial Sequence
  Description of Artificial Sequence: Synthetic oligonucleotide
caaguuggugaguuaucag

SEQ ID NO: 891553 - RNA, 19 nt, Artificial Sequence
  Description of Artificial Sequence: Synthetic oligonucleotide
auaguaguggacggcauca

SEQ ID NO: 891554 - RNA, 19 nt, Artificial Sequence
  Description of Artificial Sequence: Synthetic oligonucleotide
gauauaucuguggcaguug

SEQ ID NO: 891555 - RNA, 19 nt, Artificial Sequence
  Description of Artificial Sequence: Synthetic oligonucleotide
ggugcugcaacgcucagac

SEQ ID NO: 891556 - RNA, 19 nt, Artificial Sequence
  Description of Artificial Sequence: Synthetic oligonucleotide
auccuggucuucaauacuc

SEQ ID NO: 891557 - RNA, 19 nt, Artificial Sequence
  Description of Artificial Sequence: Synthetic oligonucleotide
ugauauaucuguggcaguu

SEQ ID NO: 891558 - RNA, 19 nt, Artificial Sequence
  Description of Artificial Sequence: Synthetic oligonucleotide
uggacaucugugcuccaug

SEQ ID NO: 891559 - RNA, 19 nt, Artificial Sequence
  Description of Artificial Sequence: Synthetic oligonucleotide
caguguugccuucuaggcg

SEQ ID NO: 891560 - RNA, 19 nt, Artificial Sequence
  Description of Artificial Sequence: Synthetic oligonucleotide
gaagugcgcauucaauauc

SEQ ID NO: 891561 - RNA, 19 nt, Artificial Sequence
  Description of Artificial Sequence: Synthetic oligonucleotide
uguagauggugguguaggu

SEQ ID NO: 891562 - RNA, 19 nt, Artificial Sequence
  Description of Artificial Sequence: Synthetic oligonucleotide
gagccuguggauaauggac

SEQ ID NO: 891563 - RNA, 19 nt, Artificial Sequence
  Description of Artificial Sequence: Synthetic oligonucleotide
uggcaguugugucuaggug

SEQ ID NO: 891564 - RNA, 19 nt, Artificial Sequence
  Description of Artificial Sequence: Synthetic oligonucleotide
aacaugggcuucccguacu

SEQ ID NO: 891565 - RNA, 19 nt, Artificial Sequence
  Description of Artificial Sequence: Synthetic oligonucleotide
guagagcuugucauuauac

SEQ ID NO: 891566 - RNA, 19 nt, Artificial Sequence
  Description of Artificial Sequence: Synthetic oligonucleotide
auagucaucuguagaacca

SEQ ID NO: 891567 - RNA, 19 nt, Artificial Sequence
  Description of Artificial Sequence: Synthetic oligonucleotide
uguccccagucauuuacug

SEQ ID NO: 891568 - RNA, 19 nt, Artificial Sequence
  Description of Artificial Sequence: Synthetic oligonucleotide
guaaucaaaauuguagagu

SEQ ID NO: 891569 - RNA, 19 nt, Artificial Sequence
  Description of Artificial Sequence: Synthetic oligonucleotide
agacucccaguauuugguc

SEQ ID NO: 891570 - RNA, 19 nt, Artificial Sequence
  Description of Artificial Sequence: Synthetic oligonucleotide
gaugcuggugcugcaacgc

SEQ ID NO: 891571 - RNA, 19 nt, Artificial Sequence
  Description of Artificial Sequence: Synthetic oligonucleotide
auauccuguggcaugcauc

SEQ ID NO: 891572 - RNA, 19 nt, Artificial Sequence
  Description of Artificial Sequence: Synthetic oligonucleotide
ucauuauaccagaccugcu

SEQ ID NO: 891573 - RNA, 19 nt, Artificial Sequence
  Description of Artificial Sequence: Synthetic oligonucleotide
uagaucuguaggcgguagc

SEQ ID NO: 891574 - RNA, 19 nt, Artificial Sequence
  Description of Artificial Sequence: Synthetic oligonucleotide
uauauccuguggcaugcau

SEQ ID NO: 891575 - RNA, 19 nt, Artificial Sequence
  Description of Artificial Sequence: Synthetic oligonucleotide
ucugguuguagaugcuggu

SEQ ID NO: 891576 - RNA, 19 nt, Artificial Sequence
  Description of Artificial Sequence: Synthetic oligonucleotide
aggucaacacgguaaugca

SEQ ID NO: 891577 - RNA, 19 nt, Artificial Sequence
  Description of Artificial Sequence: Synthetic oligonucleotide
agcuugucauuauaccaga

SEQ ID NO: 891578 - RNA, 19 nt, Artificial Sequence
  Description of Artificial Sequence: Synthetic oligonucleotide
gaguaccuggcccagcuga

SEQ ID NO: 891579 - RNA, 19 nt, Artificial Sequence
  Description of Artificial Sequence: Synthetic oligonucleotide
uguggcaguugugucuagg

SEQ ID NO: 891580 - RNA, 19 nt, Artificial Sequence
  Description of Artificial Sequence: Synthetic oligonucleotide
gugcgcauucaauaucugc

SEQ ID NO: 891581 - RNA, 19 nt, Artificial Sequence
  Description of Artificial Sequence: Synthetic oligonucleotide
gucaacacgguaaugcaca

SEQ ID NO: 891582 - RNA, 19 nt, Artificial Sequence
  Description of Artificial Sequence: Synthetic oligonucleotide
cugcucuauacuccagucc

SEQ ID NO: 891583 - RNA, 19 nt, Artificial Sequence
  Description of Artificial Sequence: Synthetic oligonucleotide
agccuacgaaguuccuagc

SEQ ID NO: 891584 - RNA, 19 nt, Artificial Sequence
  Description of Artificial Sequence: Synthetic oligonucleotide
caugccguuaguauagaaa

SEQ ID NO: 891585 - RNA, 19 nt, Artificial Sequence
  Description of Artificial Sequence: Synthetic oligonucleotide
agaaguugaaaggccugag

SEQ ID NO: 891586 - RNA, 19 nt, Artificial Sequence
  Description of Artificial Sequence: Synthetic oligonucleotide
ggcucauucuugaagugcg

SEQ ID NO: 891587 - RNA, 19 nt, Artificial Sequence
  Description of Artificial Sequence: Synthetic oligonucleotide
cuaaucucauaggcuaaag

SEQ ID NO: 891588 - RNA, 19 nt, Artificial Sequence
  Description of Artificial Sequence: Synthetic oligonucleotide
guauuuggucacugccagg

SEQ ID NO: 891589 - RNA, 19 nt, Artificial Sequence
  Description of Artificial Sequence: Synthetic oligonucleotide
aguuucacccaaccccuca

SEQ ID NO: 891590 - RNA, 19 nt, Artificial Sequence
  Description of Artificial Sequence: Synthetic oligonucleotide
cucaucaggaaaucaugca

SEQ ID NO: 891591 - RNA, 19 nt, Artificial Sequence
  Description of Artificial Sequence: Synthetic oligonucleotide
guuucacccaaccccucag

SEQ ID NO: 891592 - RNA, 19 nt, Artificial Sequence
  Description of Artificial Sequence: Synthetic oligonucleotide
uucucuaugcacagccaua

SEQ ID NO: 891593 - RNA, 19 nt, Artificial Sequence
  Description of Artificial Sequence: Synthetic oligonucleotide
gugacaucugaaaagaagu

SEQ ID NO: 891594 - RNA, 19 nt, Artificial Sequence
  Description of Artificial Sequence: Synthetic oligonucleotide
agaucuguaggcgguagcu

SEQ ID NO: 891595 - RNA, 19 nt, Artificial Sequence
  Description of Artificial Sequence: Synthetic oligonucleotide
ccaugauucacguggcagg

SEQ ID NO: 891596 - RNA, 19 nt, Artificial Sequence
  Description of Artificial Sequence: Synthetic oligonucleotide
uugccuucuaggcgguagc

SEQ ID NO: 891597 - RNA, 19 nt, Artificial Sequence
  Description of Artificial Sequence: Synthetic oligonucleotide
aaugcacaaggugggugug

SEQ ID NO: 891598 - RNA, 19 nt, Artificial Sequence
  Description of Artificial Sequence: Synthetic oligonucleotide
uacucucaucauucugaag

SEQ ID NO: 891599 - RNA, 19 nt, Artificial Sequence
  Description of Artificial Sequence: Synthetic oligonucleotide
ucuauacuccaguccugga

SEQ ID NO: 891600 - RNA, 19 nt, Artificial Sequence
  Description of Artificial Sequence: Synthetic oligonucleotide
ucaggcgaguuucacccaa

SEQ ID NO: 891601 - RNA, 19 nt, Artificial Sequence
  Description of Artificial Sequence: Synthetic oligonucleotide
gccguuaguauagaaaaug

SEQ ID NO: 891602 - RNA, 19 nt, Artificial Sequence
  Description of Artificial Sequence: Synthetic oligonucleotide
uccuggucuucaauacucu

SEQ ID NO: 891603 - RNA, 19 nt, Artificial Sequence
  Description of Artificial Sequence: Synthetic oligonucleotide
ucuugcgaguacugugucu

SEQ ID NO: 891604 - RNA, 19 nt, Artificial Sequence
  Description of Artificial Sequence: Synthetic oligonucleotide
cuguagaaccaagaugaug

SEQ ID NO: 891605 - RNA, 19 nt, Artificial Sequence
  Description of Artificial Sequence: Synthetic oligonucleotide
agauguggaguagaucugu

SEQ ID NO: 891606 - RNA, 19 nt, Artificial Sequence
  Description of Artificial Sequence: Synthetic oligonucleotide
ugcuuagauguggaguaga

SEQ ID NO: 891607 - RNA, 19 nt, Artificial Sequence
  Description of Artificial Sequence: Synthetic oligonucleotide
gucugauauaucuguggca

SEQ ID NO: 891608 - RNA, 19 nt, Artificial Sequence
  Description of Artificial Sequence: Synthetic oligonucleotide
cgugacaucugaaaagaag

SEQ ID NO: 891609 - RNA, 19 nt, Artificial Sequence
  Description of Artificial Sequence: Synthetic oligonucleotide
ugacuuugccuggaaaguc

SEQ ID NO: 891610 - RNA, 19 nt, Artificial Sequence
  Description of Artificial Sequence: Synthetic oligonucleotide
aguugacuuugccuggaaa

SEQ ID NO: 891611 - RNA, 19 nt, Artificial Sequence
  Description of Artificial Sequence: Synthetic oligonucleotide
ucuuaggcugccgggguug

SEQ ID NO: 891612 - RNA, 19 nt, Artificial Sequence
  Description of Artificial Sequence: Synthetic oligonucleotide
ugccguuaguauagaaaau

SEQ ID NO: 891613 - RNA, 19 nt, Artificial Sequence
  Description of Artificial Sequence: Synthetic oligonucleotide
ugccaaguuggugaguuau

SEQ ID NO: 891614 - RNA, 19 nt, Artificial Sequence
  Description of Artificial Sequence: Synthetic oligonucleotide
gguauauccuguggcaugc

SEQ ID NO: 891615 - RNA, 19 nt, Artificial Sequence
  Description of Artificial Sequence: Synthetic oligonucleotide
acgaaguuccuagcugagg

SEQ ID NO: 891616 - RNA, 19 nt, Artificial Sequence
  Description of Artificial Sequence: Synthetic oligonucleotide
gacacuaaucucauaggcu

SEQ ID NO: 891617 - RNA, 19 nt, Artificial Sequence
  Description of Artificial Sequence: Synthetic oligonucleotide
guugccuucuaggcgguag

SEQ ID NO: 891618 - RNA, 19 nt, Artificial Sequence
  Description of Artificial Sequence: Synthetic oligonucleotide
ucuaggcgguagcugggga

SEQ ID NO: 891619 - RNA, 19 nt, Artificial Sequence
  Description of Artificial Sequence: Synthetic oligonucleotide
ggggcugcuaaagagcagg

SEQ ID NO: 891620 - RNA, 19 nt, Artificial Sequence
  Description of Artificial Sequence: Synthetic oligonucleotide
cuaggcgguagcuggggac

SEQ ID NO: 891621 - RNA, 19 nt, Artificial Sequence
  Description of Artificial Sequence: Synthetic oligonucleotide
uuauaccagaccugcucua

SEQ ID NO: 891622 - RNA, 19 nt, Artificial Sequence
  Description of Artificial Sequence: Synthetic oligonucleotide
gaucuguaggcgguagcug

SEQ ID NO: 891623 - RNA, 19 nt, Artificial Sequence
  Description of Artificial Sequence: Synthetic oligonucleotide
uagguauauccuguggcau

SEQ ID NO: 891624 - RNA, 19 nt, Artificial Sequence
  Description of Artificial Sequence: Synthetic oligonucleotide
agucauuuacugucugaua

SEQ ID NO: 891625 - RNA, 19 nt, Artificial Sequence
  Description of Artificial Sequence: Synthetic oligonucleotide
acugucugauauaucugug

SEQ ID NO: 891626 - RNA, 19 nt, Artificial Sequence
  Description of Artificial Sequence: Synthetic oligonucleotide
aguguuaaagaugggccua

SEQ ID NO: 891627 - RNA, 19 nt, Artificial Sequence
  Description of Artificial Sequence: Synthetic oligonucleotide
gguggcagucucuggacag

SEQ ID NO: 891628 - RNA, 19 nt, Artificial Sequence
  Description of Artificial Sequence: Synthetic oligonucleotide
uguaucuccugggcgcuca

SEQ ID NO: 891629 - RNA, 19 nt, Artificial Sequence
  Description of Artificial Sequence: Synthetic oligonucleotide
gcuaaaggcucauucuuga

SEQ ID NO: 891630 - RNA, 19 nt, Artificial Sequence
  Description of Artificial Sequence: Synthetic oligonucleotide
ucaugccguuaguauagaa

SEQ ID NO: 891631 - RNA, 19 nt, Artificial Sequence
  Description of Artificial Sequence: Synthetic oligonucleotide
guagaucuguaggcgguag

SEQ ID NO: 891632 - RNA, 19 nt, Artificial Sequence
  Description of Artificial Sequence: Synthetic oligonucleotide
ugaggcccaugugagaauc

SEQ ID NO: 891633 - RNA, 19 nt, Artificial Sequence
  Description of Artificial Sequence: Synthetic oligonucleotide
uggcaugcaucuuggccga

SEQ ID NO: 891634 - RNA, 19 nt, Artificial Sequence
  Description of Artificial Sequence: Synthetic oligonucleotide
cuccagccuagguccaugg

SEQ ID NO: 891635 - RNA, 19 nt, Artificial Sequence
  Description of Artificial Sequence: Synthetic oligonucleotide
auuguagagugcugagguu

SEQ ID NO: 891636 - RNA, 19 nt, Artificial Sequence
  Description of Artificial Sequence: Synthetic oligonucleotide
ccaugugagaaucccacug

SEQ ID NO: 891637 - RNA, 19 nt, Artificial Sequence
  Description of Artificial Sequence: Synthetic oligonucleotide
gaaugaggcccaugugaga

SEQ ID NO: 891638 - RNA, 19 nt, Artificial Sequence
  Description of Artificial Sequence: Synthetic oligonucleotide
gcucaucaggaaaucaugc

SEQ ID NO: 891639 - RNA, 19 nt, Artificial Sequence
  Description of Artificial Sequence: Synthetic oligonucleotide
acuaaucucauaggcuaaa

SEQ ID NO: 891640 - RNA, 19 nt, Artificial Sequence
  Description of Artificial Sequence: Synthetic oligonucleotide
acucggugacauuggggug

SEQ ID NO: 891641 - RNA, 19 nt, Artificial Sequence
  Description of Artificial Sequence: Synthetic oligonucleotide
accagaccugcucuauacu

SEQ ID NO: 891642 - RNA, 19 nt, Artificial Sequence
  Description of Artificial Sequence: Synthetic oligonucleotide
agagagccuguggauaaug

SEQ ID NO: 891643 - RNA, 19 nt, Artificial Sequence
  Description of Artificial Sequence: Synthetic oligonucleotide
ugcagagagccuguggaua

SEQ ID NO: 891644 - RNA, 19 nt, Artificial Sequence
  Description of Artificial Sequence: Synthetic oligonucleotide
gaugggccuaacaggcacc

SEQ ID NO: 891645 - RNA, 19 nt, Artificial Sequence
  Description of Artificial Sequence: Synthetic oligonucleotide
uaggcgguagcuggggaca

SEQ ID NO: 891646 - RNA, 19 nt, Artificial Sequence
  Description of Artificial Sequence: Synthetic oligonucleotide
aucugugcuccaugauuca

SEQ ID NO: 891647 - RNA, 19 nt, Artificial Sequence
  Description of Artificial Sequence: Synthetic oligonucleotide
auccaggucaacacgguaa

SEQ ID NO: 891648 - RNA, 19 nt, Artificial Sequence
  Description of Artificial Sequence: Synthetic oligonucleotide
cucauaggcuaaaggcuca

SEQ ID NO: 891649 - RNA, 19 nt, Artificial Sequence
  Description of Artificial Sequence: Synthetic oligonucleotide
caacaugggcuucccguac

SEQ ID NO: 891650 - RNA, 19 nt, Artificial Sequence
  Description of Artificial Sequence: Synthetic oligonucleotide
aggggccaacucaugaguc

SEQ ID NO: 891651 - RNA, 19 nt, Artificial Sequence
  Description of Artificial Sequence: Synthetic oligonucleotide
aguuccuagcugaggccac

SEQ ID NO: 891652 - RNA, 19 nt, Artificial Sequence
  Description of Artificial Sequence: Synthetic oligonucleotide
uuccacaugguggccaguc

SEQ ID NO: 891653 - RNA, 19 nt, Artificial Sequence
  Description of Artificial Sequence: Synthetic oligonucleotide
aguggacggcaucaaggaa

SEQ ID NO: 891654 - RNA, 19 nt, Artificial Sequence
  Description of Artificial Sequence: Synthetic oligonucleotide
uaggcgguagcugcgccug

SEQ ID NO: 891655 - RNA, 19 nt, Artificial Sequence
  Description of Artificial Sequence: Synthetic oligonucleotide
gauucacguggcagggccc

SEQ ID NO: 891656 - RNA, 19 nt, Artificial Sequence
  Description of Artificial Sequence: Synthetic oligonucleotide
cuuuguagaucacaguguu

SEQ ID NO: 891657 - RNA, 19 nt, Artificial Sequence
  Description of Artificial Sequence: Synthetic oligonucleotide
ugccuaaaaccugcauucu

SEQ ID NO: 891658 - RNA, 19 nt, Artificial Sequence
  Description of Artificial Sequence: Synthetic oligonucleotide
ggcaguugugucuaggugu

SEQ ID NO: 891659 - RNA, 19 nt, Artificial Sequence
  Description of Artificial Sequence: Synthetic oligonucleotide
cagugucauaguaguggac

SEQ ID NO: 891660 - RNA, 19 nt, Artificial Sequence
  Description of Artificial Sequence: Synthetic oligonucleotide
cuugccuaaaaccugcauu

SEQ ID NO: 891661 - RNA, 19 nt, Artificial Sequence
  Description of Artificial Sequence: Synthetic oligonucleotide
ggccuugccauucaacauc

SEQ ID NO: 891662 - RNA, 19 nt, Artificial Sequence
  Description of Artificial Sequence: Synthetic oligonucleotide
cuccauccgcauauuucug

SEQ ID NO: 891663 - RNA, 19 nt, Artificial Sequence
  Description of Artificial Sequence: Synthetic oligonucleotide
aaccccucagggguguaga

SEQ ID NO: 891664 - RNA, 19 nt, Artificial Sequence
  Description of Artificial Sequence: Synthetic oligonucleotide
cuaaaaccugcauucuggu

SEQ ID NO: 891665 - RNA, 19 nt, Artificial Sequence
  Description of Artificial Sequence: Synthetic oligonucleotide
gaguuuguccaaaggggaa

SEQ ID NO: 891666 - RNA, 19 nt, Artificial Sequence
  Description of Artificial Sequence: Synthetic oligonucleotide
aaaugaagucccagaugua

SEQ ID NO: 891667 - RNA, 19 nt, Artificial Sequence
  Description of Artificial Sequence: Synthetic oligonucleotide
ggcuaaaggcucauucuug

SEQ ID NO: 891668 - RNA, 19 nt, Artificial Sequence
  Description of Artificial Sequence: Synthetic oligonucleotide
gucccgugacaucugaaaa

SEQ ID NO: 891669 - RNA, 19 nt, Artificial Sequence
  Description of Artificial Sequence: Synthetic oligonucleotide
uccagccuagguccauggu

SEQ ID NO: 891670 - RNA, 19 nt, Artificial Sequence
  Description of Artificial Sequence: Synthetic oligonucleotide
augcagagagccuguggau

SEQ ID NO: 891671 - RNA, 19 nt, Artificial Sequence
  Description of Artificial Sequence: Synthetic oligonucleotide
uugugucuaggugucuuua

SEQ ID NO: 891672 - RNA, 19 nt, Artificial Sequence
  Description of Artificial Sequence: Synthetic oligonucleotide
caguguuaaagaugggccu

SEQ ID NO: 891673 - RNA, 19 nt, Artificial Sequence
  Description of Artificial Sequence: Synthetic oligonucleotide
caguguguggaagcuguug

SEQ ID NO: 891674 - RNA, 19 nt, Artificial Sequence
  Description of Artificial Sequence: Synthetic oligonucleotide
ccguuaguauagaaaauga

SEQ ID NO: 891675 - RNA, 19 nt, Artificial Sequence
  Description of Artificial Sequence: Synthetic oligonucleotide
ugcagcccagaagaggguc

SEQ ID NO: 891676 - RNA, 19 nt, Artificial Sequence
  Description of Artificial Sequence: Synthetic oligonucleotide
ccauccgcauauuucugag

SEQ ID NO: 891677 - RNA, 19 nt, Artificial Sequence
  Description of Artificial Sequence: Synthetic oligonucleotide
gauaauggacaggcccauc

SEQ ID NO: 891678 - RNA, 19 nt, Artificial Sequence
  Description of Artificial Sequence: Synthetic oligonucleotide
ggggucuuaggcugccggg

SEQ ID NO: 891679 - RNA, 19 nt, Artificial Sequence
  Description of Artificial Sequence: Synthetic oligonucleotide
ccagaccugcucuauacuc

SEQ ID NO: 891680 - RNA, 19 nt, Artificial Sequence
  Description of Artificial Sequence: Synthetic oligonucleotide
gaagccuacgaaguuccua

SEQ ID NO: 891681 - RNA, 19 nt, Artificial Sequence
  Description of Artificial Sequence: Synthetic oligonucleotide
ugccuggugugcagugugu

SEQ ID NO: 891682 - RNA, 19 nt, Artificial Sequence
  Description of Artificial Sequence: Synthetic oligonucleotide
caugugagaaucccacugu

SEQ ID NO: 891683 - RNA, 19 nt, Artificial Sequence
  Description of Artificial Sequence: Synthetic oligonucleotide
cugcuuagauguggaguag

SEQ ID NO: 891684 - RNA, 19 nt, Artificial Sequence
  Description of Artificial Sequence: Synthetic oligonucleotide
gugccugccacauccaggu

SEQ ID NO: 891685 - RNA, 19 nt, Artificial Sequence
  Description of Artificial Sequence: Synthetic oligonucleotide
cacuaaucucauaggcuaa

SEQ ID NO: 891686 - RNA, 19 nt, Artificial Sequence
  Description of Artificial Sequence: Synthetic oligonucleotide
cucuugcgaguacuguguc

SEQ ID NO: 891687 - RNA, 19 nt, Artificial Sequence
  Description of Artificial Sequence: Synthetic oligonucleotide
gcgcuaaagaaaauagaca

SEQ ID NO: 891688 - RNA, 19 nt, Artificial Sequence
  Description of Artificial Sequence: Synthetic oligonucleotide
caacacgguaaugcacaag

SEQ ID NO: 891689 - RNA, 19 nt, Artificial Sequence
  Description of Artificial Sequence: Synthetic oligonucleotide
auaccagaccugcucuaua

SEQ ID NO: 891690 - RNA, 19 nt, Artificial Sequence
  Description of Artificial Sequence: Synthetic oligonucleotide
ggacaucugugcuccauga

SEQ ID NO: 891691 - RNA, 19 nt, Artificial Sequence
  Description of Artificial Sequence: Synthetic oligonucleotide
ccgcauauuucugagccag

SEQ ID NO: 891692 - RNA, 19 nt, Artificial Sequence
  Description of Artificial Sequence: Synthetic oligonucleotide
cacguggcagggcccacag

SEQ ID NO: 891693 - RNA, 19 nt, Artificial Sequence
  Description of Artificial Sequence: Synthetic oligonucleotide
ugggcgcucaggucugcga

SEQ ID NO: 891694 - RNA, 19 nt, Artificial Sequence
  Description of Artificial Sequence: Synthetic oligonucleotide
aucaggcgaguuucaccca

SEQ ID NO: 891695 - RNA, 19 nt, Artificial Sequence
  Description of Artificial Sequence: Synthetic oligonucleotide
ucauaggcuaaaggcucau

SEQ ID NO: 891696 - RNA, 19 nt, Artificial Sequence
  Description of Artificial Sequence: Synthetic oligonucleotide
aucacaguguugccuucua

SEQ ID NO: 891697 - RNA, 19 nt, Artificial Sequence
  Description of Artificial Sequence: Synthetic oligonucleotide
cagacucccaguauuuggu

SEQ ID NO: 891698 - RNA, 19 nt, Artificial Sequence
  Description of Artificial Sequence: Synthetic oligonucleotide
ggucaacacgguaaugcac

SEQ ID NO: 891699 - RNA, 19 nt, Artificial Sequence
  Description of Artificial Sequence: Synthetic oligonucleotide
caucucaaugaggaacaca

SEQ ID NO: 891700 - RNA, 19 nt, Artificial Sequence
  Description of Artificial Sequence: Synthetic oligonucleotide
gacaggcccaucaguguca

SEQ ID NO: 891701 - RNA, 19 nt, Artificial Sequence
  Description of Artificial Sequence: Synthetic oligonucleotide
agggucgaagcuggaagga

SEQ ID NO: 891702 - RNA, 19 nt, Artificial Sequence
  Description of Artificial Sequence: Synthetic oligonucleotide
uugcccguagcaccagcuu

SEQ ID NO: 891703 - RNA, 19 nt, Artificial Sequence
  Description of Artificial Sequence: Synthetic oligonucleotide
ugccuucuaggcgguagcu

SEQ ID NO: 891704 - RNA, 19 nt, Artificial Sequence
  Description of Artificial Sequence: Synthetic oligonucleotide
ccagccuagguccaugguc

SEQ ID NO: 891705 - RNA, 19 nt, Artificial Sequence
  Description of Artificial Sequence: Synthetic oligonucleotide
ccugcucuauacuccaguc

SEQ ID NO: 891706 - RNA, 19 nt, Artificial Sequence
  Description of Artificial Sequence: Synthetic oligonucleotide
gaggcccaugugagaaucc

SEQ ID NO: 891707 - RNA, 19 nt, Artificial Sequence
  Description of Artificial Sequence: Synthetic oligonucleotide
acacgguaaugcacaaggu

SEQ ID NO: 891708 - RNA, 19 nt, Artificial Sequence
  Description of Artificial Sequence: Synthetic oligonucleotide
gucgaagcuggaaggagaa

SEQ ID NO: 891709 - RNA, 19 nt, Artificial Sequence
  Description of Artificial Sequence: Synthetic oligonucleotide
uugcgaguacugugucuuc

SEQ ID NO: 891710 - RNA, 19 nt, Artificial Sequence
  Description of Artificial Sequence: Synthetic oligonucleotide
uaguaguggacggcaucaa

SEQ ID NO: 891711 - RNA, 19 nt, Artificial Sequence
  Description of Artificial Sequence: Synthetic oligonucleotide
aguagaucuguaggcggua

SEQ ID NO: 891712 - RNA, 19 nt, Artificial Sequence
  Description of Artificial Sequence: Synthetic oligonucleotide
ccaggggccaacucaugag

SEQ ID NO: 891713 - RNA, 19 nt, Artificial Sequence
  Description of Artificial Sequence: Synthetic oligonucleotide
cuaggugucuuuaggugau

SEQ ID NO: 891714 - RNA, 19 nt, Artificial Sequence
  Description of Artificial Sequence: Synthetic oligonucleotide
caggcgaguuucacccaac

SEQ ID NO: 891715 - RNA, 19 nt, Artificial Sequence
  Description of Artificial Sequence: Synthetic oligonucleotide
cuguaggcgguagcugcgc

SEQ ID NO: 891716 - RNA, 19 nt, Artificial Sequence
  Description of Artificial Sequence: Synthetic oligonucleotide
augaggcccaugugagaau

SEQ ID NO: 891717 - RNA, 19 nt, Artificial Sequence
  Description of Artificial Sequence: Synthetic oligonucleotide
cuguguucucaggcagggg

SEQ ID NO: 891718 - RNA, 19 nt, Artificial Sequence
  Description of Artificial Sequence: Synthetic oligonucleotide
gcugcaacgcucagacucc

SEQ ID NO: 891719 - RNA, 19 nt, Artificial Sequence
  Description of Artificial Sequence: Synthetic oligonucleotide
ugggguguuccugggcgcu

SEQ ID NO: 891720 - RNA, 19 nt, Artificial Sequence
  Description of Artificial Sequence: Synthetic oligonucleotide
cugggcgcuaaagaaaaua

SEQ ID NO: 891721 - RNA, 19 nt, Artificial Sequence
  Description of Artificial Sequence: Synthetic oligonucleotide
ggccuggcgcucuugcgag

SEQ ID NO: 891722 - RNA, 19 nt, Artificial Sequence
  Description of Artificial Sequence: Synthetic oligonucleotide
uggcgcucuugcgaguacu

SEQ ID NO: 891723 - RNA, 19 nt, Artificial Sequence
  Description of Artificial Sequence: Synthetic oligonucleotide
ggucgaagcuggaaggaga

SEQ ID NO: 891724 - RNA, 19 nt, Artificial Sequence
  Description of Artificial Sequence: Synthetic oligonucleotide
ccaaguuggugaguuauca

SEQ ID NO: 891725 - RNA, 19 nt, Artificial Sequence
  Description of Artificial Sequence: Synthetic oligonucleotide
gcccaugugagaaucccac

SEQ ID NO: 891726 - RNA, 19 nt, Artificial Sequence
  Description of Artificial Sequence: Synthetic oligonucleotide
uugccaaguuggugaguua

SEQ ID NO: 891727 - RNA, 19 nt, Artificial Sequence
  Description of Artificial Sequence: Synthetic oligonucleotide
ccagugccagacuucuuug

SEQ ID NO: 891728 - RNA, 19 nt, Artificial Sequence
  Description of Artificial Sequence: Synthetic oligonucleotide
agugcugagguugcccgua

SEQ ID NO: 891729 - RNA, 19 nt, Artificial Sequence
  Description of Artificial Sequence: Synthetic oligonucleotide
aucaugccguuaguauaga

SEQ ID NO: 891730 - RNA, 19 nt, Artificial Sequence
  Description of Artificial Sequence: Synthetic oligonucleotide
gggucgaagcuggaaggag

SEQ ID NO: 891731 - RNA, 19 nt, Artificial Sequence
  Description of Artificial Sequence: Synthetic oligonucleotide
gaugcaggggucagcuucu

SEQ ID NO: 891732 - RNA, 19 nt, Artificial Sequence
  Description of Artificial Sequence: Synthetic oligonucleotide
auuucagaaugaggcccau

SEQ ID NO: 891733 - RNA, 19 nt, Artificial Sequence
  Description of Artificial Sequence: Synthetic oligonucleotide
gauggugguguagguauau

SEQ ID NO: 891734 - RNA, 19 nt, Artificial Sequence
  Description of Artificial Sequence: Synthetic oligonucleotide
gcaguugugucuagguguc

SEQ ID NO: 891735 - RNA, 19 nt, Artificial Sequence
  Description of Artificial Sequence: Synthetic oligonucleotide
cugcaacgcucagacuccc

SEQ ID NO: 891736 - RNA, 19 nt, Artificial Sequence
  Description of Artificial Sequence: Synthetic oligonucleotide
cuugcgaguacugugucuu

SEQ ID NO: 891737 - RNA, 19 nt, Artificial Sequence
  Description of Artificial Sequence: Synthetic oligonucleotide
gacaucugugcuccaugau

SEQ ID NO: 891738 - RNA, 19 nt, Artificial Sequence
  Description of Artificial Sequence: Synthetic oligonucleotide
acgcucagacucccaguau

SEQ ID NO: 891739 - RNA, 19 nt, Artificial Sequence
  Description of Artificial Sequence: Synthetic oligonucleotide
guugacgccaggggccaac

SEQ ID NO: 891740 - RNA, 19 nt, Artificial Sequence
  Description of Artificial Sequence: Synthetic oligonucleotide
caucaaggaagguggcagu

SEQ ID NO: 891741 - RNA, 19 nt, Artificial Sequence
  Description of Artificial Sequence: Synthetic oligonucleotide
gugcaguguguggaagcug

SEQ ID NO: 891742 - RNA, 19 nt, Artificial Sequence
  Description of Artificial Sequence: Synthetic oligonucleotide
ccuguggauaauggacagg

SEQ ID NO: 891743 - RNA, 19 nt, Artificial Sequence
  Description of Artificial Sequence: Synthetic oligonucleotide
cuccaugauucacguggca

SEQ ID NO: 891744 - RNA, 19 nt, Artificial Sequence
  Description of Artificial Sequence: Synthetic oligonucleotide
caaccccucagggguguag

SEQ ID NO: 891745 - RNA, 19 nt, Artificial Sequence
  Description of Artificial Sequence: Synthetic oligonucleotide
gcuccaugauucacguggc

SEQ ID NO: 891746 - RNA, 19 nt, Artificial Sequence
  Description of Artificial Sequence: Synthetic oligonucleotide
gggcgcuaaagaaaauaga

SEQ ID NO: 891747 - RNA, 19 nt, Artificial Sequence
  Description of Artificial Sequence: Synthetic oligonucleotide
guccccagucauuuacugu

SEQ ID NO: 891748 - RNA, 19 nt, Artificial Sequence
  Description of Artificial Sequence: Synthetic oligonucleotide
cauccaggucaacacggua

SEQ ID NO: 891749 - RNA, 19 nt, Artificial Sequence
  Description of Artificial Sequence: Synthetic oligonucleotide
cugacuuguuccacauggu

SEQ ID NO: 891750 - RNA, 19 nt, Artificial Sequence
  Description of Artificial Sequence: Synthetic oligonucleotide
gaguuucacccaaccccuc

SEQ ID NO: 891751 - RNA, 19 nt, Artificial Sequence
  Description of Artificial Sequence: Synthetic oligonucleotide
cgcucuugcgaguacugug

SEQ ID NO: 891752 - RNA, 19 nt, Artificial Sequence
  Description of Artificial Sequence: Synthetic oligonucleotide
ugggccuaacaggcacccc

SEQ ID NO: 891753 - RNA, 19 nt, Artificial Sequence
  Description of Artificial Sequence: Synthetic oligonucleotide
caugcaucuuggccgagau

SEQ ID NO: 891754 - RNA, 19 nt, Artificial Sequence
  Description of Artificial Sequence: Synthetic oligonucleotide
gguugcccguagcaccagc

SEQ ID NO: 891755 - RNA, 19 nt, Artificial Sequence
  Description of Artificial Sequence: Synthetic oligonucleotide
cccgugacaucugaaaaga

SEQ ID NO: 891756 - RNA, 19 nt, Artificial Sequence
  Description of Artificial Sequence: Synthetic oligonucleotide
ggaguaccuggcccagcug

SEQ ID NO: 891757 - RNA, 19 nt, Artificial Sequence
  Description of Artificial Sequence: Synthetic oligonucleotide
uacuccaguccuggacauc

SEQ ID NO: 891758 - RNA, 19 nt, Artificial Sequence
  Description of Artificial Sequence: Synthetic oligonucleotide
agaagccuacgaaguuccu

SEQ ID NO: 891759 - RNA, 19 nt, Artificial Sequence
  Description of Artificial Sequence: Synthetic oligonucleotide
ggagaagcuccagccuuug

SEQ ID NO: 891760 - RNA, 19 nt, Artificial Sequence
  Description of Artificial Sequence: Synthetic oligonucleotide
gcucauucuugaagugcgc

SEQ ID NO: 891761 - RNA, 19 nt, Artificial Sequence
  Description of Artificial Sequence: Synthetic oligonucleotide
gcuugugucccgugacauc

SEQ ID NO: 891762 - RNA, 19 nt, Artificial Sequence
  Description of Artificial Sequence: Synthetic oligonucleotide
cugggcgcucaggucugcg

SEQ ID NO: 891763 - RNA, 19 nt, Artificial Sequence
  Description of Artificial Sequence: Synthetic oligonucleotide
guauauccuguggcaugca

SEQ ID NO: 891764 - RNA, 19 nt, Artificial Sequence
  Description of Artificial Sequence: Synthetic oligonucleotide
uuguaucuccugggcgcuc

SEQ ID NO: 891765 - RNA, 19 nt, Artificial Sequence
  Description of Artificial Sequence: Synthetic oligonucleotide
guggggucuuaggcugccg

SEQ ID NO: 891766 - RNA, 19 nt, Artificial Sequence
  Description of Artificial Sequence: Synthetic oligonucleotide
guaggcgguagcugcgccu

SEQ ID NO: 891767 - RNA, 19 nt, Artificial Sequence
  Description of Artificial Sequence: Synthetic oligonucleotide
cuggcgcucuugcgaguac

SEQ ID NO: 891768 - RNA, 19 nt, Artificial Sequence
  Description of Artificial Sequence: Synthetic oligonucleotide
gccuacgaaguuccuagcu

SEQ ID NO: 891769 - RNA, 19 nt, Artificial Sequence
  Description of Artificial Sequence: Synthetic oligonucleotide
acgccaggggccaacucau

SEQ ID NO: 891770 - RNA, 19 nt, Artificial Sequence
  Description of Artificial Sequence: Synthetic oligonucleotide
cccguggggaucucaaaga

SEQ ID NO: 891771 - RNA, 19 nt, Artificial Sequence
  Description of Artificial Sequence: Synthetic oligonucleotide
caguugacgccaggggcca

SEQ ID NO: 891772 - RNA, 19 nt, Artificial Sequence
  Description of Artificial Sequence: Synthetic oligonucleotide
cuguccccagucauuuacu

SEQ ID NO: 891773 - RNA, 19 nt, Artificial Sequence
  Description of Artificial Sequence: Synthetic oligonucleotide
ugcgaacaccugggccuug

SEQ ID NO: 891774 - RNA, 19 nt, Artificial Sequence
  Description of Artificial Sequence: Synthetic oligonucleotide
uucacguggcagggcccac

SEQ ID NO: 891775 - RNA, 19 nt, Artificial Sequence
  Description of Artificial Sequence: Synthetic oligonucleotide
ucggugacauugggguguu

SEQ ID NO: 891776 - RNA, 19 nt, Artificial Sequence
  Description of Artificial Sequence: Synthetic oligonucleotide
ggcgcucuugcgaguacug

SEQ ID NO: 891777 - RNA, 19 nt, Artificial Sequence
  Description of Artificial Sequence: Synthetic oligonucleotide
gcucuugcgaguacugugu

SEQ ID NO: 891778 - RNA, 19 nt, Artificial Sequence
  Description of Artificial Sequence: Synthetic oligonucleotide
cagggguguagaugguggu

SEQ ID NO: 891779 - RNA, 19 nt, Artificial Sequence
  Description of Artificial Sequence: Synthetic oligonucleotide
cacagaguucuugccuaaa

SEQ ID NO: 891780 - RNA, 19 nt, Artificial Sequence
  Description of Artificial Sequence: Synthetic oligonucleotide
ggaggaccacugugucuac

SEQ ID NO: 891781 - RNA, 19 nt, Artificial Sequence
  Description of Artificial Sequence: Synthetic oligonucleotide
ggucuuaggcugccggggu

SEQ ID NO: 891782 - RNA, 19 nt, Artificial Sequence
  Description of Artificial Sequence: Synthetic oligonucleotide
uggaccagguggggucuua

SEQ ID NO: 891783 - RNA, 19 nt, Artificial Sequence
  Description of Artificial Sequence: Synthetic oligonucleotide
uguugccuucuaggcggua

SEQ ID NO: 891784 - RNA, 19 nt, Artificial Sequence
  Description of Artificial Sequence: Synthetic oligonucleotide
gcgaacaccugggccuugc

SEQ ID NO: 891785 - RNA, 19 nt, Artificial Sequence
  Description of Artificial Sequence: Synthetic oligonucleotide
cgaguuucacccaaccccu

SEQ ID NO: 891786 - RNA, 19 nt, Artificial Sequence
  Description of Artificial Sequence: Synthetic oligonucleotide
ggcccaugugagaauccca

SEQ ID NO: 891787 - RNA, 19 nt, Artificial Sequence
  Description of Artificial Sequence: Synthetic oligonucleotide
gcuuagauguggaguagau

SEQ ID NO: 891788 - RNA, 19 nt, Artificial Sequence
  Description of Artificial Sequence: Synthetic oligonucleotide
gcaugcaucuuggccgaga

SEQ ID NO: 891789 - RNA, 19 nt, Artificial Sequence
  Description of Artificial Sequence: Synthetic oligonucleotide
cuagguccauggucuuggu

SEQ ID NO: 891790 - RNA, 19 nt, Artificial Sequence
  Description of Artificial Sequence: Synthetic oligonucleotide
gucuuaggcugccgggguu

SEQ ID NO: 891791 - RNA, 19 nt, Artificial Sequence
  Description of Artificial Sequence: Synthetic oligonucleotide
ggaagguggccuggcgcuc

SEQ ID NO: 891792 - RNA, 19 nt, Artificial Sequence
  Description of Artificial Sequence: Synthetic oligonucleotide
ccgugacaucugaaaagaa

SEQ ID NO: 891793 - RNA, 19 nt, Artificial Sequence
  Description of Artificial Sequence: Synthetic oligonucleotide
ccguacuggaacuuuuguu

SEQ ID NO: 891794 - RNA, 19 nt, Artificial Sequence
  Description of Artificial Sequence: Synthetic oligonucleotide
gacccuguccccagucauu

SEQ ID NO: 891795 - RNA, 19 nt, Artificial Sequence
  Description of Artificial Sequence: Synthetic oligonucleotide
guccuggaccagguggggu

SEQ ID NO: 891796 - RNA, 19 nt, Artificial Sequence
  Description of Artificial Sequence: Synthetic oligonucleotide
gguucugguuguagaugcu

SEQ ID NO: 891797 - RNA, 19 nt, Artificial Sequence
  Description of Artificial Sequence: Synthetic oligonucleotide
gguguuccugggcgcuaaa

SEQ ID NO: 891798 - RNA, 19 nt, Artificial Sequence
  Description of Artificial Sequence: Synthetic oligonucleotide
cgagaucaugccguuagua

SEQ ID NO: 891799 - RNA, 19 nt, Artificial Sequence
  Description of Artificial Sequence: Synthetic oligonucleotide
cauaggcuaaaggcucauu

SEQ ID NO: 891800 - RNA, 19 nt, Artificial Sequence
  Description of Artificial Sequence: Synthetic oligonucleotide
gugcugcaacgcucagacu

SEQ ID NO: 891801 - RNA, 19 nt, Artificial Sequence
  Description of Artificial Sequence: Synthetic oligonucleotide
cccaugugagaaucccacu

SEQ ID NO: 891802 - RNA, 19 nt, Artificial Sequence
  Description of Artificial Sequence: Synthetic oligonucleotide
gcucagacucccaguauuu

SEQ ID NO: 891803 - RNA, 19 nt, Artificial Sequence
  Description of Artificial Sequence: Synthetic oligonucleotide
cgguagcugcgccuguguc

SEQ ID NO: 891804 - RNA, 19 nt, Artificial Sequence
  Description of Artificial Sequence: Synthetic oligonucleotide
cccguagcaccagcuugug

SEQ ID NO: 891805 - RNA, 19 nt, Artificial Sequence
  Description of Artificial Sequence: Synthetic oligonucleotide
cugcgccuguguccccaga

SEQ ID NO: 891806 - RNA, 19 nt, Artificial Sequence
  Description of Artificial Sequence: Synthetic oligonucleotide
gccuggacacuaaucucau

SEQ ID NO: 891807 - RNA, 19 nt, Artificial Sequence
  Description of Artificial Sequence: Synthetic oligonucleotide
cugccgggguugguggugu

SEQ ID NO: 891808 - RNA, 19 nt, Artificial Sequence
  Description of Artificial Sequence: Synthetic oligonucleotide
ccuggcgcucuugcgagua

SEQ ID NO: 891809 - RNA, 19 nt, Artificial Sequence
  Description of Artificial Sequence: Synthetic oligonucleotide
ccugggcgcucaggucugc

SEQ ID NO: 891810 - RNA, 19 nt, Artificial Sequence
  Description of Artificial Sequence: Synthetic oligonucleotide
ccgagaucaugccguuagu

SEQ ID NO: 891811 - RNA, 19 nt, Artificial Sequence
  Description of Artificial Sequence: Synthetic oligonucleotide
ccguagcaccagcuugugu

SEQ ID NO: 891812 - RNA, 19 nt, Artificial Sequence
  Description of Artificial Sequence: Synthetic oligonucleotide
ccugggcgcuaaagaaaau

SEQ ID NO: 891813 - RNA, 19 nt, Artificial Sequence
  Description of Artificial Sequence: Synthetic oligonucleotide
ggacggcaucaaggaaggu

SEQ ID NO: 891814 - RNA, 19 nt, Artificial Sequence
  Description of Artificial Sequence: Synthetic oligonucleotide
gccuggcgcucuugcgagu

SEQ ID NO: 891815 - RNA, 19 nt, Artificial Sequence
  Description of Artificial Sequence: Synthetic oligonucleotide
ccgggguuggugguguuuu

SEQ ID NO: 891816 - RNA, 19 nt, Artificial Sequence
  Description of Artificial Sequence: Synthetic oligonucleotide
cccaaccccucaggggugu

SEQ ID NO: 891817 - RNA, 19 nt, Artificial Sequence
  Description of Artificial Sequence: Synthetic oligonucleotide
gccgggguuggugguguuu

SEQ ID NO: 891818 - RNA, 19 nt, Artificial Sequence
  Description of Artificial Sequence: Synthetic oligonucleotide
ccaaccccucaggggugua

SEQ ID NO: 891819 - RNA, 19 nt, Artificial Sequence
  Description of Artificial Sequence: Synthetic oligonucleotide
aacgguaagcaacagaggc

SEQ ID NO: 891820 - RNA, 19 nt, Artificial Sequence
  Description of Artificial Sequence: Synthetic oligonucleotide
acucauuuaaguuucuucc

SEQ ID NO: 891821 - RNA, 19 nt, Artificial Sequence
  Description of Artificial Sequence: Synthetic oligonucleotide
aagaguuuagacccgacuc

SEQ ID NO: 891822 - RNA, 19 nt, Artificial Sequence
  Description of Artificial Sequence: Synthetic oligonucleotide
aacucauuuaaguuucuuc

SEQ ID NO: 891823 - RNA, 19 nt, Artificial Sequence
  Description of Artificial Sequence: Synthetic oligonucleotide
aauucguucucucucuuuc

SEQ ID NO: 891824 - RNA, 19 nt, Artificial Sequence
  Description of Artificial Sequence: Synthetic oligonucleotide
uucgccauugucuaaaacc

SEQ ID NO: 891825 - RNA, 19 nt, Artificial Sequence
  Description of Artificial Sequence: Synthetic oligonucleotide
caucaguugaggaaaaucc

SEQ ID NO: 891826 - RNA, 19 nt, Artificial Sequence
  Description of Artificial Sequence: Synthetic oligonucleotide
acugcgauauucucgauuc

SEQ ID NO: 891827 - RNA, 19 nt, Artificial Sequence
  Description of Artificial Sequence: Synthetic oligonucleotide
gacgccaucauguucacag

SEQ ID NO: 891828 - RNA, 19 nt, Artificial Sequence
  Description of Artificial Sequence: Synthetic oligonucleotide
gcuucaaguacucagaucc

SEQ ID NO: 891829 - RNA, 19 nt, Artificial Sequence
  Description of Artificial Sequence: Synthetic oligonucleotide
gauggcacgggucagagac

SEQ ID NO: 891830 - RNA, 19 nt, Artificial Sequence
  Description of Artificial Sequence: Synthetic oligonucleotide
auuacaaugccuggagucc

SEQ ID NO: 891831 - RNA, 19 nt, Artificial Sequence
  Description of Artificial Sequence: Synthetic oligonucleotide
uguagguugaacugcacca

SEQ ID NO: 891832 - RNA, 19 nt, Artificial Sequence
  Description of Artificial Sequence: Synthetic oligonucleotide
aacgguguggaagaugcgc

SEQ ID NO: 891833 - RNA, 19 nt, Artificial Sequence
  Description of Artificial Sequence: Synthetic oligonucleotide
uucacagcggacgauaagg

SEQ ID NO: 891834 - RNA, 19 nt, Artificial Sequence
  Description of Artificial Sequence: Synthetic oligonucleotide
gacacuuccaaguagcgca

SEQ ID NO: 891835 - RNA, 19 nt, Artificial Sequence
  Description of Artificial Sequence: Synthetic oligonucleotide
gaucacaggagucaugaac

SEQ ID NO: 891836 - RNA, 19 nt, Artificial Sequence
  Description of Artificial Sequence: Synthetic oligonucleotide
ugcgguaacgguaagcaac

SEQ ID NO: 891837 - RNA, 19 nt, Artificial Sequence
  Description of Artificial Sequence: Synthetic oligonucleotide
aacgccauuacaaugccug

SEQ ID NO: 891838 - RNA, 19 nt, Artificial Sequence
  Description of Artificial Sequence: Synthetic oligonucleotide
aguugaggaaaauccaucu

SEQ ID NO: 891839 - RNA, 19 nt, Artificial Sequence
  Description of Artificial Sequence: Synthetic oligonucleotide
agcgaauucguucucucuc

SEQ ID NO: 891840 - RNA, 19 nt, Artificial Sequence
  Description of Artificial Sequence: Synthetic oligonucleotide
acauauccgagcuucaagu

SEQ ID NO: 891841 - RNA, 19 nt, Artificial Sequence
  Description of Artificial Sequence: Synthetic oligonucleotide
gaugacauggcgugaggag

SEQ ID NO: 891842 - RNA, 19 nt, Artificial Sequence
  Description of Artificial Sequence: Synthetic oligonucleotide
gguaccgggacacauaucc

SEQ ID NO: 891843 - RNA, 19 nt, Artificial Sequence
  Description of Artificial Sequence: Synthetic oligonucleotide
ucugcaagcgaauucguuc

SEQ ID NO: 891844 - RNA, 19 nt, Artificial Sequence
  Description of Artificial Sequence: Synthetic oligonucleotide
uccuuuacgugguaccggg

SEQ ID NO: 891845 - RNA, 19 nt, Artificial Sequence
  Description of Artificial Sequence: Synthetic oligonucleotide
gacgauaaggucaauguca

SEQ ID NO: 891846 - RNA, 19 nt, Artificial Sequence
  Description of Artificial Sequence: Synthetic oligonucleotide
acuucaacugaagagucuc

SEQ ID NO: 891847 - RNA, 19 nt, Artificial Sequence
  Description of Artificial Sequence: Synthetic oligonucleotide
guaacgguguggaagaugc

SEQ ID NO: 891848 - RNA, 19 nt, Artificial Sequence
  Description of Artificial Sequence: Synthetic oligonucleotide
aguugcgcgcgcaagagcc

SEQ ID NO: 891849 - RNA, 19 nt, Artificial Sequence
  Description of Artificial Sequence: Synthetic oligonucleotide
aguacucagauccggcuag

SEQ ID NO: 891850 - RNA, 19 nt, Artificial Sequence
  Description of Artificial Sequence: Synthetic oligonucleotide
uauccgagcuucaaguacu

SEQ ID NO: 891851 - RNA, 19 nt, Artificial Sequence
  Description of Artificial Sequence: Synthetic oligonucleotide
uucaaguacucagauccgg

SEQ ID NO: 891852 - RNA, 19 nt, Artificial Sequence
  Description of Artificial Sequence: Synthetic oligonucleotide
ucagauccggcuagcaaag

SEQ ID NO: 891853 - RNA, 19 nt, Artificial Sequence
  Description of Artificial Sequence: Synthetic oligonucleotide
aacacacgaaggcaccaag

SEQ ID NO: 891854 - RNA, 19 nt, Artificial Sequence
  Description of Artificial Sequence: Synthetic oligonucleotide
uaacgguaagcaacagagg

SEQ ID NO: 891855 - RNA, 19 nt, Artificial Sequence
  Description of Artificial Sequence: Synthetic oligonucleotide
aaucucauccgguuccgcu

SEQ ID NO: 891856 - RNA, 19 nt, Artificial Sequence
  Description of Artificial Sequence: Synthetic oligonucleotide
ucgaagucagaguuguccc

SEQ ID NO: 891857 - RNA, 19 nt, Artificial Sequence
  Description of Artificial Sequence: Synthetic oligonucleotide
uaucccgaaacuguucagg

SEQ ID NO: 891858 - RNA, 19 nt, Artificial Sequence
  Description of Artificial Sequence: Synthetic oligonucleotide
gaaggguuguccuggauca

SEQ ID NO: 891859 - RNA, 19 nt, Artificial Sequence
  Description of Artificial Sequence: Synthetic oligonucleotide
ugaacuucgccauugucua

SEQ ID NO: 891860 - RNA, 19 nt, Artificial Sequence
  Description of Artificial Sequence: Synthetic oligonucleotide
ggcgaucucauucuuaucc

SEQ ID NO: 891861 - RNA, 19 nt, Artificial Sequence
  Description of Artificial Sequence: Synthetic oligonucleotide
aaagaagaguuuagacccg

SEQ ID NO: 891862 - RNA, 19 nt, Artificial Sequence
  Description of Artificial Sequence: Synthetic oligonucleotide
agaguuuagacccgacucu

SEQ ID NO: 891863 - RNA, 19 nt, Artificial Sequence
  Description of Artificial Sequence: Synthetic oligonucleotide
aagccaacucauuuaaguu

SEQ ID NO: 891864 - RNA, 19 nt, Artificial Sequence
  Description of Artificial Sequence: Synthetic oligonucleotide
caugacgccaucauguuca

SEQ ID NO: 891865 - RNA, 19 nt, Artificial Sequence
  Description of Artificial Sequence: Synthetic oligonucleotide
gagacugcgauauucucga

SEQ ID NO: 891866 - RNA, 19 nt, Artificial Sequence
  Description of Artificial Sequence: Synthetic oligonucleotide
ugcgaacuucaacugaaga

SEQ ID NO: 891867 - RNA, 19 nt, Artificial Sequence
  Description of Artificial Sequence: Synthetic oligonucleotide
cuguucaggaacugcacag

SEQ ID NO: 891868 - RNA, 19 nt, Artificial Sequence
  Description of Artificial Sequence: Synthetic oligonucleotide
agagacugcgauauucucg

SEQ ID NO: 891869 - RNA, 19 nt, Artificial Sequence
  Description of Artificial Sequence: Synthetic oligonucleotide
gucaacgccauuacaaugc

SEQ ID NO: 891870 - RNA, 19 nt, Artificial Sequence
  Description of Artificial Sequence: Synthetic oligonucleotide
cacaaauggguuuggguug

SEQ ID NO: 891871 - RNA, 19 nt, Artificial Sequence
  Description of Artificial Sequence: Synthetic oligonucleotide
uuuacgugguaccgggaca

SEQ ID NO: 891872 - RNA, 19 nt, Artificial Sequence
  Description of Artificial Sequence: Synthetic oligonucleotide
aaaguugcgcgcgcaagag

SEQ ID NO: 891873 - RNA, 19 nt, Artificial Sequence
  Description of Artificial Sequence: Synthetic oligonucleotide
uuuagacccgacucucugc

SEQ ID NO: 891874 - RNA, 19 nt, Artificial Sequence
  Description of Artificial Sequence: Synthetic oligonucleotide
agucaacgccauuacaaug

SEQ ID NO: 891875 - RNA, 19 nt, Artificial Sequence
  Description of Artificial Sequence: Synthetic oligonucleotide
gauauucucgauucuccga

SEQ ID NO: 891876 - RNA, 19 nt, Artificial Sequence
  Description of Artificial Sequence: Synthetic oligonucleotide
acuagcuggaagcucgucu

SEQ ID NO: 891877 - RNA, 19 nt, Artificial Sequence
  Description of Artificial Sequence: Synthetic oligonucleotide
uaacuuguagcuguuguuc

SEQ ID NO: 891878 - RNA, 19 nt, Artificial Sequence
  Description of Artificial Sequence: Synthetic oligonucleotide
agucaugacgccaucaugu

SEQ ID NO: 891879 - RNA, 19 nt, Artificial Sequence
  Description of Artificial Sequence: Synthetic oligonucleotide
ugucucacuccaaauugcu

SEQ ID NO: 891880 - RNA, 19 nt, Artificial Sequence
  Description of Artificial Sequence: Synthetic oligonucleotide
ucaacgccauuacaaugcc

SEQ ID NO: 891881 - RNA, 19 nt, Artificial Sequence
  Description of Artificial Sequence: Synthetic oligonucleotide
gaguacuuguuuguguacc

SEQ ID NO: 891882 - RNA, 19 nt, Artificial Sequence
  Description of Artificial Sequence: Synthetic oligonucleotide
caucaguguggcuaggaug

SEQ ID NO: 891883 - RNA, 19 nt, Artificial Sequence
  Description of Artificial Sequence: Synthetic oligonucleotide
gcgaacuucaacugaagag

SEQ ID NO: 891884 - RNA, 19 nt, Artificial Sequence
  Description of Artificial Sequence: Synthetic oligonucleotide
uccagugcgccacagcacu

SEQ ID NO: 891885 - RNA, 19 nt, Artificial Sequence
  Description of Artificial Sequence: Synthetic oligonucleotide
gacgcggaugacuugcuug

SEQ ID NO: 891886 - RNA, 19 nt, Artificial Sequence
  Description of Artificial Sequence: Synthetic oligonucleotide
aaacugagaggaguacuug

SEQ ID NO: 891887 - RNA, 19 nt, Artificial Sequence
  Description of Artificial Sequence: Synthetic oligonucleotide
uagggcauaucccgaaacu

SEQ ID NO: 891888 - RNA, 19 nt, Artificial Sequence
  Description of Artificial Sequence: Synthetic oligonucleotide
ugugcgaaucucauccggu

SEQ ID NO: 891889 - RNA, 19 nt, Artificial Sequence
  Description of Artificial Sequence: Synthetic oligonucleotide
cucgauucuccgaggaacc

SEQ ID NO: 891890 - RNA, 19 nt, Artificial Sequence
  Description of Artificial Sequence: Synthetic oligonucleotide
agcguaggaugccccaggc

SEQ ID NO: 891891 - RNA, 19 nt, Artificial Sequence
  Description of Artificial Sequence: Synthetic oligonucleotide
ugaaggaauugccuucauc

SEQ ID NO: 891892 - RNA, 19 nt, Artificial Sequence
  Description of Artificial Sequence: Synthetic oligonucleotide
aaguacucagauccggcua

SEQ ID NO: 891893 - RNA, 19 nt, Artificial Sequence
  Description of Artificial Sequence: Synthetic oligonucleotide
aguagcgcauuuucaucag

SEQ ID NO: 891894 - RNA, 19 nt, Artificial Sequence
  Description of Artificial Sequence: Synthetic oligonucleotide
acagggucgucuguggugg

SEQ ID NO: 891895 - RNA, 19 nt, Artificial Sequence
  Description of Artificial Sequence: Synthetic oligonucleotide
cacauauccgagcuucaag

SEQ ID NO: 891896 - RNA, 19 nt, Artificial Sequence
  Description of Artificial Sequence: Synthetic oligonucleotide
uucuccgaggaaccaagac

SEQ ID NO: 891897 - RNA, 19 nt, Artificial Sequence
  Description of Artificial Sequence: Synthetic oligonucleotide
acagcggacgauaagguca

SEQ ID NO: 891898 - RNA, 19 nt, Artificial Sequence
  Description of Artificial Sequence: Synthetic oligonucleotide
gaaaguugcgcgcgcaaga

SEQ ID NO: 891899 - RNA, 19 nt, Artificial Sequence
  Description of Artificial Sequence: Synthetic oligonucleotide
uaccgggacacauauccga

SEQ ID NO: 891900 - RNA, 19 nt, Artificial Sequence
  Description of Artificial Sequence: Synthetic oligonucleotide
ggugguaacgguguggaag

SEQ ID NO: 891901 - RNA, 19 nt, Artificial Sequence
  Description of Artificial Sequence: Synthetic oligonucleotide
agcacucgaugucuugagg

SEQ ID NO: 891902 - RNA, 19 nt, Artificial Sequence
  Description of Artificial Sequence: Synthetic oligonucleotide
uuacaaugccuggaguccc

SEQ ID NO: 891903 - RNA, 19 nt, Artificial Sequence
  Description of Artificial Sequence: Synthetic oligonucleotide
ucacugcgaacuucaacug

SEQ ID NO: 891904 - RNA, 19 nt, Artificial Sequence
  Description of Artificial Sequence: Synthetic oligonucleotide
ucacagcggacgauaaggu

SEQ ID NO: 891905 - RNA, 19 nt, Artificial Sequence
  Description of Artificial Sequence: Synthetic oligonucleotide
accaagccaacucauuuaa

SEQ ID NO: 891906 - RNA, 19 nt, Artificial Sequence
  Description of Artificial Sequence: Synthetic oligonucleotide
ugaaggacacuuccccagu

SEQ ID NO: 891907 - RNA, 19 nt, Artificial Sequence
  Description of Artificial Sequence: Synthetic oligonucleotide
agcaggaaaguugcgcgcg

SEQ ID NO: 891908 - RNA, 19 nt, Artificial Sequence
  Description of Artificial Sequence: Synthetic oligonucleotide
caggaguacacagagcgug

SEQ ID NO: 891909 - RNA, 19 nt, Artificial Sequence
  Description of Artificial Sequence: Synthetic oligonucleotide
caaguagcgcauuuucauc

SEQ ID NO: 891910 - RNA, 19 nt, Artificial Sequence
  Description of Artificial Sequence: Synthetic oligonucleotide
acgguaagcaacagaggcg

SEQ ID NO: 891911 - RNA, 19 nt, Artificial Sequence
  Description of Artificial Sequence: Synthetic oligonucleotide
guagacgcggaugacuugc

SEQ ID NO: 891912 - RNA, 19 nt, Artificial Sequence
  Description of Artificial Sequence: Synthetic oligonucleotide
uguguaccucuugucuugg

SEQ ID NO: 891913 - RNA, 19 nt, Artificial Sequence
  Description of Artificial Sequence: Synthetic oligonucleotide
gagagucuaacuucugucu

SEQ ID NO: 891914 - RNA, 19 nt, Artificial Sequence
  Description of Artificial Sequence: Synthetic oligonucleotide
aagucagaguugucccucu

SEQ ID NO: 891915 - RNA, 19 nt, Artificial Sequence
  Description of Artificial Sequence: Synthetic oligonucleotide
ugcgaaucucauccgguuc

SEQ ID NO: 891916 - RNA, 19 nt, Artificial Sequence
  Description of Artificial Sequence: Synthetic oligonucleotide
acgccaucauguucacagc

SEQ ID NO: 891917 - RNA, 19 nt, Artificial Sequence
  Description of Artificial Sequence: Synthetic oligonucleotide
gaaggacacuuccccagug

SEQ ID NO: 891918 - RNA, 19 nt, Artificial Sequence
  Description of Artificial Sequence: Synthetic oligonucleotide
aacuucgccauugucuaaa

SEQ ID NO: 891919 - RNA, 19 nt, Artificial Sequence
  Description of Artificial Sequence: Synthetic oligonucleotide
ucaugacgccaucauguuc

SEQ ID NO: 891920 - RNA, 19 nt, Artificial Sequence
  Description of Artificial Sequence: Synthetic oligonucleotide
cucagauccggcuagcaaa

SEQ ID NO: 891921 - RNA, 19 nt, Artificial Sequence
  Description of Artificial Sequence: Synthetic oligonucleotide
auaucccgaaacuguucag

SEQ ID NO: 891922 - RNA, 19 nt, Artificial Sequence
  Description of Artificial Sequence: Synthetic oligonucleotide
gauccggcuagcaaagcac

SEQ ID NO: 891923 - RNA, 19 nt, Artificial Sequence
  Description of Artificial Sequence: Synthetic oligonucleotide
acggagguuccgcugugcg

SEQ ID NO: 891924 - RNA, 19 nt, Artificial Sequence
  Description of Artificial Sequence: Synthetic oligonucleotide
caccgcgcuaacuuguagc

SEQ ID NO: 891925 - RNA, 19 nt, Artificial Sequence
  Description of Artificial Sequence: Synthetic oligonucleotide
uguucacagcggacgauaa

SEQ ID NO: 891926 - RNA, 19 nt, Artificial Sequence
  Description of Artificial Sequence: Synthetic oligonucleotide
gugguaacgguguggaaga

SEQ ID NO: 891927 - RNA, 19 nt, Artificial Sequence
  Description of Artificial Sequence: Synthetic oligonucleotide
uaacgguguggaagaugcg

SEQ ID NO: 891928 - RNA, 19 nt, Artificial Sequence
  Description of Artificial Sequence: Synthetic oligonucleotide
uuacgugguaccgggacac

SEQ ID NO: 891929 - RNA, 19 nt, Artificial Sequence
  Description of Artificial Sequence: Synthetic oligonucleotide
uccggcuagcaaagcacag

SEQ ID NO: 891930 - RNA, 19 nt, Artificial Sequence
  Description of Artificial Sequence: Synthetic oligonucleotide
cauguuccggcgaucuuug

SEQ ID NO: 891931 - RNA, 19 nt, Artificial Sequence
  Description of Artificial Sequence: Synthetic oligonucleotide
accgcgcuaacuuguagcu

SEQ ID NO: 891932 - RNA, 19 nt, Artificial Sequence
  Description of Artificial Sequence: Synthetic oligonucleotide
agcaacagaggcgaucuca

SEQ ID NO: 891933 - RNA, 19 nt, Artificial Sequence
  Description of Artificial Sequence: Synthetic oligonucleotide
acgccauuacaaugccugg

SEQ ID NO: 891934 - RNA, 19 nt, Artificial Sequence
  Description of Artificial Sequence: Synthetic oligonucleotide
agcgugugcagcucaucag

SEQ ID NO: 891935 - RNA, 19 nt, Artificial Sequence
  Description of Artificial Sequence: Synthetic oligonucleotide
gcacucgaugucuugaggc

SEQ ID NO: 891936 - RNA, 19 nt, Artificial Sequence
  Description of Artificial Sequence: Synthetic oligonucleotide
guagggcauaucccgaaac

SEQ ID NO: 891937 - RNA, 19 nt, Artificial Sequence
  Description of Artificial Sequence: Synthetic oligonucleotide
gaagaguuuagacccgacu

SEQ ID NO: 891938 - RNA, 19 nt, Artificial Sequence
  Description of Artificial Sequence: Synthetic oligonucleotide
cugaaaggcugguagggca

SEQ ID NO: 891939 - RNA, 19 nt, Artificial Sequence
  Description of Artificial Sequence: Synthetic oligonucleotide
acaccuggguggaacacac

SEQ ID NO: 891940 - RNA, 19 nt, Artificial Sequence
  Description of Artificial Sequence: Synthetic oligonucleotide
gugaggaguccuuuacgug

SEQ ID NO: 891941 - RNA, 19 nt, Artificial Sequence
  Description of Artificial Sequence: Synthetic oligonucleotide
ggcuuaaacugcugggugc

SEQ ID NO: 891942 - RNA, 19 nt, Artificial Sequence
  Description of Artificial Sequence: Synthetic oligonucleotide
augacauggcgugaggagu

SEQ ID NO: 891943 - RNA, 19 nt, Artificial Sequence
  Description of Artificial Sequence: Synthetic oligonucleotide
gaagucagaguugucccuc

SEQ ID NO: 891944 - RNA, 19 nt, Artificial Sequence
  Description of Artificial Sequence: Synthetic oligonucleotide
guacuugcccuccuccagc

SEQ ID NO: 891945 - RNA, 19 nt, Artificial Sequence
  Description of Artificial Sequence: Synthetic oligonucleotide
uguagacgcggaugacuug

SEQ ID NO: 891946 - RNA, 19 nt, Artificial Sequence
  Description of Artificial Sequence: Synthetic oligonucleotide
cauccgguuccgcugguag

SEQ ID NO: 891947 - RNA, 19 nt, Artificial Sequence
  Description of Artificial Sequence: Synthetic oligonucleotide
acgcggaugacuugcuugu

SEQ ID NO: 891948 - RNA, 19 nt, Artificial Sequence
  Description of Artificial Sequence: Synthetic oligonucleotide
cacucauugaguguuuuga

SEQ ID NO: 891949 - RNA, 19 nt, Artificial Sequence
  Description of Artificial Sequence: Synthetic oligonucleotide
uuccgcugugcgaaucuca

SEQ ID NO: 891950 - RNA, 19 nt, Artificial Sequence
  Description of Artificial Sequence: Synthetic oligonucleotide
uaguacuccagugcgccac

SEQ ID NO: 891951 - RNA, 19 nt, Artificial Sequence
  Description of Artificial Sequence: Synthetic oligonucleotide
gaguuuagacccgacucuc

SEQ ID NO: 891952 - RNA, 19 nt, Artificial Sequence
  Description of Artificial Sequence: Synthetic oligonucleotide
guucacagcggacgauaag

SEQ ID NO: 891953 - RNA, 19 nt, Artificial Sequence
  Description of Artificial Sequence: Synthetic oligonucleotide
accugcgguaacgguaagc

SEQ ID NO: 891954 - RNA, 19 nt, Artificial Sequence
  Description of Artificial Sequence: Synthetic oligonucleotide
uccgcugugcgaaucucau

SEQ ID NO: 891955 - RNA, 19 nt, Artificial Sequence
  Description of Artificial Sequence: Synthetic oligonucleotide
ggaaggguuguccuggauc

SEQ ID NO: 891956 - RNA, 19 nt, Artificial Sequence
  Description of Artificial Sequence: Synthetic oligonucleotide
gcgaaucucauccgguucc

SEQ ID NO: 891957 - RNA, 19 nt, Artificial Sequence
  Description of Artificial Sequence: Synthetic oligonucleotide
ccgagcuucaaguacucag

SEQ ID NO: 891958 - RNA, 19 nt, Artificial Sequence
  Description of Artificial Sequence: Synthetic oligonucleotide
uccgcugguaggcagucuu

SEQ ID NO: 891959 - RNA, 19 nt, Artificial Sequence
  Description of Artificial Sequence: Synthetic oligonucleotide
augacagccccacgcugag

SEQ ID NO: 891960 - RNA, 19 nt, Artificial Sequence
  Description of Artificial Sequence: Synthetic oligonucleotide
cuccgcagaggcuucucgc

SEQ ID NO: 891961 - RNA, 19 nt, Artificial Sequence
  Description of Artificial Sequence: Synthetic oligonucleotide
agguccaccgcgcuaacuu

SEQ ID NO: 891962 - RNA, 19 nt, Artificial Sequence
  Description of Artificial Sequence: Synthetic oligonucleotide
cgcugugcgaaucucaucc

SEQ ID NO: 891963 - RNA, 19 nt, Artificial Sequence
  Description of Artificial Sequence: Synthetic oligonucleotide
gaagcucgucucauccucc

SEQ ID NO: 891964 - RNA, 19 nt, Artificial Sequence
  Description of Artificial Sequence: Synthetic oligonucleotide
guuccggcgaucuuugucu

SEQ ID NO: 891965 - RNA, 19 nt, Artificial Sequence
  Description of Artificial Sequence: Synthetic oligonucleotide
acugcgaacuucaacugaa

SEQ ID NO: 891966 - RNA, 19 nt, Artificial Sequence
  Description of Artificial Sequence: Synthetic oligonucleotide
gcagucuucugugugcgcg

SEQ ID NO: 891967 - RNA, 19 nt, Artificial Sequence
  Description of Artificial Sequence: Synthetic oligonucleotide
uguccacuagcuggaagcu

SEQ ID NO: 891968 - RNA, 19 nt, Artificial Sequence
  Description of Artificial Sequence: Synthetic oligonucleotide
uacuccagugcgccacagc

SEQ ID NO: 891969 - RNA, 19 nt, Artificial Sequence
  Description of Artificial Sequence: Synthetic oligonucleotide
guaagcaacagaggcgauc

SEQ ID NO: 891970 - RNA, 19 nt, Artificial Sequence
  Description of Artificial Sequence: Synthetic oligonucleotide
acagcacucgaugucuuga

SEQ ID NO: 891971 - RNA, 19 nt, Artificial Sequence
  Description of Artificial Sequence: Synthetic oligonucleotide
caaacacacuuaaacuuua

SEQ ID NO: 891972 - RNA, 19 nt, Artificial Sequence
  Description of Artificial Sequence: Synthetic oligonucleotide
cagagacugcgauauucuc

SEQ ID NO: 891973 - RNA, 19 nt, Artificial Sequence
  Description of Artificial Sequence: Synthetic oligonucleotide
uuccggaugacagggucgu

SEQ ID NO: 891974 - RNA, 19 nt, Artificial Sequence
  Description of Artificial Sequence: Synthetic oligonucleotide
ugaagagucucgggguuuc

SEQ ID NO: 891975 - RNA, 19 nt, Artificial Sequence
  Description of Artificial Sequence: Synthetic oligonucleotide
ggacacauauccgagcuuc

SEQ ID NO: 891976 - RNA, 19 nt, Artificial Sequence
  Description of Artificial Sequence: Synthetic oligonucleotide
ucccgaaacuguucaggaa

SEQ ID NO: 891977 - RNA, 19 nt, Artificial Sequence
  Description of Artificial Sequence: Synthetic oligonucleotide
ugguagggcauaucccgaa

SEQ ID NO: 891978 - RNA, 19 nt, Artificial Sequence
  Description of Artificial Sequence: Synthetic oligonucleotide
cacagcggacgauaagguc

SEQ ID NO: 891979 - RNA, 19 nt, Artificial Sequence
  Description of Artificial Sequence: Synthetic oligonucleotide
ggcgaucuuugucucuacg

SEQ ID NO: 891980 - RNA, 19 nt, Artificial Sequence
  Description of Artificial Sequence: Synthetic oligonucleotide
cuucgccauugucuaaaac

SEQ ID NO: 891981 - RNA, 19 nt, Artificial Sequence
  Description of Artificial Sequence: Synthetic oligonucleotide
cugcccaagcacaccuggg

SEQ ID NO: 891982 - RNA, 19 nt, Artificial Sequence
  Description of Artificial Sequence: Synthetic oligonucleotide
ggacgauaaggucaauguc

SEQ ID NO: 891983 - RNA, 19 nt, Artificial Sequence
  Description of Artificial Sequence: Synthetic oligonucleotide
ugacacagcguaggaugcc

SEQ ID NO: 891984 - RNA, 19 nt, Artificial Sequence
  Description of Artificial Sequence: Synthetic oligonucleotide
guaccgggacacauauccg

SEQ ID NO: 891985 - RNA, 19 nt, Artificial Sequence
  Description of Artificial Sequence: Synthetic oligonucleotide
cgauauucucgauucuccg

SEQ ID NO: 891986 - RNA, 19 nt, Artificial Sequence
  Description of Artificial Sequence: Synthetic oligonucleotide
ugcaagcgaauucguucuc

SEQ ID NO: 891987 - RNA, 19 nt, Artificial Sequence
  Description of Artificial Sequence: Synthetic oligonucleotide
gcgauauucucgauucucc

SEQ ID NO: 891988 - RNA, 19 nt, Artificial Sequence
  Description of Artificial Sequence: Synthetic oligonucleotide
ggggaaauuauaucuuucu

SEQ ID NO: 891989 - RNA, 19 nt, Artificial Sequence
  Description of Artificial Sequence: Synthetic oligonucleotide
uugaaggaauugccuucau

SEQ ID NO: 891990 - RNA, 19 nt, Artificial Sequence
  Description of Artificial Sequence: Synthetic oligonucleotide
gccaacucauuuaaguuuc

SEQ ID NO: 891991 - RNA, 19 nt, Artificial Sequence
  Description of Artificial Sequence: Synthetic oligonucleotide
gcgcauuuucaucaguuga

SEQ ID NO: 891992 - RNA, 19 nt, Artificial Sequence
  Description of Artificial Sequence: Synthetic oligonucleotide
cauauccgagcuucaagua

SEQ ID NO: 891993 - RNA, 19 nt, Artificial Sequence
  Description of Artificial Sequence: Synthetic oligonucleotide
uagacgcggaugacuugcu

SEQ ID NO: 891994 - RNA, 19 nt, Artificial Sequence
  Description of Artificial Sequence: Synthetic oligonucleotide
ggaaaguugcgcgcgcaag

SEQ ID NO: 891995 - RNA, 19 nt, Artificial Sequence
  Description of Artificial Sequence: Synthetic oligonucleotide
gcgugaggaguccuuuacg

SEQ ID NO: 891996 - RNA, 19 nt, Artificial Sequence
  Description of Artificial Sequence: Synthetic oligonucleotide
gaaucucauccgguuccgc

SEQ ID NO: 891997 - RNA, 19 nt, Artificial Sequence
  Description of Artificial Sequence: Synthetic oligonucleotide
aggaaaguugcgcgcgcaa

SEQ ID NO: 891998 - RNA, 19 nt, Artificial Sequence
  Description of Artificial Sequence: Synthetic oligonucleotide
gacccgacucucugcacuc

SEQ ID NO: 891999 - RNA, 19 nt, Artificial Sequence
  Description of Artificial Sequence: Synthetic oligonucleotide
ucacuccaaauugcuucug

SEQ ID NO: 892000 - RNA, 19 nt, Artificial Sequence
  Description of Artificial Sequence: Synthetic oligonucleotide
gcacgggucagagacugcg

SEQ ID NO: 892001 - RNA, 19 nt, Artificial Sequence
  Description of Artificial Sequence: Synthetic oligonucleotide
cugcaagcgaauucguucu

SEQ ID NO: 892002 - RNA, 19 nt, Artificial Sequence
  Description of Artificial Sequence: Synthetic oligonucleotide
acgguguggaagaugcgcu

SEQ ID NO: 892003 - RNA, 19 nt, Artificial Sequence
  Description of Artificial Sequence: Synthetic oligonucleotide
aggguuguccuggaucaca

SEQ ID NO: 892004 - RNA, 19 nt, Artificial Sequence
  Description of Artificial Sequence: Synthetic oligonucleotide
gacauggcgugaggagucc

SEQ ID NO: 892005 - RNA, 19 nt, Artificial Sequence
  Description of Artificial Sequence: Synthetic oligonucleotide
aguuuagacccgacucucu

SEQ ID NO: 892006 - RNA, 19 nt, Artificial Sequence
  Description of Artificial Sequence: Synthetic oligonucleotide
auguucacagcggacgaua

SEQ ID NO: 892007 - RNA, 19 nt, Artificial Sequence
  Description of Artificial Sequence: Synthetic oligonucleotide
caaacugagaggaguacuu

SEQ ID NO: 892008 - RNA, 19 nt, Artificial Sequence
  Description of Artificial Sequence: Synthetic oligonucleotide
uggcgagagauggcacggg

SEQ ID NO: 892009 - RNA, 19 nt, Artificial Sequence
  Description of Artificial Sequence: Synthetic oligonucleotide
cacugcgaacuucaacuga

SEQ ID NO: 892010 - RNA, 19 nt, Artificial Sequence
  Description of Artificial Sequence: Synthetic oligonucleotide
gguaacgguguggaagaug

SEQ ID NO: 892011 - RNA, 19 nt, Artificial Sequence
  Description of Artificial Sequence: Synthetic oligonucleotide
ggcgugaggaguccuuuac

SEQ ID NO: 892012 - RNA, 19 nt, Artificial Sequence
  Description of Artificial Sequence: Synthetic oligonucleotide
cgccguguccacuagcugg

SEQ ID NO: 892013 - RNA, 19 nt, Artificial Sequence
  Description of Artificial Sequence: Synthetic oligonucleotide
gacacauauccgagcuuca

SEQ ID NO: 892014 - RNA, 19 nt, Artificial Sequence
  Description of Artificial Sequence: Synthetic oligonucleotide
cccggauggcgagagaugg

SEQ ID NO: 892015 - RNA, 19 nt, Artificial Sequence
  Description of Artificial Sequence: Synthetic oligonucleotide
cacgcugagagucuaacuu

SEQ ID NO: 892016 - RNA, 19 nt, Artificial Sequence
  Description of Artificial Sequence: Synthetic oligonucleotide
acacauauccgagcuucaa

SEQ ID NO: 892017 - RNA, 19 nt, Artificial Sequence
  Description of Artificial Sequence: Synthetic oligonucleotide
ggugaugcggucaaaggcu

SEQ ID NO: 892018 - RNA, 19 nt, Artificial Sequence
  Description of Artificial Sequence: Synthetic oligonucleotide
auccggcuagcaaagcaca

SEQ ID NO: 892019 - RNA, 19 nt, Artificial Sequence
  Description of Artificial Sequence: Synthetic oligonucleotide
gccggaaggguuguccugg

SEQ ID NO: 892020 - RNA, 19 nt, Artificial Sequence
  Description of Artificial Sequence: Synthetic oligonucleotide
agugcgccacagcacucga

SEQ ID NO: 892021 - RNA, 19 nt, Artificial Sequence
  Description of Artificial Sequence: Synthetic oligonucleotide
aggaguacacagagcgugu

SEQ ID NO: 892022 - RNA, 19 nt, Artificial Sequence
  Description of Artificial Sequence: Synthetic oligonucleotide
acccgacucucugcacucc

SEQ ID NO: 892023 - RNA, 19 nt, Artificial Sequence
  Description of Artificial Sequence: Synthetic oligonucleotide
uacggagguuccgcugugc

SEQ ID NO: 892024 - RNA, 19 nt, Artificial Sequence
  Description of Artificial Sequence: Synthetic oligonucleotide
gacugcgauauucucgauu

SEQ ID NO: 892025 - RNA, 19 nt, Artificial Sequence
  Description of Artificial Sequence: Synthetic oligonucleotide
caguggcgaugacagcccc

SEQ ID NO: 892026 - RNA, 19 nt, Artificial Sequence
  Description of Artificial Sequence: Synthetic oligonucleotide
ugaugcggucaaaggcuuu

SEQ ID NO: 892027 - RNA, 19 nt, Artificial Sequence
  Description of Artificial Sequence: Synthetic oligonucleotide
uuccggcgaucuuugucuc

SEQ ID NO: 892028 - RNA, 19 nt, Artificial Sequence
  Description of Artificial Sequence: Synthetic oligonucleotide
uccggcgaucuuugucucu

SEQ ID NO: 892029 - RNA, 19 nt, Artificial Sequence
  Description of Artificial Sequence: Synthetic oligonucleotide
guugcgcgcgcaagagccg

SEQ ID NO: 892030 - RNA, 19 nt, Artificial Sequence
  Description of Artificial Sequence: Synthetic oligonucleotide
gaacacacgaaggcaccaa

SEQ ID NO: 892031 - RNA, 19 nt, Artificial Sequence
  Description of Artificial Sequence: Synthetic oligonucleotide
uccaccgcgcuaacuugua

SEQ ID NO: 892032 - RNA, 19 nt, Artificial Sequence
  Description of Artificial Sequence: Synthetic oligonucleotide
gcgaucucauucuuaucca

SEQ ID NO: 892033 - RNA, 19 nt, Artificial Sequence
  Description of Artificial Sequence: Synthetic oligonucleotide
ugcgcgccguguccacuag

SEQ ID NO: 892034 - RNA, 19 nt, Artificial Sequence
  Description of Artificial Sequence: Synthetic oligonucleotide
caccuggguggaacacacg

SEQ ID NO: 892035 - RNA, 19 nt, Artificial Sequence
  Description of Artificial Sequence: Synthetic oligonucleotide
agguuccgcugugcgaauc

SEQ ID NO: 892036 - RNA, 19 nt, Artificial Sequence
  Description of Artificial Sequence: Synthetic oligonucleotide
gaacuucgccauugucuaa

SEQ ID NO: 892037 - RNA, 19 nt, Artificial Sequence
  Description of Artificial Sequence: Synthetic oligonucleotide
ggagguuccgcugugcgaa

SEQ ID NO: 892038 - RNA, 19 nt, Artificial Sequence
  Description of Artificial Sequence: Synthetic oligonucleotide
gaauucguucucucucuuu

SEQ ID NO: 892039 - RNA, 19 nt, Artificial Sequence
  Description of Artificial Sequence: Synthetic oligonucleotide
gugguaccgggacacauau

SEQ ID NO: 892040 - RNA, 19 nt, Artificial Sequence
  Description of Artificial Sequence: Synthetic oligonucleotide
accucuugucuugguacgu

SEQ ID NO: 892041 - RNA, 19 nt, Artificial Sequence
  Description of Artificial Sequence: Synthetic oligonucleotide
cacagcguaggaugcccca

SEQ ID NO: 892042 - RNA, 19 nt, Artificial Sequence
  Description of Artificial Sequence: Synthetic oligonucleotide
cuacggagguuccgcugug

SEQ ID NO: 892043 - RNA, 19 nt, Artificial Sequence
  Description of Artificial Sequence: Synthetic oligonucleotide
guacucagauccggcuagc

SEQ ID NO: 892044 - RNA, 19 nt, Artificial Sequence
  Description of Artificial Sequence: Synthetic oligonucleotide
ugguaccgggacacauauc

SEQ ID NO: 892045 - RNA, 19 nt, Artificial Sequence
  Description of Artificial Sequence: Synthetic oligonucleotide
cuccaaugucccaggagua

SEQ ID NO: 892046 - RNA, 19 nt, Artificial Sequence
  Description of Artificial Sequence: Synthetic oligonucleotide
gcggacgauaaggucaaug

SEQ ID NO: 892047 - RNA, 19 nt, Artificial Sequence
  Description of Artificial Sequence: Synthetic oligonucleotide
ccugcgguaacgguaagca

SEQ ID NO: 892048 - RNA, 19 nt, Artificial Sequence
  Description of Artificial Sequence: Synthetic oligonucleotide
gaugccccaggcauucucu

SEQ ID NO: 892049 - RNA, 19 nt, Artificial Sequence
  Description of Artificial Sequence: Synthetic oligonucleotide
auucuccgaggaaccaaga

SEQ ID NO: 892050 - RNA, 19 nt, Artificial Sequence
  Description of Artificial Sequence: Synthetic oligonucleotide
uggcgugaggaguccuuua

SEQ ID NO: 892051 - RNA, 19 nt, Artificial Sequence
  Description of Artificial Sequence: Synthetic oligonucleotide
cagucaacgccauuacaau

SEQ ID NO: 892052 - RNA, 19 nt, Artificial Sequence
  Description of Artificial Sequence: Synthetic oligonucleotide
ucccacucauugaguguuu

SEQ ID NO: 892053 - RNA, 19 nt, Artificial Sequence
  Description of Artificial Sequence: Synthetic oligonucleotide
cagcggacgauaaggucaa

SEQ ID NO: 892054 - RNA, 19 nt, Artificial Sequence
  Description of Artificial Sequence: Synthetic oligonucleotide
gcaggaaaguugcgcgcgc

SEQ ID NO: 892055 - RNA, 19 nt, Artificial Sequence
  Description of Artificial Sequence: Synthetic oligonucleotide
ccauugucuaaaaccugca

SEQ ID NO: 892056 - RNA, 19 nt, Artificial Sequence
  Description of Artificial Sequence: Synthetic oligonucleotide
cagauccggcuagcaaagc

SEQ ID NO: 892057 - RNA, 19 nt, Artificial Sequence
  Description of Artificial Sequence: Synthetic oligonucleotide
agacgcggaugacuugcuu

SEQ ID NO: 892058 - RNA, 19 nt, Artificial Sequence
  Description of Artificial Sequence: Synthetic oligonucleotide
agcuggaagcucgucucau

SEQ ID NO: 892059 - RNA, 19 nt, Artificial Sequence
  Description of Artificial Sequence: Synthetic oligonucleotide
guacuccagugcgccacag

SEQ ID NO: 892060 - RNA, 19 nt, Artificial Sequence
  Description of Artificial Sequence: Synthetic oligonucleotide
uccgcguggugaugcgguc

SEQ ID NO: 892061 - RNA, 19 nt, Artificial Sequence
  Description of Artificial Sequence: Synthetic oligonucleotide
gcgguaacgguaagcaaca

SEQ ID NO: 892062 - RNA, 19 nt, Artificial Sequence
  Description of Artificial Sequence: Synthetic oligonucleotide
ugacgccaucauguucaca

SEQ ID NO: 892063 - RNA, 19 nt, Artificial Sequence
  Description of Artificial Sequence: Synthetic oligonucleotide
guagcgcauuuucaucagu

SEQ ID NO: 892064 - RNA, 19 nt, Artificial Sequence
  Description of Artificial Sequence: Synthetic oligonucleotide
cacaccuggguggaacaca

SEQ ID NO: 892065 - RNA, 19 nt, Artificial Sequence
  Description of Artificial Sequence: Synthetic oligonucleotide
agaggcgaucucauucuua

SEQ ID NO: 892066 - RNA, 19 nt, Artificial Sequence
  Description of Artificial Sequence: Synthetic oligonucleotide
acacuuccaaguagcgcau

SEQ ID NO: 892067 - RNA, 19 nt, Artificial Sequence
  Description of Artificial Sequence: Synthetic oligonucleotide
ggaacacacgaaggcacca

SEQ ID NO: 892068 - RNA, 19 nt, Artificial Sequence
  Description of Artificial Sequence: Synthetic oligonucleotide
ggaugccccaggcauucuc

SEQ ID NO: 892069 - RNA, 19 nt, Artificial Sequence
  Description of Artificial Sequence: Synthetic oligonucleotide
guagguugaacugcaccau

SEQ ID NO: 892070 - RNA, 19 nt, Artificial Sequence
  Description of Artificial Sequence: Synthetic oligonucleotide
acauggcgugaggaguccu

SEQ ID NO: 892071 - RNA, 19 nt, Artificial Sequence
  Description of Artificial Sequence: Synthetic oligonucleotide
ccgggacacauauccgagc

SEQ ID NO: 892072 - RNA, 19 nt, Artificial Sequence
  Description of Artificial Sequence: Synthetic oligonucleotide
ccaaguagcgcauuuucau

SEQ ID NO: 892073 - RNA, 19 nt, Artificial Sequence
  Description of Artificial Sequence: Synthetic oligonucleotide
cugagaggaguacuuguuu

SEQ ID NO: 892074 - RNA, 19 nt, Artificial Sequence
  Description of Artificial Sequence: Synthetic oligonucleotide
ugugcgcgccguguccacu

SEQ ID NO: 892075 - RNA, 19 nt, Artificial Sequence
  Description of Artificial Sequence: Synthetic oligonucleotide
cacgggucagagacugcga

SEQ ID NO: 892076 - RNA, 19 nt, Artificial Sequence
  Description of Artificial Sequence: Synthetic oligonucleotide
auggcgugaggaguccuuu

SEQ ID NO: 892077 - RNA, 19 nt, Artificial Sequence
  Description of Artificial Sequence: Synthetic oligonucleotide
gcgaauucguucucucucu

SEQ ID NO: 892078 - RNA, 19 nt, Artificial Sequence
  Description of Artificial Sequence: Synthetic oligonucleotide
cugcgguaacgguaagcaa

SEQ ID NO: 892079 - RNA, 19 nt, Artificial Sequence
  Description of Artificial Sequence: Synthetic oligonucleotide
ugguaacgguguggaagau

SEQ ID NO: 892080 - RNA, 19 nt, Artificial Sequence
  Description of Artificial Sequence: Synthetic oligonucleotide
gucaugacgccaucauguu

SEQ ID NO: 892081 - RNA, 19 nt, Artificial Sequence
  Description of Artificial Sequence: Synthetic oligonucleotide
ccgaggaaccaagacagca

SEQ ID NO: 892082 - RNA, 19 nt, Artificial Sequence
  Description of Artificial Sequence: Synthetic oligonucleotide
guuccgcugguaggcaguc

SEQ ID NO: 892083 - RNA, 19 nt, Artificial Sequence
  Description of Artificial Sequence: Synthetic oligonucleotide
guuccgcugugcgaaucuc

SEQ ID NO: 892084 - RNA, 19 nt, Artificial Sequence
  Description of Artificial Sequence: Synthetic oligonucleotide
cuccagucaugacgccauc

SEQ ID NO: 892085 - RNA, 19 nt, Artificial Sequence
  Description of Artificial Sequence: Synthetic oligonucleotide
caggaaaguugcgcgcgca

SEQ ID NO: 892086 - RNA, 19 nt, Artificial Sequence
  Description of Artificial Sequence: Synthetic oligonucleotide
ucauccgguuccgcuggua

SEQ ID NO: 892087 - RNA, 19 nt, Artificial Sequence
  Description of Artificial Sequence: Synthetic oligonucleotide
gugcgaaucucauccgguu

SEQ ID NO: 892088 - RNA, 19 nt, Artificial Sequence
  Description of Artificial Sequence: Synthetic oligonucleotide
aggcaccaagccaacucau

SEQ ID NO: 892089 - RNA, 19 nt, Artificial Sequence
  Description of Artificial Sequence: Synthetic oligonucleotide
cgguaagcaacagaggcga

SEQ ID NO: 892090 - RNA, 19 nt, Artificial Sequence
  Description of Artificial Sequence: Synthetic oligonucleotide
ggauggcgagagauggcac

SEQ ID NO: 892091 - RNA, 19 nt, Artificial Sequence
  Description of Artificial Sequence: Synthetic oligonucleotide
cggacgauaaggucaaugu

SEQ ID NO: 892092 - RNA, 19 nt, Artificial Sequence
  Description of Artificial Sequence: Synthetic oligonucleotide
ggucgucuguggugguaac

SEQ ID NO: 892093 - RNA, 19 nt, Artificial Sequence
  Description of Artificial Sequence: Synthetic oligonucleotide
uuccgcugguaggcagucu

SEQ ID NO: 892094 - RNA, 19 nt, Artificial Sequence
  Description of Artificial Sequence: Synthetic oligonucleotide
cacuagcuggaagcucguc

SEQ ID NO: 892095 - RNA, 19 nt, Artificial Sequence
  Description of Artificial Sequence: Synthetic oligonucleotide
cuccgcguggugaugcggu

SEQ ID NO: 892096 - RNA, 19 nt, Artificial Sequence
  Description of Artificial Sequence: Synthetic oligonucleotide
ccggauggcgagagauggc

SEQ ID NO: 892097 - RNA, 19 nt, Artificial Sequence
  Description of Artificial Sequence: Synthetic oligonucleotide
caccugcgguaacgguaag

SEQ ID NO: 892098 - RNA, 19 nt, Artificial Sequence
  Description of Artificial Sequence: Synthetic oligonucleotide
caccauguuccggcgaucu

SEQ ID NO: 892099 - RNA, 19 nt, Artificial Sequence
  Description of Artificial Sequence: Synthetic oligonucleotide
cgugaggaguccuuuacgu

SEQ ID NO: 892100 - RNA, 19 nt, Artificial Sequence
  Description of Artificial Sequence: Synthetic oligonucleotide
cccacgcugagagucuaac

SEQ ID NO: 892101 - RNA, 19 nt, Artificial Sequence
  Description of Artificial Sequence: Synthetic oligonucleotide
gcgagagauggcacggguc

SEQ ID NO: 892102 - RNA, 19 nt, Artificial Sequence
  Description of Artificial Sequence: Synthetic oligonucleotide
gcuccgcguggugaugcgg

SEQ ID NO: 892103 - RNA, 19 nt, Artificial Sequence
  Description of Artificial Sequence: Synthetic oligonucleotide
gugugcgcgccguguccac

SEQ ID NO: 892104 - RNA, 19 nt, Artificial Sequence
  Description of Artificial Sequence: Synthetic oligonucleotide
cucgggguuucugugacuu

SEQ ID NO: 892105 - RNA, 19 nt, Artificial Sequence
  Description of Artificial Sequence: Synthetic oligonucleotide
gcguaggaugccccaggca

SEQ ID NO: 892106 - RNA, 19 nt, Artificial Sequence
  Description of Artificial Sequence: Synthetic oligonucleotide
ccaccgcgcuaacuuguag

SEQ ID NO: 892107 - RNA, 19 nt, Artificial Sequence
  Description of Artificial Sequence: Synthetic oligonucleotide
cuccgcaggcccggauggc

SEQ ID NO: 892108 - RNA, 19 nt, Artificial Sequence
  Description of Artificial Sequence: Synthetic oligonucleotide
ggcgagagauggcacgggu

SEQ ID NO: 892109 - RNA, 19 nt, Artificial Sequence
  Description of Artificial Sequence: Synthetic oligonucleotide
cgcgcuaacuuguagcugu

SEQ ID NO: 892110 - RNA, 19 nt, Artificial Sequence
  Description of Artificial Sequence: Synthetic oligonucleotide
cacaggggccccagccgga

SEQ ID NO: 892111 - RNA, 19 nt, Artificial Sequence
  Description of Artificial Sequence: Synthetic oligonucleotide
cucgcuccgcguggugaug

SEQ ID NO: 892112 - RNA, 19 nt, Artificial Sequence
  Description of Artificial Sequence: Synthetic oligonucleotide
gggucgucuguggugguaa

SEQ ID NO: 892113 - RNA, 19 nt, Artificial Sequence
  Description of Artificial Sequence: Synthetic oligonucleotide
gugcgcgccguguccacua

SEQ ID NO: 892114 - RNA, 19 nt, Artificial Sequence
  Description of Artificial Sequence: Synthetic oligonucleotide
uccggaugacagggucguc

SEQ ID NO: 892115 - RNA, 19 nt, Artificial Sequence
  Description of Artificial Sequence: Synthetic oligonucleotide
guccaccgcgcuaacuugu

SEQ ID NO: 892116 - RNA, 19 nt, Artificial Sequence
  Description of Artificial Sequence: Synthetic oligonucleotide
cugcgauauucucgauucu

SEQ ID NO: 892117 - RNA, 19 nt, Artificial Sequence
  Description of Artificial Sequence: Synthetic oligonucleotide
gcgccguguccacuagcug

SEQ ID NO: 892118 - RNA, 19 nt, Artificial Sequence
  Description of Artificial Sequence: Synthetic oligonucleotide
ccuuuacgugguaccggga

SEQ ID NO: 892119 - RNA, 19 nt, Artificial Sequence
  Description of Artificial Sequence: Synthetic oligonucleotide
cggauggcgagagauggca

SEQ ID NO: 892120 - RNA, 19 nt, Artificial Sequence
  Description of Artificial Sequence: Synthetic oligonucleotide
ggcaagcuguagacgcgga

SEQ ID NO: 892121 - RNA, 19 nt, Artificial Sequence
  Description of Artificial Sequence: Synthetic oligonucleotide
gcccggauggcgagagaug

SEQ ID NO: 892122 - RNA, 19 nt, Artificial Sequence
  Description of Artificial Sequence: Synthetic oligonucleotide
cccagccgaucuccuuugc

SEQ ID NO: 892123 - RNA, 19 nt, Artificial Sequence
  Description of Artificial Sequence: Synthetic oligonucleotide
gagguuccgcugugcgaau

SEQ ID NO: 892124 - RNA, 19 nt, Artificial Sequence
  Description of Artificial Sequence: Synthetic oligonucleotide
ccgcugguaggcagucuuc

SEQ ID NO: 892125 - RNA, 19 nt, Artificial Sequence
  Description of Artificial Sequence: Synthetic oligonucleotide
ccgcugugcgaaucucauc

SEQ ID NO: 892126 - RNA, 19 nt, Artificial Sequence
  Description of Artificial Sequence: Synthetic oligonucleotide
cugaagagucucgggguuu

SEQ ID NO: 892127 - RNA, 19 nt, Artificial Sequence
  Description of Artificial Sequence: Synthetic oligonucleotide
cgggacacauauccgagcu

SEQ ID NO: 892128 - RNA, 19 nt, Artificial Sequence
  Description of Artificial Sequence: Synthetic oligonucleotide
gcuccagucaugacgccau

SEQ ID NO: 892129 - RNA, 19 nt, Artificial Sequence
  Description of Artificial Sequence: Synthetic oligonucleotide
ccgcgcuaacuuguagcug

SEQ ID NO: 892130 - RNA, 19 nt, Artificial Sequence
  Description of Artificial Sequence: Synthetic oligonucleotide
ggcccggauggcgagagau

SEQ ID NO: 892131 - RNA, 19 nt, Artificial Sequence
  Description of Artificial Sequence: Synthetic oligonucleotide
gcgcgccguguccacuagc

SEQ ID NO: 892132 - RNA, 19 nt, Artificial Sequence
  Description of Artificial Sequence: Synthetic oligonucleotide
cgcuaacuuguagcuguug

SEQ ID NO: 892133 - RNA, 19 nt, Artificial Sequence
  Description of Artificial Sequence: Synthetic oligonucleotide
cgccauuacaaugccugga

SEQ ID NO: 892134 - RNA, 19 nt, Artificial Sequence
  Description of Artificial Sequence: Synthetic oligonucleotide
ccggaugacagggucgucu

SEQ ID NO: 892135 - RNA, 19 nt, Artificial Sequence
  Description of Artificial Sequence: Synthetic oligonucleotide
cgaagucagaguugucccu

SEQ ID NO: 892136 - RNA, 19 nt, Artificial Sequence
  Description of Artificial Sequence: Synthetic oligonucleotide
caagcacaccuggguggaa

SEQ ID NO: 892137 - RNA, 19 nt, Artificial Sequence
  Description of Artificial Sequence: Synthetic oligonucleotide
ccacgcugagagucuaacu

SEQ ID NO: 892138 - RNA, 19 nt, Artificial Sequence
  Description of Artificial Sequence: Synthetic oligonucleotide
gggacacauauccgagcuu

SEQ ID NO: 892139 - RNA, 19 nt, Artificial Sequence
  Description of Artificial Sequence: Synthetic oligonucleotide
cgugguaccgggacacaua

SEQ ID NO: 892140 - RNA, 19 nt, Artificial Sequence
  Description of Artificial Sequence: Synthetic oligonucleotide
agcggacgauaaggucaau

SEQ ID NO: 892141 - RNA, 19 nt, Artificial Sequence
  Description of Artificial Sequence: Synthetic oligonucleotide
cgcuccgcguggugaugcg

SEQ ID NO: 892142 - RNA, 19 nt, Artificial Sequence
  Description of Artificial Sequence: Synthetic oligonucleotide
ccgacucucugcacuccaa

SEQ ID NO: 892143 - RNA, 19 nt, Artificial Sequence
  Description of Artificial Sequence: Synthetic oligonucleotide
cgguaacgguaagcaacag

SEQ ID NO: 892144 - RNA, 19 nt, Artificial Sequence
  Description of Artificial Sequence: Synthetic oligonucleotide
gcaccauguuccggcgauc

SEQ ID NO: 892145 - RNA, 19 nt, Artificial Sequence
  Description of Artificial Sequence: Synthetic oligonucleotide
cggagguuccgcugugcga

SEQ ID NO: 892146 - RNA, 19 nt, Artificial Sequence
  Description of Artificial Sequence: Synthetic oligonucleotide
ccagccgaucuccuuugcu

SEQ ID NO: 892147 - RNA, 19 nt, Artificial Sequence
  Description of Artificial Sequence: Synthetic oligonucleotide
ccggcgaucuuugucucua

SEQ ID NO: 892148 - RNA, 19 nt, Artificial Sequence
  Description of Artificial Sequence: Synthetic oligonucleotide
ggggugaguugaaggaauu

SEQ ID NO: 892149 - RNA, 19 nt, Artificial Sequence
  Description of Artificial Sequence: Synthetic oligonucleotide
cggcgaucuuugucucuac

SEQ ID NO: 892150 - RNA, 19 nt, Artificial Sequence
  Description of Artificial Sequence: Synthetic oligonucleotide
ggcaccaagccaacucauu

SEQ ID NO: 892151 - RNA, 19 nt, Artificial Sequence
  Description of Artificial Sequence: Synthetic oligonucleotide
cucauccgguuccgcuggu

SEQ ID NO: 892152 - RNA, 19 nt, Artificial Sequence
  Description of Artificial Sequence: Synthetic oligonucleotide
gguaagcaacagaggcgau

SEQ ID NO: 892153 - RNA, 19 nt, Artificial Sequence
  Description of Artificial Sequence: Synthetic oligonucleotide
ccgaucuccuuugcugaaa

SEQ ID NO: 892154 - RNA, 19 nt, Artificial Sequence
  Description of Artificial Sequence: Synthetic oligonucleotide
cggggugaguugaaggaau

SEQ ID NO: 892155 - RNA, 19 nt, Artificial Sequence
  Description of Artificial Sequence: Synthetic oligonucleotide
cgcgccguguccacuagcu

SEQ ID NO: 892156 - RNA, 19 nt, Artificial Sequence
  Description of Artificial Sequence: Synthetic oligonucleotide
cgggucagagacugcgaua

SEQ ID NO: 892157 - RNA, 19 nt, Artificial Sequence
  Description of Artificial Sequence: Synthetic oligonucleotide
ccgcguggugaugcgguca

SEQ ID NO: 892158 - RNA, 19 nt, Artificial Sequence
  Description of Artificial Sequence: Synthetic oligonucleotide
ccacuagcuggaagcucgu

SEQ ID NO: 892159 - RNA, 19 nt, Artificial Sequence
  Description of Artificial Sequence: Synthetic oligonucleotide
gugcgccacagcacucgau

SEQ ID NO: 892160 - RNA, 19 nt, Artificial Sequence
  Description of Artificial Sequence: Synthetic oligonucleotide
cccagccggaaggguuguc

SEQ ID NO: 892161 - RNA, 19 nt, Artificial Sequence
  Description of Artificial Sequence: Synthetic oligonucleotide
cgaugucuugaggcuccga

SEQ ID NO: 892162 - RNA, 19 nt, Artificial Sequence
  Description of Artificial Sequence: Synthetic oligonucleotide
gcguggugaugcggucaaa

SEQ ID NO: 892163 - RNA, 19 nt, Artificial Sequence
  Description of Artificial Sequence: Synthetic oligonucleotide
gcgcuaacuuguagcuguu

SEQ ID NO: 892164 - RNA, 19 nt, Artificial Sequence
  Description of Artificial Sequence: Synthetic oligonucleotide
ccguccagucugcaaccuu

SEQ ID NO: 892165 - RNA, 19 nt, Artificial Sequence
  Description of Artificial Sequence: Synthetic oligonucleotide
cccguccagucugcaaccu

SEQ ID NO: 892166 - RNA, 19 nt, Artificial Sequence
  Description of Artificial Sequence: Synthetic oligonucleotide
gaaaauucuagauaggcca

SEQ ID NO: 892167 - RNA, 19 nt, Artificial Sequence
  Description of Artificial Sequence: Synthetic oligonucleotide
uugagagacaaucucagag

SEQ ID NO: 892168 - RNA, 19 nt, Artificial Sequence
  Description of Artificial Sequence: Synthetic oligonucleotide
uucuagauaggccagcccg

SEQ ID NO: 892169 - RNA, 19 nt, Artificial Sequence
  Description of Artificial Sequence: Synthetic oligonucleotide
gagacaaucucagagaggg

SEQ ID NO: 892170 - RNA, 19 nt, Artificial Sequence
  Description of Artificial Sequence: Synthetic oligonucleotide
uuccgauugacaaugauga

SEQ ID NO: 892171 - RNA, 19 nt, Artificial Sequence
  Description of Artificial Sequence: Synthetic oligonucleotide
aagagauuuaguuggaccu

SEQ ID NO: 892172 - RNA, 19 nt, Artificial Sequence
  Description of Artificial Sequence: Synthetic oligonucleotide
ugagcaacauaucaucccg

SEQ ID NO: 892173 - RNA, 19 nt, Artificial Sequence
  Description of Artificial Sequence: Synthetic oligonucleotide
aaaucuguccucccgauca

SEQ ID NO: 892174 - RNA, 19 nt, Artificial Sequence
  Description of Artificial Sequence: Synthetic oligonucleotide
ugaucaauggccuggagug

SEQ ID NO: 892175 - RNA, 19 nt, Artificial Sequence
  Description of Artificial Sequence: Synthetic oligonucleotide
agccaagagauuuaguugg

SEQ ID NO: 892176 - RNA, 19 nt, Artificial Sequence
  Description of Artificial Sequence: Synthetic oligonucleotide
acuugauccucauuguccc

SEQ ID NO: 892177 - RNA, 19 nt, Artificial Sequence
  Description of Artificial Sequence: Synthetic oligonucleotide
acagcuuagccccaagugc

SEQ ID NO: 892178 - RNA, 19 nt, Artificial Sequence
  Description of Artificial Sequence: Synthetic oligonucleotide
agagacaucugaucaaugg

SEQ ID NO: 892179 - RNA, 19 nt, Artificial Sequence
  Description of Artificial Sequence: Synthetic oligonucleotide
ugaguugagcaacauauca

SEQ ID NO: 892180 - RNA, 19 nt, Artificial Sequence
  Description of Artificial Sequence: Synthetic oligonucleotide
gugauaaucaguguaagcc

SEQ ID NO: 892181 - RNA, 19 nt, Artificial Sequence
  Description of Artificial Sequence: Synthetic oligonucleotide
aaaucuggguccaaccugc

SEQ ID NO: 892182 - RNA, 19 nt, Artificial Sequence
  Description of Artificial Sequence: Synthetic oligonucleotide
agcacacuaacccacucgc

SEQ ID NO: 892183 - RNA, 19 nt, Artificial Sequence
  Description of Artificial Sequence: Synthetic oligonucleotide
ugccuugugauaaucagug

SEQ ID NO: 892184 - RNA, 19 nt, Artificial Sequence
  Description of Artificial Sequence: Synthetic oligonucleotide
agagcaucaaucccugcgc

SEQ ID NO: 892185 - RNA, 19 nt, Artificial Sequence
  Description of Artificial Sequence: Synthetic oligonucleotide
aucauucccuaucaaggcc

SEQ ID NO: 892186 - RNA, 19 nt, Artificial Sequence
  Description of Artificial Sequence: Synthetic oligonucleotide
  modified_base (7)..(7): a, c, u, g, unknown or other
agaugcncaaaacuugcag

SEQ ID NO: 892187 - RNA, 19 nt, Artificial Sequence
  Description of Artificial Sequence: Synthetic oligonucleotide
aaugucucguacuguccgc

SEQ ID NO: 892188 - RNA, 19 nt, Artificial Sequence
  Description of Artificial Sequence: Synthetic oligonucleotide
aaaugugcccaccaaccag

SEQ ID NO: 892189 - RNA, 19 nt, Artificial Sequence
  Description of Artificial Sequence: Synthetic oligonucleotide
aaaguccccgccaucaacc

SEQ ID NO: 892190 - RNA, 19 nt, Artificial Sequence
  Description of Artificial Sequence: Synthetic oligonucleotide
ggcuguaccaaauaggcgg

SEQ ID NO: 892191 - RNA, 19 nt, Artificial Sequence
  Description of Artificial Sequence: Synthetic oligonucleotide
ugauaaucaguguaagcca

SEQ ID NO: 892192 - RNA, 19 nt, Artificial Sequence
  Description of Artificial Sequence: Synthetic oligonucleotide
acgaccauaugacaggcgg

SEQ ID NO: 892193 - RNA, 19 nt, Artificial Sequence
  Description of Artificial Sequence: Synthetic oligonucleotide
  modified_base (5)..(5): a, c, u, g, unknown or other
augcncaaaacuugcagag

SEQ ID NO: 892194 - RNA, 19 nt, Artificial Sequence
  Description of Artificial Sequence: Synthetic oligonucleotide
ugcaucauucccuaucaag

SEQ ID NO: 892195 - RNA, 19 nt, Artificial Sequence
  Description of Artificial Sequence: Synthetic oligonucleotide
caagagauuuaguuggacc

SEQ ID NO: 892196 - RNA, 19 nt, Artificial Sequence
  Description of Artificial Sequence: Synthetic oligonucleotide
uguaagccaggccacaggc

SEQ ID NO: 892197 - RNA, 19 nt, Artificial Sequence
  Description of Artificial Sequence: Synthetic oligonucleotide
gggugaaaauucuagauag

SEQ ID NO: 892198 - RNA, 19 nt, Artificial Sequence
  Description of Artificial Sequence: Synthetic oligonucleotide
gaggcgagcacacuaaccc

SEQ ID NO: 892199 - RNA, 19 nt, Artificial Sequence
  Description of Artificial Sequence: Synthetic oligonucleotide
ugacgaaugugucaaacuc

SEQ ID NO: 892200 - RNA, 19 nt, Artificial Sequence
  Description of Artificial Sequence: Synthetic oligonucleotide
gaccacucgacccaugagg

SEQ ID NO: 892201 - RNA, 19 nt, Artificial Sequence
  Description of Artificial Sequence: Synthetic oligonucleotide
gacacgaccauaugacagg

SEQ ID NO: 892202 - RNA, 19 nt, Artificial Sequence
  Description of Artificial Sequence: Synthetic oligonucleotide
  modified_base (9)..(9): a, c, u, g, unknown or other
acagaugcncaaaacuugc

SEQ ID NO: 892203 - RNA, 19 nt, Artificial Sequence
  Description of Artificial Sequence: Synthetic oligonucleotide
aaaauucuagauaggccag

SEQ ID NO: 892204 - RNA, 19 nt, Artificial Sequence
  Description of Artificial Sequence: Synthetic oligonucleotide
guagccaaaggcuccaucc

SEQ ID NO: 892205 - RNA, 19 nt, Artificial Sequence
  Description of Artificial Sequence: Synthetic oligonucleotide
  modified_base (6)..(6): a, c, u, g, unknown or other
gaugcncaaaacuugcaga

SEQ ID NO: 892206 - RNA, 19 nt, Artificial Sequence
  Description of Artificial Sequence: Synthetic oligonucleotide
uuuguaccgaguccuuggg

SEQ ID NO: 892207 - RNA, 19 nt, Artificial Sequence
  Description of Artificial Sequence: Synthetic oligonucleotide
  modified_base (3)..(3): a, c, u, g, unknown or other
gcncaaaacuugcagagcg

SEQ ID NO: 892208 - RNA, 19 nt, Artificial Sequence
  Description of Artificial Sequence: Synthetic oligonucleotide
gaaaucuggguccaaccug

SEQ ID NO: 892209 - RNA, 19 nt, Artificial Sequence
  Description of Artificial Sequence: Synthetic oligonucleotide
gacgaaugugucaaacucg

SEQ ID NO: 892210 - RNA, 19 nt, Artificial Sequence
  Description of Artificial Sequence: Synthetic oligonucleotide
aagucugcucuuucugccg

SEQ ID NO: 892211 - RNA, 19 nt, Artificial Sequence
  Description of Artificial Sequence: Synthetic oligonucleotide
gacaaagcguacaccaugg

SEQ ID NO: 892212 - RNA, 19 nt, Artificial Sequence
  Description of Artificial Sequence: Synthetic oligonucleotide
aaccugggcaccuguuccc

SEQ ID NO: 892213 - RNA, 19 nt, Artificial Sequence
  Description of Artificial Sequence: Synthetic oligonucleotide
gauuuaguuggaccuugag

SEQ ID NO: 892214 - RNA, 19 nt, Artificial Sequence
  Description of Artificial Sequence: Synthetic oligonucleotide
aggcccuacacagaaaugg

SEQ ID NO: 892215 - RNA, 19 nt, Artificial Sequence
  Description of Artificial Sequence: Synthetic oligonucleotide
cuaucaaggccaucacugg

SEQ ID NO: 892216 - RNA, 19 nt, Artificial Sequence
  Description of Artificial Sequence: Synthetic oligonucleotide
caaagcguacaccaugggc

SEQ ID NO: 892217 - RNA, 19 nt, Artificial Sequence
  Description of Artificial Sequence: Synthetic oligonucleotide
aaacaggcaccagaccucg

SEQ ID NO: 892218 - RNA, 19 nt, Artificial Sequence
  Description of Artificial Sequence: Synthetic oligonucleotide
acacuaacccacucgcagg

SEQ ID NO: 892219 - RNA, 19 nt, Artificial Sequence
  Description of Artificial Sequence: Synthetic oligonucleotide
agcaucaaucccugcgccc

SEQ ID NO: 892220 - RNA, 19 nt, Artificial Sequence
  Description of Artificial Sequence: Synthetic oligonucleotide
uuaggguagguacaauguc

SEQ ID NO: 892221 - RNA, 19 nt, Artificial Sequence
  Description of Artificial Sequence: Synthetic oligonucleotide
acucgcaggcccuacacag

SEQ ID NO: 892222 - RNA, 19 nt, Artificial Sequence
  Description of Artificial Sequence: Synthetic oligonucleotide
uggaccuugagagacaauc

SEQ ID NO: 892223 - RNA, 19 nt, Artificial Sequence
  Description of Artificial Sequence: Synthetic oligonucleotide
ugacaggcggaaaucacac

SEQ ID NO: 892224 - RNA, 19 nt, Artificial Sequence
  Description of Artificial Sequence: Synthetic oligonucleotide
cacacuaacccacucgcag

SEQ ID NO: 892225 - RNA, 19 nt, Artificial Sequence
  Description of Artificial Sequence: Synthetic oligonucleotide
aagaccacucgacccauga

SEQ ID NO: 892226 - RNA, 19 nt, Artificial Sequence
  Description of Artificial Sequence: Synthetic oligonucleotide
ugcgguugaggacacgacc

SEQ ID NO: 892227 - RNA, 19 nt, Artificial Sequence
  Description of Artificial Sequence: Synthetic oligonucleotide
gguacaaugucucguacug

SEQ ID NO: 892228 - RNA, 19 nt, Artificial Sequence
  Description of Artificial Sequence: Synthetic oligonucleotide
ugugaagacaaagcguaca

SEQ ID NO: 892229 - RNA, 19 nt, Artificial Sequence
  Description of Artificial Sequence: Synthetic oligonucleotide
uugagcaugaaggaaccca

SEQ ID NO: 892230 - RNA, 19 nt, Artificial Sequence
  Description of Artificial Sequence: Synthetic oligonucleotide
gaucuccacacaccgcugg

SEQ ID NO: 892231 - RNA, 19 nt, Artificial Sequence
  Description of Artificial Sequence: Synthetic oligonucleotide
uguucccgagaaaucuggg

SEQ ID NO: 892232 - RNA, 19 nt, Artificial Sequence
  Description of Artificial Sequence: Synthetic oligonucleotide
uaaucaguguaagccaggc

SEQ ID NO: 892233 - RNA, 19 nt, Artificial Sequence
  Description of Artificial Sequence: Synthetic oligonucleotide
uaugacaggcggaaaucac

SEQ ID NO: 892234 - RNA, 19 nt, Artificial Sequence
  Description of Artificial Sequence: Synthetic oligonucleotide
ucuagauaggccagcccga

SEQ ID NO: 892235 - RNA, 19 nt, Artificial Sequence
  Description of Artificial Sequence: Synthetic oligonucleotide
uugugauaaucaguguaag

SEQ ID NO: 892236 - RNA, 19 nt, Artificial Sequence
  Description of Artificial Sequence: Synthetic oligonucleotide
  modified_base (2)..(2): a, c, u, g, unknown or other
cncaaaacuugcagagcgg

SEQ ID NO: 892237 - RNA, 19 nt, Artificial Sequence
  Description of Artificial Sequence: Synthetic oligonucleotide
aggcggaaaucacacacag

SEQ ID NO: 892238 - RNA, 19 nt, Artificial Sequence
  Description of Artificial Sequence: Synthetic oligonucleotide
acaccgcuggacuugcugg

SEQ ID NO: 892239 - RNA, 19 nt, Artificial Sequence
  Description of Artificial Sequence: Synthetic oligonucleotide
accacucgacccaugaggc

SEQ ID NO: 892240 - RNA, 19 nt, Artificial Sequence
  Description of Artificial Sequence: Synthetic oligonucleotide
ccuaucaaggccaucacug

SEQ ID NO: 892241 - RNA, 19 nt, Artificial Sequence
  Description of Artificial Sequence: Synthetic oligonucleotide
gaggacacgaccauaugac

SEQ ID NO: 892242 - RNA, 19 nt, Artificial Sequence
  Description of Artificial Sequence: Synthetic oligonucleotide
guuccgauugacaaugaug

SEQ ID NO: 892243 - RNA, 19 nt, Artificial Sequence
  Description of Artificial Sequence: Synthetic oligonucleotide
uaguuggaccuugagagac

SEQ ID NO: 892244 - RNA, 19 nt, Artificial Sequence
  Description of Artificial Sequence: Synthetic oligonucleotide
aaugugcccaccaaccagu

SEQ ID NO: 892245 - RNA, 19 nt, Artificial Sequence
  Description of Artificial Sequence: Synthetic oligonucleotide
ugucugacgaaugugucaa

SEQ ID NO: 892246 - RNA, 19 nt, Artificial Sequence
  Description of Artificial Sequence: Synthetic oligonucleotide
  modified_base (14)..(14): a, c, u, g, unknown or other
uccgcacagaugcncaaaa

SEQ ID NO: 892247 - RNA, 19 nt, Artificial Sequence
  Description of Artificial Sequence: Synthetic oligonucleotide
caaauaggcggcaguggcc

SEQ ID NO: 892248 - RNA, 19 nt, Artificial Sequence
  Description of Artificial Sequence: Synthetic oligonucleotide
gaagcgcauugucaggcag

SEQ ID NO: 892249 - RNA, 19 nt, Artificial Sequence
  Description of Artificial Sequence: Synthetic oligonucleotide
uguaccaaauaggcggcag

SEQ ID NO: 892250 - RNA, 19 nt, Artificial Sequence
  Description of Artificial Sequence: Synthetic oligonucleotide
gucaaacucgaugaggcug

SEQ ID NO: 892251 - RNA, 19 nt, Artificial Sequence
  Description of Artificial Sequence: Synthetic oligonucleotide
cacuguguuagugagacca

SEQ ID NO: 892252 - RNA, 19 nt, Artificial Sequence
  Description of Artificial Sequence: Synthetic oligonucleotide
acacgaccauaugacaggc

SEQ ID NO: 892253 - RNA, 19 nt, Artificial Sequence
  Description of Artificial Sequence: Synthetic oligonucleotide
gagauuuaguuggaccuug

SEQ ID NO: 892254 - RNA, 19 nt, Artificial Sequence
  Description of Artificial Sequence: Synthetic oligonucleotide
acaccgagggucuccacag

SEQ ID NO: 892255 - RNA, 19 nt, Artificial Sequence
  Description of Artificial Sequence: Synthetic oligonucleotide
gaagacgucugaguugagc

SEQ ID NO: 892256 - RNA, 19 nt, Artificial Sequence
  Description of Artificial Sequence: Synthetic oligonucleotide
cauuccuaagcuccucagc

SEQ ID NO: 892257 - RNA, 19 nt, Artificial Sequence
  Description of Artificial Sequence: Synthetic oligonucleotide
guguuagugagaccagggc

SEQ ID NO: 892258 - RNA, 19 nt, Artificial Sequence
  Description of Artificial Sequence: Synthetic oligonucleotide
acaaagcguacaccauggg

SEQ ID NO: 892259 - RNA, 19 nt, Artificial Sequence
  Description of Artificial Sequence: Synthetic oligonucleotide
  modified_base (4)..(4): a, c, u, g, unknown or other
ugcncaaaacuugcagagc

SEQ ID NO: 892260 - RNA, 19 nt, Artificial Sequence
  Description of Artificial Sequence: Synthetic oligonucleotide
uaucuugugucugacgaau

SEQ ID NO: 892261 - RNA, 19 nt, Artificial Sequence
  Description of Artificial Sequence: Synthetic oligonucleotide
  modified_base (18)..(18): a, c, u, g, unknown or other
acuguccgcacagaugcnc

SEQ ID NO: 892262 - RNA, 19 nt, Artificial Sequence
  Description of Artificial Sequence: Synthetic oligonucleotide
uuccuaagcuccucagccc

SEQ ID NO: 892263 - RNA, 19 nt, Artificial Sequence
  Description of Artificial Sequence: Synthetic oligonucleotide
caaucugaggcccacaucu

SEQ ID NO: 892264 - RNA, 19 nt, Artificial Sequence
  Description of Artificial Sequence: Synthetic oligonucleotide
agaggcgagcacacuaacc

SEQ ID NO: 892265 - RNA, 19 nt, Artificial Sequence
  Description of Artificial Sequence: Synthetic oligonucleotide
auaaucaguguaagccagg

SEQ ID NO: 892266 - RNA, 19 nt, Artificial Sequence
  Description of Artificial Sequence: Synthetic oligonucleotide
cacuaacccacucgcaggc

SEQ ID NO: 892267 - RNA, 19 nt, Artificial Sequence
  Description of Artificial Sequence: Synthetic oligonucleotide
aggguagguacaaugucuc

SEQ ID NO: 892268 - RNA, 19 nt, Artificial Sequence
  Description of Artificial Sequence: Synthetic oligonucleotide
auaugacaggcggaaauca

SEQ ID NO: 892269 - RNA, 19 nt, Artificial Sequence
  Description of Artificial Sequence: Synthetic oligonucleotide
uagguacaaugucucguac

SEQ ID NO: 892270 - RNA, 19 nt, Artificial Sequence
  Description of Artificial Sequence: Synthetic oligonucleotide
uuguaccgaguccuugggc

SEQ ID NO: 892271 - RNA, 19 nt, Artificial Sequence
  Description of Artificial Sequence: Synthetic oligonucleotide
augugucaaacucgaugag

SEQ ID NO: 892272 - RNA, 19 nt, Artificial Sequence
  Description of Artificial Sequence: Synthetic oligonucleotide
gacgaggcucccaagcucc

SEQ ID NO: 892273 - RNA, 19 nt, Artificial Sequence
  Description of Artificial Sequence: Synthetic oligonucleotide
ucccgguuccgauugacaa

SEQ ID NO: 892274 - RNA, 19 nt, Artificial Sequence
  Description of Artificial Sequence: Synthetic oligonucleotide
caugaaggaacccacgucu

SEQ ID NO: 892275 - RNA, 19 nt, Artificial Sequence
  Description of Artificial Sequence: Synthetic oligonucleotide
cuugucccgauaagucugc

SEQ ID NO: 892276 - RNA, 19 nt, Artificial Sequence
  Description of Artificial Sequence: Synthetic oligonucleotide
gauaggccagcccgagucc

SEQ ID NO: 892277 - RNA, 19 nt, Artificial Sequence
  Description of Artificial Sequence: Synthetic oligonucleotide
caagggugaaaauucuaga

SEQ ID NO: 892278 - RNA, 19 nt, Artificial Sequence
  Description of Artificial Sequence: Synthetic oligonucleotide
ugucaaacucgaugaggcu

SEQ ID NO: 892279 - RNA, 19 nt, Artificial Sequence
  Description of Artificial Sequence: Synthetic oligonucleotide
cacucgacccaugaggccc

SEQ ID NO: 892280 - RNA, 19 nt, Artificial Sequence
  Description of Artificial Sequence: Synthetic oligonucleotide
cuuggcgggcaccaucucc

SEQ ID NO: 892281 - RNA, 19 nt, Artificial Sequence
  Description of Artificial Sequence: Synthetic oligonucleotide
cuugacuacuugauccuca

SEQ ID NO: 892282 - RNA, 19 nt, Artificial Sequence
  Description of Artificial Sequence: Synthetic oligonucleotide
gacgucugaguugagcaac

SEQ ID NO: 892283 - RNA, 19 nt, Artificial Sequence
  Description of Artificial Sequence: Synthetic oligonucleotide
aagagguuggucaggcagu

SEQ ID NO: 892284 - RNA, 19 nt, Artificial Sequence
  Description of Artificial Sequence: Synthetic oligonucleotide
cacgaaguaccuugacuac

SEQ ID NO: 892285 - RNA, 19 nt, Artificial Sequence
  Description of Artificial Sequence: Synthetic oligonucleotide
guguaagccaggccacagg

SEQ ID NO: 892286 - RNA, 19 nt, Artificial Sequence
  Description of Artificial Sequence: Synthetic oligonucleotide
uccuugggcucauguagcc

SEQ ID NO: 892287 - RNA, 19 nt, Artificial Sequence
  Description of Artificial Sequence: Synthetic oligonucleotide
ccuugagagacaaucucag

SEQ ID NO: 892288 - RNA, 19 nt, Artificial Sequence
  Description of Artificial Sequence: Synthetic oligonucleotide
aucaaccacaagaagcgca

SEQ ID NO: 892289 - RNA, 19 nt, Artificial Sequence
  Description of Artificial Sequence: Synthetic oligonucleotide
cuaagcuugguggcagggg

SEQ ID NO: 892290 - RNA, 19 nt, Artificial Sequence
  Description of Artificial Sequence: Synthetic oligonucleotide
cuuaggguagguacaaugu

SEQ ID NO: 892291 - RNA, 19 nt, Artificial Sequence
  Description of Artificial Sequence: Synthetic oligonucleotide
uuagugagaccagggccag

SEQ ID NO: 892292 - RNA, 19 nt, Artificial Sequence
  Description of Artificial Sequence: Synthetic oligonucleotide
uugacuacuugauccucau

SEQ ID NO: 892293 - RNA, 19 nt, Artificial Sequence
  Description of Artificial Sequence: Synthetic oligonucleotide
uggagagggugguugcggc

SEQ ID NO: 892294 - RNA, 19 nt, Artificial Sequence
  Description of Artificial Sequence: Synthetic oligonucleotide
ccaaauaggcggcaguggc

SEQ ID NO: 892295 - RNA, 19 nt, Artificial Sequence
  Description of Artificial Sequence: Synthetic oligonucleotide
aggacacgaccauaugaca

SEQ ID NO: 892296 - RNA, 19 nt, Artificial Sequence
  Description of Artificial Sequence: Synthetic oligonucleotide
ggacacgaccauaugacag

SEQ ID NO: 892297 - RNA, 19 nt, Artificial Sequence
  Description of Artificial Sequence: Synthetic oligonucleotide
cacgucacugcccaaccug

SEQ ID NO: 892298 - RNA, 19 nt, Artificial Sequence
  Description of Artificial Sequence: Synthetic oligonucleotide
gucccgauaagucugcucu

SEQ ID NO: 892299 - RNA, 19 nt, Artificial Sequence
  Description of Artificial Sequence: Synthetic oligonucleotide
gacaccgagggucuccaca

SEQ ID NO: 892300 - RNA, 19 nt, Artificial Sequence
  Description of Artificial Sequence: Synthetic oligonucleotide
aaguccccgccaucaacca

SEQ ID NO: 892301 - RNA, 19 nt, Artificial Sequence
  Description of Artificial Sequence: Synthetic oligonucleotide
aggaucaagccagcgcagg

SEQ ID NO: 892302 - RNA, 19 nt, Artificial Sequence
  Description of Artificial Sequence: Synthetic oligonucleotide
cagcuuagccccaagugca

SEQ ID NO: 892303 - RNA, 19 nt, Artificial Sequence
  Description of Artificial Sequence: Synthetic oligonucleotide
guugcggcccagcagcccc

SEQ ID NO: 892304 - RNA, 19 nt, Artificial Sequence
  Description of Artificial Sequence: Synthetic oligonucleotide
uacuacacggaugcccagc

SEQ ID NO: 892305 - RNA, 19 nt, Artificial Sequence
  Description of Artificial Sequence: Synthetic oligonucleotide
uucaaggggcagagguccc

SEQ ID NO: 892306 - RNA, 19 nt, Artificial Sequence
  Description of Artificial Sequence: Synthetic oligonucleotide
ggaucaagccagcgcaggg

SEQ ID NO: 892307 - RNA, 19 nt, Artificial Sequence
  Description of Artificial Sequence: Synthetic oligonucleotide
guagguacaaugucucgua

SEQ ID NO: 892308 - RNA, 19 nt, Artificial Sequence
  Description of Artificial Sequence: Synthetic oligonucleotide
uugggcucauguagccaag

SEQ ID NO: 892309 - RNA, 19 nt, Artificial Sequence
  Description of Artificial Sequence: Synthetic oligonucleotide
agcgcauugucaggcagag

SEQ ID NO: 892310 - RNA, 19 nt, Artificial Sequence
  Description of Artificial Sequence: Synthetic oligonucleotide
agacgccugaggaauguuc

SEQ ID NO: 892311 - RNA, 19 nt, Artificial Sequence
  Description of Artificial Sequence: Synthetic oligonucleotide
aaucugaggcccacaucug

SEQ ID NO: 892312 - RNA, 19 nt, Artificial Sequence
  Description of Artificial Sequence: Synthetic oligonucleotide
cugaaaucuguccucccga

SEQ ID NO: 892313 - RNA, 19 nt, Artificial Sequence
  Description of Artificial Sequence: Synthetic oligonucleotide
gugucugacgaauguguca

SEQ ID NO: 892314 - RNA, 19 nt, Artificial Sequence
  Description of Artificial Sequence: Synthetic oligonucleotide
cagcccuaagcuugguggc

SEQ ID NO: 892315 - RNA, 19 nt, Artificial Sequence
  Description of Artificial Sequence: Synthetic oligonucleotide
aacacccgcacuggguuca

SEQ ID NO: 892316 - RNA, 19 nt, Artificial Sequence
  Description of Artificial Sequence: Synthetic oligonucleotide
accacaagaagcgcauugu

SEQ ID NO: 892317 - RNA, 19 nt, Artificial Sequence
  Description of Artificial Sequence: Synthetic oligonucleotide
gguucugccggauguggag

SEQ ID NO: 892318 - RNA, 19 nt, Artificial Sequence
  Description of Artificial Sequence: Synthetic oligonucleotide
  modified_base (16)..(16): a, c, u, g, unknown or other
uguccgcacagaugcncaa

SEQ ID NO: 892319 - RNA, 19 nt, Artificial Sequence
  Description of Artificial Sequence: Synthetic oligonucleotide
cugccggauguggagaggg

SEQ ID NO: 892320 - RNA, 19 nt, Artificial Sequence
  Description of Artificial Sequence: Synthetic oligonucleotide
cuagauaggccagcccgag

SEQ ID NO: 892321 - RNA, 19 nt, Artificial Sequence
  Description of Artificial Sequence: Synthetic oligonucleotide
acgaaguaccuugacuacu

SEQ ID NO: 892322 - RNA, 19 nt, Artificial Sequence
  Description of Artificial Sequence: Synthetic oligonucleotide
agaagcgcauugucaggca

SEQ ID NO: 892323 - RNA, 19 nt, Artificial Sequence
  Description of Artificial Sequence: Synthetic oligonucleotide
cacgaccauaugacaggcg

SEQ ID NO: 892324 - RNA, 19 nt, Artificial Sequence
  Description of Artificial Sequence: Synthetic oligonucleotide
agacaaucucagagagggc

SEQ ID NO: 892325 - RNA, 19 nt, Artificial Sequence
  Description of Artificial Sequence: Synthetic oligonucleotide
cuugagagacaaucucaga

SEQ ID NO: 892326 - RNA, 19 nt, Artificial Sequence
  Description of Artificial Sequence: Synthetic oligonucleotide
ugagagcaucaaucccugc

SEQ ID NO: 892327 - RNA, 19 nt, Artificial Sequence
  Description of Artificial Sequence: Synthetic oligonucleotide
cccgugagagcaucaaucc

SEQ ID NO: 892328 - RNA, 19 nt, Artificial Sequence
  Description of Artificial Sequence: Synthetic oligonucleotide
ugccggucagcauuccuaa

SEQ ID NO: 892329 - RNA, 19 nt, Artificial Sequence
  Description of Artificial Sequence: Synthetic oligonucleotide
uugcgguugaggacacgac

SEQ ID NO: 892330 - RNA, 19 nt, Artificial Sequence
  Description of Artificial Sequence: Synthetic oligonucleotide
gagaggcgagcacacuaac

SEQ ID NO: 892331 - RNA, 19 nt, Artificial Sequence
  Description of Artificial Sequence: Synthetic oligonucleotide
ucaggacgaggcucccaag

SEQ ID NO: 892332 - RNA, 19 nt, Artificial Sequence
  Description of Artificial Sequence: Synthetic oligonucleotide
guggagagggugguugcgg

SEQ ID NO: 892333 - RNA, 19 nt, Artificial Sequence
  Description of Artificial Sequence: Synthetic oligonucleotide
auccggcugacacagcuua

SEQ ID NO: 892334 - RNA, 19 nt, Artificial Sequence
  Description of Artificial Sequence: Synthetic oligonucleotide
aacccacgucucccugcac

SEQ ID NO: 892335 - RNA, 19 nt, Artificial Sequence
  Description of Artificial Sequence: Synthetic oligonucleotide
ggguagguacaaugucucg

SEQ ID NO: 892336 - RNA, 19 nt, Artificial Sequence
  Description of Artificial Sequence: Synthetic oligonucleotide
caggaucaagccagcgcag

SEQ ID NO: 892337 - RNA, 19 nt, Artificial Sequence
  Description of Artificial Sequence: Synthetic oligonucleotide
agacgucugaguugagcaa

SEQ ID NO: 892338 - RNA, 19 nt, Artificial Sequence
  Description of Artificial Sequence: Synthetic oligonucleotide
ggagccaucucugaaaucu

SEQ ID NO: 892339 - RNA, 19 nt, Artificial Sequence
  Description of Artificial Sequence: Synthetic oligonucleotide
ugucccgauaagucugcuc

SEQ ID NO: 892340 - RNA, 19 nt, Artificial Sequence
  Description of Artificial Sequence: Synthetic oligonucleotide
uccggcugacacagcuuag

SEQ ID NO: 892341 - RNA, 19 nt, Artificial Sequence
  Description of Artificial Sequence: Synthetic oligonucleotide
caagccagcgcaggggccc

SEQ ID NO: 892342 - RNA, 19 nt, Artificial Sequence
  Description of Artificial Sequence: Synthetic oligonucleotide
ccuugucccgauaagucug

SEQ ID NO: 892343 - RNA, 19 nt, Artificial Sequence
  Description of Artificial Sequence: Synthetic oligonucleotide
gaacccacgucucccugca

SEQ ID NO: 892344 - RNA, 19 nt, Artificial Sequence
  Description of Artificial Sequence: Synthetic oligonucleotide
cuugcgguugaggacacga

SEQ ID NO: 892345 - RNA, 19 nt, Artificial Sequence
  Description of Artificial Sequence: Synthetic oligonucleotide
acuguguuagugagaccag

SEQ ID NO: 892346 - RNA, 19 nt, Artificial Sequence
  Description of Artificial Sequence: Synthetic oligonucleotide
cacaccgcuggacuugcug

SEQ ID NO: 892347 - RNA, 19 nt, Artificial Sequence
  Description of Artificial Sequence: Synthetic oligonucleotide
ugucucguacuguccgcac

SEQ ID NO: 892348 - RNA, 19 nt, Artificial Sequence
  Description of Artificial Sequence: Synthetic oligonucleotide
guggcgugugucuacuaca

SEQ ID NO: 892349 - RNA, 19 nt, Artificial Sequence
  Description of Artificial Sequence: Synthetic oligonucleotide
agagauuuaguuggaccuu

SEQ ID NO: 892350 - RNA, 19 nt, Artificial Sequence
  Description of Artificial Sequence: Synthetic oligonucleotide
uccgauugacaaugaugau

SEQ ID NO: 892351 - RNA, 19 nt, Artificial Sequence
  Description of Artificial Sequence: Synthetic oligonucleotide
ggcucauguagccaagaga

SEQ ID NO: 892352 - RNA, 19 nt, Artificial Sequence
  Description of Artificial Sequence: Synthetic oligonucleotide
ccggucagcauuccuaagc

SEQ ID NO: 892353 - RNA, 19 nt, Artificial Sequence
  Description of Artificial Sequence: Synthetic oligonucleotide
acugcccaaccugggcacc

SEQ ID NO: 892354 - RNA, 19 nt, Artificial Sequence
  Description of Artificial Sequence: Synthetic oligonucleotide
ugggcaacuuggcgggcac

SEQ ID NO: 892355 - RNA, 19 nt, Artificial Sequence
  Description of Artificial Sequence: Synthetic oligonucleotide
ccggauguggagagggugg

SEQ ID NO: 892356 - RNA, 19 nt, Artificial Sequence
  Description of Artificial Sequence: Synthetic oligonucleotide
  modified_base (19)..(19): a, c, u, g, unknown or other
uacuguccgcacagaugcn

SEQ ID NO: 892357 - RNA, 19 nt, Artificial Sequence
  Description of Artificial Sequence: Synthetic oligonucleotide
cuacuacacggaugcccag

SEQ ID NO: 892358 - RNA, 19 nt, Artificial Sequence
  Description of Artificial Sequence: Synthetic oligonucleotide
accagaccucggcauccgg

SEQ ID NO: 892359 - RNA, 19 nt, Artificial Sequence
  Description of Artificial Sequence: Synthetic oligonucleotide
gcuguaacacccgcacugg

SEQ ID NO: 892360 - RNA, 19 nt, Artificial Sequence
  Description of Artificial Sequence: Synthetic oligonucleotide
guaagccaggccacaggcc

SEQ ID NO: 892361 - RNA, 19 nt, Artificial Sequence
  Description of Artificial Sequence: Synthetic oligonucleotide
  modified_base (8)..(8): a, c, u, g, unknown or other
cagaugcncaaaacuugca

SEQ ID NO: 892362 - RNA, 19 nt, Artificial Sequence
  Description of Artificial Sequence: Synthetic oligonucleotide
gcaucaaucccugcgcccc

SEQ ID NO: 892363 - RNA, 19 nt, Artificial Sequence
  Description of Artificial Sequence: Synthetic oligonucleotide
ucccgaucaggauguugac

SEQ ID NO: 892364 - RNA, 19 nt, Artificial Sequence
  Description of Artificial Sequence: Synthetic oligonucleotide
gaguugagcaacauaucau

SEQ ID NO: 892365 - RNA, 19 nt, Artificial Sequence
  Description of Artificial Sequence: Synthetic oligonucleotide
acauaucaucccgguuccg

SEQ ID NO: 892366 - RNA, 19 nt, Artificial Sequence
  Description of Artificial Sequence: Synthetic oligonucleotide
cugacgaaugugucaaacu

SEQ ID NO: 892367 - RNA, 19 nt, Artificial Sequence
  Description of Artificial Sequence: Synthetic oligonucleotide
ugacuacuugauccucauu

SEQ ID NO: 892368 - RNA, 19 nt, Artificial Sequence
  Description of Artificial Sequence: Synthetic oligonucleotide
gaccucggcauccggcuga

SEQ ID NO: 892369 - RNA, 19 nt, Artificial Sequence
  Description of Artificial Sequence: Synthetic oligonucleotide
guaccgaguccuugggcuc

SEQ ID NO: 892370 - RNA, 19 nt, Artificial Sequence
  Description of Artificial Sequence: Synthetic oligonucleotide
agcccaaucugaggcccac

SEQ ID NO: 892371 - RNA, 19 nt, Artificial Sequence
  Description of Artificial Sequence: Synthetic oligonucleotide
gggcucauguagccaagag

SEQ ID NO: 892372 - RNA, 19 nt, Artificial Sequence
  Description of Artificial Sequence: Synthetic oligonucleotide
guugaggacacgaccauau

SEQ ID NO: 892373 - RNA, 19 nt, Artificial Sequence
  Description of Artificial Sequence: Synthetic oligonucleotide
agagaggcgagcacacuaa

SEQ ID NO: 892374 - RNA, 19 nt, Artificial Sequence
  Description of Artificial Sequence: Synthetic oligonucleotide
ggcgugugucuacuacacg

SEQ ID NO: 892375 - RNA, 19 nt, Artificial Sequence
  Description of Artificial Sequence: Synthetic oligonucleotide
guuggaccuugagagacaa

SEQ ID NO: 892376 - RNA, 19 nt, Artificial Sequence
  Description of Artificial Sequence: Synthetic oligonucleotide
guaacacccgcacuggguu

SEQ ID NO: 892377 - RNA, 19 nt, Artificial Sequence
  Description of Artificial Sequence: Synthetic oligonucleotide
cucaggacgaggcucccaa

SEQ ID NO: 892378 - RNA, 19 nt, Artificial Sequence
  Description of Artificial Sequence: Synthetic oligonucleotide
  modified_base (17)..(17): a, c, u, g, unknown or other
cuguccgcacagaugcnca

SEQ ID NO: 892379 - RNA, 19 nt, Artificial Sequence
  Description of Artificial Sequence: Synthetic oligonucleotide
gggcuguaccaaauaggcg

SEQ ID NO: 892380 - RNA, 19 nt, Artificial Sequence
  Description of Artificial Sequence: Synthetic oligonucleotide
gugugaagacaaagcguac

SEQ ID NO: 892381 - RNA, 19 nt, Artificial Sequence
  Description of Artificial Sequence: Synthetic oligonucleotide
gcucuugcgguugaggaca

SEQ ID NO: 892382 - RNA, 19 nt, Artificial Sequence
  Description of Artificial Sequence: Synthetic oligonucleotide
gcuguaccaaauaggcggc

SEQ ID NO: 892383 - RNA, 19 nt, Artificial Sequence
  Description of Artificial Sequence: Synthetic oligonucleotide
guaccaaauaggcggcagu

SEQ ID NO: 892384 - RNA, 19 nt, Artificial Sequence
  Description of Artificial Sequence: Synthetic oligonucleotide
agcccuuaggguagguaca

SEQ ID NO: 892385 - RNA, 19 nt, Artificial Sequence
  Description of Artificial Sequence: Synthetic oligonucleotide
gcccuacacagaaauggag

SEQ ID NO: 892386 - RNA, 19 nt, Artificial Sequence
  Description of Artificial Sequence: Synthetic oligonucleotide
ccgguuccgauugacaaug

SEQ ID NO: 892387 - RNA, 19 nt, Artificial Sequence
  Description of Artificial Sequence: Synthetic oligonucleotide
caucacugguaucuugugu

SEQ ID NO: 892388 - RNA, 19 nt, Artificial Sequence
  Description of Artificial Sequence: Synthetic oligonucleotide
gaagaccacucgacccaug

SEQ ID NO: 892389 - RNA, 19 nt, Artificial Sequence
  Description of Artificial Sequence: Synthetic oligonucleotide
gguagguacaaugucucgu

SEQ ID NO: 892390 - RNA, 19 nt, Artificial Sequence
  Description of Artificial Sequence: Synthetic oligonucleotide
ucccgauaagucugcucuu

SEQ ID NO: 892391 - RNA, 19 nt, Artificial Sequence
  Description of Artificial Sequence: Synthetic oligonucleotide
cugccuugugauaaucagu

SEQ ID NO: 892392 - RNA, 19 nt, Artificial Sequence
  Description of Artificial Sequence: Synthetic oligonucleotide
cugcccggcacaguugcug

SEQ ID NO: 892393 - RNA, 19 nt, Artificial Sequence
  Description of Artificial Sequence: Synthetic oligonucleotide
acgucugaguugagcaaca

SEQ ID NO: 892394 - RNA, 19 nt, Artificial Sequence
  Description of Artificial Sequence: Synthetic oligonucleotide
accaugccggaugcuuguc

SEQ ID NO: 892395 - RNA, 19 nt, Artificial Sequence
  Description of Artificial Sequence: Synthetic oligonucleotide
acgccugaggaauguucaa

SEQ ID NO: 892396 - RNA, 19 nt, Artificial Sequence
  Description of Artificial Sequence: Synthetic oligonucleotide
ccuaagcuugguggcaggg

SEQ ID NO: 892397 - RNA, 19 nt, Artificial Sequence
  Description of Artificial Sequence: Synthetic oligonucleotide
ccggggcuguaccaaauag

SEQ ID NO: 892398 - RNA, 19 nt, Artificial Sequence
  Description of Artificial Sequence: Synthetic oligonucleotide
ugaccucguggcguguguc

SEQ ID NO: 892399 - RNA, 19 nt, Artificial Sequence
  Description of Artificial Sequence: Synthetic oligonucleotide
uccuucgaggcagcuccac

SEQ ID NO: 892400 - RNA, 19 nt, Artificial Sequence
  Description of Artificial Sequence: Synthetic oligonucleotide
cacuggaccugggugccug

SEQ ID NO: 892401 - RNA, 19 nt, Artificial Sequence
  Description of Artificial Sequence: Synthetic oligonucleotide
gcgguugaggacacgacca

SEQ ID NO: 892402 - RNA, 19 nt, Artificial Sequence
  Description of Artificial Sequence: Synthetic oligonucleotide
ggacgaggcucccaagcuc

SEQ ID NO: 892403 - RNA, 19 nt, Artificial Sequence
  Description of Artificial Sequence: Synthetic oligonucleotide
uccccgccaucaaccacaa

SEQ ID NO: 892404 - RNA, 19 nt, Artificial Sequence
  Description of Artificial Sequence: Synthetic oligonucleotide
gccuauggcugccuuguga

SEQ ID NO: 892405 - RNA, 19 nt, Artificial Sequence
  Description of Artificial Sequence: Synthetic oligonucleotide
ccaagagauuuaguuggac

SEQ ID NO: 892406 - RNA, 19 nt, Artificial Sequence
  Description of Artificial Sequence: Synthetic oligonucleotide
cgauugacaaugaugauuu

SEQ ID NO: 892407 - RNA, 19 nt, Artificial Sequence
  Description of Artificial Sequence: Synthetic oligonucleotide
caccagaccucggcauccg

SEQ ID NO: 892408 - RNA, 19 nt, Artificial Sequence
  Description of Artificial Sequence: Synthetic oligonucleotide
uugucccgauaagucugcu

SEQ ID NO: 892409 - RNA, 19 nt, Artificial Sequence
  Description of Artificial Sequence: Synthetic oligonucleotide
gaccucguggcgugugucu

SEQ ID NO: 892410 - RNA, 19 nt, Artificial Sequence
  Description of Artificial Sequence: Synthetic oligonucleotide
ccagccuugucccgauaag

SEQ ID NO: 892411 - RNA, 19 nt, Artificial Sequence
  Description of Artificial Sequence: Synthetic oligonucleotide
  modified_base (13)..(13): a, c, u, g, unknown or other
ccgcacagaugcncaaaac

SEQ ID NO: 892412 - RNA, 19 nt, Artificial Sequence
  Description of Artificial Sequence: Synthetic oligonucleotide
cuugggcaacuuggcgggc

SEQ ID NO: 892413 - RNA, 19 nt, Artificial Sequence
  Description of Artificial Sequence: Synthetic oligonucleotide
cagaccucggcauccggcu

SEQ ID NO: 892414 - RNA, 19 nt, Artificial Sequence
  Description of Artificial Sequence: Synthetic oligonucleotide
cccgaucaggauguugacc

SEQ ID NO: 892415 - RNA, 19 nt, Artificial Sequence
  Description of Artificial Sequence: Synthetic oligonucleotide
gccggauguggagagggug

SEQ ID NO: 892416 - RNA, 19 nt, Artificial Sequence
  Description of Artificial Sequence: Synthetic oligonucleotide
ggcggaaaucacacacagc

SEQ ID NO: 892417 - RNA, 19 nt, Artificial Sequence
  Description of Artificial Sequence: Synthetic oligonucleotide
gcaggcccuacacagaaau

SEQ ID NO: 892418 - RNA, 19 nt, Artificial Sequence
  Description of Artificial Sequence: Synthetic oligonucleotide
cacucgcaggcccuacaca

SEQ ID NO: 892419 - RNA, 19 nt, Artificial Sequence
  Description of Artificial Sequence: Synthetic oligonucleotide
gcccuaagcuugguggcag

SEQ ID NO: 892420 - RNA, 19 nt, Artificial Sequence
  Description of Artificial Sequence: Synthetic oligonucleotide
ccgauaagucugcucuuuc

SEQ ID NO: 892421 - RNA, 19 nt, Artificial Sequence
  Description of Artificial Sequence: Synthetic oligonucleotide
ggcccuacacagaaaugga

SEQ ID NO: 892422 - RNA, 19 nt, Artificial Sequence
  Description of Artificial Sequence: Synthetic oligonucleotide
acccacucgcaggcccuac

SEQ ID NO: 892423 - RNA, 19 nt, Artificial Sequence
  Description of Artificial Sequence: Synthetic oligonucleotide
gcauccggcugacacagcu

SEQ ID NO: 892424 - RNA, 19 nt, Artificial Sequence
  Description of Artificial Sequence: Synthetic oligonucleotide
cccuaagcuugguggcagg

SEQ ID NO: 892425 - RNA, 19 nt, Artificial Sequence
  Description of Artificial Sequence: Synthetic oligonucleotide
cuauggcugccuugugaua

SEQ ID NO: 892426 - RNA, 19 nt, Artificial Sequence
  Description of Artificial Sequence: Synthetic oligonucleotide
acucgacccaugaggcccu

SEQ ID NO: 892427 - RNA, 19 nt, Artificial Sequence
  Description of Artificial Sequence: Synthetic oligonucleotide
cguggcgugugucuacuac

SEQ ID NO: 892428 - RNA, 19 nt, Artificial Sequence
  Description of Artificial Sequence: Synthetic oligonucleotide
gcugagacacgggcauucc

SEQ ID NO: 892429 - RNA, 19 nt, Artificial Sequence
  Description of Artificial Sequence: Synthetic oligonucleotide
ccggcugacacagcuuagc

SEQ ID NO: 892430 - RNA, 19 nt, Artificial Sequence
  Description of Artificial Sequence: Synthetic oligonucleotide
agcuuagccccaagugcaa

SEQ ID NO: 892431 - RNA, 19 nt, Artificial Sequence
  Description of Artificial Sequence: Synthetic oligonucleotide
ccuucacgaaguaccuuga

SEQ ID NO: 892432 - RNA, 19 nt, Artificial Sequence
  Description of Artificial Sequence: Synthetic oligonucleotide
cuguaccaaauaggcggca

SEQ ID NO: 892433 - RNA, 19 nt, Artificial Sequence
  Description of Artificial Sequence: Synthetic oligonucleotide
gucugacgaaugugucaaa

SEQ ID NO: 892434 - RNA, 19 nt, Artificial Sequence
  Description of Artificial Sequence: Synthetic oligonucleotide
cuggaccugggugccugac

SEQ ID NO: 892435 - RNA, 19 nt, Artificial Sequence
  Description of Artificial Sequence: Synthetic oligonucleotide
ucguggcgugugucuacua

SEQ ID NO: 892436 - RNA, 19 nt, Artificial Sequence
  Description of Artificial Sequence: Synthetic oligonucleotide
agcguacaccaugggcccu

SEQ ID NO: 892437 - RNA, 19 nt, Artificial Sequence
  Description of Artificial Sequence: Synthetic oligonucleotide
cacuggguucaggugcuga

SEQ ID NO: 892438 - RNA, 19 nt, Artificial Sequence
  Description of Artificial Sequence: Synthetic oligonucleotide
ccuugacuacuugauccuc

SEQ ID NO: 892439 - RNA, 19 nt, Artificial Sequence
  Description of Artificial Sequence: Synthetic oligonucleotide
accucguggcgugugucua

SEQ ID NO: 892440 - RNA, 19 nt, Artificial Sequence
  Description of Artificial Sequence: Synthetic oligonucleotide
ccuauggcugccuugugau

SEQ ID NO: 892441 - RNA, 19 nt, Artificial Sequence
  Description of Artificial Sequence: Synthetic oligonucleotide
gccaagagauuuaguugga

SEQ ID NO: 892442 - RNA, 19 nt, Artificial Sequence
  Description of Artificial Sequence: Synthetic oligonucleotide
gguuccgauugacaaugau

SEQ ID NO: 892443 - RNA, 19 nt, Artificial Sequence
  Description of Artificial Sequence: Synthetic oligonucleotide
ggcccgacucaggaucucc

SEQ ID NO: 892444 - RNA, 19 nt, Artificial Sequence
  Description of Artificial Sequence: Synthetic oligonucleotide
cucauguagccaagagauu

SEQ ID NO: 892445 - RNA, 19 nt, Artificial Sequence
  Description of Artificial Sequence: Synthetic oligonucleotide
ccgagacaucccucccagg

SEQ ID NO: 892446 - RNA, 19 nt, Artificial Sequence
  Description of Artificial Sequence: Synthetic oligonucleotide
cccggcacaguugcuggcc

SEQ ID NO: 892447 - RNA, 19 nt, Artificial Sequence
  Description of Artificial Sequence: Synthetic oligonucleotide
  modified_base (15)..(15): a, c, u, g, unknown or other
guccgcacagaugcncaaa

SEQ ID NO: 892448 - RNA, 19 nt, Artificial Sequence
  Description of Artificial Sequence: Synthetic oligonucleotide
ccgacucaggaucuccaca

SEQ ID NO: 892449 - RNA, 19 nt, Artificial Sequence
  Description of Artificial Sequence: Synthetic oligonucleotide
ccucguggcgugugucuac

SEQ ID NO: 892450 - RNA, 19 nt, Artificial Sequence
  Description of Artificial Sequence: Synthetic oligonucleotide
gggagacgccugaggaaug

SEQ ID NO: 892451 - RNA, 19 nt, Artificial Sequence
  Description of Artificial Sequence: Synthetic oligonucleotide
ggggagacgccugaggaau

SEQ ID NO: 892452 - RNA, 19 nt, Artificial Sequence
  Description of Artificial Sequence: Synthetic oligonucleotide
gugaccucguggcgugugu

SEQ ID NO: 892453 - RNA, 19 nt, Artificial Sequence
  Description of Artificial Sequence: Synthetic oligonucleotide
gcguacaccaugggcccug

SEQ ID NO: 892454 - RNA, 19 nt, Artificial Sequence
  Description of Artificial Sequence: Synthetic oligonucleotide
acacuggaccugggugccu

SEQ ID NO: 892455 - RNA, 19 nt, Artificial Sequence
  Description of Artificial Sequence: Synthetic oligonucleotide
cacccgcacuggguucagg

SEQ ID NO: 892456 - RNA, 19 nt, Artificial Sequence
  Description of Artificial Sequence: Synthetic oligonucleotide
gcacacuaacccacucgca

SEQ ID NO: 892457 - RNA, 19 nt, Artificial Sequence
  Description of Artificial Sequence: Synthetic oligonucleotide
ccgauugacaaugaugauu

SEQ ID NO: 892458 - RNA, 19 nt, Artificial Sequence
  Description of Artificial Sequence: Synthetic oligonucleotide
cgagcacacuaacccacuc

SEQ ID NO: 892459 - RNA, 19 nt, Artificial Sequence
  Description of Artificial Sequence: Synthetic oligonucleotide
cauugucccgugagagcau

SEQ ID NO: 892460 - RNA, 19 nt, Artificial Sequence
  Description of Artificial Sequence: Synthetic oligonucleotide
ccucccgaucaggauguug

SEQ ID NO: 892461 - RNA, 19 nt, Artificial Sequence
  Description of Artificial Sequence: Synthetic oligonucleotide
cgaccauaugacaggcgga

SEQ ID NO: 892462 - RNA, 19 nt, Artificial Sequence
  Description of Artificial Sequence: Synthetic oligonucleotide
ggagacgccugaggaaugu

SEQ ID NO: 892463 - RNA, 19 nt, Artificial Sequence
  Description of Artificial Sequence: Synthetic oligonucleotide
gcccuuaggguagguacaa

SEQ ID NO: 892464 - RNA, 19 nt, Artificial Sequence
  Description of Artificial Sequence: Synthetic oligonucleotide
gcuuagccccaagugcaaa

SEQ ID NO: 892465 - RNA, 19 nt, Artificial Sequence
  Description of Artificial Sequence: Synthetic oligonucleotide
ggacaccgagggucuccac

SEQ ID NO: 892466 - RNA, 19 nt, Artificial Sequence
  Description of Artificial Sequence: Synthetic oligonucleotide
cucguggcgugugucuacu

SEQ ID NO: 892467 - RNA, 19 nt, Artificial Sequence
  Description of Artificial Sequence: Synthetic oligonucleotide
accgaguccuugggcucau

SEQ ID NO: 892468 - RNA, 19 nt, Artificial Sequence
  Description of Artificial Sequence: Synthetic oligonucleotide
cauccggcugacacagcuu

SEQ ID NO: 892469 - RNA, 19 nt, Artificial Sequence
  Description of Artificial Sequence: Synthetic oligonucleotide
cccuaucaaggccaucacu

SEQ ID NO: 892470 - RNA, 19 nt, Artificial Sequence
  Description of Artificial Sequence: Synthetic oligonucleotide
cgaaguaccuugacuacuu

SEQ ID NO: 892471 - RNA, 19 nt, Artificial Sequence
  Description of Artificial Sequence: Synthetic oligonucleotide
ccuaagcuccucagcccaa

SEQ ID NO: 892472 - RNA, 19 nt, Artificial Sequence
  Description of Artificial Sequence: Synthetic oligonucleotide
ccacgucucccugcacagc

SEQ ID NO: 892473 - RNA, 19 nt, Artificial Sequence
  Description of Artificial Sequence: Synthetic oligonucleotide
gagacgccugaggaauguu

SEQ ID NO: 892474 - RNA, 19 nt, Artificial Sequence
  Description of Artificial Sequence: Synthetic oligonucleotide
ccgucacugcugccacgcc

SEQ ID NO: 892475 - RNA, 19 nt, Artificial Sequence
  Description of Artificial Sequence: Synthetic oligonucleotide
uccucccgaucaggauguu

SEQ ID NO: 892476 - RNA, 19 nt, Artificial Sequence
  Description of Artificial Sequence: Synthetic oligonucleotide
cgggcauuccagccuuguc

SEQ ID NO: 892477 - RNA, 19 nt, Artificial Sequence
  Description of Artificial Sequence: Synthetic oligonucleotide
cgguucugccggaugugga

SEQ ID NO: 892478 - RNA, 19 nt, Artificial Sequence
  Description of Artificial Sequence: Synthetic oligonucleotide
cccacucgcaggcccuaca

SEQ ID NO: 892479 - RNA, 19 nt, Artificial Sequence
  Description of Artificial Sequence: Synthetic oligonucleotide
cccgguuccgauugacaau

SEQ ID NO: 892480 - RNA, 19 nt, Artificial Sequence
  Description of Artificial Sequence: Synthetic oligonucleotide
gcccaaucugaggcccaca

SEQ ID NO: 892481 - RNA, 19 nt, Artificial Sequence
  Description of Artificial Sequence: Synthetic oligonucleotide
ggggucucuuggcccgacu

SEQ ID NO: 892482 - RNA, 19 nt, Artificial Sequence
  Description of Artificial Sequence: Synthetic oligonucleotide
ccuggagugcuccccguuu

SEQ ID NO: 892483 - RNA, 19 nt, Artificial Sequence
  Description of Artificial Sequence: Synthetic oligonucleotide
cgguuccgauugacaauga

SEQ ID NO: 892484 - RNA, 19 nt, Artificial Sequence
  Description of Artificial Sequence: Synthetic oligonucleotide
ccucaggacgaggcuccca

SEQ ID NO: 892485 - RNA, 19 nt, Artificial Sequence
  Description of Artificial Sequence: Synthetic oligonucleotide
cccgauaagucugcucuuu

SEQ ID NO: 892486 - RNA, 19 nt, Artificial Sequence
  Description of Artificial Sequence: Synthetic oligonucleotide
cgaaugugucaaacucgau

SEQ ID NO: 892487 - RNA, 19 nt, Artificial Sequence
  Description of Artificial Sequence: Synthetic oligonucleotide
ggccuucacgaaguaccuu

SEQ ID NO: 892488 - RNA, 19 nt, Artificial Sequence
  Description of Artificial Sequence: Synthetic oligonucleotide
ccgagaaaucuggguccaa

SEQ ID NO: 892489 - RNA, 19 nt, Artificial Sequence
  Description of Artificial Sequence: Synthetic oligonucleotide
cgguugaggacacgaccau

SEQ ID NO: 892490 - RNA, 19 nt, Artificial Sequence
  Description of Artificial Sequence: Synthetic oligonucleotide
cccuuaggguagguacaau

SEQ ID NO: 892491 - RNA, 19 nt, Artificial Sequence
  Description of Artificial Sequence: Synthetic oligonucleotide
cucgacccaugaggcccuu

SEQ ID NO: 892492 - RNA, 19 nt, Artificial Sequence
  Description of Artificial Sequence: Synthetic oligonucleotide
ccucggcauccggcugaca

SEQ ID NO: 892493 - RNA, 19 nt, Artificial Sequence
  Description of Artificial Sequence: Synthetic oligonucleotide
ccacgcccacugucccagu

SEQ ID NO: 892494 - RNA, 19 nt, Artificial Sequence
  Description of Artificial Sequence: Synthetic oligonucleotide
uguacaaucacacacaggg

SEQ ID NO: 892495 - RNA, 19 nt, Artificial Sequence
  Description of Artificial Sequence: Synthetic oligonucleotide
uuuaauuucucaaugaggg

SEQ ID NO: 892496 - RNA, 19 nt, Artificial Sequence
  Description of Artificial Sequence: Synthetic oligonucleotide
uuguuaauaacuuuaaucu

SEQ ID NO: 892497 - RNA, 19 nt, Artificial Sequence
  Description of Artificial Sequence: Synthetic oligonucleotide
aaguauacacacugcaucc

SEQ ID NO: 892498 - RNA, 19 nt, Artificial Sequence
  Description of Artificial Sequence: Synthetic oligonucleotide
uuaaucuuaucacugaagc

SEQ ID NO: 892499 - RNA, 19 nt, Artificial Sequence
  Description of Artificial Sequence: Synthetic oligonucleotide
uuuucaucagucuauagga

SEQ ID NO: 892500 - RNA, 19 nt, Artificial Sequence
  Description of Artificial Sequence: Synthetic oligonucleotide
gauguuaacaacucaggcc

SEQ ID NO: 892501 - RNA, 19 nt, Artificial Sequence
  Description of Artificial Sequence: Synthetic oligonucleotide
ucauuaaucucuccaaacc

SEQ ID NO: 892502 - RNA, 19 nt, Artificial Sequence
  Description of Artificial Sequence: Synthetic oligonucleotide
aagaugucuaugcgcaugc

SEQ ID NO: 892503 - RNA, 19 nt, Artificial Sequence
  Description of Artificial Sequence: Synthetic oligonucleotide
cuuuucaucagucuauagg

SEQ ID NO: 892504 - RNA, 19 nt, Artificial Sequence
  Description of Artificial Sequence: Synthetic oligonucleotide
agagguacaaacugcuugc

SEQ ID NO: 892505 - RNA, 19 nt, Artificial Sequence
  Description of Artificial Sequence: Synthetic oligonucleotide
uuuaaucuuaucacugaag

SEQ ID NO: 892506 - RNA, 19 nt, Artificial Sequence
  Description of Artificial Sequence: Synthetic oligonucleotide
aauagcauagcagaaguca

SEQ ID NO: 892507 - RNA, 19 nt, Artificial Sequence
  Description of Artificial Sequence: Synthetic oligonucleotide
aaggcuguaccacacacag

SEQ ID NO: 892508 - RNA, 19 nt, Artificial Sequence
  Description of Artificial Sequence: Synthetic oligonucleotide
acgaucauagcauacagug

SEQ ID NO: 892509 - RNA, 19 nt, Artificial Sequence
  Description of Artificial Sequence: Synthetic oligonucleotide
uguggcaagaaguauacac

SEQ ID NO: 892510 - RNA, 19 nt, Artificial Sequence
  Description of Artificial Sequence: Synthetic oligonucleotide
aaucaguuccgugucaaac

SEQ ID NO: 892511 - RNA, 19 nt, Artificial Sequence
  Description of Artificial Sequence: Synthetic oligonucleotide
aauuaguucaaggugucug

SEQ ID NO: 892512 - RNA, 19 nt, Artificial Sequence
  Description of Artificial Sequence: Synthetic oligonucleotide
agccuguacaaucacacac

SEQ ID NO: 892513 - RNA, 19 nt, Artificial Sequence
  Description of Artificial Sequence: Synthetic oligonucleotide
ugucauagacugaaggugc

SEQ ID NO: 892514 - RNA, 19 nt, Artificial Sequence
  Description of Artificial Sequence: Synthetic oligonucleotide
aaaaccuucgcagucacca

SEQ ID NO: 892515 - RNA, 19 nt, Artificial Sequence
  Description of Artificial Sequence: Synthetic oligonucleotide
ucugcucucucgaaaaucc

SEQ ID NO: 892516 - RNA, 19 nt, Artificial Sequence
  Description of Artificial Sequence: Synthetic oligonucleotide
ucagucuauaggaagcugc

SEQ ID NO: 892517 - RNA, 19 nt, Artificial Sequence
  Description of Artificial Sequence: Synthetic oligonucleotide
aucgacaagagaccugugc

SEQ ID NO: 892518 - RNA, 19 nt, Artificial Sequence
  Description of Artificial Sequence: Synthetic oligonucleotide
ucagcugaaugucauagac

SEQ ID NO: 892519 - RNA, 19 nt, Artificial Sequence
  Description of Artificial Sequence: Synthetic oligonucleotide
ugagggaauuaguucaagg

SEQ ID NO: 892520 - RNA, 19 nt, Artificial Sequence
  Description of Artificial Sequence: Synthetic oligonucleotide
ucgacaagagaccugugcc

SEQ ID NO: 892521 - RNA, 19 nt, Artificial Sequence
  Description of Artificial Sequence: Synthetic oligonucleotide
gaucauagcauacagugaa

SEQ ID NO: 892522 - RNA, 19 nt, Artificial Sequence
  Description of Artificial Sequence: Synthetic oligonucleotide
accucaauagcauagcaga

SEQ ID NO: 892523 - RNA, 19 nt, Artificial Sequence
  Description of Artificial Sequence: Synthetic oligonucleotide
ugcuggaaaucaaagguca

SEQ ID NO: 892524 - RNA, 19 nt, Artificial Sequence
  Description of Artificial Sequence: Synthetic oligonucleotide
aaaucccugaacuccacga

SEQ ID NO: 892525 - RNA, 19 nt, Artificial Sequence
  Description of Artificial Sequence: Synthetic oligonucleotide
uaaucuuaucacugaagcc

SEQ ID NO: 892526 - RNA, 19 nt, Artificial Sequence
  Description of Artificial Sequence: Synthetic oligonucleotide
agggaauuaguucaaggug

SEQ ID NO: 892527 - RNA, 19 nt, Artificial Sequence
  Description of Artificial Sequence: Synthetic oligonucleotide
cagugaagucaguagaugg

SEQ ID NO: 892528 - RNA, 19 nt, Artificial Sequence
  Description of Artificial Sequence: Synthetic oligonucleotide
ugagccuguacaaucacac

SEQ ID NO: 892529 - RNA, 19 nt, Artificial Sequence
  Description of Artificial Sequence: Synthetic oligonucleotide
ucaguuccgugucaaacag

SEQ ID NO: 892530 - RNA, 19 nt, Artificial Sequence
  Description of Artificial Sequence: Synthetic oligonucleotide
uuuuaccuugcacaagaug

SEQ ID NO: 892531 - RNA, 19 nt, Artificial Sequence
  Description of Artificial Sequence: Synthetic oligonucleotide
agaaguauagguugugcca

SEQ ID NO: 892532 - RNA, 19 nt, Artificial Sequence
  Description of Artificial Sequence: Synthetic oligonucleotide
cuuaaucauaucauccaug

SEQ ID NO: 892533 - RNA, 19 nt, Artificial Sequence
  Description of Artificial Sequence: Synthetic oligonucleotide
ugaccaggauguuagcacg

SEQ ID NO: 892534 - RNA, 19 nt, Artificial Sequence
  Description of Artificial Sequence: Synthetic oligonucleotide
cacgucaaaaccuucgcag

SEQ ID NO: 892535 - RNA, 19 nt, Artificial Sequence
  Description of Artificial Sequence: Synthetic oligonucleotide
uugcacaagaugucuaugc

SEQ ID NO: 892536 - RNA, 19 nt, Artificial Sequence
  Description of Artificial Sequence: Synthetic oligonucleotide
gaacauugguaguacauca

SEQ ID NO: 892537 - RNA, 19 nt, Artificial Sequence
  Description of Artificial Sequence: Synthetic oligonucleotide
cacacaguagucgucaugg

SEQ ID NO: 892538 - RNA, 19 nt, Artificial Sequence
  Description of Artificial Sequence: Synthetic oligonucleotide
ugauacuaacuuuaucuuc

SEQ ID NO: 892539 - RNA, 19 nt, Artificial Sequence
  Description of Artificial Sequence: Synthetic oligonucleotide
cagaaguauagguugugcc

SEQ ID NO: 892540 - RNA, 19 nt, Artificial Sequence
  Description of Artificial Sequence: Synthetic oligonucleotide
acaauuuuaccuugcacaa

SEQ ID NO: 892541 - RNA, 19 nt, Artificial Sequence
  Description of Artificial Sequence: Synthetic oligonucleotide
aaaccucaauagcauagca

SEQ ID NO: 892542 - RNA, 19 nt, Artificial Sequence
  Description of Artificial Sequence: Synthetic oligonucleotide
cucauaagagggcagugcc

SEQ ID NO: 892543 - RNA, 19 nt, Artificial Sequence
  Description of Artificial Sequence: Synthetic oligonucleotide
caaugagggaauuaguuca

SEQ ID NO: 892544 - RNA, 19 nt, Artificial Sequence
  Description of Artificial Sequence: Synthetic oligonucleotide
cucaacuguaaacaccugc

SEQ ID NO: 892545 - RNA, 19 nt, Artificial Sequence
  Description of Artificial Sequence: Synthetic oligonucleotide
auugguaguacaucacuga

SEQ ID NO: 892546 - RNA, 19 nt, Artificial Sequence
  Description of Artificial Sequence: Synthetic oligonucleotide
aacauugguaguacaucac

SEQ ID NO: 892547 - RNA, 19 nt, Artificial Sequence
  Description of Artificial Sequence: Synthetic oligonucleotide
aguacggacauaccagaag

SEQ ID NO: 892548 - RNA, 19 nt, Artificial Sequence
  Description of Artificial Sequence: Synthetic oligonucleotide
uaaucucuccaaaccgagg

SEQ ID NO: 892549 - RNA, 19 nt, Artificial Sequence
  Description of Artificial Sequence: Synthetic oligonucleotide
aaaagggugccaugguaca

SEQ ID NO: 892550 - RNA, 19 nt, Artificial Sequence
  Description of Artificial Sequence: Synthetic oligonucleotide
acauaccagaaguauaggu

SEQ ID NO: 892551 - RNA, 19 nt, Artificial Sequence
  Description of Artificial Sequence: Synthetic oligonucleotide
gcaagaaguauacacacug

SEQ ID NO: 892552 - RNA, 19 nt, Artificial Sequence
  Description of Artificial Sequence: Synthetic oligonucleotide
aaaggguucaugaggccgg

SEQ ID NO: 892553 - RNA, 19 nt, Artificial Sequence
  Description of Artificial Sequence: Synthetic oligonucleotide
cacagcauagcugacagac

SEQ ID NO: 892554 - RNA, 19 nt, Artificial Sequence
  Description of Artificial Sequence: Synthetic oligonucleotide
agaaguacggacauaccag

SEQ ID NO: 892555 - RNA, 19 nt, Artificial Sequence
  Description of Artificial Sequence: Synthetic oligonucleotide
uguaccacacacaguaguc

SEQ ID NO: 892556 - RNA, 19 nt, Artificial Sequence
  Description of Artificial Sequence: Synthetic oligonucleotide
cauugguaguacaucacug

SEQ ID NO: 892557 - RNA, 19 nt, Artificial Sequence
  Description of Artificial Sequence: Synthetic oligonucleotide
gacaagagaccugugcccg

SEQ ID NO: 892558 - RNA, 19 nt, Artificial Sequence
  Description of Artificial Sequence: Synthetic oligonucleotide
aggacagaaccaccugugc

SEQ ID NO: 892559 - RNA, 19 nt, Artificial Sequence
  Description of Artificial Sequence: Synthetic oligonucleotide
uucuacaauuuuaccuugc

SEQ ID NO: 892560 - RNA, 19 nt, Artificial Sequence
  Description of Artificial Sequence: Synthetic oligonucleotide
gauguuagcacgacauggc

SEQ ID NO: 892561 - RNA, 19 nt, Artificial Sequence
  Description of Artificial Sequence: Synthetic oligonucleotide
uggcaagucaccaucuggu

SEQ ID NO: 892562 - RNA, 19 nt, Artificial Sequence
  Description of Artificial Sequence: Synthetic oligonucleotide
ucccugaacuccacgauca

SEQ ID NO: 892563 - RNA, 19 nt, Artificial Sequence
  Description of Artificial Sequence: Synthetic oligonucleotide
cagagguacaaacugcuug

SEQ ID NO: 892564 - RNA, 19 nt, Artificial Sequence
  Description of Artificial Sequence: Synthetic oligonucleotide
cauaagagggcagugcccc

SEQ ID NO: 892565 - RNA, 19 nt, Artificial Sequence
  Description of Artificial Sequence: Synthetic oligonucleotide
gagggagaccuucuuaccc

SEQ ID NO: 892566 - RNA, 19 nt, Artificial Sequence
  Description of Artificial Sequence: Synthetic oligonucleotide
ucaucgacaagagaccugu

SEQ ID NO: 892567 - RNA, 19 nt, Artificial Sequence
  Description of Artificial Sequence: Synthetic oligonucleotide
ugaacaacgggcuccuccu

SEQ ID NO: 892568 - RNA, 19 nt, Artificial Sequence
  Description of Artificial Sequence: Synthetic oligonucleotide
cacaagaugucuaugcgca

SEQ ID NO: 892569 - RNA, 19 nt, Artificial Sequence
  Description of Artificial Sequence: Synthetic oligonucleotide
ucggggugagcccugaaca

SEQ ID NO: 892570 - RNA, 19 nt, Artificial Sequence
  Description of Artificial Sequence: Synthetic oligonucleotide
caaaggguucaugaggccg

SEQ ID NO: 892571 - RNA, 19 nt, Artificial Sequence
  Description of Artificial Sequence: Synthetic oligonucleotide
ucaguggaauguuuguuaa

SEQ ID NO: 892572 - RNA, 19 nt, Artificial Sequence
  Description of Artificial Sequence: Synthetic oligonucleotide
uccagagcaagugagccug

SEQ ID NO: 892573 - RNA, 19 nt, Artificial Sequence
  Description of Artificial Sequence: Synthetic oligonucleotide
cagcauagcugacagacug

SEQ ID NO: 892574 - RNA, 19 nt, Artificial Sequence
  Description of Artificial Sequence: Synthetic oligonucleotide
ggauguuagcacgacaugg

SEQ ID NO: 892575 - RNA, 19 nt, Artificial Sequence
  Description of Artificial Sequence: Synthetic oligonucleotide
aaacugcuugcuauggcag

SEQ ID NO: 892576 - RNA, 19 nt, Artificial Sequence
  Description of Artificial Sequence: Synthetic oligonucleotide
uguuagcacgacauggcaa

SEQ ID NO: 892577 - RNA, 19 nt, Artificial Sequence
  Description of Artificial Sequence: Synthetic oligonucleotide
ugcacgucaaaaccuucgc

SEQ ID NO: 892578 - RNA, 19 nt, Artificial Sequence
  Description of Artificial Sequence: Synthetic oligonucleotide
gacauggcaagucaccauc

SEQ ID NO: 892579 - RNA, 19 nt, Artificial Sequence
  Description of Artificial Sequence: Synthetic oligonucleotide
auagguugugccauggcag

SEQ ID NO: 892580 - RNA, 19 nt, Artificial Sequence
  Description of Artificial Sequence: Synthetic oligonucleotide
augauacuaacuuuaucuu

SEQ ID NO: 892581 - RNA, 19 nt, Artificial Sequence
  Description of Artificial Sequence: Synthetic oligonucleotide
ugaacauugguaguacauc

SEQ ID NO: 892582 - RNA, 19 nt, Artificial Sequence
  Description of Artificial Sequence: Synthetic oligonucleotide
gaaguacggacauaccaga

SEQ ID NO: 892583 - RNA, 19 nt, Artificial Sequence
  Description of Artificial Sequence: Synthetic oligonucleotide
ugaggcucagaaaggcugc

SEQ ID NO: 892584 - RNA, 19 nt, Artificial Sequence
  Description of Artificial Sequence: Synthetic oligonucleotide
gcaagccuaaacuccaugg

SEQ ID NO: 892585 - RNA, 19 nt, Artificial Sequence
  Description of Artificial Sequence: Synthetic oligonucleotide
cugaacaacgggcuccucc

SEQ ID NO: 892586 - RNA, 19 nt, Artificial Sequence
  Description of Artificial Sequence: Synthetic oligonucleotide
cagucuauaggaagcugcc

SEQ ID NO: 892587 - RNA, 19 nt, Artificial Sequence
  Description of Artificial Sequence: Synthetic oligonucleotide
ugguccaaccgucaccuca

SEQ ID NO: 892588 - RNA, 19 nt, Artificial Sequence
  Description of Artificial Sequence: Synthetic oligonucleotide
ucuuccaagugguuagccu

SEQ ID NO: 892589 - RNA, 19 nt, Artificial Sequence
  Description of Artificial Sequence: Synthetic oligonucleotide
aacuccacgaucauagcau

SEQ ID NO: 892590 - RNA, 19 nt, Artificial Sequence
  Description of Artificial Sequence: Synthetic oligonucleotide
agggacgauaaccugcucu

SEQ ID NO: 892591 - RNA, 19 nt, Artificial Sequence
  Description of Artificial Sequence: Synthetic oligonucleotide
cauagacugaaggugcacc

SEQ ID NO: 892592 - RNA, 19 nt, Artificial Sequence
  Description of Artificial Sequence: Synthetic oligonucleotide
ggacauaccagaaguauag

SEQ ID NO: 892593 - RNA, 19 nt, Artificial Sequence
  Description of Artificial Sequence: Synthetic oligonucleotide
gccaucaucgacaagagac

SEQ ID NO: 892594 - RNA, 19 nt, Artificial Sequence
  Description of Artificial Sequence: Synthetic oligonucleotide
gagggaauuaguucaaggu

SEQ ID NO: 892595 - RNA, 19 nt, Artificial Sequence
  Description of Artificial Sequence: Synthetic oligonucleotide
gaacuccacgaucauagca

SEQ ID NO: 892596 - RNA, 19 nt, Artificial Sequence
  Description of Artificial Sequence: Synthetic oligonucleotide
aguuccgugucaaacagcu

SEQ ID NO: 892597 - RNA, 19 nt, Artificial Sequence
  Description of Artificial Sequence: Synthetic oligonucleotide
gaucauuaaucucuccaaa

SEQ ID NO: 892598 - RNA, 19 nt, Artificial Sequence
  Description of Artificial Sequence: Synthetic oligonucleotide
uguggguuugucugugccc

SEQ ID NO: 892599 - RNA, 19 nt, Artificial Sequence
  Description of Artificial Sequence: Synthetic oligonucleotide
uuaccuugcacaagauguc

SEQ ID NO: 892600 - RNA, 19 nt, Artificial Sequence
  Description of Artificial Sequence: Synthetic oligonucleotide
aacaacgggcuccuccugu

SEQ ID NO: 892601 - RNA, 19 nt, Artificial Sequence
  Description of Artificial Sequence: Synthetic oligonucleotide
aucggggugagcccugaac

SEQ ID NO: 892602 - RNA, 19 nt, Artificial Sequence
  Description of Artificial Sequence: Synthetic oligonucleotide
gucuauaggaagcugccga

SEQ ID NO: 892603 - RNA, 19 nt, Artificial Sequence
  Description of Artificial Sequence: Synthetic oligonucleotide
cuucuacaauuuuaccuug

SEQ ID NO: 892604 - RNA, 19 nt, Artificial Sequence
  Description of Artificial Sequence: Synthetic oligonucleotide
ucuauaggaagcugccgaa

SEQ ID NO: 892605 - RNA, 19 nt, Artificial Sequence
  Description of Artificial Sequence: Synthetic oligonucleotide
cagaaguacggacauacca

SEQ ID NO: 892606 - RNA, 19 nt, Artificial Sequence
  Description of Artificial Sequence: Synthetic oligonucleotide
ucugagggagggacgauaa

SEQ ID NO: 892607 - RNA, 19 nt, Artificial Sequence
  Description of Artificial Sequence: Synthetic oligonucleotide
uuacccuccaggucugcag

SEQ ID NO: 892608 - RNA, 19 nt, Artificial Sequence
  Description of Artificial Sequence: Synthetic oligonucleotide
aagaaggguucacccagga

SEQ ID NO: 892609 - RNA, 19 nt, Artificial Sequence
  Description of Artificial Sequence: Synthetic oligonucleotide
uccaaaccgaggccgauuc

SEQ ID NO: 892610 - RNA, 19 nt, Artificial Sequence
  Description of Artificial Sequence: Synthetic oligonucleotide
aguuccauggagcccucag

SEQ ID NO: 892611 - RNA, 19 nt, Artificial Sequence
  Description of Artificial Sequence: Synthetic oligonucleotide
ugguaaacuuccucauucu

SEQ ID NO: 892612 - RNA, 19 nt, Artificial Sequence
  Description of Artificial Sequence: Synthetic oligonucleotide
ugcaagccuaaacuccaug

SEQ ID NO: 892613 - RNA, 19 nt, Artificial Sequence
  Description of Artificial Sequence: Synthetic oligonucleotide
uguccugaucauuaaucuc

SEQ ID NO: 892614 - RNA, 19 nt, Artificial Sequence
  Description of Artificial Sequence: Synthetic oligonucleotide
guuugucugugcccaaaag

SEQ ID NO: 892615 - RNA, 19 nt, Artificial Sequence
  Description of Artificial Sequence: Synthetic oligonucleotide
cacgacauggcaagucacc

SEQ ID NO: 892616 - RNA, 19 nt, Artificial Sequence
  Description of Artificial Sequence: Synthetic oligonucleotide
guacaaacugcuugcuaug

SEQ ID NO: 892617 - RNA, 19 nt, Artificial Sequence
  Description of Artificial Sequence: Synthetic oligonucleotide
cauagcauacagugaagca

SEQ ID NO: 892618 - RNA, 19 nt, Artificial Sequence
  Description of Artificial Sequence: Synthetic oligonucleotide
caugugaucuuccccucag

SEQ ID NO: 892619 - RNA, 19 nt, Artificial Sequence
  Description of Artificial Sequence: Synthetic oligonucleotide
caaugggugggguucugcc

SEQ ID NO: 892620 - RNA, 19 nt, Artificial Sequence
  Description of Artificial Sequence: Synthetic oligonucleotide
ccacacugaacauugguag

SEQ ID NO: 892621 - RNA, 19 nt, Artificial Sequence
  Description of Artificial Sequence: Synthetic oligonucleotide
auguuagcacgacauggca

SEQ ID NO: 892622 - RNA, 19 nt, Artificial Sequence
  Description of Artificial Sequence: Synthetic oligonucleotide
cauacugaucaguucuguc

SEQ ID NO: 892623 - RNA, 19 nt, Artificial Sequence
  Description of Artificial Sequence: Synthetic oligonucleotide
uccggauccgccacaaauc

SEQ ID NO: 892624 - RNA, 19 nt, Artificial Sequence
  Description of Artificial Sequence: Synthetic oligonucleotide
gguacucccacaaugggug

SEQ ID NO: 892625 - RNA, 19 nt, Artificial Sequence
  Description of Artificial Sequence: Synthetic oligonucleotide
agucagcaccugcaguaac

SEQ ID NO: 892626 - RNA, 19 nt, Artificial Sequence
  Description of Artificial Sequence: Synthetic oligonucleotide
acgucaaaaccuucgcagu

SEQ ID NO: 892627 - RNA, 19 nt, Artificial Sequence
  Description of Artificial Sequence: Synthetic oligonucleotide
auacuaacuuuaucuucca

SEQ ID NO: 892628 - RNA, 19 nt, Artificial Sequence
  Description of Artificial Sequence: Synthetic oligonucleotide
guacaugugaucuuccccu

SEQ ID NO: 892629 - RNA, 19 nt, Artificial Sequence
  Description of Artificial Sequence: Synthetic oligonucleotide
agaagucagcaccugcagu

SEQ ID NO: 892630 - RNA, 19 nt, Artificial Sequence
  Description of Artificial Sequence: Synthetic oligonucleotide
gacgauaaccugcucucca

SEQ ID NO: 892631 - RNA, 19 nt, Artificial Sequence
  Description of Artificial Sequence: Synthetic oligonucleotide
agucuauaggaagcugccg

SEQ ID NO: 892632 - RNA, 19 nt, Artificial Sequence
  Description of Artificial Sequence: Synthetic oligonucleotide
gaagaaggguucacccagg

SEQ ID NO: 892633 - RNA, 19 nt, Artificial Sequence
  Description of Artificial Sequence: Synthetic oligonucleotide
cauggagcccucagcacgc

SEQ ID NO: 892634 - RNA, 19 nt, Artificial Sequence
  Description of Artificial Sequence: Synthetic oligonucleotide
acagaaguacggacauacc

SEQ ID NO: 892635 - RNA, 19 nt, Artificial Sequence
  Description of Artificial Sequence: Synthetic oligonucleotide
cagggguacucccacaaug

SEQ ID NO: 892636 - RNA, 19 nt, Artificial Sequence
  Description of Artificial Sequence: Synthetic oligonucleotide
caccugauucagcugaaug

SEQ ID NO: 892637 - RNA, 19 nt, Artificial Sequence
  Description of Artificial Sequence: Synthetic oligonucleotide
uccgccacaaaucccugaa

SEQ ID NO: 892638 - RNA, 19 nt, Artificial Sequence
  Description of Artificial Sequence: Synthetic oligonucleotide
aggauguuagcacgacaug

SEQ ID NO: 892639 - RNA, 19 nt, Artificial Sequence
  Description of Artificial Sequence: Synthetic oligonucleotide
caguagucgucaugguggg

SEQ ID NO: 892640 - RNA, 19 nt, Artificial Sequence
  Description of Artificial Sequence: Synthetic oligonucleotide
uccugaucauuaaucucuc

SEQ ID NO: 892641 - RNA, 19 nt, Artificial Sequence
  Description of Artificial Sequence: Synthetic oligonucleotide
guacacagcuugcuugcag

SEQ ID NO: 892642 - RNA, 19 nt, Artificial Sequence
  Description of Artificial Sequence: Synthetic oligonucleotide
uccaaccgucaccucagug

SEQ ID NO: 892643 - RNA, 19 nt, Artificial Sequence
  Description of Artificial Sequence: Synthetic oligonucleotide
acaaugggugggguucugc

SEQ ID NO: 892644 - RNA, 19 nt, Artificial Sequence
  Description of Artificial Sequence: Synthetic oligonucleotide
agcugccgaacucucaacu

SEQ ID NO: 892645 - RNA, 19 nt, Artificial Sequence
  Description of Artificial Sequence: Synthetic oligonucleotide
ugugccauggcagcaggcu

SEQ ID NO: 892646 - RNA, 19 nt, Artificial Sequence
  Description of Artificial Sequence: Synthetic oligonucleotide
gauauuccauccacaggac

SEQ ID NO: 892647 - RNA, 19 nt, Artificial Sequence
  Description of Artificial Sequence: Synthetic oligonucleotide
caauagcauagcagaaguc

SEQ ID NO: 892648 - RNA, 19 nt, Artificial Sequence
  Description of Artificial Sequence: Synthetic oligonucleotide
ggcgaagaaggguucaccc

SEQ ID NO: 892649 - RNA, 19 nt, Artificial Sequence
  Description of Artificial Sequence: Synthetic oligonucleotide
gugcacgucaaaaccuucg

SEQ ID NO: 892650 - RNA, 19 nt, Artificial Sequence
  Description of Artificial Sequence: Synthetic oligonucleotide
aaugagggaauuaguucaa

SEQ ID NO: 892651 - RNA, 19 nt, Artificial Sequence
  Description of Artificial Sequence: Synthetic oligonucleotide
gucugcagauguuaacaac

SEQ ID NO: 892652 - RNA, 19 nt, Artificial Sequence
  Description of Artificial Sequence: Synthetic oligonucleotide
uucacccaggaggagggag

SEQ ID NO: 892653 - RNA, 19 nt, Artificial Sequence
  Description of Artificial Sequence: Synthetic oligonucleotide
cagcuuguggcacugcuuc

SEQ ID NO: 892654 - RNA, 19 nt, Artificial Sequence
  Description of Artificial Sequence: Synthetic oligonucleotide
guacggacauaccagaagu

SEQ ID NO: 892655 - RNA, 19 nt, Artificial Sequence
  Description of Artificial Sequence: Synthetic oligonucleotide
auacagugaagcagccugg

SEQ ID NO: 892656 - RNA, 19 nt, Artificial Sequence
  Description of Artificial Sequence: Synthetic oligonucleotide
caagaugucuaugcgcaug

SEQ ID NO: 892657 - RNA, 19 nt, Artificial Sequence
  Description of Artificial Sequence: Synthetic oligonucleotide
agaaguauacacacugcau

SEQ ID NO: 892658 - RNA, 19 nt, Artificial Sequence
  Description of Artificial Sequence: Synthetic oligonucleotide
cgugccgaugucaagaacc

SEQ ID NO: 892659 - RNA, 19 nt, Artificial Sequence
  Description of Artificial Sequence: Synthetic oligonucleotide
gcaagucaccaucuggucc

SEQ ID NO: 892660 - RNA, 19 nt, Artificial Sequence
  Description of Artificial Sequence: Synthetic oligonucleotide
gcacaagaugucuaugcgc

SEQ ID NO: 892661 - RNA, 19 nt, Artificial Sequence
  Description of Artificial Sequence: Synthetic oligonucleotide
uacccuccaggucugcaga

SEQ ID NO: 892662 - RNA, 19 nt, Artificial Sequence
  Description of Artificial Sequence: Synthetic oligonucleotide
uacaucacugagggcagug

SEQ ID NO: 892663 - RNA, 19 nt, Artificial Sequence
  Description of Artificial Sequence: Synthetic oligonucleotide
aguauacacacugcaucca

SEQ ID NO: 892664 - RNA, 19 nt, Artificial Sequence
  Description of Artificial Sequence: Synthetic oligonucleotide
aggacaccucuccaguucu

SEQ ID NO: 892665 - RNA, 19 nt, Artificial Sequence
  Description of Artificial Sequence: Synthetic oligonucleotide
uuccagagcaagugagccu

SEQ ID NO: 892666 - RNA, 19 nt, Artificial Sequence
  Description of Artificial Sequence: Synthetic oligonucleotide
aaaccgaggccgauuccag

SEQ ID NO: 892667 - RNA, 19 nt, Artificial Sequence
  Description of Artificial Sequence: Synthetic oligonucleotide
uacucccacaauggguggg

SEQ ID NO: 892668 - RNA, 19 nt, Artificial Sequence
  Description of Artificial Sequence: Synthetic oligonucleotide
cacaaaucccugaacucca

SEQ ID NO: 892669 - RNA, 19 nt, Artificial Sequence
  Description of Artificial Sequence: Synthetic oligonucleotide
auuggaccauuuaauuucu

SEQ ID NO: 892670 - RNA, 19 nt, Artificial Sequence
  Description of Artificial Sequence: Synthetic oligonucleotide
uucuuacccuccaggucug

SEQ ID NO: 892671 - RNA, 19 nt, Artificial Sequence
  Description of Artificial Sequence: Synthetic oligonucleotide
cugccaucaucgacaagag

SEQ ID NO: 892672 - RNA, 19 nt, Artificial Sequence
  Description of Artificial Sequence: Synthetic oligonucleotide
guauagguugugccauggc

SEQ ID NO: 892673 - RNA, 19 nt, Artificial Sequence
  Description of Artificial Sequence: Synthetic oligonucleotide
uggcacugcuucuacaauu

SEQ ID NO: 892674 - RNA, 19 nt, Artificial Sequence
  Description of Artificial Sequence: Synthetic oligonucleotide
cauaccagaaguauagguu

SEQ ID NO: 892675 - RNA, 19 nt, Artificial Sequence
  Description of Artificial Sequence: Synthetic oligonucleotide
cacugcauccagugguccc

SEQ ID NO: 892676 - RNA, 19 nt, Artificial Sequence
  Description of Artificial Sequence: Synthetic oligonucleotide
gaugugcacgucaaaaccu

SEQ ID NO: 892677 - RNA, 19 nt, Artificial Sequence
  Description of Artificial Sequence: Synthetic oligonucleotide
caaggugucugcaagccua

SEQ ID NO: 892678 - RNA, 19 nt, Artificial Sequence
  Description of Artificial Sequence: Synthetic oligonucleotide
cuaugcgcaugcucauaag

SEQ ID NO: 892679 - RNA, 19 nt, Artificial Sequence
  Description of Artificial Sequence: Synthetic oligonucleotide
ugcucauaagagggcagug

SEQ ID NO: 892680 - RNA, 19 nt, Artificial Sequence
  Description of Artificial Sequence: Synthetic oligonucleotide
agaugauauuccauccaca

SEQ ID NO: 892681 - RNA, 19 nt, Artificial Sequence
  Description of Artificial Sequence: Synthetic oligonucleotide
gguacaaacugcuugcuau

SEQ ID NO: 892682 - RNA, 19 nt, Artificial Sequence
  Description of Artificial Sequence: Synthetic oligonucleotide
guacucccacaaugggugg

SEQ ID NO: 892683 - RNA, 19 nt, Artificial Sequence
  Description of Artificial Sequence: Synthetic oligonucleotide
aaccgaggccgauuccaga

SEQ ID NO: 892684 - RNA, 19 nt, Artificial Sequence
  Description of Artificial Sequence: Synthetic oligonucleotide
acggacauaccagaaguau

SEQ ID NO: 892685 - RNA, 19 nt, Artificial Sequence
  Description of Artificial Sequence: Synthetic oligonucleotide
acugaucaguucuguccug

SEQ ID NO: 892686 - RNA, 19 nt, Artificial Sequence
  Description of Artificial Sequence: Synthetic oligonucleotide
ucauagacugaaggugcac

SEQ ID NO: 892687 - RNA, 19 nt, Artificial Sequence
  Description of Artificial Sequence: Synthetic oligonucleotide
cacagcuugcuugcagugg

SEQ ID NO: 892688 - RNA, 19 nt, Artificial Sequence
  Description of Artificial Sequence: Synthetic oligonucleotide
ccauggagcccucagcacg

SEQ ID NO: 892689 - RNA, 19 nt, Artificial Sequence
  Description of Artificial Sequence: Synthetic oligonucleotide
acaacgggcuccuccugug

SEQ ID NO: 892690 - RNA, 19 nt, Artificial Sequence
  Description of Artificial Sequence: Synthetic oligonucleotide
cugauucagcugaauguca

SEQ ID NO: 892691 - RNA, 19 nt, Artificial Sequence
  Description of Artificial Sequence: Synthetic oligonucleotide
cuuggccagaugccagagg

SEQ ID NO: 892692 - RNA, 19 nt, Artificial Sequence
  Description of Artificial Sequence: Synthetic oligonucleotide
cuugcacaagaugucuaug

SEQ ID NO: 892693 - RNA, 19 nt, Artificial Sequence
  Description of Artificial Sequence: Synthetic oligonucleotide
ugccaucaucgacaagaga

SEQ ID NO: 892694 - RNA, 19 nt, Artificial Sequence
  Description of Artificial Sequence: Synthetic oligonucleotide
agcccugaacaacgggcuc

SEQ ID NO: 892695 - RNA, 19 nt, Artificial Sequence
  Description of Artificial Sequence: Synthetic oligonucleotide
acgauaaccugcucuccaa

SEQ ID NO: 892696 - RNA, 19 nt, Artificial Sequence
  Description of Artificial Sequence: Synthetic oligonucleotide
cauggcaagucaccaucug

SEQ ID NO: 892697 - RNA, 19 nt, Artificial Sequence
  Description of Artificial Sequence: Synthetic oligonucleotide
gcucucucgaaaauccagg

SEQ ID NO: 892698 - RNA, 19 nt, Artificial Sequence
  Description of Artificial Sequence: Synthetic oligonucleotide
acgacauggcaagucacca

SEQ ID NO: 892699 - RNA, 19 nt, Artificial Sequence
  Description of Artificial Sequence: Synthetic oligonucleotide
agcuccuguggguuugucu

SEQ ID NO: 892700 - RNA, 19 nt, Artificial Sequence
  Description of Artificial Sequence: Synthetic oligonucleotide
aucagucuauaggaagcug

SEQ ID NO: 892701 - RNA, 19 nt, Artificial Sequence
  Description of Artificial Sequence: Synthetic oligonucleotide
gcuacugacuugcuugcug

SEQ ID NO: 892702 - RNA, 19 nt, Artificial Sequence
  Description of Artificial Sequence: Synthetic oligonucleotide
gaaguauagguugugccau

SEQ ID NO: 892703 - RNA, 19 nt, Artificial Sequence
  Description of Artificial Sequence: Synthetic oligonucleotide
ggagucagaugauauucca

SEQ ID NO: 892704 - RNA, 19 nt, Artificial Sequence
  Description of Artificial Sequence: Synthetic oligonucleotide
ugccaugguacaugugauc

SEQ ID NO: 892705 - RNA, 19 nt, Artificial Sequence
  Description of Artificial Sequence: Synthetic oligonucleotide
augagggaauuaguucaag

SEQ ID NO: 892706 - RNA, 19 nt, Artificial Sequence
  Description of Artificial Sequence: Synthetic oligonucleotide
ccuguggcaagaaguauac

SEQ ID NO: 892707 - RNA, 19 nt, Artificial Sequence
  Description of Artificial Sequence: Synthetic oligonucleotide
uugugccauggcagcaggc

SEQ ID NO: 892708 - RNA, 19 nt, Artificial Sequence
  Description of Artificial Sequence: Synthetic oligonucleotide
ugucuaugcgcaugcucau

SEQ ID NO: 892709 - RNA, 19 nt, Artificial Sequence
  Description of Artificial Sequence: Synthetic oligonucleotide
acacugaacauugguagua

SEQ ID NO: 892710 - RNA, 19 nt, Artificial Sequence
  Description of Artificial Sequence: Synthetic oligonucleotide
acagauggugccguggcau

SEQ ID NO: 892711 - RNA, 19 nt, Artificial Sequence
  Description of Artificial Sequence: Synthetic oligonucleotide
cuccacgaucauagcauac

SEQ ID NO: 892712 - RNA, 19 nt, Artificial Sequence
  Description of Artificial Sequence: Synthetic oligonucleotide
uggugccguggcaucagca

SEQ ID NO: 892713 - RNA, 19 nt, Artificial Sequence
  Description of Artificial Sequence: Synthetic oligonucleotide
cuauuggaccauuuaauuu

SEQ ID NO: 892714 - RNA, 19 nt, Artificial Sequence
  Description of Artificial Sequence: Synthetic oligonucleotide
gggacgauaaccugcucuc

SEQ ID NO: 892715 - RNA, 19 nt, Artificial Sequence
  Description of Artificial Sequence: Synthetic oligonucleotide
caaccgucaccucagugga

SEQ ID NO: 892716 - RNA, 19 nt, Artificial Sequence
  Description of Artificial Sequence: Synthetic oligonucleotide
auccuuuucaucagucuau

SEQ ID NO: 892717 - RNA, 19 nt, Artificial Sequence
  Description of Artificial Sequence: Synthetic oligonucleotide
aaguacggacauaccagaa

SEQ ID NO: 892718 - RNA, 19 nt, Artificial Sequence
  Description of Artificial Sequence: Synthetic oligonucleotide
ugaucaguucuguccugau

SEQ ID NO: 892719 - RNA, 19 nt, Artificial Sequence
  Description of Artificial Sequence: Synthetic oligonucleotide
aaggugcaccaggacaccu

SEQ ID NO: 892720 - RNA, 19 nt, Artificial Sequence
  Description of Artificial Sequence: Synthetic oligonucleotide
uuaacaacucaggccguuu

SEQ ID NO: 892721 - RNA, 19 nt, Artificial Sequence
  Description of Artificial Sequence: Synthetic oligonucleotide
ggccguuucuugaugauac

SEQ ID NO: 892722 - RNA, 19 nt, Artificial Sequence
  Description of Artificial Sequence: Synthetic oligonucleotide
ugugcccgugccgauguca

SEQ ID NO: 892723 - RNA, 19 nt, Artificial Sequence
  Description of Artificial Sequence: Synthetic oligonucleotide
gggugagcccugaacaacg

SEQ ID NO: 892724 - RNA, 19 nt, Artificial Sequence
  Description of Artificial Sequence: Synthetic oligonucleotide
cgaagaaggguucacccag

SEQ ID NO: 892725 - RNA, 19 nt, Artificial Sequence
  Description of Artificial Sequence: Synthetic oligonucleotide
caaaccgaggccgauucca

SEQ ID NO: 892726 - RNA, 19 nt, Artificial Sequence
  Description of Artificial Sequence: Synthetic oligonucleotide
gaacaacgggcuccuccug

SEQ ID NO: 892727 - RNA, 19 nt, Artificial Sequence
  Description of Artificial Sequence: Synthetic oligonucleotide
ucucaucagcgcugguccu

SEQ ID NO: 892728 - RNA, 19 nt, Artificial Sequence
  Description of Artificial Sequence: Synthetic oligonucleotide
ucaccucaguggaauguuu

SEQ ID NO: 892729 - RNA, 19 nt, Artificial Sequence
  Description of Artificial Sequence: Synthetic oligonucleotide
ucaccacaagggcuccgga

SEQ ID NO: 892730 - RNA, 19 nt, Artificial Sequence
  Description of Artificial Sequence: Synthetic oligonucleotide
gcauagcugacagacugag

SEQ ID NO: 892731 - RNA, 19 nt, Artificial Sequence
  Description of Artificial Sequence: Synthetic oligonucleotide
agguacaaacugcuugcua

SEQ ID NO: 892732 - RNA, 19 nt, Artificial Sequence
  Description of Artificial Sequence: Synthetic oligonucleotide
auaagagggcagugccccu

SEQ ID NO: 892733 - RNA, 19 nt, Artificial Sequence
  Description of Artificial Sequence: Synthetic oligonucleotide
ucaucagcgcugguccucu

SEQ ID NO: 892734 - RNA, 19 nt, Artificial Sequence
  Description of Artificial Sequence: Synthetic oligonucleotide
gcuucuacaauuuuaccuu

SEQ ID NO: 892735 - RNA, 19 nt, Artificial Sequence
  Description of Artificial Sequence: Synthetic oligonucleotide
guagucgucauggugggcu

SEQ ID NO: 892736 - RNA, 19 nt, Artificial Sequence
  Description of Artificial Sequence: Synthetic oligonucleotide
cugaacauugguaguacau

SEQ ID NO: 892737 - RNA, 19 nt, Artificial Sequence
  Description of Artificial Sequence: Synthetic oligonucleotide
caggcaucggggugagccc

SEQ ID NO: 892738 - RNA, 19 nt, Artificial Sequence
  Description of Artificial Sequence: Synthetic oligonucleotide
aucagcgcugguccucuga

SEQ ID NO: 892739 - RNA, 19 nt, Artificial Sequence
  Description of Artificial Sequence: Synthetic oligonucleotide
gggagggacgauaaccugc

SEQ ID NO: 892740 - RNA, 19 nt, Artificial Sequence
  Description of Artificial Sequence: Synthetic oligonucleotide
cgauuccagagcaagugag

SEQ ID NO: 892741 - RNA, 19 nt, Artificial Sequence
  Description of Artificial Sequence: Synthetic oligonucleotide
cacagggcgcacuugguaa

SEQ ID NO: 892742 - RNA, 19 nt, Artificial Sequence
  Description of Artificial Sequence: Synthetic oligonucleotide
gcugaggaaguacacagcu

SEQ ID NO: 892743 - RNA, 19 nt, Artificial Sequence
  Description of Artificial Sequence: Synthetic oligonucleotide
gggcauacugaucaguucu

SEQ ID NO: 892744 - RNA, 19 nt, Artificial Sequence
  Description of Artificial Sequence: Synthetic oligonucleotide
agcccuauuggaccauuua

SEQ ID NO: 892745 - RNA, 19 nt, Artificial Sequence
  Description of Artificial Sequence: Synthetic oligonucleotide
aucaucgacaagagaccug

SEQ ID NO: 892746 - RNA, 19 nt, Artificial Sequence
  Description of Artificial Sequence: Synthetic oligonucleotide
uucugagggagggacgaua

SEQ ID NO: 892747 - RNA, 19 nt, Artificial Sequence
  Description of Artificial Sequence: Synthetic oligonucleotide
gcucauaagagggcagugc

SEQ ID NO: 892748 - RNA, 19 nt, Artificial Sequence
  Description of Artificial Sequence: Synthetic oligonucleotide
cagcuugcuugcagugggg

SEQ ID NO: 892749 - RNA, 19 nt, Artificial Sequence
  Description of Artificial Sequence: Synthetic oligonucleotide
agucgucauggugggcuac

SEQ ID NO: 892750 - RNA, 19 nt, Artificial Sequence
  Description of Artificial Sequence: Synthetic oligonucleotide
caacgggcuccuccugugg

SEQ ID NO: 892751 - RNA, 19 nt, Artificial Sequence
  Description of Artificial Sequence: Synthetic oligonucleotide
gagggagggacgauaaccu

SEQ ID NO: 892752 - RNA, 19 nt, Artificial Sequence
  Description of Artificial Sequence: Synthetic oligonucleotide
ggugccguggcaucagcac

SEQ ID NO: 892753 - RNA, 19 nt, Artificial Sequence
  Description of Artificial Sequence: Synthetic oligonucleotide
ugagggccauccagaggca

SEQ ID NO: 892754 - RNA, 19 nt, Artificial Sequence
  Description of Artificial Sequence: Synthetic oligonucleotide
accgucaccucaguggaau

SEQ ID NO: 892755 - RNA, 19 nt, Artificial Sequence
  Description of Artificial Sequence: Synthetic oligonucleotide
acauggcaagucaccaucu

SEQ ID NO: 892756 - RNA, 19 nt, Artificial Sequence
  Description of Artificial Sequence: Synthetic oligonucleotide
gccacaaaucccugaacuc

SEQ ID NO: 892757 - RNA, 19 nt, Artificial Sequence
  Description of Artificial Sequence: Synthetic oligonucleotide
gaggccggugcugacugug

SEQ ID NO: 892758 - RNA, 19 nt, Artificial Sequence
  Description of Artificial Sequence: Synthetic oligonucleotide
caagagaccugugcccgug

SEQ ID NO: 892759 - RNA, 19 nt, Artificial Sequence
  Description of Artificial Sequence: Synthetic oligonucleotide
ccuuuucaucagucuauag

SEQ ID NO: 892760 - RNA, 19 nt, Artificial Sequence
  Description of Artificial Sequence: Synthetic oligonucleotide
gcgcacuugguaaacuucc

SEQ ID NO: 892761 - RNA, 19 nt, Artificial Sequence
  Description of Artificial Sequence: Synthetic oligonucleotide
gguccaaccgucaccucag

SEQ ID NO: 892762 - RNA, 19 nt, Artificial Sequence
  Description of Artificial Sequence: Synthetic oligonucleotide
gucauagacugaaggugca

SEQ ID NO: 892763 - RNA, 19 nt, Artificial Sequence
  Description of Artificial Sequence: Synthetic oligonucleotide
cagauggugccguggcauc

SEQ ID NO: 892764 - RNA, 19 nt, Artificial Sequence
  Description of Artificial Sequence: Synthetic oligonucleotide
caagccuaaacuccauggu

SEQ ID NO: 892765 - RNA, 19 nt, Artificial Sequence
  Description of Artificial Sequence: Synthetic oligonucleotide
cgacaagagaccugugccc

SEQ ID NO: 892766 - RNA, 19 nt, Artificial Sequence
  Description of Artificial Sequence: Synthetic oligonucleotide
gaauuaguucaaggugucu

SEQ ID NO: 892767 - RNA, 19 nt, Artificial Sequence
  Description of Artificial Sequence: Synthetic oligonucleotide
acagcauagcugacagacu

SEQ ID NO: 892768 - RNA, 19 nt, Artificial Sequence
  Description of Artificial Sequence: Synthetic oligonucleotide
ugugcccaaaagggugcca

SEQ ID NO: 892769 - RNA, 19 nt, Artificial Sequence
  Description of Artificial Sequence: Synthetic oligonucleotide
ccacaagggcuccggaucc

SEQ ID NO: 892770 - RNA, 19 nt, Artificial Sequence
  Description of Artificial Sequence: Synthetic oligonucleotide
gauccgccacaaaucccug

SEQ ID NO: 892771 - RNA, 19 nt, Artificial Sequence
  Description of Artificial Sequence: Synthetic oligonucleotide
gcccuauuggaccauuuaa

SEQ ID NO: 892772 - RNA, 19 nt, Artificial Sequence
  Description of Artificial Sequence: Synthetic oligonucleotide
gcagaagucagcaccugca

SEQ ID NO: 892773 - RNA, 19 nt, Artificial Sequence
  Description of Artificial Sequence: Synthetic oligonucleotide
uagucgucauggugggcua

SEQ ID NO: 892774 - RNA, 19 nt, Artificial Sequence
  Description of Artificial Sequence: Synthetic oligonucleotide
cugagggagggacgauaac

SEQ ID NO: 892775 - RNA, 19 nt, Artificial Sequence
  Description of Artificial Sequence: Synthetic oligonucleotide
agucaccacaagggcuccg

SEQ ID NO: 892776 - RNA, 19 nt, Artificial Sequence
  Description of Artificial Sequence: Synthetic oligonucleotide
caucgacaagagaccugug

SEQ ID NO: 892777 - RNA, 19 nt, Artificial Sequence
  Description of Artificial Sequence: Synthetic oligonucleotide
gugccgaugucaagaacca

SEQ ID NO: 892778 - RNA, 19 nt, Artificial Sequence
  Description of Artificial Sequence: Synthetic oligonucleotide
gcacuugguaaacuuccuc

SEQ ID NO: 892779 - RNA, 19 nt, Artificial Sequence
  Description of Artificial Sequence: Synthetic oligonucleotide
ggcaagucaccaucugguc

SEQ ID NO: 892780 - RNA, 19 nt, Artificial Sequence
  Description of Artificial Sequence: Synthetic oligonucleotide
ggcauacugaucaguucug

SEQ ID NO: 892781 - RNA, 19 nt, Artificial Sequence
  Description of Artificial Sequence: Synthetic oligonucleotide
gcgaagaaggguucaccca

SEQ ID NO: 892782 - RNA, 19 nt, Artificial Sequence
  Description of Artificial Sequence: Synthetic oligonucleotide
uggucccgccacugaagcu

SEQ ID NO: 892783 - RNA, 19 nt, Artificial Sequence
  Description of Artificial Sequence: Synthetic oligonucleotide
cacaagggcuccggauccg

SEQ ID NO: 892784 - RNA, 19 nt, Artificial Sequence
  Description of Artificial Sequence: Synthetic oligonucleotide
cugcucucucgaaaaucca

SEQ ID NO: 892785 - RNA, 19 nt, Artificial Sequence
  Description of Artificial Sequence: Synthetic oligonucleotide
cuuaucacugaagccauuu

SEQ ID NO: 892786 - RNA, 19 nt, Artificial Sequence
  Description of Artificial Sequence: Synthetic oligonucleotide
agaugucuaugcgcaugcu

SEQ ID NO: 892787 - RNA, 19 nt, Artificial Sequence
  Description of Artificial Sequence: Synthetic oligonucleotide
cucuccaaaccgaggccga

SEQ ID NO: 892788 - RNA, 19 nt, Artificial Sequence
  Description of Artificial Sequence: Synthetic oligonucleotide
accugugcuuggccagaug

SEQ ID NO: 892789 - RNA, 19 nt, Artificial Sequence
  Description of Artificial Sequence: Synthetic oligonucleotide
gcacgucaaaaccuucgca

SEQ ID NO: 892790 - RNA, 19 nt, Artificial Sequence
  Description of Artificial Sequence: Synthetic oligonucleotide
agguugugccauggcagca

SEQ ID NO: 892791 - RNA, 19 nt, Artificial Sequence
  Description of Artificial Sequence: Synthetic oligonucleotide
gagucagaugauauuccau

SEQ ID NO: 892792 - RNA, 19 nt, Artificial Sequence
  Description of Artificial Sequence: Synthetic oligonucleotide
cgaugucaagaaccaaggc

SEQ ID NO: 892793 - RNA, 19 nt, Artificial Sequence
  Description of Artificial Sequence: Synthetic oligonucleotide
caucaucgacaagagaccu

SEQ ID NO: 892794 - RNA, 19 nt, Artificial Sequence
  Description of Artificial Sequence: Synthetic oligonucleotide
accuucgcagucaccacaa

SEQ ID NO: 892795 - RNA, 19 nt, Artificial Sequence
  Description of Artificial Sequence: Synthetic oligonucleotide
gguuugucugugcccaaaa

SEQ ID NO: 892796 - RNA, 19 nt, Artificial Sequence
  Description of Artificial Sequence: Synthetic oligonucleotide
gccaugguacaugugaucu

SEQ ID NO: 892797 - RNA, 19 nt, Artificial Sequence
  Description of Artificial Sequence: Synthetic oligonucleotide
cugccgaacucucaacugu

SEQ ID NO: 892798 - RNA, 19 nt, Artificial Sequence
  Description of Artificial Sequence: Synthetic oligonucleotide
gguccauuucaauguccca

SEQ ID NO: 892799 - RNA, 19 nt, Artificial Sequence
  Description of Artificial Sequence: Synthetic oligonucleotide
caaucaguuccgugucaaa

SEQ ID NO: 892800 - RNA, 19 nt, Artificial Sequence
  Description of Artificial Sequence: Synthetic oligonucleotide
ucuccaaaccgaggccgau

SEQ ID NO: 892801 - RNA, 19 nt, Artificial Sequence
  Description of Artificial Sequence: Synthetic oligonucleotide
cugcuccgccccaagguga

SEQ ID NO: 892802 - RNA, 19 nt, Artificial Sequence
  Description of Artificial Sequence: Synthetic oligonucleotide
ggauccgccacaaaucccu

SEQ ID NO: 892803 - RNA, 19 nt, Artificial Sequence
  Description of Artificial Sequence: Synthetic oligonucleotide
guggcgaagaaggguucac

SEQ ID NO: 892804 - RNA, 19 nt, Artificial Sequence
  Description of Artificial Sequence: Synthetic oligonucleotide
ggacgauaaccugcucucc

SEQ ID NO: 892805 - RNA, 19 nt, Artificial Sequence
  Description of Artificial Sequence: Synthetic oligonucleotide
aggcaucggggugagcccu

SEQ ID NO: 892806 - RNA, 19 nt, Artificial Sequence
  Description of Artificial Sequence: Synthetic oligonucleotide
gagcccugaacaacgggcu

SEQ ID NO: 892807 - RNA, 19 nt, Artificial Sequence
  Description of Artificial Sequence: Synthetic oligonucleotide
gcuugcuauggcaggcugc

SEQ ID NO: 892808 - RNA, 19 nt, Artificial Sequence
  Description of Artificial Sequence: Synthetic oligonucleotide
cgucaaaaccuucgcaguc

SEQ ID NO: 892809 - RNA, 19 nt, Artificial Sequence
  Description of Artificial Sequence: Synthetic oligonucleotide
cuccggauccgccacaaau

SEQ ID NO: 892810 - RNA, 19 nt, Artificial Sequence
  Description of Artificial Sequence: Synthetic oligonucleotide
caucagucuauaggaagcu

SEQ ID NO: 892811 - RNA, 19 nt, Artificial Sequence
  Description of Artificial Sequence: Synthetic oligonucleotide
cuuacccuccaggucugca

SEQ ID NO: 892812 - RNA, 19 nt, Artificial Sequence
  Description of Artificial Sequence: Synthetic oligonucleotide
gagguacaaacugcuugcu

SEQ ID NO: 892813 - RNA, 19 nt, Artificial Sequence
  Description of Artificial Sequence: Synthetic oligonucleotide
auggcaggcugcugagcua

SEQ ID NO: 892814 - RNA, 19 nt, Artificial Sequence
  Description of Artificial Sequence: Synthetic oligonucleotide
ugaggccggugcugacugu

SEQ ID NO: 892815 - RNA, 19 nt, Artificial Sequence
  Description of Artificial Sequence: Synthetic oligonucleotide
cacugacacaaagacagau

SEQ ID NO: 892816 - RNA, 19 nt, Artificial Sequence
  Description of Artificial Sequence: Synthetic oligonucleotide
gagggacgauaaccugcuc

SEQ ID NO: 892817 - RNA, 19 nt, Artificial Sequence
  Description of Artificial Sequence: Synthetic oligonucleotide
ccuauuggaccauuuaauu

SEQ ID NO: 892818 - RNA, 19 nt, Artificial Sequence
  Description of Artificial Sequence: Synthetic oligonucleotide
ggcgcacuugguaaacuuc

SEQ ID NO: 892819 - RNA, 19 nt, Artificial Sequence
  Description of Artificial Sequence: Synthetic oligonucleotide
agggcgcacuugguaaacu

SEQ ID NO: 892820 - RNA, 19 nt, Artificial Sequence
  Description of Artificial Sequence: Synthetic oligonucleotide
cagggcgcacuugguaaac

SEQ ID NO: 892821 - RNA, 19 nt, Artificial Sequence
  Description of Artificial Sequence: Synthetic oligonucleotide
ccucaauagcauagcagaa

SEQ ID NO: 892822 - RNA, 19 nt, Artificial Sequence
  Description of Artificial Sequence: Synthetic oligonucleotide
gguucaugaggccggugcu

SEQ ID NO: 892823 - RNA, 19 nt, Artificial Sequence
  Description of Artificial Sequence: Synthetic oligonucleotide
gcucuccaagacuggucug

SEQ ID NO: 892824 - RNA, 19 nt, Artificial Sequence
  Description of Artificial Sequence: Synthetic oligonucleotide
caguggucccgccacugaa

SEQ ID NO: 892825 - RNA, 19 nt, Artificial Sequence
  Description of Artificial Sequence: Synthetic oligonucleotide
caccaucugguccaaccgu

SEQ ID NO: 892826 - RNA, 19 nt, Artificial Sequence
  Description of Artificial Sequence: Synthetic oligonucleotide
ccaaaccgaggccgauucc

SEQ ID NO: 892827 - RNA, 19 nt, Artificial Sequence
  Description of Artificial Sequence: Synthetic oligonucleotide
gccggugcugacugugcug

SEQ ID NO: 892828 - RNA, 19 nt, Artificial Sequence
  Description of Artificial Sequence: Synthetic oligonucleotide
gguggcgaagaaggguuca

SEQ ID NO: 892829 - RNA, 19 nt, Artificial Sequence
  Description of Artificial Sequence: Synthetic oligonucleotide
ccuccuguggcaagaagua

SEQ ID NO: 892830 - RNA, 19 nt, Artificial Sequence
  Description of Artificial Sequence: Synthetic oligonucleotide
guuccgugucaaacagcuc

SEQ ID NO: 892831 - RNA, 19 nt, Artificial Sequence
  Description of Artificial Sequence: Synthetic oligonucleotide
guuaacaacucaggccguu

SEQ ID NO: 892832 - RNA, 19 nt, Artificial Sequence
  Description of Artificial Sequence: Synthetic oligonucleotide
cccuauuggaccauuuaau

SEQ ID NO: 892833 - RNA, 19 nt, Artificial Sequence
  Description of Artificial Sequence: Synthetic oligonucleotide
caucagcgcugguccucug

SEQ ID NO: 892834 - RNA, 19 nt, Artificial Sequence
  Description of Artificial Sequence: Synthetic oligonucleotide
cuguggcaagaaguauaca

SEQ ID NO: 892835 - RNA, 19 nt, Artificial Sequence
  Description of Artificial Sequence: Synthetic oligonucleotide
cgaaaauccagggagugcu

SEQ ID NO: 892836 - RNA, 19 nt, Artificial Sequence
  Description of Artificial Sequence: Synthetic oligonucleotide
gcccgugccgaugucaaga

SEQ ID NO: 892837 - RNA, 19 nt, Artificial Sequence
  Description of Artificial Sequence: Synthetic oligonucleotide
aggcuguaccacacacagu

SEQ ID NO: 892838 - RNA, 19 nt, Artificial Sequence
  Description of Artificial Sequence: Synthetic oligonucleotide
ccagaugccagagguacaa

SEQ ID NO: 892839 - RNA, 19 nt, Artificial Sequence
  Description of Artificial Sequence: Synthetic oligonucleotide
guuagccuugaagauccuu

SEQ ID NO: 892840 - RNA, 19 nt, Artificial Sequence
  Description of Artificial Sequence: Synthetic oligonucleotide
ggguacucccacaaugggu

SEQ ID NO: 892841 - RNA, 19 nt, Artificial Sequence
  Description of Artificial Sequence: Synthetic oligonucleotide
ggcagugaagucaguagau

SEQ ID NO: 892842 - RNA, 19 nt, Artificial Sequence
  Description of Artificial Sequence: Synthetic oligonucleotide
gggccauccagaggcacuc

SEQ ID NO: 892843 - RNA, 19 nt, Artificial Sequence
  Description of Artificial Sequence: Synthetic oligonucleotide
gucuaugcgcaugcucaua

SEQ ID NO: 892844 - RNA, 19 nt, Artificial Sequence
  Description of Artificial Sequence: Synthetic oligonucleotide
cggauccgccacaaauccc

SEQ ID NO: 892845 - RNA, 19 nt, Artificial Sequence
  Description of Artificial Sequence: Synthetic oligonucleotide
gugccaugguacaugugau

SEQ ID NO: 892846 - RNA, 19 nt, Artificial Sequence
  Description of Artificial Sequence: Synthetic oligonucleotide
ccgaacucucaacuguaaa

SEQ ID NO: 892847 - RNA, 19 nt, Artificial Sequence
  Description of Artificial Sequence: Synthetic oligonucleotide
ucccgccacugaagcuccu

SEQ ID NO: 892848 - RNA, 19 nt, Artificial Sequence
  Description of Artificial Sequence: Synthetic oligonucleotide
gugcccgugccgaugucaa

SEQ ID NO: 892849 - RNA, 19 nt, Artificial Sequence
  Description of Artificial Sequence: Synthetic oligonucleotide
cggacauaccagaaguaua

SEQ ID NO: 892850 - RNA, 19 nt, Artificial Sequence
  Description of Artificial Sequence: Synthetic oligonucleotide
gcauacugaucaguucugu

SEQ ID NO: 892851 - RNA, 19 nt, Artificial Sequence
  Description of Artificial Sequence: Synthetic oligonucleotide
aggugucugcaagccuaaa

SEQ ID NO: 892852 - RNA, 19 nt, Artificial Sequence
  Description of Artificial Sequence: Synthetic oligonucleotide
ccgccacaaaucccugaac

SEQ ID NO: 892853 - RNA, 19 nt, Artificial Sequence
  Description of Artificial Sequence: Synthetic oligonucleotide
ccgucaccucaguggaaug

SEQ ID NO: 892854 - RNA, 19 nt, Artificial Sequence
  Description of Artificial Sequence: Synthetic oligonucleotide
ccguuucuugaugauacua

SEQ ID NO: 892855 - RNA, 19 nt, Artificial Sequence
  Description of Artificial Sequence: Synthetic oligonucleotide
ggcuaccaggcaucggggu

SEQ ID NO: 892856 - RNA, 19 nt, Artificial Sequence
  Description of Artificial Sequence: Synthetic oligonucleotide
cccaaucaguuccguguca

SEQ ID NO: 892857 - RNA, 19 nt, Artificial Sequence
  Description of Artificial Sequence: Synthetic oligonucleotide
ccgugccgaugucaagaac

SEQ ID NO: 892858 - RNA, 19 nt, Artificial Sequence
  Description of Artificial Sequence: Synthetic oligonucleotide
cugugcccgugccgauguc

SEQ ID NO: 892859 - RNA, 19 nt, Artificial Sequence
  Description of Artificial Sequence: Synthetic oligonucleotide
gccguuucuugaugauacu

SEQ ID NO: 892860 - RNA, 19 nt, Artificial Sequence
  Description of Artificial Sequence: Synthetic oligonucleotide
ggcaucggggugagcccug

SEQ ID NO: 892861 - RNA, 19 nt, Artificial Sequence
  Description of Artificial Sequence: Synthetic oligonucleotide
gcacucugggauccacugu

SEQ ID NO: 892862 - RNA, 19 nt, Artificial Sequence
  Description of Artificial Sequence: Synthetic oligonucleotide
cugcuugcuauggcaggcu

SEQ ID NO: 892863 - RNA, 19 nt, Artificial Sequence
  Description of Artificial Sequence: Synthetic oligonucleotide
guccaaccgucaccucagu

SEQ ID NO: 892864 - RNA, 19 nt, Artificial Sequence
  Description of Artificial Sequence: Synthetic oligonucleotide
ggcaccugauucagcugaa

SEQ ID NO: 892865 - RNA, 19 nt, Artificial Sequence
  Description of Artificial Sequence: Synthetic oligonucleotide
ccaguggucccgccacuga

SEQ ID NO: 892866 - RNA, 19 nt, Artificial Sequence
  Description of Artificial Sequence: Synthetic oligonucleotide
caucggggugagcccugaa

SEQ ID NO: 892867 - RNA, 19 nt, Artificial Sequence
  Description of Artificial Sequence: Synthetic oligonucleotide
cccgugccgaugucaagaa

SEQ ID NO: 892868 - RNA, 19 nt, Artificial Sequence
  Description of Artificial Sequence: Synthetic oligonucleotide
ggccggugcugacugugcu

SEQ ID NO: 892869 - RNA, 19 nt, Artificial Sequence
  Description of Artificial Sequence: Synthetic oligonucleotide
ggcagugccccuccccaau

SEQ ID NO: 892870 - RNA, 19 nt, Artificial Sequence
  Description of Artificial Sequence: Synthetic oligonucleotide
ccacagcuccagguuccag

SEQ ID NO: 892871 - RNA, 19 nt, Artificial Sequence
  Description of Artificial Sequence: Synthetic oligonucleotide
cagcccuauuggaccauuu

SEQ ID NO: 892872 - RNA, 19 nt, Artificial Sequence
  Description of Artificial Sequence: Synthetic oligonucleotide
cccaaaagggugccauggu

SEQ ID NO: 892873 - RNA, 19 nt, Artificial Sequence
  Description of Artificial Sequence: Synthetic oligonucleotide
cuccaaaccgaggccgauu

SEQ ID NO: 892874 - RNA, 19 nt, Artificial Sequence
  Description of Artificial Sequence: Synthetic oligonucleotide
ccugugcccgugccgaugu

SEQ ID NO: 892875 - RNA, 19 nt, Artificial Sequence
  Description of Artificial Sequence: Synthetic oligonucleotide
gcagggguacucccacaau

SEQ ID NO: 892876 - RNA, 19 nt, Artificial Sequence
  Description of Artificial Sequence: Synthetic oligonucleotide
gcaucggggugagcccuga

SEQ ID NO: 892877 - RNA, 19 nt, Artificial Sequence
  Description of Artificial Sequence: Synthetic oligonucleotide
ccaccugugcuuggccaga

SEQ ID NO: 892878 - RNA, 19 nt, Artificial Sequence
  Description of Artificial Sequence: Synthetic oligonucleotide
ccugaacaacgggcuccuc

SEQ ID NO: 892879 - RNA, 19 nt, Artificial Sequence
  Description of Artificial Sequence: Synthetic oligonucleotide
gguuagccuugaagauccu

SEQ ID NO: 892880 - RNA, 19 nt, Artificial Sequence
  Description of Artificial Sequence: Synthetic oligonucleotide
ccgccacugaagcuccugu

SEQ ID NO: 892881 - RNA, 19 nt, Artificial Sequence
  Description of Artificial Sequence: Synthetic oligonucleotide
cgucaccucaguggaaugu

SEQ ID NO: 892882 - RNA, 19 nt, Artificial Sequence
  Description of Artificial Sequence: Synthetic oligonucleotide
cucagggcuugggcauacu

SEQ ID NO: 892883 - RNA, 19 nt, Artificial Sequence
  Description of Artificial Sequence: Synthetic oligonucleotide
gcaccugauucagcugaau

SEQ ID NO: 892884 - RNA, 19 nt, Artificial Sequence
  Description of Artificial Sequence: Synthetic oligonucleotide
gcagcccuauuggaccauu

SEQ ID NO: 892885 - RNA, 19 nt, Artificial Sequence
  Description of Artificial Sequence: Synthetic oligonucleotide
gccguggcaucagcacagu

SEQ ID NO: 892886 - RNA, 19 nt, Artificial Sequence
  Description of Artificial Sequence: Synthetic oligonucleotide
cggcagggguacucccaca

SEQ ID NO: 892887 - RNA, 19 nt, Artificial Sequence
  Description of Artificial Sequence: Synthetic oligonucleotide
ccuccccaaucaguuccgu

SEQ ID NO: 892888 - RNA, 19 nt, Artificial Sequence
  Description of Artificial Sequence: Synthetic oligonucleotide
gaaucaagcacccacaagg

SEQ ID NO: 892889 - RNA, 19 nt, Artificial Sequence
  Description of Artificial Sequence: Synthetic oligonucleotide
aauauagcauuuccuaagg

SEQ ID NO: 892890 - RNA, 19 nt, Artificial Sequence
  Description of Artificial Sequence: Synthetic oligonucleotide
aaacaugagggacauuuac

SEQ ID NO: 892891 - RNA, 19 nt, Artificial Sequence
  Description of Artificial Sequence: Synthetic oligonucleotide
agcauuucaggccaggacc

SEQ ID NO: 892892 - RNA, 19 nt, Artificial Sequence
  Description of Artificial Sequence: Synthetic oligonucleotide
uaaacuacagcacuuuuca

SEQ ID NO: 892893 - RNA, 19 nt, Artificial Sequence
  Description of Artificial Sequence: Synthetic oligonucleotide
aaauaacucacagagacca

SEQ ID NO: 892894 - RNA, 19 nt, Artificial Sequence
  Description of Artificial Sequence: Synthetic oligonucleotide
uccuaaggaaccaacagag

SEQ ID NO: 892895 - RNA, 19 nt, Artificial Sequence
  Description of Artificial Sequence: Synthetic oligonucleotide
gaagcgguaacauuuacac

SEQ ID NO: 892896 - RNA, 19 nt, Artificial Sequence
  Description of Artificial Sequence: Synthetic oligonucleotide
ucuccaauacauaugcgag

SEQ ID NO: 892897 - RNA, 19 nt, Artificial Sequence
  Description of Artificial Sequence: Synthetic oligonucleotide
aaaauauagcauuuccuaa

SEQ ID NO: 892898 - RNA, 19 nt, Artificial Sequence
  Description of Artificial Sequence: Synthetic oligonucleotide
agcggaauaagacaaaacu

SEQ ID NO: 892899 - RNA, 19 nt, Artificial Sequence
  Description of Artificial Sequence: Synthetic oligonucleotide
uacauaugcgagcaaauac

SEQ ID NO: 892900 - RNA, 19 nt, Artificial Sequence
  Description of Artificial Sequence: Synthetic oligonucleotide
auagcauuuccuaaggaac

SEQ ID NO: 892901 - RNA, 19 nt, Artificial Sequence
  Description of Artificial Sequence: Synthetic oligonucleotide
gaucgcugcaagcugaggg

SEQ ID NO: 892902 - RNA, 19 nt, Artificial Sequence
  Description of Artificial Sequence: Synthetic oligonucleotide
uauagcauuuccuaaggaa

SEQ ID NO: 892903 - RNA, 19 nt, Artificial Sequence
  Description of Artificial Sequence: Synthetic oligonucleotide
aauucugggccgccgcucc

SEQ ID NO: 892904 - RNA, 19 nt, Artificial Sequence
  Description of Artificial Sequence: Synthetic oligonucleotide
aacuacacgaggcgaacuc

SEQ ID NO: 892905 - RNA, 19 nt, Artificial Sequence
  Description of Artificial Sequence: Synthetic oligonucleotide
ucuguaagguucagaaucc

SEQ ID NO: 892906 - RNA, 19 nt, Artificial Sequence
  Description of Artificial Sequence: Synthetic oligonucleotide
ugguauuugguguagggac

SEQ ID NO: 892907 - RNA, 19 nt, Artificial Sequence
  Description of Artificial Sequence: Synthetic oligonucleotide
uucugaaucaagcacccac

SEQ ID NO: 892908 - RNA, 19 nt, Artificial Sequence
  Description of Artificial Sequence: Synthetic oligonucleotide
acaagagagggcuucauca

SEQ ID NO: 892909 - RNA, 19 nt, Artificial Sequence
  Description of Artificial Sequence: Synthetic oligonucleotide
uuuauuuguuggaagcggu

SEQ ID NO: 892910 - RNA, 19 nt, Artificial Sequence
  Description of Artificial Sequence: Synthetic oligonucleotide
aaaacuacacgaggcgaac

SEQ ID NO: 892911 - RNA, 19 nt, Artificial Sequence
  Description of Artificial Sequence: Synthetic oligonucleotide
ccaaauaacucacagagac

SEQ ID NO: 892912 - RNA, 19 nt, Artificial Sequence
  Description of Artificial Sequence: Synthetic oligonucleotide
auuuguuggaagcgguaac

SEQ ID NO: 892913 - RNA, 19 nt, Artificial Sequence
  Description of Artificial Sequence: Synthetic oligonucleotide
gagaacacggucgauuugg

SEQ ID NO: 892914 - RNA, 19 nt, Artificial Sequence
  Description of Artificial Sequence: Synthetic oligonucleotide
uguuugggaggcuggaccg

SEQ ID NO: 892915 - RNA, 19 nt, Artificial Sequence
  Description of Artificial Sequence: Synthetic oligonucleotide
ugagacuaaacuacagcac

SEQ ID NO: 892916 - RNA, 19 nt, Artificial Sequence
  Description of Artificial Sequence: Synthetic oligonucleotide
ugcacucacaaaauauagc

SEQ ID NO: 892917 - RNA, 19 nt, Artificial Sequence
  Description of Artificial Sequence: Synthetic oligonucleotide
guuguuugggucaaguugc

SEQ ID NO: 892918 - RNA, 19 nt, Artificial Sequence
  Description of Artificial Sequence: Synthetic oligonucleotide
uccaauacauaugcgagca

SEQ ID NO: 892919 - RNA, 19 nt, Artificial Sequence
  Description of Artificial Sequence: Synthetic oligonucleotide
gugagacuaaacuacagca

SEQ ID NO: 892920 - RNA, 19 nt, Artificial Sequence
  Description of Artificial Sequence: Synthetic oligonucleotide
cucauuggaagucagccug

SEQ ID NO: 892921 - RNA, 19 nt, Artificial Sequence
  Description of Artificial Sequence: Synthetic oligonucleotide
uccgguuucaggcuuaauc

SEQ ID NO: 892922 - RNA, 19 nt, Artificial Sequence
  Description of Artificial Sequence: Synthetic oligonucleotide
agaguuucugaaucaagca

SEQ ID NO: 892923 - RNA, 19 nt, Artificial Sequence
  Description of Artificial Sequence: Synthetic oligonucleotide
cacucaguccguuuggagg

SEQ ID NO: 892924 - RNA, 19 nt, Artificial Sequence
  Description of Artificial Sequence: Synthetic oligonucleotide
cauuuuacucagaucaguc

SEQ ID NO: 892925 - RNA, 19 nt, Artificial Sequence
  Description of Artificial Sequence: Synthetic oligonucleotide
aagguuacacugcccgccg

SEQ ID NO: 892926 - RNA, 19 nt, Artificial Sequence
  Description of Artificial Sequence: Synthetic oligonucleotide
ugaaucaagcacccacaag

SEQ ID NO: 892927 - RNA, 19 nt, Artificial Sequence
  Description of Artificial Sequence: Synthetic oligonucleotide
uccauuuuacucagaucag

SEQ ID NO: 892928 - RNA, 19 nt, Artificial Sequence
  Description of Artificial Sequence: Synthetic oligonucleotide
agagaccaaccacacaguc

SEQ ID NO: 892929 - RNA, 19 nt, Artificial Sequence
  Description of Artificial Sequence: Synthetic oligonucleotide
aaaaguccgaguugcugga

SEQ ID NO: 892930 - RNA, 19 nt, Artificial Sequence
  Description of Artificial Sequence: Synthetic oligonucleotide
uccuucagcgggcagcccg

SEQ ID NO: 892931 - RNA, 19 nt, Artificial Sequence
  Description of Artificial Sequence: Synthetic oligonucleotide
guacgggugguacaggccg

SEQ ID NO: 892932 - RNA, 19 nt, Artificial Sequence
  Description of Artificial Sequence: Synthetic oligonucleotide
agagagggcuucaucaagc

SEQ ID NO: 892933 - RNA, 19 nt, Artificial Sequence
  Description of Artificial Sequence: Synthetic oligonucleotide
acguacgggugguacaggc

SEQ ID NO: 892934 - RNA, 19 nt, Artificial Sequence
  Description of Artificial Sequence: Synthetic oligonucleotide
uuuguuggaagcgguaaca

SEQ ID NO: 892935 - RNA, 19 nt, Artificial Sequence
  Description of Artificial Sequence: Synthetic oligonucleotide
cuugguggcccgaagcgcg

SEQ ID NO: 892936 - RNA, 19 nt, Artificial Sequence
  Description of Artificial Sequence: Synthetic oligonucleotide
ucggaauuggauaguuggc

SEQ ID NO: 892937 - RNA, 19 nt, Artificial Sequence
  Description of Artificial Sequence: Synthetic oligonucleotide
uucaggcuuaaucccguag

SEQ ID NO: 892938 - RNA, 19 nt, Artificial Sequence
  Description of Artificial Sequence: Synthetic oligonucleotide
ggauaguuggcccuguuug

SEQ ID NO: 892939 - RNA, 19 nt, Artificial Sequence
  Description of Artificial Sequence: Synthetic oligonucleotide
uucgcugcgggguuguuug

SEQ ID NO: 892940 - RNA, 19 nt, Artificial Sequence
  Description of Artificial Sequence: Synthetic oligonucleotide
cacgaggcggagaacacgg

SEQ ID NO: 892941 - RNA, 19 nt, Artificial Sequence
  Description of Artificial Sequence: Synthetic oligonucleotide
gcaggaacgaguugcacgg

SEQ ID NO: 892942 - RNA, 19 nt, Artificial Sequence
  Description of Artificial Sequence: Synthetic oligonucleotide
gaggcggagaacacggucg

SEQ ID NO: 892943 - RNA, 19 nt, Artificial Sequence
  Description of Artificial Sequence: Synthetic oligonucleotide
acucaguccguuuggagga

SEQ ID NO: 892944 - RNA, 19 nt, Artificial Sequence
  Description of Artificial Sequence: Synthetic oligonucleotide
cuccaauacauaugcgagc

SEQ ID NO: 892945 - RNA, 19 nt, Artificial Sequence
  Description of Artificial Sequence: Synthetic oligonucleotide
aauuggauaguuggcccug

SEQ ID NO: 892946 - RNA, 19 nt, Artificial Sequence
  Description of Artificial Sequence: Synthetic oligonucleotide
gagacuaaacuacagcacu

SEQ ID NO: 892947 - RNA, 19 nt, Artificial Sequence
  Description of Artificial Sequence: Synthetic oligonucleotide
gcacucacaaaauauagca

SEQ ID NO: 892948 - RNA, 19 nt, Artificial Sequence
  Description of Artificial Sequence: Synthetic oligonucleotide
ugggucaaguugcugcugc

SEQ ID NO: 892949 - RNA, 19 nt, Artificial Sequence
  Description of Artificial Sequence: Synthetic oligonucleotide
aguugcacgggaauucugg

SEQ ID NO: 892950 - RNA, 19 nt, Artificial Sequence
  Description of Artificial Sequence: Synthetic oligonucleotide
agauucucggaauuggaua

SEQ ID NO: 892951 - RNA, 19 nt, Artificial Sequence
  Description of Artificial Sequence: Synthetic oligonucleotide
cuguuugggaggcuggacc

SEQ ID NO: 892952 - RNA, 19 nt, Artificial Sequence
  Description of Artificial Sequence: Synthetic oligonucleotide
ggugagacuaaacuacagc

SEQ ID NO: 892953 - RNA, 19 nt, Artificial Sequence
  Description of Artificial Sequence: Synthetic oligonucleotide
agcgcggguguccauaauc

SEQ ID NO: 892954 - RNA, 19 nt, Artificial Sequence
  Description of Artificial Sequence: Synthetic oligonucleotide
uauuuguuggaagcgguaa

SEQ ID NO: 892955 - RNA, 19 nt, Artificial Sequence
  Description of Artificial Sequence: Synthetic oligonucleotide
cauuuccuaaggaaccaac

SEQ ID NO: 892956 - RNA, 19 nt, Artificial Sequence
  Description of Artificial Sequence: Synthetic oligonucleotide
ggcuuaaucccguaguggc

SEQ ID NO: 892957 - RNA, 19 nt, Artificial Sequence
  Description of Artificial Sequence: Synthetic oligonucleotide
gaacacggucgauuugggg

SEQ ID NO: 892958 - RNA, 19 nt, Artificial Sequence
  Description of Artificial Sequence: Synthetic oligonucleotide
ugcgagcaaauacaguguc

SEQ ID NO: 892959 - RNA, 19 nt, Artificial Sequence
  Description of Artificial Sequence: Synthetic oligonucleotide
ggaauuggauaguuggccc

SEQ ID NO: 892960 - RNA, 19 nt, Artificial Sequence
  Description of Artificial Sequence: Synthetic oligonucleotide
auauagcauuuccuaagga

SEQ ID NO: 892961 - RNA, 19 nt, Artificial Sequence
  Description of Artificial Sequence: Synthetic oligonucleotide
accacacagucacuucuac

SEQ ID NO: 892962 - RNA, 19 nt, Artificial Sequence
  Description of Artificial Sequence: Synthetic oligonucleotide
uuauuuguuggaagcggua

SEQ ID NO: 892963 - RNA, 19 nt, Artificial Sequence
  Description of Artificial Sequence: Synthetic oligonucleotide
acuugguuucuccaauaca

SEQ ID NO: 892964 - RNA, 19 nt, Artificial Sequence
  Description of Artificial Sequence: Synthetic oligonucleotide
aagcgguaacauuuacacu

SEQ ID NO: 892965 - RNA, 19 nt, Artificial Sequence
  Description of Artificial Sequence: Synthetic oligonucleotide
ucucggaauuggauaguug

SEQ ID NO: 892966 - RNA, 19 nt, Artificial Sequence
  Description of Artificial Sequence: Synthetic oligonucleotide
uccugcggugugcagcugg

SEQ ID NO: 892967 - RNA, 19 nt, Artificial Sequence
  Description of Artificial Sequence: Synthetic oligonucleotide
aaguccgaguugcuggaga

SEQ ID NO: 892968 - RNA, 19 nt, Artificial Sequence
  Description of Artificial Sequence: Synthetic oligonucleotide
uguccauaaucucccucug

SEQ ID NO: 892969 - RNA, 19 nt, Artificial Sequence
  Description of Artificial Sequence: Synthetic oligonucleotide
gagggagcggaauaagaca

SEQ ID NO: 892970 - RNA, 19 nt, Artificial Sequence
  Description of Artificial Sequence: Synthetic oligonucleotide
ugucucucuguaagguuca

SEQ ID NO: 892971 - RNA, 19 nt, Artificial Sequence
  Description of Artificial Sequence: Synthetic oligonucleotide
acuacacgaggcgaacucg

SEQ ID NO: 892972 - RNA, 19 nt, Artificial Sequence
  Description of Artificial Sequence: Synthetic oligonucleotide
ccgguuucaggcuuaaucc

SEQ ID NO: 892973 - RNA, 19 nt, Artificial Sequence
  Description of Artificial Sequence: Synthetic oligonucleotide
ggggcaaaacuacacgagg

SEQ ID NO: 892974 - RNA, 19 nt, Artificial Sequence
  Description of Artificial Sequence: Synthetic oligonucleotide
auggccuaugagcgagucc

SEQ ID NO: 892975 - RNA, 19 nt, Artificial Sequence
  Description of Artificial Sequence: Synthetic oligonucleotide
caagguuacacugcccgcc

SEQ ID NO: 892976 - RNA, 19 nt, Artificial Sequence
  Description of Artificial Sequence: Synthetic oligonucleotide
ugugcagcuggcuuggguu

SEQ ID NO: 892977 - RNA, 19 nt, Artificial Sequence
  Description of Artificial Sequence: Synthetic oligonucleotide
aaucccguaguggcgcccg

SEQ ID NO: 892978 - RNA, 19 nt, Artificial Sequence
  Description of Artificial Sequence: Synthetic oligonucleotide
gagcauuucaggccaggac

SEQ ID NO: 892979 - RNA, 19 nt, Artificial Sequence
  Description of Artificial Sequence: Synthetic oligonucleotide
accgcggagcacucagucc

SEQ ID NO: 892980 - RNA, 19 nt, Artificial Sequence
  Description of Artificial Sequence: Synthetic oligonucleotide
acgaguugcacgggaauuc

SEQ ID NO: 892981 - RNA, 19 nt, Artificial Sequence
  Description of Artificial Sequence: Synthetic oligonucleotide
uugcacgggaauucugggc

SEQ ID NO: 892982 - RNA, 19 nt, Artificial Sequence
  Description of Artificial Sequence: Synthetic oligonucleotide
aggcuuaaucccguagugg

SEQ ID NO: 892983 - RNA, 19 nt, Artificial Sequence
  Description of Artificial Sequence: Synthetic oligonucleotide
cacuggacgacauguugag

SEQ ID NO: 892984 - RNA, 19 nt, Artificial Sequence
  Description of Artificial Sequence: Synthetic oligonucleotide
uucaucaagccugcgugca

SEQ ID NO: 892985 - RNA, 19 nt, Artificial Sequence
  Description of Artificial Sequence: Synthetic oligonucleotide
gguuucaggcuuaaucccg

SEQ ID NO: 892986 - RNA, 19 nt, Artificial Sequence
  Description of Artificial Sequence: Synthetic oligonucleotide
uuacacaagagagggcuuc

SEQ ID NO: 892987 - RNA, 19 nt, Artificial Sequence
  Description of Artificial Sequence: Synthetic oligonucleotide
caaguugcugcugcggcgg

SEQ ID NO: 892988 - RNA, 19 nt, Artificial Sequence
  Description of Artificial Sequence: Synthetic oligonucleotide
acacgaggcgaacucggag

SEQ ID NO: 892989 - RNA, 19 nt, Artificial Sequence
  Description of Artificial Sequence: Synthetic oligonucleotide
accucgucgcccucauggc

SEQ ID NO: 892990 - RNA, 19 nt, Artificial Sequence
  Description of Artificial Sequence: Synthetic oligonucleotide
acauguugaggcgccgcgc

SEQ ID NO: 892991 - RNA, 19 nt, Artificial Sequence
  Description of Artificial Sequence: Synthetic oligonucleotide
cccaagguuacacugcccg

SEQ ID NO: 892992 - RNA, 19 nt, Artificial Sequence
  Description of Artificial Sequence: Synthetic oligonucleotide
aaacuacacgaggcgaacu

SEQ ID NO: 892993 - RNA, 19 nt, Artificial Sequence
  Description of Artificial Sequence: Synthetic oligonucleotide
ucggcgguagccaggggug

SEQ ID NO: 892994 - RNA, 19 nt, Artificial Sequence
  Description of Artificial Sequence: Synthetic oligonucleotide
uuuacacaagagagggcuu

SEQ ID NO: 892995 - RNA, 19 nt, Artificial Sequence
  Description of Artificial Sequence: Synthetic oligonucleotide
auguugaggcgccgcgcgc

SEQ ID NO: 892996 - RNA, 19 nt, Artificial Sequence
  Description of Artificial Sequence: Synthetic oligonucleotide
uuaaucccguaguggcgcc

SEQ ID NO: 892997 - RNA, 19 nt, Artificial Sequence
  Description of Artificial Sequence: Synthetic oligonucleotide
agcacuuuucagaaacaug

SEQ ID NO: 892998 - RNA, 19 nt, Artificial Sequence
  Description of Artificial Sequence: Synthetic oligonucleotide
caggcuuaaucccguagug

SEQ ID NO: 892999 - RNA, 19 nt, Artificial Sequence
  Description of Artificial Sequence: Synthetic oligonucleotide
guggcggggacacguacgg

SEQ ID NO: 893000 - RNA, 19 nt, Artificial Sequence
  Description of Artificial Sequence: Synthetic oligonucleotide
accgggugagacuaaacua

SEQ ID NO: 893001 - RNA, 19 nt, Artificial Sequence
  Description of Artificial Sequence: Synthetic oligonucleotide
aucaagccugcgugcacuc

SEQ ID NO: 893002 - RNA, 19 nt, Artificial Sequence
  Description of Artificial Sequence: Synthetic oligonucleotide
cacguagcggcccggcucg

SEQ ID NO: 893003 - RNA, 19 nt, Artificial Sequence
  Description of Artificial Sequence: Synthetic oligonucleotide
uguuggaagcgguaacauu

SEQ ID NO: 893004 - RNA, 19 nt, Artificial Sequence
  Description of Artificial Sequence: Synthetic oligonucleotide
acacguacgggugguacag

SEQ ID NO: 893005 - RNA, 19 nt, Artificial Sequence
  Description of Artificial Sequence: Synthetic oligonucleotide
caauacauaugcgagcaaa

SEQ ID NO: 893006 - RNA, 19 nt, Artificial Sequence
  Description of Artificial Sequence: Synthetic oligonucleotide
ugagcauuucaggccagga

SEQ ID NO: 893007 - RNA, 19 nt, Artificial Sequence
  Description of Artificial Sequence: Synthetic oligonucleotide
aaaguccgaguugcuggag

SEQ ID NO: 893008 - RNA, 19 nt, Artificial Sequence
  Description of Artificial Sequence: Synthetic oligonucleotide
ugucccgcaggaacgaguu

SEQ ID NO: 893009 - RNA, 19 nt, Artificial Sequence
  Description of Artificial Sequence: Synthetic oligonucleotide
aacgaguugcacgggaauu

SEQ ID NO: 893010 - RNA, 19 nt, Artificial Sequence
  Description of Artificial Sequence: Synthetic oligonucleotide
ucaucaagccugcgugcac

SEQ ID NO: 893011 - RNA, 19 nt, Artificial Sequence
  Description of Artificial Sequence: Synthetic oligonucleotide
gaauuggauaguuggcccu

SEQ ID NO: 893012 - RNA, 19 nt, Artificial Sequence
  Description of Artificial Sequence: Synthetic oligonucleotide
ugcgugcacucacaaaaua

SEQ ID NO: 893013 - RNA, 19 nt, Artificial Sequence
  Description of Artificial Sequence: Synthetic oligonucleotide
gacgacauguugaggcgcc

SEQ ID NO: 893014 - RNA, 19 nt, Artificial Sequence
  Description of Artificial Sequence: Synthetic oligonucleotide
uuguuugggucaaguugcu

SEQ ID NO: 893015 - RNA, 19 nt, Artificial Sequence
  Description of Artificial Sequence: Synthetic oligonucleotide
acaccugcgggccggcccg

SEQ ID NO: 893016 - RNA, 19 nt, Artificial Sequence
  Description of Artificial Sequence: Synthetic oligonucleotide
ucgguaggccucauuggaa

SEQ ID NO: 893017 - RNA, 19 nt, Artificial Sequence
  Description of Artificial Sequence: Synthetic oligonucleotide
guacaggccgcucaucguc

SEQ ID NO: 893018 - RNA, 19 nt, Artificial Sequence
  Description of Artificial Sequence: Synthetic oligonucleotide
agcucuagagucugguauu

SEQ ID NO: 893019 - RNA, 19 nt, Artificial Sequence
  Description of Artificial Sequence: Synthetic oligonucleotide
ucgggugaucgcugcaagc

SEQ ID NO: 893020 - RNA, 19 nt, Artificial Sequence
  Description of Artificial Sequence: Synthetic oligonucleotide
uugucccgcaggaacgagu

SEQ ID NO: 893021 - RNA, 19 nt, Artificial Sequence
  Description of Artificial Sequence: Synthetic oligonucleotide
uccgaguugcuggagaguu

SEQ ID NO: 893022 - RNA, 19 nt, Artificial Sequence
  Description of Artificial Sequence: Synthetic oligonucleotide
gacacguacgggugguaca

SEQ ID NO: 893023 - RNA, 19 nt, Artificial Sequence
  Description of Artificial Sequence: Synthetic oligonucleotide
ccugcggcgucccagagcc

SEQ ID NO: 893024 - RNA, 19 nt, Artificial Sequence
  Description of Artificial Sequence: Synthetic oligonucleotide
ccgggugagacuaaacuac

SEQ ID NO: 893025 - RNA, 19 nt, Artificial Sequence
  Description of Artificial Sequence: Synthetic oligonucleotide
uacacaagagagggcuuca

SEQ ID NO: 893026 - RNA, 19 nt, Artificial Sequence
  Description of Artificial Sequence: Synthetic oligonucleotide
gagcggaauaagacaaaac

SEQ ID NO: 893027 - RNA, 19 nt, Artificial Sequence
  Description of Artificial Sequence: Synthetic oligonucleotide
gcauuucaggccaggaccg

SEQ ID NO: 893028 - RNA, 19 nt, Artificial Sequence
  Description of Artificial Sequence: Synthetic oligonucleotide
gccucauuggaagucagcc

SEQ ID NO: 893029 - RNA, 19 nt, Artificial Sequence
  Description of Artificial Sequence: Synthetic oligonucleotide
guuacacugcccgccgccg

SEQ ID NO: 893030 - RNA, 19 nt, Artificial Sequence
  Description of Artificial Sequence: Synthetic oligonucleotide
cacaagagagggcuucauc

SEQ ID NO: 893031 - RNA, 19 nt, Artificial Sequence
  Description of Artificial Sequence: Synthetic oligonucleotide
guagcggcccggcucggcg

SEQ ID NO: 893032 - RNA, 19 nt, Artificial Sequence
  Description of Artificial Sequence: Synthetic oligonucleotide
gcggaauaagacaaaacuc

SEQ ID NO: 893033 - RNA, 19 nt, Artificial Sequence
  Description of Artificial Sequence: Synthetic oligonucleotide
aauaacucacagagaccaa

SEQ ID NO: 893034 - RNA, 19 nt, Artificial Sequence
  Description of Artificial Sequence: Synthetic oligonucleotide
uuuuccggguggagcgagc

SEQ ID NO: 893035 - RNA, 19 nt, Artificial Sequence
  Description of Artificial Sequence: Synthetic oligonucleotide
cugggaacgggacccgggc

SEQ ID NO: 893036 - RNA, 19 nt, Artificial Sequence
  Description of Artificial Sequence: Synthetic oligonucleotide
uguuugggucaaguugcug

SEQ ID NO: 893037 - RNA, 19 nt, Artificial Sequence
  Description of Artificial Sequence: Synthetic oligonucleotide
accgcggaccacgaggcgg

SEQ ID NO: 893038 - RNA, 19 nt, Artificial Sequence
  Description of Artificial Sequence: Synthetic oligonucleotide
acuggacgacauguugagg

SEQ ID NO: 893039 - RNA, 19 nt, Artificial Sequence
  Description of Artificial Sequence: Synthetic oligonucleotide
cucgguaggccucauugga

SEQ ID NO: 893040 - RNA, 19 nt, Artificial Sequence
  Description of Artificial Sequence: Synthetic oligonucleotide
uacgggugguacaggccgc

SEQ ID NO: 893041 - RNA, 19 nt, Artificial Sequence
  Description of Artificial Sequence: Synthetic oligonucleotide
uuacacugcccgccgccga

SEQ ID NO: 893042 - RNA, 19 nt, Artificial Sequence
  Description of Artificial Sequence: Synthetic oligonucleotide
ucggaggcagcagucgggc

SEQ ID NO: 893043 - RNA, 19 nt, Artificial Sequence
  Description of Artificial Sequence: Synthetic oligonucleotide
ggagggagcggaauaagac

SEQ ID NO: 893044 - RNA, 19 nt, Artificial Sequence
  Description of Artificial Sequence: Synthetic oligonucleotide
uccccugggacucgcggac

SEQ ID NO: 893045 - RNA, 19 nt, Artificial Sequence
  Description of Artificial Sequence: Synthetic oligonucleotide
gaccgcggagcacucaguc

SEQ ID NO: 893046 - RNA, 19 nt, Artificial Sequence
  Description of Artificial Sequence: Synthetic oligonucleotide
aaggggcuuuccugcggug

SEQ ID NO: 893047 - RNA, 19 nt, Artificial Sequence
  Description of Artificial Sequence: Synthetic oligonucleotide
ggaaccaacagaguaggaa

SEQ ID NO: 893048 - RNA, 19 nt, Artificial Sequence
  Description of Artificial Sequence: Synthetic oligonucleotide
gcggcgaacaccucgucgc

SEQ ID NO: 893049 - RNA, 19 nt, Artificial Sequence
  Description of Artificial Sequence: Synthetic oligonucleotide
gcuuaaucccguaguggcg

SEQ ID NO: 893050 - RNA, 19 nt, Artificial Sequence
  Description of Artificial Sequence: Synthetic oligonucleotide
ggcaggaacccucccgggg

SEQ ID NO: 893051 - RNA, 19 nt, Artificial Sequence
  Description of Artificial Sequence: Synthetic oligonucleotide
uucucggaauuggauaguu

SEQ ID NO: 893052 - RNA, 19 nt, Artificial Sequence
  Description of Artificial Sequence: Synthetic oligonucleotide
uguugaggcgccgcgcgcu

SEQ ID NO: 893053 - RNA, 19 nt, Artificial Sequence
  Description of Artificial Sequence: Synthetic oligonucleotide
aggcuggaccgggugagac

SEQ ID NO: 893054 - RNA, 19 nt, Artificial Sequence
  Description of Artificial Sequence: Synthetic oligonucleotide
gguuacacugcccgccgcc

SEQ ID NO: 893055 - RNA, 19 nt, Artificial Sequence
  Description of Artificial Sequence: Synthetic oligonucleotide
ggucaaguugcugcugcgg

SEQ ID NO: 893056 - RNA, 19 nt, Artificial Sequence
  Description of Artificial Sequence: Synthetic oligonucleotide
cgcaggaacgaguugcacg

SEQ ID NO: 893057 - RNA, 19 nt, Artificial Sequence
  Description of Artificial Sequence: Synthetic oligonucleotide
ccgcggagcacucaguccg

SEQ ID NO: 893058 - RNA, 19 nt, Artificial Sequence
  Description of Artificial Sequence: Synthetic oligonucleotide
cuagagucugguauuuggu

SEQ ID NO: 893059 - RNA, 19 nt, Artificial Sequence
  Description of Artificial Sequence: Synthetic oligonucleotide
gcucggaagagccucccgc

SEQ ID NO: 893060 - RNA, 19 nt, Artificial Sequence
  Description of Artificial Sequence: Synthetic oligonucleotide
ucgcccucauggccuauga

SEQ ID NO: 893061 - RNA, 19 nt, Artificial Sequence
  Description of Artificial Sequence: Synthetic oligonucleotide
uugguggcccgaagcgcgc

SEQ ID NO: 893062 - RNA, 19 nt, Artificial Sequence
  Description of Artificial Sequence: Synthetic oligonucleotide
agacuaaacuacagcacuu

SEQ ID NO: 893063 - RNA, 19 nt, Artificial Sequence
  Description of Artificial Sequence: Synthetic oligonucleotide
aggcggagaacacggucga

SEQ ID NO: 893064 - RNA, 19 nt, Artificial Sequence
  Description of Artificial Sequence: Synthetic oligonucleotide
gagagcagcgcgggugucc

SEQ ID NO: 893065 - RNA, 19 nt, Artificial Sequence
  Description of Artificial Sequence: Synthetic oligonucleotide
cacaccugcgggccggccc

SEQ ID NO: 893066 - RNA, 19 nt, Artificial Sequence
  Description of Artificial Sequence: Synthetic oligonucleotide
gagcgcacguagcggcccg

SEQ ID NO: 893067 - RNA, 19 nt, Artificial Sequence
  Description of Artificial Sequence: Synthetic oligonucleotide
gaagcgcgcggcgaacacc

SEQ ID NO: 893068 - RNA, 19 nt, Artificial Sequence
  Description of Artificial Sequence: Synthetic oligonucleotide
gcgguaacauuuacacugg

SEQ ID NO: 893069 - RNA, 19 nt, Artificial Sequence
  Description of Artificial Sequence: Synthetic oligonucleotide
ccugcgugcacucacaaaa

SEQ ID NO: 893070 - RNA, 19 nt, Artificial Sequence
  Description of Artificial Sequence: Synthetic oligonucleotide
uccaguucgcugcgggguu

SEQ ID NO: 893071 - RNA, 19 nt, Artificial Sequence
  Description of Artificial Sequence: Synthetic oligonucleotide
cugccuucagauucucgga

SEQ ID NO: 893072 - RNA, 19 nt, Artificial Sequence
  Description of Artificial Sequence: Synthetic oligonucleotide
gaguugcacgggaauucug

SEQ ID NO: 893073 - RNA, 19 nt, Artificial Sequence
  Description of Artificial Sequence: Synthetic oligonucleotide
cugggacucgcggaccgcg

SEQ ID NO: 893074 - RNA, 19 nt, Artificial Sequence
  Description of Artificial Sequence: Synthetic oligonucleotide
uucagcgggcagcccgggc

SEQ ID NO: 893075 - RNA, 19 nt, Artificial Sequence
  Description of Artificial Sequence: Synthetic oligonucleotide
gaauucugggccgccgcuc

SEQ ID NO: 893076 - RNA, 19 nt, Artificial Sequence
  Description of Artificial Sequence: Synthetic oligonucleotide
ccacccaagguuacacugc

SEQ ID NO: 893077 - RNA, 19 nt, Artificial Sequence
  Description of Artificial Sequence: Synthetic oligonucleotide
gggucaaguugcugcugcg

SEQ ID NO: 893078 - RNA, 19 nt, Artificial Sequence
  Description of Artificial Sequence: Synthetic oligonucleotide
auuggauaguuggcccugu

SEQ ID NO: 893079 - RNA, 19 nt, Artificial Sequence
  Description of Artificial Sequence: Synthetic oligonucleotide
uaaucccguaguggcgccc

SEQ ID NO: 893080 - RNA, 19 nt, Artificial Sequence
  Description of Artificial Sequence: Synthetic oligonucleotide
ggaagcgguaacauuuaca

SEQ ID NO: 893081 - RNA, 19 nt, Artificial Sequence
  Description of Artificial Sequence: Synthetic oligonucleotide
ccacacagucacuucuacc

SEQ ID NO: 893082 - RNA, 19 nt, Artificial Sequence
  Description of Artificial Sequence: Synthetic oligonucleotide
gggaauucugggccgccgc

SEQ ID NO: 893083 - RNA, 19 nt, Artificial Sequence
  Description of Artificial Sequence: Synthetic oligonucleotide
ccaucggccacaccugcgg

SEQ ID NO: 893084 - RNA, 19 nt, Artificial Sequence
  Description of Artificial Sequence: Synthetic oligonucleotide
ucgcggaccgcggagcacu

SEQ ID NO: 893085 - RNA, 19 nt, Artificial Sequence
  Description of Artificial Sequence: Synthetic oligonucleotide
gcugcaagcugagggcucg

SEQ ID NO: 893086 - RNA, 19 nt, Artificial Sequence
  Description of Artificial Sequence: Synthetic oligonucleotide
aggcucccugaggaaaggg

SEQ ID NO: 893087 - RNA, 19 nt, Artificial Sequence
  Description of Artificial Sequence: Synthetic oligonucleotide
gggugagacuaaacuacag

SEQ ID NO: 893088 - RNA, 19 nt, Artificial Sequence
  Description of Artificial Sequence: Synthetic oligonucleotide
ccgauucccaccccgggcc

SEQ ID NO: 893089 - RNA, 19 nt, Artificial Sequence
  Description of Artificial Sequence: Synthetic oligonucleotide
gcacucaguccguuuggag

SEQ ID NO: 893090 - RNA, 19 nt, Artificial Sequence
  Description of Artificial Sequence: Synthetic oligonucleotide
ucaagccugcgugcacuca

SEQ ID NO: 893091 - RNA, 19 nt, Artificial Sequence
  Description of Artificial Sequence: Synthetic oligonucleotide
acgacauguugaggcgccg

SEQ ID NO: 893092 - RNA, 19 nt, Artificial Sequence
  Description of Artificial Sequence: Synthetic oligonucleotide
ucgcugcgggguuguuugg

SEQ ID NO: 893093 - RNA, 19 nt, Artificial Sequence
  Description of Artificial Sequence: Synthetic oligonucleotide
ccaagguuacacugcccgc

SEQ ID NO: 893094 - RNA, 19 nt, Artificial Sequence
  Description of Artificial Sequence: Synthetic oligonucleotide
gcacgggaauucugggccg

SEQ ID NO: 893095 - RNA, 19 nt, Artificial Sequence
  Description of Artificial Sequence: Synthetic oligonucleotide
gguggcggggacacguacg

SEQ ID NO: 893096 - RNA, 19 nt, Artificial Sequence
  Description of Artificial Sequence: Synthetic oligonucleotide
agagcagcgcgggugucca

SEQ ID NO: 893097 - RNA, 19 nt, Artificial Sequence
  Description of Artificial Sequence: Synthetic oligonucleotide
agggguggcggggacacgu

SEQ ID NO: 893098 - RNA, 19 nt, Artificial Sequence
  Description of Artificial Sequence: Synthetic oligonucleotide
cacucacaaaauauagcau

SEQ ID NO: 893099 - RNA, 19 nt, Artificial Sequence
  Description of Artificial Sequence: Synthetic oligonucleotide
cgguuucaggcuuaauccc

SEQ ID NO: 893100 - RNA, 19 nt, Artificial Sequence
  Description of Artificial Sequence: Synthetic oligonucleotide
gggugaucgcugcaagcug

SEQ ID NO: 893101 - RNA, 19 nt, Artificial Sequence
  Description of Artificial Sequence: Synthetic oligonucleotide
cucguagcgccggucccgg

SEQ ID NO: 893102 - RNA, 19 nt, Artificial Sequence
  Description of Artificial Sequence: Synthetic oligonucleotide
cagauucucggaauuggau

SEQ ID NO: 893103 - RNA, 19 nt, Artificial Sequence
  Description of Artificial Sequence: Synthetic oligonucleotide
guguccccgggccuuggug

SEQ ID NO: 893104 - RNA, 19 nt, Artificial Sequence
  Description of Artificial Sequence: Synthetic oligonucleotide
cugcgggguuguuuggguc

SEQ ID NO: 893105 - RNA, 19 nt, Artificial Sequence
  Description of Artificial Sequence: Synthetic oligonucleotide
aagccugcgugcacucaca

SEQ ID NO: 893106 - RNA, 19 nt, Artificial Sequence
  Description of Artificial Sequence: Synthetic oligonucleotide
cuugucccgcaggaacgag

SEQ ID NO: 893107 - RNA, 19 nt, Artificial Sequence
  Description of Artificial Sequence: Synthetic oligonucleotide
uuccggguggagcgagcgu

SEQ ID NO: 893108 - RNA, 19 nt, Artificial Sequence
  Description of Artificial Sequence: Synthetic oligonucleotide
gcggugugcagcuggcuug

SEQ ID NO: 893109 - RNA, 19 nt, Artificial Sequence
  Description of Artificial Sequence: Synthetic oligonucleotide
ugguggcccgaagcgcgcg

SEQ ID NO: 893110 - RNA, 19 nt, Artificial Sequence
  Description of Artificial Sequence: Synthetic oligonucleotide
gcccaggacuucucgguag

SEQ ID NO: 893111 - RNA, 19 nt, Artificial Sequence
  Description of Artificial Sequence: Synthetic oligonucleotide
ggagcggaauaagacaaaa

SEQ ID NO: 893112 - RNA, 19 nt, Artificial Sequence
  Description of Artificial Sequence: Synthetic oligonucleotide
caguccguuuggaggagga

SEQ ID NO: 893113 - RNA, 19 nt, Artificial Sequence
  Description of Artificial Sequence: Synthetic oligonucleotide
uggaccgggugagacuaaa

SEQ ID NO: 893114 - RNA, 19 nt, Artificial Sequence
  Description of Artificial Sequence: Synthetic oligonucleotide
acugcccgccgccgagccg

SEQ ID NO: 893115 - RNA, 19 nt, Artificial Sequence
  Description of Artificial Sequence: Synthetic oligonucleotide
gaauccuggccaccucgua

SEQ ID NO: 893116 - RNA, 19 nt, Artificial Sequence
  Description of Artificial Sequence: Synthetic oligonucleotide
acgggacccgggccuccgc

SEQ ID NO: 893117 - RNA, 19 nt, Artificial Sequence
  Description of Artificial Sequence: Synthetic oligonucleotide
ggccccgauucccaccccg

SEQ ID NO: 893118 - RNA, 19 nt, Artificial Sequence
  Description of Artificial Sequence: Synthetic oligonucleotide
cgguaggccucauuggaag

SEQ ID NO: 893119 - RNA, 19 nt, Artificial Sequence
  Description of Artificial Sequence: Synthetic oligonucleotide
ccuucagcgggcagcccgg

SEQ ID NO: 893120 - RNA, 19 nt, Artificial Sequence
  Description of Artificial Sequence: Synthetic oligonucleotide
cacguacgggugguacagg

SEQ ID NO: 893121 - RNA, 19 nt, Artificial Sequence
  Description of Artificial Sequence: Synthetic oligonucleotide
agccugcgugcacucacaa

SEQ ID NO: 893122 - RNA, 19 nt, Artificial Sequence
  Description of Artificial Sequence: Synthetic oligonucleotide
cucgucgcccucauggccu

SEQ ID NO: 893123 - RNA, 19 nt, Artificial Sequence
  Description of Artificial Sequence: Synthetic oligonucleotide
ggcucggcgguagccaggg

SEQ ID NO: 893124 - RNA, 19 nt, Artificial Sequence
  Description of Artificial Sequence: Synthetic oligonucleotide
acacaagagagggcuucau

SEQ ID NO: 893125 - RNA, 19 nt, Artificial Sequence
  Description of Artificial Sequence: Synthetic oligonucleotide
ggacacguacgggugguac

SEQ ID NO: 893126 - RNA, 19 nt, Artificial Sequence
  Description of Artificial Sequence: Synthetic oligonucleotide
guaguugcugagggugcca

SEQ ID NO: 893127 - RNA, 19 nt, Artificial Sequence
  Description of Artificial Sequence: Synthetic oligonucleotide
cucggcgguagccaggggu

SEQ ID NO: 893128 - RNA, 19 nt, Artificial Sequence
  Description of Artificial Sequence: Synthetic oligonucleotide
cuccccugggacucgcgga

SEQ ID NO: 893129 - RNA, 19 nt, Artificial Sequence
  Description of Artificial Sequence: Synthetic oligonucleotide
gguggcccgaagcgcgcgg

SEQ ID NO: 893130 - RNA, 19 nt, Artificial Sequence
  Description of Artificial Sequence: Synthetic oligonucleotide
cguacgggugguacaggcc

SEQ ID NO: 893131 - RNA, 19 nt, Artificial Sequence
  Description of Artificial Sequence: Synthetic oligonucleotide
agcgagcguggauccaguu

SEQ ID NO: 893132 - RNA, 19 nt, Artificial Sequence
  Description of Artificial Sequence: Synthetic oligonucleotide
uugaggcgccgcgcgcucc

SEQ ID NO: 893133 - RNA, 19 nt, Artificial Sequence
  Description of Artificial Sequence: Synthetic oligonucleotide
acccugcggcgucccagag

SEQ ID NO: 893134 - RNA, 19 nt, Artificial Sequence
  Description of Artificial Sequence: Synthetic oligonucleotide
guugaggcgccgcgcgcuc

SEQ ID NO: 893135 - RNA, 19 nt, Artificial Sequence
  Description of Artificial Sequence: Synthetic oligonucleotide
cccgauucccaccccgggc

SEQ ID NO: 893136 - RNA, 19 nt, Artificial Sequence
  Description of Artificial Sequence: Synthetic oligonucleotide
gcgcccguuggcugggccg

SEQ ID NO: 893137 - RNA, 19 nt, Artificial Sequence
  Description of Artificial Sequence: Synthetic oligonucleotide
cagucgggccaucggccac

SEQ ID NO: 893138 - RNA, 19 nt, Artificial Sequence
  Description of Artificial Sequence: Synthetic oligonucleotide
cagucacuucuaccuaaaa

SEQ ID NO: 893139 - RNA, 19 nt, Artificial Sequence
  Description of Artificial Sequence: Synthetic oligonucleotide
cgugcacucacaaaauaua

SEQ ID NO: 893140 - RNA, 19 nt, Artificial Sequence
  Description of Artificial Sequence: Synthetic oligonucleotide
caccgcggaccacgaggcg

SEQ ID NO: 893141 - RNA, 19 nt, Artificial Sequence
  Description of Artificial Sequence: Synthetic oligonucleotide
aggcgccgcgcgcucccac

SEQ ID NO: 893142 - RNA, 19 nt, Artificial Sequence
  Description of Artificial Sequence: Synthetic oligonucleotide
ccacgaggcggagaacacg

SEQ ID NO: 893143 - RNA, 19 nt, Artificial Sequence
  Description of Artificial Sequence: Synthetic oligonucleotide
accggcugccucugagcau

SEQ ID NO: 893144 - RNA, 19 nt, Artificial Sequence
  Description of Artificial Sequence: Synthetic oligonucleotide
ggcggggacacguacgggu

SEQ ID NO: 893145 - RNA, 19 nt, Artificial Sequence
  Description of Artificial Sequence: Synthetic oligonucleotide
gacccgggccuccgccacc

SEQ ID NO: 893146 - RNA, 19 nt, Artificial Sequence
  Description of Artificial Sequence: Synthetic oligonucleotide
ccguaguggcgcccguugg

SEQ ID NO: 893147 - RNA, 19 nt, Artificial Sequence
  Description of Artificial Sequence: Synthetic oligonucleotide
guaguggcgcccguuggcu

SEQ ID NO: 893148 - RNA, 19 nt, Artificial Sequence
  Description of Artificial Sequence: Synthetic oligonucleotide
acgggugguacaggccgcu

SEQ ID NO: 893149 - RNA, 19 nt, Artificial Sequence
  Description of Artificial Sequence: Synthetic oligonucleotide
agcgcacguagcggcccgg

SEQ ID NO: 893150 - RNA, 19 nt, Artificial Sequence
  Description of Artificial Sequence: Synthetic oligonucleotide
ggcgaacaccucgucgccc

SEQ ID NO: 893151 - RNA, 19 nt, Artificial Sequence
  Description of Artificial Sequence: Synthetic oligonucleotide
ggcccguucccucccgcug

SEQ ID NO: 893152 - RNA, 19 nt, Artificial Sequence
  Description of Artificial Sequence: Synthetic oligonucleotide
gcuggaccgggugagacua

SEQ ID NO: 893153 - RNA, 19 nt, Artificial Sequence
  Description of Artificial Sequence: Synthetic oligonucleotide
ucgucgcccucauggccua

SEQ ID NO: 893154 - RNA, 19 nt, Artificial Sequence
  Description of Artificial Sequence: Synthetic oligonucleotide
cgcggcgaacaccucgucg

SEQ ID NO: 893155 - RNA, 19 nt, Artificial Sequence
  Description of Artificial Sequence: Synthetic oligonucleotide
cccguaguggcgcccguug

SEQ ID NO: 893156 - RNA, 19 nt, Artificial Sequence
  Description of Artificial Sequence: Synthetic oligonucleotide
cacccugcggcgucccaga

SEQ ID NO: 893157 - RNA, 19 nt, Artificial Sequence
  Description of Artificial Sequence: Synthetic oligonucleotide
guggcccgaagcgcgcggc

SEQ ID NO: 893158 - RNA, 19 nt, Artificial Sequence
  Description of Artificial Sequence: Synthetic oligonucleotide
gguacaggccgcucaucgu

SEQ ID NO: 893159 - RNA, 19 nt, Artificial Sequence
  Description of Artificial Sequence: Synthetic oligonucleotide
gcauuuccuaaggaaccaa

SEQ ID NO: 893160 - RNA, 19 nt, Artificial Sequence
  Description of Artificial Sequence: Synthetic oligonucleotide
cugcgugcacucacaaaau

SEQ ID NO: 893161 - RNA, 19 nt, Artificial Sequence
  Description of Artificial Sequence: Synthetic oligonucleotide
ggcugggaacgggacccgg

SEQ ID NO: 893162 - RNA, 19 nt, Artificial Sequence
  Description of Artificial Sequence: Synthetic oligonucleotide
ccccgauucccaccccggg

SEQ ID NO: 893163 - RNA, 19 nt, Artificial Sequence
  Description of Artificial Sequence: Synthetic oligonucleotide
ucgggccaucggccacacc

SEQ ID NO: 893164 - RNA, 19 nt, Artificial Sequence
  Description of Artificial Sequence: Synthetic oligonucleotide
gcccgggcucgggugaucg

SEQ ID NO: 893165 - RNA, 19 nt, Artificial Sequence
  Description of Artificial Sequence: Synthetic oligonucleotide
ggugguacaggccgcucau

SEQ ID NO: 893166 - RNA, 19 nt, Artificial Sequence
  Description of Artificial Sequence: Synthetic oligonucleotide
ggaccgggugagacuaaac

SEQ ID NO: 893167 - RNA, 19 nt, Artificial Sequence
  Description of Artificial Sequence: Synthetic oligonucleotide
acgaggcggagaacacggu

SEQ ID NO: 893168 - RNA, 19 nt, Artificial Sequence
  Description of Artificial Sequence: Synthetic oligonucleotide
gggccaucggccacaccug

SEQ ID NO: 893169 - RNA, 19 nt, Artificial Sequence
  Description of Artificial Sequence: Synthetic oligonucleotide
gcgugcacucacaaaauau

SEQ ID NO: 893170 - RNA, 19 nt, Artificial Sequence
  Description of Artificial Sequence: Synthetic oligonucleotide
gccccgauucccaccccgg

SEQ ID NO: 893171 - RNA, 19 nt, Artificial Sequence
  Description of Artificial Sequence: Synthetic oligonucleotide
gcacccugcggcgucccag

SEQ ID NO: 893172 - RNA, 19 nt, Artificial Sequence
  Description of Artificial Sequence: Synthetic oligonucleotide
gcgaacaccucgucgcccu

SEQ ID NO: 893173 - RNA, 19 nt, Artificial Sequence
  Description of Artificial Sequence: Synthetic oligonucleotide
gggacucgcggaccgcgga

SEQ ID NO: 893174 - RNA, 19 nt, Artificial Sequence
  Description of Artificial Sequence: Synthetic oligonucleotide
cguucccucccgcugccgc

SEQ ID NO: 893175 - RNA, 19 nt, Artificial Sequence
  Description of Artificial Sequence: Synthetic oligonucleotide
cggaccgcggagcacucag

SEQ ID NO: 893176 - RNA, 19 nt, Artificial Sequence
  Description of Artificial Sequence: Synthetic oligonucleotide
cucgcggaccgcggagcac

SEQ ID NO: 893177 - RNA, 19 nt, Artificial Sequence
  Description of Artificial Sequence: Synthetic oligonucleotide
cgggugagacuaaacuaca

SEQ ID NO: 893178 - RNA, 19 nt, Artificial Sequence
  Description of Artificial Sequence: Synthetic oligonucleotide
ggcgguagccagggguggc

SEQ ID NO: 893179 - RNA, 19 nt, Artificial Sequence
  Description of Artificial Sequence: Synthetic oligonucleotide
gcgucccagagcccaggac

SEQ ID NO: 893180 - RNA, 19 nt, Artificial Sequence
  Description of Artificial Sequence: Synthetic oligonucleotide
gggguuguuugggucaagu

SEQ ID NO: 893181 - RNA, 19 nt, Artificial Sequence
  Description of Artificial Sequence: Synthetic oligonucleotide
ggguuguuugggucaaguu

SEQ ID NO: 893182 - RNA, 19 nt, Artificial Sequence
  Description of Artificial Sequence: Synthetic oligonucleotide
cggggacacguacgggugg

SEQ ID NO: 893183 - RNA, 19 nt, Artificial Sequence
  Description of Artificial Sequence: Synthetic oligonucleotide
cugcggcgucccagagccc

SEQ ID NO: 893184 - RNA, 19 nt, Artificial Sequence
  Description of Artificial Sequence: Synthetic oligonucleotide
acguagcggcccggcucgg

SEQ ID NO: 893185 - RNA, 19 nt, Artificial Sequence
  Description of Artificial Sequence: Synthetic oligonucleotide
ccaauacauaugcgagcaa

SEQ ID NO: 893186 - RNA, 19 nt, Artificial Sequence
  Description of Artificial Sequence: Synthetic oligonucleotide
gggagcggaauaagacaaa

SEQ ID NO: 893187 - RNA, 19 nt, Artificial Sequence
  Description of Artificial Sequence: Synthetic oligonucleotide
gcugcgggguuguuugggu

SEQ ID NO: 893188 - RNA, 19 nt, Artificial Sequence
  Description of Artificial Sequence: Synthetic oligonucleotide
cggugugcagcuggcuugg

SEQ ID NO: 893189 - RNA, 19 nt, Artificial Sequence
  Description of Artificial Sequence: Synthetic oligonucleotide
gggacccgggccuccgcca

SEQ ID NO: 893190 - RNA, 19 nt, Artificial Sequence
  Description of Artificial Sequence: Synthetic oligonucleotide
cgcgcgcucccacccaagg

SEQ ID NO: 893191 - RNA, 19 nt, Artificial Sequence
  Description of Artificial Sequence: Synthetic oligonucleotide
gagcgagcguggauccagu

SEQ ID NO: 893192 - RNA, 19 nt, Artificial Sequence
  Description of Artificial Sequence: Synthetic oligonucleotide
ccaggaccggcugggucag

SEQ ID NO: 893193 - RNA, 19 nt, Artificial Sequence
  Description of Artificial Sequence: Synthetic oligonucleotide
gucgggccaucggccacac

SEQ ID NO: 893194 - RNA, 19 nt, Artificial Sequence
  Description of Artificial Sequence: Synthetic oligonucleotide
ggccuaugagcgaguccac

SEQ ID NO: 893195 - RNA, 19 nt, Artificial Sequence
  Description of Artificial Sequence: Synthetic oligonucleotide
cuggaccgggugagacuaa

SEQ ID NO: 893196 - RNA, 19 nt, Artificial Sequence
  Description of Artificial Sequence: Synthetic oligonucleotide
ggcuggaccgggugagacu

SEQ ID NO: 893197 - RNA, 19 nt, Artificial Sequence
  Description of Artificial Sequence: Synthetic oligonucleotide
gccugcgugcacucacaaa

SEQ ID NO: 893198 - RNA, 19 nt, Artificial Sequence
  Description of Artificial Sequence: Synthetic oligonucleotide
cgcugcgggguuguuuggg

SEQ ID NO: 893199 - RNA, 19 nt, Artificial Sequence
  Description of Artificial Sequence: Synthetic oligonucleotide
ccaguucgcugcgggguug

SEQ ID NO: 893200 - RNA, 19 nt, Artificial Sequence
  Description of Artificial Sequence: Synthetic oligonucleotide
cguuggcugggccgccagg

SEQ ID NO: 893201 - RNA, 19 nt, Artificial Sequence
  Description of Artificial Sequence: Synthetic oligonucleotide
cggcgaacaccucgucgcc

SEQ ID NO: 893202 - RNA, 19 nt, Artificial Sequence
  Description of Artificial Sequence: Synthetic oligonucleotide
ccuugucccgcaggaacga

SEQ ID NO: 893203 - RNA, 19 nt, Artificial Sequence
  Description of Artificial Sequence: Synthetic oligonucleotide
cgaagcgcgcggcgaacac

SEQ ID NO: 893204 - RNA, 19 nt, Artificial Sequence
  Description of Artificial Sequence: Synthetic oligonucleotide
guucgcugcgggguuguuu

SEQ ID NO: 893205 - RNA, 19 nt, Artificial Sequence
  Description of Artificial Sequence: Synthetic oligonucleotide
gcucggcgguagccagggg

SEQ ID NO: 893206 - RNA, 19 nt, Artificial Sequence
  Description of Artificial Sequence: Synthetic oligonucleotide
ccggggagagagcagcucu

SEQ ID NO: 893207 - RNA, 19 nt, Artificial Sequence
  Description of Artificial Sequence: Synthetic oligonucleotide
cgcccucauggccuaugag

SEQ ID NO: 893208 - RNA, 19 nt, Artificial Sequence
  Description of Artificial Sequence: Synthetic oligonucleotide
gcggagaacacggucgauu

SEQ ID NO: 893209 - RNA, 19 nt, Artificial Sequence
  Description of Artificial Sequence: Synthetic oligonucleotide
cugcgggccggcccggugu

SEQ ID NO: 893210 - RNA, 19 nt, Artificial Sequence
  Description of Artificial Sequence: Synthetic oligonucleotide
ggaccggcugggucagucu

SEQ ID NO: 893211 - RNA, 19 nt, Artificial Sequence
  Description of Artificial Sequence: Synthetic oligonucleotide
ccgcggaccacgaggcgga

SEQ ID NO: 893212 - RNA, 19 nt, Artificial Sequence
  Description of Artificial Sequence: Synthetic oligonucleotide
caccugcgggccggcccgg

SEQ ID NO: 893213 - RNA, 19 nt, Artificial Sequence
  Description of Artificial Sequence: Synthetic oligonucleotide
aguucgcugcgggguuguu

SEQ ID NO: 893214 - RNA, 19 nt, Artificial Sequence
  Description of Artificial Sequence: Synthetic oligonucleotide
gcucuagagucugguauuu

SEQ ID NO: 893215 - RNA, 19 nt, Artificial Sequence
  Description of Artificial Sequence: Synthetic oligonucleotide
ccgcaggaacgaguugcac

SEQ ID NO: 893216 - RNA, 19 nt, Artificial Sequence
  Description of Artificial Sequence: Synthetic oligonucleotide
uggcgcccguuggcugggc

SEQ ID NO: 893217 - RNA, 19 nt, Artificial Sequence
  Description of Artificial Sequence: Synthetic oligonucleotide
cgggcucgggugaucgcug

SEQ ID NO: 893218 - RNA, 19 nt, Artificial Sequence
  Description of Artificial Sequence: Synthetic oligonucleotide
ggggacacguacggguggu

SEQ ID NO: 893219 - RNA, 19 nt, Artificial Sequence
  Description of Artificial Sequence: Synthetic oligonucleotide
cgggacccgggccuccgcc

SEQ ID NO: 893220 - RNA, 19 nt, Artificial Sequence
  Description of Artificial Sequence: Synthetic oligonucleotide
gccgcuccccugggacucg

SEQ ID NO: 893221 - RNA, 19 nt, Artificial Sequence
  Description of Artificial Sequence: Synthetic oligonucleotide
gcgcacguagcggcccggc

SEQ ID NO: 893222 - RNA, 19 nt, Artificial Sequence
  Description of Artificial Sequence: Synthetic oligonucleotide
gcccgaagcgcgcggcgaa

SEQ ID NO: 893223 - RNA, 19 nt, Artificial Sequence
  Description of Artificial Sequence: Synthetic oligonucleotide
gaggcgccgcgcgcuccca

SEQ ID NO: 893224 - RNA, 19 nt, Artificial Sequence
  Description of Artificial Sequence: Synthetic oligonucleotide
cgcccguuggcugggccgc

SEQ ID NO: 893225 - RNA, 19 nt, Artificial Sequence
  Description of Artificial Sequence: Synthetic oligonucleotide
caguucgcugcgggguugu

SEQ ID NO: 893226 - RNA, 19 nt, Artificial Sequence
  Description of Artificial Sequence: Synthetic oligonucleotide
guguagggacagcgcuuuu

SEQ ID NO: 893227 - RNA, 19 nt, Artificial Sequence
  Description of Artificial Sequence: Synthetic oligonucleotide
cccgaagcgcgcggcgaac

SEQ ID NO: 893228 - RNA, 19 nt, Artificial Sequence
  Description of Artificial Sequence: Synthetic oligonucleotide
ccaaaccggcugccucuga

SEQ ID NO: 893229 - RNA, 19 nt, Artificial Sequence
  Description of Artificial Sequence: Synthetic oligonucleotide
gguguccccgggccuuggu

SEQ ID NO: 893230 - RNA, 19 nt, Artificial Sequence
  Description of Artificial Sequence: Synthetic oligonucleotide
gccgcgcgcucccacccaa

SEQ ID NO: 893231 - RNA, 19 nt, Artificial Sequence
  Description of Artificial Sequence: Synthetic oligonucleotide
gccacaccugcgggccggc

SEQ ID NO: 893232 - RNA, 19 nt, Artificial Sequence
  Description of Artificial Sequence: Synthetic oligonucleotide
cgaacaccucgucgcccuc

SEQ ID NO: 893233 - RNA, 19 nt, Artificial Sequence
  Description of Artificial Sequence: Synthetic oligonucleotide
ccguucccucccgcugccg

SEQ ID NO: 893234 - RNA, 19 nt, Artificial Sequence
  Description of Artificial Sequence: Synthetic oligonucleotide
cccgcacccugcggcgucc

SEQ ID NO: 893235 - RNA, 19 nt, Artificial Sequence
  Description of Artificial Sequence: Synthetic oligonucleotide
gggcccguucccucccgcu

SEQ ID NO: 893236 - RNA, 19 nt, Artificial Sequence
  Description of Artificial Sequence: Synthetic oligonucleotide
gcggaccacgaggcggaga

SEQ ID NO: 893237 - RNA, 19 nt, Artificial Sequence
  Description of Artificial Sequence: Synthetic oligonucleotide
cgaguugcacgggaauucu

SEQ ID NO: 893238 - RNA, 19 nt, Artificial Sequence
  Description of Artificial Sequence: Synthetic oligonucleotide
ccacaccugcgggccggcc

SEQ ID NO: 893239 - RNA, 19 nt, Artificial Sequence
  Description of Artificial Sequence: Synthetic oligonucleotide
gggacacguacggguggua

SEQ ID NO: 893240 - RNA, 19 nt, Artificial Sequence
  Description of Artificial Sequence: Synthetic oligonucleotide
ccccgcacccugcggcguc

SEQ ID NO: 893241 - RNA, 19 nt, Artificial Sequence
  Description of Artificial Sequence: Synthetic oligonucleotide
cgcgcucccacccaagguu

SEQ ID NO: 893242 - RNA, 19 nt, Artificial Sequence
  Description of Artificial Sequence: Synthetic oligonucleotide
cguagcgccggucccgggu

SEQ ID NO: 893243 - RNA, 19 nt, Artificial Sequence
  Description of Artificial Sequence: Synthetic oligonucleotide
ggaccgcggagcacucagu

SEQ ID NO: 893244 - RNA, 19 nt, Artificial Sequence
  Description of Artificial Sequence: Synthetic oligonucleotide
ccggcugccucugagcauu

SEQ ID NO: 893245 - RNA, 19 nt, Artificial Sequence
  Description of Artificial Sequence: Synthetic oligonucleotide
cgccgcuccccugggacuc

SEQ ID NO: 893246 - RNA, 19 nt, Artificial Sequence
  Description of Artificial Sequence: Synthetic oligonucleotide
caccccgggcccguucccu

SEQ ID NO: 893247 - RNA, 19 nt, Artificial Sequence
  Description of Artificial Sequence: Synthetic oligonucleotide
gcccguuggcugggccgcc

SEQ ID NO: 893248 - RNA, 19 nt, Artificial Sequence
  Description of Artificial Sequence: Synthetic oligonucleotide
gcggaccgcggagcacuca

SEQ ID NO: 893249 - RNA, 19 nt, Artificial Sequence
  Description of Artificial Sequence: Synthetic oligonucleotide
gggguggcggggacacgua

SEQ ID NO: 893250 - RNA, 19 nt, Artificial Sequence
  Description of Artificial Sequence: Synthetic oligonucleotide
ccgcuccccugggacucgc

SEQ ID NO: 893251 - RNA, 19 nt, Artificial Sequence
  Description of Artificial Sequence: Synthetic oligonucleotide
cagcgcggguguccauaau

SEQ ID NO: 893252 - RNA, 19 nt, Artificial Sequence
  Description of Artificial Sequence: Synthetic oligonucleotide
cgcggaccgcggagcacuc

SEQ ID NO: 893253 - RNA, 19 nt, Artificial Sequence
  Description of Artificial Sequence: Synthetic oligonucleotide
cuccgguuucaggcuuaau

SEQ ID NO: 893254 - RNA, 19 nt, Artificial Sequence
  Description of Artificial Sequence: Synthetic oligonucleotide
ccgcacccugcggcguccc

SEQ ID NO: 893255 - RNA, 19 nt, Artificial Sequence
  Description of Artificial Sequence: Synthetic oligonucleotide
cgcuccgguuucaggcuua

SEQ ID NO: 893256 - RNA, 19 nt, Artificial Sequence
  Description of Artificial Sequence: Synthetic oligonucleotide
gcccgguguccccgggccu

SEQ ID NO: 893257 - RNA, 19 nt, Artificial Sequence
  Description of Artificial Sequence: Synthetic oligonucleotide
cccguuggcugggccgcca

SEQ ID NO: 893258 - RNA, 19 nt, Artificial Sequence
  Description of Artificial Sequence: Synthetic oligonucleotide
cggccccgauucccacccc

SEQ ID NO: 893259 - RNA, 19 nt, Artificial Sequence
  Description of Artificial Sequence: Synthetic oligonucleotide
gcggagcacucaguccguu

SEQ ID NO: 893260 - RNA, 19 nt, Artificial Sequence
  Description of Artificial Sequence: Synthetic oligonucleotide
cgcggagcacucaguccgu

SEQ ID NO: 893261 - RNA, 19 nt, Artificial Sequence
  Description of Artificial Sequence: Synthetic oligonucleotide
ccgcuccgguuucaggcuu

SEQ ID NO: 893262 - RNA, 19 nt, Artificial Sequence
  Description of Artificial Sequence: Synthetic oligonucleotide
cgcacccugcggcguccca

SEQ ID NO: 893263 - RNA, 19 nt, Artificial Sequence
  Description of Artificial Sequence: Synthetic oligonucleotide
cgccgcgcgcucccaccca

SEQ ID NO: 893264 - RNA, 19 nt, Artificial Sequence
  Description of Artificial Sequence: Synthetic oligonucleotide
aaagguaccguauuuugcc

SEQ ID NO: 893265 - RNA, 19 nt, Artificial Sequence
  Description of Artificial Sequence: Synthetic oligonucleotide
aaaacuugcuuccaaauag

SEQ ID NO: 893266 - RNA, 19 nt, Artificial Sequence
  Description of Artificial Sequence: Synthetic oligonucleotide
auauggacuaaauucaacc

SEQ ID NO: 893267 - RNA, 19 nt, Artificial Sequence
  Description of Artificial Sequence: Synthetic oligonucleotide
agaguauugaaguacauca

SEQ ID NO: 893268 - RNA, 19 nt, Artificial Sequence
  Description of Artificial Sequence: Synthetic oligonucleotide
uugugaauaacauucacac

SEQ ID NO: 893269 - RNA, 19 nt, Artificial Sequence
  Description of Artificial Sequence: Synthetic oligonucleotide
aguacaucagaucauguag

SEQ ID NO: 893270 - RNA, 19 nt, Artificial Sequence
  Description of Artificial Sequence: Synthetic oligonucleotide
aaauccccgauucauacag

SEQ ID NO: 893271 - RNA, 19 nt, Artificial Sequence
  Description of Artificial Sequence: Synthetic oligonucleotide
uguugaagaauuuucuugc

SEQ ID NO: 893272 - RNA, 19 nt, Artificial Sequence
  Description of Artificial Sequence: Synthetic oligonucleotide
uuccaaauaggucaggagc

SEQ ID NO: 893273 - RNA, 19 nt, Artificial Sequence
  Description of Artificial Sequence: Synthetic oligonucleotide
aacaaaucuaguuugugaa

SEQ ID NO: 893274 - RNA, 19 nt, Artificial Sequence
  Description of Artificial Sequence: Synthetic oligonucleotide
ugaacaguauggaaaaggc

SEQ ID NO: 893275 - RNA, 19 nt, Artificial Sequence
  Description of Artificial Sequence: Synthetic oligonucleotide
ucuagugguucauauaucc

SEQ ID NO: 893276 - RNA, 19 nt, Artificial Sequence
  Description of Artificial Sequence: Synthetic oligonucleotide
gaaugcuugauuuggauac

SEQ ID NO: 893277 - RNA, 19 nt, Artificial Sequence
  Description of Artificial Sequence: Synthetic oligonucleotide
aaaacggcgauucgggguc

SEQ ID NO: 893278 - RNA, 19 nt, Artificial Sequence
  Description of Artificial Sequence: Synthetic oligonucleotide
uaggucaggagccauaaag

SEQ ID NO: 893279 - RNA, 19 nt, Artificial Sequence
  Description of Artificial Sequence: Synthetic oligonucleotide
cucacaaugugcuuggccg

SEQ ID NO: 893280 - RNA, 19 nt, Artificial Sequence
  Description of Artificial Sequence: Synthetic oligonucleotide
auaaggaucaaucuuugga

SEQ ID NO: 893281 - RNA, 19 nt, Artificial Sequence
  Description of Artificial Sequence: Synthetic oligonucleotide
aucagcauccgauggaccc

SEQ ID NO: 893282 - RNA, 19 nt, Artificial Sequence
  Description of Artificial Sequence: Synthetic oligonucleotide
aaugguagggcaaucguuc

SEQ ID NO: 893283 - RNA, 19 nt, Artificial Sequence
  Description of Artificial Sequence: Synthetic oligonucleotide
aaauaguguuguaucaugg

SEQ ID NO: 893284 - RNA, 19 nt, Artificial Sequence
  Description of Artificial Sequence: Synthetic oligonucleotide
uucccgaucaaacacauaa

SEQ ID NO: 893285 - RNA, 19 nt, Artificial Sequence
  Description of Artificial Sequence: Synthetic oligonucleotide
uuuauuuugugaaccagaa

SEQ ID NO: 893286 - RNA, 19 nt, Artificial Sequence
  Description of Artificial Sequence: Synthetic oligonucleotide
uauggacuaaauucaaccc

SEQ ID NO: 893287 - RNA, 19 nt, Artificial Sequence
  Description of Artificial Sequence: Synthetic oligonucleotide
uccuuuaucacgucaaugu

SEQ ID NO: 893288 - RNA, 19 nt, Artificial Sequence
  Description of Artificial Sequence: Synthetic oligonucleotide
agagcaacgagauggguuc

SEQ ID NO: 893289 - RNA, 19 nt, Artificial Sequence
  Description of Artificial Sequence: Synthetic oligonucleotide
aaucguucuccacaucagg

SEQ ID NO: 893290 - RNA, 19 nt, Artificial Sequence
  Description of Artificial Sequence: Synthetic oligonucleotide
auaacgcugagucacucac

SEQ ID NO: 893291 - RNA, 19 nt, Artificial Sequence
  Description of Artificial Sequence: Synthetic oligonucleotide
aacccaaucagcaaacauc

SEQ ID NO: 893292 - RNA, 19 nt, Artificial Sequence
  Description of Artificial Sequence: Synthetic oligonucleotide
ucauuacucacaaugugcu

SEQ ID NO: 893293 - RNA, 19 nt, Artificial Sequence
  Description of Artificial Sequence: Synthetic oligonucleotide
ugaggucggagaaucaagg

SEQ ID NO: 893294 - RNA, 19 nt, Artificial Sequence
  Description of Artificial Sequence: Synthetic oligonucleotide
uugacauguaccaugugga

SEQ ID NO: 893295 - RNA, 19 nt, Artificial Sequence
  Description of Artificial Sequence: Synthetic oligonucleotide
uugaauaacgcugagucac

SEQ ID NO: 893296 - RNA, 19 nt, Artificial Sequence
  Description of Artificial Sequence: Synthetic oligonucleotide
agaaccuuuauuuugugaa

SEQ ID NO: 893297 - RNA, 19 nt, Artificial Sequence
  Description of Artificial Sequence: Synthetic oligonucleotide
ucucggguauugaauaacg

SEQ ID NO: 893298 - RNA, 19 nt, Artificial Sequence
  Description of Artificial Sequence: Synthetic oligonucleotide
gagaugaugagauccacac

SEQ ID NO: 893299 - RNA, 19 nt, Artificial Sequence
  Description of Artificial Sequence: Synthetic oligonucleotide
aaccagaaacucccaagac

SEQ ID NO: 893300 - RNA, 19 nt, Artificial Sequence
  Description of Artificial Sequence: Synthetic oligonucleotide
uccuauaagcaucccaaag

SEQ ID NO: 893301 - RNA, 19 nt, Artificial Sequence
  Description of Artificial Sequence: Synthetic oligonucleotide
gauaaugguagggcaaucg

SEQ ID NO: 893302 - RNA, 19 nt, Artificial Sequence
  Description of Artificial Sequence: Synthetic oligonucleotide
uccguucaaauucauccgg

SEQ ID NO: 893303 - RNA, 19 nt, Artificial Sequence
  Description of Artificial Sequence: Synthetic oligonucleotide
auaaagguaccguauuuug

SEQ ID NO: 893304 - RNA, 19 nt, Artificial Sequence
  Description of Artificial Sequence: Synthetic oligonucleotide
uuugacaccaaucgucgug

SEQ ID NO: 893305 - RNA, 19 nt, Artificial Sequence
  Description of Artificial Sequence: Synthetic oligonucleotide
ucuccuauaagcaucccaa

SEQ ID NO: 893306 - RNA, 19 nt, Artificial Sequence
  Description of Artificial Sequence: Synthetic oligonucleotide
aacgagauggguucugucu

SEQ ID NO: 893307 - RNA, 19 nt, Artificial Sequence
  Description of Artificial Sequence: Synthetic oligonucleotide
ugucauuacucacaaugug

SEQ ID NO: 893308 - RNA, 19 nt, Artificial Sequence
  Description of Artificial Sequence: Synthetic oligonucleotide
uucacaaccguucccauaa

SEQ ID NO: 893309 - RNA, 19 nt, Artificial Sequence
  Description of Artificial Sequence: Synthetic oligonucleotide
uucagaguauugaaguaca

SEQ ID NO: 893310 - RNA, 19 nt, Artificial Sequence
  Description of Artificial Sequence: Synthetic oligonucleotide
ggugaagagaggcaaaggg

SEQ ID NO: 893311 - RNA, 19 nt, Artificial Sequence
  Description of Artificial Sequence: Synthetic oligonucleotide
uuugguacucucuuucagc

SEQ ID NO: 893312 - RNA, 19 nt, Artificial Sequence
  Description of Artificial Sequence: Synthetic oligonucleotide
gauggacccaacuugcuug

SEQ ID NO: 893313 - RNA, 19 nt, Artificial Sequence
  Description of Artificial Sequence: Synthetic oligonucleotide
uuguaucauggcaugaaca

SEQ ID NO: 893314 - RNA, 19 nt, Artificial Sequence
  Description of Artificial Sequence: Synthetic oligonucleotide
aagaugucaguaaagguga

SEQ ID NO: 893315 - RNA, 19 nt, Artificial Sequence
  Description of Artificial Sequence: Synthetic oligonucleotide
uuaaaggugagcccacugu

SEQ ID NO: 893316 - RNA, 19 nt, Artificial Sequence
  Description of Artificial Sequence: Synthetic oligonucleotide
uccccagacacccauuagg

SEQ ID NO: 893317 - RNA, 19 nt, Artificial Sequence
  Description of Artificial Sequence: Synthetic oligonucleotide
caucagaucauguagccuc

SEQ ID NO: 893318 - RNA, 19 nt, Artificial Sequence
  Description of Artificial Sequence: Synthetic oligonucleotide
gacccaacuugcuugauug

SEQ ID NO: 893319 - RNA, 19 nt, Artificial Sequence
  Description of Artificial Sequence: Synthetic oligonucleotide
uuacuuagaaacuccuugu

SEQ ID NO: 893320 - RNA, 19 nt, Artificial Sequence
  Description of Artificial Sequence: Synthetic oligonucleotide
ugcaaguagaaguuccuug

SEQ ID NO: 893321 - RNA, 19 nt, Artificial Sequence
  Description of Artificial Sequence: Synthetic oligonucleotide
ggauaaggcagguuaaagg

SEQ ID NO: 893322 - RNA, 19 nt, Artificial Sequence
  Description of Artificial Sequence: Synthetic oligonucleotide
auuacucacaaugugcuug

SEQ ID NO: 893323 - RNA, 19 nt, Artificial Sequence
  Description of Artificial Sequence: Synthetic oligonucleotide
ugucacuuggccuugcaga

SEQ ID NO: 893324 - RNA, 19 nt, Artificial Sequence
  Description of Artificial Sequence: Synthetic oligonucleotide
ucuucguuaaucuccucug

SEQ ID NO: 893325 - RNA, 19 nt, Artificial Sequence
  Description of Artificial Sequence: Synthetic oligonucleotide
uagaaguuccuugaaagga

SEQ ID NO: 893326 - RNA, 19 nt, Artificial Sequence
  Description of Artificial Sequence: Synthetic oligonucleotide
uggaauucaaauggcuugg

SEQ ID NO: 893327 - RNA, 19 nt, Artificial Sequence
  Description of Artificial Sequence: Synthetic oligonucleotide
augucaguaaaggugacag

SEQ ID NO: 893328 - RNA, 19 nt, Artificial Sequence
  Description of Artificial Sequence: Synthetic oligonucleotide
cucauauggacuaaauuca

SEQ ID NO: 893329 - RNA, 19 nt, Artificial Sequence
  Description of Artificial Sequence: Synthetic oligonucleotide
aaacuugcuuccaaauagg

SEQ ID NO: 893330 - RNA, 19 nt, Artificial Sequence
  Description of Artificial Sequence: Synthetic oligonucleotide
agguuugacauggagacag

SEQ ID NO: 893331 - RNA, 19 nt, Artificial Sequence
  Description of Artificial Sequence: Synthetic oligonucleotide
ucggguauugaauaacgcu

SEQ ID NO: 893332 - RNA, 19 nt, Artificial Sequence
  Description of Artificial Sequence: Synthetic oligonucleotide
uugguacucucuuucagca

SEQ ID NO: 893333 - RNA, 19 nt, Artificial Sequence
  Description of Artificial Sequence: Synthetic oligonucleotide
ucuguauucaaugcucuca

SEQ ID NO: 893334 - RNA, 19 nt, Artificial Sequence
  Description of Artificial Sequence: Synthetic oligonucleotide
auccguucaaauucauccg

SEQ ID NO: 893335 - RNA, 19 nt, Artificial Sequence
  Description of Artificial Sequence: Synthetic oligonucleotide
uauugaaguacaucagauc

SEQ ID NO: 893336 - RNA, 19 nt, Artificial Sequence
  Description of Artificial Sequence: Synthetic oligonucleotide
ugugcaccuucccugcucg

SEQ ID NO: 893337 - RNA, 19 nt, Artificial Sequence
  Description of Artificial Sequence: Synthetic oligonucleotide
cuagugguucauauauccg

SEQ ID NO: 893338 - RNA, 19 nt, Artificial Sequence
  Description of Artificial Sequence: Synthetic oligonucleotide
auuucauaaugguauguau

SEQ ID NO: 893339 - RNA, 19 nt, Artificial Sequence
  Description of Artificial Sequence: Synthetic oligonucleotide
ggagaaucaagggauaagg

SEQ ID NO: 893340 - RNA, 19 nt, Artificial Sequence
  Description of Artificial Sequence: Synthetic oligonucleotide
auccccgauucauacagcg

SEQ ID NO: 893341 - RNA, 19 nt, Artificial Sequence
  Description of Artificial Sequence: Synthetic oligonucleotide
gguguugagauucaacccc

SEQ ID NO: 893342 - RNA, 19 nt, Artificial Sequence
  Description of Artificial Sequence: Synthetic oligonucleotide
ucuacaacgugaaucuuuu

SEQ ID NO: 893343 - RNA, 19 nt, Artificial Sequence
  Description of Artificial Sequence: Synthetic oligonucleotide
ugagcugaacuauuaaaua

SEQ ID NO: 893344 - RNA, 19 nt, Artificial Sequence
  Description of Artificial Sequence: Synthetic oligonucleotide
cucugcaaguagaaguucc

SEQ ID NO: 893345 - RNA, 19 nt, Artificial Sequence
  Description of Artificial Sequence: Synthetic oligonucleotide
uucguuaaucuccucugga

SEQ ID NO: 893346 - RNA, 19 nt, Artificial Sequence
  Description of Artificial Sequence: Synthetic oligonucleotide
uucaaacuacucaggguug

SEQ ID NO: 893347 - RNA, 19 nt, Artificial Sequence
  Description of Artificial Sequence: Synthetic oligonucleotide
ucauggcaugaacaaaucu

SEQ ID NO: 893348 - RNA, 19 nt, Artificial Sequence
  Description of Artificial Sequence: Synthetic oligonucleotide
aauguuguucagaguauug

SEQ ID NO: 893349 - RNA, 19 nt, Artificial Sequence
  Description of Artificial Sequence: Synthetic oligonucleotide
uucuccuauaagcauccca

SEQ ID NO: 893350 - RNA, 19 nt, Artificial Sequence
  Description of Artificial Sequence: Synthetic oligonucleotide
aaaauccccgauucauaca

SEQ ID NO: 893351 - RNA, 19 nt, Artificial Sequence
  Description of Artificial Sequence: Synthetic oligonucleotide
gaaccagaaacucccaaga

SEQ ID NO: 893352 - RNA, 19 nt, Artificial Sequence
  Description of Artificial Sequence: Synthetic oligonucleotide
uccgauggacccaacuugc

SEQ ID NO: 893353 - RNA, 19 nt, Artificial Sequence
  Description of Artificial Sequence: Synthetic oligonucleotide
auaaugguagggcaaucgu

SEQ ID NO: 893354 - RNA, 19 nt, Artificial Sequence
  Description of Artificial Sequence: Synthetic oligonucleotide
ucauauggacuaaauucaa

SEQ ID NO: 893355 - RNA, 19 nt, Artificial Sequence
  Description of Artificial Sequence: Synthetic oligonucleotide
cauaaggaucaaucuuugg

SEQ ID NO: 893356 - RNA, 19 nt, Artificial Sequence
  Description of Artificial Sequence: Synthetic oligonucleotide
ugcauuugacaccaaucgu

SEQ ID NO: 893357 - RNA, 19 nt, Artificial Sequence
  Description of Artificial Sequence: Synthetic oligonucleotide
ucgucguggaauucaaaug

SEQ ID NO: 893358 - RNA, 19 nt, Artificial Sequence
  Description of Artificial Sequence: Synthetic oligonucleotide
aaugugcuuggccguaaug

SEQ ID NO: 893359 - RNA, 19 nt, Artificial Sequence
  Description of Artificial Sequence: Synthetic oligonucleotide
acuacucaggguuguguuc

SEQ ID NO: 893360 - RNA, 19 nt, Artificial Sequence
  Description of Artificial Sequence: Synthetic oligonucleotide
gaggucggagaaucaaggg

SEQ ID NO: 893361 - RNA, 19 nt, Artificial Sequence
  Description of Artificial Sequence: Synthetic oligonucleotide
ugaacaaaucuaguuugug

SEQ ID NO: 893362 - RNA, 19 nt, Artificial Sequence
  Description of Artificial Sequence: Synthetic oligonucleotide
ugucaguaaaggugacagg

SEQ ID NO: 893363 - RNA, 19 nt, Artificial Sequence
  Description of Artificial Sequence: Synthetic oligonucleotide
gaaccuuuauuuugugaac

SEQ ID NO: 893364 - RNA, 19 nt, Artificial Sequence
  Description of Artificial Sequence: Synthetic oligonucleotide
cauauggacuaaauucaac

SEQ ID NO: 893365 - RNA, 19 nt, Artificial Sequence
  Description of Artificial Sequence: Synthetic oligonucleotide
ucuugccucgacauuacuc

SEQ ID NO: 893366 - RNA, 19 nt, Artificial Sequence
  Description of Artificial Sequence: Synthetic oligonucleotide
ugaaugcuugauuuggaua

SEQ ID NO: 893367 - RNA, 19 nt, Artificial Sequence
  Description of Artificial Sequence: Synthetic oligonucleotide
cuugccucgacauuacuca

SEQ ID NO: 893368 - RNA, 19 nt, Artificial Sequence
  Description of Artificial Sequence: Synthetic oligonucleotide
ucguuaaucuccucuggac

SEQ ID NO: 893369 - RNA, 19 nt, Artificial Sequence
  Description of Artificial Sequence: Synthetic oligonucleotide
aucgucguggaauucaaau

SEQ ID NO: 893370 - RNA, 19 nt, Artificial Sequence
  Description of Artificial Sequence: Synthetic oligonucleotide
acacauaaggaucaaucuu

SEQ ID NO: 893371 - RNA, 19 nt, Artificial Sequence
  Description of Artificial Sequence: Synthetic oligonucleotide
gagaaucaagggauaaggc

SEQ ID NO: 893372 - RNA, 19 nt, Artificial Sequence
  Description of Artificial Sequence: Synthetic oligonucleotide
ugagaguacaagguugaca

SEQ ID NO: 893373 - RNA, 19 nt, Artificial Sequence
  Description of Artificial Sequence: Synthetic oligonucleotide
agaaguuccuugaaaggag

SEQ ID NO: 893374 - RNA, 19 nt, Artificial Sequence
  Description of Artificial Sequence: Synthetic oligonucleotide
ucugcaaguagaaguuccu

SEQ ID NO: 893375 - RNA, 19 nt, Artificial Sequence
  Description of Artificial Sequence: Synthetic oligonucleotide
gaguauugaaguacaucag

SEQ ID NO: 893376 - RNA, 19 nt, Artificial Sequence
  Description of Artificial Sequence: Synthetic oligonucleotide
guuugugaauaacauucac

SEQ ID NO: 893377 - RNA, 19 nt, Artificial Sequence
  Description of Artificial Sequence: Synthetic oligonucleotide
auccgauggacccaacuug

SEQ ID NO: 893378 - RNA, 19 nt, Artificial Sequence
  Description of Artificial Sequence: Synthetic oligonucleotide
guggaaaacggcgauucgg

SEQ ID NO: 893379 - RNA, 19 nt, Artificial Sequence
  Description of Artificial Sequence: Synthetic oligonucleotide
cauuguagaaccuuuauuu

SEQ ID NO: 893380 - RNA, 19 nt, Artificial Sequence
  Description of Artificial Sequence: Synthetic oligonucleotide
gacauguaccauguggagc

SEQ ID NO: 893381 - RNA, 19 nt, Artificial Sequence
  Description of Artificial Sequence: Synthetic oligonucleotide
uagguuuacuuagaaacuc

SEQ ID NO: 893382 - RNA, 19 nt, Artificial Sequence
  Description of Artificial Sequence: Synthetic oligonucleotide
cccauuaggaaaugcaagg

SEQ ID NO: 893383 - RNA, 19 nt, Artificial Sequence
  Description of Artificial Sequence: Synthetic oligonucleotide
aagguaccguauuuugcca

SEQ ID NO: 893384 - RNA, 19 nt, Artificial Sequence
  Description of Artificial Sequence: Synthetic oligonucleotide
ucguggaauucaaauggcu

SEQ ID NO: 893385 - RNA, 19 nt, Artificial Sequence
  Description of Artificial Sequence: Synthetic oligonucleotide
cuucguuaaucuccucugg

SEQ ID NO: 893386 - RNA, 19 nt, Artificial Sequence
  Description of Artificial Sequence: Synthetic oligonucleotide
ugccucgacauuacucagg

SEQ ID NO: 893387 - RNA, 19 nt, Artificial Sequence
  Description of Artificial Sequence: Synthetic oligonucleotide
ucccgaucaaacacauaag

SEQ ID NO: 893388 - RNA, 19 nt, Artificial Sequence
  Description of Artificial Sequence: Synthetic oligonucleotide
auuuugugaaccagaaacu

SEQ ID NO: 893389 - RNA, 19 nt, Artificial Sequence
  Description of Artificial Sequence: Synthetic oligonucleotide
aggucggagaaucaaggga

SEQ ID NO: 893390 - RNA, 19 nt, Artificial Sequence
  Description of Artificial Sequence: Synthetic oligonucleotide
ucgacauuacucagggaaa

SEQ ID NO: 893391 - RNA, 19 nt, Artificial Sequence
  Description of Artificial Sequence: Synthetic oligonucleotide
cauaaagacucaacauauc

SEQ ID NO: 893392 - RNA, 19 nt, Artificial Sequence
  Description of Artificial Sequence: Synthetic oligonucleotide
ugaauaacgcugagucacu

SEQ ID NO: 893393 - RNA, 19 nt, Artificial Sequence
  Description of Artificial Sequence: Synthetic oligonucleotide
uaaugguagggcaaucguu

SEQ ID NO: 893394 - RNA, 19 nt, Artificial Sequence
  Description of Artificial Sequence: Synthetic oligonucleotide
ugcuugauuuggauacuga

SEQ ID NO: 893395 - RNA, 19 nt, Artificial Sequence
  Description of Artificial Sequence: Synthetic oligonucleotide
cacacaaugggaagccuug

SEQ ID NO: 893396 - RNA, 19 nt, Artificial Sequence
  Description of Artificial Sequence: Synthetic oligonucleotide
cucggguauugaauaacgc

SEQ ID NO: 893397 - RNA, 19 nt, Artificial Sequence
  Description of Artificial Sequence: Synthetic oligonucleotide
guuaaaggugagcccacug

SEQ ID NO: 893398 - RNA, 19 nt, Artificial Sequence
  Description of Artificial Sequence: Synthetic oligonucleotide
acaaaucuaguuugugaau

SEQ ID NO: 893399 - RNA, 19 nt, Artificial Sequence
  Description of Artificial Sequence: Synthetic oligonucleotide
ucgaaggaauccugggagc

SEQ ID NO: 893400 - RNA, 19 nt, Artificial Sequence
  Description of Artificial Sequence: Synthetic oligonucleotide
acccaaucagcaaacauca

SEQ ID NO: 893401 - RNA, 19 nt, Artificial Sequence
  Description of Artificial Sequence: Synthetic oligonucleotide
uuggauacugaaaguugaa

SEQ ID NO: 893402 - RNA, 19 nt, Artificial Sequence
  Description of Artificial Sequence: Synthetic oligonucleotide
uguuguaucauggcaugaa

SEQ ID NO: 893403 - RNA, 19 nt, Artificial Sequence
  Description of Artificial Sequence: Synthetic oligonucleotide
gacacgucagguuugacau

SEQ ID NO: 893404 - RNA, 19 nt, Artificial Sequence
  Description of Artificial Sequence: Synthetic oligonucleotide
caaucguucuccacaucag

SEQ ID NO: 893405 - RNA, 19 nt, Artificial Sequence
  Description of Artificial Sequence: Synthetic oligonucleotide
cccgaucaaacacauaagg

SEQ ID NO: 893406 - RNA, 19 nt, Artificial Sequence
  Description of Artificial Sequence: Synthetic oligonucleotide
guauguaugaauacuuaaa

SEQ ID NO: 893407 - RNA, 19 nt, Artificial Sequence
  Description of Artificial Sequence: Synthetic oligonucleotide
cugaggucggagaaucaag

SEQ ID NO: 893408 - RNA, 19 nt, Artificial Sequence
  Description of Artificial Sequence: Synthetic oligonucleotide
gaguacaagguugacaugu

SEQ ID NO: 893409 - RNA, 19 nt, Artificial Sequence
  Description of Artificial Sequence: Synthetic oligonucleotide
aauccccgauucauacagc

SEQ ID NO: 893410 - RNA, 19 nt, Artificial Sequence
  Description of Artificial Sequence: Synthetic oligonucleotide
caaugcucucaacaauggc

SEQ ID NO: 893411 - RNA, 19 nt, Artificial Sequence
  Description of Artificial Sequence: Synthetic oligonucleotide
aaaggugagcccacugucu

SEQ ID NO: 893412 - RNA, 19 nt, Artificial Sequence
  Description of Artificial Sequence: Synthetic oligonucleotide
cauacagcgccuucaucac

SEQ ID NO: 893413 - RNA, 19 nt, Artificial Sequence
  Description of Artificial Sequence: Synthetic oligonucleotide
uugucauuuugguacucuc

SEQ ID NO: 893414 - RNA, 19 nt, Artificial Sequence
  Description of Artificial Sequence: Synthetic oligonucleotide
ugccgaucucauauggacu

SEQ ID NO: 893415 - RNA, 19 nt, Artificial Sequence
  Description of Artificial Sequence: Synthetic oligonucleotide
acccauuaggaaaugcaag

SEQ ID NO: 893416 - RNA, 19 nt, Artificial Sequence
  Description of Artificial Sequence: Synthetic oligonucleotide
aauuaguguuucuccuaua

SEQ ID NO: 893417 - RNA, 19 nt, Artificial Sequence
  Description of Artificial Sequence: Synthetic oligonucleotide
aaugcuugauuuggauacu

SEQ ID NO: 893418 - RNA, 19 nt, Artificial Sequence
  Description of Artificial Sequence: Synthetic oligonucleotide
agggcaccgggcuucauug

SEQ ID NO: 893419 - RNA, 19 nt, Artificial Sequence
  Description of Artificial Sequence: Synthetic oligonucleotide
uacgccguagguuuacuua

SEQ ID NO: 893420 - RNA, 19 nt, Artificial Sequence
  Description of Artificial Sequence: Synthetic oligonucleotide
ucaaacuacucaggguugu

SEQ ID NO: 893421 - RNA, 19 nt, Artificial Sequence
  Description of Artificial Sequence: Synthetic oligonucleotide
acaccaaucgucguggaau

SEQ ID NO: 893422 - RNA, 19 nt, Artificial Sequence
  Description of Artificial Sequence: Synthetic oligonucleotide
uaacgcugagucacucacc

SEQ ID NO: 893423 - RNA, 19 nt, Artificial Sequence
  Description of Artificial Sequence: Synthetic oligonucleotide
uauauccguucaaauucau

SEQ ID NO: 893424 - RNA, 19 nt, Artificial Sequence
  Description of Artificial Sequence: Synthetic oligonucleotide
uuggccguaauguuuucua

SEQ ID NO: 893425 - RNA, 19 nt, Artificial Sequence
  Description of Artificial Sequence: Synthetic oligonucleotide
uuuuguggugugagaagua

SEQ ID NO: 893426 - RNA, 19 nt, Artificial Sequence
  Description of Artificial Sequence: Synthetic oligonucleotide
agguugaccagaacuuuuc

SEQ ID NO: 893427 - RNA, 19 nt, Artificial Sequence
  Description of Artificial Sequence: Synthetic oligonucleotide
ugacugagcugaacuauua

SEQ ID NO: 893428 - RNA, 19 nt, Artificial Sequence
  Description of Artificial Sequence: Synthetic oligonucleotide
aggagaugaugagauccac

SEQ ID NO: 893429 - RNA, 19 nt, Artificial Sequence
  Description of Artificial Sequence: Synthetic oligonucleotide
uaccguauuuugccaugcc

SEQ ID NO: 893430 - RNA, 19 nt, Artificial Sequence
  Description of Artificial Sequence: Synthetic oligonucleotide
guacaagguugacauguac

SEQ ID NO: 893431 - RNA, 19 nt, Artificial Sequence
  Description of Artificial Sequence: Synthetic oligonucleotide
gcaaucguucuccacauca

SEQ ID NO: 893432 - RNA, 19 nt, Artificial Sequence
  Description of Artificial Sequence: Synthetic oligonucleotide
uucuguauucaaugcucuc

SEQ ID NO: 893433 - RNA, 19 nt, Artificial Sequence
  Description of Artificial Sequence: Synthetic oligonucleotide
cagaguauugaaguacauc

SEQ ID NO: 893434 - RNA, 19 nt, Artificial Sequence
  Description of Artificial Sequence: Synthetic oligonucleotide
aguuugugaauaacauuca

SEQ ID NO: 893435 - RNA, 19 nt, Artificial Sequence
  Description of Artificial Sequence: Synthetic oligonucleotide
cauaaugguauguaugaau

SEQ ID NO: 893436 - RNA, 19 nt, Artificial Sequence
  Description of Artificial Sequence: Synthetic oligonucleotide
uugccucgacauuacucag

SEQ ID NO: 893437 - RNA, 19 nt, Artificial Sequence
  Description of Artificial Sequence: Synthetic oligonucleotide
aaacucccaagacucuguu

SEQ ID NO: 893438 - RNA, 19 nt, Artificial Sequence
  Description of Artificial Sequence: Synthetic oligonucleotide
caucuagugguucauauau

SEQ ID NO: 893439 - RNA, 19 nt, Artificial Sequence
  Description of Artificial Sequence: Synthetic oligonucleotide
cugagucacucaccaaggc

SEQ ID NO: 893440 - RNA, 19 nt, Artificial Sequence
  Description of Artificial Sequence: Synthetic oligonucleotide
uucucggguauugaauaac

SEQ ID NO: 893441 - RNA, 19 nt, Artificial Sequence
  Description of Artificial Sequence: Synthetic oligonucleotide
ggaaaacggcgauucgggg

SEQ ID NO: 893442 - RNA, 19 nt, Artificial Sequence
  Description of Artificial Sequence: Synthetic oligonucleotide
uggauaaugguagggcaau

SEQ ID NO: 893443 - RNA, 19 nt, Artificial Sequence
  Description of Artificial Sequence: Synthetic oligonucleotide
acacccauuaggaaaugca

SEQ ID NO: 893444 - RNA, 19 nt, Artificial Sequence
  Description of Artificial Sequence: Synthetic oligonucleotide
aggugagcccacugucuac

SEQ ID NO: 893445 - RNA, 19 nt, Artificial Sequence
  Description of Artificial Sequence: Synthetic oligonucleotide
auuugacaccaaucgucgu

SEQ ID NO: 893446 - RNA, 19 nt, Artificial Sequence
  Description of Artificial Sequence: Synthetic oligonucleotide
agaguacaagguugacaug

SEQ ID NO: 893447 - RNA, 19 nt, Artificial Sequence
  Description of Artificial Sequence: Synthetic oligonucleotide
cuauaagcaucccaaagau

SEQ ID NO: 893448 - RNA, 19 nt, Artificial Sequence
  Description of Artificial Sequence: Synthetic oligonucleotide
uuucacaaccguucccaua

SEQ ID NO: 893449 - RNA, 19 nt, Artificial Sequence
  Description of Artificial Sequence: Synthetic oligonucleotide
gguagggcaaucguucucc

SEQ ID NO: 893450 - RNA, 19 nt, Artificial Sequence
  Description of Artificial Sequence: Synthetic oligonucleotide
gaugucaguaaaggugaca

SEQ ID NO: 893451 - RNA, 19 nt, Artificial Sequence
  Description of Artificial Sequence: Synthetic oligonucleotide
acaucuagugguucauaua

SEQ ID NO: 893452 - RNA, 19 nt, Artificial Sequence
  Description of Artificial Sequence: Synthetic oligonucleotide
agggugagaguacaagguu

SEQ ID NO: 893453 - RNA, 19 nt, Artificial Sequence
  Description of Artificial Sequence: Synthetic oligonucleotide
acgagauggguucugucuu

SEQ ID NO: 893454 - RNA, 19 nt, Artificial Sequence
  Description of Artificial Sequence: Synthetic oligonucleotide
uuuucacaaccguucccau

SEQ ID NO: 893455 - RNA, 19 nt, Artificial Sequence
  Description of Artificial Sequence: Synthetic oligonucleotide
gccagaacaaaguggauaa

SEQ ID NO: 893456 - RNA, 19 nt, Artificial Sequence
  Description of Artificial Sequence: Synthetic oligonucleotide
cggguauugaauaacgcug

SEQ ID NO: 893457 - RNA, 19 nt, Artificial Sequence
  Description of Artificial Sequence: Synthetic oligonucleotide
caucagcauccgauggacc

SEQ ID NO: 893458 - RNA, 19 nt, Artificial Sequence
  Description of Artificial Sequence: Synthetic oligonucleotide
ucugacacgucagguuuga

SEQ ID NO: 893459 - RNA, 19 nt, Artificial Sequence
  Description of Artificial Sequence: Synthetic oligonucleotide
ccauuaggaaaugcaaggg

SEQ ID NO: 893460 - RNA, 19 nt, Artificial Sequence
  Description of Artificial Sequence: Synthetic oligonucleotide
gcucucaacaauggcaucc

SEQ ID NO: 893461 - RNA, 19 nt, Artificial Sequence
  Description of Artificial Sequence: Synthetic oligonucleotide
cagaucauguagccucuug

SEQ ID NO: 893462 - RNA, 19 nt, Artificial Sequence
  Description of Artificial Sequence: Synthetic oligonucleotide
gucguggaauucaaauggc

SEQ ID NO: 893463 - RNA, 19 nt, Artificial Sequence
  Description of Artificial Sequence: Synthetic oligonucleotide
uggcuuggucuuuccagca

SEQ ID NO: 893464 - RNA, 19 nt, Artificial Sequence
  Description of Artificial Sequence: Synthetic oligonucleotide
gacugagcugaacuauuaa

SEQ ID NO: 893465 - RNA, 19 nt, Artificial Sequence
  Description of Artificial Sequence: Synthetic oligonucleotide
gacauuacucagggaaaca

SEQ ID NO: 893466 - RNA, 19 nt, Artificial Sequence
  Description of Artificial Sequence: Synthetic oligonucleotide
gaauaacgcugagucacuc

SEQ ID NO: 893467 - RNA, 19 nt, Artificial Sequence
  Description of Artificial Sequence: Synthetic oligonucleotide
auggacccaacuugcuuga

SEQ ID NO: 893468 - RNA, 19 nt, Artificial Sequence
  Description of Artificial Sequence: Synthetic oligonucleotide
agcgccuucaucacaccag

SEQ ID NO: 893469 - RNA, 19 nt, Artificial Sequence
  Description of Artificial Sequence: Synthetic oligonucleotide
cacccauuaggaaaugcaa

SEQ ID NO: 893470 - RNA, 19 nt, Artificial Sequence
  Description of Artificial Sequence: Synthetic oligonucleotide
cauuuuagcccacuucucu

SEQ ID NO: 893471 - RNA, 19 nt, Artificial Sequence
  Description of Artificial Sequence: Synthetic oligonucleotide
gucacuuggccuugcagaa

SEQ ID NO: 893472 - RNA, 19 nt, Artificial Sequence
  Description of Artificial Sequence: Synthetic oligonucleotide
augcuugauuuggauacug

SEQ ID NO: 893473 - RNA, 19 nt, Artificial Sequence
  Description of Artificial Sequence: Synthetic oligonucleotide
uggccguaauguuuucuaa

SEQ ID NO: 893474 - RNA, 19 nt, Artificial Sequence
  Description of Artificial Sequence: Synthetic oligonucleotide
agguaccguauuuugccau

SEQ ID NO: 893475 - RNA, 19 nt, Artificial Sequence
  Description of Artificial Sequence: Synthetic oligonucleotide
uagcacuccuucaauccuu

SEQ ID NO: 893476 - RNA, 19 nt, Artificial Sequence
  Description of Artificial Sequence: Synthetic oligonucleotide
agguuaaaggugagcccac

SEQ ID NO: 893477 - RNA, 19 nt, Artificial Sequence
  Description of Artificial Sequence: Synthetic oligonucleotide
uugugcaccuucccugcuc

SEQ ID NO: 893478 - RNA, 19 nt, Artificial Sequence
  Description of Artificial Sequence: Synthetic oligonucleotide
acaucagaucauguagccu

SEQ ID NO: 893479 - RNA, 19 nt, Artificial Sequence
  Description of Artificial Sequence: Synthetic oligonucleotide
gguaccguauuuugccaug

SEQ ID NO: 893480 - RNA, 19 nt, Artificial Sequence
  Description of Artificial Sequence: Synthetic oligonucleotide
cuacucaggguuguguuca

SEQ ID NO: 893481 - RNA, 19 nt, Artificial Sequence
  Description of Artificial Sequence: Synthetic oligonucleotide
gugguucauauauccguuc

SEQ ID NO: 893482 - RNA, 19 nt, Artificial Sequence
  Description of Artificial Sequence: Synthetic oligonucleotide
aggagccauaaagguaccg

SEQ ID NO: 893483 - RNA, 19 nt, Artificial Sequence
  Description of Artificial Sequence: Synthetic oligonucleotide
agguugacauguaccaugu

SEQ ID NO: 893484 - RNA, 19 nt, Artificial Sequence
  Description of Artificial Sequence: Synthetic oligonucleotide
guaccguauuuugccaugc

SEQ ID NO: 893485 - RNA, 19 nt, Artificial Sequence
  Description of Artificial Sequence: Synthetic oligonucleotide
uucuugccucgacauuacu

SEQ ID NO: 893486 - RNA, 19 nt, Artificial Sequence
  Description of Artificial Sequence: Synthetic oligonucleotide
ugcuuccaaauaggucagg

SEQ ID NO: 893487 - RNA, 19 nt, Artificial Sequence
  Description of Artificial Sequence: Synthetic oligonucleotide
agcucuucguuaaucuccu

SEQ ID NO: 893488 - RNA, 19 nt, Artificial Sequence
  Description of Artificial Sequence: Synthetic oligonucleotide
acaguccaaaauccccgau

SEQ ID NO: 893489 - RNA, 19 nt, Artificial Sequence
  Description of Artificial Sequence: Synthetic oligonucleotide
gaaguugauguuggccaga

SEQ ID NO: 893490 - RNA, 19 nt, Artificial Sequence
  Description of Artificial Sequence: Synthetic oligonucleotide
ugguacucucuuucagcau

SEQ ID NO: 893491 - RNA, 19 nt, Artificial Sequence
  Description of Artificial Sequence: Synthetic oligonucleotide
ggugagaguacaagguuga

SEQ ID NO: 893492 - RNA, 19 nt, Artificial Sequence
  Description of Artificial Sequence: Synthetic oligonucleotide
ggguauugaauaacgcuga

SEQ ID NO: 893493 - RNA, 19 nt, Artificial Sequence
  Description of Artificial Sequence: Synthetic oligonucleotide
accaaucgucguggaauuc

SEQ ID NO: 893494 - RNA, 19 nt, Artificial Sequence
  Description of Artificial Sequence: Synthetic oligonucleotide
guggauaaugguagggcaa

SEQ ID NO: 893495 - RNA, 19 nt, Artificial Sequence
  Description of Artificial Sequence: Synthetic oligonucleotide
caaacuacucaggguugug

SEQ ID NO: 893496 - RNA, 19 nt, Artificial Sequence
  Description of Artificial Sequence: Synthetic oligonucleotide
cacacagccuacgccguag

SEQ ID NO: 893497 - RNA, 19 nt, Artificial Sequence
  Description of Artificial Sequence: Synthetic oligonucleotide
ugguuucccuuggaacacc

SEQ ID NO: 893498 - RNA, 19 nt, Artificial Sequence
  Description of Artificial Sequence: Synthetic oligonucleotide
aagguggaaaacggcgauu

SEQ ID NO: 893499 - RNA, 19 nt, Artificial Sequence
  Description of Artificial Sequence: Synthetic oligonucleotide
uuaaucuccucuggaccuu

SEQ ID NO: 893500 - RNA, 19 nt, Artificial Sequence
  Description of Artificial Sequence: Synthetic oligonucleotide
acccaacuugcuugauugu

SEQ ID NO: 893501 - RNA, 19 nt, Artificial Sequence
  Description of Artificial Sequence: Synthetic oligonucleotide
ccguauuuugccaugccga

SEQ ID NO: 893502 - RNA, 19 nt, Artificial Sequence
  Description of Artificial Sequence: Synthetic oligonucleotide
acagccuacgccguagguu

SEQ ID NO: 893503 - RNA, 19 nt, Artificial Sequence
  Description of Artificial Sequence: Synthetic oligonucleotide
caaucgucguggaauucaa

SEQ ID NO: 893504 - RNA, 19 nt, Artificial Sequence
  Description of Artificial Sequence: Synthetic oligonucleotide
gguucauauauccguucaa

SEQ ID NO: 893505 - RNA, 19 nt, Artificial Sequence
  Description of Artificial Sequence: Synthetic oligonucleotide
gaaaugcaagggauuuucu

SEQ ID NO: 893506 - RNA, 19 nt, Artificial Sequence
  Description of Artificial Sequence: Synthetic oligonucleotide
ucacaaccguucccauaaa

SEQ ID NO: 893507 - RNA, 19 nt, Artificial Sequence
  Description of Artificial Sequence: Synthetic oligonucleotide
aaucgucguggaauucaaa

SEQ ID NO: 893508 - RNA, 19 nt, Artificial Sequence
  Description of Artificial Sequence: Synthetic oligonucleotide
ccacaccucucugaggucg

SEQ ID NO: 893509 - RNA, 19 nt, Artificial Sequence
  Description of Artificial Sequence: Synthetic oligonucleotide
agcaacgagauggguucug

SEQ ID NO: 893510 - RNA, 19 nt, Artificial Sequence
  Description of Artificial Sequence: Synthetic oligonucleotide
ugcaccuucccugcucguc

SEQ ID NO: 893511 - RNA, 19 nt, Artificial Sequence
  Description of Artificial Sequence: Synthetic oligonucleotide
cacaaccguucccauaaaa

SEQ ID NO: 893512 - RNA, 19 nt, Artificial Sequence
  Description of Artificial Sequence: Synthetic oligonucleotide
acagagcaacgagaugggu

SEQ ID NO: 893513 - RNA, 19 nt, Artificial Sequence
  Description of Artificial Sequence: Synthetic oligonucleotide
gccuucaucacaccagaaa

SEQ ID NO: 893514 - RNA, 19 nt, Artificial Sequence
  Description of Artificial Sequence: Synthetic oligonucleotide
cuccuauaagcaucccaaa

SEQ ID NO: 893515 - RNA, 19 nt, Artificial Sequence
  Description of Artificial Sequence: Synthetic oligonucleotide
gccgaucucauauggacua

SEQ ID NO: 893516 - RNA, 19 nt, Artificial Sequence
  Description of Artificial Sequence: Synthetic oligonucleotide
agcccacuucucugcaagu

SEQ ID NO: 893517 - RNA, 19 nt, Artificial Sequence
  Description of Artificial Sequence: Synthetic oligonucleotide
cauaaagguaccguauuuu

SEQ ID NO: 893518 - RNA, 19 nt, Artificial Sequence
  Description of Artificial Sequence: Synthetic oligonucleotide
gguuguguucauucuauuu

SEQ ID NO: 893519 - RNA, 19 nt, Artificial Sequence
  Description of Artificial Sequence: Synthetic oligonucleotide
ggcaccgggcuucauugac

SEQ ID NO: 893520 - RNA, 19 nt, Artificial Sequence
  Description of Artificial Sequence: Synthetic oligonucleotide
aaacggcgauucgggguca

SEQ ID NO: 893521 - RNA, 19 nt, Artificial Sequence
  Description of Artificial Sequence: Synthetic oligonucleotide
gugagaguacaagguugac

SEQ ID NO: 893522 - RNA, 19 nt, Artificial Sequence
  Description of Artificial Sequence: Synthetic oligonucleotide
ccaucagcauccgauggac

SEQ ID NO: 893523 - RNA, 19 nt, Artificial Sequence
  Description of Artificial Sequence: Synthetic oligonucleotide
ggucggagaaucaagggau

SEQ ID NO: 893524 - RNA, 19 nt, Artificial Sequence
  Description of Artificial Sequence: Synthetic oligonucleotide
ggccagaacaaaguggaua

SEQ ID NO: 893525 - RNA, 19 nt, Artificial Sequence
  Description of Artificial Sequence: Synthetic oligonucleotide
ggugagcccacugucuaca

SEQ ID NO: 893526 - RNA, 19 nt, Artificial Sequence
  Description of Artificial Sequence: Synthetic oligonucleotide
caacuugcuugauugucau

SEQ ID NO: 893527 - RNA, 19 nt, Artificial Sequence
  Description of Artificial Sequence: Synthetic oligonucleotide
gccaugccgaucucauaug

SEQ ID NO: 893528 - RNA, 19 nt, Artificial Sequence
  Description of Artificial Sequence: Synthetic oligonucleotide
agcugucauuacucacaau

SEQ ID NO: 893529 - RNA, 19 nt, Artificial Sequence
  Description of Artificial Sequence: Synthetic oligonucleotide
cauccgauggacccaacuu

SEQ ID NO: 893530 - RNA, 19 nt, Artificial Sequence
  Description of Artificial Sequence: Synthetic oligonucleotide
cccaacuugcuugauuguc

SEQ ID NO: 893531 - RNA, 19 nt, Artificial Sequence
  Description of Artificial Sequence: Synthetic oligonucleotide
ccccagacacccauuagga

SEQ ID NO: 893532 - RNA, 19 nt, Artificial Sequence
  Description of Artificial Sequence: Synthetic oligonucleotide
ggagccauaaagguaccgu

SEQ ID NO: 893533 - RNA, 19 nt, Artificial Sequence
  Description of Artificial Sequence: Synthetic oligonucleotide
cagccuacgccguagguuu

SEQ ID NO: 893534 - RNA, 19 nt, Artificial Sequence
  Description of Artificial Sequence: Synthetic oligonucleotide
cagcgccuucaucacacca

SEQ ID NO: 893535 - RNA, 19 nt, Artificial Sequence
  Description of Artificial Sequence: Synthetic oligonucleotide
gccguaauguuuucuaauu

SEQ ID NO: 893536 - RNA, 19 nt, Artificial Sequence
  Description of Artificial Sequence: Synthetic oligonucleotide
cccaaucagcaaacaucag

SEQ ID NO: 893537 - RNA, 19 nt, Artificial Sequence
  Description of Artificial Sequence: Synthetic oligonucleotide
ggauaaugguagggcaauc

SEQ ID NO: 893538 - RNA, 19 nt, Artificial Sequence
  Description of Artificial Sequence: Synthetic oligonucleotide
gccguagguuuacuuagaa

SEQ ID NO: 893539 - RNA, 19 nt, Artificial Sequence
  Description of Artificial Sequence: Synthetic oligonucleotide
ccguucaaauucauccgga

SEQ ID NO: 893540 - RNA, 19 nt, Artificial Sequence
  Description of Artificial Sequence: Synthetic oligonucleotide
ccaaaauccccgauucaua

SEQ ID NO: 893541 - RNA, 19 nt, Artificial Sequence
  Description of Artificial Sequence: Synthetic oligonucleotide
gcgccuucaucacaccaga

SEQ ID NO: 893542 - RNA, 19 nt, Artificial Sequence
  Description of Artificial Sequence: Synthetic oligonucleotide
cauuacucacaaugugcuu

SEQ ID NO: 893543 - RNA, 19 nt, Artificial Sequence
  Description of Artificial Sequence: Synthetic oligonucleotide
acgcugagucacucaccaa

SEQ ID NO: 893544 - RNA, 19 nt, Artificial Sequence
  Description of Artificial Sequence: Synthetic oligonucleotide
caguccaaaauccccgauu

SEQ ID NO: 893545 - RNA, 19 nt, Artificial Sequence
  Description of Artificial Sequence: Synthetic oligonucleotide
cagguuugacauggagaca

SEQ ID NO: 893546 - RNA, 19 nt, Artificial Sequence
  Description of Artificial Sequence: Synthetic oligonucleotide
acggcgauucggggucauc

SEQ ID NO: 893547 - RNA, 19 nt, Artificial Sequence
  Description of Artificial Sequence: Synthetic oligonucleotide
cagguugaccagaacuuuu

SEQ ID NO: 893548 - RNA, 19 nt, Artificial Sequence
  Description of Artificial Sequence: Synthetic oligonucleotide
ggcuugugucacuuggccu

SEQ ID NO: 893549 - RNA, 19 nt, Artificial Sequence
  Description of Artificial Sequence: Synthetic oligonucleotide
gcaccgggcuucauugacc

SEQ ID NO: 893550 - RNA, 19 nt, Artificial Sequence
  Description of Artificial Sequence: Synthetic oligonucleotide
cugacacgucagguuugac

SEQ ID NO: 893551 - RNA, 19 nt, Artificial Sequence
  Description of Artificial Sequence: Synthetic oligonucleotide
aacggcgauucggggucau

SEQ ID NO: 893552 - RNA, 19 nt, Artificial Sequence
  Description of Artificial Sequence: Synthetic oligonucleotide
cgauucggggucaucaaaa

SEQ ID NO: 893553 - RNA, 19 nt, Artificial Sequence
  Description of Artificial Sequence: Synthetic oligonucleotide
ggcgauucggggucaucaa

SEQ ID NO: 893554 - RNA, 19 nt, Artificial Sequence
  Description of Artificial Sequence: Synthetic oligonucleotide
gccauaaagguaccguauu

SEQ ID NO: 893555 - RNA, 19 nt, Artificial Sequence
  Description of Artificial Sequence: Synthetic oligonucleotide
gcgauucggggucaucaaa

SEQ ID NO: 893556 - RNA, 19 nt, Artificial Sequence
  Description of Artificial Sequence: Synthetic oligonucleotide
caccaaucgucguggaauu

SEQ ID NO: 893557 - RNA, 19 nt, Artificial Sequence
  Description of Artificial Sequence: Synthetic oligonucleotide
uggacccaacuugcuugau

SEQ ID NO: 893558 - RNA, 19 nt, Artificial Sequence
  Description of Artificial Sequence: Synthetic oligonucleotide
ccguagguuuacuuagaaa

SEQ ID NO: 893559 - RNA, 19 nt, Artificial Sequence
  Description of Artificial Sequence: Synthetic oligonucleotide
cuucccgaucaaacacaua

SEQ ID NO: 893560 - RNA, 19 nt, Artificial Sequence
  Description of Artificial Sequence: Synthetic oligonucleotide
acaccucucugaggucgga

SEQ ID NO: 893561 - RNA, 19 nt, Artificial Sequence
  Description of Artificial Sequence: Synthetic oligonucleotide
caagguugacauguaccau

SEQ ID NO: 893562 - RNA, 19 nt, Artificial Sequence
  Description of Artificial Sequence: Synthetic oligonucleotide
gcauccgauggacccaacu

SEQ ID NO: 893563 - RNA, 19 nt, Artificial Sequence
  Description of Artificial Sequence: Synthetic oligonucleotide
gccucuugaaugcuugauu

SEQ ID NO: 893564 - RNA, 19 nt, Artificial Sequence
  Description of Artificial Sequence: Synthetic oligonucleotide
gggcaaucguucuccacau

SEQ ID NO: 893565 - RNA, 19 nt, Artificial Sequence
  Description of Artificial Sequence: Synthetic oligonucleotide
gagcaacgagauggguucu

SEQ ID NO: 893566 - RNA, 19 nt, Artificial Sequence
  Description of Artificial Sequence: Synthetic oligonucleotide
cuacgccguagguuuacuu

SEQ ID NO: 893567 - RNA, 19 nt, Artificial Sequence
  Description of Artificial Sequence: Synthetic oligonucleotide
cccagacacccauuaggaa

SEQ ID NO: 893568 - RNA, 19 nt, Artificial Sequence
  Description of Artificial Sequence: Synthetic oligonucleotide
cugcaaguagaaguuccuu

SEQ ID NO: 893569 - RNA, 19 nt, Artificial Sequence
  Description of Artificial Sequence: Synthetic oligonucleotide
cacagccuacgccguaggu

SEQ ID NO: 893570 - RNA, 19 nt, Artificial Sequence
  Description of Artificial Sequence: Synthetic oligonucleotide
caaugugcuuggccguaau

SEQ ID NO: 893571 - RNA, 19 nt, Artificial Sequence
  Description of Artificial Sequence: Synthetic oligonucleotide
gccuacgccguagguuuac

SEQ ID NO: 893572 - RNA, 19 nt, Artificial Sequence
  Description of Artificial Sequence: Synthetic oligonucleotide
ggacuaaauucaacccaau

SEQ ID NO: 893573 - RNA, 19 nt, Artificial Sequence
  Description of Artificial Sequence: Synthetic oligonucleotide
gggcaccgggcuucauuga

SEQ ID NO: 893574 - RNA, 19 nt, Artificial Sequence
  Description of Artificial Sequence: Synthetic oligonucleotide
ccuucccgaucaaacacau

SEQ ID NO: 893575 - RNA, 19 nt, Artificial Sequence
  Description of Artificial Sequence: Synthetic oligonucleotide
cggcgauucggggucauca

SEQ ID NO: 893576 - RNA, 19 nt, Artificial Sequence
  Description of Artificial Sequence: Synthetic oligonucleotide
agccuacgccguagguuua

SEQ ID NO: 893577 - RNA, 19 nt, Artificial Sequence
  Description of Artificial Sequence: Synthetic oligonucleotide
gugcaccuucccugcucgu

SEQ ID NO: 893578 - RNA, 19 nt, Artificial Sequence
  Description of Artificial Sequence: Synthetic oligonucleotide
cgccguagguuuacuuaga

SEQ ID NO: 893579 - RNA, 19 nt, Artificial Sequence
  Description of Artificial Sequence: Synthetic oligonucleotide
ccgauggacccaacuugcu

SEQ ID NO: 893580 - RNA, 19 nt, Artificial Sequence
  Description of Artificial Sequence: Synthetic oligonucleotide
gcucguccuucucggguau

SEQ ID NO: 893581 - RNA, 19 nt, Artificial Sequence
  Description of Artificial Sequence: Synthetic oligonucleotide
ccgaucucauauggacuaa

SEQ ID NO: 893582 - RNA, 19 nt, Artificial Sequence
  Description of Artificial Sequence: Synthetic oligonucleotide
cgauggacccaacuugcuu

SEQ ID NO: 893583 - RNA, 19 nt, Artificial Sequence
  Description of Artificial Sequence: Synthetic oligonucleotide
ccagaacaaaguggauaau

SEQ ID NO: 893584 - RNA, 19 nt, Artificial Sequence
  Description of Artificial Sequence: Synthetic oligonucleotide
ccuacgccguagguuuacu

SEQ ID NO: 893585 - RNA, 19 nt, Artificial Sequence
  Description of Artificial Sequence: Synthetic oligonucleotide
cucguccuucucggguauu

SEQ ID NO: 893586 - RNA, 19 nt, Artificial Sequence
  Description of Artificial Sequence: Synthetic oligonucleotide
auaguugacaaccauagac

SEQ ID NO: 893587 - RNA, 19 nt, Artificial Sequence
  Description of Artificial Sequence: Synthetic oligonucleotide
agaaugauggcauaagggc

SEQ ID NO: 893588 - RNA, 19 nt, Artificial Sequence
  Description of Artificial Sequence: Synthetic oligonucleotide
gaugcuauagucuucccgg

SEQ ID NO: 893589 - RNA, 19 nt, Artificial Sequence
  Description of Artificial Sequence: Synthetic oligonucleotide
cuucuuacgaaguuuacgg

SEQ ID NO: 893590 - RNA, 19 nt, Artificial Sequence
  Description of Artificial Sequence: Synthetic oligonucleotide
uuggauaucaauaccacga

SEQ ID NO: 893591 - RNA, 19 nt, Artificial Sequence
  Description of Artificial Sequence: Synthetic oligonucleotide
uuaucaaugacuuccaaaa

SEQ ID NO: 893592 - RNA, 19 nt, Artificial Sequence
  Description of Artificial Sequence: Synthetic oligonucleotide
agugcggauaccuaguggc

SEQ ID NO: 893593 - RNA, 19 nt, Artificial Sequence
  Description of Artificial Sequence: Synthetic oligonucleotide
gaugucacgauucuguagc

SEQ ID NO: 893594 - RNA, 19 nt, Artificial Sequence
  Description of Artificial Sequence: Synthetic oligonucleotide
aaucucacaacccaugcgu

SEQ ID NO: 893595 - RNA, 19 nt, Artificial Sequence
  Description of Artificial Sequence: Synthetic oligonucleotide
aaguuuacggagucuugcc

SEQ ID NO: 893596 - RNA, 19 nt, Artificial Sequence
  Description of Artificial Sequence: Synthetic oligonucleotide
aucaauaccacgaccagcc

SEQ ID NO: 893597 - RNA, 19 nt, Artificial Sequence
  Description of Artificial Sequence: Synthetic oligonucleotide
aauguaaucuucaauauuu

SEQ ID NO: 893598 - RNA, 19 nt, Artificial Sequence
  Description of Artificial Sequence: Synthetic oligonucleotide
ugacuuccaaaauaugugg

SEQ ID NO: 893599 - RNA, 19 nt, Artificial Sequence
  Description of Artificial Sequence: Synthetic oligonucleotide
aaugacuuccaaaauaugu

SEQ ID NO: 893600 - RNA, 19 nt, Artificial Sequence
  Description of Artificial Sequence: Synthetic oligonucleotide
gaugaaucuuuccaggacc

SEQ ID NO: 893601 - RNA, 19 nt, Artificial Sequence
  Description of Artificial Sequence: Synthetic oligonucleotide
aaugggauaaggaaggcug

SEQ ID NO: 893602 - RNA, 19 nt, Artificial Sequence
  Description of Artificial Sequence: Synthetic oligonucleotide
agggcaugucuuuacaucc

SEQ ID NO: 893603 - RNA, 19 nt, Artificial Sequence
  Description of Artificial Sequence: Synthetic oligonucleotide
gaacaugacuguuuggcgg

SEQ ID NO: 893604 - RNA, 19 nt, Artificial Sequence
  Description of Artificial Sequence: Synthetic oligonucleotide
aguguacaggcauuguacc

SEQ ID NO: 893605 - RNA, 19 nt, Artificial Sequence
  Description of Artificial Sequence: Synthetic oligonucleotide
guaggagccagaaugaugg

SEQ ID NO: 893606 - RNA, 19 nt, Artificial Sequence
  Description of Artificial Sequence: Synthetic oligonucleotide
ucugacaugaggaaaacuu

SEQ ID NO: 893607 - RNA, 19 nt, Artificial Sequence
  Description of Artificial Sequence: Synthetic oligonucleotide
acaaucucacaacccaugc

SEQ ID NO: 893608 - RNA, 19 nt, Artificial Sequence
  Description of Artificial Sequence: Synthetic oligonucleotide
agagaugaaucuuuccagg

SEQ ID NO: 893609 - RNA, 19 nt, Artificial Sequence
  Description of Artificial Sequence: Synthetic oligonucleotide
ugagauuggacaaugcaaa

SEQ ID NO: 893610 - RNA, 19 nt, Artificial Sequence
  Description of Artificial Sequence: Synthetic oligonucleotide
agaaacgugacuguucucg

SEQ ID NO: 893611 - RNA, 19 nt, Artificial Sequence
  Description of Artificial Sequence: Synthetic oligonucleotide
ugaugcuauagucuucccg

SEQ ID NO: 893612 - RNA, 19 nt, Artificial Sequence
  Description of Artificial Sequence: Synthetic oligonucleotide
gauaucaauaccacgacca

SEQ ID NO: 893613 - RNA, 19 nt, Artificial Sequence
  Description of Artificial Sequence: Synthetic oligonucleotide
aaugagacguccuggggug

SEQ ID NO: 893614 - RNA, 19 nt, Artificial Sequence
  Description of Artificial Sequence: Synthetic oligonucleotide
uuggccauaucauaguuga

SEQ ID NO: 893615 - RNA, 19 nt, Artificial Sequence
  Description of Artificial Sequence: Synthetic oligonucleotide
auggcuacaccacucuugc

SEQ ID NO: 893616 - RNA, 19 nt, Artificial Sequence
  Description of Artificial Sequence: Synthetic oligonucleotide
gaaccacauagguacagcg

SEQ ID NO: 893617 - RNA, 19 nt, Artificial Sequence
  Description of Artificial Sequence: Synthetic oligonucleotide
uguuccaaaauugcgagca

SEQ ID NO: 893618 - RNA, 19 nt, Artificial Sequence
  Description of Artificial Sequence: Synthetic oligonucleotide
acggguaggagccagaaug

SEQ ID NO: 893619 - RNA, 19 nt, Artificial Sequence
  Description of Artificial Sequence: Synthetic oligonucleotide
ugacacuggacucucuagg

SEQ ID NO: 893620 - RNA, 19 nt, Artificial Sequence
  Description of Artificial Sequence: Synthetic oligonucleotide
gauagcuugcuucaguuca

SEQ ID NO: 893621 - RNA, 19 nt, Artificial Sequence
  Description of Artificial Sequence: Synthetic oligonucleotide
uuaggucuccauagaaacg

SEQ ID NO: 893622 - RNA, 19 nt, Artificial Sequence
  Description of Artificial Sequence: Synthetic oligonucleotide
uuggagaggaacuugggcu

SEQ ID NO: 893623 - RNA, 19 nt, Artificial Sequence
  Description of Artificial Sequence: Synthetic oligonucleotide
uugagauuggacaaugcaa

SEQ ID NO: 893624 - RNA, 19 nt, Artificial Sequence
  Description of Artificial Sequence: Synthetic oligonucleotide
auuugcuagcucuggaggg

SEQ ID NO: 893625 - RNA, 19 nt, Artificial Sequence
  Description of Artificial Sequence: Synthetic oligonucleotide
auagaaacgugacuguucu

SEQ ID NO: 893626 - RNA, 19 nt, Artificial Sequence
  Description of Artificial Sequence: Synthetic oligonucleotide
  modified_base (4)..(4): a, c, u, g, unknown or other
aacnguuucuuuucuuccu

SEQ ID NO: 893627 - RNA, 19 nt, Artificial Sequence
  Description of Artificial Sequence: Synthetic oligonucleotide
aaaccuuguuccaaaauug

SEQ ID NO: 893628 - RNA, 19 nt, Artificial Sequence
  Description of Artificial Sequence: Synthetic oligonucleotide
aucaaugagacguccuggg

SEQ ID NO: 893629 - RNA, 19 nt, Artificial Sequence
  Description of Artificial Sequence: Synthetic oligonucleotide
uguuuggcgguacuuaugu

SEQ ID NO: 893630 - RNA, 19 nt, Artificial Sequence
  Description of Artificial Sequence: Synthetic oligonucleotide
ucuaggauagcuugcuuca

SEQ ID NO: 893631 - RNA, 19 nt, Artificial Sequence
  Description of Artificial Sequence: Synthetic oligonucleotide
cuuggauaucaauaccacg

SEQ ID NO: 893632 - RNA, 19 nt, Artificial Sequence
  Description of Artificial Sequence: Synthetic oligonucleotide
aaugaagccucgccgagga

SEQ ID NO: 893633 - RNA, 19 nt, Artificial Sequence
  Description of Artificial Sequence: Synthetic oligonucleotide
  modified_base (5)..(5): a, c, u, g, unknown or other
gaacnguuucuuuucuucc

SEQ ID NO: 893634 - RNA, 19 nt, Artificial Sequence
  Description of Artificial Sequence: Synthetic oligonucleotide
ucuuuccaggaccggaugg

SEQ ID NO: 893635 - RNA, 19 nt, Artificial Sequence
  Description of Artificial Sequence: Synthetic oligonucleotide
guagccgugaacaugacug

SEQ ID NO: 893636 - RNA, 19 nt, Artificial Sequence
  Description of Artificial Sequence: Synthetic oligonucleotide
cuuaagagcaggcacccgc

SEQ ID NO: 893637 - RNA, 19 nt, Artificial Sequence
  Description of Artificial Sequence: Synthetic oligonucleotide
aaugccugcaaugaagccu

SEQ ID NO: 893638 - RNA, 19 nt, Artificial Sequence
  Description of Artificial Sequence: Synthetic oligonucleotide
gucacaacccuucuucugg

SEQ ID NO: 893639 - RNA, 19 nt, Artificial Sequence
  Description of Artificial Sequence: Synthetic oligonucleotide
uccaaaauugcgagcagcu

SEQ ID NO: 893640 - RNA, 19 nt, Artificial Sequence
  Description of Artificial Sequence: Synthetic oligonucleotide
gacucucuaggauagcuug

SEQ ID NO: 893641 - RNA, 19 nt, Artificial Sequence
  Description of Artificial Sequence: Synthetic oligonucleotide
gaaugauggcauaagggcc

SEQ ID NO: 893642 - RNA, 19 nt, Artificial Sequence
  Description of Artificial Sequence: Synthetic oligonucleotide
ucuuggauaucaauaccac

SEQ ID NO: 893643 - RNA, 19 nt, Artificial Sequence
  Description of Artificial Sequence: Synthetic oligonucleotide
auagacacgucuuggauau

SEQ ID NO: 893644 - RNA, 19 nt, Artificial Sequence
  Description of Artificial Sequence: Synthetic oligonucleotide
aaugcaaauucucgcugcu

SEQ ID NO: 893645 - RNA, 19 nt, Artificial Sequence
  Description of Artificial Sequence: Synthetic oligonucleotide
uguacaggcauuguacccc

SEQ ID NO: 893646 - RNA, 19 nt, Artificial Sequence
  Description of Artificial Sequence: Synthetic oligonucleotide
uuuucuuccaggguucgcc

SEQ ID NO: 893647 - RNA, 19 nt, Artificial Sequence
  Description of Artificial Sequence: Synthetic oligonucleotide
aaccauagacacgucuugg

SEQ ID NO: 893648 - RNA, 19 nt, Artificial Sequence
  Description of Artificial Sequence: Synthetic oligonucleotide
auaucaauaccacgaccag

SEQ ID NO: 893649 - RNA, 19 nt, Artificial Sequence
  Description of Artificial Sequence: Synthetic oligonucleotide
gaaguuuacggagucuugc

SEQ ID NO: 893650 - RNA, 19 nt, Artificial Sequence
  Description of Artificial Sequence: Synthetic oligonucleotide
caucuuccugcccaaaucc

SEQ ID NO: 893651 - RNA, 19 nt, Artificial Sequence
  Description of Artificial Sequence: Synthetic oligonucleotide
accaaugaugucacgauuc

SEQ ID NO: 893652 - RNA, 19 nt, Artificial Sequence
  Description of Artificial Sequence: Synthetic oligonucleotide
aauaccacgaccagccaca

SEQ ID NO: 893653 - RNA, 19 nt, Artificial Sequence
  Description of Artificial Sequence: Synthetic oligonucleotide
acaaugcaaauucucgcug

SEQ ID NO: 893654 - RNA, 19 nt, Artificial Sequence
  Description of Artificial Sequence: Synthetic oligonucleotide
agagacuuggccaacacgu

SEQ ID NO: 893655 - RNA, 19 nt, Artificial Sequence
  Description of Artificial Sequence: Synthetic oligonucleotide
caccaugcaguguacaggc

SEQ ID NO: 893656 - RNA, 19 nt, Artificial Sequence
  Description of Artificial Sequence: Synthetic oligonucleotide
ugaugucacgauucuguag

SEQ ID NO: 893657 - RNA, 19 nt, Artificial Sequence
  Description of Artificial Sequence: Synthetic oligonucleotide
aagggcccuggucugacuc

SEQ ID NO: 893658 - RNA, 19 nt, Artificial Sequence
  Description of Artificial Sequence: Synthetic oligonucleotide
uuuacggagucuugccucc

SEQ ID NO: 893659 - RNA, 19 nt, Artificial Sequence
  Description of Artificial Sequence: Synthetic oligonucleotide
uggauaucaauaccacgac

SEQ ID NO: 893660 - RNA, 19 nt, Artificial Sequence
  Description of Artificial Sequence: Synthetic oligonucleotide
ugcaaugaagccucgccga

SEQ ID NO: 893661 - RNA, 19 nt, Artificial Sequence
  Description of Artificial Sequence: Synthetic oligonucleotide
uuuggcgguacuuauguuu

SEQ ID NO: 893662 - RNA, 19 nt, Artificial Sequence
  Description of Artificial Sequence: Synthetic oligonucleotide
augauggguggaucaaaac

SEQ ID NO: 893663 - RNA, 19 nt, Artificial Sequence
  Description of Artificial Sequence: Synthetic oligonucleotide
aaccacauagguacagcgg

SEQ ID NO: 893664 - RNA, 19 nt, Artificial Sequence
  Description of Artificial Sequence: Synthetic oligonucleotide
ugacucuucgauccuguca

SEQ ID NO: 893665 - RNA, 19 nt, Artificial Sequence
  Description of Artificial Sequence: Synthetic oligonucleotide
cauagaaacgugacuguuc

SEQ ID NO: 893666 - RNA, 19 nt, Artificial Sequence
  Description of Artificial Sequence: Synthetic oligonucleotide
gguacagcggcucagcacc

SEQ ID NO: 893667 - RNA, 19 nt, Artificial Sequence
  Description of Artificial Sequence: Synthetic oligonucleotide
agaaccacauagguacagc

SEQ ID NO: 893668 - RNA, 19 nt, Artificial Sequence
  Description of Artificial Sequence: Synthetic oligonucleotide
cuggagggcaagaugacac

SEQ ID NO: 893669 - RNA, 19 nt, Artificial Sequence
  Description of Artificial Sequence: Synthetic oligonucleotide
aacgugacuguucucguuu

SEQ ID NO: 893670 - RNA, 19 nt, Artificial Sequence
  Description of Artificial Sequence: Synthetic oligonucleotide
ugacuguucucguuucugc

SEQ ID NO: 893671 - RNA, 19 nt, Artificial Sequence
  Description of Artificial Sequence: Synthetic oligonucleotide
cuggcuagccguuccaccg

SEQ ID NO: 893672 - RNA, 19 nt, Artificial Sequence
  Description of Artificial Sequence: Synthetic oligonucleotide
auuuugggaagugugguga

SEQ ID NO: 893673 - RNA, 19 nt, Artificial Sequence
  Description of Artificial Sequence: Synthetic oligonucleotide
agcaggacgccgaagauag

SEQ ID NO: 893674 - RNA, 19 nt, Artificial Sequence
  Description of Artificial Sequence: Synthetic oligonucleotide
uaucaauaccacgaccagc

SEQ ID NO: 893675 - RNA, 19 nt, Artificial Sequence
  Description of Artificial Sequence: Synthetic oligonucleotide
cucuaggauagcuugcuuc

SEQ ID NO: 893676 - RNA, 19 nt, Artificial Sequence
  Description of Artificial Sequence: Synthetic oligonucleotide
augucacgauucuguagcc

SEQ ID NO: 893677 - RNA, 19 nt, Artificial Sequence
  Description of Artificial Sequence: Synthetic oligonucleotide
cuugagauuggacaaugca

SEQ ID NO: 893678 - RNA, 19 nt, Artificial Sequence
  Description of Artificial Sequence: Synthetic oligonucleotide
uucuuacgaaguuuacgga

SEQ ID NO: 893679 - RNA, 19 nt, Artificial Sequence
  Description of Artificial Sequence: Synthetic oligonucleotide
uuaagagcaggcacccgcu

SEQ ID NO: 893680 - RNA, 19 nt, Artificial Sequence
  Description of Artificial Sequence: Synthetic oligonucleotide
gagaugaaucuuuccagga

SEQ ID NO: 893681 - RNA, 19 nt, Artificial Sequence
  Description of Artificial Sequence: Synthetic oligonucleotide
uccauuaggucuccauaga

SEQ ID NO: 893682 - RNA, 19 nt, Artificial Sequence
  Description of Artificial Sequence: Synthetic oligonucleotide
augaaucuuuccaggaccg

SEQ ID NO: 893683 - RNA, 19 nt, Artificial Sequence
  Description of Artificial Sequence: Synthetic oligonucleotide
acaacccuucuucugguug

SEQ ID NO: 893684 - RNA, 19 nt, Artificial Sequence
  Description of Artificial Sequence: Synthetic oligonucleotide
guacuuauguuuuccugac

SEQ ID NO: 893685 - RNA, 19 nt, Artificial Sequence
  Description of Artificial Sequence: Synthetic oligonucleotide
gaucacaaucucacaaccc

SEQ ID NO: 893686 - RNA, 19 nt, Artificial Sequence
  Description of Artificial Sequence: Synthetic oligonucleotide
gauggcuacaccacucuug

SEQ ID NO: 893687 - RNA, 19 nt, Artificial Sequence
  Description of Artificial Sequence: Synthetic oligonucleotide
gauucugacaugaggaaaa

SEQ ID NO: 893688 - RNA, 19 nt, Artificial Sequence
  Description of Artificial Sequence: Synthetic oligonucleotide
augggauuggggaucuugc

SEQ ID NO: 893689 - RNA, 19 nt, Artificial Sequence
  Description of Artificial Sequence: Synthetic oligonucleotide
uuccaaaauugcgagcagc

SEQ ID NO: 893690 - RNA, 19 nt, Artificial Sequence
  Description of Artificial Sequence: Synthetic oligonucleotide
aguuuacggagucuugccu

SEQ ID NO: 893691 - RNA, 19 nt, Artificial Sequence
  Description of Artificial Sequence: Synthetic oligonucleotide
aagauagcuccuggcuagc

SEQ ID NO: 893692 - RNA, 19 nt, Artificial Sequence
  Description of Artificial Sequence: Synthetic oligonucleotide
uccauagaaacgugacugu

SEQ ID NO: 893693 - RNA, 19 nt, Artificial Sequence
  Description of Artificial Sequence: Synthetic oligonucleotide
cugccgucgcuucagagcc

SEQ ID NO: 893694 - RNA, 19 nt, Artificial Sequence
  Description of Artificial Sequence: Synthetic oligonucleotide
ucuucgauccugucaauuu

SEQ ID NO: 893695 - RNA, 19 nt, Artificial Sequence
  Description of Artificial Sequence: Synthetic oligonucleotide
aacacgucacaacccuucu

SEQ ID NO: 893696 - RNA, 19 nt, Artificial Sequence
  Description of Artificial Sequence: Synthetic oligonucleotide
ucacaacccaugcguagcc

SEQ ID NO: 893697 - RNA, 19 nt, Artificial Sequence
  Description of Artificial Sequence: Synthetic oligonucleotide
uggagaugccaccaaugac

SEQ ID NO: 893698 - RNA, 19 nt, Artificial Sequence
  Description of Artificial Sequence: Synthetic oligonucleotide
uguagcccaaugggaaugg

SEQ ID NO: 893699 - RNA, 19 nt, Artificial Sequence
  Description of Artificial Sequence: Synthetic oligonucleotide
gaccaguaaugggauaagg

SEQ ID NO: 893700 - RNA, 19 nt, Artificial Sequence
  Description of Artificial Sequence: Synthetic oligonucleotide
aaaauugcgagcagcuuuu

SEQ ID NO: 893701 - RNA, 19 nt, Artificial Sequence
  Description of Artificial Sequence: Synthetic oligonucleotide
ggacaaugcaaauucucgc

SEQ ID NO: 893702 - RNA, 19 nt, Artificial Sequence
  Description of Artificial Sequence: Synthetic oligonucleotide
gaaguguggugauccagac

SEQ ID NO: 893703 - RNA, 19 nt, Artificial Sequence
  Description of Artificial Sequence: Synthetic oligonucleotide
gacaaugcaaauucucgcu

SEQ ID NO: 893704 - RNA, 19 nt, Artificial Sequence
  Description of Artificial Sequence: Synthetic oligonucleotide
guuuacggagucuugccuc

SEQ ID NO: 893705 - RNA, 19 nt, Artificial Sequence
  Description of Artificial Sequence: Synthetic oligonucleotide
uuugcuagcucuggagggc

SEQ ID NO: 893706 - RNA, 19 nt, Artificial Sequence
  Description of Artificial Sequence: Synthetic oligonucleotide
uguguccggcuucugguug

SEQ ID NO: 893707 - RNA, 19 nt, Artificial Sequence
  Description of Artificial Sequence: Synthetic oligonucleotide
aagcgaagauggucucuuc

SEQ ID NO: 893708 - RNA, 19 nt, Artificial Sequence
  Description of Artificial Sequence: Synthetic oligonucleotide
gaccggaugggauugggga

SEQ ID NO: 893709 - RNA, 19 nt, Artificial Sequence
  Description of Artificial Sequence: Synthetic oligonucleotide
uuguuccaaaauugcgagc

SEQ ID NO: 893710 - RNA, 19 nt, Artificial Sequence
  Description of Artificial Sequence: Synthetic oligonucleotide
gacacuggacucucuagga

SEQ ID NO: 893711 - RNA, 19 nt, Artificial Sequence
  Description of Artificial Sequence: Synthetic oligonucleotide
cuggaucuuagguuucuug

SEQ ID NO: 893712 - RNA, 19 nt, Artificial Sequence
  Description of Artificial Sequence: Synthetic oligonucleotide
ugauucugacaugaggaaa

SEQ ID NO: 893713 - RNA, 19 nt, Artificial Sequence
  Description of Artificial Sequence: Synthetic oligonucleotide
uuggcgguacuuauguuuu

SEQ ID NO: 893714 - RNA, 19 nt, Artificial Sequence
  Description of Artificial Sequence: Synthetic oligonucleotide
caauaccacgaccagccac

SEQ ID NO: 893715 - RNA, 19 nt, Artificial Sequence
  Description of Artificial Sequence: Synthetic oligonucleotide
gucacgauucuguagccca

SEQ ID NO: 893716 - RNA, 19 nt, Artificial Sequence
  Description of Artificial Sequence: Synthetic oligonucleotide
acaacccaugcguagccug

SEQ ID NO: 893717 - RNA, 19 nt, Artificial Sequence
  Description of Artificial Sequence: Synthetic oligonucleotide
ugggauuggggaucuugcc

SEQ ID NO: 893718 - RNA, 19 nt, Artificial Sequence
  Description of Artificial Sequence: Synthetic oligonucleotide
accauagacacgucuugga

SEQ ID NO: 893719 - RNA, 19 nt, Artificial Sequence
  Description of Artificial Sequence: Synthetic oligonucleotide
agcuugcuucaguucauag

SEQ ID NO: 893720 - RNA, 19 nt, Artificial Sequence
  Description of Artificial Sequence: Synthetic oligonucleotide
uggugauccagaccaguaa

SEQ ID NO: 893721 - RNA, 19 nt, Artificial Sequence
  Description of Artificial Sequence: Synthetic oligonucleotide
uggguggaucaaaaccuug

SEQ ID NO: 893722 - RNA, 19 nt, Artificial Sequence
  Description of Artificial Sequence: Synthetic oligonucleotide
gcuauagucuucccggaag

SEQ ID NO: 893723 - RNA, 19 nt, Artificial Sequence
  Description of Artificial Sequence: Synthetic oligonucleotide
caggguucgccucuuuucc

SEQ ID NO: 893724 - RNA, 19 nt, Artificial Sequence
  Description of Artificial Sequence: Synthetic oligonucleotide
acuggacucucuaggauag

SEQ ID NO: 893725 - RNA, 19 nt, Artificial Sequence
  Description of Artificial Sequence: Synthetic oligonucleotide
cauuguaccccaucuucuc

SEQ ID NO: 893726 - RNA, 19 nt, Artificial Sequence
  Description of Artificial Sequence: Synthetic oligonucleotide
guggcgaucacaaucucac

SEQ ID NO: 893727 - RNA, 19 nt, Artificial Sequence
  Description of Artificial Sequence: Synthetic oligonucleotide
aucguagccgugaacauga

SEQ ID NO: 893728 - RNA, 19 nt, Artificial Sequence
  Description of Artificial Sequence: Synthetic oligonucleotide
ucccggaagauccuccagu

SEQ ID NO: 893729 - RNA, 19 nt, Artificial Sequence
  Description of Artificial Sequence: Synthetic oligonucleotide
acucucuaggauagcuugc

SEQ ID NO: 893730 - RNA, 19 nt, Artificial Sequence
  Description of Artificial Sequence: Synthetic oligonucleotide
gacgcuggauagguguugg

SEQ ID NO: 893731 - RNA, 19 nt, Artificial Sequence
  Description of Artificial Sequence: Synthetic oligonucleotide
caaccauagacacgucuug

SEQ ID NO: 893732 - RNA, 19 nt, Artificial Sequence
  Description of Artificial Sequence: Synthetic oligonucleotide
gauaccuaguggcuuccca

SEQ ID NO: 893733 - RNA, 19 nt, Artificial Sequence
  Description of Artificial Sequence: Synthetic oligonucleotide
ggugaugcuauagucuucc

SEQ ID NO: 893734 - RNA, 19 nt, Artificial Sequence
  Description of Artificial Sequence: Synthetic oligonucleotide
guagcgguuuuccagcaca

SEQ ID NO: 893735 - RNA, 19 nt, Artificial Sequence
  Description of Artificial Sequence: Synthetic oligonucleotide
gaaucuuuccaggaccgga

SEQ ID NO: 893736 - RNA, 19 nt, Artificial Sequence
  Description of Artificial Sequence: Synthetic oligonucleotide
ggaccaauggcggucaucc

SEQ ID NO: 893737 - RNA, 19 nt, Artificial Sequence
  Description of Artificial Sequence: Synthetic oligonucleotide
uuucuuccaggguucgccu

SEQ ID NO: 893738 - RNA, 19 nt, Artificial Sequence
  Description of Artificial Sequence: Synthetic oligonucleotide
agacacgucuuggauauca

SEQ ID NO: 893739 - RNA, 19 nt, Artificial Sequence
  Description of Artificial Sequence: Synthetic oligonucleotide
ugaagccucgccgaggauc

SEQ ID NO: 893740 - RNA, 19 nt, Artificial Sequence
  Description of Artificial Sequence: Synthetic oligonucleotide
caaugccugcaaugaagcc

SEQ ID NO: 893741 - RNA, 19 nt, Artificial Sequence
  Description of Artificial Sequence: Synthetic oligonucleotide
cagggcaugucuuuacauc

SEQ ID NO: 893742 - RNA, 19 nt, Artificial Sequence
  Description of Artificial Sequence: Synthetic oligonucleotide
cucgccgaggaucuucuag

SEQ ID NO: 893743 - RNA, 19 nt, Artificial Sequence
  Description of Artificial Sequence: Synthetic oligonucleotide
cucacaacccaugcguagc

SEQ ID NO: 893744 - RNA, 19 nt, Artificial Sequence
  Description of Artificial Sequence: Synthetic oligonucleotide
agauagcuccuggcuagcc

SEQ ID NO: 893745 - RNA, 19 nt, Artificial Sequence
  Description of Artificial Sequence: Synthetic oligonucleotide
ggauuggggaucuugccac

SEQ ID NO: 893746 - RNA, 19 nt, Artificial Sequence
  Description of Artificial Sequence: Synthetic oligonucleotide
gauuggggaucuugccacc

SEQ ID NO: 893747 - RNA, 19 nt, Artificial Sequence
  Description of Artificial Sequence: Synthetic oligonucleotide
acgugacuguucucguuuc

SEQ ID NO: 893748 - RNA, 19 nt, Artificial Sequence
  Description of Artificial Sequence: Synthetic oligonucleotide
ugcuauagucuucccggaa

SEQ ID NO: 893749 - RNA, 19 nt, Artificial Sequence
  Description of Artificial Sequence: Synthetic oligonucleotide
uccagucaagagcuguguc

SEQ ID NO: 893750 - RNA, 19 nt, Artificial Sequence
  Description of Artificial Sequence: Synthetic oligonucleotide
cuaacuucuucugggacca

SEQ ID NO: 893751 - RNA, 19 nt, Artificial Sequence
  Description of Artificial Sequence: Synthetic oligonucleotide
uccuucuuacgaaguuuac

SEQ ID NO: 893752 - RNA, 19 nt, Artificial Sequence
  Description of Artificial Sequence: Synthetic oligonucleotide
  modified_base (7)..(7): a, c, u, g, unknown or other
uggaacnguuucuuuucuu

SEQ ID NO: 893753 - RNA, 19 nt, Artificial Sequence
  Description of Artificial Sequence: Synthetic oligonucleotide
agaugccaccaaugacagc

SEQ ID NO: 893754 - RNA, 19 nt, Artificial Sequence
  Description of Artificial Sequence: Synthetic oligonucleotide
gaugauggguggaucaaaa

SEQ ID NO: 893755 - RNA, 19 nt, Artificial Sequence
  Description of Artificial Sequence: Synthetic oligonucleotide
ucgcucauggggcuugccu

SEQ ID NO: 893756 - RNA, 19 nt, Artificial Sequence
  Description of Artificial Sequence: Synthetic oligonucleotide
aucuuuccaggaccggaug

SEQ ID NO: 893757 - RNA, 19 nt, Artificial Sequence
  Description of Artificial Sequence: Synthetic oligonucleotide
cauagacacgucuuggaua

SEQ ID NO: 893758 - RNA, 19 nt, Artificial Sequence
  Description of Artificial Sequence: Synthetic oligonucleotide
ugggaauggccugacgcug

SEQ ID NO: 893759 - RNA, 19 nt, Artificial Sequence
  Description of Artificial Sequence: Synthetic oligonucleotide
cagcacaucaaugagacgu

SEQ ID NO: 893760 - RNA, 19 nt, Artificial Sequence
  Description of Artificial Sequence: Synthetic oligonucleotide
gucuccauagaaacgugac

SEQ ID NO: 893761 - RNA, 19 nt, Artificial Sequence
  Description of Artificial Sequence: Synthetic oligonucleotide
gacaaccauagacacgucu

SEQ ID NO: 893762 - RNA, 19 nt, Artificial Sequence
  Description of Artificial Sequence: Synthetic oligonucleotide
ggugauuugcuagcucugg

SEQ ID NO: 893763 - RNA, 19 nt, Artificial Sequence
  Description of Artificial Sequence: Synthetic oligonucleotide
uuuugggaaguguggugau

SEQ ID NO: 893764 - RNA, 19 nt, Artificial Sequence
  Description of Artificial Sequence: Synthetic oligonucleotide
uacaccacagcaggacgcc

SEQ ID NO: 893765 - RNA, 19 nt, Artificial Sequence
  Description of Artificial Sequence: Synthetic oligonucleotide
ggggcuugccugcagagcc

SEQ ID NO: 893766 - RNA, 19 nt, Artificial Sequence
  Description of Artificial Sequence: Synthetic oligonucleotide
cagugcggauaccuagugg

SEQ ID NO: 893767 - RNA, 19 nt, Artificial Sequence
  Description of Artificial Sequence: Synthetic oligonucleotide
auaagggcccuggucugac

SEQ ID NO: 893768 - RNA, 19 nt, Artificial Sequence
  Description of Artificial Sequence: Synthetic oligonucleotide
uagccguuccaccgcuggg

SEQ ID NO: 893769 - RNA, 19 nt, Artificial Sequence
  Description of Artificial Sequence: Synthetic oligonucleotide
caucuaacuucuucuggga

SEQ ID NO: 893770 - RNA, 19 nt, Artificial Sequence
  Description of Artificial Sequence: Synthetic oligonucleotide
ccuucuuacgaaguuuacg

SEQ ID NO: 893771 - RNA, 19 nt, Artificial Sequence
  Description of Artificial Sequence: Synthetic oligonucleotide
cacaccaaugaugucacga

SEQ ID NO: 893772 - RNA, 19 nt, Artificial Sequence
  Description of Artificial Sequence: Synthetic oligonucleotide
cauagguacagcggcucag

SEQ ID NO: 893773 - RNA, 19 nt, Artificial Sequence
  Description of Artificial Sequence: Synthetic oligonucleotide
acgaaguuuacggagucuu

SEQ ID NO: 893774 - RNA, 19 nt, Artificial Sequence
  Description of Artificial Sequence: Synthetic oligonucleotide
ggaucuuagguuucuuguc

SEQ ID NO: 893775 - RNA, 19 nt, Artificial Sequence
  Description of Artificial Sequence: Synthetic oligonucleotide
cuguuuggcgguacuuaug

SEQ ID NO: 893776 - RNA, 19 nt, Artificial Sequence
  Description of Artificial Sequence: Synthetic oligonucleotide
ccugcaaugaagccucgcc

SEQ ID NO: 893777 - RNA, 19 nt, Artificial Sequence
  Description of Artificial Sequence: Synthetic oligonucleotide
ugaugguuucuuccucaau

SEQ ID NO: 893778 - RNA, 19 nt, Artificial Sequence
  Description of Artificial Sequence: Synthetic oligonucleotide
aggugauggcuacaccacu

SEQ ID NO: 893779 - RNA, 19 nt, Artificial Sequence
  Description of Artificial Sequence: Synthetic oligonucleotide
ggccauaucauaguugaca

SEQ ID NO: 893780 - RNA, 19 nt, Artificial Sequence
  Description of Artificial Sequence: Synthetic oligonucleotide
uagccgugaacaugacugu

SEQ ID NO: 893781 - RNA, 19 nt, Artificial Sequence
  Description of Artificial Sequence: Synthetic oligonucleotide
ucaagcgaagauggucucu

SEQ ID NO: 893782 - RNA, 19 nt, Artificial Sequence
  Description of Artificial Sequence: Synthetic oligonucleotide
agccguuccaccgcugggg

SEQ ID NO: 893783 - RNA, 19 nt, Artificial Sequence
  Description of Artificial Sequence: Synthetic oligonucleotide
ugcguagccugaagccuug

SEQ ID NO: 893784 - RNA, 19 nt, Artificial Sequence
  Description of Artificial Sequence: Synthetic oligonucleotide
augcuauagucuucccgga

SEQ ID NO: 893785 - RNA, 19 nt, Artificial Sequence
  Description of Artificial Sequence: Synthetic oligonucleotide
ugggauaaggaaggcugcu

SEQ ID NO: 893786 - RNA, 19 nt, Artificial Sequence
  Description of Artificial Sequence: Synthetic oligonucleotide
acacuggacucucuaggau

SEQ ID NO: 893787 - RNA, 19 nt, Artificial Sequence
  Description of Artificial Sequence: Synthetic oligonucleotide
cagaaccacauagguacag

SEQ ID NO: 893788 - RNA, 19 nt, Artificial Sequence
  Description of Artificial Sequence: Synthetic oligonucleotide
acacgucuuggauaucaau

SEQ ID NO: 893789 - RNA, 19 nt, Artificial Sequence
  Description of Artificial Sequence: Synthetic oligonucleotide
agaccaguaaugggauaag

SEQ ID NO: 893790 - RNA, 19 nt, Artificial Sequence
  Description of Artificial Sequence: Synthetic oligonucleotide
caaaauugcgagcagcuuu

SEQ ID NO: 893791 - RNA, 19 nt, Artificial Sequence
  Description of Artificial Sequence: Synthetic oligonucleotide
gugacuguucucguuucug

SEQ ID NO: 893792 - RNA, 19 nt, Artificial Sequence
  Description of Artificial Sequence: Synthetic oligonucleotide
ggacgccgaagauagcucc

SEQ ID NO: 893793 - RNA, 19 nt, Artificial Sequence
  Description of Artificial Sequence: Synthetic oligonucleotide
ccgaggaucuucuagcauc

SEQ ID NO: 893794 - RNA, 19 nt, Artificial Sequence
  Description of Artificial Sequence: Synthetic oligonucleotide
uguuggcuccuuguagcca

SEQ ID NO: 893795 - RNA, 19 nt, Artificial Sequence
  Description of Artificial Sequence: Synthetic oligonucleotide
gcuggauagguguuggcuc

SEQ ID NO: 893796 - RNA, 19 nt, Artificial Sequence
  Description of Artificial Sequence: Synthetic oligonucleotide
uccacucgcucauggggcu

SEQ ID NO: 893797 - RNA, 19 nt, Artificial Sequence
  Description of Artificial Sequence: Synthetic oligonucleotide
ggcauaagggcccuggucu

SEQ ID NO: 893798 - RNA, 19 nt, Artificial Sequence
  Description of Artificial Sequence: Synthetic oligonucleotide
gcaagaugacacuggacuc

SEQ ID NO: 893799 - RNA, 19 nt, Artificial Sequence
  Description of Artificial Sequence: Synthetic oligonucleotide
uggugaugcuauagucuuc

SEQ ID NO: 893800 - RNA, 19 nt, Artificial Sequence
  Description of Artificial Sequence: Synthetic oligonucleotide
cuguagcccaaugggaaug

SEQ ID NO: 893801 - RNA, 19 nt, Artificial Sequence
  Description of Artificial Sequence: Synthetic oligonucleotide
  modified_base (9)..(9): a, c, u, g, unknown or other
ccuggaacnguuucuuuuc

SEQ ID NO: 893802 - RNA, 19 nt, Artificial Sequence
  Description of Artificial Sequence: Synthetic oligonucleotide
gcugacaggcauguguucc

SEQ ID NO: 893803 - RNA, 19 nt, Artificial Sequence
  Description of Artificial Sequence: Synthetic oligonucleotide
uggggaucuugccaccuuu

SEQ ID NO: 893804 - RNA, 19 nt, Artificial Sequence
  Description of Artificial Sequence: Synthetic oligonucleotide
ugacucaaaguuggccaac

SEQ ID NO: 893805 - RNA, 19 nt, Artificial Sequence
  Description of Artificial Sequence: Synthetic oligonucleotide
gaaacgugacuguucucgu

SEQ ID NO: 893806 - RNA, 19 nt, Artificial Sequence
  Description of Artificial Sequence: Synthetic oligonucleotide
cgaucacaaucucacaacc

SEQ ID NO: 893807 - RNA, 19 nt, Artificial Sequence
  Description of Artificial Sequence: Synthetic oligonucleotide
ugacgcuggauagguguug

SEQ ID NO: 893808 - RNA, 19 nt, Artificial Sequence
  Description of Artificial Sequence: Synthetic oligonucleotide
aacuugggcuuugccucag

SEQ ID NO: 893809 - RNA, 19 nt, Artificial Sequence
  Description of Artificial Sequence: Synthetic oligonucleotide
accggaugggauuggggau

SEQ ID NO: 893810 - RNA, 19 nt, Artificial Sequence
  Description of Artificial Sequence: Synthetic oligonucleotide
acggagucuugccuccucu

SEQ ID NO: 893811 - RNA, 19 nt, Artificial Sequence
  Description of Artificial Sequence: Synthetic oligonucleotide
uggccugacgcuggauagg

SEQ ID NO: 893812 - RNA, 19 nt, Artificial Sequence
  Description of Artificial Sequence: Synthetic oligonucleotide
cacauagguacagcggcuc

SEQ ID NO: 893813 - RNA, 19 nt, Artificial Sequence
  Description of Artificial Sequence: Synthetic oligonucleotide
uugcuagcucuggagggca

SEQ ID NO: 893814 - RNA, 19 nt, Artificial Sequence
  Description of Artificial Sequence: Synthetic oligonucleotide
ucccugcgcuucuugguga

SEQ ID NO: 893815 - RNA, 19 nt, Artificial Sequence
  Description of Artificial Sequence: Synthetic oligonucleotide
uagcgguuuuccagcacau

SEQ ID NO: 893816 - RNA, 19 nt, Artificial Sequence
  Description of Artificial Sequence: Synthetic oligonucleotide
aggacgccgaagauagcuc

SEQ ID NO: 893817 - RNA, 19 nt, Artificial Sequence
  Description of Artificial Sequence: Synthetic oligonucleotide
gggauuggggaucuugcca

SEQ ID NO: 893818 - RNA, 19 nt, Artificial Sequence
  Description of Artificial Sequence: Synthetic oligonucleotide
uggccauaucauaguugac

SEQ ID NO: 893819 - RNA, 19 nt, Artificial Sequence
  Description of Artificial Sequence: Synthetic oligonucleotide
cugacucaaaguuggccaa

SEQ ID NO: 893820 - RNA, 19 nt, Artificial Sequence
  Description of Artificial Sequence: Synthetic oligonucleotide
uggcgaucacaaucucaca

SEQ ID NO: 893821 - RNA, 19 nt, Artificial Sequence
  Description of Artificial Sequence: Synthetic oligonucleotide
accuaguggcuucccaaau

SEQ ID NO: 893822 - RNA, 19 nt, Artificial Sequence
  Description of Artificial Sequence: Synthetic oligonucleotide
ggcuacaccacucuugccu

SEQ ID NO: 893823 - RNA, 19 nt, Artificial Sequence
  Description of Artificial Sequence: Synthetic oligonucleotide
ugucaccaugccucauccu

SEQ ID NO: 893824 - RNA, 19 nt, Artificial Sequence
  Description of Artificial Sequence: Synthetic oligonucleotide
cacuggacucucuaggaua

SEQ ID NO: 893825 - RNA, 19 nt, Artificial Sequence
  Description of Artificial Sequence: Synthetic oligonucleotide
ccacagugcggauaccuag

SEQ ID NO: 893826 - RNA, 19 nt, Artificial Sequence
  Description of Artificial Sequence: Synthetic oligonucleotide
gaccaauggcggucauccc

SEQ ID NO: 893827 - RNA, 19 nt, Artificial Sequence
  Description of Artificial Sequence: Synthetic oligonucleotide
gugaugcuauagucuuccc

SEQ ID NO: 893828 - RNA, 19 nt, Artificial Sequence
  Description of Artificial Sequence: Synthetic oligonucleotide
ugccugcagagccaaugua

SEQ ID NO: 893829 - RNA, 19 nt, Artificial Sequence
  Description of Artificial Sequence: Synthetic oligonucleotide
uagaaacgugacuguucuc

SEQ ID NO: 893830 - RNA, 19 nt, Artificial Sequence
  Description of Artificial Sequence: Synthetic oligonucleotide
uacaccacucuugccugcu

SEQ ID NO: 893831 - RNA, 19 nt, Artificial Sequence
  Description of Artificial Sequence: Synthetic oligonucleotide
cucaaucugcugagccaac

SEQ ID NO: 893832 - RNA, 19 nt, Artificial Sequence
  Description of Artificial Sequence: Synthetic oligonucleotide
agcgguuuuccagcacauc

SEQ ID NO: 893833 - RNA, 19 nt, Artificial Sequence
  Description of Artificial Sequence: Synthetic oligonucleotide
uggcggucaucccagcguu

SEQ ID NO: 893834 - RNA, 19 nt, Artificial Sequence
  Description of Artificial Sequence: Synthetic oligonucleotide
uaagagcaggcacccgcuu

SEQ ID NO: 893835 - RNA, 19 nt, Artificial Sequence
  Description of Artificial Sequence: Synthetic oligonucleotide
caucccagcguugcuuggc

SEQ ID NO: 893836 - RNA, 19 nt, Artificial Sequence
  Description of Artificial Sequence: Synthetic oligonucleotide
guggugaugcuauagucuu

SEQ ID NO: 893837 - RNA, 19 nt, Artificial Sequence
  Description of Artificial Sequence: Synthetic oligonucleotide
guggcuggaucuuagguuu

SEQ ID NO: 893838 - RNA, 19 nt, Artificial Sequence
  Description of Artificial Sequence: Synthetic oligonucleotide
ugcaguguacaggcauugu

SEQ ID NO: 893839 - RNA, 19 nt, Artificial Sequence
  Description of Artificial Sequence: Synthetic oligonucleotide
ccuugagauuggacaaugc

SEQ ID NO: 893840 - RNA, 19 nt, Artificial Sequence
  Description of Artificial Sequence: Synthetic oligonucleotide
acccaugcguagccugaag

SEQ ID NO: 893841 - RNA, 19 nt, Artificial Sequence
  Description of Artificial Sequence: Synthetic oligonucleotide
uuccaccaugcaguguaca

SEQ ID NO: 893842 - RNA, 19 nt, Artificial Sequence
  Description of Artificial Sequence: Synthetic oligonucleotide
ggaaggugauggcuacacc

SEQ ID NO: 893843 - RNA, 19 nt, Artificial Sequence
  Description of Artificial Sequence: Synthetic oligonucleotide
cuucccgugcggccaauuc

SEQ ID NO: 893844 - RNA, 19 nt, Artificial Sequence
  Description of Artificial Sequence: Synthetic oligonucleotide
cugacaggcauguguucca

SEQ ID NO: 893845 - RNA, 19 nt, Artificial Sequence
  Description of Artificial Sequence: Synthetic oligonucleotide
ggcuuaagagcaggcaccc

SEQ ID NO: 893846 - RNA, 19 nt, Artificial Sequence
  Description of Artificial Sequence: Synthetic oligonucleotide
ugcggauaccuaguggcuu

SEQ ID NO: 893847 - RNA, 19 nt, Artificial Sequence
  Description of Artificial Sequence: Synthetic oligonucleotide
acucacggguaggagccag

SEQ ID NO: 893848 - RNA, 19 nt, Artificial Sequence
  Description of Artificial Sequence: Synthetic oligonucleotide
uacggagucuugccuccuc

SEQ ID NO: 893849 - RNA, 19 nt, Artificial Sequence
  Description of Artificial Sequence: Synthetic oligonucleotide
gagacguccugggguggcg

SEQ ID NO: 893850 - RNA, 19 nt, Artificial Sequence
  Description of Artificial Sequence: Synthetic oligonucleotide
ggugaauguaaucuucaau

SEQ ID NO: 893851 - RNA, 19 nt, Artificial Sequence
  Description of Artificial Sequence: Synthetic oligonucleotide
cagucaagagcugugucaa

SEQ ID NO: 893852 - RNA, 19 nt, Artificial Sequence
  Description of Artificial Sequence: Synthetic oligonucleotide
uggcuacaccacucuugcc

SEQ ID NO: 893853 - RNA, 19 nt, Artificial Sequence
  Description of Artificial Sequence: Synthetic oligonucleotide
gccgaagauagcuccuggc

SEQ ID NO: 893854 - RNA, 19 nt, Artificial Sequence
  Description of Artificial Sequence: Synthetic oligonucleotide
agccucgccgaggaucuuc

SEQ ID NO: 893855 - RNA, 19 nt, Artificial Sequence
  Description of Artificial Sequence: Synthetic oligonucleotide
ccagucaagagcuguguca

SEQ ID NO: 893856 - RNA, 19 nt, Artificial Sequence
  Description of Artificial Sequence: Synthetic oligonucleotide
ccgugaacaugacuguuug

SEQ ID NO: 893857 - RNA, 19 nt, Artificial Sequence
  Description of Artificial Sequence: Synthetic oligonucleotide
ccaccaaaauauccuuggc

SEQ ID NO: 893858 - RNA, 19 nt, Artificial Sequence
  Description of Artificial Sequence: Synthetic oligonucleotide
caacccaugcguagccuga

SEQ ID NO: 893859 - RNA, 19 nt, Artificial Sequence
  Description of Artificial Sequence: Synthetic oligonucleotide
cugacucuucgauccuguc

SEQ ID NO: 893860 - RNA, 19 nt, Artificial Sequence
  Description of Artificial Sequence: Synthetic oligonucleotide
gaagccucgccgaggaucu

SEQ ID NO: 893861 - RNA, 19 nt, Artificial Sequence
  Description of Artificial Sequence: Synthetic oligonucleotide
ccaccaugcaguguacagg

SEQ ID NO: 893862 - RNA, 19 nt, Artificial Sequence
  Description of Artificial Sequence: Synthetic oligonucleotide
ugacuguuuggcgguacuu

SEQ ID NO: 893863 - RNA, 19 nt, Artificial Sequence
  Description of Artificial Sequence: Synthetic oligonucleotide
ccauaucauaguugacaac

SEQ ID NO: 893864 - RNA, 19 nt, Artificial Sequence
  Description of Artificial Sequence: Synthetic oligonucleotide
caggcauuguaccccaucu

SEQ ID NO: 893865 - RNA, 19 nt, Artificial Sequence
  Description of Artificial Sequence: Synthetic oligonucleotide
caagaugacacuggacucu

SEQ ID NO: 893866 - RNA, 19 nt, Artificial Sequence
  Description of Artificial Sequence: Synthetic oligonucleotide
ugacaaccauagacacguc

SEQ ID NO: 893867 - RNA, 19 nt, Artificial Sequence
  Description of Artificial Sequence: Synthetic oligonucleotide
ggugauggcuacaccacuc

SEQ ID NO: 893868 - RNA, 19 nt, Artificial Sequence
  Description of Artificial Sequence: Synthetic oligonucleotide
cauggggcuugccugcaga

SEQ ID NO: 893869 - RNA, 19 nt, Artificial Sequence
  Description of Artificial Sequence: Synthetic oligonucleotide
gugauggcuacaccacucu

SEQ ID NO: 893870 - RNA, 19 nt, Artificial Sequence
  Description of Artificial Sequence: Synthetic oligonucleotide
uaagggcccuggucugacu

SEQ ID NO: 893871 - RNA, 19 nt, Artificial Sequence
  Description of Artificial Sequence: Synthetic oligonucleotide
aacccaugcguagccugaa

SEQ ID NO: 893872 - RNA, 19 nt, Artificial Sequence
  Description of Artificial Sequence: Synthetic oligonucleotide
aggaugguaccuggcuugu

SEQ ID NO: 893873 - RNA, 19 nt, Artificial Sequence
  Description of Artificial Sequence: Synthetic oligonucleotide
ggugauccagaccaguaau

SEQ ID NO: 893874 - RNA, 19 nt, Artificial Sequence
  Description of Artificial Sequence: Synthetic oligonucleotide
uggcgguacuuauguuuuc

SEQ ID NO: 893875 - RNA, 19 nt, Artificial Sequence
  Description of Artificial Sequence: Synthetic oligonucleotide
aacucacggguaggagcca

SEQ ID NO: 893876 - RNA, 19 nt, Artificial Sequence
  Description of Artificial Sequence: Synthetic oligonucleotide
ccuggcuagccguuccacc

SEQ ID NO: 893877 - RNA, 19 nt, Artificial Sequence
  Description of Artificial Sequence: Synthetic oligonucleotide
ucguagccgugaacaugac

SEQ ID NO: 893878 - RNA, 19 nt, Artificial Sequence
  Description of Artificial Sequence: Synthetic oligonucleotide
uuacggagucuugccuccu

SEQ ID NO: 893879 - RNA, 19 nt, Artificial Sequence
  Description of Artificial Sequence: Synthetic oligonucleotide
acccgcuucagggcauguc

SEQ ID NO: 893880 - RNA, 19 nt, Artificial Sequence
  Description of Artificial Sequence: Synthetic oligonucleotide
cgugaacaugacuguuugg

SEQ ID NO: 893881 - RNA, 19 nt, Artificial Sequence
  Description of Artificial Sequence: Synthetic oligonucleotide
agcggcucagcaccaggua

SEQ ID NO: 893882 - RNA, 19 nt, Artificial Sequence
  Description of Artificial Sequence: Synthetic oligonucleotide
gacacgucuuggauaucaa

SEQ ID NO: 893883 - RNA, 19 nt, Artificial Sequence
  Description of Artificial Sequence: Synthetic oligonucleotide
gcggauaccuaguggcuuc

SEQ ID NO: 893884 - RNA, 19 nt, Artificial Sequence
  Description of Artificial Sequence: Synthetic oligonucleotide
aucucacaacccaugcgua

SEQ ID NO: 893885 - RNA, 19 nt, Artificial Sequence
  Description of Artificial Sequence: Synthetic oligonucleotide
caggacgccgaagauagcu

SEQ ID NO: 893886 - RNA, 19 nt, Artificial Sequence
  Description of Artificial Sequence: Synthetic oligonucleotide
agcguugcuuggcuuccuu

SEQ ID NO: 893887 - RNA, 19 nt, Artificial Sequence
  Description of Artificial Sequence: Synthetic oligonucleotide
cacagugcggauaccuagu

SEQ ID NO: 893888 - RNA, 19 nt, Artificial Sequence
  Description of Artificial Sequence: Synthetic oligonucleotide
gggugauuugcuagcucug

SEQ ID NO: 893889 - RNA, 19 nt, Artificial Sequence
  Description of Artificial Sequence: Synthetic oligonucleotide
augcguagccugaagccuu

SEQ ID NO: 893890 - RNA, 19 nt, Artificial Sequence
  Description of Artificial Sequence: Synthetic oligonucleotide
gcuuaagagcaggcacccg

SEQ ID NO: 893891 - RNA, 19 nt, Artificial Sequence
  Description of Artificial Sequence: Synthetic oligonucleotide
cgaaguuuacggagucuug

SEQ ID NO: 893892 - RNA, 19 nt, Artificial Sequence
  Description of Artificial Sequence: Synthetic oligonucleotide
ccggaagauccuccagucc

SEQ ID NO: 893893 - RNA, 19 nt, Artificial Sequence
  Description of Artificial Sequence: Synthetic oligonucleotide
gccaacacgucacaacccu

SEQ ID NO: 893894 - RNA, 19 nt, Artificial Sequence
  Description of Artificial Sequence: Synthetic oligonucleotide
cauaagggcccuggucuga

SEQ ID NO: 893895 - RNA, 19 nt, Artificial Sequence
  Description of Artificial Sequence: Synthetic oligonucleotide
gcggucaucccagcguugc

SEQ ID NO: 893896 - RNA, 19 nt, Artificial Sequence
  Description of Artificial Sequence: Synthetic oligonucleotide
cccagcguugcuuggcuuc

SEQ ID NO: 893897 - RNA, 19 nt, Artificial Sequence
  Description of Artificial Sequence: Synthetic oligonucleotide
cuucccugcgcuucuuggu

SEQ ID NO: 893898 - RNA, 19 nt, Artificial Sequence
  Description of Artificial Sequence: Synthetic oligonucleotide
agccgugaacaugacuguu

SEQ ID NO: 893899 - RNA, 19 nt, Artificial Sequence
  Description of Artificial Sequence: Synthetic oligonucleotide
ggggaucuugccaccuuug

SEQ ID NO: 893900 - RNA, 19 nt, Artificial Sequence
  Description of Artificial Sequence: Synthetic oligonucleotide
cgucacaacccuucuucug

SEQ ID NO: 893901 - RNA, 19 nt, Artificial Sequence
  Description of Artificial Sequence: Synthetic oligonucleotide
gcgcuucuuggugaggaug

SEQ ID NO: 893902 - RNA, 19 nt, Artificial Sequence
  Description of Artificial Sequence: Synthetic oligonucleotide
aucuggcucgaagcccaug

SEQ ID NO: 893903 - RNA, 19 nt, Artificial Sequence
  Description of Artificial Sequence: Synthetic oligonucleotide
agacguccugggguggcga

SEQ ID NO: 893904 - RNA, 19 nt, Artificial Sequence
  Description of Artificial Sequence: Synthetic oligonucleotide
cucacggguaggagccaga

SEQ ID NO: 893905 - RNA, 19 nt, Artificial Sequence
  Description of Artificial Sequence: Synthetic oligonucleotide
caggaccggaugggauugg

SEQ ID NO: 893906 - RNA, 19 nt, Artificial Sequence
  Description of Artificial Sequence: Synthetic oligonucleotide
ccacacuuaucaaugacuu

SEQ ID NO: 893907 - RNA, 19 nt, Artificial Sequence
  Description of Artificial Sequence: Synthetic oligonucleotide
caucuguagccaccaaaau

SEQ ID NO: 893908 - RNA, 19 nt, Artificial Sequence
  Description of Artificial Sequence: Synthetic oligonucleotide
gguggaucaaaaccuuguu

SEQ ID NO: 893909 - RNA, 19 nt, Artificial Sequence
  Description of Artificial Sequence: Synthetic oligonucleotide
accaugcaguguacaggca

SEQ ID NO: 893910 - RNA, 19 nt, Artificial Sequence
  Description of Artificial Sequence: Synthetic oligonucleotide
augaagccucgccgaggau

SEQ ID NO: 893911 - RNA, 19 nt, Artificial Sequence
  Description of Artificial Sequence: Synthetic oligonucleotide
ggguggaucaaaaccuugu

SEQ ID NO: 893912 - RNA, 19 nt, Artificial Sequence
  Description of Artificial Sequence: Synthetic oligonucleotide
agccucccgcucugcuuug

SEQ ID NO: 893913 - RNA, 19 nt, Artificial Sequence
  Description of Artificial Sequence: Synthetic oligonucleotide
cucgcucauggggcuugcc

SEQ ID NO: 893914 - RNA, 19 nt, Artificial Sequence
  Description of Artificial Sequence: Synthetic oligonucleotide
ccagcguugcuuggcuucc

SEQ ID NO: 893915 - RNA, 19 nt, Artificial Sequence
  Description of Artificial Sequence: Synthetic oligonucleotide
gacgccgaagauagcuccu

SEQ ID NO: 893916 - RNA, 19 nt, Artificial Sequence
  Description of Artificial Sequence: Synthetic oligonucleotide
gcguugcuuggcuuccuuc

SEQ ID NO: 893917 - RNA, 19 nt, Artificial Sequence
  Description of Artificial Sequence: Synthetic oligonucleotide
caagcgaagauggucucuu

SEQ ID NO: 893918 - RNA, 19 nt, Artificial Sequence
  Description of Artificial Sequence: Synthetic oligonucleotide
cagucccugucugucaucu

SEQ ID NO: 893919 - RNA, 19 nt, Artificial Sequence
  Description of Artificial Sequence: Synthetic oligonucleotide
acaugacuguuuggcggua

SEQ ID NO: 893920 - RNA, 19 nt, Artificial Sequence
  Description of Artificial Sequence: Synthetic oligonucleotide
cuccuggcuagccguucca

SEQ ID NO: 893921 - RNA, 19 nt, Artificial Sequence
  Description of Artificial Sequence: Synthetic oligonucleotide
ccgaagauagcuccuggcu

SEQ ID NO: 893922 - RNA, 19 nt, Artificial Sequence
  Description of Artificial Sequence: Synthetic oligonucleotide
caccaaugaugucacgauu

SEQ ID NO: 893923 - RNA, 19 nt, Artificial Sequence
  Description of Artificial Sequence: Synthetic oligonucleotide
ucuucccgugcggccaauu

SEQ ID NO: 893924 - RNA, 19 nt, Artificial Sequence
  Description of Artificial Sequence: Synthetic oligonucleotide
gcgguacuuauguuuuccu

SEQ ID NO: 893925 - RNA, 19 nt, Artificial Sequence
  Description of Artificial Sequence: Synthetic oligonucleotide
cgccgaagauagcuccugg

SEQ ID NO: 893926 - RNA, 19 nt, Artificial Sequence
  Description of Artificial Sequence: Synthetic oligonucleotide
guacagcggcucagcacca

SEQ ID NO: 893927 - RNA, 19 nt, Artificial Sequence
  Description of Artificial Sequence: Synthetic oligonucleotide
ggaugguaccuggcuugug

SEQ ID NO: 893928 - RNA, 19 nt, Artificial Sequence
  Description of Artificial Sequence: Synthetic oligonucleotide
guuuggcgguacuuauguu

SEQ ID NO: 893929 - RNA, 19 nt, Artificial Sequence
  Description of Artificial Sequence: Synthetic oligonucleotide
ggaagauccuccagucccu

SEQ ID NO: 893930 - RNA, 19 nt, Artificial Sequence
  Description of Artificial Sequence: Synthetic oligonucleotide
gugcggauaccuaguggcu

SEQ ID NO: 893931 - RNA, 19 nt, Artificial Sequence
  Description of Artificial Sequence: Synthetic oligonucleotide
gccugcaaugaagccucgc

SEQ ID NO: 893932 - RNA, 19 nt, Artificial Sequence
  Description of Artificial Sequence: Synthetic oligonucleotide
gggcaucguagccgugaac

SEQ ID NO: 893933 - RNA, 19 nt, Artificial Sequence
  Description of Artificial Sequence: Synthetic oligonucleotide
ccaugcaguguacaggcau

SEQ ID NO: 893934 - RNA, 19 nt, Artificial Sequence
  Description of Artificial Sequence: Synthetic oligonucleotide
ccuggucugacucuucgau

SEQ ID NO: 893935 - RNA, 19 nt, Artificial Sequence
  Description of Artificial Sequence: Synthetic oligonucleotide
ggggcaucguagccgugaa

SEQ ID NO: 893936 - RNA, 19 nt, Artificial Sequence
  Description of Artificial Sequence: Synthetic oligonucleotide
ccacgaccagccacaucug

SEQ ID NO: 893937 - RNA, 19 nt, Artificial Sequence
  Description of Artificial Sequence: Synthetic oligonucleotide
gggaccaauggcggucauc

SEQ ID NO: 893938 - RNA, 19 nt, Artificial Sequence
  Description of Artificial Sequence: Synthetic oligonucleotide
  modified_base (17)..(17): a, c, u, g, unknown or other
gcccaaauccuggaacngu

SEQ ID NO: 893939 - RNA, 19 nt, Artificial Sequence
  Description of Artificial Sequence: Synthetic oligonucleotide
cacaacccaugcguagccu

SEQ ID NO: 893940 - RNA, 19 nt, Artificial Sequence
  Description of Artificial Sequence: Synthetic oligonucleotide
cggauaccuaguggcuucc

SEQ ID NO: 893941 - RNA, 19 nt, Artificial Sequence
  Description of Artificial Sequence: Synthetic oligonucleotide
ccagucccugucugucauc

SEQ ID NO: 893942 - RNA, 19 nt, Artificial Sequence
  Description of Artificial Sequence: Synthetic oligonucleotide
cacaacccuucuucugguu

SEQ ID NO: 893943 - RNA, 19 nt, Artificial Sequence
  Description of Artificial Sequence: Synthetic oligonucleotide
gcuagccguuccaccgcug

SEQ ID NO: 893944 - RNA, 19 nt, Artificial Sequence
  Description of Artificial Sequence: Synthetic oligonucleotide
gaauggccugacgcuggau

SEQ ID NO: 893945 - RNA, 19 nt, Artificial Sequence
  Description of Artificial Sequence: Synthetic oligonucleotide
ggacucucuaggauagcuu

SEQ ID NO: 893946 - RNA, 19 nt, Artificial Sequence
  Description of Artificial Sequence: Synthetic oligonucleotide
ccuaguggcuucccaaauu

SEQ ID NO: 893947 - RNA, 19 nt, Artificial Sequence
  Description of Artificial Sequence: Synthetic oligonucleotide
aagccucgccgaggaucuu

SEQ ID NO: 893948 - RNA, 19 nt, Artificial Sequence
  Description of Artificial Sequence: Synthetic oligonucleotide
gccugacgcuggauaggug

SEQ ID NO: 893949 - RNA, 19 nt, Artificial Sequence
  Description of Artificial Sequence: Synthetic oligonucleotide
cacggguaggagccagaau

SEQ ID NO: 893950 - RNA, 19 nt, Artificial Sequence
  Description of Artificial Sequence: Synthetic oligonucleotide
gccgugaacaugacuguuu

SEQ ID NO: 893951 - RNA, 19 nt, Artificial Sequence
  Description of Artificial Sequence: Synthetic oligonucleotide
gccgaggaucuucuagcau

SEQ ID NO: 893952 - RNA, 19 nt, Artificial Sequence
  Description of Artificial Sequence: Synthetic oligonucleotide
gguucgccucuuuuccauu

SEQ ID NO: 893953 - RNA, 19 nt, Artificial Sequence
  Description of Artificial Sequence: Synthetic oligonucleotide
gcaggacgccgaagauagc

SEQ ID NO: 893954 - RNA, 19 nt, Artificial Sequence
  Description of Artificial Sequence: Synthetic oligonucleotide
ggagaggaacuugggcuuu

SEQ ID NO: 893955 - RNA, 19 nt, Artificial Sequence
  Description of Artificial Sequence: Synthetic oligonucleotide
cugggguggcgaucacaau

SEQ ID NO: 893956 - RNA, 19 nt, Artificial Sequence
  Description of Artificial Sequence: Synthetic oligonucleotide
caucuggcucgaagcccau

SEQ ID NO: 893957 - RNA, 19 nt, Artificial Sequence
  Description of Artificial Sequence: Synthetic oligonucleotide
ccaaaauugcgagcagcuu

SEQ ID NO: 893958 - RNA, 19 nt, Artificial Sequence
  Description of Artificial Sequence: Synthetic oligonucleotide
ccaacacgucacaacccuu

SEQ ID NO: 893959 - RNA, 19 nt, Artificial Sequence
  Description of Artificial Sequence: Synthetic oligonucleotide
gccucgccgaggaucuucu

SEQ ID NO: 893960 - RNA, 19 nt, Artificial Sequence
  Description of Artificial Sequence: Synthetic oligonucleotide
gcguagccugaagccuuga

SEQ ID NO: 893961 - RNA, 19 nt, Artificial Sequence
  Description of Artificial Sequence: Synthetic oligonucleotide
ggauagguguuggcuccuu

SEQ ID NO: 893962 - RNA, 19 nt, Artificial Sequence
  Description of Artificial Sequence: Synthetic oligonucleotide
ccgcuucagggcaugucuu

SEQ ID NO: 893963 - RNA, 19 nt, Artificial Sequence
  Description of Artificial Sequence: Synthetic oligonucleotide
cguagccugaagccuugau

SEQ ID NO: 893964 - RNA, 19 nt, Artificial Sequence
  Description of Artificial Sequence: Synthetic oligonucleotide
cacccgcuucagggcaugu

SEQ ID NO: 893965 - RNA, 19 nt, Artificial Sequence
  Description of Artificial Sequence: Synthetic oligonucleotide
gggcccuggucugacucuu

SEQ ID NO: 893966 - RNA, 19 nt, Artificial Sequence
  Description of Artificial Sequence: Synthetic oligonucleotide
ggcacccgcuucagggcau

SEQ ID NO: 893967 - RNA, 19 nt, Artificial Sequence
  Description of Artificial Sequence: Synthetic oligonucleotide
ccucgccgaggaucuucua

SEQ ID NO: 893968 - RNA, 19 nt, Artificial Sequence
  Description of Artificial Sequence: Synthetic oligonucleotide
cggucaucccagcguugcu

SEQ ID NO: 893969 - RNA, 19 nt, Artificial Sequence
  Description of Artificial Sequence: Synthetic oligonucleotide
ccacucgcucauggggcuu

SEQ ID NO: 893970 - RNA, 19 nt, Artificial Sequence
  Description of Artificial Sequence: Synthetic oligonucleotide
aaucuauacaauuauacac

SEQ ID NO: 893971 - RNA, 19 nt, Artificial Sequence
  Description of Artificial Sequence: Synthetic oligonucleotide
aacauuaagaucccgcagg

SEQ ID NO: 893972 - RNA, 19 nt, Artificial Sequence
  Description of Artificial Sequence: Synthetic oligonucleotide
gaaugaaggguacagagcg

SEQ ID NO: 893973 - RNA, 19 nt, Artificial Sequence
  Description of Artificial Sequence: Synthetic oligonucleotide
caaggcuuaauucagaagg

SEQ ID NO: 893974 - RNA, 19 nt, Artificial Sequence
  Description of Artificial Sequence: Synthetic oligonucleotide
aaauagagauaauuuagcu

SEQ ID NO: 893975 - RNA, 19 nt, Artificial Sequence
  Description of Artificial Sequence: Synthetic oligonucleotide
uaauucagaagguagcugc

SEQ ID NO: 893976 - RNA, 19 nt, Artificial Sequence
  Description of Artificial Sequence: Synthetic oligonucleotide
ucacaauagacucuggaga

SEQ ID NO: 893977 - RNA, 19 nt, Artificial Sequence
  Description of Artificial Sequence: Synthetic oligonucleotide
aagauaugaaguuuucccu

SEQ ID NO: 893978 - RNA, 19 nt, Artificial Sequence
  Description of Artificial Sequence: Synthetic oligonucleotide
guugcuauccagcagaaug

SEQ ID NO: 893979 - RNA, 19 nt, Artificial Sequence
  Description of Artificial Sequence: Synthetic oligonucleotide
uccauuguuaaauacuuga

SEQ ID NO: 893980 - RNA, 19 nt, Artificial Sequence
  Description of Artificial Sequence: Synthetic oligonucleotide
caucccuacaaauauagag

SEQ ID NO: 893981 - RNA, 19 nt, Artificial Sequence
  Description of Artificial Sequence: Synthetic oligonucleotide
acgguuacaggagaaaucc

SEQ ID NO: 893982 - RNA, 19 nt, Artificial Sequence
  Description of Artificial Sequence: Synthetic oligonucleotide
cacucugagaggaugaacg

SEQ ID NO: 893983 - RNA, 19 nt, Artificial Sequence
  Description of Artificial Sequence: Synthetic oligonucleotide
aaauagaagguagggaaug

SEQ ID NO: 893984 - RNA, 19 nt, Artificial Sequence
  Description of Artificial Sequence: Synthetic oligonucleotide
ccuccgaacauuaagaucc

SEQ ID NO: 893985 - RNA, 19 nt, Artificial Sequence
  Description of Artificial Sequence: Synthetic oligonucleotide
ugaaugaaggguacagagc

SEQ ID NO: 893986 - RNA, 19 nt, Artificial Sequence
  Description of Artificial Sequence: Synthetic oligonucleotide
acuauggaagcccgagucc

SEQ ID NO: 893987 - RNA, 19 nt, Artificial Sequence
  Description of Artificial Sequence: Synthetic oligonucleotide
uggaggauggcguaggagc

SEQ ID NO: 893988 - RNA, 19 nt, Artificial Sequence
  Description of Artificial Sequence: Synthetic oligonucleotide
ucucucuacaaaauagaga

SEQ ID NO: 893989 - RNA, 19 nt, Artificial Sequence
  Description of Artificial Sequence: Synthetic oligonucleotide
aaguugggacaugaguucc

SEQ ID NO: 893990 - RNA, 19 nt, Artificial Sequence
  Description of Artificial Sequence: Synthetic oligonucleotide
cucacaauagacucuggag

SEQ ID NO: 893991 - RNA, 19 nt, Artificial Sequence
  Description of Artificial Sequence: Synthetic oligonucleotide
cacaauagacucuggagag

SEQ ID NO: 893992 - RNA, 19 nt, Artificial Sequence
  Description of Artificial Sequence: Synthetic oligonucleotide
aaugggcccacaucccuac

SEQ ID NO: 893993 - RNA, 19 nt, Artificial Sequence
  Description of Artificial Sequence: Synthetic oligonucleotide
guguacacggcauagagca

SEQ ID NO: 893994 - RNA, 19 nt, Artificial Sequence
  Description of Artificial Sequence: Synthetic oligonucleotide
cuuugguaggggcugaagg

SEQ ID NO: 893995 - RNA, 19 nt, Artificial Sequence
  Description of Artificial Sequence: Synthetic oligonucleotide
cacaucccuacaaauauag

SEQ ID NO: 893996 - RNA, 19 nt, Artificial Sequence
  Description of Artificial Sequence: Synthetic oligonucleotide
ucugagaggaugaacggaa

SEQ ID NO: 893997 - RNA, 19 nt, Artificial Sequence
  Description of Artificial Sequence: Synthetic oligonucleotide
ucuaagaaacucucuacau

SEQ ID NO: 893998 - RNA, 19 nt, Artificial Sequence
  Description of Artificial Sequence: Synthetic oligonucleotide
aaagugucugggugccgcc

SEQ ID NO: 893999 - RNA, 19 nt, Artificial Sequence
  Description of Artificial Sequence: Synthetic oligonucleotide
gaacauuaagaucccgcag

SEQ ID NO: 894000 - RNA, 19 nt, Artificial Sequence
  Description of Artificial Sequence: Synthetic oligonucleotide
caucuguggacucauuucc

SEQ ID NO: 894001 - RNA, 19 nt, Artificial Sequence
  Description of Artificial Sequence: Synthetic oligonucleotide
aacacuauggaagcccgag

SEQ ID NO: 894002 - RNA, 19 nt, Artificial Sequence
  Description of Artificial Sequence: Synthetic oligonucleotide
agagcgaggccguagcugg

SEQ ID NO: 894003 - RNA, 19 nt, Artificial Sequence
  Description of Artificial Sequence: Synthetic oligonucleotide
aggguacugagcugguucc

SEQ ID NO: 894004 - RNA, 19 nt, Artificial Sequence
  Description of Artificial Sequence: Synthetic oligonucleotide
cucucucuacaaaauagag

SEQ ID NO: 894005 - RNA, 19 nt, Artificial Sequence
  Description of Artificial Sequence: Synthetic oligonucleotide
ugaagauaugaaguuuucc

SEQ ID NO: 894006 - RNA, 19 nt, Artificial Sequence
  Description of Artificial Sequence: Synthetic oligonucleotide
auacuugaagauaugaagu

SEQ ID NO: 894007 - RNA, 19 nt, Artificial Sequence
  Description of Artificial Sequence: Synthetic oligonucleotide
cuucuaagaaacucucuac

SEQ ID NO: 894008 - RNA, 19 nt, Artificial Sequence
  Description of Artificial Sequence: Synthetic oligonucleotide
uucggugggccauuggagg

SEQ ID NO: 894009 - RNA, 19 nt, Artificial Sequence
  Description of Artificial Sequence: Synthetic oligonucleotide
ggaaauaagucuucagcag

SEQ ID NO: 894010 - RNA, 19 nt, Artificial Sequence
  Description of Artificial Sequence: Synthetic oligonucleotide
gacacugucccuccugggg

SEQ ID NO: 894011 - RNA, 19 nt, Artificial Sequence
  Description of Artificial Sequence: Synthetic oligonucleotide
gauaugaaguuuucccuuc

SEQ ID NO: 894012 - RNA, 19 nt, Artificial Sequence
  Description of Artificial Sequence: Synthetic oligonucleotide
uaagaucccgcagggaacg

SEQ ID NO: 894013 - RNA, 19 nt, Artificial Sequence
  Description of Artificial Sequence: Synthetic oligonucleotide
aggacaugaaggcaccauc

SEQ ID NO: 894014 - RNA, 19 nt, Artificial Sequence
  Description of Artificial Sequence: Synthetic oligonucleotide
aguuggguagcacuggacu

SEQ ID NO: 894015 - RNA, 19 nt, Artificial Sequence
  Description of Artificial Sequence: Synthetic oligonucleotide
gaaccagggcccauaaugg

SEQ ID NO: 894016 - RNA, 19 nt, Artificial Sequence
  Description of Artificial Sequence: Synthetic oligonucleotide
cucucuacauucuuccgag

SEQ ID NO: 894017 - RNA, 19 nt, Artificial Sequence
  Description of Artificial Sequence: Synthetic oligonucleotide
auucgggagacacgguuac

SEQ ID NO: 894018 - RNA, 19 nt, Artificial Sequence
  Description of Artificial Sequence: Synthetic oligonucleotide
uuggucucugaauggagcc

SEQ ID NO: 894019 - RNA, 19 nt, Artificial Sequence
  Description of Artificial Sequence: Synthetic oligonucleotide
uuaagaucccgcagggaac

SEQ ID NO: 894020 - RNA, 19 nt, Artificial Sequence
  Description of Artificial Sequence: Synthetic oligonucleotide
ugagaggaugaacggaaga

SEQ ID NO: 894021 - RNA, 19 nt, Artificial Sequence
  Description of Artificial Sequence: Synthetic oligonucleotide
uacacuagugucuuuggua

SEQ ID NO: 894022 - RNA, 19 nt, Artificial Sequence
  Description of Artificial Sequence: Synthetic oligonucleotide
agagauaauuuagcucccc

SEQ ID NO: 894023 - RNA, 19 nt, Artificial Sequence
  Description of Artificial Sequence: Synthetic oligonucleotide
auacaauuauacacagaac

SEQ ID NO: 894024 - RNA, 19 nt, Artificial Sequence
  Description of Artificial Sequence: Synthetic oligonucleotide
aucgccagagccaucuucc

SEQ ID NO: 894025 - RNA, 19 nt, Artificial Sequence
  Description of Artificial Sequence: Synthetic oligonucleotide
gaggacuuauaaauagaag

SEQ ID NO: 894026 - RNA, 19 nt, Artificial Sequence
  Description of Artificial Sequence: Synthetic oligonucleotide
auaagucuucagcagggca

SEQ ID NO: 894027 - RNA, 19 nt, Artificial Sequence
  Description of Artificial Sequence: Synthetic oligonucleotide
ucccuacaaauauagaguu

SEQ ID NO: 894028 - RNA, 19 nt, Artificial Sequence
  Description of Artificial Sequence: Synthetic oligonucleotide
uagagauaauuuagcuccc

SEQ ID NO: 894029 - RNA, 19 nt, Artificial Sequence
  Description of Artificial Sequence: Synthetic oligonucleotide
agauaugaaguuuucccuu

SEQ ID NO: 894030 - RNA, 19 nt, Artificial Sequence
  Description of Artificial Sequence: Synthetic oligonucleotide
accggaauucgggagacac

SEQ ID NO: 894031 - RNA, 19 nt, Artificial Sequence
  Description of Artificial Sequence: Synthetic oligonucleotide
aaggaccugucgaaguugg

SEQ ID NO: 894032 - RNA, 19 nt, Artificial Sequence
  Description of Artificial Sequence: Synthetic oligonucleotide
cauaaugggcccacauccc

SEQ ID NO: 894033 - RNA, 19 nt, Artificial Sequence
  Description of Artificial Sequence: Synthetic oligonucleotide
caaggacuaaaaccugggg

SEQ ID NO: 894034 - RNA, 19 nt, Artificial Sequence
  Description of Artificial Sequence: Synthetic oligonucleotide
caucauaccgacgucccgg

SEQ ID NO: 894035 - RNA, 19 nt, Artificial Sequence
  Description of Artificial Sequence: Synthetic oligonucleotide
uccgacaggcuucuaagaa

SEQ ID NO: 894036 - RNA, 19 nt, Artificial Sequence
  Description of Artificial Sequence: Synthetic oligonucleotide
gaccugucgaaguugggac

SEQ ID NO: 894037 - RNA, 19 nt, Artificial Sequence
  Description of Artificial Sequence: Synthetic oligonucleotide
acagccaaggucugucauc

SEQ ID NO: 894038 - RNA, 19 nt, Artificial Sequence
  Description of Artificial Sequence: Synthetic oligonucleotide
acuagugggguaaagggcu

SEQ ID NO: 894039 - RNA, 19 nt, Artificial Sequence
  Description of Artificial Sequence: Synthetic oligonucleotide
uguuuggucucugaaugga

SEQ ID NO: 894040 - RNA, 19 nt, Artificial Sequence
  Description of Artificial Sequence: Synthetic oligonucleotide
guagcacuggacuucggug

SEQ ID NO: 894041 - RNA, 19 nt, Artificial Sequence
  Description of Artificial Sequence: Synthetic oligonucleotide
uacagagcgaggccguagc

SEQ ID NO: 894042 - RNA, 19 nt, Artificial Sequence
  Description of Artificial Sequence: Synthetic oligonucleotide
gucaacacuauggaagccc

SEQ ID NO: 894043 - RNA, 19 nt, Artificial Sequence
  Description of Artificial Sequence: Synthetic oligonucleotide
cacuauggaagcccgaguc

SEQ ID NO: 894044 - RNA, 19 nt, Artificial Sequence
  Description of Artificial Sequence: Synthetic oligonucleotide
auaaugggcccacaucccu

SEQ ID NO: 894045 - RNA, 19 nt, Artificial Sequence
  Description of Artificial Sequence: Synthetic oligonucleotide
ggaugaacggaagaggaag

SEQ ID NO: 894046 - RNA, 19 nt, Artificial Sequence
  Description of Artificial Sequence: Synthetic oligonucleotide
ugggguaaagggcuacugu

SEQ ID NO: 894047 - RNA, 19 nt, Artificial Sequence
  Description of Artificial Sequence: Synthetic oligonucleotide
gacucauuuccugaccacc

SEQ ID NO: 894048 - RNA, 19 nt, Artificial Sequence
  Description of Artificial Sequence: Synthetic oligonucleotide
aagccacccagaccagagg

SEQ ID NO: 894049 - RNA, 19 nt, Artificial Sequence
  Description of Artificial Sequence: Synthetic oligonucleotide
gaggaugaacggaagagga

SEQ ID NO: 894050 - RNA, 19 nt, Artificial Sequence
  Description of Artificial Sequence: Synthetic oligonucleotide
aggagccgaguguacacgg

SEQ ID NO: 894051 - RNA, 19 nt, Artificial Sequence
  Description of Artificial Sequence: Synthetic oligonucleotide
ugaacggaagaggaagcug

SEQ ID NO: 894052 - RNA, 19 nt, Artificial Sequence
  Description of Artificial Sequence: Synthetic oligonucleotide
auaugaaguuuucccuuca

SEQ ID NO: 894053 - RNA, 19 nt, Artificial Sequence
  Description of Artificial Sequence: Synthetic oligonucleotide
aaauccaggcggaccagag

SEQ ID NO: 894054 - RNA, 19 nt, Artificial Sequence
  Description of Artificial Sequence: Synthetic oligonucleotide
aggguacagagcgaggccg

SEQ ID NO: 894055 - RNA, 19 nt, Artificial Sequence
  Description of Artificial Sequence: Synthetic oligonucleotide
ucuccucacaauagacucu

SEQ ID NO: 894056 - RNA, 19 nt, Artificial Sequence
  Description of Artificial Sequence: Synthetic oligonucleotide
acaauagacucuggagagg

SEQ ID NO: 894057 - RNA, 19 nt, Artificial Sequence
  Description of Artificial Sequence: Synthetic oligonucleotide
gguuccuccgaacauuaag

SEQ ID NO: 894058 - RNA, 19 nt, Artificial Sequence
  Description of Artificial Sequence: Synthetic oligonucleotide
gacuuauaaauagaaggua

SEQ ID NO: 894059 - RNA, 19 nt, Artificial Sequence
  Description of Artificial Sequence: Synthetic oligonucleotide
cugcauuucgcucuucauc

SEQ ID NO: 894060 - RNA, 19 nt, Artificial Sequence
  Description of Artificial Sequence: Synthetic oligonucleotide
cuucaggcaggguacugag

SEQ ID NO: 894061 - RNA, 19 nt, Artificial Sequence
  Description of Artificial Sequence: Synthetic oligonucleotide
ccggaaauaagucuucagc

SEQ ID NO: 894062 - RNA, 19 nt, Artificial Sequence
  Description of Artificial Sequence: Synthetic oligonucleotide
uuccuuccggccuccauug

SEQ ID NO: 894063 - RNA, 19 nt, Artificial Sequence
  Description of Artificial Sequence: Synthetic oligonucleotide
uguacacggcauagagcag

SEQ ID NO: 894064 - RNA, 19 nt, Artificial Sequence
  Description of Artificial Sequence: Synthetic oligonucleotide
uccgagggcgagcacaggu

SEQ ID NO: 894065 - RNA, 19 nt, Artificial Sequence
  Description of Artificial Sequence: Synthetic oligonucleotide
agacacaggggugggcucc

SEQ ID NO: 894066 - RNA, 19 nt, Artificial Sequence
  Description of Artificial Sequence: Synthetic oligonucleotide
acacccaucuuccgacagg

SEQ ID NO: 894067 - RNA, 19 nt, Artificial Sequence
  Description of Artificial Sequence: Synthetic oligonucleotide
gguacacuagugucuuugg

SEQ ID NO: 894068 - RNA, 19 nt, Artificial Sequence
  Description of Artificial Sequence: Synthetic oligonucleotide
uccuccgaacauuaagauc

SEQ ID NO: 894069 - RNA, 19 nt, Artificial Sequence
  Description of Artificial Sequence: Synthetic oligonucleotide
caaagugucugggugccgc

SEQ ID NO: 894070 - RNA, 19 nt, Artificial Sequence
  Description of Artificial Sequence: Synthetic oligonucleotide
cacgguuacaggagaaauc

SEQ ID NO: 894071 - RNA, 19 nt, Artificial Sequence
  Description of Artificial Sequence: Synthetic oligonucleotide
uuccuccgaacauuaagau

SEQ ID NO: 894072 - RNA, 19 nt, Artificial Sequence
  Description of Artificial Sequence: Synthetic oligonucleotide
gucacugguccagacacag

SEQ ID NO: 894073 - RNA, 19 nt, Artificial Sequence
  Description of Artificial Sequence: Synthetic oligonucleotide
gcuacugugggcacuagag

SEQ ID NO: 894074 - RNA, 19 nt, Artificial Sequence
  Description of Artificial Sequence: Synthetic oligonucleotide
gaugaggccgaagcacccg

SEQ ID NO: 894075 - RNA, 19 nt, Artificial Sequence
  Description of Artificial Sequence: Synthetic oligonucleotide
uggguagcacuggacuucg

SEQ ID NO: 894076 - RNA, 19 nt, Artificial Sequence
  Description of Artificial Sequence: Synthetic oligonucleotide
cagccgugacucaaggacc

SEQ ID NO: 894077 - RNA, 19 nt, Artificial Sequence
  Description of Artificial Sequence: Synthetic oligonucleotide
gcagccgugacucaaggac

SEQ ID NO: 894078 - RNA, 19 nt, Artificial Sequence
  Description of Artificial Sequence: Synthetic oligonucleotide
uguccucuccacauccccu

SEQ ID NO: 894079 - RNA, 19 nt, Artificial Sequence
  Description of Artificial Sequence: Synthetic oligonucleotide
auaccgacgucccggaaau

SEQ ID NO: 894080 - RNA, 19 nt, Artificial Sequence
  Description of Artificial Sequence: Synthetic oligonucleotide
acgucccggaaauaagucu

SEQ ID NO: 894081 - RNA, 19 nt, Artificial Sequence
  Description of Artificial Sequence: Synthetic oligonucleotide
gagaccggaauucgggaga

SEQ ID NO: 894082 - RNA, 19 nt, Artificial Sequence
  Description of Artificial Sequence: Synthetic oligonucleotide
ucucuacaaaauagagaua

SEQ ID NO: 894083 - RNA, 19 nt, Artificial Sequence
  Description of Artificial Sequence: Synthetic oligonucleotide
cacuagugucuuugguagg

SEQ ID NO: 894084 - RNA, 19 nt, Artificial Sequence
  Description of Artificial Sequence: Synthetic oligonucleotide
agcugucacugguccagac

SEQ ID NO: 894085 - RNA, 19 nt, Artificial Sequence
  Description of Artificial Sequence: Synthetic oligonucleotide
uccucacaauagacucugg

SEQ ID NO: 894086 - RNA, 19 nt, Artificial Sequence
  Description of Artificial Sequence: Synthetic oligonucleotide
gaucccgcagggaacggag

SEQ ID NO: 894087 - RNA, 19 nt, Artificial Sequence
  Description of Artificial Sequence: Synthetic oligonucleotide
aauucgggagacacgguua

SEQ ID NO: 894088 - RNA, 19 nt, Artificial Sequence
  Description of Artificial Sequence: Synthetic oligonucleotide
cuccucacaauagacucug

SEQ ID NO: 894089 - RNA, 19 nt, Artificial Sequence
  Description of Artificial Sequence: Synthetic oligonucleotide
agaccggaauucgggagac

SEQ ID NO: 894090 - RNA, 19 nt, Artificial Sequence
  Description of Artificial Sequence: Synthetic oligonucleotide
ugagcugguuccuccgaac

SEQ ID NO: 894091 - RNA, 19 nt, Artificial Sequence
  Description of Artificial Sequence: Synthetic oligonucleotide
ggugagggcacaugaauga

SEQ ID NO: 894092 - RNA, 19 nt, Artificial Sequence
  Description of Artificial Sequence: Synthetic oligonucleotide
accgguugaacaggaggac

SEQ ID NO: 894093 - RNA, 19 nt, Artificial Sequence
  Description of Artificial Sequence: Synthetic oligonucleotide
ugucaacacuauggaagcc

SEQ ID NO: 894094 - RNA, 19 nt, Artificial Sequence
  Description of Artificial Sequence: Synthetic oligonucleotide
gagauggaggauggcguag

SEQ ID NO: 894095 - RNA, 19 nt, Artificial Sequence
  Description of Artificial Sequence: Synthetic oligonucleotide
cugaaggcaccaccgguug

SEQ ID NO: 894096 - RNA, 19 nt, Artificial Sequence
  Description of Artificial Sequence: Synthetic oligonucleotide
aggagaccggaauucggga

SEQ ID NO: 894097 - RNA, 19 nt, Artificial Sequence
  Description of Artificial Sequence: Synthetic oligonucleotide
aaggucugucaucccucug

SEQ ID NO: 894098 - RNA, 19 nt, Artificial Sequence
  Description of Artificial Sequence: Synthetic oligonucleotide
ugcuauccagcagaaugac

SEQ ID NO: 894099 - RNA, 19 nt, Artificial Sequence
  Description of Artificial Sequence: Synthetic oligonucleotide
agauccgagggcgagcaca

SEQ ID NO: 894100 - RNA, 19 nt, Artificial Sequence
  Description of Artificial Sequence: Synthetic oligonucleotide
cccauagcagccaguaggg

SEQ ID NO: 894101 - RNA, 19 nt, Artificial Sequence
  Description of Artificial Sequence: Synthetic oligonucleotide
agggcgagcacaggucagc

SEQ ID NO: 894102 - RNA, 19 nt, Artificial Sequence
  Description of Artificial Sequence: Synthetic oligonucleotide
gcacccguggcucuggucc

SEQ ID NO: 894103 - RNA, 19 nt, Artificial Sequence
  Description of Artificial Sequence: Synthetic oligonucleotide
caggcggaccagaggaagg

SEQ ID NO: 894104 - RNA, 19 nt, Artificial Sequence
  Description of Artificial Sequence: Synthetic oligonucleotide
ggagaccggaauucgggag

SEQ ID NO: 894105 - RNA, 19 nt, Artificial Sequence
  Description of Artificial Sequence: Synthetic oligonucleotide
acacuauggaagcccgagu

SEQ ID NO: 894106 - RNA, 19 nt, Artificial Sequence
  Description of Artificial Sequence: Synthetic oligonucleotide
gcuaguguggaggacauga

SEQ ID NO: 894107 - RNA, 19 nt, Artificial Sequence
  Description of Artificial Sequence: Synthetic oligonucleotide
acucauuuccugaccaccu

SEQ ID NO: 894108 - RNA, 19 nt, Artificial Sequence
  Description of Artificial Sequence: Synthetic oligonucleotide
aggagaaauccaggcggac

SEQ ID NO: 894109 - RNA, 19 nt, Artificial Sequence
  Description of Artificial Sequence: Synthetic oligonucleotide
ucggugggccauuggaggu

SEQ ID NO: 894110 - RNA, 19 nt, Artificial Sequence
  Description of Artificial Sequence: Synthetic oligonucleotide
accugucgaaguugggaca

SEQ ID NO: 894111 - RNA, 19 nt, Artificial Sequence
  Description of Artificial Sequence: Synthetic oligonucleotide
ggacuuauaaauagaaggu

SEQ ID NO: 894112 - RNA, 19 nt, Artificial Sequence
  Description of Artificial Sequence: Synthetic oligonucleotide
cuggguggugccccggagg

SEQ ID NO: 894113 - RNA, 19 nt, Artificial Sequence
  Description of Artificial Sequence: Synthetic oligonucleotide
cuauggaagcccgagucca

SEQ ID NO: 894114 - RNA, 19 nt, Artificial Sequence
  Description of Artificial Sequence: Synthetic oligonucleotide
auggcguaggagcucccug

SEQ ID NO: 894115 - RNA, 19 nt, Artificial Sequence
  Description of Artificial Sequence: Synthetic oligonucleotide
aggagauccgagggcgagc

SEQ ID NO: 894116 - RNA, 19 nt, Artificial Sequence
  Description of Artificial Sequence: Synthetic oligonucleotide
aggaggacuuauaaauaga

SEQ ID NO: 894117 - RNA, 19 nt, Artificial Sequence
  Description of Artificial Sequence: Synthetic oligonucleotide
gagccgaguguacacggca

SEQ ID NO: 894118 - RNA, 19 nt, Artificial Sequence
  Description of Artificial Sequence: Synthetic oligonucleotide
gaggagauccgagggcgag

SEQ ID NO: 894119 - RNA, 19 nt, Artificial Sequence
  Description of Artificial Sequence: Synthetic oligonucleotide
aucagcacuagugggguaa

SEQ ID NO: 894120 - RNA, 19 nt, Artificial Sequence
  Description of Artificial Sequence: Synthetic oligonucleotide
acacgguuacaggagaaau

SEQ ID NO: 894121 - RNA, 19 nt, Artificial Sequence
  Description of Artificial Sequence: Synthetic oligonucleotide
cuacaaggcuuaauucaga

SEQ ID NO: 894122 - RNA, 19 nt, Artificial Sequence
  Description of Artificial Sequence: Synthetic oligonucleotide
agauccggaaugacagcuc

SEQ ID NO: 894123 - RNA, 19 nt, Artificial Sequence
  Description of Artificial Sequence: Synthetic oligonucleotide
ccaccgguugaacaggagg

SEQ ID NO: 894124 - RNA, 19 nt, Artificial Sequence
  Description of Artificial Sequence: Synthetic oligonucleotide
agccaaggucugucauccc

SEQ ID NO: 894125 - RNA, 19 nt, Artificial Sequence
  Description of Artificial Sequence: Synthetic oligonucleotide
gacuucggugggccauugg

SEQ ID NO: 894126 - RNA, 19 nt, Artificial Sequence
  Description of Artificial Sequence: Synthetic oligonucleotide
gaauucgggagacacgguu

SEQ ID NO: 894127 - RNA, 19 nt, Artificial Sequence
  Description of Artificial Sequence: Synthetic oligonucleotide
gacgucccggaaauaaguc

SEQ ID NO: 894128 - RNA, 19 nt, Artificial Sequence
  Description of Artificial Sequence: Synthetic oligonucleotide
cggaaauaagucuucagca

SEQ ID NO: 894129 - RNA, 19 nt, Artificial Sequence
  Description of Artificial Sequence: Synthetic oligonucleotide
gagauccggaaugacagcu

SEQ ID NO: 894130 - RNA, 19 nt, Artificial Sequence
  Description of Artificial Sequence: Synthetic oligonucleotide
cuguggacucauuuccuga

SEQ ID NO: 894131 - RNA, 19 nt, Artificial Sequence
  Description of Artificial Sequence: Synthetic oligonucleotide
ucccggaaauaagucuuca

SEQ ID NO: 894132 - RNA, 19 nt, Artificial Sequence
  Description of Artificial Sequence: Synthetic oligonucleotide
cauaccgacgucccggaaa

SEQ ID NO: 894133 - RNA, 19 nt, Artificial Sequence
  Description of Artificial Sequence: Synthetic oligonucleotide
ggguacacuagugucuuug

SEQ ID NO: 894134 - RNA, 19 nt, Artificial Sequence
  Description of Artificial Sequence: Synthetic oligonucleotide
caguuggguagcacuggac

SEQ ID NO: 894135 - RNA, 19 nt, Artificial Sequence
  Description of Artificial Sequence: Synthetic oligonucleotide
cggaauucgggagacacgg

SEQ ID NO: 894136 - RNA, 19 nt, Artificial Sequence
  Description of Artificial Sequence: Synthetic oligonucleotide
accgacgucccggaaauaa

SEQ ID NO: 894137 - RNA, 19 nt, Artificial Sequence
  Description of Artificial Sequence: Synthetic oligonucleotide
agcugguuccuccgaacau

SEQ ID NO: 894138 - RNA, 19 nt, Artificial Sequence
  Description of Artificial Sequence: Synthetic oligonucleotide
gcagcguggguccuaggag

SEQ ID NO: 894139 - RNA, 19 nt, Artificial Sequence
  Description of Artificial Sequence: Synthetic oligonucleotide
cuggcuaguguggaggaca

SEQ ID NO: 894140 - RNA, 19 nt, Artificial Sequence
  Description of Artificial Sequence: Synthetic oligonucleotide
ggugccccggaggagaucc

SEQ ID NO: 894141 - RNA, 19 nt, Artificial Sequence
  Description of Artificial Sequence: Synthetic oligonucleotide
cugcugucugggcacccgg

SEQ ID NO: 894142 - RNA, 19 nt, Artificial Sequence
  Description of Artificial Sequence: Synthetic oligonucleotide
ucccgggccagcucugaga

SEQ ID NO: 894143 - RNA, 19 nt, Artificial Sequence
  Description of Artificial Sequence: Synthetic oligonucleotide
gaggccguagcugguuggc

SEQ ID NO: 894144 - RNA, 19 nt, Artificial Sequence
  Description of Artificial Sequence: Synthetic oligonucleotide
agcauggaggccacguaga

SEQ ID NO: 894145 - RNA, 19 nt, Artificial Sequence
  Description of Artificial Sequence: Synthetic oligonucleotide
gcgagcacaggucagccuc

SEQ ID NO: 894146 - RNA, 19 nt, Artificial Sequence
  Description of Artificial Sequence: Synthetic oligonucleotide
aggcuuaauucagaaggua

SEQ ID NO: 894147 - RNA, 19 nt, Artificial Sequence
  Description of Artificial Sequence: Synthetic oligonucleotide
cugggugccgccucuccuc

SEQ ID NO: 894148 - RNA, 19 nt, Artificial Sequence
  Description of Artificial Sequence: Synthetic oligonucleotide
cagagcgaggccguagcug

SEQ ID NO: 894149 - RNA, 19 nt, Artificial Sequence
  Description of Artificial Sequence: Synthetic oligonucleotide
gugagggguacacuagugu

SEQ ID NO: 894150 - RNA, 19 nt, Artificial Sequence
  Description of Artificial Sequence: Synthetic oligonucleotide
cccggaggagauccgaggg

SEQ ID NO: 894151 - RNA, 19 nt, Artificial Sequence
  Description of Artificial Sequence: Synthetic oligonucleotide
ucucugaauggagcccagu

SEQ ID NO: 894152 - RNA, 19 nt, Artificial Sequence
  Description of Artificial Sequence: Synthetic oligonucleotide
cgaacauuaagaucccgca

SEQ ID NO: 894153 - RNA, 19 nt, Artificial Sequence
  Description of Artificial Sequence: Synthetic oligonucleotide
cagaagguagcugcuccuc

SEQ ID NO: 894154 - RNA, 19 nt, Artificial Sequence
  Description of Artificial Sequence: Synthetic oligonucleotide
ggccuccauuguuaaauac

SEQ ID NO: 894155 - RNA, 19 nt, Artificial Sequence
  Description of Artificial Sequence: Synthetic oligonucleotide
aacggaagaggaagcuguu

SEQ ID NO: 894156 - RNA, 19 nt, Artificial Sequence
  Description of Artificial Sequence: Synthetic oligonucleotide
ucauaccgacgucccggaa

SEQ ID NO: 894157 - RNA, 19 nt, Artificial Sequence
  Description of Artificial Sequence: Synthetic oligonucleotide
acuggacuucggugggcca

SEQ ID NO: 894158 - RNA, 19 nt, Artificial Sequence
  Description of Artificial Sequence: Synthetic oligonucleotide
aggaugaacggaagaggaa

SEQ ID NO: 894159 - RNA, 19 nt, Artificial Sequence
  Description of Artificial Sequence: Synthetic oligonucleotide
agccgugacucaaggaccu

SEQ ID NO: 894160 - RNA, 19 nt, Artificial Sequence
  Description of Artificial Sequence: Synthetic oligonucleotide
cccggaaauaagucuucag

SEQ ID NO: 894161 - RNA, 19 nt, Artificial Sequence
  Description of Artificial Sequence: Synthetic oligonucleotide
agguggccuguguggauga

SEQ ID NO: 894162 - RNA, 19 nt, Artificial Sequence
  Description of Artificial Sequence: Synthetic oligonucleotide
ggacacugucccuccuggg

SEQ ID NO: 894163 - RNA, 19 nt, Artificial Sequence
  Description of Artificial Sequence: Synthetic oligonucleotide
gccgccaucauaccgacgu

SEQ ID NO: 894164 - RNA, 19 nt, Artificial Sequence
  Description of Artificial Sequence: Synthetic oligonucleotide
ggugggccauuggaggugg

SEQ ID NO: 894165 - RNA, 19 nt, Artificial Sequence
  Description of Artificial Sequence: Synthetic oligonucleotide
cucugagauccggaaugac

SEQ ID NO: 894166 - RNA, 19 nt, Artificial Sequence
  Description of Artificial Sequence: Synthetic oligonucleotide
cugguuccuccgaacauua

SEQ ID NO: 894167 - RNA, 19 nt, Artificial Sequence
  Description of Artificial Sequence: Synthetic oligonucleotide
aggcggaccagaggaaggu

SEQ ID NO: 894168 - RNA, 19 nt, Artificial Sequence
  Description of Artificial Sequence: Synthetic oligonucleotide
ggaccugucgaaguuggga

SEQ ID NO: 894169 - RNA, 19 nt, Artificial Sequence
  Description of Artificial Sequence: Synthetic oligonucleotide
aagcacccguggcucuggu

SEQ ID NO: 894170 - RNA, 19 nt, Artificial Sequence
  Description of Artificial Sequence: Synthetic oligonucleotide
ccggaauucgggagacacg

SEQ ID NO: 894171 - RNA, 19 nt, Artificial Sequence
  Description of Artificial Sequence: Synthetic oligonucleotide
cccuacaaauauagaguuc

SEQ ID NO: 894172 - RNA, 19 nt, Artificial Sequence
  Description of Artificial Sequence: Synthetic oligonucleotide
uccgagacuugagggcacu

SEQ ID NO: 894173 - RNA, 19 nt, Artificial Sequence
  Description of Artificial Sequence: Synthetic oligonucleotide
gcuauccagcagaaugacc

SEQ ID NO: 894174 - RNA, 19 nt, Artificial Sequence
  Description of Artificial Sequence: Synthetic oligonucleotide
agccucagggacacccauc

SEQ ID NO: 894175 - RNA, 19 nt, Artificial Sequence
  Description of Artificial Sequence: Synthetic oligonucleotide
cauuaagaucccgcaggga

SEQ ID NO: 894176 - RNA, 19 nt, Artificial Sequence
  Description of Artificial Sequence: Synthetic oligonucleotide
cccauaaugggcccacauc

SEQ ID NO: 894177 - RNA, 19 nt, Artificial Sequence
  Description of Artificial Sequence: Synthetic oligonucleotide
ggcguaggagcucccugcc

SEQ ID NO: 894178 - RNA, 19 nt, Artificial Sequence
  Description of Artificial Sequence: Synthetic oligonucleotide
agaucccgcagggaacgga

SEQ ID NO: 894179 - RNA, 19 nt, Artificial Sequence
  Description of Artificial Sequence: Synthetic oligonucleotide
caaccugcuccaggucucc

SEQ ID NO: 894180 - RNA, 19 nt, Artificial Sequence
  Description of Artificial Sequence: Synthetic oligonucleotide
ccaucauaccgacgucccg

SEQ ID NO: 894181 - RNA, 19 nt, Artificial Sequence
  Description of Artificial Sequence: Synthetic oligonucleotide
caacacuauggaagcccga

SEQ ID NO: 894182 - RNA, 19 nt, Artificial Sequence
  Description of Artificial Sequence: Synthetic oligonucleotide
agggcagcguggguccuag

SEQ ID NO: 894183 - RNA, 19 nt, Artificial Sequence
  Description of Artificial Sequence: Synthetic oligonucleotide
ccgucagguccucaggcag

SEQ ID NO: 894184 - RNA, 19 nt, Artificial Sequence
  Description of Artificial Sequence: Synthetic oligonucleotide
aggaccugucgaaguuggg

SEQ ID NO: 894185 - RNA, 19 nt, Artificial Sequence
  Description of Artificial Sequence: Synthetic oligonucleotide
ggugccgccucuccucccc

SEQ ID NO: 894186 - RNA, 19 nt, Artificial Sequence
  Description of Artificial Sequence: Synthetic oligonucleotide
ggaugaggccgaagcaccc

SEQ ID NO: 894187 - RNA, 19 nt, Artificial Sequence
  Description of Artificial Sequence: Synthetic oligonucleotide
ccgacgucccggaaauaag

SEQ ID NO: 894188 - RNA, 19 nt, Artificial Sequence
  Description of Artificial Sequence: Synthetic oligonucleotide
gcaccaccgguugaacagg

SEQ ID NO: 894189 - RNA, 19 nt, Artificial Sequence
  Description of Artificial Sequence: Synthetic oligonucleotide
ggccguagcugguuggcca

SEQ ID NO: 894190 - RNA, 19 nt, Artificial Sequence
  Description of Artificial Sequence: Synthetic oligonucleotide
cagggaacggaggcugcac

SEQ ID NO: 894191 - RNA, 19 nt, Artificial Sequence
  Description of Artificial Sequence: Synthetic oligonucleotide
ccgaguguacacggcauag

SEQ ID NO: 894192 - RNA, 19 nt, Artificial Sequence
  Description of Artificial Sequence: Synthetic oligonucleotide
cuagugggguaaagggcua

SEQ ID NO: 894193 - RNA, 19 nt, Artificial Sequence
  Description of Artificial Sequence: Synthetic oligonucleotide
uccggccuccauuguuaaa

SEQ ID NO: 894194 - RNA, 19 nt, Artificial Sequence
  Description of Artificial Sequence: Synthetic oligonucleotide
accaccgguugaacaggag

SEQ ID NO: 894195 - RNA, 19 nt, Artificial Sequence
  Description of Artificial Sequence: Synthetic oligonucleotide
ccccggaggagauccgagg

SEQ ID NO: 894196 - RNA, 19 nt, Artificial Sequence
  Description of Artificial Sequence: Synthetic oligonucleotide
caccaccgguugaacagga

SEQ ID NO: 894197 - RNA, 19 nt, Artificial Sequence
  Description of Artificial Sequence: Synthetic oligonucleotide
gaggacaugaaggcaccau

SEQ ID NO: 894198 - RNA, 19 nt, Artificial Sequence
  Description of Artificial Sequence: Synthetic oligonucleotide
ccggaggagauccgagggc

SEQ ID NO: 894199 - RNA, 19 nt, Artificial Sequence
  Description of Artificial Sequence: Synthetic oligonucleotide
gccuccauuguuaaauacu

SEQ ID NO: 894200 - RNA, 19 nt, Artificial Sequence
  Description of Artificial Sequence: Synthetic oligonucleotide
cgggagacacgguuacagg

SEQ ID NO: 894201 - RNA, 19 nt, Artificial Sequence
  Description of Artificial Sequence: Synthetic oligonucleotide
ggcacuagaguggggcuuc

SEQ ID NO: 894202 - RNA, 19 nt, Artificial Sequence
  Description of Artificial Sequence: Synthetic oligonucleotide
gauggcguaggagcucccu

SEQ ID NO: 894203 - RNA, 19 nt, Artificial Sequence
  Description of Artificial Sequence: Synthetic oligonucleotide
uggacuucggugggccauu

SEQ ID NO: 894204 - RNA, 19 nt, Artificial Sequence
  Description of Artificial Sequence: Synthetic oligonucleotide
gccaaggucugucaucccu

SEQ ID NO: 894205 - RNA, 19 nt, Artificial Sequence
  Description of Artificial Sequence: Synthetic oligonucleotide
agccgaguguacacggcau

SEQ ID NO: 894206 - RNA, 19 nt, Artificial Sequence
  Description of Artificial Sequence: Synthetic oligonucleotide
ggcggcagaaggagaccgg

SEQ ID NO: 894207 - RNA, 19 nt, Artificial Sequence
  Description of Artificial Sequence: Synthetic oligonucleotide
ccaggcggaccagaggaag

SEQ ID NO: 894208 - RNA, 19 nt, Artificial Sequence
  Description of Artificial Sequence: Synthetic oligonucleotide
ccuaggagcccaggagccg

SEQ ID NO: 894209 - RNA, 19 nt, Artificial Sequence
  Description of Artificial Sequence: Synthetic oligonucleotide
cacuagaguggggcuucug

SEQ ID NO: 894210 - RNA, 19 nt, Artificial Sequence
  Description of Artificial Sequence: Synthetic oligonucleotide
gcaaagugucugggugccg

SEQ ID NO: 894211 - RNA, 19 nt, Artificial Sequence
  Description of Artificial Sequence: Synthetic oligonucleotide
auccgagggcgagcacagg

SEQ ID NO: 894212 - RNA, 19 nt, Artificial Sequence
  Description of Artificial Sequence: Synthetic oligonucleotide
gcguaggagcucccugccc

SEQ ID NO: 894213 - RNA, 19 nt, Artificial Sequence
  Description of Artificial Sequence: Synthetic oligonucleotide
gcgaggccguagcugguug

SEQ ID NO: 894214 - RNA, 19 nt, Artificial Sequence
  Description of Artificial Sequence: Synthetic oligonucleotide
gcagaaggagaccggaauu

SEQ ID NO: 894215 - RNA, 19 nt, Artificial Sequence
  Description of Artificial Sequence: Synthetic oligonucleotide
ccacucugagaggaugaac

SEQ ID NO: 894216 - RNA, 19 nt, Artificial Sequence
  Description of Artificial Sequence: Synthetic oligonucleotide
ccgagggcgagcacagguc

SEQ ID NO: 894217 - RNA, 19 nt, Artificial Sequence
  Description of Artificial Sequence: Synthetic oligonucleotide
gguugaacaggaggacuua

SEQ ID NO: 894218 - RNA, 19 nt, Artificial Sequence
  Description of Artificial Sequence: Synthetic oligonucleotide
ggugucugaggcggcagaa

SEQ ID NO: 894219 - RNA, 19 nt, Artificial Sequence
  Description of Artificial Sequence: Synthetic oligonucleotide
agcgaggccguagcugguu

SEQ ID NO: 894220 - RNA, 19 nt, Artificial Sequence
  Description of Artificial Sequence: Synthetic oligonucleotide
gaccggaauucgggagaca

SEQ ID NO: 894221 - RNA, 19 nt, Artificial Sequence
  Description of Artificial Sequence: Synthetic oligonucleotide
gcccacaucccuacaaaua

SEQ ID NO: 894222 - RNA, 19 nt, Artificial Sequence
  Description of Artificial Sequence: Synthetic oligonucleotide
caucagcacuaguggggua

SEQ ID NO: 894223 - RNA, 19 nt, Artificial Sequence
  Description of Artificial Sequence: Synthetic oligonucleotide
gaagggccugagccacucu

SEQ ID NO: 894224 - RNA, 19 nt, Artificial Sequence
  Description of Artificial Sequence: Synthetic oligonucleotide
gccguagcugguuggccaa

SEQ ID NO: 894225 - RNA, 19 nt, Artificial Sequence
  Description of Artificial Sequence: Synthetic oligonucleotide
gugccccggaggagauccg

SEQ ID NO: 894226 - RNA, 19 nt, Artificial Sequence
  Description of Artificial Sequence: Synthetic oligonucleotide
ggaggagauccgagggcga

SEQ ID NO: 894227 - RNA, 19 nt, Artificial Sequence
  Description of Artificial Sequence: Synthetic oligonucleotide
ggacuucggugggccauug

SEQ ID NO: 894228 - RNA, 19 nt, Artificial Sequence
  Description of Artificial Sequence: Synthetic oligonucleotide
gccgaguguacacggcaua

SEQ ID NO: 894229 - RNA, 19 nt, Artificial Sequence
  Description of Artificial Sequence: Synthetic oligonucleotide
cucccgcuccugccacaac

SEQ ID NO: 894230 - RNA, 19 nt, Artificial Sequence
  Description of Artificial Sequence: Synthetic oligonucleotide
gacacaggggugggcuccu

SEQ ID NO: 894231 - RNA, 19 nt, Artificial Sequence
  Description of Artificial Sequence: Synthetic oligonucleotide
gccccggaggagauccgag

SEQ ID NO: 894232 - RNA, 19 nt, Artificial Sequence
  Description of Artificial Sequence: Synthetic oligonucleotide
accccacuggcgagagccu

SEQ ID NO: 894233 - RNA, 19 nt, Artificial Sequence
  Description of Artificial Sequence: Synthetic oligonucleotide
ggcuaguguggaggacaug

SEQ ID NO: 894234 - RNA, 19 nt, Artificial Sequence
  Description of Artificial Sequence: Synthetic oligonucleotide
ggcggaccagaggaagguc

SEQ ID NO: 894235 - RNA, 19 nt, Artificial Sequence
  Description of Artificial Sequence: Synthetic oligonucleotide
ggguugcuauccagcagaa

SEQ ID NO: 894236 - RNA, 19 nt, Artificial Sequence
  Description of Artificial Sequence: Synthetic oligonucleotide
uaccgacgucccggaaaua

SEQ ID NO: 894237 - RNA, 19 nt, Artificial Sequence
  Description of Artificial Sequence: Synthetic oligonucleotide
cuggacuucggugggccau

SEQ ID NO: 894238 - RNA, 19 nt, Artificial Sequence
  Description of Artificial Sequence: Synthetic oligonucleotide
uggugccccggaggagauc

SEQ ID NO: 894239 - RNA, 19 nt, Artificial Sequence
  Description of Artificial Sequence: Synthetic oligonucleotide
cccaucuuccgacaggcuu

SEQ ID NO: 894240 - RNA, 19 nt, Artificial Sequence
  Description of Artificial Sequence: Synthetic oligonucleotide
gcugguuccuccgaacauu

SEQ ID NO: 894241 - RNA, 19 nt, Artificial Sequence
  Description of Artificial Sequence: Synthetic oligonucleotide
gccccuggguggugccccg

SEQ ID NO: 894242 - RNA, 19 nt, Artificial Sequence
  Description of Artificial Sequence: Synthetic oligonucleotide
gcccauaaugggcccacau

SEQ ID NO: 894243 - RNA, 19 nt, Artificial Sequence
  Description of Artificial Sequence: Synthetic oligonucleotide
gggcagcguggguccuagg

SEQ ID NO: 894244 - RNA, 19 nt, Artificial Sequence
  Description of Artificial Sequence: Synthetic oligonucleotide
ggccgccaucauaccgacg

SEQ ID NO: 894245 - RNA, 19 nt, Artificial Sequence
  Description of Artificial Sequence: Synthetic oligonucleotide
gagccuccgucagguccuc

SEQ ID NO: 894246 - RNA, 19 nt, Artificial Sequence
  Description of Artificial Sequence: Synthetic oligonucleotide
cgacgucccggaaauaagu

SEQ ID NO: 894247 - RNA, 19 nt, Artificial Sequence
  Description of Artificial Sequence: Synthetic oligonucleotide
cugccacugucaacacuau

SEQ ID NO: 894248 - RNA, 19 nt, Artificial Sequence
  Description of Artificial Sequence: Synthetic oligonucleotide
ccggccuccauuguuaaau

SEQ ID NO: 894249 - RNA, 19 nt, Artificial Sequence
  Description of Artificial Sequence: Synthetic oligonucleotide
gguacagagcgaggccgua

SEQ ID NO: 894250 - RNA, 19 nt, Artificial Sequence
  Description of Artificial Sequence: Synthetic oligonucleotide
ccgccugccgcucccuguc

SEQ ID NO: 894251 - RNA, 19 nt, Artificial Sequence
  Description of Artificial Sequence: Synthetic oligonucleotide
ggaauucgggagacacggu

SEQ ID NO: 894252 - RNA, 19 nt, Artificial Sequence
  Description of Artificial Sequence: Synthetic oligonucleotide
gccgugacucaaggaccug

SEQ ID NO: 894253 - RNA, 19 nt, Artificial Sequence
  Description of Artificial Sequence: Synthetic oligonucleotide
cuguguggaugaggccgaa

SEQ ID NO: 894254 - RNA, 19 nt, Artificial Sequence
  Description of Artificial Sequence: Synthetic oligonucleotide
ggguacagagcgaggccgu

SEQ ID NO: 894255 - RNA, 19 nt, Artificial Sequence
  Description of Artificial Sequence: Synthetic oligonucleotide
ccgccaucauaccgacguc

SEQ ID NO: 894256 - RNA, 19 nt, Artificial Sequence
  Description of Artificial Sequence: Synthetic oligonucleotide
cgaagcacccguggcucug

SEQ ID NO: 894257 - RNA, 19 nt, Artificial Sequence
  Description of Artificial Sequence: Synthetic oligonucleotide
ggacagagggcuggcuagu

SEQ ID NO: 894258 - RNA, 19 nt, Artificial Sequence
  Description of Artificial Sequence: Synthetic oligonucleotide
cgaguguacacggcauaga

SEQ ID NO: 894259 - RNA, 19 nt, Artificial Sequence
  Description of Artificial Sequence: Synthetic oligonucleotide
ccugucgaaguugggacau

SEQ ID NO: 894260 - RNA, 19 nt, Artificial Sequence
  Description of Artificial Sequence: Synthetic oligonucleotide
cugcaggcuccucccgccu

SEQ ID NO: 894261 - RNA, 19 nt, Artificial Sequence
  Description of Artificial Sequence: Synthetic oligonucleotide
cgguugaacaggaggacuu

SEQ ID NO: 894262 - RNA, 19 nt, Artificial Sequence
  Description of Artificial Sequence: Synthetic oligonucleotide
ccgguugaacaggaggacu

SEQ ID NO: 894263 - RNA, 19 nt, Artificial Sequence
  Description of Artificial Sequence: Synthetic oligonucleotide
gagcgaggccguagcuggu

SEQ ID NO: 894264 - RNA, 19 nt, Artificial Sequence
  Description of Artificial Sequence: Synthetic oligonucleotide
agccuccagugugguccga

SEQ ID NO: 894265 - RNA, 19 nt, Artificial Sequence
  Description of Artificial Sequence: Synthetic oligonucleotide
ggcccauaaugggcccaca

SEQ ID NO: 894266 - RNA, 19 nt, Artificial Sequence
  Description of Artificial Sequence: Synthetic oligonucleotide
ccguagcugguuggccaac

SEQ ID NO: 894267 - RNA, 19 nt, Artificial Sequence
  Description of Artificial Sequence: Synthetic oligonucleotide
aucuuccgacaggcuucua

SEQ ID NO: 894268 - RNA, 19 nt, Artificial Sequence
  Description of Artificial Sequence: Synthetic oligonucleotide
gggcacuagaguggggcuu

SEQ ID NO: 894269 - RNA, 19 nt, Artificial Sequence
  Description of Artificial Sequence: Synthetic oligonucleotide
ccgugacucaaggaccugu

SEQ ID NO: 894270 - RNA, 19 nt, Artificial Sequence
  Description of Artificial Sequence: Synthetic oligonucleotide
guggugccccggaggagau

SEQ ID NO: 894271 - RNA, 19 nt, Artificial Sequence
  Description of Artificial Sequence: Synthetic oligonucleotide
ccuuccggccuccauuguu

SEQ ID NO: 894272 - RNA, 19 nt, Artificial Sequence
  Description of Artificial Sequence: Synthetic oligonucleotide
ggcaggguacugagcuggu

SEQ ID NO: 894273 - RNA, 19 nt, Artificial Sequence
  Description of Artificial Sequence: Synthetic oligonucleotide
gggguacacuagugucuuu

SEQ ID NO: 894274 - RNA, 19 nt, Artificial Sequence
  Description of Artificial Sequence: Synthetic oligonucleotide
gcccgaguccaggccgcca

SEQ ID NO: 894275 - RNA, 19 nt, Artificial Sequence
  Description of Artificial Sequence: Synthetic oligonucleotide
ccgaagcacccguggcucu

SEQ ID NO: 894276 - RNA, 19 nt, Artificial Sequence
  Description of Artificial Sequence: Synthetic oligonucleotide
cguagcugguuggccaacu

SEQ ID NO: 894277 - RNA, 19 nt, Artificial Sequence
  Description of Artificial Sequence: Synthetic oligonucleotide
cucccgccugccgcucccu

SEQ ID NO: 894278 - RNA, 19 nt, Artificial Sequence
  Description of Artificial Sequence: Synthetic oligonucleotide
uuugcuauuggcaagaggc

SEQ ID NO: 894279 - RNA, 19 nt, Artificial Sequence
  Description of Artificial Sequence: Synthetic oligonucleotide
aaaggugaaacgugggugc

SEQ ID NO: 894280 - RNA, 19 nt, Artificial Sequence
  Description of Artificial Sequence: Synthetic oligonucleotide
uuaaaguucaccuccagga

SEQ ID NO: 894281 - RNA, 19 nt, Artificial Sequence
  Description of Artificial Sequence: Synthetic oligonucleotide
uggaguacaacacagggug

SEQ ID NO: 894282 - RNA, 19 nt, Artificial Sequence
  Description of Artificial Sequence: Synthetic oligonucleotide
uuugacauuccccacaucu

SEQ ID NO: 894283 - RNA, 19 nt, Artificial Sequence
  Description of Artificial Sequence: Synthetic oligonucleotide
acacgaacaagcuaagugg

SEQ ID NO: 894284 - RNA, 19 nt, Artificial Sequence
  Description of Artificial Sequence: Synthetic oligonucleotide
ucauacacgaacaagcuaa

SEQ ID NO: 894285 - RNA, 19 nt, Artificial Sequence
  Description of Artificial Sequence: Synthetic oligonucleotide
aagcuaaguggcuucaccg

SEQ ID NO: 894286 - RNA, 19 nt, Artificial Sequence
  Description of Artificial Sequence: Synthetic oligonucleotide
uacacgaacaagcuaagug

SEQ ID NO: 894287 - RNA, 19 nt, Artificial Sequence
  Description of Artificial Sequence: Synthetic oligonucleotide
uucucgaaggaacaagacg

SEQ ID NO: 894288 - RNA, 19 nt, Artificial Sequence
  Description of Artificial Sequence: Synthetic oligonucleotide
auaugaagcaggaacaugg

SEQ ID NO: 894289 - RNA, 19 nt, Artificial Sequence
  Description of Artificial Sequence: Synthetic oligonucleotide
ucguccagaaacaaggugc

SEQ ID NO: 894290 - RNA, 19 nt, Artificial Sequence
  Description of Artificial Sequence: Synthetic oligonucleotide
gaugccagcaugcagagac

SEQ ID NO: 894291 - RNA, 19 nt, Artificial Sequence
  Description of Artificial Sequence: Synthetic oligonucleotide
auggcuaucccacuugagc

SEQ ID NO: 894292 - RNA, 19 nt, Artificial Sequence
  Description of Artificial Sequence: Synthetic oligonucleotide
gaacuuaucauagugcacc

SEQ ID NO: 894293 - RNA, 19 nt, Artificial Sequence
  Description of Artificial Sequence: Synthetic oligonucleotide
uacauaugaagcaggaaca

SEQ ID NO: 894294 - RNA, 19 nt, Artificial Sequence
  Description of Artificial Sequence: Synthetic oligonucleotide
uuugaagugugagaagugg

SEQ ID NO: 894295 - RNA, 19 nt, Artificial Sequence
  Description of Artificial Sequence: Synthetic oligonucleotide
ucaguacgcagguugaagg

SEQ ID NO: 894296 - RNA, 19 nt, Artificial Sequence
  Description of Artificial Sequence: Synthetic oligonucleotide
ugcaccuagaugaugcggg

SEQ ID NO: 894297 - RNA, 19 nt, Artificial Sequence
  Description of Artificial Sequence: Synthetic oligonucleotide
aaaggccuauuggagaagc

SEQ ID NO: 894298 - RNA, 19 nt, Artificial Sequence
  Description of Artificial Sequence: Synthetic oligonucleotide
aacucaagaggacagugga

SEQ ID NO: 894299 - RNA, 19 nt, Artificial Sequence
  Description of Artificial Sequence: Synthetic oligonucleotide
ugucaaauuugacauuccc

SEQ ID NO: 894300 - RNA, 19 nt, Artificial Sequence
  Description of Artificial Sequence: Synthetic oligonucleotide
ucgucuaggucauugagug

SEQ ID NO: 894301 - RNA, 19 nt, Artificial Sequence
  Description of Artificial Sequence: Synthetic oligonucleotide
agugcgaaaggccuauugg

SEQ ID NO: 894302 - RNA, 19 nt, Artificial Sequence
  Description of Artificial Sequence: Synthetic oligonucleotide
ugauguccuacauaugaag

SEQ ID NO: 894303 - RNA, 19 nt, Artificial Sequence
  Description of Artificial Sequence: Synthetic oligonucleotide
guuaaaguucaccuccagg

SEQ ID NO: 894304 - RNA, 19 nt, Artificial Sequence
  Description of Artificial Sequence: Synthetic oligonucleotide
caagacgggacuuucaaug

SEQ ID NO: 894305 - RNA, 19 nt, Artificial Sequence
  Description of Artificial Sequence: Synthetic oligonucleotide
gaacacgucauacacgaac

SEQ ID NO: 894306 - RNA, 19 nt, Artificial Sequence
  Description of Artificial Sequence: Synthetic oligonucleotide
ucauugagugcgaaaggcc

SEQ ID NO: 894307 - RNA, 19 nt, Artificial Sequence
  Description of Artificial Sequence: Synthetic oligonucleotide
gucuaggucauugagugcg

SEQ ID NO: 894308 - RNA, 19 nt, Artificial Sequence
  Description of Artificial Sequence: Synthetic oligonucleotide
uucaugacagugaaaugcu

SEQ ID NO: 894309 - RNA, 19 nt, Artificial Sequence
  Description of Artificial Sequence: Synthetic oligonucleotide
aacuggggcagcucaguac

SEQ ID NO: 894310 - RNA, 19 nt, Artificial Sequence
  Description of Artificial Sequence: Synthetic oligonucleotide
ugcgaaaggccuauuggag

SEQ ID NO: 894311 - RNA, 19 nt, Artificial Sequence
  Description of Artificial Sequence: Synthetic oligonucleotide
guuggucucguccagaaac

SEQ ID NO: 894312 - RNA, 19 nt, Artificial Sequence
  Description of Artificial Sequence: Synthetic oligonucleotide
uauacagcccgagaugagg

SEQ ID NO: 894313 - RNA, 19 nt, Artificial Sequence
  Description of Artificial Sequence: Synthetic oligonucleotide
gucucguccagaaacaagg

SEQ ID NO: 894314 - RNA, 19 nt, Artificial Sequence
  Description of Artificial Sequence: Synthetic oligonucleotide
ggacuuucaauguacuugg

SEQ ID NO: 894315 - RNA, 19 nt, Artificial Sequence
  Description of Artificial Sequence: Synthetic oligonucleotide
ugauacccugcuuacacca

SEQ ID NO: 894316 - RNA, 19 nt, Artificial Sequence
  Description of Artificial Sequence: Synthetic oligonucleotide
agcauauacagcccgagau

SEQ ID NO: 894317 - RNA, 19 nt, Artificial Sequence
  Description of Artificial Sequence: Synthetic oligonucleotide
gaagguucggggcagccag

SEQ ID NO: 894318 - RNA, 19 nt, Artificial Sequence
  Description of Artificial Sequence: Synthetic oligonucleotide
cuagaaccagcuuugagca

SEQ ID NO: 894319 - RNA, 19 nt, Artificial Sequence
  Description of Artificial Sequence: Synthetic oligonucleotide
ucucggugccgaaugaugc

SEQ ID NO: 894320 - RNA, 19 nt, Artificial Sequence
  Description of Artificial Sequence: Synthetic oligonucleotide
aagguguuaggaggugugc

SEQ ID NO: 894321 - RNA, 19 nt, Artificial Sequence
  Description of Artificial Sequence: Synthetic oligonucleotide
aacuuaucauagugcaccu

SEQ ID NO: 894322 - RNA, 19 nt, Artificial Sequence
  Description of Artificial Sequence: Synthetic oligonucleotide
aacauagcggaugucaaau

SEQ ID NO: 894323 - RNA, 19 nt, Artificial Sequence
  Description of Artificial Sequence: Synthetic oligonucleotide
cacgaacaagcuaaguggc

SEQ ID NO: 894324 - RNA, 19 nt, Artificial Sequence
  Description of Artificial Sequence: Synthetic oligonucleotide
aagacgggacuuucaaugu

SEQ ID NO: 894325 - RNA, 19 nt, Artificial Sequence
  Description of Artificial Sequence: Synthetic oligonucleotide
uguuaggaggugugcagag

SEQ ID NO: 894326 - RNA, 19 nt, Artificial Sequence
  Description of Artificial Sequence: Synthetic oligonucleotide
gauaccacuuacuguccag

SEQ ID NO: 894327 - RNA, 19 nt, Artificial Sequence
  Description of Artificial Sequence: Synthetic oligonucleotide
uccuacauaugaagcagga

SEQ ID NO: 894328 - RNA, 19 nt, Artificial Sequence
  Description of Artificial Sequence: Synthetic oligonucleotide
ucgcagaggcccaugggcg

SEQ ID NO: 894329 - RNA, 19 nt, Artificial Sequence
  Description of Artificial Sequence: Synthetic oligonucleotide
ugaacuuaucauagugcac

SEQ ID NO: 894330 - RNA, 19 nt, Artificial Sequence
  Description of Artificial Sequence: Synthetic oligonucleotide
aaccucacaacaccagagu

SEQ ID NO: 894331 - RNA, 19 nt, Artificial Sequence
  Description of Artificial Sequence: Synthetic oligonucleotide
caacucaagaggacagugg

SEQ ID NO: 894332 - RNA, 19 nt, Artificial Sequence
  Description of Artificial Sequence: Synthetic oligonucleotide
uggaggcucaucaaaggac

SEQ ID NO: 894333 - RNA, 19 nt, Artificial Sequence
  Description of Artificial Sequence: Synthetic oligonucleotide
gucaaauuugacauucccc

SEQ ID NO: 894334 - RNA, 19 nt, Artificial Sequence
  Description of Artificial Sequence: Synthetic oligonucleotide
uauaaggcuggguuggcaa

SEQ ID NO: 894335 - RNA, 19 nt, Artificial Sequence
  Description of Artificial Sequence: Synthetic oligonucleotide
cucgcuuuccaucuggaug

SEQ ID NO: 894336 - RNA, 19 nt, Artificial Sequence
  Description of Artificial Sequence: Synthetic oligonucleotide
uagcggaugucaaauuuga

SEQ ID NO: 894337 - RNA, 19 nt, Artificial Sequence
  Description of Artificial Sequence: Synthetic oligonucleotide
auaccacuuacuguccagc

SEQ ID NO: 894338 - RNA, 19 nt, Artificial Sequence
  Description of Artificial Sequence: Synthetic oligonucleotide
agguauaaggcuggguugg

SEQ ID NO: 894339 - RNA, 19 nt, Artificial Sequence
  Description of Artificial Sequence: Synthetic oligonucleotide
aacacgucauacacgaaca

SEQ ID NO: 894340 - RNA, 19 nt, Artificial Sequence
  Description of Artificial Sequence: Synthetic oligonucleotide
uagcugacaaacuggggca

SEQ ID NO: 894341 - RNA, 19 nt, Artificial Sequence
  Description of Artificial Sequence: Synthetic oligonucleotide
gaagcguagccagaacacg

SEQ ID NO: 894342 - RNA, 19 nt, Artificial Sequence
  Description of Artificial Sequence: Synthetic oligonucleotide
uucaccgaacgcaggagca

SEQ ID NO: 894343 - RNA, 19 nt, Artificial Sequence
  Description of Artificial Sequence: Synthetic oligonucleotide
ugaaacgugggugcgugag

SEQ ID NO: 894344 - RNA, 19 nt, Artificial Sequence
  Description of Artificial Sequence: Synthetic oligonucleotide
gaugcgggugacgugacag

SEQ ID NO: 894345 - RNA, 19 nt, Artificial Sequence
  Description of Artificial Sequence: Synthetic oligonucleotide
aguaaaggugaaacguggg

SEQ ID NO: 894346 - RNA, 19 nt, Artificial Sequence
  Description of Artificial Sequence: Synthetic oligonucleotide
gucauugagugcgaaaggc

SEQ ID NO: 894347 - RNA, 19 nt, Artificial Sequence
  Description of Artificial Sequence: Synthetic oligonucleotide
cucccguugcugaaaauag

SEQ ID NO: 894348 - RNA, 19 nt, Artificial Sequence
  Description of Artificial Sequence: Synthetic oligonucleotide
cuuuacagucagcagguuc

SEQ ID NO: 894349 - RNA, 19 nt, Artificial Sequence
  Description of Artificial Sequence: Synthetic oligonucleotide
ggggauaccacuuacuguc

SEQ ID NO: 894350 - RNA, 19 nt, Artificial Sequence
  Description of Artificial Sequence: Synthetic oligonucleotide
caaacucucuggaugccag

SEQ ID NO: 894351 - RNA, 19 nt, Artificial Sequence
  Description of Artificial Sequence: Synthetic oligonucleotide
ugugcaccuagaugaugcg

SEQ ID NO: 894352 - RNA, 19 nt, Artificial Sequence
  Description of Artificial Sequence: Synthetic oligonucleotide
ugcaggcucgcucacaguc

SEQ ID NO: 894353 - RNA, 19 nt, Artificial Sequence
  Description of Artificial Sequence: Synthetic oligonucleotide
gaugaugcgggugacguga

SEQ ID NO: 894354 - RNA, 19 nt, Artificial Sequence
  Description of Artificial Sequence: Synthetic oligonucleotide
cuugaccaacucaagagga

SEQ ID NO: 894355 - RNA, 19 nt, Artificial Sequence
  Description of Artificial Sequence: Synthetic oligonucleotide
gaugccuagguauaaggcu

SEQ ID NO: 894356 - RNA, 19 nt, Artificial Sequence
  Description of Artificial Sequence: Synthetic oligonucleotide
gacucugggagagaacucc

SEQ ID NO: 894357 - RNA, 19 nt, Artificial Sequence
  Description of Artificial Sequence: Synthetic oligonucleotide
accuagaugaugcggguga

SEQ ID NO: 894358 - RNA, 19 nt, Artificial Sequence
  Description of Artificial Sequence: Synthetic oligonucleotide
caggagcacaacauagcgg

SEQ ID NO: 894359 - RNA, 19 nt, Artificial Sequence
  Description of Artificial Sequence: Synthetic oligonucleotide
ucaagaggacaguggaacu

SEQ ID NO: 894360 - RNA, 19 nt, Artificial Sequence
  Description of Artificial Sequence: Synthetic oligonucleotide
uugcuauuggcaagaggca

SEQ ID NO: 894361 - RNA, 19 nt, Artificial Sequence
  Description of Artificial Sequence: Synthetic oligonucleotide
uugaccaacucaagaggac

SEQ ID NO: 894362 - RNA, 19 nt, Artificial Sequence
  Description of Artificial Sequence: Synthetic oligonucleotide
gaaacgugggugcgugagg

SEQ ID NO: 894363 - RNA, 19 nt, Artificial Sequence
  Description of Artificial Sequence: Synthetic oligonucleotide
aguucaugacagugaaaug

SEQ ID NO: 894364 - RNA, 19 nt, Artificial Sequence
  Description of Artificial Sequence: Synthetic oligonucleotide
ugaccaacucaagaggaca

SEQ ID NO: 894365 - RNA, 19 nt, Artificial Sequence
  Description of Artificial Sequence: Synthetic oligonucleotide
aaacgugggugcgugaggu

SEQ ID NO: 894366 - RNA, 19 nt, Artificial Sequence
  Description of Artificial Sequence: Synthetic oligonucleotide
agaccaugggucucuaaca

SEQ ID NO: 894367 - RNA, 19 nt, Artificial Sequence
  Description of Artificial Sequence: Synthetic oligonucleotide
agaaccagcuuugagcacu

SEQ ID NO: 894368 - RNA, 19 nt, Artificial Sequence
  Description of Artificial Sequence: Synthetic oligonucleotide
uacgcagguugaagguucg

SEQ ID NO: 894369 - RNA, 19 nt, Artificial Sequence
  Description of Artificial Sequence: Synthetic oligonucleotide
augguguggaccugauguc

SEQ ID NO: 894370 - RNA, 19 nt, Artificial Sequence
  Description of Artificial Sequence: Synthetic oligonucleotide
caugguguggaccugaugu

SEQ ID NO: 894371 - RNA, 19 nt, Artificial Sequence
  Description of Artificial Sequence: Synthetic oligonucleotide
cauacacgaacaagcuaag

SEQ ID NO: 894372 - RNA, 19 nt, Artificial Sequence
  Description of Artificial Sequence: Synthetic oligonucleotide
cuucaccgaacgcaggagc

SEQ ID NO: 894373 - RNA, 19 nt, Artificial Sequence
  Description of Artificial Sequence: Synthetic oligonucleotide
ugacgugagugucuaggcu

SEQ ID NO: 894374 - RNA, 19 nt, Artificial Sequence
  Description of Artificial Sequence: Synthetic oligonucleotide
uacaccagucaugggaaag

SEQ ID NO: 894375 - RNA, 19 nt, Artificial Sequence
  Description of Artificial Sequence: Synthetic oligonucleotide
gucgcagaggcccaugggc

SEQ ID NO: 894376 - RNA, 19 nt, Artificial Sequence
  Description of Artificial Sequence: Synthetic oligonucleotide
gggacuuucaauguacuug

SEQ ID NO: 894377 - RNA, 19 nt, Artificial Sequence
  Description of Artificial Sequence: Synthetic oligonucleotide
cuucucgaaggaacaagac

SEQ ID NO: 894378 - RNA, 19 nt, Artificial Sequence
  Description of Artificial Sequence: Synthetic oligonucleotide
aacgcaggagcacaacaua

SEQ ID NO: 894379 - RNA, 19 nt, Artificial Sequence
  Description of Artificial Sequence: Synthetic oligonucleotide
gagugcgaaaggccuauug

SEQ ID NO: 894380 - RNA, 19 nt, Artificial Sequence
  Description of Artificial Sequence: Synthetic oligonucleotide
augggcgguggcuuggcac

SEQ ID NO: 894381 - RNA, 19 nt, Artificial Sequence
  Description of Artificial Sequence: Synthetic oligonucleotide
cauaguucaugacagugaa

SEQ ID NO: 894382 - RNA, 19 nt, Artificial Sequence
  Description of Artificial Sequence: Synthetic oligonucleotide
gcuuacaccagucauggga

SEQ ID NO: 894383 - RNA, 19 nt, Artificial Sequence
  Description of Artificial Sequence: Synthetic oligonucleotide
cauauacagcccgagauga

SEQ ID NO: 894384 - RNA, 19 nt, Artificial Sequence
  Description of Artificial Sequence: Synthetic oligonucleotide
gaacaagcuaaguggcuuc

SEQ ID NO: 894385 - RNA, 19 nt, Artificial Sequence
  Description of Artificial Sequence: Synthetic oligonucleotide
acaccagucaugggaaagg

SEQ ID NO: 894386 - RNA, 19 nt, Artificial Sequence
  Description of Artificial Sequence: Synthetic oligonucleotide
cagugagaugccagcaugc

SEQ ID NO: 894387 - RNA, 19 nt, Artificial Sequence
  Description of Artificial Sequence: Synthetic oligonucleotide
cuauuggcaagaggcagcc

SEQ ID NO: 894388 - RNA, 19 nt, Artificial Sequence
  Description of Artificial Sequence: Synthetic oligonucleotide
auacagcccgagaugaggg

SEQ ID NO: 894389 - RNA, 19 nt, Artificial Sequence
  Description of Artificial Sequence: Synthetic oligonucleotide
guaucugcaggcucgcuca

SEQ ID NO: 894390 - RNA, 19 nt, Artificial Sequence
  Description of Artificial Sequence: Synthetic oligonucleotide
ugggucucuaacaguccag

SEQ ID NO: 894391 - RNA, 19 nt, Artificial Sequence
  Description of Artificial Sequence: Synthetic oligonucleotide
ucccguugcugaaaauagc

SEQ ID NO: 894392 - RNA, 19 nt, Artificial Sequence
  Description of Artificial Sequence: Synthetic oligonucleotide
cuuacaccagucaugggaa

SEQ ID NO: 894393 - RNA, 19 nt, Artificial Sequence
  Description of Artificial Sequence: Synthetic oligonucleotide
uggaacucagugagaugcc

SEQ ID NO: 894394 - RNA, 19 nt, Artificial Sequence
  Description of Artificial Sequence: Synthetic oligonucleotide
aucuucucgaaggaacaag

SEQ ID NO: 894395 - RNA, 19 nt, Artificial Sequence
  Description of Artificial Sequence: Synthetic oligonucleotide
uacagcccgagaugagggg

SEQ ID NO: 894396 - RNA, 19 nt, Artificial Sequence
  Description of Artificial Sequence: Synthetic oligonucleotide
cuaaguggcuucaccgaac

SEQ ID NO: 894397 - RNA, 19 nt, Artificial Sequence
  Description of Artificial Sequence: Synthetic oligonucleotide
agcuaaguggcuucaccga

SEQ ID NO: 894398 - RNA, 19 nt, Artificial Sequence
  Description of Artificial Sequence: Synthetic oligonucleotide
gugguagaggaugucggcg

SEQ ID NO: 894399 - RNA, 19 nt, Artificial Sequence
  Description of Artificial Sequence: Synthetic oligonucleotide
ggugacgugagugucuagg

SEQ ID NO: 894400 - RNA, 19 nt, Artificial Sequence
  Description of Artificial Sequence: Synthetic oligonucleotide
ugccaggaguaaaagcccu

SEQ ID NO: 894401 - RNA, 19 nt, Artificial Sequence
  Description of Artificial Sequence: Synthetic oligonucleotide
augccuagguauaaggcug

SEQ ID NO: 894402 - RNA, 19 nt, Artificial Sequence
  Description of Artificial Sequence: Synthetic oligonucleotide
ugacgugacagucguuggu

SEQ ID NO: 894403 - RNA, 19 nt, Artificial Sequence
  Description of Artificial Sequence: Synthetic oligonucleotide
aggaucuggggcugcauca

SEQ ID NO: 894404 - RNA, 19 nt, Artificial Sequence
  Description of Artificial Sequence: Synthetic oligonucleotide
aagcguagccagaacacgu

SEQ ID NO: 894405 - RNA, 19 nt, Artificial Sequence
  Description of Artificial Sequence: Synthetic oligonucleotide
cugauacccugcuuacacc

SEQ ID NO: 894406 - RNA, 19 nt, Artificial Sequence
  Description of Artificial Sequence: Synthetic oligonucleotide
ccagugguugucuucaccc

SEQ ID NO: 894407 - RNA, 19 nt, Artificial Sequence
  Description of Artificial Sequence: Synthetic oligonucleotide
uggcacaugccacuuggaa

SEQ ID NO: 894408 - RNA, 19 nt, Artificial Sequence
  Description of Artificial Sequence: Synthetic oligonucleotide
gugacgugagugucuaggc

SEQ ID NO: 894409 - RNA, 19 nt, Artificial Sequence
  Description of Artificial Sequence: Synthetic oligonucleotide
cacaacauagcggauguca

SEQ ID NO: 894410 - RNA, 19 nt, Artificial Sequence
  Description of Artificial Sequence: Synthetic oligonucleotide
ugguguggaccugaugucc

SEQ ID NO: 894411 - RNA, 19 nt, Artificial Sequence
  Description of Artificial Sequence: Synthetic oligonucleotide
gcugauacccugcuuacac

SEQ ID NO: 894412 - RNA, 19 nt, Artificial Sequence
  Description of Artificial Sequence: Synthetic oligonucleotide
uuuccaucuggauggcuau

SEQ ID NO: 894413 - RNA, 19 nt, Artificial Sequence
  Description of Artificial Sequence: Synthetic oligonucleotide
gacgggacuuucaauguac

SEQ ID NO: 894414 - RNA, 19 nt, Artificial Sequence
  Description of Artificial Sequence: Synthetic oligonucleotide
gugacagucguuggucucg

SEQ ID NO: 894415 - RNA, 19 nt, Artificial Sequence
  Description of Artificial Sequence: Synthetic oligonucleotide
uucacgucggagugaacuc

SEQ ID NO: 894416 - RNA, 19 nt, Artificial Sequence
  Description of Artificial Sequence: Synthetic oligonucleotide
uaccacuuacuguccagcu

SEQ ID NO: 894417 - RNA, 19 nt, Artificial Sequence
  Description of Artificial Sequence: Synthetic oligonucleotide
ggucauugagugcgaaagg

SEQ ID NO: 894418 - RNA, 19 nt, Artificial Sequence
  Description of Artificial Sequence: Synthetic oligonucleotide
gugacgugacagucguugg

SEQ ID NO: 894419 - RNA, 19 nt, Artificial Sequence
  Description of Artificial Sequence: Synthetic oligonucleotide
gugcgaaaggccuauugga

SEQ ID NO: 894420 - RNA, 19 nt, Artificial Sequence
  Description of Artificial Sequence: Synthetic oligonucleotide
acgugagugucuaggcugc

SEQ ID NO: 894421 - RNA, 19 nt, Artificial Sequence
  Description of Artificial Sequence: Synthetic oligonucleotide
ucuaggucauugagugcga

SEQ ID NO: 894422 - RNA, 19 nt, Artificial Sequence
  Description of Artificial Sequence: Synthetic oligonucleotide
cacgucauacacgaacaag

SEQ ID NO: 894423 - RNA, 19 nt, Artificial Sequence
  Description of Artificial Sequence: Synthetic oligonucleotide
caggguuaaaguucaccuc

SEQ ID NO: 894424 - RNA, 19 nt, Artificial Sequence
  Description of Artificial Sequence: Synthetic oligonucleotide
ggugacgugacagucguug

SEQ ID NO: 894425 - RNA, 19 nt, Artificial Sequence
  Description of Artificial Sequence: Synthetic oligonucleotide
aaggccuauuggagaagcg

SEQ ID NO: 894426 - RNA, 19 nt, Artificial Sequence
  Description of Artificial Sequence: Synthetic oligonucleotide
uugcugaaaauagcugaca

SEQ ID NO: 894427 - RNA, 19 nt, Artificial Sequence
  Description of Artificial Sequence: Synthetic oligonucleotide
agucgcagaggcccauggg

SEQ ID NO: 894428 - RNA, 19 nt, Artificial Sequence
  Description of Artificial Sequence: Synthetic oligonucleotide
agaauguggggugguaucu

SEQ ID NO: 894429 - RNA, 19 nt, Artificial Sequence
  Description of Artificial Sequence: Synthetic oligonucleotide
ggauacaggguucccaaac

SEQ ID NO: 894430 - RNA, 19 nt, Artificial Sequence
  Description of Artificial Sequence: Synthetic oligonucleotide
aguggaacucagugagaug

SEQ ID NO: 894431 - RNA, 19 nt, Artificial Sequence
  Description of Artificial Sequence: Synthetic oligonucleotide
auuugacauuccccacauc

SEQ ID NO: 894432 - RNA, 19 nt, Artificial Sequence
  Description of Artificial Sequence: Synthetic oligonucleotide
ugucuggggcaguauccag

SEQ ID NO: 894433 - RNA, 19 nt, Artificial Sequence
  Description of Artificial Sequence: Synthetic oligonucleotide
guccuacauaugaagcagg

SEQ ID NO: 894434 - RNA, 19 nt, Artificial Sequence
  Description of Artificial Sequence: Synthetic oligonucleotide
ggaacagcucuaugaaggc

SEQ ID NO: 894435 - RNA, 19 nt, Artificial Sequence
  Description of Artificial Sequence: Synthetic oligonucleotide
ucgaaggaacaagacggga

SEQ ID NO: 894436 - RNA, 19 nt, Artificial Sequence
  Description of Artificial Sequence: Synthetic oligonucleotide
uggacaccacuccaaggaa

SEQ ID NO: 894437 - RNA, 19 nt, Artificial Sequence
  Description of Artificial Sequence: Synthetic oligonucleotide
gcauauacagcccgagaug

SEQ ID NO: 894438 - RNA, 19 nt, Artificial Sequence
  Description of Artificial Sequence: Synthetic oligonucleotide
cucaguacgcagguugaag

SEQ ID NO: 894439 - RNA, 19 nt, Artificial Sequence
  Description of Artificial Sequence: Synthetic oligonucleotide
aaacuggggcagcucagua

SEQ ID NO: 894440 - RNA, 19 nt, Artificial Sequence
  Description of Artificial Sequence: Synthetic oligonucleotide
uggggaacucuguuucugu

SEQ ID NO: 894441 - RNA, 19 nt, Artificial Sequence
  Description of Artificial Sequence: Synthetic oligonucleotide
caguccuuuacagucagca

SEQ ID NO: 894442 - RNA, 19 nt, Artificial Sequence
  Description of Artificial Sequence: Synthetic oligonucleotide
agaugagggguagucgcag

SEQ ID NO: 894443 - RNA, 19 nt, Artificial Sequence
  Description of Artificial Sequence: Synthetic oligonucleotide
cuagguauaaggcuggguu

SEQ ID NO: 894444 - RNA, 19 nt, Artificial Sequence
  Description of Artificial Sequence: Synthetic oligonucleotide
ugggcgguggcuuggcaca

SEQ ID NO: 894445 - RNA, 19 nt, Artificial Sequence
  Description of Artificial Sequence: Synthetic oligonucleotide
guaaaggugaaacgugggu

SEQ ID NO: 894446 - RNA, 19 nt, Artificial Sequence
  Description of Artificial Sequence: Synthetic oligonucleotide
agcucggcgagcgauggag

SEQ ID NO: 894447 - RNA, 19 nt, Artificial Sequence
  Description of Artificial Sequence: Synthetic oligonucleotide
gagugucuaggcugcgggc

SEQ ID NO: 894448 - RNA, 19 nt, Artificial Sequence
  Description of Artificial Sequence: Synthetic oligonucleotide
cauugagugcgaaaggccu

SEQ ID NO: 894449 - RNA, 19 nt, Artificial Sequence
  Description of Artificial Sequence: Synthetic oligonucleotide
gauggcuaucccacuugag

SEQ ID NO: 894450 - RNA, 19 nt, Artificial Sequence
  Description of Artificial Sequence: Synthetic oligonucleotide
ucucucccguugcugaaaa

SEQ ID NO: 894451 - RNA, 19 nt, Artificial Sequence
  Description of Artificial Sequence: Synthetic oligonucleotide
gacgugacagucguugguc

SEQ ID NO: 894452 - RNA, 19 nt, Artificial Sequence
  Description of Artificial Sequence: Synthetic oligonucleotide
uggaccugauguccuacau

SEQ ID NO: 894453 - RNA, 19 nt, Artificial Sequence
  Description of Artificial Sequence: Synthetic oligonucleotide
gaggaugccuagguauaag

SEQ ID NO: 894454 - RNA, 19 nt, Artificial Sequence
  Description of Artificial Sequence: Synthetic oligonucleotide
acaagacgggacuuucaau

SEQ ID NO: 894455 - RNA, 19 nt, Artificial Sequence
  Description of Artificial Sequence: Synthetic oligonucleotide
gagucccuugaccaacuca

SEQ ID NO: 894456 - RNA, 19 nt, Artificial Sequence
  Description of Artificial Sequence: Synthetic oligonucleotide
aacgugggugcgugaggug

SEQ ID NO: 894457 - RNA, 19 nt, Artificial Sequence
  Description of Artificial Sequence: Synthetic oligonucleotide
agagucccuugaccaacuc

SEQ ID NO: 894458 - RNA, 19 nt, Artificial Sequence
  Description of Artificial Sequence: Synthetic oligonucleotide
cagggugcugauacccugc

SEQ ID NO: 894459 - RNA, 19 nt, Artificial Sequence
  Description of Artificial Sequence: Synthetic oligonucleotide
ugcuuacaccagucauggg

SEQ ID NO: 894460 - RNA, 19 nt, Artificial Sequence
  Description of Artificial Sequence: Synthetic oligonucleotide
ccagaacacgucauacacg

SEQ ID NO: 894461 - RNA, 19 nt, Artificial Sequence
  Description of Artificial Sequence: Synthetic oligonucleotide
uggggcugcaucacucgcu

SEQ ID NO: 894462 - RNA, 19 nt, Artificial Sequence
  Description of Artificial Sequence: Synthetic oligonucleotide
caccacuccaaggaaacuc

SEQ ID NO: 894463 - RNA, 19 nt, Artificial Sequence
  Description of Artificial Sequence: Synthetic oligonucleotide
cauagugcaccugcuucag

SEQ ID NO: 894464 - RNA, 19 nt, Artificial Sequence
  Description of Artificial Sequence: Synthetic oligonucleotide
agucguuggucucguccag

SEQ ID NO: 894465 - RNA, 19 nt, Artificial Sequence
  Description of Artificial Sequence: Synthetic oligonucleotide
ucguuggucucguccagaa

SEQ ID NO: 894466 - RNA, 19 nt, Artificial Sequence
  Description of Artificial Sequence: Synthetic oligonucleotide
aggccuauuggagaagcgu

SEQ ID NO: 894467 - RNA, 19 nt, Artificial Sequence
  Description of Artificial Sequence: Synthetic oligonucleotide
gaucucagucuggacacca

SEQ ID NO: 894468 - RNA, 19 nt, Artificial Sequence
  Description of Artificial Sequence: Synthetic oligonucleotide
ggaugccuagguauaaggc

SEQ ID NO: 894469 - RNA, 19 nt, Artificial Sequence
  Description of Artificial Sequence: Synthetic oligonucleotide
ucacgucggagugaacucu

SEQ ID NO: 894470 - RNA, 19 nt, Artificial Sequence
  Description of Artificial Sequence: Synthetic oligonucleotide
gugcaccuagaugaugcgg

SEQ ID NO: 894471 - RNA, 19 nt, Artificial Sequence
  Description of Artificial Sequence: Synthetic oligonucleotide
acgugacagucguuggucu

SEQ ID NO: 894472 - RNA, 19 nt, Artificial Sequence
  Description of Artificial Sequence: Synthetic oligonucleotide
ugaagguucggggcagcca

SEQ ID NO: 894473 - RNA, 19 nt, Artificial Sequence
  Description of Artificial Sequence: Synthetic oligonucleotide
agcggaugucaaauuugac

SEQ ID NO: 894474 - RNA, 19 nt, Artificial Sequence
  Description of Artificial Sequence: Synthetic oligonucleotide
agcguagccagaacacguc

SEQ ID NO: 894475 - RNA, 19 nt, Artificial Sequence
  Description of Artificial Sequence: Synthetic oligonucleotide
aacacuccccuggggaacu

SEQ ID NO: 894476 - RNA, 19 nt, Artificial Sequence
  Description of Artificial Sequence: Synthetic oligonucleotide
ggccuugaagaucucaguc

SEQ ID NO: 894477 - RNA, 19 nt, Artificial Sequence
  Description of Artificial Sequence: Synthetic oligonucleotide
cuuaggccuaggcucugac

SEQ ID NO: 894478 - RNA, 19 nt, Artificial Sequence
  Description of Artificial Sequence: Synthetic oligonucleotide
ugcuucacgucggagugaa

SEQ ID NO: 894479 - RNA, 19 nt, Artificial Sequence
  Description of Artificial Sequence: Synthetic oligonucleotide
gguaucugcaggcucgcuc

SEQ ID NO: 894480 - RNA, 19 nt, Artificial Sequence
  Description of Artificial Sequence: Synthetic oligonucleotide
gaugagggguagucgcaga

SEQ ID NO: 894481 - RNA, 19 nt, Artificial Sequence
  Description of Artificial Sequence: Synthetic oligonucleotide
caggcucgcucacagucag

SEQ ID NO: 894482 - RNA, 19 nt, Artificial Sequence
  Description of Artificial Sequence: Synthetic oligonucleotide
agguguuaggaggugugca

SEQ ID NO: 894483 - RNA, 19 nt, Artificial Sequence
  Description of Artificial Sequence: Synthetic oligonucleotide
acaacauagcggaugucaa

SEQ ID NO: 894484 - RNA, 19 nt, Artificial Sequence
  Description of Artificial Sequence: Synthetic oligonucleotide
cgagaugagggguagucgc

SEQ ID NO: 894485 - RNA, 19 nt, Artificial Sequence
  Description of Artificial Sequence: Synthetic oligonucleotide
aguauccagcccuggggau

SEQ ID NO: 894486 - RNA, 19 nt, Artificial Sequence
  Description of Artificial Sequence: Synthetic oligonucleotide
uuacaccagucaugggaaa

SEQ ID NO: 894487 - RNA, 19 nt, Artificial Sequence
  Description of Artificial Sequence: Synthetic oligonucleotide
uugagugcgaaaggccuau

SEQ ID NO: 894488 - RNA, 19 nt, Artificial Sequence
  Description of Artificial Sequence: Synthetic oligonucleotide
uguggaccugauguccuac

SEQ ID NO: 894489 - RNA, 19 nt, Artificial Sequence
  Description of Artificial Sequence: Synthetic oligonucleotide
auauacagcccgagaugag

SEQ ID NO: 894490 - RNA, 19 nt, Artificial Sequence
  Description of Artificial Sequence: Synthetic oligonucleotide
gucauacacgaacaagcua

SEQ ID NO: 894491 - RNA, 19 nt, Artificial Sequence
  Description of Artificial Sequence: Synthetic oligonucleotide
cacgucggagugaacucug

SEQ ID NO: 894492 - RNA, 19 nt, Artificial Sequence
  Description of Artificial Sequence: Synthetic oligonucleotide
gugagugucuaggcugcgg

SEQ ID NO: 894493 - RNA, 19 nt, Artificial Sequence
  Description of Artificial Sequence: Synthetic oligonucleotide
ccgaaugaugcugugcagg

SEQ ID NO: 894494 - RNA, 19 nt, Artificial Sequence
  Description of Artificial Sequence: Synthetic oligonucleotide
guacgcagguugaagguuc

SEQ ID NO: 894495 - RNA, 19 nt, Artificial Sequence
  Description of Artificial Sequence: Synthetic oligonucleotide
accacuuacuguccagcuu

SEQ ID NO: 894496 - RNA, 19 nt, Artificial Sequence
  Description of Artificial Sequence: Synthetic oligonucleotide
cagggucauaguucaugac

SEQ ID NO: 894497 - RNA, 19 nt, Artificial Sequence
  Description of Artificial Sequence: Synthetic oligonucleotide
cacccugucucucccguug

SEQ ID NO: 894498 - RNA, 19 nt, Artificial Sequence
  Description of Artificial Sequence: Synthetic oligonucleotide
agggguagucgcagaggcc

SEQ ID NO: 894499 - RNA, 19 nt, Artificial Sequence
  Description of Artificial Sequence: Synthetic oligonucleotide
auacacgaacaagcuaagu

SEQ ID NO: 894500 - RNA, 19 nt, Artificial Sequence
  Description of Artificial Sequence: Synthetic oligonucleotide
ggcaguccuuuacagucag

SEQ ID NO: 894501 - RNA, 19 nt, Artificial Sequence
  Description of Artificial Sequence: Synthetic oligonucleotide
gaacaagacgggacuuuca

SEQ ID NO: 894502 - RNA, 19 nt, Artificial Sequence
  Description of Artificial Sequence: Synthetic oligonucleotide
gaguacaacacagggugcu

SEQ ID NO: 894503 - RNA, 19 nt, Artificial Sequence
  Description of Artificial Sequence: Synthetic oligonucleotide
ggugaaacgugggugcgug

SEQ ID NO: 894504 - RNA, 19 nt, Artificial Sequence
  Description of Artificial Sequence: Synthetic oligonucleotide
ugaugcgggugacgugaca

SEQ ID NO: 894505 - RNA, 19 nt, Artificial Sequence
  Description of Artificial Sequence: Synthetic oligonucleotide
ucggcgucagccucgcuuu

SEQ ID NO: 894506 - RNA, 19 nt, Artificial Sequence
  Description of Artificial Sequence: Synthetic oligonucleotide
accagucaugggaaaggag

SEQ ID NO: 894507 - RNA, 19 nt, Artificial Sequence
  Description of Artificial Sequence: Synthetic oligonucleotide
uuggugacgugagugucua

SEQ ID NO: 894508 - RNA, 19 nt, Artificial Sequence
  Description of Artificial Sequence: Synthetic oligonucleotide
agacgggacuuucaaugua

SEQ ID NO: 894509 - RNA, 19 nt, Artificial Sequence
  Description of Artificial Sequence: Synthetic oligonucleotide
ugcugauacccugcuuaca

SEQ ID NO: 894510 - RNA, 19 nt, Artificial Sequence
  Description of Artificial Sequence: Synthetic oligonucleotide
aaaggaggacagagacucu

SEQ ID NO: 894511 - RNA, 19 nt, Artificial Sequence
  Description of Artificial Sequence: Synthetic oligonucleotide
ugcgggugacgugacaguc

SEQ ID NO: 894512 - RNA, 19 nt, Artificial Sequence
  Description of Artificial Sequence: Synthetic oligonucleotide
aguacgcagguugaagguu

SEQ ID NO: 894513 - RNA, 19 nt, Artificial Sequence
  Description of Artificial Sequence: Synthetic oligonucleotide
acagcccgagaugaggggu

SEQ ID NO: 894514 - RNA, 19 nt, Artificial Sequence
  Description of Artificial Sequence: Synthetic oligonucleotide
agggaaccucacaacacca

SEQ ID NO: 894515 - RNA, 19 nt, Artificial Sequence
  Description of Artificial Sequence: Synthetic oligonucleotide
guacaacacagggugcuga

SEQ ID NO: 894516 - RNA, 19 nt, Artificial Sequence
  Description of Artificial Sequence: Synthetic oligonucleotide
ucaccgaacgcaggagcac

SEQ ID NO: 894517 - RNA, 19 nt, Artificial Sequence
  Description of Artificial Sequence: Synthetic oligonucleotide
gcaucacucgcuuuccauc

SEQ ID NO: 894518 - RNA, 19 nt, Artificial Sequence
  Description of Artificial Sequence: Synthetic oligonucleotide
caacauagcggaugucaaa

SEQ ID NO: 894519 - RNA, 19 nt, Artificial Sequence
  Description of Artificial Sequence: Synthetic oligonucleotide
caucacucgcuuuccaucu

SEQ ID NO: 894520 - RNA, 19 nt, Artificial Sequence
  Description of Artificial Sequence: Synthetic oligonucleotide
accaacucaagaggacagu

SEQ ID NO: 894521 - RNA, 19 nt, Artificial Sequence
  Description of Artificial Sequence: Synthetic oligonucleotide
aguagcacuuguggccucu

SEQ ID NO: 894522 - RNA, 19 nt, Artificial Sequence
  Description of Artificial Sequence: Synthetic oligonucleotide
acgaacaagcuaaguggcu

SEQ ID NO: 894523 - RNA, 19 nt, Artificial Sequence
  Description of Artificial Sequence: Synthetic oligonucleotide
cuggguacugcuucucgaa

SEQ ID NO: 894524 - RNA, 19 nt, Artificial Sequence
  Description of Artificial Sequence: Synthetic oligonucleotide
acccugcuuacaccaguca

SEQ ID NO: 894525 - RNA, 19 nt, Artificial Sequence
  Description of Artificial Sequence: Synthetic oligonucleotide
gccuauuggagaagcguag

SEQ ID NO: 894526 - RNA, 19 nt, Artificial Sequence
  Description of Artificial Sequence: Synthetic oligonucleotide
gucucuaacaguccagcuu

SEQ ID NO: 894527 - RNA, 19 nt, Artificial Sequence
  Description of Artificial Sequence: Synthetic oligonucleotide
ugucuaggcugcgggccag

SEQ ID NO: 894528 - RNA, 19 nt, Artificial Sequence
  Description of Artificial Sequence: Synthetic oligonucleotide
augucggcgucagccucgc

SEQ ID NO: 894529 - RNA, 19 nt, Artificial Sequence
  Description of Artificial Sequence: Synthetic oligonucleotide
aggcucaucaaaggacaga

SEQ ID NO: 894530 - RNA, 19 nt, Artificial Sequence
  Description of Artificial Sequence: Synthetic oligonucleotide
gggucucuaacaguccagc

SEQ ID NO: 894531 - RNA, 19 nt, Artificial Sequence
  Description of Artificial Sequence: Synthetic oligonucleotide
cacagucaggguuaaaguu

SEQ ID NO: 894532 - RNA, 19 nt, Artificial Sequence
  Description of Artificial Sequence: Synthetic oligonucleotide
uggggacgugccacugggc

SEQ ID NO: 894533 - RNA, 19 nt, Artificial Sequence
  Description of Artificial Sequence: Synthetic oligonucleotide
gccuaacuuaggccuaggc

SEQ ID NO: 894534 - RNA, 19 nt, Artificial Sequence
  Description of Artificial Sequence: Synthetic oligonucleotide
guauaaggcuggguuggca

SEQ ID NO: 894535 - RNA, 19 nt, Artificial Sequence
  Description of Artificial Sequence: Synthetic oligonucleotide
gcucucucggugccgaaug

SEQ ID NO: 894536 - RNA, 19 nt, Artificial Sequence
  Description of Artificial Sequence: Synthetic oligonucleotide
augcgggugacgugacagu

SEQ ID NO: 894537 - RNA, 19 nt, Artificial Sequence
  Description of Artificial Sequence: Synthetic oligonucleotide
ggucucguccagaaacaag

SEQ ID NO: 894538 - RNA, 19 nt, Artificial Sequence
  Description of Artificial Sequence: Synthetic oligonucleotide
ggaacaagacgggacuuuc

SEQ ID NO: 894539 - RNA, 19 nt, Artificial Sequence
  Description of Artificial Sequence: Synthetic oligonucleotide
agacaucauugaagaaugu

SEQ ID NO: 894540 - RNA, 19 nt, Artificial Sequence
  Description of Artificial Sequence: Synthetic oligonucleotide
ggauaccacuuacugucca

SEQ ID NO: 894541 - RNA, 19 nt, Artificial Sequence
  Description of Artificial Sequence: Synthetic oligonucleotide
ugacagucguuggucucgu

SEQ ID NO: 894542 - RNA, 19 nt, Artificial Sequence
  Description of Artificial Sequence: Synthetic oligonucleotide
ugcuggauacaggguuccc

SEQ ID NO: 894543 - RNA, 19 nt, Artificial Sequence
  Description of Artificial Sequence: Synthetic oligonucleotide
augaugcgggugacgugac

SEQ ID NO: 894544 - RNA, 19 nt, Artificial Sequence
  Description of Artificial Sequence: Synthetic oligonucleotide
ggcuucaccgaacgcagga

SEQ ID NO: 894545 - RNA, 19 nt, Artificial Sequence
  Description of Artificial Sequence: Synthetic oligonucleotide
gcuaaguggcuucaccgaa

SEQ ID NO: 894546 - RNA, 19 nt, Artificial Sequence
  Description of Artificial Sequence: Synthetic oligonucleotide
auugagugcgaaaggccua

SEQ ID NO: 894547 - RNA, 19 nt, Artificial Sequence
  Description of Artificial Sequence: Synthetic oligonucleotide
ggugcgugagguggcaaag

SEQ ID NO: 894548 - RNA, 19 nt, Artificial Sequence
  Description of Artificial Sequence: Synthetic oligonucleotide
ggagugaacucugaaagau

SEQ ID NO: 894549 - RNA, 19 nt, Artificial Sequence
  Description of Artificial Sequence: Synthetic oligonucleotide
agucaggguuaaaguucac

SEQ ID NO: 894550 - RNA, 19 nt, Artificial Sequence
  Description of Artificial Sequence: Synthetic oligonucleotide
gaacgcaggagcacaacau

SEQ ID NO: 894551 - RNA, 19 nt, Artificial Sequence
  Description of Artificial Sequence: Synthetic oligonucleotide
caccuagaugaugcgggug

SEQ ID NO: 894552 - RNA, 19 nt, Artificial Sequence
  Description of Artificial Sequence: Synthetic oligonucleotide
guggaccugauguccuaca

SEQ ID NO: 894553 - RNA, 19 nt, Artificial Sequence
  Description of Artificial Sequence: Synthetic oligonucleotide
cagcauauacagcccgaga

SEQ ID NO: 894554 - RNA, 19 nt, Artificial Sequence
  Description of Artificial Sequence: Synthetic oligonucleotide
uggugacgugagugucuag

SEQ ID NO: 894555 - RNA, 19 nt, Artificial Sequence
  Description of Artificial Sequence: Synthetic oligonucleotide
gacuuucaauguacuugga

SEQ ID NO: 894556 - RNA, 19 nt, Artificial Sequence
  Description of Artificial Sequence: Synthetic oligonucleotide
ggaguacaacacagggugc

SEQ ID NO: 894557 - RNA, 19 nt, Artificial Sequence
  Description of Artificial Sequence: Synthetic oligonucleotide
acucaagaggacaguggaa

SEQ ID NO: 894558 - RNA, 19 nt, Artificial Sequence
  Description of Artificial Sequence: Synthetic oligonucleotide
agccuaacuuaggccuagg

SEQ ID NO: 894559 - RNA, 19 nt, Artificial Sequence
  Description of Artificial Sequence: Synthetic oligonucleotide
auaguucaugacagugaaa

SEQ ID NO: 894560 - RNA, 19 nt, Artificial Sequence
  Description of Artificial Sequence: Synthetic oligonucleotide
gucccuugaccaacucaag

SEQ ID NO: 894561 - RNA, 19 nt, Artificial Sequence
  Description of Artificial Sequence: Synthetic oligonucleotide
ggcaagaggcagccugacc

SEQ ID NO: 894562 - RNA, 19 nt, Artificial Sequence
  Description of Artificial Sequence: Synthetic oligonucleotide
acgggacuuucaauguacu

SEQ ID NO: 894563 - RNA, 19 nt, Artificial Sequence
  Description of Artificial Sequence: Synthetic oligonucleotide
gcuaucccacuugagcaug

SEQ ID NO: 894564 - RNA, 19 nt, Artificial Sequence
  Description of Artificial Sequence: Synthetic oligonucleotide
ccugcuggauacaggguuc

SEQ ID NO: 894565 - RNA, 19 nt, Artificial Sequence
  Description of Artificial Sequence: Synthetic oligonucleotide
gucgucuaggucauugagu

SEQ ID NO: 894566 - RNA, 19 nt, Artificial Sequence
  Description of Artificial Sequence: Synthetic oligonucleotide
caacaccagagucccuuga

SEQ ID NO: 894567 - RNA, 19 nt, Artificial Sequence
  Description of Artificial Sequence: Synthetic oligonucleotide
acaccacuccaaggaaacu

SEQ ID NO: 894568 - RNA, 19 nt, Artificial Sequence
  Description of Artificial Sequence: Synthetic oligonucleotide
agcccgagaugagggguag

SEQ ID NO: 894569 - RNA, 19 nt, Artificial Sequence
  Description of Artificial Sequence: Synthetic oligonucleotide
ggccuaggcucugacuggg

SEQ ID NO: 894570 - RNA, 19 nt, Artificial Sequence
  Description of Artificial Sequence: Synthetic oligonucleotide
aggugaaacgugggugcgu

SEQ ID NO: 894571 - RNA, 19 nt, Artificial Sequence
  Description of Artificial Sequence: Synthetic oligonucleotide
agccucgcuuucaguaaag

SEQ ID NO: 894572 - RNA, 19 nt, Artificial Sequence
  Description of Artificial Sequence: Synthetic oligonucleotide
caguacgcagguugaaggu

SEQ ID NO: 894573 - RNA, 19 nt, Artificial Sequence
  Description of Artificial Sequence: Synthetic oligonucleotide
acgcagguugaagguucgg

SEQ ID NO: 894574 - RNA, 19 nt, Artificial Sequence
  Description of Artificial Sequence: Synthetic oligonucleotide
gccucgcuuucaguaaagg

SEQ ID NO: 894575 - RNA, 19 nt, Artificial Sequence
  Description of Artificial Sequence: Synthetic oligonucleotide
gaguagcacuuguggccuc

SEQ ID NO: 894576 - RNA, 19 nt, Artificial Sequence
  Description of Artificial Sequence: Synthetic oligonucleotide
gggauaccacuuacugucc

SEQ ID NO: 894577 - RNA, 19 nt, Artificial Sequence
  Description of Artificial Sequence: Synthetic oligonucleotide
ugcucucucggugccgaau

SEQ ID NO: 894578 - RNA, 19 nt, Artificial Sequence
  Description of Artificial Sequence: Synthetic oligonucleotide
ccgagaugagggguagucg

SEQ ID NO: 894579 - RNA, 19 nt, Artificial Sequence
  Description of Artificial Sequence: Synthetic oligonucleotide
gcuucaccgaacgcaggag

SEQ ID NO: 894580 - RNA, 19 nt, Artificial Sequence
  Description of Artificial Sequence: Synthetic oligonucleotide
caccagucaugggaaagga

SEQ ID NO: 894581 - RNA, 19 nt, Artificial Sequence
  Description of Artificial Sequence: Synthetic oligonucleotide
guagucgcagaggcccaug

SEQ ID NO: 894582 - RNA, 19 nt, Artificial Sequence
  Description of Artificial Sequence: Synthetic oligonucleotide
agagccuaacuuaggccua

SEQ ID NO: 894583 - RNA, 19 nt, Artificial Sequence
  Description of Artificial Sequence: Synthetic oligonucleotide
caucuucucgaaggaacaa

SEQ ID NO: 894584 - RNA, 19 nt, Artificial Sequence
  Description of Artificial Sequence: Synthetic oligonucleotide
gcgggugacgugacagucg

SEQ ID NO: 894585 - RNA, 19 nt, Artificial Sequence
  Description of Artificial Sequence: Synthetic oligonucleotide
acaacacagggugcugaua

SEQ ID NO: 894586 - RNA, 19 nt, Artificial Sequence
  Description of Artificial Sequence: Synthetic oligonucleotide
caaggaaacucuggguacu

SEQ ID NO: 894587 - RNA, 19 nt, Artificial Sequence
  Description of Artificial Sequence: Synthetic oligonucleotide
gcgucagccucgcuuucag

SEQ ID NO: 894588 - RNA, 19 nt, Artificial Sequence
  Description of Artificial Sequence: Synthetic oligonucleotide
ccauguuagcagccuuggc

SEQ ID NO: 894589 - RNA, 19 nt, Artificial Sequence
  Description of Artificial Sequence: Synthetic oligonucleotide
cccguugcugaaaauagcu

SEQ ID NO: 894590 - RNA, 19 nt, Artificial Sequence
  Description of Artificial Sequence: Synthetic oligonucleotide
gugaaacgugggugcguga

SEQ ID NO: 894591 - RNA, 19 nt, Artificial Sequence
  Description of Artificial Sequence: Synthetic oligonucleotide
gcguagccagaacacguca

SEQ ID NO: 894592 - RNA, 19 nt, Artificial Sequence
  Description of Artificial Sequence: Synthetic oligonucleotide
caccgaacgcaggagcaca

SEQ ID NO: 894593 - RNA, 19 nt, Artificial Sequence
  Description of Artificial Sequence: Synthetic oligonucleotide
gggaugaacuuaucauagu

SEQ ID NO: 894594 - RNA, 19 nt, Artificial Sequence
  Description of Artificial Sequence: Synthetic oligonucleotide
gcugacaaacuggggcagc

SEQ ID NO: 894595 - RNA, 19 nt, Artificial Sequence
  Description of Artificial Sequence: Synthetic oligonucleotide
ucacccugucucucccguu

SEQ ID NO: 894596 - RNA, 19 nt, Artificial Sequence
  Description of Artificial Sequence: Synthetic oligonucleotide
gucggcgucagccucgcuu

SEQ ID NO: 894597 - RNA, 19 nt, Artificial Sequence
  Description of Artificial Sequence: Synthetic oligonucleotide
guuaggaggugugcagagu

SEQ ID NO: 894598 - RNA, 19 nt, Artificial Sequence
  Description of Artificial Sequence: Synthetic oligonucleotide
cugcaucacucgcuuucca

SEQ ID NO: 894599 - RNA, 19 nt, Artificial Sequence
  Description of Artificial Sequence: Synthetic oligonucleotide
gguggaggaugccuaggua

SEQ ID NO: 894600 - RNA, 19 nt, Artificial Sequence
  Description of Artificial Sequence: Synthetic oligonucleotide
ggggugcucucucggugcc

SEQ ID NO: 894601 - RNA, 19 nt, Artificial Sequence
  Description of Artificial Sequence: Synthetic oligonucleotide
ggucucuaacaguccagcu

SEQ ID NO: 894602 - RNA, 19 nt, Artificial Sequence
  Description of Artificial Sequence: Synthetic oligonucleotide
cuaggucauugagugcgaa

SEQ ID NO: 894603 - RNA, 19 nt, Artificial Sequence
  Description of Artificial Sequence: Synthetic oligonucleotide
guucuggggccuggaguac

SEQ ID NO: 894604 - RNA, 19 nt, Artificial Sequence
  Description of Artificial Sequence: Synthetic oligonucleotide
cucggugccgaaugaugcu

SEQ ID NO: 894605 - RNA, 19 nt, Artificial Sequence
  Description of Artificial Sequence: Synthetic oligonucleotide
cacaacaccagagucccuu

SEQ ID NO: 894606 - RNA, 19 nt, Artificial Sequence
  Description of Artificial Sequence: Synthetic oligonucleotide
cccgagaugagggguaguc

SEQ ID NO: 894607 - RNA, 19 nt, Artificial Sequence
  Description of Artificial Sequence: Synthetic oligonucleotide
gaggacaguggaacucagu

SEQ ID NO: 894608 - RNA, 19 nt, Artificial Sequence
  Description of Artificial Sequence: Synthetic oligonucleotide
ggacgugccacugggcuaa

SEQ ID NO: 894609 - RNA, 19 nt, Artificial Sequence
  Description of Artificial Sequence: Synthetic oligonucleotide
acacuccccuggggaacuc

SEQ ID NO: 894610 - RNA, 19 nt, Artificial Sequence
  Description of Artificial Sequence: Synthetic oligonucleotide
accgaacgcaggagcacaa

SEQ ID NO: 894611 - RNA, 19 nt, Artificial Sequence
  Description of Artificial Sequence: Synthetic oligonucleotide
guguggaccugauguccua

SEQ ID NO: 894612 - RNA, 19 nt, Artificial Sequence
  Description of Artificial Sequence: Synthetic oligonucleotide
ggaggaugccuagguauaa

SEQ ID NO: 894613 - RNA, 19 nt, Artificial Sequence
  Description of Artificial Sequence: Synthetic oligonucleotide
acgucggagugaacucuga

SEQ ID NO: 894614 - RNA, 19 nt, Artificial Sequence
  Description of Artificial Sequence: Synthetic oligonucleotide
gagccauguuagcagccuu

SEQ ID NO: 894615 - RNA, 19 nt, Artificial Sequence
  Description of Artificial Sequence: Synthetic oligonucleotide
gcgugagguggcaaagcac

SEQ ID NO: 894616 - RNA, 19 nt, Artificial Sequence
  Description of Artificial Sequence: Synthetic oligonucleotide
aggcucgcucacagucagg

SEQ ID NO: 894617 - RNA, 19 nt, Artificial Sequence
  Description of Artificial Sequence: Synthetic oligonucleotide
ugagugcgaaaggccuauu

SEQ ID NO: 894618 - RNA, 19 nt, Artificial Sequence
  Description of Artificial Sequence: Synthetic oligonucleotide
ugggugcgugagguggcaa

SEQ ID NO: 894619 - RNA, 19 nt, Artificial Sequence
  Description of Artificial Sequence: Synthetic oligonucleotide
guagcacuuguggccucuc

SEQ ID NO: 894620 - RNA, 19 nt, Artificial Sequence
  Description of Artificial Sequence: Synthetic oligonucleotide
cgaacgcaggagcacaaca

SEQ ID NO: 894621 - RNA, 19 nt, Artificial Sequence
  Description of Artificial Sequence: Synthetic oligonucleotide
ccacuuacuguccagcuuu

SEQ ID NO: 894622 - RNA, 19 nt, Artificial Sequence
  Description of Artificial Sequence: Synthetic oligonucleotide
gggugcgugagguggcaaa

SEQ ID NO: 894623 - RNA, 19 nt, Artificial Sequence
  Description of Artificial Sequence: Synthetic oligonucleotide
ggcuaucccacuugagcau

SEQ ID NO: 894624 - RNA, 19 nt, Artificial Sequence
  Description of Artificial Sequence: Synthetic oligonucleotide
cagcccgagaugaggggua

SEQ ID NO: 894625 - RNA, 19 nt, Artificial Sequence
  Description of Artificial Sequence: Synthetic oligonucleotide
ccucgcuuucaguaaaggu

SEQ ID NO: 894626 - RNA, 19 nt, Artificial Sequence
  Description of Artificial Sequence: Synthetic oligonucleotide
gucucucccguugcugaaa

SEQ ID NO: 894627 - RNA, 19 nt, Artificial Sequence
  Description of Artificial Sequence: Synthetic oligonucleotide
cgugacagucguuggucuc

SEQ ID NO: 894628 - RNA, 19 nt, Artificial Sequence
  Description of Artificial Sequence: Synthetic oligonucleotide
cgucauacacgaacaagcu

SEQ ID NO: 894629 - RNA, 19 nt, Artificial Sequence
  Description of Artificial Sequence: Synthetic oligonucleotide
ccuacauaugaagcaggaa

SEQ ID NO: 894630 - RNA, 19 nt, Artificial Sequence
  Description of Artificial Sequence: Synthetic oligonucleotide
gcuucccagaagggaaaca

SEQ ID NO: 894631 - RNA, 19 nt, Artificial Sequence
  Description of Artificial Sequence: Synthetic oligonucleotide
ugucggcgucagccucgcu

SEQ ID NO: 894632 - RNA, 19 nt, Artificial Sequence
  Description of Artificial Sequence: Synthetic oligonucleotide
cccagcucggcgagcgaug

SEQ ID NO: 894633 - RNA, 19 nt, Artificial Sequence
  Description of Artificial Sequence: Synthetic oligonucleotide
gugggugcgugagguggca

SEQ ID NO: 894634 - RNA, 19 nt, Artificial Sequence
  Description of Artificial Sequence: Synthetic oligonucleotide
gggacgugccacugggcua

SEQ ID NO: 894635 - RNA, 19 nt, Artificial Sequence
  Description of Artificial Sequence: Synthetic oligonucleotide
gggugcucucucggugccg

SEQ ID NO: 894636 - RNA, 19 nt, Artificial Sequence
  Description of Artificial Sequence: Synthetic oligonucleotide
gccuaggcucugacugggg

SEQ ID NO: 894637 - RNA, 19 nt, Artificial Sequence
  Description of Artificial Sequence: Synthetic oligonucleotide
cugcuucacgucggaguga

SEQ ID NO: 894638 - RNA, 19 nt, Artificial Sequence
  Description of Artificial Sequence: Synthetic oligonucleotide
ggcucugguggaggaugcc

SEQ ID NO: 894639 - RNA, 19 nt, Artificial Sequence
  Description of Artificial Sequence: Synthetic oligonucleotide
gcaccuagaugaugcgggu

SEQ ID NO: 894640 - RNA, 19 nt, Artificial Sequence
  Description of Artificial Sequence: Synthetic oligonucleotide
ggcgucagccucgcuuuca

SEQ ID NO: 894641 - RNA, 19 nt, Artificial Sequence
  Description of Artificial Sequence: Synthetic oligonucleotide
cguccagaaacaaggugcu

SEQ ID NO: 894642 - RNA, 19 nt, Artificial Sequence
  Description of Artificial Sequence: Synthetic oligonucleotide
gcgagcgauggaggccagg

SEQ ID NO: 894643 - RNA, 19 nt, Artificial Sequence
  Description of Artificial Sequence: Synthetic oligonucleotide
ggggcugcaucacucgcuu

SEQ ID NO: 894644 - RNA, 19 nt, Artificial Sequence
  Description of Artificial Sequence: Synthetic oligonucleotide
ccgaacgcaggagcacaac

SEQ ID NO: 894645 - RNA, 19 nt, Artificial Sequence
  Description of Artificial Sequence: Synthetic oligonucleotide
gcucaguacgcagguugaa

SEQ ID NO: 894646 - RNA, 19 nt, Artificial Sequence
  Description of Artificial Sequence: Synthetic oligonucleotide
gcacaacauagcggauguc

SEQ ID NO: 894647 - RNA, 19 nt, Artificial Sequence
  Description of Artificial Sequence: Synthetic oligonucleotide
cgugagugucuaggcugcg

SEQ ID NO: 894648 - RNA, 19 nt, Artificial Sequence
  Description of Artificial Sequence: Synthetic oligonucleotide
gcgauggaggccaggcagu

SEQ ID NO: 894649 - RNA, 19 nt, Artificial Sequence
  Description of Artificial Sequence: Synthetic oligonucleotide
ccuagguauaaggcugggu

SEQ ID NO: 894650 - RNA, 19 nt, Artificial Sequence
  Description of Artificial Sequence: Synthetic oligonucleotide
cgaacaagcuaaguggcuu

SEQ ID NO: 894651 - RNA, 19 nt, Artificial Sequence
  Description of Artificial Sequence: Synthetic oligonucleotide
cgucggagugaacucugaa

SEQ ID NO: 894652 - RNA, 19 nt, Artificial Sequence
  Description of Artificial Sequence: Synthetic oligonucleotide
ggcgagcgauggaggccag

SEQ ID NO: 894653 - RNA, 19 nt, Artificial Sequence
  Description of Artificial Sequence: Synthetic oligonucleotide
gguagucgcagaggcccau

SEQ ID NO: 894654 - RNA, 19 nt, Artificial Sequence
  Description of Artificial Sequence: Synthetic oligonucleotide
ggacucugccagggaaccu

SEQ ID NO: 894655 - RNA, 19 nt, Artificial Sequence
  Description of Artificial Sequence: Synthetic oligonucleotide
caggcauggcugggaaguu

SEQ ID NO: 894656 - RNA, 19 nt, Artificial Sequence
  Description of Artificial Sequence: Synthetic oligonucleotide
gcucacagucaggguuaaa

SEQ ID NO: 894657 - RNA, 19 nt, Artificial Sequence
  Description of Artificial Sequence: Synthetic oligonucleotide
ggcccaugggcgguggcuu

SEQ ID NO: 894658 - RNA, 19 nt, Artificial Sequence
  Description of Artificial Sequence: Synthetic oligonucleotide
cauagucgucuaggucauu

SEQ ID NO: 894659 - RNA, 19 nt, Artificial Sequence
  Description of Artificial Sequence: Synthetic oligonucleotide
cgggacuuucaauguacuu

SEQ ID NO: 894660 - RNA, 19 nt, Artificial Sequence
  Description of Artificial Sequence: Synthetic oligonucleotide
gacgugccacugggcuaau

SEQ ID NO: 894661 - RNA, 19 nt, Artificial Sequence
  Description of Artificial Sequence: Synthetic oligonucleotide
gcacuggcaggagggcuuu

SEQ ID NO: 894662 - RNA, 19 nt, Artificial Sequence
  Description of Artificial Sequence: Synthetic oligonucleotide
cggcgucagccucgcuuuc

SEQ ID NO: 894663 - RNA, 19 nt, Artificial Sequence
  Description of Artificial Sequence: Synthetic oligonucleotide
gcccgagaugagggguagu

SEQ ID NO: 894664 - RNA, 19 nt, Artificial Sequence
  Description of Artificial Sequence: Synthetic oligonucleotide
gggugacgugacagucguu

SEQ ID NO: 894665 - RNA, 19 nt, Artificial Sequence
  Description of Artificial Sequence: Synthetic oligonucleotide
ucacuggucacccagaagc

SEQ ID NO: 894666 - RNA, 19 nt, Artificial Sequence
  Description of Artificial Sequence: Synthetic oligonucleotide
ucauaguugggauagggag

SEQ ID NO: 894667 - RNA, 19 nt, Artificial Sequence
  Description of Artificial Sequence: Synthetic oligonucleotide
uccuuggcgacuaaggugg

SEQ ID NO: 894668 - RNA, 19 nt, Artificial Sequence
  Description of Artificial Sequence: Synthetic oligonucleotide
gaagagaaguuucaaagug

SEQ ID NO: 894669 - RNA, 19 nt, Artificial Sequence
  Description of Artificial Sequence: Synthetic oligonucleotide
ucuucuucgccacagcagg

SEQ ID NO: 894670 - RNA, 19 nt, Artificial Sequence
  Description of Artificial Sequence: Synthetic oligonucleotide
agaagcuugucacagguag

SEQ ID NO: 894671 - RNA, 19 nt, Artificial Sequence
  Description of Artificial Sequence: Synthetic oligonucleotide
ucaagagucaagauauccc

SEQ ID NO: 894672 - RNA, 19 nt, Artificial Sequence
  Description of Artificial Sequence: Synthetic oligonucleotide
aaucuaggcgguuagugug

SEQ ID NO: 894673 - RNA, 19 nt, Artificial Sequence
  Description of Artificial Sequence: Synthetic oligonucleotide
caagagucaagauaucccg

SEQ ID NO: 894674 - RNA, 19 nt, Artificial Sequence
  Description of Artificial Sequence: Synthetic oligonucleotide
uguucaaucgagacuuggg

SEQ ID NO: 894675 - RNA, 19 nt, Artificial Sequence
  Description of Artificial Sequence: Synthetic oligonucleotide
agaaguuucaaagugguca

SEQ ID NO: 894676 - RNA, 19 nt, Artificial Sequence
  Description of Artificial Sequence: Synthetic oligonucleotide
uuuauuguaaugaguguuc

SEQ ID NO: 894677 - RNA, 19 nt, Artificial Sequence
  Description of Artificial Sequence: Synthetic oligonucleotide
auuguaaugaguguucaag

SEQ ID NO: 894678 - RNA, 19 nt, Artificial Sequence
  Description of Artificial Sequence: Synthetic oligonucleotide
uauggaugaacucuuccug

SEQ ID NO: 894679 - RNA, 19 nt, Artificial Sequence
  Description of Artificial Sequence: Synthetic oligonucleotide
ucaaucgagacuuggggag

SEQ ID NO: 894680 - RNA, 19 nt, Artificial Sequence
  Description of Artificial Sequence: Synthetic oligonucleotide
auaguugggauagggagcc

SEQ ID NO: 894681 - RNA, 19 nt, Artificial Sequence
  Description of Artificial Sequence: Synthetic oligonucleotide
cucuaugaaagcuaguuuc

SEQ ID NO: 894682 - RNA, 19 nt, Artificial Sequence
  Description of Artificial Sequence: Synthetic oligonucleotide
uguaaugaguguucaagga

SEQ ID NO: 894683 - RNA, 19 nt, Artificial Sequence
  Description of Artificial Sequence: Synthetic oligonucleotide
uucccuuugucccucaaag

SEQ ID NO: 894684 - RNA, 19 nt, Artificial Sequence
  Description of Artificial Sequence: Synthetic oligonucleotide
cagagauccucuaugaaag

SEQ ID NO: 894685 - RNA, 19 nt, Artificial Sequence
  Description of Artificial Sequence: Synthetic oligonucleotide
auacaccacguguugacgc

SEQ ID NO: 894686 - RNA, 19 nt, Artificial Sequence
  Description of Artificial Sequence: Synthetic oligonucleotide
guaaugaguguucaaggag

SEQ ID NO: 894687 - RNA, 19 nt, Artificial Sequence
  Description of Artificial Sequence: Synthetic oligonucleotide
agaaucuggucauuguguc

SEQ ID NO: 894688 - RNA, 19 nt, Artificial Sequence
  Description of Artificial Sequence: Synthetic oligonucleotide
ugagaacucuucuauuucc

SEQ ID NO: 894689 - RNA, 19 nt, Artificial Sequence
  Description of Artificial Sequence: Synthetic oligonucleotide
auaugggucuauuuccuuc

SEQ ID NO: 894690 - RNA, 19 nt, Artificial Sequence
  Description of Artificial Sequence: Synthetic oligonucleotide
gauugucuggagaaggccg

SEQ ID NO: 894691 - RNA, 19 nt, Artificial Sequence
  Description of Artificial Sequence: Synthetic oligonucleotide
ucuucuauuuccacagaga

SEQ ID NO: 894692 - RNA, 19 nt, Artificial Sequence
  Description of Artificial Sequence: Synthetic oligonucleotide
agcgggaauauccagucuc

SEQ ID NO: 894693 - RNA, 19 nt, Artificial Sequence
  Description of Artificial Sequence: Synthetic oligonucleotide
uggacaaagggcacuuccg

SEQ ID NO: 894694 - RNA, 19 nt, Artificial Sequence
  Description of Artificial Sequence: Synthetic oligonucleotide
caagauaucccggucauag

SEQ ID NO: 894695 - RNA, 19 nt, Artificial Sequence
  Description of Artificial Sequence: Synthetic oligonucleotide
uggaacgccaucuccagcc

SEQ ID NO: 894696 - RNA, 19 nt, Artificial Sequence
  Description of Artificial Sequence: Synthetic oligonucleotide
ugagauuaggggugacucg

SEQ ID NO: 894697 - RNA, 19 nt, Artificial Sequence
  Description of Artificial Sequence: Synthetic oligonucleotide
aaagggcacuuccggagac

SEQ ID NO: 894698 - RNA, 19 nt, Artificial Sequence
  Description of Artificial Sequence: Synthetic oligonucleotide
cuugacagagaacucggcc

SEQ ID NO: 894699 - RNA, 19 nt, Artificial Sequence
  Description of Artificial Sequence: Synthetic oligonucleotide
augagauuaggggugacuc

SEQ ID NO: 894700 - RNA, 19 nt, Artificial Sequence
  Description of Artificial Sequence: Synthetic oligonucleotide
agacacuaaagccacauuu

SEQ ID NO: 894701 - RNA, 19 nt, Artificial Sequence
  Description of Artificial Sequence: Synthetic oligonucleotide
uucuguucaaucgagacuu

SEQ ID NO: 894702 - RNA, 19 nt, Artificial Sequence
  Description of Artificial Sequence: Synthetic oligonucleotide
gaggcauuuauuguaauga

SEQ ID NO: 894703 - RNA, 19 nt, Artificial Sequence
  Description of Artificial Sequence: Synthetic oligonucleotide
uggucauccacucggaguc

SEQ ID NO: 894704 - RNA, 19 nt, Artificial Sequence
  Description of Artificial Sequence: Synthetic oligonucleotide
gguaguggcaacaugagug

SEQ ID NO: 894705 - RNA, 19 nt, Artificial Sequence
  Description of Artificial Sequence: Synthetic oligonucleotide
accucuccgacccuguugg

SEQ ID NO: 894706 - RNA, 19 nt, Artificial Sequence
  Description of Artificial Sequence: Synthetic oligonucleotide
uccaucuaauccuccgagg

SEQ ID NO: 894707 - RNA, 19 nt, Artificial Sequence
  Description of Artificial Sequence: Synthetic oligonucleotide
aggcauuuauuguaaugag

SEQ ID NO: 894708 - RNA, 19 nt, Artificial Sequence
  Description of Artificial Sequence: Synthetic oligonucleotide
agucaagauaucccgguca

SEQ ID NO: 894709 - RNA, 19 nt, Artificial Sequence
  Description of Artificial Sequence: Synthetic oligonucleotide
gaggcaacagaagcaaggg

SEQ ID NO: 894710 - RNA, 19 nt, Artificial Sequence
  Description of Artificial Sequence: Synthetic oligonucleotide
aggcaacagaagcaagggc

SEQ ID NO: 894711 - RNA, 19 nt, Artificial Sequence
  Description of Artificial Sequence: Synthetic oligonucleotide
gauccucuaugaaagcuag

SEQ ID NO: 894712 - RNA, 19 nt, Artificial Sequence
  Description of Artificial Sequence: Synthetic oligonucleotide
agagucaagauaucccggu

SEQ ID NO: 894713 - RNA, 19 nt, Artificial Sequence
  Description of Artificial Sequence: Synthetic oligonucleotide
ucuccgacccuguuggcag

SEQ ID NO: 894714 - RNA, 19 nt, Artificial Sequence
  Description of Artificial Sequence: Synthetic oligonucleotide
gguagugugguugaggagc

SEQ ID NO: 894715 - RNA, 19 nt, Artificial Sequence
  Description of Artificial Sequence: Synthetic oligonucleotide
guuaguguggcugcggcag

SEQ ID NO: 894716 - RNA, 19 nt, Artificial Sequence
  Description of Artificial Sequence: Synthetic oligonucleotide
uuguucguccccaggagac

SEQ ID NO: 894717 - RNA, 19 nt, Artificial Sequence
  Description of Artificial Sequence: Synthetic oligonucleotide
aaucgagacuuggggaggg

SEQ ID NO: 894718 - RNA, 19 nt, Artificial Sequence
  Description of Artificial Sequence: Synthetic oligonucleotide
agauaucccggucauaguu

SEQ ID NO: 894719 - RNA, 19 nt, Artificial Sequence
  Description of Artificial Sequence: Synthetic oligonucleotide
uuaugcuuggugagaacuc

SEQ ID NO: 894720 - RNA, 19 nt, Artificial Sequence
  Description of Artificial Sequence: Synthetic oligonucleotide
gaagcgucucaggagacag

SEQ ID NO: 894721 - RNA, 19 nt, Artificial Sequence
  Description of Artificial Sequence: Synthetic oligonucleotide
cuggacaaagggcacuucc

SEQ ID NO: 894722 - RNA, 19 nt, Artificial Sequence
  Description of Artificial Sequence: Synthetic oligonucleotide
ucaaaguggucauccacuc

SEQ ID NO: 894723 - RNA, 19 nt, Artificial Sequence
  Description of Artificial Sequence: Synthetic oligonucleotide
ggacuugaagguuugggcc

SEQ ID NO: 894724 - RNA, 19 nt, Artificial Sequence
  Description of Artificial Sequence: Synthetic oligonucleotide
uguucuggaucaguccagg

SEQ ID NO: 894725 - RNA, 19 nt, Artificial Sequence
  Description of Artificial Sequence: Synthetic oligonucleotide
uuucggggaccacagagau

SEQ ID NO: 894726 - RNA, 19 nt, Artificial Sequence
  Description of Artificial Sequence: Synthetic oligonucleotide
acaaucuaggcgguuagug

SEQ ID NO: 894727 - RNA, 19 nt, Artificial Sequence
  Description of Artificial Sequence: Synthetic oligonucleotide
ggaguagccagucuguggc

SEQ ID NO: 894728 - RNA, 19 nt, Artificial Sequence
  Description of Artificial Sequence: Synthetic oligonucleotide
ugaagguuugggccaguug

SEQ ID NO: 894729 - RNA, 19 nt, Artificial Sequence
  Description of Artificial Sequence: Synthetic oligonucleotide
uguuuaugcuuggugagaa

SEQ ID NO: 894730 - RNA, 19 nt, Artificial Sequence
  Description of Artificial Sequence: Synthetic oligonucleotide
gauaucccggucauaguug

SEQ ID NO: 894731 - RNA, 19 nt, Artificial Sequence
  Description of Artificial Sequence: Synthetic oligonucleotide
auaugguccccauccuggg

SEQ ID NO: 894732 - RNA, 19 nt, Artificial Sequence
  Description of Artificial Sequence: Synthetic oligonucleotide
gaggucaagagucaagaua

SEQ ID NO: 894733 - RNA, 19 nt, Artificial Sequence
  Description of Artificial Sequence: Synthetic oligonucleotide
uccucuaugaaagcuaguu

SEQ ID NO: 894734 - RNA, 19 nt, Artificial Sequence
  Description of Artificial Sequence: Synthetic oligonucleotide
auuaggggugacucggcug

SEQ ID NO: 894735 - RNA, 19 nt, Artificial Sequence
  Description of Artificial Sequence: Synthetic oligonucleotide
ggucuugacagagaacucg

SEQ ID NO: 894736 - RNA, 19 nt, Artificial Sequence
  Description of Artificial Sequence: Synthetic oligonucleotide
aagcaguuggcuuguucgu

SEQ ID NO: 894737 - RNA, 19 nt, Artificial Sequence
  Description of Artificial Sequence: Synthetic oligonucleotide
aguugggauagggagcccg

SEQ ID NO: 894738 - RNA, 19 nt, Artificial Sequence
  Description of Artificial Sequence: Synthetic oligonucleotide
uggagaacccuggaccacg

SEQ ID NO: 894739 - RNA, 19 nt, Artificial Sequence
  Description of Artificial Sequence: Synthetic oligonucleotide
gucuugacagagaacucgg

SEQ ID NO: 894740 - RNA, 19 nt, Artificial Sequence
  Description of Artificial Sequence: Synthetic oligonucleotide
ggagaagcacucaucacgg

SEQ ID NO: 894741 - RNA, 19 nt, Artificial Sequence
  Description of Artificial Sequence: Synthetic oligonucleotide
gaacccuggaccacggaag

SEQ ID NO: 894742 - RNA, 19 nt, Artificial Sequence
  Description of Artificial Sequence: Synthetic oligonucleotide
acaagcuuugcacaaucua

SEQ ID NO: 894743 - RNA, 19 nt, Artificial Sequence
  Description of Artificial Sequence: Synthetic oligonucleotide
uguugacgcucagaaaggc

SEQ ID NO: 894744 - RNA, 19 nt, Artificial Sequence
  Description of Artificial Sequence: Synthetic oligonucleotide
agauuugguucagauuguc

SEQ ID NO: 894745 - RNA, 19 nt, Artificial Sequence
  Description of Artificial Sequence: Synthetic oligonucleotide
cuggaagcaagagaaucgc

SEQ ID NO: 894746 - RNA, 19 nt, Artificial Sequence
  Description of Artificial Sequence: Synthetic oligonucleotide
ucacagaaucuggucauug

SEQ ID NO: 894747 - RNA, 19 nt, Artificial Sequence
  Description of Artificial Sequence: Synthetic oligonucleotide
aauauccagucuccagcaa

SEQ ID NO: 894748 - RNA, 19 nt, Artificial Sequence
  Description of Artificial Sequence: Synthetic oligonucleotide
ucagguaguugguauugaa

SEQ ID NO: 894749 - RNA, 19 nt, Artificial Sequence
  Description of Artificial Sequence: Synthetic oligonucleotide
cuccuuggcgacuaaggug

SEQ ID NO: 894750 - RNA, 19 nt, Artificial Sequence
  Description of Artificial Sequence: Synthetic oligonucleotide
agcggaagcgucucaggag

SEQ ID NO: 894751 - RNA, 19 nt, Artificial Sequence
  Description of Artificial Sequence: Synthetic oligonucleotide
ucauuguguccucccacac

SEQ ID NO: 894752 - RNA, 19 nt, Artificial Sequence
  Description of Artificial Sequence: Synthetic oligonucleotide
gucuuuauagccagcuccc

SEQ ID NO: 894753 - RNA, 19 nt, Artificial Sequence
  Description of Artificial Sequence: Synthetic oligonucleotide
uccaggguaucuucccaag

SEQ ID NO: 894754 - RNA, 19 nt, Artificial Sequence
  Description of Artificial Sequence: Synthetic oligonucleotide
gaccauacaccacguguug

SEQ ID NO: 894755 - RNA, 19 nt, Artificial Sequence
  Description of Artificial Sequence: Synthetic oligonucleotide
ugcccgguauggaugaacu

SEQ ID NO: 894756 - RNA, 19 nt, Artificial Sequence
  Description of Artificial Sequence: Synthetic oligonucleotide
uguuugcagcaccgguggg

SEQ ID NO: 894757 - RNA, 19 nt, Artificial Sequence
  Description of Artificial Sequence: Synthetic oligonucleotide
caagagaaucgcuccuccc

SEQ ID NO: 894758 - RNA, 19 nt, Artificial Sequence
  Description of Artificial Sequence: Synthetic oligonucleotide
ucuaauccuccgaggcuca

SEQ ID NO: 894759 - RNA, 19 nt, Artificial Sequence
  Description of Artificial Sequence: Synthetic oligonucleotide
guuccagggaccauacacc

SEQ ID NO: 894760 - RNA, 19 nt, Artificial Sequence
  Description of Artificial Sequence: Synthetic oligonucleotide
agggcacuuccggagacgc

SEQ ID NO: 894761 - RNA, 19 nt, Artificial Sequence
  Description of Artificial Sequence: Synthetic oligonucleotide
uggaagcaagagaaucgcu

SEQ ID NO: 894762 - RNA, 19 nt, Artificial Sequence
  Description of Artificial Sequence: Synthetic oligonucleotide
ccaucuaauccuccgaggc

SEQ ID NO: 894763 - RNA, 19 nt, Artificial Sequence
  Description of Artificial Sequence: Synthetic oligonucleotide
uccuucuguucaaucgaga

SEQ ID NO: 894764 - RNA, 19 nt, Artificial Sequence
  Description of Artificial Sequence: Synthetic oligonucleotide
aguggucauccacucggag

SEQ ID NO: 894765 - RNA, 19 nt, Artificial Sequence
  Description of Artificial Sequence: Synthetic oligonucleotide
cauacaccacguguugacg

SEQ ID NO: 894766 - RNA, 19 nt, Artificial Sequence
  Description of Artificial Sequence: Synthetic oligonucleotide
gugagaacucuucuauuuc

SEQ ID NO: 894767 - RNA, 19 nt, Artificial Sequence
  Description of Artificial Sequence: Synthetic oligonucleotide
ugagggccucuccuuggcg

SEQ ID NO: 894768 - RNA, 19 nt, Artificial Sequence
  Description of Artificial Sequence: Synthetic oligonucleotide
cagguagugugguugagga

SEQ ID NO: 894769 - RNA, 19 nt, Artificial Sequence
  Description of Artificial Sequence: Synthetic oligonucleotide
cuguucaaucgagacuugg

SEQ ID NO: 894770 - RNA, 19 nt, Artificial Sequence
  Description of Artificial Sequence: Synthetic oligonucleotide
ugucccucaaagagagagu

SEQ ID NO: 894771 - RNA, 19 nt, Artificial Sequence
  Description of Artificial Sequence: Synthetic oligonucleotide
uggucauuguguccuccca

SEQ ID NO: 894772 - RNA, 19 nt, Artificial Sequence
  Description of Artificial Sequence: Synthetic oligonucleotide
ucccaagcauuccgcaggc

SEQ ID NO: 894773 - RNA, 19 nt, Artificial Sequence
  Description of Artificial Sequence: Synthetic oligonucleotide
guauggaugaacucuuccu

SEQ ID NO: 894774 - RNA, 19 nt, Artificial Sequence
  Description of Artificial Sequence: Synthetic oligonucleotide
acucggcugaggucaagag

SEQ ID NO: 894775 - RNA, 19 nt, Artificial Sequence
  Description of Artificial Sequence: Synthetic oligonucleotide
uacaccacguguugacgcu

SEQ ID NO: 894776 - RNA, 19 nt, Artificial Sequence
  Description of Artificial Sequence: Synthetic oligonucleotide
uaauccuccgaggcucagg

SEQ ID NO: 894777 - RNA, 19 nt, Artificial Sequence
  Description of Artificial Sequence: Synthetic oligonucleotide
uaucccggucauaguuggg

SEQ ID NO: 894778 - RNA, 19 nt, Artificial Sequence
  Description of Artificial Sequence: Synthetic oligonucleotide
gucacagguagaucuggac

SEQ ID NO: 894779 - RNA, 19 nt, Artificial Sequence
  Description of Artificial Sequence: Synthetic oligonucleotide
ugggguuccuccaucuaau

SEQ ID NO: 894780 - RNA, 19 nt, Artificial Sequence
  Description of Artificial Sequence: Synthetic oligonucleotide
agagagagucaugaagaga

SEQ ID NO: 894781 - RNA, 19 nt, Artificial Sequence
  Description of Artificial Sequence: Synthetic oligonucleotide
acccagaagcuugucacag

SEQ ID NO: 894782 - RNA, 19 nt, Artificial Sequence
  Description of Artificial Sequence: Synthetic oligonucleotide
ccuucuguucaaucgagac

SEQ ID NO: 894783 - RNA, 19 nt, Artificial Sequence
  Description of Artificial Sequence: Synthetic oligonucleotide
ugaggucaagagucaagau

SEQ ID NO: 894784 - RNA, 19 nt, Artificial Sequence
  Description of Artificial Sequence: Synthetic oligonucleotide
agauuaggggugacucggc

SEQ ID NO: 894785 - RNA, 19 nt, Artificial Sequence
  Description of Artificial Sequence: Synthetic oligonucleotide
caggguaucuucccaagca

SEQ ID NO: 894786 - RNA, 19 nt, Artificial Sequence
  Description of Artificial Sequence: Synthetic oligonucleotide
aggcagauuugguucagau

SEQ ID NO: 894787 - RNA, 19 nt, Artificial Sequence
  Description of Artificial Sequence: Synthetic oligonucleotide
cuaugaaagcuaguuucuc

SEQ ID NO: 894788 - RNA, 19 nt, Artificial Sequence
  Description of Artificial Sequence: Synthetic oligonucleotide
caaucgagacuuggggagg

SEQ ID NO: 894789 - RNA, 19 nt, Artificial Sequence
  Description of Artificial Sequence: Synthetic oligonucleotide
gagucaagauaucccgguc

SEQ ID NO: 894790 - RNA, 19 nt, Artificial Sequence
  Description of Artificial Sequence: Synthetic oligonucleotide
cacguguugacgcucagaa

SEQ ID NO: 894791 - RNA, 19 nt, Artificial Sequence
  Description of Artificial Sequence: Synthetic oligonucleotide
cuuuauagccagcucccga

SEQ ID NO: 894792 - RNA, 19 nt, Artificial Sequence
  Description of Artificial Sequence: Synthetic oligonucleotide
aucuaggcgguuagugugg

SEQ ID NO: 894793 - RNA, 19 nt, Artificial Sequence
  Description of Artificial Sequence: Synthetic oligonucleotide
cagagggcaggaucuuucc

SEQ ID NO: 894794 - RNA, 19 nt, Artificial Sequence
  Description of Artificial Sequence: Synthetic oligonucleotide
cugcauagcccacuucaug

SEQ ID NO: 894795 - RNA, 19 nt, Artificial Sequence
  Description of Artificial Sequence: Synthetic oligonucleotide
ugcacaaucuaggcgguua

SEQ ID NO: 894796 - RNA, 19 nt, Artificial Sequence
  Description of Artificial Sequence: Synthetic oligonucleotide
gagcggaagcgucucagga

SEQ ID NO: 894797 - RNA, 19 nt, Artificial Sequence
  Description of Artificial Sequence: Synthetic oligonucleotide
cucuuucugcccgguaugg

SEQ ID NO: 894798 - RNA, 19 nt, Artificial Sequence
  Description of Artificial Sequence: Synthetic oligonucleotide
caagaucgagguccuggag

SEQ ID NO: 894799 - RNA, 19 nt, Artificial Sequence
  Description of Artificial Sequence: Synthetic oligonucleotide
ggugacucggcugagguca

SEQ ID NO: 894800 - RNA, 19 nt, Artificial Sequence
  Description of Artificial Sequence: Synthetic oligonucleotide
aagguuugggccaguugcu

SEQ ID NO: 894801 - RNA, 19 nt, Artificial Sequence
  Description of Artificial Sequence: Synthetic oligonucleotide
uucguccccaggagacagg

SEQ ID NO: 894802 - RNA, 19 nt, Artificial Sequence
  Description of Artificial Sequence: Synthetic oligonucleotide
gggaguagccagucugugg

SEQ ID NO: 894803 - RNA, 19 nt, Artificial Sequence
  Description of Artificial Sequence: Synthetic oligonucleotide
cuuucggggaccacagaga

SEQ ID NO: 894804 - RNA, 19 nt, Artificial Sequence
  Description of Artificial Sequence: Synthetic oligonucleotide
uuguccagagugggcaacc

SEQ ID NO: 894805 - RNA, 19 nt, Artificial Sequence
  Description of Artificial Sequence: Synthetic oligonucleotide
ggguuccuccaucuaaucc

SEQ ID NO: 894806 - RNA, 19 nt, Artificial Sequence
  Description of Artificial Sequence: Synthetic oligonucleotide
cauuuauuguaaugagugu

SEQ ID NO: 894807 - RNA, 19 nt, Artificial Sequence
  Description of Artificial Sequence: Synthetic oligonucleotide
gaagcacucaucacgggcu

SEQ ID NO: 894808 - RNA, 19 nt, Artificial Sequence
  Description of Artificial Sequence: Synthetic oligonucleotide
gguucagauugucuggaga

SEQ ID NO: 894809 - RNA, 19 nt, Artificial Sequence
  Description of Artificial Sequence: Synthetic oligonucleotide
gagagucaugaagagaagu

SEQ ID NO: 894810 - RNA, 19 nt, Artificial Sequence
  Description of Artificial Sequence: Synthetic oligonucleotide
aaggccguccaggagggaa

SEQ ID NO: 894811 - RNA, 19 nt, Artificial Sequence
  Description of Artificial Sequence: Synthetic oligonucleotide
aggaucuuuccaggaguuc

SEQ ID NO: 894812 - RNA, 19 nt, Artificial Sequence
  Description of Artificial Sequence: Synthetic oligonucleotide
ucuccaguuggguccugcu

SEQ ID NO: 894813 - RNA, 19 nt, Artificial Sequence
  Description of Artificial Sequence: Synthetic oligonucleotide
gcaaauugagggccucucc

SEQ ID NO: 894814 - RNA, 19 nt, Artificial Sequence
  Description of Artificial Sequence: Synthetic oligonucleotide
ggcacuuccggagacgcag

SEQ ID NO: 894815 - RNA, 19 nt, Artificial Sequence
  Description of Artificial Sequence: Synthetic oligonucleotide
agcgucucaggagacagau

SEQ ID NO: 894816 - RNA, 19 nt, Artificial Sequence
  Description of Artificial Sequence: Synthetic oligonucleotide
ucuaggcgguuaguguggc

SEQ ID NO: 894817 - RNA, 19 nt, Artificial Sequence
  Description of Artificial Sequence: Synthetic oligonucleotide
aucccggucauaguuggga

SEQ ID NO: 894818 - RNA, 19 nt, Artificial Sequence
  Description of Artificial Sequence: Synthetic oligonucleotide
agagagucaugaagagaag

SEQ ID NO: 894819 - RNA, 19 nt, Artificial Sequence
  Description of Artificial Sequence: Synthetic oligonucleotide
acuuccggagacgcagggg

SEQ ID NO: 894820 - RNA, 19 nt, Artificial Sequence
  Description of Artificial Sequence: Synthetic oligonucleotide
agauccucuaugaaagcua

SEQ ID NO: 894821 - RNA, 19 nt, Artificial Sequence
  Description of Artificial Sequence: Synthetic oligonucleotide
uggugagaacucuucuauu

SEQ ID NO: 894822 - RNA, 19 nt, Artificial Sequence
  Description of Artificial Sequence: Synthetic oligonucleotide
caaauugagggccucuccu

SEQ ID NO: 894823 - RNA, 19 nt, Artificial Sequence
  Description of Artificial Sequence: Synthetic oligonucleotide
aguuggggccccgaggaca

SEQ ID NO: 894824 - RNA, 19 nt, Artificial Sequence
  Description of Artificial Sequence: Synthetic oligonucleotide
ggauagggagcccggcggg

SEQ ID NO: 894825 - RNA, 19 nt, Artificial Sequence
  Description of Artificial Sequence: Synthetic oligonucleotide
gaagcuugucacagguaga

SEQ ID NO: 894826 - RNA, 19 nt, Artificial Sequence
  Description of Artificial Sequence: Synthetic oligonucleotide
aaaggcaguuggggccccg

SEQ ID NO: 894827 - RNA, 19 nt, Artificial Sequence
  Description of Artificial Sequence: Synthetic oligonucleotide
ucgggucuugacagagaac

SEQ ID NO: 894828 - RNA, 19 nt, Artificial Sequence
  Description of Artificial Sequence: Synthetic oligonucleotide
ugggagguuucguggcaca

SEQ ID NO: 894829 - RNA, 19 nt, Artificial Sequence
  Description of Artificial Sequence: Synthetic oligonucleotide
gauuugguucagauugucu

SEQ ID NO: 894830 - RNA, 19 nt, Artificial Sequence
  Description of Artificial Sequence: Synthetic oligonucleotide
gauuaggggugacucggcu

SEQ ID NO: 894831 - RNA, 19 nt, Artificial Sequence
  Description of Artificial Sequence: Synthetic oligonucleotide
cuaggaggguaguggcaac

SEQ ID NO: 894832 - RNA, 19 nt, Artificial Sequence
  Description of Artificial Sequence: Synthetic oligonucleotide
caaucuaggcgguuagugu

SEQ ID NO: 894833 - RNA, 19 nt, Artificial Sequence
  Description of Artificial Sequence: Synthetic oligonucleotide
ugcugacaaaagccugcuc

SEQ ID NO: 894834 - RNA, 19 nt, Artificial Sequence
  Description of Artificial Sequence: Synthetic oligonucleotide
uguucguccccaggagaca

SEQ ID NO: 894835 - RNA, 19 nt, Artificial Sequence
  Description of Artificial Sequence: Synthetic oligonucleotide
ccauacaccacguguugac

SEQ ID NO: 894836 - RNA, 19 nt, Artificial Sequence
  Description of Artificial Sequence: Synthetic oligonucleotide
guugacgcucagaaaggca

SEQ ID NO: 894837 - RNA, 19 nt, Artificial Sequence
  Description of Artificial Sequence: Synthetic oligonucleotide
gcagguagugugguugagg

SEQ ID NO: 894838 - RNA, 19 nt, Artificial Sequence
  Description of Artificial Sequence: Synthetic oligonucleotide
ucccggucauaguugggau

SEQ ID NO: 894839 - RNA, 19 nt, Artificial Sequence
  Description of Artificial Sequence: Synthetic oligonucleotide
ggaacgccaucuccagccg

SEQ ID NO: 894840 - RNA, 19 nt, Artificial Sequence
  Description of Artificial Sequence: Synthetic oligonucleotide
acaccacguguugacgcuc

SEQ ID NO: 894841 - RNA, 19 nt, Artificial Sequence
  Description of Artificial Sequence: Synthetic oligonucleotide
auagggagcccggcgggag

SEQ ID NO: 894842 - RNA, 19 nt, Artificial Sequence
  Description of Artificial Sequence: Synthetic oligonucleotide
uggcgacuaaggugggagu

SEQ ID NO: 894843 - RNA, 19 nt, Artificial Sequence
  Description of Artificial Sequence: Synthetic oligonucleotide
uggggccccgaggacaugc

SEQ ID NO: 894844 - RNA, 19 nt, Artificial Sequence
  Description of Artificial Sequence: Synthetic oligonucleotide
gcagcgggaauauccaguc

SEQ ID NO: 894845 - RNA, 19 nt, Artificial Sequence
  Description of Artificial Sequence: Synthetic oligonucleotide
guuggcuuguucgucccca

SEQ ID NO: 894846 - RNA, 19 nt, Artificial Sequence
  Description of Artificial Sequence: Synthetic oligonucleotide
ggugagaacucuucuauuu

SEQ ID NO: 894847 - RNA, 19 nt, Artificial Sequence
  Description of Artificial Sequence: Synthetic oligonucleotide
ggcagucauguucuggauc

SEQ ID NO: 894848 - RNA, 19 nt, Artificial Sequence
  Description of Artificial Sequence: Synthetic oligonucleotide
ggcgcagguagugugguug

SEQ ID NO: 894849 - RNA, 19 nt, Artificial Sequence
  Description of Artificial Sequence: Synthetic oligonucleotide
gggaccauacaccacgugu

SEQ ID NO: 894850 - RNA, 19 nt, Artificial Sequence
  Description of Artificial Sequence: Synthetic oligonucleotide
ccaagaggcauuuauugua

SEQ ID NO: 894851 - RNA, 19 nt, Artificial Sequence
  Description of Artificial Sequence: Synthetic oligonucleotide
gggcagaacacagcagcgg

SEQ ID NO: 894852 - RNA, 19 nt, Artificial Sequence
  Description of Artificial Sequence: Synthetic oligonucleotide
aggagacagguuacagcag

SEQ ID NO: 894853 - RNA, 19 nt, Artificial Sequence
  Description of Artificial Sequence: Synthetic oligonucleotide
cacagguagaucuggacuu

SEQ ID NO: 894854 - RNA, 19 nt, Artificial Sequence
  Description of Artificial Sequence: Synthetic oligonucleotide
aagggccaaagaggccaag

SEQ ID NO: 894855 - RNA, 19 nt, Artificial Sequence
  Description of Artificial Sequence: Synthetic oligonucleotide
gacucggcugaggucaaga

SEQ ID NO: 894856 - RNA, 19 nt, Artificial Sequence
  Description of Artificial Sequence: Synthetic oligonucleotide
gucaagauaucccggucau

SEQ ID NO: 894857 - RNA, 19 nt, Artificial Sequence
  Description of Artificial Sequence: Synthetic oligonucleotide
ucggaguccccguguuugu

SEQ ID NO: 894858 - RNA, 19 nt, Artificial Sequence
  Description of Artificial Sequence: Synthetic oligonucleotide
agggccaaagaggccaaga

SEQ ID NO: 894859 - RNA, 19 nt, Artificial Sequence
  Description of Artificial Sequence: Synthetic oligonucleotide
gcggaagcgucucaggaga

SEQ ID NO: 894860 - RNA, 19 nt, Artificial Sequence
  Description of Artificial Sequence: Synthetic oligonucleotide
agggcuggcgcagguagug

SEQ ID NO: 894861 - RNA, 19 nt, Artificial Sequence
  Description of Artificial Sequence: Synthetic oligonucleotide
acguguugacgcucagaaa

SEQ ID NO: 894862 - RNA, 19 nt, Artificial Sequence
  Description of Artificial Sequence: Synthetic oligonucleotide
cccgcuguuugcagcaccg

SEQ ID NO: 894863 - RNA, 19 nt, Artificial Sequence
  Description of Artificial Sequence: Synthetic oligonucleotide
aucgagacuuggggagggg

SEQ ID NO: 894864 - RNA, 19 nt, Artificial Sequence
  Description of Artificial Sequence: Synthetic oligonucleotide
ugccucuggauggggucag

SEQ ID NO: 894865 - RNA, 19 nt, Artificial Sequence
  Description of Artificial Sequence: Synthetic oligonucleotide
uucguggcacagagcggaa

SEQ ID NO: 894866 - RNA, 19 nt, Artificial Sequence
  Description of Artificial Sequence: Synthetic oligonucleotide
cuuggacccaggggcgggg

SEQ ID NO: 894867 - RNA, 19 nt, Artificial Sequence
  Description of Artificial Sequence: Synthetic oligonucleotide
cccgaucacaguauucauc

SEQ ID NO: 894868 - RNA, 19 nt, Artificial Sequence
  Description of Artificial Sequence: Synthetic oligonucleotide
cguguuuguggugggaagg

SEQ ID NO: 894869 - RNA, 19 nt, Artificial Sequence
  Description of Artificial Sequence: Synthetic oligonucleotide
caucuaauccuccgaggcu

SEQ ID NO: 894870 - RNA, 19 nt, Artificial Sequence
  Description of Artificial Sequence: Synthetic oligonucleotide
aggggcgggguugacauuu

SEQ ID NO: 894871 - RNA, 19 nt, Artificial Sequence
  Description of Artificial Sequence: Synthetic oligonucleotide
agucuguggcagguuccag

SEQ ID NO: 894872 - RNA, 19 nt, Artificial Sequence
  Description of Artificial Sequence: Synthetic oligonucleotide
uugggcauaugggucuauu

SEQ ID NO: 894873 - RNA, 19 nt, Artificial Sequence
  Description of Artificial Sequence: Synthetic oligonucleotide
cacagagcggaagcgucuc

SEQ ID NO: 894874 - RNA, 19 nt, Artificial Sequence
  Description of Artificial Sequence: Synthetic oligonucleotide
cacccagaagcuugucaca

SEQ ID NO: 894875 - RNA, 19 nt, Artificial Sequence
  Description of Artificial Sequence: Synthetic oligonucleotide
ggcagcagcgcuggaacgc

SEQ ID NO: 894876 - RNA, 19 nt, Artificial Sequence
  Description of Artificial Sequence: Synthetic oligonucleotide
ggagaacccuggaccacgg

SEQ ID NO: 894877 - RNA, 19 nt, Artificial Sequence
  Description of Artificial Sequence: Synthetic oligonucleotide
gauagggagcccggcggga

SEQ ID NO: 894878 - RNA, 19 nt, Artificial Sequence
  Description of Artificial Sequence: Synthetic oligonucleotide
gcgacuaaggugggaguag

SEQ ID NO: 894879 - RNA, 19 nt, Artificial Sequence
  Description of Artificial Sequence: Synthetic oligonucleotide
agcucccgaucacaguauu

SEQ ID NO: 894880 - RNA, 19 nt, Artificial Sequence
  Description of Artificial Sequence: Synthetic oligonucleotide
uccgacccuguuggcagug

SEQ ID NO: 894881 - RNA, 19 nt, Artificial Sequence
  Description of Artificial Sequence: Synthetic oligonucleotide
cauuguccagagugggcaa

SEQ ID NO: 894882 - RNA, 19 nt, Artificial Sequence
  Description of Artificial Sequence: Synthetic oligonucleotide
aagcgucucaggagacaga

SEQ ID NO: 894883 - RNA, 19 nt, Artificial Sequence
  Description of Artificial Sequence: Synthetic oligonucleotide
cuaauccuccgaggcucag

SEQ ID NO: 894884 - RNA, 19 nt, Artificial Sequence
  Description of Artificial Sequence: Synthetic oligonucleotide
gugguugaggagccuccuc

SEQ ID NO: 894885 - RNA, 19 nt, Artificial Sequence
  Description of Artificial Sequence: Synthetic oligonucleotide
cauccagccgguagcccca

SEQ ID NO: 894886 - RNA, 19 nt, Artificial Sequence
  Description of Artificial Sequence: Synthetic oligonucleotide
gcgggaauauccagucucc

SEQ ID NO: 894887 - RNA, 19 nt, Artificial Sequence
  Description of Artificial Sequence: Synthetic oligonucleotide
uugucuggagaaggccguc

SEQ ID NO: 894888 - RNA, 19 nt, Artificial Sequence
  Description of Artificial Sequence: Synthetic oligonucleotide
gccagucuguggcagguuc

SEQ ID NO: 894889 - RNA, 19 nt, Artificial Sequence
  Description of Artificial Sequence: Synthetic oligonucleotide
cugggcuaggaggguagug

SEQ ID NO: 894890 - RNA, 19 nt, Artificial Sequence
  Description of Artificial Sequence: Synthetic oligonucleotide
cugcccgguauggaugaac

SEQ ID NO: 894891 - RNA, 19 nt, Artificial Sequence
  Description of Artificial Sequence: Synthetic oligonucleotide
ccguguuuguggugggaag

SEQ ID NO: 894892 - RNA, 19 nt, Artificial Sequence
  Description of Artificial Sequence: Synthetic oligonucleotide
gcuaggaggguaguggcaa

SEQ ID NO: 894893 - RNA, 19 nt, Artificial Sequence
  Description of Artificial Sequence: Synthetic oligonucleotide
caccacguguugacgcuca

SEQ ID NO: 894894 - RNA, 19 nt, Artificial Sequence
  Description of Artificial Sequence: Synthetic oligonucleotide
cucuccgacccuguuggca

SEQ ID NO: 894895 - RNA, 19 nt, Artificial Sequence
  Description of Artificial Sequence: Synthetic oligonucleotide
uuacagcagagggcaggau

SEQ ID NO: 894896 - RNA, 19 nt, Artificial Sequence
  Description of Artificial Sequence: Synthetic oligonucleotide
ccaagaucgagguccugga

SEQ ID NO: 894897 - RNA, 19 nt, Artificial Sequence
  Description of Artificial Sequence: Synthetic oligonucleotide
cgggguugacauuuguuuc

SEQ ID NO: 894898 - RNA, 19 nt, Artificial Sequence
  Description of Artificial Sequence: Synthetic oligonucleotide
gggagguuucguggcacag

SEQ ID NO: 894899 - RNA, 19 nt, Artificial Sequence
  Description of Artificial Sequence: Synthetic oligonucleotide
gggucuauuuccuucuguu

SEQ ID NO: 894900 - RNA, 19 nt, Artificial Sequence
  Description of Artificial Sequence: Synthetic oligonucleotide
gggcaagaacuggucacug

SEQ ID NO: 894901 - RNA, 19 nt, Artificial Sequence
  Description of Artificial Sequence: Synthetic oligonucleotide
ggcgguuaguguggcugcg

SEQ ID NO: 894902 - RNA, 19 nt, Artificial Sequence
  Description of Artificial Sequence: Synthetic oligonucleotide
cagcgggcagucauguucu

SEQ ID NO: 894903 - RNA, 19 nt, Artificial Sequence
  Description of Artificial Sequence: Synthetic oligonucleotide
cagucuguggcagguucca

SEQ ID NO: 894904 - RNA, 19 nt, Artificial Sequence
  Description of Artificial Sequence: Synthetic oligonucleotide
accacggaaggggcuggcu

SEQ ID NO: 894905 - RNA, 19 nt, Artificial Sequence
  Description of Artificial Sequence: Synthetic oligonucleotide
caagggccaaagaggccaa

SEQ ID NO: 894906 - RNA, 19 nt, Artificial Sequence
  Description of Artificial Sequence: Synthetic oligonucleotide
gcagcagcgcuggaacgcc

SEQ ID NO: 894907 - RNA, 19 nt, Artificial Sequence
  Description of Artificial Sequence: Synthetic oligonucleotide
ggagguuucguggcacaga

SEQ ID NO: 894908 - RNA, 19 nt, Artificial Sequence
  Description of Artificial Sequence: Synthetic oligonucleotide
uuggacccaggggcggggu

SEQ ID NO: 894909 - RNA, 19 nt, Artificial Sequence
  Description of Artificial Sequence: Synthetic oligonucleotide
gcgguuaguguggcugcgg

SEQ ID NO: 894910 - RNA, 19 nt, Artificial Sequence
  Description of Artificial Sequence: Synthetic oligonucleotide
agcaccgguggggucgggu

SEQ ID NO: 894911 - RNA, 19 nt, Artificial Sequence
  Description of Artificial Sequence: Synthetic oligonucleotide
gaguucuuucggggaccac

SEQ ID NO: 894912 - RNA, 19 nt, Artificial Sequence
  Description of Artificial Sequence: Synthetic oligonucleotide
ggguaguggcaacaugagu

SEQ ID NO: 894913 - RNA, 19 nt, Artificial Sequence
  Description of Artificial Sequence: Synthetic oligonucleotide
gugggaguagccagucugu

SEQ ID NO: 894914 - RNA, 19 nt, Artificial Sequence
  Description of Artificial Sequence: Synthetic oligonucleotide
ccuccaucuaauccuccga

SEQ ID NO: 894915 - RNA, 19 nt, Artificial Sequence
  Description of Artificial Sequence: Synthetic oligonucleotide
ccuuggcgacuaagguggg

SEQ ID NO: 894916 - RNA, 19 nt, Artificial Sequence
  Description of Artificial Sequence: Synthetic oligonucleotide
acucggccucacagaaucu

SEQ ID NO: 894917 - RNA, 19 nt, Artificial Sequence
  Description of Artificial Sequence: Synthetic oligonucleotide
ggcgacuaaggugggagua

SEQ ID NO: 894918 - RNA, 19 nt, Artificial Sequence
  Description of Artificial Sequence: Synthetic oligonucleotide
ccgaggcucagggugacuc

SEQ ID NO: 894919 - RNA, 19 nt, Artificial Sequence
  Description of Artificial Sequence: Synthetic oligonucleotide
gaagccggccacucuucuu

SEQ ID NO: 894920 - RNA, 19 nt, Artificial Sequence
  Description of Artificial Sequence: Synthetic oligonucleotide
ggcgggagaagcacucauc

SEQ ID NO: 894921 - RNA, 19 nt, Artificial Sequence
  Description of Artificial Sequence: Synthetic oligonucleotide
gaggcucagggugacucau

SEQ ID NO: 894922 - RNA, 19 nt, Artificial Sequence
  Description of Artificial Sequence: Synthetic oligonucleotide
ccucccacacaagcuuugc

SEQ ID NO: 894923 - RNA, 19 nt, Artificial Sequence
  Description of Artificial Sequence: Synthetic oligonucleotide
cuccgaggcucagggugac

SEQ ID NO: 894924 - RNA, 19 nt, Artificial Sequence
  Description of Artificial Sequence: Synthetic oligonucleotide
cccgguauggaugaacucu

SEQ ID NO: 894925 - RNA, 19 nt, Artificial Sequence
  Description of Artificial Sequence: Synthetic oligonucleotide
gcgcagguagugugguuga

SEQ ID NO: 894926 - RNA, 19 nt, Artificial Sequence
  Description of Artificial Sequence: Synthetic oligonucleotide
ucugcccgguauggaugaa

SEQ ID NO: 894927 - RNA, 19 nt, Artificial Sequence
  Description of Artificial Sequence: Synthetic oligonucleotide
uccgaggcucagggugacu

SEQ ID NO: 894928 - RNA, 19 nt, Artificial Sequence
  Description of Artificial Sequence: Synthetic oligonucleotide
ggcuaggaggguaguggca

SEQ ID NO: 894929 - RNA, 19 nt, Artificial Sequence
  Description of Artificial Sequence: Synthetic oligonucleotide
ccgcaggcaggugugguug

SEQ ID NO: 894930 - RNA, 19 nt, Artificial Sequence
  Description of Artificial Sequence: Synthetic oligonucleotide
ggaggacccacuucacuuu

SEQ ID NO: 894931 - RNA, 19 nt, Artificial Sequence
  Description of Artificial Sequence: Synthetic oligonucleotide
gcccgguauggaugaacuc

SEQ ID NO: 894932 - RNA, 19 nt, Artificial Sequence
  Description of Artificial Sequence: Synthetic oligonucleotide
cagggaccauacaccacgu

SEQ ID NO: 894933 - RNA, 19 nt, Artificial Sequence
  Description of Artificial Sequence: Synthetic oligonucleotide
gcucccgaucacaguauuc

SEQ ID NO: 894934 - RNA, 19 nt, Artificial Sequence
  Description of Artificial Sequence: Synthetic oligonucleotide
ggccguccaggagggaagc

SEQ ID NO: 894935 - RNA, 19 nt, Artificial Sequence
  Description of Artificial Sequence: Synthetic oligonucleotide
ccuccgaggcucaggguga

SEQ ID NO: 894936 - RNA, 19 nt, Artificial Sequence
  Description of Artificial Sequence: Synthetic oligonucleotide
ggaggcuccugcagaggca

SEQ ID NO: 894937 - RNA, 19 nt, Artificial Sequence
  Description of Artificial Sequence: Synthetic oligonucleotide
ccccgcuguuugcagcacc

SEQ ID NO: 894938 - RNA, 19 nt, Artificial Sequence
  Description of Artificial Sequence: Synthetic oligonucleotide
cacaaucuaggcgguuagu

SEQ ID NO: 894939 - RNA, 19 nt, Artificial Sequence
  Description of Artificial Sequence: Synthetic oligonucleotide
cagcgcuggaacgccaucu

SEQ ID NO: 894940 - RNA, 19 nt, Artificial Sequence
  Description of Artificial Sequence: Synthetic oligonucleotide
gaacucggccucacagaau

SEQ ID NO: 894941 - RNA, 19 nt, Artificial Sequence
  Description of Artificial Sequence: Synthetic oligonucleotide
cacacaagcuuugcacaau

SEQ ID NO: 894942 - RNA, 19 nt, Artificial Sequence
  Description of Artificial Sequence: Synthetic oligonucleotide
accgguggggucgggucuu

SEQ ID NO: 894943 - RNA, 19 nt, Artificial Sequence
  Description of Artificial Sequence: Synthetic oligonucleotide
ggaagccggccacucuucu

SEQ ID NO: 894944 - RNA, 19 nt, Artificial Sequence
  Description of Artificial Sequence: Synthetic oligonucleotide
ccucuaugaaagcuaguuu

SEQ ID NO: 894945 - RNA, 19 nt, Artificial Sequence
  Description of Artificial Sequence: Synthetic oligonucleotide
cuaggcgguuaguguggcu

SEQ ID NO: 894946 - RNA, 19 nt, Artificial Sequence
  Description of Artificial Sequence: Synthetic oligonucleotide
gcgucucaggagacagaug

SEQ ID NO: 894947 - RNA, 19 nt, Artificial Sequence
  Description of Artificial Sequence: Synthetic oligonucleotide
gcagcgcuggaacgccauc

SEQ ID NO: 894948 - RNA, 19 nt, Artificial Sequence
  Description of Artificial Sequence: Synthetic oligonucleotide
cagcucccgaucacaguau

SEQ ID NO: 894949 - RNA, 19 nt, Artificial Sequence
  Description of Artificial Sequence: Synthetic oligonucleotide
gggccccgaggacaugcca

SEQ ID NO: 894950 - RNA, 19 nt, Artificial Sequence
  Description of Artificial Sequence: Synthetic oligonucleotide
caccgguggggucgggucu

SEQ ID NO: 894951 - RNA, 19 nt, Artificial Sequence
  Description of Artificial Sequence: Synthetic oligonucleotide
gugacucggcugaggucaa

SEQ ID NO: 894952 - RNA, 19 nt, Artificial Sequence
  Description of Artificial Sequence: Synthetic oligonucleotide
gccguccaggagggaagcc

SEQ ID NO: 894953 - RNA, 19 nt, Artificial Sequence
  Description of Artificial Sequence: Synthetic oligonucleotide
gcacagagcggaagcgucu

SEQ ID NO: 894954 - RNA, 19 nt, Artificial Sequence
  Description of Artificial Sequence: Synthetic oligonucleotide
ccgguauggaugaacucuu

SEQ ID NO: 894955 - RNA, 19 nt, Artificial Sequence
  Description of Artificial Sequence: Synthetic oligonucleotide
ggggcgggguugacauuug

SEQ ID NO: 894956 - RNA, 19 nt, Artificial Sequence
  Description of Artificial Sequence: Synthetic oligonucleotide
cacucggaguccccguguu

SEQ ID NO: 894957 - RNA, 19 nt, Artificial Sequence
  Description of Artificial Sequence: Synthetic oligonucleotide
cucuggcggcagcagcgcu

SEQ ID NO: 894958 - RNA, 19 nt, Artificial Sequence
  Description of Artificial Sequence: Synthetic oligonucleotide
cuccgacccuguuggcagu

SEQ ID NO: 894959 - RNA, 19 nt, Artificial Sequence
  Description of Artificial Sequence: Synthetic oligonucleotide
ccgacccuguuggcagugc

SEQ ID NO: 894960 - RNA, 19 nt, Artificial Sequence
  Description of Artificial Sequence: Synthetic oligonucleotide
ggggugcugcauagcccac

SEQ ID NO: 894961 - RNA, 19 nt, Artificial Sequence
  Description of Artificial Sequence: Synthetic oligonucleotide
guugggcauaugggucuau

SEQ ID NO: 894962 - RNA, 19 nt, Artificial Sequence
  Description of Artificial Sequence: Synthetic oligonucleotide
gcgacagcagcgggaauau

SEQ ID NO: 894963 - RNA, 19 nt, Artificial Sequence
  Description of Artificial Sequence: Synthetic oligonucleotide
cgcagguagugugguugag

SEQ ID NO: 894964 - RNA, 19 nt, Artificial Sequence
  Description of Artificial Sequence: Synthetic oligonucleotide
ggcgggguugacauuuguu

SEQ ID NO: 894965 - RNA, 19 nt, Artificial Sequence
  Description of Artificial Sequence: Synthetic oligonucleotide
gggcacuuccggagacgca

SEQ ID NO: 894966 - RNA, 19 nt, Artificial Sequence
  Description of Artificial Sequence: Synthetic oligonucleotide
gggcgggguugacauuugu

SEQ ID NO: 894967 - RNA, 19 nt, Artificial Sequence
  Description of Artificial Sequence: Synthetic oligonucleotide
ccccgaggacaugccaguc

SEQ ID NO: 894968 - RNA, 19 nt, Artificial Sequence
  Description of Artificial Sequence: Synthetic oligonucleotide
cagcaccgguggggucggg

SEQ ID NO: 894969 - RNA, 19 nt, Artificial Sequence
  Description of Artificial Sequence: Synthetic oligonucleotide
gcugggcuaggaggguagu

SEQ ID NO: 894970 - RNA, 19 nt, Artificial Sequence
  Description of Artificial Sequence: Synthetic oligonucleotide
ggaguagggugggguuccu

SEQ ID NO: 894971 - RNA, 19 nt, Artificial Sequence
  Description of Artificial Sequence: Synthetic oligonucleotide
ccggcgggagaagcacuca

SEQ ID NO: 894972 - RNA, 19 nt, Artificial Sequence
  Description of Artificial Sequence: Synthetic oligonucleotide
ccgguggggucgggucuug

SEQ ID NO: 894973 - RNA, 19 nt, Artificial Sequence
  Description of Artificial Sequence: Synthetic oligonucleotide
aaauaugcgauccacgugg

SEQ ID NO: 894974 - RNA, 19 nt, Artificial Sequence
  Description of Artificial Sequence: Synthetic oligonucleotide
ucaugguuaaucuugaagc

SEQ ID NO: 894975 - RNA, 19 nt, Artificial Sequence
  Description of Artificial Sequence: Synthetic oligonucleotide
gaaugcaugaggcugaggg

SEQ ID NO: 894976 - RNA, 19 nt, Artificial Sequence
  Description of Artificial Sequence: Synthetic oligonucleotide
uuuguuauagcgcaggcca

SEQ ID NO: 894977 - RNA, 19 nt, Artificial Sequence
  Description of Artificial Sequence: Synthetic oligonucleotide
acaaugauucuucagagag

SEQ ID NO: 894978 - RNA, 19 nt, Artificial Sequence
  Description of Artificial Sequence: Synthetic oligonucleotide
uuuguuacaguccaucuug

SEQ ID NO: 894979 - RNA, 19 nt, Artificial Sequence
  Description of Artificial Sequence: Synthetic oligonucleotide
  modified_base (6)..(6): a, c, u, g, unknown or other
ucugcngaccuucuaaacg

SEQ ID NO: 894980 - RNA, 19 nt, Artificial Sequence
  Description of Artificial Sequence: Synthetic oligonucleotide
uuuagguaauagccgaugg

SEQ ID NO: 894981 - RNA, 19 nt, Artificial Sequence
  Description of Artificial Sequence: Synthetic oligonucleotide
gauggcguaauuccgaucc

SEQ ID NO: 894982 - RNA, 19 nt, Artificial Sequence
  Description of Artificial Sequence: Synthetic oligonucleotide
aaagggaucuucguguggc

SEQ ID NO: 894983 - RNA, 19 nt, Artificial Sequence
  Description of Artificial Sequence: Synthetic oligonucleotide
aaugauucuucagagagga

SEQ ID NO: 894984 - RNA, 19 nt, Artificial Sequence
  Description of Artificial Sequence: Synthetic oligonucleotide
guuugaugcaucaugaucc

SEQ ID NO: 894985 - RNA, 19 nt, Artificial Sequence
  Description of Artificial Sequence: Synthetic oligonucleotide
ucggcaaugguguagaaga

SEQ ID NO: 894986 - RNA, 19 nt, Artificial Sequence
  Description of Artificial Sequence: Synthetic oligonucleotide
ucaaauaugcgauccacgu

SEQ ID NO: 894987 - RNA, 19 nt, Artificial Sequence
  Description of Artificial Sequence: Synthetic oligonucleotide
uacgaaaucgaacuucucu

SEQ ID NO: 894988 - RNA, 19 nt, Artificial Sequence
  Description of Artificial Sequence: Synthetic oligonucleotide
uguguacauagucagugcc

SEQ ID NO: 894989 - RNA, 19 nt, Artificial Sequence
  Description of Artificial Sequence: Synthetic oligonucleotide
aaggugcucacggagaugg

SEQ ID NO: 894990 - RNA, 19 nt, Artificial Sequence
  Description of Artificial Sequence: Synthetic oligonucleotide
gauggcguaaguaaggggc

SEQ ID NO: 894991 - RNA, 19 nt, Artificial Sequence
  Description of Artificial Sequence: Synthetic oligonucleotide
uauagcgcaggccacuggg

SEQ ID NO: 894992 - RNA, 19 nt, Artificial Sequence
  Description of Artificial Sequence: Synthetic oligonucleotide
ucacaaugauucuucagag

SEQ ID NO: 894993 - RNA, 19 nt, Artificial Sequence
  Description of Artificial Sequence: Synthetic oligonucleotide
gauacauaugcaugguggc

SEQ ID NO: 894994 - RNA, 19 nt, Artificial Sequence
  Description of Artificial Sequence: Synthetic oligonucleotide
ugaugcaucaugauccgug

SEQ ID NO: 894995 - RNA, 19 nt, Artificial Sequence
  Description of Artificial Sequence: Synthetic oligonucleotide
uaugcgauccacguggccg

SEQ ID NO: 894996 - RNA, 19 nt, Artificial Sequence
  Description of Artificial Sequence: Synthetic oligonucleotide
uuugcaagccucgauauca

SEQ ID NO: 894997 - RNA, 19 nt, Artificial Sequence
  Description of Artificial Sequence: Synthetic oligonucleotide
gauacugcaauacgaaauc

SEQ ID NO: 894998 - RNA, 19 nt, Artificial Sequence
  Description of Artificial Sequence: Synthetic oligonucleotide
guagugaacuuguggaugg

SEQ ID NO: 894999 - RNA, 19 nt, Artificial Sequence
  Description of Artificial Sequence: Synthetic oligonucleotide
aagucauacaugccgcaag

SEQ ID NO: 895000 - RNA, 19 nt, Artificial Sequence
  Description of Artificial Sequence: Synthetic oligonucleotide
uuugaugcaucaugauccg

SEQ ID NO: 895001 - RNA, 19 nt, Artificial Sequence
  Description of Artificial Sequence: Synthetic oligonucleotide
uagauguauggccagcuca

SEQ ID NO: 895002 - RNA, 19 nt, Artificial Sequence
  Description of Artificial Sequence: Synthetic oligonucleotide
acgaaaucgaacuucucug

SEQ ID NO: 895003 - RNA, 19 nt, Artificial Sequence
  Description of Artificial Sequence: Synthetic oligonucleotide
caaacuuguguacauaguc

SEQ ID NO: 895004 - RNA, 19 nt, Artificial Sequence
  Description of Artificial Sequence: Synthetic oligonucleotide
ugcguuagauguauggcca

SEQ ID NO: 895005 - RNA, 19 nt, Artificial Sequence
  Description of Artificial Sequence: Synthetic oligonucleotide
ugauucuucagagaggaaa

SEQ ID NO: 895006 - RNA, 19 nt, Artificial Sequence
  Description of Artificial Sequence: Synthetic oligonucleotide
uuccuagggguaauuauug

SEQ ID NO: 895007 - RNA, 19 nt, Artificial Sequence
  Description of Artificial Sequence: Synthetic oligonucleotide
guucagauacugcaauacg

SEQ ID NO: 895008 - RNA, 19 nt, Artificial Sequence
  Description of Artificial Sequence: Synthetic oligonucleotide
  modified_base (5)..(5): a, c, u, g, unknown or other
cugcngaccuucuaaacgc

SEQ ID NO: 895009 - RNA, 19 nt, Artificial Sequence
  Description of Artificial Sequence: Synthetic oligonucleotide
gguacaaccaggaggaugg

SEQ ID NO: 895010 - RNA, 19 nt, Artificial Sequence
  Description of Artificial Sequence: Synthetic oligonucleotide
cuucuaaacgccaggugcc

SEQ ID NO: 895011 - RNA, 19 nt, Artificial Sequence
  Description of Artificial Sequence: Synthetic oligonucleotide
cucgauaucauccccauga

SEQ ID NO: 895012 - RNA, 19 nt, Artificial Sequence
  Description of Artificial Sequence: Synthetic oligonucleotide
cuuguguacauagucagug

SEQ ID NO: 895013 - RNA, 19 nt, Artificial Sequence
  Description of Artificial Sequence: Synthetic oligonucleotide
ucuguggauagcucuaugu

SEQ ID NO: 895014 - RNA, 19 nt, Artificial Sequence
  Description of Artificial Sequence: Synthetic oligonucleotide
uacugcaauacgaaaucga

SEQ ID NO: 895015 - RNA, 19 nt, Artificial Sequence
  Description of Artificial Sequence: Synthetic oligonucleotide
uguucagauacugcaauac

SEQ ID NO: 895016 - RNA, 19 nt, Artificial Sequence
  Description of Artificial Sequence: Synthetic oligonucleotide
aagggaucuucguguggcc

SEQ ID NO: 895017 - RNA, 19 nt, Artificial Sequence
  Description of Artificial Sequence: Synthetic oligonucleotide
caugucuacucccuugggg

SEQ ID NO: 895018 - RNA, 19 nt, Artificial Sequence
  Description of Artificial Sequence: Synthetic oligonucleotide
cugugcguuagauguaugg

SEQ ID NO: 895019 - RNA, 19 nt, Artificial Sequence
  Description of Artificial Sequence: Synthetic oligonucleotide
aauaugcgauccacguggc

SEQ ID NO: 895020 - RNA, 19 nt, Artificial Sequence
  Description of Artificial Sequence: Synthetic oligonucleotide
gacauuggguacaaccagg

SEQ ID NO: 895021 - RNA, 19 nt, Artificial Sequence
  Description of Artificial Sequence: Synthetic oligonucleotide
gugccuaaggugcucacgg

SEQ ID NO: 895022 - RNA, 19 nt, Artificial Sequence
  Description of Artificial Sequence: Synthetic oligonucleotide
accuauccuugacaaaagg

SEQ ID NO: 895023 - RNA, 19 nt, Artificial Sequence
  Description of Artificial Sequence: Synthetic oligonucleotide
agggguaauuauugucccc

SEQ ID NO: 895024 - RNA, 19 nt, Artificial Sequence
  Description of Artificial Sequence: Synthetic oligonucleotide
caugccgcaagaaugcaug

SEQ ID NO: 895025 - RNA, 19 nt, Artificial Sequence
  Description of Artificial Sequence: Synthetic oligonucleotide
ucuauguggguguccacug

SEQ ID NO: 895026 - RNA, 19 nt, Artificial Sequence
  Description of Artificial Sequence: Synthetic oligonucleotide
ugugcguuagauguauggc

SEQ ID NO: 895027 - RNA, 19 nt, Artificial Sequence
  Description of Artificial Sequence: Synthetic oligonucleotide
auacauaugcaugguggcg

SEQ ID NO: 895028 - RNA, 19 nt, Artificial Sequence
  Description of Artificial Sequence: Synthetic oligonucleotide
gugcguuagauguauggcc

SEQ ID NO: 895029 - RNA, 19 nt, Artificial Sequence
  Description of Artificial Sequence: Synthetic oligonucleotide
uaggagucaugguuaaucu

SEQ ID NO: 895030 - RNA, 19 nt, Artificial Sequence
  Description of Artificial Sequence: Synthetic oligonucleotide
auaugcaugguggcgagag

SEQ ID NO: 895031 - RNA, 19 nt, Artificial Sequence
  Description of Artificial Sequence: Synthetic oligonucleotide
aguagugaacuuguggaug

SEQ ID NO: 895032 - RNA, 19 nt, Artificial Sequence
  Description of Artificial Sequence: Synthetic oligonucleotide
gcuguguugauccccaccg

SEQ ID NO: 895033 - RNA, 19 nt, Artificial Sequence
  Description of Artificial Sequence: Synthetic oligonucleotide
ugaucaaggagcugacgac

SEQ ID NO: 895034 - RNA, 19 nt, Artificial Sequence
  Description of Artificial Sequence: Synthetic oligonucleotide
guaaguaaggggcuugaca

SEQ ID NO: 895035 - RNA, 19 nt, Artificial Sequence
  Description of Artificial Sequence: Synthetic oligonucleotide
uuguguacauagucagugc

SEQ ID NO: 895036 - RNA, 19 nt, Artificial Sequence
  Description of Artificial Sequence: Synthetic oligonucleotide
gaaagggaucuucgugugg

SEQ ID NO: 895037 - RNA, 19 nt, Artificial Sequence
  Description of Artificial Sequence: Synthetic oligonucleotide
ucaugauccgugugcugcg

SEQ ID NO: 895038 - RNA, 19 nt, Artificial Sequence
  Description of Artificial Sequence: Synthetic oligonucleotide
uggcggauacauaugcaug

SEQ ID NO: 895039 - RNA, 19 nt, Artificial Sequence
  Description of Artificial Sequence: Synthetic oligonucleotide
cugaggaucuucugugugc

SEQ ID NO: 895040 - RNA, 19 nt, Artificial Sequence
  Description of Artificial Sequence: Synthetic oligonucleotide
auaaaauugcugucagcaa

SEQ ID NO: 895041 - RNA, 19 nt, Artificial Sequence
  Description of Artificial Sequence: Synthetic oligonucleotide
uaaagaccugggcuacuag

SEQ ID NO: 895042 - RNA, 19 nt, Artificial Sequence
  Description of Artificial Sequence: Synthetic oligonucleotide
agauggcguaaguaagggg

SEQ ID NO: 895043 - RNA, 19 nt, Artificial Sequence
  Description of Artificial Sequence: Synthetic oligonucleotide
acggcuucggcacuuagga

SEQ ID NO: 895044 - RNA, 19 nt, Artificial Sequence
  Description of Artificial Sequence: Synthetic oligonucleotide
uguguugauccccaccgaa

SEQ ID NO: 895045 - RNA, 19 nt, Artificial Sequence
  Description of Artificial Sequence: Synthetic oligonucleotide
gaaugggguguuuugaucu

SEQ ID NO: 895046 - RNA, 19 nt, Artificial Sequence
  Description of Artificial Sequence: Synthetic oligonucleotide
agcaccguuggcaagagug

SEQ ID NO: 895047 - RNA, 19 nt, Artificial Sequence
  Description of Artificial Sequence: Synthetic oligonucleotide
ccuucuaaacgccaggugc

SEQ ID NO: 895048 - RNA, 19 nt, Artificial Sequence
  Description of Artificial Sequence: Synthetic oligonucleotide
ucaugucuacucccuuggg

SEQ ID NO: 895049 - RNA, 19 nt, Artificial Sequence
  Description of Artificial Sequence: Synthetic oligonucleotide
acguggaaggcaaacuggc

SEQ ID NO: 895050 - RNA, 19 nt, Artificial Sequence
  Description of Artificial Sequence: Synthetic oligonucleotide
acggagauggcguaaguaa

SEQ ID NO: 895051 - RNA, 19 nt, Artificial Sequence
  Description of Artificial Sequence: Synthetic oligonucleotide
agucauacaugccgcaaga

SEQ ID NO: 895052 - RNA, 19 nt, Artificial Sequence
  Description of Artificial Sequence: Synthetic oligonucleotide
uuacgcacggcuucggcac

SEQ ID NO: 895053 - RNA, 19 nt, Artificial Sequence
  Description of Artificial Sequence: Synthetic oligonucleotide
  modified_base (4)..(4): a, c, u, g, unknown or other
ugcngaccuucuaaacgcc

SEQ ID NO: 895054 - RNA, 19 nt, Artificial Sequence
  Description of Artificial Sequence: Synthetic oligonucleotide
aacgcguucugcagagccc

SEQ ID NO: 895055 - RNA, 19 nt, Artificial Sequence
  Description of Artificial Sequence: Synthetic oligonucleotide
auaugcgauccacguggcc

SEQ ID NO: 895056 - RNA, 19 nt, Artificial Sequence
  Description of Artificial Sequence: Synthetic oligonucleotide
uugauccccaccgaagcag

SEQ ID NO: 895057 - RNA, 19 nt, Artificial Sequence
  Description of Artificial Sequence: Synthetic oligonucleotide
agauacugcaauacgaaau

SEQ ID NO: 895058 - RNA, 19 nt, Artificial Sequence
  Description of Artificial Sequence: Synthetic oligonucleotide
aacgccaggugccuuggcu

SEQ ID NO: 895059 - RNA, 19 nt, Artificial Sequence
  Description of Artificial Sequence: Synthetic oligonucleotide
cuaagggacggaucucugc

SEQ ID NO: 895060 - RNA, 19 nt, Artificial Sequence
  Description of Artificial Sequence: Synthetic oligonucleotide
ggagucaugguuaaucuug

SEQ ID NO: 895061 - RNA, 19 nt, Artificial Sequence
  Description of Artificial Sequence: Synthetic oligonucleotide
gagcugacgacaauggcac

SEQ ID NO: 895062 - RNA, 19 nt, Artificial Sequence
  Description of Artificial Sequence: Synthetic oligonucleotide
cuguggcggauacauaugc

SEQ ID NO: 895063 - RNA, 19 nt, Artificial Sequence
  Description of Artificial Sequence: Synthetic oligonucleotide
caugcgaugcaucuugcuc

SEQ ID NO: 895064 - RNA, 19 nt, Artificial Sequence
  Description of Artificial Sequence: Synthetic oligonucleotide
uggggauccgcuccugucc

SEQ ID NO: 895065 - RNA, 19 nt, Artificial Sequence
  Description of Artificial Sequence: Synthetic oligonucleotide
caaauaugcgauccacgug

SEQ ID NO: 895066 - RNA, 19 nt, Artificial Sequence
  Description of Artificial Sequence: Synthetic oligonucleotide
acuuugcaagccucgauau

SEQ ID NO: 895067 - RNA, 19 nt, Artificial Sequence
  Description of Artificial Sequence: Synthetic oligonucleotide
caacgcguucugcagagcc

SEQ ID NO: 895068 - RNA, 19 nt, Artificial Sequence
  Description of Artificial Sequence: Synthetic oligonucleotide
cuuaggacgcucucgccug

SEQ ID NO: 895069 - RNA, 19 nt, Artificial Sequence
  Description of Artificial Sequence: Synthetic oligonucleotide
guaggagucaugguuaauc

SEQ ID NO: 895070 - RNA, 19 nt, Artificial Sequence
  Description of Artificial Sequence: Synthetic oligonucleotide
  modified_base (2)..(2): a, c, u, g, unknown or other
cngaccuucuaaacgccag

SEQ ID NO: 895071 - RNA, 19 nt, Artificial Sequence
  Description of Artificial Sequence: Synthetic oligonucleotide
ugcugaaccccaugaauuc

SEQ ID NO: 895072 - RNA, 19 nt, Artificial Sequence
  Description of Artificial Sequence: Synthetic oligonucleotide
uguggcggauacauaugca

SEQ ID NO: 895073 - RNA, 19 nt, Artificial Sequence
  Description of Artificial Sequence: Synthetic oligonucleotide
auggcguaauuccgauccc

SEQ ID NO: 895074 - RNA, 19 nt, Artificial Sequence
  Description of Artificial Sequence: Synthetic oligonucleotide
acauaugcaugguggcgag

SEQ ID NO: 895075 - RNA, 19 nt, Artificial Sequence
  Description of Artificial Sequence: Synthetic oligonucleotide
  modified_base (9)..(9): a, c, u, g, unknown or other
aucucugcngaccuucuaa

SEQ ID NO: 895076 - RNA, 19 nt, Artificial Sequence
  Description of Artificial Sequence: Synthetic oligonucleotide
guuuguuauagcgcaggcc

SEQ ID NO: 895077 - RNA, 19 nt, Artificial Sequence
  Description of Artificial Sequence: Synthetic oligonucleotide
uggccugugucaccaaaug

SEQ ID NO: 895078 - RNA, 19 nt, Artificial Sequence
  Description of Artificial Sequence: Synthetic oligonucleotide
  modified_base (7)..(7): a, c, u, g, unknown or other
cucugcngaccuucuaaac

SEQ ID NO: 895079 - RNA, 19 nt, Artificial Sequence
  Description of Artificial Sequence: Synthetic oligonucleotide
cuaaacgccaggugccuug

SEQ ID NO: 895080 - RNA, 19 nt, Artificial Sequence
  Description of Artificial Sequence: Synthetic oligonucleotide
ucgauaucauccccaugac

SEQ ID NO: 895081 - RNA, 19 nt, Artificial Sequence
  Description of Artificial Sequence: Synthetic oligonucleotide
gccgcaagaaugcaugagg

SEQ ID NO: 895082 - RNA, 19 nt, Artificial Sequence
  Description of Artificial Sequence: Synthetic oligonucleotide
gcaagaaugcaugaggcug

SEQ ID NO: 895083 - RNA, 19 nt, Artificial Sequence
  Description of Artificial Sequence: Synthetic oligonucleotide
augcgauccacguggccgg

SEQ ID NO: 895084 - RNA, 19 nt, Artificial Sequence
  Description of Artificial Sequence: Synthetic oligonucleotide
uguuacgcacggcuucggc

SEQ ID NO: 895085 - RNA, 19 nt, Artificial Sequence
  Description of Artificial Sequence: Synthetic oligonucleotide
auucacuuugcaagccucg

SEQ ID NO: 895086 - RNA, 19 nt, Artificial Sequence
  Description of Artificial Sequence: Synthetic oligonucleotide
acagagcacagcuggaaau

SEQ ID NO: 895087 - RNA, 19 nt, Artificial Sequence
  Description of Artificial Sequence: Synthetic oligonucleotide
aggacugcaggcagaaagg

SEQ ID NO: 895088 - RNA, 19 nt, Artificial Sequence
  Description of Artificial Sequence: Synthetic oligonucleotide
cagugcacagggaaacgcc

SEQ ID NO: 895089 - RNA, 19 nt, Artificial Sequence
  Description of Artificial Sequence: Synthetic oligonucleotide
ugauccccaccgaagcagc

SEQ ID NO: 895090 - RNA, 19 nt, Artificial Sequence
  Description of Artificial Sequence: Synthetic oligonucleotide
aaacgccaggugccuuggc

SEQ ID NO: 895091 - RNA, 19 nt, Artificial Sequence
  Description of Artificial Sequence: Synthetic oligonucleotide
gaucaaggagcugacgaca

SEQ ID NO: 895092 - RNA, 19 nt, Artificial Sequence
  Description of Artificial Sequence: Synthetic oligonucleotide
aguggcugugcguuagaug

SEQ ID NO: 895093 - RNA, 19 nt, Artificial Sequence
  Description of Artificial Sequence: Synthetic oligonucleotide
aagaaugcaugaggcugag

SEQ ID NO: 895094 - RNA, 19 nt, Artificial Sequence
  Description of Artificial Sequence: Synthetic oligonucleotide
agacggggcagcaugccgc

SEQ ID NO: 895095 - RNA, 19 nt, Artificial Sequence
  Description of Artificial Sequence: Synthetic oligonucleotide
  modified_base (8)..(8): a, c, u, g, unknown or other
ucucugcngaccuucuaaa

SEQ ID NO: 895096 - RNA, 19 nt, Artificial Sequence
  Description of Artificial Sequence: Synthetic oligonucleotide
gguaauuauuguccccacc

SEQ ID NO: 895097 - RNA, 19 nt, Artificial Sequence
  Description of Artificial Sequence: Synthetic oligonucleotide
uguuauagcgcaggccacu

SEQ ID NO: 895098 - RNA, 19 nt, Artificial Sequence
  Description of Artificial Sequence: Synthetic oligonucleotide
ugcuaagggacggaucucu

SEQ ID NO: 895099 - RNA, 19 nt, Artificial Sequence
  Description of Artificial Sequence: Synthetic oligonucleotide
auggggauccgcuccuguc

SEQ ID NO: 895100 - RNA, 19 nt, Artificial Sequence
  Description of Artificial Sequence: Synthetic oligonucleotide
aaugggguguuuugaucuu

SEQ ID NO: 895101 - RNA, 19 nt, Artificial Sequence
  Description of Artificial Sequence: Synthetic oligonucleotide
cuugcucaugcaguccugg

SEQ ID NO: 895102 - RNA, 19 nt, Artificial Sequence
  Description of Artificial Sequence: Synthetic oligonucleotide
agaucgagagcagccauca

SEQ ID NO: 895103 - RNA, 19 nt, Artificial Sequence
  Description of Artificial Sequence: Synthetic oligonucleotide
uagagaucgagagcagcca

SEQ ID NO: 895104 - RNA, 19 nt, Artificial Sequence
  Description of Artificial Sequence: Synthetic oligonucleotide
uccuugacaaaaggauuca

SEQ ID NO: 895105 - RNA, 19 nt, Artificial Sequence
  Description of Artificial Sequence: Synthetic oligonucleotide
agcgcaugccccuggcgcg

SEQ ID NO: 895106 - RNA, 19 nt, Artificial Sequence
  Description of Artificial Sequence: Synthetic oligonucleotide
ugggcuacuaggugucugu

SEQ ID NO: 895107 - RNA, 19 nt, Artificial Sequence
  Description of Artificial Sequence: Synthetic oligonucleotide
uccuagggguaauuauugu

SEQ ID NO: 895108 - RNA, 19 nt, Artificial Sequence
  Description of Artificial Sequence: Synthetic oligonucleotide
uaaacgccaggugccuugg

SEQ ID NO: 895109 - RNA, 19 nt, Artificial Sequence
  Description of Artificial Sequence: Synthetic oligonucleotide
aacgccccaaaggucuggg

SEQ ID NO: 895110 - RNA, 19 nt, Artificial Sequence
  Description of Artificial Sequence: Synthetic oligonucleotide
gacgcucucgccugugaug

SEQ ID NO: 895111 - RNA, 19 nt, Artificial Sequence
  Description of Artificial Sequence: Synthetic oligonucleotide
cacggcuucggcacuuagg

SEQ ID NO: 895112 - RNA, 19 nt, Artificial Sequence
  Description of Artificial Sequence: Synthetic oligonucleotide
cuuugaccaccucuaggug

SEQ ID NO: 895113 - RNA, 19 nt, Artificial Sequence
  Description of Artificial Sequence: Synthetic oligonucleotide
ccugacacagcugacuugg

SEQ ID NO: 895114 - RNA, 19 nt, Artificial Sequence
  Description of Artificial Sequence: Synthetic oligonucleotide
ucuacucccuuggggaagc

SEQ ID NO: 895115 - RNA, 19 nt, Artificial Sequence
  Description of Artificial Sequence: Synthetic oligonucleotide
guuacgcacggcuucggca

SEQ ID NO: 895116 - RNA, 19 nt, Artificial Sequence
  Description of Artificial Sequence: Synthetic oligonucleotide
cauuggguacaaccaggag

SEQ ID NO: 895117 - RNA, 19 nt, Artificial Sequence
  Description of Artificial Sequence: Synthetic oligonucleotide
ucacuuugcaagccucgau

SEQ ID NO: 895118 - RNA, 19 nt, Artificial Sequence
  Description of Artificial Sequence: Synthetic oligonucleotide
gaacuuguggauggggauc

SEQ ID NO: 895119 - RNA, 19 nt, Artificial Sequence
  Description of Artificial Sequence: Synthetic oligonucleotide
gcuacuaggugucugugga

SEQ ID NO: 895120 - RNA, 19 nt, Artificial Sequence
  Description of Artificial Sequence: Synthetic oligonucleotide
uacuaggugucuguggaua

SEQ ID NO: 895121 - RNA, 19 nt, Artificial Sequence
  Description of Artificial Sequence: Synthetic oligonucleotide
agcugacgacaauggcacc

SEQ ID NO: 895122 - RNA, 19 nt, Artificial Sequence
  Description of Artificial Sequence: Synthetic oligonucleotide
uggcguaauuccgaucccc

SEQ ID NO: 895123 - RNA, 19 nt, Artificial Sequence
  Description of Artificial Sequence: Synthetic oligonucleotide
gaggguguuacgcacggcu

SEQ ID NO: 895124 - RNA, 19 nt, Artificial Sequence
  Description of Artificial Sequence: Synthetic oligonucleotide
aaacgccccaaaggucugg

SEQ ID NO: 895125 - RNA, 19 nt, Artificial Sequence
  Description of Artificial Sequence: Synthetic oligonucleotide
cacaaugauucuucagaga

SEQ ID NO: 895126 - RNA, 19 nt, Artificial Sequence
  Description of Artificial Sequence: Synthetic oligonucleotide
auuccuagggguaauuauu

SEQ ID NO: 895127 - RNA, 19 nt, Artificial Sequence
  Description of Artificial Sequence: Synthetic oligonucleotide
gaugcaucaugauccgugu

SEQ ID NO: 895128 - RNA, 19 nt, Artificial Sequence
  Description of Artificial Sequence: Synthetic oligonucleotide
uagugaacuuguggauggg

SEQ ID NO: 895129 - RNA, 19 nt, Artificial Sequence
  Description of Artificial Sequence: Synthetic oligonucleotide
cauccucaaauaugcgauc

SEQ ID NO: 895130 - RNA, 19 nt, Artificial Sequence
  Description of Artificial Sequence: Synthetic oligonucleotide
agcauguaggagucauggu

SEQ ID NO: 895131 - RNA, 19 nt, Artificial Sequence
  Description of Artificial Sequence: Synthetic oligonucleotide
agcucuaugugggugucca

SEQ ID NO: 895132 - RNA, 19 nt, Artificial Sequence
  Description of Artificial Sequence: Synthetic oligonucleotide
ucggcacuuaggacgcucu

SEQ ID NO: 895133 - RNA, 19 nt, Artificial Sequence
  Description of Artificial Sequence: Synthetic oligonucleotide
uccccaccgaagcagcuuc

SEQ ID NO: 895134 - RNA, 19 nt, Artificial Sequence
  Description of Artificial Sequence: Synthetic oligonucleotide
ggcagcaugccgcuguuug

SEQ ID NO: 895135 - RNA, 19 nt, Artificial Sequence
  Description of Artificial Sequence: Synthetic oligonucleotide
ucgggugaccccagccucc

SEQ ID NO: 895136 - RNA, 19 nt, Artificial Sequence
  Description of Artificial Sequence: Synthetic oligonucleotide
ugcggcguuccccugcccu

SEQ ID NO: 895137 - RNA, 19 nt, Artificial Sequence
  Description of Artificial Sequence: Synthetic oligonucleotide
uucuaaacgccaggugccu

SEQ ID NO: 895138 - RNA, 19 nt, Artificial Sequence
  Description of Artificial Sequence: Synthetic oligonucleotide
uuaguggcugugcguuaga

SEQ ID NO: 895139 - RNA, 19 nt, Artificial Sequence
  Description of Artificial Sequence: Synthetic oligonucleotide
guuauagcgcaggccacug

SEQ ID NO: 895140 - RNA, 19 nt, Artificial Sequence
  Description of Artificial Sequence: Synthetic oligonucleotide
ucauuccuagggguaauua

SEQ ID NO: 895141 - RNA, 19 nt, Artificial Sequence
  Description of Artificial Sequence: Synthetic oligonucleotide
uccuacccgggccacucca

SEQ ID NO: 895142 - RNA, 19 nt, Artificial Sequence
  Description of Artificial Sequence: Synthetic oligonucleotide
cuuugcaagccucgauauc

SEQ ID NO: 895143 - RNA, 19 nt, Artificial Sequence
  Description of Artificial Sequence: Synthetic oligonucleotide
ccgcaagaaugcaugaggc

SEQ ID NO: 895144 - RNA, 19 nt, Artificial Sequence
  Description of Artificial Sequence: Synthetic oligonucleotide
gagucaugguuaaucuuga

SEQ ID NO: 895145 - RNA, 19 nt, Artificial Sequence
  Description of Artificial Sequence: Synthetic oligonucleotide
gauguauggccagcucaug

SEQ ID NO: 895146 - RNA, 19 nt, Artificial Sequence
  Description of Artificial Sequence: Synthetic oligonucleotide
ccuagggguaauuauuguc

SEQ ID NO: 895147 - RNA, 19 nt, Artificial Sequence
  Description of Artificial Sequence: Synthetic oligonucleotide
uuuuaguggcugugcguua

SEQ ID NO: 895148 - RNA, 19 nt, Artificial Sequence
  Description of Artificial Sequence: Synthetic oligonucleotide
ggagcugacgacaauggca

SEQ ID NO: 895149 - RNA, 19 nt, Artificial Sequence
  Description of Artificial Sequence: Synthetic oligonucleotide
augcaucaugauccgugug

SEQ ID NO: 895150 - RNA, 19 nt, Artificial Sequence
  Description of Artificial Sequence: Synthetic oligonucleotide
guugauccccaccgaagca

SEQ ID NO: 895151 - RNA, 19 nt, Artificial Sequence
  Description of Artificial Sequence: Synthetic oligonucleotide
agauguauggccagcucau

SEQ ID NO: 895152 - RNA, 19 nt, Artificial Sequence
  Description of Artificial Sequence: Synthetic oligonucleotide
agguaauagccgauggcgu

SEQ ID NO: 895153 - RNA, 19 nt, Artificial Sequence
  Description of Artificial Sequence: Synthetic oligonucleotide
ggcacuuaggacgcucucg

SEQ ID NO: 895154 - RNA, 19 nt, Artificial Sequence
  Description of Artificial Sequence: Synthetic oligonucleotide
uugcucaugcaguccugga

SEQ ID NO: 895155 - RNA, 19 nt, Artificial Sequence
  Description of Artificial Sequence: Synthetic oligonucleotide
uugcaagccucgauaucau

SEQ ID NO: 895156 - RNA, 19 nt, Artificial Sequence
  Description of Artificial Sequence: Synthetic oligonucleotide
gguguuacgcacggcuucg

SEQ ID NO: 895157 - RNA, 19 nt, Artificial Sequence
  Description of Artificial Sequence: Synthetic oligonucleotide
aggagucaugguuaaucuu

SEQ ID NO: 895158 - RNA, 19 nt, Artificial Sequence
  Description of Artificial Sequence: Synthetic oligonucleotide
cgaaaucgaacuucucugc

SEQ ID NO: 895159 - RNA, 19 nt, Artificial Sequence
  Description of Artificial Sequence: Synthetic oligonucleotide
gccaagacggggcagcaug

SEQ ID NO: 895160 - RNA, 19 nt, Artificial Sequence
  Description of Artificial Sequence: Synthetic oligonucleotide
ugcgaugcaucuugcucau

SEQ ID NO: 895161 - RNA, 19 nt, Artificial Sequence
  Description of Artificial Sequence: Synthetic oligonucleotide
agagugccgcuggccaucc

SEQ ID NO: 895162 - RNA, 19 nt, Artificial Sequence
  Description of Artificial Sequence: Synthetic oligonucleotide
ugccuaaggugcucacgga

SEQ ID NO: 895163 - RNA, 19 nt, Artificial Sequence
  Description of Artificial Sequence: Synthetic oligonucleotide
caucaugauccgugugcug

SEQ ID NO: 895164 - RNA, 19 nt, Artificial Sequence
  Description of Artificial Sequence: Synthetic oligonucleotide
ggcucaacgcguucugcag

SEQ ID NO: 895165 - RNA, 19 nt, Artificial Sequence
  Description of Artificial Sequence: Synthetic oligonucleotide
agcaugccgcuguuugaug

SEQ ID NO: 895166 - RNA, 19 nt, Artificial Sequence
  Description of Artificial Sequence: Synthetic oligonucleotide
uuaggacgcucucgccugu

SEQ ID NO: 895167 - RNA, 19 nt, Artificial Sequence
  Description of Artificial Sequence: Synthetic oligonucleotide
auccacguggccggugaac

SEQ ID NO: 895168 - RNA, 19 nt, Artificial Sequence
  Description of Artificial Sequence: Synthetic oligonucleotide
gggguaauuauugucccca

SEQ ID NO: 895169 - RNA, 19 nt, Artificial Sequence
  Description of Artificial Sequence: Synthetic oligonucleotide
ugcaagccucgauaucauc

SEQ ID NO: 895170 - RNA, 19 nt, Artificial Sequence
  Description of Artificial Sequence: Synthetic oligonucleotide
acuuguguacauagucagu

SEQ ID NO: 895171 - RNA, 19 nt, Artificial Sequence
  Description of Artificial Sequence: Synthetic oligonucleotide
caccguuggcaagaguggc

SEQ ID NO: 895172 - RNA, 19 nt, Artificial Sequence
  Description of Artificial Sequence: Synthetic oligonucleotide
caugauccgugugcugcgg

SEQ ID NO: 895173 - RNA, 19 nt, Artificial Sequence
  Description of Artificial Sequence: Synthetic oligonucleotide
ggcagcaugcccugcuaag

SEQ ID NO: 895174 - RNA, 19 nt, Artificial Sequence
  Description of Artificial Sequence: Synthetic oligonucleotide
agaaugcaugaggcugagg

SEQ ID NO: 895175 - RNA, 19 nt, Artificial Sequence
  Description of Artificial Sequence: Synthetic oligonucleotide
augccgcaagaaugcauga

SEQ ID NO: 895176 - RNA, 19 nt, Artificial Sequence
  Description of Artificial Sequence: Synthetic oligonucleotide
uagcgcaggccacuggguu

SEQ ID NO: 895177 - RNA, 19 nt, Artificial Sequence
  Description of Artificial Sequence: Synthetic oligonucleotide
gguggcgagagucucucca

SEQ ID NO: 895178 - RNA, 19 nt, Artificial Sequence
  Description of Artificial Sequence: Synthetic oligonucleotide
guuccuugcccacaaacuu

SEQ ID NO: 895179 - RNA, 19 nt, Artificial Sequence
  Description of Artificial Sequence: Synthetic oligonucleotide
auggcguaaguaaggggcu

SEQ ID NO: 895180 - RNA, 19 nt, Artificial Sequence
  Description of Artificial Sequence: Synthetic oligonucleotide
gguaauagccgauggcgua

SEQ ID NO: 895181 - RNA, 19 nt, Artificial Sequence
  Description of Artificial Sequence: Synthetic oligonucleotide
ccacguggaaggcaaacug

SEQ ID NO: 895182 - RNA, 19 nt, Artificial Sequence
  Description of Artificial Sequence: Synthetic oligonucleotide
uugaugcaucaugauccgu

SEQ ID NO: 895183 - RNA, 19 nt, Artificial Sequence
  Description of Artificial Sequence: Synthetic oligonucleotide
uaauuccgauccccaguuu

SEQ ID NO: 895184 - RNA, 19 nt, Artificial Sequence
  Description of Artificial Sequence: Synthetic oligonucleotide
cuguacaagcaucauuccu

SEQ ID NO: 895185 - RNA, 19 nt, Artificial Sequence
  Description of Artificial Sequence: Synthetic oligonucleotide
guuagauguauggccagcu

SEQ ID NO: 895186 - RNA, 19 nt, Artificial Sequence
  Description of Artificial Sequence: Synthetic oligonucleotide
cugcccgcgcggcucaacg

SEQ ID NO: 895187 - RNA, 19 nt, Artificial Sequence
  Description of Artificial Sequence: Synthetic oligonucleotide
gucgccaagacggggcagc

SEQ ID NO: 895188 - RNA, 19 nt, Artificial Sequence
  Description of Artificial Sequence: Synthetic oligonucleotide
aucaaggagcugacgacaa

SEQ ID NO: 895189 - RNA, 19 nt, Artificial Sequence
  Description of Artificial Sequence: Synthetic oligonucleotide
guggccggugaaccaugcg

SEQ ID NO: 895190 - RNA, 19 nt, Artificial Sequence
  Description of Artificial Sequence: Synthetic oligonucleotide
cauuccuagggguaauuau

SEQ ID NO: 895191 - RNA, 19 nt, Artificial Sequence
  Description of Artificial Sequence: Synthetic oligonucleotide
caagacggggcagcaugcc

SEQ ID NO: 895192 - RNA, 19 nt, Artificial Sequence
  Description of Artificial Sequence: Synthetic oligonucleotide
guggcggauacauaugcau

SEQ ID NO: 895193 - RNA, 19 nt, Artificial Sequence
  Description of Artificial Sequence: Synthetic oligonucleotide
gcguaauuccgauccccag

SEQ ID NO: 895194 - RNA, 19 nt, Artificial Sequence
  Description of Artificial Sequence: Synthetic oligonucleotide
caugccgcuguuugaugca

SEQ ID NO: 895195 - RNA, 19 nt, Artificial Sequence
  Description of Artificial Sequence: Synthetic oligonucleotide
uucggcacuuaggacgcuc

SEQ ID NO: 895196 - RNA, 19 nt, Artificial Sequence
  Description of Artificial Sequence: Synthetic oligonucleotide
aggucgccaagacggggca

SEQ ID NO: 895197 - RNA, 19 nt, Artificial Sequence
  Description of Artificial Sequence: Synthetic oligonucleotide
gcugaggguguuacgcacg

SEQ ID NO: 895198 - RNA, 19 nt, Artificial Sequence
  Description of Artificial Sequence: Synthetic oligonucleotide
gcaccguuggcaagagugg

SEQ ID NO: 895199 - RNA, 19 nt, Artificial Sequence
  Description of Artificial Sequence: Synthetic oligonucleotide
gcguuagauguauggccag

SEQ ID NO: 895200 - RNA, 19 nt, Artificial Sequence
  Description of Artificial Sequence: Synthetic oligonucleotide
ggguaauuauuguccccac

SEQ ID NO: 895201 - RNA, 19 nt, Artificial Sequence
  Description of Artificial Sequence: Synthetic oligonucleotide
aaccaggaggauggcuccu

SEQ ID NO: 895202 - RNA, 19 nt, Artificial Sequence
  Description of Artificial Sequence: Synthetic oligonucleotide
cuauguggguguccacuga

SEQ ID NO: 895203 - RNA, 19 nt, Artificial Sequence
  Description of Artificial Sequence: Synthetic oligonucleotide
uguaggagucaugguuaau

SEQ ID NO: 895204 - RNA, 19 nt, Artificial Sequence
  Description of Artificial Sequence: Synthetic oligonucleotide
gagcacagcuggaaauaga

SEQ ID NO: 895205 - RNA, 19 nt, Artificial Sequence
  Description of Artificial Sequence: Synthetic oligonucleotide
uaguggcugugcguuagau

SEQ ID NO: 895206 - RNA, 19 nt, Artificial Sequence
  Description of Artificial Sequence: Synthetic oligonucleotide
acuuguggauggggauccg

SEQ ID NO: 895207 - RNA, 19 nt, Artificial Sequence
  Description of Artificial Sequence: Synthetic oligonucleotide
uacgcacggcuucggcacu

SEQ ID NO: 895208 - RNA, 19 nt, Artificial Sequence
  Description of Artificial Sequence: Synthetic oligonucleotide
gcuucggcacuuaggacgc

SEQ ID NO: 895209 - RNA, 19 nt, Artificial Sequence
  Description of Artificial Sequence: Synthetic oligonucleotide
ucaacgcguucugcagagc

SEQ ID NO: 895210 - RNA, 19 nt, Artificial Sequence
  Description of Artificial Sequence: Synthetic oligonucleotide
gccucacugaagugguacc

SEQ ID NO: 895211 - RNA, 19 nt, Artificial Sequence
  Description of Artificial Sequence: Synthetic oligonucleotide
ucuaaacgccaggugccuu

SEQ ID NO: 895212 - RNA, 19 nt, Artificial Sequence
  Description of Artificial Sequence: Synthetic oligonucleotide
ccaagacggggcagcaugc

SEQ ID NO: 895213 - RNA, 19 nt, Artificial Sequence
  Description of Artificial Sequence: Synthetic oligonucleotide
ugccgcuguuugaugcauc

SEQ ID NO: 895214 - RNA, 19 nt, Artificial Sequence
  Description of Artificial Sequence: Synthetic oligonucleotide
uacucccuuggggaagcac

SEQ ID NO: 895215 - RNA, 19 nt, Artificial Sequence
  Description of Artificial Sequence: Synthetic oligonucleotide
  modified_base (15)..(15): a, c, u, g, unknown or other
ggacggaucucugcngacc

SEQ ID NO: 895216 - RNA, 19 nt, Artificial Sequence
  Description of Artificial Sequence: Synthetic oligonucleotide
ggguguuacgcacggcuuc

SEQ ID NO: 895217 - RNA, 19 nt, Artificial Sequence
  Description of Artificial Sequence: Synthetic oligonucleotide
ugaggguguuacgcacggc

SEQ ID NO: 895218 - RNA, 19 nt, Artificial Sequence
  Description of Artificial Sequence: Synthetic oligonucleotide
gcugacgacaauggcacca

SEQ ID NO: 895219 - RNA, 19 nt, Artificial Sequence
  Description of Artificial Sequence: Synthetic oligonucleotide
ccuaaggugcucacggaga

SEQ ID NO: 895220 - RNA, 19 nt, Artificial Sequence
  Description of Artificial Sequence: Synthetic oligonucleotide
cugggcuacuaggugucug

SEQ ID NO: 895221 - RNA, 19 nt, Artificial Sequence
  Description of Artificial Sequence: Synthetic oligonucleotide
ugcccgcgcggcucaacgc

SEQ ID NO: 895222 - RNA, 19 nt, Artificial Sequence
  Description of Artificial Sequence: Synthetic oligonucleotide
guguuacgcacggcuucgg

SEQ ID NO: 895223 - RNA, 19 nt, Artificial Sequence
  Description of Artificial Sequence: Synthetic oligonucleotide
ugguggcgagagucucucc

SEQ ID NO: 895224 - RNA, 19 nt, Artificial Sequence
  Description of Artificial Sequence: Synthetic oligonucleotide
gccgcuguuugaugcauca

SEQ ID NO: 895225 - RNA, 19 nt, Artificial Sequence
  Description of Artificial Sequence: Synthetic oligonucleotide
guggcgagagucucuccaa

SEQ ID NO: 895226 - RNA, 19 nt, Artificial Sequence
  Description of Artificial Sequence: Synthetic oligonucleotide
ccugcuaagggacggaucu

SEQ ID NO: 895227 - RNA, 19 nt, Artificial Sequence
  Description of Artificial Sequence: Synthetic oligonucleotide
ggauucacuuugcaagccu

SEQ ID NO: 895228 - RNA, 19 nt, Artificial Sequence
  Description of Artificial Sequence: Synthetic oligonucleotide
auagcgcaggccacugggu

SEQ ID NO: 895229 - RNA, 19 nt, Artificial Sequence
  Description of Artificial Sequence: Synthetic oligonucleotide
ccaaauggcuguguugauc

SEQ ID NO: 895230 - RNA, 19 nt, Artificial Sequence
  Description of Artificial Sequence: Synthetic oligonucleotide
ggcguaaguaaggggcuug

SEQ ID NO: 895231 - RNA, 19 nt, Artificial Sequence
  Description of Artificial Sequence: Synthetic oligonucleotide
gccacccgcuccuacccgg

SEQ ID NO: 895232 - RNA, 19 nt, Artificial Sequence
  Description of Artificial Sequence: Synthetic oligonucleotide
ccuguggcggauacauaug

SEQ ID NO: 895233 - RNA, 19 nt, Artificial Sequence
  Description of Artificial Sequence: Synthetic oligonucleotide
gcccgcgcggcucaacgcg

SEQ ID NO: 895234 - RNA, 19 nt, Artificial Sequence
  Description of Artificial Sequence: Synthetic oligonucleotide
cauggagcgcaugccccug

SEQ ID NO: 895235 - RNA, 19 nt, Artificial Sequence
  Description of Artificial Sequence: Synthetic oligonucleotide
ggguaaagaccugggcuac

SEQ ID NO: 895236 - RNA, 19 nt, Artificial Sequence
  Description of Artificial Sequence: Synthetic oligonucleotide
cuguguugauccccaccga

SEQ ID NO: 895237 - RNA, 19 nt, Artificial Sequence
  Description of Artificial Sequence: Synthetic oligonucleotide
gcucaacgcguucugcaga

SEQ ID NO: 895238 - RNA, 19 nt, Artificial Sequence
  Description of Artificial Sequence: Synthetic oligonucleotide
uggcguaaguaaggggcuu

SEQ ID NO: 895239 - RNA, 19 nt, Artificial Sequence
  Description of Artificial Sequence: Synthetic oligonucleotide
ggcguaauuccgaucccca

SEQ ID NO: 895240 - RNA, 19 nt, Artificial Sequence
  Description of Artificial Sequence: Synthetic oligonucleotide
ucucuccaagaagucucuu

SEQ ID NO: 895241 - RNA, 19 nt, Artificial Sequence
  Description of Artificial Sequence: Synthetic oligonucleotide
caugcaguccuggagccgu

SEQ ID NO: 895242 - RNA, 19 nt, Artificial Sequence
  Description of Artificial Sequence: Synthetic oligonucleotide
cuccuacccgggccacucc

SEQ ID NO: 895243 - RNA, 19 nt, Artificial Sequence
  Description of Artificial Sequence: Synthetic oligonucleotide
uggcaccagcauugaccca

SEQ ID NO: 895244 - RNA, 19 nt, Artificial Sequence
  Description of Artificial Sequence: Synthetic oligonucleotide
cacagggaaacgccccaaa

SEQ ID NO: 895245 - RNA, 19 nt, Artificial Sequence
  Description of Artificial Sequence: Synthetic oligonucleotide
acgccccaaaggucugggu

SEQ ID NO: 895246 - RNA, 19 nt, Artificial Sequence
  Description of Artificial Sequence: Synthetic oligonucleotide
gcuaagggacggaucucug

SEQ ID NO: 895247 - RNA, 19 nt, Artificial Sequence
  Description of Artificial Sequence: Synthetic oligonucleotide
aggguguuacgcacggcuu

SEQ ID NO: 895248 - RNA, 19 nt, Artificial Sequence
  Description of Artificial Sequence: Synthetic oligonucleotide
gccggugaaccaugcgaug

SEQ ID NO: 895249 - RNA, 19 nt, Artificial Sequence
  Description of Artificial Sequence: Synthetic oligonucleotide
cgcggccucacugaagugg

SEQ ID NO: 895250 - RNA, 19 nt, Artificial Sequence
  Description of Artificial Sequence: Synthetic oligonucleotide
cugcuaagggacggaucuc

SEQ ID NO: 895251 - RNA, 19 nt, Artificial Sequence
  Description of Artificial Sequence: Synthetic oligonucleotide
cuacccgggccacuccaga

SEQ ID NO: 895252 - RNA, 19 nt, Artificial Sequence
  Description of Artificial Sequence: Synthetic oligonucleotide
cguuagauguauggccagc

SEQ ID NO: 895253 - RNA, 19 nt, Artificial Sequence
  Description of Artificial Sequence: Synthetic oligonucleotide
  modified_base (3)..(3): a, c, u, g, unknown or other
gcngaccuucuaaacgcca

SEQ ID NO: 895254 - RNA, 19 nt, Artificial Sequence
  Description of Artificial Sequence: Synthetic oligonucleotide
gcagcaugccgcuguuuga

SEQ ID NO: 895255 - RNA, 19 nt, Artificial Sequence
  Description of Artificial Sequence: Synthetic oligonucleotide
augccgcuguuugaugcau

SEQ ID NO: 895256 - RNA, 19 nt, Artificial Sequence
  Description of Artificial Sequence: Synthetic oligonucleotide
gcccacaaacuuguguaca

SEQ ID NO: 895257 - RNA, 19 nt, Artificial Sequence
  Description of Artificial Sequence: Synthetic oligonucleotide
gacggggcagcaugccgcu

SEQ ID NO: 895258 - RNA, 19 nt, Artificial Sequence
  Description of Artificial Sequence: Synthetic oligonucleotide
ggcuugacacaggacugca

SEQ ID NO: 895259 - RNA, 19 nt, Artificial Sequence
  Description of Artificial Sequence: Synthetic oligonucleotide
cauaugcaugguggcgaga

SEQ ID NO: 895260 - RNA, 19 nt, Artificial Sequence
  Description of Artificial Sequence: Synthetic oligonucleotide
gccgauggcguaauuccga

SEQ ID NO: 895261 - RNA, 19 nt, Artificial Sequence
  Description of Artificial Sequence: Synthetic oligonucleotide
cuggcagacccacguggaa

SEQ ID NO: 895262 - RNA, 19 nt, Artificial Sequence
  Description of Artificial Sequence: Synthetic oligonucleotide
ccuacccgggccacuccag

SEQ ID NO: 895263 - RNA, 19 nt, Artificial Sequence
  Description of Artificial Sequence: Synthetic oligonucleotide
cguuccccugcccugcgcc

SEQ ID NO: 895264 - RNA, 19 nt, Artificial Sequence
  Description of Artificial Sequence: Synthetic oligonucleotide
ggcguuccccugcccugcg

SEQ ID NO: 895265 - RNA, 19 nt, Artificial Sequence
  Description of Artificial Sequence: Synthetic oligonucleotide
ugcgauccacguggccggu

SEQ ID NO: 895266 - RNA, 19 nt, Artificial Sequence
  Description of Artificial Sequence: Synthetic oligonucleotide
ccacuccagacgugcgagc

SEQ ID NO: 895267 - RNA, 19 nt, Artificial Sequence
  Description of Artificial Sequence: Synthetic oligonucleotide
gggaagcacuucuuuuccu

SEQ ID NO: 895268 - RNA, 19 nt, Artificial Sequence
  Description of Artificial Sequence: Synthetic oligonucleotide
gccgcggccucacugaagu

SEQ ID NO: 895269 - RNA, 19 nt, Artificial Sequence
  Description of Artificial Sequence: Synthetic oligonucleotide
ccucgauaucauccccaug

SEQ ID NO: 895270 - RNA, 19 nt, Artificial Sequence
  Description of Artificial Sequence: Synthetic oligonucleotide
gcacggcuucggcacuuag

SEQ ID NO: 895271 - RNA, 19 nt, Artificial Sequence
  Description of Artificial Sequence: Synthetic oligonucleotide
gcucuauguggguguccac

SEQ ID NO: 895272 - RNA, 19 nt, Artificial Sequence
  Description of Artificial Sequence: Synthetic oligonucleotide
cuccaagaagucucuuguu

SEQ ID NO: 895273 - RNA, 19 nt, Artificial Sequence
  Description of Artificial Sequence: Synthetic oligonucleotide
gcggcguuccccugcccug

SEQ ID NO: 895274 - RNA, 19 nt, Artificial Sequence
  Description of Artificial Sequence: Synthetic oligonucleotide
cccugcuaagggacggauc

SEQ ID NO: 895275 - RNA, 19 nt, Artificial Sequence
  Description of Artificial Sequence: Synthetic oligonucleotide
ggaccuggguaaagaccug

SEQ ID NO: 895276 - RNA, 19 nt, Artificial Sequence
  Description of Artificial Sequence: Synthetic oligonucleotide
gcguaaguaaggggcuuga

SEQ ID NO: 895277 - RNA, 19 nt, Artificial Sequence
  Description of Artificial Sequence: Synthetic oligonucleotide
gcugugcguuagauguaug

SEQ ID NO: 895278 - RNA, 19 nt, Artificial Sequence
  Description of Artificial Sequence: Synthetic oligonucleotide
  modified_base (12)..(12): a, c, u, g, unknown or other
cggaucucugcngaccuuc

SEQ ID NO: 895279 - RNA, 19 nt, Artificial Sequence
  Description of Artificial Sequence: Synthetic oligonucleotide
gagcgggccccggcucggg

SEQ ID NO: 895280 - RNA, 19 nt, Artificial Sequence
  Description of Artificial Sequence: Synthetic oligonucleotide
ggucgccaagacggggcag

SEQ ID NO: 895281 - RNA, 19 nt, Artificial Sequence
  Description of Artificial Sequence: Synthetic oligonucleotide
cguaauuccgauccccagu

SEQ ID NO: 895282 - RNA, 19 nt, Artificial Sequence
  Description of Artificial Sequence: Synthetic oligonucleotide
gccccuggcgcgccacccg

SEQ ID NO: 895283 - RNA, 19 nt, Artificial Sequence
  Description of Artificial Sequence: Synthetic oligonucleotide
cagcaugccgcuguuugau

SEQ ID NO: 895284 - RNA, 19 nt, Artificial Sequence
  Description of Artificial Sequence: Synthetic oligonucleotide
ccccaccgaagcagcuucc

SEQ ID NO: 895285 - RNA, 19 nt, Artificial Sequence
  Description of Artificial Sequence: Synthetic oligonucleotide
ggcugugcguuagauguau

SEQ ID NO: 895286 - RNA, 19 nt, Artificial Sequence
  Description of Artificial Sequence: Synthetic oligonucleotide
cgauggcguaauuccgauc

SEQ ID NO: 895287 - RNA, 19 nt, Artificial Sequence
  Description of Artificial Sequence: Synthetic oligonucleotide
caucauuccuagggguaau

SEQ ID NO: 895288 - RNA, 19 nt, Artificial Sequence
  Description of Artificial Sequence: Synthetic oligonucleotide
gugcggcguuccccugccc

SEQ ID NO: 895289 - RNA, 19 nt, Artificial Sequence
  Description of Artificial Sequence: Synthetic oligonucleotide
gguaaagaccugggcuacu

SEQ ID NO: 895290 - RNA, 19 nt, Artificial Sequence
  Description of Artificial Sequence: Synthetic oligonucleotide
gucccucggcaauggugua

SEQ ID NO: 895291 - RNA, 19 nt, Artificial Sequence
  Description of Artificial Sequence: Synthetic oligonucleotide
gagugccgcuggccaucca

SEQ ID NO: 895292 - RNA, 19 nt, Artificial Sequence
  Description of Artificial Sequence: Synthetic oligonucleotide
gcggauacauaugcauggu

SEQ ID NO: 895293 - RNA, 19 nt, Artificial Sequence
  Description of Artificial Sequence: Synthetic oligonucleotide
cacguggccggugaaccau

SEQ ID NO: 895294 - RNA, 19 nt, Artificial Sequence
  Description of Artificial Sequence: Synthetic oligonucleotide
cgauccacguggccgguga

SEQ ID NO: 895295 - RNA, 19 nt, Artificial Sequence
  Description of Artificial Sequence: Synthetic oligonucleotide
cggugaaccaugcgaugca

SEQ ID NO: 895296 - RNA, 19 nt, Artificial Sequence
  Description of Artificial Sequence: Synthetic oligonucleotide
acgcacggcuucggcacuu

SEQ ID NO: 895297 - RNA, 19 nt, Artificial Sequence
  Description of Artificial Sequence: Synthetic oligonucleotide
gcguuccccugcccugcgc

SEQ ID NO: 895298 - RNA, 19 nt, Artificial Sequence
  Description of Artificial Sequence: Synthetic oligonucleotide
cggcuucggcacuuaggac

SEQ ID NO: 895299 - RNA, 19 nt, Artificial Sequence
  Description of Artificial Sequence: Synthetic oligonucleotide
cuacucccuuggggaagca

SEQ ID NO: 895300 - RNA, 19 nt, Artificial Sequence
  Description of Artificial Sequence: Synthetic oligonucleotide
gcgcaugccccuggcgcgc

SEQ ID NO: 895301 - RNA, 19 nt, Artificial Sequence
  Description of Artificial Sequence: Synthetic oligonucleotide
gcacagggaaacgccccaa

SEQ ID NO: 895302 - RNA, 19 nt, Artificial Sequence
  Description of Artificial Sequence: Synthetic oligonucleotide
gcgaugcaucuugcucaug

SEQ ID NO: 895303 - RNA, 19 nt, Artificial Sequence
  Description of Artificial Sequence: Synthetic oligonucleotide
ccggcucgggugaccccag

SEQ ID NO: 895304 - RNA, 19 nt, Artificial Sequence
  Description of Artificial Sequence: Synthetic oligonucleotide
gcgauccacguggccggug

SEQ ID NO: 895305 - RNA, 19 nt, Artificial Sequence
  Description of Artificial Sequence: Synthetic oligonucleotide
cccggcucgggugacccca

SEQ ID NO: 895306 - RNA, 19 nt, Artificial Sequence
  Description of Artificial Sequence: Synthetic oligonucleotide
cggcacuuaggacgcucuc

SEQ ID NO: 895307 - RNA, 19 nt, Artificial Sequence
  Description of Artificial Sequence: Synthetic oligonucleotide
cgggugaccccagccuccc

SEQ ID NO: 895308 - RNA, 19 nt, Artificial Sequence
  Description of Artificial Sequence: Synthetic oligonucleotide
ccgcggccucacugaagug

SEQ ID NO: 895309 - RNA, 19 nt, Artificial Sequence
  Description of Artificial Sequence: Synthetic oligonucleotide
cggcguuccccugcccugc

SEQ ID NO: 895310 - RNA, 19 nt, Artificial Sequence
  Description of Artificial Sequence: Synthetic oligonucleotide
cagcaccguuggcaagagu

SEQ ID NO: 895311 - RNA, 19 nt, Artificial Sequence
  Description of Artificial Sequence: Synthetic oligonucleotide
ccaggagcgggccccggcu

SEQ ID NO: 895312 - RNA, 19 nt, Artificial Sequence
  Description of Artificial Sequence: Synthetic oligonucleotide
cuucggcacuuaggacgcu

SEQ ID NO: 895313 - RNA, 19 nt, Artificial Sequence
  Description of Artificial Sequence: Synthetic oligonucleotide
gcccugcuaagggacggau

SEQ ID NO: 895314 - RNA, 19 nt, Artificial Sequence
  Description of Artificial Sequence: Synthetic oligonucleotide
cgcgcggcucaacgcguuc

SEQ ID NO: 895315 - RNA, 19 nt, Artificial Sequence
  Description of Artificial Sequence: Synthetic oligonucleotide
ccgcuccuacccgggccac

SEQ ID NO: 895316 - RNA, 19 nt, Artificial Sequence
  Description of Artificial Sequence: Synthetic oligonucleotide
cccgcgcggcucaacgcgu

SEQ ID NO: 895317 - RNA, 19 nt, Artificial Sequence
  Description of Artificial Sequence: Synthetic oligonucleotide
ccuuggcucccacccgcuu

SEQ ID NO: 895318 - RNA, 19 nt, Artificial Sequence
  Description of Artificial Sequence: Synthetic oligonucleotide
ccgcuguuugaugcaucau

SEQ ID NO: 895319 - RNA, 19 nt, Artificial Sequence
  Description of Artificial Sequence: Synthetic oligonucleotide
cgcacggcuucggcacuua

SEQ ID NO: 895320 - RNA, 19 nt, Artificial Sequence
  Description of Artificial Sequence: Synthetic oligonucleotide
cgcuccuacccgggccacu

SEQ ID NO: 895321 - RNA, 19 nt, Artificial Sequence
  Description of Artificial Sequence: Synthetic oligonucleotide
aauaauuuaauuuucccug

SEQ ID NO: 895322 - RNA, 19 nt, Artificial Sequence
  Description of Artificial Sequence: Synthetic oligonucleotide
aacacuuuuagcuucacuc

SEQ ID NO: 895323 - RNA, 19 nt, Artificial Sequence
  Description of Artificial Sequence: Synthetic oligonucleotide
uauauaaucuuccacaaug

SEQ ID NO: 895324 - RNA, 19 nt, Artificial Sequence
  Description of Artificial Sequence: Synthetic oligonucleotide
acgaaugaaagcuacaagc

SEQ ID NO: 895325 - RNA, 19 nt, Artificial Sequence
  Description of Artificial Sequence: Synthetic oligonucleotide
cuugaauuaauuuaaacug

SEQ ID NO: 895326 - RNA, 19 nt, Artificial Sequence
  Description of Artificial Sequence: Synthetic oligonucleotide
aaaguuuauuccgagaugg

SEQ ID NO: 895327 - RNA, 19 nt, Artificial Sequence
  Description of Artificial Sequence: Synthetic oligonucleotide
auaugagaaaucaagauac

SEQ ID NO: 895328 - RNA, 19 nt, Artificial Sequence
  Description of Artificial Sequence: Synthetic oligonucleotide
auuuauaauauuuaccugu

SEQ ID NO: 895329 - RNA, 19 nt, Artificial Sequence
  Description of Artificial Sequence: Synthetic oligonucleotide
uuaaguuaguaucuucugg

SEQ ID NO: 895330 - RNA, 19 nt, Artificial Sequence
  Description of Artificial Sequence: Synthetic oligonucleotide
aaugaaagcuacaagcugg

SEQ ID NO: 895331 - RNA, 19 nt, Artificial Sequence
  Description of Artificial Sequence: Synthetic oligonucleotide
ugcagcauuauccagauuc

SEQ ID NO: 895332 - RNA, 19 nt, Artificial Sequence
  Description of Artificial Sequence: Synthetic oligonucleotide
aagacaucacgauacacug

SEQ ID NO: 895333 - RNA, 19 nt, Artificial Sequence
  Description of Artificial Sequence: Synthetic oligonucleotide
ucuugcaugaccaguagcc

SEQ ID NO: 895334 - RNA, 19 nt, Artificial Sequence
  Description of Artificial Sequence: Synthetic oligonucleotide
aaagcuacaagcuggcgca

SEQ ID NO: 895335 - RNA, 19 nt, Artificial Sequence
  Description of Artificial Sequence: Synthetic oligonucleotide
uuuaucucguuuacgaaug

SEQ ID NO: 895336 - RNA, 19 nt, Artificial Sequence
  Description of Artificial Sequence: Synthetic oligonucleotide
uugguuucaaaaucuagag

SEQ ID NO: 895337 - RNA, 19 nt, Artificial Sequence
  Description of Artificial Sequence: Synthetic oligonucleotide
uccaaauuggccauaguca

SEQ ID NO: 895338 - RNA, 19 nt, Artificial Sequence
  Description of Artificial Sequence: Synthetic oligonucleotide
ugaauuaauuuaaacugcu

SEQ ID NO: 895339 - RNA, 19 nt, Artificial Sequence
  Description of Artificial Sequence: Synthetic oligonucleotide
aagauacacauuuauaaua

SEQ ID NO: 895340 - RNA, 19 nt, Artificial Sequence
  Description of Artificial Sequence: Synthetic oligonucleotide
cugacauacauucaaauuc

SEQ ID NO: 895341 - RNA, 19 nt, Artificial Sequence
  Description of Artificial Sequence: Synthetic oligonucleotide
cacauuuauaauauuuacc

SEQ ID NO: 895342 - RNA, 19 nt, Artificial Sequence
  Description of Artificial Sequence: Synthetic oligonucleotide
uaaguuaguaucuucugga

SEQ ID NO: 895343 - RNA, 19 nt, Artificial Sequence
  Description of Artificial Sequence: Synthetic oligonucleotide
guuaguaucuucuggauca

SEQ ID NO: 895344 - RNA, 19 nt, Artificial Sequence
  Description of Artificial Sequence: Synthetic oligonucleotide
aaaagagagagagagaauu

SEQ ID NO: 895345 - RNA, 19 nt, Artificial Sequence
  Description of Artificial Sequence: Synthetic oligonucleotide
aagagagagagagaauugg

SEQ ID NO: 895346 - RNA, 19 nt, Artificial Sequence
  Description of Artificial Sequence: Synthetic oligonucleotide
uuuaccuuccaaucuaucu

SEQ ID NO: 895347 - RNA, 19 nt, Artificial Sequence
  Description of Artificial Sequence: Synthetic oligonucleotide
ugcauagaaacccuuuuca

SEQ ID NO: 895348 - RNA, 19 nt, Artificial Sequence
  Description of Artificial Sequence: Synthetic oligonucleotide
ucgacuacuuguuacacug

SEQ ID NO: 895349 - RNA, 19 nt, Artificial Sequence
  Description of Artificial Sequence: Synthetic oligonucleotide
uaugauugucauaccaugc

SEQ ID NO: 895350 - RNA, 19 nt, Artificial Sequence
  Description of Artificial Sequence: Synthetic oligonucleotide
agcuucacucuuuggaucc

SEQ ID NO: 895351 - RNA, 19 nt, Artificial Sequence
  Description of Artificial Sequence: Synthetic oligonucleotide
uuuaaguuaguaucuucug

SEQ ID NO: 895352 - RNA, 19 nt, Artificial Sequence
  Description of Artificial Sequence: Synthetic oligonucleotide
ucguuuacgaaugaaagcu

SEQ ID NO: 895353 - RNA, 19 nt, Artificial Sequence
  Description of Artificial Sequence: Synthetic oligonucleotide
aguaucuucuggaucaacc

SEQ ID NO: 895354 - RNA, 19 nt, Artificial Sequence
  Description of Artificial Sequence: Synthetic oligonucleotide
uucucaugguucuucauag

SEQ ID NO: 895355 - RNA, 19 nt, Artificial Sequence
  Description of Artificial Sequence: Synthetic oligonucleotide
uuaauuuaaacugcucggc

SEQ ID NO: 895356 - RNA, 19 nt, Artificial Sequence
  Description of Artificial Sequence: Synthetic oligonucleotide
ucuaacugcugcuuuaaca

SEQ ID NO: 895357 - RNA, 19 nt, Artificial Sequence
  Description of Artificial Sequence: Synthetic oligonucleotide
auaauucugagcugauuuc

SEQ ID NO: 895358 - RNA, 19 nt, Artificial Sequence
  Description of Artificial Sequence: Synthetic oligonucleotide
uucaucgaaauuguuauca

SEQ ID NO: 895359 - RNA, 19 nt, Artificial Sequence
  Description of Artificial Sequence: Synthetic oligonucleotide
auauaaucuuccacaaugc

SEQ ID NO: 895360 - RNA, 19 nt, Artificial Sequence
  Description of Artificial Sequence: Synthetic oligonucleotide
gucguagucacucugggag

SEQ ID NO: 895361 - RNA, 19 nt, Artificial Sequence
  Description of Artificial Sequence: Synthetic oligonucleotide
auaaauugcagaucacuga

SEQ ID NO: 895362 - RNA, 19 nt, Artificial Sequence
  Description of Artificial Sequence: Synthetic oligonucleotide
uccgauaggaccuucuuga

SEQ ID NO: 895363 - RNA, 19 nt, Artificial Sequence
  Description of Artificial Sequence: Synthetic oligonucleotide
ucauaugagaaaucaagau

SEQ ID NO: 895364 - RNA, 19 nt, Artificial Sequence
  Description of Artificial Sequence: Synthetic oligonucleotide
ugccaguaagcguagaaag

SEQ ID NO: 895365 - RNA, 19 nt, Artificial Sequence
  Description of Artificial Sequence: Synthetic oligonucleotide
uuuuaucucguuuacgaau

SEQ ID NO: 895366 - RNA, 19 nt, Artificial Sequence
  Description of Artificial Sequence: Synthetic oligonucleotide
uuuggauccucacagacuu

SEQ ID NO: 895367 - RNA, 19 nt, Artificial Sequence
  Description of Artificial Sequence: Synthetic oligonucleotide
ucguagugacacuucaugg

SEQ ID NO: 895368 - RNA, 19 nt, Artificial Sequence
  Description of Artificial Sequence: Synthetic oligonucleotide
aguuaguaucuucuggauc

SEQ ID NO: 895369 - RNA, 19 nt, Artificial Sequence
  Description of Artificial Sequence: Synthetic oligonucleotide
auuggcagaauuccuaucu

SEQ ID NO: 895370 - RNA, 19 nt, Artificial Sequence
  Description of Artificial Sequence: Synthetic oligonucleotide
uagaaaggguguacuaccg

SEQ ID NO: 895371 - RNA, 19 nt, Artificial Sequence
  Description of Artificial Sequence: Synthetic oligonucleotide
aucacgauacacugcauag

SEQ ID NO: 895372 - RNA, 19 nt, Artificial Sequence
  Description of Artificial Sequence: Synthetic oligonucleotide
aacagugcgaccauuucuc

SEQ ID NO: 895373 - RNA, 19 nt, Artificial Sequence
  Description of Artificial Sequence: Synthetic oligonucleotide
aauucaaucacuagugaaa

SEQ ID NO: 895374 - RNA, 19 nt, Artificial Sequence
  Description of Artificial Sequence: Synthetic oligonucleotide
aguagaauucaaucacuag

SEQ ID NO: 895375 - RNA, 19 nt, Artificial Sequence
  Description of Artificial Sequence: Synthetic oligonucleotide
uuccaaucuaucuuugggc

SEQ ID NO: 895376 - RNA, 19 nt, Artificial Sequence
  Description of Artificial Sequence: Synthetic oligonucleotide
gagauggaaauucacugug

SEQ ID NO: 895377 - RNA, 19 nt, Artificial Sequence
  Description of Artificial Sequence: Synthetic oligonucleotide
uaucauaauucugagcuga

SEQ ID NO: 895378 - RNA, 19 nt, Artificial Sequence
  Description of Artificial Sequence: Synthetic oligonucleotide
uacaggucaucauaaagcu

SEQ ID NO: 895379 - RNA, 19 nt, Artificial Sequence
  Description of Artificial Sequence: Synthetic oligonucleotide
aacucuagauuauuucagu

SEQ ID NO: 895380 - RNA, 19 nt, Artificial Sequence
  Description of Artificial Sequence: Synthetic oligonucleotide
cucaacacaucguaugcgg

SEQ ID NO: 895381 - RNA, 19 nt, Artificial Sequence
  Description of Artificial Sequence: Synthetic oligonucleotide
uuuauuccgagauggaaau

SEQ ID NO: 895382 - RNA, 19 nt, Artificial Sequence
  Description of Artificial Sequence: Synthetic oligonucleotide
uacgaaugaaagcuacaag

SEQ ID NO: 895383 - RNA, 19 nt, Artificial Sequence
  Description of Artificial Sequence: Synthetic oligonucleotide
ugcucuaccaauuuggcuu

SEQ ID NO: 895384 - RNA, 19 nt, Artificial Sequence
  Description of Artificial Sequence: Synthetic oligonucleotide
agaauuggcauucaauaaa

SEQ ID NO: 895385 - RNA, 19 nt, Artificial Sequence
  Description of Artificial Sequence: Synthetic oligonucleotide
ucuaugauugucauaccau

SEQ ID NO: 895386 - RNA, 19 nt, Artificial Sequence
  Description of Artificial Sequence: Synthetic oligonucleotide
ugucauaccaugcucuuuc

SEQ ID NO: 895387 - RNA, 19 nt, Artificial Sequence
  Description of Artificial Sequence: Synthetic oligonucleotide
ugcuuuaacagugcgacca

SEQ ID NO: 895388 - RNA, 19 nt, Artificial Sequence
  Description of Artificial Sequence: Synthetic oligonucleotide
auauuuaccugucaugaaa

SEQ ID NO: 895389 - RNA, 19 nt, Artificial Sequence
  Description of Artificial Sequence: Synthetic oligonucleotide
uuauaauauuuaccuguca

SEQ ID NO: 895390 - RNA, 19 nt, Artificial Sequence
  Description of Artificial Sequence: Synthetic oligonucleotide
aucgucuucauuuaaguua

SEQ ID NO: 895391 - RNA, 19 nt, Artificial Sequence
  Description of Artificial Sequence: Synthetic oligonucleotide
gaaaggguguacuaccgug

SEQ ID NO: 895392 - RNA, 19 nt, Artificial Sequence
  Description of Artificial Sequence: Synthetic oligonucleotide
uuaacguuaaggccucucu

SEQ ID NO: 895393 - RNA, 19 nt, Artificial Sequence
  Description of Artificial Sequence: Synthetic oligonucleotide
cuaugauugucauaccaug

SEQ ID NO: 895394 - RNA, 19 nt, Artificial Sequence
  Description of Artificial Sequence: Synthetic oligonucleotide
ucaaaaucuagagacaguu

SEQ ID NO: 895395 - RNA, 19 nt, Artificial Sequence
  Description of Artificial Sequence: Synthetic oligonucleotide
uguacuaccgugucguagu

SEQ ID NO: 895396 - RNA, 19 nt, Artificial Sequence
  Description of Artificial Sequence: Synthetic oligonucleotide
ucacugaaauuuuaacucu

SEQ ID NO: 895397 - RNA, 19 nt, Artificial Sequence
  Description of Artificial Sequence: Synthetic oligonucleotide
ugucuuuaccuuccaaucu

SEQ ID NO: 895398 - RNA, 19 nt, Artificial Sequence
  Description of Artificial Sequence: Synthetic oligonucleotide
uguuucgacuacuuguuac

SEQ ID NO: 895399 - RNA, 19 nt, Artificial Sequence
  Description of Artificial Sequence: Synthetic oligonucleotide
aacguuaaggccucucuau

SEQ ID NO: 895400 - RNA, 19 nt, Artificial Sequence
  Description of Artificial Sequence: Synthetic oligonucleotide
uuuacgaaugaaagcuaca

SEQ ID NO: 895401 - RNA, 19 nt, Artificial Sequence
  Description of Artificial Sequence: Synthetic oligonucleotide
ugaccaguagccuuuagau

SEQ ID NO: 895402 - RNA, 19 nt, Artificial Sequence
  Description of Artificial Sequence: Synthetic oligonucleotide
auaaagcucagccuccuca

SEQ ID NO: 895403 - RNA, 19 nt, Artificial Sequence
  Description of Artificial Sequence: Synthetic oligonucleotide
aaggguguacuaccguguc

SEQ ID NO: 895404 - RNA, 19 nt, Artificial Sequence
  Description of Artificial Sequence: Synthetic oligonucleotide
auacagacauuuucuuggg

SEQ ID NO: 895405 - RNA, 19 nt, Artificial Sequence
  Description of Artificial Sequence: Synthetic oligonucleotide
agagagagagagaauuggc

SEQ ID NO: 895406 - RNA, 19 nt, Artificial Sequence
  Description of Artificial Sequence: Synthetic oligonucleotide
uccgagauggaaauucacu

SEQ ID NO: 895407 - RNA, 19 nt, Artificial Sequence
  Description of Artificial Sequence: Synthetic oligonucleotide
gaauucaaucacuagugaa

SEQ ID NO: 895408 - RNA, 19 nt, Artificial Sequence
  Description of Artificial Sequence: Synthetic oligonucleotide
ucugugguuucugugauac

SEQ ID NO: 895409 - RNA, 19 nt, Artificial Sequence
  Description of Artificial Sequence: Synthetic oligonucleotide
uauuccgagauggaaauuc

SEQ ID NO: 895410 - RNA, 19 nt, Artificial Sequence
  Description of Artificial Sequence: Synthetic oligonucleotide
augauugucauaccaugcu

SEQ ID NO: 895411 - RNA, 19 nt, Artificial Sequence
  Description of Artificial Sequence: Synthetic oligonucleotide
aaagagagagagagaauug

SEQ ID NO: 895412 - RNA, 19 nt, Artificial Sequence
  Description of Artificial Sequence: Synthetic oligonucleotide
cucccucugacauacauuc

SEQ ID NO: 895413 - RNA, 19 nt, Artificial Sequence
  Description of Artificial Sequence: Synthetic oligonucleotide
uggaucaaccuuuacuccu

SEQ ID NO: 895414 - RNA, 19 nt, Artificial Sequence
  Description of Artificial Sequence: Synthetic oligonucleotide
agugacacuucauggcggg

SEQ ID NO: 895415 - RNA, 19 nt, Artificial Sequence
  Description of Artificial Sequence: Synthetic oligonucleotide
aucgaaauuguuaucauaa

SEQ ID NO: 895416 - RNA, 19 nt, Artificial Sequence
  Description of Artificial Sequence: Synthetic oligonucleotide
guagaauucaaucacuagu

SEQ ID NO: 895417 - RNA, 19 nt, Artificial Sequence
  Description of Artificial Sequence: Synthetic oligonucleotide
cuccaaauuggccauaguc

SEQ ID NO: 895418 - RNA, 19 nt, Artificial Sequence
  Description of Artificial Sequence: Synthetic oligonucleotide
uagugacacuucauggcgg

SEQ ID NO: 895419 - RNA, 19 nt, Artificial Sequence
  Description of Artificial Sequence: Synthetic oligonucleotide
ugugugcagaaacucugcc

SEQ ID NO: 895420 - RNA, 19 nt, Artificial Sequence
  Description of Artificial Sequence: Synthetic oligonucleotide
ugcggcuugaauuaauuua

SEQ ID NO: 895421 - RNA, 19 nt, Artificial Sequence
  Description of Artificial Sequence: Synthetic oligonucleotide
ugagccugcacucuuuuau

SEQ ID NO: 895422 - RNA, 19 nt, Artificial Sequence
  Description of Artificial Sequence: Synthetic oligonucleotide
uuacgaaugaaagcuacaa

SEQ ID NO: 895423 - RNA, 19 nt, Artificial Sequence
  Description of Artificial Sequence: Synthetic oligonucleotide
ucaacacaucguaugcggc

SEQ ID NO: 895424 - RNA, 19 nt, Artificial Sequence
  Description of Artificial Sequence: Synthetic oligonucleotide
aaguuaguaucuucuggau

SEQ ID NO: 895425 - RNA, 19 nt, Artificial Sequence
  Description of Artificial Sequence: Synthetic oligonucleotide
agaauucaaucacuaguga

SEQ ID NO: 895426 - RNA, 19 nt, Artificial Sequence
  Description of Artificial Sequence: Synthetic oligonucleotide
ugauugucauaccaugcuc

SEQ ID NO: 895427 - RNA, 19 nt, Artificial Sequence
  Description of Artificial Sequence: Synthetic oligonucleotide
uccaaacuccuuuucguac

SEQ ID NO: 895428 - RNA, 19 nt, Artificial Sequence
  Description of Artificial Sequence: Synthetic oligonucleotide
cacuguuuaaagaugcuga

SEQ ID NO: 895429 - RNA, 19 nt, Artificial Sequence
  Description of Artificial Sequence: Synthetic oligonucleotide
agugcgaccauuucucggu

SEQ ID NO: 895430 - RNA, 19 nt, Artificial Sequence
  Description of Artificial Sequence: Synthetic oligonucleotide
aucguaugcggcuugaauu

SEQ ID NO: 895431 - RNA, 19 nt, Artificial Sequence
  Description of Artificial Sequence: Synthetic oligonucleotide
ucuuuugcaaucagcucaa

SEQ ID NO: 895432 - RNA, 19 nt, Artificial Sequence
  Description of Artificial Sequence: Synthetic oligonucleotide
cuugccgagugucauauuc

SEQ ID NO: 895433 - RNA, 19 nt, Artificial Sequence
  Description of Artificial Sequence: Synthetic oligonucleotide
cauaugagaaaucaagaua

SEQ ID NO: 895434 - RNA, 19 nt, Artificial Sequence
  Description of Artificial Sequence: Synthetic oligonucleotide
cucguagugacacuucaug

SEQ ID NO: 895435 - RNA, 19 nt, Artificial Sequence
  Description of Artificial Sequence: Synthetic oligonucleotide
uuccgauaggaccuucuug

SEQ ID NO: 895436 - RNA, 19 nt, Artificial Sequence
  Description of Artificial Sequence: Synthetic oligonucleotide
augaaagcuacaagcuggc

SEQ ID NO: 895437 - RNA, 19 nt, Artificial Sequence
  Description of Artificial Sequence: Synthetic oligonucleotide
aacucugccaguaagcgua

SEQ ID NO: 895438 - RNA, 19 nt, Artificial Sequence
  Description of Artificial Sequence: Synthetic oligonucleotide
uggcaggucgcacagcuga

SEQ ID NO: 895439 - RNA, 19 nt, Artificial Sequence
  Description of Artificial Sequence: Synthetic oligonucleotide
ggcaaaauucuucugugug

SEQ ID NO: 895440 - RNA, 19 nt, Artificial Sequence
  Description of Artificial Sequence: Synthetic oligonucleotide
aggacuugucacaagcugg

SEQ ID NO: 895441 - RNA, 19 nt, Artificial Sequence
  Description of Artificial Sequence: Synthetic oligonucleotide
aagcguagaaaggguguac

SEQ ID NO: 895442 - RNA, 19 nt, Artificial Sequence
  Description of Artificial Sequence: Synthetic oligonucleotide
uuggcagaauuccuaucug

SEQ ID NO: 895443 - RNA, 19 nt, Artificial Sequence
  Description of Artificial Sequence: Synthetic oligonucleotide
ucgcuaaggcgucucgccg

SEQ ID NO: 895444 - RNA, 19 nt, Artificial Sequence
  Description of Artificial Sequence: Synthetic oligonucleotide
augaccaguagccuuuaga

SEQ ID NO: 895445 - RNA, 19 nt, Artificial Sequence
  Description of Artificial Sequence: Synthetic oligonucleotide
uuauccgggugccaccuca

SEQ ID NO: 895446 - RNA, 19 nt, Artificial Sequence
  Description of Artificial Sequence: Synthetic oligonucleotide
acugaaauuuuaacucuag

SEQ ID NO: 895447 - RNA, 19 nt, Artificial Sequence
  Description of Artificial Sequence: Synthetic oligonucleotide
cuuuuaacguuaaggccuc

SEQ ID NO: 895448 - RNA, 19 nt, Artificial Sequence
  Description of Artificial Sequence: Synthetic oligonucleotide
uguacugcucuaccaauuu

SEQ ID NO: 895449 - RNA, 19 nt, Artificial Sequence
  Description of Artificial Sequence: Synthetic oligonucleotide
auaaucuuccacaaugcaa

SEQ ID NO: 895450 - RNA, 19 nt, Artificial Sequence
  Description of Artificial Sequence: Synthetic oligonucleotide
gucacucugggagucaccg

SEQ ID NO: 895451 - RNA, 19 nt, Artificial Sequence
  Description of Artificial Sequence: Synthetic oligonucleotide
ucugccaguaagcguagaa

SEQ ID NO: 895452 - RNA, 19 nt, Artificial Sequence
  Description of Artificial Sequence: Synthetic oligonucleotide
uuggauuuaggaacacuuu

SEQ ID NO: 895453 - RNA, 19 nt, Artificial Sequence
  Description of Artificial Sequence: Synthetic oligonucleotide
ccgagugucauauucuucc

SEQ ID NO: 895454 - RNA, 19 nt, Artificial Sequence
  Description of Artificial Sequence: Synthetic oligonucleotide
cgauacacugcauagaaac

SEQ ID NO: 895455 - RNA, 19 nt, Artificial Sequence
  Description of Artificial Sequence: Synthetic oligonucleotide
acacuguuuaaagaugcug

SEQ ID NO: 895456 - RNA, 19 nt, Artificial Sequence
  Description of Artificial Sequence: Synthetic oligonucleotide
agauggaaauucacugugg

SEQ ID NO: 895457 - RNA, 19 nt, Artificial Sequence
  Description of Artificial Sequence: Synthetic oligonucleotide
aguaagcguagaaagggug

SEQ ID NO: 895458 - RNA, 19 nt, Artificial Sequence
  Description of Artificial Sequence: Synthetic oligonucleotide
gagagagagagaauuggca

SEQ ID NO: 895459 - RNA, 19 nt, Artificial Sequence
  Description of Artificial Sequence: Synthetic oligonucleotide
agcucaaagacaucacgau

SEQ ID NO: 895460 - RNA, 19 nt, Artificial Sequence
  Description of Artificial Sequence: Synthetic oligonucleotide
ucguaugcggcuugaauua

SEQ ID NO: 895461 - RNA, 19 nt, Artificial Sequence
  Description of Artificial Sequence: Synthetic oligonucleotide
uccuccacaagcuuccgau

SEQ ID NO: 895462 - RNA, 19 nt, Artificial Sequence
  Description of Artificial Sequence: Synthetic oligonucleotide
aaguagaauucaaucacua

SEQ ID NO: 895463 - RNA, 19 nt, Artificial Sequence
  Description of Artificial Sequence: Synthetic oligonucleotide
augcaauaaauugcagauc

SEQ ID NO: 895464 - RNA, 19 nt, Artificial Sequence
  Description of Artificial Sequence: Synthetic oligonucleotide
aaaggguguacuaccgugu

SEQ ID NO: 895465 - RNA, 19 nt, Artificial Sequence
  Description of Artificial Sequence: Synthetic oligonucleotide
uggcagaauuccuaucugu

SEQ ID NO: 895466 - RNA, 19 nt, Artificial Sequence
  Description of Artificial Sequence: Synthetic oligonucleotide
uuaucucguuuacgaauga

SEQ ID NO: 895467 - RNA, 19 nt, Artificial Sequence
  Description of Artificial Sequence: Synthetic oligonucleotide
ugcugcuuuaacagugcga

SEQ ID NO: 895468 - RNA, 19 nt, Artificial Sequence
  Description of Artificial Sequence: Synthetic oligonucleotide
ucuuuaccuuccaaucuau

SEQ ID NO: 895469 - RNA, 19 nt, Artificial Sequence
  Description of Artificial Sequence: Synthetic oligonucleotide
uccuuuucguaccuggcuu

SEQ ID NO: 895470 - RNA, 19 nt, Artificial Sequence
  Description of Artificial Sequence: Synthetic oligonucleotide
acucuagauuauuucaguu

SEQ ID NO: 895471 - RNA, 19 nt, Artificial Sequence
  Description of Artificial Sequence: Synthetic oligonucleotide
uaugcggcuugaauuaauu

SEQ ID NO: 895472 - RNA, 19 nt, Artificial Sequence
  Description of Artificial Sequence: Synthetic oligonucleotide
uaacguuaaggccucucua

SEQ ID NO: 895473 - RNA, 19 nt, Artificial Sequence
  Description of Artificial Sequence: Synthetic oligonucleotide
acagugcgaccauuucucg

SEQ ID NO: 895474 - RNA, 19 nt, Artificial Sequence
  Description of Artificial Sequence: Synthetic oligonucleotide
ucgaaauuguuaucauaau

SEQ ID NO: 895475 - RNA, 19 nt, Artificial Sequence
  Description of Artificial Sequence: Synthetic oligonucleotide
ucguaccuggcuuccaucu

SEQ ID NO: 895476 - RNA, 19 nt, Artificial Sequence
  Description of Artificial Sequence: Synthetic oligonucleotide
ucaucgaaauuguuaucau

SEQ ID NO: 895477 - RNA, 19 nt, Artificial Sequence
  Description of Artificial Sequence: Synthetic oligonucleotide
aaucacuagugaaauguuu

SEQ ID NO: 895478 - RNA, 19 nt, Artificial Sequence
  Description of Artificial Sequence: Synthetic oligonucleotide
cucgcuaaggcgucucgcc

SEQ ID NO: 895479 - RNA, 19 nt, Artificial Sequence
  Description of Artificial Sequence: Synthetic oligonucleotide
cugagggucacucaacaca

SEQ ID NO: 895480 - RNA, 19 nt, Artificial Sequence
  Description of Artificial Sequence: Synthetic oligonucleotide
ccaguaagcguagaaaggg

SEQ ID NO: 895481 - RNA, 19 nt, Artificial Sequence
  Description of Artificial Sequence: Synthetic oligonucleotide
ucguccucagaauuggcau

SEQ ID NO: 895482 - RNA, 19 nt, Artificial Sequence
  Description of Artificial Sequence: Synthetic oligonucleotide
ugaaagcuacaagcuggcg

SEQ ID NO: 895483 - RNA, 19 nt, Artificial Sequence
  Description of Artificial Sequence: Synthetic oligonucleotide
acguuaaggccucucuaug

SEQ ID NO: 895484 - RNA, 19 nt, Artificial Sequence
  Description of Artificial Sequence: Synthetic oligonucleotide
uugccgagugucauauucu

SEQ ID NO: 895485 - RNA, 19 nt, Artificial Sequence
  Description of Artificial Sequence: Synthetic oligonucleotide
ugcaugaccaguagccuuu

SEQ ID NO: 895486 - RNA, 19 nt, Artificial Sequence
  Description of Artificial Sequence: Synthetic oligonucleotide
agaaaggguguacuaccgu

SEQ ID NO: 895487 - RNA, 19 nt, Artificial Sequence
  Description of Artificial Sequence: Synthetic oligonucleotide
aguuuauuccgagauggaa

SEQ ID NO: 895488 - RNA, 19 nt, Artificial Sequence
  Description of Artificial Sequence: Synthetic oligonucleotide
gugucauauucuuccuucc

SEQ ID NO: 895489 - RNA, 19 nt, Artificial Sequence
  Description of Artificial Sequence: Synthetic oligonucleotide
uuccgagauggaaauucac

SEQ ID NO: 895490 - RNA, 19 nt, Artificial Sequence
  Description of Artificial Sequence: Synthetic oligonucleotide
aggguguacuaccgugucg

SEQ ID NO: 895491 - RNA, 19 nt, Artificial Sequence
  Description of Artificial Sequence: Synthetic oligonucleotide
gcugaugagaacaucacuc

SEQ ID NO: 895492 - RNA, 19 nt, Artificial Sequence
  Description of Artificial Sequence: Synthetic oligonucleotide
uuucgacuacuuguuacac

SEQ ID NO: 895493 - RNA, 19 nt, Artificial Sequence
  Description of Artificial Sequence: Synthetic oligonucleotide
agucaccgaaguuuggaaa

SEQ ID NO: 895494 - RNA, 19 nt, Artificial Sequence
  Description of Artificial Sequence: Synthetic oligonucleotide
ugcagaucacugaaauuuu

SEQ ID NO: 895495 - RNA, 19 nt, Artificial Sequence
  Description of Artificial Sequence: Synthetic oligonucleotide
caauaaauuuccauccacu

SEQ ID NO: 895496 - RNA, 19 nt, Artificial Sequence
  Description of Artificial Sequence: Synthetic oligonucleotide
cauaauucugagcugauuu

SEQ ID NO: 895497 - RNA, 19 nt, Artificial Sequence
  Description of Artificial Sequence: Synthetic oligonucleotide
ccugcacucuuuuaucucg

SEQ ID NO: 895498 - RNA, 19 nt, Artificial Sequence
  Description of Artificial Sequence: Synthetic oligonucleotide
guuugaggcuugccgagug

SEQ ID NO: 895499 - RNA, 19 nt, Artificial Sequence
  Description of Artificial Sequence: Synthetic oligonucleotide
aguagccuuuagaugauca

SEQ ID NO: 895500 - RNA, 19 nt, Artificial Sequence
  Description of Artificial Sequence: Synthetic oligonucleotide
uugagcuccuccucgcuaa

SEQ ID NO: 895501 - RNA, 19 nt, Artificial Sequence
  Description of Artificial Sequence: Synthetic oligonucleotide
ucugugauacagacauuuu

SEQ ID NO: 895502 - RNA, 19 nt, Artificial Sequence
  Description of Artificial Sequence: Synthetic oligonucleotide
uagcuucacucuuuggauc

SEQ ID NO: 895503 - RNA, 19 nt, Artificial Sequence
  Description of Artificial Sequence: Synthetic oligonucleotide
cccuuuuaacguuaaggcc

SEQ ID NO: 895504 - RNA, 19 nt, Artificial Sequence
  Description of Artificial Sequence: Synthetic oligonucleotide
ugucguagucacucuggga

SEQ ID NO: 895505 - RNA, 19 nt, Artificial Sequence
  Description of Artificial Sequence: Synthetic oligonucleotide
ccgagauggaaauucacug

SEQ ID NO: 895506 - RNA, 19 nt, Artificial Sequence
  Description of Artificial Sequence: Synthetic oligonucleotide
uuuaacguuaaggccucuc

SEQ ID NO: 895507 - RNA, 19 nt, Artificial Sequence
  Description of Artificial Sequence: Synthetic oligonucleotide
ugaggcuugccgaguguca

SEQ ID NO: 895508 - RNA, 19 nt, Artificial Sequence
  Description of Artificial Sequence: Synthetic oligonucleotide
cugagcugauuucuguuuc

SEQ ID NO: 895509 - RNA, 19 nt, Artificial Sequence
  Description of Artificial Sequence: Synthetic oligonucleotide
cacgauacacugcauagaa

SEQ ID NO: 895510 - RNA, 19 nt, Artificial Sequence
  Description of Artificial Sequence: Synthetic oligonucleotide
ucacgauacacugcauaga

SEQ ID NO: 895511 - RNA, 19 nt, Artificial Sequence
  Description of Artificial Sequence: Synthetic oligonucleotide
uacuuguuacacuguuuaa

SEQ ID NO: 895512 - RNA, 19 nt, Artificial Sequence
  Description of Artificial Sequence: Synthetic oligonucleotide
cauucaagugaauucagau

SEQ ID NO: 895513 - RNA, 19 nt, Artificial Sequence
  Description of Artificial Sequence: Synthetic oligonucleotide
cagugcgaccauuucucgg

SEQ ID NO: 895514 - RNA, 19 nt, Artificial Sequence
  Description of Artificial Sequence: Synthetic oligonucleotide
gucaccgaaguuuggaaaa

SEQ ID NO: 895515 - RNA, 19 nt, Artificial Sequence
  Description of Artificial Sequence: Synthetic oligonucleotide
uccucgcuaaggcgucucg

SEQ ID NO: 895516 - RNA, 19 nt, Artificial Sequence
  Description of Artificial Sequence: Synthetic oligonucleotide
guacugcucuaccaauuug

SEQ ID NO: 895517 - RNA, 19 nt, Artificial Sequence
  Description of Artificial Sequence: Synthetic oligonucleotide
uaccgugucguagucacuc

SEQ ID NO: 895518 - RNA, 19 nt, Artificial Sequence
  Description of Artificial Sequence: Synthetic oligonucleotide
aguuccauuuucaucgaaa

SEQ ID NO: 895519 - RNA, 19 nt, Artificial Sequence
  Description of Artificial Sequence: Synthetic oligonucleotide
aaggccucucuaugauugu

SEQ ID NO: 895520 - RNA, 19 nt, Artificial Sequence
  Description of Artificial Sequence: Synthetic oligonucleotide
aaguuuauuccgagaugga

SEQ ID NO: 895521 - RNA, 19 nt, Artificial Sequence
  Description of Artificial Sequence: Synthetic oligonucleotide
agcuacaagcuggcgcacc

SEQ ID NO: 895522 - RNA, 19 nt, Artificial Sequence
  Description of Artificial Sequence: Synthetic oligonucleotide
ucuuauccgggugccaccu

SEQ ID NO: 895523 - RNA, 19 nt, Artificial Sequence
  Description of Artificial Sequence: Synthetic oligonucleotide
ucacucuuuggauccucac

SEQ ID NO: 895524 - RNA, 19 nt, Artificial Sequence
  Description of Artificial Sequence: Synthetic oligonucleotide
cguagugacacuucauggc

SEQ ID NO: 895525 - RNA, 19 nt, Artificial Sequence
  Description of Artificial Sequence: Synthetic oligonucleotide
ucguagucacucugggagu

SEQ ID NO: 895526 - RNA, 19 nt, Artificial Sequence
  Description of Artificial Sequence: Synthetic oligonucleotide
gaccauuucucggugcuuc

SEQ ID NO: 895527 - RNA, 19 nt, Artificial Sequence
  Description of Artificial Sequence: Synthetic oligonucleotide
uauccgggugccaccucag

SEQ ID NO: 895528 - RNA, 19 nt, Artificial Sequence
  Description of Artificial Sequence: Synthetic oligonucleotide
cuuccgaugagccugcacu

SEQ ID NO: 895529 - RNA, 19 nt, Artificial Sequence
  Description of Artificial Sequence: Synthetic oligonucleotide
uugcaugaccaguagccuu

SEQ ID NO: 895530 - RNA, 19 nt, Artificial Sequence
  Description of Artificial Sequence: Synthetic oligonucleotide
caauaaauugcagaucacu

SEQ ID NO: 895531 - RNA, 19 nt, Artificial Sequence
  Description of Artificial Sequence: Synthetic oligonucleotide
gugugcagaaacucugcca

SEQ ID NO: 895532 - RNA, 19 nt, Artificial Sequence
  Description of Artificial Sequence: Synthetic oligonucleotide
gaauuggcauucaauaaau

SEQ ID NO: 895533 - RNA, 19 nt, Artificial Sequence
  Description of Artificial Sequence: Synthetic oligonucleotide
guguacuaccgugucguag

SEQ ID NO: 895534 - RNA, 19 nt, Artificial Sequence
  Description of Artificial Sequence: Synthetic oligonucleotide
aauuggcauucaauaaauu

SEQ ID NO: 895535 - RNA, 19 nt, Artificial Sequence
  Description of Artificial Sequence: Synthetic oligonucleotide
uuccgaugagccugcacuc

SEQ ID NO: 895536 - RNA, 19 nt, Artificial Sequence
  Description of Artificial Sequence: Synthetic oligonucleotide
agcguagaaaggguguacu

SEQ ID NO: 895537 - RNA, 19 nt, Artificial Sequence
  Description of Artificial Sequence: Synthetic oligonucleotide
uaagcguagaaagggugua

SEQ ID NO: 895538 - RNA, 19 nt, Artificial Sequence
  Description of Artificial Sequence: Synthetic oligonucleotide
ggguccaucuccaaacucc

SEQ ID NO: 895539 - RNA, 19 nt, Artificial Sequence
  Description of Artificial Sequence: Synthetic oligonucleotide
gucauaccaugcucuuucc

SEQ ID NO: 895540 - RNA, 19 nt, Artificial Sequence
  Description of Artificial Sequence: Synthetic oligonucleotide
uaucucguuuacgaaugaa

SEQ ID NO: 895541 - RNA, 19 nt, Artificial Sequence
  Description of Artificial Sequence: Synthetic oligonucleotide
agcauuauccagauucuua

SEQ ID NO: 895542 - RNA, 19 nt, Artificial Sequence
  Description of Artificial Sequence: Synthetic oligonucleotide
cgaaguuuggaaaauccuc

SEQ ID NO: 895543 - RNA, 19 nt, Artificial Sequence
  Description of Artificial Sequence: Synthetic oligonucleotide
ugcgaccauuucucggugc

SEQ ID NO: 895544 - RNA, 19 nt, Artificial Sequence
  Description of Artificial Sequence: Synthetic oligonucleotide
uuuaaacugcucggcugcu

SEQ ID NO: 895545 - RNA, 19 nt, Artificial Sequence
  Description of Artificial Sequence: Synthetic oligonucleotide
aagcuacaagcuggcgcac

SEQ ID NO: 895546 - RNA, 19 nt, Artificial Sequence
  Description of Artificial Sequence: Synthetic oligonucleotide
caagcuggcgcaccaguuc

SEQ ID NO: 895547 - RNA, 19 nt, Artificial Sequence
  Description of Artificial Sequence: Synthetic oligonucleotide
gagccugcacucuuuuauc

SEQ ID NO: 895548 - RNA, 19 nt, Artificial Sequence
  Description of Artificial Sequence: Synthetic oligonucleotide
caucgcugucuuuaccuuc

SEQ ID NO: 895549 - RNA, 19 nt, Artificial Sequence
  Description of Artificial Sequence: Synthetic oligonucleotide
cuucucaugguucuucaua

SEQ ID NO: 895550 - RNA, 19 nt, Artificial Sequence
  Description of Artificial Sequence: Synthetic oligonucleotide
gagucaccgaaguuuggaa

SEQ ID NO: 895551 - RNA, 19 nt, Artificial Sequence
  Description of Artificial Sequence: Synthetic oligonucleotide
cuucguccucagaauuggc

SEQ ID NO: 895552 - RNA, 19 nt, Artificial Sequence
  Description of Artificial Sequence: Synthetic oligonucleotide
cugcuuuaacagugcgacc

SEQ ID NO: 895553 - RNA, 19 nt, Artificial Sequence
  Description of Artificial Sequence: Synthetic oligonucleotide
cuuuacuccuucuucaguu

SEQ ID NO: 895554 - RNA, 19 nt, Artificial Sequence
  Description of Artificial Sequence: Synthetic oligonucleotide
ucauaauucugagcugauu

SEQ ID NO: 895555 - RNA, 19 nt, Artificial Sequence
  Description of Artificial Sequence: Synthetic oligonucleotide
caucgaaauuguuaucaua

SEQ ID NO: 895556 - RNA, 19 nt, Artificial Sequence
  Description of Artificial Sequence: Synthetic oligonucleotide
cucaucgcugucuuuaccu

SEQ ID NO: 895557 - RNA, 19 nt, Artificial Sequence
  Description of Artificial Sequence: Synthetic oligonucleotide
cagcagguacuuugacagg

SEQ ID NO: 895558 - RNA, 19 nt, Artificial Sequence
  Description of Artificial Sequence: Synthetic oligonucleotide
cacucuuuggauccucaca

SEQ ID NO: 895559 - RNA, 19 nt, Artificial Sequence
  Description of Artificial Sequence: Synthetic oligonucleotide
auuccgagauggaaauuca

SEQ ID NO: 895560 - RNA, 19 nt, Artificial Sequence
  Description of Artificial Sequence: Synthetic oligonucleotide
cuggacgcggcaccggggc

SEQ ID NO: 895561 - RNA, 19 nt, Artificial Sequence
  Description of Artificial Sequence: Synthetic oligonucleotide
acucacuguugcugguuca

SEQ ID NO: 895562 - RNA, 19 nt, Artificial Sequence
  Description of Artificial Sequence: Synthetic oligonucleotide
ugccgagugucauauucuu

SEQ ID NO: 895563 - RNA, 19 nt, Artificial Sequence
  Description of Artificial Sequence: Synthetic oligonucleotide
ucccucugacauacauuca

SEQ ID NO: 895564 - RNA, 19 nt, Artificial Sequence
  Description of Artificial Sequence: Synthetic oligonucleotide
uugaggcuugccgaguguc

SEQ ID NO: 895565 - RNA, 19 nt, Artificial Sequence
  Description of Artificial Sequence: Synthetic oligonucleotide
acacaucguaugcggcuug

SEQ ID NO: 895566 - RNA, 19 nt, Artificial Sequence
  Description of Artificial Sequence: Synthetic oligonucleotide
cacucacuguugcugguuc

SEQ ID NO: 895567 - RNA, 19 nt, Artificial Sequence
  Description of Artificial Sequence: Synthetic oligonucleotide
cuuguuucgacuacuuguu

SEQ ID NO: 895568 - RNA, 19 nt, Artificial Sequence
  Description of Artificial Sequence: Synthetic oligonucleotide
caucacgauacacugcaua

SEQ ID NO: 895569 - RNA, 19 nt, Artificial Sequence
  Description of Artificial Sequence: Synthetic oligonucleotide
cucuagauuauuucaguuu

SEQ ID NO: 895570 - RNA, 19 nt, Artificial Sequence
  Description of Artificial Sequence: Synthetic oligonucleotide
cucuaacugcugcuuuaac

SEQ ID NO: 895571 - RNA, 19 nt, Artificial Sequence
  Description of Artificial Sequence: Synthetic oligonucleotide
augcggcuugaauuaauuu

SEQ ID NO: 895572 - RNA, 19 nt, Artificial Sequence
  Description of Artificial Sequence: Synthetic oligonucleotide
agucacucugggagucacc

SEQ ID NO: 895573 - RNA, 19 nt, Artificial Sequence
  Description of Artificial Sequence: Synthetic oligonucleotide
uuuucguaccuggcuucca

SEQ ID NO: 895574 - RNA, 19 nt, Artificial Sequence
  Description of Artificial Sequence: Synthetic oligonucleotide
guuaaggccucucuaugau

SEQ ID NO: 895575 - RNA, 19 nt, Artificial Sequence
  Description of Artificial Sequence: Synthetic oligonucleotide
cacucugggagucaccgaa

SEQ ID NO: 895576 - RNA, 19 nt, Artificial Sequence
  Description of Artificial Sequence: Synthetic oligonucleotide
caggucgcacagcugauga

SEQ ID NO: 895577 - RNA, 19 nt, Artificial Sequence
  Description of Artificial Sequence: Synthetic oligonucleotide
gaacacuuuuagcuucacu

SEQ ID NO: 895578 - RNA, 19 nt, Artificial Sequence
  Description of Artificial Sequence: Synthetic oligonucleotide
ucacucugggagucaccga

SEQ ID NO: 895579 - RNA, 19 nt, Artificial Sequence
  Description of Artificial Sequence: Synthetic oligonucleotide
uccuugcuuugucucgaau

SEQ ID NO: 895580 - RNA, 19 nt, Artificial Sequence
  Description of Artificial Sequence: Synthetic oligonucleotide
uccgaugagccugcacucu

SEQ ID NO: 895581 - RNA, 19 nt, Artificial Sequence
  Description of Artificial Sequence: Synthetic oligonucleotide
guaagcguagaaagggugu

SEQ ID NO: 895582 - RNA, 19 nt, Artificial Sequence
  Description of Artificial Sequence: Synthetic oligonucleotide
aaucuaucuuugggcuccu

SEQ ID NO: 895583 - RNA, 19 nt, Artificial Sequence
  Description of Artificial Sequence: Synthetic oligonucleotide
aggaacacuuuuagcuuca

SEQ ID NO: 895584 - RNA, 19 nt, Artificial Sequence
  Description of Artificial Sequence: Synthetic oligonucleotide
acuacuuguuacacuguuu

SEQ ID NO: 895585 - RNA, 19 nt, Artificial Sequence
  Description of Artificial Sequence: Synthetic oligonucleotide
ccagauucuuauccgggug

SEQ ID NO: 895586 - RNA, 19 nt, Artificial Sequence
  Description of Artificial Sequence: Synthetic oligonucleotide
caugaccaguagccuuuag

SEQ ID NO: 895587 - RNA, 19 nt, Artificial Sequence
  Description of Artificial Sequence: Synthetic oligonucleotide
cgugucguagucacucugg

SEQ ID NO: 895588 - RNA, 19 nt, Artificial Sequence
  Description of Artificial Sequence: Synthetic oligonucleotide
caacacaucguaugcggcu

SEQ ID NO: 895589 - RNA, 19 nt, Artificial Sequence
  Description of Artificial Sequence: Synthetic oligonucleotide
gacacuucauggcggggcu

SEQ ID NO: 895590 - RNA, 19 nt, Artificial Sequence
  Description of Artificial Sequence: Synthetic oligonucleotide
accgugucguagucacucu

SEQ ID NO: 895591 - RNA, 19 nt, Artificial Sequence
  Description of Artificial Sequence: Synthetic oligonucleotide
uuuuaacguuaaggccucu

SEQ ID NO: 895592 - RNA, 19 nt, Artificial Sequence
  Description of Artificial Sequence: Synthetic oligonucleotide
cguagaaaggguguacuac

SEQ ID NO: 895593 - RNA, 19 nt, Artificial Sequence
  Description of Artificial Sequence: Synthetic oligonucleotide
uuauuccgagauggaaauu

SEQ ID NO: 895594 - RNA, 19 nt, Artificial Sequence
  Description of Artificial Sequence: Synthetic oligonucleotide
uugucauaccaugcucuuu

SEQ ID NO: 895595 - RNA, 19 nt, Artificial Sequence
  Description of Artificial Sequence: Synthetic oligonucleotide
gcggcuugaauuaauuuaa

SEQ ID NO: 895596 - RNA, 19 nt, Artificial Sequence
  Description of Artificial Sequence: Synthetic oligonucleotide
cucggugcuucuuugacuu

SEQ ID NO: 895597 - RNA, 19 nt, Artificial Sequence
  Description of Artificial Sequence: Synthetic oligonucleotide
ccaaucuaucuuugggcuc

SEQ ID NO: 895598 - RNA, 19 nt, Artificial Sequence
  Description of Artificial Sequence: Synthetic oligonucleotide
gcgguuugaggcuugccga

SEQ ID NO: 895599 - RNA, 19 nt, Artificial Sequence
  Description of Artificial Sequence: Synthetic oligonucleotide
ggagucaccgaaguuugga

SEQ ID NO: 895600 - RNA, 19 nt, Artificial Sequence
  Description of Artificial Sequence: Synthetic oligonucleotide
uggacgcggcaccggggcc

SEQ ID NO: 895601 - RNA, 19 nt, Artificial Sequence
  Description of Artificial Sequence: Synthetic oligonucleotide
ugucacaagcugggcagua

SEQ ID NO: 895602 - RNA, 19 nt, Artificial Sequence
  Description of Artificial Sequence: Synthetic oligonucleotide
guacuaccgugucguaguc

SEQ ID NO: 895603 - RNA, 19 nt, Artificial Sequence
  Description of Artificial Sequence: Synthetic oligonucleotide
cagcgccucguagugacac

SEQ ID NO: 895604 - RNA, 19 nt, Artificial Sequence
  Description of Artificial Sequence: Synthetic oligonucleotide
cuacaagcuggcgcaccag

SEQ ID NO: 895605 - RNA, 19 nt, Artificial Sequence
  Description of Artificial Sequence: Synthetic oligonucleotide
gugcgaccauuucucggug

SEQ ID NO: 895606 - RNA, 19 nt, Artificial Sequence
  Description of Artificial Sequence: Synthetic oligonucleotide
gcaucgucuucauuuaagu

SEQ ID NO: 895607 - RNA, 19 nt, Artificial Sequence
  Description of Artificial Sequence: Synthetic oligonucleotide
gcuacaagcuggcgcacca

SEQ ID NO: 895608 - RNA, 19 nt, Artificial Sequence
  Description of Artificial Sequence: Synthetic oligonucleotide
ucacucacuguugcugguu

SEQ ID NO: 895609 - RNA, 19 nt, Artificial Sequence
  Description of Artificial Sequence: Synthetic oligonucleotide
aggcgucucgccgcacccc

SEQ ID NO: 895610 - RNA, 19 nt, Artificial Sequence
  Description of Artificial Sequence: Synthetic oligonucleotide
ggcuggacgcggcaccggg

SEQ ID NO: 895611 - RNA, 19 nt, Artificial Sequence
  Description of Artificial Sequence: Synthetic oligonucleotide
cauggcggggcuggacgcg

SEQ ID NO: 895612 - RNA, 19 nt, Artificial Sequence
  Description of Artificial Sequence: Synthetic oligonucleotide
cugccaguaagcguagaaa

SEQ ID NO: 895613 - RNA, 19 nt, Artificial Sequence
  Description of Artificial Sequence: Synthetic oligonucleotide
caguaagcguagaaagggu

SEQ ID NO: 895614 - RNA, 19 nt, Artificial Sequence
  Description of Artificial Sequence: Synthetic oligonucleotide
uccucgccuucucugcauu

SEQ ID NO: 895615 - RNA, 19 nt, Artificial Sequence
  Description of Artificial Sequence: Synthetic oligonucleotide
ccuuuucaucgucuccacc

SEQ ID NO: 895616 - RNA, 19 nt, Artificial Sequence
  Description of Artificial Sequence: Synthetic oligonucleotide
ggugccaccucagggcaag

SEQ ID NO: 895617 - RNA, 19 nt, Artificial Sequence
  Description of Artificial Sequence: Synthetic oligonucleotide
cuucauggcggggcuggac

SEQ ID NO: 895618 - RNA, 19 nt, Artificial Sequence
  Description of Artificial Sequence: Synthetic oligonucleotide
acgauacacugcauagaaa

SEQ ID NO: 895619 - RNA, 19 nt, Artificial Sequence
  Description of Artificial Sequence: Synthetic oligonucleotide
cgaaugaaagcuacaagcu

SEQ ID NO: 895620 - RNA, 19 nt, Artificial Sequence
  Description of Artificial Sequence: Synthetic oligonucleotide
ccaaauuggccauagucau

SEQ ID NO: 895621 - RNA, 19 nt, Artificial Sequence
  Description of Artificial Sequence: Synthetic oligonucleotide
ccgauaggaccuucuugag

SEQ ID NO: 895622 - RNA, 19 nt, Artificial Sequence
  Description of Artificial Sequence: Synthetic oligonucleotide
acucugccaguaagcguag

SEQ ID NO: 895623 - RNA, 19 nt, Artificial Sequence
  Description of Artificial Sequence: Synthetic oligonucleotide
caucgucuucauuuaaguu

SEQ ID NO: 895624 - RNA, 19 nt, Artificial Sequence
  Description of Artificial Sequence: Synthetic oligonucleotide
caaucacuagugaaauguu

SEQ ID NO: 895625 - RNA, 19 nt, Artificial Sequence
  Description of Artificial Sequence: Synthetic oligonucleotide
cugcucuaccaauuuggcu

SEQ ID NO: 895626 - RNA, 19 nt, Artificial Sequence
  Description of Artificial Sequence: Synthetic oligonucleotide
cuuauccgggugccaccuc

SEQ ID NO: 895627 - RNA, 19 nt, Artificial Sequence
  Description of Artificial Sequence: Synthetic oligonucleotide
gccucguagugacacuuca

SEQ ID NO: 895628 - RNA, 19 nt, Artificial Sequence
  Description of Artificial Sequence: Synthetic oligonucleotide
cuugcaugaccaguagccu

SEQ ID NO: 895629 - RNA, 19 nt, Artificial Sequence
  Description of Artificial Sequence: Synthetic oligonucleotide
cccucugacauacauucaa

SEQ ID NO: 895630 - RNA, 19 nt, Artificial Sequence
  Description of Artificial Sequence: Synthetic oligonucleotide
guagucacucugggaguca

SEQ ID NO: 895631 - RNA, 19 nt, Artificial Sequence
  Description of Artificial Sequence: Synthetic oligonucleotide
ggguguacuaccgugucgu

SEQ ID NO: 895632 - RNA, 19 nt, Artificial Sequence
  Description of Artificial Sequence: Synthetic oligonucleotide
gccugcacucuuuuaucuc

SEQ ID NO: 895633 - RNA, 19 nt, Artificial Sequence
  Description of Artificial Sequence: Synthetic oligonucleotide
cauuuucaucggguccauc

SEQ ID NO: 895634 - RNA, 19 nt, Artificial Sequence
  Description of Artificial Sequence: Synthetic oligonucleotide
augaaacauucaagugaau

SEQ ID NO: 895635 - RNA, 19 nt, Artificial Sequence
  Description of Artificial Sequence: Synthetic oligonucleotide
ggacgcggcaccggggccg

SEQ ID NO: 895636 - RNA, 19 nt, Artificial Sequence
  Description of Artificial Sequence: Synthetic oligonucleotide
cauuuucaucgaaauuguu

SEQ ID NO: 895637 - RNA, 19 nt, Artificial Sequence
  Description of Artificial Sequence: Synthetic oligonucleotide
gacgcggcaccggggccgg

SEQ ID NO: 895638 - RNA, 19 nt, Artificial Sequence
  Description of Artificial Sequence: Synthetic oligonucleotide
caugcucuuuccugagggu

SEQ ID NO: 895639 - RNA, 19 nt, Artificial Sequence
  Description of Artificial Sequence: Synthetic oligonucleotide
cugugguuucugugauaca

SEQ ID NO: 895640 - RNA, 19 nt, Artificial Sequence
  Description of Artificial Sequence: Synthetic oligonucleotide
gcuaaggcgucucgccgca

SEQ ID NO: 895641 - RNA, 19 nt, Artificial Sequence
  Description of Artificial Sequence: Synthetic oligonucleotide
gugccggggcccgggacgg

SEQ ID NO: 895642 - RNA, 19 nt, Artificial Sequence
  Description of Artificial Sequence: Synthetic oligonucleotide
cgcuaaggcgucucgccgc

SEQ ID NO: 895643 - RNA, 19 nt, Artificial Sequence
  Description of Artificial Sequence: Synthetic oligonucleotide
ggcucuugcaugaccagua

SEQ ID NO: 895644 - RNA, 19 nt, Artificial Sequence
  Description of Artificial Sequence: Synthetic oligonucleotide
cugcacucuuuuaucucgu

SEQ ID NO: 895645 - RNA, 19 nt, Artificial Sequence
  Description of Artificial Sequence: Synthetic oligonucleotide
ccgaaguuuggaaaauccu

SEQ ID NO: 895646 - RNA, 19 nt, Artificial Sequence
  Description of Artificial Sequence: Synthetic oligonucleotide
cgguuugaggcuugccgag

SEQ ID NO: 895647 - RNA, 19 nt, Artificial Sequence
  Description of Artificial Sequence: Synthetic oligonucleotide
cacaucguaugcggcuuga

SEQ ID NO: 895648 - RNA, 19 nt, Artificial Sequence
  Description of Artificial Sequence: Synthetic oligonucleotide
gcguagaaaggguguacua

SEQ ID NO: 895649 - RNA, 19 nt, Artificial Sequence
  Description of Artificial Sequence: Synthetic oligonucleotide
acaucacgauacacugcau

SEQ ID NO: 895650 - RNA, 19 nt, Artificial Sequence
  Description of Artificial Sequence: Synthetic oligonucleotide
cccgggacggggccgacgc

SEQ ID NO: 895651 - RNA, 19 nt, Artificial Sequence
  Description of Artificial Sequence: Synthetic oligonucleotide
ccucccuuuuaacguuaag

SEQ ID NO: 895652 - RNA, 19 nt, Artificial Sequence
  Description of Artificial Sequence: Synthetic oligonucleotide
ccgugucguagucacucug

SEQ ID NO: 895653 - RNA, 19 nt, Artificial Sequence
  Description of Artificial Sequence: Synthetic oligonucleotide
cuccucgcuaaggcgucuc

SEQ ID NO: 895654 - RNA, 19 nt, Artificial Sequence
  Description of Artificial Sequence: Synthetic oligonucleotide
gcaggucgcacagcugaug

SEQ ID NO: 895655 - RNA, 19 nt, Artificial Sequence
  Description of Artificial Sequence: Synthetic oligonucleotide
ccucgcuaaggcgucucgc

SEQ ID NO: 895656 - RNA, 19 nt, Artificial Sequence
  Description of Artificial Sequence: Synthetic oligonucleotide
gcgaccauuucucggugcu

SEQ ID NO: 895657 - RNA, 19 nt, Artificial Sequence
  Description of Artificial Sequence: Synthetic oligonucleotide
cgagauggaaauucacugu

SEQ ID NO: 895658 - RNA, 19 nt, Artificial Sequence
  Description of Artificial Sequence: Synthetic oligonucleotide
gcuggacgcggcaccgggg

SEQ ID NO: 895659 - RNA, 19 nt, Artificial Sequence
  Description of Artificial Sequence: Synthetic oligonucleotide
cuaaggcgucucgccgcac

SEQ ID NO: 895660 - RNA, 19 nt, Artificial Sequence
  Description of Artificial Sequence: Synthetic oligonucleotide
gccgagugucauauucuuc

SEQ ID NO: 895661 - RNA, 19 nt, Artificial Sequence
  Description of Artificial Sequence: Synthetic oligonucleotide
guaugcggcuugaauuaau

SEQ ID NO: 895662 - RNA, 19 nt, Artificial Sequence
  Description of Artificial Sequence: Synthetic oligonucleotide
ccucgccuucucugcauuc

SEQ ID NO: 895663 - RNA, 19 nt, Artificial Sequence
  Description of Artificial Sequence: Synthetic oligonucleotide
gguguacuaccgugucgua

SEQ ID NO: 895664 - RNA, 19 nt, Artificial Sequence
  Description of Artificial Sequence: Synthetic oligonucleotide
cuggcgcaccaguucauuu

SEQ ID NO: 895665 - RNA, 19 nt, Artificial Sequence
  Description of Artificial Sequence: Synthetic oligonucleotide
ggaucaaccuuuacuccuu

SEQ ID NO: 895666 - RNA, 19 nt, Artificial Sequence
  Description of Artificial Sequence: Synthetic oligonucleotide
cacccucccuuuuaacguu

SEQ ID NO: 895667 - RNA, 19 nt, Artificial Sequence
  Description of Artificial Sequence: Synthetic oligonucleotide
gcggcaccggggccggugc

SEQ ID NO: 895668 - RNA, 19 nt, Artificial Sequence
  Description of Artificial Sequence: Synthetic oligonucleotide
cuaccgugucguagucacu

SEQ ID NO: 895669 - RNA, 19 nt, Artificial Sequence
  Description of Artificial Sequence: Synthetic oligonucleotide
agcuggcgcaccaguucau

SEQ ID NO: 895670 - RNA, 19 nt, Artificial Sequence
  Description of Artificial Sequence: Synthetic oligonucleotide
ccagcgguuugaggcuugc

SEQ ID NO: 895671 - RNA, 19 nt, Artificial Sequence
  Description of Artificial Sequence: Synthetic oligonucleotide
gguuugaggcuugccgagu

SEQ ID NO: 895672 - RNA, 19 nt, Artificial Sequence
  Description of Artificial Sequence: Synthetic oligonucleotide
gggucacucaacacaucgu

SEQ ID NO: 895673 - RNA, 19 nt, Artificial Sequence
  Description of Artificial Sequence: Synthetic oligonucleotide
cccagcgguuugaggcuug

SEQ ID NO: 895674 - RNA, 19 nt, Artificial Sequence
  Description of Artificial Sequence: Synthetic oligonucleotide
gggcaguacaggucaucau

SEQ ID NO: 895675 - RNA, 19 nt, Artificial Sequence
  Description of Artificial Sequence: Synthetic oligonucleotide
ccacuucguccucagaauu

SEQ ID NO: 895676 - RNA, 19 nt, Artificial Sequence
  Description of Artificial Sequence: Synthetic oligonucleotide
ccaguagccuuuagaugau

SEQ ID NO: 895677 - RNA, 19 nt, Artificial Sequence
  Description of Artificial Sequence: Synthetic oligonucleotide
ccucguagugacacuucau

SEQ ID NO: 895678 - RNA, 19 nt, Artificial Sequence
  Description of Artificial Sequence: Synthetic oligonucleotide
gcccgggacggggccgacg

SEQ ID NO: 895679 - RNA, 19 nt, Artificial Sequence
  Description of Artificial Sequence: Synthetic oligonucleotide
cguaugcggcuugaauuaa

SEQ ID NO: 895680 - RNA, 19 nt, Artificial Sequence
  Description of Artificial Sequence: Synthetic oligonucleotide
ccagcgccucguagugaca

SEQ ID NO: 895681 - RNA, 19 nt, Artificial Sequence
  Description of Artificial Sequence: Synthetic oligonucleotide
cgacuacuuguuacacugu

SEQ ID NO: 895682 - RNA, 19 nt, Artificial Sequence
  Description of Artificial Sequence: Synthetic oligonucleotide
ccgggacggggccgacgcc

SEQ ID NO: 895683 - RNA, 19 nt, Artificial Sequence
  Description of Artificial Sequence: Synthetic oligonucleotide
gcgccucguagugacacuu

SEQ ID NO: 895684 - RNA, 19 nt, Artificial Sequence
  Description of Artificial Sequence: Synthetic oligonucleotide
cugcagcauuauccagauu

SEQ ID NO: 895685 - RNA, 19 nt, Artificial Sequence
  Description of Artificial Sequence: Synthetic oligonucleotide
ccgaugagccugcacucuu

SEQ ID NO: 895686 - RNA, 19 nt, Artificial Sequence
  Description of Artificial Sequence: Synthetic oligonucleotide
gcuugccgagugucauauu

SEQ ID NO: 895687 - RNA, 19 nt, Artificial Sequence
  Description of Artificial Sequence: Synthetic oligonucleotide
ccccagcgccucguaguga

SEQ ID NO: 895688 - RNA, 19 nt, Artificial Sequence
  Description of Artificial Sequence: Synthetic oligonucleotide
caccggggccggugccggu

SEQ ID NO: 895689 - RNA, 19 nt, Artificial Sequence
  Description of Artificial Sequence: Synthetic oligonucleotide
acgcggcaccggggccggu

SEQ ID NO: 895690 - RNA, 19 nt, Artificial Sequence
  Description of Artificial Sequence: Synthetic oligonucleotide
ccuccucgcuaaggcgucu

SEQ ID NO: 895691 - RNA, 19 nt, Artificial Sequence
  Description of Artificial Sequence: Synthetic oligonucleotide
ugcucuuugaaauagacgg

SEQ ID NO: 895692 - RNA, 19 nt, Artificial Sequence
  Description of Artificial Sequence: Synthetic oligonucleotide
uuaaagaugacaugaaccu

SEQ ID NO: 895693 - RNA, 19 nt, Artificial Sequence
  Description of Artificial Sequence: Synthetic oligonucleotide
aguucuuacacucucagug

SEQ ID NO: 895694 - RNA, 19 nt, Artificial Sequence
  Description of Artificial Sequence: Synthetic oligonucleotide
ucucauagagacauuauug

SEQ ID NO: 895695 - RNA, 19 nt, Artificial Sequence
  Description of Artificial Sequence: Synthetic oligonucleotide
aaggguucgaaucuagcgg

SEQ ID NO: 895696 - RNA, 19 nt, Artificial Sequence
  Description of Artificial Sequence: Synthetic oligonucleotide
gaaucuagcggacagcgcg

SEQ ID NO: 895697 - RNA, 19 nt, Artificial Sequence
  Description of Artificial Sequence: Synthetic oligonucleotide
agaauuaagacaaacacca

SEQ ID NO: 895698 - RNA, 19 nt, Artificial Sequence
  Description of Artificial Sequence: Synthetic oligonucleotide
uuuucugaagccuugguga

SEQ ID NO: 895699 - RNA, 19 nt, Artificial Sequence
  Description of Artificial Sequence: Synthetic oligonucleotide
cucauagagacauuauugg

SEQ ID NO: 895700 - RNA, 19 nt, Artificial Sequence
  Description of Artificial Sequence: Synthetic oligonucleotide
uaaaacgauccucaggcag

SEQ ID NO: 895701 - RNA, 19 nt, Artificial Sequence
  Description of Artificial Sequence: Synthetic oligonucleotide
ucauagagacauuauuggg

SEQ ID NO: 895702 - RNA, 19 nt, Artificial Sequence
  Description of Artificial Sequence: Synthetic oligonucleotide
auagagacauuauugggag

SEQ ID NO: 895703 - RNA, 19 nt, Artificial Sequence
  Description of Artificial Sequence: Synthetic oligonucleotide
gaaggguucgaaucuagcg

SEQ ID NO: 895704 - RNA, 19 nt, Artificial Sequence
  Description of Artificial Sequence: Synthetic oligonucleotide
aaaacgauccucaggcagc

SEQ ID NO: 895705 - RNA, 19 nt, Artificial Sequence
  Description of Artificial Sequence: Synthetic oligonucleotide
auagagaaaagggacauag

SEQ ID NO: 895706 - RNA, 19 nt, Artificial Sequence
  Description of Artificial Sequence: Synthetic oligonucleotide
uuggauucgacccagcggu

SEQ ID NO: 895707 - RNA, 19 nt, Artificial Sequence
  Description of Artificial Sequence: Synthetic oligonucleotide
uccucugagauccaagaag

SEQ ID NO: 895708 - RNA, 19 nt, Artificial Sequence
  Description of Artificial Sequence: Synthetic oligonucleotide
gauucugaauuaccggugg

SEQ ID NO: 895709 - RNA, 19 nt, Artificial Sequence
  Description of Artificial Sequence: Synthetic oligonucleotide
agugucuggcccuuguugc

SEQ ID NO: 895710 - RNA, 19 nt, Artificial Sequence
  Description of Artificial Sequence: Synthetic oligonucleotide
aaauguuggcaucugggga

SEQ ID NO: 895711 - RNA, 19 nt, Artificial Sequence
  Description of Artificial Sequence: Synthetic oligonucleotide
ggagaauuaagacaaacac

SEQ ID NO: 895712 - RNA, 19 nt, Artificial Sequence
  Description of Artificial Sequence: Synthetic oligonucleotide
ucaugcuucaccgugaacu

SEQ ID NO: 895713 - RNA, 19 nt, Artificial Sequence
  Description of Artificial Sequence: Synthetic oligonucleotide
cuuuaaaacgauccucagg

SEQ ID NO: 895714 - RNA, 19 nt, Artificial Sequence
  Description of Artificial Sequence: Synthetic oligonucleotide
uccugagucucauagagac

SEQ ID NO: 895715 - RNA, 19 nt, Artificial Sequence
  Description of Artificial Sequence: Synthetic oligonucleotide
ucuggccgcacaaucagcg

SEQ ID NO: 895716 - RNA, 19 nt, Artificial Sequence
  Description of Artificial Sequence: Synthetic oligonucleotide
acaaucagcguguacaggu

SEQ ID NO: 895717 - RNA, 19 nt, Artificial Sequence
  Description of Artificial Sequence: Synthetic oligonucleotide
ugcauaggcuucaucauug

SEQ ID NO: 895718 - RNA, 19 nt, Artificial Sequence
  Description of Artificial Sequence: Synthetic oligonucleotide
caaucauccuccaaugagc

SEQ ID NO: 895719 - RNA, 19 nt, Artificial Sequence
  Description of Artificial Sequence: Synthetic oligonucleotide
auccuuacaccggauaucc

SEQ ID NO: 895720 - RNA, 19 nt, Artificial Sequence
  Description of Artificial Sequence: Synthetic oligonucleotide
uguauuccgagucuccaug

SEQ ID NO: 895721 - RNA, 19 nt, Artificial Sequence
  Description of Artificial Sequence: Synthetic oligonucleotide
guaaaaucgggcauccugg

SEQ ID NO: 895722 - RNA, 19 nt, Artificial Sequence
  Description of Artificial Sequence: Synthetic oligonucleotide
cuuguguuuggauucgacc

SEQ ID NO: 895723 - RNA, 19 nt, Artificial Sequence
  Description of Artificial Sequence: Synthetic oligonucleotide
uucaccgugaacuguacca

SEQ ID NO: 895724 - RNA, 19 nt, Artificial Sequence
  Description of Artificial Sequence: Synthetic oligonucleotide
uacacucucagugugagcu

SEQ ID NO: 895725 - RNA, 19 nt, Artificial Sequence
  Description of Artificial Sequence: Synthetic oligonucleotide
agacacaaaacuuaauuua

SEQ ID NO: 895726 - RNA, 19 nt, Artificial Sequence
  Description of Artificial Sequence: Synthetic oligonucleotide
gaauuugccagaacugagg

SEQ ID NO: 895727 - RNA, 19 nt, Artificial Sequence
  Description of Artificial Sequence: Synthetic oligonucleotide
acgauccucaggcagcugc

SEQ ID NO: 895728 - RNA, 19 nt, Artificial Sequence
  Description of Artificial Sequence: Synthetic oligonucleotide
ucugagauccaagaaggag

SEQ ID NO: 895729 - RNA, 19 nt, Artificial Sequence
  Description of Artificial Sequence: Synthetic oligonucleotide
uaggcuucaucauugguga

SEQ ID NO: 895730 - RNA, 19 nt, Artificial Sequence
  Description of Artificial Sequence: Synthetic oligonucleotide
acuacccggaaacagcuuc

SEQ ID NO: 895731 - RNA, 19 nt, Artificial Sequence
  Description of Artificial Sequence: Synthetic oligonucleotide
ucgaaucuagcggacagcg

SEQ ID NO: 895732 - RNA, 19 nt, Artificial Sequence
  Description of Artificial Sequence: Synthetic oligonucleotide
caaacuacccggaaacagc

SEQ ID NO: 895733 - RNA, 19 nt, Artificial Sequence
  Description of Artificial Sequence: Synthetic oligonucleotide
uccggaccaaacaugaugu

SEQ ID NO: 895734 - RNA, 19 nt, Artificial Sequence
  Description of Artificial Sequence: Synthetic oligonucleotide
uucaggauucugaauuacc

SEQ ID NO: 895735 - RNA, 19 nt, Artificial Sequence
  Description of Artificial Sequence: Synthetic oligonucleotide
uguaccaccagugucuggc

SEQ ID NO: 895736 - RNA, 19 nt, Artificial Sequence
  Description of Artificial Sequence: Synthetic oligonucleotide
gauguugauucaaaaugag

SEQ ID NO: 895737 - RNA, 19 nt, Artificial Sequence
  Description of Artificial Sequence: Synthetic oligonucleotide
cauagagacauuauuggga

SEQ ID NO: 895738 - RNA, 19 nt, Artificial Sequence
  Description of Artificial Sequence: Synthetic oligonucleotide
aggauucugaauuaccggu

SEQ ID NO: 895739 - RNA, 19 nt, Artificial Sequence
  Description of Artificial Sequence: Synthetic oligonucleotide
cauuauugggagcagccag

SEQ ID NO: 895740 - RNA, 19 nt, Artificial Sequence
  Description of Artificial Sequence: Synthetic oligonucleotide
aaaucggacuuguguuugg

SEQ ID NO: 895741 - RNA, 19 nt, Artificial Sequence
  Description of Artificial Sequence: Synthetic oligonucleotide
aaaaucggacuuguguuug

SEQ ID NO: 895742 - RNA, 19 nt, Artificial Sequence
  Description of Artificial Sequence: Synthetic oligonucleotide
ggugguauggccucuacag

SEQ ID NO: 895743 - RNA, 19 nt, Artificial Sequence
  Description of Artificial Sequence: Synthetic oligonucleotide
uuaucaaucugacguggcu

SEQ ID NO: 895744 - RNA, 19 nt, Artificial Sequence
  Description of Artificial Sequence: Synthetic oligonucleotide
aaaucgggcauccuggcuu

SEQ ID NO: 895745 - RNA, 19 nt, Artificial Sequence
  Description of Artificial Sequence: Synthetic oligonucleotide
agagacauuauugggagca

SEQ ID NO: 895746 - RNA, 19 nt, Artificial Sequence
  Description of Artificial Sequence: Synthetic oligonucleotide
ugaacuguaccaccagugu

SEQ ID NO: 895747 - RNA, 19 nt, Artificial Sequence
  Description of Artificial Sequence: Synthetic oligonucleotide
gaaagucccaaucauccuc

SEQ ID NO: 895748 - RNA, 19 nt, Artificial Sequence
  Description of Artificial Sequence: Synthetic oligonucleotide
cuuguauucaggauucuga

SEQ ID NO: 895749 - RNA, 19 nt, Artificial Sequence
  Description of Artificial Sequence: Synthetic oligonucleotide
gaaauagacggcagguucc

SEQ ID NO: 895750 - RNA, 19 nt, Artificial Sequence
  Description of Artificial Sequence: Synthetic oligonucleotide
aauuuccggguguauccag

SEQ ID NO: 895751 - RNA, 19 nt, Artificial Sequence
  Description of Artificial Sequence: Synthetic oligonucleotide
gaggcagggaaacaaaauc

SEQ ID NO: 895752 - RNA, 19 nt, Artificial Sequence
  Description of Artificial Sequence: Synthetic oligonucleotide
uaggcauaaauguuggcau

SEQ ID NO: 895753 - RNA, 19 nt, Artificial Sequence
  Description of Artificial Sequence: Synthetic oligonucleotide
aagauugugccagacuuga

SEQ ID NO: 895754 - RNA, 19 nt, Artificial Sequence
  Description of Artificial Sequence: Synthetic oligonucleotide
uuuggcucguucaucccag

SEQ ID NO: 895755 - RNA, 19 nt, Artificial Sequence
  Description of Artificial Sequence: Synthetic oligonucleotide
gacauuauugggagcagcc

SEQ ID NO: 895756 - RNA, 19 nt, Artificial Sequence
  Description of Artificial Sequence: Synthetic oligonucleotide
caggauucugaauuaccgg

SEQ ID NO: 895757 - RNA, 19 nt, Artificial Sequence
  Description of Artificial Sequence: Synthetic oligonucleotide
ucaagccuaggacuuuucc

SEQ ID NO: 895758 - RNA, 19 nt, Artificial Sequence
  Description of Artificial Sequence: Synthetic oligonucleotide
uguuguauuccgagucucc

SEQ ID NO: 895759 - RNA, 19 nt, Artificial Sequence
  Description of Artificial Sequence: Synthetic oligonucleotide
aacuguaccaccagugucu

SEQ ID NO: 895760 - RNA, 19 nt, Artificial Sequence
  Description of Artificial Sequence: Synthetic oligonucleotide
ucuggguuaucaaucugac

SEQ ID NO: 895761 - RNA, 19 nt, Artificial Sequence
  Description of Artificial Sequence: Synthetic oligonucleotide
ucauccuuacaccggauau

SEQ ID NO: 895762 - RNA, 19 nt, Artificial Sequence
  Description of Artificial Sequence: Synthetic oligonucleotide
ugaaaaguuccugagucuc

SEQ ID NO: 895763 - RNA, 19 nt, Artificial Sequence
  Description of Artificial Sequence: Synthetic oligonucleotide
cauagguguugucuggccg

SEQ ID NO: 895764 - RNA, 19 nt, Artificial Sequence
  Description of Artificial Sequence: Synthetic oligonucleotide
agauguugauucaaaauga

SEQ ID NO: 895765 - RNA, 19 nt, Artificial Sequence
  Description of Artificial Sequence: Synthetic oligonucleotide
ucugacguggcuuccacuc

SEQ ID NO: 895766 - RNA, 19 nt, Artificial Sequence
  Description of Artificial Sequence: Synthetic oligonucleotide
aauuaccggugguucccac

SEQ ID NO: 895767 - RNA, 19 nt, Artificial Sequence
  Description of Artificial Sequence: Synthetic oligonucleotide
cuuacaccggauauccuug

SEQ ID NO: 895768 - RNA, 19 nt, Artificial Sequence
  Description of Artificial Sequence: Synthetic oligonucleotide
gcuaaaggagaauuaagac

SEQ ID NO: 895769 - RNA, 19 nt, Artificial Sequence
  Description of Artificial Sequence: Synthetic oligonucleotide
guucgaaucuagcggacag

SEQ ID NO: 895770 - RNA, 19 nt, Artificial Sequence
  Description of Artificial Sequence: Synthetic oligonucleotide
ugaaggguucgaaucuagc

SEQ ID NO: 895771 - RNA, 19 nt, Artificial Sequence
  Description of Artificial Sequence: Synthetic oligonucleotide
aaaaucgggcauccuggcu

SEQ ID NO: 895772 - RNA, 19 nt, Artificial Sequence
  Description of Artificial Sequence: Synthetic oligonucleotide
uccaugcauguccuucugg

SEQ ID NO: 895773 - RNA, 19 nt, Artificial Sequence
  Description of Artificial Sequence: Synthetic oligonucleotide
ucugaauuaccggugguuc

SEQ ID NO: 895774 - RNA, 19 nt, Artificial Sequence
  Description of Artificial Sequence: Synthetic oligonucleotide
cagaucugaaccugccugg

SEQ ID NO: 895775 - RNA, 19 nt, Artificial Sequence
  Description of Artificial Sequence: Synthetic oligonucleotide
guccaaacuacccggaaac

SEQ ID NO: 895776 - RNA, 19 nt, Artificial Sequence
  Description of Artificial Sequence: Synthetic oligonucleotide
ucuuacacucucaguguga

SEQ ID NO: 895777 - RNA, 19 nt, Artificial Sequence
  Description of Artificial Sequence: Synthetic oligonucleotide
aaacuacccggaaacagcu

SEQ ID NO: 895778 - RNA, 19 nt, Artificial Sequence
  Description of Artificial Sequence: Synthetic oligonucleotide
uuaaaacgauccucaggca

SEQ ID NO: 895779 - RNA, 19 nt, Artificial Sequence
  Description of Artificial Sequence: Synthetic oligonucleotide
acagucgauguucugcuca

SEQ ID NO: 895780 - RNA, 19 nt, Artificial Sequence
  Description of Artificial Sequence: Synthetic oligonucleotide
cuuguaguuaaagaugaca

SEQ ID NO: 895781 - RNA, 19 nt, Artificial Sequence
  Description of Artificial Sequence: Synthetic oligonucleotide
uccugcacuccucugagau

SEQ ID NO: 895782 - RNA, 19 nt, Artificial Sequence
  Description of Artificial Sequence: Synthetic oligonucleotide
gagaacggggaugagaaga

SEQ ID NO: 895783 - RNA, 19 nt, Artificial Sequence
  Description of Artificial Sequence: Synthetic oligonucleotide
aggguucgaaucuagcgga

SEQ ID NO: 895784 - RNA, 19 nt, Artificial Sequence
  Description of Artificial Sequence: Synthetic oligonucleotide
uugcccuuguaguuaaaga

SEQ ID NO: 895785 - RNA, 19 nt, Artificial Sequence
  Description of Artificial Sequence: Synthetic oligonucleotide
uacccuuguaaucuggguu

SEQ ID NO: 895786 - RNA, 19 nt, Artificial Sequence
  Description of Artificial Sequence: Synthetic oligonucleotide
acggagaggagcauggcgg

SEQ ID NO: 895787 - RNA, 19 nt, Artificial Sequence
  Description of Artificial Sequence: Synthetic oligonucleotide
acaccggauauccuuguug

SEQ ID NO: 895788 - RNA, 19 nt, Artificial Sequence
  Description of Artificial Sequence: Synthetic oligonucleotide
aaucgggcauccuggcuug

SEQ ID NO: 895789 - RNA, 19 nt, Artificial Sequence
  Description of Artificial Sequence: Synthetic oligonucleotide
ucccaaucauccuccaaug

SEQ ID NO: 895790 - RNA, 19 nt, Artificial Sequence
  Description of Artificial Sequence: Synthetic oligonucleotide
aauagacggcagguuccgc

SEQ ID NO: 895791 - RNA, 19 nt, Artificial Sequence
  Description of Artificial Sequence: Synthetic oligonucleotide
ggagguugagggcuaaagg

SEQ ID NO: 895792 - RNA, 19 nt, Artificial Sequence
  Description of Artificial Sequence: Synthetic oligonucleotide
agaauuugccagaacugag

SEQ ID NO: 895793 - RNA, 19 nt, Artificial Sequence
  Description of Artificial Sequence: Synthetic oligonucleotide
gaacuguaccaccaguguc

SEQ ID NO: 895794 - RNA, 19 nt, Artificial Sequence
  Description of Artificial Sequence: Synthetic oligonucleotide
agcaaaacugucauaggca

SEQ ID NO: 895795 - RNA, 19 nt, Artificial Sequence
  Description of Artificial Sequence: Synthetic oligonucleotide
ugugccagacuugaccugc

SEQ ID NO: 895796 - RNA, 19 nt, Artificial Sequence
  Description of Artificial Sequence: Synthetic oligonucleotide
gguaguauccuccucaucu

SEQ ID NO: 895797 - RNA, 19 nt, Artificial Sequence
  Description of Artificial Sequence: Synthetic oligonucleotide
gacaccccaugucucauug

SEQ ID NO: 895798 - RNA, 19 nt, Artificial Sequence
  Description of Artificial Sequence: Synthetic oligonucleotide
guccggaccaaacaugaug

SEQ ID NO: 895799 - RNA, 19 nt, Artificial Sequence
  Description of Artificial Sequence: Synthetic oligonucleotide
uccaagaaggagagcagau

SEQ ID NO: 895800 - RNA, 19 nt, Artificial Sequence
  Description of Artificial Sequence: Synthetic oligonucleotide
gacagcgcguaaaaucggg

SEQ ID NO: 895801 - RNA, 19 nt, Artificial Sequence
  Description of Artificial Sequence: Synthetic oligonucleotide
uuaccggugguucccacuc

SEQ ID NO: 895802 - RNA, 19 nt, Artificial Sequence
  Description of Artificial Sequence: Synthetic oligonucleotide
cuuguugcugaaggguucg

SEQ ID NO: 895803 - RNA, 19 nt, Artificial Sequence
  Description of Artificial Sequence: Synthetic oligonucleotide
ugacguggcuuccacucgc

SEQ ID NO: 895804 - RNA, 19 nt, Artificial Sequence
  Description of Artificial Sequence: Synthetic oligonucleotide
gauguccggaccaaacaug

SEQ ID NO: 895805 - RNA, 19 nt, Artificial Sequence
  Description of Artificial Sequence: Synthetic oligonucleotide
augagaagccaggagguug

SEQ ID NO: 895806 - RNA, 19 nt, Artificial Sequence
  Description of Artificial Sequence: Synthetic oligonucleotide
gguuaucaaucugacgugg

SEQ ID NO: 895807 - RNA, 19 nt, Artificial Sequence
  Description of Artificial Sequence: Synthetic oligonucleotide
guauuccgagucuccaugc

SEQ ID NO: 895808 - RNA, 19 nt, Artificial Sequence
  Description of Artificial Sequence: Synthetic oligonucleotide
gugaacuguaccaccagug

SEQ ID NO: 895809 - RNA, 19 nt, Artificial Sequence
  Description of Artificial Sequence: Synthetic oligonucleotide
ucucagugugagcugugcu

SEQ ID NO: 895810 - RNA, 19 nt, Artificial Sequence
  Description of Artificial Sequence: Synthetic oligonucleotide
aaucucaagccuaggacuu

SEQ ID NO: 895811 - RNA, 19 nt, Artificial Sequence
  Description of Artificial Sequence: Synthetic oligonucleotide
ccugccagagaucuaagcc

SEQ ID NO: 895812 - RNA, 19 nt, Artificial Sequence
  Description of Artificial Sequence: Synthetic oligonucleotide
ccaaucauccuccaaugag

SEQ ID NO: 895813 - RNA, 19 nt, Artificial Sequence
  Description of Artificial Sequence: Synthetic oligonucleotide
aggugugugaauucaucau

SEQ ID NO: 895814 - RNA, 19 nt, Artificial Sequence
  Description of Artificial Sequence: Synthetic oligonucleotide
uuccugagucucauagaga

SEQ ID NO: 895815 - RNA, 19 nt, Artificial Sequence
  Description of Artificial Sequence: Synthetic oligonucleotide
ugcuucaccgugaacugua

SEQ ID NO: 895816 - RNA, 19 nt, Artificial Sequence
  Description of Artificial Sequence: Synthetic oligonucleotide
cugaaggguucgaaucuag

SEQ ID NO: 895817 - RNA, 19 nt, Artificial Sequence
  Description of Artificial Sequence: Synthetic oligonucleotide
caaugagccugacuccacc

SEQ ID NO: 895818 - RNA, 19 nt, Artificial Sequence
  Description of Artificial Sequence: Synthetic oligonucleotide
acuuguguuuggauucgac

SEQ ID NO: 895819 - RNA, 19 nt, Artificial Sequence
  Description of Artificial Sequence: Synthetic oligonucleotide
uaguauccuccucaucuuc

SEQ ID NO: 895820 - RNA, 19 nt, Artificial Sequence
  Description of Artificial Sequence: Synthetic oligonucleotide
ugagggcuaaaggagaauu

SEQ ID NO: 895821 - RNA, 19 nt, Artificial Sequence
  Description of Artificial Sequence: Synthetic oligonucleotide
uccguccaagaacugcucu

SEQ ID NO: 895822 - RNA, 19 nt, Artificial Sequence
  Description of Artificial Sequence: Synthetic oligonucleotide
uccagguacccuuguaauc

SEQ ID NO: 895823 - RNA, 19 nt, Artificial Sequence
  Description of Artificial Sequence: Synthetic oligonucleotide
auguugauucaaaaugaga

SEQ ID NO: 895824 - RNA, 19 nt, Artificial Sequence
  Description of Artificial Sequence: Synthetic oligonucleotide
gaaguugggaggguuguga

SEQ ID NO: 895825 - RNA, 19 nt, Artificial Sequence
  Description of Artificial Sequence: Synthetic oligonucleotide
aaacgauccucaggcagcu

SEQ ID NO: 895826 - RNA, 19 nt, Artificial Sequence
  Description of Artificial Sequence: Synthetic oligonucleotide
guuaucaaucugacguggc

SEQ ID NO: 895827 - RNA, 19 nt, Artificial Sequence
  Description of Artificial Sequence: Synthetic oligonucleotide
gcacgggcccuuuaaaacg

SEQ ID NO: 895828 - RNA, 19 nt, Artificial Sequence
  Description of Artificial Sequence: Synthetic oligonucleotide
uaucaaucugacguggcuu

SEQ ID NO: 895829 - RNA, 19 nt, Artificial Sequence
  Description of Artificial Sequence: Synthetic oligonucleotide
acagcgcguaaaaucgggc

SEQ ID NO: 895830 - RNA, 19 nt, Artificial Sequence
  Description of Artificial Sequence: Synthetic oligonucleotide
guugucuggccgcacaauc

SEQ ID NO: 895831 - RNA, 19 nt, Artificial Sequence
  Description of Artificial Sequence: Synthetic oligonucleotide
ggugaugagaaaguuguca

SEQ ID NO: 895832 - RNA, 19 nt, Artificial Sequence
  Description of Artificial Sequence: Synthetic oligonucleotide
uuuccggguguauccaggu

SEQ ID NO: 895833 - RNA, 19 nt, Artificial Sequence
  Description of Artificial Sequence: Synthetic oligonucleotide
aggagguugagggcuaaag

SEQ ID NO: 895834 - RNA, 19 nt, Artificial Sequence
  Description of Artificial Sequence: Synthetic oligonucleotide
acggggaugagaagacccc

SEQ ID NO: 895835 - RNA, 19 nt, Artificial Sequence
  Description of Artificial Sequence: Synthetic oligonucleotide
caggugugugaauucauca

SEQ ID NO: 895836 - RNA, 19 nt, Artificial Sequence
  Description of Artificial Sequence: Synthetic oligonucleotide
acaccccaugucucauugc

SEQ ID NO: 895837 - RNA, 19 nt, Artificial Sequence
  Description of Artificial Sequence: Synthetic oligonucleotide
auuaccggugguucccacu

SEQ ID NO: 895838 - RNA, 19 nt, Artificial Sequence
  Description of Artificial Sequence: Synthetic oligonucleotide
caaucagcguguacaggug

SEQ ID NO: 895839 - RNA, 19 nt, Artificial Sequence
  Description of Artificial Sequence: Synthetic oligonucleotide
auuuccggguguauccagg

SEQ ID NO: 895840 - RNA, 19 nt, Artificial Sequence
  Description of Artificial Sequence: Synthetic oligonucleotide
aaucggacuuguguuugga

SEQ ID NO: 895841 - RNA, 19 nt, Artificial Sequence
  Description of Artificial Sequence: Synthetic oligonucleotide
aggagcggcacggagagga

SEQ ID NO: 895842 - RNA, 19 nt, Artificial Sequence
  Description of Artificial Sequence: Synthetic oligonucleotide
cugcucaugcuucaccgug

SEQ ID NO: 895843 - RNA, 19 nt, Artificial Sequence
  Description of Artificial Sequence: Synthetic oligonucleotide
caucugcuuuucugaagcc

SEQ ID NO: 895844 - RNA, 19 nt, Artificial Sequence
  Description of Artificial Sequence: Synthetic oligonucleotide
uucgaaucuagcggacagc

SEQ ID NO: 895845 - RNA, 19 nt, Artificial Sequence
  Description of Artificial Sequence: Synthetic oligonucleotide
uguuuggauucgacccagc

SEQ ID NO: 895846 - RNA, 19 nt, Artificial Sequence
  Description of Artificial Sequence: Synthetic oligonucleotide
uccgagucuccaugcaugu

SEQ ID NO: 895847 - RNA, 19 nt, Artificial Sequence
  Description of Artificial Sequence: Synthetic oligonucleotide
gugguauggccucuacagc

SEQ ID NO: 895848 - RNA, 19 nt, Artificial Sequence
  Description of Artificial Sequence: Synthetic oligonucleotide
uuguauuccgagucuccau

SEQ ID NO: 895849 - RNA, 19 nt, Artificial Sequence
  Description of Artificial Sequence: Synthetic oligonucleotide
agggcuaaaggagaauuaa

SEQ ID NO: 895850 - RNA, 19 nt, Artificial Sequence
  Description of Artificial Sequence: Synthetic oligonucleotide
agcgcguaaaaucgggcau

SEQ ID NO: 895851 - RNA, 19 nt, Artificial Sequence
  Description of Artificial Sequence: Synthetic oligonucleotide
cggacagcgcguaaaaucg

SEQ ID NO: 895852 - RNA, 19 nt, Artificial Sequence
  Description of Artificial Sequence: Synthetic oligonucleotide
auuccgagucuccaugcau

SEQ ID NO: 895853 - RNA, 19 nt, Artificial Sequence
  Description of Artificial Sequence: Synthetic oligonucleotide
uucuuagcaucagggucag

SEQ ID NO: 895854 - RNA, 19 nt, Artificial Sequence
  Description of Artificial Sequence: Synthetic oligonucleotide
uuacaccggauauccuugu

SEQ ID NO: 895855 - RNA, 19 nt, Artificial Sequence
  Description of Artificial Sequence: Synthetic oligonucleotide
gagacauuauugggagcag

SEQ ID NO: 895856 - RNA, 19 nt, Artificial Sequence
  Description of Artificial Sequence: Synthetic oligonucleotide
agcguguacagguguguga

SEQ ID NO: 895857 - RNA, 19 nt, Artificial Sequence
  Description of Artificial Sequence: Synthetic oligonucleotide
uugaaauagacggcagguu

SEQ ID NO: 895858 - RNA, 19 nt, Artificial Sequence
  Description of Artificial Sequence: Synthetic oligonucleotide
uuacacucucagugugagc

SEQ ID NO: 895859 - RNA, 19 nt, Artificial Sequence
  Description of Artificial Sequence: Synthetic oligonucleotide
uccaaacuacccggaaaca

SEQ ID NO: 895860 - RNA, 19 nt, Artificial Sequence
  Description of Artificial Sequence: Synthetic oligonucleotide
aaucuagcggacagcgcgu

SEQ ID NO: 895861 - RNA, 19 nt, Artificial Sequence
  Description of Artificial Sequence: Synthetic oligonucleotide
ggggucaucaauuuuggcu

SEQ ID NO: 895862 - RNA, 19 nt, Artificial Sequence
  Description of Artificial Sequence: Synthetic oligonucleotide
gucaauuuccggguguauc

SEQ ID NO: 895863 - RNA, 19 nt, Artificial Sequence
  Description of Artificial Sequence: Synthetic oligonucleotide
uccacucgcccuuguauuc

SEQ ID NO: 895864 - RNA, 19 nt, Artificial Sequence
  Description of Artificial Sequence: Synthetic oligonucleotide
aucauccuuacaccggaua

SEQ ID NO: 895865 - RNA, 19 nt, Artificial Sequence
  Description of Artificial Sequence: Synthetic oligonucleotide
gacggcagguuccgcggcg

SEQ ID NO: 895866 - RNA, 19 nt, Artificial Sequence
  Description of Artificial Sequence: Synthetic oligonucleotide
ggaguauucaggguuguca

SEQ ID NO: 895867 - RNA, 19 nt, Artificial Sequence
  Description of Artificial Sequence: Synthetic oligonucleotide
cguaaaaucgggcauccug

SEQ ID NO: 895868 - RNA, 19 nt, Artificial Sequence
  Description of Artificial Sequence: Synthetic oligonucleotide
ucaaucugacguggcuucc

SEQ ID NO: 895869 - RNA, 19 nt, Artificial Sequence
  Description of Artificial Sequence: Synthetic oligonucleotide
auguccggaccaaacauga

SEQ ID NO: 895870 - RNA, 19 nt, Artificial Sequence
  Description of Artificial Sequence: Synthetic oligonucleotide
gagucucauagagacauua

SEQ ID NO: 895871 - RNA, 19 nt, Artificial Sequence
  Description of Artificial Sequence: Synthetic oligonucleotide
ggguuaucaaucugacgug

SEQ ID NO: 895872 - RNA, 19 nt, Artificial Sequence
  Description of Artificial Sequence: Synthetic oligonucleotide
cacaaucagcguguacagg

SEQ ID NO: 895873 - RNA, 19 nt, Artificial Sequence
  Description of Artificial Sequence: Synthetic oligonucleotide
aggaccacagauguccgga

SEQ ID NO: 895874 - RNA, 19 nt, Artificial Sequence
  Description of Artificial Sequence: Synthetic oligonucleotide
uugugccagacuugaccug

SEQ ID NO: 895875 - RNA, 19 nt, Artificial Sequence
  Description of Artificial Sequence: Synthetic oligonucleotide
ugguccccguagaauuugc

SEQ ID NO: 895876 - RNA, 19 nt, Artificial Sequence
  Description of Artificial Sequence: Synthetic oligonucleotide
ugccaaaaucggacuugug

SEQ ID NO: 895877 - RNA, 19 nt, Artificial Sequence
  Description of Artificial Sequence: Synthetic oligonucleotide
cagaugaaaucucaagccu

SEQ ID NO: 895878 - RNA, 19 nt, Artificial Sequence
  Description of Artificial Sequence: Synthetic oligonucleotide
acacccguuccugaaguug

SEQ ID NO: 895879 - RNA, 19 nt, Artificial Sequence
  Description of Artificial Sequence: Synthetic oligonucleotide
gcccaguacagcaaaacug

SEQ ID NO: 895880 - RNA, 19 nt, Artificial Sequence
  Description of Artificial Sequence: Synthetic oligonucleotide
gaccagggguuggauagag

SEQ ID NO: 895881 - RNA, 19 nt, Artificial Sequence
  Description of Artificial Sequence: Synthetic oligonucleotide
gcaggagcggcacggagag

SEQ ID NO: 895882 - RNA, 19 nt, Artificial Sequence
  Description of Artificial Sequence: Synthetic oligonucleotide
cccuuuaaaacgauccuca

SEQ ID NO: 895883 - RNA, 19 nt, Artificial Sequence
  Description of Artificial Sequence: Synthetic oligonucleotide
caggaccacagauguccgg

SEQ ID NO: 895884 - RNA, 19 nt, Artificial Sequence
  Description of Artificial Sequence: Synthetic oligonucleotide
gaggacaaauuugccaaaa

SEQ ID NO: 895885 - RNA, 19 nt, Artificial Sequence
  Description of Artificial Sequence: Synthetic oligonucleotide
cucgcccuuguauucagga

SEQ ID NO: 895886 - RNA, 19 nt, Artificial Sequence
  Description of Artificial Sequence: Synthetic oligonucleotide
ccaaacuacccggaaacag

SEQ ID NO: 895887 - RNA, 19 nt, Artificial Sequence
  Description of Artificial Sequence: Synthetic oligonucleotide
uagcggacagcgcguaaaa

SEQ ID NO: 895888 - RNA, 19 nt, Artificial Sequence
  Description of Artificial Sequence: Synthetic oligonucleotide
gccaaaaucggacuugugu

SEQ ID NO: 895889 - RNA, 19 nt, Artificial Sequence
  Description of Artificial Sequence: Synthetic oligonucleotide
guacaggugugugaauuca

SEQ ID NO: 895890 - RNA, 19 nt, Artificial Sequence
  Description of Artificial Sequence: Synthetic oligonucleotide
cucagugugagcugugcua

SEQ ID NO: 895891 - RNA, 19 nt, Artificial Sequence
  Description of Artificial Sequence: Synthetic oligonucleotide
gcggacagcgcguaaaauc

SEQ ID NO: 895892 - RNA, 19 nt, Artificial Sequence
  Description of Artificial Sequence: Synthetic oligonucleotide
ccucauagguguugucugg

SEQ ID NO: 895893 - RNA, 19 nt, Artificial Sequence
  Description of Artificial Sequence: Synthetic oligonucleotide
cugagucucauagagacau

SEQ ID NO: 895894 - RNA, 19 nt, Artificial Sequence
  Description of Artificial Sequence: Synthetic oligonucleotide
aucggacuuguguuuggau

SEQ ID NO: 895895 - RNA, 19 nt, Artificial Sequence
  Description of Artificial Sequence: Synthetic oligonucleotide
gggcuaaaggagaauuaag

SEQ ID NO: 895896 - RNA, 19 nt, Artificial Sequence
  Description of Artificial Sequence: Synthetic oligonucleotide
cagcgcguaaaaucgggca

SEQ ID NO: 895897 - RNA, 19 nt, Artificial Sequence
  Description of Artificial Sequence: Synthetic oligonucleotide
agggaugugcucaggcuug

SEQ ID NO: 895898 - RNA, 19 nt, Artificial Sequence
  Description of Artificial Sequence: Synthetic oligonucleotide
agguacccuuguaaucugg

SEQ ID NO: 895899 - RNA, 19 nt, Artificial Sequence
  Description of Artificial Sequence: Synthetic oligonucleotide
uccuuacaccggauauccu

SEQ ID NO: 895900 - RNA, 19 nt, Artificial Sequence
  Description of Artificial Sequence: Synthetic oligonucleotide
agagcagaugaaaucucaa

SEQ ID NO: 895901 - RNA, 19 nt, Artificial Sequence
  Description of Artificial Sequence: Synthetic oligonucleotide
ggcuucaucauuggugaug

SEQ ID NO: 895902 - RNA, 19 nt, Artificial Sequence
  Description of Artificial Sequence: Synthetic oligonucleotide
ucuuggugccaggaccaca

SEQ ID NO: 895903 - RNA, 19 nt, Artificial Sequence
  Description of Artificial Sequence: Synthetic oligonucleotide
accgugaacuguaccacca

SEQ ID NO: 895904 - RNA, 19 nt, Artificial Sequence
  Description of Artificial Sequence: Synthetic oligonucleotide
cagguacccuuguaaucug

SEQ ID NO: 895905 - RNA, 19 nt, Artificial Sequence
  Description of Artificial Sequence: Synthetic oligonucleotide
uaccggugguucccacucc

SEQ ID NO: 895906 - RNA, 19 nt, Artificial Sequence
  Description of Artificial Sequence: Synthetic oligonucleotide
guaccaccagugucuggcc

SEQ ID NO: 895907 - RNA, 19 nt, Artificial Sequence
  Description of Artificial Sequence: Synthetic oligonucleotide
ucuagcggacagcgcguaa

SEQ ID NO: 895908 - RNA, 19 nt, Artificial Sequence
  Description of Artificial Sequence: Synthetic oligonucleotide
gauagagaaaagggacaua

SEQ ID NO: 895909 - RNA, 19 nt, Artificial Sequence
  Description of Artificial Sequence: Synthetic oligonucleotide
agucucauagagacauuau

SEQ ID NO: 895910 - RNA, 19 nt, Artificial Sequence
  Description of Artificial Sequence: Synthetic oligonucleotide
cuagaacuggcugccccac

SEQ ID NO: 895911 - RNA, 19 nt, Artificial Sequence
  Description of Artificial Sequence: Synthetic oligonucleotide
ucgcccuuguauucaggau

SEQ ID NO: 895912 - RNA, 19 nt, Artificial Sequence
  Description of Artificial Sequence: Synthetic oligonucleotide
cuacccggaaacagcuuca

SEQ ID NO: 895913 - RNA, 19 nt, Artificial Sequence
  Description of Artificial Sequence: Synthetic oligonucleotide
cacucgcccuuguauucag

SEQ ID NO: 895914 - RNA, 19 nt, Artificial Sequence
  Description of Artificial Sequence: Synthetic oligonucleotide
gggagaacggggaugagaa

SEQ ID NO: 895915 - RNA, 19 nt, Artificial Sequence
  Description of Artificial Sequence: Synthetic oligonucleotide
uguccggaccaaacaugau

SEQ ID NO: 895916 - RNA, 19 nt, Artificial Sequence
  Description of Artificial Sequence: Synthetic oligonucleotide
cggaaacagcuucacauag

SEQ ID NO: 895917 - RNA, 19 nt, Artificial Sequence
  Description of Artificial Sequence: Synthetic oligonucleotide
uagguguugucuggccgca

SEQ ID NO: 895918 - RNA, 19 nt, Artificial Sequence
  Description of Artificial Sequence: Synthetic oligonucleotide
cucaagccuaggacuuuuc

SEQ ID NO: 895919 - RNA, 19 nt, Artificial Sequence
  Description of Artificial Sequence: Synthetic oligonucleotide
cacgggcccuuuaaaacga

SEQ ID NO: 895920 - RNA, 19 nt, Artificial Sequence
  Description of Artificial Sequence: Synthetic oligonucleotide
ugagucucauagagacauu

SEQ ID NO: 895921 - RNA, 19 nt, Artificial Sequence
  Description of Artificial Sequence: Synthetic oligonucleotide
agucccaaucauccuccaa

SEQ ID NO: 895922 - RNA, 19 nt, Artificial Sequence
  Description of Artificial Sequence: Synthetic oligonucleotide
uuacgcuucuugucuucuu

SEQ ID NO: 895923 - RNA, 19 nt, Artificial Sequence
  Description of Artificial Sequence: Synthetic oligonucleotide
ccagggguuggauagagaa

SEQ ID NO: 895924 - RNA, 19 nt, Artificial Sequence
  Description of Artificial Sequence: Synthetic oligonucleotide
cggauauccuuguugauca

SEQ ID NO: 895925 - RNA, 19 nt, Artificial Sequence
  Description of Artificial Sequence: Synthetic oligonucleotide
gaauuaccggugguuccca

SEQ ID NO: 895926 - RNA, 19 nt, Artificial Sequence
  Description of Artificial Sequence: Synthetic oligonucleotide
ccucuuuacgcuucuuguc

SEQ ID NO: 895927 - RNA, 19 nt, Artificial Sequence
  Description of Artificial Sequence: Synthetic oligonucleotide
cagagaucuaagcccagua

SEQ ID NO: 895928 - RNA, 19 nt, Artificial Sequence
  Description of Artificial Sequence: Synthetic oligonucleotide
gagggcuaaaggagaauua

SEQ ID NO: 895929 - RNA, 19 nt, Artificial Sequence
  Description of Artificial Sequence: Synthetic oligonucleotide
ggauauccuuguugaucag

SEQ ID NO: 895930 - RNA, 19 nt, Artificial Sequence
  Description of Artificial Sequence: Synthetic oligonucleotide
acccggaaacagcuucaca

SEQ ID NO: 895931 - RNA, 19 nt, Artificial Sequence
  Description of Artificial Sequence: Synthetic oligonucleotide
cagucaucuccguccaaga

SEQ ID NO: 895932 - RNA, 19 nt, Artificial Sequence
  Description of Artificial Sequence: Synthetic oligonucleotide
guguauccagguacccuug

SEQ ID NO: 895933 - RNA, 19 nt, Artificial Sequence
  Description of Artificial Sequence: Synthetic oligonucleotide
caaaaucggacuuguguuu

SEQ ID NO: 895934 - RNA, 19 nt, Artificial Sequence
  Description of Artificial Sequence: Synthetic oligonucleotide
gguccaaacuacccggaaa

SEQ ID NO: 895935 - RNA, 19 nt, Artificial Sequence
  Description of Artificial Sequence: Synthetic oligonucleotide
gggaagacacaaaacuuaa

SEQ ID NO: 895936 - RNA, 19 nt, Artificial Sequence
  Description of Artificial Sequence: Synthetic oligonucleotide
uacccggaaacagcuucac

SEQ ID NO: 895937 - RNA, 19 nt, Artificial Sequence
  Description of Artificial Sequence: Synthetic oligonucleotide
uugagggcuaaaggagaau

SEQ ID NO: 895938 - RNA, 19 nt, Artificial Sequence
  Description of Artificial Sequence: Synthetic oligonucleotide
gaaaguugucaaagauugu

SEQ ID NO: 895939 - RNA, 19 nt, Artificial Sequence
  Description of Artificial Sequence: Synthetic oligonucleotide
gguugugaccagggguugg

SEQ ID NO: 895940 - RNA, 19 nt, Artificial Sequence
  Description of Artificial Sequence: Synthetic oligonucleotide
uccugaaguugggaggguu

SEQ ID NO: 895941 - RNA, 19 nt, Artificial Sequence
  Description of Artificial Sequence: Synthetic oligonucleotide
caucauuggugaugagaaa

SEQ ID NO: 895942 - RNA, 19 nt, Artificial Sequence
  Description of Artificial Sequence: Synthetic oligonucleotide
aaacugucauaggcauaaa

SEQ ID NO: 895943 - RNA, 19 nt, Artificial Sequence
  Description of Artificial Sequence: Synthetic oligonucleotide
guugugaccagggguugga

SEQ ID NO: 895944 - RNA, 19 nt, Artificial Sequence
  Description of Artificial Sequence: Synthetic oligonucleotide
gacguggcuuccacucgcc

SEQ ID NO: 895945 - RNA, 19 nt, Artificial Sequence
  Description of Artificial Sequence: Synthetic oligonucleotide
gguguugucuggccgcaca

SEQ ID NO: 895946 - RNA, 19 nt, Artificial Sequence
  Description of Artificial Sequence: Synthetic oligonucleotide
caauuuccggguguaucca

SEQ ID NO: 895947 - RNA, 19 nt, Artificial Sequence
  Description of Artificial Sequence: Synthetic oligonucleotide
ggacagcgcguaaaaucgg

SEQ ID NO: 895948 - RNA, 19 nt, Artificial Sequence
  Description of Artificial Sequence: Synthetic oligonucleotide
ccuuguauucaggauucug

SEQ ID NO: 895949 - RNA, 19 nt, Artificial Sequence
  Description of Artificial Sequence: Synthetic oligonucleotide
ccaggaccacagauguccg

SEQ ID NO: 895950 - RNA, 19 nt, Artificial Sequence
  Description of Artificial Sequence: Synthetic oligonucleotide
uuggcucguucaucccagu

SEQ ID NO: 895951 - RNA, 19 nt, Artificial Sequence
  Description of Artificial Sequence: Synthetic oligonucleotide
ccggauauccuuguugauc

SEQ ID NO: 895952 - RNA, 19 nt, Artificial Sequence
  Description of Artificial Sequence: Synthetic oligonucleotide
gguguauccagguacccuu

SEQ ID NO: 895953 - RNA, 19 nt, Artificial Sequence
  Description of Artificial Sequence: Synthetic oligonucleotide
cccaguacagcaaaacugu

SEQ ID NO: 895954 - RNA, 19 nt, Artificial Sequence
  Description of Artificial Sequence: Synthetic oligonucleotide
cauccuccaaugagccuga

SEQ ID NO: 895955 - RNA, 19 nt, Artificial Sequence
  Description of Artificial Sequence: Synthetic oligonucleotide
guauccagguacccuugua

SEQ ID NO: 895956 - RNA, 19 nt, Artificial Sequence
  Description of Artificial Sequence: Synthetic oligonucleotide
ggauucgacccagcgguug

SEQ ID NO: 895957 - RNA, 19 nt, Artificial Sequence
  Description of Artificial Sequence: Synthetic oligonucleotide
uggauucgacccagcgguu

SEQ ID NO: 895958 - RNA, 19 nt, Artificial Sequence
  Description of Artificial Sequence: Synthetic oligonucleotide
agucgauguucugcucaug

SEQ ID NO: 895959 - RNA, 19 nt, Artificial Sequence
  Description of Artificial Sequence: Synthetic oligonucleotide
ggauagagaaaagggacau

SEQ ID NO: 895960 - RNA, 19 nt, Artificial Sequence
  Description of Artificial Sequence: Synthetic oligonucleotide
uucgacccagcgguugguc

SEQ ID NO: 895961 - RNA, 19 nt, Artificial Sequence
  Description of Artificial Sequence: Synthetic oligonucleotide
guaguauccuccucaucuu

SEQ ID NO: 895962 - RNA, 19 nt, Artificial Sequence
  Description of Artificial Sequence: Synthetic oligonucleotide
cuagcggacagcgcguaaa

SEQ ID NO: 895963 - RNA, 19 nt, Artificial Sequence
  Description of Artificial Sequence: Synthetic oligonucleotide
ccaaaaucggacuuguguu

SEQ ID NO: 895964 - RNA, 19 nt, Artificial Sequence
  Description of Artificial Sequence: Synthetic oligonucleotide
cgcacgggcccuuuaaaac

SEQ ID NO: 895965 - RNA, 19 nt, Artificial Sequence
  Description of Artificial Sequence: Synthetic oligonucleotide
agguguugucuggccgcac

SEQ ID NO: 895966 - RNA, 19 nt, Artificial Sequence
  Description of Artificial Sequence: Synthetic oligonucleotide
caguccucagguuuagaau

SEQ ID NO: 895967 - RNA, 19 nt, Artificial Sequence
  Description of Artificial Sequence: Synthetic oligonucleotide
gcccuuguauucaggauuc

SEQ ID NO: 895968 - RNA, 19 nt, Artificial Sequence
  Description of Artificial Sequence: Synthetic oligonucleotide
aacuacccggaaacagcuu

SEQ ID NO: 895969 - RNA, 19 nt, Artificial Sequence
  Description of Artificial Sequence: Synthetic oligonucleotide
guguacaggugugugaauu

SEQ ID NO: 895970 - RNA, 19 nt, Artificial Sequence
  Description of Artificial Sequence: Synthetic oligonucleotide
caaucugacguggcuucca

SEQ ID NO: 895971 - RNA, 19 nt, Artificial Sequence
  Description of Artificial Sequence: Synthetic oligonucleotide
ggaccacagauguccggac

SEQ ID NO: 895972 - RNA, 19 nt, Artificial Sequence
  Description of Artificial Sequence: Synthetic oligonucleotide
ggguugucaauuuccgggu

SEQ ID NO: 895973 - RNA, 19 nt, Artificial Sequence
  Description of Artificial Sequence: Synthetic oligonucleotide
cagggguaguauccuccuc

SEQ ID NO: 895974 - RNA, 19 nt, Artificial Sequence
  Description of Artificial Sequence: Synthetic oligonucleotide
cccggaaacagcuucacau

SEQ ID NO: 895975 - RNA, 19 nt, Artificial Sequence
  Description of Artificial Sequence: Synthetic oligonucleotide
accccaugucucauugcca

SEQ ID NO: 895976 - RNA, 19 nt, Artificial Sequence
  Description of Artificial Sequence: Synthetic oligonucleotide
aggcuucaucauuggugau

SEQ ID NO: 895977 - RNA, 19 nt, Artificial Sequence
  Description of Artificial Sequence: Synthetic oligonucleotide
cggaccaaacaugauguug

SEQ ID NO: 895978 - RNA, 19 nt, Artificial Sequence
  Description of Artificial Sequence: Synthetic oligonucleotide
uugugaccagggguuggau

SEQ ID NO: 895979 - RNA, 19 nt, Artificial Sequence
  Description of Artificial Sequence: Synthetic oligonucleotide
auucgacccagcgguuggu

SEQ ID NO: 895980 - RNA, 19 nt, Artificial Sequence
  Description of Artificial Sequence: Synthetic oligonucleotide
ccgagcaggagcggcacgg

SEQ ID NO: 895981 - RNA, 19 nt, Artificial Sequence
  Description of Artificial Sequence: Synthetic oligonucleotide
ccaaugagccugacuccac

SEQ ID NO: 895982 - RNA, 19 nt, Artificial Sequence
  Description of Artificial Sequence: Synthetic oligonucleotide
agcggacagcgcguaaaau

SEQ ID NO: 895983 - RNA, 19 nt, Artificial Sequence
  Description of Artificial Sequence: Synthetic oligonucleotide
gguuccgcggcggccaggc

SEQ ID NO: 895984 - RNA, 19 nt, Artificial Sequence
  Description of Artificial Sequence: Synthetic oligonucleotide
gcguguacaggugugugaa

SEQ ID NO: 895985 - RNA, 19 nt, Artificial Sequence
  Description of Artificial Sequence: Synthetic oligonucleotide
gguccccguagaauuugcc

SEQ ID NO: 895986 - RNA, 19 nt, Artificial Sequence
  Description of Artificial Sequence: Synthetic oligonucleotide
cagugggguguucaggccu

SEQ ID NO: 895987 - RNA, 19 nt, Artificial Sequence
  Description of Artificial Sequence: Synthetic oligonucleotide
cgaaucuagcggacagcgc

SEQ ID NO: 895988 - RNA, 19 nt, Artificial Sequence
  Description of Artificial Sequence: Synthetic oligonucleotide
ccagguacccuuguaaucu

SEQ ID NO: 895989 - RNA, 19 nt, Artificial Sequence
  Description of Artificial Sequence: Synthetic oligonucleotide
ccgugaacuguaccaccag

SEQ ID NO: 895990 - RNA, 19 nt, Artificial Sequence
  Description of Artificial Sequence: Synthetic oligonucleotide
ccccaugucucauugccaa

SEQ ID NO: 895991 - RNA, 19 nt, Artificial Sequence
  Description of Artificial Sequence: Synthetic oligonucleotide
cagcgguugguccagucau

SEQ ID NO: 895992 - RNA, 19 nt, Artificial Sequence
  Description of Artificial Sequence: Synthetic oligonucleotide
ggguaguauccuccucauc

SEQ ID NO: 895993 - RNA, 19 nt, Artificial Sequence
  Description of Artificial Sequence: Synthetic oligonucleotide
cgcguaaaaucgggcaucc

SEQ ID NO: 895994 - RNA, 19 nt, Artificial Sequence
  Description of Artificial Sequence: Synthetic oligonucleotide
cccaaucauccuccaauga

SEQ ID NO: 895995 - RNA, 19 nt, Artificial Sequence
  Description of Artificial Sequence: Synthetic oligonucleotide
aucuagcggacagcgcgua

SEQ ID NO: 895996 - RNA, 19 nt, Artificial Sequence
  Description of Artificial Sequence: Synthetic oligonucleotide
accagggguuggauagaga

SEQ ID NO: 895997 - RNA, 19 nt, Artificial Sequence
  Description of Artificial Sequence: Synthetic oligonucleotide
gccuaggacuuuuccucca

SEQ ID NO: 895998 - RNA, 19 nt, Artificial Sequence
  Description of Artificial Sequence: Synthetic oligonucleotide
gcgcguaaaaucgggcauc

SEQ ID NO: 895999 - RNA, 19 nt, Artificial Sequence
  Description of Artificial Sequence: Synthetic oligonucleotide
gguggcagaaagucccaau

SEQ ID NO: 896000 - RNA, 19 nt, Artificial Sequence
  Description of Artificial Sequence: Synthetic oligonucleotide
ccccguagaauuugccaga

SEQ ID NO: 896001 - RNA, 19 nt, Artificial Sequence
  Description of Artificial Sequence: Synthetic oligonucleotide
ccggaaacagcuucacaua

SEQ ID NO: 896002 - RNA, 19 nt, Artificial Sequence
  Description of Artificial Sequence: Synthetic oligonucleotide
ggguucgaaucuagcggac

SEQ ID NO: 896003 - RNA, 19 nt, Artificial Sequence
  Description of Artificial Sequence: Synthetic oligonucleotide
ccguagaauuugccagaac

SEQ ID NO: 896004 - RNA, 19 nt, Artificial Sequence
  Description of Artificial Sequence: Synthetic oligonucleotide
gcgcacgggcccuuuaaaa

SEQ ID NO: 896005 - RNA, 19 nt, Artificial Sequence
  Description of Artificial Sequence: Synthetic oligonucleotide
gccgagcaggagcggcacg

SEQ ID NO: 896006 - RNA, 19 nt, Artificial Sequence
  Description of Artificial Sequence: Synthetic oligonucleotide
gcuucaccgugaacuguac

SEQ ID NO: 896007 - RNA, 19 nt, Artificial Sequence
  Description of Artificial Sequence: Synthetic oligonucleotide
ggcagguuccgcggcggcc

SEQ ID NO: 896008 - RNA, 19 nt, Artificial Sequence
  Description of Artificial Sequence: Synthetic oligonucleotide
ggccgaggaggccgagcag

SEQ ID NO: 896009 - RNA, 19 nt, Artificial Sequence
  Description of Artificial Sequence: Synthetic oligonucleotide
gccagagaucuaagcccag

SEQ ID NO: 896010 - RNA, 19 nt, Artificial Sequence
  Description of Artificial Sequence: Synthetic oligonucleotide
agguuccgcggcggccagg

SEQ ID NO: 896011 - RNA, 19 nt, Artificial Sequence
  Description of Artificial Sequence: Synthetic oligonucleotide
ggagcggcacggagaggag

SEQ ID NO: 896012 - RNA, 19 nt, Artificial Sequence
  Description of Artificial Sequence: Synthetic oligonucleotide
ggccucaguccagcccugg

SEQ ID NO: 896013 - RNA, 19 nt, Artificial Sequence
  Description of Artificial Sequence: Synthetic oligonucleotide
guuccgcggcggccaggcc

SEQ ID NO: 896014 - RNA, 19 nt, Artificial Sequence
  Description of Artificial Sequence: Synthetic oligonucleotide
gaggagcauggcgggccga

SEQ ID NO: 896015 - RNA, 19 nt, Artificial Sequence
  Description of Artificial Sequence: Synthetic oligonucleotide
caucauccuuacaccggau

SEQ ID NO: 896016 - RNA, 19 nt, Artificial Sequence
  Description of Artificial Sequence: Synthetic oligonucleotide
gcccuuguugcugaagggu

SEQ ID NO: 896017 - RNA, 19 nt, Artificial Sequence
  Description of Artificial Sequence: Synthetic oligonucleotide
gggguaguauccuccucau

SEQ ID NO: 896018 - RNA, 19 nt, Artificial Sequence
  Description of Artificial Sequence: Synthetic oligonucleotide
ggcgcacgggcccuuuaaa

SEQ ID NO: 896019 - RNA, 19 nt, Artificial Sequence
  Description of Artificial Sequence: Synthetic oligonucleotide
ggguguauccagguacccu

SEQ ID NO: 896020 - RNA, 19 nt, Artificial Sequence
  Description of Artificial Sequence: Synthetic oligonucleotide
caucagggucagggaugug

SEQ ID NO: 896021 - RNA, 19 nt, Artificial Sequence
  Description of Artificial Sequence: Synthetic oligonucleotide
ggcaagggagaacggggau

SEQ ID NO: 896022 - RNA, 19 nt, Artificial Sequence
  Description of Artificial Sequence: Synthetic oligonucleotide
acgggcccuuuaaaacgau

SEQ ID NO: 896023 - RNA, 19 nt, Artificial Sequence
  Description of Artificial Sequence: Synthetic oligonucleotide
ccccacaaguggcccaguc

SEQ ID NO: 896024 - RNA, 19 nt, Artificial Sequence
  Description of Artificial Sequence: Synthetic oligonucleotide
aucgggcauccuggcuugu

SEQ ID NO: 896025 - RNA, 19 nt, Artificial Sequence
  Description of Artificial Sequence: Synthetic oligonucleotide
cuguggggucaucaauuuu

SEQ ID NO: 896026 - RNA, 19 nt, Artificial Sequence
  Description of Artificial Sequence: Synthetic oligonucleotide
gcgguugguccagucaucu

SEQ ID NO: 896027 - RNA, 19 nt, Artificial Sequence
  Description of Artificial Sequence: Synthetic oligonucleotide
cgggcccuuuaaaacgauc

SEQ ID NO: 896028 - RNA, 19 nt, Artificial Sequence
  Description of Artificial Sequence: Synthetic oligonucleotide
ggccgcacaaucagcgugu

SEQ ID NO: 896029 - RNA, 19 nt, Artificial Sequence
  Description of Artificial Sequence: Synthetic oligonucleotide
ggaugugcucaggcuuguc

SEQ ID NO: 896030 - RNA, 19 nt, Artificial Sequence
  Description of Artificial Sequence: Synthetic oligonucleotide
ccgcacaaucagcguguac

SEQ ID NO: 896031 - RNA, 19 nt, Artificial Sequence
  Description of Artificial Sequence: Synthetic oligonucleotide
cccagcgguugguccaguc

SEQ ID NO: 896032 - RNA, 19 nt, Artificial Sequence
  Description of Artificial Sequence: Synthetic oligonucleotide
cgacccagcgguuggucca

SEQ ID NO: 896033 - RNA, 19 nt, Artificial Sequence
  Description of Artificial Sequence: Synthetic oligonucleotide
cggguguauccagguaccc

SEQ ID NO: 896034 - RNA, 19 nt, Artificial Sequence
  Description of Artificial Sequence: Synthetic oligonucleotide
ccacucgcccuuguauuca

SEQ ID NO: 896035 - RNA, 19 nt, Artificial Sequence
  Description of Artificial Sequence: Synthetic oligonucleotide
ccacacccguuccugaagu

SEQ ID NO: 896036 - RNA, 19 nt, Artificial Sequence
  Description of Artificial Sequence: Synthetic oligonucleotide
cccguagaauuugccagaa

SEQ ID NO: 896037 - RNA, 19 nt, Artificial Sequence
  Description of Artificial Sequence: Synthetic oligonucleotide
cgugaacuguaccaccagu

SEQ ID NO: 896038 - RNA, 19 nt, Artificial Sequence
  Description of Artificial Sequence: Synthetic oligonucleotide
cacacccguuccugaaguu

SEQ ID NO: 896039 - RNA, 19 nt, Artificial Sequence
  Description of Artificial Sequence: Synthetic oligonucleotide
ccgagucuccaugcauguc

SEQ ID NO: 896040 - RNA, 19 nt, Artificial Sequence
  Description of Artificial Sequence: Synthetic oligonucleotide
ggggaguauucaggguugu

SEQ ID NO: 896041 - RNA, 19 nt, Artificial Sequence
  Description of Artificial Sequence: Synthetic oligonucleotide
ccguccaagaacugcucuu

SEQ ID NO: 896042 - RNA, 19 nt, Artificial Sequence
  Description of Artificial Sequence: Synthetic oligonucleotide
gcaggugguauggccucua

SEQ ID NO: 896043 - RNA, 19 nt, Artificial Sequence
  Description of Artificial Sequence: Synthetic oligonucleotide
gggaugugcucaggcuugu

SEQ ID NO: 896044 - RNA, 19 nt, Artificial Sequence
  Description of Artificial Sequence: Synthetic oligonucleotide
gcguaaaaucgggcauccu

SEQ ID NO: 896045 - RNA, 19 nt, Artificial Sequence
  Description of Artificial Sequence: Synthetic oligonucleotide
gccgcacaaucagcgugua

SEQ ID NO: 896046 - RNA, 19 nt, Artificial Sequence
  Description of Artificial Sequence: Synthetic oligonucleotide
cccaguccucagguuuaga

SEQ ID NO: 896047 - RNA, 19 nt, Artificial Sequence
  Description of Artificial Sequence: Synthetic oligonucleotide
ccggaccaaacaugauguu

SEQ ID NO: 896048 - RNA, 19 nt, Artificial Sequence
  Description of Artificial Sequence: Synthetic oligonucleotide
cguguacaggugugugaau

SEQ ID NO: 896049 - RNA, 19 nt, Artificial Sequence
  Description of Artificial Sequence: Synthetic oligonucleotide
cggcgcacgggcccuuuaa

SEQ ID NO: 896050 - RNA, 19 nt, Artificial Sequence
  Description of Artificial Sequence: Synthetic oligonucleotide
gcggcgcacgggcccuuua

SEQ ID NO: 896051 - RNA, 19 nt, Artificial Sequence
  Description of Artificial Sequence: Synthetic oligonucleotide
ggcggcgcacgggcccuuu

SEQ ID NO: 896052 - RNA, 19 nt, Artificial Sequence
  Description of Artificial Sequence: Synthetic oligonucleotide
aauuuuaacuagcuacugc

SEQ ID NO: 896053 - RNA, 19 nt, Artificial Sequence
  Description of Artificial Sequence: Synthetic oligonucleotide
cuauuuaagagcuucaccg

SEQ ID NO: 896054 - RNA, 19 nt, Artificial Sequence
  Description of Artificial Sequence: Synthetic oligonucleotide
ucuucuaacaagcugagug

SEQ ID NO: 896055 - RNA, 19 nt, Artificial Sequence
  Description of Artificial Sequence: Synthetic oligonucleotide
ugcaugauaaaccugaaca

SEQ ID NO: 896056 - RNA, 19 nt, Artificial Sequence
  Description of Artificial Sequence: Synthetic oligonucleotide
ucugaauagacugugaugc

SEQ ID NO: 896057 - RNA, 19 nt, Artificial Sequence
  Description of Artificial Sequence: Synthetic oligonucleotide
uguuugaacuauuuaagag

SEQ ID NO: 896058 - RNA, 19 nt, Artificial Sequence
  Description of Artificial Sequence: Synthetic oligonucleotide
uuugaacuauuuaagagcu

SEQ ID NO: 896059 - RNA, 19 nt, Artificial Sequence
  Description of Artificial Sequence: Synthetic oligonucleotide
uccucaacggagaagacgg

SEQ ID NO: 896060 - RNA, 19 nt, Artificial Sequence
  Description of Artificial Sequence: Synthetic oligonucleotide
ugcaguucaagguagacug

SEQ ID NO: 896061 - RNA, 19 nt, Artificial Sequence
  Description of Artificial Sequence: Synthetic oligonucleotide
uuaggauggaucauugaag

SEQ ID NO: 896062 - RNA, 19 nt, Artificial Sequence
  Description of Artificial Sequence: Synthetic oligonucleotide
aagccaugagguuaucacc

SEQ ID NO: 896063 - RNA, 19 nt, Artificial Sequence
  Description of Artificial Sequence: Synthetic oligonucleotide
auuuuaacuagcuacugcu

SEQ ID NO: 896064 - RNA, 19 nt, Artificial Sequence
  Description of Artificial Sequence: Synthetic oligonucleotide
uuauugguuagcaaaguac

SEQ ID NO: 896065 - RNA, 19 nt, Artificial Sequence
  Description of Artificial Sequence: Synthetic oligonucleotide
gaugugaaggccuggaaag

SEQ ID NO: 896066 - RNA, 19 nt, Artificial Sequence
  Description of Artificial Sequence: Synthetic oligonucleotide
gucugcaugacucaaagcc

SEQ ID NO: 896067 - RNA, 19 nt, Artificial Sequence
  Description of Artificial Sequence: Synthetic oligonucleotide
cuuaaguacucaaaauugc

SEQ ID NO: 896068 - RNA, 19 nt, Artificial Sequence
  Description of Artificial Sequence: Synthetic oligonucleotide
uuuaggauggaucauugaa

SEQ ID NO: 896069 - RNA, 19 nt, Artificial Sequence
  Description of Artificial Sequence: Synthetic oligonucleotide
uuuugagaaacagggaggg

SEQ ID NO: 896070 - RNA, 19 nt, Artificial Sequence
  Description of Artificial Sequence: Synthetic oligonucleotide
ugcucauucgaagagaucc

SEQ ID NO: 896071 - RNA, 19 nt, Artificial Sequence
  Description of Artificial Sequence: Synthetic oligonucleotide
uuaaguacucaaaauugcu

SEQ ID NO: 896072 - RNA, 19 nt, Artificial Sequence
  Description of Artificial Sequence: Synthetic oligonucleotide
uuugcaagccuucagggac

SEQ ID NO: 896073 - RNA, 19 nt, Artificial Sequence
  Description of Artificial Sequence: Synthetic oligonucleotide
aguucauaccucuuauugg

SEQ ID NO: 896074 - RNA, 19 nt, Artificial Sequence
  Description of Artificial Sequence: Synthetic oligonucleotide
ucaacggagaagacggugg

SEQ ID NO: 896075 - RNA, 19 nt, Artificial Sequence
  Description of Artificial Sequence: Synthetic oligonucleotide
cuauuuuacggugauaccc

SEQ ID NO: 896076 - RNA, 19 nt, Artificial Sequence
  Description of Artificial Sequence: Synthetic oligonucleotide
uuuaacuagcuacugcugu

SEQ ID NO: 896077 - RNA, 19 nt, Artificial Sequence
  Description of Artificial Sequence: Synthetic oligonucleotide
agaaacuuaagagagccag

SEQ ID NO: 896078 - RNA, 19 nt, Artificial Sequence
  Description of Artificial Sequence: Synthetic oligonucleotide
ugccagaacuauuuuacgg

SEQ ID NO: 896079 - RNA, 19 nt, Artificial Sequence
  Description of Artificial Sequence: Synthetic oligonucleotide
auauucacuccucaggcag

SEQ ID NO: 896080 - RNA, 19 nt, Artificial Sequence
  Description of Artificial Sequence: Synthetic oligonucleotide
acggugauaccccugaccg

SEQ ID NO: 896081 - RNA, 19 nt, Artificial Sequence
  Description of Artificial Sequence: Synthetic oligonucleotide
uaggauggaucauugaagc

SEQ ID NO: 896082 - RNA, 19 nt, Artificial Sequence
  Description of Artificial Sequence: Synthetic oligonucleotide
aaauugugcuugcccaugg

SEQ ID NO: 896083 - RNA, 19 nt, Artificial Sequence
  Description of Artificial Sequence: Synthetic oligonucleotide
accgcuuuucgauaauugc

SEQ ID NO: 896084 - RNA, 19 nt, Artificial Sequence
  Description of Artificial Sequence: Synthetic oligonucleotide
uuauuggcagcaaugcagc

SEQ ID NO: 896085 - RNA, 19 nt, Artificial Sequence
  Description of Artificial Sequence: Synthetic oligonucleotide
caauagauugcacaauccc

SEQ ID NO: 896086 - RNA, 19 nt, Artificial Sequence
  Description of Artificial Sequence: Synthetic oligonucleotide
uauuuaagagcuucaccgc

SEQ ID NO: 896087 - RNA, 19 nt, Artificial Sequence
  Description of Artificial Sequence: Synthetic oligonucleotide
cuugucugauccuuggucc

SEQ ID NO: 896088 - RNA, 19 nt, Artificial Sequence
  Description of Artificial Sequence: Synthetic oligonucleotide
uguacucuaauccauccau

SEQ ID NO: 896089 - RNA, 19 nt, Artificial Sequence
  Description of Artificial Sequence: Synthetic oligonucleotide
gauguacucuaauccaucc

SEQ ID NO: 896090 - RNA, 19 nt, Artificial Sequence
  Description of Artificial Sequence: Synthetic oligonucleotide
uuuacggugauaccccuga

SEQ ID NO: 896091 - RNA, 19 nt, Artificial Sequence
  Description of Artificial Sequence: Synthetic oligonucleotide
gacaauagauugcacaauc

SEQ ID NO: 896092 - RNA, 19 nt, Artificial Sequence
  Description of Artificial Sequence: Synthetic oligonucleotide
augcaaccaagauuauucc

SEQ ID NO: 896093 - RNA, 19 nt, Artificial Sequence
  Description of Artificial Sequence: Synthetic oligonucleotide
uugagaaacagggagggug

SEQ ID NO: 896094 - RNA, 19 nt, Artificial Sequence
  Description of Artificial Sequence: Synthetic oligonucleotide
uuuuaacuagcuacugcug

SEQ ID NO: 896095 - RNA, 19 nt, Artificial Sequence
  Description of Artificial Sequence: Synthetic oligonucleotide
ucgauaauugccccuuaag

SEQ ID NO: 896096 - RNA, 19 nt, Artificial Sequence
  Description of Artificial Sequence: Synthetic oligonucleotide
caaucagacacucgaaggc

SEQ ID NO: 896097 - RNA, 19 nt, Artificial Sequence
  Description of Artificial Sequence: Synthetic oligonucleotide
uggaacaccggcuucuucc

SEQ ID NO: 896098 - RNA, 19 nt, Artificial Sequence
  Description of Artificial Sequence: Synthetic oligonucleotide
gaugccagaacuauuuuac

SEQ ID NO: 896099 - RNA, 19 nt, Artificial Sequence
  Description of Artificial Sequence: Synthetic oligonucleotide
cucaaaauugcuuuugaga

SEQ ID NO: 896100 - RNA, 19 nt, Artificial Sequence
  Description of Artificial Sequence: Synthetic oligonucleotide
ugugaugccagaacuauuu

SEQ ID NO: 896101 - RNA, 19 nt, Artificial Sequence
  Description of Artificial Sequence: Synthetic oligonucleotide
acaauagauugcacaaucc

SEQ ID NO: 896102 - RNA, 19 nt, Artificial Sequence
  Description of Artificial Sequence: Synthetic oligonucleotide
aaauggaugcaaccaagau

SEQ ID NO: 896103 - RNA, 19 nt, Artificial Sequence
  Description of Artificial Sequence: Synthetic oligonucleotide
auuugcaugauaaaccuga

SEQ ID NO: 896104 - RNA, 19 nt, Artificial Sequence
  Description of Artificial Sequence: Synthetic oligonucleotide
accucuuuaggauggauca

SEQ ID NO: 896105 - RNA, 19 nt, Artificial Sequence
  Description of Artificial Sequence: Synthetic oligonucleotide
caugauaaaccugaacagc

SEQ ID NO: 896106 - RNA, 19 nt, Artificial Sequence
  Description of Artificial Sequence: Synthetic oligonucleotide
uucaccuguuuucaugaag

SEQ ID NO: 896107 - RNA, 19 nt, Artificial Sequence
  Description of Artificial Sequence: Synthetic oligonucleotide
uucugaauagacugugaug

SEQ ID NO: 896108 - RNA, 19 nt, Artificial Sequence
  Description of Artificial Sequence: Synthetic oligonucleotide
uuucacccuugucugaucc

SEQ ID NO: 896109 - RNA, 19 nt, Artificial Sequence
  Description of Artificial Sequence: Synthetic oligonucleotide
caugaagccuggaugcucg

SEQ ID NO: 896110 - RNA, 19 nt, Artificial Sequence
  Description of Artificial Sequence: Synthetic oligonucleotide
uuuaguaggaagaccuuua

SEQ ID NO: 896111 - RNA, 19 nt, Artificial Sequence
  Description of Artificial Sequence: Synthetic oligonucleotide
ugggguagcacugaggggc

SEQ ID NO: 896112 - RNA, 19 nt, Artificial Sequence
  Description of Artificial Sequence: Synthetic oligonucleotide
acucuaauccauccauuuc

SEQ ID NO: 896113 - RNA, 19 nt, Artificial Sequence
  Description of Artificial Sequence: Synthetic oligonucleotide
cuaaggagacaucagugac

SEQ ID NO: 896114 - RNA, 19 nt, Artificial Sequence
  Description of Artificial Sequence: Synthetic oligonucleotide
ugguuagcaaaguacacau

SEQ ID NO: 896115 - RNA, 19 nt, Artificial Sequence
  Description of Artificial Sequence: Synthetic oligonucleotide
ggauggaucauugaagccg

SEQ ID NO: 896116 - RNA, 19 nt, Artificial Sequence
  Description of Artificial Sequence: Synthetic oligonucleotide
gagaugagagcuucugcag

SEQ ID NO: 896117 - RNA, 19 nt, Artificial Sequence
  Description of Artificial Sequence: Synthetic oligonucleotide
agacaggcaucauaauuuc

SEQ ID NO: 896118 - RNA, 19 nt, Artificial Sequence
  Description of Artificial Sequence: Synthetic oligonucleotide
cauugaagccgccuggugc

SEQ ID NO: 896119 - RNA, 19 nt, Artificial Sequence
  Description of Artificial Sequence: Synthetic oligonucleotide
accgacaauagauugcaca

SEQ ID NO: 896120 - RNA, 19 nt, Artificial Sequence
  Description of Artificial Sequence: Synthetic oligonucleotide
uguguguugccauucugca

SEQ ID NO: 896121 - RNA, 19 nt, Artificial Sequence
  Description of Artificial Sequence: Synthetic oligonucleotide
uucaagugcguaauggcau

SEQ ID NO: 896122 - RNA, 19 nt, Artificial Sequence
  Description of Artificial Sequence: Synthetic oligonucleotide
uacucaaaauugcuuuuga

SEQ ID NO: 896123 - RNA, 19 nt, Artificial Sequence
  Description of Artificial Sequence: Synthetic oligonucleotide
aagucccuuuauuggcagc

SEQ ID NO: 896124 - RNA, 19 nt, Artificial Sequence
  Description of Artificial Sequence: Synthetic oligonucleotide
acuuaucuccaucauggcu

SEQ ID NO: 896125 - RNA, 19 nt, Artificial Sequence
  Description of Artificial Sequence: Synthetic oligonucleotide
ucaagcauucaccuguuuu

SEQ ID NO: 896126 - RNA, 19 nt, Artificial Sequence
  Description of Artificial Sequence: Synthetic oligonucleotide
ucuuccucacgucggagug

SEQ ID NO: 896127 - RNA, 19 nt, Artificial Sequence
  Description of Artificial Sequence: Synthetic oligonucleotide
ccuuaaguacucaaaauug

SEQ ID NO: 896128 - RNA, 19 nt, Artificial Sequence
  Description of Artificial Sequence: Synthetic oligonucleotide
aaugcagcauucagccagc

SEQ ID NO: 896129 - RNA, 19 nt, Artificial Sequence
  Description of Artificial Sequence: Synthetic oligonucleotide
aaucagacacucgaaggca

SEQ ID NO: 896130 - RNA, 19 nt, Artificial Sequence
  Description of Artificial Sequence: Synthetic oligonucleotide
aaaauggaugcaaccaaga

SEQ ID NO: 896131 - RNA, 19 nt, Artificial Sequence
  Description of Artificial Sequence: Synthetic oligonucleotide
uuccucaacggagaagacg

SEQ ID NO: 896132 - RNA, 19 nt, Artificial Sequence
  Description of Artificial Sequence: Synthetic oligonucleotide
aguagaaaauccccaaauu

SEQ ID NO: 896133 - RNA, 19 nt, Artificial Sequence
  Description of Artificial Sequence: Synthetic oligonucleotide
aagacgguggagcuggaau

SEQ ID NO: 896134 - RNA, 19 nt, Artificial Sequence
  Description of Artificial Sequence: Synthetic oligonucleotide
aacuuaagagagccagaca

SEQ ID NO: 896135 - RNA, 19 nt, Artificial Sequence
  Description of Artificial Sequence: Synthetic oligonucleotide
ucggagugcgccuucacug

SEQ ID NO: 896136 - RNA, 19 nt, Artificial Sequence
  Description of Artificial Sequence: Synthetic oligonucleotide
aaauuaucuguuguuguuu

SEQ ID NO: 896137 - RNA, 19 nt, Artificial Sequence
  Description of Artificial Sequence: Synthetic oligonucleotide
cugguuaaguguuugucuc

SEQ ID NO: 896138 - RNA, 19 nt, Artificial Sequence
  Description of Artificial Sequence: Synthetic oligonucleotide
agggcuagcuguguguugc

SEQ ID NO: 896139 - RNA, 19 nt, Artificial Sequence
  Description of Artificial Sequence: Synthetic oligonucleotide
auagauugcacaauccccu

SEQ ID NO: 896140 - RNA, 19 nt, Artificial Sequence
  Description of Artificial Sequence: Synthetic oligonucleotide
gauggaucauugaagccgc

SEQ ID NO: 896141 - RNA, 19 nt, Artificial Sequence
  Description of Artificial Sequence: Synthetic oligonucleotide
cauaccucuuauugguuag

SEQ ID NO: 896142 - RNA, 19 nt, Artificial Sequence
  Description of Artificial Sequence: Synthetic oligonucleotide
uacggugauaccccugacc

SEQ ID NO: 896143 - RNA, 19 nt, Artificial Sequence
  Description of Artificial Sequence: Synthetic oligonucleotide
guucaagguagacugccag

SEQ ID NO: 896144 - RNA, 19 nt, Artificial Sequence
  Description of Artificial Sequence: Synthetic oligonucleotide
agaguugacagaacugggg

SEQ ID NO: 896145 - RNA, 19 nt, Artificial Sequence
  Description of Artificial Sequence: Synthetic oligonucleotide
acuagcuacugcuguguuc

SEQ ID NO: 896146 - RNA, 19 nt, Artificial Sequence
  Description of Artificial Sequence: Synthetic oligonucleotide
ugcaaccaagauuauucca

SEQ ID NO: 896147 - RNA, 19 nt, Artificial Sequence
  Description of Artificial Sequence: Synthetic oligonucleotide
uucaagguagacugccagc

SEQ ID NO: 896148 - RNA, 19 nt, Artificial Sequence
  Description of Artificial Sequence: Synthetic oligonucleotide
ucccuaaggagacaucagu

SEQ ID NO: 896149 - RNA, 19 nt, Artificial Sequence
  Description of Artificial Sequence: Synthetic oligonucleotide
gaacacuuuagguuuucca

SEQ ID NO: 896150 - RNA, 19 nt, Artificial Sequence
  Description of Artificial Sequence: Synthetic oligonucleotide
agaacuauuuuacggugau

SEQ ID NO: 896151 - RNA, 19 nt, Artificial Sequence
  Description of Artificial Sequence: Synthetic oligonucleotide
ugaccgacaauagauugca

SEQ ID NO: 896152 - RNA, 19 nt, Artificial Sequence
  Description of Artificial Sequence: Synthetic oligonucleotide
uccgcauucccuccuagcu

SEQ ID NO: 896153 - RNA, 19 nt, Artificial Sequence
  Description of Artificial Sequence: Synthetic oligonucleotide
cugaccgacaauagauugc

SEQ ID NO: 896154 - RNA, 19 nt, Artificial Sequence
  Description of Artificial Sequence: Synthetic oligonucleotide
agaugugaaggccuggaaa

SEQ ID NO: 896155 - RNA, 19 nt, Artificial Sequence
  Description of Artificial Sequence: Synthetic oligonucleotide
augccagaacuauuuuacg

SEQ ID NO: 896156 - RNA, 19 nt, Artificial Sequence
  Description of Artificial Sequence: Synthetic oligonucleotide
auucgaagagaucccuaag

SEQ ID NO: 896157 - RNA, 19 nt, Artificial Sequence
  Description of Artificial Sequence: Synthetic oligonucleotide
caaguucucacuuccucug

SEQ ID NO: 896158 - RNA, 19 nt, Artificial Sequence
  Description of Artificial Sequence: Synthetic oligonucleotide
ucuaacaagcugagugaac

SEQ ID NO: 896159 - RNA, 19 nt, Artificial Sequence
  Description of Artificial Sequence: Synthetic oligonucleotide
guagacaguguucugaaua

SEQ ID NO: 896160 - RNA, 19 nt, Artificial Sequence
  Description of Artificial Sequence: Synthetic oligonucleotide
acuggcaagguguugcaga

SEQ ID NO: 896161 - RNA, 19 nt, Artificial Sequence
  Description of Artificial Sequence: Synthetic oligonucleotide
aaccaagauuauuccaaaa

SEQ ID NO: 896162 - RNA, 19 nt, Artificial Sequence
  Description of Artificial Sequence: Synthetic oligonucleotide
ugagugaaccugauucuuc

SEQ ID NO: 896163 - RNA, 19 nt, Artificial Sequence
  Description of Artificial Sequence: Synthetic oligonucleotide
cuucuaacaagcugaguga

SEQ ID NO: 896164 - RNA, 19 nt, Artificial Sequence
  Description of Artificial Sequence: Synthetic oligonucleotide
guaauggcaucagauauuc

SEQ ID NO: 896165 - RNA, 19 nt, Artificial Sequence
  Description of Artificial Sequence: Synthetic oligonucleotide
uuuuacggugauaccccug

SEQ ID NO: 896166 - RNA, 19 nt, Artificial Sequence
  Description of Artificial Sequence: Synthetic oligonucleotide
ggcaagguguugcagacag

SEQ ID NO: 896167 - RNA, 19 nt, Artificial Sequence
  Description of Artificial Sequence: Synthetic oligonucleotide
gggauuugcaugauaaacc

SEQ ID NO: 896168 - RNA, 19 nt, Artificial Sequence
  Description of Artificial Sequence: Synthetic oligonucleotide
agacgguggagcuggaaug

SEQ ID NO: 896169 - RNA, 19 nt, Artificial Sequence
  Description of Artificial Sequence: Synthetic oligonucleotide
caucagauauucugucaag

SEQ ID NO: 896170 - RNA, 19 nt, Artificial Sequence
  Description of Artificial Sequence: Synthetic oligonucleotide
auggcaaaauggaugcaac

SEQ ID NO: 896171 - RNA, 19 nt, Artificial Sequence
  Description of Artificial Sequence: Synthetic oligonucleotide
ugcaagcaaggauggaaca

SEQ ID NO: 896172 - RNA, 19 nt, Artificial Sequence
  Description of Artificial Sequence: Synthetic oligonucleotide
acugcuguguucaaaauua

SEQ ID NO: 896173 - RNA, 19 nt, Artificial Sequence
  Description of Artificial Sequence: Synthetic oligonucleotide
ugaugccagaacuauuuua

SEQ ID NO: 896174 - RNA, 19 nt, Artificial Sequence
  Description of Artificial Sequence: Synthetic oligonucleotide
cugcaagcaaggauggaac

SEQ ID NO: 896175 - RNA, 19 nt, Artificial Sequence
  Description of Artificial Sequence: Synthetic oligonucleotide
cauucaccuguuuucauga

SEQ ID NO: 896176 - RNA, 19 nt, Artificial Sequence
  Description of Artificial Sequence: Synthetic oligonucleotide
ugcguaauggcaucagaua

SEQ ID NO: 896177 - RNA, 19 nt, Artificial Sequence
  Description of Artificial Sequence: Synthetic oligonucleotide
ucuuauugguuagcaaagu

SEQ ID NO: 896178 - RNA, 19 nt, Artificial Sequence
  Description of Artificial Sequence: Synthetic oligonucleotide
guagacugccagcaggaug

SEQ ID NO: 896179 - RNA, 19 nt, Artificial Sequence
  Description of Artificial Sequence: Synthetic oligonucleotide
uggucggugaccccagaug

SEQ ID NO: 896180 - RNA, 19 nt, Artificial Sequence
  Description of Artificial Sequence: Synthetic oligonucleotide
agccguguucaugacagac

SEQ ID NO: 896181 - RNA, 19 nt, Artificial Sequence
  Description of Artificial Sequence: Synthetic oligonucleotide
ccagaaacuuaagagagcc

SEQ ID NO: 896182 - RNA, 19 nt, Artificial Sequence
  Description of Artificial Sequence: Synthetic oligonucleotide
uuugcaugauaaaccugaa

SEQ ID NO: 896183 - RNA, 19 nt, Artificial Sequence
  Description of Artificial Sequence: Synthetic oligonucleotide
cuagcuacugcuguguuca

SEQ ID NO: 896184 - RNA, 19 nt, Artificial Sequence
  Description of Artificial Sequence: Synthetic oligonucleotide
caugcacugagcugggcac

SEQ ID NO: 896185 - RNA, 19 nt, Artificial Sequence
  Description of Artificial Sequence: Synthetic oligonucleotide
ugguuaaguguuugucuca

SEQ ID NO: 896186 - RNA, 19 nt, Artificial Sequence
  Description of Artificial Sequence: Synthetic oligonucleotide
ugauaaaccugaacagcuu

SEQ ID NO: 896187 - RNA, 19 nt, Artificial Sequence
  Description of Artificial Sequence: Synthetic oligonucleotide
acagacuugauuucccguu

SEQ ID NO: 896188 - RNA, 19 nt, Artificial Sequence
  Description of Artificial Sequence: Synthetic oligonucleotide
caggcaucauaauuuccag

SEQ ID NO: 896189 - RNA, 19 nt, Artificial Sequence
  Description of Artificial Sequence: Synthetic oligonucleotide
caucagugacauucucugg

SEQ ID NO: 896190 - RNA, 19 nt, Artificial Sequence
  Description of Artificial Sequence: Synthetic oligonucleotide
ggauugggugcacagacug

SEQ ID NO: 896191 - RNA, 19 nt, Artificial Sequence
  Description of Artificial Sequence: Synthetic oligonucleotide
auaccucuuauugguuagc

SEQ ID NO: 896192 - RNA, 19 nt, Artificial Sequence
  Description of Artificial Sequence: Synthetic oligonucleotide
cuggauguacucuaaucca

SEQ ID NO: 896193 - RNA, 19 nt, Artificial Sequence
  Description of Artificial Sequence: Synthetic oligonucleotide
gauuugcaugauaaaccug

SEQ ID NO: 896194 - RNA, 19 nt, Artificial Sequence
  Description of Artificial Sequence: Synthetic oligonucleotide
uuuucgauaauugccccuu

SEQ ID NO: 896195 - RNA, 19 nt, Artificial Sequence
  Description of Artificial Sequence: Synthetic oligonucleotide
auuaucuguuguuguuugu

SEQ ID NO: 896196 - RNA, 19 nt, Artificial Sequence
  Description of Artificial Sequence: Synthetic oligonucleotide
uccuugguccugcucauuc

SEQ ID NO: 896197 - RNA, 19 nt, Artificial Sequence
  Description of Artificial Sequence: Synthetic oligonucleotide
gccuucuuaaaguagaaaa

SEQ ID NO: 896198 - RNA, 19 nt, Artificial Sequence
  Description of Artificial Sequence: Synthetic oligonucleotide
agccgccuggugcagacac

SEQ ID NO: 896199 - RNA, 19 nt, Artificial Sequence
  Description of Artificial Sequence: Synthetic oligonucleotide
uucuaacaagcugagugaa

SEQ ID NO: 896200 - RNA, 19 nt, Artificial Sequence
  Description of Artificial Sequence: Synthetic oligonucleotide
gacacuuccgggcuuuguc

SEQ ID NO: 896201 - RNA, 19 nt, Artificial Sequence
  Description of Artificial Sequence: Synthetic oligonucleotide
auuuuacggugauaccccu

SEQ ID NO: 896202 - RNA, 19 nt, Artificial Sequence
  Description of Artificial Sequence: Synthetic oligonucleotide
auguacucuaauccaucca

SEQ ID NO: 896203 - RNA, 19 nt, Artificial Sequence
  Description of Artificial Sequence: Synthetic oligonucleotide
caguucaagguagacugcc

SEQ ID NO: 896204 - RNA, 19 nt, Artificial Sequence
  Description of Artificial Sequence: Synthetic oligonucleotide
guacgcgcugcccagguug

SEQ ID NO: 896205 - RNA, 19 nt, Artificial Sequence
  Description of Artificial Sequence: Synthetic oligonucleotide
ucggcaauguuugaacuau

SEQ ID NO: 896206 - RNA, 19 nt, Artificial Sequence
  Description of Artificial Sequence: Synthetic oligonucleotide
agccagacagcuugggcug

SEQ ID NO: 896207 - RNA, 19 nt, Artificial Sequence
  Description of Artificial Sequence: Synthetic oligonucleotide
aauugccccuuaaguacuc

SEQ ID NO: 896208 - RNA, 19 nt, Artificial Sequence
  Description of Artificial Sequence: Synthetic oligonucleotide
guccgggcagaguugacag

SEQ ID NO: 896209 - RNA, 19 nt, Artificial Sequence
  Description of Artificial Sequence: Synthetic oligonucleotide
uggaugcucggcaauguuu

SEQ ID NO: 896210 - RNA, 19 nt, Artificial Sequence
  Description of Artificial Sequence: Synthetic oligonucleotide
ggaucauugaagccgccug

SEQ ID NO: 896211 - RNA, 19 nt, Artificial Sequence
  Description of Artificial Sequence: Synthetic oligonucleotide
cuuuauuggcagcaaugca

SEQ ID NO: 896212 - RNA, 19 nt, Artificial Sequence
  Description of Artificial Sequence: Synthetic oligonucleotide
uaccccugaccgacaauag

SEQ ID NO: 896213 - RNA, 19 nt, Artificial Sequence
  Description of Artificial Sequence: Synthetic oligonucleotide
agugcguaauggcaucaga

SEQ ID NO: 896214 - RNA, 19 nt, Artificial Sequence
  Description of Artificial Sequence: Synthetic oligonucleotide
ugcuguguucaaaauuauu

SEQ ID NO: 896215 - RNA, 19 nt, Artificial Sequence
  Description of Artificial Sequence: Synthetic oligonucleotide
uaaaccugaacagcuucaa

SEQ ID NO: 896216 - RNA, 19 nt, Artificial Sequence
  Description of Artificial Sequence: Synthetic oligonucleotide
aggcaucauaauuuccaga

SEQ ID NO: 896217 - RNA, 19 nt, Artificial Sequence
  Description of Artificial Sequence: Synthetic oligonucleotide
cuuauugguuagcaaagua

SEQ ID NO: 896218 - RNA, 19 nt, Artificial Sequence
  Description of Artificial Sequence: Synthetic oligonucleotide
uauuggcagcaaugcagca

SEQ ID NO: 896219 - RNA, 19 nt, Artificial Sequence
  Description of Artificial Sequence: Synthetic oligonucleotide
aagugcguaauggcaucag

SEQ ID NO: 896220 - RNA, 19 nt, Artificial Sequence
  Description of Artificial Sequence: Synthetic oligonucleotide
cauucgaagagaucccuaa

SEQ ID NO: 896221 - RNA, 19 nt, Artificial Sequence
  Description of Artificial Sequence: Synthetic oligonucleotide
ccgcuuuucgauaauugcc

SEQ ID NO: 896222 - RNA, 19 nt, Artificial Sequence
  Description of Artificial Sequence: Synthetic oligonucleotide
ggggauuugcaugauaaac

SEQ ID NO: 896223 - RNA, 19 nt, Artificial Sequence
  Description of Artificial Sequence: Synthetic oligonucleotide
uccgggcuuugucauauuc

SEQ ID NO: 896224 - RNA, 19 nt, Artificial Sequence
  Description of Artificial Sequence: Synthetic oligonucleotide
gaaacuuaagagagccaga

SEQ ID NO: 896225 - RNA, 19 nt, Artificial Sequence
  Description of Artificial Sequence: Synthetic oligonucleotide
uugcaagccuucagggacu

SEQ ID NO: 896226 - RNA, 19 nt, Artificial Sequence
  Description of Artificial Sequence: Synthetic oligonucleotide
gagccagacagcuugggcu

SEQ ID NO: 896227 - RNA, 19 nt, Artificial Sequence
  Description of Artificial Sequence: Synthetic oligonucleotide
ugauaccccugaccgacaa

SEQ ID NO: 896228 - RNA, 19 nt, Artificial Sequence
  Description of Artificial Sequence: Synthetic oligonucleotide
uggguucaagugcguaaug

SEQ ID NO: 896229 - RNA, 19 nt, Artificial Sequence
  Description of Artificial Sequence: Synthetic oligonucleotide
aguugacagaacuggggua

SEQ ID NO: 896230 - RNA, 19 nt, Artificial Sequence
  Description of Artificial Sequence: Synthetic oligonucleotide
uccagccguguucaugaca

SEQ ID NO: 896231 - RNA, 19 nt, Artificial Sequence
  Description of Artificial Sequence: Synthetic oligonucleotide
cagaacuauuuuacgguga

SEQ ID NO: 896232 - RNA, 19 nt, Artificial Sequence
  Description of Artificial Sequence: Synthetic oligonucleotide
cuggaucccacaguuguac

SEQ ID NO: 896233 - RNA, 19 nt, Artificial Sequence
  Description of Artificial Sequence: Synthetic oligonucleotide
agacugcccaucauuguag

SEQ ID NO: 896234 - RNA, 19 nt, Artificial Sequence
  Description of Artificial Sequence: Synthetic oligonucleotide
uucauaccucuuauugguu

SEQ ID NO: 896235 - RNA, 19 nt, Artificial Sequence
  Description of Artificial Sequence: Synthetic oligonucleotide
uguuuauaucuuggagacu

SEQ ID NO: 896236 - RNA, 19 nt, Artificial Sequence
  Description of Artificial Sequence: Synthetic oligonucleotide
ggauuugcaugauaaaccu

SEQ ID NO: 896237 - RNA, 19 nt, Artificial Sequence
  Description of Artificial Sequence: Synthetic oligonucleotide
gauuucccguuugcaagcc

SEQ ID NO: 896238 - RNA, 19 nt, Artificial Sequence
  Description of Artificial Sequence: Synthetic oligonucleotide
ugcucagaagucccuuuau

SEQ ID NO: 896239 - RNA, 19 nt, Artificial Sequence
  Description of Artificial Sequence: Synthetic oligonucleotide
gcauucaccuguuuucaug

SEQ ID NO: 896240 - RNA, 19 nt, Artificial Sequence
  Description of Artificial Sequence: Synthetic oligonucleotide
aguguuugucucaaauuau

SEQ ID NO: 896241 - RNA, 19 nt, Artificial Sequence
  Description of Artificial Sequence: Synthetic oligonucleotide
cacguaagcacugcaagca

SEQ ID NO: 896242 - RNA, 19 nt, Artificial Sequence
  Description of Artificial Sequence: Synthetic oligonucleotide
cgcuuuucgauaauugccc

SEQ ID NO: 896243 - RNA, 19 nt, Artificial Sequence
  Description of Artificial Sequence: Synthetic oligonucleotide
caaauugugcuugcccaug

SEQ ID NO: 896244 - RNA, 19 nt, Artificial Sequence
  Description of Artificial Sequence: Synthetic oligonucleotide
uggaucauugaagccgccu

SEQ ID NO: 896245 - RNA, 19 nt, Artificial Sequence
  Description of Artificial Sequence: Synthetic oligonucleotide
cucaacggagaagacggug

SEQ ID NO: 896246 - RNA, 19 nt, Artificial Sequence
  Description of Artificial Sequence: Synthetic oligonucleotide
uguagacaguguucugaau

SEQ ID NO: 896247 - RNA, 19 nt, Artificial Sequence
  Description of Artificial Sequence: Synthetic oligonucleotide
ggugauaccccugaccgac

SEQ ID NO: 896248 - RNA, 19 nt, Artificial Sequence
  Description of Artificial Sequence: Synthetic oligonucleotide
guucucacuuccucugcac

SEQ ID NO: 896249 - RNA, 19 nt, Artificial Sequence
  Description of Artificial Sequence: Synthetic oligonucleotide
ucggugaccccagaugacu

SEQ ID NO: 896250 - RNA, 19 nt, Artificial Sequence
  Description of Artificial Sequence: Synthetic oligonucleotide
cuuuaggauggaucauuga

SEQ ID NO: 896251 - RNA, 19 nt, Artificial Sequence
  Description of Artificial Sequence: Synthetic oligonucleotide
ucaugaagccuggaugcuc

SEQ ID NO: 896252 - RNA, 19 nt, Artificial Sequence
  Description of Artificial Sequence: Synthetic oligonucleotide
ccugaccgacaauagauug

SEQ ID NO: 896253 - RNA, 19 nt, Artificial Sequence
  Description of Artificial Sequence: Synthetic oligonucleotide
agaaacagggagggugcag

SEQ ID NO: 896254 - RNA, 19 nt, Artificial Sequence
  Description of Artificial Sequence: Synthetic oligonucleotide
ggaugcucggcaauguuug

SEQ ID NO: 896255 - RNA, 19 nt, Artificial Sequence
  Description of Artificial Sequence: Synthetic oligonucleotide
uucugucaagggagaugag

SEQ ID NO: 896256 - RNA, 19 nt, Artificial Sequence
  Description of Artificial Sequence: Synthetic oligonucleotide
uuugagaaacagggagggu

SEQ ID NO: 896257 - RNA, 19 nt, Artificial Sequence
  Description of Artificial Sequence: Synthetic oligonucleotide
gcuuuucgauaauugcccc

SEQ ID NO: 896258 - RNA, 19 nt, Artificial Sequence
  Description of Artificial Sequence: Synthetic oligonucleotide
uucaugaagccuggaugcu

SEQ ID NO: 896259 - RNA, 19 nt, Artificial Sequence
  Description of Artificial Sequence: Synthetic oligonucleotide
cagcauacaaauggcccag

SEQ ID NO: 896260 - RNA, 19 nt, Artificial Sequence
  Description of Artificial Sequence: Synthetic oligonucleotide
auaccccugaccgacaaua

SEQ ID NO: 896261 - RNA, 19 nt, Artificial Sequence
  Description of Artificial Sequence: Synthetic oligonucleotide
cagacaggcaucauaauuu

SEQ ID NO: 896262 - RNA, 19 nt, Artificial Sequence
  Description of Artificial Sequence: Synthetic oligonucleotide
auguuucucugcucccuga

SEQ ID NO: 896263 - RNA, 19 nt, Artificial Sequence
  Description of Artificial Sequence: Synthetic oligonucleotide
augaagccuggaugcucgg

SEQ ID NO: 896264 - RNA, 19 nt, Artificial Sequence
  Description of Artificial Sequence: Synthetic oligonucleotide
gcagcauacaaauggccca

SEQ ID NO: 896265 - RNA, 19 nt, Artificial Sequence
  Description of Artificial Sequence: Synthetic oligonucleotide
cccuaaggagacaucagug

SEQ ID NO: 896266 - RNA, 19 nt, Artificial Sequence
  Description of Artificial Sequence: Synthetic oligonucleotide
ccucuuauugguuagcaaa

SEQ ID NO: 896267 - RNA, 19 nt, Artificial Sequence
  Description of Artificial Sequence: Synthetic oligonucleotide
accucuuauugguuagcaa

SEQ ID NO: 896268 - RNA, 19 nt, Artificial Sequence
  Description of Artificial Sequence: Synthetic oligonucleotide
gauugcacaauccccuuuu

SEQ ID NO: 896269 - RNA, 19 nt, Artificial Sequence
  Description of Artificial Sequence: Synthetic oligonucleotide
aacaugcaccucaagcauu

SEQ ID NO: 896270 - RNA, 19 nt, Artificial Sequence
  Description of Artificial Sequence: Synthetic oligonucleotide
uuuucacccuugucugauc

SEQ ID NO: 896271 - RNA, 19 nt, Artificial Sequence
  Description of Artificial Sequence: Synthetic oligonucleotide
gcaaggauggaacacuuua

SEQ ID NO: 896272 - RNA, 19 nt, Artificial Sequence
  Description of Artificial Sequence: Synthetic oligonucleotide
aguacacaugggucuucca

SEQ ID NO: 896273 - RNA, 19 nt, Artificial Sequence
  Description of Artificial Sequence: Synthetic oligonucleotide
aggcaguacgcgcugccca

SEQ ID NO: 896274 - RNA, 19 nt, Artificial Sequence
  Description of Artificial Sequence: Synthetic oligonucleotide
uuacggugauaccccugac

SEQ ID NO: 896275 - RNA, 19 nt, Artificial Sequence
  Description of Artificial Sequence: Synthetic oligonucleotide
ugaaggagcuggucugcau

SEQ ID NO: 896276 - RNA, 19 nt, Artificial Sequence
  Description of Artificial Sequence: Synthetic oligonucleotide
caaccaagauuauuccaaa

SEQ ID NO: 896277 - RNA, 19 nt, Artificial Sequence
  Description of Artificial Sequence: Synthetic oligonucleotide
acguaagcacugcaagcaa

SEQ ID NO: 896278 - RNA, 19 nt, Artificial Sequence
  Description of Artificial Sequence: Synthetic oligonucleotide
cuugguccugcucauucga

SEQ ID NO: 896279 - RNA, 19 nt, Artificial Sequence
  Description of Artificial Sequence: Synthetic oligonucleotide
agauugcacaauccccuuu

SEQ ID NO: 896280 - RNA, 19 nt, Artificial Sequence
  Description of Artificial Sequence: Synthetic oligonucleotide
cuccgcauucccuccuagc

SEQ ID NO: 896281 - RNA, 19 nt, Artificial Sequence
  Description of Artificial Sequence: Synthetic oligonucleotide
ccacguaagcacugcaagc

SEQ ID NO: 896282 - RNA, 19 nt, Artificial Sequence
  Description of Artificial Sequence: Synthetic oligonucleotide
accccugaccgacaauaga

SEQ ID NO: 896283 - RNA, 19 nt, Artificial Sequence
  Description of Artificial Sequence: Synthetic oligonucleotide
uacgcgcugcccagguuga

SEQ ID NO: 896284 - RNA, 19 nt, Artificial Sequence
  Description of Artificial Sequence: Synthetic oligonucleotide
ccuaaggagacaucaguga

SEQ ID NO: 896285 - RNA, 19 nt, Artificial Sequence
  Description of Artificial Sequence: Synthetic oligonucleotide
agcauucaccuguuuucau

SEQ ID NO: 896286 - RNA, 19 nt, Artificial Sequence
  Description of Artificial Sequence: Synthetic oligonucleotide
agguagacugccagcagga

SEQ ID NO: 896287 - RNA, 19 nt, Artificial Sequence
  Description of Artificial Sequence: Synthetic oligonucleotide
gaagacugcccaucauugu

SEQ ID NO: 896288 - RNA, 19 nt, Artificial Sequence
  Description of Artificial Sequence: Synthetic oligonucleotide
aucccuaaggagacaucag

SEQ ID NO: 896289 - RNA, 19 nt, Artificial Sequence
  Description of Artificial Sequence: Synthetic oligonucleotide
aagcaaguucucacuuccu

SEQ ID NO: 896290 - RNA, 19 nt, Artificial Sequence
  Description of Artificial Sequence: Synthetic oligonucleotide
gaugcucggcaauguuuga

SEQ ID NO: 896291 - RNA, 19 nt, Artificial Sequence
  Description of Artificial Sequence: Synthetic oligonucleotide
caccuaaggccagagccac

SEQ ID NO: 896292 - RNA, 19 nt, Artificial Sequence
  Description of Artificial Sequence: Synthetic oligonucleotide
auauucugucaagggagau

SEQ ID NO: 896293 - RNA, 19 nt, Artificial Sequence
  Description of Artificial Sequence: Synthetic oligonucleotide
caccucaagcauucaccug

SEQ ID NO: 896294 - RNA, 19 nt, Artificial Sequence
  Description of Artificial Sequence: Synthetic oligonucleotide
ggcuggauugggugcacag

SEQ ID NO: 896295 - RNA, 19 nt, Artificial Sequence
  Description of Artificial Sequence: Synthetic oligonucleotide
cccaaauugugcuugccca

SEQ ID NO: 896296 - RNA, 19 nt, Artificial Sequence
  Description of Artificial Sequence: Synthetic oligonucleotide
ugcagacaggcaucauaau

SEQ ID NO: 896297 - RNA, 19 nt, Artificial Sequence
  Description of Artificial Sequence: Synthetic oligonucleotide
gcaauguuugaacuauuua

SEQ ID NO: 896298 - RNA, 19 nt, Artificial Sequence
  Description of Artificial Sequence: Synthetic oligonucleotide
cccagaaacuuaagagagc

SEQ ID NO: 896299 - RNA, 19 nt, Artificial Sequence
  Description of Artificial Sequence: Synthetic oligonucleotide
auggaucauugaagccgcc

SEQ ID NO: 896300 - RNA, 19 nt, Artificial Sequence
  Description of Artificial Sequence: Synthetic oligonucleotide
ggcagaguugacagaacug

SEQ ID NO: 896301 - RNA, 19 nt, Artificial Sequence
  Description of Artificial Sequence: Synthetic oligonucleotide
cacgguggugaaugaggac

SEQ ID NO: 896302 - RNA, 19 nt, Artificial Sequence
  Description of Artificial Sequence: Synthetic oligonucleotide
ccgacaauagauugcacaa

SEQ ID NO: 896303 - RNA, 19 nt, Artificial Sequence
  Description of Artificial Sequence: Synthetic oligonucleotide
cacccuugucugauccuug

SEQ ID NO: 896304 - RNA, 19 nt, Artificial Sequence
  Description of Artificial Sequence: Synthetic oligonucleotide
cguaagcacugcaagcaag

SEQ ID NO: 896305 - RNA, 19 nt, Artificial Sequence
  Description of Artificial Sequence: Synthetic oligonucleotide
gcaagcaaggauggaacac

SEQ ID NO: 896306 - RNA, 19 nt, Artificial Sequence
  Description of Artificial Sequence: Synthetic oligonucleotide
ggggcaccucuuuaggaug

SEQ ID NO: 896307 - RNA, 19 nt, Artificial Sequence
  Description of Artificial Sequence: Synthetic oligonucleotide
uggaacacuuuagguuuuc

SEQ ID NO: 896308 - RNA, 19 nt, Artificial Sequence
  Description of Artificial Sequence: Synthetic oligonucleotide
gcuacaggaauggcugaag

SEQ ID NO: 896309 - RNA, 19 nt, Artificial Sequence
  Description of Artificial Sequence: Synthetic oligonucleotide
ggcaguacgcgcugcccag

SEQ ID NO: 896310 - RNA, 19 nt, Artificial Sequence
  Description of Artificial Sequence: Synthetic oligonucleotide
caagcaaggauggaacacu

SEQ ID NO: 896311 - RNA, 19 nt, Artificial Sequence
  Description of Artificial Sequence: Synthetic oligonucleotide
ggaacacuuuagguuuucc

SEQ ID NO: 896312 - RNA, 19 nt, Artificial Sequence
  Description of Artificial Sequence: Synthetic oligonucleotide
cugcucauucgaagagauc

SEQ ID NO: 896313 - RNA, 19 nt, Artificial Sequence
  Description of Artificial Sequence: Synthetic oligonucleotide
uggaugcaaccaagauuau

SEQ ID NO: 896314 - RNA, 19 nt, Artificial Sequence
  Description of Artificial Sequence: Synthetic oligonucleotide
gcguaauggcaucagauau

SEQ ID NO: 896315 - RNA, 19 nt, Artificial Sequence
  Description of Artificial Sequence: Synthetic oligonucleotide
gguuaucaccuaaggccag

SEQ ID NO: 896316 - RNA, 19 nt, Artificial Sequence
  Description of Artificial Sequence: Synthetic oligonucleotide
auugccccuuaaguacuca

SEQ ID NO: 896317 - RNA, 19 nt, Artificial Sequence
  Description of Artificial Sequence: Synthetic oligonucleotide
ccuguuuccucaacggaga

SEQ ID NO: 896318 - RNA, 19 nt, Artificial Sequence
  Description of Artificial Sequence: Synthetic oligonucleotide
gguuaaguguuugucucaa

SEQ ID NO: 896319 - RNA, 19 nt, Artificial Sequence
  Description of Artificial Sequence: Synthetic oligonucleotide
gagccuucuuaaaguagaa

SEQ ID NO: 896320 - RNA, 19 nt, Artificial Sequence
  Description of Artificial Sequence: Synthetic oligonucleotide
augcucggcaauguuugaa

SEQ ID NO: 896321 - RNA, 19 nt, Artificial Sequence
  Description of Artificial Sequence: Synthetic oligonucleotide
gacuggaacaccggcuucu

SEQ ID NO: 896322 - RNA, 19 nt, Artificial Sequence
  Description of Artificial Sequence: Synthetic oligonucleotide
cagggcuagcuguguguug

SEQ ID NO: 896323 - RNA, 19 nt, Artificial Sequence
  Description of Artificial Sequence: Synthetic oligonucleotide
cacgguccgggcagaguug

SEQ ID NO: 896324 - RNA, 19 nt, Artificial Sequence
  Description of Artificial Sequence: Synthetic oligonucleotide
caggcaguacgcgcugccc

SEQ ID NO: 896325 - RNA, 19 nt, Artificial Sequence
  Description of Artificial Sequence: Synthetic oligonucleotide
gcaugacucaaagccauga

SEQ ID NO: 896326 - RNA, 19 nt, Artificial Sequence
  Description of Artificial Sequence: Synthetic oligonucleotide
agagaucccuaaggagaca

SEQ ID NO: 896327 - RNA, 19 nt, Artificial Sequence
  Description of Artificial Sequence: Synthetic oligonucleotide
cugaagacugcccaucauu

SEQ ID NO: 896328 - RNA, 19 nt, Artificial Sequence
  Description of Artificial Sequence: Synthetic oligonucleotide
ggcuuuuacugcugcaugu

SEQ ID NO: 896329 - RNA, 19 nt, Artificial Sequence
  Description of Artificial Sequence: Synthetic oligonucleotide
ccggggauuugcaugauaa

SEQ ID NO: 896330 - RNA, 19 nt, Artificial Sequence
  Description of Artificial Sequence: Synthetic oligonucleotide
caagugcguaauggcauca

SEQ ID NO: 896331 - RNA, 19 nt, Artificial Sequence
  Description of Artificial Sequence: Synthetic oligonucleotide
uuccagccguguucaugac

SEQ ID NO: 896332 - RNA, 19 nt, Artificial Sequence
  Description of Artificial Sequence: Synthetic oligonucleotide
gugcguaauggcaucagau

SEQ ID NO: 896333 - RNA, 19 nt, Artificial Sequence
  Description of Artificial Sequence: Synthetic oligonucleotide
ggagugcgccuucacugug

SEQ ID NO: 896334 - RNA, 19 nt, Artificial Sequence
  Description of Artificial Sequence: Synthetic oligonucleotide
uucacuccucaggcaguac

SEQ ID NO: 896335 - RNA, 19 nt, Artificial Sequence
  Description of Artificial Sequence: Synthetic oligonucleotide
cugguuccgcuugaucauc

SEQ ID NO: 896336 - RNA, 19 nt, Artificial Sequence
  Description of Artificial Sequence: Synthetic oligonucleotide
gcagacaggcaucauaauu

SEQ ID NO: 896337 - RNA, 19 nt, Artificial Sequence
  Description of Artificial Sequence: Synthetic oligonucleotide
gaccgacaauagauugcac

SEQ ID NO: 896338 - RNA, 19 nt, Artificial Sequence
  Description of Artificial Sequence: Synthetic oligonucleotide
acgguccgggcagaguuga

SEQ ID NO: 896339 - RNA, 19 nt, Artificial Sequence
  Description of Artificial Sequence: Synthetic oligonucleotide
ccucccgaugugcagcagc

SEQ ID NO: 896340 - RNA, 19 nt, Artificial Sequence
  Description of Artificial Sequence: Synthetic oligonucleotide
cacuggcuacaggaauggc

SEQ ID NO: 896341 - RNA, 19 nt, Artificial Sequence
  Description of Artificial Sequence: Synthetic oligonucleotide
gggcagaguugacagaacu

SEQ ID NO: 896342 - RNA, 19 nt, Artificial Sequence
  Description of Artificial Sequence: Synthetic oligonucleotide
agacacuuccgggcuuugu

SEQ ID NO: 896343 - RNA, 19 nt, Artificial Sequence
  Description of Artificial Sequence: Synthetic oligonucleotide
cccuuaaguacucaaaauu

SEQ ID NO: 896344 - RNA, 19 nt, Artificial Sequence
  Description of Artificial Sequence: Synthetic oligonucleotide
gcaguucaagguagacugc

SEQ ID NO: 896345 - RNA, 19 nt, Artificial Sequence
  Description of Artificial Sequence: Synthetic oligonucleotide
cccguuugcaagccuucag

SEQ ID NO: 896346 - RNA, 19 nt, Artificial Sequence
  Description of Artificial Sequence: Synthetic oligonucleotide
gucggugaccccagaugac

SEQ ID NO: 896347 - RNA, 19 nt, Artificial Sequence
  Description of Artificial Sequence: Synthetic oligonucleotide
gucggagugcgccuucacu

SEQ ID NO: 896348 - RNA, 19 nt, Artificial Sequence
  Description of Artificial Sequence: Synthetic oligonucleotide
cgauaauugccccuuaagu

SEQ ID NO: 896349 - RNA, 19 nt, Artificial Sequence
  Description of Artificial Sequence: Synthetic oligonucleotide
ugcuguucuuggagccauu

SEQ ID NO: 896350 - RNA, 19 nt, Artificial Sequence
  Description of Artificial Sequence: Synthetic oligonucleotide
cucccgaugugcagcagcu

SEQ ID NO: 896351 - RNA, 19 nt, Artificial Sequence
  Description of Artificial Sequence: Synthetic oligonucleotide
agcaaggauggaacacuuu

SEQ ID NO: 896352 - RNA, 19 nt, Artificial Sequence
  Description of Artificial Sequence: Synthetic oligonucleotide
cuugccagaggacuccauu

SEQ ID NO: 896353 - RNA, 19 nt, Artificial Sequence
  Description of Artificial Sequence: Synthetic oligonucleotide
uagcacugaggggcgcgcu

SEQ ID NO: 896354 - RNA, 19 nt, Artificial Sequence
  Description of Artificial Sequence: Synthetic oligonucleotide
caucacgguccgggcagag

SEQ ID NO: 896355 - RNA, 19 nt, Artificial Sequence
  Description of Artificial Sequence: Synthetic oligonucleotide
uccucacgucggagugcgc

SEQ ID NO: 896356 - RNA, 19 nt, Artificial Sequence
  Description of Artificial Sequence: Synthetic oligonucleotide
gcgccuucacuguggggag

SEQ ID NO: 896357 - RNA, 19 nt, Artificial Sequence
  Description of Artificial Sequence: Synthetic oligonucleotide
gcacgguggugaaugagga

SEQ ID NO: 896358 - RNA, 19 nt, Artificial Sequence
  Description of Artificial Sequence: Synthetic oligonucleotide
gggucuuccagaaaacuuu

SEQ ID NO: 896359 - RNA, 19 nt, Artificial Sequence
  Description of Artificial Sequence: Synthetic oligonucleotide
cagaauuuccagccguguu

SEQ ID NO: 896360 - RNA, 19 nt, Artificial Sequence
  Description of Artificial Sequence: Synthetic oligonucleotide
acacucgaaggcagccagu

SEQ ID NO: 896361 - RNA, 19 nt, Artificial Sequence
  Description of Artificial Sequence: Synthetic oligonucleotide
gcucggcaauguuugaacu

SEQ ID NO: 896362 - RNA, 19 nt, Artificial Sequence
  Description of Artificial Sequence: Synthetic oligonucleotide
caguuguacagcaguucau

SEQ ID NO: 896363 - RNA, 19 nt, Artificial Sequence
  Description of Artificial Sequence: Synthetic oligonucleotide
caagcugagugaaccugau

SEQ ID NO: 896364 - RNA, 19 nt, Artificial Sequence
  Description of Artificial Sequence: Synthetic oligonucleotide
caaaguacacaugggucuu

SEQ ID NO: 896365 - RNA, 19 nt, Artificial Sequence
  Description of Artificial Sequence: Synthetic oligonucleotide
gggcuagcuguguguugcc

SEQ ID NO: 896366 - RNA, 19 nt, Artificial Sequence
  Description of Artificial Sequence: Synthetic oligonucleotide
caaagccggggauuugcau

SEQ ID NO: 896367 - RNA, 19 nt, Artificial Sequence
  Description of Artificial Sequence: Synthetic oligonucleotide
cagacuugauuucccguuu

SEQ ID NO: 896368 - RNA, 19 nt, Artificial Sequence
  Description of Artificial Sequence: Synthetic oligonucleotide
cuggguucaagugcguaau

SEQ ID NO: 896369 - RNA, 19 nt, Artificial Sequence
  Description of Artificial Sequence: Synthetic oligonucleotide
ucccuccuagcuggcugcu

SEQ ID NO: 896370 - RNA, 19 nt, Artificial Sequence
  Description of Artificial Sequence: Synthetic oligonucleotide
cucacgucggagugcgccu

SEQ ID NO: 896371 - RNA, 19 nt, Artificial Sequence
  Description of Artificial Sequence: Synthetic oligonucleotide
guacucuaauccauccauu

SEQ ID NO: 896372 - RNA, 19 nt, Artificial Sequence
  Description of Artificial Sequence: Synthetic oligonucleotide
gcacugaggggcgcgcuug

SEQ ID NO: 896373 - RNA, 19 nt, Artificial Sequence
  Description of Artificial Sequence: Synthetic oligonucleotide
acgucggagugcgccuuca

SEQ ID NO: 896374 - RNA, 19 nt, Artificial Sequence
  Description of Artificial Sequence: Synthetic oligonucleotide
ccccugaccgacaauagau

SEQ ID NO: 896375 - RNA, 19 nt, Artificial Sequence
  Description of Artificial Sequence: Synthetic oligonucleotide
ccaaagccggggauuugca

SEQ ID NO: 896376 - RNA, 19 nt, Artificial Sequence
  Description of Artificial Sequence: Synthetic oligonucleotide
caugcaccucaagcauuca

SEQ ID NO: 896377 - RNA, 19 nt, Artificial Sequence
  Description of Artificial Sequence: Synthetic oligonucleotide
gcgcuugccagaggacucc

SEQ ID NO: 896378 - RNA, 19 nt, Artificial Sequence
  Description of Artificial Sequence: Synthetic oligonucleotide
uuccgggcuuugucauauu

SEQ ID NO: 896379 - RNA, 19 nt, Artificial Sequence
  Description of Artificial Sequence: Synthetic oligonucleotide
cugccccuucauguuucuc

SEQ ID NO: 896380 - RNA, 19 nt, Artificial Sequence
  Description of Artificial Sequence: Synthetic oligonucleotide
cuaaggccagagccacgua

SEQ ID NO: 896381 - RNA, 19 nt, Artificial Sequence
  Description of Artificial Sequence: Synthetic oligonucleotide
cagccguguucaugacaga

SEQ ID NO: 896382 - RNA, 19 nt, Artificial Sequence
  Description of Artificial Sequence: Synthetic oligonucleotide
ccguguucaugacagacuu

SEQ ID NO: 896383 - RNA, 19 nt, Artificial Sequence
  Description of Artificial Sequence: Synthetic oligonucleotide
ccaaauugugcuugcccau

SEQ ID NO: 896384 - RNA, 19 nt, Artificial Sequence
  Description of Artificial Sequence: Synthetic oligonucleotide
cgcgcuugccagaggacuc

SEQ ID NO: 896385 - RNA, 19 nt, Artificial Sequence
  Description of Artificial Sequence: Synthetic oligonucleotide
ccuaaggccagagccacgu

SEQ ID NO: 896386 - RNA, 19 nt, Artificial Sequence
  Description of Artificial Sequence: Synthetic oligonucleotide
gccagacagcuugggcugc

SEQ ID NO: 896387 - RNA, 19 nt, Artificial Sequence
  Description of Artificial Sequence: Synthetic oligonucleotide
cuggucggugaccccagau

SEQ ID NO: 896388 - RNA, 19 nt, Artificial Sequence
  Description of Artificial Sequence: Synthetic oligonucleotide
cuggaugcucggcaauguu

SEQ ID NO: 896389 - RNA, 19 nt, Artificial Sequence
  Description of Artificial Sequence: Synthetic oligonucleotide
caguacgcgcugcccaggu

SEQ ID NO: 896390 - RNA, 19 nt, Artificial Sequence
  Description of Artificial Sequence: Synthetic oligonucleotide
gcauucccuccuagcuggc

SEQ ID NO: 896391 - RNA, 19 nt, Artificial Sequence
  Description of Artificial Sequence: Synthetic oligonucleotide
ggcaccucuuuaggaugga

SEQ ID NO: 896392 - RNA, 19 nt, Artificial Sequence
  Description of Artificial Sequence: Synthetic oligonucleotide
ggcgcgcuugccagaggac

SEQ ID NO: 896393 - RNA, 19 nt, Artificial Sequence
  Description of Artificial Sequence: Synthetic oligonucleotide
gacuggccugccccuucau

SEQ ID NO: 896394 - RNA, 19 nt, Artificial Sequence
  Description of Artificial Sequence: Synthetic oligonucleotide
agccggggauuugcaugau

SEQ ID NO: 896395 - RNA, 19 nt, Artificial Sequence
  Description of Artificial Sequence: Synthetic oligonucleotide
gccggggauuugcaugaua

SEQ ID NO: 896396 - RNA, 19 nt, Artificial Sequence
  Description of Artificial Sequence: Synthetic oligonucleotide
gcgcgcuugccagaggacu

SEQ ID NO: 896397 - RNA, 19 nt, Artificial Sequence
  Description of Artificial Sequence: Synthetic oligonucleotide
cggggauuugcaugauaaa

SEQ ID NO: 896398 - RNA, 19 nt, Artificial Sequence
  Description of Artificial Sequence: Synthetic oligonucleotide
cuccuagcuggcugcuguu

SEQ ID NO: 896399 - RNA, 19 nt, Artificial Sequence
  Description of Artificial Sequence: Synthetic oligonucleotide
cgucggagugcgccuucac

SEQ ID NO: 896400 - RNA, 19 nt, Artificial Sequence
  Description of Artificial Sequence: Synthetic oligonucleotide
gcaucacgguccgggcaga

SEQ ID NO: 896401 - RNA, 19 nt, Artificial Sequence
  Description of Artificial Sequence: Synthetic oligonucleotide
cggugauaccccugaccga

SEQ ID NO: 896402 - RNA, 19 nt, Artificial Sequence
  Description of Artificial Sequence: Synthetic oligonucleotide
gcacugguggacagcuccu

SEQ ID NO: 896403 - RNA, 19 nt, Artificial Sequence
  Description of Artificial Sequence: Synthetic oligonucleotide
ccuggaugcucggcaaugu

SEQ ID NO: 896404 - RNA, 19 nt, Artificial Sequence
  Description of Artificial Sequence: Synthetic oligonucleotide
ccucaacggagaagacggu

SEQ ID NO: 896405 - RNA, 19 nt, Artificial Sequence
  Description of Artificial Sequence: Synthetic oligonucleotide
ccucaagcauucaccuguu

SEQ ID NO: 896406 - RNA, 19 nt, Artificial Sequence
  Description of Artificial Sequence: Synthetic oligonucleotide
cggagugcgccuucacugu

SEQ ID NO: 896407 - RNA, 19 nt, Artificial Sequence
  Description of Artificial Sequence: Synthetic oligonucleotide
cgacaauagauugcacaau

SEQ ID NO: 896408 - RNA, 19 nt, Artificial Sequence
  Description of Artificial Sequence: Synthetic oligonucleotide
ccuggucggugaccccaga

SEQ ID NO: 896409 - RNA, 19 nt, Artificial Sequence
  Description of Artificial Sequence: Synthetic oligonucleotide
ccucuuuaggauggaucau

SEQ ID NO: 896410 - RNA, 19 nt, Artificial Sequence
  Description of Artificial Sequence: Synthetic oligonucleotide
cgguccgggcagaguugac

SEQ ID NO: 896411 - RNA, 19 nt, Artificial Sequence
  Description of Artificial Sequence: Synthetic oligonucleotide
cgcuugccagaggacucca

SEQ ID NO: 896412 - RNA, 19 nt, Artificial Sequence
  Description of Artificial Sequence: Synthetic oligonucleotide
gcccaucauuguagacagu

SEQ ID NO: 896413 - RNA, 19 nt, Artificial Sequence
  Description of Artificial Sequence: Synthetic oligonucleotide
cggcaauguuugaacuauu

SEQ ID NO: 896414 - RNA, 19 nt, Artificial Sequence
  Description of Artificial Sequence: Synthetic oligonucleotide
ccucugcacgguggugaau

SEQ ID NO: 896415 - RNA, 19 nt, Artificial Sequence
  Description of Artificial Sequence: Synthetic oligonucleotide
uccaaaaugaagcauaacg

SEQ ID NO: 896416 - RNA, 19 nt, Artificial Sequence
  Description of Artificial Sequence: Synthetic oligonucleotide
ugaggcaucaaauucaacg

SEQ ID NO: 896417 - RNA, 19 nt, Artificial Sequence
  Description of Artificial Sequence: Synthetic oligonucleotide
aauacaugugcacugaugu

SEQ ID NO: 896418 - RNA, 19 nt, Artificial Sequence
  Description of Artificial Sequence: Synthetic oligonucleotide
agauucuggaguuauauuc

SEQ ID NO: 896419 - RNA, 19 nt, Artificial Sequence
  Description of Artificial Sequence: Synthetic oligonucleotide
aauuaaaccugaccgguuc

SEQ ID NO: 896420 - RNA, 19 nt, Artificial Sequence
  Description of Artificial Sequence: Synthetic oligonucleotide
aaaacagaacgucauccac

SEQ ID NO: 896421 - RNA, 19 nt, Artificial Sequence
  Description of Artificial Sequence: Synthetic oligonucleotide
aacggggucauccuggucg

SEQ ID NO: 896422 - RNA, 19 nt, Artificial Sequence
  Description of Artificial Sequence: Synthetic oligonucleotide
aaucuuauuaucucuauua

SEQ ID NO: 896423 - RNA, 19 nt, Artificial Sequence
  Description of Artificial Sequence: Synthetic oligonucleotide
aacagaacgucauccacac

SEQ ID NO: 896424 - RNA, 19 nt, Artificial Sequence
  Description of Artificial Sequence: Synthetic oligonucleotide
aguauuacauuuccccucc

SEQ ID NO: 896425 - RNA, 19 nt, Artificial Sequence
  Description of Artificial Sequence: Synthetic oligonucleotide
cauaauuaaaccugaccgg

SEQ ID NO: 896426 - RNA, 19 nt, Artificial Sequence
  Description of Artificial Sequence: Synthetic oligonucleotide
uccaguacuaugaagcgag

SEQ ID NO: 896427 - RNA, 19 nt, Artificial Sequence
  Description of Artificial Sequence: Synthetic oligonucleotide
uuuacaguugggcuggaag

SEQ ID NO: 896428 - RNA, 19 nt, Artificial Sequence
  Description of Artificial Sequence: Synthetic oligonucleotide
aacggcaauuaacucauuc

SEQ ID NO: 896429 - RNA, 19 nt, Artificial Sequence
  Description of Artificial Sequence: Synthetic oligonucleotide
uuguaguuacauuugcagg

SEQ ID NO: 896430 - RNA, 19 nt, Artificial Sequence
  Description of Artificial Sequence: Synthetic oligonucleotide
gauguuuacaguugggcug

SEQ ID NO: 896431 - RNA, 19 nt, Artificial Sequence
  Description of Artificial Sequence: Synthetic oligonucleotide
ucauugaacagacuguaga

SEQ ID NO: 896432 - RNA, 19 nt, Artificial Sequence
  Description of Artificial Sequence: Synthetic oligonucleotide
uccugcauaauuaaaccug

SEQ ID NO: 896433 - RNA, 19 nt, Artificial Sequence
  Description of Artificial Sequence: Synthetic oligonucleotide
aaucgcaucuucacggucc

SEQ ID NO: 896434 - RNA, 19 nt, Artificial Sequence
  Description of Artificial Sequence: Synthetic oligonucleotide
uaugaagcgagguauuccc

SEQ ID NO: 896435 - RNA, 19 nt, Artificial Sequence
  Description of Artificial Sequence: Synthetic oligonucleotide
ucuuucgcgguucuggcgg

SEQ ID NO: 896436 - RNA, 19 nt, Artificial Sequence
  Description of Artificial Sequence: Synthetic oligonucleotide
uuuuccaacggcaauuaac

SEQ ID NO: 896437 - RNA, 19 nt, Artificial Sequence
  Description of Artificial Sequence: Synthetic oligonucleotide
aaagccaacaagccgguga

SEQ ID NO: 896438 - RNA, 19 nt, Artificial Sequence
  Description of Artificial Sequence: Synthetic oligonucleotide
gacacgaaagccaacaagc

SEQ ID NO: 896439 - RNA, 19 nt, Artificial Sequence
  Description of Artificial Sequence: Synthetic oligonucleotide
ugaacgaugcauuucuggc

SEQ ID NO: 896440 - RNA, 19 nt, Artificial Sequence
  Description of Artificial Sequence: Synthetic oligonucleotide
aggaaugcagcccacggcg

SEQ ID NO: 896441 - RNA, 19 nt, Artificial Sequence
  Description of Artificial Sequence: Synthetic oligonucleotide
aacucauucuuccucguca

SEQ ID NO: 896442 - RNA, 19 nt, Artificial Sequence
  Description of Artificial Sequence: Synthetic oligonucleotide
agacauucagucccuaaac

SEQ ID NO: 896443 - RNA, 19 nt, Artificial Sequence
  Description of Artificial Sequence: Synthetic oligonucleotide
aacgucauccacacgacac

SEQ ID NO: 896444 - RNA, 19 nt, Artificial Sequence
  Description of Artificial Sequence: Synthetic oligonucleotide
acacgcuccaaaaugaagc

SEQ ID NO: 896445 - RNA, 19 nt, Artificial Sequence
  Description of Artificial Sequence: Synthetic oligonucleotide
aacgaugcauuucuggcca

SEQ ID NO: 896446 - RNA, 19 nt, Artificial Sequence
  Description of Artificial Sequence: Synthetic oligonucleotide
cuuauguccauccacacca

SEQ ID NO: 896447 - RNA, 19 nt, Artificial Sequence
  Description of Artificial Sequence: Synthetic oligonucleotide
uuuacaaauuauuccagua

SEQ ID NO: 896448 - RNA, 19 nt, Artificial Sequence
  Description of Artificial Sequence: Synthetic oligonucleotide
cauugaacagacuguagag

SEQ ID NO: 896449 - RNA, 19 nt, Artificial Sequence
  Description of Artificial Sequence: Synthetic oligonucleotide
uccaacggcaauuaacuca

SEQ ID NO: 896450 - RNA, 19 nt, Artificial Sequence
  Description of Artificial Sequence: Synthetic oligonucleotide
uucaacggggucauccugg

SEQ ID NO: 896451 - RNA, 19 nt, Artificial Sequence
  Description of Artificial Sequence: Synthetic oligonucleotide
ucagucccuaaacuugugg

SEQ ID NO: 896452 - RNA, 19 nt, Artificial Sequence
  Description of Artificial Sequence: Synthetic oligonucleotide
guugcaagcgcuucucugg

SEQ ID NO: 896453 - RNA, 19 nt, Artificial Sequence
  Description of Artificial Sequence: Synthetic oligonucleotide
cauucagucccuaaacuug

SEQ ID NO: 896454 - RNA, 19 nt, Artificial Sequence
  Description of Artificial Sequence: Synthetic oligonucleotide
agagccguggagcuggcgc

SEQ ID NO: 896455 - RNA, 19 nt, Artificial Sequence
  Description of Artificial Sequence: Synthetic oligonucleotide
cauuguggcgcgcagaaag

SEQ ID NO: 896456 - RNA, 19 nt, Artificial Sequence
  Description of Artificial Sequence: Synthetic oligonucleotide
acaccgguuguccacaagg

SEQ ID NO: 896457 - RNA, 19 nt, Artificial Sequence
  Description of Artificial Sequence: Synthetic oligonucleotide
auaauuaaaccugaccggu

SEQ ID NO: 896458 - RNA, 19 nt, Artificial Sequence
  Description of Artificial Sequence: Synthetic oligonucleotide
caguuuagagugcagguag

SEQ ID NO: 896459 - RNA, 19 nt, Artificial Sequence
  Description of Artificial Sequence: Synthetic oligonucleotide
cugaacgaugcauuucugg

SEQ ID NO: 896460 - RNA, 19 nt, Artificial Sequence
  Description of Artificial Sequence: Synthetic oligonucleotide
aauggaggcccuuucacuu

SEQ ID NO: 896461 - RNA, 19 nt, Artificial Sequence
  Description of Artificial Sequence: Synthetic oligonucleotide
aaaucuuauuaucucuauu

SEQ ID NO: 896462 - RNA, 19 nt, Artificial Sequence
  Description of Artificial Sequence: Synthetic oligonucleotide
gaacgaugcauuucuggcc

SEQ ID NO: 896463 - RNA, 19 nt, Artificial Sequence
  Description of Artificial Sequence: Synthetic oligonucleotide
aaggaauggaggcccuuuc

SEQ ID NO: 896464 - RNA, 19 nt, Artificial Sequence
  Description of Artificial Sequence: Synthetic oligonucleotide
agcggaaucgcaucuucac

SEQ ID NO: 896465 - RNA, 19 nt, Artificial Sequence
  Description of Artificial Sequence: Synthetic oligonucleotide
ucacuuacuccugucagag

SEQ ID NO: 896466 - RNA, 19 nt, Artificial Sequence
  Description of Artificial Sequence: Synthetic oligonucleotide
aaagcuacguuuugauaaa

SEQ ID NO: 896467 - RNA, 19 nt, Artificial Sequence
  Description of Artificial Sequence: Synthetic oligonucleotide
acacuaggaacccaggaga

SEQ ID NO: 896468 - RNA, 19 nt, Artificial Sequence
  Description of Artificial Sequence: Synthetic oligonucleotide
caaauuauuccaguauuac

SEQ ID NO: 896469 - RNA, 19 nt, Artificial Sequence
  Description of Artificial Sequence: Synthetic oligonucleotide
auaacgggugcuccaguac

SEQ ID NO: 896470 - RNA, 19 nt, Artificial Sequence
  Description of Artificial Sequence: Synthetic oligonucleotide
gguuguaaaggacucgcgg

SEQ ID NO: 896471 - RNA, 19 nt, Artificial Sequence
  Description of Artificial Sequence: Synthetic oligonucleotide
ugccuuauguccauccaca

SEQ ID NO: 896472 - RNA, 19 nt, Artificial Sequence
  Description of Artificial Sequence: Synthetic oligonucleotide
caucaauacaugugcacug

SEQ ID NO: 896473 - RNA, 19 nt, Artificial Sequence
  Description of Artificial Sequence: Synthetic oligonucleotide
aaacagaacgucauccaca

SEQ ID NO: 896474 - RNA, 19 nt, Artificial Sequence
  Description of Artificial Sequence: Synthetic oligonucleotide
agcgcggcgacacgaaagc

SEQ ID NO: 896475 - RNA, 19 nt, Artificial Sequence
  Description of Artificial Sequence: Synthetic oligonucleotide
cuuggcgcagaccuuacag

SEQ ID NO: 896476 - RNA, 19 nt, Artificial Sequence
  Description of Artificial Sequence: Synthetic oligonucleotide
aguacuaugaagcgaggua

SEQ ID NO: 896477 - RNA, 19 nt, Artificial Sequence
  Description of Artificial Sequence: Synthetic oligonucleotide
ugcguuuugcugcaguccu

SEQ ID NO: 896478 - RNA, 19 nt, Artificial Sequence
  Description of Artificial Sequence: Synthetic oligonucleotide
uugucauugguaacccgug

SEQ ID NO: 896479 - RNA, 19 nt, Artificial Sequence
  Description of Artificial Sequence: Synthetic oligonucleotide
agcaugacauucuuggaaa

SEQ ID NO: 896480 - RNA, 19 nt, Artificial Sequence
  Description of Artificial Sequence: Synthetic oligonucleotide
ugaagcgagguauucccca

SEQ ID NO: 896481 - RNA, 19 nt, Artificial Sequence
  Description of Artificial Sequence: Synthetic oligonucleotide
acagauccgggucucuuuc

SEQ ID NO: 896482 - RNA, 19 nt, Artificial Sequence
  Description of Artificial Sequence: Synthetic oligonucleotide
ucuggggauuucuuggucu

SEQ ID NO: 896483 - RNA, 19 nt, Artificial Sequence
  Description of Artificial Sequence: Synthetic oligonucleotide
uuugcaguuuagagugcag

SEQ ID NO: 896484 - RNA, 19 nt, Artificial Sequence
  Description of Artificial Sequence: Synthetic oligonucleotide
uugcaagcgcuucucuggg

SEQ ID NO: 896485 - RNA, 19 nt, Artificial Sequence
  Description of Artificial Sequence: Synthetic oligonucleotide
aguuauauucacagggucu

SEQ ID NO: 896486 - RNA, 19 nt, Artificial Sequence
  Description of Artificial Sequence: Synthetic oligonucleotide
aguauuugggccgauacuu

SEQ ID NO: 896487 - RNA, 19 nt, Artificial Sequence
  Description of Artificial Sequence: Synthetic oligonucleotide
gacugaaucagcaugacau

SEQ ID NO: 896488 - RNA, 19 nt, Artificial Sequence
  Description of Artificial Sequence: Synthetic oligonucleotide
caauacaugugcacugaug

SEQ ID NO: 896489 - RNA, 19 nt, Artificial Sequence
  Description of Artificial Sequence: Synthetic oligonucleotide
aucucuccgucuucgcagc

SEQ ID NO: 896490 - RNA, 19 nt, Artificial Sequence
  Description of Artificial Sequence: Synthetic oligonucleotide
cacgacacgcuccaaaaug

SEQ ID NO: 896491 - RNA, 19 nt, Artificial Sequence
  Description of Artificial Sequence: Synthetic oligonucleotide
cucuauuacaacuguagaa

SEQ ID NO: 896492 - RNA, 19 nt, Artificial Sequence
  Description of Artificial Sequence: Synthetic oligonucleotide
aagcgagguauuccccaac

SEQ ID NO: 896493 - RNA, 19 nt, Artificial Sequence
  Description of Artificial Sequence: Synthetic oligonucleotide
agauccgggucucuuucac

SEQ ID NO: 896494 - RNA, 19 nt, Artificial Sequence
  Description of Artificial Sequence: Synthetic oligonucleotide
uaacgggugcuccaguacu

SEQ ID NO: 896495 - RNA, 19 nt, Artificial Sequence
  Description of Artificial Sequence: Synthetic oligonucleotide
uggagcauccugcauaauu

SEQ ID NO: 896496 - RNA, 19 nt, Artificial Sequence
  Description of Artificial Sequence: Synthetic oligonucleotide
acgucauccacacgacacg

SEQ ID NO: 896497 - RNA, 19 nt, Artificial Sequence
  Description of Artificial Sequence: Synthetic oligonucleotide
uucuuucgcgguucuggcg

SEQ ID NO: 896498 - RNA, 19 nt, Artificial Sequence
  Description of Artificial Sequence: Synthetic oligonucleotide
auuaaaccugaccgguucu

SEQ ID NO: 896499 - RNA, 19 nt, Artificial Sequence
  Description of Artificial Sequence: Synthetic oligonucleotide
uacauuugcaggacugaau

SEQ ID NO: 896500 - RNA, 19 nt, Artificial Sequence
  Description of Artificial Sequence: Synthetic oligonucleotide
gaggcgaaaugaugccucg

SEQ ID NO: 896501 - RNA, 19 nt, Artificial Sequence
  Description of Artificial Sequence: Synthetic oligonucleotide
ucccuaaacuuguggaugu

SEQ ID NO: 896502 - RNA, 19 nt, Artificial Sequence
  Description of Artificial Sequence: Synthetic oligonucleotide
gaagcauaacgggugcucc

SEQ ID NO: 896503 - RNA, 19 nt, Artificial Sequence
  Description of Artificial Sequence: Synthetic oligonucleotide
uuguaaaggacucgcgguu

SEQ ID NO: 896504 - RNA, 19 nt, Artificial Sequence
  Description of Artificial Sequence: Synthetic oligonucleotide
ggucucuuucaccaggcgg

SEQ ID NO: 896505 - RNA, 19 nt, Artificial Sequence
  Description of Artificial Sequence: Synthetic oligonucleotide
agccgcaguauuugggccg

SEQ ID NO: 896506 - RNA, 19 nt, Artificial Sequence
  Description of Artificial Sequence: Synthetic oligonucleotide
cuguccaccccacacuagg

SEQ ID NO: 896507 - RNA, 19 nt, Artificial Sequence
  Description of Artificial Sequence: Synthetic oligonucleotide
gugaggacgggaccgaggc

SEQ ID NO: 896508 - RNA, 19 nt, Artificial Sequence
  Description of Artificial Sequence: Synthetic oligonucleotide
acgcacuucacagauccgg

SEQ ID NO: 896509 - RNA, 19 nt, Artificial Sequence
  Description of Artificial Sequence: Synthetic oligonucleotide
gaccuuacagcagccacag

SEQ ID NO: 896510 - RNA, 19 nt, Artificial Sequence
  Description of Artificial Sequence: Synthetic oligonucleotide
gagacauucagucccuaaa

SEQ ID NO: 896511 - RNA, 19 nt, Artificial Sequence
  Description of Artificial Sequence: Synthetic oligonucleotide
uuauguccauccacaccag

SEQ ID NO: 896512 - RNA, 19 nt, Artificial Sequence
  Description of Artificial Sequence: Synthetic oligonucleotide
aagcauaacgggugcucca

SEQ ID NO: 896513 - RNA, 19 nt, Artificial Sequence
  Description of Artificial Sequence: Synthetic oligonucleotide
uaucucuauuacaacugua

SEQ ID NO: 896514 - RNA, 19 nt, Artificial Sequence
  Description of Artificial Sequence: Synthetic oligonucleotide
gaucggaugcuccgggagc

SEQ ID NO: 896515 - RNA, 19 nt, Artificial Sequence
  Description of Artificial Sequence: Synthetic oligonucleotide
accacgacguugucugaac

SEQ ID NO: 896516 - RNA, 19 nt, Artificial Sequence
  Description of Artificial Sequence: Synthetic oligonucleotide
cuguagaggcgaaaugaug

SEQ ID NO: 896517 - RNA, 19 nt, Artificial Sequence
  Description of Artificial Sequence: Synthetic oligonucleotide
agaggcgaaaugaugccuc

SEQ ID NO: 896518 - RNA, 19 nt, Artificial Sequence
  Description of Artificial Sequence: Synthetic oligonucleotide
uaauuaaaccugaccgguu

SEQ ID NO: 896519 - RNA, 19 nt, Artificial Sequence
  Description of Artificial Sequence: Synthetic oligonucleotide
uuaaaccugaccgguucug

SEQ ID NO: 896520 - RNA, 19 nt, Artificial Sequence
  Description of Artificial Sequence: Synthetic oligonucleotide
guaaaggacucgcgguucc

SEQ ID NO: 896521 - RNA, 19 nt, Artificial Sequence
  Description of Artificial Sequence: Synthetic oligonucleotide
gacacgcuccaaaaugaag

SEQ ID NO: 896522 - RNA, 19 nt, Artificial Sequence
  Description of Artificial Sequence: Synthetic oligonucleotide
gcuacguuuugauaaauaa

SEQ ID NO: 896523 - RNA, 19 nt, Artificial Sequence
  Description of Artificial Sequence: Synthetic oligonucleotide
accaacccgacucccgggg

SEQ ID NO: 896524 - RNA, 19 nt, Artificial Sequence
  Description of Artificial Sequence: Synthetic oligonucleotide
ccgaaauugcauuccagcc

SEQ ID NO: 896525 - RNA, 19 nt, Artificial Sequence
  Description of Artificial Sequence: Synthetic oligonucleotide
caugacauucuuggaaaac

SEQ ID NO: 896526 - RNA, 19 nt, Artificial Sequence
  Description of Artificial Sequence: Synthetic oligonucleotide
agucccuaaacuuguggau

SEQ ID NO: 896527 - RNA, 19 nt, Artificial Sequence
  Description of Artificial Sequence: Synthetic oligonucleotide
cugaaucagcaugacauuc

SEQ ID NO: 896528 - RNA, 19 nt, Artificial Sequence
  Description of Artificial Sequence: Synthetic oligonucleotide
ccgguuguccacaaggacg

SEQ ID NO: 896529 - RNA, 19 nt, Artificial Sequence
  Description of Artificial Sequence: Synthetic oligonucleotide
gggaccacgacguugucug

SEQ ID NO: 896530 - RNA, 19 nt, Artificial Sequence
  Description of Artificial Sequence: Synthetic oligonucleotide
gccgaaauugcauuccagc

SEQ ID NO: 896531 - RNA, 19 nt, Artificial Sequence
  Description of Artificial Sequence: Synthetic oligonucleotide
cacuaggaacccaggagac

SEQ ID NO: 896532 - RNA, 19 nt, Artificial Sequence
  Description of Artificial Sequence: Synthetic oligonucleotide
gacggcgacagcgagcgcc

SEQ ID NO: 896533 - RNA, 19 nt, Artificial Sequence
  Description of Artificial Sequence: Synthetic oligonucleotide
ugacuuucaccagccgggg

SEQ ID NO: 896534 - RNA, 19 nt, Artificial Sequence
  Description of Artificial Sequence: Synthetic oligonucleotide
guuguaaaggacucgcggu

SEQ ID NO: 896535 - RNA, 19 nt, Artificial Sequence
  Description of Artificial Sequence: Synthetic oligonucleotide
ugaagcauaacgggugcuc

SEQ ID NO: 896536 - RNA, 19 nt, Artificial Sequence
  Description of Artificial Sequence: Synthetic oligonucleotide
uauuugggccgauacuuuu

SEQ ID NO: 896537 - RNA, 19 nt, Artificial Sequence
  Description of Artificial Sequence: Synthetic oligonucleotide
augaagcgagguauucccc

SEQ ID NO: 896538 - RNA, 19 nt, Artificial Sequence
  Description of Artificial Sequence: Synthetic oligonucleotide
cgaaaugaugccucguugg

SEQ ID NO: 896539 - RNA, 19 nt, Artificial Sequence
  Description of Artificial Sequence: Synthetic oligonucleotide
uguaaaggacucgcgguuc

SEQ ID NO: 896540 - RNA, 19 nt, Artificial Sequence
  Description of Artificial Sequence: Synthetic oligonucleotide
aucaauacaugugcacuga

SEQ ID NO: 896541 - RNA, 19 nt, Artificial Sequence
  Description of Artificial Sequence: Synthetic oligonucleotide
uguacaccgguuguccaca

SEQ ID NO: 896542 - RNA, 19 nt, Artificial Sequence
  Description of Artificial Sequence: Synthetic oligonucleotide
gcuccaguacuaugaagcg

SEQ ID NO: 896543 - RNA, 19 nt, Artificial Sequence
  Description of Artificial Sequence: Synthetic oligonucleotide
agcgagguauuccccaacu

SEQ ID NO: 896544 - RNA, 19 nt, Artificial Sequence
  Description of Artificial Sequence: Synthetic oligonucleotide
gucccuaaacuuguggaug

SEQ ID NO: 896545 - RNA, 19 nt, Artificial Sequence
  Description of Artificial Sequence: Synthetic oligonucleotide
cacuugggcgccuccagag

SEQ ID NO: 896546 - RNA, 19 nt, Artificial Sequence
  Description of Artificial Sequence: Synthetic oligonucleotide
ucgucaacuccaccucuga

SEQ ID NO: 896547 - RNA, 19 nt, Artificial Sequence
  Description of Artificial Sequence: Synthetic oligonucleotide
cugccuuauguccauccac

SEQ ID NO: 896548 - RNA, 19 nt, Artificial Sequence
  Description of Artificial Sequence: Synthetic oligonucleotide
aacccgacucccggggcgc

SEQ ID NO: 896549 - RNA, 19 nt, Artificial Sequence
  Description of Artificial Sequence: Synthetic oligonucleotide
uugucugaacgaugcauuu

SEQ ID NO: 896550 - RNA, 19 nt, Artificial Sequence
  Description of Artificial Sequence: Synthetic oligonucleotide
uuuagagugcagguagcua

SEQ ID NO: 896551 - RNA, 19 nt, Artificial Sequence
  Description of Artificial Sequence: Synthetic oligonucleotide
gucugaacgaugcauuucu

SEQ ID NO: 896552 - RNA, 19 nt, Artificial Sequence
  Description of Artificial Sequence: Synthetic oligonucleotide
gagccgcaguauuugggcc

SEQ ID NO: 896553 - RNA, 19 nt, Artificial Sequence
  Description of Artificial Sequence: Synthetic oligonucleotide
uguccaccccacacuagga

SEQ ID NO: 896554 - RNA, 19 nt, Artificial Sequence
  Description of Artificial Sequence: Synthetic oligonucleotide
gacagcgagcgcccuggcg

SEQ ID NO: 896555 - RNA, 19 nt, Artificial Sequence
  Description of Artificial Sequence: Synthetic oligonucleotide
accucugaggcaucaaauu

SEQ ID NO: 896556 - RNA, 19 nt, Artificial Sequence
  Description of Artificial Sequence: Synthetic oligonucleotide
agccgucccggaccaaccc

SEQ ID NO: 896557 - RNA, 19 nt, Artificial Sequence
  Description of Artificial Sequence: Synthetic oligonucleotide
gcaguauuugggccgauac

SEQ ID NO: 896558 - RNA, 19 nt, Artificial Sequence
  Description of Artificial Sequence: Synthetic oligonucleotide
cagucccuaaacuugugga

SEQ ID NO: 896559 - RNA, 19 nt, Artificial Sequence
  Description of Artificial Sequence: Synthetic oligonucleotide
cuguacaccgguuguccac

SEQ ID NO: 896560 - RNA, 19 nt, Artificial Sequence
  Description of Artificial Sequence: Synthetic oligonucleotide
cgaaauugcauuccagccc

SEQ ID NO: 896561 - RNA, 19 nt, Artificial Sequence
  Description of Artificial Sequence: Synthetic oligonucleotide
cggaaucgcaucuucacgg

SEQ ID NO: 896562 - RNA, 19 nt, Artificial Sequence
  Description of Artificial Sequence: Synthetic oligonucleotide
uagaggcgaaaugaugccu

SEQ ID NO: 896563 - RNA, 19 nt, Artificial Sequence
  Description of Artificial Sequence: Synthetic oligonucleotide
ugcauuccagccccuuggu

SEQ ID NO: 896564 - RNA, 19 nt, Artificial Sequence
  Description of Artificial Sequence: Synthetic oligonucleotide
uccgggagcgcggugagga

SEQ ID NO: 896565 - RNA, 19 nt, Artificial Sequence
  Description of Artificial Sequence: Synthetic oligonucleotide
uuccaacggcaauuaacuc

SEQ ID NO: 896566 - RNA, 19 nt, Artificial Sequence
  Description of Artificial Sequence: Synthetic oligonucleotide
ccugucagaggacaaaauc

SEQ ID NO: 896567 - RNA, 19 nt, Artificial Sequence
  Description of Artificial Sequence: Synthetic oligonucleotide
acagaacgucauccacacg

SEQ ID NO: 896568 - RNA, 19 nt, Artificial Sequence
  Description of Artificial Sequence: Synthetic oligonucleotide
acugggaccacgacguugu

SEQ ID NO: 896569 - RNA, 19 nt, Artificial Sequence
  Description of Artificial Sequence: Synthetic oligonucleotide
ucuucgcagcggaaucgca

SEQ ID NO: 896570 - RNA, 19 nt, Artificial Sequence
  Description of Artificial Sequence: Synthetic oligonucleotide
uacaccgguuguccacaag

SEQ ID NO: 896571 - RNA, 19 nt, Artificial Sequence
  Description of Artificial Sequence: Synthetic oligonucleotide
cucgucaacuccaccucug

SEQ ID NO: 896572 - RNA, 19 nt, Artificial Sequence
  Description of Artificial Sequence: Synthetic oligonucleotide
caaguggagaagggugacg

SEQ ID NO: 896573 - RNA, 19 nt, Artificial Sequence
  Description of Artificial Sequence: Synthetic oligonucleotide
ugucugaacgaugcauuuc

SEQ ID NO: 896574 - RNA, 19 nt, Artificial Sequence
  Description of Artificial Sequence: Synthetic oligonucleotide
gguggagagugccagccug

SEQ ID NO: 896575 - RNA, 19 nt, Artificial Sequence
  Description of Artificial Sequence: Synthetic oligonucleotide
gagccguggagcuggcgcc

SEQ ID NO: 896576 - RNA, 19 nt, Artificial Sequence
  Description of Artificial Sequence: Synthetic oligonucleotide
ucaacggggucauccuggu

SEQ ID NO: 896577 - RNA, 19 nt, Artificial Sequence
  Description of Artificial Sequence: Synthetic oligonucleotide
guuugcaguuuagagugca

SEQ ID NO: 896578 - RNA, 19 nt, Artificial Sequence
  Description of Artificial Sequence: Synthetic oligonucleotide
gguugucauugguaacccg

SEQ ID NO: 896579 - RNA, 19 nt, Artificial Sequence
  Description of Artificial Sequence: Synthetic oligonucleotide
cacuuacuccugucagagg

SEQ ID NO: 896580 - RNA, 19 nt, Artificial Sequence
  Description of Artificial Sequence: Synthetic oligonucleotide
cacgcuccaaaaugaagca

SEQ ID NO: 896581 - RNA, 19 nt, Artificial Sequence
  Description of Artificial Sequence: Synthetic oligonucleotide
gcggaaucgcaucuucacg

SEQ ID NO: 896582 - RNA, 19 nt, Artificial Sequence
  Description of Artificial Sequence: Synthetic oligonucleotide
acgacacgcuccaaaauga

SEQ ID NO: 896583 - RNA, 19 nt, Artificial Sequence
  Description of Artificial Sequence: Synthetic oligonucleotide
gucaaguggagaaggguga

SEQ ID NO: 896584 - RNA, 19 nt, Artificial Sequence
  Description of Artificial Sequence: Synthetic oligonucleotide
gaacgucauccacacgaca

SEQ ID NO: 896585 - RNA, 19 nt, Artificial Sequence
  Description of Artificial Sequence: Synthetic oligonucleotide
ggaccaacccgacucccgg

SEQ ID NO: 896586 - RNA, 19 nt, Artificial Sequence
  Description of Artificial Sequence: Synthetic oligonucleotide
guugucauugguaacccgu

SEQ ID NO: 896587 - RNA, 19 nt, Artificial Sequence
  Description of Artificial Sequence: Synthetic oligonucleotide
cugcguuuugcugcagucc

SEQ ID NO: 896588 - RNA, 19 nt, Artificial Sequence
  Description of Artificial Sequence: Synthetic oligonucleotide
caacccgacucccggggcg

SEQ ID NO: 896589 - RNA, 19 nt, Artificial Sequence
  Description of Artificial Sequence: Synthetic oligonucleotide
acuguagaggcgaaaugau

SEQ ID NO: 896590 - RNA, 19 nt, Artificial Sequence
  Description of Artificial Sequence: Synthetic oligonucleotide
uggggacacagaggaaugc

SEQ ID NO: 896591 - RNA, 19 nt, Artificial Sequence
  Description of Artificial Sequence: Synthetic oligonucleotide
guagauucuggaguuauau

SEQ ID NO: 896592 - RNA, 19 nt, Artificial Sequence
  Description of Artificial Sequence: Synthetic oligonucleotide
ggaucggaugcuccgggag

SEQ ID NO: 896593 - RNA, 19 nt, Artificial Sequence
  Description of Artificial Sequence: Synthetic oligonucleotide
aucgcaucuucacgguccu

SEQ ID NO: 896594 - RNA, 19 nt, Artificial Sequence
  Description of Artificial Sequence: Synthetic oligonucleotide
agcucauuguggcgcgcag

SEQ ID NO: 896595 - RNA, 19 nt, Artificial Sequence
  Description of Artificial Sequence: Synthetic oligonucleotide
gaagcgagguauuccccaa

SEQ ID NO: 896596 - RNA, 19 nt, Artificial Sequence
  Description of Artificial Sequence: Synthetic oligonucleotide
gcgaaaugaugccucguug

SEQ ID NO: 896597 - RNA, 19 nt, Artificial Sequence
  Description of Artificial Sequence: Synthetic oligonucleotide
caaaagcuacguuuugaua

SEQ ID NO: 896598 - RNA, 19 nt, Artificial Sequence
  Description of Artificial Sequence: Synthetic oligonucleotide
guauuacauuuccccuccc

SEQ ID NO: 896599 - RNA, 19 nt, Artificial Sequence
  Description of Artificial Sequence: Synthetic oligonucleotide
ggcccuuucacuuacuccu

SEQ ID NO: 896600 - RNA, 19 nt, Artificial Sequence
  Description of Artificial Sequence: Synthetic oligonucleotide
gagcgcggcgacacgaaag

SEQ ID NO: 896601 - RNA, 19 nt, Artificial Sequence
  Description of Artificial Sequence: Synthetic oligonucleotide
ccuuauguccauccacacc

SEQ ID NO: 896602 - RNA, 19 nt, Artificial Sequence
  Description of Artificial Sequence: Synthetic oligonucleotide
cacgacguugucugaacga

SEQ ID NO: 896603 - RNA, 19 nt, Artificial Sequence
  Description of Artificial Sequence: Synthetic oligonucleotide
aagcuacguuuugauaaau

SEQ ID NO: 896604 - RNA, 19 nt, Artificial Sequence
  Description of Artificial Sequence: Synthetic oligonucleotide
ggcgccaucaauacaugug

SEQ ID NO: 896605 - RNA, 19 nt, Artificial Sequence
  Description of Artificial Sequence: Synthetic oligonucleotide
uccgggucucuuucaccag

SEQ ID NO: 896606 - RNA, 19 nt, Artificial Sequence
  Description of Artificial Sequence: Synthetic oligonucleotide
acuaggaacccaggagaca

SEQ ID NO: 896607 - RNA, 19 nt, Artificial Sequence
  Description of Artificial Sequence: Synthetic oligonucleotide
uucgcgguucuggcggagg

SEQ ID NO: 896608 - RNA, 19 nt, Artificial Sequence
  Description of Artificial Sequence: Synthetic oligonucleotide
gacgggaccgaggcugccg

SEQ ID NO: 896609 - RNA, 19 nt, Artificial Sequence
  Description of Artificial Sequence: Synthetic oligonucleotide
ucgcgguucuggcggagga

SEQ ID NO: 896610 - RNA, 19 nt, Artificial Sequence
  Description of Artificial Sequence: Synthetic oligonucleotide
acacgacacgcuccaaaau

SEQ ID NO: 896611 - RNA, 19 nt, Artificial Sequence
  Description of Artificial Sequence: Synthetic oligonucleotide
acgacguugucugaacgau

SEQ ID NO: 896612 - RNA, 19 nt, Artificial Sequence
  Description of Artificial Sequence: Synthetic oligonucleotide
cacacgacacgcuccaaaa

SEQ ID NO: 896613 - RNA, 19 nt, Artificial Sequence
  Description of Artificial Sequence: Synthetic oligonucleotide
ggcgcagagguugcaagcg

SEQ ID NO: 896614 - RNA, 19 nt, Artificial Sequence
  Description of Artificial Sequence: Synthetic oligonucleotide
uccgucuucgcagcggaau

SEQ ID NO: 896615 - RNA, 19 nt, Artificial Sequence
  Description of Artificial Sequence: Synthetic oligonucleotide
cauaacgggugcuccagua

SEQ ID NO: 896616 - RNA, 19 nt, Artificial Sequence
  Description of Artificial Sequence: Synthetic oligonucleotide
agggcugcguuuugcugca

SEQ ID NO: 896617 - RNA, 19 nt, Artificial Sequence
  Description of Artificial Sequence: Synthetic oligonucleotide
cauugguaacccgugugga

SEQ ID NO: 896618 - RNA, 19 nt, Artificial Sequence
  Description of Artificial Sequence: Synthetic oligonucleotide
agaucccuuucagagccgu

SEQ ID NO: 896619 - RNA, 19 nt, Artificial Sequence
  Description of Artificial Sequence: Synthetic oligonucleotide
gacgcacuucacagauccg

SEQ ID NO: 896620 - RNA, 19 nt, Artificial Sequence
  Description of Artificial Sequence: Synthetic oligonucleotide
agguugcaagcgcuucucu

SEQ ID NO: 896621 - RNA, 19 nt, Artificial Sequence
  Description of Artificial Sequence: Synthetic oligonucleotide
ugggaccacgacguugucu

SEQ ID NO: 896622 - RNA, 19 nt, Artificial Sequence
  Description of Artificial Sequence: Synthetic oligonucleotide
cagaucccuuucagagccg

SEQ ID NO: 896623 - RNA, 19 nt, Artificial Sequence
  Description of Artificial Sequence: Synthetic oligonucleotide
agccaacaagccggugagc

SEQ ID NO: 896624 - RNA, 19 nt, Artificial Sequence
  Description of Artificial Sequence: Synthetic oligonucleotide
ucgcgguuccgugccaaag

SEQ ID NO: 896625 - RNA, 19 nt, Artificial Sequence
  Description of Artificial Sequence: Synthetic oligonucleotide
auuguggcgcgcagaaaga

SEQ ID NO: 896626 - RNA, 19 nt, Artificial Sequence
  Description of Artificial Sequence: Synthetic oligonucleotide
cacggcgccaucaauacau

SEQ ID NO: 896627 - RNA, 19 nt, Artificial Sequence
  Description of Artificial Sequence: Synthetic oligonucleotide
gagcuggcgccgaaauugc

SEQ ID NO: 896628 - RNA, 19 nt, Artificial Sequence
  Description of Artificial Sequence: Synthetic oligonucleotide
gucuucgcagcggaaucgc

SEQ ID NO: 896629 - RNA, 19 nt, Artificial Sequence
  Description of Artificial Sequence: Synthetic oligonucleotide
cucuccgucuucgcagcgg

SEQ ID NO: 896630 - RNA, 19 nt, Artificial Sequence
  Description of Artificial Sequence: Synthetic oligonucleotide
gaugccucguuggggugug

SEQ ID NO: 896631 - RNA, 19 nt, Artificial Sequence
  Description of Artificial Sequence: Synthetic oligonucleotide
uggcgccgaaauugcauuc

SEQ ID NO: 896632 - RNA, 19 nt, Artificial Sequence
  Description of Artificial Sequence: Synthetic oligonucleotide
acguugucugaacgaugca

SEQ ID NO: 896633 - RNA, 19 nt, Artificial Sequence
  Description of Artificial Sequence: Synthetic oligonucleotide
aggacgggaccgaggcugc

SEQ ID NO: 896634 - RNA, 19 nt, Artificial Sequence
  Description of Artificial Sequence: Synthetic oligonucleotide
ggguuguaaaggacucgcg

SEQ ID NO: 896635 - RNA, 19 nt, Artificial Sequence
  Description of Artificial Sequence: Synthetic oligonucleotide
gugccagccuggucaagug

SEQ ID NO: 896636 - RNA, 19 nt, Artificial Sequence
  Description of Artificial Sequence: Synthetic oligonucleotide
cacugggaccacgacguug

SEQ ID NO: 896637 - RNA, 19 nt, Artificial Sequence
  Description of Artificial Sequence: Synthetic oligonucleotide
ggcgcgcagaaagagccgg

SEQ ID NO: 896638 - RNA, 19 nt, Artificial Sequence
  Description of Artificial Sequence: Synthetic oligonucleotide
agcuacguuuugauaaaua

SEQ ID NO: 896639 - RNA, 19 nt, Artificial Sequence
  Description of Artificial Sequence: Synthetic oligonucleotide
cagcgggaucggaugcucc

SEQ ID NO: 896640 - RNA, 19 nt, Artificial Sequence
  Description of Artificial Sequence: Synthetic oligonucleotide
ggcgacacgaaagccaaca

SEQ ID NO: 896641 - RNA, 19 nt, Artificial Sequence
  Description of Artificial Sequence: Synthetic oligonucleotide
gggucucuuucaccaggcg

SEQ ID NO: 896642 - RNA, 19 nt, Artificial Sequence
  Description of Artificial Sequence: Synthetic oligonucleotide
acuccugucagaggacaaa

SEQ ID NO: 896643 - RNA, 19 nt, Artificial Sequence
  Description of Artificial Sequence: Synthetic oligonucleotide
auggaggcccuuucacuua

SEQ ID NO: 896644 - RNA, 19 nt, Artificial Sequence
  Description of Artificial Sequence: Synthetic oligonucleotide
ggacucgcgguuccgugcc

SEQ ID NO: 896645 - RNA, 19 nt, Artificial Sequence
  Description of Artificial Sequence: Synthetic oligonucleotide
cagccgucccggaccaacc

SEQ ID NO: 896646 - RNA, 19 nt, Artificial Sequence
  Description of Artificial Sequence: Synthetic oligonucleotide
cgacacgaaagccaacaag

SEQ ID NO: 896647 - RNA, 19 nt, Artificial Sequence
  Description of Artificial Sequence: Synthetic oligonucleotide
uggagcuggcgccgaaauu

SEQ ID NO: 896648 - RNA, 19 nt, Artificial Sequence
  Description of Artificial Sequence: Synthetic oligonucleotide
gcaccggccguccacgcag

SEQ ID NO: 896649 - RNA, 19 nt, Artificial Sequence
  Description of Artificial Sequence: Synthetic oligonucleotide
caccccacacuaggaaccc

SEQ ID NO: 896650 - RNA, 19 nt, Artificial Sequence
  Description of Artificial Sequence: Synthetic oligonucleotide
acccacccaugucuccaag

SEQ ID NO: 896651 - RNA, 19 nt, Artificial Sequence
  Description of Artificial Sequence: Synthetic oligonucleotide
gggugcuccaguacuauga

SEQ ID NO: 896652 - RNA, 19 nt, Artificial Sequence
  Description of Artificial Sequence: Synthetic oligonucleotide
ccacgacguugucugaacg

SEQ ID NO: 896653 - RNA, 19 nt, Artificial Sequence
  Description of Artificial Sequence: Synthetic oligonucleotide
cagagguugcaagcgcuuc

SEQ ID NO: 896654 - RNA, 19 nt, Artificial Sequence
  Description of Artificial Sequence: Synthetic oligonucleotide
gcugcguuuugcugcaguc

SEQ ID NO: 896655 - RNA, 19 nt, Artificial Sequence
  Description of Artificial Sequence: Synthetic oligonucleotide
cuccaguacuaugaagcga

SEQ ID NO: 896656 - RNA, 19 nt, Artificial Sequence
  Description of Artificial Sequence: Synthetic oligonucleotide
ggugaggacgggaccgagg

SEQ ID NO: 896657 - RNA, 19 nt, Artificial Sequence
  Description of Artificial Sequence: Synthetic oligonucleotide
ccggcguccuucuuucgcg

SEQ ID NO: 896658 - RNA, 19 nt, Artificial Sequence
  Description of Artificial Sequence: Synthetic oligonucleotide
cagaaagagccggggcgag

SEQ ID NO: 896659 - RNA, 19 nt, Artificial Sequence
  Description of Artificial Sequence: Synthetic oligonucleotide
uggggcagcccagguuggg

SEQ ID NO: 896660 - RNA, 19 nt, Artificial Sequence
  Description of Artificial Sequence: Synthetic oligonucleotide
ggaguuauauucacagggu

SEQ ID NO: 896661 - RNA, 19 nt, Artificial Sequence
  Description of Artificial Sequence: Synthetic oligonucleotide
ccaguacuaugaagcgagg

SEQ ID NO: 896662 - RNA, 19 nt, Artificial Sequence
  Description of Artificial Sequence: Synthetic oligonucleotide
guugucugaacgaugcauu

SEQ ID NO: 896663 - RNA, 19 nt, Artificial Sequence
  Description of Artificial Sequence: Synthetic oligonucleotide
ccccacacuaggaacccag

SEQ ID NO: 896664 - RNA, 19 nt, Artificial Sequence
  Description of Artificial Sequence: Synthetic oligonucleotide
ccucccucgggaaggaaug

SEQ ID NO: 896665 - RNA, 19 nt, Artificial Sequence
  Description of Artificial Sequence: Synthetic oligonucleotide
gccuuauguccauccacac

SEQ ID NO: 896666 - RNA, 19 nt, Artificial Sequence
  Description of Artificial Sequence: Synthetic oligonucleotide
ugccggcguccuucuuucg

SEQ ID NO: 896667 - RNA, 19 nt, Artificial Sequence
  Description of Artificial Sequence: Synthetic oligonucleotide
cuuuuccaacggcaauuaa

SEQ ID NO: 896668 - RNA, 19 nt, Artificial Sequence
  Description of Artificial Sequence: Synthetic oligonucleotide
gggagcgcggugaggacgg

SEQ ID NO: 896669 - RNA, 19 nt, Artificial Sequence
  Description of Artificial Sequence: Synthetic oligonucleotide
cagcggaaucgcaucuuca

SEQ ID NO: 896670 - RNA, 19 nt, Artificial Sequence
  Description of Artificial Sequence: Synthetic oligonucleotide
gcgguuccgugccaaagac

SEQ ID NO: 896671 - RNA, 19 nt, Artificial Sequence
  Description of Artificial Sequence: Synthetic oligonucleotide
ggcgccgaaauugcauucc

SEQ ID NO: 896672 - RNA, 19 nt, Artificial Sequence
  Description of Artificial Sequence: Synthetic oligonucleotide
uuucaccaggcggcauucu

SEQ ID NO: 896673 - RNA, 19 nt, Artificial Sequence
  Description of Artificial Sequence: Synthetic oligonucleotide
gcggugcuggagcucauug

SEQ ID NO: 896674 - RNA, 19 nt, Artificial Sequence
  Description of Artificial Sequence: Synthetic oligonucleotide
cccacacuaggaacccagg

SEQ ID NO: 896675 - RNA, 19 nt, Artificial Sequence
  Description of Artificial Sequence: Synthetic oligonucleotide
ccgggucucuuucaccagg

SEQ ID NO: 896676 - RNA, 19 nt, Artificial Sequence
  Description of Artificial Sequence: Synthetic oligonucleotide
cccacggcgccaucaauac

SEQ ID NO: 896677 - RNA, 19 nt, Artificial Sequence
  Description of Artificial Sequence: Synthetic oligonucleotide
gccccguuggcacccaccc

SEQ ID NO: 896678 - RNA, 19 nt, Artificial Sequence
  Description of Artificial Sequence: Synthetic oligonucleotide
acgcuccaaaaugaagcau

SEQ ID NO: 896679 - RNA, 19 nt, Artificial Sequence
  Description of Artificial Sequence: Synthetic oligonucleotide
agcaccggccguccacgca

SEQ ID NO: 896680 - RNA, 19 nt, Artificial Sequence
  Description of Artificial Sequence: Synthetic oligonucleotide
uguggucgcagggcugcgu

SEQ ID NO: 896681 - RNA, 19 nt, Artificial Sequence
  Description of Artificial Sequence: Synthetic oligonucleotide
uguuuacaguugggcugga

SEQ ID NO: 896682 - RNA, 19 nt, Artificial Sequence
  Description of Artificial Sequence: Synthetic oligonucleotide
caguauuugggccgauacu

SEQ ID NO: 896683 - RNA, 19 nt, Artificial Sequence
  Description of Artificial Sequence: Synthetic oligonucleotide
gccgucccggaccaacccg

SEQ ID NO: 896684 - RNA, 19 nt, Artificial Sequence
  Description of Artificial Sequence: Synthetic oligonucleotide
cuggucguccagggagucc

SEQ ID NO: 896685 - RNA, 19 nt, Artificial Sequence
  Description of Artificial Sequence: Synthetic oligonucleotide
gcagcggaaucgcaucuuc

SEQ ID NO: 896686 - RNA, 19 nt, Artificial Sequence
  Description of Artificial Sequence: Synthetic oligonucleotide
gcgcagaaagagccggggc

SEQ ID NO: 896687 - RNA, 19 nt, Artificial Sequence
  Description of Artificial Sequence: Synthetic oligonucleotide
ggaaugcagcccacggcgc

SEQ ID NO: 896688 - RNA, 19 nt, Artificial Sequence
  Description of Artificial Sequence: Synthetic oligonucleotide
ccaguauuacauuuccccu

SEQ ID NO: 896689 - RNA, 19 nt, Artificial Sequence
  Description of Artificial Sequence: Synthetic oligonucleotide
cagauccgggucucuuuca

SEQ ID NO: 896690 - RNA, 19 nt, Artificial Sequence
  Description of Artificial Sequence: Synthetic oligonucleotide
aggcgaaaugaugccucgu

SEQ ID NO: 896691 - RNA, 19 nt, Artificial Sequence
  Description of Artificial Sequence: Synthetic oligonucleotide
acgaugcauuucuggccau

SEQ ID NO: 896692 - RNA, 19 nt, Artificial Sequence
  Description of Artificial Sequence: Synthetic oligonucleotide
gccggcguccuucuuucgc

SEQ ID NO: 896693 - RNA, 19 nt, Artificial Sequence
  Description of Artificial Sequence: Synthetic oligonucleotide
gcuguacaccgguugucca

SEQ ID NO: 896694 - RNA, 19 nt, Artificial Sequence
  Description of Artificial Sequence: Synthetic oligonucleotide
cuucgcagcggaaucgcau

SEQ ID NO: 896695 - RNA, 19 nt, Artificial Sequence
  Description of Artificial Sequence: Synthetic oligonucleotide
gaaggaauggaggcccuuu

SEQ ID NO: 896696 - RNA, 19 nt, Artificial Sequence
  Description of Artificial Sequence: Synthetic oligonucleotide
agggugacggcgacagcga

SEQ ID NO: 896697 - RNA, 19 nt, Artificial Sequence
  Description of Artificial Sequence: Synthetic oligonucleotide
gggugacggcgacagcgag

SEQ ID NO: 896698 - RNA, 19 nt, Artificial Sequence
  Description of Artificial Sequence: Synthetic oligonucleotide
cuuucgcgguucuggcgga

SEQ ID NO: 896699 - RNA, 19 nt, Artificial Sequence
  Description of Artificial Sequence: Synthetic oligonucleotide
ucggaugcuccgggagcgc

SEQ ID NO: 896700 - RNA, 19 nt, Artificial Sequence
  Description of Artificial Sequence: Synthetic oligonucleotide
gucgcagggcugcguuuug

SEQ ID NO: 896701 - RNA, 19 nt, Artificial Sequence
  Description of Artificial Sequence: Synthetic oligonucleotide
caguacuaugaagcgaggu

SEQ ID NO: 896702 - RNA, 19 nt, Artificial Sequence
  Description of Artificial Sequence: Synthetic oligonucleotide
ccaacggcaauuaacucau

SEQ ID NO: 896703 - RNA, 19 nt, Artificial Sequence
  Description of Artificial Sequence: Synthetic oligonucleotide
gcgcagagguugcaagcgc

SEQ ID NO: 896704 - RNA, 19 nt, Artificial Sequence
  Description of Artificial Sequence: Synthetic oligonucleotide
ggaaucgcaucuucacggu

SEQ ID NO: 896705 - RNA, 19 nt, Artificial Sequence
  Description of Artificial Sequence: Synthetic oligonucleotide
gcaguuuagagugcaggua

SEQ ID NO: 896706 - RNA, 19 nt, Artificial Sequence
  Description of Artificial Sequence: Synthetic oligonucleotide
cggccguccacgcaggagc

SEQ ID NO: 896707 - RNA, 19 nt, Artificial Sequence
  Description of Artificial Sequence: Synthetic oligonucleotide
cuuggagcacugggaccac

SEQ ID NO: 896708 - RNA, 19 nt, Artificial Sequence
  Description of Artificial Sequence: Synthetic oligonucleotide
uuuccccguucugguagau

SEQ ID NO: 896709 - RNA, 19 nt, Artificial Sequence
  Description of Artificial Sequence: Synthetic oligonucleotide
ccaugcagaggguuguaaa

SEQ ID NO: 896710 - RNA, 19 nt, Artificial Sequence
  Description of Artificial Sequence: Synthetic oligonucleotide
uggucgcagggcugcguuu

SEQ ID NO: 896711 - RNA, 19 nt, Artificial Sequence
  Description of Artificial Sequence: Synthetic oligonucleotide
acggcgccaucaauacaug

SEQ ID NO: 896712 - RNA, 19 nt, Artificial Sequence
  Description of Artificial Sequence: Synthetic oligonucleotide
caacggggucauccugguc

SEQ ID NO: 896713 - RNA, 19 nt, Artificial Sequence
  Description of Artificial Sequence: Synthetic oligonucleotide
cgucaacuccaccucugag

SEQ ID NO: 896714 - RNA, 19 nt, Artificial Sequence
  Description of Artificial Sequence: Synthetic oligonucleotide
cgucuucgcagcggaaucg

SEQ ID NO: 896715 - RNA, 19 nt, Artificial Sequence
  Description of Artificial Sequence: Synthetic oligonucleotide
ucguuggggugugggcagu

SEQ ID NO: 896716 - RNA, 19 nt, Artificial Sequence
  Description of Artificial Sequence: Synthetic oligonucleotide
guacaccgguuguccacaa

SEQ ID NO: 896717 - RNA, 19 nt, Artificial Sequence
  Description of Artificial Sequence: Synthetic oligonucleotide
guguggucgcagggcugcg

SEQ ID NO: 896718 - RNA, 19 nt, Artificial Sequence
  Description of Artificial Sequence: Synthetic oligonucleotide
ggcgaaaugaugccucguu

SEQ ID NO: 896719 - RNA, 19 nt, Artificial Sequence
  Description of Artificial Sequence: Synthetic oligonucleotide
cgccgaaauugcauuccag

SEQ ID NO: 896720 - RNA, 19 nt, Artificial Sequence
  Description of Artificial Sequence: Synthetic oligonucleotide
cccguucugguagauucug

SEQ ID NO: 896721 - RNA, 19 nt, Artificial Sequence
  Description of Artificial Sequence: Synthetic oligonucleotide
cagagccguggagcuggcg

SEQ ID NO: 896722 - RNA, 19 nt, Artificial Sequence
  Description of Artificial Sequence: Synthetic oligonucleotide
cggaccaacccgacucccg

SEQ ID NO: 896723 - RNA, 19 nt, Artificial Sequence
  Description of Artificial Sequence: Synthetic oligonucleotide
ccgucuucgcagcggaauc

SEQ ID NO: 896724 - RNA, 19 nt, Artificial Sequence
  Description of Artificial Sequence: Synthetic oligonucleotide
gcgccgaaauugcauucca

SEQ ID NO: 896725 - RNA, 19 nt, Artificial Sequence
  Description of Artificial Sequence: Synthetic oligonucleotide
cuggcgccgaaauugcauu

SEQ ID NO: 896726 - RNA, 19 nt, Artificial Sequence
  Description of Artificial Sequence: Synthetic oligonucleotide
acucgcgguuccgugccaa

SEQ ID NO: 896727 - RNA, 19 nt, Artificial Sequence
  Description of Artificial Sequence: Synthetic oligonucleotide
gacucgcgguuccgugcca

SEQ ID NO: 896728 - RNA, 19 nt, Artificial Sequence
  Description of Artificial Sequence: Synthetic oligonucleotide
cgacguugucugaacgaug

SEQ ID NO: 896729 - RNA, 19 nt, Artificial Sequence
  Description of Artificial Sequence: Synthetic oligonucleotide
gguagauucuggaguuaua

SEQ ID NO: 896730 - RNA, 19 nt, Artificial Sequence
  Description of Artificial Sequence: Synthetic oligonucleotide
ccaacccgacucccggggc

SEQ ID NO: 896731 - RNA, 19 nt, Artificial Sequence
  Description of Artificial Sequence: Synthetic oligonucleotide
ggggcgagcgcggcgacac

SEQ ID NO: 896732 - RNA, 19 nt, Artificial Sequence
  Description of Artificial Sequence: Synthetic oligonucleotide
gcgacacgaaagccaacaa

SEQ ID NO: 896733 - RNA, 19 nt, Artificial Sequence
  Description of Artificial Sequence: Synthetic oligonucleotide
ccacaaggacgcacuucac

SEQ ID NO: 896734 - RNA, 19 nt, Artificial Sequence
  Description of Artificial Sequence: Synthetic oligonucleotide
gcggggcagguggagagug

SEQ ID NO: 896735 - RNA, 19 nt, Artificial Sequence
  Description of Artificial Sequence: Synthetic oligonucleotide
cgcagaccuuacagcagcc

SEQ ID NO: 896736 - RNA, 19 nt, Artificial Sequence
  Description of Artificial Sequence: Synthetic oligonucleotide
gucauccacacgacacgcu

SEQ ID NO: 896737 - RNA, 19 nt, Artificial Sequence
  Description of Artificial Sequence: Synthetic oligonucleotide
cgcgcagaaagagccgggg

SEQ ID NO: 896738 - RNA, 19 nt, Artificial Sequence
  Description of Artificial Sequence: Synthetic oligonucleotide
gcggcgacacgaaagccaa

SEQ ID NO: 896739 - RNA, 19 nt, Artificial Sequence
  Description of Artificial Sequence: Synthetic oligonucleotide
cugggaccacgacguuguc

SEQ ID NO: 896740 - RNA, 19 nt, Artificial Sequence
  Description of Artificial Sequence: Synthetic oligonucleotide
caguugggcuggaagcuuu

SEQ ID NO: 896741 - RNA, 19 nt, Artificial Sequence
  Description of Artificial Sequence: Synthetic oligonucleotide
cgcggcgacacgaaagcca

SEQ ID NO: 896742 - RNA, 19 nt, Artificial Sequence
  Description of Artificial Sequence: Synthetic oligonucleotide
ggagcucauuguggcgcgc

SEQ ID NO: 896743 - RNA, 19 nt, Artificial Sequence
  Description of Artificial Sequence: Synthetic oligonucleotide
ccacacgacacgcuccaaa

SEQ ID NO: 896744 - RNA, 19 nt, Artificial Sequence
  Description of Artificial Sequence: Synthetic oligonucleotide
guggucgcagggcugcguu

SEQ ID NO: 896745 - RNA, 19 nt, Artificial Sequence
  Description of Artificial Sequence: Synthetic oligonucleotide
cucgcgguuccgugccaaa

SEQ ID NO: 896746 - RNA, 19 nt, Artificial Sequence
  Description of Artificial Sequence: Synthetic oligonucleotide
ggaccacgacguugucuga

SEQ ID NO: 896747 - RNA, 19 nt, Artificial Sequence
  Description of Artificial Sequence: Synthetic oligonucleotide
ccguuggcacccacccaug

SEQ ID NO: 896748 - RNA, 19 nt, Artificial Sequence
  Description of Artificial Sequence: Synthetic oligonucleotide
gcagcgggaucggaugcuc

SEQ ID NO: 896749 - RNA, 19 nt, Artificial Sequence
  Description of Artificial Sequence: Synthetic oligonucleotide
gccgcaguauuugggccga

SEQ ID NO: 896750 - RNA, 19 nt, Artificial Sequence
  Description of Artificial Sequence: Synthetic oligonucleotide
ccgucccggaccaacccga

SEQ ID NO: 896751 - RNA, 19 nt, Artificial Sequence
  Description of Artificial Sequence: Synthetic oligonucleotide
ccggaccaacccgacuccc

SEQ ID NO: 896752 - RNA, 19 nt, Artificial Sequence
  Description of Artificial Sequence: Synthetic oligonucleotide
gcccacggcgccaucaaua

SEQ ID NO: 896753 - RNA, 19 nt, Artificial Sequence
  Description of Artificial Sequence: Synthetic oligonucleotide
gcauaacgggugcuccagu

SEQ ID NO: 896754 - RNA, 19 nt, Artificial Sequence
  Description of Artificial Sequence: Synthetic oligonucleotide
gggcgagcgcggcgacacg

SEQ ID NO: 896755 - RNA, 19 nt, Artificial Sequence
  Description of Artificial Sequence: Synthetic oligonucleotide
gcugccggcguccuucuuu

SEQ ID NO: 896756 - RNA, 19 nt, Artificial Sequence
  Description of Artificial Sequence: Synthetic oligonucleotide
ccacgcaggagccgcagua

SEQ ID NO: 896757 - RNA, 19 nt, Artificial Sequence
  Description of Artificial Sequence: Synthetic oligonucleotide
gcgcggcgacacgaaagcc

SEQ ID NO: 896758 - RNA, 19 nt, Artificial Sequence
  Description of Artificial Sequence: Synthetic oligonucleotide
gcguuuugcugcaguccuc

SEQ ID NO: 896759 - RNA, 19 nt, Artificial Sequence
  Description of Artificial Sequence: Synthetic oligonucleotide
gcgagcgcccuggcggugc

SEQ ID NO: 896760 - RNA, 19 nt, Artificial Sequence
  Description of Artificial Sequence: Synthetic oligonucleotide
aggcggcauucuggguugu

SEQ ID NO: 896761 - RNA, 19 nt, Artificial Sequence
  Description of Artificial Sequence: Synthetic oligonucleotide
cgcgguuccgugccaaaga

SEQ ID NO: 896762 - RNA, 19 nt, Artificial Sequence
  Description of Artificial Sequence: Synthetic oligonucleotide
cccguuggcacccacccau

SEQ ID NO: 896763 - RNA, 19 nt, Artificial Sequence
  Description of Artificial Sequence: Synthetic oligonucleotide
cgacacgcuccaaaaugaa

SEQ ID NO: 896764 - RNA, 19 nt, Artificial Sequence
  Description of Artificial Sequence: Synthetic oligonucleotide
ggcguccuucuuucgcggu

SEQ ID NO: 896765 - RNA, 19 nt, Artificial Sequence
  Description of Artificial Sequence: Synthetic oligonucleotide
ccacagccgucccggacca

SEQ ID NO: 896766 - RNA, 19 nt, Artificial Sequence
  Description of Artificial Sequence: Synthetic oligonucleotide
cacgcaggagccgcaguau

SEQ ID NO: 896767 - RNA, 19 nt, Artificial Sequence
  Description of Artificial Sequence: Synthetic oligonucleotide
cgguuccgugccaaagaca

SEQ ID NO: 896768 - RNA, 19 nt, Artificial Sequence
  Description of Artificial Sequence: Synthetic oligonucleotide
ccucgucaacuccaccucu

SEQ ID NO: 896769 - RNA, 19 nt, Artificial Sequence
  Description of Artificial Sequence: Synthetic oligonucleotide
ccgggagcgcggugaggac

SEQ ID NO: 896770 - RNA, 19 nt, Artificial Sequence
  Description of Artificial Sequence: Synthetic oligonucleotide
ggucgcagggcugcguuuu

SEQ ID NO: 896771 - RNA, 19 nt, Artificial Sequence
  Description of Artificial Sequence: Synthetic oligonucleotide
ccacggcgccaucaauaca

SEQ ID NO: 896772 - RNA, 19 nt, Artificial Sequence
  Description of Artificial Sequence: Synthetic oligonucleotide
gcgccuccagagggcagug

SEQ ID NO: 896773 - RNA, 19 nt, Artificial Sequence
  Description of Artificial Sequence: Synthetic oligonucleotide
cucuuucaccaggcggcau

SEQ ID NO: 896774 - RNA, 19 nt, Artificial Sequence
  Description of Artificial Sequence: Synthetic oligonucleotide
gcagagguugcaagcgcuu

SEQ ID NO: 896775 - RNA, 19 nt, Artificial Sequence
  Description of Artificial Sequence: Synthetic oligonucleotide
gcguccuucuuucgcgguu

SEQ ID NO: 896776 - RNA, 19 nt, Artificial Sequence
  Description of Artificial Sequence: Synthetic oligonucleotide
cccguguggagaugccagu

SEQ ID NO: 896777 - RNA, 19 nt, Artificial Sequence
  Description of Artificial Sequence: Synthetic oligonucleotide
ccccguucugguagauucu

SEQ ID NO: 896778 - RNA, 19 nt, Artificial Sequence
  Description of Artificial Sequence: Synthetic oligonucleotide
gggcugcguuuugcugcag

SEQ ID NO: 896779 - RNA, 19 nt, Artificial Sequence
  Description of Artificial Sequence: Synthetic oligonucleotide
cuucagcgagcugccuuuu

SEQ ID NO: 896780 - RNA, 19 nt, Artificial Sequence
  Description of Artificial Sequence: Synthetic oligonucleotide
gccccuugguguggucgca

SEQ ID NO: 896781 - RNA, 19 nt, Artificial Sequence
  Description of Artificial Sequence: Synthetic oligonucleotide
cggcgacacgaaagccaac

SEQ ID NO: 896782 - RNA, 19 nt, Artificial Sequence
  Description of Artificial Sequence: Synthetic oligonucleotide
ccccguuggcacccaccca

SEQ ID NO: 896783 - RNA, 19 nt, Artificial Sequence
  Description of Artificial Sequence: Synthetic oligonucleotide
cggggcgcacuugggcgcc

SEQ ID NO: 896784 - RNA, 19 nt, Artificial Sequence
  Description of Artificial Sequence: Synthetic oligonucleotide
cccuccccaaaagcuacgu

SEQ ID NO: 896785 - RNA, 19 nt, Artificial Sequence
  Description of Artificial Sequence: Synthetic oligonucleotide
cggcgccaucaauacaugu

SEQ ID NO: 896786 - RNA, 19 nt, Artificial Sequence
  Description of Artificial Sequence: Synthetic oligonucleotide
ggcggggcagguggagagu

SEQ ID NO: 896787 - RNA, 19 nt, Artificial Sequence
  Description of Artificial Sequence: Synthetic oligonucleotide
cgcaguauuugggccgaua

SEQ ID NO: 896788 - RNA, 19 nt, Artificial Sequence
  Description of Artificial Sequence: Synthetic oligonucleotide
cacagccgucccggaccaa

SEQ ID NO: 896789 - RNA, 19 nt, Artificial Sequence
  Description of Artificial Sequence: Synthetic oligonucleotide
ggcggugcuggagcucauu

SEQ ID NO: 896790 - RNA, 19 nt, Artificial Sequence
  Description of Artificial Sequence: Synthetic oligonucleotide
ccguggagcuggcgccgaa

SEQ ID NO: 896791 - RNA, 19 nt, Artificial Sequence
  Description of Artificial Sequence: Synthetic oligonucleotide
ggggcgcacuugggcgccu

SEQ ID NO: 896792 - RNA, 19 nt, Artificial Sequence
  Description of Artificial Sequence: Synthetic oligonucleotide
cggggcgagcgcggcgaca

SEQ ID NO: 896793 - RNA, 19 nt, Artificial Sequence
  Description of Artificial Sequence: Synthetic oligonucleotide
ccgcaguauuugggccgau

SEQ ID NO: 896794 - RNA, 19 nt, Artificial Sequence
  Description of Artificial Sequence: Synthetic oligonucleotide
gaaaucauaaccuuuagag

SEQ ID NO: 896795 - RNA, 19 nt, Artificial Sequence
  Description of Artificial Sequence: Synthetic oligonucleotide
ucuaucuaaacucaauucc

SEQ ID NO: 896796 - RNA, 19 nt, Artificial Sequence
  Description of Artificial Sequence: Synthetic oligonucleotide
aaaaucaaucuaucuaaac

SEQ ID NO: 896797 - RNA, 19 nt, Artificial Sequence
  Description of Artificial Sequence: Synthetic oligonucleotide
uuuccuacucuccagauag

SEQ ID NO: 896798 - RNA, 19 nt, Artificial Sequence
  Description of Artificial Sequence: Synthetic oligonucleotide
auagacagcacauucaaag

SEQ ID NO: 896799 - RNA, 19 nt, Artificial Sequence
  Description of Artificial Sequence: Synthetic oligonucleotide
agaauuaguggcucgagac

SEQ ID NO: 896800 - RNA, 19 nt, Artificial Sequence
  Description of Artificial Sequence: Synthetic oligonucleotide
aauuccgcgauuuucaggu

SEQ ID NO: 896801 - RNA, 19 nt, Artificial Sequence
  Description of Artificial Sequence: Synthetic oligonucleotide
aagcgggagaauuaguggc

SEQ ID NO: 896802 - RNA, 19 nt, Artificial Sequence
  Description of Artificial Sequence: Synthetic oligonucleotide
auaaccaacaugucacugc

SEQ ID NO: 896803 - RNA, 19 nt, Artificial Sequence
  Description of Artificial Sequence: Synthetic oligonucleotide
uauagaaggcucuucacag

SEQ ID NO: 896804 - RNA, 19 nt, Artificial Sequence
  Description of Artificial Sequence: Synthetic oligonucleotide
gaauccacacuuaugaagg

SEQ ID NO: 896805 - RNA, 19 nt, Artificial Sequence
  Description of Artificial Sequence: Synthetic oligonucleotide
ggaaauuccauucacagug

SEQ ID NO: 896806 - RNA, 19 nt, Artificial Sequence
  Description of Artificial Sequence: Synthetic oligonucleotide
aaaucauaaccuuuagaga

SEQ ID NO: 896807 - RNA, 19 nt, Artificial Sequence
  Description of Artificial Sequence: Synthetic oligonucleotide
uucaguaaugacacugugg

SEQ ID NO: 896808 - RNA, 19 nt, Artificial Sequence
  Description of Artificial Sequence: Synthetic oligonucleotide
aucuaucuaaacucaauuc

SEQ ID NO: 896809 - RNA, 19 nt, Artificial Sequence
  Description of Artificial Sequence: Synthetic oligonucleotide
gagguuaagacucuucugc

SEQ ID NO: 896810 - RNA, 19 nt, Artificial Sequence
  Description of Artificial Sequence: Synthetic oligonucleotide
auggaaauuccauucacag

SEQ ID NO: 896811 - RNA, 19 nt, Artificial Sequence
  Description of Artificial Sequence: Synthetic oligonucleotide
aaaugggguuuagagaccc

SEQ ID NO: 896812 - RNA, 19 nt, Artificial Sequence
  Description of Artificial Sequence: Synthetic oligonucleotide
agacugugcauucaggacg

SEQ ID NO: 896813 - RNA, 19 nt, Artificial Sequence
  Description of Artificial Sequence: Synthetic oligonucleotide
acuuaugaaggaaucaucg

SEQ ID NO: 896814 - RNA, 19 nt, Artificial Sequence
  Description of Artificial Sequence: Synthetic oligonucleotide
aagagguuaagacucuucu

SEQ ID NO: 896815 - RNA, 19 nt, Artificial Sequence
  Description of Artificial Sequence: Synthetic oligonucleotide
auuccauucacaguguccg

SEQ ID NO: 896816 - RNA, 19 nt, Artificial Sequence
  Description of Artificial Sequence: Synthetic oligonucleotide
cagauaggaugcaagaugc

SEQ ID NO: 896817 - RNA, 19 nt, Artificial Sequence
  Description of Artificial Sequence: Synthetic oligonucleotide
acgauaaccaacaugucac

SEQ ID NO: 896818 - RNA, 19 nt, Artificial Sequence
  Description of Artificial Sequence: Synthetic oligonucleotide
aagccauccaaagaccacc

SEQ ID NO: 896819 - RNA, 19 nt, Artificial Sequence
  Description of Artificial Sequence: Synthetic oligonucleotide
uccaaagaccaccucgugg

SEQ ID NO: 896820 - RNA, 19 nt, Artificial Sequence
  Description of Artificial Sequence: Synthetic oligonucleotide
auaaccuuuagagaggucu

SEQ ID NO: 896821 - RNA, 19 nt, Artificial Sequence
  Description of Artificial Sequence: Synthetic oligonucleotide
uggcaaaugggguuuagag

SEQ ID NO: 896822 - RNA, 19 nt, Artificial Sequence
  Description of Artificial Sequence: Synthetic oligonucleotide
ggaucaaggagucugaggc

SEQ ID NO: 896823 - RNA, 19 nt, Artificial Sequence
  Description of Artificial Sequence: Synthetic oligonucleotide
uuuagacacauuguacccg

SEQ ID NO: 896824 - RNA, 19 nt, Artificial Sequence
  Description of Artificial Sequence: Synthetic oligonucleotide
aaagaugugucucucuuua

SEQ ID NO: 896825 - RNA, 19 nt, Artificial Sequence
  Description of Artificial Sequence: Synthetic oligonucleotide
aucuaaacucaauuccgcg

SEQ ID NO: 896826 - RNA, 19 nt, Artificial Sequence
  Description of Artificial Sequence: Synthetic oligonucleotide
uucucugcauauuuucccg

SEQ ID NO: 896827 - RNA, 19 nt, Artificial Sequence
  Description of Artificial Sequence: Synthetic oligonucleotide
ucuaaacucaauuccgcga

SEQ ID NO: 896828 - RNA, 19 nt, Artificial Sequence
  Description of Artificial Sequence: Synthetic oligonucleotide
uuauccaguuaguaaaaga

SEQ ID NO: 896829 - RNA, 19 nt, Artificial Sequence
  Description of Artificial Sequence: Synthetic oligonucleotide
guuuagagacccugaagcg

SEQ ID NO: 896830 - RNA, 19 nt, Artificial Sequence
  Description of Artificial Sequence: Synthetic oligonucleotide
cauuguacccguaugcggc

SEQ ID NO: 896831 - RNA, 19 nt, Artificial Sequence
  Description of Artificial Sequence: Synthetic oligonucleotide
cuuuuccccucucagaggg

SEQ ID NO: 896832 - RNA, 19 nt, Artificial Sequence
  Description of Artificial Sequence: Synthetic oligonucleotide
aauuaucucacuccauuuu

SEQ ID NO: 896833 - RNA, 19 nt, Artificial Sequence
  Description of Artificial Sequence: Synthetic oligonucleotide
cugaauggaaauuccauuc

SEQ ID NO: 896834 - RNA, 19 nt, Artificial Sequence
  Description of Artificial Sequence: Synthetic oligonucleotide
gaacaaaugggaucacgag

SEQ ID NO: 896835 - RNA, 19 nt, Artificial Sequence
  Description of Artificial Sequence: Synthetic oligonucleotide
acccguaugcggcauaagc

SEQ ID NO: 896836 - RNA, 19 nt, Artificial Sequence
  Description of Artificial Sequence: Synthetic oligonucleotide
auagaaggcucuucacagc

SEQ ID NO: 896837 - RNA, 19 nt, Artificial Sequence
  Description of Artificial Sequence: Synthetic oligonucleotide
cuuaugaaggaaucaucgc

SEQ ID NO: 896838 - RNA, 19 nt, Artificial Sequence
  Description of Artificial Sequence: Synthetic oligonucleotide
ucauaagggacauggucag

SEQ ID NO: 896839 - RNA, 19 nt, Artificial Sequence
  Description of Artificial Sequence: Synthetic oligonucleotide
uuagagacccugaagcgcu

SEQ ID NO: 896840 - RNA, 19 nt, Artificial Sequence
  Description of Artificial Sequence: Synthetic oligonucleotide
gagacagagccuguuaugg

SEQ ID NO: 896841 - RNA, 19 nt, Artificial Sequence
  Description of Artificial Sequence: Synthetic oligonucleotide
uucugauccccucuaaaga

SEQ ID NO: 896842 - RNA, 19 nt, Artificial Sequence
  Description of Artificial Sequence: Synthetic oligonucleotide
aaaugggaucacgagguuc

SEQ ID NO: 896843 - RNA, 19 nt, Artificial Sequence
  Description of Artificial Sequence: Synthetic oligonucleotide
ggagaucucacugaaaggg

SEQ ID NO: 896844 - RNA, 19 nt, Artificial Sequence
  Description of Artificial Sequence: Synthetic oligonucleotide
aguaaugacacuguggcaa

SEQ ID NO: 896845 - RNA, 19 nt, Artificial Sequence
  Description of Artificial Sequence: Synthetic oligonucleotide
acauuguacccguaugcgg

SEQ ID NO: 896846 - RNA, 19 nt, Artificial Sequence
  Description of Artificial Sequence: Synthetic oligonucleotide
ucccuuucuagcccuauag

SEQ ID NO: 896847 - RNA, 19 nt, Artificial Sequence
  Description of Artificial Sequence: Synthetic oligonucleotide
ucuccagauaggaugcaag

SEQ ID NO: 896848 - RNA, 19 nt, Artificial Sequence
  Description of Artificial Sequence: Synthetic oligonucleotide
uuuagagacccugaagcgc

SEQ ID NO: 896849 - RNA, 19 nt, Artificial Sequence
  Description of Artificial Sequence: Synthetic oligonucleotide
aaaggggugucuugcaaga

SEQ ID NO: 896850 - RNA, 19 nt, Artificial Sequence
  Description of Artificial Sequence: Synthetic oligonucleotide
uguuucccggaucaaggag

SEQ ID NO: 896851 - RNA, 19 nt, Artificial Sequence
  Description of Artificial Sequence: Synthetic oligonucleotide
aaugggaucacgagguuca

SEQ ID NO: 896852 - RNA, 19 nt, Artificial Sequence
  Description of Artificial Sequence: Synthetic oligonucleotide
uauaggaaaucauaaccuu

SEQ ID NO: 896853 - RNA, 19 nt, Artificial Sequence
  Description of Artificial Sequence: Synthetic oligonucleotide
caggugugcaaauuagagg

SEQ ID NO: 896854 - RNA, 19 nt, Artificial Sequence
  Description of Artificial Sequence: Synthetic oligonucleotide
uuucuagcccuauaggaaa

SEQ ID NO: 896855 - RNA, 19 nt, Artificial Sequence
  Description of Artificial Sequence: Synthetic oligonucleotide
aguuaguaaaagaaagaug

SEQ ID NO: 896856 - RNA, 19 nt, Artificial Sequence
  Description of Artificial Sequence: Synthetic oligonucleotide
uuccuuuagacacauugua

SEQ ID NO: 896857 - RNA, 19 nt, Artificial Sequence
  Description of Artificial Sequence: Synthetic oligonucleotide
uuuagagaggucuccacua

SEQ ID NO: 896858 - RNA, 19 nt, Artificial Sequence
  Description of Artificial Sequence: Synthetic oligonucleotide
acaauggaugucugcagag

SEQ ID NO: 896859 - RNA, 19 nt, Artificial Sequence
  Description of Artificial Sequence: Synthetic oligonucleotide
ugauugagguggcuccugg

SEQ ID NO: 896860 - RNA, 19 nt, Artificial Sequence
  Description of Artificial Sequence: Synthetic oligonucleotide
ucuuaggagucccagggau

SEQ ID NO: 896861 - RNA, 19 nt, Artificial Sequence
  Description of Artificial Sequence: Synthetic oligonucleotide
gagagguuggaguuaucag

SEQ ID NO: 896862 - RNA, 19 nt, Artificial Sequence
  Description of Artificial Sequence: Synthetic oligonucleotide
ugauccccucuaaagagca

SEQ ID NO: 896863 - RNA, 19 nt, Artificial Sequence
  Description of Artificial Sequence: Synthetic oligonucleotide
ugagcaucuaaaagggguc

SEQ ID NO: 896864 - RNA, 19 nt, Artificial Sequence
  Description of Artificial Sequence: Synthetic oligonucleotide
uuucucagugcaauacaga

SEQ ID NO: 896865 - RNA, 19 nt, Artificial Sequence
  Description of Artificial Sequence: Synthetic oligonucleotide
ucacugaaagggcugggca

SEQ ID NO: 896866 - RNA, 19 nt, Artificial Sequence
  Description of Artificial Sequence: Synthetic oligonucleotide
guuaucagcagaaggaaca

SEQ ID NO: 896867 - RNA, 19 nt, Artificial Sequence
  Description of Artificial Sequence: Synthetic oligonucleotide
cuugaagguccaaagucug

SEQ ID NO: 896868 - RNA, 19 nt, Artificial Sequence
  Description of Artificial Sequence: Synthetic oligonucleotide
cucuaaagagcaucuguac

SEQ ID NO: 896869 - RNA, 19 nt, Artificial Sequence
  Description of Artificial Sequence: Synthetic oligonucleotide
ucuguaucaggcccuuccc

SEQ ID NO: 896870 - RNA, 19 nt, Artificial Sequence
  Description of Artificial Sequence: Synthetic oligonucleotide
cugggaagucccuugagug

SEQ ID NO: 896871 - RNA, 19 nt, Artificial Sequence
  Description of Artificial Sequence: Synthetic oligonucleotide
ucaauuccgcgauuuucag

SEQ ID NO: 896872 - RNA, 19 nt, Artificial Sequence
  Description of Artificial Sequence: Synthetic oligonucleotide
ucugggaagucccuugagu

SEQ ID NO: 896873 - RNA, 19 nt, Artificial Sequence
  Description of Artificial Sequence: Synthetic oligonucleotide
ccaaagaccaccucguggg

SEQ ID NO: 896874 - RNA, 19 nt, Artificial Sequence
  Description of Artificial Sequence: Synthetic oligonucleotide
uuaagggagaagaggcgcu

SEQ ID NO: 896875 - RNA, 19 nt, Artificial Sequence
  Description of Artificial Sequence: Synthetic oligonucleotide
ugaacgugcuggacagugg

SEQ ID NO: 896876 - RNA, 19 nt, Artificial Sequence
  Description of Artificial Sequence: Synthetic oligonucleotide
uuccugaauggaaauucca

SEQ ID NO: 896877 - RNA, 19 nt, Artificial Sequence
  Description of Artificial Sequence: Synthetic oligonucleotide
agaggucuccacuauagaa

SEQ ID NO: 896878 - RNA, 19 nt, Artificial Sequence
  Description of Artificial Sequence: Synthetic oligonucleotide
aguuaucagcagaaggaac

SEQ ID NO: 896879 - RNA, 19 nt, Artificial Sequence
  Description of Artificial Sequence: Synthetic oligonucleotide
agagguuaagacucuucug

SEQ ID NO: 896880 - RNA, 19 nt, Artificial Sequence
  Description of Artificial Sequence: Synthetic oligonucleotide
uguuauggaagcgggagaa

SEQ ID NO: 896881 - RNA, 19 nt, Artificial Sequence
  Description of Artificial Sequence: Synthetic oligonucleotide
gguaggggaaucuuuauga

SEQ ID NO: 896882 - RNA, 19 nt, Artificial Sequence
  Description of Artificial Sequence: Synthetic oligonucleotide
uggaaauuccauucacagu

SEQ ID NO: 896883 - RNA, 19 nt, Artificial Sequence
  Description of Artificial Sequence: Synthetic oligonucleotide
gauaaccaacaugucacug

SEQ ID NO: 896884 - RNA, 19 nt, Artificial Sequence
  Description of Artificial Sequence: Synthetic oligonucleotide
gacgggcaaagccagggag

SEQ ID NO: 896885 - RNA, 19 nt, Artificial Sequence
  Description of Artificial Sequence: Synthetic oligonucleotide
ggaaucaucgccaucagca

SEQ ID NO: 896886 - RNA, 19 nt, Artificial Sequence
  Description of Artificial Sequence: Synthetic oligonucleotide
aauccacacuuaugaagga

SEQ ID NO: 896887 - RNA, 19 nt, Artificial Sequence
  Description of Artificial Sequence: Synthetic oligonucleotide
gacugugcauucaggacgg

SEQ ID NO: 896888 - RNA, 19 nt, Artificial Sequence
  Description of Artificial Sequence: Synthetic oligonucleotide
aagaccaccucgugggccu

SEQ ID NO: 896889 - RNA, 19 nt, Artificial Sequence
  Description of Artificial Sequence: Synthetic oligonucleotide
auuagaggcuggcccgccc

SEQ ID NO: 896890 - RNA, 19 nt, Artificial Sequence
  Description of Artificial Sequence: Synthetic oligonucleotide
gucuguaucaggcccuucc

SEQ ID NO: 896891 - RNA, 19 nt, Artificial Sequence
  Description of Artificial Sequence: Synthetic oligonucleotide
cuauagaaggcucuucaca

SEQ ID NO: 896892 - RNA, 19 nt, Artificial Sequence
  Description of Artificial Sequence: Synthetic oligonucleotide
gacaauggaugucugcaga

SEQ ID NO: 896893 - RNA, 19 nt, Artificial Sequence
  Description of Artificial Sequence: Synthetic oligonucleotide
gggaucacgagguucauac

SEQ ID NO: 896894 - RNA, 19 nt, Artificial Sequence
  Description of Artificial Sequence: Synthetic oligonucleotide
guucauacccucuuuucuc

SEQ ID NO: 896895 - RNA, 19 nt, Artificial Sequence
  Description of Artificial Sequence: Synthetic oligonucleotide
gaugguuaccguccuccag

SEQ ID NO: 896896 - RNA, 19 nt, Artificial Sequence
  Description of Artificial Sequence: Synthetic oligonucleotide
gggacuaaugcuucccugg

SEQ ID NO: 896897 - RNA, 19 nt, Artificial Sequence
  Description of Artificial Sequence: Synthetic oligonucleotide
ucauaaccuuuagagaggu

SEQ ID NO: 896898 - RNA, 19 nt, Artificial Sequence
  Description of Artificial Sequence: Synthetic oligonucleotide
uauggaagcgggagaauua

SEQ ID NO: 896899 - RNA, 19 nt, Artificial Sequence
  Description of Artificial Sequence: Synthetic oligonucleotide
gagccuguuauggaagcgg

SEQ ID NO: 896900 - RNA, 19 nt, Artificial Sequence
  Description of Artificial Sequence: Synthetic oligonucleotide
cauuuccucccuuucuagc

SEQ ID NO: 896901 - RNA, 19 nt, Artificial Sequence
  Description of Artificial Sequence: Synthetic oligonucleotide
cacgauaaccaacauguca

SEQ ID NO: 896902 - RNA, 19 nt, Artificial Sequence
  Description of Artificial Sequence: Synthetic oligonucleotide
agagaggucuccacuauag

SEQ ID NO: 896903 - RNA, 19 nt, Artificial Sequence
  Description of Artificial Sequence: Synthetic oligonucleotide
aucaaucuaucuaaacuca

SEQ ID NO: 896904 - RNA, 19 nt, Artificial Sequence
  Description of Artificial Sequence: Synthetic oligonucleotide
auccacgauaaccaacaug

SEQ ID NO: 896905 - RNA, 19 nt, Artificial Sequence
  Description of Artificial Sequence: Synthetic oligonucleotide
uaagccauccaaagaccac

SEQ ID NO: 896906 - RNA, 19 nt, Artificial Sequence
  Description of Artificial Sequence: Synthetic oligonucleotide
uaaccuuuagagaggucuc

SEQ ID NO: 896907 - RNA, 19 nt, Artificial Sequence
  Description of Artificial Sequence: Synthetic oligonucleotide
augcggcauaagcagcugc

SEQ ID NO: 896908 - RNA, 19 nt, Artificial Sequence
  Description of Artificial Sequence: Synthetic oligonucleotide
uuaccguccuccagcgggg

SEQ ID NO: 896909 - RNA, 19 nt, Artificial Sequence
  Description of Artificial Sequence: Synthetic oligonucleotide
cugcuggucauguggaggc

SEQ ID NO: 896910 - RNA, 19 nt, Artificial Sequence
  Description of Artificial Sequence: Synthetic oligonucleotide
ugguuaccguccuccagcg

SEQ ID NO: 896911 - RNA, 19 nt, Artificial Sequence
  Description of Artificial Sequence: Synthetic oligonucleotide
caauuccgcgauuuucagg

SEQ ID NO: 896912 - RNA, 19 nt, Artificial Sequence
  Description of Artificial Sequence: Synthetic oligonucleotide
uuuccccuacaccuacucc

SEQ ID NO: 896913 - RNA, 19 nt, Artificial Sequence
  Description of Artificial Sequence: Synthetic oligonucleotide
agagagguuggaguuauca

SEQ ID NO: 896914 - RNA, 19 nt, Artificial Sequence
  Description of Artificial Sequence: Synthetic oligonucleotide
acuguggauaccagggaac

SEQ ID NO: 896915 - RNA, 19 nt, Artificial Sequence
  Description of Artificial Sequence: Synthetic oligonucleotide
ugcggcauaagcagcugca

SEQ ID NO: 896916 - RNA, 19 nt, Artificial Sequence
  Description of Artificial Sequence: Synthetic oligonucleotide
gucauguggaggcucuuag

SEQ ID NO: 896917 - RNA, 19 nt, Artificial Sequence
  Description of Artificial Sequence: Synthetic oligonucleotide
cuuucuagcccuauaggaa

SEQ ID NO: 896918 - RNA, 19 nt, Artificial Sequence
  Description of Artificial Sequence: Synthetic oligonucleotide
ucgccaucagcagagaggu

SEQ ID NO: 896919 - RNA, 19 nt, Artificial Sequence
  Description of Artificial Sequence: Synthetic oligonucleotide
aucgccaucagcagagagg

SEQ ID NO: 896920 - RNA, 19 nt, Artificial Sequence
  Description of Artificial Sequence: Synthetic oligonucleotide
aggggaaucuuuaugauuu

SEQ ID NO: 896921 - RNA, 19 nt, Artificial Sequence
  Description of Artificial Sequence: Synthetic oligonucleotide
guggaaagcccucccagcc

SEQ ID NO: 896922 - RNA, 19 nt, Artificial Sequence
  Description of Artificial Sequence: Synthetic oligonucleotide
uuggguaggggaaucuuua

SEQ ID NO: 896923 - RNA, 19 nt, Artificial Sequence
  Description of Artificial Sequence: Synthetic oligonucleotide
aucaucgccaucagcagag

SEQ ID NO: 896924 - RNA, 19 nt, Artificial Sequence
  Description of Artificial Sequence: Synthetic oligonucleotide
uggcucgagacugaggagc

SEQ ID NO: 896925 - RNA, 19 nt, Artificial Sequence
  Description of Artificial Sequence: Synthetic oligonucleotide
uuagagaggucuccacuau

SEQ ID NO: 896926 - RNA, 19 nt, Artificial Sequence
  Description of Artificial Sequence: Synthetic oligonucleotide
gagaauuaguggcucgaga

SEQ ID NO: 896927 - RNA, 19 nt, Artificial Sequence
  Description of Artificial Sequence: Synthetic oligonucleotide
gugucuugcaagagggugg

SEQ ID NO: 896928 - RNA, 19 nt, Artificial Sequence
  Description of Artificial Sequence: Synthetic oligonucleotide
uuccgcgauuuucaggugu

SEQ ID NO: 896929 - RNA, 19 nt, Artificial Sequence
  Description of Artificial Sequence: Synthetic oligonucleotide
acacuuaugaaggaaucau

SEQ ID NO: 896930 - RNA, 19 nt, Artificial Sequence
  Description of Artificial Sequence: Synthetic oligonucleotide
aucuaaaaggggucuguau

SEQ ID NO: 896931 - RNA, 19 nt, Artificial Sequence
  Description of Artificial Sequence: Synthetic oligonucleotide
ggaguuaucagcagaagga

SEQ ID NO: 896932 - RNA, 19 nt, Artificial Sequence
  Description of Artificial Sequence: Synthetic oligonucleotide
gauguggauggagacugcc

SEQ ID NO: 896933 - RNA, 19 nt, Artificial Sequence
  Description of Artificial Sequence: Synthetic oligonucleotide
uggaaagcccucccagccc

SEQ ID NO: 896934 - RNA, 19 nt, Artificial Sequence
  Description of Artificial Sequence: Synthetic oligonucleotide
uaagggacauggucagagc

SEQ ID NO: 896935 - RNA, 19 nt, Artificial Sequence
  Description of Artificial Sequence: Synthetic oligonucleotide
agauaggaugcaagaugcc

SEQ ID NO: 896936 - RNA, 19 nt, Artificial Sequence
  Description of Artificial Sequence: Synthetic oligonucleotide
uuauggaagcgggagaauu

SEQ ID NO: 896937 - RNA, 19 nt, Artificial Sequence
  Description of Artificial Sequence: Synthetic oligonucleotide
uccgcgauuuucaggugug

SEQ ID NO: 896938 - RNA, 19 nt, Artificial Sequence
  Description of Artificial Sequence: Synthetic oligonucleotide
auccccucuaaagagcauc

SEQ ID NO: 896939 - RNA, 19 nt, Artificial Sequence
  Description of Artificial Sequence: Synthetic oligonucleotide
agcaagcucaggcgagugg

SEQ ID NO: 896940 - RNA, 19 nt, Artificial Sequence
  Description of Artificial Sequence: Synthetic oligonucleotide
ucccggaucaaggagucug

SEQ ID NO: 896941 - RNA, 19 nt, Artificial Sequence
  Description of Artificial Sequence: Synthetic oligonucleotide
uuaggagucccagggauau

SEQ ID NO: 896942 - RNA, 19 nt, Artificial Sequence
  Description of Artificial Sequence: Synthetic oligonucleotide
cacuauagaaggcucuuca

SEQ ID NO: 896943 - RNA, 19 nt, Artificial Sequence
  Description of Artificial Sequence: Synthetic oligonucleotide
auggaagcgggagaauuag

SEQ ID NO: 896944 - RNA, 19 nt, Artificial Sequence
  Description of Artificial Sequence: Synthetic oligonucleotide
uccuacucuccagauagga

SEQ ID NO: 896945 - RNA, 19 nt, Artificial Sequence
  Description of Artificial Sequence: Synthetic oligonucleotide
guaucaggcccuuccccgg

SEQ ID NO: 896946 - RNA, 19 nt, Artificial Sequence
  Description of Artificial Sequence: Synthetic oligonucleotide
uuucccggaucaaggaguc

SEQ ID NO: 896947 - RNA, 19 nt, Artificial Sequence
  Description of Artificial Sequence: Synthetic oligonucleotide
auuccuuuagacacauugu

SEQ ID NO: 896948 - RNA, 19 nt, Artificial Sequence
  Description of Artificial Sequence: Synthetic oligonucleotide
gggaacuuaagggagaaga

SEQ ID NO: 896949 - RNA, 19 nt, Artificial Sequence
  Description of Artificial Sequence: Synthetic oligonucleotide
uuccuacucuccagauagg

SEQ ID NO: 896950 - RNA, 19 nt, Artificial Sequence
  Description of Artificial Sequence: Synthetic oligonucleotide
aaggaacaaaugggaucac

SEQ ID NO: 896951 - RNA, 19 nt, Artificial Sequence
  Description of Artificial Sequence: Synthetic oligonucleotide
ccagauaggaugcaagaug

SEQ ID NO: 896952 - RNA, 19 nt, Artificial Sequence
  Description of Artificial Sequence: Synthetic oligonucleotide
cuguggauaccagggaacc

SEQ ID NO: 896953 - RNA, 19 nt, Artificial Sequence
  Description of Artificial Sequence: Synthetic oligonucleotide
agacacauuguacccguau

SEQ ID NO: 896954 - RNA, 19 nt, Artificial Sequence
  Description of Artificial Sequence: Synthetic oligonucleotide
ggaacuuaagggagaagag

SEQ ID NO: 896955 - RNA, 19 nt, Artificial Sequence
  Description of Artificial Sequence: Synthetic oligonucleotide
cugagcaucuaaaaggggu

SEQ ID NO: 896956 - RNA, 19 nt, Artificial Sequence
  Description of Artificial Sequence: Synthetic oligonucleotide
uggacaguggaggaaugcu

SEQ ID NO: 896957 - RNA, 19 nt, Artificial Sequence
  Description of Artificial Sequence: Synthetic oligonucleotide
ggaaaucauaaccuuuaga

SEQ ID NO: 896958 - RNA, 19 nt, Artificial Sequence
  Description of Artificial Sequence: Synthetic oligonucleotide
ggaagcgggagaauuagug

SEQ ID NO: 896959 - RNA, 19 nt, Artificial Sequence
  Description of Artificial Sequence: Synthetic oligonucleotide
gaauuaguggcucgagacu

SEQ ID NO: 896960 - RNA, 19 nt, Artificial Sequence
  Description of Artificial Sequence: Synthetic oligonucleotide
agagaugguuaccguccuc

SEQ ID NO: 896961 - RNA, 19 nt, Artificial Sequence
  Description of Artificial Sequence: Synthetic oligonucleotide
agaaaggggugucuugcaa

SEQ ID NO: 896962 - RNA, 19 nt, Artificial Sequence
  Description of Artificial Sequence: Synthetic oligonucleotide
uccagauaggaugcaagau

SEQ ID NO: 896963 - RNA, 19 nt, Artificial Sequence
  Description of Artificial Sequence: Synthetic oligonucleotide
auuguacccguaugcggca

SEQ ID NO: 896964 - RNA, 19 nt, Artificial Sequence
  Description of Artificial Sequence: Synthetic oligonucleotide
cggaaagagguuaagacuc

SEQ ID NO: 896965 - RNA, 19 nt, Artificial Sequence
  Description of Artificial Sequence: Synthetic oligonucleotide
agaucucacugaaagggcu

SEQ ID NO: 896966 - RNA, 19 nt, Artificial Sequence
  Description of Artificial Sequence: Synthetic oligonucleotide
cauccuacagccaccaucu

SEQ ID NO: 896967 - RNA, 19 nt, Artificial Sequence
  Description of Artificial Sequence: Synthetic oligonucleotide
ucgagacugaggagcugag

SEQ ID NO: 896968 - RNA, 19 nt, Artificial Sequence
  Description of Artificial Sequence: Synthetic oligonucleotide
gugaacgugcuggacagug

SEQ ID NO: 896969 - RNA, 19 nt, Artificial Sequence
  Description of Artificial Sequence: Synthetic oligonucleotide
uucuagcccuauaggaaau

SEQ ID NO: 896970 - RNA, 19 nt, Artificial Sequence
  Description of Artificial Sequence: Synthetic oligonucleotide
cccggaaagagguuaagac

SEQ ID NO: 896971 - RNA, 19 nt, Artificial Sequence
  Description of Artificial Sequence: Synthetic oligonucleotide
agagccuguuauggaagcg

SEQ ID NO: 896972 - RNA, 19 nt, Artificial Sequence
  Description of Artificial Sequence: Synthetic oligonucleotide
augaaggaaucaucgccau

SEQ ID NO: 896973 - RNA, 19 nt, Artificial Sequence
  Description of Artificial Sequence: Synthetic oligonucleotide
ucgguugaaggaagcugga

SEQ ID NO: 896974 - RNA, 19 nt, Artificial Sequence
  Description of Artificial Sequence: Synthetic oligonucleotide
ggaacaaaugggaucacga

SEQ ID NO: 896975 - RNA, 19 nt, Artificial Sequence
  Description of Artificial Sequence: Synthetic oligonucleotide
agacagagccuguuaugga

SEQ ID NO: 896976 - RNA, 19 nt, Artificial Sequence
  Description of Artificial Sequence: Synthetic oligonucleotide
agucccagggauauuauuu

SEQ ID NO: 896977 - RNA, 19 nt, Artificial Sequence
  Description of Artificial Sequence: Synthetic oligonucleotide
uagcccuauaggaaaucau

SEQ ID NO: 896978 - RNA, 19 nt, Artificial Sequence
  Description of Artificial Sequence: Synthetic oligonucleotide
ugucuugcaagaggguggu

SEQ ID NO: 896979 - RNA, 19 nt, Artificial Sequence
  Description of Artificial Sequence: Synthetic oligonucleotide
ucauacccucuuuucuccu

SEQ ID NO: 896980 - RNA, 19 nt, Artificial Sequence
  Description of Artificial Sequence: Synthetic oligonucleotide
ggugucuugcaagagggug

SEQ ID NO: 896981 - RNA, 19 nt, Artificial Sequence
  Description of Artificial Sequence: Synthetic oligonucleotide
aggaugcaagaugccacac

SEQ ID NO: 896982 - RNA, 19 nt, Artificial Sequence
  Description of Artificial Sequence: Synthetic oligonucleotide
uggcugaauccacacuuau

SEQ ID NO: 896983 - RNA, 19 nt, Artificial Sequence
  Description of Artificial Sequence: Synthetic oligonucleotide
gcaagcucaggcgaguggg

SEQ ID NO: 896984 - RNA, 19 nt, Artificial Sequence
  Description of Artificial Sequence: Synthetic oligonucleotide
agccuguuauggaagcggg

SEQ ID NO: 896985 - RNA, 19 nt, Artificial Sequence
  Description of Artificial Sequence: Synthetic oligonucleotide
ggggcugacgggcaaagcc

SEQ ID NO: 896986 - RNA, 19 nt, Artificial Sequence
  Description of Artificial Sequence: Synthetic oligonucleotide
agguuggaguuaucagcag

SEQ ID NO: 896987 - RNA, 19 nt, Artificial Sequence
  Description of Artificial Sequence: Synthetic oligonucleotide
gcagagaugguuaccgucc

SEQ ID NO: 896988 - RNA, 19 nt, Artificial Sequence
  Description of Artificial Sequence: Synthetic oligonucleotide
ggcauaagcagcugcagaa

SEQ ID NO: 896989 - RNA, 19 nt, Artificial Sequence
  Description of Artificial Sequence: Synthetic oligonucleotide
uaaacucaauuccgcgauu

SEQ ID NO: 896990 - RNA, 19 nt, Artificial Sequence
  Description of Artificial Sequence: Synthetic oligonucleotide
gagaaaggggugucuugca

SEQ ID NO: 896991 - RNA, 19 nt, Artificial Sequence
  Description of Artificial Sequence: Synthetic oligonucleotide
uagagaggucuccacuaua

SEQ ID NO: 896992 - RNA, 19 nt, Artificial Sequence
  Description of Artificial Sequence: Synthetic oligonucleotide
auccaaagaccaccucgug

SEQ ID NO: 896993 - RNA, 19 nt, Artificial Sequence
  Description of Artificial Sequence: Synthetic oligonucleotide
uggaagcgggagaauuagu

SEQ ID NO: 896994 - RNA, 19 nt, Artificial Sequence
  Description of Artificial Sequence: Synthetic oligonucleotide
ccguaugcggcauaagcag

SEQ ID NO: 896995 - RNA, 19 nt, Artificial Sequence
  Description of Artificial Sequence: Synthetic oligonucleotide
caucgccaucagcagagag

SEQ ID NO: 896996 - RNA, 19 nt, Artificial Sequence
  Description of Artificial Sequence: Synthetic oligonucleotide
guacacaggagucaggguu

SEQ ID NO: 896997 - RNA, 19 nt, Artificial Sequence
  Description of Artificial Sequence: Synthetic oligonucleotide
agaugguuaccguccucca

SEQ ID NO: 896998 - RNA, 19 nt, Artificial Sequence
  Description of Artificial Sequence: Synthetic oligonucleotide
ugacgggcaaagccaggga

SEQ ID NO: 896999 - RNA, 19 nt, Artificial Sequence
  Description of Artificial Sequence: Synthetic oligonucleotide
uaucaggcccuuccccgga

SEQ ID NO: 897000 - RNA, 19 nt, Artificial Sequence
  Description of Artificial Sequence: Synthetic oligonucleotide
uuuuccccucucagagggc

SEQ ID NO: 897001 - RNA, 19 nt, Artificial Sequence
  Description of Artificial Sequence: Synthetic oligonucleotide
gguaagccauccaaagacc

SEQ ID NO: 897002 - RNA, 19 nt, Artificial Sequence
  Description of Artificial Sequence: Synthetic oligonucleotide
uccgagacagagccuguua

SEQ ID NO: 897003 - RNA, 19 nt, Artificial Sequence
  Description of Artificial Sequence: Synthetic oligonucleotide
cuaaacucaauuccgcgau

SEQ ID NO: 897004 - RNA, 19 nt, Artificial Sequence
  Description of Artificial Sequence: Synthetic oligonucleotide
agcaucuaaaaggggucug

SEQ ID NO: 897005 - RNA, 19 nt, Artificial Sequence
  Description of Artificial Sequence: Synthetic oligonucleotide
cuggugggacuaaugcuuc

SEQ ID NO: 897006 - RNA, 19 nt, Artificial Sequence
  Description of Artificial Sequence: Synthetic oligonucleotide
gguggaaagcccucccagc

SEQ ID NO: 897007 - RNA, 19 nt, Artificial Sequence
  Description of Artificial Sequence: Synthetic oligonucleotide
uccccuacaccuacuccaa

SEQ ID NO: 897008 - RNA, 19 nt, Artificial Sequence
  Description of Artificial Sequence: Synthetic oligonucleotide
aacgugcuggacaguggag

SEQ ID NO: 897009 - RNA, 19 nt, Artificial Sequence
  Description of Artificial Sequence: Synthetic oligonucleotide
ucacgagguucauacccuc

SEQ ID NO: 897010 - RNA, 19 nt, Artificial Sequence
  Description of Artificial Sequence: Synthetic oligonucleotide
ucacagcaccgguggagcc

SEQ ID NO: 897011 - RNA, 19 nt, Artificial Sequence
  Description of Artificial Sequence: Synthetic oligonucleotide
cacacuuaugaaggaauca

SEQ ID NO: 897012 - RNA, 19 nt, Artificial Sequence
  Description of Artificial Sequence: Synthetic oligonucleotide
uuugcccuguuucccggau

SEQ ID NO: 897013 - RNA, 19 nt, Artificial Sequence
  Description of Artificial Sequence: Synthetic oligonucleotide
uguggcaaaugggguuuag

SEQ ID NO: 897014 - RNA, 19 nt, Artificial Sequence
  Description of Artificial Sequence: Synthetic oligonucleotide
ccaguuaguaaaagaaaga

SEQ ID NO: 897015 - RNA, 19 nt, Artificial Sequence
  Description of Artificial Sequence: Synthetic oligonucleotide
uccacuauagaaggcucuu

SEQ ID NO: 897016 - RNA, 19 nt, Artificial Sequence
  Description of Artificial Sequence: Synthetic oligonucleotide
ggguaggggaaucuuuaug

SEQ ID NO: 897017 - RNA, 19 nt, Artificial Sequence
  Description of Artificial Sequence: Synthetic oligonucleotide
cugaaagggcugggcaugg

SEQ ID NO: 897018 - RNA, 19 nt, Artificial Sequence
  Description of Artificial Sequence: Synthetic oligonucleotide
gugcauucaggacggagaa

SEQ ID NO: 897019 - RNA, 19 nt, Artificial Sequence
  Description of Artificial Sequence: Synthetic oligonucleotide
cucacuccauuuuauuuua

SEQ ID NO: 897020 - RNA, 19 nt, Artificial Sequence
  Description of Artificial Sequence: Synthetic oligonucleotide
cugugcauucaggacggag

SEQ ID NO: 897021 - RNA, 19 nt, Artificial Sequence
  Description of Artificial Sequence: Synthetic oligonucleotide
gccaagcaggggcugacgg

SEQ ID NO: 897022 - RNA, 19 nt, Artificial Sequence
  Description of Artificial Sequence: Synthetic oligonucleotide
acgagguucauacccucuu

SEQ ID NO: 897023 - RNA, 19 nt, Artificial Sequence
  Description of Artificial Sequence: Synthetic oligonucleotide
agcccuauaggaaaucaua

SEQ ID NO: 897024 - RNA, 19 nt, Artificial Sequence
  Description of Artificial Sequence: Synthetic oligonucleotide
uuccccggaaagagguuaa

SEQ ID NO: 897025 - RNA, 19 nt, Artificial Sequence
  Description of Artificial Sequence: Synthetic oligonucleotide
ucuagcccuauaggaaauc

SEQ ID NO: 897026 - RNA, 19 nt, Artificial Sequence
  Description of Artificial Sequence: Synthetic oligonucleotide
ugaagcgcucuggacugug

SEQ ID NO: 897027 - RNA, 19 nt, Artificial Sequence
  Description of Artificial Sequence: Synthetic oligonucleotide
ucccuggugugaacgugcu

SEQ ID NO: 897028 - RNA, 19 nt, Artificial Sequence
  Description of Artificial Sequence: Synthetic oligonucleotide
aggucggacaauggauguc

SEQ ID NO: 897029 - RNA, 19 nt, Artificial Sequence
  Description of Artificial Sequence: Synthetic oligonucleotide
gagacccugaagcgcucug

SEQ ID NO: 897030 - RNA, 19 nt, Artificial Sequence
  Description of Artificial Sequence: Synthetic oligonucleotide
ggcagagaugguuaccguc

SEQ ID NO: 897031 - RNA, 19 nt, Artificial Sequence
  Description of Artificial Sequence: Synthetic oligonucleotide
ugccauccuacagccacca

SEQ ID NO: 897032 - RNA, 19 nt, Artificial Sequence
  Description of Artificial Sequence: Synthetic oligonucleotide
cauaaccuuuagagagguc

SEQ ID NO: 897033 - RNA, 19 nt, Artificial Sequence
  Description of Artificial Sequence: Synthetic oligonucleotide
cuguuauggaagcgggaga

SEQ ID NO: 897034 - RNA, 19 nt, Artificial Sequence
  Description of Artificial Sequence: Synthetic oligonucleotide
cugguuucgguugaaggaa

SEQ ID NO: 897035 - RNA, 19 nt, Artificial Sequence
  Description of Artificial Sequence: Synthetic oligonucleotide
gguucauacccucuuuucu

SEQ ID NO: 897036 - RNA, 19 nt, Artificial Sequence
  Description of Artificial Sequence: Synthetic oligonucleotide
ccugguuucgguugaagga

SEQ ID NO: 897037 - RNA, 19 nt, Artificial Sequence
  Description of Artificial Sequence: Synthetic oligonucleotide
auuccgcgauuuucaggug

SEQ ID NO: 897038 - RNA, 19 nt, Artificial Sequence
  Description of Artificial Sequence: Synthetic oligonucleotide
cccuuucuagcccuauagg

SEQ ID NO: 897039 - RNA, 19 nt, Artificial Sequence
  Description of Artificial Sequence: Synthetic oligonucleotide
ccauccuacagccaccauc

SEQ ID NO: 897040 - RNA, 19 nt, Artificial Sequence
  Description of Artificial Sequence: Synthetic oligonucleotide
cagcccgccccuuuucccc

SEQ ID NO: 897041 - RNA, 19 nt, Artificial Sequence
  Description of Artificial Sequence: Synthetic oligonucleotide
uguccgagacagagccugu

SEQ ID NO: 897042 - RNA, 19 nt, Artificial Sequence
  Description of Artificial Sequence: Synthetic oligonucleotide
aggcucuuaggagucccag

SEQ ID NO: 897043 - RNA, 19 nt, Artificial Sequence
  Description of Artificial Sequence: Synthetic oligonucleotide
gagggcagagaugguuacc

SEQ ID NO: 897044 - RNA, 19 nt, Artificial Sequence
  Description of Artificial Sequence: Synthetic oligonucleotide
cucgagacugaggagcuga

SEQ ID NO: 897045 - RNA, 19 nt, Artificial Sequence
  Description of Artificial Sequence: Synthetic oligonucleotide
gaaauuccauucacagugu

SEQ ID NO: 897046 - RNA, 19 nt, Artificial Sequence
  Description of Artificial Sequence: Synthetic oligonucleotide
ggacugcuugcugagauuc

SEQ ID NO: 897047 - RNA, 19 nt, Artificial Sequence
  Description of Artificial Sequence: Synthetic oligonucleotide
agcgggagaauuaguggcu

SEQ ID NO: 897048 - RNA, 19 nt, Artificial Sequence
  Description of Artificial Sequence: Synthetic oligonucleotide
cugcacacuucaguaauga

SEQ ID NO: 897049 - RNA, 19 nt, Artificial Sequence
  Description of Artificial Sequence: Synthetic oligonucleotide
aaugggguuuagagacccu

SEQ ID NO: 897050 - RNA, 19 nt, Artificial Sequence
  Description of Artificial Sequence: Synthetic oligonucleotide
caguaaugacacuguggca

SEQ ID NO: 897051 - RNA, 19 nt, Artificial Sequence
  Description of Artificial Sequence: Synthetic oligonucleotide
ggugggacuaaugcuuccc

SEQ ID NO: 897052 - RNA, 19 nt, Artificial Sequence
  Description of Artificial Sequence: Synthetic oligonucleotide
gcaggucggacaauggaug

SEQ ID NO: 897053 - RNA, 19 nt, Artificial Sequence
  Description of Artificial Sequence: Synthetic oligonucleotide
guuucccggaucaaggagu

SEQ ID NO: 897054 - RNA, 19 nt, Artificial Sequence
  Description of Artificial Sequence: Synthetic oligonucleotide
cugcugauugagguggcuc

SEQ ID NO: 897055 - RNA, 19 nt, Artificial Sequence
  Description of Artificial Sequence: Synthetic oligonucleotide
uguacccguaugcggcaua

SEQ ID NO: 897056 - RNA, 19 nt, Artificial Sequence
  Description of Artificial Sequence: Synthetic oligonucleotide
auuaguggcucgagacuga

SEQ ID NO: 897057 - RNA, 19 nt, Artificial Sequence
  Description of Artificial Sequence: Synthetic oligonucleotide
ccacacuuaugaaggaauc

SEQ ID NO: 897058 - RNA, 19 nt, Artificial Sequence
  Description of Artificial Sequence: Synthetic oligonucleotide
cuuaggagucccagggaua

SEQ ID NO: 897059 - RNA, 19 nt, Artificial Sequence
  Description of Artificial Sequence: Synthetic oligonucleotide
agcgcucuggacuguggau

SEQ ID NO: 897060 - RNA, 19 nt, Artificial Sequence
  Description of Artificial Sequence: Synthetic oligonucleotide
uaaugacacuguggcaaau

SEQ ID NO: 897061 - RNA, 19 nt, Artificial Sequence
  Description of Artificial Sequence: Synthetic oligonucleotide
ggaucacgagguucauacc

SEQ ID NO: 897062 - RNA, 19 nt, Artificial Sequence
  Description of Artificial Sequence: Synthetic oligonucleotide
cgguggagccuucauaagg

SEQ ID NO: 897063 - RNA, 19 nt, Artificial Sequence
  Description of Artificial Sequence: Synthetic oligonucleotide
auacagccaagcaggggcu

SEQ ID NO: 897064 - RNA, 19 nt, Artificial Sequence
  Description of Artificial Sequence: Synthetic oligonucleotide
ccuuuagagaggucuccac

SEQ ID NO: 897065 - RNA, 19 nt, Artificial Sequence
  Description of Artificial Sequence: Synthetic oligonucleotide
uagacacauuguacccgua

SEQ ID NO: 897066 - RNA, 19 nt, Artificial Sequence
  Description of Artificial Sequence: Synthetic oligonucleotide
gguuucgguugaaggaagc

SEQ ID NO: 897067 - RNA, 19 nt, Artificial Sequence
  Description of Artificial Sequence: Synthetic oligonucleotide
uccccggaaagagguuaag

SEQ ID NO: 897068 - RNA, 19 nt, Artificial Sequence
  Description of Artificial Sequence: Synthetic oligonucleotide
acgggcaaagccagggaga

SEQ ID NO: 897069 - RNA, 19 nt, Artificial Sequence
  Description of Artificial Sequence: Synthetic oligonucleotide
cucuuaggagucccaggga

SEQ ID NO: 897070 - RNA, 19 nt, Artificial Sequence
  Description of Artificial Sequence: Synthetic oligonucleotide
gcgauuuucaggugugcaa

SEQ ID NO: 897071 - RNA, 19 nt, Artificial Sequence
  Description of Artificial Sequence: Synthetic oligonucleotide
cugauugagguggcuccug

SEQ ID NO: 897072 - RNA, 19 nt, Artificial Sequence
  Description of Artificial Sequence: Synthetic oligonucleotide
cacguccugcagcuggcac

SEQ ID NO: 897073 - RNA, 19 nt, Artificial Sequence
  Description of Artificial Sequence: Synthetic oligonucleotide
uggugugaacgugcuggac

SEQ ID NO: 897074 - RNA, 19 nt, Artificial Sequence
  Description of Artificial Sequence: Synthetic oligonucleotide
agccauccaaagaccaccu

SEQ ID NO: 897075 - RNA, 19 nt, Artificial Sequence
  Description of Artificial Sequence: Synthetic oligonucleotide
gagcaucuaaaaggggucu

SEQ ID NO: 897076 - RNA, 19 nt, Artificial Sequence
  Description of Artificial Sequence: Synthetic oligonucleotide
cccguaugcggcauaagca

SEQ ID NO: 897077 - RNA, 19 nt, Artificial Sequence
  Description of Artificial Sequence: Synthetic oligonucleotide
ccuuugcccuguuucccgg

SEQ ID NO: 897078 - RNA, 19 nt, Artificial Sequence
  Description of Artificial Sequence: Synthetic oligonucleotide
cuggugugaacgugcugga

SEQ ID NO: 897079 - RNA, 19 nt, Artificial Sequence
  Description of Artificial Sequence: Synthetic oligonucleotide
gcugggcauggcugaaucc

SEQ ID NO: 897080 - RNA, 19 nt, Artificial Sequence
  Description of Artificial Sequence: Synthetic oligonucleotide
guggauaccagggaaccau

SEQ ID NO: 897081 - RNA, 19 nt, Artificial Sequence
  Description of Artificial Sequence: Synthetic oligonucleotide
uacccguaugcggcauaag

SEQ ID NO: 897082 - RNA, 19 nt, Artificial Sequence
  Description of Artificial Sequence: Synthetic oligonucleotide
ggaggcucuuaggaguccc

SEQ ID NO: 897083 - RNA, 19 nt, Artificial Sequence
  Description of Artificial Sequence: Synthetic oligonucleotide
agccccgagugaccacguc

SEQ ID NO: 897084 - RNA, 19 nt, Artificial Sequence
  Description of Artificial Sequence: Synthetic oligonucleotide
gcccuauaggaaaucauaa

SEQ ID NO: 897085 - RNA, 19 nt, Artificial Sequence
  Description of Artificial Sequence: Synthetic oligonucleotide
acggagaaaggggugucuu

SEQ ID NO: 897086 - RNA, 19 nt, Artificial Sequence
  Description of Artificial Sequence: Synthetic oligonucleotide
ggcagcaagcucaggcgag

SEQ ID NO: 897087 - RNA, 19 nt, Artificial Sequence
  Description of Artificial Sequence: Synthetic oligonucleotide
gguuaccguccuccagcgg

SEQ ID NO: 897088 - RNA, 19 nt, Artificial Sequence
  Description of Artificial Sequence: Synthetic oligonucleotide
gaggcuggcccgcccagaa

SEQ ID NO: 897089 - RNA, 19 nt, Artificial Sequence
  Description of Artificial Sequence: Synthetic oligonucleotide
ucaucgccaucagcagaga

SEQ ID NO: 897090 - RNA, 19 nt, Artificial Sequence
  Description of Artificial Sequence: Synthetic oligonucleotide
ggacuguggauaccaggga

SEQ ID NO: 897091 - RNA, 19 nt, Artificial Sequence
  Description of Artificial Sequence: Synthetic oligonucleotide
uacccucuuuucuccuuuu

SEQ ID NO: 897092 - RNA, 19 nt, Artificial Sequence
  Description of Artificial Sequence: Synthetic oligonucleotide
caucuaaaaggggucugua

SEQ ID NO: 897093 - RNA, 19 nt, Artificial Sequence
  Description of Artificial Sequence: Synthetic oligonucleotide
gggagaauuaguggcucga

SEQ ID NO: 897094 - RNA, 19 nt, Artificial Sequence
  Description of Artificial Sequence: Synthetic oligonucleotide
gguuggugccuuugcccug

SEQ ID NO: 897095 - RNA, 19 nt, Artificial Sequence
  Description of Artificial Sequence: Synthetic oligonucleotide
gcaauacagacagugcaua

SEQ ID NO: 897096 - RNA, 19 nt, Artificial Sequence
  Description of Artificial Sequence: Synthetic oligonucleotide
cuuccccggaaagagguua

SEQ ID NO: 897097 - RNA, 19 nt, Artificial Sequence
  Description of Artificial Sequence: Synthetic oligonucleotide
gggaaucuuuaugauuuaa

SEQ ID NO: 897098 - RNA, 19 nt, Artificial Sequence
  Description of Artificial Sequence: Synthetic oligonucleotide
agccagggagacugugcau

SEQ ID NO: 897099 - RNA, 19 nt, Artificial Sequence
  Description of Artificial Sequence: Synthetic oligonucleotide
auggcugaauccacacuua

SEQ ID NO: 897100 - RNA, 19 nt, Artificial Sequence
  Description of Artificial Sequence: Synthetic oligonucleotide
uccagcgggguuggugccu

SEQ ID NO: 897101 - RNA, 19 nt, Artificial Sequence
  Description of Artificial Sequence: Synthetic oligonucleotide
ccggaaagagguuaagacu

SEQ ID NO: 897102 - RNA, 19 nt, Artificial Sequence
  Description of Artificial Sequence: Synthetic oligonucleotide
gaaagagguuaagacucuu

SEQ ID NO: 897103 - RNA, 19 nt, Artificial Sequence
  Description of Artificial Sequence: Synthetic oligonucleotide
cagcaagcucaggcgagug

SEQ ID NO: 897104 - RNA, 19 nt, Artificial Sequence
  Description of Artificial Sequence: Synthetic oligonucleotide
gaccaccucgugggccugg

SEQ ID NO: 897105 - RNA, 19 nt, Artificial Sequence
  Description of Artificial Sequence: Synthetic oligonucleotide
ggucggacaauggaugucu

SEQ ID NO: 897106 - RNA, 19 nt, Artificial Sequence
  Description of Artificial Sequence: Synthetic oligonucleotide
agcgggguuggugccuuug

SEQ ID NO: 897107 - RNA, 19 nt, Artificial Sequence
  Description of Artificial Sequence: Synthetic oligonucleotide
gaggcucuuaggaguccca

SEQ ID NO: 897108 - RNA, 19 nt, Artificial Sequence
  Description of Artificial Sequence: Synthetic oligonucleotide
ggucuccacuauagaaggc

SEQ ID NO: 897109 - RNA, 19 nt, Artificial Sequence
  Description of Artificial Sequence: Synthetic oligonucleotide
caggucggacaauggaugu

SEQ ID NO: 897110 - RNA, 19 nt, Artificial Sequence
  Description of Artificial Sequence: Synthetic oligonucleotide
gucuccuuacuggcuucug

SEQ ID NO: 897111 - RNA, 19 nt, Artificial Sequence
  Description of Artificial Sequence: Synthetic oligonucleotide
guacccguaugcggcauaa

SEQ ID NO: 897112 - RNA, 19 nt, Artificial Sequence
  Description of Artificial Sequence: Synthetic oligonucleotide
agcccgccccuuuuccccu

SEQ ID NO: 897113 - RNA, 19 nt, Artificial Sequence
  Description of Artificial Sequence: Synthetic oligonucleotide
ggacuaaugcuucccuggu

SEQ ID NO: 897114 - RNA, 19 nt, Artificial Sequence
  Description of Artificial Sequence: Synthetic oligonucleotide
acagcaccgguggagccuu

SEQ ID NO: 897115 - RNA, 19 nt, Artificial Sequence
  Description of Artificial Sequence: Synthetic oligonucleotide
ccuuacuggcuucugggaa

SEQ ID NO: 897116 - RNA, 19 nt, Artificial Sequence
  Description of Artificial Sequence: Synthetic oligonucleotide
gcggcauaagcagcugcag

SEQ ID NO: 897117 - RNA, 19 nt, Artificial Sequence
  Description of Artificial Sequence: Synthetic oligonucleotide
gagucccagggauauuauu

SEQ ID NO: 897118 - RNA, 19 nt, Artificial Sequence
  Description of Artificial Sequence: Synthetic oligonucleotide
gggcugacgggcaaagcca

SEQ ID NO: 897119 - RNA, 19 nt, Artificial Sequence
  Description of Artificial Sequence: Synthetic oligonucleotide
cagggauauuauuuccuuu

SEQ ID NO: 897120 - RNA, 19 nt, Artificial Sequence
  Description of Artificial Sequence: Synthetic oligonucleotide
cucuggcauccacugcaca

SEQ ID NO: 897121 - RNA, 19 nt, Artificial Sequence
  Description of Artificial Sequence: Synthetic oligonucleotide
ccgagugaccacguccugc

SEQ ID NO: 897122 - RNA, 19 nt, Artificial Sequence
  Description of Artificial Sequence: Synthetic oligonucleotide
gacggagaaaggggugucu

SEQ ID NO: 897123 - RNA, 19 nt, Artificial Sequence
  Description of Artificial Sequence: Synthetic oligonucleotide
uucccggaucaaggagucu

SEQ ID NO: 897124 - RNA, 19 nt, Artificial Sequence
  Description of Artificial Sequence: Synthetic oligonucleotide
cugggucauccacgauaac

SEQ ID NO: 897125 - RNA, 19 nt, Artificial Sequence
  Description of Artificial Sequence: Synthetic oligonucleotide
ugaccacguccugcagcug

SEQ ID NO: 897126 - RNA, 19 nt, Artificial Sequence
  Description of Artificial Sequence: Synthetic oligonucleotide
agcaccgguggagccuuca

SEQ ID NO: 897127 - RNA, 19 nt, Artificial Sequence
  Description of Artificial Sequence: Synthetic oligonucleotide
ccugaauggaaauuccauu

SEQ ID NO: 897128 - RNA, 19 nt, Artificial Sequence
  Description of Artificial Sequence: Synthetic oligonucleotide
cagccaagcaggggcugac

SEQ ID NO: 897129 - RNA, 19 nt, Artificial Sequence
  Description of Artificial Sequence: Synthetic oligonucleotide
ccacgauaaccaacauguc

SEQ ID NO: 897130 - RNA, 19 nt, Artificial Sequence
  Description of Artificial Sequence: Synthetic oligonucleotide
cacgagguucauacccucu

SEQ ID NO: 897131 - RNA, 19 nt, Artificial Sequence
  Description of Artificial Sequence: Synthetic oligonucleotide
gcgggguuggugccuuugc

SEQ ID NO: 897132 - RNA, 19 nt, Artificial Sequence
  Description of Artificial Sequence: Synthetic oligonucleotide
cgcucuggacuguggauac

SEQ ID NO: 897133 - RNA, 19 nt, Artificial Sequence
  Description of Artificial Sequence: Synthetic oligonucleotide
ggaaagagguuaagacucu

SEQ ID NO: 897134 - RNA, 19 nt, Artificial Sequence
  Description of Artificial Sequence: Synthetic oligonucleotide
ccagcccgccccuuuuccc

SEQ ID NO: 897135 - RNA, 19 nt, Artificial Sequence
  Description of Artificial Sequence: Synthetic oligonucleotide
ccgguggagccuucauaag

SEQ ID NO: 897136 - RNA, 19 nt, Artificial Sequence
  Description of Artificial Sequence: Synthetic oligonucleotide
uaccguccuccagcggggu

SEQ ID NO: 897137 - RNA, 19 nt, Artificial Sequence
  Description of Artificial Sequence: Synthetic oligonucleotide
gcaucuaaaaggggucugu

SEQ ID NO: 897138 - RNA, 19 nt, Artificial Sequence
  Description of Artificial Sequence: Synthetic oligonucleotide
guuuggguaggggaaucuu

SEQ ID NO: 897139 - RNA, 19 nt, Artificial Sequence
  Description of Artificial Sequence: Synthetic oligonucleotide
guuauggaagcgggagaau

SEQ ID NO: 897140 - RNA, 19 nt, Artificial Sequence
  Description of Artificial Sequence: Synthetic oligonucleotide
gcgggagaauuaguggcuc

SEQ ID NO: 897141 - RNA, 19 nt, Artificial Sequence
  Description of Artificial Sequence: Synthetic oligonucleotide
gucuugcaagaggguggug

SEQ ID NO: 897142 - RNA, 19 nt, Artificial Sequence
  Description of Artificial Sequence: Synthetic oligonucleotide
ucgugggccugggacugua

SEQ ID NO: 897143 - RNA, 19 nt, Artificial Sequence
  Description of Artificial Sequence: Synthetic oligonucleotide
gccauccaaagaccaccuc

SEQ ID NO: 897144 - RNA, 19 nt, Artificial Sequence
  Description of Artificial Sequence: Synthetic oligonucleotide
gcccuuccccggaaagagg

SEQ ID NO: 897145 - RNA, 19 nt, Artificial Sequence
  Description of Artificial Sequence: Synthetic oligonucleotide
ggugugcaaauuagaggcu

SEQ ID NO: 897146 - RNA, 19 nt, Artificial Sequence
  Description of Artificial Sequence: Synthetic oligonucleotide
ccggaucaaggagucugag

SEQ ID NO: 897147 - RNA, 19 nt, Artificial Sequence
  Description of Artificial Sequence: Synthetic oligonucleotide
ggacggagaaagggguguc

SEQ ID NO: 897148 - RNA, 19 nt, Artificial Sequence
  Description of Artificial Sequence: Synthetic oligonucleotide
agaccaccucgugggccug

SEQ ID NO: 897149 - RNA, 19 nt, Artificial Sequence
  Description of Artificial Sequence: Synthetic oligonucleotide
cgggcaaagccagggagac

SEQ ID NO: 897150 - RNA, 19 nt, Artificial Sequence
  Description of Artificial Sequence: Synthetic oligonucleotide
cccuuccccggaaagaggu

SEQ ID NO: 897151 - RNA, 19 nt, Artificial Sequence
  Description of Artificial Sequence: Synthetic oligonucleotide
ggcuaggcugcuggucaug

SEQ ID NO: 897152 - RNA, 19 nt, Artificial Sequence
  Description of Artificial Sequence: Synthetic oligonucleotide
cccggaucaaggagucuga

SEQ ID NO: 897153 - RNA, 19 nt, Artificial Sequence
  Description of Artificial Sequence: Synthetic oligonucleotide
gcucuggacuguggauacc

SEQ ID NO: 897154 - RNA, 19 nt, Artificial Sequence
  Description of Artificial Sequence: Synthetic oligonucleotide
gcgcucuggacuguggaua

SEQ ID NO: 897155 - RNA, 19 nt, Artificial Sequence
  Description of Artificial Sequence: Synthetic oligonucleotide
cauccacgauaaccaacau

SEQ ID NO: 897156 - RNA, 19 nt, Artificial Sequence
  Description of Artificial Sequence: Synthetic oligonucleotide
ccuacucuccagauaggau

SEQ ID NO: 897157 - RNA, 19 nt, Artificial Sequence
  Description of Artificial Sequence: Synthetic oligonucleotide
ccuucauaagggacauggu

SEQ ID NO: 897158 - RNA, 19 nt, Artificial Sequence
  Description of Artificial Sequence: Synthetic oligonucleotide
cacuuccugaauggaaauu

SEQ ID NO: 897159 - RNA, 19 nt, Artificial Sequence
  Description of Artificial Sequence: Synthetic oligonucleotide
gauccccucuaaagagcau

SEQ ID NO: 897160 - RNA, 19 nt, Artificial Sequence
  Description of Artificial Sequence: Synthetic oligonucleotide
ccgcgauuuucaggugugc

SEQ ID NO: 897161 - RNA, 19 nt, Artificial Sequence
  Description of Artificial Sequence: Synthetic oligonucleotide
gcucgagacugaggagcug

SEQ ID NO: 897162 - RNA, 19 nt, Artificial Sequence
  Description of Artificial Sequence: Synthetic oligonucleotide
gaggcgcuugaagguccaa

SEQ ID NO: 897163 - RNA, 19 nt, Artificial Sequence
  Description of Artificial Sequence: Synthetic oligonucleotide
ggauaccagggaaccauuu

SEQ ID NO: 897164 - RNA, 19 nt, Artificial Sequence
  Description of Artificial Sequence: Synthetic oligonucleotide
ccgagacagagccuguuau

SEQ ID NO: 897165 - RNA, 19 nt, Artificial Sequence
  Description of Artificial Sequence: Synthetic oligonucleotide
cccuggugugaacgugcug

SEQ ID NO: 897166 - RNA, 19 nt, Artificial Sequence
  Description of Artificial Sequence: Synthetic oligonucleotide
ggcuccuggucuccuuacu

SEQ ID NO: 897167 - RNA, 19 nt, Artificial Sequence
  Description of Artificial Sequence: Synthetic oligonucleotide
cgauaaccaacaugucacu

SEQ ID NO: 897168 - RNA, 19 nt, Artificial Sequence
  Description of Artificial Sequence: Synthetic oligonucleotide
cuguggcaaaugggguuua

SEQ ID NO: 897169 - RNA, 19 nt, Artificial Sequence
  Description of Artificial Sequence: Synthetic oligonucleotide
cccgagugaccacguccug

SEQ ID NO: 897170 - RNA, 19 nt, Artificial Sequence
  Description of Artificial Sequence: Synthetic oligonucleotide
ggucuguaucaggcccuuc

SEQ ID NO: 897171 - RNA, 19 nt, Artificial Sequence
  Description of Artificial Sequence: Synthetic oligonucleotide
ggucuccuuacuggcuucu

SEQ ID NO: 897172 - RNA, 19 nt, Artificial Sequence
  Description of Artificial Sequence: Synthetic oligonucleotide
cagcaccgguggagccuuc

SEQ ID NO: 897173 - RNA, 19 nt, Artificial Sequence
  Description of Artificial Sequence: Synthetic oligonucleotide
ggagucccagggauauuau

SEQ ID NO: 897174 - RNA, 19 nt, Artificial Sequence
  Description of Artificial Sequence: Synthetic oligonucleotide
ggacauggucagagcugaa

SEQ ID NO: 897175 - RNA, 19 nt, Artificial Sequence
  Description of Artificial Sequence: Synthetic oligonucleotide
cccgcccagaagcaccugu

SEQ ID NO: 897176 - RNA, 19 nt, Artificial Sequence
  Description of Artificial Sequence: Synthetic oligonucleotide
ccccuacaccuacuccaaa

SEQ ID NO: 897177 - RNA, 19 nt, Artificial Sequence
  Description of Artificial Sequence: Synthetic oligonucleotide
gcccgccccuuuuccccuc

SEQ ID NO: 897178 - RNA, 19 nt, Artificial Sequence
  Description of Artificial Sequence: Synthetic oligonucleotide
cgagguucauacccucuuu

SEQ ID NO: 897179 - RNA, 19 nt, Artificial Sequence
  Description of Artificial Sequence: Synthetic oligonucleotide
ccacguccugcagcuggca

SEQ ID NO: 897180 - RNA, 19 nt, Artificial Sequence
  Description of Artificial Sequence: Synthetic oligonucleotide
cagcgggguuggugccuuu

SEQ ID NO: 897181 - RNA, 19 nt, Artificial Sequence
  Description of Artificial Sequence: Synthetic oligonucleotide
ccagcgggguuggugccuu

SEQ ID NO: 897182 - RNA, 19 nt, Artificial Sequence
  Description of Artificial Sequence: Synthetic oligonucleotide
aaaauuaacucauccaggc

SEQ ID NO: 897183 - RNA, 19 nt, Artificial Sequence
  Description of Artificial Sequence: Synthetic oligonucleotide
ugaaaugcagacauuaucc

SEQ ID NO: 897184 - RNA, 19 nt, Artificial Sequence
  Description of Artificial Sequence: Synthetic oligonucleotide
aaauuaacucauccaggcc

SEQ ID NO: 897185 - RNA, 19 nt, Artificial Sequence
  Description of Artificial Sequence: Synthetic oligonucleotide
uugucuaucagacagccca

SEQ ID NO: 897186 - RNA, 19 nt, Artificial Sequence
  Description of Artificial Sequence: Synthetic oligonucleotide
uuuucaucaauauacugga

SEQ ID NO: 897187 - RNA, 19 nt, Artificial Sequence
  Description of Artificial Sequence: Synthetic oligonucleotide
uccaccucaauaaagaagu

SEQ ID NO: 897188 - RNA, 19 nt, Artificial Sequence
  Description of Artificial Sequence: Synthetic oligonucleotide
aaagaaguaacaaaugccu

SEQ ID NO: 897189 - RNA, 19 nt, Artificial Sequence
  Description of Artificial Sequence: Synthetic oligonucleotide
uuccacuucccuaagaaag

SEQ ID NO: 897190 - RNA, 19 nt, Artificial Sequence
  Description of Artificial Sequence: Synthetic oligonucleotide
auagggaaaagaaacuucc

SEQ ID NO: 897191 - RNA, 19 nt, Artificial Sequence
  Description of Artificial Sequence: Synthetic oligonucleotide
guaacaaaugccucggagg

SEQ ID NO: 897192 - RNA, 19 nt, Artificial Sequence
  Description of Artificial Sequence: Synthetic oligonucleotide
ugagcggucaccauggggc

SEQ ID NO: 897193 - RNA, 19 nt, Artificial Sequence
  Description of Artificial Sequence: Synthetic oligonucleotide
uuacccaacaggaugggag

SEQ ID NO: 897194 - RNA, 19 nt, Artificial Sequence
  Description of Artificial Sequence: Synthetic oligonucleotide
aaaccugcucacuaacaac

SEQ ID NO: 897195 - RNA, 19 nt, Artificial Sequence
  Description of Artificial Sequence: Synthetic oligonucleotide
agugaaaugagauccguca

SEQ ID NO: 897196 - RNA, 19 nt, Artificial Sequence
  Description of Artificial Sequence: Synthetic oligonucleotide
gaagggguaucucugagcc

SEQ ID NO: 897197 - RNA, 19 nt, Artificial Sequence
  Description of Artificial Sequence: Synthetic oligonucleotide
ucaggugucauguugggca

SEQ ID NO: 897198 - RNA, 19 nt, Artificial Sequence
  Description of Artificial Sequence: Synthetic oligonucleotide
ucagguucaacaccaaaca

SEQ ID NO: 897199 - RNA, 19 nt, Artificial Sequence
  Description of Artificial Sequence: Synthetic oligonucleotide
aguaacaaaugccucggag

SEQ ID NO: 897200 - RNA, 19 nt, Artificial Sequence
  Description of Artificial Sequence: Synthetic oligonucleotide
agucaauguggucauagag

SEQ ID NO: 897201 - RNA, 19 nt, Artificial Sequence
  Description of Artificial Sequence: Synthetic oligonucleotide
ugagccaccauacacucca

SEQ ID NO: 897202 - RNA, 19 nt, Artificial Sequence
  Description of Artificial Sequence: Synthetic oligonucleotide
accuugaacuuguuggggc

SEQ ID NO: 897203 - RNA, 19 nt, Artificial Sequence
  Description of Artificial Sequence: Synthetic oligonucleotide
gucuuaagaacagauacag

SEQ ID NO: 897204 - RNA, 19 nt, Artificial Sequence
  Description of Artificial Sequence: Synthetic oligonucleotide
aaaugagauccgucauggc

SEQ ID NO: 897205 - RNA, 19 nt, Artificial Sequence
  Description of Artificial Sequence: Synthetic oligonucleotide
ugugaccugagggagauag

SEQ ID NO: 897206 - RNA, 19 nt, Artificial Sequence
  Description of Artificial Sequence: Synthetic oligonucleotide
gaaguaacaaaugccucgg

SEQ ID NO: 897207 - RNA, 19 nt, Artificial Sequence
  Description of Artificial Sequence: Synthetic oligonucleotide
ugagggaugacaucuuuca

SEQ ID NO: 897208 - RNA, 19 nt, Artificial Sequence
  Description of Artificial Sequence: Synthetic oligonucleotide
ucccuaagaaagcuggaag

SEQ ID NO: 897209 - RNA, 19 nt, Artificial Sequence
  Description of Artificial Sequence: Synthetic oligonucleotide
ugcccauaaaugcacacug

SEQ ID NO: 897210 - RNA, 19 nt, Artificial Sequence
  Description of Artificial Sequence: Synthetic oligonucleotide
uauggaauacgagaguucu

SEQ ID NO: 897211 - RNA, 19 nt, Artificial Sequence
  Description of Artificial Sequence: Synthetic oligonucleotide
ugucacaggagccacggca

SEQ ID NO: 897212 - RNA, 19 nt, Artificial Sequence
  Description of Artificial Sequence: Synthetic oligonucleotide
auacacuccagaauggagg

SEQ ID NO: 897213 - RNA, 19 nt, Artificial Sequence
  Description of Artificial Sequence: Synthetic oligonucleotide
uggaauacgagaguucuca

SEQ ID NO: 897214 - RNA, 19 nt, Artificial Sequence
  Description of Artificial Sequence: Synthetic oligonucleotide
uggucauagagcuugcacu

SEQ ID NO: 897215 - RNA, 19 nt, Artificial Sequence
  Description of Artificial Sequence: Synthetic oligonucleotide
uuucuugacauagcggucc

SEQ ID NO: 897216 - RNA, 19 nt, Artificial Sequence
  Description of Artificial Sequence: Synthetic oligonucleotide
caccauacacuccagaaug

SEQ ID NO: 897217 - RNA, 19 nt, Artificial Sequence
  Description of Artificial Sequence: Synthetic oligonucleotide
uguaguugugccuguuuag

SEQ ID NO: 897218 - RNA, 19 nt, Artificial Sequence
  Description of Artificial Sequence: Synthetic oligonucleotide
uggauggccacccauucug

SEQ ID NO: 897219 - RNA, 19 nt, Artificial Sequence
  Description of Artificial Sequence: Synthetic oligonucleotide
uucuauguaguugugccug

SEQ ID NO: 897220 - RNA, 19 nt, Artificial Sequence
  Description of Artificial Sequence: Synthetic oligonucleotide
acaaaugccucggaggccg

SEQ ID NO: 897221 - RNA, 19 nt, Artificial Sequence
  Description of Artificial Sequence: Synthetic oligonucleotide
ucuaucagacagcccauca

SEQ ID NO: 897222 - RNA, 19 nt, Artificial Sequence
  Description of Artificial Sequence: Synthetic oligonucleotide
cagguugacaggaaucucc

SEQ ID NO: 897223 - RNA, 19 nt, Artificial Sequence
  Description of Artificial Sequence: Synthetic oligonucleotide
aggaauacugccaccuucc

SEQ ID NO: 897224 - RNA, 19 nt, Artificial Sequence
  Description of Artificial Sequence: Synthetic oligonucleotide
uaaugaggaugguugaagu

SEQ ID NO: 897225 - RNA, 19 nt, Artificial Sequence
  Description of Artificial Sequence: Synthetic oligonucleotide
aaguuucuugacauagcgg

SEQ ID NO: 897226 - RNA, 19 nt, Artificial Sequence
  Description of Artificial Sequence: Synthetic oligonucleotide
gggucuuaagaacagauac

SEQ ID NO: 897227 - RNA, 19 nt, Artificial Sequence
  Description of Artificial Sequence: Synthetic oligonucleotide
ugaugcauggcuuauucuu

SEQ ID NO: 897228 - RNA, 19 nt, Artificial Sequence
  Description of Artificial Sequence: Synthetic oligonucleotide
cuugacauagcgguccugg

SEQ ID NO: 897229 - RNA, 19 nt, Artificial Sequence
  Description of Artificial Sequence: Synthetic oligonucleotide
acucuauggaauacgagag

SEQ ID NO: 897230 - RNA, 19 nt, Artificial Sequence
  Description of Artificial Sequence: Synthetic oligonucleotide
ugucacagcacaagugucu

SEQ ID NO: 897231 - RNA, 19 nt, Artificial Sequence
  Description of Artificial Sequence: Synthetic oligonucleotide
aacaggaggggacaccagu

SEQ ID NO: 897232 - RNA, 19 nt, Artificial Sequence
  Description of Artificial Sequence: Synthetic oligonucleotide
uuuauuagcaggguagcua

SEQ ID NO: 897233 - RNA, 19 nt, Artificial Sequence
  Description of Artificial Sequence: Synthetic oligonucleotide
caauauacuggaagauggc

SEQ ID NO: 897234 - RNA, 19 nt, Artificial Sequence
  Description of Artificial Sequence: Synthetic oligonucleotide
cacucuauggaauacgaga

SEQ ID NO: 897235 - RNA, 19 nt, Artificial Sequence
  Description of Artificial Sequence: Synthetic oligonucleotide
cauacacuccagaauggag

SEQ ID NO: 897236 - RNA, 19 nt, Artificial Sequence
  Description of Artificial Sequence: Synthetic oligonucleotide
accuuuauuagcaggguag

SEQ ID NO: 897237 - RNA, 19 nt, Artificial Sequence
  Description of Artificial Sequence: Synthetic oligonucleotide
agguugaggggacugcaac

SEQ ID NO: 897238 - RNA, 19 nt, Artificial Sequence
  Description of Artificial Sequence: Synthetic oligonucleotide
gauagggaaaagaaacuuc

SEQ ID NO: 897239 - RNA, 19 nt, Artificial Sequence
  Description of Artificial Sequence: Synthetic oligonucleotide
guaaugaggaugguugaag

SEQ ID NO: 897240 - RNA, 19 nt, Artificial Sequence
  Description of Artificial Sequence: Synthetic oligonucleotide
ucuauggaauacgagaguu

SEQ ID NO: 897241 - RNA, 19 nt, Artificial Sequence
  Description of Artificial Sequence: Synthetic oligonucleotide
ugucauguugggcacgagu

SEQ ID NO: 897242 - RNA, 19 nt, Artificial Sequence
  Description of Artificial Sequence: Synthetic oligonucleotide
augaggaugguugaaguca

SEQ ID NO: 897243 - RNA, 19 nt, Artificial Sequence
  Description of Artificial Sequence: Synthetic oligonucleotide
ugauaggcuuccaaggcau

SEQ ID NO: 897244 - RNA, 19 nt, Artificial Sequence
  Description of Artificial Sequence: Synthetic oligonucleotide
auacagguaugcugccagc

SEQ ID NO: 897245 - RNA, 19 nt, Artificial Sequence
  Description of Artificial Sequence: Synthetic oligonucleotide
aggguagcuagcucaggac

SEQ ID NO: 897246 - RNA, 19 nt, Artificial Sequence
  Description of Artificial Sequence: Synthetic oligonucleotide
ucauagagcuugcacuccu

SEQ ID NO: 897247 - RNA, 19 nt, Artificial Sequence
  Description of Artificial Sequence: Synthetic oligonucleotide
gucagcaagggucuuaaga

SEQ ID NO: 897248 - RNA, 19 nt, Artificial Sequence
  Description of Artificial Sequence: Synthetic oligonucleotide
aaugccucggaggccguac

SEQ ID NO: 897249 - RNA, 19 nt, Artificial Sequence
  Description of Artificial Sequence: Synthetic oligonucleotide
auacgagaguucucaguuc

SEQ ID NO: 897250 - RNA, 19 nt, Artificial Sequence
  Description of Artificial Sequence: Synthetic oligonucleotide
uugagccucucccauacaa

SEQ ID NO: 897251 - RNA, 19 nt, Artificial Sequence
  Description of Artificial Sequence: Synthetic oligonucleotide
gacgcuuccacuagggcug

SEQ ID NO: 897252 - RNA, 19 nt, Artificial Sequence
  Description of Artificial Sequence: Synthetic oligonucleotide
agcuuacccaacaggaugg

SEQ ID NO: 897253 - RNA, 19 nt, Artificial Sequence
  Description of Artificial Sequence: Synthetic oligonucleotide
aagggcucacugucccagc

SEQ ID NO: 897254 - RNA, 19 nt, Artificial Sequence
  Description of Artificial Sequence: Synthetic oligonucleotide
auacaacuugccaucccgc

SEQ ID NO: 897255 - RNA, 19 nt, Artificial Sequence
  Description of Artificial Sequence: Synthetic oligonucleotide
agcacagugagcggucacc

SEQ ID NO: 897256 - RNA, 19 nt, Artificial Sequence
  Description of Artificial Sequence: Synthetic oligonucleotide
agguucaacaccaaacacu

SEQ ID NO: 897257 - RNA, 19 nt, Artificial Sequence
  Description of Artificial Sequence: Synthetic oligonucleotide
acgagucugauggagaacu

SEQ ID NO: 897258 - RNA, 19 nt, Artificial Sequence
  Description of Artificial Sequence: Synthetic oligonucleotide
cagcuuacccaacaggaug

SEQ ID NO: 897259 - RNA, 19 nt, Artificial Sequence
  Description of Artificial Sequence: Synthetic oligonucleotide
gcagacauuauccacaucu

SEQ ID NO: 897260 - RNA, 19 nt, Artificial Sequence
  Description of Artificial Sequence: Synthetic oligonucleotide
gagccagacuccuccaugc

SEQ ID NO: 897261 - RNA, 19 nt, Artificial Sequence
  Description of Artificial Sequence: Synthetic oligonucleotide
uaguugugccuguuuagcu

SEQ ID NO: 897262 - RNA, 19 nt, Artificial Sequence
  Description of Artificial Sequence: Synthetic oligonucleotide
ucuccucucuucucgggcc

SEQ ID NO: 897263 - RNA, 19 nt, Artificial Sequence
  Description of Artificial Sequence: Synthetic oligonucleotide
uugagggaugacaucuuuc

SEQ ID NO: 897264 - RNA, 19 nt, Artificial Sequence
  Description of Artificial Sequence: Synthetic oligonucleotide
gauacagagcacagugagc

SEQ ID NO: 897265 - RNA, 19 nt, Artificial Sequence
  Description of Artificial Sequence: Synthetic oligonucleotide
cuauggaauacgagaguuc

SEQ ID NO: 897266 - RNA, 19 nt, Artificial Sequence
  Description of Artificial Sequence: Synthetic oligonucleotide
guugaggggacugcaacag

SEQ ID NO: 897267 - RNA, 19 nt, Artificial Sequence
  Description of Artificial Sequence: Synthetic oligonucleotide
aaccggagaaggccccuuc

SEQ ID NO: 897268 - RNA, 19 nt, Artificial Sequence
  Description of Artificial Sequence: Synthetic oligonucleotide
guaguugugccuguuuagc

SEQ ID NO: 897269 - RNA, 19 nt, Artificial Sequence
  Description of Artificial Sequence: Synthetic oligonucleotide
caaggcauucauccauccg

SEQ ID NO: 897270 - RNA, 19 nt, Artificial Sequence
  Description of Artificial Sequence: Synthetic oligonucleotide
uacccagggcuucccaccg

SEQ ID NO: 897271 - RNA, 19 nt, Artificial Sequence
  Description of Artificial Sequence: Synthetic oligonucleotide
acggauaucuccaucugug

SEQ ID NO: 897272 - RNA, 19 nt, Artificial Sequence
  Description of Artificial Sequence: Synthetic oligonucleotide
ccauauugaagucaaugug

SEQ ID NO: 897273 - RNA, 19 nt, Artificial Sequence
  Description of Artificial Sequence: Synthetic oligonucleotide
acagcacucuauggaauac

SEQ ID NO: 897274 - RNA, 19 nt, Artificial Sequence
  Description of Artificial Sequence: Synthetic oligonucleotide
uccuucuauguaguugugc

SEQ ID NO: 897275 - RNA, 19 nt, Artificial Sequence
  Description of Artificial Sequence: Synthetic oligonucleotide
gaugcauggcuuauucuuc

SEQ ID NO: 897276 - RNA, 19 nt, Artificial Sequence
  Description of Artificial Sequence: Synthetic oligonucleotide
aggguagguuguuuccggg

SEQ ID NO: 897277 - RNA, 19 nt, Artificial Sequence
  Description of Artificial Sequence: Synthetic oligonucleotide
agcaagggucuuaagaaca

SEQ ID NO: 897278 - RNA, 19 nt, Artificial Sequence
  Description of Artificial Sequence: Synthetic oligonucleotide
cagaggguagguuguuucc

SEQ ID NO: 897279 - RNA, 19 nt, Artificial Sequence
  Description of Artificial Sequence: Synthetic oligonucleotide
gaagggcucacugucccag

SEQ ID NO: 897280 - RNA, 19 nt, Artificial Sequence
  Description of Artificial Sequence: Synthetic oligonucleotide
agacauuauccacaucuuu

SEQ ID NO: 897281 - RNA, 19 nt, Artificial Sequence
  Description of Artificial Sequence: Synthetic oligonucleotide
agccgcaggcugcacgucc

SEQ ID NO: 897282 - RNA, 19 nt, Artificial Sequence
  Description of Artificial Sequence: Synthetic oligonucleotide
cugagacaccucauacagg

SEQ ID NO: 897283 - RNA, 19 nt, Artificial Sequence
  Description of Artificial Sequence: Synthetic oligonucleotide
cagguucaacaccaaacac

SEQ ID NO: 897284 - RNA, 19 nt, Artificial Sequence
  Description of Artificial Sequence: Synthetic oligonucleotide
gacugacgcuuccacuagg

SEQ ID NO: 897285 - RNA, 19 nt, Artificial Sequence
  Description of Artificial Sequence: Synthetic oligonucleotide
uauuccguggagggagagg

SEQ ID NO: 897286 - RNA, 19 nt, Artificial Sequence
  Description of Artificial Sequence: Synthetic oligonucleotide
ucuauguaguugugccugu

SEQ ID NO: 897287 - RNA, 19 nt, Artificial Sequence
  Description of Artificial Sequence: Synthetic oligonucleotide
uacagguaugcugccagca

SEQ ID NO: 897288 - RNA, 19 nt, Artificial Sequence
  Description of Artificial Sequence: Synthetic oligonucleotide
augcacugagccaccauac

SEQ ID NO: 897289 - RNA, 19 nt, Artificial Sequence
  Description of Artificial Sequence: Synthetic oligonucleotide
gauaucuccaucugugcau

SEQ ID NO: 897290 - RNA, 19 nt, Artificial Sequence
  Description of Artificial Sequence: Synthetic oligonucleotide
augaggauuuuccccuucu

SEQ ID NO: 897291 - RNA, 19 nt, Artificial Sequence
  Description of Artificial Sequence: Synthetic oligonucleotide
ucuauuccguggagggaga

SEQ ID NO: 897292 - RNA, 19 nt, Artificial Sequence
  Description of Artificial Sequence: Synthetic oligonucleotide
acugacgcuuccacuaggg

SEQ ID NO: 897293 - RNA, 19 nt, Artificial Sequence
  Description of Artificial Sequence: Synthetic oligonucleotide
cacuggccccuuaucaucc

SEQ ID NO: 897294 - RNA, 19 nt, Artificial Sequence
  Description of Artificial Sequence: Synthetic oligonucleotide
ugacauagcgguccugguu

SEQ ID NO: 897295 - RNA, 19 nt, Artificial Sequence
  Description of Artificial Sequence: Synthetic oligonucleotide
caucuugguuccuucuaug

SEQ ID NO: 897296 - RNA, 19 nt, Artificial Sequence
  Description of Artificial Sequence: Synthetic oligonucleotide
caagcaucuggauguccgc

SEQ ID NO: 897297 - RNA, 19 nt, Artificial Sequence
  Description of Artificial Sequence: Synthetic oligonucleotide
caggaauacugccaccuuc

SEQ ID NO: 897298 - RNA, 19 nt, Artificial Sequence
  Description of Artificial Sequence: Synthetic oligonucleotide
guagguuguuuccgggcag

SEQ ID NO: 897299 - RNA, 19 nt, Artificial Sequence
  Description of Artificial Sequence: Synthetic oligonucleotide
ggucauagagcuugcacuc

SEQ ID NO: 897300 - RNA, 19 nt, Artificial Sequence
  Description of Artificial Sequence: Synthetic oligonucleotide
gaauacgagaguucucagu

SEQ ID NO: 897301 - RNA, 19 nt, Artificial Sequence
  Description of Artificial Sequence: Synthetic oligonucleotide
gacaaguagcuugaaaccu

SEQ ID NO: 897302 - RNA, 19 nt, Artificial Sequence
  Description of Artificial Sequence: Synthetic oligonucleotide
uucccuaagaaagcuggaa

SEQ ID NO: 897303 - RNA, 19 nt, Artificial Sequence
  Description of Artificial Sequence: Synthetic oligonucleotide
gugagcggucaccaugggg

SEQ ID NO: 897304 - RNA, 19 nt, Artificial Sequence
  Description of Artificial Sequence: Synthetic oligonucleotide
cauguugggcacgagucug

SEQ ID NO: 897305 - RNA, 19 nt, Artificial Sequence
  Description of Artificial Sequence: Synthetic oligonucleotide
agcgguccugguuuucauc

SEQ ID NO: 897306 - RNA, 19 nt, Artificial Sequence
  Description of Artificial Sequence: Synthetic oligonucleotide
ugagauccgucauggcuuc

SEQ ID NO: 897307 - RNA, 19 nt, Artificial Sequence
  Description of Artificial Sequence: Synthetic oligonucleotide
agagccgcaggcugcacgu

SEQ ID NO: 897308 - RNA, 19 nt, Artificial Sequence
  Description of Artificial Sequence: Synthetic oligonucleotide
uucaggugucauguugggc

SEQ ID NO: 897309 - RNA, 19 nt, Artificial Sequence
  Description of Artificial Sequence: Synthetic oligonucleotide
uuguuuccgggcaggcaca

SEQ ID NO: 897310 - RNA, 19 nt, Artificial Sequence
  Description of Artificial Sequence: Synthetic oligonucleotide
gauccgucauggcuucaug

SEQ ID NO: 897311 - RNA, 19 nt, Artificial Sequence
  Description of Artificial Sequence: Synthetic oligonucleotide
agagggacggauaucucca

SEQ ID NO: 897312 - RNA, 19 nt, Artificial Sequence
  Description of Artificial Sequence: Synthetic oligonucleotide
ugagggagauagggaaaag

SEQ ID NO: 897313 - RNA, 19 nt, Artificial Sequence
  Description of Artificial Sequence: Synthetic oligonucleotide
gacauagcgguccugguuu

SEQ ID NO: 897314 - RNA, 19 nt, Artificial Sequence
  Description of Artificial Sequence: Synthetic oligonucleotide
ggauaucuccaucugugca

SEQ ID NO: 897315 - RNA, 19 nt, Artificial Sequence
  Description of Artificial Sequence: Synthetic oligonucleotide
cuuccacuagggcugugug

SEQ ID NO: 897316 - RNA, 19 nt, Artificial Sequence
  Description of Artificial Sequence: Synthetic oligonucleotide
agcacucuauggaauacga

SEQ ID NO: 897317 - RNA, 19 nt, Artificial Sequence
  Description of Artificial Sequence: Synthetic oligonucleotide
ggaaaagaaacuuccacuu

SEQ ID NO: 897318 - RNA, 19 nt, Artificial Sequence
  Description of Artificial Sequence: Synthetic oligonucleotide
cagguaugcugccagcauc

SEQ ID NO: 897319 - RNA, 19 nt, Artificial Sequence
  Description of Artificial Sequence: Synthetic oligonucleotide
ucaccuuuauuagcagggu

SEQ ID NO: 897320 - RNA, 19 nt, Artificial Sequence
  Description of Artificial Sequence: Synthetic oligonucleotide
cagcacucuauggaauacg

SEQ ID NO: 897321 - RNA, 19 nt, Artificial Sequence
  Description of Artificial Sequence: Synthetic oligonucleotide
uuccuucuauguaguugug

SEQ ID NO: 897322 - RNA, 19 nt, Artificial Sequence
  Description of Artificial Sequence: Synthetic oligonucleotide
augagauccgucauggcuu

SEQ ID NO: 897323 - RNA, 19 nt, Artificial Sequence
  Description of Artificial Sequence: Synthetic oligonucleotide
ggccguacgugaugcaugg

SEQ ID NO: 897324 - RNA, 19 nt, Artificial Sequence
  Description of Artificial Sequence: Synthetic oligonucleotide
cuucaugcacugagccacc

SEQ ID NO: 897325 - RNA, 19 nt, Artificial Sequence
  Description of Artificial Sequence: Synthetic oligonucleotide
ggaauacgagaguucucag

SEQ ID NO: 897326 - RNA, 19 nt, Artificial Sequence
  Description of Artificial Sequence: Synthetic oligonucleotide
gaggaagggguaucucuga

SEQ ID NO: 897327 - RNA, 19 nt, Artificial Sequence
  Description of Artificial Sequence: Synthetic oligonucleotide
gcucacuaacaacuucagg

SEQ ID NO: 897328 - RNA, 19 nt, Artificial Sequence
  Description of Artificial Sequence: Synthetic oligonucleotide
accguggcccauguacacc

SEQ ID NO: 897329 - RNA, 19 nt, Artificial Sequence
  Description of Artificial Sequence: Synthetic oligonucleotide
ggaagggguaucucugagc

SEQ ID NO: 897330 - RNA, 19 nt, Artificial Sequence
  Description of Artificial Sequence: Synthetic oligonucleotide
gguagguuguuuccgggca

SEQ ID NO: 897331 - RNA, 19 nt, Artificial Sequence
  Description of Artificial Sequence: Synthetic oligonucleotide
cugacgcuuccacuagggc

SEQ ID NO: 897332 - RNA, 19 nt, Artificial Sequence
  Description of Artificial Sequence: Synthetic oligonucleotide
ccugaaccggagaaggccc

SEQ ID NO: 897333 - RNA, 19 nt, Artificial Sequence
  Description of Artificial Sequence: Synthetic oligonucleotide
auggaauacgagaguucuc

SEQ ID NO: 897334 - RNA, 19 nt, Artificial Sequence
  Description of Artificial Sequence: Synthetic oligonucleotide
agcccaucagugaaaugag

SEQ ID NO: 897335 - RNA, 19 nt, Artificial Sequence
  Description of Artificial Sequence: Synthetic oligonucleotide
ugcaacaggaggggacacc

SEQ ID NO: 897336 - RNA, 19 nt, Artificial Sequence
  Description of Artificial Sequence: Synthetic oligonucleotide
cagauacagagcacaguga

SEQ ID NO: 897337 - RNA, 19 nt, Artificial Sequence
  Description of Artificial Sequence: Synthetic oligonucleotide
agugagcggucaccauggg

SEQ ID NO: 897338 - RNA, 19 nt, Artificial Sequence
  Description of Artificial Sequence: Synthetic oligonucleotide
cagagccgcaggcugcacg

SEQ ID NO: 897339 - RNA, 19 nt, Artificial Sequence
  Description of Artificial Sequence: Synthetic oligonucleotide
ugaagggcucacuguccca

SEQ ID NO: 897340 - RNA, 19 nt, Artificial Sequence
  Description of Artificial Sequence: Synthetic oligonucleotide
auccguugagccucuccca

SEQ ID NO: 897341 - RNA, 19 nt, Artificial Sequence
  Description of Artificial Sequence: Synthetic oligonucleotide
ccucaauaaagaaguaaca

SEQ ID NO: 897342 - RNA, 19 nt, Artificial Sequence
  Description of Artificial Sequence: Synthetic oligonucleotide
cacggcaucguugaugcca

SEQ ID NO: 897343 - RNA, 19 nt, Artificial Sequence
  Description of Artificial Sequence: Synthetic oligonucleotide
agguugacaggaaucuccu

SEQ ID NO: 897344 - RNA, 19 nt, Artificial Sequence
  Description of Artificial Sequence: Synthetic oligonucleotide
augccucggaggccguacg

SEQ ID NO: 897345 - RNA, 19 nt, Artificial Sequence
  Description of Artificial Sequence: Synthetic oligonucleotide
gacggauaucuccaucugu

SEQ ID NO: 897346 - RNA, 19 nt, Artificial Sequence
  Description of Artificial Sequence: Synthetic oligonucleotide
auagcgguccugguuuuca

SEQ ID NO: 897347 - RNA, 19 nt, Artificial Sequence
  Description of Artificial Sequence: Synthetic oligonucleotide
uguuuccgggcaggcacag

SEQ ID NO: 897348 - RNA, 19 nt, Artificial Sequence
  Description of Artificial Sequence: Synthetic oligonucleotide
ggucuuaagaacagauaca

SEQ ID NO: 897349 - RNA, 19 nt, Artificial Sequence
  Description of Artificial Sequence: Synthetic oligonucleotide
auuaacucauccaggccuu

SEQ ID NO: 897350 - RNA, 19 nt, Artificial Sequence
  Description of Artificial Sequence: Synthetic oligonucleotide
gaugccagggaugaggauu

SEQ ID NO: 897351 - RNA, 19 nt, Artificial Sequence
  Description of Artificial Sequence: Synthetic oligonucleotide
gcauucauccauccggcca

SEQ ID NO: 897352 - RNA, 19 nt, Artificial Sequence
  Description of Artificial Sequence: Synthetic oligonucleotide
gguugaggggacugcaaca

SEQ ID NO: 897353 - RNA, 19 nt, Artificial Sequence
  Description of Artificial Sequence: Synthetic oligonucleotide
uuuugacaaguagcuugaa

SEQ ID NO: 897354 - RNA, 19 nt, Artificial Sequence
  Description of Artificial Sequence: Synthetic oligonucleotide
ggguagguuguuuccgggc

SEQ ID NO: 897355 - RNA, 19 nt, Artificial Sequence
  Description of Artificial Sequence: Synthetic oligonucleotide
ggagccagacuccuccaug

SEQ ID NO: 897356 - RNA, 19 nt, Artificial Sequence
  Description of Artificial Sequence: Synthetic oligonucleotide
uucaugcacugagccacca

SEQ ID NO: 897357 - RNA, 19 nt, Artificial Sequence
  Description of Artificial Sequence: Synthetic oligonucleotide
cccaccguggcccauguac

SEQ ID NO: 897358 - RNA, 19 nt, Artificial Sequence
  Description of Artificial Sequence: Synthetic oligonucleotide
cuguguggacagguugagg

SEQ ID NO: 897359 - RNA, 19 nt, Artificial Sequence
  Description of Artificial Sequence: Synthetic oligonucleotide
agccacggcaucguugaug

SEQ ID NO: 897360 - RNA, 19 nt, Artificial Sequence
  Description of Artificial Sequence: Synthetic oligonucleotide
uacuuccaucauccuucug

SEQ ID NO: 897361 - RNA, 19 nt, Artificial Sequence
  Description of Artificial Sequence: Synthetic oligonucleotide
cagagcacagugagcgguc

SEQ ID NO: 897362 - RNA, 19 nt, Artificial Sequence
  Description of Artificial Sequence: Synthetic oligonucleotide
ugcacguccaggugcccau

SEQ ID NO: 897363 - RNA, 19 nt, Artificial Sequence
  Description of Artificial Sequence: Synthetic oligonucleotide
gcagaggguagguuguuuc

SEQ ID NO: 897364 - RNA, 19 nt, Artificial Sequence
  Description of Artificial Sequence: Synthetic oligonucleotide
ccccuuaucauccguugag

SEQ ID NO: 897365 - RNA, 19 nt, Artificial Sequence
  Description of Artificial Sequence: Synthetic oligonucleotide
ggccuucggagccagacuc

SEQ ID NO: 897366 - RNA, 19 nt, Artificial Sequence
  Description of Artificial Sequence: Synthetic oligonucleotide
uacgugaugcauggcuuau

SEQ ID NO: 897367 - RNA, 19 nt, Artificial Sequence
  Description of Artificial Sequence: Synthetic oligonucleotide
guugggcacgagucugaug

SEQ ID NO: 897368 - RNA, 19 nt, Artificial Sequence
  Description of Artificial Sequence: Synthetic oligonucleotide
gccccugaaccggagaagg

SEQ ID NO: 897369 - RNA, 19 nt, Artificial Sequence
  Description of Artificial Sequence: Synthetic oligonucleotide
ggacggauaucuccaucug

SEQ ID NO: 897370 - RNA, 19 nt, Artificial Sequence
  Description of Artificial Sequence: Synthetic oligonucleotide
cuauuccguggagggagag

SEQ ID NO: 897371 - RNA, 19 nt, Artificial Sequence
  Description of Artificial Sequence: Synthetic oligonucleotide
ucccuggucaagucagguu

SEQ ID NO: 897372 - RNA, 19 nt, Artificial Sequence
  Description of Artificial Sequence: Synthetic oligonucleotide
gugccuguuuagcuuuuca

SEQ ID NO: 897373 - RNA, 19 nt, Artificial Sequence
  Description of Artificial Sequence: Synthetic oligonucleotide
gcgguccugguuuucauca

SEQ ID NO: 897374 - RNA, 19 nt, Artificial Sequence
  Description of Artificial Sequence: Synthetic oligonucleotide
cacuaacaacuucaggugu

SEQ ID NO: 897375 - RNA, 19 nt, Artificial Sequence
  Description of Artificial Sequence: Synthetic oligonucleotide
cuucuauguaguugugccu

SEQ ID NO: 897376 - RNA, 19 nt, Artificial Sequence
  Description of Artificial Sequence: Synthetic oligonucleotide
uuccgggcaggcacagcac

SEQ ID NO: 897377 - RNA, 19 nt, Artificial Sequence
  Description of Artificial Sequence: Synthetic oligonucleotide
caccguggcccauguacac

SEQ ID NO: 897378 - RNA, 19 nt, Artificial Sequence
  Description of Artificial Sequence: Synthetic oligonucleotide
gaccugagggagauaggga

SEQ ID NO: 897379 - RNA, 19 nt, Artificial Sequence
  Description of Artificial Sequence: Synthetic oligonucleotide
ugccucggaggccguacgu

SEQ ID NO: 897380 - RNA, 19 nt, Artificial Sequence
  Description of Artificial Sequence: Synthetic oligonucleotide
aggcacaucaucaccuuua

SEQ ID NO: 897381 - RNA, 19 nt, Artificial Sequence
  Description of Artificial Sequence: Synthetic oligonucleotide
guacgugaugcauggcuua

SEQ ID NO: 897382 - RNA, 19 nt, Artificial Sequence
  Description of Artificial Sequence: Synthetic oligonucleotide
cacugguaacagcaugaca

SEQ ID NO: 897383 - RNA, 19 nt, Artificial Sequence
  Description of Artificial Sequence: Synthetic oligonucleotide
aggugucauguugggcacg

SEQ ID NO: 897384 - RNA, 19 nt, Artificial Sequence
  Description of Artificial Sequence: Synthetic oligonucleotide
aggccuucggagccagacu

SEQ ID NO: 897385 - RNA, 19 nt, Artificial Sequence
  Description of Artificial Sequence: Synthetic oligonucleotide
cugagggagauagggaaaa

SEQ ID NO: 897386 - RNA, 19 nt, Artificial Sequence
  Description of Artificial Sequence: Synthetic oligonucleotide
gagcacagugagcggucac

SEQ ID NO: 897387 - RNA, 19 nt, Artificial Sequence
  Description of Artificial Sequence: Synthetic oligonucleotide
agggucuuaagaacagaua

SEQ ID NO: 897388 - RNA, 19 nt, Artificial Sequence
  Description of Artificial Sequence: Synthetic oligonucleotide
uggccccuuaucauccguu

SEQ ID NO: 897389 - RNA, 19 nt, Artificial Sequence
  Description of Artificial Sequence: Synthetic oligonucleotide
ccuaagaaagcuggaagga

SEQ ID NO: 897390 - RNA, 19 nt, Artificial Sequence
  Description of Artificial Sequence: Synthetic oligonucleotide
agcucaggacugacgcuuc

SEQ ID NO: 897391 - RNA, 19 nt, Artificial Sequence
  Description of Artificial Sequence: Synthetic oligonucleotide
agauccgucauggcuucau

SEQ ID NO: 897392 - RNA, 19 nt, Artificial Sequence
  Description of Artificial Sequence: Synthetic oligonucleotide
ggcauucauccauccggcc

SEQ ID NO: 897393 - RNA, 19 nt, Artificial Sequence
  Description of Artificial Sequence: Synthetic oligonucleotide
uucccaccguggcccaugu

SEQ ID NO: 897394 - RNA, 19 nt, Artificial Sequence
  Description of Artificial Sequence: Synthetic oligonucleotide
ugggcacgagucugaugga

SEQ ID NO: 897395 - RNA, 19 nt, Artificial Sequence
  Description of Artificial Sequence: Synthetic oligonucleotide
cccugaaccggagaaggcc

SEQ ID NO: 897396 - RNA, 19 nt, Artificial Sequence
  Description of Artificial Sequence: Synthetic oligonucleotide
gcaucguugaugccaggga

SEQ ID NO: 897397 - RNA, 19 nt, Artificial Sequence
  Description of Artificial Sequence: Synthetic oligonucleotide
aggccguacgugaugcaug

SEQ ID NO: 897398 - RNA, 19 nt, Artificial Sequence
  Description of Artificial Sequence: Synthetic oligonucleotide
ggccccuuaucauccguug

SEQ ID NO: 897399 - RNA, 19 nt, Artificial Sequence
  Description of Artificial Sequence: Synthetic oligonucleotide
cccacugguaacagcauga

SEQ ID NO: 897400 - RNA, 19 nt, Artificial Sequence
  Description of Artificial Sequence: Synthetic oligonucleotide
cucuauggaauacgagagu

SEQ ID NO: 897401 - RNA, 19 nt, Artificial Sequence
  Description of Artificial Sequence: Synthetic oligonucleotide
gcacucuauggaauacgag

SEQ ID NO: 897402 - RNA, 19 nt, Artificial Sequence
  Description of Artificial Sequence: Synthetic oligonucleotide
caucguugaugccagggau

SEQ ID NO: 897403 - RNA, 19 nt, Artificial Sequence
  Description of Artificial Sequence: Synthetic oligonucleotide
gugaugcauggcuuauucu

SEQ ID NO: 897404 - RNA, 19 nt, Artificial Sequence
  Description of Artificial Sequence: Synthetic oligonucleotide
uggcgaacucuuccauauu

SEQ ID NO: 897405 - RNA, 19 nt, Artificial Sequence
  Description of Artificial Sequence: Synthetic oligonucleotide
agccaguaguugucugaaa

SEQ ID NO: 897406 - RNA, 19 nt, Artificial Sequence
  Description of Artificial Sequence: Synthetic oligonucleotide
uagcgguccugguuuucau

SEQ ID NO: 897407 - RNA, 19 nt, Artificial Sequence
  Description of Artificial Sequence: Synthetic oligonucleotide
cccuuaucauccguugagc

SEQ ID NO: 897408 - RNA, 19 nt, Artificial Sequence
  Description of Artificial Sequence: Synthetic oligonucleotide
cggauaucuccaucugugc

SEQ ID NO: 897409 - RNA, 19 nt, Artificial Sequence
  Description of Artificial Sequence: Synthetic oligonucleotide
cguugagccucucccauac

SEQ ID NO: 897410 - RNA, 19 nt, Artificial Sequence
  Description of Artificial Sequence: Synthetic oligonucleotide
cugcccagcuuacccaaca

SEQ ID NO: 897411 - RNA, 19 nt, Artificial Sequence
  Description of Artificial Sequence: Synthetic oligonucleotide
gcuuacccaacaggauggg

SEQ ID NO: 897412 - RNA, 19 nt, Artificial Sequence
  Description of Artificial Sequence: Synthetic oligonucleotide
gcacgagucugauggagaa

SEQ ID NO: 897413 - RNA, 19 nt, Artificial Sequence
  Description of Artificial Sequence: Synthetic oligonucleotide
cacuagggcuguguggaca

SEQ ID NO: 897414 - RNA, 19 nt, Artificial Sequence
  Description of Artificial Sequence: Synthetic oligonucleotide
gggcacgagucugauggag

SEQ ID NO: 897415 - RNA, 19 nt, Artificial Sequence
  Description of Artificial Sequence: Synthetic oligonucleotide
cuucucgggccaggcagac

SEQ ID NO: 897416 - RNA, 19 nt, Artificial Sequence
  Description of Artificial Sequence: Synthetic oligonucleotide
ggugucauguugggcacga

SEQ ID NO: 897417 - RNA, 19 nt, Artificial Sequence
  Description of Artificial Sequence: Synthetic oligonucleotide
ccugguuuucaucaauaua

SEQ ID NO: 897418 - RNA, 19 nt, Artificial Sequence
  Description of Artificial Sequence: Synthetic oligonucleotide
gcgaacucuuccauauuga

SEQ ID NO: 897419 - RNA, 19 nt, Artificial Sequence
  Description of Artificial Sequence: Synthetic oligonucleotide
cagacauuauccacaucuu

SEQ ID NO: 897420 - RNA, 19 nt, Artificial Sequence
  Description of Artificial Sequence: Synthetic oligonucleotide
cuagcucaggacugacgcu

SEQ ID NO: 897421 - RNA, 19 nt, Artificial Sequence
  Description of Artificial Sequence: Synthetic oligonucleotide
ggcacgagucugauggaga

SEQ ID NO: 897422 - RNA, 19 nt, Artificial Sequence
  Description of Artificial Sequence: Synthetic oligonucleotide
gagcggucaccauggggcu

SEQ ID NO: 897423 - RNA, 19 nt, Artificial Sequence
  Description of Artificial Sequence: Synthetic oligonucleotide
ccccacugguaacagcaug

SEQ ID NO: 897424 - RNA, 19 nt, Artificial Sequence
  Description of Artificial Sequence: Synthetic oligonucleotide
gaggccguacgugaugcau

SEQ ID NO: 897425 - RNA, 19 nt, Artificial Sequence
  Description of Artificial Sequence: Synthetic oligonucleotide
ccauccggccacuggcccc

SEQ ID NO: 897426 - RNA, 19 nt, Artificial Sequence
  Description of Artificial Sequence: Synthetic oligonucleotide
aucauccguugagccucuc

SEQ ID NO: 897427 - RNA, 19 nt, Artificial Sequence
  Description of Artificial Sequence: Synthetic oligonucleotide
gcaucuugguuccuucuau

SEQ ID NO: 897428 - RNA, 19 nt, Artificial Sequence
  Description of Artificial Sequence: Synthetic oligonucleotide
gcacagugagcggucacca

SEQ ID NO: 897429 - RNA, 19 nt, Artificial Sequence
  Description of Artificial Sequence: Synthetic oligonucleotide
gcaggguagcuagcucagg

SEQ ID NO: 897430 - RNA, 19 nt, Artificial Sequence
  Description of Artificial Sequence: Synthetic oligonucleotide
gccccuuaucauccguuga

SEQ ID NO: 897431 - RNA, 19 nt, Artificial Sequence
  Description of Artificial Sequence: Synthetic oligonucleotide
gagggacggauaucuccau

SEQ ID NO: 897432 - RNA, 19 nt, Artificial Sequence
  Description of Artificial Sequence: Synthetic oligonucleotide
acgugaugcauggcuuauu

SEQ ID NO: 897433 - RNA, 19 nt, Artificial Sequence
  Description of Artificial Sequence: Synthetic oligonucleotide
ccugagggagauagggaaa

SEQ ID NO: 897434 - RNA, 19 nt, Artificial Sequence
  Description of Artificial Sequence: Synthetic oligonucleotide
cugcacguccaggugccca

SEQ ID NO: 897435 - RNA, 19 nt, Artificial Sequence
  Description of Artificial Sequence: Synthetic oligonucleotide
cacguccaggugcccauaa

SEQ ID NO: 897436 - RNA, 19 nt, Artificial Sequence
  Description of Artificial Sequence: Synthetic oligonucleotide
ccucggaggccguacguga

SEQ ID NO: 897437 - RNA, 19 nt, Artificial Sequence
  Description of Artificial Sequence: Synthetic oligonucleotide
ccaccguggcccauguaca

SEQ ID NO: 897438 - RNA, 19 nt, Artificial Sequence
  Description of Artificial Sequence: Synthetic oligonucleotide
uucugggagugggcaccgu

SEQ ID NO: 897439 - RNA, 19 nt, Artificial Sequence
  Description of Artificial Sequence: Synthetic oligonucleotide
acgagaguucucaguucuu

SEQ ID NO: 897440 - RNA, 19 nt, Artificial Sequence
  Description of Artificial Sequence: Synthetic oligonucleotide
gccucggaggccguacgug

SEQ ID NO: 897441 - RNA, 19 nt, Artificial Sequence
  Description of Artificial Sequence: Synthetic oligonucleotide
cccaagcaucuggaugucc

SEQ ID NO: 897442 - RNA, 19 nt, Artificial Sequence
  Description of Artificial Sequence: Synthetic oligonucleotide
ccguacgugaugcauggcu

SEQ ID NO: 897443 - RNA, 19 nt, Artificial Sequence
  Description of Artificial Sequence: Synthetic oligonucleotide
gccuucggagccagacucc

SEQ ID NO: 897444 - RNA, 19 nt, Artificial Sequence
  Description of Artificial Sequence: Synthetic oligonucleotide
gagauccgucauggcuuca

SEQ ID NO: 897445 - RNA, 19 nt, Artificial Sequence
  Description of Artificial Sequence: Synthetic oligonucleotide
cggaggccguacgugaugc

SEQ ID NO: 897446 - RNA, 19 nt, Artificial Sequence
  Description of Artificial Sequence: Synthetic oligonucleotide
cuggucaagucagguucaa

SEQ ID NO: 897447 - RNA, 19 nt, Artificial Sequence
  Description of Artificial Sequence: Synthetic oligonucleotide
ggacugcaacaggagggga

SEQ ID NO: 897448 - RNA, 19 nt, Artificial Sequence
  Description of Artificial Sequence: Synthetic oligonucleotide
ucccaccguggcccaugua

SEQ ID NO: 897449 - RNA, 19 nt, Artificial Sequence
  Description of Artificial Sequence: Synthetic oligonucleotide
ggaggccguacgugaugca

SEQ ID NO: 897450 - RNA, 19 nt, Artificial Sequence
  Description of Artificial Sequence: Synthetic oligonucleotide
ccacuagggcuguguggac

SEQ ID NO: 897451 - RNA, 19 nt, Artificial Sequence
  Description of Artificial Sequence: Synthetic oligonucleotide
ccaccauacacuccagaau

SEQ ID NO: 897452 - RNA, 19 nt, Artificial Sequence
  Description of Artificial Sequence: Synthetic oligonucleotide
uccggccacuggccccuua

SEQ ID NO: 897453 - RNA, 19 nt, Artificial Sequence
  Description of Artificial Sequence: Synthetic oligonucleotide
cucggaggccguacgugau

SEQ ID NO: 897454 - RNA, 19 nt, Artificial Sequence
  Description of Artificial Sequence: Synthetic oligonucleotide
ccagacuccuccaugccuu

SEQ ID NO: 897455 - RNA, 19 nt, Artificial Sequence
  Description of Artificial Sequence: Synthetic oligonucleotide
gauggucagcaagggucuu

SEQ ID NO: 897456 - RNA, 19 nt, Artificial Sequence
  Description of Artificial Sequence: Synthetic oligonucleotide
cuggccccuuaucauccgu

SEQ ID NO: 897457 - RNA, 19 nt, Artificial Sequence
  Description of Artificial Sequence: Synthetic oligonucleotide
ccagcuuacccaacaggau

SEQ ID NO: 897458 - RNA, 19 nt, Artificial Sequence
  Description of Artificial Sequence: Synthetic oligonucleotide
ccguggcccauguacaccu

SEQ ID NO: 897459 - RNA, 19 nt, Artificial Sequence
  Description of Artificial Sequence: Synthetic oligonucleotide
cauccggccacuggccccu

SEQ ID NO: 897460 - RNA, 19 nt, Artificial Sequence
  Description of Artificial Sequence: Synthetic oligonucleotide
ccacuucccuaagaaagcu

SEQ ID NO: 897461 - RNA, 19 nt, Artificial Sequence
  Description of Artificial Sequence: Synthetic oligonucleotide
gccguacgugaugcauggc

SEQ ID NO: 897462 - RNA, 19 nt, Artificial Sequence
  Description of Artificial Sequence: Synthetic oligonucleotide
cguacgugaugcauggcuu

SEQ ID NO: 897463 - RNA, 19 nt, Artificial Sequence
  Description of Artificial Sequence: Synthetic oligonucleotide
cguccaggugcccauaaau

SEQ ID NO: 897464 - RNA, 19 nt, Artificial Sequence
  Description of Artificial Sequence: Synthetic oligonucleotide
gggguaucucugagccauc

SEQ ID NO: 897465 - RNA, 19 nt, Artificial Sequence
  Description of Artificial Sequence: Synthetic oligonucleotide
gccagucuucugauaggcu

SEQ ID NO: 897466 - RNA, 19 nt, Artificial Sequence
  Description of Artificial Sequence: Synthetic oligonucleotide
ccacccauucugcaaguuu

SEQ ID NO: 897467 - RNA, 19 nt, Artificial Sequence
  Description of Artificial Sequence: Synthetic oligonucleotide
gcacaucaucaccuuuauu

SEQ ID NO: 897468 - RNA, 19 nt, Artificial Sequence
  Description of Artificial Sequence: Synthetic oligonucleotide
ccaccuucccuggucaagu

SEQ ID NO: 897469 - RNA, 19 nt, Artificial Sequence
  Description of Artificial Sequence: Synthetic oligonucleotide
ccugugaccugagggagau

SEQ ID NO: 897470 - RNA, 19 nt, Artificial Sequence
  Description of Artificial Sequence: Synthetic oligonucleotide
ccccaagcaucuggauguc

SEQ ID NO: 897471 - RNA, 19 nt, Artificial Sequence
  Description of Artificial Sequence: Synthetic oligonucleotide
ccguugagccucucccaua

SEQ ID NO: 897472 - RNA, 19 nt, Artificial Sequence
  Description of Artificial Sequence: Synthetic oligonucleotide
cugugaccugagggagaua

SEQ ID NO: 897473 - RNA, 19 nt, Artificial Sequence
  Description of Artificial Sequence: Synthetic oligonucleotide
ccggccacuggccccuuau

SEQ ID NO: 897474 - RNA, 19 nt, Artificial Sequence
  Description of Artificial Sequence: Synthetic oligonucleotide
aaugaaaggauauaaagga

SEQ ID NO: 897475 - RNA, 19 nt, Artificial Sequence
  Description of Artificial Sequence: Synthetic oligonucleotide
guaacuaccauguaguacg

SEQ ID NO: 897476 - RNA, 19 nt, Artificial Sequence
  Description of Artificial Sequence: Synthetic oligonucleotide
uuaaaacagauccugagcc

SEQ ID NO: 897477 - RNA, 19 nt, Artificial Sequence
  Description of Artificial Sequence: Synthetic oligonucleotide
auuuucuuaacccagaggu

SEQ ID NO: 897478 - RNA, 19 nt, Artificial Sequence
  Description of Artificial Sequence: Synthetic oligonucleotide
ucaacugugggucauaaag

SEQ ID NO: 897479 - RNA, 19 nt, Artificial Sequence
  Description of Artificial Sequence: Synthetic oligonucleotide
aaaggauacacuuaagcca

SEQ ID NO: 897480 - RNA, 19 nt, Artificial Sequence
  Description of Artificial Sequence: Synthetic oligonucleotide
uaaaauugguucaaagggg

SEQ ID NO: 897481 - RNA, 19 nt, Artificial Sequence
  Description of Artificial Sequence: Synthetic oligonucleotide
aauaacaaaggauacacuu

SEQ ID NO: 897482 - RNA, 19 nt, Artificial Sequence
  Description of Artificial Sequence: Synthetic oligonucleotide
auuugaaugaguaacuacc

SEQ ID NO: 897483 - RNA, 19 nt, Artificial Sequence
  Description of Artificial Sequence: Synthetic oligonucleotide
gaugugaugggauggaugg

SEQ ID NO: 897484 - RNA, 19 nt, Artificial Sequence
  Description of Artificial Sequence: Synthetic oligonucleotide
uuuagcauuaccaaacuuc

SEQ ID NO: 897485 - RNA, 19 nt, Artificial Sequence
  Description of Artificial Sequence: Synthetic oligonucleotide
aaauuuaugcuucuguuau

SEQ ID NO: 897486 - RNA, 19 nt, Artificial Sequence
  Description of Artificial Sequence: Synthetic oligonucleotide
uguuguacauuucaaaugu

SEQ ID NO: 897487 - RNA, 19 nt, Artificial Sequence
  Description of Artificial Sequence: Synthetic oligonucleotide
agcacauagaauuucauug

SEQ ID NO: 897488 - RNA, 19 nt, Artificial Sequence
  Description of Artificial Sequence: Synthetic oligonucleotide
uuauaguugauuugaauga

SEQ ID NO: 897489 - RNA, 19 nt, Artificial Sequence
  Description of Artificial Sequence: Synthetic oligonucleotide
aauaagaauauuacaucac

SEQ ID NO: 897490 - RNA, 19 nt, Artificial Sequence
  Description of Artificial Sequence: Synthetic oligonucleotide
uguaguacgaaagacagga

SEQ ID NO: 897491 - RNA, 19 nt, Artificial Sequence
  Description of Artificial Sequence: Synthetic oligonucleotide
aauuuucuuaacccagagg

SEQ ID NO: 897492 - RNA, 19 nt, Artificial Sequence
  Description of Artificial Sequence: Synthetic oligonucleotide
aagagugcguccuuuaaag

SEQ ID NO: 897493 - RNA, 19 nt, Artificial Sequence
  Description of Artificial Sequence: Synthetic oligonucleotide
ucauaaagaaguuauuaac

SEQ ID NO: 897494 - RNA, 19 nt, Artificial Sequence
  Description of Artificial Sequence: Synthetic oligonucleotide
uuacaucacauuugcaucg

SEQ ID NO: 897495 - RNA, 19 nt, Artificial Sequence
  Description of Artificial Sequence: Synthetic oligonucleotide
guuuacaccugucagacag

SEQ ID NO: 897496 - RNA, 19 nt, Artificial Sequence
  Description of Artificial Sequence: Synthetic oligonucleotide
aaaacgaaaugaacgggcc

SEQ ID NO: 897497 - RNA, 19 nt, Artificial Sequence
  Description of Artificial Sequence: Synthetic oligonucleotide
aaucugaccaaugaucuuc

SEQ ID NO: 897498 - RNA, 19 nt, Artificial Sequence
  Description of Artificial Sequence: Synthetic oligonucleotide
aguacgaaagacaggaugc

SEQ ID NO: 897499 - RNA, 19 nt, Artificial Sequence
  Description of Artificial Sequence: Synthetic oligonucleotide
ugaguaacuaccauguagu

SEQ ID NO: 897500 - RNA, 19 nt, Artificial Sequence
  Description of Artificial Sequence: Synthetic oligonucleotide
ugugugaaaauucuaagua

SEQ ID NO: 897501 - RNA, 19 nt, Artificial Sequence
  Description of Artificial Sequence: Synthetic oligonucleotide
ugaguuugaaauguggcgg

SEQ ID NO: 897502 - RNA, 19 nt, Artificial Sequence
  Description of Artificial Sequence: Synthetic oligonucleotide
ugagcuuagguacagauua

SEQ ID NO: 897503 - RNA, 19 nt, Artificial Sequence
  Description of Artificial Sequence: Synthetic oligonucleotide
ugaaguucuaaacaacgca

SEQ ID NO: 897504 - RNA, 19 nt, Artificial Sequence
  Description of Artificial Sequence: Synthetic oligonucleotide
uuugcaucgaaaacaaaac

SEQ ID NO: 897505 - RNA, 19 nt, Artificial Sequence
  Description of Artificial Sequence: Synthetic oligonucleotide
uuuacuuccuaauuugugu

SEQ ID NO: 897506 - RNA, 19 nt, Artificial Sequence
  Description of Artificial Sequence: Synthetic oligonucleotide
aggaguuagccccuuaagc

SEQ ID NO: 897507 - RNA, 19 nt, Artificial Sequence
  Description of Artificial Sequence: Synthetic oligonucleotide
ugaaugaguaacuaccaug

SEQ ID NO: 897508 - RNA, 19 nt, Artificial Sequence
  Description of Artificial Sequence: Synthetic oligonucleotide
aacggaauuguagaacccc

SEQ ID NO: 897509 - RNA, 19 nt, Artificial Sequence
  Description of Artificial Sequence: Synthetic oligonucleotide
ugaucacuagaugaaaugg

SEQ ID NO: 897510 - RNA, 19 nt, Artificial Sequence
  Description of Artificial Sequence: Synthetic oligonucleotide
agucuuaggaauccuaguc

SEQ ID NO: 897511 - RNA, 19 nt, Artificial Sequence
  Description of Artificial Sequence: Synthetic oligonucleotide
augaguaacuaccauguag

SEQ ID NO: 897512 - RNA, 19 nt, Artificial Sequence
  Description of Artificial Sequence: Synthetic oligonucleotide
uuugcuuacacaguaaggu

SEQ ID NO: 897513 - RNA, 19 nt, Artificial Sequence
  Description of Artificial Sequence: Synthetic oligonucleotide
aaaaugcacaacaaaccac

SEQ ID NO: 897514 - RNA, 19 nt, Artificial Sequence
  Description of Artificial Sequence: Synthetic oligonucleotide
aaaauggcaagagugcguc

SEQ ID NO: 897515 - RNA, 19 nt, Artificial Sequence
  Description of Artificial Sequence: Synthetic oligonucleotide
caaacggaauuguagaacc

SEQ ID NO: 897516 - RNA, 19 nt, Artificial Sequence
  Description of Artificial Sequence: Synthetic oligonucleotide
ugcaauauaucccuguaaa

SEQ ID NO: 897517 - RNA, 19 nt, Artificial Sequence
  Description of Artificial Sequence: Synthetic oligonucleotide
agcaguagacguuauuuac

SEQ ID NO: 897518 - RNA, 19 nt, Artificial Sequence
  Description of Artificial Sequence: Synthetic oligonucleotide
aaaugaacgggccaacagu

SEQ ID NO: 897519 - RNA, 19 nt, Artificial Sequence
  Description of Artificial Sequence: Synthetic oligonucleotide
acauuuagcauuaccaaac

SEQ ID NO: 897520 - RNA, 19 nt, Artificial Sequence
  Description of Artificial Sequence: Synthetic oligonucleotide
aacuugaguaccaaauaac

SEQ ID NO: 897521 - RNA, 19 nt, Artificial Sequence
  Description of Artificial Sequence: Synthetic oligonucleotide
guugauuugaaugaguaac

SEQ ID NO: 897522 - RNA, 19 nt, Artificial Sequence
  Description of Artificial Sequence: Synthetic oligonucleotide
ucuauaggacaccugaggu

SEQ ID NO: 897523 - RNA, 19 nt, Artificial Sequence
  Description of Artificial Sequence: Synthetic oligonucleotide
acauaaaauggcaagagug

SEQ ID NO: 897524 - RNA, 19 nt, Artificial Sequence
  Description of Artificial Sequence: Synthetic oligonucleotide
uuuaaucaugcaaacucca

SEQ ID NO: 897525 - RNA, 19 nt, Artificial Sequence
  Description of Artificial Sequence: Synthetic oligonucleotide
acaauuaccagcaagcuga

SEQ ID NO: 897526 - RNA, 19 nt, Artificial Sequence
  Description of Artificial Sequence: Synthetic oligonucleotide
uaguacgaaagacaggaug

SEQ ID NO: 897527 - RNA, 19 nt, Artificial Sequence
  Description of Artificial Sequence: Synthetic oligonucleotide
ucuaaguagucaaaaguaa

SEQ ID NO: 897528 - RNA, 19 nt, Artificial Sequence
  Description of Artificial Sequence: Synthetic oligonucleotide
uugaaaauuaucugcaaua

SEQ ID NO: 897529 - RNA, 19 nt, Artificial Sequence
  Description of Artificial Sequence: Synthetic oligonucleotide
accacaauuaccagcaagc

SEQ ID NO: 897530 - RNA, 19 nt, Artificial Sequence
  Description of Artificial Sequence: Synthetic oligonucleotide
gaaguucuaaacaacgcag

SEQ ID NO: 897531 - RNA, 19 nt, Artificial Sequence
  Description of Artificial Sequence: Synthetic oligonucleotide
aucuauaggacaccugagg

SEQ ID NO: 897532 - RNA, 19 nt, Artificial Sequence
  Description of Artificial Sequence: Synthetic oligonucleotide
ugaguaccaaauaacauua

SEQ ID NO: 897533 - RNA, 19 nt, Artificial Sequence
  Description of Artificial Sequence: Synthetic oligonucleotide
gacagugcuaaucugacca

SEQ ID NO: 897534 - RNA, 19 nt, Artificial Sequence
  Description of Artificial Sequence: Synthetic oligonucleotide
aauagguacaauacuauaa

SEQ ID NO: 897535 - RNA, 19 nt, Artificial Sequence
  Description of Artificial Sequence: Synthetic oligonucleotide
acaguaaggugcuaauagg

SEQ ID NO: 897536 - RNA, 19 nt, Artificial Sequence
  Description of Artificial Sequence: Synthetic oligonucleotide
auaaaauggcaagagugcg

SEQ ID NO: 897537 - RNA, 19 nt, Artificial Sequence
  Description of Artificial Sequence: Synthetic oligonucleotide
cuuucccugaauauuaaac

SEQ ID NO: 897538 - RNA, 19 nt, Artificial Sequence
  Description of Artificial Sequence: Synthetic oligonucleotide
uuagguacagauuaugauu

SEQ ID NO: 897539 - RNA, 19 nt, Artificial Sequence
  Description of Artificial Sequence: Synthetic oligonucleotide
ugauuauuagauuguguga

SEQ ID NO: 897540 - RNA, 19 nt, Artificial Sequence
  Description of Artificial Sequence: Synthetic oligonucleotide
uacagauuaugauuuguca

SEQ ID NO: 897541 - RNA, 19 nt, Artificial Sequence
  Description of Artificial Sequence: Synthetic oligonucleotide
uugauguacacaguaauac

SEQ ID NO: 897542 - RNA, 19 nt, Artificial Sequence
  Description of Artificial Sequence: Synthetic oligonucleotide
uuaacucuucaaauauugc

SEQ ID NO: 897543 - RNA, 19 nt, Artificial Sequence
  Description of Artificial Sequence: Synthetic oligonucleotide
gaauauuacaucacauuug

SEQ ID NO: 897544 - RNA, 19 nt, Artificial Sequence
  Description of Artificial Sequence: Synthetic oligonucleotide
uagauugugugaaaauucu

SEQ ID NO: 897545 - RNA, 19 nt, Artificial Sequence
  Description of Artificial Sequence: Synthetic oligonucleotide
ucagacagugcuaaucuga

SEQ ID NO: 897546 - RNA, 19 nt, Artificial Sequence
  Description of Artificial Sequence: Synthetic oligonucleotide
aggaauccuagucacacag

SEQ ID NO: 897547 - RNA, 19 nt, Artificial Sequence
  Description of Artificial Sequence: Synthetic oligonucleotide
auacuauaaaauugguuca

SEQ ID NO: 897548 - RNA, 19 nt, Artificial Sequence
  Description of Artificial Sequence: Synthetic oligonucleotide
gaaaugaacgggccaacag

SEQ ID NO: 897549 - RNA, 19 nt, Artificial Sequence
  Description of Artificial Sequence: Synthetic oligonucleotide
ugcugugaucacuagauga

SEQ ID NO: 897550 - RNA, 19 nt, Artificial Sequence
  Description of Artificial Sequence: Synthetic oligonucleotide
aguucuaaacaacgcagag

SEQ ID NO: 897551 - RNA, 19 nt, Artificial Sequence
  Description of Artificial Sequence: Synthetic oligonucleotide
gugugaaaauucuaaguag

SEQ ID NO: 897552 - RNA, 19 nt, Artificial Sequence
  Description of Artificial Sequence: Synthetic oligonucleotide
uugcauauugagcuuaggu

SEQ ID NO: 897553 - RNA, 19 nt, Artificial Sequence
  Description of Artificial Sequence: Synthetic oligonucleotide
uaauacugauagcugaggu

SEQ ID NO: 897554 - RNA, 19 nt, Artificial Sequence
  Description of Artificial Sequence: Synthetic oligonucleotide
ugucagacagugcuaaucu

SEQ ID NO: 897555 - RNA, 19 nt, Artificial Sequence
  Description of Artificial Sequence: Synthetic oligonucleotide
auuuacugcuacucauagc

SEQ ID NO: 897556 - RNA, 19 nt, Artificial Sequence
  Description of Artificial Sequence: Synthetic oligonucleotide
uguugauguacacaguaau

SEQ ID NO: 897557 - RNA, 19 nt, Artificial Sequence
  Description of Artificial Sequence: Synthetic oligonucleotide
ugcauauugagcuuaggua

SEQ ID NO: 897558 - RNA, 19 nt, Artificial Sequence
  Description of Artificial Sequence: Synthetic oligonucleotide
auagguacaauacuauaaa

SEQ ID NO: 897559 - RNA, 19 nt, Artificial Sequence
  Description of Artificial Sequence: Synthetic oligonucleotide
uguauuuacugcuacucau

SEQ ID NO: 897560 - RNA, 19 nt, Artificial Sequence
  Description of Artificial Sequence: Synthetic oligonucleotide
cuagucacacagcacauag

SEQ ID NO: 897561 - RNA, 19 nt, Artificial Sequence
  Description of Artificial Sequence: Synthetic oligonucleotide
auaaauuuaugcuucuguu

SEQ ID NO: 897562 - RNA, 19 nt, Artificial Sequence
  Description of Artificial Sequence: Synthetic oligonucleotide
ucuuaggaauccuagucac

SEQ ID NO: 897563 - RNA, 19 nt, Artificial Sequence
  Description of Artificial Sequence: Synthetic oligonucleotide
uugcaucgaaaacaaaaca

SEQ ID NO: 897564 - RNA, 19 nt, Artificial Sequence
  Description of Artificial Sequence: Synthetic oligonucleotide
aauacugauagcugagguu

SEQ ID NO: 897565 - RNA, 19 nt, Artificial Sequence
  Description of Artificial Sequence: Synthetic oligonucleotide
aaauagguacaauacuaua

SEQ ID NO: 897566 - RNA, 19 nt, Artificial Sequence
  Description of Artificial Sequence: Synthetic oligonucleotide
cuaccauguaguacgaaag

SEQ ID NO: 897567 - RNA, 19 nt, Artificial Sequence
  Description of Artificial Sequence: Synthetic oligonucleotide
aaguuguggacuuuugcau

SEQ ID NO: 897568 - RNA, 19 nt, Artificial Sequence
  Description of Artificial Sequence: Synthetic oligonucleotide
aaauggcaagagugcgucc

SEQ ID NO: 897569 - RNA, 19 nt, Artificial Sequence
  Description of Artificial Sequence: Synthetic oligonucleotide
uaaaacagauccugagccc

SEQ ID NO: 897570 - RNA, 19 nt, Artificial Sequence
  Description of Artificial Sequence: Synthetic oligonucleotide
uuaggaauccuagucacac

SEQ ID NO: 897571 - RNA, 19 nt, Artificial Sequence
  Description of Artificial Sequence: Synthetic oligonucleotide
auccuagucacacagcaca

SEQ ID NO: 897572 - RNA, 19 nt, Artificial Sequence
  Description of Artificial Sequence: Synthetic oligonucleotide
ucacauacuuagguaaggg

SEQ ID NO: 897573 - RNA, 19 nt, Artificial Sequence
  Description of Artificial Sequence: Synthetic oligonucleotide
uaguugauuugaaugagua

SEQ ID NO: 897574 - RNA, 19 nt, Artificial Sequence
  Description of Artificial Sequence: Synthetic oligonucleotide
gaagucuuaggaauccuag

SEQ ID NO: 897575 - RNA, 19 nt, Artificial Sequence
  Description of Artificial Sequence: Synthetic oligonucleotide
aaacggaauuguagaaccc

SEQ ID NO: 897576 - RNA, 19 nt, Artificial Sequence
  Description of Artificial Sequence: Synthetic oligonucleotide
cugaaguucuaaacaacgc

SEQ ID NO: 897577 - RNA, 19 nt, Artificial Sequence
  Description of Artificial Sequence: Synthetic oligonucleotide
cauuugcuuacacaguaag

SEQ ID NO: 897578 - RNA, 19 nt, Artificial Sequence
  Description of Artificial Sequence: Synthetic oligonucleotide
guagacguuauuuacaacu

SEQ ID NO: 897579 - RNA, 19 nt, Artificial Sequence
  Description of Artificial Sequence: Synthetic oligonucleotide
agauuaugauuugucaauc

SEQ ID NO: 897580 - RNA, 19 nt, Artificial Sequence
  Description of Artificial Sequence: Synthetic oligonucleotide
agagugcguccuuuaaagc

SEQ ID NO: 897581 - RNA, 19 nt, Artificial Sequence
  Description of Artificial Sequence: Synthetic oligonucleotide
uaaaauggcaagagugcgu

SEQ ID NO: 897582 - RNA, 19 nt, Artificial Sequence
  Description of Artificial Sequence: Synthetic oligonucleotide
uuuguguuguacauuucaa

SEQ ID NO: 897583 - RNA, 19 nt, Artificial Sequence
  Description of Artificial Sequence: Synthetic oligonucleotide
uguggacuuuugcauauug

SEQ ID NO: 897584 - RNA, 19 nt, Artificial Sequence
  Description of Artificial Sequence: Synthetic oligonucleotide
gaguuagccccuuaagccc

SEQ ID NO: 897585 - RNA, 19 nt, Artificial Sequence
  Description of Artificial Sequence: Synthetic oligonucleotide
augaucuuccaguacauaa

SEQ ID NO: 897586 - RNA, 19 nt, Artificial Sequence
  Description of Artificial Sequence: Synthetic oligonucleotide
gcauauugagcuuagguac

SEQ ID NO: 897587 - RNA, 19 nt, Artificial Sequence
  Description of Artificial Sequence: Synthetic oligonucleotide
ggaguuagccccuuaagcc

SEQ ID NO: 897588 - RNA, 19 nt, Artificial Sequence
  Description of Artificial Sequence: Synthetic oligonucleotide
uuauuuaaucaugcaaacu

SEQ ID NO: 897589 - RNA, 19 nt, Artificial Sequence
  Description of Artificial Sequence: Synthetic oligonucleotide
aggaagucaaguacaacac

SEQ ID NO: 897590 - RNA, 19 nt, Artificial Sequence
  Description of Artificial Sequence: Synthetic oligonucleotide
aguccuuugaaaggcacgg

SEQ ID NO: 897591 - RNA, 19 nt, Artificial Sequence
  Description of Artificial Sequence: Synthetic oligonucleotide
ugaagagaucaccuuuccc

SEQ ID NO: 897592 - RNA, 19 nt, Artificial Sequence
  Description of Artificial Sequence: Synthetic oligonucleotide
uauuagauugugugaaaau

SEQ ID NO: 897593 - RNA, 19 nt, Artificial Sequence
  Description of Artificial Sequence: Synthetic oligonucleotide
cacuagaugaaauggaaga

SEQ ID NO: 897594 - RNA, 19 nt, Artificial Sequence
  Description of Artificial Sequence: Synthetic oligonucleotide
ucuugggaccaucugauua

SEQ ID NO: 897595 - RNA, 19 nt, Artificial Sequence
  Description of Artificial Sequence: Synthetic oligonucleotide
ugugaucacuagaugaaau

SEQ ID NO: 897596 - RNA, 19 nt, Artificial Sequence
  Description of Artificial Sequence: Synthetic oligonucleotide
aguaccaaauaacauuaaa

SEQ ID NO: 897597 - RNA, 19 nt, Artificial Sequence
  Description of Artificial Sequence: Synthetic oligonucleotide
acacgagacucuugggacc

SEQ ID NO: 897598 - RNA, 19 nt, Artificial Sequence
  Description of Artificial Sequence: Synthetic oligonucleotide
ucacuuaagaagcaacauu

SEQ ID NO: 897599 - RNA, 19 nt, Artificial Sequence
  Description of Artificial Sequence: Synthetic oligonucleotide
gggaacugcaaacaaaccc

SEQ ID NO: 897600 - RNA, 19 nt, Artificial Sequence
  Description of Artificial Sequence: Synthetic oligonucleotide
ucaguuucuacaguuuaca

SEQ ID NO: 897601 - RNA, 19 nt, Artificial Sequence
  Description of Artificial Sequence: Synthetic oligonucleotide
aagucuuaggaauccuagu

SEQ ID NO: 897602 - RNA, 19 nt, Artificial Sequence
  Description of Artificial Sequence: Synthetic oligonucleotide
auugagcuuagguacagau

SEQ ID NO: 897603 - RNA, 19 nt, Artificial Sequence
  Description of Artificial Sequence: Synthetic oligonucleotide
agucaaguacaacacauuu

SEQ ID NO: 897604 - RNA, 19 nt, Artificial Sequence
  Description of Artificial Sequence: Synthetic oligonucleotide
aagacaggaugcuucagua

SEQ ID NO: 897605 - RNA, 19 nt, Artificial Sequence
  Description of Artificial Sequence: Synthetic oligonucleotide
accaaugaucuuccaguac

SEQ ID NO: 897606 - RNA, 19 nt, Artificial Sequence
  Description of Artificial Sequence: Synthetic oligonucleotide
aauggcaagagugcguccu

SEQ ID NO: 897607 - RNA, 19 nt, Artificial Sequence
  Description of Artificial Sequence: Synthetic oligonucleotide
uuagguaaggguuccccac

SEQ ID NO: 897608 - RNA, 19 nt, Artificial Sequence
  Description of Artificial Sequence: Synthetic oligonucleotide
aguagacguuauuuacaac

SEQ ID NO: 897609 - RNA, 19 nt, Artificial Sequence
  Description of Artificial Sequence: Synthetic oligonucleotide
auuagauugugugaaaauu

SEQ ID NO: 897610 - RNA, 19 nt, Artificial Sequence
  Description of Artificial Sequence: Synthetic oligonucleotide
uuuuaacucuucaaauauu

SEQ ID NO: 897611 - RNA, 19 nt, Artificial Sequence
  Description of Artificial Sequence: Synthetic oligonucleotide
caucgaaaacaaaacacca

SEQ ID NO: 897612 - RNA, 19 nt, Artificial Sequence
  Description of Artificial Sequence: Synthetic oligonucleotide
caugagggccaguagauuc

SEQ ID NO: 897613 - RNA, 19 nt, Artificial Sequence
  Description of Artificial Sequence: Synthetic oligonucleotide
agacagugcuaaucugacc

SEQ ID NO: 897614 - RNA, 19 nt, Artificial Sequence
  Description of Artificial Sequence: Synthetic oligonucleotide
aaaacccaaacggaauugu

SEQ ID NO: 897615 - RNA, 19 nt, Artificial Sequence
  Description of Artificial Sequence: Synthetic oligonucleotide
auacuuagguaaggguucc

SEQ ID NO: 897616 - RNA, 19 nt, Artificial Sequence
  Description of Artificial Sequence: Synthetic oligonucleotide
acuugaguaccaaauaaca

SEQ ID NO: 897617 - RNA, 19 nt, Artificial Sequence
  Description of Artificial Sequence: Synthetic oligonucleotide
cauguauuuacugcuacuc

SEQ ID NO: 897618 - RNA, 19 nt, Artificial Sequence
  Description of Artificial Sequence: Synthetic oligonucleotide
aacaacgcagagccacguc

SEQ ID NO: 897619 - RNA, 19 nt, Artificial Sequence
  Description of Artificial Sequence: Synthetic oligonucleotide
auauaaaggaggaagucaa

SEQ ID NO: 897620 - RNA, 19 nt, Artificial Sequence
  Description of Artificial Sequence: Synthetic oligonucleotide
gacguuauuuacaacuuga

SEQ ID NO: 897621 - RNA, 19 nt, Artificial Sequence
  Description of Artificial Sequence: Synthetic oligonucleotide
cugagguaguagaaacugg

SEQ ID NO: 897622 - RNA, 19 nt, Artificial Sequence
  Description of Artificial Sequence: Synthetic oligonucleotide
aauguggcgggcauguuga

SEQ ID NO: 897623 - RNA, 19 nt, Artificial Sequence
  Description of Artificial Sequence: Synthetic oligonucleotide
auguauuuacugcuacuca

SEQ ID NO: 897624 - RNA, 19 nt, Artificial Sequence
  Description of Artificial Sequence: Synthetic oligonucleotide
uucuacaguuuacaccugu

SEQ ID NO: 897625 - RNA, 19 nt, Artificial Sequence
  Description of Artificial Sequence: Synthetic oligonucleotide
aguaaggugcuaauaggag

SEQ ID NO: 897626 - RNA, 19 nt, Artificial Sequence
  Description of Artificial Sequence: Synthetic oligonucleotide
uagguacaauacuauaaaa

SEQ ID NO: 897627 - RNA, 19 nt, Artificial Sequence
  Description of Artificial Sequence: Synthetic oligonucleotide
ugaaauguggcgggcaugu

SEQ ID NO: 897628 - RNA, 19 nt, Artificial Sequence
  Description of Artificial Sequence: Synthetic oligonucleotide
acaacgcagagccacguca

SEQ ID NO: 897629 - RNA, 19 nt, Artificial Sequence
  Description of Artificial Sequence: Synthetic oligonucleotide
uucaguggcaugagggcca

SEQ ID NO: 897630 - RNA, 19 nt, Artificial Sequence
  Description of Artificial Sequence: Synthetic oligonucleotide
uacuuccuaauuuguguug

SEQ ID NO: 897631 - RNA, 19 nt, Artificial Sequence
  Description of Artificial Sequence: Synthetic oligonucleotide
uauaucccuguaaacuuau

SEQ ID NO: 897632 - RNA, 19 nt, Artificial Sequence
  Description of Artificial Sequence: Synthetic oligonucleotide
agacguuauuuacaacuug

SEQ ID NO: 897633 - RNA, 19 nt, Artificial Sequence
  Description of Artificial Sequence: Synthetic oligonucleotide
cacauagaauuucauugug

SEQ ID NO: 897634 - RNA, 19 nt, Artificial Sequence
  Description of Artificial Sequence: Synthetic oligonucleotide
ggaauaaacagcaguagac

SEQ ID NO: 897635 - RNA, 19 nt, Artificial Sequence
  Description of Artificial Sequence: Synthetic oligonucleotide
gaaugaguaacuaccaugu

SEQ ID NO: 897636 - RNA, 19 nt, Artificial Sequence
  Description of Artificial Sequence: Synthetic oligonucleotide
uugaaugaguaacuaccau

SEQ ID NO: 897637 - RNA, 19 nt, Artificial Sequence
  Description of Artificial Sequence: Synthetic oligonucleotide
guaccaaauaacauuaaaa

SEQ ID NO: 897638 - RNA, 19 nt, Artificial Sequence
  Description of Artificial Sequence: Synthetic oligonucleotide
aucacauacuuagguaagg

SEQ ID NO: 897639 - RNA, 19 nt, Artificial Sequence
  Description of Artificial Sequence: Synthetic oligonucleotide
ugcuaaucugaccaaugau

SEQ ID NO: 897640 - RNA, 19 nt, Artificial Sequence
  Description of Artificial Sequence: Synthetic oligonucleotide
aaacuuaucuuggaacuua

SEQ ID NO: 897641 - RNA, 19 nt, Artificial Sequence
  Description of Artificial Sequence: Synthetic oligonucleotide
aaguucuaaacaacgcaga

SEQ ID NO: 897642 - RNA, 19 nt, Artificial Sequence
  Description of Artificial Sequence: Synthetic oligonucleotide
auuuacuuccuaauuugug

SEQ ID NO: 897643 - RNA, 19 nt, Artificial Sequence
  Description of Artificial Sequence: Synthetic oligonucleotide
cacgguuuacaguuucugc

SEQ ID NO: 897644 - RNA, 19 nt, Artificial Sequence
  Description of Artificial Sequence: Synthetic oligonucleotide
aucuuggaacuuaauuuac

SEQ ID NO: 897645 - RNA, 19 nt, Artificial Sequence
  Description of Artificial Sequence: Synthetic oligonucleotide
ugaacgggccaacaguaaa

SEQ ID NO: 897646 - RNA, 19 nt, Artificial Sequence
  Description of Artificial Sequence: Synthetic oligonucleotide
cacaauuaccagcaagcug

SEQ ID NO: 897647 - RNA, 19 nt, Artificial Sequence
  Description of Artificial Sequence: Synthetic oligonucleotide
aacgcagagccacgucacg

SEQ ID NO: 897648 - RNA, 19 nt, Artificial Sequence
  Description of Artificial Sequence: Synthetic oligonucleotide
cuaaucugaccaaugaucu

SEQ ID NO: 897649 - RNA, 19 nt, Artificial Sequence
  Description of Artificial Sequence: Synthetic oligonucleotide
gguaguagaaacuggaaua

SEQ ID NO: 897650 - RNA, 19 nt, Artificial Sequence
  Description of Artificial Sequence: Synthetic oligonucleotide
aaugaacgggccaacagua

SEQ ID NO: 897651 - RNA, 19 nt, Artificial Sequence
  Description of Artificial Sequence: Synthetic oligonucleotide
agcccuggaagucuuagga

SEQ ID NO: 897652 - RNA, 19 nt, Artificial Sequence
  Description of Artificial Sequence: Synthetic oligonucleotide
cuguuauuuaaucaugcaa

SEQ ID NO: 897653 - RNA, 19 nt, Artificial Sequence
  Description of Artificial Sequence: Synthetic oligonucleotide
caguaauacugauagcuga

SEQ ID NO: 897654 - RNA, 19 nt, Artificial Sequence
  Description of Artificial Sequence: Synthetic oligonucleotide
uguacacaguaauacugau

SEQ ID NO: 897655 - RNA, 19 nt, Artificial Sequence
  Description of Artificial Sequence: Synthetic oligonucleotide
ucuacaguuuacaccuguc

SEQ ID NO: 897656 - RNA, 19 nt, Artificial Sequence
  Description of Artificial Sequence: Synthetic oligonucleotide
acauguauuuacugcuacu

SEQ ID NO: 897657 - RNA, 19 nt, Artificial Sequence
  Description of Artificial Sequence: Synthetic oligonucleotide
guaaggguuccccacuggc

SEQ ID NO: 897658 - RNA, 19 nt, Artificial Sequence
  Description of Artificial Sequence: Synthetic oligonucleotide
gucuuaggaauccuaguca

SEQ ID NO: 897659 - RNA, 19 nt, Artificial Sequence
  Description of Artificial Sequence: Synthetic oligonucleotide
uguugcacuuccugucucc

SEQ ID NO: 897660 - RNA, 19 nt, Artificial Sequence
  Description of Artificial Sequence: Synthetic oligonucleotide
uacuauaaaauugguucaa

SEQ ID NO: 897661 - RNA, 19 nt, Artificial Sequence
  Description of Artificial Sequence: Synthetic oligonucleotide
aacaaaggauacacuuaag

SEQ ID NO: 897662 - RNA, 19 nt, Artificial Sequence
  Description of Artificial Sequence: Synthetic oligonucleotide
caguaaggugcuaauagga

SEQ ID NO: 897663 - RNA, 19 nt, Artificial Sequence
  Description of Artificial Sequence: Synthetic oligonucleotide
uugaaaggcacgguuuaca

SEQ ID NO: 897664 - RNA, 19 nt, Artificial Sequence
  Description of Artificial Sequence: Synthetic oligonucleotide
uuugcauauugagcuuagg

SEQ ID NO: 897665 - RNA, 19 nt, Artificial Sequence
  Description of Artificial Sequence: Synthetic oligonucleotide
gaucacuagaugaaaugga

SEQ ID NO: 897666 - RNA, 19 nt, Artificial Sequence
  Description of Artificial Sequence: Synthetic oligonucleotide
uccuuugaaaggcacgguu

SEQ ID NO: 897667 - RNA, 19 nt, Artificial Sequence
  Description of Artificial Sequence: Synthetic oligonucleotide
caaaccacaacugaccaga

SEQ ID NO: 897668 - RNA, 19 nt, Artificial Sequence
  Description of Artificial Sequence: Synthetic oligonucleotide
aucugcaauauaucccugu

SEQ ID NO: 897669 - RNA, 19 nt, Artificial Sequence
  Description of Artificial Sequence: Synthetic oligonucleotide
gggaccaucugauuauuag

SEQ ID NO: 897670 - RNA, 19 nt, Artificial Sequence
  Description of Artificial Sequence: Synthetic oligonucleotide
aggcugaaguucuaaacaa

SEQ ID NO: 897671 - RNA, 19 nt, Artificial Sequence
  Description of Artificial Sequence: Synthetic oligonucleotide
cugugggucauaaagaagu

SEQ ID NO: 897672 - RNA, 19 nt, Artificial Sequence
  Description of Artificial Sequence: Synthetic oligonucleotide
uggaugggcgcagucgucg

SEQ ID NO: 897673 - RNA, 19 nt, Artificial Sequence
  Description of Artificial Sequence: Synthetic oligonucleotide
aaugaguaacuaccaugua

SEQ ID NO: 897674 - RNA, 19 nt, Artificial Sequence
  Description of Artificial Sequence: Synthetic oligonucleotide
gugagagugaacuuuggua

SEQ ID NO: 897675 - RNA, 19 nt, Artificial Sequence
  Description of Artificial Sequence: Synthetic oligonucleotide
cagacagugcuaaucugac

SEQ ID NO: 897676 - RNA, 19 nt, Artificial Sequence
  Description of Artificial Sequence: Synthetic oligonucleotide
agccacgucacgaagaccu

SEQ ID NO: 897677 - RNA, 19 nt, Artificial Sequence
  Description of Artificial Sequence: Synthetic oligonucleotide
ucuaaacaacgcagagcca

SEQ ID NO: 897678 - RNA, 19 nt, Artificial Sequence
  Description of Artificial Sequence: Synthetic oligonucleotide
caguuucuacaguuuacac

SEQ ID NO: 897679 - RNA, 19 nt, Artificial Sequence
  Description of Artificial Sequence: Synthetic oligonucleotide
cgggccaacaguaaaaugc

SEQ ID NO: 897680 - RNA, 19 nt, Artificial Sequence
  Description of Artificial Sequence: Synthetic oligonucleotide
aucugauuauuagauugug

SEQ ID NO: 897681 - RNA, 19 nt, Artificial Sequence
  Description of Artificial Sequence: Synthetic oligonucleotide
ucugcacaaguuguggacu

SEQ ID NO: 897682 - RNA, 19 nt, Artificial Sequence
  Description of Artificial Sequence: Synthetic oligonucleotide
aauuaccagcaagcugagg

SEQ ID NO: 897683 - RNA, 19 nt, Artificial Sequence
  Description of Artificial Sequence: Synthetic oligonucleotide
cauauugagcuuagguaca

SEQ ID NO: 897684 - RNA, 19 nt, Artificial Sequence
  Description of Artificial Sequence: Synthetic oligonucleotide
acagcaguagacguuauuu

SEQ ID NO: 897685 - RNA, 19 nt, Artificial Sequence
  Description of Artificial Sequence: Synthetic oligonucleotide
uagguaaggguuccccacu

SEQ ID NO: 897686 - RNA, 19 nt, Artificial Sequence
  Description of Artificial Sequence: Synthetic oligonucleotide
uaucugcaauauaucccug

SEQ ID NO: 897687 - RNA, 19 nt, Artificial Sequence
  Description of Artificial Sequence: Synthetic oligonucleotide
uuacaacuugaguaccaaa

SEQ ID NO: 897688 - RNA, 19 nt, Artificial Sequence
  Description of Artificial Sequence: Synthetic oligonucleotide
auauugagcuuagguacag

SEQ ID NO: 897689 - RNA, 19 nt, Artificial Sequence
  Description of Artificial Sequence: Synthetic oligonucleotide
caacuugaguaccaaauaa

SEQ ID NO: 897690 - RNA, 19 nt, Artificial Sequence
  Description of Artificial Sequence: Synthetic oligonucleotide
ugcacacgagacucuuggg

SEQ ID NO: 897691 - RNA, 19 nt, Artificial Sequence
  Description of Artificial Sequence: Synthetic oligonucleotide
ggccaguagauucucaaug

SEQ ID NO: 897692 - RNA, 19 nt, Artificial Sequence
  Description of Artificial Sequence: Synthetic oligonucleotide
acuuccuaauuuguguugu

SEQ ID NO: 897693 - RNA, 19 nt, Artificial Sequence
  Description of Artificial Sequence: Synthetic oligonucleotide
acguuauuuacaacuugag

SEQ ID NO: 897694 - RNA, 19 nt, Artificial Sequence
  Description of Artificial Sequence: Synthetic oligonucleotide
agacaguuugaguuugaaa

SEQ ID NO: 897695 - RNA, 19 nt, Artificial Sequence
  Description of Artificial Sequence: Synthetic oligonucleotide
acaauacuauaaaauuggu

SEQ ID NO: 897696 - RNA, 19 nt, Artificial Sequence
  Description of Artificial Sequence: Synthetic oligonucleotide
uugagcuuagguacagauu

SEQ ID NO: 897697 - RNA, 19 nt, Artificial Sequence
  Description of Artificial Sequence: Synthetic oligonucleotide
uuuacaccugucagacagu

SEQ ID NO: 897698 - RNA, 19 nt, Artificial Sequence
  Description of Artificial Sequence: Synthetic oligonucleotide
uaacuaccauguaguacga

SEQ ID NO: 897699 - RNA, 19 nt, Artificial Sequence
  Description of Artificial Sequence: Synthetic oligonucleotide
gaagucaaguacaacacau

SEQ ID NO: 897700 - RNA, 19 nt, Artificial Sequence
  Description of Artificial Sequence: Synthetic oligonucleotide
aucacuagaugaaauggaa

SEQ ID NO: 897701 - RNA, 19 nt, Artificial Sequence
  Description of Artificial Sequence: Synthetic oligonucleotide
ucaaugugguugcccacaa

SEQ ID NO: 897702 - RNA, 19 nt, Artificial Sequence
  Description of Artificial Sequence: Synthetic oligonucleotide
guacagauuaugauuuguc

SEQ ID NO: 897703 - RNA, 19 nt, Artificial Sequence
  Description of Artificial Sequence: Synthetic oligonucleotide
caacugugggucauaaaga

SEQ ID NO: 897704 - RNA, 19 nt, Artificial Sequence
  Description of Artificial Sequence: Synthetic oligonucleotide
aggcacgguuuacaguuuc

SEQ ID NO: 897705 - RNA, 19 nt, Artificial Sequence
  Description of Artificial Sequence: Synthetic oligonucleotide
guaaggugcuaauaggagu

SEQ ID NO: 897706 - RNA, 19 nt, Artificial Sequence
  Description of Artificial Sequence: Synthetic oligonucleotide
uuuguagcauuugcuuaca

SEQ ID NO: 897707 - RNA, 19 nt, Artificial Sequence
  Description of Artificial Sequence: Synthetic oligonucleotide
uuuaugcuucuguuauuua

SEQ ID NO: 897708 - RNA, 19 nt, Artificial Sequence
  Description of Artificial Sequence: Synthetic oligonucleotide
uuucuacaguuuacaccug

SEQ ID NO: 897709 - RNA, 19 nt, Artificial Sequence
  Description of Artificial Sequence: Synthetic oligonucleotide
ugcacuuccugucuccauu

SEQ ID NO: 897710 - RNA, 19 nt, Artificial Sequence
  Description of Artificial Sequence: Synthetic oligonucleotide
uagcaaucuuaaauaucaa

SEQ ID NO: 897711 - RNA, 19 nt, Artificial Sequence
  Description of Artificial Sequence: Synthetic oligonucleotide
auaguugauuugaaugagu

SEQ ID NO: 897712 - RNA, 19 nt, Artificial Sequence
  Description of Artificial Sequence: Synthetic oligonucleotide
cugcuaauauugcugaaaa

SEQ ID NO: 897713 - RNA, 19 nt, Artificial Sequence
  Description of Artificial Sequence: Synthetic oligonucleotide
gaacuuaauuuacuuccua

SEQ ID NO: 897714 - RNA, 19 nt, Artificial Sequence
  Description of Artificial Sequence: Synthetic oligonucleotide
caguagacguuauuuacaa

SEQ ID NO: 897715 - RNA, 19 nt, Artificial Sequence
  Description of Artificial Sequence: Synthetic oligonucleotide
aaacaacgcagagccacgu

SEQ ID NO: 897716 - RNA, 19 nt, Artificial Sequence
  Description of Artificial Sequence: Synthetic oligonucleotide
agcuuagguacagauuaug

SEQ ID NO: 897717 - RNA, 19 nt, Artificial Sequence
  Description of Artificial Sequence: Synthetic oligonucleotide
cuuagguaaggguucccca

SEQ ID NO: 897718 - RNA, 19 nt, Artificial Sequence
  Description of Artificial Sequence: Synthetic oligonucleotide
aacagcaguagacguuauu

SEQ ID NO: 897719 - RNA, 19 nt, Artificial Sequence
  Description of Artificial Sequence: Synthetic oligonucleotide
uaggaauccuagucacaca

SEQ ID NO: 897720 - RNA, 19 nt, Artificial Sequence
  Description of Artificial Sequence: Synthetic oligonucleotide
auagcauacucugacccaa

SEQ ID NO: 897721 - RNA, 19 nt, Artificial Sequence
  Description of Artificial Sequence: Synthetic oligonucleotide
aggaugcuucaguagcucu

SEQ ID NO: 897722 - RNA, 19 nt, Artificial Sequence
  Description of Artificial Sequence: Synthetic oligonucleotide
gcaauauaucccuguaaac

SEQ ID NO: 897723 - RNA, 19 nt, Artificial Sequence
  Description of Artificial Sequence: Synthetic oligonucleotide
aacgggccaacaguaaaau

SEQ ID NO: 897724 - RNA, 19 nt, Artificial Sequence
  Description of Artificial Sequence: Synthetic oligonucleotide
cauagcauacucugaccca

SEQ ID NO: 897725 - RNA, 19 nt, Artificial Sequence
  Description of Artificial Sequence: Synthetic oligonucleotide
acgaaaugaacgggccaac

SEQ ID NO: 897726 - RNA, 19 nt, Artificial Sequence
  Description of Artificial Sequence: Synthetic oligonucleotide
agguaaggguuccccacug

SEQ ID NO: 897727 - RNA, 19 nt, Artificial Sequence
  Description of Artificial Sequence: Synthetic oligonucleotide
auguaguacgaaagacagg

SEQ ID NO: 897728 - RNA, 19 nt, Artificial Sequence
  Description of Artificial Sequence: Synthetic oligonucleotide
uacaucacauuugcaucga

SEQ ID NO: 897729 - RNA, 19 nt, Artificial Sequence
  Description of Artificial Sequence: Synthetic oligonucleotide
aguuucugcacaaguugug

SEQ ID NO: 897730 - RNA, 19 nt, Artificial Sequence
  Description of Artificial Sequence: Synthetic oligonucleotide
uccuagucacacagcacau

SEQ ID NO: 897731 - RNA, 19 nt, Artificial Sequence
  Description of Artificial Sequence: Synthetic oligonucleotide
agucgucgcacuagcaauc

SEQ ID NO: 897732 - RNA, 19 nt, Artificial Sequence
  Description of Artificial Sequence: Synthetic oligonucleotide
aggugcuaauaggaguuag

SEQ ID NO: 897733 - RNA, 19 nt, Artificial Sequence
  Description of Artificial Sequence: Synthetic oligonucleotide
caacgcagagccacgucac

SEQ ID NO: 897734 - RNA, 19 nt, Artificial Sequence
  Description of Artificial Sequence: Synthetic oligonucleotide
uucuagcuguucaguggca

SEQ ID NO: 897735 - RNA, 19 nt, Artificial Sequence
  Description of Artificial Sequence: Synthetic oligonucleotide
cugucagacagugcuaauc

SEQ ID NO: 897736 - RNA, 19 nt, Artificial Sequence
  Description of Artificial Sequence: Synthetic oligonucleotide
ggucauaaagaaguuauua

SEQ ID NO: 897737 - RNA, 19 nt, Artificial Sequence
  Description of Artificial Sequence: Synthetic oligonucleotide
acgucacgaagaccugggg

SEQ ID NO: 897738 - RNA, 19 nt, Artificial Sequence
  Description of Artificial Sequence: Synthetic oligonucleotide
aagucaaguacaacacauu

SEQ ID NO: 897739 - RNA, 19 nt, Artificial Sequence
  Description of Artificial Sequence: Synthetic oligonucleotide
cuugaguaccaaauaacau

SEQ ID NO: 897740 - RNA, 19 nt, Artificial Sequence
  Description of Artificial Sequence: Synthetic oligonucleotide
uaaucugaccaaugaucuu

SEQ ID NO: 897741 - RNA, 19 nt, Artificial Sequence
  Description of Artificial Sequence: Synthetic oligonucleotide
cuuugaaaggcacgguuua

SEQ ID NO: 897742 - RNA, 19 nt, Artificial Sequence
  Description of Artificial Sequence: Synthetic oligonucleotide
gauggaggucuguccugag

SEQ ID NO: 897743 - RNA, 19 nt, Artificial Sequence
  Description of Artificial Sequence: Synthetic oligonucleotide
gccccuuaagcccuggaag

SEQ ID NO: 897744 - RNA, 19 nt, Artificial Sequence
  Description of Artificial Sequence: Synthetic oligonucleotide
ggaccaucugauuauuaga

SEQ ID NO: 897745 - RNA, 19 nt, Artificial Sequence
  Description of Artificial Sequence: Synthetic oligonucleotide
auugguucaaagggguaaa

SEQ ID NO: 897746 - RNA, 19 nt, Artificial Sequence
  Description of Artificial Sequence: Synthetic oligonucleotide
gaccaucugauuauuagau

SEQ ID NO: 897747 - RNA, 19 nt, Artificial Sequence
  Description of Artificial Sequence: Synthetic oligonucleotide
aaauugguucaaaggggua

SEQ ID NO: 897748 - RNA, 19 nt, Artificial Sequence
  Description of Artificial Sequence: Synthetic oligonucleotide
cuauaggacaccugaggua

SEQ ID NO: 897749 - RNA, 19 nt, Artificial Sequence
  Description of Artificial Sequence: Synthetic oligonucleotide
ucugaccaaugaucuucca

SEQ ID NO: 897750 - RNA, 19 nt, Artificial Sequence
  Description of Artificial Sequence: Synthetic oligonucleotide
cagcugcuaauauugcuga

SEQ ID NO: 897751 - RNA, 19 nt, Artificial Sequence
  Description of Artificial Sequence: Synthetic oligonucleotide
acgggccaacaguaaaaug

SEQ ID NO: 897752 - RNA, 19 nt, Artificial Sequence
  Description of Artificial Sequence: Synthetic oligonucleotide
aaacccaaacggaauugua

SEQ ID NO: 897753 - RNA, 19 nt, Artificial Sequence
  Description of Artificial Sequence: Synthetic oligonucleotide
aguuuacaccugucagaca

SEQ ID NO: 897754 - RNA, 19 nt, Artificial Sequence
  Description of Artificial Sequence: Synthetic oligonucleotide
gguaaggguuccccacugg

SEQ ID NO: 897755 - RNA, 19 nt, Artificial Sequence
  Description of Artificial Sequence: Synthetic oligonucleotide
cagauccugagcccucagc

SEQ ID NO: 897756 - RNA, 19 nt, Artificial Sequence
  Description of Artificial Sequence: Synthetic oligonucleotide
ccauguaguacgaaagaca

SEQ ID NO: 897757 - RNA, 19 nt, Artificial Sequence
  Description of Artificial Sequence: Synthetic oligonucleotide
gagaucaccuuucccugaa

SEQ ID NO: 897758 - RNA, 19 nt, Artificial Sequence
  Description of Artificial Sequence: Synthetic oligonucleotide
aguuagccccuuaagcccu

SEQ ID NO: 897759 - RNA, 19 nt, Artificial Sequence
  Description of Artificial Sequence: Synthetic oligonucleotide
gauucucaaugugguugcc

SEQ ID NO: 897760 - RNA, 19 nt, Artificial Sequence
  Description of Artificial Sequence: Synthetic oligonucleotide
auauaucccuguaaacuua

SEQ ID NO: 897761 - RNA, 19 nt, Artificial Sequence
  Description of Artificial Sequence: Synthetic oligonucleotide
gaaaggcacgguuuacagu

SEQ ID NO: 897762 - RNA, 19 nt, Artificial Sequence
  Description of Artificial Sequence: Synthetic oligonucleotide
auauuacaucacauuugca

SEQ ID NO: 897763 - RNA, 19 nt, Artificial Sequence
  Description of Artificial Sequence: Synthetic oligonucleotide
uggaagucuuaggaauccu

SEQ ID NO: 897764 - RNA, 19 nt, Artificial Sequence
  Description of Artificial Sequence: Synthetic oligonucleotide
ggugcuaauaggaguuagc

SEQ ID NO: 897765 - RNA, 19 nt, Artificial Sequence
  Description of Artificial Sequence: Synthetic oligonucleotide
gugaacuuugguagaagaa

SEQ ID NO: 897766 - RNA, 19 nt, Artificial Sequence
  Description of Artificial Sequence: Synthetic oligonucleotide
aguggcaugagggccagua

SEQ ID NO: 897767 - RNA, 19 nt, Artificial Sequence
  Description of Artificial Sequence: Synthetic oligonucleotide
uacgaaagacaggaugcuu

SEQ ID NO: 897768 - RNA, 19 nt, Artificial Sequence
  Description of Artificial Sequence: Synthetic oligonucleotide
uaccagcaagcugagggaa

SEQ ID NO: 897769 - RNA, 19 nt, Artificial Sequence
  Description of Artificial Sequence: Synthetic oligonucleotide
guauuuacugcuacucaua

SEQ ID NO: 897770 - RNA, 19 nt, Artificial Sequence
  Description of Artificial Sequence: Synthetic oligonucleotide
augauuugucaaucacaua

SEQ ID NO: 897771 - RNA, 19 nt, Artificial Sequence
  Description of Artificial Sequence: Synthetic oligonucleotide
cucuugauggaggucuguc

SEQ ID NO: 897772 - RNA, 19 nt, Artificial Sequence
  Description of Artificial Sequence: Synthetic oligonucleotide
auguugauguacacaguaa

SEQ ID NO: 897773 - RNA, 19 nt, Artificial Sequence
  Description of Artificial Sequence: Synthetic oligonucleotide
aaggucaacugugggucau

SEQ ID NO: 897774 - RNA, 19 nt, Artificial Sequence
  Description of Artificial Sequence: Synthetic oligonucleotide
gaacgggccaacaguaaaa

SEQ ID NO: 897775 - RNA, 19 nt, Artificial Sequence
  Description of Artificial Sequence: Synthetic oligonucleotide
ugggaccaucugauuauua

SEQ ID NO: 897776 - RNA, 19 nt, Artificial Sequence
  Description of Artificial Sequence: Synthetic oligonucleotide
cucucuugauggaggucug

SEQ ID NO: 897777 - RNA, 19 nt, Artificial Sequence
  Description of Artificial Sequence: Synthetic oligonucleotide
ugcguccuuuaaagcuugc

SEQ ID NO: 897778 - RNA, 19 nt, Artificial Sequence
  Description of Artificial Sequence: Synthetic oligonucleotide
cacuuaagccaaauuuucu

SEQ ID NO: 897779 - RNA, 19 nt, Artificial Sequence
  Description of Artificial Sequence: Synthetic oligonucleotide
ccaaacggaauuguagaac

SEQ ID NO: 897780 - RNA, 19 nt, Artificial Sequence
  Description of Artificial Sequence: Synthetic oligonucleotide
caaugugguugcccacaag

SEQ ID NO: 897781 - RNA, 19 nt, Artificial Sequence
  Description of Artificial Sequence: Synthetic oligonucleotide
auacauguauuuacugcua

SEQ ID NO: 897782 - RNA, 19 nt, Artificial Sequence
  Description of Artificial Sequence: Synthetic oligonucleotide
uugguucaaagggguaaaa

SEQ ID NO: 897783 - RNA, 19 nt, Artificial Sequence
  Description of Artificial Sequence: Synthetic oligonucleotide
accugucagacagugcuaa

SEQ ID NO: 897784 - RNA, 19 nt, Artificial Sequence
  Description of Artificial Sequence: Synthetic oligonucleotide
acaccugagguaguagaaa

SEQ ID NO: 897785 - RNA, 19 nt, Artificial Sequence
  Description of Artificial Sequence: Synthetic oligonucleotide
uuagccccuuaagcccugg

SEQ ID NO: 897786 - RNA, 19 nt, Artificial Sequence
  Description of Artificial Sequence: Synthetic oligonucleotide
ccuggaagucuuaggaauc

SEQ ID NO: 897787 - RNA, 19 nt, Artificial Sequence
  Description of Artificial Sequence: Synthetic oligonucleotide
uuaagcccuggaagucuua

SEQ ID NO: 897788 - RNA, 19 nt, Artificial Sequence
  Description of Artificial Sequence: Synthetic oligonucleotide
aacuaccauguaguacgaa

SEQ ID NO: 897789 - RNA, 19 nt, Artificial Sequence
  Description of Artificial Sequence: Synthetic oligonucleotide
aaggugcuaauaggaguua

SEQ ID NO: 897790 - RNA, 19 nt, Artificial Sequence
  Description of Artificial Sequence: Synthetic oligonucleotide
cacuagcaaucuuaaauau

SEQ ID NO: 897791 - RNA, 19 nt, Artificial Sequence
  Description of Artificial Sequence: Synthetic oligonucleotide
ccuuuaaagcuugcacacg

SEQ ID NO: 897792 - RNA, 19 nt, Artificial Sequence
  Description of Artificial Sequence: Synthetic oligonucleotide
cagcaguagacguuauuua

SEQ ID NO: 897793 - RNA, 19 nt, Artificial Sequence
  Description of Artificial Sequence: Synthetic oligonucleotide
aggaggaagucaaguacaa

SEQ ID NO: 897794 - RNA, 19 nt, Artificial Sequence
  Description of Artificial Sequence: Synthetic oligonucleotide
ucgcacuagcaaucuuaaa

SEQ ID NO: 897795 - RNA, 19 nt, Artificial Sequence
  Description of Artificial Sequence: Synthetic oligonucleotide
gaguaccaaauaacauuaa

SEQ ID NO: 897796 - RNA, 19 nt, Artificial Sequence
  Description of Artificial Sequence: Synthetic oligonucleotide
augggauggaugggcgcag

SEQ ID NO: 897797 - RNA, 19 nt, Artificial Sequence
  Description of Artificial Sequence: Synthetic oligonucleotide
acgcagagccacgucacga

SEQ ID NO: 897798 - RNA, 19 nt, Artificial Sequence
  Description of Artificial Sequence: Synthetic oligonucleotide
gaugggcgcagucgucgca

SEQ ID NO: 897799 - RNA, 19 nt, Artificial Sequence
  Description of Artificial Sequence: Synthetic oligonucleotide
cugauagcugagguuccuc

SEQ ID NO: 897800 - RNA, 19 nt, Artificial Sequence
  Description of Artificial Sequence: Synthetic oligonucleotide
agaucaccuuucccugaau

SEQ ID NO: 897801 - RNA, 19 nt, Artificial Sequence
  Description of Artificial Sequence: Synthetic oligonucleotide
gucgcacuagcaaucuuaa

SEQ ID NO: 897802 - RNA, 19 nt, Artificial Sequence
  Description of Artificial Sequence: Synthetic oligonucleotide
gcugcuaauauugcugaaa

SEQ ID NO: 897803 - RNA, 19 nt, Artificial Sequence
  Description of Artificial Sequence: Synthetic oligonucleotide
gcacgguuuacaguuucug

SEQ ID NO: 897804 - RNA, 19 nt, Artificial Sequence
  Description of Artificial Sequence: Synthetic oligonucleotide
gagacucuugggaccaucu

SEQ ID NO: 897805 - RNA, 19 nt, Artificial Sequence
  Description of Artificial Sequence: Synthetic oligonucleotide
auggaugggcgcagucguc

SEQ ID NO: 897806 - RNA, 19 nt, Artificial Sequence
  Description of Artificial Sequence: Synthetic oligonucleotide
cacgagacucuugggacca

SEQ ID NO: 897807 - RNA, 19 nt, Artificial Sequence
  Description of Artificial Sequence: Synthetic oligonucleotide
ugguugcccacaaguucuu

SEQ ID NO: 897808 - RNA, 19 nt, Artificial Sequence
  Description of Artificial Sequence: Synthetic oligonucleotide
cugugaucacuagaugaaa

SEQ ID NO: 897809 - RNA, 19 nt, Artificial Sequence
  Description of Artificial Sequence: Synthetic oligonucleotide
auggcaagagugcguccuu

SEQ ID NO: 897810 - RNA, 19 nt, Artificial Sequence
  Description of Artificial Sequence: Synthetic oligonucleotide
gagccacgucacgaagacc

SEQ ID NO: 897811 - RNA, 19 nt, Artificial Sequence
  Description of Artificial Sequence: Synthetic oligonucleotide
ggaggaagucaaguacaac

SEQ ID NO: 897812 - RNA, 19 nt, Artificial Sequence
  Description of Artificial Sequence: Synthetic oligonucleotide
gucaacugugggucauaaa

SEQ ID NO: 897813 - RNA, 19 nt, Artificial Sequence
  Description of Artificial Sequence: Synthetic oligonucleotide
augaacgggccaacaguaa

SEQ ID NO: 897814 - RNA, 19 nt, Artificial Sequence
  Description of Artificial Sequence: Synthetic oligonucleotide
ggcgcagucgucgcacuag

SEQ ID NO: 897815 - RNA, 19 nt, Artificial Sequence
  Description of Artificial Sequence: Synthetic oligonucleotide
ucgucgcacuagcaaucuu

SEQ ID NO: 897816 - RNA, 19 nt, Artificial Sequence
  Description of Artificial Sequence: Synthetic oligonucleotide
ggaugggcgcagucgucgc

SEQ ID NO: 897817 - RNA, 19 nt, Artificial Sequence
  Description of Artificial Sequence: Synthetic oligonucleotide
cagucgucgcacuagcaau

SEQ ID NO: 897818 - RNA, 19 nt, Artificial Sequence
  Description of Artificial Sequence: Synthetic oligonucleotide
uggcaagagugcguccuuu

SEQ ID NO: 897819 - RNA, 19 nt, Artificial Sequence
  Description of Artificial Sequence: Synthetic oligonucleotide
guuagccccuuaagcccug

SEQ ID NO: 897820 - RNA, 19 nt, Artificial Sequence
  Description of Artificial Sequence: Synthetic oligonucleotide
ugggcgcagucgucgcacu

SEQ ID NO: 897821 - RNA, 19 nt, Artificial Sequence
  Description of Artificial Sequence: Synthetic oligonucleotide
cuuaagcccuggaagucuu

SEQ ID NO: 897822 - RNA, 19 nt, Artificial Sequence
  Description of Artificial Sequence: Synthetic oligonucleotide
cccaaacggaauuguagaa

SEQ ID NO: 897823 - RNA, 19 nt, Artificial Sequence
  Description of Artificial Sequence: Synthetic oligonucleotide
agcuugcacacgagacucu

SEQ ID NO: 897824 - RNA, 19 nt, Artificial Sequence
  Description of Artificial Sequence: Synthetic oligonucleotide
gcgcagucgucgcacuagc

SEQ ID NO: 897825 - RNA, 19 nt, Artificial Sequence
  Description of Artificial Sequence: Synthetic oligonucleotide
gcgggcauguugauguaca

SEQ ID NO: 897826 - RNA, 19 nt, Artificial Sequence
  Description of Artificial Sequence: Synthetic oligonucleotide
ggcaagagugcguccuuua

SEQ ID NO: 897827 - RNA, 19 nt, Artificial Sequence
  Description of Artificial Sequence: Synthetic oligonucleotide
gccaaucuuccaaaacaaa

SEQ ID NO: 897828 - RNA, 19 nt, Artificial Sequence
  Description of Artificial Sequence: Synthetic oligonucleotide
ggucaacugugggucauaa

SEQ ID NO: 897829 - RNA, 19 nt, Artificial Sequence
  Description of Artificial Sequence: Synthetic oligonucleotide
gagcuuagguacagauuau

SEQ ID NO: 897830 - RNA, 19 nt, Artificial Sequence
  Description of Artificial Sequence: Synthetic oligonucleotide
cugcacaaguuguggacuu

SEQ ID NO: 897831 - RNA, 19 nt, Artificial Sequence
  Description of Artificial Sequence: Synthetic oligonucleotide
gucgucgcacuagcaaucu

SEQ ID NO: 897832 - RNA, 19 nt, Artificial Sequence
  Description of Artificial Sequence: Synthetic oligonucleotide
cccuggaagucuuaggaau

SEQ ID NO: 897833 - RNA, 19 nt, Artificial Sequence
  Description of Artificial Sequence: Synthetic oligonucleotide
ggcgggcauguugauguac

SEQ ID NO: 897834 - RNA, 19 nt, Artificial Sequence
  Description of Artificial Sequence: Synthetic oligonucleotide
cccuuaagcccuggaaguc

SEQ ID NO: 897835 - RNA, 19 nt, Artificial Sequence
  Description of Artificial Sequence: Synthetic oligonucleotide
guaguacgaaagacaggau

SEQ ID NO: 897836 - RNA, 19 nt, Artificial Sequence
  Description of Artificial Sequence: Synthetic oligonucleotide
cgucgcacuagcaaucuua

SEQ ID NO: 897837 - RNA, 19 nt, Artificial Sequence
  Description of Artificial Sequence: Synthetic oligonucleotide
ccccuuaagcccuggaagu

SEQ ID NO: 897838 - RNA, 19 nt, Artificial Sequence
  Description of Artificial Sequence: Synthetic oligonucleotide
gccacgucacgaagaccug

SEQ ID NO: 897839 - RNA, 19 nt, Artificial Sequence
  Description of Artificial Sequence: Synthetic oligonucleotide
cagaugugaugggauggau

SEQ ID NO: 897840 - RNA, 19 nt, Artificial Sequence
  Description of Artificial Sequence: Synthetic oligonucleotide
gcuuuccuguucacccaga

SEQ ID NO: 897841 - RNA, 19 nt, Artificial Sequence
  Description of Artificial Sequence: Synthetic oligonucleotide
ccuuaagcccuggaagucu

SEQ ID NO: 897842 - RNA, 19 nt, Artificial Sequence
  Description of Artificial Sequence: Synthetic oligonucleotide
cucuugggaccaucugauu

SEQ ID NO: 897843 - RNA, 19 nt, Artificial Sequence
  Description of Artificial Sequence: Synthetic oligonucleotide
acgagacucuugggaccau

SEQ ID NO: 897844 - RNA, 19 nt, Artificial Sequence
  Description of Artificial Sequence: Synthetic oligonucleotide
gggucauaaagaaguuauu

SEQ ID NO: 897845 - RNA, 19 nt, Artificial Sequence
  Description of Artificial Sequence: Synthetic oligonucleotide
ggcacgguuuacaguuucu

SEQ ID NO: 897846 - RNA, 19 nt, Artificial Sequence
  Description of Artificial Sequence: Synthetic oligonucleotide
ccuagucacacagcacaua

SEQ ID NO: 897847 - RNA, 19 nt, Artificial Sequence
  Description of Artificial Sequence: Synthetic oligonucleotide
cgagacucuugggaccauc

SEQ ID NO: 897848 - RNA, 19 nt, Artificial Sequence
  Description of Artificial Sequence: Synthetic oligonucleotide
cgcagucgucgcacuagca

SEQ ID NO: 897849 - RNA, 19 nt, Artificial Sequence
  Description of Artificial Sequence: Synthetic oligonucleotide
gggcgcagucgucgcacua

SEQ ID NO: 897850 - RNA, 19 nt, Artificial Sequence
  Description of Artificial Sequence: Synthetic oligonucleotide
gcaugagggccaguagauu

SEQ ID NO: 897851 - RNA, 19 nt, Artificial Sequence
  Description of Artificial Sequence: Synthetic oligonucleotide
ccugucagacagugcuaau

SEQ ID NO: 897852 - RNA, 19 nt, Artificial Sequence
  Description of Artificial Sequence: Synthetic oligonucleotide
uuuuggaaaaucauggacc

SEQ ID NO: 897853 - RNA, 19 nt, Artificial Sequence
  Description of Artificial Sequence: Synthetic oligonucleotide
aaauccuuuaccuaugaca

SEQ ID NO: 897854 - RNA, 19 nt, Artificial Sequence
  Description of Artificial Sequence: Synthetic oligonucleotide
aaaugaguggaauaggcug

SEQ ID NO: 897855 - RNA, 19 nt, Artificial Sequence
  Description of Artificial Sequence: Synthetic oligonucleotide
ucauuaacucuucaaaucc

SEQ ID NO: 897856 - RNA, 19 nt, Artificial Sequence
  Description of Artificial Sequence: Synthetic oligonucleotide
uuaccuaugacagugagca

SEQ ID NO: 897857 - RNA, 19 nt, Artificial Sequence
  Description of Artificial Sequence: Synthetic oligonucleotide
ucaaaagccaaagaaacag

SEQ ID NO: 897858 - RNA, 19 nt, Artificial Sequence
  Description of Artificial Sequence: Synthetic oligonucleotide
ucauugucggagaugaagg

SEQ ID NO: 897859 - RNA, 19 nt, Artificial Sequence
  Description of Artificial Sequence: Synthetic oligonucleotide
gaaacuaacacaacguaag

SEQ ID NO: 897860 - RNA, 19 nt, Artificial Sequence
  Description of Artificial Sequence: Synthetic oligonucleotide
aacgucaccaucucauugg

SEQ ID NO: 897861 - RNA, 19 nt, Artificial Sequence
  Description of Artificial Sequence: Synthetic oligonucleotide
aaacuaacacaacguaagg

SEQ ID NO: 897862 - RNA, 19 nt, Artificial Sequence
  Description of Artificial Sequence: Synthetic oligonucleotide
gaugaggcaagacauuacg

SEQ ID NO: 897863 - RNA, 19 nt, Artificial Sequence
  Description of Artificial Sequence: Synthetic oligonucleotide
gaagauuccacugggaucc

SEQ ID NO: 897864 - RNA, 19 nt, Artificial Sequence
  Description of Artificial Sequence: Synthetic oligonucleotide
uacugcguagaccagacag

SEQ ID NO: 897865 - RNA, 19 nt, Artificial Sequence
  Description of Artificial Sequence: Synthetic oligonucleotide
ucucguuagagaaggaugc

SEQ ID NO: 897866 - RNA, 19 nt, Artificial Sequence
  Description of Artificial Sequence: Synthetic oligonucleotide
aacguaaggacuuacucaa

SEQ ID NO: 897867 - RNA, 19 nt, Artificial Sequence
  Description of Artificial Sequence: Synthetic oligonucleotide
aaugaaacuaacacaacgu

SEQ ID NO: 897868 - RNA, 19 nt, Artificial Sequence
  Description of Artificial Sequence: Synthetic oligonucleotide
gacauuacggcccuuggag

SEQ ID NO: 897869 - RNA, 19 nt, Artificial Sequence
  Description of Artificial Sequence: Synthetic oligonucleotide
agaaccauaugccaugaag

SEQ ID NO: 897870 - RNA, 19 nt, Artificial Sequence
  Description of Artificial Sequence: Synthetic oligonucleotide
aguucacacgcugugaucc

SEQ ID NO: 897871 - RNA, 19 nt, Artificial Sequence
  Description of Artificial Sequence: Synthetic oligonucleotide
aauaggcugguaugagcgc

SEQ ID NO: 897872 - RNA, 19 nt, Artificial Sequence
  Description of Artificial Sequence: Synthetic oligonucleotide
uuaauuuguucugacaaug

SEQ ID NO: 897873 - RNA, 19 nt, Artificial Sequence
  Description of Artificial Sequence: Synthetic oligonucleotide
aucauaacccugaagauuc

SEQ ID NO: 897874 - RNA, 19 nt, Artificial Sequence
  Description of Artificial Sequence: Synthetic oligonucleotide
aggaguguaacagacgagc

SEQ ID NO: 897875 - RNA, 19 nt, Artificial Sequence
  Description of Artificial Sequence: Synthetic oligonucleotide
aaugaguggaauaggcugg

SEQ ID NO: 897876 - RNA, 19 nt, Artificial Sequence
  Description of Artificial Sequence: Synthetic oligonucleotide
aaauucacugucauuaacu

SEQ ID NO: 897877 - RNA, 19 nt, Artificial Sequence
  Description of Artificial Sequence: Synthetic oligonucleotide
ugaggcaagacauuacggc

SEQ ID NO: 897878 - RNA, 19 nt, Artificial Sequence
  Description of Artificial Sequence: Synthetic oligonucleotide
aggaugucagcuuuccggc

SEQ ID NO: 897879 - RNA, 19 nt, Artificial Sequence
  Description of Artificial Sequence: Synthetic oligonucleotide
ugaaacuaacacaacguaa

SEQ ID NO: 897880 - RNA, 19 nt, Artificial Sequence
  Description of Artificial Sequence: Synthetic oligonucleotide
uucguauugucacauacuc

SEQ ID NO: 897881 - RNA, 19 nt, Artificial Sequence
  Description of Artificial Sequence: Synthetic oligonucleotide
cuacucaugaucucguuag

SEQ ID NO: 897882 - RNA, 19 nt, Artificial Sequence
  Description of Artificial Sequence: Synthetic oligonucleotide
aaccauaugccaugaagga

SEQ ID NO: 897883 - RNA, 19 nt, Artificial Sequence
  Description of Artificial Sequence: Synthetic oligonucleotide
agaauguccuuucaagcag

SEQ ID NO: 897884 - RNA, 19 nt, Artificial Sequence
  Description of Artificial Sequence: Synthetic oligonucleotide
aauggaacgugagggacuc

SEQ ID NO: 897885 - RNA, 19 nt, Artificial Sequence
  Description of Artificial Sequence: Synthetic oligonucleotide
ucgguauggcacuauauug

SEQ ID NO: 897886 - RNA, 19 nt, Artificial Sequence
  Description of Artificial Sequence: Synthetic oligonucleotide
uaauuuguucugacaauga

SEQ ID NO: 897887 - RNA, 19 nt, Artificial Sequence
  Description of Artificial Sequence: Synthetic oligonucleotide
aagacauuacggcccuugg

SEQ ID NO: 897888 - RNA, 19 nt, Artificial Sequence
  Description of Artificial Sequence: Synthetic oligonucleotide
uuuguaccuggcuaaauuc

SEQ ID NO: 897889 - RNA, 19 nt, Artificial Sequence
  Description of Artificial Sequence: Synthetic oligonucleotide
gaggcaagacauuacggcc

SEQ ID NO: 897890 - RNA, 19 nt, Artificial Sequence
  Description of Artificial Sequence: Synthetic oligonucleotide
ugucauuaacucuucaaau

SEQ ID NO: 897891 - RNA, 19 nt, Artificial Sequence
  Description of Artificial Sequence: Synthetic oligonucleotide
uuuaccuaugacagugagc

SEQ ID NO: 897892 - RNA, 19 nt, Artificial Sequence
  Description of Artificial Sequence: Synthetic oligonucleotide
gacagggcgaagcaacucg

SEQ ID NO: 897893 - RNA, 19 nt, Artificial Sequence
  Description of Artificial Sequence: Synthetic oligonucleotide
uaaauucacugucauuaac

SEQ ID NO: 897894 - RNA, 19 nt, Artificial Sequence
  Description of Artificial Sequence: Synthetic oligonucleotide
ucuagguugauccuucgua

SEQ ID NO: 897895 - RNA, 19 nt, Artificial Sequence
  Description of Artificial Sequence: Synthetic oligonucleotide
auugacucagaacucccag

SEQ ID NO: 897896 - RNA, 19 nt, Artificial Sequence
  Description of Artificial Sequence: Synthetic oligonucleotide
uuagaaacaugaagcuccc

SEQ ID NO: 897897 - RNA, 19 nt, Artificial Sequence
  Description of Artificial Sequence: Synthetic oligonucleotide
gacguaacgacccacagcu

SEQ ID NO: 897898 - RNA, 19 nt, Artificial Sequence
  Description of Artificial Sequence: Synthetic oligonucleotide
agagguuucaggugucagg

SEQ ID NO: 897899 - RNA, 19 nt, Artificial Sequence
  Description of Artificial Sequence: Synthetic oligonucleotide
gaaacagugaagucucuuc

SEQ ID NO: 897900 - RNA, 19 nt, Artificial Sequence
  Description of Artificial Sequence: Synthetic oligonucleotide
ucgugaguuaagcucuggg

SEQ ID NO: 897901 - RNA, 19 nt, Artificial Sequence
  Description of Artificial Sequence: Synthetic oligonucleotide
gugcuuaaaacagacacug

SEQ ID NO: 897902 - RNA, 19 nt, Artificial Sequence
  Description of Artificial Sequence: Synthetic oligonucleotide
aacagacgagcuaagaggu

SEQ ID NO: 897903 - RNA, 19 nt, Artificial Sequence
  Description of Artificial Sequence: Synthetic oligonucleotide
uuguaccuggcuaaauuca

SEQ ID NO: 897904 - RNA, 19 nt, Artificial Sequence
  Description of Artificial Sequence: Synthetic oligonucleotide
uaaggagguccccugagcu

SEQ ID NO: 897905 - RNA, 19 nt, Artificial Sequence
  Description of Artificial Sequence: Synthetic oligonucleotide
ugcuuaaaacagacacugg

SEQ ID NO: 897906 - RNA, 19 nt, Artificial Sequence
  Description of Artificial Sequence: Synthetic oligonucleotide
acgugagggacucaugguc

SEQ ID NO: 897907 - RNA, 19 nt, Artificial Sequence
  Description of Artificial Sequence: Synthetic oligonucleotide
gaugagauccuuugcagaa

SEQ ID NO: 897908 - RNA, 19 nt, Artificial Sequence
  Description of Artificial Sequence: Synthetic oligonucleotide
uauugggauggcugaagag

SEQ ID NO: 897909 - RNA, 19 nt, Artificial Sequence
  Description of Artificial Sequence: Synthetic oligonucleotide
uguaccuggcuaaauucac

SEQ ID NO: 897910 - RNA, 19 nt, Artificial Sequence
  Description of Artificial Sequence: Synthetic oligonucleotide
gaaaggaguguaacagacg

SEQ ID NO: 897911 - RNA, 19 nt, Artificial Sequence
  Description of Artificial Sequence: Synthetic oligonucleotide
uaugcaaucgccagcucau

SEQ ID NO: 897912 - RNA, 19 nt, Artificial Sequence
  Description of Artificial Sequence: Synthetic oligonucleotide
acauuacggcccuuggagg

SEQ ID NO: 897913 - RNA, 19 nt, Artificial Sequence
  Description of Artificial Sequence: Synthetic oligonucleotide
uaacacaacguaaggacuu

SEQ ID NO: 897914 - RNA, 19 nt, Artificial Sequence
  Description of Artificial Sequence: Synthetic oligonucleotide
ugcauugacucagaacucc

SEQ ID NO: 897915 - RNA, 19 nt, Artificial Sequence
  Description of Artificial Sequence: Synthetic oligonucleotide
aguguaacagacgagcuaa

SEQ ID NO: 897916 - RNA, 19 nt, Artificial Sequence
  Description of Artificial Sequence: Synthetic oligonucleotide
aagaacgucaccaucucau

SEQ ID NO: 897917 - RNA, 19 nt, Artificial Sequence
  Description of Artificial Sequence: Synthetic oligonucleotide
cuuuaccuaugacagugag

SEQ ID NO: 897918 - RNA, 19 nt, Artificial Sequence
  Description of Artificial Sequence: Synthetic oligonucleotide
cucauugucggagaugaag

SEQ ID NO: 897919 - RNA, 19 nt, Artificial Sequence
  Description of Artificial Sequence: Synthetic oligonucleotide
agaaagcuacucaugaucu

SEQ ID NO: 897920 - RNA, 19 nt, Artificial Sequence
  Description of Artificial Sequence: Synthetic oligonucleotide
cuugacacuccugugcacg

SEQ ID NO: 897921 - RNA, 19 nt, Artificial Sequence
  Description of Artificial Sequence: Synthetic oligonucleotide
ugagcgcaagugcaggaag

SEQ ID NO: 897922 - RNA, 19 nt, Artificial Sequence
  Description of Artificial Sequence: Synthetic oligonucleotide
ugggucgugaguuaagcuc

SEQ ID NO: 897923 - RNA, 19 nt, Artificial Sequence
  Description of Artificial Sequence: Synthetic oligonucleotide
gguauggcacuauauuggg

SEQ ID NO: 897924 - RNA, 19 nt, Artificial Sequence
  Description of Artificial Sequence: Synthetic oligonucleotide
gaacgucaccaucucauug

SEQ ID NO: 897925 - RNA, 19 nt, Artificial Sequence
  Description of Artificial Sequence: Synthetic oligonucleotide
uuggauggauucuugggaa

SEQ ID NO: 897926 - RNA, 19 nt, Artificial Sequence
  Description of Artificial Sequence: Synthetic oligonucleotide
augaaacuaacacaacgua

SEQ ID NO: 897927 - RNA, 19 nt, Artificial Sequence
  Description of Artificial Sequence: Synthetic oligonucleotide
aggcaagacauuacggccc

SEQ ID NO: 897928 - RNA, 19 nt, Artificial Sequence
  Description of Artificial Sequence: Synthetic oligonucleotide
ucaccaucucauuggaaca

SEQ ID NO: 897929 - RNA, 19 nt, Artificial Sequence
  Description of Artificial Sequence: Synthetic oligonucleotide
accuugacgcuauauuuug

SEQ ID NO: 897930 - RNA, 19 nt, Artificial Sequence
  Description of Artificial Sequence: Synthetic oligonucleotide
uuaagcucugggcuuggac

SEQ ID NO: 897931 - RNA, 19 nt, Artificial Sequence
  Description of Artificial Sequence: Synthetic oligonucleotide
caugaucucguuagagaag

SEQ ID NO: 897932 - RNA, 19 nt, Artificial Sequence
  Description of Artificial Sequence: Synthetic oligonucleotide
gcguagaccagacagguag

SEQ ID NO: 897933 - RNA, 19 nt, Artificial Sequence
  Description of Artificial Sequence: Synthetic oligonucleotide
auccuugaaggggacaugg

SEQ ID NO: 897934 - RNA, 19 nt, Artificial Sequence
  Description of Artificial Sequence: Synthetic oligonucleotide
acagguagaccuucccauc

SEQ ID NO: 897935 - RNA, 19 nt, Artificial Sequence
  Description of Artificial Sequence: Synthetic oligonucleotide
guuacuaguggccaggcua

SEQ ID NO: 897936 - RNA, 19 nt, Artificial Sequence
  Description of Artificial Sequence: Synthetic oligonucleotide
acccacagcucauugucgg

SEQ ID NO: 897937 - RNA, 19 nt, Artificial Sequence
  Description of Artificial Sequence: Synthetic oligonucleotide
aaaucauggaccgcacgcu

SEQ ID NO: 897938 - RNA, 19 nt, Artificial Sequence
  Description of Artificial Sequence: Synthetic oligonucleotide
aaggccggagguuacuagu

SEQ ID NO: 897939 - RNA, 19 nt, Artificial Sequence
  Description of Artificial Sequence: Synthetic oligonucleotide
uuggaacaagcuucuaggu

SEQ ID NO: 897940 - RNA, 19 nt, Artificial Sequence
  Description of Artificial Sequence: Synthetic oligonucleotide
cuugaaggggacauggcca

SEQ ID NO: 897941 - RNA, 19 nt, Artificial Sequence
  Description of Artificial Sequence: Synthetic oligonucleotide
uuacuaguggccaggcuau

SEQ ID NO: 897942 - RNA, 19 nt, Artificial Sequence
  Description of Artificial Sequence: Synthetic oligonucleotide
acuccugugcacguagccc

SEQ ID NO: 897943 - RNA, 19 nt, Artificial Sequence
  Description of Artificial Sequence: Synthetic oligonucleotide
caggcauauccuugaaggg

SEQ ID NO: 897944 - RNA, 19 nt, Artificial Sequence
  Description of Artificial Sequence: Synthetic oligonucleotide
uugauccuucguauuguca

SEQ ID NO: 897945 - RNA, 19 nt, Artificial Sequence
  Description of Artificial Sequence: Synthetic oligonucleotide
ucguauugucacauacucu

SEQ ID NO: 897946 - RNA, 19 nt, Artificial Sequence
  Description of Artificial Sequence: Synthetic oligonucleotide
aacgugagggacucauggu

SEQ ID NO: 897947 - RNA, 19 nt, Artificial Sequence
  Description of Artificial Sequence: Synthetic oligonucleotide
ugagguuacugcguagacc

SEQ ID NO: 897948 - RNA, 19 nt, Artificial Sequence
  Description of Artificial Sequence: Synthetic oligonucleotide
gccauaacugaccuggugc

SEQ ID NO: 897949 - RNA, 19 nt, Artificial Sequence
  Description of Artificial Sequence: Synthetic oligonucleotide
uguaacagacgagcuaaga

SEQ ID NO: 897950 - RNA, 19 nt, Artificial Sequence
  Description of Artificial Sequence: Synthetic oligonucleotide
aagugugugccgaugagau

SEQ ID NO: 897951 - RNA, 19 nt, Artificial Sequence
  Description of Artificial Sequence: Synthetic oligonucleotide
aaguggggugagaagguuc

SEQ ID NO: 897952 - RNA, 19 nt, Artificial Sequence
  Description of Artificial Sequence: Synthetic oligonucleotide
cuugacgcuauauuuugga

SEQ ID NO: 897953 - RNA, 19 nt, Artificial Sequence
  Description of Artificial Sequence: Synthetic oligonucleotide
aucucguuagagaaggaug

SEQ ID NO: 897954 - RNA, 19 nt, Artificial Sequence
  Description of Artificial Sequence: Synthetic oligonucleotide
agcuaguucacacgcugug

SEQ ID NO: 897955 - RNA, 19 nt, Artificial Sequence
  Description of Artificial Sequence: Synthetic oligonucleotide
ugaguuaagcucugggcuu

SEQ ID NO: 897956 - RNA, 19 nt, Artificial Sequence
  Description of Artificial Sequence: Synthetic oligonucleotide
aagguucggugguaggggu

SEQ ID NO: 897957 - RNA, 19 nt, Artificial Sequence
  Description of Artificial Sequence: Synthetic oligonucleotide
guaugcaaucgccagcuca

SEQ ID NO: 897958 - RNA, 19 nt, Artificial Sequence
  Description of Artificial Sequence: Synthetic oligonucleotide
uaugagcgcaagugcagga

SEQ ID NO: 897959 - RNA, 19 nt, Artificial Sequence
  Description of Artificial Sequence: Synthetic oligonucleotide
agacagguagaccuuccca

SEQ ID NO: 897960 - RNA, 19 nt, Artificial Sequence
  Description of Artificial Sequence: Synthetic oligonucleotide
cagguagaccuucccaucc

SEQ ID NO: 897961 - RNA, 19 nt, Artificial Sequence
  Description of Artificial Sequence: Synthetic oligonucleotide
uugacgcuauauuuuggaa

SEQ ID NO: 897962 - RNA, 19 nt, Artificial Sequence
  Description of Artificial Sequence: Synthetic oligonucleotide
guaggugccgacccucagg

SEQ ID NO: 897963 - RNA, 19 nt, Artificial Sequence
  Description of Artificial Sequence: Synthetic oligonucleotide
uucuaaggagguccccuga

SEQ ID NO: 897964 - RNA, 19 nt, Artificial Sequence
  Description of Artificial Sequence: Synthetic oligonucleotide
aagagcuagguggggauga

SEQ ID NO: 897965 - RNA, 19 nt, Artificial Sequence
  Description of Artificial Sequence: Synthetic oligonucleotide
gaaggccggagguuacuag

SEQ ID NO: 897966 - RNA, 19 nt, Artificial Sequence
  Description of Artificial Sequence: Synthetic oligonucleotide
aggacguaacgacccacag

SEQ ID NO: 897967 - RNA, 19 nt, Artificial Sequence
  Description of Artificial Sequence: Synthetic oligonucleotide
guaugagcgcaagugcagg

SEQ ID NO: 897968 - RNA, 19 nt, Artificial Sequence
  Description of Artificial Sequence: Synthetic oligonucleotide
uucuagguugauccuucgu

SEQ ID NO: 897969 - RNA, 19 nt, Artificial Sequence
  Description of Artificial Sequence: Synthetic oligonucleotide
agaugaggcaagacauuac

SEQ ID NO: 897970 - RNA, 19 nt, Artificial Sequence
  Description of Artificial Sequence: Synthetic oligonucleotide
ugcaaucgccagcucauuc

SEQ ID NO: 897971 - RNA, 19 nt, Artificial Sequence
  Description of Artificial Sequence: Synthetic oligonucleotide
gacuuacucaagcccucag

SEQ ID NO: 897972 - RNA, 19 nt, Artificial Sequence
  Description of Artificial Sequence: Synthetic oligonucleotide
augagauccuuugcagaac

SEQ ID NO: 897973 - RNA, 19 nt, Artificial Sequence
  Description of Artificial Sequence: Synthetic oligonucleotide
acugcguagaccagacagg

SEQ ID NO: 897974 - RNA, 19 nt, Artificial Sequence
  Description of Artificial Sequence: Synthetic oligonucleotide
gaagauucugcuggaggac

SEQ ID NO: 897975 - RNA, 19 nt, Artificial Sequence
  Description of Artificial Sequence: Synthetic oligonucleotide
gugccgaugagauccuuug

SEQ ID NO: 897976 - RNA, 19 nt, Artificial Sequence
  Description of Artificial Sequence: Synthetic oligonucleotide
agacauuacggcccuugga

SEQ ID NO: 897977 - RNA, 19 nt, Artificial Sequence
  Description of Artificial Sequence: Synthetic oligonucleotide
acugaccuggugcuuaaaa

SEQ ID NO: 897978 - RNA, 19 nt, Artificial Sequence
  Description of Artificial Sequence: Synthetic oligonucleotide
auggcacuauauugggaug

SEQ ID NO: 897979 - RNA, 19 nt, Artificial Sequence
  Description of Artificial Sequence: Synthetic oligonucleotide
gauccuucguauugucaca

SEQ ID NO: 897980 - RNA, 19 nt, Artificial Sequence
  Description of Artificial Sequence: Synthetic oligonucleotide
aggaccuugacgcuauauu

SEQ ID NO: 897981 - RNA, 19 nt, Artificial Sequence
  Description of Artificial Sequence: Synthetic oligonucleotide
gcugguaugagcgcaagug

SEQ ID NO: 897982 - RNA, 19 nt, Artificial Sequence
  Description of Artificial Sequence: Synthetic oligonucleotide
uccuuucuacccagucugc

SEQ ID NO: 897983 - RNA, 19 nt, Artificial Sequence
  Description of Artificial Sequence: Synthetic oligonucleotide
ucagaugaggcaagacauu

SEQ ID NO: 897984 - RNA, 19 nt, Artificial Sequence
  Description of Artificial Sequence: Synthetic oligonucleotide
ugcccguggcugaucaugc

SEQ ID NO: 897985 - RNA, 19 nt, Artificial Sequence
  Description of Artificial Sequence: Synthetic oligonucleotide
gccauuagcuaguucacac

SEQ ID NO: 897986 - RNA, 19 nt, Artificial Sequence
  Description of Artificial Sequence: Synthetic oligonucleotide
uagcuaguucacacgcugu

SEQ ID NO: 897987 - RNA, 19 nt, Artificial Sequence
  Description of Artificial Sequence: Synthetic oligonucleotide
ugccgaugagauccuuugc

SEQ ID NO: 897988 - RNA, 19 nt, Artificial Sequence
  Description of Artificial Sequence: Synthetic oligonucleotide
ucgcuugaucugcuugaag

SEQ ID NO: 897989 - RNA, 19 nt, Artificial Sequence
  Description of Artificial Sequence: Synthetic oligonucleotide
cucagaugaggcaagacau

SEQ ID NO: 897990 - RNA, 19 nt, Artificial Sequence
  Description of Artificial Sequence: Synthetic oligonucleotide
acacaacguaaggacuuac

SEQ ID NO: 897991 - RNA, 19 nt, Artificial Sequence
  Description of Artificial Sequence: Synthetic oligonucleotide
cauuacggcccuuggagga

SEQ ID NO: 897992 - RNA, 19 nt, Artificial Sequence
  Description of Artificial Sequence: Synthetic oligonucleotide
agcuagguggggaugagga

SEQ ID NO: 897993 - RNA, 19 nt, Artificial Sequence
  Description of Artificial Sequence: Synthetic oligonucleotide
ucauaacccugaagauucu

SEQ ID NO: 897994 - RNA, 19 nt, Artificial Sequence
  Description of Artificial Sequence: Synthetic oligonucleotide
cgguauggcacuauauugg

SEQ ID NO: 897995 - RNA, 19 nt, Artificial Sequence
  Description of Artificial Sequence: Synthetic oligonucleotide
gauuccacugggauccuga

SEQ ID NO: 897996 - RNA, 19 nt, Artificial Sequence
  Description of Artificial Sequence: Synthetic oligonucleotide
ccauuagcuaguucacacg

SEQ ID NO: 897997 - RNA, 19 nt, Artificial Sequence
  Description of Artificial Sequence: Synthetic oligonucleotide
auaggcugguaugagcgca

SEQ ID NO: 897998 - RNA, 19 nt, Artificial Sequence
  Description of Artificial Sequence: Synthetic oligonucleotide
gccaggcuaucauucaggg

SEQ ID NO: 897999 - RNA, 19 nt, Artificial Sequence
  Description of Artificial Sequence: Synthetic oligonucleotide
agcccuacaggaucuggga

SEQ ID NO: 898000 - RNA, 19 nt, Artificial Sequence
  Description of Artificial Sequence: Synthetic oligonucleotide
ccuggugcuuaaaacagac

SEQ ID NO: 898001 - RNA, 19 nt, Artificial Sequence
  Description of Artificial Sequence: Synthetic oligonucleotide
ccuucguauugucacauac

SEQ ID NO: 898002 - RNA, 19 nt, Artificial Sequence
  Description of Artificial Sequence: Synthetic oligonucleotide
cuaagagguuucagguguc

SEQ ID NO: 898003 - RNA, 19 nt, Artificial Sequence
  Description of Artificial Sequence: Synthetic oligonucleotide
ugucagacuuggcaucaua

SEQ ID NO: 898004 - RNA, 19 nt, Artificial Sequence
  Description of Artificial Sequence: Synthetic oligonucleotide
cucaagcccucagaugagg

SEQ ID NO: 898005 - RNA, 19 nt, Artificial Sequence
  Description of Artificial Sequence: Synthetic oligonucleotide
uuggcaucauaacccugaa

SEQ ID NO: 898006 - RNA, 19 nt, Artificial Sequence
  Description of Artificial Sequence: Synthetic oligonucleotide
ucaugccauccaugaagug

SEQ ID NO: 898007 - RNA, 19 nt, Artificial Sequence
  Description of Artificial Sequence: Synthetic oligonucleotide
aagcuacucaugaucucgu

SEQ ID NO: 898008 - RNA, 19 nt, Artificial Sequence
  Description of Artificial Sequence: Synthetic oligonucleotide
ucguuagagaaggaugcua

SEQ ID NO: 898009 - RNA, 19 nt, Artificial Sequence
  Description of Artificial Sequence: Synthetic oligonucleotide
cacuccugugcacguagcc

SEQ ID NO: 898010 - RNA, 19 nt, Artificial Sequence
  Description of Artificial Sequence: Synthetic oligonucleotide
agcgcaagugcaggaagag

SEQ ID NO: 898011 - RNA, 19 nt, Artificial Sequence
  Description of Artificial Sequence: Synthetic oligonucleotide
cgugaguuaagcucugggc

SEQ ID NO: 898012 - RNA, 19 nt, Artificial Sequence
  Description of Artificial Sequence: Synthetic oligonucleotide
cugagguuacugcguagac

SEQ ID NO: 898013 - RNA, 19 nt, Artificial Sequence
  Description of Artificial Sequence: Synthetic oligonucleotide
uuacggcccuuggaggagg

SEQ ID NO: 898014 - RNA, 19 nt, Artificial Sequence
  Description of Artificial Sequence: Synthetic oligonucleotide
acagggcgaagcaacucgg

SEQ ID NO: 898015 - RNA, 19 nt, Artificial Sequence
  Description of Artificial Sequence: Synthetic oligonucleotide
gaugaagguggcucgguau

SEQ ID NO: 898016 - RNA, 19 nt, Artificial Sequence
  Description of Artificial Sequence: Synthetic oligonucleotide
cugcauugacucagaacuc

SEQ ID NO: 898017 - RNA, 19 nt, Artificial Sequence
  Description of Artificial Sequence: Synthetic oligonucleotide
uaccuaugacagugagcag

SEQ ID NO: 898018 - RNA, 19 nt, Artificial Sequence
  Description of Artificial Sequence: Synthetic oligonucleotide
auuacggcccuuggaggag

SEQ ID NO: 898019 - RNA, 19 nt, Artificial Sequence
  Description of Artificial Sequence: Synthetic oligonucleotide
cauugacucagaacuccca

SEQ ID NO: 898020 - RNA, 19 nt, Artificial Sequence
  Description of Artificial Sequence: Synthetic oligonucleotide
acccgccucuggcagaaag

SEQ ID NO: 898021 - RNA, 19 nt, Artificial Sequence
  Description of Artificial Sequence: Synthetic oligonucleotide
auuagcuaguucacacgcu

SEQ ID NO: 898022 - RNA, 19 nt, Artificial Sequence
  Description of Artificial Sequence: Synthetic oligonucleotide
aggaagugaaggaucccug

SEQ ID NO: 898023 - RNA, 19 nt, Artificial Sequence
  Description of Artificial Sequence: Synthetic oligonucleotide
agacgagcuaagagguuuc

SEQ ID NO: 898024 - RNA, 19 nt, Artificial Sequence
  Description of Artificial Sequence: Synthetic oligonucleotide
gguaugagcgcaagugcag

SEQ ID NO: 898025 - RNA, 19 nt, Artificial Sequence
  Description of Artificial Sequence: Synthetic oligonucleotide
aggacuuacucaagcccuc

SEQ ID NO: 898026 - RNA, 19 nt, Artificial Sequence
  Description of Artificial Sequence: Synthetic oligonucleotide
gcuaucauucagggaaggg

SEQ ID NO: 898027 - RNA, 19 nt, Artificial Sequence
  Description of Artificial Sequence: Synthetic oligonucleotide
cuaucauucagggaagggu

SEQ ID NO: 898028 - RNA, 19 nt, Artificial Sequence
  Description of Artificial Sequence: Synthetic oligonucleotide
agguagaccuucccaucca

SEQ ID NO: 898029 - RNA, 19 nt, Artificial Sequence
  Description of Artificial Sequence: Synthetic oligonucleotide
cagggcgaagcaacucggg

SEQ ID NO: 898030 - RNA, 19 nt, Artificial Sequence
  Description of Artificial Sequence: Synthetic oligonucleotide
ggggugagaagguucggug

SEQ ID NO: 898031 - RNA, 19 nt, Artificial Sequence
  Description of Artificial Sequence: Synthetic oligonucleotide
acgucaccaucucauugga

SEQ ID NO: 898032 - RNA, 19 nt, Artificial Sequence
  Description of Artificial Sequence: Synthetic oligonucleotide
agaaacagugaagucucuu

SEQ ID NO: 898033 - RNA, 19 nt, Artificial Sequence
  Description of Artificial Sequence: Synthetic oligonucleotide
gguucggugguaggggugg

SEQ ID NO: 898034 - RNA, 19 nt, Artificial Sequence
  Description of Artificial Sequence: Synthetic oligonucleotide
agaugaagguggcucggua

SEQ ID NO: 898035 - RNA, 19 nt, Artificial Sequence
  Description of Artificial Sequence: Synthetic oligonucleotide
agucaccauuggaaggccg

SEQ ID NO: 898036 - RNA, 19 nt, Artificial Sequence
  Description of Artificial Sequence: Synthetic oligonucleotide
uuuagcccuacaggaucug

SEQ ID NO: 898037 - RNA, 19 nt, Artificial Sequence
  Description of Artificial Sequence: Synthetic oligonucleotide
ggacguaacgacccacagc

SEQ ID NO: 898038 - RNA, 19 nt, Artificial Sequence
  Description of Artificial Sequence: Synthetic oligonucleotide
uucggccuugcaucggggu

SEQ ID NO: 898039 - RNA, 19 nt, Artificial Sequence
  Description of Artificial Sequence: Synthetic oligonucleotide
aggcacgucgcuugaucug

SEQ ID NO: 898040 - RNA, 19 nt, Artificial Sequence
  Description of Artificial Sequence: Synthetic oligonucleotide
guuuguaccuggcuaaauu

SEQ ID NO: 898041 - RNA, 19 nt, Artificial Sequence
  Description of Artificial Sequence: Synthetic oligonucleotide
ccgaugagauccuuugcag

SEQ ID NO: 898042 - RNA, 19 nt, Artificial Sequence
  Description of Artificial Sequence: Synthetic oligonucleotide
cuugcaucgggguugcgcu

SEQ ID NO: 898043 - RNA, 19 nt, Artificial Sequence
  Description of Artificial Sequence: Synthetic oligonucleotide
acgagcuaagagguuucag

SEQ ID NO: 898044 - RNA, 19 nt, Artificial Sequence
  Description of Artificial Sequence: Synthetic oligonucleotide
guaggggugggaaggcgag

SEQ ID NO: 898045 - RNA, 19 nt, Artificial Sequence
  Description of Artificial Sequence: Synthetic oligonucleotide
ucaccauuggaaggccgga

SEQ ID NO: 898046 - RNA, 19 nt, Artificial Sequence
  Description of Artificial Sequence: Synthetic oligonucleotide
gccgaugagauccuuugca

SEQ ID NO: 898047 - RNA, 19 nt, Artificial Sequence
  Description of Artificial Sequence: Synthetic oligonucleotide
guccuuucaagcagccagc

SEQ ID NO: 898048 - RNA, 19 nt, Artificial Sequence
  Description of Artificial Sequence: Synthetic oligonucleotide
cuucguauugucacauacu

SEQ ID NO: 898049 - RNA, 19 nt, Artificial Sequence
  Description of Artificial Sequence: Synthetic oligonucleotide
gcaaucgccagcucauuca

SEQ ID NO: 898050 - RNA, 19 nt, Artificial Sequence
  Description of Artificial Sequence: Synthetic oligonucleotide
aggcgagucaccauuggaa

SEQ ID NO: 898051 - RNA, 19 nt, Artificial Sequence
  Description of Artificial Sequence: Synthetic oligonucleotide
ggcguucggccuugcaucg

SEQ ID NO: 898052 - RNA, 19 nt, Artificial Sequence
  Description of Artificial Sequence: Synthetic oligonucleotide
gccucuggcagaaagcuac

SEQ ID NO: 898053 - RNA, 19 nt, Artificial Sequence
  Description of Artificial Sequence: Synthetic oligonucleotide
ggcauauccuugaagggga

SEQ ID NO: 898054 - RNA, 19 nt, Artificial Sequence
  Description of Artificial Sequence: Synthetic oligonucleotide
cccguuuagcccuacagga

SEQ ID NO: 898055 - RNA, 19 nt, Artificial Sequence
  Description of Artificial Sequence: Synthetic oligonucleotide
cacuguagaugucagacuu

SEQ ID NO: 898056 - RNA, 19 nt, Artificial Sequence
  Description of Artificial Sequence: Synthetic oligonucleotide
gaggcacgucgcuugaucu

SEQ ID NO: 898057 - RNA, 19 nt, Artificial Sequence
  Description of Artificial Sequence: Synthetic oligonucleotide
ugggauccugagacugacu

SEQ ID NO: 898058 - RNA, 19 nt, Artificial Sequence
  Description of Artificial Sequence: Synthetic oligonucleotide
gaucucguuagagaaggau

SEQ ID NO: 898059 - RNA, 19 nt, Artificial Sequence
  Description of Artificial Sequence: Synthetic oligonucleotide
aggcuaucauucagggaag

SEQ ID NO: 898060 - RNA, 19 nt, Artificial Sequence
  Description of Artificial Sequence: Synthetic oligonucleotide
auggcaggaccuugacgcu

SEQ ID NO: 898061 - RNA, 19 nt, Artificial Sequence
  Description of Artificial Sequence: Synthetic oligonucleotide
ggccggagguuacuagugg

SEQ ID NO: 898062 - RNA, 19 nt, Artificial Sequence
  Description of Artificial Sequence: Synthetic oligonucleotide
aggagggugcuggcguucg

SEQ ID NO: 898063 - RNA, 19 nt, Artificial Sequence
  Description of Artificial Sequence: Synthetic oligonucleotide
ccccguuuagcccuacagg

SEQ ID NO: 898064 - RNA, 19 nt, Artificial Sequence
  Description of Artificial Sequence: Synthetic oligonucleotide
ugagggacucauggucagc

SEQ ID NO: 898065 - RNA, 19 nt, Artificial Sequence
  Description of Artificial Sequence: Synthetic oligonucleotide
ucggccuugcaucgggguu

SEQ ID NO: 898066 - RNA, 19 nt, Artificial Sequence
  Description of Artificial Sequence: Synthetic oligonucleotide
ucggugguaggggugggaa

SEQ ID NO: 898067 - RNA, 19 nt, Artificial Sequence
  Description of Artificial Sequence: Synthetic oligonucleotide
gucgugaguuaagcucugg

SEQ ID NO: 898068 - RNA, 19 nt, Artificial Sequence
  Description of Artificial Sequence: Synthetic oligonucleotide
uugcaucgggguugcgcug

SEQ ID NO: 898069 - RNA, 19 nt, Artificial Sequence
  Description of Artificial Sequence: Synthetic oligonucleotide
cauacucuccuguugguuu

SEQ ID NO: 898070 - RNA, 19 nt, Artificial Sequence
  Description of Artificial Sequence: Synthetic oligonucleotide
caagagcuagguggggaug

SEQ ID NO: 898071 - RNA, 19 nt, Artificial Sequence
  Description of Artificial Sequence: Synthetic oligonucleotide
cuggugcuuaaaacagaca

SEQ ID NO: 898072 - RNA, 19 nt, Artificial Sequence
  Description of Artificial Sequence: Synthetic oligonucleotide
gagcgcaagugcaggaaga

SEQ ID NO: 898073 - RNA, 19 nt, Artificial Sequence
  Description of Artificial Sequence: Synthetic oligonucleotide
ccggagguuacuaguggcc

SEQ ID NO: 898074 - RNA, 19 nt, Artificial Sequence
  Description of Artificial Sequence: Synthetic oligonucleotide
gggcgaagcaacucgggca

SEQ ID NO: 898075 - RNA, 19 nt, Artificial Sequence
  Description of Artificial Sequence: Synthetic oligonucleotide
ugacagggcgaagcaacuc

SEQ ID NO: 898076 - RNA, 19 nt, Artificial Sequence
  Description of Artificial Sequence: Synthetic oligonucleotide
ugcguagaccagacaggua

SEQ ID NO: 898077 - RNA, 19 nt, Artificial Sequence
  Description of Artificial Sequence: Synthetic oligonucleotide
gaccgcacgcugccgcugc

SEQ ID NO: 898078 - RNA, 19 nt, Artificial Sequence
  Description of Artificial Sequence: Synthetic oligonucleotide
agccucggggccaaagcag

SEQ ID NO: 898079 - RNA, 19 nt, Artificial Sequence
  Description of Artificial Sequence: Synthetic oligonucleotide
uacggcccuuggaggaggc

SEQ ID NO: 898080 - RNA, 19 nt, Artificial Sequence
  Description of Artificial Sequence: Synthetic oligonucleotide
cguaacacccgccucuggc

SEQ ID NO: 898081 - RNA, 19 nt, Artificial Sequence
  Description of Artificial Sequence: Synthetic oligonucleotide
agagcuagguggggaugag

SEQ ID NO: 898082 - RNA, 19 nt, Artificial Sequence
  Description of Artificial Sequence: Synthetic oligonucleotide
guugcgcugaaggcacugc

SEQ ID NO: 898083 - RNA, 19 nt, Artificial Sequence
  Description of Artificial Sequence: Synthetic oligonucleotide
ggcuaucauucagggaagg

SEQ ID NO: 898084 - RNA, 19 nt, Artificial Sequence
  Description of Artificial Sequence: Synthetic oligonucleotide
acguagcccauguggugga

SEQ ID NO: 898085 - RNA, 19 nt, Artificial Sequence
  Description of Artificial Sequence: Synthetic oligonucleotide
ggcacgucgcuugaucugc

SEQ ID NO: 898086 - RNA, 19 nt, Artificial Sequence
  Description of Artificial Sequence: Synthetic oligonucleotide
acguaaggacuuacucaag

SEQ ID NO: 898087 - RNA, 19 nt, Artificial Sequence
  Description of Artificial Sequence: Synthetic oligonucleotide
gagggacucauggucagcu

SEQ ID NO: 898088 - RNA, 19 nt, Artificial Sequence
  Description of Artificial Sequence: Synthetic oligonucleotide
cauugucggagaugaaggu

SEQ ID NO: 898089 - RNA, 19 nt, Artificial Sequence
  Description of Artificial Sequence: Synthetic oligonucleotide
gcauugacucagaacuccc

SEQ ID NO: 898090 - RNA, 19 nt, Artificial Sequence
  Description of Artificial Sequence: Synthetic oligonucleotide
gcccuacaggaucugggag

SEQ ID NO: 898091 - RNA, 19 nt, Artificial Sequence
  Description of Artificial Sequence: Synthetic oligonucleotide
uccuucguauugucacaua

SEQ ID NO: 898092 - RNA, 19 nt, Artificial Sequence
  Description of Artificial Sequence: Synthetic oligonucleotide
cacaacguaaggacuuacu

SEQ ID NO: 898093 - RNA, 19 nt, Artificial Sequence
  Description of Artificial Sequence: Synthetic oligonucleotide
agcuacucaugaucucguu

SEQ ID NO: 898094 - RNA, 19 nt, Artificial Sequence
  Description of Artificial Sequence: Synthetic oligonucleotide
cauucaugccauccaugaa

SEQ ID NO: 898095 - RNA, 19 nt, Artificial Sequence
  Description of Artificial Sequence: Synthetic oligonucleotide
gacgagcuaagagguuuca

SEQ ID NO: 898096 - RNA, 19 nt, Artificial Sequence
  Description of Artificial Sequence: Synthetic oligonucleotide
augagcgcaagugcaggaa

SEQ ID NO: 898097 - RNA, 19 nt, Artificial Sequence
  Description of Artificial Sequence: Synthetic oligonucleotide
cguuuagcccuacaggauc

SEQ ID NO: 898098 - RNA, 19 nt, Artificial Sequence
  Description of Artificial Sequence: Synthetic oligonucleotide
ggcgaagcaacucgggcaa

SEQ ID NO: 898099 - RNA, 19 nt, Artificial Sequence
  Description of Artificial Sequence: Synthetic oligonucleotide
cauggccauuagcuaguuc

SEQ ID NO: 898100 - RNA, 19 nt, Artificial Sequence
  Description of Artificial Sequence: Synthetic oligonucleotide
aggccggagguuacuagug

SEQ ID NO: 898101 - RNA, 19 nt, Artificial Sequence
  Description of Artificial Sequence: Synthetic oligonucleotide
cucgguauggcacuauauu

SEQ ID NO: 898102 - RNA, 19 nt, Artificial Sequence
  Description of Artificial Sequence: Synthetic oligonucleotide
ugucagggcccaagagcua

SEQ ID NO: 898103 - RNA, 19 nt, Artificial Sequence
  Description of Artificial Sequence: Synthetic oligonucleotide
gaucccugggucgugaguu

SEQ ID NO: 898104 - RNA, 19 nt, Artificial Sequence
  Description of Artificial Sequence: Synthetic oligonucleotide
cuuuccggcuucuccaagu

SEQ ID NO: 898105 - RNA, 19 nt, Artificial Sequence
  Description of Artificial Sequence: Synthetic oligonucleotide
cuauauugggauggcugaa

SEQ ID NO: 898106 - RNA, 19 nt, Artificial Sequence
  Description of Artificial Sequence: Synthetic oligonucleotide
ccauggaaaucagaaugug

SEQ ID NO: 898107 - RNA, 19 nt, Artificial Sequence
  Description of Artificial Sequence: Synthetic oligonucleotide
ggaccuugacgcuauauuu

SEQ ID NO: 898108 - RNA, 19 nt, Artificial Sequence
  Description of Artificial Sequence: Synthetic oligonucleotide
guucggccuugcaucgggg

SEQ ID NO: 898109 - RNA, 19 nt, Artificial Sequence
  Description of Artificial Sequence: Synthetic oligonucleotide
uggaaggccggagguuacu

SEQ ID NO: 898110 - RNA, 19 nt, Artificial Sequence
  Description of Artificial Sequence: Synthetic oligonucleotide
cguaacgacccacagcuca

SEQ ID NO: 898111 - RNA, 19 nt, Artificial Sequence
  Description of Artificial Sequence: Synthetic oligonucleotide
ccugggucgugaguuaagc

SEQ ID NO: 898112 - RNA, 19 nt, Artificial Sequence
  Description of Artificial Sequence: Synthetic oligonucleotide
aacaagcuucuagguugau

SEQ ID NO: 898113 - RNA, 19 nt, Artificial Sequence
  Description of Artificial Sequence: Synthetic oligonucleotide
gggcuuggacuucagccuc

SEQ ID NO: 898114 - RNA, 19 nt, Artificial Sequence
  Description of Artificial Sequence: Synthetic oligonucleotide
aggcugguaugagcgcaag

SEQ ID NO: 898115 - RNA, 19 nt, Artificial Sequence
  Description of Artificial Sequence: Synthetic oligonucleotide
ggugggaaggcgagucacc

SEQ ID NO: 898116 - RNA, 19 nt, Artificial Sequence
  Description of Artificial Sequence: Synthetic oligonucleotide
gcgcaagugcaggaagagg

SEQ ID NO: 898117 - RNA, 19 nt, Artificial Sequence
  Description of Artificial Sequence: Synthetic oligonucleotide
acguaacgacccacagcuc

SEQ ID NO: 898118 - RNA, 19 nt, Artificial Sequence
  Description of Artificial Sequence: Synthetic oligonucleotide
guucggugguagggguggg

SEQ ID NO: 898119 - RNA, 19 nt, Artificial Sequence
  Description of Artificial Sequence: Synthetic oligonucleotide
gaaggaugcuauggacucu

SEQ ID NO: 898120 - RNA, 19 nt, Artificial Sequence
  Description of Artificial Sequence: Synthetic oligonucleotide
acgcuauauuuuggaaaau

SEQ ID NO: 898121 - RNA, 19 nt, Artificial Sequence
  Description of Artificial Sequence: Synthetic oligonucleotide
agguucggugguaggggug

SEQ ID NO: 898122 - RNA, 19 nt, Artificial Sequence
  Description of Artificial Sequence: Synthetic oligonucleotide
ucugaguggcaggcauauc

SEQ ID NO: 898123 - RNA, 19 nt, Artificial Sequence
  Description of Artificial Sequence: Synthetic oligonucleotide
cucggcagggauggugcug

SEQ ID NO: 898124 - RNA, 19 nt, Artificial Sequence
  Description of Artificial Sequence: Synthetic oligonucleotide
agguuacugcguagaccag

SEQ ID NO: 898125 - RNA, 19 nt, Artificial Sequence
  Description of Artificial Sequence: Synthetic oligonucleotide
cccgccucuggcagaaagc

SEQ ID NO: 898126 - RNA, 19 nt, Artificial Sequence
  Description of Artificial Sequence: Synthetic oligonucleotide
ccagagguaggugccgacc

SEQ ID NO: 898127 - RNA, 19 nt, Artificial Sequence
  Description of Artificial Sequence: Synthetic oligonucleotide
guaccuggcuaaauucacu

SEQ ID NO: 898128 - RNA, 19 nt, Artificial Sequence
  Description of Artificial Sequence: Synthetic oligonucleotide
cugcguagaccagacaggu

SEQ ID NO: 898129 - RNA, 19 nt, Artificial Sequence
  Description of Artificial Sequence: Synthetic oligonucleotide
gcacccagagguaggugcc

SEQ ID NO: 898130 - RNA, 19 nt, Artificial Sequence
  Description of Artificial Sequence: Synthetic oligonucleotide
gggucgugaguuaagcucu

SEQ ID NO: 898131 - RNA, 19 nt, Artificial Sequence
  Description of Artificial Sequence: Synthetic oligonucleotide
gguugcgcugaaggcacug

SEQ ID NO: 898132 - RNA, 19 nt, Artificial Sequence
  Description of Artificial Sequence: Synthetic oligonucleotide
cguucggccuugcaucggg

SEQ ID NO: 898133 - RNA, 19 nt, Artificial Sequence
  Description of Artificial Sequence: Synthetic oligonucleotide
cugggucgugaguuaagcu

SEQ ID NO: 898134 - RNA, 19 nt, Artificial Sequence
  Description of Artificial Sequence: Synthetic oligonucleotide
ccuaugacagugagcagcu

SEQ ID NO: 898135 - RNA, 19 nt, Artificial Sequence
  Description of Artificial Sequence: Synthetic oligonucleotide
cuaugacagugagcagcuc

SEQ ID NO: 898136 - RNA, 19 nt, Artificial Sequence
  Description of Artificial Sequence: Synthetic oligonucleotide
agguaggugccgacccuca

SEQ ID NO: 898137 - RNA, 19 nt, Artificial Sequence
  Description of Artificial Sequence: Synthetic oligonucleotide
cccggcccagccauaacug

SEQ ID NO: 898138 - RNA, 19 nt, Artificial Sequence
  Description of Artificial Sequence: Synthetic oligonucleotide
ccgacccucagggagcgcc

SEQ ID NO: 898139 - RNA, 19 nt, Artificial Sequence
  Description of Artificial Sequence: Synthetic oligonucleotide
cuacaggaucugggagcag

SEQ ID NO: 898140 - RNA, 19 nt, Artificial Sequence
  Description of Artificial Sequence: Synthetic oligonucleotide
ggcaagacauuacggcccu

SEQ ID NO: 898141 - RNA, 19 nt, Artificial Sequence
  Description of Artificial Sequence: Synthetic oligonucleotide
gucgcuugaucugcuugaa

SEQ ID NO: 898142 - RNA, 19 nt, Artificial Sequence
  Description of Artificial Sequence: Synthetic oligonucleotide
acagacgagcuaagagguu

SEQ ID NO: 898143 - RNA, 19 nt, Artificial Sequence
  Description of Artificial Sequence: Synthetic oligonucleotide
gggaaggcgagucaccauu

SEQ ID NO: 898144 - RNA, 19 nt, Artificial Sequence
  Description of Artificial Sequence: Synthetic oligonucleotide
ccuugacacuccugugcac

SEQ ID NO: 898145 - RNA, 19 nt, Artificial Sequence
  Description of Artificial Sequence: Synthetic oligonucleotide
gguggcucgguauggcacu

SEQ ID NO: 898146 - RNA, 19 nt, Artificial Sequence
  Description of Artificial Sequence: Synthetic oligonucleotide
ggacuuacucaagcccuca

SEQ ID NO: 898147 - RNA, 19 nt, Artificial Sequence
  Description of Artificial Sequence: Synthetic oligonucleotide
ggucgugaguuaagcucug

SEQ ID NO: 898148 - RNA, 19 nt, Artificial Sequence
  Description of Artificial Sequence: Synthetic oligonucleotide
gcaucugaguggcaggcau

SEQ ID NO: 898149 - RNA, 19 nt, Artificial Sequence
  Description of Artificial Sequence: Synthetic oligonucleotide
guaacgacccacagcucau

SEQ ID NO: 898150 - RNA, 19 nt, Artificial Sequence
  Description of Artificial Sequence: Synthetic oligonucleotide
augucagacuuggcaucau

SEQ ID NO: 898151 - RNA, 19 nt, Artificial Sequence
  Description of Artificial Sequence: Synthetic oligonucleotide
cucguuagagaaggaugcu

SEQ ID NO: 898152 - RNA, 19 nt, Artificial Sequence
  Description of Artificial Sequence: Synthetic oligonucleotide
gcagagaaaugaguggaau

SEQ ID NO: 898153 - RNA, 19 nt, Artificial Sequence
  Description of Artificial Sequence: Synthetic oligonucleotide
gugagaagguucgguggua

SEQ ID NO: 898154 - RNA, 19 nt, Artificial Sequence
  Description of Artificial Sequence: Synthetic oligonucleotide
augcaaucgccagcucauu

SEQ ID NO: 898155 - RNA, 19 nt, Artificial Sequence
  Description of Artificial Sequence: Synthetic oligonucleotide
ggaugucagcuuuccggcu

SEQ ID NO: 898156 - RNA, 19 nt, Artificial Sequence
  Description of Artificial Sequence: Synthetic oligonucleotide
ccaggcuaucauucaggga

SEQ ID NO: 898157 - RNA, 19 nt, Artificial Sequence
  Description of Artificial Sequence: Synthetic oligonucleotide
auggaacgugagggacuca

SEQ ID NO: 898158 - RNA, 19 nt, Artificial Sequence
  Description of Artificial Sequence: Synthetic oligonucleotide
ggcucgguauggcacuaua

SEQ ID NO: 898159 - RNA, 19 nt, Artificial Sequence
  Description of Artificial Sequence: Synthetic oligonucleotide
uggcucgguauggcacuau

SEQ ID NO: 898160 - RNA, 19 nt, Artificial Sequence
  Description of Artificial Sequence: Synthetic oligonucleotide
uucaggugucagggcccaa

SEQ ID NO: 898161 - RNA, 19 nt, Artificial Sequence
  Description of Artificial Sequence: Synthetic oligonucleotide
ggacucauggucagcuccu

SEQ ID NO: 898162 - RNA, 19 nt, Artificial Sequence
  Description of Artificial Sequence: Synthetic oligonucleotide
ggaaggccggagguuacua

SEQ ID NO: 898163 - RNA, 19 nt, Artificial Sequence
  Description of Artificial Sequence: Synthetic oligonucleotide
caacucgggcaaugccucu

SEQ ID NO: 898164 - RNA, 19 nt, Artificial Sequence
  Description of Artificial Sequence: Synthetic oligonucleotide
gcguucggccuugcaucgg

SEQ ID NO: 898165 - RNA, 19 nt, Artificial Sequence
  Description of Artificial Sequence: Synthetic oligonucleotide
acggcccuuggaggaggca

SEQ ID NO: 898166 - RNA, 19 nt, Artificial Sequence
  Description of Artificial Sequence: Synthetic oligonucleotide
gguuuguaccuggcuaaau

SEQ ID NO: 898167 - RNA, 19 nt, Artificial Sequence
  Description of Artificial Sequence: Synthetic oligonucleotide
ggcugguaugagcgcaagu

SEQ ID NO: 898168 - RNA, 19 nt, Artificial Sequence
  Description of Artificial Sequence: Synthetic oligonucleotide
gcacuauauugggauggcu

SEQ ID NO: 898169 - RNA, 19 nt, Artificial Sequence
  Description of Artificial Sequence: Synthetic oligonucleotide
cggccuugcaucgggguug

SEQ ID NO: 898170 - RNA, 19 nt, Artificial Sequence
  Description of Artificial Sequence: Synthetic oligonucleotide
ggaccgcacgcugccgcug

SEQ ID NO: 898171 - RNA, 19 nt, Artificial Sequence
  Description of Artificial Sequence: Synthetic oligonucleotide
cggcccuuggaggaggcac

SEQ ID NO: 898172 - RNA, 19 nt, Artificial Sequence
  Description of Artificial Sequence: Synthetic oligonucleotide
gcucgguauggcacuauau

SEQ ID NO: 898173 - RNA, 19 nt, Artificial Sequence
  Description of Artificial Sequence: Synthetic oligonucleotide
ccguuuagcccuacaggau

SEQ ID NO: 898174 - RNA, 19 nt, Artificial Sequence
  Description of Artificial Sequence: Synthetic oligonucleotide
cacgucgcuugaucugcuu

SEQ ID NO: 898175 - RNA, 19 nt, Artificial Sequence
  Description of Artificial Sequence: Synthetic oligonucleotide
ccgccucuggcagaaagcu

SEQ ID NO: 898176 - RNA, 19 nt, Artificial Sequence
  Description of Artificial Sequence: Synthetic oligonucleotide
cgcugcccguggcugauca

SEQ ID NO: 898177 - RNA, 19 nt, Artificial Sequence
  Description of Artificial Sequence: Synthetic oligonucleotide
cccuggugacugggacucc

SEQ ID NO: 898178 - RNA, 19 nt, Artificial Sequence
  Description of Artificial Sequence: Synthetic oligonucleotide
cugaggcacgucgcuugau

SEQ ID NO: 898179 - RNA, 19 nt, Artificial Sequence
  Description of Artificial Sequence: Synthetic oligonucleotide
gcaggaccuugacgcuaua

SEQ ID NO: 898180 - RNA, 19 nt, Artificial Sequence
  Description of Artificial Sequence: Synthetic oligonucleotide
gcacgucgcuugaucugcu

SEQ ID NO: 898181 - RNA, 19 nt, Artificial Sequence
  Description of Artificial Sequence: Synthetic oligonucleotide
gcgaagcaacucgggcaau

SEQ ID NO: 898182 - RNA, 19 nt, Artificial Sequence
  Description of Artificial Sequence: Synthetic oligonucleotide
gcaagacauuacggcccuu

SEQ ID NO: 898183 - RNA, 19 nt, Artificial Sequence
  Description of Artificial Sequence: Synthetic oligonucleotide
cacccgccucuggcagaaa

SEQ ID NO: 898184 - RNA, 19 nt, Artificial Sequence
  Description of Artificial Sequence: Synthetic oligonucleotide
ccgcugcccguggcugauc

SEQ ID NO: 898185 - RNA, 19 nt, Artificial Sequence
  Description of Artificial Sequence: Synthetic oligonucleotide
cucucguugauauagaugc

SEQ ID NO: 898186 - RNA, 19 nt, Artificial Sequence
  Description of Artificial Sequence: Synthetic oligonucleotide
uauagaugcuuccauugcg

SEQ ID NO: 898187 - RNA, 19 nt, Artificial Sequence
  Description of Artificial Sequence: Synthetic oligonucleotide
aagugcgacacaaaggugc

SEQ ID NO: 898188 - RNA, 19 nt, Artificial Sequence
  Description of Artificial Sequence: Synthetic oligonucleotide
guauacauaguccccaucg

SEQ ID NO: 898189 - RNA, 19 nt, Artificial Sequence
  Description of Artificial Sequence: Synthetic oligonucleotide
aucacguucacaaauuugc

SEQ ID NO: 898190 - RNA, 19 nt, Artificial Sequence
  Description of Artificial Sequence: Synthetic oligonucleotide
uacauaguccccaucgagg

SEQ ID NO: 898191 - RNA, 19 nt, Artificial Sequence
  Description of Artificial Sequence: Synthetic oligonucleotide
ucccuuacggucaugaccc

SEQ ID NO: 898192 - RNA, 19 nt, Artificial Sequence
  Description of Artificial Sequence: Synthetic oligonucleotide
aauggauuuacagaaucca

SEQ ID NO: 898193 - RNA, 19 nt, Artificial Sequence
  Description of Artificial Sequence: Synthetic oligonucleotide
ugcacgaauggauuuacag

SEQ ID NO: 898194 - RNA, 19 nt, Artificial Sequence
  Description of Artificial Sequence: Synthetic oligonucleotide
auaaaagugaggagcaggg

SEQ ID NO: 898195 - RNA, 19 nt, Artificial Sequence
  Description of Artificial Sequence: Synthetic oligonucleotide
ucgaagugcgacacaaagg

SEQ ID NO: 898196 - RNA, 19 nt, Artificial Sequence
  Description of Artificial Sequence: Synthetic oligonucleotide
cuuccauugcggaugagcc

SEQ ID NO: 898197 - RNA, 19 nt, Artificial Sequence
  Description of Artificial Sequence: Synthetic oligonucleotide
uuccccauaaaagugagga

SEQ ID NO: 898198 - RNA, 19 nt, Artificial Sequence
  Description of Artificial Sequence: Synthetic oligonucleotide
ugcacacauaccacggugg

SEQ ID NO: 898199 - RNA, 19 nt, Artificial Sequence
  Description of Artificial Sequence: Synthetic oligonucleotide
aagaguacgagcugucccu

SEQ ID NO: 898200 - RNA, 19 nt, Artificial Sequence
  Description of Artificial Sequence: Synthetic oligonucleotide
aaagaaccugucuccugcg

SEQ ID NO: 898201 - RNA, 19 nt, Artificial Sequence
  Description of Artificial Sequence: Synthetic oligonucleotide
gaagaguacgagcuguccc

SEQ ID NO: 898202 - RNA, 19 nt, Artificial Sequence
  Description of Artificial Sequence: Synthetic oligonucleotide
uaucacguucacaaauuug

SEQ ID NO: 898203 - RNA, 19 nt, Artificial Sequence
  Description of Artificial Sequence: Synthetic oligonucleotide
ugauccgagggguaacugg

SEQ ID NO: 898204 - RNA, 19 nt, Artificial Sequence
  Description of Artificial Sequence: Synthetic oligonucleotide
aaaacuaggaugaggguaa

SEQ ID NO: 898205 - RNA, 19 nt, Artificial Sequence
  Description of Artificial Sequence: Synthetic oligonucleotide
uacgagcugucccuuacgg

SEQ ID NO: 898206 - RNA, 19 nt, Artificial Sequence
  Description of Artificial Sequence: Synthetic oligonucleotide
auacauaguccccaucgag

SEQ ID NO: 898207 - RNA, 19 nt, Artificial Sequence
  Description of Artificial Sequence: Synthetic oligonucleotide
cuuacggucaugacccacg

SEQ ID NO: 898208 - RNA, 19 nt, Artificial Sequence
  Description of Artificial Sequence: Synthetic oligonucleotide
ucaugcggaagaaaccacc

SEQ ID NO: 898209 - RNA, 19 nt, Artificial Sequence
  Description of Artificial Sequence: Synthetic oligonucleotide
cuaggaugaggguaagugc

SEQ ID NO: 898210 - RNA, 19 nt, Artificial Sequence
  Description of Artificial Sequence: Synthetic oligonucleotide
gaugcuuccauugcggaug

SEQ ID NO: 898211 - RNA, 19 nt, Artificial Sequence
  Description of Artificial Sequence: Synthetic oligonucleotide
cauaccacgguggaaaccc

SEQ ID NO: 898212 - RNA, 19 nt, Artificial Sequence
  Description of Artificial Sequence: Synthetic oligonucleotide
gaggcaaccggcugggacg

SEQ ID NO: 898213 - RNA, 19 nt, Artificial Sequence
  Description of Artificial Sequence: Synthetic oligonucleotide
acggucaugacccacggcu

SEQ ID NO: 898214 - RNA, 19 nt, Artificial Sequence
  Description of Artificial Sequence: Synthetic oligonucleotide
gaauggauuuacagaaucc

SEQ ID NO: 898215 - RNA, 19 nt, Artificial Sequence
  Description of Artificial Sequence: Synthetic oligonucleotide
uccucagauagguacccgg

SEQ ID NO: 898216 - RNA, 19 nt, Artificial Sequence
  Description of Artificial Sequence: Synthetic oligonucleotide
caugcggaagaaaccaccg

SEQ ID NO: 898217 - RNA, 19 nt, Artificial Sequence
  Description of Artificial Sequence: Synthetic oligonucleotide
cucgaagugcgacacaaag

SEQ ID NO: 898218 - RNA, 19 nt, Artificial Sequence
  Description of Artificial Sequence: Synthetic oligonucleotide
cacgucuuguuucagcagg

SEQ ID NO: 898219 - RNA, 19 nt, Artificial Sequence
  Description of Artificial Sequence: Synthetic oligonucleotide
ugcgucucaucacacucgg

SEQ ID NO: 898220 - RNA, 19 nt, Artificial Sequence
  Description of Artificial Sequence: Synthetic oligonucleotide
uguucacacugacaaggcc

SEQ ID NO: 898221 - RNA, 19 nt, Artificial Sequence
  Description of Artificial Sequence: Synthetic oligonucleotide
cacgaauggauuuacagaa

SEQ ID NO: 898222 - RNA, 19 nt, Artificial Sequence
  Description of Artificial Sequence: Synthetic oligonucleotide
agcucuguauugcuugggg

SEQ ID NO: 898223 - RNA, 19 nt, Artificial Sequence
  Description of Artificial Sequence: Synthetic oligonucleotide
ugcaccacaccacuccgag

SEQ ID NO: 898224 - RNA, 19 nt, Artificial Sequence
  Description of Artificial Sequence: Synthetic oligonucleotide
ucccguugagcacaaaggu

SEQ ID NO: 898225 - RNA, 19 nt, Artificial Sequence
  Description of Artificial Sequence: Synthetic oligonucleotide
ucuugucaugacuuggggu

SEQ ID NO: 898226 - RNA, 19 nt, Artificial Sequence
  Description of Artificial Sequence: Synthetic oligonucleotide
aaagugaggagcagggaca

SEQ ID NO: 898227 - RNA, 19 nt, Artificial Sequence
  Description of Artificial Sequence: Synthetic oligonucleotide
uuacggucaugacccacgg

SEQ ID NO: 898228 - RNA, 19 nt, Artificial Sequence
  Description of Artificial Sequence: Synthetic oligonucleotide
gagcagggacauuauuugg

SEQ ID NO: 898229 - RNA, 19 nt, Artificial Sequence
  Description of Artificial Sequence: Synthetic oligonucleotide
agucuagcucgcugcaggc

SEQ ID NO: 898230 - RNA, 19 nt, Artificial Sequence
  Description of Artificial Sequence: Synthetic oligonucleotide
gaaaacuaggaugagggua

SEQ ID NO: 898231 - RNA, 19 nt, Artificial Sequence
  Description of Artificial Sequence: Synthetic oligonucleotide
gaguuggccacucuuguca

SEQ ID NO: 898232 - RNA, 19 nt, Artificial Sequence
  Description of Artificial Sequence: Synthetic oligonucleotide
ugauauagaugcuuccauu

SEQ ID NO: 898233 - RNA, 19 nt, Artificial Sequence
  Description of Artificial Sequence: Synthetic oligonucleotide
aaacccggcggggacagcg

SEQ ID NO: 898234 - RNA, 19 nt, Artificial Sequence
  Description of Artificial Sequence: Synthetic oligonucleotide
gaaaccccggagcucaggc

SEQ ID NO: 898235 - RNA, 19 nt, Artificial Sequence
  Description of Artificial Sequence: Synthetic oligonucleotide
accaaggucccgucgcggc

SEQ ID NO: 898236 - RNA, 19 nt, Artificial Sequence
  Description of Artificial Sequence: Synthetic oligonucleotide
ggcggaaccaccuccaucc

SEQ ID NO: 898237 - RNA, 19 nt, Artificial Sequence
  Description of Artificial Sequence: Synthetic oligonucleotide
gucccuuacggucaugacc

SEQ ID NO: 898238 - RNA, 19 nt, Artificial Sequence
  Description of Artificial Sequence: Synthetic oligonucleotide
agagguugaugccacgcug

SEQ ID NO: 898239 - RNA, 19 nt, Artificial Sequence
  Description of Artificial Sequence: Synthetic oligonucleotide
cuugucaugacuuggggua

SEQ ID NO: 898240 - RNA, 19 nt, Artificial Sequence
  Description of Artificial Sequence: Synthetic oligonucleotide
acacugacaaggccucugg

SEQ ID NO: 898241 - RNA, 19 nt, Artificial Sequence
  Description of Artificial Sequence: Synthetic oligonucleotide
uccauugcggaugagccac

SEQ ID NO: 898242 - RNA, 19 nt, Artificial Sequence
  Description of Artificial Sequence: Synthetic oligonucleotide
cacuguuucacuugggaga

SEQ ID NO: 898243 - RNA, 19 nt, Artificial Sequence
  Description of Artificial Sequence: Synthetic oligonucleotide
gacggcugugucuuccacg

SEQ ID NO: 898244 - RNA, 19 nt, Artificial Sequence
  Description of Artificial Sequence: Synthetic oligonucleotide
ugcggaagaaaccaccguu

SEQ ID NO: 898245 - RNA, 19 nt, Artificial Sequence
  Description of Artificial Sequence: Synthetic oligonucleotide
augcacacauaccacggug

SEQ ID NO: 898246 - RNA, 19 nt, Artificial Sequence
  Description of Artificial Sequence: Synthetic oligonucleotide
ugaccaaggucccgucgcg

SEQ ID NO: 898247 - RNA, 19 nt, Artificial Sequence
  Description of Artificial Sequence: Synthetic oligonucleotide
gagaaagugcgcagaggcg

SEQ ID NO: 898248 - RNA, 19 nt, Artificial Sequence
  Description of Artificial Sequence: Synthetic oligonucleotide
cagucuagcucgcugcagg

SEQ ID NO: 898249 - RNA, 19 nt, Artificial Sequence
  Description of Artificial Sequence: Synthetic oligonucleotide
cucaccacguuccccaagc

SEQ ID NO: 898250 - RNA, 19 nt, Artificial Sequence
  Description of Artificial Sequence: Synthetic oligonucleotide
ugcaguugccagucugagg

SEQ ID NO: 898251 - RNA, 19 nt, Artificial Sequence
  Description of Artificial Sequence: Synthetic oligonucleotide
ggagcagggacauuauuug

SEQ ID NO: 898252 - RNA, 19 nt, Artificial Sequence
  Description of Artificial Sequence: Synthetic oligonucleotide
ugcgacacaaaggugcgca

SEQ ID NO: 898253 - RNA, 19 nt, Artificial Sequence
  Description of Artificial Sequence: Synthetic oligonucleotide
uccccauaaaagugaggag

SEQ ID NO: 898254 - RNA, 19 nt, Artificial Sequence
  Description of Artificial Sequence: Synthetic oligonucleotide
acguuccccaagcacucgc

SEQ ID NO: 898255 - RNA, 19 nt, Artificial Sequence
  Description of Artificial Sequence: Synthetic oligonucleotide
accgagaaagugcgcagag

SEQ ID NO: 898256 - RNA, 19 nt, Artificial Sequence
  Description of Artificial Sequence: Synthetic oligonucleotide
acacauaccacgguggaaa

SEQ ID NO: 898257 - RNA, 19 nt, Artificial Sequence
  Description of Artificial Sequence: Synthetic oligonucleotide
gucccguugagcacaaagg

SEQ ID NO: 898258 - RNA, 19 nt, Artificial Sequence
  Description of Artificial Sequence: Synthetic oligonucleotide
ucuucacugcaguuggauc

SEQ ID NO: 898259 - RNA, 19 nt, Artificial Sequence
  Description of Artificial Sequence: Synthetic oligonucleotide
ucauuugcuaguggccucc

SEQ ID NO: 898260 - RNA, 19 nt, Artificial Sequence
  Description of Artificial Sequence: Synthetic oligonucleotide
gaaagugcgcagaggcgcg

SEQ ID NO: 898261 - RNA, 19 nt, Artificial Sequence
  Description of Artificial Sequence: Synthetic oligonucleotide
acauaccacgguggaaacc

SEQ ID NO: 898262 - RNA, 19 nt, Artificial Sequence
  Description of Artificial Sequence: Synthetic oligonucleotide
acgguggaaacccggcggg

SEQ ID NO: 898263 - RNA, 19 nt, Artificial Sequence
  Description of Artificial Sequence: Synthetic oligonucleotide
cacacaacuccacucagca

SEQ ID NO: 898264 - RNA, 19 nt, Artificial Sequence
  Description of Artificial Sequence: Synthetic oligonucleotide
agcgagggcaagaagagca

SEQ ID NO: 898265 - RNA, 19 nt, Artificial Sequence
  Description of Artificial Sequence: Synthetic oligonucleotide
ucaucgucgcgggaaaccc

SEQ ID NO: 898266 - RNA, 19 nt, Artificial Sequence
  Description of Artificial Sequence: Synthetic oligonucleotide
agccacacaacuccacuca

SEQ ID NO: 898267 - RNA, 19 nt, Artificial Sequence
  Description of Artificial Sequence: Synthetic oligonucleotide
auaucacguucacaaauuu

SEQ ID NO: 898268 - RNA, 19 nt, Artificial Sequence
  Description of Artificial Sequence: Synthetic oligonucleotide
ggaacugcucaccagccgc

SEQ ID NO: 898269 - RNA, 19 nt, Artificial Sequence
  Description of Artificial Sequence: Synthetic oligonucleotide
ucgcucaccacguucccca

SEQ ID NO: 898270 - RNA, 19 nt, Artificial Sequence
  Description of Artificial Sequence: Synthetic oligonucleotide
caccacaccacuccgagca

SEQ ID NO: 898271 - RNA, 19 nt, Artificial Sequence
  Description of Artificial Sequence: Synthetic oligonucleotide
gagguugaugccacgcugc

SEQ ID NO: 898272 - RNA, 19 nt, Artificial Sequence
  Description of Artificial Sequence: Synthetic oligonucleotide
cuugaagggguugcaagug

SEQ ID NO: 898273 - RNA, 19 nt, Artificial Sequence
  Description of Artificial Sequence: Synthetic oligonucleotide
agugcgacacaaaggugcg

SEQ ID NO: 898274 - RNA, 19 nt, Artificial Sequence
  Description of Artificial Sequence: Synthetic oligonucleotide
ggaaccaccuccauccagg

SEQ ID NO: 898275 - RNA, 19 nt, Artificial Sequence
  Description of Artificial Sequence: Synthetic oligonucleotide
ugucgguuccucucugucu

SEQ ID NO: 898276 - RNA, 19 nt, Artificial Sequence
  Description of Artificial Sequence: Synthetic oligonucleotide
ccagcaccgagaaagugcg

SEQ ID NO: 898277 - RNA, 19 nt, Artificial Sequence
  Description of Artificial Sequence: Synthetic oligonucleotide
aaaggugcgcacggccgcg

SEQ ID NO: 898278 - RNA, 19 nt, Artificial Sequence
  Description of Artificial Sequence: Synthetic oligonucleotide
uaagugccagccacguggu

SEQ ID NO: 898279 - RNA, 19 nt, Artificial Sequence
  Description of Artificial Sequence: Synthetic oligonucleotide
cuggcugauaucacguuca

SEQ ID NO: 898280 - RNA, 19 nt, Artificial Sequence
  Description of Artificial Sequence: Synthetic oligonucleotide
aaaccaccguucugggcga

SEQ ID NO: 898281 - RNA, 19 nt, Artificial Sequence
  Description of Artificial Sequence: Synthetic oligonucleotide
acccgugucagguggccgg

SEQ ID NO: 898282 - RNA, 19 nt, Artificial Sequence
  Description of Artificial Sequence: Synthetic oligonucleotide
agcaccgagaaagugcgca

SEQ ID NO: 898283 - RNA, 19 nt, Artificial Sequence
  Description of Artificial Sequence: Synthetic oligonucleotide
ggucccguugagcacaaag

SEQ ID NO: 898284 - RNA, 19 nt, Artificial Sequence
  Description of Artificial Sequence: Synthetic oligonucleotide
aaaccccggagcucaggcu

SEQ ID NO: 898285 - RNA, 19 nt, Artificial Sequence
  Description of Artificial Sequence: Synthetic oligonucleotide
cauaccagcccagaggaca

SEQ ID NO: 898286 - RNA, 19 nt, Artificial Sequence
  Description of Artificial Sequence: Synthetic oligonucleotide
agccacgugguccugguaa

SEQ ID NO: 898287 - RNA, 19 nt, Artificial Sequence
  Description of Artificial Sequence: Synthetic oligonucleotide
aaacuaggaugaggguaag

SEQ ID NO: 898288 - RNA, 19 nt, Artificial Sequence
  Description of Artificial Sequence: Synthetic oligonucleotide
ggagacacuguuucacuug

SEQ ID NO: 898289 - RNA, 19 nt, Artificial Sequence
  Description of Artificial Sequence: Synthetic oligonucleotide
cacucgccgguguucaugc

SEQ ID NO: 898290 - RNA, 19 nt, Artificial Sequence
  Description of Artificial Sequence: Synthetic oligonucleotide
cagauagguacccggugac

SEQ ID NO: 898291 - RNA, 19 nt, Artificial Sequence
  Description of Artificial Sequence: Synthetic oligonucleotide
caaaggugcgcacggccgc

SEQ ID NO: 898292 - RNA, 19 nt, Artificial Sequence
  Description of Artificial Sequence: Synthetic oligonucleotide
uggaagaguacgagcuguc

SEQ ID NO: 898293 - RNA, 19 nt, Artificial Sequence
  Description of Artificial Sequence: Synthetic oligonucleotide
aaagugcgcagaggcgcgg

SEQ ID NO: 898294 - RNA, 19 nt, Artificial Sequence
  Description of Artificial Sequence: Synthetic oligonucleotide
ucgccgguguucaugcgga

SEQ ID NO: 898295 - RNA, 19 nt, Artificial Sequence
  Description of Artificial Sequence: Synthetic oligonucleotide
guacgagcugucccuuacg

SEQ ID NO: 898296 - RNA, 19 nt, Artificial Sequence
  Description of Artificial Sequence: Synthetic oligonucleotide
aucgucgcgggaaaccccg

SEQ ID NO: 898297 - RNA, 19 nt, Artificial Sequence
  Description of Artificial Sequence: Synthetic oligonucleotide
uccccaagcacucgccggu

SEQ ID NO: 898298 - RNA, 19 nt, Artificial Sequence
  Description of Artificial Sequence: Synthetic oligonucleotide
ucugagggucgcagggaca

SEQ ID NO: 898299 - RNA, 19 nt, Artificial Sequence
  Description of Artificial Sequence: Synthetic oligonucleotide
guccccaucgaggugucgg

SEQ ID NO: 898300 - RNA, 19 nt, Artificial Sequence
  Description of Artificial Sequence: Synthetic oligonucleotide
gaugccacgcugcuccguc

SEQ ID NO: 898301 - RNA, 19 nt, Artificial Sequence
  Description of Artificial Sequence: Synthetic oligonucleotide
gaagugcgacacaaaggug

SEQ ID NO: 898302 - RNA, 19 nt, Artificial Sequence
  Description of Artificial Sequence: Synthetic oligonucleotide
uucugggcgacgaggcaac

SEQ ID NO: 898303 - RNA, 19 nt, Artificial Sequence
  Description of Artificial Sequence: Synthetic oligonucleotide
gacgaggcaaccggcuggg

SEQ ID NO: 898304 - RNA, 19 nt, Artificial Sequence
  Description of Artificial Sequence: Synthetic oligonucleotide
gcccauaccagcccagagg

SEQ ID NO: 898305 - RNA, 19 nt, Artificial Sequence
  Description of Artificial Sequence: Synthetic oligonucleotide
ucuuccacgguggcgcggc

SEQ ID NO: 898306 - RNA, 19 nt, Artificial Sequence
  Description of Artificial Sequence: Synthetic oligonucleotide
gacgcgugcgcgcgagugg

SEQ ID NO: 898307 - RNA, 19 nt, Artificial Sequence
  Description of Artificial Sequence: Synthetic oligonucleotide
gcacgaauggauuuacaga

SEQ ID NO: 898308 - RNA, 19 nt, Artificial Sequence
  Description of Artificial Sequence: Synthetic oligonucleotide
uccgagcaagccgagcagc

SEQ ID NO: 898309 - RNA, 19 nt, Artificial Sequence
  Description of Artificial Sequence: Synthetic oligonucleotide
gggguucaugcacacauac

SEQ ID NO: 898310 - RNA, 19 nt, Artificial Sequence
  Description of Artificial Sequence: Synthetic oligonucleotide
ggcaaccuggcccauacca

SEQ ID NO: 898311 - RNA, 19 nt, Artificial Sequence
  Description of Artificial Sequence: Synthetic oligonucleotide
aacuaggaugaggguaagu

SEQ ID NO: 898312 - RNA, 19 nt, Artificial Sequence
  Description of Artificial Sequence: Synthetic oligonucleotide
uugucaugacuugggguac

SEQ ID NO: 898313 - RNA, 19 nt, Artificial Sequence
  Description of Artificial Sequence: Synthetic oligonucleotide
cacauaccacgguggaaac

SEQ ID NO: 898314 - RNA, 19 nt, Artificial Sequence
  Description of Artificial Sequence: Synthetic oligonucleotide
ggugguauacauagucccc

SEQ ID NO: 898315 - RNA, 19 nt, Artificial Sequence
  Description of Artificial Sequence: Synthetic oligonucleotide
uggcugauaucacguucac

SEQ ID NO: 898316 - RNA, 19 nt, Artificial Sequence
  Description of Artificial Sequence: Synthetic oligonucleotide
augcggaagaaaccaccgu

SEQ ID NO: 898317 - RNA, 19 nt, Artificial Sequence
  Description of Artificial Sequence: Synthetic oligonucleotide
gagggucgcagggacacug

SEQ ID NO: 898318 - RNA, 19 nt, Artificial Sequence
  Description of Artificial Sequence: Synthetic oligonucleotide
gucaucgucgcgggaaacc

SEQ ID NO: 898319 - RNA, 19 nt, Artificial Sequence
  Description of Artificial Sequence: Synthetic oligonucleotide
gggacacugguguucacac

SEQ ID NO: 898320 - RNA, 19 nt, Artificial Sequence
  Description of Artificial Sequence: Synthetic oligonucleotide
gaaccugucuccugcgucu

SEQ ID NO: 898321 - RNA, 19 nt, Artificial Sequence
  Description of Artificial Sequence: Synthetic oligonucleotide
ucaguccuugaagggguug

SEQ ID NO: 898322 - RNA, 19 nt, Artificial Sequence
  Description of Artificial Sequence: Synthetic oligonucleotide
caucgucgcgggaaacccc

SEQ ID NO: 898323 - RNA, 19 nt, Artificial Sequence
  Description of Artificial Sequence: Synthetic oligonucleotide
ugccacgcugcuccgucug

SEQ ID NO: 898324 - RNA, 19 nt, Artificial Sequence
  Description of Artificial Sequence: Synthetic oligonucleotide
agguugaugccacgcugcu

SEQ ID NO: 898325 - RNA, 19 nt, Artificial Sequence
  Description of Artificial Sequence: Synthetic oligonucleotide
ugucccuuacggucaugac

SEQ ID NO: 898326 - RNA, 19 nt, Artificial Sequence
  Description of Artificial Sequence: Synthetic oligonucleotide
uggcucucguugauauaga

SEQ ID NO: 898327 - RNA, 19 nt, Artificial Sequence
  Description of Artificial Sequence: Synthetic oligonucleotide
agcauccaugccaguggcc

SEQ ID NO: 898328 - RNA, 19 nt, Artificial Sequence
  Description of Artificial Sequence: Synthetic oligonucleotide
guuggauccuguccaucca

SEQ ID NO: 898329 - RNA, 19 nt, Artificial Sequence
  Description of Artificial Sequence: Synthetic oligonucleotide
aucgaggugucgguuccuc

SEQ ID NO: 898330 - RNA, 19 nt, Artificial Sequence
  Description of Artificial Sequence: Synthetic oligonucleotide
cuagcucgcugcaggcggc

SEQ ID NO: 898331 - RNA, 19 nt, Artificial Sequence
  Description of Artificial Sequence: Synthetic oligonucleotide
auagguacccggugaccaa

SEQ ID NO: 898332 - RNA, 19 nt, Artificial Sequence
  Description of Artificial Sequence: Synthetic oligonucleotide
gaccaaggucccgucgcgg

SEQ ID NO: 898333 - RNA, 19 nt, Artificial Sequence
  Description of Artificial Sequence: Synthetic oligonucleotide
acgagcugucccuuacggu

SEQ ID NO: 898334 - RNA, 19 nt, Artificial Sequence
  Description of Artificial Sequence: Synthetic oligonucleotide
ggagaguuggccacucuug

SEQ ID NO: 898335 - RNA, 19 nt, Artificial Sequence
  Description of Artificial Sequence: Synthetic oligonucleotide
gcggaucccgaacugcgcg

SEQ ID NO: 898336 - RNA, 19 nt, Artificial Sequence
  Description of Artificial Sequence: Synthetic oligonucleotide
cguugauauagaugcuucc

SEQ ID NO: 898337 - RNA, 19 nt, Artificial Sequence
  Description of Artificial Sequence: Synthetic oligonucleotide
guacccggugaccaagguc

SEQ ID NO: 898338 - RNA, 19 nt, Artificial Sequence
  Description of Artificial Sequence: Synthetic oligonucleotide
agcucucuugcucgcggcu

SEQ ID NO: 898339 - RNA, 19 nt, Artificial Sequence
  Description of Artificial Sequence: Synthetic oligonucleotide
ggaagaguacgagcugucc

SEQ ID NO: 898340 - RNA, 19 nt, Artificial Sequence
  Description of Artificial Sequence: Synthetic oligonucleotide
gucaugacuugggguacag

SEQ ID NO: 898341 - RNA, 19 nt, Artificial Sequence
  Description of Artificial Sequence: Synthetic oligonucleotide
ugggguucaugcacacaua

SEQ ID NO: 898342 - RNA, 19 nt, Artificial Sequence
  Description of Artificial Sequence: Synthetic oligonucleotide
acggccgcgggguggcugg

SEQ ID NO: 898343 - RNA, 19 nt, Artificial Sequence
  Description of Artificial Sequence: Synthetic oligonucleotide
uccccaucgaggugucggu

SEQ ID NO: 898344 - RNA, 19 nt, Artificial Sequence
  Description of Artificial Sequence: Synthetic oligonucleotide
gcaugugccacagccuggg

SEQ ID NO: 898345 - RNA, 19 nt, Artificial Sequence
  Description of Artificial Sequence: Synthetic oligonucleotide
gguauacauaguccccauc

SEQ ID NO: 898346 - RNA, 19 nt, Artificial Sequence
  Description of Artificial Sequence: Synthetic oligonucleotide
cccguugagcacaaaggug

SEQ ID NO: 898347 - RNA, 19 nt, Artificial Sequence
  Description of Artificial Sequence: Synthetic oligonucleotide
augacuugggguacaguuu

SEQ ID NO: 898348 - RNA, 19 nt, Artificial Sequence
  Description of Artificial Sequence: Synthetic oligonucleotide
cugcgcguucugcagcccc

SEQ ID NO: 898349 - RNA, 19 nt, Artificial Sequence
  Description of Artificial Sequence: Synthetic oligonucleotide
acgcgugcgcgcgaguggg

SEQ ID NO: 898350 - RNA, 19 nt, Artificial Sequence
  Description of Artificial Sequence: Synthetic oligonucleotide
gcucucguugauauagaug

SEQ ID NO: 898351 - RNA, 19 nt, Artificial Sequence
  Description of Artificial Sequence: Synthetic oligonucleotide
cugggcgacgaggcaaccg

SEQ ID NO: 898352 - RNA, 19 nt, Artificial Sequence
  Description of Artificial Sequence: Synthetic oligonucleotide
aggucccauggccacugca

SEQ ID NO: 898353 - RNA, 19 nt, Artificial Sequence
  Description of Artificial Sequence: Synthetic oligonucleotide
ccgucuguccaucugcaug

SEQ ID NO: 898354 - RNA, 19 nt, Artificial Sequence
  Description of Artificial Sequence: Synthetic oligonucleotide
gccacacaacuccacucag

SEQ ID NO: 898355 - RNA, 19 nt, Artificial Sequence
  Description of Artificial Sequence: Synthetic oligonucleotide
aggucaucgucgcgggaaa

SEQ ID NO: 898356 - RNA, 19 nt, Artificial Sequence
  Description of Artificial Sequence: Synthetic oligonucleotide
gcaccgagaaagugcgcag

SEQ ID NO: 898357 - RNA, 19 nt, Artificial Sequence
  Description of Artificial Sequence: Synthetic oligonucleotide
gucccgucgcggcggaucc

SEQ ID NO: 898358 - RNA, 19 nt, Artificial Sequence
  Description of Artificial Sequence: Synthetic oligonucleotide
agucccgcgagggacgcgu

SEQ ID NO: 898359 - RNA, 19 nt, Artificial Sequence
  Description of Artificial Sequence: Synthetic oligonucleotide
ggguaacuggccagggucc

SEQ ID NO: 898360 - RNA, 19 nt, Artificial Sequence
  Description of Artificial Sequence: Synthetic oligonucleotide
cagugggguucaugcacac

SEQ ID NO: 898361 - RNA, 19 nt, Artificial Sequence
  Description of Artificial Sequence: Synthetic oligonucleotide
acgaauggauuuacagaau

SEQ ID NO: 898362 - RNA, 19 nt, Artificial Sequence
  Description of Artificial Sequence: Synthetic oligonucleotide
cugcaaccagcaguucccc

SEQ ID NO: 898363 - RNA, 19 nt, Artificial Sequence
  Description of Artificial Sequence: Synthetic oligonucleotide
ucccgcgagggacgcgugc

SEQ ID NO: 898364 - RNA, 19 nt, Artificial Sequence
  Description of Artificial Sequence: Synthetic oligonucleotide
uccuggcugauaucacguu

SEQ ID NO: 898365 - RNA, 19 nt, Artificial Sequence
  Description of Artificial Sequence: Synthetic oligonucleotide
cuccugcgucucaucacac

SEQ ID NO: 898366 - RNA, 19 nt, Artificial Sequence
  Description of Artificial Sequence: Synthetic oligonucleotide
ccgucgcucaccacguucc

SEQ ID NO: 898367 - RNA, 19 nt, Artificial Sequence
  Description of Artificial Sequence: Synthetic oligonucleotide
guacggcagcagcagguca

SEQ ID NO: 898368 - RNA, 19 nt, Artificial Sequence
  Description of Artificial Sequence: Synthetic oligonucleotide
gaggugucgguuccucucu

SEQ ID NO: 898369 - RNA, 19 nt, Artificial Sequence
  Description of Artificial Sequence: Synthetic oligonucleotide
caagcacucgccgguguuc

SEQ ID NO: 898370 - RNA, 19 nt, Artificial Sequence
  Description of Artificial Sequence: Synthetic oligonucleotide
acgucuuguuucagcagga

SEQ ID NO: 898371 - RNA, 19 nt, Artificial Sequence
  Description of Artificial Sequence: Synthetic oligonucleotide
ggguucaugcacacauacc

SEQ ID NO: 898372 - RNA, 19 nt, Artificial Sequence
  Description of Artificial Sequence: Synthetic oligonucleotide
cacagucuagcucgcugca

SEQ ID NO: 898373 - RNA, 19 nt, Artificial Sequence
  Description of Artificial Sequence: Synthetic oligonucleotide
gcugccggcgcgcacccgg

SEQ ID NO: 898374 - RNA, 19 nt, Artificial Sequence
  Description of Artificial Sequence: Synthetic oligonucleotide
gaucccgaacugcgcguuc

SEQ ID NO: 898375 - RNA, 19 nt, Artificial Sequence
  Description of Artificial Sequence: Synthetic oligonucleotide
cgaagugcgacacaaaggu

SEQ ID NO: 898376 - RNA, 19 nt, Artificial Sequence
  Description of Artificial Sequence: Synthetic oligonucleotide
ccaucgaggugucgguucc

SEQ ID NO: 898377 - RNA, 19 nt, Artificial Sequence
  Description of Artificial Sequence: Synthetic oligonucleotide
gucgcggcggaucccgaac

SEQ ID NO: 898378 - RNA, 19 nt, Artificial Sequence
  Description of Artificial Sequence: Synthetic oligonucleotide
caaccggcugggacggcug

SEQ ID NO: 898379 - RNA, 19 nt, Artificial Sequence
  Description of Artificial Sequence: Synthetic oligonucleotide
aggugcgcacggccgcggg

SEQ ID NO: 898380 - RNA, 19 nt, Artificial Sequence
  Description of Artificial Sequence: Synthetic oligonucleotide
uccgucuguccaucugcau

SEQ ID NO: 898381 - RNA, 19 nt, Artificial Sequence
  Description of Artificial Sequence: Synthetic oligonucleotide
ccguucugggcgacgaggc

SEQ ID NO: 898382 - RNA, 19 nt, Artificial Sequence
  Description of Artificial Sequence: Synthetic oligonucleotide
cuccgucuguccaucugca

SEQ ID NO: 898383 - RNA, 19 nt, Artificial Sequence
  Description of Artificial Sequence: Synthetic oligonucleotide
gguaacuggccaggguccc

SEQ ID NO: 898384 - RNA, 19 nt, Artificial Sequence
  Description of Artificial Sequence: Synthetic oligonucleotide
gugcgcgcgaguggguacg

SEQ ID NO: 898385 - RNA, 19 nt, Artificial Sequence
  Description of Artificial Sequence: Synthetic oligonucleotide
accgcgcggcccucgaagu

SEQ ID NO: 898386 - RNA, 19 nt, Artificial Sequence
  Description of Artificial Sequence: Synthetic oligonucleotide
ggcggcaccccgccaaaag

SEQ ID NO: 898387 - RNA, 19 nt, Artificial Sequence
  Description of Artificial Sequence: Synthetic oligonucleotide
ggcccauaccagcccagag

SEQ ID NO: 898388 - RNA, 19 nt, Artificial Sequence
  Description of Artificial Sequence: Synthetic oligonucleotide
cagcgagggcaagaagagc

SEQ ID NO: 898389 - RNA, 19 nt, Artificial Sequence
  Description of Artificial Sequence: Synthetic oligonucleotide
acccggugaccaagguccc

SEQ ID NO: 898390 - RNA, 19 nt, Artificial Sequence
  Description of Artificial Sequence: Synthetic oligonucleotide
agggucgcagggacacugg

SEQ ID NO: 898391 - RNA, 19 nt, Artificial Sequence
  Description of Artificial Sequence: Synthetic oligonucleotide
accaccguucugggcgacg

SEQ ID NO: 898392 - RNA, 19 nt, Artificial Sequence
  Description of Artificial Sequence: Synthetic oligonucleotide
ccgcccgucgcucaccacg

SEQ ID NO: 898393 - RNA, 19 nt, Artificial Sequence
  Description of Artificial Sequence: Synthetic oligonucleotide
gccggagacacuguuucac

SEQ ID NO: 898394 - RNA, 19 nt, Artificial Sequence
  Description of Artificial Sequence: Synthetic oligonucleotide
guggcgcggcgccucugcg

SEQ ID NO: 898395 - RNA, 19 nt, Artificial Sequence
  Description of Artificial Sequence: Synthetic oligonucleotide
ccacgucuuguuucagcag

SEQ ID NO: 898396 - RNA, 19 nt, Artificial Sequence
  Description of Artificial Sequence: Synthetic oligonucleotide
cguugagcacaaagguggc

SEQ ID NO: 898397 - RNA, 19 nt, Artificial Sequence
  Description of Artificial Sequence: Synthetic oligonucleotide
gaguacgagcugucccuua

SEQ ID NO: 898398 - RNA, 19 nt, Artificial Sequence
  Description of Artificial Sequence: Synthetic oligonucleotide
gcgacgaggcaaccggcug

SEQ ID NO: 898399 - RNA, 19 nt, Artificial Sequence
  Description of Artificial Sequence: Synthetic oligonucleotide
caguuggauccuguccauc

SEQ ID NO: 898400 - RNA, 19 nt, Artificial Sequence
  Description of Artificial Sequence: Synthetic oligonucleotide
caguggccucacauccuuc

SEQ ID NO: 898401 - RNA, 19 nt, Artificial Sequence
  Description of Artificial Sequence: Synthetic oligonucleotide
gucaugacccacggcuguc

SEQ ID NO: 898402 - RNA, 19 nt, Artificial Sequence
  Description of Artificial Sequence: Synthetic oligonucleotide
cuuccacgguggcgcggcg

SEQ ID NO: 898403 - RNA, 19 nt, Artificial Sequence
  Description of Artificial Sequence: Synthetic oligonucleotide
ccgagaaagugcgcagagg

SEQ ID NO: 898404 - RNA, 19 nt, Artificial Sequence
  Description of Artificial Sequence: Synthetic oligonucleotide
cgacgaggcaaccggcugg

SEQ ID NO: 898405 - RNA, 19 nt, Artificial Sequence
  Description of Artificial Sequence: Synthetic oligonucleotide
caccguucugggcgacgag

SEQ ID NO: 898406 - RNA, 19 nt, Artificial Sequence
  Description of Artificial Sequence: Synthetic oligonucleotide
cugccggcgcgcacccggg

SEQ ID NO: 898407 - RNA, 19 nt, Artificial Sequence
  Description of Artificial Sequence: Synthetic oligonucleotide
aggcugcaccacaccacuc

SEQ ID NO: 898408 - RNA, 19 nt, Artificial Sequence
  Description of Artificial Sequence: Synthetic oligonucleotide
caccgagaaagugcgcaga

SEQ ID NO: 898409 - RNA, 19 nt, Artificial Sequence
  Description of Artificial Sequence: Synthetic oligonucleotide
gugcgacacaaaggugcgc

SEQ ID NO: 898410 - RNA, 19 nt, Artificial Sequence
  Description of Artificial Sequence: Synthetic oligonucleotide
ggcgcggcgacccguguca

SEQ ID NO: 898411 - RNA, 19 nt, Artificial Sequence
  Description of Artificial Sequence: Synthetic oligonucleotide
cgaggugucgguuccucuc

SEQ ID NO: 898412 - RNA, 19 nt, Artificial Sequence
  Description of Artificial Sequence: Synthetic oligonucleotide
cacacauaccacgguggaa

SEQ ID NO: 898413 - RNA, 19 nt, Artificial Sequence
  Description of Artificial Sequence: Synthetic oligonucleotide
agaggcgcggcgacccgug

SEQ ID NO: 898414 - RNA, 19 nt, Artificial Sequence
  Description of Artificial Sequence: Synthetic oligonucleotide
ggacgcgugcgcgcgagug

SEQ ID NO: 898415 - RNA, 19 nt, Artificial Sequence
  Description of Artificial Sequence: Synthetic oligonucleotide
gcaccacaccacuccgagc

SEQ ID NO: 898416 - RNA, 19 nt, Artificial Sequence
  Description of Artificial Sequence: Synthetic oligonucleotide
gcgcgaguggguacggcag

SEQ ID NO: 898417 - RNA, 19 nt, Artificial Sequence
  Description of Artificial Sequence: Synthetic oligonucleotide
ggucaugacccacggcugu

SEQ ID NO: 898418 - RNA, 19 nt, Artificial Sequence
  Description of Artificial Sequence: Synthetic oligonucleotide
ggcccucgaagugcgacac

SEQ ID NO: 898419 - RNA, 19 nt, Artificial Sequence
  Description of Artificial Sequence: Synthetic oligonucleotide
guuggccggagacacuguu

SEQ ID NO: 898420 - RNA, 19 nt, Artificial Sequence
  Description of Artificial Sequence: Synthetic oligonucleotide
aguuggccggagacacugu

SEQ ID NO: 898421 - RNA, 19 nt, Artificial Sequence
  Description of Artificial Sequence: Synthetic oligonucleotide
ggacggcugugucuuccac

SEQ ID NO: 898422 - RNA, 19 nt, Artificial Sequence
  Description of Artificial Sequence: Synthetic oligonucleotide
gcagugauccgagggguaa

SEQ ID NO: 898423 - RNA, 19 nt, Artificial Sequence
  Description of Artificial Sequence: Synthetic oligonucleotide
gcacucgccgguguucaug

SEQ ID NO: 898424 - RNA, 19 nt, Artificial Sequence
  Description of Artificial Sequence: Synthetic oligonucleotide
ccuuacggucaugacccac

SEQ ID NO: 898425 - RNA, 19 nt, Artificial Sequence
  Description of Artificial Sequence: Synthetic oligonucleotide
cauugaccacgucuuguuu

SEQ ID NO: 898426 - RNA, 19 nt, Artificial Sequence
  Description of Artificial Sequence: Synthetic oligonucleotide
agcacucgccgguguucau

SEQ ID NO: 898427 - RNA, 19 nt, Artificial Sequence
  Description of Artificial Sequence: Synthetic oligonucleotide
ggcucucguugauauagau

SEQ ID NO: 898428 - RNA, 19 nt, Artificial Sequence
  Description of Artificial Sequence: Synthetic oligonucleotide
gaaacccggcggggacagc

SEQ ID NO: 898429 - RNA, 19 nt, Artificial Sequence
  Description of Artificial Sequence: Synthetic oligonucleotide
gcgagggacgcgugcgcgc

SEQ ID NO: 898430 - RNA, 19 nt, Artificial Sequence
  Description of Artificial Sequence: Synthetic oligonucleotide
gccacucuugucaugacuu

SEQ ID NO: 898431 - RNA, 19 nt, Artificial Sequence
  Description of Artificial Sequence: Synthetic oligonucleotide
caccccgccaaaaguggcu

SEQ ID NO: 898432 - RNA, 19 nt, Artificial Sequence
  Description of Artificial Sequence: Synthetic oligonucleotide
ccccgccaaaaguggcugg

SEQ ID NO: 898433 - RNA, 19 nt, Artificial Sequence
  Description of Artificial Sequence: Synthetic oligonucleotide
cccgucgcucaccacguuc

SEQ ID NO: 898434 - RNA, 19 nt, Artificial Sequence
  Description of Artificial Sequence: Synthetic oligonucleotide
gcaccccgccaaaaguggc

SEQ ID NO: 898435 - RNA, 19 nt, Artificial Sequence
  Description of Artificial Sequence: Synthetic oligonucleotide
cccgcgagggacgcgugcg

SEQ ID NO: 898436 - RNA, 19 nt, Artificial Sequence
  Description of Artificial Sequence: Synthetic oligonucleotide
cggucaugacccacggcug

SEQ ID NO: 898437 - RNA, 19 nt, Artificial Sequence
  Description of Artificial Sequence: Synthetic oligonucleotide
gcucgcggcugccggcgcg

SEQ ID NO: 898438 - RNA, 19 nt, Artificial Sequence
  Description of Artificial Sequence: Synthetic oligonucleotide
ggucaucgucgcgggaaac

SEQ ID NO: 898439 - RNA, 19 nt, Artificial Sequence
  Description of Artificial Sequence: Synthetic oligonucleotide
gcggcggaucccgaacugc

SEQ ID NO: 898440 - RNA, 19 nt, Artificial Sequence
  Description of Artificial Sequence: Synthetic oligonucleotide
cggaaccaccuccauccag

SEQ ID NO: 898441 - RNA, 19 nt, Artificial Sequence
  Description of Artificial Sequence: Synthetic oligonucleotide
acgguggcgcggcgccucu

SEQ ID NO: 898442 - RNA, 19 nt, Artificial Sequence
  Description of Artificial Sequence: Synthetic oligonucleotide
cccgaacugcgcguucugc

SEQ ID NO: 898443 - RNA, 19 nt, Artificial Sequence
  Description of Artificial Sequence: Synthetic oligonucleotide
gagggacgcgugcgcgcga

SEQ ID NO: 898444 - RNA, 19 nt, Artificial Sequence
  Description of Artificial Sequence: Synthetic oligonucleotide
cacgguggcgcggcgccuc

SEQ ID NO: 898445 - RNA, 19 nt, Artificial Sequence
  Description of Artificial Sequence: Synthetic oligonucleotide
cccgucgcggcggaucccg

SEQ ID NO: 898446 - RNA, 19 nt, Artificial Sequence
  Description of Artificial Sequence: Synthetic oligonucleotide
ggucccgucgcggcggauc

SEQ ID NO: 898447 - RNA, 19 nt, Artificial Sequence
  Description of Artificial Sequence: Synthetic oligonucleotide
ggcgcagucccgcgaggga

SEQ ID NO: 898448 - RNA, 19 nt, Artificial Sequence
  Description of Artificial Sequence: Synthetic oligonucleotide
ucccgucgcggcggauccc

SEQ ID NO: 898449 - RNA, 19 nt, Artificial Sequence
  Description of Artificial Sequence: Synthetic oligonucleotide
cacggccgcgggguggcug

SEQ ID NO: 898450 - RNA, 19 nt, Artificial Sequence
  Description of Artificial Sequence: Synthetic oligonucleotide
cgagggacgcgugcgcgcg

SEQ ID NO: 898451 - RNA, 19 nt, Artificial Sequence
  Description of Artificial Sequence: Synthetic oligonucleotide
ccgggcgcagucccgcgag

SEQ ID NO: 898452 - RNA, 19 nt, Artificial Sequence
  Description of Artificial Sequence: Synthetic oligonucleotide
gcagucccgcgagggacgc

SEQ ID NO: 898453 - RNA, 19 nt, Artificial Sequence
  Description of Artificial Sequence: Synthetic oligonucleotide
caguugccagucugagggu

SEQ ID NO: 898454 - RNA, 19 nt, Artificial Sequence
  Description of Artificial Sequence: Synthetic oligonucleotide
cgcacccgggcgcaguccc

SEQ ID NO: 898455 - RNA, 19 nt, Artificial Sequence
  Description of Artificial Sequence: Synthetic oligonucleotide
cagucccgcgagggacgcg

SEQ ID NO: 898456 - RNA, 19 nt, Artificial Sequence
  Description of Artificial Sequence: Synthetic oligonucleotide
cgggaaaccccggagcuca

SEQ ID NO: 898457 - RNA, 19 nt, Artificial Sequence
  Description of Artificial Sequence: Synthetic oligonucleotide
gggaaaccccggagcucag

SEQ ID NO: 898458 - RNA, 19 nt, Artificial Sequence
  Description of Artificial Sequence: Synthetic oligonucleotide
gcggaaccaccuccaucca

SEQ ID NO: 898459 - RNA, 19 nt, Artificial Sequence
  Description of Artificial Sequence: Synthetic oligonucleotide
cgcgcggcccucgaagugc

SEQ ID NO: 898460 - RNA, 19 nt, Artificial Sequence
  Description of Artificial Sequence: Synthetic oligonucleotide
ccgccaaaaguggcuggug

SEQ ID NO: 898461 - RNA, 19 nt, Artificial Sequence
  Description of Artificial Sequence: Synthetic oligonucleotide
cgcgcgaguggguacggca

SEQ ID NO: 898462 - RNA, 19 nt, Artificial Sequence
  Description of Artificial Sequence: Synthetic oligonucleotide
cgcgagggacgcgugcgcg

SEQ ID NO: 898463 - RNA, 19 nt, Artificial Sequence
  Description of Artificial Sequence: Synthetic oligonucleotide
gcggcgacccgugucaggu

SEQ ID NO: 898464 - RNA, 19 nt, Artificial Sequence
  Description of Artificial Sequence: Synthetic oligonucleotide
gggucgcagggacacuggu

SEQ ID NO: 898465 - RNA, 19 nt, Artificial Sequence
  Description of Artificial Sequence: Synthetic oligonucleotide
ggcagugauccgaggggua

SEQ ID NO: 898466 - RNA, 19 nt, Artificial Sequence
  Description of Artificial Sequence: Synthetic oligonucleotide
ccaaaaguggcuggugcau

SEQ ID NO: 898467 - RNA, 19 nt, Artificial Sequence
  Description of Artificial Sequence: Synthetic oligonucleotide
gcgggaaaccccggagcuc

SEQ ID NO: 898468 - RNA, 19 nt, Artificial Sequence
  Description of Artificial Sequence: Synthetic oligonucleotide
ggacagcgccacauguugu

SEQ ID NO: 898469 - RNA, 19 nt, Artificial Sequence
  Description of Artificial Sequence: Synthetic oligonucleotide
cccgugucagguggccggc

SEQ ID NO: 898470 - RNA, 19 nt, Artificial Sequence
  Description of Artificial Sequence: Synthetic oligonucleotide
gcgacccgugucagguggc

SEQ ID NO: 898471 - RNA, 19 nt, Artificial Sequence
  Description of Artificial Sequence: Synthetic oligonucleotide
ccgcgagggacgcgugcgc

SEQ ID NO: 898472 - RNA, 19 nt, Artificial Sequence
  Description of Artificial Sequence: Synthetic oligonucleotide
gucccgcgagggacgcgug

SEQ ID NO: 898473 - RNA, 19 nt, Artificial Sequence
  Description of Artificial Sequence: Synthetic oligonucleotide
ggcgacgaggcaaccggcu

SEQ ID NO: 898474 - RNA, 19 nt, Artificial Sequence
  Description of Artificial Sequence: Synthetic oligonucleotide
ccaccguucugggcgacga

SEQ ID NO: 898475 - RNA, 19 nt, Artificial Sequence
  Description of Artificial Sequence: Synthetic oligonucleotide
aggcggcaccccgccaaaa

SEQ ID NO: 898476 - RNA, 19 nt, Artificial Sequence
  Description of Artificial Sequence: Synthetic oligonucleotide
gaggcgcggcgacccgugu

SEQ ID NO: 898477 - RNA, 19 nt, Artificial Sequence
  Description of Artificial Sequence: Synthetic oligonucleotide
cgacccgugucagguggcc

SEQ ID NO: 898478 - RNA, 19 nt, Artificial Sequence
  Description of Artificial Sequence: Synthetic oligonucleotide
cugcuccgucuguccaucu

SEQ ID NO: 898479 - RNA, 19 nt, Artificial Sequence
  Description of Artificial Sequence: Synthetic oligonucleotide
ccgcgcggcccucgaagug

SEQ ID NO: 898480 - RNA, 19 nt, Artificial Sequence
  Description of Artificial Sequence: Synthetic oligonucleotide
ccgugucagguggccggcc

SEQ ID NO: 898481 - RNA, 19 nt, Artificial Sequence
  Description of Artificial Sequence: Synthetic oligonucleotide
gcgcagaggcgcggcgacc

SEQ ID NO: 898482 - RNA, 19 nt, Artificial Sequence
  Description of Artificial Sequence: Synthetic oligonucleotide
ggggacagcgccacauguu

SEQ ID NO: 898483 - RNA, 19 nt, Artificial Sequence
  Description of Artificial Sequence: Synthetic oligonucleotide
cccuuacggucaugaccca

SEQ ID NO: 898484 - RNA, 19 nt, Artificial Sequence
  Description of Artificial Sequence: Synthetic oligonucleotide
gcgcacccgggcgcagucc

SEQ ID NO: 898485 - RNA, 19 nt, Artificial Sequence
  Description of Artificial Sequence: Synthetic oligonucleotide
gcgcggcgacccgugucag

SEQ ID NO: 898486 - RNA, 19 nt, Artificial Sequence
  Description of Artificial Sequence: Synthetic oligonucleotide
ggcaaccggcugggacggc

SEQ ID NO: 898487 - RNA, 19 nt, Artificial Sequence
  Description of Artificial Sequence: Synthetic oligonucleotide
gcgcgcgaguggguacggc

SEQ ID NO: 898488 - RNA, 19 nt, Artificial Sequence
  Description of Artificial Sequence: Synthetic oligonucleotide
gccacgcugcuccgucugu

SEQ ID NO: 898489 - RNA, 19 nt, Artificial Sequence
  Description of Artificial Sequence: Synthetic oligonucleotide
cgggcgcagucccgcgagg

SEQ ID NO: 898490 - RNA, 19 nt, Artificial Sequence
  Description of Artificial Sequence: Synthetic oligonucleotide
cccgccaaaaguggcuggu

SEQ ID NO: 898491 - RNA, 19 nt, Artificial Sequence
  Description of Artificial Sequence: Synthetic oligonucleotide
cggggacagcgccacaugu

SEQ ID NO: 898492 - RNA, 19 nt, Artificial Sequence
  Description of Artificial Sequence: Synthetic oligonucleotide
ccaagcacucgccgguguu

SEQ ID NO: 898493 - RNA, 19 nt, Artificial Sequence
  Description of Artificial Sequence: Synthetic oligonucleotide
gccgcccgucgcucaccac

SEQ ID NO: 898494 - RNA, 19 nt, Artificial Sequence
  Description of Artificial Sequence: Synthetic oligonucleotide
ggcggaggccagcucucuu

SEQ ID NO: 898495 - RNA, 19 nt, Artificial Sequence
  Description of Artificial Sequence: Synthetic oligonucleotide
gcggcgccucugcgcgcag

SEQ ID NO: 898496 - RNA, 19 nt, Artificial Sequence
  Description of Artificial Sequence: Synthetic oligonucleotide
cggaucccgaacugcgcgu

SEQ ID NO: 898497 - RNA, 19 nt, Artificial Sequence
  Description of Artificial Sequence: Synthetic oligonucleotide
ggcuggcgccaggggucgc

SEQ ID NO: 898498 - RNA, 19 nt, Artificial Sequence
  Description of Artificial Sequence: Synthetic oligonucleotide
cgucgcggcggaucccgaa

SEQ ID NO: 898499 - RNA, 19 nt, Artificial Sequence
  Description of Artificial Sequence: Synthetic oligonucleotide
gggacgcgugcgcgcgagu

SEQ ID NO: 898500 - RNA, 19 nt, Artificial Sequence
  Description of Artificial Sequence: Synthetic oligonucleotide
cgcccgucgcucaccacgu

SEQ ID NO: 898501 - RNA, 19 nt, Artificial Sequence
  Description of Artificial Sequence: Synthetic oligonucleotide
gcgcagccuccaggucccc

SEQ ID NO: 898502 - RNA, 19 nt, Artificial Sequence
  Description of Artificial Sequence: Synthetic oligonucleotide
ccgucgcggcggaucccga

SEQ ID NO: 898503 - RNA, 19 nt, Artificial Sequence
  Description of Artificial Sequence: Synthetic oligonucleotide
cgcggcgccucugcgcgca

SEQ ID NO: 898504 - RNA, 19 nt, Artificial Sequence
  Description of Artificial Sequence: Synthetic oligonucleotide
cggcgccucugcgcgcagc

SEQ ID NO: 898505 - RNA, 19 nt, Artificial Sequence
  Description of Artificial Sequence: Synthetic oligonucleotide
ccccaucgaggugucgguu

SEQ ID NO: 898506 - RNA, 19 nt, Artificial Sequence
  Description of Artificial Sequence: Synthetic oligonucleotide
cggugacuuggcucucguu

SEQ ID NO: 898507 - RNA, 19 nt, Artificial Sequence
  Description of Artificial Sequence: Synthetic oligonucleotide
gcccgucgcucaccacguu

SEQ ID NO: 898508 - RNA, 19 nt, Artificial Sequence
  Description of Artificial Sequence: Synthetic oligonucleotide
ccacgguggcgcggcgccu

SEQ ID NO: 898509 - RNA, 19 nt, Artificial Sequence
  Description of Artificial Sequence: Synthetic oligonucleotide
cggcggaggccagcucucu

SEQ ID NO: 898510 - RNA, 19 nt, Artificial Sequence
  Description of Artificial Sequence: Synthetic oligonucleotide
gcacggccgcgggguggcu

SEQ ID NO: 898511 - RNA, 19 nt, Artificial Sequence
  Description of Artificial Sequence: Synthetic oligonucleotide
auuucauacauuuaucagc

SEQ ID NO: 898512 - RNA, 19 nt, Artificial Sequence
  Description of Artificial Sequence: Synthetic oligonucleotide
aagacgauccuucacgagc

SEQ ID NO: 898513 - RNA, 19 nt, Artificial Sequence
  Description of Artificial Sequence: Synthetic oligonucleotide
aaauaucuugauuguaggg

SEQ ID NO: 898514 - RNA, 19 nt, Artificial Sequence
  Description of Artificial Sequence: Synthetic oligonucleotide
aaaggaaccaccucccacg

SEQ ID NO: 898515 - RNA, 19 nt, Artificial Sequence
  Description of Artificial Sequence: Synthetic oligonucleotide
acguccaaaagacaguucc

SEQ ID NO: 898516 - RNA, 19 nt, Artificial Sequence
  Description of Artificial Sequence: Synthetic oligonucleotide
aacgcaauccaauucacug

SEQ ID NO: 898517 - RNA, 19 nt, Artificial Sequence
  Description of Artificial Sequence: Synthetic oligonucleotide
acuaagacgauccuucacg

SEQ ID NO: 898518 - RNA, 19 nt, Artificial Sequence
  Description of Artificial Sequence: Synthetic oligonucleotide
aauguuucaacaacccacc

SEQ ID NO: 898519 - RNA, 19 nt, Artificial Sequence
  Description of Artificial Sequence: Synthetic oligonucleotide
aaagaacgcaauccaauuc

SEQ ID NO: 898520 - RNA, 19 nt, Artificial Sequence
  Description of Artificial Sequence: Synthetic oligonucleotide
acuaugucugaucuugucc

SEQ ID NO: 898521 - RNA, 19 nt, Artificial Sequence
  Description of Artificial Sequence: Synthetic oligonucleotide
aauccucuaaucccauacc

SEQ ID NO: 898522 - RNA, 19 nt, Artificial Sequence
  Description of Artificial Sequence: Synthetic oligonucleotide
uguccguccaccaucauag

SEQ ID NO: 898523 - RNA, 19 nt, Artificial Sequence
  Description of Artificial Sequence: Synthetic oligonucleotide
aauaucuugauuguaggga

SEQ ID NO: 898524 - RNA, 19 nt, Artificial Sequence
  Description of Artificial Sequence: Synthetic oligonucleotide
aaugacaucgucacuagag

SEQ ID NO: 898525 - RNA, 19 nt, Artificial Sequence
  Description of Artificial Sequence: Synthetic oligonucleotide
agaaaagacauuggaaggc

SEQ ID NO: 898526 - RNA, 19 nt, Artificial Sequence
  Description of Artificial Sequence: Synthetic oligonucleotide
auaccaaagaacgcaaucc

SEQ ID NO: 898527 - RNA, 19 nt, Artificial Sequence
  Description of Artificial Sequence: Synthetic oligonucleotide
aagaacgcaauccaauuca

SEQ ID NO: 898528 - RNA, 19 nt, Artificial Sequence
  Description of Artificial Sequence: Synthetic oligonucleotide
cauacauuuaucagcauug

SEQ ID NO: 898529 - RNA, 19 nt, Artificial Sequence
  Description of Artificial Sequence: Synthetic oligonucleotide
guuucaacaacccaccuug

SEQ ID NO: 898530 - RNA, 19 nt, Artificial Sequence
  Description of Artificial Sequence: Synthetic oligonucleotide
uccgauuuuaugaugugcc

SEQ ID NO: 898531 - RNA, 19 nt, Artificial Sequence
  Description of Artificial Sequence: Synthetic oligonucleotide
cuaugucugaucuuguccg

SEQ ID NO: 898532 - RNA, 19 nt, Artificial Sequence
  Description of Artificial Sequence: Synthetic oligonucleotide
ucacuagaggaauagagac

SEQ ID NO: 898533 - RNA, 19 nt, Artificial Sequence
  Description of Artificial Sequence: Synthetic oligonucleotide
auacugaccucccagggac

SEQ ID NO: 898534 - RNA, 19 nt, Artificial Sequence
  Description of Artificial Sequence: Synthetic oligonucleotide
auuuugcgagcguugaugg

SEQ ID NO: 898535 - RNA, 19 nt, Artificial Sequence
  Description of Artificial Sequence: Synthetic oligonucleotide
auaccgguuggccaggacc

SEQ ID NO: 898536 - RNA, 19 nt, Artificial Sequence
  Description of Artificial Sequence: Synthetic oligonucleotide
gcuccgaauaucuugaugg

SEQ ID NO: 898537 - RNA, 19 nt, Artificial Sequence
  Description of Artificial Sequence: Synthetic oligonucleotide
ucuaucacauccuucuuac

SEQ ID NO: 898538 - RNA, 19 nt, Artificial Sequence
  Description of Artificial Sequence: Synthetic oligonucleotide
uucguugauuaucucaagc

SEQ ID NO: 898539 - RNA, 19 nt, Artificial Sequence
  Description of Artificial Sequence: Synthetic oligonucleotide
uauaccaaagaacgcaauc

SEQ ID NO: 898540 - RNA, 19 nt, Artificial Sequence
  Description of Artificial Sequence: Synthetic oligonucleotide
uguuuuccagaacuguacc

SEQ ID NO: 898541 - RNA, 19 nt, Artificial Sequence
  Description of Artificial Sequence: Synthetic oligonucleotide
uguucuaacauaacuccaa

SEQ ID NO: 898542 - RNA, 19 nt, Artificial Sequence
  Description of Artificial Sequence: Synthetic oligonucleotide
uagggaauccucuaauccc

SEQ ID NO: 898543 - RNA, 19 nt, Artificial Sequence
  Description of Artificial Sequence: Synthetic oligonucleotide
acggccacgacacagagcu

SEQ ID NO: 898544 - RNA, 19 nt, Artificial Sequence
  Description of Artificial Sequence: Synthetic oligonucleotide
gacacuaugucugaucuug

SEQ ID NO: 898545 - RNA, 19 nt, Artificial Sequence
  Description of Artificial Sequence: Synthetic oligonucleotide
uccucuaaucccauaccgg

SEQ ID NO: 898546 - RNA, 19 nt, Artificial Sequence
  Description of Artificial Sequence: Synthetic oligonucleotide
acgcaauccaauucacugc

SEQ ID NO: 898547 - RNA, 19 nt, Artificial Sequence
  Description of Artificial Sequence: Synthetic oligonucleotide
auagagaccgcuggcagcc

SEQ ID NO: 898548 - RNA, 19 nt, Artificial Sequence
  Description of Artificial Sequence: Synthetic oligonucleotide
gaauccucuaaucccauac

SEQ ID NO: 898549 - RNA, 19 nt, Artificial Sequence
  Description of Artificial Sequence: Synthetic oligonucleotide
ucgccuuucugaaauaucu

SEQ ID NO: 898550 - RNA, 19 nt, Artificial Sequence
  Description of Artificial Sequence: Synthetic oligonucleotide
gauggcguuaauucaauga

SEQ ID NO: 898551 - RNA, 19 nt, Artificial Sequence
  Description of Artificial Sequence: Synthetic oligonucleotide
ucgucagucagcucuauca

SEQ ID NO: 898552 - RNA, 19 nt, Artificial Sequence
  Description of Artificial Sequence: Synthetic oligonucleotide
ugguguucuaacauaacuc

SEQ ID NO: 898553 - RNA, 19 nt, Artificial Sequence
  Description of Artificial Sequence: Synthetic oligonucleotide
ucgacacuaugucugaucu

SEQ ID NO: 898554 - RNA, 19 nt, Artificial Sequence
  Description of Artificial Sequence: Synthetic oligonucleotide
ugaaagacccuuugagaag

SEQ ID NO: 898555 - RNA, 19 nt, Artificial Sequence
  Description of Artificial Sequence: Synthetic oligonucleotide
uucaccguagcguccacgg

SEQ ID NO: 898556 - RNA, 19 nt, Artificial Sequence
  Description of Artificial Sequence: Synthetic oligonucleotide
gguguucuaacauaacucc

SEQ ID NO: 898557 - RNA, 19 nt, Artificial Sequence
  Description of Artificial Sequence: Synthetic oligonucleotide
uuaguggccgagcaagugc

SEQ ID NO: 898558 - RNA, 19 nt, Artificial Sequence
  Description of Artificial Sequence: Synthetic oligonucleotide
uguugaaauuugauggcgu

SEQ ID NO: 898559 - RNA, 19 nt, Artificial Sequence
  Description of Artificial Sequence: Synthetic oligonucleotide
gaauagagaccgcuggcag

SEQ ID NO: 898560 - RNA, 19 nt, Artificial Sequence
  Description of Artificial Sequence: Synthetic oligonucleotide
acccaaacccuccaauccc

SEQ ID NO: 898561 - RNA, 19 nt, Artificial Sequence
  Description of Artificial Sequence: Synthetic oligonucleotide
ugcuacaauucauagaauu

SEQ ID NO: 898562 - RNA, 19 nt, Artificial Sequence
  Description of Artificial Sequence: Synthetic oligonucleotide
gucucgguaguuuucaggc

SEQ ID NO: 898563 - RNA, 19 nt, Artificial Sequence
  Description of Artificial Sequence: Synthetic oligonucleotide
aagugcugcucggaaaggc

SEQ ID NO: 898564 - RNA, 19 nt, Artificial Sequence
  Description of Artificial Sequence: Synthetic oligonucleotide
accagaccgaacccaaggc

SEQ ID NO: 898565 - RNA, 19 nt, Artificial Sequence
  Description of Artificial Sequence: Synthetic oligonucleotide
ugauuguagggaauccucu

SEQ ID NO: 898566 - RNA, 19 nt, Artificial Sequence
  Description of Artificial Sequence: Synthetic oligonucleotide
uccaaguaagaguuccugc

SEQ ID NO: 898567 - RNA, 19 nt, Artificial Sequence
  Description of Artificial Sequence: Synthetic oligonucleotide
auaucuugauuguagggaa

SEQ ID NO: 898568 - RNA, 19 nt, Artificial Sequence
  Description of Artificial Sequence: Synthetic oligonucleotide
gauuaucucaagcagcucu

SEQ ID NO: 898569 - RNA, 19 nt, Artificial Sequence
  Description of Artificial Sequence: Synthetic oligonucleotide
uuuuguuagcuccgaauau

SEQ ID NO: 898570 - RNA, 19 nt, Artificial Sequence
  Description of Artificial Sequence: Synthetic oligonucleotide
uauccgagaacagauccag

SEQ ID NO: 898571 - RNA, 19 nt, Artificial Sequence
  Description of Artificial Sequence: Synthetic oligonucleotide
aaggaaccaccucccacgg

SEQ ID NO: 898572 - RNA, 19 nt, Artificial Sequence
  Description of Artificial Sequence: Synthetic oligonucleotide
uacuggaacuaucaccucu

SEQ ID NO: 898573 - RNA, 19 nt, Artificial Sequence
  Description of Artificial Sequence: Synthetic oligonucleotide
caggcuaaccaccagacuc

SEQ ID NO: 898574 - RNA, 19 nt, Artificial Sequence
  Description of Artificial Sequence: Synthetic oligonucleotide
uucacugcuacaauucaua

SEQ ID NO: 898575 - RNA, 19 nt, Artificial Sequence
  Description of Artificial Sequence: Synthetic oligonucleotide
ucacaacucguccuucucc

SEQ ID NO: 898576 - RNA, 19 nt, Artificial Sequence
  Description of Artificial Sequence: Synthetic oligonucleotide
augccuuguucacugaaag

SEQ ID NO: 898577 - RNA, 19 nt, Artificial Sequence
  Description of Artificial Sequence: Synthetic oligonucleotide
uucaggcuaaccaccagac

SEQ ID NO: 898578 - RNA, 19 nt, Artificial Sequence
  Description of Artificial Sequence: Synthetic oligonucleotide
uucuaacauaacuccaaac

SEQ ID NO: 898579 - RNA, 19 nt, Artificial Sequence
  Description of Artificial Sequence: Synthetic oligonucleotide
aaaacccuauauauaagaa

SEQ ID NO: 898580 - RNA, 19 nt, Artificial Sequence
  Description of Artificial Sequence: Synthetic oligonucleotide
aaagacauuggaaggcuga

SEQ ID NO: 898581 - RNA, 19 nt, Artificial Sequence
  Description of Artificial Sequence: Synthetic oligonucleotide
aauuucauuuugcgagcgu

SEQ ID NO: 898582 - RNA, 19 nt, Artificial Sequence
  Description of Artificial Sequence: Synthetic oligonucleotide
ucaacaacccaccuugcuu

SEQ ID NO: 898583 - RNA, 19 nt, Artificial Sequence
  Description of Artificial Sequence: Synthetic oligonucleotide
cuucguuugcuccuuuacc

SEQ ID NO: 898584 - RNA, 19 nt, Artificial Sequence
  Description of Artificial Sequence: Synthetic oligonucleotide
uggcguuaauucaaugaca

SEQ ID NO: 898585 - RNA, 19 nt, Artificial Sequence
  Description of Artificial Sequence: Synthetic oligonucleotide
cucggaaaggccaagggca

SEQ ID NO: 898586 - RNA, 19 nt, Artificial Sequence
  Description of Artificial Sequence: Synthetic oligonucleotide
cacgacacagagcuggugc

SEQ ID NO: 898587 - RNA, 19 nt, Artificial Sequence
  Description of Artificial Sequence: Synthetic oligonucleotide
ucuugagacgccgagguuc

SEQ ID NO: 898588 - RNA, 19 nt, Artificial Sequence
  Description of Artificial Sequence: Synthetic oligonucleotide
gacauuggaaggcugagcu

SEQ ID NO: 898589 - RNA, 19 nt, Artificial Sequence
  Description of Artificial Sequence: Synthetic oligonucleotide
uccaaaagacaguucccug

SEQ ID NO: 898590 - RNA, 19 nt, Artificial Sequence
  Description of Artificial Sequence: Synthetic oligonucleotide
agggaaaauguuucaacaa

SEQ ID NO: 898591 - RNA, 19 nt, Artificial Sequence
  Description of Artificial Sequence: Synthetic oligonucleotide
caacaacccaccuugcuuc

SEQ ID NO: 898592 - RNA, 19 nt, Artificial Sequence
  Description of Artificial Sequence: Synthetic oligonucleotide
gaaagacccuuugagaaga

SEQ ID NO: 898593 - RNA, 19 nt, Artificial Sequence
  Description of Artificial Sequence: Synthetic oligonucleotide
uucaacaacccaccuugcu

SEQ ID NO: 898594 - RNA, 19 nt, Artificial Sequence
  Description of Artificial Sequence: Synthetic oligonucleotide
uucuuaucaaaggugucgu

SEQ ID NO: 898595 - RNA, 19 nt, Artificial Sequence
  Description of Artificial Sequence: Synthetic oligonucleotide
ugccacuaauuucauacau

SEQ ID NO: 898596 - RNA, 19 nt, Artificial Sequence
  Description of Artificial Sequence: Synthetic oligonucleotide
uguuucaacaacccaccuu

SEQ ID NO: 898597 - RNA, 19 nt, Artificial Sequence
  Description of Artificial Sequence: Synthetic oligonucleotide
cagcucaccagaccgaacc

SEQ ID NO: 898598 - RNA, 19 nt, Artificial Sequence
  Description of Artificial Sequence: Synthetic oligonucleotide
aguguuuucuugagacgcc

SEQ ID NO: 898599 - RNA, 19 nt, Artificial Sequence
  Description of Artificial Sequence: Synthetic oligonucleotide
accgacuuugacaacaucu

SEQ ID NO: 898600 - RNA, 19 nt, Artificial Sequence
  Description of Artificial Sequence: Synthetic oligonucleotide
cauuuugcgagcguugaug

SEQ ID NO: 898601 - RNA, 19 nt, Artificial Sequence
  Description of Artificial Sequence: Synthetic oligonucleotide
agcucaccagaccgaaccc

SEQ ID NO: 898602 - RNA, 19 nt, Artificial Sequence
  Description of Artificial Sequence: Synthetic oligonucleotide
ccaaguaagaguuccugcc

SEQ ID NO: 898603 - RNA, 19 nt, Artificial Sequence
  Description of Artificial Sequence: Synthetic oligonucleotide
uaacuccaaacugucucgg

SEQ ID NO: 898604 - RNA, 19 nt, Artificial Sequence
  Description of Artificial Sequence: Synthetic oligonucleotide
aggcuaaccaccagacucc

SEQ ID NO: 898605 - RNA, 19 nt, Artificial Sequence
  Description of Artificial Sequence: Synthetic oligonucleotide
agacauuggaaggcugagc

SEQ ID NO: 898606 - RNA, 19 nt, Artificial Sequence
  Description of Artificial Sequence: Synthetic oligonucleotide
ugcaccgacuuugacaaca

SEQ ID NO: 898607 - RNA, 19 nt, Artificial Sequence
  Description of Artificial Sequence: Synthetic oligonucleotide
gagacgccgagguucacug

SEQ ID NO: 898608 - RNA, 19 nt, Artificial Sequence
  Description of Artificial Sequence: Synthetic oligonucleotide
aagacaguucccugagaaa

SEQ ID NO: 898609 - RNA, 19 nt, Artificial Sequence
  Description of Artificial Sequence: Synthetic oligonucleotide
uuucaacaacccaccuugc

SEQ ID NO: 898610 - RNA, 19 nt, Artificial Sequence
  Description of Artificial Sequence: Synthetic oligonucleotide
uaccgguuggccaggaccu

SEQ ID NO: 898611 - RNA, 19 nt, Artificial Sequence
  Description of Artificial Sequence: Synthetic oligonucleotide
uuguagggaauccucuaau

SEQ ID NO: 898612 - RNA, 19 nt, Artificial Sequence
  Description of Artificial Sequence: Synthetic oligonucleotide
guagggaaucccuggacac

SEQ ID NO: 898613 - RNA, 19 nt, Artificial Sequence
  Description of Artificial Sequence: Synthetic oligonucleotide
ugcaucaacugcaccgacu

SEQ ID NO: 898614 - RNA, 19 nt, Artificial Sequence
  Description of Artificial Sequence: Synthetic oligonucleotide
aucgucacuagaggaauag

SEQ ID NO: 898615 - RNA, 19 nt, Artificial Sequence
  Description of Artificial Sequence: Synthetic oligonucleotide
acggcugccagcuuuacuu

SEQ ID NO: 898616 - RNA, 19 nt, Artificial Sequence
  Description of Artificial Sequence: Synthetic oligonucleotide
agccacguccaaaagacag

SEQ ID NO: 898617 - RNA, 19 nt, Artificial Sequence
  Description of Artificial Sequence: Synthetic oligonucleotide
gacuauugcucugaauaac

SEQ ID NO: 898618 - RNA, 19 nt, Artificial Sequence
  Description of Artificial Sequence: Synthetic oligonucleotide
aaacugcccgcucccaaga

SEQ ID NO: 898619 - RNA, 19 nt, Artificial Sequence
  Description of Artificial Sequence: Synthetic oligonucleotide
accgaacccaaggcgagcc

SEQ ID NO: 898620 - RNA, 19 nt, Artificial Sequence
  Description of Artificial Sequence: Synthetic oligonucleotide
agaacgcaauccaauucac

SEQ ID NO: 898621 - RNA, 19 nt, Artificial Sequence
  Description of Artificial Sequence: Synthetic oligonucleotide
auuaucucaagcagcucug

SEQ ID NO: 898622 - RNA, 19 nt, Artificial Sequence
  Description of Artificial Sequence: Synthetic oligonucleotide
cauuauccgagaacagauc

SEQ ID NO: 898623 - RNA, 19 nt, Artificial Sequence
  Description of Artificial Sequence: Synthetic oligonucleotide
aacuccaaacugucucggu

SEQ ID NO: 898624 - RNA, 19 nt, Artificial Sequence
  Description of Artificial Sequence: Synthetic oligonucleotide
uacaagccacagacuauug

SEQ ID NO: 898625 - RNA, 19 nt, Artificial Sequence
  Description of Artificial Sequence: Synthetic oligonucleotide
gcuuccaagaacauucaag

SEQ ID NO: 898626 - RNA, 19 nt, Artificial Sequence
  Description of Artificial Sequence: Synthetic oligonucleotide
ugauggcguuaauucaaug

SEQ ID NO: 898627 - RNA, 19 nt, Artificial Sequence
  Description of Artificial Sequence: Synthetic oligonucleotide
caccauacugaccucccag

SEQ ID NO: 898628 - RNA, 19 nt, Artificial Sequence
  Description of Artificial Sequence: Synthetic oligonucleotide
aacaacccaccuugcuuca

SEQ ID NO: 898629 - RNA, 19 nt, Artificial Sequence
  Description of Artificial Sequence: Synthetic oligonucleotide
gaccugguucaccguagcg

SEQ ID NO: 898630 - RNA, 19 nt, Artificial Sequence
  Description of Artificial Sequence: Synthetic oligonucleotide
agcuccgaauaucuugaug

SEQ ID NO: 898631 - RNA, 19 nt, Artificial Sequence
  Description of Artificial Sequence: Synthetic oligonucleotide
cuaagacgauccuucacga

SEQ ID NO: 898632 - RNA, 19 nt, Artificial Sequence
  Description of Artificial Sequence: Synthetic oligonucleotide
caaacaucgucacuaucca

SEQ ID NO: 898633 - RNA, 19 nt, Artificial Sequence
  Description of Artificial Sequence: Synthetic oligonucleotide
cuccgauuuuaugaugugc

SEQ ID NO: 898634 - RNA, 19 nt, Artificial Sequence
  Description of Artificial Sequence: Synthetic oligonucleotide
uuuugcgagcguugauggc

SEQ ID NO: 898635 - RNA, 19 nt, Artificial Sequence
  Description of Artificial Sequence: Synthetic oligonucleotide
ugccuuguucacugaaaga

SEQ ID NO: 898636 - RNA, 19 nt, Artificial Sequence
  Description of Artificial Sequence: Synthetic oligonucleotide
gucacuagaggaauagaga

SEQ ID NO: 898637 - RNA, 19 nt, Artificial Sequence
  Description of Artificial Sequence: Synthetic oligonucleotide
guaagaguuccugccugcg

SEQ ID NO: 898638 - RNA, 19 nt, Artificial Sequence
  Description of Artificial Sequence: Synthetic oligonucleotide
guuaaccucuggcaaugac

SEQ ID NO: 898639 - RNA, 19 nt, Artificial Sequence
  Description of Artificial Sequence: Synthetic oligonucleotide
acauuggaaggcugagcug

SEQ ID NO: 898640 - RNA, 19 nt, Artificial Sequence
  Description of Artificial Sequence: Synthetic oligonucleotide
uugaaauuugauggcguua

SEQ ID NO: 898641 - RNA, 19 nt, Artificial Sequence
  Description of Artificial Sequence: Synthetic oligonucleotide
ucugaucuuguccguccac

SEQ ID NO: 898642 - RNA, 19 nt, Artificial Sequence
  Description of Artificial Sequence: Synthetic oligonucleotide
acuccaaacugucucggua

SEQ ID NO: 898643 - RNA, 19 nt, Artificial Sequence
  Description of Artificial Sequence: Synthetic oligonucleotide
cucgacacuaugucugauc

SEQ ID NO: 898644 - RNA, 19 nt, Artificial Sequence
  Description of Artificial Sequence: Synthetic oligonucleotide
guacccaccacuccgccca

SEQ ID NO: 898645 - RNA, 19 nt, Artificial Sequence
  Description of Artificial Sequence: Synthetic oligonucleotide
agacuccgauuuuaugaug

SEQ ID NO: 898646 - RNA, 19 nt, Artificial Sequence
  Description of Artificial Sequence: Synthetic oligonucleotide
acuccgauuuuaugaugug

SEQ ID NO: 898647 - RNA, 19 nt, Artificial Sequence
  Description of Artificial Sequence: Synthetic oligonucleotide
aucccauaccgguuggcca

SEQ ID NO: 898648 - RNA, 19 nt, Artificial Sequence
  Description of Artificial Sequence: Synthetic oligonucleotide
uguucacugaaagacccuu

SEQ ID NO: 898649 - RNA, 19 nt, Artificial Sequence
  Description of Artificial Sequence: Synthetic oligonucleotide
ucaccagaccgaacccaag

SEQ ID NO: 898650 - RNA, 19 nt, Artificial Sequence
  Description of Artificial Sequence: Synthetic oligonucleotide
caccacuccgcccacuaag

SEQ ID NO: 898651 - RNA, 19 nt, Artificial Sequence
  Description of Artificial Sequence: Synthetic oligonucleotide
ucgucacuauccaggacau

SEQ ID NO: 898652 - RNA, 19 nt, Artificial Sequence
  Description of Artificial Sequence: Synthetic oligonucleotide
guucuaacauaacuccaaa

SEQ ID NO: 898653 - RNA, 19 nt, Artificial Sequence
  Description of Artificial Sequence: Synthetic oligonucleotide
ggugucgucagucagcucu

SEQ ID NO: 898654 - RNA, 19 nt, Artificial Sequence
  Description of Artificial Sequence: Synthetic oligonucleotide
ucgguaguuuucaggcuaa

SEQ ID NO: 898655 - RNA, 19 nt, Artificial Sequence
  Description of Artificial Sequence: Synthetic oligonucleotide
ucucgguaguuuucaggcu

SEQ ID NO: 898656 - RNA, 19 nt, Artificial Sequence
  Description of Artificial Sequence: Synthetic oligonucleotide
gaagccgcauucuguccgc

SEQ ID NO: 898657 - RNA, 19 nt, Artificial Sequence
  Description of Artificial Sequence: Synthetic oligonucleotide
acgucuucguugauuaucu

SEQ ID NO: 898658 - RNA, 19 nt, Artificial Sequence
  Description of Artificial Sequence: Synthetic oligonucleotide
gacaucgucacuagaggaa

SEQ ID NO: 898659 - RNA, 19 nt, Artificial Sequence
  Description of Artificial Sequence: Synthetic oligonucleotide
gacaccauacugaccuccc

SEQ ID NO: 898660 - RNA, 19 nt, Artificial Sequence
  Description of Artificial Sequence: Synthetic oligonucleotide
cacuaugucugaucuuguc

SEQ ID NO: 898661 - RNA, 19 nt, Artificial Sequence
  Description of Artificial Sequence: Synthetic oligonucleotide
cccacuaagacgauccuuc

SEQ ID NO: 898662 - RNA, 19 nt, Artificial Sequence
  Description of Artificial Sequence: Synthetic oligonucleotide
cagaccgaacccaaggcga

SEQ ID NO: 898663 - RNA, 19 nt, Artificial Sequence
  Description of Artificial Sequence: Synthetic oligonucleotide
guguuaaccucuggcaaug

SEQ ID NO: 898664 - RNA, 19 nt, Artificial Sequence
  Description of Artificial Sequence: Synthetic oligonucleotide
cacuaagacgauccuucac

SEQ ID NO: 898665 - RNA, 19 nt, Artificial Sequence
  Description of Artificial Sequence: Synthetic oligonucleotide
agccucgccuuucugaaau

SEQ ID NO: 898666 - RNA, 19 nt, Artificial Sequence
  Description of Artificial Sequence: Synthetic oligonucleotide
acgacacagagcuggugcu

SEQ ID NO: 898667 - RNA, 19 nt, Artificial Sequence
  Description of Artificial Sequence: Synthetic oligonucleotide
uagggaaucccuggacacc

SEQ ID NO: 898668 - RNA, 19 nt, Artificial Sequence
  Description of Artificial Sequence: Synthetic oligonucleotide
augucugaucuuguccguc

SEQ ID NO: 898669 - RNA, 19 nt, Artificial Sequence
  Description of Artificial Sequence: Synthetic oligonucleotide
accugguucaccguagcgu

SEQ ID NO: 898670 - RNA, 19 nt, Artificial Sequence
  Description of Artificial Sequence: Synthetic oligonucleotide
agacgccgagguucacugc

SEQ ID NO: 898671 - RNA, 19 nt, Artificial Sequence
  Description of Artificial Sequence: Synthetic oligonucleotide
cacgucuucguugauuauc

SEQ ID NO: 898672 - RNA, 19 nt, Artificial Sequence
  Description of Artificial Sequence: Synthetic oligonucleotide
agacgauccuucacgagcu

SEQ ID NO: 898673 - RNA, 19 nt, Artificial Sequence
  Description of Artificial Sequence: Synthetic oligonucleotide
cccaaggcgagccaugccg

SEQ ID NO: 898674 - RNA, 19 nt, Artificial Sequence
  Description of Artificial Sequence: Synthetic oligonucleotide
uguuagcuccgaauaucuu

SEQ ID NO: 898675 - RNA, 19 nt, Artificial Sequence
  Description of Artificial Sequence: Synthetic oligonucleotide
gacuccgauuuuaugaugu

SEQ ID NO: 898676 - RNA, 19 nt, Artificial Sequence
  Description of Artificial Sequence: Synthetic oligonucleotide
uccgaauaucuugauggua

SEQ ID NO: 898677 - RNA, 19 nt, Artificial Sequence
  Description of Artificial Sequence: Synthetic oligonucleotide
gguaguuuucaggcuaacc

SEQ ID NO: 898678 - RNA, 19 nt, Artificial Sequence
  Description of Artificial Sequence: Synthetic oligonucleotide
uacgauggccuccccaguu

SEQ ID NO: 898679 - RNA, 19 nt, Artificial Sequence
  Description of Artificial Sequence: Synthetic oligonucleotide
cuugagacgccgagguuca

SEQ ID NO: 898680 - RNA, 19 nt, Artificial Sequence
  Description of Artificial Sequence: Synthetic oligonucleotide
cucgccuuucugaaauauc

SEQ ID NO: 898681 - RNA, 19 nt, Artificial Sequence
  Description of Artificial Sequence: Synthetic oligonucleotide
cugguguucuaacauaacu

SEQ ID NO: 898682 - RNA, 19 nt, Artificial Sequence
  Description of Artificial Sequence: Synthetic oligonucleotide
cuggaacuaucaccucugc

SEQ ID NO: 898683 - RNA, 19 nt, Artificial Sequence
  Description of Artificial Sequence: Synthetic oligonucleotide
acccuauauauaagaaaca

SEQ ID NO: 898684 - RNA, 19 nt, Artificial Sequence
  Description of Artificial Sequence: Synthetic oligonucleotide
cauacugaccucccaggga

SEQ ID NO: 898685 - RNA, 19 nt, Artificial Sequence
  Description of Artificial Sequence: Synthetic oligonucleotide
ugguucaccguagcgucca

SEQ ID NO: 898686 - RNA, 19 nt, Artificial Sequence
  Description of Artificial Sequence: Synthetic oligonucleotide
ccagaccgaacccaaggcg

SEQ ID NO: 898687 - RNA, 19 nt, Artificial Sequence
  Description of Artificial Sequence: Synthetic oligonucleotide
agcguugauggcugccaug

SEQ ID NO: 898688 - RNA, 19 nt, Artificial Sequence
  Description of Artificial Sequence: Synthetic oligonucleotide
ugcccgcucccaagaaaag

SEQ ID NO: 898689 - RNA, 19 nt, Artificial Sequence
  Description of Artificial Sequence: Synthetic oligonucleotide
cugguucaccguagcgucc

SEQ ID NO: 898690 - RNA, 19 nt, Artificial Sequence
  Description of Artificial Sequence: Synthetic oligonucleotide
cuaaccaccagacuccgau

SEQ ID NO: 898691 - RNA, 19 nt, Artificial Sequence
  Description of Artificial Sequence: Synthetic oligonucleotide
ugagacgccgagguucacu

SEQ ID NO: 898692 - RNA, 19 nt, Artificial Sequence
  Description of Artificial Sequence: Synthetic oligonucleotide
guguucuaacauaacucca

SEQ ID NO: 898693 - RNA, 19 nt, Artificial Sequence
  Description of Artificial Sequence: Synthetic oligonucleotide
cauuggaaggcugagcugu

SEQ ID NO: 898694 - RNA, 19 nt, Artificial Sequence
  Description of Artificial Sequence: Synthetic oligonucleotide
uguuaaccucuggcaauga

SEQ ID NO: 898695 - RNA, 19 nt, Artificial Sequence
  Description of Artificial Sequence: Synthetic oligonucleotide
aggaaccaccucccacggg

SEQ ID NO: 898696 - RNA, 19 nt, Artificial Sequence
  Description of Artificial Sequence: Synthetic oligonucleotide
ccauacugaccucccaggg

SEQ ID NO: 898697 - RNA, 19 nt, Artificial Sequence
  Description of Artificial Sequence: Synthetic oligonucleotide
cccaagaaaagacauugga

SEQ ID NO: 898698 - RNA, 19 nt, Artificial Sequence
  Description of Artificial Sequence: Synthetic oligonucleotide
ucgucacuagaggaauaga

SEQ ID NO: 898699 - RNA, 19 nt, Artificial Sequence
  Description of Artificial Sequence: Synthetic oligonucleotide
cucgguaguuuucaggcua

SEQ ID NO: 898700 - RNA, 19 nt, Artificial Sequence
  Description of Artificial Sequence: Synthetic oligonucleotide
caagugcugcucggaaagg

SEQ ID NO: 898701 - RNA, 19 nt, Artificial Sequence
  Description of Artificial Sequence: Synthetic oligonucleotide
ugauuaucucaagcagcuc

SEQ ID NO: 898702 - RNA, 19 nt, Artificial Sequence
  Description of Artificial Sequence: Synthetic oligonucleotide
caaguuccacaucgcugag

SEQ ID NO: 898703 - RNA, 19 nt, Artificial Sequence
  Description of Artificial Sequence: Synthetic oligonucleotide
gugccacuaauuucauaca

SEQ ID NO: 898704 - RNA, 19 nt, Artificial Sequence
  Description of Artificial Sequence: Synthetic oligonucleotide
acugaccucccagggacug

SEQ ID NO: 898705 - RNA, 19 nt, Artificial Sequence
  Description of Artificial Sequence: Synthetic oligonucleotide
cccgcucccaagaaaagac

SEQ ID NO: 898706 - RNA, 19 nt, Artificial Sequence
  Description of Artificial Sequence: Synthetic oligonucleotide
guucaccguagcguccacg

SEQ ID NO: 898707 - RNA, 19 nt, Artificial Sequence
  Description of Artificial Sequence: Synthetic oligonucleotide
guugaaauuugauggcguu

SEQ ID NO: 898708 - RNA, 19 nt, Artificial Sequence
  Description of Artificial Sequence: Synthetic oligonucleotide
aagccgcauucuguccgcg

SEQ ID NO: 898709 - RNA, 19 nt, Artificial Sequence
  Description of Artificial Sequence: Synthetic oligonucleotide
agaccgaacccaaggcgag

SEQ ID NO: 898710 - RNA, 19 nt, Artificial Sequence
  Description of Artificial Sequence: Synthetic oligonucleotide
aacugcccgcucccaagaa

SEQ ID NO: 898711 - RNA, 19 nt, Artificial Sequence
  Description of Artificial Sequence: Synthetic oligonucleotide
gacgccgagguucacugcu

SEQ ID NO: 898712 - RNA, 19 nt, Artificial Sequence
  Description of Artificial Sequence: Synthetic oligonucleotide
caaggcgagccaugccgag

SEQ ID NO: 898713 - RNA, 19 nt, Artificial Sequence
  Description of Artificial Sequence: Synthetic oligonucleotide
gaacccaaggcgagccaug

SEQ ID NO: 898714 - RNA, 19 nt, Artificial Sequence
  Description of Artificial Sequence: Synthetic oligonucleotide
caaacaaaggaaucacauu

SEQ ID NO: 898715 - RNA, 19 nt, Artificial Sequence
  Description of Artificial Sequence: Synthetic oligonucleotide
aaggcgagccaugccgaga

SEQ ID NO: 898716 - RNA, 19 nt, Artificial Sequence
  Description of Artificial Sequence: Synthetic oligonucleotide
caaguaagaguuccugccu

SEQ ID NO: 898717 - RNA, 19 nt, Artificial Sequence
  Description of Artificial Sequence: Synthetic oligonucleotide
gcgcaaagcacugagggca

SEQ ID NO: 898718 - RNA, 19 nt, Artificial Sequence
  Description of Artificial Sequence: Synthetic oligonucleotide
gacgauccuucacgagcug

SEQ ID NO: 898719 - RNA, 19 nt, Artificial Sequence
  Description of Artificial Sequence: Synthetic oligonucleotide
uaucaccucugcccuguuu

SEQ ID NO: 898720 - RNA, 19 nt, Artificial Sequence
  Description of Artificial Sequence: Synthetic oligonucleotide
cacguccaaaagacaguuc

SEQ ID NO: 898721 - RNA, 19 nt, Artificial Sequence
  Description of Artificial Sequence: Synthetic oligonucleotide
agguucacugcugcagugu

SEQ ID NO: 898722 - RNA, 19 nt, Artificial Sequence
  Description of Artificial Sequence: Synthetic oligonucleotide
ggaaccaccucccacgggu

SEQ ID NO: 898723 - RNA, 19 nt, Artificial Sequence
  Description of Artificial Sequence: Synthetic oligonucleotide
acagcugaccagagccuuc

SEQ ID NO: 898724 - RNA, 19 nt, Artificial Sequence
  Description of Artificial Sequence: Synthetic oligonucleotide
acugcccgcucccaagaaa

SEQ ID NO: 898725 - RNA, 19 nt, Artificial Sequence
  Description of Artificial Sequence: Synthetic oligonucleotide
uucuugagacgccgagguu

SEQ ID NO: 898726 - RNA, 19 nt, Artificial Sequence
  Description of Artificial Sequence: Synthetic oligonucleotide
cugcccgcucccaagaaaa

SEQ ID NO: 898727 - RNA, 19 nt, Artificial Sequence
  Description of Artificial Sequence: Synthetic oligonucleotide
ccggaaaacugcccgcucc

SEQ ID NO: 898728 - RNA, 19 nt, Artificial Sequence
  Description of Artificial Sequence: Synthetic oligonucleotide
ccuucguuugcuccuuuac

SEQ ID NO: 898729 - RNA, 19 nt, Artificial Sequence
  Description of Artificial Sequence: Synthetic oligonucleotide
gcaucuacgauggccuccc

SEQ ID NO: 898730 - RNA, 19 nt, Artificial Sequence
  Description of Artificial Sequence: Synthetic oligonucleotide
auuggaaggcugagcugug

SEQ ID NO: 898731 - RNA, 19 nt, Artificial Sequence
  Description of Artificial Sequence: Synthetic oligonucleotide
cacggccacgacacagagc

SEQ ID NO: 898732 - RNA, 19 nt, Artificial Sequence
  Description of Artificial Sequence: Synthetic oligonucleotide
gaaccaccucccacgggug

SEQ ID NO: 898733 - RNA, 19 nt, Artificial Sequence
  Description of Artificial Sequence: Synthetic oligonucleotide
gaaauuugauggcguuaau

SEQ ID NO: 898734 - RNA, 19 nt, Artificial Sequence
  Description of Artificial Sequence: Synthetic oligonucleotide
gaacgcaauccaauucacu

SEQ ID NO: 898735 - RNA, 19 nt, Artificial Sequence
  Description of Artificial Sequence: Synthetic oligonucleotide
gaccgaacccaaggcgagc

SEQ ID NO: 898736 - RNA, 19 nt, Artificial Sequence
  Description of Artificial Sequence: Synthetic oligonucleotide
gcccucgacacuaugucug

SEQ ID NO: 898737 - RNA, 19 nt, Artificial Sequence
  Description of Artificial Sequence: Synthetic oligonucleotide
ugcgagcguugauggcugc

SEQ ID NO: 898738 - RNA, 19 nt, Artificial Sequence
  Description of Artificial Sequence: Synthetic oligonucleotide
cauaccgguuggccaggac

SEQ ID NO: 898739 - RNA, 19 nt, Artificial Sequence
  Description of Artificial Sequence: Synthetic oligonucleotide
ccucuggcaaugaccacac

SEQ ID NO: 898740 - RNA, 19 nt, Artificial Sequence
  Description of Artificial Sequence: Synthetic oligonucleotide
augcucaguucugaggcuu

SEQ ID NO: 898741 - RNA, 19 nt, Artificial Sequence
  Description of Artificial Sequence: Synthetic oligonucleotide
gccacgucuucguugauua

SEQ ID NO: 898742 - RNA, 19 nt, Artificial Sequence
  Description of Artificial Sequence: Synthetic oligonucleotide
ggcuaaccaccagacuccg

SEQ ID NO: 898743 - RNA, 19 nt, Artificial Sequence
  Description of Artificial Sequence: Synthetic oligonucleotide
ugccgagaagccgcauucu

SEQ ID NO: 898744 - RNA, 19 nt, Artificial Sequence
  Description of Artificial Sequence: Synthetic oligonucleotide
cuauugcucugaauaacuu

SEQ ID NO: 898745 - RNA, 19 nt, Artificial Sequence
  Description of Artificial Sequence: Synthetic oligonucleotide
gagcuggcgcaaagcacug

SEQ ID NO: 898746 - RNA, 19 nt, Artificial Sequence
  Description of Artificial Sequence: Synthetic oligonucleotide
ggugcuguggagccacguc

SEQ ID NO: 898747 - RNA, 19 nt, Artificial Sequence
  Description of Artificial Sequence: Synthetic oligonucleotide
aggugucgucagucagcuc

SEQ ID NO: 898748 - RNA, 19 nt, Artificial Sequence
  Description of Artificial Sequence: Synthetic oligonucleotide
caccguagcguccacggcu

SEQ ID NO: 898749 - RNA, 19 nt, Artificial Sequence
  Description of Artificial Sequence: Synthetic oligonucleotide
gcguuaauucaaugacauc

SEQ ID NO: 898750 - RNA, 19 nt, Artificial Sequence
  Description of Artificial Sequence: Synthetic oligonucleotide
cuccgaauaucuugauggu

SEQ ID NO: 898751 - RNA, 19 nt, Artificial Sequence
  Description of Artificial Sequence: Synthetic oligonucleotide
ccgagguucacugcugcag

SEQ ID NO: 898752 - RNA, 19 nt, Artificial Sequence
  Description of Artificial Sequence: Synthetic oligonucleotide
ccgauuuuaugaugugcca

SEQ ID NO: 898753 - RNA, 19 nt, Artificial Sequence
  Description of Artificial Sequence: Synthetic oligonucleotide
cagauccagggcccucgac

SEQ ID NO: 898754 - RNA, 19 nt, Artificial Sequence
  Description of Artificial Sequence: Synthetic oligonucleotide
gcacggccacgacacagag

SEQ ID NO: 898755 - RNA, 19 nt, Artificial Sequence
  Description of Artificial Sequence: Synthetic oligonucleotide
ccucuaaucccauaccggu

SEQ ID NO: 898756 - RNA, 19 nt, Artificial Sequence
  Description of Artificial Sequence: Synthetic oligonucleotide
ccaaagaacgcaauccaau

SEQ ID NO: 898757 - RNA, 19 nt, Artificial Sequence
  Description of Artificial Sequence: Synthetic oligonucleotide
caucgucacuagaggaaua

SEQ ID NO: 898758 - RNA, 19 nt, Artificial Sequence
  Description of Artificial Sequence: Synthetic oligonucleotide
caucuacgauggccucccc

SEQ ID NO: 898759 - RNA, 19 nt, Artificial Sequence
  Description of Artificial Sequence: Synthetic oligonucleotide
cacagacuauugcucugaa

SEQ ID NO: 898760 - RNA, 19 nt, Artificial Sequence
  Description of Artificial Sequence: Synthetic oligonucleotide
cugccauggcaggguaccc

SEQ ID NO: 898761 - RNA, 19 nt, Artificial Sequence
  Description of Artificial Sequence: Synthetic oligonucleotide
cggaaaacugcccgcuccc

SEQ ID NO: 898762 - RNA, 19 nt, Artificial Sequence
  Description of Artificial Sequence: Synthetic oligonucleotide
cuaucacauccuucuuacu

SEQ ID NO: 898763 - RNA, 19 nt, Artificial Sequence
  Description of Artificial Sequence: Synthetic oligonucleotide
ggaggggcauuauccgaga

SEQ ID NO: 898764 - RNA, 19 nt, Artificial Sequence
  Description of Artificial Sequence: Synthetic oligonucleotide
agaccgcuggcagccagaa

SEQ ID NO: 898765 - RNA, 19 nt, Artificial Sequence
  Description of Artificial Sequence: Synthetic oligonucleotide
cucuaaucccauaccgguu

SEQ ID NO: 898766 - RNA, 19 nt, Artificial Sequence
  Description of Artificial Sequence: Synthetic oligonucleotide
gagccucgccuuucugaaa

SEQ ID NO: 898767 - RNA, 19 nt, Artificial Sequence
  Description of Artificial Sequence: Synthetic oligonucleotide
ccgcauucuguccgcgccg

SEQ ID NO: 898768 - RNA, 19 nt, Artificial Sequence
  Description of Artificial Sequence: Synthetic oligonucleotide
cugcaccgacuuugacaac

SEQ ID NO: 898769 - RNA, 19 nt, Artificial Sequence
  Description of Artificial Sequence: Synthetic oligonucleotide
gagcguugauggcugccau

SEQ ID NO: 898770 - RNA, 19 nt, Artificial Sequence
  Description of Artificial Sequence: Synthetic oligonucleotide
ccacuaagacgauccuuca

SEQ ID NO: 898771 - RNA, 19 nt, Artificial Sequence
  Description of Artificial Sequence: Synthetic oligonucleotide
agcuggcgcaaagcacuga

SEQ ID NO: 898772 - RNA, 19 nt, Artificial Sequence
  Description of Artificial Sequence: Synthetic oligonucleotide
uccccuucguuugcuccuu

SEQ ID NO: 898773 - RNA, 19 nt, Artificial Sequence
  Description of Artificial Sequence: Synthetic oligonucleotide
uugagacgccgagguucac

SEQ ID NO: 898774 - RNA, 19 nt, Artificial Sequence
  Description of Artificial Sequence: Synthetic oligonucleotide
cucccacgggugcugugga

SEQ ID NO: 898775 - RNA, 19 nt, Artificial Sequence
  Description of Artificial Sequence: Synthetic oligonucleotide
cacuauccaggacauucuu

SEQ ID NO: 898776 - RNA, 19 nt, Artificial Sequence
  Description of Artificial Sequence: Synthetic oligonucleotide
caugccgagaagccgcauu

SEQ ID NO: 898777 - RNA, 19 nt, Artificial Sequence
  Description of Artificial Sequence: Synthetic oligonucleotide
caccagacuccgauuuuau

SEQ ID NO: 898778 - RNA, 19 nt, Artificial Sequence
  Description of Artificial Sequence: Synthetic oligonucleotide
gcauucuguccgcgccgcc

SEQ ID NO: 898779 - RNA, 19 nt, Artificial Sequence
  Description of Artificial Sequence: Synthetic oligonucleotide
caguucugccacccugaua

SEQ ID NO: 898780 - RNA, 19 nt, Artificial Sequence
  Description of Artificial Sequence: Synthetic oligonucleotide
ccgcucccaagaaaagaca

SEQ ID NO: 898781 - RNA, 19 nt, Artificial Sequence
  Description of Artificial Sequence: Synthetic oligonucleotide
ccgacuuugacaacaucuu

SEQ ID NO: 898782 - RNA, 19 nt, Artificial Sequence
  Description of Artificial Sequence: Synthetic oligonucleotide
gcgagcguugauggcugcc

SEQ ID NO: 898783 - RNA, 19 nt, Artificial Sequence
  Description of Artificial Sequence: Synthetic oligonucleotide
gccggaaaacugcccgcuc

SEQ ID NO: 898784 - RNA, 19 nt, Artificial Sequence
  Description of Artificial Sequence: Synthetic oligonucleotide
ggcccucgacacuaugucu

SEQ ID NO: 898785 - RNA, 19 nt, Artificial Sequence
  Description of Artificial Sequence: Synthetic oligonucleotide
gcccgcucccaagaaaaga

SEQ ID NO: 898786 - RNA, 19 nt, Artificial Sequence
  Description of Artificial Sequence: Synthetic oligonucleotide
gccgagguucacugcugca

SEQ ID NO: 898787 - RNA, 19 nt, Artificial Sequence
  Description of Artificial Sequence: Synthetic oligonucleotide
cuacgauggccuccccagu

SEQ ID NO: 898788 - RNA, 19 nt, Artificial Sequence
  Description of Artificial Sequence: Synthetic oligonucleotide
gccacuaauuucauacauu

SEQ ID NO: 898789 - RNA, 19 nt, Artificial Sequence
  Description of Artificial Sequence: Synthetic oligonucleotide
cccucgacacuaugucuga

SEQ ID NO: 898790 - RNA, 19 nt, Artificial Sequence
  Description of Artificial Sequence: Synthetic oligonucleotide
ccgagaagccgcauucugu

SEQ ID NO: 898791 - RNA, 19 nt, Artificial Sequence
  Description of Artificial Sequence: Synthetic oligonucleotide
cgccgagguucacugcugc

SEQ ID NO: 898792 - RNA, 19 nt, Artificial Sequence
  Description of Artificial Sequence: Synthetic oligonucleotide
cccauaccgguuggccagg

SEQ ID NO: 898793 - RNA, 19 nt, Artificial Sequence
  Description of Artificial Sequence: Synthetic oligonucleotide
cguagcguccacggcugcc

SEQ ID NO: 898794 - RNA, 19 nt, Artificial Sequence
  Description of Artificial Sequence: Synthetic oligonucleotide
cacggcugccagcuuuacu

SEQ ID NO: 898795 - RNA, 19 nt, Artificial Sequence
  Description of Artificial Sequence: Synthetic oligonucleotide
cgcauucuguccgcgccgc

SEQ ID NO: 898796 - RNA, 19 nt, Artificial Sequence
  Description of Artificial Sequence: Synthetic oligonucleotide
gccacguccaaaagacagu

SEQ ID NO: 898797 - RNA, 19 nt, Artificial Sequence
  Description of Artificial Sequence: Synthetic oligonucleotide
guccguccaccaucauagu

SEQ ID NO: 898798 - RNA, 19 nt, Artificial Sequence
  Description of Artificial Sequence: Synthetic oligonucleotide
cgucuucguugauuaucuc

SEQ ID NO: 898799 - RNA, 19 nt, Artificial Sequence
  Description of Artificial Sequence: Synthetic oligonucleotide
ccucacaacucguccuucu

SEQ ID NO: 898800 - RNA, 19 nt, Artificial Sequence
  Description of Artificial Sequence: Synthetic oligonucleotide
ccacgacacagagcuggug

SEQ ID NO: 898801 - RNA, 19 nt, Artificial Sequence
  Description of Artificial Sequence: Synthetic oligonucleotide
gccucacaacucguccuuc

SEQ ID NO: 898802 - RNA, 19 nt, Artificial Sequence
  Description of Artificial Sequence: Synthetic oligonucleotide
gcuaaccaccagacuccga

SEQ ID NO: 898803 - RNA, 19 nt, Artificial Sequence
  Description of Artificial Sequence: Synthetic oligonucleotide
cgcucccaagaaaagacau

SEQ ID NO: 898804 - RNA, 19 nt, Artificial Sequence
  Description of Artificial Sequence: Synthetic oligonucleotide
cgagcguugauggcugcca

SEQ ID NO: 898805 - RNA, 19 nt, Artificial Sequence
  Description of Artificial Sequence: Synthetic oligonucleotide
ccacguccaaaagacaguu

SEQ ID NO: 898806 - RNA, 19 nt, Artificial Sequence
  Description of Artificial Sequence: Synthetic oligonucleotide
cccuucguuugcuccuuua

SEQ ID NO: 898807 - RNA, 19 nt, Artificial Sequence
  Description of Artificial Sequence: Synthetic oligonucleotide
gccucgccuuucugaaaua

SEQ ID NO: 898808 - RNA, 19 nt, Artificial Sequence
  Description of Artificial Sequence: Synthetic oligonucleotide
cccugauaaucuucugguu

SEQ ID NO: 898809 - RNA, 19 nt, Artificial Sequence
  Description of Artificial Sequence: Synthetic oligonucleotide
cgguaguuuucaggcuaac

SEQ ID NO: 898810 - RNA, 19 nt, Artificial Sequence
  Description of Artificial Sequence: Synthetic oligonucleotide
ccgaacccaaggcgagcca

SEQ ID NO: 898811 - RNA, 19 nt, Artificial Sequence
  Description of Artificial Sequence: Synthetic oligonucleotide
cuuguccguccaccaucau

SEQ ID NO: 898812 - RNA, 19 nt, Artificial Sequence
  Description of Artificial Sequence: Synthetic oligonucleotide
ccucgccuuucugaaauau

SEQ ID NO: 898813 - RNA, 19 nt, Artificial Sequence
  Description of Artificial Sequence: Synthetic oligonucleotide
cuaucaccucugcccuguu

SEQ ID NO: 898814 - RNA, 19 nt, Artificial Sequence
  Description of Artificial Sequence: Synthetic oligonucleotide
ccuucacgagcuggcgcaa

SEQ ID NO: 898815 - RNA, 19 nt, Artificial Sequence
  Description of Artificial Sequence: Synthetic oligonucleotide
cgaacccaaggcgagccau

SEQ ID NO: 898816 - RNA, 19 nt, Artificial Sequence
  Description of Artificial Sequence: Synthetic oligonucleotide
ccacgucuucguugauuau

SEQ ID NO: 898817 - RNA, 19 nt, Artificial Sequence
  Description of Artificial Sequence: Synthetic oligonucleotide
cgacacuaugucugaucuu

SEQ ID NO: 898818 - RNA, 19 nt, Artificial Sequence
  Description of Artificial Sequence: Synthetic oligonucleotide
ccucgacacuaugucugau

SEQ ID NO: 898819 - RNA, 19 nt, Artificial Sequence
  Description of Artificial Sequence: Synthetic oligonucleotide
cgcccacuaagacgauccu

SEQ ID NO: 898820 - RNA, 19 nt, Artificial Sequence
  Description of Artificial Sequence: Synthetic oligonucleotide
ccaugccgagaagccgcau

SEQ ID NO: 898821 - RNA, 19 nt, Artificial Sequence
  Description of Artificial Sequence: Synthetic oligonucleotide
ccccuucguuugcuccuuu

SEQ ID NO: 898822 - RNA, 19 nt, Artificial Sequence
  Description of Artificial Sequence: Synthetic oligonucleotide
cguccacggcugccagcuu

SEQ ID NO: 898823 - RNA, 19 nt, Artificial Sequence
  Description of Artificial Sequence: Synthetic oligonucleotide
aagaccaaguuucacauag

SEQ ID NO: 898824 - RNA, 19 nt, Artificial Sequence
  Description of Artificial Sequence: Synthetic oligonucleotide
aaauucuacaguccugcgc

SEQ ID NO: 898825 - RNA, 19 nt, Artificial Sequence
  Description of Artificial Sequence: Synthetic oligonucleotide
aagucauccuuccauaagg

SEQ ID NO: 898826 - RNA, 19 nt, Artificial Sequence
  Description of Artificial Sequence: Synthetic oligonucleotide
aauucuacaguccugcgca

SEQ ID NO: 898827 - RNA, 19 nt, Artificial Sequence
  Description of Artificial Sequence: Synthetic oligonucleotide
gaguacaucuuuuaucucg

SEQ ID NO: 898828 - RNA, 19 nt, Artificial Sequence
  Description of Artificial Sequence: Synthetic oligonucleotide
aaauguagacuuccaaauc

SEQ ID NO: 898829 - RNA, 19 nt, Artificial Sequence
  Description of Artificial Sequence: Synthetic oligonucleotide
cucauuuaagaaaugcugg

SEQ ID NO: 898830 - RNA, 19 nt, Artificial Sequence
  Description of Artificial Sequence: Synthetic oligonucleotide
aaguucacaagcucucagc

SEQ ID NO: 898831 - RNA, 19 nt, Artificial Sequence
  Description of Artificial Sequence: Synthetic oligonucleotide
uucauuuagcauccaaacg

SEQ ID NO: 898832 - RNA, 19 nt, Artificial Sequence
  Description of Artificial Sequence: Synthetic oligonucleotide
ugaaaguccauguaagacc

SEQ ID NO: 898833 - RNA, 19 nt, Artificial Sequence
  Description of Artificial Sequence: Synthetic oligonucleotide
uuuaucucggagaugaggu

SEQ ID NO: 898834 - RNA, 19 nt, Artificial Sequence
  Description of Artificial Sequence: Synthetic oligonucleotide
aguaacaggucccacuccc

SEQ ID NO: 898835 - RNA, 19 nt, Artificial Sequence
  Description of Artificial Sequence: Synthetic oligonucleotide
aguaagccugauuacagac

SEQ ID NO: 898836 - RNA, 19 nt, Artificial Sequence
  Description of Artificial Sequence: Synthetic oligonucleotide
cauauuucauuuagcaucc

SEQ ID NO: 898837 - RNA, 19 nt, Artificial Sequence
  Description of Artificial Sequence: Synthetic oligonucleotide
ucagcuaggaacaagcgaa

SEQ ID NO: 898838 - RNA, 19 nt, Artificial Sequence
  Description of Artificial Sequence: Synthetic oligonucleotide
cuaggaacaagcgaaauag

SEQ ID NO: 898839 - RNA, 19 nt, Artificial Sequence
  Description of Artificial Sequence: Synthetic oligonucleotide
cuuaggagcaguaagccug

SEQ ID NO: 898840 - RNA, 19 nt, Artificial Sequence
  Description of Artificial Sequence: Synthetic oligonucleotide
agcgaaauaguguugauaa

SEQ ID NO: 898841 - RNA, 19 nt, Artificial Sequence
  Description of Artificial Sequence: Synthetic oligonucleotide
ucuguugcaagccccacag

SEQ ID NO: 898842 - RNA, 19 nt, Artificial Sequence
  Description of Artificial Sequence: Synthetic oligonucleotide
uuugauccaauucuuucug

SEQ ID NO: 898843 - RNA, 19 nt, Artificial Sequence
  Description of Artificial Sequence: Synthetic oligonucleotide
aaugaaaguccauguaaga

SEQ ID NO: 898844 - RNA, 19 nt, Artificial Sequence
  Description of Artificial Sequence: Synthetic oligonucleotide
gaagaagugacucggcuug

SEQ ID NO: 898845 - RNA, 19 nt, Artificial Sequence
  Description of Artificial Sequence: Synthetic oligonucleotide
uugauaauucuuccgagaa

SEQ ID NO: 898846 - RNA, 19 nt, Artificial Sequence
  Description of Artificial Sequence: Synthetic oligonucleotide
agugauuuuccucacaaaa

SEQ ID NO: 898847 - RNA, 19 nt, Artificial Sequence
  Description of Artificial Sequence: Synthetic oligonucleotide
uuuuaucucggagaugagg

SEQ ID NO: 898848 - RNA, 19 nt, Artificial Sequence
  Description of Artificial Sequence: Synthetic oligonucleotide
caugagauccuuuucuacc

SEQ ID NO: 898849 - RNA, 19 nt, Artificial Sequence
  Description of Artificial Sequence: Synthetic oligonucleotide
augaaaguccauguaagac

SEQ ID NO: 898850 - RNA, 19 nt, Artificial Sequence
  Description of Artificial Sequence: Synthetic oligonucleotide
auuuuccucacaaaacccc

SEQ ID NO: 898851 - RNA, 19 nt, Artificial Sequence
  Description of Artificial Sequence: Synthetic oligonucleotide
uguuaacuuucucacaagu

SEQ ID NO: 898852 - RNA, 19 nt, Artificial Sequence
  Description of Artificial Sequence: Synthetic oligonucleotide
aacgccagcuccaagacuc

SEQ ID NO: 898853 - RNA, 19 nt, Artificial Sequence
  Description of Artificial Sequence: Synthetic oligonucleotide
uacaucuuuuaucucggag

SEQ ID NO: 898854 - RNA, 19 nt, Artificial Sequence
  Description of Artificial Sequence: Synthetic oligonucleotide
acaguaacaggucccacuc

SEQ ID NO: 898855 - RNA, 19 nt, Artificial Sequence
  Description of Artificial Sequence: Synthetic oligonucleotide
uuuggcugucaauauuugg

SEQ ID NO: 898856 - RNA, 19 nt, Artificial Sequence
  Description of Artificial Sequence: Synthetic oligonucleotide
auaguguugauaauucuuc

SEQ ID NO: 898857 - RNA, 19 nt, Artificial Sequence
  Description of Artificial Sequence: Synthetic oligonucleotide
agccugauuacagacaugg

SEQ ID NO: 898858 - RNA, 19 nt, Artificial Sequence
  Description of Artificial Sequence: Synthetic oligonucleotide
gcuugaaaugcacugaccg

SEQ ID NO: 898859 - RNA, 19 nt, Artificial Sequence
  Description of Artificial Sequence: Synthetic oligonucleotide
ugauaauucuuccgagaag

SEQ ID NO: 898860 - RNA, 19 nt, Artificial Sequence
  Description of Artificial Sequence: Synthetic oligonucleotide
ucuacaguccugcgcaggg

SEQ ID NO: 898861 - RNA, 19 nt, Artificial Sequence
  Description of Artificial Sequence: Synthetic oligonucleotide
uucaccucucuucuaauca

SEQ ID NO: 898862 - RNA, 19 nt, Artificial Sequence
  Description of Artificial Sequence: Synthetic oligonucleotide
uccucuagacuucaggugu

SEQ ID NO: 898863 - RNA, 19 nt, Artificial Sequence
  Description of Artificial Sequence: Synthetic oligonucleotide
ggugucaugcccaagaggg

SEQ ID NO: 898864 - RNA, 19 nt, Artificial Sequence
  Description of Artificial Sequence: Synthetic oligonucleotide
uacacauauuucauuuagc

SEQ ID NO: 898865 - RNA, 19 nt, Artificial Sequence
  Description of Artificial Sequence: Synthetic oligonucleotide
cuugaaaugcacugaccgg

SEQ ID NO: 898866 - RNA, 19 nt, Artificial Sequence
  Description of Artificial Sequence: Synthetic oligonucleotide
uuccauaaggaaagcagca

SEQ ID NO: 898867 - RNA, 19 nt, Artificial Sequence
  Description of Artificial Sequence: Synthetic oligonucleotide
gagaguacaucuuuuaucu

SEQ ID NO: 898868 - RNA, 19 nt, Artificial Sequence
  Description of Artificial Sequence: Synthetic oligonucleotide
uuaaucagguucuccuucc

SEQ ID NO: 898869 - RNA, 19 nt, Artificial Sequence
  Description of Artificial Sequence: Synthetic oligonucleotide
aaacgagaaacgccagcuc

SEQ ID NO: 898870 - RNA, 19 nt, Artificial Sequence
  Description of Artificial Sequence: Synthetic oligonucleotide
cugaguagaagcuguagug

SEQ ID NO: 898871 - RNA, 19 nt, Artificial Sequence
  Description of Artificial Sequence: Synthetic oligonucleotide
cauccaaacgagaaacgcc

SEQ ID NO: 898872 - RNA, 19 nt, Artificial Sequence
  Description of Artificial Sequence: Synthetic oligonucleotide
cugauuacagacauggcca

SEQ ID NO: 898873 - RNA, 19 nt, Artificial Sequence
  Description of Artificial Sequence: Synthetic oligonucleotide
uaauuuguguuguguuggg

SEQ ID NO: 898874 - RNA, 19 nt, Artificial Sequence
  Description of Artificial Sequence: Synthetic oligonucleotide
ugccuaucaaaauuucuca

SEQ ID NO: 898875 - RNA, 19 nt, Artificial Sequence
  Description of Artificial Sequence: Synthetic oligonucleotide
ucugaugacuaacucccug

SEQ ID NO: 898876 - RNA, 19 nt, Artificial Sequence
  Description of Artificial Sequence: Synthetic oligonucleotide
aauuuguguuguguugggg

SEQ ID NO: 898877 - RNA, 19 nt, Artificial Sequence
  Description of Artificial Sequence: Synthetic oligonucleotide
cuguugguccacaacaggc

SEQ ID NO: 898878 - RNA, 19 nt, Artificial Sequence
  Description of Artificial Sequence: Synthetic oligonucleotide
accccuaauuuucuacacc

SEQ ID NO: 898879 - RNA, 19 nt, Artificial Sequence
  Description of Artificial Sequence: Synthetic oligonucleotide
uaggcuucuaucuccagcu

SEQ ID NO: 898880 - RNA, 19 nt, Artificial Sequence
  Description of Artificial Sequence: Synthetic oligonucleotide
  modified_base (2)..(2): a, c, u, g, unknown or other
gngggagugauuuuccuca

SEQ ID NO: 898881 - RNA, 19 nt, Artificial Sequence
  Description of Artificial Sequence: Synthetic oligonucleotide
ccgaguaucugcuagaagc

SEQ ID NO: 898882 - RNA, 19 nt, Artificial Sequence
  Description of Artificial Sequence: Synthetic oligonucleotide
acacacuuccuucacuuag

SEQ ID NO: 898883 - RNA, 19 nt, Artificial Sequence
  Description of Artificial Sequence: Synthetic oligonucleotide
aaacucccuccucaggguc

SEQ ID NO: 898884 - RNA, 19 nt, Artificial Sequence
  Description of Artificial Sequence: Synthetic oligonucleotide
gauaauucuuccgagaagu

SEQ ID NO: 898885 - RNA, 19 nt, Artificial Sequence
  Description of Artificial Sequence: Synthetic oligonucleotide
ucuuugccuaucaaaauuu

SEQ ID NO: 898886 - RNA, 19 nt, Artificial Sequence
  Description of Artificial Sequence: Synthetic oligonucleotide
aagaccuuuguuaaaaguu

SEQ ID NO: 898887 - RNA, 19 nt, Artificial Sequence
  Description of Artificial Sequence: Synthetic oligonucleotide
  modified_base (3)..(3): a, c, u, g, unknown or other
agngggagugauuuuccuc

SEQ ID NO: 898888 - RNA, 19 nt, Artificial Sequence
  Description of Artificial Sequence: Synthetic oligonucleotide
uuucacauagguguguccu

SEQ ID NO: 898889 - RNA, 19 nt, Artificial Sequence
  Description of Artificial Sequence: Synthetic oligonucleotide
acuuucucacaaguuaaac

SEQ ID NO: 898890 - RNA, 19 nt, Artificial Sequence
  Description of Artificial Sequence: Synthetic oligonucleotide
uguugguccacaacaggca

SEQ ID NO: 898891 - RNA, 19 nt, Artificial Sequence
  Description of Artificial Sequence: Synthetic oligonucleotide
uaguguugauaauucuucc

SEQ ID NO: 898892 - RNA, 19 nt, Artificial Sequence
  Description of Artificial Sequence: Synthetic oligonucleotide
aggcuugaaaugcacugac

SEQ ID NO: 898893 - RNA, 19 nt, Artificial Sequence
  Description of Artificial Sequence: Synthetic oligonucleotide
cauaaguucacaagcucuc

SEQ ID NO: 898894 - RNA, 19 nt, Artificial Sequence
  Description of Artificial Sequence: Synthetic oligonucleotide
ggaaacucccuccucaggg

SEQ ID NO: 898895 - RNA, 19 nt, Artificial Sequence
  Description of Artificial Sequence: Synthetic oligonucleotide
gaaaguccauguaagacca

SEQ ID NO: 898896 - RNA, 19 nt, Artificial Sequence
  Description of Artificial Sequence: Synthetic oligonucleotide
cugaugacuaacucccugc

SEQ ID NO: 898897 - RNA, 19 nt, Artificial Sequence
  Description of Artificial Sequence: Synthetic oligonucleotide
ucccaugagauccuuuucu

SEQ ID NO: 898898 - RNA, 19 nt, Artificial Sequence
  Description of Artificial Sequence: Synthetic oligonucleotide
uguaauguuggcugacaac

SEQ ID NO: 898899 - RNA, 19 nt, Artificial Sequence
  Description of Artificial Sequence: Synthetic oligonucleotide
augacuaacucccugcaaa

SEQ ID NO: 898900 - RNA, 19 nt, Artificial Sequence
  Description of Artificial Sequence: Synthetic oligonucleotide
ggaguaagaacaguaacag

SEQ ID NO: 898901 - RNA, 19 nt, Artificial Sequence
  Description of Artificial Sequence: Synthetic oligonucleotide
ccauguaagaccaaguuuc

SEQ ID NO: 898902 - RNA, 19 nt, Artificial Sequence
  Description of Artificial Sequence: Synthetic oligonucleotide
aauguuggcugacaaccaa

SEQ ID NO: 898903 - RNA, 19 nt, Artificial Sequence
  Description of Artificial Sequence: Synthetic oligonucleotide
agaucugccacccagcguu

SEQ ID NO: 898904 - RNA, 19 nt, Artificial Sequence
  Description of Artificial Sequence: Synthetic oligonucleotide
ugcuagaagccccacauuu

SEQ ID NO: 898905 - RNA, 19 nt, Artificial Sequence
  Description of Artificial Sequence: Synthetic oligonucleotide
aaucagugcuguaauguug

SEQ ID NO: 898906 - RNA, 19 nt, Artificial Sequence
  Description of Artificial Sequence: Synthetic oligonucleotide
ugccacaaauucuacaguc

SEQ ID NO: 898907 - RNA, 19 nt, Artificial Sequence
  Description of Artificial Sequence: Synthetic oligonucleotide
uuggccgaguaucugcuag

SEQ ID NO: 898908 - RNA, 19 nt, Artificial Sequence
  Description of Artificial Sequence: Synthetic oligonucleotide
uuuuggcugucaauauuug

SEQ ID NO: 898909 - RNA, 19 nt, Artificial Sequence
  Description of Artificial Sequence: Synthetic oligonucleotide
ccugauuacagacauggcc

SEQ ID NO: 898910 - RNA, 19 nt, Artificial Sequence
  Description of Artificial Sequence: Synthetic oligonucleotide
uggugucaugcccaagagg

SEQ ID NO: 898911 - RNA, 19 nt, Artificial Sequence
  Description of Artificial Sequence: Synthetic oligonucleotide
ugcacugaccggcauacac

SEQ ID NO: 898912 - RNA, 19 nt, Artificial Sequence
  Description of Artificial Sequence: Synthetic oligonucleotide
uccauguaagaccaaguuu

SEQ ID NO: 898913 - RNA, 19 nt, Artificial Sequence
  Description of Artificial Sequence: Synthetic oligonucleotide
uguguuggggcccguaaga

SEQ ID NO: 898914 - RNA, 19 nt, Artificial Sequence
  Description of Artificial Sequence: Synthetic oligonucleotide
aacucccugcaaaugaaag

SEQ ID NO: 898915 - RNA, 19 nt, Artificial Sequence
  Description of Artificial Sequence: Synthetic oligonucleotide
ugaugacuaacucccugca

SEQ ID NO: 898916 - RNA, 19 nt, Artificial Sequence
  Description of Artificial Sequence: Synthetic oligonucleotide
ucucuucuaaucagugcug

SEQ ID NO: 898917 - RNA, 19 nt, Artificial Sequence
  Description of Artificial Sequence: Synthetic oligonucleotide
uauacagcagcuguugguc

SEQ ID NO: 898918 - RNA, 19 nt, Artificial Sequence
  Description of Artificial Sequence: Synthetic oligonucleotide
agcaacacacuuccuucac

SEQ ID NO: 898919 - RNA, 19 nt, Artificial Sequence
  Description of Artificial Sequence: Synthetic oligonucleotide
uuguuaacuuucucacaag

SEQ ID NO: 898920 - RNA, 19 nt, Artificial Sequence
  Description of Artificial Sequence: Synthetic oligonucleotide
aggaacaagcgaaauagug

SEQ ID NO: 898921 - RNA, 19 nt, Artificial Sequence
  Description of Artificial Sequence: Synthetic oligonucleotide
auagguguguccuaccuuu

SEQ ID NO: 898922 - RNA, 19 nt, Artificial Sequence
  Description of Artificial Sequence: Synthetic oligonucleotide
uuugggccagcacuguccc

SEQ ID NO: 898923 - RNA, 19 nt, Artificial Sequence
  Description of Artificial Sequence: Synthetic oligonucleotide
uggggaaacucccuccuca

SEQ ID NO: 898924 - RNA, 19 nt, Artificial Sequence
  Description of Artificial Sequence: Synthetic oligonucleotide
ugccugaaacccaggaagc

SEQ ID NO: 898925 - RNA, 19 nt, Artificial Sequence
  Description of Artificial Sequence: Synthetic oligonucleotide
  modified_base (14)..(14): a, c, u, g, unknown or other
cugguagugguagngggag

SEQ ID NO: 898926 - RNA, 19 nt, Artificial Sequence
  Description of Artificial Sequence: Synthetic oligonucleotide
acugugacucuuaaucagg

SEQ ID NO: 898927 - RNA, 19 nt, Artificial Sequence
  Description of Artificial Sequence: Synthetic oligonucleotide
uccaauauaggggcagcag

SEQ ID NO: 898928 - RNA, 19 nt, Artificial Sequence
  Description of Artificial Sequence: Synthetic oligonucleotide
ucgguuuguuugcauaagu

SEQ ID NO: 898929 - RNA, 19 nt, Artificial Sequence
  Description of Artificial Sequence: Synthetic oligonucleotide
agaguacaucuuuuaucuc

SEQ ID NO: 898930 - RNA, 19 nt, Artificial Sequence
  Description of Artificial Sequence: Synthetic oligonucleotide
uggggcucagcuaggaaca

SEQ ID NO: 898931 - RNA, 19 nt, Artificial Sequence
  Description of Artificial Sequence: Synthetic oligonucleotide
ucuaggcuuuuccacugug

SEQ ID NO: 898932 - RNA, 19 nt, Artificial Sequence
  Description of Artificial Sequence: Synthetic oligonucleotide
agcaagcaguuuccggagc

SEQ ID NO: 898933 - RNA, 19 nt, Artificial Sequence
  Description of Artificial Sequence: Synthetic oligonucleotide
uuguguuggggcccguaag

SEQ ID NO: 898934 - RNA, 19 nt, Artificial Sequence
  Description of Artificial Sequence: Synthetic oligonucleotide
ugauuacagacauggccac

SEQ ID NO: 898935 - RNA, 19 nt, Artificial Sequence
  Description of Artificial Sequence: Synthetic oligonucleotide
cucucucuaauuuguguug

SEQ ID NO: 898936 - RNA, 19 nt, Artificial Sequence
  Description of Artificial Sequence: Synthetic oligonucleotide
caaauucuacaguccugcg

SEQ ID NO: 898937 - RNA, 19 nt, Artificial Sequence
  Description of Artificial Sequence: Synthetic oligonucleotide
acucccuuggccgaguauc

SEQ ID NO: 898938 - RNA, 19 nt, Artificial Sequence
  Description of Artificial Sequence: Synthetic oligonucleotide
cuuccgagaaguccccugg

SEQ ID NO: 898939 - RNA, 19 nt, Artificial Sequence
  Description of Artificial Sequence: Synthetic oligonucleotide
guaggugagaaaauguaga

SEQ ID NO: 898940 - RNA, 19 nt, Artificial Sequence
  Description of Artificial Sequence: Synthetic oligonucleotide
guaggcuucuaucuccagc

SEQ ID NO: 898941 - RNA, 19 nt, Artificial Sequence
  Description of Artificial Sequence: Synthetic oligonucleotide
ugaagaagugacucggcuu

SEQ ID NO: 898942 - RNA, 19 nt, Artificial Sequence
  Description of Artificial Sequence: Synthetic oligonucleotide
uuaucucggagaugaggug

SEQ ID NO: 898943 - RNA, 19 nt, Artificial Sequence
  Description of Artificial Sequence: Synthetic oligonucleotide
agugacucggcuugauuca

SEQ ID NO: 898944 - RNA, 19 nt, Artificial Sequence
  Description of Artificial Sequence: Synthetic oligonucleotide
caggaugcgacuuacagcu

SEQ ID NO: 898945 - RNA, 19 nt, Artificial Sequence
  Description of Artificial Sequence: Synthetic oligonucleotide
agcacugucccucgguuug

SEQ ID NO: 898946 - RNA, 19 nt, Artificial Sequence
  Description of Artificial Sequence: Synthetic oligonucleotide
ucccugcaaaugaaagucc

SEQ ID NO: 898947 - RNA, 19 nt, Artificial Sequence
  Description of Artificial Sequence: Synthetic oligonucleotide
auccaaacgagaaacgcca

SEQ ID NO: 898948 - RNA, 19 nt, Artificial Sequence
  Description of Artificial Sequence: Synthetic oligonucleotide
acuuaggagcaguaagccu

SEQ ID NO: 898949 - RNA, 19 nt, Artificial Sequence
  Description of Artificial Sequence: Synthetic oligonucleotide
uccaaacgagaaacgccag

SEQ ID NO: 898950 - RNA, 19 nt, Artificial Sequence
  Description of Artificial Sequence: Synthetic oligonucleotide
uaaucagugcuguaauguu

SEQ ID NO: 898951 - RNA, 19 nt, Artificial Sequence
  Description of Artificial Sequence: Synthetic oligonucleotide
cucccugcaaaugaaaguc

SEQ ID NO: 898952 - RNA, 19 nt, Artificial Sequence
  Description of Artificial Sequence: Synthetic oligonucleotide
gaacaagcgaaauaguguu

SEQ ID NO: 898953 - RNA, 19 nt, Artificial Sequence
  Description of Artificial Sequence: Synthetic oligonucleotide
uccgagaaguccccuggcc

SEQ ID NO: 898954 - RNA, 19 nt, Artificial Sequence
  Description of Artificial Sequence: Synthetic oligonucleotide
ggagaguacaucuuuuauc

SEQ ID NO: 898955 - RNA, 19 nt, Artificial Sequence
  Description of Artificial Sequence: Synthetic oligonucleotide
cuuccuucacuuaggagca

SEQ ID NO: 898956 - RNA, 19 nt, Artificial Sequence
  Description of Artificial Sequence: Synthetic oligonucleotide
uuccucacaaaaccccacu

SEQ ID NO: 898957 - RNA, 19 nt, Artificial Sequence
  Description of Artificial Sequence: Synthetic oligonucleotide
uaggaacaagcgaaauagu

SEQ ID NO: 898958 - RNA, 19 nt, Artificial Sequence
  Description of Artificial Sequence: Synthetic oligonucleotide
ccaaguuucacauaggugu

SEQ ID NO: 898959 - RNA, 19 nt, Artificial Sequence
  Description of Artificial Sequence: Synthetic oligonucleotide
uucucuguugcaagcccca

SEQ ID NO: 898960 - RNA, 19 nt, Artificial Sequence
  Description of Artificial Sequence: Synthetic oligonucleotide
ccaauauaggggcagcagg

SEQ ID NO: 898961 - RNA, 19 nt, Artificial Sequence
  Description of Artificial Sequence: Synthetic oligonucleotide
auguaagaccaaguuucac

SEQ ID NO: 898962 - RNA, 19 nt, Artificial Sequence
  Description of Artificial Sequence: Synthetic oligonucleotide
agcaguaagccugauuaca

SEQ ID NO: 898963 - RNA, 19 nt, Artificial Sequence
  Description of Artificial Sequence: Synthetic oligonucleotide
uguguuguguuggggcccg

SEQ ID NO: 898964 - RNA, 19 nt, Artificial Sequence
  Description of Artificial Sequence: Synthetic oligonucleotide
ucucucuaauuuguguugu

SEQ ID NO: 898965 - RNA, 19 nt, Artificial Sequence
  Description of Artificial Sequence: Synthetic oligonucleotide
aacaagcgaaauaguguug

SEQ ID NO: 898966 - RNA, 19 nt, Artificial Sequence
  Description of Artificial Sequence: Synthetic oligonucleotide
auauaggggcagcagguau

SEQ ID NO: 898967 - RNA, 19 nt, Artificial Sequence
  Description of Artificial Sequence: Synthetic oligonucleotide
guuugauccaauucuuucu

SEQ ID NO: 898968 - RNA, 19 nt, Artificial Sequence
  Description of Artificial Sequence: Synthetic oligonucleotide
ucuuccgagaaguccccug

SEQ ID NO: 898969 - RNA, 19 nt, Artificial Sequence
  Description of Artificial Sequence: Synthetic oligonucleotide
ugucccucgguuuguuugc

SEQ ID NO: 898970 - RNA, 19 nt, Artificial Sequence
  Description of Artificial Sequence: Synthetic oligonucleotide
guagacuuccaaauccaug

SEQ ID NO: 898971 - RNA, 19 nt, Artificial Sequence
  Description of Artificial Sequence: Synthetic oligonucleotide
uguuggggcccguaagaug

SEQ ID NO: 898972 - RNA, 19 nt, Artificial Sequence
  Description of Artificial Sequence: Synthetic oligonucleotide
guuggcugacaaccaagag

SEQ ID NO: 898973 - RNA, 19 nt, Artificial Sequence
  Description of Artificial Sequence: Synthetic oligonucleotide
aggucccacucccuuggcc

SEQ ID NO: 898974 - RNA, 19 nt, Artificial Sequence
  Description of Artificial Sequence: Synthetic oligonucleotide
caagacucggagucucuag

SEQ ID NO: 898975 - RNA, 19 nt, Artificial Sequence
  Description of Artificial Sequence: Synthetic oligonucleotide
ggucccacucccuuggccg

SEQ ID NO: 898976 - RNA, 19 nt, Artificial Sequence
  Description of Artificial Sequence: Synthetic oligonucleotide
auaauucuuccgagaaguc

SEQ ID NO: 898977 - RNA, 19 nt, Artificial Sequence
  Description of Artificial Sequence: Synthetic oligonucleotide
ugacuaacucccugcaaau

SEQ ID NO: 898978 - RNA, 19 nt, Artificial Sequence
  Description of Artificial Sequence: Synthetic oligonucleotide
cauaaggaaagcagcaugu

SEQ ID NO: 898979 - RNA, 19 nt, Artificial Sequence
  Description of Artificial Sequence: Synthetic oligonucleotide
ucccggaguaagaacagua

SEQ ID NO: 898980 - RNA, 19 nt, Artificial Sequence
  Description of Artificial Sequence: Synthetic oligonucleotide
guugguccacaacaggcac

SEQ ID NO: 898981 - RNA, 19 nt, Artificial Sequence
  Description of Artificial Sequence: Synthetic oligonucleotide
cuguccucucucuaauuug

SEQ ID NO: 898982 - RNA, 19 nt, Artificial Sequence
  Description of Artificial Sequence: Synthetic oligonucleotide
uaguggaacuggccccugg

SEQ ID NO: 898983 - RNA, 19 nt, Artificial Sequence
  Description of Artificial Sequence: Synthetic oligonucleotide
  modified_base (4)..(4): a, c, u, g, unknown or other
uagngggagugauuuuccu

SEQ ID NO: 898984 - RNA, 19 nt, Artificial Sequence
  Description of Artificial Sequence: Synthetic oligonucleotide
accggcauacacauauuuc

SEQ ID NO: 898985 - RNA, 19 nt, Artificial Sequence
  Description of Artificial Sequence: Synthetic oligonucleotide
uuuccacugugacucuuaa

SEQ ID NO: 898986 - RNA, 19 nt, Artificial Sequence
  Description of Artificial Sequence: Synthetic oligonucleotide
ugcucugcagcaacacacu

SEQ ID NO: 898987 - RNA, 19 nt, Artificial Sequence
  Description of Artificial Sequence: Synthetic oligonucleotide
aagcgaaauaguguugaua

SEQ ID NO: 898988 - RNA, 19 nt, Artificial Sequence
  Description of Artificial Sequence: Synthetic oligonucleotide
gaccaaguuucacauaggu

SEQ ID NO: 898989 - RNA, 19 nt, Artificial Sequence
  Description of Artificial Sequence: Synthetic oligonucleotide
uuguuugcauaaguucaca

SEQ ID NO: 898990 - RNA, 19 nt, Artificial Sequence
  Description of Artificial Sequence: Synthetic oligonucleotide
gggguaacaguccagcuuc

SEQ ID NO: 898991 - RNA, 19 nt, Artificial Sequence
  Description of Artificial Sequence: Synthetic oligonucleotide
  modified_base (5)..(5): a, c, u, g, unknown or other
guagngggagugauuuucc

SEQ ID NO: 898992 - RNA, 19 nt, Artificial Sequence
  Description of Artificial Sequence: Synthetic oligonucleotide
uaacucccugcaaaugaaa

SEQ ID NO: 898993 - RNA, 19 nt, Artificial Sequence
  Description of Artificial Sequence: Synthetic oligonucleotide
uguaguggaacuggccccu

SEQ ID NO: 898994 - RNA, 19 nt, Artificial Sequence
  Description of Artificial Sequence: Synthetic oligonucleotide
aauauaggggcagcaggua

SEQ ID NO: 898995 - RNA, 19 nt, Artificial Sequence
  Description of Artificial Sequence: Synthetic oligonucleotide
cucacaaguuaaacauuuc

SEQ ID NO: 898996 - RNA, 19 nt, Artificial Sequence
  Description of Artificial Sequence: Synthetic oligonucleotide
caccagaucugccacccag

SEQ ID NO: 898997 - RNA, 19 nt, Artificial Sequence
  Description of Artificial Sequence: Synthetic oligonucleotide
ugggccucauuaaggcugc

SEQ ID NO: 898998 - RNA, 19 nt, Artificial Sequence
  Description of Artificial Sequence: Synthetic oligonucleotide
ggaugcgacuuacagcugc

SEQ ID NO: 898999 - RNA, 19 nt, Artificial Sequence
  Description of Artificial Sequence: Synthetic oligonucleotide
ugucaauauuugggguggg

SEQ ID NO: 899000 - RNA, 19 nt, Artificial Sequence
  Description of Artificial Sequence: Synthetic oligonucleotide
ugcgacuuacagcugcuuu

SEQ ID NO: 899001 - RNA, 19 nt, Artificial Sequence
  Description of Artificial Sequence: Synthetic oligonucleotide
accaaguuucacauaggug

SEQ ID NO: 899002 - RNA, 19 nt, Artificial Sequence
  Description of Artificial Sequence: Synthetic oligonucleotide
auaaguucacaagcucuca

SEQ ID NO: 899003 - RNA, 19 nt, Artificial Sequence
  Description of Artificial Sequence: Synthetic oligonucleotide
uccauaaggaaagcagcau

SEQ ID NO: 899004 - RNA, 19 nt, Artificial Sequence
  Description of Artificial Sequence: Synthetic oligonucleotide
ucuccaauauaggggcagc

SEQ ID NO: 899005 - RNA, 19 nt, Artificial Sequence
  Description of Artificial Sequence: Synthetic oligonucleotide
cucuccaauauaggggcag

SEQ ID NO: 899006 - RNA, 19 nt, Artificial Sequence
  Description of Artificial Sequence: Synthetic oligonucleotide
agaccuuuguuaaaaguuu

SEQ ID NO: 899007 - RNA, 19 nt, Artificial Sequence
  Description of Artificial Sequence: Synthetic oligonucleotide
gcuucuguaggugagaaaa

SEQ ID NO: 899008 - RNA, 19 nt, Artificial Sequence
  Description of Artificial Sequence: Synthetic oligonucleotide
aguggaacuggccccugga

SEQ ID NO: 899009 - RNA, 19 nt, Artificial Sequence
  Description of Artificial Sequence: Synthetic oligonucleotide
gacuaacucccugcaaaug

SEQ ID NO: 899010 - RNA, 19 nt, Artificial Sequence
  Description of Artificial Sequence: Synthetic oligonucleotide
ugcaagccccacagcaaug

SEQ ID NO: 899011 - RNA, 19 nt, Artificial Sequence
  Description of Artificial Sequence: Synthetic oligonucleotide
uuccgagaaguccccuggc

SEQ ID NO: 899012 - RNA, 19 nt, Artificial Sequence
  Description of Artificial Sequence: Synthetic oligonucleotide
aggaagcaagcaguuuccg

SEQ ID NO: 899013 - RNA, 19 nt, Artificial Sequence
  Description of Artificial Sequence: Synthetic oligonucleotide
ccauaaggaaagcagcaug

SEQ ID NO: 899014 - RNA, 19 nt, Artificial Sequence
  Description of Artificial Sequence: Synthetic oligonucleotide
  modified_base (10)..(10): a, c, u, g, unknown or other
uagugguagngggagugau

SEQ ID NO: 899015 - RNA, 19 nt, Artificial Sequence
  Description of Artificial Sequence: Synthetic oligonucleotide
gcuguugguccacaacagg

SEQ ID NO: 899016 - RNA, 19 nt, Artificial Sequence
  Description of Artificial Sequence: Synthetic oligonucleotide
ugggcucgcaggaugcgac

SEQ ID NO: 899017 - RNA, 19 nt, Artificial Sequence
  Description of Artificial Sequence: Synthetic oligonucleotide
cuuccucuagacuucaggu

SEQ ID NO: 899018 - RNA, 19 nt, Artificial Sequence
  Description of Artificial Sequence: Synthetic oligonucleotide
uaacaggucccacucccuu

SEQ ID NO: 899019 - RNA, 19 nt, Artificial Sequence
  Description of Artificial Sequence: Synthetic oligonucleotide
ucuucuaaucagugcugua

SEQ ID NO: 899020 - RNA, 19 nt, Artificial Sequence
  Description of Artificial Sequence: Synthetic oligonucleotide
cacauagguguguccuacc

SEQ ID NO: 899021 - RNA, 19 nt, Artificial Sequence
  Description of Artificial Sequence: Synthetic oligonucleotide
gagaaacgccagcuccaag

SEQ ID NO: 899022 - RNA, 19 nt, Artificial Sequence
  Description of Artificial Sequence: Synthetic oligonucleotide
gcaguaagccugauuacag

SEQ ID NO: 899023 - RNA, 19 nt, Artificial Sequence
  Description of Artificial Sequence: Synthetic oligonucleotide
  modified_base (6)..(6): a, c, u, g, unknown or other
gguagngggagugauuuuc

SEQ ID NO: 899024 - RNA, 19 nt, Artificial Sequence
  Description of Artificial Sequence: Synthetic oligonucleotide
gcauccaaacgagaaacgc

SEQ ID NO: 899025 - RNA, 19 nt, Artificial Sequence
  Description of Artificial Sequence: Synthetic oligonucleotide
agggagaguacaucuuuua

SEQ ID NO: 899026 - RNA, 19 nt, Artificial Sequence
  Description of Artificial Sequence: Synthetic oligonucleotide
ccagcccuagcuuugggcc

SEQ ID NO: 899027 - RNA, 19 nt, Artificial Sequence
  Description of Artificial Sequence: Synthetic oligonucleotide
cuaacucccugcaaaugaa

SEQ ID NO: 899028 - RNA, 19 nt, Artificial Sequence
  Description of Artificial Sequence: Synthetic oligonucleotide
caaggugugcagugggcuc

SEQ ID NO: 899029 - RNA, 19 nt, Artificial Sequence
  Description of Artificial Sequence: Synthetic oligonucleotide
agucauccuuccauaagga

SEQ ID NO: 899030 - RNA, 19 nt, Artificial Sequence
  Description of Artificial Sequence: Synthetic oligonucleotide
guaagccugauuacagaca

SEQ ID NO: 899031 - RNA, 19 nt, Artificial Sequence
  Description of Artificial Sequence: Synthetic oligonucleotide
cuucccagcccuagcuuug

SEQ ID NO: 899032 - RNA, 19 nt, Artificial Sequence
  Description of Artificial Sequence: Synthetic oligonucleotide
aucugcuagaagccccaca

SEQ ID NO: 899033 - RNA, 19 nt, Artificial Sequence
  Description of Artificial Sequence: Synthetic oligonucleotide
guauacagcagcuguuggu

SEQ ID NO: 899034 - RNA, 19 nt, Artificial Sequence
  Description of Artificial Sequence: Synthetic oligonucleotide
aguccauguaagaccaagu

SEQ ID NO: 899035 - RNA, 19 nt, Artificial Sequence
  Description of Artificial Sequence: Synthetic oligonucleotide
auuuagcauccaaacgaga

SEQ ID NO: 899036 - RNA, 19 nt, Artificial Sequence
  Description of Artificial Sequence: Synthetic oligonucleotide
cugcuuagaacagcagcug

SEQ ID NO: 899037 - RNA, 19 nt, Artificial Sequence
  Description of Artificial Sequence: Synthetic oligonucleotide
acaguuugauccaauucuu

SEQ ID NO: 899038 - RNA, 19 nt, Artificial Sequence
  Description of Artificial Sequence: Synthetic oligonucleotide
ccggcauacacauauuuca

SEQ ID NO: 899039 - RNA, 19 nt, Artificial Sequence
  Description of Artificial Sequence: Synthetic oligonucleotide
cgaguaucugcuagaagcc

SEQ ID NO: 899040 - RNA, 19 nt, Artificial Sequence
  Description of Artificial Sequence: Synthetic oligonucleotide
aagaagugacucggcuuga

SEQ ID NO: 899041 - RNA, 19 nt, Artificial Sequence
  Description of Artificial Sequence: Synthetic oligonucleotide
  modified_base (17)..(17): a, c, u, g, unknown or other
aggcugguagugguagngg

SEQ ID NO: 899042 - RNA, 19 nt, Artificial Sequence
  Description of Artificial Sequence: Synthetic oligonucleotide
cucgguuuguuugcauaag

SEQ ID NO: 899043 - RNA, 19 nt, Artificial Sequence
  Description of Artificial Sequence: Synthetic oligonucleotide
ccggagcucuccaauauag

SEQ ID NO: 899044 - RNA, 19 nt, Artificial Sequence
  Description of Artificial Sequence: Synthetic oligonucleotide
uugauguguuugacacagu

SEQ ID NO: 899045 - RNA, 19 nt, Artificial Sequence
  Description of Artificial Sequence: Synthetic oligonucleotide
cugaccggcauacacauau

SEQ ID NO: 899046 - RNA, 19 nt, Artificial Sequence
  Description of Artificial Sequence: Synthetic oligonucleotide
caguaagccugauuacaga

SEQ ID NO: 899047 - RNA, 19 nt, Artificial Sequence
  Description of Artificial Sequence: Synthetic oligonucleotide
uggccgaguaucugcuaga

SEQ ID NO: 899048 - RNA, 19 nt, Artificial Sequence
  Description of Artificial Sequence: Synthetic oligonucleotide
uucccagcccuagcuuugg

SEQ ID NO: 899049 - RNA, 19 nt, Artificial Sequence
  Description of Artificial Sequence: Synthetic oligonucleotide
uccggagcucuccaauaua

SEQ ID NO: 899050 - RNA, 19 nt, Artificial Sequence
  Description of Artificial Sequence: Synthetic oligonucleotide
gccucauuaaggcugccca

SEQ ID NO: 899051 - RNA, 19 nt, Artificial Sequence
  Description of Artificial Sequence: Synthetic oligonucleotide
uguugaggcccgugucugu

SEQ ID NO: 899052 - RNA, 19 nt, Artificial Sequence
  Description of Artificial Sequence: Synthetic oligonucleotide
ggaacaagcgaaauagugu

SEQ ID NO: 899053 - RNA, 19 nt, Artificial Sequence
  Description of Artificial Sequence: Synthetic oligonucleotide
ugcuuggucugaugacuaa

SEQ ID NO: 899054 - RNA, 19 nt, Artificial Sequence
  Description of Artificial Sequence: Synthetic oligonucleotide
caaacgagaaacgccagcu

SEQ ID NO: 899055 - RNA, 19 nt, Artificial Sequence
  Description of Artificial Sequence: Synthetic oligonucleotide
ccagaucugccacccagcg

SEQ ID NO: 899056 - RNA, 19 nt, Artificial Sequence
  Description of Artificial Sequence: Synthetic oligonucleotide
ggcggcaccgcagugacug

SEQ ID NO: 899057 - RNA, 19 nt, Artificial Sequence
  Description of Artificial Sequence: Synthetic oligonucleotide
uucgagccuguccucucuc

SEQ ID NO: 899058 - RNA, 19 nt, Artificial Sequence
  Description of Artificial Sequence: Synthetic oligonucleotide
ccggaguaagaacaguaac

SEQ ID NO: 899059 - RNA, 19 nt, Artificial Sequence
  Description of Artificial Sequence: Synthetic oligonucleotide
ucagguguugaggcccgug

SEQ ID NO: 899060 - RNA, 19 nt, Artificial Sequence
  Description of Artificial Sequence: Synthetic oligonucleotide
guugaggcccgugucugug

SEQ ID NO: 899061 - RNA, 19 nt, Artificial Sequence
  Description of Artificial Sequence: Synthetic oligonucleotide
ccaaacgagaaacgccagc

SEQ ID NO: 899062 - RNA, 19 nt, Artificial Sequence
  Description of Artificial Sequence: Synthetic oligonucleotide
ucuagcagauggggcucag

SEQ ID NO: 899063 - RNA, 19 nt, Artificial Sequence
  Description of Artificial Sequence: Synthetic oligonucleotide
acgagaaacgccagcucca

SEQ ID NO: 899064 - RNA, 19 nt, Artificial Sequence
  Description of Artificial Sequence: Synthetic oligonucleotide
gggcccguaagauggggag

SEQ ID NO: 899065 - RNA, 19 nt, Artificial Sequence
  Description of Artificial Sequence: Synthetic oligonucleotide
gccugcaaccccuggcugg

SEQ ID NO: 899066 - RNA, 19 nt, Artificial Sequence
  Description of Artificial Sequence: Synthetic oligonucleotide
guaucugcuagaagcccca

SEQ ID NO: 899067 - RNA, 19 nt, Artificial Sequence
  Description of Artificial Sequence: Synthetic oligonucleotide
cagcaacacacuuccuuca

SEQ ID NO: 899068 - RNA, 19 nt, Artificial Sequence
  Description of Artificial Sequence: Synthetic oligonucleotide
gacucggagucucuaggcu

SEQ ID NO: 899069 - RNA, 19 nt, Artificial Sequence
  Description of Artificial Sequence: Synthetic oligonucleotide
ggcaguuggcucaggaccc

SEQ ID NO: 899070 - RNA, 19 nt, Artificial Sequence
  Description of Artificial Sequence: Synthetic oligonucleotide
  modified_base (7)..(7): a, c, u, g, unknown or other
ugguagngggagugauuuu

SEQ ID NO: 899071 - RNA, 19 nt, Artificial Sequence
  Description of Artificial Sequence: Synthetic oligonucleotide
cucgcaggaugcgacuuac

SEQ ID NO: 899072 - RNA, 19 nt, Artificial Sequence
  Description of Artificial Sequence: Synthetic oligonucleotide
agccugcaaccccuggcug

SEQ ID NO: 899073 - RNA, 19 nt, Artificial Sequence
  Description of Artificial Sequence: Synthetic oligonucleotide
aggcccgugucuguggaug

SEQ ID NO: 899074 - RNA, 19 nt, Artificial Sequence
  Description of Artificial Sequence: Synthetic oligonucleotide
cauuaaggcugcccaagua

SEQ ID NO: 899075 - RNA, 19 nt, Artificial Sequence
  Description of Artificial Sequence: Synthetic oligonucleotide
accuuuguuaaaaguuuua

SEQ ID NO: 899076 - RNA, 19 nt, Artificial Sequence
  Description of Artificial Sequence: Synthetic oligonucleotide
guccauguaagaccaaguu

SEQ ID NO: 899077 - RNA, 19 nt, Artificial Sequence
  Description of Artificial Sequence: Synthetic oligonucleotide
cucuagacuucagguguug

SEQ ID NO: 899078 - RNA, 19 nt, Artificial Sequence
  Description of Artificial Sequence: Synthetic oligonucleotide
ggaacuggcggcaccgcag

SEQ ID NO: 899079 - RNA, 19 nt, Artificial Sequence
  Description of Artificial Sequence: Synthetic oligonucleotide
gucccaugagauccuuuuc

SEQ ID NO: 899080 - RNA, 19 nt, Artificial Sequence
  Description of Artificial Sequence: Synthetic oligonucleotide
gguucuggugucaugccca

SEQ ID NO: 899081 - RNA, 19 nt, Artificial Sequence
  Description of Artificial Sequence: Synthetic oligonucleotide
agccuucgagccuguccuc

SEQ ID NO: 899082 - RNA, 19 nt, Artificial Sequence
  Description of Artificial Sequence: Synthetic oligonucleotide
ggggagucuggucugcaac

SEQ ID NO: 899083 - RNA, 19 nt, Artificial Sequence
  Description of Artificial Sequence: Synthetic oligonucleotide
guucuagcagauggggcuc

SEQ ID NO: 899084 - RNA, 19 nt, Artificial Sequence
  Description of Artificial Sequence: Synthetic oligonucleotide
caaccaggagggaagccaa

SEQ ID NO: 899085 - RNA, 19 nt, Artificial Sequence
  Description of Artificial Sequence: Synthetic oligonucleotide
aacuggccccuggaaguca

SEQ ID NO: 899086 - RNA, 19 nt, Artificial Sequence
  Description of Artificial Sequence: Synthetic oligonucleotide
ucgcaggaugcgacuuaca

SEQ ID NO: 899087 - RNA, 19 nt, Artificial Sequence
  Description of Artificial Sequence: Synthetic oligonucleotide
gguggggcucuuccuuugg

SEQ ID NO: 899088 - RNA, 19 nt, Artificial Sequence
  Description of Artificial Sequence: Synthetic oligonucleotide
cacuccgcccacugcugcc

SEQ ID NO: 899089 - RNA, 19 nt, Artificial Sequence
  Description of Artificial Sequence: Synthetic oligonucleotide
gugcuguaauguuggcuga

SEQ ID NO: 899090 - RNA, 19 nt, Artificial Sequence
  Description of Artificial Sequence: Synthetic oligonucleotide
caacacacuuccuucacuu

SEQ ID NO: 899091 - RNA, 19 nt, Artificial Sequence
  Description of Artificial Sequence: Synthetic oligonucleotide
cugugacucuuaaucaggu

SEQ ID NO: 899092 - RNA, 19 nt, Artificial Sequence
  Description of Artificial Sequence: Synthetic oligonucleotide
uggggagucuggucugcaa

SEQ ID NO: 899093 - RNA, 19 nt, Artificial Sequence
  Description of Artificial Sequence: Synthetic oligonucleotide
ggcugaguagaagcuguag

SEQ ID NO: 899094 - RNA, 19 nt, Artificial Sequence
  Description of Artificial Sequence: Synthetic oligonucleotide
cugcaaccaggagggaagc

SEQ ID NO: 899095 - RNA, 19 nt, Artificial Sequence
  Description of Artificial Sequence: Synthetic oligonucleotide
gucccgaggccccgcagcc

SEQ ID NO: 899096 - RNA, 19 nt, Artificial Sequence
  Description of Artificial Sequence: Synthetic oligonucleotide
agcccuagcuuugggccag

SEQ ID NO: 899097 - RNA, 19 nt, Artificial Sequence
  Description of Artificial Sequence: Synthetic oligonucleotide
cucuguugcaagccccaca

SEQ ID NO: 899098 - RNA, 19 nt, Artificial Sequence
  Description of Artificial Sequence: Synthetic oligonucleotide
gcauaaguucacaagcucu

SEQ ID NO: 899099 - RNA, 19 nt, Artificial Sequence
  Description of Artificial Sequence: Synthetic oligonucleotide
gaacuggccccuggaaguc

SEQ ID NO: 899100 - RNA, 19 nt, Artificial Sequence
  Description of Artificial Sequence: Synthetic oligonucleotide
gugucaugcccaagagggc

SEQ ID NO: 899101 - RNA, 19 nt, Artificial Sequence
  Description of Artificial Sequence: Synthetic oligonucleotide
ugaccggcauacacauauu

SEQ ID NO: 899102 - RNA, 19 nt, Artificial Sequence
  Description of Artificial Sequence: Synthetic oligonucleotide
ggcuugaaaugcacugacc

SEQ ID NO: 899103 - RNA, 19 nt, Artificial Sequence
  Description of Artificial Sequence: Synthetic oligonucleotide
ugcuuucaccucucuucua

SEQ ID NO: 899104 - RNA, 19 nt, Artificial Sequence
  Description of Artificial Sequence: Synthetic oligonucleotide
gaccggcauacacauauuu

SEQ ID NO: 899105 - RNA, 19 nt, Artificial Sequence
  Description of Artificial Sequence: Synthetic oligonucleotide
aaaagaccccaaaccccua

SEQ ID NO: 899106 - RNA, 19 nt, Artificial Sequence
  Description of Artificial Sequence: Synthetic oligonucleotide
ggguucuagcagauggggc

SEQ ID NO: 899107 - RNA, 19 nt, Artificial Sequence
  Description of Artificial Sequence: Synthetic oligonucleotide
uaucugcuagaagccccac

SEQ ID NO: 899108 - RNA, 19 nt, Artificial Sequence
  Description of Artificial Sequence: Synthetic oligonucleotide
uucuuccgagaaguccccu

SEQ ID NO: 899109 - RNA, 19 nt, Artificial Sequence
  Description of Artificial Sequence: Synthetic oligonucleotide
cuuuggccccugugucacc

SEQ ID NO: 899110 - RNA, 19 nt, Artificial Sequence
  Description of Artificial Sequence: Synthetic oligonucleotide
caccaugcuuggucugaug

SEQ ID NO: 899111 - RNA, 19 nt, Artificial Sequence
  Description of Artificial Sequence: Synthetic oligonucleotide
gcccaaguaggcuucuauc

SEQ ID NO: 899112 - RNA, 19 nt, Artificial Sequence
  Description of Artificial Sequence: Synthetic oligonucleotide
  modified_base (8)..(8): a, c, u, g, unknown or other
gugguagngggagugauuu

SEQ ID NO: 899113 - RNA, 19 nt, Artificial Sequence
  Description of Artificial Sequence: Synthetic oligonucleotide
aaaguccauguaagaccaa

SEQ ID NO: 899114 - RNA, 19 nt, Artificial Sequence
  Description of Artificial Sequence: Synthetic oligonucleotide
gucugcaaccaggagggaa

SEQ ID NO: 899115 - RNA, 19 nt, Artificial Sequence
  Description of Artificial Sequence: Synthetic oligonucleotide
guaagauggggagucuggu

SEQ ID NO: 899116 - RNA, 19 nt, Artificial Sequence
  Description of Artificial Sequence: Synthetic oligonucleotide
gugacucggcuugauucac

SEQ ID NO: 899117 - RNA, 19 nt, Artificial Sequence
  Description of Artificial Sequence: Synthetic oligonucleotide
agaagugacucggcuugau

SEQ ID NO: 899118 - RNA, 19 nt, Artificial Sequence
  Description of Artificial Sequence: Synthetic oligonucleotide
guuuccggagcucuccaau

SEQ ID NO: 899119 - RNA, 19 nt, Artificial Sequence
  Description of Artificial Sequence: Synthetic oligonucleotide
cuggggaaacucccuccuc

SEQ ID NO: 899120 - RNA, 19 nt, Artificial Sequence
  Description of Artificial Sequence: Synthetic oligonucleotide
ggcaggguucccaggcugg

SEQ ID NO: 899121 - RNA, 19 nt, Artificial Sequence
  Description of Artificial Sequence: Synthetic oligonucleotide
cuccaauauaggggcagca

SEQ ID NO: 899122 - RNA, 19 nt, Artificial Sequence
  Description of Artificial Sequence: Synthetic oligonucleotide
gcuuggucugaugacuaac

SEQ ID NO: 899123 - RNA, 19 nt, Artificial Sequence
  Description of Artificial Sequence: Synthetic oligonucleotide
gauuacagacauggccacu

SEQ ID NO: 899124 - RNA, 19 nt, Artificial Sequence
  Description of Artificial Sequence: Synthetic oligonucleotide
gccgaguaucugcuagaag

SEQ ID NO: 899125 - RNA, 19 nt, Artificial Sequence
  Description of Artificial Sequence: Synthetic oligonucleotide
  modified_base (9)..(9): a, c, u, g, unknown or other
agugguagngggagugauu

SEQ ID NO: 899126 - RNA, 19 nt, Artificial Sequence
  Description of Artificial Sequence: Synthetic oligonucleotide
gaagugacucggcuugauu

SEQ ID NO: 899127 - RNA, 19 nt, Artificial Sequence
  Description of Artificial Sequence: Synthetic oligonucleotide
uguuguguuggggcccgua

SEQ ID NO: 899128 - RNA, 19 nt, Artificial Sequence
  Description of Artificial Sequence: Synthetic oligonucleotide
ggucccgaggccccgcagc

SEQ ID NO: 899129 - RNA, 19 nt, Artificial Sequence
  Description of Artificial Sequence: Synthetic oligonucleotide
gcuagaagccccacauuuc

SEQ ID NO: 899130 - RNA, 19 nt, Artificial Sequence
  Description of Artificial Sequence: Synthetic oligonucleotide
cacccgggcaguuggcuca

SEQ ID NO: 899131 - RNA, 19 nt, Artificial Sequence
  Description of Artificial Sequence: Synthetic oligonucleotide
cacugaccggcauacacau

SEQ ID NO: 899132 - RNA, 19 nt, Artificial Sequence
  Description of Artificial Sequence: Synthetic oligonucleotide
agcguugccuugauguguu

SEQ ID NO: 899133 - RNA, 19 nt, Artificial Sequence
  Description of Artificial Sequence: Synthetic oligonucleotide
gaugcgacuuacagcugcu

SEQ ID NO: 899134 - RNA, 19 nt, Artificial Sequence
  Description of Artificial Sequence: Synthetic oligonucleotide
aguccugcgcagggaaggu

SEQ ID NO: 899135 - RNA, 19 nt, Artificial Sequence
  Description of Artificial Sequence: Synthetic oligonucleotide
ccagcguugccuugaugug

SEQ ID NO: 899136 - RNA, 19 nt, Artificial Sequence
  Description of Artificial Sequence: Synthetic oligonucleotide
augcuuggucugaugacua

SEQ ID NO: 899137 - RNA, 19 nt, Artificial Sequence
  Description of Artificial Sequence: Synthetic oligonucleotide
cucuucuaaucagugcugu

SEQ ID NO: 899138 - RNA, 19 nt, Artificial Sequence
  Description of Artificial Sequence: Synthetic oligonucleotide
ucccucgguuuguuugcau

SEQ ID NO: 899139 - RNA, 19 nt, Artificial Sequence
  Description of Artificial Sequence: Synthetic oligonucleotide
gguggcugguuguggaaaa

SEQ ID NO: 899140 - RNA, 19 nt, Artificial Sequence
  Description of Artificial Sequence: Synthetic oligonucleotide
ggcagguucuggugucaug

SEQ ID NO: 899141 - RNA, 19 nt, Artificial Sequence
  Description of Artificial Sequence: Synthetic oligonucleotide
gggagaguacaucuuuuau

SEQ ID NO: 899142 - RNA, 19 nt, Artificial Sequence
  Description of Artificial Sequence: Synthetic oligonucleotide
uccgcccacugcugccuga

SEQ ID NO: 899143 - RNA, 19 nt, Artificial Sequence
  Description of Artificial Sequence: Synthetic oligonucleotide
ggagucuggucugcaacca

SEQ ID NO: 899144 - RNA, 19 nt, Artificial Sequence
  Description of Artificial Sequence: Synthetic oligonucleotide
cagccccuccgcucacccg

SEQ ID NO: 899145 - RNA, 19 nt, Artificial Sequence
  Description of Artificial Sequence: Synthetic oligonucleotide
gccuaucaaaauuucucau

SEQ ID NO: 899146 - RNA, 19 nt, Artificial Sequence
  Description of Artificial Sequence: Synthetic oligonucleotide
ggcauacacauauuucauu

SEQ ID NO: 899147 - RNA, 19 nt, Artificial Sequence
  Description of Artificial Sequence: Synthetic oligonucleotide
ccagaugcugcucagcagu

SEQ ID NO: 899148 - RNA, 19 nt, Artificial Sequence
  Description of Artificial Sequence: Synthetic oligonucleotide
cagcagguauacagcagcu

SEQ ID NO: 899149 - RNA, 19 nt, Artificial Sequence
  Description of Artificial Sequence: Synthetic oligonucleotide
caggucccacucccuuggc

SEQ ID NO: 899150 - RNA, 19 nt, Artificial Sequence
  Description of Artificial Sequence: Synthetic oligonucleotide
gcccguaagauggggaguc

SEQ ID NO: 899151 - RNA, 19 nt, Artificial Sequence
  Description of Artificial Sequence: Synthetic oligonucleotide
guaguggaacuggccccug

SEQ ID NO: 899152 - RNA, 19 nt, Artificial Sequence
  Description of Artificial Sequence: Synthetic oligonucleotide
cagcuucuguaggugagaa

SEQ ID NO: 899153 - RNA, 19 nt, Artificial Sequence
  Description of Artificial Sequence: Synthetic oligonucleotide
ccucgguuuguuugcauaa

SEQ ID NO: 899154 - RNA, 19 nt, Artificial Sequence
  Description of Artificial Sequence: Synthetic oligonucleotide
gcaccgcagugacuggccc

SEQ ID NO: 899155 - RNA, 19 nt, Artificial Sequence
  Description of Artificial Sequence: Synthetic oligonucleotide
guccugcgcagggaaggug

SEQ ID NO: 899156 - RNA, 19 nt, Artificial Sequence
  Description of Artificial Sequence: Synthetic oligonucleotide
uucagguguugaggcccgu

SEQ ID NO: 899157 - RNA, 19 nt, Artificial Sequence
  Description of Artificial Sequence: Synthetic oligonucleotide
aggaugcgacuuacagcug

SEQ ID NO: 899158 - RNA, 19 nt, Artificial Sequence
  Description of Artificial Sequence: Synthetic oligonucleotide
cccggaguaagaacaguaa

SEQ ID NO: 899159 - RNA, 19 nt, Artificial Sequence
  Description of Artificial Sequence: Synthetic oligonucleotide
agcugucccaugagauccu

SEQ ID NO: 899160 - RNA, 19 nt, Artificial Sequence
  Description of Artificial Sequence: Synthetic oligonucleotide
acagagcacuuggccagau

SEQ ID NO: 899161 - RNA, 19 nt, Artificial Sequence
  Description of Artificial Sequence: Synthetic oligonucleotide
gccugauuacagacauggc

SEQ ID NO: 899162 - RNA, 19 nt, Artificial Sequence
  Description of Artificial Sequence: Synthetic oligonucleotide
cgcucacccgggcaguugg

SEQ ID NO: 899163 - RNA, 19 nt, Artificial Sequence
  Description of Artificial Sequence: Synthetic oligonucleotide
guaacaggucccacucccu

SEQ ID NO: 899164 - RNA, 19 nt, Artificial Sequence
  Description of Artificial Sequence: Synthetic oligonucleotide
acuggccccuggaagucau

SEQ ID NO: 899165 - RNA, 19 nt, Artificial Sequence
  Description of Artificial Sequence: Synthetic oligonucleotide
ccguaagauggggagucug

SEQ ID NO: 899166 - RNA, 19 nt, Artificial Sequence
  Description of Artificial Sequence: Synthetic oligonucleotide
cuuggccgaguaucugcua

SEQ ID NO: 899167 - RNA, 19 nt, Artificial Sequence
  Description of Artificial Sequence: Synthetic oligonucleotide
cgaaauaguguugauaauu

SEQ ID NO: 899168 - RNA, 19 nt, Artificial Sequence
  Description of Artificial Sequence: Synthetic oligonucleotide
agcugggguucuagcagau

SEQ ID NO: 899169 - RNA, 19 nt, Artificial Sequence
  Description of Artificial Sequence: Synthetic oligonucleotide
uggcggcaccgcagugacu

SEQ ID NO: 899170 - RNA, 19 nt, Artificial Sequence
  Description of Artificial Sequence: Synthetic oligonucleotide
ucccgaggccccgcagcca

SEQ ID NO: 899171 - RNA, 19 nt, Artificial Sequence
  Description of Artificial Sequence: Synthetic oligonucleotide
ccucauuaaggcugcccaa

SEQ ID NO: 899172 - RNA, 19 nt, Artificial Sequence
  Description of Artificial Sequence: Synthetic oligonucleotide
gcaaggugugcagugggcu

SEQ ID NO: 899173 - RNA, 19 nt, Artificial Sequence
  Description of Artificial Sequence: Synthetic oligonucleotide
augcgacuuacagcugcuu

SEQ ID NO: 899174 - RNA, 19 nt, Artificial Sequence
  Description of Artificial Sequence: Synthetic oligonucleotide
acccgggcaguuggcucag

SEQ ID NO: 899175 - RNA, 19 nt, Artificial Sequence
  Description of Artificial Sequence: Synthetic oligonucleotide
cagcguugccuugaugugu

SEQ ID NO: 899176 - RNA, 19 nt, Artificial Sequence
  Description of Artificial Sequence: Synthetic oligonucleotide
gcgaaauaguguugauaau

SEQ ID NO: 899177 - RNA, 19 nt, Artificial Sequence
  Description of Artificial Sequence: Synthetic oligonucleotide
cagaucugccacccagcgu

SEQ ID NO: 899178 - RNA, 19 nt, Artificial Sequence
  Description of Artificial Sequence: Synthetic oligonucleotide
ggccgaguaucugcuagaa

SEQ ID NO: 899179 - RNA, 19 nt, Artificial Sequence
  Description of Artificial Sequence: Synthetic oligonucleotide
gcaagccccacagcaaugu

SEQ ID NO: 899180 - RNA, 19 nt, Artificial Sequence
  Description of Artificial Sequence: Synthetic oligonucleotide
uccgcucacccgggcaguu

SEQ ID NO: 899181 - RNA, 19 nt, Artificial Sequence
  Description of Artificial Sequence: Synthetic oligonucleotide
gcggcaccgcagugacugg

SEQ ID NO: 899182 - RNA, 19 nt, Artificial Sequence
  Description of Artificial Sequence: Synthetic oligonucleotide
ggcugcccaaguaggcuuc

SEQ ID NO: 899183 - RNA, 19 nt, Artificial Sequence
  Description of Artificial Sequence: Synthetic oligonucleotide
cagaugcugcucagcaguu

SEQ ID NO: 899184 - RNA, 19 nt, Artificial Sequence
  Description of Artificial Sequence: Synthetic oligonucleotide
cccucgguuuguuugcaua

SEQ ID NO: 899185 - RNA, 19 nt, Artificial Sequence
  Description of Artificial Sequence: Synthetic oligonucleotide
acugaccggcauacacaua

SEQ ID NO: 899186 - RNA, 19 nt, Artificial Sequence
  Description of Artificial Sequence: Synthetic oligonucleotide
ggggcccguaagaugggga

SEQ ID NO: 899187 - RNA, 19 nt, Artificial Sequence
  Description of Artificial Sequence: Synthetic oligonucleotide
gcucgcaggaugcgacuua

SEQ ID NO: 899188 - RNA, 19 nt, Artificial Sequence
  Description of Artificial Sequence: Synthetic oligonucleotide
  modified_base (19)..(19): a, c, u, g, unknown or other
ccaggcugguagugguagn

SEQ ID NO: 899189 - RNA, 19 nt, Artificial Sequence
  Description of Artificial Sequence: Synthetic oligonucleotide
accccugggcucgcaggau

SEQ ID NO: 899190 - RNA, 19 nt, Artificial Sequence
  Description of Artificial Sequence: Synthetic oligonucleotide
gcacaggaacuggcggcac

SEQ ID NO: 899191 - RNA, 19 nt, Artificial Sequence
  Description of Artificial Sequence: Synthetic oligonucleotide
ggaggggagcauggugcuc

SEQ ID NO: 899192 - RNA, 19 nt, Artificial Sequence
  Description of Artificial Sequence: Synthetic oligonucleotide
cagcacugucccucgguuu

SEQ ID NO: 899193 - RNA, 19 nt, Artificial Sequence
  Description of Artificial Sequence: Synthetic oligonucleotide
cugcuagaagccccacauu

SEQ ID NO: 899194 - RNA, 19 nt, Artificial Sequence
  Description of Artificial Sequence: Synthetic oligonucleotide
gaggcccgugucuguggau

SEQ ID NO: 899195 - RNA, 19 nt, Artificial Sequence
  Description of Artificial Sequence: Synthetic oligonucleotide
cccuaauuuucuacaccau

SEQ ID NO: 899196 - RNA, 19 nt, Artificial Sequence
  Description of Artificial Sequence: Synthetic oligonucleotide
ccgggcaguuggcucagga

SEQ ID NO: 899197 - RNA, 19 nt, Artificial Sequence
  Description of Artificial Sequence: Synthetic oligonucleotide
cgguggggcucuuccuuug

SEQ ID NO: 899198 - RNA, 19 nt, Artificial Sequence
  Description of Artificial Sequence: Synthetic oligonucleotide
cagcgguggggcucuuccu

SEQ ID NO: 899199 - RNA, 19 nt, Artificial Sequence
  Description of Artificial Sequence: Synthetic oligonucleotide
ccaagacucggagucucua

SEQ ID NO: 899200 - RNA, 19 nt, Artificial Sequence
  Description of Artificial Sequence: Synthetic oligonucleotide
cagaagccuucgagccugu

SEQ ID NO: 899201 - RNA, 19 nt, Artificial Sequence
  Description of Artificial Sequence: Synthetic oligonucleotide
cggcauacacauauuucau

SEQ ID NO: 899202 - RNA, 19 nt, Artificial Sequence
  Description of Artificial Sequence: Synthetic oligonucleotide
cacucccuuggccgaguau

SEQ ID NO: 899203 - RNA, 19 nt, Artificial Sequence
  Description of Artificial Sequence: Synthetic oligonucleotide
ggcccguaagauggggagu

SEQ ID NO: 899204 - RNA, 19 nt, Artificial Sequence
  Description of Artificial Sequence: Synthetic oligonucleotide
gggccucauuaaggcugcc

SEQ ID NO: 899205 - RNA, 19 nt, Artificial Sequence
  Description of Artificial Sequence: Synthetic oligonucleotide
ggcucgggagcagccccuc

SEQ ID NO: 899206 - RNA, 19 nt, Artificial Sequence
  Description of Artificial Sequence: Synthetic oligonucleotide
ccgcagccagggagaguac

SEQ ID NO: 899207 - RNA, 19 nt, Artificial Sequence
  Description of Artificial Sequence: Synthetic oligonucleotide
cgagaaacgccagcuccaa

SEQ ID NO: 899208 - RNA, 19 nt, Artificial Sequence
  Description of Artificial Sequence: Synthetic oligonucleotide
ccucuagacuucagguguu

SEQ ID NO: 899209 - RNA, 19 nt, Artificial Sequence
  Description of Artificial Sequence: Synthetic oligonucleotide
cacccagcguugccuugau

SEQ ID NO: 899210 - RNA, 19 nt, Artificial Sequence
  Description of Artificial Sequence: Synthetic oligonucleotide
cuccgcucacccgggcagu

SEQ ID NO: 899211 - RNA, 19 nt, Artificial Sequence
  Description of Artificial Sequence: Synthetic oligonucleotide
guguuguguuggggcccgu

SEQ ID NO: 899212 - RNA, 19 nt, Artificial Sequence
  Description of Artificial Sequence: Synthetic oligonucleotide
gcccgugucuguggaugcu

SEQ ID NO: 899213 - RNA, 19 nt, Artificial Sequence
  Description of Artificial Sequence: Synthetic oligonucleotide
cccguaagauggggagucu

SEQ ID NO: 899214 - RNA, 19 nt, Artificial Sequence
  Description of Artificial Sequence: Synthetic oligonucleotide
ccgcccacugcugccugaa

SEQ ID NO: 899215 - RNA, 19 nt, Artificial Sequence
  Description of Artificial Sequence: Synthetic oligonucleotide
gcguugccuugauguguuu

SEQ ID NO: 899216 - RNA, 19 nt, Artificial Sequence
  Description of Artificial Sequence: Synthetic oligonucleotide
cgcccacugcugccugaaa

SEQ ID NO: 899217 - RNA, 19 nt, Artificial Sequence
  Description of Artificial Sequence: Synthetic oligonucleotide
aagaauuagaucuucaauc

SEQ ID NO: 899218 - RNA, 19 nt, Artificial Sequence
  Description of Artificial Sequence: Synthetic oligonucleotide
aaugagauaucauguaugc

SEQ ID NO: 899219 - RNA, 19 nt, Artificial Sequence
  Description of Artificial Sequence: Synthetic oligonucleotide
ucugauuacaaaaugagca

SEQ ID NO: 899220 - RNA, 19 nt, Artificial Sequence
  Description of Artificial Sequence: Synthetic oligonucleotide
ugaacaauuacacugaagu

SEQ ID NO: 899221 - RNA, 19 nt, Artificial Sequence
  Description of Artificial Sequence: Synthetic oligonucleotide
aauauuggacuccagauca

SEQ ID NO: 899222 - RNA, 19 nt, Artificial Sequence
  Description of Artificial Sequence: Synthetic oligonucleotide
aaauacaugaggcccaauc

SEQ ID NO: 899223 - RNA, 19 nt, Artificial Sequence
  Description of Artificial Sequence: Synthetic oligonucleotide
uauaugauuauaaaaggaa

SEQ ID NO: 899224 - RNA, 19 nt, Artificial Sequence
  Description of Artificial Sequence: Synthetic oligonucleotide
gauacagucgcacucaaag

SEQ ID NO: 899225 - RNA, 19 nt, Artificial Sequence
  Description of Artificial Sequence: Synthetic oligonucleotide
aauuagaucuucaaucagg

SEQ ID NO: 899226 - RNA, 19 nt, Artificial Sequence
  Description of Artificial Sequence: Synthetic oligonucleotide
auuguaaugguucugcucu

SEQ ID NO: 899227 - RNA, 19 nt, Artificial Sequence
  Description of Artificial Sequence: Synthetic oligonucleotide
aguuuguuaauauuggacu

SEQ ID NO: 899228 - RNA, 19 nt, Artificial Sequence
  Description of Artificial Sequence: Synthetic oligonucleotide
guuucuccgacucugaggg

SEQ ID NO: 899229 - RNA, 19 nt, Artificial Sequence
  Description of Artificial Sequence: Synthetic oligonucleotide
uguaguuaauuuauaauau

SEQ ID NO: 899230 - RNA, 19 nt, Artificial Sequence
  Description of Artificial Sequence: Synthetic oligonucleotide
aguaaaguuucuccgacuc

SEQ ID NO: 899231 - RNA, 19 nt, Artificial Sequence
  Description of Artificial Sequence: Synthetic oligonucleotide
aauacaugaggcccaauca

SEQ ID NO: 899232 - RNA, 19 nt, Artificial Sequence
  Description of Artificial Sequence: Synthetic oligonucleotide
uuugcauuccugcuugugg

SEQ ID NO: 899233 - RNA, 19 nt, Artificial Sequence
  Description of Artificial Sequence: Synthetic oligonucleotide
uucggcauugagaacaccg

SEQ ID NO: 899234 - RNA, 19 nt, Artificial Sequence
  Description of Artificial Sequence: Synthetic oligonucleotide
augauuauaaaaggaaagg

SEQ ID NO: 899235 - RNA, 19 nt, Artificial Sequence
  Description of Artificial Sequence: Synthetic oligonucleotide
cauuuacccacauagacac

SEQ ID NO: 899236 - RNA, 19 nt, Artificial Sequence
  Description of Artificial Sequence: Synthetic oligonucleotide
aaggcguucgaucagggug

SEQ ID NO: 899237 - RNA, 19 nt, Artificial Sequence
  Description of Artificial Sequence: Synthetic oligonucleotide
uaugcaguuaaaaugcuau

SEQ ID NO: 899238 - RNA, 19 nt, Artificial Sequence
  Description of Artificial Sequence: Synthetic oligonucleotide
uuaauauuggacuccagau

SEQ ID NO: 899239 - RNA, 19 nt, Artificial Sequence
  Description of Artificial Sequence: Synthetic oligonucleotide
ugauucagcagagacaugc

SEQ ID NO: 899240 - RNA, 19 nt, Artificial Sequence
  Description of Artificial Sequence: Synthetic oligonucleotide
auaucaucagucaucaggg

SEQ ID NO: 899241 - RNA, 19 nt, Artificial Sequence
  Description of Artificial Sequence: Synthetic oligonucleotide
uacagucgcacucaaagca

SEQ ID NO: 899242 - RNA, 19 nt, Artificial Sequence
  Description of Artificial Sequence: Synthetic oligonucleotide
gagagagagagagagagag

SEQ ID NO: 899243 - RNA, 19 nt, Artificial Sequence
  Description of Artificial Sequence: Synthetic oligonucleotide
ucaucacuugcacaccucg

SEQ ID NO: 899244 - RNA, 19 nt, Artificial Sequence
  Description of Artificial Sequence: Synthetic oligonucleotide
acaauaaggcguucgauca

SEQ ID NO: 899245 - RNA, 19 nt, Artificial Sequence
  Description of Artificial Sequence: Synthetic oligonucleotide
ugcuauuaaagccaacagu

SEQ ID NO: 899246 - RNA, 19 nt, Artificial Sequence
  Description of Artificial Sequence: Synthetic oligonucleotide
aauaaggcguucgaucagg

SEQ ID NO: 899247 - RNA, 19 nt, Artificial Sequence
  Description of Artificial Sequence: Synthetic oligonucleotide
ucacaaauacaugaggccc

SEQ ID NO: 899248 - RNA, 19 nt, Artificial Sequence
  Description of Artificial Sequence: Synthetic oligonucleotide
uccuguaucucuucucucg

SEQ ID NO: 899249 - RNA, 19 nt, Artificial Sequence
  Description of Artificial Sequence: Synthetic oligonucleotide
gacgggauggcuuccaggg

SEQ ID NO: 899250 - RNA, 19 nt, Artificial Sequence
  Description of Artificial Sequence: Synthetic oligonucleotide
auaaugucgaaggccagcc

SEQ ID NO: 899251 - RNA, 19 nt, Artificial Sequence
  Description of Artificial Sequence: Synthetic oligonucleotide
aaaagauccgguacggcuc

SEQ ID NO: 899252 - RNA, 19 nt, Artificial Sequence
  Description of Artificial Sequence: Synthetic oligonucleotide
auacagucgcacucaaagc

SEQ ID NO: 899253 - RNA, 19 nt, Artificial Sequence
  Description of Artificial Sequence: Synthetic oligonucleotide
gagagaauuuauuguaaug

SEQ ID NO: 899254 - RNA, 19 nt, Artificial Sequence
  Description of Artificial Sequence: Synthetic oligonucleotide
uaagaggugaggcccauug

SEQ ID NO: 899255 - RNA, 19 nt, Artificial Sequence
  Description of Artificial Sequence: Synthetic oligonucleotide
gaaugagagaauuguuugc

SEQ ID NO: 899256 - RNA, 19 nt, Artificial Sequence
  Description of Artificial Sequence: Synthetic oligonucleotide
auauguaguuaauuuauaa

SEQ ID NO: 899257 - RNA, 19 nt, Artificial Sequence
  Description of Artificial Sequence: Synthetic oligonucleotide
cauugaacacaauugagca

SEQ ID NO: 899258 - RNA, 19 nt, Artificial Sequence
  Description of Artificial Sequence: Synthetic oligonucleotide
aucuccgcauugcagaugg

SEQ ID NO: 899259 - RNA, 19 nt, Artificial Sequence
  Description of Artificial Sequence: Synthetic oligonucleotide
gaauuagaucuucaaucag

SEQ ID NO: 899260 - RNA, 19 nt, Artificial Sequence
  Description of Artificial Sequence: Synthetic oligonucleotide
agggcaagcugccucaggc

SEQ ID NO: 899261 - RNA, 19 nt, Artificial Sequence
  Description of Artificial Sequence: Synthetic oligonucleotide
aucugauuacaaaaugagc

SEQ ID NO: 899262 - RNA, 19 nt, Artificial Sequence
  Description of Artificial Sequence: Synthetic oligonucleotide
caguauuuggcaauucggc

SEQ ID NO: 899263 - RNA, 19 nt, Artificial Sequence
  Description of Artificial Sequence: Synthetic oligonucleotide
acgaucuacagaaugagag

SEQ ID NO: 899264 - RNA, 19 nt, Artificial Sequence
  Description of Artificial Sequence: Synthetic oligonucleotide
ugaguaaaguuucuccgac

SEQ ID NO: 899265 - RNA, 19 nt, Artificial Sequence
  Description of Artificial Sequence: Synthetic oligonucleotide
guugaugucgggaagccgg

SEQ ID NO: 899266 - RNA, 19 nt, Artificial Sequence
  Description of Artificial Sequence: Synthetic oligonucleotide
gugagagagagagagagag

SEQ ID NO: 899267 - RNA, 19 nt, Artificial Sequence
  Description of Artificial Sequence: Synthetic oligonucleotide
aguauuuggcaauucggca

SEQ ID NO: 899268 - RNA, 19 nt, Artificial Sequence
  Description of Artificial Sequence: Synthetic oligonucleotide
aaugucagggcaagcugcc

SEQ ID NO: 899269 - RNA, 19 nt, Artificial Sequence
  Description of Artificial Sequence: Synthetic oligonucleotide
aauuacacugaaguuuugu

SEQ ID NO: 899270 - RNA, 19 nt, Artificial Sequence
  Description of Artificial Sequence: Synthetic oligonucleotide
ucuagcauccccagguuga

SEQ ID NO: 899271 - RNA, 19 nt, Artificial Sequence
  Description of Artificial Sequence: Synthetic oligonucleotide
acuugcacaccucggacgg

SEQ ID NO: 899272 - RNA, 19 nt, Artificial Sequence
  Description of Artificial Sequence: Synthetic oligonucleotide
cauauuugcucaucacccg

SEQ ID NO: 899273 - RNA, 19 nt, Artificial Sequence
  Description of Artificial Sequence: Synthetic oligonucleotide
gucacaaauacaugaggcc

SEQ ID NO: 899274 - RNA, 19 nt, Artificial Sequence
  Description of Artificial Sequence: Synthetic oligonucleotide
ucacccgucagcauaucag

SEQ ID NO: 899275 - RNA, 19 nt, Artificial Sequence
  Description of Artificial Sequence: Synthetic oligonucleotide
auaucauguaugcaguuaa

SEQ ID NO: 899276 - RNA, 19 nt, Artificial Sequence
  Description of Artificial Sequence: Synthetic oligonucleotide
gaguuuguuaauauuggac

SEQ ID NO: 899277 - RNA, 19 nt, Artificial Sequence
  Description of Artificial Sequence: Synthetic oligonucleotide
ugaguuuguuaauauugga

SEQ ID NO: 899278 - RNA, 19 nt, Artificial Sequence
  Description of Artificial Sequence: Synthetic oligonucleotide
augcuauuaaagccaacag

SEQ ID NO: 899279 - RNA, 19 nt, Artificial Sequence
  Description of Artificial Sequence: Synthetic oligonucleotide
acguaguaagaggugaggc

SEQ ID NO: 899280 - RNA, 19 nt, Artificial Sequence
  Description of Artificial Sequence: Synthetic oligonucleotide
uuucuuaucuucugugagu

SEQ ID NO: 899281 - RNA, 19 nt, Artificial Sequence
  Description of Artificial Sequence: Synthetic oligonucleotide
uuugcuaacuguccuccca

SEQ ID NO: 899282 - RNA, 19 nt, Artificial Sequence
  Description of Artificial Sequence: Synthetic oligonucleotide
gugugugagagagagagag

SEQ ID NO: 899283 - RNA, 19 nt, Artificial Sequence
  Description of Artificial Sequence: Synthetic oligonucleotide
gagaauuguuugcuaacug

SEQ ID NO: 899284 - RNA, 19 nt, Artificial Sequence
  Description of Artificial Sequence: Synthetic oligonucleotide
guuuguuaauauuggacuc

SEQ ID NO: 899285 - RNA, 19 nt, Artificial Sequence
  Description of Artificial Sequence: Synthetic oligonucleotide
cagauggugaacgaguugc

SEQ ID NO: 899286 - RNA, 19 nt, Artificial Sequence
  Description of Artificial Sequence: Synthetic oligonucleotide
ucgugaaaugcugaaaugu

SEQ ID NO: 899287 - RNA, 19 nt, Artificial Sequence
  Description of Artificial Sequence: Synthetic oligonucleotide
acaauugagcaguuggggu

SEQ ID NO: 899288 - RNA, 19 nt, Artificial Sequence
  Description of Artificial Sequence: Synthetic oligonucleotide
ucagggaaguugaaaauua

SEQ ID NO: 899289 - RNA, 19 nt, Artificial Sequence
  Description of Artificial Sequence: Synthetic oligonucleotide
aacagugugugugugugug

SEQ ID NO: 899290 - RNA, 19 nt, Artificial Sequence
  Description of Artificial Sequence: Synthetic oligonucleotide
gugugagagagagagagag

SEQ ID NO: 899291 - RNA, 19 nt, Artificial Sequence
  Description of Artificial Sequence: Synthetic oligonucleotide
caagacgaucuacagaaug

SEQ ID NO: 899292 - RNA, 19 nt, Artificial Sequence
  Description of Artificial Sequence: Synthetic oligonucleotide
augaucgccuggcacaggg

SEQ ID NO: 899293 - RNA, 19 nt, Artificial Sequence
  Description of Artificial Sequence: Synthetic oligonucleotide
aagacgaucuacagaauga

SEQ ID NO: 899294 - RNA, 19 nt, Artificial Sequence
  Description of Artificial Sequence: Synthetic oligonucleotide
gauguugaugucgggaagc

SEQ ID NO: 899295 - RNA, 19 nt, Artificial Sequence
  Description of Artificial Sequence: Synthetic oligonucleotide
uggcaauucggcauugaga

SEQ ID NO: 899296 - RNA, 19 nt, Artificial Sequence
  Description of Artificial Sequence: Synthetic oligonucleotide
caggccaacgccaaccucc

SEQ ID NO: 899297 - RNA, 19 nt, Artificial Sequence
  Description of Artificial Sequence: Synthetic oligonucleotide
ucuaccacgaacaggucuu

SEQ ID NO: 899298 - RNA, 19 nt, Artificial Sequence
  Description of Artificial Sequence: Synthetic oligonucleotide
cacaauugagcaguugggg

SEQ ID NO: 899299 - RNA, 19 nt, Artificial Sequence
  Description of Artificial Sequence: Synthetic oligonucleotide
uacaaugagauaucaugua

SEQ ID NO: 899300 - RNA, 19 nt, Artificial Sequence
  Description of Artificial Sequence: Synthetic oligonucleotide
gugugugugugugagagag

SEQ ID NO: 899301 - RNA, 19 nt, Artificial Sequence
  Description of Artificial Sequence: Synthetic oligonucleotide
ccauugaacacaauugagc

SEQ ID NO: 899302 - RNA, 19 nt, Artificial Sequence
  Description of Artificial Sequence: Synthetic oligonucleotide
aauugagcaguugggguca

SEQ ID NO: 899303 - RNA, 19 nt, Artificial Sequence
  Description of Artificial Sequence: Synthetic oligonucleotide
ugucguguguuuggcaucg

SEQ ID NO: 899304 - RNA, 19 nt, Artificial Sequence
  Description of Artificial Sequence: Synthetic oligonucleotide
caauugagcaguugggguc

SEQ ID NO: 899305 - RNA, 19 nt, Artificial Sequence
  Description of Artificial Sequence: Synthetic oligonucleotide
gagagagagagagagagaa

SEQ ID NO: 899306 - RNA, 19 nt, Artificial Sequence
  Description of Artificial Sequence: Synthetic oligonucleotide
uguuuggcaucggauacag

SEQ ID NO: 899307 - RNA, 19 nt, Artificial Sequence
  Description of Artificial Sequence: Synthetic oligonucleotide
ugcaguuaaaaugcuauua

SEQ ID NO: 899308 - RNA, 19 nt, Artificial Sequence
  Description of Artificial Sequence: Synthetic oligonucleotide
ucggcauugagaacaccgc

SEQ ID NO: 899309 - RNA, 19 nt, Artificial Sequence
  Description of Artificial Sequence: Synthetic oligonucleotide
guacuggucccucagcugc

SEQ ID NO: 899310 - RNA, 19 nt, Artificial Sequence
  Description of Artificial Sequence: Synthetic oligonucleotide
gugaacgaguugcagauca

SEQ ID NO: 899311 - RNA, 19 nt, Artificial Sequence
  Description of Artificial Sequence: Synthetic oligonucleotide
gaucgccuggcacagggcc

SEQ ID NO: 899312 - RNA, 19 nt, Artificial Sequence
  Description of Artificial Sequence: Synthetic oligonucleotide
aguuucacgaugacucugg

SEQ ID NO: 899313 - RNA, 19 nt, Artificial Sequence
  Description of Artificial Sequence: Synthetic oligonucleotide
ggcaauucggcauugagaa

SEQ ID NO: 899314 - RNA, 19 nt, Artificial Sequence
  Description of Artificial Sequence: Synthetic oligonucleotide
auacaugaggcccaaucaa

SEQ ID NO: 899315 - RNA, 19 nt, Artificial Sequence
  Description of Artificial Sequence: Synthetic oligonucleotide
aauuacaaugagauaucau

SEQ ID NO: 899316 - RNA, 19 nt, Artificial Sequence
  Description of Artificial Sequence: Synthetic oligonucleotide
cacugcacguaguaagagg

SEQ ID NO: 899317 - RNA, 19 nt, Artificial Sequence
  Description of Artificial Sequence: Synthetic oligonucleotide
uacaugaggcccaaucaau

SEQ ID NO: 899318 - RNA, 19 nt, Artificial Sequence
  Description of Artificial Sequence: Synthetic oligonucleotide
aacuguccucccaagguag

SEQ ID NO: 899319 - RNA, 19 nt, Artificial Sequence
  Description of Artificial Sequence: Synthetic oligonucleotide
gcagcgaucgcacaccacg

SEQ ID NO: 899320 - RNA, 19 nt, Artificial Sequence
  Description of Artificial Sequence: Synthetic oligonucleotide
aacgaguugcagaucaccu

SEQ ID NO: 899321 - RNA, 19 nt, Artificial Sequence
  Description of Artificial Sequence: Synthetic oligonucleotide
gugugugugugugugagag

SEQ ID NO: 899322 - RNA, 19 nt, Artificial Sequence
  Description of Artificial Sequence: Synthetic oligonucleotide
agagaauuguuugcuaacu

SEQ ID NO: 899323 - RNA, 19 nt, Artificial Sequence
  Description of Artificial Sequence: Synthetic oligonucleotide
uuaugaucgccuggcacag

SEQ ID NO: 899324 - RNA, 19 nt, Artificial Sequence
  Description of Artificial Sequence: Synthetic oligonucleotide
uuuucuacaggagggucac

SEQ ID NO: 899325 - RNA, 19 nt, Artificial Sequence
  Description of Artificial Sequence: Synthetic oligonucleotide
agaugaacaauuacacuga

SEQ ID NO: 899326 - RNA, 19 nt, Artificial Sequence
  Description of Artificial Sequence: Synthetic oligonucleotide
acauuuacccacauagaca

SEQ ID NO: 899327 - RNA, 19 nt, Artificial Sequence
  Description of Artificial Sequence: Synthetic oligonucleotide
uacgccaagggaucgcagc

SEQ ID NO: 899328 - RNA, 19 nt, Artificial Sequence
  Description of Artificial Sequence: Synthetic oligonucleotide
aaguuucacgaugacucug

SEQ ID NO: 899329 - RNA, 19 nt, Artificial Sequence
  Description of Artificial Sequence: Synthetic oligonucleotide
agacgaucuacagaaugag

SEQ ID NO: 899330 - RNA, 19 nt, Artificial Sequence
  Description of Artificial Sequence: Synthetic oligonucleotide
ugugagagagagagagaga

SEQ ID NO: 899331 - RNA, 19 nt, Artificial Sequence
  Description of Artificial Sequence: Synthetic oligonucleotide
agcaucacagguuguguga

SEQ ID NO: 899332 - RNA, 19 nt, Artificial Sequence
  Description of Artificial Sequence: Synthetic oligonucleotide
acugcacguaguaagaggu

SEQ ID NO: 899333 - RNA, 19 nt, Artificial Sequence
  Description of Artificial Sequence: Synthetic oligonucleotide
gaccacaauaaggcguucg

SEQ ID NO: 899334 - RNA, 19 nt, Artificial Sequence
  Description of Artificial Sequence: Synthetic oligonucleotide
uauuugcucaucacccguc

SEQ ID NO: 899335 - RNA, 19 nt, Artificial Sequence
  Description of Artificial Sequence: Synthetic oligonucleotide
agaggacaagacgaucuac

SEQ ID NO: 899336 - RNA, 19 nt, Artificial Sequence
  Description of Artificial Sequence: Synthetic oligonucleotide
ggauaucugggcuugcagc

SEQ ID NO: 899337 - RNA, 19 nt, Artificial Sequence
  Description of Artificial Sequence: Synthetic oligonucleotide
aggcguucgaucagggugc

SEQ ID NO: 899338 - RNA, 19 nt, Artificial Sequence
  Description of Artificial Sequence: Synthetic oligonucleotide
acgccaagggaucgcagcg

SEQ ID NO: 899339 - RNA, 19 nt, Artificial Sequence
  Description of Artificial Sequence: Synthetic oligonucleotide
ugagagagagagagagaga

SEQ ID NO: 899340 - RNA, 19 nt, Artificial Sequence
  Description of Artificial Sequence: Synthetic oligonucleotide
cacgcagcccauuuccacg

SEQ ID NO: 899341 - RNA, 19 nt, Artificial Sequence
  Description of Artificial Sequence: Synthetic oligonucleotide
uuccauauuugcucaucac

SEQ ID NO: 899342 - RNA, 19 nt, Artificial Sequence
  Description of Artificial Sequence: Synthetic oligonucleotide
aagggaucgcagcggaaga

SEQ ID NO: 899343 - RNA, 19 nt, Artificial Sequence
  Description of Artificial Sequence: Synthetic oligonucleotide
agcaguacuggucccucag

SEQ ID NO: 899344 - RNA, 19 nt, Artificial Sequence
  Description of Artificial Sequence: Synthetic oligonucleotide
uaacuguccucccaaggua

SEQ ID NO: 899345 - RNA, 19 nt, Artificial Sequence
  Description of Artificial Sequence: Synthetic oligonucleotide
ugugugagagagagagaga

SEQ ID NO: 899346 - RNA, 19 nt, Artificial Sequence
  Description of Artificial Sequence: Synthetic oligonucleotide
cucgugaaaugcugaaaug

SEQ ID NO: 899347 - RNA, 19 nt, Artificial Sequence
  Description of Artificial Sequence: Synthetic oligonucleotide
guaaugguucugcucuacc

SEQ ID NO: 899348 - RNA, 19 nt, Artificial Sequence
  Description of Artificial Sequence: Synthetic oligonucleotide
accacaauaaggcguucga

SEQ ID NO: 899349 - RNA, 19 nt, Artificial Sequence
  Description of Artificial Sequence: Synthetic oligonucleotide
uaggauuuauguccauaau

SEQ ID NO: 899350 - RNA, 19 nt, Artificial Sequence
  Description of Artificial Sequence: Synthetic oligonucleotide
uguugaugucgggaagccg

SEQ ID NO: 899351 - RNA, 19 nt, Artificial Sequence
  Description of Artificial Sequence: Synthetic oligonucleotide
gcaguauuuggcaauucgg

SEQ ID NO: 899352 - RNA, 19 nt, Artificial Sequence
  Description of Artificial Sequence: Synthetic oligonucleotide
agaauuuauuguaaugguu

SEQ ID NO: 899353 - RNA, 19 nt, Artificial Sequence
  Description of Artificial Sequence: Synthetic oligonucleotide
ucgauuucccgcacugcac

SEQ ID NO: 899354 - RNA, 19 nt, Artificial Sequence
  Description of Artificial Sequence: Synthetic oligonucleotide
uaguaagaggugaggccca

SEQ ID NO: 899355 - RNA, 19 nt, Artificial Sequence
  Description of Artificial Sequence: Synthetic oligonucleotide
uugcuaacuguccucccaa

SEQ ID NO: 899356 - RNA, 19 nt, Artificial Sequence
  Description of Artificial Sequence: Synthetic oligonucleotide
aucagcauccuugucgugu

SEQ ID NO: 899357 - RNA, 19 nt, Artificial Sequence
  Description of Artificial Sequence: Synthetic oligonucleotide
aacaccgcaucagcuuuuc

SEQ ID NO: 899358 - RNA, 19 nt, Artificial Sequence
  Description of Artificial Sequence: Synthetic oligonucleotide
acaguguacgccaagggau

SEQ ID NO: 899359 - RNA, 19 nt, Artificial Sequence
  Description of Artificial Sequence: Synthetic oligonucleotide
caagggaucgcagcggaag

SEQ ID NO: 899360 - RNA, 19 nt, Artificial Sequence
  Description of Artificial Sequence: Synthetic oligonucleotide
acgcagcccauuuccacgg

SEQ ID NO: 899361 - RNA, 19 nt, Artificial Sequence
  Description of Artificial Sequence: Synthetic oligonucleotide
guagauguugaugucggga

SEQ ID NO: 899362 - RNA, 19 nt, Artificial Sequence
  Description of Artificial Sequence: Synthetic oligonucleotide
uccgguacggcuccauggu

SEQ ID NO: 899363 - RNA, 19 nt, Artificial Sequence
  Description of Artificial Sequence: Synthetic oligonucleotide
agaacaccgcaucagcuuu

SEQ ID NO: 899364 - RNA, 19 nt, Artificial Sequence
  Description of Artificial Sequence: Synthetic oligonucleotide
ucccaagguaggauuuaug

SEQ ID NO: 899365 - RNA, 19 nt, Artificial Sequence
  Description of Artificial Sequence: Synthetic oligonucleotide
aucacagguugugugacca

SEQ ID NO: 899366 - RNA, 19 nt, Artificial Sequence
  Description of Artificial Sequence: Synthetic oligonucleotide
ugugugugagagagagaga

SEQ ID NO: 899367 - RNA, 19 nt, Artificial Sequence
  Description of Artificial Sequence: Synthetic oligonucleotide
gaucgcacaccacgccgcg

SEQ ID NO: 899368 - RNA, 19 nt, Artificial Sequence
  Description of Artificial Sequence: Synthetic oligonucleotide
caauaaggcguucgaucag

SEQ ID NO: 899369 - RNA, 19 nt, Artificial Sequence
  Description of Artificial Sequence: Synthetic oligonucleotide
cuuccauauuugcucauca

SEQ ID NO: 899370 - RNA, 19 nt, Artificial Sequence
  Description of Artificial Sequence: Synthetic oligonucleotide
gcuaacuguccucccaagg

SEQ ID NO: 899371 - RNA, 19 nt, Artificial Sequence
  Description of Artificial Sequence: Synthetic oligonucleotide
ugcugcuuaugaucgccug

SEQ ID NO: 899372 - RNA, 19 nt, Artificial Sequence
  Description of Artificial Sequence: Synthetic oligonucleotide
uucugugaguuuguuaaua

SEQ ID NO: 899373 - RNA, 19 nt, Artificial Sequence
  Description of Artificial Sequence: Synthetic oligonucleotide
aguguacgccaagggaucg

SEQ ID NO: 899374 - RNA, 19 nt, Artificial Sequence
  Description of Artificial Sequence: Synthetic oligonucleotide
ucggauacagucgcacuca

SEQ ID NO: 899375 - RNA, 19 nt, Artificial Sequence
  Description of Artificial Sequence: Synthetic oligonucleotide
auuuccacggucggcgguc

SEQ ID NO: 899376 - RNA, 19 nt, Artificial Sequence
  Description of Artificial Sequence: Synthetic oligonucleotide
uguaaugguucugcucuac

SEQ ID NO: 899377 - RNA, 19 nt, Artificial Sequence
  Description of Artificial Sequence: Synthetic oligonucleotide
cacguaguaagaggugagg

SEQ ID NO: 899378 - RNA, 19 nt, Artificial Sequence
  Description of Artificial Sequence: Synthetic oligonucleotide
ucacgaugacucuggccag

SEQ ID NO: 899379 - RNA, 19 nt, Artificial Sequence
  Description of Artificial Sequence: Synthetic oligonucleotide
ugaacgaguugcagaucac

SEQ ID NO: 899380 - RNA, 19 nt, Artificial Sequence
  Description of Artificial Sequence: Synthetic oligonucleotide
ugcgccuucagcucuucaa

SEQ ID NO: 899381 - RNA, 19 nt, Artificial Sequence
  Description of Artificial Sequence: Synthetic oligonucleotide
acgaacaggucuucucaca

SEQ ID NO: 899382 - RNA, 19 nt, Artificial Sequence
  Description of Artificial Sequence: Synthetic oligonucleotide
gugugugugugugugugag

SEQ ID NO: 899383 - RNA, 19 nt, Artificial Sequence
  Description of Artificial Sequence: Synthetic oligonucleotide
acagucgcacucaaagcag

SEQ ID NO: 899384 - RNA, 19 nt, Artificial Sequence
  Description of Artificial Sequence: Synthetic oligonucleotide
uccuuaggaggcucuuaug

SEQ ID NO: 899385 - RNA, 19 nt, Artificial Sequence
  Description of Artificial Sequence: Synthetic oligonucleotide
uguguguguguguguguga

SEQ ID NO: 899386 - RNA, 19 nt, Artificial Sequence
  Description of Artificial Sequence: Synthetic oligonucleotide
uaaugucgaaggccagccu

SEQ ID NO: 899387 - RNA, 19 nt, Artificial Sequence
  Description of Artificial Sequence: Synthetic oligonucleotide
uguacgccaagggaucgca

SEQ ID NO: 899388 - RNA, 19 nt, Artificial Sequence
  Description of Artificial Sequence: Synthetic oligonucleotide
cucgcuggucaucagcaug

SEQ ID NO: 899389 - RNA, 19 nt, Artificial Sequence
  Description of Artificial Sequence: Synthetic oligonucleotide
agagagagagagaauuuau

SEQ ID NO: 899390 - RNA, 19 nt, Artificial Sequence
  Description of Artificial Sequence: Synthetic oligonucleotide
gguugugugaccacaauaa

SEQ ID NO: 899391 - RNA, 19 nt, Artificial Sequence
  Description of Artificial Sequence: Synthetic oligonucleotide
gagagagagagagagaauu

SEQ ID NO: 899392 - RNA, 19 nt, Artificial Sequence
  Description of Artificial Sequence: Synthetic oligonucleotide
guugcagaucaccuuugca

SEQ ID NO: 899393 - RNA, 19 nt, Artificial Sequence
  Description of Artificial Sequence: Synthetic oligonucleotide
uacggcuccauggugcgca

SEQ ID NO: 899394 - RNA, 19 nt, Artificial Sequence
  Description of Artificial Sequence: Synthetic oligonucleotide
gcugcuuaugaucgccugg

SEQ ID NO: 899395 - RNA, 19 nt, Artificial Sequence
  Description of Artificial Sequence: Synthetic oligonucleotide
cacgaacaggucuucucac

SEQ ID NO: 899396 - RNA, 19 nt, Artificial Sequence
  Description of Artificial Sequence: Synthetic oligonucleotide
ugcuuaugaucgccuggca

SEQ ID NO: 899397 - RNA, 19 nt, Artificial Sequence
  Description of Artificial Sequence: Synthetic oligonucleotide
ugugugugugugagagaga

SEQ ID NO: 899398 - RNA, 19 nt, Artificial Sequence
  Description of Artificial Sequence: Synthetic oligonucleotide
cccauugaacacaauugag

SEQ ID NO: 899399 - RNA, 19 nt, Artificial Sequence
  Description of Artificial Sequence: Synthetic oligonucleotide
cucgauuucccgcacugca

SEQ ID NO: 899400 - RNA, 19 nt, Artificial Sequence
  Description of Artificial Sequence: Synthetic oligonucleotide
auaaggcguucgaucaggg

SEQ ID NO: 899401 - RNA, 19 nt, Artificial Sequence
  Description of Artificial Sequence: Synthetic oligonucleotide
ggcccauugaacacaauug

SEQ ID NO: 899402 - RNA, 19 nt, Artificial Sequence
  Description of Artificial Sequence: Synthetic oligonucleotide
gagagagagagagaauuua

SEQ ID NO: 899403 - RNA, 19 nt, Artificial Sequence
  Description of Artificial Sequence: Synthetic oligonucleotide
ugugugugugugugugugu

SEQ ID NO: 899404 - RNA, 19 nt, Artificial Sequence
  Description of Artificial Sequence: Synthetic oligonucleotide
uaaggcguucgaucagggu

SEQ ID NO: 899405 - RNA, 19 nt, Artificial Sequence
  Description of Artificial Sequence: Synthetic oligonucleotide
aucacccgucagcauauca

SEQ ID NO: 899406 - RNA, 19 nt, Artificial Sequence
  Description of Artificial Sequence: Synthetic oligonucleotide
gaacaauuacacugaaguu

SEQ ID NO: 899407 - RNA, 19 nt, Artificial Sequence
  Description of Artificial Sequence: Synthetic oligonucleotide
ugugugugugugugugaga

SEQ ID NO: 899408 - RNA, 19 nt, Artificial Sequence
  Description of Artificial Sequence: Synthetic oligonucleotide
ugugugugugugugagaga

SEQ ID NO: 899409 - RNA, 19 nt, Artificial Sequence
  Description of Artificial Sequence: Synthetic oligonucleotide
gaacacaauugagcaguug

SEQ ID NO: 899410 - RNA, 19 nt, Artificial Sequence
  Description of Artificial Sequence: Synthetic oligonucleotide
caguguacgccaagggauc

SEQ ID NO: 899411 - RNA, 19 nt, Artificial Sequence
  Description of Artificial Sequence: Synthetic oligonucleotide
guuucacgaugacucuggc

SEQ ID NO: 899412 - RNA, 19 nt, Artificial Sequence
  Description of Artificial Sequence: Synthetic oligonucleotide
ucgaucagggugcgccacc

SEQ ID NO: 899413 - RNA, 19 nt, Artificial Sequence
  Description of Artificial Sequence: Synthetic oligonucleotide
gguacggcuccauggugcg

SEQ ID NO: 899414 - RNA, 19 nt, Artificial Sequence
  Description of Artificial Sequence: Synthetic oligonucleotide
cguaguaagaggugaggcc

SEQ ID NO: 899415 - RNA, 19 nt, Artificial Sequence
  Description of Artificial Sequence: Synthetic oligonucleotide
agguagcagauggugagcu

SEQ ID NO: 899416 - RNA, 19 nt, Artificial Sequence
  Description of Artificial Sequence: Synthetic oligonucleotide
gguagauguugaugucggg

SEQ ID NO: 899417 - RNA, 19 nt, Artificial Sequence
  Description of Artificial Sequence: Synthetic oligonucleotide
gaggugaggcccauugaac

SEQ ID NO: 899418 - RNA, 19 nt, Artificial Sequence
  Description of Artificial Sequence: Synthetic oligonucleotide
gggcuugcagcuuuuaaga

SEQ ID NO: 899419 - RNA, 19 nt, Artificial Sequence
  Description of Artificial Sequence: Synthetic oligonucleotide
gugugugugugugugugug

SEQ ID NO: 899420 - RNA, 19 nt, Artificial Sequence
  Description of Artificial Sequence: Synthetic oligonucleotide
cuaacuguccucccaaggu

SEQ ID NO: 899421 - RNA, 19 nt, Artificial Sequence
  Description of Artificial Sequence: Synthetic oligonucleotide
agugugugugugugugugu

SEQ ID NO: 899422 - RNA, 19 nt, Artificial Sequence
  Description of Artificial Sequence: Synthetic oligonucleotide
augcaguuaaaaugcuauu

SEQ ID NO: 899423 - RNA, 19 nt, Artificial Sequence
  Description of Artificial Sequence: Synthetic oligonucleotide
ucggcggucgcgaacuuuu

SEQ ID NO: 899424 - RNA, 19 nt, Artificial Sequence
  Description of Artificial Sequence: Synthetic oligonucleotide
gacgaucuacagaaugaga

SEQ ID NO: 899425 - RNA, 19 nt, Artificial Sequence
  Description of Artificial Sequence: Synthetic oligonucleotide
aacugcuuugacagucaca

SEQ ID NO: 899426 - RNA, 19 nt, Artificial Sequence
  Description of Artificial Sequence: Synthetic oligonucleotide
uccuugucguguguuuggc

SEQ ID NO: 899427 - RNA, 19 nt, Artificial Sequence
  Description of Artificial Sequence: Synthetic oligonucleotide
auucggcauugagaacacc

SEQ ID NO: 899428 - RNA, 19 nt, Artificial Sequence
  Description of Artificial Sequence: Synthetic oligonucleotide
gcagaucaccuuugcaaag

SEQ ID NO: 899429 - RNA, 19 nt, Artificial Sequence
  Description of Artificial Sequence: Synthetic oligonucleotide
cagugugugugugugugug

SEQ ID NO: 899430 - RNA, 19 nt, Artificial Sequence
  Description of Artificial Sequence: Synthetic oligonucleotide
gggauaucugggcuugcag

SEQ ID NO: 899431 - RNA, 19 nt, Artificial Sequence
  Description of Artificial Sequence: Synthetic oligonucleotide
uugucguguguuuggcauc

SEQ ID NO: 899432 - RNA, 19 nt, Artificial Sequence
  Description of Artificial Sequence: Synthetic oligonucleotide
agagacacauuuacccaca

SEQ ID NO: 899433 - RNA, 19 nt, Artificial Sequence
  Description of Artificial Sequence: Synthetic oligonucleotide
gaggcagcgaucgcacacc

SEQ ID NO: 899434 - RNA, 19 nt, Artificial Sequence
  Description of Artificial Sequence: Synthetic oligonucleotide
ccaagguaggauuuauguc

SEQ ID NO: 899435 - RNA, 19 nt, Artificial Sequence
  Description of Artificial Sequence: Synthetic oligonucleotide
uccacggucggcggucgcg

SEQ ID NO: 899436 - RNA, 19 nt, Artificial Sequence
  Description of Artificial Sequence: Synthetic oligonucleotide
acgaguugcagaucaccuu

SEQ ID NO: 899437 - RNA, 19 nt, Artificial Sequence
  Description of Artificial Sequence: Synthetic oligonucleotide
gcccauugaacacaauuga

SEQ ID NO: 899438 - RNA, 19 nt, Artificial Sequence
  Description of Artificial Sequence: Synthetic oligonucleotide
cugcacguaguaagaggug

SEQ ID NO: 899439 - RNA, 19 nt, Artificial Sequence
  Description of Artificial Sequence: Synthetic oligonucleotide
gucgggaagccggucagag

SEQ ID NO: 899440 - RNA, 19 nt, Artificial Sequence
  Description of Artificial Sequence: Synthetic oligonucleotide
caacugcuuugacagucac

SEQ ID NO: 899441 - RNA, 19 nt, Artificial Sequence
  Description of Artificial Sequence: Synthetic oligonucleotide
acagugugugugugugugu

SEQ ID NO: 899442 - RNA, 19 nt, Artificial Sequence
  Description of Artificial Sequence: Synthetic oligonucleotide
gcgaucgcacaccacgccg

SEQ ID NO: 899443 - RNA, 19 nt, Artificial Sequence
  Description of Artificial Sequence: Synthetic oligonucleotide
gaguaaaguuucuccgacu

SEQ ID NO: 899444 - RNA, 19 nt, Artificial Sequence
  Description of Artificial Sequence: Synthetic oligonucleotide
uuguaaugguucugcucua

SEQ ID NO: 899445 - RNA, 19 nt, Artificial Sequence
  Description of Artificial Sequence: Synthetic oligonucleotide
ggacaagacgaucuacaga

SEQ ID NO: 899446 - RNA, 19 nt, Artificial Sequence
  Description of Artificial Sequence: Synthetic oligonucleotide
cuugucguguguuuggcau

SEQ ID NO: 899447 - RNA, 19 nt, Artificial Sequence
  Description of Artificial Sequence: Synthetic oligonucleotide
uaugaucgccuggcacagg

SEQ ID NO: 899448 - RNA, 19 nt, Artificial Sequence
  Description of Artificial Sequence: Synthetic oligonucleotide
agggaucgcagcggaagag

SEQ ID NO: 899449 - RNA, 19 nt, Artificial Sequence
  Description of Artificial Sequence: Synthetic oligonucleotide
agagagagagagagaauuu

SEQ ID NO: 899450 - RNA, 19 nt, Artificial Sequence
  Description of Artificial Sequence: Synthetic oligonucleotide
acggucggcggucgcgaac

SEQ ID NO: 899451 - RNA, 19 nt, Artificial Sequence
  Description of Artificial Sequence: Synthetic oligonucleotide
gucgcgaacuuuuccaccu

SEQ ID NO: 899452 - RNA, 19 nt, Artificial Sequence
  Description of Artificial Sequence: Synthetic oligonucleotide
ggacgggauggcuuccagg

SEQ ID NO: 899453 - RNA, 19 nt, Artificial Sequence
  Description of Artificial Sequence: Synthetic oligonucleotide
ggucgcgaacuuuuccacc

SEQ ID NO: 899454 - RNA, 19 nt, Artificial Sequence
  Description of Artificial Sequence: Synthetic oligonucleotide
guaaaguuucuccgacucu

SEQ ID NO: 899455 - RNA, 19 nt, Artificial Sequence
  Description of Artificial Sequence: Synthetic oligonucleotide
cacaccacgccgcgacucc

SEQ ID NO: 899456 - RNA, 19 nt, Artificial Sequence
  Description of Artificial Sequence: Synthetic oligonucleotide
acaugaggcccaaucaaua

SEQ ID NO: 899457 - RNA, 19 nt, Artificial Sequence
  Description of Artificial Sequence: Synthetic oligonucleotide
ucccgcacugcacguagua

SEQ ID NO: 899458 - RNA, 19 nt, Artificial Sequence
  Description of Artificial Sequence: Synthetic oligonucleotide
uucgaucagggugcgccac

SEQ ID NO: 899459 - RNA, 19 nt, Artificial Sequence
  Description of Artificial Sequence: Synthetic oligonucleotide
agagagagagagagagaga

SEQ ID NO: 899460 - RNA, 19 nt, Artificial Sequence
  Description of Artificial Sequence: Synthetic oligonucleotide
uuccggcguuccucgcugg

SEQ ID NO: 899461 - RNA, 19 nt, Artificial Sequence
  Description of Artificial Sequence: Synthetic oligonucleotide
ccaacagugugugugugug

SEQ ID NO: 899462 - RNA, 19 nt, Artificial Sequence
  Description of Artificial Sequence: Synthetic oligonucleotide
cacagucgagcaccuucag

SEQ ID NO: 899463 - RNA, 19 nt, Artificial Sequence
  Description of Artificial Sequence: Synthetic oligonucleotide
gcagauggugaacgaguug

SEQ ID NO: 899464 - RNA, 19 nt, Artificial Sequence
  Description of Artificial Sequence: Synthetic oligonucleotide
gagagagagagaauuuauu

SEQ ID NO: 899465 - RNA, 19 nt, Artificial Sequence
  Description of Artificial Sequence: Synthetic oligonucleotide
cucuuauguuggcaucaca

SEQ ID NO: 899466 - RNA, 19 nt, Artificial Sequence
  Description of Artificial Sequence: Synthetic oligonucleotide
agggcguagagcagggccu

SEQ ID NO: 899467 - RNA, 19 nt, Artificial Sequence
  Description of Artificial Sequence: Synthetic oligonucleotide
ucccacuuccagugcgccu

SEQ ID NO: 899468 - RNA, 19 nt, Artificial Sequence
  Description of Artificial Sequence: Synthetic oligonucleotide
gcuggucaucagcaugucc

SEQ ID NO: 899469 - RNA, 19 nt, Artificial Sequence
  Description of Artificial Sequence: Synthetic oligonucleotide
acgggauggcuuccaggga

SEQ ID NO: 899470 - RNA, 19 nt, Artificial Sequence
  Description of Artificial Sequence: Synthetic oligonucleotide
uaccacgaacaggucuucu

SEQ ID NO: 899471 - RNA, 19 nt, Artificial Sequence
  Description of Artificial Sequence: Synthetic oligonucleotide
cuuaggaggcucuuauguu

SEQ ID NO: 899472 - RNA, 19 nt, Artificial Sequence
  Description of Artificial Sequence: Synthetic oligonucleotide
agagagagagagagagaau

SEQ ID NO: 899473 - RNA, 19 nt, Artificial Sequence
  Description of Artificial Sequence: Synthetic oligonucleotide
cccaagguaggauuuaugu

SEQ ID NO: 899474 - RNA, 19 nt, Artificial Sequence
  Description of Artificial Sequence: Synthetic oligonucleotide
agccaacagugugugugug

SEQ ID NO: 899475 - RNA, 19 nt, Artificial Sequence
  Description of Artificial Sequence: Synthetic oligonucleotide
ggcggucgcgaacuuuucc

SEQ ID NO: 899476 - RNA, 19 nt, Artificial Sequence
  Description of Artificial Sequence: Synthetic oligonucleotide
ggaagccggucagaguugc

SEQ ID NO: 899477 - RNA, 19 nt, Artificial Sequence
  Description of Artificial Sequence: Synthetic oligonucleotide
gcggucgcgaacuuuucca

SEQ ID NO: 899478 - RNA, 19 nt, Artificial Sequence
  Description of Artificial Sequence: Synthetic oligonucleotide
guccuuaggaggcucuuau

SEQ ID NO: 899479 - RNA, 19 nt, Artificial Sequence
  Description of Artificial Sequence: Synthetic oligonucleotide
uccggcguuccucgcuggu

SEQ ID NO: 899480 - RNA, 19 nt, Artificial Sequence
  Description of Artificial Sequence: Synthetic oligonucleotide
gggaucgcagcggaagagc

SEQ ID NO: 899481 - RNA, 19 nt, Artificial Sequence
  Description of Artificial Sequence: Synthetic oligonucleotide
ugcuugugguccggccaag

SEQ ID NO: 899482 - RNA, 19 nt, Artificial Sequence
  Description of Artificial Sequence: Synthetic oligonucleotide
aguaagaggugaggcccau

SEQ ID NO: 899483 - RNA, 19 nt, Artificial Sequence
  Description of Artificial Sequence: Synthetic oligonucleotide
ccgucagcauaucagcauc

SEQ ID NO: 899484 - RNA, 19 nt, Artificial Sequence
  Description of Artificial Sequence: Synthetic oligonucleotide
ucgcgaacuuuuccaccuu

SEQ ID NO: 899485 - RNA, 19 nt, Artificial Sequence
  Description of Artificial Sequence: Synthetic oligonucleotide
gcacugcacguaguaagag

SEQ ID NO: 899486 - RNA, 19 nt, Artificial Sequence
  Description of Artificial Sequence: Synthetic oligonucleotide
gcaucacagguugugugac

SEQ ID NO: 899487 - RNA, 19 nt, Artificial Sequence
  Description of Artificial Sequence: Synthetic oligonucleotide
guacgccaagggaucgcag

SEQ ID NO: 899488 - RNA, 19 nt, Artificial Sequence
  Description of Artificial Sequence: Synthetic oligonucleotide
cgguacggcuccauggugc

SEQ ID NO: 899489 - RNA, 19 nt, Artificial Sequence
  Description of Artificial Sequence: Synthetic oligonucleotide
caucuccgcauugcagaug

SEQ ID NO: 899490 - RNA, 19 nt, Artificial Sequence
  Description of Artificial Sequence: Synthetic oligonucleotide
guguacgccaagggaucgc

SEQ ID NO: 899491 - RNA, 19 nt, Artificial Sequence
  Description of Artificial Sequence: Synthetic oligonucleotide
ucaggcccucuuucuuauc

SEQ ID NO: 899492 - RNA, 19 nt, Artificial Sequence
  Description of Artificial Sequence: Synthetic oligonucleotide
ugcuuccggcguuccucgc

SEQ ID NO: 899493 - RNA, 19 nt, Artificial Sequence
  Description of Artificial Sequence: Synthetic oligonucleotide
ugaugucgggaagccgguc

SEQ ID NO: 899494 - RNA, 19 nt, Artificial Sequence
  Description of Artificial Sequence: Synthetic oligonucleotide
agcgggaccacggcacgca

SEQ ID NO: 899495 - RNA, 19 nt, Artificial Sequence
  Description of Artificial Sequence: Synthetic oligonucleotide
acggcuccauggugcgcag

SEQ ID NO: 899496 - RNA, 19 nt, Artificial Sequence
  Description of Artificial Sequence: Synthetic oligonucleotide
ucuccgcauugcagauggu

SEQ ID NO: 899497 - RNA, 19 nt, Artificial Sequence
  Description of Artificial Sequence: Synthetic oligonucleotide
uuccacggucggcggucgc

SEQ ID NO: 899498 - RNA, 19 nt, Artificial Sequence
  Description of Artificial Sequence: Synthetic oligonucleotide
acgaugacucuggccagaa

SEQ ID NO: 899499 - RNA, 19 nt, Artificial Sequence
  Description of Artificial Sequence: Synthetic oligonucleotide
cuaccacgaacaggucuuc

SEQ ID NO: 899500 - RNA, 19 nt, Artificial Sequence
  Description of Artificial Sequence: Synthetic oligonucleotide
gugaccacaauaaggcguu

SEQ ID NO: 899501 - RNA, 19 nt, Artificial Sequence
  Description of Artificial Sequence: Synthetic oligonucleotide
ugaccacaauaaggcguuc

SEQ ID NO: 899502 - RNA, 19 nt, Artificial Sequence
  Description of Artificial Sequence: Synthetic oligonucleotide
aagauccgguacggcucca

SEQ ID NO: 899503 - RNA, 19 nt, Artificial Sequence
  Description of Artificial Sequence: Synthetic oligonucleotide
aucgccuggcacagggcca

SEQ ID NO: 899504 - RNA, 19 nt, Artificial Sequence
  Description of Artificial Sequence: Synthetic oligonucleotide
auuucccgcacugcacgua

SEQ ID NO: 899505 - RNA, 19 nt, Artificial Sequence
  Description of Artificial Sequence: Synthetic oligonucleotide
gccaagggaucgcagcgga

SEQ ID NO: 899506 - RNA, 19 nt, Artificial Sequence
  Description of Artificial Sequence: Synthetic oligonucleotide
cgaucgcacaccacgccgc

SEQ ID NO: 899507 - RNA, 19 nt, Artificial Sequence
  Description of Artificial Sequence: Synthetic oligonucleotide
agucgcacucaaagcagua

SEQ ID NO: 899508 - RNA, 19 nt, Artificial Sequence
  Description of Artificial Sequence: Synthetic oligonucleotide
caagcaucacagguugugu

SEQ ID NO: 899509 - RNA, 19 nt, Artificial Sequence
  Description of Artificial Sequence: Synthetic oligonucleotide
gugauucagcagagacaug

SEQ ID NO: 899510 - RNA, 19 nt, Artificial Sequence
  Description of Artificial Sequence: Synthetic oligonucleotide
gucguguguuuggcaucgg

SEQ ID NO: 899511 - RNA, 19 nt, Artificial Sequence
  Description of Artificial Sequence: Synthetic oligonucleotide
gccgcgacuccccuugcac

SEQ ID NO: 899512 - RNA, 19 nt, Artificial Sequence
  Description of Artificial Sequence: Synthetic oligonucleotide
aggccaacgccaaccuccu

SEQ ID NO: 899513 - RNA, 19 nt, Artificial Sequence
  Description of Artificial Sequence: Synthetic oligonucleotide
cucggacgggauggcuucc

SEQ ID NO: 899514 - RNA, 19 nt, Artificial Sequence
  Description of Artificial Sequence: Synthetic oligonucleotide
gcucuuauguuggcaucac

SEQ ID NO: 899515 - RNA, 19 nt, Artificial Sequence
  Description of Artificial Sequence: Synthetic oligonucleotide
uugcagcuuuuaagacauu

SEQ ID NO: 899516 - RNA, 19 nt, Artificial Sequence
  Description of Artificial Sequence: Synthetic oligonucleotide
accucggacgggauggcuu

SEQ ID NO: 899517 - RNA, 19 nt, Artificial Sequence
  Description of Artificial Sequence: Synthetic oligonucleotide
cggcacgcagcccauuucc

SEQ ID NO: 899518 - RNA, 19 nt, Artificial Sequence
  Description of Artificial Sequence: Synthetic oligonucleotide
gcggcaguugggaagcauc

SEQ ID NO: 899519 - RNA, 19 nt, Artificial Sequence
  Description of Artificial Sequence: Synthetic oligonucleotide
ggcauugagaacaccgcau

SEQ ID NO: 899520 - RNA, 19 nt, Artificial Sequence
  Description of Artificial Sequence: Synthetic oligonucleotide
ggggauaucugggcuugca

SEQ ID NO: 899521 - RNA, 19 nt, Artificial Sequence
  Description of Artificial Sequence: Synthetic oligonucleotide
ggcguucgaucagggugcg

SEQ ID NO: 899522 - RNA, 19 nt, Artificial Sequence
  Description of Artificial Sequence: Synthetic oligonucleotide
ggugaacgaguugcagauc

SEQ ID NO: 899523 - RNA, 19 nt, Artificial Sequence
  Description of Artificial Sequence: Synthetic oligonucleotide
gggaagccggucagaguug

SEQ ID NO: 899524 - RNA, 19 nt, Artificial Sequence
  Description of Artificial Sequence: Synthetic oligonucleotide
caacagugugugugugugu

SEQ ID NO: 899525 - RNA, 19 nt, Artificial Sequence
  Description of Artificial Sequence: Synthetic oligonucleotide
cgcgacuccccuugcacac

SEQ ID NO: 899526 - RNA, 19 nt, Artificial Sequence
  Description of Artificial Sequence: Synthetic oligonucleotide
cagcgggaccacggcacgc

SEQ ID NO: 899527 - RNA, 19 nt, Artificial Sequence
  Description of Artificial Sequence: Synthetic oligonucleotide
guacggcuccauggugcgc

SEQ ID NO: 899528 - RNA, 19 nt, Artificial Sequence
  Description of Artificial Sequence: Synthetic oligonucleotide
gcuugugguccggccaagc

SEQ ID NO: 899529 - RNA, 19 nt, Artificial Sequence
  Description of Artificial Sequence: Synthetic oligonucleotide
ccucgauuucccgcacugc

SEQ ID NO: 899530 - RNA, 19 nt, Artificial Sequence
  Description of Artificial Sequence: Synthetic oligonucleotide
ccuugucguguguuuggca

SEQ ID NO: 899531 - RNA, 19 nt, Artificial Sequence
  Description of Artificial Sequence: Synthetic oligonucleotide
cggucgcgaacuuuuccac

SEQ ID NO: 899532 - RNA, 19 nt, Artificial Sequence
  Description of Artificial Sequence: Synthetic oligonucleotide
cgcagggcguagagcaggg

SEQ ID NO: 899533 - RNA, 19 nt, Artificial Sequence
  Description of Artificial Sequence: Synthetic oligonucleotide
gcccauuuccacggucggc

SEQ ID NO: 899534 - RNA, 19 nt, Artificial Sequence
  Description of Artificial Sequence: Synthetic oligonucleotide
caucacccgucagcauauc

SEQ ID NO: 899535 - RNA, 19 nt, Artificial Sequence
  Description of Artificial Sequence: Synthetic oligonucleotide
cgcgaacuuuuccaccuuc

SEQ ID NO: 899536 - RNA, 19 nt, Artificial Sequence
  Description of Artificial Sequence: Synthetic oligonucleotide
gccaacagugugugugugu

SEQ ID NO: 899537 - RNA, 19 nt, Artificial Sequence
  Description of Artificial Sequence: Synthetic oligonucleotide
ucucggccgugggucacuu

SEQ ID NO: 899538 - RNA, 19 nt, Artificial Sequence
  Description of Artificial Sequence: Synthetic oligonucleotide
ccgguacggcuccauggug

SEQ ID NO: 899539 - RNA, 19 nt, Artificial Sequence
  Description of Artificial Sequence: Synthetic oligonucleotide
ggcacgcagcccauuucca

SEQ ID NO: 899540 - RNA, 19 nt, Artificial Sequence
  Description of Artificial Sequence: Synthetic oligonucleotide
cucccaagguaggauuuau

SEQ ID NO: 899541 - RNA, 19 nt, Artificial Sequence
  Description of Artificial Sequence: Synthetic oligonucleotide
cuagcauccccagguugau

SEQ ID NO: 899542 - RNA, 19 nt, Artificial Sequence
  Description of Artificial Sequence: Synthetic oligonucleotide
gaagccggucagaguugcu

SEQ ID NO: 899543 - RNA, 19 nt, Artificial Sequence
  Description of Artificial Sequence: Synthetic oligonucleotide
cgccaagggaucgcagcgg

SEQ ID NO: 899544 - RNA, 19 nt, Artificial Sequence
  Description of Artificial Sequence: Synthetic oligonucleotide
gcuuccggcguuccucgcu

SEQ ID NO: 899545 - RNA, 19 nt, Artificial Sequence
  Description of Artificial Sequence: Synthetic oligonucleotide
cgaguugcagaucaccuuu

SEQ ID NO: 899546 - RNA, 19 nt, Artificial Sequence
  Description of Artificial Sequence: Synthetic oligonucleotide
cacggcacgcagcccauuu

SEQ ID NO: 899547 - RNA, 19 nt, Artificial Sequence
  Description of Artificial Sequence: Synthetic oligonucleotide
gcgcagcgggaccacggca

SEQ ID NO: 899548 - RNA, 19 nt, Artificial Sequence
  Description of Artificial Sequence: Synthetic oligonucleotide
ccucuccugccucgauuuc

SEQ ID NO: 899549 - RNA, 19 nt, Artificial Sequence
  Description of Artificial Sequence: Synthetic oligonucleotide
gcagggcguagagcagggc

SEQ ID NO: 899550 - RNA, 19 nt, Artificial Sequence
  Description of Artificial Sequence: Synthetic oligonucleotide
cccgucagcauaucagcau

SEQ ID NO: 899551 - RNA, 19 nt, Artificial Sequence
  Description of Artificial Sequence: Synthetic oligonucleotide
cggcguuccucgcugguca

SEQ ID NO: 899552 - RNA, 19 nt, Artificial Sequence
  Description of Artificial Sequence: Synthetic oligonucleotide
cgacucugagggcuuuuca

SEQ ID NO: 899553 - RNA, 19 nt, Artificial Sequence
  Description of Artificial Sequence: Synthetic oligonucleotide
gccgugggucacuuucaua

SEQ ID NO: 899554 - RNA, 19 nt, Artificial Sequence
  Description of Artificial Sequence: Synthetic oligonucleotide
cacggucggcggucgcgaa

SEQ ID NO: 899555 - RNA, 19 nt, Artificial Sequence
  Description of Artificial Sequence: Synthetic oligonucleotide
ccaagggaucgcagcggaa

SEQ ID NO: 899556 - RNA, 19 nt, Artificial Sequence
  Description of Artificial Sequence: Synthetic oligonucleotide
ccacaauaaggcguucgau

SEQ ID NO: 899557 - RNA, 19 nt, Artificial Sequence
  Description of Artificial Sequence: Synthetic oligonucleotide
ccggcguuccucgcugguc

SEQ ID NO: 899558 - RNA, 19 nt, Artificial Sequence
  Description of Artificial Sequence: Synthetic oligonucleotide
gcgacuccccuugcacaca

SEQ ID NO: 899559 - RNA, 19 nt, Artificial Sequence
  Description of Artificial Sequence: Synthetic oligonucleotide
gcguuccucgcuggucauc

SEQ ID NO: 899560 - RNA, 19 nt, Artificial Sequence
  Description of Artificial Sequence: Synthetic oligonucleotide
gcguucgaucagggugcgc

SEQ ID NO: 899561 - RNA, 19 nt, Artificial Sequence
  Description of Artificial Sequence: Synthetic oligonucleotide
caacgccaaccuccugcau

SEQ ID NO: 899562 - RNA, 19 nt, Artificial Sequence
  Description of Artificial Sequence: Synthetic oligonucleotide
ccucccaagguaggauuua

SEQ ID NO: 899563 - RNA, 19 nt, Artificial Sequence
  Description of Artificial Sequence: Synthetic oligonucleotide
cggauacagucgcacucaa

SEQ ID NO: 899564 - RNA, 19 nt, Artificial Sequence
  Description of Artificial Sequence: Synthetic oligonucleotide
cagugcgccuucagcucuu

SEQ ID NO: 899565 - RNA, 19 nt, Artificial Sequence
  Description of Artificial Sequence: Synthetic oligonucleotide
ccacggucggcggucgcga

SEQ ID NO: 899566 - RNA, 19 nt, Artificial Sequence
  Description of Artificial Sequence: Synthetic oligonucleotide
ggcguuccucgcuggucau

SEQ ID NO: 899567 - RNA, 19 nt, Artificial Sequence
  Description of Artificial Sequence: Synthetic oligonucleotide
cggcggucgcgaacuuuuc

SEQ ID NO: 899568 - RNA, 19 nt, Artificial Sequence
  Description of Artificial Sequence: Synthetic oligonucleotide
ccucgcuggucaucagcau

SEQ ID NO: 899569 - RNA, 19 nt, Artificial Sequence
  Description of Artificial Sequence: Synthetic oligonucleotide
cgaucagggugcgccaccu

SEQ ID NO: 899570 - RNA, 19 nt, Artificial Sequence
  Description of Artificial Sequence: Synthetic oligonucleotide
cucggccgugggucacuuu

SEQ ID NO: 899571 - RNA, 19 nt, Artificial Sequence
  Description of Artificial Sequence: Synthetic oligonucleotide
aaucuuuaaauuuaagucc

SEQ ID NO: 899572 - RNA, 19 nt, Artificial Sequence
  Description of Artificial Sequence: Synthetic oligonucleotide
aauccaauguuccaguugc

SEQ ID NO: 899573 - RNA, 19 nt, Artificial Sequence
  Description of Artificial Sequence: Synthetic oligonucleotide
gauauaaugaugcuguucc

SEQ ID NO: 899574 - RNA, 19 nt, Artificial Sequence
  Description of Artificial Sequence: Synthetic oligonucleotide
uuaauuuaagccaauacac

SEQ ID NO: 899575 - RNA, 19 nt, Artificial Sequence
  Description of Artificial Sequence: Synthetic oligonucleotide
aaguauaccaaguuggcag

SEQ ID NO: 899576 - RNA, 19 nt, Artificial Sequence
  Description of Artificial Sequence: Synthetic oligonucleotide
aauuuaagccaauacacug

SEQ ID NO: 899577 - RNA, 19 nt, Artificial Sequence
  Description of Artificial Sequence: Synthetic oligonucleotide
ugaucgucaacauagagcc

SEQ ID NO: 899578 - RNA, 19 nt, Artificial Sequence
  Description of Artificial Sequence: Synthetic oligonucleotide
ucgucuucgaaauacaugg

SEQ ID NO: 899579 - RNA, 19 nt, Artificial Sequence
  Description of Artificial Sequence: Synthetic oligonucleotide
uuggauuugucuaagagug

SEQ ID NO: 899580 - RNA, 19 nt, Artificial Sequence
  Description of Artificial Sequence: Synthetic oligonucleotide
auaaauaaaaccugaguug

SEQ ID NO: 899581 - RNA, 19 nt, Artificial Sequence
  Description of Artificial Sequence: Synthetic oligonucleotide
auauuauuguuguaggcac

SEQ ID NO: 899582 - RNA, 19 nt, Artificial Sequence
  Description of Artificial Sequence: Synthetic oligonucleotide
ugaguuauggccuagguaa

SEQ ID NO: 899583 - RNA, 19 nt, Artificial Sequence
  Description of Artificial Sequence: Synthetic oligonucleotide
aaccgaacaaaauugucuc

SEQ ID NO: 899584 - RNA, 19 nt, Artificial Sequence
  Description of Artificial Sequence: Synthetic oligonucleotide
ucuuuaaugguuaaguguc

SEQ ID NO: 899585 - RNA, 19 nt, Artificial Sequence
  Description of Artificial Sequence: Synthetic oligonucleotide
uugguaauaaauuagguuu

SEQ ID NO: 899586 - RNA, 19 nt, Artificial Sequence
  Description of Artificial Sequence: Synthetic oligonucleotide
acagguuaggaugagaacc

SEQ ID NO: 899587 - RNA, 19 nt, Artificial Sequence
  Description of Artificial Sequence: Synthetic oligonucleotide
aauuagguuuauauaaccg

SEQ ID NO: 899588 - RNA, 19 nt, Artificial Sequence
  Description of Artificial Sequence: Synthetic oligonucleotide
agacaaguauuccaagucc

SEQ ID NO: 899589 - RNA, 19 nt, Artificial Sequence
  Description of Artificial Sequence: Synthetic oligonucleotide
aaaucuuuaaugguuaagu

SEQ ID NO: 899590 - RNA, 19 nt, Artificial Sequence
  Description of Artificial Sequence: Synthetic oligonucleotide
aaauuuaaguccagguagc

SEQ ID NO: 899591 - RNA, 19 nt, Artificial Sequence
  Description of Artificial Sequence: Synthetic oligonucleotide
aaucuuuaaugguuaagug

SEQ ID NO: 899592 - RNA, 19 nt, Artificial Sequence
  Description of Artificial Sequence: Synthetic oligonucleotide
uuuaaagaccaucauauuu

SEQ ID NO: 899593 - RNA, 19 nt, Artificial Sequence
  Description of Artificial Sequence: Synthetic oligonucleotide
aauggauggguagucauac

SEQ ID NO: 899594 - RNA, 19 nt, Artificial Sequence
  Description of Artificial Sequence: Synthetic oligonucleotide
aagauaucaauaccuaccu

SEQ ID NO: 899595 - RNA, 19 nt, Artificial Sequence
  Description of Artificial Sequence: Synthetic oligonucleotide
accuuugacagcuggaggc

SEQ ID NO: 899596 - RNA, 19 nt, Artificial Sequence
  Description of Artificial Sequence: Synthetic oligonucleotide
cauucuaguuaaaugaaag

SEQ ID NO: 899597 - RNA, 19 nt, Artificial Sequence
  Description of Artificial Sequence: Synthetic oligonucleotide
aaguuauguaaguauucuc

SEQ ID NO: 899598 - RNA, 19 nt, Artificial Sequence
  Description of Artificial Sequence: Synthetic oligonucleotide
uucuaguuaaaugaaagca

SEQ ID NO: 899599 - RNA, 19 nt, Artificial Sequence
  Description of Artificial Sequence: Synthetic oligonucleotide
aguaaggugacccaauaug

SEQ ID NO: 899600 - RNA, 19 nt, Artificial Sequence
  Description of Artificial Sequence: Synthetic oligonucleotide
auaugaaugaacuaugauu

SEQ ID NO: 899601 - RNA, 19 nt, Artificial Sequence
  Description of Artificial Sequence: Synthetic oligonucleotide
gaugagaaccuauuaagac

SEQ ID NO: 899602 - RNA, 19 nt, Artificial Sequence
  Description of Artificial Sequence: Synthetic oligonucleotide
aagaccaucauauuuggua

SEQ ID NO: 899603 - RNA, 19 nt, Artificial Sequence
  Description of Artificial Sequence: Synthetic oligonucleotide
auuugucuaagagugacac

SEQ ID NO: 899604 - RNA, 19 nt, Artificial Sequence
  Description of Artificial Sequence: Synthetic oligonucleotide
auaaaugucaaguuagaaa

SEQ ID NO: 899605 - RNA, 19 nt, Artificial Sequence
  Description of Artificial Sequence: Synthetic oligonucleotide
uuuacauaguguuuguagu

SEQ ID NO: 899606 - RNA, 19 nt, Artificial Sequence
  Description of Artificial Sequence: Synthetic oligonucleotide
ucuaguuaaaugaaagcau

SEQ ID NO: 899607 - RNA, 19 nt, Artificial Sequence
  Description of Artificial Sequence: Synthetic oligonucleotide
uccggagacacuuugaaga

SEQ ID NO: 899608 - RNA, 19 nt, Artificial Sequence
  Description of Artificial Sequence: Synthetic oligonucleotide
aagcugaucgucaacauag

SEQ ID NO: 899609 - RNA, 19 nt, Artificial Sequence
  Description of Artificial Sequence: Synthetic oligonucleotide
caaaagguaacucuucccc

SEQ ID NO: 899610 - RNA, 19 nt, Artificial Sequence
  Description of Artificial Sequence: Synthetic oligonucleotide
auaucuuugucuugacuac

SEQ ID NO: 899611 - RNA, 19 nt, Artificial Sequence
  Description of Artificial Sequence: Synthetic oligonucleotide
augauuucugucuuaauga

SEQ ID NO: 899612 - RNA, 19 nt, Artificial Sequence
  Description of Artificial Sequence: Synthetic oligonucleotide
aggaugagaaccuauuaag

SEQ ID NO: 899613 - RNA, 19 nt, Artificial Sequence
  Description of Artificial Sequence: Synthetic oligonucleotide
aauaugaaugaacuaugau

SEQ ID NO: 899614 - RNA, 19 nt, Artificial Sequence
  Description of Artificial Sequence: Synthetic oligonucleotide
uaagccaauacacugcaac

SEQ ID NO: 899615 - RNA, 19 nt, Artificial Sequence
  Description of Artificial Sequence: Synthetic oligonucleotide
caaacagcguguaacaccc

SEQ ID NO: 899616 - RNA, 19 nt, Artificial Sequence
  Description of Artificial Sequence: Synthetic oligonucleotide
augauagacuuugugauac

SEQ ID NO: 899617 - RNA, 19 nt, Artificial Sequence
  Description of Artificial Sequence: Synthetic oligonucleotide
uuugcuagacauccaaucu

SEQ ID NO: 899618 - RNA, 19 nt, Artificial Sequence
  Description of Artificial Sequence: Synthetic oligonucleotide
ucauaugauagacuuugug

SEQ ID NO: 899619 - RNA, 19 nt, Artificial Sequence
  Description of Artificial Sequence: Synthetic oligonucleotide
auaaccgauaauuucaaaa

SEQ ID NO: 899620 - RNA, 19 nt, Artificial Sequence
  Description of Artificial Sequence: Synthetic oligonucleotide
uagacuuugugauacucag

SEQ ID NO: 899621 - RNA, 19 nt, Artificial Sequence
  Description of Artificial Sequence: Synthetic oligonucleotide
uuuaagccaauacacugca

SEQ ID NO: 899622 - RNA, 19 nt, Artificial Sequence
  Description of Artificial Sequence: Synthetic oligonucleotide
uuucauuuaggccagugua

SEQ ID NO: 899623 - RNA, 19 nt, Artificial Sequence
  Description of Artificial Sequence: Synthetic oligonucleotide
cuauuaagacuacagcugc

SEQ ID NO: 899624 - RNA, 19 nt, Artificial Sequence
  Description of Artificial Sequence: Synthetic oligonucleotide
uuugguaauaaauuagguu

SEQ ID NO: 899625 - RNA, 19 nt, Artificial Sequence
  Description of Artificial Sequence: Synthetic oligonucleotide
uguugagauaucuuugucu

SEQ ID NO: 899626 - RNA, 19 nt, Artificial Sequence
  Description of Artificial Sequence: Synthetic oligonucleotide
cucaacaaacaaaugcugc

SEQ ID NO: 899627 - RNA, 19 nt, Artificial Sequence
  Description of Artificial Sequence: Synthetic oligonucleotide
uggauggguagucauaccc

SEQ ID NO: 899628 - RNA, 19 nt, Artificial Sequence
  Description of Artificial Sequence: Synthetic oligonucleotide
uggguagucauacccaaag

SEQ ID NO: 899629 - RNA, 19 nt, Artificial Sequence
  Description of Artificial Sequence: Synthetic oligonucleotide
cugaucgucaacauagagc

SEQ ID NO: 899630 - RNA, 19 nt, Artificial Sequence
  Description of Artificial Sequence: Synthetic oligonucleotide
ucaauaccuaccuaaauuu

SEQ ID NO: 899631 - RNA, 19 nt, Artificial Sequence
  Description of Artificial Sequence: Synthetic oligonucleotide
cauaguguuuguaguagcg

SEQ ID NO: 899632 - RNA, 19 nt, Artificial Sequence
  Description of Artificial Sequence: Synthetic oligonucleotide
acauaguguuuguaguagc

SEQ ID NO: 899633 - RNA, 19 nt, Artificial Sequence
  Description of Artificial Sequence: Synthetic oligonucleotide
cuugacuaccauuaucacc

SEQ ID NO: 899634 - RNA, 19 nt, Artificial Sequence
  Description of Artificial Sequence: Synthetic oligonucleotide
ucuggcauaacccgguccc

SEQ ID NO: 899635 - RNA, 19 nt, Artificial Sequence
  Description of Artificial Sequence: Synthetic oligonucleotide
uuagguuuauauaaccgau

SEQ ID NO: 899636 - RNA, 19 nt, Artificial Sequence
  Description of Artificial Sequence: Synthetic oligonucleotide
uaaccgauaauuucaaaau

SEQ ID NO: 899637 - RNA, 19 nt, Artificial Sequence
  Description of Artificial Sequence: Synthetic oligonucleotide
ucccaguuaauuuaagcca

SEQ ID NO: 899638 - RNA, 19 nt, Artificial Sequence
  Description of Artificial Sequence: Synthetic oligonucleotide
aaaccgaacaaaauugucu

SEQ ID NO: 899639 - RNA, 19 nt, Artificial Sequence
  Description of Artificial Sequence: Synthetic oligonucleotide
caaauucgggcauugaaug

SEQ ID NO: 899640 - RNA, 19 nt, Artificial Sequence
  Description of Artificial Sequence: Synthetic oligonucleotide
augagaaccuauuaagacu

SEQ ID NO: 899641 - RNA, 19 nt, Artificial Sequence
  Description of Artificial Sequence: Synthetic oligonucleotide
caucauaugauagacuuug

SEQ ID NO: 899642 - RNA, 19 nt, Artificial Sequence
  Description of Artificial Sequence: Synthetic oligonucleotide
gagccuuccauauuauucc

SEQ ID NO: 899643 - RNA, 19 nt, Artificial Sequence
  Description of Artificial Sequence: Synthetic oligonucleotide
ucuucgaaauacauggauc

SEQ ID NO: 899644 - RNA, 19 nt, Artificial Sequence
  Description of Artificial Sequence: Synthetic oligonucleotide
uuacuuguaaacuuucuuu

SEQ ID NO: 899645 - RNA, 19 nt, Artificial Sequence
  Description of Artificial Sequence: Synthetic oligonucleotide
aacauagagccuuccauau

SEQ ID NO: 899646 - RNA, 19 nt, Artificial Sequence
  Description of Artificial Sequence: Synthetic oligonucleotide
ucuuguagcagucugccua

SEQ ID NO: 899647 - RNA, 19 nt, Artificial Sequence
  Description of Artificial Sequence: Synthetic oligonucleotide
ucagaaaagacagguuagg

SEQ ID NO: 899648 - RNA, 19 nt, Artificial Sequence
  Description of Artificial Sequence: Synthetic oligonucleotide
uuuguuuauagcagcucca

SEQ ID NO: 899649 - RNA, 19 nt, Artificial Sequence
  Description of Artificial Sequence: Synthetic oligonucleotide
aguuauguaaguauucucu

SEQ ID NO: 899650 - RNA, 19 nt, Artificial Sequence
  Description of Artificial Sequence: Synthetic oligonucleotide
uuauguaaguauucucucu

SEQ ID NO: 899651 - RNA, 19 nt, Artificial Sequence
  Description of Artificial Sequence: Synthetic oligonucleotide
gacguuuacauaguguuug

SEQ ID NO: 899652 - RNA, 19 nt, Artificial Sequence
  Description of Artificial Sequence: Synthetic oligonucleotide
ucaacauagagccuuccau

SEQ ID NO: 899653 - RNA, 19 nt, Artificial Sequence
  Description of Artificial Sequence: Synthetic oligonucleotide
uucauuuaggccaguguac

SEQ ID NO: 899654 - RNA, 19 nt, Artificial Sequence
  Description of Artificial Sequence: Synthetic oligonucleotide
uuauagcccauuuucauuu

SEQ ID NO: 899655 - RNA, 19 nt, Artificial Sequence
  Description of Artificial Sequence: Synthetic oligonucleotide
agguguaugcaucaaccuc

SEQ ID NO: 899656 - RNA, 19 nt, Artificial Sequence
  Description of Artificial Sequence: Synthetic oligonucleotide
uaggaugagaaccuauuaa

SEQ ID NO: 899657 - RNA, 19 nt, Artificial Sequence
  Description of Artificial Sequence: Synthetic oligonucleotide
agagccuuccauauuauuc

SEQ ID NO: 899658 - RNA, 19 nt, Artificial Sequence
  Description of Artificial Sequence: Synthetic oligonucleotide
cauauauaacccuugggga

SEQ ID NO: 899659 - RNA, 19 nt, Artificial Sequence
  Description of Artificial Sequence: Synthetic oligonucleotide
auauauaacccuuggggau

SEQ ID NO: 899660 - RNA, 19 nt, Artificial Sequence
  Description of Artificial Sequence: Synthetic oligonucleotide
uacacaucauaugauagac

SEQ ID NO: 899661 - RNA, 19 nt, Artificial Sequence
  Description of Artificial Sequence: Synthetic oligonucleotide
cuucgaaauacauggauca

SEQ ID NO: 899662 - RNA, 19 nt, Artificial Sequence
  Description of Artificial Sequence: Synthetic oligonucleotide
augacguuuacauaguguu

SEQ ID NO: 899663 - RNA, 19 nt, Artificial Sequence
  Description of Artificial Sequence: Synthetic oligonucleotide
uguaguagcgcgcuauuuc

SEQ ID NO: 899664 - RNA, 19 nt, Artificial Sequence
  Description of Artificial Sequence: Synthetic oligonucleotide
uguuccaauuuccagugaa

SEQ ID NO: 899665 - RNA, 19 nt, Artificial Sequence
  Description of Artificial Sequence: Synthetic oligonucleotide
accuaccuaaauuucaaca

SEQ ID NO: 899666 - RNA, 19 nt, Artificial Sequence
  Description of Artificial Sequence: Synthetic oligonucleotide
accgaacaaaauugucucc

SEQ ID NO: 899667 - RNA, 19 nt, Artificial Sequence
  Description of Artificial Sequence: Synthetic oligonucleotide
cuucguuugcuagacaucc

SEQ ID NO: 899668 - RNA, 19 nt, Artificial Sequence
  Description of Artificial Sequence: Synthetic oligonucleotide
agcguguaacacccaaugc

SEQ ID NO: 899669 - RNA, 19 nt, Artificial Sequence
  Description of Artificial Sequence: Synthetic oligonucleotide
cuuguggccaaacagcgug

SEQ ID NO: 899670 - RNA, 19 nt, Artificial Sequence
  Description of Artificial Sequence: Synthetic oligonucleotide
agaaguuauguaaguauuc

SEQ ID NO: 899671 - RNA, 19 nt, Artificial Sequence
  Description of Artificial Sequence: Synthetic oligonucleotide
uuauagcagcuccaaauuc

SEQ ID NO: 899672 - RNA, 19 nt, Artificial Sequence
  Description of Artificial Sequence: Synthetic oligonucleotide
auuuaggccaguguacuuc

SEQ ID NO: 899673 - RNA, 19 nt, Artificial Sequence
  Description of Artificial Sequence: Synthetic oligonucleotide
ucuuuaagcuaucccgucu

SEQ ID NO: 899674 - RNA, 19 nt, Artificial Sequence
  Description of Artificial Sequence: Synthetic oligonucleotide
uacaaucagcacuggauca

SEQ ID NO: 899675 - RNA, 19 nt, Artificial Sequence
  Description of Artificial Sequence: Synthetic oligonucleotide
auuaagacuacagcugcag

SEQ ID NO: 899676 - RNA, 19 nt, Artificial Sequence
  Description of Artificial Sequence: Synthetic oligonucleotide
cacaaaagguaacucuucc

SEQ ID NO: 899677 - RNA, 19 nt, Artificial Sequence
  Description of Artificial Sequence: Synthetic oligonucleotide
aaccgauaauuucaaaaua

SEQ ID NO: 899678 - RNA, 19 nt, Artificial Sequence
  Description of Artificial Sequence: Synthetic oligonucleotide
cugcuauucgcugauagcc

SEQ ID NO: 899679 - RNA, 19 nt, Artificial Sequence
  Description of Artificial Sequence: Synthetic oligonucleotide
aaugaacuagaggaagcug

SEQ ID NO: 899680 - RNA, 19 nt, Artificial Sequence
  Description of Artificial Sequence: Synthetic oligonucleotide
uauuauuguuguaggcaca

SEQ ID NO: 899681 - RNA, 19 nt, Artificial Sequence
  Description of Artificial Sequence: Synthetic oligonucleotide
uccaaauucgggcauugaa

SEQ ID NO: 899682 - RNA, 19 nt, Artificial Sequence
  Description of Artificial Sequence: Synthetic oligonucleotide
ucaauccggagacacuuug

SEQ ID NO: 899683 - RNA, 19 nt, Artificial Sequence
  Description of Artificial Sequence: Synthetic oligonucleotide
cugaguugaaaaugcuucc

SEQ ID NO: 899684 - RNA, 19 nt, Artificial Sequence
  Description of Artificial Sequence: Synthetic oligonucleotide
gaucaguuacucgucuucg

SEQ ID NO: 899685 - RNA, 19 nt, Artificial Sequence
  Description of Artificial Sequence: Synthetic oligonucleotide
uuuaaugguuaagugucca

SEQ ID NO: 899686 - RNA, 19 nt, Artificial Sequence
  Description of Artificial Sequence: Synthetic oligonucleotide
uuauuggcuggcuugaguu

SEQ ID NO: 899687 - RNA, 19 nt, Artificial Sequence
  Description of Artificial Sequence: Synthetic oligonucleotide
auucauagguguaugcauc

SEQ ID NO: 899688 - RNA, 19 nt, Artificial Sequence
  Description of Artificial Sequence: Synthetic oligonucleotide
cuucaaacuucauccaaug

SEQ ID NO: 899689 - RNA, 19 nt, Artificial Sequence
  Description of Artificial Sequence: Synthetic oligonucleotide
guaguagcgcgcuauuucc

SEQ ID NO: 899690 - RNA, 19 nt, Artificial Sequence
  Description of Artificial Sequence: Synthetic oligonucleotide
cuugcauguuauuggcugg

SEQ ID NO: 899691 - RNA, 19 nt, Artificial Sequence
  Description of Artificial Sequence: Synthetic oligonucleotide
aguuacucgucuucgaaau

SEQ ID NO: 899692 - RNA, 19 nt, Artificial Sequence
  Description of Artificial Sequence: Synthetic oligonucleotide
gggauauuauuguuguagg

SEQ ID NO: 899693 - RNA, 19 nt, Artificial Sequence
  Description of Artificial Sequence: Synthetic oligonucleotide
ucgaaauacauggaucaca

SEQ ID NO: 899694 - RNA, 19 nt, Artificial Sequence
  Description of Artificial Sequence: Synthetic oligonucleotide
uuacucgucuucgaaauac

SEQ ID NO: 899695 - RNA, 19 nt, Artificial Sequence
  Description of Artificial Sequence: Synthetic oligonucleotide
uuuaagcuaucccgucucc

SEQ ID NO: 899696 - RNA, 19 nt, Artificial Sequence
  Description of Artificial Sequence: Synthetic oligonucleotide
uuaggaugagaaccuauua

SEQ ID NO: 899697 - RNA, 19 nt, Artificial Sequence
  Description of Artificial Sequence: Synthetic oligonucleotide
uauuaagacuacagcugca

SEQ ID NO: 899698 - RNA, 19 nt, Artificial Sequence
  Description of Artificial Sequence: Synthetic oligonucleotide
aaauugucuccaaccaaag

SEQ ID NO: 899699 - RNA, 19 nt, Artificial Sequence
  Description of Artificial Sequence: Synthetic oligonucleotide
uuacauaguguuuguagua

SEQ ID NO: 899700 - RNA, 19 nt, Artificial Sequence
  Description of Artificial Sequence: Synthetic oligonucleotide
guuugcuagacauccaauc

SEQ ID NO: 899701 - RNA, 19 nt, Artificial Sequence
  Description of Artificial Sequence: Synthetic oligonucleotide
uauaaugaugcuguuccaa

SEQ ID NO: 899702 - RNA, 19 nt, Artificial Sequence
  Description of Artificial Sequence: Synthetic oligonucleotide
aguguuuguaguagcgcgc

SEQ ID NO: 899703 - RNA, 19 nt, Artificial Sequence
  Description of Artificial Sequence: Synthetic oligonucleotide
cuacaaucagcacuggauc

SEQ ID NO: 899704 - RNA, 19 nt, Artificial Sequence
  Description of Artificial Sequence: Synthetic oligonucleotide
ugguuaaguguccauuuaa

SEQ ID NO: 899705 - RNA, 19 nt, Artificial Sequence
  Description of Artificial Sequence: Synthetic oligonucleotide
gaucuuguagcagucugcc

SEQ ID NO: 899706 - RNA, 19 nt, Artificial Sequence
  Description of Artificial Sequence: Synthetic oligonucleotide
ucaaccuccacaggguucc

SEQ ID NO: 899707 - RNA, 19 nt, Artificial Sequence
  Description of Artificial Sequence: Synthetic oligonucleotide
auaaugaugcuguuccaau

SEQ ID NO: 899708 - RNA, 19 nt, Artificial Sequence
  Description of Artificial Sequence: Synthetic oligonucleotide
aaauuccuaaugaacuaga

SEQ ID NO: 899709 - RNA, 19 nt, Artificial Sequence
  Description of Artificial Sequence: Synthetic oligonucleotide
ccuaccuaaauuucaacag

SEQ ID NO: 899710 - RNA, 19 nt, Artificial Sequence
  Description of Artificial Sequence: Synthetic oligonucleotide
acaggguuccccuugcaug

SEQ ID NO: 899711 - RNA, 19 nt, Artificial Sequence
  Description of Artificial Sequence: Synthetic oligonucleotide
ccuauuaagacuacagcug

SEQ ID NO: 899712 - RNA, 19 nt, Artificial Sequence
  Description of Artificial Sequence: Synthetic oligonucleotide
ucaguuacucgucuucgaa

SEQ ID NO: 899713 - RNA, 19 nt, Artificial Sequence
  Description of Artificial Sequence: Synthetic oligonucleotide
aguauaccaaguuggcagu

SEQ ID NO: 899714 - RNA, 19 nt, Artificial Sequence
  Description of Artificial Sequence: Synthetic oligonucleotide
uccuucguuugcuagacau

SEQ ID NO: 899715 - RNA, 19 nt, Artificial Sequence
  Description of Artificial Sequence: Synthetic oligonucleotide
aguagcgcgcuauuuccuc

SEQ ID NO: 899716 - RNA, 19 nt, Artificial Sequence
  Description of Artificial Sequence: Synthetic oligonucleotide
auacauggaucacagggau

SEQ ID NO: 899717 - RNA, 19 nt, Artificial Sequence
  Description of Artificial Sequence: Synthetic oligonucleotide
cuuugugauacucagggua

SEQ ID NO: 899718 - RNA, 19 nt, Artificial Sequence
  Description of Artificial Sequence: Synthetic oligonucleotide
guaaauguuuuguugagau

SEQ ID NO: 899719 - RNA, 19 nt, Artificial Sequence
  Description of Artificial Sequence: Synthetic oligonucleotide
ugcaucggcugcaguaagg

SEQ ID NO: 899720 - RNA, 19 nt, Artificial Sequence
  Description of Artificial Sequence: Synthetic oligonucleotide
augaacuagaggaagcuga

SEQ ID NO: 899721 - RNA, 19 nt, Artificial Sequence
  Description of Artificial Sequence: Synthetic oligonucleotide
uauauaacccuuggggauc

SEQ ID NO: 899722 - RNA, 19 nt, Artificial Sequence
  Description of Artificial Sequence: Synthetic oligonucleotide
uugaguuauggccuaggua

SEQ ID NO: 899723 - RNA, 19 nt, Artificial Sequence
  Description of Artificial Sequence: Synthetic oligonucleotide
uucuucaauccggagacac

SEQ ID NO: 899724 - RNA, 19 nt, Artificial Sequence
  Description of Artificial Sequence: Synthetic oligonucleotide
caauaugaaugaacuauga

SEQ ID NO: 899725 - RNA, 19 nt, Artificial Sequence
  Description of Artificial Sequence: Synthetic oligonucleotide
cuuuaagcuaucccgucuc

SEQ ID NO: 899726 - RNA, 19 nt, Artificial Sequence
  Description of Artificial Sequence: Synthetic oligonucleotide
ucguuugcuagacauccaa

SEQ ID NO: 899727 - RNA, 19 nt, Artificial Sequence
  Description of Artificial Sequence: Synthetic oligonucleotide
ucgggcauugaaugaaaca

SEQ ID NO: 899728 - RNA, 19 nt, Artificial Sequence
  Description of Artificial Sequence: Synthetic oligonucleotide
ggauauuauuguuguaggc

SEQ ID NO: 899729 - RNA, 19 nt, Artificial Sequence
  Description of Artificial Sequence: Synthetic oligonucleotide
augaucggcccuccagacc

SEQ ID NO: 899730 - RNA, 19 nt, Artificial Sequence
  Description of Artificial Sequence: Synthetic oligonucleotide
accgauaauuucaaaauaa

SEQ ID NO: 899731 - RNA, 19 nt, Artificial Sequence
  Description of Artificial Sequence: Synthetic oligonucleotide
agauaucuuugucuugacu

SEQ ID NO: 899732 - RNA, 19 nt, Artificial Sequence
  Description of Artificial Sequence: Synthetic oligonucleotide
ugcuagacauccaaucuuu

SEQ ID NO: 899733 - RNA, 19 nt, Artificial Sequence
  Description of Artificial Sequence: Synthetic oligonucleotide
uuauggccuagguaacacc

SEQ ID NO: 899734 - RNA, 19 nt, Artificial Sequence
  Description of Artificial Sequence: Synthetic oligonucleotide
aggaaagcugguauaauca

SEQ ID NO: 899735 - RNA, 19 nt, Artificial Sequence
  Description of Artificial Sequence: Synthetic oligonucleotide
uaccaagaacuaagugggg

SEQ ID NO: 899736 - RNA, 19 nt, Artificial Sequence
  Description of Artificial Sequence: Synthetic oligonucleotide
auggauggguagucauacc

SEQ ID NO: 899737 - RNA, 19 nt, Artificial Sequence
  Description of Artificial Sequence: Synthetic oligonucleotide
uguaacacccaaugccccu

SEQ ID NO: 899738 - RNA, 19 nt, Artificial Sequence
  Description of Artificial Sequence: Synthetic oligonucleotide
uaacccuuggggaucuugu

SEQ ID NO: 899739 - RNA, 19 nt, Artificial Sequence
  Description of Artificial Sequence: Synthetic oligonucleotide
ugcuauucgcugauagccu

SEQ ID NO: 899740 - RNA, 19 nt, Artificial Sequence
  Description of Artificial Sequence: Synthetic oligonucleotide
guaaggugacccaauauga

SEQ ID NO: 899741 - RNA, 19 nt, Artificial Sequence
  Description of Artificial Sequence: Synthetic oligonucleotide
ugugauacucaggguacag

SEQ ID NO: 899742 - RNA, 19 nt, Artificial Sequence
  Description of Artificial Sequence: Synthetic oligonucleotide
gauagacuuugugauacuc

SEQ ID NO: 899743 - RNA, 19 nt, Artificial Sequence
  Description of Artificial Sequence: Synthetic oligonucleotide
uguaggcacacaguacugc

SEQ ID NO: 899744 - RNA, 19 nt, Artificial Sequence
  Description of Artificial Sequence: Synthetic oligonucleotide
uuguugagauaucuuuguc

SEQ ID NO: 899745 - RNA, 19 nt, Artificial Sequence
  Description of Artificial Sequence: Synthetic oligonucleotide
uugagauaucuuugucuug

SEQ ID NO: 899746 - RNA, 19 nt, Artificial Sequence
  Description of Artificial Sequence: Synthetic oligonucleotide
guacacaucauaugauaga

SEQ ID NO: 899747 - RNA, 19 nt, Artificial Sequence
  Description of Artificial Sequence: Synthetic oligonucleotide
uuugacagcuggaggcucu

SEQ ID NO: 899748 - RNA, 19 nt, Artificial Sequence
  Description of Artificial Sequence: Synthetic oligonucleotide
uuugacuucugguucugua

SEQ ID NO: 899749 - RNA, 19 nt, Artificial Sequence
  Description of Artificial Sequence: Synthetic oligonucleotide
acauucauagguguaugca

SEQ ID NO: 899750 - RNA, 19 nt, Artificial Sequence
  Description of Artificial Sequence: Synthetic oligonucleotide
cuggcccucaacuugagca

SEQ ID NO: 899751 - RNA, 19 nt, Artificial Sequence
  Description of Artificial Sequence: Synthetic oligonucleotide
auagcagcuccaaauucgg

SEQ ID NO: 899752 - RNA, 19 nt, Artificial Sequence
  Description of Artificial Sequence: Synthetic oligonucleotide
uuggaucaguuacucgucu

SEQ ID NO: 899753 - RNA, 19 nt, Artificial Sequence
  Description of Artificial Sequence: Synthetic oligonucleotide
ucuugacuaccauuaucac

SEQ ID NO: 899754 - RNA, 19 nt, Artificial Sequence
  Description of Artificial Sequence: Synthetic oligonucleotide
uuaaugguuaaguguccau

SEQ ID NO: 899755 - RNA, 19 nt, Artificial Sequence
  Description of Artificial Sequence: Synthetic oligonucleotide
uugcuagacauccaaucuu

SEQ ID NO: 899756 - RNA, 19 nt, Artificial Sequence
  Description of Artificial Sequence: Synthetic oligonucleotide
cuagaggaagcugaagcug

SEQ ID NO: 899757 - RNA, 19 nt, Artificial Sequence
  Description of Artificial Sequence: Synthetic oligonucleotide
cuaaauuccuaaugaacua

SEQ ID NO: 899758 - RNA, 19 nt, Artificial Sequence
  Description of Artificial Sequence: Synthetic oligonucleotide
gaugaucggcccuccagac

SEQ ID NO: 899759 - RNA, 19 nt, Artificial Sequence
  Description of Artificial Sequence: Synthetic oligonucleotide
cauagagccuuccauauua

SEQ ID NO: 899760 - RNA, 19 nt, Artificial Sequence
  Description of Artificial Sequence: Synthetic oligonucleotide
gaaguuauguaaguauucu

SEQ ID NO: 899761 - RNA, 19 nt, Artificial Sequence
  Description of Artificial Sequence: Synthetic oligonucleotide
uucuuuaagcuaucccguc

SEQ ID NO: 899762 - RNA, 19 nt, Artificial Sequence
  Description of Artificial Sequence: Synthetic oligonucleotide
cugccuaaauuccuaauga

SEQ ID NO: 899763 - RNA, 19 nt, Artificial Sequence
  Description of Artificial Sequence: Synthetic oligonucleotide
uauaaccgauaauuucaaa

SEQ ID NO: 899764 - RNA, 19 nt, Artificial Sequence
  Description of Artificial Sequence: Synthetic oligonucleotide
gaaguauaccaaguuggca

SEQ ID NO: 899765 - RNA, 19 nt, Artificial Sequence
  Description of Artificial Sequence: Synthetic oligonucleotide
uaaugaugcuguuccaauu

SEQ ID NO: 899766 - RNA, 19 nt, Artificial Sequence
  Description of Artificial Sequence: Synthetic oligonucleotide
uacucgucuucgaaauaca

SEQ ID NO: 899767 - RNA, 19 nt, Artificial Sequence
  Description of Artificial Sequence: Synthetic oligonucleotide
uggccaaacagcguguaac

SEQ ID NO: 899768 - RNA, 19 nt, Artificial Sequence
  Description of Artificial Sequence: Synthetic oligonucleotide
cagaguaugucugaguaca

SEQ ID NO: 899769 - RNA, 19 nt, Artificial Sequence
  Description of Artificial Sequence: Synthetic oligonucleotide
cuuggaucaguuacucguc

SEQ ID NO: 899770 - RNA, 19 nt, Artificial Sequence
  Description of Artificial Sequence: Synthetic oligonucleotide
acuaugauuucugucuuaa

SEQ ID NO: 899771 - RNA, 19 nt, Artificial Sequence
  Description of Artificial Sequence: Synthetic oligonucleotide
ccaauaugaaugaacuaug

SEQ ID NO: 899772 - RNA, 19 nt, Artificial Sequence
  Description of Artificial Sequence: Synthetic oligonucleotide
guuaaguguccauuuaagu

SEQ ID NO: 899773 - RNA, 19 nt, Artificial Sequence
  Description of Artificial Sequence: Synthetic oligonucleotide
ggagacacuuugaagaaug

SEQ ID NO: 899774 - RNA, 19 nt, Artificial Sequence
  Description of Artificial Sequence: Synthetic oligonucleotide
gguuaaguguccauuuaag

SEQ ID NO: 899775 - RNA, 19 nt, Artificial Sequence
  Description of Artificial Sequence: Synthetic oligonucleotide
gauggguagucauacccaa

SEQ ID NO: 899776 - RNA, 19 nt, Artificial Sequence
  Description of Artificial Sequence: Synthetic oligonucleotide
cagcguguaacacccaaug

SEQ ID NO: 899777 - RNA, 19 nt, Artificial Sequence
  Description of Artificial Sequence: Synthetic oligonucleotide
auccggagacacuuugaag

SEQ ID NO: 899778 - RNA, 19 nt, Artificial Sequence
  Description of Artificial Sequence: Synthetic oligonucleotide
gaaagcugguauaaucaga

SEQ ID NO: 899779 - RNA, 19 nt, Artificial Sequence
  Description of Artificial Sequence: Synthetic oligonucleotide
augcuaucccagcauauau

SEQ ID NO: 899780 - RNA, 19 nt, Artificial Sequence
  Description of Artificial Sequence: Synthetic oligonucleotide
ugcuaucccagcauauaua

SEQ ID NO: 899781 - RNA, 19 nt, Artificial Sequence
  Description of Artificial Sequence: Synthetic oligonucleotide
uucgggcauugaaugaaac

SEQ ID NO: 899782 - RNA, 19 nt, Artificial Sequence
  Description of Artificial Sequence: Synthetic oligonucleotide
auuuccagugaagaaugga

SEQ ID NO: 899783 - RNA, 19 nt, Artificial Sequence
  Description of Artificial Sequence: Synthetic oligonucleotide
cacaucauaugauagacuu

SEQ ID NO: 899784 - RNA, 19 nt, Artificial Sequence
  Description of Artificial Sequence: Synthetic oligonucleotide
cccuucaacuuccaggugg

SEQ ID NO: 899785 - RNA, 19 nt, Artificial Sequence
  Description of Artificial Sequence: Synthetic oligonucleotide
aucgucaacauagagccuu

SEQ ID NO: 899786 - RNA, 19 nt, Artificial Sequence
  Description of Artificial Sequence: Synthetic oligonucleotide
cacuggauuggaugaucgg

SEQ ID NO: 899787 - RNA, 19 nt, Artificial Sequence
  Description of Artificial Sequence: Synthetic oligonucleotide
ugacguuuacauaguguuu

SEQ ID NO: 899788 - RNA, 19 nt, Artificial Sequence
  Description of Artificial Sequence: Synthetic oligonucleotide
aaccuccacaggguucccc

SEQ ID NO: 899789 - RNA, 19 nt, Artificial Sequence
  Description of Artificial Sequence: Synthetic oligonucleotide
uaccuaccuaaauuucaac

SEQ ID NO: 899790 - RNA, 19 nt, Artificial Sequence
  Description of Artificial Sequence: Synthetic oligonucleotide
auauauuuuauagcccauu

SEQ ID NO: 899791 - RNA, 19 nt, Artificial Sequence
  Description of Artificial Sequence: Synthetic oligonucleotide
uucgaaauacauggaucac

SEQ ID NO: 899792 - RNA, 19 nt, Artificial Sequence
  Description of Artificial Sequence: Synthetic oligonucleotide
agaaccuauuaagacuaca

SEQ ID NO: 899793 - RNA, 19 nt, Artificial Sequence
  Description of Artificial Sequence: Synthetic oligonucleotide
agacacuuugaagaaugca

SEQ ID NO: 899794 - RNA, 19 nt, Artificial Sequence
  Description of Artificial Sequence: Synthetic oligonucleotide
uucguuugcuagacaucca

SEQ ID NO: 899795 - RNA, 19 nt, Artificial Sequence
  Description of Artificial Sequence: Synthetic oligonucleotide
aucaguuacucgucuucga

SEQ ID NO: 899796 - RNA, 19 nt, Artificial Sequence
  Description of Artificial Sequence: Synthetic oligonucleotide
gucauacccaaagucagca

SEQ ID NO: 899797 - RNA, 19 nt, Artificial Sequence
  Description of Artificial Sequence: Synthetic oligonucleotide
uuuguaguagcgcgcuauu

SEQ ID NO: 899798 - RNA, 19 nt, Artificial Sequence
  Description of Artificial Sequence: Synthetic oligonucleotide
uugcauguuauuggcuggc

SEQ ID NO: 899799 - RNA, 19 nt, Artificial Sequence
  Description of Artificial Sequence: Synthetic oligonucleotide
uaugcuaucccagcauaua

SEQ ID NO: 899800 - RNA, 19 nt, Artificial Sequence
  Description of Artificial Sequence: Synthetic oligonucleotide
gguacagcuuuuguggaag

SEQ ID NO: 899801 - RNA, 19 nt, Artificial Sequence
  Description of Artificial Sequence: Synthetic oligonucleotide
auuguuguaggcacacagu

SEQ ID NO: 899802 - RNA, 19 nt, Artificial Sequence
  Description of Artificial Sequence: Synthetic oligonucleotide
ugauagacuuugugauacu

SEQ ID NO: 899803 - RNA, 19 nt, Artificial Sequence
  Description of Artificial Sequence: Synthetic oligonucleotide
acccucagacaaguauucc

SEQ ID NO: 899804 - RNA, 19 nt, Artificial Sequence
  Description of Artificial Sequence: Synthetic oligonucleotide
uaguagcgcgcuauuuccu

SEQ ID NO: 899805 - RNA, 19 nt, Artificial Sequence
  Description of Artificial Sequence: Synthetic oligonucleotide
augucugacuuaaaggaaa

SEQ ID NO: 899806 - RNA, 19 nt, Artificial Sequence
  Description of Artificial Sequence: Synthetic oligonucleotide
agacuuugugauacucagg

SEQ ID NO: 899807 - RNA, 19 nt, Artificial Sequence
  Description of Artificial Sequence: Synthetic oligonucleotide
uuaagccaauacacugcaa

SEQ ID NO: 899808 - RNA, 19 nt, Artificial Sequence
  Description of Artificial Sequence: Synthetic oligonucleotide
auauaaccgauaauuucaa

SEQ ID NO: 899809 - RNA, 19 nt, Artificial Sequence
  Description of Artificial Sequence: Synthetic oligonucleotide
gucaacauagagccuucca

SEQ ID NO: 899810 - RNA, 19 nt, Artificial Sequence
  Description of Artificial Sequence: Synthetic oligonucleotide
acguuuacauaguguuugu

SEQ ID NO: 899811 - RNA, 19 nt, Artificial Sequence
  Description of Artificial Sequence: Synthetic oligonucleotide
uguuauuggcuggcuugag

SEQ ID NO: 899812 - RNA, 19 nt, Artificial Sequence
  Description of Artificial Sequence: Synthetic oligonucleotide
aggguacagcuuuugugga

SEQ ID NO: 899813 - RNA, 19 nt, Artificial Sequence
  Description of Artificial Sequence: Synthetic oligonucleotide
gcugaucgucaacauagag

SEQ ID NO: 899814 - RNA, 19 nt, Artificial Sequence
  Description of Artificial Sequence: Synthetic oligonucleotide
gacaaguauuccaaguccu

SEQ ID NO: 899815 - RNA, 19 nt, Artificial Sequence
  Description of Artificial Sequence: Synthetic oligonucleotide
uauuggcuggcuugaguua

SEQ ID NO: 899816 - RNA, 19 nt, Artificial Sequence
  Description of Artificial Sequence: Synthetic oligonucleotide
uuccuccuaugcuauccca

SEQ ID NO: 899817 - RNA, 19 nt, Artificial Sequence
  Description of Artificial Sequence: Synthetic oligonucleotide
ccaaucuuuaaauuuaagu

SEQ ID NO: 899818 - RNA, 19 nt, Artificial Sequence
  Description of Artificial Sequence: Synthetic oligonucleotide
augguuaaguguccauuua

SEQ ID NO: 899819 - RNA, 19 nt, Artificial Sequence
  Description of Artificial Sequence: Synthetic oligonucleotide
aaccugaguugaaaaugcu

SEQ ID NO: 899820 - RNA, 19 nt, Artificial Sequence
  Description of Artificial Sequence: Synthetic oligonucleotide
agauaucaauaccuaccua

SEQ ID NO: 899821 - RNA, 19 nt, Artificial Sequence
  Description of Artificial Sequence: Synthetic oligonucleotide
auaccuaccuaaauuucaa

SEQ ID NO: 899822 - RNA, 19 nt, Artificial Sequence
  Description of Artificial Sequence: Synthetic oligonucleotide
auaccaaguuggcaguguu

SEQ ID NO: 899823 - RNA, 19 nt, Artificial Sequence
  Description of Artificial Sequence: Synthetic oligonucleotide
aucaaccuccacaggguuc

SEQ ID NO: 899824 - RNA, 19 nt, Artificial Sequence
  Description of Artificial Sequence: Synthetic oligonucleotide
aguuauggccuagguaaca

SEQ ID NO: 899825 - RNA, 19 nt, Artificial Sequence
  Description of Artificial Sequence: Synthetic oligonucleotide
uacauggaucacagggaua

SEQ ID NO: 899826 - RNA, 19 nt, Artificial Sequence
  Description of Artificial Sequence: Synthetic oligonucleotide
cuaccuaaauuucaacagu

SEQ ID NO: 899827 - RNA, 19 nt, Artificial Sequence
  Description of Artificial Sequence: Synthetic oligonucleotide
auaacccuuggggaucuug

SEQ ID NO: 899828 - RNA, 19 nt, Artificial Sequence
  Description of Artificial Sequence: Synthetic oligonucleotide
auguuauuggcuggcuuga

SEQ ID NO: 899829 - RNA, 19 nt, Artificial Sequence
  Description of Artificial Sequence: Synthetic oligonucleotide
ggaucaguuacucgucuuc

SEQ ID NO: 899830 - RNA, 19 nt, Artificial Sequence
  Description of Artificial Sequence: Synthetic oligonucleotide
auauaacccuuggggaucu

SEQ ID NO: 899831 - RNA, 19 nt, Artificial Sequence
  Description of Artificial Sequence: Synthetic oligonucleotide
ggugacccaauaugaauga

SEQ ID NO: 899832 - RNA, 19 nt, Artificial Sequence
  Description of Artificial Sequence: Synthetic oligonucleotide
aagacccaugacguuuaca

SEQ ID NO: 899833 - RNA, 19 nt, Artificial Sequence
  Description of Artificial Sequence: Synthetic oligonucleotide
agcgcgcuauuuccucugg

SEQ ID NO: 899834 - RNA, 19 nt, Artificial Sequence
  Description of Artificial Sequence: Synthetic oligonucleotide
ggauauaaugaugcuguuc

SEQ ID NO: 899835 - RNA, 19 nt, Artificial Sequence
  Description of Artificial Sequence: Synthetic oligonucleotide
ugucuaagagugacaccuu

SEQ ID NO: 899836 - RNA, 19 nt, Artificial Sequence
  Description of Artificial Sequence: Synthetic oligonucleotide
caugacguuuacauagugu

SEQ ID NO: 899837 - RNA, 19 nt, Artificial Sequence
  Description of Artificial Sequence: Synthetic oligonucleotide
ucgcugauagccucugauu

SEQ ID NO: 899838 - RNA, 19 nt, Artificial Sequence
  Description of Artificial Sequence: Synthetic oligonucleotide
ucgucaacauagagccuuc

SEQ ID NO: 899839 - RNA, 19 nt, Artificial Sequence
  Description of Artificial Sequence: Synthetic oligonucleotide
gacccucagacaaguauuc

SEQ ID NO: 899840 - RNA, 19 nt, Artificial Sequence
  Description of Artificial Sequence: Synthetic oligonucleotide
cauucauagguguaugcau

SEQ ID NO: 899841 - RNA, 19 nt, Artificial Sequence
  Description of Artificial Sequence: Synthetic oligonucleotide
ggggauauaaugaugcugu

SEQ ID NO: 899842 - RNA, 19 nt, Artificial Sequence
  Description of Artificial Sequence: Synthetic oligonucleotide
aucuuguagcagucugccu

SEQ ID NO: 899843 - RNA, 19 nt, Artificial Sequence
  Description of Artificial Sequence: Synthetic oligonucleotide
uagcgcgcuauuuccucug

SEQ ID NO: 899844 - RNA, 19 nt, Artificial Sequence
  Description of Artificial Sequence: Synthetic oligonucleotide
uucaauccggagacacuuu

SEQ ID NO: 899845 - RNA, 19 nt, Artificial Sequence
  Description of Artificial Sequence: Synthetic oligonucleotide
uggaucaguuacucgucuu

SEQ ID NO: 899846 - RNA, 19 nt, Artificial Sequence
  Description of Artificial Sequence: Synthetic oligonucleotide
uggccuagguaacacccuu

SEQ ID NO: 899847 - RNA, 19 nt, Artificial Sequence
  Description of Artificial Sequence: Synthetic oligonucleotide
acacaucauaugauagacu

SEQ ID NO: 899848 - RNA, 19 nt, Artificial Sequence
  Description of Artificial Sequence: Synthetic oligonucleotide
gucuucgaaauacauggau

SEQ ID NO: 899849 - RNA, 19 nt, Artificial Sequence
  Description of Artificial Sequence: Synthetic oligonucleotide
guagcagucugccuaaauu

SEQ ID NO: 899850 - RNA, 19 nt, Artificial Sequence
  Description of Artificial Sequence: Synthetic oligonucleotide
uagagccuuccauauuauu

SEQ ID NO: 899851 - RNA, 19 nt, Artificial Sequence
  Description of Artificial Sequence: Synthetic oligonucleotide
caguuacucgucuucgaaa

SEQ ID NO: 899852 - RNA, 19 nt, Artificial Sequence
  Description of Artificial Sequence: Synthetic oligonucleotide
guuauuggcuggcuugagu

SEQ ID NO: 899853 - RNA, 19 nt, Artificial Sequence
  Description of Artificial Sequence: Synthetic oligonucleotide
ggaugaucggcccuccaga

SEQ ID NO: 899854 - RNA, 19 nt, Artificial Sequence
  Description of Artificial Sequence: Synthetic oligonucleotide
cagguuaggaugagaaccu

SEQ ID NO: 899855 - RNA, 19 nt, Artificial Sequence
  Description of Artificial Sequence: Synthetic oligonucleotide
gaauggauggguagucaua

SEQ ID NO: 899856 - RNA, 19 nt, Artificial Sequence
  Description of Artificial Sequence: Synthetic oligonucleotide
aucauaugauagacuuugu

SEQ ID NO: 899857 - RNA, 19 nt, Artificial Sequence
  Description of Artificial Sequence: Synthetic oligonucleotide
gagaaccuauuaagacuac

SEQ ID NO: 899858 - RNA, 19 nt, Artificial Sequence
  Description of Artificial Sequence: Synthetic oligonucleotide
gcagaguaugucugaguac

SEQ ID NO: 899859 - RNA, 19 nt, Artificial Sequence
  Description of Artificial Sequence: Synthetic oligonucleotide
uuguaguagcgcgcuauuu

SEQ ID NO: 899860 - RNA, 19 nt, Artificial Sequence
  Description of Artificial Sequence: Synthetic oligonucleotide
uuaggccaguguacuucaa

SEQ ID NO: 899861 - RNA, 19 nt, Artificial Sequence
  Description of Artificial Sequence: Synthetic oligonucleotide
ccauuuaaguuacuuguaa

SEQ ID NO: 899862 - RNA, 19 nt, Artificial Sequence
  Description of Artificial Sequence: Synthetic oligonucleotide
ggccaaacagcguguaaca

SEQ ID NO: 899863 - RNA, 19 nt, Artificial Sequence
  Description of Artificial Sequence: Synthetic oligonucleotide
cuccuaugcuaucccagca

SEQ ID NO: 899864 - RNA, 19 nt, Artificial Sequence
  Description of Artificial Sequence: Synthetic oligonucleotide
cggugcucaggaaagcugg

SEQ ID NO: 899865 - RNA, 19 nt, Artificial Sequence
  Description of Artificial Sequence: Synthetic oligonucleotide
cugcaucggcugcaguaag

SEQ ID NO: 899866 - RNA, 19 nt, Artificial Sequence
  Description of Artificial Sequence: Synthetic oligonucleotide
ccgauaauuucaaaauaaa

SEQ ID NO: 899867 - RNA, 19 nt, Artificial Sequence
  Description of Artificial Sequence: Synthetic oligonucleotide
cagagccuacaaucagcac

SEQ ID NO: 899868 - RNA, 19 nt, Artificial Sequence
  Description of Artificial Sequence: Synthetic oligonucleotide
cuugaguuauggccuaggu

SEQ ID NO: 899869 - RNA, 19 nt, Artificial Sequence
  Description of Artificial Sequence: Synthetic oligonucleotide
ccccuugcauguuauuggc

SEQ ID NO: 899870 - RNA, 19 nt, Artificial Sequence
  Description of Artificial Sequence: Synthetic oligonucleotide
gcaucggcugcaguaaggc

SEQ ID NO: 899871 - RNA, 19 nt, Artificial Sequence
  Description of Artificial Sequence: Synthetic oligonucleotide
acaucauaugauagacuuu

SEQ ID NO: 899872 - RNA, 19 nt, Artificial Sequence
  Description of Artificial Sequence: Synthetic oligonucleotide
cccaguuaauuuaagccaa

SEQ ID NO: 899873 - RNA, 19 nt, Artificial Sequence
  Description of Artificial Sequence: Synthetic oligonucleotide
guuaggaugagaaccuauu

SEQ ID NO: 899874 - RNA, 19 nt, Artificial Sequence
  Description of Artificial Sequence: Synthetic oligonucleotide
guuacucgucuucgaaaua

SEQ ID NO: 899875 - RNA, 19 nt, Artificial Sequence
  Description of Artificial Sequence: Synthetic oligonucleotide
ggauggguagucauaccca

SEQ ID NO: 899876 - RNA, 19 nt, Artificial Sequence
  Description of Artificial Sequence: Synthetic oligonucleotide
gggcauugaaugaaacaca

SEQ ID NO: 899877 - RNA, 19 nt, Artificial Sequence
  Description of Artificial Sequence: Synthetic oligonucleotide
auagagccuuccauauuau

SEQ ID NO: 899878 - RNA, 19 nt, Artificial Sequence
  Description of Artificial Sequence: Synthetic oligonucleotide
cccucagacaaguauucca

SEQ ID NO: 899879 - RNA, 19 nt, Artificial Sequence
  Description of Artificial Sequence: Synthetic oligonucleotide
gcauucuaguuaaaugaaa

SEQ ID NO: 899880 - RNA, 19 nt, Artificial Sequence
  Description of Artificial Sequence: Synthetic oligonucleotide
agcugaucgucaacauaga

SEQ ID NO: 899881 - RNA, 19 nt, Artificial Sequence
  Description of Artificial Sequence: Synthetic oligonucleotide
cuaugcuaucccagcauau

SEQ ID NO: 899882 - RNA, 19 nt, Artificial Sequence
  Description of Artificial Sequence: Synthetic oligonucleotide
acagcguguaacacccaau

SEQ ID NO: 899883 - RNA, 19 nt, Artificial Sequence
  Description of Artificial Sequence: Synthetic oligonucleotide
ccaaauucgggcauugaau

SEQ ID NO: 899884 - RNA, 19 nt, Artificial Sequence
  Description of Artificial Sequence: Synthetic oligonucleotide
acccaaugccccucccuuu

SEQ ID NO: 899885 - RNA, 19 nt, Artificial Sequence
  Description of Artificial Sequence: Synthetic oligonucleotide
guagcgcgcuauuuccucu

SEQ ID NO: 899886 - RNA, 19 nt, Artificial Sequence
  Description of Artificial Sequence: Synthetic oligonucleotide
gaaccaccugcuauucgcu

SEQ ID NO: 899887 - RNA, 19 nt, Artificial Sequence
  Description of Artificial Sequence: Synthetic oligonucleotide
ggccaguguacuucaaacu

SEQ ID NO: 899888 - RNA, 19 nt, Artificial Sequence
  Description of Artificial Sequence: Synthetic oligonucleotide
gccaaacagcguguaacac

SEQ ID NO: 899889 - RNA, 19 nt, Artificial Sequence
  Description of Artificial Sequence: Synthetic oligonucleotide
gcaguaaggugacccaaua

SEQ ID NO: 899890 - RNA, 19 nt, Artificial Sequence
  Description of Artificial Sequence: Synthetic oligonucleotide
guggccaaacagcguguaa

SEQ ID NO: 899891 - RNA, 19 nt, Artificial Sequence
  Description of Artificial Sequence: Synthetic oligonucleotide
agguuaggaugagaaccua

SEQ ID NO: 899892 - RNA, 19 nt, Artificial Sequence
  Description of Artificial Sequence: Synthetic oligonucleotide
aucggcccuccagacccuc

SEQ ID NO: 899893 - RNA, 19 nt, Artificial Sequence
  Description of Artificial Sequence: Synthetic oligonucleotide
ggccuagguaacacccuug

SEQ ID NO: 899894 - RNA, 19 nt, Artificial Sequence
  Description of Artificial Sequence: Synthetic oligonucleotide
ggccuuuaccaagaacuaa

SEQ ID NO: 899895 - RNA, 19 nt, Artificial Sequence
  Description of Artificial Sequence: Synthetic oligonucleotide
cauuuaggccaguguacuu

SEQ ID NO: 899896 - RNA, 19 nt, Artificial Sequence
  Description of Artificial Sequence: Synthetic oligonucleotide
ggcuugaguuauggccuag

SEQ ID NO: 899897 - RNA, 19 nt, Artificial Sequence
  Description of Artificial Sequence: Synthetic oligonucleotide
cuccaaauucgggcauuga

SEQ ID NO: 899898 - RNA, 19 nt, Artificial Sequence
  Description of Artificial Sequence: Synthetic oligonucleotide
gaucgucaacauagagccu

SEQ ID NO: 899899 - RNA, 19 nt, Artificial Sequence
  Description of Artificial Sequence: Synthetic oligonucleotide
ccggagacacuuugaagaa

SEQ ID NO: 899900 - RNA, 19 nt, Artificial Sequence
  Description of Artificial Sequence: Synthetic oligonucleotide
gguuaggaugagaaccuau

SEQ ID NO: 899901 - RNA, 19 nt, Artificial Sequence
  Description of Artificial Sequence: Synthetic oligonucleotide
cgcgcuauuuccucuggca

SEQ ID NO: 899902 - RNA, 19 nt, Artificial Sequence
  Description of Artificial Sequence: Synthetic oligonucleotide
gcgcgcuauuuccucuggc

SEQ ID NO: 899903 - RNA, 19 nt, Artificial Sequence
  Description of Artificial Sequence: Synthetic oligonucleotide
gguaacacccuuguuccuu

SEQ ID NO: 899904 - RNA, 19 nt, Artificial Sequence
  Description of Artificial Sequence: Synthetic oligonucleotide
gcuaucccgucuccuccuc

SEQ ID NO: 899905 - RNA, 19 nt, Artificial Sequence
  Description of Artificial Sequence: Synthetic oligonucleotide
gcgcuauuuccucuggcau

SEQ ID NO: 899906 - RNA, 19 nt, Artificial Sequence
  Description of Artificial Sequence: Synthetic oligonucleotide
cacccaaugccccucccuu

SEQ ID NO: 899907 - RNA, 19 nt, Artificial Sequence
  Description of Artificial Sequence: Synthetic oligonucleotide
gcauguuauuggcuggcuu

SEQ ID NO: 899908 - RNA, 19 nt, Artificial Sequence
  Description of Artificial Sequence: Synthetic oligonucleotide
gggauauaaugaugcuguu

SEQ ID NO: 899909 - RNA, 19 nt, Artificial Sequence
  Description of Artificial Sequence: Synthetic oligonucleotide
cgucaacauagagccuucc

SEQ ID NO: 899910 - RNA, 19 nt, Artificial Sequence
  Description of Artificial Sequence: Synthetic oligonucleotide
cccaaugccccucccuuua

SEQ ID NO: 899911 - RNA, 19 nt, Artificial Sequence
  Description of Artificial Sequence: Synthetic oligonucleotide
cccuuuaaguuccuucguu

SEQ ID NO: 899912 - RNA, 19 nt, Artificial Sequence
  Description of Artificial Sequence: Synthetic oligonucleotide
caguugcaagagcaacauu

SEQ ID NO: 899913 - RNA, 19 nt, Artificial Sequence
  Description of Artificial Sequence: Synthetic oligonucleotide
gaucggcccuccagacccu

SEQ ID NO: 899914 - RNA, 19 nt, Artificial Sequence
  Description of Artificial Sequence: Synthetic oligonucleotide
cuccaaccaaagggcccaa

SEQ ID NO: 899915 - RNA, 19 nt, Artificial Sequence
  Description of Artificial Sequence: Synthetic oligonucleotide
gcccucaacuugagcagua

SEQ ID NO: 899916 - RNA, 19 nt, Artificial Sequence
  Description of Artificial Sequence: Synthetic oligonucleotide
cccucaacuugagcaguaa

SEQ ID NO: 899917 - RNA, 19 nt, Artificial Sequence
  Description of Artificial Sequence: Synthetic oligonucleotide
aagauuuaugcacuggggc

SEQ ID NO: 899918 - RNA, 19 nt, Artificial Sequence
  Description of Artificial Sequence: Synthetic oligonucleotide
auaacauuuguacaccacc

SEQ ID NO: 899919 - RNA, 19 nt, Artificial Sequence
  Description of Artificial Sequence: Synthetic oligonucleotide
aacgacauaauggaagugc

SEQ ID NO: 899920 - RNA, 19 nt, Artificial Sequence
  Description of Artificial Sequence: Synthetic oligonucleotide
auggaagugacacagucgc

SEQ ID NO: 899921 - RNA, 19 nt, Artificial Sequence
  Description of Artificial Sequence: Synthetic oligonucleotide
aauggaagugcuuuagcuc

SEQ ID NO: 899922 - RNA, 19 nt, Artificial Sequence
  Description of Artificial Sequence: Synthetic oligonucleotide
agauuuaugcacuggggcc

SEQ ID NO: 899923 - RNA, 19 nt, Artificial Sequence
  Description of Artificial Sequence: Synthetic oligonucleotide
uggguuguaagauuuaugc

SEQ ID NO: 899924 - RNA, 19 nt, Artificial Sequence
  Description of Artificial Sequence: Synthetic oligonucleotide
ugucauucacuuuacagcc

SEQ ID NO: 899925 - RNA, 19 nt, Artificial Sequence
  Description of Artificial Sequence: Synthetic oligonucleotide
acagcauauagucuuguac

SEQ ID NO: 899926 - RNA, 19 nt, Artificial Sequence
  Description of Artificial Sequence: Synthetic oligonucleotide
uaagauuuaugcacugggg

SEQ ID NO: 899927 - RNA, 19 nt, Artificial Sequence
  Description of Artificial Sequence: Synthetic oligonucleotide
ugaagaauauggcagggca

SEQ ID NO: 899928 - RNA, 19 nt, Artificial Sequence
  Description of Artificial Sequence: Synthetic oligonucleotide
guaagauuuaugcacuggg

SEQ ID NO: 899929 - RNA, 19 nt, Artificial Sequence
  Description of Artificial Sequence: Synthetic oligonucleotide
agcauauagucuuguaccc

SEQ ID NO: 899930 - RNA, 19 nt, Artificial Sequence
  Description of Artificial Sequence: Synthetic oligonucleotide
aauuucggcccucauuuuc

SEQ ID NO: 899931 - RNA, 19 nt, Artificial Sequence
  Description of Artificial Sequence: Synthetic oligonucleotide
uuagccuuggggcaaagcc

SEQ ID NO: 899932 - RNA, 19 nt, Artificial Sequence
  Description of Artificial Sequence: Synthetic oligonucleotide
uguacuguaccuuuacagc

SEQ ID NO: 899933 - RNA, 19 nt, Artificial Sequence
  Description of Artificial Sequence: Synthetic oligonucleotide
uuccauuaugccuucaaag

SEQ ID NO: 899934 - RNA, 19 nt, Artificial Sequence
  Description of Artificial Sequence: Synthetic oligonucleotide
uguuucgcagcacaaguag

SEQ ID NO: 899935 - RNA, 19 nt, Artificial Sequence
  Description of Artificial Sequence: Synthetic oligonucleotide
uguaggacccagcugaagc

SEQ ID NO: 899936 - RNA, 19 nt, Artificial Sequence
  Description of Artificial Sequence: Synthetic oligonucleotide
cagaacacgaagcaggagg

SEQ ID NO: 899937 - RNA, 19 nt, Artificial Sequence
  Description of Artificial Sequence: Synthetic oligonucleotide
ucaaacuugaaugucuccc

SEQ ID NO: 899938 - RNA, 19 nt, Artificial Sequence
  Description of Artificial Sequence: Synthetic oligonucleotide
uccauuaugccuucaaagu

SEQ ID NO: 899939 - RNA, 19 nt, Artificial Sequence
  Description of Artificial Sequence: Synthetic oligonucleotide
gacaacgacauaauggaag

SEQ ID NO: 899940 - RNA, 19 nt, Artificial Sequence
  Description of Artificial Sequence: Synthetic oligonucleotide
uaacauuuguacaccacca

SEQ ID NO: 899941 - RNA, 19 nt, Artificial Sequence
  Description of Artificial Sequence: Synthetic oligonucleotide
agacuuaucccagugcacc

SEQ ID NO: 899942 - RNA, 19 nt, Artificial Sequence
  Description of Artificial Sequence: Synthetic oligonucleotide
uuugcuacguccugcacug

SEQ ID NO: 899943 - RNA, 19 nt, Artificial Sequence
  Description of Artificial Sequence: Synthetic oligonucleotide
agaauuucggcccucauuu

SEQ ID NO: 899944 - RNA, 19 nt, Artificial Sequence
  Description of Artificial Sequence: Synthetic oligonucleotide
gaaauagcgggcuccgagg

SEQ ID NO: 899945 - RNA, 19 nt, Artificial Sequence
  Description of Artificial Sequence: Synthetic oligonucleotide
ucuaccgcaagucgcagcc

SEQ ID NO: 899946 - RNA, 19 nt, Artificial Sequence
  Description of Artificial Sequence: Synthetic oligonucleotide
aauggaagugacacagucg

SEQ ID NO: 899947 - RNA, 19 nt, Artificial Sequence
  Description of Artificial Sequence: Synthetic oligonucleotide
auaguguacuccccauucc

SEQ ID NO: 899948 - RNA, 19 nt, Artificial Sequence
  Description of Artificial Sequence: Synthetic oligonucleotide
agcagaccaaccuucagag

SEQ ID NO: 899949 - RNA, 19 nt, Artificial Sequence
  Description of Artificial Sequence: Synthetic oligonucleotide
caucauguagcuuggcacg

SEQ ID NO: 899950 - RNA, 19 nt, Artificial Sequence
  Description of Artificial Sequence: Synthetic oligonucleotide
uugacccaguuucacauag

SEQ ID NO: 899951 - RNA, 19 nt, Artificial Sequence
  Description of Artificial Sequence: Synthetic oligonucleotide
aucaaagcggucucguagg

SEQ ID NO: 899952 - RNA, 19 nt, Artificial Sequence
  Description of Artificial Sequence: Synthetic oligonucleotide
aagaauauggcagggcaug

SEQ ID NO: 899953 - RNA, 19 nt, Artificial Sequence
  Description of Artificial Sequence: Synthetic oligonucleotide
guacuguaccuuuacagcc

SEQ ID NO: 899954 - RNA, 19 nt, Artificial Sequence
  Description of Artificial Sequence: Synthetic oligonucleotide
uuucgcagcacaaguagca

SEQ ID NO: 899955 - RNA, 19 nt, Artificial Sequence
  Description of Artificial Sequence: Synthetic oligonucleotide
aggauaacauuuguacacc

SEQ ID NO: 899956 - RNA, 19 nt, Artificial Sequence
  Description of Artificial Sequence: Synthetic oligonucleotide
uuguacaccaccaguaguc

SEQ ID NO: 899957 - RNA, 19 nt, Artificial Sequence
  Description of Artificial Sequence: Synthetic oligonucleotide
uuuacagccacagcagugc

SEQ ID NO: 899958 - RNA, 19 nt, Artificial Sequence
  Description of Artificial Sequence: Synthetic oligonucleotide
cuggaagaguucauuaggc

SEQ ID NO: 899959 - RNA, 19 nt, Artificial Sequence
  Description of Artificial Sequence: Synthetic oligonucleotide
acaacgacauaauggaagu

SEQ ID NO: 899960 - RNA, 19 nt, Artificial Sequence
  Description of Artificial Sequence: Synthetic oligonucleotide
gacccaguuucacauagag

SEQ ID NO: 899961 - RNA, 19 nt, Artificial Sequence
  Description of Artificial Sequence: Synthetic oligonucleotide
agcucuacgaguugcagca

SEQ ID NO: 899962 - RNA, 19 nt, Artificial Sequence
  Description of Artificial Sequence: Synthetic oligonucleotide
agccauauccugcauguag

SEQ ID NO: 899963 - RNA, 19 nt, Artificial Sequence
  Description of Artificial Sequence: Synthetic oligonucleotide
uccaucuggaccuuuccgc

SEQ ID NO: 899964 - RNA, 19 nt, Artificial Sequence
  Description of Artificial Sequence: Synthetic oligonucleotide
uaccaucuaccgcaagucg

SEQ ID NO: 899965 - RNA, 19 nt, Artificial Sequence
  Description of Artificial Sequence: Synthetic oligonucleotide
uguaaaugccaugguaugc

SEQ ID NO: 899966 - RNA, 19 nt, Artificial Sequence
  Description of Artificial Sequence: Synthetic oligonucleotide
ucugaagaauauggcaggg

SEQ ID NO: 899967 - RNA, 19 nt, Artificial Sequence
  Description of Artificial Sequence: Synthetic oligonucleotide
uuuguacaccaccaguagu

SEQ ID NO: 899968 - RNA, 19 nt, Artificial Sequence
  Description of Artificial Sequence: Synthetic oligonucleotide
uguagcuuggcacggugca

SEQ ID NO: 899969 - RNA, 19 nt, Artificial Sequence
  Description of Artificial Sequence: Synthetic oligonucleotide
ucucguaggucaauguacu

SEQ ID NO: 899970 - RNA, 19 nt, Artificial Sequence
  Description of Artificial Sequence: Synthetic oligonucleotide
uggcguaagaggcugcugc

SEQ ID NO: 899971 - RNA, 19 nt, Artificial Sequence
  Description of Artificial Sequence: Synthetic oligonucleotide
uccucguaggauaacauuu

SEQ ID NO: 899972 - RNA, 19 nt, Artificial Sequence
  Description of Artificial Sequence: Synthetic oligonucleotide
uguacuccccauuccaggc

SEQ ID NO: 899973 - RNA, 19 nt, Artificial Sequence
  Description of Artificial Sequence: Synthetic oligonucleotide
acacagggaggaucggucc

SEQ ID NO: 899974 - RNA, 19 nt, Artificial Sequence
  Description of Artificial Sequence: Synthetic oligonucleotide
ugcaugagcaccucagaga

SEQ ID NO: 899975 - RNA, 19 nt, Artificial Sequence
  Description of Artificial Sequence: Synthetic oligonucleotide
acuguaccuuuacagccac

SEQ ID NO: 899976 - RNA, 19 nt, Artificial Sequence
  Description of Artificial Sequence: Synthetic oligonucleotide
cauaguguacuccccauuc

SEQ ID NO: 899977 - RNA, 19 nt, Artificial Sequence
  Description of Artificial Sequence: Synthetic oligonucleotide
guagaauaucuguucagca

SEQ ID NO: 899978 - RNA, 19 nt, Artificial Sequence
  Description of Artificial Sequence: Synthetic oligonucleotide
gauguacucagguggcagc

SEQ ID NO: 899979 - RNA, 19 nt, Artificial Sequence
  Description of Artificial Sequence: Synthetic oligonucleotide
accaucuaccgcaagucgc

SEQ ID NO: 899980 - RNA, 19 nt, Artificial Sequence
  Description of Artificial Sequence: Synthetic oligonucleotide
ugcuagacuuaucccagug

SEQ ID NO: 899981 - RNA, 19 nt, Artificial Sequence
  Description of Artificial Sequence: Synthetic oligonucleotide
aggucaauguacuguaccu

SEQ ID NO: 899982 - RNA, 19 nt, Artificial Sequence
  Description of Artificial Sequence: Synthetic oligonucleotide
uagccuuggggcaaagccc

SEQ ID NO: 899983 - RNA, 19 nt, Artificial Sequence
  Description of Artificial Sequence: Synthetic oligonucleotide
agaacacgaagcaggaggg

SEQ ID NO: 899984 - RNA, 19 nt, Artificial Sequence
  Description of Artificial Sequence: Synthetic oligonucleotide
cuaggaacugguagagacc

SEQ ID NO: 899985 - RNA, 19 nt, Artificial Sequence
  Description of Artificial Sequence: Synthetic oligonucleotide
aacacgaagcaggagggca

SEQ ID NO: 899986 - RNA, 19 nt, Artificial Sequence
  Description of Artificial Sequence: Synthetic oligonucleotide
uaucccagugcacccgagg

SEQ ID NO: 899987 - RNA, 19 nt, Artificial Sequence
  Description of Artificial Sequence: Synthetic oligonucleotide
agagaccugccaaagcgcc

SEQ ID NO: 899988 - RNA, 19 nt, Artificial Sequence
  Description of Artificial Sequence: Synthetic oligonucleotide
acacgcaacgucuggaugu

SEQ ID NO: 899989 - RNA, 19 nt, Artificial Sequence
  Description of Artificial Sequence: Synthetic oligonucleotide
cauuguguuuaagagcccc

SEQ ID NO: 899990 - RNA, 19 nt, Artificial Sequence
  Description of Artificial Sequence: Synthetic oligonucleotide
cuuuacagccacagcagug

SEQ ID NO: 899991 - RNA, 19 nt, Artificial Sequence
  Description of Artificial Sequence: Synthetic oligonucleotide
cguaggauaacauuuguac

SEQ ID NO: 899992 - RNA, 19 nt, Artificial Sequence
  Description of Artificial Sequence: Synthetic oligonucleotide
uagacagucuccucacggc

SEQ ID NO: 899993 - RNA, 19 nt, Artificial Sequence
  Description of Artificial Sequence: Synthetic oligonucleotide
gauaacauuuguacaccac

SEQ ID NO: 899994 - RNA, 19 nt, Artificial Sequence
  Description of Artificial Sequence: Synthetic oligonucleotide
aagaguucauuaggcagug

SEQ ID NO: 899995 - RNA, 19 nt, Artificial Sequence
  Description of Artificial Sequence: Synthetic oligonucleotide
ugauguuucgcagcacaag

SEQ ID NO: 899996 - RNA, 19 nt, Artificial Sequence
  Description of Artificial Sequence: Synthetic oligonucleotide
cauauagucuuguacccca

SEQ ID NO: 899997 - RNA, 19 nt, Artificial Sequence
  Description of Artificial Sequence: Synthetic oligonucleotide
uguaccccaaguucagcug

SEQ ID NO: 899998 - RNA, 19 nt, Artificial Sequence
  Description of Artificial Sequence: Synthetic oligonucleotide
cauguagacagucuccuca

SEQ ID NO: 899999 - RNA, 19 nt, Artificial Sequence
  Description of Artificial Sequence: Synthetic oligonucleotide
ugcaugagcucuacgaguu

SEQ ID NO: 900000 - RNA, 19 nt, Artificial Sequence
  Description of Artificial Sequence: Synthetic oligonucleotide
ugguaugcugcacccacca

SEQ ID NO: 900001 - RNA, 19 nt, Artificial Sequence
  Description of Artificial Sequence: Synthetic oligonucleotide
agugaaauagcgggcuccg

SEQ ID NO: 900002 - RNA, 19 nt, Artificial Sequence
  Description of Artificial Sequence: Synthetic oligonucleotide
caugguaugcugcacccac

SEQ ID NO: 900003 - RNA, 19 nt, Artificial Sequence
  Description of Artificial Sequence: Synthetic oligonucleotide
gggacaacgacauaaugga

SEQ ID NO: 900004 - RNA, 19 nt, Artificial Sequence
  Description of Artificial Sequence: Synthetic oligonucleotide
aucuaccgcaagucgcagc

SEQ ID NO: 900005 - RNA, 19 nt, Artificial Sequence
  Description of Artificial Sequence: Synthetic oligonucleotide
augauggcccgccacagcu

SEQ ID NO: 900006 - RNA, 19 nt, Artificial Sequence
  Description of Artificial Sequence: Synthetic oligonucleotide
gauguuucgcagcacaagu

SEQ ID NO: 900007 - RNA, 19 nt, Artificial Sequence
  Description of Artificial Sequence: Synthetic oligonucleotide
ugccauugggcucuugagu

SEQ ID NO: 900008 - RNA, 19 nt, Artificial Sequence
  Description of Artificial Sequence: Synthetic oligonucleotide
uguugaguugauggcacgc

SEQ ID NO: 900009 - RNA, 19 nt, Artificial Sequence
  Description of Artificial Sequence: Synthetic oligonucleotide
auuucggcccucauuuucg

SEQ ID NO: 900010 - RNA, 19 nt, Artificial Sequence
  Description of Artificial Sequence: Synthetic oligonucleotide
gacuuaucccagugcaccc

SEQ ID NO: 900011 - RNA, 19 nt, Artificial Sequence
  Description of Artificial Sequence: Synthetic oligonucleotide
cacuguauugauguuucgc

SEQ ID NO: 900012 - RNA, 19 nt, Artificial Sequence
  Description of Artificial Sequence: Synthetic oligonucleotide
ucuacgaguugcagcagaa

SEQ ID NO: 900013 - RNA, 19 nt, Artificial Sequence
  Description of Artificial Sequence: Synthetic oligonucleotide
cuggauguacucagguggc

SEQ ID NO: 900014 - RNA, 19 nt, Artificial Sequence
  Description of Artificial Sequence: Synthetic oligonucleotide
ucguaggucaauguacugu

SEQ ID NO: 900015 - RNA, 19 nt, Artificial Sequence
  Description of Artificial Sequence: Synthetic oligonucleotide
ugcuacguccugcacugcc

SEQ ID NO: 900016 - RNA, 19 nt, Artificial Sequence
  Description of Artificial Sequence: Synthetic oligonucleotide
ugcagugaaauagcgggcu

SEQ ID NO: 900017 - RNA, 19 nt, Artificial Sequence
  Description of Artificial Sequence: Synthetic oligonucleotide
ugcauguagacagucuccu

SEQ ID NO: 900018 - RNA, 19 nt, Artificial Sequence
  Description of Artificial Sequence: Synthetic oligonucleotide
auguugaguugauggcacg

SEQ ID NO: 900019 - RNA, 19 nt, Artificial Sequence
  Description of Artificial Sequence: Synthetic oligonucleotide
ggagcacaguccuugaccc

SEQ ID NO: 900020 - RNA, 19 nt, Artificial Sequence
  Description of Artificial Sequence: Synthetic oligonucleotide
uagacuuaucccagugcac

SEQ ID NO: 900021 - RNA, 19 nt, Artificial Sequence
  Description of Artificial Sequence: Synthetic oligonucleotide
agaccaaccuucagagacc

SEQ ID NO: 900022 - RNA, 19 nt, Artificial Sequence
  Description of Artificial Sequence: Synthetic oligonucleotide
aacagcauauagucuugua

SEQ ID NO: 900023 - RNA, 19 nt, Artificial Sequence
  Description of Artificial Sequence: Synthetic oligonucleotide
gagggacaacgacauaaug

SEQ ID NO: 900024 - RNA, 19 nt, Artificial Sequence
  Description of Artificial Sequence: Synthetic oligonucleotide
ggaaguagcgguccacagg

SEQ ID NO: 900025 - RNA, 19 nt, Artificial Sequence
  Description of Artificial Sequence: Synthetic oligonucleotide
ucguaggauaacauuugua

SEQ ID NO: 900026 - RNA, 19 nt, Artificial Sequence
  Description of Artificial Sequence: Synthetic oligonucleotide
agccuuguccuccagcaca

SEQ ID NO: 900027 - RNA, 19 nt, Artificial Sequence
  Description of Artificial Sequence: Synthetic oligonucleotide
uaccccaaguucagcugcg

SEQ ID NO: 900028 - RNA, 19 nt, Artificial Sequence
  Description of Artificial Sequence: Synthetic oligonucleotide
guaccccaaguucagcugc

SEQ ID NO: 900029 - RNA, 19 nt, Artificial Sequence
  Description of Artificial Sequence: Synthetic oligonucleotide
ggugcaugagcucuacgag

SEQ ID NO: 900030 - RNA, 19 nt, Artificial Sequence
  Description of Artificial Sequence: Synthetic oligonucleotide
guucacgagccauauccug

SEQ ID NO: 900031 - RNA, 19 nt, Artificial Sequence
  Description of Artificial Sequence: Synthetic oligonucleotide
uucacagaagucagcuguc

SEQ ID NO: 900032 - RNA, 19 nt, Artificial Sequence
  Description of Artificial Sequence: Synthetic oligonucleotide
ucauuguguuuaagagccc

SEQ ID NO: 900033 - RNA, 19 nt, Artificial Sequence
  Description of Artificial Sequence: Synthetic oligonucleotide
caaacuugaaugucuccca

SEQ ID NO: 900034 - RNA, 19 nt, Artificial Sequence
  Description of Artificial Sequence: Synthetic oligonucleotide
cuucacauaccccgggcug

SEQ ID NO: 900035 - RNA, 19 nt, Artificial Sequence
  Description of Artificial Sequence: Synthetic oligonucleotide
gacaucaccuucacauacc

SEQ ID NO: 900036 - RNA, 19 nt, Artificial Sequence
  Description of Artificial Sequence: Synthetic oligonucleotide
gcacaaguagcaugggccg

SEQ ID NO: 900037 - RNA, 19 nt, Artificial Sequence
  Description of Artificial Sequence: Synthetic oligonucleotide
agagugaaugaagccagug

SEQ ID NO: 900038 - RNA, 19 nt, Artificial Sequence
  Description of Artificial Sequence: Synthetic oligonucleotide
ugaaugucucccagaugac

SEQ ID NO: 900039 - RNA, 19 nt, Artificial Sequence
  Description of Artificial Sequence: Synthetic oligonucleotide
aaagcgcccgauaccaucu

SEQ ID NO: 900040 - RNA, 19 nt, Artificial Sequence
  Description of Artificial Sequence: Synthetic oligonucleotide
ucgcagcacaaguagcaug

SEQ ID NO: 900041 - RNA, 19 nt, Artificial Sequence
  Description of Artificial Sequence: Synthetic oligonucleotide
acuuaucccagugcacccg

SEQ ID NO: 900042 - RNA, 19 nt, Artificial Sequence
  Description of Artificial Sequence: Synthetic oligonucleotide
cuuuagcucuugagcacag

SEQ ID NO: 900043 - RNA, 19 nt, Artificial Sequence
  Description of Artificial Sequence: Synthetic oligonucleotide
ggccagaacacgaagcagg

SEQ ID NO: 900044 - RNA, 19 nt, Artificial Sequence
  Description of Artificial Sequence: Synthetic oligonucleotide
ugccaaagcgcccgauacc

SEQ ID NO: 900045 - RNA, 19 nt, Artificial Sequence
  Description of Artificial Sequence: Synthetic oligonucleotide
ccaauguugaguugauggc

SEQ ID NO: 900046 - RNA, 19 nt, Artificial Sequence
  Description of Artificial Sequence: Synthetic oligonucleotide
gagaugagcagaccaaccu

SEQ ID NO: 900047 - RNA, 19 nt, Artificial Sequence
  Description of Artificial Sequence: Synthetic oligonucleotide
gucucguaggucaauguac

SEQ ID NO: 900048 - RNA, 19 nt, Artificial Sequence
  Description of Artificial Sequence: Synthetic oligonucleotide
gcuugcuagacuuauccca

SEQ ID NO: 900049 - RNA, 19 nt, Artificial Sequence
  Description of Artificial Sequence: Synthetic oligonucleotide
cugccaaagcgcccgauac

SEQ ID NO: 900050 - RNA, 19 nt, Artificial Sequence
  Description of Artificial Sequence: Synthetic oligonucleotide
ugagcucuacgaguugcag

SEQ ID NO: 900051 - RNA, 19 nt, Artificial Sequence
  Description of Artificial Sequence: Synthetic oligonucleotide
ucaaagcggucucguaggu

SEQ ID NO: 900052 - RNA, 19 nt, Artificial Sequence
  Description of Artificial Sequence: Synthetic oligonucleotide
cugaagaauauggcagggc

SEQ ID NO: 900053 - RNA, 19 nt, Artificial Sequence
  Description of Artificial Sequence: Synthetic oligonucleotide
cugcagugaaauagcgggc

SEQ ID NO: 900054 - RNA, 19 nt, Artificial Sequence
  Description of Artificial Sequence: Synthetic oligonucleotide
auguagcuuggcacggugc

SEQ ID NO: 900055 - RNA, 19 nt, Artificial Sequence
  Description of Artificial Sequence: Synthetic oligonucleotide
uuccgcaccagaacauuuc

SEQ ID NO: 900056 - RNA, 19 nt, Artificial Sequence
  Description of Artificial Sequence: Synthetic oligonucleotide
aggaugauggcccgccaca

SEQ ID NO: 900057 - RNA, 19 nt, Artificial Sequence
  Description of Artificial Sequence: Synthetic oligonucleotide
uguuguggcucagggagcu

SEQ ID NO: 900058 - RNA, 19 nt, Artificial Sequence
  Description of Artificial Sequence: Synthetic oligonucleotide
aguucagcugcgugugucu

SEQ ID NO: 900059 - RNA, 19 nt, Artificial Sequence
  Description of Artificial Sequence: Synthetic oligonucleotide
aagucgcagccuccucuuc

SEQ ID NO: 900060 - RNA, 19 nt, Artificial Sequence
  Description of Artificial Sequence: Synthetic oligonucleotide
cagugaaauagcgggcucc

SEQ ID NO: 900061 - RNA, 19 nt, Artificial Sequence
  Description of Artificial Sequence: Synthetic oligonucleotide
acgagccauauccugcaug

SEQ ID NO: 900062 - RNA, 19 nt, Artificial Sequence
  Description of Artificial Sequence: Synthetic oligonucleotide
acauaauggaagugcuuua

SEQ ID NO: 900063 - RNA, 19 nt, Artificial Sequence
  Description of Artificial Sequence: Synthetic oligonucleotide
uacucagguggcagcaggu

SEQ ID NO: 900064 - RNA, 19 nt, Artificial Sequence
  Description of Artificial Sequence: Synthetic oligonucleotide
augaccuugauguggcgua

SEQ ID NO: 900065 - RNA, 19 nt, Artificial Sequence
  Description of Artificial Sequence: Synthetic oligonucleotide
gaugauggcccgccacagc

SEQ ID NO: 900066 - RNA, 19 nt, Artificial Sequence
  Description of Artificial Sequence: Synthetic oligonucleotide
gacauaauggaagugcuuu

SEQ ID NO: 900067 - RNA, 19 nt, Artificial Sequence
  Description of Artificial Sequence: Synthetic oligonucleotide
cucggaagccccgagugag

SEQ ID NO: 900068 - RNA, 19 nt, Artificial Sequence
  Description of Artificial Sequence: Synthetic oligonucleotide
uugcaguuguuguggcuca

SEQ ID NO: 900069 - RNA, 19 nt, Artificial Sequence
  Description of Artificial Sequence: Synthetic oligonucleotide
gauuuaugcacuggggccu

SEQ ID NO: 900070 - RNA, 19 nt, Artificial Sequence
  Description of Artificial Sequence: Synthetic oligonucleotide
aaguguucacgagccauau

SEQ ID NO: 900071 - RNA, 19 nt, Artificial Sequence
  Description of Artificial Sequence: Synthetic oligonucleotide
uuaucccagugcacccgag

SEQ ID NO: 900072 - RNA, 19 nt, Artificial Sequence
  Description of Artificial Sequence: Synthetic oligonucleotide
aguguacuccccauuccag

SEQ ID NO: 900073 - RNA, 19 nt, Artificial Sequence
  Description of Artificial Sequence: Synthetic oligonucleotide
guuucgcagcacaaguagc

SEQ ID NO: 900074 - RNA, 19 nt, Artificial Sequence
  Description of Artificial Sequence: Synthetic oligonucleotide
agcgcccgauaccaucuac

SEQ ID NO: 900075 - RNA, 19 nt, Artificial Sequence
  Description of Artificial Sequence: Synthetic oligonucleotide
caucggcucauagucaaac

SEQ ID NO: 900076 - RNA, 19 nt, Artificial Sequence
  Description of Artificial Sequence: Synthetic oligonucleotide
acgacauaauggaagugcu

SEQ ID NO: 900077 - RNA, 19 nt, Artificial Sequence
  Description of Artificial Sequence: Synthetic oligonucleotide
agagaacagcauauagucu

SEQ ID NO: 900078 - RNA, 19 nt, Artificial Sequence
  Description of Artificial Sequence: Synthetic oligonucleotide
cauuuucgaaguccagcuc

SEQ ID NO: 900079 - RNA, 19 nt, Artificial Sequence
  Description of Artificial Sequence: Synthetic oligonucleotide
aucggcucauagucaaacu

SEQ ID NO: 900080 - RNA, 19 nt, Artificial Sequence
  Description of Artificial Sequence: Synthetic oligonucleotide
ccgagugagagccuugucc

SEQ ID NO: 900081 - RNA, 19 nt, Artificial Sequence
  Description of Artificial Sequence: Synthetic oligonucleotide
auaccccgggcuguucucc

SEQ ID NO: 900082 - RNA, 19 nt, Artificial Sequence
  Description of Artificial Sequence: Synthetic oligonucleotide
acauaccccgggcuguucu

SEQ ID NO: 900083 - RNA, 19 nt, Artificial Sequence
  Description of Artificial Sequence: Synthetic oligonucleotide
guaccuuuacagccacagc

SEQ ID NO: 900084 - RNA, 19 nt, Artificial Sequence
  Description of Artificial Sequence: Synthetic oligonucleotide
uaccgcaagucgcagccuc

SEQ ID NO: 900085 - RNA, 19 nt, Artificial Sequence
  Description of Artificial Sequence: Synthetic oligonucleotide
acaaguagcaugggccgug

SEQ ID NO: 900086 - RNA, 19 nt, Artificial Sequence
  Description of Artificial Sequence: Synthetic oligonucleotide
augguaugcugcacccacc

SEQ ID NO: 900087 - RNA, 19 nt, Artificial Sequence
  Description of Artificial Sequence: Synthetic oligonucleotide
cuacguccugcacugccag

SEQ ID NO: 900088 - RNA, 19 nt, Artificial Sequence
  Description of Artificial Sequence: Synthetic oligonucleotide
uuuagcucuugagcacagc

SEQ ID NO: 900089 - RNA, 19 nt, Artificial Sequence
  Description of Artificial Sequence: Synthetic oligonucleotide
cccgauaccaucuaccgca

SEQ ID NO: 900090 - RNA, 19 nt, Artificial Sequence
  Description of Artificial Sequence: Synthetic oligonucleotide
gggugcaugagcucuacga

SEQ ID NO: 900091 - RNA, 19 nt, Artificial Sequence
  Description of Artificial Sequence: Synthetic oligonucleotide
ggcccaggcgcacuggucg

SEQ ID NO: 900092 - RNA, 19 nt, Artificial Sequence
  Description of Artificial Sequence: Synthetic oligonucleotide
ucagcacccgcuugcuaga

SEQ ID NO: 900093 - RNA, 19 nt, Artificial Sequence
  Description of Artificial Sequence: Synthetic oligonucleotide
uuucggcccucauuuucga

SEQ ID NO: 900094 - RNA, 19 nt, Artificial Sequence
  Description of Artificial Sequence: Synthetic oligonucleotide
cucguaggucaauguacug

SEQ ID NO: 900095 - RNA, 19 nt, Artificial Sequence
  Description of Artificial Sequence: Synthetic oligonucleotide
auccugcauguagacaguc

SEQ ID NO: 900096 - RNA, 19 nt, Artificial Sequence
  Description of Artificial Sequence: Synthetic oligonucleotide
ugguagagaccguggucca

SEQ ID NO: 900097 - RNA, 19 nt, Artificial Sequence
  Description of Artificial Sequence: Synthetic oligonucleotide
cagccuugcaguuguugug

SEQ ID NO: 900098 - RNA, 19 nt, Artificial Sequence
  Description of Artificial Sequence: Synthetic oligonucleotide
ugccuuuugauggccucug

SEQ ID NO: 900099 - RNA, 19 nt, Artificial Sequence
  Description of Artificial Sequence: Synthetic oligonucleotide
cacuggucgcugcaugagc

SEQ ID NO: 900100 - RNA, 19 nt, Artificial Sequence
  Description of Artificial Sequence: Synthetic oligonucleotide
uccccaucaaagcggucuc

SEQ ID NO: 900101 - RNA, 19 nt, Artificial Sequence
  Description of Artificial Sequence: Synthetic oligonucleotide
uauugauguuucgcagcac

SEQ ID NO: 900102 - RNA, 19 nt, Artificial Sequence
  Description of Artificial Sequence: Synthetic oligonucleotide
uaugcacuggggccugcuc

SEQ ID NO: 900103 - RNA, 19 nt, Artificial Sequence
  Description of Artificial Sequence: Synthetic oligonucleotide
uggucgcugcaugagcacc

SEQ ID NO: 900104 - RNA, 19 nt, Artificial Sequence
  Description of Artificial Sequence: Synthetic oligonucleotide
cuuccauuaugccuucaaa

SEQ ID NO: 900105 - RNA, 19 nt, Artificial Sequence
  Description of Artificial Sequence: Synthetic oligonucleotide
ggaggaucgguccuucuca

SEQ ID NO: 900106 - RNA, 19 nt, Artificial Sequence
  Description of Artificial Sequence: Synthetic oligonucleotide
ugaggaaguagcgguccac

SEQ ID NO: 900107 - RNA, 19 nt, Artificial Sequence
  Description of Artificial Sequence: Synthetic oligonucleotide
gaacacgaagcaggagggc

SEQ ID NO: 900108 - RNA, 19 nt, Artificial Sequence
  Description of Artificial Sequence: Synthetic oligonucleotide
auguacucagguggcagca

SEQ ID NO: 900109 - RNA, 19 nt, Artificial Sequence
  Description of Artificial Sequence: Synthetic oligonucleotide
cacacgcaacgucuggaug

SEQ ID NO: 900110 - RNA, 19 nt, Artificial Sequence
  Description of Artificial Sequence: Synthetic oligonucleotide
auuuaugcacuggggccug

SEQ ID NO: 900111 - RNA, 19 nt, Artificial Sequence
  Description of Artificial Sequence: Synthetic oligonucleotide
gugcacccgagggacaacg

SEQ ID NO: 900112 - RNA, 19 nt, Artificial Sequence
  Description of Artificial Sequence: Synthetic oligonucleotide
guugaguugauggcacgca

SEQ ID NO: 900113 - RNA, 19 nt, Artificial Sequence
  Description of Artificial Sequence: Synthetic oligonucleotide
aaguagcgguccacagggg

SEQ ID NO: 900114 - RNA, 19 nt, Artificial Sequence
  Description of Artificial Sequence: Synthetic oligonucleotide
gcgcucagaauuucggccc

SEQ ID NO: 900115 - RNA, 19 nt, Artificial Sequence
  Description of Artificial Sequence: Synthetic oligonucleotide
cuacgaguugcagcagaag

SEQ ID NO: 900116 - RNA, 19 nt, Artificial Sequence
  Description of Artificial Sequence: Synthetic oligonucleotide
ccucguaggauaacauuug

SEQ ID NO: 900117 - RNA, 19 nt, Artificial Sequence
  Description of Artificial Sequence: Synthetic oligonucleotide
gugcccaauguugaguuga

SEQ ID NO: 900118 - RNA, 19 nt, Artificial Sequence
  Description of Artificial Sequence: Synthetic oligonucleotide
caaguagcaugggccgugg

SEQ ID NO: 900119 - RNA, 19 nt, Artificial Sequence
  Description of Artificial Sequence: Synthetic oligonucleotide
auggcacgcacuguauuga

SEQ ID NO: 900120 - RNA, 19 nt, Artificial Sequence
  Description of Artificial Sequence: Synthetic oligonucleotide
cggcucauagucaaacucc

SEQ ID NO: 900121 - RNA, 19 nt, Artificial Sequence
  Description of Artificial Sequence: Synthetic oligonucleotide
agagagcguccuccuccac

SEQ ID NO: 900122 - RNA, 19 nt, Artificial Sequence
  Description of Artificial Sequence: Synthetic oligonucleotide
caugggccguggcagugcc

SEQ ID NO: 900123 - RNA, 19 nt, Artificial Sequence
  Description of Artificial Sequence: Synthetic oligonucleotide
ucggaagccccgagugaga

SEQ ID NO: 900124 - RNA, 19 nt, Artificial Sequence
  Description of Artificial Sequence: Synthetic oligonucleotide
gccaugguaugcugcaccc

SEQ ID NO: 900125 - RNA, 19 nt, Artificial Sequence
  Description of Artificial Sequence: Synthetic oligonucleotide
ggaucgguccuucucaucu

SEQ ID NO: 900126 - RNA, 19 nt, Artificial Sequence
  Description of Artificial Sequence: Synthetic oligonucleotide
uuucgaaguccagcuccug

SEQ ID NO: 900127 - RNA, 19 nt, Artificial Sequence
  Description of Artificial Sequence: Synthetic oligonucleotide
ugcacccgagggacaacga

SEQ ID NO: 900128 - RNA, 19 nt, Artificial Sequence
  Description of Artificial Sequence: Synthetic oligonucleotide
gugucuucauugcagcacu

SEQ ID NO: 900129 - RNA, 19 nt, Artificial Sequence
  Description of Artificial Sequence: Synthetic oligonucleotide
gaugaccuugauguggcgu

SEQ ID NO: 900130 - RNA, 19 nt, Artificial Sequence
  Description of Artificial Sequence: Synthetic oligonucleotide
gacagucuccucacggcuc

SEQ ID NO: 900131 - RNA, 19 nt, Artificial Sequence
  Description of Artificial Sequence: Synthetic oligonucleotide
caacgacauaauggaagug

SEQ ID NO: 900132 - RNA, 19 nt, Artificial Sequence
  Description of Artificial Sequence: Synthetic oligonucleotide
uggcucagggagcuacauc

SEQ ID NO: 900133 - RNA, 19 nt, Artificial Sequence
  Description of Artificial Sequence: Synthetic oligonucleotide
cuuaucccagugcacccga

SEQ ID NO: 900134 - RNA, 19 nt, Artificial Sequence
  Description of Artificial Sequence: Synthetic oligonucleotide
gccaguguagaauaucugu

SEQ ID NO: 900135 - RNA, 19 nt, Artificial Sequence
  Description of Artificial Sequence: Synthetic oligonucleotide
cucuacgaguugcagcaga

SEQ ID NO: 900136 - RNA, 19 nt, Artificial Sequence
  Description of Artificial Sequence: Synthetic oligonucleotide
gaccuugauguggcguaag

SEQ ID NO: 900137 - RNA, 19 nt, Artificial Sequence
  Description of Artificial Sequence: Synthetic oligonucleotide
uucgcagcacaaguagcau

SEQ ID NO: 900138 - RNA, 19 nt, Artificial Sequence
  Description of Artificial Sequence: Synthetic oligonucleotide
uuggcacggugcaccugag

SEQ ID NO: 900139 - RNA, 19 nt, Artificial Sequence
  Description of Artificial Sequence: Synthetic oligonucleotide
gcacgcacuguauugaugu

SEQ ID NO: 900140 - RNA, 19 nt, Artificial Sequence
  Description of Artificial Sequence: Synthetic oligonucleotide
guaggucaauguacuguac

SEQ ID NO: 900141 - RNA, 19 nt, Artificial Sequence
  Description of Artificial Sequence: Synthetic oligonucleotide
guccuguaggacccagcug

SEQ ID NO: 900142 - RNA, 19 nt, Artificial Sequence
  Description of Artificial Sequence: Synthetic oligonucleotide
cgugugucuucauugcagc

SEQ ID NO: 900143 - RNA, 19 nt, Artificial Sequence
  Description of Artificial Sequence: Synthetic oligonucleotide
uggcacggugcaccugagc

SEQ ID NO: 900144 - RNA, 19 nt, Artificial Sequence
  Description of Artificial Sequence: Synthetic oligonucleotide
gcuucuuugcuacguccug

SEQ ID NO: 900145 - RNA, 19 nt, Artificial Sequence
  Description of Artificial Sequence: Synthetic oligonucleotide
cuggucgcugcaugagcac

SEQ ID NO: 900146 - RNA, 19 nt, Artificial Sequence
  Description of Artificial Sequence: Synthetic oligonucleotide
ucauugcagcacugucccu

SEQ ID NO: 900147 - RNA, 19 nt, Artificial Sequence
  Description of Artificial Sequence: Synthetic oligonucleotide
ccauauccugcauguagac

SEQ ID NO: 900148 - RNA, 19 nt, Artificial Sequence
  Description of Artificial Sequence: Synthetic oligonucleotide
caggggugcccaauguuga

SEQ ID NO: 900149 - RNA, 19 nt, Artificial Sequence
  Description of Artificial Sequence: Synthetic oligonucleotide
gaaacucugcuggccccug

SEQ ID NO: 900150 - RNA, 19 nt, Artificial Sequence
  Description of Artificial Sequence: Synthetic oligonucleotide
gcaacgucuggauguacuc

SEQ ID NO: 900151 - RNA, 19 nt, Artificial Sequence
  Description of Artificial Sequence: Synthetic oligonucleotide
gugcaugagcucuacgagu

SEQ ID NO: 900152 - RNA, 19 nt, Artificial Sequence
  Description of Artificial Sequence: Synthetic oligonucleotide
acgucuggauguacucagg

SEQ ID NO: 900153 - RNA, 19 nt, Artificial Sequence
  Description of Artificial Sequence: Synthetic oligonucleotide
augcugcacccaccaggcg

SEQ ID NO: 900154 - RNA, 19 nt, Artificial Sequence
  Description of Artificial Sequence: Synthetic oligonucleotide
auguggcguaagaggcugc

SEQ ID NO: 900155 - RNA, 19 nt, Artificial Sequence
  Description of Artificial Sequence: Synthetic oligonucleotide
gcgugugucuucauugcag

SEQ ID NO: 900156 - RNA, 19 nt, Artificial Sequence
  Description of Artificial Sequence: Synthetic oligonucleotide
uggcacgcacuguauugau

SEQ ID NO: 900157 - RNA, 19 nt, Artificial Sequence
  Description of Artificial Sequence: Synthetic oligonucleotide
agggagaugagcagaccaa

SEQ ID NO: 900158 - RNA, 19 nt, Artificial Sequence
  Description of Artificial Sequence: Synthetic oligonucleotide
uuuaugcacuggggccugc

SEQ ID NO: 900159 - RNA, 19 nt, Artificial Sequence
  Description of Artificial Sequence: Synthetic oligonucleotide
gcuguaaaugccaugguau

SEQ ID NO: 900160 - RNA, 19 nt, Artificial Sequence
  Description of Artificial Sequence: Synthetic oligonucleotide
aguccuugacccaguuuca

SEQ ID NO: 900161 - RNA, 19 nt, Artificial Sequence
  Description of Artificial Sequence: Synthetic oligonucleotide
acagcacucuuggccauga

SEQ ID NO: 900162 - RNA, 19 nt, Artificial Sequence
  Description of Artificial Sequence: Synthetic oligonucleotide
cuccacuccucguaggaua

SEQ ID NO: 900163 - RNA, 19 nt, Artificial Sequence
  Description of Artificial Sequence: Synthetic oligonucleotide
acaguccuugacccaguuu

SEQ ID NO: 900164 - RNA, 19 nt, Artificial Sequence
  Description of Artificial Sequence: Synthetic oligonucleotide
ggcacggugcaccugagcu

SEQ ID NO: 900165 - RNA, 19 nt, Artificial Sequence
  Description of Artificial Sequence: Synthetic oligonucleotide
ugaccuugauguggcguaa

SEQ ID NO: 900166 - RNA, 19 nt, Artificial Sequence
  Description of Artificial Sequence: Synthetic oligonucleotide
cauaccccgggcuguucuc

SEQ ID NO: 900167 - RNA, 19 nt, Artificial Sequence
  Description of Artificial Sequence: Synthetic oligonucleotide
uucggcccucauuuucgaa

SEQ ID NO: 900168 - RNA, 19 nt, Artificial Sequence
  Description of Artificial Sequence: Synthetic oligonucleotide
caucuaccgcaagucgcag

SEQ ID NO: 900169 - RNA, 19 nt, Artificial Sequence
  Description of Artificial Sequence: Synthetic oligonucleotide
ggagcuacaucuccaggua

SEQ ID NO: 900170 - RNA, 19 nt, Artificial Sequence
  Description of Artificial Sequence: Synthetic oligonucleotide
acggcucaacaggugggag

SEQ ID NO: 900171 - RNA, 19 nt, Artificial Sequence
  Description of Artificial Sequence: Synthetic oligonucleotide
gcaaaagucuggaucagcu

SEQ ID NO: 900172 - RNA, 19 nt, Artificial Sequence
  Description of Artificial Sequence: Synthetic oligonucleotide
auguuucgcagcacaagua

SEQ ID NO: 900173 - RNA, 19 nt, Artificial Sequence
  Description of Artificial Sequence: Synthetic oligonucleotide
ggaugauggcccgccacag

SEQ ID NO: 900174 - RNA, 19 nt, Artificial Sequence
  Description of Artificial Sequence: Synthetic oligonucleotide
acugccagucccugccuuu

SEQ ID NO: 900175 - RNA, 19 nt, Artificial Sequence
  Description of Artificial Sequence: Synthetic oligonucleotide
acuccucguaggauaacau

SEQ ID NO: 900176 - RNA, 19 nt, Artificial Sequence
  Description of Artificial Sequence: Synthetic oligonucleotide
agugcacccgagggacaac

SEQ ID NO: 900177 - RNA, 19 nt, Artificial Sequence
  Description of Artificial Sequence: Synthetic oligonucleotide
ggucucguaggucaaugua

SEQ ID NO: 900178 - RNA, 19 nt, Artificial Sequence
  Description of Artificial Sequence: Synthetic oligonucleotide
caaagcggucucguagguc

SEQ ID NO: 900179 - RNA, 19 nt, Artificial Sequence
  Description of Artificial Sequence: Synthetic oligonucleotide
gaucgguccuucucaucua

SEQ ID NO: 900180 - RNA, 19 nt, Artificial Sequence
  Description of Artificial Sequence: Synthetic oligonucleotide
cgcccgauaccaucuaccg

SEQ ID NO: 900181 - RNA, 19 nt, Artificial Sequence
  Description of Artificial Sequence: Synthetic oligonucleotide
cucguaggauaacauuugu

SEQ ID NO: 900182 - RNA, 19 nt, Artificial Sequence
  Description of Artificial Sequence: Synthetic oligonucleotide
agcacccgcuugcuagacu

SEQ ID NO: 900183 - RNA, 19 nt, Artificial Sequence
  Description of Artificial Sequence: Synthetic oligonucleotide
auauagucuuguaccccaa

SEQ ID NO: 900184 - RNA, 19 nt, Artificial Sequence
  Description of Artificial Sequence: Synthetic oligonucleotide
caccaguaguccagggaga

SEQ ID NO: 900185 - RNA, 19 nt, Artificial Sequence
  Description of Artificial Sequence: Synthetic oligonucleotide
gaccaaccuucagagaccu

SEQ ID NO: 900186 - RNA, 19 nt, Artificial Sequence
  Description of Artificial Sequence: Synthetic oligonucleotide
cagagagcguccuccucca

SEQ ID NO: 900187 - RNA, 19 nt, Artificial Sequence
  Description of Artificial Sequence: Synthetic oligonucleotide
ggugacaugcagacaucac

SEQ ID NO: 900188 - RNA, 19 nt, Artificial Sequence
  Description of Artificial Sequence: Synthetic oligonucleotide
gaacagcauauagucuugu

SEQ ID NO: 900189 - RNA, 19 nt, Artificial Sequence
  Description of Artificial Sequence: Synthetic oligonucleotide
gagccgcauggcaaggauc

SEQ ID NO: 900190 - RNA, 19 nt, Artificial Sequence
  Description of Artificial Sequence: Synthetic oligonucleotide
ccaucuaccgcaagucgca

SEQ ID NO: 900191 - RNA, 19 nt, Artificial Sequence
  Description of Artificial Sequence: Synthetic oligonucleotide
ggcgggccagaacacgaag

SEQ ID NO: 900192 - RNA, 19 nt, Artificial Sequence
  Description of Artificial Sequence: Synthetic oligonucleotide
acgcaacgucuggauguac

SEQ ID NO: 900193 - RNA, 19 nt, Artificial Sequence
  Description of Artificial Sequence: Synthetic oligonucleotide
uaccccgggcuguucuccu

SEQ ID NO: 900194 - RNA, 19 nt, Artificial Sequence
  Description of Artificial Sequence: Synthetic oligonucleotide
ugccaucauguagcuuggc

SEQ ID NO: 900195 - RNA, 19 nt, Artificial Sequence
  Description of Artificial Sequence: Synthetic oligonucleotide
ggcgucagccgcacgcugg

SEQ ID NO: 900196 - RNA, 19 nt, Artificial Sequence
  Description of Artificial Sequence: Synthetic oligonucleotide
ccccuucagguccuguagg

SEQ ID NO: 900197 - RNA, 19 nt, Artificial Sequence
  Description of Artificial Sequence: Synthetic oligonucleotide
cugaagccgaagcuggggu

SEQ ID NO: 900198 - RNA, 19 nt, Artificial Sequence
  Description of Artificial Sequence: Synthetic oligonucleotide
gccaucggcucauagucaa

SEQ ID NO: 900199 - RNA, 19 nt, Artificial Sequence
  Description of Artificial Sequence: Synthetic oligonucleotide
aagcgcccgauaccaucua

SEQ ID NO: 900200 - RNA, 19 nt, Artificial Sequence
  Description of Artificial Sequence: Synthetic oligonucleotide
caggcgcacuggucgcugc

SEQ ID NO: 900201 - RNA, 19 nt, Artificial Sequence
  Description of Artificial Sequence: Synthetic oligonucleotide
ccaucuggaccuuuccgca

SEQ ID NO: 900202 - RNA, 19 nt, Artificial Sequence
  Description of Artificial Sequence: Synthetic oligonucleotide
ggccacuucaaacuugaau

SEQ ID NO: 900203 - RNA, 19 nt, Artificial Sequence
  Description of Artificial Sequence: Synthetic oligonucleotide
aggcagugccuggaagucu

SEQ ID NO: 900204 - RNA, 19 nt, Artificial Sequence
  Description of Artificial Sequence: Synthetic oligonucleotide
gcagugaaauagcgggcuc

SEQ ID NO: 900205 - RNA, 19 nt, Artificial Sequence
  Description of Artificial Sequence: Synthetic oligonucleotide
agccgcacgcuggugacau

SEQ ID NO: 900206 - RNA, 19 nt, Artificial Sequence
  Description of Artificial Sequence: Synthetic oligonucleotide
gcagccuugcaguuguugu

SEQ ID NO: 900207 - RNA, 19 nt, Artificial Sequence
  Description of Artificial Sequence: Synthetic oligonucleotide
agccaucggcucauaguca

SEQ ID NO: 900208 - RNA, 19 nt, Artificial Sequence
  Description of Artificial Sequence: Synthetic oligonucleotide
caaaagucuggaucagcuu

SEQ ID NO: 900209 - RNA, 19 nt, Artificial Sequence
  Description of Artificial Sequence: Synthetic oligonucleotide
ggggugcaugagcucuacg

SEQ ID NO: 900210 - RNA, 19 nt, Artificial Sequence
  Description of Artificial Sequence: Synthetic oligonucleotide
guacugggagacauccuua

SEQ ID NO: 900211 - RNA, 19 nt, Artificial Sequence
  Description of Artificial Sequence: Synthetic oligonucleotide
aggcgcacuggucgcugca

SEQ ID NO: 900212 - RNA, 19 nt, Artificial Sequence
  Description of Artificial Sequence: Synthetic oligonucleotide
cgcuugcuagacuuauccc

SEQ ID NO: 900213 - RNA, 19 nt, Artificial Sequence
  Description of Artificial Sequence: Synthetic oligonucleotide
acccgcuugcuagacuuau

SEQ ID NO: 900214 - RNA, 19 nt, Artificial Sequence
  Description of Artificial Sequence: Synthetic oligonucleotide
gaauuucggcccucauuuu

SEQ ID NO: 900215 - RNA, 19 nt, Artificial Sequence
  Description of Artificial Sequence: Synthetic oligonucleotide
ucacauaccccgggcuguu

SEQ ID NO: 900216 - RNA, 19 nt, Artificial Sequence
  Description of Artificial Sequence: Synthetic oligonucleotide
cguggcagugccuugagua

SEQ ID NO: 900217 - RNA, 19 nt, Artificial Sequence
  Description of Artificial Sequence: Synthetic oligonucleotide
ggcacgcacuguauugaug

SEQ ID NO: 900218 - RNA, 19 nt, Artificial Sequence
  Description of Artificial Sequence: Synthetic oligonucleotide
ccgagggacaacgacauaa

SEQ ID NO: 900219 - RNA, 19 nt, Artificial Sequence
  Description of Artificial Sequence: Synthetic oligonucleotide
gucuucauugcagcacugu

SEQ ID NO: 900220 - RNA, 19 nt, Artificial Sequence
  Description of Artificial Sequence: Synthetic oligonucleotide
ccaaccccagacagcacuc

SEQ ID NO: 900221 - RNA, 19 nt, Artificial Sequence
  Description of Artificial Sequence: Synthetic oligonucleotide
gcaagucgcagccuccucu

SEQ ID NO: 900222 - RNA, 19 nt, Artificial Sequence
  Description of Artificial Sequence: Synthetic oligonucleotide
cguaggucaauguacugua

SEQ ID NO: 900223 - RNA, 19 nt, Artificial Sequence
  Description of Artificial Sequence: Synthetic oligonucleotide
ccgcacgcuggugacaugc

SEQ ID NO: 900224 - RNA, 19 nt, Artificial Sequence
  Description of Artificial Sequence: Synthetic oligonucleotide
agguacugggagacauccu

SEQ ID NO: 900225 - RNA, 19 nt, Artificial Sequence
  Description of Artificial Sequence: Synthetic oligonucleotide
gcgcccgauaccaucuacc

SEQ ID NO: 900226 - RNA, 19 nt, Artificial Sequence
  Description of Artificial Sequence: Synthetic oligonucleotide
gucauucacuuuacagccu

SEQ ID NO: 900227 - RNA, 19 nt, Artificial Sequence
  Description of Artificial Sequence: Synthetic oligonucleotide
cuguaccuuuacagccaca

SEQ ID NO: 900228 - RNA, 19 nt, Artificial Sequence
  Description of Artificial Sequence: Synthetic oligonucleotide
gugaaauagcgggcuccga

SEQ ID NO: 900229 - RNA, 19 nt, Artificial Sequence
  Description of Artificial Sequence: Synthetic oligonucleotide
cuccucguaggauaacauu

SEQ ID NO: 900230 - RNA, 19 nt, Artificial Sequence
  Description of Artificial Sequence: Synthetic oligonucleotide
ccgaggagcaagggcaccc

SEQ ID NO: 900231 - RNA, 19 nt, Artificial Sequence
  Description of Artificial Sequence: Synthetic oligonucleotide
ccuugacccaguuucacau

SEQ ID NO: 900232 - RNA, 19 nt, Artificial Sequence
  Description of Artificial Sequence: Synthetic oligonucleotide
gcuacguccugcacugcca

SEQ ID NO: 900233 - RNA, 19 nt, Artificial Sequence
  Description of Artificial Sequence: Synthetic oligonucleotide
cuggaccuuuccgcaccag

SEQ ID NO: 900234 - RNA, 19 nt, Artificial Sequence
  Description of Artificial Sequence: Synthetic oligonucleotide
ggacaacgacauaauggaa

SEQ ID NO: 900235 - RNA, 19 nt, Artificial Sequence
  Description of Artificial Sequence: Synthetic oligonucleotide
gugagccgcauggcaagga

SEQ ID NO: 900236 - RNA, 19 nt, Artificial Sequence
  Description of Artificial Sequence: Synthetic oligonucleotide
cuggccccuggcagccuug

SEQ ID NO: 900237 - RNA, 19 nt, Artificial Sequence
  Description of Artificial Sequence: Synthetic oligonucleotide
ggcagagagcguccuccuc

SEQ ID NO: 900238 - RNA, 19 nt, Artificial Sequence
  Description of Artificial Sequence: Synthetic oligonucleotide
cgagugagagccuuguccu

SEQ ID NO: 900239 - RNA, 19 nt, Artificial Sequence
  Description of Artificial Sequence: Synthetic oligonucleotide
ggcguaagaggcugcugcu

SEQ ID NO: 900240 - RNA, 19 nt, Artificial Sequence
  Description of Artificial Sequence: Synthetic oligonucleotide
cagugcacccgagggacaa

SEQ ID NO: 900241 - RNA, 19 nt, Artificial Sequence
  Description of Artificial Sequence: Synthetic oligonucleotide
gucgcugcaugagcaccuc

SEQ ID NO: 900242 - RNA, 19 nt, Artificial Sequence
  Description of Artificial Sequence: Synthetic oligonucleotide
gccguggcagugccuugag

SEQ ID NO: 900243 - RNA, 19 nt, Artificial Sequence
  Description of Artificial Sequence: Synthetic oligonucleotide
cagcacccgcuugcuagac

SEQ ID NO: 900244 - RNA, 19 nt, Artificial Sequence
  Description of Artificial Sequence: Synthetic oligonucleotide
ccccauaguguacucccca

SEQ ID NO: 900245 - RNA, 19 nt, Artificial Sequence
  Description of Artificial Sequence: Synthetic oligonucleotide
ggcccgccacagcugacac

SEQ ID NO: 900246 - RNA, 19 nt, Artificial Sequence
  Description of Artificial Sequence: Synthetic oligonucleotide
cacauaccccgggcuguuc

SEQ ID NO: 900247 - RNA, 19 nt, Artificial Sequence
  Description of Artificial Sequence: Synthetic oligonucleotide
gcucuacgaguugcagcag

SEQ ID NO: 900248 - RNA, 19 nt, Artificial Sequence
  Description of Artificial Sequence: Synthetic oligonucleotide
ggugcaccugagcuaggcu

SEQ ID NO: 900249 - RNA, 19 nt, Artificial Sequence
  Description of Artificial Sequence: Synthetic oligonucleotide
cacgcaacgucuggaugua

SEQ ID NO: 900250 - RNA, 19 nt, Artificial Sequence
  Description of Artificial Sequence: Synthetic oligonucleotide
gcccaggcgcacuggucgc

SEQ ID NO: 900251 - RNA, 19 nt, Artificial Sequence
  Description of Artificial Sequence: Synthetic oligonucleotide
cacaaguagcaugggccgu

SEQ ID NO: 900252 - RNA, 19 nt, Artificial Sequence
  Description of Artificial Sequence: Synthetic oligonucleotide
gggcgucagccgcacgcug

SEQ ID NO: 900253 - RNA, 19 nt, Artificial Sequence
  Description of Artificial Sequence: Synthetic oligonucleotide
acggugcaccugagcuagg

SEQ ID NO: 900254 - RNA, 19 nt, Artificial Sequence
  Description of Artificial Sequence: Synthetic oligonucleotide
ccaguaguccagggagaug

SEQ ID NO: 900255 - RNA, 19 nt, Artificial Sequence
  Description of Artificial Sequence: Synthetic oligonucleotide
gcucuugagcacagcgcuc

SEQ ID NO: 900256 - RNA, 19 nt, Artificial Sequence
  Description of Artificial Sequence: Synthetic oligonucleotide
cccgcuugcuagacuuauc

SEQ ID NO: 900257 - RNA, 19 nt, Artificial Sequence
  Description of Artificial Sequence: Synthetic oligonucleotide
aggcgggccagaacacgaa

SEQ ID NO: 900258 - RNA, 19 nt, Artificial Sequence
  Description of Artificial Sequence: Synthetic oligonucleotide
gggcagugagccgcauggc

SEQ ID NO: 900259 - RNA, 19 nt, Artificial Sequence
  Description of Artificial Sequence: Synthetic oligonucleotide
accugccaaagcgcccgau

SEQ ID NO: 900260 - RNA, 19 nt, Artificial Sequence
  Description of Artificial Sequence: Synthetic oligonucleotide
cguaagaggcugcugcugu

SEQ ID NO: 900261 - RNA, 19 nt, Artificial Sequence
  Description of Artificial Sequence: Synthetic oligonucleotide
ggucgcugcaugagcaccu

SEQ ID NO: 900262 - RNA, 19 nt, Artificial Sequence
  Description of Artificial Sequence: Synthetic oligonucleotide
gcucaacaggugggagccc

SEQ ID NO: 900263 - RNA, 19 nt, Artificial Sequence
  Description of Artificial Sequence: Synthetic oligonucleotide
ccugccaaagcgcccgaua

SEQ ID NO: 900264 - RNA, 19 nt, Artificial Sequence
  Description of Artificial Sequence: Synthetic oligonucleotide
gcucagaauuucggcccuc

SEQ ID NO: 900265 - RNA, 19 nt, Artificial Sequence
  Description of Artificial Sequence: Synthetic oligonucleotide
cccgagugagagccuuguc

SEQ ID NO: 900266 - RNA, 19 nt, Artificial Sequence
  Description of Artificial Sequence: Synthetic oligonucleotide
cgcaacgucuggauguacu

SEQ ID NO: 900267 - RNA, 19 nt, Artificial Sequence
  Description of Artificial Sequence: Synthetic oligonucleotide
gggccguggcagugccuug

SEQ ID NO: 900268 - RNA, 19 nt, Artificial Sequence
  Description of Artificial Sequence: Synthetic oligonucleotide
cugcgccucugcagugaaa

SEQ ID NO: 900269 - RNA, 19 nt, Artificial Sequence
  Description of Artificial Sequence: Synthetic oligonucleotide
ccuuuccgcaccagaacau

SEQ ID NO: 900270 - RNA, 19 nt, Artificial Sequence
  Description of Artificial Sequence: Synthetic oligonucleotide
ccgauaccaucuaccgcaa

SEQ ID NO: 900271 - RNA, 19 nt, Artificial Sequence
  Description of Artificial Sequence: Synthetic oligonucleotide
cgucuggauguacucaggu

SEQ ID NO: 900272 - RNA, 19 nt, Artificial Sequence
  Description of Artificial Sequence: Synthetic oligonucleotide
cagugugcccaggcuggaa

SEQ ID NO: 900273 - RNA, 19 nt, Artificial Sequence
  Description of Artificial Sequence: Synthetic oligonucleotide
guuguggcucagggagcua

SEQ ID NO: 900274 - RNA, 19 nt, Artificial Sequence
  Description of Artificial Sequence: Synthetic oligonucleotide
ccaugguaugcugcaccca

SEQ ID NO: 900275 - RNA, 19 nt, Artificial Sequence
  Description of Artificial Sequence: Synthetic oligonucleotide
ccuuagccuuggggcaaag

SEQ ID NO: 900276 - RNA, 19 nt, Artificial Sequence
  Description of Artificial Sequence: Synthetic oligonucleotide
ccaggcgcacuggucgcug

SEQ ID NO: 900277 - RNA, 19 nt, Artificial Sequence
  Description of Artificial Sequence: Synthetic oligonucleotide
ccauuccaggcucuggguu

SEQ ID NO: 900278 - RNA, 19 nt, Artificial Sequence
  Description of Artificial Sequence: Synthetic oligonucleotide
ccgccacagcugacacagg

SEQ ID NO: 900279 - RNA, 19 nt, Artificial Sequence
  Description of Artificial Sequence: Synthetic oligonucleotide
ccagggcgucagccgcacg

SEQ ID NO: 900280 - RNA, 19 nt, Artificial Sequence
  Description of Artificial Sequence: Synthetic oligonucleotide
ccgggcuguucuccuccac

SEQ ID NO: 900281 - RNA, 19 nt, Artificial Sequence
  Description of Artificial Sequence: Synthetic oligonucleotide
cuaccgcaagucgcagccu

SEQ ID NO: 900282 - RNA, 19 nt, Artificial Sequence
  Description of Artificial Sequence: Synthetic oligonucleotide
ccauaguguacuccccauu

SEQ ID NO: 900283 - RNA, 19 nt, Artificial Sequence
  Description of Artificial Sequence: Synthetic oligonucleotide
gcgucagccgcacgcuggu

SEQ ID NO: 900284 - RNA, 19 nt, Artificial Sequence
  Description of Artificial Sequence: Synthetic oligonucleotide
gccgcacgcuggugacaug

SEQ ID NO: 900285 - RNA, 19 nt, Artificial Sequence
  Description of Artificial Sequence: Synthetic oligonucleotide
cgagggacaacgacauaau

SEQ ID NO: 900286 - RNA, 19 nt, Artificial Sequence
  Description of Artificial Sequence: Synthetic oligonucleotide
cgcaagucgcagccuccuc

SEQ ID NO: 900287 - RNA, 19 nt, Artificial Sequence
  Description of Artificial Sequence: Synthetic oligonucleotide
cgacauaauggaagugcuu

SEQ ID NO: 900288 - RNA, 19 nt, Artificial Sequence
  Description of Artificial Sequence: Synthetic oligonucleotide
ccucucggaagccccgagu

SEQ ID NO: 900289 - RNA, 19 nt, Artificial Sequence
  Description of Artificial Sequence: Synthetic oligonucleotide
cagucuccucacggcucaa

SEQ ID NO: 900290 - RNA, 19 nt, Artificial Sequence
  Description of Artificial Sequence: Synthetic oligonucleotide
cccugccuuuugauggccu

SEQ ID NO: 900291 - RNA, 19 nt, Artificial Sequence
  Description of Artificial Sequence: Synthetic oligonucleotide
cggucucguaggucaaugu

SEQ ID NO: 900292 - RNA, 19 nt, Artificial Sequence
  Description of Artificial Sequence: Synthetic oligonucleotide
cgcucagaauuucggcccu

SEQ ID NO: 900293 - RNA, 19 nt, Artificial Sequence
  Description of Artificial Sequence: Synthetic oligonucleotide
ccccgagugagagccuugu

SEQ ID NO: 900294 - RNA, 19 nt, Artificial Sequence
  Description of Artificial Sequence: Synthetic oligonucleotide
cgucagccgcacgcuggug

SEQ ID NO: 900295 - RNA, 19 nt, Artificial Sequence
  Description of Artificial Sequence: Synthetic oligonucleotide
ccgcaagucgcagccuccu

SEQ ID NO: 900296 - RNA, 19 nt, Artificial Sequence
  Description of Artificial Sequence: Synthetic oligonucleotide
ugaauuaacucauugaagg

SEQ ID NO: 900297 - RNA, 19 nt, Artificial Sequence
  Description of Artificial Sequence: Synthetic oligonucleotide
aauauuguauucuggcucg

SEQ ID NO: 900298 - RNA, 19 nt, Artificial Sequence
  Description of Artificial Sequence: Synthetic oligonucleotide
uaaucaaaggguuguaggg

SEQ ID NO: 900299 - RNA, 19 nt, Artificial Sequence
  Description of Artificial Sequence: Synthetic oligonucleotide
uuaguuaaggcuuuagaca

SEQ ID NO: 900300 - RNA, 19 nt, Artificial Sequence
  Description of Artificial Sequence: Synthetic oligonucleotide
uaguuaaggcuuuagacag

SEQ ID NO: 900301 - RNA, 19 nt, Artificial Sequence
  Description of Artificial Sequence: Synthetic oligonucleotide
aaacauucgugccccaggc

SEQ ID NO: 900302 - RNA, 19 nt, Artificial Sequence
  Description of Artificial Sequence: Synthetic oligonucleotide
ugaaacgucugaauuaacu

SEQ ID NO: 900303 - RNA, 19 nt, Artificial Sequence
  Description of Artificial Sequence: Synthetic oligonucleotide
uguagccgcauaaucaaag

SEQ ID NO: 900304 - RNA, 19 nt, Artificial Sequence
  Description of Artificial Sequence: Synthetic oligonucleotide
uccaauuuggagucacucg

SEQ ID NO: 900305 - RNA, 19 nt, Artificial Sequence
  Description of Artificial Sequence: Synthetic oligonucleotide
uaaacauccccugaguaag

SEQ ID NO: 900306 - RNA, 19 nt, Artificial Sequence
  Description of Artificial Sequence: Synthetic oligonucleotide
gagaccaaagcacagcagc

SEQ ID NO: 900307 - RNA, 19 nt, Artificial Sequence
  Description of Artificial Sequence: Synthetic oligonucleotide
uuagacuuucaccauggca

SEQ ID NO: 900308 - RNA, 19 nt, Artificial Sequence
  Description of Artificial Sequence: Synthetic oligonucleotide
ucuuaguuaaggcuuuaga

SEQ ID NO: 900309 - RNA, 19 nt, Artificial Sequence
  Description of Artificial Sequence: Synthetic oligonucleotide
gaaaccuuggcuuucccac

SEQ ID NO: 900310 - RNA, 19 nt, Artificial Sequence
  Description of Artificial Sequence: Synthetic oligonucleotide
acaugaucguuguaucccc

SEQ ID NO: 900311 - RNA, 19 nt, Artificial Sequence
  Description of Artificial Sequence: Synthetic oligonucleotide
cugaauuaacucauugaag

SEQ ID NO: 900312 - RNA, 19 nt, Artificial Sequence
  Description of Artificial Sequence: Synthetic oligonucleotide
guaugcagcgcuccgaggg

SEQ ID NO: 900313 - RNA, 19 nt, Artificial Sequence
  Description of Artificial Sequence: Synthetic oligonucleotide
aacauucgugccccaggcc

SEQ ID NO: 900314 - RNA, 19 nt, Artificial Sequence
  Description of Artificial Sequence: Synthetic oligonucleotide
ugugugaaacgucugaauu

SEQ ID NO: 900315 - RNA, 19 nt, Artificial Sequence
  Description of Artificial Sequence: Synthetic oligonucleotide
uagccgcauaaucaaaggg

SEQ ID NO: 900316 - RNA, 19 nt, Artificial Sequence
  Description of Artificial Sequence: Synthetic oligonucleotide
auuuauaccugccuucccu

SEQ ID NO: 900317 - RNA, 19 nt, Artificial Sequence
  Description of Artificial Sequence: Synthetic oligonucleotide
aauuaacucauugaaggua

SEQ ID NO: 900318 - RNA, 19 nt, Artificial Sequence
  Description of Artificial Sequence: Synthetic oligonucleotide
cucuggugaccuuugaugc

SEQ ID NO: 900319 - RNA, 19 nt, Artificial Sequence
  Description of Artificial Sequence: Synthetic oligonucleotide
aaggcuuuagacaggcagg

SEQ ID NO: 900320 - RNA, 19 nt, Artificial Sequence
  Description of Artificial Sequence: Synthetic oligonucleotide
uucuuagacuuucaccaug

SEQ ID NO: 900321 - RNA, 19 nt, Artificial Sequence
  Description of Artificial Sequence: Synthetic oligonucleotide
aaaggguuguaggggaacg

SEQ ID NO: 900322 - RNA, 19 nt, Artificial Sequence
  Description of Artificial Sequence: Synthetic oligonucleotide
auacugugaacacagcagu

SEQ ID NO: 900323 - RNA, 19 nt, Artificial Sequence
  Description of Artificial Sequence: Synthetic oligonucleotide
uggacccugcagaugaggg

SEQ ID NO: 900324 - RNA, 19 nt, Artificial Sequence
  Description of Artificial Sequence: Synthetic oligonucleotide
ucgagcaccagguaaacau

SEQ ID NO: 900325 - RNA, 19 nt, Artificial Sequence
  Description of Artificial Sequence: Synthetic oligonucleotide
gaguguaccgaggagacug

SEQ ID NO: 900326 - RNA, 19 nt, Artificial Sequence
  Description of Artificial Sequence: Synthetic oligonucleotide
aacgguguggacccugcag

SEQ ID NO: 900327 - RNA, 19 nt, Artificial Sequence
  Description of Artificial Sequence: Synthetic oligonucleotide
aguuccgacaaacauucgu

SEQ ID NO: 900328 - RNA, 19 nt, Artificial Sequence
  Description of Artificial Sequence: Synthetic oligonucleotide
aaugcguuaaggggcgagg

SEQ ID NO: 900329 - RNA, 19 nt, Artificial Sequence
  Description of Artificial Sequence: Synthetic oligonucleotide
uuccuugugugaaacgucu

SEQ ID NO: 900330 - RNA, 19 nt, Artificial Sequence
  Description of Artificial Sequence: Synthetic oligonucleotide
gaucguuguauccccuccg

SEQ ID NO: 900331 - RNA, 19 nt, Artificial Sequence
  Description of Artificial Sequence: Synthetic oligonucleotide
acgccucuggagcauaagc

SEQ ID NO: 900332 - RNA, 19 nt, Artificial Sequence
  Description of Artificial Sequence: Synthetic oligonucleotide
ugaucguuguauccccucc

SEQ ID NO: 900333 - RNA, 19 nt, Artificial Sequence
  Description of Artificial Sequence: Synthetic oligonucleotide
guagccgcauaaucaaagg

SEQ ID NO: 900334 - RNA, 19 nt, Artificial Sequence
  Description of Artificial Sequence: Synthetic oligonucleotide
gucgcgauacagcaguggg

SEQ ID NO: 900335 - RNA, 19 nt, Artificial Sequence
  Description of Artificial Sequence: Synthetic oligonucleotide
aggguaaccacccucuggu

SEQ ID NO: 900336 - RNA, 19 nt, Artificial Sequence
  Description of Artificial Sequence: Synthetic oligonucleotide
uuacugaagaaggcuggcg

SEQ ID NO: 900337 - RNA, 19 nt, Artificial Sequence
  Description of Artificial Sequence: Synthetic oligonucleotide
auacccuguaagccaacac

SEQ ID NO: 900338 - RNA, 19 nt, Artificial Sequence
  Description of Artificial Sequence: Synthetic oligonucleotide
uccgacaaacauucgugcc

SEQ ID NO: 900339 - RNA, 19 nt, Artificial Sequence
  Description of Artificial Sequence: Synthetic oligonucleotide
uguauaguccugugugaug

SEQ ID NO: 900340 - RNA, 19 nt, Artificial Sequence
  Description of Artificial Sequence: Synthetic oligonucleotide
caaacauucgugccccagg

SEQ ID NO: 900341 - RNA, 19 nt, Artificial Sequence
  Description of Artificial Sequence: Synthetic oligonucleotide
ugcguuaaggggcgaggcg

SEQ ID NO: 900342 - RNA, 19 nt, Artificial Sequence
  Description of Artificial Sequence: Synthetic oligonucleotide
ugugcacccaccugguuug

SEQ ID NO: 900343 - RNA, 19 nt, Artificial Sequence
  Description of Artificial Sequence: Synthetic oligonucleotide
ucagucaugcccuccggug

SEQ ID NO: 900344 - RNA, 19 nt, Artificial Sequence
  Description of Artificial Sequence: Synthetic oligonucleotide
cacaugaucguuguauccc

SEQ ID NO: 900345 - RNA, 19 nt, Artificial Sequence
  Description of Artificial Sequence: Synthetic oligonucleotide
gauacagcaguggguaugc

SEQ ID NO: 900346 - RNA, 19 nt, Artificial Sequence
  Description of Artificial Sequence: Synthetic oligonucleotide
auuaacucauugaagguau

SEQ ID NO: 900347 - RNA, 19 nt, Artificial Sequence
  Description of Artificial Sequence: Synthetic oligonucleotide
cacccaccugguuugaugg

SEQ ID NO: 900348 - RNA, 19 nt, Artificial Sequence
  Description of Artificial Sequence: Synthetic oligonucleotide
gucacucgcugucugagag

SEQ ID NO: 900349 - RNA, 19 nt, Artificial Sequence
  Description of Artificial Sequence: Synthetic oligonucleotide
uuuauaccugccuucccuc

SEQ ID NO: 900350 - RNA, 19 nt, Artificial Sequence
  Description of Artificial Sequence: Synthetic oligonucleotide
aucguuguauccccuccgg

SEQ ID NO: 900351 - RNA, 19 nt, Artificial Sequence
  Description of Artificial Sequence: Synthetic oligonucleotide
ucuggggaccucuugcccc

SEQ ID NO: 900352 - RNA, 19 nt, Artificial Sequence
  Description of Artificial Sequence: Synthetic oligonucleotide
ggaaagaguagagaggggc

SEQ ID NO: 900353 - RNA, 19 nt, Artificial Sequence
  Description of Artificial Sequence: Synthetic oligonucleotide
ucguuguauccccuccggg

SEQ ID NO: 900354 - RNA, 19 nt, Artificial Sequence
  Description of Artificial Sequence: Synthetic oligonucleotide
aaaugcguuaaggggcgag

SEQ ID NO: 900355 - RNA, 19 nt, Artificial Sequence
  Description of Artificial Sequence: Synthetic oligonucleotide
aacgucugaauuaacucau

SEQ ID NO: 900356 - RNA, 19 nt, Artificial Sequence
  Description of Artificial Sequence: Synthetic oligonucleotide
ccaauuuggagucacucgc

SEQ ID NO: 900357 - RNA, 19 nt, Artificial Sequence
  Description of Artificial Sequence: Synthetic oligonucleotide
cugaguguaccgaggagac

SEQ ID NO: 900358 - RNA, 19 nt, Artificial Sequence
  Description of Artificial Sequence: Synthetic oligonucleotide
gcuuuagacaggcaggaug

SEQ ID NO: 900359 - RNA, 19 nt, Artificial Sequence
  Description of Artificial Sequence: Synthetic oligonucleotide
acaccauuuauaccugccu

SEQ ID NO: 900360 - RNA, 19 nt, Artificial Sequence
  Description of Artificial Sequence: Synthetic oligonucleotide
gaauuaacucauugaaggu

SEQ ID NO: 900361 - RNA, 19 nt, Artificial Sequence
  Description of Artificial Sequence: Synthetic oligonucleotide
cuggagcauaagcagagac

SEQ ID NO: 900362 - RNA, 19 nt, Artificial Sequence
  Description of Artificial Sequence: Synthetic oligonucleotide
aacacggggaguccuuccu

SEQ ID NO: 900363 - RNA, 19 nt, Artificial Sequence
  Description of Artificial Sequence: Synthetic oligonucleotide
uccccgcugccccagaugc

SEQ ID NO: 900364 - RNA, 19 nt, Artificial Sequence
  Description of Artificial Sequence: Synthetic oligonucleotide
uauucuggcucguuccggu

SEQ ID NO: 900365 - RNA, 19 nt, Artificial Sequence
  Description of Artificial Sequence: Synthetic oligonucleotide
aacugacacaugaucguug

SEQ ID NO: 900366 - RNA, 19 nt, Artificial Sequence
  Description of Artificial Sequence: Synthetic oligonucleotide
agucaugcccuccgguggg

SEQ ID NO: 900367 - RNA, 19 nt, Artificial Sequence
  Description of Artificial Sequence: Synthetic oligonucleotide
guagaggucgguagguggg

SEQ ID NO: 900368 - RNA, 19 nt, Artificial Sequence
  Description of Artificial Sequence: Synthetic oligonucleotide
uuaaggggcgaggcggugg

SEQ ID NO: 900369 - RNA, 19 nt, Artificial Sequence
  Description of Artificial Sequence: Synthetic oligonucleotide
guaaccacccucuggugac

SEQ ID NO: 900370 - RNA, 19 nt, Artificial Sequence
  Description of Artificial Sequence: Synthetic oligonucleotide
augcguuaaggggcgaggc

SEQ ID NO: 900371 - RNA, 19 nt, Artificial Sequence
  Description of Artificial Sequence: Synthetic oligonucleotide
ucgguccucccacacgcgg

SEQ ID NO: 900372 - RNA, 19 nt, Artificial Sequence
  Description of Artificial Sequence: Synthetic oligonucleotide
uuucuuagacuuucaccau

SEQ ID NO: 900373 - RNA, 19 nt, Artificial Sequence
  Description of Artificial Sequence: Synthetic oligonucleotide
ugugcggggauccccgggc

SEQ ID NO: 900374 - RNA, 19 nt, Artificial Sequence
  Description of Artificial Sequence: Synthetic oligonucleotide
uuuucggcuacugggucug

SEQ ID NO: 900375 - RNA, 19 nt, Artificial Sequence
  Description of Artificial Sequence: Synthetic oligonucleotide
ugagggucgguccucccac

SEQ ID NO: 900376 - RNA, 19 nt, Artificial Sequence
  Description of Artificial Sequence: Synthetic oligonucleotide
uggacgcgcaggcagacuc

SEQ ID NO: 900377 - RNA, 19 nt, Artificial Sequence
  Description of Artificial Sequence: Synthetic oligonucleotide
cagucaugcccuccggugg

SEQ ID NO: 900378 - RNA, 19 nt, Artificial Sequence
  Description of Artificial Sequence: Synthetic oligonucleotide
agguaaacauccccugagu

SEQ ID NO: 900379 - RNA, 19 nt, Artificial Sequence
  Description of Artificial Sequence: Synthetic oligonucleotide
agccgcauaaucaaagggu

SEQ ID NO: 900380 - RNA, 19 nt, Artificial Sequence
  Description of Artificial Sequence: Synthetic oligonucleotide
gcguguauaguccugugug

SEQ ID NO: 900381 - RNA, 19 nt, Artificial Sequence
  Description of Artificial Sequence: Synthetic oligonucleotide
aauggccgcagauguggga

SEQ ID NO: 900382 - RNA, 19 nt, Artificial Sequence
  Description of Artificial Sequence: Synthetic oligonucleotide
uuaacucauugaagguauc

SEQ ID NO: 900383 - RNA, 19 nt, Artificial Sequence
  Description of Artificial Sequence: Synthetic oligonucleotide
acgguguggacccugcaga

SEQ ID NO: 900384 - RNA, 19 nt, Artificial Sequence
  Description of Artificial Sequence: Synthetic oligonucleotide
uuccccgucgcgauacagc

SEQ ID NO: 900385 - RNA, 19 nt, Artificial Sequence
  Description of Artificial Sequence: Synthetic oligonucleotide
uauacccuguaagccaaca

SEQ ID NO: 900386 - RNA, 19 nt, Artificial Sequence
  Description of Artificial Sequence: Synthetic oligonucleotide
uaaggggcgaggcgguggc

SEQ ID NO: 900387 - RNA, 19 nt, Artificial Sequence
  Description of Artificial Sequence: Synthetic oligonucleotide
ccaaaugcguuaaggggcg

SEQ ID NO: 900388 - RNA, 19 nt, Artificial Sequence
  Description of Artificial Sequence: Synthetic oligonucleotide
uccuugugugaaacgucug

SEQ ID NO: 900389 - RNA, 19 nt, Artificial Sequence
  Description of Artificial Sequence: Synthetic oligonucleotide
uguccuccccuccugucca

SEQ ID NO: 900390 - RNA, 19 nt, Artificial Sequence
  Description of Artificial Sequence: Synthetic oligonucleotide
cuuagacuuucaccauggc

SEQ ID NO: 900391 - RNA, 19 nt, Artificial Sequence
  Description of Artificial Sequence: Synthetic oligonucleotide
guggacggacgguuggacg

SEQ ID NO: 900392 - RNA, 19 nt, Artificial Sequence
  Description of Artificial Sequence: Synthetic oligonucleotide
ggggacuuggcuuuucggc

SEQ ID NO: 900393 - RNA, 19 nt, Artificial Sequence
  Description of Artificial Sequence: Synthetic oligonucleotide
guuguaggggaacggugug

SEQ ID NO: 900394 - RNA, 19 nt, Artificial Sequence
  Description of Artificial Sequence: Synthetic oligonucleotide
aacauccccugaguaaggu

SEQ ID NO: 900395 - RNA, 19 nt, Artificial Sequence
  Description of Artificial Sequence: Synthetic oligonucleotide
uuguauccccuccgggccc

SEQ ID NO: 900396 - RNA, 19 nt, Artificial Sequence
  Description of Artificial Sequence: Synthetic oligonucleotide
aguuaaggcuuuagacagg

SEQ ID NO: 900397 - RNA, 19 nt, Artificial Sequence
  Description of Artificial Sequence: Synthetic oligonucleotide
ggugguggcguguauaguc

SEQ ID NO: 900398 - RNA, 19 nt, Artificial Sequence
  Description of Artificial Sequence: Synthetic oligonucleotide
uaugcagcgcuccgagggu

SEQ ID NO: 900399 - RNA, 19 nt, Artificial Sequence
  Description of Artificial Sequence: Synthetic oligonucleotide
gugugaaacgucugaauua

SEQ ID NO: 900400 - RNA, 19 nt, Artificial Sequence
  Description of Artificial Sequence: Synthetic oligonucleotide
cagauggguggacggacgg

SEQ ID NO: 900401 - RNA, 19 nt, Artificial Sequence
  Description of Artificial Sequence: Synthetic oligonucleotide
caguccugcguaugguggg

SEQ ID NO: 900402 - RNA, 19 nt, Artificial Sequence
  Description of Artificial Sequence: Synthetic oligonucleotide
gcugguguugccuggagac

SEQ ID NO: 900403 - RNA, 19 nt, Artificial Sequence
  Description of Artificial Sequence: Synthetic oligonucleotide
ugugccggcgccccugccc

SEQ ID NO: 900404 - RNA, 19 nt, Artificial Sequence
  Description of Artificial Sequence: Synthetic oligonucleotide
uguccggcgauugcagucc

SEQ ID NO: 900405 - RNA, 19 nt, Artificial Sequence
  Description of Artificial Sequence: Synthetic oligonucleotide
ccagggacgguccaguucc

SEQ ID NO: 900406 - RNA, 19 nt, Artificial Sequence
  Description of Artificial Sequence: Synthetic oligonucleotide
ggacugaugucuugcuggg

SEQ ID NO: 900407 - RNA, 19 nt, Artificial Sequence
  Description of Artificial Sequence: Synthetic oligonucleotide
uaacacggggaguccuucc

SEQ ID NO: 900408 - RNA, 19 nt, Artificial Sequence
  Description of Artificial Sequence: Synthetic oligonucleotide
uuuagacaggcaggaugcc

SEQ ID NO: 900409 - RNA, 19 nt, Artificial Sequence
  Description of Artificial Sequence: Synthetic oligonucleotide
gggaacgucugucugccag

SEQ ID NO: 900410 - RNA, 19 nt, Artificial Sequence
  Description of Artificial Sequence: Synthetic oligonucleotide
gaacgucugucugccagag

SEQ ID NO: 900411 - RNA, 19 nt, Artificial Sequence
  Description of Artificial Sequence: Synthetic oligonucleotide
ucgcgauacagcagugggu

SEQ ID NO: 900412 - RNA, 19 nt, Artificial Sequence
  Description of Artificial Sequence: Synthetic oligonucleotide
acccuguaagccaacacca

SEQ ID NO: 900413 - RNA, 19 nt, Artificial Sequence
  Description of Artificial Sequence: Synthetic oligonucleotide
ugggcuaguugaggguugg

SEQ ID NO: 900414 - RNA, 19 nt, Artificial Sequence
  Description of Artificial Sequence: Synthetic oligonucleotide
cugggaacgucugucugcc

SEQ ID NO: 900415 - RNA, 19 nt, Artificial Sequence
  Description of Artificial Sequence: Synthetic oligonucleotide
cauccuggacccuugugca

SEQ ID NO: 900416 - RNA, 19 nt, Artificial Sequence
  Description of Artificial Sequence: Synthetic oligonucleotide
cacucgcugucugagagug

SEQ ID NO: 900417 - RNA, 19 nt, Artificial Sequence
  Description of Artificial Sequence: Synthetic oligonucleotide
agggucgguccucccacac

SEQ ID NO: 900418 - RNA, 19 nt, Artificial Sequence
  Description of Artificial Sequence: Synthetic oligonucleotide
ccgacaaacauucgugccc

SEQ ID NO: 900419 - RNA, 19 nt, Artificial Sequence
  Description of Artificial Sequence: Synthetic oligonucleotide
ggucgguccucccacacgc

SEQ ID NO: 900420 - RNA, 19 nt, Artificial Sequence
  Description of Artificial Sequence: Synthetic oligonucleotide
ggcucguuccgguuguggg

SEQ ID NO: 900421 - RNA, 19 nt, Artificial Sequence
  Description of Artificial Sequence: Synthetic oligonucleotide
gcuaguugaggguuggcuc

SEQ ID NO: 900422 - RNA, 19 nt, Artificial Sequence
  Description of Artificial Sequence: Synthetic oligonucleotide
cuccccuuguuccccgucg

SEQ ID NO: 900423 - RNA, 19 nt, Artificial Sequence
  Description of Artificial Sequence: Synthetic oligonucleotide
uguggacccugcagaugag

SEQ ID NO: 900424 - RNA, 19 nt, Artificial Sequence
  Description of Artificial Sequence: Synthetic oligonucleotide
gacuuucaccauggcagag

SEQ ID NO: 900425 - RNA, 19 nt, Artificial Sequence
  Description of Artificial Sequence: Synthetic oligonucleotide
uguauccccuccgggcccg

SEQ ID NO: 900426 - RNA, 19 nt, Artificial Sequence
  Description of Artificial Sequence: Synthetic oligonucleotide
guccacuccccucucgagc

SEQ ID NO: 900427 - RNA, 19 nt, Artificial Sequence
  Description of Artificial Sequence: Synthetic oligonucleotide
accgcuccccuccaauuug

SEQ ID NO: 900428 - RNA, 19 nt, Artificial Sequence
  Description of Artificial Sequence: Synthetic oligonucleotide
uggccgaucuccugacccc

SEQ ID NO: 900429 - RNA, 19 nt, Artificial Sequence
  Description of Artificial Sequence: Synthetic oligonucleotide
gguaaccacccucugguga

SEQ ID NO: 900430 - RNA, 19 nt, Artificial Sequence
  Description of Artificial Sequence: Synthetic oligonucleotide
cuggucauccugcguuggg

SEQ ID NO: 900431 - RNA, 19 nt, Artificial Sequence
  Description of Artificial Sequence: Synthetic oligonucleotide
uccccuuguuccccgucgc

SEQ ID NO: 900432 - RNA, 19 nt, Artificial Sequence
  Description of Artificial Sequence: Synthetic oligonucleotide
gcguuaaggggcgaggcgg

SEQ ID NO: 900433 - RNA, 19 nt, Artificial Sequence
  Description of Artificial Sequence: Synthetic oligonucleotide
ccaguccugcguauggugg

SEQ ID NO: 900434 - RNA, 19 nt, Artificial Sequence
  Description of Artificial Sequence: Synthetic oligonucleotide
uuguuccccgucgcgauac

SEQ ID NO: 900435 - RNA, 19 nt, Artificial Sequence
  Description of Artificial Sequence: Synthetic oligonucleotide
cacggggaguccuuccuug

SEQ ID NO: 900436 - RNA, 19 nt, Artificial Sequence
  Description of Artificial Sequence: Synthetic oligonucleotide
ccauuuauaccugccuucc

SEQ ID NO: 900437 - RNA, 19 nt, Artificial Sequence
  Description of Artificial Sequence: Synthetic oligonucleotide
agaggucgguaggugggcg

SEQ ID NO: 900438 - RNA, 19 nt, Artificial Sequence
  Description of Artificial Sequence: Synthetic oligonucleotide
gugguggcguguauagucc

SEQ ID NO: 900439 - RNA, 19 nt, Artificial Sequence
  Description of Artificial Sequence: Synthetic oligonucleotide
aguccugcguauggugggg

SEQ ID NO: 900440 - RNA, 19 nt, Artificial Sequence
  Description of Artificial Sequence: Synthetic oligonucleotide
cucguuccgguugugggug

SEQ ID NO: 900441 - RNA, 19 nt, Artificial Sequence
  Description of Artificial Sequence: Synthetic oligonucleotide
ugguggcguguauaguccu

SEQ ID NO: 900442 - RNA, 19 nt, Artificial Sequence
  Description of Artificial Sequence: Synthetic oligonucleotide
ccuucugaguguaccgagg

SEQ ID NO: 900443 - RNA, 19 nt, Artificial Sequence
  Description of Artificial Sequence: Synthetic oligonucleotide
aacgucugucugccagagu

SEQ ID NO: 900444 - RNA, 19 nt, Artificial Sequence
  Description of Artificial Sequence: Synthetic oligonucleotide
cucucgagcaccagguaaa

SEQ ID NO: 900445 - RNA, 19 nt, Artificial Sequence
  Description of Artificial Sequence: Synthetic oligonucleotide
ucacucgcugucugagagu

SEQ ID NO: 900446 - RNA, 19 nt, Artificial Sequence
  Description of Artificial Sequence: Synthetic oligonucleotide
uagaggucgguaggugggc

SEQ ID NO: 900447 - RNA, 19 nt, Artificial Sequence
  Description of Artificial Sequence: Synthetic oligonucleotide
gcgggagucuuaguuaagg

SEQ ID NO: 900448 - RNA, 19 nt, Artificial Sequence
  Description of Artificial Sequence: Synthetic oligonucleotide
uggcucguuccgguugugg

SEQ ID NO: 900449 - RNA, 19 nt, Artificial Sequence
  Description of Artificial Sequence: Synthetic oligonucleotide
ggguaugcagcgcuccgag

SEQ ID NO: 900450 - RNA, 19 nt, Artificial Sequence
  Description of Artificial Sequence: Synthetic oligonucleotide
cguuguauccccuccgggc

SEQ ID NO: 900451 - RNA, 19 nt, Artificial Sequence
  Description of Artificial Sequence: Synthetic oligonucleotide
cagcauuggggcaggauaa

SEQ ID NO: 900452 - RNA, 19 nt, Artificial Sequence
  Description of Artificial Sequence: Synthetic oligonucleotide
agucacucgcugucugaga

SEQ ID NO: 900453 - RNA, 19 nt, Artificial Sequence
  Description of Artificial Sequence: Synthetic oligonucleotide
uggcguguauaguccugug

SEQ ID NO: 900454 - RNA, 19 nt, Artificial Sequence
  Description of Artificial Sequence: Synthetic oligonucleotide
agcauuggggcaggauaag

SEQ ID NO: 900455 - RNA, 19 nt, Artificial Sequence
  Description of Artificial Sequence: Synthetic oligonucleotide
ugugugccggcgccccugc

SEQ ID NO: 900456 - RNA, 19 nt, Artificial Sequence
  Description of Artificial Sequence: Synthetic oligonucleotide
gguaugcagcgcuccgagg

SEQ ID NO: 900457 - RNA, 19 nt, Artificial Sequence
  Description of Artificial Sequence: Synthetic oligonucleotide
uggguaugcagcgcuccga

SEQ ID NO: 900458 - RNA, 19 nt, Artificial Sequence
  Description of Artificial Sequence: Synthetic oligonucleotide
caguuccgacaaacauucg

SEQ ID NO: 900459 - RNA, 19 nt, Artificial Sequence
  Description of Artificial Sequence: Synthetic oligonucleotide
aggcuggccaauauuguau

SEQ ID NO: 900460 - RNA, 19 nt, Artificial Sequence
  Description of Artificial Sequence: Synthetic oligonucleotide
ugcagcgcuccgagggugu

SEQ ID NO: 900461 - RNA, 19 nt, Artificial Sequence
  Description of Artificial Sequence: Synthetic oligonucleotide
aaccacccucuggugaccu

SEQ ID NO: 900462 - RNA, 19 nt, Artificial Sequence
  Description of Artificial Sequence: Synthetic oligonucleotide
cuuugguuccaaaugcguu

SEQ ID NO: 900463 - RNA, 19 nt, Artificial Sequence
  Description of Artificial Sequence: Synthetic oligonucleotide
cgucugaauuaacucauug

SEQ ID NO: 900464 - RNA, 19 nt, Artificial Sequence
  Description of Artificial Sequence: Synthetic oligonucleotide
ggcgauugcaguccccuuc

SEQ ID NO: 900465 - RNA, 19 nt, Artificial Sequence
  Description of Artificial Sequence: Synthetic oligonucleotide
ccagagugcgagcaggcug

SEQ ID NO: 900466 - RNA, 19 nt, Artificial Sequence
  Description of Artificial Sequence: Synthetic oligonucleotide
uccgguggggacacagguu

SEQ ID NO: 900467 - RNA, 19 nt, Artificial Sequence
  Description of Artificial Sequence: Synthetic oligonucleotide
uaaccacccucuggugacc

SEQ ID NO: 900468 - RNA, 19 nt, Artificial Sequence
  Description of Artificial Sequence: Synthetic oligonucleotide
gucgguaggugggcggcgg

SEQ ID NO: 900469 - RNA, 19 nt, Artificial Sequence
  Description of Artificial Sequence: Synthetic oligonucleotide
ggucauccugcguuggguc

SEQ ID NO: 900470 - RNA, 19 nt, Artificial Sequence
  Description of Artificial Sequence: Synthetic oligonucleotide
cugugcggggauccccggg

SEQ ID NO: 900471 - RNA, 19 nt, Artificial Sequence
  Description of Artificial Sequence: Synthetic oligonucleotide
uccugcguuggguccccgc

SEQ ID NO: 900472 - RNA, 19 nt, Artificial Sequence
  Description of Artificial Sequence: Synthetic oligonucleotide
acggggaguccuuccuugu

SEQ ID NO: 900473 - RNA, 19 nt, Artificial Sequence
  Description of Artificial Sequence: Synthetic oligonucleotide
cuuuucggcuacugggucu

SEQ ID NO: 900474 - RNA, 19 nt, Artificial Sequence
  Description of Artificial Sequence: Synthetic oligonucleotide
gccgcugagcugcugcggg

SEQ ID NO: 900475 - RNA, 19 nt, Artificial Sequence
  Description of Artificial Sequence: Synthetic oligonucleotide
ggcucuucaucccaggcgu

SEQ ID NO: 900476 - RNA, 19 nt, Artificial Sequence
  Description of Artificial Sequence: Synthetic oligonucleotide
acacgcgguuggugagugg

SEQ ID NO: 900477 - RNA, 19 nt, Artificial Sequence
  Description of Artificial Sequence: Synthetic oligonucleotide
guaacacggggaguccuuc

SEQ ID NO: 900478 - RNA, 19 nt, Artificial Sequence
  Description of Artificial Sequence: Synthetic oligonucleotide
gacccuugugcacccaccu

SEQ ID NO: 900479 - RNA, 19 nt, Artificial Sequence
  Description of Artificial Sequence: Synthetic oligonucleotide
uccggcgauugcagucccc

SEQ ID NO: 900480 - RNA, 19 nt, Artificial Sequence
  Description of Artificial Sequence: Synthetic oligonucleotide
uggggacugcgaugacagc

SEQ ID NO: 900481 - RNA, 19 nt, Artificial Sequence
  Description of Artificial Sequence: Synthetic oligonucleotide
uguuccccgucgcgauaca

SEQ ID NO: 900482 - RNA, 19 nt, Artificial Sequence
  Description of Artificial Sequence: Synthetic oligonucleotide
ucgguaggugggcggcgga

SEQ ID NO: 900483 - RNA, 19 nt, Artificial Sequence
  Description of Artificial Sequence: Synthetic oligonucleotide
gcguaugguggggucaccg

SEQ ID NO: 900484 - RNA, 19 nt, Artificial Sequence
  Description of Artificial Sequence: Synthetic oligonucleotide
guuccccgucgcgauacag

SEQ ID NO: 900485 - RNA, 19 nt, Artificial Sequence
  Description of Artificial Sequence: Synthetic oligonucleotide
uucgcugugcggggauccc

SEQ ID NO: 900486 - RNA, 19 nt, Artificial Sequence
  Description of Artificial Sequence: Synthetic oligonucleotide
ccgcauaaucaaaggguug

SEQ ID NO: 900487 - RNA, 19 nt, Artificial Sequence
  Description of Artificial Sequence: Synthetic oligonucleotide
caggcuggccaauauugua

SEQ ID NO: 900488 - RNA, 19 nt, Artificial Sequence
  Description of Artificial Sequence: Synthetic oligonucleotide
gguuugaugggcucccagu

SEQ ID NO: 900489 - RNA, 19 nt, Artificial Sequence
  Description of Artificial Sequence: Synthetic oligonucleotide
guaagccaacaccauuuau

SEQ ID NO: 900490 - RNA, 19 nt, Artificial Sequence
  Description of Artificial Sequence: Synthetic oligonucleotide
ggaacgucugucugccaga

SEQ ID NO: 900491 - RNA, 19 nt, Artificial Sequence
  Description of Artificial Sequence: Synthetic oligonucleotide
gugaaacgucugaauuaac

SEQ ID NO: 900492 - RNA, 19 nt, Artificial Sequence
  Description of Artificial Sequence: Synthetic oligonucleotide
ggguuguaggggaacggug

SEQ ID NO: 900493 - RNA, 19 nt, Artificial Sequence
  Description of Artificial Sequence: Synthetic oligonucleotide
gaacgguguggacccugca

SEQ ID NO: 900494 - RNA, 19 nt, Artificial Sequence
  Description of Artificial Sequence: Synthetic oligonucleotide
cacacgcgguuggugagug

SEQ ID NO: 900495 - RNA, 19 nt, Artificial Sequence
  Description of Artificial Sequence: Synthetic oligonucleotide
gggucgguccucccacacg

SEQ ID NO: 900496 - RNA, 19 nt, Artificial Sequence
  Description of Artificial Sequence: Synthetic oligonucleotide
aguguaccgaggagacuga

SEQ ID NO: 900497 - RNA, 19 nt, Artificial Sequence
  Description of Artificial Sequence: Synthetic oligonucleotide
caccugguuugaugggcuc

SEQ ID NO: 900498 - RNA, 19 nt, Artificial Sequence
  Description of Artificial Sequence: Synthetic oligonucleotide
agauggguggacggacggu

SEQ ID NO: 900499 - RNA, 19 nt, Artificial Sequence
  Description of Artificial Sequence: Synthetic oligonucleotide
gggacuuggcuuuucggcu

SEQ ID NO: 900500 - RNA, 19 nt, Artificial Sequence
  Description of Artificial Sequence: Synthetic oligonucleotide
ucuccgucccaggcuggcc

SEQ ID NO: 900501 - RNA, 19 nt, Artificial Sequence
  Description of Artificial Sequence: Synthetic oligonucleotide
gagugcgagcaggcugggg

SEQ ID NO: 900502 - RNA, 19 nt, Artificial Sequence
  Description of Artificial Sequence: Synthetic oligonucleotide
aguaacacggggaguccuu

SEQ ID NO: 900503 - RNA, 19 nt, Artificial Sequence
  Description of Artificial Sequence: Synthetic oligonucleotide
ggugagugguguccggcga

SEQ ID NO: 900504 - RNA, 19 nt, Artificial Sequence
  Description of Artificial Sequence: Synthetic oligonucleotide
guuggacgcgcaggcagac

SEQ ID NO: 900505 - RNA, 19 nt, Artificial Sequence
  Description of Artificial Sequence: Synthetic oligonucleotide
cagggacgguccaguuccg

SEQ ID NO: 900506 - RNA, 19 nt, Artificial Sequence
  Description of Artificial Sequence: Synthetic oligonucleotide
agagugcgagcaggcuggg

SEQ ID NO: 900507 - RNA, 19 nt, Artificial Sequence
  Description of Artificial Sequence: Synthetic oligonucleotide
cuguagccgcauaaucaaa

SEQ ID NO: 900508 - RNA, 19 nt, Artificial Sequence
  Description of Artificial Sequence: Synthetic oligonucleotide
augcagcgcuccgagggug

SEQ ID NO: 900509 - RNA, 19 nt, Artificial Sequence
  Description of Artificial Sequence: Synthetic oligonucleotide
agcguagacuuugguucca

SEQ ID NO: 900510 - RNA, 19 nt, Artificial Sequence
  Description of Artificial Sequence: Synthetic oligonucleotide
ugagugguguccggcgauu

SEQ ID NO: 900511 - RNA, 19 nt, Artificial Sequence
  Description of Artificial Sequence: Synthetic oligonucleotide
cuccgucccaggcuggcca

SEQ ID NO: 900512 - RNA, 19 nt, Artificial Sequence
  Description of Artificial Sequence: Synthetic oligonucleotide
gguuguaggggaacggugu

SEQ ID NO: 900513 - RNA, 19 nt, Artificial Sequence
  Description of Artificial Sequence: Synthetic oligonucleotide
gauggguggacggacgguu

SEQ ID NO: 900514 - RNA, 19 nt, Artificial Sequence
  Description of Artificial Sequence: Synthetic oligonucleotide
ggggccgcugagcugcugc

SEQ ID NO: 900515 - RNA, 19 nt, Artificial Sequence
  Description of Artificial Sequence: Synthetic oligonucleotide
ugggaacgucugucugcca

SEQ ID NO: 900516 - RNA, 19 nt, Artificial Sequence
  Description of Artificial Sequence: Synthetic oligonucleotide
caccauuuauaccugccuu

SEQ ID NO: 900517 - RNA, 19 nt, Artificial Sequence
  Description of Artificial Sequence: Synthetic oligonucleotide
ucguuccgguugugggugu

SEQ ID NO: 900518 - RNA, 19 nt, Artificial Sequence
  Description of Artificial Sequence: Synthetic oligonucleotide
caccccugguccagugaug

SEQ ID NO: 900519 - RNA, 19 nt, Artificial Sequence
  Description of Artificial Sequence: Synthetic oligonucleotide
uccgucccaggcuggccaa

SEQ ID NO: 900520 - RNA, 19 nt, Artificial Sequence
  Description of Artificial Sequence: Synthetic oligonucleotide
gacggacgguuggacgcgc

SEQ ID NO: 900521 - RNA, 19 nt, Artificial Sequence
  Description of Artificial Sequence: Synthetic oligonucleotide
gggucaccgccuuggccgg

SEQ ID NO: 900522 - RNA, 19 nt, Artificial Sequence
  Description of Artificial Sequence: Synthetic oligonucleotide
ggacggacgguuggacgcg

SEQ ID NO: 900523 - RNA, 19 nt, Artificial Sequence
  Description of Artificial Sequence: Synthetic oligonucleotide
ggaacgguguggacccugc

SEQ ID NO: 900524 - RNA, 19 nt, Artificial Sequence
  Description of Artificial Sequence: Synthetic oligonucleotide
ggauaagcugggaacgucu

SEQ ID NO: 900525 - RNA, 19 nt, Artificial Sequence
  Description of Artificial Sequence: Synthetic oligonucleotide
agucuuaguuaaggcuuua

SEQ ID NO: 900526 - RNA, 19 nt, Artificial Sequence
  Description of Artificial Sequence: Synthetic oligonucleotide
caugaucguuguauccccu

SEQ ID NO: 900527 - RNA, 19 nt, Artificial Sequence
  Description of Artificial Sequence: Synthetic oligonucleotide
ucgugccccaggccauccu

SEQ ID NO: 900528 - RNA, 19 nt, Artificial Sequence
  Description of Artificial Sequence: Synthetic oligonucleotide
gggcgggagucuuaguuaa

SEQ ID NO: 900529 - RNA, 19 nt, Artificial Sequence
  Description of Artificial Sequence: Synthetic oligonucleotide
gagggucgguccucccaca

SEQ ID NO: 900530 - RNA, 19 nt, Artificial Sequence
  Description of Artificial Sequence: Synthetic oligonucleotide
cuuggccggcacacgccuc

SEQ ID NO: 900531 - RNA, 19 nt, Artificial Sequence
  Description of Artificial Sequence: Synthetic oligonucleotide
uuucggcuacugggucugc

SEQ ID NO: 900532 - RNA, 19 nt, Artificial Sequence
  Description of Artificial Sequence: Synthetic oligonucleotide
uuggacgcgcaggcagacu

SEQ ID NO: 900533 - RNA, 19 nt, Artificial Sequence
  Description of Artificial Sequence: Synthetic oligonucleotide
cauccugcguugggucccc

SEQ ID NO: 900534 - RNA, 19 nt, Artificial Sequence
  Description of Artificial Sequence: Synthetic oligonucleotide
gccuggucauccugcguug

SEQ ID NO: 900535 - RNA, 19 nt, Artificial Sequence
  Description of Artificial Sequence: Synthetic oligonucleotide
gguggcguguauaguccug

SEQ ID NO: 900536 - RNA, 19 nt, Artificial Sequence
  Description of Artificial Sequence: Synthetic oligonucleotide
uccccugaguaaggucacu

SEQ ID NO: 900537 - RNA, 19 nt, Artificial Sequence
  Description of Artificial Sequence: Synthetic oligonucleotide
auacagcaguggguaugca

SEQ ID NO: 900538 - RNA, 19 nt, Artificial Sequence
  Description of Artificial Sequence: Synthetic oligonucleotide
ccucccaucgccacagcga

SEQ ID NO: 900539 - RNA, 19 nt, Artificial Sequence
  Description of Artificial Sequence: Synthetic oligonucleotide
cgggugguggcguguauag

SEQ ID NO: 900540 - RNA, 19 nt, Artificial Sequence
  Description of Artificial Sequence: Synthetic oligonucleotide
ggacccuugugcacccacc

SEQ ID NO: 900541 - RNA, 19 nt, Artificial Sequence
  Description of Artificial Sequence: Synthetic oligonucleotide
gguggacggacgguuggac

SEQ ID NO: 900542 - RNA, 19 nt, Artificial Sequence
  Description of Artificial Sequence: Synthetic oligonucleotide
ccgcuccccuccaauuugg

SEQ ID NO: 900543 - RNA, 19 nt, Artificial Sequence
  Description of Artificial Sequence: Synthetic oligonucleotide
cgguuggacgcgcaggcag

SEQ ID NO: 900544 - RNA, 19 nt, Artificial Sequence
  Description of Artificial Sequence: Synthetic oligonucleotide
cucgagcaccagguaaaca

SEQ ID NO: 900545 - RNA, 19 nt, Artificial Sequence
  Description of Artificial Sequence: Synthetic oligonucleotide
cuccgguggggacacaggu

SEQ ID NO: 900546 - RNA, 19 nt, Artificial Sequence
  Description of Artificial Sequence: Synthetic oligonucleotide
cguguauaguccuguguga

SEQ ID NO: 900547 - RNA, 19 nt, Artificial Sequence
  Description of Artificial Sequence: Synthetic oligonucleotide
ggcguguauaguccugugu

SEQ ID NO: 900548 - RNA, 19 nt, Artificial Sequence
  Description of Artificial Sequence: Synthetic oligonucleotide
ugcgggugguggcguguau

SEQ ID NO: 900549 - RNA, 19 nt, Artificial Sequence
  Description of Artificial Sequence: Synthetic oligonucleotide
cugugugccggcgccccug

SEQ ID NO: 900550 - RNA, 19 nt, Artificial Sequence
  Description of Artificial Sequence: Synthetic oligonucleotide
cucagucaugcccuccggu

SEQ ID NO: 900551 - RNA, 19 nt, Artificial Sequence
  Description of Artificial Sequence: Synthetic oligonucleotide
cucgugcaggaaccuggca

SEQ ID NO: 900552 - RNA, 19 nt, Artificial Sequence
  Description of Artificial Sequence: Synthetic oligonucleotide
ccgaucuccugaccccagg

SEQ ID NO: 900553 - RNA, 19 nt, Artificial Sequence
  Description of Artificial Sequence: Synthetic oligonucleotide
gggcgaggcgguggcaugg

SEQ ID NO: 900554 - RNA, 19 nt, Artificial Sequence
  Description of Artificial Sequence: Synthetic oligonucleotide
acgucugaauuaacucauu

SEQ ID NO: 900555 - RNA, 19 nt, Artificial Sequence
  Description of Artificial Sequence: Synthetic oligonucleotide
acgguuggacgcgcaggca

SEQ ID NO: 900556 - RNA, 19 nt, Artificial Sequence
  Description of Artificial Sequence: Synthetic oligonucleotide
ccuggucauccugcguugg

SEQ ID NO: 900557 - RNA, 19 nt, Artificial Sequence
  Description of Artificial Sequence: Synthetic oligonucleotide
agggacgguccaguuccga

SEQ ID NO: 900558 - RNA, 19 nt, Artificial Sequence
  Description of Artificial Sequence: Synthetic oligonucleotide
ugcacccaccugguuugau

SEQ ID NO: 900559 - RNA, 19 nt, Artificial Sequence
  Description of Artificial Sequence: Synthetic oligonucleotide
ggucgguaggugggcggcg

SEQ ID NO: 900560 - RNA, 19 nt, Artificial Sequence
  Description of Artificial Sequence: Synthetic oligonucleotide
guaggugggcggcggagau

SEQ ID NO: 900561 - RNA, 19 nt, Artificial Sequence
  Description of Artificial Sequence: Synthetic oligonucleotide
gcaggaaccuggcaccgcu

SEQ ID NO: 900562 - RNA, 19 nt, Artificial Sequence
  Description of Artificial Sequence: Synthetic oligonucleotide
cagcgcuccgagggugucc

SEQ ID NO: 900563 - RNA, 19 nt, Artificial Sequence
  Description of Artificial Sequence: Synthetic oligonucleotide
aaggggcgaggcgguggca

SEQ ID NO: 900564 - RNA, 19 nt, Artificial Sequence
  Description of Artificial Sequence: Synthetic oligonucleotide
ccggcacacgccucuggag

SEQ ID NO: 900565 - RNA, 19 nt, Artificial Sequence
  Description of Artificial Sequence: Synthetic oligonucleotide
gggaacgguguggacccug

SEQ ID NO: 900566 - RNA, 19 nt, Artificial Sequence
  Description of Artificial Sequence: Synthetic oligonucleotide
gguuggacgcgcaggcaga

SEQ ID NO: 900567 - RNA, 19 nt, Artificial Sequence
  Description of Artificial Sequence: Synthetic oligonucleotide
cuuguuccccgucgcgaua

SEQ ID NO: 900568 - RNA, 19 nt, Artificial Sequence
  Description of Artificial Sequence: Synthetic oligonucleotide
acgcgguuggugaguggug

SEQ ID NO: 900569 - RNA, 19 nt, Artificial Sequence
  Description of Artificial Sequence: Synthetic oligonucleotide
ggcggcggagauccaggac

SEQ ID NO: 900570 - RNA, 19 nt, Artificial Sequence
  Description of Artificial Sequence: Synthetic oligonucleotide
gggccacaagcucagcgua

SEQ ID NO: 900571 - RNA, 19 nt, Artificial Sequence
  Description of Artificial Sequence: Synthetic oligonucleotide
ggaccggccagggacccac

SEQ ID NO: 900572 - RNA, 19 nt, Artificial Sequence
  Description of Artificial Sequence: Synthetic oligonucleotide
ccccuuguuccccgucgcg

SEQ ID NO: 900573 - RNA, 19 nt, Artificial Sequence
  Description of Artificial Sequence: Synthetic oligonucleotide
cgguccaguuccgacaaac

SEQ ID NO: 900574 - RNA, 19 nt, Artificial Sequence
  Description of Artificial Sequence: Synthetic oligonucleotide
ggcgggagucuuaguuaag

SEQ ID NO: 900575 - RNA, 19 nt, Artificial Sequence
  Description of Artificial Sequence: Synthetic oligonucleotide
cgucgcgauacagcagugg

SEQ ID NO: 900576 - RNA, 19 nt, Artificial Sequence
  Description of Artificial Sequence: Synthetic oligonucleotide
caaaugcguuaaggggcga

SEQ ID NO: 900577 - RNA, 19 nt, Artificial Sequence
  Description of Artificial Sequence: Synthetic oligonucleotide
gcucguuccgguugugggu

SEQ ID NO: 900578 - RNA, 19 nt, Artificial Sequence
  Description of Artificial Sequence: Synthetic oligonucleotide
gccggcacacgccucugga

SEQ ID NO: 900579 - RNA, 19 nt, Artificial Sequence
  Description of Artificial Sequence: Synthetic oligonucleotide
cgugguggggaccggccag

SEQ ID NO: 900580 - RNA, 19 nt, Artificial Sequence
  Description of Artificial Sequence: Synthetic oligonucleotide
gcgacggccagggacgguc

SEQ ID NO: 900581 - RNA, 19 nt, Artificial Sequence
  Description of Artificial Sequence: Synthetic oligonucleotide
gccgcauaaucaaaggguu

SEQ ID NO: 900582 - RNA, 19 nt, Artificial Sequence
  Description of Artificial Sequence: Synthetic oligonucleotide
ccgaggguguccuggcuca

SEQ ID NO: 900583 - RNA, 19 nt, Artificial Sequence
  Description of Artificial Sequence: Synthetic oligonucleotide
gcgguuggugagugguguc

SEQ ID NO: 900584 - RNA, 19 nt, Artificial Sequence
  Description of Artificial Sequence: Synthetic oligonucleotide
gcgaggcgguggcauggag

SEQ ID NO: 900585 - RNA, 19 nt, Artificial Sequence
  Description of Artificial Sequence: Synthetic oligonucleotide
auccugcguuggguccccg

SEQ ID NO: 900586 - RNA, 19 nt, Artificial Sequence
  Description of Artificial Sequence: Synthetic oligonucleotide
ggcuggccaauauuguauu

SEQ ID NO: 900587 - RNA, 19 nt, Artificial Sequence
  Description of Artificial Sequence: Synthetic oligonucleotide
cuuugaugccuggggcugu

SEQ ID NO: 900588 - RNA, 19 nt, Artificial Sequence
  Description of Artificial Sequence: Synthetic oligonucleotide
gugugccggcgccccugcc

SEQ ID NO: 900589 - RNA, 19 nt, Artificial Sequence
  Description of Artificial Sequence: Synthetic oligonucleotide
ggccgaucuccugacccca

SEQ ID NO: 900590 - RNA, 19 nt, Artificial Sequence
  Description of Artificial Sequence: Synthetic oligonucleotide
cuggcucguuccgguugug

SEQ ID NO: 900591 - RNA, 19 nt, Artificial Sequence
  Description of Artificial Sequence: Synthetic oligonucleotide
acggacgguuggacgcgca

SEQ ID NO: 900592 - RNA, 19 nt, Artificial Sequence
  Description of Artificial Sequence: Synthetic oligonucleotide
gcgugguggggaccggcca

SEQ ID NO: 900593 - RNA, 19 nt, Artificial Sequence
  Description of Artificial Sequence: Synthetic oligonucleotide
gggcuaguugaggguuggc

SEQ ID NO: 900594 - RNA, 19 nt, Artificial Sequence
  Description of Artificial Sequence: Synthetic oligonucleotide
cccugcagaugagggucgg

SEQ ID NO: 900595 - RNA, 19 nt, Artificial Sequence
  Description of Artificial Sequence: Synthetic oligonucleotide
gccgaucuccugaccccag

SEQ ID NO: 900596 - RNA, 19 nt, Artificial Sequence
  Description of Artificial Sequence: Synthetic oligonucleotide
cggacgguuggacgcgcag

SEQ ID NO: 900597 - RNA, 19 nt, Artificial Sequence
  Description of Artificial Sequence: Synthetic oligonucleotide
ggacgcgcaggcagacuca

SEQ ID NO: 900598 - RNA, 19 nt, Artificial Sequence
  Description of Artificial Sequence: Synthetic oligonucleotide
ggguggacggacgguugga

SEQ ID NO: 900599 - RNA, 19 nt, Artificial Sequence
  Description of Artificial Sequence: Synthetic oligonucleotide
caccgcuccccuccaauuu

SEQ ID NO: 900600 - RNA, 19 nt, Artificial Sequence
  Description of Artificial Sequence: Synthetic oligonucleotide
gcccgcuguccuccccucc

SEQ ID NO: 900601 - RNA, 19 nt, Artificial Sequence
  Description of Artificial Sequence: Synthetic oligonucleotide
caccgccuuggccggcaca

SEQ ID NO: 900602 - RNA, 19 nt, Artificial Sequence
  Description of Artificial Sequence: Synthetic oligonucleotide
agcgacggccagggacggu

SEQ ID NO: 900603 - RNA, 19 nt, Artificial Sequence
  Description of Artificial Sequence: Synthetic oligonucleotide
guccugcguaugguggggu

SEQ ID NO: 900604 - RNA, 19 nt, Artificial Sequence
  Description of Artificial Sequence: Synthetic oligonucleotide
cacacgccucuggagcaua

SEQ ID NO: 900605 - RNA, 19 nt, Artificial Sequence
  Description of Artificial Sequence: Synthetic oligonucleotide
cgauugcaguccccuucug

SEQ ID NO: 900606 - RNA, 19 nt, Artificial Sequence
  Description of Artificial Sequence: Synthetic oligonucleotide
gugcacccaccugguuuga

SEQ ID NO: 900607 - RNA, 19 nt, Artificial Sequence
  Description of Artificial Sequence: Synthetic oligonucleotide
ccugcguuggguccccgcu

SEQ ID NO: 900608 - RNA, 19 nt, Artificial Sequence
  Description of Artificial Sequence: Synthetic oligonucleotide
ccuuguuccccgucgcgau

SEQ ID NO: 900609 - RNA, 19 nt, Artificial Sequence
  Description of Artificial Sequence: Synthetic oligonucleotide
ggcgaggcgguggcaugga

SEQ ID NO: 900610 - RNA, 19 nt, Artificial Sequence
  Description of Artificial Sequence: Synthetic oligonucleotide
ggcuuuagacaggcaggau

SEQ ID NO: 900611 - RNA, 19 nt, Artificial Sequence
  Description of Artificial Sequence: Synthetic oligonucleotide
cugcgggugguggcgugua

SEQ ID NO: 900612 - RNA, 19 nt, Artificial Sequence
  Description of Artificial Sequence: Synthetic oligonucleotide
gggugguggcguguauagu

SEQ ID NO: 900613 - RNA, 19 nt, Artificial Sequence
  Description of Artificial Sequence: Synthetic oligonucleotide
ccggcgauugcaguccccu

SEQ ID NO: 900614 - RNA, 19 nt, Artificial Sequence
  Description of Artificial Sequence: Synthetic oligonucleotide
gcgcuccgaggguguccug

SEQ ID NO: 900615 - RNA, 19 nt, Artificial Sequence
  Description of Artificial Sequence: Synthetic oligonucleotide
gaccggccagggacccacu

SEQ ID NO: 900616 - RNA, 19 nt, Artificial Sequence
  Description of Artificial Sequence: Synthetic oligonucleotide
gggaccggccagggaccca

SEQ ID NO: 900617 - RNA, 19 nt, Artificial Sequence
  Description of Artificial Sequence: Synthetic oligonucleotide
ccuccgggcccgcuguccu

SEQ ID NO: 900618 - RNA, 19 nt, Artificial Sequence
  Description of Artificial Sequence: Synthetic oligonucleotide
gcacacgccucuggagcau

SEQ ID NO: 900619 - RNA, 19 nt, Artificial Sequence
  Description of Artificial Sequence: Synthetic oligonucleotide
ccccuucgcugugcgggga

SEQ ID NO: 900620 - RNA, 19 nt, Artificial Sequence
  Description of Artificial Sequence: Synthetic oligonucleotide
ccagggcgggagucuuagu

SEQ ID NO: 900621 - RNA, 19 nt, Artificial Sequence
  Description of Artificial Sequence: Synthetic oligonucleotide
cggcgauugcaguccccuu

SEQ ID NO: 900622 - RNA, 19 nt, Artificial Sequence
  Description of Artificial Sequence: Synthetic oligonucleotide
gcccuccgguggggacaca

SEQ ID NO: 900623 - RNA, 19 nt, Artificial Sequence
  Description of Artificial Sequence: Synthetic oligonucleotide
ccgucccaggcuggccaau

SEQ ID NO: 900624 - RNA, 19 nt, Artificial Sequence
  Description of Artificial Sequence: Synthetic oligonucleotide
aaaaguaugguauagaaug

SEQ ID NO: 900625 - RNA, 19 nt, Artificial Sequence
  Description of Artificial Sequence: Synthetic oligonucleotide
aacuauaugaugugugugg

SEQ ID NO: 900626 - RNA, 19 nt, Artificial Sequence
  Description of Artificial Sequence: Synthetic oligonucleotide
ugugauguuagacaggugc

SEQ ID NO: 900627 - RNA, 19 nt, Artificial Sequence
  Description of Artificial Sequence: Synthetic oligonucleotide
uauagaaugagguuuggcc

SEQ ID NO: 900628 - RNA, 19 nt, Artificial Sequence
  Description of Artificial Sequence: Synthetic oligonucleotide
cagagauaaacauugaccc

SEQ ID NO: 900629 - RNA, 19 nt, Artificial Sequence
  Description of Artificial Sequence: Synthetic oligonucleotide
agagaaacagacuacauga

SEQ ID NO: 900630 - RNA, 19 nt, Artificial Sequence
  Description of Artificial Sequence: Synthetic oligonucleotide
ucuauaaacuuccuguccc

SEQ ID NO: 900631 - RNA, 19 nt, Artificial Sequence
  Description of Artificial Sequence: Synthetic oligonucleotide
gaaacagacuacaugaagg

SEQ ID NO: 900632 - RNA, 19 nt, Artificial Sequence
  Description of Artificial Sequence: Synthetic oligonucleotide
agaucuauaaacuuccugu

SEQ ID NO: 900633 - RNA, 19 nt, Artificial Sequence
  Description of Artificial Sequence: Synthetic oligonucleotide
agaagauuuagcugcuucc

SEQ ID NO: 900634 - RNA, 19 nt, Artificial Sequence
  Description of Artificial Sequence: Synthetic oligonucleotide
uauaugauguguguggagg

SEQ ID NO: 900635 - RNA, 19 nt, Artificial Sequence
  Description of Artificial Sequence: Synthetic oligonucleotide
aaugcggugggccucugcc

SEQ ID NO: 900636 - RNA, 19 nt, Artificial Sequence
  Description of Artificial Sequence: Synthetic oligonucleotide
aacauguaagccccaggcc

SEQ ID NO: 900637 - RNA, 19 nt, Artificial Sequence
  Description of Artificial Sequence: Synthetic oligonucleotide
agugauuauaauaaacaac

SEQ ID NO: 900638 - RNA, 19 nt, Artificial Sequence
  Description of Artificial Sequence: Synthetic oligonucleotide
agagauaaacauugacccc

SEQ ID NO: 900639 - RNA, 19 nt, Artificial Sequence
  Description of Artificial Sequence: Synthetic oligonucleotide
gacagauacauauagaacu

SEQ ID NO: 900640 - RNA, 19 nt, Artificial Sequence
  Description of Artificial Sequence: Synthetic oligonucleotide
ucugacgucaccuugcugu

SEQ ID NO: 900641 - RNA, 19 nt, Artificial Sequence
  Description of Artificial Sequence: Synthetic oligonucleotide
aauaaggcaccagagucgg

SEQ ID NO: 900642 - RNA, 19 nt, Artificial Sequence
  Description of Artificial Sequence: Synthetic oligonucleotide
aagggcucgagucugcagg

SEQ ID NO: 900643 - RNA, 19 nt, Artificial Sequence
  Description of Artificial Sequence: Synthetic oligonucleotide
aaauaaggcaccagagucg

SEQ ID NO: 900644 - RNA, 19 nt, Artificial Sequence
  Description of Artificial Sequence: Synthetic oligonucleotide
uuuggucguaaguagaucu

SEQ ID NO: 900645 - RNA, 19 nt, Artificial Sequence
  Description of Artificial Sequence: Synthetic oligonucleotide
aagaucuauaaacuuccug

SEQ ID NO: 900646 - RNA, 19 nt, Artificial Sequence
  Description of Artificial Sequence: Synthetic oligonucleotide
acuaccucaaucucaaucu

SEQ ID NO: 900647 - RNA, 19 nt, Artificial Sequence
  Description of Artificial Sequence: Synthetic oligonucleotide
aagggcaagaauguguggg

SEQ ID NO: 900648 - RNA, 19 nt, Artificial Sequence
  Description of Artificial Sequence: Synthetic oligonucleotide
auagacaagaggccuugcc

SEQ ID NO: 900649 - RNA, 19 nt, Artificial Sequence
  Description of Artificial Sequence: Synthetic oligonucleotide
uggaacagaguuuagggcu

SEQ ID NO: 900650 - RNA, 19 nt, Artificial Sequence
  Description of Artificial Sequence: Synthetic oligonucleotide
guugguacagccuugcccc

SEQ ID NO: 900651 - RNA, 19 nt, Artificial Sequence
  Description of Artificial Sequence: Synthetic oligonucleotide
uaaacuauaugaugugugu

SEQ ID NO: 900652 - RNA, 19 nt, Artificial Sequence
  Description of Artificial Sequence: Synthetic oligonucleotide
auagaaugagguuuggcca

SEQ ID NO: 900653 - RNA, 19 nt, Artificial Sequence
  Description of Artificial Sequence: Synthetic oligonucleotide
aguaguaaacugaggaagc

SEQ ID NO: 900654 - RNA, 19 nt, Artificial Sequence
  Description of Artificial Sequence: Synthetic oligonucleotide
acagacuacaugaaggugg

SEQ ID NO: 900655 - RNA, 19 nt, Artificial Sequence
  Description of Artificial Sequence: Synthetic oligonucleotide
auauagaacuugaaggcac

SEQ ID NO: 900656 - RNA, 19 nt, Artificial Sequence
  Description of Artificial Sequence: Synthetic oligonucleotide
gaaggggagagaaacagag

SEQ ID NO: 900657 - RNA, 19 nt, Artificial Sequence
  Description of Artificial Sequence: Synthetic oligonucleotide
accaauggugcaaagacac

SEQ ID NO: 900658 - RNA, 19 nt, Artificial Sequence
  Description of Artificial Sequence: Synthetic oligonucleotide
cuugaaggcaccaggauuc

SEQ ID NO: 900659 - RNA, 19 nt, Artificial Sequence
  Description of Artificial Sequence: Synthetic oligonucleotide
agucuacagcacuugauuc

SEQ ID NO: 900660 - RNA, 19 nt, Artificial Sequence
  Description of Artificial Sequence: Synthetic oligonucleotide
agccuuaagcuucauccgc

SEQ ID NO: 900661 - RNA, 19 nt, Artificial Sequence
  Description of Artificial Sequence: Synthetic oligonucleotide
aggaaguucagauggggag

SEQ ID NO: 900662 - RNA, 19 nt, Artificial Sequence
  Description of Artificial Sequence: Synthetic oligonucleotide
uauagaacuugaaggcacc

SEQ ID NO: 900663 - RNA, 19 nt, Artificial Sequence
  Description of Artificial Sequence: Synthetic oligonucleotide
uugaucagggguaucuuug

SEQ ID NO: 900664 - RNA, 19 nt, Artificial Sequence
  Description of Artificial Sequence: Synthetic oligonucleotide
ggcuaggaaguucagaugg

SEQ ID NO: 900665 - RNA, 19 nt, Artificial Sequence
  Description of Artificial Sequence: Synthetic oligonucleotide
acauguaagccccaggcca

SEQ ID NO: 900666 - RNA, 19 nt, Artificial Sequence
  Description of Artificial Sequence: Synthetic oligonucleotide
auuacuccaggcccaauag

SEQ ID NO: 900667 - RNA, 19 nt, Artificial Sequence
  Description of Artificial Sequence: Synthetic oligonucleotide
aaguaugguauagaaugag

SEQ ID NO: 900668 - RNA, 19 nt, Artificial Sequence
  Description of Artificial Sequence: Synthetic oligonucleotide
gacuacaugaagguggcag

SEQ ID NO: 900669 - RNA, 19 nt, Artificial Sequence
  Description of Artificial Sequence: Synthetic oligonucleotide
ugguauagaaugagguuug

SEQ ID NO: 900670 - RNA, 19 nt, Artificial Sequence
  Description of Artificial Sequence: Synthetic oligonucleotide
aaacuauaugaugugugug

SEQ ID NO: 900671 - RNA, 19 nt, Artificial Sequence
  Description of Artificial Sequence: Synthetic oligonucleotide
auugaccccagaaagacag

SEQ ID NO: 900672 - RNA, 19 nt, Artificial Sequence
  Description of Artificial Sequence: Synthetic oligonucleotide
uuugagagguccacaccgg

SEQ ID NO: 900673 - RNA, 19 nt, Artificial Sequence
  Description of Artificial Sequence: Synthetic oligonucleotide
uuaccggaggggaaguagg

SEQ ID NO: 900674 - RNA, 19 nt, Artificial Sequence
  Description of Artificial Sequence: Synthetic oligonucleotide
agaacccuuuuacccaugc

SEQ ID NO: 900675 - RNA, 19 nt, Artificial Sequence
  Description of Artificial Sequence: Synthetic oligonucleotide
acaccugcgcaccaguggc

SEQ ID NO: 900676 - RNA, 19 nt, Artificial Sequence
  Description of Artificial Sequence: Synthetic oligonucleotide
ugauauugaccucuucacu

SEQ ID NO: 900677 - RNA, 19 nt, Artificial Sequence
  Description of Artificial Sequence: Synthetic oligonucleotide
uuuugcgaaucuuuucagc

SEQ ID NO: 900678 - RNA, 19 nt, Artificial Sequence
  Description of Artificial Sequence: Synthetic oligonucleotide
agcuuaaacuauaugaugu

SEQ ID NO: 900679 - RNA, 19 nt, Artificial Sequence
  Description of Artificial Sequence: Synthetic oligonucleotide
gaugcgaguguggagagag

SEQ ID NO: 900680 - RNA, 19 nt, Artificial Sequence
  Description of Artificial Sequence: Synthetic oligonucleotide
uuugcagcucaaaaggcuc

SEQ ID NO: 900681 - RNA, 19 nt, Artificial Sequence
  Description of Artificial Sequence: Synthetic oligonucleotide
uagacaagaggccuugccu

SEQ ID NO: 900682 - RNA, 19 nt, Artificial Sequence
  Description of Artificial Sequence: Synthetic oligonucleotide
aagauuuagcugcuuccca

SEQ ID NO: 900683 - RNA, 19 nt, Artificial Sequence
  Description of Artificial Sequence: Synthetic oligonucleotide
agacagauacauauagaac

SEQ ID NO: 900684 - RNA, 19 nt, Artificial Sequence
  Description of Artificial Sequence: Synthetic oligonucleotide
aguaugguauagaaugagg

SEQ ID NO: 900685 - RNA, 19 nt, Artificial Sequence
  Description of Artificial Sequence: Synthetic oligonucleotide
aacuacaaucucaucaacu

SEQ ID NO: 900686 - RNA, 19 nt, Artificial Sequence
  Description of Artificial Sequence: Synthetic oligonucleotide
gaaggcugacuuuugcagc

SEQ ID NO: 900687 - RNA, 19 nt, Artificial Sequence
  Description of Artificial Sequence: Synthetic oligonucleotide
cuugauucucuuaggguug

SEQ ID NO: 900688 - RNA, 19 nt, Artificial Sequence
  Description of Artificial Sequence: Synthetic oligonucleotide
aaaguaugguauagaauga

SEQ ID NO: 900689 - RNA, 19 nt, Artificial Sequence
  Description of Artificial Sequence: Synthetic oligonucleotide
ugcgaaucuuuucagcuuc

SEQ ID NO: 900690 - RNA, 19 nt, Artificial Sequence
  Description of Artificial Sequence: Synthetic oligonucleotide
uccuaaggcaguaguaaac

SEQ ID NO: 900691 - RNA, 19 nt, Artificial Sequence
  Description of Artificial Sequence: Synthetic oligonucleotide
cagacagauacauauagaa

SEQ ID NO: 900692 - RNA, 19 nt, Artificial Sequence
  Description of Artificial Sequence: Synthetic oligonucleotide
ugcacuaccucaaucucaa

SEQ ID NO: 900693 - RNA, 19 nt, Artificial Sequence
  Description of Artificial Sequence: Synthetic oligonucleotide
caccuuuucgcccucggcg

SEQ ID NO: 900694 - RNA, 19 nt, Artificial Sequence
  Description of Artificial Sequence: Synthetic oligonucleotide
cuggaacagaguuuagggc

SEQ ID NO: 900695 - RNA, 19 nt, Artificial Sequence
  Description of Artificial Sequence: Synthetic oligonucleotide
agccgguucacuucugacg

SEQ ID NO: 900696 - RNA, 19 nt, Artificial Sequence
  Description of Artificial Sequence: Synthetic oligonucleotide
auggacagugauuauaaua

SEQ ID NO: 900697 - RNA, 19 nt, Artificial Sequence
  Description of Artificial Sequence: Synthetic oligonucleotide
uucucuuaggguugguaca

SEQ ID NO: 900698 - RNA, 19 nt, Artificial Sequence
  Description of Artificial Sequence: Synthetic oligonucleotide
ucuuugagagguccacacc

SEQ ID NO: 900699 - RNA, 19 nt, Artificial Sequence
  Description of Artificial Sequence: Synthetic oligonucleotide
gauuuagcugcuucccaug

SEQ ID NO: 900700 - RNA, 19 nt, Artificial Sequence
  Description of Artificial Sequence: Synthetic oligonucleotide
ucggugacguucuuguccc

SEQ ID NO: 900701 - RNA, 19 nt, Artificial Sequence
  Description of Artificial Sequence: Synthetic oligonucleotide
ggcaguaguaaacugagga

SEQ ID NO: 900702 - RNA, 19 nt, Artificial Sequence
  Description of Artificial Sequence: Synthetic oligonucleotide
ucggcgaucugcugaaugc

SEQ ID NO: 900703 - RNA, 19 nt, Artificial Sequence
  Description of Artificial Sequence: Synthetic oligonucleotide
ugcgaguguggagagagag

SEQ ID NO: 900704 - RNA, 19 nt, Artificial Sequence
  Description of Artificial Sequence: Synthetic oligonucleotide
ugcuauagacaagaggccu

SEQ ID NO: 900705 - RNA, 19 nt, Artificial Sequence
  Description of Artificial Sequence: Synthetic oligonucleotide
aacagacuacaugaaggug

SEQ ID NO: 900706 - RNA, 19 nt, Artificial Sequence
  Description of Artificial Sequence: Synthetic oligonucleotide
gucggugacguucuugucc

SEQ ID NO: 900707 - RNA, 19 nt, Artificial Sequence
  Description of Artificial Sequence: Synthetic oligonucleotide
acuacaugaagguggcagu

SEQ ID NO: 900708 - RNA, 19 nt, Artificial Sequence
  Description of Artificial Sequence: Synthetic oligonucleotide
cagacuacaugaagguggc

SEQ ID NO: 900709 - RNA, 19 nt, Artificial Sequence
  Description of Artificial Sequence: Synthetic oligonucleotide
aaugagguuuggccagucu

SEQ ID NO: 900710 - RNA, 19 nt, Artificial Sequence
  Description of Artificial Sequence: Synthetic oligonucleotide
aagacagaacuggacuaag

SEQ ID NO: 900711 - RNA, 19 nt, Artificial Sequence
  Description of Artificial Sequence: Synthetic oligonucleotide
acaugaagguggcaguuga

SEQ ID NO: 900712 - RNA, 19 nt, Artificial Sequence
  Description of Artificial Sequence: Synthetic oligonucleotide
agauuuuggcagcaaucug

SEQ ID NO: 900713 - RNA, 19 nt, Artificial Sequence
  Description of Artificial Sequence: Synthetic oligonucleotide
cuauaugauguguguggag

SEQ ID NO: 900714 - RNA, 19 nt, Artificial Sequence
  Description of Artificial Sequence: Synthetic oligonucleotide
guugaugcgaguguggaga

SEQ ID NO: 900715 - RNA, 19 nt, Artificial Sequence
  Description of Artificial Sequence: Synthetic oligonucleotide
acccuuuuacccaugcugg

SEQ ID NO: 900716 - RNA, 19 nt, Artificial Sequence
  Description of Artificial Sequence: Synthetic oligonucleotide
gaguggguguccuacccag

SEQ ID NO: 900717 - RNA, 19 nt, Artificial Sequence
  Description of Artificial Sequence: Synthetic oligonucleotide
aggauacuugggcauuggg

SEQ ID NO: 900718 - RNA, 19 nt, Artificial Sequence
  Description of Artificial Sequence: Synthetic oligonucleotide
agauuuagcugcuucccau

SEQ ID NO: 900719 - RNA, 19 nt, Artificial Sequence
  Description of Artificial Sequence: Synthetic oligonucleotide
ugauguuagacaggugcug

SEQ ID NO: 900720 - RNA, 19 nt, Artificial Sequence
  Description of Artificial Sequence: Synthetic oligonucleotide
cacgcagcacuucuggucc

SEQ ID NO: 900721 - RNA, 19 nt, Artificial Sequence
  Description of Artificial Sequence: Synthetic oligonucleotide
aucagggguaucuuugaga

SEQ ID NO: 900722 - RNA, 19 nt, Artificial Sequence
  Description of Artificial Sequence: Synthetic oligonucleotide
acuugaaggcaccaggauu

SEQ ID NO: 900723 - RNA, 19 nt, Artificial Sequence
  Description of Artificial Sequence: Synthetic oligonucleotide
cauguaagccccaggccag

SEQ ID NO: 900724 - RNA, 19 nt, Artificial Sequence
  Description of Artificial Sequence: Synthetic oligonucleotide
aggagccucgcucacaccu

SEQ ID NO: 900725 - RNA, 19 nt, Artificial Sequence
  Description of Artificial Sequence: Synthetic oligonucleotide
aggaaggcuaacaggagag

SEQ ID NO: 900726 - RNA, 19 nt, Artificial Sequence
  Description of Artificial Sequence: Synthetic oligonucleotide
aaucaaggacaagccaaug

SEQ ID NO: 900727 - RNA, 19 nt, Artificial Sequence
  Description of Artificial Sequence: Synthetic oligonucleotide
ucuccgauuuugcgaaucu

SEQ ID NO: 900728 - RNA, 19 nt, Artificial Sequence
  Description of Artificial Sequence: Synthetic oligonucleotide
acuauaugaugugugugga

SEQ ID NO: 900729 - RNA, 19 nt, Artificial Sequence
  Description of Artificial Sequence: Synthetic oligonucleotide
agugacgggcauuacucca

SEQ ID NO: 900730 - RNA, 19 nt, Artificial Sequence
  Description of Artificial Sequence: Synthetic oligonucleotide
ugacgggcauuacuccagg

SEQ ID NO: 900731 - RNA, 19 nt, Artificial Sequence
  Description of Artificial Sequence: Synthetic oligonucleotide
augggcgagccccaugcac

SEQ ID NO: 900732 - RNA, 19 nt, Artificial Sequence
  Description of Artificial Sequence: Synthetic oligonucleotide
aauggugcaaagacacaga

SEQ ID NO: 900733 - RNA, 19 nt, Artificial Sequence
  Description of Artificial Sequence: Synthetic oligonucleotide
cauggcuagaaccccauca

SEQ ID NO: 900734 - RNA, 19 nt, Artificial Sequence
  Description of Artificial Sequence: Synthetic oligonucleotide
cuagcaggaagaucuauaa

SEQ ID NO: 900735 - RNA, 19 nt, Artificial Sequence
  Description of Artificial Sequence: Synthetic oligonucleotide
uugaugcgaguguggagag

SEQ ID NO: 900736 - RNA, 19 nt, Artificial Sequence
  Description of Artificial Sequence: Synthetic oligonucleotide
ggguguccuacccagaacc

SEQ ID NO: 900737 - RNA, 19 nt, Artificial Sequence
  Description of Artificial Sequence: Synthetic oligonucleotide
cuucugccaccaauggugc

SEQ ID NO: 900738 - RNA, 19 nt, Artificial Sequence
  Description of Artificial Sequence: Synthetic oligonucleotide
gcuuaaacuauaugaugug

SEQ ID NO: 900739 - RNA, 19 nt, Artificial Sequence
  Description of Artificial Sequence: Synthetic oligonucleotide
cuugucccugugauguuag

SEQ ID NO: 900740 - RNA, 19 nt, Artificial Sequence
  Description of Artificial Sequence: Synthetic oligonucleotide
ugccucuccgauuuugcga

SEQ ID NO: 900741 - RNA, 19 nt, Artificial Sequence
  Description of Artificial Sequence: Synthetic oligonucleotide
uccuugucgguccggagaa

SEQ ID NO: 900742 - RNA, 19 nt, Artificial Sequence
  Description of Artificial Sequence: Synthetic oligonucleotide
cuucagcuuaaacuauaug

SEQ ID NO: 900743 - RNA, 19 nt, Artificial Sequence
  Description of Artificial Sequence: Synthetic oligonucleotide
guauagaaugagguuuggc

SEQ ID NO: 900744 - RNA, 19 nt, Artificial Sequence
  Description of Artificial Sequence: Synthetic oligonucleotide
ugaccucuucacugaaggc

SEQ ID NO: 900745 - RNA, 19 nt, Artificial Sequence
  Description of Artificial Sequence: Synthetic oligonucleotide
agauggacagugauuauaa

SEQ ID NO: 900746 - RNA, 19 nt, Artificial Sequence
  Description of Artificial Sequence: Synthetic oligonucleotide
gagauuuuggcagcaaucu

SEQ ID NO: 900747 - RNA, 19 nt, Artificial Sequence
  Description of Artificial Sequence: Synthetic oligonucleotide
agguuuaacagcaggccug

SEQ ID NO: 900748 - RNA, 19 nt, Artificial Sequence
  Description of Artificial Sequence: Synthetic oligonucleotide
uagguaguggggcgagugc

SEQ ID NO: 900749 - RNA, 19 nt, Artificial Sequence
  Description of Artificial Sequence: Synthetic oligonucleotide
cccagaaagacagaacugg

SEQ ID NO: 900750 - RNA, 19 nt, Artificial Sequence
  Description of Artificial Sequence: Synthetic oligonucleotide
ugcaacauguaagccccag

SEQ ID NO: 900751 - RNA, 19 nt, Artificial Sequence
  Description of Artificial Sequence: Synthetic oligonucleotide
ugggcgagccccaugcacu

SEQ ID NO: 900752 - RNA, 19 nt, Artificial Sequence
  Description of Artificial Sequence: Synthetic oligonucleotide
aggguugguacagccuugc

SEQ ID NO: 900753 - RNA, 19 nt, Artificial Sequence
  Description of Artificial Sequence: Synthetic oligonucleotide
cuauagacaagaggccuug

SEQ ID NO: 900754 - RNA, 19 nt, Artificial Sequence
  Description of Artificial Sequence: Synthetic oligonucleotide
ggcuagaaccccaucaugc

SEQ ID NO: 900755 - RNA, 19 nt, Artificial Sequence
  Description of Artificial Sequence: Synthetic oligonucleotide
gaacuugaaggcaccagga

SEQ ID NO: 900756 - RNA, 19 nt, Artificial Sequence
  Description of Artificial Sequence: Synthetic oligonucleotide
ggauacuugggcauugggc

SEQ ID NO: 900757 - RNA, 19 nt, Artificial Sequence
  Description of Artificial Sequence: Synthetic oligonucleotide
ugucccugagcacgagcag

SEQ ID NO: 900758 - RNA, 19 nt, Artificial Sequence
  Description of Artificial Sequence: Synthetic oligonucleotide
accuuuucgcccucggcga

SEQ ID NO: 900759 - RNA, 19 nt, Artificial Sequence
  Description of Artificial Sequence: Synthetic oligonucleotide
aaguagguaguggggcgag

SEQ ID NO: 900760 - RNA, 19 nt, Artificial Sequence
  Description of Artificial Sequence: Synthetic oligonucleotide
uguuagacaggugcuggaa

SEQ ID NO: 900761 - RNA, 19 nt, Artificial Sequence
  Description of Artificial Sequence: Synthetic oligonucleotide
acguucuugucccugugau

SEQ ID NO: 900762 - RNA, 19 nt, Artificial Sequence
  Description of Artificial Sequence: Synthetic oligonucleotide
uucacaugcacagcagcuc

SEQ ID NO: 900763 - RNA, 19 nt, Artificial Sequence
  Description of Artificial Sequence: Synthetic oligonucleotide
acgagcagggccuccuaag

SEQ ID NO: 900764 - RNA, 19 nt, Artificial Sequence
  Description of Artificial Sequence: Synthetic oligonucleotide
uugucgguccggagaaucu

SEQ ID NO: 900765 - RNA, 19 nt, Artificial Sequence
  Description of Artificial Sequence: Synthetic oligonucleotide
aguggggccacuccucaca

SEQ ID NO: 900766 - RNA, 19 nt, Artificial Sequence
  Description of Artificial Sequence: Synthetic oligonucleotide
agggcgugcacagaagcag

SEQ ID NO: 900767 - RNA, 19 nt, Artificial Sequence
  Description of Artificial Sequence: Synthetic oligonucleotide
gacaagccaaugaugggga

SEQ ID NO: 900768 - RNA, 19 nt, Artificial Sequence
  Description of Artificial Sequence: Synthetic oligonucleotide
uuuuggucguaaguagauc

SEQ ID NO: 900769 - RNA, 19 nt, Artificial Sequence
  Description of Artificial Sequence: Synthetic oligonucleotide
uccggagaaucuccugugu

SEQ ID NO: 900770 - RNA, 19 nt, Artificial Sequence
  Description of Artificial Sequence: Synthetic oligonucleotide
ugaccccagaaagacagaa

SEQ ID NO: 900771 - RNA, 19 nt, Artificial Sequence
  Description of Artificial Sequence: Synthetic oligonucleotide
uaaacugaggaagcugcua

SEQ ID NO: 900772 - RNA, 19 nt, Artificial Sequence
  Description of Artificial Sequence: Synthetic oligonucleotide
caauaggccauagccacuc

SEQ ID NO: 900773 - RNA, 19 nt, Artificial Sequence
  Description of Artificial Sequence: Synthetic oligonucleotide
ugagaacuacaaucucauc

SEQ ID NO: 900774 - RNA, 19 nt, Artificial Sequence
  Description of Artificial Sequence: Synthetic oligonucleotide
cagcgaucugcuucuugcg

SEQ ID NO: 900775 - RNA, 19 nt, Artificial Sequence
  Description of Artificial Sequence: Synthetic oligonucleotide
uuggucguaaguagaucuu

SEQ ID NO: 900776 - RNA, 19 nt, Artificial Sequence
  Description of Artificial Sequence: Synthetic oligonucleotide
auguuagacaggugcugga

SEQ ID NO: 900777 - RNA, 19 nt, Artificial Sequence
  Description of Artificial Sequence: Synthetic oligonucleotide
guuguccccacugagaacu

SEQ ID NO: 900778 - RNA, 19 nt, Artificial Sequence
  Description of Artificial Sequence: Synthetic oligonucleotide
guagguaguggggcgagug

SEQ ID NO: 900779 - RNA, 19 nt, Artificial Sequence
  Description of Artificial Sequence: Synthetic oligonucleotide
ccuccucuaggauacuugg

SEQ ID NO: 900780 - RNA, 19 nt, Artificial Sequence
  Description of Artificial Sequence: Synthetic oligonucleotide
uauagacaagaggccuugc

SEQ ID NO: 900781 - RNA, 19 nt, Artificial Sequence
  Description of Artificial Sequence: Synthetic oligonucleotide
ggcaagaauguguggguug

SEQ ID NO: 900782 - RNA, 19 nt, Artificial Sequence
  Description of Artificial Sequence: Synthetic oligonucleotide
cugcuuugcccauugccuc

SEQ ID NO: 900783 - RNA, 19 nt, Artificial Sequence
  Description of Artificial Sequence: Synthetic oligonucleotide
uugcgaaucuuuucagcuu

SEQ ID NO: 900784 - RNA, 19 nt, Artificial Sequence
  Description of Artificial Sequence: Synthetic oligonucleotide
cauugggcucuucugccac

SEQ ID NO: 900785 - RNA, 19 nt, Artificial Sequence
  Description of Artificial Sequence: Synthetic oligonucleotide
gagucggugacguucuugu

SEQ ID NO: 900786 - RNA, 19 nt, Artificial Sequence
  Description of Artificial Sequence: Synthetic oligonucleotide
agucggugacguucuuguc

SEQ ID NO: 900787 - RNA, 19 nt, Artificial Sequence
  Description of Artificial Sequence: Synthetic oligonucleotide
uuuacccaugcugggcucu

SEQ ID NO: 900788 - RNA, 19 nt, Artificial Sequence
  Description of Artificial Sequence: Synthetic oligonucleotide
cucgcucacaccugcgcac

SEQ ID NO: 900789 - RNA, 19 nt, Artificial Sequence
  Description of Artificial Sequence: Synthetic oligonucleotide
ggcauugggcucuucugcc

SEQ ID NO: 900790 - RNA, 19 nt, Artificial Sequence
  Description of Artificial Sequence: Synthetic oligonucleotide
gaaguagguaguggggcga

SEQ ID NO: 900791 - RNA, 19 nt, Artificial Sequence
  Description of Artificial Sequence: Synthetic oligonucleotide
cuaggauacuugggcauug

SEQ ID NO: 900792 - RNA, 19 nt, Artificial Sequence
  Description of Artificial Sequence: Synthetic oligonucleotide
uucgcccucggcgaucugc

SEQ ID NO: 900793 - RNA, 19 nt, Artificial Sequence
  Description of Artificial Sequence: Synthetic oligonucleotide
cuuccuggaacagaguuua

SEQ ID NO: 900794 - RNA, 19 nt, Artificial Sequence
  Description of Artificial Sequence: Synthetic oligonucleotide
gguauagaaugagguuugg

SEQ ID NO: 900795 - RNA, 19 nt, Artificial Sequence
  Description of Artificial Sequence: Synthetic oligonucleotide
cucggcgaucugcugaaug

SEQ ID NO: 900796 - RNA, 19 nt, Artificial Sequence
  Description of Artificial Sequence: Synthetic oligonucleotide
cuuaagcuucauccgcuca

SEQ ID NO: 900797 - RNA, 19 nt, Artificial Sequence
  Description of Artificial Sequence: Synthetic oligonucleotide
cugcacuaccucaaucuca

SEQ ID NO: 900798 - RNA, 19 nt, Artificial Sequence
  Description of Artificial Sequence: Synthetic oligonucleotide
guccggagaaucuccugug

SEQ ID NO: 900799 - RNA, 19 nt, Artificial Sequence
  Description of Artificial Sequence: Synthetic oligonucleotide
acuggggccaugggacacc

SEQ ID NO: 900800 - RNA, 19 nt, Artificial Sequence
  Description of Artificial Sequence: Synthetic oligonucleotide
uuuucgcccucggcgaucu

SEQ ID NO: 900801 - RNA, 19 nt, Artificial Sequence
  Description of Artificial Sequence: Synthetic oligonucleotide
acuagcaggaagaucuaua

SEQ ID NO: 900802 - RNA, 19 nt, Artificial Sequence
  Description of Artificial Sequence: Synthetic oligonucleotide
caccaauggugcaaagaca

SEQ ID NO: 900803 - RNA, 19 nt, Artificial Sequence
  Description of Artificial Sequence: Synthetic oligonucleotide
ucuugucccugugauguua

SEQ ID NO: 900804 - RNA, 19 nt, Artificial Sequence
  Description of Artificial Sequence: Synthetic oligonucleotide
gugacgggcauuacuccag

SEQ ID NO: 900805 - RNA, 19 nt, Artificial Sequence
  Description of Artificial Sequence: Synthetic oligonucleotide
ucgguccggagaaucuccu

SEQ ID NO: 900806 - RNA, 19 nt, Artificial Sequence
  Description of Artificial Sequence: Synthetic oligonucleotide
agguaguggggcgagugca

SEQ ID NO: 900807 - RNA, 19 nt, Artificial Sequence
  Description of Artificial Sequence: Synthetic oligonucleotide
agagucggugacguucuug

SEQ ID NO: 900808 - RNA, 19 nt, Artificial Sequence
  Description of Artificial Sequence: Synthetic oligonucleotide
cagggcggcgcacuguggc

SEQ ID NO: 900809 - RNA, 19 nt, Artificial Sequence
  Description of Artificial Sequence: Synthetic oligonucleotide
uggucguaaguagaucuuu

SEQ ID NO: 900810 - RNA, 19 nt, Artificial Sequence
  Description of Artificial Sequence: Synthetic oligonucleotide
ccccaaucaaggacaagcc

SEQ ID NO: 900811 - RNA, 19 nt, Artificial Sequence
  Description of Artificial Sequence: Synthetic oligonucleotide
agggcggcgcacuguggcg

SEQ ID NO: 900812 - RNA, 19 nt, Artificial Sequence
  Description of Artificial Sequence: Synthetic oligonucleotide
acagauggacagugauuau

SEQ ID NO: 900813 - RNA, 19 nt, Artificial Sequence
  Description of Artificial Sequence: Synthetic oligonucleotide
cacugaaggcugacuuuug

SEQ ID NO: 900814 - RNA, 19 nt, Artificial Sequence
  Description of Artificial Sequence: Synthetic oligonucleotide
uggccagucuacagcacuu

SEQ ID NO: 900815 - RNA, 19 nt, Artificial Sequence
  Description of Artificial Sequence: Synthetic oligonucleotide
accuccucuaggauacuug

SEQ ID NO: 900816 - RNA, 19 nt, Artificial Sequence
  Description of Artificial Sequence: Synthetic oligonucleotide
gaaugcggugggccucugc

SEQ ID NO: 900817 - RNA, 19 nt, Artificial Sequence
  Description of Artificial Sequence: Synthetic oligonucleotide
uccacaccggugagggcgu

SEQ ID NO: 900818 - RNA, 19 nt, Artificial Sequence
  Description of Artificial Sequence: Synthetic oligonucleotide
cuccuugucgguccggaga

SEQ ID NO: 900819 - RNA, 19 nt, Artificial Sequence
  Description of Artificial Sequence: Synthetic oligonucleotide
aguggggcgagugcaacau

SEQ ID NO: 900820 - RNA, 19 nt, Artificial Sequence
  Description of Artificial Sequence: Synthetic oligonucleotide
ucgggccccuugcagcuca

SEQ ID NO: 900821 - RNA, 19 nt, Artificial Sequence
  Description of Artificial Sequence: Synthetic oligonucleotide
uugguacagccuugcccca

SEQ ID NO: 900822 - RNA, 19 nt, Artificial Sequence
  Description of Artificial Sequence: Synthetic oligonucleotide
ugucgguccggagaaucuc

SEQ ID NO: 900823 - RNA, 19 nt, Artificial Sequence
  Description of Artificial Sequence: Synthetic oligonucleotide
ccaugggacacccuugcac

SEQ ID NO: 900824 - RNA, 19 nt, Artificial Sequence
  Description of Artificial Sequence: Synthetic oligonucleotide
gucgguccggagaaucucc

SEQ ID NO: 900825 - RNA, 19 nt, Artificial Sequence
  Description of Artificial Sequence: Synthetic oligonucleotide
ggaaguucagauggggaga

SEQ ID NO: 900826 - RNA, 19 nt, Artificial Sequence
  Description of Artificial Sequence: Synthetic oligonucleotide
guaguaaacugaggaagcu

SEQ ID NO: 900827 - RNA, 19 nt, Artificial Sequence
  Description of Artificial Sequence: Synthetic oligonucleotide
ccaugggcgagccccaugc

SEQ ID NO: 900828 - RNA, 19 nt, Artificial Sequence
  Description of Artificial Sequence: Synthetic oligonucleotide
ucgcucacaccugcgcacc

SEQ ID NO: 900829 - RNA, 19 nt, Artificial Sequence
  Description of Artificial Sequence: Synthetic oligonucleotide
uguaagccccaggccagac

SEQ ID NO: 900830 - RNA, 19 nt, Artificial Sequence
  Description of Artificial Sequence: Synthetic oligonucleotide
ggcgaucugcugaaugcgg

SEQ ID NO: 900831 - RNA, 19 nt, Artificial Sequence
  Description of Artificial Sequence: Synthetic oligonucleotide
accggugagggcgugcaca

SEQ ID NO: 900832 - RNA, 19 nt, Artificial Sequence
  Description of Artificial Sequence: Synthetic oligonucleotide
cuuaggguugguacagccu

SEQ ID NO: 900833 - RNA, 19 nt, Artificial Sequence
  Description of Artificial Sequence: Synthetic oligonucleotide
cacagcgaucugcuucuug

SEQ ID NO: 900834 - RNA, 19 nt, Artificial Sequence
  Description of Artificial Sequence: Synthetic oligonucleotide
cucuccgauuuugcgaauc

SEQ ID NO: 900835 - RNA, 19 nt, Artificial Sequence
  Description of Artificial Sequence: Synthetic oligonucleotide
guuuaacagcaggccuggg

SEQ ID NO: 900836 - RNA, 19 nt, Artificial Sequence
  Description of Artificial Sequence: Synthetic oligonucleotide
cugaggaagcugcuauaga

SEQ ID NO: 900837 - RNA, 19 nt, Artificial Sequence
  Description of Artificial Sequence: Synthetic oligonucleotide
ggccaugggacacccuugc

SEQ ID NO: 900838 - RNA, 19 nt, Artificial Sequence
  Description of Artificial Sequence: Synthetic oligonucleotide
ugacgucaccuugcuguug

SEQ ID NO: 900839 - RNA, 19 nt, Artificial Sequence
  Description of Artificial Sequence: Synthetic oligonucleotide
cagcauucacaugcacagc

SEQ ID NO: 900840 - RNA, 19 nt, Artificial Sequence
  Description of Artificial Sequence: Synthetic oligonucleotide
gagggcgugcacagaagca

SEQ ID NO: 900841 - RNA, 19 nt, Artificial Sequence
  Description of Artificial Sequence: Synthetic oligonucleotide
cagauggacagugauuaua

SEQ ID NO: 900842 - RNA, 19 nt, Artificial Sequence
  Description of Artificial Sequence: Synthetic oligonucleotide
cuugcagcucauaggccaa

SEQ ID NO: 900843 - RNA, 19 nt, Artificial Sequence
  Description of Artificial Sequence: Synthetic oligonucleotide
cuugccccaugggcgagcc

SEQ ID NO: 900844 - RNA, 19 nt, Artificial Sequence
  Description of Artificial Sequence: Synthetic oligonucleotide
ugaugcgaguguggagaga

SEQ ID NO: 900845 - RNA, 19 nt, Artificial Sequence
  Description of Artificial Sequence: Synthetic oligonucleotide
ugugugagugacgggcauu

SEQ ID NO: 900846 - RNA, 19 nt, Artificial Sequence
  Description of Artificial Sequence: Synthetic oligonucleotide
ggcaccagagucggugacg

SEQ ID NO: 900847 - RNA, 19 nt, Artificial Sequence
  Description of Artificial Sequence: Synthetic oligonucleotide
augcggugggccucugccu

SEQ ID NO: 900848 - RNA, 19 nt, Artificial Sequence
  Description of Artificial Sequence: Synthetic oligonucleotide
guaagccccaggccagaca

SEQ ID NO: 900849 - RNA, 19 nt, Artificial Sequence
  Description of Artificial Sequence: Synthetic oligonucleotide
caggaagaucuauaaacuu

SEQ ID NO: 900850 - RNA, 19 nt, Artificial Sequence
  Description of Artificial Sequence: Synthetic oligonucleotide
guaguggggcgagugcaac

SEQ ID NO: 900851 - RNA, 19 nt, Artificial Sequence
  Description of Artificial Sequence: Synthetic oligonucleotide
gaacccuuuuacccaugcu

SEQ ID NO: 900852 - RNA, 19 nt, Artificial Sequence
  Description of Artificial Sequence: Synthetic oligonucleotide
gacuggggccaugggacac

SEQ ID NO: 900853 - RNA, 19 nt, Artificial Sequence
  Description of Artificial Sequence: Synthetic oligonucleotide
gggacacccuugcaccucc

SEQ ID NO: 900854 - RNA, 19 nt, Artificial Sequence
  Description of Artificial Sequence: Synthetic oligonucleotide
ggugacguucuugucccug

SEQ ID NO: 900855 - RNA, 19 nt, Artificial Sequence
  Description of Artificial Sequence: Synthetic oligonucleotide
gccucuccgauuuugcgaa

SEQ ID NO: 900856 - RNA, 19 nt, Artificial Sequence
  Description of Artificial Sequence: Synthetic oligonucleotide
ggaagcugcuauagacaag

SEQ ID NO: 900857 - RNA, 19 nt, Artificial Sequence
  Description of Artificial Sequence: Synthetic oligonucleotide
cagucuacagcacuugauu

SEQ ID NO: 900858 - RNA, 19 nt, Artificial Sequence
  Description of Artificial Sequence: Synthetic oligonucleotide
uguggguugugggcuuccu

SEQ ID NO: 900859 - RNA, 19 nt, Artificial Sequence
  Description of Artificial Sequence: Synthetic oligonucleotide
gugagggcgugcacagaag

SEQ ID NO: 900860 - RNA, 19 nt, Artificial Sequence
  Description of Artificial Sequence: Synthetic oligonucleotide
gcgaguguggagagagagg

SEQ ID NO: 900861 - RNA, 19 nt, Artificial Sequence
  Description of Artificial Sequence: Synthetic oligonucleotide
cugacuuuugcagcucaaa

SEQ ID NO: 900862 - RNA, 19 nt, Artificial Sequence
  Description of Artificial Sequence: Synthetic oligonucleotide
gggcgugcacagaagcagg

SEQ ID NO: 900863 - RNA, 19 nt, Artificial Sequence
  Description of Artificial Sequence: Synthetic oligonucleotide
cuacaaucucaucaacuuu

SEQ ID NO: 900864 - RNA, 19 nt, Artificial Sequence
  Description of Artificial Sequence: Synthetic oligonucleotide
agcacgagcagggccuccu

SEQ ID NO: 900865 - RNA, 19 nt, Artificial Sequence
  Description of Artificial Sequence: Synthetic oligonucleotide
gugugagugacgggcauua

SEQ ID NO: 900866 - RNA, 19 nt, Artificial Sequence
  Description of Artificial Sequence: Synthetic oligonucleotide
gcuagaaccccaucaugcu

SEQ ID NO: 900867 - RNA, 19 nt, Artificial Sequence
  Description of Artificial Sequence: Synthetic oligonucleotide
gguccggagaaucuccugu

SEQ ID NO: 900868 - RNA, 19 nt, Artificial Sequence
  Description of Artificial Sequence: Synthetic oligonucleotide
ugggacacccuugcaccuc

SEQ ID NO: 900869 - RNA, 19 nt, Artificial Sequence
  Description of Artificial Sequence: Synthetic oligonucleotide
gcaccaggauucugaggag

SEQ ID NO: 900870 - RNA, 19 nt, Artificial Sequence
  Description of Artificial Sequence: Synthetic oligonucleotide
guaaacugaggaagcugcu

SEQ ID NO: 900871 - RNA, 19 nt, Artificial Sequence
  Description of Artificial Sequence: Synthetic oligonucleotide
aguagguaguggggcgagu

SEQ ID NO: 900872 - RNA, 19 nt, Artificial Sequence
  Description of Artificial Sequence: Synthetic oligonucleotide
cagagauuuuggcagcaau

SEQ ID NO: 900873 - RNA, 19 nt, Artificial Sequence
  Description of Artificial Sequence: Synthetic oligonucleotide
gcaguucugcuagcagccg

SEQ ID NO: 900874 - RNA, 19 nt, Artificial Sequence
  Description of Artificial Sequence: Synthetic oligonucleotide
cuuuucgcccucggcgauc

SEQ ID NO: 900875 - RNA, 19 nt, Artificial Sequence
  Description of Artificial Sequence: Synthetic oligonucleotide
uucauccgcucagccucug

SEQ ID NO: 900876 - RNA, 19 nt, Artificial Sequence
  Description of Artificial Sequence: Synthetic oligonucleotide
guggggcgagugcaacaug

SEQ ID NO: 900877 - RNA, 19 nt, Artificial Sequence
  Description of Artificial Sequence: Synthetic oligonucleotide
ugagcacgagcagggccuc

SEQ ID NO: 900878 - RNA, 19 nt, Artificial Sequence
  Description of Artificial Sequence: Synthetic oligonucleotide
ccggagaaucuccuguguc

SEQ ID NO: 900879 - RNA, 19 nt, Artificial Sequence
  Description of Artificial Sequence: Synthetic oligonucleotide
auguaagccccaggccaga

SEQ ID NO: 900880 - RNA, 19 nt, Artificial Sequence
  Description of Artificial Sequence: Synthetic oligonucleotide
gggcgagugcaacauguaa

SEQ ID NO: 900881 - RNA, 19 nt, Artificial Sequence
  Description of Artificial Sequence: Synthetic oligonucleotide
ggaacagaguuuagggcua

SEQ ID NO: 900882 - RNA, 19 nt, Artificial Sequence
  Description of Artificial Sequence: Synthetic oligonucleotide
agacuacaugaagguggca

SEQ ID NO: 900883 - RNA, 19 nt, Artificial Sequence
  Description of Artificial Sequence: Synthetic oligonucleotide
cagcaaucuggggcagggc

SEQ ID NO: 900884 - RNA, 19 nt, Artificial Sequence
  Description of Artificial Sequence: Synthetic oligonucleotide
ccuccuaaggcaguaguaa

SEQ ID NO: 900885 - RNA, 19 nt, Artificial Sequence
  Description of Artificial Sequence: Synthetic oligonucleotide
cugcuagcagccgguucac

SEQ ID NO: 900886 - RNA, 19 nt, Artificial Sequence
  Description of Artificial Sequence: Synthetic oligonucleotide
gcaagaauguguggguugu

SEQ ID NO: 900887 - RNA, 19 nt, Artificial Sequence
  Description of Artificial Sequence: Synthetic oligonucleotide
uugccccaugggcgagccc

SEQ ID NO: 900888 - RNA, 19 nt, Artificial Sequence
  Description of Artificial Sequence: Synthetic oligonucleotide
cacaccggugagggcgugc

SEQ ID NO: 900889 - RNA, 19 nt, Artificial Sequence
  Description of Artificial Sequence: Synthetic oligonucleotide
accggaggggaaguaggua

SEQ ID NO: 900890 - RNA, 19 nt, Artificial Sequence
  Description of Artificial Sequence: Synthetic oligonucleotide
cgagugcaacauguaagcc

SEQ ID NO: 900891 - RNA, 19 nt, Artificial Sequence
  Description of Artificial Sequence: Synthetic oligonucleotide
auagccacucaggccucaa

SEQ ID NO: 900892 - RNA, 19 nt, Artificial Sequence
  Description of Artificial Sequence: Synthetic oligonucleotide
gccucaaugacugcugccu

SEQ ID NO: 900893 - RNA, 19 nt, Artificial Sequence
  Description of Artificial Sequence: Synthetic oligonucleotide
ccaauggugcaaagacaca

SEQ ID NO: 900894 - RNA, 19 nt, Artificial Sequence
  Description of Artificial Sequence: Synthetic oligonucleotide
ugaaugcggugggccucug

SEQ ID NO: 900895 - RNA, 19 nt, Artificial Sequence
  Description of Artificial Sequence: Synthetic oligonucleotide
gcagccgguucacuucuga

SEQ ID NO: 900896 - RNA, 19 nt, Artificial Sequence
  Description of Artificial Sequence: Synthetic oligonucleotide
uuucgcccucggcgaucug

SEQ ID NO: 900897 - RNA, 19 nt, Artificial Sequence
  Description of Artificial Sequence: Synthetic oligonucleotide
caugaagguggcaguugau

SEQ ID NO: 900898 - RNA, 19 nt, Artificial Sequence
  Description of Artificial Sequence: Synthetic oligonucleotide
auaaggcaccagagucggu

SEQ ID NO: 900899 - RNA, 19 nt, Artificial Sequence
  Description of Artificial Sequence: Synthetic oligonucleotide
gcugaaugcggugggccuc

SEQ ID NO: 900900 - RNA, 19 nt, Artificial Sequence
  Description of Artificial Sequence: Synthetic oligonucleotide
gguucacuucugacgucac

SEQ ID NO: 900901 - RNA, 19 nt, Artificial Sequence
  Description of Artificial Sequence: Synthetic oligonucleotide
caugggcgagccccaugca

SEQ ID NO: 900902 - RNA, 19 nt, Artificial Sequence
  Description of Artificial Sequence: Synthetic oligonucleotide
gggcauuacuccaggccca

SEQ ID NO: 900903 - RNA, 19 nt, Artificial Sequence
  Description of Artificial Sequence: Synthetic oligonucleotide
cuacaugaagguggcaguu

SEQ ID NO: 900904 - RNA, 19 nt, Artificial Sequence
  Description of Artificial Sequence: Synthetic oligonucleotide
gcucacaccugcgcaccag

SEQ ID NO: 900905 - RNA, 19 nt, Artificial Sequence
  Description of Artificial Sequence: Synthetic oligonucleotide
ccccguacuucugguaggc

SEQ ID NO: 900906 - RNA, 19 nt, Artificial Sequence
  Description of Artificial Sequence: Synthetic oligonucleotide
cuucauccgcucagccucu

SEQ ID NO: 900907 - RNA, 19 nt, Artificial Sequence
  Description of Artificial Sequence: Synthetic oligonucleotide
cggcgaucugcugaaugcg

SEQ ID NO: 900908 - RNA, 19 nt, Artificial Sequence
  Description of Artificial Sequence: Synthetic oligonucleotide
gguaguggggcgagugcaa

SEQ ID NO: 900909 - RNA, 19 nt, Artificial Sequence
  Description of Artificial Sequence: Synthetic oligonucleotide
ggccuccuaaggcaguagu

SEQ ID NO: 900910 - RNA, 19 nt, Artificial Sequence
  Description of Artificial Sequence: Synthetic oligonucleotide
cucaggccucaaagggcaa

SEQ ID NO: 900911 - RNA, 19 nt, Artificial Sequence
  Description of Artificial Sequence: Synthetic oligonucleotide
ccucgcucacaccugcgca

SEQ ID NO: 900912 - RNA, 19 nt, Artificial Sequence
  Description of Artificial Sequence: Synthetic oligonucleotide
caccggugagggcgugcac

SEQ ID NO: 900913 - RNA, 19 nt, Artificial Sequence
  Description of Artificial Sequence: Synthetic oligonucleotide
gcuauagacaagaggccuu

SEQ ID NO: 900914 - RNA, 19 nt, Artificial Sequence
  Description of Artificial Sequence: Synthetic oligonucleotide
ccgauuuugcgaaucuuuu

SEQ ID NO: 900915 - RNA, 19 nt, Artificial Sequence
  Description of Artificial Sequence: Synthetic oligonucleotide
cugacgucaccuugcuguu

SEQ ID NO: 900916 - RNA, 19 nt, Artificial Sequence
  Description of Artificial Sequence: Synthetic oligonucleotide
ggucguaaguagaucuuuu

SEQ ID NO: 900917 - RNA, 19 nt, Artificial Sequence
  Description of Artificial Sequence: Synthetic oligonucleotide
gggcucgagucugcaggag

SEQ ID NO: 900918 - RNA, 19 nt, Artificial Sequence
  Description of Artificial Sequence: Synthetic oligonucleotide
gccaugggacacccuugca

SEQ ID NO: 900919 - RNA, 19 nt, Artificial Sequence
  Description of Artificial Sequence: Synthetic oligonucleotide
cugaaugcggugggccucu

SEQ ID NO: 900920 - RNA, 19 nt, Artificial Sequence
  Description of Artificial Sequence: Synthetic oligonucleotide
gugcaacauguaagcccca

SEQ ID NO: 900921 - RNA, 19 nt, Artificial Sequence
  Description of Artificial Sequence: Synthetic oligonucleotide
ggcauuacuccaggcccaa

SEQ ID NO: 900922 - RNA, 19 nt, Artificial Sequence
  Description of Artificial Sequence: Synthetic oligonucleotide
gcagaggggcagguuuaac

SEQ ID NO: 900923 - RNA, 19 nt, Artificial Sequence
  Description of Artificial Sequence: Synthetic oligonucleotide
ccauggcuagaaccccauc

SEQ ID NO: 900924 - RNA, 19 nt, Artificial Sequence
  Description of Artificial Sequence: Synthetic oligonucleotide
gcugacuuuugcagcucaa

SEQ ID NO: 900925 - RNA, 19 nt, Artificial Sequence
  Description of Artificial Sequence: Synthetic oligonucleotide
cacuagcaggaagaucuau

SEQ ID NO: 900926 - RNA, 19 nt, Artificial Sequence
  Description of Artificial Sequence: Synthetic oligonucleotide
cccguacuucugguaggcc

SEQ ID NO: 900927 - RNA, 19 nt, Artificial Sequence
  Description of Artificial Sequence: Synthetic oligonucleotide
cgguucacuucugacguca

SEQ ID NO: 900928 - RNA, 19 nt, Artificial Sequence
  Description of Artificial Sequence: Synthetic oligonucleotide
cgcagggcggcgcacugug

SEQ ID NO: 900929 - RNA, 19 nt, Artificial Sequence
  Description of Artificial Sequence: Synthetic oligonucleotide
ccagaacccuuuuacccau

SEQ ID NO: 900930 - RNA, 19 nt, Artificial Sequence
  Description of Artificial Sequence: Synthetic oligonucleotide
ccgguucacuucugacguc

SEQ ID NO: 900931 - RNA, 19 nt, Artificial Sequence
  Description of Artificial Sequence: Synthetic oligonucleotide
ccaauaggccauagccacu

SEQ ID NO: 900932 - RNA, 19 nt, Artificial Sequence
  Description of Artificial Sequence: Synthetic oligonucleotide
cucgagucugcaggagccu

SEQ ID NO: 900933 - RNA, 19 nt, Artificial Sequence
  Description of Artificial Sequence: Synthetic oligonucleotide
ccucaacacgcagcacuuc

SEQ ID NO: 900934 - RNA, 19 nt, Artificial Sequence
  Description of Artificial Sequence: Synthetic oligonucleotide
cccaugggcgagccccaug

SEQ ID NO: 900935 - RNA, 19 nt, Artificial Sequence
  Description of Artificial Sequence: Synthetic oligonucleotide
gggcggcgcacuguggcga

SEQ ID NO: 900936 - RNA, 19 nt, Artificial Sequence
  Description of Artificial Sequence: Synthetic oligonucleotide
gggcaagaauguguggguu

SEQ ID NO: 900937 - RNA, 19 nt, Artificial Sequence
  Description of Artificial Sequence: Synthetic oligonucleotide
guucugcuagcagccgguu

SEQ ID NO: 900938 - RNA, 19 nt, Artificial Sequence
  Description of Artificial Sequence: Synthetic oligonucleotide
gcacuagcaggaagaucua

SEQ ID NO: 900939 - RNA, 19 nt, Artificial Sequence
  Description of Artificial Sequence: Synthetic oligonucleotide
ggcgagccccaugcacuca

SEQ ID NO: 900940 - RNA, 19 nt, Artificial Sequence
  Description of Artificial Sequence: Synthetic oligonucleotide
cuccgcagggcggcgcacu

SEQ ID NO: 900941 - RNA, 19 nt, Artificial Sequence
  Description of Artificial Sequence: Synthetic oligonucleotide
cgaugagcuccuugucggu

SEQ ID NO: 900942 - RNA, 19 nt, Artificial Sequence
  Description of Artificial Sequence: Synthetic oligonucleotide
gcggcgcacuguggcgaug

SEQ ID NO: 900943 - RNA, 19 nt, Artificial Sequence
  Description of Artificial Sequence: Synthetic oligonucleotide
caccagagucggugacguu

SEQ ID NO: 900944 - RNA, 19 nt, Artificial Sequence
  Description of Artificial Sequence: Synthetic oligonucleotide
ccuuuucgcccucggcgau

SEQ ID NO: 900945 - RNA, 19 nt, Artificial Sequence
  Description of Artificial Sequence: Synthetic oligonucleotide
cagagucggugacguucuu

SEQ ID NO: 900946 - RNA, 19 nt, Artificial Sequence
  Description of Artificial Sequence: Synthetic oligonucleotide
ggcggcgcacuguggcgau

SEQ ID NO: 900947 - RNA, 19 nt, Artificial Sequence
  Description of Artificial Sequence: Synthetic oligonucleotide
ggcaggccggguggggacu

SEQ ID NO: 900948 - RNA, 19 nt, Artificial Sequence
  Description of Artificial Sequence: Synthetic oligonucleotide
ccacaccggugagggcgug

SEQ ID NO: 900949 - RNA, 19 nt, Artificial Sequence
  Description of Artificial Sequence: Synthetic oligonucleotide
ccucuccgauuuugcgaau

SEQ ID NO: 900950 - RNA, 19 nt, Artificial Sequence
  Description of Artificial Sequence: Synthetic oligonucleotide
gcgcaccaguggcauucuu

SEQ ID NO: 900951 - RNA, 19 nt, Artificial Sequence
  Description of Artificial Sequence: Synthetic oligonucleotide
ccuugucgguccggagaau

SEQ ID NO: 900952 - RNA, 19 nt, Artificial Sequence
  Description of Artificial Sequence: Synthetic oligonucleotide
cggugacguucuugucccu

SEQ ID NO: 900953 - RNA, 19 nt, Artificial Sequence
  Description of Artificial Sequence: Synthetic oligonucleotide
ccgcagggcggcgcacugu

SEQ ID NO: 900954 - RNA, 19 nt, Artificial Sequence
  Description of Artificial Sequence: Synthetic oligonucleotide
aauguguucacaugggcac

SEQ ID NO: 900955 - RNA, 19 nt, Artificial Sequence
  Description of Artificial Sequence: Synthetic oligonucleotide
aguacugcaaccuucugcc

SEQ ID NO: 900956 - RNA, 19 nt, Artificial Sequence
  Description of Artificial Sequence: Synthetic oligonucleotide
aaggacauugcgcacagcg

SEQ ID NO: 900957 - RNA, 19 nt, Artificial Sequence
  Description of Artificial Sequence: Synthetic oligonucleotide
gauaauuguacaauggcag

SEQ ID NO: 900958 - RNA, 19 nt, Artificial Sequence
  Description of Artificial Sequence: Synthetic oligonucleotide
ucauagauaagcaauuccu

SEQ ID NO: 900959 - RNA, 19 nt, Artificial Sequence
  Description of Artificial Sequence: Synthetic oligonucleotide
aauggguagagauaauugu

SEQ ID NO: 900960 - RNA, 19 nt, Artificial Sequence
  Description of Artificial Sequence: Synthetic oligonucleotide
aaagcggacuuugagauuc

SEQ ID NO: 900961 - RNA, 19 nt, Artificial Sequence
  Description of Artificial Sequence: Synthetic oligonucleotide
gaaguugauguugugaggg

SEQ ID NO: 900962 - RNA, 19 nt, Artificial Sequence
  Description of Artificial Sequence: Synthetic oligonucleotide
gaagugagcagugacacgg

SEQ ID NO: 900963 - RNA, 19 nt, Artificial Sequence
  Description of Artificial Sequence: Synthetic oligonucleotide
aguacaggaagccacgggg

SEQ ID NO: 900964 - RNA, 19 nt, Artificial Sequence
  Description of Artificial Sequence: Synthetic oligonucleotide
cauauacaccauaagauug

SEQ ID NO: 900965 - RNA, 19 nt, Artificial Sequence
  Description of Artificial Sequence: Synthetic oligonucleotide
uacaugguacgccacauag

SEQ ID NO: 900966 - RNA, 19 nt, Artificial Sequence
  Description of Artificial Sequence: Synthetic oligonucleotide
uacaccauaagauugcggu

SEQ ID NO: 900967 - RNA, 19 nt, Artificial Sequence
  Description of Artificial Sequence: Synthetic oligonucleotide
auaauuguacaauggcagg

SEQ ID NO: 900968 - RNA, 19 nt, Artificial Sequence
  Description of Artificial Sequence: Synthetic oligonucleotide
ugguacgccacauaguggg

SEQ ID NO: 900969 - RNA, 19 nt, Artificial Sequence
  Description of Artificial Sequence: Synthetic oligonucleotide
aauagcggaaacgugccac

SEQ ID NO: 900970 - RNA, 19 nt, Artificial Sequence
  Description of Artificial Sequence: Synthetic oligonucleotide
ucuuaaagcggacuuugag

SEQ ID NO: 900971 - RNA, 19 nt, Artificial Sequence
  Description of Artificial Sequence: Synthetic oligonucleotide
ucagggaccacuucaauca

SEQ ID NO: 900972 - RNA, 19 nt, Artificial Sequence
  Description of Artificial Sequence: Synthetic oligonucleotide
auagauguccucgaaauag

SEQ ID NO: 900973 - RNA, 19 nt, Artificial Sequence
  Description of Artificial Sequence: Synthetic oligonucleotide
uuaaagcggacuuugagau

SEQ ID NO: 900974 - RNA, 19 nt, Artificial Sequence
  Description of Artificial Sequence: Synthetic oligonucleotide
uccaugaucaagauccgcc

SEQ ID NO: 900975 - RNA, 19 nt, Artificial Sequence
  Description of Artificial Sequence: Synthetic oligonucleotide
cuuguucuuagucaggggc

SEQ ID NO: 900976 - RNA, 19 nt, Artificial Sequence
  Description of Artificial Sequence: Synthetic oligonucleotide
gucaccagaagccagugcg

SEQ ID NO: 900977 - RNA, 19 nt, Artificial Sequence
  Description of Artificial Sequence: Synthetic oligonucleotide
uaacgcagcagugagaugc

SEQ ID NO: 900978 - RNA, 19 nt, Artificial Sequence
  Description of Artificial Sequence: Synthetic oligonucleotide
auagguagcgguuuagcag

SEQ ID NO: 900979 - RNA, 19 nt, Artificial Sequence
  Description of Artificial Sequence: Synthetic oligonucleotide
uuuucacggaaguugaugu

SEQ ID NO: 900980 - RNA, 19 nt, Artificial Sequence
  Description of Artificial Sequence: Synthetic oligonucleotide
uaauuguacaauggcaggg

SEQ ID NO: 900981 - RNA, 19 nt, Artificial Sequence
  Description of Artificial Sequence: Synthetic oligonucleotide
ucaagauccgcccacggca

SEQ ID NO: 900982 - RNA, 19 nt, Artificial Sequence
  Description of Artificial Sequence: Synthetic oligonucleotide
uagagauaauuguacaaug

SEQ ID NO: 900983 - RNA, 19 nt, Artificial Sequence
  Description of Artificial Sequence: Synthetic oligonucleotide
gugggauucgaguacaagg

SEQ ID NO: 900984 - RNA, 19 nt, Artificial Sequence
  Description of Artificial Sequence: Synthetic oligonucleotide
aagauugcggucucgguca

SEQ ID NO: 900985 - RNA, 19 nt, Artificial Sequence
  Description of Artificial Sequence: Synthetic oligonucleotide
agugacacggucugucucc

SEQ ID NO: 900986 - RNA, 19 nt, Artificial Sequence
  Description of Artificial Sequence: Synthetic oligonucleotide
auaaugucgggugugguac

SEQ ID NO: 900987 - RNA, 19 nt, Artificial Sequence
  Description of Artificial Sequence: Synthetic oligonucleotide
ucuuagauggcuuuggcuu

SEQ ID NO: 900988 - RNA, 19 nt, Artificial Sequence
  Description of Artificial Sequence: Synthetic oligonucleotide
cacuaagaagcccagcugg

SEQ ID NO: 900989 - RNA, 19 nt, Artificial Sequence
  Description of Artificial Sequence: Synthetic oligonucleotide
acggccagucaccagaagc

SEQ ID NO: 900990 - RNA, 19 nt, Artificial Sequence
  Description of Artificial Sequence: Synthetic oligonucleotide
gacuuugagauuccccugg

SEQ ID NO: 900991 - RNA, 19 nt, Artificial Sequence
  Description of Artificial Sequence: Synthetic oligonucleotide
agagauaauuguacaaugg

SEQ ID NO: 900992 - RNA, 19 nt, Artificial Sequence
  Description of Artificial Sequence: Synthetic oligonucleotide
caggguaucacagaguuag

SEQ ID NO: 900993 - RNA, 19 nt, Artificial Sequence
  Description of Artificial Sequence: Synthetic oligonucleotide
caugguacgccacauagug

SEQ ID NO: 900994 - RNA, 19 nt, Artificial Sequence
  Description of Artificial Sequence: Synthetic oligonucleotide
aaacggucuccucacugcg

SEQ ID NO: 900995 - RNA, 19 nt, Artificial Sequence
  Description of Artificial Sequence: Synthetic oligonucleotide
cauagauaagcaauuccug

SEQ ID NO: 900996 - RNA, 19 nt, Artificial Sequence
  Description of Artificial Sequence: Synthetic oligonucleotide
uauagguagcgguuuagca

SEQ ID NO: 900997 - RNA, 19 nt, Artificial Sequence
  Description of Artificial Sequence: Synthetic oligonucleotide
uggguagagauaauuguac

SEQ ID NO: 900998 - RNA, 19 nt, Artificial Sequence
  Description of Artificial Sequence: Synthetic oligonucleotide
agcgggaucuuccugacag

SEQ ID NO: 900999 - RNA, 19 nt, Artificial Sequence
  Description of Artificial Sequence: Synthetic oligonucleotide
acaaaauggguagagauaa

SEQ ID NO: 901000 - RNA, 19 nt, Artificial Sequence
  Description of Artificial Sequence: Synthetic oligonucleotide
uuuggaagaaaucguuuuc

SEQ ID NO: 901001 - RNA, 19 nt, Artificial Sequence
  Description of Artificial Sequence: Synthetic oligonucleotide
aucaagauccgcccacggc

SEQ ID NO: 901002 - RNA, 19 nt, Artificial Sequence
  Description of Artificial Sequence: Synthetic oligonucleotide
acggcaugugacuucuucc

SEQ ID NO: 901003 - RNA, 19 nt, Artificial Sequence
  Description of Artificial Sequence: Synthetic oligonucleotide
uaagauugcggucucgguc

SEQ ID NO: 901004 - RNA, 19 nt, Artificial Sequence
  Description of Artificial Sequence: Synthetic oligonucleotide
augaucaagauccgcccac

SEQ ID NO: 901005 - RNA, 19 nt, Artificial Sequence
  Description of Artificial Sequence: Synthetic oligonucleotide
agaguuagaagugagcagu

SEQ ID NO: 901006 - RNA, 19 nt, Artificial Sequence
  Description of Artificial Sequence: Synthetic oligonucleotide
aauaaugucggguguggua

SEQ ID NO: 901007 - RNA, 19 nt, Artificial Sequence
  Description of Artificial Sequence: Synthetic oligonucleotide
acauauacaccauaagauu

SEQ ID NO: 901008 - RNA, 19 nt, Artificial Sequence
  Description of Artificial Sequence: Synthetic oligonucleotide
auguccucgaaauagcgga

SEQ ID NO: 901009 - RNA, 19 nt, Artificial Sequence
  Description of Artificial Sequence: Synthetic oligonucleotide
acagcguucuguaggaugc

SEQ ID NO: 901010 - RNA, 19 nt, Artificial Sequence
  Description of Artificial Sequence: Synthetic oligonucleotide
acagaguuagaagugagca

SEQ ID NO: 901011 - RNA, 19 nt, Artificial Sequence
  Description of Artificial Sequence: Synthetic oligonucleotide
uauacaccauaagauugcg

SEQ ID NO: 901012 - RNA, 19 nt, Artificial Sequence
  Description of Artificial Sequence: Synthetic oligonucleotide
cacaugacugacuucuugc

SEQ ID NO: 901013 - RNA, 19 nt, Artificial Sequence
  Description of Artificial Sequence: Synthetic oligonucleotide
ggagcaaacgagucaaugg

SEQ ID NO: 901014 - RNA, 19 nt, Artificial Sequence
  Description of Artificial Sequence: Synthetic oligonucleotide
ugaaacggucuccucacug

SEQ ID NO: 901015 - RNA, 19 nt, Artificial Sequence
  Description of Artificial Sequence: Synthetic oligonucleotide
augccagucagcucgcugg

SEQ ID NO: 901016 - RNA, 19 nt, Artificial Sequence
  Description of Artificial Sequence: Synthetic oligonucleotide
ugcggucucggucagacac

SEQ ID NO: 901017 - RNA, 19 nt, Artificial Sequence
  Description of Artificial Sequence: Synthetic oligonucleotide
gacaccgucuucaugcacg

SEQ ID NO: 901018 - RNA, 19 nt, Artificial Sequence
  Description of Artificial Sequence: Synthetic oligonucleotide
cuuaaagcggacuuugaga

SEQ ID NO: 901019 - RNA, 19 nt, Artificial Sequence
  Description of Artificial Sequence: Synthetic oligonucleotide
gaaacggucuccucacugc

SEQ ID NO: 901020 - RNA, 19 nt, Artificial Sequence
  Description of Artificial Sequence: Synthetic oligonucleotide
gaaauagcggaaacgugcc

SEQ ID NO: 901021 - RNA, 19 nt, Artificial Sequence
  Description of Artificial Sequence: Synthetic oligonucleotide
aucgaugcccaugggaugc

SEQ ID NO: 901022 - RNA, 19 nt, Artificial Sequence
  Description of Artificial Sequence: Synthetic oligonucleotide
agauaauuguacaauggca

SEQ ID NO: 901023 - RNA, 19 nt, Artificial Sequence
  Description of Artificial Sequence: Synthetic oligonucleotide
acuuugagauuccccuggc

SEQ ID NO: 901024 - RNA, 19 nt, Artificial Sequence
  Description of Artificial Sequence: Synthetic oligonucleotide
ucgaguacaagguguguug

SEQ ID NO: 901025 - RNA, 19 nt, Artificial Sequence
  Description of Artificial Sequence: Synthetic oligonucleotide
aacaugcagcauucggaag

SEQ ID NO: 901026 - RNA, 19 nt, Artificial Sequence
  Description of Artificial Sequence: Synthetic oligonucleotide
gguaucacagaguuagaag

SEQ ID NO: 901027 - RNA, 19 nt, Artificial Sequence
  Description of Artificial Sequence: Synthetic oligonucleotide
cuucaugcacgugacaugc

SEQ ID NO: 901028 - RNA, 19 nt, Artificial Sequence
  Description of Artificial Sequence: Synthetic oligonucleotide
augcacgugacaugcuccc

SEQ ID NO: 901029 - RNA, 19 nt, Artificial Sequence
  Description of Artificial Sequence: Synthetic oligonucleotide
cauaagauugcggucucgg

SEQ ID NO: 901030 - RNA, 19 nt, Artificial Sequence
  Description of Artificial Sequence: Synthetic oligonucleotide
ucgaaauagcggaaacgug

SEQ ID NO: 901031 - RNA, 19 nt, Artificial Sequence
  Description of Artificial Sequence: Synthetic oligonucleotide
uuguucuuagucaggggcu

SEQ ID NO: 901032 - RNA, 19 nt, Artificial Sequence
  Description of Artificial Sequence: Synthetic oligonucleotide
agaauaaugucgggugugg

SEQ ID NO: 901033 - RNA, 19 nt, Artificial Sequence
  Description of Artificial Sequence: Synthetic oligonucleotide
uacaccuuggacucuacau

SEQ ID NO: 901034 - RNA, 19 nt, Artificial Sequence
  Description of Artificial Sequence: Synthetic oligonucleotide
auugcggucucggucagac

SEQ ID NO: 901035 - RNA, 19 nt, Artificial Sequence
  Description of Artificial Sequence: Synthetic oligonucleotide
gucucggucagacacuaag

SEQ ID NO: 901036 - RNA, 19 nt, Artificial Sequence
  Description of Artificial Sequence: Synthetic oligonucleotide
aaacgagucaauggggcca

SEQ ID NO: 901037 - RNA, 19 nt, Artificial Sequence
  Description of Artificial Sequence: Synthetic oligonucleotide
accgucuucaugcacguga

SEQ ID NO: 901038 - RNA, 19 nt, Artificial Sequence
  Description of Artificial Sequence: Synthetic oligonucleotide
gaugcgccggucaacaugc

SEQ ID NO: 901039 - RNA, 19 nt, Artificial Sequence
  Description of Artificial Sequence: Synthetic oligonucleotide
gugguaccuaucuucuugg

SEQ ID NO: 901040 - RNA, 19 nt, Artificial Sequence
  Description of Artificial Sequence: Synthetic oligonucleotide
ucaauccuggcauuaggaa

SEQ ID NO: 901041 - RNA, 19 nt, Artificial Sequence
  Description of Artificial Sequence: Synthetic oligonucleotide
uuuggcuucuuuucacgga

SEQ ID NO: 901042 - RNA, 19 nt, Artificial Sequence
  Description of Artificial Sequence: Synthetic oligonucleotide
uuggcuucuuuucacggaa

SEQ ID NO: 901043 - RNA, 19 nt, Artificial Sequence
  Description of Artificial Sequence: Synthetic oligonucleotide
gaucaagauccgcccacgg

SEQ ID NO: 901044 - RNA, 19 nt, Artificial Sequence
  Description of Artificial Sequence: Synthetic oligonucleotide
gauucgaguacaaggugug

SEQ ID NO: 901045 - RNA, 19 nt, Artificial Sequence
  Description of Artificial Sequence: Synthetic oligonucleotide
uugugagggaccuucuuaa

SEQ ID NO: 901046 - RNA, 19 nt, Artificial Sequence
  Description of Artificial Sequence: Synthetic oligonucleotide
caaacgagucaauggggcc

SEQ ID NO: 901047 - RNA, 19 nt, Artificial Sequence
  Description of Artificial Sequence: Synthetic oligonucleotide
gaauguguucacaugggca

SEQ ID NO: 901048 - RNA, 19 nt, Artificial Sequence
  Description of Artificial Sequence: Synthetic oligonucleotide
gacucuacaugguacgcca

SEQ ID NO: 901049 - RNA, 19 nt, Artificial Sequence
  Description of Artificial Sequence: Synthetic oligonucleotide
gacacuaagaagcccagcu

SEQ ID NO: 901050 - RNA, 19 nt, Artificial Sequence
  Description of Artificial Sequence: Synthetic oligonucleotide
gaauggagcaaacgaguca

SEQ ID NO: 901051 - RNA, 19 nt, Artificial Sequence
  Description of Artificial Sequence: Synthetic oligonucleotide
caugcacgugacaugcucc

SEQ ID NO: 901052 - RNA, 19 nt, Artificial Sequence
  Description of Artificial Sequence: Synthetic oligonucleotide
cgaaauagcggaaacgugc

SEQ ID NO: 901053 - RNA, 19 nt, Artificial Sequence
  Description of Artificial Sequence: Synthetic oligonucleotide
aagcaauuccugguccacg

SEQ ID NO: 901054 - RNA, 19 nt, Artificial Sequence
  Description of Artificial Sequence: Synthetic oligonucleotide
agcgguuuagcagcucucc

SEQ ID NO: 901055 - RNA, 19 nt, Artificial Sequence
  Description of Artificial Sequence: Synthetic oligonucleotide
cagaguuagaagugagcag

SEQ ID NO: 901056 - RNA, 19 nt, Artificial Sequence
  Description of Artificial Sequence: Synthetic oligonucleotide
uuuaggccugaaacggucu

SEQ ID NO: 901057 - RNA, 19 nt, Artificial Sequence
  Description of Artificial Sequence: Synthetic oligonucleotide
ucaugcacgugacaugcuc

SEQ ID NO: 901058 - RNA, 19 nt, Artificial Sequence
  Description of Artificial Sequence: Synthetic oligonucleotide
agacgcagagcuccacggc

SEQ ID NO: 901059 - RNA, 19 nt, Artificial Sequence
  Description of Artificial Sequence: Synthetic oligonucleotide
cucaccagucauucguggg

SEQ ID NO: 901060 - RNA, 19 nt, Artificial Sequence
  Description of Artificial Sequence: Synthetic oligonucleotide
aaauagcggaaacgugcca

SEQ ID NO: 901061 - RNA, 19 nt, Artificial Sequence
  Description of Artificial Sequence: Synthetic oligonucleotide
ugacugacuucuugcuggg

SEQ ID NO: 901062 - RNA, 19 nt, Artificial Sequence
  Description of Artificial Sequence: Synthetic oligonucleotide
uuagucaggggcugcccag

SEQ ID NO: 901063 - RNA, 19 nt, Artificial Sequence
  Description of Artificial Sequence: Synthetic oligonucleotide
cuuuaggccugaaacgguc

SEQ ID NO: 901064 - RNA, 19 nt, Artificial Sequence
  Description of Artificial Sequence: Synthetic oligonucleotide
cuuuucacggaaguugaug

SEQ ID NO: 901065 - RNA, 19 nt, Artificial Sequence
  Description of Artificial Sequence: Synthetic oligonucleotide
gaaguacaggaagccacgg

SEQ ID NO: 901066 - RNA, 19 nt, Artificial Sequence
  Description of Artificial Sequence: Synthetic oligonucleotide
ugaucaagauccgcccacg

SEQ ID NO: 901067 - RNA, 19 nt, Artificial Sequence
  Description of Artificial Sequence: Synthetic oligonucleotide
auagccucaaauuccuuuu

SEQ ID NO: 901068 - RNA, 19 nt, Artificial Sequence
  Description of Artificial Sequence: Synthetic oligonucleotide
cuucuuagauggcuuuggc

SEQ ID NO: 901069 - RNA, 19 nt, Artificial Sequence
  Description of Artificial Sequence: Synthetic oligonucleotide
uucuuaaagcggacuuuga

SEQ ID NO: 901070 - RNA, 19 nt, Artificial Sequence
  Description of Artificial Sequence: Synthetic oligonucleotide
ggaaacgugccacacggcc

SEQ ID NO: 901071 - RNA, 19 nt, Artificial Sequence
  Description of Artificial Sequence: Synthetic oligonucleotide
aaccacgugaugugcuugu

SEQ ID NO: 901072 - RNA, 19 nt, Artificial Sequence
  Description of Artificial Sequence: Synthetic oligonucleotide
cagcauacaccuuggacuc

SEQ ID NO: 901073 - RNA, 19 nt, Artificial Sequence
  Description of Artificial Sequence: Synthetic oligonucleotide
agcaaacgagucaaugggg

SEQ ID NO: 901074 - RNA, 19 nt, Artificial Sequence
  Description of Artificial Sequence: Synthetic oligonucleotide
uccucgaaauagcggaaac

SEQ ID NO: 901075 - RNA, 19 nt, Artificial Sequence
  Description of Artificial Sequence: Synthetic oligonucleotide
gcggaaacgugccacacgg

SEQ ID NO: 901076 - RNA, 19 nt, Artificial Sequence
  Description of Artificial Sequence: Synthetic oligonucleotide
uuuccucaccagucauucg

SEQ ID NO: 901077 - RNA, 19 nt, Artificial Sequence
  Description of Artificial Sequence: Synthetic oligonucleotide
uguaggaugcgccggucaa

SEQ ID NO: 901078 - RNA, 19 nt, Artificial Sequence
  Description of Artificial Sequence: Synthetic oligonucleotide
cucagggaccacuucaauc

SEQ ID NO: 901079 - RNA, 19 nt, Artificial Sequence
  Description of Artificial Sequence: Synthetic oligonucleotide
cagacgcagagcuccacgg

SEQ ID NO: 901080 - RNA, 19 nt, Artificial Sequence
  Description of Artificial Sequence: Synthetic oligonucleotide
ugggguagcaugguuguca

SEQ ID NO: 901081 - RNA, 19 nt, Artificial Sequence
  Description of Artificial Sequence: Synthetic oligonucleotide
caugcucccauuccucuag

SEQ ID NO: 901082 - RNA, 19 nt, Artificial Sequence
  Description of Artificial Sequence: Synthetic oligonucleotide
cucacugcgcuccauggug

SEQ ID NO: 901083 - RNA, 19 nt, Artificial Sequence
  Description of Artificial Sequence: Synthetic oligonucleotide
aguucacccugucuguuga

SEQ ID NO: 901084 - RNA, 19 nt, Artificial Sequence
  Description of Artificial Sequence: Synthetic oligonucleotide
auaagauugcggucucggu

SEQ ID NO: 901085 - RNA, 19 nt, Artificial Sequence
  Description of Artificial Sequence: Synthetic oligonucleotide
uggcaaaccacgugaugug

SEQ ID NO: 901086 - RNA, 19 nt, Artificial Sequence
  Description of Artificial Sequence: Synthetic oligonucleotide
gaaacgugccacacggccc

SEQ ID NO: 901087 - RNA, 19 nt, Artificial Sequence
  Description of Artificial Sequence: Synthetic oligonucleotide
ccacauggaagucugcucg

SEQ ID NO: 901088 - RNA, 19 nt, Artificial Sequence
  Description of Artificial Sequence: Synthetic oligonucleotide
agcggaaacgugccacacg

SEQ ID NO: 901089 - RNA, 19 nt, Artificial Sequence
  Description of Artificial Sequence: Synthetic oligonucleotide
uaccuaucuucuuggccag

SEQ ID NO: 901090 - RNA, 19 nt, Artificial Sequence
  Description of Artificial Sequence: Synthetic oligonucleotide
cacagcguucuguaggaug

SEQ ID NO: 901091 - RNA, 19 nt, Artificial Sequence
  Description of Artificial Sequence: Synthetic oligonucleotide
agagguaugcaggcaggac

SEQ ID NO: 901092 - RNA, 19 nt, Artificial Sequence
  Description of Artificial Sequence: Synthetic oligonucleotide
ucacccugucuguugaagu

SEQ ID NO: 901093 - RNA, 19 nt, Artificial Sequence
  Description of Artificial Sequence: Synthetic oligonucleotide
cugaauagccauagauguc

SEQ ID NO: 901094 - RNA, 19 nt, Artificial Sequence
  Description of Artificial Sequence: Synthetic oligonucleotide
cacauggaagucugcucgg

SEQ ID NO: 901095 - RNA, 19 nt, Artificial Sequence
  Description of Artificial Sequence: Synthetic oligonucleotide
uccucaccagucauucgug

SEQ ID NO: 901096 - RNA, 19 nt, Artificial Sequence
  Description of Artificial Sequence: Synthetic oligonucleotide
agucaauggggccaucgau

SEQ ID NO: 901097 - RNA, 19 nt, Artificial Sequence
  Description of Artificial Sequence: Synthetic oligonucleotide
cacagcgcagucacgggcc

SEQ ID NO: 901098 - RNA, 19 nt, Artificial Sequence
  Description of Artificial Sequence: Synthetic oligonucleotide
uucuguaggaugcgccggu

SEQ ID NO: 901099 - RNA, 19 nt, Artificial Sequence
  Description of Artificial Sequence: Synthetic oligonucleotide
accuucuuaaagcggacuu

SEQ ID NO: 901100 - RNA, 19 nt, Artificial Sequence
  Description of Artificial Sequence: Synthetic oligonucleotide
acgugacaugcucccauuc

SEQ ID NO: 901101 - RNA, 19 nt, Artificial Sequence
  Description of Artificial Sequence: Synthetic oligonucleotide
guauagguagcgguuuagc

SEQ ID NO: 901102 - RNA, 19 nt, Artificial Sequence
  Description of Artificial Sequence: Synthetic oligonucleotide
uuaggccugaaacggucuc

SEQ ID NO: 901103 - RNA, 19 nt, Artificial Sequence
  Description of Artificial Sequence: Synthetic oligonucleotide
acccugucuguugaaguac

SEQ ID NO: 901104 - RNA, 19 nt, Artificial Sequence
  Description of Artificial Sequence: Synthetic oligonucleotide
auagcggaaacgugccaca

SEQ ID NO: 901105 - RNA, 19 nt, Artificial Sequence
  Description of Artificial Sequence: Synthetic oligonucleotide
agcguucuguaggaugcgc

SEQ ID NO: 901106 - RNA, 19 nt, Artificial Sequence
  Description of Artificial Sequence: Synthetic oligonucleotide
cagaauaaugucgggugug

SEQ ID NO: 901107 - RNA, 19 nt, Artificial Sequence
  Description of Artificial Sequence: Synthetic oligonucleotide
uaaugucgggugugguacc

SEQ ID NO: 901108 - RNA, 19 nt, Artificial Sequence
  Description of Artificial Sequence: Synthetic oligonucleotide
auacaccauaagauugcgg

SEQ ID NO: 901109 - RNA, 19 nt, Artificial Sequence
  Description of Artificial Sequence: Synthetic oligonucleotide
gcccuuuaggccugaaacg

SEQ ID NO: 901110 - RNA, 19 nt, Artificial Sequence
  Description of Artificial Sequence: Synthetic oligonucleotide
ugcgccggucaacaugcag

SEQ ID NO: 901111 - RNA, 19 nt, Artificial Sequence
  Description of Artificial Sequence: Synthetic oligonucleotide
ucuacaugguacgccacau

SEQ ID NO: 901112 - RNA, 19 nt, Artificial Sequence
  Description of Artificial Sequence: Synthetic oligonucleotide
guucuguaggaugcgccgg

SEQ ID NO: 901113 - RNA, 19 nt, Artificial Sequence
  Description of Artificial Sequence: Synthetic oligonucleotide
aaugucgggugugguaccu

SEQ ID NO: 901114 - RNA, 19 nt, Artificial Sequence
  Description of Artificial Sequence: Synthetic oligonucleotide
gcauucggaaggcacgggg

SEQ ID NO: 901115 - RNA, 19 nt, Artificial Sequence
  Description of Artificial Sequence: Synthetic oligonucleotide
gcccaugggaugcagacgc

SEQ ID NO: 901116 - RNA, 19 nt, Artificial Sequence
  Description of Artificial Sequence: Synthetic oligonucleotide
cauucgugggauucgagua

SEQ ID NO: 901117 - RNA, 19 nt, Artificial Sequence
  Description of Artificial Sequence: Synthetic oligonucleotide
augcucccauuccucuagc

SEQ ID NO: 901118 - RNA, 19 nt, Artificial Sequence
  Description of Artificial Sequence: Synthetic oligonucleotide
uguccucgaaauagcggaa

SEQ ID NO: 901119 - RNA, 19 nt, Artificial Sequence
  Description of Artificial Sequence: Synthetic oligonucleotide
ugguaccuaucuucuuggc

SEQ ID NO: 901120 - RNA, 19 nt, Artificial Sequence
  Description of Artificial Sequence: Synthetic oligonucleotide
uggacucuacaugguacgc

SEQ ID NO: 901121 - RNA, 19 nt, Artificial Sequence
  Description of Artificial Sequence: Synthetic oligonucleotide
ggaauggccucccagcuga

SEQ ID NO: 901122 - RNA, 19 nt, Artificial Sequence
  Description of Artificial Sequence: Synthetic oligonucleotide
acggucuccucacugcgca

SEQ ID NO: 901123 - RNA, 19 nt, Artificial Sequence
  Description of Artificial Sequence: Synthetic oligonucleotide
cagugagaugcucuucaug

SEQ ID NO: 901124 - RNA, 19 nt, Artificial Sequence
  Description of Artificial Sequence: Synthetic oligonucleotide
guugugagggaccuucuua

SEQ ID NO: 901125 - RNA, 19 nt, Artificial Sequence
  Description of Artificial Sequence: Synthetic oligonucleotide
aagcggacuuugagauucc

SEQ ID NO: 901126 - RNA, 19 nt, Artificial Sequence
  Description of Artificial Sequence: Synthetic oligonucleotide
aguuagaagugagcaguga

SEQ ID NO: 901127 - RNA, 19 nt, Artificial Sequence
  Description of Artificial Sequence: Synthetic oligonucleotide
ccugaauagccauagaugu

SEQ ID NO: 901128 - RNA, 19 nt, Artificial Sequence
  Description of Artificial Sequence: Synthetic oligonucleotide
ugugagggaccuucuuaaa

SEQ ID NO: 901129 - RNA, 19 nt, Artificial Sequence
  Description of Artificial Sequence: Synthetic oligonucleotide
uuucacggaaguugauguu

SEQ ID NO: 901130 - RNA, 19 nt, Artificial Sequence
  Description of Artificial Sequence: Synthetic oligonucleotide
auacaccuuggacucuaca

SEQ ID NO: 901131 - RNA, 19 nt, Artificial Sequence
  Description of Artificial Sequence: Synthetic oligonucleotide
caucgaugcccaugggaug

SEQ ID NO: 901132 - RNA, 19 nt, Artificial Sequence
  Description of Artificial Sequence: Synthetic oligonucleotide
ucuuagucaggggcugccc

SEQ ID NO: 901133 - RNA, 19 nt, Artificial Sequence
  Description of Artificial Sequence: Synthetic oligonucleotide
agcggacuuugagauuccc

SEQ ID NO: 901134 - RNA, 19 nt, Artificial Sequence
  Description of Artificial Sequence: Synthetic oligonucleotide
cccuuuaggccugaaacgg

SEQ ID NO: 901135 - RNA, 19 nt, Artificial Sequence
  Description of Artificial Sequence: Synthetic oligonucleotide
cucgaaauagcggaaacgu

SEQ ID NO: 901136 - RNA, 19 nt, Artificial Sequence
  Description of Artificial Sequence: Synthetic oligonucleotide
guggauguaucugucaucu

SEQ ID NO: 901137 - RNA, 19 nt, Artificial Sequence
  Description of Artificial Sequence: Synthetic oligonucleotide
cacggcaugugacuucuuc

SEQ ID NO: 901138 - RNA, 19 nt, Artificial Sequence
  Description of Artificial Sequence: Synthetic oligonucleotide
caucaaggacauugcgcac

SEQ ID NO: 901139 - RNA, 19 nt, Artificial Sequence
  Description of Artificial Sequence: Synthetic oligonucleotide
caugaucaagauccgccca

SEQ ID NO: 901140 - RNA, 19 nt, Artificial Sequence
  Description of Artificial Sequence: Synthetic oligonucleotide
cagucauucgugggauucg

SEQ ID NO: 901141 - RNA, 19 nt, Artificial Sequence
  Description of Artificial Sequence: Synthetic oligonucleotide
aagauccgcccacggcaug

SEQ ID NO: 901142 - RNA, 19 nt, Artificial Sequence
  Description of Artificial Sequence: Synthetic oligonucleotide
auugcgcacagcguucugu

SEQ ID NO: 901143 - RNA, 19 nt, Artificial Sequence
  Description of Artificial Sequence: Synthetic oligonucleotide
ugucgggugugguaccuau

SEQ ID NO: 901144 - RNA, 19 nt, Artificial Sequence
  Description of Artificial Sequence: Synthetic oligonucleotide
guggcaaaccacgugaugu

SEQ ID NO: 901145 - RNA, 19 nt, Artificial Sequence
  Description of Artificial Sequence: Synthetic oligonucleotide
gggauucgaguacaaggug

SEQ ID NO: 901146 - RNA, 19 nt, Artificial Sequence
  Description of Artificial Sequence: Synthetic oligonucleotide
cuuagucaggggcugccca

SEQ ID NO: 901147 - RNA, 19 nt, Artificial Sequence
  Description of Artificial Sequence: Synthetic oligonucleotide
acaccgucuucaugcacgu

SEQ ID NO: 901148 - RNA, 19 nt, Artificial Sequence
  Description of Artificial Sequence: Synthetic oligonucleotide
aacgagucaauggggccau

SEQ ID NO: 901149 - RNA, 19 nt, Artificial Sequence
  Description of Artificial Sequence: Synthetic oligonucleotide
uaaagcggacuuugagauu

SEQ ID NO: 901150 - RNA, 19 nt, Artificial Sequence
  Description of Artificial Sequence: Synthetic oligonucleotide
cauuguggaauggagcaaa

SEQ ID NO: 901151 - RNA, 19 nt, Artificial Sequence
  Description of Artificial Sequence: Synthetic oligonucleotide
ggacuuugagauuccccug

SEQ ID NO: 901152 - RNA, 19 nt, Artificial Sequence
  Description of Artificial Sequence: Synthetic oligonucleotide
agucauucgugggauucga

SEQ ID NO: 901153 - RNA, 19 nt, Artificial Sequence
  Description of Artificial Sequence: Synthetic oligonucleotide
agauugcggucucggucag

SEQ ID NO: 901154 - RNA, 19 nt, Artificial Sequence
  Description of Artificial Sequence: Synthetic oligonucleotide
gguauagguagcgguuuag

SEQ ID NO: 901155 - RNA, 19 nt, Artificial Sequence
  Description of Artificial Sequence: Synthetic oligonucleotide
acucuacaugguacgccac

SEQ ID NO: 901156 - RNA, 19 nt, Artificial Sequence
  Description of Artificial Sequence: Synthetic oligonucleotide
ccucgaaauagcggaaacg

SEQ ID NO: 901157 - RNA, 19 nt, Artificial Sequence
  Description of Artificial Sequence: Synthetic oligonucleotide
uagcgguuuagcagcucuc

SEQ ID NO: 901158 - RNA, 19 nt, Artificial Sequence
  Description of Artificial Sequence: Synthetic oligonucleotide
gggguagcaugguugucag

SEQ ID NO: 901159 - RNA, 19 nt, Artificial Sequence
  Description of Artificial Sequence: Synthetic oligonucleotide
agguauagguagcgguuua

SEQ ID NO: 901160 - RNA, 19 nt, Artificial Sequence
  Description of Artificial Sequence: Synthetic oligonucleotide
gaccccuccucaguacugc

SEQ ID NO: 901161 - RNA, 19 nt, Artificial Sequence
  Description of Artificial Sequence: Synthetic oligonucleotide
agcgcagcgggaucuuccu

SEQ ID NO: 901162 - RNA, 19 nt, Artificial Sequence
  Description of Artificial Sequence: Synthetic oligonucleotide
ggaauggagcaaacgaguc

SEQ ID NO: 901163 - RNA, 19 nt, Artificial Sequence
  Description of Artificial Sequence: Synthetic oligonucleotide
agcauucggaaggcacggg

SEQ ID NO: 901164 - RNA, 19 nt, Artificial Sequence
  Description of Artificial Sequence: Synthetic oligonucleotide
aacgcagcagugagaugcu

SEQ ID NO: 901165 - RNA, 19 nt, Artificial Sequence
  Description of Artificial Sequence: Synthetic oligonucleotide
gagauuccccuggccaagc

SEQ ID NO: 901166 - RNA, 19 nt, Artificial Sequence
  Description of Artificial Sequence: Synthetic oligonucleotide
auucgaguacaaggugugu

SEQ ID NO: 901167 - RNA, 19 nt, Artificial Sequence
  Description of Artificial Sequence: Synthetic oligonucleotide
aaacucucuuuggcuucug

SEQ ID NO: 901168 - RNA, 19 nt, Artificial Sequence
  Description of Artificial Sequence: Synthetic oligonucleotide
gucuucaugcacgugacau

SEQ ID NO: 901169 - RNA, 19 nt, Artificial Sequence
  Description of Artificial Sequence: Synthetic oligonucleotide
gccugaaacggucuccuca

SEQ ID NO: 901170 - RNA, 19 nt, Artificial Sequence
  Description of Artificial Sequence: Synthetic oligonucleotide
gguggauguaucugucauc

SEQ ID NO: 901171 - RNA, 19 nt, Artificial Sequence
  Description of Artificial Sequence: Synthetic oligonucleotide
acauugcgcacagcguucu

SEQ ID NO: 901172 - RNA, 19 nt, Artificial Sequence
  Description of Artificial Sequence: Synthetic oligonucleotide
acaugguacgccacauagu

SEQ ID NO: 901173 - RNA, 19 nt, Artificial Sequence
  Description of Artificial Sequence: Synthetic oligonucleotide
ggcaucccgggacaccagg

SEQ ID NO: 901174 - RNA, 19 nt, Artificial Sequence
  Description of Artificial Sequence: Synthetic oligonucleotide
cacggaaguugauguugug

SEQ ID NO: 901175 - RNA, 19 nt, Artificial Sequence
  Description of Artificial Sequence: Synthetic oligonucleotide
aggacauugcgcacagcgu

SEQ ID NO: 901176 - RNA, 19 nt, Artificial Sequence
  Description of Artificial Sequence: Synthetic oligonucleotide
ggacucuacaugguacgcc

SEQ ID NO: 901177 - RNA, 19 nt, Artificial Sequence
  Description of Artificial Sequence: Synthetic oligonucleotide
guaacgcagcagugagaug

SEQ ID NO: 901178 - RNA, 19 nt, Artificial Sequence
  Description of Artificial Sequence: Synthetic oligonucleotide
gucauucgugggauucgag

SEQ ID NO: 901179 - RNA, 19 nt, Artificial Sequence
  Description of Artificial Sequence: Synthetic oligonucleotide
cagggaccacuucaaucac

SEQ ID NO: 901180 - RNA, 19 nt, Artificial Sequence
  Description of Artificial Sequence: Synthetic oligonucleotide
cgugaugugcuuguuuucc

SEQ ID NO: 901181 - RNA, 19 nt, Artificial Sequence
  Description of Artificial Sequence: Synthetic oligonucleotide
ccucaccagucauucgugg

SEQ ID NO: 901182 - RNA, 19 nt, Artificial Sequence
  Description of Artificial Sequence: Synthetic oligonucleotide
ccauugcaguggcacagcg

SEQ ID NO: 901183 - RNA, 19 nt, Artificial Sequence
  Description of Artificial Sequence: Synthetic oligonucleotide
agauccgcccacggcaugu

SEQ ID NO: 901184 - RNA, 19 nt, Artificial Sequence
  Description of Artificial Sequence: Synthetic oligonucleotide
acaugcucccauuccucua

SEQ ID NO: 901185 - RNA, 19 nt, Artificial Sequence
  Description of Artificial Sequence: Synthetic oligonucleotide
gguugucagugcauucugc

SEQ ID NO: 901186 - RNA, 19 nt, Artificial Sequence
  Description of Artificial Sequence: Synthetic oligonucleotide
ucgugggauucgaguacaa

SEQ ID NO: 901187 - RNA, 19 nt, Artificial Sequence
  Description of Artificial Sequence: Synthetic oligonucleotide
cacgcuguacaccuccaaa

SEQ ID NO: 901188 - RNA, 19 nt, Artificial Sequence
  Description of Artificial Sequence: Synthetic oligonucleotide
cggcaugugacuucuuccc

SEQ ID NO: 901189 - RNA, 19 nt, Artificial Sequence
  Description of Artificial Sequence: Synthetic oligonucleotide
agcagccgucgguaugucu

SEQ ID NO: 901190 - RNA, 19 nt, Artificial Sequence
  Description of Artificial Sequence: Synthetic oligonucleotide
gaauaaugucggguguggu

SEQ ID NO: 901191 - RNA, 19 nt, Artificial Sequence
  Description of Artificial Sequence: Synthetic oligonucleotide
ugcacgugacaugcuccca

SEQ ID NO: 901192 - RNA, 19 nt, Artificial Sequence
  Description of Artificial Sequence: Synthetic oligonucleotide
gccaucgaugcccauggga

SEQ ID NO: 901193 - RNA, 19 nt, Artificial Sequence
  Description of Artificial Sequence: Synthetic oligonucleotide
cuguaggaugcgccgguca

SEQ ID NO: 901194 - RNA, 19 nt, Artificial Sequence
  Description of Artificial Sequence: Synthetic oligonucleotide
ggauucgaguacaaggugu

SEQ ID NO: 901195 - RNA, 19 nt, Artificial Sequence
  Description of Artificial Sequence: Synthetic oligonucleotide
ggauguagagcuggguguc

SEQ ID NO: 901196 - RNA, 19 nt, Artificial Sequence
  Description of Artificial Sequence: Synthetic oligonucleotide
guacaauggcaggguauca

SEQ ID NO: 901197 - RNA, 19 nt, Artificial Sequence
  Description of Artificial Sequence: Synthetic oligonucleotide
gcgccggucaacaugcagc

SEQ ID NO: 901198 - RNA, 19 nt, Artificial Sequence
  Description of Artificial Sequence: Synthetic oligonucleotide
ggguaucacagaguuagaa

SEQ ID NO: 901199 - RNA, 19 nt, Artificial Sequence
  Description of Artificial Sequence: Synthetic oligonucleotide
ccucauagauaagcaauuc

SEQ ID NO: 901200 - RNA, 19 nt, Artificial Sequence
  Description of Artificial Sequence: Synthetic oligonucleotide
cacccugucuguugaagua

SEQ ID NO: 901201 - RNA, 19 nt, Artificial Sequence
  Description of Artificial Sequence: Synthetic oligonucleotide
cucggcaugggguccucca

SEQ ID NO: 901202 - RNA, 19 nt, Artificial Sequence
  Description of Artificial Sequence: Synthetic oligonucleotide
cagcguucuguaggaugcg

SEQ ID NO: 901203 - RNA, 19 nt, Artificial Sequence
  Description of Artificial Sequence: Synthetic oligonucleotide
cgaguacaagguguguugg

SEQ ID NO: 901204 - RNA, 19 nt, Artificial Sequence
  Description of Artificial Sequence: Synthetic oligonucleotide
gcaauuccugguccacgug

SEQ ID NO: 901205 - RNA, 19 nt, Artificial Sequence
  Description of Artificial Sequence: Synthetic oligonucleotide
cagccgucgguaugucuuc

SEQ ID NO: 901206 - RNA, 19 nt, Artificial Sequence
  Description of Artificial Sequence: Synthetic oligonucleotide
gcuucccagagcaaccaac

SEQ ID NO: 901207 - RNA, 19 nt, Artificial Sequence
  Description of Artificial Sequence: Synthetic oligonucleotide
agcaugguugucagugcau

SEQ ID NO: 901208 - RNA, 19 nt, Artificial Sequence
  Description of Artificial Sequence: Synthetic oligonucleotide
cauuaggaauggccuccca

SEQ ID NO: 901209 - RNA, 19 nt, Artificial Sequence
  Description of Artificial Sequence: Synthetic oligonucleotide
gcguucuguaggaugcgcc

SEQ ID NO: 901210 - RNA, 19 nt, Artificial Sequence
  Description of Artificial Sequence: Synthetic oligonucleotide
gaccuucuuaaagcggacu

SEQ ID NO: 901211 - RNA, 19 nt, Artificial Sequence
  Description of Artificial Sequence: Synthetic oligonucleotide
cauugcgcacagcguucug

SEQ ID NO: 901212 - RNA, 19 nt, Artificial Sequence
  Description of Artificial Sequence: Synthetic oligonucleotide
ggacauugcgcacagcguu

SEQ ID NO: 901213 - RNA, 19 nt, Artificial Sequence
  Description of Artificial Sequence: Synthetic oligonucleotide
ggugggguagcaugguugu

SEQ ID NO: 901214 - RNA, 19 nt, Artificial Sequence
  Description of Artificial Sequence: Synthetic oligonucleotide
gcggacuuugagauucccc

SEQ ID NO: 901215 - RNA, 19 nt, Artificial Sequence
  Description of Artificial Sequence: Synthetic oligonucleotide
gauccgcccacggcaugug

SEQ ID NO: 901216 - RNA, 19 nt, Artificial Sequence
  Description of Artificial Sequence: Synthetic oligonucleotide
auguugugagggaccuucu

SEQ ID NO: 901217 - RNA, 19 nt, Artificial Sequence
  Description of Artificial Sequence: Synthetic oligonucleotide
ccggacuccagaccccucc

SEQ ID NO: 901218 - RNA, 19 nt, Artificial Sequence
  Description of Artificial Sequence: Synthetic oligonucleotide
agcagcgccucggcauggg

SEQ ID NO: 901219 - RNA, 19 nt, Artificial Sequence
  Description of Artificial Sequence: Synthetic oligonucleotide
ucgaugcccaugggaugca

SEQ ID NO: 901220 - RNA, 19 nt, Artificial Sequence
  Description of Artificial Sequence: Synthetic oligonucleotide
gcauuaggaauggccuccc

SEQ ID NO: 901221 - RNA, 19 nt, Artificial Sequence
  Description of Artificial Sequence: Synthetic oligonucleotide
guccucgaaauagcggaaa

SEQ ID NO: 901222 - RNA, 19 nt, Artificial Sequence
  Description of Artificial Sequence: Synthetic oligonucleotide
ccauaagauugcggucucg

SEQ ID NO: 901223 - RNA, 19 nt, Artificial Sequence
  Description of Artificial Sequence: Synthetic oligonucleotide
guacgccacauagugggcu

SEQ ID NO: 901224 - RNA, 19 nt, Artificial Sequence
  Description of Artificial Sequence: Synthetic oligonucleotide
aggaugcgccggucaacau

SEQ ID NO: 901225 - RNA, 19 nt, Artificial Sequence
  Description of Artificial Sequence: Synthetic oligonucleotide
ggaagucugcucggcgcag

SEQ ID NO: 901226 - RNA, 19 nt, Artificial Sequence
  Description of Artificial Sequence: Synthetic oligonucleotide
gguacgccacauagugggc

SEQ ID NO: 901227 - RNA, 19 nt, Artificial Sequence
  Description of Artificial Sequence: Synthetic oligonucleotide
ccaucgaugcccaugggau

SEQ ID NO: 901228 - RNA, 19 nt, Artificial Sequence
  Description of Artificial Sequence: Synthetic oligonucleotide
caaaauggguagagauaau

SEQ ID NO: 901229 - RNA, 19 nt, Artificial Sequence
  Description of Artificial Sequence: Synthetic oligonucleotide
gugacacggucugucucca

SEQ ID NO: 901230 - RNA, 19 nt, Artificial Sequence
  Description of Artificial Sequence: Synthetic oligonucleotide
gcgguuuagcagcucucca

SEQ ID NO: 901231 - RNA, 19 nt, Artificial Sequence
  Description of Artificial Sequence: Synthetic oligonucleotide
ggaccuucuuaaagcggac

SEQ ID NO: 901232 - RNA, 19 nt, Artificial Sequence
  Description of Artificial Sequence: Synthetic oligonucleotide
guucacccugucuguugaa

SEQ ID NO: 901233 - RNA, 19 nt, Artificial Sequence
  Description of Artificial Sequence: Synthetic oligonucleotide
gaauggccucccagcugac

SEQ ID NO: 901234 - RNA, 19 nt, Artificial Sequence
  Description of Artificial Sequence: Synthetic oligonucleotide
cucagcgucuugcucuccu

SEQ ID NO: 901235 - RNA, 19 nt, Artificial Sequence
  Description of Artificial Sequence: Synthetic oligonucleotide
caagauccgcccacggcau

SEQ ID NO: 901236 - RNA, 19 nt, Artificial Sequence
  Description of Artificial Sequence: Synthetic oligonucleotide
acgccacauagugggcugu

SEQ ID NO: 901237 - RNA, 19 nt, Artificial Sequence
  Description of Artificial Sequence: Synthetic oligonucleotide
agccgucgguaugucuucu

SEQ ID NO: 901238 - RNA, 19 nt, Artificial Sequence
  Description of Artificial Sequence: Synthetic oligonucleotide
ccauggugcugagguauag

SEQ ID NO: 901239 - RNA, 19 nt, Artificial Sequence
  Description of Artificial Sequence: Synthetic oligonucleotide
cccugucuguugaaguaca

SEQ ID NO: 901240 - RNA, 19 nt, Artificial Sequence
  Description of Artificial Sequence: Synthetic oligonucleotide
gauugcggucucggucaga

SEQ ID NO: 901241 - RNA, 19 nt, Artificial Sequence
  Description of Artificial Sequence: Synthetic oligonucleotide
gccauugcaguggcacagc

SEQ ID NO: 901242 - RNA, 19 nt, Artificial Sequence
  Description of Artificial Sequence: Synthetic oligonucleotide
acgagucaauggggccauc

SEQ ID NO: 901243 - RNA, 19 nt, Artificial Sequence
  Description of Artificial Sequence: Synthetic oligonucleotide
cagcagcgccucggcaugg

SEQ ID NO: 901244 - RNA, 19 nt, Artificial Sequence
  Description of Artificial Sequence: Synthetic oligonucleotide
auggagcaaacgagucaau

SEQ ID NO: 901245 - RNA, 19 nt, Artificial Sequence
  Description of Artificial Sequence: Synthetic oligonucleotide
agcgcagucacgggcccuu

SEQ ID NO: 901246 - RNA, 19 nt, Artificial Sequence
  Description of Artificial Sequence: Synthetic oligonucleotide
ccagaauaaugucgggugu

SEQ ID NO: 901247 - RNA, 19 nt, Artificial Sequence
  Description of Artificial Sequence: Synthetic oligonucleotide
cgugggauucgaguacaag

SEQ ID NO: 901248 - RNA, 19 nt, Artificial Sequence
  Description of Artificial Sequence: Synthetic oligonucleotide
augcagacgcagagcucca

SEQ ID NO: 901249 - RNA, 19 nt, Artificial Sequence
  Description of Artificial Sequence: Synthetic oligonucleotide
gucgggugugguaccuauc

SEQ ID NO: 901250 - RNA, 19 nt, Artificial Sequence
  Description of Artificial Sequence: Synthetic oligonucleotide
gcagugacacggucugucu

SEQ ID NO: 901251 - RNA, 19 nt, Artificial Sequence
  Description of Artificial Sequence: Synthetic oligonucleotide
gcaaaccacgugaugugcu

SEQ ID NO: 901252 - RNA, 19 nt, Artificial Sequence
  Description of Artificial Sequence: Synthetic oligonucleotide
cugaaacggucuccucacu

SEQ ID NO: 901253 - RNA, 19 nt, Artificial Sequence
  Description of Artificial Sequence: Synthetic oligonucleotide
gccucauagauaagcaauu

SEQ ID NO: 901254 - RNA, 19 nt, Artificial Sequence
  Description of Artificial Sequence: Synthetic oligonucleotide
caccgucuucaugcacgug

SEQ ID NO: 901255 - RNA, 19 nt, Artificial Sequence
  Description of Artificial Sequence: Synthetic oligonucleotide
augucgggugugguaccua

SEQ ID NO: 901256 - RNA, 19 nt, Artificial Sequence
  Description of Artificial Sequence: Synthetic oligonucleotide
cggaaacgugccacacggc

SEQ ID NO: 901257 - RNA, 19 nt, Artificial Sequence
  Description of Artificial Sequence: Synthetic oligonucleotide
gcacgugacaugcucccau

SEQ ID NO: 901258 - RNA, 19 nt, Artificial Sequence
  Description of Artificial Sequence: Synthetic oligonucleotide
cagcgggaucuuccugaca

SEQ ID NO: 901259 - RNA, 19 nt, Artificial Sequence
  Description of Artificial Sequence: Synthetic oligonucleotide
gccgucgguaugucuucuc

SEQ ID NO: 901260 - RNA, 19 nt, Artificial Sequence
  Description of Artificial Sequence: Synthetic oligonucleotide
caccagucauucgugggau

SEQ ID NO: 901261 - RNA, 19 nt, Artificial Sequence
  Description of Artificial Sequence: Synthetic oligonucleotide
ccuuuaggccugaaacggu

SEQ ID NO: 901262 - RNA, 19 nt, Artificial Sequence
  Description of Artificial Sequence: Synthetic oligonucleotide
cacgugacaugcucccauu

SEQ ID NO: 901263 - RNA, 19 nt, Artificial Sequence
  Description of Artificial Sequence: Synthetic oligonucleotide
gcagccgucgguaugucuu

SEQ ID NO: 901264 - RNA, 19 nt, Artificial Sequence
  Description of Artificial Sequence: Synthetic oligonucleotide
cacugcgcuccauggugcu

SEQ ID NO: 901265 - RNA, 19 nt, Artificial Sequence
  Description of Artificial Sequence: Synthetic oligonucleotide
gcgcagcgggaucuuccug

SEQ ID NO: 901266 - RNA, 19 nt, Artificial Sequence
  Description of Artificial Sequence: Synthetic oligonucleotide
ccggucaacaugcagcauu

SEQ ID NO: 901267 - RNA, 19 nt, Artificial Sequence
  Description of Artificial Sequence: Synthetic oligonucleotide
ggccaagcugagagucgug

SEQ ID NO: 901268 - RNA, 19 nt, Artificial Sequence
  Description of Artificial Sequence: Synthetic oligonucleotide
cacugcgcagugacaccgu

SEQ ID NO: 901269 - RNA, 19 nt, Artificial Sequence
  Description of Artificial Sequence: Synthetic oligonucleotide
ccaugaaauccacgcugua

SEQ ID NO: 901270 - RNA, 19 nt, Artificial Sequence
  Description of Artificial Sequence: Synthetic oligonucleotide
ccgucgguaugucuucucu

SEQ ID NO: 901271 - RNA, 19 nt, Artificial Sequence
  Description of Artificial Sequence: Synthetic oligonucleotide
cccaugggaugcagacgca

SEQ ID NO: 901272 - RNA, 19 nt, Artificial Sequence
  Description of Artificial Sequence: Synthetic oligonucleotide
gguaugcaggcaggacacu

SEQ ID NO: 901273 - RNA, 19 nt, Artificial Sequence
  Description of Artificial Sequence: Synthetic oligonucleotide
ccacgcuguacaccuccaa

SEQ ID NO: 901274 - RNA, 19 nt, Artificial Sequence
  Description of Artificial Sequence: Synthetic oligonucleotide
ccucggcaugggguccucc

SEQ ID NO: 901275 - RNA, 19 nt, Artificial Sequence
  Description of Artificial Sequence: Synthetic oligonucleotide
ggucucggucagacacuaa

SEQ ID NO: 901276 - RNA, 19 nt, Artificial Sequence
  Description of Artificial Sequence: Synthetic oligonucleotide
ccgcccacggcaugugacu

SEQ ID NO: 901277 - RNA, 19 nt, Artificial Sequence
  Description of Artificial Sequence: Synthetic oligonucleotide
cgucgguaugucuucucuu

SEQ ID NO: 901278 - RNA, 19 nt, Artificial Sequence
  Description of Artificial Sequence: Synthetic oligonucleotide
cagcgcagucacgggcccu

SEQ ID NO: 901279 - RNA, 19 nt, Artificial Sequence
  Description of Artificial Sequence: Synthetic oligonucleotide
cggucucggucagacacua

SEQ ID NO: 901280 - RNA, 19 nt, Artificial Sequence
  Description of Artificial Sequence: Synthetic oligonucleotide
gccucggcaugggguccuc

SEQ ID NO: 901281 - RNA, 19 nt, Artificial Sequence
  Description of Artificial Sequence: Synthetic oligonucleotide
gccggucaacaugcagcau

SEQ ID NO: 901282 - RNA, 19 nt, Artificial Sequence
  Description of Artificial Sequence: Synthetic oligonucleotide
ccacggcaugugacuucuu

SEQ ID NO: 901283 - RNA, 19 nt, Artificial Sequence
  Description of Artificial Sequence: Synthetic oligonucleotide
aaaaugaucagcaagucgc

SEQ ID NO: 901284 - RNA, 19 nt, Artificial Sequence
  Description of Artificial Sequence: Synthetic oligonucleotide
agaaauacaaacaagagac

SEQ ID NO: 901285 - RNA, 19 nt, Artificial Sequence
  Description of Artificial Sequence: Synthetic oligonucleotide
aagaacuauaaacaauagc

SEQ ID NO: 901286 - RNA, 19 nt, Artificial Sequence
  Description of Artificial Sequence: Synthetic oligonucleotide
aauaguggaguauagucag

SEQ ID NO: 901287 - RNA, 19 nt, Artificial Sequence
  Description of Artificial Sequence: Synthetic oligonucleotide
aaauacaaacaagagacuc

SEQ ID NO: 901288 - RNA, 19 nt, Artificial Sequence
  Description of Artificial Sequence: Synthetic oligonucleotide
uauauaaugcaacagcugu

SEQ ID NO: 901289 - RNA, 19 nt, Artificial Sequence
  Description of Artificial Sequence: Synthetic oligonucleotide
ucuaguuccagaaaggaca

SEQ ID NO: 901290 - RNA, 19 nt, Artificial Sequence
  Description of Artificial Sequence: Synthetic oligonucleotide
aguuauauugcuucccugc

SEQ ID NO: 901291 - RNA, 19 nt, Artificial Sequence
  Description of Artificial Sequence: Synthetic oligonucleotide
agaacuauaaacaauagca

SEQ ID NO: 901292 - RNA, 19 nt, Artificial Sequence
  Description of Artificial Sequence: Synthetic oligonucleotide
aauaguucuaguaacaacu

SEQ ID NO: 901293 - RNA, 19 nt, Artificial Sequence
  Description of Artificial Sequence: Synthetic oligonucleotide
uauuaggagauacaaaaga

SEQ ID NO: 901294 - RNA, 19 nt, Artificial Sequence
  Description of Artificial Sequence: Synthetic oligonucleotide
auuuccaacucuaauaggc

SEQ ID NO: 901295 - RNA, 19 nt, Artificial Sequence
  Description of Artificial Sequence: Synthetic oligonucleotide
aauuucgauaaacuuccuc

SEQ ID NO: 901296 - RNA, 19 nt, Artificial Sequence
  Description of Artificial Sequence: Synthetic oligonucleotide
auuuaacucaugaacacgc

SEQ ID NO: 901297 - RNA, 19 nt, Artificial Sequence
  Description of Artificial Sequence: Synthetic oligonucleotide
uuaaggauguuacagaaua

SEQ ID NO: 901298 - RNA, 19 nt, Artificial Sequence
  Description of Artificial Sequence: Synthetic oligonucleotide
aaaacagcccuguauaagu

SEQ ID NO: 901299 - RNA, 19 nt, Artificial Sequence
  Description of Artificial Sequence: Synthetic oligonucleotide
ucuucgaucacaaucugca

SEQ ID NO: 901300 - RNA, 19 nt, Artificial Sequence
  Description of Artificial Sequence: Synthetic oligonucleotide
gauucuugcuaugugaacg

SEQ ID NO: 901301 - RNA, 19 nt, Artificial Sequence
  Description of Artificial Sequence: Synthetic oligonucleotide
acagaauagaggaaaauac

SEQ ID NO: 901302 - RNA, 19 nt, Artificial Sequence
  Description of Artificial Sequence: Synthetic oligonucleotide
aaacaagagacucuuaguu

SEQ ID NO: 901303 - RNA, 19 nt, Artificial Sequence
  Description of Artificial Sequence: Synthetic oligonucleotide
ucuuaguugcuucuacagg

SEQ ID NO: 901304 - RNA, 19 nt, Artificial Sequence
  Description of Artificial Sequence: Synthetic oligonucleotide
uauauugcuucccugcccc

SEQ ID NO: 901305 - RNA, 19 nt, Artificial Sequence
  Description of Artificial Sequence: Synthetic oligonucleotide
auaguuagaucuccccugc

SEQ ID NO: 901306 - RNA, 19 nt, Artificial Sequence
  Description of Artificial Sequence: Synthetic oligonucleotide
augaaauagucccugcccg

SEQ ID NO: 901307 - RNA, 19 nt, Artificial Sequence
  Description of Artificial Sequence: Synthetic oligonucleotide
acucuaauaggccccaaac

SEQ ID NO: 901308 - RNA, 19 nt, Artificial Sequence
  Description of Artificial Sequence: Synthetic oligonucleotide
uauaguuagaucuccccug

SEQ ID NO: 901309 - RNA, 19 nt, Artificial Sequence
  Description of Artificial Sequence: Synthetic oligonucleotide
uauuuacuuccuuuggugc

SEQ ID NO: 901310 - RNA, 19 nt, Artificial Sequence
  Description of Artificial Sequence: Synthetic oligonucleotide
uuagcacucucauaggacc

SEQ ID NO: 901311 - RNA, 19 nt, Artificial Sequence
  Description of Artificial Sequence: Synthetic oligonucleotide
uuucaauaaaucccaggug

SEQ ID NO: 901312 - RNA, 19 nt, Artificial Sequence
  Description of Artificial Sequence: Synthetic oligonucleotide
agcauguuaacuccagagg

SEQ ID NO: 901313 - RNA, 19 nt, Artificial Sequence
  Description of Artificial Sequence: Synthetic oligonucleotide
agcuguuaaacacagcucu

SEQ ID NO: 901314 - RNA, 19 nt, Artificial Sequence
  Description of Artificial Sequence: Synthetic oligonucleotide
uuuggguagagcaacaauu

SEQ ID NO: 901315 - RNA, 19 nt, Artificial Sequence
  Description of Artificial Sequence: Synthetic oligonucleotide
uguauaaguuucuccagca

SEQ ID NO: 901316 - RNA, 19 nt, Artificial Sequence
  Description of Artificial Sequence: Synthetic oligonucleotide
ucuaucucuagaacugugc

SEQ ID NO: 901317 - RNA, 19 nt, Artificial Sequence
  Description of Artificial Sequence: Synthetic oligonucleotide
acuauaaacaauagcaugu

SEQ ID NO: 901318 - RNA, 19 nt, Artificial Sequence
  Description of Artificial Sequence: Synthetic oligonucleotide
uauauugguuacauauuga

SEQ ID NO: 901319 - RNA, 19 nt, Artificial Sequence
  Description of Artificial Sequence: Synthetic oligonucleotide
guucucgagacauggagcg

SEQ ID NO: 901320 - RNA, 19 nt, Artificial Sequence
  Description of Artificial Sequence: Synthetic oligonucleotide
aguuacagugugaugaugg

SEQ ID NO: 901321 - RNA, 19 nt, Artificial Sequence
  Description of Artificial Sequence: Synthetic oligonucleotide
aaauaguggaguauaguca

SEQ ID NO: 901322 - RNA, 19 nt, Artificial Sequence
  Description of Artificial Sequence: Synthetic oligonucleotide
uaucucuagaacugugccg

SEQ ID NO: 901323 - RNA, 19 nt, Artificial Sequence
  Description of Artificial Sequence: Synthetic oligonucleotide
uguuaaggauguuacagaa

SEQ ID NO: 901324 - RNA, 19 nt, Artificial Sequence
  Description of Artificial Sequence: Synthetic oligonucleotide
ugcgaugcucucuagaucu

SEQ ID NO: 901325 - RNA, 19 nt, Artificial Sequence
  Description of Artificial Sequence: Synthetic oligonucleotide
uuuccaacucuaauaggcc

SEQ ID NO: 901326 - RNA, 19 nt, Artificial Sequence
  Description of Artificial Sequence: Synthetic oligonucleotide
aagcuuaaggauggaagac

SEQ ID NO: 901327 - RNA, 19 nt, Artificial Sequence
  Description of Artificial Sequence: Synthetic oligonucleotide
ucuagaucuagaucuuuug

SEQ ID NO: 901328 - RNA, 19 nt, Artificial Sequence
  Description of Artificial Sequence: Synthetic oligonucleotide
auucuugcuaugugaacgg

SEQ ID NO: 901329 - RNA, 19 nt, Artificial Sequence
  Description of Artificial Sequence: Synthetic oligonucleotide
ucuuggaucgcucucugcu

SEQ ID NO: 901330 - RNA, 19 nt, Artificial Sequence
  Description of Artificial Sequence: Synthetic oligonucleotide
agaucuagaucuuuuggga

SEQ ID NO: 901331 - RNA, 19 nt, Artificial Sequence
  Description of Artificial Sequence: Synthetic oligonucleotide
aauccaguagaaaugcuca

SEQ ID NO: 901332 - RNA, 19 nt, Artificial Sequence
  Description of Artificial Sequence: Synthetic oligonucleotide
uuucgauaaacuuccucug

SEQ ID NO: 901333 - RNA, 19 nt, Artificial Sequence
  Description of Artificial Sequence: Synthetic oligonucleotide
ugcuaaucuuuucuuagac

SEQ ID NO: 901334 - RNA, 19 nt, Artificial Sequence
  Description of Artificial Sequence: Synthetic oligonucleotide
ugcuucuaucucuagaacu

SEQ ID NO: 901335 - RNA, 19 nt, Artificial Sequence
  Description of Artificial Sequence: Synthetic oligonucleotide
aaggauguuacagaauaga

SEQ ID NO: 901336 - RNA, 19 nt, Artificial Sequence
  Description of Artificial Sequence: Synthetic oligonucleotide
ugaucugccauuagcacuc

SEQ ID NO: 901337 - RNA, 19 nt, Artificial Sequence
  Description of Artificial Sequence: Synthetic oligonucleotide
cuugcuaugugaacgggac

SEQ ID NO: 901338 - RNA, 19 nt, Artificial Sequence
  Description of Artificial Sequence: Synthetic oligonucleotide
uggacuuucaggcauucuc

SEQ ID NO: 901339 - RNA, 19 nt, Artificial Sequence
  Description of Artificial Sequence: Synthetic oligonucleotide
aaguuauauugcuucccug

SEQ ID NO: 901340 - RNA, 19 nt, Artificial Sequence
  Description of Artificial Sequence: Synthetic oligonucleotide
auuaucuuuacaguaagua

SEQ ID NO: 901341 - RNA, 19 nt, Artificial Sequence
  Description of Artificial Sequence: Synthetic oligonucleotide
uccaacucuaauaggcccc

SEQ ID NO: 901342 - RNA, 19 nt, Artificial Sequence
  Description of Artificial Sequence: Synthetic oligonucleotide
uacaacucucuuuaauucu

SEQ ID NO: 901343 - RNA, 19 nt, Artificial Sequence
  Description of Artificial Sequence: Synthetic oligonucleotide
guggaguauagucagcaag

SEQ ID NO: 901344 - RNA, 19 nt, Artificial Sequence
  Description of Artificial Sequence: Synthetic oligonucleotide
gaguuguuccacuuuggcc

SEQ ID NO: 901345 - RNA, 19 nt, Artificial Sequence
  Description of Artificial Sequence: Synthetic oligonucleotide
ugaacauagcaguuuaaua

SEQ ID NO: 901346 - RNA, 19 nt, Artificial Sequence
  Description of Artificial Sequence: Synthetic oligonucleotide
ugcucaacugugaucaacu

SEQ ID NO: 901347 - RNA, 19 nt, Artificial Sequence
  Description of Artificial Sequence: Synthetic oligonucleotide
uauaaugcaacagcuguuc

SEQ ID NO: 901348 - RNA, 19 nt, Artificial Sequence
  Description of Artificial Sequence: Synthetic oligonucleotide
cucuuaguugcuucuacag

SEQ ID NO: 901349 - RNA, 19 nt, Artificial Sequence
  Description of Artificial Sequence: Synthetic oligonucleotide
auagaggaaaauaccacag

SEQ ID NO: 901350 - RNA, 19 nt, Artificial Sequence
  Description of Artificial Sequence: Synthetic oligonucleotide
ucguuucagacguuccugg

SEQ ID NO: 901351 - RNA, 19 nt, Artificial Sequence
  Description of Artificial Sequence: Synthetic oligonucleotide
aaugcaacagcuguucaau

SEQ ID NO: 901352 - RNA, 19 nt, Artificial Sequence
  Description of Artificial Sequence: Synthetic oligonucleotide
auaggccccaaacaaaaca

SEQ ID NO: 901353 - RNA, 19 nt, Artificial Sequence
  Description of Artificial Sequence: Synthetic oligonucleotide
uuggguagagcaacaauuc

SEQ ID NO: 901354 - RNA, 19 nt, Artificial Sequence
  Description of Artificial Sequence: Synthetic oligonucleotide
uccgaguuguuccacuuug

SEQ ID NO: 901355 - RNA, 19 nt, Artificial Sequence
  Description of Artificial Sequence: Synthetic oligonucleotide
gaugcuaagucuuggucuc

SEQ ID NO: 901356 - RNA, 19 nt, Artificial Sequence
  Description of Artificial Sequence: Synthetic oligonucleotide
acucucauaggaccgcuuc

SEQ ID NO: 901357 - RNA, 19 nt, Artificial Sequence
  Description of Artificial Sequence: Synthetic oligonucleotide
uggugauuguuucuuuuca

SEQ ID NO: 901358 - RNA, 19 nt, Artificial Sequence
  Description of Artificial Sequence: Synthetic oligonucleotide
aucuuuucggucucgguca

SEQ ID NO: 901359 - RNA, 19 nt, Artificial Sequence
  Description of Artificial Sequence: Synthetic oligonucleotide
ugaacaaguuacaguguga

SEQ ID NO: 901360 - RNA, 19 nt, Artificial Sequence
  Description of Artificial Sequence: Synthetic oligonucleotide
gugaacagaagcuuacaac

SEQ ID NO: 901361 - RNA, 19 nt, Artificial Sequence
  Description of Artificial Sequence: Synthetic oligonucleotide
caauccaguagaaaugcuc

SEQ ID NO: 901362 - RNA, 19 nt, Artificial Sequence
  Description of Artificial Sequence: Synthetic oligonucleotide
ugucauuaucaugaagacc

SEQ ID NO: 901363 - RNA, 19 nt, Artificial Sequence
  Description of Artificial Sequence: Synthetic oligonucleotide
uuuaacucaugaacacgcu

SEQ ID NO: 901364 - RNA, 19 nt, Artificial Sequence
  Description of Artificial Sequence: Synthetic oligonucleotide
uuucagacguuccugguuu

SEQ ID NO: 901365 - RNA, 19 nt, Artificial Sequence
  Description of Artificial Sequence: Synthetic oligonucleotide
uuacaguaaguauagccuu

SEQ ID NO: 901366 - RNA, 19 nt, Artificial Sequence
  Description of Artificial Sequence: Synthetic oligonucleotide
uucuucgaucacaaucugc

SEQ ID NO: 901367 - RNA, 19 nt, Artificial Sequence
  Description of Artificial Sequence: Synthetic oligonucleotide
ugcuaugugaacgggaccu

SEQ ID NO: 901368 - RNA, 19 nt, Artificial Sequence
  Description of Artificial Sequence: Synthetic oligonucleotide
ucuagaacugugccgacuu

SEQ ID NO: 901369 - RNA, 19 nt, Artificial Sequence
  Description of Artificial Sequence: Synthetic oligonucleotide
cugaaauaguggaguauag

SEQ ID NO: 901370 - RNA, 19 nt, Artificial Sequence
  Description of Artificial Sequence: Synthetic oligonucleotide
aauaggccccaaacaaaac

SEQ ID NO: 901371 - RNA, 19 nt, Artificial Sequence
  Description of Artificial Sequence: Synthetic oligonucleotide
ugaaauaguggaguauagu

SEQ ID NO: 901372 - RNA, 19 nt, Artificial Sequence
  Description of Artificial Sequence: Synthetic oligonucleotide
ucuucguuucagacguucc

SEQ ID NO: 901373 - RNA, 19 nt, Artificial Sequence
  Description of Artificial Sequence: Synthetic oligonucleotide
cauucuccaagauccauuc

SEQ ID NO: 901374 - RNA, 19 nt, Artificial Sequence
  Description of Artificial Sequence: Synthetic oligonucleotide
uccucuugcguucucgaga

SEQ ID NO: 901375 - RNA, 19 nt, Artificial Sequence
  Description of Artificial Sequence: Synthetic oligonucleotide
gaucgaguccuccucuugc

SEQ ID NO: 901376 - RNA, 19 nt, Artificial Sequence
  Description of Artificial Sequence: Synthetic oligonucleotide
aucucuagaacugugccga

SEQ ID NO: 901377 - RNA, 19 nt, Artificial Sequence
  Description of Artificial Sequence: Synthetic oligonucleotide
ucgagcuuuucucuuauuu

SEQ ID NO: 901378 - RNA, 19 nt, Artificial Sequence
  Description of Artificial Sequence: Synthetic oligonucleotide
uuucucgacuucauccaug

SEQ ID NO: 901379 - RNA, 19 nt, Artificial Sequence
  Description of Artificial Sequence: Synthetic oligonucleotide
uauagucagcaagagauuu

SEQ ID NO: 901380 - RNA, 19 nt, Artificial Sequence
  Description of Artificial Sequence: Synthetic oligonucleotide
gaaaugcucaacugugauc

SEQ ID NO: 901381 - RNA, 19 nt, Artificial Sequence
  Description of Artificial Sequence: Synthetic oligonucleotide
uggguagagcaacaauuca

SEQ ID NO: 901382 - RNA, 19 nt, Artificial Sequence
  Description of Artificial Sequence: Synthetic oligonucleotide
gaugugaacagaagcuuac

SEQ ID NO: 901383 - RNA, 19 nt, Artificial Sequence
  Description of Artificial Sequence: Synthetic oligonucleotide
auaggaccgcuucuuaucu

SEQ ID NO: 901384 - RNA, 19 nt, Artificial Sequence
  Description of Artificial Sequence: Synthetic oligonucleotide
agcgagaucggugucugcg

SEQ ID NO: 901385 - RNA, 19 nt, Artificial Sequence
  Description of Artificial Sequence: Synthetic oligonucleotide
aacucuaauaggccccaaa

SEQ ID NO: 901386 - RNA, 19 nt, Artificial Sequence
  Description of Artificial Sequence: Synthetic oligonucleotide
cauaggaccgcuucuuauc

SEQ ID NO: 901387 - RNA, 19 nt, Artificial Sequence
  Description of Artificial Sequence: Synthetic oligonucleotide
aucgaguccuccucuugcg

SEQ ID NO: 901388 - RNA, 19 nt, Artificial Sequence
  Description of Artificial Sequence: Synthetic oligonucleotide
ugaaauagucccugcccgu

SEQ ID NO: 901389 - RNA, 19 nt, Artificial Sequence
  Description of Artificial Sequence: Synthetic oligonucleotide
ucuagaucuuuugggauuc

SEQ ID NO: 901390 - RNA, 19 nt, Artificial Sequence
  Description of Artificial Sequence: Synthetic oligonucleotide
ucacgugaugcuaagucuu

SEQ ID NO: 901391 - RNA, 19 nt, Artificial Sequence
  Description of Artificial Sequence: Synthetic oligonucleotide
agcuauaguuagaucuccc

SEQ ID NO: 901392 - RNA, 19 nt, Artificial Sequence
  Description of Artificial Sequence: Synthetic oligonucleotide
uuuucccgagacuuggauc

SEQ ID NO: 901393 - RNA, 19 nt, Artificial Sequence
  Description of Artificial Sequence: Synthetic oligonucleotide
gcuuauuaugaaauagucc

SEQ ID NO: 901394 - RNA, 19 nt, Artificial Sequence
  Description of Artificial Sequence: Synthetic oligonucleotide
uucguuucagacguuccug

SEQ ID NO: 901395 - RNA, 19 nt, Artificial Sequence
  Description of Artificial Sequence: Synthetic oligonucleotide
ggcugcggcuacuagaacg

SEQ ID NO: 901396 - RNA, 19 nt, Artificial Sequence
  Description of Artificial Sequence: Synthetic oligonucleotide
agcucugaaauaguggagu

SEQ ID NO: 901397 - RNA, 19 nt, Artificial Sequence
  Description of Artificial Sequence: Synthetic oligonucleotide
ccauucuaguuccagaaag

SEQ ID NO: 901398 - RNA, 19 nt, Artificial Sequence
  Description of Artificial Sequence: Synthetic oligonucleotide
gacucuuaguugcuucuac

SEQ ID NO: 901399 - RNA, 19 nt, Artificial Sequence
  Description of Artificial Sequence: Synthetic oligonucleotide
aaugaucagcaagucgccu

SEQ ID NO: 901400 - RNA, 19 nt, Artificial Sequence
  Description of Artificial Sequence: Synthetic oligonucleotide
aacacgcucugccuuugcu

SEQ ID NO: 901401 - RNA, 19 nt, Artificial Sequence
  Description of Artificial Sequence: Synthetic oligonucleotide
gacaagucugauuucaaau

SEQ ID NO: 901402 - RNA, 19 nt, Artificial Sequence
  Description of Artificial Sequence: Synthetic oligonucleotide
uaguucuaguaacaacuua

SEQ ID NO: 901403 - RNA, 19 nt, Artificial Sequence
  Description of Artificial Sequence: Synthetic oligonucleotide
gcuauaguuagaucucccc

SEQ ID NO: 901404 - RNA, 19 nt, Artificial Sequence
  Description of Artificial Sequence: Synthetic oligonucleotide
guauaaguuucuccagcac

SEQ ID NO: 901405 - RNA, 19 nt, Artificial Sequence
  Description of Artificial Sequence: Synthetic oligonucleotide
guagguggcucuugcauac

SEQ ID NO: 901406 - RNA, 19 nt, Artificial Sequence
  Description of Artificial Sequence: Synthetic oligonucleotide
uacuagaacgggaccugug

SEQ ID NO: 901407 - RNA, 19 nt, Artificial Sequence
  Description of Artificial Sequence: Synthetic oligonucleotide
auuuggguagagcaacaau

SEQ ID NO: 901408 - RNA, 19 nt, Artificial Sequence
  Description of Artificial Sequence: Synthetic oligonucleotide
uuaucuuuucggucucggu

SEQ ID NO: 901409 - RNA, 19 nt, Artificial Sequence
  Description of Artificial Sequence: Synthetic oligonucleotide
aacagcccuguauaaguuu

SEQ ID NO: 901410 - RNA, 19 nt, Artificial Sequence
  Description of Artificial Sequence: Synthetic oligonucleotide
aucuagaucuuuugggauu

SEQ ID NO: 901411 - RNA, 19 nt, Artificial Sequence
  Description of Artificial Sequence: Synthetic oligonucleotide
gaguauagucagcaagaga

SEQ ID NO: 901412 - RNA, 19 nt, Artificial Sequence
  Description of Artificial Sequence: Synthetic oligonucleotide
aaucccaggugcaguuuac

SEQ ID NO: 901413 - RNA, 19 nt, Artificial Sequence
  Description of Artificial Sequence: Synthetic oligonucleotide
uacaguaaguauagccuuu

SEQ ID NO: 901414 - RNA, 19 nt, Artificial Sequence
  Description of Artificial Sequence: Synthetic oligonucleotide
ucuugcguucucgagacau

SEQ ID NO: 901415 - RNA, 19 nt, Artificial Sequence
  Description of Artificial Sequence: Synthetic oligonucleotide
gcucucuagaucuagaucu

SEQ ID NO: 901416 - RNA, 19 nt, Artificial Sequence
  Description of Artificial Sequence: Synthetic oligonucleotide
uucccugccccuuuucucu

SEQ ID NO: 901417 - RNA, 19 nt, Artificial Sequence
  Description of Artificial Sequence: Synthetic oligonucleotide
uugcuaugugaacgggacc

SEQ ID NO: 901418 - RNA, 19 nt, Artificial Sequence
  Description of Artificial Sequence: Synthetic oligonucleotide
ucauaggaccgcuucuuau

SEQ ID NO: 901419 - RNA, 19 nt, Artificial Sequence
  Description of Artificial Sequence: Synthetic oligonucleotide
gagaugauccauggcauca

SEQ ID NO: 901420 - RNA, 19 nt, Artificial Sequence
  Description of Artificial Sequence: Synthetic oligonucleotide
ggggacaacaguugaguag

SEQ ID NO: 901421 - RNA, 19 nt, Artificial Sequence
  Description of Artificial Sequence: Synthetic oligonucleotide
uaacuccagaggaagcuua

SEQ ID NO: 901422 - RNA, 19 nt, Artificial Sequence
  Description of Artificial Sequence: Synthetic oligonucleotide
cuguuaaggauguuacaga

SEQ ID NO: 901423 - RNA, 19 nt, Artificial Sequence
  Description of Artificial Sequence: Synthetic oligonucleotide
agacaagucugauuucaaa

SEQ ID NO: 901424 - RNA, 19 nt, Artificial Sequence
  Description of Artificial Sequence: Synthetic oligonucleotide
aaguuacagugugaugaug

SEQ ID NO: 901425 - RNA, 19 nt, Artificial Sequence
  Description of Artificial Sequence: Synthetic oligonucleotide
ugugccgacuucucuggug

SEQ ID NO: 901426 - RNA, 19 nt, Artificial Sequence
  Description of Artificial Sequence: Synthetic oligonucleotide
uggccaacaauuucccuau

SEQ ID NO: 901427 - RNA, 19 nt, Artificial Sequence
  Description of Artificial Sequence: Synthetic oligonucleotide
gaggcacggguauuaggag

SEQ ID NO: 901428 - RNA, 19 nt, Artificial Sequence
  Description of Artificial Sequence: Synthetic oligonucleotide
agauccauucuaguuccag

SEQ ID NO: 901429 - RNA, 19 nt, Artificial Sequence
  Description of Artificial Sequence: Synthetic oligonucleotide
augcucaacugugaucaac

SEQ ID NO: 901430 - RNA, 19 nt, Artificial Sequence
  Description of Artificial Sequence: Synthetic oligonucleotide
auaguggaguauagucagc

SEQ ID NO: 901431 - RNA, 19 nt, Artificial Sequence
  Description of Artificial Sequence: Synthetic oligonucleotide
gugccuuguacaguaaggc

SEQ ID NO: 901432 - RNA, 19 nt, Artificial Sequence
  Description of Artificial Sequence: Synthetic oligonucleotide
ucagcuccgaguuguucca

SEQ ID NO: 901433 - RNA, 19 nt, Artificial Sequence
  Description of Artificial Sequence: Synthetic oligonucleotide
ugcggcuacuagaacggga

SEQ ID NO: 901434 - RNA, 19 nt, Artificial Sequence
  Description of Artificial Sequence: Synthetic oligonucleotide
gaacuccugucucugucac

SEQ ID NO: 901435 - RNA, 19 nt, Artificial Sequence
  Description of Artificial Sequence: Synthetic oligonucleotide
aacgggaccuccucaguuu

SEQ ID NO: 901436 - RNA, 19 nt, Artificial Sequence
  Description of Artificial Sequence: Synthetic oligonucleotide
aagucgccugucauuauca

SEQ ID NO: 901437 - RNA, 19 nt, Artificial Sequence
  Description of Artificial Sequence: Synthetic oligonucleotide
ugcucgugcuuucucgacu

SEQ ID NO: 901438 - RNA, 19 nt, Artificial Sequence
  Description of Artificial Sequence: Synthetic oligonucleotide
cuuggaucgaguccuccuc

SEQ ID NO: 901439 - RNA, 19 nt, Artificial Sequence
  Description of Artificial Sequence: Synthetic oligonucleotide
ucaagacaagucugauuuc

SEQ ID NO: 901440 - RNA, 19 nt, Artificial Sequence
  Description of Artificial Sequence: Synthetic oligonucleotide
cagcacuuaucucuucuug

SEQ ID NO: 901441 - RNA, 19 nt, Artificial Sequence
  Description of Artificial Sequence: Synthetic oligonucleotide
ucuucgagcuuuucucuua

SEQ ID NO: 901442 - RNA, 19 nt, Artificial Sequence
  Description of Artificial Sequence: Synthetic oligonucleotide
acguuccugguuucuuuuc

SEQ ID NO: 901443 - RNA, 19 nt, Artificial Sequence
  Description of Artificial Sequence: Synthetic oligonucleotide
acgggaccuccucaguuuc

SEQ ID NO: 901444 - RNA, 19 nt, Artificial Sequence
  Description of Artificial Sequence: Synthetic oligonucleotide
auucaggcuugucaauuaa

SEQ ID NO: 901445 - RNA, 19 nt, Artificial Sequence
  Description of Artificial Sequence: Synthetic oligonucleotide
aggcacggguauuaggaga

SEQ ID NO: 901446 - RNA, 19 nt, Artificial Sequence
  Description of Artificial Sequence: Synthetic oligonucleotide
ucuuuucggucucggucac

SEQ ID NO: 901447 - RNA, 19 nt, Artificial Sequence
  Description of Artificial Sequence: Synthetic oligonucleotide
gaaauagucccugcccguc

SEQ ID NO: 901448 - RNA, 19 nt, Artificial Sequence
  Description of Artificial Sequence: Synthetic oligonucleotide
gaucuagaucuuuugggau

SEQ ID NO: 901449 - RNA, 19 nt, Artificial Sequence
  Description of Artificial Sequence: Synthetic oligonucleotide
caagucgccugucauuauc

SEQ ID NO: 901450 - RNA, 19 nt, Artificial Sequence
  Description of Artificial Sequence: Synthetic oligonucleotide
ucggucacgaggugaucug

SEQ ID NO: 901451 - RNA, 19 nt, Artificial Sequence
  Description of Artificial Sequence: Synthetic oligonucleotide
gcguucucgagacauggag

SEQ ID NO: 901452 - RNA, 19 nt, Artificial Sequence
  Description of Artificial Sequence: Synthetic oligonucleotide
cuauaguuagaucuccccu

SEQ ID NO: 901453 - RNA, 19 nt, Artificial Sequence
  Description of Artificial Sequence: Synthetic oligonucleotide
gucgccugucauuaucaug

SEQ ID NO: 901454 - RNA, 19 nt, Artificial Sequence
  Description of Artificial Sequence: Synthetic oligonucleotide
ugaacgggaccuccucagu

SEQ ID NO: 901455 - RNA, 19 nt, Artificial Sequence
  Description of Artificial Sequence: Synthetic oligonucleotide
gcuaaucuuuucuuagaca

SEQ ID NO: 901456 - RNA, 19 nt, Artificial Sequence
  Description of Artificial Sequence: Synthetic oligonucleotide
cacggguauuaggagauac

SEQ ID NO: 901457 - RNA, 19 nt, Artificial Sequence
  Description of Artificial Sequence: Synthetic oligonucleotide
aaugcucaacugugaucaa

SEQ ID NO: 901458 - RNA, 19 nt, Artificial Sequence
  Description of Artificial Sequence: Synthetic oligonucleotide
gaacaaguuacagugugau

SEQ ID NO: 901459 - RNA, 19 nt, Artificial Sequence
  Description of Artificial Sequence: Synthetic oligonucleotide
cuugcguucucgagacaug

SEQ ID NO: 901460 - RNA, 19 nt, Artificial Sequence
  Description of Artificial Sequence: Synthetic oligonucleotide
acauagcaguuuaauagaa

SEQ ID NO: 901461 - RNA, 19 nt, Artificial Sequence
  Description of Artificial Sequence: Synthetic oligonucleotide
cugcuucuaucucuagaac

SEQ ID NO: 901462 - RNA, 19 nt, Artificial Sequence
  Description of Artificial Sequence: Synthetic oligonucleotide
aacugguaauugaugugaa

SEQ ID NO: 901463 - RNA, 19 nt, Artificial Sequence
  Description of Artificial Sequence: Synthetic oligonucleotide
aguggaguauagucagcaa

SEQ ID NO: 901464 - RNA, 19 nt, Artificial Sequence
  Description of Artificial Sequence: Synthetic oligonucleotide
uaguuagaucuccccugcu

SEQ ID NO: 901465 - RNA, 19 nt, Artificial Sequence
  Description of Artificial Sequence: Synthetic oligonucleotide
ucgaguccuccucuugcgu

SEQ ID NO: 901466 - RNA, 19 nt, Artificial Sequence
  Description of Artificial Sequence: Synthetic oligonucleotide
ucgugcuuucucgacuuca

SEQ ID NO: 901467 - RNA, 19 nt, Artificial Sequence
  Description of Artificial Sequence: Synthetic oligonucleotide
ugcguucucgagacaugga

SEQ ID NO: 901468 - RNA, 19 nt, Artificial Sequence
  Description of Artificial Sequence: Synthetic oligonucleotide
agcaagucgccugucauua

SEQ ID NO: 901469 - RNA, 19 nt, Artificial Sequence
  Description of Artificial Sequence: Synthetic oligonucleotide
cuguuaaacacagcucuga

SEQ ID NO: 901470 - RNA, 19 nt, Artificial Sequence
  Description of Artificial Sequence: Synthetic oligonucleotide
cugcuaaucuuuucuuaga

SEQ ID NO: 901471 - RNA, 19 nt, Artificial Sequence
  Description of Artificial Sequence: Synthetic oligonucleotide
auaguucuaguaacaacuu

SEQ ID NO: 901472 - RNA, 19 nt, Artificial Sequence
  Description of Artificial Sequence: Synthetic oligonucleotide
gaguccuccucuugcguuc

SEQ ID NO: 901473 - RNA, 19 nt, Artificial Sequence
  Description of Artificial Sequence: Synthetic oligonucleotide
guauagccuuuauacucca

SEQ ID NO: 901474 - RNA, 19 nt, Artificial Sequence
  Description of Artificial Sequence: Synthetic oligonucleotide
ucauggacuuucaggcauu

SEQ ID NO: 901475 - RNA, 19 nt, Artificial Sequence
  Description of Artificial Sequence: Synthetic oligonucleotide
gagacucuuaguugcuucu

SEQ ID NO: 901476 - RNA, 19 nt, Artificial Sequence
  Description of Artificial Sequence: Synthetic oligonucleotide
aaacagcccuguauaaguu

SEQ ID NO: 901477 - RNA, 19 nt, Artificial Sequence
  Description of Artificial Sequence: Synthetic oligonucleotide
auggagcgagaucgguguc

SEQ ID NO: 901478 - RNA, 19 nt, Artificial Sequence
  Description of Artificial Sequence: Synthetic oligonucleotide
gucacgugaugcuaagucu

SEQ ID NO: 901479 - RNA, 19 nt, Artificial Sequence
  Description of Artificial Sequence: Synthetic oligonucleotide
ccuuuggugccuuguacag

SEQ ID NO: 901480 - RNA, 19 nt, Artificial Sequence
  Description of Artificial Sequence: Synthetic oligonucleotide
ggaggcacggguauuagga

SEQ ID NO: 901481 - RNA, 19 nt, Artificial Sequence
  Description of Artificial Sequence: Synthetic oligonucleotide
gauuuggguagagcaacaa

SEQ ID NO: 901482 - RNA, 19 nt, Artificial Sequence
  Description of Artificial Sequence: Synthetic oligonucleotide
cucuucguuucagacguuc

SEQ ID NO: 901483 - RNA, 19 nt, Artificial Sequence
  Description of Artificial Sequence: Synthetic oligonucleotide
uggagcgagaucggugucu

SEQ ID NO: 901484 - RNA, 19 nt, Artificial Sequence
  Description of Artificial Sequence: Synthetic oligonucleotide
agacguuccugguuucuuu

SEQ ID NO: 901485 - RNA, 19 nt, Artificial Sequence
  Description of Artificial Sequence: Synthetic oligonucleotide
ggauucuugcuaugugaac

SEQ ID NO: 901486 - RNA, 19 nt, Artificial Sequence
  Description of Artificial Sequence: Synthetic oligonucleotide
uugcucgugcuuucucgac

SEQ ID NO: 901487 - RNA, 19 nt, Artificial Sequence
  Description of Artificial Sequence: Synthetic oligonucleotide
ugaacacgcucugccuuug

SEQ ID NO: 901488 - RNA, 19 nt, Artificial Sequence
  Description of Artificial Sequence: Synthetic oligonucleotide
acaauucaucugaaaucca

SEQ ID NO: 901489 - RNA, 19 nt, Artificial Sequence
  Description of Artificial Sequence: Synthetic oligonucleotide
ucagacguuccugguuucu

SEQ ID NO: 901490 - RNA, 19 nt, Artificial Sequence
  Description of Artificial Sequence: Synthetic oligonucleotide
ccucuugcguucucgagac

SEQ ID NO: 901491 - RNA, 19 nt, Artificial Sequence
  Description of Artificial Sequence: Synthetic oligonucleotide
gggaccuguggcgaugucg

SEQ ID NO: 901492 - RNA, 19 nt, Artificial Sequence
  Description of Artificial Sequence: Synthetic oligonucleotide
aacgggaccuguggcgaug

SEQ ID NO: 901493 - RNA, 19 nt, Artificial Sequence
  Description of Artificial Sequence: Synthetic oligonucleotide
gaacacgcucugccuuugc

SEQ ID NO: 901494 - RNA, 19 nt, Artificial Sequence
  Description of Artificial Sequence: Synthetic oligonucleotide
uggaucgcucucugcuucu

SEQ ID NO: 901495 - RNA, 19 nt, Artificial Sequence
  Description of Artificial Sequence: Synthetic oligonucleotide
gucauggacuuucaggcau

SEQ ID NO: 901496 - RNA, 19 nt, Artificial Sequence
  Description of Artificial Sequence: Synthetic oligonucleotide
agauuuggguagagcaaca

SEQ ID NO: 901497 - RNA, 19 nt, Artificial Sequence
  Description of Artificial Sequence: Synthetic oligonucleotide
agcaagagauuuggguaga

SEQ ID NO: 901498 - RNA, 19 nt, Artificial Sequence
  Description of Artificial Sequence: Synthetic oligonucleotide
uucagacguuccugguuuc

SEQ ID NO: 901499 - RNA, 19 nt, Artificial Sequence
  Description of Artificial Sequence: Synthetic oligonucleotide
ucucgacuucauccaugac

SEQ ID NO: 901500 - RNA, 19 nt, Artificial Sequence
  Description of Artificial Sequence: Synthetic oligonucleotide
gcccuguauaaguuucucc

SEQ ID NO: 901501 - RNA, 19 nt, Artificial Sequence
  Description of Artificial Sequence: Synthetic oligonucleotide
auauugcuucccugccccu

SEQ ID NO: 901502 - RNA, 19 nt, Artificial Sequence
  Description of Artificial Sequence: Synthetic oligonucleotide
cuagaacugugccgacuuc

SEQ ID NO: 901503 - RNA, 19 nt, Artificial Sequence
  Description of Artificial Sequence: Synthetic oligonucleotide
auaccacagcaaaauaguu

SEQ ID NO: 901504 - RNA, 19 nt, Artificial Sequence
  Description of Artificial Sequence: Synthetic oligonucleotide
ccccucaauauacugaaca

SEQ ID NO: 901505 - RNA, 19 nt, Artificial Sequence
  Description of Artificial Sequence: Synthetic oligonucleotide
cguucucgagacauggagc

SEQ ID NO: 901506 - RNA, 19 nt, Artificial Sequence
  Description of Artificial Sequence: Synthetic oligonucleotide
acaauccaguagaaaugcu

SEQ ID NO: 901507 - RNA, 19 nt, Artificial Sequence
  Description of Artificial Sequence: Synthetic oligonucleotide
ucccgagacuuggaucgag

SEQ ID NO: 901508 - RNA, 19 nt, Artificial Sequence
  Description of Artificial Sequence: Synthetic oligonucleotide
acggguauuaggagauaca

SEQ ID NO: 901509 - RNA, 19 nt, Artificial Sequence
  Description of Artificial Sequence: Synthetic oligonucleotide
agucgccugucauuaucau

SEQ ID NO: 901510 - RNA, 19 nt, Artificial Sequence
  Description of Artificial Sequence: Synthetic oligonucleotide
agaugauccauggcaucaa

SEQ ID NO: 901511 - RNA, 19 nt, Artificial Sequence
  Description of Artificial Sequence: Synthetic oligonucleotide
cuaguuccagaaaggacau

SEQ ID NO: 901512 - RNA, 19 nt, Artificial Sequence
  Description of Artificial Sequence: Synthetic oligonucleotide
cuucgaucacaaucugcaa

SEQ ID NO: 901513 - RNA, 19 nt, Artificial Sequence
  Description of Artificial Sequence: Synthetic oligonucleotide
gcuguuaaacacagcucug

SEQ ID NO: 901514 - RNA, 19 nt, Artificial Sequence
  Description of Artificial Sequence: Synthetic oligonucleotide
cuucguuucagacguuccu

SEQ ID NO: 901515 - RNA, 19 nt, Artificial Sequence
  Description of Artificial Sequence: Synthetic oligonucleotide
ggaucgaguccuccucuug

SEQ ID NO: 901516 - RNA, 19 nt, Artificial Sequence
  Description of Artificial Sequence: Synthetic oligonucleotide
ucccugccccuuuucucug

SEQ ID NO: 901517 - RNA, 19 nt, Artificial Sequence
  Description of Artificial Sequence: Synthetic oligonucleotide
guaaggcacuguuaaggau

SEQ ID NO: 901518 - RNA, 19 nt, Artificial Sequence
  Description of Artificial Sequence: Synthetic oligonucleotide
ccgaguuguuccacuuugg

SEQ ID NO: 901519 - RNA, 19 nt, Artificial Sequence
  Description of Artificial Sequence: Synthetic oligonucleotide
ugccgacuucucugguggc

SEQ ID NO: 901520 - RNA, 19 nt, Artificial Sequence
  Description of Artificial Sequence: Synthetic oligonucleotide
ucgagacauggagcgagau

SEQ ID NO: 901521 - RNA, 19 nt, Artificial Sequence
  Description of Artificial Sequence: Synthetic oligonucleotide
cacacagcuauaguuagau

SEQ ID NO: 901522 - RNA, 19 nt, Artificial Sequence
  Description of Artificial Sequence: Synthetic oligonucleotide
gcuucuacagguccaauuu

SEQ ID NO: 901523 - RNA, 19 nt, Artificial Sequence
  Description of Artificial Sequence: Synthetic oligonucleotide
gcggcuacuagaacgggac

SEQ ID NO: 901524 - RNA, 19 nt, Artificial Sequence
  Description of Artificial Sequence: Synthetic oligonucleotide
guuucagacguuccugguu

SEQ ID NO: 901525 - RNA, 19 nt, Artificial Sequence
  Description of Artificial Sequence: Synthetic oligonucleotide
cucuagaucuagaucuuuu

SEQ ID NO: 901526 - RNA, 19 nt, Artificial Sequence
  Description of Artificial Sequence: Synthetic oligonucleotide
uucgagcuuuucucuuauu

SEQ ID NO: 901527 - RNA, 19 nt, Artificial Sequence
  Description of Artificial Sequence: Synthetic oligonucleotide
guuaaggauguuacagaau

SEQ ID NO: 901528 - RNA, 19 nt, Artificial Sequence
  Description of Artificial Sequence: Synthetic oligonucleotide
accuguggcgaugucguuu

SEQ ID NO: 901529 - RNA, 19 nt, Artificial Sequence
  Description of Artificial Sequence: Synthetic oligonucleotide
uaggaccgcuucuuaucuu

SEQ ID NO: 901530 - RNA, 19 nt, Artificial Sequence
  Description of Artificial Sequence: Synthetic oligonucleotide
gaacgggaccuccucaguu

SEQ ID NO: 901531 - RNA, 19 nt, Artificial Sequence
  Description of Artificial Sequence: Synthetic oligonucleotide
gagcgagaucggugucugc

SEQ ID NO: 901532 - RNA, 19 nt, Artificial Sequence
  Description of Artificial Sequence: Synthetic oligonucleotide
cucagcuacaacucucuuu

SEQ ID NO: 901533 - RNA, 19 nt, Artificial Sequence
  Description of Artificial Sequence: Synthetic oligonucleotide
agacucuuaguugcuucua

SEQ ID NO: 901534 - RNA, 19 nt, Artificial Sequence
  Description of Artificial Sequence: Synthetic oligonucleotide
ccuuuauacuccacacaca

SEQ ID NO: 901535 - RNA, 19 nt, Artificial Sequence
  Description of Artificial Sequence: Synthetic oligonucleotide
cucgagacauggagcgaga

SEQ ID NO: 901536 - RNA, 19 nt, Artificial Sequence
  Description of Artificial Sequence: Synthetic oligonucleotide
gacguuccugguuucuuuu

SEQ ID NO: 901537 - RNA, 19 nt, Artificial Sequence
  Description of Artificial Sequence: Synthetic oligonucleotide
gguuacauauugauuuuau

SEQ ID NO: 901538 - RNA, 19 nt, Artificial Sequence
  Description of Artificial Sequence: Synthetic oligonucleotide
cucauaggaccgcuucuua

SEQ ID NO: 901539 - RNA, 19 nt, Artificial Sequence
  Description of Artificial Sequence: Synthetic oligonucleotide
caugaacacgcucugccuu

SEQ ID NO: 901540 - RNA, 19 nt, Artificial Sequence
  Description of Artificial Sequence: Synthetic oligonucleotide
cugcggcuacuagaacggg

SEQ ID NO: 901541 - RNA, 19 nt, Artificial Sequence
  Description of Artificial Sequence: Synthetic oligonucleotide
gcucugaaauaguggagua

SEQ ID NO: 901542 - RNA, 19 nt, Artificial Sequence
  Description of Artificial Sequence: Synthetic oligonucleotide
augcuaagucuuggucucu

SEQ ID NO: 901543 - RNA, 19 nt, Artificial Sequence
  Description of Artificial Sequence: Synthetic oligonucleotide
ggguauuaggagauacaaa

SEQ ID NO: 901544 - RNA, 19 nt, Artificial Sequence
  Description of Artificial Sequence: Synthetic oligonucleotide
cuucuaucucuagaacugu

SEQ ID NO: 901545 - RNA, 19 nt, Artificial Sequence
  Description of Artificial Sequence: Synthetic oligonucleotide
gaauuucgauaaacuuccu

SEQ ID NO: 901546 - RNA, 19 nt, Artificial Sequence
  Description of Artificial Sequence: Synthetic oligonucleotide
cucucauaggaccgcuucu

SEQ ID NO: 901547 - RNA, 19 nt, Artificial Sequence
  Description of Artificial Sequence: Synthetic oligonucleotide
ggcuacuagaacgggaccu

SEQ ID NO: 901548 - RNA, 19 nt, Artificial Sequence
  Description of Artificial Sequence: Synthetic oligonucleotide
ucucuucguuucagacguu

SEQ ID NO: 901549 - RNA, 19 nt, Artificial Sequence
  Description of Artificial Sequence: Synthetic oligonucleotide
cucgugcuuucucgacuuc

SEQ ID NO: 901550 - RNA, 19 nt, Artificial Sequence
  Description of Artificial Sequence: Synthetic oligonucleotide
ggcauagaauuucgauaaa

SEQ ID NO: 901551 - RNA, 19 nt, Artificial Sequence
  Description of Artificial Sequence: Synthetic oligonucleotide
cucggucacgaggugaucu

SEQ ID NO: 901552 - RNA, 19 nt, Artificial Sequence
  Description of Artificial Sequence: Synthetic oligonucleotide
acgaggugaucugucucuu

SEQ ID NO: 901553 - RNA, 19 nt, Artificial Sequence
  Description of Artificial Sequence: Synthetic oligonucleotide
cuucgagcuuuucucuuau

SEQ ID NO: 901554 - RNA, 19 nt, Artificial Sequence
  Description of Artificial Sequence: Synthetic oligonucleotide
cucugaaauaguggaguau

SEQ ID NO: 901555 - RNA, 19 nt, Artificial Sequence
  Description of Artificial Sequence: Synthetic oligonucleotide
cuuggaucgcucucugcuu

SEQ ID NO: 901556 - RNA, 19 nt, Artificial Sequence
  Description of Artificial Sequence: Synthetic oligonucleotide
ccacuucagcacuuaucuc

SEQ ID NO: 901557 - RNA, 19 nt, Artificial Sequence
  Description of Artificial Sequence: Synthetic oligonucleotide
gcgagaucggugucugcga

SEQ ID NO: 901558 - RNA, 19 nt, Artificial Sequence
  Description of Artificial Sequence: Synthetic oligonucleotide
ucucggucacgaggugauc

SEQ ID NO: 901559 - RNA, 19 nt, Artificial Sequence
  Description of Artificial Sequence: Synthetic oligonucleotide
cucucuagaucuagaucuu

SEQ ID NO: 901560 - RNA, 19 nt, Artificial Sequence
  Description of Artificial Sequence: Synthetic oligonucleotide
ggaccuguggcgaugucgu

SEQ ID NO: 901561 - RNA, 19 nt, Artificial Sequence
  Description of Artificial Sequence: Synthetic oligonucleotide
ccgacuucucugguggcug

SEQ ID NO: 901562 - RNA, 19 nt, Artificial Sequence
  Description of Artificial Sequence: Synthetic oligonucleotide
gcuaugugaacgggaccuc

SEQ ID NO: 901563 - RNA, 19 nt, Artificial Sequence
  Description of Artificial Sequence: Synthetic oligonucleotide
cucuagaacugugccgacu

SEQ ID NO: 901564 - RNA, 19 nt, Artificial Sequence
  Description of Artificial Sequence: Synthetic oligonucleotide
cggguauuaggagauacaa

SEQ ID NO: 901565 - RNA, 19 nt, Artificial Sequence
  Description of Artificial Sequence: Synthetic oligonucleotide
cugccccuuuucucugaca

SEQ ID NO: 901566 - RNA, 19 nt, Artificial Sequence
  Description of Artificial Sequence: Synthetic oligonucleotide
cagcuacaacucucuuuaa

SEQ ID NO: 901567 - RNA, 19 nt, Artificial Sequence
  Description of Artificial Sequence: Synthetic oligonucleotide
cuacuagaacgggaccugu

SEQ ID NO: 901568 - RNA, 19 nt, Artificial Sequence
  Description of Artificial Sequence: Synthetic oligonucleotide
gucucggucacgaggugau

SEQ ID NO: 901569 - RNA, 19 nt, Artificial Sequence
  Description of Artificial Sequence: Synthetic oligonucleotide
cagcuccgaguuguuccac

SEQ ID NO: 901570 - RNA, 19 nt, Artificial Sequence
  Description of Artificial Sequence: Synthetic oligonucleotide
ggcacggguauuaggagau

SEQ ID NO: 901571 - RNA, 19 nt, Artificial Sequence
  Description of Artificial Sequence: Synthetic oligonucleotide
ccacacagcuauaguuaga

SEQ ID NO: 901572 - RNA, 19 nt, Artificial Sequence
  Description of Artificial Sequence: Synthetic oligonucleotide
gguggcucuugcauacucu

SEQ ID NO: 901573 - RNA, 19 nt, Artificial Sequence
  Description of Artificial Sequence: Synthetic oligonucleotide
cucuugcguucucgagaca

SEQ ID NO: 901574 - RNA, 19 nt, Artificial Sequence
  Description of Artificial Sequence: Synthetic oligonucleotide
gcuugucaauuaagaaaua

SEQ ID NO: 901575 - RNA, 19 nt, Artificial Sequence
  Description of Artificial Sequence: Synthetic oligonucleotide
cggcuacuagaacgggacc

SEQ ID NO: 901576 - RNA, 19 nt, Artificial Sequence
  Description of Artificial Sequence: Synthetic oligonucleotide
gaucugccauuagcacucu

SEQ ID NO: 901577 - RNA, 19 nt, Artificial Sequence
  Description of Artificial Sequence: Synthetic oligonucleotide
cuagaucuuuugggauucu

SEQ ID NO: 901578 - RNA, 19 nt, Artificial Sequence
  Description of Artificial Sequence: Synthetic oligonucleotide
cagacguuccugguuucuu

SEQ ID NO: 901579 - RNA, 19 nt, Artificial Sequence
  Description of Artificial Sequence: Synthetic oligonucleotide
ggaagaccacacagcuaua

SEQ ID NO: 901580 - RNA, 19 nt, Artificial Sequence
  Description of Artificial Sequence: Synthetic oligonucleotide
gcaagucgccugucauuau

SEQ ID NO: 901581 - RNA, 19 nt, Artificial Sequence
  Description of Artificial Sequence: Synthetic oligonucleotide
gcgaugcucucuagaucua

SEQ ID NO: 901582 - RNA, 19 nt, Artificial Sequence
  Description of Artificial Sequence: Synthetic oligonucleotide
gcacggguauuaggagaua

SEQ ID NO: 901583 - RNA, 19 nt, Artificial Sequence
  Description of Artificial Sequence: Synthetic oligonucleotide
cgaguccuccucuugcguu

SEQ ID NO: 901584 - RNA, 19 nt, Artificial Sequence
  Description of Artificial Sequence: Synthetic oligonucleotide
cgagaucggugucugcgau

SEQ ID NO: 901585 - RNA, 19 nt, Artificial Sequence
  Description of Artificial Sequence: Synthetic oligonucleotide
cggcugcggcuacuagaac

SEQ ID NO: 901586 - RNA, 19 nt, Artificial Sequence
  Description of Artificial Sequence: Synthetic oligonucleotide
cgggaccuguggcgauguc

SEQ ID NO: 901587 - RNA, 19 nt, Artificial Sequence
  Description of Artificial Sequence: Synthetic oligonucleotide
ugaucaagaaaugagaugg

SEQ ID NO: 901588 - RNA, 19 nt, Artificial Sequence
  Description of Artificial Sequence: Synthetic oligonucleotide
aaaccccgcacauugaggc

SEQ ID NO: 901589 - RNA, 19 nt, Artificial Sequence
  Description of Artificial Sequence: Synthetic oligonucleotide
aaugagauggaccuccaag

SEQ ID NO: 901590 - RNA, 19 nt, Artificial Sequence
  Description of Artificial Sequence: Synthetic oligonucleotide
aaaagcgagggccacugcc

SEQ ID NO: 901591 - RNA, 19 nt, Artificial Sequence
  Description of Artificial Sequence: Synthetic oligonucleotide
aauaauaccaacucuucuu

SEQ ID NO: 901592 - RNA, 19 nt, Artificial Sequence
  Description of Artificial Sequence: Synthetic oligonucleotide
uuauuuguucugaaucugg

SEQ ID NO: 901593 - RNA, 19 nt, Artificial Sequence
  Description of Artificial Sequence: Synthetic oligonucleotide
ucuuccauguucaaagugc

SEQ ID NO: 901594 - RNA, 19 nt, Artificial Sequence
  Description of Artificial Sequence: Synthetic oligonucleotide
aauaccugcugcuaccuag

SEQ ID NO: 901595 - RNA, 19 nt, Artificial Sequence
  Description of Artificial Sequence: Synthetic oligonucleotide
cuugguucaaagcugaccc

SEQ ID NO: 901596 - RNA, 19 nt, Artificial Sequence
  Description of Artificial Sequence: Synthetic oligonucleotide
gaugaugccucuaagagug

SEQ ID NO: 901597 - RNA, 19 nt, Artificial Sequence
  Description of Artificial Sequence: Synthetic oligonucleotide
gaugcaauguccuugguuc

SEQ ID NO: 901598 - RNA, 19 nt, Artificial Sequence
  Description of Artificial Sequence: Synthetic oligonucleotide
aaaauaauaccaacucuuc

SEQ ID NO: 901599 - RNA, 19 nt, Artificial Sequence
  Description of Artificial Sequence: Synthetic oligonucleotide
uauuuguucugaaucuggg

SEQ ID NO: 901600 - RNA, 19 nt, Artificial Sequence
  Description of Artificial Sequence: Synthetic oligonucleotide
acauuuuagauguucaacu

SEQ ID NO: 901601 - RNA, 19 nt, Artificial Sequence
  Description of Artificial Sequence: Synthetic oligonucleotide
aaauaauaccaacucuucu

SEQ ID NO: 901602 - RNA, 19 nt, Artificial Sequence
  Description of Artificial Sequence: Synthetic oligonucleotide
aaugcgacugaccaugugu

SEQ ID NO: 901603 - RNA, 19 nt, Artificial Sequence
  Description of Artificial Sequence: Synthetic oligonucleotide
aauaaucuagacugacucu

SEQ ID NO: 901604 - RNA, 19 nt, Artificial Sequence
  Description of Artificial Sequence: Synthetic oligonucleotide
uuuuagauguucaacugaa

SEQ ID NO: 901605 - RNA, 19 nt, Artificial Sequence
  Description of Artificial Sequence: Synthetic oligonucleotide
aaugcguccagcuucccug

SEQ ID NO: 901606 - RNA, 19 nt, Artificial Sequence
  Description of Artificial Sequence: Synthetic oligonucleotide
aagagugccucccuuaaug

SEQ ID NO: 901607 - RNA, 19 nt, Artificial Sequence
  Description of Artificial Sequence: Synthetic oligonucleotide
aaucaggaaccucagggug

SEQ ID NO: 901608 - RNA, 19 nt, Artificial Sequence
  Description of Artificial Sequence: Synthetic oligonucleotide
uagauguucaacugaagca

SEQ ID NO: 901609 - RNA, 19 nt, Artificial Sequence
  Description of Artificial Sequence: Synthetic oligonucleotide
uggaccuccaagcaaaagc

SEQ ID NO: 901610 - RNA, 19 nt, Artificial Sequence
  Description of Artificial Sequence: Synthetic oligonucleotide
acagugauggggaagaaac

SEQ ID NO: 901611 - RNA, 19 nt, Artificial Sequence
  Description of Artificial Sequence: Synthetic oligonucleotide
caauaaucuagacugacuc

SEQ ID NO: 901612 - RNA, 19 nt, Artificial Sequence
  Description of Artificial Sequence: Synthetic oligonucleotide
ucaacugaagcagagugag

SEQ ID NO: 901613 - RNA, 19 nt, Artificial Sequence
  Description of Artificial Sequence: Synthetic oligonucleotide
aaaagagggccuuuucucu

SEQ ID NO: 901614 - RNA, 19 nt, Artificial Sequence
  Description of Artificial Sequence: Synthetic oligonucleotide
accucuaucugcuuugggg

SEQ ID NO: 901615 - RNA, 19 nt, Artificial Sequence
  Description of Artificial Sequence: Synthetic oligonucleotide
ugauguucaucgaauggag

SEQ ID NO: 901616 - RNA, 19 nt, Artificial Sequence
  Description of Artificial Sequence: Synthetic oligonucleotide
aaugccagcaggugcagug

SEQ ID NO: 901617 - RNA, 19 nt, Artificial Sequence
  Description of Artificial Sequence: Synthetic oligonucleotide
guucaacugaagcagagug

SEQ ID NO: 901618 - RNA, 19 nt, Artificial Sequence
  Description of Artificial Sequence: Synthetic oligonucleotide
uuaauguacucggugauga

SEQ ID NO: 901619 - RNA, 19 nt, Artificial Sequence
  Description of Artificial Sequence: Synthetic oligonucleotide
aauaccaacucuucuuaaa

SEQ ID NO: 901620 - RNA, 19 nt, Artificial Sequence
  Description of Artificial Sequence: Synthetic oligonucleotide
auuccuaucauggucacug

SEQ ID NO: 901621 - RNA, 19 nt, Artificial Sequence
  Description of Artificial Sequence: Synthetic oligonucleotide
guuuauaucauugucaaua

SEQ ID NO: 901622 - RNA, 19 nt, Artificial Sequence
  Description of Artificial Sequence: Synthetic oligonucleotide
auuuuagauguucaacuga

SEQ ID NO: 901623 - RNA, 19 nt, Artificial Sequence
  Description of Artificial Sequence: Synthetic oligonucleotide
acagaaucguuuuauuugu

SEQ ID NO: 901624 - RNA, 19 nt, Artificial Sequence
  Description of Artificial Sequence: Synthetic oligonucleotide
uuuagauguucaacugaag

SEQ ID NO: 901625 - RNA, 19 nt, Artificial Sequence
  Description of Artificial Sequence: Synthetic oligonucleotide
auguucaucgaauggaggu

SEQ ID NO: 901626 - RNA, 19 nt, Artificial Sequence
  Description of Artificial Sequence: Synthetic oligonucleotide
ucugaaucuggguucauuc

SEQ ID NO: 901627 - RNA, 19 nt, Artificial Sequence
  Description of Artificial Sequence: Synthetic oligonucleotide
aucgaauggagguaggcca

SEQ ID NO: 901628 - RNA, 19 nt, Artificial Sequence
  Description of Artificial Sequence: Synthetic oligonucleotide
cagagugaggaaauggccc

SEQ ID NO: 901629 - RNA, 19 nt, Artificial Sequence
  Description of Artificial Sequence: Synthetic oligonucleotide
uccucgucaaaccggauga

SEQ ID NO: 901630 - RNA, 19 nt, Artificial Sequence
  Description of Artificial Sequence: Synthetic oligonucleotide
aaaccggaugaguuccuuc

SEQ ID NO: 901631 - RNA, 19 nt, Artificial Sequence
  Description of Artificial Sequence: Synthetic oligonucleotide
ucauugucaauaccugcug

SEQ ID NO: 901632 - RNA, 19 nt, Artificial Sequence
  Description of Artificial Sequence: Synthetic oligonucleotide
uucuaaagcugccucccag

SEQ ID NO: 901633 - RNA, 19 nt, Artificial Sequence
  Description of Artificial Sequence: Synthetic oligonucleotide
uaaggcagggcaaugcgac

SEQ ID NO: 901634 - RNA, 19 nt, Artificial Sequence
  Description of Artificial Sequence: Synthetic oligonucleotide
aaccggaugaguuccuuca

SEQ ID NO: 901635 - RNA, 19 nt, Artificial Sequence
  Description of Artificial Sequence: Synthetic oligonucleotide
ugaggaaauggcccucccg

SEQ ID NO: 901636 - RNA, 19 nt, Artificial Sequence
  Description of Artificial Sequence: Synthetic oligonucleotide
uucaacugaagcagaguga

SEQ ID NO: 901637 - RNA, 19 nt, Artificial Sequence
  Description of Artificial Sequence: Synthetic oligonucleotide
agggcaaugcgacugacca

SEQ ID NO: 901638 - RNA, 19 nt, Artificial Sequence
  Description of Artificial Sequence: Synthetic oligonucleotide
uccuaucauggucacuggg

SEQ ID NO: 901639 - RNA, 19 nt, Artificial Sequence
  Description of Artificial Sequence: Synthetic oligonucleotide
aauagaucacacagaaaga

SEQ ID NO: 901640 - RNA, 19 nt, Artificial Sequence
  Description of Artificial Sequence: Synthetic oligonucleotide
aucuaccaugagucgagcc

SEQ ID NO: 901641 - RNA, 19 nt, Artificial Sequence
  Description of Artificial Sequence: Synthetic oligonucleotide
uucacucgcccaauaaucu

SEQ ID NO: 901642 - RNA, 19 nt, Artificial Sequence
  Description of Artificial Sequence: Synthetic oligonucleotide
auucacucgcccaauaauc

SEQ ID NO: 901643 - RNA, 19 nt, Artificial Sequence
  Description of Artificial Sequence: Synthetic oligonucleotide
gaggaugcugagaugaacc

SEQ ID NO: 901644 - RNA, 19 nt, Artificial Sequence
  Description of Artificial Sequence: Synthetic oligonucleotide
ucuaaagcugccucccagc

SEQ ID NO: 901645 - RNA, 19 nt, Artificial Sequence
  Description of Artificial Sequence: Synthetic oligonucleotide
agaggcaaguaugucuugc

SEQ ID NO: 901646 - RNA, 19 nt, Artificial Sequence
  Description of Artificial Sequence: Synthetic oligonucleotide
auagaucacacagaaagaa

SEQ ID NO: 901647 - RNA, 19 nt, Artificial Sequence
  Description of Artificial Sequence: Synthetic oligonucleotide
ucucaucuaccaugagucg

SEQ ID NO: 901648 - RNA, 19 nt, Artificial Sequence
  Description of Artificial Sequence: Synthetic oligonucleotide
ucccuuaauguacucggug

SEQ ID NO: 901649 - RNA, 19 nt, Artificial Sequence
  Description of Artificial Sequence: Synthetic oligonucleotide
cacacagaaagaacucagg

SEQ ID NO: 901650 - RNA, 19 nt, Artificial Sequence
  Description of Artificial Sequence: Synthetic oligonucleotide
auuugguggacaguagcgg

SEQ ID NO: 901651 - RNA, 19 nt, Artificial Sequence
  Description of Artificial Sequence: Synthetic oligonucleotide
ucugcauucacucgcccaa

SEQ ID NO: 901652 - RNA, 19 nt, Artificial Sequence
  Description of Artificial Sequence: Synthetic oligonucleotide
ggguguauucuccagaggc

SEQ ID NO: 901653 - RNA, 19 nt, Artificial Sequence
  Description of Artificial Sequence: Synthetic oligonucleotide
agaaaccccgcacauugag

SEQ ID NO: 901654 - RNA, 19 nt, Artificial Sequence
  Description of Artificial Sequence: Synthetic oligonucleotide
gauguucaucgaauggagg

SEQ ID NO: 901655 - RNA, 19 nt, Artificial Sequence
  Description of Artificial Sequence: Synthetic oligonucleotide
aggaaauggcccucccgcc

SEQ ID NO: 901656 - RNA, 19 nt, Artificial Sequence
  Description of Artificial Sequence: Synthetic oligonucleotide
ugaggaauguccucugggu

SEQ ID NO: 901657 - RNA, 19 nt, Artificial Sequence
  Description of Artificial Sequence: Synthetic oligonucleotide
agacugacucuucucaucu

SEQ ID NO: 901658 - RNA, 19 nt, Artificial Sequence
  Description of Artificial Sequence: Synthetic oligonucleotide
uucgggugcuccaagcacc

SEQ ID NO: 901659 - RNA, 19 nt, Artificial Sequence
  Description of Artificial Sequence: Synthetic oligonucleotide
uuugguggacaguagcggu

SEQ ID NO: 901660 - RNA, 19 nt, Artificial Sequence
  Description of Artificial Sequence: Synthetic oligonucleotide
caugcgaagcguuuccagc

SEQ ID NO: 901661 - RNA, 19 nt, Artificial Sequence
  Description of Artificial Sequence: Synthetic oligonucleotide
acugagaaagcuucacagu

SEQ ID NO: 901662 - RNA, 19 nt, Artificial Sequence
  Description of Artificial Sequence: Synthetic oligonucleotide
aaccccgcacauugaggcc

SEQ ID NO: 901663 - RNA, 19 nt, Artificial Sequence
  Description of Artificial Sequence: Synthetic oligonucleotide
ugugggaucagaccucuau

SEQ ID NO: 901664 - RNA, 19 nt, Artificial Sequence
  Description of Artificial Sequence: Synthetic oligonucleotide
aaaucccagcagcggcugc

SEQ ID NO: 901665 - RNA, 19 nt, Artificial Sequence
  Description of Artificial Sequence: Synthetic oligonucleotide
cugagaugaaccuggggug

SEQ ID NO: 901666 - RNA, 19 nt, Artificial Sequence
  Description of Artificial Sequence: Synthetic oligonucleotide
ucgcccaauaaucuagacu

SEQ ID NO: 901667 - RNA, 19 nt, Artificial Sequence
  Description of Artificial Sequence: Synthetic oligonucleotide
cauugucaauaccugcugc

SEQ ID NO: 901668 - RNA, 19 nt, Artificial Sequence
  Description of Artificial Sequence: Synthetic oligonucleotide
uucaucgaauggagguagg

SEQ ID NO: 901669 - RNA, 19 nt, Artificial Sequence
  Description of Artificial Sequence: Synthetic oligonucleotide
augaaguucagccgcuugu

SEQ ID NO: 901670 - RNA, 19 nt, Artificial Sequence
  Description of Artificial Sequence: Synthetic oligonucleotide
cuaaagcugccucccagcc

SEQ ID NO: 901671 - RNA, 19 nt, Artificial Sequence
  Description of Artificial Sequence: Synthetic oligonucleotide
ugggaugauguucaucgaa

SEQ ID NO: 901672 - RNA, 19 nt, Artificial Sequence
  Description of Artificial Sequence: Synthetic oligonucleotide
uccaagcaccgcaugaccu

SEQ ID NO: 901673 - RNA, 19 nt, Artificial Sequence
  Description of Artificial Sequence: Synthetic oligonucleotide
uggaaugcguccagcuucc

SEQ ID NO: 901674 - RNA, 19 nt, Artificial Sequence
  Description of Artificial Sequence: Synthetic oligonucleotide
ucgucaaaccggaugaguu

SEQ ID NO: 901675 - RNA, 19 nt, Artificial Sequence
  Description of Artificial Sequence: Synthetic oligonucleotide
auaaucuagacugacucuu

SEQ ID NO: 901676 - RNA, 19 nt, Artificial Sequence
  Description of Artificial Sequence: Synthetic oligonucleotide
gucaauaccugcugcuacc

SEQ ID NO: 901677 - RNA, 19 nt, Artificial Sequence
  Description of Artificial Sequence: Synthetic oligonucleotide
aaucggggucugcauucac

SEQ ID NO: 901678 - RNA, 19 nt, Artificial Sequence
  Description of Artificial Sequence: Synthetic oligonucleotide
agguaaggcagggcaaugc

SEQ ID NO: 901679 - RNA, 19 nt, Artificial Sequence
  Description of Artificial Sequence: Synthetic oligonucleotide
ggguucauuccuaucaugg

SEQ ID NO: 901680 - RNA, 19 nt, Artificial Sequence
  Description of Artificial Sequence: Synthetic oligonucleotide
caugagucgagccagccca

SEQ ID NO: 901681 - RNA, 19 nt, Artificial Sequence
  Description of Artificial Sequence: Synthetic oligonucleotide
ugagaugaaccuggggugc

SEQ ID NO: 901682 - RNA, 19 nt, Artificial Sequence
  Description of Artificial Sequence: Synthetic oligonucleotide
cacuucuaaagcugccucc

SEQ ID NO: 901683 - RNA, 19 nt, Artificial Sequence
  Description of Artificial Sequence: Synthetic oligonucleotide
uagcgguccaagaaacccc

SEQ ID NO: 901684 - RNA, 19 nt, Artificial Sequence
  Description of Artificial Sequence: Synthetic oligonucleotide
guagcgguccaagaaaccc

SEQ ID NO: 901685 - RNA, 19 nt, Artificial Sequence
  Description of Artificial Sequence: Synthetic oligonucleotide
ugaugcaauguccuugguu

SEQ ID NO: 901686 - RNA, 19 nt, Artificial Sequence
  Description of Artificial Sequence: Synthetic oligonucleotide
guucaucgaauggagguag

SEQ ID NO: 901687 - RNA, 19 nt, Artificial Sequence
  Description of Artificial Sequence: Synthetic oligonucleotide
acaguagcgguccaagaaa

SEQ ID NO: 901688 - RNA, 19 nt, Artificial Sequence
  Description of Artificial Sequence: Synthetic oligonucleotide
uguucucacgaaccagaca

SEQ ID NO: 901689 - RNA, 19 nt, Artificial Sequence
  Description of Artificial Sequence: Synthetic oligonucleotide
gguaaggcagggcaaugcg

SEQ ID NO: 901690 - RNA, 19 nt, Artificial Sequence
  Description of Artificial Sequence: Synthetic oligonucleotide
gucaaaccggaugaguucc

SEQ ID NO: 901691 - RNA, 19 nt, Artificial Sequence
  Description of Artificial Sequence: Synthetic oligonucleotide
ucuaagagugccucccuua

SEQ ID NO: 901692 - RNA, 19 nt, Artificial Sequence
  Description of Artificial Sequence: Synthetic oligonucleotide
aaguaugucuugcuuccuu

SEQ ID NO: 901693 - RNA, 19 nt, Artificial Sequence
  Description of Artificial Sequence: Synthetic oligonucleotide
ggaucagaccucuaucugc

SEQ ID NO: 901694 - RNA, 19 nt, Artificial Sequence
  Description of Artificial Sequence: Synthetic oligonucleotide
agcguuuccagccauuguu

SEQ ID NO: 901695 - RNA, 19 nt, Artificial Sequence
  Description of Artificial Sequence: Synthetic oligonucleotide
gaaaccccgcacauugagg

SEQ ID NO: 901696 - RNA, 19 nt, Artificial Sequence
  Description of Artificial Sequence: Synthetic oligonucleotide
guuguuccagcugugggcc

SEQ ID NO: 901697 - RNA, 19 nt, Artificial Sequence
  Description of Artificial Sequence: Synthetic oligonucleotide
gaacucagggcagaggcac

SEQ ID NO: 901698 - RNA, 19 nt, Artificial Sequence
  Description of Artificial Sequence: Synthetic oligonucleotide
uuguucucacgaaccagac

SEQ ID NO: 901699 - RNA, 19 nt, Artificial Sequence
  Description of Artificial Sequence: Synthetic oligonucleotide
aguucggggcagauaaucg

SEQ ID NO: 901700 - RNA, 19 nt, Artificial Sequence
  Description of Artificial Sequence: Synthetic oligonucleotide
cugacucuucucaucuacc

SEQ ID NO: 901701 - RNA, 19 nt, Artificial Sequence
  Description of Artificial Sequence: Synthetic oligonucleotide
caucgaauggagguaggcc

SEQ ID NO: 901702 - RNA, 19 nt, Artificial Sequence
  Description of Artificial Sequence: Synthetic oligonucleotide
caggcagugagcucucgcc

SEQ ID NO: 901703 - RNA, 19 nt, Artificial Sequence
  Description of Artificial Sequence: Synthetic oligonucleotide
ucgggugcuccaagcaccg

SEQ ID NO: 901704 - RNA, 19 nt, Artificial Sequence
  Description of Artificial Sequence: Synthetic oligonucleotide
ccaagcaaaagcgagggcc

SEQ ID NO: 901705 - RNA, 19 nt, Artificial Sequence
  Description of Artificial Sequence: Synthetic oligonucleotide
acguucgggugcuccaagc

SEQ ID NO: 901706 - RNA, 19 nt, Artificial Sequence
  Description of Artificial Sequence: Synthetic oligonucleotide
guggggagagacccgagag

SEQ ID NO: 901707 - RNA, 19 nt, Artificial Sequence
  Description of Artificial Sequence: Synthetic oligonucleotide
agugcaugcgaagcguuuc

SEQ ID NO: 901708 - RNA, 19 nt, Artificial Sequence
  Description of Artificial Sequence: Synthetic oligonucleotide
ucaucgaauggagguaggc

SEQ ID NO: 901709 - RNA, 19 nt, Artificial Sequence
  Description of Artificial Sequence: Synthetic oligonucleotide
uuccuaucauggucacugg

SEQ ID NO: 901710 - RNA, 19 nt, Artificial Sequence
  Description of Artificial Sequence: Synthetic oligonucleotide
uuucccuugagggaucccu

SEQ ID NO: 901711 - RNA, 19 nt, Artificial Sequence
  Description of Artificial Sequence: Synthetic oligonucleotide
gaagcguuuccagccauug

SEQ ID NO: 901712 - RNA, 19 nt, Artificial Sequence
  Description of Artificial Sequence: Synthetic oligonucleotide
ugaccaugugugugcagcc

SEQ ID NO: 901713 - RNA, 19 nt, Artificial Sequence
  Description of Artificial Sequence: Synthetic oligonucleotide
cuuaauguacucggugaug

SEQ ID NO: 901714 - RNA, 19 nt, Artificial Sequence
  Description of Artificial Sequence: Synthetic oligonucleotide
cuaucauggucacugggca

SEQ ID NO: 901715 - RNA, 19 nt, Artificial Sequence
  Description of Artificial Sequence: Synthetic oligonucleotide
cuaccaugagucgagccag

SEQ ID NO: 901716 - RNA, 19 nt, Artificial Sequence
  Description of Artificial Sequence: Synthetic oligonucleotide
ccuaucauggucacugggc

SEQ ID NO: 901717 - RNA, 19 nt, Artificial Sequence
  Description of Artificial Sequence: Synthetic oligonucleotide
uggacaguagcgguccaag

SEQ ID NO: 901718 - RNA, 19 nt, Artificial Sequence
  Description of Artificial Sequence: Synthetic oligonucleotide
acacggggcugcuccagcc

SEQ ID NO: 901719 - RNA, 19 nt, Artificial Sequence
  Description of Artificial Sequence: Synthetic oligonucleotide
uuggguuaggggcucacuu

SEQ ID NO: 901720 - RNA, 19 nt, Artificial Sequence
  Description of Artificial Sequence: Synthetic oligonucleotide
auguacucggugaugaagu

SEQ ID NO: 901721 - RNA, 19 nt, Artificial Sequence
  Description of Artificial Sequence: Synthetic oligonucleotide
ugcugugugggcugagccc

SEQ ID NO: 901722 - RNA, 19 nt, Artificial Sequence
  Description of Artificial Sequence: Synthetic oligonucleotide
ugaugccucuaagagugcc

SEQ ID NO: 901723 - RNA, 19 nt, Artificial Sequence
  Description of Artificial Sequence: Synthetic oligonucleotide
aaagcgagggccacugccu

SEQ ID NO: 901724 - RNA, 19 nt, Artificial Sequence
  Description of Artificial Sequence: Synthetic oligonucleotide
ucucacuaaaguggcuuug

SEQ ID NO: 901725 - RNA, 19 nt, Artificial Sequence
  Description of Artificial Sequence: Synthetic oligonucleotide
aggguguauucuccagagg

SEQ ID NO: 901726 - RNA, 19 nt, Artificial Sequence
  Description of Artificial Sequence: Synthetic oligonucleotide
aggaaccucagggugagca

SEQ ID NO: 901727 - RNA, 19 nt, Artificial Sequence
  Description of Artificial Sequence: Synthetic oligonucleotide
caagcaaaagcgagggcca

SEQ ID NO: 901728 - RNA, 19 nt, Artificial Sequence
  Description of Artificial Sequence: Synthetic oligonucleotide
accaugagucgagccagcc

SEQ ID NO: 901729 - RNA, 19 nt, Artificial Sequence
  Description of Artificial Sequence: Synthetic oligonucleotide
caucaccugcccuuuuccc

SEQ ID NO: 901730 - RNA, 19 nt, Artificial Sequence
  Description of Artificial Sequence: Synthetic oligonucleotide
agugagcucucgccccgcc

SEQ ID NO: 901731 - RNA, 19 nt, Artificial Sequence
  Description of Artificial Sequence: Synthetic oligonucleotide
ucaauaccugcugcuaccu

SEQ ID NO: 901732 - RNA, 19 nt, Artificial Sequence
  Description of Artificial Sequence: Synthetic oligonucleotide
ggcaaguaugucuugcuuc

SEQ ID NO: 901733 - RNA, 19 nt, Artificial Sequence
  Description of Artificial Sequence: Synthetic oligonucleotide
cucacgaaccagacaguug

SEQ ID NO: 901734 - RNA, 19 nt, Artificial Sequence
  Description of Artificial Sequence: Synthetic oligonucleotide
aagcguuuccagccauugu

SEQ ID NO: 901735 - RNA, 19 nt, Artificial Sequence
  Description of Artificial Sequence: Synthetic oligonucleotide
ucgaauggagguaggccau

SEQ ID NO: 901736 - RNA, 19 nt, Artificial Sequence
  Description of Artificial Sequence: Synthetic oligonucleotide
uugguggacaguagcgguc

SEQ ID NO: 901737 - RNA, 19 nt, Artificial Sequence
  Description of Artificial Sequence: Synthetic oligonucleotide
uaguucggggcagauaauc

SEQ ID NO: 901738 - RNA, 19 nt, Artificial Sequence
  Description of Artificial Sequence: Synthetic oligonucleotide
cuccucgucaaaccggaug

SEQ ID NO: 901739 - RNA, 19 nt, Artificial Sequence
  Description of Artificial Sequence: Synthetic oligonucleotide
agauaaucggggucugcau

SEQ ID NO: 901740 - RNA, 19 nt, Artificial Sequence
  Description of Artificial Sequence: Synthetic oligonucleotide
uuuacaaaagagggccuuu

SEQ ID NO: 901741 - RNA, 19 nt, Artificial Sequence
  Description of Artificial Sequence: Synthetic oligonucleotide
aaggcaaaucagggccugg

SEQ ID NO: 901742 - RNA, 19 nt, Artificial Sequence
  Description of Artificial Sequence: Synthetic oligonucleotide
uccgaccucugcugugugg

SEQ ID NO: 901743 - RNA, 19 nt, Artificial Sequence
  Description of Artificial Sequence: Synthetic oligonucleotide
uaccugcuucucacuaaag

SEQ ID NO: 901744 - RNA, 19 nt, Artificial Sequence
  Description of Artificial Sequence: Synthetic oligonucleotide
acaauuugguggacaguag

SEQ ID NO: 901745 - RNA, 19 nt, Artificial Sequence
  Description of Artificial Sequence: Synthetic oligonucleotide
cuugagggaucccugcuca

SEQ ID NO: 901746 - RNA, 19 nt, Artificial Sequence
  Description of Artificial Sequence: Synthetic oligonucleotide
agauggaccuccaagcaaa

SEQ ID NO: 901747 - RNA, 19 nt, Artificial Sequence
  Description of Artificial Sequence: Synthetic oligonucleotide
aggcaaaucagggccuggg

SEQ ID NO: 901748 - RNA, 19 nt, Artificial Sequence
  Description of Artificial Sequence: Synthetic oligonucleotide
ccaaacgucggccaccacc

SEQ ID NO: 901749 - RNA, 19 nt, Artificial Sequence
  Description of Artificial Sequence: Synthetic oligonucleotide
aaggcagggcaaugcgacu

SEQ ID NO: 901750 - RNA, 19 nt, Artificial Sequence
  Description of Artificial Sequence: Synthetic oligonucleotide
ucccugaccagaguucaug

SEQ ID NO: 901751 - RNA, 19 nt, Artificial Sequence
  Description of Artificial Sequence: Synthetic oligonucleotide
gccaagugcaugcgaagcg

SEQ ID NO: 901752 - RNA, 19 nt, Artificial Sequence
  Description of Artificial Sequence: Synthetic oligonucleotide
uucucacuaaaguggcuuu

SEQ ID NO: 901753 - RNA, 19 nt, Artificial Sequence
  Description of Artificial Sequence: Synthetic oligonucleotide
aguggggagagacccgaga

SEQ ID NO: 901754 - RNA, 19 nt, Artificial Sequence
  Description of Artificial Sequence: Synthetic oligonucleotide
caccgcaugaccuucaccu

SEQ ID NO: 901755 - RNA, 19 nt, Artificial Sequence
  Description of Artificial Sequence: Synthetic oligonucleotide
agcaccgcaugaccuucac

SEQ ID NO: 901756 - RNA, 19 nt, Artificial Sequence
  Description of Artificial Sequence: Synthetic oligonucleotide
cacccaaggaggacacggg

SEQ ID NO: 901757 - RNA, 19 nt, Artificial Sequence
  Description of Artificial Sequence: Synthetic oligonucleotide
cccuaaaaucccagcagcg

SEQ ID NO: 901758 - RNA, 19 nt, Artificial Sequence
  Description of Artificial Sequence: Synthetic oligonucleotide
cucgcuggggaagaaugcc

SEQ ID NO: 901759 - RNA, 19 nt, Artificial Sequence
  Description of Artificial Sequence: Synthetic oligonucleotide
uucucacgaaccagacagu

SEQ ID NO: 901760 - RNA, 19 nt, Artificial Sequence
  Description of Artificial Sequence: Synthetic oligonucleotide
ucaaaccggaugaguuccu

SEQ ID NO: 901761 - RNA, 19 nt, Artificial Sequence
  Description of Artificial Sequence: Synthetic oligonucleotide
augcaauguccuugguuca

SEQ ID NO: 901762 - RNA, 19 nt, Artificial Sequence
  Description of Artificial Sequence: Synthetic oligonucleotide
ccuaaaaucccagcagcgg

SEQ ID NO: 901763 - RNA, 19 nt, Artificial Sequence
  Description of Artificial Sequence: Synthetic oligonucleotide
gaaggcaaaucagggccug

SEQ ID NO: 901764 - RNA, 19 nt, Artificial Sequence
  Description of Artificial Sequence: Synthetic oligonucleotide
guucgggugcuccaagcac

SEQ ID NO: 901765 - RNA, 19 nt, Artificial Sequence
  Description of Artificial Sequence: Synthetic oligonucleotide
cacguucuuguucucacga

SEQ ID NO: 901766 - RNA, 19 nt, Artificial Sequence
  Description of Artificial Sequence: Synthetic oligonucleotide
ucucacgaaccagacaguu

SEQ ID NO: 901767 - RNA, 19 nt, Artificial Sequence
  Description of Artificial Sequence: Synthetic oligonucleotide
gcuacagcuguuaugaaaa

SEQ ID NO: 901768 - RNA, 19 nt, Artificial Sequence
  Description of Artificial Sequence: Synthetic oligonucleotide
ccuccaagcaaaagcgagg

SEQ ID NO: 901769 - RNA, 19 nt, Artificial Sequence
  Description of Artificial Sequence: Synthetic oligonucleotide
cucuguccgaccucugcug

SEQ ID NO: 901770 - RNA, 19 nt, Artificial Sequence
  Description of Artificial Sequence: Synthetic oligonucleotide
agcccaaacgucggccacc

SEQ ID NO: 901771 - RNA, 19 nt, Artificial Sequence
  Description of Artificial Sequence: Synthetic oligonucleotide
gggucuccucgucaaaccg

SEQ ID NO: 901772 - RNA, 19 nt, Artificial Sequence
  Description of Artificial Sequence: Synthetic oligonucleotide
augcgacugaccaugugug

SEQ ID NO: 901773 - RNA, 19 nt, Artificial Sequence
  Description of Artificial Sequence: Synthetic oligonucleotide
ugcugcuaccuagaucccc

SEQ ID NO: 901774 - RNA, 19 nt, Artificial Sequence
  Description of Artificial Sequence: Synthetic oligonucleotide
uguacucggugaugaaguu

SEQ ID NO: 901775 - RNA, 19 nt, Artificial Sequence
  Description of Artificial Sequence: Synthetic oligonucleotide
ugcauggaaugcguccagc

SEQ ID NO: 901776 - RNA, 19 nt, Artificial Sequence
  Description of Artificial Sequence: Synthetic oligonucleotide
ucacucgcccaauaaucua

SEQ ID NO: 901777 - RNA, 19 nt, Artificial Sequence
  Description of Artificial Sequence: Synthetic oligonucleotide
gugggaucagaccucuauc

SEQ ID NO: 901778 - RNA, 19 nt, Artificial Sequence
  Description of Artificial Sequence: Synthetic oligonucleotide
cagggcaaugcgacugacc

SEQ ID NO: 901779 - RNA, 19 nt, Artificial Sequence
  Description of Artificial Sequence: Synthetic oligonucleotide
ggagagacccgagaggaug

SEQ ID NO: 901780 - RNA, 19 nt, Artificial Sequence
  Description of Artificial Sequence: Synthetic oligonucleotide
gacccgagaggaugcugag

SEQ ID NO: 901781 - RNA, 19 nt, Artificial Sequence
  Description of Artificial Sequence: Synthetic oligonucleotide
gugcaugcgaagcguuucc

SEQ ID NO: 901782 - RNA, 19 nt, Artificial Sequence
  Description of Artificial Sequence: Synthetic oligonucleotide
ugcgacugaccaugugugu

SEQ ID NO: 901783 - RNA, 19 nt, Artificial Sequence
  Description of Artificial Sequence: Synthetic oligonucleotide
gauaaucggggucugcauu

SEQ ID NO: 901784 - RNA, 19 nt, Artificial Sequence
  Description of Artificial Sequence: Synthetic oligonucleotide
gaucagaccucuaucugcu

SEQ ID NO: 901785 - RNA, 19 nt, Artificial Sequence
  Description of Artificial Sequence: Synthetic oligonucleotide
ugcauucacucgcccaaua

SEQ ID NO: 901786 - RNA, 19 nt, Artificial Sequence
  Description of Artificial Sequence: Synthetic oligonucleotide
ucuaucugcuuugggguuu

SEQ ID NO: 901787 - RNA, 19 nt, Artificial Sequence
  Description of Artificial Sequence: Synthetic oligonucleotide
gcacccaaggaggacacgg

SEQ ID NO: 901788 - RNA, 19 nt, Artificial Sequence
  Description of Artificial Sequence: Synthetic oligonucleotide
agcacaccgaugaacuuga

SEQ ID NO: 901789 - RNA, 19 nt, Artificial Sequence
  Description of Artificial Sequence: Synthetic oligonucleotide
ccccuaaaaucccagcagc

SEQ ID NO: 901790 - RNA, 19 nt, Artificial Sequence
  Description of Artificial Sequence: Synthetic oligonucleotide
gggaucagaccucuaucug

SEQ ID NO: 901791 - RNA, 19 nt, Artificial Sequence
  Description of Artificial Sequence: Synthetic oligonucleotide
cucgcccaauaaucuagac

SEQ ID NO: 901792 - RNA, 19 nt, Artificial Sequence
  Description of Artificial Sequence: Synthetic oligonucleotide
cagauaaucggggucugca

SEQ ID NO: 901793 - RNA, 19 nt, Artificial Sequence
  Description of Artificial Sequence: Synthetic oligonucleotide
cuaagagugccucccuuaa

SEQ ID NO: 901794 - RNA, 19 nt, Artificial Sequence
  Description of Artificial Sequence: Synthetic oligonucleotide
agcgagggccacugccugg

SEQ ID NO: 901795 - RNA, 19 nt, Artificial Sequence
  Description of Artificial Sequence: Synthetic oligonucleotide
ggaagaaugccagcaggug

SEQ ID NO: 901796 - RNA, 19 nt, Artificial Sequence
  Description of Artificial Sequence: Synthetic oligonucleotide
aggcaaguaugucuugcuu

SEQ ID NO: 901797 - RNA, 19 nt, Artificial Sequence
  Description of Artificial Sequence: Synthetic oligonucleotide
aggcagggcaaugcgacug

SEQ ID NO: 901798 - RNA, 19 nt, Artificial Sequence
  Description of Artificial Sequence: Synthetic oligonucleotide
ugcaauguccuugguucaa

SEQ ID NO: 901799 - RNA, 19 nt, Artificial Sequence
  Description of Artificial Sequence: Synthetic oligonucleotide
uaaucggggucugcauuca

SEQ ID NO: 901800 - RNA, 19 nt, Artificial Sequence
  Description of Artificial Sequence: Synthetic oligonucleotide
uugagcacguucgggugcu

SEQ ID NO: 901801 - RNA, 19 nt, Artificial Sequence
  Description of Artificial Sequence: Synthetic oligonucleotide
ugcaugcgaagcguuucca

SEQ ID NO: 901802 - RNA, 19 nt, Artificial Sequence
  Description of Artificial Sequence: Synthetic oligonucleotide
ccccacacagaaagaaagg

SEQ ID NO: 901803 - RNA, 19 nt, Artificial Sequence
  Description of Artificial Sequence: Synthetic oligonucleotide
ucgagccagcccaaacguc

SEQ ID NO: 901804 - RNA, 19 nt, Artificial Sequence
  Description of Artificial Sequence: Synthetic oligonucleotide
agcccugccucgcugggga

SEQ ID NO: 901805 - RNA, 19 nt, Artificial Sequence
  Description of Artificial Sequence: Synthetic oligonucleotide
ugagggaucccugcucauc

SEQ ID NO: 901806 - RNA, 19 nt, Artificial Sequence
  Description of Artificial Sequence: Synthetic oligonucleotide
gagguaaggcagggcaaug

SEQ ID NO: 901807 - RNA, 19 nt, Artificial Sequence
  Description of Artificial Sequence: Synthetic oligonucleotide
ggucuccucgucaaaccgg

SEQ ID NO: 901808 - RNA, 19 nt, Artificial Sequence
  Description of Artificial Sequence: Synthetic oligonucleotide
acguucuuguucucacgaa

SEQ ID NO: 901809 - RNA, 19 nt, Artificial Sequence
  Description of Artificial Sequence: Synthetic oligonucleotide
uucugaaucuggguucauu

SEQ ID NO: 901810 - RNA, 19 nt, Artificial Sequence
  Description of Artificial Sequence: Synthetic oligonucleotide
gaggcaaguaugucuugcu

SEQ ID NO: 901811 - RNA, 19 nt, Artificial Sequence
  Description of Artificial Sequence: Synthetic oligonucleotide
augaugccucuaagagugc

SEQ ID NO: 901812 - RNA, 19 nt, Artificial Sequence
  Description of Artificial Sequence: Synthetic oligonucleotide
gcaugcgaagcguuuccag

SEQ ID NO: 901813 - RNA, 19 nt, Artificial Sequence
  Description of Artificial Sequence: Synthetic oligonucleotide
gaaucuggguucauuccua

SEQ ID NO: 901814 - RNA, 19 nt, Artificial Sequence
  Description of Artificial Sequence: Synthetic oligonucleotide
guaaggcagggcaaugcga

SEQ ID NO: 901815 - RNA, 19 nt, Artificial Sequence
  Description of Artificial Sequence: Synthetic oligonucleotide
auggaccuccaagcaaaag

SEQ ID NO: 901816 - RNA, 19 nt, Artificial Sequence
  Description of Artificial Sequence: Synthetic oligonucleotide
caaaagcgagggccacugc

SEQ ID NO: 901817 - RNA, 19 nt, Artificial Sequence
  Description of Artificial Sequence: Synthetic oligonucleotide
gggagguugagggucucgg

SEQ ID NO: 901818 - RNA, 19 nt, Artificial Sequence
  Description of Artificial Sequence: Synthetic oligonucleotide
aggaaucuggugagggugu

SEQ ID NO: 901819 - RNA, 19 nt, Artificial Sequence
  Description of Artificial Sequence: Synthetic oligonucleotide
gcaaaagcgagggccacug

SEQ ID NO: 901820 - RNA, 19 nt, Artificial Sequence
  Description of Artificial Sequence: Synthetic oligonucleotide
guggcaggugaccagccaa

SEQ ID NO: 901821 - RNA, 19 nt, Artificial Sequence
  Description of Artificial Sequence: Synthetic oligonucleotide
aagugcaugcgaagcguuu

SEQ ID NO: 901822 - RNA, 19 nt, Artificial Sequence
  Description of Artificial Sequence: Synthetic oligonucleotide
gagcacguucgggugcucc

SEQ ID NO: 901823 - RNA, 19 nt, Artificial Sequence
  Description of Artificial Sequence: Synthetic oligonucleotide
gccucccuuaauguacucg

SEQ ID NO: 901824 - RNA, 19 nt, Artificial Sequence
  Description of Artificial Sequence: Synthetic oligonucleotide
gucgagccagcccaaacgu

SEQ ID NO: 901825 - RNA, 19 nt, Artificial Sequence
  Description of Artificial Sequence: Synthetic oligonucleotide
caagcaccgcaugaccuuc

SEQ ID NO: 901826 - RNA, 19 nt, Artificial Sequence
  Description of Artificial Sequence: Synthetic oligonucleotide
acggguacuggcuguccau

SEQ ID NO: 901827 - RNA, 19 nt, Artificial Sequence
  Description of Artificial Sequence: Synthetic oligonucleotide
cacguucgggugcuccaag

SEQ ID NO: 901828 - RNA, 19 nt, Artificial Sequence
  Description of Artificial Sequence: Synthetic oligonucleotide
cauucacucgcccaauaau

SEQ ID NO: 901829 - RNA, 19 nt, Artificial Sequence
  Description of Artificial Sequence: Synthetic oligonucleotide
gacugaccaugugugugca

SEQ ID NO: 901830 - RNA, 19 nt, Artificial Sequence
  Description of Artificial Sequence: Synthetic oligonucleotide
ugguggauggcugccucau

SEQ ID NO: 901831 - RNA, 19 nt, Artificial Sequence
  Description of Artificial Sequence: Synthetic oligonucleotide
ucagccgcuuguccuugua

SEQ ID NO: 901832 - RNA, 19 nt, Artificial Sequence
  Description of Artificial Sequence: Synthetic oligonucleotide
gcgacugaccaugugugug

SEQ ID NO: 901833 - RNA, 19 nt, Artificial Sequence
  Description of Artificial Sequence: Synthetic oligonucleotide
uugagggaucccugcucau

SEQ ID NO: 901834 - RNA, 19 nt, Artificial Sequence
  Description of Artificial Sequence: Synthetic oligonucleotide
uccauaguucggggcagau

SEQ ID NO: 901835 - RNA, 19 nt, Artificial Sequence
  Description of Artificial Sequence: Synthetic oligonucleotide
ugguuccacugggaucugc

SEQ ID NO: 901836 - RNA, 19 nt, Artificial Sequence
  Description of Artificial Sequence: Synthetic oligonucleotide
ccacguucuuguucucacg

SEQ ID NO: 901837 - RNA, 19 nt, Artificial Sequence
  Description of Artificial Sequence: Synthetic oligonucleotide
gugaugcauggaaugcguc

SEQ ID NO: 901838 - RNA, 19 nt, Artificial Sequence
  Description of Artificial Sequence: Synthetic oligonucleotide
gagugaggaaauggcccuc

SEQ ID NO: 901839 - RNA, 19 nt, Artificial Sequence
  Description of Artificial Sequence: Synthetic oligonucleotide
ccgaccucugcuguguggg

SEQ ID NO: 901840 - RNA, 19 nt, Artificial Sequence
  Description of Artificial Sequence: Synthetic oligonucleotide
ccaugagucgagccagccc

SEQ ID NO: 901841 - RNA, 19 nt, Artificial Sequence
  Description of Artificial Sequence: Synthetic oligonucleotide
gggugcuccaagcaccgca

SEQ ID NO: 901842 - RNA, 19 nt, Artificial Sequence
  Description of Artificial Sequence: Synthetic oligonucleotide
cuagacugacucuucucau

SEQ ID NO: 901843 - RNA, 19 nt, Artificial Sequence
  Description of Artificial Sequence: Synthetic oligonucleotide
caaagcugacccucugacu

SEQ ID NO: 901844 - RNA, 19 nt, Artificial Sequence
  Description of Artificial Sequence: Synthetic oligonucleotide
gcauucacucgcccaauaa

SEQ ID NO: 901845 - RNA, 19 nt, Artificial Sequence
  Description of Artificial Sequence: Synthetic oligonucleotide
cagcccaaacgucggccac

SEQ ID NO: 901846 - RNA, 19 nt, Artificial Sequence
  Description of Artificial Sequence: Synthetic oligonucleotide
agcgcacagugauggggaa

SEQ ID NO: 901847 - RNA, 19 nt, Artificial Sequence
  Description of Artificial Sequence: Synthetic oligonucleotide
gauggaccuccaagcaaaa

SEQ ID NO: 901848 - RNA, 19 nt, Artificial Sequence
  Description of Artificial Sequence: Synthetic oligonucleotide
caguggggagagacccgag

SEQ ID NO: 901849 - RNA, 19 nt, Artificial Sequence
  Description of Artificial Sequence: Synthetic oligonucleotide
ugagucgagccagcccaaa

SEQ ID NO: 901850 - RNA, 19 nt, Artificial Sequence
  Description of Artificial Sequence: Synthetic oligonucleotide
aucagaccucuaucugcuu

SEQ ID NO: 901851 - RNA, 19 nt, Artificial Sequence
  Description of Artificial Sequence: Synthetic oligonucleotide
cuuuacaaaagagggccuu

SEQ ID NO: 901852 - RNA, 19 nt, Artificial Sequence
  Description of Artificial Sequence: Synthetic oligonucleotide
gacucccuguuggguuagg

SEQ ID NO: 901853 - RNA, 19 nt, Artificial Sequence
  Description of Artificial Sequence: Synthetic oligonucleotide
cucucgccccgccgguagg

SEQ ID NO: 901854 - RNA, 19 nt, Artificial Sequence
  Description of Artificial Sequence: Synthetic oligonucleotide
ccuugagggaucccugcuc

SEQ ID NO: 901855 - RNA, 19 nt, Artificial Sequence
  Description of Artificial Sequence: Synthetic oligonucleotide
cagccccacacagaaagaa

SEQ ID NO: 901856 - RNA, 19 nt, Artificial Sequence
  Description of Artificial Sequence: Synthetic oligonucleotide
guaugggucuggggcacca

SEQ ID NO: 901857 - RNA, 19 nt, Artificial Sequence
  Description of Artificial Sequence: Synthetic oligonucleotide
gcauggaaugcguccagcu

SEQ ID NO: 901858 - RNA, 19 nt, Artificial Sequence
  Description of Artificial Sequence: Synthetic oligonucleotide
ucucgccccgccgguaggu

SEQ ID NO: 901859 - RNA, 19 nt, Artificial Sequence
  Description of Artificial Sequence: Synthetic oligonucleotide
gggucugcauucacucgcc

SEQ ID NO: 901860 - RNA, 19 nt, Artificial Sequence
  Description of Artificial Sequence: Synthetic oligonucleotide
ucggugggaugauguucau

SEQ ID NO: 901861 - RNA, 19 nt, Artificial Sequence
  Description of Artificial Sequence: Synthetic oligonucleotide
ggugaugcauggaaugcgu

SEQ ID NO: 901862 - RNA, 19 nt, Artificial Sequence
  Description of Artificial Sequence: Synthetic oligonucleotide
ggaggcacagaaucguuuu

SEQ ID NO: 901863 - RNA, 19 nt, Artificial Sequence
  Description of Artificial Sequence: Synthetic oligonucleotide
cauggaaugcguccagcuu

SEQ ID NO: 901864 - RNA, 19 nt, Artificial Sequence
  Description of Artificial Sequence: Synthetic oligonucleotide
gcagauaaucggggucugc

SEQ ID NO: 901865 - RNA, 19 nt, Artificial Sequence
  Description of Artificial Sequence: Synthetic oligonucleotide
guccgaccucugcugugug

SEQ ID NO: 901866 - RNA, 19 nt, Artificial Sequence
  Description of Artificial Sequence: Synthetic oligonucleotide
gggaagaaugccagcaggu

SEQ ID NO: 901867 - RNA, 19 nt, Artificial Sequence
  Description of Artificial Sequence: Synthetic oligonucleotide
gcucucgccccgccgguag

SEQ ID NO: 901868 - RNA, 19 nt, Artificial Sequence
  Description of Artificial Sequence: Synthetic oligonucleotide
ggaauccuggacucccugu

SEQ ID NO: 901869 - RNA, 19 nt, Artificial Sequence
  Description of Artificial Sequence: Synthetic oligonucleotide
gcuucccugaccagaguuc

SEQ ID NO: 901870 - RNA, 19 nt, Artificial Sequence
  Description of Artificial Sequence: Synthetic oligonucleotide
gugcacugagaaagcuuca

SEQ ID NO: 901871 - RNA, 19 nt, Artificial Sequence
  Description of Artificial Sequence: Synthetic oligonucleotide
caugugggaucagaccucu

SEQ ID NO: 901872 - RNA, 19 nt, Artificial Sequence
  Description of Artificial Sequence: Synthetic oligonucleotide
ugccucgcuggggaagaau

SEQ ID NO: 901873 - RNA, 19 nt, Artificial Sequence
  Description of Artificial Sequence: Synthetic oligonucleotide
caauaccugcugcuaccua

SEQ ID NO: 901874 - RNA, 19 nt, Artificial Sequence
  Description of Artificial Sequence: Synthetic oligonucleotide
cagcccugccucgcugggg

SEQ ID NO: 901875 - RNA, 19 nt, Artificial Sequence
  Description of Artificial Sequence: Synthetic oligonucleotide
caagugcaugcgaagcguu

SEQ ID NO: 901876 - RNA, 19 nt, Artificial Sequence
  Description of Artificial Sequence: Synthetic oligonucleotide
cacggggcugcuccagcca

SEQ ID NO: 901877 - RNA, 19 nt, Artificial Sequence
  Description of Artificial Sequence: Synthetic oligonucleotide
gaaucuggugaggguguau

SEQ ID NO: 901878 - RNA, 19 nt, Artificial Sequence
  Description of Artificial Sequence: Synthetic oligonucleotide
gcugugugggcugagcccu

SEQ ID NO: 901879 - RNA, 19 nt, Artificial Sequence
  Description of Artificial Sequence: Synthetic oligonucleotide
cggggucugcauucacucg

SEQ ID NO: 901880 - RNA, 19 nt, Artificial Sequence
  Description of Artificial Sequence: Synthetic oligonucleotide
guggacaguagcgguccaa

SEQ ID NO: 901881 - RNA, 19 nt, Artificial Sequence
  Description of Artificial Sequence: Synthetic oligonucleotide
guccauaguucggggcaga

SEQ ID NO: 901882 - RNA, 19 nt, Artificial Sequence
  Description of Artificial Sequence: Synthetic oligonucleotide
ccgcacauugaggccaaag

SEQ ID NO: 901883 - RNA, 19 nt, Artificial Sequence
  Description of Artificial Sequence: Synthetic oligonucleotide
ggucucggugggaugaugu

SEQ ID NO: 901884 - RNA, 19 nt, Artificial Sequence
  Description of Artificial Sequence: Synthetic oligonucleotide
ccaaggaggacacggggcu

SEQ ID NO: 901885 - RNA, 19 nt, Artificial Sequence
  Description of Artificial Sequence: Synthetic oligonucleotide
gguucaaagcugacccucu

SEQ ID NO: 901886 - RNA, 19 nt, Artificial Sequence
  Description of Artificial Sequence: Synthetic oligonucleotide
gguuccacugggaucugcu

SEQ ID NO: 901887 - RNA, 19 nt, Artificial Sequence
  Description of Artificial Sequence: Synthetic oligonucleotide
ccgagaggaugcugagaug

SEQ ID NO: 901888 - RNA, 19 nt, Artificial Sequence
  Description of Artificial Sequence: Synthetic oligonucleotide
gcgcacagugauggggaag

SEQ ID NO: 901889 - RNA, 19 nt, Artificial Sequence
  Description of Artificial Sequence: Synthetic oligonucleotide
ggcacagaaucguuuuauu

SEQ ID NO: 901890 - RNA, 19 nt, Artificial Sequence
  Description of Artificial Sequence: Synthetic oligonucleotide
guuggguuaggggcucacu

SEQ ID NO: 901891 - RNA, 19 nt, Artificial Sequence
  Description of Artificial Sequence: Synthetic oligonucleotide
gaaugccagcaggugcagu

SEQ ID NO: 901892 - RNA, 19 nt, Artificial Sequence
  Description of Artificial Sequence: Synthetic oligonucleotide
ccuuaauguacucggugau

SEQ ID NO: 901893 - RNA, 19 nt, Artificial Sequence
  Description of Artificial Sequence: Synthetic oligonucleotide
agccauuguuccagcuuua

SEQ ID NO: 901894 - RNA, 19 nt, Artificial Sequence
  Description of Artificial Sequence: Synthetic oligonucleotide
uaucugcuuugggguuuau

SEQ ID NO: 901895 - RNA, 19 nt, Artificial Sequence
  Description of Artificial Sequence: Synthetic oligonucleotide
ccucgucaaaccggaugag

SEQ ID NO: 901896 - RNA, 19 nt, Artificial Sequence
  Description of Artificial Sequence: Synthetic oligonucleotide
guccucugggucuccucgu

SEQ ID NO: 901897 - RNA, 19 nt, Artificial Sequence
  Description of Artificial Sequence: Synthetic oligonucleotide
ccagcccugccucgcuggg

SEQ ID NO: 901898 - RNA, 19 nt, Artificial Sequence
  Description of Artificial Sequence: Synthetic oligonucleotide
cagugcggaugcugcaggu

SEQ ID NO: 901899 - RNA, 19 nt, Artificial Sequence
  Description of Artificial Sequence: Synthetic oligonucleotide
ugagcacguucgggugcuc

SEQ ID NO: 901900 - RNA, 19 nt, Artificial Sequence
  Description of Artificial Sequence: Synthetic oligonucleotide
cacugggaucugcucagau

SEQ ID NO: 901901 - RNA, 19 nt, Artificial Sequence
  Description of Artificial Sequence: Synthetic oligonucleotide
ggaaugcguccagcuuccc

SEQ ID NO: 901902 - RNA, 19 nt, Artificial Sequence
  Description of Artificial Sequence: Synthetic oligonucleotide
cguucgggugcuccaagca

SEQ ID NO: 901903 - RNA, 19 nt, Artificial Sequence
  Description of Artificial Sequence: Synthetic oligonucleotide
gggucucggugggaugaug

SEQ ID NO: 901904 - RNA, 19 nt, Artificial Sequence
  Description of Artificial Sequence: Synthetic oligonucleotide
cccucugacuccacgggua

SEQ ID NO: 901905 - RNA, 19 nt, Artificial Sequence
  Description of Artificial Sequence: Synthetic oligonucleotide
gcccaguggcaggugacca

SEQ ID NO: 901906 - RNA, 19 nt, Artificial Sequence
  Description of Artificial Sequence: Synthetic oligonucleotide
ggaaucuggugagggugua

SEQ ID NO: 901907 - RNA, 19 nt, Artificial Sequence
  Description of Artificial Sequence: Synthetic oligonucleotide
cgguccaagaaaccccgca

SEQ ID NO: 901908 - RNA, 19 nt, Artificial Sequence
  Description of Artificial Sequence: Synthetic oligonucleotide
gagcucucgccccgccggu

SEQ ID NO: 901909 - RNA, 19 nt, Artificial Sequence
  Description of Artificial Sequence: Synthetic oligonucleotide
gggcucaaucaggaaccuc

SEQ ID NO: 901910 - RNA, 19 nt, Artificial Sequence
  Description of Artificial Sequence: Synthetic oligonucleotide
ccaagugcaugcgaagcgu

SEQ ID NO: 901911 - RNA, 19 nt, Artificial Sequence
  Description of Artificial Sequence: Synthetic oligonucleotide
cucgccccgccgguagguc

SEQ ID NO: 901912 - RNA, 19 nt, Artificial Sequence
  Description of Artificial Sequence: Synthetic oligonucleotide
cuguuggguuaggggcuca

SEQ ID NO: 901913 - RNA, 19 nt, Artificial Sequence
  Description of Artificial Sequence: Synthetic oligonucleotide
ggugcuccaagcaccgcau

SEQ ID NO: 901914 - RNA, 19 nt, Artificial Sequence
  Description of Artificial Sequence: Synthetic oligonucleotide
ccaggcaucaccugcccuu

SEQ ID NO: 901915 - RNA, 19 nt, Artificial Sequence
  Description of Artificial Sequence: Synthetic oligonucleotide
ccucuguccgaccucugcu

SEQ ID NO: 901916 - RNA, 19 nt, Artificial Sequence
  Description of Artificial Sequence: Synthetic oligonucleotide
ccacggguacuggcugucc

SEQ ID NO: 901917 - RNA, 19 nt, Artificial Sequence
  Description of Artificial Sequence: Synthetic oligonucleotide
gcacaccgaugaacuugag

SEQ ID NO: 901918 - RNA, 19 nt, Artificial Sequence
  Description of Artificial Sequence: Synthetic oligonucleotide
caaaccggaugaguuccuu

SEQ ID NO: 901919 - RNA, 19 nt, Artificial Sequence
  Description of Artificial Sequence: Synthetic oligonucleotide
cccugccucgcuggggaag

SEQ ID NO: 901920 - RNA, 19 nt, Artificial Sequence
  Description of Artificial Sequence: Synthetic oligonucleotide
gcuucucacuaaaguggcu

SEQ ID NO: 901921 - RNA, 19 nt, Artificial Sequence
  Description of Artificial Sequence: Synthetic oligonucleotide
agcucucgccccgccggua

SEQ ID NO: 901922 - RNA, 19 nt, Artificial Sequence
  Description of Artificial Sequence: Synthetic oligonucleotide
augugggaucagaccucua

SEQ ID NO: 901923 - RNA, 19 nt, Artificial Sequence
  Description of Artificial Sequence: Synthetic oligonucleotide
gcacguucgggugcuccaa

SEQ ID NO: 901924 - RNA, 19 nt, Artificial Sequence
  Description of Artificial Sequence: Synthetic oligonucleotide
ccaagcaccgcaugaccuu

SEQ ID NO: 901925 - RNA, 19 nt, Artificial Sequence
  Description of Artificial Sequence: Synthetic oligonucleotide
gccaucccugaugcaaugu

SEQ ID NO: 901926 - RNA, 19 nt, Artificial Sequence
  Description of Artificial Sequence: Synthetic oligonucleotide
gcgaagcguuuccagccau

SEQ ID NO: 901927 - RNA, 19 nt, Artificial Sequence
  Description of Artificial Sequence: Synthetic oligonucleotide
cugcauucacucgcccaau

SEQ ID NO: 901928 - RNA, 19 nt, Artificial Sequence
  Description of Artificial Sequence: Synthetic oligonucleotide
ccucuaagagugccucccu

SEQ ID NO: 901929 - RNA, 19 nt, Artificial Sequence
  Description of Artificial Sequence: Synthetic oligonucleotide
cccgccgguaggucuccca

SEQ ID NO: 901930 - RNA, 19 nt, Artificial Sequence
  Description of Artificial Sequence: Synthetic oligonucleotide
cccaaacgucggccaccac

SEQ ID NO: 901931 - RNA, 19 nt, Artificial Sequence
  Description of Artificial Sequence: Synthetic oligonucleotide
cgccccgccgguaggucuc

SEQ ID NO: 901932 - RNA, 19 nt, Artificial Sequence
  Description of Artificial Sequence: Synthetic oligonucleotide
gggagagacccgagaggau

SEQ ID NO: 901933 - RNA, 19 nt, Artificial Sequence
  Description of Artificial Sequence: Synthetic oligonucleotide
cgggugcuccaagcaccgc

SEQ ID NO: 901934 - RNA, 19 nt, Artificial Sequence
  Description of Artificial Sequence: Synthetic oligonucleotide
ccgccccacccaccuaaaa

SEQ ID NO: 901935 - RNA, 19 nt, Artificial Sequence
  Description of Artificial Sequence: Synthetic oligonucleotide
cgaagcguuuccagccauu

SEQ ID NO: 901936 - RNA, 19 nt, Artificial Sequence
  Description of Artificial Sequence: Synthetic oligonucleotide
cccgccccacccaccuaaa

SEQ ID NO: 901937 - RNA, 19 nt, Artificial Sequence
  Description of Artificial Sequence: Synthetic oligonucleotide
aguauaaucagguaugucc

SEQ ID NO: 901938 - RNA, 19 nt, Artificial Sequence
  Description of Artificial Sequence: Synthetic oligonucleotide
aauauauaugauuuggaac

SEQ ID NO: 901939 - RNA, 19 nt, Artificial Sequence
  Description of Artificial Sequence: Synthetic oligonucleotide
uucacuagaacuaauguag

SEQ ID NO: 901940 - RNA, 19 nt, Artificial Sequence
  Description of Artificial Sequence: Synthetic oligonucleotide
auauauaugauuuggaaca

SEQ ID NO: 901941 - RNA, 19 nt, Artificial Sequence
  Description of Artificial Sequence: Synthetic oligonucleotide
aucaaaauuacuuucucuc

SEQ ID NO: 901942 - RNA, 19 nt, Artificial Sequence
  Description of Artificial Sequence: Synthetic oligonucleotide
uguaguuauugcuagacag

SEQ ID NO: 901943 - RNA, 19 nt, Artificial Sequence
  Description of Artificial Sequence: Synthetic oligonucleotide
uaaauagccaggcaagagg

SEQ ID NO: 901944 - RNA, 19 nt, Artificial Sequence
  Description of Artificial Sequence: Synthetic oligonucleotide
aauguaguuauugcuagac

SEQ ID NO: 901945 - RNA, 19 nt, Artificial Sequence
  Description of Artificial Sequence: Synthetic oligonucleotide
uuauccacaacuuaaacau

SEQ ID NO: 901946 - RNA, 19 nt, Artificial Sequence
  Description of Artificial Sequence: Synthetic oligonucleotide
aaugcaaaagcauucacua

SEQ ID NO: 901947 - RNA, 19 nt, Artificial Sequence
  Description of Artificial Sequence: Synthetic oligonucleotide
uuugucucaguccaggcag

SEQ ID NO: 901948 - RNA, 19 nt, Artificial Sequence
  Description of Artificial Sequence: Synthetic oligonucleotide
augcuaaagccauacaugg

SEQ ID NO: 901949 - RNA, 19 nt, Artificial Sequence
  Description of Artificial Sequence: Synthetic oligonucleotide
acugaagcaccauaggaac

SEQ ID NO: 901950 - RNA, 19 nt, Artificial Sequence
  Description of Artificial Sequence: Synthetic oligonucleotide
ugcaaaagcauucacuaga

SEQ ID NO: 901951 - RNA, 19 nt, Artificial Sequence
  Description of Artificial Sequence: Synthetic oligonucleotide
uuguagauuaggcacaugu

SEQ ID NO: 901952 - RNA, 19 nt, Artificial Sequence
  Description of Artificial Sequence: Synthetic oligonucleotide
aaaacgaaugaugaaauaa

SEQ ID NO: 901953 - RNA, 19 nt, Artificial Sequence
  Description of Artificial Sequence: Synthetic oligonucleotide
aaaguauugaguccaugca

SEQ ID NO: 901954 - RNA, 19 nt, Artificial Sequence
  Description of Artificial Sequence: Synthetic oligonucleotide
uaauucaggggccaggcag

SEQ ID NO: 901955 - RNA, 19 nt, Artificial Sequence
  Description of Artificial Sequence: Synthetic oligonucleotide
caaaguauugaguccaugc

SEQ ID NO: 901956 - RNA, 19 nt, Artificial Sequence
  Description of Artificial Sequence: Synthetic oligonucleotide
uauaugauuuggaacagaa

SEQ ID NO: 901957 - RNA, 19 nt, Artificial Sequence
  Description of Artificial Sequence: Synthetic oligonucleotide
aaaucguaaacccguaaga

SEQ ID NO: 901958 - RNA, 19 nt, Artificial Sequence
  Description of Artificial Sequence: Synthetic oligonucleotide
uuguuuggguaguugaugg

SEQ ID NO: 901959 - RNA, 19 nt, Artificial Sequence
  Description of Artificial Sequence: Synthetic oligonucleotide
aauuacuuucucucaacca

SEQ ID NO: 901960 - RNA, 19 nt, Artificial Sequence
  Description of Artificial Sequence: Synthetic oligonucleotide
acaggugauggcuaaauag

SEQ ID NO: 901961 - RNA, 19 nt, Artificial Sequence
  Description of Artificial Sequence: Synthetic oligonucleotide
aaacgaaugaugaaauaag

SEQ ID NO: 901962 - RNA, 19 nt, Artificial Sequence
  Description of Artificial Sequence: Synthetic oligonucleotide
agauuaggcacauguuucc

SEQ ID NO: 901963 - RNA, 19 nt, Artificial Sequence
  Description of Artificial Sequence: Synthetic oligonucleotide
ugaguaacuuuccccaagg

SEQ ID NO: 901964 - RNA, 19 nt, Artificial Sequence
  Description of Artificial Sequence: Synthetic oligonucleotide
ucuagagacuacuucuagg

SEQ ID NO: 901965 - RNA, 19 nt, Artificial Sequence
  Description of Artificial Sequence: Synthetic oligonucleotide
cagagaaccuaauucaggg

SEQ ID NO: 901966 - RNA, 19 nt, Artificial Sequence
  Description of Artificial Sequence: Synthetic oligonucleotide
ucguaaacccguaagaaaa

SEQ ID NO: 901967 - RNA, 19 nt, Artificial Sequence
  Description of Artificial Sequence: Synthetic oligonucleotide
augcaugccacagugaggc

SEQ ID NO: 901968 - RNA, 19 nt, Artificial Sequence
  Description of Artificial Sequence: Synthetic oligonucleotide
agaacuaauguaguuauug

SEQ ID NO: 901969 - RNA, 19 nt, Artificial Sequence
  Description of Artificial Sequence: Synthetic oligonucleotide
guuauugcuagacagguga

SEQ ID NO: 901970 - RNA, 19 nt, Artificial Sequence
  Description of Artificial Sequence: Synthetic oligonucleotide
auugcuagacaggugaugg

SEQ ID NO: 901971 - RNA, 19 nt, Artificial Sequence
  Description of Artificial Sequence: Synthetic oligonucleotide
ucucuuccaaccaaguccc

SEQ ID NO: 901972 - RNA, 19 nt, Artificial Sequence
  Description of Artificial Sequence: Synthetic oligonucleotide
aaccuauucccucccacuc

SEQ ID NO: 901973 - RNA, 19 nt, Artificial Sequence
  Description of Artificial Sequence: Synthetic oligonucleotide
uuugcaaccuauucccucc

SEQ ID NO: 901974 - RNA, 19 nt, Artificial Sequence
  Description of Artificial Sequence: Synthetic oligonucleotide
cuugauggaacuccuuugg

SEQ ID NO: 901975 - RNA, 19 nt, Artificial Sequence
  Description of Artificial Sequence: Synthetic oligonucleotide
uguagacaaaguauugagu

SEQ ID NO: 901976 - RNA, 19 nt, Artificial Sequence
  Description of Artificial Sequence: Synthetic oligonucleotide
uauaugcugggguucauca

SEQ ID NO: 901977 - RNA, 19 nt, Artificial Sequence
  Description of Artificial Sequence: Synthetic oligonucleotide
uagaauuuguacaauuaua

SEQ ID NO: 901978 - RNA, 19 nt, Artificial Sequence
  Description of Artificial Sequence: Synthetic oligonucleotide
agcuaguggugccagaagg

SEQ ID NO: 901979 - RNA, 19 nt, Artificial Sequence
  Description of Artificial Sequence: Synthetic oligonucleotide
uagauuaggcacauguuuc

SEQ ID NO: 901980 - RNA, 19 nt, Artificial Sequence
  Description of Artificial Sequence: Synthetic oligonucleotide
aaguauugaguccaugcau

SEQ ID NO: 901981 - RNA, 19 nt, Artificial Sequence
  Description of Artificial Sequence: Synthetic oligonucleotide
uagacaaaguauugagucc

SEQ ID NO: 901982 - RNA, 19 nt, Artificial Sequence
  Description of Artificial Sequence: Synthetic oligonucleotide
agaaguauaaucagguaug

SEQ ID NO: 901983 - RNA, 19 nt, Artificial Sequence
  Description of Artificial Sequence: Synthetic oligonucleotide
ucucucaaccaaauaauaa

SEQ ID NO: 901984 - RNA, 19 nt, Artificial Sequence
  Description of Artificial Sequence: Synthetic oligonucleotide
auucuuuguagauuaggca

SEQ ID NO: 901985 - RNA, 19 nt, Artificial Sequence
  Description of Artificial Sequence: Synthetic oligonucleotide
cuagagaaagcagaggcag

SEQ ID NO: 901986 - RNA, 19 nt, Artificial Sequence
  Description of Artificial Sequence: Synthetic oligonucleotide
uauuagaauuuguacaauu

SEQ ID NO: 901987 - RNA, 19 nt, Artificial Sequence
  Description of Artificial Sequence: Synthetic oligonucleotide
gagccugugcugcacaucg

SEQ ID NO: 901988 - RNA, 19 nt, Artificial Sequence
  Description of Artificial Sequence: Synthetic oligonucleotide
aauucaggggccaggcagc

SEQ ID NO: 901989 - RNA, 19 nt, Artificial Sequence
  Description of Artificial Sequence: Synthetic oligonucleotide
agguaugccaaucaccaug

SEQ ID NO: 901990 - RNA, 19 nt, Artificial Sequence
  Description of Artificial Sequence: Synthetic oligonucleotide
ucucugaguaacuuucccc

SEQ ID NO: 901991 - RNA, 19 nt, Artificial Sequence
  Description of Artificial Sequence: Synthetic oligonucleotide
uuuugucucaguccaggca

SEQ ID NO: 901992 - RNA, 19 nt, Artificial Sequence
  Description of Artificial Sequence: Synthetic oligonucleotide
gacuacaauuccuuugaug

SEQ ID NO: 901993 - RNA, 19 nt, Artificial Sequence
  Description of Artificial Sequence: Synthetic oligonucleotide
aagcagaaguauaaucagg

SEQ ID NO: 901994 - RNA, 19 nt, Artificial Sequence
  Description of Artificial Sequence: Synthetic oligonucleotide
agagaaccuaauucagggg

SEQ ID NO: 901995 - RNA, 19 nt, Artificial Sequence
  Description of Artificial Sequence: Synthetic oligonucleotide
aacgaaugaugaaauaagu

SEQ ID NO: 901996 - RNA, 19 nt, Artificial Sequence
  Description of Artificial Sequence: Synthetic oligonucleotide
acgaaugaugaaauaaguc

SEQ ID NO: 901997 - RNA, 19 nt, Artificial Sequence
  Description of Artificial Sequence: Synthetic oligonucleotide
cucauuagaacagugucug

SEQ ID NO: 901998 - RNA, 19 nt, Artificial Sequence
  Description of Artificial Sequence: Synthetic oligonucleotide
ugcuuggcauccaaauggg

SEQ ID NO: 901999 - RNA, 19 nt, Artificial Sequence
  Description of Artificial Sequence: Synthetic oligonucleotide
aaucguaaacccguaagaa

SEQ ID NO: 902000 - RNA, 19 nt, Artificial Sequence
  Description of Artificial Sequence: Synthetic oligonucleotide
guaguugauggccaggcug

SEQ ID NO: 902001 - RNA, 19 nt, Artificial Sequence
  Description of Artificial Sequence: Synthetic oligonucleotide
ugcacagugggccuacuug

SEQ ID NO: 902002 - RNA, 19 nt, Artificial Sequence
  Description of Artificial Sequence: Synthetic oligonucleotide
agacagaauccuucuagag

SEQ ID NO: 902003 - RNA, 19 nt, Artificial Sequence
  Description of Artificial Sequence: Synthetic oligonucleotide
guaguuauugcuagacagg

SEQ ID NO: 902004 - RNA, 19 nt, Artificial Sequence
  Description of Artificial Sequence: Synthetic oligonucleotide
agcugauauaaucaaaauu

SEQ ID NO: 902005 - RNA, 19 nt, Artificial Sequence
  Description of Artificial Sequence: Synthetic oligonucleotide
uaaacccguaagaaaacaa

SEQ ID NO: 902006 - RNA, 19 nt, Artificial Sequence
  Description of Artificial Sequence: Synthetic oligonucleotide
cucucauuagaacaguguc

SEQ ID NO: 902007 - RNA, 19 nt, Artificial Sequence
  Description of Artificial Sequence: Synthetic oligonucleotide
auagcagcgauguuuugca

SEQ ID NO: 902008 - RNA, 19 nt, Artificial Sequence
  Description of Artificial Sequence: Synthetic oligonucleotide
uucauuugcauaucuuauc

SEQ ID NO: 902009 - RNA, 19 nt, Artificial Sequence
  Description of Artificial Sequence: Synthetic oligonucleotide
caauauauaugauuuggaa

SEQ ID NO: 902010 - RNA, 19 nt, Artificial Sequence
  Description of Artificial Sequence: Synthetic oligonucleotide
aggugauggcuaaauagcc

SEQ ID NO: 902011 - RNA, 19 nt, Artificial Sequence
  Description of Artificial Sequence: Synthetic oligonucleotide
ucuucaaugcugugacucc

SEQ ID NO: 902012 - RNA, 19 nt, Artificial Sequence
  Description of Artificial Sequence: Synthetic oligonucleotide
ugauggcuaaauagccagg

SEQ ID NO: 902013 - RNA, 19 nt, Artificial Sequence
  Description of Artificial Sequence: Synthetic oligonucleotide
agaaccuaauucaggggcc

SEQ ID NO: 902014 - RNA, 19 nt, Artificial Sequence
  Description of Artificial Sequence: Synthetic oligonucleotide
uuagaggucugcuguaaac

SEQ ID NO: 902015 - RNA, 19 nt, Artificial Sequence
  Description of Artificial Sequence: Synthetic oligonucleotide
ugaugagacggcugcuugg

SEQ ID NO: 902016 - RNA, 19 nt, Artificial Sequence
  Description of Artificial Sequence: Synthetic oligonucleotide
cauagcaacaugagcuggc

SEQ ID NO: 902017 - RNA, 19 nt, Artificial Sequence
  Description of Artificial Sequence: Synthetic oligonucleotide
uaguuauugcuagacaggu

SEQ ID NO: 902018 - RNA, 19 nt, Artificial Sequence
  Description of Artificial Sequence: Synthetic oligonucleotide
auagcaacaugagcuggcc

SEQ ID NO: 902019 - RNA, 19 nt, Artificial Sequence
  Description of Artificial Sequence: Synthetic oligonucleotide
aguauugaguccaugcaug

SEQ ID NO: 902020 - RNA, 19 nt, Artificial Sequence
  Description of Artificial Sequence: Synthetic oligonucleotide
agacaaaguauugagucca

SEQ ID NO: 902021 - RNA, 19 nt, Artificial Sequence
  Description of Artificial Sequence: Synthetic oligonucleotide
ugugguugguuucccaacu

SEQ ID NO: 902022 - RNA, 19 nt, Artificial Sequence
  Description of Artificial Sequence: Synthetic oligonucleotide
gauggcaagccugagcagc

SEQ ID NO: 902023 - RNA, 19 nt, Artificial Sequence
  Description of Artificial Sequence: Synthetic oligonucleotide
aguggagacagaauccuuc

SEQ ID NO: 902024 - RNA, 19 nt, Artificial Sequence
  Description of Artificial Sequence: Synthetic oligonucleotide
guagguaugccaaucacca

SEQ ID NO: 902025 - RNA, 19 nt, Artificial Sequence
  Description of Artificial Sequence: Synthetic oligonucleotide
cugcacaguccccugaugg

SEQ ID NO: 902026 - RNA, 19 nt, Artificial Sequence
  Description of Artificial Sequence: Synthetic oligonucleotide
uagaggucugcuguaaacc

SEQ ID NO: 902027 - RNA, 19 nt, Artificial Sequence
  Description of Artificial Sequence: Synthetic oligonucleotide
cuaacacuccacauuccag

SEQ ID NO: 902028 - RNA, 19 nt, Artificial Sequence
  Description of Artificial Sequence: Synthetic oligonucleotide
uauguccugacuccugaac

SEQ ID NO: 902029 - RNA, 19 nt, Artificial Sequence
  Description of Artificial Sequence: Synthetic oligonucleotide
aaucagguauguccugacu

SEQ ID NO: 902030 - RNA, 19 nt, Artificial Sequence
  Description of Artificial Sequence: Synthetic oligonucleotide
cucauguugguugugguug

SEQ ID NO: 902031 - RNA, 19 nt, Artificial Sequence
  Description of Artificial Sequence: Synthetic oligonucleotide
uuuugcaaccuauucccuc

SEQ ID NO: 902032 - RNA, 19 nt, Artificial Sequence
  Description of Artificial Sequence: Synthetic oligonucleotide
acuggucucucugaguaac

SEQ ID NO: 902033 - RNA, 19 nt, Artificial Sequence
  Description of Artificial Sequence: Synthetic oligonucleotide
cucucaaccaaauaauaaa

SEQ ID NO: 902034 - RNA, 19 nt, Artificial Sequence
  Description of Artificial Sequence: Synthetic oligonucleotide
ugggccuacuugaugagac

SEQ ID NO: 902035 - RNA, 19 nt, Artificial Sequence
  Description of Artificial Sequence: Synthetic oligonucleotide
aagagcucagugagggcgc

SEQ ID NO: 902036 - RNA, 19 nt, Artificial Sequence
  Description of Artificial Sequence: Synthetic oligonucleotide
guauugaguccaugcaugc

SEQ ID NO: 902037 - RNA, 19 nt, Artificial Sequence
  Description of Artificial Sequence: Synthetic oligonucleotide
uccuucuagagacuacuuc

SEQ ID NO: 902038 - RNA, 19 nt, Artificial Sequence
  Description of Artificial Sequence: Synthetic oligonucleotide
uguagauuaggcacauguu

SEQ ID NO: 902039 - RNA, 19 nt, Artificial Sequence
  Description of Artificial Sequence: Synthetic oligonucleotide
aaccccuguagacaaagua

SEQ ID NO: 902040 - RNA, 19 nt, Artificial Sequence
  Description of Artificial Sequence: Synthetic oligonucleotide
auaucuuauccacaacuua

SEQ ID NO: 902041 - RNA, 19 nt, Artificial Sequence
  Description of Artificial Sequence: Synthetic oligonucleotide
aaacccguaagaaaacaaa

SEQ ID NO: 902042 - RNA, 19 nt, Artificial Sequence
  Description of Artificial Sequence: Synthetic oligonucleotide
aucguaaacccguaagaaa

SEQ ID NO: 902043 - RNA, 19 nt, Artificial Sequence
  Description of Artificial Sequence: Synthetic oligonucleotide
cuccuaagaagggucaagg

SEQ ID NO: 902044 - RNA, 19 nt, Artificial Sequence
  Description of Artificial Sequence: Synthetic oligonucleotide
acaauauauaugauuugga

SEQ ID NO: 902045 - RNA, 19 nt, Artificial Sequence
  Description of Artificial Sequence: Synthetic oligonucleotide
ucucucugaguaacuuucc

SEQ ID NO: 902046 - RNA, 19 nt, Artificial Sequence
  Description of Artificial Sequence: Synthetic oligonucleotide
uuuacaggcugaacucacu

SEQ ID NO: 902047 - RNA, 19 nt, Artificial Sequence
  Description of Artificial Sequence: Synthetic oligonucleotide
ugguccucagugguuaagg

SEQ ID NO: 902048 - RNA, 19 nt, Artificial Sequence
  Description of Artificial Sequence: Synthetic oligonucleotide
agcacuucagggcaaugcu

SEQ ID NO: 902049 - RNA, 19 nt, Artificial Sequence
  Description of Artificial Sequence: Synthetic oligonucleotide
gaccccuuauuccugccag

SEQ ID NO: 902050 - RNA, 19 nt, Artificial Sequence
  Description of Artificial Sequence: Synthetic oligonucleotide
uuccacgaccccuuauucc

SEQ ID NO: 902051 - RNA, 19 nt, Artificial Sequence
  Description of Artificial Sequence: Synthetic oligonucleotide
guaacuuuccccaaggccu

SEQ ID NO: 902052 - RNA, 19 nt, Artificial Sequence
  Description of Artificial Sequence: Synthetic oligonucleotide
agacuggucucucugagua

SEQ ID NO: 902053 - RNA, 19 nt, Artificial Sequence
  Description of Artificial Sequence: Synthetic oligonucleotide
uguuuggguaguugauggc

SEQ ID NO: 902054 - RNA, 19 nt, Artificial Sequence
  Description of Artificial Sequence: Synthetic oligonucleotide
gaugcucccagacccgcag

SEQ ID NO: 902055 - RNA, 19 nt, Artificial Sequence
  Description of Artificial Sequence: Synthetic oligonucleotide
aucagagaaccuaauucag

SEQ ID NO: 902056 - RNA, 19 nt, Artificial Sequence
  Description of Artificial Sequence: Synthetic oligonucleotide
agcaagguuagaggucugc

SEQ ID NO: 902057 - RNA, 19 nt, Artificial Sequence
  Description of Artificial Sequence: Synthetic oligonucleotide
ugcuagacaggugauggcu

SEQ ID NO: 902058 - RNA, 19 nt, Artificial Sequence
  Description of Artificial Sequence: Synthetic oligonucleotide
uuuccacgaccccuuauuc

SEQ ID NO: 902059 - RNA, 19 nt, Artificial Sequence
  Description of Artificial Sequence: Synthetic oligonucleotide
acucacucagcugauauaa

SEQ ID NO: 902060 - RNA, 19 nt, Artificial Sequence
  Description of Artificial Sequence: Synthetic oligonucleotide
uauugcuagacaggugaug

SEQ ID NO: 902061 - RNA, 19 nt, Artificial Sequence
  Description of Artificial Sequence: Synthetic oligonucleotide
ucaccgcuccacuuguucc

SEQ ID NO: 902062 - RNA, 19 nt, Artificial Sequence
  Description of Artificial Sequence: Synthetic oligonucleotide
caugcaugccacagugagg

SEQ ID NO: 902063 - RNA, 19 nt, Artificial Sequence
  Description of Artificial Sequence: Synthetic oligonucleotide
auaaucagguauguccuga

SEQ ID NO: 902064 - RNA, 19 nt, Artificial Sequence
  Description of Artificial Sequence: Synthetic oligonucleotide
gaugagacggcugcuuggc

SEQ ID NO: 902065 - RNA, 19 nt, Artificial Sequence
  Description of Artificial Sequence: Synthetic oligonucleotide
agcagcgauguuuugcaga

SEQ ID NO: 902066 - RNA, 19 nt, Artificial Sequence
  Description of Artificial Sequence: Synthetic oligonucleotide
auaugcugggguucaucag

SEQ ID NO: 902067 - RNA, 19 nt, Artificial Sequence
  Description of Artificial Sequence: Synthetic oligonucleotide
cucauuguggcccuggaaa

SEQ ID NO: 902068 - RNA, 19 nt, Artificial Sequence
  Description of Artificial Sequence: Synthetic oligonucleotide
aggcaagaggcccaaggug

SEQ ID NO: 902069 - RNA, 19 nt, Artificial Sequence
  Description of Artificial Sequence: Synthetic oligonucleotide
ugccaguuuugucucaguc

SEQ ID NO: 902070 - RNA, 19 nt, Artificial Sequence
  Description of Artificial Sequence: Synthetic oligonucleotide
cuaguggugccagaaggcc

SEQ ID NO: 902071 - RNA, 19 nt, Artificial Sequence
  Description of Artificial Sequence: Synthetic oligonucleotide
uaaucagguauguccugac

SEQ ID NO: 902072 - RNA, 19 nt, Artificial Sequence
  Description of Artificial Sequence: Synthetic oligonucleotide
acgguucucggugacaaag

SEQ ID NO: 902073 - RNA, 19 nt, Artificial Sequence
  Description of Artificial Sequence: Synthetic oligonucleotide
ugcacaguccccugauggc

SEQ ID NO: 902074 - RNA, 19 nt, Artificial Sequence
  Description of Artificial Sequence: Synthetic oligonucleotide
auuuggaacagaauucuuu

SEQ ID NO: 902075 - RNA, 19 nt, Artificial Sequence
  Description of Artificial Sequence: Synthetic oligonucleotide
uguccugacuccugaacaa

SEQ ID NO: 902076 - RNA, 19 nt, Artificial Sequence
  Description of Artificial Sequence: Synthetic oligonucleotide
uuauuagaauuuguacaau

SEQ ID NO: 902077 - RNA, 19 nt, Artificial Sequence
  Description of Artificial Sequence: Synthetic oligonucleotide
uuauugcuagacaggugau

SEQ ID NO: 902078 - RNA, 19 nt, Artificial Sequence
  Description of Artificial Sequence: Synthetic oligonucleotide
gcaccuuugcagaagaugc

SEQ ID NO: 902079 - RNA, 19 nt, Artificial Sequence
  Description of Artificial Sequence: Synthetic oligonucleotide
cuacaauuccuuugauguc

SEQ ID NO: 902080 - RNA, 19 nt, Artificial Sequence
  Description of Artificial Sequence: Synthetic oligonucleotide
aacaugagcuggccaagua

SEQ ID NO: 902081 - RNA, 19 nt, Artificial Sequence
  Description of Artificial Sequence: Synthetic oligonucleotide
acucccgugggacagcccu

SEQ ID NO: 902082 - RNA, 19 nt, Artificial Sequence
  Description of Artificial Sequence: Synthetic oligonucleotide
aagaagggucaaggggacg

SEQ ID NO: 902083 - RNA, 19 nt, Artificial Sequence
  Description of Artificial Sequence: Synthetic oligonucleotide
gcagcgauguuuugcagag

SEQ ID NO: 902084 - RNA, 19 nt, Artificial Sequence
  Description of Artificial Sequence: Synthetic oligonucleotide
aggcggguggccuuguuug

SEQ ID NO: 902085 - RNA, 19 nt, Artificial Sequence
  Description of Artificial Sequence: Synthetic oligonucleotide
ggccaagaggcauacuggg

SEQ ID NO: 902086 - RNA, 19 nt, Artificial Sequence
  Description of Artificial Sequence: Synthetic oligonucleotide
cuagaacuaauguaguuau

SEQ ID NO: 902087 - RNA, 19 nt, Artificial Sequence
  Description of Artificial Sequence: Synthetic oligonucleotide
agugagggcgcggugaugu

SEQ ID NO: 902088 - RNA, 19 nt, Artificial Sequence
  Description of Artificial Sequence: Synthetic oligonucleotide
cuacuugaugagacggcug

SEQ ID NO: 902089 - RNA, 19 nt, Artificial Sequence
  Description of Artificial Sequence: Synthetic oligonucleotide
gguagguaugccaaucacc

SEQ ID NO: 902090 - RNA, 19 nt, Artificial Sequence
  Description of Artificial Sequence: Synthetic oligonucleotide
uggagagucccuccauuuc

SEQ ID NO: 902091 - RNA, 19 nt, Artificial Sequence
  Description of Artificial Sequence: Synthetic oligonucleotide
ucauuagaacagugucugu

SEQ ID NO: 902092 - RNA, 19 nt, Artificial Sequence
  Description of Artificial Sequence: Synthetic oligonucleotide
uccaaccaagucccuugcc

SEQ ID NO: 902093 - RNA, 19 nt, Artificial Sequence
  Description of Artificial Sequence: Synthetic oligonucleotide
auauaugauuuggaacaga

SEQ ID NO: 902094 - RNA, 19 nt, Artificial Sequence
  Description of Artificial Sequence: Synthetic oligonucleotide
gguuaaggccagcagguac

SEQ ID NO: 902095 - RNA, 19 nt, Artificial Sequence
  Description of Artificial Sequence: Synthetic oligonucleotide
uugcuagacaggugauggc

SEQ ID NO: 902096 - RNA, 19 nt, Artificial Sequence
  Description of Artificial Sequence: Synthetic oligonucleotide
cagugggccuacuugauga

SEQ ID NO: 902097 - RNA, 19 nt, Artificial Sequence
  Description of Artificial Sequence: Synthetic oligonucleotide
guucucggugacaaagaag

SEQ ID NO: 902098 - RNA, 19 nt, Artificial Sequence
  Description of Artificial Sequence: Synthetic oligonucleotide
uugcaaccuauucccuccc

SEQ ID NO: 902099 - RNA, 19 nt, Artificial Sequence
  Description of Artificial Sequence: Synthetic oligonucleotide
cauucacuagaacuaaugu

SEQ ID NO: 902100 - RNA, 19 nt, Artificial Sequence
  Description of Artificial Sequence: Synthetic oligonucleotide
caccauaggaacuggacua

SEQ ID NO: 902101 - RNA, 19 nt, Artificial Sequence
  Description of Artificial Sequence: Synthetic oligonucleotide
caaugcuaaagccauacau

SEQ ID NO: 902102 - RNA, 19 nt, Artificial Sequence
  Description of Artificial Sequence: Synthetic oligonucleotide
agugggccuacuugaugag

SEQ ID NO: 902103 - RNA, 19 nt, Artificial Sequence
  Description of Artificial Sequence: Synthetic oligonucleotide
guaaacccguaagaaaaca

SEQ ID NO: 902104 - RNA, 19 nt, Artificial Sequence
  Description of Artificial Sequence: Synthetic oligonucleotide
ucccaacugggccacugcu

SEQ ID NO: 902105 - RNA, 19 nt, Artificial Sequence
  Description of Artificial Sequence: Synthetic oligonucleotide
accuaauucaggggccagg

SEQ ID NO: 902106 - RNA, 19 nt, Artificial Sequence
  Description of Artificial Sequence: Synthetic oligonucleotide
ccaugcaugccacagugag

SEQ ID NO: 902107 - RNA, 19 nt, Artificial Sequence
  Description of Artificial Sequence: Synthetic oligonucleotide
ccaaccaagucccuugccc

SEQ ID NO: 902108 - RNA, 19 nt, Artificial Sequence
  Description of Artificial Sequence: Synthetic oligonucleotide
gcauaucuuauccacaacu

SEQ ID NO: 902109 - RNA, 19 nt, Artificial Sequence
  Description of Artificial Sequence: Synthetic oligonucleotide
ggcacauguuuccacgacc

SEQ ID NO: 902110 - RNA, 19 nt, Artificial Sequence
  Description of Artificial Sequence: Synthetic oligonucleotide
acgaccccuuauuccugcc

SEQ ID NO: 902111 - RNA, 19 nt, Artificial Sequence
  Description of Artificial Sequence: Synthetic oligonucleotide
cagcacuucagggcaaugc

SEQ ID NO: 902112 - RNA, 19 nt, Artificial Sequence
  Description of Artificial Sequence: Synthetic oligonucleotide
ggccuacuugaugagacgg

SEQ ID NO: 902113 - RNA, 19 nt, Artificial Sequence
  Description of Artificial Sequence: Synthetic oligonucleotide
uccacaacuuaaacaucuu

SEQ ID NO: 902114 - RNA, 19 nt, Artificial Sequence
  Description of Artificial Sequence: Synthetic oligonucleotide
ugccaacccagcuucccac

SEQ ID NO: 902115 - RNA, 19 nt, Artificial Sequence
  Description of Artificial Sequence: Synthetic oligonucleotide
caggcugauagcagcgaug

SEQ ID NO: 902116 - RNA, 19 nt, Artificial Sequence
  Description of Artificial Sequence: Synthetic oligonucleotide
gaaguauaaucagguaugu

SEQ ID NO: 902117 - RNA, 19 nt, Artificial Sequence
  Description of Artificial Sequence: Synthetic oligonucleotide
aguuauugcuagacaggug

SEQ ID NO: 902118 - RNA, 19 nt, Artificial Sequence
  Description of Artificial Sequence: Synthetic oligonucleotide
caccaugaccuugaagcag

SEQ ID NO: 902119 - RNA, 19 nt, Artificial Sequence
  Description of Artificial Sequence: Synthetic oligonucleotide
gaauccuucuagagacuac

SEQ ID NO: 902120 - RNA, 19 nt, Artificial Sequence
  Description of Artificial Sequence: Synthetic oligonucleotide
aguccaugcaugccacagu

SEQ ID NO: 902121 - RNA, 19 nt, Artificial Sequence
  Description of Artificial Sequence: Synthetic oligonucleotide
aggagacuggucucucuga

SEQ ID NO: 902122 - RNA, 19 nt, Artificial Sequence
  Description of Artificial Sequence: Synthetic oligonucleotide
gugaggcuaacacuccaca

SEQ ID NO: 902123 - RNA, 19 nt, Artificial Sequence
  Description of Artificial Sequence: Synthetic oligonucleotide
uagcagcgauguuuugcag

SEQ ID NO: 902124 - RNA, 19 nt, Artificial Sequence
  Description of Artificial Sequence: Synthetic oligonucleotide
cacauguuuccacgacccc

SEQ ID NO: 902125 - RNA, 19 nt, Artificial Sequence
  Description of Artificial Sequence: Synthetic oligonucleotide
cacgaccccuuauuccugc

SEQ ID NO: 902126 - RNA, 19 nt, Artificial Sequence
  Description of Artificial Sequence: Synthetic oligonucleotide
gacuacuucuaggucuuca

SEQ ID NO: 902127 - RNA, 19 nt, Artificial Sequence
  Description of Artificial Sequence: Synthetic oligonucleotide
cuguaaaccccuguagaca

SEQ ID NO: 902128 - RNA, 19 nt, Artificial Sequence
  Description of Artificial Sequence: Synthetic oligonucleotide
uguuuccacgaccccuuau

SEQ ID NO: 902129 - RNA, 19 nt, Artificial Sequence
  Description of Artificial Sequence: Synthetic oligonucleotide
cauuccagaggcggguggc

SEQ ID NO: 902130 - RNA, 19 nt, Artificial Sequence
  Description of Artificial Sequence: Synthetic oligonucleotide
agacccgcaggcucagucu

SEQ ID NO: 902131 - RNA, 19 nt, Artificial Sequence
  Description of Artificial Sequence: Synthetic oligonucleotide
uuccuauaugcugggguuc

SEQ ID NO: 902132 - RNA, 19 nt, Artificial Sequence
  Description of Artificial Sequence: Synthetic oligonucleotide
gcacauguuuccacgaccc

SEQ ID NO: 902133 - RNA, 19 nt, Artificial Sequence
  Description of Artificial Sequence: Synthetic oligonucleotide
ugcaaggguggcucugcac

SEQ ID NO: 902134 - RNA, 19 nt, Artificial Sequence
  Description of Artificial Sequence: Synthetic oligonucleotide
caaugcugugacucccgug

SEQ ID NO: 902135 - RNA, 19 nt, Artificial Sequence
  Description of Artificial Sequence: Synthetic oligonucleotide
cauaucuuauccacaacuu

SEQ ID NO: 902136 - RNA, 19 nt, Artificial Sequence
  Description of Artificial Sequence: Synthetic oligonucleotide
uccauuucuggagguggcu

SEQ ID NO: 902137 - RNA, 19 nt, Artificial Sequence
  Description of Artificial Sequence: Synthetic oligonucleotide
gguggccuuguuuggguag

SEQ ID NO: 902138 - RNA, 19 nt, Artificial Sequence
  Description of Artificial Sequence: Synthetic oligonucleotide
gguauguccugacuccuga

SEQ ID NO: 902139 - RNA, 19 nt, Artificial Sequence
  Description of Artificial Sequence: Synthetic oligonucleotide
gaggcuaacacuccacauu

SEQ ID NO: 902140 - RNA, 19 nt, Artificial Sequence
  Description of Artificial Sequence: Synthetic oligonucleotide
acccguaagaaaacaaauu

SEQ ID NO: 902141 - RNA, 19 nt, Artificial Sequence
  Description of Artificial Sequence: Synthetic oligonucleotide
gguccucagugguuaaggc

SEQ ID NO: 902142 - RNA, 19 nt, Artificial Sequence
  Description of Artificial Sequence: Synthetic oligonucleotide
gacaggugauggcuaaaua

SEQ ID NO: 902143 - RNA, 19 nt, Artificial Sequence
  Description of Artificial Sequence: Synthetic oligonucleotide
cccguaagaaaacaaauua

SEQ ID NO: 902144 - RNA, 19 nt, Artificial Sequence
  Description of Artificial Sequence: Synthetic oligonucleotide
cuauaugcugggguucauc

SEQ ID NO: 902145 - RNA, 19 nt, Artificial Sequence
  Description of Artificial Sequence: Synthetic oligonucleotide
gucaccgcuccacuuguuc

SEQ ID NO: 902146 - RNA, 19 nt, Artificial Sequence
  Description of Artificial Sequence: Synthetic oligonucleotide
guuagaggucugcuguaaa

SEQ ID NO: 902147 - RNA, 19 nt, Artificial Sequence
  Description of Artificial Sequence: Synthetic oligonucleotide
agacaggugauggcuaaau

SEQ ID NO: 902148 - RNA, 19 nt, Artificial Sequence
  Description of Artificial Sequence: Synthetic oligonucleotide
gggugguggaccaugaguc

SEQ ID NO: 902149 - RNA, 19 nt, Artificial Sequence
  Description of Artificial Sequence: Synthetic oligonucleotide
uagguaugccaaucaccau

SEQ ID NO: 902150 - RNA, 19 nt, Artificial Sequence
  Description of Artificial Sequence: Synthetic oligonucleotide
ccuaauucaggggccaggc

SEQ ID NO: 902151 - RNA, 19 nt, Artificial Sequence
  Description of Artificial Sequence: Synthetic oligonucleotide
aggucugcuguaaaccccu

SEQ ID NO: 902152 - RNA, 19 nt, Artificial Sequence
  Description of Artificial Sequence: Synthetic oligonucleotide
aaaccccuguagacaaagu

SEQ ID NO: 902153 - RNA, 19 nt, Artificial Sequence
  Description of Artificial Sequence: Synthetic oligonucleotide
caugccacagugaggcuaa

SEQ ID NO: 902154 - RNA, 19 nt, Artificial Sequence
  Description of Artificial Sequence: Synthetic oligonucleotide
guuaaggccagcagguacu

SEQ ID NO: 902155 - RNA, 19 nt, Artificial Sequence
  Description of Artificial Sequence: Synthetic oligonucleotide
ccguaagaaaacaaauuaa

SEQ ID NO: 902156 - RNA, 19 nt, Artificial Sequence
  Description of Artificial Sequence: Synthetic oligonucleotide
gacguuggccuugauggaa

SEQ ID NO: 902157 - RNA, 19 nt, Artificial Sequence
  Description of Artificial Sequence: Synthetic oligonucleotide
cagcuaguggugccagaag

SEQ ID NO: 902158 - RNA, 19 nt, Artificial Sequence
  Description of Artificial Sequence: Synthetic oligonucleotide
cagacccgcaggcucaguc

SEQ ID NO: 902159 - RNA, 19 nt, Artificial Sequence
  Description of Artificial Sequence: Synthetic oligonucleotide
gcuaguggugccagaaggc

SEQ ID NO: 902160 - RNA, 19 nt, Artificial Sequence
  Description of Artificial Sequence: Synthetic oligonucleotide
ugacucccgugggacagcc

SEQ ID NO: 902161 - RNA, 19 nt, Artificial Sequence
  Description of Artificial Sequence: Synthetic oligonucleotide
agagcucagugagggcgcg

SEQ ID NO: 902162 - RNA, 19 nt, Artificial Sequence
  Description of Artificial Sequence: Synthetic oligonucleotide
gggccuacuugaugagacg

SEQ ID NO: 902163 - RNA, 19 nt, Artificial Sequence
  Description of Artificial Sequence: Synthetic oligonucleotide
ccccaaggccucucgaugg

SEQ ID NO: 902164 - RNA, 19 nt, Artificial Sequence
  Description of Artificial Sequence: Synthetic oligonucleotide
agagaugggccuggcucag

SEQ ID NO: 902165 - RNA, 19 nt, Artificial Sequence
  Description of Artificial Sequence: Synthetic oligonucleotide
ggcagucuugccuccuaag

SEQ ID NO: 902166 - RNA, 19 nt, Artificial Sequence
  Description of Artificial Sequence: Synthetic oligonucleotide
gcugcaagcugcaagucuc

SEQ ID NO: 902167 - RNA, 19 nt, Artificial Sequence
  Description of Artificial Sequence: Synthetic oligonucleotide
cuaauucaggggccaggca

SEQ ID NO: 902168 - RNA, 19 nt, Artificial Sequence
  Description of Artificial Sequence: Synthetic oligonucleotide
cccuguagacaaaguauug

SEQ ID NO: 902169 - RNA, 19 nt, Artificial Sequence
  Description of Artificial Sequence: Synthetic oligonucleotide
aucggagaaggugguccuc

SEQ ID NO: 902170 - RNA, 19 nt, Artificial Sequence
  Description of Artificial Sequence: Synthetic oligonucleotide
augagacggcugcuuggca

SEQ ID NO: 902171 - RNA, 19 nt, Artificial Sequence
  Description of Artificial Sequence: Synthetic oligonucleotide
gauguuuugcagagccugu

SEQ ID NO: 902172 - RNA, 19 nt, Artificial Sequence
  Description of Artificial Sequence: Synthetic oligonucleotide
ccuauucccucccacucug

SEQ ID NO: 902173 - RNA, 19 nt, Artificial Sequence
  Description of Artificial Sequence: Synthetic oligonucleotide
guuuccacgaccccuuauu

SEQ ID NO: 902174 - RNA, 19 nt, Artificial Sequence
  Description of Artificial Sequence: Synthetic oligonucleotide
aggcgcucauguugguugu

SEQ ID NO: 902175 - RNA, 19 nt, Artificial Sequence
  Description of Artificial Sequence: Synthetic oligonucleotide
cguaaacccguaagaaaac

SEQ ID NO: 902176 - RNA, 19 nt, Artificial Sequence
  Description of Artificial Sequence: Synthetic oligonucleotide
accuugaagcagaaguaua

SEQ ID NO: 902177 - RNA, 19 nt, Artificial Sequence
  Description of Artificial Sequence: Synthetic oligonucleotide
ugucucaguccaggcaguc

SEQ ID NO: 902178 - RNA, 19 nt, Artificial Sequence
  Description of Artificial Sequence: Synthetic oligonucleotide
accccuuauuccugccagu

SEQ ID NO: 902179 - RNA, 19 nt, Artificial Sequence
  Description of Artificial Sequence: Synthetic oligonucleotide
auacugggccauagcaaca

SEQ ID NO: 902180 - RNA, 19 nt, Artificial Sequence
  Description of Artificial Sequence: Synthetic oligonucleotide
aaggggacguuggccuuga

SEQ ID NO: 902181 - RNA, 19 nt, Artificial Sequence
  Description of Artificial Sequence: Synthetic oligonucleotide
gacuggucucucugaguaa

SEQ ID NO: 902182 - RNA, 19 nt, Artificial Sequence
  Description of Artificial Sequence: Synthetic oligonucleotide
aggugguagguaugccaau

SEQ ID NO: 902183 - RNA, 19 nt, Artificial Sequence
  Description of Artificial Sequence: Synthetic oligonucleotide
caaccuauucccucccacu

SEQ ID NO: 902184 - RNA, 19 nt, Artificial Sequence
  Description of Artificial Sequence: Synthetic oligonucleotide
agguauguccugacuccug

SEQ ID NO: 902185 - RNA, 19 nt, Artificial Sequence
  Description of Artificial Sequence: Synthetic oligonucleotide
agcauucacuagaacuaau

SEQ ID NO: 902186 - RNA, 19 nt, Artificial Sequence
  Description of Artificial Sequence: Synthetic oligonucleotide
caaguauggcccuggcugu

SEQ ID NO: 902187 - RNA, 19 nt, Artificial Sequence
  Description of Artificial Sequence: Synthetic oligonucleotide
ggugguggaccaugaguca

SEQ ID NO: 902188 - RNA, 19 nt, Artificial Sequence
  Description of Artificial Sequence: Synthetic oligonucleotide
aggcagucuugccuccuaa

SEQ ID NO: 902189 - RNA, 19 nt, Artificial Sequence
  Description of Artificial Sequence: Synthetic oligonucleotide
gugguccucagugguuaag

SEQ ID NO: 902190 - RNA, 19 nt, Artificial Sequence
  Description of Artificial Sequence: Synthetic oligonucleotide
gugccagaaggcccagcac

SEQ ID NO: 902191 - RNA, 19 nt, Artificial Sequence
  Description of Artificial Sequence: Synthetic oligonucleotide
aggugguccucagugguua

SEQ ID NO: 902192 - RNA, 19 nt, Artificial Sequence
  Description of Artificial Sequence: Synthetic oligonucleotide
ugcaugccacagugaggcu

SEQ ID NO: 902193 - RNA, 19 nt, Artificial Sequence
  Description of Artificial Sequence: Synthetic oligonucleotide
cuuugggaccuccugcccu

SEQ ID NO: 902194 - RNA, 19 nt, Artificial Sequence
  Description of Artificial Sequence: Synthetic oligonucleotide
ggcggguggccuuguuugg

SEQ ID NO: 902195 - RNA, 19 nt, Artificial Sequence
  Description of Artificial Sequence: Synthetic oligonucleotide
acggcugcuuggcauccaa

SEQ ID NO: 902196 - RNA, 19 nt, Artificial Sequence
  Description of Artificial Sequence: Synthetic oligonucleotide
caguggccuagagaaagca

SEQ ID NO: 902197 - RNA, 19 nt, Artificial Sequence
  Description of Artificial Sequence: Synthetic oligonucleotide
gcgcucauguugguugugg

SEQ ID NO: 902198 - RNA, 19 nt, Artificial Sequence
  Description of Artificial Sequence: Synthetic oligonucleotide
cacuagaacuaauguaguu

SEQ ID NO: 902199 - RNA, 19 nt, Artificial Sequence
  Description of Artificial Sequence: Synthetic oligonucleotide
cacaguccccugauggcaa

SEQ ID NO: 902200 - RNA, 19 nt, Artificial Sequence
  Description of Artificial Sequence: Synthetic oligonucleotide
gccuacuugaugagacggc

SEQ ID NO: 902201 - RNA, 19 nt, Artificial Sequence
  Description of Artificial Sequence: Synthetic oligonucleotide
gagcaagguuagaggucug

SEQ ID NO: 902202 - RNA, 19 nt, Artificial Sequence
  Description of Artificial Sequence: Synthetic oligonucleotide
caugagucaccgcuccacu

SEQ ID NO: 902203 - RNA, 19 nt, Artificial Sequence
  Description of Artificial Sequence: Synthetic oligonucleotide
gccugugcugcacaucgga

SEQ ID NO: 902204 - RNA, 19 nt, Artificial Sequence
  Description of Artificial Sequence: Synthetic oligonucleotide
ccaugagucaccgcuccac

SEQ ID NO: 902205 - RNA, 19 nt, Artificial Sequence
  Description of Artificial Sequence: Synthetic oligonucleotide
ccuccuaagaagggucaag

SEQ ID NO: 902206 - RNA, 19 nt, Artificial Sequence
  Description of Artificial Sequence: Synthetic oligonucleotide
cucccgugggacagcccug

SEQ ID NO: 902207 - RNA, 19 nt, Artificial Sequence
  Description of Artificial Sequence: Synthetic oligonucleotide
caucggagaaggugguccu

SEQ ID NO: 902208 - RNA, 19 nt, Artificial Sequence
  Description of Artificial Sequence: Synthetic oligonucleotide
cuuuguagauuaggcacau

SEQ ID NO: 902209 - RNA, 19 nt, Artificial Sequence
  Description of Artificial Sequence: Synthetic oligonucleotide
ccuuugggaccuccugccc

SEQ ID NO: 902210 - RNA, 19 nt, Artificial Sequence
  Description of Artificial Sequence: Synthetic oligonucleotide
gagaugggccuggcucagc

SEQ ID NO: 902211 - RNA, 19 nt, Artificial Sequence
  Description of Artificial Sequence: Synthetic oligonucleotide
gguuucccaacugggccac

SEQ ID NO: 902212 - RNA, 19 nt, Artificial Sequence
  Description of Artificial Sequence: Synthetic oligonucleotide
ggcgcggugauguucaguu

SEQ ID NO: 902213 - RNA, 19 nt, Artificial Sequence
  Description of Artificial Sequence: Synthetic oligonucleotide
gacaaaguauugaguccau

SEQ ID NO: 902214 - RNA, 19 nt, Artificial Sequence
  Description of Artificial Sequence: Synthetic oligonucleotide
gugggccuacuugaugaga

SEQ ID NO: 902215 - RNA, 19 nt, Artificial Sequence
  Description of Artificial Sequence: Synthetic oligonucleotide
ggacguuggccuugaugga

SEQ ID NO: 902216 - RNA, 19 nt, Artificial Sequence
  Description of Artificial Sequence: Synthetic oligonucleotide
gcagcuaguggugccagaa

SEQ ID NO: 902217 - RNA, 19 nt, Artificial Sequence
  Description of Artificial Sequence: Synthetic oligonucleotide
ccuuauuccugccaguuuu

SEQ ID NO: 902218 - RNA, 19 nt, Artificial Sequence
  Description of Artificial Sequence: Synthetic oligonucleotide
cuggagagucccuccauuu

SEQ ID NO: 902219 - RNA, 19 nt, Artificial Sequence
  Description of Artificial Sequence: Synthetic oligonucleotide
gugccacccaguggccuag

SEQ ID NO: 902220 - RNA, 19 nt, Artificial Sequence
  Description of Artificial Sequence: Synthetic oligonucleotide
gcggguggccuuguuuggg

SEQ ID NO: 902221 - RNA, 19 nt, Artificial Sequence
  Description of Artificial Sequence: Synthetic oligonucleotide
cccaaggccucucgauggc

SEQ ID NO: 902222 - RNA, 19 nt, Artificial Sequence
  Description of Artificial Sequence: Synthetic oligonucleotide
gugacucccgugggacagc

SEQ ID NO: 902223 - RNA, 19 nt, Artificial Sequence
  Description of Artificial Sequence: Synthetic oligonucleotide
cuugaugagacggcugcuu

SEQ ID NO: 902224 - RNA, 19 nt, Artificial Sequence
  Description of Artificial Sequence: Synthetic oligonucleotide
ccgugggacagcccuggag

SEQ ID NO: 902225 - RNA, 19 nt, Artificial Sequence
  Description of Artificial Sequence: Synthetic oligonucleotide
cucccacucaguggagaca

SEQ ID NO: 902226 - RNA, 19 nt, Artificial Sequence
  Description of Artificial Sequence: Synthetic oligonucleotide
gaggcggguggccuuguuu

SEQ ID NO: 902227 - RNA, 19 nt, Artificial Sequence
  Description of Artificial Sequence: Synthetic oligonucleotide
ccaacccagcuucccacuc

SEQ ID NO: 902228 - RNA, 19 nt, Artificial Sequence
  Description of Artificial Sequence: Synthetic oligonucleotide
cucacucagcugauauaau

SEQ ID NO: 902229 - RNA, 19 nt, Artificial Sequence
  Description of Artificial Sequence: Synthetic oligonucleotide
gacucccgugggacagccc

SEQ ID NO: 902230 - RNA, 19 nt, Artificial Sequence
  Description of Artificial Sequence: Synthetic oligonucleotide
gcaugccacagugaggcua

SEQ ID NO: 902231 - RNA, 19 nt, Artificial Sequence
  Description of Artificial Sequence: Synthetic oligonucleotide
ggucucucugaguaacuuu

SEQ ID NO: 902232 - RNA, 19 nt, Artificial Sequence
  Description of Artificial Sequence: Synthetic oligonucleotide
gcaagguuagaggucugcu

SEQ ID NO: 902233 - RNA, 19 nt, Artificial Sequence
  Description of Artificial Sequence: Synthetic oligonucleotide
ccacgaccccuuauuccug

SEQ ID NO: 902234 - RNA, 19 nt, Artificial Sequence
  Description of Artificial Sequence: Synthetic oligonucleotide
uggccuuguuuggguaguu

SEQ ID NO: 902235 - RNA, 19 nt, Artificial Sequence
  Description of Artificial Sequence: Synthetic oligonucleotide
cagguauguccugacuccu

SEQ ID NO: 902236 - RNA, 19 nt, Artificial Sequence
  Description of Artificial Sequence: Synthetic oligonucleotide
ccuacuugaugagacggcu

SEQ ID NO: 902237 - RNA, 19 nt, Artificial Sequence
  Description of Artificial Sequence: Synthetic oligonucleotide
cagugagggcgcggugaug

SEQ ID NO: 902238 - RNA, 19 nt, Artificial Sequence
  Description of Artificial Sequence: Synthetic oligonucleotide
gacggcugcuuggcaucca

SEQ ID NO: 902239 - RNA, 19 nt, Artificial Sequence
  Description of Artificial Sequence: Synthetic oligonucleotide
guggugugugaagggcaaa

SEQ ID NO: 902240 - RNA, 19 nt, Artificial Sequence
  Description of Artificial Sequence: Synthetic oligonucleotide
gaggcccaaggugguaggu

SEQ ID NO: 902241 - RNA, 19 nt, Artificial Sequence
  Description of Artificial Sequence: Synthetic oligonucleotide
cccuccauuucuggaggug

SEQ ID NO: 902242 - RNA, 19 nt, Artificial Sequence
  Description of Artificial Sequence: Synthetic oligonucleotide
caguggagacagaauccuu

SEQ ID NO: 902243 - RNA, 19 nt, Artificial Sequence
  Description of Artificial Sequence: Synthetic oligonucleotide
ccccuguagacaaaguauu

SEQ ID NO: 902244 - RNA, 19 nt, Artificial Sequence
  Description of Artificial Sequence: Synthetic oligonucleotide
ggacuacaauuccuuugau

SEQ ID NO: 902245 - RNA, 19 nt, Artificial Sequence
  Description of Artificial Sequence: Synthetic oligonucleotide
ggccuggugccaacccagc

SEQ ID NO: 902246 - RNA, 19 nt, Artificial Sequence
  Description of Artificial Sequence: Synthetic oligonucleotide
ggcgcucauguugguugug

SEQ ID NO: 902247 - RNA, 19 nt, Artificial Sequence
  Description of Artificial Sequence: Synthetic oligonucleotide
ggguggccuuguuugggua

SEQ ID NO: 902248 - RNA, 19 nt, Artificial Sequence
  Description of Artificial Sequence: Synthetic oligonucleotide
cgguucucggugacaaaga

SEQ ID NO: 902249 - RNA, 19 nt, Artificial Sequence
  Description of Artificial Sequence: Synthetic oligonucleotide
cauguugguugugguuggu

SEQ ID NO: 902250 - RNA, 19 nt, Artificial Sequence
  Description of Artificial Sequence: Synthetic oligonucleotide
agucaccgcuccacuuguu

SEQ ID NO: 902251 - RNA, 19 nt, Artificial Sequence
  Description of Artificial Sequence: Synthetic oligonucleotide
gcgauguuuugcagagccu

SEQ ID NO: 902252 - RNA, 19 nt, Artificial Sequence
  Description of Artificial Sequence: Synthetic oligonucleotide
cgaccccuuauuccugcca

SEQ ID NO: 902253 - RNA, 19 nt, Artificial Sequence
  Description of Artificial Sequence: Synthetic oligonucleotide
cgcggugauguucaguuuu

SEQ ID NO: 902254 - RNA, 19 nt, Artificial Sequence
  Description of Artificial Sequence: Synthetic oligonucleotide
ccgcaggcucagucucuuc

SEQ ID NO: 902255 - RNA, 19 nt, Artificial Sequence
  Description of Artificial Sequence: Synthetic oligonucleotide
gggguucaucagagaaccu

SEQ ID NO: 902256 - RNA, 19 nt, Artificial Sequence
  Description of Artificial Sequence: Synthetic oligonucleotide
ccucucgauggcccuuucu

SEQ ID NO: 902257 - RNA, 19 nt, Artificial Sequence
  Description of Artificial Sequence: Synthetic oligonucleotide
ccccuuauuccugccaguu

SEQ ID NO: 902258 - RNA, 19 nt, Artificial Sequence
  Description of Artificial Sequence: Synthetic oligonucleotide
gcgcggugauguucaguuu

SEQ ID NO: 902259 - RNA, 19 nt, Artificial Sequence
  Description of Artificial Sequence: Synthetic oligonucleotide
cggguggccuuguuugggu

SEQ ID NO: 902260 - RNA, 19 nt, Artificial Sequence
  Description of Artificial Sequence: Synthetic oligonucleotide
cccgugggacagcccugga

SEQ ID NO: 902261 - RNA, 19 nt, Artificial Sequence
  Description of Artificial Sequence: Synthetic oligonucleotide
ggccucucgauggcccuuu

SEQ ID NO: 902262 - RNA, 19 nt, Artificial Sequence
  Description of Artificial Sequence: Synthetic oligonucleotide
cagaggcggguggccuugu

SEQ ID NO: 902263 - RNA, 19 nt, Artificial Sequence
  Description of Artificial Sequence: Synthetic oligonucleotide
ccuauaugcugggguucau

SEQ ID NO: 902264 - RNA, 19 nt, Artificial Sequence
  Description of Artificial Sequence: Synthetic oligonucleotide
ccacucccagaagggucuu

SEQ ID NO: 902265 - RNA, 19 nt, Artificial Sequence
  Description of Artificial Sequence: Synthetic oligonucleotide
aaaugaauggucaugagac

SEQ ID NO: 902266 - RNA, 19 nt, Artificial Sequence
  Description of Artificial Sequence: Synthetic oligonucleotide
cacuuauagaacuugaacg

SEQ ID NO: 902267 - RNA, 19 nt, Artificial Sequence
  Description of Artificial Sequence: Synthetic oligonucleotide
ugaugaaacacuuugacuc

SEQ ID NO: 902268 - RNA, 19 nt, Artificial Sequence
  Description of Artificial Sequence: Synthetic oligonucleotide
ugauguuagaauuaugcag

SEQ ID NO: 902269 - RNA, 19 nt, Artificial Sequence
  Description of Artificial Sequence: Synthetic oligonucleotide
acagauuucaaguuaacug

SEQ ID NO: 902270 - RNA, 19 nt, Artificial Sequence
  Description of Artificial Sequence: Synthetic oligonucleotide
uuuuccugucguaagaggg

SEQ ID NO: 902271 - RNA, 19 nt, Artificial Sequence
  Description of Artificial Sequence: Synthetic oligonucleotide
aagucugugacucaccaag

SEQ ID NO: 902272 - RNA, 19 nt, Artificial Sequence
  Description of Artificial Sequence: Synthetic oligonucleotide
agaaagauucuucucuagc

SEQ ID NO: 902273 - RNA, 19 nt, Artificial Sequence
  Description of Artificial Sequence: Synthetic oligonucleotide
aauuucuagcuguaaauga

SEQ ID NO: 902274 - RNA, 19 nt, Artificial Sequence
  Description of Artificial Sequence: Synthetic oligonucleotide
gauguuagaauuaugcagc

SEQ ID NO: 902275 - RNA, 19 nt, Artificial Sequence
  Description of Artificial Sequence: Synthetic oligonucleotide
uuuucaauaaugcucgauc

SEQ ID NO: 902276 - RNA, 19 nt, Artificial Sequence
  Description of Artificial Sequence: Synthetic oligonucleotide
uuucaauaaugcucgaucc

SEQ ID NO: 902277 - RNA, 19 nt, Artificial Sequence
  Description of Artificial Sequence: Synthetic oligonucleotide
ucuauguuguuucucaacu

SEQ ID NO: 902278 - RNA, 19 nt, Artificial Sequence
  Description of Artificial Sequence: Synthetic oligonucleotide
ugauuuguuaauuuaacua

SEQ ID NO: 902279 - RNA, 19 nt, Artificial Sequence
  Description of Artificial Sequence: Synthetic oligonucleotide
uaaaugacuaauuucuccu

SEQ ID NO: 902280 - RNA, 19 nt, Artificial Sequence
  Description of Artificial Sequence: Synthetic oligonucleotide
aguacuagaaacagaaaac

SEQ ID NO: 902281 - RNA, 19 nt, Artificial Sequence
  Description of Artificial Sequence: Synthetic oligonucleotide
acgaugaagucugagagcc

SEQ ID NO: 902282 - RNA, 19 nt, Artificial Sequence
  Description of Artificial Sequence: Synthetic oligonucleotide
uaaugcucgauccugcucc

SEQ ID NO: 902283 - RNA, 19 nt, Artificial Sequence
  Description of Artificial Sequence: Synthetic oligonucleotide
auugcuaauuucuagcugu

SEQ ID NO: 902284 - RNA, 19 nt, Artificial Sequence
  Description of Artificial Sequence: Synthetic oligonucleotide
acuuauagaacuugaacgu

SEQ ID NO: 902285 - RNA, 19 nt, Artificial Sequence
  Description of Artificial Sequence: Synthetic oligonucleotide
uucuagauugcuaauuucu

SEQ ID NO: 902286 - RNA, 19 nt, Artificial Sequence
  Description of Artificial Sequence: Synthetic oligonucleotide
ucuagcaucucccacgaug

SEQ ID NO: 902287 - RNA, 19 nt, Artificial Sequence
  Description of Artificial Sequence: Synthetic oligonucleotide
uugaacgugaaaugguggg

SEQ ID NO: 902288 - RNA, 19 nt, Artificial Sequence
  Description of Artificial Sequence: Synthetic oligonucleotide
guaucuacuccacuuauag

SEQ ID NO: 902289 - RNA, 19 nt, Artificial Sequence
  Description of Artificial Sequence: Synthetic oligonucleotide
uuauagaacuugaacguga

SEQ ID NO: 902290 - RNA, 19 nt, Artificial Sequence
  Description of Artificial Sequence: Synthetic oligonucleotide
aucuacuccacuuauagaa

SEQ ID NO: 902291 - RNA, 19 nt, Artificial Sequence
  Description of Artificial Sequence: Synthetic oligonucleotide
aagucuacuguuuuccugu

SEQ ID NO: 902292 - RNA, 19 nt, Artificial Sequence
  Description of Artificial Sequence: Synthetic oligonucleotide
ucggaguugaacucgaagc

SEQ ID NO: 902293 - RNA, 19 nt, Artificial Sequence
  Description of Artificial Sequence: Synthetic oligonucleotide
aaauuuucuaucugucgga

SEQ ID NO: 902294 - RNA, 19 nt, Artificial Sequence
  Description of Artificial Sequence: Synthetic oligonucleotide
uuucuauucagcuuugcaa

SEQ ID NO: 902295 - RNA, 19 nt, Artificial Sequence
  Description of Artificial Sequence: Synthetic oligonucleotide
aagaucuuucucuuggcgu

SEQ ID NO: 902296 - RNA, 19 nt, Artificial Sequence
  Description of Artificial Sequence: Synthetic oligonucleotide
aguucacugaucucauggc

SEQ ID NO: 902297 - RNA, 19 nt, Artificial Sequence
  Description of Artificial Sequence: Synthetic oligonucleotide
gaacuugaacgugaaaugg

SEQ ID NO: 902298 - RNA, 19 nt, Artificial Sequence
  Description of Artificial Sequence: Synthetic oligonucleotide
uuaacuagcucuucagaca

SEQ ID NO: 902299 - RNA, 19 nt, Artificial Sequence
  Description of Artificial Sequence: Synthetic oligonucleotide
aucuucaagauccaggcga

SEQ ID NO: 902300 - RNA, 19 nt, Artificial Sequence
  Description of Artificial Sequence: Synthetic oligonucleotide
aguacuucggcucuuuucu

SEQ ID NO: 902301 - RNA, 19 nt, Artificial Sequence
  Description of Artificial Sequence: Synthetic oligonucleotide
uauucaaucuaguggcaag

SEQ ID NO: 902302 - RNA, 19 nt, Artificial Sequence
  Description of Artificial Sequence: Synthetic oligonucleotide
uuagccuucaucucacgcc

SEQ ID NO: 902303 - RNA, 19 nt, Artificial Sequence
  Description of Artificial Sequence: Synthetic oligonucleotide
auuagcuuugugaagauca

SEQ ID NO: 902304 - RNA, 19 nt, Artificial Sequence
  Description of Artificial Sequence: Synthetic oligonucleotide
auuucuagcuguaaaugac

SEQ ID NO: 902305 - RNA, 19 nt, Artificial Sequence
  Description of Artificial Sequence: Synthetic oligonucleotide
cuugguuucgauucucugc

SEQ ID NO: 902306 - RNA, 19 nt, Artificial Sequence
  Description of Artificial Sequence: Synthetic oligonucleotide
ugcagugcuagucuaaggu

SEQ ID NO: 902307 - RNA, 19 nt, Artificial Sequence
  Description of Artificial Sequence: Synthetic oligonucleotide
guugaugaaacacuuugac

SEQ ID NO: 902308 - RNA, 19 nt, Artificial Sequence
  Description of Artificial Sequence: Synthetic oligonucleotide
ucucccacgaugaagucug

SEQ ID NO: 902309 - RNA, 19 nt, Artificial Sequence
  Description of Artificial Sequence: Synthetic oligonucleotide
uuccauuaacccuugaauc

SEQ ID NO: 902310 - RNA, 19 nt, Artificial Sequence
  Description of Artificial Sequence: Synthetic oligonucleotide
uucuauucagcuuugcaau

SEQ ID NO: 902311 - RNA, 19 nt, Artificial Sequence
  Description of Artificial Sequence: Synthetic oligonucleotide
uuugcaggcuaguugaacu

SEQ ID NO: 902312 - RNA, 19 nt, Artificial Sequence
  Description of Artificial Sequence: Synthetic oligonucleotide
ucaauaaugcucgauccug

SEQ ID NO: 902313 - RNA, 19 nt, Artificial Sequence
  Description of Artificial Sequence: Synthetic oligonucleotide
uuguuguugaugaaacacu

SEQ ID NO: 902314 - RNA, 19 nt, Artificial Sequence
  Description of Artificial Sequence: Synthetic oligonucleotide
aauacagauuucaaguuaa

SEQ ID NO: 902315 - RNA, 19 nt, Artificial Sequence
  Description of Artificial Sequence: Synthetic oligonucleotide
ucuuucaacugcugcagcc

SEQ ID NO: 902316 - RNA, 19 nt, Artificial Sequence
  Description of Artificial Sequence: Synthetic oligonucleotide
uugaugaaacacuuugacu

SEQ ID NO: 902317 - RNA, 19 nt, Artificial Sequence
  Description of Artificial Sequence: Synthetic oligonucleotide
uuucuagcuguaaaugacu

SEQ ID NO: 902318 - RNA, 19 nt, Artificial Sequence
  Description of Artificial Sequence: Synthetic oligonucleotide
accgauuauuuucaucuuc

SEQ ID NO: 902319 - RNA, 19 nt, Artificial Sequence
  Description of Artificial Sequence: Synthetic oligonucleotide
aaugaauggucaugagacu

SEQ ID NO: 902320 - RNA, 19 nt, Artificial Sequence
  Description of Artificial Sequence: Synthetic oligonucleotide
acagaaaacugucuguggu

SEQ ID NO: 902321 - RNA, 19 nt, Artificial Sequence
  Description of Artificial Sequence: Synthetic oligonucleotide
aaugcucgauccugcuccc

SEQ ID NO: 902322 - RNA, 19 nt, Artificial Sequence
  Description of Artificial Sequence: Synthetic oligonucleotide
aauaaugcucgauccugcu

SEQ ID NO: 902323 - RNA, 19 nt, Artificial Sequence
  Description of Artificial Sequence: Synthetic oligonucleotide
ucaaggaccugucuuaaau

SEQ ID NO: 902324 - RNA, 19 nt, Artificial Sequence
  Description of Artificial Sequence: Synthetic oligonucleotide
uccauuucuaacugacugc

SEQ ID NO: 902325 - RNA, 19 nt, Artificial Sequence
  Description of Artificial Sequence: Synthetic oligonucleotide
uucucuguaugcacuaucu

SEQ ID NO: 902326 - RNA, 19 nt, Artificial Sequence
  Description of Artificial Sequence: Synthetic oligonucleotide
augaauggucaugagacuc

SEQ ID NO: 902327 - RNA, 19 nt, Artificial Sequence
  Description of Artificial Sequence: Synthetic oligonucleotide
ugacuacuauucaaucuag

SEQ ID NO: 902328 - RNA, 19 nt, Artificial Sequence
  Description of Artificial Sequence: Synthetic oligonucleotide
uucaauaaugcucgauccu

SEQ ID NO: 902329 - RNA, 19 nt, Artificial Sequence
  Description of Artificial Sequence: Synthetic oligonucleotide
ugugacuccaccgaagaca

SEQ ID NO: 902330 - RNA, 19 nt, Artificial Sequence
  Description of Artificial Sequence: Synthetic oligonucleotide
uccuuacagcuucauaaag

SEQ ID NO: 902331 - RNA, 19 nt, Artificial Sequence
  Description of Artificial Sequence: Synthetic oligonucleotide
agugucuuuucuuuccuug

SEQ ID NO: 902332 - RNA, 19 nt, Artificial Sequence
  Description of Artificial Sequence: Synthetic oligonucleotide
agaucaguaaguucucugu

SEQ ID NO: 902333 - RNA, 19 nt, Artificial Sequence
  Description of Artificial Sequence: Synthetic oligonucleotide
uugaacucgaagcuugggu

SEQ ID NO: 902334 - RNA, 19 nt, Artificial Sequence
  Description of Artificial Sequence: Synthetic oligonucleotide
uaacuagcucuucagacau

SEQ ID NO: 902335 - RNA, 19 nt, Artificial Sequence
  Description of Artificial Sequence: Synthetic oligonucleotide
cagugcuagucuaaggucc

SEQ ID NO: 902336 - RNA, 19 nt, Artificial Sequence
  Description of Artificial Sequence: Synthetic oligonucleotide
uuugggguaaauucauccu

SEQ ID NO: 902337 - RNA, 19 nt, Artificial Sequence
  Description of Artificial Sequence: Synthetic oligonucleotide
gauugcuaauuucuagcug

SEQ ID NO: 902338 - RNA, 19 nt, Artificial Sequence
  Description of Artificial Sequence: Synthetic oligonucleotide
uaugcacuaucuagggcag

SEQ ID NO: 902339 - RNA, 19 nt, Artificial Sequence
  Description of Artificial Sequence: Synthetic oligonucleotide
ugaauggucaugagacuca

SEQ ID NO: 902340 - RNA, 19 nt, Artificial Sequence
  Description of Artificial Sequence: Synthetic oligonucleotide
aaugccucuugcugcugac

SEQ ID NO: 902341 - RNA, 19 nt, Artificial Sequence
  Description of Artificial Sequence: Synthetic oligonucleotide
augucuguagcccugcugu

SEQ ID NO: 902342 - RNA, 19 nt, Artificial Sequence
  Description of Artificial Sequence: Synthetic oligonucleotide
uuuccugucguaagagggc

SEQ ID NO: 902343 - RNA, 19 nt, Artificial Sequence
  Description of Artificial Sequence: Synthetic oligonucleotide
uuccuugucucuucaagug

SEQ ID NO: 902344 - RNA, 19 nt, Artificial Sequence
  Description of Artificial Sequence: Synthetic oligonucleotide
ucggccaagaucuuucucu

SEQ ID NO: 902345 - RNA, 19 nt, Artificial Sequence
  Description of Artificial Sequence: Synthetic oligonucleotide
ucaucucacgccucaaagc

SEQ ID NO: 902346 - RNA, 19 nt, Artificial Sequence
  Description of Artificial Sequence: Synthetic oligonucleotide
guaccgauuauuuucaucu

SEQ ID NO: 902347 - RNA, 19 nt, Artificial Sequence
  Description of Artificial Sequence: Synthetic oligonucleotide
guagacauuggcccaaaug

SEQ ID NO: 902348 - RNA, 19 nt, Artificial Sequence
  Description of Artificial Sequence: Synthetic oligonucleotide
uguaugcacuaucuagggc

SEQ ID NO: 902349 - RNA, 19 nt, Artificial Sequence
  Description of Artificial Sequence: Synthetic oligonucleotide
uuugacucaguucuugguu

SEQ ID NO: 902350 - RNA, 19 nt, Artificial Sequence
  Description of Artificial Sequence: Synthetic oligonucleotide
aaauguuguaauuccucuu

SEQ ID NO: 902351 - RNA, 19 nt, Artificial Sequence
  Description of Artificial Sequence: Synthetic oligonucleotide
uauagaacuugaacgugaa

SEQ ID NO: 902352 - RNA, 19 nt, Artificial Sequence
  Description of Artificial Sequence: Synthetic oligonucleotide
uucguucuuaauuucuuaa

SEQ ID NO: 902353 - RNA, 19 nt, Artificial Sequence
  Description of Artificial Sequence: Synthetic oligonucleotide
ucuauucagcuuugcaaug

SEQ ID NO: 902354 - RNA, 19 nt, Artificial Sequence
  Description of Artificial Sequence: Synthetic oligonucleotide
ugcagaauaguguuauauc

SEQ ID NO: 902355 - RNA, 19 nt, Artificial Sequence
  Description of Artificial Sequence: Synthetic oligonucleotide
uuugaugggaauacagauu

SEQ ID NO: 902356 - RNA, 19 nt, Artificial Sequence
  Description of Artificial Sequence: Synthetic oligonucleotide
gaaauggugggaguacuag

SEQ ID NO: 902357 - RNA, 19 nt, Artificial Sequence
  Description of Artificial Sequence: Synthetic oligonucleotide
ucuacuccacuuauagaac

SEQ ID NO: 902358 - RNA, 19 nt, Artificial Sequence
  Description of Artificial Sequence: Synthetic oligonucleotide
ucugugacucaccaagccu

SEQ ID NO: 902359 - RNA, 19 nt, Artificial Sequence
  Description of Artificial Sequence: Synthetic oligonucleotide
cacuaaugccucuugcugc

SEQ ID NO: 902360 - RNA, 19 nt, Artificial Sequence
  Description of Artificial Sequence: Synthetic oligonucleotide
ugaacucgaagcuugggua

SEQ ID NO: 902361 - RNA, 19 nt, Artificial Sequence
  Description of Artificial Sequence: Synthetic oligonucleotide
caguuugaugggaauacag

SEQ ID NO: 902362 - RNA, 19 nt, Artificial Sequence
  Description of Artificial Sequence: Synthetic oligonucleotide
caauaaugcucgauccugc

SEQ ID NO: 902363 - RNA, 19 nt, Artificial Sequence
  Description of Artificial Sequence: Synthetic oligonucleotide
ucaaucuaguggcaaguuc

SEQ ID NO: 902364 - RNA, 19 nt, Artificial Sequence
  Description of Artificial Sequence: Synthetic oligonucleotide
auaaugcucgauccugcuc

SEQ ID NO: 902365 - RNA, 19 nt, Artificial Sequence
  Description of Artificial Sequence: Synthetic oligonucleotide
gaacgugaaauggugggag

SEQ ID NO: 902366 - RNA, 19 nt, Artificial Sequence
  Description of Artificial Sequence: Synthetic oligonucleotide
aagucuaccugaagucggc

SEQ ID NO: 902367 - RNA, 19 nt, Artificial Sequence
  Description of Artificial Sequence: Synthetic oligonucleotide
cugaagucuacuguuuucc

SEQ ID NO: 902368 - RNA, 19 nt, Artificial Sequence
  Description of Artificial Sequence: Synthetic oligonucleotide
cugugacucaccaagccug

SEQ ID NO: 902369 - RNA, 19 nt, Artificial Sequence
  Description of Artificial Sequence: Synthetic oligonucleotide
uuucuagauugcuaauuuc

SEQ ID NO: 902370 - RNA, 19 nt, Artificial Sequence
  Description of Artificial Sequence: Synthetic oligonucleotide
aauggugggaguacuagaa

SEQ ID NO: 902371 - RNA, 19 nt, Artificial Sequence
  Description of Artificial Sequence: Synthetic oligonucleotide
caguaaguucucuguaugc

SEQ ID NO: 902372 - RNA, 19 nt, Artificial Sequence
  Description of Artificial Sequence: Synthetic oligonucleotide
auaguguuauaucuuugau

SEQ ID NO: 902373 - RNA, 19 nt, Artificial Sequence
  Description of Artificial Sequence: Synthetic oligonucleotide
guaaguucucuguaugcac

SEQ ID NO: 902374 - RNA, 19 nt, Artificial Sequence
  Description of Artificial Sequence: Synthetic oligonucleotide
uguuacuacuuucuucuuu

SEQ ID NO: 902375 - RNA, 19 nt, Artificial Sequence
  Description of Artificial Sequence: Synthetic oligonucleotide
cuuagccuucaucucacgc

SEQ ID NO: 902376 - RNA, 19 nt, Artificial Sequence
  Description of Artificial Sequence: Synthetic oligonucleotide
accgaagacaucuggauuu

SEQ ID NO: 902377 - RNA, 19 nt, Artificial Sequence
  Description of Artificial Sequence: Synthetic oligonucleotide
aaguuaacugagccuuugu

SEQ ID NO: 902378 - RNA, 19 nt, Artificial Sequence
  Description of Artificial Sequence: Synthetic oligonucleotide
ucagaaagauucuucucua

SEQ ID NO: 902379 - RNA, 19 nt, Artificial Sequence
  Description of Artificial Sequence: Synthetic oligonucleotide
aagucggccaagaucuuuc

SEQ ID NO: 902380 - RNA, 19 nt, Artificial Sequence
  Description of Artificial Sequence: Synthetic oligonucleotide
agcacuaaugccucuugcu

SEQ ID NO: 902381 - RNA, 19 nt, Artificial Sequence
  Description of Artificial Sequence: Synthetic oligonucleotide
cuuauagaacuugaacgug

SEQ ID NO: 902382 - RNA, 19 nt, Artificial Sequence
  Description of Artificial Sequence: Synthetic oligonucleotide
ugggguaaauucauccuuc

SEQ ID NO: 902383 - RNA, 19 nt, Artificial Sequence
  Description of Artificial Sequence: Synthetic oligonucleotide
aguaaguucucuguaugca

SEQ ID NO: 902384 - RNA, 19 nt, Artificial Sequence
  Description of Artificial Sequence: Synthetic oligonucleotide
ucaagaggucugcagucug

SEQ ID NO: 902385 - RNA, 19 nt, Artificial Sequence
  Description of Artificial Sequence: Synthetic oligonucleotide
uucaaccugguaccgauua

SEQ ID NO: 902386 - RNA, 19 nt, Artificial Sequence
  Description of Artificial Sequence: Synthetic oligonucleotide
ucguaagagggcauucugu

SEQ ID NO: 902387 - RNA, 19 nt, Artificial Sequence
  Description of Artificial Sequence: Synthetic oligonucleotide
uucugugacuccaccgaag

SEQ ID NO: 902388 - RNA, 19 nt, Artificial Sequence
  Description of Artificial Sequence: Synthetic oligonucleotide
gaguugaacucgaagcuug

SEQ ID NO: 902389 - RNA, 19 nt, Artificial Sequence
  Description of Artificial Sequence: Synthetic oligonucleotide
uucuagcuguaaaugacua

SEQ ID NO: 902390 - RNA, 19 nt, Artificial Sequence
  Description of Artificial Sequence: Synthetic oligonucleotide
aacuugaacgugaaauggu

SEQ ID NO: 902391 - RNA, 19 nt, Artificial Sequence
  Description of Artificial Sequence: Synthetic oligonucleotide
uagccuucaucucacgccu

SEQ ID NO: 902392 - RNA, 19 nt, Artificial Sequence
  Description of Artificial Sequence: Synthetic oligonucleotide
ucuaccugaagucggccaa

SEQ ID NO: 902393 - RNA, 19 nt, Artificial Sequence
  Description of Artificial Sequence: Synthetic oligonucleotide
agcaucucucucuuugcag

SEQ ID NO: 902394 - RNA, 19 nt, Artificial Sequence
  Description of Artificial Sequence: Synthetic oligonucleotide
ggucaugagacucauccug

SEQ ID NO: 902395 - RNA, 19 nt, Artificial Sequence
  Description of Artificial Sequence: Synthetic oligonucleotide
agauuucaaguuaacugag

SEQ ID NO: 902396 - RNA, 19 nt, Artificial Sequence
  Description of Artificial Sequence: Synthetic oligonucleotide
ucaugagacucauccugag

SEQ ID NO: 902397 - RNA, 19 nt, Artificial Sequence
  Description of Artificial Sequence: Synthetic oligonucleotide
aacgugaaauggugggagu

SEQ ID NO: 902398 - RNA, 19 nt, Artificial Sequence
  Description of Artificial Sequence: Synthetic oligonucleotide
agcuccuuagcuuuucuau

SEQ ID NO: 902399 - RNA, 19 nt, Artificial Sequence
  Description of Artificial Sequence: Synthetic oligonucleotide
ucucuuggcguucuaccac

SEQ ID NO: 902400 - RNA, 19 nt, Artificial Sequence
  Description of Artificial Sequence: Synthetic oligonucleotide
uaucuacuccacuuauaga

SEQ ID NO: 902401 - RNA, 19 nt, Artificial Sequence
  Description of Artificial Sequence: Synthetic oligonucleotide
agugcuagucuaagguccc

SEQ ID NO: 902402 - RNA, 19 nt, Artificial Sequence
  Description of Artificial Sequence: Synthetic oligonucleotide
uccuugucucuucaagugu

SEQ ID NO: 902403 - RNA, 19 nt, Artificial Sequence
  Description of Artificial Sequence: Synthetic oligonucleotide
gaagcacuaaugccucuug

SEQ ID NO: 902404 - RNA, 19 nt, Artificial Sequence
  Description of Artificial Sequence: Synthetic oligonucleotide
cucuauguuguuucucaac

SEQ ID NO: 902405 - RNA, 19 nt, Artificial Sequence
  Description of Artificial Sequence: Synthetic oligonucleotide
ugcuguaucuacuccacuu

SEQ ID NO: 902406 - RNA, 19 nt, Artificial Sequence
  Description of Artificial Sequence: Synthetic oligonucleotide
cuuuccucgcagcaguuug

SEQ ID NO: 902407 - RNA, 19 nt, Artificial Sequence
  Description of Artificial Sequence: Synthetic oligonucleotide
acuugaacgugaaauggug

SEQ ID NO: 902408 - RNA, 19 nt, Artificial Sequence
  Description of Artificial Sequence: Synthetic oligonucleotide
uucggcucuuuucuucaag

SEQ ID NO: 902409 - RNA, 19 nt, Artificial Sequence
  Description of Artificial Sequence: Synthetic oligonucleotide
ucguucuuaauuucuuaau

SEQ ID NO: 902410 - RNA, 19 nt, Artificial Sequence
  Description of Artificial Sequence: Synthetic oligonucleotide
acauuauggaucgaguuuu

SEQ ID NO: 902411 - RNA, 19 nt, Artificial Sequence
  Description of Artificial Sequence: Synthetic oligonucleotide
auugcuucuugagugaaaa

SEQ ID NO: 902412 - RNA, 19 nt, Artificial Sequence
  Description of Artificial Sequence: Synthetic oligonucleotide
ugggccugaagucuacugu

SEQ ID NO: 902413 - RNA, 19 nt, Artificial Sequence
  Description of Artificial Sequence: Synthetic oligonucleotide
ucuagggcagccugaguac

SEQ ID NO: 902414 - RNA, 19 nt, Artificial Sequence
  Description of Artificial Sequence: Synthetic oligonucleotide
ggaaagaugucuguagccc

SEQ ID NO: 902415 - RNA, 19 nt, Artificial Sequence
  Description of Artificial Sequence: Synthetic oligonucleotide
ccgauuauuuucaucuucc

SEQ ID NO: 902416 - RNA, 19 nt, Artificial Sequence
  Description of Artificial Sequence: Synthetic oligonucleotide
ucuagcuguaaaugacuaa

SEQ ID NO: 902417 - RNA, 19 nt, Artificial Sequence
  Description of Artificial Sequence: Synthetic oligonucleotide
caucucacgccucaaagca

SEQ ID NO: 902418 - RNA, 19 nt, Artificial Sequence
  Description of Artificial Sequence: Synthetic oligonucleotide
acauuggcccaaaugaaug

SEQ ID NO: 902419 - RNA, 19 nt, Artificial Sequence
  Description of Artificial Sequence: Synthetic oligonucleotide
uguaucuacuccacuuaua

SEQ ID NO: 902420 - RNA, 19 nt, Artificial Sequence
  Description of Artificial Sequence: Synthetic oligonucleotide
uuaacccuugaaucuguuc

SEQ ID NO: 902421 - RNA, 19 nt, Artificial Sequence
  Description of Artificial Sequence: Synthetic oligonucleotide
uuuccucgcagcaguuugc

SEQ ID NO: 902422 - RNA, 19 nt, Artificial Sequence
  Description of Artificial Sequence: Synthetic oligonucleotide
uaaugccucuugcugcuga

SEQ ID NO: 902423 - RNA, 19 nt, Artificial Sequence
  Description of Artificial Sequence: Synthetic oligonucleotide
ucuaucugucggagcaaug

SEQ ID NO: 902424 - RNA, 19 nt, Artificial Sequence
  Description of Artificial Sequence: Synthetic oligonucleotide
cugacuacuauucaaucua

SEQ ID NO: 902425 - RNA, 19 nt, Artificial Sequence
  Description of Artificial Sequence: Synthetic oligonucleotide
ucggcucuuuucuucaagu

SEQ ID NO: 902426 - RNA, 19 nt, Artificial Sequence
  Description of Artificial Sequence: Synthetic oligonucleotide
caaucuaguggcaaguucu

SEQ ID NO: 902427 - RNA, 19 nt, Artificial Sequence
  Description of Artificial Sequence: Synthetic oligonucleotide
cagaaaacugucugugguc

SEQ ID NO: 902428 - RNA, 19 nt, Artificial Sequence
  Description of Artificial Sequence: Synthetic oligonucleotide
ccugguaccgauuauuuuc

SEQ ID NO: 902429 - RNA, 19 nt, Artificial Sequence
  Description of Artificial Sequence: Synthetic oligonucleotide
cucggaguugaacucgaag

SEQ ID NO: 902430 - RNA, 19 nt, Artificial Sequence
  Description of Artificial Sequence: Synthetic oligonucleotide
gugggaguacuagaaacag

SEQ ID NO: 902431 - RNA, 19 nt, Artificial Sequence
  Description of Artificial Sequence: Synthetic oligonucleotide
ucaucuauuuugaguuuua

SEQ ID NO: 902432 - RNA, 19 nt, Artificial Sequence
  Description of Artificial Sequence: Synthetic oligonucleotide
uguuagaauuaugcagcug

SEQ ID NO: 902433 - RNA, 19 nt, Artificial Sequence
  Description of Artificial Sequence: Synthetic oligonucleotide
caucuucaagauccaggcg

SEQ ID NO: 902434 - RNA, 19 nt, Artificial Sequence
  Description of Artificial Sequence: Synthetic oligonucleotide
aaguucucuguaugcacua

SEQ ID NO: 902435 - RNA, 19 nt, Artificial Sequence
  Description of Artificial Sequence: Synthetic oligonucleotide
ugaaauggugggaguacua

SEQ ID NO: 902436 - RNA, 19 nt, Artificial Sequence
  Description of Artificial Sequence: Synthetic oligonucleotide
auucaaucuaguggcaagu

SEQ ID NO: 902437 - RNA, 19 nt, Artificial Sequence
  Description of Artificial Sequence: Synthetic oligonucleotide
cucgauccugcucccaucc

SEQ ID NO: 902438 - RNA, 19 nt, Artificial Sequence
  Description of Artificial Sequence: Synthetic oligonucleotide
cacgccucaaagcagcuuc

SEQ ID NO: 902439 - RNA, 19 nt, Artificial Sequence
  Description of Artificial Sequence: Synthetic oligonucleotide
cuuugauccagaucucgga

SEQ ID NO: 902440 - RNA, 19 nt, Artificial Sequence
  Description of Artificial Sequence: Synthetic oligonucleotide
agucuacuguuuuccuguc

SEQ ID NO: 902441 - RNA, 19 nt, Artificial Sequence
  Description of Artificial Sequence: Synthetic oligonucleotide
cauucugugacuccaccga

SEQ ID NO: 902442 - RNA, 19 nt, Artificial Sequence
  Description of Artificial Sequence: Synthetic oligonucleotide
uuggcccaaaugaaugguc

SEQ ID NO: 902443 - RNA, 19 nt, Artificial Sequence
  Description of Artificial Sequence: Synthetic oligonucleotide
uacuguuuuccugucguaa

SEQ ID NO: 902444 - RNA, 19 nt, Artificial Sequence
  Description of Artificial Sequence: Synthetic oligonucleotide
aacccuugaaucuguucuu

SEQ ID NO: 902445 - RNA, 19 nt, Artificial Sequence
  Description of Artificial Sequence: Synthetic oligonucleotide
agucuaccugaagucggcc

SEQ ID NO: 902446 - RNA, 19 nt, Artificial Sequence
  Description of Artificial Sequence: Synthetic oligonucleotide
auggcguaaauaauccucu

SEQ ID NO: 902447 - RNA, 19 nt, Artificial Sequence
  Description of Artificial Sequence: Synthetic oligonucleotide
gaucaguaaguucucugua

SEQ ID NO: 902448 - RNA, 19 nt, Artificial Sequence
  Description of Artificial Sequence: Synthetic oligonucleotide
aucugucggagcaaugguc

SEQ ID NO: 902449 - RNA, 19 nt, Artificial Sequence
  Description of Artificial Sequence: Synthetic oligonucleotide
gcauucugugacuccaccg

SEQ ID NO: 902450 - RNA, 19 nt, Artificial Sequence
  Description of Artificial Sequence: Synthetic oligonucleotide
ccacuuauagaacuugaac

SEQ ID NO: 902451 - RNA, 19 nt, Artificial Sequence
  Description of Artificial Sequence: Synthetic oligonucleotide
ucucuauguuguuucucaa

SEQ ID NO: 902452 - RNA, 19 nt, Artificial Sequence
  Description of Artificial Sequence: Synthetic oligonucleotide
guugaacucgaagcuuggg

SEQ ID NO: 902453 - RNA, 19 nt, Artificial Sequence
  Description of Artificial Sequence: Synthetic oligonucleotide
gacauuauggaucgaguuu

SEQ ID NO: 902454 - RNA, 19 nt, Artificial Sequence
  Description of Artificial Sequence: Synthetic oligonucleotide
cuaucuagggcagccugag

SEQ ID NO: 902455 - RNA, 19 nt, Artificial Sequence
  Description of Artificial Sequence: Synthetic oligonucleotide
ucacugaucucauggcgua

SEQ ID NO: 902456 - RNA, 19 nt, Artificial Sequence
  Description of Artificial Sequence: Synthetic oligonucleotide
gggaguacuagaaacagaa

SEQ ID NO: 902457 - RNA, 19 nt, Artificial Sequence
  Description of Artificial Sequence: Synthetic oligonucleotide
cugguaccgauuauuuuca

SEQ ID NO: 902458 - RNA, 19 nt, Artificial Sequence
  Description of Artificial Sequence: Synthetic oligonucleotide
cuccaccgaagacaucugg

SEQ ID NO: 902459 - RNA, 19 nt, Artificial Sequence
  Description of Artificial Sequence: Synthetic oligonucleotide
cuuuuauugcuucuugagu

SEQ ID NO: 902460 - RNA, 19 nt, Artificial Sequence
  Description of Artificial Sequence: Synthetic oligonucleotide
acugacugcacaacagugu

SEQ ID NO: 902461 - RNA, 19 nt, Artificial Sequence
  Description of Artificial Sequence: Synthetic oligonucleotide
cauuucuaacugacugcac

SEQ ID NO: 902462 - RNA, 19 nt, Artificial Sequence
  Description of Artificial Sequence: Synthetic oligonucleotide
ugugguccuuuucuuuuau

SEQ ID NO: 902463 - RNA, 19 nt, Artificial Sequence
  Description of Artificial Sequence: Synthetic oligonucleotide
cagcauuagcuuugugaag

SEQ ID NO: 902464 - RNA, 19 nt, Artificial Sequence
  Description of Artificial Sequence: Synthetic oligonucleotide
uucuaacugacugcacaac

SEQ ID NO: 902465 - RNA, 19 nt, Artificial Sequence
  Description of Artificial Sequence: Synthetic oligonucleotide
aguugaacucgaagcuugg

SEQ ID NO: 902466 - RNA, 19 nt, Artificial Sequence
  Description of Artificial Sequence: Synthetic oligonucleotide
ugacucaguucuugguuuc

SEQ ID NO: 902467 - RNA, 19 nt, Artificial Sequence
  Description of Artificial Sequence: Synthetic oligonucleotide
gauuuucaauaaugcucga

SEQ ID NO: 902468 - RNA, 19 nt, Artificial Sequence
  Description of Artificial Sequence: Synthetic oligonucleotide
ggaccugucuuaaauguug

SEQ ID NO: 902469 - RNA, 19 nt, Artificial Sequence
  Description of Artificial Sequence: Synthetic oligonucleotide
aaaacugucugugguccuu

SEQ ID NO: 902470 - RNA, 19 nt, Artificial Sequence
  Description of Artificial Sequence: Synthetic oligonucleotide
auuggcccaaaugaauggu

SEQ ID NO: 902471 - RNA, 19 nt, Artificial Sequence
  Description of Artificial Sequence: Synthetic oligonucleotide
guugccuguaaauuuucua

SEQ ID NO: 902472 - RNA, 19 nt, Artificial Sequence
  Description of Artificial Sequence: Synthetic oligonucleotide
agcuuggguaucucuuuca

SEQ ID NO: 902473 - RNA, 19 nt, Artificial Sequence
  Description of Artificial Sequence: Synthetic oligonucleotide
agcaguuugcucugcccgu

SEQ ID NO: 902474 - RNA, 19 nt, Artificial Sequence
  Description of Artificial Sequence: Synthetic oligonucleotide
uugcuaauuucuagcugua

SEQ ID NO: 902475 - RNA, 19 nt, Artificial Sequence
  Description of Artificial Sequence: Synthetic oligonucleotide
ugucggagcaauggucuug

SEQ ID NO: 902476 - RNA, 19 nt, Artificial Sequence
  Description of Artificial Sequence: Synthetic oligonucleotide
auucugugacuccaccgaa

SEQ ID NO: 902477 - RNA, 19 nt, Artificial Sequence
  Description of Artificial Sequence: Synthetic oligonucleotide
ucaaccugguaccgauuau

SEQ ID NO: 902478 - RNA, 19 nt, Artificial Sequence
  Description of Artificial Sequence: Synthetic oligonucleotide
auagaacuugaacgugaaa

SEQ ID NO: 902479 - RNA, 19 nt, Artificial Sequence
  Description of Artificial Sequence: Synthetic oligonucleotide
cauccaagucuaccugaag

SEQ ID NO: 902480 - RNA, 19 nt, Artificial Sequence
  Description of Artificial Sequence: Synthetic oligonucleotide
cuuugcaggcuaguugaac

SEQ ID NO: 902481 - RNA, 19 nt, Artificial Sequence
  Description of Artificial Sequence: Synthetic oligonucleotide
cacuuugacucaguucuug

SEQ ID NO: 902482 - RNA, 19 nt, Artificial Sequence
  Description of Artificial Sequence: Synthetic oligonucleotide
auccugcucccauccuuac

SEQ ID NO: 902483 - RNA, 19 nt, Artificial Sequence
  Description of Artificial Sequence: Synthetic oligonucleotide
agaguugccuguaaauuuu

SEQ ID NO: 902484 - RNA, 19 nt, Artificial Sequence
  Description of Artificial Sequence: Synthetic oligonucleotide
caucuggauuuuguuggcc

SEQ ID NO: 902485 - RNA, 19 nt, Artificial Sequence
  Description of Artificial Sequence: Synthetic oligonucleotide
ucuuugcaggcuaguugaa

SEQ ID NO: 902486 - RNA, 19 nt, Artificial Sequence
  Description of Artificial Sequence: Synthetic oligonucleotide
uucuaucugucggagcaau

SEQ ID NO: 902487 - RNA, 19 nt, Artificial Sequence
  Description of Artificial Sequence: Synthetic oligonucleotide
agcuuuaguugagacugca

SEQ ID NO: 902488 - RNA, 19 nt, Artificial Sequence
  Description of Artificial Sequence: Synthetic oligonucleotide
aaucuaguggcaaguucuu

SEQ ID NO: 902489 - RNA, 19 nt, Artificial Sequence
  Description of Artificial Sequence: Synthetic oligonucleotide
cugggccugaagucuacug

SEQ ID NO: 902490 - RNA, 19 nt, Artificial Sequence
  Description of Artificial Sequence: Synthetic oligonucleotide
gguaccgauuauuuucauc

SEQ ID NO: 902491 - RNA, 19 nt, Artificial Sequence
  Description of Artificial Sequence: Synthetic oligonucleotide
ugagagccuagaguugccu

SEQ ID NO: 902492 - RNA, 19 nt, Artificial Sequence
  Description of Artificial Sequence: Synthetic oligonucleotide
uucaaucuaguggcaaguu

SEQ ID NO: 902493 - RNA, 19 nt, Artificial Sequence
  Description of Artificial Sequence: Synthetic oligonucleotide
cagccaacaaagucuguga

SEQ ID NO: 902494 - RNA, 19 nt, Artificial Sequence
  Description of Artificial Sequence: Synthetic oligonucleotide
ccuuacagcuucauaaaga

SEQ ID NO: 902495 - RNA, 19 nt, Artificial Sequence
  Description of Artificial Sequence: Synthetic oligonucleotide
cucugccuuuucuccauac

SEQ ID NO: 902496 - RNA, 19 nt, Artificial Sequence
  Description of Artificial Sequence: Synthetic oligonucleotide
ugcuaauuucuagcuguaa

SEQ ID NO: 902497 - RNA, 19 nt, Artificial Sequence
  Description of Artificial Sequence: Synthetic oligonucleotide
auggugggaguacuagaaa

SEQ ID NO: 902498 - RNA, 19 nt, Artificial Sequence
  Description of Artificial Sequence: Synthetic oligonucleotide
cucgcagcaguuugcucug

SEQ ID NO: 902499 - RNA, 19 nt, Artificial Sequence
  Description of Artificial Sequence: Synthetic oligonucleotide
cuacuccacuuauagaacu

SEQ ID NO: 902500 - RNA, 19 nt, Artificial Sequence
  Description of Artificial Sequence: Synthetic oligonucleotide
ucgcagagaguucuuccuu

SEQ ID NO: 902501 - RNA, 19 nt, Artificial Sequence
  Description of Artificial Sequence: Synthetic oligonucleotide
cguaagagggcauucugug

SEQ ID NO: 902502 - RNA, 19 nt, Artificial Sequence
  Description of Artificial Sequence: Synthetic oligonucleotide
gucaugagacucauccuga

SEQ ID NO: 902503 - RNA, 19 nt, Artificial Sequence
  Description of Artificial Sequence: Synthetic oligonucleotide
caaguucauccaagucuac

SEQ ID NO: 902504 - RNA, 19 nt, Artificial Sequence
  Description of Artificial Sequence: Synthetic oligonucleotide
acuaucuagggcagccuga

SEQ ID NO: 902505 - RNA, 19 nt, Artificial Sequence
  Description of Artificial Sequence: Synthetic oligonucleotide
ggcgaaguuccucugcuuc

SEQ ID NO: 902506 - RNA, 19 nt, Artificial Sequence
  Description of Artificial Sequence: Synthetic oligonucleotide
uaccgauuauuuucaucuu

SEQ ID NO: 902507 - RNA, 19 nt, Artificial Sequence
  Description of Artificial Sequence: Synthetic oligonucleotide
caugagacucauccugaga

SEQ ID NO: 902508 - RNA, 19 nt, Artificial Sequence
  Description of Artificial Sequence: Synthetic oligonucleotide
agucggccaagaucuuucu

SEQ ID NO: 902509 - RNA, 19 nt, Artificial Sequence
  Description of Artificial Sequence: Synthetic oligonucleotide
gaacucgaagcuuggguau

SEQ ID NO: 902510 - RNA, 19 nt, Artificial Sequence
  Description of Artificial Sequence: Synthetic oligonucleotide
ucugcagaauaguguuaua

SEQ ID NO: 902511 - RNA, 19 nt, Artificial Sequence
  Description of Artificial Sequence: Synthetic oligonucleotide
acgccucaaagcagcuucc

SEQ ID NO: 902512 - RNA, 19 nt, Artificial Sequence
  Description of Artificial Sequence: Synthetic oligonucleotide
gcuaguugaacuuucuuuu

SEQ ID NO: 902513 - RNA, 19 nt, Artificial Sequence
  Description of Artificial Sequence: Synthetic oligonucleotide
acugaucucauggcguaaa

SEQ ID NO: 902514 - RNA, 19 nt, Artificial Sequence
  Description of Artificial Sequence: Synthetic oligonucleotide
aucucacgccucaaagcag

SEQ ID NO: 902515 - RNA, 19 nt, Artificial Sequence
  Description of Artificial Sequence: Synthetic oligonucleotide
gcagugcuagucuaagguc

SEQ ID NO: 902516 - RNA, 19 nt, Artificial Sequence
  Description of Artificial Sequence: Synthetic oligonucleotide
cugugacuccaccgaagac

SEQ ID NO: 902517 - RNA, 19 nt, Artificial Sequence
  Description of Artificial Sequence: Synthetic oligonucleotide
augggaauacagauuucaa

SEQ ID NO: 902518 - RNA, 19 nt, Artificial Sequence
  Description of Artificial Sequence: Synthetic oligonucleotide
uaccugaagucggccaaga

SEQ ID NO: 902519 - RNA, 19 nt, Artificial Sequence
  Description of Artificial Sequence: Synthetic oligonucleotide
cuuugacucaguucuuggu

SEQ ID NO: 902520 - RNA, 19 nt, Artificial Sequence
  Description of Artificial Sequence: Synthetic oligonucleotide
agaugucuguagcccugcu

SEQ ID NO: 902521 - RNA, 19 nt, Artificial Sequence
  Description of Artificial Sequence: Synthetic oligonucleotide
uaacugagccuuuguccuu

SEQ ID NO: 902522 - RNA, 19 nt, Artificial Sequence
  Description of Artificial Sequence: Synthetic oligonucleotide
cuaccugaagucggccaag

SEQ ID NO: 902523 - RNA, 19 nt, Artificial Sequence
  Description of Artificial Sequence: Synthetic oligonucleotide
ugcaauucuuugggguaaa

SEQ ID NO: 902524 - RNA, 19 nt, Artificial Sequence
  Description of Artificial Sequence: Synthetic oligonucleotide
cagacauuauggaucgagu

SEQ ID NO: 902525 - RNA, 19 nt, Artificial Sequence
  Description of Artificial Sequence: Synthetic oligonucleotide
ucucggaguugaacucgaa

SEQ ID NO: 902526 - RNA, 19 nt, Artificial Sequence
  Description of Artificial Sequence: Synthetic oligonucleotide
acgugaaauggugggagua

SEQ ID NO: 902527 - RNA, 19 nt, Artificial Sequence
  Description of Artificial Sequence: Synthetic oligonucleotide
uagcugggccugaagucua

SEQ ID NO: 902528 - RNA, 19 nt, Artificial Sequence
  Description of Artificial Sequence: Synthetic oligonucleotide
ugguaccgauuauuuucau

SEQ ID NO: 902529 - RNA, 19 nt, Artificial Sequence
  Description of Artificial Sequence: Synthetic oligonucleotide
cauuaacccuugaaucugu

SEQ ID NO: 902530 - RNA, 19 nt, Artificial Sequence
  Description of Artificial Sequence: Synthetic oligonucleotide
acuguccuuagcagcauua

SEQ ID NO: 902531 - RNA, 19 nt, Artificial Sequence
  Description of Artificial Sequence: Synthetic oligonucleotide
uccagaucucggaguugaa

SEQ ID NO: 902532 - RNA, 19 nt, Artificial Sequence
  Description of Artificial Sequence: Synthetic oligonucleotide
gauccugcucccauccuua

SEQ ID NO: 902533 - RNA, 19 nt, Artificial Sequence
  Description of Artificial Sequence: Synthetic oligonucleotide
gacuacuauucaaucuagu

SEQ ID NO: 902534 - RNA, 19 nt, Artificial Sequence
  Description of Artificial Sequence: Synthetic oligonucleotide
cagcaucucucucuuugca

SEQ ID NO: 902535 - RNA, 19 nt, Artificial Sequence
  Description of Artificial Sequence: Synthetic oligonucleotide
ccauuucuaacugacugca

SEQ ID NO: 902536 - RNA, 19 nt, Artificial Sequence
  Description of Artificial Sequence: Synthetic oligonucleotide
cugcagaauaguguuauau

SEQ ID NO: 902537 - RNA, 19 nt, Artificial Sequence
  Description of Artificial Sequence: Synthetic oligonucleotide
accugaagucggccaagau

SEQ ID NO: 902538 - RNA, 19 nt, Artificial Sequence
  Description of Artificial Sequence: Synthetic oligonucleotide
cuagaguugccuguaaauu

SEQ ID NO: 902539 - RNA, 19 nt, Artificial Sequence
  Description of Artificial Sequence: Synthetic oligonucleotide
ugaagucggccaagaucuu

SEQ ID NO: 902540 - RNA, 19 nt, Artificial Sequence
  Description of Artificial Sequence: Synthetic oligonucleotide
aucucggaguugaacucga

SEQ ID NO: 902541 - RNA, 19 nt, Artificial Sequence
  Description of Artificial Sequence: Synthetic oligonucleotide
gucggccaagaucuuucuc

SEQ ID NO: 902542 - RNA, 19 nt, Artificial Sequence
  Description of Artificial Sequence: Synthetic oligonucleotide
cuagcugggccugaagucu

SEQ ID NO: 902543 - RNA, 19 nt, Artificial Sequence
  Description of Artificial Sequence: Synthetic oligonucleotide
auuaacccuugaaucuguu

SEQ ID NO: 902544 - RNA, 19 nt, Artificial Sequence
  Description of Artificial Sequence: Synthetic oligonucleotide
ggccaagaucuuucucuug

SEQ ID NO: 902545 - RNA, 19 nt, Artificial Sequence
  Description of Artificial Sequence: Synthetic oligonucleotide
ugguuucgauucucugcuu

SEQ ID NO: 902546 - RNA, 19 nt, Artificial Sequence
  Description of Artificial Sequence: Synthetic oligonucleotide
agccuagaguugccuguaa

SEQ ID NO: 902547 - RNA, 19 nt, Artificial Sequence
  Description of Artificial Sequence: Synthetic oligonucleotide
caucaaggaccugucuuaa

SEQ ID NO: 902548 - RNA, 19 nt, Artificial Sequence
  Description of Artificial Sequence: Synthetic oligonucleotide
agauccaggcgaaguuccu

SEQ ID NO: 902549 - RNA, 19 nt, Artificial Sequence
  Description of Artificial Sequence: Synthetic oligonucleotide
cuguaucuacuccacuuau

SEQ ID NO: 902550 - RNA, 19 nt, Artificial Sequence
  Description of Artificial Sequence: Synthetic oligonucleotide
ccaggcgaaguuccucugc

SEQ ID NO: 902551 - RNA, 19 nt, Artificial Sequence
  Description of Artificial Sequence: Synthetic oligonucleotide
ggcguucuaccacagaauu

SEQ ID NO: 902552 - RNA, 19 nt, Artificial Sequence
  Description of Artificial Sequence: Synthetic oligonucleotide
cguucuaccacagaauuua

SEQ ID NO: 902553 - RNA, 19 nt, Artificial Sequence
  Description of Artificial Sequence: Synthetic oligonucleotide
cuaguggcaaguucuucuu

SEQ ID NO: 902554 - RNA, 19 nt, Artificial Sequence
  Description of Artificial Sequence: Synthetic oligonucleotide
aggcgaaguuccucugcuu

SEQ ID NO: 902555 - RNA, 19 nt, Artificial Sequence
  Description of Artificial Sequence: Synthetic oligonucleotide
acuccaccgaagacaucug

SEQ ID NO: 902556 - RNA, 19 nt, Artificial Sequence
  Description of Artificial Sequence: Synthetic oligonucleotide
ugacucuagcugggccuga

SEQ ID NO: 902557 - RNA, 19 nt, Artificial Sequence
  Description of Artificial Sequence: Synthetic oligonucleotide
cgugaaauggugggaguac

SEQ ID NO: 902558 - RNA, 19 nt, Artificial Sequence
  Description of Artificial Sequence: Synthetic oligonucleotide
caggcgaaguuccucugcu

SEQ ID NO: 902559 - RNA, 19 nt, Artificial Sequence
  Description of Artificial Sequence: Synthetic oligonucleotide
gagccuagaguugccugua

SEQ ID NO: 902560 - RNA, 19 nt, Artificial Sequence
  Description of Artificial Sequence: Synthetic oligonucleotide
ucacgccucaaagcagcuu

SEQ ID NO: 902561 - RNA, 19 nt, Artificial Sequence
  Description of Artificial Sequence: Synthetic oligonucleotide
caggcuaguugaacuuucu

SEQ ID NO: 902562 - RNA, 19 nt, Artificial Sequence
  Description of Artificial Sequence: Synthetic oligonucleotide
gcaggcuaguugaacuuuc

SEQ ID NO: 902563 - RNA, 19 nt, Artificial Sequence
  Description of Artificial Sequence: Synthetic oligonucleotide
gucggagcaauggucuugu

SEQ ID NO: 902564 - RNA, 19 nt, Artificial Sequence
  Description of Artificial Sequence: Synthetic oligonucleotide
gccuagaguugccuguaaa

SEQ ID NO: 902565 - RNA, 19 nt, Artificial Sequence
  Description of Artificial Sequence: Synthetic oligonucleotide
caucuauuuugaguuuuau

SEQ ID NO: 902566 - RNA, 19 nt, Artificial Sequence
  Description of Artificial Sequence: Synthetic oligonucleotide
ccuagaguugccuguaaau

SEQ ID NO: 902567 - RNA, 19 nt, Artificial Sequence
  Description of Artificial Sequence: Synthetic oligonucleotide
cugcacaacagugucuuuu

SEQ ID NO: 902568 - RNA, 19 nt, Artificial Sequence
  Description of Artificial Sequence: Synthetic oligonucleotide
caccgaagacaucuggauu

SEQ ID NO: 902569 - RNA, 19 nt, Artificial Sequence
  Description of Artificial Sequence: Synthetic oligonucleotide
gugacucaccaagccuguc

SEQ ID NO: 902570 - RNA, 19 nt, Artificial Sequence
  Description of Artificial Sequence: Synthetic oligonucleotide
caaccugguaccgauuauu

SEQ ID NO: 902571 - RNA, 19 nt, Artificial Sequence
  Description of Artificial Sequence: Synthetic oligonucleotide
ucggagcaauggucuuguu

SEQ ID NO: 902572 - RNA, 19 nt, Artificial Sequence
  Description of Artificial Sequence: Synthetic oligonucleotide
cuuugccaucaaggaccug

SEQ ID NO: 902573 - RNA, 19 nt, Artificial Sequence
  Description of Artificial Sequence: Synthetic oligonucleotide
ggaguugaacucgaagcuu

SEQ ID NO: 902574 - RNA, 19 nt, Artificial Sequence
  Description of Artificial Sequence: Synthetic oligonucleotide
gggccugaagucuacuguu

SEQ ID NO: 902575 - RNA, 19 nt, Artificial Sequence
  Description of Artificial Sequence: Synthetic oligonucleotide
cucacgccucaaagcagcu

SEQ ID NO: 902576 - RNA, 19 nt, Artificial Sequence
  Description of Artificial Sequence: Synthetic oligonucleotide
gucugcagucugacuacua

SEQ ID NO: 902577 - RNA, 19 nt, Artificial Sequence
  Description of Artificial Sequence: Synthetic oligonucleotide
cacugaucucauggcguaa

SEQ ID NO: 902578 - RNA, 19 nt, Artificial Sequence
  Description of Artificial Sequence: Synthetic oligonucleotide
gcauuagcuuugugaagau

SEQ ID NO: 902579 - RNA, 19 nt, Artificial Sequence
  Description of Artificial Sequence: Synthetic oligonucleotide
ggcccaaaugaauggucau

SEQ ID NO: 902580 - RNA, 19 nt, Artificial Sequence
  Description of Artificial Sequence: Synthetic oligonucleotide
cucccacgaugaagucuga

SEQ ID NO: 902581 - RNA, 19 nt, Artificial Sequence
  Description of Artificial Sequence: Synthetic oligonucleotide
ccaccgaagacaucuggau

SEQ ID NO: 902582 - RNA, 19 nt, Artificial Sequence
  Description of Artificial Sequence: Synthetic oligonucleotide
cucugcccguugcagugcu

SEQ ID NO: 902583 - RNA, 19 nt, Artificial Sequence
  Description of Artificial Sequence: Synthetic oligonucleotide
cugaguacuucggcucuuu

SEQ ID NO: 902584 - RNA, 19 nt, Artificial Sequence
  Description of Artificial Sequence: Synthetic oligonucleotide
ccguugcagugcuagucua

SEQ ID NO: 902585 - RNA, 19 nt, Artificial Sequence
  Description of Artificial Sequence: Synthetic oligonucleotide
gcguucuaccacagaauuu

SEQ ID NO: 902586 - RNA, 19 nt, Artificial Sequence
  Description of Artificial Sequence: Synthetic oligonucleotide
gccugucagaaagauucuu

SEQ ID NO: 902587 - RNA, 19 nt, Artificial Sequence
  Description of Artificial Sequence: Synthetic oligonucleotide
ggccugaagucuacuguuu

SEQ ID NO: 902588 - RNA, 19 nt, Artificial Sequence
  Description of Artificial Sequence: Synthetic oligonucleotide
cucuagcaucucccacgau

SEQ ID NO: 902589 - RNA, 19 nt, Artificial Sequence
  Description of Artificial Sequence: Synthetic oligonucleotide
gcaguuugcucugcccguu

SEQ ID NO: 902590 - RNA, 19 nt, Artificial Sequence
  Description of Artificial Sequence: Synthetic oligonucleotide
aaacuaucuaacuaggguc

SEQ ID NO: 902591 - RNA, 19 nt, Artificial Sequence
  Description of Artificial Sequence: Synthetic oligonucleotide
aaggugaucaaagagacac

SEQ ID NO: 902592 - RNA, 19 nt, Artificial Sequence
  Description of Artificial Sequence: Synthetic oligonucleotide
gaagauugaacauaccugg

SEQ ID NO: 902593 - RNA, 19 nt, Artificial Sequence
  Description of Artificial Sequence: Synthetic oligonucleotide
uucaaaacuaucuaacuag

SEQ ID NO: 902594 - RNA, 19 nt, Artificial Sequence
  Description of Artificial Sequence: Synthetic oligonucleotide
uaaugauucagucucauac

SEQ ID NO: 902595 - RNA, 19 nt, Artificial Sequence
  Description of Artificial Sequence: Synthetic oligonucleotide
aaaacuaucuaacuagggu

SEQ ID NO: 902596 - RNA, 19 nt, Artificial Sequence
  Description of Artificial Sequence: Synthetic oligonucleotide
ugauucuacagcaaucugg

SEQ ID NO: 902597 - RNA, 19 nt, Artificial Sequence
  Description of Artificial Sequence: Synthetic oligonucleotide
gauaaaggugaucaaagag

SEQ ID NO: 902598 - RNA, 19 nt, Artificial Sequence
  Description of Artificial Sequence: Synthetic oligonucleotide
ugaaucaggacauaggcca

SEQ ID NO: 902599 - RNA, 19 nt, Artificial Sequence
  Description of Artificial Sequence: Synthetic oligonucleotide
ucaaaacuaucuaacuagg

SEQ ID NO: 902600 - RNA, 19 nt, Artificial Sequence
  Description of Artificial Sequence: Synthetic oligonucleotide
auaaggacacuguagcccc

SEQ ID NO: 902601 - RNA, 19 nt, Artificial Sequence
  Description of Artificial Sequence: Synthetic oligonucleotide
aauaguaugcacucacgug

SEQ ID NO: 902602 - RNA, 19 nt, Artificial Sequence
  Description of Artificial Sequence: Synthetic oligonucleotide
ggaauaucuucucagaugg

SEQ ID NO: 902603 - RNA, 19 nt, Artificial Sequence
  Description of Artificial Sequence: Synthetic oligonucleotide
aaauuugggccucacagca

SEQ ID NO: 902604 - RNA, 19 nt, Artificial Sequence
  Description of Artificial Sequence: Synthetic oligonucleotide
uguauuugacuacuccugg

SEQ ID NO: 902605 - RNA, 19 nt, Artificial Sequence
  Description of Artificial Sequence: Synthetic oligonucleotide
aauuccguuguuucgcagg

SEQ ID NO: 902606 - RNA, 19 nt, Artificial Sequence
  Description of Artificial Sequence: Synthetic oligonucleotide
aaccggacagguaagaccc

SEQ ID NO: 902607 - RNA, 19 nt, Artificial Sequence
  Description of Artificial Sequence: Synthetic oligonucleotide
ucgauuucuagacugaagu

SEQ ID NO: 902608 - RNA, 19 nt, Artificial Sequence
  Description of Artificial Sequence: Synthetic oligonucleotide
acaucuacucuacuguacc

SEQ ID NO: 902609 - RNA, 19 nt, Artificial Sequence
  Description of Artificial Sequence: Synthetic oligonucleotide
uauaauauuauggaaggaa

SEQ ID NO: 902610 - RNA, 19 nt, Artificial Sequence
  Description of Artificial Sequence: Synthetic oligonucleotide
aacaugcccuacuuuaagg

SEQ ID NO: 902611 - RNA, 19 nt, Artificial Sequence
  Description of Artificial Sequence: Synthetic oligonucleotide
ucgaauaaggacacuguag

SEQ ID NO: 902612 - RNA, 19 nt, Artificial Sequence
  Description of Artificial Sequence: Synthetic oligonucleotide
gacgauucaauaucaauac

SEQ ID NO: 902613 - RNA, 19 nt, Artificial Sequence
  Description of Artificial Sequence: Synthetic oligonucleotide
ucaucuauccuaauuggga

SEQ ID NO: 902614 - RNA, 19 nt, Artificial Sequence
  Description of Artificial Sequence: Synthetic oligonucleotide
gucacauagagacugacug

SEQ ID NO: 902615 - RNA, 19 nt, Artificial Sequence
  Description of Artificial Sequence: Synthetic oligonucleotide
gcuagaaguagucacagcg

SEQ ID NO: 902616 - RNA, 19 nt, Artificial Sequence
  Description of Artificial Sequence: Synthetic oligonucleotide
ugacgauucaauaucaaua

SEQ ID NO: 902617 - RNA, 19 nt, Artificial Sequence
  Description of Artificial Sequence: Synthetic oligonucleotide
aaccuucccacguuguugg

SEQ ID NO: 902618 - RNA, 19 nt, Artificial Sequence
  Description of Artificial Sequence: Synthetic oligonucleotide
agaaucacagaugaagcac

SEQ ID NO: 902619 - RNA, 19 nt, Artificial Sequence
  Description of Artificial Sequence: Synthetic oligonucleotide
agcuguauuugacuacucc

SEQ ID NO: 902620 - RNA, 19 nt, Artificial Sequence
  Description of Artificial Sequence: Synthetic oligonucleotide
aagaaucacagaugaagca

SEQ ID NO: 902621 - RNA, 19 nt, Artificial Sequence
  Description of Artificial Sequence: Synthetic oligonucleotide
cauaguggcagaaaucccc

SEQ ID NO: 902622 - RNA, 19 nt, Artificial Sequence
  Description of Artificial Sequence: Synthetic oligonucleotide
uuuaagggguggaauaucu

SEQ ID NO: 902623 - RNA, 19 nt, Artificial Sequence
  Description of Artificial Sequence: Synthetic oligonucleotide
ucuacagcaaucuggcuug

SEQ ID NO: 902624 - RNA, 19 nt, Artificial Sequence
  Description of Artificial Sequence: Synthetic oligonucleotide
accccgagcaucuacacac

SEQ ID NO: 902625 - RNA, 19 nt, Artificial Sequence
  Description of Artificial Sequence: Synthetic oligonucleotide
acucacgugaagaaaauac

SEQ ID NO: 902626 - RNA, 19 nt, Artificial Sequence
  Description of Artificial Sequence: Synthetic oligonucleotide
agaauucccacccuccagg

SEQ ID NO: 902627 - RNA, 19 nt, Artificial Sequence
  Description of Artificial Sequence: Synthetic oligonucleotide
aaggcgaucgauuucuaga

SEQ ID NO: 902628 - RNA, 19 nt, Artificial Sequence
  Description of Artificial Sequence: Synthetic oligonucleotide
aaaagacaauccauagugg

SEQ ID NO: 902629 - RNA, 19 nt, Artificial Sequence
  Description of Artificial Sequence: Synthetic oligonucleotide
ugaaaagacaauccauagu

SEQ ID NO: 902630 - RNA, 19 nt, Artificial Sequence
  Description of Artificial Sequence: Synthetic oligonucleotide
aauacagaguuagcuacuc

SEQ ID NO: 902631 - RNA, 19 nt, Artificial Sequence
  Description of Artificial Sequence: Synthetic oligonucleotide
auacugauaaaggugauca

SEQ ID NO: 902632 - RNA, 19 nt, Artificial Sequence
  Description of Artificial Sequence: Synthetic oligonucleotide
aaucuuguacacaagggca

SEQ ID NO: 902633 - RNA, 19 nt, Artificial Sequence
  Description of Artificial Sequence: Synthetic oligonucleotide
uccauguuaacuguccggg

SEQ ID NO: 902634 - RNA, 19 nt, Artificial Sequence
  Description of Artificial Sequence: Synthetic oligonucleotide
aacucuaaacuugggagag

SEQ ID NO: 902635 - RNA, 19 nt, Artificial Sequence
  Description of Artificial Sequence: Synthetic oligonucleotide
uuuauaaggcgaucgauuu

SEQ ID NO: 902636 - RNA, 19 nt, Artificial Sequence
  Description of Artificial Sequence: Synthetic oligonucleotide
caaaacuaucuaacuaggg

SEQ ID NO: 902637 - RNA, 19 nt, Artificial Sequence
  Description of Artificial Sequence: Synthetic oligonucleotide
uuggaagugucuaacuucu

SEQ ID NO: 902638 - RNA, 19 nt, Artificial Sequence
  Description of Artificial Sequence: Synthetic oligonucleotide
aucuaacuagggucaaacc

SEQ ID NO: 902639 - RNA, 19 nt, Artificial Sequence
  Description of Artificial Sequence: Synthetic oligonucleotide
ggagcaugcauacagaaug

SEQ ID NO: 902640 - RNA, 19 nt, Artificial Sequence
  Description of Artificial Sequence: Synthetic oligonucleotide
uauccuaauugggacaagg

SEQ ID NO: 902641 - RNA, 19 nt, Artificial Sequence
  Description of Artificial Sequence: Synthetic oligonucleotide
uauaaggcgaucgauuucu

SEQ ID NO: 902642 - RNA, 19 nt, Artificial Sequence
  Description of Artificial Sequence: Synthetic oligonucleotide
aucaaugacgauucaauau

SEQ ID NO: 902643 - RNA, 19 nt, Artificial Sequence
  Description of Artificial Sequence: Synthetic oligonucleotide
ugagaaagagacacugcug

SEQ ID NO: 902644 - RNA, 19 nt, Artificial Sequence
  Description of Artificial Sequence: Synthetic oligonucleotide
gaugaagcacauuauaaua

SEQ ID NO: 902645 - RNA, 19 nt, Artificial Sequence
  Description of Artificial Sequence: Synthetic oligonucleotide
aggcgaucgauuucuagac

SEQ ID NO: 902646 - RNA, 19 nt, Artificial Sequence
  Description of Artificial Sequence: Synthetic oligonucleotide
uuagcuacucaaugguuug

SEQ ID NO: 902647 - RNA, 19 nt, Artificial Sequence
  Description of Artificial Sequence: Synthetic oligonucleotide
acagguaagacccucucga

SEQ ID NO: 902648 - RNA, 19 nt, Artificial Sequence
  Description of Artificial Sequence: Synthetic oligonucleotide
caauggagaauucccaccc

SEQ ID NO: 902649 - RNA, 19 nt, Artificial Sequence
  Description of Artificial Sequence: Synthetic oligonucleotide
ugguagacuagggagauca

SEQ ID NO: 902650 - RNA, 19 nt, Artificial Sequence
  Description of Artificial Sequence: Synthetic oligonucleotide
uaaccuaugaacuccuuua

SEQ ID NO: 902651 - RNA, 19 nt, Artificial Sequence
  Description of Artificial Sequence: Synthetic oligonucleotide
agaugaagcacauuauaau

SEQ ID NO: 902652 - RNA, 19 nt, Artificial Sequence
  Description of Artificial Sequence: Synthetic oligonucleotide
cauguuaacuguccggggc

SEQ ID NO: 902653 - RNA, 19 nt, Artificial Sequence
  Description of Artificial Sequence: Synthetic oligonucleotide
uacuuuaaggagcuccaca

SEQ ID NO: 902654 - RNA, 19 nt, Artificial Sequence
  Description of Artificial Sequence: Synthetic oligonucleotide
aaugcaucggaaauccuca

SEQ ID NO: 902655 - RNA, 19 nt, Artificial Sequence
  Description of Artificial Sequence: Synthetic oligonucleotide
agaagugacugaucugccg

SEQ ID NO: 902656 - RNA, 19 nt, Artificial Sequence
  Description of Artificial Sequence: Synthetic oligonucleotide
uaaugcuugauagaacaga

SEQ ID NO: 902657 - RNA, 19 nt, Artificial Sequence
  Description of Artificial Sequence: Synthetic oligonucleotide
aacuaucuaacuaggguca

SEQ ID NO: 902658 - RNA, 19 nt, Artificial Sequence
  Description of Artificial Sequence: Synthetic oligonucleotide
aaauggauucaucaaccuu

SEQ ID NO: 902659 - RNA, 19 nt, Artificial Sequence
  Description of Artificial Sequence: Synthetic oligonucleotide
accugucagaacucuaaac

SEQ ID NO: 902660 - RNA, 19 nt, Artificial Sequence
  Description of Artificial Sequence: Synthetic oligonucleotide
ugcacucacgugaagaaaa

SEQ ID NO: 902661 - RNA, 19 nt, Artificial Sequence
  Description of Artificial Sequence: Synthetic oligonucleotide
uuaggugugagggcaaugc

SEQ ID NO: 902662 - RNA, 19 nt, Artificial Sequence
  Description of Artificial Sequence: Synthetic oligonucleotide
caaauuugggccucacagc

SEQ ID NO: 902663 - RNA, 19 nt, Artificial Sequence
  Description of Artificial Sequence: Synthetic oligonucleotide
auugaacauaccuggggug

SEQ ID NO: 902664 - RNA, 19 nt, Artificial Sequence
  Description of Artificial Sequence: Synthetic oligonucleotide
caucuauccuaauugggac

SEQ ID NO: 902665 - RNA, 19 nt, Artificial Sequence
  Description of Artificial Sequence: Synthetic oligonucleotide
uccguuguuucgcagguga

SEQ ID NO: 902666 - RNA, 19 nt, Artificial Sequence
  Description of Artificial Sequence: Synthetic oligonucleotide
ugccccuuaggugugaggg

SEQ ID NO: 902667 - RNA, 19 nt, Artificial Sequence
  Description of Artificial Sequence: Synthetic oligonucleotide
uaucuaacuagggucaaac

SEQ ID NO: 902668 - RNA, 19 nt, Artificial Sequence
  Description of Artificial Sequence: Synthetic oligonucleotide
acagugaucccaacagucc

SEQ ID NO: 902669 - RNA, 19 nt, Artificial Sequence
  Description of Artificial Sequence: Synthetic oligonucleotide
gacagguaagacccucucg

SEQ ID NO: 902670 - RNA, 19 nt, Artificial Sequence
  Description of Artificial Sequence: Synthetic oligonucleotide
gaacucuaaacuugggaga

SEQ ID NO: 902671 - RNA, 19 nt, Artificial Sequence
  Description of Artificial Sequence: Synthetic oligonucleotide
ucucgaauaaggacacugu

SEQ ID NO: 902672 - RNA, 19 nt, Artificial Sequence
  Description of Artificial Sequence: Synthetic oligonucleotide
ugauucagucucauacuga

SEQ ID NO: 902673 - RNA, 19 nt, Artificial Sequence
  Description of Artificial Sequence: Synthetic oligonucleotide
auggagaauucccacccuc

SEQ ID NO: 902674 - RNA, 19 nt, Artificial Sequence
  Description of Artificial Sequence: Synthetic oligonucleotide
caaugcaucggaaauccuc

SEQ ID NO: 902675 - RNA, 19 nt, Artificial Sequence
  Description of Artificial Sequence: Synthetic oligonucleotide
uggagaauucccacccucc

SEQ ID NO: 902676 - RNA, 19 nt, Artificial Sequence
  Description of Artificial Sequence: Synthetic oligonucleotide
uuauaauauuauggaagga

SEQ ID NO: 902677 - RNA, 19 nt, Artificial Sequence
  Description of Artificial Sequence: Synthetic oligonucleotide
cagagauauacugucacug

SEQ ID NO: 902678 - RNA, 19 nt, Artificial Sequence
  Description of Artificial Sequence: Synthetic oligonucleotide
uaugcacucacgugaagaa

SEQ ID NO: 902679 - RNA, 19 nt, Artificial Sequence
  Description of Artificial Sequence: Synthetic oligonucleotide
uugauucuacagcaaucug

SEQ ID NO: 902680 - RNA, 19 nt, Artificial Sequence
  Description of Artificial Sequence: Synthetic oligonucleotide
augcccuacuuuaaggagc

SEQ ID NO: 902681 - RNA, 19 nt, Artificial Sequence
  Description of Artificial Sequence: Synthetic oligonucleotide
uuaaagaaucacagaugaa

SEQ ID NO: 902682 - RNA, 19 nt, Artificial Sequence
  Description of Artificial Sequence: Synthetic oligonucleotide
ggcaaugccaaccggacag

SEQ ID NO: 902683 - RNA, 19 nt, Artificial Sequence
  Description of Artificial Sequence: Synthetic oligonucleotide
cuccuuuauaaggcgaucg

SEQ ID NO: 902684 - RNA, 19 nt, Artificial Sequence
  Description of Artificial Sequence: Synthetic oligonucleotide
cacagugaucccaacaguc

SEQ ID NO: 902685 - RNA, 19 nt, Artificial Sequence
  Description of Artificial Sequence: Synthetic oligonucleotide
ucagaugguagcuguagau

SEQ ID NO: 902686 - RNA, 19 nt, Artificial Sequence
  Description of Artificial Sequence: Synthetic oligonucleotide
ugcuaucagccacaaugag

SEQ ID NO: 902687 - RNA, 19 nt, Artificial Sequence
  Description of Artificial Sequence: Synthetic oligonucleotide
gauugaacauaccuggggu

SEQ ID NO: 902688 - RNA, 19 nt, Artificial Sequence
  Description of Artificial Sequence: Synthetic oligonucleotide
aaccuaugaacuccuuuau

SEQ ID NO: 902689 - RNA, 19 nt, Artificial Sequence
  Description of Artificial Sequence: Synthetic oligonucleotide
aauggagaauucccacccu

SEQ ID NO: 902690 - RNA, 19 nt, Artificial Sequence
  Description of Artificial Sequence: Synthetic oligonucleotide
caugcccuacuuuaaggag

SEQ ID NO: 902691 - RNA, 19 nt, Artificial Sequence
  Description of Artificial Sequence: Synthetic oligonucleotide
aauugggacaagguaccug

SEQ ID NO: 902692 - RNA, 19 nt, Artificial Sequence
  Description of Artificial Sequence: Synthetic oligonucleotide
ucuauccuaauugggacaa

SEQ ID NO: 902693 - RNA, 19 nt, Artificial Sequence
  Description of Artificial Sequence: Synthetic oligonucleotide
augacgauucaauaucaau

SEQ ID NO: 902694 - RNA, 19 nt, Artificial Sequence
  Description of Artificial Sequence: Synthetic oligonucleotide
uuauaaggcgaucgauuuc

SEQ ID NO: 902695 - RNA, 19 nt, Artificial Sequence
  Description of Artificial Sequence: Synthetic oligonucleotide
auucaucaaccuucccacg

SEQ ID NO: 902696 - RNA, 19 nt, Artificial Sequence
  Description of Artificial Sequence: Synthetic oligonucleotide
gaaggaaaugguagacuag

SEQ ID NO: 902697 - RNA, 19 nt, Artificial Sequence
  Description of Artificial Sequence: Synthetic oligonucleotide
acaagguaccugucagaac

SEQ ID NO: 902698 - RNA, 19 nt, Artificial Sequence
  Description of Artificial Sequence: Synthetic oligonucleotide
aaggguagagcagauccca

SEQ ID NO: 902699 - RNA, 19 nt, Artificial Sequence
  Description of Artificial Sequence: Synthetic oligonucleotide
uucuaaccuaugaacuccu

SEQ ID NO: 902700 - RNA, 19 nt, Artificial Sequence
  Description of Artificial Sequence: Synthetic oligonucleotide
uaacagcuugcccaaucug

SEQ ID NO: 902701 - RNA, 19 nt, Artificial Sequence
  Description of Artificial Sequence: Synthetic oligonucleotide
guauuugacuacuccuggc

SEQ ID NO: 902702 - RNA, 19 nt, Artificial Sequence
  Description of Artificial Sequence: Synthetic oligonucleotide
augccaaccggacagguaa

SEQ ID NO: 902703 - RNA, 19 nt, Artificial Sequence
  Description of Artificial Sequence: Synthetic oligonucleotide
aucuauccuaauugggaca

SEQ ID NO: 902704 - RNA, 19 nt, Artificial Sequence
  Description of Artificial Sequence: Synthetic oligonucleotide
acagagauauacugucacu

SEQ ID NO: 902705 - RNA, 19 nt, Artificial Sequence
  Description of Artificial Sequence: Synthetic oligonucleotide
ucuacucuacuguaccauc

SEQ ID NO: 902706 - RNA, 19 nt, Artificial Sequence
  Description of Artificial Sequence: Synthetic oligonucleotide
ugcccuacuuuaaggagcu

SEQ ID NO: 902707 - RNA, 19 nt, Artificial Sequence
  Description of Artificial Sequence: Synthetic oligonucleotide
uguccggggcuucuuaaca

SEQ ID NO: 902708 - RNA, 19 nt, Artificial Sequence
  Description of Artificial Sequence: Synthetic oligonucleotide
gaucaaugacgauucaaua

SEQ ID NO: 902709 - RNA, 19 nt, Artificial Sequence
  Description of Artificial Sequence: Synthetic oligonucleotide
cgaauaaggacacuguagc

SEQ ID NO: 902710 - RNA, 19 nt, Artificial Sequence
  Description of Artificial Sequence: Synthetic oligonucleotide
ggcauuuaaugauucaguc

SEQ ID NO: 902711 - RNA, 19 nt, Artificial Sequence
  Description of Artificial Sequence: Synthetic oligonucleotide
auguuaacuguccggggcu

SEQ ID NO: 902712 - RNA, 19 nt, Artificial Sequence
  Description of Artificial Sequence: Synthetic oligonucleotide
augaagcacauuauaauau

SEQ ID NO: 902713 - RNA, 19 nt, Artificial Sequence
  Description of Artificial Sequence: Synthetic oligonucleotide
cacaucuacucuacuguac

SEQ ID NO: 902714 - RNA, 19 nt, Artificial Sequence
  Description of Artificial Sequence: Synthetic oligonucleotide
cuuaacagcuugcccaauc

SEQ ID NO: 902715 - RNA, 19 nt, Artificial Sequence
  Description of Artificial Sequence: Synthetic oligonucleotide
aggaaucuuccauguuaac

SEQ ID NO: 902716 - RNA, 19 nt, Artificial Sequence
  Description of Artificial Sequence: Synthetic oligonucleotide
uacuaaagccuuggaagug

SEQ ID NO: 902717 - RNA, 19 nt, Artificial Sequence
  Description of Artificial Sequence: Synthetic oligonucleotide
ucuuuaagggguggaauau

SEQ ID NO: 902718 - RNA, 19 nt, Artificial Sequence
  Description of Artificial Sequence: Synthetic oligonucleotide
agugacugaucugccggcc

SEQ ID NO: 902719 - RNA, 19 nt, Artificial Sequence
  Description of Artificial Sequence: Synthetic oligonucleotide
acaaugaggucaccccgag

SEQ ID NO: 902720 - RNA, 19 nt, Artificial Sequence
  Description of Artificial Sequence: Synthetic oligonucleotide
gauucagucucauacugau

SEQ ID NO: 902721 - RNA, 19 nt, Artificial Sequence
  Description of Artificial Sequence: Synthetic oligonucleotide
caaugacgauucaauauca

SEQ ID NO: 902722 - RNA, 19 nt, Artificial Sequence
  Description of Artificial Sequence: Synthetic oligonucleotide
acuaaagccuuggaagugu

SEQ ID NO: 902723 - RNA, 19 nt, Artificial Sequence
  Description of Artificial Sequence: Synthetic oligonucleotide
acuagggagaucacagcuc

SEQ ID NO: 902724 - RNA, 19 nt, Artificial Sequence
  Description of Artificial Sequence: Synthetic oligonucleotide
gcaacuucugcuaacagca

SEQ ID NO: 902725 - RNA, 19 nt, Artificial Sequence
  Description of Artificial Sequence: Synthetic oligonucleotide
caacaugcccuacuuuaag

SEQ ID NO: 902726 - RNA, 19 nt, Artificial Sequence
  Description of Artificial Sequence: Synthetic oligonucleotide
gaauuccguuguuucgcag

SEQ ID NO: 902727 - RNA, 19 nt, Artificial Sequence
  Description of Artificial Sequence: Synthetic oligonucleotide
uucauucugucgguuuucc

SEQ ID NO: 902728 - RNA, 19 nt, Artificial Sequence
  Description of Artificial Sequence: Synthetic oligonucleotide
gaaagaagaaacuggcauu

SEQ ID NO: 902729 - RNA, 19 nt, Artificial Sequence
  Description of Artificial Sequence: Synthetic oligonucleotide
cuagggagaucacagcuca

SEQ ID NO: 902730 - RNA, 19 nt, Artificial Sequence
  Description of Artificial Sequence: Synthetic oligonucleotide
uggggugcuuccuuuugcc

SEQ ID NO: 902731 - RNA, 19 nt, Artificial Sequence
  Description of Artificial Sequence: Synthetic oligonucleotide
agaauuccguuguuucgca

SEQ ID NO: 902732 - RNA, 19 nt, Artificial Sequence
  Description of Artificial Sequence: Synthetic oligonucleotide
gacuagggagaucacagcu

SEQ ID NO: 902733 - RNA, 19 nt, Artificial Sequence
  Description of Artificial Sequence: Synthetic oligonucleotide
gaguuagcuacucaauggu

SEQ ID NO: 902734 - RNA, 19 nt, Artificial Sequence
  Description of Artificial Sequence: Synthetic oligonucleotide
gaaggguagagcagauccc

SEQ ID NO: 902735 - RNA, 19 nt, Artificial Sequence
  Description of Artificial Sequence: Synthetic oligonucleotide
aaugacgauucaauaucaa

SEQ ID NO: 902736 - RNA, 19 nt, Artificial Sequence
  Description of Artificial Sequence: Synthetic oligonucleotide
ugucgguuuuccacauuga

SEQ ID NO: 902737 - RNA, 19 nt, Artificial Sequence
  Description of Artificial Sequence: Synthetic oligonucleotide
aggcccuacuucccaaagg

SEQ ID NO: 902738 - RNA, 19 nt, Artificial Sequence
  Description of Artificial Sequence: Synthetic oligonucleotide
aggugaucaaagagacacc

SEQ ID NO: 902739 - RNA, 19 nt, Artificial Sequence
  Description of Artificial Sequence: Synthetic oligonucleotide
ucaucuuuaagggguggaa

SEQ ID NO: 902740 - RNA, 19 nt, Artificial Sequence
  Description of Artificial Sequence: Synthetic oligonucleotide
cuaacuagggucaaaccau

SEQ ID NO: 902741 - RNA, 19 nt, Artificial Sequence
  Description of Artificial Sequence: Synthetic oligonucleotide
ucgguccacagugaaacac

SEQ ID NO: 902742 - RNA, 19 nt, Artificial Sequence
  Description of Artificial Sequence: Synthetic oligonucleotide
gcuugaaucaggacauagg

SEQ ID NO: 902743 - RNA, 19 nt, Artificial Sequence
  Description of Artificial Sequence: Synthetic oligonucleotide
guaugcacucacgugaaga

SEQ ID NO: 902744 - RNA, 19 nt, Artificial Sequence
  Description of Artificial Sequence: Synthetic oligonucleotide
agggcaaugccaaccggac

SEQ ID NO: 902745 - RNA, 19 nt, Artificial Sequence
  Description of Artificial Sequence: Synthetic oligonucleotide
cuacucuacuguaccauca

SEQ ID NO: 902746 - RNA, 19 nt, Artificial Sequence
  Description of Artificial Sequence: Synthetic oligonucleotide
acuagggucaaaccaucuu

SEQ ID NO: 902747 - RNA, 19 nt, Artificial Sequence
  Description of Artificial Sequence: Synthetic oligonucleotide
uuaagggguggaauaucuu

SEQ ID NO: 902748 - RNA, 19 nt, Artificial Sequence
  Description of Artificial Sequence: Synthetic oligonucleotide
gguaagacccucucgaaua

SEQ ID NO: 902749 - RNA, 19 nt, Artificial Sequence
  Description of Artificial Sequence: Synthetic oligonucleotide
agguaagacccucucgaau

SEQ ID NO: 902750 - RNA, 19 nt, Artificial Sequence
  Description of Artificial Sequence: Synthetic oligonucleotide
cugcuaucagccacaauga

SEQ ID NO: 902751 - RNA, 19 nt, Artificial Sequence
  Description of Artificial Sequence: Synthetic oligonucleotide
ggugaucaaagagacacca

SEQ ID NO: 902752 - RNA, 19 nt, Artificial Sequence
  Description of Artificial Sequence: Synthetic oligonucleotide
caucaaccuucccacguug

SEQ ID NO: 902753 - RNA, 19 nt, Artificial Sequence
  Description of Artificial Sequence: Synthetic oligonucleotide
cuugacacagugaucccaa

SEQ ID NO: 902754 - RNA, 19 nt, Artificial Sequence
  Description of Artificial Sequence: Synthetic oligonucleotide
uuccgcaucacaggugaca

SEQ ID NO: 902755 - RNA, 19 nt, Artificial Sequence
  Description of Artificial Sequence: Synthetic oligonucleotide
aacuagggucaaaccaucu

SEQ ID NO: 902756 - RNA, 19 nt, Artificial Sequence
  Description of Artificial Sequence: Synthetic oligonucleotide
aagccuugggugaaauaga

SEQ ID NO: 902757 - RNA, 19 nt, Artificial Sequence
  Description of Artificial Sequence: Synthetic oligonucleotide
ucaaccuucccacguuguu

SEQ ID NO: 902758 - RNA, 19 nt, Artificial Sequence
  Description of Artificial Sequence: Synthetic oligonucleotide
gguggaauaucuucucaga

SEQ ID NO: 902759 - RNA, 19 nt, Artificial Sequence
  Description of Artificial Sequence: Synthetic oligonucleotide
gccagaauuaaagaaucac

SEQ ID NO: 902760 - RNA, 19 nt, Artificial Sequence
  Description of Artificial Sequence: Synthetic oligonucleotide
cugccucagaauuccguug

SEQ ID NO: 902761 - RNA, 19 nt, Artificial Sequence
  Description of Artificial Sequence: Synthetic oligonucleotide
cuuaagcaacuucugcuaa

SEQ ID NO: 902762 - RNA, 19 nt, Artificial Sequence
  Description of Artificial Sequence: Synthetic oligonucleotide
gaacuccuuuauaaggcga

SEQ ID NO: 902763 - RNA, 19 nt, Artificial Sequence
  Description of Artificial Sequence: Synthetic oligonucleotide
cuuuaagggguggaauauc

SEQ ID NO: 902764 - RNA, 19 nt, Artificial Sequence
  Description of Artificial Sequence: Synthetic oligonucleotide
uccgcaucacaggugacaa

SEQ ID NO: 902765 - RNA, 19 nt, Artificial Sequence
  Description of Artificial Sequence: Synthetic oligonucleotide
cauggcagaguucuaaccu

SEQ ID NO: 902766 - RNA, 19 nt, Artificial Sequence
  Description of Artificial Sequence: Synthetic oligonucleotide
guagacuagggagaucaca

SEQ ID NO: 902767 - RNA, 19 nt, Artificial Sequence
  Description of Artificial Sequence: Synthetic oligonucleotide
auggcagaguucuaaccua

SEQ ID NO: 902768 - RNA, 19 nt, Artificial Sequence
  Description of Artificial Sequence: Synthetic oligonucleotide
uuaacuguccggggcuucu

SEQ ID NO: 902769 - RNA, 19 nt, Artificial Sequence
  Description of Artificial Sequence: Synthetic oligonucleotide
ucccgggguagguuggcag

SEQ ID NO: 902770 - RNA, 19 nt, Artificial Sequence
  Description of Artificial Sequence: Synthetic oligonucleotide
ugcaucggaaauccucauu

SEQ ID NO: 902771 - RNA, 19 nt, Artificial Sequence
  Description of Artificial Sequence: Synthetic oligonucleotide
ugccaaccggacagguaag

SEQ ID NO: 902772 - RNA, 19 nt, Artificial Sequence
  Description of Artificial Sequence: Synthetic oligonucleotide
ccacagugaaacaccaaag

SEQ ID NO: 902773 - RNA, 19 nt, Artificial Sequence
  Description of Artificial Sequence: Synthetic oligonucleotide
uuccauugcccaggaaucu

SEQ ID NO: 902774 - RNA, 19 nt, Artificial Sequence
  Description of Artificial Sequence: Synthetic oligonucleotide
caucuccuuaaaaguaaca

SEQ ID NO: 902775 - RNA, 19 nt, Artificial Sequence
  Description of Artificial Sequence: Synthetic oligonucleotide
aucuacucuacuguaccau

SEQ ID NO: 902776 - RNA, 19 nt, Artificial Sequence
  Description of Artificial Sequence: Synthetic oligonucleotide
ggcuugaaucaggacauag

SEQ ID NO: 902777 - RNA, 19 nt, Artificial Sequence
  Description of Artificial Sequence: Synthetic oligonucleotide
gcagaguucuaaccuauga

SEQ ID NO: 902778 - RNA, 19 nt, Artificial Sequence
  Description of Artificial Sequence: Synthetic oligonucleotide
cccacccuugggaaaaugg

SEQ ID NO: 902779 - RNA, 19 nt, Artificial Sequence
  Description of Artificial Sequence: Synthetic oligonucleotide
guaagacccucucgaauaa

SEQ ID NO: 902780 - RNA, 19 nt, Artificial Sequence
  Description of Artificial Sequence: Synthetic oligonucleotide
caucuacucuacuguacca

SEQ ID NO: 902781 - RNA, 19 nt, Artificial Sequence
  Description of Artificial Sequence: Synthetic oligonucleotide
gcuguauuugacuacuccu

SEQ ID NO: 902782 - RNA, 19 nt, Artificial Sequence
  Description of Artificial Sequence: Synthetic oligonucleotide
ggaagugucuaacuucuua

SEQ ID NO: 902783 - RNA, 19 nt, Artificial Sequence
  Description of Artificial Sequence: Synthetic oligonucleotide
uugacacagugaucccaac

SEQ ID NO: 902784 - RNA, 19 nt, Artificial Sequence
  Description of Artificial Sequence: Synthetic oligonucleotide
ucaccccgagcaucuacac

SEQ ID NO: 902785 - RNA, 19 nt, Artificial Sequence
  Description of Artificial Sequence: Synthetic oligonucleotide
cuacuuuaaggagcuccac

SEQ ID NO: 902786 - RNA, 19 nt, Artificial Sequence
  Description of Artificial Sequence: Synthetic oligonucleotide
cucagaugguagcuguaga

SEQ ID NO: 902787 - RNA, 19 nt, Artificial Sequence
  Description of Artificial Sequence: Synthetic oligonucleotide
guuagcuacucaaugguuu

SEQ ID NO: 902788 - RNA, 19 nt, Artificial Sequence
  Description of Artificial Sequence: Synthetic oligonucleotide
aaugccaaccggacaggua

SEQ ID NO: 902789 - RNA, 19 nt, Artificial Sequence
  Description of Artificial Sequence: Synthetic oligonucleotide
cuguccggggcuucuuaac

SEQ ID NO: 902790 - RNA, 19 nt, Artificial Sequence
  Description of Artificial Sequence: Synthetic oligonucleotide
uagcuacucaaugguuugu

SEQ ID NO: 902791 - RNA, 19 nt, Artificial Sequence
  Description of Artificial Sequence: Synthetic oligonucleotide
ccauguuaacuguccgggg

SEQ ID NO: 902792 - RNA, 19 nt, Artificial Sequence
  Description of Artificial Sequence: Synthetic oligonucleotide
aguuagcuacucaaugguu

SEQ ID NO: 902793 - RNA, 19 nt, Artificial Sequence
  Description of Artificial Sequence: Synthetic oligonucleotide
ugacaaauuugggccucac

SEQ ID NO: 902794 - RNA, 19 nt, Artificial Sequence
  Description of Artificial Sequence: Synthetic oligonucleotide
gaucuuggcuagaaguagu

SEQ ID NO: 902795 - RNA, 19 nt, Artificial Sequence
  Description of Artificial Sequence: Synthetic oligonucleotide
ggagaauucccacccucca

SEQ ID NO: 902796 - RNA, 19 nt, Artificial Sequence
  Description of Artificial Sequence: Synthetic oligonucleotide
caagggcaaagggcuaaag

SEQ ID NO: 902797 - RNA, 19 nt, Artificial Sequence
  Description of Artificial Sequence: Synthetic oligonucleotide
acuaucuaacuagggucaa

SEQ ID NO: 902798 - RNA, 19 nt, Artificial Sequence
  Description of Artificial Sequence: Synthetic oligonucleotide
agggcuaaaguggcuuugu

SEQ ID NO: 902799 - RNA, 19 nt, Artificial Sequence
  Description of Artificial Sequence: Synthetic oligonucleotide
gcuacucaaugguuuguuc

SEQ ID NO: 902800 - RNA, 19 nt, Artificial Sequence
  Description of Artificial Sequence: Synthetic oligonucleotide
gaauucccacccuccaggu

SEQ ID NO: 902801 - RNA, 19 nt, Artificial Sequence
  Description of Artificial Sequence: Synthetic oligonucleotide
ucaccuuugguggcauuua

SEQ ID NO: 902802 - RNA, 19 nt, Artificial Sequence
  Description of Artificial Sequence: Synthetic oligonucleotide
agguaccugucagaacucu

SEQ ID NO: 902803 - RNA, 19 nt, Artificial Sequence
  Description of Artificial Sequence: Synthetic oligonucleotide
gacugacuggaagauugaa

SEQ ID NO: 902804 - RNA, 19 nt, Artificial Sequence
  Description of Artificial Sequence: Synthetic oligonucleotide
uguuaacuguccggggcuu

SEQ ID NO: 902805 - RNA, 19 nt, Artificial Sequence
  Description of Artificial Sequence: Synthetic oligonucleotide
ugccagcaaugcaucggaa

SEQ ID NO: 902806 - RNA, 19 nt, Artificial Sequence
  Description of Artificial Sequence: Synthetic oligonucleotide
augcaucggaaauccucau

SEQ ID NO: 902807 - RNA, 19 nt, Artificial Sequence
  Description of Artificial Sequence: Synthetic oligonucleotide
ucacucugacuggucacau

SEQ ID NO: 902808 - RNA, 19 nt, Artificial Sequence
  Description of Artificial Sequence: Synthetic oligonucleotide
agugaucccaacaguccaa

SEQ ID NO: 902809 - RNA, 19 nt, Artificial Sequence
  Description of Artificial Sequence: Synthetic oligonucleotide
cuauccuaauugggacaag

SEQ ID NO: 902810 - RNA, 19 nt, Artificial Sequence
  Description of Artificial Sequence: Synthetic oligonucleotide
cagcuguauuugacuacuc

SEQ ID NO: 902811 - RNA, 19 nt, Artificial Sequence
  Description of Artificial Sequence: Synthetic oligonucleotide
cucacucugacuggucaca

SEQ ID NO: 902812 - RNA, 19 nt, Artificial Sequence
  Description of Artificial Sequence: Synthetic oligonucleotide
gucaccccgagcaucuaca

SEQ ID NO: 902813 - RNA, 19 nt, Artificial Sequence
  Description of Artificial Sequence: Synthetic oligonucleotide
ggacagguaagacccucuc

SEQ ID NO: 902814 - RNA, 19 nt, Artificial Sequence
  Description of Artificial Sequence: Synthetic oligonucleotide
ccuuccgcaucacagguga

SEQ ID NO: 902815 - RNA, 19 nt, Artificial Sequence
  Description of Artificial Sequence: Synthetic oligonucleotide
cagguaagacccucucgaa

SEQ ID NO: 902816 - RNA, 19 nt, Artificial Sequence
  Description of Artificial Sequence: Synthetic oligonucleotide
cuuccgcaucacaggugac

SEQ ID NO: 902817 - RNA, 19 nt, Artificial Sequence
  Description of Artificial Sequence: Synthetic oligonucleotide
ucccacguuguuggucaug

SEQ ID NO: 902818 - RNA, 19 nt, Artificial Sequence
  Description of Artificial Sequence: Synthetic oligonucleotide
ggugacaaauuugggccuc

SEQ ID NO: 902819 - RNA, 19 nt, Artificial Sequence
  Description of Artificial Sequence: Synthetic oligonucleotide
guuaacuguccggggcuuc

SEQ ID NO: 902820 - RNA, 19 nt, Artificial Sequence
  Description of Artificial Sequence: Synthetic oligonucleotide
aggccacaucuacucuacu

SEQ ID NO: 902821 - RNA, 19 nt, Artificial Sequence
  Description of Artificial Sequence: Synthetic oligonucleotide
cuaucuaacuagggucaaa

SEQ ID NO: 902822 - RNA, 19 nt, Artificial Sequence
  Description of Artificial Sequence: Synthetic oligonucleotide
caucuuuaagggguggaau

SEQ ID NO: 902823 - RNA, 19 nt, Artificial Sequence
  Description of Artificial Sequence: Synthetic oligonucleotide
guuucgcaggugaagcccu

SEQ ID NO: 902824 - RNA, 19 nt, Artificial Sequence
  Description of Artificial Sequence: Synthetic oligonucleotide
aggggaccaacaugcccua

SEQ ID NO: 902825 - RNA, 19 nt, Artificial Sequence
  Description of Artificial Sequence: Synthetic oligonucleotide
ggcagaguucuaaccuaug

SEQ ID NO: 902826 - RNA, 19 nt, Artificial Sequence
  Description of Artificial Sequence: Synthetic oligonucleotide
accuucccacguuguuggu

SEQ ID NO: 902827 - RNA, 19 nt, Artificial Sequence
  Description of Artificial Sequence: Synthetic oligonucleotide
caccccgagcaucuacaca

SEQ ID NO: 902828 - RNA, 19 nt, Artificial Sequence
  Description of Artificial Sequence: Synthetic oligonucleotide
ccaaccggacagguaagac

SEQ ID NO: 902829 - RNA, 19 nt, Artificial Sequence
  Description of Artificial Sequence: Synthetic oligonucleotide
gggaccaacaugcccuacu

SEQ ID NO: 902830 - RNA, 19 nt, Artificial Sequence
  Description of Artificial Sequence: Synthetic oligonucleotide
cacucacgugaagaaaaua

SEQ ID NO: 902831 - RNA, 19 nt, Artificial Sequence
  Description of Artificial Sequence: Synthetic oligonucleotide
gggcaaugccaaccggaca

SEQ ID NO: 902832 - RNA, 19 nt, Artificial Sequence
  Description of Artificial Sequence: Synthetic oligonucleotide
cuguaccaucaacaaccaa

SEQ ID NO: 902833 - RNA, 19 nt, Artificial Sequence
  Description of Artificial Sequence: Synthetic oligonucleotide
gguagacuagggagaucac

SEQ ID NO: 902834 - RNA, 19 nt, Artificial Sequence
  Description of Artificial Sequence: Synthetic oligonucleotide
uggcuugaaucaggacaua

SEQ ID NO: 902835 - RNA, 19 nt, Artificial Sequence
  Description of Artificial Sequence: Synthetic oligonucleotide
gugaucaaagagacaccau

SEQ ID NO: 902836 - RNA, 19 nt, Artificial Sequence
  Description of Artificial Sequence: Synthetic oligonucleotide
cacucugacuggucacaua

SEQ ID NO: 902837 - RNA, 19 nt, Artificial Sequence
  Description of Artificial Sequence: Synthetic oligonucleotide
ugacuacuccuggcuccuc

SEQ ID NO: 902838 - RNA, 19 nt, Artificial Sequence
  Description of Artificial Sequence: Synthetic oligonucleotide
ggcgaucgauuucuagacu

SEQ ID NO: 902839 - RNA, 19 nt, Artificial Sequence
  Description of Artificial Sequence: Synthetic oligonucleotide
accggacagguaagacccu

SEQ ID NO: 902840 - RNA, 19 nt, Artificial Sequence
  Description of Artificial Sequence: Synthetic oligonucleotide
cuacuccuggcuccucggu

SEQ ID NO: 902841 - RNA, 19 nt, Artificial Sequence
  Description of Artificial Sequence: Synthetic oligonucleotide
gccuuccgcaucacaggug

SEQ ID NO: 902842 - RNA, 19 nt, Artificial Sequence
  Description of Artificial Sequence: Synthetic oligonucleotide
gccaaccggacagguaaga

SEQ ID NO: 902843 - RNA, 19 nt, Artificial Sequence
  Description of Artificial Sequence: Synthetic oligonucleotide
agcugccccuuagguguga

SEQ ID NO: 902844 - RNA, 19 nt, Artificial Sequence
  Description of Artificial Sequence: Synthetic oligonucleotide
cucccgggguagguuggca

SEQ ID NO: 902845 - RNA, 19 nt, Artificial Sequence
  Description of Artificial Sequence: Synthetic oligonucleotide
ccguuguuucgcaggugaa

SEQ ID NO: 902846 - RNA, 19 nt, Artificial Sequence
  Description of Artificial Sequence: Synthetic oligonucleotide
gcucccgggguagguuggc

SEQ ID NO: 902847 - RNA, 19 nt, Artificial Sequence
  Description of Artificial Sequence: Synthetic oligonucleotide
ggggaccaacaugcccuac

SEQ ID NO: 902848 - RNA, 19 nt, Artificial Sequence
  Description of Artificial Sequence: Synthetic oligonucleotide
gcacucacgugaagaaaau

SEQ ID NO: 902849 - RNA, 19 nt, Artificial Sequence
  Description of Artificial Sequence: Synthetic oligonucleotide
gcaaugcaucggaaauccu

SEQ ID NO: 902850 - RNA, 19 nt, Artificial Sequence
  Description of Artificial Sequence: Synthetic oligonucleotide
cugcccgucugggcccaca

SEQ ID NO: 902851 - RNA, 19 nt, Artificial Sequence
  Description of Artificial Sequence: Synthetic oligonucleotide
cccgggguagguuggcagu

SEQ ID NO: 902852 - RNA, 19 nt, Artificial Sequence
  Description of Artificial Sequence: Synthetic oligonucleotide
cggacagguaagacccucu

SEQ ID NO: 902853 - RNA, 19 nt, Artificial Sequence
  Description of Artificial Sequence: Synthetic oligonucleotide
cccgagcaucuacacacau

SEQ ID NO: 902854 - RNA, 19 nt, Artificial Sequence
  Description of Artificial Sequence: Synthetic oligonucleotide
gcccuacuuuaaggagcuc

SEQ ID NO: 902855 - RNA, 19 nt, Artificial Sequence
  Description of Artificial Sequence: Synthetic oligonucleotide
gugcuacaucagccugcuu

SEQ ID NO: 902856 - RNA, 19 nt, Artificial Sequence
  Description of Artificial Sequence: Synthetic oligonucleotide
gccggcccagcugcccguc

SEQ ID NO: 902857 - RNA, 19 nt, Artificial Sequence
  Description of Artificial Sequence: Synthetic oligonucleotide
ccucucgaauaaggacacu

SEQ ID NO: 902858 - RNA, 19 nt, Artificial Sequence
  Description of Artificial Sequence: Synthetic oligonucleotide
aaaugugucacauugaagc

SEQ ID NO: 902859 - RNA, 19 nt, Artificial Sequence
  Description of Artificial Sequence: Synthetic oligonucleotide
auugacaucuuauugaugc

SEQ ID NO: 902860 - RNA, 19 nt, Artificial Sequence
  Description of Artificial Sequence: Synthetic oligonucleotide
auaaaauuuagacuuauuc

SEQ ID NO: 902861 - RNA, 19 nt, Artificial Sequence
  Description of Artificial Sequence: Synthetic oligonucleotide
agaaauaaaugcuacuacc

SEQ ID NO: 902862 - RNA, 19 nt, Artificial Sequence
  Description of Artificial Sequence: Synthetic oligonucleotide
aaaacgagaaacuuugcag

SEQ ID NO: 902863 - RNA, 19 nt, Artificial Sequence
  Description of Artificial Sequence: Synthetic oligonucleotide
uauuaauguagcuagauac

SEQ ID NO: 902864 - RNA, 19 nt, Artificial Sequence
  Description of Artificial Sequence: Synthetic oligonucleotide
aauguagcuagauacauca

SEQ ID NO: 902865 - RNA, 19 nt, Artificial Sequence
  Description of Artificial Sequence: Synthetic oligonucleotide
uuagcuaauauuauacuag

SEQ ID NO: 902866 - RNA, 19 nt, Artificial Sequence
  Description of Artificial Sequence: Synthetic oligonucleotide
aaauccuuaauuuuaguga

SEQ ID NO: 902867 - RNA, 19 nt, Artificial Sequence
  Description of Artificial Sequence: Synthetic oligonucleotide
uauuauacuagaaauaaau

SEQ ID NO: 902868 - RNA, 19 nt, Artificial Sequence
  Description of Artificial Sequence: Synthetic oligonucleotide
auguuauuaaugcaaagac

SEQ ID NO: 902869 - RNA, 19 nt, Artificial Sequence
  Description of Artificial Sequence: Synthetic oligonucleotide
auaacauaccaauuuaagg

SEQ ID NO: 902870 - RNA, 19 nt, Artificial Sequence
  Description of Artificial Sequence: Synthetic oligonucleotide
aacuacugaaucucgaggg

SEQ ID NO: 902871 - RNA, 19 nt, Artificial Sequence
  Description of Artificial Sequence: Synthetic oligonucleotide
ucaaucauguuauuaaugc

SEQ ID NO: 902872 - RNA, 19 nt, Artificial Sequence
  Description of Artificial Sequence: Synthetic oligonucleotide
uguaauuuugucuaaacaa

SEQ ID NO: 902873 - RNA, 19 nt, Artificial Sequence
  Description of Artificial Sequence: Synthetic oligonucleotide
acauuauuaauguagcuag

SEQ ID NO: 902874 - RNA, 19 nt, Artificial Sequence
  Description of Artificial Sequence: Synthetic oligonucleotide
ugaauuuagguacaucuag

SEQ ID NO: 902875 - RNA, 19 nt, Artificial Sequence
  Description of Artificial Sequence: Synthetic oligonucleotide
caaucaacagcauuaaucc

SEQ ID NO: 902876 - RNA, 19 nt, Artificial Sequence
  Description of Artificial Sequence: Synthetic oligonucleotide
aacacugauaauccaaauc

SEQ ID NO: 902877 - RNA, 19 nt, Artificial Sequence
  Description of Artificial Sequence: Synthetic oligonucleotide
aauuuugucuaaacaaccc

SEQ ID NO: 902878 - RNA, 19 nt, Artificial Sequence
  Description of Artificial Sequence: Synthetic oligonucleotide
ucaacaucuagcuuacugg

SEQ ID NO: 902879 - RNA, 19 nt, Artificial Sequence
  Description of Artificial Sequence: Synthetic oligonucleotide
uaaacaacccauuauauau

SEQ ID NO: 902880 - RNA, 19 nt, Artificial Sequence
  Description of Artificial Sequence: Synthetic oligonucleotide
cauaugaucuuaaaugugc

SEQ ID NO: 902881 - RNA, 19 nt, Artificial Sequence
  Description of Artificial Sequence: Synthetic oligonucleotide
ucugacaucacagaaagug

SEQ ID NO: 902882 - RNA, 19 nt, Artificial Sequence
  Description of Artificial Sequence: Synthetic oligonucleotide
agauuaaacccuuuagaac

SEQ ID NO: 902883 - RNA, 19 nt, Artificial Sequence
  Description of Artificial Sequence: Synthetic oligonucleotide
agggagaaaugacaaaucc

SEQ ID NO: 902884 - RNA, 19 nt, Artificial Sequence
  Description of Artificial Sequence: Synthetic oligonucleotide
ucugacugaauuuagguac

SEQ ID NO: 902885 - RNA, 19 nt, Artificial Sequence
  Description of Artificial Sequence: Synthetic oligonucleotide
uuagaaguacauauuuuag

SEQ ID NO: 902886 - RNA, 19 nt, Artificial Sequence
  Description of Artificial Sequence: Synthetic oligonucleotide
ugagauguuauauuucugc

SEQ ID NO: 902887 - RNA, 19 nt, Artificial Sequence
  Description of Artificial Sequence: Synthetic oligonucleotide
agaaguacauauuuuagcu

SEQ ID NO: 902888 - RNA, 19 nt, Artificial Sequence
  Description of Artificial Sequence: Synthetic oligonucleotide
agacuuauucuuuaauugg

SEQ ID NO: 902889 - RNA, 19 nt, Artificial Sequence
  Description of Artificial Sequence: Synthetic oligonucleotide
uguagcuagauacaucaag

SEQ ID NO: 902890 - RNA, 19 nt, Artificial Sequence
  Description of Artificial Sequence: Synthetic oligonucleotide
auaaucagaagauacacaa

SEQ ID NO: 902891 - RNA, 19 nt, Artificial Sequence
  Description of Artificial Sequence: Synthetic oligonucleotide
aaauaaaugcuacuaccca

SEQ ID NO: 902892 - RNA, 19 nt, Artificial Sequence
  Description of Artificial Sequence: Synthetic oligonucleotide
acauucaacacugauaauc

SEQ ID NO: 902893 - RNA, 19 nt, Artificial Sequence
  Description of Artificial Sequence: Synthetic oligonucleotide
ggauaaauggcucacaugc

SEQ ID NO: 902894 - RNA, 19 nt, Artificial Sequence
  Description of Artificial Sequence: Synthetic oligonucleotide
aucuuguauaucuauuuac

SEQ ID NO: 902895 - RNA, 19 nt, Artificial Sequence
  Description of Artificial Sequence: Synthetic oligonucleotide
uuauuaacuauaaugugau

SEQ ID NO: 902896 - RNA, 19 nt, Artificial Sequence
  Description of Artificial Sequence: Synthetic oligonucleotide
uagacuuauucuuuaauug

SEQ ID NO: 902897 - RNA, 19 nt, Artificial Sequence
  Description of Artificial Sequence: Synthetic oligonucleotide
aauuuagguacaucuagga

SEQ ID NO: 902898 - RNA, 19 nt, Artificial Sequence
  Description of Artificial Sequence: Synthetic oligonucleotide
aaacgagaaacuuugcaga

SEQ ID NO: 902899 - RNA, 19 nt, Artificial Sequence
  Description of Artificial Sequence: Synthetic oligonucleotide
ugagagaagccccugauga

SEQ ID NO: 902900 - RNA, 19 nt, Artificial Sequence
  Description of Artificial Sequence: Synthetic oligonucleotide
uagacuuaaacuaugguuu

SEQ ID NO: 902901 - RNA, 19 nt, Artificial Sequence
  Description of Artificial Sequence: Synthetic oligonucleotide
auugcauuaaacacaaagg

SEQ ID NO: 902902 - RNA, 19 nt, Artificial Sequence
  Description of Artificial Sequence: Synthetic oligonucleotide
aaauuuaaaccaauaacgu

SEQ ID NO: 902903 - RNA, 19 nt, Artificial Sequence
  Description of Artificial Sequence: Synthetic oligonucleotide
gauuaaacccuuuagaacu

SEQ ID NO: 902904 - RNA, 19 nt, Artificial Sequence
  Description of Artificial Sequence: Synthetic oligonucleotide
acaaucaacagcauuaauc

SEQ ID NO: 902905 - RNA, 19 nt, Artificial Sequence
  Description of Artificial Sequence: Synthetic oligonucleotide
uuuauacuguacaaaagaa

SEQ ID NO: 902906 - RNA, 19 nt, Artificial Sequence
  Description of Artificial Sequence: Synthetic oligonucleotide
cauuucaacaaucaacagc

SEQ ID NO: 902907 - RNA, 19 nt, Artificial Sequence
  Description of Artificial Sequence: Synthetic oligonucleotide
ugcauuaaacacaaaggca

SEQ ID NO: 902908 - RNA, 19 nt, Artificial Sequence
  Description of Artificial Sequence: Synthetic oligonucleotide
aauuagacuuaaacuaugg

SEQ ID NO: 902909 - RNA, 19 nt, Artificial Sequence
  Description of Artificial Sequence: Synthetic oligonucleotide
uuuauccaauaucugacug

SEQ ID NO: 902910 - RNA, 19 nt, Artificial Sequence
  Description of Artificial Sequence: Synthetic oligonucleotide
ucuuguauaucuauuuacu

SEQ ID NO: 902911 - RNA, 19 nt, Artificial Sequence
  Description of Artificial Sequence: Synthetic oligonucleotide
uucuuuauccaauaucuga

SEQ ID NO: 902912 - RNA, 19 nt, Artificial Sequence
  Description of Artificial Sequence: Synthetic oligonucleotide
uucaacaucuagcuuacug

SEQ ID NO: 902913 - RNA, 19 nt, Artificial Sequence
  Description of Artificial Sequence: Synthetic oligonucleotide
aguguuuucaaccaauuau

SEQ ID NO: 902914 - RNA, 19 nt, Artificial Sequence
  Description of Artificial Sequence: Synthetic oligonucleotide
aauuuaaaccaauaacgua

SEQ ID NO: 902915 - RNA, 19 nt, Artificial Sequence
  Description of Artificial Sequence: Synthetic oligonucleotide
agucugacaucacagaaag

SEQ ID NO: 902916 - RNA, 19 nt, Artificial Sequence
  Description of Artificial Sequence: Synthetic oligonucleotide
uuagacuuaaacuaugguu

SEQ ID NO: 902917 - RNA, 19 nt, Artificial Sequence
  Description of Artificial Sequence: Synthetic oligonucleotide
cucucacuggauuugaugg

SEQ ID NO: 902918 - RNA, 19 nt, Artificial Sequence
  Description of Artificial Sequence: Synthetic oligonucleotide
uccgaauuagacuuaaacu

SEQ ID NO: 902919 - RNA, 19 nt, Artificial Sequence
  Description of Artificial Sequence: Synthetic oligonucleotide
uagaaguacauauuuuagc

SEQ ID NO: 902920 - RNA, 19 nt, Artificial Sequence
  Description of Artificial Sequence: Synthetic oligonucleotide
agucuuauccaaucaaauc

SEQ ID NO: 902921 - RNA, 19 nt, Artificial Sequence
  Description of Artificial Sequence: Synthetic oligonucleotide
aaaucaagucaguacccuc

SEQ ID NO: 902922 - RNA, 19 nt, Artificial Sequence
  Description of Artificial Sequence: Synthetic oligonucleotide
ugauuuaugaaaucauuaa

SEQ ID NO: 902923 - RNA, 19 nt, Artificial Sequence
  Description of Artificial Sequence: Synthetic oligonucleotide
uuuuguagccucuuagcag

SEQ ID NO: 902924 - RNA, 19 nt, Artificial Sequence
  Description of Artificial Sequence: Synthetic oligonucleotide
auuaacuauaaugugauau

SEQ ID NO: 902925 - RNA, 19 nt, Artificial Sequence
  Description of Artificial Sequence: Synthetic oligonucleotide
ugauguauuuccuuggagu

SEQ ID NO: 902926 - RNA, 19 nt, Artificial Sequence
  Description of Artificial Sequence: Synthetic oligonucleotide
ucaaccaauuaucuguccc

SEQ ID NO: 902927 - RNA, 19 nt, Artificial Sequence
  Description of Artificial Sequence: Synthetic oligonucleotide
ugacaaaucccucaagaga

SEQ ID NO: 902928 - RNA, 19 nt, Artificial Sequence
  Description of Artificial Sequence: Synthetic oligonucleotide
uuaagaaagucuuauccaa

SEQ ID NO: 902929 - RNA, 19 nt, Artificial Sequence
  Description of Artificial Sequence: Synthetic oligonucleotide
cuaugcuaagaucagcugg

SEQ ID NO: 902930 - RNA, 19 nt, Artificial Sequence
  Description of Artificial Sequence: Synthetic oligonucleotide
uuuagcuaauauuauacua

SEQ ID NO: 902931 - RNA, 19 nt, Artificial Sequence
  Description of Artificial Sequence: Synthetic oligonucleotide
gaguauaugaccucaggac

SEQ ID NO: 902932 - RNA, 19 nt, Artificial Sequence
  Description of Artificial Sequence: Synthetic oligonucleotide
uuguggagaaaucaaguca

SEQ ID NO: 902933 - RNA, 19 nt, Artificial Sequence
  Description of Artificial Sequence: Synthetic oligonucleotide
agaaucuaugcuaagauca

SEQ ID NO: 902934 - RNA, 19 nt, Artificial Sequence
  Description of Artificial Sequence: Synthetic oligonucleotide
auuuaaaccaauaacguau

SEQ ID NO: 902935 - RNA, 19 nt, Artificial Sequence
  Description of Artificial Sequence: Synthetic oligonucleotide
caauaagacaggauaaaug

SEQ ID NO: 902936 - RNA, 19 nt, Artificial Sequence
  Description of Artificial Sequence: Synthetic oligonucleotide
aguauaugaccucaggacu

SEQ ID NO: 902937 - RNA, 19 nt, Artificial Sequence
  Description of Artificial Sequence: Synthetic oligonucleotide
aauagucugacaucacaga

SEQ ID NO: 902938 - RNA, 19 nt, Artificial Sequence
  Description of Artificial Sequence: Synthetic oligonucleotide
uucuccaauagucugacau

SEQ ID NO: 902939 - RNA, 19 nt, Artificial Sequence
  Description of Artificial Sequence: Synthetic oligonucleotide
cagaagauacacaaauugc

SEQ ID NO: 902940 - RNA, 19 nt, Artificial Sequence
  Description of Artificial Sequence: Synthetic oligonucleotide
gaacuacugaaucucgagg

SEQ ID NO: 902941 - RNA, 19 nt, Artificial Sequence
  Description of Artificial Sequence: Synthetic oligonucleotide
aaucuaugcuaagaucagc

SEQ ID NO: 902942 - RNA, 19 nt, Artificial Sequence
  Description of Artificial Sequence: Synthetic oligonucleotide
caauuuaaggaguuuuccc

SEQ ID NO: 902943 - RNA, 19 nt, Artificial Sequence
  Description of Artificial Sequence: Synthetic oligonucleotide
caaacaaggccugagaccc

SEQ ID NO: 902944 - RNA, 19 nt, Artificial Sequence
  Description of Artificial Sequence: Synthetic oligonucleotide
acagauuaaacccuuuaga

SEQ ID NO: 902945 - RNA, 19 nt, Artificial Sequence
  Description of Artificial Sequence: Synthetic oligonucleotide
uuuguagccucuuagcagu

SEQ ID NO: 902946 - RNA, 19 nt, Artificial Sequence
  Description of Artificial Sequence: Synthetic oligonucleotide
guagcuagauacaucaagg

SEQ ID NO: 902947 - RNA, 19 nt, Artificial Sequence
  Description of Artificial Sequence: Synthetic oligonucleotide
uuuacauagucaaaugauu

SEQ ID NO: 902948 - RNA, 19 nt, Artificial Sequence
  Description of Artificial Sequence: Synthetic oligonucleotide
uguuuucaaccaauuaucu

SEQ ID NO: 902949 - RNA, 19 nt, Artificial Sequence
  Description of Artificial Sequence: Synthetic oligonucleotide
aaaugcuacuacccauugg

SEQ ID NO: 902950 - RNA, 19 nt, Artificial Sequence
  Description of Artificial Sequence: Synthetic oligonucleotide
uguauuuguguuuuccaga

SEQ ID NO: 902951 - RNA, 19 nt, Artificial Sequence
  Description of Artificial Sequence: Synthetic oligonucleotide
uuacauagucaaaugauuu

SEQ ID NO: 902952 - RNA, 19 nt, Artificial Sequence
  Description of Artificial Sequence: Synthetic oligonucleotide
gaauuuagguacaucuagg

SEQ ID NO: 902953 - RNA, 19 nt, Artificial Sequence
  Description of Artificial Sequence: Synthetic oligonucleotide
acuauaaugugauauuaaa

SEQ ID NO: 902954 - RNA, 19 nt, Artificial Sequence
  Description of Artificial Sequence: Synthetic oligonucleotide
guuuuagcuaauauuauac

SEQ ID NO: 902955 - RNA, 19 nt, Artificial Sequence
  Description of Artificial Sequence: Synthetic oligonucleotide
uaugcuaagaucagcuggu

SEQ ID NO: 902956 - RNA, 19 nt, Artificial Sequence
  Description of Artificial Sequence: Synthetic oligonucleotide
uuuuagcuaauauuauacu

SEQ ID NO: 902957 - RNA, 19 nt, Artificial Sequence
  Description of Artificial Sequence: Synthetic oligonucleotide
aagccccugaugaaaaucc

SEQ ID NO: 902958 - RNA, 19 nt, Artificial Sequence
  Description of Artificial Sequence: Synthetic oligonucleotide
uagcuagauacaucaaggg

SEQ ID NO: 902959 - RNA, 19 nt, Artificial Sequence
  Description of Artificial Sequence: Synthetic oligonucleotide
ucaaacaaggccugagacc

SEQ ID NO: 902960 - RNA, 19 nt, Artificial Sequence
  Description of Artificial Sequence: Synthetic oligonucleotide
uaucugacugaauuuaggu

SEQ ID NO: 902961 - RNA, 19 nt, Artificial Sequence
  Description of Artificial Sequence: Synthetic oligonucleotide
uuuacaaguucaacaguga

SEQ ID NO: 902962 - RNA, 19 nt, Artificial Sequence
  Description of Artificial Sequence: Synthetic oligonucleotide
ucaagagacacaauauuua

SEQ ID NO: 902963 - RNA, 19 nt, Artificial Sequence
  Description of Artificial Sequence: Synthetic oligonucleotide
uuuccuuggaguauaugac

SEQ ID NO: 902964 - RNA, 19 nt, Artificial Sequence
  Description of Artificial Sequence: Synthetic oligonucleotide
uuagacuuauucuuuaauu

SEQ ID NO: 902965 - RNA, 19 nt, Artificial Sequence
  Description of Artificial Sequence: Synthetic oligonucleotide
uuccagaucaaauaauguc

SEQ ID NO: 902966 - RNA, 19 nt, Artificial Sequence
  Description of Artificial Sequence: Synthetic oligonucleotide
ugcaccaauacauaugauc

SEQ ID NO: 902967 - RNA, 19 nt, Artificial Sequence
  Description of Artificial Sequence: Synthetic oligonucleotide
ucuaaacaacccauuauau

SEQ ID NO: 902968 - RNA, 19 nt, Artificial Sequence
  Description of Artificial Sequence: Synthetic oligonucleotide
aagagacacaauauuuaac

SEQ ID NO: 902969 - RNA, 19 nt, Artificial Sequence
  Description of Artificial Sequence: Synthetic oligonucleotide
uuaacaucugagauguuau

SEQ ID NO: 902970 - RNA, 19 nt, Artificial Sequence
  Description of Artificial Sequence: Synthetic oligonucleotide
uacaucaagggagaaauga

SEQ ID NO: 902971 - RNA, 19 nt, Artificial Sequence
  Description of Artificial Sequence: Synthetic oligonucleotide
uuuugucuaaacaacccau

SEQ ID NO: 902972 - RNA, 19 nt, Artificial Sequence
  Description of Artificial Sequence: Synthetic oligonucleotide
augacaaaucccucaagag

SEQ ID NO: 902973 - RNA, 19 nt, Artificial Sequence
  Description of Artificial Sequence: Synthetic oligonucleotide
aucggugucagcucaacag

SEQ ID NO: 902974 - RNA, 19 nt, Artificial Sequence
  Description of Artificial Sequence: Synthetic oligonucleotide
guuaccaaaugcuacuuac

SEQ ID NO: 902975 - RNA, 19 nt, Artificial Sequence
  Description of Artificial Sequence: Synthetic oligonucleotide
auuauacuagaaauaaaug

SEQ ID NO: 902976 - RNA, 19 nt, Artificial Sequence
  Description of Artificial Sequence: Synthetic oligonucleotide
auuuugucuaaacaaccca

SEQ ID NO: 902977 - RNA, 19 nt, Artificial Sequence
  Description of Artificial Sequence: Synthetic oligonucleotide
aaauuccaaauaaagcugu

SEQ ID NO: 902978 - RNA, 19 nt, Artificial Sequence
  Description of Artificial Sequence: Synthetic oligonucleotide
acaaauugcauuaaacaca

SEQ ID NO: 902979 - RNA, 19 nt, Artificial Sequence
  Description of Artificial Sequence: Synthetic oligonucleotide
uguacaaacugcuuucgaa

SEQ ID NO: 902980 - RNA, 19 nt, Artificial Sequence
  Description of Artificial Sequence: Synthetic oligonucleotide
aaaugacaaaucccucaag

SEQ ID NO: 902981 - RNA, 19 nt, Artificial Sequence
  Description of Artificial Sequence: Synthetic oligonucleotide
uuaacuauaaugugauauu

SEQ ID NO: 902982 - RNA, 19 nt, Artificial Sequence
  Description of Artificial Sequence: Synthetic oligonucleotide
uucgaacuacugaaucucg

SEQ ID NO: 902983 - RNA, 19 nt, Artificial Sequence
  Description of Artificial Sequence: Synthetic oligonucleotide
acagcauuaauccauucaa

SEQ ID NO: 902984 - RNA, 19 nt, Artificial Sequence
  Description of Artificial Sequence: Synthetic oligonucleotide
cuaugugucaugauuuaug

SEQ ID NO: 902985 - RNA, 19 nt, Artificial Sequence
  Description of Artificial Sequence: Synthetic oligonucleotide
aagauacacaaauugcauu

SEQ ID NO: 902986 - RNA, 19 nt, Artificial Sequence
  Description of Artificial Sequence: Synthetic oligonucleotide
uggaguauaugaccucagg

SEQ ID NO: 902987 - RNA, 19 nt, Artificial Sequence
  Description of Artificial Sequence: Synthetic oligonucleotide
uuauccaauaucugacuga

SEQ ID NO: 902988 - RNA, 19 nt, Artificial Sequence
  Description of Artificial Sequence: Synthetic oligonucleotide
gacacaauauuuaacaucu

SEQ ID NO: 902989 - RNA, 19 nt, Artificial Sequence
  Description of Artificial Sequence: Synthetic oligonucleotide
uacauuauuaauguagcua

SEQ ID NO: 902990 - RNA, 19 nt, Artificial Sequence
  Description of Artificial Sequence: Synthetic oligonucleotide
agucaguacccucugguag

SEQ ID NO: 902991 - RNA, 19 nt, Artificial Sequence
  Description of Artificial Sequence: Synthetic oligonucleotide
uuuaacaucugagauguua

SEQ ID NO: 902992 - RNA, 19 nt, Artificial Sequence
  Description of Artificial Sequence: Synthetic oligonucleotide
gaagucacucacaauacug

SEQ ID NO: 902993 - RNA, 19 nt, Artificial Sequence
  Description of Artificial Sequence: Synthetic oligonucleotide
augauuuacuugaggaagc

SEQ ID NO: 902994 - RNA, 19 nt, Artificial Sequence
  Description of Artificial Sequence: Synthetic oligonucleotide
cauucaauaagacaggaua

SEQ ID NO: 902995 - RNA, 19 nt, Artificial Sequence
  Description of Artificial Sequence: Synthetic oligonucleotide
aaaggguuucuccaauagu

SEQ ID NO: 902996 - RNA, 19 nt, Artificial Sequence
  Description of Artificial Sequence: Synthetic oligonucleotide
aaucaacagcauuaaucca

SEQ ID NO: 902997 - RNA, 19 nt, Artificial Sequence
  Description of Artificial Sequence: Synthetic oligonucleotide
auauugacaucuuauugau

SEQ ID NO: 902998 - RNA, 19 nt, Artificial Sequence
  Description of Artificial Sequence: Synthetic oligonucleotide
aaaguacuuguuuggaaua

SEQ ID NO: 902999 - RNA, 19 nt, Artificial Sequence
  Description of Artificial Sequence: Synthetic oligonucleotide
uugaagucacucacaauac

SEQ ID NO: 903000 - RNA, 19 nt, Artificial Sequence
  Description of Artificial Sequence: Synthetic oligonucleotide
uuuggccuacauauuuuag

SEQ ID NO: 903001 - RNA, 19 nt, Artificial Sequence
  Description of Artificial Sequence: Synthetic oligonucleotide
uaaaugcuacuacccauug

SEQ ID NO: 903002 - RNA, 19 nt, Artificial Sequence
  Description of Artificial Sequence: Synthetic oligonucleotide
aucuuauugaugcaagaaa

SEQ ID NO: 903003 - RNA, 19 nt, Artificial Sequence
  Description of Artificial Sequence: Synthetic oligonucleotide
uaccaaaugcuacuuacau

SEQ ID NO: 903004 - RNA, 19 nt, Artificial Sequence
  Description of Artificial Sequence: Synthetic oligonucleotide
uuaccaaaugcuacuuaca

SEQ ID NO: 903005 - RNA, 19 nt, Artificial Sequence
  Description of Artificial Sequence: Synthetic oligonucleotide
agaaagucuuauccaauca

SEQ ID NO: 903006 - RNA, 19 nt, Artificial Sequence
  Description of Artificial Sequence: Synthetic oligonucleotide
ugucuaaacaacccauuau

SEQ ID NO: 903007 - RNA, 19 nt, Artificial Sequence
  Description of Artificial Sequence: Synthetic oligonucleotide
uaugaccucaggacuuagg

SEQ ID NO: 903008 - RNA, 19 nt, Artificial Sequence
  Description of Artificial Sequence: Synthetic oligonucleotide
aacaucugagauguuauau

SEQ ID NO: 903009 - RNA, 19 nt, Artificial Sequence
  Description of Artificial Sequence: Synthetic oligonucleotide
aguccaauauuuauuaacu

SEQ ID NO: 903010 - RNA, 19 nt, Artificial Sequence
  Description of Artificial Sequence: Synthetic oligonucleotide
uuuacuguauuuguguuuu

SEQ ID NO: 903011 - RNA, 19 nt, Artificial Sequence
  Description of Artificial Sequence: Synthetic oligonucleotide
guuuucaaccaauuaucug

SEQ ID NO: 903012 - RNA, 19 nt, Artificial Sequence
  Description of Artificial Sequence: Synthetic oligonucleotide
auagucaaaugauuuacuu

SEQ ID NO: 903013 - RNA, 19 nt, Artificial Sequence
  Description of Artificial Sequence: Synthetic oligonucleotide
aacgagaaacuuugcagau

SEQ ID NO: 903014 - RNA, 19 nt, Artificial Sequence
  Description of Artificial Sequence: Synthetic oligonucleotide
auaugaucuuaaaugugcg

SEQ ID NO: 903015 - RNA, 19 nt, Artificial Sequence
  Description of Artificial Sequence: Synthetic oligonucleotide
agcuagauacaucaaggga

SEQ ID NO: 903016 - RNA, 19 nt, Artificial Sequence
  Description of Artificial Sequence: Synthetic oligonucleotide
cacaaaggcaguguggucc

SEQ ID NO: 903017 - RNA, 19 nt, Artificial Sequence
  Description of Artificial Sequence: Synthetic oligonucleotide
aguacauauuuuagcuucc

SEQ ID NO: 903018 - RNA, 19 nt, Artificial Sequence
  Description of Artificial Sequence: Synthetic oligonucleotide
uuuaaaccaauaacguauu

SEQ ID NO: 903019 - RNA, 19 nt, Artificial Sequence
  Description of Artificial Sequence: Synthetic oligonucleotide
aaucccucaagagacacaa

SEQ ID NO: 903020 - RNA, 19 nt, Artificial Sequence
  Description of Artificial Sequence: Synthetic oligonucleotide
guccgaauuagacuuaaac

SEQ ID NO: 903021 - RNA, 19 nt, Artificial Sequence
  Description of Artificial Sequence: Synthetic oligonucleotide
ucuaugcuaagaucagcug

SEQ ID NO: 903022 - RNA, 19 nt, Artificial Sequence
  Description of Artificial Sequence: Synthetic oligonucleotide
gaauuagacuuaaacuaug

SEQ ID NO: 903023 - RNA, 19 nt, Artificial Sequence
  Description of Artificial Sequence: Synthetic oligonucleotide
aaacuaugugucaugauuu

SEQ ID NO: 903024 - RNA, 19 nt, Artificial Sequence
  Description of Artificial Sequence: Synthetic oligonucleotide
uaugaucuuaaaugugcgu

SEQ ID NO: 903025 - RNA, 19 nt, Artificial Sequence
  Description of Artificial Sequence: Synthetic oligonucleotide
aguuuuagcuaauauuaua

SEQ ID NO: 903026 - RNA, 19 nt, Artificial Sequence
  Description of Artificial Sequence: Synthetic oligonucleotide
uccuuaauuuuagugaaaa

SEQ ID NO: 903027 - RNA, 19 nt, Artificial Sequence
  Description of Artificial Sequence: Synthetic oligonucleotide
uuuucuaucucuggcagau

SEQ ID NO: 903028 - RNA, 19 nt, Artificial Sequence
  Description of Artificial Sequence: Synthetic oligonucleotide
ucccucaagagacacaaua

SEQ ID NO: 903029 - RNA, 19 nt, Artificial Sequence
  Description of Artificial Sequence: Synthetic oligonucleotide
agcaguuaaacuaaccaca

SEQ ID NO: 903030 - RNA, 19 nt, Artificial Sequence
  Description of Artificial Sequence: Synthetic oligonucleotide
uggcggaacgcccaguugc

SEQ ID NO: 903031 - RNA, 19 nt, Artificial Sequence
  Description of Artificial Sequence: Synthetic oligonucleotide
ugaagucacucacaauacu

SEQ ID NO: 903032 - RNA, 19 nt, Artificial Sequence
  Description of Artificial Sequence: Synthetic oligonucleotide
auaaggaauaaaauuuaga

SEQ ID NO: 903033 - RNA, 19 nt, Artificial Sequence
  Description of Artificial Sequence: Synthetic oligonucleotide
uacauagucaaaugauuua

SEQ ID NO: 903034 - RNA, 19 nt, Artificial Sequence
  Description of Artificial Sequence: Synthetic oligonucleotide
uaucuuuggcggaacgccc

SEQ ID NO: 903035 - RNA, 19 nt, Artificial Sequence
  Description of Artificial Sequence: Synthetic oligonucleotide
guugcuacuuuccguaagc

SEQ ID NO: 903036 - RNA, 19 nt, Artificial Sequence
  Description of Artificial Sequence: Synthetic oligonucleotide
gcuaauauuauacuagaaa

SEQ ID NO: 903037 - RNA, 19 nt, Artificial Sequence
  Description of Artificial Sequence: Synthetic oligonucleotide
ucaauaagacaggauaaau

SEQ ID NO: 903038 - RNA, 19 nt, Artificial Sequence
  Description of Artificial Sequence: Synthetic oligonucleotide
guuaaacuaaccacaccag

SEQ ID NO: 903039 - RNA, 19 nt, Artificial Sequence
  Description of Artificial Sequence: Synthetic oligonucleotide
gaaucuaugcuaagaucag

SEQ ID NO: 903040 - RNA, 19 nt, Artificial Sequence
  Description of Artificial Sequence: Synthetic oligonucleotide
ugcuugacugccauuuaca

SEQ ID NO: 903041 - RNA, 19 nt, Artificial Sequence
  Description of Artificial Sequence: Synthetic oligonucleotide
auccaaucaaaucaacaau

SEQ ID NO: 903042 - RNA, 19 nt, Artificial Sequence
  Description of Artificial Sequence: Synthetic oligonucleotide
auugcagacggauacugaa

SEQ ID NO: 903043 - RNA, 19 nt, Artificial Sequence
  Description of Artificial Sequence: Synthetic oligonucleotide
uauugacaucuuauugaug

SEQ ID NO: 903044 - RNA, 19 nt, Artificial Sequence
  Description of Artificial Sequence: Synthetic oligonucleotide
auuuagguacaucuaggaa

SEQ ID NO: 903045 - RNA, 19 nt, Artificial Sequence
  Description of Artificial Sequence: Synthetic oligonucleotide
uuucgaacuacugaaucuc

SEQ ID NO: 903046 - RNA, 19 nt, Artificial Sequence
  Description of Artificial Sequence: Synthetic oligonucleotide
gauacaucaagggagaaau

SEQ ID NO: 903047 - RNA, 19 nt, Artificial Sequence
  Description of Artificial Sequence: Synthetic oligonucleotide
uauccaauaucugacugaa

SEQ ID NO: 903048 - RNA, 19 nt, Artificial Sequence
  Description of Artificial Sequence: Synthetic oligonucleotide
auuaauguagcuagauaca

SEQ ID NO: 903049 - RNA, 19 nt, Artificial Sequence
  Description of Artificial Sequence: Synthetic oligonucleotide
uaauguagcuagauacauc

SEQ ID NO: 903050 - RNA, 19 nt, Artificial Sequence
  Description of Artificial Sequence: Synthetic oligonucleotide
ugcuacuacccauuggagu

SEQ ID NO: 903051 - RNA, 19 nt, Artificial Sequence
  Description of Artificial Sequence: Synthetic oligonucleotide
agcugguuguacaaacugc

SEQ ID NO: 903052 - RNA, 19 nt, Artificial Sequence
  Description of Artificial Sequence: Synthetic oligonucleotide
uuugucuaaacaacccauu

SEQ ID NO: 903053 - RNA, 19 nt, Artificial Sequence
  Description of Artificial Sequence: Synthetic oligonucleotide
cuuauccaaucaaaucaac

SEQ ID NO: 903054 - RNA, 19 nt, Artificial Sequence
  Description of Artificial Sequence: Synthetic oligonucleotide
uucaauaagacaggauaaa

SEQ ID NO: 903055 - RNA, 19 nt, Artificial Sequence
  Description of Artificial Sequence: Synthetic oligonucleotide
aacuauaaugugauauuaa

SEQ ID NO: 903056 - RNA, 19 nt, Artificial Sequence
  Description of Artificial Sequence: Synthetic oligonucleotide
agaucaaauaaugucuuaa

SEQ ID NO: 903057 - RNA, 19 nt, Artificial Sequence
  Description of Artificial Sequence: Synthetic oligonucleotide
gauguuauauuucugcauu

SEQ ID NO: 903058 - RNA, 19 nt, Artificial Sequence
  Description of Artificial Sequence: Synthetic oligonucleotide
ugcuacuuacauacauuca

SEQ ID NO: 903059 - RNA, 19 nt, Artificial Sequence
  Description of Artificial Sequence: Synthetic oligonucleotide
acuuuccguaagcuucccc

SEQ ID NO: 903060 - RNA, 19 nt, Artificial Sequence
  Description of Artificial Sequence: Synthetic oligonucleotide
ucggugucagcucaacaga

SEQ ID NO: 903061 - RNA, 19 nt, Artificial Sequence
  Description of Artificial Sequence: Synthetic oligonucleotide
cuaaccacaccaguuuuag

SEQ ID NO: 903062 - RNA, 19 nt, Artificial Sequence
  Description of Artificial Sequence: Synthetic oligonucleotide
acauugaagcaucaguguu

SEQ ID NO: 903063 - RNA, 19 nt, Artificial Sequence
  Description of Artificial Sequence: Synthetic oligonucleotide
ucucacuggauuugauggc

SEQ ID NO: 903064 - RNA, 19 nt, Artificial Sequence
  Description of Artificial Sequence: Synthetic oligonucleotide
cuagauacaucaagggaga

SEQ ID NO: 903065 - RNA, 19 nt, Artificial Sequence
  Description of Artificial Sequence: Synthetic oligonucleotide
aacuaugugucaugauuua

SEQ ID NO: 903066 - RNA, 19 nt, Artificial Sequence
  Description of Artificial Sequence: Synthetic oligonucleotide
cugcauugcagacggauac

SEQ ID NO: 903067 - RNA, 19 nt, Artificial Sequence
  Description of Artificial Sequence: Synthetic oligonucleotide
ucgaacuacugaaucucga

SEQ ID NO: 903068 - RNA, 19 nt, Artificial Sequence
  Description of Artificial Sequence: Synthetic oligonucleotide
guuguacaaacugcuuucg

SEQ ID NO: 903069 - RNA, 19 nt, Artificial Sequence
  Description of Artificial Sequence: Synthetic oligonucleotide
cucaacagaaucuaugcua

SEQ ID NO: 903070 - RNA, 19 nt, Artificial Sequence
  Description of Artificial Sequence: Synthetic oligonucleotide
ugguuuggucccauguggc

SEQ ID NO: 903071 - RNA, 19 nt, Artificial Sequence
  Description of Artificial Sequence: Synthetic oligonucleotide
augucuuaauuaauuaacu

SEQ ID NO: 903072 - RNA, 19 nt, Artificial Sequence
  Description of Artificial Sequence: Synthetic oligonucleotide
ugaucuuaaaugugcguuu

SEQ ID NO: 903073 - RNA, 19 nt, Artificial Sequence
  Description of Artificial Sequence: Synthetic oligonucleotide
ugcagacggauacugaauu

SEQ ID NO: 903074 - RNA, 19 nt, Artificial Sequence
  Description of Artificial Sequence: Synthetic oligonucleotide
uuguacaaacugcuuucga

SEQ ID NO: 903075 - RNA, 19 nt, Artificial Sequence
  Description of Artificial Sequence: Synthetic oligonucleotide
cagaaucuaugcuaagauc

SEQ ID NO: 903076 - RNA, 19 nt, Artificial Sequence
  Description of Artificial Sequence: Synthetic oligonucleotide
auucaauaagacaggauaa

SEQ ID NO: 903077 - RNA, 19 nt, Artificial Sequence
  Description of Artificial Sequence: Synthetic oligonucleotide
cagauaaucagaagauaca

SEQ ID NO: 903078 - RNA, 19 nt, Artificial Sequence
  Description of Artificial Sequence: Synthetic oligonucleotide
augauuuaugaaaucauua

SEQ ID NO: 903079 - RNA, 19 nt, Artificial Sequence
  Description of Artificial Sequence: Synthetic oligonucleotide
uguauuuccuuggaguaua

SEQ ID NO: 903080 - RNA, 19 nt, Artificial Sequence
  Description of Artificial Sequence: Synthetic oligonucleotide
gguacaucuaggaagcagc

SEQ ID NO: 903081 - RNA, 19 nt, Artificial Sequence
  Description of Artificial Sequence: Synthetic oligonucleotide
gcagauaaucagaagauac

SEQ ID NO: 903082 - RNA, 19 nt, Artificial Sequence
  Description of Artificial Sequence: Synthetic oligonucleotide
gucuuaauuaauuaacuuu

SEQ ID NO: 903083 - RNA, 19 nt, Artificial Sequence
  Description of Artificial Sequence: Synthetic oligonucleotide
augaucuuaaaugugcguu

SEQ ID NO: 903084 - RNA, 19 nt, Artificial Sequence
  Description of Artificial Sequence: Synthetic oligonucleotide
ucaacagcauuaauccauu

SEQ ID NO: 903085 - RNA, 19 nt, Artificial Sequence
  Description of Artificial Sequence: Synthetic oligonucleotide
uuagcuuccuuuagcucaa

SEQ ID NO: 903086 - RNA, 19 nt, Artificial Sequence
  Description of Artificial Sequence: Synthetic oligonucleotide
acauaugaucuuaaaugug

SEQ ID NO: 903087 - RNA, 19 nt, Artificial Sequence
  Description of Artificial Sequence: Synthetic oligonucleotide
agacaggauaaauggcuca

SEQ ID NO: 903088 - RNA, 19 nt, Artificial Sequence
  Description of Artificial Sequence: Synthetic oligonucleotide
uuaaaccaauaacguauuu

SEQ ID NO: 903089 - RNA, 19 nt, Artificial Sequence
  Description of Artificial Sequence: Synthetic oligonucleotide
aucugacugaauuuaggua

SEQ ID NO: 903090 - RNA, 19 nt, Artificial Sequence
  Description of Artificial Sequence: Synthetic oligonucleotide
cugccauuuacauagucaa

SEQ ID NO: 903091 - RNA, 19 nt, Artificial Sequence
  Description of Artificial Sequence: Synthetic oligonucleotide
uagcaguuaccaaaugcua

SEQ ID NO: 903092 - RNA, 19 nt, Artificial Sequence
  Description of Artificial Sequence: Synthetic oligonucleotide
ggaguauaugaccucagga

SEQ ID NO: 903093 - RNA, 19 nt, Artificial Sequence
  Description of Artificial Sequence: Synthetic oligonucleotide
aagucaguacccucuggua

SEQ ID NO: 903094 - RNA, 19 nt, Artificial Sequence
  Description of Artificial Sequence: Synthetic oligonucleotide
caauuaucugucccugaug

SEQ ID NO: 903095 - RNA, 19 nt, Artificial Sequence
  Description of Artificial Sequence: Synthetic oligonucleotide
gugacuacauuucacauuu

SEQ ID NO: 903096 - RNA, 19 nt, Artificial Sequence
  Description of Artificial Sequence: Synthetic oligonucleotide
uacauauuuuagcuuccuu

SEQ ID NO: 903097 - RNA, 19 nt, Artificial Sequence
  Description of Artificial Sequence: Synthetic oligonucleotide
uaaacagauuaaacccuuu

SEQ ID NO: 903098 - RNA, 19 nt, Artificial Sequence
  Description of Artificial Sequence: Synthetic oligonucleotide
uggauugagugcugguacu

SEQ ID NO: 903099 - RNA, 19 nt, Artificial Sequence
  Description of Artificial Sequence: Synthetic oligonucleotide
cugauaauccaaauccuua

SEQ ID NO: 903100 - RNA, 19 nt, Artificial Sequence
  Description of Artificial Sequence: Synthetic oligonucleotide
agguacaucuaggaagcag

SEQ ID NO: 903101 - RNA, 19 nt, Artificial Sequence
  Description of Artificial Sequence: Synthetic oligonucleotide
ugagacccagaagagauuu

SEQ ID NO: 903102 - RNA, 19 nt, Artificial Sequence
  Description of Artificial Sequence: Synthetic oligonucleotide
guagccucuuagcaguuac

SEQ ID NO: 903103 - RNA, 19 nt, Artificial Sequence
  Description of Artificial Sequence: Synthetic oligonucleotide
aacaugucauaaggaauaa

SEQ ID NO: 903104 - RNA, 19 nt, Artificial Sequence
  Description of Artificial Sequence: Synthetic oligonucleotide
auacuagaaauaaaugcua

SEQ ID NO: 903105 - RNA, 19 nt, Artificial Sequence
  Description of Artificial Sequence: Synthetic oligonucleotide
ucccaguccaauauuuauu

SEQ ID NO: 903106 - RNA, 19 nt, Artificial Sequence
  Description of Artificial Sequence: Synthetic oligonucleotide
gcuacuuuccguaagcuuc

SEQ ID NO: 903107 - RNA, 19 nt, Artificial Sequence
  Description of Artificial Sequence: Synthetic oligonucleotide
ucuuuggcggaacgcccag

SEQ ID NO: 903108 - RNA, 19 nt, Artificial Sequence
  Description of Artificial Sequence: Synthetic oligonucleotide
ccgaauuagacuuaaacua

SEQ ID NO: 903109 - RNA, 19 nt, Artificial Sequence
  Description of Artificial Sequence: Synthetic oligonucleotide
gauuuacuugaggaagcac

SEQ ID NO: 903110 - RNA, 19 nt, Artificial Sequence
  Description of Artificial Sequence: Synthetic oligonucleotide
gauugagugcugguacuug

SEQ ID NO: 903111 - RNA, 19 nt, Artificial Sequence
  Description of Artificial Sequence: Synthetic oligonucleotide
gauaaauggcucacaugca

SEQ ID NO: 903112 - RNA, 19 nt, Artificial Sequence
  Description of Artificial Sequence: Synthetic oligonucleotide
guaagcuuccccucugaga

SEQ ID NO: 903113 - RNA, 19 nt, Artificial Sequence
  Description of Artificial Sequence: Synthetic oligonucleotide
uggcaugauuucaaaguuu

SEQ ID NO: 903114 - RNA, 19 nt, Artificial Sequence
  Description of Artificial Sequence: Synthetic oligonucleotide
cugcuuucgaacuacugaa

SEQ ID NO: 903115 - RNA, 19 nt, Artificial Sequence
  Description of Artificial Sequence: Synthetic oligonucleotide
uuuccguaagcuuccccuc

SEQ ID NO: 903116 - RNA, 19 nt, Artificial Sequence
  Description of Artificial Sequence: Synthetic oligonucleotide
uuuggcggaacgcccaguu

SEQ ID NO: 903117 - RNA, 19 nt, Artificial Sequence
  Description of Artificial Sequence: Synthetic oligonucleotide
cugauagcaguugaaguca

SEQ ID NO: 903118 - RNA, 19 nt, Artificial Sequence
  Description of Artificial Sequence: Synthetic oligonucleotide
auugaagcaucaguguuuu

SEQ ID NO: 903119 - RNA, 19 nt, Artificial Sequence
  Description of Artificial Sequence: Synthetic oligonucleotide
ccaauuuaaggaguuuucc

SEQ ID NO: 903120 - RNA, 19 nt, Artificial Sequence
  Description of Artificial Sequence: Synthetic oligonucleotide
acgcccaguugcuacuuuc

SEQ ID NO: 903121 - RNA, 19 nt, Artificial Sequence
  Description of Artificial Sequence: Synthetic oligonucleotide
gacuuauucuuuaauuggu

SEQ ID NO: 903122 - RNA, 19 nt, Artificial Sequence
  Description of Artificial Sequence: Synthetic oligonucleotide
auccuaauauauucccuua

SEQ ID NO: 903123 - RNA, 19 nt, Artificial Sequence
  Description of Artificial Sequence: Synthetic oligonucleotide
auaaaugcuacuacccauu

SEQ ID NO: 903124 - RNA, 19 nt, Artificial Sequence
  Description of Artificial Sequence: Synthetic oligonucleotide
ugcagauaaucagaagaua

SEQ ID NO: 903125 - RNA, 19 nt, Artificial Sequence
  Description of Artificial Sequence: Synthetic oligonucleotide
uugcagacggauacugaau

SEQ ID NO: 903126 - RNA, 19 nt, Artificial Sequence
  Description of Artificial Sequence: Synthetic oligonucleotide
uaacaucugagauguuaua

SEQ ID NO: 903127 - RNA, 19 nt, Artificial Sequence
  Description of Artificial Sequence: Synthetic oligonucleotide
ugcuuucgaacuacugaau

SEQ ID NO: 903128 - RNA, 19 nt, Artificial Sequence
  Description of Artificial Sequence: Synthetic oligonucleotide
acuuugcagauaaucagaa

SEQ ID NO: 903129 - RNA, 19 nt, Artificial Sequence
  Description of Artificial Sequence: Synthetic oligonucleotide
ugccauuuacauagucaaa

SEQ ID NO: 903130 - RNA, 19 nt, Artificial Sequence
  Description of Artificial Sequence: Synthetic oligonucleotide
uagccucuuagcaguuacc

SEQ ID NO: 903131 - RNA, 19 nt, Artificial Sequence
  Description of Artificial Sequence: Synthetic oligonucleotide
acauaccaauuuaaggagu

SEQ ID NO: 903132 - RNA, 19 nt, Artificial Sequence
  Description of Artificial Sequence: Synthetic oligonucleotide
agccucuuagcaguuacca

SEQ ID NO: 903133 - RNA, 19 nt, Artificial Sequence
  Description of Artificial Sequence: Synthetic oligonucleotide
gucaguacccucugguaga

SEQ ID NO: 903134 - RNA, 19 nt, Artificial Sequence
  Description of Artificial Sequence: Synthetic oligonucleotide
gauacacaaauugcauuaa

SEQ ID NO: 903135 - RNA, 19 nt, Artificial Sequence
  Description of Artificial Sequence: Synthetic oligonucleotide
uaucugucccugauguauu

SEQ ID NO: 903136 - RNA, 19 nt, Artificial Sequence
  Description of Artificial Sequence: Synthetic oligonucleotide
accaauuaucugucccuga

SEQ ID NO: 903137 - RNA, 19 nt, Artificial Sequence
  Description of Artificial Sequence: Synthetic oligonucleotide
caacagaaucuaugcuaag

SEQ ID NO: 903138 - RNA, 19 nt, Artificial Sequence
  Description of Artificial Sequence: Synthetic oligonucleotide
cugagagaagccccugaug

SEQ ID NO: 903139 - RNA, 19 nt, Artificial Sequence
  Description of Artificial Sequence: Synthetic oligonucleotide
cuuuccguaagcuuccccu

SEQ ID NO: 903140 - RNA, 19 nt, Artificial Sequence
  Description of Artificial Sequence: Synthetic oligonucleotide
gaagccccugaugaaaauc

SEQ ID NO: 903141 - RNA, 19 nt, Artificial Sequence
  Description of Artificial Sequence: Synthetic oligonucleotide
caauacauaugaucuuaaa

SEQ ID NO: 903142 - RNA, 19 nt, Artificial Sequence
  Description of Artificial Sequence: Synthetic oligonucleotide
gcuuucgaacuacugaauc

SEQ ID NO: 903143 - RNA, 19 nt, Artificial Sequence
  Description of Artificial Sequence: Synthetic oligonucleotide
ggguuucuccaauagucug

SEQ ID NO: 903144 - RNA, 19 nt, Artificial Sequence
  Description of Artificial Sequence: Synthetic oligonucleotide
uauaugaccucaggacuua

SEQ ID NO: 903145 - RNA, 19 nt, Artificial Sequence
  Description of Artificial Sequence: Synthetic oligonucleotide
gaaaucaagucaguacccu

SEQ ID NO: 903146 - RNA, 19 nt, Artificial Sequence
  Description of Artificial Sequence: Synthetic oligonucleotide
aaaucccucaagagacaca

SEQ ID NO: 903147 - RNA, 19 nt, Artificial Sequence
  Description of Artificial Sequence: Synthetic oligonucleotide
ggccuacauauuuuagaag

SEQ ID NO: 903148 - RNA, 19 nt, Artificial Sequence
  Description of Artificial Sequence: Synthetic oligonucleotide
caugauuuaugaaaucauu

SEQ ID NO: 903149 - RNA, 19 nt, Artificial Sequence
  Description of Artificial Sequence: Synthetic oligonucleotide
cuuuauccaauaucugacu

SEQ ID NO: 903150 - RNA, 19 nt, Artificial Sequence
  Description of Artificial Sequence: Synthetic oligonucleotide
uugcuacuuuccguaagcu

SEQ ID NO: 903151 - RNA, 19 nt, Artificial Sequence
  Description of Artificial Sequence: Synthetic oligonucleotide
cuucaucggugucagcuca

SEQ ID NO: 903152 - RNA, 19 nt, Artificial Sequence
  Description of Artificial Sequence: Synthetic oligonucleotide
agcuaauauuauacuagaa

SEQ ID NO: 903153 - RNA, 19 nt, Artificial Sequence
  Description of Artificial Sequence: Synthetic oligonucleotide
gcaccaauacauaugaucu

SEQ ID NO: 903154 - RNA, 19 nt, Artificial Sequence
  Description of Artificial Sequence: Synthetic oligonucleotide
gcucucacuggauuugaug

SEQ ID NO: 903155 - RNA, 19 nt, Artificial Sequence
  Description of Artificial Sequence: Synthetic oligonucleotide
aaacugcuuucgaacuacu

SEQ ID NO: 903156 - RNA, 19 nt, Artificial Sequence
  Description of Artificial Sequence: Synthetic oligonucleotide
auuaucugucccugaugua

SEQ ID NO: 903157 - RNA, 19 nt, Artificial Sequence
  Description of Artificial Sequence: Synthetic oligonucleotide
uggcucacaugcaccaaua

SEQ ID NO: 903158 - RNA, 19 nt, Artificial Sequence
  Description of Artificial Sequence: Synthetic oligonucleotide
auagaaucuuguauaucua

SEQ ID NO: 903159 - RNA, 19 nt, Artificial Sequence
  Description of Artificial Sequence: Synthetic oligonucleotide
auguauuuccuuggaguau

SEQ ID NO: 903160 - RNA, 19 nt, Artificial Sequence
  Description of Artificial Sequence: Synthetic oligonucleotide
uacauucaacacugauaau

SEQ ID NO: 903161 - RNA, 19 nt, Artificial Sequence
  Description of Artificial Sequence: Synthetic oligonucleotide
cuugacugccauuuacaua

SEQ ID NO: 903162 - RNA, 19 nt, Artificial Sequence
  Description of Artificial Sequence: Synthetic oligonucleotide
aucuuaaaugugcguuuua

SEQ ID NO: 903163 - RNA, 19 nt, Artificial Sequence
  Description of Artificial Sequence: Synthetic oligonucleotide
ggacuuagguuucuuuauc

SEQ ID NO: 903164 - RNA, 19 nt, Artificial Sequence
  Description of Artificial Sequence: Synthetic oligonucleotide
cugguagaaauguucuaua

SEQ ID NO: 903165 - RNA, 19 nt, Artificial Sequence
  Description of Artificial Sequence: Synthetic oligonucleotide
uuaaacccuuuagaacuuu

SEQ ID NO: 903166 - RNA, 19 nt, Artificial Sequence
  Description of Artificial Sequence: Synthetic oligonucleotide
cauugcagacggauacuga

SEQ ID NO: 903167 - RNA, 19 nt, Artificial Sequence
  Description of Artificial Sequence: Synthetic oligonucleotide
cgaacuacugaaucucgag

SEQ ID NO: 903168 - RNA, 19 nt, Artificial Sequence
  Description of Artificial Sequence: Synthetic oligonucleotide
uucaucggugucagcucaa

SEQ ID NO: 903169 - RNA, 19 nt, Artificial Sequence
  Description of Artificial Sequence: Synthetic oligonucleotide
guacccucugguagaaaug

SEQ ID NO: 903170 - RNA, 19 nt, Artificial Sequence
  Description of Artificial Sequence: Synthetic oligonucleotide
cccugauguauuuccuugg

SEQ ID NO: 903171 - RNA, 19 nt, Artificial Sequence
  Description of Artificial Sequence: Synthetic oligonucleotide
augcuacuacccauuggag

SEQ ID NO: 903172 - RNA, 19 nt, Artificial Sequence
  Description of Artificial Sequence: Synthetic oligonucleotide
auaugaccucaggacuuag

SEQ ID NO: 903173 - RNA, 19 nt, Artificial Sequence
  Description of Artificial Sequence: Synthetic oligonucleotide
auacaucaagggagaaaug

SEQ ID NO: 903174 - RNA, 19 nt, Artificial Sequence
  Description of Artificial Sequence: Synthetic oligonucleotide
ugacuacauuucacauuuc

SEQ ID NO: 903175 - RNA, 19 nt, Artificial Sequence
  Description of Artificial Sequence: Synthetic oligonucleotide
uagauacaucaagggagaa

SEQ ID NO: 903176 - RNA, 19 nt, Artificial Sequence
  Description of Artificial Sequence: Synthetic oligonucleotide
ccccugaugaaaauccuuc

SEQ ID NO: 903177 - RNA, 19 nt, Artificial Sequence
  Description of Artificial Sequence: Synthetic oligonucleotide
gucccauguggcuggcugc

SEQ ID NO: 903178 - RNA, 19 nt, Artificial Sequence
  Description of Artificial Sequence: Synthetic oligonucleotide
caagucaguacccucuggu

SEQ ID NO: 903179 - RNA, 19 nt, Artificial Sequence
  Description of Artificial Sequence: Synthetic oligonucleotide
cacugauaauccaaauccu

SEQ ID NO: 903180 - RNA, 19 nt, Artificial Sequence
  Description of Artificial Sequence: Synthetic oligonucleotide
agggcucucacuggauuug

SEQ ID NO: 903181 - RNA, 19 nt, Artificial Sequence
  Description of Artificial Sequence: Synthetic oligonucleotide
accucaggacuuagguuuc

SEQ ID NO: 903182 - RNA, 19 nt, Artificial Sequence
  Description of Artificial Sequence: Synthetic oligonucleotide
gugccagcauucccagucc

SEQ ID NO: 903183 - RNA, 19 nt, Artificial Sequence
  Description of Artificial Sequence: Synthetic oligonucleotide
aggaugguuuggucccaug

SEQ ID NO: 903184 - RNA, 19 nt, Artificial Sequence
  Description of Artificial Sequence: Synthetic oligonucleotide
acaaaucccucaagagaca

SEQ ID NO: 903185 - RNA, 19 nt, Artificial Sequence
  Description of Artificial Sequence: Synthetic oligonucleotide
ucaguacccucugguagaa

SEQ ID NO: 903186 - RNA, 19 nt, Artificial Sequence
  Description of Artificial Sequence: Synthetic oligonucleotide
acacaauauuuaacaucug

SEQ ID NO: 903187 - RNA, 19 nt, Artificial Sequence
  Description of Artificial Sequence: Synthetic oligonucleotide
uugauggcagaugcuguuu

SEQ ID NO: 903188 - RNA, 19 nt, Artificial Sequence
  Description of Artificial Sequence: Synthetic oligonucleotide
cauugaagcaucaguguuu

SEQ ID NO: 903189 - RNA, 19 nt, Artificial Sequence
  Description of Artificial Sequence: Synthetic oligonucleotide
ucaucggugucagcucaac

SEQ ID NO: 903190 - RNA, 19 nt, Artificial Sequence
  Description of Artificial Sequence: Synthetic oligonucleotide
gcccaguugcuacuuuccg

SEQ ID NO: 903191 - RNA, 19 nt, Artificial Sequence
  Description of Artificial Sequence: Synthetic oligonucleotide
aucuuuggcggaacgccca

SEQ ID NO: 903192 - RNA, 19 nt, Artificial Sequence
  Description of Artificial Sequence: Synthetic oligonucleotide
cacagaaaguggauugagu

SEQ ID NO: 903193 - RNA, 19 nt, Artificial Sequence
  Description of Artificial Sequence: Synthetic oligonucleotide
agacggauacugaauuuua

SEQ ID NO: 903194 - RNA, 19 nt, Artificial Sequence
  Description of Artificial Sequence: Synthetic oligonucleotide
cuaucucuggcagauauuu

SEQ ID NO: 903195 - RNA, 19 nt, Artificial Sequence
  Description of Artificial Sequence: Synthetic oligonucleotide
acuaaccacaccaguuuua

SEQ ID NO: 903196 - RNA, 19 nt, Artificial Sequence
  Description of Artificial Sequence: Synthetic oligonucleotide
uacuuuccguaagcuuccc

SEQ ID NO: 903197 - RNA, 19 nt, Artificial Sequence
  Description of Artificial Sequence: Synthetic oligonucleotide
aacgcccaguugcuacuuu

SEQ ID NO: 903198 - RNA, 19 nt, Artificial Sequence
  Description of Artificial Sequence: Synthetic oligonucleotide
cucuuagcaguuaccaaau

SEQ ID NO: 903199 - RNA, 19 nt, Artificial Sequence
  Description of Artificial Sequence: Synthetic oligonucleotide
gaucuuaaaugugcguuuu

SEQ ID NO: 903200 - RNA, 19 nt, Artificial Sequence
  Description of Artificial Sequence: Synthetic oligonucleotide
cauucccaguccaauauuu

SEQ ID NO: 903201 - RNA, 19 nt, Artificial Sequence
  Description of Artificial Sequence: Synthetic oligonucleotide
uagguacaucuaggaagca

SEQ ID NO: 903202 - RNA, 19 nt, Artificial Sequence
  Description of Artificial Sequence: Synthetic oligonucleotide
uguagccucuuagcaguua

SEQ ID NO: 903203 - RNA, 19 nt, Artificial Sequence
  Description of Artificial Sequence: Synthetic oligonucleotide
guauaugaccucaggacuu

SEQ ID NO: 903204 - RNA, 19 nt, Artificial Sequence
  Description of Artificial Sequence: Synthetic oligonucleotide
gugugguccuuguggagaa

SEQ ID NO: 903205 - RNA, 19 nt, Artificial Sequence
  Description of Artificial Sequence: Synthetic oligonucleotide
gacaucacagaaaguggau

SEQ ID NO: 903206 - RNA, 19 nt, Artificial Sequence
  Description of Artificial Sequence: Synthetic oligonucleotide
ggcucacaugcaccaauac

SEQ ID NO: 903207 - RNA, 19 nt, Artificial Sequence
  Description of Artificial Sequence: Synthetic oligonucleotide
uugaagcaucaguguuuuc

SEQ ID NO: 903208 - RNA, 19 nt, Artificial Sequence
  Description of Artificial Sequence: Synthetic oligonucleotide
caucggugucagcucaaca

SEQ ID NO: 903209 - RNA, 19 nt, Artificial Sequence
  Description of Artificial Sequence: Synthetic oligonucleotide
gacggauacugaauuuuau

SEQ ID NO: 903210 - RNA, 19 nt, Artificial Sequence
  Description of Artificial Sequence: Synthetic oligonucleotide
gcuuacuggcaugauuuca

SEQ ID NO: 903211 - RNA, 19 nt, Artificial Sequence
  Description of Artificial Sequence: Synthetic oligonucleotide
cagcauuaauccauucaau

SEQ ID NO: 903212 - RNA, 19 nt, Artificial Sequence
  Description of Artificial Sequence: Synthetic oligonucleotide
gguacuugcuugacugcca

SEQ ID NO: 903213 - RNA, 19 nt, Artificial Sequence
  Description of Artificial Sequence: Synthetic oligonucleotide
uacuacccauuggaguauu

SEQ ID NO: 903214 - RNA, 19 nt, Artificial Sequence
  Description of Artificial Sequence: Synthetic oligonucleotide
guacuugcuugacugccau

SEQ ID NO: 903215 - RNA, 19 nt, Artificial Sequence
  Description of Artificial Sequence: Synthetic oligonucleotide
cccugaugaaaauccuuca

SEQ ID NO: 903216 - RNA, 19 nt, Artificial Sequence
  Description of Artificial Sequence: Synthetic oligonucleotide
cuguccgaauuagacuuaa

SEQ ID NO: 903217 - RNA, 19 nt, Artificial Sequence
  Description of Artificial Sequence: Synthetic oligonucleotide
cugaaucucgagggcucuc

SEQ ID NO: 903218 - RNA, 19 nt, Artificial Sequence
  Description of Artificial Sequence: Synthetic oligonucleotide
cguaagcuuccccucugag

SEQ ID NO: 903219 - RNA, 19 nt, Artificial Sequence
  Description of Artificial Sequence: Synthetic oligonucleotide
cagacggauacugaauuuu

SEQ ID NO: 903220 - RNA, 19 nt, Artificial Sequence
  Description of Artificial Sequence: Synthetic oligonucleotide
cggaacgcccaguugcuac

SEQ ID NO: 903221 - RNA, 19 nt, Artificial Sequence
  Description of Artificial Sequence: Synthetic oligonucleotide
caccaauacauaugaucuu

SEQ ID NO: 903222 - RNA, 19 nt, Artificial Sequence
  Description of Artificial Sequence: Synthetic oligonucleotide
auccaauaucugacugaau

SEQ ID NO: 903223 - RNA, 19 nt, Artificial Sequence
  Description of Artificial Sequence: Synthetic oligonucleotide
augcaccaauacauaugau

SEQ ID NO: 903224 - RNA, 19 nt, Artificial Sequence
  Description of Artificial Sequence: Synthetic oligonucleotide
acuacccauuggaguauuu

SEQ ID NO: 903225 - RNA, 19 nt, Artificial Sequence
  Description of Artificial Sequence: Synthetic oligonucleotide
cuacccauuggaguauuuu

SEQ ID NO: 903226 - RNA, 19 nt, Artificial Sequence
  Description of Artificial Sequence: Synthetic oligonucleotide
gccugagacccagaagaga

SEQ ID NO: 903227 - RNA, 19 nt, Artificial Sequence
  Description of Artificial Sequence: Synthetic oligonucleotide
cccucaagagacacaauau

SEQ ID NO: 903228 - RNA, 19 nt, Artificial Sequence
  Description of Artificial Sequence: Synthetic oligonucleotide
uggcaccaccuggccagca

SEQ ID NO: 903229 - RNA, 19 nt, Artificial Sequence
  Description of Artificial Sequence: Synthetic oligonucleotide
ccucaagagacacaauauu

SEQ ID NO: 903230 - RNA, 19 nt, Artificial Sequence
  Description of Artificial Sequence: Synthetic oligonucleotide
ggauuugauggcagaugcu

SEQ ID NO: 903231 - RNA, 19 nt, Artificial Sequence
  Description of Artificial Sequence: Synthetic oligonucleotide
guauuuccuuggaguauau

SEQ ID NO: 903232 - RNA, 19 nt, Artificial Sequence
  Description of Artificial Sequence: Synthetic oligonucleotide
ccauucaauaagacaggau

SEQ ID NO: 903233 - RNA, 19 nt, Artificial Sequence
  Description of Artificial Sequence: Synthetic oligonucleotide
gcacuggcuguccgaauua

SEQ ID NO: 903234 - RNA, 19 nt, Artificial Sequence
  Description of Artificial Sequence: Synthetic oligonucleotide
gcagacggauacugaauuu

SEQ ID NO: 903235 - RNA, 19 nt, Artificial Sequence
  Description of Artificial Sequence: Synthetic oligonucleotide
aucccucaagagacacaau

SEQ ID NO: 903236 - RNA, 19 nt, Artificial Sequence
  Description of Artificial Sequence: Synthetic oligonucleotide
gaggaugguuuggucccau

SEQ ID NO: 903237 - RNA, 19 nt, Artificial Sequence
  Description of Artificial Sequence: Synthetic oligonucleotide
ggauugagugcugguacuu

SEQ ID NO: 903238 - RNA, 19 nt, Artificial Sequence
  Description of Artificial Sequence: Synthetic oligonucleotide
cccuguaauuuugucuaaa

SEQ ID NO: 903239 - RNA, 19 nt, Artificial Sequence
  Description of Artificial Sequence: Synthetic oligonucleotide
gaacgcccaguugcuacuu

SEQ ID NO: 903240 - RNA, 19 nt, Artificial Sequence
  Description of Artificial Sequence: Synthetic oligonucleotide
ccguaagcuuccccucuga

SEQ ID NO: 903241 - RNA, 19 nt, Artificial Sequence
  Description of Artificial Sequence: Synthetic oligonucleotide
cuuuggcggaacgcccagu

SEQ ID NO: 903242 - RNA, 19 nt, Artificial Sequence
  Description of Artificial Sequence: Synthetic oligonucleotide
ggcggaacgcccaguugcu

SEQ ID NO: 903243 - RNA, 19 nt, Artificial Sequence
  Description of Artificial Sequence: Synthetic oligonucleotide
caguacccucugguagaaa

SEQ ID NO: 903244 - RNA, 19 nt, Artificial Sequence
  Description of Artificial Sequence: Synthetic oligonucleotide
gccccugaugaaaauccuu

SEQ ID NO: 903245 - RNA, 19 nt, Artificial Sequence
  Description of Artificial Sequence: Synthetic oligonucleotide
gcggaacgcccaguugcua

SEQ ID NO: 903246 - RNA, 19 nt, Artificial Sequence
  Description of Artificial Sequence: Synthetic oligonucleotide
ccucaggacuuagguuucu

SEQ ID NO: 903247 - RNA, 19 nt, Artificial Sequence
  Description of Artificial Sequence: Synthetic oligonucleotide
aaaaguuuagggcuccagc

SEQ ID NO: 903248 - RNA, 19 nt, Artificial Sequence
  Description of Artificial Sequence: Synthetic oligonucleotide
gauauaauucaucuguggg

SEQ ID NO: 903249 - RNA, 19 nt, Artificial Sequence
  Description of Artificial Sequence: Synthetic oligonucleotide
aacguuuuaagcgugacgg

SEQ ID NO: 903250 - RNA, 19 nt, Artificial Sequence
  Description of Artificial Sequence: Synthetic oligonucleotide
agauggaaagauuugggcc

SEQ ID NO: 903251 - RNA, 19 nt, Artificial Sequence
  Description of Artificial Sequence: Synthetic oligonucleotide
auauaauucaucugugggg

SEQ ID NO: 903252 - RNA, 19 nt, Artificial Sequence
  Description of Artificial Sequence: Synthetic oligonucleotide
uuaagcgugacggugaugg

SEQ ID NO: 903253 - RNA, 19 nt, Artificial Sequence
  Description of Artificial Sequence: Synthetic oligonucleotide
auaugguauuccuugaugg

SEQ ID NO: 903254 - RNA, 19 nt, Artificial Sequence
  Description of Artificial Sequence: Synthetic oligonucleotide
aaagauuugggccacucca

SEQ ID NO: 903255 - RNA, 19 nt, Artificial Sequence
  Description of Artificial Sequence: Synthetic oligonucleotide
ugcugcaacguuuuaagcg

SEQ ID NO: 903256 - RNA, 19 nt, Artificial Sequence
  Description of Artificial Sequence: Synthetic oligonucleotide
uagcugauuccucugaugg

SEQ ID NO: 903257 - RNA, 19 nt, Artificial Sequence
  Description of Artificial Sequence: Synthetic oligonucleotide
aggauaaaaguuuagggcu

SEQ ID NO: 903258 - RNA, 19 nt, Artificial Sequence
  Description of Artificial Sequence: Synthetic oligonucleotide
aaaguuuagggcuccagcu

SEQ ID NO: 903259 - RNA, 19 nt, Artificial Sequence
  Description of Artificial Sequence: Synthetic oligonucleotide
acaacaugcaacucacgcc

SEQ ID NO: 903260 - RNA, 19 nt, Artificial Sequence
  Description of Artificial Sequence: Synthetic oligonucleotide
ucuugucggacugagaugg

SEQ ID NO: 903261 - RNA, 19 nt, Artificial Sequence
  Description of Artificial Sequence: Synthetic oligonucleotide
uucuaaugaacucacucgc

SEQ ID NO: 903262 - RNA, 19 nt, Artificial Sequence
  Description of Artificial Sequence: Synthetic oligonucleotide
uauaauucaucuguggggc

SEQ ID NO: 903263 - RNA, 19 nt, Artificial Sequence
  Description of Artificial Sequence: Synthetic oligonucleotide
aucuauaugguauuccuug

SEQ ID NO: 903264 - RNA, 19 nt, Artificial Sequence
  Description of Artificial Sequence: Synthetic oligonucleotide
ucgucucauacucagagcc

SEQ ID NO: 903265 - RNA, 19 nt, Artificial Sequence
  Description of Artificial Sequence: Synthetic oligonucleotide
uauaugguauuccuugaug

SEQ ID NO: 903266 - RNA, 19 nt, Artificial Sequence
  Description of Artificial Sequence: Synthetic oligonucleotide
ucacuaauguggaagcugc

SEQ ID NO: 903267 - RNA, 19 nt, Artificial Sequence
  Description of Artificial Sequence: Synthetic oligonucleotide
  modified_base (7)..(7): a, c, u, g, unknown or other
aucugunaggcucaggccu

SEQ ID NO: 903268 - RNA, 19 nt, Artificial Sequence
  Description of Artificial Sequence: Synthetic oligonucleotide
gauggaaagauuugggcca

SEQ ID NO: 903269 - RNA, 19 nt, Artificial Sequence
  Description of Artificial Sequence: Synthetic oligonucleotide
ucaucuauaugguauuccu

SEQ ID NO: 903270 - RNA, 19 nt, Artificial Sequence
  Description of Artificial Sequence: Synthetic oligonucleotide
uuuaucagagaugugguuc

SEQ ID NO: 903271 - RNA, 19 nt, Artificial Sequence
  Description of Artificial Sequence: Synthetic oligonucleotide
ucguacaacaugcaacuca

SEQ ID NO: 903272 - RNA, 19 nt, Artificial Sequence
  Description of Artificial Sequence: Synthetic oligonucleotide
ugauguuggagccggagga

SEQ ID NO: 903273 - RNA, 19 nt, Artificial Sequence
  Description of Artificial Sequence: Synthetic oligonucleotide
cauuacaaccacaaaguuc

SEQ ID NO: 903274 - RNA, 19 nt, Artificial Sequence
  Description of Artificial Sequence: Synthetic oligonucleotide
aguuuagggcuccagcuuc

SEQ ID NO: 903275 - RNA, 19 nt, Artificial Sequence
  Description of Artificial Sequence: Synthetic oligonucleotide
ucaccuauggcaccaaccu

SEQ ID NO: 903276 - RNA, 19 nt, Artificial Sequence
  Description of Artificial Sequence: Synthetic oligonucleotide
aauaggggccacuucagaa

SEQ ID NO: 903277 - RNA, 19 nt, Artificial Sequence
  Description of Artificial Sequence: Synthetic oligonucleotide
aaugaacucacucgcucca

SEQ ID NO: 903278 - RNA, 19 nt, Artificial Sequence
  Description of Artificial Sequence: Synthetic oligonucleotide
uaaugaacucacucgcucc

SEQ ID NO: 903279 - RNA, 19 nt, Artificial Sequence
  Description of Artificial Sequence: Synthetic oligonucleotide
uggauauaauucaucugug

SEQ ID NO: 903280 - RNA, 19 nt, Artificial Sequence
  Description of Artificial Sequence: Synthetic oligonucleotide
aaagccuugggcuucuaau

SEQ ID NO: 903281 - RNA, 19 nt, Artificial Sequence
  Description of Artificial Sequence: Synthetic oligonucleotide
cucaaugcggccacaaccc

SEQ ID NO: 903282 - RNA, 19 nt, Artificial Sequence
  Description of Artificial Sequence: Synthetic oligonucleotide
caucauucaagaucuugcc

SEQ ID NO: 903283 - RNA, 19 nt, Artificial Sequence
  Description of Artificial Sequence: Synthetic oligonucleotide
auaauucaucuguggggcc

SEQ ID NO: 903284 - RNA, 19 nt, Artificial Sequence
  Description of Artificial Sequence: Synthetic oligonucleotide
  modified_base (2)..(2): a, c, u, g, unknown or other
unaggcucaggccucuucc

SEQ ID NO: 903285 - RNA, 19 nt, Artificial Sequence
  Description of Artificial Sequence: Synthetic oligonucleotide
uccucguacaacaugcaac

SEQ ID NO: 903286 - RNA, 19 nt, Artificial Sequence
  Description of Artificial Sequence: Synthetic oligonucleotide
cauacucagagccagucac

SEQ ID NO: 903287 - RNA, 19 nt, Artificial Sequence
  Description of Artificial Sequence: Synthetic oligonucleotide
uuaucagagaugugguucu

SEQ ID NO: 903288 - RNA, 19 nt, Artificial Sequence
  Description of Artificial Sequence: Synthetic oligonucleotide
uuugcugcaagagcugagg

SEQ ID NO: 903289 - RNA, 19 nt, Artificial Sequence
  Description of Artificial Sequence: Synthetic oligonucleotide
ggauauaauucaucugugg

SEQ ID NO: 903290 - RNA, 19 nt, Artificial Sequence
  Description of Artificial Sequence: Synthetic oligonucleotide
uccaacggaggauaaaagu

SEQ ID NO: 903291 - RNA, 19 nt, Artificial Sequence
  Description of Artificial Sequence: Synthetic oligonucleotide
caucgucucauacucagag

SEQ ID NO: 903292 - RNA, 19 nt, Artificial Sequence
  Description of Artificial Sequence: Synthetic oligonucleotide
agcaacuuugagcaggcug

SEQ ID NO: 903293 - RNA, 19 nt, Artificial Sequence
  Description of Artificial Sequence: Synthetic oligonucleotide
uggaggaugggacaugccu

SEQ ID NO: 903294 - RNA, 19 nt, Artificial Sequence
  Description of Artificial Sequence: Synthetic oligonucleotide
ugauguuaccucuucucca

SEQ ID NO: 903295 - RNA, 19 nt, Artificial Sequence
  Description of Artificial Sequence: Synthetic oligonucleotide
agcaucgucucauacucag

SEQ ID NO: 903296 - RNA, 19 nt, Artificial Sequence
  Description of Artificial Sequence: Synthetic oligonucleotide
agaagcucaguaggcaugc

SEQ ID NO: 903297 - RNA, 19 nt, Artificial Sequence
  Description of Artificial Sequence: Synthetic oligonucleotide
ucuaaugaacucacucgcu

SEQ ID NO: 903298 - RNA, 19 nt, Artificial Sequence
  Description of Artificial Sequence: Synthetic oligonucleotide
cuaauuugcugcaagagcu

SEQ ID NO: 903299 - RNA, 19 nt, Artificial Sequence
  Description of Artificial Sequence: Synthetic oligonucleotide
acucgcuccagauggaaag

SEQ ID NO: 903300 - RNA, 19 nt, Artificial Sequence
  Description of Artificial Sequence: Synthetic oligonucleotide
ucuauagcuuccuucuccu

SEQ ID NO: 903301 - RNA, 19 nt, Artificial Sequence
  Description of Artificial Sequence: Synthetic oligonucleotide
aucgucucauacucagagc

SEQ ID NO: 903302 - RNA, 19 nt, Artificial Sequence
  Description of Artificial Sequence: Synthetic oligonucleotide
cuggugucggcuaauuugc

SEQ ID NO: 903303 - RNA, 19 nt, Artificial Sequence
  Description of Artificial Sequence: Synthetic oligonucleotide
ucacacgcgaaguaggccu

SEQ ID NO: 903304 - RNA, 19 nt, Artificial Sequence
  Description of Artificial Sequence: Synthetic oligonucleotide
uaggcaugcaccauuguua

SEQ ID NO: 903305 - RNA, 19 nt, Artificial Sequence
  Description of Artificial Sequence: Synthetic oligonucleotide
gaaagauuugggccacucc

SEQ ID NO: 903306 - RNA, 19 nt, Artificial Sequence
  Description of Artificial Sequence: Synthetic oligonucleotide
uaauuugcugcaagagcug

SEQ ID NO: 903307 - RNA, 19 nt, Artificial Sequence
  Description of Artificial Sequence: Synthetic oligonucleotide
gauaaaaguuuagggcucc

SEQ ID NO: 903308 - RNA, 19 nt, Artificial Sequence
  Description of Artificial Sequence: Synthetic oligonucleotide
agagggagcagccagcccu

SEQ ID NO: 903309 - RNA, 19 nt, Artificial Sequence
  Description of Artificial Sequence: Synthetic oligonucleotide
cuaaugaacucacucgcuc

SEQ ID NO: 903310 - RNA, 19 nt, Artificial Sequence
  Description of Artificial Sequence: Synthetic oligonucleotide
gugucggcuaauuugcugc

SEQ ID NO: 903311 - RNA, 19 nt, Artificial Sequence
  Description of Artificial Sequence: Synthetic oligonucleotide
gugagcaaguauuccacag

SEQ ID NO: 903312 - RNA, 19 nt, Artificial Sequence
  Description of Artificial Sequence: Synthetic oligonucleotide
aaguauuccacagcucugu

SEQ ID NO: 903313 - RNA, 19 nt, Artificial Sequence
  Description of Artificial Sequence: Synthetic oligonucleotide
augaucucagucagcaucg

SEQ ID NO: 903314 - RNA, 19 nt, Artificial Sequence
  Description of Artificial Sequence: Synthetic oligonucleotide
aguaucacucaucaucaaa

SEQ ID NO: 903315 - RNA, 19 nt, Artificial Sequence
  Description of Artificial Sequence: Synthetic oligonucleotide
aucauucaagaucuugcca

SEQ ID NO: 903316 - RNA, 19 nt, Artificial Sequence
  Description of Artificial Sequence: Synthetic oligonucleotide
aggcaugcaccauuguuag

SEQ ID NO: 903317 - RNA, 19 nt, Artificial Sequence
  Description of Artificial Sequence: Synthetic oligonucleotide
uguuggagccggaggaaag

SEQ ID NO: 903318 - RNA, 19 nt, Artificial Sequence
  Description of Artificial Sequence: Synthetic oligonucleotide
ucaaugcggccacaacccg

SEQ ID NO: 903319 - RNA, 19 nt, Artificial Sequence
  Description of Artificial Sequence: Synthetic oligonucleotide
cuaauguggaagcugcguc

SEQ ID NO: 903320 - RNA, 19 nt, Artificial Sequence
  Description of Artificial Sequence: Synthetic oligonucleotide
agacucacaagcuggugug

SEQ ID NO: 903321 - RNA, 19 nt, Artificial Sequence
  Description of Artificial Sequence: Synthetic oligonucleotide
acaugcaacucacgccgcc

SEQ ID NO: 903322 - RNA, 19 nt, Artificial Sequence
  Description of Artificial Sequence: Synthetic oligonucleotide
gaacagaaccauguuccgg

SEQ ID NO: 903323 - RNA, 19 nt, Artificial Sequence
  Description of Artificial Sequence: Synthetic oligonucleotide
cagucacuaauguggaagc

SEQ ID NO: 903324 - RNA, 19 nt, Artificial Sequence
  Description of Artificial Sequence: Synthetic oligonucleotide
uaaaaguuuagggcuccag

SEQ ID NO: 903325 - RNA, 19 nt, Artificial Sequence
  Description of Artificial Sequence: Synthetic oligonucleotide
aacucacucgcuccagaug

SEQ ID NO: 903326 - RNA, 19 nt, Artificial Sequence
  Description of Artificial Sequence: Synthetic oligonucleotide
cucaccuauggcaccaacc

SEQ ID NO: 903327 - RNA, 19 nt, Artificial Sequence
  Description of Artificial Sequence: Synthetic oligonucleotide
gcaugcaccauuguuaggg

SEQ ID NO: 903328 - RNA, 19 nt, Artificial Sequence
  Description of Artificial Sequence: Synthetic oligonucleotide
ugcaccauuguuagggcuc

SEQ ID NO: 903329 - RNA, 19 nt, Artificial Sequence
  Description of Artificial Sequence: Synthetic oligonucleotide
ugcaugagagggagcagcc

SEQ ID NO: 903330 - RNA, 19 nt, Artificial Sequence
  Description of Artificial Sequence: Synthetic oligonucleotide
uuugccucccaguaucacu

SEQ ID NO: 903331 - RNA, 19 nt, Artificial Sequence
  Description of Artificial Sequence: Synthetic oligonucleotide
ugcggcgucaccuggauau

SEQ ID NO: 903332 - RNA, 19 nt, Artificial Sequence
  Description of Artificial Sequence: Synthetic oligonucleotide
caacguuuuaagcgugacg

SEQ ID NO: 903333 - RNA, 19 nt, Artificial Sequence
  Description of Artificial Sequence: Synthetic oligonucleotide
caucuggaugaacugcucc

SEQ ID NO: 903334 - RNA, 19 nt, Artificial Sequence
  Description of Artificial Sequence: Synthetic oligonucleotide
  modified_base (9)..(9): a, c, u, g, unknown or other
ccaucugunaggcucaggc

SEQ ID NO: 903335 - RNA, 19 nt, Artificial Sequence
  Description of Artificial Sequence: Synthetic oligonucleotide
ugagaagcucaguaggcau

SEQ ID NO: 903336 - RNA, 19 nt, Artificial Sequence
  Description of Artificial Sequence: Synthetic oligonucleotide
uugccucccaguaucacuc

SEQ ID NO: 903337 - RNA, 19 nt, Artificial Sequence
  Description of Artificial Sequence: Synthetic oligonucleotide
gcauagaugaguuucuguc

SEQ ID NO: 903338 - RNA, 19 nt, Artificial Sequence
  Description of Artificial Sequence: Synthetic oligonucleotide
agcauagaugaguuucugu

SEQ ID NO: 903339 - RNA, 19 nt, Artificial Sequence
  Description of Artificial Sequence: Synthetic oligonucleotide
cucaucuauaugguauucc

SEQ ID NO: 903340 - RNA, 19 nt, Artificial Sequence
  Description of Artificial Sequence: Synthetic oligonucleotide
cuguuaagaggauggggac

SEQ ID NO: 903341 - RNA, 19 nt, Artificial Sequence
  Description of Artificial Sequence: Synthetic oligonucleotide
aacaugcaacucacgccgc

SEQ ID NO: 903342 - RNA, 19 nt, Artificial Sequence
  Description of Artificial Sequence: Synthetic oligonucleotide
auggauucuggagauguug

SEQ ID NO: 903343 - RNA, 19 nt, Artificial Sequence
  Description of Artificial Sequence: Synthetic oligonucleotide
agggagcaaggcuggauuc

SEQ ID NO: 903344 - RNA, 19 nt, Artificial Sequence
  Description of Artificial Sequence: Synthetic oligonucleotide
ugucggacugagaugggaa

SEQ ID NO: 903345 - RNA, 19 nt, Artificial Sequence
  Description of Artificial Sequence: Synthetic oligonucleotide
  modified_base (6)..(6): a, c, u, g, unknown or other
ucugunaggcucaggccuc

SEQ ID NO: 903346 - RNA, 19 nt, Artificial Sequence
  Description of Artificial Sequence: Synthetic oligonucleotide
aaugcggcagccccaggau

SEQ ID NO: 903347 - RNA, 19 nt, Artificial Sequence
  Description of Artificial Sequence: Synthetic oligonucleotide
ugaacucacucgcuccaga

SEQ ID NO: 903348 - RNA, 19 nt, Artificial Sequence
  Description of Artificial Sequence: Synthetic oligonucleotide
uucaagaucuugccagcau

SEQ ID NO: 903349 - RNA, 19 nt, Artificial Sequence
  Description of Artificial Sequence: Synthetic oligonucleotide
gucacuaauguggaagcug

SEQ ID NO: 903350 - RNA, 19 nt, Artificial Sequence
  Description of Artificial Sequence: Synthetic oligonucleotide
uuuuaagcgugacggugau

SEQ ID NO: 903351 - RNA, 19 nt, Artificial Sequence
  Description of Artificial Sequence: Synthetic oligonucleotide
ugccgcauguucuggaacu

SEQ ID NO: 903352 - RNA, 19 nt, Artificial Sequence
  Description of Artificial Sequence: Synthetic oligonucleotide
ugcaacguuuuaagcguga

SEQ ID NO: 903353 - RNA, 19 nt, Artificial Sequence
  Description of Artificial Sequence: Synthetic oligonucleotide
ggauccucguacaacaugc

SEQ ID NO: 903354 - RNA, 19 nt, Artificial Sequence
  Description of Artificial Sequence: Synthetic oligonucleotide
aggauccucguacaacaug

SEQ ID NO: 903355 - RNA, 19 nt, Artificial Sequence
  Description of Artificial Sequence: Synthetic oligonucleotide
auaggggccacuucagaaa

SEQ ID NO: 903356 - RNA, 19 nt, Artificial Sequence
  Description of Artificial Sequence: Synthetic oligonucleotide
acuaauguggaagcugcgu

SEQ ID NO: 903357 - RNA, 19 nt, Artificial Sequence
  Description of Artificial Sequence: Synthetic oligonucleotide
uuggagccggaggaaaggg

SEQ ID NO: 903358 - RNA, 19 nt, Artificial Sequence
  Description of Artificial Sequence: Synthetic oligonucleotide
cuccaacggaggauaaaag

SEQ ID NO: 903359 - RNA, 19 nt, Artificial Sequence
  Description of Artificial Sequence: Synthetic oligonucleotide
aaugcggccacaacccgcu

SEQ ID NO: 903360 - RNA, 19 nt, Artificial Sequence
  Description of Artificial Sequence: Synthetic oligonucleotide
ucuucucaucuauauggua

SEQ ID NO: 903361 - RNA, 19 nt, Artificial Sequence
  Description of Artificial Sequence: Synthetic oligonucleotide
agccuugggcuucuaauga

SEQ ID NO: 903362 - RNA, 19 nt, Artificial Sequence
  Description of Artificial Sequence: Synthetic oligonucleotide
caugcaccauuguuagggc

SEQ ID NO: 903363 - RNA, 19 nt, Artificial Sequence
  Description of Artificial Sequence: Synthetic oligonucleotide
auggaaagauuugggccac

SEQ ID NO: 903364 - RNA, 19 nt, Artificial Sequence
  Description of Artificial Sequence: Synthetic oligonucleotide
caucucuacccuucucagc

SEQ ID NO: 903365 - RNA, 19 nt, Artificial Sequence
  Description of Artificial Sequence: Synthetic oligonucleotide
auguuaccucuucuccagg

SEQ ID NO: 903366 - RNA, 19 nt, Artificial Sequence
  Description of Artificial Sequence: Synthetic oligonucleotide
ccagcuagcucacagacuc

SEQ ID NO: 903367 - RNA, 19 nt, Artificial Sequence
  Description of Artificial Sequence: Synthetic oligonucleotide
cacuaauguggaagcugcg

SEQ ID NO: 903368 - RNA, 19 nt, Artificial Sequence
  Description of Artificial Sequence: Synthetic oligonucleotide
guuuuaagcgugacgguga

SEQ ID NO: 903369 - RNA, 19 nt, Artificial Sequence
  Description of Artificial Sequence: Synthetic oligonucleotide
guuggagccggaggaaagg

SEQ ID NO: 903370 - RNA, 19 nt, Artificial Sequence
  Description of Artificial Sequence: Synthetic oligonucleotide
cuucucaucuauaugguau

SEQ ID NO: 903371 - RNA, 19 nt, Artificial Sequence
  Description of Artificial Sequence: Synthetic oligonucleotide
uccuggucuugccagcaac

SEQ ID NO: 903372 - RNA, 19 nt, Artificial Sequence
  Description of Artificial Sequence: Synthetic oligonucleotide
caaugcggccacaacccgc

SEQ ID NO: 903373 - RNA, 19 nt, Artificial Sequence
  Description of Artificial Sequence: Synthetic oligonucleotide
aguagcugauuccucugau

SEQ ID NO: 903374 - RNA, 19 nt, Artificial Sequence
  Description of Artificial Sequence: Synthetic oligonucleotide
gggaauaggggccacuuca

SEQ ID NO: 903375 - RNA, 19 nt, Artificial Sequence
  Description of Artificial Sequence: Synthetic oligonucleotide
aaucuggccuagguguugu

SEQ ID NO: 903376 - RNA, 19 nt, Artificial Sequence
  Description of Artificial Sequence: Synthetic oligonucleotide
ugcguaucuugaaggucug

SEQ ID NO: 903377 - RNA, 19 nt, Artificial Sequence
  Description of Artificial Sequence: Synthetic oligonucleotide
uccucugaugggcucuugu

SEQ ID NO: 903378 - RNA, 19 nt, Artificial Sequence
  Description of Artificial Sequence: Synthetic oligonucleotide
uucacacgcgaaguaggcc

SEQ ID NO: 903379 - RNA, 19 nt, Artificial Sequence
  Description of Artificial Sequence: Synthetic oligonucleotide
aacggaggauaaaaguuua

SEQ ID NO: 903380 - RNA, 19 nt, Artificial Sequence
  Description of Artificial Sequence: Synthetic oligonucleotide
gaaguaggccuggaucacc

SEQ ID NO: 903381 - RNA, 19 nt, Artificial Sequence
  Description of Artificial Sequence: Synthetic oligonucleotide
ugucggcuaauuugcugca

SEQ ID NO: 903382 - RNA, 19 nt, Artificial Sequence
  Description of Artificial Sequence: Synthetic oligonucleotide
gcugauuccucugaugggc

SEQ ID NO: 903383 - RNA, 19 nt, Artificial Sequence
  Description of Artificial Sequence: Synthetic oligonucleotide
gaauaggggccacuucaga

SEQ ID NO: 903384 - RNA, 19 nt, Artificial Sequence
  Description of Artificial Sequence: Synthetic oligonucleotide
caugcaacucacgccgccg

SEQ ID NO: 903385 - RNA, 19 nt, Artificial Sequence
  Description of Artificial Sequence: Synthetic oligonucleotide
ccagucacuaauguggaag

SEQ ID NO: 903386 - RNA, 19 nt, Artificial Sequence
  Description of Artificial Sequence: Synthetic oligonucleotide
ucucaucuauaugguauuc

SEQ ID NO: 903387 - RNA, 19 nt, Artificial Sequence
  Description of Artificial Sequence: Synthetic oligonucleotide
ugcaacucacgccgccgcc

SEQ ID NO: 903388 - RNA, 19 nt, Artificial Sequence
  Description of Artificial Sequence: Synthetic oligonucleotide
ggccagacuagggagaaag

SEQ ID NO: 903389 - RNA, 19 nt, Artificial Sequence
  Description of Artificial Sequence: Synthetic oligonucleotide
gaucaccugccgcauguuc

SEQ ID NO: 903390 - RNA, 19 nt, Artificial Sequence
  Description of Artificial Sequence: Synthetic oligonucleotide
gacaugccugauguuggag

SEQ ID NO: 903391 - RNA, 19 nt, Artificial Sequence
  Description of Artificial Sequence: Synthetic oligonucleotide
augcaccauuguuagggcu

SEQ ID NO: 903392 - RNA, 19 nt, Artificial Sequence
  Description of Artificial Sequence: Synthetic oligonucleotide
gucuugucggacugagaug

SEQ ID NO: 903393 - RNA, 19 nt, Artificial Sequence
  Description of Artificial Sequence: Synthetic oligonucleotide
gaucucagucagcaucguc

SEQ ID NO: 903394 - RNA, 19 nt, Artificial Sequence
  Description of Artificial Sequence: Synthetic oligonucleotide
acguuuuaagcgugacggu

SEQ ID NO: 903395 - RNA, 19 nt, Artificial Sequence
  Description of Artificial Sequence: Synthetic oligonucleotide
cucuuccccaguucucagc

SEQ ID NO: 903396 - RNA, 19 nt, Artificial Sequence
  Description of Artificial Sequence: Synthetic oligonucleotide
ucuacccuucucagccucu

SEQ ID NO: 903397 - RNA, 19 nt, Artificial Sequence
  Description of Artificial Sequence: Synthetic oligonucleotide
caccuggauauaauucauc

SEQ ID NO: 903398 - RNA, 19 nt, Artificial Sequence
  Description of Artificial Sequence: Synthetic oligonucleotide
auccucguacaacaugcaa

SEQ ID NO: 903399 - RNA, 19 nt, Artificial Sequence
  Description of Artificial Sequence: Synthetic oligonucleotide
acccgcucccgcucguagc

SEQ ID NO: 903400 - RNA, 19 nt, Artificial Sequence
  Description of Artificial Sequence: Synthetic oligonucleotide
ugcugcugcaacguuuuaa

SEQ ID NO: 903401 - RNA, 19 nt, Artificial Sequence
  Description of Artificial Sequence: Synthetic oligonucleotide
uugucggacugagauggga

SEQ ID NO: 903402 - RNA, 19 nt, Artificial Sequence
  Description of Artificial Sequence: Synthetic oligonucleotide
uacucagagccagucacua

SEQ ID NO: 903403 - RNA, 19 nt, Artificial Sequence
  Description of Artificial Sequence: Synthetic oligonucleotide
uuccggcucaggacucccg

SEQ ID NO: 903404 - RNA, 19 nt, Artificial Sequence
  Description of Artificial Sequence: Synthetic oligonucleotide
caugcguaucuugaagguc

SEQ ID NO: 903405 - RNA, 19 nt, Artificial Sequence
  Description of Artificial Sequence: Synthetic oligonucleotide
cuauagcuuccuucuccug

SEQ ID NO: 903406 - RNA, 19 nt, Artificial Sequence
  Description of Artificial Sequence: Synthetic oligonucleotide
guugcaguagcugauuccu

SEQ ID NO: 903407 - RNA, 19 nt, Artificial Sequence
  Description of Artificial Sequence: Synthetic oligonucleotide
gaaucuggccuagguguug

SEQ ID NO: 903408 - RNA, 19 nt, Artificial Sequence
  Description of Artificial Sequence: Synthetic oligonucleotide
cuugucggacugagauggg

SEQ ID NO: 903409 - RNA, 19 nt, Artificial Sequence
  Description of Artificial Sequence: Synthetic oligonucleotide
ugggaauaggggccacuuc

SEQ ID NO: 903410 - RNA, 19 nt, Artificial Sequence
  Description of Artificial Sequence: Synthetic oligonucleotide
augcggcagccccaggauc

SEQ ID NO: 903411 - RNA, 19 nt, Artificial Sequence
  Description of Artificial Sequence: Synthetic oligonucleotide
ccuggauauaauucaucug

SEQ ID NO: 903412 - RNA, 19 nt, Artificial Sequence
  Description of Artificial Sequence: Synthetic oligonucleotide
auucaucuguggggccucc

SEQ ID NO: 903413 - RNA, 19 nt, Artificial Sequence
  Description of Artificial Sequence: Synthetic oligonucleotide
ggugucggcuaauuugcug

SEQ ID NO: 903414 - RNA, 19 nt, Artificial Sequence
  Description of Artificial Sequence: Synthetic oligonucleotide
cugcaacguuuuaagcgug

SEQ ID NO: 903415 - RNA, 19 nt, Artificial Sequence
  Description of Artificial Sequence: Synthetic oligonucleotide
ugggguacuuuggccagcc

SEQ ID NO: 903416 - RNA, 19 nt, Artificial Sequence
  Description of Artificial Sequence: Synthetic oligonucleotide
uaagcgugacggugauggc

SEQ ID NO: 903417 - RNA, 19 nt, Artificial Sequence
  Description of Artificial Sequence: Synthetic oligonucleotide
cagacuagggagaaagccu

SEQ ID NO: 903418 - RNA, 19 nt, Artificial Sequence
  Description of Artificial Sequence: Synthetic oligonucleotide
caacuuugagcaggcuggg

SEQ ID NO: 903419 - RNA, 19 nt, Artificial Sequence
  Description of Artificial Sequence: Synthetic oligonucleotide
ugcaagagcugaggguucu

SEQ ID NO: 903420 - RNA, 19 nt, Artificial Sequence
  Description of Artificial Sequence: Synthetic oligonucleotide
agucacuaauguggaagcu

SEQ ID NO: 903421 - RNA, 19 nt, Artificial Sequence
  Description of Artificial Sequence: Synthetic oligonucleotide
aguaggcaugcaccauugu

SEQ ID NO: 903422 - RNA, 19 nt, Artificial Sequence
  Description of Artificial Sequence: Synthetic oligonucleotide
agcaaugcggcagccccag

SEQ ID NO: 903423 - RNA, 19 nt, Artificial Sequence
  Description of Artificial Sequence: Synthetic oligonucleotide
agacuagggagaaagccuu

SEQ ID NO: 903424 - RNA, 19 nt, Artificial Sequence
  Description of Artificial Sequence: Synthetic oligonucleotide
uccacggccggcuguucug

SEQ ID NO: 903425 - RNA, 19 nt, Artificial Sequence
  Description of Artificial Sequence: Synthetic oligonucleotide
ucccgggaauucccgugag

SEQ ID NO: 903426 - RNA, 19 nt, Artificial Sequence
  Description of Artificial Sequence: Synthetic oligonucleotide
auaaaaguuuagggcucca

SEQ ID NO: 903427 - RNA, 19 nt, Artificial Sequence
  Description of Artificial Sequence: Synthetic oligonucleotide
uuccacggccggcuguucu

SEQ ID NO: 903428 - RNA, 19 nt, Artificial Sequence
  Description of Artificial Sequence: Synthetic oligonucleotide
uaucagagaugugguucug

SEQ ID NO: 903429 - RNA, 19 nt, Artificial Sequence
  Description of Artificial Sequence: Synthetic oligonucleotide
uuuaagcgugacggugaug

SEQ ID NO: 903430 - RNA, 19 nt, Artificial Sequence
  Description of Artificial Sequence: Synthetic oligonucleotide
cacaacccgcucccgcucg

SEQ ID NO: 903431 - RNA, 19 nt, Artificial Sequence
  Description of Artificial Sequence: Synthetic oligonucleotide
gcccaugucaccugugccc

SEQ ID NO: 903432 - RNA, 19 nt, Artificial Sequence
  Description of Artificial Sequence: Synthetic oligonucleotide
guuuagggcuccagcuucc

SEQ ID NO: 903433 - RNA, 19 nt, Artificial Sequence
  Description of Artificial Sequence: Synthetic oligonucleotide
uccucucgcccgcugcuac

SEQ ID NO: 903434 - RNA, 19 nt, Artificial Sequence
  Description of Artificial Sequence: Synthetic oligonucleotide
uggugucggcuaauuugcu

SEQ ID NO: 903435 - RNA, 19 nt, Artificial Sequence
  Description of Artificial Sequence: Synthetic oligonucleotide
ggucuugucggacugagau

SEQ ID NO: 903436 - RNA, 19 nt, Artificial Sequence
  Description of Artificial Sequence: Synthetic oligonucleotide
  modified_base (3)..(3): a, c, u, g, unknown or other
gunaggcucaggccucuuc

SEQ ID NO: 903437 - RNA, 19 nt, Artificial Sequence
  Description of Artificial Sequence: Synthetic oligonucleotide
acggaggauaaaaguuuag

SEQ ID NO: 903438 - RNA, 19 nt, Artificial Sequence
  Description of Artificial Sequence: Synthetic oligonucleotide
cccgcugcuaccugaagag

SEQ ID NO: 903439 - RNA, 19 nt, Artificial Sequence
  Description of Artificial Sequence: Synthetic oligonucleotide
gcugcaacguuuuaagcgu

SEQ ID NO: 903440 - RNA, 19 nt, Artificial Sequence
  Description of Artificial Sequence: Synthetic oligonucleotide
caaugcggcagccccagga

SEQ ID NO: 903441 - RNA, 19 nt, Artificial Sequence
  Description of Artificial Sequence: Synthetic oligonucleotide
ggaauaggggccacuucag

SEQ ID NO: 903442 - RNA, 19 nt, Artificial Sequence
  Description of Artificial Sequence: Synthetic oligonucleotide
ucggacugagaugggaaua

SEQ ID NO: 903443 - RNA, 19 nt, Artificial Sequence
  Description of Artificial Sequence: Synthetic oligonucleotide
gacuagggagaaagccuug

SEQ ID NO: 903444 - RNA, 19 nt, Artificial Sequence
  Description of Artificial Sequence: Synthetic oligonucleotide
cucuacccuucucagccuc

SEQ ID NO: 903445 - RNA, 19 nt, Artificial Sequence
  Description of Artificial Sequence: Synthetic oligonucleotide
cacacgcgaaguaggccug

SEQ ID NO: 903446 - RNA, 19 nt, Artificial Sequence
  Description of Artificial Sequence: Synthetic oligonucleotide
ggagguggguuguccuugg

SEQ ID NO: 903447 - RNA, 19 nt, Artificial Sequence
  Description of Artificial Sequence: Synthetic oligonucleotide
aaccuuuaucagagaugug

SEQ ID NO: 903448 - RNA, 19 nt, Artificial Sequence
  Description of Artificial Sequence: Synthetic oligonucleotide
cacagggaaagcaucucua

SEQ ID NO: 903449 - RNA, 19 nt, Artificial Sequence
  Description of Artificial Sequence: Synthetic oligonucleotide
agaugggaauaggggccac

SEQ ID NO: 903450 - RNA, 19 nt, Artificial Sequence
  Description of Artificial Sequence: Synthetic oligonucleotide
ucuggccuagguguuguuu

SEQ ID NO: 903451 - RNA, 19 nt, Artificial Sequence
  Description of Artificial Sequence: Synthetic oligonucleotide
gauguuggagccggaggaa

SEQ ID NO: 903452 - RNA, 19 nt, Artificial Sequence
  Description of Artificial Sequence: Synthetic oligonucleotide
gauccucguacaacaugca

SEQ ID NO: 903453 - RNA, 19 nt, Artificial Sequence
  Description of Artificial Sequence: Synthetic oligonucleotide
caucuguggggccuccuca

SEQ ID NO: 903454 - RNA, 19 nt, Artificial Sequence
  Description of Artificial Sequence: Synthetic oligonucleotide
guaggcaugcaccauuguu

SEQ ID NO: 903455 - RNA, 19 nt, Artificial Sequence
  Description of Artificial Sequence: Synthetic oligonucleotide
gccuagguguuguuuugcc

SEQ ID NO: 903456 - RNA, 19 nt, Artificial Sequence
  Description of Artificial Sequence: Synthetic oligonucleotide
cuuuucuagggcugaggcu

SEQ ID NO: 903457 - RNA, 19 nt, Artificial Sequence
  Description of Artificial Sequence: Synthetic oligonucleotide
ccgugagcaaguauuccac

SEQ ID NO: 903458 - RNA, 19 nt, Artificial Sequence
  Description of Artificial Sequence: Synthetic oligonucleotide
gcucaguaggcaugcacca

SEQ ID NO: 903459 - RNA, 19 nt, Artificial Sequence
  Description of Artificial Sequence: Synthetic oligonucleotide
gcccagcuagcucacagac

SEQ ID NO: 903460 - RNA, 19 nt, Artificial Sequence
  Description of Artificial Sequence: Synthetic oligonucleotide
uucugguaccuggcucucc

SEQ ID NO: 903461 - RNA, 19 nt, Artificial Sequence
  Description of Artificial Sequence: Synthetic oligonucleotide
ggacugagaugggaauagg

SEQ ID NO: 903462 - RNA, 19 nt, Artificial Sequence
  Description of Artificial Sequence: Synthetic oligonucleotide
uguggggccuccucaccua

SEQ ID NO: 903463 - RNA, 19 nt, Artificial Sequence
  Description of Artificial Sequence: Synthetic oligonucleotide
cgucaccuggauauaauuc

SEQ ID NO: 903464 - RNA, 19 nt, Artificial Sequence
  Description of Artificial Sequence: Synthetic oligonucleotide
cguuuuaagcgugacggug

SEQ ID NO: 903465 - RNA, 19 nt, Artificial Sequence
  Description of Artificial Sequence: Synthetic oligonucleotide
cuauaugguauuccuugau

SEQ ID NO: 903466 - RNA, 19 nt, Artificial Sequence
  Description of Artificial Sequence: Synthetic oligonucleotide
ugccucccaguaucacuca

SEQ ID NO: 903467 - RNA, 19 nt, Artificial Sequence
  Description of Artificial Sequence: Synthetic oligonucleotide
acacgcgaaguaggccugg

SEQ ID NO: 903468 - RNA, 19 nt, Artificial Sequence
  Description of Artificial Sequence: Synthetic oligonucleotide
cagagcugauguuaccucu

SEQ ID NO: 903469 - RNA, 19 nt, Artificial Sequence
  Description of Artificial Sequence: Synthetic oligonucleotide
ggaaagauuugggccacuc

SEQ ID NO: 903470 - RNA, 19 nt, Artificial Sequence
  Description of Artificial Sequence: Synthetic oligonucleotide
ggcaugcaccauuguuagg

SEQ ID NO: 903471 - RNA, 19 nt, Artificial Sequence
  Description of Artificial Sequence: Synthetic oligonucleotide
aucauggaggagggaggug

SEQ ID NO: 903472 - RNA, 19 nt, Artificial Sequence
  Description of Artificial Sequence: Synthetic oligonucleotide
guauuccuugauggggaca

SEQ ID NO: 903473 - RNA, 19 nt, Artificial Sequence
  Description of Artificial Sequence: Synthetic oligonucleotide
guuuugccucccaguauca

SEQ ID NO: 903474 - RNA, 19 nt, Artificial Sequence
  Description of Artificial Sequence: Synthetic oligonucleotide
gacucacaagcugguguga

SEQ ID NO: 903475 - RNA, 19 nt, Artificial Sequence
  Description of Artificial Sequence: Synthetic oligonucleotide
cauuguuagggcucauuuu

SEQ ID NO: 903476 - RNA, 19 nt, Artificial Sequence
  Description of Artificial Sequence: Synthetic oligonucleotide
cuuuaucagagaugugguu

SEQ ID NO: 903477 - RNA, 19 nt, Artificial Sequence
  Description of Artificial Sequence: Synthetic oligonucleotide
cucguacaacaugcaacuc

SEQ ID NO: 903478 - RNA, 19 nt, Artificial Sequence
  Description of Artificial Sequence: Synthetic oligonucleotide
ggagaaagccuugggcuuc

SEQ ID NO: 903479 - RNA, 19 nt, Artificial Sequence
  Description of Artificial Sequence: Synthetic oligonucleotide
ucucgcccgcugcuaccug

SEQ ID NO: 903480 - RNA, 19 nt, Artificial Sequence
  Description of Artificial Sequence: Synthetic oligonucleotide
caucuauaugguauuccuu

SEQ ID NO: 903481 - RNA, 19 nt, Artificial Sequence
  Description of Artificial Sequence: Synthetic oligonucleotide
ccucugaugggcucuuguc

SEQ ID NO: 903482 - RNA, 19 nt, Artificial Sequence
  Description of Artificial Sequence: Synthetic oligonucleotide
uggaaagauuugggccacu

SEQ ID NO: 903483 - RNA, 19 nt, Artificial Sequence
  Description of Artificial Sequence: Synthetic oligonucleotide
accauuguuagggcucauu

SEQ ID NO: 903484 - RNA, 19 nt, Artificial Sequence
  Description of Artificial Sequence: Synthetic oligonucleotide
gggcuucuaaugaacucac

SEQ ID NO: 903485 - RNA, 19 nt, Artificial Sequence
  Description of Artificial Sequence: Synthetic oligonucleotide
gguguuguuuugccuccca

SEQ ID NO: 903486 - RNA, 19 nt, Artificial Sequence
  Description of Artificial Sequence: Synthetic oligonucleotide
ucgcccgcugcuaccugaa

SEQ ID NO: 903487 - RNA, 19 nt, Artificial Sequence
  Description of Artificial Sequence: Synthetic oligonucleotide
ugccagcauagaugaguuu

SEQ ID NO: 903488 - RNA, 19 nt, Artificial Sequence
  Description of Artificial Sequence: Synthetic oligonucleotide
gauguugcaguagcugauu

SEQ ID NO: 903489 - RNA, 19 nt, Artificial Sequence
  Description of Artificial Sequence: Synthetic oligonucleotide
cucccgggaauucccguga

SEQ ID NO: 903490 - RNA, 19 nt, Artificial Sequence
  Description of Artificial Sequence: Synthetic oligonucleotide
cugugcccagcuagcucac

SEQ ID NO: 903491 - RNA, 19 nt, Artificial Sequence
  Description of Artificial Sequence: Synthetic oligonucleotide
ccgcucguagcccauggac

SEQ ID NO: 903492 - RNA, 19 nt, Artificial Sequence
  Description of Artificial Sequence: Synthetic oligonucleotide
cacucgcuccagauggaaa

SEQ ID NO: 903493 - RNA, 19 nt, Artificial Sequence
  Description of Artificial Sequence: Synthetic oligonucleotide
caguaucacucaucaucaa

SEQ ID NO: 903494 - RNA, 19 nt, Artificial Sequence
  Description of Artificial Sequence: Synthetic oligonucleotide
acaacccgcucccgcucgu

SEQ ID NO: 903495 - RNA, 19 nt, Artificial Sequence
  Description of Artificial Sequence: Synthetic oligonucleotide
ggacucccgggaauucccg

SEQ ID NO: 903496 - RNA, 19 nt, Artificial Sequence
  Description of Artificial Sequence: Synthetic oligonucleotide
gaagcucaguaggcaugca

SEQ ID NO: 903497 - RNA, 19 nt, Artificial Sequence
  Description of Artificial Sequence: Synthetic oligonucleotide
cucguagcccauggacaug

SEQ ID NO: 903498 - RNA, 19 nt, Artificial Sequence
  Description of Artificial Sequence: Synthetic oligonucleotide
ggggccggagcaaugcggc

SEQ ID NO: 903499 - RNA, 19 nt, Artificial Sequence
  Description of Artificial Sequence: Synthetic oligonucleotide
cucacucgcuccagaugga

SEQ ID NO: 903500 - RNA, 19 nt, Artificial Sequence
  Description of Artificial Sequence: Synthetic oligonucleotide
cuggcccucaaugcggcca

SEQ ID NO: 903501 - RNA, 19 nt, Artificial Sequence
  Description of Artificial Sequence: Synthetic oligonucleotide
gucggacugagaugggaau

SEQ ID NO: 903502 - RNA, 19 nt, Artificial Sequence
  Description of Artificial Sequence: Synthetic oligonucleotide
ccgggaauucccgugagca

SEQ ID NO: 903503 - RNA, 19 nt, Artificial Sequence
  Description of Artificial Sequence: Synthetic oligonucleotide
gagcaaugcggcagcccca

SEQ ID NO: 903504 - RNA, 19 nt, Artificial Sequence
  Description of Artificial Sequence: Synthetic oligonucleotide
ccucccaguaucacucauc

SEQ ID NO: 903505 - RNA, 19 nt, Artificial Sequence
  Description of Artificial Sequence: Synthetic oligonucleotide
gaugggaauaggggccacu

SEQ ID NO: 903506 - RNA, 19 nt, Artificial Sequence
  Description of Artificial Sequence: Synthetic oligonucleotide
gccggagcaaugcggcagc

SEQ ID NO: 903507 - RNA, 19 nt, Artificial Sequence
  Description of Artificial Sequence: Synthetic oligonucleotide
cucgcccgcugcuaccuga

SEQ ID NO: 903508 - RNA, 19 nt, Artificial Sequence
  Description of Artificial Sequence: Synthetic oligonucleotide
caucauggaggagggaggu

SEQ ID NO: 903509 - RNA, 19 nt, Artificial Sequence
  Description of Artificial Sequence: Synthetic oligonucleotide
  modified_base (4)..(4): a, c, u, g, unknown or other
ugunaggcucaggccucuu

SEQ ID NO: 903510 - RNA, 19 nt, Artificial Sequence
  Description of Artificial Sequence: Synthetic oligonucleotide
augcggccacaacccgcuc

SEQ ID NO: 903511 - RNA, 19 nt, Artificial Sequence
  Description of Artificial Sequence: Synthetic oligonucleotide
ggccuggaucaccaggcuc

SEQ ID NO: 903512 - RNA, 19 nt, Artificial Sequence
  Description of Artificial Sequence: Synthetic oligonucleotide
guuguagcuggcccucaau

SEQ ID NO: 903513 - RNA, 19 nt, Artificial Sequence
  Description of Artificial Sequence: Synthetic oligonucleotide
gaauucccgugagcaagua

SEQ ID NO: 903514 - RNA, 19 nt, Artificial Sequence
  Description of Artificial Sequence: Synthetic oligonucleotide
gacucccgggaauucccgu

SEQ ID NO: 903515 - RNA, 19 nt, Artificial Sequence
  Description of Artificial Sequence: Synthetic oligonucleotide
cccaggauccucguacaac

SEQ ID NO: 903516 - RNA, 19 nt, Artificial Sequence
  Description of Artificial Sequence: Synthetic oligonucleotide
gccagacuagggagaaagc

SEQ ID NO: 903517 - RNA, 19 nt, Artificial Sequence
  Description of Artificial Sequence: Synthetic oligonucleotide
ggguacuuuggccagccuu

SEQ ID NO: 903518 - RNA, 19 nt, Artificial Sequence
  Description of Artificial Sequence: Synthetic oligonucleotide
acggccggcuguucuggua

SEQ ID NO: 903519 - RNA, 19 nt, Artificial Sequence
  Description of Artificial Sequence: Synthetic oligonucleotide
cugcuaccugaagagggaa

SEQ ID NO: 903520 - RNA, 19 nt, Artificial Sequence
  Description of Artificial Sequence: Synthetic oligonucleotide
gcggggccggagcaaugcg

SEQ ID NO: 903521 - RNA, 19 nt, Artificial Sequence
  Description of Artificial Sequence: Synthetic oligonucleotide
ggcggggccggagcaaugc

SEQ ID NO: 903522 - RNA, 19 nt, Artificial Sequence
  Description of Artificial Sequence: Synthetic oligonucleotide
gcaccauuguuagggcuca

SEQ ID NO: 903523 - RNA, 19 nt, Artificial Sequence
  Description of Artificial Sequence: Synthetic oligonucleotide
auggcggggccggagcaau

SEQ ID NO: 903524 - RNA, 19 nt, Artificial Sequence
  Description of Artificial Sequence: Synthetic oligonucleotide
gucggcuaauuugcugcaa

SEQ ID NO: 903525 - RNA, 19 nt, Artificial Sequence
  Description of Artificial Sequence: Synthetic oligonucleotide
gccgcauguucuggaacug

SEQ ID NO: 903526 - RNA, 19 nt, Artificial Sequence
  Description of Artificial Sequence: Synthetic oligonucleotide
cggggccggagcaaugcgg

SEQ ID NO: 903527 - RNA, 19 nt, Artificial Sequence
  Description of Artificial Sequence: Synthetic oligonucleotide
agaggccaagaggggccca

SEQ ID NO: 903528 - RNA, 19 nt, Artificial Sequence
  Description of Artificial Sequence: Synthetic oligonucleotide
cccgggaauucccgugagc

SEQ ID NO: 903529 - RNA, 19 nt, Artificial Sequence
  Description of Artificial Sequence: Synthetic oligonucleotide
gcguaucuugaaggucugc

SEQ ID NO: 903530 - RNA, 19 nt, Artificial Sequence
  Description of Artificial Sequence: Synthetic oligonucleotide
ggaauucccgugagcaagu

SEQ ID NO: 903531 - RNA, 19 nt, Artificial Sequence
  Description of Artificial Sequence: Synthetic oligonucleotide
gcaaugcggcagccccagg

SEQ ID NO: 903532 - RNA, 19 nt, Artificial Sequence
  Description of Artificial Sequence: Synthetic oligonucleotide
cgugagcaaguauuccaca

SEQ ID NO: 903533 - RNA, 19 nt, Artificial Sequence
  Description of Artificial Sequence: Synthetic oligonucleotide
ggcaggggcccaaguuucc

SEQ ID NO: 903534 - RNA, 19 nt, Artificial Sequence
  Description of Artificial Sequence: Synthetic oligonucleotide
ccuagguguuguuuugccu

SEQ ID NO: 903535 - RNA, 19 nt, Artificial Sequence
  Description of Artificial Sequence: Synthetic oligonucleotide
ccucucgcccgcugcuacc

SEQ ID NO: 903536 - RNA, 19 nt, Artificial Sequence
  Description of Artificial Sequence: Synthetic oligonucleotide
ggaaagcaucucuacccuu

SEQ ID NO: 903537 - RNA, 19 nt, Artificial Sequence
  Description of Artificial Sequence: Synthetic oligonucleotide
gcucacagacucacaagcu

SEQ ID NO: 903538 - RNA, 19 nt, Artificial Sequence
  Description of Artificial Sequence: Synthetic oligonucleotide
ccgcugcuaccugaagagg

SEQ ID NO: 903539 - RNA, 19 nt, Artificial Sequence
  Description of Artificial Sequence: Synthetic oligonucleotide
cgucucauacucagagcca

SEQ ID NO: 903540 - RNA, 19 nt, Artificial Sequence
  Description of Artificial Sequence: Synthetic oligonucleotide
gcaugagagggagcagcca

SEQ ID NO: 903541 - RNA, 19 nt, Artificial Sequence
  Description of Artificial Sequence: Synthetic oligonucleotide
gccccaggauccucguaca

SEQ ID NO: 903542 - RNA, 19 nt, Artificial Sequence
  Description of Artificial Sequence: Synthetic oligonucleotide
cggccggcuguucugguac

SEQ ID NO: 903543 - RNA, 19 nt, Artificial Sequence
  Description of Artificial Sequence: Synthetic oligonucleotide
ccauuacaaccacaaaguu

SEQ ID NO: 903544 - RNA, 19 nt, Artificial Sequence
  Description of Artificial Sequence: Synthetic oligonucleotide
cucccgcucguagcccaug

SEQ ID NO: 903545 - RNA, 19 nt, Artificial Sequence
  Description of Artificial Sequence: Synthetic oligonucleotide
gcgucaccuggauauaauu

SEQ ID NO: 903546 - RNA, 19 nt, Artificial Sequence
  Description of Artificial Sequence: Synthetic oligonucleotide
ggggcucauucaacaucug

SEQ ID NO: 903547 - RNA, 19 nt, Artificial Sequence
  Description of Artificial Sequence: Synthetic oligonucleotide
ccacaacccgcucccgcuc

SEQ ID NO: 903548 - RNA, 19 nt, Artificial Sequence
  Description of Artificial Sequence: Synthetic oligonucleotide
  modified_base (5)..(5): a, c, u, g, unknown or other
cugunaggcucaggccucu

SEQ ID NO: 903549 - RNA, 19 nt, Artificial Sequence
  Description of Artificial Sequence: Synthetic oligonucleotide
agaaagccuugggcuucua

SEQ ID NO: 903550 - RNA, 19 nt, Artificial Sequence
  Description of Artificial Sequence: Synthetic oligonucleotide
cucucgcccgcugcuaccu

SEQ ID NO: 903551 - RNA, 19 nt, Artificial Sequence
  Description of Artificial Sequence: Synthetic oligonucleotide
ccggcuguucugguaccug

SEQ ID NO: 903552 - RNA, 19 nt, Artificial Sequence
  Description of Artificial Sequence: Synthetic oligonucleotide
ccacuccaacggaggauaa

SEQ ID NO: 903553 - RNA, 19 nt, Artificial Sequence
  Description of Artificial Sequence: Synthetic oligonucleotide
cugcggcgucaccuggaua

SEQ ID NO: 903554 - RNA, 19 nt, Artificial Sequence
  Description of Artificial Sequence: Synthetic oligonucleotide
cgggaauucccgugagcaa

SEQ ID NO: 903555 - RNA, 19 nt, Artificial Sequence
  Description of Artificial Sequence: Synthetic oligonucleotide
cucaggccucuuccccagu

SEQ ID NO: 903556 - RNA, 19 nt, Artificial Sequence
  Description of Artificial Sequence: Synthetic oligonucleotide
gccucccaguaucacucau

SEQ ID NO: 903557 - RNA, 19 nt, Artificial Sequence
  Description of Artificial Sequence: Synthetic oligonucleotide
ggcccaucugucaccuccu

SEQ ID NO: 903558 - RNA, 19 nt, Artificial Sequence
  Description of Artificial Sequence: Synthetic oligonucleotide
ggccacuccaacggaggau

SEQ ID NO: 903559 - RNA, 19 nt, Artificial Sequence
  Description of Artificial Sequence: Synthetic oligonucleotide
cccgcucguagcccaugga

SEQ ID NO: 903560 - RNA, 19 nt, Artificial Sequence
  Description of Artificial Sequence: Synthetic oligonucleotide
cacggccggcuguucuggu

SEQ ID NO: 903561 - RNA, 19 nt, Artificial Sequence
  Description of Artificial Sequence: Synthetic oligonucleotide
ccccaggauccucguacaa

SEQ ID NO: 903562 - RNA, 19 nt, Artificial Sequence
  Description of Artificial Sequence: Synthetic oligonucleotide
caacccgcucccgcucgua

SEQ ID NO: 903563 - RNA, 19 nt, Artificial Sequence
  Description of Artificial Sequence: Synthetic oligonucleotide
gggguacuuuggccagccu

SEQ ID NO: 903564 - RNA, 19 nt, Artificial Sequence
  Description of Artificial Sequence: Synthetic oligonucleotide
gcuuccacggccggcuguu

SEQ ID NO: 903565 - RNA, 19 nt, Artificial Sequence
  Description of Artificial Sequence: Synthetic oligonucleotide
cgcccgcugcuaccugaag

SEQ ID NO: 903566 - RNA, 19 nt, Artificial Sequence
  Description of Artificial Sequence: Synthetic oligonucleotide
gccggcuguucugguaccu

SEQ ID NO: 903567 - RNA, 19 nt, Artificial Sequence
  Description of Artificial Sequence: Synthetic oligonucleotide
cgcuccagauggaaagauu

SEQ ID NO: 903568 - RNA, 19 nt, Artificial Sequence
  Description of Artificial Sequence: Synthetic oligonucleotide
gcggcgucaccuggauaua

SEQ ID NO: 903569 - RNA, 19 nt, Artificial Sequence
  Description of Artificial Sequence: Synthetic oligonucleotide
caccauuguuagggcucau

SEQ ID NO: 903570 - RNA, 19 nt, Artificial Sequence
  Description of Artificial Sequence: Synthetic oligonucleotide
gcgugacggugauggccau

SEQ ID NO: 903571 - RNA, 19 nt, Artificial Sequence
  Description of Artificial Sequence: Synthetic oligonucleotide
uuugguucgacucugauug

SEQ ID NO: 903572 - RNA, 19 nt, Artificial Sequence
  Description of Artificial Sequence: Synthetic oligonucleotide
aaugcuaucuugcugcagc

SEQ ID NO: 903573 - RNA, 19 nt, Artificial Sequence
  Description of Artificial Sequence: Synthetic oligonucleotide
aggaaugcuaucuugcugc

SEQ ID NO: 903574 - RNA, 19 nt, Artificial Sequence
  Description of Artificial Sequence: Synthetic oligonucleotide
auguguagcacuuugguuc

SEQ ID NO: 903575 - RNA, 19 nt, Artificial Sequence
  Description of Artificial Sequence: Synthetic oligonucleotide
ucaguaagcaacccguugg

SEQ ID NO: 903576 - RNA, 19 nt, Artificial Sequence
  Description of Artificial Sequence: Synthetic oligonucleotide
uguguagcaaaccuugcgg

SEQ ID NO: 903577 - RNA, 19 nt, Artificial Sequence
  Description of Artificial Sequence: Synthetic oligonucleotide
uuucaaggaacuaauaguc

SEQ ID NO: 903578 - RNA, 19 nt, Artificial Sequence
  Description of Artificial Sequence: Synthetic oligonucleotide
cuaauagucucccuggccg

SEQ ID NO: 903579 - RNA, 19 nt, Artificial Sequence
  Description of Artificial Sequence: Synthetic oligonucleotide
aacuaauagucucccuggc

SEQ ID NO: 903580 - RNA, 19 nt, Artificial Sequence
  Description of Artificial Sequence: Synthetic oligonucleotide
gaugccugcgggcagaugg

SEQ ID NO: 903581 - RNA, 19 nt, Artificial Sequence
  Description of Artificial Sequence: Synthetic oligonucleotide
gaacuaauagucucccugg

SEQ ID NO: 903582 - RNA, 19 nt, Artificial Sequence
  Description of Artificial Sequence: Synthetic oligonucleotide
aaugaggaugccugcgggc

SEQ ID NO: 903583 - RNA, 19 nt, Artificial Sequence
  Description of Artificial Sequence: Synthetic oligonucleotide
augaguguucuccucacgc

SEQ ID NO: 903584 - RNA, 19 nt, Artificial Sequence
  Description of Artificial Sequence: Synthetic oligonucleotide
ucaaccacgaaccuggaaa

SEQ ID NO: 903585 - RNA, 19 nt, Artificial Sequence
  Description of Artificial Sequence: Synthetic oligonucleotide
acuaauagucucccuggcc

SEQ ID NO: 903586 - RNA, 19 nt, Artificial Sequence
  Description of Artificial Sequence: Synthetic oligonucleotide
auaggcuaggcagaggucc

SEQ ID NO: 903587 - RNA, 19 nt, Artificial Sequence
  Description of Artificial Sequence: Synthetic oligonucleotide
guucucaguggucacaucg

SEQ ID NO: 903588 - RNA, 19 nt, Artificial Sequence
  Description of Artificial Sequence: Synthetic oligonucleotide
aaggaacuaauagucuccc

SEQ ID NO: 903589 - RNA, 19 nt, Artificial Sequence
  Description of Artificial Sequence: Synthetic oligonucleotide
agugaggcgguauugguuc

SEQ ID NO: 903590 - RNA, 19 nt, Artificial Sequence
  Description of Artificial Sequence: Synthetic oligonucleotide
gcuguaacuagcucgaugg

SEQ ID NO: 903591 - RNA, 19 nt, Artificial Sequence
  Description of Artificial Sequence: Synthetic oligonucleotide
aauucuaggucaaccagag

SEQ ID NO: 903592 - RNA, 19 nt, Artificial Sequence
  Description of Artificial Sequence: Synthetic oligonucleotide
uucaauuccugcuucucag

SEQ ID NO: 903593 - RNA, 19 nt, Artificial Sequence
  Description of Artificial Sequence: Synthetic oligonucleotide
cuucugaaccccaagcucc

SEQ ID NO: 903594 - RNA, 19 nt, Artificial Sequence
  Description of Artificial Sequence: Synthetic oligonucleotide
ucccauugcauucaacugc

SEQ ID NO: 903595 - RNA, 19 nt, Artificial Sequence
  Description of Artificial Sequence: Synthetic oligonucleotide
aacgggagaacuccgucuc

SEQ ID NO: 903596 - RNA, 19 nt, Artificial Sequence
  Description of Artificial Sequence: Synthetic oligonucleotide
acucugauuguagucaccc

SEQ ID NO: 903597 - RNA, 19 nt, Artificial Sequence
  Description of Artificial Sequence: Synthetic oligonucleotide
uguaggguaagccucucca

SEQ ID NO: 903598 - RNA, 19 nt, Artificial Sequence
  Description of Artificial Sequence: Synthetic oligonucleotide
uguguagcacuuugguucg

SEQ ID NO: 903599 - RNA, 19 nt, Artificial Sequence
  Description of Artificial Sequence: Synthetic oligonucleotide
aaccuugcggaacuccugg

SEQ ID NO: 903600 - RNA, 19 nt, Artificial Sequence
  Description of Artificial Sequence: Synthetic oligonucleotide
acgcauaccgucucgcucc

SEQ ID NO: 903601 - RNA, 19 nt, Artificial Sequence
  Description of Artificial Sequence: Synthetic oligonucleotide
ucaaggaacuaauagucuc

SEQ ID NO: 903602 - RNA, 19 nt, Artificial Sequence
  Description of Artificial Sequence: Synthetic oligonucleotide
acaucgaucugguagccag

SEQ ID NO: 903603 - RNA, 19 nt, Artificial Sequence
  Description of Artificial Sequence: Synthetic oligonucleotide
caaggaacuaauagucucc

SEQ ID NO: 903604 - RNA, 19 nt, Artificial Sequence
  Description of Artificial Sequence: Synthetic oligonucleotide
gagucuucgggccagugcc

SEQ ID NO: 903605 - RNA, 19 nt, Artificial Sequence
  Description of Artificial Sequence: Synthetic oligonucleotide
ggucacaucgaucugguag

SEQ ID NO: 903606 - RNA, 19 nt, Artificial Sequence
  Description of Artificial Sequence: Synthetic oligonucleotide
uccucaguaagcaacccgu

SEQ ID NO: 903607 - RNA, 19 nt, Artificial Sequence
  Description of Artificial Sequence: Synthetic oligonucleotide
ugcauucaacugcaucucg

SEQ ID NO: 903608 - RNA, 19 nt, Artificial Sequence
  Description of Artificial Sequence: Synthetic oligonucleotide
aaaccccgagcacugcugg

SEQ ID NO: 903609 - RNA, 19 nt, Artificial Sequence
  Description of Artificial Sequence: Synthetic oligonucleotide
ucguaggaucccaggaugg

SEQ ID NO: 903610 - RNA, 19 nt, Artificial Sequence
  Description of Artificial Sequence: Synthetic oligonucleotide
agcaagugcagcucaauga

SEQ ID NO: 903611 - RNA, 19 nt, Artificial Sequence
  Description of Artificial Sequence: Synthetic oligonucleotide
ugaaccauguccucugccu

SEQ ID NO: 903612 - RNA, 19 nt, Artificial Sequence
  Description of Artificial Sequence: Synthetic oligonucleotide
agcucaaccacgaaccugg

SEQ ID NO: 903613 - RNA, 19 nt, Artificial Sequence
  Description of Artificial Sequence: Synthetic oligonucleotide
uguaacuagcucgauggug

SEQ ID NO: 903614 - RNA, 19 nt, Artificial Sequence
  Description of Artificial Sequence: Synthetic oligonucleotide
aacuccgucuccaacagcu

SEQ ID NO: 903615 - RNA, 19 nt, Artificial Sequence
  Description of Artificial Sequence: Synthetic oligonucleotide
uuaaucuucugcucauggu

SEQ ID NO: 903616 - RNA, 19 nt, Artificial Sequence
  Description of Artificial Sequence: Synthetic oligonucleotide
aguggucacaucgaucugg

SEQ ID NO: 903617 - RNA, 19 nt, Artificial Sequence
  Description of Artificial Sequence: Synthetic oligonucleotide
cuuggaugagggaaggcug

SEQ ID NO: 903618 - RNA, 19 nt, Artificial Sequence
  Description of Artificial Sequence: Synthetic oligonucleotide
cuggaaaaccuccuugagc

SEQ ID NO: 903619 - RNA, 19 nt, Artificial Sequence
  Description of Artificial Sequence: Synthetic oligonucleotide
ucacgcuccauccuaggca

SEQ ID NO: 903620 - RNA, 19 nt, Artificial Sequence
  Description of Artificial Sequence: Synthetic oligonucleotide
cugguagccagucagugug

SEQ ID NO: 903621 - RNA, 19 nt, Artificial Sequence
  Description of Artificial Sequence: Synthetic oligonucleotide
agaacuccgucuccaacag

SEQ ID NO: 903622 - RNA, 19 nt, Artificial Sequence
  Description of Artificial Sequence: Synthetic oligonucleotide
auugguucucaguggucac

SEQ ID NO: 903623 - RNA, 19 nt, Artificial Sequence
  Description of Artificial Sequence: Synthetic oligonucleotide
aaccuggaaagguccuccg

SEQ ID NO: 903624 - RNA, 19 nt, Artificial Sequence
  Description of Artificial Sequence: Synthetic oligonucleotide
ucgacucugauuguaguca

SEQ ID NO: 903625 - RNA, 19 nt, Artificial Sequence
  Description of Artificial Sequence: Synthetic oligonucleotide
acugucguaggaucccagg

SEQ ID NO: 903626 - RNA, 19 nt, Artificial Sequence
  Description of Artificial Sequence: Synthetic oligonucleotide
agcucacugucguaggauc

SEQ ID NO: 903627 - RNA, 19 nt, Artificial Sequence
  Description of Artificial Sequence: Synthetic oligonucleotide
auaccgggaagugaggcgg

SEQ ID NO: 903628 - RNA, 19 nt, Artificial Sequence
  Description of Artificial Sequence: Synthetic oligonucleotide
agaccuuccagcuccucag

SEQ ID NO: 903629 - RNA, 19 nt, Artificial Sequence
  Description of Artificial Sequence: Synthetic oligonucleotide
ccuuucaaggaacuaauag

SEQ ID NO: 903630 - RNA, 19 nt, Artificial Sequence
  Description of Artificial Sequence: Synthetic oligonucleotide
cacgaaccuggaaaggucc

SEQ ID NO: 903631 - RNA, 19 nt, Artificial Sequence
  Description of Artificial Sequence: Synthetic oligonucleotide
cuuucaaggaacuaauagu

SEQ ID NO: 903632 - RNA, 19 nt, Artificial Sequence
  Description of Artificial Sequence: Synthetic oligonucleotide
cauaccgggaagugaggcg

SEQ ID NO: 903633 - RNA, 19 nt, Artificial Sequence
  Description of Artificial Sequence: Synthetic oligonucleotide
aaggcaugcacgagucccc

SEQ ID NO: 903634 - RNA, 19 nt, Artificial Sequence
  Description of Artificial Sequence: Synthetic oligonucleotide
agugccucauguaucuccc

SEQ ID NO: 903635 - RNA, 19 nt, Artificial Sequence
  Description of Artificial Sequence: Synthetic oligonucleotide
cugcagaccuuccagcucc

SEQ ID NO: 903636 - RNA, 19 nt, Artificial Sequence
  Description of Artificial Sequence: Synthetic oligonucleotide
guaacuagcucgaugguga

SEQ ID NO: 903637 - RNA, 19 nt, Artificial Sequence
  Description of Artificial Sequence: Synthetic oligonucleotide
acaaugcgcuucuggaguc

SEQ ID NO: 903638 - RNA, 19 nt, Artificial Sequence
  Description of Artificial Sequence: Synthetic oligonucleotide
caaccacgaaccuggaaag

SEQ ID NO: 903639 - RNA, 19 nt, Artificial Sequence
  Description of Artificial Sequence: Synthetic oligonucleotide
ggcggcuguaacuagcucg

SEQ ID NO: 903640 - RNA, 19 nt, Artificial Sequence
  Description of Artificial Sequence: Synthetic oligonucleotide
agcacuuugguucgacucu

SEQ ID NO: 903641 - RNA, 19 nt, Artificial Sequence
  Description of Artificial Sequence: Synthetic oligonucleotide
caguacaaugcgcuucugg

SEQ ID NO: 903642 - RNA, 19 nt, Artificial Sequence
  Description of Artificial Sequence: Synthetic oligonucleotide
caaggcaugcacgaguccc

SEQ ID NO: 903643 - RNA, 19 nt, Artificial Sequence
  Description of Artificial Sequence: Synthetic oligonucleotide
ugaguguucuccucacgca

SEQ ID NO: 903644 - RNA, 19 nt, Artificial Sequence
  Description of Artificial Sequence: Synthetic oligonucleotide
auuuucguugcugcaguuc

SEQ ID NO: 903645 - RNA, 19 nt, Artificial Sequence
  Description of Artificial Sequence: Synthetic oligonucleotide
uaauagucucccuggccgc

SEQ ID NO: 903646 - RNA, 19 nt, Artificial Sequence
  Description of Artificial Sequence: Synthetic oligonucleotide
cuaggcagagguccagugg

SEQ ID NO: 903647 - RNA, 19 nt, Artificial Sequence
  Description of Artificial Sequence: Synthetic oligonucleotide
cuaccuccuuggaugaggg

SEQ ID NO: 903648 - RNA, 19 nt, Artificial Sequence
  Description of Artificial Sequence: Synthetic oligonucleotide
aacccguuggucuccuuca

SEQ ID NO: 903649 - RNA, 19 nt, Artificial Sequence
  Description of Artificial Sequence: Synthetic oligonucleotide
ucuggcggcuguaacuagc

SEQ ID NO: 903650 - RNA, 19 nt, Artificial Sequence
  Description of Artificial Sequence: Synthetic oligonucleotide
uagcaaaccuugcggaacu

SEQ ID NO: 903651 - RNA, 19 nt, Artificial Sequence
  Description of Artificial Sequence: Synthetic oligonucleotide
agauucacgcccauggucu

SEQ ID NO: 903652 - RNA, 19 nt, Artificial Sequence
  Description of Artificial Sequence: Synthetic oligonucleotide
aggguaagccucuccaucu

SEQ ID NO: 903653 - RNA, 19 nt, Artificial Sequence
  Description of Artificial Sequence: Synthetic oligonucleotide
uagcacuuugguucgacuc

SEQ ID NO: 903654 - RNA, 19 nt, Artificial Sequence
  Description of Artificial Sequence: Synthetic oligonucleotide
ggaguccugagauucacgc

SEQ ID NO: 903655 - RNA, 19 nt, Artificial Sequence
  Description of Artificial Sequence: Synthetic oligonucleotide
cauugcauucaacugcauc

SEQ ID NO: 903656 - RNA, 19 nt, Artificial Sequence
  Description of Artificial Sequence: Synthetic oligonucleotide
agcaguacaaugcgcuucu

SEQ ID NO: 903657 - RNA, 19 nt, Artificial Sequence
  Description of Artificial Sequence: Synthetic oligonucleotide
uaggguaagccucuccauc

SEQ ID NO: 903658 - RNA, 19 nt, Artificial Sequence
  Description of Artificial Sequence: Synthetic oligonucleotide
uaagcaacccguuggucuc

SEQ ID NO: 903659 - RNA, 19 nt, Artificial Sequence
  Description of Artificial Sequence: Synthetic oligonucleotide
uucagggugagcucucgcu

SEQ ID NO: 903660 - RNA, 19 nt, Artificial Sequence
  Description of Artificial Sequence: Synthetic oligonucleotide
ucuuggagccugagggucc

SEQ ID NO: 903661 - RNA, 19 nt, Artificial Sequence
  Description of Artificial Sequence: Synthetic oligonucleotide
uagauggaggucuggcggc

SEQ ID NO: 903662 - RNA, 19 nt, Artificial Sequence
  Description of Artificial Sequence: Synthetic oligonucleotide
uucgacucugauuguaguc

SEQ ID NO: 903663 - RNA, 19 nt, Artificial Sequence
  Description of Artificial Sequence: Synthetic oligonucleotide
ucaguguguagcaaaccuu

SEQ ID NO: 903664 - RNA, 19 nt, Artificial Sequence
  Description of Artificial Sequence: Synthetic oligonucleotide
gucguaggaucccaggaug

SEQ ID NO: 903665 - RNA, 19 nt, Artificial Sequence
  Description of Artificial Sequence: Synthetic oligonucleotide
uagcucgauggugagggcg

SEQ ID NO: 903666 - RNA, 19 nt, Artificial Sequence
  Description of Artificial Sequence: Synthetic oligonucleotide
caauucuaggucaaccaga

SEQ ID NO: 903667 - RNA, 19 nt, Artificial Sequence
  Description of Artificial Sequence: Synthetic oligonucleotide
aguguguagcaaaccuugc

SEQ ID NO: 903668 - RNA, 19 nt, Artificial Sequence
  Description of Artificial Sequence: Synthetic oligonucleotide
ugcucagcauaccgggaag

SEQ ID NO: 903669 - RNA, 19 nt, Artificial Sequence
  Description of Artificial Sequence: Synthetic oligonucleotide
cacgcuccauccuaggcag

SEQ ID NO: 903670 - RNA, 19 nt, Artificial Sequence
  Description of Artificial Sequence: Synthetic oligonucleotide
ugaacgggagaacuccguc

SEQ ID NO: 903671 - RNA, 19 nt, Artificial Sequence
  Description of Artificial Sequence: Synthetic oligonucleotide
ucaaugagcucaggcacug

SEQ ID NO: 903672 - RNA, 19 nt, Artificial Sequence
  Description of Artificial Sequence: Synthetic oligonucleotide
aaccacgaaccuggaaagg

SEQ ID NO: 903673 - RNA, 19 nt, Artificial Sequence
  Description of Artificial Sequence: Synthetic oligonucleotide
cucaguaagcaacccguug

SEQ ID NO: 903674 - RNA, 19 nt, Artificial Sequence
  Description of Artificial Sequence: Synthetic oligonucleotide
gcuaucuugcugcagcaag

SEQ ID NO: 903675 - RNA, 19 nt, Artificial Sequence
  Description of Artificial Sequence: Synthetic oligonucleotide
uguuccaggcgacuccgcu

SEQ ID NO: 903676 - RNA, 19 nt, Artificial Sequence
  Description of Artificial Sequence: Synthetic oligonucleotide
gaguacucggccuggguca

SEQ ID NO: 903677 - RNA, 19 nt, Artificial Sequence
  Description of Artificial Sequence: Synthetic oligonucleotide
ugggucagcucacugucgu

SEQ ID NO: 903678 - RNA, 19 nt, Artificial Sequence
  Description of Artificial Sequence: Synthetic oligonucleotide
cacugaacgggagaacucc

SEQ ID NO: 903679 - RNA, 19 nt, Artificial Sequence
  Description of Artificial Sequence: Synthetic oligonucleotide
cauaccgucucgcuccuug

SEQ ID NO: 903680 - RNA, 19 nt, Artificial Sequence
  Description of Artificial Sequence: Synthetic oligonucleotide
gcgguauugguucucagug

SEQ ID NO: 903681 - RNA, 19 nt, Artificial Sequence
  Description of Artificial Sequence: Synthetic oligonucleotide
aacuagcucgauggugagg

SEQ ID NO: 903682 - RNA, 19 nt, Artificial Sequence
  Description of Artificial Sequence: Synthetic oligonucleotide
guaagcaacccguuggucu

SEQ ID NO: 903683 - RNA, 19 nt, Artificial Sequence
  Description of Artificial Sequence: Synthetic oligonucleotide
uaacuagcucgauggugag

SEQ ID NO: 903684 - RNA, 19 nt, Artificial Sequence
  Description of Artificial Sequence: Synthetic oligonucleotide
gaguccugagauucacgcc

SEQ ID NO: 903685 - RNA, 19 nt, Artificial Sequence
  Description of Artificial Sequence: Synthetic oligonucleotide
cucggcacuuuccacuugc

SEQ ID NO: 903686 - RNA, 19 nt, Artificial Sequence
  Description of Artificial Sequence: Synthetic oligonucleotide
cuugcggaacuccuggauc

SEQ ID NO: 903687 - RNA, 19 nt, Artificial Sequence
  Description of Artificial Sequence: Synthetic oligonucleotide
ucacccuguaggguaagcc

SEQ ID NO: 903688 - RNA, 19 nt, Artificial Sequence
  Description of Artificial Sequence: Synthetic oligonucleotide
agcucgauggugagggcgc

SEQ ID NO: 903689 - RNA, 19 nt, Artificial Sequence
  Description of Artificial Sequence: Synthetic oligonucleotide
ugaaccccaagcuccucca

SEQ ID NO: 903690 - RNA, 19 nt, Artificial Sequence
  Description of Artificial Sequence: Synthetic oligonucleotide
uuccuggaccuucugacuu

SEQ ID NO: 903691 - RNA, 19 nt, Artificial Sequence
  Description of Artificial Sequence: Synthetic oligonucleotide
aguaagcaacccguugguc

SEQ ID NO: 903692 - RNA, 19 nt, Artificial Sequence
  Description of Artificial Sequence: Synthetic oligonucleotide
ucagaugaguguucuccuc

SEQ ID NO: 903693 - RNA, 19 nt, Artificial Sequence
  Description of Artificial Sequence: Synthetic oligonucleotide
accgucucgcuccuugguc

SEQ ID NO: 903694 - RNA, 19 nt, Artificial Sequence
  Description of Artificial Sequence: Synthetic oligonucleotide
aucgaucugguagccaguc

SEQ ID NO: 903695 - RNA, 19 nt, Artificial Sequence
  Description of Artificial Sequence: Synthetic oligonucleotide
guguagcaaaccuugcgga

SEQ ID NO: 903696 - RNA, 19 nt, Artificial Sequence
  Description of Artificial Sequence: Synthetic oligonucleotide
ugucugggcccucagcauc

SEQ ID NO: 903697 - RNA, 19 nt, Artificial Sequence
  Description of Artificial Sequence: Synthetic oligonucleotide
auaccgucucgcuccuugg

SEQ ID NO: 903698 - RNA, 19 nt, Artificial Sequence
  Description of Artificial Sequence: Synthetic oligonucleotide
ucucaguggucacaucgau

SEQ ID NO: 903699 - RNA, 19 nt, Artificial Sequence
  Description of Artificial Sequence: Synthetic oligonucleotide
caggcguuucaccugcacc

SEQ ID NO: 903700 - RNA, 19 nt, Artificial Sequence
  Description of Artificial Sequence: Synthetic oligonucleotide
acgggagaacuccgucucc

SEQ ID NO: 903701 - RNA, 19 nt, Artificial Sequence
  Description of Artificial Sequence: Synthetic oligonucleotide
uucuccaaaccccgagcac

SEQ ID NO: 903702 - RNA, 19 nt, Artificial Sequence
  Description of Artificial Sequence: Synthetic oligonucleotide
gucagcucacugucguagg

SEQ ID NO: 903703 - RNA, 19 nt, Artificial Sequence
  Description of Artificial Sequence: Synthetic oligonucleotide
uauaggcuaggcagagguc

SEQ ID NO: 903704 - RNA, 19 nt, Artificial Sequence
  Description of Artificial Sequence: Synthetic oligonucleotide
uggccuugaagaugaggca

SEQ ID NO: 903705 - RNA, 19 nt, Artificial Sequence
  Description of Artificial Sequence: Synthetic oligonucleotide
guagucacccuguagggua

SEQ ID NO: 903706 - RNA, 19 nt, Artificial Sequence
  Description of Artificial Sequence: Synthetic oligonucleotide
auggcacgcauaccgucuc

SEQ ID NO: 903707 - RNA, 19 nt, Artificial Sequence
  Description of Artificial Sequence: Synthetic oligonucleotide
uccuugcagaaugggaagc

SEQ ID NO: 903708 - RNA, 19 nt, Artificial Sequence
  Description of Artificial Sequence: Synthetic oligonucleotide
gaaagguccuccggagucc

SEQ ID NO: 903709 - RNA, 19 nt, Artificial Sequence
  Description of Artificial Sequence: Synthetic oligonucleotide
uguagucacccuguagggu

SEQ ID NO: 903710 - RNA, 19 nt, Artificial Sequence
  Description of Artificial Sequence: Synthetic oligonucleotide
gcuggaggcaaccuccagg

SEQ ID NO: 903711 - RNA, 19 nt, Artificial Sequence
  Description of Artificial Sequence: Synthetic oligonucleotide
auguucuuuaccacagcug

SEQ ID NO: 903712 - RNA, 19 nt, Artificial Sequence
  Description of Artificial Sequence: Synthetic oligonucleotide
guagcaaaccuugcggaac

SEQ ID NO: 903713 - RNA, 19 nt, Artificial Sequence
  Description of Artificial Sequence: Synthetic oligonucleotide
cugagucuccaucuccgag

SEQ ID NO: 903714 - RNA, 19 nt, Artificial Sequence
  Description of Artificial Sequence: Synthetic oligonucleotide
ggaggcaaccuccagguca

SEQ ID NO: 903715 - RNA, 19 nt, Artificial Sequence
  Description of Artificial Sequence: Synthetic oligonucleotide
acaugcgcuguguuagcug

SEQ ID NO: 903716 - RNA, 19 nt, Artificial Sequence
  Description of Artificial Sequence: Synthetic oligonucleotide
cugcaucucggagacacgc

SEQ ID NO: 903717 - RNA, 19 nt, Artificial Sequence
  Description of Artificial Sequence: Synthetic oligonucleotide
agcgugucggcucucugcu

SEQ ID NO: 903718 - RNA, 19 nt, Artificial Sequence
  Description of Artificial Sequence: Synthetic oligonucleotide
aaaccuugcggaacuccug

SEQ ID NO: 903719 - RNA, 19 nt, Artificial Sequence
  Description of Artificial Sequence: Synthetic oligonucleotide
aauagucucccuggccgca

SEQ ID NO: 903720 - RNA, 19 nt, Artificial Sequence
  Description of Artificial Sequence: Synthetic oligonucleotide
accacgaaccuggaaaggu

SEQ ID NO: 903721 - RNA, 19 nt, Artificial Sequence
  Description of Artificial Sequence: Synthetic oligonucleotide
cugcgcacugaccugccgg

SEQ ID NO: 903722 - RNA, 19 nt, Artificial Sequence
  Description of Artificial Sequence: Synthetic oligonucleotide
ugagacagcugagucucca

SEQ ID NO: 903723 - RNA, 19 nt, Artificial Sequence
  Description of Artificial Sequence: Synthetic oligonucleotide
uaggcuaggcagaggucca

SEQ ID NO: 903724 - RNA, 19 nt, Artificial Sequence
  Description of Artificial Sequence: Synthetic oligonucleotide
ucggagacacgcccuuuca

SEQ ID NO: 903725 - RNA, 19 nt, Artificial Sequence
  Description of Artificial Sequence: Synthetic oligonucleotide
gucaguguguagcaaaccu

SEQ ID NO: 903726 - RNA, 19 nt, Artificial Sequence
  Description of Artificial Sequence: Synthetic oligonucleotide
auccuaggcagccgcagca

SEQ ID NO: 903727 - RNA, 19 nt, Artificial Sequence
  Description of Artificial Sequence: Synthetic oligonucleotide
cuugcacagccuguggcgc

SEQ ID NO: 903728 - RNA, 19 nt, Artificial Sequence
  Description of Artificial Sequence: Synthetic oligonucleotide
gauucacgcccauggucug

SEQ ID NO: 903729 - RNA, 19 nt, Artificial Sequence
  Description of Artificial Sequence: Synthetic oligonucleotide
cagcaagugcagcucaaug

SEQ ID NO: 903730 - RNA, 19 nt, Artificial Sequence
  Description of Artificial Sequence: Synthetic oligonucleotide
caaaccccgagcacugcug

SEQ ID NO: 903731 - RNA, 19 nt, Artificial Sequence
  Description of Artificial Sequence: Synthetic oligonucleotide
ccuccuggcauuuucguug

SEQ ID NO: 903732 - RNA, 19 nt, Artificial Sequence
  Description of Artificial Sequence: Synthetic oligonucleotide
uguagcacuuugguucgac

SEQ ID NO: 903733 - RNA, 19 nt, Artificial Sequence
  Description of Artificial Sequence: Synthetic oligonucleotide
cucacugucguaggauccc

SEQ ID NO: 903734 - RNA, 19 nt, Artificial Sequence
  Description of Artificial Sequence: Synthetic oligonucleotide
guagccagucaguguguag

SEQ ID NO: 903735 - RNA, 19 nt, Artificial Sequence
  Description of Artificial Sequence: Synthetic oligonucleotide
uggcacgcauaccgucucg

SEQ ID NO: 903736 - RNA, 19 nt, Artificial Sequence
  Description of Artificial Sequence: Synthetic oligonucleotide
ugauuguagucacccugua

SEQ ID NO: 903737 - RNA, 19 nt, Artificial Sequence
  Description of Artificial Sequence: Synthetic oligonucleotide
augcuaucuugcugcagca

SEQ ID NO: 903738 - RNA, 19 nt, Artificial Sequence
  Description of Artificial Sequence: Synthetic oligonucleotide
ucgaucugguagccaguca

SEQ ID NO: 903739 - RNA, 19 nt, Artificial Sequence
  Description of Artificial Sequence: Synthetic oligonucleotide
ucucccucagaugaguguu

SEQ ID NO: 903740 - RNA, 19 nt, Artificial Sequence
  Description of Artificial Sequence: Synthetic oligonucleotide
ucagcucggcacuuuccac

SEQ ID NO: 903741 - RNA, 19 nt, Artificial Sequence
  Description of Artificial Sequence: Synthetic oligonucleotide
aggaacuaauagucucccu

SEQ ID NO: 903742 - RNA, 19 nt, Artificial Sequence
  Description of Artificial Sequence: Synthetic oligonucleotide
cugccggaccucauccugg

SEQ ID NO: 903743 - RNA, 19 nt, Artificial Sequence
  Description of Artificial Sequence: Synthetic oligonucleotide
ugcgcacugaccugccgga

SEQ ID NO: 903744 - RNA, 19 nt, Artificial Sequence
  Description of Artificial Sequence: Synthetic oligonucleotide
cauccuaggcagccgcagc

SEQ ID NO: 903745 - RNA, 19 nt, Artificial Sequence
  Description of Artificial Sequence: Synthetic oligonucleotide
uaagccucuccaucugcau

SEQ ID NO: 903746 - RNA, 19 nt, Artificial Sequence
  Description of Artificial Sequence: Synthetic oligonucleotide
uucucagacuccaggcguu

SEQ ID NO: 903747 - RNA, 19 nt, Artificial Sequence
  Description of Artificial Sequence: Synthetic oligonucleotide
ggccuugaagaugaggcag

SEQ ID NO: 903748 - RNA, 19 nt, Artificial Sequence
  Description of Artificial Sequence: Synthetic oligonucleotide
caucuucucuuccgccgcg

SEQ ID NO: 903749 - RNA, 19 nt, Artificial Sequence
  Description of Artificial Sequence: Synthetic oligonucleotide
cgagcugugggcaugcacc

SEQ ID NO: 903750 - RNA, 19 nt, Artificial Sequence
  Description of Artificial Sequence: Synthetic oligonucleotide
ucacaucgaucugguagcc

SEQ ID NO: 903751 - RNA, 19 nt, Artificial Sequence
  Description of Artificial Sequence: Synthetic oligonucleotide
ggucagcucacugucguag

SEQ ID NO: 903752 - RNA, 19 nt, Artificial Sequence
  Description of Artificial Sequence: Synthetic oligonucleotide
uccggaguccugagauuca

SEQ ID NO: 903753 - RNA, 19 nt, Artificial Sequence
  Description of Artificial Sequence: Synthetic oligonucleotide
cacgcauaccgucucgcuc

SEQ ID NO: 903754 - RNA, 19 nt, Artificial Sequence
  Description of Artificial Sequence: Synthetic oligonucleotide
ggcuguaacuagcucgaug

SEQ ID NO: 903755 - RNA, 19 nt, Artificial Sequence
  Description of Artificial Sequence: Synthetic oligonucleotide
gaaccccaagcuccuccag

SEQ ID NO: 903756 - RNA, 19 nt, Artificial Sequence
  Description of Artificial Sequence: Synthetic oligonucleotide
caacccguuggucuccuuc

SEQ ID NO: 903757 - RNA, 19 nt, Artificial Sequence
  Description of Artificial Sequence: Synthetic oligonucleotide
uggucuggaaaaccuccuu

SEQ ID NO: 903758 - RNA, 19 nt, Artificial Sequence
  Description of Artificial Sequence: Synthetic oligonucleotide
gaacgggagaacuccgucu

SEQ ID NO: 903759 - RNA, 19 nt, Artificial Sequence
  Description of Artificial Sequence: Synthetic oligonucleotide
uguguuagcugggcugagu

SEQ ID NO: 903760 - RNA, 19 nt, Artificial Sequence
  Description of Artificial Sequence: Synthetic oligonucleotide
gguucgacucugauuguag

SEQ ID NO: 903761 - RNA, 19 nt, Artificial Sequence
  Description of Artificial Sequence: Synthetic oligonucleotide
ugcagcaagugcagcucaa

SEQ ID NO: 903762 - RNA, 19 nt, Artificial Sequence
  Description of Artificial Sequence: Synthetic oligonucleotide
cuucagggugagcucucgc

SEQ ID NO: 903763 - RNA, 19 nt, Artificial Sequence
  Description of Artificial Sequence: Synthetic oligonucleotide
agggcgcugaggaaggcag

SEQ ID NO: 903764 - RNA, 19 nt, Artificial Sequence
  Description of Artificial Sequence: Synthetic oligonucleotide
ccgggcauggucuucuugc

SEQ ID NO: 903765 - RNA, 19 nt, Artificial Sequence
  Description of Artificial Sequence: Synthetic oligonucleotide
guuagcugggcugaguacu

SEQ ID NO: 903766 - RNA, 19 nt, Artificial Sequence
  Description of Artificial Sequence: Synthetic oligonucleotide
gguauugguucucaguggu

SEQ ID NO: 903767 - RNA, 19 nt, Artificial Sequence
  Description of Artificial Sequence: Synthetic oligonucleotide
cuccuuggaugagggaagg

SEQ ID NO: 903768 - RNA, 19 nt, Artificial Sequence
  Description of Artificial Sequence: Synthetic oligonucleotide
gaacuccgucuccaacagc

SEQ ID NO: 903769 - RNA, 19 nt, Artificial Sequence
  Description of Artificial Sequence: Synthetic oligonucleotide
cugucguaggaucccagga

SEQ ID NO: 903770 - RNA, 19 nt, Artificial Sequence
  Description of Artificial Sequence: Synthetic oligonucleotide
uaccgucucgcuccuuggu

SEQ ID NO: 903771 - RNA, 19 nt, Artificial Sequence
  Description of Artificial Sequence: Synthetic oligonucleotide
acacgcccuuucaaggaac

SEQ ID NO: 903772 - RNA, 19 nt, Artificial Sequence
  Description of Artificial Sequence: Synthetic oligonucleotide
guguuagcugggcugagua

SEQ ID NO: 903773 - RNA, 19 nt, Artificial Sequence
  Description of Artificial Sequence: Synthetic oligonucleotide
cauccucccgcucccgaag

SEQ ID NO: 903774 - RNA, 19 nt, Artificial Sequence
  Description of Artificial Sequence: Synthetic oligonucleotide
gugagggcgcugaggaagg

SEQ ID NO: 903775 - RNA, 19 nt, Artificial Sequence
  Description of Artificial Sequence: Synthetic oligonucleotide
ggugaugguguuauucuuc

SEQ ID NO: 903776 - RNA, 19 nt, Artificial Sequence
  Description of Artificial Sequence: Synthetic oligonucleotide
ucacugucguaggauccca

SEQ ID NO: 903777 - RNA, 19 nt, Artificial Sequence
  Description of Artificial Sequence: Synthetic oligonucleotide
cacugucguaggaucccag

SEQ ID NO: 903778 - RNA, 19 nt, Artificial Sequence
  Description of Artificial Sequence: Synthetic oligonucleotide
caugcacgaguccccgcag

SEQ ID NO: 903779 - RNA, 19 nt, Artificial Sequence
  Description of Artificial Sequence: Synthetic oligonucleotide
gaggcuagauggaggucug

SEQ ID NO: 903780 - RNA, 19 nt, Artificial Sequence
  Description of Artificial Sequence: Synthetic oligonucleotide
ucccacaugcgcuguguua

SEQ ID NO: 903781 - RNA, 19 nt, Artificial Sequence
  Description of Artificial Sequence: Synthetic oligonucleotide
cagcaguacaaugcgcuuc

SEQ ID NO: 903782 - RNA, 19 nt, Artificial Sequence
  Description of Artificial Sequence: Synthetic oligonucleotide
aaccccgagcacugcuggu

SEQ ID NO: 903783 - RNA, 19 nt, Artificial Sequence
  Description of Artificial Sequence: Synthetic oligonucleotide
cagccucuucagcucacgc

SEQ ID NO: 903784 - RNA, 19 nt, Artificial Sequence
  Description of Artificial Sequence: Synthetic oligonucleotide
caaaccuugcggaacuccu

SEQ ID NO: 903785 - RNA, 19 nt, Artificial Sequence
  Description of Artificial Sequence: Synthetic oligonucleotide
cuagcucgauggugagggc

SEQ ID NO: 903786 - RNA, 19 nt, Artificial Sequence
  Description of Artificial Sequence: Synthetic oligonucleotide
agcauaccgggaagugagg

SEQ ID NO: 903787 - RNA, 19 nt, Artificial Sequence
  Description of Artificial Sequence: Synthetic oligonucleotide
ucuucgggccagugccuca

SEQ ID NO: 903788 - RNA, 19 nt, Artificial Sequence
  Description of Artificial Sequence: Synthetic oligonucleotide
aggcaugcacgaguccccg

SEQ ID NO: 903789 - RNA, 19 nt, Artificial Sequence
  Description of Artificial Sequence: Synthetic oligonucleotide
aaugcgcuucuggagucuu

SEQ ID NO: 903790 - RNA, 19 nt, Artificial Sequence
  Description of Artificial Sequence: Synthetic oligonucleotide
cuaucuugcugcagcaagu

SEQ ID NO: 903791 - RNA, 19 nt, Artificial Sequence
  Description of Artificial Sequence: Synthetic oligonucleotide
cuucucagacuccaggcgu

SEQ ID NO: 903792 - RNA, 19 nt, Artificial Sequence
  Description of Artificial Sequence: Synthetic oligonucleotide
cagaccuuccagcuccuca

SEQ ID NO: 903793 - RNA, 19 nt, Artificial Sequence
  Description of Artificial Sequence: Synthetic oligonucleotide
uccuuggaugagggaaggc

SEQ ID NO: 903794 - RNA, 19 nt, Artificial Sequence
  Description of Artificial Sequence: Synthetic oligonucleotide
cccacaugcgcuguguuag

SEQ ID NO: 903795 - RNA, 19 nt, Artificial Sequence
  Description of Artificial Sequence: Synthetic oligonucleotide
ugguucgacucugauugua

SEQ ID NO: 903796 - RNA, 19 nt, Artificial Sequence
  Description of Artificial Sequence: Synthetic oligonucleotide
gugcucagcauaccgggaa

SEQ ID NO: 903797 - RNA, 19 nt, Artificial Sequence
  Description of Artificial Sequence: Synthetic oligonucleotide
ggagaacuccgucuccaac

SEQ ID NO: 903798 - RNA, 19 nt, Artificial Sequence
  Description of Artificial Sequence: Synthetic oligonucleotide
uggucccauugcauucaac

SEQ ID NO: 903799 - RNA, 19 nt, Artificial Sequence
  Description of Artificial Sequence: Synthetic oligonucleotide
aggcacugaacgggagaac

SEQ ID NO: 903800 - RNA, 19 nt, Artificial Sequence
  Description of Artificial Sequence: Synthetic oligonucleotide
cugagacagcugagucucc

SEQ ID NO: 903801 - RNA, 19 nt, Artificial Sequence
  Description of Artificial Sequence: Synthetic oligonucleotide
aggcgguauugguucucag

SEQ ID NO: 903802 - RNA, 19 nt, Artificial Sequence
  Description of Artificial Sequence: Synthetic oligonucleotide
ggcuagauggaggucuggc

SEQ ID NO: 903803 - RNA, 19 nt, Artificial Sequence
  Description of Artificial Sequence: Synthetic oligonucleotide
auagucucccuggccgcag

SEQ ID NO: 903804 - RNA, 19 nt, Artificial Sequence
  Description of Artificial Sequence: Synthetic oligonucleotide
gauggcacgcauaccgucu

SEQ ID NO: 903805 - RNA, 19 nt, Artificial Sequence
  Description of Artificial Sequence: Synthetic oligonucleotide
ggaucuuggucuggaaaac

SEQ ID NO: 903806 - RNA, 19 nt, Artificial Sequence
  Description of Artificial Sequence: Synthetic oligonucleotide
uugcuuccgcagcucugcu

SEQ ID NO: 903807 - RNA, 19 nt, Artificial Sequence
  Description of Artificial Sequence: Synthetic oligonucleotide
gcugagcuugucugggccc

SEQ ID NO: 903808 - RNA, 19 nt, Artificial Sequence
  Description of Artificial Sequence: Synthetic oligonucleotide
accgggcauggucuucuug

SEQ ID NO: 903809 - RNA, 19 nt, Artificial Sequence
  Description of Artificial Sequence: Synthetic oligonucleotide
gcauaccgggaagugaggc

SEQ ID NO: 903810 - RNA, 19 nt, Artificial Sequence
  Description of Artificial Sequence: Synthetic oligonucleotide
cagcucaaccacgaaccug

SEQ ID NO: 903811 - RNA, 19 nt, Artificial Sequence
  Description of Artificial Sequence: Synthetic oligonucleotide
ccuccuugcagaaugggaa

SEQ ID NO: 903812 - RNA, 19 nt, Artificial Sequence
  Description of Artificial Sequence: Synthetic oligonucleotide
guucgacucugauuguagu

SEQ ID NO: 903813 - RNA, 19 nt, Artificial Sequence
  Description of Artificial Sequence: Synthetic oligonucleotide
gucuggcggcuguaacuag

SEQ ID NO: 903814 - RNA, 19 nt, Artificial Sequence
  Description of Artificial Sequence: Synthetic oligonucleotide
gcugugggcaugcaccuuc

SEQ ID NO: 903815 - RNA, 19 nt, Artificial Sequence
  Description of Artificial Sequence: Synthetic oligonucleotide
cagucagacuggugcucag

SEQ ID NO: 903816 - RNA, 19 nt, Artificial Sequence
  Description of Artificial Sequence: Synthetic oligonucleotide
ggcgacuccgcucacccuc

SEQ ID NO: 903817 - RNA, 19 nt, Artificial Sequence
  Description of Artificial Sequence: Synthetic oligonucleotide
uccugacggcccagcuucc

SEQ ID NO: 903818 - RNA, 19 nt, Artificial Sequence
  Description of Artificial Sequence: Synthetic oligonucleotide
cucaaugagcucaggcacu

SEQ ID NO: 903819 - RNA, 19 nt, Artificial Sequence
  Description of Artificial Sequence: Synthetic oligonucleotide
cucagaugaguguucuccu

SEQ ID NO: 903820 - RNA, 19 nt, Artificial Sequence
  Description of Artificial Sequence: Synthetic oligonucleotide
uaccgggaagugaggcggu

SEQ ID NO: 903821 - RNA, 19 nt, Artificial Sequence
  Description of Artificial Sequence: Synthetic oligonucleotide
agcucacgcuccauccuag

SEQ ID NO: 903822 - RNA, 19 nt, Artificial Sequence
  Description of Artificial Sequence: Synthetic oligonucleotide
acugaccugccggaccuca

SEQ ID NO: 903823 - RNA, 19 nt, Artificial Sequence
  Description of Artificial Sequence: Synthetic oligonucleotide
cagcugcgcacugaccugc

SEQ ID NO: 903824 - RNA, 19 nt, Artificial Sequence
  Description of Artificial Sequence: Synthetic oligonucleotide
accccgagcacugcuggug

SEQ ID NO: 903825 - RNA, 19 nt, Artificial Sequence
  Description of Artificial Sequence: Synthetic oligonucleotide
gaggcgguauugguucuca

SEQ ID NO: 903826 - RNA, 19 nt, Artificial Sequence
  Description of Artificial Sequence: Synthetic oligonucleotide
cccauugcauucaacugca

SEQ ID NO: 903827 - RNA, 19 nt, Artificial Sequence
  Description of Artificial Sequence: Synthetic oligonucleotide
guauugguucucagugguc

SEQ ID NO: 903828 - RNA, 19 nt, Artificial Sequence
  Description of Artificial Sequence: Synthetic oligonucleotide
ggauggcacgcauaccguc

SEQ ID NO: 903829 - RNA, 19 nt, Artificial Sequence
  Description of Artificial Sequence: Synthetic oligonucleotide
cgguauugguucucagugg

SEQ ID NO: 903830 - RNA, 19 nt, Artificial Sequence
  Description of Artificial Sequence: Synthetic oligonucleotide
ugccugcgggcagauggag

SEQ ID NO: 903831 - RNA, 19 nt, Artificial Sequence
  Description of Artificial Sequence: Synthetic oligonucleotide
cacccuguaggguaagccu

SEQ ID NO: 903832 - RNA, 19 nt, Artificial Sequence
  Description of Artificial Sequence: Synthetic oligonucleotide
gcucacugucguaggaucc

SEQ ID NO: 903833 - RNA, 19 nt, Artificial Sequence
  Description of Artificial Sequence: Synthetic oligonucleotide
ggaggcuagauggaggucu

SEQ ID NO: 903834 - RNA, 19 nt, Artificial Sequence
  Description of Artificial Sequence: Synthetic oligonucleotide
gcaugcacgaguccccgca

SEQ ID NO: 903835 - RNA, 19 nt, Artificial Sequence
  Description of Artificial Sequence: Synthetic oligonucleotide
ccuucaaccugagugcauc

SEQ ID NO: 903836 - RNA, 19 nt, Artificial Sequence
  Description of Artificial Sequence: Synthetic oligonucleotide
uucgggccagugccucaug

SEQ ID NO: 903837 - RNA, 19 nt, Artificial Sequence
  Description of Artificial Sequence: Synthetic oligonucleotide
gagcugugggcaugcaccu

SEQ ID NO: 903838 - RNA, 19 nt, Artificial Sequence
  Description of Artificial Sequence: Synthetic oligonucleotide
guagcacuuugguucgacu

SEQ ID NO: 903839 - RNA, 19 nt, Artificial Sequence
  Description of Artificial Sequence: Synthetic oligonucleotide
ccacgaaccuggaaagguc

SEQ ID NO: 903840 - RNA, 19 nt, Artificial Sequence
  Description of Artificial Sequence: Synthetic oligonucleotide
ugaggcgguauugguucuc

SEQ ID NO: 903841 - RNA, 19 nt, Artificial Sequence
  Description of Artificial Sequence: Synthetic oligonucleotide
ugcaaccgggcauggucuu

SEQ ID NO: 903842 - RNA, 19 nt, Artificial Sequence
  Description of Artificial Sequence: Synthetic oligonucleotide
guggcuguagaaugaggau

SEQ ID NO: 903843 - RNA, 19 nt, Artificial Sequence
  Description of Artificial Sequence: Synthetic oligonucleotide
ugcgggcagauggaggcua

SEQ ID NO: 903844 - RNA, 19 nt, Artificial Sequence
  Description of Artificial Sequence: Synthetic oligonucleotide
caguggucacaucgaucug

SEQ ID NO: 903845 - RNA, 19 nt, Artificial Sequence
  Description of Artificial Sequence: Synthetic oligonucleotide
uccagcgugucggcucucu

SEQ ID NO: 903846 - RNA, 19 nt, Artificial Sequence
  Description of Artificial Sequence: Synthetic oligonucleotide
gcuguguuagcugggcuga

SEQ ID NO: 903847 - RNA, 19 nt, Artificial Sequence
  Description of Artificial Sequence: Synthetic oligonucleotide
guaggguaagccucuccau

SEQ ID NO: 903848 - RNA, 19 nt, Artificial Sequence
  Description of Artificial Sequence: Synthetic oligonucleotide
gcacuuugguucgacucug

SEQ ID NO: 903849 - RNA, 19 nt, Artificial Sequence
  Description of Artificial Sequence: Synthetic oligonucleotide
caucuuggagccugagggu

SEQ ID NO: 903850 - RNA, 19 nt, Artificial Sequence
  Description of Artificial Sequence: Synthetic oligonucleotide
caccuucaaccugagugca

SEQ ID NO: 903851 - RNA, 19 nt, Artificial Sequence
  Description of Artificial Sequence: Synthetic oligonucleotide
cugcaaccgggcauggucu

SEQ ID NO: 903852 - RNA, 19 nt, Artificial Sequence
  Description of Artificial Sequence: Synthetic oligonucleotide
augcgcuguguuagcuggg

SEQ ID NO: 903853 - RNA, 19 nt, Artificial Sequence
  Description of Artificial Sequence: Synthetic oligonucleotide
cacuuugguucgacucuga

SEQ ID NO: 903854 - RNA, 19 nt, Artificial Sequence
  Description of Artificial Sequence: Synthetic oligonucleotide
aggcuaggcagagguccag

SEQ ID NO: 903855 - RNA, 19 nt, Artificial Sequence
  Description of Artificial Sequence: Synthetic oligonucleotide
gucggcucucugcuucuga

SEQ ID NO: 903856 - RNA, 19 nt, Artificial Sequence
  Description of Artificial Sequence: Synthetic oligonucleotide
cgcuguguuagcugggcug

SEQ ID NO: 903857 - RNA, 19 nt, Artificial Sequence
  Description of Artificial Sequence: Synthetic oligonucleotide
cuguguuagcugggcugag

SEQ ID NO: 903858 - RNA, 19 nt, Artificial Sequence
  Description of Artificial Sequence: Synthetic oligonucleotide
cucaaccacgaaccuggaa

SEQ ID NO: 903859 - RNA, 19 nt, Artificial Sequence
  Description of Artificial Sequence: Synthetic oligonucleotide
augcgcuucuggagucuuc

SEQ ID NO: 903860 - RNA, 19 nt, Artificial Sequence
  Description of Artificial Sequence: Synthetic oligonucleotide
acccguuggucuccuucau

SEQ ID NO: 903861 - RNA, 19 nt, Artificial Sequence
  Description of Artificial Sequence: Synthetic oligonucleotide
cugaacgggagaacuccgu

SEQ ID NO: 903862 - RNA, 19 nt, Artificial Sequence
  Description of Artificial Sequence: Synthetic oligonucleotide
ggcugaguacucggccugg

SEQ ID NO: 903863 - RNA, 19 nt, Artificial Sequence
  Description of Artificial Sequence: Synthetic oligonucleotide
ggcgguauugguucucagu

SEQ ID NO: 903864 - RNA, 19 nt, Artificial Sequence
  Description of Artificial Sequence: Synthetic oligonucleotide
ggcacgcauaccgucucgc

SEQ ID NO: 903865 - RNA, 19 nt, Artificial Sequence
  Description of Artificial Sequence: Synthetic oligonucleotide
cugcaucuuggagccugag

SEQ ID NO: 903866 - RNA, 19 nt, Artificial Sequence
  Description of Artificial Sequence: Synthetic oligonucleotide
aaccgggcauggucuucuu

SEQ ID NO: 903867 - RNA, 19 nt, Artificial Sequence
  Description of Artificial Sequence: Synthetic oligonucleotide
cuggcggcuguaacuagcu

SEQ ID NO: 903868 - RNA, 19 nt, Artificial Sequence
  Description of Artificial Sequence: Synthetic oligonucleotide
cucugauuguagucacccu

SEQ ID NO: 903869 - RNA, 19 nt, Artificial Sequence
  Description of Artificial Sequence: Synthetic oligonucleotide
gcugcgcacugaccugccg

SEQ ID NO: 903870 - RNA, 19 nt, Artificial Sequence
  Description of Artificial Sequence: Synthetic oligonucleotide
gcgcuucuggagucuucgg

SEQ ID NO: 903871 - RNA, 19 nt, Artificial Sequence
  Description of Artificial Sequence: Synthetic oligonucleotide
gucuucgggccagugccuc

SEQ ID NO: 903872 - RNA, 19 nt, Artificial Sequence
  Description of Artificial Sequence: Synthetic oligonucleotide
ccaaggcaugcacgagucc

SEQ ID NO: 903873 - RNA, 19 nt, Artificial Sequence
  Description of Artificial Sequence: Synthetic oligonucleotide
gcagucagacuggugcuca

SEQ ID NO: 903874 - RNA, 19 nt, Artificial Sequence
  Description of Artificial Sequence: Synthetic oligonucleotide
gcggcuguaacuagcucga

SEQ ID NO: 903875 - RNA, 19 nt, Artificial Sequence
  Description of Artificial Sequence: Synthetic oligonucleotide
ccguuggucuccuucaucu

SEQ ID NO: 903876 - RNA, 19 nt, Artificial Sequence
  Description of Artificial Sequence: Synthetic oligonucleotide
gcagccucuucagcucacg

SEQ ID NO: 903877 - RNA, 19 nt, Artificial Sequence
  Description of Artificial Sequence: Synthetic oligonucleotide
cacaucgaucugguagcca

SEQ ID NO: 903878 - RNA, 19 nt, Artificial Sequence
  Description of Artificial Sequence: Synthetic oligonucleotide
aggcgacuccgcucacccu

SEQ ID NO: 903879 - RNA, 19 nt, Artificial Sequence
  Description of Artificial Sequence: Synthetic oligonucleotide
ccacaugcgcuguguuagc

SEQ ID NO: 903880 - RNA, 19 nt, Artificial Sequence
  Description of Artificial Sequence: Synthetic oligonucleotide
ggucuggcggcuguaacua

SEQ ID NO: 903881 - RNA, 19 nt, Artificial Sequence
  Description of Artificial Sequence: Synthetic oligonucleotide
cuguaacuagcucgauggu

SEQ ID NO: 903882 - RNA, 19 nt, Artificial Sequence
  Description of Artificial Sequence: Synthetic oligonucleotide
cagcucacgcuccauccua

SEQ ID NO: 903883 - RNA, 19 nt, Artificial Sequence
  Description of Artificial Sequence: Synthetic oligonucleotide
ggcaugcacgaguccccgc

SEQ ID NO: 903884 - RNA, 19 nt, Artificial Sequence
  Description of Artificial Sequence: Synthetic oligonucleotide
augccugcgggcagaugga

SEQ ID NO: 903885 - RNA, 19 nt, Artificial Sequence
  Description of Artificial Sequence: Synthetic oligonucleotide
cacgcccuuucaaggaacu

SEQ ID NO: 903886 - RNA, 19 nt, Artificial Sequence
  Description of Artificial Sequence: Synthetic oligonucleotide
gccugcgggcagauggagg

SEQ ID NO: 903887 - RNA, 19 nt, Artificial Sequence
  Description of Artificial Sequence: Synthetic oligonucleotide
caucgaucugguagccagu

SEQ ID NO: 903888 - RNA, 19 nt, Artificial Sequence
  Description of Artificial Sequence: Synthetic oligonucleotide
ggaaaaccuccuugagccu

SEQ ID NO: 903889 - RNA, 19 nt, Artificial Sequence
  Description of Artificial Sequence: Synthetic oligonucleotide
ccugagauucacgcccaug

SEQ ID NO: 903890 - RNA, 19 nt, Artificial Sequence
  Description of Artificial Sequence: Synthetic oligonucleotide
gccucauguaucucccucu

SEQ ID NO: 903891 - RNA, 19 nt, Artificial Sequence
  Description of Artificial Sequence: Synthetic oligonucleotide
ggcgcugaggaaggcagga

SEQ ID NO: 903892 - RNA, 19 nt, Artificial Sequence
  Description of Artificial Sequence: Synthetic oligonucleotide
gcacugaacgggagaacuc

SEQ ID NO: 903893 - RNA, 19 nt, Artificial Sequence
  Description of Artificial Sequence: Synthetic oligonucleotide
ccgucucgcuccuugguca

SEQ ID NO: 903894 - RNA, 19 nt, Artificial Sequence
  Description of Artificial Sequence: Synthetic oligonucleotide
cguaggaucccaggauggc

SEQ ID NO: 903895 - RNA, 19 nt, Artificial Sequence
  Description of Artificial Sequence: Synthetic oligonucleotide
cgcacugaccugccggacc

SEQ ID NO: 903896 - RNA, 19 nt, Artificial Sequence
  Description of Artificial Sequence: Synthetic oligonucleotide
gcuccuuggucagcaguac

SEQ ID NO: 903897 - RNA, 19 nt, Artificial Sequence
  Description of Artificial Sequence: Synthetic oligonucleotide
ggcagucagacuggugcuc

SEQ ID NO: 903898 - RNA, 19 nt, Artificial Sequence
  Description of Artificial Sequence: Synthetic oligonucleotide
ggccagugccucauguauc

SEQ ID NO: 903899 - RNA, 19 nt, Artificial Sequence
  Description of Artificial Sequence: Synthetic oligonucleotide
ccuuggaugagggaaggcu

SEQ ID NO: 903900 - RNA, 19 nt, Artificial Sequence
  Description of Artificial Sequence: Synthetic oligonucleotide
gguccaguggcuguagaau

SEQ ID NO: 903901 - RNA, 19 nt, Artificial Sequence
  Description of Artificial Sequence: Synthetic oligonucleotide
cccgcagccguucgcacuc

SEQ ID NO: 903902 - RNA, 19 nt, Artificial Sequence
  Description of Artificial Sequence: Synthetic oligonucleotide
gcacugaccugccggaccu

SEQ ID NO: 903903 - RNA, 19 nt, Artificial Sequence
  Description of Artificial Sequence: Synthetic oligonucleotide
cugaguacucggccugggu

SEQ ID NO: 903904 - RNA, 19 nt, Artificial Sequence
  Description of Artificial Sequence: Synthetic oligonucleotide
cauuuucguugcugcaguu

SEQ ID NO: 903905 - RNA, 19 nt, Artificial Sequence
  Description of Artificial Sequence: Synthetic oligonucleotide
cacaugcgcuguguuagcu

SEQ ID NO: 903906 - RNA, 19 nt, Artificial Sequence
  Description of Artificial Sequence: Synthetic oligonucleotide
ccggaguccugagauucac

SEQ ID NO: 903907 - RNA, 19 nt, Artificial Sequence
  Description of Artificial Sequence: Synthetic oligonucleotide
cagagguccaguggcugua

SEQ ID NO: 903908 - RNA, 19 nt, Artificial Sequence
  Description of Artificial Sequence: Synthetic oligonucleotide
gcagagguccaguggcugu

SEQ ID NO: 903909 - RNA, 19 nt, Artificial Sequence
  Description of Artificial Sequence: Synthetic oligonucleotide
ccccaagcuccuccagggc

SEQ ID NO: 903910 - RNA, 19 nt, Artificial Sequence
  Description of Artificial Sequence: Synthetic oligonucleotide
cccguuggucuccuucauc

SEQ ID NO: 903911 - RNA, 19 nt, Artificial Sequence
  Description of Artificial Sequence: Synthetic oligonucleotide
acgcccuuucaaggaacua

SEQ ID NO: 903912 - RNA, 19 nt, Artificial Sequence
  Description of Artificial Sequence: Synthetic oligonucleotide
gcucggcacuuuccacuug

SEQ ID NO: 903913 - RNA, 19 nt, Artificial Sequence
  Description of Artificial Sequence: Synthetic oligonucleotide
gagcacugcuggugauggu

SEQ ID NO: 903914 - RNA, 19 nt, Artificial Sequence
  Description of Artificial Sequence: Synthetic oligonucleotide
gcgacuccgcucacccucc

SEQ ID NO: 903915 - RNA, 19 nt, Artificial Sequence
  Description of Artificial Sequence: Synthetic oligonucleotide
cuuggagccugaggguccu

SEQ ID NO: 903916 - RNA, 19 nt, Artificial Sequence
  Description of Artificial Sequence: Synthetic oligonucleotide
cccucagaugaguguucuc

SEQ ID NO: 903917 - RNA, 19 nt, Artificial Sequence
  Description of Artificial Sequence: Synthetic oligonucleotide
ggucucagcugagcuuguc

SEQ ID NO: 903918 - RNA, 19 nt, Artificial Sequence
  Description of Artificial Sequence: Synthetic oligonucleotide
agcugugggcaugcaccuu

SEQ ID NO: 903919 - RNA, 19 nt, Artificial Sequence
  Description of Artificial Sequence: Synthetic oligonucleotide
guguagcacuuugguucga

SEQ ID NO: 903920 - RNA, 19 nt, Artificial Sequence
  Description of Artificial Sequence: Synthetic oligonucleotide
caugcaccuucugaaccau

SEQ ID NO: 903921 - RNA, 19 nt, Artificial Sequence
  Description of Artificial Sequence: Synthetic oligonucleotide
gcgggcagauggaggcuag

SEQ ID NO: 903922 - RNA, 19 nt, Artificial Sequence
  Description of Artificial Sequence: Synthetic oligonucleotide
accgggaagugaggcggua

SEQ ID NO: 903923 - RNA, 19 nt, Artificial Sequence
  Description of Artificial Sequence: Synthetic oligonucleotide
caaugcgcuucuggagucu

SEQ ID NO: 903924 - RNA, 19 nt, Artificial Sequence
  Description of Artificial Sequence: Synthetic oligonucleotide
cuggcgcuuccuggccaug

SEQ ID NO: 903925 - RNA, 19 nt, Artificial Sequence
  Description of Artificial Sequence: Synthetic oligonucleotide
ccccucucuccaaggcaug

SEQ ID NO: 903926 - RNA, 19 nt, Artificial Sequence
  Description of Artificial Sequence: Synthetic oligonucleotide
gcacgcauaccgucucgcu

SEQ ID NO: 903927 - RNA, 19 nt, Artificial Sequence
  Description of Artificial Sequence: Synthetic oligonucleotide
cgcccuuucaaggaacuaa

SEQ ID NO: 903928 - RNA, 19 nt, Artificial Sequence
  Description of Artificial Sequence: Synthetic oligonucleotide
cacugaccugccggaccuc

SEQ ID NO: 903929 - RNA, 19 nt, Artificial Sequence
  Description of Artificial Sequence: Synthetic oligonucleotide
gcaaccgggcauggucuuc

SEQ ID NO: 903930 - RNA, 19 nt, Artificial Sequence
  Description of Artificial Sequence: Synthetic oligonucleotide
cacagccuguggcgcucca

SEQ ID NO: 903931 - RNA, 19 nt, Artificial Sequence
  Description of Artificial Sequence: Synthetic oligonucleotide
gggucagcucacugucgua

SEQ ID NO: 903932 - RNA, 19 nt, Artificial Sequence
  Description of Artificial Sequence: Synthetic oligonucleotide
ccaaaccccgagcacugcu

SEQ ID NO: 903933 - RNA, 19 nt, Artificial Sequence
  Description of Artificial Sequence: Synthetic oligonucleotide
ccccgagcacugcugguga

SEQ ID NO: 903934 - RNA, 19 nt, Artificial Sequence
  Description of Artificial Sequence: Synthetic oligonucleotide
gggccugagacagcugagu

SEQ ID NO: 903935 - RNA, 19 nt, Artificial Sequence
  Description of Artificial Sequence: Synthetic oligonucleotide
ggaugccugcgggcagaug

SEQ ID NO: 903936 - RNA, 19 nt, Artificial Sequence
  Description of Artificial Sequence: Synthetic oligonucleotide
cuucgggccagugccucau

SEQ ID NO: 903937 - RNA, 19 nt, Artificial Sequence
  Description of Artificial Sequence: Synthetic oligonucleotide
ccgcagccaggccauccuc

SEQ ID NO: 903938 - RNA, 19 nt, Artificial Sequence
  Description of Artificial Sequence: Synthetic oligonucleotide
gcucaaccacgaaccugga

SEQ ID NO: 903939 - RNA, 19 nt, Artificial Sequence
  Description of Artificial Sequence: Synthetic oligonucleotide
acgaguccccgcagccguu

SEQ ID NO: 903940 - RNA, 19 nt, Artificial Sequence
  Description of Artificial Sequence: Synthetic oligonucleotide
gcgcuguguuagcugggcu

SEQ ID NO: 903941 - RNA, 19 nt, Artificial Sequence
  Description of Artificial Sequence: Synthetic oligonucleotide
gcgcacugaccugccggac

SEQ ID NO: 903942 - RNA, 19 nt, Artificial Sequence
  Description of Artificial Sequence: Synthetic oligonucleotide
cggagacacgcccuuucaa

SEQ ID NO: 903943 - RNA, 19 nt, Artificial Sequence
  Description of Artificial Sequence: Synthetic oligonucleotide
cuccagcgugucggcucuc

SEQ ID NO: 903944 - RNA, 19 nt, Artificial Sequence
  Description of Artificial Sequence: Synthetic oligonucleotide
cugcgggcagauggaggcu

SEQ ID NO: 903945 - RNA, 19 nt, Artificial Sequence
  Description of Artificial Sequence: Synthetic oligonucleotide
ggcguuucaccugcaccuu

SEQ ID NO: 903946 - RNA, 19 nt, Artificial Sequence
  Description of Artificial Sequence: Synthetic oligonucleotide
cgggcauggucuucuugcu

SEQ ID NO: 903947 - RNA, 19 nt, Artificial Sequence
  Description of Artificial Sequence: Synthetic oligonucleotide
ccgcagccguucgcacucc

SEQ ID NO: 903948 - RNA, 19 nt, Artificial Sequence
  Description of Artificial Sequence: Synthetic oligonucleotide
cgggaagugaggcgguauu

SEQ ID NO: 903949 - RNA, 19 nt, Artificial Sequence
  Description of Artificial Sequence: Synthetic oligonucleotide
cugcaccuucuggucccau

SEQ ID NO: 903950 - RNA, 19 nt, Artificial Sequence
  Description of Artificial Sequence: Synthetic oligonucleotide
gcgugucggcucucugcuu

SEQ ID NO: 903951 - RNA, 19 nt, Artificial Sequence
  Description of Artificial Sequence: Synthetic oligonucleotide
ccgggaagugaggcgguau

SEQ ID NO: 903952 - RNA, 19 nt, Artificial Sequence
  Description of Artificial Sequence: Synthetic oligonucleotide
cccgagcacugcuggugau

SEQ ID NO: 903953 - RNA, 19 nt, Artificial Sequence
  Description of Artificial Sequence: Synthetic oligonucleotide
gcaacccguuggucuccuu

SEQ ID NO: 903954 - RNA, 19 nt, Artificial Sequence
  Description of Artificial Sequence: Synthetic oligonucleotide
cgcauaccgucucgcuccu

SEQ ID NO: 903955 - RNA, 19 nt, Artificial Sequence
  Description of Artificial Sequence: Synthetic oligonucleotide
cgacuccgcucacccucca

SEQ ID NO: 903956 - RNA, 19 nt, Artificial Sequence
  Description of Artificial Sequence: Synthetic oligonucleotide
cccugcaaccgggcauggu

SEQ ID NO: 903957 - RNA, 19 nt, Artificial Sequence
  Description of Artificial Sequence: Synthetic oligonucleotide
gcauaccgucucgcuccuu

SEQ ID NO: 903958 - RNA, 19 nt, Artificial Sequence
  Description of Artificial Sequence: Synthetic oligonucleotide
cggcuguaacuagcucgau

SEQ ID NO: 903959 - RNA, 19 nt, Artificial Sequence
  Description of Artificial Sequence: Synthetic oligonucleotide
aguagaaacauaaauaggg

SEQ ID NO: 903960 - RNA, 19 nt, Artificial Sequence
  Description of Artificial Sequence: Synthetic oligonucleotide
uagauuugcauaaaggggc

SEQ ID NO: 903961 - RNA, 19 nt, Artificial Sequence
  Description of Artificial Sequence: Synthetic oligonucleotide
ucguagauuugcauaaagg

SEQ ID NO: 903962 - RNA, 19 nt, Artificial Sequence
  Description of Artificial Sequence: Synthetic oligonucleotide
uuaggguagaggaacugcg

SEQ ID NO: 903963 - RNA, 19 nt, Artificial Sequence
  Description of Artificial Sequence: Synthetic oligonucleotide
acauaaauagggcggaauc

SEQ ID NO: 903964 - RNA, 19 nt, Artificial Sequence
  Description of Artificial Sequence: Synthetic oligonucleotide
cucguagcaaaacaaaacc

SEQ ID NO: 903965 - RNA, 19 nt, Artificial Sequence
  Description of Artificial Sequence: Synthetic oligonucleotide
guagauuugcauaaagggg

SEQ ID NO: 903966 - RNA, 19 nt, Artificial Sequence
  Description of Artificial Sequence: Synthetic oligonucleotide
uggguugacgucauggagg

SEQ ID NO: 903967 - RNA, 19 nt, Artificial Sequence
  Description of Artificial Sequence: Synthetic oligonucleotide
aaccaaggauuacggaacc

SEQ ID NO: 903968 - RNA, 19 nt, Artificial Sequence
  Description of Artificial Sequence: Synthetic oligonucleotide
acccuuauagccucggccc

SEQ ID NO: 903969 - RNA, 19 nt, Artificial Sequence
  Description of Artificial Sequence: Synthetic oligonucleotide
uucucggcggcacaaaggg

SEQ ID NO: 903970 - RNA, 19 nt, Artificial Sequence
  Description of Artificial Sequence: Synthetic oligonucleotide
ugcguguccaugucgaugg

SEQ ID NO: 903971 - RNA, 19 nt, Artificial Sequence
  Description of Artificial Sequence: Synthetic oligonucleotide
guaacgaagacuuuacuga

SEQ ID NO: 903972 - RNA, 19 nt, Artificial Sequence
  Description of Artificial Sequence: Synthetic oligonucleotide
auaaauagggcggaaucgg

SEQ ID NO: 903973 - RNA, 19 nt, Artificial Sequence
  Description of Artificial Sequence: Synthetic oligonucleotide
agagggauagugucgagag

SEQ ID NO: 903974 - RNA, 19 nt, Artificial Sequence
  Description of Artificial Sequence: Synthetic oligonucleotide
agggauagugucgagaggg

SEQ ID NO: 903975 - RNA, 19 nt, Artificial Sequence
  Description of Artificial Sequence: Synthetic oligonucleotide
ugcggcucguccuugagcg

SEQ ID NO: 903976 - RNA, 19 nt, Artificial Sequence
  Description of Artificial Sequence: Synthetic oligonucleotide
ucguagcaaaacaaaacca

SEQ ID NO: 903977 - RNA, 19 nt, Artificial Sequence
  Description of Artificial Sequence: Synthetic oligonucleotide
cauaaauagggcggaaucg

SEQ ID NO: 903978 - RNA, 19 nt, Artificial Sequence
  Description of Artificial Sequence: Synthetic oligonucleotide
gauagugucgagagggagg

SEQ ID NO: 903979 - RNA, 19 nt, Artificial Sequence
  Description of Artificial Sequence: Synthetic oligonucleotide
aaaacgggcgaaccaagga

SEQ ID NO: 903980 - RNA, 19 nt, Artificial Sequence
  Description of Artificial Sequence: Synthetic oligonucleotide
aaauagggcggaaucggac

SEQ ID NO: 903981 - RNA, 19 nt, Artificial Sequence
  Description of Artificial Sequence: Synthetic oligonucleotide
ugcauaaaggggcgggccg

SEQ ID NO: 903982 - RNA, 19 nt, Artificial Sequence
  Description of Artificial Sequence: Synthetic oligonucleotide
uucccgaguagaaacauaa

SEQ ID NO: 903983 - RNA, 19 nt, Artificial Sequence
  Description of Artificial Sequence: Synthetic oligonucleotide
cguagauuugcauaaaggg

SEQ ID NO: 903984 - RNA, 19 nt, Artificial Sequence
  Description of Artificial Sequence: Synthetic oligonucleotide
acucguagcaaaacaaaac

SEQ ID NO: 903985 - RNA, 19 nt, Artificial Sequence
  Description of Artificial Sequence: Synthetic oligonucleotide
gaagagagggauagugucg

SEQ ID NO: 903986 - RNA, 19 nt, Artificial Sequence
  Description of Artificial Sequence: Synthetic oligonucleotide
auagugucgagagggaggg

SEQ ID NO: 903987 - RNA, 19 nt, Artificial Sequence
  Description of Artificial Sequence: Synthetic oligonucleotide
caaggauuacggaaccagg

SEQ ID NO: 903988 - RNA, 19 nt, Artificial Sequence
  Description of Artificial Sequence: Synthetic oligonucleotide
agcgaguccgcgcaugcgc

SEQ ID NO: 903989 - RNA, 19 nt, Artificial Sequence
  Description of Artificial Sequence: Synthetic oligonucleotide
aaacgggcgaaccaaggau

SEQ ID NO: 903990 - RNA, 19 nt, Artificial Sequence
  Description of Artificial Sequence: Synthetic oligonucleotide
uuaccagcccguuggauug

SEQ ID NO: 903991 - RNA, 19 nt, Artificial Sequence
  Description of Artificial Sequence: Synthetic oligonucleotide
auuugcauaaaggggcggg

SEQ ID NO: 903992 - RNA, 19 nt, Artificial Sequence
  Description of Artificial Sequence: Synthetic oligonucleotide
agcaguaccggcgacguuc

SEQ ID NO: 903993 - RNA, 19 nt, Artificial Sequence
  Description of Artificial Sequence: Synthetic oligonucleotide
uggacucguagcaaaacaa

SEQ ID NO: 903994 - RNA, 19 nt, Artificial Sequence
  Description of Artificial Sequence: Synthetic oligonucleotide
agcauuguggguugacguc

SEQ ID NO: 903995 - RNA, 19 nt, Artificial Sequence
  Description of Artificial Sequence: Synthetic oligonucleotide
uaaauagggcggaaucgga

SEQ ID NO: 903996 - RNA, 19 nt, Artificial Sequence
  Description of Artificial Sequence: Synthetic oligonucleotide
gacgccagcaguccgucgg

SEQ ID NO: 903997 - RNA, 19 nt, Artificial Sequence
  Description of Artificial Sequence: Synthetic oligonucleotide
cucggcggcacaaaggggc

SEQ ID NO: 903998 - RNA, 19 nt, Artificial Sequence
  Description of Artificial Sequence: Synthetic oligonucleotide
cucgcuacaaggcacaaca

SEQ ID NO: 903999 - RNA, 19 nt, Artificial Sequence
  Description of Artificial Sequence: Synthetic oligonucleotide
aaucggacacucccguucu

SEQ ID NO: 904000 - RNA, 19 nt, Artificial Sequence
  Description of Artificial Sequence: Synthetic oligonucleotide
aaggugcaguggccgaccc

SEQ ID NO: 904001 - RNA, 19 nt, Artificial Sequence
  Description of Artificial Sequence: Synthetic oligonucleotide
aaggauuacggaaccagga

SEQ ID NO: 904002 - RNA, 19 nt, Artificial Sequence
  Description of Artificial Sequence: Synthetic oligonucleotide
acgaugagcucaccgcccc

SEQ ID NO: 904003 - RNA, 19 nt, Artificial Sequence
  Description of Artificial Sequence: Synthetic oligonucleotide
uaacgaagacuuuacugaa

SEQ ID NO: 904004 - RNA, 19 nt, Artificial Sequence
  Description of Artificial Sequence: Synthetic oligonucleotide
uccucgccguaaaagggcg

SEQ ID NO: 904005 - RNA, 19 nt, Artificial Sequence
  Description of Artificial Sequence: Synthetic oligonucleotide
gucguagauuugcauaaag

SEQ ID NO: 904006 - RNA, 19 nt, Artificial Sequence
  Description of Artificial Sequence: Synthetic oligonucleotide
guaccggcgacguucgacg

SEQ ID NO: 904007 - RNA, 19 nt, Artificial Sequence
  Description of Artificial Sequence: Synthetic oligonucleotide
aacauaaauagggcggaau

SEQ ID NO: 904008 - RNA, 19 nt, Artificial Sequence
  Description of Artificial Sequence: Synthetic oligonucleotide
acuggcuccgcggugaagg

SEQ ID NO: 904009 - RNA, 19 nt, Artificial Sequence
  Description of Artificial Sequence: Synthetic oligonucleotide
uacgcugccggccacucug

SEQ ID NO: 904010 - RNA, 19 nt, Artificial Sequence
  Description of Artificial Sequence: Synthetic oligonucleotide
ucgacgcacccgcagacag

SEQ ID NO: 904011 - RNA, 19 nt, Artificial Sequence
  Description of Artificial Sequence: Synthetic oligonucleotide
uugagcgcggccaggcgcg

SEQ ID NO: 904012 - RNA, 19 nt, Artificial Sequence
  Description of Artificial Sequence: Synthetic oligonucleotide
agauuugcauaaaggggcg

SEQ ID NO: 904013 - RNA, 19 nt, Artificial Sequence
  Description of Artificial Sequence: Synthetic oligonucleotide
cagagcgugaggcugcgcg

SEQ ID NO: 904014 - RNA, 19 nt, Artificial Sequence
  Description of Artificial Sequence: Synthetic oligonucleotide
aagucaggcucaguacgcg

SEQ ID NO: 904015 - RNA, 19 nt, Artificial Sequence
  Description of Artificial Sequence: Synthetic oligonucleotide
gacgucauggagguggggc

SEQ ID NO: 904016 - RNA, 19 nt, Artificial Sequence
  Description of Artificial Sequence: Synthetic oligonucleotide
aacagcgcgcagcauugug

SEQ ID NO: 904017 - RNA, 19 nt, Artificial Sequence
  Description of Artificial Sequence: Synthetic oligonucleotide
cacccuuauagccucggcc

SEQ ID NO: 904018 - RNA, 19 nt, Artificial Sequence
  Description of Artificial Sequence: Synthetic oligonucleotide
agcccguuggauuggauga

SEQ ID NO: 904019 - RNA, 19 nt, Artificial Sequence
  Description of Artificial Sequence: Synthetic oligonucleotide
acgcaaccaacguuuguuc

SEQ ID NO: 904020 - RNA, 19 nt, Artificial Sequence
  Description of Artificial Sequence: Synthetic oligonucleotide
cuucucggcggcacaaagg

SEQ ID NO: 904021 - RNA, 19 nt, Artificial Sequence
  Description of Artificial Sequence: Synthetic oligonucleotide
uuguucccgaguagaaaca

SEQ ID NO: 904022 - RNA, 19 nt, Artificial Sequence
  Description of Artificial Sequence: Synthetic oligonucleotide
uuugcauaaaggggcgggc

SEQ ID NO: 904023 - RNA, 19 nt, Artificial Sequence
  Description of Artificial Sequence: Synthetic oligonucleotide
acgucguagauuugcauaa

SEQ ID NO: 904024 - RNA, 19 nt, Artificial Sequence
  Description of Artificial Sequence: Synthetic oligonucleotide
gauuugcauaaaggggcgg

SEQ ID NO: 904025 - RNA, 19 nt, Artificial Sequence
  Description of Artificial Sequence: Synthetic oligonucleotide
uccugcguguccaugucga

SEQ ID NO: 904026 - RNA, 19 nt, Artificial Sequence
  Description of Artificial Sequence: Synthetic oligonucleotide
aguaccggcgacguucgac

SEQ ID NO: 904027 - RNA, 19 nt, Artificial Sequence
  Description of Artificial Sequence: Synthetic oligonucleotide
cacgcaacacgcaaccaac

SEQ ID NO: 904028 - RNA, 19 nt, Artificial Sequence
  Description of Artificial Sequence: Synthetic oligonucleotide
cucgcgcgcacccuuauag

SEQ ID NO: 904029 - RNA, 19 nt, Artificial Sequence
  Description of Artificial Sequence: Synthetic oligonucleotide
gaaacagagguggcgcgag

SEQ ID NO: 904030 - RNA, 19 nt, Artificial Sequence
  Description of Artificial Sequence: Synthetic oligonucleotide
gacgucguagauuugcaua

SEQ ID NO: 904031 - RNA, 19 nt, Artificial Sequence
  Description of Artificial Sequence: Synthetic oligonucleotide
aggcacaacagcgcgcagc

SEQ ID NO: 904032 - RNA, 19 nt, Artificial Sequence
  Description of Artificial Sequence: Synthetic oligonucleotide
cuccucgccguaaaagggc

SEQ ID NO: 904033 - RNA, 19 nt, Artificial Sequence
  Description of Artificial Sequence: Synthetic oligonucleotide
aagggcguuuccauccccg

SEQ ID NO: 904034 - RNA, 19 nt, Artificial Sequence
  Description of Artificial Sequence: Synthetic oligonucleotide
caggaauguggacucguag

SEQ ID NO: 904035 - RNA, 19 nt, Artificial Sequence
  Description of Artificial Sequence: Synthetic oligonucleotide
cugaacgcggccuggccgg

SEQ ID NO: 904036 - RNA, 19 nt, Artificial Sequence
  Description of Artificial Sequence: Synthetic oligonucleotide
uguagguccuccagcgccu

SEQ ID NO: 904037 - RNA, 19 nt, Artificial Sequence
  Description of Artificial Sequence: Synthetic oligonucleotide
cuugagcgcggccaggcgc

SEQ ID NO: 904038 - RNA, 19 nt, Artificial Sequence
  Description of Artificial Sequence: Synthetic oligonucleotide
uugcauaaaggggcgggcc

SEQ ID NO: 904039 - RNA, 19 nt, Artificial Sequence
  Description of Artificial Sequence: Synthetic oligonucleotide
gucgccgaagcucgggacg

SEQ ID NO: 904040 - RNA, 19 nt, Artificial Sequence
  Description of Artificial Sequence: Synthetic oligonucleotide
cguaacgaagacuuuacug

SEQ ID NO: 904041 - RNA, 19 nt, Artificial Sequence
  Description of Artificial Sequence: Synthetic oligonucleotide
ucucggcggcacaaagggg

SEQ ID NO: 904042 - RNA, 19 nt, Artificial Sequence
  Description of Artificial Sequence: Synthetic oligonucleotide
acacgcaacacgcaaccaa

SEQ ID NO: 904043 - RNA, 19 nt, Artificial Sequence
  Description of Artificial Sequence: Synthetic oligonucleotide
ucgcuacaaggcacaacag

SEQ ID NO: 904044 - RNA, 19 nt, Artificial Sequence
  Description of Artificial Sequence: Synthetic oligonucleotide
caccuuaggguagaggaac

SEQ ID NO: 904045 - RNA, 19 nt, Artificial Sequence
  Description of Artificial Sequence: Synthetic oligonucleotide
caaaggggcugccacgcgc

SEQ ID NO: 904046 - RNA, 19 nt, Artificial Sequence
  Description of Artificial Sequence: Synthetic oligonucleotide
ggcggaaucggacacuccc

SEQ ID NO: 904047 - RNA, 19 nt, Artificial Sequence
  Description of Artificial Sequence: Synthetic oligonucleotide
gacgcacccgcagacaggc

SEQ ID NO: 904048 - RNA, 19 nt, Artificial Sequence
  Description of Artificial Sequence: Synthetic oligonucleotide
ucaauccugccgcucccug

SEQ ID NO: 904049 - RNA, 19 nt, Artificial Sequence
  Description of Artificial Sequence: Synthetic oligonucleotide
gcuugcggcacuuggaggc

SEQ ID NO: 904050 - RNA, 19 nt, Artificial Sequence
  Description of Artificial Sequence: Synthetic oligonucleotide
aggcucaguacgcggggac

SEQ ID NO: 904051 - RNA, 19 nt, Artificial Sequence
  Description of Artificial Sequence: Synthetic oligonucleotide
uccccacccggagugaagg

SEQ ID NO: 904052 - RNA, 19 nt, Artificial Sequence
  Description of Artificial Sequence: Synthetic oligonucleotide
guacgcggggaccuggugc

SEQ ID NO: 904053 - RNA, 19 nt, Artificial Sequence
  Description of Artificial Sequence: Synthetic oligonucleotide
ggcgacgcucgcuacaagg

SEQ ID NO: 904054 - RNA, 19 nt, Artificial Sequence
  Description of Artificial Sequence: Synthetic oligonucleotide
ucgguguuuuggcuuuuga

SEQ ID NO: 904055 - RNA, 19 nt, Artificial Sequence
  Description of Artificial Sequence: Synthetic oligonucleotide
ggugacgucguagauuugc

SEQ ID NO: 904056 - RNA, 19 nt, Artificial Sequence
  Description of Artificial Sequence: Synthetic oligonucleotide
gacgcgagcuuuagcagcc

SEQ ID NO: 904057 - RNA, 19 nt, Artificial Sequence
  Description of Artificial Sequence: Synthetic oligonucleotide
cagcuugucgaguccgggg

SEQ ID NO: 904058 - RNA, 19 nt, Artificial Sequence
  Description of Artificial Sequence: Synthetic oligonucleotide
uuacggaaccaggaaugug

SEQ ID NO: 904059 - RNA, 19 nt, Artificial Sequence
  Description of Artificial Sequence: Synthetic oligonucleotide
uguggacucguagcaaaac

SEQ ID NO: 904060 - RNA, 19 nt, Artificial Sequence
  Description of Artificial Sequence: Synthetic oligonucleotide
cacacacgcaacacgcaac

SEQ ID NO: 904061 - RNA, 19 nt, Artificial Sequence
  Description of Artificial Sequence: Synthetic oligonucleotide
gacagcggagggcugucgc

SEQ ID NO: 904062 - RNA, 19 nt, Artificial Sequence
  Description of Artificial Sequence: Synthetic oligonucleotide
gggaguggcugccaggucc

SEQ ID NO: 904063 - RNA, 19 nt, Artificial Sequence
  Description of Artificial Sequence: Synthetic oligonucleotide
ucaguacgcggggaccugg

SEQ ID NO: 904064 - RNA, 19 nt, Artificial Sequence
  Description of Artificial Sequence: Synthetic oligonucleotide
acaaaacgggcgaaccaag

SEQ ID NO: 904065 - RNA, 19 nt, Artificial Sequence
  Description of Artificial Sequence: Synthetic oligonucleotide
gaugggcgacagcggaggg

SEQ ID NO: 904066 - RNA, 19 nt, Artificial Sequence
  Description of Artificial Sequence: Synthetic oligonucleotide
acaaaggggcugccacgcg

SEQ ID NO: 904067 - RNA, 19 nt, Artificial Sequence
  Description of Artificial Sequence: Synthetic oligonucleotide
guugacguggcugaggacu

SEQ ID NO: 904068 - RNA, 19 nt, Artificial Sequence
  Description of Artificial Sequence: Synthetic oligonucleotide
gcuucaauccugccgcucc

SEQ ID NO: 904069 - RNA, 19 nt, Artificial Sequence
  Description of Artificial Sequence: Synthetic oligonucleotide
aacgaagacuuuacugaaa

SEQ ID NO: 904070 - RNA, 19 nt, Artificial Sequence
  Description of Artificial Sequence: Synthetic oligonucleotide
cuucaauccugccgcuccc

SEQ ID NO: 904071 - RNA, 19 nt, Artificial Sequence
  Description of Artificial Sequence: Synthetic oligonucleotide
cagcccguuggauuggaug

SEQ ID NO: 904072 - RNA, 19 nt, Artificial Sequence
  Description of Artificial Sequence: Synthetic oligonucleotide
acgucauggagguggggcu

SEQ ID NO: 904073 - RNA, 19 nt, Artificial Sequence
  Description of Artificial Sequence: Synthetic oligonucleotide
agggcguuuccauccccgg

SEQ ID NO: 904074 - RNA, 19 nt, Artificial Sequence
  Description of Artificial Sequence: Synthetic oligonucleotide
acguuuguucccgaguaga

SEQ ID NO: 904075 - RNA, 19 nt, Artificial Sequence
  Description of Artificial Sequence: Synthetic oligonucleotide
gucagcgcgucuuucuuca

SEQ ID NO: 904076 - RNA, 19 nt, Artificial Sequence
  Description of Artificial Sequence: Synthetic oligonucleotide
ucggaguggugguuaccag

SEQ ID NO: 904077 - RNA, 19 nt, Artificial Sequence
  Description of Artificial Sequence: Synthetic oligonucleotide
ggcguuuccauccccggcc

SEQ ID NO: 904078 - RNA, 19 nt, Artificial Sequence
  Description of Artificial Sequence: Synthetic oligonucleotide
aacacgcaaccaacguuug

SEQ ID NO: 904079 - RNA, 19 nt, Artificial Sequence
  Description of Artificial Sequence: Synthetic oligonucleotide
ggcgaaccaaggauuacgg

SEQ ID NO: 904080 - RNA, 19 nt, Artificial Sequence
  Description of Artificial Sequence: Synthetic oligonucleotide
ugcgcuccgccuugaugcg

SEQ ID NO: 904081 - RNA, 19 nt, Artificial Sequence
  Description of Artificial Sequence: Synthetic oligonucleotide
uggcguaacgaagacuuua

SEQ ID NO: 904082 - RNA, 19 nt, Artificial Sequence
  Description of Artificial Sequence: Synthetic oligonucleotide
ugacgucguagauuugcau

SEQ ID NO: 904083 - RNA, 19 nt, Artificial Sequence
  Description of Artificial Sequence: Synthetic oligonucleotide
gcugaacgcggccuggccg

SEQ ID NO: 904084 - RNA, 19 nt, Artificial Sequence
  Description of Artificial Sequence: Synthetic oligonucleotide
agcucgggacguccggcac

SEQ ID NO: 904085 - RNA, 19 nt, Artificial Sequence
  Description of Artificial Sequence: Synthetic oligonucleotide
gggaaacagagguggcgcg

SEQ ID NO: 904086 - RNA, 19 nt, Artificial Sequence
  Description of Artificial Sequence: Synthetic oligonucleotide
aacgggcgaaccaaggauu

SEQ ID NO: 904087 - RNA, 19 nt, Artificial Sequence
  Description of Artificial Sequence: Synthetic oligonucleotide
auuggcccgaggugacguc

SEQ ID NO: 904088 - RNA, 19 nt, Artificial Sequence
  Description of Artificial Sequence: Synthetic oligonucleotide
cagcaguccgucgggagcg

SEQ ID NO: 904089 - RNA, 19 nt, Artificial Sequence
  Description of Artificial Sequence: Synthetic oligonucleotide
ucccgaguagaaacauaaa

SEQ ID NO: 904090 - RNA, 19 nt, Artificial Sequence
  Description of Artificial Sequence: Synthetic oligonucleotide
acguucgacgcacccgcag

SEQ ID NO: 904091 - RNA, 19 nt, Artificial Sequence
  Description of Artificial Sequence: Synthetic oligonucleotide
agcgugaggcugcgcgccc

SEQ ID NO: 904092 - RNA, 19 nt, Artificial Sequence
  Description of Artificial Sequence: Synthetic oligonucleotide
augcgccccgaagucaggc

SEQ ID NO: 904093 - RNA, 19 nt, Artificial Sequence
  Description of Artificial Sequence: Synthetic oligonucleotide
ccaaggauuacggaaccag

SEQ ID NO: 904094 - RNA, 19 nt, Artificial Sequence
  Description of Artificial Sequence: Synthetic oligonucleotide
gggcgaaccaaggauuacg

SEQ ID NO: 904095 - RNA, 19 nt, Artificial Sequence
  Description of Artificial Sequence: Synthetic oligonucleotide
ccgaguagaaacauaaaua

SEQ ID NO: 904096 - RNA, 19 nt, Artificial Sequence
  Description of Artificial Sequence: Synthetic oligonucleotide
cccacgaugagcucaccgc

SEQ ID NO: 904097 - RNA, 19 nt, Artificial Sequence
  Description of Artificial Sequence: Synthetic oligonucleotide
uugacguggcugaggacuu

SEQ ID NO: 904098 - RNA, 19 nt, Artificial Sequence
  Description of Artificial Sequence: Synthetic oligonucleotide
uucuucccguuucucuaaa

SEQ ID NO: 904099 - RNA, 19 nt, Artificial Sequence
  Description of Artificial Sequence: Synthetic oligonucleotide
ugucgccgaagcucgggac

SEQ ID NO: 904100 - RNA, 19 nt, Artificial Sequence
  Description of Artificial Sequence: Synthetic oligonucleotide
cauaaaggggcgggccggg

SEQ ID NO: 904101 - RNA, 19 nt, Artificial Sequence
  Description of Artificial Sequence: Synthetic oligonucleotide
ucggacacucccguucucu

SEQ ID NO: 904102 - RNA, 19 nt, Artificial Sequence
  Description of Artificial Sequence: Synthetic oligonucleotide
ucgagcucuggcgacgcga

SEQ ID NO: 904103 - RNA, 19 nt, Artificial Sequence
  Description of Artificial Sequence: Synthetic oligonucleotide
aagguccggcgacgccagc

SEQ ID NO: 904104 - RNA, 19 nt, Artificial Sequence
  Description of Artificial Sequence: Synthetic oligonucleotide
ucuucccguuucucuaaaa

SEQ ID NO: 904105 - RNA, 19 nt, Artificial Sequence
  Description of Artificial Sequence: Synthetic oligonucleotide
acgcaacacgcaaccaacg

SEQ ID NO: 904106 - RNA, 19 nt, Artificial Sequence
  Description of Artificial Sequence: Synthetic oligonucleotide
guucgacgcacccgcagac

SEQ ID NO: 904107 - RNA, 19 nt, Artificial Sequence
  Description of Artificial Sequence: Synthetic oligonucleotide
ucggcgaacuccugcuccu

SEQ ID NO: 904108 - RNA, 19 nt, Artificial Sequence
  Description of Artificial Sequence: Synthetic oligonucleotide
ggauagugucgagagggag

SEQ ID NO: 904109 - RNA, 19 nt, Artificial Sequence
  Description of Artificial Sequence: Synthetic oligonucleotide
cacaaaacgggcgaaccaa

SEQ ID NO: 904110 - RNA, 19 nt, Artificial Sequence
  Description of Artificial Sequence: Synthetic oligonucleotide
acuuuacugaaaacacaaa

SEQ ID NO: 904111 - RNA, 19 nt, Artificial Sequence
  Description of Artificial Sequence: Synthetic oligonucleotide
caagguccggcgacgccag

SEQ ID NO: 904112 - RNA, 19 nt, Artificial Sequence
  Description of Artificial Sequence: Synthetic oligonucleotide
ucgcgcgcacccuuauagc

SEQ ID NO: 904113 - RNA, 19 nt, Artificial Sequence
  Description of Artificial Sequence: Synthetic oligonucleotide
cagcgcgucuuucuucagc

SEQ ID NO: 904114 - RNA, 19 nt, Artificial Sequence
  Description of Artificial Sequence: Synthetic oligonucleotide
ugguuaccagcccguugga

SEQ ID NO: 904115 - RNA, 19 nt, Artificial Sequence
  Description of Artificial Sequence: Synthetic oligonucleotide
agcgcggaaggugcagugg

SEQ ID NO: 904116 - RNA, 19 nt, Artificial Sequence
  Description of Artificial Sequence: Synthetic oligonucleotide
acacgcaaccaacguuugu

SEQ ID NO: 904117 - RNA, 19 nt, Artificial Sequence
  Description of Artificial Sequence: Synthetic oligonucleotide
caguccgucgggagcgccg

SEQ ID NO: 904118 - RNA, 19 nt, Artificial Sequence
  Description of Artificial Sequence: Synthetic oligonucleotide
aguacgcggggaccuggug

SEQ ID NO: 904119 - RNA, 19 nt, Artificial Sequence
  Description of Artificial Sequence: Synthetic oligonucleotide
guuaccagcccguuggauu

SEQ ID NO: 904120 - RNA, 19 nt, Artificial Sequence
  Description of Artificial Sequence: Synthetic oligonucleotide
gacgcccucgcucccuggc

SEQ ID NO: 904121 - RNA, 19 nt, Artificial Sequence
  Description of Artificial Sequence: Synthetic oligonucleotide
uguugacguggcugaggac

SEQ ID NO: 904122 - RNA, 19 nt, Artificial Sequence
  Description of Artificial Sequence: Synthetic oligonucleotide
gaauguggacucguagcaa

SEQ ID NO: 904123 - RNA, 19 nt, Artificial Sequence
  Description of Artificial Sequence: Synthetic oligonucleotide
acguccggcacggucugcg

SEQ ID NO: 904124 - RNA, 19 nt, Artificial Sequence
  Description of Artificial Sequence: Synthetic oligonucleotide
caacacgcaaccaacguuu

SEQ ID NO: 904125 - RNA, 19 nt, Artificial Sequence
  Description of Artificial Sequence: Synthetic oligonucleotide
ugcuggucggagugguggu

SEQ ID NO: 904126 - RNA, 19 nt, Artificial Sequence
  Description of Artificial Sequence: Synthetic oligonucleotide
cucgggacguccggcacgg

SEQ ID NO: 904127 - RNA, 19 nt, Artificial Sequence
  Description of Artificial Sequence: Synthetic oligonucleotide
cucugccccgcgacgcucg

SEQ ID NO: 904128 - RNA, 19 nt, Artificial Sequence
  Description of Artificial Sequence: Synthetic oligonucleotide
cucucgagcucuggcgacg

SEQ ID NO: 904129 - RNA, 19 nt, Artificial Sequence
  Description of Artificial Sequence: Synthetic oligonucleotide
aucggacacucccguucuc

SEQ ID NO: 904130 - RNA, 19 nt, Artificial Sequence
  Description of Artificial Sequence: Synthetic oligonucleotide
ucagcgcgucuuucuucag

SEQ ID NO: 904131 - RNA, 19 nt, Artificial Sequence
  Description of Artificial Sequence: Synthetic oligonucleotide
ggugguuaccagcccguug

SEQ ID NO: 904132 - RNA, 19 nt, Artificial Sequence
  Description of Artificial Sequence: Synthetic oligonucleotide
ucuggcgacgcgagcuuua

SEQ ID NO: 904133 - RNA, 19 nt, Artificial Sequence
  Description of Artificial Sequence: Synthetic oligonucleotide
ugagcgucagcgcgucuuu

SEQ ID NO: 904134 - RNA, 19 nt, Artificial Sequence
  Description of Artificial Sequence: Synthetic oligonucleotide
uaccggcgacguucgacgc

SEQ ID NO: 904135 - RNA, 19 nt, Artificial Sequence
  Description of Artificial Sequence: Synthetic oligonucleotide
ccgggcuucaauccugccg

SEQ ID NO: 904136 - RNA, 19 nt, Artificial Sequence
  Description of Artificial Sequence: Synthetic oligonucleotide
gcauaaaggggcgggccgg

SEQ ID NO: 904137 - RNA, 19 nt, Artificial Sequence
  Description of Artificial Sequence: Synthetic oligonucleotide
cugcguguccaugucgaug

SEQ ID NO: 904138 - RNA, 19 nt, Artificial Sequence
  Description of Artificial Sequence: Synthetic oligonucleotide
gguggaugccagcucggug

SEQ ID NO: 904139 - RNA, 19 nt, Artificial Sequence
  Description of Artificial Sequence: Synthetic oligonucleotide
ugaugcguuccugcguguc

SEQ ID NO: 904140 - RNA, 19 nt, Artificial Sequence
  Description of Artificial Sequence: Synthetic oligonucleotide
uugaugcguuccugcgugu

SEQ ID NO: 904141 - RNA, 19 nt, Artificial Sequence
  Description of Artificial Sequence: Synthetic oligonucleotide
ggcguaacgaagacuuuac

SEQ ID NO: 904142 - RNA, 19 nt, Artificial Sequence
  Description of Artificial Sequence: Synthetic oligonucleotide
uggucggaguggugguuac

SEQ ID NO: 904143 - RNA, 19 nt, Artificial Sequence
  Description of Artificial Sequence: Synthetic oligonucleotide
ugacgucauggaggugggg

SEQ ID NO: 904144 - RNA, 19 nt, Artificial Sequence
  Description of Artificial Sequence: Synthetic oligonucleotide
ugcgcucgggguccccacc

SEQ ID NO: 904145 - RNA, 19 nt, Artificial Sequence
  Description of Artificial Sequence: Synthetic oligonucleotide
uucgacgcacccgcagaca

SEQ ID NO: 904146 - RNA, 19 nt, Artificial Sequence
  Description of Artificial Sequence: Synthetic oligonucleotide
accaaggauuacggaacca

SEQ ID NO: 904147 - RNA, 19 nt, Artificial Sequence
  Description of Artificial Sequence: Synthetic oligonucleotide
cagcauuguggguugacgu

SEQ ID NO: 904148 - RNA, 19 nt, Artificial Sequence
  Description of Artificial Sequence: Synthetic oligonucleotide
caugcgccccgaagucagg

SEQ ID NO: 904149 - RNA, 19 nt, Artificial Sequence
  Description of Artificial Sequence: Synthetic oligonucleotide
ugcgccccgaagucaggcu

SEQ ID NO: 904150 - RNA, 19 nt, Artificial Sequence
  Description of Artificial Sequence: Synthetic oligonucleotide
gugcugcccggcuacgcug

SEQ ID NO: 904151 - RNA, 19 nt, Artificial Sequence
  Description of Artificial Sequence: Synthetic oligonucleotide
ggauuacggaaccaggaau

SEQ ID NO: 904152 - RNA, 19 nt, Artificial Sequence
  Description of Artificial Sequence: Synthetic oligonucleotide
gcugcgcgccccuaggagc

SEQ ID NO: 904153 - RNA, 19 nt, Artificial Sequence
  Description of Artificial Sequence: Synthetic oligonucleotide
gacguggcugaggacuuuc

SEQ ID NO: 904154 - RNA, 19 nt, Artificial Sequence
  Description of Artificial Sequence: Synthetic oligonucleotide
agcccaagguccggcgacg

SEQ ID NO: 904155 - RNA, 19 nt, Artificial Sequence
  Description of Artificial Sequence: Synthetic oligonucleotide
ucgccgaagcucgggacgu

SEQ ID NO: 904156 - RNA, 19 nt, Artificial Sequence
  Description of Artificial Sequence: Synthetic oligonucleotide
gccguaaaagggcguuucc

SEQ ID NO: 904157 - RNA, 19 nt, Artificial Sequence
  Description of Artificial Sequence: Synthetic oligonucleotide
gcauuguggguugacguca

SEQ ID NO: 904158 - RNA, 19 nt, Artificial Sequence
  Description of Artificial Sequence: Synthetic oligonucleotide
gugacgucguagauuugca

SEQ ID NO: 904159 - RNA, 19 nt, Artificial Sequence
  Description of Artificial Sequence: Synthetic oligonucleotide
gcgacgcgagcuuuagcag

SEQ ID NO: 904160 - RNA, 19 nt, Artificial Sequence
  Description of Artificial Sequence: Synthetic oligonucleotide
gcggaaucggacacucccg

SEQ ID NO: 904161 - RNA, 19 nt, Artificial Sequence
  Description of Artificial Sequence: Synthetic oligonucleotide
cagcgcggaaggugcagug

SEQ ID NO: 904162 - RNA, 19 nt, Artificial Sequence
  Description of Artificial Sequence: Synthetic oligonucleotide
accggcgacguucgacgca

SEQ ID NO: 904163 - RNA, 19 nt, Artificial Sequence
  Description of Artificial Sequence: Synthetic oligonucleotide
agcaguccgucgggagcgc

SEQ ID NO: 904164 - RNA, 19 nt, Artificial Sequence
  Description of Artificial Sequence: Synthetic oligonucleotide
gcgcggaaggugcaguggc

SEQ ID NO: 904165 - RNA, 19 nt, Artificial Sequence
  Description of Artificial Sequence: Synthetic oligonucleotide
ccgacccgggcuucaaucc

SEQ ID NO: 904166 - RNA, 19 nt, Artificial Sequence
  Description of Artificial Sequence: Synthetic oligonucleotide
ggacucguagcaaaacaaa

SEQ ID NO: 904167 - RNA, 19 nt, Artificial Sequence
  Description of Artificial Sequence: Synthetic oligonucleotide
uggcuccgcggugaaggcc

SEQ ID NO: 904168 - RNA, 19 nt, Artificial Sequence
  Description of Artificial Sequence: Synthetic oligonucleotide
cgacguucgacgcacccgc

SEQ ID NO: 904169 - RNA, 19 nt, Artificial Sequence
  Description of Artificial Sequence: Synthetic oligonucleotide
gcucgggacguccggcacg

SEQ ID NO: 904170 - RNA, 19 nt, Artificial Sequence
  Description of Artificial Sequence: Synthetic oligonucleotide
cuggcgacgcgagcuuuag

SEQ ID NO: 904171 - RNA, 19 nt, Artificial Sequence
  Description of Artificial Sequence: Synthetic oligonucleotide
ggcgacguucgacgcaccc

SEQ ID NO: 904172 - RNA, 19 nt, Artificial Sequence
  Description of Artificial Sequence: Synthetic oligonucleotide
ggcugcgcgccccuaggag

SEQ ID NO: 904173 - RNA, 19 nt, Artificial Sequence
  Description of Artificial Sequence: Synthetic oligonucleotide
gcgacguucgacgcacccg

SEQ ID NO: 904174 - RNA, 19 nt, Artificial Sequence
  Description of Artificial Sequence: Synthetic oligonucleotide
cuguugccaggggcgacgc

SEQ ID NO: 904175 - RNA, 19 nt, Artificial Sequence
  Description of Artificial Sequence: Synthetic oligonucleotide
cgacgcgagcuuuagcagc

SEQ ID NO: 904176 - RNA, 19 nt, Artificial Sequence
  Description of Artificial Sequence: Synthetic oligonucleotide
cccuuauagccucggcccc

SEQ ID NO: 904177 - RNA, 19 nt, Artificial Sequence
  Description of Artificial Sequence: Synthetic oligonucleotide
gccgggacgcccucgcucc

SEQ ID NO: 904178 - RNA, 19 nt, Artificial Sequence
  Description of Artificial Sequence: Synthetic oligonucleotide
gaugccagcucgguguuuu

SEQ ID NO: 904179 - RNA, 19 nt, Artificial Sequence
  Description of Artificial Sequence: Synthetic oligonucleotide
cucgagcucuggcgacgcg

SEQ ID NO: 904180 - RNA, 19 nt, Artificial Sequence
  Description of Artificial Sequence: Synthetic oligonucleotide
cagcgccuugacgaagccc

SEQ ID NO: 904181 - RNA, 19 nt, Artificial Sequence
  Description of Artificial Sequence: Synthetic oligonucleotide
cgcgcgcacccuuauagcc

SEQ ID NO: 904182 - RNA, 19 nt, Artificial Sequence
  Description of Artificial Sequence: Synthetic oligonucleotide
gggcgcgaagccaccaccg

SEQ ID NO: 904183 - RNA, 19 nt, Artificial Sequence
  Description of Artificial Sequence: Synthetic oligonucleotide
ggaaacagagguggcgcga

SEQ ID NO: 904184 - RNA, 19 nt, Artificial Sequence
  Description of Artificial Sequence: Synthetic oligonucleotide
gagccucggaggaguccgg

SEQ ID NO: 904185 - RNA, 19 nt, Artificial Sequence
  Description of Artificial Sequence: Synthetic oligonucleotide
aguccgucgggagcgccgu

SEQ ID NO: 904186 - RNA, 19 nt, Artificial Sequence
  Description of Artificial Sequence: Synthetic oligonucleotide
agcgcgcagcauugugggu

SEQ ID NO: 904187 - RNA, 19 nt, Artificial Sequence
  Description of Artificial Sequence: Synthetic oligonucleotide
acgcugccggccacucugc

SEQ ID NO: 904188 - RNA, 19 nt, Artificial Sequence
  Description of Artificial Sequence: Synthetic oligonucleotide
cugucgccgaagcucggga

SEQ ID NO: 904189 - RNA, 19 nt, Artificial Sequence
  Description of Artificial Sequence: Synthetic oligonucleotide
ggcggcacaaaggggcugc

SEQ ID NO: 904190 - RNA, 19 nt, Artificial Sequence
  Description of Artificial Sequence: Synthetic oligonucleotide
cucaguacgcggggaccug

SEQ ID NO: 904191 - RNA, 19 nt, Artificial Sequence
  Description of Artificial Sequence: Synthetic oligonucleotide
cccgaguagaaacauaaau

SEQ ID NO: 904192 - RNA, 19 nt, Artificial Sequence
  Description of Artificial Sequence: Synthetic oligonucleotide
ccguuggauuggaugauca

SEQ ID NO: 904193 - RNA, 19 nt, Artificial Sequence
  Description of Artificial Sequence: Synthetic oligonucleotide
aguggccgacccgggcuuc

SEQ ID NO: 904194 - RNA, 19 nt, Artificial Sequence
  Description of Artificial Sequence: Synthetic oligonucleotide
gcugucgccgaagcucggg

SEQ ID NO: 904195 - RNA, 19 nt, Artificial Sequence
  Description of Artificial Sequence: Synthetic oligonucleotide
ggccaggcgcgguggaugc

SEQ ID NO: 904196 - RNA, 19 nt, Artificial Sequence
  Description of Artificial Sequence: Synthetic oligonucleotide
cccgaagucaggcucagua

SEQ ID NO: 904197 - RNA, 19 nt, Artificial Sequence
  Description of Artificial Sequence: Synthetic oligonucleotide
ugcccgugcugcccggcua

SEQ ID NO: 904198 - RNA, 19 nt, Artificial Sequence
  Description of Artificial Sequence: Synthetic oligonucleotide
ggcgcgaagccaccaccgc

SEQ ID NO: 904199 - RNA, 19 nt, Artificial Sequence
  Description of Artificial Sequence: Synthetic oligonucleotide
cucggccgcuguugccagg

SEQ ID NO: 904200 - RNA, 19 nt, Artificial Sequence
  Description of Artificial Sequence: Synthetic oligonucleotide
gccgacccgggcuucaauc

SEQ ID NO: 904201 - RNA, 19 nt, Artificial Sequence
  Description of Artificial Sequence: Synthetic oligonucleotide
cacccgcgaagcugcucag

SEQ ID NO: 904202 - RNA, 19 nt, Artificial Sequence
  Description of Artificial Sequence: Synthetic oligonucleotide
acgcucgcuacaaggcaca

SEQ ID NO: 904203 - RNA, 19 nt, Artificial Sequence
  Description of Artificial Sequence: Synthetic oligonucleotide
ggcgccacccgcgaagcug

SEQ ID NO: 904204 - RNA, 19 nt, Artificial Sequence
  Description of Artificial Sequence: Synthetic oligonucleotide
cccacccggagugaagggg

SEQ ID NO: 904205 - RNA, 19 nt, Artificial Sequence
  Description of Artificial Sequence: Synthetic oligonucleotide
cacgcaaccaacguuuguu

SEQ ID NO: 904206 - RNA, 19 nt, Artificial Sequence
  Description of Artificial Sequence: Synthetic oligonucleotide
acgggcgaaccaaggauua

SEQ ID NO: 904207 - RNA, 19 nt, Artificial Sequence
  Description of Artificial Sequence: Synthetic oligonucleotide
ccagcuugucgaguccggg

SEQ ID NO: 904208 - RNA, 19 nt, Artificial Sequence
  Description of Artificial Sequence: Synthetic oligonucleotide
gcacccuuauagccucggc

SEQ ID NO: 904209 - RNA, 19 nt, Artificial Sequence
  Description of Artificial Sequence: Synthetic oligonucleotide
ggcuccgcggugaaggcca

SEQ ID NO: 904210 - RNA, 19 nt, Artificial Sequence
  Description of Artificial Sequence: Synthetic oligonucleotide
uagugucgagagggaggga

SEQ ID NO: 904211 - RNA, 19 nt, Artificial Sequence
  Description of Artificial Sequence: Synthetic oligonucleotide
cccgaucgccauuggcccg

SEQ ID NO: 904212 - RNA, 19 nt, Artificial Sequence
  Description of Artificial Sequence: Synthetic oligonucleotide
ucgccguaaaagggcguuu

SEQ ID NO: 904213 - RNA, 19 nt, Artificial Sequence
  Description of Artificial Sequence: Synthetic oligonucleotide
gggucucgcuggcuccggg

SEQ ID NO: 904214 - RNA, 19 nt, Artificial Sequence
  Description of Artificial Sequence: Synthetic oligonucleotide
cccgaggugacgucguaga

SEQ ID NO: 904215 - RNA, 19 nt, Artificial Sequence
  Description of Artificial Sequence: Synthetic oligonucleotide
caggggcgacgcucgcuac

SEQ ID NO: 904216 - RNA, 19 nt, Artificial Sequence
  Description of Artificial Sequence: Synthetic oligonucleotide
ggacguccggcacggucug

SEQ ID NO: 904217 - RNA, 19 nt, Artificial Sequence
  Description of Artificial Sequence: Synthetic oligonucleotide
ggccacucugccccgcgac

SEQ ID NO: 904218 - RNA, 19 nt, Artificial Sequence
  Description of Artificial Sequence: Synthetic oligonucleotide
gcaacacgcaaccaacguu

SEQ ID NO: 904219 - RNA, 19 nt, Artificial Sequence
  Description of Artificial Sequence: Synthetic oligonucleotide
cugcccggcuacgcugccg

SEQ ID NO: 904220 - RNA, 19 nt, Artificial Sequence
  Description of Artificial Sequence: Synthetic oligonucleotide
cacacgcaacacgcaacca

SEQ ID NO: 904221 - RNA, 19 nt, Artificial Sequence
  Description of Artificial Sequence: Synthetic oligonucleotide
gcgaguccgcgcaugcgcc

SEQ ID NO: 904222 - RNA, 19 nt, Artificial Sequence
  Description of Artificial Sequence: Synthetic oligonucleotide
cgcuugcggcacuuggagg

SEQ ID NO: 904223 - RNA, 19 nt, Artificial Sequence
  Description of Artificial Sequence: Synthetic oligonucleotide
gacguucgacgcacccgca

SEQ ID NO: 904224 - RNA, 19 nt, Artificial Sequence
  Description of Artificial Sequence: Synthetic oligonucleotide
agccgcuguugacguggcu

SEQ ID NO: 904225 - RNA, 19 nt, Artificial Sequence
  Description of Artificial Sequence: Synthetic oligonucleotide
cauuggcccgaggugacgu

SEQ ID NO: 904226 - RNA, 19 nt, Artificial Sequence
  Description of Artificial Sequence: Synthetic oligonucleotide
acgcacccgcagacaggcc

SEQ ID NO: 904227 - RNA, 19 nt, Artificial Sequence
  Description of Artificial Sequence: Synthetic oligonucleotide
ccucucgagcucuggcgac

SEQ ID NO: 904228 - RNA, 19 nt, Artificial Sequence
  Description of Artificial Sequence: Synthetic oligonucleotide
accagcccguuggauugga

SEQ ID NO: 904229 - RNA, 19 nt, Artificial Sequence
  Description of Artificial Sequence: Synthetic oligonucleotide
ggcucguccuugagcgcgg

SEQ ID NO: 904230 - RNA, 19 nt, Artificial Sequence
  Description of Artificial Sequence: Synthetic oligonucleotide
ggucggaguggugguuacc

SEQ ID NO: 904231 - RNA, 19 nt, Artificial Sequence
  Description of Artificial Sequence: Synthetic oligonucleotide
ugacguggcugaggacuuu

SEQ ID NO: 904232 - RNA, 19 nt, Artificial Sequence
  Description of Artificial Sequence: Synthetic oligonucleotide
gcgccccgaagucaggcuc

SEQ ID NO: 904233 - RNA, 19 nt, Artificial Sequence
  Description of Artificial Sequence: Synthetic oligonucleotide
gugcgcucgggguccccac

SEQ ID NO: 904234 - RNA, 19 nt, Artificial Sequence
  Description of Artificial Sequence: Synthetic oligonucleotide
gcgcucgggguccccaccc

SEQ ID NO: 904235 - RNA, 19 nt, Artificial Sequence
  Description of Artificial Sequence: Synthetic oligonucleotide
ccgcuguugacguggcuga

SEQ ID NO: 904236 - RNA, 19 nt, Artificial Sequence
  Description of Artificial Sequence: Synthetic oligonucleotide
gacguccggcacggucugc

SEQ ID NO: 904237 - RNA, 19 nt, Artificial Sequence
  Description of Artificial Sequence: Synthetic oligonucleotide
gcguaacgaagacuuuacu

SEQ ID NO: 904238 - RNA, 19 nt, Artificial Sequence
  Description of Artificial Sequence: Synthetic oligonucleotide
gcccgaggugacgucguag

SEQ ID NO: 904239 - RNA, 19 nt, Artificial Sequence
  Description of Artificial Sequence: Synthetic oligonucleotide
acccgcagacaggccgcuc

SEQ ID NO: 904240 - RNA, 19 nt, Artificial Sequence
  Description of Artificial Sequence: Synthetic oligonucleotide
gcgcaugcgccccgaaguc

SEQ ID NO: 904241 - RNA, 19 nt, Artificial Sequence
  Description of Artificial Sequence: Synthetic oligonucleotide
ggacgcccucgcucccugg

SEQ ID NO: 904242 - RNA, 19 nt, Artificial Sequence
  Description of Artificial Sequence: Synthetic oligonucleotide
gcgguggaugccagcucgg

SEQ ID NO: 904243 - RNA, 19 nt, Artificial Sequence
  Description of Artificial Sequence: Synthetic oligonucleotide
ccccacccggagugaaggg

SEQ ID NO: 904244 - RNA, 19 nt, Artificial Sequence
  Description of Artificial Sequence: Synthetic oligonucleotide
gggacguccggcacggucu

SEQ ID NO: 904245 - RNA, 19 nt, Artificial Sequence
  Description of Artificial Sequence: Synthetic oligonucleotide
ggcuucaauccugccgcuc

SEQ ID NO: 904246 - RNA, 19 nt, Artificial Sequence
  Description of Artificial Sequence: Synthetic oligonucleotide
ccauuggcccgaggugacg

SEQ ID NO: 904247 - RNA, 19 nt, Artificial Sequence
  Description of Artificial Sequence: Synthetic oligonucleotide
cccggcgccacccgcgaag

SEQ ID NO: 904248 - RNA, 19 nt, Artificial Sequence
  Description of Artificial Sequence: Synthetic oligonucleotide
gcucgcuacaaggcacaac

SEQ ID NO: 904249 - RNA, 19 nt, Artificial Sequence
  Description of Artificial Sequence: Synthetic oligonucleotide
gggacgcccucgcucccug

SEQ ID NO: 904250 - RNA, 19 nt, Artificial Sequence
  Description of Artificial Sequence: Synthetic oligonucleotide
gacgcucgcgcgcacccuu

SEQ ID NO: 904251 - RNA, 19 nt, Artificial Sequence
  Description of Artificial Sequence: Synthetic oligonucleotide
gaacugcgugcuggucgga

SEQ ID NO: 904252 - RNA, 19 nt, Artificial Sequence
  Description of Artificial Sequence: Synthetic oligonucleotide
cccaagguccggcgacgcc

SEQ ID NO: 904253 - RNA, 19 nt, Artificial Sequence
  Description of Artificial Sequence: Synthetic oligonucleotide
cgcgcagcauuguggguug

SEQ ID NO: 904254 - RNA, 19 nt, Artificial Sequence
  Description of Artificial Sequence: Synthetic oligonucleotide
cgacgcacccgcagacagg

SEQ ID NO: 904255 - RNA, 19 nt, Artificial Sequence
  Description of Artificial Sequence: Synthetic oligonucleotide
cgucagcgcgucuuucuuc

SEQ ID NO: 904256 - RNA, 19 nt, Artificial Sequence
  Description of Artificial Sequence: Synthetic oligonucleotide
gccccuaggagccccuucu

SEQ ID NO: 904257 - RNA, 19 nt, Artificial Sequence
  Description of Artificial Sequence: Synthetic oligonucleotide
gggccgugcgcucgggguc

SEQ ID NO: 904258 - RNA, 19 nt, Artificial Sequence
  Description of Artificial Sequence: Synthetic oligonucleotide
ggccgugcgcucggggucc

SEQ ID NO: 904259 - RNA, 19 nt, Artificial Sequence
  Description of Artificial Sequence: Synthetic oligonucleotide
gggcugaacgcggccuggc

SEQ ID NO: 904260 - RNA, 19 nt, Artificial Sequence
  Description of Artificial Sequence: Synthetic oligonucleotide
cugagcgucagcgcgucuu

SEQ ID NO: 904261 - RNA, 19 nt, Artificial Sequence
  Description of Artificial Sequence: Synthetic oligonucleotide
gggcgacgcucgcuacaag

SEQ ID NO: 904262 - RNA, 19 nt, Artificial Sequence
  Description of Artificial Sequence: Synthetic oligonucleotide
gcggcucguccuugagcgc

SEQ ID NO: 904263 - RNA, 19 nt, Artificial Sequence
  Description of Artificial Sequence: Synthetic oligonucleotide
gcgagcuuuagcagcccaa

SEQ ID NO: 904264 - RNA, 19 nt, Artificial Sequence
  Description of Artificial Sequence: Synthetic oligonucleotide
ggggucucgcuggcuccgg

SEQ ID NO: 904265 - RNA, 19 nt, Artificial Sequence
  Description of Artificial Sequence: Synthetic oligonucleotide
gcgagauacgcuccagcuu

SEQ ID NO: 904266 - RNA, 19 nt, Artificial Sequence
  Description of Artificial Sequence: Synthetic oligonucleotide
cgaguccgcgcaugcgccc

SEQ ID NO: 904267 - RNA, 19 nt, Artificial Sequence
  Description of Artificial Sequence: Synthetic oligonucleotide
cguucgacgcacccgcaga

SEQ ID NO: 904268 - RNA, 19 nt, Artificial Sequence
  Description of Artificial Sequence: Synthetic oligonucleotide
ccgcgcaugcgccccgaag

SEQ ID NO: 904269 - RNA, 19 nt, Artificial Sequence
  Description of Artificial Sequence: Synthetic oligonucleotide
cucgccguaaaagggcguu

SEQ ID NO: 904270 - RNA, 19 nt, Artificial Sequence
  Description of Artificial Sequence: Synthetic oligonucleotide
uggccgacccgggcuucaa

SEQ ID NO: 904271 - RNA, 19 nt, Artificial Sequence
  Description of Artificial Sequence: Synthetic oligonucleotide
ggggcgacgcucgcuacaa

SEQ ID NO: 904272 - RNA, 19 nt, Artificial Sequence
  Description of Artificial Sequence: Synthetic oligonucleotide
ggcugagcgucagcgcguc

SEQ ID NO: 904273 - RNA, 19 nt, Artificial Sequence
  Description of Artificial Sequence: Synthetic oligonucleotide
cgcgagauacgcuccagcu

SEQ ID NO: 904274 - RNA, 19 nt, Artificial Sequence
  Description of Artificial Sequence: Synthetic oligonucleotide
cgccguaaaagggcguuuc

SEQ ID NO: 904275 - RNA, 19 nt, Artificial Sequence
  Description of Artificial Sequence: Synthetic oligonucleotide
gcuacgcugccggccacuc

SEQ ID NO: 904276 - RNA, 19 nt, Artificial Sequence
  Description of Artificial Sequence: Synthetic oligonucleotide
caguacgcggggaccuggu

SEQ ID NO: 904277 - RNA, 19 nt, Artificial Sequence
  Description of Artificial Sequence: Synthetic oligonucleotide
ggccacgguggccgcgccc

SEQ ID NO: 904278 - RNA, 19 nt, Artificial Sequence
  Description of Artificial Sequence: Synthetic oligonucleotide
ggaaucggacacucccguu

SEQ ID NO: 904279 - RNA, 19 nt, Artificial Sequence
  Description of Artificial Sequence: Synthetic oligonucleotide
ccggcuacgcugccggcca

SEQ ID NO: 904280 - RNA, 19 nt, Artificial Sequence
  Description of Artificial Sequence: Synthetic oligonucleotide
gcguuccugcguguccaug

SEQ ID NO: 904281 - RNA, 19 nt, Artificial Sequence
  Description of Artificial Sequence: Synthetic oligonucleotide
gcaguccgucgggagcgcc

SEQ ID NO: 904282 - RNA, 19 nt, Artificial Sequence
  Description of Artificial Sequence: Synthetic oligonucleotide
gggcggaaucggacacucc

SEQ ID NO: 904283 - RNA, 19 nt, Artificial Sequence
  Description of Artificial Sequence: Synthetic oligonucleotide
cguccggcacggucugcgg

SEQ ID NO: 904284 - RNA, 19 nt, Artificial Sequence
  Description of Artificial Sequence: Synthetic oligonucleotide
acgcggggaccuggugcug

SEQ ID NO: 904285 - RNA, 19 nt, Artificial Sequence
  Description of Artificial Sequence: Synthetic oligonucleotide
guggccgacccgggcuuca

SEQ ID NO: 904286 - RNA, 19 nt, Artificial Sequence
  Description of Artificial Sequence: Synthetic oligonucleotide
cgggacguccggcacgguc

SEQ ID NO: 904287 - RNA, 19 nt, Artificial Sequence
  Description of Artificial Sequence: Synthetic oligonucleotide
ccgucggggcgcagcgcgg

SEQ ID NO: 904288 - RNA, 19 nt, Artificial Sequence
  Description of Artificial Sequence: Synthetic oligonucleotide
gcgcacccuuauagccucg

SEQ ID NO: 904289 - RNA, 19 nt, Artificial Sequence
  Description of Artificial Sequence: Synthetic oligonucleotide
cgcggggcuggggaaacag

SEQ ID NO: 904290 - RNA, 19 nt, Artificial Sequence
  Description of Artificial Sequence: Synthetic oligonucleotide
cacucugccccgcgacgcu

SEQ ID NO: 904291 - RNA, 19 nt, Artificial Sequence
  Description of Artificial Sequence: Synthetic oligonucleotide
gucggggcgcagcgcggaa

SEQ ID NO: 904292 - RNA, 19 nt, Artificial Sequence
  Description of Artificial Sequence: Synthetic oligonucleotide
gccaggcgcgguggaugcg

SEQ ID NO: 904293 - RNA, 19 nt, Artificial Sequence
  Description of Artificial Sequence: Synthetic oligonucleotide
gguuaccagcccguuggau

SEQ ID NO: 904294 - RNA, 19 nt, Artificial Sequence
  Description of Artificial Sequence: Synthetic oligonucleotide
cgacgccagcaguccgucg

SEQ ID NO: 904295 - RNA, 19 nt, Artificial Sequence
  Description of Artificial Sequence: Synthetic oligonucleotide
cgcaacacgcaaccaacgu

SEQ ID NO: 904296 - RNA, 19 nt, Artificial Sequence
  Description of Artificial Sequence: Synthetic oligonucleotide
gcggcacaaaggggcugcc

SEQ ID NO: 904297 - RNA, 19 nt, Artificial Sequence
  Description of Artificial Sequence: Synthetic oligonucleotide
ccggcgccacccgcgaagc

SEQ ID NO: 904298 - RNA, 19 nt, Artificial Sequence
  Description of Artificial Sequence: Synthetic oligonucleotide
gguccccacccggagugaa

SEQ ID NO: 904299 - RNA, 19 nt, Artificial Sequence
  Description of Artificial Sequence: Synthetic oligonucleotide
guccgucgggagcgccguc

SEQ ID NO: 904300 - RNA, 19 nt, Artificial Sequence
  Description of Artificial Sequence: Synthetic oligonucleotide
cuacgcugccggccacucu

SEQ ID NO: 904301 - RNA, 19 nt, Artificial Sequence
  Description of Artificial Sequence: Synthetic oligonucleotide
ccgugcugcccggcuacgc

SEQ ID NO: 904302 - RNA, 19 nt, Artificial Sequence
  Description of Artificial Sequence: Synthetic oligonucleotide
cccggggaacgcgcggccc

SEQ ID NO: 904303 - RNA, 19 nt, Artificial Sequence
  Description of Artificial Sequence: Synthetic oligonucleotide
gcgcgcagcauuguggguu

SEQ ID NO: 904304 - RNA, 19 nt, Artificial Sequence
  Description of Artificial Sequence: Synthetic oligonucleotide
ccgaucgccauuggcccga

SEQ ID NO: 904305 - RNA, 19 nt, Artificial Sequence
  Description of Artificial Sequence: Synthetic oligonucleotide
gcgcggccaggcgcggugg

SEQ ID NO: 904306 - RNA, 19 nt, Artificial Sequence
  Description of Artificial Sequence: Synthetic oligonucleotide
ucgggacguccggcacggu

SEQ ID NO: 904307 - RNA, 19 nt, Artificial Sequence
  Description of Artificial Sequence: Synthetic oligonucleotide
gcggggcuggggaaacaga

SEQ ID NO: 904308 - RNA, 19 nt, Artificial Sequence
  Description of Artificial Sequence: Synthetic oligonucleotide
gcgacagcggagggcuguc

SEQ ID NO: 904309 - RNA, 19 nt, Artificial Sequence
  Description of Artificial Sequence: Synthetic oligonucleotide
cgucgggagcgccgucggg

SEQ ID NO: 904310 - RNA, 19 nt, Artificial Sequence
  Description of Artificial Sequence: Synthetic oligonucleotide
gggcuucaauccugccgcu

SEQ ID NO: 904311 - RNA, 19 nt, Artificial Sequence
  Description of Artificial Sequence: Synthetic oligonucleotide
cggaaucggacacucccgu

SEQ ID NO: 904312 - RNA, 19 nt, Artificial Sequence
  Description of Artificial Sequence: Synthetic oligonucleotide
cgggcgaaccaaggauuac

SEQ ID NO: 904313 - RNA, 19 nt, Artificial Sequence
  Description of Artificial Sequence: Synthetic oligonucleotide
acgcucgcgcgcacccuua

SEQ ID NO: 904314 - RNA, 19 nt, Artificial Sequence
  Description of Artificial Sequence: Synthetic oligonucleotide
gcgucagcgcgucuuucuu

SEQ ID NO: 904315 - RNA, 19 nt, Artificial Sequence
  Description of Artificial Sequence: Synthetic oligonucleotide
cccgugcugcccggcuacg

SEQ ID NO: 904316 - RNA, 19 nt, Artificial Sequence
  Description of Artificial Sequence: Synthetic oligonucleotide
gcagcgcggaaggugcagu

SEQ ID NO: 904317 - RNA, 19 nt, Artificial Sequence
  Description of Artificial Sequence: Synthetic oligonucleotide
guccgcgcaugcgccccga

SEQ ID NO: 904318 - RNA, 19 nt, Artificial Sequence
  Description of Artificial Sequence: Synthetic oligonucleotide
cgggccgggacgcccucgc

SEQ ID NO: 904319 - RNA, 19 nt, Artificial Sequence
  Description of Artificial Sequence: Synthetic oligonucleotide
cgggagcgccgucggggcg

SEQ ID NO: 904320 - RNA, 19 nt, Artificial Sequence
  Description of Artificial Sequence: Synthetic oligonucleotide
gcucgcgcgcacccuuaua

SEQ ID NO: 904321 - RNA, 19 nt, Artificial Sequence
  Description of Artificial Sequence: Synthetic oligonucleotide
ccgggaguggcugccaggu

SEQ ID NO: 904322 - RNA, 19 nt, Artificial Sequence
  Description of Artificial Sequence: Synthetic oligonucleotide
ccgggacgcccucgcuccc

SEQ ID NO: 904323 - RNA, 19 nt, Artificial Sequence
  Description of Artificial Sequence: Synthetic oligonucleotide
gcgcgccccuaggagcccc

SEQ ID NO: 904324 - RNA, 19 nt, Artificial Sequence
  Description of Artificial Sequence: Synthetic oligonucleotide
gcgugcuggucggaguggu

SEQ ID NO: 904325 - RNA, 19 nt, Artificial Sequence
  Description of Artificial Sequence: Synthetic oligonucleotide
gccgagccucggaggaguc

SEQ ID NO: 904326 - RNA, 19 nt, Artificial Sequence
  Description of Artificial Sequence: Synthetic oligonucleotide
gugaggcugcgcgccccua

SEQ ID NO: 904327 - RNA, 19 nt, Artificial Sequence
  Description of Artificial Sequence: Synthetic oligonucleotide
gcggagggcugucgccgaa

SEQ ID NO: 904328 - RNA, 19 nt, Artificial Sequence
  Description of Artificial Sequence: Synthetic oligonucleotide
cucuggcgacgcgagcuuu

SEQ ID NO: 904329 - RNA, 19 nt, Artificial Sequence
  Description of Artificial Sequence: Synthetic oligonucleotide
cgccccuaggagccccuuc

SEQ ID NO: 904330 - RNA, 19 nt, Artificial Sequence
  Description of Artificial Sequence: Synthetic oligonucleotide
ccucgccguaaaagggcgu

SEQ ID NO: 904331 - RNA, 19 nt, Artificial Sequence
  Description of Artificial Sequence: Synthetic oligonucleotide
cggcgacguucgacgcacc

SEQ ID NO: 904332 - RNA, 19 nt, Artificial Sequence
  Description of Artificial Sequence: Synthetic oligonucleotide
gcugagcgucagcgcgucu

SEQ ID NO: 904333 - RNA, 19 nt, Artificial Sequence
  Description of Artificial Sequence: Synthetic oligonucleotide
ccccuucucggcggcacaa

SEQ ID NO: 904334 - RNA, 19 nt, Artificial Sequence
  Description of Artificial Sequence: Synthetic oligonucleotide
gccgugcgcucgggguccc

SEQ ID NO: 904335 - RNA, 19 nt, Artificial Sequence
  Description of Artificial Sequence: Synthetic oligonucleotide
cgacccgggcuucaauccu

SEQ ID NO: 904336 - RNA, 19 nt, Artificial Sequence
  Description of Artificial Sequence: Synthetic oligonucleotide
cgaucgccauuggcccgag

SEQ ID NO: 904337 - RNA, 19 nt, Artificial Sequence
  Description of Artificial Sequence: Synthetic oligonucleotide
ggccgacccgggcuucaau

SEQ ID NO: 904338 - RNA, 19 nt, Artificial Sequence
  Description of Artificial Sequence: Synthetic oligonucleotide
cagcaguaccggcgacguu

SEQ ID NO: 904339 - RNA, 19 nt, Artificial Sequence
  Description of Artificial Sequence: Synthetic oligonucleotide
ccaguccgcugcccgugcu

SEQ ID NO: 904340 - RNA, 19 nt, Artificial Sequence
  Description of Artificial Sequence: Synthetic oligonucleotide
ggaugccagcucgguguuu

SEQ ID NO: 904341 - RNA, 19 nt, Artificial Sequence
  Description of Artificial Sequence: Synthetic oligonucleotide
ccagcccguuggauuggau

SEQ ID NO: 904342 - RNA, 19 nt, Artificial Sequence
  Description of Artificial Sequence: Synthetic oligonucleotide
cgucggggcgcagcgcgga

SEQ ID NO: 904343 - RNA, 19 nt, Artificial Sequence
  Description of Artificial Sequence: Synthetic oligonucleotide
gcgcuccgccuugaugcgu

SEQ ID NO: 904344 - RNA, 19 nt, Artificial Sequence
  Description of Artificial Sequence: Synthetic oligonucleotide
ccgugcgcucggggucccc

SEQ ID NO: 904345 - RNA, 19 nt, Artificial Sequence
  Description of Artificial Sequence: Synthetic oligonucleotide
cggccacucugccccgcga

SEQ ID NO: 904346 - RNA, 19 nt, Artificial Sequence
  Description of Artificial Sequence: Synthetic oligonucleotide
cgcucgcuacaaggcacaa

SEQ ID NO: 904347 - RNA, 19 nt, Artificial Sequence
  Description of Artificial Sequence: Synthetic oligonucleotide
ccgcggugaaggccacggu

SEQ ID NO: 904348 - RNA, 19 nt, Artificial Sequence
  Description of Artificial Sequence: Synthetic oligonucleotide
cgcucgcgcgcacccuuau

SEQ ID NO: 904349 - RNA, 19 nt, Artificial Sequence
  Description of Artificial Sequence: Synthetic oligonucleotide
cgcgccccuaggagccccu

SEQ ID NO: 904350 - RNA, 19 nt, Artificial Sequence
  Description of Artificial Sequence: Synthetic oligonucleotide
cgacgcucgcgcgcacccu

SEQ ID NO: 904351 - RNA, 19 nt, Artificial Sequence
  Description of Artificial Sequence: Synthetic oligonucleotide
gcgccccuaggagccccuu

SEQ ID NO: 904352 - RNA, 19 nt, Artificial Sequence
  Description of Artificial Sequence: Synthetic oligonucleotide
cggcgccacccgcgaagcu

SEQ ID NO: 904353 - RNA, 19 nt, Artificial Sequence
  Description of Artificial Sequence: Synthetic oligonucleotide
aacuuugugaucuuacugg

SEQ ID NO: 904354 - RNA, 19 nt, Artificial Sequence
  Description of Artificial Sequence: Synthetic oligonucleotide
aauaccaucaccaaugcuc

SEQ ID NO: 904355 - RNA, 19 nt, Artificial Sequence
  Description of Artificial Sequence: Synthetic oligonucleotide
aaacuagucacacaauacg

SEQ ID NO: 904356 - RNA, 19 nt, Artificial Sequence
  Description of Artificial Sequence: Synthetic oligonucleotide
aaucauucaucuuggcugc

SEQ ID NO: 904357 - RNA, 19 nt, Artificial Sequence
  Description of Artificial Sequence: Synthetic oligonucleotide
uauagaacaacucuguuuc

SEQ ID NO: 904358 - RNA, 19 nt, Artificial Sequence
  Description of Artificial Sequence: Synthetic oligonucleotide
gaaucauucaucuuggcug

SEQ ID NO: 904359 - RNA, 19 nt, Artificial Sequence
  Description of Artificial Sequence: Synthetic oligonucleotide
cugauauugcccaagaggg

SEQ ID NO: 904360 - RNA, 19 nt, Artificial Sequence
  Description of Artificial Sequence: Synthetic oligonucleotide
aauagcaacguagauacag

SEQ ID NO: 904361 - RNA, 19 nt, Artificial Sequence
  Description of Artificial Sequence: Synthetic oligonucleotide
gauaaaucgucguagauga

SEQ ID NO: 904362 - RNA, 19 nt, Artificial Sequence
  Description of Artificial Sequence: Synthetic oligonucleotide
uuaagguucaaacccagcc

SEQ ID NO: 904363 - RNA, 19 nt, Artificial Sequence
  Description of Artificial Sequence: Synthetic oligonucleotide
agggacauacccuuuaagc

SEQ ID NO: 904364 - RNA, 19 nt, Artificial Sequence
  Description of Artificial Sequence: Synthetic oligonucleotide
uacaucaggaguacgagag

SEQ ID NO: 904365 - RNA, 19 nt, Artificial Sequence
  Description of Artificial Sequence: Synthetic oligonucleotide
auagauaacagccaccugu

SEQ ID NO: 904366 - RNA, 19 nt, Artificial Sequence
  Description of Artificial Sequence: Synthetic oligonucleotide
cugacauggauucaaaggg

SEQ ID NO: 904367 - RNA, 19 nt, Artificial Sequence
  Description of Artificial Sequence: Synthetic oligonucleotide
agagcuguugaguagcagc

SEQ ID NO: 904368 - RNA, 19 nt, Artificial Sequence
  Description of Artificial Sequence: Synthetic oligonucleotide
uacccuuuaagccugaaga

SEQ ID NO: 904369 - RNA, 19 nt, Artificial Sequence
  Description of Artificial Sequence: Synthetic oligonucleotide
auugaaacguuucugguug

SEQ ID NO: 904370 - RNA, 19 nt, Artificial Sequence
  Description of Artificial Sequence: Synthetic oligonucleotide
uuuaucauuuccgaacacg

SEQ ID NO: 904371 - RNA, 19 nt, Artificial Sequence
  Description of Artificial Sequence: Synthetic oligonucleotide
auuguuccgagauuuuccc

SEQ ID NO: 904372 - RNA, 19 nt, Artificial Sequence
  Description of Artificial Sequence: Synthetic oligonucleotide
aaugguguacuucauggca

SEQ ID NO: 904373 - RNA, 19 nt, Artificial Sequence
  Description of Artificial Sequence: Synthetic oligonucleotide
uaaucaguuuaucauuucc

SEQ ID NO: 904374 - RNA, 19 nt, Artificial Sequence
  Description of Artificial Sequence: Synthetic oligonucleotide
aaucaguuuaucauuuccg

SEQ ID NO: 904375 - RNA, 19 nt, Artificial Sequence
  Description of Artificial Sequence: Synthetic oligonucleotide
uuugugaucuuacugggcu

SEQ ID NO: 904376 - RNA, 19 nt, Artificial Sequence
  Description of Artificial Sequence: Synthetic oligonucleotide
agaaguuuguuacaaucuc

SEQ ID NO: 904377 - RNA, 19 nt, Artificial Sequence
  Description of Artificial Sequence: Synthetic oligonucleotide
uuaucauuuccgaacacga

SEQ ID NO: 904378 - RNA, 19 nt, Artificial Sequence
  Description of Artificial Sequence: Synthetic oligonucleotide
aaccaauuggacccuuccc

SEQ ID NO: 904379 - RNA, 19 nt, Artificial Sequence
  Description of Artificial Sequence: Synthetic oligonucleotide
uuggaauguaagcagacac

SEQ ID NO: 904380 - RNA, 19 nt, Artificial Sequence
  Description of Artificial Sequence: Synthetic oligonucleotide
ucguagaugaucaaagcgu

SEQ ID NO: 904381 - RNA, 19 nt, Artificial Sequence
  Description of Artificial Sequence: Synthetic oligonucleotide
uugaacauuccucagccca

SEQ ID NO: 904382 - RNA, 19 nt, Artificial Sequence
  Description of Artificial Sequence: Synthetic oligonucleotide
aacuagucacacaauacgg

SEQ ID NO: 904383 - RNA, 19 nt, Artificial Sequence
  Description of Artificial Sequence: Synthetic oligonucleotide
ugaagucgcauguuggagg

SEQ ID NO: 904384 - RNA, 19 nt, Artificial Sequence
  Description of Artificial Sequence: Synthetic oligonucleotide
acaacuccaacauugucag

SEQ ID NO: 904385 - RNA, 19 nt, Artificial Sequence
  Description of Artificial Sequence: Synthetic oligonucleotide
aacguagauacaguacagc

SEQ ID NO: 904386 - RNA, 19 nt, Artificial Sequence
  Description of Artificial Sequence: Synthetic oligonucleotide
aacacgacaacuccaacau

SEQ ID NO: 904387 - RNA, 19 nt, Artificial Sequence
  Description of Artificial Sequence: Synthetic oligonucleotide
auuucuugcaccaaugaag

SEQ ID NO: 904388 - RNA, 19 nt, Artificial Sequence
  Description of Artificial Sequence: Synthetic oligonucleotide
aauuggacccuucccauca

SEQ ID NO: 904389 - RNA, 19 nt, Artificial Sequence
  Description of Artificial Sequence: Synthetic oligonucleotide
cugaccacgaccaauuggc

SEQ ID NO: 904390 - RNA, 19 nt, Artificial Sequence
  Description of Artificial Sequence: Synthetic oligonucleotide
aagaauggaggacaccuca

SEQ ID NO: 904391 - RNA, 19 nt, Artificial Sequence
  Description of Artificial Sequence: Synthetic oligonucleotide
auugugucaauagcaaucg

SEQ ID NO: 904392 - RNA, 19 nt, Artificial Sequence
  Description of Artificial Sequence: Synthetic oligonucleotide
guuacaaucucuuucagcu

SEQ ID NO: 904393 - RNA, 19 nt, Artificial Sequence
  Description of Artificial Sequence: Synthetic oligonucleotide
uguccuugcuuuaacaacu

SEQ ID NO: 904394 - RNA, 19 nt, Artificial Sequence
  Description of Artificial Sequence: Synthetic oligonucleotide
ucaagaauggaggacaccu

SEQ ID NO: 904395 - RNA, 19 nt, Artificial Sequence
  Description of Artificial Sequence: Synthetic oligonucleotide
ucgucguagaugaucaaag

SEQ ID NO: 904396 - RNA, 19 nt, Artificial Sequence
  Description of Artificial Sequence: Synthetic oligonucleotide
gagccaaauacugaagugg

SEQ ID NO: 904397 - RNA, 19 nt, Artificial Sequence
  Description of Artificial Sequence: Synthetic oligonucleotide
ucuucaagaauggaggaca

SEQ ID NO: 904398 - RNA, 19 nt, Artificial Sequence
  Description of Artificial Sequence: Synthetic oligonucleotide
cauuuguuggaauguaagc

SEQ ID NO: 904399 - RNA, 19 nt, Artificial Sequence
  Description of Artificial Sequence: Synthetic oligonucleotide
caguuuaucauuuccgaac

SEQ ID NO: 904400 - RNA, 19 nt, Artificial Sequence
  Description of Artificial Sequence: Synthetic oligonucleotide
ucgggcaauaccaucacca

SEQ ID NO: 904401 - RNA, 19 nt, Artificial Sequence
  Description of Artificial Sequence: Synthetic oligonucleotide
uaagguucaaacccagcca

SEQ ID NO: 904402 - RNA, 19 nt, Artificial Sequence
  Description of Artificial Sequence: Synthetic oligonucleotide
auuuguuggaauguaagca

SEQ ID NO: 904403 - RNA, 19 nt, Artificial Sequence
  Description of Artificial Sequence: Synthetic oligonucleotide
ugugucaauagcaaucgau

SEQ ID NO: 904404 - RNA, 19 nt, Artificial Sequence
  Description of Artificial Sequence: Synthetic oligonucleotide
uuauagaacaacucuguuu

SEQ ID NO: 904405 - RNA, 19 nt, Artificial Sequence
  Description of Artificial Sequence: Synthetic oligonucleotide
uuaauggcagggcggaugc

SEQ ID NO: 904406 - RNA, 19 nt, Artificial Sequence
  Description of Artificial Sequence: Synthetic oligonucleotide
augaucaaagcgugcuugc

SEQ ID NO: 904407 - RNA, 19 nt, Artificial Sequence
  Description of Artificial Sequence: Synthetic oligonucleotide
caauaaucagcucacgcug

SEQ ID NO: 904408 - RNA, 19 nt, Artificial Sequence
  Description of Artificial Sequence: Synthetic oligonucleotide
ugucaauagcaaucgaugu

SEQ ID NO: 904409 - RNA, 19 nt, Artificial Sequence
  Description of Artificial Sequence: Synthetic oligonucleotide
aggcauggagauuucuugc

SEQ ID NO: 904410 - RNA, 19 nt, Artificial Sequence
  Description of Artificial Sequence: Synthetic oligonucleotide
agucacacaauacggaacu

SEQ ID NO: 904411 - RNA, 19 nt, Artificial Sequence
  Description of Artificial Sequence: Synthetic oligonucleotide
aagaaguuuguuacaaucu

SEQ ID NO: 904412 - RNA, 19 nt, Artificial Sequence
  Description of Artificial Sequence: Synthetic oligonucleotide
caaacuagucacacaauac

SEQ ID NO: 904413 - RNA, 19 nt, Artificial Sequence
  Description of Artificial Sequence: Synthetic oligonucleotide
aaaucgucguagaugauca

SEQ ID NO: 904414 - RNA, 19 nt, Artificial Sequence
  Description of Artificial Sequence: Synthetic oligonucleotide
aaauacugaaguggggcag

SEQ ID NO: 904415 - RNA, 19 nt, Artificial Sequence
  Description of Artificial Sequence: Synthetic oligonucleotide
gacgacuggcacaaaaugg

SEQ ID NO: 904416 - RNA, 19 nt, Artificial Sequence
  Description of Artificial Sequence: Synthetic oligonucleotide
ugacauggauucaaagggc

SEQ ID NO: 904417 - RNA, 19 nt, Artificial Sequence
  Description of Artificial Sequence: Synthetic oligonucleotide
uuucuguacaucaggagua

SEQ ID NO: 904418 - RNA, 19 nt, Artificial Sequence
  Description of Artificial Sequence: Synthetic oligonucleotide
acgacuggcacaaaauggc

SEQ ID NO: 904419 - RNA, 19 nt, Artificial Sequence
  Description of Artificial Sequence: Synthetic oligonucleotide
cacauuaauggcagggcgg

SEQ ID NO: 904420 - RNA, 19 nt, Artificial Sequence
  Description of Artificial Sequence: Synthetic oligonucleotide
uggaauguaagcagacaca

SEQ ID NO: 904421 - RNA, 19 nt, Artificial Sequence
  Description of Artificial Sequence: Synthetic oligonucleotide
gauugugucaauagcaauc

SEQ ID NO: 904422 - RNA, 19 nt, Artificial Sequence
  Description of Artificial Sequence: Synthetic oligonucleotide
uccgacacgggacacagac

SEQ ID NO: 904423 - RNA, 19 nt, Artificial Sequence
  Description of Artificial Sequence: Synthetic oligonucleotide
acguagauacaguacagcu

SEQ ID NO: 904424 - RNA, 19 nt, Artificial Sequence
  Description of Artificial Sequence: Synthetic oligonucleotide
aggaguacgagagcagucc

SEQ ID NO: 904425 - RNA, 19 nt, Artificial Sequence
  Description of Artificial Sequence: Synthetic oligonucleotide
aucaguuuaucauuuccga

SEQ ID NO: 904426 - RNA, 19 nt, Artificial Sequence
  Description of Artificial Sequence: Synthetic oligonucleotide
gaugaucaaagcgugcuug

SEQ ID NO: 904427 - RNA, 19 nt, Artificial Sequence
  Description of Artificial Sequence: Synthetic oligonucleotide
uuuccgaacacgacaacuc

SEQ ID NO: 904428 - RNA, 19 nt, Artificial Sequence
  Description of Artificial Sequence: Synthetic oligonucleotide
ucggggaaugauuccaggg

SEQ ID NO: 904429 - RNA, 19 nt, Artificial Sequence
  Description of Artificial Sequence: Synthetic oligonucleotide
acgagagcaguccuuuuac

SEQ ID NO: 904430 - RNA, 19 nt, Artificial Sequence
  Description of Artificial Sequence: Synthetic oligonucleotide
uuuaagguucaaacccagc

SEQ ID NO: 904431 - RNA, 19 nt, Artificial Sequence
  Description of Artificial Sequence: Synthetic oligonucleotide
uguacaucaggaguacgag

SEQ ID NO: 904432 - RNA, 19 nt, Artificial Sequence
  Description of Artificial Sequence: Synthetic oligonucleotide
gaagucgcauguuggaggc

SEQ ID NO: 904433 - RNA, 19 nt, Artificial Sequence
  Description of Artificial Sequence: Synthetic oligonucleotide
cagccaagaaguuuguuac

SEQ ID NO: 904434 - RNA, 19 nt, Artificial Sequence
  Description of Artificial Sequence: Synthetic oligonucleotide
uuauguaauuucuguacau

SEQ ID NO: 904435 - RNA, 19 nt, Artificial Sequence
  Description of Artificial Sequence: Synthetic oligonucleotide
aacagcgacaucuggcggu

SEQ ID NO: 904436 - RNA, 19 nt, Artificial Sequence
  Description of Artificial Sequence: Synthetic oligonucleotide
agauucggggaaugauucc

SEQ ID NO: 904437 - RNA, 19 nt, Artificial Sequence
  Description of Artificial Sequence: Synthetic oligonucleotide
accaauuggacccuuccca

SEQ ID NO: 904438 - RNA, 19 nt, Artificial Sequence
  Description of Artificial Sequence: Synthetic oligonucleotide
uagcaaucgauguuuuccc

SEQ ID NO: 904439 - RNA, 19 nt, Artificial Sequence
  Description of Artificial Sequence: Synthetic oligonucleotide
gacacgcccagucucuucg

SEQ ID NO: 904440 - RNA, 19 nt, Artificial Sequence
  Description of Artificial Sequence: Synthetic oligonucleotide
gaacacgacaacuccaaca

SEQ ID NO: 904441 - RNA, 19 nt, Artificial Sequence
  Description of Artificial Sequence: Synthetic oligonucleotide
aguaaggagccaaauacug

SEQ ID NO: 904442 - RNA, 19 nt, Artificial Sequence
  Description of Artificial Sequence: Synthetic oligonucleotide
cuuuaagguucaaacccag

SEQ ID NO: 904443 - RNA, 19 nt, Artificial Sequence
  Description of Artificial Sequence: Synthetic oligonucleotide
ucagcccugauauugccca

SEQ ID NO: 904444 - RNA, 19 nt, Artificial Sequence
  Description of Artificial Sequence: Synthetic oligonucleotide
agccugcuuggauaaaucg

SEQ ID NO: 904445 - RNA, 19 nt, Artificial Sequence
  Description of Artificial Sequence: Synthetic oligonucleotide
agggcggaugccuuuauag

SEQ ID NO: 904446 - RNA, 19 nt, Artificial Sequence
  Description of Artificial Sequence: Synthetic oligonucleotide
ucugauuguuccgagauuu

SEQ ID NO: 904447 - RNA, 19 nt, Artificial Sequence
  Description of Artificial Sequence: Synthetic oligonucleotide
acuggaacguccacaaugg

SEQ ID NO: 904448 - RNA, 19 nt, Artificial Sequence
  Description of Artificial Sequence: Synthetic oligonucleotide
uagaugaucaaagcgugcu

SEQ ID NO: 904449 - RNA, 19 nt, Artificial Sequence
  Description of Artificial Sequence: Synthetic oligonucleotide
uaaaucgucguagaugauc

SEQ ID NO: 904450 - RNA, 19 nt, Artificial Sequence
  Description of Artificial Sequence: Synthetic oligonucleotide
uuggauaaaucgucguaga

SEQ ID NO: 904451 - RNA, 19 nt, Artificial Sequence
  Description of Artificial Sequence: Synthetic oligonucleotide
uuccgaacacgacaacucc

SEQ ID NO: 904452 - RNA, 19 nt, Artificial Sequence
  Description of Artificial Sequence: Synthetic oligonucleotide
ucagucccaucauugaaac

SEQ ID NO: 904453 - RNA, 19 nt, Artificial Sequence
  Description of Artificial Sequence: Synthetic oligonucleotide
acaucuggcgguaagccac

SEQ ID NO: 904454 - RNA, 19 nt, Artificial Sequence
  Description of Artificial Sequence: Synthetic oligonucleotide
acauuuguuggaauguaag

SEQ ID NO: 904455 - RNA, 19 nt, Artificial Sequence
  Description of Artificial Sequence: Synthetic oligonucleotide
gucucuucgaggucaacag

SEQ ID NO: 904456 - RNA, 19 nt, Artificial Sequence
  Description of Artificial Sequence: Synthetic oligonucleotide
ucuucgaggucaacagaag

SEQ ID NO: 904457 - RNA, 19 nt, Artificial Sequence
  Description of Artificial Sequence: Synthetic oligonucleotide
ucuugcaccaaugaaggau

SEQ ID NO: 904458 - RNA, 19 nt, Artificial Sequence
  Description of Artificial Sequence: Synthetic oligonucleotide
uucgaggucaacagaagua

SEQ ID NO: 904459 - RNA, 19 nt, Artificial Sequence
  Description of Artificial Sequence: Synthetic oligonucleotide
caagauagccccucacacc

SEQ ID NO: 904460 - RNA, 19 nt, Artificial Sequence
  Description of Artificial Sequence: Synthetic oligonucleotide
gaccguuucugaccaauag

SEQ ID NO: 904461 - RNA, 19 nt, Artificial Sequence
  Description of Artificial Sequence: Synthetic oligonucleotide
cuuuucgucagucccauca

SEQ ID NO: 904462 - RNA, 19 nt, Artificial Sequence
  Description of Artificial Sequence: Synthetic oligonucleotide
ucaguuuaucauuuccgaa

SEQ ID NO: 904463 - RNA, 19 nt, Artificial Sequence
  Description of Artificial Sequence: Synthetic oligonucleotide
gaagccguagcugacacca

SEQ ID NO: 904464 - RNA, 19 nt, Artificial Sequence
  Description of Artificial Sequence: Synthetic oligonucleotide
ugagauucggggaaugauu

SEQ ID NO: 904465 - RNA, 19 nt, Artificial Sequence
  Description of Artificial Sequence: Synthetic oligonucleotide
auagccaugggagaguacu

SEQ ID NO: 904466 - RNA, 19 nt, Artificial Sequence
  Description of Artificial Sequence: Synthetic oligonucleotide
auaggccucacgcccaggg

SEQ ID NO: 904467 - RNA, 19 nt, Artificial Sequence
  Description of Artificial Sequence: Synthetic oligonucleotide
gugucaauagcaaucgaug

SEQ ID NO: 904468 - RNA, 19 nt, Artificial Sequence
  Description of Artificial Sequence: Synthetic oligonucleotide
ugauuucaccagaacaaau

SEQ ID NO: 904469 - RNA, 19 nt, Artificial Sequence
  Description of Artificial Sequence: Synthetic oligonucleotide
ucgucuacgggucuuggaa

SEQ ID NO: 904470 - RNA, 19 nt, Artificial Sequence
  Description of Artificial Sequence: Synthetic oligonucleotide
uagucacacaauacggaac

SEQ ID NO: 904471 - RNA, 19 nt, Artificial Sequence
  Description of Artificial Sequence: Synthetic oligonucleotide
caggauaggccucacgccc

SEQ ID NO: 904472 - RNA, 19 nt, Artificial Sequence
  Description of Artificial Sequence: Synthetic oligonucleotide
aagcgugcuugccauuauc

SEQ ID NO: 904473 - RNA, 19 nt, Artificial Sequence
  Description of Artificial Sequence: Synthetic oligonucleotide
ugauauugcccaagaggga

SEQ ID NO: 904474 - RNA, 19 nt, Artificial Sequence
  Description of Artificial Sequence: Synthetic oligonucleotide
aauaaucagcucacgcuga

SEQ ID NO: 904475 - RNA, 19 nt, Artificial Sequence
  Description of Artificial Sequence: Synthetic oligonucleotide
ggcaauaccaucaccaaug

SEQ ID NO: 904476 - RNA, 19 nt, Artificial Sequence
  Description of Artificial Sequence: Synthetic oligonucleotide
gcaacagcgacaucuggcg

SEQ ID NO: 904477 - RNA, 19 nt, Artificial Sequence
  Description of Artificial Sequence: Synthetic oligonucleotide
uuaccaagggcaucaacua

SEQ ID NO: 904478 - RNA, 19 nt, Artificial Sequence
  Description of Artificial Sequence: Synthetic oligonucleotide
aaaugacauuuguuggaau

SEQ ID NO: 904479 - RNA, 19 nt, Artificial Sequence
  Description of Artificial Sequence: Synthetic oligonucleotide
aguggaccguuucugacca

SEQ ID NO: 904480 - RNA, 19 nt, Artificial Sequence
  Description of Artificial Sequence: Synthetic oligonucleotide
caacguagauacaguacag

SEQ ID NO: 904481 - RNA, 19 nt, Artificial Sequence
  Description of Artificial Sequence: Synthetic oligonucleotide
cucgccaacuggaacgucc

SEQ ID NO: 904482 - RNA, 19 nt, Artificial Sequence
  Description of Artificial Sequence: Synthetic oligonucleotide
uucaaagggcuuuaagguu

SEQ ID NO: 904483 - RNA, 19 nt, Artificial Sequence
  Description of Artificial Sequence: Synthetic oligonucleotide
auacccuuuaagccugaag

SEQ ID NO: 904484 - RNA, 19 nt, Artificial Sequence
  Description of Artificial Sequence: Synthetic oligonucleotide
auuaauggcagggcggaug

SEQ ID NO: 904485 - RNA, 19 nt, Artificial Sequence
  Description of Artificial Sequence: Synthetic oligonucleotide
uucggggaaugauuccagg

SEQ ID NO: 904486 - RNA, 19 nt, Artificial Sequence
  Description of Artificial Sequence: Synthetic oligonucleotide
aucuguccgucagugaugg

SEQ ID NO: 904487 - RNA, 19 nt, Artificial Sequence
  Description of Artificial Sequence: Synthetic oligonucleotide
ggauaaaucgucguagaug

SEQ ID NO: 904488 - RNA, 19 nt, Artificial Sequence
  Description of Artificial Sequence: Synthetic oligonucleotide
uccgaacacgacaacucca

SEQ ID NO: 904489 - RNA, 19 nt, Artificial Sequence
  Description of Artificial Sequence: Synthetic oligonucleotide
auuuccgaacacgacaacu

SEQ ID NO: 904490 - RNA, 19 nt, Artificial Sequence
  Description of Artificial Sequence: Synthetic oligonucleotide
uggauaaaucgucguagau

SEQ ID NO: 904491 - RNA, 19 nt, Artificial Sequence
  Description of Artificial Sequence: Synthetic oligonucleotide
gaggucaacagaaguauca

SEQ ID NO: 904492 - RNA, 19 nt, Artificial Sequence
  Description of Artificial Sequence: Synthetic oligonucleotide
ucagaaccaaacugggcaa

SEQ ID NO: 904493 - RNA, 19 nt, Artificial Sequence
  Description of Artificial Sequence: Synthetic oligonucleotide
uagauaacagccaccuguu

SEQ ID NO: 904494 - RNA, 19 nt, Artificial Sequence
  Description of Artificial Sequence: Synthetic oligonucleotide
uccgagauuuucccaucag

SEQ ID NO: 904495 - RNA, 19 nt, Artificial Sequence
  Description of Artificial Sequence: Synthetic oligonucleotide
gagauucggggaaugauuc

SEQ ID NO: 904496 - RNA, 19 nt, Artificial Sequence
  Description of Artificial Sequence: Synthetic oligonucleotide
aucaaagcgugcuugccau

SEQ ID NO: 904497 - RNA, 19 nt, Artificial Sequence
  Description of Artificial Sequence: Synthetic oligonucleotide
cauccucgcagcuucucgg

SEQ ID NO: 904498 - RNA, 19 nt, Artificial Sequence
  Description of Artificial Sequence: Synthetic oligonucleotide
cucacaccugcauagauaa

SEQ ID NO: 904499 - RNA, 19 nt, Artificial Sequence
  Description of Artificial Sequence: Synthetic oligonucleotide
agcagauccgacacgggac

SEQ ID NO: 904500 - RNA, 19 nt, Artificial Sequence
  Description of Artificial Sequence: Synthetic oligonucleotide
agauaacagccaccuguuc

SEQ ID NO: 904501 - RNA, 19 nt, Artificial Sequence
  Description of Artificial Sequence: Synthetic oligonucleotide
gcaacguagauacaguaca

SEQ ID NO: 904502 - RNA, 19 nt, Artificial Sequence
  Description of Artificial Sequence: Synthetic oligonucleotide
gacauacccuuuaagccug

SEQ ID NO: 904503 - RNA, 19 nt, Artificial Sequence
  Description of Artificial Sequence: Synthetic oligonucleotide
cuucauggcccuagucugg

SEQ ID NO: 904504 - RNA, 19 nt, Artificial Sequence
  Description of Artificial Sequence: Synthetic oligonucleotide
uaucagcuccaagaauccg

SEQ ID NO: 904505 - RNA, 19 nt, Artificial Sequence
  Description of Artificial Sequence: Synthetic oligonucleotide
cuucaagaauggaggacac

SEQ ID NO: 904506 - RNA, 19 nt, Artificial Sequence
  Description of Artificial Sequence: Synthetic oligonucleotide
auguacucgggcaauacca

SEQ ID NO: 904507 - RNA, 19 nt, Artificial Sequence
  Description of Artificial Sequence: Synthetic oligonucleotide
cauugguucccgcacugag

SEQ ID NO: 904508 - RNA, 19 nt, Artificial Sequence
  Description of Artificial Sequence: Synthetic oligonucleotide
ugggagaguacuguccuug

SEQ ID NO: 904509 - RNA, 19 nt, Artificial Sequence
  Description of Artificial Sequence: Synthetic oligonucleotide
aacauuccucagcccaugu

SEQ ID NO: 904510 - RNA, 19 nt, Artificial Sequence
  Description of Artificial Sequence: Synthetic oligonucleotide
cgagauuuucccaucagcc

SEQ ID NO: 904511 - RNA, 19 nt, Artificial Sequence
  Description of Artificial Sequence: Synthetic oligonucleotide
gauccgacacgggacacag

SEQ ID NO: 904512 - RNA, 19 nt, Artificial Sequence
  Description of Artificial Sequence: Synthetic oligonucleotide
ucgaggucaacagaaguau

SEQ ID NO: 904513 - RNA, 19 nt, Artificial Sequence
  Description of Artificial Sequence: Synthetic oligonucleotide
uguacucgggcaauaccau

SEQ ID NO: 904514 - RNA, 19 nt, Artificial Sequence
  Description of Artificial Sequence: Synthetic oligonucleotide
acaauacggaacuuuuauu

SEQ ID NO: 904515 - RNA, 19 nt, Artificial Sequence
  Description of Artificial Sequence: Synthetic oligonucleotide
gucuacgggucuuggaacc

SEQ ID NO: 904516 - RNA, 19 nt, Artificial Sequence
  Description of Artificial Sequence: Synthetic oligonucleotide
uuccgagauuuucccauca

SEQ ID NO: 904517 - RNA, 19 nt, Artificial Sequence
  Description of Artificial Sequence: Synthetic oligonucleotide
uacgagagcaguccuuuua

SEQ ID NO: 904518 - RNA, 19 nt, Artificial Sequence
  Description of Artificial Sequence: Synthetic oligonucleotide
caguggaccguuucugacc

SEQ ID NO: 904519 - RNA, 19 nt, Artificial Sequence
  Description of Artificial Sequence: Synthetic oligonucleotide
cuagucacacaauacggaa

SEQ ID NO: 904520 - RNA, 19 nt, Artificial Sequence
  Description of Artificial Sequence: Synthetic oligonucleotide
gauucggggaaugauucca

SEQ ID NO: 904521 - RNA, 19 nt, Artificial Sequence
  Description of Artificial Sequence: Synthetic oligonucleotide
uggagaccagucccgcccg

SEQ ID NO: 904522 - RNA, 19 nt, Artificial Sequence
  Description of Artificial Sequence: Synthetic oligonucleotide
gaucagaaccaaacugggc

SEQ ID NO: 904523 - RNA, 19 nt, Artificial Sequence
  Description of Artificial Sequence: Synthetic oligonucleotide
aaugcucaagacacgccca

SEQ ID NO: 904524 - RNA, 19 nt, Artificial Sequence
  Description of Artificial Sequence: Synthetic oligonucleotide
ugauuguuccgagauuuuc

SEQ ID NO: 904525 - RNA, 19 nt, Artificial Sequence
  Description of Artificial Sequence: Synthetic oligonucleotide
uuuucgucagucccaucau

SEQ ID NO: 904526 - RNA, 19 nt, Artificial Sequence
  Description of Artificial Sequence: Synthetic oligonucleotide
aggucaacagaaguaucag

SEQ ID NO: 904527 - RNA, 19 nt, Artificial Sequence
  Description of Artificial Sequence: Synthetic oligonucleotide
aagaucuguccgucaguga

SEQ ID NO: 904528 - RNA, 19 nt, Artificial Sequence
  Description of Artificial Sequence: Synthetic oligonucleotide
ugaucaaagcgugcuugcc

SEQ ID NO: 904529 - RNA, 19 nt, Artificial Sequence
  Description of Artificial Sequence: Synthetic oligonucleotide
acuagucacacaauacgga

SEQ ID NO: 904530 - RNA, 19 nt, Artificial Sequence
  Description of Artificial Sequence: Synthetic oligonucleotide
ucaggaguacgagagcagu

SEQ ID NO: 904531 - RNA, 19 nt, Artificial Sequence
  Description of Artificial Sequence: Synthetic oligonucleotide
gaccacgaccaauuggcac

SEQ ID NO: 904532 - RNA, 19 nt, Artificial Sequence
  Description of Artificial Sequence: Synthetic oligonucleotide
uuuuggagaccagucccgc

SEQ ID NO: 904533 - RNA, 19 nt, Artificial Sequence
  Description of Artificial Sequence: Synthetic oligonucleotide
acaacucggucagacgcac

SEQ ID NO: 904534 - RNA, 19 nt, Artificial Sequence
  Description of Artificial Sequence: Synthetic oligonucleotide
ucagcccauguacucgggc

SEQ ID NO: 904535 - RNA, 19 nt, Artificial Sequence
  Description of Artificial Sequence: Synthetic oligonucleotide
agaccagucccgcccgucg

SEQ ID NO: 904536 - RNA, 19 nt, Artificial Sequence
  Description of Artificial Sequence: Synthetic oligonucleotide
aucagcccugauauugccc

SEQ ID NO: 904537 - RNA, 19 nt, Artificial Sequence
  Description of Artificial Sequence: Synthetic oligonucleotide
caauacggaacuuuuauuu

SEQ ID NO: 904538 - RNA, 19 nt, Artificial Sequence
  Description of Artificial Sequence: Synthetic oligonucleotide
cucuucgaggucaacagaa

SEQ ID NO: 904539 - RNA, 19 nt, Artificial Sequence
  Description of Artificial Sequence: Synthetic oligonucleotide
gauuuucccaucagcccug

SEQ ID NO: 904540 - RNA, 19 nt, Artificial Sequence
  Description of Artificial Sequence: Synthetic oligonucleotide
aguuuguuacaaucucuuu

SEQ ID NO: 904541 - RNA, 19 nt, Artificial Sequence
  Description of Artificial Sequence: Synthetic oligonucleotide
gcaaucgauguuuucccag

SEQ ID NO: 904542 - RNA, 19 nt, Artificial Sequence
  Description of Artificial Sequence: Synthetic oligonucleotide
gcuucauggcccuagucug

SEQ ID NO: 904543 - RNA, 19 nt, Artificial Sequence
  Description of Artificial Sequence: Synthetic oligonucleotide
agcaaucgauguuuuccca

SEQ ID NO: 904544 - RNA, 19 nt, Artificial Sequence
  Description of Artificial Sequence: Synthetic oligonucleotide
uugugucaauagcaaucga

SEQ ID NO: 904545 - RNA, 19 nt, Artificial Sequence
  Description of Artificial Sequence: Synthetic oligonucleotide
ccacauuaauggcagggcg

SEQ ID NO: 904546 - RNA, 19 nt, Artificial Sequence
  Description of Artificial Sequence: Synthetic oligonucleotide
cacgggacacagacaaacc

SEQ ID NO: 904547 - RNA, 19 nt, Artificial Sequence
  Description of Artificial Sequence: Synthetic oligonucleotide
aacaacucggucagacgca

SEQ ID NO: 904548 - RNA, 19 nt, Artificial Sequence
  Description of Artificial Sequence: Synthetic oligonucleotide
agcgacaucuggcgguaag

SEQ ID NO: 904549 - RNA, 19 nt, Artificial Sequence
  Description of Artificial Sequence: Synthetic oligonucleotide
cugaagucgcauguuggag

SEQ ID NO: 904550 - RNA, 19 nt, Artificial Sequence
  Description of Artificial Sequence: Synthetic oligonucleotide
uugaaacguuucugguuga

SEQ ID NO: 904551 - RNA, 19 nt, Artificial Sequence
  Description of Artificial Sequence: Synthetic oligonucleotide
ggacgacuggcacaaaaug

SEQ ID NO: 904552 - RNA, 19 nt, Artificial Sequence
  Description of Artificial Sequence: Synthetic oligonucleotide
auagcaacguagauacagu

SEQ ID NO: 904553 - RNA, 19 nt, Artificial Sequence
  Description of Artificial Sequence: Synthetic oligonucleotide
ugaccacgaccaauuggca

SEQ ID NO: 904554 - RNA, 19 nt, Artificial Sequence
  Description of Artificial Sequence: Synthetic oligonucleotide
uucaggcccacucgucuac

SEQ ID NO: 904555 - RNA, 19 nt, Artificial Sequence
  Description of Artificial Sequence: Synthetic oligonucleotide
guagaugaucaaagcgugc

SEQ ID NO: 904556 - RNA, 19 nt, Artificial Sequence
  Description of Artificial Sequence: Synthetic oligonucleotide
guacaucaggaguacgaga

SEQ ID NO: 904557 - RNA, 19 nt, Artificial Sequence
  Description of Artificial Sequence: Synthetic oligonucleotide
agaauccgcucuucaagaa

SEQ ID NO: 904558 - RNA, 19 nt, Artificial Sequence
  Description of Artificial Sequence: Synthetic oligonucleotide
ucccaucaauggcauuacc

SEQ ID NO: 904559 - RNA, 19 nt, Artificial Sequence
  Description of Artificial Sequence: Synthetic oligonucleotide
aaagcgugcuugccauuau

SEQ ID NO: 904560 - RNA, 19 nt, Artificial Sequence
  Description of Artificial Sequence: Synthetic oligonucleotide
caaccucccgauacugagc

SEQ ID NO: 904561 - RNA, 19 nt, Artificial Sequence
  Description of Artificial Sequence: Synthetic oligonucleotide
caucaggaguacgagagca

SEQ ID NO: 904562 - RNA, 19 nt, Artificial Sequence
  Description of Artificial Sequence: Synthetic oligonucleotide
caacagcgacaucuggcgg

SEQ ID NO: 904563 - RNA, 19 nt, Artificial Sequence
  Description of Artificial Sequence: Synthetic oligonucleotide
cauagauaacagccaccug

SEQ ID NO: 904564 - RNA, 19 nt, Artificial Sequence
  Description of Artificial Sequence: Synthetic oligonucleotide
agaauggaggacaccucag

SEQ ID NO: 904565 - RNA, 19 nt, Artificial Sequence
  Description of Artificial Sequence: Synthetic oligonucleotide
ggcgguaagccacagccug

SEQ ID NO: 904566 - RNA, 19 nt, Artificial Sequence
  Description of Artificial Sequence: Synthetic oligonucleotide
uaaucagcucacgcugacc

SEQ ID NO: 904567 - RNA, 19 nt, Artificial Sequence
  Description of Artificial Sequence: Synthetic oligonucleotide
guaaggagccaaauacuga

SEQ ID NO: 904568 - RNA, 19 nt, Artificial Sequence
  Description of Artificial Sequence: Synthetic oligonucleotide
gaacguccacaauggcacc

SEQ ID NO: 904569 - RNA, 19 nt, Artificial Sequence
  Description of Artificial Sequence: Synthetic oligonucleotide
uuucgucagucccaucauu

SEQ ID NO: 904570 - RNA, 19 nt, Artificial Sequence
  Description of Artificial Sequence: Synthetic oligonucleotide
gacaccacaaugguguacu

SEQ ID NO: 904571 - RNA, 19 nt, Artificial Sequence
  Description of Artificial Sequence: Synthetic oligonucleotide
uccgucagugauggaaaug

SEQ ID NO: 904572 - RNA, 19 nt, Artificial Sequence
  Description of Artificial Sequence: Synthetic oligonucleotide
aggcccacucgucuacggg

SEQ ID NO: 904573 - RNA, 19 nt, Artificial Sequence
  Description of Artificial Sequence: Synthetic oligonucleotide
aguacgagagcaguccuuu

SEQ ID NO: 904574 - RNA, 19 nt, Artificial Sequence
  Description of Artificial Sequence: Synthetic oligonucleotide
cucggucagacgcacacca

SEQ ID NO: 904575 - RNA, 19 nt, Artificial Sequence
  Description of Artificial Sequence: Synthetic oligonucleotide
gguucccgcacugagauuc

SEQ ID NO: 904576 - RNA, 19 nt, Artificial Sequence
  Description of Artificial Sequence: Synthetic oligonucleotide
cagucccaucauugaaacg

SEQ ID NO: 904577 - RNA, 19 nt, Artificial Sequence
  Description of Artificial Sequence: Synthetic oligonucleotide
acucggucagacgcacacc

SEQ ID NO: 904578 - RNA, 19 nt, Artificial Sequence
  Description of Artificial Sequence: Synthetic oligonucleotide
aggaugaacccaaagcauu

SEQ ID NO: 904579 - RNA, 19 nt, Artificial Sequence
  Description of Artificial Sequence: Synthetic oligonucleotide
agacacgcccagucucuuc

SEQ ID NO: 904580 - RNA, 19 nt, Artificial Sequence
  Description of Artificial Sequence: Synthetic oligonucleotide
uucuuuucgucagucccau

SEQ ID NO: 904581 - RNA, 19 nt, Artificial Sequence
  Description of Artificial Sequence: Synthetic oligonucleotide
agcgugcuugccauuaucu

SEQ ID NO: 904582 - RNA, 19 nt, Artificial Sequence
  Description of Artificial Sequence: Synthetic oligonucleotide
accaacugggcgacagugg

SEQ ID NO: 904583 - RNA, 19 nt, Artificial Sequence
  Description of Artificial Sequence: Synthetic oligonucleotide
caauuggacccuucccauc

SEQ ID NO: 904584 - RNA, 19 nt, Artificial Sequence
  Description of Artificial Sequence: Synthetic oligonucleotide
caggaguacgagagcaguc

SEQ ID NO: 904585 - RNA, 19 nt, Artificial Sequence
  Description of Artificial Sequence: Synthetic oligonucleotide
ucuacgggucuuggaacca

SEQ ID NO: 904586 - RNA, 19 nt, Artificial Sequence
  Description of Artificial Sequence: Synthetic oligonucleotide
ggucuuggaaccaauugga

SEQ ID NO: 904587 - RNA, 19 nt, Artificial Sequence
  Description of Artificial Sequence: Synthetic oligonucleotide
gaucuuacugggcuccagu

SEQ ID NO: 904588 - RNA, 19 nt, Artificial Sequence
  Description of Artificial Sequence: Synthetic oligonucleotide
gagaguacuguccuugcuu

SEQ ID NO: 904589 - RNA, 19 nt, Artificial Sequence
  Description of Artificial Sequence: Synthetic oligonucleotide
gaguaaggagccaaauacu

SEQ ID NO: 904590 - RNA, 19 nt, Artificial Sequence
  Description of Artificial Sequence: Synthetic oligonucleotide
cacgacucaagagcuguug

SEQ ID NO: 904591 - RNA, 19 nt, Artificial Sequence
  Description of Artificial Sequence: Synthetic oligonucleotide
cuggaacguccacaauggc

SEQ ID NO: 904592 - RNA, 19 nt, Artificial Sequence
  Description of Artificial Sequence: Synthetic oligonucleotide
ccgagauuuucccaucagc

SEQ ID NO: 904593 - RNA, 19 nt, Artificial Sequence
  Description of Artificial Sequence: Synthetic oligonucleotide
auccgcucuucaagaaugg

SEQ ID NO: 904594 - RNA, 19 nt, Artificial Sequence
  Description of Artificial Sequence: Synthetic oligonucleotide
ugaaacguuucugguugau

SEQ ID NO: 904595 - RNA, 19 nt, Artificial Sequence
  Description of Artificial Sequence: Synthetic oligonucleotide
caagaagaucuguccguca

SEQ ID NO: 904596 - RNA, 19 nt, Artificial Sequence
  Description of Artificial Sequence: Synthetic oligonucleotide
cauuuccgaacacgacaac

SEQ ID NO: 904597 - RNA, 19 nt, Artificial Sequence
  Description of Artificial Sequence: Synthetic oligonucleotide
cccaucaauggcauuacca

SEQ ID NO: 904598 - RNA, 19 nt, Artificial Sequence
  Description of Artificial Sequence: Synthetic oligonucleotide
uggaccguuucugaccaau

SEQ ID NO: 904599 - RNA, 19 nt, Artificial Sequence
  Description of Artificial Sequence: Synthetic oligonucleotide
cagccugcuuggauaaauc

SEQ ID NO: 904600 - RNA, 19 nt, Artificial Sequence
  Description of Artificial Sequence: Synthetic oligonucleotide
gucaauagcaaucgauguu

SEQ ID NO: 904601 - RNA, 19 nt, Artificial Sequence
  Description of Artificial Sequence: Synthetic oligonucleotide
guacucgggcaauaccauc

SEQ ID NO: 904602 - RNA, 19 nt, Artificial Sequence
  Description of Artificial Sequence: Synthetic oligonucleotide
acagccugcuuggauaaau

SEQ ID NO: 904603 - RNA, 19 nt, Artificial Sequence
  Description of Artificial Sequence: Synthetic oligonucleotide
gcucacgcugaccacgacc

SEQ ID NO: 904604 - RNA, 19 nt, Artificial Sequence
  Description of Artificial Sequence: Synthetic oligonucleotide
gaauccgcucuucaagaau

SEQ ID NO: 904605 - RNA, 19 nt, Artificial Sequence
  Description of Artificial Sequence: Synthetic oligonucleotide
cucagcccauguacucggg

SEQ ID NO: 904606 - RNA, 19 nt, Artificial Sequence
  Description of Artificial Sequence: Synthetic oligonucleotide
ucggucagacgcacaccac

SEQ ID NO: 904607 - RNA, 19 nt, Artificial Sequence
  Description of Artificial Sequence: Synthetic oligonucleotide
ccaggauaggccucacgcc

SEQ ID NO: 904608 - RNA, 19 nt, Artificial Sequence
  Description of Artificial Sequence: Synthetic oligonucleotide
uacgggucuuggaaccaau

SEQ ID NO: 904609 - RNA, 19 nt, Artificial Sequence
  Description of Artificial Sequence: Synthetic oligonucleotide
cugauuucaccagaacaaa

SEQ ID NO: 904610 - RNA, 19 nt, Artificial Sequence
  Description of Artificial Sequence: Synthetic oligonucleotide
auauugcccaagagggacu

SEQ ID NO: 904611 - RNA, 19 nt, Artificial Sequence
  Description of Artificial Sequence: Synthetic oligonucleotide
cuguccgucagugauggaa

SEQ ID NO: 904612 - RNA, 19 nt, Artificial Sequence
  Description of Artificial Sequence: Synthetic oligonucleotide
cuucgaggucaacagaagu

SEQ ID NO: 904613 - RNA, 19 nt, Artificial Sequence
  Description of Artificial Sequence: Synthetic oligonucleotide
acucgucuacgggucuugg

SEQ ID NO: 904614 - RNA, 19 nt, Artificial Sequence
  Description of Artificial Sequence: Synthetic oligonucleotide
aagccguagcugacaccac

SEQ ID NO: 904615 - RNA, 19 nt, Artificial Sequence
  Description of Artificial Sequence: Synthetic oligonucleotide
cagccugcggacgacuggc

SEQ ID NO: 904616 - RNA, 19 nt, Artificial Sequence
  Description of Artificial Sequence: Synthetic oligonucleotide
acgacaacuccaacauugu

SEQ ID NO: 904617 - RNA, 19 nt, Artificial Sequence
  Description of Artificial Sequence: Synthetic oligonucleotide
uucccgcacugagauucgg

SEQ ID NO: 904618 - RNA, 19 nt, Artificial Sequence
  Description of Artificial Sequence: Synthetic oligonucleotide
cguagcugacaccacaaug

SEQ ID NO: 904619 - RNA, 19 nt, Artificial Sequence
  Description of Artificial Sequence: Synthetic oligonucleotide
gucagacgcacaccacgac

SEQ ID NO: 904620 - RNA, 19 nt, Artificial Sequence
  Description of Artificial Sequence: Synthetic oligonucleotide
gccuggguuucuaugacug

SEQ ID NO: 904621 - RNA, 19 nt, Artificial Sequence
  Description of Artificial Sequence: Synthetic oligonucleotide
auggcauuaccaagggcau

SEQ ID NO: 904622 - RNA, 19 nt, Artificial Sequence
  Description of Artificial Sequence: Synthetic oligonucleotide
aggcuauccacagccuuga

SEQ ID NO: 904623 - RNA, 19 nt, Artificial Sequence
  Description of Artificial Sequence: Synthetic oligonucleotide
gcauagauaacagccaccu

SEQ ID NO: 904624 - RNA, 19 nt, Artificial Sequence
  Description of Artificial Sequence: Synthetic oligonucleotide
agcauccucgcagcuucuc

SEQ ID NO: 904625 - RNA, 19 nt, Artificial Sequence
  Description of Artificial Sequence: Synthetic oligonucleotide
gggagaguacuguccuugc

SEQ ID NO: 904626 - RNA, 19 nt, Artificial Sequence
  Description of Artificial Sequence: Synthetic oligonucleotide
acguuucugguugaugauu

SEQ ID NO: 904627 - RNA, 19 nt, Artificial Sequence
  Description of Artificial Sequence: Synthetic oligonucleotide
uggagauuucuugcaccaa

SEQ ID NO: 904628 - RNA, 19 nt, Artificial Sequence
  Description of Artificial Sequence: Synthetic oligonucleotide
cacgcccagucucuucgag

SEQ ID NO: 904629 - RNA, 19 nt, Artificial Sequence
  Description of Artificial Sequence: Synthetic oligonucleotide
cagugccagucuucugaag

SEQ ID NO: 904630 - RNA, 19 nt, Artificial Sequence
  Description of Artificial Sequence: Synthetic oligonucleotide
ccuggguuucuaugacugg

SEQ ID NO: 904631 - RNA, 19 nt, Artificial Sequence
  Description of Artificial Sequence: Synthetic oligonucleotide
auuggacccuucccaucaa

SEQ ID NO: 904632 - RNA, 19 nt, Artificial Sequence
  Description of Artificial Sequence: Synthetic oligonucleotide
guucccgcacugagauucg

SEQ ID NO: 904633 - RNA, 19 nt, Artificial Sequence
  Description of Artificial Sequence: Synthetic oligonucleotide
agauccgacacgggacaca

SEQ ID NO: 904634 - RNA, 19 nt, Artificial Sequence
  Description of Artificial Sequence: Synthetic oligonucleotide
gcagauccgacacgggaca

SEQ ID NO: 904635 - RNA, 19 nt, Artificial Sequence
  Description of Artificial Sequence: Synthetic oligonucleotide
acacaauacggaacuuuua

SEQ ID NO: 904636 - RNA, 19 nt, Artificial Sequence
  Description of Artificial Sequence: Synthetic oligonucleotide
ucuuuucgucagucccauc

SEQ ID NO: 904637 - RNA, 19 nt, Artificial Sequence
  Description of Artificial Sequence: Synthetic oligonucleotide
cagcaaccucccgauacug

SEQ ID NO: 904638 - RNA, 19 nt, Artificial Sequence
  Description of Artificial Sequence: Synthetic oligonucleotide
acauggauucaaagggcuu

SEQ ID NO: 904639 - RNA, 19 nt, Artificial Sequence
  Description of Artificial Sequence: Synthetic oligonucleotide
agccccucacaccugcaua

SEQ ID NO: 904640 - RNA, 19 nt, Artificial Sequence
  Description of Artificial Sequence: Synthetic oligonucleotide
cggucagacgcacaccacg

SEQ ID NO: 904641 - RNA, 19 nt, Artificial Sequence
  Description of Artificial Sequence: Synthetic oligonucleotide
aggauaggccucacgccca

SEQ ID NO: 904642 - RNA, 19 nt, Artificial Sequence
  Description of Artificial Sequence: Synthetic oligonucleotide
uggcauuaccaagggcauc

SEQ ID NO: 904643 - RNA, 19 nt, Artificial Sequence
  Description of Artificial Sequence: Synthetic oligonucleotide
gaguacuguccuugcuuua

SEQ ID NO: 904644 - RNA, 19 nt, Artificial Sequence
  Description of Artificial Sequence: Synthetic oligonucleotide
ggauaggccucacgcccag

SEQ ID NO: 904645 - RNA, 19 nt, Artificial Sequence
  Description of Artificial Sequence: Synthetic oligonucleotide
gggcggaugccuuuauaga

SEQ ID NO: 904646 - RNA, 19 nt, Artificial Sequence
  Description of Artificial Sequence: Synthetic oligonucleotide
cgacucaagagcuguugag

SEQ ID NO: 904647 - RNA, 19 nt, Artificial Sequence
  Description of Artificial Sequence: Synthetic oligonucleotide
gaccagucccgcccgucga

SEQ ID NO: 904648 - RNA, 19 nt, Artificial Sequence
  Description of Artificial Sequence: Synthetic oligonucleotide
cucgucuacgggucuugga

SEQ ID NO: 904649 - RNA, 19 nt, Artificial Sequence
  Description of Artificial Sequence: Synthetic oligonucleotide
gucccgcccgucgagggag

SEQ ID NO: 904650 - RNA, 19 nt, Artificial Sequence
  Description of Artificial Sequence: Synthetic oligonucleotide
aagacacgcccagucucuu

SEQ ID NO: 904651 - RNA, 19 nt, Artificial Sequence
  Description of Artificial Sequence: Synthetic oligonucleotide
ccaagaagaucuguccguc

SEQ ID NO: 904652 - RNA, 19 nt, Artificial Sequence
  Description of Artificial Sequence: Synthetic oligonucleotide
augggagaguacuguccuu

SEQ ID NO: 904653 - RNA, 19 nt, Artificial Sequence
  Description of Artificial Sequence: Synthetic oligonucleotide
ucacgcugaccacgaccaa

SEQ ID NO: 904654 - RNA, 19 nt, Artificial Sequence
  Description of Artificial Sequence: Synthetic oligonucleotide
agucccgcccgucgaggga

SEQ ID NO: 904655 - RNA, 19 nt, Artificial Sequence
  Description of Artificial Sequence: Synthetic oligonucleotide
caucuggcgguaagccaca

SEQ ID NO: 904656 - RNA, 19 nt, Artificial Sequence
  Description of Artificial Sequence: Synthetic oligonucleotide
ggucagacgcacaccacga

SEQ ID NO: 904657 - RNA, 19 nt, Artificial Sequence
  Description of Artificial Sequence: Synthetic oligonucleotide
acgcugaccacgaccaauu

SEQ ID NO: 904658 - RNA, 19 nt, Artificial Sequence
  Description of Artificial Sequence: Synthetic oligonucleotide
auaaaucgucguagaugau

SEQ ID NO: 904659 - RNA, 19 nt, Artificial Sequence
  Description of Artificial Sequence: Synthetic oligonucleotide
caauagccaugggagagua

SEQ ID NO: 904660 - RNA, 19 nt, Artificial Sequence
  Description of Artificial Sequence: Synthetic oligonucleotide
ggcgacaguggaccguuuc

SEQ ID NO: 904661 - RNA, 19 nt, Artificial Sequence
  Description of Artificial Sequence: Synthetic oligonucleotide
cacucgucuacgggucuug

SEQ ID NO: 904662 - RNA, 19 nt, Artificial Sequence
  Description of Artificial Sequence: Synthetic oligonucleotide
cgggucuuggaaccaauug

SEQ ID NO: 904663 - RNA, 19 nt, Artificial Sequence
  Description of Artificial Sequence: Synthetic oligonucleotide
acgggccacggccgcggcg

SEQ ID NO: 904664 - RNA, 19 nt, Artificial Sequence
  Description of Artificial Sequence: Synthetic oligonucleotide
ggagcugauuucaccagaa

SEQ ID NO: 904665 - RNA, 19 nt, Artificial Sequence
  Description of Artificial Sequence: Synthetic oligonucleotide
gccaacuggaacguccaca

SEQ ID NO: 904666 - RNA, 19 nt, Artificial Sequence
  Description of Artificial Sequence: Synthetic oligonucleotide
augguaccagccaccugcu

SEQ ID NO: 904667 - RNA, 19 nt, Artificial Sequence
  Description of Artificial Sequence: Synthetic oligonucleotide
ucuguccgucagugaugga

SEQ ID NO: 904668 - RNA, 19 nt, Artificial Sequence
  Description of Artificial Sequence: Synthetic oligonucleotide
acagcgacaucuggcggua

SEQ ID NO: 904669 - RNA, 19 nt, Artificial Sequence
  Description of Artificial Sequence: Synthetic oligonucleotide
cagauccgacacgggacac

SEQ ID NO: 904670 - RNA, 19 nt, Artificial Sequence
  Description of Artificial Sequence: Synthetic oligonucleotide
caauaccaucaccaaugcu

SEQ ID NO: 904671 - RNA, 19 nt, Artificial Sequence
  Description of Artificial Sequence: Synthetic oligonucleotide
cgacacgggacacagacaa

SEQ ID NO: 904672 - RNA, 19 nt, Artificial Sequence
  Description of Artificial Sequence: Synthetic oligonucleotide
cgucuacgggucuuggaac

SEQ ID NO: 904673 - RNA, 19 nt, Artificial Sequence
  Description of Artificial Sequence: Synthetic oligonucleotide
caauagcaaucgauguuuu

SEQ ID NO: 904674 - RNA, 19 nt, Artificial Sequence
  Description of Artificial Sequence: Synthetic oligonucleotide
ccgaacacgacaacuccaa

SEQ ID NO: 904675 - RNA, 19 nt, Artificial Sequence
  Description of Artificial Sequence: Synthetic oligonucleotide
ugguaccagccaccugcuu

SEQ ID NO: 904676 - RNA, 19 nt, Artificial Sequence
  Description of Artificial Sequence: Synthetic oligonucleotide
uggcacccguucucuucac

SEQ ID NO: 904677 - RNA, 19 nt, Artificial Sequence
  Description of Artificial Sequence: Synthetic oligonucleotide
gucgcauguuggaggcaug

SEQ ID NO: 904678 - RNA, 19 nt, Artificial Sequence
  Description of Artificial Sequence: Synthetic oligonucleotide
cugcggacgacuggcacaa

SEQ ID NO: 904679 - RNA, 19 nt, Artificial Sequence
  Description of Artificial Sequence: Synthetic oligonucleotide
cugagauucggggaaugau

SEQ ID NO: 904680 - RNA, 19 nt, Artificial Sequence
  Description of Artificial Sequence: Synthetic oligonucleotide
ggaguacgagagcaguccu

SEQ ID NO: 904681 - RNA, 19 nt, Artificial Sequence
  Description of Artificial Sequence: Synthetic oligonucleotide
cugacaccacaauggugua

SEQ ID NO: 904682 - RNA, 19 nt, Artificial Sequence
  Description of Artificial Sequence: Synthetic oligonucleotide
cggaugccuuuauagaaca

SEQ ID NO: 904683 - RNA, 19 nt, Artificial Sequence
  Description of Artificial Sequence: Synthetic oligonucleotide
cgaggucaacagaaguauc

SEQ ID NO: 904684 - RNA, 19 nt, Artificial Sequence
  Description of Artificial Sequence: Synthetic oligonucleotide
ggagaguacuguccuugcu

SEQ ID NO: 904685 - RNA, 19 nt, Artificial Sequence
  Description of Artificial Sequence: Synthetic oligonucleotide
gcggacgacuggcacaaaa

SEQ ID NO: 904686 - RNA, 19 nt, Artificial Sequence
  Description of Artificial Sequence: Synthetic oligonucleotide
gucggcgcagcaacagcga

SEQ ID NO: 904687 - RNA, 19 nt, Artificial Sequence
  Description of Artificial Sequence: Synthetic oligonucleotide
agcuccucgccaacuggaa

SEQ ID NO: 904688 - RNA, 19 nt, Artificial Sequence
  Description of Artificial Sequence: Synthetic oligonucleotide
acauacccuuuaagccuga

SEQ ID NO: 904689 - RNA, 19 nt, Artificial Sequence
  Description of Artificial Sequence: Synthetic oligonucleotide
cccgauacugagccagcuc

SEQ ID NO: 904690 - RNA, 19 nt, Artificial Sequence
  Description of Artificial Sequence: Synthetic oligonucleotide
acgggucuuggaaccaauu

SEQ ID NO: 904691 - RNA, 19 nt, Artificial Sequence
  Description of Artificial Sequence: Synthetic oligonucleotide
ugguucccgcacugagauu

SEQ ID NO: 904692 - RNA, 19 nt, Artificial Sequence
  Description of Artificial Sequence: Synthetic oligonucleotide
ccucacaccugcauagaua

SEQ ID NO: 904693 - RNA, 19 nt, Artificial Sequence
  Description of Artificial Sequence: Synthetic oligonucleotide
gcgguaagccacagccugc

SEQ ID NO: 904694 - RNA, 19 nt, Artificial Sequence
  Description of Artificial Sequence: Synthetic oligonucleotide
caacauugucagguuccaa

SEQ ID NO: 904695 - RNA, 19 nt, Artificial Sequence
  Description of Artificial Sequence: Synthetic oligonucleotide
ggaugaacccaaagcauuu

SEQ ID NO: 904696 - RNA, 19 nt, Artificial Sequence
  Description of Artificial Sequence: Synthetic oligonucleotide
ggcccacucgucuacgggu

SEQ ID NO: 904697 - RNA, 19 nt, Artificial Sequence
  Description of Artificial Sequence: Synthetic oligonucleotide
agccgagagugcagguaga

SEQ ID NO: 904698 - RNA, 19 nt, Artificial Sequence
  Description of Artificial Sequence: Synthetic oligonucleotide
cuacgggucuuggaaccaa

SEQ ID NO: 904699 - RNA, 19 nt, Artificial Sequence
  Description of Artificial Sequence: Synthetic oligonucleotide
gggcaauaccaucaccaau

SEQ ID NO: 904700 - RNA, 19 nt, Artificial Sequence
  Description of Artificial Sequence: Synthetic oligonucleotide
cugauuguuccgagauuuu

SEQ ID NO: 904701 - RNA, 19 nt, Artificial Sequence
  Description of Artificial Sequence: Synthetic oligonucleotide
gcagcaaccucccgauacu

SEQ ID NO: 904702 - RNA, 19 nt, Artificial Sequence
  Description of Artificial Sequence: Synthetic oligonucleotide
gccugcggacgacuggcac

SEQ ID NO: 904703 - RNA, 19 nt, Artificial Sequence
  Description of Artificial Sequence: Synthetic oligonucleotide
gcgacaguggaccguuucu

SEQ ID NO: 904704 - RNA, 19 nt, Artificial Sequence
  Description of Artificial Sequence: Synthetic oligonucleotide
gcgacgcgcacggacagca

SEQ ID NO: 904705 - RNA, 19 nt, Artificial Sequence
  Description of Artificial Sequence: Synthetic oligonucleotide
ccgagagugcagguagaac

SEQ ID NO: 904706 - RNA, 19 nt, Artificial Sequence
  Description of Artificial Sequence: Synthetic oligonucleotide
gaguacgagagcaguccuu

SEQ ID NO: 904707 - RNA, 19 nt, Artificial Sequence
  Description of Artificial Sequence: Synthetic oligonucleotide
guccgucagugauggaaau

SEQ ID NO: 904708 - RNA, 19 nt, Artificial Sequence
  Description of Artificial Sequence: Synthetic oligonucleotide
gguguacuucauggcaucu

SEQ ID NO: 904709 - RNA, 19 nt, Artificial Sequence
  Description of Artificial Sequence: Synthetic oligonucleotide
cacgaccaauuggcaccag

SEQ ID NO: 904710 - RNA, 19 nt, Artificial Sequence
  Description of Artificial Sequence: Synthetic oligonucleotide
ccgcacugagauucgggga

SEQ ID NO: 904711 - RNA, 19 nt, Artificial Sequence
  Description of Artificial Sequence: Synthetic oligonucleotide
ccgucgagggagggcacgg

SEQ ID NO: 904712 - RNA, 19 nt, Artificial Sequence
  Description of Artificial Sequence: Synthetic oligonucleotide
gcauugguucccgcacuga

SEQ ID NO: 904713 - RNA, 19 nt, Artificial Sequence
  Description of Artificial Sequence: Synthetic oligonucleotide
guacgagagcaguccuuuu

SEQ ID NO: 904714 - RNA, 19 nt, Artificial Sequence
  Description of Artificial Sequence: Synthetic oligonucleotide
cagggcggaugccuuuaua

SEQ ID NO: 904715 - RNA, 19 nt, Artificial Sequence
  Description of Artificial Sequence: Synthetic oligonucleotide
agccugcggacgacuggca

SEQ ID NO: 904716 - RNA, 19 nt, Artificial Sequence
  Description of Artificial Sequence: Synthetic oligonucleotide
gcccacucgucuacggguc

SEQ ID NO: 904717 - RNA, 19 nt, Artificial Sequence
  Description of Artificial Sequence: Synthetic oligonucleotide
cccgucgagggagggcacg

SEQ ID NO: 904718 - RNA, 19 nt, Artificial Sequence
  Description of Artificial Sequence: Synthetic oligonucleotide
caucaacuacacggcccaa

SEQ ID NO: 904719 - RNA, 19 nt, Artificial Sequence
  Description of Artificial Sequence: Synthetic oligonucleotide
gccgagagugcagguagaa

SEQ ID NO: 904720 - RNA, 19 nt, Artificial Sequence
  Description of Artificial Sequence: Synthetic oligonucleotide
ggaccguuucugaccaaua

SEQ ID NO: 904721 - RNA, 19 nt, Artificial Sequence
  Description of Artificial Sequence: Synthetic oligonucleotide
auccgacacgggacacaga

SEQ ID NO: 904722 - RNA, 19 nt, Artificial Sequence
  Description of Artificial Sequence: Synthetic oligonucleotide
gucacacaauacggaacuu

SEQ ID NO: 904723 - RNA, 19 nt, Artificial Sequence
  Description of Artificial Sequence: Synthetic oligonucleotide
guggaccguuucugaccaa

SEQ ID NO: 904724 - RNA, 19 nt, Artificial Sequence
  Description of Artificial Sequence: Synthetic oligonucleotide
gcggcgacgcgcacggaca

SEQ ID NO: 904725 - RNA, 19 nt, Artificial Sequence
  Description of Artificial Sequence: Synthetic oligonucleotide
cgcggcgacgcgcacggac

SEQ ID NO: 904726 - RNA, 19 nt, Artificial Sequence
  Description of Artificial Sequence: Synthetic oligonucleotide
ccacgaccaauuggcacca

SEQ ID NO: 904727 - RNA, 19 nt, Artificial Sequence
  Description of Artificial Sequence: Synthetic oligonucleotide
ggcgacgcgcacggacagc

SEQ ID NO: 904728 - RNA, 19 nt, Artificial Sequence
  Description of Artificial Sequence: Synthetic oligonucleotide
ggcccuagucugggcagca

SEQ ID NO: 904729 - RNA, 19 nt, Artificial Sequence
  Description of Artificial Sequence: Synthetic oligonucleotide
ccacaauggcacccguucu

SEQ ID NO: 904730 - RNA, 19 nt, Artificial Sequence
  Description of Artificial Sequence: Synthetic oligonucleotide
gcgcacggacagcauccuc

SEQ ID NO: 904731 - RNA, 19 nt, Artificial Sequence
  Description of Artificial Sequence: Synthetic oligonucleotide
ugcggacgacuggcacaaa

SEQ ID NO: 904732 - RNA, 19 nt, Artificial Sequence
  Description of Artificial Sequence: Synthetic oligonucleotide
cacagccugcuuggauaaa

SEQ ID NO: 904733 - RNA, 19 nt, Artificial Sequence
  Description of Artificial Sequence: Synthetic oligonucleotide
cggcgacgcgcacggacag

SEQ ID NO: 904734 - RNA, 19 nt, Artificial Sequence
  Description of Artificial Sequence: Synthetic oligonucleotide
cgccaacuggaacguccac

SEQ ID NO: 904735 - RNA, 19 nt, Artificial Sequence
  Description of Artificial Sequence: Synthetic oligonucleotide
ccucgccaacuggaacguc

SEQ ID NO: 904736 - RNA, 19 nt, Artificial Sequence
  Description of Artificial Sequence: Synthetic oligonucleotide
gggacuggugcuggcugau

SEQ ID NO: 904737 - RNA, 19 nt, Artificial Sequence
  Description of Artificial Sequence: Synthetic oligonucleotide
cagcgacaucuggcgguaa

SEQ ID NO: 904738 - RNA, 19 nt, Artificial Sequence
  Description of Artificial Sequence: Synthetic oligonucleotide
gcccauguacucgggcaau

SEQ ID NO: 904739 - RNA, 19 nt, Artificial Sequence
  Description of Artificial Sequence: Synthetic oligonucleotide
ccguagcugacaccacaau

SEQ ID NO: 904740 - RNA, 19 nt, Artificial Sequence
  Description of Artificial Sequence: Synthetic oligonucleotide
cccacucgucuacgggucu

SEQ ID NO: 904741 - RNA, 19 nt, Artificial Sequence
  Description of Artificial Sequence: Synthetic oligonucleotide
gcccgucgagggagggcac

SEQ ID NO: 904742 - RNA, 19 nt, Artificial Sequence
  Description of Artificial Sequence: Synthetic oligonucleotide
gcgcagcaacagcgacauc

SEQ ID NO: 904743 - RNA, 19 nt, Artificial Sequence
  Description of Artificial Sequence: Synthetic oligonucleotide
ccacucgucuacgggucuu

SEQ ID NO: 904744 - RNA, 19 nt, Artificial Sequence
  Description of Artificial Sequence: Synthetic oligonucleotide
cgcgcacggacagcauccu

SEQ ID NO: 904745 - RNA, 19 nt, Artificial Sequence
  Description of Artificial Sequence: Synthetic oligonucleotide
cgacgcgcacggacagcau

SEQ ID NO: 904746 - RNA, 19 nt, Artificial Sequence
  Description of Artificial Sequence: Synthetic oligonucleotide
uuaauuauuacguacaagg

SEQ ID NO: 904747 - RNA, 19 nt, Artificial Sequence
  Description of Artificial Sequence: Synthetic oligonucleotide
aauacuaugcuauucuagc

SEQ ID NO: 904748 - RNA, 19 nt, Artificial Sequence
  Description of Artificial Sequence: Synthetic oligonucleotide
aauauuuaaaccuuggccu

SEQ ID NO: 904749 - RNA, 19 nt, Artificial Sequence
  Description of Artificial Sequence: Synthetic oligonucleotide
uuuacuuccaguuaaaaca

SEQ ID NO: 904750 - RNA, 19 nt, Artificial Sequence
  Description of Artificial Sequence: Synthetic oligonucleotide
ucaacauuuaauuauuacg

SEQ ID NO: 904751 - RNA, 19 nt, Artificial Sequence
  Description of Artificial Sequence: Synthetic oligonucleotide
aacauuacuaaauuuaaca

SEQ ID NO: 904752 - RNA, 19 nt, Artificial Sequence
  Description of Artificial Sequence: Synthetic oligonucleotide
uaauauuuaaaccuuggcc

SEQ ID NO: 904753 - RNA, 19 nt, Artificial Sequence
  Description of Artificial Sequence: Synthetic oligonucleotide
aauuaguaagucuuuaaug

SEQ ID NO: 904754 - RNA, 19 nt, Artificial Sequence
  Description of Artificial Sequence: Synthetic oligonucleotide
uuaaauugcccaaugaaug

SEQ ID NO: 904755 - RNA, 19 nt, Artificial Sequence
  Description of Artificial Sequence: Synthetic oligonucleotide
aacauuggcauguaugaac

SEQ ID NO: 904756 - RNA, 19 nt, Artificial Sequence
  Description of Artificial Sequence: Synthetic oligonucleotide
auuccaaccaaaucaaggc

SEQ ID NO: 904757 - RNA, 19 nt, Artificial Sequence
  Description of Artificial Sequence: Synthetic oligonucleotide
gaacuuaacaucuacacac

SEQ ID NO: 904758 - RNA, 19 nt, Artificial Sequence
  Description of Artificial Sequence: Synthetic oligonucleotide
ucuacugaaaauauuugag

SEQ ID NO: 904759 - RNA, 19 nt, Artificial Sequence
  Description of Artificial Sequence: Synthetic oligonucleotide
ugagguaauauuuaaaccu

SEQ ID NO: 904760 - RNA, 19 nt, Artificial Sequence
  Description of Artificial Sequence: Synthetic oligonucleotide
aauaugagaaauaauguug

SEQ ID NO: 904761 - RNA, 19 nt, Artificial Sequence
  Description of Artificial Sequence: Synthetic oligonucleotide
aaaguaugaaguuugcuga

SEQ ID NO: 904762 - RNA, 19 nt, Artificial Sequence
  Description of Artificial Sequence: Synthetic oligonucleotide
auuaguaagucuuuaauga

SEQ ID NO: 904763 - RNA, 19 nt, Artificial Sequence
  Description of Artificial Sequence: Synthetic oligonucleotide
ugacauauguuuaauagca

SEQ ID NO: 904764 - RNA, 19 nt, Artificial Sequence
  Description of Artificial Sequence: Synthetic oligonucleotide
gaaaguaugaaguuugcug

SEQ ID NO: 904765 - RNA, 19 nt, Artificial Sequence
  Description of Artificial Sequence: Synthetic oligonucleotide
aaaccauggacacagacgu

SEQ ID NO: 904766 - RNA, 19 nt, Artificial Sequence
  Description of Artificial Sequence: Synthetic oligonucleotide
uguuaaacuauauaucuga

SEQ ID NO: 904767 - RNA, 19 nt, Artificial Sequence
  Description of Artificial Sequence: Synthetic oligonucleotide
uaaaaggcucuacacaugg

SEQ ID NO: 904768 - RNA, 19 nt, Artificial Sequence
  Description of Artificial Sequence: Synthetic oligonucleotide
auuauuacguacaaggaac

SEQ ID NO: 904769 - RNA, 19 nt, Artificial Sequence
  Description of Artificial Sequence: Synthetic oligonucleotide
acaauaaugauuuuauaga

SEQ ID NO: 904770 - RNA, 19 nt, Artificial Sequence
  Description of Artificial Sequence: Synthetic oligonucleotide
aaaguuaguauuuuaggau

SEQ ID NO: 904771 - RNA, 19 nt, Artificial Sequence
  Description of Artificial Sequence: Synthetic oligonucleotide
uaaaauacuaugcuauucu

SEQ ID NO: 904772 - RNA, 19 nt, Artificial Sequence
  Description of Artificial Sequence: Synthetic oligonucleotide
caugacauauguuuaauag

SEQ ID NO: 904773 - RNA, 19 nt, Artificial Sequence
  Description of Artificial Sequence: Synthetic oligonucleotide
uaaaccuuggccuuguaag

SEQ ID NO: 904774 - RNA, 19 nt, Artificial Sequence
  Description of Artificial Sequence: Synthetic oligonucleotide
aauuauuacguacaaggaa

SEQ ID NO: 904775 - RNA, 19 nt, Artificial Sequence
  Description of Artificial Sequence: Synthetic oligonucleotide
caaugaauguccaauaaag

SEQ ID NO: 904776 - RNA, 19 nt, Artificial Sequence
  Description of Artificial Sequence: Synthetic oligonucleotide
ucaauaugagaaauaaugu

SEQ ID NO: 904777 - RNA, 19 nt, Artificial Sequence
  Description of Artificial Sequence: Synthetic oligonucleotide
uucaucuaaaccauggaca

SEQ ID NO: 904778 - RNA, 19 nt, Artificial Sequence
  Description of Artificial Sequence: Synthetic oligonucleotide
uaugucuuagaacuuaaca

SEQ ID NO: 904779 - RNA, 19 nt, Artificial Sequence
  Description of Artificial Sequence: Synthetic oligonucleotide
uuauuuaaaccacugcuga

SEQ ID NO: 904780 - RNA, 19 nt, Artificial Sequence
  Description of Artificial Sequence: Synthetic oligonucleotide
cacugaaauacuuagguag

SEQ ID NO: 904781 - RNA, 19 nt, Artificial Sequence
  Description of Artificial Sequence: Synthetic oligonucleotide
ugcuauucuagcaauaaca

SEQ ID NO: 904782 - RNA, 19 nt, Artificial Sequence
  Description of Artificial Sequence: Synthetic oligonucleotide
aguaagucuuuaaugaugc

SEQ ID NO: 904783 - RNA, 19 nt, Artificial Sequence
  Description of Artificial Sequence: Synthetic oligonucleotide
aauuccaaccaaaucaagg

SEQ ID NO: 904784 - RNA, 19 nt, Artificial Sequence
  Description of Artificial Sequence: Synthetic oligonucleotide
uuagguagcaaaauauaug

SEQ ID NO: 904785 - RNA, 19 nt, Artificial Sequence
  Description of Artificial Sequence: Synthetic oligonucleotide
uuuguguccacugaaagcc

SEQ ID NO: 904786 - RNA, 19 nt, Artificial Sequence
  Description of Artificial Sequence: Synthetic oligonucleotide
uauuaaauugcccaaugaa

SEQ ID NO: 904787 - RNA, 19 nt, Artificial Sequence
  Description of Artificial Sequence: Synthetic oligonucleotide
auagauuuguccugacugc

SEQ ID NO: 904788 - RNA, 19 nt, Artificial Sequence
  Description of Artificial Sequence: Synthetic oligonucleotide
aaaccagagaccuguauug

SEQ ID NO: 904789 - RNA, 19 nt, Artificial Sequence
  Description of Artificial Sequence: Synthetic oligonucleotide
uacucuaaaauauuucuga

SEQ ID NO: 904790 - RNA, 19 nt, Artificial Sequence
  Description of Artificial Sequence: Synthetic oligonucleotide
auaagcaugacauauguuu

SEQ ID NO: 904791 - RNA, 19 nt, Artificial Sequence
  Description of Artificial Sequence: Synthetic oligonucleotide
aaaaucaacucuuccccag

SEQ ID NO: 904792 - RNA, 19 nt, Artificial Sequence
  Description of Artificial Sequence: Synthetic oligonucleotide
auauuuaauaagcaugaca

SEQ ID NO: 904793 - RNA, 19 nt, Artificial Sequence
  Description of Artificial Sequence: Synthetic oligonucleotide
uguaugaaccaccuguuug

SEQ ID NO: 904794 - RNA, 19 nt, Artificial Sequence
  Description of Artificial Sequence: Synthetic oligonucleotide
uccauacuaaaguaaggcg

SEQ ID NO: 904795 - RNA, 19 nt, Artificial Sequence
  Description of Artificial Sequence: Synthetic oligonucleotide
uuugcuuugcagcacuggg

SEQ ID NO: 904796 - RNA, 19 nt, Artificial Sequence
  Description of Artificial Sequence: Synthetic oligonucleotide
uaauaagcaugacauaugu

SEQ ID NO: 904797 - RNA, 19 nt, Artificial Sequence
  Description of Artificial Sequence: Synthetic oligonucleotide
ugaacggauuauuaaauug

SEQ ID NO: 904798 - RNA, 19 nt, Artificial Sequence
  Description of Artificial Sequence: Synthetic oligonucleotide
uguuugagcaaauguaaag

SEQ ID NO: 904799 - RNA, 19 nt, Artificial Sequence
  Description of Artificial Sequence: Synthetic oligonucleotide
uuacuuccaguuaaaacag

SEQ ID NO: 904800 - RNA, 19 nt, Artificial Sequence
  Description of Artificial Sequence: Synthetic oligonucleotide
aacggauuauuaaauugcc

SEQ ID NO: 904801 - RNA, 19 nt, Artificial Sequence
  Description of Artificial Sequence: Synthetic oligonucleotide
ucuuuauaagcuccuaaug

SEQ ID NO: 904802 - RNA, 19 nt, Artificial Sequence
  Description of Artificial Sequence: Synthetic oligonucleotide
caauguauuguuuuacuag

SEQ ID NO: 904803 - RNA, 19 nt, Artificial Sequence
  Description of Artificial Sequence: Synthetic oligonucleotide
aagccaauaagaaaugauc

SEQ ID NO: 904804 - RNA, 19 nt, Artificial Sequence
  Description of Artificial Sequence: Synthetic oligonucleotide
cacuauuucaucuaaacca

SEQ ID NO: 904805 - RNA, 19 nt, Artificial Sequence
  Description of Artificial Sequence: Synthetic oligonucleotide
ugcugaaugagguaauuag

SEQ ID NO: 904806 - RNA, 19 nt, Artificial Sequence
  Description of Artificial Sequence: Synthetic oligonucleotide
uuguaauggcaucaaauug

SEQ ID NO: 904807 - RNA, 19 nt, Artificial Sequence
  Description of Artificial Sequence: Synthetic oligonucleotide
cauacauaugggaucaagg

SEQ ID NO: 904808 - RNA, 19 nt, Artificial Sequence
  Description of Artificial Sequence: Synthetic oligonucleotide
agacuguuaaacuauauau

SEQ ID NO: 904809 - RNA, 19 nt, Artificial Sequence
  Description of Artificial Sequence: Synthetic oligonucleotide
uuuauaagcuccuaaugaa

SEQ ID NO: 904810 - RNA, 19 nt, Artificial Sequence
  Description of Artificial Sequence: Synthetic oligonucleotide
uguuuuacuagucggagau

SEQ ID NO: 904811 - RNA, 19 nt, Artificial Sequence
  Description of Artificial Sequence: Synthetic oligonucleotide
aguuccaguaauaaaaguc

SEQ ID NO: 904812 - RNA, 19 nt, Artificial Sequence
  Description of Artificial Sequence: Synthetic oligonucleotide
uaauuauuacguacaagga

SEQ ID NO: 904813 - RNA, 19 nt, Artificial Sequence
  Description of Artificial Sequence: Synthetic oligonucleotide
uuuagcuccauaaauuuua

SEQ ID NO: 904814 - RNA, 19 nt, Artificial Sequence
  Description of Artificial Sequence: Synthetic oligonucleotide
ucugaauaaggauugugga

SEQ ID NO: 904815 - RNA, 19 nt, Artificial Sequence
  Description of Artificial Sequence: Synthetic oligonucleotide
aauugcccaaugaaugucc

SEQ ID NO: 904816 - RNA, 19 nt, Artificial Sequence
  Description of Artificial Sequence: Synthetic oligonucleotide
aguuaaaacagaauaaagu

SEQ ID NO: 904817 - RNA, 19 nt, Artificial Sequence
  Description of Artificial Sequence: Synthetic oligonucleotide
uuacucuaaaauauuucug

SEQ ID NO: 904818 - RNA, 19 nt, Artificial Sequence
  Description of Artificial Sequence: Synthetic oligonucleotide
gauuguggaagccaauaag

SEQ ID NO: 904819 - RNA, 19 nt, Artificial Sequence
  Description of Artificial Sequence: Synthetic oligonucleotide
aauagcaacaauaaugauu

SEQ ID NO: 904820 - RNA, 19 nt, Artificial Sequence
  Description of Artificial Sequence: Synthetic oligonucleotide
ugucuuagaacuuaacauc

SEQ ID NO: 904821 - RNA, 19 nt, Artificial Sequence
  Description of Artificial Sequence: Synthetic oligonucleotide
aauucaagcaacauuacua

SEQ ID NO: 904822 - RNA, 19 nt, Artificial Sequence
  Description of Artificial Sequence: Synthetic oligonucleotide
uccuaaugaacaagaaaag

SEQ ID NO: 904823 - RNA, 19 nt, Artificial Sequence
  Description of Artificial Sequence: Synthetic oligonucleotide
uuaacaucuacacacuaua

SEQ ID NO: 904824 - RNA, 19 nt, Artificial Sequence
  Description of Artificial Sequence: Synthetic oligonucleotide
uguaagaaaugcugcuugg

SEQ ID NO: 904825 - RNA, 19 nt, Artificial Sequence
  Description of Artificial Sequence: Synthetic oligonucleotide
uaauuaguaagucuuuaau

SEQ ID NO: 904826 - RNA, 19 nt, Artificial Sequence
  Description of Artificial Sequence: Synthetic oligonucleotide
aaauacuaugcuauucuag

SEQ ID NO: 904827 - RNA, 19 nt, Artificial Sequence
  Description of Artificial Sequence: Synthetic oligonucleotide
aaaguaaggcgcugagggg

SEQ ID NO: 904828 - RNA, 19 nt, Artificial Sequence
  Description of Artificial Sequence: Synthetic oligonucleotide
aaguuaguauuuuaggauu

SEQ ID NO: 904829 - RNA, 19 nt, Artificial Sequence
  Description of Artificial Sequence: Synthetic oligonucleotide
uauuguuuuacuagucgga

SEQ ID NO: 904830 - RNA, 19 nt, Artificial Sequence
  Description of Artificial Sequence: Synthetic oligonucleotide
uuuguaauggcaucaaauu

SEQ ID NO: 904831 - RNA, 19 nt, Artificial Sequence
  Description of Artificial Sequence: Synthetic oligonucleotide
ugaaguuguaagaaaugcu

SEQ ID NO: 904832 - RNA, 19 nt, Artificial Sequence
  Description of Artificial Sequence: Synthetic oligonucleotide
aaaguuccaguaauaaaag

SEQ ID NO: 904833 - RNA, 19 nt, Artificial Sequence
  Description of Artificial Sequence: Synthetic oligonucleotide
ucagacauacauaugggau

SEQ ID NO: 904834 - RNA, 19 nt, Artificial Sequence
  Description of Artificial Sequence: Synthetic oligonucleotide
ucaucuaaaccauggacac

SEQ ID NO: 904835 - RNA, 19 nt, Artificial Sequence
  Description of Artificial Sequence: Synthetic oligonucleotide
augucuuagaacuuaacau

SEQ ID NO: 904836 - RNA, 19 nt, Artificial Sequence
  Description of Artificial Sequence: Synthetic oligonucleotide
uuauaagcuccuaaugaac

SEQ ID NO: 904837 - RNA, 19 nt, Artificial Sequence
  Description of Artificial Sequence: Synthetic oligonucleotide
gaacggauuauuaaauugc

SEQ ID NO: 904838 - RNA, 19 nt, Artificial Sequence
  Description of Artificial Sequence: Synthetic oligonucleotide
ugugauguagucugaauaa

SEQ ID NO: 904839 - RNA, 19 nt, Artificial Sequence
  Description of Artificial Sequence: Synthetic oligonucleotide
uuccauacuaaaguaaggc

SEQ ID NO: 904840 - RNA, 19 nt, Artificial Sequence
  Description of Artificial Sequence: Synthetic oligonucleotide
aucuaaaccauggacacag

SEQ ID NO: 904841 - RNA, 19 nt, Artificial Sequence
  Description of Artificial Sequence: Synthetic oligonucleotide
acauuacuaaauuuaacaa

SEQ ID NO: 904842 - RNA, 19 nt, Artificial Sequence
  Description of Artificial Sequence: Synthetic oligonucleotide
ugcauuaaugacauuguau

SEQ ID NO: 904843 - RNA, 19 nt, Artificial Sequence
  Description of Artificial Sequence: Synthetic oligonucleotide
uuuuacuagucggagaucu

SEQ ID NO: 904844 - RNA, 19 nt, Artificial Sequence
  Description of Artificial Sequence: Synthetic oligonucleotide
caucuacacacuauaauac

SEQ ID NO: 904845 - RNA, 19 nt, Artificial Sequence
  Description of Artificial Sequence: Synthetic oligonucleotide
uacuuagguagcaaaauau

SEQ ID NO: 904846 - RNA, 19 nt, Artificial Sequence
  Description of Artificial Sequence: Synthetic oligonucleotide
acauuggcauguaugaacc

SEQ ID NO: 904847 - RNA, 19 nt, Artificial Sequence
  Description of Artificial Sequence: Synthetic oligonucleotide
cuuuauaagcuccuaauga

SEQ ID NO: 904848 - RNA, 19 nt, Artificial Sequence
  Description of Artificial Sequence: Synthetic oligonucleotide
uguugaaauuaccaguaaa

SEQ ID NO: 904849 - RNA, 19 nt, Artificial Sequence
  Description of Artificial Sequence: Synthetic oligonucleotide
uugggcaaugcauuaauga

SEQ ID NO: 904850 - RNA, 19 nt, Artificial Sequence
  Description of Artificial Sequence: Synthetic oligonucleotide
uaaauugcccaaugaaugu

SEQ ID NO: 904851 - RNA, 19 nt, Artificial Sequence
  Description of Artificial Sequence: Synthetic oligonucleotide
cauuuaauuauuacguaca

SEQ ID NO: 904852 - RNA, 19 nt, Artificial Sequence
  Description of Artificial Sequence: Synthetic oligonucleotide
uguaucugaccaaauuaca

SEQ ID NO: 904853 - RNA, 19 nt, Artificial Sequence
  Description of Artificial Sequence: Synthetic oligonucleotide
aaaaggcggucagucaugc

SEQ ID NO: 904854 - RNA, 19 nt, Artificial Sequence
  Description of Artificial Sequence: Synthetic oligonucleotide
uauuuaccaccacaaggag

SEQ ID NO: 904855 - RNA, 19 nt, Artificial Sequence
  Description of Artificial Sequence: Synthetic oligonucleotide
auauuugagggcagcaacc

SEQ ID NO: 904856 - RNA, 19 nt, Artificial Sequence
  Description of Artificial Sequence: Synthetic oligonucleotide
cuuagaacuuaacaucuac

SEQ ID NO: 904857 - RNA, 19 nt, Artificial Sequence
  Description of Artificial Sequence: Synthetic oligonucleotide
acagccuuuaaugugaugu

SEQ ID NO: 904858 - RNA, 19 nt, Artificial Sequence
  Description of Artificial Sequence: Synthetic oligonucleotide
aauacuuagguagcaaaau

SEQ ID NO: 904859 - RNA, 19 nt, Artificial Sequence
  Description of Artificial Sequence: Synthetic oligonucleotide
aaaauacuaugcuauucua

SEQ ID NO: 904860 - RNA, 19 nt, Artificial Sequence
  Description of Artificial Sequence: Synthetic oligonucleotide
uuaaacuauauaucugaau

SEQ ID NO: 904861 - RNA, 19 nt, Artificial Sequence
  Description of Artificial Sequence: Synthetic oligonucleotide
aaauauugcacagccacau

SEQ ID NO: 904862 - RNA, 19 nt, Artificial Sequence
  Description of Artificial Sequence: Synthetic oligonucleotide
uuauuacguacaaggaacu

SEQ ID NO: 904863 - RNA, 19 nt, Artificial Sequence
  Description of Artificial Sequence: Synthetic oligonucleotide
cuugguugcuuuguaaugg

SEQ ID NO: 904864 - RNA, 19 nt, Artificial Sequence
  Description of Artificial Sequence: Synthetic oligonucleotide
uugcauaaaccagagaccu

SEQ ID NO: 904865 - RNA, 19 nt, Artificial Sequence
  Description of Artificial Sequence: Synthetic oligonucleotide
uugacgagagcacugcugu

SEQ ID NO: 904866 - RNA, 19 nt, Artificial Sequence
  Description of Artificial Sequence: Synthetic oligonucleotide
aggguuaaagaacugcugu

SEQ ID NO: 904867 - RNA, 19 nt, Artificial Sequence
  Description of Artificial Sequence: Synthetic oligonucleotide
uacuaugcuauucuagcaa

SEQ ID NO: 904868 - RNA, 19 nt, Artificial Sequence
  Description of Artificial Sequence: Synthetic oligonucleotide
uuaaaaggcucuacacaug

SEQ ID NO: 904869 - RNA, 19 nt, Artificial Sequence
  Description of Artificial Sequence: Synthetic oligonucleotide
uuaaagaacugcugugaga

SEQ ID NO: 904870 - RNA, 19 nt, Artificial Sequence
  Description of Artificial Sequence: Synthetic oligonucleotide
aaugcauuaaugacauugu

SEQ ID NO: 904871 - RNA, 19 nt, Artificial Sequence
  Description of Artificial Sequence: Synthetic oligonucleotide
uggugaauuuucauaccag

SEQ ID NO: 904872 - RNA, 19 nt, Artificial Sequence
  Description of Artificial Sequence: Synthetic oligonucleotide
aguauuguguaugucuguc

SEQ ID NO: 904873 - RNA, 19 nt, Artificial Sequence
  Description of Artificial Sequence: Synthetic oligonucleotide
ugggcaaugcauuaaugac

SEQ ID NO: 904874 - RNA, 19 nt, Artificial Sequence
  Description of Artificial Sequence: Synthetic oligonucleotide
gcauuaaugacauuguauc

SEQ ID NO: 904875 - RNA, 19 nt, Artificial Sequence
  Description of Artificial Sequence: Synthetic oligonucleotide
gcugugagaaaauucaagc

SEQ ID NO: 904876 - RNA, 19 nt, Artificial Sequence
  Description of Artificial Sequence: Synthetic oligonucleotide
uuugagcaaauguaaaguu

SEQ ID NO: 904877 - RNA, 19 nt, Artificial Sequence
  Description of Artificial Sequence: Synthetic oligonucleotide
uuaguaagucuuuaaugau

SEQ ID NO: 904878 - RNA, 19 nt, Artificial Sequence
  Description of Artificial Sequence: Synthetic oligonucleotide
acuaaaguaaggcgcugag

SEQ ID NO: 904879 - RNA, 19 nt, Artificial Sequence
  Description of Artificial Sequence: Synthetic oligonucleotide
gaaauacuuagguagcaaa

SEQ ID NO: 904880 - RNA, 19 nt, Artificial Sequence
  Description of Artificial Sequence: Synthetic oligonucleotide
auuaaauugcccaaugaau

SEQ ID NO: 904881 - RNA, 19 nt, Artificial Sequence
  Description of Artificial Sequence: Synthetic oligonucleotide
agucaugcagucaaaauca

SEQ ID NO: 904882 - RNA, 19 nt, Artificial Sequence
  Description of Artificial Sequence: Synthetic oligonucleotide
caauaaugauuuuauagaa

SEQ ID NO: 904883 - RNA, 19 nt, Artificial Sequence
  Description of Artificial Sequence: Synthetic oligonucleotide
augcuauucuagcaauaac

SEQ ID NO: 904884 - RNA, 19 nt, Artificial Sequence
  Description of Artificial Sequence: Synthetic oligonucleotide
uuacguacaaggaacucua

SEQ ID NO: 904885 - RNA, 19 nt, Artificial Sequence
  Description of Artificial Sequence: Synthetic oligonucleotide
cagucaugcagucaaaauc

SEQ ID NO: 904886 - RNA, 19 nt, Artificial Sequence
  Description of Artificial Sequence: Synthetic oligonucleotide
ugggaucaagguuucacug

SEQ ID NO: 904887 - RNA, 19 nt, Artificial Sequence
  Description of Artificial Sequence: Synthetic oligonucleotide
auuguguaugucugucuuc

SEQ ID NO: 904888 - RNA, 19 nt, Artificial Sequence
  Description of Artificial Sequence: Synthetic oligonucleotide
uuaaguugcuucaacucuu

SEQ ID NO: 904889 - RNA, 19 nt, Artificial Sequence
  Description of Artificial Sequence: Synthetic oligonucleotide
auauaucugaauauacugu

SEQ ID NO: 904890 - RNA, 19 nt, Artificial Sequence
  Description of Artificial Sequence: Synthetic oligonucleotide
uuguggaagccaauaagaa

SEQ ID NO: 904891 - RNA, 19 nt, Artificial Sequence
  Description of Artificial Sequence: Synthetic oligonucleotide
uacauaugggaucaagguu

SEQ ID NO: 904892 - RNA, 19 nt, Artificial Sequence
  Description of Artificial Sequence: Synthetic oligonucleotide
caaaaucagcaaaaguauc

SEQ ID NO: 904893 - RNA, 19 nt, Artificial Sequence
  Description of Artificial Sequence: Synthetic oligonucleotide
uaagaaaugcugcuugguu

SEQ ID NO: 904894 - RNA, 19 nt, Artificial Sequence
  Description of Artificial Sequence: Synthetic oligonucleotide
auuacguacaaggaacucu

SEQ ID NO: 904895 - RNA, 19 nt, Artificial Sequence
  Description of Artificial Sequence: Synthetic oligonucleotide
auuguggaagccaauaaga

SEQ ID NO: 904896 - RNA, 19 nt, Artificial Sequence
  Description of Artificial Sequence: Synthetic oligonucleotide
uagagugugccaaggugag

SEQ ID NO: 904897 - RNA, 19 nt, Artificial Sequence
  Description of Artificial Sequence: Synthetic oligonucleotide
aaguaaggcgcugaggggu

SEQ ID NO: 904898 - RNA, 19 nt, Artificial Sequence
  Description of Artificial Sequence: Synthetic oligonucleotide
guuccaguaauaaaaguca

SEQ ID NO: 904899 - RNA, 19 nt, Artificial Sequence
  Description of Artificial Sequence: Synthetic oligonucleotide
ugugcagcucucccgauga

SEQ ID NO: 904900 - RNA, 19 nt, Artificial Sequence
  Description of Artificial Sequence: Synthetic oligonucleotide
acuagucggagaucugcac

SEQ ID NO: 904901 - RNA, 19 nt, Artificial Sequence
  Description of Artificial Sequence: Synthetic oligonucleotide
agcgaaucagccguguugg

SEQ ID NO: 904902 - RNA, 19 nt, Artificial Sequence
  Description of Artificial Sequence: Synthetic oligonucleotide
uaagcuccuaaugaacaag

SEQ ID NO: 904903 - RNA, 19 nt, Artificial Sequence
  Description of Artificial Sequence: Synthetic oligonucleotide
agcuuaaguugcuucaacu

SEQ ID NO: 904904 - RNA, 19 nt, Artificial Sequence
  Description of Artificial Sequence: Synthetic oligonucleotide
uaugcuauucuagcaauaa

SEQ ID NO: 904905 - RNA, 19 nt, Artificial Sequence
  Description of Artificial Sequence: Synthetic oligonucleotide
auacuaugcuauucuagca

SEQ ID NO: 904906 - RNA, 19 nt, Artificial Sequence
  Description of Artificial Sequence: Synthetic oligonucleotide
aauguaaaguuaguauuuu

SEQ ID NO: 904907 - RNA, 19 nt, Artificial Sequence
  Description of Artificial Sequence: Synthetic oligonucleotide
agccaauaagaaaugauca

SEQ ID NO: 904908 - RNA, 19 nt, Artificial Sequence
  Description of Artificial Sequence: Synthetic oligonucleotide
agguauaaauaugucuuag

SEQ ID NO: 904909 - RNA, 19 nt, Artificial Sequence
  Description of Artificial Sequence: Synthetic oligonucleotide
acggauuauuaaauugccc

SEQ ID NO: 904910 - RNA, 19 nt, Artificial Sequence
  Description of Artificial Sequence: Synthetic oligonucleotide
cagacauacauaugggauc

SEQ ID NO: 904911 - RNA, 19 nt, Artificial Sequence
  Description of Artificial Sequence: Synthetic oligonucleotide
cauuaccuagaaaguaaag

SEQ ID NO: 904912 - RNA, 19 nt, Artificial Sequence
  Description of Artificial Sequence: Synthetic oligonucleotide
caaacaaccagaaguacaa

SEQ ID NO: 904913 - RNA, 19 nt, Artificial Sequence
  Description of Artificial Sequence: Synthetic oligonucleotide
ugaaagccccaaauuagaa

SEQ ID NO: 904914 - RNA, 19 nt, Artificial Sequence
  Description of Artificial Sequence: Synthetic oligonucleotide
ucugcacuauuucaucuaa

SEQ ID NO: 904915 - RNA, 19 nt, Artificial Sequence
  Description of Artificial Sequence: Synthetic oligonucleotide
aguaugaaguuugcugagg

SEQ ID NO: 904916 - RNA, 19 nt, Artificial Sequence
  Description of Artificial Sequence: Synthetic oligonucleotide
aagcaugacauauguuuaa

SEQ ID NO: 904917 - RNA, 19 nt, Artificial Sequence
  Description of Artificial Sequence: Synthetic oligonucleotide
augugauguagucugaaua

SEQ ID NO: 904918 - RNA, 19 nt, Artificial Sequence
  Description of Artificial Sequence: Synthetic oligonucleotide
gaaaaucaacucuucccca

SEQ ID NO: 904919 - RNA, 19 nt, Artificial Sequence
  Description of Artificial Sequence: Synthetic oligonucleotide
uugcacagccacauuaccu

SEQ ID NO: 904920 - RNA, 19 nt, Artificial Sequence
  Description of Artificial Sequence: Synthetic oligonucleotide
uaacaucuacacacuauaa

SEQ ID NO: 904921 - RNA, 19 nt, Artificial Sequence
  Description of Artificial Sequence: Synthetic oligonucleotide
guaugaaccaccuguuuga

SEQ ID NO: 904922 - RNA, 19 nt, Artificial Sequence
  Description of Artificial Sequence: Synthetic oligonucleotide
acgucgucuucuuccauac

SEQ ID NO: 904923 - RNA, 19 nt, Artificial Sequence
  Description of Artificial Sequence: Synthetic oligonucleotide
uauuuaaaccacugcugaa

SEQ ID NO: 904924 - RNA, 19 nt, Artificial Sequence
  Description of Artificial Sequence: Synthetic oligonucleotide
auuuaaaccacugcugaau

SEQ ID NO: 904925 - RNA, 19 nt, Artificial Sequence
  Description of Artificial Sequence: Synthetic oligonucleotide
aggcucuacacauggauga

SEQ ID NO: 904926 - RNA, 19 nt, Artificial Sequence
  Description of Artificial Sequence: Synthetic oligonucleotide
aaauacauuuuagcagcca

SEQ ID NO: 904927 - RNA, 19 nt, Artificial Sequence
  Description of Artificial Sequence: Synthetic oligonucleotide
auauuuaaaccuuggccuu

SEQ ID NO: 904928 - RNA, 19 nt, Artificial Sequence
  Description of Artificial Sequence: Synthetic oligonucleotide
cuaaugaacaagaaaaguu

SEQ ID NO: 904929 - RNA, 19 nt, Artificial Sequence
  Description of Artificial Sequence: Synthetic oligonucleotide
auccaaaaggcggucaguc

SEQ ID NO: 904930 - RNA, 19 nt, Artificial Sequence
  Description of Artificial Sequence: Synthetic oligonucleotide
aguuguggaucauuucuga

SEQ ID NO: 904931 - RNA, 19 nt, Artificial Sequence
  Description of Artificial Sequence: Synthetic oligonucleotide
uuaaaacauuggcauguau

SEQ ID NO: 904932 - RNA, 19 nt, Artificial Sequence
  Description of Artificial Sequence: Synthetic oligonucleotide
gaagugaaguuguaagaaa

SEQ ID NO: 904933 - RNA, 19 nt, Artificial Sequence
  Description of Artificial Sequence: Synthetic oligonucleotide
aaauuccaaccaaaucaag

SEQ ID NO: 904934 - RNA, 19 nt, Artificial Sequence
  Description of Artificial Sequence: Synthetic oligonucleotide
agacauacauaugggauca

SEQ ID NO: 904935 - RNA, 19 nt, Artificial Sequence
  Description of Artificial Sequence: Synthetic oligonucleotide
acuaugcuauucuagcaau

SEQ ID NO: 904936 - RNA, 19 nt, Artificial Sequence
  Description of Artificial Sequence: Synthetic oligonucleotide
auacuuagguagcaaaaua

SEQ ID NO: 904937 - RNA, 19 nt, Artificial Sequence
  Description of Artificial Sequence: Synthetic oligonucleotide
caaaucaaggcagagggca

SEQ ID NO: 904938 - RNA, 19 nt, Artificial Sequence
  Description of Artificial Sequence: Synthetic oligonucleotide
aaggguuaaagaacugcug

SEQ ID NO: 904939 - RNA, 19 nt, Artificial Sequence
  Description of Artificial Sequence: Synthetic oligonucleotide
ucuagcaauaacagccuuu

SEQ ID NO: 904940 - RNA, 19 nt, Artificial Sequence
  Description of Artificial Sequence: Synthetic oligonucleotide
gagcgaaucagccguguug

SEQ ID NO: 904941 - RNA, 19 nt, Artificial Sequence
  Description of Artificial Sequence: Synthetic oligonucleotide
aaaccacugcugaaugagg

SEQ ID NO: 904942 - RNA, 19 nt, Artificial Sequence
  Description of Artificial Sequence: Synthetic oligonucleotide
uggaucauuucugaauaga

SEQ ID NO: 904943 - RNA, 19 nt, Artificial Sequence
  Description of Artificial Sequence: Synthetic oligonucleotide
uauuuaaaccuuggccuug

SEQ ID NO: 904944 - RNA, 19 nt, Artificial Sequence
  Description of Artificial Sequence: Synthetic oligonucleotide
aacuuacucuaaaauauuu

SEQ ID NO: 904945 - RNA, 19 nt, Artificial Sequence
  Description of Artificial Sequence: Synthetic oligonucleotide
acguacaaggaacucuaug

SEQ ID NO: 904946 - RNA, 19 nt, Artificial Sequence
  Description of Artificial Sequence: Synthetic oligonucleotide
cugugagaaaauucaagca

SEQ ID NO: 904947 - RNA, 19 nt, Artificial Sequence
  Description of Artificial Sequence: Synthetic oligonucleotide
gagacuguuaaacuauaua

SEQ ID NO: 904948 - RNA, 19 nt, Artificial Sequence
  Description of Artificial Sequence: Synthetic oligonucleotide
auugacuucuagaauauuu

SEQ ID NO: 904949 - RNA, 19 nt, Artificial Sequence
  Description of Artificial Sequence: Synthetic oligonucleotide
aguaucauucugguuucuc

SEQ ID NO: 904950 - RNA, 19 nt, Artificial Sequence
  Description of Artificial Sequence: Synthetic oligonucleotide
cuacacauggaugauauaa

SEQ ID NO: 904951 - RNA, 19 nt, Artificial Sequence
  Description of Artificial Sequence: Synthetic oligonucleotide
ugaaauacuuagguagcaa

SEQ ID NO: 904952 - RNA, 19 nt, Artificial Sequence
  Description of Artificial Sequence: Synthetic oligonucleotide
acauacauaugggaucaag

SEQ ID NO: 904953 - RNA, 19 nt, Artificial Sequence
  Description of Artificial Sequence: Synthetic oligonucleotide
augggaucaagguuucacu

SEQ ID NO: 904954 - RNA, 19 nt, Artificial Sequence
  Description of Artificial Sequence: Synthetic oligonucleotide
agugaaguuguaagaaaug

SEQ ID NO: 904955 - RNA, 19 nt, Artificial Sequence
  Description of Artificial Sequence: Synthetic oligonucleotide
ugagacuguuaaacuauau

SEQ ID NO: 904956 - RNA, 19 nt, Artificial Sequence
  Description of Artificial Sequence: Synthetic oligonucleotide
ucacugaaauacuuaggua

SEQ ID NO: 904957 - RNA, 19 nt, Artificial Sequence
  Description of Artificial Sequence: Synthetic oligonucleotide
aguaaaguugauguuuaaa

SEQ ID NO: 904958 - RNA, 19 nt, Artificial Sequence
  Description of Artificial Sequence: Synthetic oligonucleotide
auaagcuccuaaugaacaa

SEQ ID NO: 904959 - RNA, 19 nt, Artificial Sequence
  Description of Artificial Sequence: Synthetic oligonucleotide
aacuuaacaucuacacacu

SEQ ID NO: 904960 - RNA, 19 nt, Artificial Sequence
  Description of Artificial Sequence: Synthetic oligonucleotide
guugcuuuguaauggcauc

SEQ ID NO: 904961 - RNA, 19 nt, Artificial Sequence
  Description of Artificial Sequence: Synthetic oligonucleotide
ggaaagacaaacaaccaga

SEQ ID NO: 904962 - RNA, 19 nt, Artificial Sequence
  Description of Artificial Sequence: Synthetic oligonucleotide
cuaugugugcagcucuccc

SEQ ID NO: 904963 - RNA, 19 nt, Artificial Sequence
  Description of Artificial Sequence: Synthetic oligonucleotide
ugggcgaagcaaguugugg

SEQ ID NO: 904964 - RNA, 19 nt, Artificial Sequence
  Description of Artificial Sequence: Synthetic oligonucleotide
auaugucuuagaacuuaac

SEQ ID NO: 904965 - RNA, 19 nt, Artificial Sequence
  Description of Artificial Sequence: Synthetic oligonucleotide
agaaagagagaggaaagua

SEQ ID NO: 904966 - RNA, 19 nt, Artificial Sequence
  Description of Artificial Sequence: Synthetic oligonucleotide
cuauuucaucuaaaccaug

SEQ ID NO: 904967 - RNA, 19 nt, Artificial Sequence
  Description of Artificial Sequence: Synthetic oligonucleotide
ucggagaucugcacuauuu

SEQ ID NO: 904968 - RNA, 19 nt, Artificial Sequence
  Description of Artificial Sequence: Synthetic oligonucleotide
aagcuccuaaugaacaaga

SEQ ID NO: 904969 - RNA, 19 nt, Artificial Sequence
  Description of Artificial Sequence: Synthetic oligonucleotide
uggcauguaugaaccaccu

SEQ ID NO: 904970 - RNA, 19 nt, Artificial Sequence
  Description of Artificial Sequence: Synthetic oligonucleotide
ucgucuucuuccauacuaa

SEQ ID NO: 904971 - RNA, 19 nt, Artificial Sequence
  Description of Artificial Sequence: Synthetic oligonucleotide
gaauguccaauaaagcuua

SEQ ID NO: 904972 - RNA, 19 nt, Artificial Sequence
  Description of Artificial Sequence: Synthetic oligonucleotide
ugcauaaaccagagaccug

SEQ ID NO: 904973 - RNA, 19 nt, Artificial Sequence
  Description of Artificial Sequence: Synthetic oligonucleotide
aaacuuacucuaaaauauu

SEQ ID NO: 904974 - RNA, 19 nt, Artificial Sequence
  Description of Artificial Sequence: Synthetic oligonucleotide
uuguaagcacugaacggau

SEQ ID NO: 904975 - RNA, 19 nt, Artificial Sequence
  Description of Artificial Sequence: Synthetic oligonucleotide
guagagugugccaagguga

SEQ ID NO: 904976 - RNA, 19 nt, Artificial Sequence
  Description of Artificial Sequence: Synthetic oligonucleotide
agcaaauguaaaguuagua

SEQ ID NO: 904977 - RNA, 19 nt, Artificial Sequence
  Description of Artificial Sequence: Synthetic oligonucleotide
uacuaaaguaaggcgcuga

SEQ ID NO: 904978 - RNA, 19 nt, Artificial Sequence
  Description of Artificial Sequence: Synthetic oligonucleotide
gacgagagcacugcuguug

SEQ ID NO: 904979 - RNA, 19 nt, Artificial Sequence
  Description of Artificial Sequence: Synthetic oligonucleotide
agccuuuaaugugauguag

SEQ ID NO: 904980 - RNA, 19 nt, Artificial Sequence
  Description of Artificial Sequence: Synthetic oligonucleotide
uauugacgagagcacugcu

SEQ ID NO: 904981 - RNA, 19 nt, Artificial Sequence
  Description of Artificial Sequence: Synthetic oligonucleotide
guaauggcaucaaauugac

SEQ ID NO: 904982 - RNA, 19 nt, Artificial Sequence
  Description of Artificial Sequence: Synthetic oligonucleotide
agucugaauaaggauugug

SEQ ID NO: 904983 - RNA, 19 nt, Artificial Sequence
  Description of Artificial Sequence: Synthetic oligonucleotide
cuuaaguugcuucaacucu

SEQ ID NO: 904984 - RNA, 19 nt, Artificial Sequence
  Description of Artificial Sequence: Synthetic oligonucleotide
ccuuguaagcacugaacgg

SEQ ID NO: 904985 - RNA, 19 nt, Artificial Sequence
  Description of Artificial Sequence: Synthetic oligonucleotide
agucuuuaaugaugcuucu

SEQ ID NO: 904986 - RNA, 19 nt, Artificial Sequence
  Description of Artificial Sequence: Synthetic oligonucleotide
agaccuguauugacgagag

SEQ ID NO: 904987 - RNA, 19 nt, Artificial Sequence
  Description of Artificial Sequence: Synthetic oligonucleotide
ucauaccaggaaguugaag

SEQ ID NO: 904988 - RNA, 19 nt, Artificial Sequence
  Description of Artificial Sequence: Synthetic oligonucleotide
cauacuaaaguaaggcgcu

SEQ ID NO: 904989 - RNA, 19 nt, Artificial Sequence
  Description of Artificial Sequence: Synthetic oligonucleotide
aaacauuggcauguaugaa

SEQ ID NO: 904990 - RNA, 19 nt, Artificial Sequence
  Description of Artificial Sequence: Synthetic oligonucleotide
ugacauuguaucugaccaa

SEQ ID NO: 904991 - RNA, 19 nt, Artificial Sequence
  Description of Artificial Sequence: Synthetic oligonucleotide
aagaaaaguuccaguaaua

SEQ ID NO: 904992 - RNA, 19 nt, Artificial Sequence
  Description of Artificial Sequence: Synthetic oligonucleotide
acugaacggauuauuaaau

SEQ ID NO: 904993 - RNA, 19 nt, Artificial Sequence
  Description of Artificial Sequence: Synthetic oligonucleotide
gacucuuuagcuccauaaa

SEQ ID NO: 904994 - RNA, 19 nt, Artificial Sequence
  Description of Artificial Sequence: Synthetic oligonucleotide
uugagacuguuaaacuaua

SEQ ID NO: 904995 - RNA, 19 nt, Artificial Sequence
  Description of Artificial Sequence: Synthetic oligonucleotide
guauugacgagagcacugc

SEQ ID NO: 904996 - RNA, 19 nt, Artificial Sequence
  Description of Artificial Sequence: Synthetic oligonucleotide
cagucaaaaucagcaaaag

SEQ ID NO: 904997 - RNA, 19 nt, Artificial Sequence
  Description of Artificial Sequence: Synthetic oligonucleotide
ucccgaugagcgaaucagc

SEQ ID NO: 904998 - RNA, 19 nt, Artificial Sequence
  Description of Artificial Sequence: Synthetic oligonucleotide
gacauuguaucugaccaaa

SEQ ID NO: 904999 - RNA, 19 nt, Artificial Sequence
  Description of Artificial Sequence: Synthetic oligonucleotide
cuuugcuuugcagcacugg

SEQ ID NO: 905000 - RNA, 19 nt, Artificial Sequence
  Description of Artificial Sequence: Synthetic oligonucleotide
augugugcagcucucccga

SEQ ID NO: 905001 - RNA, 19 nt, Artificial Sequence
  Description of Artificial Sequence: Synthetic oligonucleotide
augaacaagaaaaguucca

SEQ ID NO: 905002 - RNA, 19 nt, Artificial Sequence
  Description of Artificial Sequence: Synthetic oligonucleotide
cacugaacggauuauuaaa

SEQ ID NO: 905003 - RNA, 19 nt, Artificial Sequence
  Description of Artificial Sequence: Synthetic oligonucleotide
cucccgaugagcgaaucag

SEQ ID NO: 905004 - RNA, 19 nt, Artificial Sequence
  Description of Artificial Sequence: Synthetic oligonucleotide
agaggaaaguaugaaguuu

SEQ ID NO: 905005 - RNA, 19 nt, Artificial Sequence
  Description of Artificial Sequence: Synthetic oligonucleotide
gagguaauuaguaagucuu

SEQ ID NO: 905006 - RNA, 19 nt, Artificial Sequence
  Description of Artificial Sequence: Synthetic oligonucleotide
gcaucaaauugacuucuag

SEQ ID NO: 905007 - RNA, 19 nt, Artificial Sequence
  Description of Artificial Sequence: Synthetic oligonucleotide
cauaugggaucaagguuuc

SEQ ID NO: 905008 - RNA, 19 nt, Artificial Sequence
  Description of Artificial Sequence: Synthetic oligonucleotide
auggacacagacgucgucu

SEQ ID NO: 905009 - RNA, 19 nt, Artificial Sequence
  Description of Artificial Sequence: Synthetic oligonucleotide
uggcaucaaauugacuucu

SEQ ID NO: 905010 - RNA, 19 nt, Artificial Sequence
  Description of Artificial Sequence: Synthetic oligonucleotide
caauaugagaaauaauguu

SEQ ID NO: 905011 - RNA, 19 nt, Artificial Sequence
  Description of Artificial Sequence: Synthetic oligonucleotide
uauuacguacaaggaacuc

SEQ ID NO: 905012 - RNA, 19 nt, Artificial Sequence
  Description of Artificial Sequence: Synthetic oligonucleotide
auugacgagagcacugcug

SEQ ID NO: 905013 - RNA, 19 nt, Artificial Sequence
  Description of Artificial Sequence: Synthetic oligonucleotide
caccacaaggagacucucg

SEQ ID NO: 905014 - RNA, 19 nt, Artificial Sequence
  Description of Artificial Sequence: Synthetic oligonucleotide
caaaaggcggucagucaug

SEQ ID NO: 905015 - RNA, 19 nt, Artificial Sequence
  Description of Artificial Sequence: Synthetic oligonucleotide
uagucggagaucugcacua

SEQ ID NO: 905016 - RNA, 19 nt, Artificial Sequence
  Description of Artificial Sequence: Synthetic oligonucleotide
aauaagcaugacauauguu

SEQ ID NO: 905017 - RNA, 19 nt, Artificial Sequence
  Description of Artificial Sequence: Synthetic oligonucleotide
aguugauguuuaaaaggcu

SEQ ID NO: 905018 - RNA, 19 nt, Artificial Sequence
  Description of Artificial Sequence: Synthetic oligonucleotide
aaccagagaccuguauuga

SEQ ID NO: 905019 - RNA, 19 nt, Artificial Sequence
  Description of Artificial Sequence: Synthetic oligonucleotide
cacugaaagccccaaauua

SEQ ID NO: 905020 - RNA, 19 nt, Artificial Sequence
  Description of Artificial Sequence: Synthetic oligonucleotide
gguccagaaagagagagga

SEQ ID NO: 905021 - RNA, 19 nt, Artificial Sequence
  Description of Artificial Sequence: Synthetic oligonucleotide
ugccugaagaaaggcaugu

SEQ ID NO: 905022 - RNA, 19 nt, Artificial Sequence
  Description of Artificial Sequence: Synthetic oligonucleotide
auucuagcaauaacagccu

SEQ ID NO: 905023 - RNA, 19 nt, Artificial Sequence
  Description of Artificial Sequence: Synthetic oligonucleotide
ucuaaaccauggacacaga

SEQ ID NO: 905024 - RNA, 19 nt, Artificial Sequence
  Description of Artificial Sequence: Synthetic oligonucleotide
ggagaucugcacuauuuca

SEQ ID NO: 905025 - RNA, 19 nt, Artificial Sequence
  Description of Artificial Sequence: Synthetic oligonucleotide
guuaaacuauauaucugaa

SEQ ID NO: 905026 - RNA, 19 nt, Artificial Sequence
  Description of Artificial Sequence: Synthetic oligonucleotide
ccuuuaaugugauguaguc

SEQ ID NO: 905027 - RNA, 19 nt, Artificial Sequence
  Description of Artificial Sequence: Synthetic oligonucleotide
augcauuaaugacauugua

SEQ ID NO: 905028 - RNA, 19 nt, Artificial Sequence
  Description of Artificial Sequence: Synthetic oligonucleotide
gguuaaagaacugcuguga

SEQ ID NO: 905029 - RNA, 19 nt, Artificial Sequence
  Description of Artificial Sequence: Synthetic oligonucleotide
auuuaaaccuuggccuugu

SEQ ID NO: 905030 - RNA, 19 nt, Artificial Sequence
  Description of Artificial Sequence: Synthetic oligonucleotide
aguuaguauuuuaggauua

SEQ ID NO: 905031 - RNA, 19 nt, Artificial Sequence
  Description of Artificial Sequence: Synthetic oligonucleotide
aucucauccaaaaggcggu

SEQ ID NO: 905032 - RNA, 19 nt, Artificial Sequence
  Description of Artificial Sequence: Synthetic oligonucleotide
cggauuauuaaauugccca

SEQ ID NO: 905033 - RNA, 19 nt, Artificial Sequence
  Description of Artificial Sequence: Synthetic oligonucleotide
gauuauuaaauugcccaau

SEQ ID NO: 905034 - RNA, 19 nt, Artificial Sequence
  Description of Artificial Sequence: Synthetic oligonucleotide
gaacagcuaugugugcagc

SEQ ID NO: 905035 - RNA, 19 nt, Artificial Sequence
  Description of Artificial Sequence: Synthetic oligonucleotide
uguaagcacugaacggauu

SEQ ID NO: 905036 - RNA, 19 nt, Artificial Sequence
  Description of Artificial Sequence: Synthetic oligonucleotide
uaccaccacaaggagacuc

SEQ ID NO: 905037 - RNA, 19 nt, Artificial Sequence
  Description of Artificial Sequence: Synthetic oligonucleotide
gauauucacuguuuacuuu

SEQ ID NO: 905038 - RNA, 19 nt, Artificial Sequence
  Description of Artificial Sequence: Synthetic oligonucleotide
aucugcacuauuucaucua

SEQ ID NO: 905039 - RNA, 19 nt, Artificial Sequence
  Description of Artificial Sequence: Synthetic oligonucleotide
cuuaacaucuacacacuau

SEQ ID NO: 905040 - RNA, 19 nt, Artificial Sequence
  Description of Artificial Sequence: Synthetic oligonucleotide
aauugacuucuagaauauu

SEQ ID NO: 905041 - RNA, 19 nt, Artificial Sequence
  Description of Artificial Sequence: Synthetic oligonucleotide
guugggcaaugcauuaaug

SEQ ID NO: 905042 - RNA, 19 nt, Artificial Sequence
  Description of Artificial Sequence: Synthetic oligonucleotide
gaagccaauaagaaaugau

SEQ ID NO: 905043 - RNA, 19 nt, Artificial Sequence
  Description of Artificial Sequence: Synthetic oligonucleotide
aaucagccguguugggcaa

SEQ ID NO: 905044 - RNA, 19 nt, Artificial Sequence
  Description of Artificial Sequence: Synthetic oligonucleotide
uucauaccaggaaguugaa

SEQ ID NO: 905045 - RNA, 19 nt, Artificial Sequence
  Description of Artificial Sequence: Synthetic oligonucleotide
cagauauucacuguuuacu

SEQ ID NO: 905046 - RNA, 19 nt, Artificial Sequence
  Description of Artificial Sequence: Synthetic oligonucleotide
gacauauguuuaauagcaa

SEQ ID NO: 905047 - RNA, 19 nt, Artificial Sequence
  Description of Artificial Sequence: Synthetic oligonucleotide
cagccccucagauauucac

SEQ ID NO: 905048 - RNA, 19 nt, Artificial Sequence
  Description of Artificial Sequence: Synthetic oligonucleotide
auguaugaaccaccuguuu

SEQ ID NO: 905049 - RNA, 19 nt, Artificial Sequence
  Description of Artificial Sequence: Synthetic oligonucleotide
ugaccaaauuacagccuuu

SEQ ID NO: 905050 - RNA, 19 nt, Artificial Sequence
  Description of Artificial Sequence: Synthetic oligonucleotide
auacuaaaguaaggcgcug

SEQ ID NO: 905051 - RNA, 19 nt, Artificial Sequence
  Description of Artificial Sequence: Synthetic oligonucleotide
aaaggcggucagucaugca

SEQ ID NO: 905052 - RNA, 19 nt, Artificial Sequence
  Description of Artificial Sequence: Synthetic oligonucleotide
gucaugcagucaaaaucag

SEQ ID NO: 905053 - RNA, 19 nt, Artificial Sequence
  Description of Artificial Sequence: Synthetic oligonucleotide
cagagggcauucaaaaucu

SEQ ID NO: 905054 - RNA, 19 nt, Artificial Sequence
  Description of Artificial Sequence: Synthetic oligonucleotide
ccuguauugacgagagcac

SEQ ID NO: 905055 - RNA, 19 nt, Artificial Sequence
  Description of Artificial Sequence: Synthetic oligonucleotide
ccaauaagaaaugaucaga

SEQ ID NO: 905056 - RNA, 19 nt, Artificial Sequence
  Description of Artificial Sequence: Synthetic oligonucleotide
agcaugacauauguuuaau

SEQ ID NO: 905057 - RNA, 19 nt, Artificial Sequence
  Description of Artificial Sequence: Synthetic oligonucleotide
uccccaggcaguccaaguu

SEQ ID NO: 905058 - RNA, 19 nt, Artificial Sequence
  Description of Artificial Sequence: Synthetic oligonucleotide
cugaaauacuuagguagca

SEQ ID NO: 905059 - RNA, 19 nt, Artificial Sequence
  Description of Artificial Sequence: Synthetic oligonucleotide
aggauuguggaagccaaua

SEQ ID NO: 905060 - RNA, 19 nt, Artificial Sequence
  Description of Artificial Sequence: Synthetic oligonucleotide
ugcuucuguucuacugaaa

SEQ ID NO: 905061 - RNA, 19 nt, Artificial Sequence
  Description of Artificial Sequence: Synthetic oligonucleotide
augaucagacauacauaug

SEQ ID NO: 905062 - RNA, 19 nt, Artificial Sequence
  Description of Artificial Sequence: Synthetic oligonucleotide
acucuaugaaaaggguuaa

SEQ ID NO: 905063 - RNA, 19 nt, Artificial Sequence
  Description of Artificial Sequence: Synthetic oligonucleotide
ggaucaagguuucacugaa

SEQ ID NO: 905064 - RNA, 19 nt, Artificial Sequence
  Description of Artificial Sequence: Synthetic oligonucleotide
uacguacaaggaacucuau

SEQ ID NO: 905065 - RNA, 19 nt, Artificial Sequence
  Description of Artificial Sequence: Synthetic oligonucleotide
gagguaauauuuaaaccuu

SEQ ID NO: 905066 - RNA, 19 nt, Artificial Sequence
  Description of Artificial Sequence: Synthetic oligonucleotide
gacgucgucuucuuccaua

SEQ ID NO: 905067 - RNA, 19 nt, Artificial Sequence
  Description of Artificial Sequence: Synthetic oligonucleotide
aaccaccuguuugagcaaa

SEQ ID NO: 905068 - RNA, 19 nt, Artificial Sequence
  Description of Artificial Sequence: Synthetic oligonucleotide
aaguaucauucugguuucu

SEQ ID NO: 905069 - RNA, 19 nt, Artificial Sequence
  Description of Artificial Sequence: Synthetic oligonucleotide
agcacugaacggauuauua

SEQ ID NO: 905070 - RNA, 19 nt, Artificial Sequence
  Description of Artificial Sequence: Synthetic oligonucleotide
gggaucaagguuucacuga

SEQ ID NO: 905071 - RNA, 19 nt, Artificial Sequence
  Description of Artificial Sequence: Synthetic oligonucleotide
uuuaaaccuuggccuugua

SEQ ID NO: 905072 - RNA, 19 nt, Artificial Sequence
  Description of Artificial Sequence: Synthetic oligonucleotide
gggcaaugcauuaaugaca

SEQ ID NO: 905073 - RNA, 19 nt, Artificial Sequence
  Description of Artificial Sequence: Synthetic oligonucleotide
acacacuauaauacauuau

SEQ ID NO: 905074 - RNA, 19 nt, Artificial Sequence
  Description of Artificial Sequence: Synthetic oligonucleotide
ggauuguggaagccaauaa

SEQ ID NO: 905075 - RNA, 19 nt, Artificial Sequence
  Description of Artificial Sequence: Synthetic oligonucleotide
uagucugaauaaggauugu

SEQ ID NO: 905076 - RNA, 19 nt, Artificial Sequence
  Description of Artificial Sequence: Synthetic oligonucleotide
cuguaugaucucauccaaa

SEQ ID NO: 905077 - RNA, 19 nt, Artificial Sequence
  Description of Artificial Sequence: Synthetic oligonucleotide
agccccaaauuagaaaauu

SEQ ID NO: 905078 - RNA, 19 nt, Artificial Sequence
  Description of Artificial Sequence: Synthetic oligonucleotide
gguaauuaguaagucuuua

SEQ ID NO: 905079 - RNA, 19 nt, Artificial Sequence
  Description of Artificial Sequence: Synthetic oligonucleotide
aguaaggcgcugaggggug

SEQ ID NO: 905080 - RNA, 19 nt, Artificial Sequence
  Description of Artificial Sequence: Synthetic oligonucleotide
gaccuguauugacgagagc

SEQ ID NO: 905081 - RNA, 19 nt, Artificial Sequence
  Description of Artificial Sequence: Synthetic oligonucleotide
cauuguaucugaccaaauu

SEQ ID NO: 905082 - RNA, 19 nt, Artificial Sequence
  Description of Artificial Sequence: Synthetic oligonucleotide
gggcgaagcaaguugugga

SEQ ID NO: 905083 - RNA, 19 nt, Artificial Sequence
  Description of Artificial Sequence: Synthetic oligonucleotide
gacaguuacagcagccccu

SEQ ID NO: 905084 - RNA, 19 nt, Artificial Sequence
  Description of Artificial Sequence: Synthetic oligonucleotide
aauguccaauaaagcuuau

SEQ ID NO: 905085 - RNA, 19 nt, Artificial Sequence
  Description of Artificial Sequence: Synthetic oligonucleotide
cauuggcauguaugaacca

SEQ ID NO: 905086 - RNA, 19 nt, Artificial Sequence
  Description of Artificial Sequence: Synthetic oligonucleotide
gcauaaaccagagaccugu

SEQ ID NO: 905087 - RNA, 19 nt, Artificial Sequence
  Description of Artificial Sequence: Synthetic oligonucleotide
cauggacacagacgucguc

SEQ ID NO: 905088 - RNA, 19 nt, Artificial Sequence
  Description of Artificial Sequence: Synthetic oligonucleotide
cugggcgaagcaaguugug

SEQ ID NO: 905089 - RNA, 19 nt, Artificial Sequence
  Description of Artificial Sequence: Synthetic oligonucleotide
ggaagccaauaagaaauga

SEQ ID NO: 905090 - RNA, 19 nt, Artificial Sequence
  Description of Artificial Sequence: Synthetic oligonucleotide
agguaauuaguaagucuuu

SEQ ID NO: 905091 - RNA, 19 nt, Artificial Sequence
  Description of Artificial Sequence: Synthetic oligonucleotide
guuuuacuagucggagauc

SEQ ID NO: 905092 - RNA, 19 nt, Artificial Sequence
  Description of Artificial Sequence: Synthetic oligonucleotide
gcacugaacggauuauuaa

SEQ ID NO: 905093 - RNA, 19 nt, Artificial Sequence
  Description of Artificial Sequence: Synthetic oligonucleotide
augacucuuuagcuccaua

SEQ ID NO: 905094 - RNA, 19 nt, Artificial Sequence
  Description of Artificial Sequence: Synthetic oligonucleotide
caccuguuugagcaaaugu

SEQ ID NO: 905095 - RNA, 19 nt, Artificial Sequence
  Description of Artificial Sequence: Synthetic oligonucleotide
agccccucagauauucacu

SEQ ID NO: 905096 - RNA, 19 nt, Artificial Sequence
  Description of Artificial Sequence: Synthetic oligonucleotide
cauguaugaaccaccuguu

SEQ ID NO: 905097 - RNA, 19 nt, Artificial Sequence
  Description of Artificial Sequence: Synthetic oligonucleotide
cacagccacauuaccuaga

SEQ ID NO: 905098 - RNA, 19 nt, Artificial Sequence
  Description of Artificial Sequence: Synthetic oligonucleotide
cugaacggauuauuaaauu

SEQ ID NO: 905099 - RNA, 19 nt, Artificial Sequence
  Description of Artificial Sequence: Synthetic oligonucleotide
guuguaagaaaugcugcuu

SEQ ID NO: 905100 - RNA, 19 nt, Artificial Sequence
  Description of Artificial Sequence: Synthetic oligonucleotide
gcaugacauauguuuaaua

SEQ ID NO: 905101 - RNA, 19 nt, Artificial Sequence
  Description of Artificial Sequence: Synthetic oligonucleotide
cugaccaaauuacagccuu

SEQ ID NO: 905102 - RNA, 19 nt, Artificial Sequence
  Description of Artificial Sequence: Synthetic oligonucleotide
ggccuuguaagcacugaac

SEQ ID NO: 905103 - RNA, 19 nt, Artificial Sequence
  Description of Artificial Sequence: Synthetic oligonucleotide
augagcgaaucagccgugu

SEQ ID NO: 905104 - RNA, 19 nt, Artificial Sequence
  Description of Artificial Sequence: Synthetic oligonucleotide
ccauaaauuuuaauaguau

SEQ ID NO: 905105 - RNA, 19 nt, Artificial Sequence
  Description of Artificial Sequence: Synthetic oligonucleotide
acacagacgucgucuucuu

SEQ ID NO: 905106 - RNA, 19 nt, Artificial Sequence
  Description of Artificial Sequence: Synthetic oligonucleotide
cugcuugguugcuuuguaa

SEQ ID NO: 905107 - RNA, 19 nt, Artificial Sequence
  Description of Artificial Sequence: Synthetic oligonucleotide
caucuaaaccauggacaca

SEQ ID NO: 905108 - RNA, 19 nt, Artificial Sequence
  Description of Artificial Sequence: Synthetic oligonucleotide
ggaucauuucugaauagau

SEQ ID NO: 905109 - RNA, 19 nt, Artificial Sequence
  Description of Artificial Sequence: Synthetic oligonucleotide
gagcaaauguaaaguuagu

SEQ ID NO: 905110 - RNA, 19 nt, Artificial Sequence
  Description of Artificial Sequence: Synthetic oligonucleotide
ccuaaugaacaagaaaagu

SEQ ID NO: 905111 - RNA, 19 nt, Artificial Sequence
  Description of Artificial Sequence: Synthetic oligonucleotide
cacagacgucgucuucuuc

SEQ ID NO: 905112 - RNA, 19 nt, Artificial Sequence
  Description of Artificial Sequence: Synthetic oligonucleotide
ggaacucuaugaaaagggu

SEQ ID NO: 905113 - RNA, 19 nt, Artificial Sequence
  Description of Artificial Sequence: Synthetic oligonucleotide
gcuaugugugcagcucucc

SEQ ID NO: 905114 - RNA, 19 nt, Artificial Sequence
  Description of Artificial Sequence: Synthetic oligonucleotide
ggaaaguaugaaguuugcu

SEQ ID NO: 905115 - RNA, 19 nt, Artificial Sequence
  Description of Artificial Sequence: Synthetic oligonucleotide
cuguauugacgagagcacu

SEQ ID NO: 905116 - RNA, 19 nt, Artificial Sequence
  Description of Artificial Sequence: Synthetic oligonucleotide
agacgucgucuucuuccau

SEQ ID NO: 905117 - RNA, 19 nt, Artificial Sequence
  Description of Artificial Sequence: Synthetic oligonucleotide
guaaggcgcugaggggugc

SEQ ID NO: 905118 - RNA, 19 nt, Artificial Sequence
  Description of Artificial Sequence: Synthetic oligonucleotide
gcgaaucagccguguuggg

SEQ ID NO: 905119 - RNA, 19 nt, Artificial Sequence
  Description of Artificial Sequence: Synthetic oligonucleotide
cgaaucagccguguugggc

SEQ ID NO: 905120 - RNA, 19 nt, Artificial Sequence
  Description of Artificial Sequence: Synthetic oligonucleotide
gguugcuuuguaauggcau

SEQ ID NO: 905121 - RNA, 19 nt, Artificial Sequence
  Description of Artificial Sequence: Synthetic oligonucleotide
uccugacugcuuguccuuu

SEQ ID NO: 905122 - RNA, 19 nt, Artificial Sequence
  Description of Artificial Sequence: Synthetic oligonucleotide
cagcuaugugugcagcucu

SEQ ID NO: 905123 - RNA, 19 nt, Artificial Sequence
  Description of Artificial Sequence: Synthetic oligonucleotide
gaacugcugugagaaaauu

SEQ ID NO: 905124 - RNA, 19 nt, Artificial Sequence
  Description of Artificial Sequence: Synthetic oligonucleotide
gccacauuaccuagaaagu

SEQ ID NO: 905125 - RNA, 19 nt, Artificial Sequence
  Description of Artificial Sequence: Synthetic oligonucleotide
ggagacucucguggagcag

SEQ ID NO: 905126 - RNA, 19 nt, Artificial Sequence
  Description of Artificial Sequence: Synthetic oligonucleotide
agacucucguggagcagau

SEQ ID NO: 905127 - RNA, 19 nt, Artificial Sequence
  Description of Artificial Sequence: Synthetic oligonucleotide
ggcggucagucaugcaguc

SEQ ID NO: 905128 - RNA, 19 nt, Artificial Sequence
  Description of Artificial Sequence: Synthetic oligonucleotide
ggcgaagcaaguuguggau

SEQ ID NO: 905129 - RNA, 19 nt, Artificial Sequence
  Description of Artificial Sequence: Synthetic oligonucleotide
agagggcauucaaaaucuu

SEQ ID NO: 905130 - RNA, 19 nt, Artificial Sequence
  Description of Artificial Sequence: Synthetic oligonucleotide
augaacccaggcagcuuaa

SEQ ID NO: 905131 - RNA, 19 nt, Artificial Sequence
  Description of Artificial Sequence: Synthetic oligonucleotide
cucucccgaugagcgaauc

SEQ ID NO: 905132 - RNA, 19 nt, Artificial Sequence
  Description of Artificial Sequence: Synthetic oligonucleotide
ccaccuguuugagcaaaug

SEQ ID NO: 905133 - RNA, 19 nt, Artificial Sequence
  Description of Artificial Sequence: Synthetic oligonucleotide
cgaugagcgaaucagccgu

SEQ ID NO: 905134 - RNA, 19 nt, Artificial Sequence
  Description of Artificial Sequence: Synthetic oligonucleotide
ggcagagggcauucaaaau

SEQ ID NO: 905135 - RNA, 19 nt, Artificial Sequence
  Description of Artificial Sequence: Synthetic oligonucleotide
cagcucucccgaugagcga

SEQ ID NO: 905136 - RNA, 19 nt, Artificial Sequence
  Description of Artificial Sequence: Synthetic oligonucleotide
aucagccguguugggcaau

SEQ ID NO: 905137 - RNA, 19 nt, Artificial Sequence
  Description of Artificial Sequence: Synthetic oligonucleotide
ccaaggugagguccagaaa

SEQ ID NO: 905138 - RNA, 19 nt, Artificial Sequence
  Description of Artificial Sequence: Synthetic oligonucleotide
gucggagaucugcacuauu

SEQ ID NO: 905139 - RNA, 19 nt, Artificial Sequence
  Description of Artificial Sequence: Synthetic oligonucleotide
ggcaucaaauugacuucua

SEQ ID NO: 905140 - RNA, 19 nt, Artificial Sequence
  Description of Artificial Sequence: Synthetic oligonucleotide
gcggucagucaugcaguca

SEQ ID NO: 905141 - RNA, 19 nt, Artificial Sequence
  Description of Artificial Sequence: Synthetic oligonucleotide
ccguguugggcaaugcauu

SEQ ID NO: 905142 - RNA, 19 nt, Artificial Sequence
  Description of Artificial Sequence: Synthetic oligonucleotide
gggugccagcagaggaaca

SEQ ID NO: 905143 - RNA, 19 nt, Artificial Sequence
  Description of Artificial Sequence: Synthetic oligonucleotide
ggcucuacacauggaugau

SEQ ID NO: 905144 - RNA, 19 nt, Artificial Sequence
  Description of Artificial Sequence: Synthetic oligonucleotide
ccaggcaguccaaguucaa

SEQ ID NO: 905145 - RNA, 19 nt, Artificial Sequence
  Description of Artificial Sequence: Synthetic oligonucleotide
aauucuacgacaucucgac

SEQ ID NO: 905146 - RNA, 19 nt, Artificial Sequence
  Description of Artificial Sequence: Synthetic oligonucleotide
aaaagcagaauucuacgac

SEQ ID NO: 905147 - RNA, 19 nt, Artificial Sequence
  Description of Artificial Sequence: Synthetic oligonucleotide
aacucguggauuucaaccc

SEQ ID NO: 905148 - RNA, 19 nt, Artificial Sequence
  Description of Artificial Sequence: Synthetic oligonucleotide
ugaucaacucguaagauug

SEQ ID NO: 905149 - RNA, 19 nt, Artificial Sequence
  Description of Artificial Sequence: Synthetic oligonucleotide
agugccaggggauugaagc

SEQ ID NO: 905150 - RNA, 19 nt, Artificial Sequence
  Description of Artificial Sequence: Synthetic oligonucleotide
gaaccuaacauuuugucug

SEQ ID NO: 905151 - RNA, 19 nt, Artificial Sequence
  Description of Artificial Sequence: Synthetic oligonucleotide
uguauugcugggaagcugg

SEQ ID NO: 905152 - RNA, 19 nt, Artificial Sequence
  Description of Artificial Sequence: Synthetic oligonucleotide
uuugcuguagucuaacuug

SEQ ID NO: 905153 - RNA, 19 nt, Artificial Sequence
  Description of Artificial Sequence: Synthetic oligonucleotide
auagaugauccucugcacc

SEQ ID NO: 905154 - RNA, 19 nt, Artificial Sequence
  Description of Artificial Sequence: Synthetic oligonucleotide
uugacgaccaccuuguuca

SEQ ID NO: 905155 - RNA, 19 nt, Artificial Sequence
  Description of Artificial Sequence: Synthetic oligonucleotide
agucguuuuaacuccaccg

SEQ ID NO: 905156 - RNA, 19 nt, Artificial Sequence
  Description of Artificial Sequence: Synthetic oligonucleotide
ucugcuaaagugagcaccg

SEQ ID NO: 905157 - RNA, 19 nt, Artificial Sequence
  Description of Artificial Sequence: Synthetic oligonucleotide
gauggcguccccuucaugg

SEQ ID NO: 905158 - RNA, 19 nt, Artificial Sequence
  Description of Artificial Sequence: Synthetic oligonucleotide
aaacucgccuuccagggac

SEQ ID NO: 905159 - RNA, 19 nt, Artificial Sequence
  Description of Artificial Sequence: Synthetic oligonucleotide
cuaacuuguccucucaugg

SEQ ID NO: 905160 - RNA, 19 nt, Artificial Sequence
  Description of Artificial Sequence: Synthetic oligonucleotide
ucuaguugcugacugagcu

SEQ ID NO: 905161 - RNA, 19 nt, Artificial Sequence
  Description of Artificial Sequence: Synthetic oligonucleotide
uuugcuagggucuuccacc

SEQ ID NO: 905162 - RNA, 19 nt, Artificial Sequence
  Description of Artificial Sequence: Synthetic oligonucleotide
agaauucuacgacaucucg

SEQ ID NO: 905163 - RNA, 19 nt, Artificial Sequence
  Description of Artificial Sequence: Synthetic oligonucleotide
gagcuaaugagacugguac

SEQ ID NO: 905164 - RNA, 19 nt, Artificial Sequence
  Description of Artificial Sequence: Synthetic oligonucleotide
caucauguggucauagggg

SEQ ID NO: 905165 - RNA, 19 nt, Artificial Sequence
  Description of Artificial Sequence: Synthetic oligonucleotide
uacacagugccuuuguuca

SEQ ID NO: 905166 - RNA, 19 nt, Artificial Sequence
  Description of Artificial Sequence: Synthetic oligonucleotide
uucaaccccauucucagug

SEQ ID NO: 905167 - RNA, 19 nt, Artificial Sequence
  Description of Artificial Sequence: Synthetic oligonucleotide
ucuuuaagucuucuaguug

SEQ ID NO: 905168 - RNA, 19 nt, Artificial Sequence
  Description of Artificial Sequence: Synthetic oligonucleotide
uuaacuccaccgcugcugg

SEQ ID NO: 905169 - RNA, 19 nt, Artificial Sequence
  Description of Artificial Sequence: Synthetic oligonucleotide
caacucguggauuucaacc

SEQ ID NO: 905170 - RNA, 19 nt, Artificial Sequence
  Description of Artificial Sequence: Synthetic oligonucleotide
gauugaagcgcacucucag

SEQ ID NO: 905171 - RNA, 19 nt, Artificial Sequence
  Description of Artificial Sequence: Synthetic oligonucleotide
ugccauaucuugaaguucu

SEQ ID NO: 905172 - RNA, 19 nt, Artificial Sequence
  Description of Artificial Sequence: Synthetic oligonucleotide
ucuaaguugccauuggcau

SEQ ID NO: 905173 - RNA, 19 nt, Artificial Sequence
  Description of Artificial Sequence: Synthetic oligonucleotide
guauagucguuuuaacucc

SEQ ID NO: 905174 - RNA, 19 nt, Artificial Sequence
  Description of Artificial Sequence: Synthetic oligonucleotide
uugccguucauaauuuugc

SEQ ID NO: 905175 - RNA, 19 nt, Artificial Sequence
  Description of Artificial Sequence: Synthetic oligonucleotide
ucuaguagcuccugggagc

SEQ ID NO: 905176 - RNA, 19 nt, Artificial Sequence
  Description of Artificial Sequence: Synthetic oligonucleotide
agagggugaguucaacucg

SEQ ID NO: 905177 - RNA, 19 nt, Artificial Sequence
  Description of Artificial Sequence: Synthetic oligonucleotide
gagcugaucaacucguaag

SEQ ID NO: 905178 - RNA, 19 nt, Artificial Sequence
  Description of Artificial Sequence: Synthetic oligonucleotide
ucguuaacauuucucugag

SEQ ID NO: 905179 - RNA, 19 nt, Artificial Sequence
  Description of Artificial Sequence: Synthetic oligonucleotide
uaagcuguagcucuuggua

SEQ ID NO: 905180 - RNA, 19 nt, Artificial Sequence
  Description of Artificial Sequence: Synthetic oligonucleotide
ucgucguuggguuugcuag

SEQ ID NO: 905181 - RNA, 19 nt, Artificial Sequence
  Description of Artificial Sequence: Synthetic oligonucleotide
aaagauagcggccccacuu

SEQ ID NO: 905182 - RNA, 19 nt, Artificial Sequence
  Description of Artificial Sequence: Synthetic oligonucleotide
uaaguugccauuggcauug

SEQ ID NO: 905183 - RNA, 19 nt, Artificial Sequence
  Description of Artificial Sequence: Synthetic oligonucleotide
auuaucauuggcaucugag

SEQ ID NO: 905184 - RNA, 19 nt, Artificial Sequence
  Description of Artificial Sequence: Synthetic oligonucleotide
aguucaggcaagugugcgc

SEQ ID NO: 905185 - RNA, 19 nt, Artificial Sequence
  Description of Artificial Sequence: Synthetic oligonucleotide
ucaacucguaagauugcag

SEQ ID NO: 905186 - RNA, 19 nt, Artificial Sequence
  Description of Artificial Sequence: Synthetic oligonucleotide
cagguuaccuuaaaagcag

SEQ ID NO: 905187 - RNA, 19 nt, Artificial Sequence
  Description of Artificial Sequence: Synthetic oligonucleotide
acucguggauuucaacccc

SEQ ID NO: 905188 - RNA, 19 nt, Artificial Sequence
  Description of Artificial Sequence: Synthetic oligonucleotide
ucucagugcgcuuuucucc

SEQ ID NO: 905189 - RNA, 19 nt, Artificial Sequence
  Description of Artificial Sequence: Synthetic oligonucleotide
uguccgucugcuaaaguga

SEQ ID NO: 905190 - RNA, 19 nt, Artificial Sequence
  Description of Artificial Sequence: Synthetic oligonucleotide
uaguguauugcugggaagc

SEQ ID NO: 905191 - RNA, 19 nt, Artificial Sequence
  Description of Artificial Sequence: Synthetic oligonucleotide
uuuaacuccaccgcugcug

SEQ ID NO: 905192 - RNA, 19 nt, Artificial Sequence
  Description of Artificial Sequence: Synthetic oligonucleotide
cagggacgcaucaagaagc

SEQ ID NO: 905193 - RNA, 19 nt, Artificial Sequence
  Description of Artificial Sequence: Synthetic oligonucleotide
gauccguggauacaacccc

SEQ ID NO: 905194 - RNA, 19 nt, Artificial Sequence
  Description of Artificial Sequence: Synthetic oligonucleotide
uacaucauguggucauagg

SEQ ID NO: 905195 - RNA, 19 nt, Artificial Sequence
  Description of Artificial Sequence: Synthetic oligonucleotide
aaguucaggcaagugugcg

SEQ ID NO: 905196 - RNA, 19 nt, Artificial Sequence
  Description of Artificial Sequence: Synthetic oligonucleotide
gaucuaaguugccauuggc

SEQ ID NO: 905197 - RNA, 19 nt, Artificial Sequence
  Description of Artificial Sequence: Synthetic oligonucleotide
aagguaacucauuaucauu

SEQ ID NO: 905198 - RNA, 19 nt, Artificial Sequence
  Description of Artificial Sequence: Synthetic oligonucleotide
ugcagucugaacuuccugu

SEQ ID NO: 905199 - RNA, 19 nt, Artificial Sequence
  Description of Artificial Sequence: Synthetic oligonucleotide
aagugugcgcugccggggc

SEQ ID NO: 905200 - RNA, 19 nt, Artificial Sequence
  Description of Artificial Sequence: Synthetic oligonucleotide
agguaacucauuaucauug

SEQ ID NO: 905201 - RNA, 19 nt, Artificial Sequence
  Description of Artificial Sequence: Synthetic oligonucleotide
uuugacgaccaccuuguuc

SEQ ID NO: 905202 - RNA, 19 nt, Artificial Sequence
  Description of Artificial Sequence: Synthetic oligonucleotide
aagacgagcccaccaccac

SEQ ID NO: 905203 - RNA, 19 nt, Artificial Sequence
  Description of Artificial Sequence: Synthetic oligonucleotide
acucgaaccuaacauuuug

SEQ ID NO: 905204 - RNA, 19 nt, Artificial Sequence
  Description of Artificial Sequence: Synthetic oligonucleotide
gucguuuuaacuccaccgc

SEQ ID NO: 905205 - RNA, 19 nt, Artificial Sequence
  Description of Artificial Sequence: Synthetic oligonucleotide
uauagucguuuuaacucca

SEQ ID NO: 905206 - RNA, 19 nt, Artificial Sequence
  Description of Artificial Sequence: Synthetic oligonucleotide
uugggaucugcucugugga

SEQ ID NO: 905207 - RNA, 19 nt, Artificial Sequence
  Description of Artificial Sequence: Synthetic oligonucleotide
ucuguuugauuuucaauuu

SEQ ID NO: 905208 - RNA, 19 nt, Artificial Sequence
  Description of Artificial Sequence: Synthetic oligonucleotide
guagcucuugguauagucg

SEQ ID NO: 905209 - RNA, 19 nt, Artificial Sequence
  Description of Artificial Sequence: Synthetic oligonucleotide
aacuucacgaugugauggu

SEQ ID NO: 905210 - RNA, 19 nt, Artificial Sequence
  Description of Artificial Sequence: Synthetic oligonucleotide
ucucuaguagcuccuggga

SEQ ID NO: 905211 - RNA, 19 nt, Artificial Sequence
  Description of Artificial Sequence: Synthetic oligonucleotide
cuggaccccauacagaaac

SEQ ID NO: 905212 - RNA, 19 nt, Artificial Sequence
  Description of Artificial Sequence: Synthetic oligonucleotide
cuguccgucugcuaaagug

SEQ ID NO: 905213 - RNA, 19 nt, Artificial Sequence
  Description of Artificial Sequence: Synthetic oligonucleotide
guaacucauuaucauuggc

SEQ ID NO: 905214 - RNA, 19 nt, Artificial Sequence
  Description of Artificial Sequence: Synthetic oligonucleotide
aaccuaacauuuugucugu

SEQ ID NO: 905215 - RNA, 19 nt, Artificial Sequence
  Description of Artificial Sequence: Synthetic oligonucleotide
auuguggauacuguccguc

SEQ ID NO: 905216 - RNA, 19 nt, Artificial Sequence
  Description of Artificial Sequence: Synthetic oligonucleotide
ucaacucgaaccuaacauu

SEQ ID NO: 905217 - RNA, 19 nt, Artificial Sequence
  Description of Artificial Sequence: Synthetic oligonucleotide
uguggauacuguccgucug

SEQ ID NO: 905218 - RNA, 19 nt, Artificial Sequence
  Description of Artificial Sequence: Synthetic oligonucleotide
agcugaucaacucguaaga

SEQ ID NO: 905219 - RNA, 19 nt, Artificial Sequence
  Description of Artificial Sequence: Synthetic oligonucleotide
aggggugaucccuucgucg

SEQ ID NO: 905220 - RNA, 19 nt, Artificial Sequence
  Description of Artificial Sequence: Synthetic oligonucleotide
cucguuaacauuucucuga

SEQ ID NO: 905221 - RNA, 19 nt, Artificial Sequence
  Description of Artificial Sequence: Synthetic oligonucleotide
uaacuuguccucucauggc

SEQ ID NO: 905222 - RNA, 19 nt, Artificial Sequence
  Description of Artificial Sequence: Synthetic oligonucleotide
uccuggaccccauacagaa

SEQ ID NO: 905223 - RNA, 19 nt, Artificial Sequence
  Description of Artificial Sequence: Synthetic oligonucleotide
uagucguuuuaacuccacc

SEQ ID NO: 905224 - RNA, 19 nt, Artificial Sequence
  Description of Artificial Sequence: Synthetic oligonucleotide
acucguuaacauuucucug

SEQ ID NO: 905225 - RNA, 19 nt, Artificial Sequence
  Description of Artificial Sequence: Synthetic oligonucleotide
ucgaaccuaacauuuuguc

SEQ ID NO: 905226 - RNA, 19 nt, Artificial Sequence
  Description of Artificial Sequence: Synthetic oligonucleotide
cugggagcuaaugagacug

SEQ ID NO: 905227 - RNA, 19 nt, Artificial Sequence
  Description of Artificial Sequence: Synthetic oligonucleotide
uuggcauugguauuuccau

SEQ ID NO: 905228 - RNA, 19 nt, Artificial Sequence
  Description of Artificial Sequence: Synthetic oligonucleotide
ucgauggucgaagaaagaa

SEQ ID NO: 905229 - RNA, 19 nt, Artificial Sequence
  Description of Artificial Sequence: Synthetic oligonucleotide
uaguugcugacugagcuga

SEQ ID NO: 905230 - RNA, 19 nt, Artificial Sequence
  Description of Artificial Sequence: Synthetic oligonucleotide
aucaagaagcagugccagg

SEQ ID NO: 905231 - RNA, 19 nt, Artificial Sequence
  Description of Artificial Sequence: Synthetic oligonucleotide
uucuaucucagcugacaga

SEQ ID NO: 905232 - RNA, 19 nt, Artificial Sequence
  Description of Artificial Sequence: Synthetic oligonucleotide
agacugguacuccagggga

SEQ ID NO: 905233 - RNA, 19 nt, Artificial Sequence
  Description of Artificial Sequence: Synthetic oligonucleotide
uccccuucauggaaggaca

SEQ ID NO: 905234 - RNA, 19 nt, Artificial Sequence
  Description of Artificial Sequence: Synthetic oligonucleotide
gucugcuaaagugagcacc

SEQ ID NO: 905235 - RNA, 19 nt, Artificial Sequence
  Description of Artificial Sequence: Synthetic oligonucleotide
cuucuaguugcugacugag

SEQ ID NO: 905236 - RNA, 19 nt, Artificial Sequence
  Description of Artificial Sequence: Synthetic oligonucleotide
uccagguacacucguuaac

SEQ ID NO: 905237 - RNA, 19 nt, Artificial Sequence
  Description of Artificial Sequence: Synthetic oligonucleotide
ucuucuaguugcugacuga

SEQ ID NO: 905238 - RNA, 19 nt, Artificial Sequence
  Description of Artificial Sequence: Synthetic oligonucleotide
caguuuucccuucuuuaag

SEQ ID NO: 905239 - RNA, 19 nt, Artificial Sequence
  Description of Artificial Sequence: Synthetic oligonucleotide
uguccguuccgaguuaggc

SEQ ID NO: 905240 - RNA, 19 nt, Artificial Sequence
  Description of Artificial Sequence: Synthetic oligonucleotide
cauggcacggaucuucuuc

SEQ ID NO: 905241 - RNA, 19 nt, Artificial Sequence
  Description of Artificial Sequence: Synthetic oligonucleotide
ucuccagguacacucguua

SEQ ID NO: 905242 - RNA, 19 nt, Artificial Sequence
  Description of Artificial Sequence: Synthetic oligonucleotide
uacacucguuaacauuucu

SEQ ID NO: 905243 - RNA, 19 nt, Artificial Sequence
  Description of Artificial Sequence: Synthetic oligonucleotide
acauugacaccaaagucca

SEQ ID NO: 905244 - RNA, 19 nt, Artificial Sequence
  Description of Artificial Sequence: Synthetic oligonucleotide
guaagauugcagucugaac

SEQ ID NO: 905245 - RNA, 19 nt, Artificial Sequence
  Description of Artificial Sequence: Synthetic oligonucleotide
cuaguguauugcugggaag

SEQ ID NO: 905246 - RNA, 19 nt, Artificial Sequence
  Description of Artificial Sequence: Synthetic oligonucleotide
ugggagcuaaugagacugg

SEQ ID NO: 905247 - RNA, 19 nt, Artificial Sequence
  Description of Artificial Sequence: Synthetic oligonucleotide
gaauucuacgacaucucga

SEQ ID NO: 905248 - RNA, 19 nt, Artificial Sequence
  Description of Artificial Sequence: Synthetic oligonucleotide
gcuguagucuaacuugucc

SEQ ID NO: 905249 - RNA, 19 nt, Artificial Sequence
  Description of Artificial Sequence: Synthetic oligonucleotide
auguaacccucuuccaucu

SEQ ID NO: 905250 - RNA, 19 nt, Artificial Sequence
  Description of Artificial Sequence: Synthetic oligonucleotide
uggaacccucucuaguagc

SEQ ID NO: 905251 - RNA, 19 nt, Artificial Sequence
  Description of Artificial Sequence: Synthetic oligonucleotide
agcuaaugagacugguacu

SEQ ID NO: 905252 - RNA, 19 nt, Artificial Sequence
  Description of Artificial Sequence: Synthetic oligonucleotide
acacucguuaacauuucuc

SEQ ID NO: 905253 - RNA, 19 nt, Artificial Sequence
  Description of Artificial Sequence: Synthetic oligonucleotide
ucaggggaagguaacucau

SEQ ID NO: 905254 - RNA, 19 nt, Artificial Sequence
  Description of Artificial Sequence: Synthetic oligonucleotide
ggugaguucaacucgugga

SEQ ID NO: 905255 - RNA, 19 nt, Artificial Sequence
  Description of Artificial Sequence: Synthetic oligonucleotide
caagaagcagugccagggg

SEQ ID NO: 905256 - RNA, 19 nt, Artificial Sequence
  Description of Artificial Sequence: Synthetic oligonucleotide
acucguaagauugcagucu

SEQ ID NO: 905257 - RNA, 19 nt, Artificial Sequence
  Description of Artificial Sequence: Synthetic oligonucleotide
gggaagguaacucauuauc

SEQ ID NO: 905258 - RNA, 19 nt, Artificial Sequence
  Description of Artificial Sequence: Synthetic oligonucleotide
cuccgagggagccucagcc

SEQ ID NO: 905259 - RNA, 19 nt, Artificial Sequence
  Description of Artificial Sequence: Synthetic oligonucleotide
aagauagcggccccacuuu

SEQ ID NO: 905260 - RNA, 19 nt, Artificial Sequence
  Description of Artificial Sequence: Synthetic oligonucleotide
uccguggauacaaccccag

SEQ ID NO: 905261 - RNA, 19 nt, Artificial Sequence
  Description of Artificial Sequence: Synthetic oligonucleotide
uggagggacuuguucuucc

SEQ ID NO: 905262 - RNA, 19 nt, Artificial Sequence
  Description of Artificial Sequence: Synthetic oligonucleotide
uuugcucgcagauguugcu

SEQ ID NO: 905263 - RNA, 19 nt, Artificial Sequence
  Description of Artificial Sequence: Synthetic oligonucleotide
ugucaaccugccauuguau

SEQ ID NO: 905264 - RNA, 19 nt, Artificial Sequence
  Description of Artificial Sequence: Synthetic oligonucleotide
uccucgauggucgaagaaa

SEQ ID NO: 905265 - RNA, 19 nt, Artificial Sequence
  Description of Artificial Sequence: Synthetic oligonucleotide
gugccaggggauugaagcg

SEQ ID NO: 905266 - RNA, 19 nt, Artificial Sequence
  Description of Artificial Sequence: Synthetic oligonucleotide
cuugguauagucguuuuaa

SEQ ID NO: 905267 - RNA, 19 nt, Artificial Sequence
  Description of Artificial Sequence: Synthetic oligonucleotide
accagaucaaacucgccuu

SEQ ID NO: 905268 - RNA, 19 nt, Artificial Sequence
  Description of Artificial Sequence: Synthetic oligonucleotide
uugcgccucaggaugguga

SEQ ID NO: 905269 - RNA, 19 nt, Artificial Sequence
  Description of Artificial Sequence: Synthetic oligonucleotide
ucuugguauagucguuuua

SEQ ID NO: 905270 - RNA, 19 nt, Artificial Sequence
  Description of Artificial Sequence: Synthetic oligonucleotide
ugccguucauaauuuugcu

SEQ ID NO: 905271 - RNA, 19 nt, Artificial Sequence
  Description of Artificial Sequence: Synthetic oligonucleotide
uuguggauacuguccgucu

SEQ ID NO: 905272 - RNA, 19 nt, Artificial Sequence
  Description of Artificial Sequence: Synthetic oligonucleotide
guggauacuguccgucugc

SEQ ID NO: 905273 - RNA, 19 nt, Artificial Sequence
  Description of Artificial Sequence: Synthetic oligonucleotide
uggucgaagaaagaauuuu

SEQ ID NO: 905274 - RNA, 19 nt, Artificial Sequence
  Description of Artificial Sequence: Synthetic oligonucleotide
caaccugccauuguaugac

SEQ ID NO: 905275 - RNA, 19 nt, Artificial Sequence
  Description of Artificial Sequence: Synthetic oligonucleotide
guggauacaaccccagcaa

SEQ ID NO: 905276 - RNA, 19 nt, Artificial Sequence
  Description of Artificial Sequence: Synthetic oligonucleotide
gcaacugccccucuccagg

SEQ ID NO: 905277 - RNA, 19 nt, Artificial Sequence
  Description of Artificial Sequence: Synthetic oligonucleotide
ggcaaaugagcucuggcuc

SEQ ID NO: 905278 - RNA, 19 nt, Artificial Sequence
  Description of Artificial Sequence: Synthetic oligonucleotide
aggggaagguaacucauua

SEQ ID NO: 905279 - RNA, 19 nt, Artificial Sequence
  Description of Artificial Sequence: Synthetic oligonucleotide
gaguccucgauggucgaag

SEQ ID NO: 905280 - RNA, 19 nt, Artificial Sequence
  Description of Artificial Sequence: Synthetic oligonucleotide
aggccucgaucuaaguugc

SEQ ID NO: 905281 - RNA, 19 nt, Artificial Sequence
  Description of Artificial Sequence: Synthetic oligonucleotide
gaagcgcacucucagccca

SEQ ID NO: 905282 - RNA, 19 nt, Artificial Sequence
  Description of Artificial Sequence: Synthetic oligonucleotide
agcacuggauguaacccuc

SEQ ID NO: 905283 - RNA, 19 nt, Artificial Sequence
  Description of Artificial Sequence: Synthetic oligonucleotide
caguuugaugagucguuug

SEQ ID NO: 905284 - RNA, 19 nt, Artificial Sequence
  Description of Artificial Sequence: Synthetic oligonucleotide
aucaacucguaagauugca

SEQ ID NO: 905285 - RNA, 19 nt, Artificial Sequence
  Description of Artificial Sequence: Synthetic oligonucleotide
agaggggugaucccuucgu

SEQ ID NO: 905286 - RNA, 19 nt, Artificial Sequence
  Description of Artificial Sequence: Synthetic oligonucleotide
guuugcucgcagauguugc

SEQ ID NO: 905287 - RNA, 19 nt, Artificial Sequence
  Description of Artificial Sequence: Synthetic oligonucleotide
auagucguuuuaacuccac

SEQ ID NO: 905288 - RNA, 19 nt, Artificial Sequence
  Description of Artificial Sequence: Synthetic oligonucleotide
cacucguuaacauuucucu

SEQ ID NO: 905289 - RNA, 19 nt, Artificial Sequence
  Description of Artificial Sequence: Synthetic oligonucleotide
ggguuugacgaccaccuug

SEQ ID NO: 905290 - RNA, 19 nt, Artificial Sequence
  Description of Artificial Sequence: Synthetic oligonucleotide
auagcggccccacuuucca

SEQ ID NO: 905291 - RNA, 19 nt, Artificial Sequence
  Description of Artificial Sequence: Synthetic oligonucleotide
aaccugccauuguaugacu

SEQ ID NO: 905292 - RNA, 19 nt, Artificial Sequence
  Description of Artificial Sequence: Synthetic oligonucleotide
guguccauccgucacuguc

SEQ ID NO: 905293 - RNA, 19 nt, Artificial Sequence
  Description of Artificial Sequence: Synthetic oligonucleotide
uagucuaacuuguccucuc

SEQ ID NO: 905294 - RNA, 19 nt, Artificial Sequence
  Description of Artificial Sequence: Synthetic oligonucleotide
cuugauccguggauacaac

SEQ ID NO: 905295 - RNA, 19 nt, Artificial Sequence
  Description of Artificial Sequence: Synthetic oligonucleotide
gccauuguaugacuggaac

SEQ ID NO: 905296 - RNA, 19 nt, Artificial Sequence
  Description of Artificial Sequence: Synthetic oligonucleotide
cagcguuuacauugacacc

SEQ ID NO: 905297 - RNA, 19 nt, Artificial Sequence
  Description of Artificial Sequence: Synthetic oligonucleotide
ugaucccuucgucguuggg

SEQ ID NO: 905298 - RNA, 19 nt, Artificial Sequence
  Description of Artificial Sequence: Synthetic oligonucleotide
gauagcggccccacuuucc

SEQ ID NO: 905299 - RNA, 19 nt, Artificial Sequence
  Description of Artificial Sequence: Synthetic oligonucleotide
cagcuaguguauugcuggg

SEQ ID NO: 905300 - RNA, 19 nt, Artificial Sequence
  Description of Artificial Sequence: Synthetic oligonucleotide
ccagguuaccuuaaaagca

SEQ ID NO: 905301 - RNA, 19 nt, Artificial Sequence
  Description of Artificial Sequence: Synthetic oligonucleotide
gauggucgaagaaagaauu

SEQ ID NO: 905302 - RNA, 19 nt, Artificial Sequence
  Description of Artificial Sequence: Synthetic oligonucleotide
acagauugccguucauaau

SEQ ID NO: 905303 - RNA, 19 nt, Artificial Sequence
  Description of Artificial Sequence: Synthetic oligonucleotide
agugcgcuuuucuccaggu

SEQ ID NO: 905304 - RNA, 19 nt, Artificial Sequence
  Description of Artificial Sequence: Synthetic oligonucleotide
gggugaguucaacucgugg

SEQ ID NO: 905305 - RNA, 19 nt, Artificial Sequence
  Description of Artificial Sequence: Synthetic oligonucleotide
ucguaagauugcagucuga

SEQ ID NO: 905306 - RNA, 19 nt, Artificial Sequence
  Description of Artificial Sequence: Synthetic oligonucleotide
gccucguagucccacagag

SEQ ID NO: 905307 - RNA, 19 nt, Artificial Sequence
  Description of Artificial Sequence: Synthetic oligonucleotide
ccucgauggucgaagaaag

SEQ ID NO: 905308 - RNA, 19 nt, Artificial Sequence
  Description of Artificial Sequence: Synthetic oligonucleotide
aguguauugcugggaagcu

SEQ ID NO: 905309 - RNA, 19 nt, Artificial Sequence
  Description of Artificial Sequence: Synthetic oligonucleotide
gcuaaugagacugguacuc

SEQ ID NO: 905310 - RNA, 19 nt, Artificial Sequence
  Description of Artificial Sequence: Synthetic oligonucleotide
uccgucugcuaaagugagc

SEQ ID NO: 905311 - RNA, 19 nt, Artificial Sequence
  Description of Artificial Sequence: Synthetic oligonucleotide
cuguagucuaacuuguccu

SEQ ID NO: 905312 - RNA, 19 nt, Artificial Sequence
  Description of Artificial Sequence: Synthetic oligonucleotide
agguacacucguuaacauu

SEQ ID NO: 905313 - RNA, 19 nt, Artificial Sequence
  Description of Artificial Sequence: Synthetic oligonucleotide
agacgagcccaccaccacu

SEQ ID NO: 905314 - RNA, 19 nt, Artificial Sequence
  Description of Artificial Sequence: Synthetic oligonucleotide
caacucguaagauugcagu

SEQ ID NO: 905315 - RNA, 19 nt, Artificial Sequence
  Description of Artificial Sequence: Synthetic oligonucleotide
uacuguccgucugcuaaag

SEQ ID NO: 905316 - RNA, 19 nt, Artificial Sequence
  Description of Artificial Sequence: Synthetic oligonucleotide
gggacuuguucuuccuccg

SEQ ID NO: 905317 - RNA, 19 nt, Artificial Sequence
  Description of Artificial Sequence: Synthetic oligonucleotide
uucccuucgagguccccac

SEQ ID NO: 905318 - RNA, 19 nt, Artificial Sequence
  Description of Artificial Sequence: Synthetic oligonucleotide
uggaccccauacagaaacu

SEQ ID NO: 905319 - RNA, 19 nt, Artificial Sequence
  Description of Artificial Sequence: Synthetic oligonucleotide
uucgucguuggguuugcua

SEQ ID NO: 905320 - RNA, 19 nt, Artificial Sequence
  Description of Artificial Sequence: Synthetic oligonucleotide
cagucuuguuuuccugggc

SEQ ID NO: 905321 - RNA, 19 nt, Artificial Sequence
  Description of Artificial Sequence: Synthetic oligonucleotide
aucccuucgucguuggguu

SEQ ID NO: 905322 - RNA, 19 nt, Artificial Sequence
  Description of Artificial Sequence: Synthetic oligonucleotide
agaugauccucugcaccag

SEQ ID NO: 905323 - RNA, 19 nt, Artificial Sequence
  Description of Artificial Sequence: Synthetic oligonucleotide
caagugugcgcugccgggg

SEQ ID NO: 905324 - RNA, 19 nt, Artificial Sequence
  Description of Artificial Sequence: Synthetic oligonucleotide
uuuugggcacauagcccuc

SEQ ID NO: 905325 - RNA, 19 nt, Artificial Sequence
  Description of Artificial Sequence: Synthetic oligonucleotide
uccgagggagccucagcca

SEQ ID NO: 905326 - RNA, 19 nt, Artificial Sequence
  Description of Artificial Sequence: Synthetic oligonucleotide
agucucaaugucacugaug

SEQ ID NO: 905327 - RNA, 19 nt, Artificial Sequence
  Description of Artificial Sequence: Synthetic oligonucleotide
uaacccucuuccaucucuu

SEQ ID NO: 905328 - RNA, 19 nt, Artificial Sequence
  Description of Artificial Sequence: Synthetic oligonucleotide
ggucgaagaaagaauuuuc

SEQ ID NO: 905329 - RNA, 19 nt, Artificial Sequence
  Description of Artificial Sequence: Synthetic oligonucleotide
gcacucucagcccaugccc

SEQ ID NO: 905330 - RNA, 19 nt, Artificial Sequence
  Description of Artificial Sequence: Synthetic oligonucleotide
gccguucauaauuuugcug

SEQ ID NO: 905331 - RNA, 19 nt, Artificial Sequence
  Description of Artificial Sequence: Synthetic oligonucleotide
uuguuguccucagcaggcc

SEQ ID NO: 905332 - RNA, 19 nt, Artificial Sequence
  Description of Artificial Sequence: Synthetic oligonucleotide
agcuguagcucuugguaua

SEQ ID NO: 905333 - RNA, 19 nt, Artificial Sequence
  Description of Artificial Sequence: Synthetic oligonucleotide
gaccccauacagaaacuga

SEQ ID NO: 905334 - RNA, 19 nt, Artificial Sequence
  Description of Artificial Sequence: Synthetic oligonucleotide
cucugcaccagaucaaacu

SEQ ID NO: 905335 - RNA, 19 nt, Artificial Sequence
  Description of Artificial Sequence: Synthetic oligonucleotide
uggcauugguauuuccauu

SEQ ID NO: 905336 - RNA, 19 nt, Artificial Sequence
  Description of Artificial Sequence: Synthetic oligonucleotide
agcugacagauugccguuc

SEQ ID NO: 905337 - RNA, 19 nt, Artificial Sequence
  Description of Artificial Sequence: Synthetic oligonucleotide
aguagcuccugggagcuaa

SEQ ID NO: 905338 - RNA, 19 nt, Artificial Sequence
  Description of Artificial Sequence: Synthetic oligonucleotide
cagaggggugaucccuucg

SEQ ID NO: 905339 - RNA, 19 nt, Artificial Sequence
  Description of Artificial Sequence: Synthetic oligonucleotide
gugaucccuucgucguugg

SEQ ID NO: 905340 - RNA, 19 nt, Artificial Sequence
  Description of Artificial Sequence: Synthetic oligonucleotide
aacucgccuuccagggacg

SEQ ID NO: 905341 - RNA, 19 nt, Artificial Sequence
  Description of Artificial Sequence: Synthetic oligonucleotide
ugguccguuugcucgcaga

SEQ ID NO: 905342 - RNA, 19 nt, Artificial Sequence
  Description of Artificial Sequence: Synthetic oligonucleotide
guugcaagaggcagcacaa

SEQ ID NO: 905343 - RNA, 19 nt, Artificial Sequence
  Description of Artificial Sequence: Synthetic oligonucleotide
uguggucauaggggauggg

SEQ ID NO: 905344 - RNA, 19 nt, Artificial Sequence
  Description of Artificial Sequence: Synthetic oligonucleotide
gaggaggccucgaucuaag

SEQ ID NO: 905345 - RNA, 19 nt, Artificial Sequence
  Description of Artificial Sequence: Synthetic oligonucleotide
cagauugccguucauaauu

SEQ ID NO: 905346 - RNA, 19 nt, Artificial Sequence
  Description of Artificial Sequence: Synthetic oligonucleotide
auacuguccgucugcuaaa

SEQ ID NO: 905347 - RNA, 19 nt, Artificial Sequence
  Description of Artificial Sequence: Synthetic oligonucleotide
guccccuucauggaaggac

SEQ ID NO: 905348 - RNA, 19 nt, Artificial Sequence
  Description of Artificial Sequence: Synthetic oligonucleotide
aguccucgauggucgaaga

SEQ ID NO: 905349 - RNA, 19 nt, Artificial Sequence
  Description of Artificial Sequence: Synthetic oligonucleotide
guccgucugcuaaagugag

SEQ ID NO: 905350 - RNA, 19 nt, Artificial Sequence
  Description of Artificial Sequence: Synthetic oligonucleotide
ugaguucaacucguggauu

SEQ ID NO: 905351 - RNA, 19 nt, Artificial Sequence
  Description of Artificial Sequence: Synthetic oligonucleotide
acgaugugaugguggccag

SEQ ID NO: 905352 - RNA, 19 nt, Artificial Sequence
  Description of Artificial Sequence: Synthetic oligonucleotide
cauugacaccaaaguccag

SEQ ID NO: 905353 - RNA, 19 nt, Artificial Sequence
  Description of Artificial Sequence: Synthetic oligonucleotide
gcuaguguauugcugggaa

SEQ ID NO: 905354 - RNA, 19 nt, Artificial Sequence
  Description of Artificial Sequence: Synthetic oligonucleotide
gauacaaccccagcaaguu

SEQ ID NO: 905355 - RNA, 19 nt, Artificial Sequence
  Description of Artificial Sequence: Synthetic oligonucleotide
uguaacccucuuccaucuc

SEQ ID NO: 905356 - RNA, 19 nt, Artificial Sequence
  Description of Artificial Sequence: Synthetic oligonucleotide
guauugcugggaagcuggg

SEQ ID NO: 905357 - RNA, 19 nt, Artificial Sequence
  Description of Artificial Sequence: Synthetic oligonucleotide
caccagaucaaacucgccu

SEQ ID NO: 905358 - RNA, 19 nt, Artificial Sequence
  Description of Artificial Sequence: Synthetic oligonucleotide
auggcguccccuucaugga

SEQ ID NO: 905359 - RNA, 19 nt, Artificial Sequence
  Description of Artificial Sequence: Synthetic oligonucleotide
cauccgucacugucagcag

SEQ ID NO: 905360 - RNA, 19 nt, Artificial Sequence
  Description of Artificial Sequence: Synthetic oligonucleotide
aacucgaaccuaacauuuu

SEQ ID NO: 905361 - RNA, 19 nt, Artificial Sequence
  Description of Artificial Sequence: Synthetic oligonucleotide
ucguggauuucaaccccau

SEQ ID NO: 905362 - RNA, 19 nt, Artificial Sequence
  Description of Artificial Sequence: Synthetic oligonucleotide
ccagggacgcaucaagaag

SEQ ID NO: 905363 - RNA, 19 nt, Artificial Sequence
  Description of Artificial Sequence: Synthetic oligonucleotide
acucucagcccaugcccug

SEQ ID NO: 905364 - RNA, 19 nt, Artificial Sequence
  Description of Artificial Sequence: Synthetic oligonucleotide
uuuucagguugguccguuu

SEQ ID NO: 905365 - RNA, 19 nt, Artificial Sequence
  Description of Artificial Sequence: Synthetic oligonucleotide
gggauugaagcgcacucuc

SEQ ID NO: 905366 - RNA, 19 nt, Artificial Sequence
  Description of Artificial Sequence: Synthetic oligonucleotide
gagcacuggauguaacccu

SEQ ID NO: 905367 - RNA, 19 nt, Artificial Sequence
  Description of Artificial Sequence: Synthetic oligonucleotide
acucgccuuccagggacgc

SEQ ID NO: 905368 - RNA, 19 nt, Artificial Sequence
  Description of Artificial Sequence: Synthetic oligonucleotide
gacgagcccaccaccacuc

SEQ ID NO: 905369 - RNA, 19 nt, Artificial Sequence
  Description of Artificial Sequence: Synthetic oligonucleotide
caaugcagcgguguccauc

SEQ ID NO: 905370 - RNA, 19 nt, Artificial Sequence
  Description of Artificial Sequence: Synthetic oligonucleotide
gguugguccguuugcucgc

SEQ ID NO: 905371 - RNA, 19 nt, Artificial Sequence
  Description of Artificial Sequence: Synthetic oligonucleotide
cuggcugccauaucuugaa

SEQ ID NO: 905372 - RNA, 19 nt, Artificial Sequence
  Description of Artificial Sequence: Synthetic oligonucleotide
uggggcgcucacuuccucu

SEQ ID NO: 905373 - RNA, 19 nt, Artificial Sequence
  Description of Artificial Sequence: Synthetic oligonucleotide
ugcgccucaggauggugau

SEQ ID NO: 905374 - RNA, 19 nt, Artificial Sequence
  Description of Artificial Sequence: Synthetic oligonucleotide
gaggggugaucccuucguc

SEQ ID NO: 905375 - RNA, 19 nt, Artificial Sequence
  Description of Artificial Sequence: Synthetic oligonucleotide
ccguucauaauuuugcugu

SEQ ID NO: 905376 - RNA, 19 nt, Artificial Sequence
  Description of Artificial Sequence: Synthetic oligonucleotide
uugguccguuugcucgcag

SEQ ID NO: 905377 - RNA, 19 nt, Artificial Sequence
  Description of Artificial Sequence: Synthetic oligonucleotide
ggacuugggaucugcucug

SEQ ID NO: 905378 - RNA, 19 nt, Artificial Sequence
  Description of Artificial Sequence: Synthetic oligonucleotide
cucguggauuucaacccca

SEQ ID NO: 905379 - RNA, 19 nt, Artificial Sequence
  Description of Artificial Sequence: Synthetic oligonucleotide
cuguccguuccgaguuagg

SEQ ID NO: 905380 - RNA, 19 nt, Artificial Sequence
  Description of Artificial Sequence: Synthetic oligonucleotide
gugaguucaacucguggau

SEQ ID NO: 905381 - RNA, 19 nt, Artificial Sequence
  Description of Artificial Sequence: Synthetic oligonucleotide
cucgcagauguugcuggag

SEQ ID NO: 905382 - RNA, 19 nt, Artificial Sequence
  Description of Artificial Sequence: Synthetic oligonucleotide
agcuaguguauugcuggga

SEQ ID NO: 905383 - RNA, 19 nt, Artificial Sequence
  Description of Artificial Sequence: Synthetic oligonucleotide
uggaacccauucaguuuuc

SEQ ID NO: 905384 - RNA, 19 nt, Artificial Sequence
  Description of Artificial Sequence: Synthetic oligonucleotide
caccaguugcuugcagagg

SEQ ID NO: 905385 - RNA, 19 nt, Artificial Sequence
  Description of Artificial Sequence: Synthetic oligonucleotide
ucgccuuccagggacgcau

SEQ ID NO: 905386 - RNA, 19 nt, Artificial Sequence
  Description of Artificial Sequence: Synthetic oligonucleotide
uucuucccuucgagguccc

SEQ ID NO: 905387 - RNA, 19 nt, Artificial Sequence
  Description of Artificial Sequence: Synthetic oligonucleotide
agauugccguucauaauuu

SEQ ID NO: 905388 - RNA, 19 nt, Artificial Sequence
  Description of Artificial Sequence: Synthetic oligonucleotide
aggcaagugugcgcugccg

SEQ ID NO: 905389 - RNA, 19 nt, Artificial Sequence
  Description of Artificial Sequence: Synthetic oligonucleotide
cagaaacuucacgauguga

SEQ ID NO: 905390 - RNA, 19 nt, Artificial Sequence
  Description of Artificial Sequence: Synthetic oligonucleotide
caccgugaggccguccuag

SEQ ID NO: 905391 - RNA, 19 nt, Artificial Sequence
  Description of Artificial Sequence: Synthetic oligonucleotide
cucgaaccuaacauuuugu

SEQ ID NO: 905392 - RNA, 19 nt, Artificial Sequence
  Description of Artificial Sequence: Synthetic oligonucleotide
ccauccgucacugucagca

SEQ ID NO: 905393 - RNA, 19 nt, Artificial Sequence
  Description of Artificial Sequence: Synthetic oligonucleotide
ggaccccauacagaaacug

SEQ ID NO: 905394 - RNA, 19 nt, Artificial Sequence
  Description of Artificial Sequence: Synthetic oligonucleotide
ccguccuagcuucuguucc

SEQ ID NO: 905395 - RNA, 19 nt, Artificial Sequence
  Description of Artificial Sequence: Synthetic oligonucleotide
ggugauggcguccccuuca

SEQ ID NO: 905396 - RNA, 19 nt, Artificial Sequence
  Description of Artificial Sequence: Synthetic oligonucleotide
cucgauggucgaagaaaga

SEQ ID NO: 905397 - RNA, 19 nt, Artificial Sequence
  Description of Artificial Sequence: Synthetic oligonucleotide
agguuaccuuaaaagcaga

SEQ ID NO: 905398 - RNA, 19 nt, Artificial Sequence
  Description of Artificial Sequence: Synthetic oligonucleotide
ccaagacgagcccaccacc

SEQ ID NO: 905399 - RNA, 19 nt, Artificial Sequence
  Description of Artificial Sequence: Synthetic oligonucleotide
ggugaucccuucgucguug

SEQ ID NO: 905400 - RNA, 19 nt, Artificial Sequence
  Description of Artificial Sequence: Synthetic oligonucleotide
cucagcccaugcccugucc

SEQ ID NO: 905401 - RNA, 19 nt, Artificial Sequence
  Description of Artificial Sequence: Synthetic oligonucleotide
ucucagcccaugcccuguc

SEQ ID NO: 905402 - RNA, 19 nt, Artificial Sequence
  Description of Artificial Sequence: Synthetic oligonucleotide
gcugccggggcuugauccg

SEQ ID NO: 905403 - RNA, 19 nt, Artificial Sequence
  Description of Artificial Sequence: Synthetic oligonucleotide
cgaucuaaguugccauugg

SEQ ID NO: 905404 - RNA, 19 nt, Artificial Sequence
  Description of Artificial Sequence: Synthetic oligonucleotide
auggucgaagaaagaauuu

SEQ ID NO: 905405 - RNA, 19 nt, Artificial Sequence
  Description of Artificial Sequence: Synthetic oligonucleotide
ugguacuccaggggaaguu

SEQ ID NO: 905406 - RNA, 19 nt, Artificial Sequence
  Description of Artificial Sequence: Synthetic oligonucleotide
ugacgaccaccuuguucac

SEQ ID NO: 905407 - RNA, 19 nt, Artificial Sequence
  Description of Artificial Sequence: Synthetic oligonucleotide
agggacgcaucaagaagca

SEQ ID NO: 905408 - RNA, 19 nt, Artificial Sequence
  Description of Artificial Sequence: Synthetic oligonucleotide
guacuccaggggaaguuca

SEQ ID NO: 905409 - RNA, 19 nt, Artificial Sequence
  Description of Artificial Sequence: Synthetic oligonucleotide
gcucuuggguuugacgacc

SEQ ID NO: 905410 - RNA, 19 nt, Artificial Sequence
  Description of Artificial Sequence: Synthetic oligonucleotide
aggccguccuagcuucugu

SEQ ID NO: 905411 - RNA, 19 nt, Artificial Sequence
  Description of Artificial Sequence: Synthetic oligonucleotide
gagaguccucgauggucga

SEQ ID NO: 905412 - RNA, 19 nt, Artificial Sequence
  Description of Artificial Sequence: Synthetic oligonucleotide
gcuugauccguggauacaa

SEQ ID NO: 905413 - RNA, 19 nt, Artificial Sequence
  Description of Artificial Sequence: Synthetic oligonucleotide
caaacucgccuuccaggga

SEQ ID NO: 905414 - RNA, 19 nt, Artificial Sequence
  Description of Artificial Sequence: Synthetic oligonucleotide
gggcuugauccguggauac

SEQ ID NO: 905415 - RNA, 19 nt, Artificial Sequence
  Description of Artificial Sequence: Synthetic oligonucleotide
gacugguacuccaggggaa

SEQ ID NO: 905416 - RNA, 19 nt, Artificial Sequence
  Description of Artificial Sequence: Synthetic oligonucleotide
cguuggguuugcuaggguc

SEQ ID NO: 905417 - RNA, 19 nt, Artificial Sequence
  Description of Artificial Sequence: Synthetic oligonucleotide
ggaacccauucaguuuucc

SEQ ID NO: 905418 - RNA, 19 nt, Artificial Sequence
  Description of Artificial Sequence: Synthetic oligonucleotide
uccauccgucacugucagc

SEQ ID NO: 905419 - RNA, 19 nt, Artificial Sequence
  Description of Artificial Sequence: Synthetic oligonucleotide
uccuccgagggagccucag

SEQ ID NO: 905420 - RNA, 19 nt, Artificial Sequence
  Description of Artificial Sequence: Synthetic oligonucleotide
ccagguacacucguuaaca

SEQ ID NO: 905421 - RNA, 19 nt, Artificial Sequence
  Description of Artificial Sequence: Synthetic oligonucleotide
cguggauacaaccccagca

SEQ ID NO: 905422 - RNA, 19 nt, Artificial Sequence
  Description of Artificial Sequence: Synthetic oligonucleotide
agugugcgcugccggggcu

SEQ ID NO: 905423 - RNA, 19 nt, Artificial Sequence
  Description of Artificial Sequence: Synthetic oligonucleotide
gguuaccuuaaaagcagaa

SEQ ID NO: 905424 - RNA, 19 nt, Artificial Sequence
  Description of Artificial Sequence: Synthetic oligonucleotide
ugaggccguccuagcuucu

SEQ ID NO: 905425 - RNA, 19 nt, Artificial Sequence
  Description of Artificial Sequence: Synthetic oligonucleotide
ugcuagggucuuccaccuc

SEQ ID NO: 905426 - RNA, 19 nt, Artificial Sequence
  Description of Artificial Sequence: Synthetic oligonucleotide
gcugacagauugccguuca

SEQ ID NO: 905427 - RNA, 19 nt, Artificial Sequence
  Description of Artificial Sequence: Synthetic oligonucleotide
cuccuggaccccauacaga

SEQ ID NO: 905428 - RNA, 19 nt, Artificial Sequence
  Description of Artificial Sequence: Synthetic oligonucleotide
gccagguggcaacugcccc

SEQ ID NO: 905429 - RNA, 19 nt, Artificial Sequence
  Description of Artificial Sequence: Synthetic oligonucleotide
cccaagacgagcccaccac

SEQ ID NO: 905430 - RNA, 19 nt, Artificial Sequence
  Description of Artificial Sequence: Synthetic oligonucleotide
ccagaucaaacucgccuuc

SEQ ID NO: 905431 - RNA, 19 nt, Artificial Sequence
  Description of Artificial Sequence: Synthetic oligonucleotide
ucccuucgagguccccacu

SEQ ID NO: 905432 - RNA, 19 nt, Artificial Sequence
  Description of Artificial Sequence: Synthetic oligonucleotide
gguuugacgaccaccuugu

SEQ ID NO: 905433 - RNA, 19 nt, Artificial Sequence
  Description of Artificial Sequence: Synthetic oligonucleotide
agcccucccgguccccaag

SEQ ID NO: 905434 - RNA, 19 nt, Artificial Sequence
  Description of Artificial Sequence: Synthetic oligonucleotide
gcaaagauagcggccccac

SEQ ID NO: 905435 - RNA, 19 nt, Artificial Sequence
  Description of Artificial Sequence: Synthetic oligonucleotide
ugcuggaggaugggacgac

SEQ ID NO: 905436 - RNA, 19 nt, Artificial Sequence
  Description of Artificial Sequence: Synthetic oligonucleotide
ucauggcacggaucuucuu

SEQ ID NO: 905437 - RNA, 19 nt, Artificial Sequence
  Description of Artificial Sequence: Synthetic oligonucleotide
gaggccguccuagcuucug

SEQ ID NO: 905438 - RNA, 19 nt, Artificial Sequence
  Description of Artificial Sequence: Synthetic oligonucleotide
caucuuugcgccucaggau

SEQ ID NO: 905439 - RNA, 19 nt, Artificial Sequence
  Description of Artificial Sequence: Synthetic oligonucleotide
ccgguccccaagacgagcc

SEQ ID NO: 905440 - RNA, 19 nt, Artificial Sequence
  Description of Artificial Sequence: Synthetic oligonucleotide
gcguccccuucauggaagg

SEQ ID NO: 905441 - RNA, 19 nt, Artificial Sequence
  Description of Artificial Sequence: Synthetic oligonucleotide
cauucucagugcgcuuuuc

SEQ ID NO: 905442 - RNA, 19 nt, Artificial Sequence
  Description of Artificial Sequence: Synthetic oligonucleotide
ggauugaagcgcacucuca

SEQ ID NO: 905443 - RNA, 19 nt, Artificial Sequence
  Description of Artificial Sequence: Synthetic oligonucleotide
gcugccauaucuugaaguu

SEQ ID NO: 905444 - RNA, 19 nt, Artificial Sequence
  Description of Artificial Sequence: Synthetic oligonucleotide
guugccuggcugccauauc

SEQ ID NO: 905445 - RNA, 19 nt, Artificial Sequence
  Description of Artificial Sequence: Synthetic oligonucleotide
gggccucguagucccacag

SEQ ID NO: 905446 - RNA, 19 nt, Artificial Sequence
  Description of Artificial Sequence: Synthetic oligonucleotide
cuaguagcuccugggagcu

SEQ ID NO: 905447 - RNA, 19 nt, Artificial Sequence
  Description of Artificial Sequence: Synthetic oligonucleotide
ggauacaaccccagcaagu

SEQ ID NO: 905448 - RNA, 19 nt, Artificial Sequence
  Description of Artificial Sequence: Synthetic oligonucleotide
cgucguuggguuugcuagg

SEQ ID NO: 905449 - RNA, 19 nt, Artificial Sequence
  Description of Artificial Sequence: Synthetic oligonucleotide
ggacuuguucuuccuccga

SEQ ID NO: 905450 - RNA, 19 nt, Artificial Sequence
  Description of Artificial Sequence: Synthetic oligonucleotide
guccucgauggucgaagaa

SEQ ID NO: 905451 - RNA, 19 nt, Artificial Sequence
  Description of Artificial Sequence: Synthetic oligonucleotide
cucauggcacggaucuucu

SEQ ID NO: 905452 - RNA, 19 nt, Artificial Sequence
  Description of Artificial Sequence: Synthetic oligonucleotide
ccgagggagccucagccac

SEQ ID NO: 905453 - RNA, 19 nt, Artificial Sequence
  Description of Artificial Sequence: Synthetic oligonucleotide
ggcuucaacucgaaccuaa

SEQ ID NO: 905454 - RNA, 19 nt, Artificial Sequence
  Description of Artificial Sequence: Synthetic oligonucleotide
cagcagcguuuacauugac

SEQ ID NO: 905455 - RNA, 19 nt, Artificial Sequence
  Description of Artificial Sequence: Synthetic oligonucleotide
gcucaggggaagguaacuc

SEQ ID NO: 905456 - RNA, 19 nt, Artificial Sequence
  Description of Artificial Sequence: Synthetic oligonucleotide
cacucucagcccaugcccu

SEQ ID NO: 905457 - RNA, 19 nt, Artificial Sequence
  Description of Artificial Sequence: Synthetic oligonucleotide
cauuguggauacuguccgu

SEQ ID NO: 905458 - RNA, 19 nt, Artificial Sequence
  Description of Artificial Sequence: Synthetic oligonucleotide
ggggugaucccuucgucgu

SEQ ID NO: 905459 - RNA, 19 nt, Artificial Sequence
  Description of Artificial Sequence: Synthetic oligonucleotide
agaguccucgauggucgaa

SEQ ID NO: 905460 - RNA, 19 nt, Artificial Sequence
  Description of Artificial Sequence: Synthetic oligonucleotide
cguuugcucgcagauguug

SEQ ID NO: 905461 - RNA, 19 nt, Artificial Sequence
  Description of Artificial Sequence: Synthetic oligonucleotide
ggagcuaaugagacuggua

SEQ ID NO: 905462 - RNA, 19 nt, Artificial Sequence
  Description of Artificial Sequence: Synthetic oligonucleotide
gccguccuagcuucuguuc

SEQ ID NO: 905463 - RNA, 19 nt, Artificial Sequence
  Description of Artificial Sequence: Synthetic oligonucleotide
cagguacacucguuaacau

SEQ ID NO: 905464 - RNA, 19 nt, Artificial Sequence
  Description of Artificial Sequence: Synthetic oligonucleotide
cucgaucuaaguugccauu

SEQ ID NO: 905465 - RNA, 19 nt, Artificial Sequence
  Description of Artificial Sequence: Synthetic oligonucleotide
agcgcacucucagcccaug

SEQ ID NO: 905466 - RNA, 19 nt, Artificial Sequence
  Description of Artificial Sequence: Synthetic oligonucleotide
ccguggauacaaccccagc

SEQ ID NO: 905467 - RNA, 19 nt, Artificial Sequence
  Description of Artificial Sequence: Synthetic oligonucleotide
gguacuggggccacauugu

SEQ ID NO: 905468 - RNA, 19 nt, Artificial Sequence
  Description of Artificial Sequence: Synthetic oligonucleotide
cccauucaguuuucccuuc

SEQ ID NO: 905469 - RNA, 19 nt, Artificial Sequence
  Description of Artificial Sequence: Synthetic oligonucleotide
ucccuucgucguuggguuu

SEQ ID NO: 905470 - RNA, 19 nt, Artificial Sequence
  Description of Artificial Sequence: Synthetic oligonucleotide
gggacgcaucaagaagcag

SEQ ID NO: 905471 - RNA, 19 nt, Artificial Sequence
  Description of Artificial Sequence: Synthetic oligonucleotide
guugguccguuugcucgca

SEQ ID NO: 905472 - RNA, 19 nt, Artificial Sequence
  Description of Artificial Sequence: Synthetic oligonucleotide
ggaggccucgaucuaaguu

SEQ ID NO: 905473 - RNA, 19 nt, Artificial Sequence
  Description of Artificial Sequence: Synthetic oligonucleotide
ggcaaagauagcggcccca

SEQ ID NO: 905474 - RNA, 19 nt, Artificial Sequence
  Description of Artificial Sequence: Synthetic oligonucleotide
cauagcccucccggucccc

SEQ ID NO: 905475 - RNA, 19 nt, Artificial Sequence
  Description of Artificial Sequence: Synthetic oligonucleotide
caaagauagcggccccacu

SEQ ID NO: 905476 - RNA, 19 nt, Artificial Sequence
  Description of Artificial Sequence: Synthetic oligonucleotide
cguaagauugcagucugaa

SEQ ID NO: 905477 - RNA, 19 nt, Artificial Sequence
  Description of Artificial Sequence: Synthetic oligonucleotide
ccuguccguuccgaguuag

SEQ ID NO: 905478 - RNA, 19 nt, Artificial Sequence
  Description of Artificial Sequence: Synthetic oligonucleotide
gguccguuugcucgcagau

SEQ ID NO: 905479 - RNA, 19 nt, Artificial Sequence
  Description of Artificial Sequence: Synthetic oligonucleotide
aagcgcacucucagcccau

SEQ ID NO: 905480 - RNA, 19 nt, Artificial Sequence
  Description of Artificial Sequence: Synthetic oligonucleotide
cucuugguauagucguuuu

SEQ ID NO: 905481 - RNA, 19 nt, Artificial Sequence
  Description of Artificial Sequence: Synthetic oligonucleotide
ggaacccucucuaguagcu

SEQ ID NO: 905482 - RNA, 19 nt, Artificial Sequence
  Description of Artificial Sequence: Synthetic oligonucleotide
gauggggcgcucacuuccu

SEQ ID NO: 905483 - RNA, 19 nt, Artificial Sequence
  Description of Artificial Sequence: Synthetic oligonucleotide
ggggaagguaacucauuau

SEQ ID NO: 905484 - RNA, 19 nt, Artificial Sequence
  Description of Artificial Sequence: Synthetic oligonucleotide
gugcgcuuuucuccaggua

SEQ ID NO: 905485 - RNA, 19 nt, Artificial Sequence
  Description of Artificial Sequence: Synthetic oligonucleotide
gcaccagaucaaacucgcc

SEQ ID NO: 905486 - RNA, 19 nt, Artificial Sequence
  Description of Artificial Sequence: Synthetic oligonucleotide
cccuucgucguuggguuug

SEQ ID NO: 905487 - RNA, 19 nt, Artificial Sequence
  Description of Artificial Sequence: Synthetic oligonucleotide
ggggcuugauccguggaua

SEQ ID NO: 905488 - RNA, 19 nt, Artificial Sequence
  Description of Artificial Sequence: Synthetic oligonucleotide
agcccaugcccuguccguu

SEQ ID NO: 905489 - RNA, 19 nt, Artificial Sequence
  Description of Artificial Sequence: Synthetic oligonucleotide
guacuggggccacauuguu

SEQ ID NO: 905490 - RNA, 19 nt, Artificial Sequence
  Description of Artificial Sequence: Synthetic oligonucleotide
guccugucaaccugccauu

SEQ ID NO: 905491 - RNA, 19 nt, Artificial Sequence
  Description of Artificial Sequence: Synthetic oligonucleotide
gggauggggcgcucacuuc

SEQ ID NO: 905492 - RNA, 19 nt, Artificial Sequence
  Description of Artificial Sequence: Synthetic oligonucleotide
ggccucguagucccacaga

SEQ ID NO: 905493 - RNA, 19 nt, Artificial Sequence
  Description of Artificial Sequence: Synthetic oligonucleotide
ggcuugauccguggauaca

SEQ ID NO: 905494 - RNA, 19 nt, Artificial Sequence
  Description of Artificial Sequence: Synthetic oligonucleotide
ugagcaccgugaggccguc

SEQ ID NO: 905495 - RNA, 19 nt, Artificial Sequence
  Description of Artificial Sequence: Synthetic oligonucleotide
gugagcaccgugaggccgu

SEQ ID NO: 905496 - RNA, 19 nt, Artificial Sequence
  Description of Artificial Sequence: Synthetic oligonucleotide
gcucgcagauguugcugga

SEQ ID NO: 905497 - RNA, 19 nt, Artificial Sequence
  Description of Artificial Sequence: Synthetic oligonucleotide
gccaggggauugaagcgca

SEQ ID NO: 905498 - RNA, 19 nt, Artificial Sequence
  Description of Artificial Sequence: Synthetic oligonucleotide
gagcaccgugaggccgucc

SEQ ID NO: 905499 - RNA, 19 nt, Artificial Sequence
  Description of Artificial Sequence: Synthetic oligonucleotide
gcgcucacuuccucuccac

SEQ ID NO: 905500 - RNA, 19 nt, Artificial Sequence
  Description of Artificial Sequence: Synthetic oligonucleotide
ccucgaucuaaguugccau

SEQ ID NO: 905501 - RNA, 19 nt, Artificial Sequence
  Description of Artificial Sequence: Synthetic oligonucleotide
caggggaagguaacucauu

SEQ ID NO: 905502 - RNA, 19 nt, Artificial Sequence
  Description of Artificial Sequence: Synthetic oligonucleotide
ccuucgucguuggguuugc

SEQ ID NO: 905503 - RNA, 19 nt, Artificial Sequence
  Description of Artificial Sequence: Synthetic oligonucleotide
gccacaggacuugggaucu

SEQ ID NO: 905504 - RNA, 19 nt, Artificial Sequence
  Description of Artificial Sequence: Synthetic oligonucleotide
cgauggucgaagaaagaau

SEQ ID NO: 905505 - RNA, 19 nt, Artificial Sequence
  Description of Artificial Sequence: Synthetic oligonucleotide
cucgccuuccagggacgca

SEQ ID NO: 905506 - RNA, 19 nt, Artificial Sequence
  Description of Artificial Sequence: Synthetic oligonucleotide
cagcugacagauugccguu

SEQ ID NO: 905507 - RNA, 19 nt, Artificial Sequence
  Description of Artificial Sequence: Synthetic oligonucleotide
cugacagauugccguucau

SEQ ID NO: 905508 - RNA, 19 nt, Artificial Sequence
  Description of Artificial Sequence: Synthetic oligonucleotide
gcgguguccauccgucacu

SEQ ID NO: 905509 - RNA, 19 nt, Artificial Sequence
  Description of Artificial Sequence: Synthetic oligonucleotide
cugguacuccaggggaagu

SEQ ID NO: 905510 - RNA, 19 nt, Artificial Sequence
  Description of Artificial Sequence: Synthetic oligonucleotide
guuugacgaccaccuuguu

SEQ ID NO: 905511 - RNA, 19 nt, Artificial Sequence
  Description of Artificial Sequence: Synthetic oligonucleotide
cgagguccccacuucugca

SEQ ID NO: 905512 - RNA, 19 nt, Artificial Sequence
  Description of Artificial Sequence: Synthetic oligonucleotide
gggaggaggccucgaucua

SEQ ID NO: 905513 - RNA, 19 nt, Artificial Sequence
  Description of Artificial Sequence: Synthetic oligonucleotide
cugcuaagcuguagcucuu

SEQ ID NO: 905514 - RNA, 19 nt, Artificial Sequence
  Description of Artificial Sequence: Synthetic oligonucleotide
gcccuguccguuccgaguu

SEQ ID NO: 905515 - RNA, 19 nt, Artificial Sequence
  Description of Artificial Sequence: Synthetic oligonucleotide
cuuugcgccucaggauggu

SEQ ID NO: 905516 - RNA, 19 nt, Artificial Sequence
  Description of Artificial Sequence: Synthetic oligonucleotide
cugcuaaagugagcaccgu

SEQ ID NO: 905517 - RNA, 19 nt, Artificial Sequence
  Description of Artificial Sequence: Synthetic oligonucleotide
cuguagcucuugguauagu

SEQ ID NO: 905518 - RNA, 19 nt, Artificial Sequence
  Description of Artificial Sequence: Synthetic oligonucleotide
cuguugccuggcugccaua

SEQ ID NO: 905519 - RNA, 19 nt, Artificial Sequence
  Description of Artificial Sequence: Synthetic oligonucleotide
ccuggaccccauacagaaa

SEQ ID NO: 905520 - RNA, 19 nt, Artificial Sequence
  Description of Artificial Sequence: Synthetic oligonucleotide
gcccucccgguccccaaga

SEQ ID NO: 905521 - RNA, 19 nt, Artificial Sequence
  Description of Artificial Sequence: Synthetic oligonucleotide
cgguccccaagacgagccc

SEQ ID NO: 905522 - RNA, 19 nt, Artificial Sequence
  Description of Artificial Sequence: Synthetic oligonucleotide
gcuugcagagguggacacu

SEQ ID NO: 905523 - RNA, 19 nt, Artificial Sequence
  Description of Artificial Sequence: Synthetic oligonucleotide
gcgccucaggauggugaug

SEQ ID NO: 905524 - RNA, 19 nt, Artificial Sequence
  Description of Artificial Sequence: Synthetic oligonucleotide
gcaggccaguuugaugagu

SEQ ID NO: 905525 - RNA, 19 nt, Artificial Sequence
  Description of Artificial Sequence: Synthetic oligonucleotide
ggccguccuagcuucuguu

SEQ ID NO: 905526 - RNA, 19 nt, Artificial Sequence
  Description of Artificial Sequence: Synthetic oligonucleotide
gcagauggucauacaucau

SEQ ID NO: 905527 - RNA, 19 nt, Artificial Sequence
  Description of Artificial Sequence: Synthetic oligonucleotide
gggcuucaacucgaaccua

SEQ ID NO: 905528 - RNA, 19 nt, Artificial Sequence
  Description of Artificial Sequence: Synthetic oligonucleotide
cguuaacauuucucugagu

SEQ ID NO: 905529 - RNA, 19 nt, Artificial Sequence
  Description of Artificial Sequence: Synthetic oligonucleotide
cccauucucagugcgcuuu

SEQ ID NO: 905530 - RNA, 19 nt, Artificial Sequence
  Description of Artificial Sequence: Synthetic oligonucleotide
cuucgucguuggguuugcu

SEQ ID NO: 905531 - RNA, 19 nt, Artificial Sequence
  Description of Artificial Sequence: Synthetic oligonucleotide
gggugaucccuucgucguu

SEQ ID NO: 905532 - RNA, 19 nt, Artificial Sequence
  Description of Artificial Sequence: Synthetic oligonucleotide
ccggggcuugauccgugga

SEQ ID NO: 905533 - RNA, 19 nt, Artificial Sequence
  Description of Artificial Sequence: Synthetic oligonucleotide
ccgugaggccguccuagcu

SEQ ID NO: 905534 - RNA, 19 nt, Artificial Sequence
  Description of Artificial Sequence: Synthetic oligonucleotide
gugugcgcugccggggcuu

SEQ ID NO: 905535 - RNA, 19 nt, Artificial Sequence
  Description of Artificial Sequence: Synthetic oligonucleotide
cccuucgagguccccacuu

SEQ ID NO: 905536 - RNA, 19 nt, Artificial Sequence
  Description of Artificial Sequence: Synthetic oligonucleotide
cccuguccguuccgaguua

SEQ ID NO: 905537 - RNA, 19 nt, Artificial Sequence
  Description of Artificial Sequence: Synthetic oligonucleotide
cggggcuugauccguggau

SEQ ID NO: 905538 - RNA, 19 nt, Artificial Sequence
  Description of Artificial Sequence: Synthetic oligonucleotide
cguggauuucaaccccauu

SEQ ID NO: 905539 - RNA, 19 nt, Artificial Sequence
  Description of Artificial Sequence: Synthetic oligonucleotide
ccguuccgaguuaggcuuu

SEQ ID NO: 905540 - RNA, 19 nt, Artificial Sequence
  Description of Artificial Sequence: Synthetic oligonucleotide
cguuccgaguuaggcuuuu

SEQ ID NO: 905541 - RNA, 19 nt, Artificial Sequence
  Description of Artificial Sequence: Synthetic oligonucleotide
aauuugagcaggcauaggc

SEQ ID NO: 905542 - RNA, 19 nt, Artificial Sequence
  Description of Artificial Sequence: Synthetic oligonucleotide
uaacagacaacuuagacca

SEQ ID NO: 905543 - RNA, 19 nt, Artificial Sequence
  Description of Artificial Sequence: Synthetic oligonucleotide
ugcuaauugauacaugagg

SEQ ID NO: 905544 - RNA, 19 nt, Artificial Sequence
  Description of Artificial Sequence: Synthetic oligonucleotide
  modified_base (3)..(3): a, c, u, g, unknown or other
uunaggauacccauuuugg

SEQ ID NO: 905545 - RNA, 19 nt, Artificial Sequence
  Description of Artificial Sequence: Synthetic oligonucleotide
uuuaguaaccauaaauuca

SEQ ID NO: 905546 - RNA, 19 nt, Artificial Sequence
  Description of Artificial Sequence: Synthetic oligonucleotide
uuacuauuuaaagacaccg

SEQ ID NO: 905547 - RNA, 19 nt, Artificial Sequence
  Description of Artificial Sequence: Synthetic oligonucleotide
uuuaagcuugugcugaagg

SEQ ID NO: 905548 - RNA, 19 nt, Artificial Sequence
  Description of Artificial Sequence: Synthetic oligonucleotide
uuacacaaggaaaacaaug

SEQ ID NO: 905549 - RNA, 19 nt, Artificial Sequence
  Description of Artificial Sequence: Synthetic oligonucleotide
aaugcugugacguaccacu

SEQ ID NO: 905550 - RNA, 19 nt, Artificial Sequence
  Description of Artificial Sequence: Synthetic oligonucleotide
aacguuaugguggagucgc

SEQ ID NO: 905551 - RNA, 19 nt, Artificial Sequence
  Description of Artificial Sequence: Synthetic oligonucleotide
aacauaaucuaaauccuac

SEQ ID NO: 905552 - RNA, 19 nt, Artificial Sequence
  Description of Artificial Sequence: Synthetic oligonucleotide
uuaguaaccauaaauucaa

SEQ ID NO: 905553 - RNA, 19 nt, Artificial Sequence
  Description of Artificial Sequence: Synthetic oligonucleotide
ucugguuuaaacccuuccg

SEQ ID NO: 905554 - RNA, 19 nt, Artificial Sequence
  Description of Artificial Sequence: Synthetic oligonucleotide
uugguaucgaaucagcuca

SEQ ID NO: 905555 - RNA, 19 nt, Artificial Sequence
  Description of Artificial Sequence: Synthetic oligonucleotide
guaacagacaacuuagacc

SEQ ID NO: 905556 - RNA, 19 nt, Artificial Sequence
  Description of Artificial Sequence: Synthetic oligonucleotide
uacagucucaguaacagac

SEQ ID NO: 905557 - RNA, 19 nt, Artificial Sequence
  Description of Artificial Sequence: Synthetic oligonucleotide
uacaccuuagcagagaugc

SEQ ID NO: 905558 - RNA, 19 nt, Artificial Sequence
  Description of Artificial Sequence: Synthetic oligonucleotide
cuacugaacguuauggugg

SEQ ID NO: 905559 - RNA, 19 nt, Artificial Sequence
  Description of Artificial Sequence: Synthetic oligonucleotide
aaacaugcaauuauguuug

SEQ ID NO: 905560 - RNA, 19 nt, Artificial Sequence
  Description of Artificial Sequence: Synthetic oligonucleotide
gacaacuuagaccaguccc

SEQ ID NO: 905561 - RNA, 19 nt, Artificial Sequence
  Description of Artificial Sequence: Synthetic oligonucleotide
aagucuuaguucuuccuuc

SEQ ID NO: 905562 - RNA, 19 nt, Artificial Sequence
  Description of Artificial Sequence: Synthetic oligonucleotide
accaaguucaucuucagcu

SEQ ID NO: 905563 - RNA, 19 nt, Artificial Sequence
  Description of Artificial Sequence: Synthetic oligonucleotide
aguaaccauaaauucaaag

SEQ ID NO: 905564 - RNA, 19 nt, Artificial Sequence
  Description of Artificial Sequence: Synthetic oligonucleotide
uuaguguugagccucaguc

SEQ ID NO: 905565 - RNA, 19 nt, Artificial Sequence
  Description of Artificial Sequence: Synthetic oligonucleotide
gguaagauccuacaggugg

SEQ ID NO: 905566 - RNA, 19 nt, Artificial Sequence
  Description of Artificial Sequence: Synthetic oligonucleotide
ugcaguuuacaauuuaaug

SEQ ID NO: 905567 - RNA, 19 nt, Artificial Sequence
  Description of Artificial Sequence: Synthetic oligonucleotide
aaacaugagaaacaugcaa

SEQ ID NO: 905568 - RNA, 19 nt, Artificial Sequence
  Description of Artificial Sequence: Synthetic oligonucleotide
uuauguuugcauuccuugg

SEQ ID NO: 905569 - RNA, 19 nt, Artificial Sequence
  Description of Artificial Sequence: Synthetic oligonucleotide
  modified_base (2)..(2): a, c, u, g, unknown or other
unaggauacccauuuuggg

SEQ ID NO: 905570 - RNA, 19 nt, Artificial Sequence
  Description of Artificial Sequence: Synthetic oligonucleotide
auaaucuaaauccuacuga

SEQ ID NO: 905571 - RNA, 19 nt, Artificial Sequence
  Description of Artificial Sequence: Synthetic oligonucleotide
uaauugauacaugagguca

SEQ ID NO: 905572 - RNA, 19 nt, Artificial Sequence
  Description of Artificial Sequence: Synthetic oligonucleotide
aaagcuaguuacaacuaac

SEQ ID NO: 905573 - RNA, 19 nt, Artificial Sequence
  Description of Artificial Sequence: Synthetic oligonucleotide
ugaaguuuuaguaaccaua

SEQ ID NO: 905574 - RNA, 19 nt, Artificial Sequence
  Description of Artificial Sequence: Synthetic oligonucleotide
cuugauaugacaagccuug

SEQ ID NO: 905575 - RNA, 19 nt, Artificial Sequence
  Description of Artificial Sequence: Synthetic oligonucleotide
ugugguacaccuuagcaga

SEQ ID NO: 905576 - RNA, 19 nt, Artificial Sequence
  Description of Artificial Sequence: Synthetic oligonucleotide
ugaaguaagggacaggaua

SEQ ID NO: 905577 - RNA, 19 nt, Artificial Sequence
  Description of Artificial Sequence: Synthetic oligonucleotide
auaugcauagcacacuuug

SEQ ID NO: 905578 - RNA, 19 nt, Artificial Sequence
  Description of Artificial Sequence: Synthetic oligonucleotide
auggaugcauaauuugagc

SEQ ID NO: 905579 - RNA, 19 nt, Artificial Sequence
  Description of Artificial Sequence: Synthetic oligonucleotide
uauaugucaucuuucauua

SEQ ID NO: 905580 - RNA, 19 nt, Artificial Sequence
  Description of Artificial Sequence: Synthetic oligonucleotide
ugaaggucuacaaucugag

SEQ ID NO: 905581 - RNA, 19 nt, Artificial Sequence
  Description of Artificial Sequence: Synthetic oligonucleotide
uuugugcaaauauauguca

SEQ ID NO: 905582 - RNA, 19 nt, Artificial Sequence
  Description of Artificial Sequence: Synthetic oligonucleotide
ugagguugugcaaacuggg

SEQ ID NO: 905583 - RNA, 19 nt, Artificial Sequence
  Description of Artificial Sequence: Synthetic oligonucleotide
gaugcauaauuugagcagg

SEQ ID NO: 905584 - RNA, 19 nt, Artificial Sequence
  Description of Artificial Sequence: Synthetic oligonucleotide
  modified_base (4)..(4): a, c, u, g, unknown or other
cuunaggauacccauuuug

SEQ ID NO: 905585 - RNA, 19 nt, Artificial Sequence
  Description of Artificial Sequence: Synthetic oligonucleotide
aaagcaagcaccuggguuu

SEQ ID NO: 905586 - RNA, 19 nt, Artificial Sequence
  Description of Artificial Sequence: Synthetic oligonucleotide
ucuaccaaguucaucuuca

SEQ ID NO: 905587 - RNA, 19 nt, Artificial Sequence
  Description of Artificial Sequence: Synthetic oligonucleotide
aaggucucaagccauacau

SEQ ID NO: 905588 - RNA, 19 nt, Artificial Sequence
  Description of Artificial Sequence: Synthetic oligonucleotide
uaaucuaaauccuacugau

SEQ ID NO: 905589 - RNA, 19 nt, Artificial Sequence
  Description of Artificial Sequence: Synthetic oligonucleotide
auaugacaagccuuggauc

SEQ ID NO: 905590 - RNA, 19 nt, Artificial Sequence
  Description of Artificial Sequence: Synthetic oligonucleotide
gauggauucaccaugcuga

SEQ ID NO: 905591 - RNA, 19 nt, Artificial Sequence
  Description of Artificial Sequence: Synthetic oligonucleotide
aguuccuuaacacagucau

SEQ ID NO: 905592 - RNA, 19 nt, Artificial Sequence
  Description of Artificial Sequence: Synthetic oligonucleotide
uggaugcauaauuugagca

SEQ ID NO: 905593 - RNA, 19 nt, Artificial Sequence
  Description of Artificial Sequence: Synthetic oligonucleotide
gucuauaggacauggcagg

SEQ ID NO: 905594 - RNA, 19 nt, Artificial Sequence
  Description of Artificial Sequence: Synthetic oligonucleotide
uaucgaaucagcucaucgc

SEQ ID NO: 905595 - RNA, 19 nt, Artificial Sequence
  Description of Artificial Sequence: Synthetic oligonucleotide
aaaagcuaguuacaacuaa

SEQ ID NO: 905596 - RNA, 19 nt, Artificial Sequence
  Description of Artificial Sequence: Synthetic oligonucleotide
  modified_base (9)..(9): a, c, u, g, unknown or other
ucuuccuunaggauaccca

SEQ ID NO: 905597 - RNA, 19 nt, Artificial Sequence
  Description of Artificial Sequence: Synthetic oligonucleotide
ugugacguaccacuggaug

SEQ ID NO: 905598 - RNA, 19 nt, Artificial Sequence
  Description of Artificial Sequence: Synthetic oligonucleotide
guaucgaaucagcucaucg

SEQ ID NO: 905599 - RNA, 19 nt, Artificial Sequence
  Description of Artificial Sequence: Synthetic oligonucleotide
augguaagauccuacaggu

SEQ ID NO: 905600 - RNA, 19 nt, Artificial Sequence
  Description of Artificial Sequence: Synthetic oligonucleotide
ugucuugauaugacaagcc

SEQ ID NO: 905601 - RNA, 19 nt, Artificial Sequence
  Description of Artificial Sequence: Synthetic oligonucleotide
aagacaccgagaacuaggc

SEQ ID NO: 905602 - RNA, 19 nt, Artificial Sequence
  Description of Artificial Sequence: Synthetic oligonucleotide
cugguuuaaacccuuccgg

SEQ ID NO: 905603 - RNA, 19 nt, Artificial Sequence
  Description of Artificial Sequence: Synthetic oligonucleotide
ucuaaauccuacugauugc

SEQ ID NO: 905604 - RNA, 19 nt, Artificial Sequence
  Description of Artificial Sequence: Synthetic oligonucleotide
aauguuucagcuggucggg

SEQ ID NO: 905605 - RNA, 19 nt, Artificial Sequence
  Description of Artificial Sequence: Synthetic oligonucleotide
aaguaaaaguuucugucuu

SEQ ID NO: 905606 - RNA, 19 nt, Artificial Sequence
  Description of Artificial Sequence: Synthetic oligonucleotide
aacaugcaauuauguuugc

SEQ ID NO: 905607 - RNA, 19 nt, Artificial Sequence
  Description of Artificial Sequence: Synthetic oligonucleotide
aauugauacaugaggucag

SEQ ID NO: 905608 - RNA, 19 nt, Artificial Sequence
  Description of Artificial Sequence: Synthetic oligonucleotide
augacauguucuuuaagcu

SEQ ID NO: 905609 - RNA, 19 nt, Artificial Sequence
  Description of Artificial Sequence: Synthetic oligonucleotide
ugcaauuauguuugcauuc

SEQ ID NO: 905610 - RNA, 19 nt, Artificial Sequence
  Description of Artificial Sequence: Synthetic oligonucleotide
agacaacuuagaccagucc

SEQ ID NO: 905611 - RNA, 19 nt, Artificial Sequence
  Description of Artificial Sequence: Synthetic oligonucleotide
cuacugauugcacuucugg

SEQ ID NO: 905612 - RNA, 19 nt, Artificial Sequence
  Description of Artificial Sequence: Synthetic oligonucleotide
aaaggaaucuggguggugu

SEQ ID NO: 905613 - RNA, 19 nt, Artificial Sequence
  Description of Artificial Sequence: Synthetic oligonucleotide
auaauuugagcaggcauag

SEQ ID NO: 905614 - RNA, 19 nt, Artificial Sequence
  Description of Artificial Sequence: Synthetic oligonucleotide
uggagagccaccuucugcc

SEQ ID NO: 905615 - RNA, 19 nt, Artificial Sequence
  Description of Artificial Sequence: Synthetic oligonucleotide
uuaugguggagucgcgccg

SEQ ID NO: 905616 - RNA, 19 nt, Artificial Sequence
  Description of Artificial Sequence: Synthetic oligonucleotide
aagccauacauuucuugca

SEQ ID NO: 905617 - RNA, 19 nt, Artificial Sequence
  Description of Artificial Sequence: Synthetic oligonucleotide
gaagcuuggcuaaacuccg

SEQ ID NO: 905618 - RNA, 19 nt, Artificial Sequence
  Description of Artificial Sequence: Synthetic oligonucleotide
agugaugggaagccgagcu

SEQ ID NO: 905619 - RNA, 19 nt, Artificial Sequence
  Description of Artificial Sequence: Synthetic oligonucleotide
cuaauugauacaugagguc

SEQ ID NO: 905620 - RNA, 19 nt, Artificial Sequence
  Description of Artificial Sequence: Synthetic oligonucleotide
aagcaccuggguuuuacug

SEQ ID NO: 905621 - RNA, 19 nt, Artificial Sequence
  Description of Artificial Sequence: Synthetic oligonucleotide
aucgaaucagcucaucgcu

SEQ ID NO: 905622 - RNA, 19 nt, Artificial Sequence
  Description of Artificial Sequence: Synthetic oligonucleotide
uuuuagccugucuaccaag

SEQ ID NO: 905623 - RNA, 19 nt, Artificial Sequence
  Description of Artificial Sequence: Synthetic oligonucleotide
aggucaguuaguguugagc

SEQ ID NO: 905624 - RNA, 19 nt, Artificial Sequence
  Description of Artificial Sequence: Synthetic oligonucleotide
uggauggaugcauaauuug

SEQ ID NO: 905625 - RNA, 19 nt, Artificial Sequence
  Description of Artificial Sequence: Synthetic oligonucleotide
ugauaugacaagccuugga

SEQ ID NO: 905626 - RNA, 19 nt, Artificial Sequence
  Description of Artificial Sequence: Synthetic oligonucleotide
aaggugaaugucgaguucu

SEQ ID NO: 905627 - RNA, 19 nt, Artificial Sequence
  Description of Artificial Sequence: Synthetic oligonucleotide
ggucaguuaguguugagcc

SEQ ID NO: 905628 - RNA, 19 nt, Artificial Sequence
  Description of Artificial Sequence: Synthetic oligonucleotide
aguccacccaauaaacugc

SEQ ID NO: 905629 - RNA, 19 nt, Artificial Sequence
  Description of Artificial Sequence: Synthetic oligonucleotide
ucuugauaugacaagccuu

SEQ ID NO: 905630 - RNA, 19 nt, Artificial Sequence
  Description of Artificial Sequence: Synthetic oligonucleotide
aucggaagacucugauucc

SEQ ID NO: 905631 - RNA, 19 nt, Artificial Sequence
  Description of Artificial Sequence: Synthetic oligonucleotide
gaaguuuuaguaaccauaa

SEQ ID NO: 905632 - RNA, 19 nt, Artificial Sequence
  Description of Artificial Sequence: Synthetic oligonucleotide
ucuugguaucgaaucagcu

SEQ ID NO: 905633 - RNA, 19 nt, Artificial Sequence
  Description of Artificial Sequence: Synthetic oligonucleotide
acauaaucuaaauccuacu

SEQ ID NO: 905634 - RNA, 19 nt, Artificial Sequence
  Description of Artificial Sequence: Synthetic oligonucleotide
uacaacuaacuuuucuuaa

SEQ ID NO: 905635 - RNA, 19 nt, Artificial Sequence
  Description of Artificial Sequence: Synthetic oligonucleotide
agcaucuacagucucagua

SEQ ID NO: 905636 - RNA, 19 nt, Artificial Sequence
  Description of Artificial Sequence: Synthetic oligonucleotide
ggaauguuucagcuggucg

SEQ ID NO: 905637 - RNA, 19 nt, Artificial Sequence
  Description of Artificial Sequence: Synthetic oligonucleotide
uuugugauggauucaccau

SEQ ID NO: 905638 - RNA, 19 nt, Artificial Sequence
  Description of Artificial Sequence: Synthetic oligonucleotide
ugugcuacugaacguuaug

SEQ ID NO: 905639 - RNA, 19 nt, Artificial Sequence
  Description of Artificial Sequence: Synthetic oligonucleotide
uuggcuaaacuccgugugc

SEQ ID NO: 905640 - RNA, 19 nt, Artificial Sequence
  Description of Artificial Sequence: Synthetic oligonucleotide
caguccacccaauaaacug

SEQ ID NO: 905641 - RNA, 19 nt, Artificial Sequence
  Description of Artificial Sequence: Synthetic oligonucleotide
uuuagccugucuaccaagu

SEQ ID NO: 905642 - RNA, 19 nt, Artificial Sequence
  Description of Artificial Sequence: Synthetic oligonucleotide
agagaucuccucuugguau

SEQ ID NO: 905643 - RNA, 19 nt, Artificial Sequence
  Description of Artificial Sequence: Synthetic oligonucleotide
agucuauaggacauggcag

SEQ ID NO: 905644 - RNA, 19 nt, Artificial Sequence
  Description of Artificial Sequence: Synthetic oligonucleotide
uuaaagacaccgagaacua

SEQ ID NO: 905645 - RNA, 19 nt, Artificial Sequence
  Description of Artificial Sequence: Synthetic oligonucleotide
ugaacguuaugguggaguc

SEQ ID NO: 905646 - RNA, 19 nt, Artificial Sequence
  Description of Artificial Sequence: Synthetic oligonucleotide
ugcauugguuucacgaagu

SEQ ID NO: 905647 - RNA, 19 nt, Artificial Sequence
  Description of Artificial Sequence: Synthetic oligonucleotide
gauaugacaagccuuggau

SEQ ID NO: 905648 - RNA, 19 nt, Artificial Sequence
  Description of Artificial Sequence: Synthetic oligonucleotide
acaacuaacuuuucuuaaa

SEQ ID NO: 905649 - RNA, 19 nt, Artificial Sequence
  Description of Artificial Sequence: Synthetic oligonucleotide
ggaugcauaauuugagcag

SEQ ID NO: 905650 - RNA, 19 nt, Artificial Sequence
  Description of Artificial Sequence: Synthetic oligonucleotide
cuauuuaaagacaccgaga

SEQ ID NO: 905651 - RNA, 19 nt, Artificial Sequence
  Description of Artificial Sequence: Synthetic oligonucleotide
ugugcauugguuucacgaa

SEQ ID NO: 905652 - RNA, 19 nt, Artificial Sequence
  Description of Artificial Sequence: Synthetic oligonucleotide
ugcugugacguaccacugg

SEQ ID NO: 905653 - RNA, 19 nt, Artificial Sequence
  Description of Artificial Sequence: Synthetic oligonucleotide
guuaugguggagucgcgcc

SEQ ID NO: 905654 - RNA, 19 nt, Artificial Sequence
  Description of Artificial Sequence: Synthetic oligonucleotide
aagcuaguuacaacuaacu

SEQ ID NO: 905655 - RNA, 19 nt, Artificial Sequence
  Description of Artificial Sequence: Synthetic oligonucleotide
guggugaaggugaaugucg

SEQ ID NO: 905656 - RNA, 19 nt, Artificial Sequence
  Description of Artificial Sequence: Synthetic oligonucleotide
ggauucaccaugcugaguc

SEQ ID NO: 905657 - RNA, 19 nt, Artificial Sequence
  Description of Artificial Sequence: Synthetic oligonucleotide
cucaguccacccaauaaac

SEQ ID NO: 905658 - RNA, 19 nt, Artificial Sequence
  Description of Artificial Sequence: Synthetic oligonucleotide
caucaugaucggaagacuc

SEQ ID NO: 905659 - RNA, 19 nt, Artificial Sequence
  Description of Artificial Sequence: Synthetic oligonucleotide
acugauugcacuucugguu

SEQ ID NO: 905660 - RNA, 19 nt, Artificial Sequence
  Description of Artificial Sequence: Synthetic oligonucleotide
cugucuugauaugacaagc

SEQ ID NO: 905661 - RNA, 19 nt, Artificial Sequence
  Description of Artificial Sequence: Synthetic oligonucleotide
uguuucagcuggucgggag

SEQ ID NO: 905662 - RNA, 19 nt, Artificial Sequence
  Description of Artificial Sequence: Synthetic oligonucleotide
ucaguuaguguugagccuc

SEQ ID NO: 905663 - RNA, 19 nt, Artificial Sequence
  Description of Artificial Sequence: Synthetic oligonucleotide
uccucuugguaucgaauca

SEQ ID NO: 905664 - RNA, 19 nt, Artificial Sequence
  Description of Artificial Sequence: Synthetic oligonucleotide
uacugauugcacuucuggu

SEQ ID NO: 905665 - RNA, 19 nt, Artificial Sequence
  Description of Artificial Sequence: Synthetic oligonucleotide
uggauagugaugggaagcc

SEQ ID NO: 905666 - RNA, 19 nt, Artificial Sequence
  Description of Artificial Sequence: Synthetic oligonucleotide
gugcuacugaacguuaugg

SEQ ID NO: 905667 - RNA, 19 nt, Artificial Sequence
  Description of Artificial Sequence: Synthetic oligonucleotide
cuaguuacaacuaacuuuu

SEQ ID NO: 905668 - RNA, 19 nt, Artificial Sequence
  Description of Artificial Sequence: Synthetic oligonucleotide
caccgcauuauccagaaga

SEQ ID NO: 905669 - RNA, 19 nt, Artificial Sequence
  Description of Artificial Sequence: Synthetic oligonucleotide
ugagucuauaggacauggc

SEQ ID NO: 905670 - RNA, 19 nt, Artificial Sequence
  Description of Artificial Sequence: Synthetic oligonucleotide
guuucagcuggucgggagg

SEQ ID NO: 905671 - RNA, 19 nt, Artificial Sequence
  Description of Artificial Sequence: Synthetic oligonucleotide
cuuggccaccgcauuaucc

SEQ ID NO: 905672 - RNA, 19 nt, Artificial Sequence
  Description of Artificial Sequence: Synthetic oligonucleotide
guaagggacaggauaaaac

SEQ ID NO: 905673 - RNA, 19 nt, Artificial Sequence
  Description of Artificial Sequence: Synthetic oligonucleotide
aaguuucugucuugauaug

SEQ ID NO: 905674 - RNA, 19 nt, Artificial Sequence
  Description of Artificial Sequence: Synthetic oligonucleotide
uaaauccuacugauugcac

SEQ ID NO: 905675 - RNA, 19 nt, Artificial Sequence
  Description of Artificial Sequence: Synthetic oligonucleotide
aacuccgugugcuacugaa

SEQ ID NO: 905676 - RNA, 19 nt, Artificial Sequence
  Description of Artificial Sequence: Synthetic oligonucleotide
uagccugucuaccaaguuc

SEQ ID NO: 905677 - RNA, 19 nt, Artificial Sequence
  Description of Artificial Sequence: Synthetic oligonucleotide
uggacucggggcucaaagg

SEQ ID NO: 905678 - RNA, 19 nt, Artificial Sequence
  Description of Artificial Sequence: Synthetic oligonucleotide
uugcaggaauguuucagcu

SEQ ID NO: 905679 - RNA, 19 nt, Artificial Sequence
  Description of Artificial Sequence: Synthetic oligonucleotide
aagagaucuccucuuggua

SEQ ID NO: 905680 - RNA, 19 nt, Artificial Sequence
  Description of Artificial Sequence: Synthetic oligonucleotide
ugacauguucuuuaagcuu

SEQ ID NO: 905681 - RNA, 19 nt, Artificial Sequence
  Description of Artificial Sequence: Synthetic oligonucleotide
uguuugcauuccuuggcca

SEQ ID NO: 905682 - RNA, 19 nt, Artificial Sequence
  Description of Artificial Sequence: Synthetic oligonucleotide
ugcuacugaacguuauggu

SEQ ID NO: 905683 - RNA, 19 nt, Artificial Sequence
  Description of Artificial Sequence: Synthetic oligonucleotide
cugagucuauaggacaugg

SEQ ID NO: 905684 - RNA, 19 nt, Artificial Sequence
  Description of Artificial Sequence: Synthetic oligonucleotide
ucaugaucggaagacucug

SEQ ID NO: 905685 - RNA, 19 nt, Artificial Sequence
  Description of Artificial Sequence: Synthetic oligonucleotide
uuagaccagucccuauucu

SEQ ID NO: 905686 - RNA, 19 nt, Artificial Sequence
  Description of Artificial Sequence: Synthetic oligonucleotide
agucccuauucucagugcu

SEQ ID NO: 905687 - RNA, 19 nt, Artificial Sequence
  Description of Artificial Sequence: Synthetic oligonucleotide
ucgaguucuccaucgucag

SEQ ID NO: 905688 - RNA, 19 nt, Artificial Sequence
  Description of Artificial Sequence: Synthetic oligonucleotide
gguuuaaacccuuccggcc

SEQ ID NO: 905689 - RNA, 19 nt, Artificial Sequence
  Description of Artificial Sequence: Synthetic oligonucleotide
aaaguucugcaaugagaaa

SEQ ID NO: 905690 - RNA, 19 nt, Artificial Sequence
  Description of Artificial Sequence: Synthetic oligonucleotide
cucuugguaucgaaucagc

SEQ ID NO: 905691 - RNA, 19 nt, Artificial Sequence
  Description of Artificial Sequence: Synthetic oligonucleotide
uaaagacaccgagaacuag

SEQ ID NO: 905692 - RNA, 19 nt, Artificial Sequence
  Description of Artificial Sequence: Synthetic oligonucleotide
cucagagacauggacucgg

SEQ ID NO: 905693 - RNA, 19 nt, Artificial Sequence
  Description of Artificial Sequence: Synthetic oligonucleotide
cugugcauugguuucacga

SEQ ID NO: 905694 - RNA, 19 nt, Artificial Sequence
  Description of Artificial Sequence: Synthetic oligonucleotide
uacugaacguuauggugga

SEQ ID NO: 905695 - RNA, 19 nt, Artificial Sequence
  Description of Artificial Sequence: Synthetic oligonucleotide
  modified_base (16)..(16): a, c, u, g, unknown or other
gccucagucuuccuunagg

SEQ ID NO: 905696 - RNA, 19 nt, Artificial Sequence
  Description of Artificial Sequence: Synthetic oligonucleotide
gguucucagugccugaaag

SEQ ID NO: 905697 - RNA, 19 nt, Artificial Sequence
  Description of Artificial Sequence: Synthetic oligonucleotide
cuccucuugguaucgaauc

SEQ ID NO: 905698 - RNA, 19 nt, Artificial Sequence
  Description of Artificial Sequence: Synthetic oligonucleotide
augucagagggaugguaag

SEQ ID NO: 905699 - RNA, 19 nt, Artificial Sequence
  Description of Artificial Sequence: Synthetic oligonucleotide
ggacucggggcucaaaggg

SEQ ID NO: 905700 - RNA, 19 nt, Artificial Sequence
  Description of Artificial Sequence: Synthetic oligonucleotide
gaacguuaugguggagucg

SEQ ID NO: 905701 - RNA, 19 nt, Artificial Sequence
  Description of Artificial Sequence: Synthetic oligonucleotide
ggugagguugugcaaacug

SEQ ID NO: 905702 - RNA, 19 nt, Artificial Sequence
  Description of Artificial Sequence: Synthetic oligonucleotide
gauccuacagguggugaag

SEQ ID NO: 905703 - RNA, 19 nt, Artificial Sequence
  Description of Artificial Sequence: Synthetic oligonucleotide
agcuaguuacaacuaacuu

SEQ ID NO: 905704 - RNA, 19 nt, Artificial Sequence
  Description of Artificial Sequence: Synthetic oligonucleotide
augcaauuauguuugcauu

SEQ ID NO: 905705 - RNA, 19 nt, Artificial Sequence
  Description of Artificial Sequence: Synthetic oligonucleotide
acaauuuaaugugccugag

SEQ ID NO: 905706 - RNA, 19 nt, Artificial Sequence
  Description of Artificial Sequence: Synthetic oligonucleotide
uagaccagucccuauucuc

SEQ ID NO: 905707 - RNA, 19 nt, Artificial Sequence
  Description of Artificial Sequence: Synthetic oligonucleotide
uuaucucucccaagcccgc

SEQ ID NO: 905708 - RNA, 19 nt, Artificial Sequence
  Description of Artificial Sequence: Synthetic oligonucleotide
ggaucaggggucuugacca

SEQ ID NO: 905709 - RNA, 19 nt, Artificial Sequence
  Description of Artificial Sequence: Synthetic oligonucleotide
uuaaugugccugagaauuu

SEQ ID NO: 905710 - RNA, 19 nt, Artificial Sequence
  Description of Artificial Sequence: Synthetic oligonucleotide
ugguaagauccuacaggug

SEQ ID NO: 905711 - RNA, 19 nt, Artificial Sequence
  Description of Artificial Sequence: Synthetic oligonucleotide
uucucgaugacauguucuu

SEQ ID NO: 905712 - RNA, 19 nt, Artificial Sequence
  Description of Artificial Sequence: Synthetic oligonucleotide
ucaaagcaagcaccugggu

SEQ ID NO: 905713 - RNA, 19 nt, Artificial Sequence
  Description of Artificial Sequence: Synthetic oligonucleotide
uaauuugagcaggcauagg

SEQ ID NO: 905714 - RNA, 19 nt, Artificial Sequence
  Description of Artificial Sequence: Synthetic oligonucleotide
ggaugguaagauccuacag

SEQ ID NO: 905715 - RNA, 19 nt, Artificial Sequence
  Description of Artificial Sequence: Synthetic oligonucleotide
agggaugguaagauccuac

SEQ ID NO: 905716 - RNA, 19 nt, Artificial Sequence
  Description of Artificial Sequence: Synthetic oligonucleotide
uuuaaacccuuccggccuc

SEQ ID NO: 905717 - RNA, 19 nt, Artificial Sequence
  Description of Artificial Sequence: Synthetic oligonucleotide
uuccccgacaguucuucag

SEQ ID NO: 905718 - RNA, 19 nt, Artificial Sequence
  Description of Artificial Sequence: Synthetic oligonucleotide
gaugccucgcuccugcaga

SEQ ID NO: 905719 - RNA, 19 nt, Artificial Sequence
  Description of Artificial Sequence: Synthetic oligonucleotide
gaugucagagggaugguaa

SEQ ID NO: 905720 - RNA, 19 nt, Artificial Sequence
  Description of Artificial Sequence: Synthetic oligonucleotide
ugcuaaugcugugacguac

SEQ ID NO: 905721 - RNA, 19 nt, Artificial Sequence
  Description of Artificial Sequence: Synthetic oligonucleotide
aguucugcaaugagaaagu

SEQ ID NO: 905722 - RNA, 19 nt, Artificial Sequence
  Description of Artificial Sequence: Synthetic oligonucleotide
uccacuggauagugauggg

SEQ ID NO: 905723 - RNA, 19 nt, Artificial Sequence
  Description of Artificial Sequence: Synthetic oligonucleotide
ucgaugacauguucuuuaa

SEQ ID NO: 905724 - RNA, 19 nt, Artificial Sequence
  Description of Artificial Sequence: Synthetic oligonucleotide
ugcauaauuugagcaggca

SEQ ID NO: 905725 - RNA, 19 nt, Artificial Sequence
  Description of Artificial Sequence: Synthetic oligonucleotide
  modified_base (7)..(7): a, c, u, g, unknown or other
uuccuunaggauacccauu

SEQ ID NO: 905726 - RNA, 19 nt, Artificial Sequence
  Description of Artificial Sequence: Synthetic oligonucleotide
uaaacuccgugugcuacug

SEQ ID NO: 905727 - RNA, 19 nt, Artificial Sequence
  Description of Artificial Sequence: Synthetic oligonucleotide
ugacguaccacuggaugga

SEQ ID NO: 905728 - RNA, 19 nt, Artificial Sequence
  Description of Artificial Sequence: Synthetic oligonucleotide
ugggugaugucagagggau

SEQ ID NO: 905729 - RNA, 19 nt, Artificial Sequence
  Description of Artificial Sequence: Synthetic oligonucleotide
ucuccucuugguaucgaau

SEQ ID NO: 905730 - RNA, 19 nt, Artificial Sequence
  Description of Artificial Sequence: Synthetic oligonucleotide
gaagagaucuccucuuggu

SEQ ID NO: 905731 - RNA, 19 nt, Artificial Sequence
  Description of Artificial Sequence: Synthetic oligonucleotide
cacgaaguuccuuaacaca

SEQ ID NO: 905732 - RNA, 19 nt, Artificial Sequence
  Description of Artificial Sequence: Synthetic oligonucleotide
guagggaagagaucuccuc

SEQ ID NO: 905733 - RNA, 19 nt, Artificial Sequence
  Description of Artificial Sequence: Synthetic oligonucleotide
caaucugagacaguaggga

SEQ ID NO: 905734 - RNA, 19 nt, Artificial Sequence
  Description of Artificial Sequence: Synthetic oligonucleotide
cagacaacuuagaccaguc

SEQ ID NO: 905735 - RNA, 19 nt, Artificial Sequence
  Description of Artificial Sequence: Synthetic oligonucleotide
ggaucgaagggccauguuc

SEQ ID NO: 905736 - RNA, 19 nt, Artificial Sequence
  Description of Artificial Sequence: Synthetic oligonucleotide
acagacaacuuagaccagu

SEQ ID NO: 905737 - RNA, 19 nt, Artificial Sequence
  Description of Artificial Sequence: Synthetic oligonucleotide
cugcaaugagaaagucucc

SEQ ID NO: 905738 - RNA, 19 nt, Artificial Sequence
  Description of Artificial Sequence: Synthetic oligonucleotide
aagauccuacaggugguga

SEQ ID NO: 905739 - RNA, 19 nt, Artificial Sequence
  Description of Artificial Sequence: Synthetic oligonucleotide
acccuuccggccuccaagg

SEQ ID NO: 905740 - RNA, 19 nt, Artificial Sequence
  Description of Artificial Sequence: Synthetic oligonucleotide
agucucaguaacagacaac

SEQ ID NO: 905741 - RNA, 19 nt, Artificial Sequence
  Description of Artificial Sequence: Synthetic oligonucleotide
aacuuagaccagucccuau

SEQ ID NO: 905742 - RNA, 19 nt, Artificial Sequence
  Description of Artificial Sequence: Synthetic oligonucleotide
agccugucuaccaaguuca

SEQ ID NO: 905743 - RNA, 19 nt, Artificial Sequence
  Description of Artificial Sequence: Synthetic oligonucleotide
uaguaaccauaaauucaaa

SEQ ID NO: 905744 - RNA, 19 nt, Artificial Sequence
  Description of Artificial Sequence: Synthetic oligonucleotide
aagcccgcucacauuauug

SEQ ID NO: 905745 - RNA, 19 nt, Artificial Sequence
  Description of Artificial Sequence: Synthetic oligonucleotide
uggcuaaacuccgugugcu

SEQ ID NO: 905746 - RNA, 19 nt, Artificial Sequence
  Description of Artificial Sequence: Synthetic oligonucleotide
guuuaaacccuuccggccu

SEQ ID NO: 905747 - RNA, 19 nt, Artificial Sequence
  Description of Artificial Sequence: Synthetic oligonucleotide
cuucucuacccuucaugug

SEQ ID NO: 905748 - RNA, 19 nt, Artificial Sequence
  Description of Artificial Sequence: Synthetic oligonucleotide
aaucuaaauccuacugauu

SEQ ID NO: 905749 - RNA, 19 nt, Artificial Sequence
  Description of Artificial Sequence: Synthetic oligonucleotide
ugaaggucucaagccauac

SEQ ID NO: 905750 - RNA, 19 nt, Artificial Sequence
  Description of Artificial Sequence: Synthetic oligonucleotide
agaugccucgcuccugcag

SEQ ID NO: 905751 - RNA, 19 nt, Artificial Sequence
  Description of Artificial Sequence: Synthetic oligonucleotide
ugaggucaguuaguguuga

SEQ ID NO: 905752 - RNA, 19 nt, Artificial Sequence
  Description of Artificial Sequence: Synthetic oligonucleotide
gaucgaagggccauguucu

SEQ ID NO: 905753 - RNA, 19 nt, Artificial Sequence
  Description of Artificial Sequence: Synthetic oligonucleotide
aucucucccaagcccgcuc

SEQ ID NO: 905754 - RNA, 19 nt, Artificial Sequence
  Description of Artificial Sequence: Synthetic oligonucleotide
cuauaggacauggcaggag

SEQ ID NO: 905755 - RNA, 19 nt, Artificial Sequence
  Description of Artificial Sequence: Synthetic oligonucleotide
agcccgcucacauuauugu

SEQ ID NO: 905756 - RNA, 19 nt, Artificial Sequence
  Description of Artificial Sequence: Synthetic oligonucleotide
aucgaagggccauguucuc

SEQ ID NO: 905757 - RNA, 19 nt, Artificial Sequence
  Description of Artificial Sequence: Synthetic oligonucleotide
acuccuuauuuugcuaaug

SEQ ID NO: 905758 - RNA, 19 nt, Artificial Sequence
  Description of Artificial Sequence: Synthetic oligonucleotide
aucaugaucggaagacucu

SEQ ID NO: 905759 - RNA, 19 nt, Artificial Sequence
  Description of Artificial Sequence: Synthetic oligonucleotide
gggaucaggggucuugacc

SEQ ID NO: 905760 - RNA, 19 nt, Artificial Sequence
  Description of Artificial Sequence: Synthetic oligonucleotide
gagaaacaugcaauuaugu

SEQ ID NO: 905761 - RNA, 19 nt, Artificial Sequence
  Description of Artificial Sequence: Synthetic oligonucleotide
gaugggaagccgagcuagg

SEQ ID NO: 905762 - RNA, 19 nt, Artificial Sequence
  Description of Artificial Sequence: Synthetic oligonucleotide
ucccuauucucagugcuuc

SEQ ID NO: 905763 - RNA, 19 nt, Artificial Sequence
  Description of Artificial Sequence: Synthetic oligonucleotide
auaggacauggcaggagag

SEQ ID NO: 905764 - RNA, 19 nt, Artificial Sequence
  Description of Artificial Sequence: Synthetic oligonucleotide
ugaucggaagacucugauu

SEQ ID NO: 905765 - RNA, 19 nt, Artificial Sequence
  Description of Artificial Sequence: Synthetic oligonucleotide
uuagccugucuaccaaguu

SEQ ID NO: 905766 - RNA, 19 nt, Artificial Sequence
  Description of Artificial Sequence: Synthetic oligonucleotide
gcuaguuacaacuaacuuu

SEQ ID NO: 905767 - RNA, 19 nt, Artificial Sequence
  Description of Artificial Sequence: Synthetic oligonucleotide
aauaugcauagcacacuuu

SEQ ID NO: 905768 - RNA, 19 nt, Artificial Sequence
  Description of Artificial Sequence: Synthetic oligonucleotide
gaagucuuaguucuuccuu

SEQ ID NO: 905769 - RNA, 19 nt, Artificial Sequence
  Description of Artificial Sequence: Synthetic oligonucleotide
uccuacagguggugaaggu

SEQ ID NO: 905770 - RNA, 19 nt, Artificial Sequence
  Description of Artificial Sequence: Synthetic oligonucleotide
gcuaauugauacaugaggu

SEQ ID NO: 905771 - RNA, 19 nt, Artificial Sequence
  Description of Artificial Sequence: Synthetic oligonucleotide
uagcagagaugccucgcuc

SEQ ID NO: 905772 - RNA, 19 nt, Artificial Sequence
  Description of Artificial Sequence: Synthetic oligonucleotide
aaacuccgugugcuacuga

SEQ ID NO: 905773 - RNA, 19 nt, Artificial Sequence
  Description of Artificial Sequence: Synthetic oligonucleotide
ggauggaugcauaauuuga

SEQ ID NO: 905774 - RNA, 19 nt, Artificial Sequence
  Description of Artificial Sequence: Synthetic oligonucleotide
auccuacugauugcacuuc

SEQ ID NO: 905775 - RNA, 19 nt, Artificial Sequence
  Description of Artificial Sequence: Synthetic oligonucleotide
gacucggggcucaaagggc

SEQ ID NO: 905776 - RNA, 19 nt, Artificial Sequence
  Description of Artificial Sequence: Synthetic oligonucleotide
gcccuugaaggucucaagc

SEQ ID NO: 905777 - RNA, 19 nt, Artificial Sequence
  Description of Artificial Sequence: Synthetic oligonucleotide
accuggguuuuacugcagu

SEQ ID NO: 905778 - RNA, 19 nt, Artificial Sequence
  Description of Artificial Sequence: Synthetic oligonucleotide
augaggucaguuaguguug

SEQ ID NO: 905779 - RNA, 19 nt, Artificial Sequence
  Description of Artificial Sequence: Synthetic oligonucleotide
gaggucaguuaguguugag

SEQ ID NO: 905780 - RNA, 19 nt, Artificial Sequence
  Description of Artificial Sequence: Synthetic oligonucleotide
aguagggaagagaucuccu

SEQ ID NO: 905781 - RNA, 19 nt, Artificial Sequence
  Description of Artificial Sequence: Synthetic oligonucleotide
ucuuccccgacaguucuuc

SEQ ID NO: 905782 - RNA, 19 nt, Artificial Sequence
  Description of Artificial Sequence: Synthetic oligonucleotide
caucgucagcugucgcugg

SEQ ID NO: 905783 - RNA, 19 nt, Artificial Sequence
  Description of Artificial Sequence: Synthetic oligonucleotide
agacaccgagaacuaggca

SEQ ID NO: 905784 - RNA, 19 nt, Artificial Sequence
  Description of Artificial Sequence: Synthetic oligonucleotide
uacagguggugaaggugaa

SEQ ID NO: 905785 - RNA, 19 nt, Artificial Sequence
  Description of Artificial Sequence: Synthetic oligonucleotide
gcaucuacagucucaguaa

SEQ ID NO: 905786 - RNA, 19 nt, Artificial Sequence
  Description of Artificial Sequence: Synthetic oligonucleotide
cagucucaguaacagacaa

SEQ ID NO: 905787 - RNA, 19 nt, Artificial Sequence
  Description of Artificial Sequence: Synthetic oligonucleotide
ggugaaggugaaugucgag

SEQ ID NO: 905788 - RNA, 19 nt, Artificial Sequence
  Description of Artificial Sequence: Synthetic oligonucleotide
uuggaucgaagggccaugu

SEQ ID NO: 905789 - RNA, 19 nt, Artificial Sequence
  Description of Artificial Sequence: Synthetic oligonucleotide
acuccgugugcuacugaac

SEQ ID NO: 905790 - RNA, 19 nt, Artificial Sequence
  Description of Artificial Sequence: Synthetic oligonucleotide
gccaacaucaggaggggcc

SEQ ID NO: 905791 - RNA, 19 nt, Artificial Sequence
  Description of Artificial Sequence: Synthetic oligonucleotide
ucgcgccgguuugugaugg

SEQ ID NO: 905792 - RNA, 19 nt, Artificial Sequence
  Description of Artificial Sequence: Synthetic oligonucleotide
gaucaggggucuugaccac

SEQ ID NO: 905793 - RNA, 19 nt, Artificial Sequence
  Description of Artificial Sequence: Synthetic oligonucleotide
  modified_base (8)..(8): a, c, u, g, unknown or other
cuuccuunaggauacccau

SEQ ID NO: 905794 - RNA, 19 nt, Artificial Sequence
  Description of Artificial Sequence: Synthetic oligonucleotide
ucgaagggccauguucucu

SEQ ID NO: 905795 - RNA, 19 nt, Artificial Sequence
  Description of Artificial Sequence: Synthetic oligonucleotide
ugguaucgaaucagcucau

SEQ ID NO: 905796 - RNA, 19 nt, Artificial Sequence
  Description of Artificial Sequence: Synthetic oligonucleotide
aggacauggcaggagaguu

SEQ ID NO: 905797 - RNA, 19 nt, Artificial Sequence
  Description of Artificial Sequence: Synthetic oligonucleotide
cuucucgaugacauguucu

SEQ ID NO: 905798 - RNA, 19 nt, Artificial Sequence
  Description of Artificial Sequence: Synthetic oligonucleotide
ggauagugaugggaagccg

SEQ ID NO: 905799 - RNA, 19 nt, Artificial Sequence
  Description of Artificial Sequence: Synthetic oligonucleotide
aagccgagcuaggggugac

SEQ ID NO: 905800 - RNA, 19 nt, Artificial Sequence
  Description of Artificial Sequence: Synthetic oligonucleotide
ggaaucugggugguguuug

SEQ ID NO: 905801 - RNA, 19 nt, Artificial Sequence
  Description of Artificial Sequence: Synthetic oligonucleotide
aaacccuuccggccuccaa

SEQ ID NO: 905802 - RNA, 19 nt, Artificial Sequence
  Description of Artificial Sequence: Synthetic oligonucleotide
acccaauaaacugccacuu

SEQ ID NO: 905803 - RNA, 19 nt, Artificial Sequence
  Description of Artificial Sequence: Synthetic oligonucleotide
uauuuccaauuuuccccua

SEQ ID NO: 905804 - RNA, 19 nt, Artificial Sequence
  Description of Artificial Sequence: Synthetic oligonucleotide
caugaucggaagacucuga

SEQ ID NO: 905805 - RNA, 19 nt, Artificial Sequence
  Description of Artificial Sequence: Synthetic oligonucleotide
aucuccucuugguaucgaa

SEQ ID NO: 905806 - RNA, 19 nt, Artificial Sequence
  Description of Artificial Sequence: Synthetic oligonucleotide
uuaaacccuuccggccucc

SEQ ID NO: 905807 - RNA, 19 nt, Artificial Sequence
  Description of Artificial Sequence: Synthetic oligonucleotide
uugauacaugaggucaguu

SEQ ID NO: 905808 - RNA, 19 nt, Artificial Sequence
  Description of Artificial Sequence: Synthetic oligonucleotide
agggcaagggagaggagca

SEQ ID NO: 905809 - RNA, 19 nt, Artificial Sequence
  Description of Artificial Sequence: Synthetic oligonucleotide
cuaaugcugugacguacca

SEQ ID NO: 905810 - RNA, 19 nt, Artificial Sequence
  Description of Artificial Sequence: Synthetic oligonucleotide
gcuaaugcugugacguacc

SEQ ID NO: 905811 - RNA, 19 nt, Artificial Sequence
  Description of Artificial Sequence: Synthetic oligonucleotide
gccgguuugugauggauuc

SEQ ID NO: 905812 - RNA, 19 nt, Artificial Sequence
  Description of Artificial Sequence: Synthetic oligonucleotide
  modified_base (17)..(17): a, c, u, g, unknown or other
agccucagucuuccuunag

SEQ ID NO: 905813 - RNA, 19 nt, Artificial Sequence
  Description of Artificial Sequence: Synthetic oligonucleotide
gggaugguaagauccuaca

SEQ ID NO: 905814 - RNA, 19 nt, Artificial Sequence
  Description of Artificial Sequence: Synthetic oligonucleotide
ugacaagccuuggaucgaa

SEQ ID NO: 905815 - RNA, 19 nt, Artificial Sequence
  Description of Artificial Sequence: Synthetic oligonucleotide
auuccuuggccaccgcauu

SEQ ID NO: 905816 - RNA, 19 nt, Artificial Sequence
  Description of Artificial Sequence: Synthetic oligonucleotide
accgcauuauccagaagaa

SEQ ID NO: 905817 - RNA, 19 nt, Artificial Sequence
  Description of Artificial Sequence: Synthetic oligonucleotide
cuuggaucgaagggccaug

SEQ ID NO: 905818 - RNA, 19 nt, Artificial Sequence
  Description of Artificial Sequence: Synthetic oligonucleotide
gacaagccuuggaucgaag

SEQ ID NO: 905819 - RNA, 19 nt, Artificial Sequence
  Description of Artificial Sequence: Synthetic oligonucleotide
uugcuaaugcugugacgua

SEQ ID NO: 905820 - RNA, 19 nt, Artificial Sequence
  Description of Artificial Sequence: Synthetic oligonucleotide
gcugugacguaccacugga

SEQ ID NO: 905821 - RNA, 19 nt, Artificial Sequence
  Description of Artificial Sequence: Synthetic oligonucleotide
gcuaaacuccgugugcuac

SEQ ID NO: 905822 - RNA, 19 nt, Artificial Sequence
  Description of Artificial Sequence: Synthetic oligonucleotide
ccuuagcagagaugccucg

SEQ ID NO: 905823 - RNA, 19 nt, Artificial Sequence
  Description of Artificial Sequence: Synthetic oligonucleotide
ccagucccuauucucagug

SEQ ID NO: 905824 - RNA, 19 nt, Artificial Sequence
  Description of Artificial Sequence: Synthetic oligonucleotide
augugcuaauugauacaug

SEQ ID NO: 905825 - RNA, 19 nt, Artificial Sequence
  Description of Artificial Sequence: Synthetic oligonucleotide
guggagucgcgccgguuug

SEQ ID NO: 905826 - RNA, 19 nt, Artificial Sequence
  Description of Artificial Sequence: Synthetic oligonucleotide
gucucaagccauacauuuc

SEQ ID NO: 905827 - RNA, 19 nt, Artificial Sequence
  Description of Artificial Sequence: Synthetic oligonucleotide
gauucaccaugcugagucu

SEQ ID NO: 905828 - RNA, 19 nt, Artificial Sequence
  Description of Artificial Sequence: Synthetic oligonucleotide
ucucgaugacauguucuuu

SEQ ID NO: 905829 - RNA, 19 nt, Artificial Sequence
  Description of Artificial Sequence: Synthetic oligonucleotide
gcauaauuugagcaggcau

SEQ ID NO: 905830 - RNA, 19 nt, Artificial Sequence
  Description of Artificial Sequence: Synthetic oligonucleotide
augacaagccuuggaucga

SEQ ID NO: 905831 - RNA, 19 nt, Artificial Sequence
  Description of Artificial Sequence: Synthetic oligonucleotide
cugauugcacuucugguuu

SEQ ID NO: 905832 - RNA, 19 nt, Artificial Sequence
  Description of Artificial Sequence: Synthetic oligonucleotide
cucuucccgcucuccuggg

SEQ ID NO: 905833 - RNA, 19 nt, Artificial Sequence
  Description of Artificial Sequence: Synthetic oligonucleotide
gucaguuaguguugagccu

SEQ ID NO: 905834 - RNA, 19 nt, Artificial Sequence
  Description of Artificial Sequence: Synthetic oligonucleotide
cuggauggaugcauaauuu

SEQ ID NO: 905835 - RNA, 19 nt, Artificial Sequence
  Description of Artificial Sequence: Synthetic oligonucleotide
  modified_base (15)..(15): a, c, u, g, unknown or other
ccucagucuuccuunagga

SEQ ID NO: 905836 - RNA, 19 nt, Artificial Sequence
  Description of Artificial Sequence: Synthetic oligonucleotide
gguuugugauggauucacc

SEQ ID NO: 905837 - RNA, 19 nt, Artificial Sequence
  Description of Artificial Sequence: Synthetic oligonucleotide
cucaucgcucuuccccgac

SEQ ID NO: 905838 - RNA, 19 nt, Artificial Sequence
  Description of Artificial Sequence: Synthetic oligonucleotide
cugaacguuaugguggagu

SEQ ID NO: 905839 - RNA, 19 nt, Artificial Sequence
  Description of Artificial Sequence: Synthetic oligonucleotide
ccucuugguaucgaaucag

SEQ ID NO: 905840 - RNA, 19 nt, Artificial Sequence
  Description of Artificial Sequence: Synthetic oligonucleotide
uggaucgaagggccauguu

SEQ ID NO: 905841 - RNA, 19 nt, Artificial Sequence
  Description of Artificial Sequence: Synthetic oligonucleotide
cauuuugggugagguugug

SEQ ID NO: 905842 - RNA, 19 nt, Artificial Sequence
  Description of Artificial Sequence: Synthetic oligonucleotide
ccuacugauugcacuucug

SEQ ID NO: 905843 - RNA, 19 nt, Artificial Sequence
  Description of Artificial Sequence: Synthetic oligonucleotide
cugccucccggcucuuccc

SEQ ID NO: 905844 - RNA, 19 nt, Artificial Sequence
  Description of Artificial Sequence: Synthetic oligonucleotide
acugaacguuaugguggag

SEQ ID NO: 905845 - RNA, 19 nt, Artificial Sequence
  Description of Artificial Sequence: Synthetic oligonucleotide
caauuauguuugcauuccu

SEQ ID NO: 905846 - RNA, 19 nt, Artificial Sequence
  Description of Artificial Sequence: Synthetic oligonucleotide
cccaauaaacugccacuug

SEQ ID NO: 905847 - RNA, 19 nt, Artificial Sequence
  Description of Artificial Sequence: Synthetic oligonucleotide
cuccaucgucagcugucgc

SEQ ID NO: 905848 - RNA, 19 nt, Artificial Sequence
  Description of Artificial Sequence: Synthetic oligonucleotide
gcauggagacugugauggg

SEQ ID NO: 905849 - RNA, 19 nt, Artificial Sequence
  Description of Artificial Sequence: Synthetic oligonucleotide
cacuucugguuuaaacccu

SEQ ID NO: 905850 - RNA, 19 nt, Artificial Sequence
  Description of Artificial Sequence: Synthetic oligonucleotide
caccuuagcagagaugccu

SEQ ID NO: 905851 - RNA, 19 nt, Artificial Sequence
  Description of Artificial Sequence: Synthetic oligonucleotide
aucgcucuuccccgacagu

SEQ ID NO: 905852 - RNA, 19 nt, Artificial Sequence
  Description of Artificial Sequence: Synthetic oligonucleotide
augcugugacguaccacug

SEQ ID NO: 905853 - RNA, 19 nt, Artificial Sequence
  Description of Artificial Sequence: Synthetic oligonucleotide
accgagaacuaggcagcug

SEQ ID NO: 905854 - RNA, 19 nt, Artificial Sequence
  Description of Artificial Sequence: Synthetic oligonucleotide
cugagacaguagggaagag

SEQ ID NO: 905855 - RNA, 19 nt, Artificial Sequence
  Description of Artificial Sequence: Synthetic oligonucleotide
gucgcgccgguuugugaug

SEQ ID NO: 905856 - RNA, 19 nt, Artificial Sequence
  Description of Artificial Sequence: Synthetic oligonucleotide
acguuaugguggagucgcg

SEQ ID NO: 905857 - RNA, 19 nt, Artificial Sequence
  Description of Artificial Sequence: Synthetic oligonucleotide
augccucgcuccugcagaa

SEQ ID NO: 905858 - RNA, 19 nt, Artificial Sequence
  Description of Artificial Sequence: Synthetic oligonucleotide
ccucaguccacccaauaaa

SEQ ID NO: 905859 - RNA, 19 nt, Artificial Sequence
  Description of Artificial Sequence: Synthetic oligonucleotide
acguaccacuggauggaug

SEQ ID NO: 905860 - RNA, 19 nt, Artificial Sequence
  Description of Artificial Sequence: Synthetic oligonucleotide
gagucgcgccgguuuguga

SEQ ID NO: 905861 - RNA, 19 nt, Artificial Sequence
  Description of Artificial Sequence: Synthetic oligonucleotide
acauggcaggagaguucac

SEQ ID NO: 905862 - RNA, 19 nt, Artificial Sequence
  Description of Artificial Sequence: Synthetic oligonucleotide
gugaugggaagccgagcua

SEQ ID NO: 905863 - RNA, 19 nt, Artificial Sequence
  Description of Artificial Sequence: Synthetic oligonucleotide
uccggccuccaaggaaaca

SEQ ID NO: 905864 - RNA, 19 nt, Artificial Sequence
  Description of Artificial Sequence: Synthetic oligonucleotide
ggguuuuacugcaguuuac

SEQ ID NO: 905865 - RNA, 19 nt, Artificial Sequence
  Description of Artificial Sequence: Synthetic oligonucleotide
aggucucaagccauacauu

SEQ ID NO: 905866 - RNA, 19 nt, Artificial Sequence
  Description of Artificial Sequence: Synthetic oligonucleotide
ugccucgcuccugcagaag

SEQ ID NO: 905867 - RNA, 19 nt, Artificial Sequence
  Description of Artificial Sequence: Synthetic oligonucleotide
cuggcuaucccuagucuuu

SEQ ID NO: 905868 - RNA, 19 nt, Artificial Sequence
  Description of Artificial Sequence: Synthetic oligonucleotide
uggagucgcgccgguuugu

SEQ ID NO: 905869 - RNA, 19 nt, Artificial Sequence
  Description of Artificial Sequence: Synthetic oligonucleotide
guguugagccucagucuuc

SEQ ID NO: 905870 - RNA, 19 nt, Artificial Sequence
  Description of Artificial Sequence: Synthetic oligonucleotide
ucccaagcccgcucacauu

SEQ ID NO: 905871 - RNA, 19 nt, Artificial Sequence
  Description of Artificial Sequence: Synthetic oligonucleotide
cuuccccgacaguucuuca

SEQ ID NO: 905872 - RNA, 19 nt, Artificial Sequence
  Description of Artificial Sequence: Synthetic oligonucleotide
caacuuagaccagucccua

SEQ ID NO: 905873 - RNA, 19 nt, Artificial Sequence
  Description of Artificial Sequence: Synthetic oligonucleotide
cucucccaagcccgcucac

SEQ ID NO: 905874 - RNA, 19 nt, Artificial Sequence
  Description of Artificial Sequence: Synthetic oligonucleotide
cuacccuucaugugcuaau

SEQ ID NO: 905875 - RNA, 19 nt, Artificial Sequence
  Description of Artificial Sequence: Synthetic oligonucleotide
agaggagcauggagacugu

SEQ ID NO: 905876 - RNA, 19 nt, Artificial Sequence
  Description of Artificial Sequence: Synthetic oligonucleotide
gcaggagaguucacagcug

SEQ ID NO: 905877 - RNA, 19 nt, Artificial Sequence
  Description of Artificial Sequence: Synthetic oligonucleotide
guaccacuggauggaugca

SEQ ID NO: 905878 - RNA, 19 nt, Artificial Sequence
  Description of Artificial Sequence: Synthetic oligonucleotide
cguuaugguggagucgcgc

SEQ ID NO: 905879 - RNA, 19 nt, Artificial Sequence
  Description of Artificial Sequence: Synthetic oligonucleotide
cuggguuuuacugcaguuu

SEQ ID NO: 905880 - RNA, 19 nt, Artificial Sequence
  Description of Artificial Sequence: Synthetic oligonucleotide
gaaucagcucaucgcucuu

SEQ ID NO: 905881 - RNA, 19 nt, Artificial Sequence
  Description of Artificial Sequence: Synthetic oligonucleotide
ggagucgcgccgguuugug

SEQ ID NO: 905882 - RNA, 19 nt, Artificial Sequence
  Description of Artificial Sequence: Synthetic oligonucleotide
ggggaucaggggucuugac

SEQ ID NO: 905883 - RNA, 19 nt, Artificial Sequence
  Description of Artificial Sequence: Synthetic oligonucleotide
cuccucaguccacccaaua

SEQ ID NO: 905884 - RNA, 19 nt, Artificial Sequence
  Description of Artificial Sequence: Synthetic oligonucleotide
cucccaagcccgcucacau

SEQ ID NO: 905885 - RNA, 19 nt, Artificial Sequence
  Description of Artificial Sequence: Synthetic oligonucleotide
ccacccuggcuaucccuag

SEQ ID NO: 905886 - RNA, 19 nt, Artificial Sequence
  Description of Artificial Sequence: Synthetic oligonucleotide
gguggagucgcgccgguuu

SEQ ID NO: 905887 - RNA, 19 nt, Artificial Sequence
  Description of Artificial Sequence: Synthetic oligonucleotide
ggccaacaucaggaggggc

SEQ ID NO: 905888 - RNA, 19 nt, Artificial Sequence
  Description of Artificial Sequence: Synthetic oligonucleotide
cucaagccauacauuucuu

SEQ ID NO: 905889 - RNA, 19 nt, Artificial Sequence
  Description of Artificial Sequence: Synthetic oligonucleotide
ggcuaaacuccgugugcua

SEQ ID NO: 905890 - RNA, 19 nt, Artificial Sequence
  Description of Artificial Sequence: Synthetic oligonucleotide
gugugcuacugaacguuau

SEQ ID NO: 905891 - RNA, 19 nt, Artificial Sequence
  Description of Artificial Sequence: Synthetic oligonucleotide
gacguaccacuggauggau

SEQ ID NO: 905892 - RNA, 19 nt, Artificial Sequence
  Description of Artificial Sequence: Synthetic oligonucleotide
ccuuccggccuccaaggaa

SEQ ID NO: 905893 - RNA, 19 nt, Artificial Sequence
  Description of Artificial Sequence: Synthetic oligonucleotide
cugugacguaccacuggau

SEQ ID NO: 905894 - RNA, 19 nt, Artificial Sequence
  Description of Artificial Sequence: Synthetic oligonucleotide
ggagagccaccuucugccu

SEQ ID NO: 905895 - RNA, 19 nt, Artificial Sequence
  Description of Artificial Sequence: Synthetic oligonucleotide
cgcucuuccccgacaguuc

SEQ ID NO: 905896 - RNA, 19 nt, Artificial Sequence
  Description of Artificial Sequence: Synthetic oligonucleotide
agcuggucgggaggccaaa

SEQ ID NO: 905897 - RNA, 19 nt, Artificial Sequence
  Description of Artificial Sequence: Synthetic oligonucleotide
gcauugguuucacgaaguu

SEQ ID NO: 905898 - RNA, 19 nt, Artificial Sequence
  Description of Artificial Sequence: Synthetic oligonucleotide
acauggacucggggcucaa

SEQ ID NO: 905899 - RNA, 19 nt, Artificial Sequence
  Description of Artificial Sequence: Synthetic oligonucleotide
cccgcucacauuauuguuu

SEQ ID NO: 905900 - RNA, 19 nt, Artificial Sequence
  Description of Artificial Sequence: Synthetic oligonucleotide
cauggacucggggcucaaa

SEQ ID NO: 905901 - RNA, 19 nt, Artificial Sequence
  Description of Artificial Sequence: Synthetic oligonucleotide
ccaccgcauuauccagaag

SEQ ID NO: 905902 - RNA, 19 nt, Artificial Sequence
  Description of Artificial Sequence: Synthetic oligonucleotide
ccuggcuaucccuagucuu

SEQ ID NO: 905903 - RNA, 19 nt, Artificial Sequence
  Description of Artificial Sequence: Synthetic oligonucleotide
ccacuacuuccacuggaua

SEQ ID NO: 905904 - RNA, 19 nt, Artificial Sequence
  Description of Artificial Sequence: Synthetic oligonucleotide
caagcccgcucacauuauu

SEQ ID NO: 905905 - RNA, 19 nt, Artificial Sequence
  Description of Artificial Sequence: Synthetic oligonucleotide
caccuucugccucccggcu

SEQ ID NO: 905906 - RNA, 19 nt, Artificial Sequence
  Description of Artificial Sequence: Synthetic oligonucleotide
agcaagcaccuggguuuua

SEQ ID NO: 905907 - RNA, 19 nt, Artificial Sequence
  Description of Artificial Sequence: Synthetic oligonucleotide
ccgcauuauccagaagaaa

SEQ ID NO: 905908 - RNA, 19 nt, Artificial Sequence
  Description of Artificial Sequence: Synthetic oligonucleotide
cgugugcuacugaacguua

SEQ ID NO: 905909 - RNA, 19 nt, Artificial Sequence
  Description of Artificial Sequence: Synthetic oligonucleotide
ccgguuugugauggauuca

SEQ ID NO: 905910 - RNA, 19 nt, Artificial Sequence
  Description of Artificial Sequence: Synthetic oligonucleotide
gcccgcucacauuauuguu

SEQ ID NO: 905911 - RNA, 19 nt, Artificial Sequence
  Description of Artificial Sequence: Synthetic oligonucleotide
  modified_base (5)..(5): a, c, u, g, unknown or other
ccuunaggauacccauuuu

SEQ ID NO: 905912 - RNA, 19 nt, Artificial Sequence
  Description of Artificial Sequence: Synthetic oligonucleotide
gggugagguugugcaaacu

SEQ ID NO: 905913 - RNA, 19 nt, Artificial Sequence
  Description of Artificial Sequence: Synthetic oligonucleotide
caggggucuugaccacccu

SEQ ID NO: 905914 - RNA, 19 nt, Artificial Sequence
  Description of Artificial Sequence: Synthetic oligonucleotide
cccuauucucagugcuucu

SEQ ID NO: 905915 - RNA, 19 nt, Artificial Sequence
  Description of Artificial Sequence: Synthetic oligonucleotide
cccgcucuccuggggauca

SEQ ID NO: 905916 - RNA, 19 nt, Artificial Sequence
  Description of Artificial Sequence: Synthetic oligonucleotide
cccuggcuaucccuagucu

SEQ ID NO: 905917 - RNA, 19 nt, Artificial Sequence
  Description of Artificial Sequence: Synthetic oligonucleotide
ccuuggaucgaagggccau

SEQ ID NO: 905918 - RNA, 19 nt, Artificial Sequence
  Description of Artificial Sequence: Synthetic oligonucleotide
gcgccgguuugugauggau

SEQ ID NO: 905919 - RNA, 19 nt, Artificial Sequence
  Description of Artificial Sequence: Synthetic oligonucleotide
ccaagcccgcucacauuau

SEQ ID NO: 905920 - RNA, 19 nt, Artificial Sequence
  Description of Artificial Sequence: Synthetic oligonucleotide
cgcgccgguuugugaugga

SEQ ID NO: 905921 - RNA, 19 nt, Artificial Sequence
  Description of Artificial Sequence: Synthetic oligonucleotide
ccuggggaucaggggucuu

SEQ ID NO: 905922 - RNA, 19 nt, Artificial Sequence
  Description of Artificial Sequence: Synthetic oligonucleotide
  modified_base (1)..(1): a, c, u, g, unknown or other
naggauacccauuuugggu

SEQ ID NO: 905923 - RNA, 19 nt, Artificial Sequence
  Description of Artificial Sequence: Synthetic oligonucleotide
guaauuuugaagcagagug

SEQ ID NO: 905924 - RNA, 19 nt, Artificial Sequence
  Description of Artificial Sequence: Synthetic oligonucleotide
ugcucuauacuacacaugg

SEQ ID NO: 905925 - RNA, 19 nt, Artificial Sequence
  Description of Artificial Sequence: Synthetic oligonucleotide
aguaguacaaagcaccagg

SEQ ID NO: 905926 - RNA, 19 nt, Artificial Sequence
  Description of Artificial Sequence: Synthetic oligonucleotide
uauaucauggugaugggca

SEQ ID NO: 905927 - RNA, 19 nt, Artificial Sequence
  Description of Artificial Sequence: Synthetic oligonucleotide
ugaauucgcuccaacaugg

SEQ ID NO: 905928 - RNA, 19 nt, Artificial Sequence
  Description of Artificial Sequence: Synthetic oligonucleotide
aacgucccaggacagaugc

SEQ ID NO: 905929 - RNA, 19 nt, Artificial Sequence
  Description of Artificial Sequence: Synthetic oligonucleotide
uucgaauuaagugaauucg

SEQ ID NO: 905930 - RNA, 19 nt, Artificial Sequence
  Description of Artificial Sequence: Synthetic oligonucleotide
acuaauuugaaaccagcuc

SEQ ID NO: 905931 - RNA, 19 nt, Artificial Sequence
  Description of Artificial Sequence: Synthetic oligonucleotide
uugggagggaaacauaacg

SEQ ID NO: 905932 - RNA, 19 nt, Artificial Sequence
  Description of Artificial Sequence: Synthetic oligonucleotide
ucugcauggaaccuuagug

SEQ ID NO: 905933 - RNA, 19 nt, Artificial Sequence
  Description of Artificial Sequence: Synthetic oligonucleotide
ugcgcuugaagucuggacg

SEQ ID NO: 905934 - RNA, 19 nt, Artificial Sequence
  Description of Artificial Sequence: Synthetic oligonucleotide
cucuauacuacacaugggg

SEQ ID NO: 905935 - RNA, 19 nt, Artificial Sequence
  Description of Artificial Sequence: Synthetic oligonucleotide
aucuuuucgaauuaaguga

SEQ ID NO: 905936 - RNA, 19 nt, Artificial Sequence
  Description of Artificial Sequence: Synthetic oligonucleotide
gaagauguguggcuggucg

SEQ ID NO: 905937 - RNA, 19 nt, Artificial Sequence
  Description of Artificial Sequence: Synthetic oligonucleotide
auuagaacgucccaggaca

SEQ ID NO: 905938 - RNA, 19 nt, Artificial Sequence
  Description of Artificial Sequence: Synthetic oligonucleotide
aggauaagauguuuaacuc

SEQ ID NO: 905939 - RNA, 19 nt, Artificial Sequence
  Description of Artificial Sequence: Synthetic oligonucleotide
aaugagauccaugggagag

SEQ ID NO: 905940 - RNA, 19 nt, Artificial Sequence
  Description of Artificial Sequence: Synthetic oligonucleotide
gaggcuuagagccuaacag

SEQ ID NO: 905941 - RNA, 19 nt, Artificial Sequence
  Description of Artificial Sequence: Synthetic oligonucleotide
gauagaguaagauguggcc

SEQ ID NO: 905942 - RNA, 19 nt, Artificial Sequence
  Description of Artificial Sequence: Synthetic oligonucleotide
uacuauucuggugaaaggg

SEQ ID NO: 905943 - RNA, 19 nt, Artificial Sequence
  Description of Artificial Sequence: Synthetic oligonucleotide
aacaguguaccuguguaac

SEQ ID NO: 905944 - RNA, 19 nt, Artificial Sequence
  Description of Artificial Sequence: Synthetic oligonucleotide
aauucgcuccaacaugggg

SEQ ID NO: 905945 - RNA, 19 nt, Artificial Sequence
  Description of Artificial Sequence: Synthetic oligonucleotide
ucuauacuacacauggggc

SEQ ID NO: 905946 - RNA, 19 nt, Artificial Sequence
  Description of Artificial Sequence: Synthetic oligonucleotide
ucuauugaggucacaaacu

SEQ ID NO: 905947 - RNA, 19 nt, Artificial Sequence
  Description of Artificial Sequence: Synthetic oligonucleotide
ugugcauccagacaugacu

SEQ ID NO: 905948 - RNA, 19 nt, Artificial Sequence
  Description of Artificial Sequence: Synthetic oligonucleotide
acagauggcaggcauagag

SEQ ID NO: 905949 - RNA, 19 nt, Artificial Sequence
  Description of Artificial Sequence: Synthetic oligonucleotide
aggauugagacacagggca

SEQ ID NO: 905950 - RNA, 19 nt, Artificial Sequence
  Description of Artificial Sequence: Synthetic oligonucleotide
ucgaauuaagugaauucgc

SEQ ID NO: 905951 - RNA, 19 nt, Artificial Sequence
  Description of Artificial Sequence: Synthetic oligonucleotide
ugaggucacaaacucaucu

SEQ ID NO: 905952 - RNA, 19 nt, Artificial Sequence
  Description of Artificial Sequence: Synthetic oligonucleotide
uacuugauagaguaagaug

SEQ ID NO: 905953 - RNA, 19 nt, Artificial Sequence
  Description of Artificial Sequence: Synthetic oligonucleotide
cuuagagccuaacaguggg

SEQ ID NO: 905954 - RNA, 19 nt, Artificial Sequence
  Description of Artificial Sequence: Synthetic oligonucleotide
ccauauaucauggugaugg

SEQ ID NO: 905955 - RNA, 19 nt, Artificial Sequence
  Description of Artificial Sequence: Synthetic oligonucleotide
uagaguaagauguggccag

SEQ ID NO: 905956 - RNA, 19 nt, Artificial Sequence
  Description of Artificial Sequence: Synthetic oligonucleotide
auucgcuccaacauggggc

SEQ ID NO: 905957 - RNA, 19 nt, Artificial Sequence
  Description of Artificial Sequence: Synthetic oligonucleotide
ggaguuaauacuauucugg

SEQ ID NO: 905958 - RNA, 19 nt, Artificial Sequence
  Description of Artificial Sequence: Synthetic oligonucleotide
aaggguuggcuuuauaaaa

SEQ ID NO: 905959 - RNA, 19 nt, Artificial Sequence
  Description of Artificial Sequence: Synthetic oligonucleotide
agugagaagcauugugugg

SEQ ID NO: 905960 - RNA, 19 nt, Artificial Sequence
  Description of Artificial Sequence: Synthetic oligonucleotide
aagugucccaauuuaggca

SEQ ID NO: 905961 - RNA, 19 nt, Artificial Sequence
  Description of Artificial Sequence: Synthetic oligonucleotide
caagugucccaauuuaggc

SEQ ID NO: 905962 - RNA, 19 nt, Artificial Sequence
  Description of Artificial Sequence: Synthetic oligonucleotide
aagugaauucgcuccaaca

SEQ ID NO: 905963 - RNA, 19 nt, Artificial Sequence
  Description of Artificial Sequence: Synthetic oligonucleotide
aaugccguuuccccacugg

SEQ ID NO: 905964 - RNA, 19 nt, Artificial Sequence
  Description of Artificial Sequence: Synthetic oligonucleotide
cucuauugaggucacaaac

SEQ ID NO: 905965 - RNA, 19 nt, Artificial Sequence
  Description of Artificial Sequence: Synthetic oligonucleotide
ugagcuucgcccaaagcca

SEQ ID NO: 905966 - RNA, 19 nt, Artificial Sequence
  Description of Artificial Sequence: Synthetic oligonucleotide
aggauuagaacgucccagg

SEQ ID NO: 905967 - RNA, 19 nt, Artificial Sequence
  Description of Artificial Sequence: Synthetic oligonucleotide
auauaucauggugaugggc

SEQ ID NO: 905968 - RNA, 19 nt, Artificial Sequence
  Description of Artificial Sequence: Synthetic oligonucleotide
ugaugggcacaucuuuucg

SEQ ID NO: 905969 - RNA, 19 nt, Artificial Sequence
  Description of Artificial Sequence: Synthetic oligonucleotide
guaacagguuagaauaugg

SEQ ID NO: 905970 - RNA, 19 nt, Artificial Sequence
  Description of Artificial Sequence: Synthetic oligonucleotide
aguuaauacuauucuggug

SEQ ID NO: 905971 - RNA, 19 nt, Artificial Sequence
  Description of Artificial Sequence: Synthetic oligonucleotide
cauuguguggcugaugagg

SEQ ID NO: 905972 - RNA, 19 nt, Artificial Sequence
  Description of Artificial Sequence: Synthetic oligonucleotide
uuuaacucuuucuggguac

SEQ ID NO: 905973 - RNA, 19 nt, Artificial Sequence
  Description of Artificial Sequence: Synthetic oligonucleotide
agugaauucgcuccaacau

SEQ ID NO: 905974 - RNA, 19 nt, Artificial Sequence
  Description of Artificial Sequence: Synthetic oligonucleotide
gaaaggguuggcuuuauaa

SEQ ID NO: 905975 - RNA, 19 nt, Artificial Sequence
  Description of Artificial Sequence: Synthetic oligonucleotide
agacuaauuugaaaccagc

SEQ ID NO: 905976 - RNA, 19 nt, Artificial Sequence
  Description of Artificial Sequence: Synthetic oligonucleotide
aagacuaauuugaaaccag

SEQ ID NO: 905977 - RNA, 19 nt, Artificial Sequence
  Description of Artificial Sequence: Synthetic oligonucleotide
uggcgcaagacuaauuuga

SEQ ID NO: 905978 - RNA, 19 nt, Artificial Sequence
  Description of Artificial Sequence: Synthetic oligonucleotide
uggguaauuuugaagcaga

SEQ ID NO: 905979 - RNA, 19 nt, Artificial Sequence
  Description of Artificial Sequence: Synthetic oligonucleotide
aacucuaguuuccuccucu

SEQ ID NO: 905980 - RNA, 19 nt, Artificial Sequence
  Description of Artificial Sequence: Synthetic oligonucleotide
cugcauggaaccuuagugc

SEQ ID NO: 905981 - RNA, 19 nt, Artificial Sequence
  Description of Artificial Sequence: Synthetic oligonucleotide
uauggcgcaagacuaauuu

SEQ ID NO: 905982 - RNA, 19 nt, Artificial Sequence
  Description of Artificial Sequence: Synthetic oligonucleotide
aggaguuaauacuauucug

SEQ ID NO: 905983 - RNA, 19 nt, Artificial Sequence
  Description of Artificial Sequence: Synthetic oligonucleotide
augacucuaggguggaagg

SEQ ID NO: 905984 - RNA, 19 nt, Artificial Sequence
  Description of Artificial Sequence: Synthetic oligonucleotide
guaggggaaagccccaugg

SEQ ID NO: 905985 - RNA, 19 nt, Artificial Sequence
  Description of Artificial Sequence: Synthetic oligonucleotide
uuugaaugccguuucccca

SEQ ID NO: 905986 - RNA, 19 nt, Artificial Sequence
  Description of Artificial Sequence: Synthetic oligonucleotide
uacucagccagcccugagg

SEQ ID NO: 905987 - RNA, 19 nt, Artificial Sequence
  Description of Artificial Sequence: Synthetic oligonucleotide
uauugaggucacaaacuca

SEQ ID NO: 905988 - RNA, 19 nt, Artificial Sequence
  Description of Artificial Sequence: Synthetic oligonucleotide
gauuagaacgucccaggac

SEQ ID NO: 905989 - RNA, 19 nt, Artificial Sequence
  Description of Artificial Sequence: Synthetic oligonucleotide
ugcauggaaccuuagugcu

SEQ ID NO: 905990 - RNA, 19 nt, Artificial Sequence
  Description of Artificial Sequence: Synthetic oligonucleotide
ucagucaaccgaguuacag

SEQ ID NO: 905991 - RNA, 19 nt, Artificial Sequence
  Description of Artificial Sequence: Synthetic oligonucleotide
cagaggauuagaacguccc

SEQ ID NO: 905992 - RNA, 19 nt, Artificial Sequence
  Description of Artificial Sequence: Synthetic oligonucleotide
agaccacggugacagaugg

SEQ ID NO: 905993 - RNA, 19 nt, Artificial Sequence
  Description of Artificial Sequence: Synthetic oligonucleotide
auuaagugaauucgcucca

SEQ ID NO: 905994 - RNA, 19 nt, Artificial Sequence
  Description of Artificial Sequence: Synthetic oligonucleotide
gaggauuagaacgucccag

SEQ ID NO: 905995 - RNA, 19 nt, Artificial Sequence
  Description of Artificial Sequence: Synthetic oligonucleotide
uucuggguacuugauagag

SEQ ID NO: 905996 - RNA, 19 nt, Artificial Sequence
  Description of Artificial Sequence: Synthetic oligonucleotide
ugcgaugcacccucgaucu

SEQ ID NO: 905997 - RNA, 19 nt, Artificial Sequence
  Description of Artificial Sequence: Synthetic oligonucleotide
uggacggaaucucugcacc

SEQ ID NO: 905998 - RNA, 19 nt, Artificial Sequence
  Description of Artificial Sequence: Synthetic oligonucleotide
agugucccaauuuaggcaa

SEQ ID NO: 905999 - RNA, 19 nt, Artificial Sequence
  Description of Artificial Sequence: Synthetic oligonucleotide
ugacagauggcaggcauag

SEQ ID NO: 906000 - RNA, 19 nt, Artificial Sequence
  Description of Artificial Sequence: Synthetic oligonucleotide
uccagacaugacucuaggg

SEQ ID NO: 906001 - RNA, 19 nt, Artificial Sequence
  Description of Artificial Sequence: Synthetic oligonucleotide
uuucacugugguccuaucu

SEQ ID NO: 906002 - RNA, 19 nt, Artificial Sequence
  Description of Artificial Sequence: Synthetic oligonucleotide
uauauuccgagaugguauc

SEQ ID NO: 906003 - RNA, 19 nt, Artificial Sequence
  Description of Artificial Sequence: Synthetic oligonucleotide
auagaguaagauguggcca

SEQ ID NO: 906004 - RNA, 19 nt, Artificial Sequence
  Description of Artificial Sequence: Synthetic oligonucleotide
cucaagugucccaauuuag

SEQ ID NO: 906005 - RNA, 19 nt, Artificial Sequence
  Description of Artificial Sequence: Synthetic oligonucleotide
aguguaccuguguaacagg

SEQ ID NO: 906006 - RNA, 19 nt, Artificial Sequence
  Description of Artificial Sequence: Synthetic oligonucleotide
ggcaagauaacaguguacc

SEQ ID NO: 906007 - RNA, 19 nt, Artificial Sequence
  Description of Artificial Sequence: Synthetic oligonucleotide
uagagccuaacagugggag

SEQ ID NO: 906008 - RNA, 19 nt, Artificial Sequence
  Description of Artificial Sequence: Synthetic oligonucleotide
cauauaucauggugauggg

SEQ ID NO: 906009 - RNA, 19 nt, Artificial Sequence
  Description of Artificial Sequence: Synthetic oligonucleotide
uuuucgaauuaagugaauu

SEQ ID NO: 906010 - RNA, 19 nt, Artificial Sequence
  Description of Artificial Sequence: Synthetic oligonucleotide
uuagaauauggcgcaagac

SEQ ID NO: 906011 - RNA, 19 nt, Artificial Sequence
  Description of Artificial Sequence: Synthetic oligonucleotide
cagauggcaggcauagagg

SEQ ID NO: 906012 - RNA, 19 nt, Artificial Sequence
  Description of Artificial Sequence: Synthetic oligonucleotide
ugguagauauauuccgaga

SEQ ID NO: 906013 - RNA, 19 nt, Artificial Sequence
  Description of Artificial Sequence: Synthetic oligonucleotide
auauauuccgagaugguau

SEQ ID NO: 906014 - RNA, 19 nt, Artificial Sequence
  Description of Artificial Sequence: Synthetic oligonucleotide
cccaauuuaggcaaccagg

SEQ ID NO: 906015 - RNA, 19 nt, Artificial Sequence
  Description of Artificial Sequence: Synthetic oligonucleotide
aaccgaguuacagaucucu

SEQ ID NO: 906016 - RNA, 19 nt, Artificial Sequence
  Description of Artificial Sequence: Synthetic oligonucleotide
guacccagagccuuagagc

SEQ ID NO: 906017 - RNA, 19 nt, Artificial Sequence
  Description of Artificial Sequence: Synthetic oligonucleotide
agcugagacauggaagugg

SEQ ID NO: 906018 - RNA, 19 nt, Artificial Sequence
  Description of Artificial Sequence: Synthetic oligonucleotide
agccccauauaucauggug

SEQ ID NO: 906019 - RNA, 19 nt, Artificial Sequence
  Description of Artificial Sequence: Synthetic oligonucleotide
uaagugaauucgcuccaac

SEQ ID NO: 906020 - RNA, 19 nt, Artificial Sequence
  Description of Artificial Sequence: Synthetic oligonucleotide
acggaaucucugcaccagc

SEQ ID NO: 906021 - RNA, 19 nt, Artificial Sequence
  Description of Artificial Sequence: Synthetic oligonucleotide
uaccuguguaacagguuag

SEQ ID NO: 906022 - RNA, 19 nt, Artificial Sequence
  Description of Artificial Sequence: Synthetic oligonucleotide
caggauaagauguuuaacu

SEQ ID NO: 906023 - RNA, 19 nt, Artificial Sequence
  Description of Artificial Sequence: Synthetic oligonucleotide
gguaucauccucgaagaag

SEQ ID NO: 906024 - RNA, 19 nt, Artificial Sequence
  Description of Artificial Sequence: Synthetic oligonucleotide
ggcaacucuaguuuccucc

SEQ ID NO: 906025 - RNA, 19 nt, Artificial Sequence
  Description of Artificial Sequence: Synthetic oligonucleotide
acucgaagaacagccagag

SEQ ID NO: 906026 - RNA, 19 nt, Artificial Sequence
  Description of Artificial Sequence: Synthetic oligonucleotide
ugucuauccagguguuagc

SEQ ID NO: 906027 - RNA, 19 nt, Artificial Sequence
  Description of Artificial Sequence: Synthetic oligonucleotide
guuagaauauggcgcaaga

SEQ ID NO: 906028 - RNA, 19 nt, Artificial Sequence
  Description of Artificial Sequence: Synthetic oligonucleotide
cuaaagcuccucagugagg

SEQ ID NO: 906029 - RNA, 19 nt, Artificial Sequence
  Description of Artificial Sequence: Synthetic oligonucleotide
ugugcauugcagugguaga

SEQ ID NO: 906030 - RNA, 19 nt, Artificial Sequence
  Description of Artificial Sequence: Synthetic oligonucleotide
aggaccagccacucgaaga

SEQ ID NO: 906031 - RNA, 19 nt, Artificial Sequence
  Description of Artificial Sequence: Synthetic oligonucleotide
agaggcuuagagccuaaca

SEQ ID NO: 906032 - RNA, 19 nt, Artificial Sequence
  Description of Artificial Sequence: Synthetic oligonucleotide
gagugaguuggagaccacg

SEQ ID NO: 906033 - RNA, 19 nt, Artificial Sequence
  Description of Artificial Sequence: Synthetic oligonucleotide
agaauauggcgcaagacua

SEQ ID NO: 906034 - RNA, 19 nt, Artificial Sequence
  Description of Artificial Sequence: Synthetic oligonucleotide
aaggaccagccacucgaag

SEQ ID NO: 906035 - RNA, 19 nt, Artificial Sequence
  Description of Artificial Sequence: Synthetic oligonucleotide
ucuggguacuugauagagu

SEQ ID NO: 906036 - RNA, 19 nt, Artificial Sequence
  Description of Artificial Sequence: Synthetic oligonucleotide
ggggcuauguagaaaaugc

SEQ ID NO: 906037 - RNA, 19 nt, Artificial Sequence
  Description of Artificial Sequence: Synthetic oligonucleotide
cauccagacaugacucuag

SEQ ID NO: 906038 - RNA, 19 nt, Artificial Sequence
  Description of Artificial Sequence: Synthetic oligonucleotide
aauauggcgcaagacuaau

SEQ ID NO: 906039 - RNA, 19 nt, Artificial Sequence
  Description of Artificial Sequence: Synthetic oligonucleotide
gacucuaggguggaagggc

SEQ ID NO: 906040 - RNA, 19 nt, Artificial Sequence
  Description of Artificial Sequence: Synthetic oligonucleotide
caguguaccuguguaacag

SEQ ID NO: 906041 - RNA, 19 nt, Artificial Sequence
  Description of Artificial Sequence: Synthetic oligonucleotide
uaacaguguaccuguguaa

SEQ ID NO: 906042 - RNA, 19 nt, Artificial Sequence
  Description of Artificial Sequence: Synthetic oligonucleotide
augccguuuccccacuggg

SEQ ID NO: 906043 - RNA, 19 nt, Artificial Sequence
  Description of Artificial Sequence: Synthetic oligonucleotide
caagacuaauuugaaacca

SEQ ID NO: 906044 - RNA, 19 nt, Artificial Sequence
  Description of Artificial Sequence: Synthetic oligonucleotide
auggcgcaagacuaauuug

SEQ ID NO: 906045 - RNA, 19 nt, Artificial Sequence
  Description of Artificial Sequence: Synthetic oligonucleotide
uauacuacacauggggcuu

SEQ ID NO: 906046 - RNA, 19 nt, Artificial Sequence
  Description of Artificial Sequence: Synthetic oligonucleotide
agaggauuagaacguccca

SEQ ID NO: 906047 - RNA, 19 nt, Artificial Sequence
  Description of Artificial Sequence: Synthetic oligonucleotide
gagccuaacagugggagga

SEQ ID NO: 906048 - RNA, 19 nt, Artificial Sequence
  Description of Artificial Sequence: Synthetic oligonucleotide
ucccuugggaauguuggcc

SEQ ID NO: 906049 - RNA, 19 nt, Artificial Sequence
  Description of Artificial Sequence: Synthetic oligonucleotide
cagagguucuggcuaaaac

SEQ ID NO: 906050 - RNA, 19 nt, Artificial Sequence
  Description of Artificial Sequence: Synthetic oligonucleotide
guaccuguguaacagguua

SEQ ID NO: 906051 - RNA, 19 nt, Artificial Sequence
  Description of Artificial Sequence: Synthetic oligonucleotide
ccgaaggacuccaucaugg

SEQ ID NO: 906052 - RNA, 19 nt, Artificial Sequence
  Description of Artificial Sequence: Synthetic oligonucleotide
cagguuagaauauggcgca

SEQ ID NO: 906053 - RNA, 19 nt, Artificial Sequence
  Description of Artificial Sequence: Synthetic oligonucleotide
gauaagauguuuaacucuu

SEQ ID NO: 906054 - RNA, 19 nt, Artificial Sequence
  Description of Artificial Sequence: Synthetic oligonucleotide
gacguggugcgaugcaccc

SEQ ID NO: 906055 - RNA, 19 nt, Artificial Sequence
  Description of Artificial Sequence: Synthetic oligonucleotide
ggaaacauaacgggccagg

SEQ ID NO: 906056 - RNA, 19 nt, Artificial Sequence
  Description of Artificial Sequence: Synthetic oligonucleotide
ggucccuugggaauguugg

SEQ ID NO: 906057 - RNA, 19 nt, Artificial Sequence
  Description of Artificial Sequence: Synthetic oligonucleotide
uggccuaaagcuccucagu

SEQ ID NO: 906058 - RNA, 19 nt, Artificial Sequence
  Description of Artificial Sequence: Synthetic oligonucleotide
gguacuuguggacuuugug

SEQ ID NO: 906059 - RNA, 19 nt, Artificial Sequence
  Description of Artificial Sequence: Synthetic oligonucleotide
aggucccggacauaggagu

SEQ ID NO: 906060 - RNA, 19 nt, Artificial Sequence
  Description of Artificial Sequence: Synthetic oligonucleotide
aagaggcuuagagccuaac

SEQ ID NO: 906061 - RNA, 19 nt, Artificial Sequence
  Description of Artificial Sequence: Synthetic oligonucleotide
augagauccaugggagagg

SEQ ID NO: 906062 - RNA, 19 nt, Artificial Sequence
  Description of Artificial Sequence: Synthetic oligonucleotide
cuauacuacacauggggcu

SEQ ID NO: 906063 - RNA, 19 nt, Artificial Sequence
  Description of Artificial Sequence: Synthetic oligonucleotide
aaagcaccaggaguuaaua

SEQ ID NO: 906064 - RNA, 19 nt, Artificial Sequence
  Description of Artificial Sequence: Synthetic oligonucleotide
agacguggugcgaugcacc

SEQ ID NO: 906065 - RNA, 19 nt, Artificial Sequence
  Description of Artificial Sequence: Synthetic oligonucleotide
guguuaguuggugagaaaa

SEQ ID NO: 906066 - RNA, 19 nt, Artificial Sequence
  Description of Artificial Sequence: Synthetic oligonucleotide
aguaggggaaaggaucuca

SEQ ID NO: 906067 - RNA, 19 nt, Artificial Sequence
  Description of Artificial Sequence: Synthetic oligonucleotide
cucgaagaagucugcgaac

SEQ ID NO: 906068 - RNA, 19 nt, Artificial Sequence
  Description of Artificial Sequence: Synthetic oligonucleotide
acaguguaccuguguaaca

SEQ ID NO: 906069 - RNA, 19 nt, Artificial Sequence
  Description of Artificial Sequence: Synthetic oligonucleotide
aaguaggggaaaggaucuc

SEQ ID NO: 906070 - RNA, 19 nt, Artificial Sequence
  Description of Artificial Sequence: Synthetic oligonucleotide
gguucuggcuaaaacuggg

SEQ ID NO: 906071 - RNA, 19 nt, Artificial Sequence
  Description of Artificial Sequence: Synthetic oligonucleotide
gaggugacggcaacucuag

SEQ ID NO: 906072 - RNA, 19 nt, Artificial Sequence
  Description of Artificial Sequence: Synthetic oligonucleotide
agccauguaccaucaccag

SEQ ID NO: 906073 - RNA, 19 nt, Artificial Sequence
  Description of Artificial Sequence: Synthetic oligonucleotide
aucauggguggggauuccc

SEQ ID NO: 906074 - RNA, 19 nt, Artificial Sequence
  Description of Artificial Sequence: Synthetic oligonucleotide
cauagacguggugcgaugc

SEQ ID NO: 906075 - RNA, 19 nt, Artificial Sequence
  Description of Artificial Sequence: Synthetic oligonucleotide
uggcuuugaaugccguuuc

SEQ ID NO: 906076 - RNA, 19 nt, Artificial Sequence
  Description of Artificial Sequence: Synthetic oligonucleotide
gaauucgcuccaacauggg

SEQ ID NO: 906077 - RNA, 19 nt, Artificial Sequence
  Description of Artificial Sequence: Synthetic oligonucleotide
gacggaaucucugcaccag

SEQ ID NO: 906078 - RNA, 19 nt, Artificial Sequence
  Description of Artificial Sequence: Synthetic oligonucleotide
cauguaccaucaccagagg

SEQ ID NO: 906079 - RNA, 19 nt, Artificial Sequence
  Description of Artificial Sequence: Synthetic oligonucleotide
gcugagacauggaaguggg

SEQ ID NO: 906080 - RNA, 19 nt, Artificial Sequence
  Description of Artificial Sequence: Synthetic oligonucleotide
uguaccuguguaacagguu

SEQ ID NO: 906081 - RNA, 19 nt, Artificial Sequence
  Description of Artificial Sequence: Synthetic oligonucleotide
uugcgcuugaagucuggac

SEQ ID NO: 906082 - RNA, 19 nt, Artificial Sequence
  Description of Artificial Sequence: Synthetic oligonucleotide
ucauggcuuugaaugccgu

SEQ ID NO: 906083 - RNA, 19 nt, Artificial Sequence
  Description of Artificial Sequence: Synthetic oligonucleotide
gacuaauuugaaaccagcu

SEQ ID NO: 906084 - RNA, 19 nt, Artificial Sequence
  Description of Artificial Sequence: Synthetic oligonucleotide
ugucccaauuuaggcaacc

SEQ ID NO: 906085 - RNA, 19 nt, Artificial Sequence
  Description of Artificial Sequence: Synthetic oligonucleotide
agaguaagauguggccagg

SEQ ID NO: 906086 - RNA, 19 nt, Artificial Sequence
  Description of Artificial Sequence: Synthetic oligonucleotide
gaaacauaacgggccagga

SEQ ID NO: 906087 - RNA, 19 nt, Artificial Sequence
  Description of Artificial Sequence: Synthetic oligonucleotide
ucccggacauaggaguccg

SEQ ID NO: 906088 - RNA, 19 nt, Artificial Sequence
  Description of Artificial Sequence: Synthetic oligonucleotide
uggggcgccaaguggggag

SEQ ID NO: 906089 - RNA, 19 nt, Artificial Sequence
  Description of Artificial Sequence: Synthetic oligonucleotide
gaaguaggggaaaggaucu

SEQ ID NO: 906090 - RNA, 19 nt, Artificial Sequence
  Description of Artificial Sequence: Synthetic oligonucleotide
ggccuaaagcuccucagug

SEQ ID NO: 906091 - RNA, 19 nt, Artificial Sequence
  Description of Artificial Sequence: Synthetic oligonucleotide
auagacguggugcgaugca

SEQ ID NO: 906092 - RNA, 19 nt, Artificial Sequence
  Description of Artificial Sequence: Synthetic oligonucleotide
ggauaagauguuuaacucu

SEQ ID NO: 906093 - RNA, 19 nt, Artificial Sequence
  Description of Artificial Sequence: Synthetic oligonucleotide
gcgcuugaagucuggacgg

SEQ ID NO: 906094 - RNA, 19 nt, Artificial Sequence
  Description of Artificial Sequence: Synthetic oligonucleotide
ugacggcaacucuaguuuc

SEQ ID NO: 906095 - RNA, 19 nt, Artificial Sequence
  Description of Artificial Sequence: Synthetic oligonucleotide
uuaagugaauucgcuccaa

SEQ ID NO: 906096 - RNA, 19 nt, Artificial Sequence
  Description of Artificial Sequence: Synthetic oligonucleotide
cucgaagaacagccagagg

SEQ ID NO: 906097 - RNA, 19 nt, Artificial Sequence
  Description of Artificial Sequence: Synthetic oligonucleotide
agaacgucccaggacagau

SEQ ID NO: 906098 - RNA, 19 nt, Artificial Sequence
  Description of Artificial Sequence: Synthetic oligonucleotide
agacacagggcaagauaac

SEQ ID NO: 906099 - RNA, 19 nt, Artificial Sequence
  Description of Artificial Sequence: Synthetic oligonucleotide
gcacguguuaguuggugag

SEQ ID NO: 906100 - RNA, 19 nt, Artificial Sequence
  Description of Artificial Sequence: Synthetic oligonucleotide
cagucaaccgaguuacaga

SEQ ID NO: 906101 - RNA, 19 nt, Artificial Sequence
  Description of Artificial Sequence: Synthetic oligonucleotide
gguuagaauauggcgcaag

SEQ ID NO: 906102 - RNA, 19 nt, Artificial Sequence
  Description of Artificial Sequence: Synthetic oligonucleotide
uugaggucacaaacucauc

SEQ ID NO: 906103 - RNA, 19 nt, Artificial Sequence
  Description of Artificial Sequence: Synthetic oligonucleotide
aguuggucguaggggaaag

SEQ ID NO: 906104 - RNA, 19 nt, Artificial Sequence
  Description of Artificial Sequence: Synthetic oligonucleotide
uggguacuugauagaguaa

SEQ ID NO: 906105 - RNA, 19 nt, Artificial Sequence
  Description of Artificial Sequence: Synthetic oligonucleotide
uuggugagaaaaggacaga

SEQ ID NO: 906106 - RNA, 19 nt, Artificial Sequence
  Description of Artificial Sequence: Synthetic oligonucleotide
ugugcggcgggcacucagu

SEQ ID NO: 906107 - RNA, 19 nt, Artificial Sequence
  Description of Artificial Sequence: Synthetic oligonucleotide
ugaaugccguuuccccacu

SEQ ID NO: 906108 - RNA, 19 nt, Artificial Sequence
  Description of Artificial Sequence: Synthetic oligonucleotide
caguaguacaaagcaccag

SEQ ID NO: 906109 - RNA, 19 nt, Artificial Sequence
  Description of Artificial Sequence: Synthetic oligonucleotide
gaauauggcgcaagacuaa

SEQ ID NO: 906110 - RNA, 19 nt, Artificial Sequence
  Description of Artificial Sequence: Synthetic oligonucleotide
cagccgaaggacuccauca

SEQ ID NO: 906111 - RNA, 19 nt, Artificial Sequence
  Description of Artificial Sequence: Synthetic oligonucleotide
ugguccuaucuugggaaca

SEQ ID NO: 906112 - RNA, 19 nt, Artificial Sequence
  Description of Artificial Sequence: Synthetic oligonucleotide
uggagugugcggcgggcac

SEQ ID NO: 906113 - RNA, 19 nt, Artificial Sequence
  Description of Artificial Sequence: Synthetic oligonucleotide
aggaucucaagugucccaa

SEQ ID NO: 906114 - RNA, 19 nt, Artificial Sequence
  Description of Artificial Sequence: Synthetic oligonucleotide
acguguuaguuggugagaa

SEQ ID NO: 906115 - RNA, 19 nt, Artificial Sequence
  Description of Artificial Sequence: Synthetic oligonucleotide
agaaaaggacagagguucu

SEQ ID NO: 906116 - RNA, 19 nt, Artificial Sequence
  Description of Artificial Sequence: Synthetic oligonucleotide
cauagagggucaggcagug

SEQ ID NO: 906117 - RNA, 19 nt, Artificial Sequence
  Description of Artificial Sequence: Synthetic oligonucleotide
ccagaggauuagaacgucc

SEQ ID NO: 906118 - RNA, 19 nt, Artificial Sequence
  Description of Artificial Sequence: Synthetic oligonucleotide
gcuuagagccuaacagugg

SEQ ID NO: 906119 - RNA, 19 nt, Artificial Sequence
  Description of Artificial Sequence: Synthetic oligonucleotide
auauuccgagaugguauca

SEQ ID NO: 906120 - RNA, 19 nt, Artificial Sequence
  Description of Artificial Sequence: Synthetic oligonucleotide
cccaaagccauguaccauc

SEQ ID NO: 906121 - RNA, 19 nt, Artificial Sequence
  Description of Artificial Sequence: Synthetic oligonucleotide
ggaaaggaucucaaguguc

SEQ ID NO: 906122 - RNA, 19 nt, Artificial Sequence
  Description of Artificial Sequence: Synthetic oligonucleotide
uguguggcuggucggcaua

SEQ ID NO: 906123 - RNA, 19 nt, Artificial Sequence
  Description of Artificial Sequence: Synthetic oligonucleotide
gaaugccguuuccccacug

SEQ ID NO: 906124 - RNA, 19 nt, Artificial Sequence
  Description of Artificial Sequence: Synthetic oligonucleotide
agaagaggcuuagagccua

SEQ ID NO: 906125 - RNA, 19 nt, Artificial Sequence
  Description of Artificial Sequence: Synthetic oligonucleotide
gguguuagccccauauauc

SEQ ID NO: 906126 - RNA, 19 nt, Artificial Sequence
  Description of Artificial Sequence: Synthetic oligonucleotide
uggcacguguuaguuggug

SEQ ID NO: 906127 - RNA, 19 nt, Artificial Sequence
  Description of Artificial Sequence: Synthetic oligonucleotide
ggauuagaacgucccagga

SEQ ID NO: 906128 - RNA, 19 nt, Artificial Sequence
  Description of Artificial Sequence: Synthetic oligonucleotide
gguccuaucuugggaacag

SEQ ID NO: 906129 - RNA, 19 nt, Artificial Sequence
  Description of Artificial Sequence: Synthetic oligonucleotide
ggaacugcccugccucggg

SEQ ID NO: 906130 - RNA, 19 nt, Artificial Sequence
  Description of Artificial Sequence: Synthetic oligonucleotide
gugguccuaucuugggaac

SEQ ID NO: 906131 - RNA, 19 nt, Artificial Sequence
  Description of Artificial Sequence: Synthetic oligonucleotide
uagaacgucccaggacaga

SEQ ID NO: 906132 - RNA, 19 nt, Artificial Sequence
  Description of Artificial Sequence: Synthetic oligonucleotide
guacuugauagaguaagau

SEQ ID NO: 906133 - RNA, 19 nt, Artificial Sequence
  Description of Artificial Sequence: Synthetic oligonucleotide
ggcuaaaacugggagguga

SEQ ID NO: 906134 - RNA, 19 nt, Artificial Sequence
  Description of Artificial Sequence: Synthetic oligonucleotide
cacagggcaagauaacagu

SEQ ID NO: 906135 - RNA, 19 nt, Artificial Sequence
  Description of Artificial Sequence: Synthetic oligonucleotide
gaguaagauguggccagga

SEQ ID NO: 906136 - RNA, 19 nt, Artificial Sequence
  Description of Artificial Sequence: Synthetic oligonucleotide
ugggcacaucuuuucgaau

SEQ ID NO: 906137 - RNA, 19 nt, Artificial Sequence
  Description of Artificial Sequence: Synthetic oligonucleotide
uuuaggcaaccaggauuga

SEQ ID NO: 906138 - RNA, 19 nt, Artificial Sequence
  Description of Artificial Sequence: Synthetic oligonucleotide
agaugguaucauccucgaa

SEQ ID NO: 906139 - RNA, 19 nt, Artificial Sequence
  Description of Artificial Sequence: Synthetic oligonucleotide
ccgaguuacagaucucuuc

SEQ ID NO: 906140 - RNA, 19 nt, Artificial Sequence
  Description of Artificial Sequence: Synthetic oligonucleotide
gggauucugugcauugcag

SEQ ID NO: 906141 - RNA, 19 nt, Artificial Sequence
  Description of Artificial Sequence: Synthetic oligonucleotide
gaacgucccaggacagaug

SEQ ID NO: 906142 - RNA, 19 nt, Artificial Sequence
  Description of Artificial Sequence: Synthetic oligonucleotide
aggaucauggguggggauu

SEQ ID NO: 906143 - RNA, 19 nt, Artificial Sequence
  Description of Artificial Sequence: Synthetic oligonucleotide
gcucuauacuacacauggg

SEQ ID NO: 906144 - RNA, 19 nt, Artificial Sequence
  Description of Artificial Sequence: Synthetic oligonucleotide
ggugcgguccuuuugcucu

SEQ ID NO: 906145 - RNA, 19 nt, Artificial Sequence
  Description of Artificial Sequence: Synthetic oligonucleotide
uaguacccagagccuuaga

SEQ ID NO: 906146 - RNA, 19 nt, Artificial Sequence
  Description of Artificial Sequence: Synthetic oligonucleotide
uacuacacauggggcuuca

SEQ ID NO: 906147 - RNA, 19 nt, Artificial Sequence
  Description of Artificial Sequence: Synthetic oligonucleotide
ccaaggaccagccacucga

SEQ ID NO: 906148 - RNA, 19 nt, Artificial Sequence
  Description of Artificial Sequence: Synthetic oligonucleotide
uggggucaguuggucguag

SEQ ID NO: 906149 - RNA, 19 nt, Artificial Sequence
  Description of Artificial Sequence: Synthetic oligonucleotide
cuacucagccagcccugag

SEQ ID NO: 906150 - RNA, 19 nt, Artificial Sequence
  Description of Artificial Sequence: Synthetic oligonucleotide
agauaacaguguaccugug

SEQ ID NO: 906151 - RNA, 19 nt, Artificial Sequence
  Description of Artificial Sequence: Synthetic oligonucleotide
ggcuuugaaugccguuucc

SEQ ID NO: 906152 - RNA, 19 nt, Artificial Sequence
  Description of Artificial Sequence: Synthetic oligonucleotide
ccagacaugacucuagggu

SEQ ID NO: 906153 - RNA, 19 nt, Artificial Sequence
  Description of Artificial Sequence: Synthetic oligonucleotide
cuauucuggugaaaggguu

SEQ ID NO: 906154 - RNA, 19 nt, Artificial Sequence
  Description of Artificial Sequence: Synthetic oligonucleotide
ucucuaccaggagccauau

SEQ ID NO: 906155 - RNA, 19 nt, Artificial Sequence
  Description of Artificial Sequence: Synthetic oligonucleotide
augcucuccccgccauguc

SEQ ID NO: 906156 - RNA, 19 nt, Artificial Sequence
  Description of Artificial Sequence: Synthetic oligonucleotide
uagccccauauaucauggu

SEQ ID NO: 906157 - RNA, 19 nt, Artificial Sequence
  Description of Artificial Sequence: Synthetic oligonucleotide
acggcaacucuaguuuccu

SEQ ID NO: 906158 - RNA, 19 nt, Artificial Sequence
  Description of Artificial Sequence: Synthetic oligonucleotide
auaagauguuuaacucuuu

SEQ ID NO: 906159 - RNA, 19 nt, Artificial Sequence
  Description of Artificial Sequence: Synthetic oligonucleotide
ggauucugugcauugcagu

SEQ ID NO: 906160 - RNA, 19 nt, Artificial Sequence
  Description of Artificial Sequence: Synthetic oligonucleotide
auguguggcuggucggcau

SEQ ID NO: 906161 - RNA, 19 nt, Artificial Sequence
  Description of Artificial Sequence: Synthetic oligonucleotide
gccauguaccaucaccaga

SEQ ID NO: 906162 - RNA, 19 nt, Artificial Sequence
  Description of Artificial Sequence: Synthetic oligonucleotide
gguggggauucccaugcuc

SEQ ID NO: 906163 - RNA, 19 nt, Artificial Sequence
  Description of Artificial Sequence: Synthetic oligonucleotide
uggcuaaaacugggaggug

SEQ ID NO: 906164 - RNA, 19 nt, Artificial Sequence
  Description of Artificial Sequence: Synthetic oligonucleotide
ggggucaguuggucguagg

SEQ ID NO: 906165 - RNA, 19 nt, Artificial Sequence
  Description of Artificial Sequence: Synthetic oligonucleotide
acgucccaggacagaugcc

SEQ ID NO: 906166 - RNA, 19 nt, Artificial Sequence
  Description of Artificial Sequence: Synthetic oligonucleotide
agucugcgaacuugcgcuu

SEQ ID NO: 906167 - RNA, 19 nt, Artificial Sequence
  Description of Artificial Sequence: Synthetic oligonucleotide
guccuaucuugggaacagc

SEQ ID NO: 906168 - RNA, 19 nt, Artificial Sequence
  Description of Artificial Sequence: Synthetic oligonucleotide
gcauagacguggugcgaug

SEQ ID NO: 906169 - RNA, 19 nt, Artificial Sequence
  Description of Artificial Sequence: Synthetic oligonucleotide
acagagguucuggcuaaaa

SEQ ID NO: 906170 - RNA, 19 nt, Artificial Sequence
  Description of Artificial Sequence: Synthetic oligonucleotide
gucugcgaacuugcgcuug

SEQ ID NO: 906171 - RNA, 19 nt, Artificial Sequence
  Description of Artificial Sequence: Synthetic oligonucleotide
gugcggcgggcacucagug

SEQ ID NO: 906172 - RNA, 19 nt, Artificial Sequence
  Description of Artificial Sequence: Synthetic oligonucleotide
ggacggaaucucugcacca

SEQ ID NO: 906173 - RNA, 19 nt, Artificial Sequence
  Description of Artificial Sequence: Synthetic oligonucleotide
ccucagugaggcaugggca

SEQ ID NO: 906174 - RNA, 19 nt, Artificial Sequence
  Description of Artificial Sequence: Synthetic oligonucleotide
aggugacggcaacucuagu

SEQ ID NO: 906175 - RNA, 19 nt, Artificial Sequence
  Description of Artificial Sequence: Synthetic oligonucleotide
agguacuuguggacuuugu

SEQ ID NO: 906176 - RNA, 19 nt, Artificial Sequence
  Description of Artificial Sequence: Synthetic oligonucleotide
gcuggccuaaagcuccuca

SEQ ID NO: 906177 - RNA, 19 nt, Artificial Sequence
  Description of Artificial Sequence: Synthetic oligonucleotide
ggcuggcacguguuaguug

SEQ ID NO: 906178 - RNA, 19 nt, Artificial Sequence
  Description of Artificial Sequence: Synthetic oligonucleotide
gagccauauuugcucuaua

SEQ ID NO: 906179 - RNA, 19 nt, Artificial Sequence
  Description of Artificial Sequence: Synthetic oligonucleotide
gcaggcauagagggucagg

SEQ ID NO: 906180 - RNA, 19 nt, Artificial Sequence
  Description of Artificial Sequence: Synthetic oligonucleotide
gcaagauaacaguguaccu

SEQ ID NO: 906181 - RNA, 19 nt, Artificial Sequence
  Description of Artificial Sequence: Synthetic oligonucleotide
caauuuaggcaaccaggau

SEQ ID NO: 906182 - RNA, 19 nt, Artificial Sequence
  Description of Artificial Sequence: Synthetic oligonucleotide
cacguguuaguuggugaga

SEQ ID NO: 906183 - RNA, 19 nt, Artificial Sequence
  Description of Artificial Sequence: Synthetic oligonucleotide
auauggcgcaagacuaauu

SEQ ID NO: 906184 - RNA, 19 nt, Artificial Sequence
  Description of Artificial Sequence: Synthetic oligonucleotide
gugcgguccuuuugcucug

SEQ ID NO: 906185 - RNA, 19 nt, Artificial Sequence
  Description of Artificial Sequence: Synthetic oligonucleotide
cgaaggacuccaucauggc

SEQ ID NO: 906186 - RNA, 19 nt, Artificial Sequence
  Description of Artificial Sequence: Synthetic oligonucleotide
gcgggcacucagugaaucc

SEQ ID NO: 906187 - RNA, 19 nt, Artificial Sequence
  Description of Artificial Sequence: Synthetic oligonucleotide
uggcuggcacguguuaguu

SEQ ID NO: 906188 - RNA, 19 nt, Artificial Sequence
  Description of Artificial Sequence: Synthetic oligonucleotide
gucaaccgaguuacagauc

SEQ ID NO: 906189 - RNA, 19 nt, Artificial Sequence
  Description of Artificial Sequence: Synthetic oligonucleotide
gacauaggaguccggccuu

SEQ ID NO: 906190 - RNA, 19 nt, Artificial Sequence
  Description of Artificial Sequence: Synthetic oligonucleotide
gcaccaggaguuaauacua

SEQ ID NO: 906191 - RNA, 19 nt, Artificial Sequence
  Description of Artificial Sequence: Synthetic oligonucleotide
gaucucacuggggucaguu

SEQ ID NO: 906192 - RNA, 19 nt, Artificial Sequence
  Description of Artificial Sequence: Synthetic oligonucleotide
agccuaguacccagagccu

SEQ ID NO: 906193 - RNA, 19 nt, Artificial Sequence
  Description of Artificial Sequence: Synthetic oligonucleotide
ccgagaugguaucauccuc

SEQ ID NO: 906194 - RNA, 19 nt, Artificial Sequence
  Description of Artificial Sequence: Synthetic oligonucleotide
cggacauaggaguccggcc

SEQ ID NO: 906195 - RNA, 19 nt, Artificial Sequence
  Description of Artificial Sequence: Synthetic oligonucleotide
auagagggucaggcaguga

SEQ ID NO: 906196 - RNA, 19 nt, Artificial Sequence
  Description of Artificial Sequence: Synthetic oligonucleotide
gagcuucgcccaaagccaa

SEQ ID NO: 906197 - RNA, 19 nt, Artificial Sequence
  Description of Artificial Sequence: Synthetic oligonucleotide
ucguaggggaaagccccau

SEQ ID NO: 906198 - RNA, 19 nt, Artificial Sequence
  Description of Artificial Sequence: Synthetic oligonucleotide
gcaacucuaguuuccuccu

SEQ ID NO: 906199 - RNA, 19 nt, Artificial Sequence
  Description of Artificial Sequence: Synthetic oligonucleotide
caaggaccagccacucgaa

SEQ ID NO: 906200 - RNA, 19 nt, Artificial Sequence
  Description of Artificial Sequence: Synthetic oligonucleotide
gcacggaucucacuggggu

SEQ ID NO: 906201 - RNA, 19 nt, Artificial Sequence
  Description of Artificial Sequence: Synthetic oligonucleotide
ccgccaugucucuauugag

SEQ ID NO: 906202 - RNA, 19 nt, Artificial Sequence
  Description of Artificial Sequence: Synthetic oligonucleotide
cgaugcacccucgaucucc

SEQ ID NO: 906203 - RNA, 19 nt, Artificial Sequence
  Description of Artificial Sequence: Synthetic oligonucleotide
cgaauuaagugaauucgcu

SEQ ID NO: 906204 - RNA, 19 nt, Artificial Sequence
  Description of Artificial Sequence: Synthetic oligonucleotide
agguuagaauauggcgcaa

SEQ ID NO: 906205 - RNA, 19 nt, Artificial Sequence
  Description of Artificial Sequence: Synthetic oligonucleotide
gggcacaucuuuucgaauu

SEQ ID NO: 906206 - RNA, 19 nt, Artificial Sequence
  Description of Artificial Sequence: Synthetic oligonucleotide
ggaggugacggcaacucua

SEQ ID NO: 906207 - RNA, 19 nt, Artificial Sequence
  Description of Artificial Sequence: Synthetic oligonucleotide
agcuucgcccaaagccaag

SEQ ID NO: 906208 - RNA, 19 nt, Artificial Sequence
  Description of Artificial Sequence: Synthetic oligonucleotide
ggagagggcugauggguaa

SEQ ID NO: 906209 - RNA, 19 nt, Artificial Sequence
  Description of Artificial Sequence: Synthetic oligonucleotide
accgaguuacagaucucuu

SEQ ID NO: 906210 - RNA, 19 nt, Artificial Sequence
  Description of Artificial Sequence: Synthetic oligonucleotide
gacagauggcaggcauaga

SEQ ID NO: 906211 - RNA, 19 nt, Artificial Sequence
  Description of Artificial Sequence: Synthetic oligonucleotide
cucagucaaccgaguuaca

SEQ ID NO: 906212 - RNA, 19 nt, Artificial Sequence
  Description of Artificial Sequence: Synthetic oligonucleotide
acauggaaguggggcgcca

SEQ ID NO: 906213 - RNA, 19 nt, Artificial Sequence
  Description of Artificial Sequence: Synthetic oligonucleotide
uccagguguuagccccaua

SEQ ID NO: 906214 - RNA, 19 nt, Artificial Sequence
  Description of Artificial Sequence: Synthetic oligonucleotide
uuccccgugcuggugucua

SEQ ID NO: 906215 - RNA, 19 nt, Artificial Sequence
  Description of Artificial Sequence: Synthetic oligonucleotide
gccuaacagugggaggaag

SEQ ID NO: 906216 - RNA, 19 nt, Artificial Sequence
  Description of Artificial Sequence: Synthetic oligonucleotide
cguggugcgaugcacccuc

SEQ ID NO: 906217 - RNA, 19 nt, Artificial Sequence
  Description of Artificial Sequence: Synthetic oligonucleotide
guggugcgaugcacccucg

SEQ ID NO: 906218 - RNA, 19 nt, Artificial Sequence
  Description of Artificial Sequence: Synthetic oligonucleotide
ccaacauggggcgccgggc

SEQ ID NO: 906219 - RNA, 19 nt, Artificial Sequence
  Description of Artificial Sequence: Synthetic oligonucleotide
cccaaggaccagccacucg

SEQ ID NO: 906220 - RNA, 19 nt, Artificial Sequence
  Description of Artificial Sequence: Synthetic oligonucleotide
agccuaacagugggaggaa

SEQ ID NO: 906221 - RNA, 19 nt, Artificial Sequence
  Description of Artificial Sequence: Synthetic oligonucleotide
ggauugagacacagggcaa

SEQ ID NO: 906222 - RNA, 19 nt, Artificial Sequence
  Description of Artificial Sequence: Synthetic oligonucleotide
ggcgcaagacuaauuugaa

SEQ ID NO: 906223 - RNA, 19 nt, Artificial Sequence
  Description of Artificial Sequence: Synthetic oligonucleotide
ccagccgaaggacuccauc

SEQ ID NO: 906224 - RNA, 19 nt, Artificial Sequence
  Description of Artificial Sequence: Synthetic oligonucleotide
acauaggaguccggccuuu

SEQ ID NO: 906225 - RNA, 19 nt, Artificial Sequence
  Description of Artificial Sequence: Synthetic oligonucleotide
ccuaacagugggaggaagu

SEQ ID NO: 906226 - RNA, 19 nt, Artificial Sequence
  Description of Artificial Sequence: Synthetic oligonucleotide
gaggaucauggguggggau

SEQ ID NO: 906227 - RNA, 19 nt, Artificial Sequence
  Description of Artificial Sequence: Synthetic oligonucleotide
ggucccggacauaggaguc

SEQ ID NO: 906228 - RNA, 19 nt, Artificial Sequence
  Description of Artificial Sequence: Synthetic oligonucleotide
caguuggucguaggggaaa

SEQ ID NO: 906229 - RNA, 19 nt, Artificial Sequence
  Description of Artificial Sequence: Synthetic oligonucleotide
acguggugcgaugcacccu

SEQ ID NO: 906230 - RNA, 19 nt, Artificial Sequence
  Description of Artificial Sequence: Synthetic oligonucleotide
ucucagcucuggggcuaug

SEQ ID NO: 906231 - RNA, 19 nt, Artificial Sequence
  Description of Artificial Sequence: Synthetic oligonucleotide
ggucggcauagacguggug

SEQ ID NO: 906232 - RNA, 19 nt, Artificial Sequence
  Description of Artificial Sequence: Synthetic oligonucleotide
gccguuuccccacugggau

SEQ ID NO: 906233 - RNA, 19 nt, Artificial Sequence
  Description of Artificial Sequence: Synthetic oligonucleotide
cauggaaguggggcgccaa

SEQ ID NO: 906234 - RNA, 19 nt, Artificial Sequence
  Description of Artificial Sequence: Synthetic oligonucleotide
ccagguguuagccccauau

SEQ ID NO: 906235 - RNA, 19 nt, Artificial Sequence
  Description of Artificial Sequence: Synthetic oligonucleotide
caccaggaguuaauacuau

SEQ ID NO: 906236 - RNA, 19 nt, Artificial Sequence
  Description of Artificial Sequence: Synthetic oligonucleotide
acaugacucuaggguggaa

SEQ ID NO: 906237 - RNA, 19 nt, Artificial Sequence
  Description of Artificial Sequence: Synthetic oligonucleotide
cccauauaucauggugaug

SEQ ID NO: 906238 - RNA, 19 nt, Artificial Sequence
  Description of Artificial Sequence: Synthetic oligonucleotide
ugugccccaggaggaucau

SEQ ID NO: 906239 - RNA, 19 nt, Artificial Sequence
  Description of Artificial Sequence: Synthetic oligonucleotide
uccccgugcuggugucuau

SEQ ID NO: 906240 - RNA, 19 nt, Artificial Sequence
  Description of Artificial Sequence: Synthetic oligonucleotide
ggugcgaugcacccucgau

SEQ ID NO: 906241 - RNA, 19 nt, Artificial Sequence
  Description of Artificial Sequence: Synthetic oligonucleotide
ccuaguacccagagccuua

SEQ ID NO: 906242 - RNA, 19 nt, Artificial Sequence
  Description of Artificial Sequence: Synthetic oligonucleotide
cguaggggaaagccccaug

SEQ ID NO: 906243 - RNA, 19 nt, Artificial Sequence
  Description of Artificial Sequence: Synthetic oligonucleotide
ggaaagccccaugggucca

SEQ ID NO: 906244 - RNA, 19 nt, Artificial Sequence
  Description of Artificial Sequence: Synthetic oligonucleotide
ggggcgccaaguggggagc

SEQ ID NO: 906245 - RNA, 19 nt, Artificial Sequence
  Description of Artificial Sequence: Synthetic oligonucleotide
ggcauagacguggugcgau

SEQ ID NO: 906246 - RNA, 19 nt, Artificial Sequence
  Description of Artificial Sequence: Synthetic oligonucleotide
ccccgccaugucucuauug

SEQ ID NO: 906247 - RNA, 19 nt, Artificial Sequence
  Description of Artificial Sequence: Synthetic oligonucleotide
gggaggugacggcaacucu

SEQ ID NO: 906248 - RNA, 19 nt, Artificial Sequence
  Description of Artificial Sequence: Synthetic oligonucleotide
ggugucuauccagguguua

SEQ ID NO: 906249 - RNA, 19 nt, Artificial Sequence
  Description of Artificial Sequence: Synthetic oligonucleotide
cgaagaacagccagaggau

SEQ ID NO: 906250 - RNA, 19 nt, Artificial Sequence
  Description of Artificial Sequence: Synthetic oligonucleotide
gcuggucggcauagacgug

SEQ ID NO: 906251 - RNA, 19 nt, Artificial Sequence
  Description of Artificial Sequence: Synthetic oligonucleotide
cuggcacguguuaguuggu

SEQ ID NO: 906252 - RNA, 19 nt, Artificial Sequence
  Description of Artificial Sequence: Synthetic oligonucleotide
ccgacucugccuggcuggc

SEQ ID NO: 906253 - RNA, 19 nt, Artificial Sequence
  Description of Artificial Sequence: Synthetic oligonucleotide
cguguuaguuggugagaaa

SEQ ID NO: 906254 - RNA, 19 nt, Artificial Sequence
  Description of Artificial Sequence: Synthetic oligonucleotide
gcgaugcacccucgaucuc

SEQ ID NO: 906255 - RNA, 19 nt, Artificial Sequence
  Description of Artificial Sequence: Synthetic oligonucleotide
cggcaacucuaguuuccuc

SEQ ID NO: 906256 - RNA, 19 nt, Artificial Sequence
  Description of Artificial Sequence: Synthetic oligonucleotide
cacugggauucugugcauu

SEQ ID NO: 906257 - RNA, 19 nt, Artificial Sequence
  Description of Artificial Sequence: Synthetic oligonucleotide
ggagugugcggcgggcacu

SEQ ID NO: 906258 - RNA, 19 nt, Artificial Sequence
  Description of Artificial Sequence: Synthetic oligonucleotide
gccuaguacccagagccuu

SEQ ID NO: 906259 - RNA, 19 nt, Artificial Sequence
  Description of Artificial Sequence: Synthetic oligonucleotide
gcccagccgaaggacucca

SEQ ID NO: 906260 - RNA, 19 nt, Artificial Sequence
  Description of Artificial Sequence: Synthetic oligonucleotide
cucuaccaggagccauauu

SEQ ID NO: 906261 - RNA, 19 nt, Artificial Sequence
  Description of Artificial Sequence: Synthetic oligonucleotide
cagaggggugcgguccuuu

SEQ ID NO: 906262 - RNA, 19 nt, Artificial Sequence
  Description of Artificial Sequence: Synthetic oligonucleotide
cggcauagacguggugcga

SEQ ID NO: 906263 - RNA, 19 nt, Artificial Sequence
  Description of Artificial Sequence: Synthetic oligonucleotide
cccaugcucuccccgccau

SEQ ID NO: 906264 - RNA, 19 nt, Artificial Sequence
  Description of Artificial Sequence: Synthetic oligonucleotide
ccguuuccccacugggauu

SEQ ID NO: 906265 - RNA, 19 nt, Artificial Sequence
  Description of Artificial Sequence: Synthetic oligonucleotide
cccagccgaaggacuccau

SEQ ID NO: 906266 - RNA, 19 nt, Artificial Sequence
  Description of Artificial Sequence: Synthetic oligonucleotide
auaugcaucaaauagaugu

SEQ ID NO: 906267 - RNA, 19 nt, Artificial Sequence
  Description of Artificial Sequence: Synthetic oligonucleotide
uucagcauauauuauaugc

SEQ ID NO: 906268 - RNA, 19 nt, Artificial Sequence
  Description of Artificial Sequence: Synthetic oligonucleotide
aaagauuauugauacacca

SEQ ID NO: 906269 - RNA, 19 nt, Artificial Sequence
  Description of Artificial Sequence: Synthetic oligonucleotide
ugauacaccacauauauuc

SEQ ID NO: 906270 - RNA, 19 nt, Artificial Sequence
  Description of Artificial Sequence: Synthetic oligonucleotide
ggaaguuugacuuauggcg

SEQ ID NO: 906271 - RNA, 19 nt, Artificial Sequence
  Description of Artificial Sequence: Synthetic oligonucleotide
auaaccaaaccacuaaggg

SEQ ID NO: 906272 - RNA, 19 nt, Artificial Sequence
  Description of Artificial Sequence: Synthetic oligonucleotide
aaacagaccacuccuguuc

SEQ ID NO: 906273 - RNA, 19 nt, Artificial Sequence
  Description of Artificial Sequence: Synthetic oligonucleotide
uguaaaaggaaguuugacu

SEQ ID NO: 906274 - RNA, 19 nt, Artificial Sequence
  Description of Artificial Sequence: Synthetic oligonucleotide
auugauacaccacauauau

SEQ ID NO: 906275 - RNA, 19 nt, Artificial Sequence
  Description of Artificial Sequence: Synthetic oligonucleotide
guagauucuaaauaacacc

SEQ ID NO: 906276 - RNA, 19 nt, Artificial Sequence
  Description of Artificial Sequence: Synthetic oligonucleotide
ugaacaaacagaccacucc

SEQ ID NO: 906277 - RNA, 19 nt, Artificial Sequence
  Description of Artificial Sequence: Synthetic oligonucleotide
aaauaacaccccuucugac

SEQ ID NO: 906278 - RNA, 19 nt, Artificial Sequence
  Description of Artificial Sequence: Synthetic oligonucleotide
auaauucaggaucugagca

SEQ ID NO: 906279 - RNA, 19 nt, Artificial Sequence
  Description of Artificial Sequence: Synthetic oligonucleotide
agacuuagugcacagggac

SEQ ID NO: 906280 - RNA, 19 nt, Artificial Sequence
  Description of Artificial Sequence: Synthetic oligonucleotide
uucagaagcugauaaguag

SEQ ID NO: 906281 - RNA, 19 nt, Artificial Sequence
  Description of Artificial Sequence: Synthetic oligonucleotide
aagauuauugauacaccac

SEQ ID NO: 906282 - RNA, 19 nt, Artificial Sequence
  Description of Artificial Sequence: Synthetic oligonucleotide
uuuccgaugggucucaaac

SEQ ID NO: 906283 - RNA, 19 nt, Artificial Sequence
  Description of Artificial Sequence: Synthetic oligonucleotide
guuaugguaccuguaaucg

SEQ ID NO: 906284 - RNA, 19 nt, Artificial Sequence
  Description of Artificial Sequence: Synthetic oligonucleotide
cauaaccaaaccacuaagg

SEQ ID NO: 906285 - RNA, 19 nt, Artificial Sequence
  Description of Artificial Sequence: Synthetic oligonucleotide
uaugcaucaaauagaugug

SEQ ID NO: 906286 - RNA, 19 nt, Artificial Sequence
  Description of Artificial Sequence: Synthetic oligonucleotide
uucuaaauaacaccccuuc

SEQ ID NO: 906287 - RNA, 19 nt, Artificial Sequence
  Description of Artificial Sequence: Synthetic oligonucleotide
cauaauucaggaucugagc

SEQ ID NO: 906288 - RNA, 19 nt, Artificial Sequence
  Description of Artificial Sequence: Synthetic oligonucleotide
uagcuuaccugaaagcucc

SEQ ID NO: 906289 - RNA, 19 nt, Artificial Sequence
  Description of Artificial Sequence: Synthetic oligonucleotide
uaaauuaccuguugccuug

SEQ ID NO: 906290 - RNA, 19 nt, Artificial Sequence
  Description of Artificial Sequence: Synthetic oligonucleotide
auuacacaaauacggcuuc

SEQ ID NO: 906291 - RNA, 19 nt, Artificial Sequence
  Description of Artificial Sequence: Synthetic oligonucleotide
acuaccuucaugcauaauu

SEQ ID NO: 906292 - RNA, 19 nt, Artificial Sequence
  Description of Artificial Sequence: Synthetic oligonucleotide
ugauaaguagauucuaaau

SEQ ID NO: 906293 - RNA, 19 nt, Artificial Sequence
  Description of Artificial Sequence: Synthetic oligonucleotide
agugauucuccuucggguc

SEQ ID NO: 906294 - RNA, 19 nt, Artificial Sequence
  Description of Artificial Sequence: Synthetic oligonucleotide
aguggugcgaauuucugug

SEQ ID NO: 906295 - RNA, 19 nt, Artificial Sequence
  Description of Artificial Sequence: Synthetic oligonucleotide
ugggucucaaaccaagggc

SEQ ID NO: 906296 - RNA, 19 nt, Artificial Sequence
  Description of Artificial Sequence: Synthetic oligonucleotide
uuaugcacugugaaugcug

SEQ ID NO: 906297 - RNA, 19 nt, Artificial Sequence
  Description of Artificial Sequence: Synthetic oligonucleotide
acauaaccaaaccacuaag

SEQ ID NO: 906298 - RNA, 19 nt, Artificial Sequence
  Description of Artificial Sequence: Synthetic oligonucleotide
ugauguauggcgaguguug

SEQ ID NO: 906299 - RNA, 19 nt, Artificial Sequence
  Description of Artificial Sequence: Synthetic oligonucleotide
uggugcucgauaaaggaga

SEQ ID NO: 906300 - RNA, 19 nt, Artificial Sequence
  Description of Artificial Sequence: Synthetic oligonucleotide
aacuaugguuagucugucg

SEQ ID NO: 906301 - RNA, 19 nt, Artificial Sequence
  Description of Artificial Sequence: Synthetic oligonucleotide
agcgagagcagacuuagug

SEQ ID NO: 906302 - RNA, 19 nt, Artificial Sequence
  Description of Artificial Sequence: Synthetic oligonucleotide
uguuaugguaccuguaauc

SEQ ID NO: 906303 - RNA, 19 nt, Artificial Sequence
  Description of Artificial Sequence: Synthetic oligonucleotide
uccgaugggucucaaacca

SEQ ID NO: 906304 - RNA, 19 nt, Artificial Sequence
  Description of Artificial Sequence: Synthetic oligonucleotide
cauuauguaaauuaccugu

SEQ ID NO: 906305 - RNA, 19 nt, Artificial Sequence
  Description of Artificial Sequence: Synthetic oligonucleotide
gaugaccugaugcgcagcg

SEQ ID NO: 906306 - RNA, 19 nt, Artificial Sequence
  Description of Artificial Sequence: Synthetic oligonucleotide
ucuuaugcacugugaaugc

SEQ ID NO: 906307 - RNA, 19 nt, Artificial Sequence
  Description of Artificial Sequence: Synthetic oligonucleotide
aaucgcuguuuucuuagcu

SEQ ID NO: 906308 - RNA, 19 nt, Artificial Sequence
  Description of Artificial Sequence: Synthetic oligonucleotide
uuugacuuauggcgaaaug

SEQ ID NO: 906309 - RNA, 19 nt, Artificial Sequence
  Description of Artificial Sequence: Synthetic oligonucleotide
agcaaagcaaaucuuuuaa

SEQ ID NO: 906310 - RNA, 19 nt, Artificial Sequence
  Description of Artificial Sequence: Synthetic oligonucleotide
uuuacuagcucgccguggu

SEQ ID NO: 906311 - RNA, 19 nt, Artificial Sequence
  Description of Artificial Sequence: Synthetic oligonucleotide
acaacuguguuuaccuugc

SEQ ID NO: 906312 - RNA, 19 nt, Artificial Sequence
  Description of Artificial Sequence: Synthetic oligonucleotide
cuaccuucaugcauaauuc

SEQ ID NO: 906313 - RNA, 19 nt, Artificial Sequence
  Description of Artificial Sequence: Synthetic oligonucleotide
uggaauuuccgaugggucu

SEQ ID NO: 906314 - RNA, 19 nt, Artificial Sequence
  Description of Artificial Sequence: Synthetic oligonucleotide
uaccugaaagcuccagggg

SEQ ID NO: 906315 - RNA, 19 nt, Artificial Sequence
  Description of Artificial Sequence: Synthetic oligonucleotide
accacauauauucauguuu

SEQ ID NO: 906316 - RNA, 19 nt, Artificial Sequence
  Description of Artificial Sequence: Synthetic oligonucleotide
ugaccugaugcgcagcgag

SEQ ID NO: 906317 - RNA, 19 nt, Artificial Sequence
  Description of Artificial Sequence: Synthetic oligonucleotide
aaauuaccuguugccuugc

SEQ ID NO: 906318 - RNA, 19 nt, Artificial Sequence
  Description of Artificial Sequence: Synthetic oligonucleotide
ugacuuauggcgaaauguu

SEQ ID NO: 906319 - RNA, 19 nt, Artificial Sequence
  Description of Artificial Sequence: Synthetic oligonucleotide
accacuccuguucacauug

SEQ ID NO: 906320 - RNA, 19 nt, Artificial Sequence
  Description of Artificial Sequence: Synthetic oligonucleotide
acaaauagauaaaauucca

SEQ ID NO: 906321 - RNA, 19 nt, Artificial Sequence
  Description of Artificial Sequence: Synthetic oligonucleotide
ucccauaugguucuccuau

SEQ ID NO: 906322 - RNA, 19 nt, Artificial Sequence
  Description of Artificial Sequence: Synthetic oligonucleotide
ugccaaucagacuugugga

SEQ ID NO: 906323 - RNA, 19 nt, Artificial Sequence
  Description of Artificial Sequence: Synthetic oligonucleotide
uagugauucuccuucgggu

SEQ ID NO: 906324 - RNA, 19 nt, Artificial Sequence
  Description of Artificial Sequence: Synthetic oligonucleotide
uacacgcuaccccucauga

SEQ ID NO: 906325 - RNA, 19 nt, Artificial Sequence
  Description of Artificial Sequence: Synthetic oligonucleotide
aaguggugcgaauuucugu

SEQ ID NO: 906326 - RNA, 19 nt, Artificial Sequence
  Description of Artificial Sequence: Synthetic oligonucleotide
auaacaccccuucugacau

SEQ ID NO: 906327 - RNA, 19 nt, Artificial Sequence
  Description of Artificial Sequence: Synthetic oligonucleotide
aaugcugacuuguggcgga

SEQ ID NO: 906328 - RNA, 19 nt, Artificial Sequence
  Description of Artificial Sequence: Synthetic oligonucleotide
aaccacuaaggggacagag

SEQ ID NO: 906329 - RNA, 19 nt, Artificial Sequence
  Description of Artificial Sequence: Synthetic oligonucleotide
gauucuaaauaacaccccu

SEQ ID NO: 906330 - RNA, 19 nt, Artificial Sequence
  Description of Artificial Sequence: Synthetic oligonucleotide
ugcucgauaaaggagacuu

SEQ ID NO: 906331 - RNA, 19 nt, Artificial Sequence
  Description of Artificial Sequence: Synthetic oligonucleotide
ugacauaaccaaaccacua

SEQ ID NO: 906332 - RNA, 19 nt, Artificial Sequence
  Description of Artificial Sequence: Synthetic oligonucleotide
aggauauaaaauagaaacu

SEQ ID NO: 906333 - RNA, 19 nt, Artificial Sequence
  Description of Artificial Sequence: Synthetic oligonucleotide
aauuuacuucuugugagua

SEQ ID NO: 906334 - RNA, 19 nt, Artificial Sequence
  Description of Artificial Sequence: Synthetic oligonucleotide
caaaugcucacucacguga

SEQ ID NO: 906335 - RNA, 19 nt, Artificial Sequence
  Description of Artificial Sequence: Synthetic oligonucleotide
cuuauggcgaaauguuuuc

SEQ ID NO: 906336 - RNA, 19 nt, Artificial Sequence
  Description of Artificial Sequence: Synthetic oligonucleotide
ugcgaauuucuguggacug

SEQ ID NO: 906337 - RNA, 19 nt, Artificial Sequence
  Description of Artificial Sequence: Synthetic oligonucleotide
cuaugguuagucugucgcc

SEQ ID NO: 906338 - RNA, 19 nt, Artificial Sequence
  Description of Artificial Sequence: Synthetic oligonucleotide
gaaguuugacuuauggcga

SEQ ID NO: 906339 - RNA, 19 nt, Artificial Sequence
  Description of Artificial Sequence: Synthetic oligonucleotide
uaauucaggaucugagcau

SEQ ID NO: 906340 - RNA, 19 nt, Artificial Sequence
  Description of Artificial Sequence: Synthetic oligonucleotide
uugucuuaagguggaacag

SEQ ID NO: 906341 - RNA, 19 nt, Artificial Sequence
  Description of Artificial Sequence: Synthetic oligonucleotide
aggggaacuaugguuaguc

SEQ ID NO: 906342 - RNA, 19 nt, Artificial Sequence
  Description of Artificial Sequence: Synthetic oligonucleotide
uuucuguucuuguuauggu

SEQ ID NO: 906343 - RNA, 19 nt, Artificial Sequence
  Description of Artificial Sequence: Synthetic oligonucleotide
gacuuagugcacagggacg

SEQ ID NO: 906344 - RNA, 19 nt, Artificial Sequence
  Description of Artificial Sequence: Synthetic oligonucleotide
uaugguuagucugucgccu

SEQ ID NO: 906345 - RNA, 19 nt, Artificial Sequence
  Description of Artificial Sequence: Synthetic oligonucleotide
uuccgaugggucucaaacc

SEQ ID NO: 906346 - RNA, 19 nt, Artificial Sequence
  Description of Artificial Sequence: Synthetic oligonucleotide
uuacauucguuugucuucu

SEQ ID NO: 906347 - RNA, 19 nt, Artificial Sequence
  Description of Artificial Sequence: Synthetic oligonucleotide
ugucacuaccuucaugcau

SEQ ID NO: 906348 - RNA, 19 nt, Artificial Sequence
  Description of Artificial Sequence: Synthetic oligonucleotide
auggcgaaauguuuucuga

SEQ ID NO: 906349 - RNA, 19 nt, Artificial Sequence
  Description of Artificial Sequence: Synthetic oligonucleotide
ucguagugauucuccuucg

SEQ ID NO: 906350 - RNA, 19 nt, Artificial Sequence
  Description of Artificial Sequence: Synthetic oligonucleotide
aaaugcucacucacgugag

SEQ ID NO: 906351 - RNA, 19 nt, Artificial Sequence
  Description of Artificial Sequence: Synthetic oligonucleotide
aauucaggaucugagcauu

SEQ ID NO: 906352 - RNA, 19 nt, Artificial Sequence
  Description of Artificial Sequence: Synthetic oligonucleotide
aaguuugacuuauggcgaa

SEQ ID NO: 906353 - RNA, 19 nt, Artificial Sequence
  Description of Artificial Sequence: Synthetic oligonucleotide
uuguuaugguaccuguaau

SEQ ID NO: 906354 - RNA, 19 nt, Artificial Sequence
  Description of Artificial Sequence: Synthetic oligonucleotide
aaagcagagacagcguuuu

SEQ ID NO: 906355 - RNA, 19 nt, Artificial Sequence
  Description of Artificial Sequence: Synthetic oligonucleotide
ucacucacgugagaguugc

SEQ ID NO: 906356 - RNA, 19 nt, Artificial Sequence
  Description of Artificial Sequence: Synthetic oligonucleotide
aaaguggugcgaauuucug

SEQ ID NO: 906357 - RNA, 19 nt, Artificial Sequence
  Description of Artificial Sequence: Synthetic oligonucleotide
cuggugcucgauaaaggag

SEQ ID NO: 906358 - RNA, 19 nt, Artificial Sequence
  Description of Artificial Sequence: Synthetic oligonucleotide
uuacacgcuaccccucaug

SEQ ID NO: 906359 - RNA, 19 nt, Artificial Sequence
  Description of Artificial Sequence: Synthetic oligonucleotide
gagguauuuaaaauacuaa

SEQ ID NO: 906360 - RNA, 19 nt, Artificial Sequence
  Description of Artificial Sequence: Synthetic oligonucleotide
caaauccucuucacuauuc

SEQ ID NO: 906361 - RNA, 19 nt, Artificial Sequence
  Description of Artificial Sequence: Synthetic oligonucleotide
cuuguuaugguaccuguaa

SEQ ID NO: 906362 - RNA, 19 nt, Artificial Sequence
  Description of Artificial Sequence: Synthetic oligonucleotide
cacuauucaaaucugcuua

SEQ ID NO: 906363 - RNA, 19 nt, Artificial Sequence
  Description of Artificial Sequence: Synthetic oligonucleotide
cauaugguucuccuaugug

SEQ ID NO: 906364 - RNA, 19 nt, Artificial Sequence
  Description of Artificial Sequence: Synthetic oligonucleotide
cucgauaaaggagacuuuc

SEQ ID NO: 906365 - RNA, 19 nt, Artificial Sequence
  Description of Artificial Sequence: Synthetic oligonucleotide
auuuacuagcucgccgugg

SEQ ID NO: 906366 - RNA, 19 nt, Artificial Sequence
  Description of Artificial Sequence: Synthetic oligonucleotide
ucucuuaugcacugugaau

SEQ ID NO: 906367 - RNA, 19 nt, Artificial Sequence
  Description of Artificial Sequence: Synthetic oligonucleotide
ugacuuguggcggaaagau

SEQ ID NO: 906368 - RNA, 19 nt, Artificial Sequence
  Description of Artificial Sequence: Synthetic oligonucleotide
aagauugaacucagguugu

SEQ ID NO: 906369 - RNA, 19 nt, Artificial Sequence
  Description of Artificial Sequence: Synthetic oligonucleotide
aaugcucacucacgugaga

SEQ ID NO: 906370 - RNA, 19 nt, Artificial Sequence
  Description of Artificial Sequence: Synthetic oligonucleotide
gggaacuaugguuagucug

SEQ ID NO: 906371 - RNA, 19 nt, Artificial Sequence
  Description of Artificial Sequence: Synthetic oligonucleotide
uggcgaaauguuuucugac

SEQ ID NO: 906372 - RNA, 19 nt, Artificial Sequence
  Description of Artificial Sequence: Synthetic oligonucleotide
uuagugcacagggacgugc

SEQ ID NO: 906373 - RNA, 19 nt, Artificial Sequence
  Description of Artificial Sequence: Synthetic oligonucleotide
ggacgugccgcacuggugg

SEQ ID NO: 906374 - RNA, 19 nt, Artificial Sequence
  Description of Artificial Sequence: Synthetic oligonucleotide
aacaccccuucugacaugu

SEQ ID NO: 906375 - RNA, 19 nt, Artificial Sequence
  Description of Artificial Sequence: Synthetic oligonucleotide
ggugcgucgacccauuuac

SEQ ID NO: 906376 - RNA, 19 nt, Artificial Sequence
  Description of Artificial Sequence: Synthetic oligonucleotide
cucgccgugguucucuccg

SEQ ID NO: 906377 - RNA, 19 nt, Artificial Sequence
  Description of Artificial Sequence: Synthetic oligonucleotide
ucucccauaugguucuccu

SEQ ID NO: 906378 - RNA, 19 nt, Artificial Sequence
  Description of Artificial Sequence: Synthetic oligonucleotide
uggugcgaauuucugugga

SEQ ID NO: 906379 - RNA, 19 nt, Artificial Sequence
  Description of Artificial Sequence: Synthetic oligonucleotide
cucgugacacucguaaggc

SEQ ID NO: 906380 - RNA, 19 nt, Artificial Sequence
  Description of Artificial Sequence: Synthetic oligonucleotide
ggcacuuacacgcuacccc

SEQ ID NO: 906381 - RNA, 19 nt, Artificial Sequence
  Description of Artificial Sequence: Synthetic oligonucleotide
accuguaaucgcuguuuuc

SEQ ID NO: 906382 - RNA, 19 nt, Artificial Sequence
  Description of Artificial Sequence: Synthetic oligonucleotide
augguuagucugucgccuc

SEQ ID NO: 906383 - RNA, 19 nt, Artificial Sequence
  Description of Artificial Sequence: Synthetic oligonucleotide
uucuugugaguauucugau

SEQ ID NO: 906384 - RNA, 19 nt, Artificial Sequence
  Description of Artificial Sequence: Synthetic oligonucleotide
ucuuguuaugguaccugua

SEQ ID NO: 906385 - RNA, 19 nt, Artificial Sequence
  Description of Artificial Sequence: Synthetic oligonucleotide
acgugagaguugcugcagg

SEQ ID NO: 906386 - RNA, 19 nt, Artificial Sequence
  Description of Artificial Sequence: Synthetic oligonucleotide
aauuaccuguugccuugcu

SEQ ID NO: 906387 - RNA, 19 nt, Artificial Sequence
  Description of Artificial Sequence: Synthetic oligonucleotide
uuagucugucgccucacuu

SEQ ID NO: 906388 - RNA, 19 nt, Artificial Sequence
  Description of Artificial Sequence: Synthetic oligonucleotide
auguauggcgaguguuguc

SEQ ID NO: 906389 - RNA, 19 nt, Artificial Sequence
  Description of Artificial Sequence: Synthetic oligonucleotide
cugcagauaaagggguugg

SEQ ID NO: 906390 - RNA, 19 nt, Artificial Sequence
  Description of Artificial Sequence: Synthetic oligonucleotide
cauuggaauuuccgauggg

SEQ ID NO: 906391 - RNA, 19 nt, Artificial Sequence
  Description of Artificial Sequence: Synthetic oligonucleotide
gacuuccggcaguaggucc

SEQ ID NO: 906392 - RNA, 19 nt, Artificial Sequence
  Description of Artificial Sequence: Synthetic oligonucleotide
acuuacacgcuaccccuca

SEQ ID NO: 906393 - RNA, 19 nt, Artificial Sequence
  Description of Artificial Sequence: Synthetic oligonucleotide
ugagggccgacugacaaaa

SEQ ID NO: 906394 - RNA, 19 nt, Artificial Sequence
  Description of Artificial Sequence: Synthetic oligonucleotide
uuauggcgaaauguuuucu

SEQ ID NO: 906395 - RNA, 19 nt, Artificial Sequence
  Description of Artificial Sequence: Synthetic oligonucleotide
agggccgacugacaaaaga

SEQ ID NO: 906396 - RNA, 19 nt, Artificial Sequence
  Description of Artificial Sequence: Synthetic oligonucleotide
caugcauaauucaggaucu

SEQ ID NO: 906397 - RNA, 19 nt, Artificial Sequence
  Description of Artificial Sequence: Synthetic oligonucleotide
uucaugcauaauucaggau

SEQ ID NO: 906398 - RNA, 19 nt, Artificial Sequence
  Description of Artificial Sequence: Synthetic oligonucleotide
caaggggaacuaugguuag

SEQ ID NO: 906399 - RNA, 19 nt, Artificial Sequence
  Description of Artificial Sequence: Synthetic oligonucleotide
gacccauuuacuagcucgc

SEQ ID NO: 906400 - RNA, 19 nt, Artificial Sequence
  Description of Artificial Sequence: Synthetic oligonucleotide
ugguuagucugucgccuca

SEQ ID NO: 906401 - RNA, 19 nt, Artificial Sequence
  Description of Artificial Sequence: Synthetic oligonucleotide
ugcgucgacccauuuacua

SEQ ID NO: 906402 - RNA, 19 nt, Artificial Sequence
  Description of Artificial Sequence: Synthetic oligonucleotide
accaagaacccaacaucac

SEQ ID NO: 906403 - RNA, 19 nt, Artificial Sequence
  Description of Artificial Sequence: Synthetic oligonucleotide
acuuauggcgaaauguuuu

SEQ ID NO: 906404 - RNA, 19 nt, Artificial Sequence
  Description of Artificial Sequence: Synthetic oligonucleotide
ucgugacacucguaaggcc

SEQ ID NO: 906405 - RNA, 19 nt, Artificial Sequence
  Description of Artificial Sequence: Synthetic oligonucleotide
aacacuccccaaauccucu

SEQ ID NO: 906406 - RNA, 19 nt, Artificial Sequence
  Description of Artificial Sequence: Synthetic oligonucleotide
gagcagacuuagugcacag

SEQ ID NO: 906407 - RNA, 19 nt, Artificial Sequence
  Description of Artificial Sequence: Synthetic oligonucleotide
cuuagcuuaccugaaagcu

SEQ ID NO: 906408 - RNA, 19 nt, Artificial Sequence
  Description of Artificial Sequence: Synthetic oligonucleotide
ggcgaguguugucuuaagg

SEQ ID NO: 906409 - RNA, 19 nt, Artificial Sequence
  Description of Artificial Sequence: Synthetic oligonucleotide
ggaucugagcauuauguaa

SEQ ID NO: 906410 - RNA, 19 nt, Artificial Sequence
  Description of Artificial Sequence: Synthetic oligonucleotide
cacgcuaccccucaugaga

SEQ ID NO: 906411 - RNA, 19 nt, Artificial Sequence
  Description of Artificial Sequence: Synthetic oligonucleotide
cgacccauuuacuagcucg

SEQ ID NO: 906412 - RNA, 19 nt, Artificial Sequence
  Description of Artificial Sequence: Synthetic oligonucleotide
aauuggcagugggugcguc

SEQ ID NO: 906413 - RNA, 19 nt, Artificial Sequence
  Description of Artificial Sequence: Synthetic oligonucleotide
acagaccacuccuguucac

SEQ ID NO: 906414 - RNA, 19 nt, Artificial Sequence
  Description of Artificial Sequence: Synthetic oligonucleotide
uugauacaccacauauauu

SEQ ID NO: 906415 - RNA, 19 nt, Artificial Sequence
  Description of Artificial Sequence: Synthetic oligonucleotide
accugaugcgcagcgagag

SEQ ID NO: 906416 - RNA, 19 nt, Artificial Sequence
  Description of Artificial Sequence: Synthetic oligonucleotide
agagcagacuuagugcaca

SEQ ID NO: 906417 - RNA, 19 nt, Artificial Sequence
  Description of Artificial Sequence: Synthetic oligonucleotide
acuagcucgccgugguucu

SEQ ID NO: 906418 - RNA, 19 nt, Artificial Sequence
  Description of Artificial Sequence: Synthetic oligonucleotide
gcgagagcagacuuagugc

SEQ ID NO: 906419 - RNA, 19 nt, Artificial Sequence
  Description of Artificial Sequence: Synthetic oligonucleotide
uacuagcucgccgugguuc

SEQ ID NO: 906420 - RNA, 19 nt, Artificial Sequence
  Description of Artificial Sequence: Synthetic oligonucleotide
cucuccuaucauguggggc

SEQ ID NO: 906421 - RNA, 19 nt, Artificial Sequence
  Description of Artificial Sequence: Synthetic oligonucleotide
acagggacgugccgcacug

SEQ ID NO: 906422 - RNA, 19 nt, Artificial Sequence
  Description of Artificial Sequence: Synthetic oligonucleotide
cauuuacuagcucgccgug

SEQ ID NO: 906423 - RNA, 19 nt, Artificial Sequence
  Description of Artificial Sequence: Synthetic oligonucleotide
acuugcaagaaaagcaguu

SEQ ID NO: 906424 - RNA, 19 nt, Artificial Sequence
  Description of Artificial Sequence: Synthetic oligonucleotide
cauuacacaaauacggcuu

SEQ ID NO: 906425 - RNA, 19 nt, Artificial Sequence
  Description of Artificial Sequence: Synthetic oligonucleotide
cuuguggcggaaagauuuc

SEQ ID NO: 906426 - RNA, 19 nt, Artificial Sequence
  Description of Artificial Sequence: Synthetic oligonucleotide
ucuuaagguggaacagcuu

SEQ ID NO: 906427 - RNA, 19 nt, Artificial Sequence
  Description of Artificial Sequence: Synthetic oligonucleotide
cugugaaugcugacuugug

SEQ ID NO: 906428 - RNA, 19 nt, Artificial Sequence
  Description of Artificial Sequence: Synthetic oligonucleotide
caaagauugaacucagguu

SEQ ID NO: 906429 - RNA, 19 nt, Artificial Sequence
  Description of Artificial Sequence: Synthetic oligonucleotide
ggcgaaauguuuucugaca

SEQ ID NO: 906430 - RNA, 19 nt, Artificial Sequence
  Description of Artificial Sequence: Synthetic oligonucleotide
gucacuaccuucaugcaua

SEQ ID NO: 906431 - RNA, 19 nt, Artificial Sequence
  Description of Artificial Sequence: Synthetic oligonucleotide
acacgcuaccccucaugag

SEQ ID NO: 906432 - RNA, 19 nt, Artificial Sequence
  Description of Artificial Sequence: Synthetic oligonucleotide
gauuauugauacaccacau

SEQ ID NO: 906433 - RNA, 19 nt, Artificial Sequence
  Description of Artificial Sequence: Synthetic oligonucleotide
agcagacuuagugcacagg

SEQ ID NO: 906434 - RNA, 19 nt, Artificial Sequence
  Description of Artificial Sequence: Synthetic oligonucleotide
acgguagcuucugccacac

SEQ ID NO: 906435 - RNA, 19 nt, Artificial Sequence
  Description of Artificial Sequence: Synthetic oligonucleotide
aggggacagagguauuuaa

SEQ ID NO: 906436 - RNA, 19 nt, Artificial Sequence
  Description of Artificial Sequence: Synthetic oligonucleotide
ugcauuccaaggacgucuu

SEQ ID NO: 906437 - RNA, 19 nt, Artificial Sequence
  Description of Artificial Sequence: Synthetic oligonucleotide
cugacauaaccaaaccacu

SEQ ID NO: 906438 - RNA, 19 nt, Artificial Sequence
  Description of Artificial Sequence: Synthetic oligonucleotide
cucacucacgugagaguug

SEQ ID NO: 906439 - RNA, 19 nt, Artificial Sequence
  Description of Artificial Sequence: Synthetic oligonucleotide
auucuaaauaacaccccuu

SEQ ID NO: 906440 - RNA, 19 nt, Artificial Sequence
  Description of Artificial Sequence: Synthetic oligonucleotide
ucacaacuguguuuaccuu

SEQ ID NO: 906441 - RNA, 19 nt, Artificial Sequence
  Description of Artificial Sequence: Synthetic oligonucleotide
ugcgcugucagggcugaca

SEQ ID NO: 906442 - RNA, 19 nt, Artificial Sequence
  Description of Artificial Sequence: Synthetic oligonucleotide
ucacuaccuucaugcauaa

SEQ ID NO: 906443 - RNA, 19 nt, Artificial Sequence
  Description of Artificial Sequence: Synthetic oligonucleotide
gcgucgacccauuuacuag

SEQ ID NO: 906444 - RNA, 19 nt, Artificial Sequence
  Description of Artificial Sequence: Synthetic oligonucleotide
ccguggaugaccugaugcg

SEQ ID NO: 906445 - RNA, 19 nt, Artificial Sequence
  Description of Artificial Sequence: Synthetic oligonucleotide
uccggcaguagguccuccc

SEQ ID NO: 906446 - RNA, 19 nt, Artificial Sequence
  Description of Artificial Sequence: Synthetic oligonucleotide
uggugcgcugucagggcug

SEQ ID NO: 906447 - RNA, 19 nt, Artificial Sequence
  Description of Artificial Sequence: Synthetic oligonucleotide
ucacaaccaaaggcagcag

SEQ ID NO: 906448 - RNA, 19 nt, Artificial Sequence
  Description of Artificial Sequence: Synthetic oligonucleotide
ugucaggccuccgucagua

SEQ ID NO: 906449 - RNA, 19 nt, Artificial Sequence
  Description of Artificial Sequence: Synthetic oligonucleotide
gaacuaugguuagucuguc

SEQ ID NO: 906450 - RNA, 19 nt, Artificial Sequence
  Description of Artificial Sequence: Synthetic oligonucleotide
uggcgaguguugucuuaag

SEQ ID NO: 906451 - RNA, 19 nt, Artificial Sequence
  Description of Artificial Sequence: Synthetic oligonucleotide
aaggggaacuaugguuagu

SEQ ID NO: 906452 - RNA, 19 nt, Artificial Sequence
  Description of Artificial Sequence: Synthetic oligonucleotide
agggacgugccgcacuggu

SEQ ID NO: 906453 - RNA, 19 nt, Artificial Sequence
  Description of Artificial Sequence: Synthetic oligonucleotide
gggucucaaaccaagggca

SEQ ID NO: 906454 - RNA, 19 nt, Artificial Sequence
  Description of Artificial Sequence: Synthetic oligonucleotide
cugguggcauuuguagggc

SEQ ID NO: 906455 - RNA, 19 nt, Artificial Sequence
  Description of Artificial Sequence: Synthetic oligonucleotide
gucucaaaccaagggcagc

SEQ ID NO: 906456 - RNA, 19 nt, Artificial Sequence
  Description of Artificial Sequence: Synthetic oligonucleotide
ggcccaaagauugaacuca

SEQ ID NO: 906457 - RNA, 19 nt, Artificial Sequence
  Description of Artificial Sequence: Synthetic oligonucleotide
cuaguccuugucaggccuc

SEQ ID NO: 906458 - RNA, 19 nt, Artificial Sequence
  Description of Artificial Sequence: Synthetic oligonucleotide
gcauucacaacuguguuua

SEQ ID NO: 906459 - RNA, 19 nt, Artificial Sequence
  Description of Artificial Sequence: Synthetic oligonucleotide
ccaaggacgucuugccucc

SEQ ID NO: 906460 - RNA, 19 nt, Artificial Sequence
  Description of Artificial Sequence: Synthetic oligonucleotide
ucgacccauuuacuagcuc

SEQ ID NO: 906461 - RNA, 19 nt, Artificial Sequence
  Description of Artificial Sequence: Synthetic oligonucleotide
ucgccgugguucucuccgg

SEQ ID NO: 906462 - RNA, 19 nt, Artificial Sequence
  Description of Artificial Sequence: Synthetic oligonucleotide
acuuccggcaguagguccu

SEQ ID NO: 906463 - RNA, 19 nt, Artificial Sequence
  Description of Artificial Sequence: Synthetic oligonucleotide
ggugcgaauuucuguggac

SEQ ID NO: 906464 - RNA, 19 nt, Artificial Sequence
  Description of Artificial Sequence: Synthetic oligonucleotide
ggaauuuccgaugggucuc

SEQ ID NO: 906465 - RNA, 19 nt, Artificial Sequence
  Description of Artificial Sequence: Synthetic oligonucleotide
cacgugagaguugcugcag

SEQ ID NO: 906466 - RNA, 19 nt, Artificial Sequence
  Description of Artificial Sequence: Synthetic oligonucleotide
gaauuuccgaugggucuca

SEQ ID NO: 906467 - RNA, 19 nt, Artificial Sequence
  Description of Artificial Sequence: Synthetic oligonucleotide
gcgaguguugucuuaaggu

SEQ ID NO: 906468 - RNA, 19 nt, Artificial Sequence
  Description of Artificial Sequence: Synthetic oligonucleotide
ugugugugcgcgugccaau

SEQ ID NO: 906469 - RNA, 19 nt, Artificial Sequence
  Description of Artificial Sequence: Synthetic oligonucleotide
gcuggaauuuacuucuugu

SEQ ID NO: 906470 - RNA, 19 nt, Artificial Sequence
  Description of Artificial Sequence: Synthetic oligonucleotide
uugucaggccuccgucagu

SEQ ID NO: 906471 - RNA, 19 nt, Artificial Sequence
  Description of Artificial Sequence: Synthetic oligonucleotide
ggucucaaaccaagggcag

SEQ ID NO: 906472 - RNA, 19 nt, Artificial Sequence
  Description of Artificial Sequence: Synthetic oligonucleotide
ggaacuaugguuagucugu

SEQ ID NO: 906473 - RNA, 19 nt, Artificial Sequence
  Description of Artificial Sequence: Synthetic oligonucleotide
cuccuaucauguggggccc

SEQ ID NO: 906474 - RNA, 19 nt, Artificial Sequence
  Description of Artificial Sequence: Synthetic oligonucleotide
ccaagaacccaacaucaca

SEQ ID NO: 906475 - RNA, 19 nt, Artificial Sequence
  Description of Artificial Sequence: Synthetic oligonucleotide
gcagugggugcgucgaccc

SEQ ID NO: 906476 - RNA, 19 nt, Artificial Sequence
  Description of Artificial Sequence: Synthetic oligonucleotide
gcgcugucagggcugacag

SEQ ID NO: 906477 - RNA, 19 nt, Artificial Sequence
  Description of Artificial Sequence: Synthetic oligonucleotide
cguuggaauuggcaguggg

SEQ ID NO: 906478 - RNA, 19 nt, Artificial Sequence
  Description of Artificial Sequence: Synthetic oligonucleotide
gccgacgguagcuucugcc

SEQ ID NO: 906479 - RNA, 19 nt, Artificial Sequence
  Description of Artificial Sequence: Synthetic oligonucleotide
cgucgacccauuuacuagc

SEQ ID NO: 906480 - RNA, 19 nt, Artificial Sequence
  Description of Artificial Sequence: Synthetic oligonucleotide
aguuugacuuauggcgaaa

SEQ ID NO: 906481 - RNA, 19 nt, Artificial Sequence
  Description of Artificial Sequence: Synthetic oligonucleotide
agugggugcgucgacccau

SEQ ID NO: 906482 - RNA, 19 nt, Artificial Sequence
  Description of Artificial Sequence: Synthetic oligonucleotide
guuggaauuggcagugggu

SEQ ID NO: 906483 - RNA, 19 nt, Artificial Sequence
  Description of Artificial Sequence: Synthetic oligonucleotide
cuuagugcacagggacgug

SEQ ID NO: 906484 - RNA, 19 nt, Artificial Sequence
  Description of Artificial Sequence: Synthetic oligonucleotide
agagccgacgguagcuucu

SEQ ID NO: 906485 - RNA, 19 nt, Artificial Sequence
  Description of Artificial Sequence: Synthetic oligonucleotide
ugacacucguaaggccucu

SEQ ID NO: 906486 - RNA, 19 nt, Artificial Sequence
  Description of Artificial Sequence: Synthetic oligonucleotide
cacuccuguucacauugga

SEQ ID NO: 906487 - RNA, 19 nt, Artificial Sequence
  Description of Artificial Sequence: Synthetic oligonucleotide
ggggcccaaagauugaacu

SEQ ID NO: 906488 - RNA, 19 nt, Artificial Sequence
  Description of Artificial Sequence: Synthetic oligonucleotide
cugcauuccaaggacgucu

SEQ ID NO: 906489 - RNA, 19 nt, Artificial Sequence
  Description of Artificial Sequence: Synthetic oligonucleotide
cguagugauucuccuucgg

SEQ ID NO: 906490 - RNA, 19 nt, Artificial Sequence
  Description of Artificial Sequence: Synthetic oligonucleotide
aauuuccgaugggucucaa

SEQ ID NO: 906491 - RNA, 19 nt, Artificial Sequence
  Description of Artificial Sequence: Synthetic oligonucleotide
gugcgaauuucuguggacu

SEQ ID NO: 906492 - RNA, 19 nt, Artificial Sequence
  Description of Artificial Sequence: Synthetic oligonucleotide
gacuuauggcgaaauguuu

SEQ ID NO: 906493 - RNA, 19 nt, Artificial Sequence
  Description of Artificial Sequence: Synthetic oligonucleotide
acgucuugccuccguggau

SEQ ID NO: 906494 - RNA, 19 nt, Artificial Sequence
  Description of Artificial Sequence: Synthetic oligonucleotide
ggugcucgauaaaggagac

SEQ ID NO: 906495 - RNA, 19 nt, Artificial Sequence
  Description of Artificial Sequence: Synthetic oligonucleotide
uagcucgccgugguucucu

SEQ ID NO: 906496 - RNA, 19 nt, Artificial Sequence
  Description of Artificial Sequence: Synthetic oligonucleotide
gccguuggaauuggcagug

SEQ ID NO: 906497 - RNA, 19 nt, Artificial Sequence
  Description of Artificial Sequence: Synthetic oligonucleotide
gccaaucagacuuguggaa

SEQ ID NO: 906498 - RNA, 19 nt, Artificial Sequence
  Description of Artificial Sequence: Synthetic oligonucleotide
gccgugguucucuccggcg

SEQ ID NO: 906499 - RNA, 19 nt, Artificial Sequence
  Description of Artificial Sequence: Synthetic oligonucleotide
ccacuaaggggacagaggu

SEQ ID NO: 906500 - RNA, 19 nt, Artificial Sequence
  Description of Artificial Sequence: Synthetic oligonucleotide
gaccugaugcgcagcgaga

SEQ ID NO: 906501 - RNA, 19 nt, Artificial Sequence
  Description of Artificial Sequence: Synthetic oligonucleotide
gcacuuacacgcuaccccu

SEQ ID NO: 906502 - RNA, 19 nt, Artificial Sequence
  Description of Artificial Sequence: Synthetic oligonucleotide
agcagacuuccggcaguag

SEQ ID NO: 906503 - RNA, 19 nt, Artificial Sequence
  Description of Artificial Sequence: Synthetic oligonucleotide
ccauuuacuagcucgccgu

SEQ ID NO: 906504 - RNA, 19 nt, Artificial Sequence
  Description of Artificial Sequence: Synthetic oligonucleotide
acgcuaccccucaugagaa

SEQ ID NO: 906505 - RNA, 19 nt, Artificial Sequence
  Description of Artificial Sequence: Synthetic oligonucleotide
uccuaucauguggggccca

SEQ ID NO: 906506 - RNA, 19 nt, Artificial Sequence
  Description of Artificial Sequence: Synthetic oligonucleotide
gggcacuuacacgcuaccc

SEQ ID NO: 906507 - RNA, 19 nt, Artificial Sequence
  Description of Artificial Sequence: Synthetic oligonucleotide
guuagucugucgccucacu

SEQ ID NO: 906508 - RNA, 19 nt, Artificial Sequence
  Description of Artificial Sequence: Synthetic oligonucleotide
uggcagugggugcgucgac

SEQ ID NO: 906509 - RNA, 19 nt, Artificial Sequence
  Description of Artificial Sequence: Synthetic oligonucleotide
ggcagugggugcgucgacc

SEQ ID NO: 906510 - RNA, 19 nt, Artificial Sequence
  Description of Artificial Sequence: Synthetic oligonucleotide
cuuaugcacugugaaugcu

SEQ ID NO: 906511 - RNA, 19 nt, Artificial Sequence
  Description of Artificial Sequence: Synthetic oligonucleotide
gcuaguccuugucaggccu

SEQ ID NO: 906512 - RNA, 19 nt, Artificial Sequence
  Description of Artificial Sequence: Synthetic oligonucleotide
gcgcgugccaaucagacuu

SEQ ID NO: 906513 - RNA, 19 nt, Artificial Sequence
  Description of Artificial Sequence: Synthetic oligonucleotide
caaggacgucuugccuccg

SEQ ID NO: 906514 - RNA, 19 nt, Artificial Sequence
  Description of Artificial Sequence: Synthetic oligonucleotide
cugagggccgacugacaaa

SEQ ID NO: 906515 - RNA, 19 nt, Artificial Sequence
  Description of Artificial Sequence: Synthetic oligonucleotide
gguuagucugucgccucac

SEQ ID NO: 906516 - RNA, 19 nt, Artificial Sequence
  Description of Artificial Sequence: Synthetic oligonucleotide
ccugaugcgcagcgagagc

SEQ ID NO: 906517 - RNA, 19 nt, Artificial Sequence
  Description of Artificial Sequence: Synthetic oligonucleotide
aggccuccgucaguaauuu

SEQ ID NO: 906518 - RNA, 19 nt, Artificial Sequence
  Description of Artificial Sequence: Synthetic oligonucleotide
uaccuugcugaaggauaua

SEQ ID NO: 906519 - RNA, 19 nt, Artificial Sequence
  Description of Artificial Sequence: Synthetic oligonucleotide
ggaugaccugaugcgcagc

SEQ ID NO: 906520 - RNA, 19 nt, Artificial Sequence
  Description of Artificial Sequence: Synthetic oligonucleotide
ccgacgguagcuucugcca

SEQ ID NO: 906521 - RNA, 19 nt, Artificial Sequence
  Description of Artificial Sequence: Synthetic oligonucleotide
ccuugucaggccuccguca

SEQ ID NO: 906522 - RNA, 19 nt, Artificial Sequence
  Description of Artificial Sequence: Synthetic oligonucleotide
guggggcccaaagauugaa

SEQ ID NO: 906523 - RNA, 19 nt, Artificial Sequence
  Description of Artificial Sequence: Synthetic oligonucleotide
ugggugcgucgacccauuu

SEQ ID NO: 906524 - RNA, 19 nt, Artificial Sequence
  Description of Artificial Sequence: Synthetic oligonucleotide
gugguucucuccggcguga

SEQ ID NO: 906525 - RNA, 19 nt, Artificial Sequence
  Description of Artificial Sequence: Synthetic oligonucleotide
ggggaacuaugguuagucu

SEQ ID NO: 906526 - RNA, 19 nt, Artificial Sequence
  Description of Artificial Sequence: Synthetic oligonucleotide
cagggacgugccgcacugg

SEQ ID NO: 906527 - RNA, 19 nt, Artificial Sequence
  Description of Artificial Sequence: Synthetic oligonucleotide
agcuuaccugaaagcucca

SEQ ID NO: 906528 - RNA, 19 nt, Artificial Sequence
  Description of Artificial Sequence: Synthetic oligonucleotide
gucgacccauuuacuagcu

SEQ ID NO: 906529 - RNA, 19 nt, Artificial Sequence
  Description of Artificial Sequence: Synthetic oligonucleotide
caccccuucugacauguuu

SEQ ID NO: 906530 - RNA, 19 nt, Artificial Sequence
  Description of Artificial Sequence: Synthetic oligonucleotide
guauggcgaguguugucuu

SEQ ID NO: 906531 - RNA, 19 nt, Artificial Sequence
  Description of Artificial Sequence: Synthetic oligonucleotide
cgacgguagcuucugccac

SEQ ID NO: 906532 - RNA, 19 nt, Artificial Sequence
  Description of Artificial Sequence: Synthetic oligonucleotide
gacuuguggcggaaagauu

SEQ ID NO: 906533 - RNA, 19 nt, Artificial Sequence
  Description of Artificial Sequence: Synthetic oligonucleotide
acgugccgcacugguggca

SEQ ID NO: 906534 - RNA, 19 nt, Artificial Sequence
  Description of Artificial Sequence: Synthetic oligonucleotide
gggacgugccgcacuggug

SEQ ID NO: 906535 - RNA, 19 nt, Artificial Sequence
  Description of Artificial Sequence: Synthetic oligonucleotide
cuagcucgccgugguucuc

SEQ ID NO: 906536 - RNA, 19 nt, Artificial Sequence
  Description of Artificial Sequence: Synthetic oligonucleotide
cuaucauguggggcccaaa

SEQ ID NO: 906537 - RNA, 19 nt, Artificial Sequence
  Description of Artificial Sequence: Synthetic oligonucleotide
cagugggugcgucgaccca

SEQ ID NO: 906538 - RNA, 19 nt, Artificial Sequence
  Description of Artificial Sequence: Synthetic oligonucleotide
gccggagagcagacuuccg

SEQ ID NO: 906539 - RNA, 19 nt, Artificial Sequence
  Description of Artificial Sequence: Synthetic oligonucleotide
cgugguucucuccggcgug

SEQ ID NO: 906540 - RNA, 19 nt, Artificial Sequence
  Description of Artificial Sequence: Synthetic oligonucleotide
gggugcgucgacccauuua

SEQ ID NO: 906541 - RNA, 19 nt, Artificial Sequence
  Description of Artificial Sequence: Synthetic oligonucleotide
cuuacacgcuaccccucau

SEQ ID NO: 906542 - RNA, 19 nt, Artificial Sequence
  Description of Artificial Sequence: Synthetic oligonucleotide
ccguuggaauuggcagugg

SEQ ID NO: 906543 - RNA, 19 nt, Artificial Sequence
  Description of Artificial Sequence: Synthetic oligonucleotide
gugcucgauaaaggagacu

SEQ ID NO: 906544 - RNA, 19 nt, Artificial Sequence
  Description of Artificial Sequence: Synthetic oligonucleotide
cgcgugccaaucagacuug

SEQ ID NO: 906545 - RNA, 19 nt, Artificial Sequence
  Description of Artificial Sequence: Synthetic oligonucleotide
ccgaugggucucaaaccaa

SEQ ID NO: 906546 - RNA, 19 nt, Artificial Sequence
  Description of Artificial Sequence: Synthetic oligonucleotide
gugcgucgacccauuuacu

SEQ ID NO: 906547 - RNA, 19 nt, Artificial Sequence
  Description of Artificial Sequence: Synthetic oligonucleotide
cacucacgugagaguugcu

SEQ ID NO: 906548 - RNA, 19 nt, Artificial Sequence
  Description of Artificial Sequence: Synthetic oligonucleotide
ccuaucauguggggcccaa

SEQ ID NO: 906549 - RNA, 19 nt, Artificial Sequence
  Description of Artificial Sequence: Synthetic oligonucleotide
gcucgauaaaggagacuuu

SEQ ID NO: 906550 - RNA, 19 nt, Artificial Sequence
  Description of Artificial Sequence: Synthetic oligonucleotide
gcgcagcgagagcagacuu

SEQ ID NO: 906551 - RNA, 19 nt, Artificial Sequence
  Description of Artificial Sequence: Synthetic oligonucleotide
ccaggggcacuuacacgcu

SEQ ID NO: 906552 - RNA, 19 nt, Artificial Sequence
  Description of Artificial Sequence: Synthetic oligonucleotide
gugcgcugucagggcugac

SEQ ID NO: 906553 - RNA, 19 nt, Artificial Sequence
  Description of Artificial Sequence: Synthetic oligonucleotide
gugggugcgucgacccauu

SEQ ID NO: 906554 - RNA, 19 nt, Artificial Sequence
  Description of Artificial Sequence: Synthetic oligonucleotide
gcgugccaaucagacuugu

SEQ ID NO: 906555 - RNA, 19 nt, Artificial Sequence
  Description of Artificial Sequence: Synthetic oligonucleotide
ccuccguggaugaccugau

SEQ ID NO: 906556 - RNA, 19 nt, Artificial Sequence
  Description of Artificial Sequence: Synthetic oligonucleotide
cgcuaccccucaugagaaa

SEQ ID NO: 906557 - RNA, 19 nt, Artificial Sequence
  Description of Artificial Sequence: Synthetic oligonucleotide
ggccuccgucaguaauuuu

SEQ ID NO: 906558 - RNA, 19 nt, Artificial Sequence
  Description of Artificial Sequence: Synthetic oligonucleotide
cgugccgcacugguggcau

SEQ ID NO: 906559 - RNA, 19 nt, Artificial Sequence
  Description of Artificial Sequence: Synthetic oligonucleotide
aauaguacauuucucaauc

SEQ ID NO: 906560 - RNA, 19 nt, Artificial Sequence
  Description of Artificial Sequence: Synthetic oligonucleotide
uguaauaauaauaauaaua

SEQ ID NO: 906561 - RNA, 19 nt, Artificial Sequence
  Description of Artificial Sequence: Synthetic oligonucleotide
uauaauauauauauauuug

SEQ ID NO: 906562 - RNA, 19 nt, Artificial Sequence
  Description of Artificial Sequence: Synthetic oligonucleotide
aauaauaauaauaauaaaa

SEQ ID NO: 906563 - RNA, 19 nt, Artificial Sequence
  Description of Artificial Sequence: Synthetic oligonucleotide
uauauauauacauauauaa

SEQ ID NO: 906564 - RNA, 19 nt, Artificial Sequence
  Description of Artificial Sequence: Synthetic oligonucleotide
acauauauaauauauauau

SEQ ID NO: 906565 - RNA, 19 nt, Artificial Sequence
  Description of Artificial Sequence: Synthetic oligonucleotide
aauagaucagacuaaauaa

SEQ ID NO: 906566 - RNA, 19 nt, Artificial Sequence
  Description of Artificial Sequence: Synthetic oligonucleotide
auauauaauauauauauau

SEQ ID NO: 906567 - RNA, 19 nt, Artificial Sequence
  Description of Artificial Sequence: Synthetic oligonucleotide
aauaauaauaauaauaaua

SEQ ID NO: 906568 - RNA, 19 nt, Artificial Sequence
  Description of Artificial Sequence: Synthetic oligonucleotide
auuauugcgagcugcagcc

SEQ ID NO: 906569 - RNA, 19 nt, Artificial Sequence
  Description of Artificial Sequence: Synthetic oligonucleotide
aauauauauauauuuguaa

SEQ ID NO: 906570 - RNA, 19 nt, Artificial Sequence
  Description of Artificial Sequence: Synthetic oligonucleotide
aauucuacaguuauuauug

SEQ ID NO: 906571 - RNA, 19 nt, Artificial Sequence
  Description of Artificial Sequence: Synthetic oligonucleotide
uauaggacacucaagaaug

SEQ ID NO: 906572 - RNA, 19 nt, Artificial Sequence
  Description of Artificial Sequence: Synthetic oligonucleotide
gauuuuagccacuagaaac

SEQ ID NO: 906573 - RNA, 19 nt, Artificial Sequence
  Description of Artificial Sequence: Synthetic oligonucleotide
aaacuugugauucuguuca

SEQ ID NO: 906574 - RNA, 19 nt, Artificial Sequence
  Description of Artificial Sequence: Synthetic oligonucleotide
uugacuaugaagaauagau

SEQ ID NO: 906575 - RNA, 19 nt, Artificial Sequence
  Description of Artificial Sequence: Synthetic oligonucleotide
acuaaacuaugauucaccc

SEQ ID NO: 906576 - RNA, 19 nt, Artificial Sequence
  Description of Artificial Sequence: Synthetic oligonucleotide
aucaauagugauuauugcg

SEQ ID NO: 906577 - RNA, 19 nt, Artificial Sequence
  Description of Artificial Sequence: Synthetic oligonucleotide
aauauaucacuuuucauua

SEQ ID NO: 906578 - RNA, 19 nt, Artificial Sequence
  Description of Artificial Sequence: Synthetic oligonucleotide
ucaauagugauuauugcga

SEQ ID NO: 906579 - RNA, 19 nt, Artificial Sequence
  Description of Artificial Sequence: Synthetic oligonucleotide
auaauauauauauauuugu

SEQ ID NO: 906580 - RNA, 19 nt, Artificial Sequence
  Description of Artificial Sequence: Synthetic oligonucleotide
aacuuagaagaccaugggg

SEQ ID NO: 906581 - RNA, 19 nt, Artificial Sequence
  Description of Artificial Sequence: Synthetic oligonucleotide
auaauaauaauaauaauaa

SEQ ID NO: 906582 - RNA, 19 nt, Artificial Sequence
  Description of Artificial Sequence: Synthetic oligonucleotide
auauaauauauauauauuu

SEQ ID NO: 906583 - RNA, 19 nt, Artificial Sequence
  Description of Artificial Sequence: Synthetic oligonucleotide
auacauauauaauauauau

SEQ ID NO: 906584 - RNA, 19 nt, Artificial Sequence
  Description of Artificial Sequence: Synthetic oligonucleotide
uucacaguuuaauaugugg

SEQ ID NO: 906585 - RNA, 19 nt, Artificial Sequence
  Description of Artificial Sequence: Synthetic oligonucleotide
uagugauugaaucucagca

SEQ ID NO: 906586 - RNA, 19 nt, Artificial Sequence
  Description of Artificial Sequence: Synthetic oligonucleotide
uuucagacgauccauauau

SEQ ID NO: 906587 - RNA, 19 nt, Artificial Sequence
  Description of Artificial Sequence: Synthetic oligonucleotide
acuaauaaaauguggcaag

SEQ ID NO: 906588 - RNA, 19 nt, Artificial Sequence
  Description of Artificial Sequence: Synthetic oligonucleotide
aaucucacuaauaaaaugu

SEQ ID NO: 906589 - RNA, 19 nt, Artificial Sequence
  Description of Artificial Sequence: Synthetic oligonucleotide
uguaugaugaugauguauc

SEQ ID NO: 906590 - RNA, 19 nt, Artificial Sequence
  Description of Artificial Sequence: Synthetic oligonucleotide
auauauauauauuuguaaa

SEQ ID NO: 906591 - RNA, 19 nt, Artificial Sequence
  Description of Artificial Sequence: Synthetic oligonucleotide
acaaauuagcuggacaugc

SEQ ID NO: 906592 - RNA, 19 nt, Artificial Sequence
  Description of Artificial Sequence: Synthetic oligonucleotide
uucuauacaacugaguaca

SEQ ID NO: 906593 - RNA, 19 nt, Artificial Sequence
  Description of Artificial Sequence: Synthetic oligonucleotide
ucucacuaauaaaaugugg

SEQ ID NO: 906594 - RNA, 19 nt, Artificial Sequence
  Description of Artificial Sequence: Synthetic oligonucleotide
guaauaauaauaauaauaa

SEQ ID NO: 906595 - RNA, 19 nt, Artificial Sequence
  Description of Artificial Sequence: Synthetic oligonucleotide
acuauggguggacucaucc

SEQ ID NO: 906596 - RNA, 19 nt, Artificial Sequence
  Description of Artificial Sequence: Synthetic oligonucleotide
gaccuuauugacuaugaag

SEQ ID NO: 906597 - RNA, 19 nt, Artificial Sequence
  Description of Artificial Sequence: Synthetic oligonucleotide
uaauauauauauauuugua

SEQ ID NO: 906598 - RNA, 19 nt, Artificial Sequence
  Description of Artificial Sequence: Synthetic oligonucleotide
aacuaugauucacccagcg

SEQ ID NO: 906599 - RNA, 19 nt, Artificial Sequence
  Description of Artificial Sequence: Synthetic oligonucleotide
aauuaaaagcgcugcucuc

SEQ ID NO: 906600 - RNA, 19 nt, Artificial Sequence
  Description of Artificial Sequence: Synthetic oligonucleotide
uauauaauauauauauauu

SEQ ID NO: 906601 - RNA, 19 nt, Artificial Sequence
  Description of Artificial Sequence: Synthetic oligonucleotide
ucauacaucccuaguacag

SEQ ID NO: 906602 - RNA, 19 nt, Artificial Sequence
  Description of Artificial Sequence: Synthetic oligonucleotide
uccugcaaggaccagaagc

SEQ ID NO: 906603 - RNA, 19 nt, Artificial Sequence
  Description of Artificial Sequence: Synthetic oligonucleotide
uuaggaaauuaaaagcgcu

SEQ ID NO: 906604 - RNA, 19 nt, Artificial Sequence
  Description of Artificial Sequence: Synthetic oligonucleotide
uuuaaguucccuuuagaaa

SEQ ID NO: 906605 - RNA, 19 nt, Artificial Sequence
  Description of Artificial Sequence: Synthetic oligonucleotide
uccauugaagucagggugg

SEQ ID NO: 906606 - RNA, 19 nt, Artificial Sequence
  Description of Artificial Sequence: Synthetic oligonucleotide
uaacuuagaagaccauggg

SEQ ID NO: 906607 - RNA, 19 nt, Artificial Sequence
  Description of Artificial Sequence: Synthetic oligonucleotide
gaauagaucagacuaaaua

SEQ ID NO: 906608 - RNA, 19 nt, Artificial Sequence
  Description of Artificial Sequence: Synthetic oligonucleotide
aaaucauauauaacucaac

SEQ ID NO: 906609 - RNA, 19 nt, Artificial Sequence
  Description of Artificial Sequence: Synthetic oligonucleotide
agugauuauugcgagcugc

SEQ ID NO: 906610 - RNA, 19 nt, Artificial Sequence
  Description of Artificial Sequence: Synthetic oligonucleotide
aauuuggaaguucuauaca

SEQ ID NO: 906611 - RNA, 19 nt, Artificial Sequence
  Description of Artificial Sequence: Synthetic oligonucleotide
aacugguucauacaucccu

SEQ ID NO: 906612 - RNA, 19 nt, Artificial Sequence
  Description of Artificial Sequence: Synthetic oligonucleotide
aaaagcgcugcucucucuc

SEQ ID NO: 906613 - RNA, 19 nt, Artificial Sequence
  Description of Artificial Sequence: Synthetic oligonucleotide
uguaaaagcccugaggaga

SEQ ID NO: 906614 - RNA, 19 nt, Artificial Sequence
  Description of Artificial Sequence: Synthetic oligonucleotide
agaucagacuaaauaaagc

SEQ ID NO: 906615 - RNA, 19 nt, Artificial Sequence
  Description of Artificial Sequence: Synthetic oligonucleotide
ugcuuagaugguuugauac

SEQ ID NO: 906616 - RNA, 19 nt, Artificial Sequence
  Description of Artificial Sequence: Synthetic oligonucleotide
ugcuuuaaggugaagguuc

SEQ ID NO: 906617 - RNA, 19 nt, Artificial Sequence
  Description of Artificial Sequence: Synthetic oligonucleotide
uaauaauaauaauaauaaa

SEQ ID NO: 906618 - RNA, 19 nt, Artificial Sequence
  Description of Artificial Sequence: Synthetic oligonucleotide
gauuauugcgagcugcagc

SEQ ID NO: 906619 - RNA, 19 nt, Artificial Sequence
  Description of Artificial Sequence: Synthetic oligonucleotide
uggauuuuagccacuagaa

SEQ ID NO: 906620 - RNA, 19 nt, Artificial Sequence
  Description of Artificial Sequence: Synthetic oligonucleotide
  modified_base (16)..(16): a, c, u, g, unknown or other
aaggaccccgcuuugngca

SEQ ID NO: 906621 - RNA, 19 nt, Artificial Sequence
  Description of Artificial Sequence: Synthetic oligonucleotide
auuuggaaguucuauacaa

SEQ ID NO: 906622 - RNA, 19 nt, Artificial Sequence
  Description of Artificial Sequence: Synthetic oligonucleotide
uuggaaguucuauacaacu

SEQ ID NO: 906623 - RNA, 19 nt, Artificial Sequence
  Description of Artificial Sequence: Synthetic oligonucleotide
uuuguacaugacauguagc

SEQ ID NO: 906624 - RNA, 19 nt, Artificial Sequence
  Description of Artificial Sequence: Synthetic oligonucleotide
uaauaauaauaauaauaau

SEQ ID NO: 906625 - RNA, 19 nt, Artificial Sequence
  Description of Artificial Sequence: Synthetic oligonucleotide
agcgguuucauucugcuga

SEQ ID NO: 906626 - RNA, 19 nt, Artificial Sequence
  Description of Artificial Sequence: Synthetic oligonucleotide
uacauauauaauauauaua

SEQ ID NO: 906627 - RNA, 19 nt, Artificial Sequence
  Description of Artificial Sequence: Synthetic oligonucleotide
aacaguuguaauaauaaua

SEQ ID NO: 906628 - RNA, 19 nt, Artificial Sequence
  Description of Artificial Sequence: Synthetic oligonucleotide
uggaaguucuauacaacug

SEQ ID NO: 906629 - RNA, 19 nt, Artificial Sequence
  Description of Artificial Sequence: Synthetic oligonucleotide
uuaguggccgugcuuuugg

SEQ ID NO: 906630 - RNA, 19 nt, Artificial Sequence
  Description of Artificial Sequence: Synthetic oligonucleotide
ucuacugccuguauaggac

SEQ ID NO: 906631 - RNA, 19 nt, Artificial Sequence
  Description of Artificial Sequence: Synthetic oligonucleotide
uguagugauugaaucucag

SEQ ID NO: 906632 - RNA, 19 nt, Artificial Sequence
  Description of Artificial Sequence: Synthetic oligonucleotide
agguauuuuauguagugau

SEQ ID NO: 906633 - RNA, 19 nt, Artificial Sequence
  Description of Artificial Sequence: Synthetic oligonucleotide
auauauuuguaaaagcccu

SEQ ID NO: 906634 - RNA, 19 nt, Artificial Sequence
  Description of Artificial Sequence: Synthetic oligonucleotide
ucuaguagcaguguggcuc

SEQ ID NO: 906635 - RNA, 19 nt, Artificial Sequence
  Description of Artificial Sequence: Synthetic oligonucleotide
uauugacuaugaagaauag

SEQ ID NO: 906636 - RNA, 19 nt, Artificial Sequence
  Description of Artificial Sequence: Synthetic oligonucleotide
aaaucagcgucugucucac

SEQ ID NO: 906637 - RNA, 19 nt, Artificial Sequence
  Description of Artificial Sequence: Synthetic oligonucleotide
uuuggaaguucuauacaac

SEQ ID NO: 906638 - RNA, 19 nt, Artificial Sequence
  Description of Artificial Sequence: Synthetic oligonucleotide
acagccagguauuuuaugu

SEQ ID NO: 906639 - RNA, 19 nt, Artificial Sequence
  Description of Artificial Sequence: Synthetic oligonucleotide
auucacccagcguuuaaac

SEQ ID NO: 906640 - RNA, 19 nt, Artificial Sequence
  Description of Artificial Sequence: Synthetic oligonucleotide
guauguaugaugaugaugu

SEQ ID NO: 906641 - RNA, 19 nt, Artificial Sequence
  Description of Artificial Sequence: Synthetic oligonucleotide
gcauaaaccaguuuuguac

SEQ ID NO: 906642 - RNA, 19 nt, Artificial Sequence
  Description of Artificial Sequence: Synthetic oligonucleotide
ucacccagcguuuaaacaa

SEQ ID NO: 906643 - RNA, 19 nt, Artificial Sequence
  Description of Artificial Sequence: Synthetic oligonucleotide
aggguaugcagcaagggac

SEQ ID NO: 906644 - RNA, 19 nt, Artificial Sequence
  Description of Artificial Sequence: Synthetic oligonucleotide
acaguuauuauuguuuccu

SEQ ID NO: 906645 - RNA, 19 nt, Artificial Sequence
  Description of Artificial Sequence: Synthetic oligonucleotide
guucauacaucccuaguac

SEQ ID NO: 906646 - RNA, 19 nt, Artificial Sequence
  Description of Artificial Sequence: Synthetic oligonucleotide
ugcaaacuaaacuaugauu

SEQ ID NO: 906647 - RNA, 19 nt, Artificial Sequence
  Description of Artificial Sequence: Synthetic oligonucleotide
gaauagcugucuuccauug

SEQ ID NO: 906648 - RNA, 19 nt, Artificial Sequence
  Description of Artificial Sequence: Synthetic oligonucleotide
ugagacaggguuguuagca

SEQ ID NO: 906649 - RNA, 19 nt, Artificial Sequence
  Description of Artificial Sequence: Synthetic oligonucleotide
cacaagaucaugaguuuag

SEQ ID NO: 906650 - RNA, 19 nt, Artificial Sequence
  Description of Artificial Sequence: Synthetic oligonucleotide
caauagugauuauugcgag

SEQ ID NO: 906651 - RNA, 19 nt, Artificial Sequence
  Description of Artificial Sequence: Synthetic oligonucleotide
ucagacgauccauauauau

SEQ ID NO: 906652 - RNA, 19 nt, Artificial Sequence
  Description of Artificial Sequence: Synthetic oligonucleotide
auaugugggaaggaaggcg

SEQ ID NO: 906653 - RNA, 19 nt, Artificial Sequence
  Description of Artificial Sequence: Synthetic oligonucleotide
ugacuaugaagaauagauc

SEQ ID NO: 906654 - RNA, 19 nt, Artificial Sequence
  Description of Artificial Sequence: Synthetic oligonucleotide
uuuaaggugaagguucgcu

SEQ ID NO: 906655 - RNA, 19 nt, Artificial Sequence
  Description of Artificial Sequence: Synthetic oligonucleotide
uauggguggacucauccuc

SEQ ID NO: 906656 - RNA, 19 nt, Artificial Sequence
  Description of Artificial Sequence: Synthetic oligonucleotide
  modified_base (18)..(18): a, c, u, g, unknown or other
gaaaggaccccgcuuugng

SEQ ID NO: 906657 - RNA, 19 nt, Artificial Sequence
  Description of Artificial Sequence: Synthetic oligonucleotide
uuaaacugguucauacauc

SEQ ID NO: 906658 - RNA, 19 nt, Artificial Sequence
  Description of Artificial Sequence: Synthetic oligonucleotide
uaguacauuucucaaucuc

SEQ ID NO: 906659 - RNA, 19 nt, Artificial Sequence
  Description of Artificial Sequence: Synthetic oligonucleotide
gucgcugucuuucccaugg

SEQ ID NO: 906660 - RNA, 19 nt, Artificial Sequence
  Description of Artificial Sequence: Synthetic oligonucleotide
cauauauauauacauauau

SEQ ID NO: 906661 - RNA, 19 nt, Artificial Sequence
  Description of Artificial Sequence: Synthetic oligonucleotide
auuaucucuagaauagcug

SEQ ID NO: 906662 - RNA, 19 nt, Artificial Sequence
  Description of Artificial Sequence: Synthetic oligonucleotide
uucauacaucccuaguaca

SEQ ID NO: 906663 - RNA, 19 nt, Artificial Sequence
  Description of Artificial Sequence: Synthetic oligonucleotide
aggguuguuagcacuaugg

SEQ ID NO: 906664 - RNA, 19 nt, Artificial Sequence
  Description of Artificial Sequence: Synthetic oligonucleotide
guucuauacaacugaguac

SEQ ID NO: 906665 - RNA, 19 nt, Artificial Sequence
  Description of Artificial Sequence: Synthetic oligonucleotide
agugauugaaucucagcau

SEQ ID NO: 906666 - RNA, 19 nt, Artificial Sequence
  Description of Artificial Sequence: Synthetic oligonucleotide
aaacuaugauucacccagc

SEQ ID NO: 906667 - RNA, 19 nt, Artificial Sequence
  Description of Artificial Sequence: Synthetic oligonucleotide
aggacaacaaacaaauagu

SEQ ID NO: 906668 - RNA, 19 nt, Artificial Sequence
  Description of Artificial Sequence: Synthetic oligonucleotide
aagaauagaucagacuaaa

SEQ ID NO: 906669 - RNA, 19 nt, Artificial Sequence
  Description of Artificial Sequence: Synthetic oligonucleotide
auauauauacauauauaau

SEQ ID NO: 906670 - RNA, 19 nt, Artificial Sequence
  Description of Artificial Sequence: Synthetic oligonucleotide
uuaaggugaagguucgcuc

SEQ ID NO: 906671 - RNA, 19 nt, Artificial Sequence
  Description of Artificial Sequence: Synthetic oligonucleotide
ugcuacaucuuaccgcagc

SEQ ID NO: 906672 - RNA, 19 nt, Artificial Sequence
  Description of Artificial Sequence: Synthetic oligonucleotide
ucuugaggaaagagaggag

SEQ ID NO: 906673 - RNA, 19 nt, Artificial Sequence
  Description of Artificial Sequence: Synthetic oligonucleotide
uugucugccuuaguggccg

SEQ ID NO: 906674 - RNA, 19 nt, Artificial Sequence
  Description of Artificial Sequence: Synthetic oligonucleotide
uaacaguuguaauaauaau

SEQ ID NO: 906675 - RNA, 19 nt, Artificial Sequence
  Description of Artificial Sequence: Synthetic oligonucleotide
guagugauugaaucucagc

SEQ ID NO: 906676 - RNA, 19 nt, Artificial Sequence
  Description of Artificial Sequence: Synthetic oligonucleotide
uauugcgagcugcagcccc

SEQ ID NO: 906677 - RNA, 19 nt, Artificial Sequence
  Description of Artificial Sequence: Synthetic oligonucleotide
cucauucucugagacaggg

SEQ ID NO: 906678 - RNA, 19 nt, Artificial Sequence
  Description of Artificial Sequence: Synthetic oligonucleotide
uguuuaaugcaugggcuga

SEQ ID NO: 906679 - RNA, 19 nt, Artificial Sequence
  Description of Artificial Sequence: Synthetic oligonucleotide
ugaacagaggccagcuaca

SEQ ID NO: 906680 - RNA, 19 nt, Artificial Sequence
  Description of Artificial Sequence: Synthetic oligonucleotide
auaacauuuauugcuuaga

SEQ ID NO: 906681 - RNA, 19 nt, Artificial Sequence
  Description of Artificial Sequence: Synthetic oligonucleotide
uagaaacaaauuagcugga

SEQ ID NO: 906682 - RNA, 19 nt, Artificial Sequence
  Description of Artificial Sequence: Synthetic oligonucleotide
auuaaaagcgcugcucucu

SEQ ID NO: 906683 - RNA, 19 nt, Artificial Sequence
  Description of Artificial Sequence: Synthetic oligonucleotide
ucccugcuacaucuuaccg

SEQ ID NO: 906684 - RNA, 19 nt, Artificial Sequence
  Description of Artificial Sequence: Synthetic oligonucleotide
ugguuugauacagaacagc

SEQ ID NO: 906685 - RNA, 19 nt, Artificial Sequence
  Description of Artificial Sequence: Synthetic oligonucleotide
acgcugcacaccuucuucc

SEQ ID NO: 906686 - RNA, 19 nt, Artificial Sequence
  Description of Artificial Sequence: Synthetic oligonucleotide
cuguuuaaugcaugggcug

SEQ ID NO: 906687 - RNA, 19 nt, Artificial Sequence
  Description of Artificial Sequence: Synthetic oligonucleotide
agcguuuaaacaaaucaca

SEQ ID NO: 906688 - RNA, 19 nt, Artificial Sequence
  Description of Artificial Sequence: Synthetic oligonucleotide
cuuagaagaccaugggguc

SEQ ID NO: 906689 - RNA, 19 nt, Artificial Sequence
  Description of Artificial Sequence: Synthetic oligonucleotide
cauucugcugaugagggac

SEQ ID NO: 906690 - RNA, 19 nt, Artificial Sequence
  Description of Artificial Sequence: Synthetic oligonucleotide
aucuacugccuguauagga

SEQ ID NO: 906691 - RNA, 19 nt, Artificial Sequence
  Description of Artificial Sequence: Synthetic oligonucleotide
gaaagagaggagaggagac

SEQ ID NO: 906692 - RNA, 19 nt, Artificial Sequence
  Description of Artificial Sequence: Synthetic oligonucleotide
auauauauauacauauaua

SEQ ID NO: 906693 - RNA, 19 nt, Artificial Sequence
  Description of Artificial Sequence: Synthetic oligonucleotide
aagggauuggccaguuagg

SEQ ID NO: 906694 - RNA, 19 nt, Artificial Sequence
  Description of Artificial Sequence: Synthetic oligonucleotide
uucacccagcguuuaaaca

SEQ ID NO: 906695 - RNA, 19 nt, Artificial Sequence
  Description of Artificial Sequence: Synthetic oligonucleotide
uuaaaagcgcugcucucuc

SEQ ID NO: 906696 - RNA, 19 nt, Artificial Sequence
  Description of Artificial Sequence: Synthetic oligonucleotide
ugcuugaagaacagcccca

SEQ ID NO: 906697 - RNA, 19 nt, Artificial Sequence
  Description of Artificial Sequence: Synthetic oligonucleotide
ugucgcacuaggcugugcu

SEQ ID NO: 906698 - RNA, 19 nt, Artificial Sequence
  Description of Artificial Sequence: Synthetic oligonucleotide
ugugaccucaugugccggg

SEQ ID NO: 906699 - RNA, 19 nt, Artificial Sequence
  Description of Artificial Sequence: Synthetic oligonucleotide
  modified_base (4)..(4): a, c, u, g, unknown or other
uugngcaccaagggauugg

SEQ ID NO: 906700 - RNA, 19 nt, Artificial Sequence
  Description of Artificial Sequence: Synthetic oligonucleotide
aagaccuuauugacuauga

SEQ ID NO: 906701 - RNA, 19 nt, Artificial Sequence
  Description of Artificial Sequence: Synthetic oligonucleotide
auguaucugaaaucagcgu

SEQ ID NO: 906702 - RNA, 19 nt, Artificial Sequence
  Description of Artificial Sequence: Synthetic oligonucleotide
agaaugaaaggaccccgcu

SEQ ID NO: 906703 - RNA, 19 nt, Artificial Sequence
  Description of Artificial Sequence: Synthetic oligonucleotide
uaugauucacccagcguuu

SEQ ID NO: 906704 - RNA, 19 nt, Artificial Sequence
  Description of Artificial Sequence: Synthetic oligonucleotide
gagacgagauguauguaug

SEQ ID NO: 906705 - RNA, 19 nt, Artificial Sequence
  Description of Artificial Sequence: Synthetic oligonucleotide
ucuuaccgcagccuagagu

SEQ ID NO: 906706 - RNA, 19 nt, Artificial Sequence
  Description of Artificial Sequence: Synthetic oligonucleotide
acuaugauucacccagcgu

SEQ ID NO: 906707 - RNA, 19 nt, Artificial Sequence
  Description of Artificial Sequence: Synthetic oligonucleotide
gaauucuacaguuauuauu

SEQ ID NO: 906708 - RNA, 19 nt, Artificial Sequence
  Description of Artificial Sequence: Synthetic oligonucleotide
guggcaagaccuuauugac

SEQ ID NO: 906709 - RNA, 19 nt, Artificial Sequence
  Description of Artificial Sequence: Synthetic oligonucleotide
uggcuuuaacuuagaagac

SEQ ID NO: 906710 - RNA, 19 nt, Artificial Sequence
  Description of Artificial Sequence: Synthetic oligonucleotide
cauauauaauauauauaua

SEQ ID NO: 906711 - RNA, 19 nt, Artificial Sequence
  Description of Artificial Sequence: Synthetic oligonucleotide
ggagaaagagaaucaaaca

SEQ ID NO: 906712 - RNA, 19 nt, Artificial Sequence
  Description of Artificial Sequence: Synthetic oligonucleotide
uagcuggacaugcaaacua

SEQ ID NO: 906713 - RNA, 19 nt, Artificial Sequence
  Description of Artificial Sequence: Synthetic oligonucleotide
cuggugucgcacuaggcug

SEQ ID NO: 906714 - RNA, 19 nt, Artificial Sequence
  Description of Artificial Sequence: Synthetic oligonucleotide
auugacuaugaagaauaga

SEQ ID NO: 906715 - RNA, 19 nt, Artificial Sequence
  Description of Artificial Sequence: Synthetic oligonucleotide
ucaugaguuuaguguggag

SEQ ID NO: 906716 - RNA, 19 nt, Artificial Sequence
  Description of Artificial Sequence: Synthetic oligonucleotide
ugauuauugcgagcugcag

SEQ ID NO: 906717 - RNA, 19 nt, Artificial Sequence
  Description of Artificial Sequence: Synthetic oligonucleotide
uggcaagaccuuauugacu

SEQ ID NO: 906718 - RNA, 19 nt, Artificial Sequence
  Description of Artificial Sequence: Synthetic oligonucleotide
gaagaauagaucagacuaa

SEQ ID NO: 906719 - RNA, 19 nt, Artificial Sequence
  Description of Artificial Sequence: Synthetic oligonucleotide
ggguuguuagcacuauggg

SEQ ID NO: 906720 - RNA, 19 nt, Artificial Sequence
  Description of Artificial Sequence: Synthetic oligonucleotide
agacgagauguauguauga

SEQ ID NO: 906721 - RNA, 19 nt, Artificial Sequence
  Description of Artificial Sequence: Synthetic oligonucleotide
  modified_base (5)..(5): a, c, u, g, unknown or other
uuugngcaccaagggauug

SEQ ID NO: 906722 - RNA, 19 nt, Artificial Sequence
  Description of Artificial Sequence: Synthetic oligonucleotide
aaccaguuuuguacaugac

SEQ ID NO: 906723 - RNA, 19 nt, Artificial Sequence
  Description of Artificial Sequence: Synthetic oligonucleotide
cuuaccgcagccuagaguu

SEQ ID NO: 906724 - RNA, 19 nt, Artificial Sequence
  Description of Artificial Sequence: Synthetic oligonucleotide
uuagcuggacaugcaaacu

SEQ ID NO: 906725 - RNA, 19 nt, Artificial Sequence
  Description of Artificial Sequence: Synthetic oligonucleotide
auauaucacuuuucauuau

SEQ ID NO: 906726 - RNA, 19 nt, Artificial Sequence
  Description of Artificial Sequence: Synthetic oligonucleotide
ucuauacaacugaguacaa

SEQ ID NO: 906727 - RNA, 19 nt, Artificial Sequence
  Description of Artificial Sequence: Synthetic oligonucleotide
guauaggacacucaagaau

SEQ ID NO: 906728 - RNA, 19 nt, Artificial Sequence
  Description of Artificial Sequence: Synthetic oligonucleotide
auguaugaugaugauguau

SEQ ID NO: 906729 - RNA, 19 nt, Artificial Sequence
  Description of Artificial Sequence: Synthetic oligonucleotide
acaugcaaacuaaacuaug

SEQ ID NO: 906730 - RNA, 19 nt, Artificial Sequence
  Description of Artificial Sequence: Synthetic oligonucleotide
uuaaaucaauagugauuau

SEQ ID NO: 906731 - RNA, 19 nt, Artificial Sequence
  Description of Artificial Sequence: Synthetic oligonucleotide
cacuaauaaaauguggcaa

SEQ ID NO: 906732 - RNA, 19 nt, Artificial Sequence
  Description of Artificial Sequence: Synthetic oligonucleotide
  modified_base (3)..(3): a, c, u, g, unknown or other
ugngcaccaagggauuggc

SEQ ID NO: 906733 - RNA, 19 nt, Artificial Sequence
  Description of Artificial Sequence: Synthetic oligonucleotide
auacaucccuaguacaguu

SEQ ID NO: 906734 - RNA, 19 nt, Artificial Sequence
  Description of Artificial Sequence: Synthetic oligonucleotide
cuaugauucacccagcguu

SEQ ID NO: 906735 - RNA, 19 nt, Artificial Sequence
  Description of Artificial Sequence: Synthetic oligonucleotide
caagaccuuauugacuaug

SEQ ID NO: 906736 - RNA, 19 nt, Artificial Sequence
  Description of Artificial Sequence: Synthetic oligonucleotide
uggcauaaaccaguuuugu

SEQ ID NO: 906737 - RNA, 19 nt, Artificial Sequence
  Description of Artificial Sequence: Synthetic oligonucleotide
cuuucugguggauccgcug

SEQ ID NO: 906738 - RNA, 19 nt, Artificial Sequence
  Description of Artificial Sequence: Synthetic oligonucleotide
cucgggucucagcuaaagg

SEQ ID NO: 906739 - RNA, 19 nt, Artificial Sequence
  Description of Artificial Sequence: Synthetic oligonucleotide
agaggagacgagauguaug

SEQ ID NO: 906740 - RNA, 19 nt, Artificial Sequence
  Description of Artificial Sequence: Synthetic oligonucleotide
ggcaagaccuuauugacua

SEQ ID NO: 906741 - RNA, 19 nt, Artificial Sequence
  Description of Artificial Sequence: Synthetic oligonucleotide
agccaaucccugcuacauc

SEQ ID NO: 906742 - RNA, 19 nt, Artificial Sequence
  Description of Artificial Sequence: Synthetic oligonucleotide
uuagcacuauggguggacu

SEQ ID NO: 906743 - RNA, 19 nt, Artificial Sequence
  Description of Artificial Sequence: Synthetic oligonucleotide
uggugucgcacuaggcugu

SEQ ID NO: 906744 - RNA, 19 nt, Artificial Sequence
  Description of Artificial Sequence: Synthetic oligonucleotide
  modified_base (19)..(19): a, c, u, g, unknown or other
ugaaaggaccccgcuuugn

SEQ ID NO: 906745 - RNA, 19 nt, Artificial Sequence
  Description of Artificial Sequence: Synthetic oligonucleotide
gcaagggacaagcacagga

SEQ ID NO: 906746 - RNA, 19 nt, Artificial Sequence
  Description of Artificial Sequence: Synthetic oligonucleotide
ugguggacaaaaggguaug

SEQ ID NO: 906747 - RNA, 19 nt, Artificial Sequence
  Description of Artificial Sequence: Synthetic oligonucleotide
uauguaugaugaugaugua

SEQ ID NO: 906748 - RNA, 19 nt, Artificial Sequence
  Description of Artificial Sequence: Synthetic oligonucleotide
aaucagcgucugucucacg

SEQ ID NO: 906749 - RNA, 19 nt, Artificial Sequence
  Description of Artificial Sequence: Synthetic oligonucleotide
uaguggccgugcuuuuggg

SEQ ID NO: 906750 - RNA, 19 nt, Artificial Sequence
  Description of Artificial Sequence: Synthetic oligonucleotide
caugguugcuggugcuagg

SEQ ID NO: 906751 - RNA, 19 nt, Artificial Sequence
  Description of Artificial Sequence: Synthetic oligonucleotide
uaaaagcgcugcucucucu

SEQ ID NO: 906752 - RNA, 19 nt, Artificial Sequence
  Description of Artificial Sequence: Synthetic oligonucleotide
gcuacaucuuaccgcagcc

SEQ ID NO: 906753 - RNA, 19 nt, Artificial Sequence
  Description of Artificial Sequence: Synthetic oligonucleotide
acaagaucaugaguuuagu

SEQ ID NO: 906754 - RNA, 19 nt, Artificial Sequence
  Description of Artificial Sequence: Synthetic oligonucleotide
uaggagcgguuucauucug

SEQ ID NO: 906755 - RNA, 19 nt, Artificial Sequence
  Description of Artificial Sequence: Synthetic oligonucleotide
augauguaucugaaaucag

SEQ ID NO: 906756 - RNA, 19 nt, Artificial Sequence
  Description of Artificial Sequence: Synthetic oligonucleotide
ugauucacccagcguuuaa

SEQ ID NO: 906757 - RNA, 19 nt, Artificial Sequence
  Description of Artificial Sequence: Synthetic oligonucleotide
acuaagggaugcaggagcu

SEQ ID NO: 906758 - RNA, 19 nt, Artificial Sequence
  Description of Artificial Sequence: Synthetic oligonucleotide
aggagcgguuucauucugc

SEQ ID NO: 906759 - RNA, 19 nt, Artificial Sequence
  Description of Artificial Sequence: Synthetic oligonucleotide
agaccuuauugacuaugaa

SEQ ID NO: 906760 - RNA, 19 nt, Artificial Sequence
  Description of Artificial Sequence: Synthetic oligonucleotide
agucagggugguuggauuu

SEQ ID NO: 906761 - RNA, 19 nt, Artificial Sequence
  Description of Artificial Sequence: Synthetic oligonucleotide
uaccgcagccuagaguuca

SEQ ID NO: 906762 - RNA, 19 nt, Artificial Sequence
  Description of Artificial Sequence: Synthetic oligonucleotide
aggagcucuaguagcagug

SEQ ID NO: 906763 - RNA, 19 nt, Artificial Sequence
  Description of Artificial Sequence: Synthetic oligonucleotide
aucccuaguacaguuuuaa

SEQ ID NO: 906764 - RNA, 19 nt, Artificial Sequence
  Description of Artificial Sequence: Synthetic oligonucleotide
aucuuaccgcagccuagag

SEQ ID NO: 906765 - RNA, 19 nt, Artificial Sequence
  Description of Artificial Sequence: Synthetic oligonucleotide
uucagacgauccauauaua

SEQ ID NO: 906766 - RNA, 19 nt, Artificial Sequence
  Description of Artificial Sequence: Synthetic oligonucleotide
gccacuagaaacuggugga

SEQ ID NO: 906767 - RNA, 19 nt, Artificial Sequence
  Description of Artificial Sequence: Synthetic oligonucleotide
ugacauguagcagcaguuu

SEQ ID NO: 906768 - RNA, 19 nt, Artificial Sequence
  Description of Artificial Sequence: Synthetic oligonucleotide
cuacugccuguauaggaca

SEQ ID NO: 906769 - RNA, 19 nt, Artificial Sequence
  Description of Artificial Sequence: Synthetic oligonucleotide
ccugcuacaucuuaccgca

SEQ ID NO: 906770 - RNA, 19 nt, Artificial Sequence
  Description of Artificial Sequence: Synthetic oligonucleotide
ucggccucauucucugaga

SEQ ID NO: 906771 - RNA, 19 nt, Artificial Sequence
  Description of Artificial Sequence: Synthetic oligonucleotide
gauugaaucucagcauugu

SEQ ID NO: 906772 - RNA, 19 nt, Artificial Sequence
  Description of Artificial Sequence: Synthetic oligonucleotide
ggauuuuagccacuagaaa

SEQ ID NO: 906773 - RNA, 19 nt, Artificial Sequence
  Description of Artificial Sequence: Synthetic oligonucleotide
gauucuguucauguggcau

SEQ ID NO: 906774 - RNA, 19 nt, Artificial Sequence
  Description of Artificial Sequence: Synthetic oligonucleotide
guuagcacuauggguggac

SEQ ID NO: 906775 - RNA, 19 nt, Artificial Sequence
  Description of Artificial Sequence: Synthetic oligonucleotide
  modified_base (15)..(15): a, c, u, g, unknown or other
aggaccccgcuuugngcac

SEQ ID NO: 906776 - RNA, 19 nt, Artificial Sequence
  Description of Artificial Sequence: Synthetic oligonucleotide
gagcgguuucauucugcug

SEQ ID NO: 906777 - RNA, 19 nt, Artificial Sequence
  Description of Artificial Sequence: Synthetic oligonucleotide
auccucgggucucagcuaa

SEQ ID NO: 906778 - RNA, 19 nt, Artificial Sequence
  Description of Artificial Sequence: Synthetic oligonucleotide
ccuguauaggacacucaag

SEQ ID NO: 906779 - RNA, 19 nt, Artificial Sequence
  Description of Artificial Sequence: Synthetic oligonucleotide
gauucacccagcguuuaaa

SEQ ID NO: 906780 - RNA, 19 nt, Artificial Sequence
  Description of Artificial Sequence: Synthetic oligonucleotide
uuauugcgagcugcagccc

SEQ ID NO: 906781 - RNA, 19 nt, Artificial Sequence
  Description of Artificial Sequence: Synthetic oligonucleotide
auugcgagcugcagccccg

SEQ ID NO: 906782 - RNA, 19 nt, Artificial Sequence
  Description of Artificial Sequence: Synthetic oligonucleotide
gugauuauugcgagcugca

SEQ ID NO: 906783 - RNA, 19 nt, Artificial Sequence
  Description of Artificial Sequence: Synthetic oligonucleotide
cauggggucacugguucug

SEQ ID NO: 906784 - RNA, 19 nt, Artificial Sequence
  Description of Artificial Sequence: Synthetic oligonucleotide
auguagugauugaaucuca

SEQ ID NO: 906785 - RNA, 19 nt, Artificial Sequence
  Description of Artificial Sequence: Synthetic oligonucleotide
gcagccuagaguucaguca

SEQ ID NO: 906786 - RNA, 19 nt, Artificial Sequence
  Description of Artificial Sequence: Synthetic oligonucleotide
cuuauugacuaugaagaau

SEQ ID NO: 906787 - RNA, 19 nt, Artificial Sequence
  Description of Artificial Sequence: Synthetic oligonucleotide
cccuaguacaguuuuaaaa

SEQ ID NO: 906788 - RNA, 19 nt, Artificial Sequence
  Description of Artificial Sequence: Synthetic oligonucleotide
ugguuggauuuuagccacu

SEQ ID NO: 906789 - RNA, 19 nt, Artificial Sequence
  Description of Artificial Sequence: Synthetic oligonucleotide
caggguuguuagcacuaug

SEQ ID NO: 906790 - RNA, 19 nt, Artificial Sequence
  Description of Artificial Sequence: Synthetic oligonucleotide
gaaggcgggcaggacaaca

SEQ ID NO: 906791 - RNA, 19 nt, Artificial Sequence
  Description of Artificial Sequence: Synthetic oligonucleotide
guaggagcgguuucauucu

SEQ ID NO: 906792 - RNA, 19 nt, Artificial Sequence
  Description of Artificial Sequence: Synthetic oligonucleotide
ggcaggacaacaaacaaau

SEQ ID NO: 906793 - RNA, 19 nt, Artificial Sequence
  Description of Artificial Sequence: Synthetic oligonucleotide
gccaguuaggaaauuaaaa

SEQ ID NO: 906794 - RNA, 19 nt, Artificial Sequence
  Description of Artificial Sequence: Synthetic oligonucleotide
ggagacgagauguauguau

SEQ ID NO: 906795 - RNA, 19 nt, Artificial Sequence
  Description of Artificial Sequence: Synthetic oligonucleotide
ucgcacuaggcugugcuuu

SEQ ID NO: 906796 - RNA, 19 nt, Artificial Sequence
  Description of Artificial Sequence: Synthetic oligonucleotide
aaggcgggcaggacaacaa

SEQ ID NO: 906797 - RNA, 19 nt, Artificial Sequence
  Description of Artificial Sequence: Synthetic oligonucleotide
uuaccgcagccuagaguuc

SEQ ID NO: 906798 - RNA, 19 nt, Artificial Sequence
  Description of Artificial Sequence: Synthetic oligonucleotide
  modified_base (7)..(7): a, c, u, g, unknown or other
gcuuugngcaccaagggau

SEQ ID NO: 906799 - RNA, 19 nt, Artificial Sequence
  Description of Artificial Sequence: Synthetic oligonucleotide
gccuguauaggacacucaa

SEQ ID NO: 906800 - RNA, 19 nt, Artificial Sequence
  Description of Artificial Sequence: Synthetic oligonucleotide
uccgcuggugucgcacuag

SEQ ID NO: 906801 - RNA, 19 nt, Artificial Sequence
  Description of Artificial Sequence: Synthetic oligonucleotide
  modified_base (9)..(9): a, c, u, g, unknown or other
ccgcuuugngcaccaaggg

SEQ ID NO: 906802 - RNA, 19 nt, Artificial Sequence
  Description of Artificial Sequence: Synthetic oligonucleotide
  modified_base (2)..(2): a, c, u, g, unknown or other
gngcaccaagggauuggcc

SEQ ID NO: 906803 - RNA, 19 nt, Artificial Sequence
  Description of Artificial Sequence: Synthetic oligonucleotide
ggcauaaaccaguuuugua

SEQ ID NO: 906804 - RNA, 19 nt, Artificial Sequence
  Description of Artificial Sequence: Synthetic oligonucleotide
gguggacaaaaggguaugc

SEQ ID NO: 906805 - RNA, 19 nt, Artificial Sequence
  Description of Artificial Sequence: Synthetic oligonucleotide
cuaagggaugcaggagcug

SEQ ID NO: 906806 - RNA, 19 nt, Artificial Sequence
  Description of Artificial Sequence: Synthetic oligonucleotide
gacgagauguauguaugau

SEQ ID NO: 906807 - RNA, 19 nt, Artificial Sequence
  Description of Artificial Sequence: Synthetic oligonucleotide
caucuuaccgcagccuaga

SEQ ID NO: 906808 - RNA, 19 nt, Artificial Sequence
  Description of Artificial Sequence: Synthetic oligonucleotide
ccuagaguucagucauggc

SEQ ID NO: 906809 - RNA, 19 nt, Artificial Sequence
  Description of Artificial Sequence: Synthetic oligonucleotide
ggcuucuccccacaagauc

SEQ ID NO: 906810 - RNA, 19 nt, Artificial Sequence
  Description of Artificial Sequence: Synthetic oligonucleotide
caaggaccagaagcgcuug

SEQ ID NO: 906811 - RNA, 19 nt, Artificial Sequence
  Description of Artificial Sequence: Synthetic oligonucleotide
cgauccauauauauauaca

SEQ ID NO: 906812 - RNA, 19 nt, Artificial Sequence
  Description of Artificial Sequence: Synthetic oligonucleotide
ggccagcuacaguaggagc

SEQ ID NO: 906813 - RNA, 19 nt, Artificial Sequence
  Description of Artificial Sequence: Synthetic oligonucleotide
ccauauauauauacauaua

SEQ ID NO: 906814 - RNA, 19 nt, Artificial Sequence
  Description of Artificial Sequence: Synthetic oligonucleotide
gacgauccauauauauaua

SEQ ID NO: 906815 - RNA, 19 nt, Artificial Sequence
  Description of Artificial Sequence: Synthetic oligonucleotide
ccuguuuaaugcaugggcu

SEQ ID NO: 906816 - RNA, 19 nt, Artificial Sequence
  Description of Artificial Sequence: Synthetic oligonucleotide
ucgcugucuuucccauggu

SEQ ID NO: 906817 - RNA, 19 nt, Artificial Sequence
  Description of Artificial Sequence: Synthetic oligonucleotide
cuauggguggacucauccu

SEQ ID NO: 906818 - RNA, 19 nt, Artificial Sequence
  Description of Artificial Sequence: Synthetic oligonucleotide
ccgggugagguccugcaag

SEQ ID NO: 906819 - RNA, 19 nt, Artificial Sequence
  Description of Artificial Sequence: Synthetic oligonucleotide
cagccuagaguucagucau

SEQ ID NO: 906820 - RNA, 19 nt, Artificial Sequence
  Description of Artificial Sequence: Synthetic oligonucleotide
ccuuauugacuaugaagaa

SEQ ID NO: 906821 - RNA, 19 nt, Artificial Sequence
  Description of Artificial Sequence: Synthetic oligonucleotide
cauacaucccuaguacagu

SEQ ID NO: 906822 - RNA, 19 nt, Artificial Sequence
  Description of Artificial Sequence: Synthetic oligonucleotide
cacuauggguggacucauc

SEQ ID NO: 906823 - RNA, 19 nt, Artificial Sequence
  Description of Artificial Sequence: Synthetic oligonucleotide
ggugcugaacagaggccag

SEQ ID NO: 906824 - RNA, 19 nt, Artificial Sequence
  Description of Artificial Sequence: Synthetic oligonucleotide
aggcgggcaggacaacaaa

SEQ ID NO: 906825 - RNA, 19 nt, Artificial Sequence
  Description of Artificial Sequence: Synthetic oligonucleotide
gagaggagacgagauguau

SEQ ID NO: 906826 - RNA, 19 nt, Artificial Sequence
  Description of Artificial Sequence: Synthetic oligonucleotide
ucuguucauguggcauaaa

SEQ ID NO: 906827 - RNA, 19 nt, Artificial Sequence
  Description of Artificial Sequence: Synthetic oligonucleotide
ggagccaaucccugcuaca

SEQ ID NO: 906828 - RNA, 19 nt, Artificial Sequence
  Description of Artificial Sequence: Synthetic oligonucleotide
gagccaaucccugcuacau

SEQ ID NO: 906829 - RNA, 19 nt, Artificial Sequence
  Description of Artificial Sequence: Synthetic oligonucleotide
cuaggagcugagucggccu

SEQ ID NO: 906830 - RNA, 19 nt, Artificial Sequence
  Description of Artificial Sequence: Synthetic oligonucleotide
ggcgggcaggacaacaaac

SEQ ID NO: 906831 - RNA, 19 nt, Artificial Sequence
  Description of Artificial Sequence: Synthetic oligonucleotide
ggagcgguuucauucugcu

SEQ ID NO: 906832 - RNA, 19 nt, Artificial Sequence
  Description of Artificial Sequence: Synthetic oligonucleotide
gauccgcuggugucgcacu

SEQ ID NO: 906833 - RNA, 19 nt, Artificial Sequence
  Description of Artificial Sequence: Synthetic oligonucleotide
  modified_base (6)..(6): a, c, u, g, unknown or other
cuuugngcaccaagggauu

SEQ ID NO: 906834 - RNA, 19 nt, Artificial Sequence
  Description of Artificial Sequence: Synthetic oligonucleotide
caucccuaguacaguuuua

SEQ ID NO: 906835 - RNA, 19 nt, Artificial Sequence
  Description of Artificial Sequence: Synthetic oligonucleotide
ggccaguuaggaaauuaaa

SEQ ID NO: 906836 - RNA, 19 nt, Artificial Sequence
  Description of Artificial Sequence: Synthetic oligonucleotide
ugucugccuuaguggccgu

SEQ ID NO: 906837 - RNA, 19 nt, Artificial Sequence
  Description of Artificial Sequence: Synthetic oligonucleotide
agccuagaguucagucaug

SEQ ID NO: 906838 - RNA, 19 nt, Artificial Sequence
  Description of Artificial Sequence: Synthetic oligonucleotide
aggagacgagauguaugua

SEQ ID NO: 906839 - RNA, 19 nt, Artificial Sequence
  Description of Artificial Sequence: Synthetic oligonucleotide
agguucgcucacaggucug

SEQ ID NO: 906840 - RNA, 19 nt, Artificial Sequence
  Description of Artificial Sequence: Synthetic oligonucleotide
gguuggauuuuagccacua

SEQ ID NO: 906841 - RNA, 19 nt, Artificial Sequence
  Description of Artificial Sequence: Synthetic oligonucleotide
  modified_base (14)..(14): a, c, u, g, unknown or other
ggaccccgcuuugngcacc

SEQ ID NO: 906842 - RNA, 19 nt, Artificial Sequence
  Description of Artificial Sequence: Synthetic oligonucleotide
agcuacaguaggagcgguu

SEQ ID NO: 906843 - RNA, 19 nt, Artificial Sequence
  Description of Artificial Sequence: Synthetic oligonucleotide
  modified_base (11)..(11): a, c, u, g, unknown or other
ccccgcuuugngcaccaag

SEQ ID NO: 906844 - RNA, 19 nt, Artificial Sequence
  Description of Artificial Sequence: Synthetic oligonucleotide
gguucgcucacaggucuga

SEQ ID NO: 906845 - RNA, 19 nt, Artificial Sequence
  Description of Artificial Sequence: Synthetic oligonucleotide
  modified_base (13)..(13): a, c, u, g, unknown or other
gaccccgcuuugngcacca

SEQ ID NO: 906846 - RNA, 19 nt, Artificial Sequence
  Description of Artificial Sequence: Synthetic oligonucleotide
cauccucgggucucagcua

SEQ ID NO: 906847 - RNA, 19 nt, Artificial Sequence
  Description of Artificial Sequence: Synthetic oligonucleotide
ccucaugugccgggugagg

SEQ ID NO: 906848 - RNA, 19 nt, Artificial Sequence
  Description of Artificial Sequence: Synthetic oligonucleotide
  modified_base (8)..(8): a, c, u, g, unknown or other
cgcuuugngcaccaaggga

SEQ ID NO: 906849 - RNA, 19 nt, Artificial Sequence
  Description of Artificial Sequence: Synthetic oligonucleotide
gcuggacaugcaaacuaaa

SEQ ID NO: 906850 - RNA, 19 nt, Artificial Sequence
  Description of Artificial Sequence: Synthetic oligonucleotide
gugucgcacuaggcugugc

SEQ ID NO: 906851 - RNA, 19 nt, Artificial Sequence
  Description of Artificial Sequence: Synthetic oligonucleotide
gcuacaguaggagcgguuu

SEQ ID NO: 906852 - RNA, 19 nt, Artificial Sequence
  Description of Artificial Sequence: Synthetic oligonucleotide
ggagaggagacgagaugua

SEQ ID NO: 906853 - RNA, 19 nt, Artificial Sequence
  Description of Artificial Sequence: Synthetic oligonucleotide
ccacaagaucaugaguuua

SEQ ID NO: 906854 - RNA, 19 nt, Artificial Sequence
  Description of Artificial Sequence: Synthetic oligonucleotide
gugaccucaugugccgggu

SEQ ID NO: 906855 - RNA, 19 nt, Artificial Sequence
  Description of Artificial Sequence: Synthetic oligonucleotide
gucgcacuaggcugugcuu

SEQ ID NO: 906856 - RNA, 19 nt, Artificial Sequence
  Description of Artificial Sequence: Synthetic oligonucleotide
cucaggcauccucgggucu

SEQ ID NO: 906857 - RNA, 19 nt, Artificial Sequence
  Description of Artificial Sequence: Synthetic oligonucleotide
cugccuuaguggccgugcu

SEQ ID NO: 906858 - RNA, 19 nt, Artificial Sequence
  Description of Artificial Sequence: Synthetic oligonucleotide
augugccgggugagguccu

SEQ ID NO: 906859 - RNA, 19 nt, Artificial Sequence
  Description of Artificial Sequence: Synthetic oligonucleotide
caguaggagcgguuucauu

SEQ ID NO: 906860 - RNA, 19 nt, Artificial Sequence
  Description of Artificial Sequence: Synthetic oligonucleotide
gcaaggaccagaagcgcuu

SEQ ID NO: 906861 - RNA, 19 nt, Artificial Sequence
  Description of Artificial Sequence: Synthetic oligonucleotide
gcaagaccuuauugacuau

SEQ ID NO: 906862 - RNA, 19 nt, Artificial Sequence
  Description of Artificial Sequence: Synthetic oligonucleotide
ggaaggcgggcaggacaac

SEQ ID NO: 906863 - RNA, 19 nt, Artificial Sequence
  Description of Artificial Sequence: Synthetic oligonucleotide
cccacaagaucaugaguuu

SEQ ID NO: 906864 - RNA, 19 nt, Artificial Sequence
  Description of Artificial Sequence: Synthetic oligonucleotide
cagcuacaguaggagcggu

SEQ ID NO: 906865 - RNA, 19 nt, Artificial Sequence
  Description of Artificial Sequence: Synthetic oligonucleotide
gccgugcuuuuggggaguc

SEQ ID NO: 906866 - RNA, 19 nt, Artificial Sequence
  Description of Artificial Sequence: Synthetic oligonucleotide
cgcacuaggcugugcuuua

SEQ ID NO: 906867 - RNA, 19 nt, Artificial Sequence
  Description of Artificial Sequence: Synthetic oligonucleotide
  modified_base (12)..(12): a, c, u, g, unknown or other
accccgcuuugngcaccaa

SEQ ID NO: 906868 - RNA, 19 nt, Artificial Sequence
  Description of Artificial Sequence: Synthetic oligonucleotide
ggccgugcuuuuggggagu

SEQ ID NO: 906869 - RNA, 19 nt, Artificial Sequence
  Description of Artificial Sequence: Synthetic oligonucleotide
ccuuaguggccgugcuuuu

SEQ ID NO: 906870 - RNA, 19 nt, Artificial Sequence
  Description of Artificial Sequence: Synthetic oligonucleotide
ccgcagccuagaguucagu

SEQ ID NO: 906871 - RNA, 19 nt, Artificial Sequence
  Description of Artificial Sequence: Synthetic oligonucleotide
ccgugcuuuuggggagucu

SEQ ID NO: 906872 - RNA, 19 nt, Artificial Sequence
  Description of Artificial Sequence: Synthetic oligonucleotide
ucuuggagaaacaauggag

SEQ ID NO: 906873 - RNA, 19 nt, Artificial Sequence
  Description of Artificial Sequence: Synthetic oligonucleotide
cuuucuuggagaaacaaug

SEQ ID NO: 906874 - RNA, 19 nt, Artificial Sequence
  Description of Artificial Sequence: Synthetic oligonucleotide
uuuucguuuaaaaggaacu

SEQ ID NO: 906875 - RNA, 19 nt, Artificial Sequence
  Description of Artificial Sequence: Synthetic oligonucleotide
agaagcgugggccaagucc

SEQ ID NO: 906876 - RNA, 19 nt, Artificial Sequence
  Description of Artificial Sequence: Synthetic oligonucleotide
uuucuuggagaaacaaugg

SEQ ID NO: 906877 - RNA, 19 nt, Artificial Sequence
  Description of Artificial Sequence: Synthetic oligonucleotide
aguaccuuguggcuggggc

SEQ ID NO: 906878 - RNA, 19 nt, Artificial Sequence
  Description of Artificial Sequence: Synthetic oligonucleotide
uuagcauccacagaugcag

SEQ ID NO: 906879 - RNA, 19 nt, Artificial Sequence
  Description of Artificial Sequence: Synthetic oligonucleotide
aacuuuauuggguguuggg

SEQ ID NO: 906880 - RNA, 19 nt, Artificial Sequence
  Description of Artificial Sequence: Synthetic oligonucleotide
uuugagggacuccaggucc

SEQ ID NO: 906881 - RNA, 19 nt, Artificial Sequence
  Description of Artificial Sequence: Synthetic oligonucleotide
aacuggaccauucuugagu

SEQ ID NO: 906882 - RNA, 19 nt, Artificial Sequence
  Description of Artificial Sequence: Synthetic oligonucleotide
aguuccggaacagagggcc

SEQ ID NO: 906883 - RNA, 19 nt, Artificial Sequence
  Description of Artificial Sequence: Synthetic oligonucleotide
agcacuuagguucccaggg

SEQ ID NO: 906884 - RNA, 19 nt, Artificial Sequence
  Description of Artificial Sequence: Synthetic oligonucleotide
gaaacaauggagaagugga

SEQ ID NO: 906885 - RNA, 19 nt, Artificial Sequence
  Description of Artificial Sequence: Synthetic oligonucleotide
aaaaggaacuuuauugggu

SEQ ID NO: 906886 - RNA, 19 nt, Artificial Sequence
  Description of Artificial Sequence: Synthetic oligonucleotide
acuagcaccaugugccucg

SEQ ID NO: 906887 - RNA, 19 nt, Artificial Sequence
  Description of Artificial Sequence: Synthetic oligonucleotide
ucguuuaaaaggaacuuua

SEQ ID NO: 906888 - RNA, 19 nt, Artificial Sequence
  Description of Artificial Sequence: Synthetic oligonucleotide
cuuggagaaacaauggaga

SEQ ID NO: 906889 - RNA, 19 nt, Artificial Sequence
  Description of Artificial Sequence: Synthetic oligonucleotide
uggaccauucuugaguucc

SEQ ID NO: 906890 - RNA, 19 nt, Artificial Sequence
  Description of Artificial Sequence: Synthetic oligonucleotide
ggauugaugggugagaagc

SEQ ID NO: 906891 - RNA, 19 nt, Artificial Sequence
  Description of Artificial Sequence: Synthetic oligonucleotide
agcacccugaggcuggggc

SEQ ID NO: 906892 - RNA, 19 nt, Artificial Sequence
  Description of Artificial Sequence: Synthetic oligonucleotide
aggagcugccuucucaaac

SEQ ID NO: 906893 - RNA, 19 nt, Artificial Sequence
  Description of Artificial Sequence: Synthetic oligonucleotide
uggagacuaggcuaggcug

SEQ ID NO: 906894 - RNA, 19 nt, Artificial Sequence
  Description of Artificial Sequence: Synthetic oligonucleotide
gaguuguggccccagcugg

SEQ ID NO: 906895 - RNA, 19 nt, Artificial Sequence
  Description of Artificial Sequence: Synthetic oligonucleotide
uguuuucagguuuucucca

SEQ ID NO: 906896 - RNA, 19 nt, Artificial Sequence
  Description of Artificial Sequence: Synthetic oligonucleotide
gcuuguuggacacugacug

SEQ ID NO: 906897 - RNA, 19 nt, Artificial Sequence
  Description of Artificial Sequence: Synthetic oligonucleotide
acgcacuagcaccaugugc

SEQ ID NO: 906898 - RNA, 19 nt, Artificial Sequence
  Description of Artificial Sequence: Synthetic oligonucleotide
cauagaccuggcaaggcag

SEQ ID NO: 906899 - RNA, 19 nt, Artificial Sequence
  Description of Artificial Sequence: Synthetic oligonucleotide
aaacagaagccgaagggcu

SEQ ID NO: 906900 - RNA, 19 nt, Artificial Sequence
  Description of Artificial Sequence: Synthetic oligonucleotide
gauugaugggugagaagcg

SEQ ID NO: 906901 - RNA, 19 nt, Artificial Sequence
  Description of Artificial Sequence: Synthetic oligonucleotide
aaacuggaccauucuugag

SEQ ID NO: 906902 - RNA, 19 nt, Artificial Sequence
  Description of Artificial Sequence: Synthetic oligonucleotide
uuguuggagaggauugaug

SEQ ID NO: 906903 - RNA, 19 nt, Artificial Sequence
  Description of Artificial Sequence: Synthetic oligonucleotide
cugacuguugcccaccaag

SEQ ID NO: 906904 - RNA, 19 nt, Artificial Sequence
  Description of Artificial Sequence: Synthetic oligonucleotide
guucagaugagguccauga

SEQ ID NO: 906905 - RNA, 19 nt, Artificial Sequence
  Description of Artificial Sequence: Synthetic oligonucleotide
ugagcagcacuuagguucc

SEQ ID NO: 906906 - RNA, 19 nt, Artificial Sequence
  Description of Artificial Sequence: Synthetic oligonucleotide
ucacauagaccuggcaagg

SEQ ID NO: 906907 - RNA, 19 nt, Artificial Sequence
  Description of Artificial Sequence: Synthetic oligonucleotide
uucagaugagguccaugag

SEQ ID NO: 906908 - RNA, 19 nt, Artificial Sequence
  Description of Artificial Sequence: Synthetic oligonucleotide
ucgaggaccccacuccagg

SEQ ID NO: 906909 - RNA, 19 nt, Artificial Sequence
  Description of Artificial Sequence: Synthetic oligonucleotide
guauguggugcucuccagg

SEQ ID NO: 906910 - RNA, 19 nt, Artificial Sequence
  Description of Artificial Sequence: Synthetic oligonucleotide
auucuugaguuccggaaca

SEQ ID NO: 906911 - RNA, 19 nt, Artificial Sequence
  Description of Artificial Sequence: Synthetic oligonucleotide
ucuacugguugcugcaaug

SEQ ID NO: 906912 - RNA, 19 nt, Artificial Sequence
  Description of Artificial Sequence: Synthetic oligonucleotide
uugaugggugagaagcgug

SEQ ID NO: 906913 - RNA, 19 nt, Artificial Sequence
  Description of Artificial Sequence: Synthetic oligonucleotide
gaacuuuauuggguguugg

SEQ ID NO: 906914 - RNA, 19 nt, Artificial Sequence
  Description of Artificial Sequence: Synthetic oligonucleotide
aagacugggcagguggagg

SEQ ID NO: 906915 - RNA, 19 nt, Artificial Sequence
  Description of Artificial Sequence: Synthetic oligonucleotide
agaugcaggcuuugguuuc

SEQ ID NO: 906916 - RNA, 19 nt, Artificial Sequence
  Description of Artificial Sequence: Synthetic oligonucleotide
ugcagccugaguauguggu

SEQ ID NO: 906917 - RNA, 19 nt, Artificial Sequence
  Description of Artificial Sequence: Synthetic oligonucleotide
guucacauagaccuggcaa

SEQ ID NO: 906918 - RNA, 19 nt, Artificial Sequence
  Description of Artificial Sequence: Synthetic oligonucleotide
gacagguggaguugguggc

SEQ ID NO: 906919 - RNA, 19 nt, Artificial Sequence
  Description of Artificial Sequence: Synthetic oligonucleotide
gguaguaccuuguggcugg

SEQ ID NO: 906920 - RNA, 19 nt, Artificial Sequence
  Description of Artificial Sequence: Synthetic oligonucleotide
uggacacugacuguugccc

SEQ ID NO: 906921 - RNA, 19 nt, Artificial Sequence
  Description of Artificial Sequence: Synthetic oligonucleotide
guagucagcagcugcugag

SEQ ID NO: 906922 - RNA, 19 nt, Artificial Sequence
  Description of Artificial Sequence: Synthetic oligonucleotide
gagcccacgcacuagcacc

SEQ ID NO: 906923 - RNA, 19 nt, Artificial Sequence
  Description of Artificial Sequence: Synthetic oligonucleotide
acuuuauuggguguugggu

SEQ ID NO: 906924 - RNA, 19 nt, Artificial Sequence
  Description of Artificial Sequence: Synthetic oligonucleotide
ugugcagugggugccaggc

SEQ ID NO: 906925 - RNA, 19 nt, Artificial Sequence
  Description of Artificial Sequence: Synthetic oligonucleotide
ucucaaacagaagccgaag

SEQ ID NO: 906926 - RNA, 19 nt, Artificial Sequence
  Description of Artificial Sequence: Synthetic oligonucleotide
uguaugcgggaagugcacg

SEQ ID NO: 906927 - RNA, 19 nt, Artificial Sequence
  Description of Artificial Sequence: Synthetic oligonucleotide
agcugugugggccaagacu

SEQ ID NO: 906928 - RNA, 19 nt, Artificial Sequence
  Description of Artificial Sequence: Synthetic oligonucleotide
uguuggacacugacuguug

SEQ ID NO: 906929 - RNA, 19 nt, Artificial Sequence
  Description of Artificial Sequence: Synthetic oligonucleotide
uccagaagguggugggccg

SEQ ID NO: 906930 - RNA, 19 nt, Artificial Sequence
  Description of Artificial Sequence: Synthetic oligonucleotide
gggaagugcacgcagcccg

SEQ ID NO: 906931 - RNA, 19 nt, Artificial Sequence
  Description of Artificial Sequence: Synthetic oligonucleotide
cucgcauggggcuguaugc

SEQ ID NO: 906932 - RNA, 19 nt, Artificial Sequence
  Description of Artificial Sequence: Synthetic oligonucleotide
cuggccaaucuguucacgc

SEQ ID NO: 906933 - RNA, 19 nt, Artificial Sequence
  Description of Artificial Sequence: Synthetic oligonucleotide
uuucguuuaaaaggaacuu

SEQ ID NO: 906934 - RNA, 19 nt, Artificial Sequence
  Description of Artificial Sequence: Synthetic oligonucleotide
acagacucggugugucugg

SEQ ID NO: 906935 - RNA, 19 nt, Artificial Sequence
  Description of Artificial Sequence: Synthetic oligonucleotide
ggauagguccagaaggugg

SEQ ID NO: 906936 - RNA, 19 nt, Artificial Sequence
  Description of Artificial Sequence: Synthetic oligonucleotide
uucuggggccgaaggauag

SEQ ID NO: 906937 - RNA, 19 nt, Artificial Sequence
  Description of Artificial Sequence: Synthetic oligonucleotide
aggaugucguccuccauga

SEQ ID NO: 906938 - RNA, 19 nt, Artificial Sequence
  Description of Artificial Sequence: Synthetic oligonucleotide
ugcugcaauggcuccagca

SEQ ID NO: 906939 - RNA, 19 nt, Artificial Sequence
  Description of Artificial Sequence: Synthetic oligonucleotide
acuaggcuaggcugggaag

SEQ ID NO: 906940 - RNA, 19 nt, Artificial Sequence
  Description of Artificial Sequence: Synthetic oligonucleotide
aggcaguacgagcccacgc

SEQ ID NO: 906941 - RNA, 19 nt, Artificial Sequence
  Description of Artificial Sequence: Synthetic oligonucleotide
cugcuugggcugcagaggg

SEQ ID NO: 906942 - RNA, 19 nt, Artificial Sequence
  Description of Artificial Sequence: Synthetic oligonucleotide
aguggagacuaggcuaggc

SEQ ID NO: 906943 - RNA, 19 nt, Artificial Sequence
  Description of Artificial Sequence: Synthetic oligonucleotide
uucguuuaaaaggaacuuu

SEQ ID NO: 906944 - RNA, 19 nt, Artificial Sequence
  Description of Artificial Sequence: Synthetic oligonucleotide
agcaccaugugccucgggu

SEQ ID NO: 906945 - RNA, 19 nt, Artificial Sequence
  Description of Artificial Sequence: Synthetic oligonucleotide
aguauguggugcucuccag

SEQ ID NO: 906946 - RNA, 19 nt, Artificial Sequence
  Description of Artificial Sequence: Synthetic oligonucleotide
uacgagcccacgcacuagc

SEQ ID NO: 906947 - RNA, 19 nt, Artificial Sequence
  Description of Artificial Sequence: Synthetic oligonucleotide
auguggugcucuccagggc

SEQ ID NO: 906948 - RNA, 19 nt, Artificial Sequence
  Description of Artificial Sequence: Synthetic oligonucleotide
gccaagacugggcaggugg

SEQ ID NO: 906949 - RNA, 19 nt, Artificial Sequence
  Description of Artificial Sequence: Synthetic oligonucleotide
gagaggauugaugggugag

SEQ ID NO: 906950 - RNA, 19 nt, Artificial Sequence
  Description of Artificial Sequence: Synthetic oligonucleotide
gagcuuguuggacacugac

SEQ ID NO: 906951 - RNA, 19 nt, Artificial Sequence
  Description of Artificial Sequence: Synthetic oligonucleotide
ugcuggaccugcuuguggu

SEQ ID NO: 906952 - RNA, 19 nt, Artificial Sequence
  Description of Artificial Sequence: Synthetic oligonucleotide
guuggacacugacuguugc

SEQ ID NO: 906953 - RNA, 19 nt, Artificial Sequence
  Description of Artificial Sequence: Synthetic oligonucleotide
gaguauguggugcucucca

SEQ ID NO: 906954 - RNA, 19 nt, Artificial Sequence
  Description of Artificial Sequence: Synthetic oligonucleotide
cgcacuagcaccaugugcc

SEQ ID NO: 906955 - RNA, 19 nt, Artificial Sequence
  Description of Artificial Sequence: Synthetic oligonucleotide
guuggguucagaugagguc

SEQ ID NO: 906956 - RNA, 19 nt, Artificial Sequence
  Description of Artificial Sequence: Synthetic oligonucleotide
ugugugggccaagacuggg

SEQ ID NO: 906957 - RNA, 19 nt, Artificial Sequence
  Description of Artificial Sequence: Synthetic oligonucleotide
uagucagcagcugcugagg

SEQ ID NO: 906958 - RNA, 19 nt, Artificial Sequence
  Description of Artificial Sequence: Synthetic oligonucleotide
gaggaggcuccgcaacugg

SEQ ID NO: 906959 - RNA, 19 nt, Artificial Sequence
  Description of Artificial Sequence: Synthetic oligonucleotide
aguggauaccacgcucccc

SEQ ID NO: 906960 - RNA, 19 nt, Artificial Sequence
  Description of Artificial Sequence: Synthetic oligonucleotide
gcggaugccauugacaaag

SEQ ID NO: 906961 - RNA, 19 nt, Artificial Sequence
  Description of Artificial Sequence: Synthetic oligonucleotide
ggaccugguacuguggugg

SEQ ID NO: 906962 - RNA, 19 nt, Artificial Sequence
  Description of Artificial Sequence: Synthetic oligonucleotide
cuuugagggacuccagguc

SEQ ID NO: 906963 - RNA, 19 nt, Artificial Sequence
  Description of Artificial Sequence: Synthetic oligonucleotide
gaccucgucagcuuggugu

SEQ ID NO: 906964 - RNA, 19 nt, Artificial Sequence
  Description of Artificial Sequence: Synthetic oligonucleotide
cuguggugcacggagcugg

SEQ ID NO: 906965 - RNA, 19 nt, Artificial Sequence
  Description of Artificial Sequence: Synthetic oligonucleotide
agugcaggggccccuggag

SEQ ID NO: 906966 - RNA, 19 nt, Artificial Sequence
  Description of Artificial Sequence: Synthetic oligonucleotide
ugugccucggguccuggcu

SEQ ID NO: 906967 - RNA, 19 nt, Artificial Sequence
  Description of Artificial Sequence: Synthetic oligonucleotide
ugcaccaggcucuccguug

SEQ ID NO: 906968 - RNA, 19 nt, Artificial Sequence
  Description of Artificial Sequence: Synthetic oligonucleotide
uggugaagugaaacuggac

SEQ ID NO: 906969 - RNA, 19 nt, Artificial Sequence
  Description of Artificial Sequence: Synthetic oligonucleotide
cacuuagguucccagggac

SEQ ID NO: 906970 - RNA, 19 nt, Artificial Sequence
  Description of Artificial Sequence: Synthetic oligonucleotide
guaugcgggaagugcacgc

SEQ ID NO: 906971 - RNA, 19 nt, Artificial Sequence
  Description of Artificial Sequence: Synthetic oligonucleotide
gauaccacgcuccccuauc

SEQ ID NO: 906972 - RNA, 19 nt, Artificial Sequence
  Description of Artificial Sequence: Synthetic oligonucleotide
cuucucaaacagaagccga

SEQ ID NO: 906973 - RNA, 19 nt, Artificial Sequence
  Description of Artificial Sequence: Synthetic oligonucleotide
gacucggugugucuggcca

SEQ ID NO: 906974 - RNA, 19 nt, Artificial Sequence
  Description of Artificial Sequence: Synthetic oligonucleotide
ccuaucuucugcaccaggc

SEQ ID NO: 906975 - RNA, 19 nt, Artificial Sequence
  Description of Artificial Sequence: Synthetic oligonucleotide
agacucggugugucuggcc

SEQ ID NO: 906976 - RNA, 19 nt, Artificial Sequence
  Description of Artificial Sequence: Synthetic oligonucleotide
accugcuugugguugguga

SEQ ID NO: 906977 - RNA, 19 nt, Artificial Sequence
  Description of Artificial Sequence: Synthetic oligonucleotide
ucgcauggggcuguaugcg

SEQ ID NO: 906978 - RNA, 19 nt, Artificial Sequence
  Description of Artificial Sequence: Synthetic oligonucleotide
caccaugugccucgggucc

SEQ ID NO: 906979 - RNA, 19 nt, Artificial Sequence
  Description of Artificial Sequence: Synthetic oligonucleotide
guagaggccuuugagggac

SEQ ID NO: 906980 - RNA, 19 nt, Artificial Sequence
  Description of Artificial Sequence: Synthetic oligonucleotide
acugagcugccgccgacag

SEQ ID NO: 906981 - RNA, 19 nt, Artificial Sequence
  Description of Artificial Sequence: Synthetic oligonucleotide
gaagcaggagguggcuugg

SEQ ID NO: 906982 - RNA, 19 nt, Artificial Sequence
  Description of Artificial Sequence: Synthetic oligonucleotide
ggggccgaaggauaggucc

SEQ ID NO: 906983 - RNA, 19 nt, Artificial Sequence
  Description of Artificial Sequence: Synthetic oligonucleotide
caugguucacauagaccug

SEQ ID NO: 906984 - RNA, 19 nt, Artificial Sequence
  Description of Artificial Sequence: Synthetic oligonucleotide
ugcgggaagugcacgcagc

SEQ ID NO: 906985 - RNA, 19 nt, Artificial Sequence
  Description of Artificial Sequence: Synthetic oligonucleotide
uucccagggaccugguacu

SEQ ID NO: 906986 - RNA, 19 nt, Artificial Sequence
  Description of Artificial Sequence: Synthetic oligonucleotide
gcugugugggccaagacug

SEQ ID NO: 906987 - RNA, 19 nt, Artificial Sequence
  Description of Artificial Sequence: Synthetic oligonucleotide
ugaguauguggugcucucc

SEQ ID NO: 906988 - RNA, 19 nt, Artificial Sequence
  Description of Artificial Sequence: Synthetic oligonucleotide
agcuuguuggagaggauug

SEQ ID NO: 906989 - RNA, 19 nt, Artificial Sequence
  Description of Artificial Sequence: Synthetic oligonucleotide
ccgacaggcaguacgagcc

SEQ ID NO: 906990 - RNA, 19 nt, Artificial Sequence
  Description of Artificial Sequence: Synthetic oligonucleotide
gacacugacuguugcccac

SEQ ID NO: 906991 - RNA, 19 nt, Artificial Sequence
  Description of Artificial Sequence: Synthetic oligonucleotide
cacagcacccugaggcugg

SEQ ID NO: 906992 - RNA, 19 nt, Artificial Sequence
  Description of Artificial Sequence: Synthetic oligonucleotide
ucuggccaaucuguucacg

SEQ ID NO: 906993 - RNA, 19 nt, Artificial Sequence
  Description of Artificial Sequence: Synthetic oligonucleotide
ugguucacauagaccuggc

SEQ ID NO: 906994 - RNA, 19 nt, Artificial Sequence
  Description of Artificial Sequence: Synthetic oligonucleotide
gaccauucuugaguuccgg

SEQ ID NO: 906995 - RNA, 19 nt, Artificial Sequence
  Description of Artificial Sequence: Synthetic oligonucleotide
ggagacuaggcuaggcugg

SEQ ID NO: 906996 - RNA, 19 nt, Artificial Sequence
  Description of Artificial Sequence: Synthetic oligonucleotide
auggagaaguggauaccac

SEQ ID NO: 906997 - RNA, 19 nt, Artificial Sequence
  Description of Artificial Sequence: Synthetic oligonucleotide
agaugaggagacagacucg

SEQ ID NO: 906998 - RNA, 19 nt, Artificial Sequence
  Description of Artificial Sequence: Synthetic oligonucleotide
uuguuggacacugacuguu

SEQ ID NO: 906999 - RNA, 19 nt, Artificial Sequence
  Description of Artificial Sequence: Synthetic oligonucleotide
gagacuaggcuaggcuggg

SEQ ID NO: 907000 - RNA, 19 nt, Artificial Sequence
  Description of Artificial Sequence: Synthetic oligonucleotide
caauggagaaguggauacc

SEQ ID NO: 907001 - RNA, 19 nt, Artificial Sequence
  Description of Artificial Sequence: Synthetic oligonucleotide
auggauggagccccaggcu

SEQ ID NO: 907002 - RNA, 19 nt, Artificial Sequence
  Description of Artificial Sequence: Synthetic oligonucleotide
gguggguuaaggaggaggc

SEQ ID NO: 907003 - RNA, 19 nt, Artificial Sequence
  Description of Artificial Sequence: Synthetic oligonucleotide
cacgcaucuucuugaaguc

SEQ ID NO: 907004 - RNA, 19 nt, Artificial Sequence
  Description of Artificial Sequence: Synthetic oligonucleotide
ugguacuguggugggacag

SEQ ID NO: 907005 - RNA, 19 nt, Artificial Sequence
  Description of Artificial Sequence: Synthetic oligonucleotide
gcucacaucuacugguugc

SEQ ID NO: 907006 - RNA, 19 nt, Artificial Sequence
  Description of Artificial Sequence: Synthetic oligonucleotide
uggagccccaggcugugca

SEQ ID NO: 907007 - RNA, 19 nt, Artificial Sequence
  Description of Artificial Sequence: Synthetic oligonucleotide
uaaggaggaggcuccgcaa

SEQ ID NO: 907008 - RNA, 19 nt, Artificial Sequence
  Description of Artificial Sequence: Synthetic oligonucleotide
uggggcuguaugcgggaag

SEQ ID NO: 907009 - RNA, 19 nt, Artificial Sequence
  Description of Artificial Sequence: Synthetic oligonucleotide
gguaccccagucuggggcg

SEQ ID NO: 907010 - RNA, 19 nt, Artificial Sequence
  Description of Artificial Sequence: Synthetic oligonucleotide
cgguagaggccuuugaggg

SEQ ID NO: 907011 - RNA, 19 nt, Artificial Sequence
  Description of Artificial Sequence: Synthetic oligonucleotide
cagucuggggcgguggugg

SEQ ID NO: 907012 - RNA, 19 nt, Artificial Sequence
  Description of Artificial Sequence: Synthetic oligonucleotide
aguacgagcccacgcacua

SEQ ID NO: 907013 - RNA, 19 nt, Artificial Sequence
  Description of Artificial Sequence: Synthetic oligonucleotide
cuguaugcgggaagugcac

SEQ ID NO: 907014 - RNA, 19 nt, Artificial Sequence
  Description of Artificial Sequence: Synthetic oligonucleotide
ggaaggaccacugacccca

SEQ ID NO: 907015 - RNA, 19 nt, Artificial Sequence
  Description of Artificial Sequence: Synthetic oligonucleotide
ggaguuguggccccagcug

SEQ ID NO: 907016 - RNA, 19 nt, Artificial Sequence
  Description of Artificial Sequence: Synthetic oligonucleotide
uaugcgggaagugcacgca

SEQ ID NO: 907017 - RNA, 19 nt, Artificial Sequence
  Description of Artificial Sequence: Synthetic oligonucleotide
auaccacgcuccccuaucu

SEQ ID NO: 907018 - RNA, 19 nt, Artificial Sequence
  Description of Artificial Sequence: Synthetic oligonucleotide
gcggugguggguuaaggag

SEQ ID NO: 907019 - RNA, 19 nt, Artificial Sequence
  Description of Artificial Sequence: Synthetic oligonucleotide
gaggauugaugggugagaa

SEQ ID NO: 907020 - RNA, 19 nt, Artificial Sequence
  Description of Artificial Sequence: Synthetic oligonucleotide
agaggauugaugggugaga

SEQ ID NO: 907021 - RNA, 19 nt, Artificial Sequence
  Description of Artificial Sequence: Synthetic oligonucleotide
gcuggcagcuuucuuggag

SEQ ID NO: 907022 - RNA, 19 nt, Artificial Sequence
  Description of Artificial Sequence: Synthetic oligonucleotide
aggaccccacuccaggcca

SEQ ID NO: 907023 - RNA, 19 nt, Artificial Sequence
  Description of Artificial Sequence: Synthetic oligonucleotide
guggauaccacgcuccccu

SEQ ID NO: 907024 - RNA, 19 nt, Artificial Sequence
  Description of Artificial Sequence: Synthetic oligonucleotide
acucgaggaccccacucca

SEQ ID NO: 907025 - RNA, 19 nt, Artificial Sequence
  Description of Artificial Sequence: Synthetic oligonucleotide
gccgccgacaggcaguacg

SEQ ID NO: 907026 - RNA, 19 nt, Artificial Sequence
  Description of Artificial Sequence: Synthetic oligonucleotide
cucgucagcuugguguuag

SEQ ID NO: 907027 - RNA, 19 nt, Artificial Sequence
  Description of Artificial Sequence: Synthetic oligonucleotide
gaguugcagaugaggagac

SEQ ID NO: 907028 - RNA, 19 nt, Artificial Sequence
  Description of Artificial Sequence: Synthetic oligonucleotide
aggauagguccagaaggug

SEQ ID NO: 907029 - RNA, 19 nt, Artificial Sequence
  Description of Artificial Sequence: Synthetic oligonucleotide
cagagaccucgucagcuug

SEQ ID NO: 907030 - RNA, 19 nt, Artificial Sequence
  Description of Artificial Sequence: Synthetic oligonucleotide
ggaugccauugacaaagcc

SEQ ID NO: 907031 - RNA, 19 nt, Artificial Sequence
  Description of Artificial Sequence: Synthetic oligonucleotide
ugccugcauggauggagcc

SEQ ID NO: 907032 - RNA, 19 nt, Artificial Sequence
  Description of Artificial Sequence: Synthetic oligonucleotide
aucuacugguugcugcaau

SEQ ID NO: 907033 - RNA, 19 nt, Artificial Sequence
  Description of Artificial Sequence: Synthetic oligonucleotide
ucacaucuacugguugcug

SEQ ID NO: 907034 - RNA, 19 nt, Artificial Sequence
  Description of Artificial Sequence: Synthetic oligonucleotide
gcgaguugcagaugaggag

SEQ ID NO: 907035 - RNA, 19 nt, Artificial Sequence
  Description of Artificial Sequence: Synthetic oligonucleotide
gaagcugugugggccaaga

SEQ ID NO: 907036 - RNA, 19 nt, Artificial Sequence
  Description of Artificial Sequence: Synthetic oligonucleotide
cacgcaccucgcauggggc

SEQ ID NO: 907037 - RNA, 19 nt, Artificial Sequence
  Description of Artificial Sequence: Synthetic oligonucleotide
gcuugguccuccagaaugg

SEQ ID NO: 907038 - RNA, 19 nt, Artificial Sequence
  Description of Artificial Sequence: Synthetic oligonucleotide
agccugaguauguggugcu

SEQ ID NO: 907039 - RNA, 19 nt, Artificial Sequence
  Description of Artificial Sequence: Synthetic oligonucleotide
uguggugcacggagcugga

SEQ ID NO: 907040 - RNA, 19 nt, Artificial Sequence
  Description of Artificial Sequence: Synthetic oligonucleotide
aggaacuuuauuggguguu

SEQ ID NO: 907041 - RNA, 19 nt, Artificial Sequence
  Description of Artificial Sequence: Synthetic oligonucleotide
ggguaccccagucuggggc

SEQ ID NO: 907042 - RNA, 19 nt, Artificial Sequence
  Description of Artificial Sequence: Synthetic oligonucleotide
ugagaagcgugggccaagu

SEQ ID NO: 907043 - RNA, 19 nt, Artificial Sequence
  Description of Artificial Sequence: Synthetic oligonucleotide
guuggccccaggguucugg

SEQ ID NO: 907044 - RNA, 19 nt, Artificial Sequence
  Description of Artificial Sequence: Synthetic oligonucleotide
ugggccaaguccagccuuc

SEQ ID NO: 907045 - RNA, 19 nt, Artificial Sequence
  Description of Artificial Sequence: Synthetic oligonucleotide
gaggcugcaggugguggag

SEQ ID NO: 907046 - RNA, 19 nt, Artificial Sequence
  Description of Artificial Sequence: Synthetic oligonucleotide
agacagacucggugugucu

SEQ ID NO: 907047 - RNA, 19 nt, Artificial Sequence
  Description of Artificial Sequence: Synthetic oligonucleotide
cucgaggaccccacuccag

SEQ ID NO: 907048 - RNA, 19 nt, Artificial Sequence
  Description of Artificial Sequence: Synthetic oligonucleotide
gaccuggcggaugccauug

SEQ ID NO: 907049 - RNA, 19 nt, Artificial Sequence
  Description of Artificial Sequence: Synthetic oligonucleotide
ggaacuuuauuggguguug

SEQ ID NO: 907050 - RNA, 19 nt, Artificial Sequence
  Description of Artificial Sequence: Synthetic oligonucleotide
aguuguggccccagcuggg

SEQ ID NO: 907051 - RNA, 19 nt, Artificial Sequence
  Description of Artificial Sequence: Synthetic oligonucleotide
ccuggcucacaucuacugg

SEQ ID NO: 907052 - RNA, 19 nt, Artificial Sequence
  Description of Artificial Sequence: Synthetic oligonucleotide
cuggcggaugccauugaca

SEQ ID NO: 907053 - RNA, 19 nt, Artificial Sequence
  Description of Artificial Sequence: Synthetic oligonucleotide
agcgugggccaaguccagc

SEQ ID NO: 907054 - RNA, 19 nt, Artificial Sequence
  Description of Artificial Sequence: Synthetic oligonucleotide
ggcuguaugcgggaagugc

SEQ ID NO: 907055 - RNA, 19 nt, Artificial Sequence
  Description of Artificial Sequence: Synthetic oligonucleotide
cucgcuugguccuccagaa

SEQ ID NO: 907056 - RNA, 19 nt, Artificial Sequence
  Description of Artificial Sequence: Synthetic oligonucleotide
ggcaguacgagcccacgca

SEQ ID NO: 907057 - RNA, 19 nt, Artificial Sequence
  Description of Artificial Sequence: Synthetic oligonucleotide
guuucuggggccacugcuc

SEQ ID NO: 907058 - RNA, 19 nt, Artificial Sequence
  Description of Artificial Sequence: Synthetic oligonucleotide
uuagguucccagggaccug

SEQ ID NO: 907059 - RNA, 19 nt, Artificial Sequence
  Description of Artificial Sequence: Synthetic oligonucleotide
ugccacucgaggaccccac

SEQ ID NO: 907060 - RNA, 19 nt, Artificial Sequence
  Description of Artificial Sequence: Synthetic oligonucleotide
agguggaggguggaggagu

SEQ ID NO: 907061 - RNA, 19 nt, Artificial Sequence
  Description of Artificial Sequence: Synthetic oligonucleotide
cuggcucacaucuacuggu

SEQ ID NO: 907062 - RNA, 19 nt, Artificial Sequence
  Description of Artificial Sequence: Synthetic oligonucleotide
auagaccuggcaaggcaga

SEQ ID NO: 907063 - RNA, 19 nt, Artificial Sequence
  Description of Artificial Sequence: Synthetic oligonucleotide
cgaaggauagguccagaag

SEQ ID NO: 907064 - RNA, 19 nt, Artificial Sequence
  Description of Artificial Sequence: Synthetic oligonucleotide
guggagacuaggcuaggcu

SEQ ID NO: 907065 - RNA, 19 nt, Artificial Sequence
  Description of Artificial Sequence: Synthetic oligonucleotide
gugggccaagacugggcag

SEQ ID NO: 907066 - RNA, 19 nt, Artificial Sequence
  Description of Artificial Sequence: Synthetic oligonucleotide
ggguuaaggaggaggcucc

SEQ ID NO: 907067 - RNA, 19 nt, Artificial Sequence
  Description of Artificial Sequence: Synthetic oligonucleotide
ugcauggauggagccccag

SEQ ID NO: 907068 - RNA, 19 nt, Artificial Sequence
  Description of Artificial Sequence: Synthetic oligonucleotide
ggcgaguugcagaugagga

SEQ ID NO: 907069 - RNA, 19 nt, Artificial Sequence
  Description of Artificial Sequence: Synthetic oligonucleotide
uagcaccaugugccucggg

SEQ ID NO: 907070 - RNA, 19 nt, Artificial Sequence
  Description of Artificial Sequence: Synthetic oligonucleotide
ggcuaggcugggaagcagg

SEQ ID NO: 907071 - RNA, 19 nt, Artificial Sequence
  Description of Artificial Sequence: Synthetic oligonucleotide
cacgcacuagcaccaugug

SEQ ID NO: 907072 - RNA, 19 nt, Artificial Sequence
  Description of Artificial Sequence: Synthetic oligonucleotide
gggcgaguugcagaugagg

SEQ ID NO: 907073 - RNA, 19 nt, Artificial Sequence
  Description of Artificial Sequence: Synthetic oligonucleotide
gaguuccggaacagagggc

SEQ ID NO: 907074 - RNA, 19 nt, Artificial Sequence
  Description of Artificial Sequence: Synthetic oligonucleotide
acgcaucuucuugaaguca

SEQ ID NO: 907075 - RNA, 19 nt, Artificial Sequence
  Description of Artificial Sequence: Synthetic oligonucleotide
auagguccagaagguggug

SEQ ID NO: 907076 - RNA, 19 nt, Artificial Sequence
  Description of Artificial Sequence: Synthetic oligonucleotide
cuaucuucugcaccaggcu

SEQ ID NO: 907077 - RNA, 19 nt, Artificial Sequence
  Description of Artificial Sequence: Synthetic oligonucleotide
gauggagccccaggcugug

SEQ ID NO: 907078 - RNA, 19 nt, Artificial Sequence
  Description of Artificial Sequence: Synthetic oligonucleotide
gugggugccaggccuguuc

SEQ ID NO: 907079 - RNA, 19 nt, Artificial Sequence
  Description of Artificial Sequence: Synthetic oligonucleotide
ggcucacaucuacugguug

SEQ ID NO: 907080 - RNA, 19 nt, Artificial Sequence
  Description of Artificial Sequence: Synthetic oligonucleotide
ucgucagcuugguguuagc

SEQ ID NO: 907081 - RNA, 19 nt, Artificial Sequence
  Description of Artificial Sequence: Synthetic oligonucleotide
gguagucagcagcugcuga

SEQ ID NO: 907082 - RNA, 19 nt, Artificial Sequence
  Description of Artificial Sequence: Synthetic oligonucleotide
gccgacaggcaguacgagc

SEQ ID NO: 907083 - RNA, 19 nt, Artificial Sequence
  Description of Artificial Sequence: Synthetic oligonucleotide
gccacugcucuguuuucag

SEQ ID NO: 907084 - RNA, 19 nt, Artificial Sequence
  Description of Artificial Sequence: Synthetic oligonucleotide
cugggcuggggaaggacca

SEQ ID NO: 907085 - RNA, 19 nt, Artificial Sequence
  Description of Artificial Sequence: Synthetic oligonucleotide
acgcaccucgcauggggcu

SEQ ID NO: 907086 - RNA, 19 nt, Artificial Sequence
  Description of Artificial Sequence: Synthetic oligonucleotide
cuuagguucccagggaccu

SEQ ID NO: 907087 - RNA, 19 nt, Artificial Sequence
  Description of Artificial Sequence: Synthetic oligonucleotide
agaccucgucagcuuggug

SEQ ID NO: 907088 - RNA, 19 nt, Artificial Sequence
  Description of Artificial Sequence: Synthetic oligonucleotide
gcuguaugcgggaagugca

SEQ ID NO: 907089 - RNA, 19 nt, Artificial Sequence
  Description of Artificial Sequence: Synthetic oligonucleotide
uggggccgaaggauagguc

SEQ ID NO: 907090 - RNA, 19 nt, Artificial Sequence
  Description of Artificial Sequence: Synthetic oligonucleotide
cugagcugccgccgacagg

SEQ ID NO: 907091 - RNA, 19 nt, Artificial Sequence
  Description of Artificial Sequence: Synthetic oligonucleotide
ggaccauucuugaguuccg

SEQ ID NO: 907092 - RNA, 19 nt, Artificial Sequence
  Description of Artificial Sequence: Synthetic oligonucleotide
ggagccccaagcugggcug

SEQ ID NO: 907093 - RNA, 19 nt, Artificial Sequence
  Description of Artificial Sequence: Synthetic oligonucleotide
cuagcaccaugugccucgg

SEQ ID NO: 907094 - RNA, 19 nt, Artificial Sequence
  Description of Artificial Sequence: Synthetic oligonucleotide
caggcaguacgagcccacg

SEQ ID NO: 907095 - RNA, 19 nt, Artificial Sequence
  Description of Artificial Sequence: Synthetic oligonucleotide
agccgaagggcuggcagcu

SEQ ID NO: 907096 - RNA, 19 nt, Artificial Sequence
  Description of Artificial Sequence: Synthetic oligonucleotide
gcaguacgagcccacgcac

SEQ ID NO: 907097 - RNA, 19 nt, Artificial Sequence
  Description of Artificial Sequence: Synthetic oligonucleotide
agagggcccaggguaguca

SEQ ID NO: 907098 - RNA, 19 nt, Artificial Sequence
  Description of Artificial Sequence: Synthetic oligonucleotide
gugaaacuggaccauucuu

SEQ ID NO: 907099 - RNA, 19 nt, Artificial Sequence
  Description of Artificial Sequence: Synthetic oligonucleotide
gugagaagcgugggccaag

SEQ ID NO: 907100 - RNA, 19 nt, Artificial Sequence
  Description of Artificial Sequence: Synthetic oligonucleotide
gguucacauagaccuggca

SEQ ID NO: 907101 - RNA, 19 nt, Artificial Sequence
  Description of Artificial Sequence: Synthetic oligonucleotide
gagccccaagcugggcugg

SEQ ID NO: 907102 - RNA, 19 nt, Artificial Sequence
  Description of Artificial Sequence: Synthetic oligonucleotide
ccugccugcauggauggag

SEQ ID NO: 907103 - RNA, 19 nt, Artificial Sequence
  Description of Artificial Sequence: Synthetic oligonucleotide
ucuggggcggugguggguu

SEQ ID NO: 907104 - RNA, 19 nt, Artificial Sequence
  Description of Artificial Sequence: Synthetic oligonucleotide
cagacucggugugucuggc

SEQ ID NO: 907105 - RNA, 19 nt, Artificial Sequence
  Description of Artificial Sequence: Synthetic oligonucleotide
uaccacgcuccccuaucuu

SEQ ID NO: 907106 - RNA, 19 nt, Artificial Sequence
  Description of Artificial Sequence: Synthetic oligonucleotide
guaccuuguggcuggggcu

SEQ ID NO: 907107 - RNA, 19 nt, Artificial Sequence
  Description of Artificial Sequence: Synthetic oligonucleotide
ccauucuugaguuccggaa

SEQ ID NO: 907108 - RNA, 19 nt, Artificial Sequence
  Description of Artificial Sequence: Synthetic oligonucleotide
gcgggaagugcacgcagcc

SEQ ID NO: 907109 - RNA, 19 nt, Artificial Sequence
  Description of Artificial Sequence: Synthetic oligonucleotide
gguucagaugagguccaug

SEQ ID NO: 907110 - RNA, 19 nt, Artificial Sequence
  Description of Artificial Sequence: Synthetic oligonucleotide
guacgagcccacgcacuag

SEQ ID NO: 907111 - RNA, 19 nt, Artificial Sequence
  Description of Artificial Sequence: Synthetic oligonucleotide
aagcgugggccaaguccag

SEQ ID NO: 907112 - RNA, 19 nt, Artificial Sequence
  Description of Artificial Sequence: Synthetic oligonucleotide
guaguaccuuguggcuggg

SEQ ID NO: 907113 - RNA, 19 nt, Artificial Sequence
  Description of Artificial Sequence: Synthetic oligonucleotide
ugaccuggcggaugccauu

SEQ ID NO: 907114 - RNA, 19 nt, Artificial Sequence
  Description of Artificial Sequence: Synthetic oligonucleotide
agggcuggcaggagguaug

SEQ ID NO: 907115 - RNA, 19 nt, Artificial Sequence
  Description of Artificial Sequence: Synthetic oligonucleotide
cuuguuggacacugacugu

SEQ ID NO: 907116 - RNA, 19 nt, Artificial Sequence
  Description of Artificial Sequence: Synthetic oligonucleotide
ccucgcauggggcuguaug

SEQ ID NO: 907117 - RNA, 19 nt, Artificial Sequence
  Description of Artificial Sequence: Synthetic oligonucleotide
gagggacuccagguccuug

SEQ ID NO: 907118 - RNA, 19 nt, Artificial Sequence
  Description of Artificial Sequence: Synthetic oligonucleotide
ggacacugacuguugccca

SEQ ID NO: 907119 - RNA, 19 nt, Artificial Sequence
  Description of Artificial Sequence: Synthetic oligonucleotide
cauggggcuguaugcggga

SEQ ID NO: 907120 - RNA, 19 nt, Artificial Sequence
  Description of Artificial Sequence: Synthetic oligonucleotide
ucgcuugguccuccagaau

SEQ ID NO: 907121 - RNA, 19 nt, Artificial Sequence
  Description of Artificial Sequence: Synthetic oligonucleotide
ggugguggguuaaggagga

SEQ ID NO: 907122 - RNA, 19 nt, Artificial Sequence
  Description of Artificial Sequence: Synthetic oligonucleotide
gugcagugggugccaggcc

SEQ ID NO: 907123 - RNA, 19 nt, Artificial Sequence
  Description of Artificial Sequence: Synthetic oligonucleotide
gcaucugaccuggcagugg

SEQ ID NO: 907124 - RNA, 19 nt, Artificial Sequence
  Description of Artificial Sequence: Synthetic oligonucleotide
caguggagcccgcugggga

SEQ ID NO: 907125 - RNA, 19 nt, Artificial Sequence
  Description of Artificial Sequence: Synthetic oligonucleotide
gaccccacuccaggccagg

SEQ ID NO: 907126 - RNA, 19 nt, Artificial Sequence
  Description of Artificial Sequence: Synthetic oligonucleotide
cccuguagccacagaggcc

SEQ ID NO: 907127 - RNA, 19 nt, Artificial Sequence
  Description of Artificial Sequence: Synthetic oligonucleotide
gacugagcugccgccgaca

SEQ ID NO: 907128 - RNA, 19 nt, Artificial Sequence
  Description of Artificial Sequence: Synthetic oligonucleotide
guaccccagucuggggcgg

SEQ ID NO: 907129 - RNA, 19 nt, Artificial Sequence
  Description of Artificial Sequence: Synthetic oligonucleotide
gaccugcuugugguuggug

SEQ ID NO: 907130 - RNA, 19 nt, Artificial Sequence
  Description of Artificial Sequence: Synthetic oligonucleotide
gggcuguuccuggaggacc

SEQ ID NO: 907131 - RNA, 19 nt, Artificial Sequence
  Description of Artificial Sequence: Synthetic oligonucleotide
gcaccaugugccucggguc

SEQ ID NO: 907132 - RNA, 19 nt, Artificial Sequence
  Description of Artificial Sequence: Synthetic oligonucleotide
uggauaccacgcuccccua

SEQ ID NO: 907133 - RNA, 19 nt, Artificial Sequence
  Description of Artificial Sequence: Synthetic oligonucleotide
caggggccacaguggagac

SEQ ID NO: 907134 - RNA, 19 nt, Artificial Sequence
  Description of Artificial Sequence: Synthetic oligonucleotide
uggggccacagugccugcc

SEQ ID NO: 907135 - RNA, 19 nt, Artificial Sequence
  Description of Artificial Sequence: Synthetic oligonucleotide
agcccacgcacuagcacca

SEQ ID NO: 907136 - RNA, 19 nt, Artificial Sequence
  Description of Artificial Sequence: Synthetic oligonucleotide
cccuaucuucugcaccagg

SEQ ID NO: 907137 - RNA, 19 nt, Artificial Sequence
  Description of Artificial Sequence: Synthetic oligonucleotide
caugugccucggguccugg

SEQ ID NO: 907138 - RNA, 19 nt, Artificial Sequence
  Description of Artificial Sequence: Synthetic oligonucleotide
ggcucuccguugugcagcc

SEQ ID NO: 907139 - RNA, 19 nt, Artificial Sequence
  Description of Artificial Sequence: Synthetic oligonucleotide
gcacuuagguucccaggga

SEQ ID NO: 907140 - RNA, 19 nt, Artificial Sequence
  Description of Artificial Sequence: Synthetic oligonucleotide
uggaggaguuguggcccca

SEQ ID NO: 907141 - RNA, 19 nt, Artificial Sequence
  Description of Artificial Sequence: Synthetic oligonucleotide
gagcccgcuggggaagcug

SEQ ID NO: 907142 - RNA, 19 nt, Artificial Sequence
  Description of Artificial Sequence: Synthetic oligonucleotide
cgaguugcagaugaggaga

SEQ ID NO: 907143 - RNA, 19 nt, Artificial Sequence
  Description of Artificial Sequence: Synthetic oligonucleotide
agcugccuucucaaacaga

SEQ ID NO: 907144 - RNA, 19 nt, Artificial Sequence
  Description of Artificial Sequence: Synthetic oligonucleotide
gggcccacuccugaagcag

SEQ ID NO: 907145 - RNA, 19 nt, Artificial Sequence
  Description of Artificial Sequence: Synthetic oligonucleotide
caggguucuggggccgaag

SEQ ID NO: 907146 - RNA, 19 nt, Artificial Sequence
  Description of Artificial Sequence: Synthetic oligonucleotide
cuuguuggagaggauugau

SEQ ID NO: 907147 - RNA, 19 nt, Artificial Sequence
  Description of Artificial Sequence: Synthetic oligonucleotide
ccccaggcugugcaguggg

SEQ ID NO: 907148 - RNA, 19 nt, Artificial Sequence
  Description of Artificial Sequence: Synthetic oligonucleotide
gccuggguaguaccuugug

SEQ ID NO: 907149 - RNA, 19 nt, Artificial Sequence
  Description of Artificial Sequence: Synthetic oligonucleotide
gggguaccccagucugggg

SEQ ID NO: 907150 - RNA, 19 nt, Artificial Sequence
  Description of Artificial Sequence: Synthetic oligonucleotide
ugaugcgguagaggccuuu

SEQ ID NO: 907151 - RNA, 19 nt, Artificial Sequence
  Description of Artificial Sequence: Synthetic oligonucleotide
gcuuguuggagaggauuga

SEQ ID NO: 907152 - RNA, 19 nt, Artificial Sequence
  Description of Artificial Sequence: Synthetic oligonucleotide
ggguagucagcagcugcug

SEQ ID NO: 907153 - RNA, 19 nt, Artificial Sequence
  Description of Artificial Sequence: Synthetic oligonucleotide
gguugcugcaauggcucca

SEQ ID NO: 907154 - RNA, 19 nt, Artificial Sequence
  Description of Artificial Sequence: Synthetic oligonucleotide
guacuguggugggacaggu

SEQ ID NO: 907155 - RNA, 19 nt, Artificial Sequence
  Description of Artificial Sequence: Synthetic oligonucleotide
guggugcacggagcuggag

SEQ ID NO: 907156 - RNA, 19 nt, Artificial Sequence
  Description of Artificial Sequence: Synthetic oligonucleotide
guggaggguggaggaguug

SEQ ID NO: 907157 - RNA, 19 nt, Artificial Sequence
  Description of Artificial Sequence: Synthetic oligonucleotide
gggcccaggguagucagca

SEQ ID NO: 907158 - RNA, 19 nt, Artificial Sequence
  Description of Artificial Sequence: Synthetic oligonucleotide
ucggugugucuggccaauc

SEQ ID NO: 907159 - RNA, 19 nt, Artificial Sequence
  Description of Artificial Sequence: Synthetic oligonucleotide
acgagcccacgcacuagca

SEQ ID NO: 907160 - RNA, 19 nt, Artificial Sequence
  Description of Artificial Sequence: Synthetic oligonucleotide
gccaaucuguucacgcauc

SEQ ID NO: 907161 - RNA, 19 nt, Artificial Sequence
  Description of Artificial Sequence: Synthetic oligonucleotide
caguacgagcccacgcacu

SEQ ID NO: 907162 - RNA, 19 nt, Artificial Sequence
  Description of Artificial Sequence: Synthetic oligonucleotide
cgaggaccccacuccaggc

SEQ ID NO: 907163 - RNA, 19 nt, Artificial Sequence
  Description of Artificial Sequence: Synthetic oligonucleotide
gcaauggcuccagcagggc

SEQ ID NO: 907164 - RNA, 19 nt, Artificial Sequence
  Description of Artificial Sequence: Synthetic oligonucleotide
cucugaugugguggaggca

SEQ ID NO: 907165 - RNA, 19 nt, Artificial Sequence
  Description of Artificial Sequence: Synthetic oligonucleotide
ccgaaggauagguccagaa

SEQ ID NO: 907166 - RNA, 19 nt, Artificial Sequence
  Description of Artificial Sequence: Synthetic oligonucleotide
agccaccugagcagcacuu

SEQ ID NO: 907167 - RNA, 19 nt, Artificial Sequence
  Description of Artificial Sequence: Synthetic oligonucleotide
gggacugagcugccgccga

SEQ ID NO: 907168 - RNA, 19 nt, Artificial Sequence
  Description of Artificial Sequence: Synthetic oligonucleotide
ggcuguggugcacggagcu

SEQ ID NO: 907169 - RNA, 19 nt, Artificial Sequence
  Description of Artificial Sequence: Synthetic oligonucleotide
gagaccucgucagcuuggu

SEQ ID NO: 907170 - RNA, 19 nt, Artificial Sequence
  Description of Artificial Sequence: Synthetic oligonucleotide
caccaggcucuccguugug

SEQ ID NO: 907171 - RNA, 19 nt, Artificial Sequence
  Description of Artificial Sequence: Synthetic oligonucleotide
ccggcuggggaccggcccg

SEQ ID NO: 907172 - RNA, 19 nt, Artificial Sequence
  Description of Artificial Sequence: Synthetic oligonucleotide
cagagggcccaggguaguc

SEQ ID NO: 907173 - RNA, 19 nt, Artificial Sequence
  Description of Artificial Sequence: Synthetic oligonucleotide
ggacugagcugccgccgac

SEQ ID NO: 907174 - RNA, 19 nt, Artificial Sequence
  Description of Artificial Sequence: Synthetic oligonucleotide
ggugagaagcgugggccaa

SEQ ID NO: 907175 - RNA, 19 nt, Artificial Sequence
  Description of Artificial Sequence: Synthetic oligonucleotide
caggagccccaagcugggc

SEQ ID NO: 907176 - RNA, 19 nt, Artificial Sequence
  Description of Artificial Sequence: Synthetic oligonucleotide
ccacgcacuagcaccaugu

SEQ ID NO: 907177 - RNA, 19 nt, Artificial Sequence
  Description of Artificial Sequence: Synthetic oligonucleotide
ggaggcccaggagccaaug

SEQ ID NO: 907178 - RNA, 19 nt, Artificial Sequence
  Description of Artificial Sequence: Synthetic oligonucleotide
ggggcccacuccugaagca

SEQ ID NO: 907179 - RNA, 19 nt, Artificial Sequence
  Description of Artificial Sequence: Synthetic oligonucleotide
guggguuaaggaggaggcu

SEQ ID NO: 907180 - RNA, 19 nt, Artificial Sequence
  Description of Artificial Sequence: Synthetic oligonucleotide
ggccuggaagugccugcug

SEQ ID NO: 907181 - RNA, 19 nt, Artificial Sequence
  Description of Artificial Sequence: Synthetic oligonucleotide
ggccaggagcuuguuggac

SEQ ID NO: 907182 - RNA, 19 nt, Artificial Sequence
  Description of Artificial Sequence: Synthetic oligonucleotide
ggcagccuccacagcauuc

SEQ ID NO: 907183 - RNA, 19 nt, Artificial Sequence
  Description of Artificial Sequence: Synthetic oligonucleotide
ccgcuggggaagcugugug

SEQ ID NO: 907184 - RNA, 19 nt, Artificial Sequence
  Description of Artificial Sequence: Synthetic oligonucleotide
ccacagcauucugugcagc

SEQ ID NO: 907185 - RNA, 19 nt, Artificial Sequence
  Description of Artificial Sequence: Synthetic oligonucleotide
cugcauggauggagcccca

SEQ ID NO: 907186 - RNA, 19 nt, Artificial Sequence
  Description of Artificial Sequence: Synthetic oligonucleotide
caggcccggcuggggaccg

SEQ ID NO: 907187 - RNA, 19 nt, Artificial Sequence
  Description of Artificial Sequence: Synthetic oligonucleotide
cuggggccgaaggauaggu

SEQ ID NO: 907188 - RNA, 19 nt, Artificial Sequence
  Description of Artificial Sequence: Synthetic oligonucleotide
cgagcccacgcacuagcac

SEQ ID NO: 907189 - RNA, 19 nt, Artificial Sequence
  Description of Artificial Sequence: Synthetic oligonucleotide
cauugcccaugaugcggua

SEQ ID NO: 907190 - RNA, 19 nt, Artificial Sequence
  Description of Artificial Sequence: Synthetic oligonucleotide
ggcggaugccauugacaaa

SEQ ID NO: 907191 - RNA, 19 nt, Artificial Sequence
  Description of Artificial Sequence: Synthetic oligonucleotide
ggggcgaguugcagaugag

SEQ ID NO: 907192 - RNA, 19 nt, Artificial Sequence
  Description of Artificial Sequence: Synthetic oligonucleotide
gugggccaaguccagccuu

SEQ ID NO: 907193 - RNA, 19 nt, Artificial Sequence
  Description of Artificial Sequence: Synthetic oligonucleotide
ccuuguuggugaagugaaa

SEQ ID NO: 907194 - RNA, 19 nt, Artificial Sequence
  Description of Artificial Sequence: Synthetic oligonucleotide
ccacaguggagacuaggcu

SEQ ID NO: 907195 - RNA, 19 nt, Artificial Sequence
  Description of Artificial Sequence: Synthetic oligonucleotide
ccaaucuguucacgcaucu

SEQ ID NO: 907196 - RNA, 19 nt, Artificial Sequence
  Description of Artificial Sequence: Synthetic oligonucleotide
ggugcucuccagggcuggc

SEQ ID NO: 907197 - RNA, 19 nt, Artificial Sequence
  Description of Artificial Sequence: Synthetic oligonucleotide
ggaccccacuccaggccag

SEQ ID NO: 907198 - RNA, 19 nt, Artificial Sequence
  Description of Artificial Sequence: Synthetic oligonucleotide
gccugggacugagcugccg

SEQ ID NO: 907199 - RNA, 19 nt, Artificial Sequence
  Description of Artificial Sequence: Synthetic oligonucleotide
gcucuguuuucagguuuuc

SEQ ID NO: 907200 - RNA, 19 nt, Artificial Sequence
  Description of Artificial Sequence: Synthetic oligonucleotide
cccaggguagucagcagcu

SEQ ID NO: 907201 - RNA, 19 nt, Artificial Sequence
  Description of Artificial Sequence: Synthetic oligonucleotide
ccgccgacaggcaguacga

SEQ ID NO: 907202 - RNA, 19 nt, Artificial Sequence
  Description of Artificial Sequence: Synthetic oligonucleotide
ggauaccacgcuccccuau

SEQ ID NO: 907203 - RNA, 19 nt, Artificial Sequence
  Description of Artificial Sequence: Synthetic oligonucleotide
ccccagcuggggcugcccc

SEQ ID NO: 907204 - RNA, 19 nt, Artificial Sequence
  Description of Artificial Sequence: Synthetic oligonucleotide
cgaagggcuggcagcuuuc

SEQ ID NO: 907205 - RNA, 19 nt, Artificial Sequence
  Description of Artificial Sequence: Synthetic oligonucleotide
ggauggagccccaggcugu

SEQ ID NO: 907206 - RNA, 19 nt, Artificial Sequence
  Description of Artificial Sequence: Synthetic oligonucleotide
gcacuagcaccaugugccu

SEQ ID NO: 907207 - RNA, 19 nt, Artificial Sequence
  Description of Artificial Sequence: Synthetic oligonucleotide
gguucccagggaccuggua

SEQ ID NO: 907208 - RNA, 19 nt, Artificial Sequence
  Description of Artificial Sequence: Synthetic oligonucleotide
gcaggcccggcuggggacc

SEQ ID NO: 907209 - RNA, 19 nt, Artificial Sequence
  Description of Artificial Sequence: Synthetic oligonucleotide
cagccaccugagcagcacu

SEQ ID NO: 907210 - RNA, 19 nt, Artificial Sequence
  Description of Artificial Sequence: Synthetic oligonucleotide
gcacccugaggcuggggcu

SEQ ID NO: 907211 - RNA, 19 nt, Artificial Sequence
  Description of Artificial Sequence: Synthetic oligonucleotide
ccugaguauguggugcucu

SEQ ID NO: 907212 - RNA, 19 nt, Artificial Sequence
  Description of Artificial Sequence: Synthetic oligonucleotide
cgggaagugcacgcagccc

SEQ ID NO: 907213 - RNA, 19 nt, Artificial Sequence
  Description of Artificial Sequence: Synthetic oligonucleotide
ccacgcuccccuaucuucu

SEQ ID NO: 907214 - RNA, 19 nt, Artificial Sequence
  Description of Artificial Sequence: Synthetic oligonucleotide
gccugaguauguggugcuc

SEQ ID NO: 907215 - RNA, 19 nt, Artificial Sequence
  Description of Artificial Sequence: Synthetic oligonucleotide
ccagucuggggcgguggug

SEQ ID NO: 907216 - RNA, 19 nt, Artificial Sequence
  Description of Artificial Sequence: Synthetic oligonucleotide
gccgaaggauagguccaga

SEQ ID NO: 907217 - RNA, 19 nt, Artificial Sequence
  Description of Artificial Sequence: Synthetic oligonucleotide
cgcuccccuaucuucugca

SEQ ID NO: 907218 - RNA, 19 nt, Artificial Sequence
  Description of Artificial Sequence: Synthetic oligonucleotide
ccccuaucuucugcaccag

SEQ ID NO: 907219 - RNA, 19 nt, Artificial Sequence
  Description of Artificial Sequence: Synthetic oligonucleotide
accucgcauggggcuguau

SEQ ID NO: 907220 - RNA, 19 nt, Artificial Sequence
  Description of Artificial Sequence: Synthetic oligonucleotide
cguugugcagccugaguau

SEQ ID NO: 907221 - RNA, 19 nt, Artificial Sequence
  Description of Artificial Sequence: Synthetic oligonucleotide
aggcccggcuggggaccgg

SEQ ID NO: 907222 - RNA, 19 nt, Artificial Sequence
  Description of Artificial Sequence: Synthetic oligonucleotide
cucggugugucuggccaau

SEQ ID NO: 907223 - RNA, 19 nt, Artificial Sequence
  Description of Artificial Sequence: Synthetic oligonucleotide
ccaugugccucggguccug

SEQ ID NO: 907224 - RNA, 19 nt, Artificial Sequence
  Description of Artificial Sequence: Synthetic oligonucleotide
cccacagcacccugaggcu

SEQ ID NO: 907225 - RNA, 19 nt, Artificial Sequence
  Description of Artificial Sequence: Synthetic oligonucleotide
gcugccgccgacaggcagu

SEQ ID NO: 907226 - RNA, 19 nt, Artificial Sequence
  Description of Artificial Sequence: Synthetic oligonucleotide
cugccgccgacaggcagua

SEQ ID NO: 907227 - RNA, 19 nt, Artificial Sequence
  Description of Artificial Sequence: Synthetic oligonucleotide
ugccgccgacaggcaguac

SEQ ID NO: 907228 - RNA, 19 nt, Artificial Sequence
  Description of Artificial Sequence: Synthetic oligonucleotide
cacggagcuggaguagguu

SEQ ID NO: 907229 - RNA, 19 nt, Artificial Sequence
  Description of Artificial Sequence: Synthetic oligonucleotide
cgcaccucgcauggggcug

SEQ ID NO: 907230 - RNA, 19 nt, Artificial Sequence
  Description of Artificial Sequence: Synthetic oligonucleotide
cccagcuggggcugcccca

SEQ ID NO: 907231 - RNA, 19 nt, Artificial Sequence
  Description of Artificial Sequence: Synthetic oligonucleotide
ggccucgcuugguccucca

SEQ ID NO: 907232 - RNA, 19 nt, Artificial Sequence
  Description of Artificial Sequence: Synthetic oligonucleotide
gccacucgaggaccccacu

SEQ ID NO: 907233 - RNA, 19 nt, Artificial Sequence
  Description of Artificial Sequence: Synthetic oligonucleotide
gggcuggggaaggaccacu

SEQ ID NO: 907234 - RNA, 19 nt, Artificial Sequence
  Description of Artificial Sequence: Synthetic oligonucleotide
ggggccucgcuugguccuc

SEQ ID NO: 907235 - RNA, 19 nt, Artificial Sequence
  Description of Artificial Sequence: Synthetic oligonucleotide
ggguuggccccaggguucu

SEQ ID NO: 907236 - RNA, 19 nt, Artificial Sequence
  Description of Artificial Sequence: Synthetic oligonucleotide
cgccgacaggcaguacgag

SEQ ID NO: 907237 - RNA, 19 nt, Artificial Sequence
  Description of Artificial Sequence: Synthetic oligonucleotide
ggaccggcccggggacccc

SEQ ID NO: 907238 - RNA, 19 nt, Artificial Sequence
  Description of Artificial Sequence: Synthetic oligonucleotide
ccgaagggcuggcagcuuu

SEQ ID NO: 907239 - RNA, 19 nt, Artificial Sequence
  Description of Artificial Sequence: Synthetic oligonucleotide
gcaccucgcauggggcugu

SEQ ID NO: 907240 - RNA, 19 nt, Artificial Sequence
  Description of Artificial Sequence: Synthetic oligonucleotide
gcccggcuggggaccggcc

SEQ ID NO: 907241 - RNA, 19 nt, Artificial Sequence
  Description of Artificial Sequence: Synthetic oligonucleotide
ccccaggcucugauguggu

SEQ ID NO: 907242 - RNA, 19 nt, Artificial Sequence
  Description of Artificial Sequence: Synthetic oligonucleotide
ggggccuggguaguaccuu

SEQ ID NO: 907243 - RNA, 19 nt, Artificial Sequence
  Description of Artificial Sequence: Synthetic oligonucleotide
gccucggguccuggcucac

SEQ ID NO: 907244 - RNA, 19 nt, Artificial Sequence
  Description of Artificial Sequence: Synthetic oligonucleotide
cccagucuggggcgguggu

SEQ ID NO: 907245 - RNA, 19 nt, Artificial Sequence
  Description of Artificial Sequence: Synthetic oligonucleotide
ggguucagaugagguccau

SEQ ID NO: 907246 - RNA, 19 nt, Artificial Sequence
  Description of Artificial Sequence: Synthetic oligonucleotide
cccgcuggggaagcugugu

SEQ ID NO: 907247 - RNA, 19 nt, Artificial Sequence
  Description of Artificial Sequence: Synthetic oligonucleotide
ccucggguccuggcucaca

SEQ ID NO: 907248 - RNA, 19 nt, Artificial Sequence
  Description of Artificial Sequence: Synthetic oligonucleotide
ccaggguucuggggccgaa

SEQ ID NO: 907249 - RNA, 19 nt, Artificial Sequence
  Description of Artificial Sequence: Synthetic oligonucleotide
caccucgcauggggcugua

SEQ ID NO: 907250 - RNA, 19 nt, Artificial Sequence
  Description of Artificial Sequence: Synthetic oligonucleotide
ccucgucagcuugguguua

SEQ ID NO: 907251 - RNA, 19 nt, Artificial Sequence
  Description of Artificial Sequence: Synthetic oligonucleotide
gcucuccguugugcagccu

SEQ ID NO: 907252 - RNA, 19 nt, Artificial Sequence
  Description of Artificial Sequence: Synthetic oligonucleotide
gcccacgcacuagcaccau

SEQ ID NO: 907253 - RNA, 19 nt, Artificial Sequence
  Description of Artificial Sequence: Synthetic oligonucleotide
aaaaccaugggcauacucc

SEQ ID NO: 907254 - RNA, 19 nt, Artificial Sequence
  Description of Artificial Sequence: Synthetic oligonucleotide
uggaacaccagccagcccg

SEQ ID NO: 907255 - RNA, 19 nt, Artificial Sequence
  Description of Artificial Sequence: Synthetic oligonucleotide
cauaggacaccacaaaucg

SEQ ID NO: 907256 - RNA, 19 nt, Artificial Sequence
  Description of Artificial Sequence: Synthetic oligonucleotide
uguauuugcgcccagguuc

SEQ ID NO: 907257 - RNA, 19 nt, Artificial Sequence
  Description of Artificial Sequence: Synthetic oligonucleotide
uguauuugcgcccaggcuc

SEQ ID NO: 907258 - RNA, 19 nt, Artificial Sequence
  Description of Artificial Sequence: Synthetic oligonucleotide
  modified_base (7)..(7): a, c, u, g, unknown or other
auagaancgggguagcuga

SEQ ID NO: 907259 - RNA, 19 nt, Artificial Sequence
  Description of Artificial Sequence: Synthetic oligonucleotide
uguggucggagucacagcc

SEQ ID NO: 907260 - RNA, 19 nt, Artificial Sequence
  Description of Artificial Sequence: Synthetic oligonucleotide
aguccauacagguucaucu

SEQ ID NO: 907261 - RNA, 19 nt, Artificial Sequence
  Description of Artificial Sequence: Synthetic oligonucleotide
ugaggaccgucaaucaugg

SEQ ID NO: 907262 - RNA, 19 nt, Artificial Sequence
  Description of Artificial Sequence: Synthetic oligonucleotide
agacacggggcccacacgc

SEQ ID NO: 907263 - RNA, 19 nt, Artificial Sequence
  Description of Artificial Sequence: Synthetic oligonucleotide
acggugcuuccauagagcc

SEQ ID NO: 907264 - RNA, 19 nt, Artificial Sequence
  Description of Artificial Sequence: Synthetic oligonucleotide
cuuagaggcaggaggaccc

SEQ ID NO: 907265 - RNA, 19 nt, Artificial Sequence
  Description of Artificial Sequence: Synthetic oligonucleotide
uguguaggaccucauugcc

SEQ ID NO: 907266 - RNA, 19 nt, Artificial Sequence
  Description of Artificial Sequence: Synthetic oligonucleotide
  modified_base (3)..(3): a, c, u, g, unknown or other
aancgggguagcugacugc

SEQ ID NO: 907267 - RNA, 19 nt, Artificial Sequence
  Description of Artificial Sequence: Synthetic oligonucleotide
aacaacagacacggggccc

SEQ ID NO: 907268 - RNA, 19 nt, Artificial Sequence
  Description of Artificial Sequence: Synthetic oligonucleotide
aguuccuguaccaccaagc

SEQ ID NO: 907269 - RNA, 19 nt, Artificial Sequence
  Description of Artificial Sequence: Synthetic oligonucleotide
  modified_base (4)..(4): a, c, u, g, unknown or other
gaancgggguagcugacug

SEQ ID NO: 907270 - RNA, 19 nt, Artificial Sequence
  Description of Artificial Sequence: Synthetic oligonucleotide
guggaugccauacagguuc

SEQ ID NO: 907271 - RNA, 19 nt, Artificial Sequence
  Description of Artificial Sequence: Synthetic oligonucleotide
aaucgguccaccucagccu

SEQ ID NO: 907272 - RNA, 19 nt, Artificial Sequence
  Description of Artificial Sequence: Synthetic oligonucleotide
agucauacugggcgaacac

SEQ ID NO: 907273 - RNA, 19 nt, Artificial Sequence
  Description of Artificial Sequence: Synthetic oligonucleotide
caucgaguagucuccagcc

SEQ ID NO: 907274 - RNA, 19 nt, Artificial Sequence
  Description of Artificial Sequence: Synthetic oligonucleotide
agucgcacccuuugguugc

SEQ ID NO: 907275 - RNA, 19 nt, Artificial Sequence
  Description of Artificial Sequence: Synthetic oligonucleotide
gacaacgagacacggggcc

SEQ ID NO: 907276 - RNA, 19 nt, Artificial Sequence
  Description of Artificial Sequence: Synthetic oligonucleotide
ucgaguagucuccagccug

SEQ ID NO: 907277 - RNA, 19 nt, Artificial Sequence
  Description of Artificial Sequence: Synthetic oligonucleotide
  modified_base (8)..(8): a, c, u, g, unknown or other
gauagaancgggguagcug

SEQ ID NO: 907278 - RNA, 19 nt, Artificial Sequence
  Description of Artificial Sequence: Synthetic oligonucleotide
acauaggacaccacaaauc

SEQ ID NO: 907279 - RNA, 19 nt, Artificial Sequence
  Description of Artificial Sequence: Synthetic oligonucleotide
auugagucgccugcggugc

SEQ ID NO: 907280 - RNA, 19 nt, Artificial Sequence
  Description of Artificial Sequence: Synthetic oligonucleotide
guauuugcuguguuugccc

SEQ ID NO: 907281 - RNA, 19 nt, Artificial Sequence
  Description of Artificial Sequence: Synthetic oligonucleotide
ugggucacgcccacggugg

SEQ ID NO: 907282 - RNA, 19 nt, Artificial Sequence
  Description of Artificial Sequence: Synthetic oligonucleotide
acggacagugaccugguag

SEQ ID NO: 907283 - RNA, 19 nt, Artificial Sequence
  Description of Artificial Sequence: Synthetic oligonucleotide
cacccgcugaccaucaugg

SEQ ID NO: 907284 - RNA, 19 nt, Artificial Sequence
  Description of Artificial Sequence: Synthetic oligonucleotide
guacuuguggucuggcucc

SEQ ID NO: 907285 - RNA, 19 nt, Artificial Sequence
  Description of Artificial Sequence: Synthetic oligonucleotide
aggaccucauugcccagcc

SEQ ID NO: 907286 - RNA, 19 nt, Artificial Sequence
  Description of Artificial Sequence: Synthetic oligonucleotide
uuugguugccagcacugac

SEQ ID NO: 907287 - RNA, 19 nt, Artificial Sequence
  Description of Artificial Sequence: Synthetic oligonucleotide
auuuccgugaagggcaccg

SEQ ID NO: 907288 - RNA, 19 nt, Artificial Sequence
  Description of Artificial Sequence: Synthetic oligonucleotide
uagagcacggacagugacc

SEQ ID NO: 907289 - RNA, 19 nt, Artificial Sequence
  Description of Artificial Sequence: Synthetic oligonucleotide
agacacggggcccacccgc

SEQ ID NO: 907290 - RNA, 19 nt, Artificial Sequence
  Description of Artificial Sequence: Synthetic oligonucleotide
acgcgcaucgaguagucuc

SEQ ID NO: 907291 - RNA, 19 nt, Artificial Sequence
  Description of Artificial Sequence: Synthetic oligonucleotide
aguguggucggagucacag

SEQ ID NO: 907292 - RNA, 19 nt, Artificial Sequence
  Description of Artificial Sequence: Synthetic oligonucleotide
aggaccgucaaucaugguu

SEQ ID NO: 907293 - RNA, 19 nt, Artificial Sequence
  Description of Artificial Sequence: Synthetic oligonucleotide
uuguauuugcgcccaggcu

SEQ ID NO: 907294 - RNA, 19 nt, Artificial Sequence
  Description of Artificial Sequence: Synthetic oligonucleotide
ugguagcucauugagucgc

SEQ ID NO: 907295 - RNA, 19 nt, Artificial Sequence
  Description of Artificial Sequence: Synthetic oligonucleotide
gucaaagucucccugaggu

SEQ ID NO: 907296 - RNA, 19 nt, Artificial Sequence
  Description of Artificial Sequence: Synthetic oligonucleotide
guagucuccagccugcguc

SEQ ID NO: 907297 - RNA, 19 nt, Artificial Sequence
  Description of Artificial Sequence: Synthetic oligonucleotide
agguguagacgguaguucu

SEQ ID NO: 907298 - RNA, 19 nt, Artificial Sequence
  Description of Artificial Sequence: Synthetic oligonucleotide
ugaccugguaguccugacc

SEQ ID NO: 907299 - RNA, 19 nt, Artificial Sequence
  Description of Artificial Sequence: Synthetic oligonucleotide
aggauccugucacagucag

SEQ ID NO: 907300 - RNA, 19 nt, Artificial Sequence
  Description of Artificial Sequence: Synthetic oligonucleotide
guaguccugaccaggagcc

SEQ ID NO: 907301 - RNA, 19 nt, Artificial Sequence
  Description of Artificial Sequence: Synthetic oligonucleotide
ucauugagucgccugcggu

SEQ ID NO: 907302 - RNA, 19 nt, Artificial Sequence
  Description of Artificial Sequence: Synthetic oligonucleotide
  modified_base (2)..(2): a, c, u, g, unknown or other
ancgggguagcugacugca

SEQ ID NO: 907303 - RNA, 19 nt, Artificial Sequence
  Description of Artificial Sequence: Synthetic oligonucleotide
cacugcugagucuacccgg

SEQ ID NO: 907304 - RNA, 19 nt, Artificial Sequence
  Description of Artificial Sequence: Synthetic oligonucleotide
augggcauacuccucccag

SEQ ID NO: 907305 - RNA, 19 nt, Artificial Sequence
  Description of Artificial Sequence: Synthetic oligonucleotide
aacacauccaaaggccgcu

SEQ ID NO: 907306 - RNA, 19 nt, Artificial Sequence
  Description of Artificial Sequence: Synthetic oligonucleotide
cacgcugaccaucauggag

SEQ ID NO: 907307 - RNA, 19 nt, Artificial Sequence
  Description of Artificial Sequence: Synthetic oligonucleotide
guccuuguacugcacagug

SEQ ID NO: 907308 - RNA, 19 nt, Artificial Sequence
  Description of Artificial Sequence: Synthetic oligonucleotide
ccaacaacagacacggggc

SEQ ID NO: 907309 - RNA, 19 nt, Artificial Sequence
  Description of Artificial Sequence: Synthetic oligonucleotide
cauugagucgccugcggug

SEQ ID NO: 907310 - RNA, 19 nt, Artificial Sequence
  Description of Artificial Sequence: Synthetic oligonucleotide
aaaggccgcucgcgguugc

SEQ ID NO: 907311 - RNA, 19 nt, Artificial Sequence
  Description of Artificial Sequence: Synthetic oligonucleotide
cacaaaucgguccaccuca

SEQ ID NO: 907312 - RNA, 19 nt, Artificial Sequence
  Description of Artificial Sequence: Synthetic oligonucleotide
uuccgugaagggcaccgag

SEQ ID NO: 907313 - RNA, 19 nt, Artificial Sequence
  Description of Artificial Sequence: Synthetic oligonucleotide
aaguccgucuguccgucca

SEQ ID NO: 907314 - RNA, 19 nt, Artificial Sequence
  Description of Artificial Sequence: Synthetic oligonucleotide
uccagucgcacccuuuggu

SEQ ID NO: 907315 - RNA, 19 nt, Artificial Sequence
  Description of Artificial Sequence: Synthetic oligonucleotide
ccgacaacgagacacgggg

SEQ ID NO: 907316 - RNA, 19 nt, Artificial Sequence
  Description of Artificial Sequence: Synthetic oligonucleotide
gguaugguccaggagaggc

SEQ ID NO: 907317 - RNA, 19 nt, Artificial Sequence
  Description of Artificial Sequence: Synthetic oligonucleotide
caacaacagacacggggcc

SEQ ID NO: 907318 - RNA, 19 nt, Artificial Sequence
  Description of Artificial Sequence: Synthetic oligonucleotide
aagucauacugggcgaaca

SEQ ID NO: 907319 - RNA, 19 nt, Artificial Sequence
  Description of Artificial Sequence: Synthetic oligonucleotide
gguaguccugaccaggagc

SEQ ID NO: 907320 - RNA, 19 nt, Artificial Sequence
  Description of Artificial Sequence: Synthetic oligonucleotide
uggucuuagguuccagguc

SEQ ID NO: 907321 - RNA, 19 nt, Artificial Sequence
  Description of Artificial Sequence: Synthetic oligonucleotide
uccagaaguccgucugucc

SEQ ID NO: 907322 - RNA, 19 nt, Artificial Sequence
  Description of Artificial Sequence: Synthetic oligonucleotide
ucgcgguugccguugagga

SEQ ID NO: 907323 - RNA, 19 nt, Artificial Sequence
  Description of Artificial Sequence: Synthetic oligonucleotide
gacgguaguucuccacugc

SEQ ID NO: 907324 - RNA, 19 nt, Artificial Sequence
  Description of Artificial Sequence: Synthetic oligonucleotide
cauacugggcgaacacagc

SEQ ID NO: 907325 - RNA, 19 nt, Artificial Sequence
  Description of Artificial Sequence: Synthetic oligonucleotide
gcuucauuuccgugaaggg

SEQ ID NO: 907326 - RNA, 19 nt, Artificial Sequence
  Description of Artificial Sequence: Synthetic oligonucleotide
aagccccacgauaggagac

SEQ ID NO: 907327 - RNA, 19 nt, Artificial Sequence
  Description of Artificial Sequence: Synthetic oligonucleotide
cacggugcuuccauagagc

SEQ ID NO: 907328 - RNA, 19 nt, Artificial Sequence
  Description of Artificial Sequence: Synthetic oligonucleotide
auaggacaccacaaaucgg

SEQ ID NO: 907329 - RNA, 19 nt, Artificial Sequence
  Description of Artificial Sequence: Synthetic oligonucleotide
gacagugaccugguagucc

SEQ ID NO: 907330 - RNA, 19 nt, Artificial Sequence
  Description of Artificial Sequence: Synthetic oligonucleotide
  modified_base (10)..(10): a, c, u, g, unknown or other
cugauagaancgggguagc

SEQ ID NO: 907331 - RNA, 19 nt, Artificial Sequence
  Description of Artificial Sequence: Synthetic oligonucleotide
uccgugaagggcaccgaga

SEQ ID NO: 907332 - RNA, 19 nt, Artificial Sequence
  Description of Artificial Sequence: Synthetic oligonucleotide
ggagauguucccaaaacca

SEQ ID NO: 907333 - RNA, 19 nt, Artificial Sequence
  Description of Artificial Sequence: Synthetic oligonucleotide
acagacacggggcccaccu

SEQ ID NO: 907334 - RNA, 19 nt, Artificial Sequence
  Description of Artificial Sequence: Synthetic oligonucleotide
cucauugagucgccugcgg

SEQ ID NO: 907335 - RNA, 19 nt, Artificial Sequence
  Description of Artificial Sequence: Synthetic oligonucleotide
acucggagguccugaggac

SEQ ID NO: 907336 - RNA, 19 nt, Artificial Sequence
  Description of Artificial Sequence: Synthetic oligonucleotide
uagcucauugagucgccug

SEQ ID NO: 907337 - RNA, 19 nt, Artificial Sequence
  Description of Artificial Sequence: Synthetic oligonucleotide
guauuugcgcccagguucc

SEQ ID NO: 907338 - RNA, 19 nt, Artificial Sequence
  Description of Artificial Sequence: Synthetic oligonucleotide
cccgacaacagacacgggg

SEQ ID NO: 907339 - RNA, 19 nt, Artificial Sequence
  Description of Artificial Sequence: Synthetic oligonucleotide
guguagacgguaguucucc

SEQ ID NO: 907340 - RNA, 19 nt, Artificial Sequence
  Description of Artificial Sequence: Synthetic oligonucleotide
uuguauuugcgcccagguu

SEQ ID NO: 907341 - RNA, 19 nt, Artificial Sequence
  Description of Artificial Sequence: Synthetic oligonucleotide
ggaccgucaaucaugguug

SEQ ID NO: 907342 - RNA, 19 nt, Artificial Sequence
  Description of Artificial Sequence: Synthetic oligonucleotide
aucgguccaccucagccug

SEQ ID NO: 907343 - RNA, 19 nt, Artificial Sequence
  Description of Artificial Sequence: Synthetic oligonucleotide
ucccucguagagcacggac

SEQ ID NO: 907344 - RNA, 19 nt, Artificial Sequence
  Description of Artificial Sequence: Synthetic oligonucleotide
  modified_base (9)..(9): a, c, u, g, unknown or other
ugauagaancgggguagcu

SEQ ID NO: 907345 - RNA, 19 nt, Artificial Sequence
  Description of Artificial Sequence: Synthetic oligonucleotide
uggaguccauacagguuca

SEQ ID NO: 907346 - RNA, 19 nt, Artificial Sequence
  Description of Artificial Sequence: Synthetic oligonucleotide
guauuugcgcccaggcucc

SEQ ID NO: 907347 - RNA, 19 nt, Artificial Sequence
  Description of Artificial Sequence: Synthetic oligonucleotide
  modified_base (11)..(11): a, c, u, g, unknown or other
ccugauagaancgggguag

SEQ ID NO: 907348 - RNA, 19 nt, Artificial Sequence
  Description of Artificial Sequence: Synthetic oligonucleotide
guccacggugcuuccauag

SEQ ID NO: 907349 - RNA, 19 nt, Artificial Sequence
  Description of Artificial Sequence: Synthetic oligonucleotide
gugguaccagcucacuccc

SEQ ID NO: 907350 - RNA, 19 nt, Artificial Sequence
  Description of Artificial Sequence: Synthetic oligonucleotide
ucauuuccgugaagggcac

SEQ ID NO: 907351 - RNA, 19 nt, Artificial Sequence
  Description of Artificial Sequence: Synthetic oligonucleotide
cauagugacaguuccugua

SEQ ID NO: 907352 - RNA, 19 nt, Artificial Sequence
  Description of Artificial Sequence: Synthetic oligonucleotide
gacauaggacaccacaaau

SEQ ID NO: 907353 - RNA, 19 nt, Artificial Sequence
  Description of Artificial Sequence: Synthetic oligonucleotide
aucacgggcagagaagaca

SEQ ID NO: 907354 - RNA, 19 nt, Artificial Sequence
  Description of Artificial Sequence: Synthetic oligonucleotide
agcccguugagguuggcau

SEQ ID NO: 907355 - RNA, 19 nt, Artificial Sequence
  Description of Artificial Sequence: Synthetic oligonucleotide
gacaacagacacggggccc

SEQ ID NO: 907356 - RNA, 19 nt, Artificial Sequence
  Description of Artificial Sequence: Synthetic oligonucleotide
aacagacacggggcccacc

SEQ ID NO: 907357 - RNA, 19 nt, Artificial Sequence
  Description of Artificial Sequence: Synthetic oligonucleotide
auaggagacggcacaggag

SEQ ID NO: 907358 - RNA, 19 nt, Artificial Sequence
  Description of Artificial Sequence: Synthetic oligonucleotide
acgcugaccaucauggagu

SEQ ID NO: 907359 - RNA, 19 nt, Artificial Sequence
  Description of Artificial Sequence: Synthetic oligonucleotide
aucgaguagucuccagccu

SEQ ID NO: 907360 - RNA, 19 nt, Artificial Sequence
  Description of Artificial Sequence: Synthetic oligonucleotide
agaaguccgucuguccguc

SEQ ID NO: 907361 - RNA, 19 nt, Artificial Sequence
  Description of Artificial Sequence: Synthetic oligonucleotide
uagcccuccagguguagac

SEQ ID NO: 907362 - RNA, 19 nt, Artificial Sequence
  Description of Artificial Sequence: Synthetic oligonucleotide
cacucggagguccugagga

SEQ ID NO: 907363 - RNA, 19 nt, Artificial Sequence
  Description of Artificial Sequence: Synthetic oligonucleotide
cagucgcacccuuugguug

SEQ ID NO: 907364 - RNA, 19 nt, Artificial Sequence
  Description of Artificial Sequence: Synthetic oligonucleotide
ucuguccguccaugcgucg

SEQ ID NO: 907365 - RNA, 19 nt, Artificial Sequence
  Description of Artificial Sequence: Synthetic oligonucleotide
guugccguugaggaagaug

SEQ ID NO: 907366 - RNA, 19 nt, Artificial Sequence
  Description of Artificial Sequence: Synthetic oligonucleotide
uguggaugccauacagguu

SEQ ID NO: 907367 - RNA, 19 nt, Artificial Sequence
  Description of Artificial Sequence: Synthetic oligonucleotide
uagagcccguugagguugg

SEQ ID NO: 907368 - RNA, 19 nt, Artificial Sequence
  Description of Artificial Sequence: Synthetic oligonucleotide
uccgucuguccguccaugc

SEQ ID NO: 907369 - RNA, 19 nt, Artificial Sequence
  Description of Artificial Sequence: Synthetic oligonucleotide
gcaucgaguagucuccagc

SEQ ID NO: 907370 - RNA, 19 nt, Artificial Sequence
  Description of Artificial Sequence: Synthetic oligonucleotide
cucgcgguugccguugagg

SEQ ID NO: 907371 - RNA, 19 nt, Artificial Sequence
  Description of Artificial Sequence: Synthetic oligonucleotide
cuccagguguagacgguag

SEQ ID NO: 907372 - RNA, 19 nt, Artificial Sequence
  Description of Artificial Sequence: Synthetic oligonucleotide
agggagucuggggaggauc

SEQ ID NO: 907373 - RNA, 19 nt, Artificial Sequence
  Description of Artificial Sequence: Synthetic oligonucleotide
  modified_base (6)..(6): a, c, u, g, unknown or other
uagaancgggguagcugac

SEQ ID NO: 907374 - RNA, 19 nt, Artificial Sequence
  Description of Artificial Sequence: Synthetic oligonucleotide
ggacacggggcccacacgc

SEQ ID NO: 907375 - RNA, 19 nt, Artificial Sequence
  Description of Artificial Sequence: Synthetic oligonucleotide
guuggcauagugacaguuc

SEQ ID NO: 907376 - RNA, 19 nt, Artificial Sequence
  Description of Artificial Sequence: Synthetic oligonucleotide
ccaccaagccccacgauag

SEQ ID NO: 907377 - RNA, 19 nt, Artificial Sequence
  Description of Artificial Sequence: Synthetic oligonucleotide
cacgauaggagacggcaca

SEQ ID NO: 907378 - RNA, 19 nt, Artificial Sequence
  Description of Artificial Sequence: Synthetic oligonucleotide
uguccguccaugcgucgcu

SEQ ID NO: 907379 - RNA, 19 nt, Artificial Sequence
  Description of Artificial Sequence: Synthetic oligonucleotide
uccguccaugcgucgcugg

SEQ ID NO: 907380 - RNA, 19 nt, Artificial Sequence
  Description of Artificial Sequence: Synthetic oligonucleotide
gucaccccgacaacgagac

SEQ ID NO: 907381 - RNA, 19 nt, Artificial Sequence
  Description of Artificial Sequence: Synthetic oligonucleotide
cacagccaccacucggagg

SEQ ID NO: 907382 - RNA, 19 nt, Artificial Sequence
  Description of Artificial Sequence: Synthetic oligonucleotide
acgauaggagacggcacag

SEQ ID NO: 907383 - RNA, 19 nt, Artificial Sequence
  Description of Artificial Sequence: Synthetic oligonucleotide
gggguagcugacugcacgg

SEQ ID NO: 907384 - RNA, 19 nt, Artificial Sequence
  Description of Artificial Sequence: Synthetic oligonucleotide
agccgucaccccgacaacg

SEQ ID NO: 907385 - RNA, 19 nt, Artificial Sequence
  Description of Artificial Sequence: Synthetic oligonucleotide
cucggagguccugaggacc

SEQ ID NO: 907386 - RNA, 19 nt, Artificial Sequence
  Description of Artificial Sequence: Synthetic oligonucleotide
aggucucucacgguggccu

SEQ ID NO: 907387 - RNA, 19 nt, Artificial Sequence
  Description of Artificial Sequence: Synthetic oligonucleotide
aggagcggcuccucacggg

SEQ ID NO: 907388 - RNA, 19 nt, Artificial Sequence
  Description of Artificial Sequence: Synthetic oligonucleotide
cucgaucacgggcagagaa

SEQ ID NO: 907389 - RNA, 19 nt, Artificial Sequence
  Description of Artificial Sequence: Synthetic oligonucleotide
gucgccugcggugccaugg

SEQ ID NO: 907390 - RNA, 19 nt, Artificial Sequence
  Description of Artificial Sequence: Synthetic oligonucleotide
gacugcacggccucguucu

SEQ ID NO: 907391 - RNA, 19 nt, Artificial Sequence
  Description of Artificial Sequence: Synthetic oligonucleotide
ucaugguugugauggucuu

SEQ ID NO: 907392 - RNA, 19 nt, Artificial Sequence
  Description of Artificial Sequence: Synthetic oligonucleotide
ugguccacggugcuuccau

SEQ ID NO: 907393 - RNA, 19 nt, Artificial Sequence
  Description of Artificial Sequence: Synthetic oligonucleotide
ugcgucgcuggaacaccag

SEQ ID NO: 907394 - RNA, 19 nt, Artificial Sequence
  Description of Artificial Sequence: Synthetic oligonucleotide
gguuguuggggucucgauc

SEQ ID NO: 907395 - RNA, 19 nt, Artificial Sequence
  Description of Artificial Sequence: Synthetic oligonucleotide
aacgagacacggggcccac

SEQ ID NO: 907396 - RNA, 19 nt, Artificial Sequence
  Description of Artificial Sequence: Synthetic oligonucleotide
uuagaggcaggaggacccc

SEQ ID NO: 907397 - RNA, 19 nt, Artificial Sequence
  Description of Artificial Sequence: Synthetic oligonucleotide
agccccacgauaggagacg

SEQ ID NO: 907398 - RNA, 19 nt, Artificial Sequence
  Description of Artificial Sequence: Synthetic oligonucleotide
cauugcccagccagaacuc

SEQ ID NO: 907399 - RNA, 19 nt, Artificial Sequence
  Description of Artificial Sequence: Synthetic oligonucleotide
cagguguagacgguaguuc

SEQ ID NO: 907400 - RNA, 19 nt, Artificial Sequence
  Description of Artificial Sequence: Synthetic oligonucleotide
guggucuuagguuccaggu

SEQ ID NO: 907401 - RNA, 19 nt, Artificial Sequence
  Description of Artificial Sequence: Synthetic oligonucleotide
  modified_base (5)..(5): a, c, u, g, unknown or other
agaancgggguagcugacu

SEQ ID NO: 907402 - RNA, 19 nt, Artificial Sequence
  Description of Artificial Sequence: Synthetic oligonucleotide
ccucguagagcacggacag

SEQ ID NO: 907403 - RNA, 19 nt, Artificial Sequence
  Description of Artificial Sequence: Synthetic oligonucleotide
cacggggcccacacgcugg

SEQ ID NO: 907404 - RNA, 19 nt, Artificial Sequence
  Description of Artificial Sequence: Synthetic oligonucleotide
uccaugcgucgcuggaaca

SEQ ID NO: 907405 - RNA, 19 nt, Artificial Sequence
  Description of Artificial Sequence: Synthetic oligonucleotide
gcugagucuacccggaaaa

SEQ ID NO: 907406 - RNA, 19 nt, Artificial Sequence
  Description of Artificial Sequence: Synthetic oligonucleotide
guggacacggggcccacac

SEQ ID NO: 907407 - RNA, 19 nt, Artificial Sequence
  Description of Artificial Sequence: Synthetic oligonucleotide
acacccggcaucaggucgg

SEQ ID NO: 907408 - RNA, 19 nt, Artificial Sequence
  Description of Artificial Sequence: Synthetic oligonucleotide
caagccccacgauaggaga

SEQ ID NO: 907409 - RNA, 19 nt, Artificial Sequence
  Description of Artificial Sequence: Synthetic oligonucleotide
ggucuuagaggcaggagga

SEQ ID NO: 907410 - RNA, 19 nt, Artificial Sequence
  Description of Artificial Sequence: Synthetic oligonucleotide
cagugguaccagcucacuc

SEQ ID NO: 907411 - RNA, 19 nt, Artificial Sequence
  Description of Artificial Sequence: Synthetic oligonucleotide
cagcccgccuccaucaguc

SEQ ID NO: 907412 - RNA, 19 nt, Artificial Sequence
  Description of Artificial Sequence: Synthetic oligonucleotide
uugagucgccugcggugcc

SEQ ID NO: 907413 - RNA, 19 nt, Artificial Sequence
  Description of Artificial Sequence: Synthetic oligonucleotide
agcccuccagguguagacg

SEQ ID NO: 907414 - RNA, 19 nt, Artificial Sequence
  Description of Artificial Sequence: Synthetic oligonucleotide
gcagccgucaccccgacaa

SEQ ID NO: 907415 - RNA, 19 nt, Artificial Sequence
  Description of Artificial Sequence: Synthetic oligonucleotide
acggggcccaccucuucuc

SEQ ID NO: 907416 - RNA, 19 nt, Artificial Sequence
  Description of Artificial Sequence: Synthetic oligonucleotide
gaaguccgucuguccgucc

SEQ ID NO: 907417 - RNA, 19 nt, Artificial Sequence
  Description of Artificial Sequence: Synthetic oligonucleotide
caccgagaacucgaagccc

SEQ ID NO: 907418 - RNA, 19 nt, Artificial Sequence
  Description of Artificial Sequence: Synthetic oligonucleotide
gaguccugucugccucagg

SEQ ID NO: 907419 - RNA, 19 nt, Artificial Sequence
  Description of Artificial Sequence: Synthetic oligonucleotide
ugggcgaacacagcuucau

SEQ ID NO: 907420 - RNA, 19 nt, Artificial Sequence
  Description of Artificial Sequence: Synthetic oligonucleotide
ccugcgucagacuguguag

SEQ ID NO: 907421 - RNA, 19 nt, Artificial Sequence
  Description of Artificial Sequence: Synthetic oligonucleotide
ucucucacgguggccuccc

SEQ ID NO: 907422 - RNA, 19 nt, Artificial Sequence
  Description of Artificial Sequence: Synthetic oligonucleotide
acugcugagucuacccgga

SEQ ID NO: 907423 - RNA, 19 nt, Artificial Sequence
  Description of Artificial Sequence: Synthetic oligonucleotide
accccgacaacgagacacg

SEQ ID NO: 907424 - RNA, 19 nt, Artificial Sequence
  Description of Artificial Sequence: Synthetic oligonucleotide
ccaagccccacgauaggag

SEQ ID NO: 907425 - RNA, 19 nt, Artificial Sequence
  Description of Artificial Sequence: Synthetic oligonucleotide
ugguugugauggucuuaga

SEQ ID NO: 907426 - RNA, 19 nt, Artificial Sequence
  Description of Artificial Sequence: Synthetic oligonucleotide
guguggucggagucacagc

SEQ ID NO: 907427 - RNA, 19 nt, Artificial Sequence
  Description of Artificial Sequence: Synthetic oligonucleotide
cagguccacgcgcaucgag

SEQ ID NO: 907428 - RNA, 19 nt, Artificial Sequence
  Description of Artificial Sequence: Synthetic oligonucleotide
ccacggugcuuccauagag

SEQ ID NO: 907429 - RNA, 19 nt, Artificial Sequence
  Description of Artificial Sequence: Synthetic oligonucleotide
acggggcccacacgcugac

SEQ ID NO: 907430 - RNA, 19 nt, Artificial Sequence
  Description of Artificial Sequence: Synthetic oligonucleotide
guaggaccucauugcccag

SEQ ID NO: 907431 - RNA, 19 nt, Artificial Sequence
  Description of Artificial Sequence: Synthetic oligonucleotide
cccgcugaccaucauggag

SEQ ID NO: 907432 - RNA, 19 nt, Artificial Sequence
  Description of Artificial Sequence: Synthetic oligonucleotide
gaucacgggcagagaagac

SEQ ID NO: 907433 - RNA, 19 nt, Artificial Sequence
  Description of Artificial Sequence: Synthetic oligonucleotide
cuguccguccaugcgucgc

SEQ ID NO: 907434 - RNA, 19 nt, Artificial Sequence
  Description of Artificial Sequence: Synthetic oligonucleotide
ccacugcugagucuacccg

SEQ ID NO: 907435 - RNA, 19 nt, Artificial Sequence
  Description of Artificial Sequence: Synthetic oligonucleotide
acggggcccacccgcugac

SEQ ID NO: 907436 - RNA, 19 nt, Artificial Sequence
  Description of Artificial Sequence: Synthetic oligonucleotide
acacgcugaccaucaugga

SEQ ID NO: 907437 - RNA, 19 nt, Artificial Sequence
  Description of Artificial Sequence: Synthetic oligonucleotide
ucggagucacagccaccac

SEQ ID NO: 907438 - RNA, 19 nt, Artificial Sequence
  Description of Artificial Sequence: Synthetic oligonucleotide
cuccagaaguccgucuguc

SEQ ID NO: 907439 - RNA, 19 nt, Artificial Sequence
  Description of Artificial Sequence: Synthetic oligonucleotide
gcucauugagucgccugcg

SEQ ID NO: 907440 - RNA, 19 nt, Artificial Sequence
  Description of Artificial Sequence: Synthetic oligonucleotide
cauacagguucaucuugua

SEQ ID NO: 907441 - RNA, 19 nt, Artificial Sequence
  Description of Artificial Sequence: Synthetic oligonucleotide
cagacacggggcccacccg

SEQ ID NO: 907442 - RNA, 19 nt, Artificial Sequence
  Description of Artificial Sequence: Synthetic oligonucleotide
gucuuagaggcaggaggac

SEQ ID NO: 907443 - RNA, 19 nt, Artificial Sequence
  Description of Artificial Sequence: Synthetic oligonucleotide
agccgucaccccgacaaca

SEQ ID NO: 907444 - RNA, 19 nt, Artificial Sequence
  Description of Artificial Sequence: Synthetic oligonucleotide
ugguaccagcucacucccu

SEQ ID NO: 907445 - RNA, 19 nt, Artificial Sequence
  Description of Artificial Sequence: Synthetic oligonucleotide
cgucgcuggaacaccagcc

SEQ ID NO: 907446 - RNA, 19 nt, Artificial Sequence
  Description of Artificial Sequence: Synthetic oligonucleotide
ggugguggucuuagguucc

SEQ ID NO: 907447 - RNA, 19 nt, Artificial Sequence
  Description of Artificial Sequence: Synthetic oligonucleotide
cccgacaacgagacacggg

SEQ ID NO: 907448 - RNA, 19 nt, Artificial Sequence
  Description of Artificial Sequence: Synthetic oligonucleotide
gcgcagccagcugagaucc

SEQ ID NO: 907449 - RNA, 19 nt, Artificial Sequence
  Description of Artificial Sequence: Synthetic oligonucleotide
ugagucgccugcggugcca

SEQ ID NO: 907450 - RNA, 19 nt, Artificial Sequence
  Description of Artificial Sequence: Synthetic oligonucleotide
cauuuccgugaagggcacc

SEQ ID NO: 907451 - RNA, 19 nt, Artificial Sequence
  Description of Artificial Sequence: Synthetic oligonucleotide
cucacgguggccucccucu

SEQ ID NO: 907452 - RNA, 19 nt, Artificial Sequence
  Description of Artificial Sequence: Synthetic oligonucleotide
cacgcaccaccuggggacg

SEQ ID NO: 907453 - RNA, 19 nt, Artificial Sequence
  Description of Artificial Sequence: Synthetic oligonucleotide
ucacgcccacgguggacac

SEQ ID NO: 907454 - RNA, 19 nt, Artificial Sequence
  Description of Artificial Sequence: Synthetic oligonucleotide
gucuguccguccaugcguc

SEQ ID NO: 907455 - RNA, 19 nt, Artificial Sequence
  Description of Artificial Sequence: Synthetic oligonucleotide
cgucaccccgacaacagac

SEQ ID NO: 907456 - RNA, 19 nt, Artificial Sequence
  Description of Artificial Sequence: Synthetic oligonucleotide
agcugacugcacggccucg

SEQ ID NO: 907457 - RNA, 19 nt, Artificial Sequence
  Description of Artificial Sequence: Synthetic oligonucleotide
caugggcauacuccuccca

SEQ ID NO: 907458 - RNA, 19 nt, Artificial Sequence
  Description of Artificial Sequence: Synthetic oligonucleotide
cugucaccccaacaacaga

SEQ ID NO: 907459 - RNA, 19 nt, Artificial Sequence
  Description of Artificial Sequence: Synthetic oligonucleotide
cgcgcaucgaguagucucc

SEQ ID NO: 907460 - RNA, 19 nt, Artificial Sequence
  Description of Artificial Sequence: Synthetic oligonucleotide
accgucaaucaugguugug

SEQ ID NO: 907461 - RNA, 19 nt, Artificial Sequence
  Description of Artificial Sequence: Synthetic oligonucleotide
ggcgcagccagcugagauc

SEQ ID NO: 907462 - RNA, 19 nt, Artificial Sequence
  Description of Artificial Sequence: Synthetic oligonucleotide
gcucacucccugguggucc

SEQ ID NO: 907463 - RNA, 19 nt, Artificial Sequence
  Description of Artificial Sequence: Synthetic oligonucleotide
ggucccucguagagcacgg

SEQ ID NO: 907464 - RNA, 19 nt, Artificial Sequence
  Description of Artificial Sequence: Synthetic oligonucleotide
ccgucaaucaugguuguga

SEQ ID NO: 907465 - RNA, 19 nt, Artificial Sequence
  Description of Artificial Sequence: Synthetic oligonucleotide
ggagacggcacaggagaug

SEQ ID NO: 907466 - RNA, 19 nt, Artificial Sequence
  Description of Artificial Sequence: Synthetic oligonucleotide
agacacugccgcuguggua

SEQ ID NO: 907467 - RNA, 19 nt, Artificial Sequence
  Description of Artificial Sequence: Synthetic oligonucleotide
ccgacacgcaccaccuggg

SEQ ID NO: 907468 - RNA, 19 nt, Artificial Sequence
  Description of Artificial Sequence: Synthetic oligonucleotide
gggacgcccaucacugucc

SEQ ID NO: 907469 - RNA, 19 nt, Artificial Sequence
  Description of Artificial Sequence: Synthetic oligonucleotide
cccagcuggucccucguag

SEQ ID NO: 907470 - RNA, 19 nt, Artificial Sequence
  Description of Artificial Sequence: Synthetic oligonucleotide
ccgucuguccguccaugcg

SEQ ID NO: 907471 - RNA, 19 nt, Artificial Sequence
  Description of Artificial Sequence: Synthetic oligonucleotide
cugccgcugugguagcuca

SEQ ID NO: 907472 - RNA, 19 nt, Artificial Sequence
  Description of Artificial Sequence: Synthetic oligonucleotide
uggggacgcccaucacugu

SEQ ID NO: 907473 - RNA, 19 nt, Artificial Sequence
  Description of Artificial Sequence: Synthetic oligonucleotide
acgcaccaccuggggacgc

SEQ ID NO: 907474 - RNA, 19 nt, Artificial Sequence
  Description of Artificial Sequence: Synthetic oligonucleotide
uauuugcgcccagguucca

SEQ ID NO: 907475 - RNA, 19 nt, Artificial Sequence
  Description of Artificial Sequence: Synthetic oligonucleotide
gacuguguaggaccucauu

SEQ ID NO: 907476 - RNA, 19 nt, Artificial Sequence
  Description of Artificial Sequence: Synthetic oligonucleotide
ggggacgcccaucacuguc

SEQ ID NO: 907477 - RNA, 19 nt, Artificial Sequence
  Description of Artificial Sequence: Synthetic oligonucleotide
gagcacggacagugaccug

SEQ ID NO: 907478 - RNA, 19 nt, Artificial Sequence
  Description of Artificial Sequence: Synthetic oligonucleotide
uauuugcgcccaggcucca

SEQ ID NO: 907479 - RNA, 19 nt, Artificial Sequence
  Description of Artificial Sequence: Synthetic oligonucleotide
acccgcugaccaucaugga

SEQ ID NO: 907480 - RNA, 19 nt, Artificial Sequence
  Description of Artificial Sequence: Synthetic oligonucleotide
cgacaacagacacggggcc

SEQ ID NO: 907481 - RNA, 19 nt, Artificial Sequence
  Description of Artificial Sequence: Synthetic oligonucleotide
ggccucguucugcagugac

SEQ ID NO: 907482 - RNA, 19 nt, Artificial Sequence
  Description of Artificial Sequence: Synthetic oligonucleotide
gaccgucaaucaugguugu

SEQ ID NO: 907483 - RNA, 19 nt, Artificial Sequence
  Description of Artificial Sequence: Synthetic oligonucleotide
gccugcgucagacugugua

SEQ ID NO: 907484 - RNA, 19 nt, Artificial Sequence
  Description of Artificial Sequence: Synthetic oligonucleotide
agagcccguugagguuggc

SEQ ID NO: 907485 - RNA, 19 nt, Artificial Sequence
  Description of Artificial Sequence: Synthetic oligonucleotide
cccacgauaggagacggca

SEQ ID NO: 907486 - RNA, 19 nt, Artificial Sequence
  Description of Artificial Sequence: Synthetic oligonucleotide
augcgucgcuggaacacca

SEQ ID NO: 907487 - RNA, 19 nt, Artificial Sequence
  Description of Artificial Sequence: Synthetic oligonucleotide
cugggcgaacacagcuuca

SEQ ID NO: 907488 - RNA, 19 nt, Artificial Sequence
  Description of Artificial Sequence: Synthetic oligonucleotide
ccugagguaugguccagga

SEQ ID NO: 907489 - RNA, 19 nt, Artificial Sequence
  Description of Artificial Sequence: Synthetic oligonucleotide
guccgucuguccguccaug

SEQ ID NO: 907490 - RNA, 19 nt, Artificial Sequence
  Description of Artificial Sequence: Synthetic oligonucleotide
ccaugcgucgcuggaacac

SEQ ID NO: 907491 - RNA, 19 nt, Artificial Sequence
  Description of Artificial Sequence: Synthetic oligonucleotide
acgguggacacggggccca

SEQ ID NO: 907492 - RNA, 19 nt, Artificial Sequence
  Description of Artificial Sequence: Synthetic oligonucleotide
cacggggcccacacgcuga

SEQ ID NO: 907493 - RNA, 19 nt, Artificial Sequence
  Description of Artificial Sequence: Synthetic oligonucleotide
gguccacgcgcaucgagua

SEQ ID NO: 907494 - RNA, 19 nt, Artificial Sequence
  Description of Artificial Sequence: Synthetic oligonucleotide
gggucucgaucacgggcag

SEQ ID NO: 907495 - RNA, 19 nt, Artificial Sequence
  Description of Artificial Sequence: Synthetic oligonucleotide
aggagacggcacaggagau

SEQ ID NO: 907496 - RNA, 19 nt, Artificial Sequence
  Description of Artificial Sequence: Synthetic oligonucleotide
gccagaacucccuggagau

SEQ ID NO: 907497 - RNA, 19 nt, Artificial Sequence
  Description of Artificial Sequence: Synthetic oligonucleotide
gccccacgauaggagacgg

SEQ ID NO: 907498 - RNA, 19 nt, Artificial Sequence
  Description of Artificial Sequence: Synthetic oligonucleotide
ccacccgcugaccaucaug

SEQ ID NO: 907499 - RNA, 19 nt, Artificial Sequence
  Description of Artificial Sequence: Synthetic oligonucleotide
ugccgcugugguagcucau

SEQ ID NO: 907500 - RNA, 19 nt, Artificial Sequence
  Description of Artificial Sequence: Synthetic oligonucleotide
cgacaacgagacacggggc

SEQ ID NO: 907501 - RNA, 19 nt, Artificial Sequence
  Description of Artificial Sequence: Synthetic oligonucleotide
agcccgccuccaucagucu

SEQ ID NO: 907502 - RNA, 19 nt, Artificial Sequence
  Description of Artificial Sequence: Synthetic oligonucleotide
cagccgucaccccgacaac

SEQ ID NO: 907503 - RNA, 19 nt, Artificial Sequence
  Description of Artificial Sequence: Synthetic oligonucleotide
cagacacggggcccaccuc

SEQ ID NO: 907504 - RNA, 19 nt, Artificial Sequence
  Description of Artificial Sequence: Synthetic oligonucleotide
gcauagugacaguuccugu

SEQ ID NO: 907505 - RNA, 19 nt, Artificial Sequence
  Description of Artificial Sequence: Synthetic oligonucleotide
ccgcugaccaucauggagu

SEQ ID NO: 907506 - RNA, 19 nt, Artificial Sequence
  Description of Artificial Sequence: Synthetic oligonucleotide
caacagacacggggcccac

SEQ ID NO: 907507 - RNA, 19 nt, Artificial Sequence
  Description of Artificial Sequence: Synthetic oligonucleotide
guccguccaugcgucgcug

SEQ ID NO: 907508 - RNA, 19 nt, Artificial Sequence
  Description of Artificial Sequence: Synthetic oligonucleotide
ccgcugugguagcucauug

SEQ ID NO: 907509 - RNA, 19 nt, Artificial Sequence
  Description of Artificial Sequence: Synthetic oligonucleotide
cccugagguaugguccagg

SEQ ID NO: 907510 - RNA, 19 nt, Artificial Sequence
  Description of Artificial Sequence: Synthetic oligonucleotide
caccacucggagguccuga

SEQ ID NO: 907511 - RNA, 19 nt, Artificial Sequence
  Description of Artificial Sequence: Synthetic oligonucleotide
guagcucauugagucgccu

SEQ ID NO: 907512 - RNA, 19 nt, Artificial Sequence
  Description of Artificial Sequence: Synthetic oligonucleotide
cacggggcccacccgcuga

SEQ ID NO: 907513 - RNA, 19 nt, Artificial Sequence
  Description of Artificial Sequence: Synthetic oligonucleotide
gagauccaguguggucgga

SEQ ID NO: 907514 - RNA, 19 nt, Artificial Sequence
  Description of Artificial Sequence: Synthetic oligonucleotide
ggcauacuccucccagucu

SEQ ID NO: 907515 - RNA, 19 nt, Artificial Sequence
  Description of Artificial Sequence: Synthetic oligonucleotide
ggucucucacgguggccuc

SEQ ID NO: 907516 - RNA, 19 nt, Artificial Sequence
  Description of Artificial Sequence: Synthetic oligonucleotide
  modified_base (12)..(12): a, c, u, g, unknown or other
cccugauagaancggggua

SEQ ID NO: 907517 - RNA, 19 nt, Artificial Sequence
  Description of Artificial Sequence: Synthetic oligonucleotide
ucgcacccuuugguugcca

SEQ ID NO: 907518 - RNA, 19 nt, Artificial Sequence
  Description of Artificial Sequence: Synthetic oligonucleotide
ccgucaccccgacaacgag

SEQ ID NO: 907519 - RNA, 19 nt, Artificial Sequence
  Description of Artificial Sequence: Synthetic oligonucleotide
caccaccuggggacgccca

SEQ ID NO: 907520 - RNA, 19 nt, Artificial Sequence
  Description of Artificial Sequence: Synthetic oligonucleotide
ccccgacaacgagacacgg

SEQ ID NO: 907521 - RNA, 19 nt, Artificial Sequence
  Description of Artificial Sequence: Synthetic oligonucleotide
  modified_base (13)..(13): a, c, u, g, unknown or other
gcccugauagaancggggu

SEQ ID NO: 907522 - RNA, 19 nt, Artificial Sequence
  Description of Artificial Sequence: Synthetic oligonucleotide
ccaggccggggaugggccc

SEQ ID NO: 907523 - RNA, 19 nt, Artificial Sequence
  Description of Artificial Sequence: Synthetic oligonucleotide
ccccacgauaggagacggc

SEQ ID NO: 907524 - RNA, 19 nt, Artificial Sequence
  Description of Artificial Sequence: Synthetic oligonucleotide
gaggaccgucaaucauggu

SEQ ID NO: 907525 - RNA, 19 nt, Artificial Sequence
  Description of Artificial Sequence: Synthetic oligonucleotide
ggaccucauugcccagcca

SEQ ID NO: 907526 - RNA, 19 nt, Artificial Sequence
  Description of Artificial Sequence: Synthetic oligonucleotide
cgcaucgaguagucuccag

SEQ ID NO: 907527 - RNA, 19 nt, Artificial Sequence
  Description of Artificial Sequence: Synthetic oligonucleotide
ggucuggcuccaggccggg

SEQ ID NO: 907528 - RNA, 19 nt, Artificial Sequence
  Description of Artificial Sequence: Synthetic oligonucleotide
gacacggggcccacccgcu

SEQ ID NO: 907529 - RNA, 19 nt, Artificial Sequence
  Description of Artificial Sequence: Synthetic oligonucleotide
ccacgcgcaucgaguaguc

SEQ ID NO: 907530 - RNA, 19 nt, Artificial Sequence
  Description of Artificial Sequence: Synthetic oligonucleotide
ccccaacaacagacacggg

SEQ ID NO: 907531 - RNA, 19 nt, Artificial Sequence
  Description of Artificial Sequence: Synthetic oligonucleotide
caggaggaccccagcuggu

SEQ ID NO: 907532 - RNA, 19 nt, Artificial Sequence
  Description of Artificial Sequence: Synthetic oligonucleotide
ggaugggcccacgguggac

SEQ ID NO: 907533 - RNA, 19 nt, Artificial Sequence
  Description of Artificial Sequence: Synthetic oligonucleotide
guccugaccaggagccagu

SEQ ID NO: 907534 - RNA, 19 nt, Artificial Sequence
  Description of Artificial Sequence: Synthetic oligonucleotide
gcccuuccagugguaccag

SEQ ID NO: 907535 - RNA, 19 nt, Artificial Sequence
  Description of Artificial Sequence: Synthetic oligonucleotide
gcucgcgguugccguugag

SEQ ID NO: 907536 - RNA, 19 nt, Artificial Sequence
  Description of Artificial Sequence: Synthetic oligonucleotide
gucccucguagagcacgga

SEQ ID NO: 907537 - RNA, 19 nt, Artificial Sequence
  Description of Artificial Sequence: Synthetic oligonucleotide
ggcccacccgcugaccauc

SEQ ID NO: 907538 - RNA, 19 nt, Artificial Sequence
  Description of Artificial Sequence: Synthetic oligonucleotide
ggacgcccaucacuguccu

SEQ ID NO: 907539 - RNA, 19 nt, Artificial Sequence
  Description of Artificial Sequence: Synthetic oligonucleotide
ggucucgaucacgggcaga

SEQ ID NO: 907540 - RNA, 19 nt, Artificial Sequence
  Description of Artificial Sequence: Synthetic oligonucleotide
cacggacagugaccuggua

SEQ ID NO: 907541 - RNA, 19 nt, Artificial Sequence
  Description of Artificial Sequence: Synthetic oligonucleotide
gggucacgcccacggugga

SEQ ID NO: 907542 - RNA, 19 nt, Artificial Sequence
  Description of Artificial Sequence: Synthetic oligonucleotide
acccggcaucaggucggug

SEQ ID NO: 907543 - RNA, 19 nt, Artificial Sequence
  Description of Artificial Sequence: Synthetic oligonucleotide
cgucuguccguccaugcgu

SEQ ID NO: 907544 - RNA, 19 nt, Artificial Sequence
  Description of Artificial Sequence: Synthetic oligonucleotide
ccccgacaacagacacggg

SEQ ID NO: 907545 - RNA, 19 nt, Artificial Sequence
  Description of Artificial Sequence: Synthetic oligonucleotide
ccguccaugcgucgcugga

SEQ ID NO: 907546 - RNA, 19 nt, Artificial Sequence
  Description of Artificial Sequence: Synthetic oligonucleotide
cucguagagcacggacagu

SEQ ID NO: 907547 - RNA, 19 nt, Artificial Sequence
  Description of Artificial Sequence: Synthetic oligonucleotide
ccagucgcacccuuugguu

SEQ ID NO: 907548 - RNA, 19 nt, Artificial Sequence
  Description of Artificial Sequence: Synthetic oligonucleotide
gcgcaucgaguagucucca

SEQ ID NO: 907549 - RNA, 19 nt, Artificial Sequence
  Description of Artificial Sequence: Synthetic oligonucleotide
cccuggagauguucccaaa

SEQ ID NO: 907550 - RNA, 19 nt, Artificial Sequence
  Description of Artificial Sequence: Synthetic oligonucleotide
cugacugcacggccucguu

SEQ ID NO: 907551 - RNA, 19 nt, Artificial Sequence
  Description of Artificial Sequence: Synthetic oligonucleotide
gguggacacggggcccaca

SEQ ID NO: 907552 - RNA, 19 nt, Artificial Sequence
  Description of Artificial Sequence: Synthetic oligonucleotide
gacgcccaucacuguccuu

SEQ ID NO: 907553 - RNA, 19 nt, Artificial Sequence
  Description of Artificial Sequence: Synthetic oligonucleotide
ccagguguagacgguaguu

SEQ ID NO: 907554 - RNA, 19 nt, Artificial Sequence
  Description of Artificial Sequence: Synthetic oligonucleotide
agccugcgucagacugugu

SEQ ID NO: 907555 - RNA, 19 nt, Artificial Sequence
  Description of Artificial Sequence: Synthetic oligonucleotide
cacgcgcaucgaguagucu

SEQ ID NO: 907556 - RNA, 19 nt, Artificial Sequence
  Description of Artificial Sequence: Synthetic oligonucleotide
ccgcucgcgguugccguug

SEQ ID NO: 907557 - RNA, 19 nt, Artificial Sequence
  Description of Artificial Sequence: Synthetic oligonucleotide
ccccgacacgcaccaccug

SEQ ID NO: 907558 - RNA, 19 nt, Artificial Sequence
  Description of Artificial Sequence: Synthetic oligonucleotide
ccaaaggccgcucgcgguu

SEQ ID NO: 907559 - RNA, 19 nt, Artificial Sequence
  Description of Artificial Sequence: Synthetic oligonucleotide
cgcaccaccuggggacgcc

SEQ ID NO: 907560 - RNA, 19 nt, Artificial Sequence
  Description of Artificial Sequence: Synthetic oligonucleotide
gcacggacagugaccuggu

SEQ ID NO: 907561 - RNA, 19 nt, Artificial Sequence
  Description of Artificial Sequence: Synthetic oligonucleotide
ggagaggcucagggagucu

SEQ ID NO: 907562 - RNA, 19 nt, Artificial Sequence
  Description of Artificial Sequence: Synthetic oligonucleotide
cggcaucaggucggugagc

SEQ ID NO: 907563 - RNA, 19 nt, Artificial Sequence
  Description of Artificial Sequence: Synthetic oligonucleotide
cucucacgguggccucccu

SEQ ID NO: 907564 - RNA, 19 nt, Artificial Sequence
  Description of Artificial Sequence: Synthetic oligonucleotide
cacugccgcugugguagcu

SEQ ID NO: 907565 - RNA, 19 nt, Artificial Sequence
  Description of Artificial Sequence: Synthetic oligonucleotide
gccaccacucggagguccu

SEQ ID NO: 907566 - RNA, 19 nt, Artificial Sequence
  Description of Artificial Sequence: Synthetic oligonucleotide
gggcccacacgcugaccau

SEQ ID NO: 907567 - RNA, 19 nt, Artificial Sequence
  Description of Artificial Sequence: Synthetic oligonucleotide
ccggggaugggcccacggu

SEQ ID NO: 907568 - RNA, 19 nt, Artificial Sequence
  Description of Artificial Sequence: Synthetic oligonucleotide
gccgcugugguagcucauu

SEQ ID NO: 907569 - RNA, 19 nt, Artificial Sequence
  Description of Artificial Sequence: Synthetic oligonucleotide
gggcccacccgcugaccau

SEQ ID NO: 907570 - RNA, 19 nt, Artificial Sequence
  Description of Artificial Sequence: Synthetic oligonucleotide
ccagcccgccuccaucagu

SEQ ID NO: 907571 - RNA, 19 nt, Artificial Sequence
  Description of Artificial Sequence: Synthetic oligonucleotide
ccgccuccaucagucucca

SEQ ID NO: 907572 - RNA, 19 nt, Artificial Sequence
  Description of Artificial Sequence: Synthetic oligonucleotide
cacccggcaucaggucggu

SEQ ID NO: 907573 - RNA, 19 nt, Artificial Sequence
  Description of Artificial Sequence: Synthetic oligonucleotide
gguugccguugaggaagau

SEQ ID NO: 907574 - RNA, 19 nt, Artificial Sequence
  Description of Artificial Sequence: Synthetic oligonucleotide
ccgagaacucgaagcccuu

SEQ ID NO: 907575 - RNA, 19 nt, Artificial Sequence
  Description of Artificial Sequence: Synthetic oligonucleotide
ggcccacacgcuggccacu

SEQ ID NO: 907576 - RNA, 19 nt, Artificial Sequence
  Description of Artificial Sequence: Synthetic oligonucleotide
cggggcccacccgcugacc

SEQ ID NO: 907577 - RNA, 19 nt, Artificial Sequence
  Description of Artificial Sequence: Synthetic oligonucleotide
cggggcccaccucuucucu

SEQ ID NO: 907578 - RNA, 19 nt, Artificial Sequence
  Description of Artificial Sequence: Synthetic oligonucleotide
ccguugagguuggcauagu

SEQ ID NO: 907579 - RNA, 19 nt, Artificial Sequence
  Description of Artificial Sequence: Synthetic oligonucleotide
cccucagguccacgcgcau

SEQ ID NO: 907580 - RNA, 19 nt, Artificial Sequence
  Description of Artificial Sequence: Synthetic oligonucleotide
cgccuccaucagucuccau

SEQ ID NO: 907581 - RNA, 19 nt, Artificial Sequence
  Description of Artificial Sequence: Synthetic oligonucleotide
  modified_base (1)..(1): a, c, u, g, unknown or other
ncgggguagcugacugcac

SEQ ID NO: 907582 - RNA, 19 nt, Artificial Sequence
  Description of Artificial Sequence: Synthetic oligonucleotide
aacacguggaagcuguucc

SEQ ID NO: 907583 - RNA, 19 nt, Artificial Sequence
  Description of Artificial Sequence: Synthetic oligonucleotide
ucuagaagaguguuuaagg

SEQ ID NO: 907584 - RNA, 19 nt, Artificial Sequence
  Description of Artificial Sequence: Synthetic oligonucleotide
gauaaagguguauccaugg

SEQ ID NO: 907585 - RNA, 19 nt, Artificial Sequence
  Description of Artificial Sequence: Synthetic oligonucleotide
aaagguguauccauggagg

SEQ ID NO: 907586 - RNA, 19 nt, Artificial Sequence
  Description of Artificial Sequence: Synthetic oligonucleotide
cauacuugggcacagagug

SEQ ID NO: 907587 - RNA, 19 nt, Artificial Sequence
  Description of Artificial Sequence: Synthetic oligonucleotide
agucaaugaaggcaguugg

SEQ ID NO: 907588 - RNA, 19 nt, Artificial Sequence
  Description of Artificial Sequence: Synthetic oligonucleotide
agauuauggguccagagcu

SEQ ID NO: 907589 - RNA, 19 nt, Artificial Sequence
  Description of Artificial Sequence: Synthetic oligonucleotide
ugagaucaggaacugaaug

SEQ ID NO: 907590 - RNA, 19 nt, Artificial Sequence
  Description of Artificial Sequence: Synthetic oligonucleotide
uguuuaagggcugagcuag

SEQ ID NO: 907591 - RNA, 19 nt, Artificial Sequence
  Description of Artificial Sequence: Synthetic oligonucleotide
cugaguaugggccaggacc

SEQ ID NO: 907592 - RNA, 19 nt, Artificial Sequence
  Description of Artificial Sequence: Synthetic oligonucleotide
accucuaggagacaguggg

SEQ ID NO: 907593 - RNA, 19 nt, Artificial Sequence
  Description of Artificial Sequence: Synthetic oligonucleotide
auacauguugagcugccgc

SEQ ID NO: 907594 - RNA, 19 nt, Artificial Sequence
  Description of Artificial Sequence: Synthetic oligonucleotide
auaucagagauuauggguc

SEQ ID NO: 907595 - RNA, 19 nt, Artificial Sequence
  Description of Artificial Sequence: Synthetic oligonucleotide
ucguucucauguuucaugg

SEQ ID NO: 907596 - RNA, 19 nt, Artificial Sequence
  Description of Artificial Sequence: Synthetic oligonucleotide
aguguuuaagggcugagcu

SEQ ID NO: 907597 - RNA, 19 nt, Artificial Sequence
  Description of Artificial Sequence: Synthetic oligonucleotide
aguacugucgaccauacuu

SEQ ID NO: 907598 - RNA, 19 nt, Artificial Sequence
  Description of Artificial Sequence: Synthetic oligonucleotide
gucacucaacaucagaggg

SEQ ID NO: 907599 - RNA, 19 nt, Artificial Sequence
  Description of Artificial Sequence: Synthetic oligonucleotide
uucagagcccgucagaaga

SEQ ID NO: 907600 - RNA, 19 nt, Artificial Sequence
  Description of Artificial Sequence: Synthetic oligonucleotide
uccgguuguguccacaggg

SEQ ID NO: 907601 - RNA, 19 nt, Artificial Sequence
  Description of Artificial Sequence: Synthetic oligonucleotide
uuucggaagccauacaugu

SEQ ID NO: 907602 - RNA, 19 nt, Artificial Sequence
  Description of Artificial Sequence: Synthetic oligonucleotide
uccgucaacagccugguga

SEQ ID NO: 907603 - RNA, 19 nt, Artificial Sequence
  Description of Artificial Sequence: Synthetic oligonucleotide
gagauuauggguccagagc

SEQ ID NO: 907604 - RNA, 19 nt, Artificial Sequence
  Description of Artificial Sequence: Synthetic oligonucleotide
uggagauaaagguguaucc

SEQ ID NO: 907605 - RNA, 19 nt, Artificial Sequence
  Description of Artificial Sequence: Synthetic oligonucleotide
ugaaugagcuuguugacaa

SEQ ID NO: 907606 - RNA, 19 nt, Artificial Sequence
  Description of Artificial Sequence: Synthetic oligonucleotide
aaggcaguuggagauaaag

SEQ ID NO: 907607 - RNA, 19 nt, Artificial Sequence
  Description of Artificial Sequence: Synthetic oligonucleotide
agggcuugccuccaguacc

SEQ ID NO: 907608 - RNA, 19 nt, Artificial Sequence
  Description of Artificial Sequence: Synthetic oligonucleotide
guucucauguuucauggcc

SEQ ID NO: 907609 - RNA, 19 nt, Artificial Sequence
  Description of Artificial Sequence: Synthetic oligonucleotide
gauaucagagauuaugggu

SEQ ID NO: 907610 - RNA, 19 nt, Artificial Sequence
  Description of Artificial Sequence: Synthetic oligonucleotide
agagauuauggguccagag

SEQ ID NO: 907611 - RNA, 19 nt, Artificial Sequence
  Description of Artificial Sequence: Synthetic oligonucleotide
uuggggagcacuuccuugg

SEQ ID NO: 907612 - RNA, 19 nt, Artificial Sequence
  Description of Artificial Sequence: Synthetic oligonucleotide
auggacuccgguugugucc

SEQ ID NO: 907613 - RNA, 19 nt, Artificial Sequence
  Description of Artificial Sequence: Synthetic oligonucleotide
uacuugggcacagagugcg

SEQ ID NO: 907614 - RNA, 19 nt, Artificial Sequence
  Description of Artificial Sequence: Synthetic oligonucleotide
acguccuagguguaguugg

SEQ ID NO: 907615 - RNA, 19 nt, Artificial Sequence
  Description of Artificial Sequence: Synthetic oligonucleotide
ucucggacgaagcgggugg

SEQ ID NO: 907616 - RNA, 19 nt, Artificial Sequence
  Description of Artificial Sequence: Synthetic oligonucleotide
cucguucuugucuaggcag

SEQ ID NO: 907617 - RNA, 19 nt, Artificial Sequence
  Description of Artificial Sequence: Synthetic oligonucleotide
ugaucacugagcucguucu

SEQ ID NO: 907618 - RNA, 19 nt, Artificial Sequence
  Description of Artificial Sequence: Synthetic oligonucleotide
ucguucuugucuaggcagg

SEQ ID NO: 907619 - RNA, 19 nt, Artificial Sequence
  Description of Artificial Sequence: Synthetic oligonucleotide
uggauugccugucuugucu

SEQ ID NO: 907620 - RNA, 19 nt, Artificial Sequence
  Description of Artificial Sequence: Synthetic oligonucleotide
uacgcugaggcacuucuca

SEQ ID NO: 907621 - RNA, 19 nt, Artificial Sequence
  Description of Artificial Sequence: Synthetic oligonucleotide
aagguguauccauggagga

SEQ ID NO: 907622 - RNA, 19 nt, Artificial Sequence
  Description of Artificial Sequence: Synthetic oligonucleotide
aggcaguucacuguucccc

SEQ ID NO: 907623 - RNA, 19 nt, Artificial Sequence
  Description of Artificial Sequence: Synthetic oligonucleotide
aaacacguggaagcuguuc

SEQ ID NO: 907624 - RNA, 19 nt, Artificial Sequence
  Description of Artificial Sequence: Synthetic oligonucleotide
uacugucgaccauacuugg

SEQ ID NO: 907625 - RNA, 19 nt, Artificial Sequence
  Description of Artificial Sequence: Synthetic oligonucleotide
gaaggauggagucaaugaa

SEQ ID NO: 907626 - RNA, 19 nt, Artificial Sequence
  Description of Artificial Sequence: Synthetic oligonucleotide
acacguggaagcuguuccc

SEQ ID NO: 907627 - RNA, 19 nt, Artificial Sequence
  Description of Artificial Sequence: Synthetic oligonucleotide
acacggaucaggguacugc

SEQ ID NO: 907628 - RNA, 19 nt, Artificial Sequence
  Description of Artificial Sequence: Synthetic oligonucleotide
agagguguaaaggcuagag

SEQ ID NO: 907629 - RNA, 19 nt, Artificial Sequence
  Description of Artificial Sequence: Synthetic oligonucleotide
caaccuccaucuauguucc

SEQ ID NO: 907630 - RNA, 19 nt, Artificial Sequence
  Description of Artificial Sequence: Synthetic oligonucleotide
uccgggucgcucacgaggg

SEQ ID NO: 907631 - RNA, 19 nt, Artificial Sequence
  Description of Artificial Sequence: Synthetic oligonucleotide
agucagcucagugauauca

SEQ ID NO: 907632 - RNA, 19 nt, Artificial Sequence
  Description of Artificial Sequence: Synthetic oligonucleotide
auaaagguguauccaugga

SEQ ID NO: 907633 - RNA, 19 nt, Artificial Sequence
  Description of Artificial Sequence: Synthetic oligonucleotide
cuugaccugaggcacugcc

SEQ ID NO: 907634 - RNA, 19 nt, Artificial Sequence
  Description of Artificial Sequence: Synthetic oligonucleotide
agcucagugauaucagaga

SEQ ID NO: 907635 - RNA, 19 nt, Artificial Sequence
  Description of Artificial Sequence: Synthetic oligonucleotide
uucuugucuaggcaggcua

SEQ ID NO: 907636 - RNA, 19 nt, Artificial Sequence
  Description of Artificial Sequence: Synthetic oligonucleotide
cauacacuccuguuucccc

SEQ ID NO: 907637 - RNA, 19 nt, Artificial Sequence
  Description of Artificial Sequence: Synthetic oligonucleotide
cagagccagauccaucucg

SEQ ID NO: 907638 - RNA, 19 nt, Artificial Sequence
  Description of Artificial Sequence: Synthetic oligonucleotide
aggauggacggccagggcu

SEQ ID NO: 907639 - RNA, 19 nt, Artificial Sequence
  Description of Artificial Sequence: Synthetic oligonucleotide
uaugguggcuugaccuagg

SEQ ID NO: 907640 - RNA, 19 nt, Artificial Sequence
  Description of Artificial Sequence: Synthetic oligonucleotide
cauggaugcuggaacucgg

SEQ ID NO: 907641 - RNA, 19 nt, Artificial Sequence
  Description of Artificial Sequence: Synthetic oligonucleotide
guaggagucagcucaguga

SEQ ID NO: 907642 - RNA, 19 nt, Artificial Sequence
  Description of Artificial Sequence: Synthetic oligonucleotide
uuugggagguucagagccc

SEQ ID NO: 907643 - RNA, 19 nt, Artificial Sequence
  Description of Artificial Sequence: Synthetic oligonucleotide
auccaucucggacgaagcg

SEQ ID NO: 907644 - RNA, 19 nt, Artificial Sequence
  Description of Artificial Sequence: Synthetic oligonucleotide
ucugccucaauaggccugg

SEQ ID NO: 907645 - RNA, 19 nt, Artificial Sequence
  Description of Artificial Sequence: Synthetic oligonucleotide
ucuugucuaggcaggcuac

SEQ ID NO: 907646 - RNA, 19 nt, Artificial Sequence
  Description of Artificial Sequence: Synthetic oligonucleotide
cuugacacggaucagggua

SEQ ID NO: 907647 - RNA, 19 nt, Artificial Sequence
  Description of Artificial Sequence: Synthetic oligonucleotide
agcaggguuaggcucgcuc

SEQ ID NO: 907648 - RNA, 19 nt, Artificial Sequence
  Description of Artificial Sequence: Synthetic oligonucleotide
guaugcagcccucaggauc

SEQ ID NO: 907649 - RNA, 19 nt, Artificial Sequence
  Description of Artificial Sequence: Synthetic oligonucleotide
uugaccugaggcacugccc

SEQ ID NO: 907650 - RNA, 19 nt, Artificial Sequence
  Description of Artificial Sequence: Synthetic oligonucleotide
gggaucuuucucuucaccc

SEQ ID NO: 907651 - RNA, 19 nt, Artificial Sequence
  Description of Artificial Sequence: Synthetic oligonucleotide
cucguucucauguuucaug

SEQ ID NO: 907652 - RNA, 19 nt, Artificial Sequence
  Description of Artificial Sequence: Synthetic oligonucleotide
ggugucaucccgcucaggc

SEQ ID NO: 907653 - RNA, 19 nt, Artificial Sequence
  Description of Artificial Sequence: Synthetic oligonucleotide
ccaaccuccaucuauguuc

SEQ ID NO: 907654 - RNA, 19 nt, Artificial Sequence
  Description of Artificial Sequence: Synthetic oligonucleotide
uuuaagggcugagcuagug

SEQ ID NO: 907655 - RNA, 19 nt, Artificial Sequence
  Description of Artificial Sequence: Synthetic oligonucleotide
uggaagcuguucccacucg

SEQ ID NO: 907656 - RNA, 19 nt, Artificial Sequence
  Description of Artificial Sequence: Synthetic oligonucleotide
aggcaguuggagauaaagg

SEQ ID NO: 907657 - RNA, 19 nt, Artificial Sequence
  Description of Artificial Sequence: Synthetic oligonucleotide
guacugucgaccauacuug

SEQ ID NO: 907658 - RNA, 19 nt, Artificial Sequence
  Description of Artificial Sequence: Synthetic oligonucleotide
gauccgguucgacugcacc

SEQ ID NO: 907659 - RNA, 19 nt, Artificial Sequence
  Description of Artificial Sequence: Synthetic oligonucleotide
ugaccuaggaugcccugga

SEQ ID NO: 907660 - RNA, 19 nt, Artificial Sequence
  Description of Artificial Sequence: Synthetic oligonucleotide
ugucuaggcaggcuacgcu

SEQ ID NO: 907661 - RNA, 19 nt, Artificial Sequence
  Description of Artificial Sequence: Synthetic oligonucleotide
agauaaagguguauccaug

SEQ ID NO: 907662 - RNA, 19 nt, Artificial Sequence
  Description of Artificial Sequence: Synthetic oligonucleotide
ugucgaccauacuugggca

SEQ ID NO: 907663 - RNA, 19 nt, Artificial Sequence
  Description of Artificial Sequence: Synthetic oligonucleotide
caucuauguuccacugggg

SEQ ID NO: 907664 - RNA, 19 nt, Artificial Sequence
  Description of Artificial Sequence: Synthetic oligonucleotide
auacacuccuguuuccccu

SEQ ID NO: 907665 - RNA, 19 nt, Artificial Sequence
  Description of Artificial Sequence: Synthetic oligonucleotide
ucgaaggauggagucaaug

SEQ ID NO: 907666 - RNA, 19 nt, Artificial Sequence
  Description of Artificial Sequence: Synthetic oligonucleotide
cuagugucgucgcugcccc

SEQ ID NO: 907667 - RNA, 19 nt, Artificial Sequence
  Description of Artificial Sequence: Synthetic oligonucleotide
gucuaggcaggcuacgcug

SEQ ID NO: 907668 - RNA, 19 nt, Artificial Sequence
  Description of Artificial Sequence: Synthetic oligonucleotide
guauccauggaggauggac

SEQ ID NO: 907669 - RNA, 19 nt, Artificial Sequence
  Description of Artificial Sequence: Synthetic oligonucleotide
guucgacugcaccagugag

SEQ ID NO: 907670 - RNA, 19 nt, Artificial Sequence
  Description of Artificial Sequence: Synthetic oligonucleotide
gcugaggcacuucucaggg

SEQ ID NO: 907671 - RNA, 19 nt, Artificial Sequence
  Description of Artificial Sequence: Synthetic oligonucleotide
aacucggugucaucccgcu

SEQ ID NO: 907672 - RNA, 19 nt, Artificial Sequence
  Description of Artificial Sequence: Synthetic oligonucleotide
caccagugagaucaggaac

SEQ ID NO: 907673 - RNA, 19 nt, Artificial Sequence
  Description of Artificial Sequence: Synthetic oligonucleotide
gaucaggaacugaaugagc

SEQ ID NO: 907674 - RNA, 19 nt, Artificial Sequence
  Description of Artificial Sequence: Synthetic oligonucleotide
uaggcucgcucucucgaag

SEQ ID NO: 907675 - RNA, 19 nt, Artificial Sequence
  Description of Artificial Sequence: Synthetic oligonucleotide
gauugccugucuugucucc

SEQ ID NO: 907676 - RNA, 19 nt, Artificial Sequence
  Description of Artificial Sequence: Synthetic oligonucleotide
cccgucagaagagagaugg

SEQ ID NO: 907677 - RNA, 19 nt, Artificial Sequence
  Description of Artificial Sequence: Synthetic oligonucleotide
acauguugagcugccgcac

SEQ ID NO: 907678 - RNA, 19 nt, Artificial Sequence
  Description of Artificial Sequence: Synthetic oligonucleotide
agugcgcugagcugcuguc

SEQ ID NO: 907679 - RNA, 19 nt, Artificial Sequence
  Description of Artificial Sequence: Synthetic oligonucleotide
cuuggggagcacuuccuug

SEQ ID NO: 907680 - RNA, 19 nt, Artificial Sequence
  Description of Artificial Sequence: Synthetic oligonucleotide
cuugaccaggccaccgugc

SEQ ID NO: 907681 - RNA, 19 nt, Artificial Sequence
  Description of Artificial Sequence: Synthetic oligonucleotide
acguggaagcuguucccac

SEQ ID NO: 907682 - RNA, 19 nt, Artificial Sequence
  Description of Artificial Sequence: Synthetic oligonucleotide
gagauaaagguguauccau

SEQ ID NO: 907683 - RNA, 19 nt, Artificial Sequence
  Description of Artificial Sequence: Synthetic oligonucleotide
ggcgucaggguccagcagg

SEQ ID NO: 907684 - RNA, 19 nt, Artificial Sequence
  Description of Artificial Sequence: Synthetic oligonucleotide
aagaguguuuaagggcuga

SEQ ID NO: 907685 - RNA, 19 nt, Artificial Sequence
  Description of Artificial Sequence: Synthetic oligonucleotide
uguccgagccgcuccgccg

SEQ ID NO: 907686 - RNA, 19 nt, Artificial Sequence
  Description of Artificial Sequence: Synthetic oligonucleotide
cauguuucauggccaggag

SEQ ID NO: 907687 - RNA, 19 nt, Artificial Sequence
  Description of Artificial Sequence: Synthetic oligonucleotide
gagcuagugucgucgcugc

SEQ ID NO: 907688 - RNA, 19 nt, Artificial Sequence
  Description of Artificial Sequence: Synthetic oligonucleotide
gauccaucucggacgaagc

SEQ ID NO: 907689 - RNA, 19 nt, Artificial Sequence
  Description of Artificial Sequence: Synthetic oligonucleotide
ucuaggagacagugggguc

SEQ ID NO: 907690 - RNA, 19 nt, Artificial Sequence
  Description of Artificial Sequence: Synthetic oligonucleotide
ggaagcuguucccacucgg

SEQ ID NO: 907691 - RNA, 19 nt, Artificial Sequence
  Description of Artificial Sequence: Synthetic oligonucleotide
auccgguucgacugcacca

SEQ ID NO: 907692 - RNA, 19 nt, Artificial Sequence
  Description of Artificial Sequence: Synthetic oligonucleotide
ucgucuguguagucauccc

SEQ ID NO: 907693 - RNA, 19 nt, Artificial Sequence
  Description of Artificial Sequence: Synthetic oligonucleotide
uccgguucgacugcaccag

SEQ ID NO: 907694 - RNA, 19 nt, Artificial Sequence
  Description of Artificial Sequence: Synthetic oligonucleotide
gugaucacugagcucguuc

SEQ ID NO: 907695 - RNA, 19 nt, Artificial Sequence
  Description of Artificial Sequence: Synthetic oligonucleotide
cucggugucaucccgcuca

SEQ ID NO: 907696 - RNA, 19 nt, Artificial Sequence
  Description of Artificial Sequence: Synthetic oligonucleotide
ggcaguucacuguuccccg

SEQ ID NO: 907697 - RNA, 19 nt, Artificial Sequence
  Description of Artificial Sequence: Synthetic oligonucleotide
uaggaugcccuggauugcc

SEQ ID NO: 907698 - RNA, 19 nt, Artificial Sequence
  Description of Artificial Sequence: Synthetic oligonucleotide
cuugucuaggcaggcuacg

SEQ ID NO: 907699 - RNA, 19 nt, Artificial Sequence
  Description of Artificial Sequence: Synthetic oligonucleotide
uaugcuccugccuggggau

SEQ ID NO: 907700 - RNA, 19 nt, Artificial Sequence
  Description of Artificial Sequence: Synthetic oligonucleotide
gcugcgcacacacagcaag

SEQ ID NO: 907701 - RNA, 19 nt, Artificial Sequence
  Description of Artificial Sequence: Synthetic oligonucleotide
guacccgagggcuccgagg

SEQ ID NO: 907702 - RNA, 19 nt, Artificial Sequence
  Description of Artificial Sequence: Synthetic oligonucleotide
cuaugguggcuugaccuag

SEQ ID NO: 907703 - RNA, 19 nt, Artificial Sequence
  Description of Artificial Sequence: Synthetic oligonucleotide
agcuagugucgucgcugcc

SEQ ID NO: 907704 - RNA, 19 nt, Artificial Sequence
  Description of Artificial Sequence: Synthetic oligonucleotide
guuaggcucgcucucucga

SEQ ID NO: 907705 - RNA, 19 nt, Artificial Sequence
  Description of Artificial Sequence: Synthetic oligonucleotide
uggacuccgguugugucca

SEQ ID NO: 907706 - RNA, 19 nt, Artificial Sequence
  Description of Artificial Sequence: Synthetic oligonucleotide
ggagauaaagguguaucca

SEQ ID NO: 907707 - RNA, 19 nt, Artificial Sequence
  Description of Artificial Sequence: Synthetic oligonucleotide
accgugcucaauguggacu

SEQ ID NO: 907708 - RNA, 19 nt, Artificial Sequence
  Description of Artificial Sequence: Synthetic oligonucleotide
cugagcuguguagugcacc

SEQ ID NO: 907709 - RNA, 19 nt, Artificial Sequence
  Description of Artificial Sequence: Synthetic oligonucleotide
uguccacggcgucaggguc

SEQ ID NO: 907710 - RNA, 19 nt, Artificial Sequence
  Description of Artificial Sequence: Synthetic oligonucleotide
acgcugaggcacuucucag

SEQ ID NO: 907711 - RNA, 19 nt, Artificial Sequence
  Description of Artificial Sequence: Synthetic oligonucleotide
ccuggggaugccaaagggg

SEQ ID NO: 907712 - RNA, 19 nt, Artificial Sequence
  Description of Artificial Sequence: Synthetic oligonucleotide
uuccccguguccacggcgu

SEQ ID NO: 907713 - RNA, 19 nt, Artificial Sequence
  Description of Artificial Sequence: Synthetic oligonucleotide
uuaggcucgcucucucgaa

SEQ ID NO: 907714 - RNA, 19 nt, Artificial Sequence
  Description of Artificial Sequence: Synthetic oligonucleotide
accuaggaugcccuggauu

SEQ ID NO: 907715 - RNA, 19 nt, Artificial Sequence
  Description of Artificial Sequence: Synthetic oligonucleotide
aguacccgagggcuccgag

SEQ ID NO: 907716 - RNA, 19 nt, Artificial Sequence
  Description of Artificial Sequence: Synthetic oligonucleotide
ugccaaaggggugguagga

SEQ ID NO: 907717 - RNA, 19 nt, Artificial Sequence
  Description of Artificial Sequence: Synthetic oligonucleotide
auggaggauggacggccag

SEQ ID NO: 907718 - RNA, 19 nt, Artificial Sequence
  Description of Artificial Sequence: Synthetic oligonucleotide
gccaccgugcucaaugugg

SEQ ID NO: 907719 - RNA, 19 nt, Artificial Sequence
  Description of Artificial Sequence: Synthetic oligonucleotide
gucgaccauacuugggcac

SEQ ID NO: 907720 - RNA, 19 nt, Artificial Sequence
  Description of Artificial Sequence: Synthetic oligonucleotide
agcccgucagaagagagau

SEQ ID NO: 907721 - RNA, 19 nt, Artificial Sequence
  Description of Artificial Sequence: Synthetic oligonucleotide
cuugaccuaggaugcccug

SEQ ID NO: 907722 - RNA, 19 nt, Artificial Sequence
  Description of Artificial Sequence: Synthetic oligonucleotide
augagcgcgucgguguccg

SEQ ID NO: 907723 - RNA, 19 nt, Artificial Sequence
  Description of Artificial Sequence: Synthetic oligonucleotide
gaacucggugucaucccgc

SEQ ID NO: 907724 - RNA, 19 nt, Artificial Sequence
  Description of Artificial Sequence: Synthetic oligonucleotide
uggacaggggccucucauc

SEQ ID NO: 907725 - RNA, 19 nt, Artificial Sequence
  Description of Artificial Sequence: Synthetic oligonucleotide
agagcccgucagaagagag

SEQ ID NO: 907726 - RNA, 19 nt, Artificial Sequence
  Description of Artificial Sequence: Synthetic oligonucleotide
cagggaguacugucgacca

SEQ ID NO: 907727 - RNA, 19 nt, Artificial Sequence
  Description of Artificial Sequence: Synthetic oligonucleotide
gagcgcgucgguguccggg

SEQ ID NO: 907728 - RNA, 19 nt, Artificial Sequence
  Description of Artificial Sequence: Synthetic oligonucleotide
acggcgucaggguccagca

SEQ ID NO: 907729 - RNA, 19 nt, Artificial Sequence
  Description of Artificial Sequence: Synthetic oligonucleotide
aguaugggccaggaccaug

SEQ ID NO: 907730 - RNA, 19 nt, Artificial Sequence
  Description of Artificial Sequence: Synthetic oligonucleotide
ggaccucuaggagacagug

SEQ ID NO: 907731 - RNA, 19 nt, Artificial Sequence
  Description of Artificial Sequence: Synthetic oligonucleotide
uuacuguucucugccucaa

SEQ ID NO: 907732 - RNA, 19 nt, Artificial Sequence
  Description of Artificial Sequence: Synthetic oligonucleotide
agguucagagcccgucaga

SEQ ID NO: 907733 - RNA, 19 nt, Artificial Sequence
  Description of Artificial Sequence: Synthetic oligonucleotide
aggggcauggacuccgguu

SEQ ID NO: 907734 - RNA, 19 nt, Artificial Sequence
  Description of Artificial Sequence: Synthetic oligonucleotide
cagggcuugccuccaguac

SEQ ID NO: 907735 - RNA, 19 nt, Artificial Sequence
  Description of Artificial Sequence: Synthetic oligonucleotide
cuaggcaggcuacgcugag

SEQ ID NO: 907736 - RNA, 19 nt, Artificial Sequence
  Description of Artificial Sequence: Synthetic oligonucleotide
uccagggaguacugucgac

SEQ ID NO: 907737 - RNA, 19 nt, Artificial Sequence
  Description of Artificial Sequence: Synthetic oligonucleotide
ugguggcuugaccuaggau

SEQ ID NO: 907738 - RNA, 19 nt, Artificial Sequence
  Description of Artificial Sequence: Synthetic oligonucleotide
cuauguuccacuggggcua

SEQ ID NO: 907739 - RNA, 19 nt, Artificial Sequence
  Description of Artificial Sequence: Synthetic oligonucleotide
caggauccgguucgacugc

SEQ ID NO: 907740 - RNA, 19 nt, Artificial Sequence
  Description of Artificial Sequence: Synthetic oligonucleotide
acucggugucaucccgcuc

SEQ ID NO: 907741 - RNA, 19 nt, Artificial Sequence
  Description of Artificial Sequence: Synthetic oligonucleotide
gaugagcgcgucggugucc

SEQ ID NO: 907742 - RNA, 19 nt, Artificial Sequence
  Description of Artificial Sequence: Synthetic oligonucleotide
cuccgguuguguccacagg

SEQ ID NO: 907743 - RNA, 19 nt, Artificial Sequence
  Description of Artificial Sequence: Synthetic oligonucleotide
gcuagugucgucgcugccc

SEQ ID NO: 907744 - RNA, 19 nt, Artificial Sequence
  Description of Artificial Sequence: Synthetic oligonucleotide
ucgcucacgaggguccaca

SEQ ID NO: 907745 - RNA, 19 nt, Artificial Sequence
  Description of Artificial Sequence: Synthetic oligonucleotide
cuggauugccugucuuguc

SEQ ID NO: 907746 - RNA, 19 nt, Artificial Sequence
  Description of Artificial Sequence: Synthetic oligonucleotide
agcuuggaauccauacacu

SEQ ID NO: 907747 - RNA, 19 nt, Artificial Sequence
  Description of Artificial Sequence: Synthetic oligonucleotide
cacguccuagguguaguug

SEQ ID NO: 907748 - RNA, 19 nt, Artificial Sequence
  Description of Artificial Sequence: Synthetic oligonucleotide
uguagugcaccagcugcuu

SEQ ID NO: 907749 - RNA, 19 nt, Artificial Sequence
  Description of Artificial Sequence: Synthetic oligonucleotide
gcaggcuacgcugaggcac

SEQ ID NO: 907750 - RNA, 19 nt, Artificial Sequence
  Description of Artificial Sequence: Synthetic oligonucleotide
ccagggaguacugucgacc

SEQ ID NO: 907751 - RNA, 19 nt, Artificial Sequence
  Description of Artificial Sequence: Synthetic oligonucleotide
uugucuccccaggaccagc

SEQ ID NO: 907752 - RNA, 19 nt, Artificial Sequence
  Description of Artificial Sequence: Synthetic oligonucleotide
uguccgggucgcucacgag

SEQ ID NO: 907753 - RNA, 19 nt, Artificial Sequence
  Description of Artificial Sequence: Synthetic oligonucleotide
gagauaggagcuccugaau

SEQ ID NO: 907754 - RNA, 19 nt, Artificial Sequence
  Description of Artificial Sequence: Synthetic oligonucleotide
cuguccgagccgcuccgcc

SEQ ID NO: 907755 - RNA, 19 nt, Artificial Sequence
  Description of Artificial Sequence: Synthetic oligonucleotide
cacggcgucaggguccagc

SEQ ID NO: 907756 - RNA, 19 nt, Artificial Sequence
  Description of Artificial Sequence: Synthetic oligonucleotide
gggagcacuuccuuggcaa

SEQ ID NO: 907757 - RNA, 19 nt, Artificial Sequence
  Description of Artificial Sequence: Synthetic oligonucleotide
uguugagcugccgcacgaa

SEQ ID NO: 907758 - RNA, 19 nt, Artificial Sequence
  Description of Artificial Sequence: Synthetic oligonucleotide
uggacggccagggcuugcc

SEQ ID NO: 907759 - RNA, 19 nt, Artificial Sequence
  Description of Artificial Sequence: Synthetic oligonucleotide
gagcugaguaugggccagg

SEQ ID NO: 907760 - RNA, 19 nt, Artificial Sequence
  Description of Artificial Sequence: Synthetic oligonucleotide
gaagcggguggaggcuggg

SEQ ID NO: 907761 - RNA, 19 nt, Artificial Sequence
  Description of Artificial Sequence: Synthetic oligonucleotide
gucgcugccccugcugucc

SEQ ID NO: 907762 - RNA, 19 nt, Artificial Sequence
  Description of Artificial Sequence: Synthetic oligonucleotide
gggagauaggagcuccuga

SEQ ID NO: 907763 - RNA, 19 nt, Artificial Sequence
  Description of Artificial Sequence: Synthetic oligonucleotide
cugucuugucuccccagga

SEQ ID NO: 907764 - RNA, 19 nt, Artificial Sequence
  Description of Artificial Sequence: Synthetic oligonucleotide
agguguauccauggaggau

SEQ ID NO: 907765 - RNA, 19 nt, Artificial Sequence
  Description of Artificial Sequence: Synthetic oligonucleotide
gauggcguucuagaagagu

SEQ ID NO: 907766 - RNA, 19 nt, Artificial Sequence
  Description of Artificial Sequence: Synthetic oligonucleotide
cuacgcugaggcacuucuc

SEQ ID NO: 907767 - RNA, 19 nt, Artificial Sequence
  Description of Artificial Sequence: Synthetic oligonucleotide
ccgucaacagccuggugac

SEQ ID NO: 907768 - RNA, 19 nt, Artificial Sequence
  Description of Artificial Sequence: Synthetic oligonucleotide
gcccgcugcgcacacacag

SEQ ID NO: 907769 - RNA, 19 nt, Artificial Sequence
  Description of Artificial Sequence: Synthetic oligonucleotide
ggauugccugucuugucuc

SEQ ID NO: 907770 - RNA, 19 nt, Artificial Sequence
  Description of Artificial Sequence: Synthetic oligonucleotide
cacuguuccccguguccac

SEQ ID NO: 907771 - RNA, 19 nt, Artificial Sequence
  Description of Artificial Sequence: Synthetic oligonucleotide
aggccaccgugcucaaugu

SEQ ID NO: 907772 - RNA, 19 nt, Artificial Sequence
  Description of Artificial Sequence: Synthetic oligonucleotide
ccucuaggagacagugggg

SEQ ID NO: 907773 - RNA, 19 nt, Artificial Sequence
  Description of Artificial Sequence: Synthetic oligonucleotide
caggaccauggacaugcuc

SEQ ID NO: 907774 - RNA, 19 nt, Artificial Sequence
  Description of Artificial Sequence: Synthetic oligonucleotide
ccauacacuccuguuuccc

SEQ ID NO: 907775 - RNA, 19 nt, Artificial Sequence
  Description of Artificial Sequence: Synthetic oligonucleotide
ucggacgaagcggguggag

SEQ ID NO: 907776 - RNA, 19 nt, Artificial Sequence
  Description of Artificial Sequence: Synthetic oligonucleotide
gcuucccugagucagaguu

SEQ ID NO: 907777 - RNA, 19 nt, Artificial Sequence
  Description of Artificial Sequence: Synthetic oligonucleotide
ggcuugaccuaggaugccc

SEQ ID NO: 907778 - RNA, 19 nt, Artificial Sequence
  Description of Artificial Sequence: Synthetic oligonucleotide
gcuugaccaggccaccgug

SEQ ID NO: 907779 - RNA, 19 nt, Artificial Sequence
  Description of Artificial Sequence: Synthetic oligonucleotide
gagcccgucagaagagaga

SEQ ID NO: 907780 - RNA, 19 nt, Artificial Sequence
  Description of Artificial Sequence: Synthetic oligonucleotide
cgucagaagagagauggug

SEQ ID NO: 907781 - RNA, 19 nt, Artificial Sequence
  Description of Artificial Sequence: Synthetic oligonucleotide
acgaagcggguggaggcug

SEQ ID NO: 907782 - RNA, 19 nt, Artificial Sequence
  Description of Artificial Sequence: Synthetic oligonucleotide
acacuguccuggcguauuu

SEQ ID NO: 907783 - RNA, 19 nt, Artificial Sequence
  Description of Artificial Sequence: Synthetic oligonucleotide
gagcuuguugacaacuuuu

SEQ ID NO: 907784 - RNA, 19 nt, Artificial Sequence
  Description of Artificial Sequence: Synthetic oligonucleotide
gagccagauccaucucgga

SEQ ID NO: 907785 - RNA, 19 nt, Artificial Sequence
  Description of Artificial Sequence: Synthetic oligonucleotide
agcugaguaugggccagga

SEQ ID NO: 907786 - RNA, 19 nt, Artificial Sequence
  Description of Artificial Sequence: Synthetic oligonucleotide
gagucagcucagugauauc

SEQ ID NO: 907787 - RNA, 19 nt, Artificial Sequence
  Description of Artificial Sequence: Synthetic oligonucleotide
ggaguacugucgaccauac

SEQ ID NO: 907788 - RNA, 19 nt, Artificial Sequence
  Description of Artificial Sequence: Synthetic oligonucleotide
gcgcacacacagcaaggcc

SEQ ID NO: 907789 - RNA, 19 nt, Artificial Sequence
  Description of Artificial Sequence: Synthetic oligonucleotide
gauggacggccagggcuug

SEQ ID NO: 907790 - RNA, 19 nt, Artificial Sequence
  Description of Artificial Sequence: Synthetic oligonucleotide
uggcuugaccuaggaugcc

SEQ ID NO: 907791 - RNA, 19 nt, Artificial Sequence
  Description of Artificial Sequence: Synthetic oligonucleotide
auggacggccagggcuugc

SEQ ID NO: 907792 - RNA, 19 nt, Artificial Sequence
  Description of Artificial Sequence: Synthetic oligonucleotide
cacucaacaucagagggau

SEQ ID NO: 907793 - RNA, 19 nt, Artificial Sequence
  Description of Artificial Sequence: Synthetic oligonucleotide
acguugcugggccccgcug

SEQ ID NO: 907794 - RNA, 19 nt, Artificial Sequence
  Description of Artificial Sequence: Synthetic oligonucleotide
ugggagguucagagcccgu

SEQ ID NO: 907795 - RNA, 19 nt, Artificial Sequence
  Description of Artificial Sequence: Synthetic oligonucleotide
caccgugcucaauguggac

SEQ ID NO: 907796 - RNA, 19 nt, Artificial Sequence
  Description of Artificial Sequence: Synthetic oligonucleotide
cacggaucaggguacugcu

SEQ ID NO: 907797 - RNA, 19 nt, Artificial Sequence
  Description of Artificial Sequence: Synthetic oligonucleotide
gccgggacguugcugggcc

SEQ ID NO: 907798 - RNA, 19 nt, Artificial Sequence
  Description of Artificial Sequence: Synthetic oligonucleotide
ggagucagcucagugauau

SEQ ID NO: 907799 - RNA, 19 nt, Artificial Sequence
  Description of Artificial Sequence: Synthetic oligonucleotide
cucaucuaugcuccugccu

SEQ ID NO: 907800 - RNA, 19 nt, Artificial Sequence
  Description of Artificial Sequence: Synthetic oligonucleotide
cagagauuauggguccaga

SEQ ID NO: 907801 - RNA, 19 nt, Artificial Sequence
  Description of Artificial Sequence: Synthetic oligonucleotide
aggccgggacguugcuggg

SEQ ID NO: 907802 - RNA, 19 nt, Artificial Sequence
  Description of Artificial Sequence: Synthetic oligonucleotide
ccagcagaugagcgcgucg

SEQ ID NO: 907803 - RNA, 19 nt, Artificial Sequence
  Description of Artificial Sequence: Synthetic oligonucleotide
gcaaggccucgcauggccg

SEQ ID NO: 907804 - RNA, 19 nt, Artificial Sequence
  Description of Artificial Sequence: Synthetic oligonucleotide
cacguggaagcuguuccca

SEQ ID NO: 907805 - RNA, 19 nt, Artificial Sequence
  Description of Artificial Sequence: Synthetic oligonucleotide
gugucgucgcugccccugc

SEQ ID NO: 907806 - RNA, 19 nt, Artificial Sequence
  Description of Artificial Sequence: Synthetic oligonucleotide
cugaagccguggcuuguca

SEQ ID NO: 907807 - RNA, 19 nt, Artificial Sequence
  Description of Artificial Sequence: Synthetic oligonucleotide
cccuggauugccugucuug

SEQ ID NO: 907808 - RNA, 19 nt, Artificial Sequence
  Description of Artificial Sequence: Synthetic oligonucleotide
ugagcgcgucgguguccgg

SEQ ID NO: 907809 - RNA, 19 nt, Artificial Sequence
  Description of Artificial Sequence: Synthetic oligonucleotide
gcuaugguggcuugaccua

SEQ ID NO: 907810 - RNA, 19 nt, Artificial Sequence
  Description of Artificial Sequence: Synthetic oligonucleotide
cguccuagguguaguuggg

SEQ ID NO: 907811 - RNA, 19 nt, Artificial Sequence
  Description of Artificial Sequence: Synthetic oligonucleotide
cuggggcuaugguggcuug

SEQ ID NO: 907812 - RNA, 19 nt, Artificial Sequence
  Description of Artificial Sequence: Synthetic oligonucleotide
ccguggcuugucagcaugg

SEQ ID NO: 907813 - RNA, 19 nt, Artificial Sequence
  Description of Artificial Sequence: Synthetic oligonucleotide
ggcacugcccaggccaacc

SEQ ID NO: 907814 - RNA, 19 nt, Artificial Sequence
  Description of Artificial Sequence: Synthetic oligonucleotide
aggauccgguucgacugca

SEQ ID NO: 907815 - RNA, 19 nt, Artificial Sequence
  Description of Artificial Sequence: Synthetic oligonucleotide
gggcuugccuccaguaccc

SEQ ID NO: 907816 - RNA, 19 nt, Artificial Sequence
  Description of Artificial Sequence: Synthetic oligonucleotide
gaggcugggauggcguucu

SEQ ID NO: 907817 - RNA, 19 nt, Artificial Sequence
  Description of Artificial Sequence: Synthetic oligonucleotide
gccucguucucauguuuca

SEQ ID NO: 907818 - RNA, 19 nt, Artificial Sequence
  Description of Artificial Sequence: Synthetic oligonucleotide
caggggccucucaucuaug

SEQ ID NO: 907819 - RNA, 19 nt, Artificial Sequence
  Description of Artificial Sequence: Synthetic oligonucleotide
gacuccgguuguguccaca

SEQ ID NO: 907820 - RNA, 19 nt, Artificial Sequence
  Description of Artificial Sequence: Synthetic oligonucleotide
guguccacggcgucagggu

SEQ ID NO: 907821 - RNA, 19 nt, Artificial Sequence
  Description of Artificial Sequence: Synthetic oligonucleotide
gggaguacugucgaccaua

SEQ ID NO: 907822 - RNA, 19 nt, Artificial Sequence
  Description of Artificial Sequence: Synthetic oligonucleotide
uggggucgucuguguaguc

SEQ ID NO: 907823 - RNA, 19 nt, Artificial Sequence
  Description of Artificial Sequence: Synthetic oligonucleotide
gaccauacuugggcacaga

SEQ ID NO: 907824 - RNA, 19 nt, Artificial Sequence
  Description of Artificial Sequence: Synthetic oligonucleotide
ggggcuaugguggcuugac

SEQ ID NO: 907825 - RNA, 19 nt, Artificial Sequence
  Description of Artificial Sequence: Synthetic oligonucleotide
cuugggcacagagugcgcu

SEQ ID NO: 907826 - RNA, 19 nt, Artificial Sequence
  Description of Artificial Sequence: Synthetic oligonucleotide
uccccguguccacggcguc

SEQ ID NO: 907827 - RNA, 19 nt, Artificial Sequence
  Description of Artificial Sequence: Synthetic oligonucleotide
agccguggcuugucagcau

SEQ ID NO: 907828 - RNA, 19 nt, Artificial Sequence
  Description of Artificial Sequence: Synthetic oligonucleotide
gacgaagcggguggaggcu

SEQ ID NO: 907829 - RNA, 19 nt, Artificial Sequence
  Description of Artificial Sequence: Synthetic oligonucleotide
ggucaaacacguggaagcu

SEQ ID NO: 907830 - RNA, 19 nt, Artificial Sequence
  Description of Artificial Sequence: Synthetic oligonucleotide
uguucccacucgggcucca

SEQ ID NO: 907831 - RNA, 19 nt, Artificial Sequence
  Description of Artificial Sequence: Synthetic oligonucleotide
ggggagcacuuccuuggca

SEQ ID NO: 907832 - RNA, 19 nt, Artificial Sequence
  Description of Artificial Sequence: Synthetic oligonucleotide
ggcucgcucucucgaagga

SEQ ID NO: 907833 - RNA, 19 nt, Artificial Sequence
  Description of Artificial Sequence: Synthetic oligonucleotide
caggcuacgcugaggcacu

SEQ ID NO: 907834 - RNA, 19 nt, Artificial Sequence
  Description of Artificial Sequence: Synthetic oligonucleotide
gacguugcugggccccgcu

SEQ ID NO: 907835 - RNA, 19 nt, Artificial Sequence
  Description of Artificial Sequence: Synthetic oligonucleotide
ccaccgugcucaaugugga

SEQ ID NO: 907836 - RNA, 19 nt, Artificial Sequence
  Description of Artificial Sequence: Synthetic oligonucleotide
cagagguguaaaggcuaga

SEQ ID NO: 907837 - RNA, 19 nt, Artificial Sequence
  Description of Artificial Sequence: Synthetic oligonucleotide
gggcucuuggggagauagg

SEQ ID NO: 907838 - RNA, 19 nt, Artificial Sequence
  Description of Artificial Sequence: Synthetic oligonucleotide
gguguccgggucgcucacg

SEQ ID NO: 907839 - RNA, 19 nt, Artificial Sequence
  Description of Artificial Sequence: Synthetic oligonucleotide
cagagcccgucagaagaga

SEQ ID NO: 907840 - RNA, 19 nt, Artificial Sequence
  Description of Artificial Sequence: Synthetic oligonucleotide
guggggucgucuguguagu

SEQ ID NO: 907841 - RNA, 19 nt, Artificial Sequence
  Description of Artificial Sequence: Synthetic oligonucleotide
gugcgcugagcugcuguca

SEQ ID NO: 907842 - RNA, 19 nt, Artificial Sequence
  Description of Artificial Sequence: Synthetic oligonucleotide
aggccucgcauggccgcag

SEQ ID NO: 907843 - RNA, 19 nt, Artificial Sequence
  Description of Artificial Sequence: Synthetic oligonucleotide
gugcucaauguggacuacu

SEQ ID NO: 907844 - RNA, 19 nt, Artificial Sequence
  Description of Artificial Sequence: Synthetic oligonucleotide
gggacguugcugggccccg

SEQ ID NO: 907845 - RNA, 19 nt, Artificial Sequence
  Description of Artificial Sequence: Synthetic oligonucleotide
cucgcauggccgcagccau

SEQ ID NO: 907846 - RNA, 19 nt, Artificial Sequence
  Description of Artificial Sequence: Synthetic oligonucleotide
cauccgucaacagccuggu

SEQ ID NO: 907847 - RNA, 19 nt, Artificial Sequence
  Description of Artificial Sequence: Synthetic oligonucleotide
cgcacacacagcaaggccu

SEQ ID NO: 907848 - RNA, 19 nt, Artificial Sequence
  Description of Artificial Sequence: Synthetic oligonucleotide
gaccuaggaugcccuggau

SEQ ID NO: 907849 - RNA, 19 nt, Artificial Sequence
  Description of Artificial Sequence: Synthetic oligonucleotide
guuuaagggcugagcuagu

SEQ ID NO: 907850 - RNA, 19 nt, Artificial Sequence
  Description of Artificial Sequence: Synthetic oligonucleotide
ccgugcucaauguggacua

SEQ ID NO: 907851 - RNA, 19 nt, Artificial Sequence
  Description of Artificial Sequence: Synthetic oligonucleotide
gccucgcauggccgcagcc

SEQ ID NO: 907852 - RNA, 19 nt, Artificial Sequence
  Description of Artificial Sequence: Synthetic oligonucleotide
caacaucagagggaucuuu

SEQ ID NO: 907853 - RNA, 19 nt, Artificial Sequence
  Description of Artificial Sequence: Synthetic oligonucleotide
cucggacgaagcgggugga

SEQ ID NO: 907854 - RNA, 19 nt, Artificial Sequence
  Description of Artificial Sequence: Synthetic oligonucleotide
ccgcccgcugcgcacacac

SEQ ID NO: 907855 - RNA, 19 nt, Artificial Sequence
  Description of Artificial Sequence: Synthetic oligonucleotide
aggagucagcucagugaua

SEQ ID NO: 907856 - RNA, 19 nt, Artificial Sequence
  Description of Artificial Sequence: Synthetic oligonucleotide
ccacgcaggaaacauggau

SEQ ID NO: 907857 - RNA, 19 nt, Artificial Sequence
  Description of Artificial Sequence: Synthetic oligonucleotide
ggcacuucucagggguaga

SEQ ID NO: 907858 - RNA, 19 nt, Artificial Sequence
  Description of Artificial Sequence: Synthetic oligonucleotide
ggagucaaugaaggcaguu

SEQ ID NO: 907859 - RNA, 19 nt, Artificial Sequence
  Description of Artificial Sequence: Synthetic oligonucleotide
ggcguucuagaagaguguu

SEQ ID NO: 907860 - RNA, 19 nt, Artificial Sequence
  Description of Artificial Sequence: Synthetic oligonucleotide
ggccucgcauggccgcagc

SEQ ID NO: 907861 - RNA, 19 nt, Artificial Sequence
  Description of Artificial Sequence: Synthetic oligonucleotide
ggauccgguucgacugcac

SEQ ID NO: 907862 - RNA, 19 nt, Artificial Sequence
  Description of Artificial Sequence: Synthetic oligonucleotide
cagugauaucagagauuau

SEQ ID NO: 907863 - RNA, 19 nt, Artificial Sequence
  Description of Artificial Sequence: Synthetic oligonucleotide
gcgucaggguccagcagga

SEQ ID NO: 907864 - RNA, 19 nt, Artificial Sequence
  Description of Artificial Sequence: Synthetic oligonucleotide
cgcucacgaggguccacag

SEQ ID NO: 907865 - RNA, 19 nt, Artificial Sequence
  Description of Artificial Sequence: Synthetic oligonucleotide
ggauggacggccagggcuu

SEQ ID NO: 907866 - RNA, 19 nt, Artificial Sequence
  Description of Artificial Sequence: Synthetic oligonucleotide
gaguaugggccaggaccau

SEQ ID NO: 907867 - RNA, 19 nt, Artificial Sequence
  Description of Artificial Sequence: Synthetic oligonucleotide
caaacacguggaagcuguu

SEQ ID NO: 907868 - RNA, 19 nt, Artificial Sequence
  Description of Artificial Sequence: Synthetic oligonucleotide
gcccgucagaagagagaug

SEQ ID NO: 907869 - RNA, 19 nt, Artificial Sequence
  Description of Artificial Sequence: Synthetic oligonucleotide
gcauggacuccgguugugu

SEQ ID NO: 907870 - RNA, 19 nt, Artificial Sequence
  Description of Artificial Sequence: Synthetic oligonucleotide
ggacguugcugggccccgc

SEQ ID NO: 907871 - RNA, 19 nt, Artificial Sequence
  Description of Artificial Sequence: Synthetic oligonucleotide
gggcauggacuccgguugu

SEQ ID NO: 907872 - RNA, 19 nt, Artificial Sequence
  Description of Artificial Sequence: Synthetic oligonucleotide
ccgggacguugcugggccc

SEQ ID NO: 907873 - RNA, 19 nt, Artificial Sequence
  Description of Artificial Sequence: Synthetic oligonucleotide
cgggacguugcugggcccc

SEQ ID NO: 907874 - RNA, 19 nt, Artificial Sequence
  Description of Artificial Sequence: Synthetic oligonucleotide
gccaaccuccaucuauguu

SEQ ID NO: 907875 - RNA, 19 nt, Artificial Sequence
  Description of Artificial Sequence: Synthetic oligonucleotide
ggucgcucacgagggucca

SEQ ID NO: 907876 - RNA, 19 nt, Artificial Sequence
  Description of Artificial Sequence: Synthetic oligonucleotide
ggcuacgcugaggcacuuc

SEQ ID NO: 907877 - RNA, 19 nt, Artificial Sequence
  Description of Artificial Sequence: Synthetic oligonucleotide
ggacuccgguuguguccac

SEQ ID NO: 907878 - RNA, 19 nt, Artificial Sequence
  Description of Artificial Sequence: Synthetic oligonucleotide
cgugcucaauguggacuac

SEQ ID NO: 907879 - RNA, 19 nt, Artificial Sequence
  Description of Artificial Sequence: Synthetic oligonucleotide
aggcuacgcugaggcacuu

SEQ ID NO: 907880 - RNA, 19 nt, Artificial Sequence
  Description of Artificial Sequence: Synthetic oligonucleotide
ccuggccacgcaggaaaca

SEQ ID NO: 907881 - RNA, 19 nt, Artificial Sequence
  Description of Artificial Sequence: Synthetic oligonucleotide
cgggucgcucacgaggguc

SEQ ID NO: 907882 - RNA, 19 nt, Artificial Sequence
  Description of Artificial Sequence: Synthetic oligonucleotide
gggccucguucucauguuu

SEQ ID NO: 907883 - RNA, 19 nt, Artificial Sequence
  Description of Artificial Sequence: Synthetic oligonucleotide
cacuggggcuaugguggcu

SEQ ID NO: 907884 - RNA, 19 nt, Artificial Sequence
  Description of Artificial Sequence: Synthetic oligonucleotide
ccgucagaagagagauggu

SEQ ID NO: 907885 - RNA, 19 nt, Artificial Sequence
  Description of Artificial Sequence: Synthetic oligonucleotide
cgguguccgggucgcucac

SEQ ID NO: 907886 - RNA, 19 nt, Artificial Sequence
  Description of Artificial Sequence: Synthetic oligonucleotide
gcccuggauugccugucuu

SEQ ID NO: 907887 - RNA, 19 nt, Artificial Sequence
  Description of Artificial Sequence: Synthetic oligonucleotide
cguggcuugucagcauggu

SEQ ID NO: 907888 - RNA, 19 nt, Artificial Sequence
  Description of Artificial Sequence: Synthetic oligonucleotide
ccgggucgcucacgagggu

SEQ ID NO: 907889 - RNA, 19 nt, Artificial Sequence
  Description of Artificial Sequence: Synthetic oligonucleotide
ccacggcgucaggguccag

SEQ ID NO: 907890 - RNA, 19 nt, Artificial Sequence
  Description of Artificial Sequence: Synthetic oligonucleotide
aaaagcuagaauucuaugc

SEQ ID NO: 907891 - RNA, 19 nt, Artificial Sequence
  Description of Artificial Sequence: Synthetic oligonucleotide
uuaaacaucacaauuaaac

SEQ ID NO: 907892 - RNA, 19 nt, Artificial Sequence
  Description of Artificial Sequence: Synthetic oligonucleotide
aaaauuugggauuuuggcg

SEQ ID NO: 907893 - RNA, 19 nt, Artificial Sequence
  Description of Artificial Sequence: Synthetic oligonucleotide
uucaucaucaucaucauca

SEQ ID NO: 907894 - RNA, 19 nt, Artificial Sequence
  Description of Artificial Sequence: Synthetic oligonucleotide
aauaaguugagagccaugg

SEQ ID NO: 907895 - RNA, 19 nt, Artificial Sequence
  Description of Artificial Sequence: Synthetic oligonucleotide
uauccauauauuuagagac

SEQ ID NO: 907896 - RNA, 19 nt, Artificial Sequence
  Description of Artificial Sequence: Synthetic oligonucleotide
aaauuugggauuuuggcga

SEQ ID NO: 907897 - RNA, 19 nt, Artificial Sequence
  Description of Artificial Sequence: Synthetic oligonucleotide
ucauuuccaaauaaaaccc

SEQ ID NO: 907898 - RNA, 19 nt, Artificial Sequence
  Description of Artificial Sequence: Synthetic oligonucleotide
aaagcuagaauucuaugca

SEQ ID NO: 907899 - RNA, 19 nt, Artificial Sequence
  Description of Artificial Sequence: Synthetic oligonucleotide
uguauuuugcucaagguau

SEQ ID NO: 907900 - RNA, 19 nt, Artificial Sequence
  Description of Artificial Sequence: Synthetic oligonucleotide
uauuucauuuuguacuucg

SEQ ID NO: 907901 - RNA, 19 nt, Artificial Sequence
  Description of Artificial Sequence: Synthetic oligonucleotide
uaaacaucacaauuaaaca

SEQ ID NO: 907902 - RNA, 19 nt, Artificial Sequence
  Description of Artificial Sequence: Synthetic oligonucleotide
aacuuguacacuuuaacau

SEQ ID NO: 907903 - RNA, 19 nt, Artificial Sequence
  Description of Artificial Sequence: Synthetic oligonucleotide
uaugcacuacuacacaggg

SEQ ID NO: 907904 - RNA, 19 nt, Artificial Sequence
  Description of Artificial Sequence: Synthetic oligonucleotide
acugucuguauucacauag

SEQ ID NO: 907905 - RNA, 19 nt, Artificial Sequence
  Description of Artificial Sequence: Synthetic oligonucleotide
uucaaaauuuccucacugg

SEQ ID NO: 907906 - RNA, 19 nt, Artificial Sequence
  Description of Artificial Sequence: Synthetic oligonucleotide
ucuguaaccugauuuaaug

SEQ ID NO: 907907 - RNA, 19 nt, Artificial Sequence
  Description of Artificial Sequence: Synthetic oligonucleotide
uuuccuuccagugaaaacc

SEQ ID NO: 907908 - RNA, 19 nt, Artificial Sequence
  Description of Artificial Sequence: Synthetic oligonucleotide
aaauucuuuggagagaacu

SEQ ID NO: 907909 - RNA, 19 nt, Artificial Sequence
  Description of Artificial Sequence: Synthetic oligonucleotide
uguugauucucccauugag

SEQ ID NO: 907910 - RNA, 19 nt, Artificial Sequence
  Description of Artificial Sequence: Synthetic oligonucleotide
ugucauuuccaaauaaaac

SEQ ID NO: 907911 - RNA, 19 nt, Artificial Sequence
  Description of Artificial Sequence: Synthetic oligonucleotide
aauuuagaacagaagagug

SEQ ID NO: 907912 - RNA, 19 nt, Artificial Sequence
  Description of Artificial Sequence: Synthetic oligonucleotide
uuauccauauauuuagaga

SEQ ID NO: 907913 - RNA, 19 nt, Artificial Sequence
  Description of Artificial Sequence: Synthetic oligonucleotide
aaaauuuccucacuggcuu

SEQ ID NO: 907914 - RNA, 19 nt, Artificial Sequence
  Description of Artificial Sequence: Synthetic oligonucleotide
ucacaauuaaacaugccaa

SEQ ID NO: 907915 - RNA, 19 nt, Artificial Sequence
  Description of Artificial Sequence: Synthetic oligonucleotide
uuaggagagaauuuuauuu

SEQ ID NO: 907916 - RNA, 19 nt, Artificial Sequence
  Description of Artificial Sequence: Synthetic oligonucleotide
ugucuguuaaacaucacaa

SEQ ID NO: 907917 - RNA, 19 nt, Artificial Sequence
  Description of Artificial Sequence: Synthetic oligonucleotide
uuuagaacagaagagugga

SEQ ID NO: 907918 - RNA, 19 nt, Artificial Sequence
  Description of Artificial Sequence: Synthetic oligonucleotide
uguugguaaaugcuaacug

SEQ ID NO: 907919 - RNA, 19 nt, Artificial Sequence
  Description of Artificial Sequence: Synthetic oligonucleotide
uugauucucccauugagug

SEQ ID NO: 907920 - RNA, 19 nt, Artificial Sequence
  Description of Artificial Sequence: Synthetic oligonucleotide
uguucauuaagucugucua

SEQ ID NO: 907921 - RNA, 19 nt, Artificial Sequence
  Description of Artificial Sequence: Synthetic oligonucleotide
caagucaucguuaggagag

SEQ ID NO: 907922 - RNA, 19 nt, Artificial Sequence
  Description of Artificial Sequence: Synthetic oligonucleotide
uuuguguacacauugguuu

SEQ ID NO: 907923 - RNA, 19 nt, Artificial Sequence
  Description of Artificial Sequence: Synthetic oligonucleotide
uauuuagagacgaggauaa

SEQ ID NO: 907924 - RNA, 19 nt, Artificial Sequence
  Description of Artificial Sequence: Synthetic oligonucleotide
gucaccuuaaacugcaagg

SEQ ID NO: 907925 - RNA, 19 nt, Artificial Sequence
  Description of Artificial Sequence: Synthetic oligonucleotide
aucaucaucaucaucaucu

SEQ ID NO: 907926 - RNA, 19 nt, Artificial Sequence
  Description of Artificial Sequence: Synthetic oligonucleotide
cacauuggcgguuuuaucc

SEQ ID NO: 907927 - RNA, 19 nt, Artificial Sequence
  Description of Artificial Sequence: Synthetic oligonucleotide
uuguacuucgucaaugugu

SEQ ID NO: 907928 - RNA, 19 nt, Artificial Sequence
  Description of Artificial Sequence: Synthetic oligonucleotide
ucuaugcacuacuacacag

SEQ ID NO: 907929 - RNA, 19 nt, Artificial Sequence
  Description of Artificial Sequence: Synthetic oligonucleotide
aacucuggucaaguaaugc

SEQ ID NO: 907930 - RNA, 19 nt, Artificial Sequence
  Description of Artificial Sequence: Synthetic oligonucleotide
gucacuucaacucugguca

SEQ ID NO: 907931 - RNA, 19 nt, Artificial Sequence
  Description of Artificial Sequence: Synthetic oligonucleotide
uguaaccugauuuaauguc

SEQ ID NO: 907932 - RNA, 19 nt, Artificial Sequence
  Description of Artificial Sequence: Synthetic oligonucleotide
uaaaagugucaccuuaaac

SEQ ID NO: 907933 - RNA, 19 nt, Artificial Sequence
  Description of Artificial Sequence: Synthetic oligonucleotide
aguuacaacagagaauguc

SEQ ID NO: 907934 - RNA, 19 nt, Artificial Sequence
  Description of Artificial Sequence: Synthetic oligonucleotide
acauugguuuuauuguaac

SEQ ID NO: 907935 - RNA, 19 nt, Artificial Sequence
  Description of Artificial Sequence: Synthetic oligonucleotide
aguggagauucuuuucucg

SEQ ID NO: 907936 - RNA, 19 nt, Artificial Sequence
  Description of Artificial Sequence: Synthetic oligonucleotide
agguaaagaagcucucugg

SEQ ID NO: 907937 - RNA, 19 nt, Artificial Sequence
  Description of Artificial Sequence: Synthetic oligonucleotide
uuguauuuugcucaaggua

SEQ ID NO: 907938 - RNA, 19 nt, Artificial Sequence
  Description of Artificial Sequence: Synthetic oligonucleotide
uauauuuagagacgaggau

SEQ ID NO: 907939 - RNA, 19 nt, Artificial Sequence
  Description of Artificial Sequence: Synthetic oligonucleotide
uuuaaaagugucaccuuaa

SEQ ID NO: 907940 - RNA, 19 nt, Artificial Sequence
  Description of Artificial Sequence: Synthetic oligonucleotide
uacacaggggccuagcacc

SEQ ID NO: 907941 - RNA, 19 nt, Artificial Sequence
  Description of Artificial Sequence: Synthetic oligonucleotide
ucgucaauguguucaauug

SEQ ID NO: 907942 - RNA, 19 nt, Artificial Sequence
  Description of Artificial Sequence: Synthetic oligonucleotide
uauucacauagagacacag

SEQ ID NO: 907943 - RNA, 19 nt, Artificial Sequence
  Description of Artificial Sequence: Synthetic oligonucleotide
uguucaauugcuucuugcu

SEQ ID NO: 907944 - RNA, 19 nt, Artificial Sequence
  Description of Artificial Sequence: Synthetic oligonucleotide
uuaaacugcaaggaugucu

SEQ ID NO: 907945 - RNA, 19 nt, Artificial Sequence
  Description of Artificial Sequence: Synthetic oligonucleotide
ucaacucuggucaaguaau

SEQ ID NO: 907946 - RNA, 19 nt, Artificial Sequence
  Description of Artificial Sequence: Synthetic oligonucleotide
aacccuacagguucuguug

SEQ ID NO: 907947 - RNA, 19 nt, Artificial Sequence
  Description of Artificial Sequence: Synthetic oligonucleotide
uugguaaaugcuaacuguc

SEQ ID NO: 907948 - RNA, 19 nt, Artificial Sequence
  Description of Artificial Sequence: Synthetic oligonucleotide
uuuuguacuucgucaaugu

SEQ ID NO: 907949 - RNA, 19 nt, Artificial Sequence
  Description of Artificial Sequence: Synthetic oligonucleotide
ugucuauuucauuuuguac

SEQ ID NO: 907950 - RNA, 19 nt, Artificial Sequence
  Description of Artificial Sequence: Synthetic oligonucleotide
aagucggccucgcagccgc

SEQ ID NO: 907951 - RNA, 19 nt, Artificial Sequence
  Description of Artificial Sequence: Synthetic oligonucleotide
guaaaccagguaaagaagc

SEQ ID NO: 907952 - RNA, 19 nt, Artificial Sequence
  Description of Artificial Sequence: Synthetic oligonucleotide
uuuuauccauauauuuaga

SEQ ID NO: 907953 - RNA, 19 nt, Artificial Sequence
  Description of Artificial Sequence: Synthetic oligonucleotide
aaaggagaagccauguugu

SEQ ID NO: 907954 - RNA, 19 nt, Artificial Sequence
  Description of Artificial Sequence: Synthetic oligonucleotide
cuaugcacuacuacacagg

SEQ ID NO: 907955 - RNA, 19 nt, Artificial Sequence
  Description of Artificial Sequence: Synthetic oligonucleotide
auagagacacaguguaauc

SEQ ID NO: 907956 - RNA, 19 nt, Artificial Sequence
  Description of Artificial Sequence: Synthetic oligonucleotide
guaaugcagagccucuucg

SEQ ID NO: 907957 - RNA, 19 nt, Artificial Sequence
  Description of Artificial Sequence: Synthetic oligonucleotide
uguacuucgucaauguguu

SEQ ID NO: 907958 - RNA, 19 nt, Artificial Sequence
  Description of Artificial Sequence: Synthetic oligonucleotide
uccauauauuuagagacga

SEQ ID NO: 907959 - RNA, 19 nt, Artificial Sequence
  Description of Artificial Sequence: Synthetic oligonucleotide
cuacuuucaaaauuuccuc

SEQ ID NO: 907960 - RNA, 19 nt, Artificial Sequence
  Description of Artificial Sequence: Synthetic oligonucleotide
cugagcccaauauacagag

SEQ ID NO: 907961 - RNA, 19 nt, Artificial Sequence
  Description of Artificial Sequence: Synthetic oligonucleotide
aguguaaucucugagccca

SEQ ID NO: 907962 - RNA, 19 nt, Artificial Sequence
  Description of Artificial Sequence: Synthetic oligonucleotide
aguaaugcagagccucuuc

SEQ ID NO: 907963 - RNA, 19 nt, Artificial Sequence
  Description of Artificial Sequence: Synthetic oligonucleotide
uacuucgucaauguguuca

SEQ ID NO: 907964 - RNA, 19 nt, Artificial Sequence
  Description of Artificial Sequence: Synthetic oligonucleotide
ucauuuuguacuucgucaa

SEQ ID NO: 907965 - RNA, 19 nt, Artificial Sequence
  Description of Artificial Sequence: Synthetic oligonucleotide
uagaacagaagaguggaga

SEQ ID NO: 907966 - RNA, 19 nt, Artificial Sequence
  Description of Artificial Sequence: Synthetic oligonucleotide
uuuagagacgaggauaaaa

SEQ ID NO: 907967 - RNA, 19 nt, Artificial Sequence
  Description of Artificial Sequence: Synthetic oligonucleotide
cucuggucaaguaaugcag

SEQ ID NO: 907968 - RNA, 19 nt, Artificial Sequence
  Description of Artificial Sequence: Synthetic oligonucleotide
ugucacaaugcccacuaac

SEQ ID NO: 907969 - RNA, 19 nt, Artificial Sequence
  Description of Artificial Sequence: Synthetic oligonucleotide
aaggagaagccauguuguc

SEQ ID NO: 907970 - RNA, 19 nt, Artificial Sequence
  Description of Artificial Sequence: Synthetic oligonucleotide
ucaaguaaugcagagccuc

SEQ ID NO: 907971 - RNA, 19 nt, Artificial Sequence
  Description of Artificial Sequence: Synthetic oligonucleotide
gaauucuaugcacuacuac

SEQ ID NO: 907972 - RNA, 19 nt, Artificial Sequence
  Description of Artificial Sequence: Synthetic oligonucleotide
uuuguacuucgucaaugug

SEQ ID NO: 907973 - RNA, 19 nt, Artificial Sequence
  Description of Artificial Sequence: Synthetic oligonucleotide
uuaaaagugucaccuuaaa

SEQ ID NO: 907974 - RNA, 19 nt, Artificial Sequence
  Description of Artificial Sequence: Synthetic oligonucleotide
uuguucauuaagucugucu

SEQ ID NO: 907975 - RNA, 19 nt, Artificial Sequence
  Description of Artificial Sequence: Synthetic oligonucleotide
guuaagucggccucgcagc

SEQ ID NO: 907976 - RNA, 19 nt, Artificial Sequence
  Description of Artificial Sequence: Synthetic oligonucleotide
ucacauagagacacagugu

SEQ ID NO: 907977 - RNA, 19 nt, Artificial Sequence
  Description of Artificial Sequence: Synthetic oligonucleotide
ucaagucaucguuaggaga

SEQ ID NO: 907978 - RNA, 19 nt, Artificial Sequence
  Description of Artificial Sequence: Synthetic oligonucleotide
uuagaacagaagaguggag

SEQ ID NO: 907979 - RNA, 19 nt, Artificial Sequence
  Description of Artificial Sequence: Synthetic oligonucleotide
ugguaaaugcuaacugucu

SEQ ID NO: 907980 - RNA, 19 nt, Artificial Sequence
  Description of Artificial Sequence: Synthetic oligonucleotide
aacagggcgacugagcaca

SEQ ID NO: 907981 - RNA, 19 nt, Artificial Sequence
  Description of Artificial Sequence: Synthetic oligonucleotide
gagcccaauauacagagaa

SEQ ID NO: 907982 - RNA, 19 nt, Artificial Sequence
  Description of Artificial Sequence: Synthetic oligonucleotide
ucuggucaaguaaugcaga

SEQ ID NO: 907983 - RNA, 19 nt, Artificial Sequence
  Description of Artificial Sequence: Synthetic oligonucleotide
ucugagcccaauauacaga

SEQ ID NO: 907984 - RNA, 19 nt, Artificial Sequence
  Description of Artificial Sequence: Synthetic oligonucleotide
uguacacuuuaacauuuaa

SEQ ID NO: 907985 - RNA, 19 nt, Artificial Sequence
  Description of Artificial Sequence: Synthetic oligonucleotide
ucaaauucugucacuucaa

SEQ ID NO: 907986 - RNA, 19 nt, Artificial Sequence
  Description of Artificial Sequence: Synthetic oligonucleotide
guucaauugcuucuugcug

SEQ ID NO: 907987 - RNA, 19 nt, Artificial Sequence
  Description of Artificial Sequence: Synthetic oligonucleotide
uaggagagaauuuuauuuu

SEQ ID NO: 907988 - RNA, 19 nt, Artificial Sequence
  Description of Artificial Sequence: Synthetic oligonucleotide
uuaagucugucuauuucau

SEQ ID NO: 907989 - RNA, 19 nt, Artificial Sequence
  Description of Artificial Sequence: Synthetic oligonucleotide
ucgcugaccuucuuuaccc

SEQ ID NO: 907990 - RNA, 19 nt, Artificial Sequence
  Description of Artificial Sequence: Synthetic oligonucleotide
ugucacuucaacucugguc

SEQ ID NO: 907991 - RNA, 19 nt, Artificial Sequence
  Description of Artificial Sequence: Synthetic oligonucleotide
aguaaaccagguaaagaag

SEQ ID NO: 907992 - RNA, 19 nt, Artificial Sequence
  Description of Artificial Sequence: Synthetic oligonucleotide
uucgucuuccuccccaagc

SEQ ID NO: 907993 - RNA, 19 nt, Artificial Sequence
  Description of Artificial Sequence: Synthetic oligonucleotide
uuuguucuacuuucaaaau

SEQ ID NO: 907994 - RNA, 19 nt, Artificial Sequence
  Description of Artificial Sequence: Synthetic oligonucleotide
acucuggucaaguaaugca

SEQ ID NO: 907995 - RNA, 19 nt, Artificial Sequence
  Description of Artificial Sequence: Synthetic oligonucleotide
cauuaagucugucuauuuc

SEQ ID NO: 907996 - RNA, 19 nt, Artificial Sequence
  Description of Artificial Sequence: Synthetic oligonucleotide
ugguguugagaccucaaaa

SEQ ID NO: 907997 - RNA, 19 nt, Artificial Sequence
  Description of Artificial Sequence: Synthetic oligonucleotide
agaacagaagaguggagau

SEQ ID NO: 907998 - RNA, 19 nt, Artificial Sequence
  Description of Artificial Sequence: Synthetic oligonucleotide
gucacaaugcccacuaacc

SEQ ID NO: 907999 - RNA, 19 nt, Artificial Sequence
  Description of Artificial Sequence: Synthetic oligonucleotide
gaauuuagaacagaagagu

SEQ ID NO: 908000 - RNA, 19 nt, Artificial Sequence
  Description of Artificial Sequence: Synthetic oligonucleotide
cuaacugucuguauucaca

SEQ ID NO: 908001 - RNA, 19 nt, Artificial Sequence
  Description of Artificial Sequence: Synthetic oligonucleotide
agagggcuuuucuuuuccc

SEQ ID NO: 908002 - RNA, 19 nt, Artificial Sequence
  Description of Artificial Sequence: Synthetic oligonucleotide
acuuguacacuuuaacauu

SEQ ID NO: 908003 - RNA, 19 nt, Artificial Sequence
  Description of Artificial Sequence: Synthetic oligonucleotide
cacaagagggauuggggag

SEQ ID NO: 908004 - RNA, 19 nt, Artificial Sequence
  Description of Artificial Sequence: Synthetic oligonucleotide
cauggcacgagggaagugg

SEQ ID NO: 908005 - RNA, 19 nt, Artificial Sequence
  Description of Artificial Sequence: Synthetic oligonucleotide
ugucgguccagcuucgcug

SEQ ID NO: 908006 - RNA, 19 nt, Artificial Sequence
  Description of Artificial Sequence: Synthetic oligonucleotide
uggcuuguucauuaagucu

SEQ ID NO: 908007 - RNA, 19 nt, Artificial Sequence
  Description of Artificial Sequence: Synthetic oligonucleotide
acuuggguuucuuggacug

SEQ ID NO: 908008 - RNA, 19 nt, Artificial Sequence
  Description of Artificial Sequence: Synthetic oligonucleotide
aaucucugagcccaauaua

SEQ ID NO: 908009 - RNA, 19 nt, Artificial Sequence
  Description of Artificial Sequence: Synthetic oligonucleotide
auucugucacuucaacucu

SEQ ID NO: 908010 - RNA, 19 nt, Artificial Sequence
  Description of Artificial Sequence: Synthetic oligonucleotide
acugcaacuugcucccagg

SEQ ID NO: 908011 - RNA, 19 nt, Artificial Sequence
  Description of Artificial Sequence: Synthetic oligonucleotide
uuaagucggccucgcagcc

SEQ ID NO: 908012 - RNA, 19 nt, Artificial Sequence
  Description of Artificial Sequence: Synthetic oligonucleotide
agcgaggccggcuugucgg

SEQ ID NO: 908013 - RNA, 19 nt, Artificial Sequence
  Description of Artificial Sequence: Synthetic oligonucleotide
cuguuaaacaucacaauua

SEQ ID NO: 908014 - RNA, 19 nt, Artificial Sequence
  Description of Artificial Sequence: Synthetic oligonucleotide
auccauauauuuagagacg

SEQ ID NO: 908015 - RNA, 19 nt, Artificial Sequence
  Description of Artificial Sequence: Synthetic oligonucleotide
accucaaacccacccuucg

SEQ ID NO: 908016 - RNA, 19 nt, Artificial Sequence
  Description of Artificial Sequence: Synthetic oligonucleotide
aaacccuacagguucuguu

SEQ ID NO: 908017 - RNA, 19 nt, Artificial Sequence
  Description of Artificial Sequence: Synthetic oligonucleotide
ucucugagcccaauauaca

SEQ ID NO: 908018 - RNA, 19 nt, Artificial Sequence
  Description of Artificial Sequence: Synthetic oligonucleotide
uguguucaauugcuucuug

SEQ ID NO: 908019 - RNA, 19 nt, Artificial Sequence
  Description of Artificial Sequence: Synthetic oligonucleotide
accuuaaacugcaaggaug

SEQ ID NO: 908020 - RNA, 19 nt, Artificial Sequence
  Description of Artificial Sequence: Synthetic oligonucleotide
ugaguggcagggcucaagu

SEQ ID NO: 908021 - RNA, 19 nt, Artificial Sequence
  Description of Artificial Sequence: Synthetic oligonucleotide
aaauggcuggcggaguuug

SEQ ID NO: 908022 - RNA, 19 nt, Artificial Sequence
  Description of Artificial Sequence: Synthetic oligonucleotide
aauuugggauuuuggcgau

SEQ ID NO: 908023 - RNA, 19 nt, Artificial Sequence
  Description of Artificial Sequence: Synthetic oligonucleotide
acauuggcgguuuuaucca

SEQ ID NO: 908024 - RNA, 19 nt, Artificial Sequence
  Description of Artificial Sequence: Synthetic oligonucleotide
uucgucaauguguucaauu

SEQ ID NO: 908025 - RNA, 19 nt, Artificial Sequence
  Description of Artificial Sequence: Synthetic oligonucleotide
ccacagagcacauuggcgg

SEQ ID NO: 908026 - RNA, 19 nt, Artificial Sequence
  Description of Artificial Sequence: Synthetic oligonucleotide
uucugucacuucaacucug

SEQ ID NO: 908027 - RNA, 19 nt, Artificial Sequence
  Description of Artificial Sequence: Synthetic oligonucleotide
aaaugcuaacugucuguau

SEQ ID NO: 908028 - RNA, 19 nt, Artificial Sequence
  Description of Artificial Sequence: Synthetic oligonucleotide
gagacguuaagucggccuc

SEQ ID NO: 908029 - RNA, 19 nt, Artificial Sequence
  Description of Artificial Sequence: Synthetic oligonucleotide
guugguaaaugcuaacugu

SEQ ID NO: 908030 - RNA, 19 nt, Artificial Sequence
  Description of Artificial Sequence: Synthetic oligonucleotide
cugagcacaagagggauug

SEQ ID NO: 908031 - RNA, 19 nt, Artificial Sequence
  Description of Artificial Sequence: Synthetic oligonucleotide
caucacaauuaaacaugcc

SEQ ID NO: 908032 - RNA, 19 nt, Artificial Sequence
  Description of Artificial Sequence: Synthetic oligonucleotide
cauguugguaaaugcuaac

SEQ ID NO: 908033 - RNA, 19 nt, Artificial Sequence
  Description of Artificial Sequence: Synthetic oligonucleotide
aauuuccucacuggcuugu

SEQ ID NO: 908034 - RNA, 19 nt, Artificial Sequence
  Description of Artificial Sequence: Synthetic oligonucleotide
ugcaacuugcucccaggga

SEQ ID NO: 908035 - RNA, 19 nt, Artificial Sequence
  Description of Artificial Sequence: Synthetic oligonucleotide
uaaaugcuaacugucugua

SEQ ID NO: 908036 - RNA, 19 nt, Artificial Sequence
  Description of Artificial Sequence: Synthetic oligonucleotide
aggaugucuguuaaacauc

SEQ ID NO: 908037 - RNA, 19 nt, Artificial Sequence
  Description of Artificial Sequence: Synthetic oligonucleotide
agaaugucauuuccaaaua

SEQ ID NO: 908038 - RNA, 19 nt, Artificial Sequence
  Description of Artificial Sequence: Synthetic oligonucleotide
auguugguaaaugcuaacu

SEQ ID NO: 908039 - RNA, 19 nt, Artificial Sequence
  Description of Artificial Sequence: Synthetic oligonucleotide
cacgacaccucaaacccac

SEQ ID NO: 908040 - RNA, 19 nt, Artificial Sequence
  Description of Artificial Sequence: Synthetic oligonucleotide
cccaauauacagagaaagg

SEQ ID NO: 908041 - RNA, 19 nt, Artificial Sequence
  Description of Artificial Sequence: Synthetic oligonucleotide
aggagagaauuuuauuuua

SEQ ID NO: 908042 - RNA, 19 nt, Artificial Sequence
  Description of Artificial Sequence: Synthetic oligonucleotide
cucccauugaguggcaggg

SEQ ID NO: 908043 - RNA, 19 nt, Artificial Sequence
  Description of Artificial Sequence: Synthetic oligonucleotide
cuagaauucuaugcacuac

SEQ ID NO: 908044 - RNA, 19 nt, Artificial Sequence
  Description of Artificial Sequence: Synthetic oligonucleotide
ucauuaagucugucuauuu

SEQ ID NO: 908045 - RNA, 19 nt, Artificial Sequence
  Description of Artificial Sequence: Synthetic oligonucleotide
ugccaaaggagaagccaug

SEQ ID NO: 908046 - RNA, 19 nt, Artificial Sequence
  Description of Artificial Sequence: Synthetic oligonucleotide
cacauagagacacagugua

SEQ ID NO: 908047 - RNA, 19 nt, Artificial Sequence
  Description of Artificial Sequence: Synthetic oligonucleotide
agggcgacugagcacaaga

SEQ ID NO: 908048 - RNA, 19 nt, Artificial Sequence
  Description of Artificial Sequence: Synthetic oligonucleotide
gcaacuugcucccagggac

SEQ ID NO: 908049 - RNA, 19 nt, Artificial Sequence
  Description of Artificial Sequence: Synthetic oligonucleotide
acacauugguuuuauugua

SEQ ID NO: 908050 - RNA, 19 nt, Artificial Sequence
  Description of Artificial Sequence: Synthetic oligonucleotide
uggucaaguaaugcagagc

SEQ ID NO: 908051 - RNA, 19 nt, Artificial Sequence
  Description of Artificial Sequence: Synthetic oligonucleotide
aguggcgagaggccagcgg

SEQ ID NO: 908052 - RNA, 19 nt, Artificial Sequence
  Description of Artificial Sequence: Synthetic oligonucleotide
ggcgacugagcacaagagg

SEQ ID NO: 908053 - RNA, 19 nt, Artificial Sequence
  Description of Artificial Sequence: Synthetic oligonucleotide
cuacacaggggccuagcac

SEQ ID NO: 908054 - RNA, 19 nt, Artificial Sequence
  Description of Artificial Sequence: Synthetic oligonucleotide
ucaucaucaucaucaucau

SEQ ID NO: 908055 - RNA, 19 nt, Artificial Sequence
  Description of Artificial Sequence: Synthetic oligonucleotide
ucuauucuguaaccugauu

SEQ ID NO: 908056 - RNA, 19 nt, Artificial Sequence
  Description of Artificial Sequence: Synthetic oligonucleotide
ucguuaggagagaauuuua

SEQ ID NO: 908057 - RNA, 19 nt, Artificial Sequence
  Description of Artificial Sequence: Synthetic oligonucleotide
ugccguuucggggccaugg

SEQ ID NO: 908058 - RNA, 19 nt, Artificial Sequence
  Description of Artificial Sequence: Synthetic oligonucleotide
acuucaacucuggucaagu

SEQ ID NO: 908059 - RNA, 19 nt, Artificial Sequence
  Description of Artificial Sequence: Synthetic oligonucleotide
cguuguauuuugcucaagg

SEQ ID NO: 908060 - RNA, 19 nt, Artificial Sequence
  Description of Artificial Sequence: Synthetic oligonucleotide
aaaacccuacagguucugu

SEQ ID NO: 908061 - RNA, 19 nt, Artificial Sequence
  Description of Artificial Sequence: Synthetic oligonucleotide
cccacgacaccucaaaccc

SEQ ID NO: 908062 - RNA, 19 nt, Artificial Sequence
  Description of Artificial Sequence: Synthetic oligonucleotide
agcuagaauucuaugcacu

SEQ ID NO: 908063 - RNA, 19 nt, Artificial Sequence
  Description of Artificial Sequence: Synthetic oligonucleotide
guugucacaaugcccacua

SEQ ID NO: 908064 - RNA, 19 nt, Artificial Sequence
  Description of Artificial Sequence: Synthetic oligonucleotide
uuggcgguuuuauccauau

SEQ ID NO: 908065 - RNA, 19 nt, Artificial Sequence
  Description of Artificial Sequence: Synthetic oligonucleotide
ccaauauacagagaaagga

SEQ ID NO: 908066 - RNA, 19 nt, Artificial Sequence
  Description of Artificial Sequence: Synthetic oligonucleotide
agagggauuggggagggga

SEQ ID NO: 908067 - RNA, 19 nt, Artificial Sequence
  Description of Artificial Sequence: Synthetic oligonucleotide
aaacugcaaggaugucugu

SEQ ID NO: 908068 - RNA, 19 nt, Artificial Sequence
  Description of Artificial Sequence: Synthetic oligonucleotide
uccagcuucgcugcgggga

SEQ ID NO: 908069 - RNA, 19 nt, Artificial Sequence
  Description of Artificial Sequence: Synthetic oligonucleotide
caaggaugucuguuaaaca

SEQ ID NO: 908070 - RNA, 19 nt, Artificial Sequence
  Description of Artificial Sequence: Synthetic oligonucleotide
ugcuaacugucuguauuca

SEQ ID NO: 908071 - RNA, 19 nt, Artificial Sequence
  Description of Artificial Sequence: Synthetic oligonucleotide
augaaauucuuuggagaga

SEQ ID NO: 908072 - RNA, 19 nt, Artificial Sequence
  Description of Artificial Sequence: Synthetic oligonucleotide
agacguuaagucggccucg

SEQ ID NO: 908073 - RNA, 19 nt, Artificial Sequence
  Description of Artificial Sequence: Synthetic oligonucleotide
gccauguugucacaaugcc

SEQ ID NO: 908074 - RNA, 19 nt, Artificial Sequence
  Description of Artificial Sequence: Synthetic oligonucleotide
guacacuuuaacauuuaaa

SEQ ID NO: 908075 - RNA, 19 nt, Artificial Sequence
  Description of Artificial Sequence: Synthetic oligonucleotide
aacugcaaggaugucuguu

SEQ ID NO: 908076 - RNA, 19 nt, Artificial Sequence
  Description of Artificial Sequence: Synthetic oligonucleotide
aaagcaacuuguacacuuu

SEQ ID NO: 908077 - RNA, 19 nt, Artificial Sequence
  Description of Artificial Sequence: Synthetic oligonucleotide
ucaucaucaucaucaucuu

SEQ ID NO: 908078 - RNA, 19 nt, Artificial Sequence
  Description of Artificial Sequence: Synthetic oligonucleotide
uugucgguccagcuucgcu

SEQ ID NO: 908079 - RNA, 19 nt, Artificial Sequence
  Description of Artificial Sequence: Synthetic oligonucleotide
augguguugagaccucaaa

SEQ ID NO: 908080 - RNA, 19 nt, Artificial Sequence
  Description of Artificial Sequence: Synthetic oligonucleotide
cuucaucaucaucaucauc

SEQ ID NO: 908081 - RNA, 19 nt, Artificial Sequence
  Description of Artificial Sequence: Synthetic oligonucleotide
ggcgguuuuauccauauau

SEQ ID NO: 908082 - RNA, 19 nt, Artificial Sequence
  Description of Artificial Sequence: Synthetic oligonucleotide
auaaaacccuacagguucu

SEQ ID NO: 908083 - RNA, 19 nt, Artificial Sequence
  Description of Artificial Sequence: Synthetic oligonucleotide
guaaccugauuuaaugucu

SEQ ID NO: 908084 - RNA, 19 nt, Artificial Sequence
  Description of Artificial Sequence: Synthetic oligonucleotide
aacugucuguauucacaua

SEQ ID NO: 908085 - RNA, 19 nt, Artificial Sequence
  Description of Artificial Sequence: Synthetic oligonucleotide
uguugucacaaugcccacu

SEQ ID NO: 908086 - RNA, 19 nt, Artificial Sequence
  Description of Artificial Sequence: Synthetic oligonucleotide
gguuuuauccauauauuua

SEQ ID NO: 908087 - RNA, 19 nt, Artificial Sequence
  Description of Artificial Sequence: Synthetic oligonucleotide
acauguugguaaaugcuaa

SEQ ID NO: 908088 - RNA, 19 nt, Artificial Sequence
  Description of Artificial Sequence: Synthetic oligonucleotide
acuucgucaauguguucaa

SEQ ID NO: 908089 - RNA, 19 nt, Artificial Sequence
  Description of Artificial Sequence: Synthetic oligonucleotide
gcucaagucaucguuagga

SEQ ID NO: 908090 - RNA, 19 nt, Artificial Sequence
  Description of Artificial Sequence: Synthetic oligonucleotide
cacauugguuuuauuguaa

SEQ ID NO: 908091 - RNA, 19 nt, Artificial Sequence
  Description of Artificial Sequence: Synthetic oligonucleotide
gucgguccagcuucgcugc

SEQ ID NO: 908092 - RNA, 19 nt, Artificial Sequence
  Description of Artificial Sequence: Synthetic oligonucleotide
ucaggugcgggagacguua

SEQ ID NO: 908093 - RNA, 19 nt, Artificial Sequence
  Description of Artificial Sequence: Synthetic oligonucleotide
acccuacagguucuguuga

SEQ ID NO: 908094 - RNA, 19 nt, Artificial Sequence
  Description of Artificial Sequence: Synthetic oligonucleotide
ggaugucuguuaaacauca

SEQ ID NO: 908095 - RNA, 19 nt, Artificial Sequence
  Description of Artificial Sequence: Synthetic oligonucleotide
gugcgggagacguuaaguc

SEQ ID NO: 908096 - RNA, 19 nt, Artificial Sequence
  Description of Artificial Sequence: Synthetic oligonucleotide
uaagucggccucgcagccg

SEQ ID NO: 908097 - RNA, 19 nt, Artificial Sequence
  Description of Artificial Sequence: Synthetic oligonucleotide
agcacauuggcgguuuuau

SEQ ID NO: 908098 - RNA, 19 nt, Artificial Sequence
  Description of Artificial Sequence: Synthetic oligonucleotide
caucaucaucaucaucauc

SEQ ID NO: 908099 - RNA, 19 nt, Artificial Sequence
  Description of Artificial Sequence: Synthetic oligonucleotide
cuucgcugaccuucuuuac

SEQ ID NO: 908100 - RNA, 19 nt, Artificial Sequence
  Description of Artificial Sequence: Synthetic oligonucleotide
gagcgaggccggcuugucg

SEQ ID NO: 908101 - RNA, 19 nt, Artificial Sequence
  Description of Artificial Sequence: Synthetic oligonucleotide
cuuggguuucuuggacugg

SEQ ID NO: 908102 - RNA, 19 nt, Artificial Sequence
  Description of Artificial Sequence: Synthetic oligonucleotide
gagccaugguguugagacc

SEQ ID NO: 908103 - RNA, 19 nt, Artificial Sequence
  Description of Artificial Sequence: Synthetic oligonucleotide
uucgcugcggggaccgacu

SEQ ID NO: 908104 - RNA, 19 nt, Artificial Sequence
  Description of Artificial Sequence: Synthetic oligonucleotide
cuuguacacuuuaacauuu

SEQ ID NO: 908105 - RNA, 19 nt, Artificial Sequence
  Description of Artificial Sequence: Synthetic oligonucleotide
gguucuguugauucuccca

SEQ ID NO: 908106 - RNA, 19 nt, Artificial Sequence
  Description of Artificial Sequence: Synthetic oligonucleotide
accagguaaagaagcucuc

SEQ ID NO: 908107 - RNA, 19 nt, Artificial Sequence
  Description of Artificial Sequence: Synthetic oligonucleotide
caaagcaacuuguacacuu

SEQ ID NO: 908108 - RNA, 19 nt, Artificial Sequence
  Description of Artificial Sequence: Synthetic oligonucleotide
gaggccggcuugucggucc

SEQ ID NO: 908109 - RNA, 19 nt, Artificial Sequence
  Description of Artificial Sequence: Synthetic oligonucleotide
ugcagagccucuucgucuu

SEQ ID NO: 908110 - RNA, 19 nt, Artificial Sequence
  Description of Artificial Sequence: Synthetic oligonucleotide
gcgggagacguuaagucgg

SEQ ID NO: 908111 - RNA, 19 nt, Artificial Sequence
  Description of Artificial Sequence: Synthetic oligonucleotide
aaguaaugcagagccucuu

SEQ ID NO: 908112 - RNA, 19 nt, Artificial Sequence
  Description of Artificial Sequence: Synthetic oligonucleotide
guuaggagagaauuuuauu

SEQ ID NO: 908113 - RNA, 19 nt, Artificial Sequence
  Description of Artificial Sequence: Synthetic oligonucleotide
cuguaaccugauuuaaugu

SEQ ID NO: 908114 - RNA, 19 nt, Artificial Sequence
  Description of Artificial Sequence: Synthetic oligonucleotide
uguacacauugguuuuauu

SEQ ID NO: 908115 - RNA, 19 nt, Artificial Sequence
  Description of Artificial Sequence: Synthetic oligonucleotide
aaaauggcuggcggaguuu

SEQ ID NO: 908116 - RNA, 19 nt, Artificial Sequence
  Description of Artificial Sequence: Synthetic oligonucleotide
gaccgacuuggguuucuug

SEQ ID NO: 908117 - RNA, 19 nt, Artificial Sequence
  Description of Artificial Sequence: Synthetic oligonucleotide
augcacuacuacacagggg

SEQ ID NO: 908118 - RNA, 19 nt, Artificial Sequence
  Description of Artificial Sequence: Synthetic oligonucleotide
gaaguggcgagaggccagc

SEQ ID NO: 908119 - RNA, 19 nt, Artificial Sequence
  Description of Artificial Sequence: Synthetic oligonucleotide
gacguuaagucggccucgc

SEQ ID NO: 908120 - RNA, 19 nt, Artificial Sequence
  Description of Artificial Sequence: Synthetic oligonucleotide
gacaccucaaacccacccu

SEQ ID NO: 908121 - RNA, 19 nt, Artificial Sequence
  Description of Artificial Sequence: Synthetic oligonucleotide
guaaucucugagcccaaua

SEQ ID NO: 908122 - RNA, 19 nt, Artificial Sequence
  Description of Artificial Sequence: Synthetic oligonucleotide
agaauucuaugcacuacua

SEQ ID NO: 908123 - RNA, 19 nt, Artificial Sequence
  Description of Artificial Sequence: Synthetic oligonucleotide
gcugcggggaccgacuugg

SEQ ID NO: 908124 - RNA, 19 nt, Artificial Sequence
  Description of Artificial Sequence: Synthetic oligonucleotide
uguguacacauugguuuua

SEQ ID NO: 908125 - RNA, 19 nt, Artificial Sequence
  Description of Artificial Sequence: Synthetic oligonucleotide
cugucuguauucacauaga

SEQ ID NO: 908126 - RNA, 19 nt, Artificial Sequence
  Description of Artificial Sequence: Synthetic oligonucleotide
uacuacacaggggccuagc

SEQ ID NO: 908127 - RNA, 19 nt, Artificial Sequence
  Description of Artificial Sequence: Synthetic oligonucleotide
augccaaaggagaagccau

SEQ ID NO: 908128 - RNA, 19 nt, Artificial Sequence
  Description of Artificial Sequence: Synthetic oligonucleotide
guugauucucccauugagu

SEQ ID NO: 908129 - RNA, 19 nt, Artificial Sequence
  Description of Artificial Sequence: Synthetic oligonucleotide
aaguggcgagaggccagcg

SEQ ID NO: 908130 - RNA, 19 nt, Artificial Sequence
  Description of Artificial Sequence: Synthetic oligonucleotide
gggcucaagucaucguuag

SEQ ID NO: 908131 - RNA, 19 nt, Artificial Sequence
  Description of Artificial Sequence: Synthetic oligonucleotide
ucggggccauggcacgagg

SEQ ID NO: 908132 - RNA, 19 nt, Artificial Sequence
  Description of Artificial Sequence: Synthetic oligonucleotide
cauagagacacaguguaau

SEQ ID NO: 908133 - RNA, 19 nt, Artificial Sequence
  Description of Artificial Sequence: Synthetic oligonucleotide
uucuguugauucucccauu

SEQ ID NO: 908134 - RNA, 19 nt, Artificial Sequence
  Description of Artificial Sequence: Synthetic oligonucleotide
ccccacgacaccucaaacc

SEQ ID NO: 908135 - RNA, 19 nt, Artificial Sequence
  Description of Artificial Sequence: Synthetic oligonucleotide
gguccagcuucgcugcggg

SEQ ID NO: 908136 - RNA, 19 nt, Artificial Sequence
  Description of Artificial Sequence: Synthetic oligonucleotide
ucacuucaacucuggucaa

SEQ ID NO: 908137 - RNA, 19 nt, Artificial Sequence
  Description of Artificial Sequence: Synthetic oligonucleotide
cguuaagucggccucgcag

SEQ ID NO: 908138 - RNA, 19 nt, Artificial Sequence
  Description of Artificial Sequence: Synthetic oligonucleotide
gcuaacugucuguauucac

SEQ ID NO: 908139 - RNA, 19 nt, Artificial Sequence
  Description of Artificial Sequence: Synthetic oligonucleotide
agcuucgcugcggggaccg

SEQ ID NO: 908140 - RNA, 19 nt, Artificial Sequence
  Description of Artificial Sequence: Synthetic oligonucleotide
guggagauucuuuucucgu

SEQ ID NO: 908141 - RNA, 19 nt, Artificial Sequence
  Description of Artificial Sequence: Synthetic oligonucleotide
uguaaucucugagcccaau

SEQ ID NO: 908142 - RNA, 19 nt, Artificial Sequence
  Description of Artificial Sequence: Synthetic oligonucleotide
ggcagggcucaagucaucg

SEQ ID NO: 908143 - RNA, 19 nt, Artificial Sequence
  Description of Artificial Sequence: Synthetic oligonucleotide
guucauuaagucugucuau

SEQ ID NO: 908144 - RNA, 19 nt, Artificial Sequence
  Description of Artificial Sequence: Synthetic oligonucleotide
ucguuguauuuugcucaag

SEQ ID NO: 908145 - RNA, 19 nt, Artificial Sequence
  Description of Artificial Sequence: Synthetic oligonucleotide
aagagggauuggggagggg

SEQ ID NO: 908146 - RNA, 19 nt, Artificial Sequence
  Description of Artificial Sequence: Synthetic oligonucleotide
gucuguuaaacaucacaau

SEQ ID NO: 908147 - RNA, 19 nt, Artificial Sequence
  Description of Artificial Sequence: Synthetic oligonucleotide
aggugcgggagacguuaag

SEQ ID NO: 908148 - RNA, 19 nt, Artificial Sequence
  Description of Artificial Sequence: Synthetic oligonucleotide
ucgguccagcuucgcugcg

SEQ ID NO: 908149 - RNA, 19 nt, Artificial Sequence
  Description of Artificial Sequence: Synthetic oligonucleotide
agucaucguuaggagagaa

SEQ ID NO: 908150 - RNA, 19 nt, Artificial Sequence
  Description of Artificial Sequence: Synthetic oligonucleotide
cuucggcaggccgagcgag

SEQ ID NO: 908151 - RNA, 19 nt, Artificial Sequence
  Description of Artificial Sequence: Synthetic oligonucleotide
gucuccugcagagcccagg

SEQ ID NO: 908152 - RNA, 19 nt, Artificial Sequence
  Description of Artificial Sequence: Synthetic oligonucleotide
ccuuaaacugcaaggaugu

SEQ ID NO: 908153 - RNA, 19 nt, Artificial Sequence
  Description of Artificial Sequence: Synthetic oligonucleotide
gcggacugccguuucgggg

SEQ ID NO: 908154 - RNA, 19 nt, Artificial Sequence
  Description of Artificial Sequence: Synthetic oligonucleotide
ggcucaagucaucguuagg

SEQ ID NO: 908155 - RNA, 19 nt, Artificial Sequence
  Description of Artificial Sequence: Synthetic oligonucleotide
cuuaaacugcaaggauguc

SEQ ID NO: 908156 - RNA, 19 nt, Artificial Sequence
  Description of Artificial Sequence: Synthetic oligonucleotide
cuucgucuuccuccccaag

SEQ ID NO: 908157 - RNA, 19 nt, Artificial Sequence
  Description of Artificial Sequence: Synthetic oligonucleotide
aucuauucuguaaccugau

SEQ ID NO: 908158 - RNA, 19 nt, Artificial Sequence
  Description of Artificial Sequence: Synthetic oligonucleotide
ggagagaauuuuauuuuaa

SEQ ID NO: 908159 - RNA, 19 nt, Artificial Sequence
  Description of Artificial Sequence: Synthetic oligonucleotide
cucguuguauuuugcucaa

SEQ ID NO: 908160 - RNA, 19 nt, Artificial Sequence
  Description of Artificial Sequence: Synthetic oligonucleotide
uggcuggcggaguuuguua

SEQ ID NO: 908161 - RNA, 19 nt, Artificial Sequence
  Description of Artificial Sequence: Synthetic oligonucleotide
ucccauugaguggcagggc

SEQ ID NO: 908162 - RNA, 19 nt, Artificial Sequence
  Description of Artificial Sequence: Synthetic oligonucleotide
acgacaccucaaacccacc

SEQ ID NO: 908163 - RNA, 19 nt, Artificial Sequence
  Description of Artificial Sequence: Synthetic oligonucleotide
acuacuacacaggggccua

SEQ ID NO: 908164 - RNA, 19 nt, Artificial Sequence
  Description of Artificial Sequence: Synthetic oligonucleotide
agggagcucaggugcggga

SEQ ID NO: 908165 - RNA, 19 nt, Artificial Sequence
  Description of Artificial Sequence: Synthetic oligonucleotide
aauggcuggcggaguuugu

SEQ ID NO: 908166 - RNA, 19 nt, Artificial Sequence
  Description of Artificial Sequence: Synthetic oligonucleotide
cuugcucccagggacugga

SEQ ID NO: 908167 - RNA, 19 nt, Artificial Sequence
  Description of Artificial Sequence: Synthetic oligonucleotide
uuucggggccauggcacga

SEQ ID NO: 908168 - RNA, 19 nt, Artificial Sequence
  Description of Artificial Sequence: Synthetic oligonucleotide
cugcaaggaugucuguuaa

SEQ ID NO: 908169 - RNA, 19 nt, Artificial Sequence
  Description of Artificial Sequence: Synthetic oligonucleotide
cggacugccguuucggggc

SEQ ID NO: 908170 - RNA, 19 nt, Artificial Sequence
  Description of Artificial Sequence: Synthetic oligonucleotide
cuuguggaugguugacaaa

SEQ ID NO: 908171 - RNA, 19 nt, Artificial Sequence
  Description of Artificial Sequence: Synthetic oligonucleotide
auuuagagacgaggauaaa

SEQ ID NO: 908172 - RNA, 19 nt, Artificial Sequence
  Description of Artificial Sequence: Synthetic oligonucleotide
ggagacguuaagucggccu

SEQ ID NO: 908173 - RNA, 19 nt, Artificial Sequence
  Description of Artificial Sequence: Synthetic oligonucleotide
ccccacagagcacauuggc

SEQ ID NO: 908174 - RNA, 19 nt, Artificial Sequence
  Description of Artificial Sequence: Synthetic oligonucleotide
ccccaagcagggcagacac

SEQ ID NO: 908175 - RNA, 19 nt, Artificial Sequence
  Description of Artificial Sequence: Synthetic oligonucleotide
ucggugcucagggcaggag

SEQ ID NO: 908176 - RNA, 19 nt, Artificial Sequence
  Description of Artificial Sequence: Synthetic oligonucleotide
ggaaguggcgagaggccag

SEQ ID NO: 908177 - RNA, 19 nt, Artificial Sequence
  Description of Artificial Sequence: Synthetic oligonucleotide
cccuucggcaggccgagcg

SEQ ID NO: 908178 - RNA, 19 nt, Artificial Sequence
  Description of Artificial Sequence: Synthetic oligonucleotide
cguuucggggccauggcac

SEQ ID NO: 908179 - RNA, 19 nt, Artificial Sequence
  Description of Artificial Sequence: Synthetic oligonucleotide
cuucaacucuggucaagua

SEQ ID NO: 908180 - RNA, 19 nt, Artificial Sequence
  Description of Artificial Sequence: Synthetic oligonucleotide
ccucaaacccacccuucgc

SEQ ID NO: 908181 - RNA, 19 nt, Artificial Sequence
  Description of Artificial Sequence: Synthetic oligonucleotide
agcccaauauacagagaaa

SEQ ID NO: 908182 - RNA, 19 nt, Artificial Sequence
  Description of Artificial Sequence: Synthetic oligonucleotide
gagccucggugcucagggc

SEQ ID NO: 908183 - RNA, 19 nt, Artificial Sequence
  Description of Artificial Sequence: Synthetic oligonucleotide
acguuaagucggccucgca

SEQ ID NO: 908184 - RNA, 19 nt, Artificial Sequence
  Description of Artificial Sequence: Synthetic oligonucleotide
cuacuacacaggggccuag

SEQ ID NO: 908185 - RNA, 19 nt, Artificial Sequence
  Description of Artificial Sequence: Synthetic oligonucleotide
gcacgagggaaguggcgag

SEQ ID NO: 908186 - RNA, 19 nt, Artificial Sequence
  Description of Artificial Sequence: Synthetic oligonucleotide
uggcgguuuuauccauaua

SEQ ID NO: 908187 - RNA, 19 nt, Artificial Sequence
  Description of Artificial Sequence: Synthetic oligonucleotide
gacugagcacaagagggau

SEQ ID NO: 908188 - RNA, 19 nt, Artificial Sequence
  Description of Artificial Sequence: Synthetic oligonucleotide
ggcggaguuuguuauauuu

SEQ ID NO: 908189 - RNA, 19 nt, Artificial Sequence
  Description of Artificial Sequence: Synthetic oligonucleotide
ggcacgagggaaguggcga

SEQ ID NO: 908190 - RNA, 19 nt, Artificial Sequence
  Description of Artificial Sequence: Synthetic oligonucleotide
guacuucgucaauguguuc

SEQ ID NO: 908191 - RNA, 19 nt, Artificial Sequence
  Description of Artificial Sequence: Synthetic oligonucleotide
cuugucgguccagcuucgc

SEQ ID NO: 908192 - RNA, 19 nt, Artificial Sequence
  Description of Artificial Sequence: Synthetic oligonucleotide
guccagcuucgcugcgggg

SEQ ID NO: 908193 - RNA, 19 nt, Artificial Sequence
  Description of Artificial Sequence: Synthetic oligonucleotide
agggcucaagucaucguua

SEQ ID NO: 908194 - RNA, 19 nt, Artificial Sequence
  Description of Artificial Sequence: Synthetic oligonucleotide
gggcgacugagcacaagag

SEQ ID NO: 908195 - RNA, 19 nt, Artificial Sequence
  Description of Artificial Sequence: Synthetic oligonucleotide
ggcaggagcgcggacugcc

SEQ ID NO: 908196 - RNA, 19 nt, Artificial Sequence
  Description of Artificial Sequence: Synthetic oligonucleotide
cgacaccucaaacccaccc

SEQ ID NO: 908197 - RNA, 19 nt, Artificial Sequence
  Description of Artificial Sequence: Synthetic oligonucleotide
cucccuucggcaggccgag

SEQ ID NO: 908198 - RNA, 19 nt, Artificial Sequence
  Description of Artificial Sequence: Synthetic oligonucleotide
acugagcacaagagggauu

SEQ ID NO: 908199 - RNA, 19 nt, Artificial Sequence
  Description of Artificial Sequence: Synthetic oligonucleotide
auuggcgguuuuauccaua

SEQ ID NO: 908200 - RNA, 19 nt, Artificial Sequence
  Description of Artificial Sequence: Synthetic oligonucleotide
caccuuaaacugcaaggau

SEQ ID NO: 908201 - RNA, 19 nt, Artificial Sequence
  Description of Artificial Sequence: Synthetic oligonucleotide
ggacuggggcaggagcgcg

SEQ ID NO: 908202 - RNA, 19 nt, Artificial Sequence
  Description of Artificial Sequence: Synthetic oligonucleotide
uggcggaguuuguuauauu

SEQ ID NO: 908203 - RNA, 19 nt, Artificial Sequence
  Description of Artificial Sequence: Synthetic oligonucleotide
aggagcgcggacugccguu

SEQ ID NO: 908204 - RNA, 19 nt, Artificial Sequence
  Description of Artificial Sequence: Synthetic oligonucleotide
cacuacuacacaggggccu

SEQ ID NO: 908205 - RNA, 19 nt, Artificial Sequence
  Description of Artificial Sequence: Synthetic oligonucleotide
acagagcacauuggcgguu

SEQ ID NO: 908206 - RNA, 19 nt, Artificial Sequence
  Description of Artificial Sequence: Synthetic oligonucleotide
ccuucgcugaccuucuuua

SEQ ID NO: 908207 - RNA, 19 nt, Artificial Sequence
  Description of Artificial Sequence: Synthetic oligonucleotide
agagcacauuggcgguuuu

SEQ ID NO: 908208 - RNA, 19 nt, Artificial Sequence
  Description of Artificial Sequence: Synthetic oligonucleotide
gagaggccagcggccggag

SEQ ID NO: 908209 - RNA, 19 nt, Artificial Sequence
  Description of Artificial Sequence: Synthetic oligonucleotide
cugcggggaccgacuuggg

SEQ ID NO: 908210 - RNA, 19 nt, Artificial Sequence
  Description of Artificial Sequence: Synthetic oligonucleotide
gucaaguaaugcagagccu

SEQ ID NO: 908211 - RNA, 19 nt, Artificial Sequence
  Description of Artificial Sequence: Synthetic oligonucleotide
gcacuacuacacaggggcc

SEQ ID NO: 908212 - RNA, 19 nt, Artificial Sequence
  Description of Artificial Sequence: Synthetic oligonucleotide
gagcacauuggcgguuuua

SEQ ID NO: 908213 - RNA, 19 nt, Artificial Sequence
  Description of Artificial Sequence: Synthetic oligonucleotide
gcuugucgguccagcuucg

SEQ ID NO: 908214 - RNA, 19 nt, Artificial Sequence
  Description of Artificial Sequence: Synthetic oligonucleotide
gccguuucggggccauggc

SEQ ID NO: 908215 - RNA, 19 nt, Artificial Sequence
  Description of Artificial Sequence: Synthetic oligonucleotide
ccgacuuggguuucuugga

SEQ ID NO: 908216 - RNA, 19 nt, Artificial Sequence
  Description of Artificial Sequence: Synthetic oligonucleotide
ucgcugcggggaccgacuu

SEQ ID NO: 908217 - RNA, 19 nt, Artificial Sequence
  Description of Artificial Sequence: Synthetic oligonucleotide
ccagcuucgcugcggggac

SEQ ID NO: 908218 - RNA, 19 nt, Artificial Sequence
  Description of Artificial Sequence: Synthetic oligonucleotide
ggugcgggagacguuaagu

SEQ ID NO: 908219 - RNA, 19 nt, Artificial Sequence
  Description of Artificial Sequence: Synthetic oligonucleotide
cacaggggccuagcacccc

SEQ ID NO: 908220 - RNA, 19 nt, Artificial Sequence
  Description of Artificial Sequence: Synthetic oligonucleotide
aggccggcuugucggucca

SEQ ID NO: 908221 - RNA, 19 nt, Artificial Sequence
  Description of Artificial Sequence: Synthetic oligonucleotide
cuggcggaguuuguuauau

SEQ ID NO: 908222 - RNA, 19 nt, Artificial Sequence
  Description of Artificial Sequence: Synthetic oligonucleotide
guguacacauugguuuuau

SEQ ID NO: 908223 - RNA, 19 nt, Artificial Sequence
  Description of Artificial Sequence: Synthetic oligonucleotide
gagcgcggacugccguuuc

SEQ ID NO: 908224 - RNA, 19 nt, Artificial Sequence
  Description of Artificial Sequence: Synthetic oligonucleotide
auugaguggcagggcucaa

SEQ ID NO: 908225 - RNA, 19 nt, Artificial Sequence
  Description of Artificial Sequence: Synthetic oligonucleotide
cacgagggaaguggcgaga

SEQ ID NO: 908226 - RNA, 19 nt, Artificial Sequence
  Description of Artificial Sequence: Synthetic oligonucleotide
cauuggcgguuuuauccau

SEQ ID NO: 908227 - RNA, 19 nt, Artificial Sequence
  Description of Artificial Sequence: Synthetic oligonucleotide
cagggcgacugagcacaag

SEQ ID NO: 908228 - RNA, 19 nt, Artificial Sequence
  Description of Artificial Sequence: Synthetic oligonucleotide
agucggccucgcagccgcc

SEQ ID NO: 908229 - RNA, 19 nt, Artificial Sequence
  Description of Artificial Sequence: Synthetic oligonucleotide
gcgagaggccagcggccgg

SEQ ID NO: 908230 - RNA, 19 nt, Artificial Sequence
  Description of Artificial Sequence: Synthetic oligonucleotide
acugccguuucggggccau

SEQ ID NO: 908231 - RNA, 19 nt, Artificial Sequence
  Description of Artificial Sequence: Synthetic oligonucleotide
gucaucguuaggagagaau

SEQ ID NO: 908232 - RNA, 19 nt, Artificial Sequence
  Description of Artificial Sequence: Synthetic oligonucleotide
gggagacguuaagucggcc

SEQ ID NO: 908233 - RNA, 19 nt, Artificial Sequence
  Description of Artificial Sequence: Synthetic oligonucleotide
cugucacuucaacucuggu

SEQ ID NO: 908234 - RNA, 19 nt, Artificial Sequence
  Description of Artificial Sequence: Synthetic oligonucleotide
cagcuucgcugcggggacc

SEQ ID NO: 908235 - RNA, 19 nt, Artificial Sequence
  Description of Artificial Sequence: Synthetic oligonucleotide
cguuaggagagaauuuuau

SEQ ID NO: 908236 - RNA, 19 nt, Artificial Sequence
  Description of Artificial Sequence: Synthetic oligonucleotide
cgggagacguuaagucggc

SEQ ID NO: 908237 - RNA, 19 nt, Artificial Sequence
  Description of Artificial Sequence: Synthetic oligonucleotide
cgcugaccuucuuuacccc

SEQ ID NO: 908238 - RNA, 19 nt, Artificial Sequence
  Description of Artificial Sequence: Synthetic oligonucleotide
cgacugagcacaagaggga

SEQ ID NO: 908239 - RNA, 19 nt, Artificial Sequence
  Description of Artificial Sequence: Synthetic oligonucleotide
cgguuuuauccauauauuu

SEQ ID NO: 908240 - RNA, 19 nt, Artificial Sequence
  Description of Artificial Sequence: Synthetic oligonucleotide
cccauugaguggcagggcu

SEQ ID NO: 908241 - RNA, 19 nt, Artificial Sequence
  Description of Artificial Sequence: Synthetic oligonucleotide
ggcuggcggaguuuguuau

SEQ ID NO: 908242 - RNA, 19 nt, Artificial Sequence
  Description of Artificial Sequence: Synthetic oligonucleotide
cgagggaaguggcgagagg

SEQ ID NO: 908243 - RNA, 19 nt, Artificial Sequence
  Description of Artificial Sequence: Synthetic oligonucleotide
gcggggaccgacuuggguu

SEQ ID NO: 908244 - RNA, 19 nt, Artificial Sequence
  Description of Artificial Sequence: Synthetic oligonucleotide
aggccgagcgaggccggcu

SEQ ID NO: 908245 - RNA, 19 nt, Artificial Sequence
  Description of Artificial Sequence: Synthetic oligonucleotide
guguaaucucugagcccaa

SEQ ID NO: 908246 - RNA, 19 nt, Artificial Sequence
  Description of Artificial Sequence: Synthetic oligonucleotide
cgcggacugccguuucggg

SEQ ID NO: 908247 - RNA, 19 nt, Artificial Sequence
  Description of Artificial Sequence: Synthetic oligonucleotide
caggugcgggagacguuaa

SEQ ID NO: 908248 - RNA, 19 nt, Artificial Sequence
  Description of Artificial Sequence: Synthetic oligonucleotide
gccggcuugucgguccagc

SEQ ID NO: 908249 - RNA, 19 nt, Artificial Sequence
  Description of Artificial Sequence: Synthetic oligonucleotide
cacccuucgcugaccuucu

SEQ ID NO: 908250 - RNA, 19 nt, Artificial Sequence
  Description of Artificial Sequence: Synthetic oligonucleotide
gcgguuuuauccauauauu

SEQ ID NO: 908251 - RNA, 19 nt, Artificial Sequence
  Description of Artificial Sequence: Synthetic oligonucleotide
ucccuucggcaggccgagc

SEQ ID NO: 908252 - RNA, 19 nt, Artificial Sequence
  Description of Artificial Sequence: Synthetic oligonucleotide
gcuggcggaguuuguuaua

SEQ ID NO: 908253 - RNA, 19 nt, Artificial Sequence
  Description of Artificial Sequence: Synthetic oligonucleotide
ccguuucggggccauggca

SEQ ID NO: 908254 - RNA, 19 nt, Artificial Sequence
  Description of Artificial Sequence: Synthetic oligonucleotide
gugucaccuuaaacugcaa

SEQ ID NO: 908255 - RNA, 19 nt, Artificial Sequence
  Description of Artificial Sequence: Synthetic oligonucleotide
gcggaguuuguuauauuuu

SEQ ID NO: 908256 - RNA, 19 nt, Artificial Sequence
  Description of Artificial Sequence: Synthetic oligonucleotide
gccgagcgaggccggcuug

SEQ ID NO: 908257 - RNA, 19 nt, Artificial Sequence
  Description of Artificial Sequence: Synthetic oligonucleotide
acccuucgcugaccuucuu

SEQ ID NO: 908258 - RNA, 19 nt, Artificial Sequence
  Description of Artificial Sequence: Synthetic oligonucleotide
gcagggcucaagucaucgu

SEQ ID NO: 908259 - RNA, 19 nt, Artificial Sequence
  Description of Artificial Sequence: Synthetic oligonucleotide
cuucgucaauguguucaau

SEQ ID NO: 908260 - RNA, 19 nt, Artificial Sequence
  Description of Artificial Sequence: Synthetic oligonucleotide
ccaugguguugagaccuca

SEQ ID NO: 908261 - RNA, 19 nt, Artificial Sequence
  Description of Artificial Sequence: Synthetic oligonucleotide
gcaggccgagcgaggccgg

SEQ ID NO: 908262 - RNA, 19 nt, Artificial Sequence
  Description of Artificial Sequence: Synthetic oligonucleotide
acagggcgacugagcacaa

SEQ ID NO: 908263 - RNA, 19 nt, Artificial Sequence
  Description of Artificial Sequence: Synthetic oligonucleotide
ccuucggcaggccgagcga

SEQ ID NO: 908264 - RNA, 19 nt, Artificial Sequence
  Description of Artificial Sequence: Synthetic oligonucleotide
gccaugguguugagaccuc

SEQ ID NO: 908265 - RNA, 19 nt, Artificial Sequence
  Description of Artificial Sequence: Synthetic oligonucleotide
ccauggcacgagggaagug

SEQ ID NO: 908266 - RNA, 19 nt, Artificial Sequence
  Description of Artificial Sequence: Synthetic oligonucleotide
gccagcggccggagccucg

SEQ ID NO: 908267 - RNA, 19 nt, Artificial Sequence
  Description of Artificial Sequence: Synthetic oligonucleotide
cgguccagcuucgcugcgg

SEQ ID NO: 908268 - RNA, 19 nt, Artificial Sequence
  Description of Artificial Sequence: Synthetic oligonucleotide
gggagccagagggcuuuuc

SEQ ID NO: 908269 - RNA, 19 nt, Artificial Sequence
  Description of Artificial Sequence: Synthetic oligonucleotide
cucaggugcgggagacguu

SEQ ID NO: 908270 - RNA, 19 nt, Artificial Sequence
  Description of Artificial Sequence: Synthetic oligonucleotide
ggggaccgacuuggguuuc

SEQ ID NO: 908271 - RNA, 19 nt, Artificial Sequence
  Description of Artificial Sequence: Synthetic oligonucleotide
ccuacagguucuguugauu

SEQ ID NO: 908272 - RNA, 19 nt, Artificial Sequence
  Description of Artificial Sequence: Synthetic oligonucleotide
cgcugcggggaccgacuug

SEQ ID NO: 908273 - RNA, 19 nt, Artificial Sequence
  Description of Artificial Sequence: Synthetic oligonucleotide
ggccggcuugucgguccag

SEQ ID NO: 908274 - RNA, 19 nt, Artificial Sequence
  Description of Artificial Sequence: Synthetic oligonucleotide
ccggcuugucgguccagcu

SEQ ID NO: 908275 - RNA, 19 nt, Artificial Sequence
  Description of Artificial Sequence: Synthetic oligonucleotide
cccuacagguucuguugau

SEQ ID NO: 908276 - RNA, 19 nt, Artificial Sequence
  Description of Artificial Sequence: Synthetic oligonucleotide
ggccgagcgaggccggcuu

SEQ ID NO: 908277 - RNA, 19 nt, Artificial Sequence
  Description of Artificial Sequence: Synthetic oligonucleotide
gcgaggccggcuugucggu

SEQ ID NO: 908278 - RNA, 19 nt, Artificial Sequence
  Description of Artificial Sequence: Synthetic oligonucleotide
ggagcgcggacugccguuu

SEQ ID NO: 908279 - RNA, 19 nt, Artificial Sequence
  Description of Artificial Sequence: Synthetic oligonucleotide
cccuucgcugaccuucuuu

SEQ ID NO: 908280 - RNA, 19 nt, Artificial Sequence
  Description of Artificial Sequence: Synthetic oligonucleotide
cccagggacuggagaaaau

SEQ ID NO: 908281 - RNA, 19 nt, Artificial Sequence
  Description of Artificial Sequence: Synthetic oligonucleotide
ccggagccucggugcucag

SEQ ID NO: 908282 - RNA, 19 nt, Artificial Sequence
  Description of Artificial Sequence: Synthetic oligonucleotide
cccaagcagggcagacacu

SEQ ID NO: 908283 - RNA, 19 nt, Artificial Sequence
  Description of Artificial Sequence: Synthetic oligonucleotide
cgagcgaggccggcuuguc

SEQ ID NO: 908284 - RNA, 19 nt, Artificial Sequence
  Description of Artificial Sequence: Synthetic oligonucleotide
ggaccgacuuggguuucuu

SEQ ID NO: 908285 - RNA, 19 nt, Artificial Sequence
  Description of Artificial Sequence: Synthetic oligonucleotide
cggggaccgacuuggguuu

SEQ ID NO: 908286 - RNA, 19 nt, Artificial Sequence
  Description of Artificial Sequence: Synthetic oligonucleotide
gcuucgcugcggggaccga

SEQ ID NO: 908287 - RNA, 19 nt, Artificial Sequence
  Description of Artificial Sequence: Synthetic oligonucleotide
cagcggccggagccucggu

SEQ ID NO: 908288 - RNA, 19 nt, Artificial Sequence
  Description of Artificial Sequence: Synthetic oligonucleotide
ccgagcgaggccggcuugu

SEQ ID NO: 908289 - RNA, 19 nt, Artificial Sequence
  Description of Artificial Sequence: Synthetic oligonucleotide
uguaucaaagucaagagaa

SEQ ID NO: 908290 - RNA, 19 nt, Artificial Sequence
  Description of Artificial Sequence: Synthetic oligonucleotide
aaagcagagaucaaagggc

SEQ ID NO: 908291 - RNA, 19 nt, Artificial Sequence
  Description of Artificial Sequence: Synthetic oligonucleotide
aacgguaagagcuguaccg

SEQ ID NO: 908292 - RNA, 19 nt, Artificial Sequence
  Description of Artificial Sequence: Synthetic oligonucleotide
aagggaauagccuugucag

SEQ ID NO: 908293 - RNA, 19 nt, Artificial Sequence
  Description of Artificial Sequence: Synthetic oligonucleotide
ucuggaaugacuagggcag

SEQ ID NO: 908294 - RNA, 19 nt, Artificial Sequence
  Description of Artificial Sequence: Synthetic oligonucleotide
uugcacacgaaaaugaaug

SEQ ID NO: 908295 - RNA, 19 nt, Artificial Sequence
  Description of Artificial Sequence: Synthetic oligonucleotide
gacacaauagucauggucc

SEQ ID NO: 908296 - RNA, 19 nt, Artificial Sequence
  Description of Artificial Sequence: Synthetic oligonucleotide
gguaacagcgcauugaccg

SEQ ID NO: 908297 - RNA, 19 nt, Artificial Sequence
  Description of Artificial Sequence: Synthetic oligonucleotide
aaauuugcucuucacagga

SEQ ID NO: 908298 - RNA, 19 nt, Artificial Sequence
  Description of Artificial Sequence: Synthetic oligonucleotide
uucuggaacguccagagga

SEQ ID NO: 908299 - RNA, 19 nt, Artificial Sequence
  Description of Artificial Sequence: Synthetic oligonucleotide
aggagauuuggcuuuggcc

SEQ ID NO: 908300 - RNA, 19 nt, Artificial Sequence
  Description of Artificial Sequence: Synthetic oligonucleotide
ucaagagaaucaaauuugc

SEQ ID NO: 908301 - RNA, 19 nt, Artificial Sequence
  Description of Artificial Sequence: Synthetic oligonucleotide
agauuuaggagauuuggcu

SEQ ID NO: 908302 - RNA, 19 nt, Artificial Sequence
  Description of Artificial Sequence: Synthetic oligonucleotide
ucggacacaauagucaugg

SEQ ID NO: 908303 - RNA, 19 nt, Artificial Sequence
  Description of Artificial Sequence: Synthetic oligonucleotide
uccgguuggacccagagcu

SEQ ID NO: 908304 - RNA, 19 nt, Artificial Sequence
  Description of Artificial Sequence: Synthetic oligonucleotide
aacaccuucuggaacgucc

SEQ ID NO: 908305 - RNA, 19 nt, Artificial Sequence
  Description of Artificial Sequence: Synthetic oligonucleotide
cuuguaaccggucuagggg

SEQ ID NO: 908306 - RNA, 19 nt, Artificial Sequence
  Description of Artificial Sequence: Synthetic oligonucleotide
ugugcauggaagcagggga

SEQ ID NO: 908307 - RNA, 19 nt, Artificial Sequence
  Description of Artificial Sequence: Synthetic oligonucleotide
gucauuuccacacuagcag

SEQ ID NO: 908308 - RNA, 19 nt, Artificial Sequence
  Description of Artificial Sequence: Synthetic oligonucleotide
ugcaaaagccuccucagca

SEQ ID NO: 908309 - RNA, 19 nt, Artificial Sequence
  Description of Artificial Sequence: Synthetic oligonucleotide
uaguguucaugucauuccg

SEQ ID NO: 908310 - RNA, 19 nt, Artificial Sequence
  Description of Artificial Sequence: Synthetic oligonucleotide
aucgguaagugacgaaacc

SEQ ID NO: 908311 - RNA, 19 nt, Artificial Sequence
  Description of Artificial Sequence: Synthetic oligonucleotide
cagcauaucgguaagugac

SEQ ID NO: 908312 - RNA, 19 nt, Artificial Sequence
  Description of Artificial Sequence: Synthetic oligonucleotide
ugcacacgaaaaugaaugg

SEQ ID NO: 908313 - RNA, 19 nt, Artificial Sequence
  Description of Artificial Sequence: Synthetic oligonucleotide
aagacaccgaugaagauga

SEQ ID NO: 908314 - RNA, 19 nt, Artificial Sequence
  Description of Artificial Sequence: Synthetic oligonucleotide
guaauggucacuggaacgg

SEQ ID NO: 908315 - RNA, 19 nt, Artificial Sequence
  Description of Artificial Sequence: Synthetic oligonucleotide
cacacgaaaaugaauggug

SEQ ID NO: 908316 - RNA, 19 nt, Artificial Sequence
  Description of Artificial Sequence: Synthetic oligonucleotide
acacaauagucaugguccc

SEQ ID NO: 908317 - RNA, 19 nt, Artificial Sequence
  Description of Artificial Sequence: Synthetic oligonucleotide
acacgaaaaugaauggugc

SEQ ID NO: 908318 - RNA, 19 nt, Artificial Sequence
  Description of Artificial Sequence: Synthetic oligonucleotide
cuaguguucaugucauucc

SEQ ID NO: 908319 - RNA, 19 nt, Artificial Sequence
  Description of Artificial Sequence: Synthetic oligonucleotide
cuuauggccacucucgaug

SEQ ID NO: 908320 - RNA, 19 nt, Artificial Sequence
  Description of Artificial Sequence: Synthetic oligonucleotide
aggcuuuucgguaacagcg

SEQ ID NO: 908321 - RNA, 19 nt, Artificial Sequence
  Description of Artificial Sequence: Synthetic oligonucleotide
cucacuguuaguccugugg

SEQ ID NO: 908322 - RNA, 19 nt, Artificial Sequence
  Description of Artificial Sequence: Synthetic oligonucleotide
uugacauuccaucgggagc

SEQ ID NO: 908323 - RNA, 19 nt, Artificial Sequence
  Description of Artificial Sequence: Synthetic oligonucleotide
caaauuugcucuucacagg

SEQ ID NO: 908324 - RNA, 19 nt, Artificial Sequence
  Description of Artificial Sequence: Synthetic oligonucleotide
ugacauuccaucgggagcc

SEQ ID NO: 908325 - RNA, 19 nt, Artificial Sequence
  Description of Artificial Sequence: Synthetic oligonucleotide
cuugacauuccaucgggag

SEQ ID NO: 908326 - RNA, 19 nt, Artificial Sequence
  Description of Artificial Sequence: Synthetic oligonucleotide
aagcuuauggccacucucg

SEQ ID NO: 908327 - RNA, 19 nt, Artificial Sequence
  Description of Artificial Sequence: Synthetic oligonucleotide
ugcuucgauuccaaucucg

SEQ ID NO: 908328 - RNA, 19 nt, Artificial Sequence
  Description of Artificial Sequence: Synthetic oligonucleotide
uauugcacgcuccuucugc

SEQ ID NO: 908329 - RNA, 19 nt, Artificial Sequence
  Description of Artificial Sequence: Synthetic oligonucleotide
auggaccccaucuuggagg

SEQ ID NO: 908330 - RNA, 19 nt, Artificial Sequence
  Description of Artificial Sequence: Synthetic oligonucleotide
gucaagagaaucaaauuug

SEQ ID NO: 908331 - RNA, 19 nt, Artificial Sequence
  Description of Artificial Sequence: Synthetic oligonucleotide
aaugaauggugcauuccuc

SEQ ID NO: 908332 - RNA, 19 nt, Artificial Sequence
  Description of Artificial Sequence: Synthetic oligonucleotide
gucacuucuccuccgaggg

SEQ ID NO: 908333 - RNA, 19 nt, Artificial Sequence
  Description of Artificial Sequence: Synthetic oligonucleotide
uuuccauaacugaugggga

SEQ ID NO: 908334 - RNA, 19 nt, Artificial Sequence
  Description of Artificial Sequence: Synthetic oligonucleotide
uuauggccacucucgaugg

SEQ ID NO: 908335 - RNA, 19 nt, Artificial Sequence
  Description of Artificial Sequence: Synthetic oligonucleotide
caauguaucaaagucaaga

SEQ ID NO: 908336 - RNA, 19 nt, Artificial Sequence
  Description of Artificial Sequence: Synthetic oligonucleotide
aguccuaguguucauguca

SEQ ID NO: 908337 - RNA, 19 nt, Artificial Sequence
  Description of Artificial Sequence: Synthetic oligonucleotide
ugacaagacagguuugaug

SEQ ID NO: 908338 - RNA, 19 nt, Artificial Sequence
  Description of Artificial Sequence: Synthetic oligonucleotide
guaagugacgaaaccauag

SEQ ID NO: 908339 - RNA, 19 nt, Artificial Sequence
  Description of Artificial Sequence: Synthetic oligonucleotide
uccuuagacgagcaggaug

SEQ ID NO: 908340 - RNA, 19 nt, Artificial Sequence
  Description of Artificial Sequence: Synthetic oligonucleotide
uaagugacgaaaccauagu

SEQ ID NO: 908341 - RNA, 19 nt, Artificial Sequence
  Description of Artificial Sequence: Synthetic oligonucleotide
auggugauguccugauggc

SEQ ID NO: 908342 - RNA, 19 nt, Artificial Sequence
  Description of Artificial Sequence: Synthetic oligonucleotide
ggagauuuggcuuuggcca

SEQ ID NO: 908343 - RNA, 19 nt, Artificial Sequence
  Description of Artificial Sequence: Synthetic oligonucleotide
ugucauuccggcaggguga

SEQ ID NO: 908344 - RNA, 19 nt, Artificial Sequence
  Description of Artificial Sequence: Synthetic oligonucleotide
aaugacuagggcaggcauc

SEQ ID NO: 908345 - RNA, 19 nt, Artificial Sequence
  Description of Artificial Sequence: Synthetic oligonucleotide
uccauaacugauggggagg

SEQ ID NO: 908346 - RNA, 19 nt, Artificial Sequence
  Description of Artificial Sequence: Synthetic oligonucleotide
gacgaaaccauaguuguca

SEQ ID NO: 908347 - RNA, 19 nt, Artificial Sequence
  Description of Artificial Sequence: Synthetic oligonucleotide
aagugacgaaaccauaguu

SEQ ID NO: 908348 - RNA, 19 nt, Artificial Sequence
  Description of Artificial Sequence: Synthetic oligonucleotide
uguucugccuuagcaaggg

SEQ ID NO: 908349 - RNA, 19 nt, Artificial Sequence
  Description of Artificial Sequence: Synthetic oligonucleotide
ucaaagucaagagaaucaa

SEQ ID NO: 908350 - RNA, 19 nt, Artificial Sequence
  Description of Artificial Sequence: Synthetic oligonucleotide
uuguaaccggucuaggggu

SEQ ID NO: 908351 - RNA, 19 nt, Artificial Sequence
  Description of Artificial Sequence: Synthetic oligonucleotide
ugaguuuccuacagccaag

SEQ ID NO: 908352 - RNA, 19 nt, Artificial Sequence
  Description of Artificial Sequence: Synthetic oligonucleotide
agcagcugggcccaaugac

SEQ ID NO: 908353 - RNA, 19 nt, Artificial Sequence
  Description of Artificial Sequence: Synthetic oligonucleotide
agggaauagccuugucagc

SEQ ID NO: 908354 - RNA, 19 nt, Artificial Sequence
  Description of Artificial Sequence: Synthetic oligonucleotide
uaucgguaagugacgaaac

SEQ ID NO: 908355 - RNA, 19 nt, Artificial Sequence
  Description of Artificial Sequence: Synthetic oligonucleotide
ugguaauggucacuggaac

SEQ ID NO: 908356 - RNA, 19 nt, Artificial Sequence
  Description of Artificial Sequence: Synthetic oligonucleotide
cugaucugcaggcuuuucg

SEQ ID NO: 908357 - RNA, 19 nt, Artificial Sequence
  Description of Artificial Sequence: Synthetic oligonucleotide
uuggacccagagcugacag

SEQ ID NO: 908358 - RNA, 19 nt, Artificial Sequence
  Description of Artificial Sequence: Synthetic oligonucleotide
cauggacgggacuagggcc

SEQ ID NO: 908359 - RNA, 19 nt, Artificial Sequence
  Description of Artificial Sequence: Synthetic oligonucleotide
ucgguaacagcgcauugac

SEQ ID NO: 908360 - RNA, 19 nt, Artificial Sequence
  Description of Artificial Sequence: Synthetic oligonucleotide
aggaucaaagucuucccga

SEQ ID NO: 908361 - RNA, 19 nt, Artificial Sequence
  Description of Artificial Sequence: Synthetic oligonucleotide
ucgauuccaaucucgcuga

SEQ ID NO: 908362 - RNA, 19 nt, Artificial Sequence
  Description of Artificial Sequence: Synthetic oligonucleotide
uguaccacguccucaggac

SEQ ID NO: 908363 - RNA, 19 nt, Artificial Sequence
  Description of Artificial Sequence: Synthetic oligonucleotide
auuuaggagauuuggcuuu

SEQ ID NO: 908364 - RNA, 19 nt, Artificial Sequence
  Description of Artificial Sequence: Synthetic oligonucleotide
gagaucaaagggcugcuca

SEQ ID NO: 908365 - RNA, 19 nt, Artificial Sequence
  Description of Artificial Sequence: Synthetic oligonucleotide
ucagagggaguccuagugu

SEQ ID NO: 908366 - RNA, 19 nt, Artificial Sequence
  Description of Artificial Sequence: Synthetic oligonucleotide
gaauagccuugucagcugc

SEQ ID NO: 908367 - RNA, 19 nt, Artificial Sequence
  Description of Artificial Sequence: Synthetic oligonucleotide
uugcagaacugccugcggc

SEQ ID NO: 908368 - RNA, 19 nt, Artificial Sequence
  Description of Artificial Sequence: Synthetic oligonucleotide
ucgguaagugacgaaacca

SEQ ID NO: 908369 - RNA, 19 nt, Artificial Sequence
  Description of Artificial Sequence: Synthetic oligonucleotide
gucacuggaacgguaagag

SEQ ID NO: 908370 - RNA, 19 nt, Artificial Sequence
  Description of Artificial Sequence: Synthetic oligonucleotide
gaacgguaagagcuguacc

SEQ ID NO: 908371 - RNA, 19 nt, Artificial Sequence
  Description of Artificial Sequence: Synthetic oligonucleotide
uggaggaggaggaggagga

SEQ ID NO: 908372 - RNA, 19 nt, Artificial Sequence
  Description of Artificial Sequence: Synthetic oligonucleotide
agcuguaccgccgucuucg

SEQ ID NO: 908373 - RNA, 19 nt, Artificial Sequence
  Description of Artificial Sequence: Synthetic oligonucleotide
ugacagaccggcugcugcg

SEQ ID NO: 908374 - RNA, 19 nt, Artificial Sequence
  Description of Artificial Sequence: Synthetic oligonucleotide
ucugaccgagucaugcggc

SEQ ID NO: 908375 - RNA, 19 nt, Artificial Sequence
  Description of Artificial Sequence: Synthetic oligonucleotide
ugaugcagacuccccaaca

SEQ ID NO: 908376 - RNA, 19 nt, Artificial Sequence
  Description of Artificial Sequence: Synthetic oligonucleotide
acgguaagagcuguaccgc

SEQ ID NO: 908377 - RNA, 19 nt, Artificial Sequence
  Description of Artificial Sequence: Synthetic oligonucleotide
ggcaccuccagagaaaacg

SEQ ID NO: 908378 - RNA, 19 nt, Artificial Sequence
  Description of Artificial Sequence: Synthetic oligonucleotide
gacgaagaggaugaacacc

SEQ ID NO: 908379 - RNA, 19 nt, Artificial Sequence
  Description of Artificial Sequence: Synthetic oligonucleotide
acuguuaguccugugguca

SEQ ID NO: 908380 - RNA, 19 nt, Artificial Sequence
  Description of Artificial Sequence: Synthetic oligonucleotide
uugaccgcuguuugccugg

SEQ ID NO: 908381 - RNA, 19 nt, Artificial Sequence
  Description of Artificial Sequence: Synthetic oligonucleotide
aguugugcauggaagcagg

SEQ ID NO: 908382 - RNA, 19 nt, Artificial Sequence
  Description of Artificial Sequence: Synthetic oligonucleotide
ugcuucggacacaauaguc

SEQ ID NO: 908383 - RNA, 19 nt, Artificial Sequence
  Description of Artificial Sequence: Synthetic oligonucleotide
cucugaccgagucaugcgg

SEQ ID NO: 908384 - RNA, 19 nt, Artificial Sequence
  Description of Artificial Sequence: Synthetic oligonucleotide
cauaguugucaccuugcac

SEQ ID NO: 908385 - RNA, 19 nt, Artificial Sequence
  Description of Artificial Sequence: Synthetic oligonucleotide
ugccacguuggccaguucu

SEQ ID NO: 908386 - RNA, 19 nt, Artificial Sequence
  Description of Artificial Sequence: Synthetic oligonucleotide
auaacugauggggaggggu

SEQ ID NO: 908387 - RNA, 19 nt, Artificial Sequence
  Description of Artificial Sequence: Synthetic oligonucleotide
auaucgguaagugacgaaa

SEQ ID NO: 908388 - RNA, 19 nt, Artificial Sequence
  Description of Artificial Sequence: Synthetic oligonucleotide
uugugcauggaagcagggg

SEQ ID NO: 908389 - RNA, 19 nt, Artificial Sequence
  Description of Artificial Sequence: Synthetic oligonucleotide
acaauagucauggucccca

SEQ ID NO: 908390 - RNA, 19 nt, Artificial Sequence
  Description of Artificial Sequence: Synthetic oligonucleotide
ugccuuagcaagggaauag

SEQ ID NO: 908391 - RNA, 19 nt, Artificial Sequence
  Description of Artificial Sequence: Synthetic oligonucleotide
uucgguaacagcgcauuga

SEQ ID NO: 908392 - RNA, 19 nt, Artificial Sequence
  Description of Artificial Sequence: Synthetic oligonucleotide
gagucaagaucagaguaac

SEQ ID NO: 908393 - RNA, 19 nt, Artificial Sequence
  Description of Artificial Sequence: Synthetic oligonucleotide
caagggaauagccuuguca

SEQ ID NO: 908394 - RNA, 19 nt, Artificial Sequence
  Description of Artificial Sequence: Synthetic oligonucleotide
uuucgguaacagcgcauug

SEQ ID NO: 908395 - RNA, 19 nt, Artificial Sequence
  Description of Artificial Sequence: Synthetic oligonucleotide
gacagagagggugaacggc

SEQ ID NO: 908396 - RNA, 19 nt, Artificial Sequence
  Description of Artificial Sequence: Synthetic oligonucleotide
ggcgcuugacauuccaucg

SEQ ID NO: 908397 - RNA, 19 nt, Artificial Sequence
  Description of Artificial Sequence: Synthetic oligonucleotide
gcuuguaaccggucuaggg

SEQ ID NO: 908398 - RNA, 19 nt, Artificial Sequence
  Description of Artificial Sequence: Synthetic oligonucleotide
auuccggcagggugaggcc

SEQ ID NO: 908399 - RNA, 19 nt, Artificial Sequence
  Description of Artificial Sequence: Synthetic oligonucleotide
agcauaucgguaagugacg

SEQ ID NO: 908400 - RNA, 19 nt, Artificial Sequence
  Description of Artificial Sequence: Synthetic oligonucleotide
auugaccgcuguuugccug

SEQ ID NO: 908401 - RNA, 19 nt, Artificial Sequence
  Description of Artificial Sequence: Synthetic oligonucleotide
gauuuaggagauuuggcuu

SEQ ID NO: 908402 - RNA, 19 nt, Artificial Sequence
  Description of Artificial Sequence: Synthetic oligonucleotide
ucacuggaacgguaagagc

SEQ ID NO: 908403 - RNA, 19 nt, Artificial Sequence
  Description of Artificial Sequence: Synthetic oligonucleotide
uuaguccuguggucaagug

SEQ ID NO: 908404 - RNA, 19 nt, Artificial Sequence
  Description of Artificial Sequence: Synthetic oligonucleotide
ugaauggugcauuccucaa

SEQ ID NO: 908405 - RNA, 19 nt, Artificial Sequence
  Description of Artificial Sequence: Synthetic oligonucleotide
ucucugaugcagacucccc

SEQ ID NO: 908406 - RNA, 19 nt, Artificial Sequence
  Description of Artificial Sequence: Synthetic oligonucleotide
uucggacacaauagucaug

SEQ ID NO: 908407 - RNA, 19 nt, Artificial Sequence
  Description of Artificial Sequence: Synthetic oligonucleotide
cacuggaacgguaagagcu

SEQ ID NO: 908408 - RNA, 19 nt, Artificial Sequence
  Description of Artificial Sequence: Synthetic oligonucleotide
aguguucaugucauuccgg

SEQ ID NO: 908409 - RNA, 19 nt, Artificial Sequence
  Description of Artificial Sequence: Synthetic oligonucleotide
augacuagggcaggcaucu

SEQ ID NO: 908410 - RNA, 19 nt, Artificial Sequence
  Description of Artificial Sequence: Synthetic oligonucleotide
caagacagguuugauggug

SEQ ID NO: 908411 - RNA, 19 nt, Artificial Sequence
  Description of Artificial Sequence: Synthetic oligonucleotide
gacgggacuagggccaugg

SEQ ID NO: 908412 - RNA, 19 nt, Artificial Sequence
  Description of Artificial Sequence: Synthetic oligonucleotide
gaggacgcuucgcuggucc

SEQ ID NO: 908413 - RNA, 19 nt, Artificial Sequence
  Description of Artificial Sequence: Synthetic oligonucleotide
gugacgaaaccauaguugu

SEQ ID NO: 908414 - RNA, 19 nt, Artificial Sequence
  Description of Artificial Sequence: Synthetic oligonucleotide
gcuccaagagacuggacag

SEQ ID NO: 908415 - RNA, 19 nt, Artificial Sequence
  Description of Artificial Sequence: Synthetic oligonucleotide
cuucggucacuucuccucc

SEQ ID NO: 908416 - RNA, 19 nt, Artificial Sequence
  Description of Artificial Sequence: Synthetic oligonucleotide
ggacacaauagucaugguc

SEQ ID NO: 908417 - RNA, 19 nt, Artificial Sequence
  Description of Artificial Sequence: Synthetic oligonucleotide
gaggaggaggaggaggaag

SEQ ID NO: 908418 - RNA, 19 nt, Artificial Sequence
  Description of Artificial Sequence: Synthetic oligonucleotide
guaacagcgcauugaccgc

SEQ ID NO: 908419 - RNA, 19 nt, Artificial Sequence
  Description of Artificial Sequence: Synthetic oligonucleotide
uggauguuuggccucugua

SEQ ID NO: 908420 - RNA, 19 nt, Artificial Sequence
  Description of Artificial Sequence: Synthetic oligonucleotide
acgaaaaugaauggugcau

SEQ ID NO: 908421 - RNA, 19 nt, Artificial Sequence
  Description of Artificial Sequence: Synthetic oligonucleotide
ccaaagcagagaucaaagg

SEQ ID NO: 908422 - RNA, 19 nt, Artificial Sequence
  Description of Artificial Sequence: Synthetic oligonucleotide
uggucacuggaacgguaag

SEQ ID NO: 908423 - RNA, 19 nt, Artificial Sequence
  Description of Artificial Sequence: Synthetic oligonucleotide
ccugccgaagcuuauggcc

SEQ ID NO: 908424 - RNA, 19 nt, Artificial Sequence
  Description of Artificial Sequence: Synthetic oligonucleotide
caaucucgcugaugaaagc

SEQ ID NO: 908425 - RNA, 19 nt, Artificial Sequence
  Description of Artificial Sequence: Synthetic oligonucleotide
gacucagagggaguccuag

SEQ ID NO: 908426 - RNA, 19 nt, Artificial Sequence
  Description of Artificial Sequence: Synthetic oligonucleotide
uucggucacuucuccuccg

SEQ ID NO: 908427 - RNA, 19 nt, Artificial Sequence
  Description of Artificial Sequence: Synthetic oligonucleotide
agaccacucuucucucuuc

SEQ ID NO: 908428 - RNA, 19 nt, Artificial Sequence
  Description of Artificial Sequence: Synthetic oligonucleotide
uaacugauggggaggggua

SEQ ID NO: 908429 - RNA, 19 nt, Artificial Sequence
  Description of Artificial Sequence: Synthetic oligonucleotide
uuuucgguaacagcgcauu

SEQ ID NO: 908430 - RNA, 19 nt, Artificial Sequence
  Description of Artificial Sequence: Synthetic oligonucleotide
ccgauuggagucaagauca

SEQ ID NO: 908431 - RNA, 19 nt, Artificial Sequence
  Description of Artificial Sequence: Synthetic oligonucleotide
aagagcuguaccgccgucu

SEQ ID NO: 908432 - RNA, 19 nt, Artificial Sequence
  Description of Artificial Sequence: Synthetic oligonucleotide
cugaguuuccuacagccaa

SEQ ID NO: 908433 - RNA, 19 nt, Artificial Sequence
  Description of Artificial Sequence: Synthetic oligonucleotide
ugacgaaaccauaguuguc

SEQ ID NO: 908434 - RNA, 19 nt, Artificial Sequence
  Description of Artificial Sequence: Synthetic oligonucleotide
cccaaagcagagaucaaag

SEQ ID NO: 908435 - RNA, 19 nt, Artificial Sequence
  Description of Artificial Sequence: Synthetic oligonucleotide
cacgaaaaugaauggugca

SEQ ID NO: 908436 - RNA, 19 nt, Artificial Sequence
  Description of Artificial Sequence: Synthetic oligonucleotide
cuggaggaggaggaggagg

SEQ ID NO: 908437 - RNA, 19 nt, Artificial Sequence
  Description of Artificial Sequence: Synthetic oligonucleotide
uuagacgagcaggauggac

SEQ ID NO: 908438 - RNA, 19 nt, Artificial Sequence
  Description of Artificial Sequence: Synthetic oligonucleotide
gaccgagucaugcggccag

SEQ ID NO: 908439 - RNA, 19 nt, Artificial Sequence
  Description of Artificial Sequence: Synthetic oligonucleotide
aaggcaccgagggcucugc

SEQ ID NO: 908440 - RNA, 19 nt, Artificial Sequence
  Description of Artificial Sequence: Synthetic oligonucleotide
caccucuggaaugacuagg

SEQ ID NO: 908441 - RNA, 19 nt, Artificial Sequence
  Description of Artificial Sequence: Synthetic oligonucleotide
uccuggggagugucaaugc

SEQ ID NO: 908442 - RNA, 19 nt, Artificial Sequence
  Description of Artificial Sequence: Synthetic oligonucleotide
caacuuugggacaguguuc

SEQ ID NO: 908443 - RNA, 19 nt, Artificial Sequence
  Description of Artificial Sequence: Synthetic oligonucleotide
agacuggacaggucugaug

SEQ ID NO: 908444 - RNA, 19 nt, Artificial Sequence
  Description of Artificial Sequence: Synthetic oligonucleotide
uggaaugacuagggcaggc

SEQ ID NO: 908445 - RNA, 19 nt, Artificial Sequence
  Description of Artificial Sequence: Synthetic oligonucleotide
aagagacuggacaggucug

SEQ ID NO: 908446 - RNA, 19 nt, Artificial Sequence
  Description of Artificial Sequence: Synthetic oligonucleotide
cugauggcgcuugacauuc

SEQ ID NO: 908447 - RNA, 19 nt, Artificial Sequence
  Description of Artificial Sequence: Synthetic oligonucleotide
gggcccaaugacaagacag

SEQ ID NO: 908448 - RNA, 19 nt, Artificial Sequence
  Description of Artificial Sequence: Synthetic oligonucleotide
cauggaccccaucuuggag

SEQ ID NO: 908449 - RNA, 19 nt, Artificial Sequence
  Description of Artificial Sequence: Synthetic oligonucleotide
aagcugucagcaggagccg

SEQ ID NO: 908450 - RNA, 19 nt, Artificial Sequence
  Description of Artificial Sequence: Synthetic oligonucleotide
augcuucgauuccaaucuc

SEQ ID NO: 908451 - RNA, 19 nt, Artificial Sequence
  Description of Artificial Sequence: Synthetic oligonucleotide
uguaaccggucuagggguc

SEQ ID NO: 908452 - RNA, 19 nt, Artificial Sequence
  Description of Artificial Sequence: Synthetic oligonucleotide
accgggaucgggaugagga

SEQ ID NO: 908453 - RNA, 19 nt, Artificial Sequence
  Description of Artificial Sequence: Synthetic oligonucleotide
gguaagagcuguaccgccg

SEQ ID NO: 908454 - RNA, 19 nt, Artificial Sequence
  Description of Artificial Sequence: Synthetic oligonucleotide
guaccacguccucaggacc

SEQ ID NO: 908455 - RNA, 19 nt, Artificial Sequence
  Description of Artificial Sequence: Synthetic oligonucleotide
acaggucugaugcuucgau

SEQ ID NO: 908456 - RNA, 19 nt, Artificial Sequence
  Description of Artificial Sequence: Synthetic oligonucleotide
caagaucagaguaacuccu

SEQ ID NO: 908457 - RNA, 19 nt, Artificial Sequence
  Description of Artificial Sequence: Synthetic oligonucleotide
gauguccugauggcgcuug

SEQ ID NO: 908458 - RNA, 19 nt, Artificial Sequence
  Description of Artificial Sequence: Synthetic oligonucleotide
gcagagaucaaagggcugc

SEQ ID NO: 908459 - RNA, 19 nt, Artificial Sequence
  Description of Artificial Sequence: Synthetic oligonucleotide
ggacagagagggugaacgg

SEQ ID NO: 908460 - RNA, 19 nt, Artificial Sequence
  Description of Artificial Sequence: Synthetic oligonucleotide
ucccgauuggagucaagau

SEQ ID NO: 908461 - RNA, 19 nt, Artificial Sequence
  Description of Artificial Sequence: Synthetic oligonucleotide
cugaccgagucaugcggcc

SEQ ID NO: 908462 - RNA, 19 nt, Artificial Sequence
  Description of Artificial Sequence: Synthetic oligonucleotide
caccuugcacacgaaaaug

SEQ ID NO: 908463 - RNA, 19 nt, Artificial Sequence
  Description of Artificial Sequence: Synthetic oligonucleotide
gagucaugcggccagguau

SEQ ID NO: 908464 - RNA, 19 nt, Artificial Sequence
  Description of Artificial Sequence: Synthetic oligonucleotide
agcuuauggccacucucga

SEQ ID NO: 908465 - RNA, 19 nt, Artificial Sequence
  Description of Artificial Sequence: Synthetic oligonucleotide
agcugcacaaaggggcuuc

SEQ ID NO: 908466 - RNA, 19 nt, Artificial Sequence
  Description of Artificial Sequence: Synthetic oligonucleotide
uccacacuagcagcucucc

SEQ ID NO: 908467 - RNA, 19 nt, Artificial Sequence
  Description of Artificial Sequence: Synthetic oligonucleotide
acuagggccauggacccca

SEQ ID NO: 908468 - RNA, 19 nt, Artificial Sequence
  Description of Artificial Sequence: Synthetic oligonucleotide
aggggugagcccugccacg

SEQ ID NO: 908469 - RNA, 19 nt, Artificial Sequence
  Description of Artificial Sequence: Synthetic oligonucleotide
acuggaacgguaagagcug

SEQ ID NO: 908470 - RNA, 19 nt, Artificial Sequence
  Description of Artificial Sequence: Synthetic oligonucleotide
guugugcauggaagcaggg

SEQ ID NO: 908471 - RNA, 19 nt, Artificial Sequence
  Description of Artificial Sequence: Synthetic oligonucleotide
aggguuaccuccucagguu

SEQ ID NO: 908472 - RNA, 19 nt, Artificial Sequence
  Description of Artificial Sequence: Synthetic oligonucleotide
cuacagccaagcugucagc

SEQ ID NO: 908473 - RNA, 19 nt, Artificial Sequence
  Description of Artificial Sequence: Synthetic oligonucleotide
cuccaagagacuggacagg

SEQ ID NO: 908474 - RNA, 19 nt, Artificial Sequence
  Description of Artificial Sequence: Synthetic oligonucleotide
gauuggagucaagaucaga

SEQ ID NO: 908475 - RNA, 19 nt, Artificial Sequence
  Description of Artificial Sequence: Synthetic oligonucleotide
caaaggggcuucucccuug

SEQ ID NO: 908476 - RNA, 19 nt, Artificial Sequence
  Description of Artificial Sequence: Synthetic oligonucleotide
cacuguuaguccugugguc

SEQ ID NO: 908477 - RNA, 19 nt, Artificial Sequence
  Description of Artificial Sequence: Synthetic oligonucleotide
cugccgaagcuuauggcca

SEQ ID NO: 908478 - RNA, 19 nt, Artificial Sequence
  Description of Artificial Sequence: Synthetic oligonucleotide
agcuuccuuagacgagcag

SEQ ID NO: 908479 - RNA, 19 nt, Artificial Sequence
  Description of Artificial Sequence: Synthetic oligonucleotide
ggcccaaugacaagacagg

SEQ ID NO: 908480 - RNA, 19 nt, Artificial Sequence
  Description of Artificial Sequence: Synthetic oligonucleotide
cacaauagucauggucccc

SEQ ID NO: 908481 - RNA, 19 nt, Artificial Sequence
  Description of Artificial Sequence: Synthetic oligonucleotide
cauggaagcaggggagcag

SEQ ID NO: 908482 - RNA, 19 nt, Artificial Sequence
  Description of Artificial Sequence: Synthetic oligonucleotide
aggacgcuucgcugguccg

SEQ ID NO: 908483 - RNA, 19 nt, Artificial Sequence
  Description of Artificial Sequence: Synthetic oligonucleotide
ggaacguccagaggaacug

SEQ ID NO: 908484 - RNA, 19 nt, Artificial Sequence
  Description of Artificial Sequence: Synthetic oligonucleotide
ggacaggucugaugcuucg

SEQ ID NO: 908485 - RNA, 19 nt, Artificial Sequence
  Description of Artificial Sequence: Synthetic oligonucleotide
gcauugaccgcuguuugcc

SEQ ID NO: 908486 - RNA, 19 nt, Artificial Sequence
  Description of Artificial Sequence: Synthetic oligonucleotide
gacagaccggcugcugcgg

SEQ ID NO: 908487 - RNA, 19 nt, Artificial Sequence
  Description of Artificial Sequence: Synthetic oligonucleotide
gaguccuaguguucauguc

SEQ ID NO: 908488 - RNA, 19 nt, Artificial Sequence
  Description of Artificial Sequence: Synthetic oligonucleotide
agggguuuccauaacugau

SEQ ID NO: 908489 - RNA, 19 nt, Artificial Sequence
  Description of Artificial Sequence: Synthetic oligonucleotide
cagggguuuccauaacuga

SEQ ID NO: 908490 - RNA, 19 nt, Artificial Sequence
  Description of Artificial Sequence: Synthetic oligonucleotide
acucagagggaguccuagu

SEQ ID NO: 908491 - RNA, 19 nt, Artificial Sequence
  Description of Artificial Sequence: Synthetic oligonucleotide
aguugucaccuugcacacg

SEQ ID NO: 908492 - RNA, 19 nt, Artificial Sequence
  Description of Artificial Sequence: Synthetic oligonucleotide
cauaacugauggggagggg

SEQ ID NO: 908493 - RNA, 19 nt, Artificial Sequence
  Description of Artificial Sequence: Synthetic oligonucleotide
aucucgcugaugaaagccu

SEQ ID NO: 908494 - RNA, 19 nt, Artificial Sequence
  Description of Artificial Sequence: Synthetic oligonucleotide
gaaugacuagggcaggcau

SEQ ID NO: 908495 - RNA, 19 nt, Artificial Sequence
  Description of Artificial Sequence: Synthetic oligonucleotide
ccuaguguucaugucauuc

SEQ ID NO: 908496 - RNA, 19 nt, Artificial Sequence
  Description of Artificial Sequence: Synthetic oligonucleotide
gcuucggacacaauaguca

SEQ ID NO: 908497 - RNA, 19 nt, Artificial Sequence
  Description of Artificial Sequence: Synthetic oligonucleotide
acaaaggggcuucucccuu

SEQ ID NO: 908498 - RNA, 19 nt, Artificial Sequence
  Description of Artificial Sequence: Synthetic oligonucleotide
ggaacgguaagagcuguac

SEQ ID NO: 908499 - RNA, 19 nt, Artificial Sequence
  Description of Artificial Sequence: Synthetic oligonucleotide
ccauaacugauggggaggg

SEQ ID NO: 908500 - RNA, 19 nt, Artificial Sequence
  Description of Artificial Sequence: Synthetic oligonucleotide
gcucugaccgagucaugcg

SEQ ID NO: 908501 - RNA, 19 nt, Artificial Sequence
  Description of Artificial Sequence: Synthetic oligonucleotide
ccagggguuuccauaacug

SEQ ID NO: 908502 - RNA, 19 nt, Artificial Sequence
  Description of Artificial Sequence: Synthetic oligonucleotide
cuggaaugacuagggcagg

SEQ ID NO: 908503 - RNA, 19 nt, Artificial Sequence
  Description of Artificial Sequence: Synthetic oligonucleotide
agagcuguaccgccgucuu

SEQ ID NO: 908504 - RNA, 19 nt, Artificial Sequence
  Description of Artificial Sequence: Synthetic oligonucleotide
uaagagcuguaccgccguc

SEQ ID NO: 908505 - RNA, 19 nt, Artificial Sequence
  Description of Artificial Sequence: Synthetic oligonucleotide
gcuucgauuccaaucucgc

SEQ ID NO: 908506 - RNA, 19 nt, Artificial Sequence
  Description of Artificial Sequence: Synthetic oligonucleotide
gcgcuugacauuccaucgg

SEQ ID NO: 908507 - RNA, 19 nt, Artificial Sequence
  Description of Artificial Sequence: Synthetic oligonucleotide
ccugagagcguggaguggg

SEQ ID NO: 908508 - RNA, 19 nt, Artificial Sequence
  Description of Artificial Sequence: Synthetic oligonucleotide
uguuugccuggggacucag

SEQ ID NO: 908509 - RNA, 19 nt, Artificial Sequence
  Description of Artificial Sequence: Synthetic oligonucleotide
uuuggccaacagugagaca

SEQ ID NO: 908510 - RNA, 19 nt, Artificial Sequence
  Description of Artificial Sequence: Synthetic oligonucleotide
agcaagggaauagccuugu

SEQ ID NO: 908511 - RNA, 19 nt, Artificial Sequence
  Description of Artificial Sequence: Synthetic oligonucleotide
guccgguuggacccagagc

SEQ ID NO: 908512 - RNA, 19 nt, Artificial Sequence
  Description of Artificial Sequence: Synthetic oligonucleotide
cugagagcguggagugggc

SEQ ID NO: 908513 - RNA, 19 nt, Artificial Sequence
  Description of Artificial Sequence: Synthetic oligonucleotide
agcaggcaacuuugggaca

SEQ ID NO: 908514 - RNA, 19 nt, Artificial Sequence
  Description of Artificial Sequence: Synthetic oligonucleotide
ugauggcgcuugacauucc

SEQ ID NO: 908515 - RNA, 19 nt, Artificial Sequence
  Description of Artificial Sequence: Synthetic oligonucleotide
uugggacaguguucugccu

SEQ ID NO: 908516 - RNA, 19 nt, Artificial Sequence
  Description of Artificial Sequence: Synthetic oligonucleotide
gcaggcaacuuugggacag

SEQ ID NO: 908517 - RNA, 19 nt, Artificial Sequence
  Description of Artificial Sequence: Synthetic oligonucleotide
cuugcacacgaaaaugaau

SEQ ID NO: 908518 - RNA, 19 nt, Artificial Sequence
  Description of Artificial Sequence: Synthetic oligonucleotide
ggugagcccugccacguug

SEQ ID NO: 908519 - RNA, 19 nt, Artificial Sequence
  Description of Artificial Sequence: Synthetic oligonucleotide
gauuuggcuuuggccaaca

SEQ ID NO: 908520 - RNA, 19 nt, Artificial Sequence
  Description of Artificial Sequence: Synthetic oligonucleotide
guggauggggcaagacaag

SEQ ID NO: 908521 - RNA, 19 nt, Artificial Sequence
  Description of Artificial Sequence: Synthetic oligonucleotide
gucauuccggcagggugag

SEQ ID NO: 908522 - RNA, 19 nt, Artificial Sequence
  Description of Artificial Sequence: Synthetic oligonucleotide
ugaccgagucaugcggcca

SEQ ID NO: 908523 - RNA, 19 nt, Artificial Sequence
  Description of Artificial Sequence: Synthetic oligonucleotide
gaucgggaugaggaagaca

SEQ ID NO: 908524 - RNA, 19 nt, Artificial Sequence
  Description of Artificial Sequence: Synthetic oligonucleotide
cuucggacacaauagucau

SEQ ID NO: 908525 - RNA, 19 nt, Artificial Sequence
  Description of Artificial Sequence: Synthetic oligonucleotide
auggucacuggaacgguaa

SEQ ID NO: 908526 - RNA, 19 nt, Artificial Sequence
  Description of Artificial Sequence: Synthetic oligonucleotide
ggagucaagaucagaguaa

SEQ ID NO: 908527 - RNA, 19 nt, Artificial Sequence
  Description of Artificial Sequence: Synthetic oligonucleotide
ggccauggaccccaucuug

SEQ ID NO: 908528 - RNA, 19 nt, Artificial Sequence
  Description of Artificial Sequence: Synthetic oligonucleotide
ggugcauuccucaaucucu

SEQ ID NO: 908529 - RNA, 19 nt, Artificial Sequence
  Description of Artificial Sequence: Synthetic oligonucleotide
ccaagcugucagcaggagc

SEQ ID NO: 908530 - RNA, 19 nt, Artificial Sequence
  Description of Artificial Sequence: Synthetic oligonucleotide
ggcuuuucgguaacagcgc

SEQ ID NO: 908531 - RNA, 19 nt, Artificial Sequence
  Description of Artificial Sequence: Synthetic oligonucleotide
cauaucgguaagugacgaa

SEQ ID NO: 908532 - RNA, 19 nt, Artificial Sequence
  Description of Artificial Sequence: Synthetic oligonucleotide
ugaccgcuguuugccuggg

SEQ ID NO: 908533 - RNA, 19 nt, Artificial Sequence
  Description of Artificial Sequence: Synthetic oligonucleotide
guaagagcuguaccgccgu

SEQ ID NO: 908534 - RNA, 19 nt, Artificial Sequence
  Description of Artificial Sequence: Synthetic oligonucleotide
gcuuuucgguaacagcgca

SEQ ID NO: 908535 - RNA, 19 nt, Artificial Sequence
  Description of Artificial Sequence: Synthetic oligonucleotide
caggguuaccuccucaggu

SEQ ID NO: 908536 - RNA, 19 nt, Artificial Sequence
  Description of Artificial Sequence: Synthetic oligonucleotide
uucgcugguccgguuggac

SEQ ID NO: 908537 - RNA, 19 nt, Artificial Sequence
  Description of Artificial Sequence: Synthetic oligonucleotide
ugcaggcuuuucgguaaca

SEQ ID NO: 908538 - RNA, 19 nt, Artificial Sequence
  Description of Artificial Sequence: Synthetic oligonucleotide
cgcuugacauuccaucggg

SEQ ID NO: 908539 - RNA, 19 nt, Artificial Sequence
  Description of Artificial Sequence: Synthetic oligonucleotide
gaccgcuguuugccugggg

SEQ ID NO: 908540 - RNA, 19 nt, Artificial Sequence
  Description of Artificial Sequence: Synthetic oligonucleotide
ggggcaagacaaggcaccg

SEQ ID NO: 908541 - RNA, 19 nt, Artificial Sequence
  Description of Artificial Sequence: Synthetic oligonucleotide
gccuguuucaacaauguau

SEQ ID NO: 908542 - RNA, 19 nt, Artificial Sequence
  Description of Artificial Sequence: Synthetic oligonucleotide
gacauuccaucgggagccc

SEQ ID NO: 908543 - RNA, 19 nt, Artificial Sequence
  Description of Artificial Sequence: Synthetic oligonucleotide
gggcuuguaaccggucuag

SEQ ID NO: 908544 - RNA, 19 nt, Artificial Sequence
  Description of Artificial Sequence: Synthetic oligonucleotide
guaacuccucuugcagaac

SEQ ID NO: 908545 - RNA, 19 nt, Artificial Sequence
  Description of Artificial Sequence: Synthetic oligonucleotide
gaccgggaucgggaugagg

SEQ ID NO: 908546 - RNA, 19 nt, Artificial Sequence
  Description of Artificial Sequence: Synthetic oligonucleotide
gaggagugcccaggguuac

SEQ ID NO: 908547 - RNA, 19 nt, Artificial Sequence
  Description of Artificial Sequence: Synthetic oligonucleotide
caccuucuggaacguccag

SEQ ID NO: 908548 - RNA, 19 nt, Artificial Sequence
  Description of Artificial Sequence: Synthetic oligonucleotide
cagcugggcccaaugacaa

SEQ ID NO: 908549 - RNA, 19 nt, Artificial Sequence
  Description of Artificial Sequence: Synthetic oligonucleotide
cuucgauuccaaucucgcu

SEQ ID NO: 908550 - RNA, 19 nt, Artificial Sequence
  Description of Artificial Sequence: Synthetic oligonucleotide
agucaugcggccagguauu

SEQ ID NO: 908551 - RNA, 19 nt, Artificial Sequence
  Description of Artificial Sequence: Synthetic oligonucleotide
caucgggagcccaccucug

SEQ ID NO: 908552 - RNA, 19 nt, Artificial Sequence
  Description of Artificial Sequence: Synthetic oligonucleotide
gcgcauugaccgcuguuug

SEQ ID NO: 908553 - RNA, 19 nt, Artificial Sequence
  Description of Artificial Sequence: Synthetic oligonucleotide
ggaaugacuagggcaggca

SEQ ID NO: 908554 - RNA, 19 nt, Artificial Sequence
  Description of Artificial Sequence: Synthetic oligonucleotide
gagccgggagaggacacuc

SEQ ID NO: 908555 - RNA, 19 nt, Artificial Sequence
  Description of Artificial Sequence: Synthetic oligonucleotide
guuaguccuguggucaagu

SEQ ID NO: 908556 - RNA, 19 nt, Artificial Sequence
  Description of Artificial Sequence: Synthetic oligonucleotide
gcauaucgguaagugacga

SEQ ID NO: 908557 - RNA, 19 nt, Artificial Sequence
  Description of Artificial Sequence: Synthetic oligonucleotide
ccucuggaaugacuagggc

SEQ ID NO: 908558 - RNA, 19 nt, Artificial Sequence
  Description of Artificial Sequence: Synthetic oligonucleotide
aaccggucuaggggucucu

SEQ ID NO: 908559 - RNA, 19 nt, Artificial Sequence
  Description of Artificial Sequence: Synthetic oligonucleotide
accgagucaugcggccagg

SEQ ID NO: 908560 - RNA, 19 nt, Artificial Sequence
  Description of Artificial Sequence: Synthetic oligonucleotide
cuggaccgggaucgggaug

SEQ ID NO: 908561 - RNA, 19 nt, Artificial Sequence
  Description of Artificial Sequence: Synthetic oligonucleotide
uuccuacagccaagcuguc

SEQ ID NO: 908562 - RNA, 19 nt, Artificial Sequence
  Description of Artificial Sequence: Synthetic oligonucleotide
cugcaggcuuuucgguaac

SEQ ID NO: 908563 - RNA, 19 nt, Artificial Sequence
  Description of Artificial Sequence: Synthetic oligonucleotide
gacuagggccauggacccc

SEQ ID NO: 908564 - RNA, 19 nt, Artificial Sequence
  Description of Artificial Sequence: Synthetic oligonucleotide
guucugccuuagcaaggga

SEQ ID NO: 908565 - RNA, 19 nt, Artificial Sequence
  Description of Artificial Sequence: Synthetic oligonucleotide
gugauguccugauggcgcu

SEQ ID NO: 908566 - RNA, 19 nt, Artificial Sequence
  Description of Artificial Sequence: Synthetic oligonucleotide
auguccugauggcgcuuga

SEQ ID NO: 908567 - RNA, 19 nt, Artificial Sequence
  Description of Artificial Sequence: Synthetic oligonucleotide
gguaagugacgaaaccaua

SEQ ID NO: 908568 - RNA, 19 nt, Artificial Sequence
  Description of Artificial Sequence: Synthetic oligonucleotide
ggacgcuucgcugguccgg

SEQ ID NO: 908569 - RNA, 19 nt, Artificial Sequence
  Description of Artificial Sequence: Synthetic oligonucleotide
ccaccucuggaaugacuag

SEQ ID NO: 908570 - RNA, 19 nt, Artificial Sequence
  Description of Artificial Sequence: Synthetic oligonucleotide
cgguaagagcuguaccgcc

SEQ ID NO: 908571 - RNA, 19 nt, Artificial Sequence
  Description of Artificial Sequence: Synthetic oligonucleotide
uaaccggucuaggggucuc

SEQ ID NO: 908572 - RNA, 19 nt, Artificial Sequence
  Description of Artificial Sequence: Synthetic oligonucleotide
gccgucuucggucacuucu

SEQ ID NO: 908573 - RNA, 19 nt, Artificial Sequence
  Description of Artificial Sequence: Synthetic oligonucleotide
acauuccaucgggagccca

SEQ ID NO: 908574 - RNA, 19 nt, Artificial Sequence
  Description of Artificial Sequence: Synthetic oligonucleotide
cccagagcugacagaccgg

SEQ ID NO: 908575 - RNA, 19 nt, Artificial Sequence
  Description of Artificial Sequence: Synthetic oligonucleotide
gcuguaccgccgucuucgg

SEQ ID NO: 908576 - RNA, 19 nt, Artificial Sequence
  Description of Artificial Sequence: Synthetic oligonucleotide
cagagggaguccuaguguu

SEQ ID NO: 908577 - RNA, 19 nt, Artificial Sequence
  Description of Artificial Sequence: Synthetic oligonucleotide
caaggcaccgagggcucug

SEQ ID NO: 908578 - RNA, 19 nt, Artificial Sequence
  Description of Artificial Sequence: Synthetic oligonucleotide
cuuuucgguaacagcgcau

SEQ ID NO: 908579 - RNA, 19 nt, Artificial Sequence
  Description of Artificial Sequence: Synthetic oligonucleotide
cugccugccgaagcuuaug

SEQ ID NO: 908580 - RNA, 19 nt, Artificial Sequence
  Description of Artificial Sequence: Synthetic oligonucleotide
ccacacuagcagcucuccc

SEQ ID NO: 908581 - RNA, 19 nt, Artificial Sequence
  Description of Artificial Sequence: Synthetic oligonucleotide
agacuccccaacagcuaca

SEQ ID NO: 908582 - RNA, 19 nt, Artificial Sequence
  Description of Artificial Sequence: Synthetic oligonucleotide
ucaugcggccagguauuuu

SEQ ID NO: 908583 - RNA, 19 nt, Artificial Sequence
  Description of Artificial Sequence: Synthetic oligonucleotide
acgggacuagggccaugga

SEQ ID NO: 908584 - RNA, 19 nt, Artificial Sequence
  Description of Artificial Sequence: Synthetic oligonucleotide
cuguuucagcucugaccga

SEQ ID NO: 908585 - RNA, 19 nt, Artificial Sequence
  Description of Artificial Sequence: Synthetic oligonucleotide
ugguccgguuggacccaga

SEQ ID NO: 908586 - RNA, 19 nt, Artificial Sequence
  Description of Artificial Sequence: Synthetic oligonucleotide
guccuaguguucaugucau

SEQ ID NO: 908587 - RNA, 19 nt, Artificial Sequence
  Description of Artificial Sequence: Synthetic oligonucleotide
cgggacuagggccauggac

SEQ ID NO: 908588 - RNA, 19 nt, Artificial Sequence
  Description of Artificial Sequence: Synthetic oligonucleotide
cauugaccgcuguuugccu

SEQ ID NO: 908589 - RNA, 19 nt, Artificial Sequence
  Description of Artificial Sequence: Synthetic oligonucleotide
ccauaguugucaccuugca

SEQ ID NO: 908590 - RNA, 19 nt, Artificial Sequence
  Description of Artificial Sequence: Synthetic oligonucleotide
cuuagacgagcaggaugga

SEQ ID NO: 908591 - RNA, 19 nt, Artificial Sequence
  Description of Artificial Sequence: Synthetic oligonucleotide
ggacaguguucugccuuag

SEQ ID NO: 908592 - RNA, 19 nt, Artificial Sequence
  Description of Artificial Sequence: Synthetic oligonucleotide
ugauguccugauggcgcuu

SEQ ID NO: 908593 - RNA, 19 nt, Artificial Sequence
  Description of Artificial Sequence: Synthetic oligonucleotide
ccgcuguuugccuggggac

SEQ ID NO: 908594 - RNA, 19 nt, Artificial Sequence
  Description of Artificial Sequence: Synthetic oligonucleotide
gcacacgaaaaugaauggu

SEQ ID NO: 908595 - RNA, 19 nt, Artificial Sequence
  Description of Artificial Sequence: Synthetic oligonucleotide
ugaggacgcuucgcugguc

SEQ ID NO: 908596 - RNA, 19 nt, Artificial Sequence
  Description of Artificial Sequence: Synthetic oligonucleotide
cgguaacagcgcauugacc

SEQ ID NO: 908597 - RNA, 19 nt, Artificial Sequence
  Description of Artificial Sequence: Synthetic oligonucleotide
gcuguuugccuggggacuc

SEQ ID NO: 908598 - RNA, 19 nt, Artificial Sequence
  Description of Artificial Sequence: Synthetic oligonucleotide
gagcguggagugggcagga

SEQ ID NO: 908599 - RNA, 19 nt, Artificial Sequence
  Description of Artificial Sequence: Synthetic oligonucleotide
ccacauggacgggacuagg

SEQ ID NO: 908600 - RNA, 19 nt, Artificial Sequence
  Description of Artificial Sequence: Synthetic oligonucleotide
cugccuuagcaagggaaua

SEQ ID NO: 908601 - RNA, 19 nt, Artificial Sequence
  Description of Artificial Sequence: Synthetic oligonucleotide
ggggcuuguaaccggucua

SEQ ID NO: 908602 - RNA, 19 nt, Artificial Sequence
  Description of Artificial Sequence: Synthetic oligonucleotide
ggaucgggaugaggaagac

SEQ ID NO: 908603 - RNA, 19 nt, Artificial Sequence
  Description of Artificial Sequence: Synthetic oligonucleotide
agacaccgaugaagaugag

SEQ ID NO: 908604 - RNA, 19 nt, Artificial Sequence
  Description of Artificial Sequence: Synthetic oligonucleotide
gccagggguuuccauaacu

SEQ ID NO: 908605 - RNA, 19 nt, Artificial Sequence
  Description of Artificial Sequence: Synthetic oligonucleotide
uggacgggacuagggccau

SEQ ID NO: 908606 - RNA, 19 nt, Artificial Sequence
  Description of Artificial Sequence: Synthetic oligonucleotide
ucccuccugggcgguagau

SEQ ID NO: 908607 - RNA, 19 nt, Artificial Sequence
  Description of Artificial Sequence: Synthetic oligonucleotide
guaaccggucuaggggucu

SEQ ID NO: 908608 - RNA, 19 nt, Artificial Sequence
  Description of Artificial Sequence: Synthetic oligonucleotide
uaccgccgucuucggucac

SEQ ID NO: 908609 - RNA, 19 nt, Artificial Sequence
  Description of Artificial Sequence: Synthetic oligonucleotide
ggcgguagauuuaggagau

SEQ ID NO: 908610 - RNA, 19 nt, Artificial Sequence
  Description of Artificial Sequence: Synthetic oligonucleotide
gagacuggacaggucugau

SEQ ID NO: 908611 - RNA, 19 nt, Artificial Sequence
  Description of Artificial Sequence: Synthetic oligonucleotide
cccucugccuuugguaaug

SEQ ID NO: 908612 - RNA, 19 nt, Artificial Sequence
  Description of Artificial Sequence: Synthetic oligonucleotide
cugguccgguuggacccag

SEQ ID NO: 908613 - RNA, 19 nt, Artificial Sequence
  Description of Artificial Sequence: Synthetic oligonucleotide
cuggauguuuggccucugu

SEQ ID NO: 908614 - RNA, 19 nt, Artificial Sequence
  Description of Artificial Sequence: Synthetic oligonucleotide
ggagcaggaucaaagucuu

SEQ ID NO: 908615 - RNA, 19 nt, Artificial Sequence
  Description of Artificial Sequence: Synthetic oligonucleotide
gggacucagagggaguccu

SEQ ID NO: 908616 - RNA, 19 nt, Artificial Sequence
  Description of Artificial Sequence: Synthetic oligonucleotide
caugucauuccggcagggu

SEQ ID NO: 908617 - RNA, 19 nt, Artificial Sequence
  Description of Artificial Sequence: Synthetic oligonucleotide
cuggaacgguaagagcugu

SEQ ID NO: 908618 - RNA, 19 nt, Artificial Sequence
  Description of Artificial Sequence: Synthetic oligonucleotide
ggggagugucaaugccuga

SEQ ID NO: 908619 - RNA, 19 nt, Artificial Sequence
  Description of Artificial Sequence: Synthetic oligonucleotide
cuguuugccuggggacuca

SEQ ID NO: 908620 - RNA, 19 nt, Artificial Sequence
  Description of Artificial Sequence: Synthetic oligonucleotide
ggcaacuuugggacagugu

SEQ ID NO: 908621 - RNA, 19 nt, Artificial Sequence
  Description of Artificial Sequence: Synthetic oligonucleotide
accggucuaggggucucuu

SEQ ID NO: 908622 - RNA, 19 nt, Artificial Sequence
  Description of Artificial Sequence: Synthetic oligonucleotide
gcccacauggacgggacua

SEQ ID NO: 908623 - RNA, 19 nt, Artificial Sequence
  Description of Artificial Sequence: Synthetic oligonucleotide
gguuaccuccucagguucu

SEQ ID NO: 908624 - RNA, 19 nt, Artificial Sequence
  Description of Artificial Sequence: Synthetic oligonucleotide
ccggucuaggggucucuuc

SEQ ID NO: 908625 - RNA, 19 nt, Artificial Sequence
  Description of Artificial Sequence: Synthetic oligonucleotide
ccgaagcuuauggccacuc

SEQ ID NO: 908626 - RNA, 19 nt, Artificial Sequence
  Description of Artificial Sequence: Synthetic oligonucleotide
cuucgcugguccgguugga

SEQ ID NO: 908627 - RNA, 19 nt, Artificial Sequence
  Description of Artificial Sequence: Synthetic oligonucleotide
cgguaagugacgaaaccau

SEQ ID NO: 908628 - RNA, 19 nt, Artificial Sequence
  Description of Artificial Sequence: Synthetic oligonucleotide
ccuccugggcgguagauuu

SEQ ID NO: 908629 - RNA, 19 nt, Artificial Sequence
  Description of Artificial Sequence: Synthetic oligonucleotide
gauggacagcaggcaacuu

SEQ ID NO: 908630 - RNA, 19 nt, Artificial Sequence
  Description of Artificial Sequence: Synthetic oligonucleotide
gggcaagacaaggcaccga

SEQ ID NO: 908631 - RNA, 19 nt, Artificial Sequence
  Description of Artificial Sequence: Synthetic oligonucleotide
cuucuauugcacgcuccuu

SEQ ID NO: 908632 - RNA, 19 nt, Artificial Sequence
  Description of Artificial Sequence: Synthetic oligonucleotide
cugccacguuggccaguuc

SEQ ID NO: 908633 - RNA, 19 nt, Artificial Sequence
  Description of Artificial Sequence: Synthetic oligonucleotide
ggaggaggaggaggaggaa

SEQ ID NO: 908634 - RNA, 19 nt, Artificial Sequence
  Description of Artificial Sequence: Synthetic oligonucleotide
ggccacggcggcccugcca

SEQ ID NO: 908635 - RNA, 19 nt, Artificial Sequence
  Description of Artificial Sequence: Synthetic oligonucleotide
cggucuaggggucucuucu

SEQ ID NO: 908636 - RNA, 19 nt, Artificial Sequence
  Description of Artificial Sequence: Synthetic oligonucleotide
ccgggaucgggaugaggaa

SEQ ID NO: 908637 - RNA, 19 nt, Artificial Sequence
  Description of Artificial Sequence: Synthetic oligonucleotide
ggggugagcccugccacgu

SEQ ID NO: 908638 - RNA, 19 nt, Artificial Sequence
  Description of Artificial Sequence: Synthetic oligonucleotide
cgguuggacccagagcuga

SEQ ID NO: 908639 - RNA, 19 nt, Artificial Sequence
  Description of Artificial Sequence: Synthetic oligonucleotide
ggacgggacuagggccaug

SEQ ID NO: 908640 - RNA, 19 nt, Artificial Sequence
  Description of Artificial Sequence: Synthetic oligonucleotide
ggagccgggagaggacacu

SEQ ID NO: 908641 - RNA, 19 nt, Artificial Sequence
  Description of Artificial Sequence: Synthetic oligonucleotide
cgagucaugcggccaggua

SEQ ID NO: 908642 - RNA, 19 nt, Artificial Sequence
  Description of Artificial Sequence: Synthetic oligonucleotide
ggaccccaucuuggaggca

SEQ ID NO: 908643 - RNA, 19 nt, Artificial Sequence
  Description of Artificial Sequence: Synthetic oligonucleotide
cgcuguuugccuggggacu

SEQ ID NO: 908644 - RNA, 19 nt, Artificial Sequence
  Description of Artificial Sequence: Synthetic oligonucleotide
gggugagcccugccacguu

SEQ ID NO: 908645 - RNA, 19 nt, Artificial Sequence
  Description of Artificial Sequence: Synthetic oligonucleotide
cggacacaauagucauggu

SEQ ID NO: 908646 - RNA, 19 nt, Artificial Sequence
  Description of Artificial Sequence: Synthetic oligonucleotide
ccgagucaugcggccaggu

SEQ ID NO: 908647 - RNA, 19 nt, Artificial Sequence
  Description of Artificial Sequence: Synthetic oligonucleotide
gcgguagauuuaggagauu

SEQ ID NO: 908648 - RNA, 19 nt, Artificial Sequence
  Description of Artificial Sequence: Synthetic oligonucleotide
cgauuccaaucucgcugau

SEQ ID NO: 908649 - RNA, 19 nt, Artificial Sequence
  Description of Artificial Sequence: Synthetic oligonucleotide
ccgccgucuucggucacuu

SEQ ID NO: 908650 - RNA, 19 nt, Artificial Sequence
  Description of Artificial Sequence: Synthetic oligonucleotide
aaguauaggagcuguggcc

SEQ ID NO: 908651 - RNA, 19 nt, Artificial Sequence
  Description of Artificial Sequence: Synthetic oligonucleotide
aucagcaugacauauuggg

SEQ ID NO: 908652 - RNA, 19 nt, Artificial Sequence
  Description of Artificial Sequence: Synthetic oligonucleotide
aauucuaccagggugcuuc

SEQ ID NO: 908653 - RNA, 19 nt, Artificial Sequence
  Description of Artificial Sequence: Synthetic oligonucleotide
uacaacacuaagauugccg

SEQ ID NO: 908654 - RNA, 19 nt, Artificial Sequence
  Description of Artificial Sequence: Synthetic oligonucleotide
aauugugacuuuugguaac

SEQ ID NO: 908655 - RNA, 19 nt, Artificial Sequence
  Description of Artificial Sequence: Synthetic oligonucleotide
uggaauaggauggagaaag

SEQ ID NO: 908656 - RNA, 19 nt, Artificial Sequence
  Description of Artificial Sequence: Synthetic oligonucleotide
aaucucauaaguauaggag

SEQ ID NO: 908657 - RNA, 19 nt, Artificial Sequence
  Description of Artificial Sequence: Synthetic oligonucleotide
aaacuucuaauucuaccag

SEQ ID NO: 908658 - RNA, 19 nt, Artificial Sequence
  Description of Artificial Sequence: Synthetic oligonucleotide
uccccauagacuuugggcg

SEQ ID NO: 908659 - RNA, 19 nt, Artificial Sequence
  Description of Artificial Sequence: Synthetic oligonucleotide
ugacauauugggcagguug

SEQ ID NO: 908660 - RNA, 19 nt, Artificial Sequence
  Description of Artificial Sequence: Synthetic oligonucleotide
auauugggcagguuggagc

SEQ ID NO: 908661 - RNA, 19 nt, Artificial Sequence
  Description of Artificial Sequence: Synthetic oligonucleotide
agcuuuaugaaccucguug

SEQ ID NO: 908662 - RNA, 19 nt, Artificial Sequence
  Description of Artificial Sequence: Synthetic oligonucleotide
agaagacucugagagaucc

SEQ ID NO: 908663 - RNA, 19 nt, Artificial Sequence
  Description of Artificial Sequence: Synthetic oligonucleotide
agaguuuccagcaggagcc

SEQ ID NO: 908664 - RNA, 19 nt, Artificial Sequence
  Description of Artificial Sequence: Synthetic oligonucleotide
ucgaaagccacuaugucca

SEQ ID NO: 908665 - RNA, 19 nt, Artificial Sequence
  Description of Artificial Sequence: Synthetic oligonucleotide
ucagguaugcccaugcccc

SEQ ID NO: 908666 - RNA, 19 nt, Artificial Sequence
  Description of Artificial Sequence: Synthetic oligonucleotide
cagucaauagccuugggag

SEQ ID NO: 908667 - RNA, 19 nt, Artificial Sequence
  Description of Artificial Sequence: Synthetic oligonucleotide
ugaggaacggcgaagacuc

SEQ ID NO: 908668 - RNA, 19 nt, Artificial Sequence
  Description of Artificial Sequence: Synthetic oligonucleotide
uaaguauaggagcuguggc

SEQ ID NO: 908669 - RNA, 19 nt, Artificial Sequence
  Description of Artificial Sequence: Synthetic oligonucleotide
ucaggaauaggaucucacg

SEQ ID NO: 908670 - RNA, 19 nt, Artificial Sequence
  Description of Artificial Sequence: Synthetic oligonucleotide
gaacucuaaaucuuuccag

SEQ ID NO: 908671 - RNA, 19 nt, Artificial Sequence
  Description of Artificial Sequence: Synthetic oligonucleotide
uauccaugggacuucggcg

SEQ ID NO: 908672 - RNA, 19 nt, Artificial Sequence
  Description of Artificial Sequence: Synthetic oligonucleotide
uaugucuagaauccgcucu

SEQ ID NO: 908673 - RNA, 19 nt, Artificial Sequence
  Description of Artificial Sequence: Synthetic oligonucleotide
aauaggaucucacgguaga

SEQ ID NO: 908674 - RNA, 19 nt, Artificial Sequence
  Description of Artificial Sequence: Synthetic oligonucleotide
auaaguauaggagcugugg

SEQ ID NO: 908675 - RNA, 19 nt, Artificial Sequence
  Description of Artificial Sequence: Synthetic oligonucleotide
ucgacaacagaauuuccag

SEQ ID NO: 908676 - RNA, 19 nt, Artificial Sequence
  Description of Artificial Sequence: Synthetic oligonucleotide
uaagacaagaggguacugg

SEQ ID NO: 908677 - RNA, 19 nt, Artificial Sequence
  Description of Artificial Sequence: Synthetic oligonucleotide
cuuggaacgguccucgugg

SEQ ID NO: 908678 - RNA, 19 nt, Artificial Sequence
  Description of Artificial Sequence: Synthetic oligonucleotide
caggaauaggaucucacgg

SEQ ID NO: 908679 - RNA, 19 nt, Artificial Sequence
  Description of Artificial Sequence: Synthetic oligonucleotide
gagaaucucauaaguauag

SEQ ID NO: 908680 - RNA, 19 nt, Artificial Sequence
  Description of Artificial Sequence: Synthetic oligonucleotide
aguuguauugagguuagag

SEQ ID NO: 908681 - RNA, 19 nt, Artificial Sequence
  Description of Artificial Sequence: Synthetic oligonucleotide
agaauuuccagggagggug

SEQ ID NO: 908682 - RNA, 19 nt, Artificial Sequence
  Description of Artificial Sequence: Synthetic oligonucleotide
accagcgaaucacaggcgc

SEQ ID NO: 908683 - RNA, 19 nt, Artificial Sequence
  Description of Artificial Sequence: Synthetic oligonucleotide
acaacacuaagauugccgu

SEQ ID NO: 908684 - RNA, 19 nt, Artificial Sequence
  Description of Artificial Sequence: Synthetic oligonucleotide
uugucgaaagccacuaugu

SEQ ID NO: 908685 - RNA, 19 nt, Artificial Sequence
  Description of Artificial Sequence: Synthetic oligonucleotide
uuccacuuggagccuaugg

SEQ ID NO: 908686 - RNA, 19 nt, Artificial Sequence
  Description of Artificial Sequence: Synthetic oligonucleotide
acggcgaagacucaggcug

SEQ ID NO: 908687 - RNA, 19 nt, Artificial Sequence
  Description of Artificial Sequence: Synthetic oligonucleotide
agagaagcggaacuuaccu

SEQ ID NO: 908688 - RNA, 19 nt, Artificial Sequence
  Description of Artificial Sequence: Synthetic oligonucleotide
ugggucgagaaucaagggc

SEQ ID NO: 908689 - RNA, 19 nt, Artificial Sequence
  Description of Artificial Sequence: Synthetic oligonucleotide
gucgaaagccacuaugucc

SEQ ID NO: 908690 - RNA, 19 nt, Artificial Sequence
  Description of Artificial Sequence: Synthetic oligonucleotide
gaguggacaagaaggaccg

SEQ ID NO: 908691 - RNA, 19 nt, Artificial Sequence
  Description of Artificial Sequence: Synthetic oligonucleotide
agggaauagggagucaagc

SEQ ID NO: 908692 - RNA, 19 nt, Artificial Sequence
  Description of Artificial Sequence: Synthetic oligonucleotide
gagcccaacagcuuuauga

SEQ ID NO: 908693 - RNA, 19 nt, Artificial Sequence
  Description of Artificial Sequence: Synthetic oligonucleotide
agcuacaaacuuaauuccc

SEQ ID NO: 908694 - RNA, 19 nt, Artificial Sequence
  Description of Artificial Sequence: Synthetic oligonucleotide
auccaugggacuucggcgg

SEQ ID NO: 908695 - RNA, 19 nt, Artificial Sequence
  Description of Artificial Sequence: Synthetic oligonucleotide
agggagucaagcuaugucu

SEQ ID NO: 908696 - RNA, 19 nt, Artificial Sequence
  Description of Artificial Sequence: Synthetic oligonucleotide
aguugugccaacuucccca

SEQ ID NO: 908697 - RNA, 19 nt, Artificial Sequence
  Description of Artificial Sequence: Synthetic oligonucleotide
ugagaaucucauaaguaua

SEQ ID NO: 908698 - RNA, 19 nt, Artificial Sequence
  Description of Artificial Sequence: Synthetic oligonucleotide
acuaagauugccgugggcu

SEQ ID NO: 908699 - RNA, 19 nt, Artificial Sequence
  Description of Artificial Sequence: Synthetic oligonucleotide
acugggucgagaaucaagg

SEQ ID NO: 908700 - RNA, 19 nt, Artificial Sequence
  Description of Artificial Sequence: Synthetic oligonucleotide
auggaguugugccaacuuc

SEQ ID NO: 908701 - RNA, 19 nt, Artificial Sequence
  Description of Artificial Sequence: Synthetic oligonucleotide
aggcccuagaguuuccagc

SEQ ID NO: 908702 - RNA, 19 nt, Artificial Sequence
  Description of Artificial Sequence: Synthetic oligonucleotide
cuauccaugggacuucggc

SEQ ID NO: 908703 - RNA, 19 nt, Artificial Sequence
  Description of Artificial Sequence: Synthetic oligonucleotide
uuaagggucccuagcauuc

SEQ ID NO: 908704 - RNA, 19 nt, Artificial Sequence
  Description of Artificial Sequence: Synthetic oligonucleotide
aagcacuccccauagacuu

SEQ ID NO: 908705 - RNA, 19 nt, Artificial Sequence
  Description of Artificial Sequence: Synthetic oligonucleotide
caacagaauuuccagggag

SEQ ID NO: 908706 - RNA, 19 nt, Artificial Sequence
  Description of Artificial Sequence: Synthetic oligonucleotide
uuuaugaaccucguugagu

SEQ ID NO: 908707 - RNA, 19 nt, Artificial Sequence
  Description of Artificial Sequence: Synthetic oligonucleotide
aggaauaggaucucacggu

SEQ ID NO: 908708 - RNA, 19 nt, Artificial Sequence
  Description of Artificial Sequence: Synthetic oligonucleotide
agcucgacaacagaauuuc

SEQ ID NO: 908709 - RNA, 19 nt, Artificial Sequence
  Description of Artificial Sequence: Synthetic oligonucleotide
cuugucgaaagccacuaug

SEQ ID NO: 908710 - RNA, 19 nt, Artificial Sequence
  Description of Artificial Sequence: Synthetic oligonucleotide
aaggaccgggacuacaaga

SEQ ID NO: 908711 - RNA, 19 nt, Artificial Sequence
  Description of Artificial Sequence: Synthetic oligonucleotide
ucccuagcauuccagaggu

SEQ ID NO: 908712 - RNA, 19 nt, Artificial Sequence
  Description of Artificial Sequence: Synthetic oligonucleotide
cauggcguaguacugacuc

SEQ ID NO: 908713 - RNA, 19 nt, Artificial Sequence
  Description of Artificial Sequence: Synthetic oligonucleotide
cacuuauuccuucuagggc

SEQ ID NO: 908714 - RNA, 19 nt, Artificial Sequence
  Description of Artificial Sequence: Synthetic oligonucleotide
gaauugugacuuuugguaa

SEQ ID NO: 908715 - RNA, 19 nt, Artificial Sequence
  Description of Artificial Sequence: Synthetic oligonucleotide
cugacauccacuaguuuug

SEQ ID NO: 908716 - RNA, 19 nt, Artificial Sequence
  Description of Artificial Sequence: Synthetic oligonucleotide
ucauaaguauaggagcugu

SEQ ID NO: 908717 - RNA, 19 nt, Artificial Sequence
  Description of Artificial Sequence: Synthetic oligonucleotide
uucucaacucuccgggaag

SEQ ID NO: 908718 - RNA, 19 nt, Artificial Sequence
  Description of Artificial Sequence: Synthetic oligonucleotide
agcuaugucuagaauccgc

SEQ ID NO: 908719 - RNA, 19 nt, Artificial Sequence
  Description of Artificial Sequence: Synthetic oligonucleotide
agagucaucaggugcccag

SEQ ID NO: 908720 - RNA, 19 nt, Artificial Sequence
  Description of Artificial Sequence: Synthetic oligonucleotide
ugccaagcuaagacaagag

SEQ ID NO: 908721 - RNA, 19 nt, Artificial Sequence
  Description of Artificial Sequence: Synthetic oligonucleotide
ugcgggacacagaggagcg

SEQ ID NO: 908722 - RNA, 19 nt, Artificial Sequence
  Description of Artificial Sequence: Synthetic oligonucleotide
caaguuguauugagguuag

SEQ ID NO: 908723 - RNA, 19 nt, Artificial Sequence
  Description of Artificial Sequence: Synthetic oligonucleotide
cuaguuuugggaccccgcc

SEQ ID NO: 908724 - RNA, 19 nt, Artificial Sequence
  Description of Artificial Sequence: Synthetic oligonucleotide
ucuucccaagggaagcuug

SEQ ID NO: 908725 - RNA, 19 nt, Artificial Sequence
  Description of Artificial Sequence: Synthetic oligonucleotide
cuagaauccgcucuuccuc

SEQ ID NO: 908726 - RNA, 19 nt, Artificial Sequence
  Description of Artificial Sequence: Synthetic oligonucleotide
agguagaguggacaagaag

SEQ ID NO: 908727 - RNA, 19 nt, Artificial Sequence
  Description of Artificial Sequence: Synthetic oligonucleotide
gucccuagcauuccagagg

SEQ ID NO: 908728 - RNA, 19 nt, Artificial Sequence
  Description of Artificial Sequence: Synthetic oligonucleotide
aguauaggagcuguggccu

SEQ ID NO: 908729 - RNA, 19 nt, Artificial Sequence
  Description of Artificial Sequence: Synthetic oligonucleotide
acugacuccaguaaugcca

SEQ ID NO: 908730 - RNA, 19 nt, Artificial Sequence
  Description of Artificial Sequence: Synthetic oligonucleotide
gagccuauggcugaacagc

SEQ ID NO: 908731 - RNA, 19 nt, Artificial Sequence
  Description of Artificial Sequence: Synthetic oligonucleotide
aguuuugggaccccgccca

SEQ ID NO: 908732 - RNA, 19 nt, Artificial Sequence
  Description of Artificial Sequence: Synthetic oligonucleotide
auggcguaguacugacucc

SEQ ID NO: 908733 - RNA, 19 nt, Artificial Sequence
  Description of Artificial Sequence: Synthetic oligonucleotide
uuaugcuccuugagaaucu

SEQ ID NO: 908734 - RNA, 19 nt, Artificial Sequence
  Description of Artificial Sequence: Synthetic oligonucleotide
uugcagagaacaauccuua

SEQ ID NO: 908735 - RNA, 19 nt, Artificial Sequence
  Description of Artificial Sequence: Synthetic oligonucleotide
aauccuuauugcacagguc

SEQ ID NO: 908736 - RNA, 19 nt, Artificial Sequence
  Description of Artificial Sequence: Synthetic oligonucleotide
acgggaaggggugagcagc

SEQ ID NO: 908737 - RNA, 19 nt, Artificial Sequence
  Description of Artificial Sequence: Synthetic oligonucleotide
uaguuuugggaccccgccc

SEQ ID NO: 908738 - RNA, 19 nt, Artificial Sequence
  Description of Artificial Sequence: Synthetic oligonucleotide
ugaggcgcucugaggaacg

SEQ ID NO: 908739 - RNA, 19 nt, Artificial Sequence
  Description of Artificial Sequence: Synthetic oligonucleotide
gaauaggaucucacgguag

SEQ ID NO: 908740 - RNA, 19 nt, Artificial Sequence
  Description of Artificial Sequence: Synthetic oligonucleotide
uuuugguaacagugaauuc

SEQ ID NO: 908741 - RNA, 19 nt, Artificial Sequence
  Description of Artificial Sequence: Synthetic oligonucleotide
cucgacaacagaauuucca

SEQ ID NO: 908742 - RNA, 19 nt, Artificial Sequence
  Description of Artificial Sequence: Synthetic oligonucleotide
acuuaauucccuucucuuu

SEQ ID NO: 908743 - RNA, 19 nt, Artificial Sequence
  Description of Artificial Sequence: Synthetic oligonucleotide
ugucgaaagccacuauguc

SEQ ID NO: 908744 - RNA, 19 nt, Artificial Sequence
  Description of Artificial Sequence: Synthetic oligonucleotide
ucucacgguagauuccucu

SEQ ID NO: 908745 - RNA, 19 nt, Artificial Sequence
  Description of Artificial Sequence: Synthetic oligonucleotide
aaccucguugaguccaaca

SEQ ID NO: 908746 - RNA, 19 nt, Artificial Sequence
  Description of Artificial Sequence: Synthetic oligonucleotide
caucagcaugacauauugg

SEQ ID NO: 908747 - RNA, 19 nt, Artificial Sequence
  Description of Artificial Sequence: Synthetic oligonucleotide
cauaaguauaggagcugug

SEQ ID NO: 908748 - RNA, 19 nt, Artificial Sequence
  Description of Artificial Sequence: Synthetic oligonucleotide
aaggcuauccaugggacuu

SEQ ID NO: 908749 - RNA, 19 nt, Artificial Sequence
  Description of Artificial Sequence: Synthetic oligonucleotide
ucacgguagauuccucucu

SEQ ID NO: 908750 - RNA, 19 nt, Artificial Sequence
  Description of Artificial Sequence: Synthetic oligonucleotide
aacggcgaagacucaggcu

SEQ ID NO: 908751 - RNA, 19 nt, Artificial Sequence
  Description of Artificial Sequence: Synthetic oligonucleotide
cauugucuaccagagacuc

SEQ ID NO: 908752 - RNA, 19 nt, Artificial Sequence
  Description of Artificial Sequence: Synthetic oligonucleotide
gaauuuccagggagggugg

SEQ ID NO: 908753 - RNA, 19 nt, Artificial Sequence
  Description of Artificial Sequence: Synthetic oligonucleotide
cucgcugugggaucuggcc

SEQ ID NO: 908754 - RNA, 19 nt, Artificial Sequence
  Description of Artificial Sequence: Synthetic oligonucleotide
gaacggcgaagacucaggc

SEQ ID NO: 908755 - RNA, 19 nt, Artificial Sequence
  Description of Artificial Sequence: Synthetic oligonucleotide
gaccgggacuacaagaggc

SEQ ID NO: 908756 - RNA, 19 nt, Artificial Sequence
  Description of Artificial Sequence: Synthetic oligonucleotide
cuaagauugccgugggcuc

SEQ ID NO: 908757 - RNA, 19 nt, Artificial Sequence
  Description of Artificial Sequence: Synthetic oligonucleotide
ggaacucuaaaucuuucca

SEQ ID NO: 908758 - RNA, 19 nt, Artificial Sequence
  Description of Artificial Sequence: Synthetic oligonucleotide
uucauaucugaggguaccc

SEQ ID NO: 908759 - RNA, 19 nt, Artificial Sequence
  Description of Artificial Sequence: Synthetic oligonucleotide
uacugacuccaguaaugcc

SEQ ID NO: 908760 - RNA, 19 nt, Artificial Sequence
  Description of Artificial Sequence: Synthetic oligonucleotide
uaugaaccucguugagucc

SEQ ID NO: 908761 - RNA, 19 nt, Artificial Sequence
  Description of Artificial Sequence: Synthetic oligonucleotide
ucuaccagggugcuucaua

SEQ ID NO: 908762 - RNA, 19 nt, Artificial Sequence
  Description of Artificial Sequence: Synthetic oligonucleotide
ccuauggcugaacagcucg

SEQ ID NO: 908763 - RNA, 19 nt, Artificial Sequence
  Description of Artificial Sequence: Synthetic oligonucleotide
guacugacuccaguaaugc

SEQ ID NO: 908764 - RNA, 19 nt, Artificial Sequence
  Description of Artificial Sequence: Synthetic oligonucleotide
agaaggggcaaguuguauu

SEQ ID NO: 908765 - RNA, 19 nt, Artificial Sequence
  Description of Artificial Sequence: Synthetic oligonucleotide
gaaggaccgggacuacaag

SEQ ID NO: 908766 - RNA, 19 nt, Artificial Sequence
  Description of Artificial Sequence: Synthetic oligonucleotide
accucguugaguccaacau

SEQ ID NO: 908767 - RNA, 19 nt, Artificial Sequence
  Description of Artificial Sequence: Synthetic oligonucleotide
agcggaacuuaccucagaa

SEQ ID NO: 908768 - RNA, 19 nt, Artificial Sequence
  Description of Artificial Sequence: Synthetic oligonucleotide
uuggaacgguccucguggg

SEQ ID NO: 908769 - RNA, 19 nt, Artificial Sequence
  Description of Artificial Sequence: Synthetic oligonucleotide
cggaacuuaccucagaagc

SEQ ID NO: 908770 - RNA, 19 nt, Artificial Sequence
  Description of Artificial Sequence: Synthetic oligonucleotide
aagggaauagggagucaag

SEQ ID NO: 908771 - RNA, 19 nt, Artificial Sequence
  Description of Artificial Sequence: Synthetic oligonucleotide
gaggguacccuggagagga

SEQ ID NO: 908772 - RNA, 19 nt, Artificial Sequence
  Description of Artificial Sequence: Synthetic oligonucleotide
uacccaaggcaggagagga

SEQ ID NO: 908773 - RNA, 19 nt, Artificial Sequence
  Description of Artificial Sequence: Synthetic oligonucleotide
cugggucgagaaucaaggg

SEQ ID NO: 908774 - RNA, 19 nt, Artificial Sequence
  Description of Artificial Sequence: Synthetic oligonucleotide
gacugggucgagaaucaag

SEQ ID NO: 908775 - RNA, 19 nt, Artificial Sequence
  Description of Artificial Sequence: Synthetic oligonucleotide
ucauaucugaggguacccu

SEQ ID NO: 908776 - RNA, 19 nt, Artificial Sequence
  Description of Artificial Sequence: Synthetic oligonucleotide
ucuuaugcuccuugagaau

SEQ ID NO: 908777 - RNA, 19 nt, Artificial Sequence
  Description of Artificial Sequence: Synthetic oligonucleotide
acuuaagggucccuagcau

SEQ ID NO: 908778 - RNA, 19 nt, Artificial Sequence
  Description of Artificial Sequence: Synthetic oligonucleotide
gcuuuaugaaccucguuga

SEQ ID NO: 908779 - RNA, 19 nt, Artificial Sequence
  Description of Artificial Sequence: Synthetic oligonucleotide
uggcguaguacugacucca

SEQ ID NO: 908780 - RNA, 19 nt, Artificial Sequence
  Description of Artificial Sequence: Synthetic oligonucleotide
aggaccgggacuacaagag

SEQ ID NO: 908781 - RNA, 19 nt, Artificial Sequence
  Description of Artificial Sequence: Synthetic oligonucleotide
ucucaacucuccgggaagc

SEQ ID NO: 908782 - RNA, 19 nt, Artificial Sequence
  Description of Artificial Sequence: Synthetic oligonucleotide
gaguugugccaacuucccc

SEQ ID NO: 908783 - RNA, 19 nt, Artificial Sequence
  Description of Artificial Sequence: Synthetic oligonucleotide
ugcccaugccccauucuca

SEQ ID NO: 908784 - RNA, 19 nt, Artificial Sequence
  Description of Artificial Sequence: Synthetic oligonucleotide
cuaugucuagaauccgcuc

SEQ ID NO: 908785 - RNA, 19 nt, Artificial Sequence
  Description of Artificial Sequence: Synthetic oligonucleotide
guugaguccaacauggcgu

SEQ ID NO: 908786 - RNA, 19 nt, Artificial Sequence
  Description of Artificial Sequence: Synthetic oligonucleotide
gaacgguccucgugggucc

SEQ ID NO: 908787 - RNA, 19 nt, Artificial Sequence
  Description of Artificial Sequence: Synthetic oligonucleotide
caacacuaagauugccgug

SEQ ID NO: 908788 - RNA, 19 nt, Artificial Sequence
  Description of Artificial Sequence: Synthetic oligonucleotide
acuuaccucagaagcagug

SEQ ID NO: 908789 - RNA, 19 nt, Artificial Sequence
  Description of Artificial Sequence: Synthetic oligonucleotide
ucgagaaucaagggcugga

SEQ ID NO: 908790 - RNA, 19 nt, Artificial Sequence
  Description of Artificial Sequence: Synthetic oligonucleotide
uugaguccaacauggcgua

SEQ ID NO: 908791 - RNA, 19 nt, Artificial Sequence
  Description of Artificial Sequence: Synthetic oligonucleotide
gaagggaauagggagucaa

SEQ ID NO: 908792 - RNA, 19 nt, Artificial Sequence
  Description of Artificial Sequence: Synthetic oligonucleotide
gaccccgcccacuuauucc

SEQ ID NO: 908793 - RNA, 19 nt, Artificial Sequence
  Description of Artificial Sequence: Synthetic oligonucleotide
cauacuacucgcuguggga

SEQ ID NO: 908794 - RNA, 19 nt, Artificial Sequence
  Description of Artificial Sequence: Synthetic oligonucleotide
uugccgugggcuccuuuag

SEQ ID NO: 908795 - RNA, 19 nt, Artificial Sequence
  Description of Artificial Sequence: Synthetic oligonucleotide
uccucgugggucccagugc

SEQ ID NO: 908796 - RNA, 19 nt, Artificial Sequence
  Description of Artificial Sequence: Synthetic oligonucleotide
ggggaaugaaauuccuccc

SEQ ID NO: 908797 - RNA, 19 nt, Artificial Sequence
  Description of Artificial Sequence: Synthetic oligonucleotide
cucacgguagauuccucuc

SEQ ID NO: 908798 - RNA, 19 nt, Artificial Sequence
  Description of Artificial Sequence: Synthetic oligonucleotide
uccagggcguucucggggc

SEQ ID NO: 908799 - RNA, 19 nt, Artificial Sequence
  Description of Artificial Sequence: Synthetic oligonucleotide
cccacuuauuccuucuagg

SEQ ID NO: 908800 - RNA, 19 nt, Artificial Sequence
  Description of Artificial Sequence: Synthetic oligonucleotide
uggccauacuacucgcugu

SEQ ID NO: 908801 - RNA, 19 nt, Artificial Sequence
  Description of Artificial Sequence: Synthetic oligonucleotide
gaauccgcucuuccucacc

SEQ ID NO: 908802 - RNA, 19 nt, Artificial Sequence
  Description of Artificial Sequence: Synthetic oligonucleotide
aagggaagcuuggaacggu

SEQ ID NO: 908803 - RNA, 19 nt, Artificial Sequence
  Description of Artificial Sequence: Synthetic oligonucleotide
uucuugucgaaagccacua

SEQ ID NO: 908804 - RNA, 19 nt, Artificial Sequence
  Description of Artificial Sequence: Synthetic oligonucleotide
ucguugaguccaacauggc

SEQ ID NO: 908805 - RNA, 19 nt, Artificial Sequence
  Description of Artificial Sequence: Synthetic oligonucleotide
uaccucagaagcaguggau

SEQ ID NO: 908806 - RNA, 19 nt, Artificial Sequence
  Description of Artificial Sequence: Synthetic oligonucleotide
gacgggaaggggugagcag

SEQ ID NO: 908807 - RNA, 19 nt, Artificial Sequence
  Description of Artificial Sequence: Synthetic oligonucleotide
uucggcagucaauagccuu

SEQ ID NO: 908808 - RNA, 19 nt, Artificial Sequence
  Description of Artificial Sequence: Synthetic oligonucleotide
uuugggaccccgcccacuu

SEQ ID NO: 908809 - RNA, 19 nt, Artificial Sequence
  Description of Artificial Sequence: Synthetic oligonucleotide
ggaauagggagucaagcua

SEQ ID NO: 908810 - RNA, 19 nt, Artificial Sequence
  Description of Artificial Sequence: Synthetic oligonucleotide
aagcggaacuuaccucaga

SEQ ID NO: 908811 - RNA, 19 nt, Artificial Sequence
  Description of Artificial Sequence: Synthetic oligonucleotide
ggucccuagcauuccagag

SEQ ID NO: 908812 - RNA, 19 nt, Artificial Sequence
  Description of Artificial Sequence: Synthetic oligonucleotide
cagcgaaucacaggcgcgg

SEQ ID NO: 908813 - RNA, 19 nt, Artificial Sequence
  Description of Artificial Sequence: Synthetic oligonucleotide
auacuacucgcugugggau

SEQ ID NO: 908814 - RNA, 19 nt, Artificial Sequence
  Description of Artificial Sequence: Synthetic oligonucleotide
agcgaaucacaggcgcggc

SEQ ID NO: 908815 - RNA, 19 nt, Artificial Sequence
  Description of Artificial Sequence: Synthetic oligonucleotide
ggagucaagcuaugucuag

SEQ ID NO: 908816 - RNA, 19 nt, Artificial Sequence
  Description of Artificial Sequence: Synthetic oligonucleotide
aacaucagcaugacauauu

SEQ ID NO: 908817 - RNA, 19 nt, Artificial Sequence
  Description of Artificial Sequence: Synthetic oligonucleotide
gaauagggagucaagcuau

SEQ ID NO: 908818 - RNA, 19 nt, Artificial Sequence
  Description of Artificial Sequence: Synthetic oligonucleotide
guuggagcuaggggaauug

SEQ ID NO: 908819 - RNA, 19 nt, Artificial Sequence
  Description of Artificial Sequence: Synthetic oligonucleotide
caauccuuauugcacaggu

SEQ ID NO: 908820 - RNA, 19 nt, Artificial Sequence
  Description of Artificial Sequence: Synthetic oligonucleotide
ccauacuacucgcuguggg

SEQ ID NO: 908821 - RNA, 19 nt, Artificial Sequence
  Description of Artificial Sequence: Synthetic oligonucleotide
agcucguuuccaauuccuc

SEQ ID NO: 908822 - RNA, 19 nt, Artificial Sequence
  Description of Artificial Sequence: Synthetic oligonucleotide
cguugaguccaacauggcg

SEQ ID NO: 908823 - RNA, 19 nt, Artificial Sequence
  Description of Artificial Sequence: Synthetic oligonucleotide
acuucggcgggccgcagga

SEQ ID NO: 908824 - RNA, 19 nt, Artificial Sequence
  Description of Artificial Sequence: Synthetic oligonucleotide
auacaccagcgaaucacag

SEQ ID NO: 908825 - RNA, 19 nt, Artificial Sequence
  Description of Artificial Sequence: Synthetic oligonucleotide
gagucaagcuaugucuaga

SEQ ID NO: 908826 - RNA, 19 nt, Artificial Sequence
  Description of Artificial Sequence: Synthetic oligonucleotide
gucgagaaucaagggcugg

SEQ ID NO: 908827 - RNA, 19 nt, Artificial Sequence
  Description of Artificial Sequence: Synthetic oligonucleotide
gacuucggcgggccgcagg

SEQ ID NO: 908828 - RNA, 19 nt, Artificial Sequence
  Description of Artificial Sequence: Synthetic oligonucleotide
cacuaguuuugggaccccg

SEQ ID NO: 908829 - RNA, 19 nt, Artificial Sequence
  Description of Artificial Sequence: Synthetic oligonucleotide
aacuuaccucagaagcagu

SEQ ID NO: 908830 - RNA, 19 nt, Artificial Sequence
  Description of Artificial Sequence: Synthetic oligonucleotide
uacucgcugugggaucugg

SEQ ID NO: 908831 - RNA, 19 nt, Artificial Sequence
  Description of Artificial Sequence: Synthetic oligonucleotide
ugccgugggcuccuuuagc

SEQ ID NO: 908832 - RNA, 19 nt, Artificial Sequence
  Description of Artificial Sequence: Synthetic oligonucleotide
accccgcccacuuauuccu

SEQ ID NO: 908833 - RNA, 19 nt, Artificial Sequence
  Description of Artificial Sequence: Synthetic oligonucleotide
caccagcgaaucacaggcg

SEQ ID NO: 908834 - RNA, 19 nt, Artificial Sequence
  Description of Artificial Sequence: Synthetic oligonucleotide
ggaagcuacaaacuuaauu

SEQ ID NO: 908835 - RNA, 19 nt, Artificial Sequence
  Description of Artificial Sequence: Synthetic oligonucleotide
gcaaguuguauugagguua

SEQ ID NO: 908836 - RNA, 19 nt, Artificial Sequence
  Description of Artificial Sequence: Synthetic oligonucleotide
cuuuucucggggugcccac

SEQ ID NO: 908837 - RNA, 19 nt, Artificial Sequence
  Description of Artificial Sequence: Synthetic oligonucleotide
uacuacucgcugugggauc

SEQ ID NO: 908838 - RNA, 19 nt, Artificial Sequence
  Description of Artificial Sequence: Synthetic oligonucleotide
cucucaaggaagcuacaaa

SEQ ID NO: 908839 - RNA, 19 nt, Artificial Sequence
  Description of Artificial Sequence: Synthetic oligonucleotide
agcuuguuaaaggcagacu

SEQ ID NO: 908840 - RNA, 19 nt, Artificial Sequence
  Description of Artificial Sequence: Synthetic oligonucleotide
ggcgcucugaggaacggcg

SEQ ID NO: 908841 - RNA, 19 nt, Artificial Sequence
  Description of Artificial Sequence: Synthetic oligonucleotide
gaugcgggacacagaggag

SEQ ID NO: 908842 - RNA, 19 nt, Artificial Sequence
  Description of Artificial Sequence: Synthetic oligonucleotide
caugccccauucucaacuc

SEQ ID NO: 908843 - RNA, 19 nt, Artificial Sequence
  Description of Artificial Sequence: Synthetic oligonucleotide
cacuaagauugccgugggc

SEQ ID NO: 908844 - RNA, 19 nt, Artificial Sequence
  Description of Artificial Sequence: Synthetic oligonucleotide
ccaguaaugccaagcuaag

SEQ ID NO: 908845 - RNA, 19 nt, Artificial Sequence
  Description of Artificial Sequence: Synthetic oligonucleotide
acagcuuuaugaaccucgu

SEQ ID NO: 908846 - RNA, 19 nt, Artificial Sequence
  Description of Artificial Sequence: Synthetic oligonucleotide
ggaccgggacuacaagagg

SEQ ID NO: 908847 - RNA, 19 nt, Artificial Sequence
  Description of Artificial Sequence: Synthetic oligonucleotide
caggcaacucaggcaaugc

SEQ ID NO: 908848 - RNA, 19 nt, Artificial Sequence
  Description of Artificial Sequence: Synthetic oligonucleotide
gaucucacgguagauuccu

SEQ ID NO: 908849 - RNA, 19 nt, Artificial Sequence
  Description of Artificial Sequence: Synthetic oligonucleotide
cuaagacaagaggguacug

SEQ ID NO: 908850 - RNA, 19 nt, Artificial Sequence
  Description of Artificial Sequence: Synthetic oligonucleotide
ggcccuagaguuuccagca

SEQ ID NO: 908851 - RNA, 19 nt, Artificial Sequence
  Description of Artificial Sequence: Synthetic oligonucleotide
ggaacggcgaagacucagg

SEQ ID NO: 908852 - RNA, 19 nt, Artificial Sequence
  Description of Artificial Sequence: Synthetic oligonucleotide
gcggaacuuaccucagaag

SEQ ID NO: 908853 - RNA, 19 nt, Artificial Sequence
  Description of Artificial Sequence: Synthetic oligonucleotide
gcccacuuauuccuucuag

SEQ ID NO: 908854 - RNA, 19 nt, Artificial Sequence
  Description of Artificial Sequence: Synthetic oligonucleotide
ugaguccaacauggcguag

SEQ ID NO: 908855 - RNA, 19 nt, Artificial Sequence
  Description of Artificial Sequence: Synthetic oligonucleotide
caacucaggcaaugccaac

SEQ ID NO: 908856 - RNA, 19 nt, Artificial Sequence
  Description of Artificial Sequence: Synthetic oligonucleotide
agccuauggcugaacagcu

SEQ ID NO: 908857 - RNA, 19 nt, Artificial Sequence
  Description of Artificial Sequence: Synthetic oligonucleotide
auucuaccagggugcuuca

SEQ ID NO: 908858 - RNA, 19 nt, Artificial Sequence
  Description of Artificial Sequence: Synthetic oligonucleotide
aggagcgacgggaaggggu

SEQ ID NO: 908859 - RNA, 19 nt, Artificial Sequence
  Description of Artificial Sequence: Synthetic oligonucleotide
uggaacgguccucgugggu

SEQ ID NO: 908860 - RNA, 19 nt, Artificial Sequence
  Description of Artificial Sequence: Synthetic oligonucleotide
caagaggguacugggccug

SEQ ID NO: 908861 - RNA, 19 nt, Artificial Sequence
  Description of Artificial Sequence: Synthetic oligonucleotide
uauggcugaacagcucguu

SEQ ID NO: 908862 - RNA, 19 nt, Artificial Sequence
  Description of Artificial Sequence: Synthetic oligonucleotide
cauucucaacucuccggga

SEQ ID NO: 908863 - RNA, 19 nt, Artificial Sequence
  Description of Artificial Sequence: Synthetic oligonucleotide
aggcgcucugaggaacggc

SEQ ID NO: 908864 - RNA, 19 nt, Artificial Sequence
  Description of Artificial Sequence: Synthetic oligonucleotide
aggcuauccaugggacuuc

SEQ ID NO: 908865 - RNA, 19 nt, Artificial Sequence
  Description of Artificial Sequence: Synthetic oligonucleotide
uuccucuaugaagggaaua

SEQ ID NO: 908866 - RNA, 19 nt, Artificial Sequence
  Description of Artificial Sequence: Synthetic oligonucleotide
auaggaucucacgguagau

SEQ ID NO: 908867 - RNA, 19 nt, Artificial Sequence
  Description of Artificial Sequence: Synthetic oligonucleotide
gggaauagggagucaagcu

SEQ ID NO: 908868 - RNA, 19 nt, Artificial Sequence
  Description of Artificial Sequence: Synthetic oligonucleotide
ggcgacugggucgagaauc

SEQ ID NO: 908869 - RNA, 19 nt, Artificial Sequence
  Description of Artificial Sequence: Synthetic oligonucleotide
guauaggagcuguggccuc

SEQ ID NO: 908870 - RNA, 19 nt, Artificial Sequence
  Description of Artificial Sequence: Synthetic oligonucleotide
augccccauucucaacucu

SEQ ID NO: 908871 - RNA, 19 nt, Artificial Sequence
  Description of Artificial Sequence: Synthetic oligonucleotide
ccagcgaaucacaggcgcg

SEQ ID NO: 908872 - RNA, 19 nt, Artificial Sequence
  Description of Artificial Sequence: Synthetic oligonucleotide
agcagcucgacaacagaau

SEQ ID NO: 908873 - RNA, 19 nt, Artificial Sequence
  Description of Artificial Sequence: Synthetic oligonucleotide
aaguuguauugagguuaga

SEQ ID NO: 908874 - RNA, 19 nt, Artificial Sequence
  Description of Artificial Sequence: Synthetic oligonucleotide
uuuugggaccccgcccacu

SEQ ID NO: 908875 - RNA, 19 nt, Artificial Sequence
  Description of Artificial Sequence: Synthetic oligonucleotide
gcuuggaacgguccucgug

SEQ ID NO: 908876 - RNA, 19 nt, Artificial Sequence
  Description of Artificial Sequence: Synthetic oligonucleotide
gaacagcucguuuccaauu

SEQ ID NO: 908877 - RNA, 19 nt, Artificial Sequence
  Description of Artificial Sequence: Synthetic oligonucleotide
ggaacgguccucguggguc

SEQ ID NO: 908878 - RNA, 19 nt, Artificial Sequence
  Description of Artificial Sequence: Synthetic oligonucleotide
guaugcccaugccccauuc

SEQ ID NO: 908879 - RNA, 19 nt, Artificial Sequence
  Description of Artificial Sequence: Synthetic oligonucleotide
cugaggcgcucugaggaac

SEQ ID NO: 908880 - RNA, 19 nt, Artificial Sequence
  Description of Artificial Sequence: Synthetic oligonucleotide
cuucuugucgaaagccacu

SEQ ID NO: 908881 - RNA, 19 nt, Artificial Sequence
  Description of Artificial Sequence: Synthetic oligonucleotide
ugggcacucagggcugagc

SEQ ID NO: 908882 - RNA, 19 nt, Artificial Sequence
  Description of Artificial Sequence: Synthetic oligonucleotide
gggucgagaaucaagggcu

SEQ ID NO: 908883 - RNA, 19 nt, Artificial Sequence
  Description of Artificial Sequence: Synthetic oligonucleotide
gggaaugaaauuccucccu

SEQ ID NO: 908884 - RNA, 19 nt, Artificial Sequence
  Description of Artificial Sequence: Synthetic oligonucleotide
accgggacuacaagaggca

SEQ ID NO: 908885 - RNA, 19 nt, Artificial Sequence
  Description of Artificial Sequence: Synthetic oligonucleotide
gacugggcacucagggcug

SEQ ID NO: 908886 - RNA, 19 nt, Artificial Sequence
  Description of Artificial Sequence: Synthetic oligonucleotide
agggcguucucggggccac

SEQ ID NO: 908887 - RNA, 19 nt, Artificial Sequence
  Description of Artificial Sequence: Synthetic oligonucleotide
ggagcgacgggaaggggug

SEQ ID NO: 908888 - RNA, 19 nt, Artificial Sequence
  Description of Artificial Sequence: Synthetic oligonucleotide
ggaucucacgguagauucc

SEQ ID NO: 908889 - RNA, 19 nt, Artificial Sequence
  Description of Artificial Sequence: Synthetic oligonucleotide
agggugcuucauaucugag

SEQ ID NO: 908890 - RNA, 19 nt, Artificial Sequence
  Description of Artificial Sequence: Synthetic oligonucleotide
guuuugggaccccgcccac

SEQ ID NO: 908891 - RNA, 19 nt, Artificial Sequence
  Description of Artificial Sequence: Synthetic oligonucleotide
ggacaggcgcagaaggggc

SEQ ID NO: 908892 - RNA, 19 nt, Artificial Sequence
  Description of Artificial Sequence: Synthetic oligonucleotide
ggcuauccaugggacuucg

SEQ ID NO: 908893 - RNA, 19 nt, Artificial Sequence
  Description of Artificial Sequence: Synthetic oligonucleotide
gaguccaacauggcguagu

SEQ ID NO: 908894 - RNA, 19 nt, Artificial Sequence
  Description of Artificial Sequence: Synthetic oligonucleotide
aucucacgguagauuccuc

SEQ ID NO: 908895 - RNA, 19 nt, Artificial Sequence
  Description of Artificial Sequence: Synthetic oligonucleotide
cugcccagagaagcggaac

SEQ ID NO: 908896 - RNA, 19 nt, Artificial Sequence
  Description of Artificial Sequence: Synthetic oligonucleotide
gccgugggcuccuuuagca

SEQ ID NO: 908897 - RNA, 19 nt, Artificial Sequence
  Description of Artificial Sequence: Synthetic oligonucleotide
aggugcuccaaaacauuuu

SEQ ID NO: 908898 - RNA, 19 nt, Artificial Sequence
  Description of Artificial Sequence: Synthetic oligonucleotide
gucaagcuaugucuagaau

SEQ ID NO: 908899 - RNA, 19 nt, Artificial Sequence
  Description of Artificial Sequence: Synthetic oligonucleotide
uaauucuaccagggugcuu

SEQ ID NO: 908900 - RNA, 19 nt, Artificial Sequence
  Description of Artificial Sequence: Synthetic oligonucleotide
gcccaacagcuuuaugaac

SEQ ID NO: 908901 - RNA, 19 nt, Artificial Sequence
  Description of Artificial Sequence: Synthetic oligonucleotide
gccauacuacucgcugugg

SEQ ID NO: 908902 - RNA, 19 nt, Artificial Sequence
  Description of Artificial Sequence: Synthetic oligonucleotide
caugacauauugggcaggu

SEQ ID NO: 908903 - RNA, 19 nt, Artificial Sequence
  Description of Artificial Sequence: Synthetic oligonucleotide
aggcgcggcacagggagca

SEQ ID NO: 908904 - RNA, 19 nt, Artificial Sequence
  Description of Artificial Sequence: Synthetic oligonucleotide
ggucgagaaucaagggcug

SEQ ID NO: 908905 - RNA, 19 nt, Artificial Sequence
  Description of Artificial Sequence: Synthetic oligonucleotide
ggaauaggauggagaaaga

SEQ ID NO: 908906 - RNA, 19 nt, Artificial Sequence
  Description of Artificial Sequence: Synthetic oligonucleotide
gggacacagaggagcgacg

SEQ ID NO: 908907 - RNA, 19 nt, Artificial Sequence
  Description of Artificial Sequence: Synthetic oligonucleotide
aggcaccaauucuucccaa

SEQ ID NO: 908908 - RNA, 19 nt, Artificial Sequence
  Description of Artificial Sequence: Synthetic oligonucleotide
gcuaugucuagaauccgcu

SEQ ID NO: 908909 - RNA, 19 nt, Artificial Sequence
  Description of Artificial Sequence: Synthetic oligonucleotide
gcuucauaucugaggguac

SEQ ID NO: 908910 - RNA, 19 nt, Artificial Sequence
  Description of Artificial Sequence: Synthetic oligonucleotide
gcuaagacaagaggguacu

SEQ ID NO: 908911 - RNA, 19 nt, Artificial Sequence
  Description of Artificial Sequence: Synthetic oligonucleotide
ggccguggacaggagaggc

SEQ ID NO: 908912 - RNA, 19 nt, Artificial Sequence
  Description of Artificial Sequence: Synthetic oligonucleotide
cuggaauaggauggagaaa

SEQ ID NO: 908913 - RNA, 19 nt, Artificial Sequence
  Description of Artificial Sequence: Synthetic oligonucleotide
uguuggaggcgggcaccca

SEQ ID NO: 908914 - RNA, 19 nt, Artificial Sequence
  Description of Artificial Sequence: Synthetic oligonucleotide
gccuccguggacugggcac

SEQ ID NO: 908915 - RNA, 19 nt, Artificial Sequence
  Description of Artificial Sequence: Synthetic oligonucleotide
acauggcguaguacugacu

SEQ ID NO: 908916 - RNA, 19 nt, Artificial Sequence
  Description of Artificial Sequence: Synthetic oligonucleotide
cagguaugcccaugcccca

SEQ ID NO: 908917 - RNA, 19 nt, Artificial Sequence
  Description of Artificial Sequence: Synthetic oligonucleotide
gggucccuagcauuccaga

SEQ ID NO: 908918 - RNA, 19 nt, Artificial Sequence
  Description of Artificial Sequence: Synthetic oligonucleotide
cuaauucuaccagggugcu

SEQ ID NO: 908919 - RNA, 19 nt, Artificial Sequence
  Description of Artificial Sequence: Synthetic oligonucleotide
cuauggcugaacagcucgu

SEQ ID NO: 908920 - RNA, 19 nt, Artificial Sequence
  Description of Artificial Sequence: Synthetic oligonucleotide
gcuaggggaauugugacuu

SEQ ID NO: 908921 - RNA, 19 nt, Artificial Sequence
  Description of Artificial Sequence: Synthetic oligonucleotide
gcccuagaguuuccagcag

SEQ ID NO: 908922 - RNA, 19 nt, Artificial Sequence
  Description of Artificial Sequence: Synthetic oligonucleotide
caggcgcggcacagggagc

SEQ ID NO: 908923 - RNA, 19 nt, Artificial Sequence
  Description of Artificial Sequence: Synthetic oligonucleotide
cagcucguuuccaauuccu

SEQ ID NO: 908924 - RNA, 19 nt, Artificial Sequence
  Description of Artificial Sequence: Synthetic oligonucleotide
ggaccccgcccacuuauuc

SEQ ID NO: 908925 - RNA, 19 nt, Artificial Sequence
  Description of Artificial Sequence: Synthetic oligonucleotide
uucuaccagggugcuucau

SEQ ID NO: 908926 - RNA, 19 nt, Artificial Sequence
  Description of Artificial Sequence: Synthetic oligonucleotide
ggcguaguacugacuccag

SEQ ID NO: 908927 - RNA, 19 nt, Artificial Sequence
  Description of Artificial Sequence: Synthetic oligonucleotide
cagcucgacaacagaauuu

SEQ ID NO: 908928 - RNA, 19 nt, Artificial Sequence
  Description of Artificial Sequence: Synthetic oligonucleotide
cgggaagcacuccccauag

SEQ ID NO: 908929 - RNA, 19 nt, Artificial Sequence
  Description of Artificial Sequence: Synthetic oligonucleotide
augacauauugggcagguu

SEQ ID NO: 908930 - RNA, 19 nt, Artificial Sequence
  Description of Artificial Sequence: Synthetic oligonucleotide
agguaugcccaugccccau

SEQ ID NO: 908931 - RNA, 19 nt, Artificial Sequence
  Description of Artificial Sequence: Synthetic oligonucleotide
ccauagacuuugggcgugg

SEQ ID NO: 908932 - RNA, 19 nt, Artificial Sequence
  Description of Artificial Sequence: Synthetic oligonucleotide
gggagucaagcuaugucua

SEQ ID NO: 908933 - RNA, 19 nt, Artificial Sequence
  Description of Artificial Sequence: Synthetic oligonucleotide
aggaagcuacaaacuuaau

SEQ ID NO: 908934 - RNA, 19 nt, Artificial Sequence
  Description of Artificial Sequence: Synthetic oligonucleotide
gcuauccaugggacuucgg

SEQ ID NO: 908935 - RNA, 19 nt, Artificial Sequence
  Description of Artificial Sequence: Synthetic oligonucleotide
ccucgugggucccagugca

SEQ ID NO: 908936 - RNA, 19 nt, Artificial Sequence
  Description of Artificial Sequence: Synthetic oligonucleotide
gcagcucgacaacagaauu

SEQ ID NO: 908937 - RNA, 19 nt, Artificial Sequence
  Description of Artificial Sequence: Synthetic oligonucleotide
ggcaaguuguauugagguu

SEQ ID NO: 908938 - RNA, 19 nt, Artificial Sequence
  Description of Artificial Sequence: Synthetic oligonucleotide
gcgaaucacaggcgcggca

SEQ ID NO: 908939 - RNA, 19 nt, Artificial Sequence
  Description of Artificial Sequence: Synthetic oligonucleotide
gccacuauguccacauggu

SEQ ID NO: 908940 - RNA, 19 nt, Artificial Sequence
  Description of Artificial Sequence: Synthetic oligonucleotide
ccaugccccauucucaacu

SEQ ID NO: 908941 - RNA, 19 nt, Artificial Sequence
  Description of Artificial Sequence: Synthetic oligonucleotide
cuucggcgggccgcaggag

SEQ ID NO: 908942 - RNA, 19 nt, Artificial Sequence
  Description of Artificial Sequence: Synthetic oligonucleotide
cccauagacuuugggcgug

SEQ ID NO: 908943 - RNA, 19 nt, Artificial Sequence
  Description of Artificial Sequence: Synthetic oligonucleotide
gccgcaggaggaaggucag

SEQ ID NO: 908944 - RNA, 19 nt, Artificial Sequence
  Description of Artificial Sequence: Synthetic oligonucleotide
gcgacugggucgagaauca

SEQ ID NO: 908945 - RNA, 19 nt, Artificial Sequence
  Description of Artificial Sequence: Synthetic oligonucleotide
ccgggacuacaagaggcac

SEQ ID NO: 908946 - RNA, 19 nt, Artificial Sequence
  Description of Artificial Sequence: Synthetic oligonucleotide
gggaagcacuccccauaga

SEQ ID NO: 908947 - RNA, 19 nt, Artificial Sequence
  Description of Artificial Sequence: Synthetic oligonucleotide
gagcgacgggaagggguga

SEQ ID NO: 908948 - RNA, 19 nt, Artificial Sequence
  Description of Artificial Sequence: Synthetic oligonucleotide
gcgggccgcaggaggaagg

SEQ ID NO: 908949 - RNA, 19 nt, Artificial Sequence
  Description of Artificial Sequence: Synthetic oligonucleotide
ccuuuucucggggugccca

SEQ ID NO: 908950 - RNA, 19 nt, Artificial Sequence
  Description of Artificial Sequence: Synthetic oligonucleotide
cggcgaagacucaggcugc

SEQ ID NO: 908951 - RNA, 19 nt, Artificial Sequence
  Description of Artificial Sequence: Synthetic oligonucleotide
cccaugccccauucucaac

SEQ ID NO: 908952 - RNA, 19 nt, Artificial Sequence
  Description of Artificial Sequence: Synthetic oligonucleotide
gcgaagacucaggcugcug

SEQ ID NO: 908953 - RNA, 19 nt, Artificial Sequence
  Description of Artificial Sequence: Synthetic oligonucleotide
cuccguggacugggcacuc

SEQ ID NO: 908954 - RNA, 19 nt, Artificial Sequence
  Description of Artificial Sequence: Synthetic oligonucleotide
gccuauggcugaacagcuc

SEQ ID NO: 908955 - RNA, 19 nt, Artificial Sequence
  Description of Artificial Sequence: Synthetic oligonucleotide
ggcgggccgcaggaggaag

SEQ ID NO: 908956 - RNA, 19 nt, Artificial Sequence
  Description of Artificial Sequence: Synthetic oligonucleotide
cuaggggaauugugacuuu

SEQ ID NO: 908957 - RNA, 19 nt, Artificial Sequence
  Description of Artificial Sequence: Synthetic oligonucleotide
ccaugggacuucggcgggc

SEQ ID NO: 908958 - RNA, 19 nt, Artificial Sequence
  Description of Artificial Sequence: Synthetic oligonucleotide
cagggcguucucggggcca

SEQ ID NO: 908959 - RNA, 19 nt, Artificial Sequence
  Description of Artificial Sequence: Synthetic oligonucleotide
cagcuuuaugaaccucguu

SEQ ID NO: 908960 - RNA, 19 nt, Artificial Sequence
  Description of Artificial Sequence: Synthetic oligonucleotide
ccacuaguuuugggacccc

SEQ ID NO: 908961 - RNA, 19 nt, Artificial Sequence
  Description of Artificial Sequence: Synthetic oligonucleotide
ccgggaagcacuccccaua

SEQ ID NO: 908962 - RNA, 19 nt, Artificial Sequence
  Description of Artificial Sequence: Synthetic oligonucleotide
ccccauagacuuugggcgu

SEQ ID NO: 908963 - RNA, 19 nt, Artificial Sequence
  Description of Artificial Sequence: Synthetic oligonucleotide
ccaaaacauuuucggcagu

SEQ ID NO: 908964 - RNA, 19 nt, Artificial Sequence
  Description of Artificial Sequence: Synthetic oligonucleotide
cccuuuucucggggugccc

SEQ ID NO: 908965 - RNA, 19 nt, Artificial Sequence
  Description of Artificial Sequence: Synthetic oligonucleotide
gguaugcccaugccccauu

SEQ ID NO: 908966 - RNA, 19 nt, Artificial Sequence
  Description of Artificial Sequence: Synthetic oligonucleotide
gguuggagcuaggggaauu

SEQ ID NO: 908967 - RNA, 19 nt, Artificial Sequence
  Description of Artificial Sequence: Synthetic oligonucleotide
cgacgggaaggggugagca

SEQ ID NO: 908968 - RNA, 19 nt, Artificial Sequence
  Description of Artificial Sequence: Synthetic oligonucleotide
cucgugggucccagugcau

SEQ ID NO: 908969 - RNA, 19 nt, Artificial Sequence
  Description of Artificial Sequence: Synthetic oligonucleotide
ggacuucggcgggccgcag

SEQ ID NO: 908970 - RNA, 19 nt, Artificial Sequence
  Description of Artificial Sequence: Synthetic oligonucleotide
ggcgaagacucaggcugcu

SEQ ID NO: 908971 - RNA, 19 nt, Artificial Sequence
  Description of Artificial Sequence: Synthetic oligonucleotide
gcgggacacagaggagcga

SEQ ID NO: 908972 - RNA, 19 nt, Artificial Sequence
  Description of Artificial Sequence: Synthetic oligonucleotide
ccuccguggacugggcacu

SEQ ID NO: 908973 - RNA, 19 nt, Artificial Sequence
  Description of Artificial Sequence: Synthetic oligonucleotide
gggcgacugggucgagaau

SEQ ID NO: 908974 - RNA, 19 nt, Artificial Sequence
  Description of Artificial Sequence: Synthetic oligonucleotide
cgcccacuuauuccuucua

SEQ ID NO: 908975 - RNA, 19 nt, Artificial Sequence
  Description of Artificial Sequence: Synthetic oligonucleotide
gggaccccgcccacuuauu

SEQ ID NO: 908976 - RNA, 19 nt, Artificial Sequence
  Description of Artificial Sequence: Synthetic oligonucleotide
cggggccacagaaggcuau

SEQ ID NO: 908977 - RNA, 19 nt, Artificial Sequence
  Description of Artificial Sequence: Synthetic oligonucleotide
ccccgcccacuuauuccuu

SEQ ID NO: 908978 - RNA, 19 nt, Artificial Sequence
  Description of Artificial Sequence: Synthetic oligonucleotide
cggcgggccgcaggaggaa

SEQ ID NO: 908979 - RNA, 19 nt, Artificial Sequence
  Description of Artificial Sequence: Synthetic oligonucleotide
aauugcuugucucccaagc

SEQ ID NO: 908980 - RNA, 19 nt, Artificial Sequence
  Description of Artificial Sequence: Synthetic oligonucleotide
aacaccacuaugcacauug

SEQ ID NO: 908981 - RNA, 19 nt, Artificial Sequence
  Description of Artificial Sequence: Synthetic oligonucleotide
uguuccaaagaaaucuccg

SEQ ID NO: 908982 - RNA, 19 nt, Artificial Sequence
  Description of Artificial Sequence: Synthetic oligonucleotide
gacaagaacauccaccgag

SEQ ID NO: 908983 - RNA, 19 nt, Artificial Sequence
  Description of Artificial Sequence: Synthetic oligonucleotide
agaacauccaccgaggagg

SEQ ID NO: 908984 - RNA, 19 nt, Artificial Sequence
  Description of Artificial Sequence: Synthetic oligonucleotide
uuccaaagaaaucuccgcg

SEQ ID NO: 908985 - RNA, 19 nt, Artificial Sequence
  Description of Artificial Sequence: Synthetic oligonucleotide
  modified_base (4)..(4): a, c, u, g, unknown or other
uuunuuuucuauacuauuu

SEQ ID NO: 908986 - RNA, 19 nt, Artificial Sequence
  Description of Artificial Sequence: Synthetic oligonucleotide
acugagaagucuuccacgc

SEQ ID NO: 908987 - RNA, 19 nt, Artificial Sequence
  Description of Artificial Sequence: Synthetic oligonucleotide
caaguaguuacacaugucc

SEQ ID NO: 908988 - RNA, 19 nt, Artificial Sequence
  Description of Artificial Sequence: Synthetic oligonucleotide
aacugagaagucuuccacg

SEQ ID NO: 908989 - RNA, 19 nt, Artificial Sequence
  Description of Artificial Sequence: Synthetic oligonucleotide
aaguaguuacacauguccc

SEQ ID NO: 908990 - RNA, 19 nt, Artificial Sequence
  Description of Artificial Sequence: Synthetic oligonucleotide
ugggacaaaggacauggcg

SEQ ID NO: 908991 - RNA, 19 nt, Artificial Sequence
  Description of Artificial Sequence: Synthetic oligonucleotide
ucuugagcuacauuguggc

SEQ ID NO: 908992 - RNA, 19 nt, Artificial Sequence
  Description of Artificial Sequence: Synthetic oligonucleotide
cagaucuuaagguuguucc

SEQ ID NO: 908993 - RNA, 19 nt, Artificial Sequence
  Description of Artificial Sequence: Synthetic oligonucleotide
ugguaggagagcauguagg

SEQ ID NO: 908994 - RNA, 19 nt, Artificial Sequence
  Description of Artificial Sequence: Synthetic oligonucleotide
gcgaagaccacacauaugg

SEQ ID NO: 908995 - RNA, 19 nt, Artificial Sequence
  Description of Artificial Sequence: Synthetic oligonucleotide
uuuggauuguggcaggaga

SEQ ID NO: 908996 - RNA, 19 nt, Artificial Sequence
  Description of Artificial Sequence: Synthetic oligonucleotide
gaauaccuccuccagagug

SEQ ID NO: 908997 - RNA, 19 nt, Artificial Sequence
  Description of Artificial Sequence: Synthetic oligonucleotide
uucccggccaguaagcagg

SEQ ID NO: 908998 - RNA, 19 nt, Artificial Sequence
  Description of Artificial Sequence: Synthetic oligonucleotide
agcaguccgaaacacuccc

SEQ ID NO: 908999 - RNA, 19 nt, Artificial Sequence
  Description of Artificial Sequence: Synthetic oligonucleotide
ugcgacgugagcaccacgg

SEQ ID NO: 909000 - RNA, 19 nt, Artificial Sequence
  Description of Artificial Sequence: Synthetic oligonucleotide
guuggcucgguucacaaag

SEQ ID NO: 909001 - RNA, 19 nt, Artificial Sequence
  Description of Artificial Sequence: Synthetic oligonucleotide
gaucuuaagguuguuccgg

SEQ ID NO: 909002 - RNA, 19 nt, Artificial Sequence
  Description of Artificial Sequence: Synthetic oligonucleotide
agaucuuaagguuguuccg

SEQ ID NO: 909003 - RNA, 19 nt, Artificial Sequence
  Description of Artificial Sequence: Synthetic oligonucleotide
  modified_base (5)..(5): a, c, u, g, unknown or other
uuuunuuuucuauacuauu

SEQ ID NO: 909004 - RNA, 19 nt, Artificial Sequence
  Description of Artificial Sequence: Synthetic oligonucleotide
auagacgauccacagccgg

SEQ ID NO: 909005 - RNA, 19 nt, Artificial Sequence
  Description of Artificial Sequence: Synthetic oligonucleotide
gcauagacgauccacagcc

SEQ ID NO: 909006 - RNA, 19 nt, Artificial Sequence
  Description of Artificial Sequence: Synthetic oligonucleotide
ucagacuggggacaguagc

SEQ ID NO: 909007 - RNA, 19 nt, Artificial Sequence
  Description of Artificial Sequence: Synthetic oligonucleotide
gacacguuccucaaugagg

SEQ ID NO: 909008 - RNA, 19 nt, Artificial Sequence
  Description of Artificial Sequence: Synthetic oligonucleotide
ugacgaaggcuauugucgg

SEQ ID NO: 909009 - RNA, 19 nt, Artificial Sequence
  Description of Artificial Sequence: Synthetic oligonucleotide
aaagaaaucuccgcgcgcu

SEQ ID NO: 909010 - RNA, 19 nt, Artificial Sequence
  Description of Artificial Sequence: Synthetic oligonucleotide
agaagaaauugccaagcca

SEQ ID NO: 909011 - RNA, 19 nt, Artificial Sequence
  Description of Artificial Sequence: Synthetic oligonucleotide
aauaccuccuccagagugg

SEQ ID NO: 909012 - RNA, 19 nt, Artificial Sequence
  Description of Artificial Sequence: Synthetic oligonucleotide
acugccaugcaucucccgg

SEQ ID NO: 909013 - RNA, 19 nt, Artificial Sequence
  Description of Artificial Sequence: Synthetic oligonucleotide
  modified_base (2)..(2): a, c, u, g, unknown or other
unuuuucuauacuauuuua

SEQ ID NO: 909014 - RNA, 19 nt, Artificial Sequence
  Description of Artificial Sequence: Synthetic oligonucleotide
ugugugaccaguuccgaac

SEQ ID NO: 909015 - RNA, 19 nt, Artificial Sequence
  Description of Artificial Sequence: Synthetic oligonucleotide
uguagguacccgcgggucg

SEQ ID NO: 909016 - RNA, 19 nt, Artificial Sequence
  Description of Artificial Sequence: Synthetic oligonucleotide
ucgguuuggauuguggcag

SEQ ID NO: 909017 - RNA, 19 nt, Artificial Sequence
  Description of Artificial Sequence: Synthetic oligonucleotide
ugucgguucaggcuguucu

SEQ ID NO: 909018 - RNA, 19 nt, Artificial Sequence
  Description of Artificial Sequence: Synthetic oligonucleotide
ugacacguuccucaaugag

SEQ ID NO: 909019 - RNA, 19 nt, Artificial Sequence
  Description of Artificial Sequence: Synthetic oligonucleotide
gucaguguguggcucaagg

SEQ ID NO: 909020 - RNA, 19 nt, Artificial Sequence
  Description of Artificial Sequence: Synthetic oligonucleotide
gcuagaaaggcccaggcgc

SEQ ID NO: 909021 - RNA, 19 nt, Artificial Sequence
  Description of Artificial Sequence: Synthetic oligonucleotide
cuuggauccaugccugugg

SEQ ID NO: 909022 - RNA, 19 nt, Artificial Sequence
  Description of Artificial Sequence: Synthetic oligonucleotide
gaacaagggucccuggacc

SEQ ID NO: 909023 - RNA, 19 nt, Artificial Sequence
  Description of Artificial Sequence: Synthetic oligonucleotide
agaagguucuugccgauga

SEQ ID NO: 909024 - RNA, 19 nt, Artificial Sequence
  Description of Artificial Sequence: Synthetic oligonucleotide
gaaaucuccgcgcgcuugg

SEQ ID NO: 909025 - RNA, 19 nt, Artificial Sequence
  Description of Artificial Sequence: Synthetic oligonucleotide
uccgcuguagguacccgcg

SEQ ID NO: 909026 - RNA, 19 nt, Artificial Sequence
  Description of Artificial Sequence: Synthetic oligonucleotide
acgcccagcaguccgaaac

SEQ ID NO: 909027 - RNA, 19 nt, Artificial Sequence
  Description of Artificial Sequence: Synthetic oligonucleotide
gaacacucgugccagggug

SEQ ID NO: 909028 - RNA, 19 nt, Artificial Sequence
  Description of Artificial Sequence: Synthetic oligonucleotide
aacaagggucccuggacca

SEQ ID NO: 909029 - RNA, 19 nt, Artificial Sequence
  Description of Artificial Sequence: Synthetic oligonucleotide
uguuccgggcaucaaggcc

SEQ ID NO: 909030 - RNA, 19 nt, Artificial Sequence
  Description of Artificial Sequence: Synthetic oligonucleotide
uucgguuuggauuguggca

SEQ ID NO: 909031 - RNA, 19 nt, Artificial Sequence
  Description of Artificial Sequence: Synthetic oligonucleotide
ggcuuuaccacucaggcca

SEQ ID NO: 909032 - RNA, 19 nt, Artificial Sequence
  Description of Artificial Sequence: Synthetic oligonucleotide
cagagcacggucuccauag

SEQ ID NO: 909033 - RNA, 19 nt, Artificial Sequence
  Description of Artificial Sequence: Synthetic oligonucleotide
guuccgggcaucaaggccg

SEQ ID NO: 909034 - RNA, 19 nt, Artificial Sequence
  Description of Artificial Sequence: Synthetic oligonucleotide
agcuagaaaggcccaggcg

SEQ ID NO: 909035 - RNA, 19 nt, Artificial Sequence
  Description of Artificial Sequence: Synthetic oligonucleotide
uccauuguuggcucgguuc

SEQ ID NO: 909036 - RNA, 19 nt, Artificial Sequence
  Description of Artificial Sequence: Synthetic oligonucleotide
uaugcacauugccaccaag

SEQ ID NO: 909037 - RNA, 19 nt, Artificial Sequence
  Description of Artificial Sequence: Synthetic oligonucleotide
ugugccaguugguaggaga

SEQ ID NO: 909038 - RNA, 19 nt, Artificial Sequence
  Description of Artificial Sequence: Synthetic oligonucleotide
uccgaaccugccuuugagg

SEQ ID NO: 909039 - RNA, 19 nt, Artificial Sequence
  Description of Artificial Sequence: Synthetic oligonucleotide
agcuggagguguuuggcuc

SEQ ID NO: 909040 - RNA, 19 nt, Artificial Sequence
  Description of Artificial Sequence: Synthetic oligonucleotide
ucgcauuccuccaugcugu

SEQ ID NO: 909041 - RNA, 19 nt, Artificial Sequence
  Description of Artificial Sequence: Synthetic oligonucleotide
agcacggucuccauagagc

SEQ ID NO: 909042 - RNA, 19 nt, Artificial Sequence
  Description of Artificial Sequence: Synthetic oligonucleotide
uuccgaaccugccuuugag

SEQ ID NO: 909043 - RNA, 19 nt, Artificial Sequence
  Description of Artificial Sequence: Synthetic oligonucleotide
cagcccuuguuguugaacc

SEQ ID NO: 909044 - RNA, 19 nt, Artificial Sequence
  Description of Artificial Sequence: Synthetic oligonucleotide
gcaguuucgguuuggauug

SEQ ID NO: 909045 - RNA, 19 nt, Artificial Sequence
  Description of Artificial Sequence: Synthetic oligonucleotide
uccaggaaucggcugacac

SEQ ID NO: 909046 - RNA, 19 nt, Artificial Sequence
  Description of Artificial Sequence: Synthetic oligonucleotide
gaugguugaauguagugau

SEQ ID NO: 909047 - RNA, 19 nt, Artificial Sequence
  Description of Artificial Sequence: Synthetic oligonucleotide
aggaugguugaauguagug

SEQ ID NO: 909048 - RNA, 19 nt, Artificial Sequence
  Description of Artificial Sequence: Synthetic oligonucleotide
caguguguggcucaaggac

SEQ ID NO: 909049 - RNA, 19 nt, Artificial Sequence
  Description of Artificial Sequence: Synthetic oligonucleotide
ggaugugccaguugguagg

SEQ ID NO: 909050 - RNA, 19 nt, Artificial Sequence
  Description of Artificial Sequence: Synthetic oligonucleotide
gagcgcuucgcauuccucc

SEQ ID NO: 909051 - RNA, 19 nt, Artificial Sequence
  Description of Artificial Sequence: Synthetic oligonucleotide
ucggcauagcuagaaaggc

SEQ ID NO: 909052 - RNA, 19 nt, Artificial Sequence
  Description of Artificial Sequence: Synthetic oligonucleotide
cagacuggggacaguagcc

SEQ ID NO: 909053 - RNA, 19 nt, Artificial Sequence
  Description of Artificial Sequence: Synthetic oligonucleotide
cuacauuguggccugccag

SEQ ID NO: 909054 - RNA, 19 nt, Artificial Sequence
  Description of Artificial Sequence: Synthetic oligonucleotide
uuggcucgguucacaaagg

SEQ ID NO: 909055 - RNA, 19 nt, Artificial Sequence
  Description of Artificial Sequence: Synthetic oligonucleotide
cuucccugccccauugacg

SEQ ID NO: 909056 - RNA, 19 nt, Artificial Sequence
  Description of Artificial Sequence: Synthetic oligonucleotide
ugcacauugccaccaagua

SEQ ID NO: 909057 - RNA, 19 nt, Artificial Sequence
  Description of Artificial Sequence: Synthetic oligonucleotide
gacgugagcaccacggagc

SEQ ID NO: 909058 - RNA, 19 nt, Artificial Sequence
  Description of Artificial Sequence: Synthetic oligonucleotide
agacuggggacaguagccc

SEQ ID NO: 909059 - RNA, 19 nt, Artificial Sequence
  Description of Artificial Sequence: Synthetic oligonucleotide
ccaguauaggguuuggggc

SEQ ID NO: 909060 - RNA, 19 nt, Artificial Sequence
  Description of Artificial Sequence: Synthetic oligonucleotide
aucuccgcgcgcuuggauc

SEQ ID NO: 909061 - RNA, 19 nt, Artificial Sequence
  Description of Artificial Sequence: Synthetic oligonucleotide
cuuggaacacucgugccag

SEQ ID NO: 909062 - RNA, 19 nt, Artificial Sequence
  Description of Artificial Sequence: Synthetic oligonucleotide
agacgauccacagccgggc

SEQ ID NO: 909063 - RNA, 19 nt, Artificial Sequence
  Description of Artificial Sequence: Synthetic oligonucleotide
acaaaggacauggcgaaga

SEQ ID NO: 909064 - RNA, 19 nt, Artificial Sequence
  Description of Artificial Sequence: Synthetic oligonucleotide
ugacgucccagcgaagggg

SEQ ID NO: 909065 - RNA, 19 nt, Artificial Sequence
  Description of Artificial Sequence: Synthetic oligonucleotide
aggcauagacgauccacag

SEQ ID NO: 909066 - RNA, 19 nt, Artificial Sequence
  Description of Artificial Sequence: Synthetic oligonucleotide
auauggagacaagaacauc

SEQ ID NO: 909067 - RNA, 19 nt, Artificial Sequence
  Description of Artificial Sequence: Synthetic oligonucleotide
augagugugaugaggagga

SEQ ID NO: 909068 - RNA, 19 nt, Artificial Sequence
  Description of Artificial Sequence: Synthetic oligonucleotide
cuaacugagaagucuucca

SEQ ID NO: 909069 - RNA, 19 nt, Artificial Sequence
  Description of Artificial Sequence: Synthetic oligonucleotide
ggucggcauagcuagaaag

SEQ ID NO: 909070 - RNA, 19 nt, Artificial Sequence
  Description of Artificial Sequence: Synthetic oligonucleotide
accacuaugcacauugcca

SEQ ID NO: 909071 - RNA, 19 nt, Artificial Sequence
  Description of Artificial Sequence: Synthetic oligonucleotide
uacacaugucccagaagaa

SEQ ID NO: 909072 - RNA, 19 nt, Artificial Sequence
  Description of Artificial Sequence: Synthetic oligonucleotide
caaagaaaucuccgcgcgc

SEQ ID NO: 909073 - RNA, 19 nt, Artificial Sequence
  Description of Artificial Sequence: Synthetic oligonucleotide
gaauugcuugucucccaag

SEQ ID NO: 909074 - RNA, 19 nt, Artificial Sequence
  Description of Artificial Sequence: Synthetic oligonucleotide
guuucgguuuggauugugg

SEQ ID NO: 909075 - RNA, 19 nt, Artificial Sequence
  Description of Artificial Sequence: Synthetic oligonucleotide
ugccgaugacgucccagcg

SEQ ID NO: 909076 - RNA, 19 nt, Artificial Sequence
  Description of Artificial Sequence: Synthetic oligonucleotide
ggcauagcuagaaaggccc

SEQ ID NO: 909077 - RNA, 19 nt, Artificial Sequence
  Description of Artificial Sequence: Synthetic oligonucleotide
acacguuccucaaugagga

SEQ ID NO: 909078 - RNA, 19 nt, Artificial Sequence
  Description of Artificial Sequence: Synthetic oligonucleotide
uugccgaugacgucccagc

SEQ ID NO: 909079 - RNA, 19 nt, Artificial Sequence
  Description of Artificial Sequence: Synthetic oligonucleotide
accacggaaagcaagcugu

SEQ ID NO: 909080 - RNA, 19 nt, Artificial Sequence
  Description of Artificial Sequence: Synthetic oligonucleotide
cuugagcuacauuguggcc

SEQ ID NO: 909081 - RNA, 19 nt, Artificial Sequence
  Description of Artificial Sequence: Synthetic oligonucleotide
ggucggucggcauagcuag

SEQ ID NO: 909082 - RNA, 19 nt, Artificial Sequence
  Description of Artificial Sequence: Synthetic oligonucleotide
cacgguacaccuuggucag

SEQ ID NO: 909083 - RNA, 19 nt, Artificial Sequence
  Description of Artificial Sequence: Synthetic oligonucleotide
gguuguucaggauacgguc

SEQ ID NO: 909084 - RNA, 19 nt, Artificial Sequence
  Description of Artificial Sequence: Synthetic oligonucleotide
cauagacgauccacagccg

SEQ ID NO: 909085 - RNA, 19 nt, Artificial Sequence
  Description of Artificial Sequence: Synthetic oligonucleotide
aaucgcaggcgacugccau

SEQ ID NO: 909086 - RNA, 19 nt, Artificial Sequence
  Description of Artificial Sequence: Synthetic oligonucleotide
cgcccguucaccaugaugg

SEQ ID NO: 909087 - RNA, 19 nt, Artificial Sequence
  Description of Artificial Sequence: Synthetic oligonucleotide
uuuauuucucugggaguca

SEQ ID NO: 909088 - RNA, 19 nt, Artificial Sequence
  Description of Artificial Sequence: Synthetic oligonucleotide
cucaaggacccucugccug

SEQ ID NO: 909089 - RNA, 19 nt, Artificial Sequence
  Description of Artificial Sequence: Synthetic oligonucleotide
gacacguuuggggugcugc

SEQ ID NO: 909090 - RNA, 19 nt, Artificial Sequence
  Description of Artificial Sequence: Synthetic oligonucleotide
caccacuaugcacauugcc

SEQ ID NO: 909091 - RNA, 19 nt, Artificial Sequence
  Description of Artificial Sequence: Synthetic oligonucleotide
ccaaagaaaucuccgcgcg

SEQ ID NO: 909092 - RNA, 19 nt, Artificial Sequence
  Description of Artificial Sequence: Synthetic oligonucleotide
ugccaugcaucucccggag

SEQ ID NO: 909093 - RNA, 19 nt, Artificial Sequence
  Description of Artificial Sequence: Synthetic oligonucleotide
gagagcgcugucugggcag

SEQ ID NO: 909094 - RNA, 19 nt, Artificial Sequence
  Description of Artificial Sequence: Synthetic oligonucleotide
aguccgaaacacuccccag

SEQ ID NO: 909095 - RNA, 19 nt, Artificial Sequence
  Description of Artificial Sequence: Synthetic oligonucleotide
gucgaagauggcaucagac

SEQ ID NO: 909096 - RNA, 19 nt, Artificial Sequence
  Description of Artificial Sequence: Synthetic oligonucleotide
gcucuuggaacacucgugc

SEQ ID NO: 909097 - RNA, 19 nt, Artificial Sequence
  Description of Artificial Sequence: Synthetic oligonucleotide
aaggaugguugaauguagu

SEQ ID NO: 909098 - RNA, 19 nt, Artificial Sequence
  Description of Artificial Sequence: Synthetic oligonucleotide
gguuguuccgggcaucaag

SEQ ID NO: 909099 - RNA, 19 nt, Artificial Sequence
  Description of Artificial Sequence: Synthetic oligonucleotide
gguguucccggccaguaag

SEQ ID NO: 909100 - RNA, 19 nt, Artificial Sequence
  Description of Artificial Sequence: Synthetic oligonucleotide
uucuugccgaugacguccc

SEQ ID NO: 909101 - RNA, 19 nt, Artificial Sequence
  Description of Artificial Sequence: Synthetic oligonucleotide
gacauggcgaagaccacac

SEQ ID NO: 909102 - RNA, 19 nt, Artificial Sequence
  Description of Artificial Sequence: Synthetic oligonucleotide
aguauaggguuuggggcag

SEQ ID NO: 909103 - RNA, 19 nt, Artificial Sequence
  Description of Artificial Sequence: Synthetic oligonucleotide
ugcgcagccagcucuugga

SEQ ID NO: 909104 - RNA, 19 nt, Artificial Sequence
  Description of Artificial Sequence: Synthetic oligonucleotide
acuaugcacauugccacca

SEQ ID NO: 909105 - RNA, 19 nt, Artificial Sequence
  Description of Artificial Sequence: Synthetic oligonucleotide
uauugucgguucaggcugu

SEQ ID NO: 909106 - RNA, 19 nt, Artificial Sequence
  Description of Artificial Sequence: Synthetic oligonucleotide
caggcgacugccaugcauc

SEQ ID NO: 909107 - RNA, 19 nt, Artificial Sequence
  Description of Artificial Sequence: Synthetic oligonucleotide
agcacccgggaauguggcc

SEQ ID NO: 909108 - RNA, 19 nt, Artificial Sequence
  Description of Artificial Sequence: Synthetic oligonucleotide
caccaaguaguuacacaug

SEQ ID NO: 909109 - RNA, 19 nt, Artificial Sequence
  Description of Artificial Sequence: Synthetic oligonucleotide
gcgacugccaugcaucucc

SEQ ID NO: 909110 - RNA, 19 nt, Artificial Sequence
  Description of Artificial Sequence: Synthetic oligonucleotide
cauagcuagaaaggcccag

SEQ ID NO: 909111 - RNA, 19 nt, Artificial Sequence
  Description of Artificial Sequence: Synthetic oligonucleotide
gguaggagagcauguagga

SEQ ID NO: 909112 - RNA, 19 nt, Artificial Sequence
  Description of Artificial Sequence: Synthetic oligonucleotide
ggucccuggaccaccaugg

SEQ ID NO: 909113 - RNA, 19 nt, Artificial Sequence
  Description of Artificial Sequence: Synthetic oligonucleotide
ccacuaugcacauugccac

SEQ ID NO: 909114 - RNA, 19 nt, Artificial Sequence
  Description of Artificial Sequence: Synthetic oligonucleotide
accgaggaggccaucagug

SEQ ID NO: 909115 - RNA, 19 nt, Artificial Sequence
  Description of Artificial Sequence: Synthetic oligonucleotide
uggaaucgcaggcgacugc

SEQ ID NO: 909116 - RNA, 19 nt, Artificial Sequence
  Description of Artificial Sequence: Synthetic oligonucleotide
cugagaagucuuccacgcc

SEQ ID NO: 909117 - RNA, 19 nt, Artificial Sequence
  Description of Artificial Sequence: Synthetic oligonucleotide
gggaccaugagggucagug

SEQ ID NO: 909118 - RNA, 19 nt, Artificial Sequence
  Description of Artificial Sequence: Synthetic oligonucleotide
caggcauagacgauccaca

SEQ ID NO: 909119 - RNA, 19 nt, Artificial Sequence
  Description of Artificial Sequence: Synthetic oligonucleotide
gaaccgcccguucaccaug

SEQ ID NO: 909120 - RNA, 19 nt, Artificial Sequence
  Description of Artificial Sequence: Synthetic oligonucleotide
gggaugugccaguugguag

SEQ ID NO: 909121 - RNA, 19 nt, Artificial Sequence
  Description of Artificial Sequence: Synthetic oligonucleotide
gaaggcuauugucgguuca

SEQ ID NO: 909122 - RNA, 19 nt, Artificial Sequence
  Description of Artificial Sequence: Synthetic oligonucleotide
uugccuccgcuguagguac

SEQ ID NO: 909123 - RNA, 19 nt, Artificial Sequence
  Description of Artificial Sequence: Synthetic oligonucleotide
accacacauauggagacaa

SEQ ID NO: 909124 - RNA, 19 nt, Artificial Sequence
  Description of Artificial Sequence: Synthetic oligonucleotide
uuugaggugcugagggcuu

SEQ ID NO: 909125 - RNA, 19 nt, Artificial Sequence
  Description of Artificial Sequence: Synthetic oligonucleotide
gaagguucuugccgaugac

SEQ ID NO: 909126 - RNA, 19 nt, Artificial Sequence
  Description of Artificial Sequence: Synthetic oligonucleotide
aagccaguauaggguuugg

SEQ ID NO: 909127 - RNA, 19 nt, Artificial Sequence
  Description of Artificial Sequence: Synthetic oligonucleotide
guagguacccgcgggucgg

SEQ ID NO: 909128 - RNA, 19 nt, Artificial Sequence
  Description of Artificial Sequence: Synthetic oligonucleotide
ggaugguugaauguaguga

SEQ ID NO: 909129 - RNA, 19 nt, Artificial Sequence
  Description of Artificial Sequence: Synthetic oligonucleotide
caagccaguauaggguuug

SEQ ID NO: 909130 - RNA, 19 nt, Artificial Sequence
  Description of Artificial Sequence: Synthetic oligonucleotide
guucccggccaguaagcag

SEQ ID NO: 909131 - RNA, 19 nt, Artificial Sequence
  Description of Artificial Sequence: Synthetic oligonucleotide
gaacauccaccgaggaggc

SEQ ID NO: 909132 - RNA, 19 nt, Artificial Sequence
  Description of Artificial Sequence: Synthetic oligonucleotide
cagcaguccgaaacacucc

SEQ ID NO: 909133 - RNA, 19 nt, Artificial Sequence
  Description of Artificial Sequence: Synthetic oligonucleotide
ccaggaaucggcugacacg

SEQ ID NO: 909134 - RNA, 19 nt, Artificial Sequence
  Description of Artificial Sequence: Synthetic oligonucleotide
caguugguaggagagcaug

SEQ ID NO: 909135 - RNA, 19 nt, Artificial Sequence
  Description of Artificial Sequence: Synthetic oligonucleotide
ggcuauugucgguucaggc

SEQ ID NO: 909136 - RNA, 19 nt, Artificial Sequence
  Description of Artificial Sequence: Synthetic oligonucleotide
guuuggauuguggcaggag

SEQ ID NO: 909137 - RNA, 19 nt, Artificial Sequence
  Description of Artificial Sequence: Synthetic oligonucleotide
gauccuugccuugcgcagc

SEQ ID NO: 909138 - RNA, 19 nt, Artificial Sequence
  Description of Artificial Sequence: Synthetic oligonucleotide
agaaauugccaagccagua

SEQ ID NO: 909139 - RNA, 19 nt, Artificial Sequence
  Description of Artificial Sequence: Synthetic oligonucleotide
ucuuccacgccgugauccu

SEQ ID NO: 909140 - RNA, 19 nt, Artificial Sequence
  Description of Artificial Sequence: Synthetic oligonucleotide
agacaagaacauccaccga

SEQ ID NO: 909141 - RNA, 19 nt, Artificial Sequence
  Description of Artificial Sequence: Synthetic oligonucleotide
gcuaacugagaagucuucc

SEQ ID NO: 909142 - RNA, 19 nt, Artificial Sequence
  Description of Artificial Sequence: Synthetic oligonucleotide
cucgguucacaaaggccac

SEQ ID NO: 909143 - RNA, 19 nt, Artificial Sequence
  Description of Artificial Sequence: Synthetic oligonucleotide
ucagagcacggucuccaua

SEQ ID NO: 909144 - RNA, 19 nt, Artificial Sequence
  Description of Artificial Sequence: Synthetic oligonucleotide
aaucuccgcgcgcuuggau

SEQ ID NO: 909145 - RNA, 19 nt, Artificial Sequence
  Description of Artificial Sequence: Synthetic oligonucleotide
agcgcuucgcauuccucca

SEQ ID NO: 909146 - RNA, 19 nt, Artificial Sequence
  Description of Artificial Sequence: Synthetic oligonucleotide
ucucccaggggugguagca

SEQ ID NO: 909147 - RNA, 19 nt, Artificial Sequence
  Description of Artificial Sequence: Synthetic oligonucleotide
aggcuauugucgguucagg

SEQ ID NO: 909148 - RNA, 19 nt, Artificial Sequence
  Description of Artificial Sequence: Synthetic oligonucleotide
agguuguucaggauacggu

SEQ ID NO: 909149 - RNA, 19 nt, Artificial Sequence
  Description of Artificial Sequence: Synthetic oligonucleotide
gucgguucaggcuguucug

SEQ ID NO: 909150 - RNA, 19 nt, Artificial Sequence
  Description of Artificial Sequence: Synthetic oligonucleotide
uugacgcccagcaguccga

SEQ ID NO: 909151 - RNA, 19 nt, Artificial Sequence
  Description of Artificial Sequence: Synthetic oligonucleotide
cuugccgaugacgucccag

SEQ ID NO: 909152 - RNA, 19 nt, Artificial Sequence
  Description of Artificial Sequence: Synthetic oligonucleotide
cuccgcuguagguacccgc

SEQ ID NO: 909153 - RNA, 19 nt, Artificial Sequence
  Description of Artificial Sequence: Synthetic oligonucleotide
cagacaccugaaccgcccg

SEQ ID NO: 909154 - RNA, 19 nt, Artificial Sequence
  Description of Artificial Sequence: Synthetic oligonucleotide
agaagucuuccacgccgug

SEQ ID NO: 909155 - RNA, 19 nt, Artificial Sequence
  Description of Artificial Sequence: Synthetic oligonucleotide
uguucccggccaguaagca

SEQ ID NO: 909156 - RNA, 19 nt, Artificial Sequence
  Description of Artificial Sequence: Synthetic oligonucleotide
ccaguaagcaggucgaaga

SEQ ID NO: 909157 - RNA, 19 nt, Artificial Sequence
  Description of Artificial Sequence: Synthetic oligonucleotide
auuguuggcucgguucaca

SEQ ID NO: 909158 - RNA, 19 nt, Artificial Sequence
  Description of Artificial Sequence: Synthetic oligonucleotide
agagcgcugucugggcagc

SEQ ID NO: 909159 - RNA, 19 nt, Artificial Sequence
  Description of Artificial Sequence: Synthetic oligonucleotide
acacguuuggggugcugca

SEQ ID NO: 909160 - RNA, 19 nt, Artificial Sequence
  Description of Artificial Sequence: Synthetic oligonucleotide
ggcauagacgauccacagc

SEQ ID NO: 909161 - RNA, 19 nt, Artificial Sequence
  Description of Artificial Sequence: Synthetic oligonucleotide
uguuggcucgguucacaaa

SEQ ID NO: 909162 - RNA, 19 nt, Artificial Sequence
  Description of Artificial Sequence: Synthetic oligonucleotide
aucgcaggcgacugccaug

SEQ ID NO: 909163 - RNA, 19 nt, Artificial Sequence
  Description of Artificial Sequence: Synthetic oligonucleotide
guacccgcgggucggucgg

SEQ ID NO: 909164 - RNA, 19 nt, Artificial Sequence
  Description of Artificial Sequence: Synthetic oligonucleotide
ugggaugugccaguuggua

SEQ ID NO: 909165 - RNA, 19 nt, Artificial Sequence
  Description of Artificial Sequence: Synthetic oligonucleotide
caagaacauccaccgagga

SEQ ID NO: 909166 - RNA, 19 nt, Artificial Sequence
  Description of Artificial Sequence: Synthetic oligonucleotide
ggaaucgcaggcgacugcc

SEQ ID NO: 909167 - RNA, 19 nt, Artificial Sequence
  Description of Artificial Sequence: Synthetic oligonucleotide
ccgcucuugagccacgucc

SEQ ID NO: 909168 - RNA, 19 nt, Artificial Sequence
  Description of Artificial Sequence: Synthetic oligonucleotide
ugaaccgcccguucaccau

SEQ ID NO: 909169 - RNA, 19 nt, Artificial Sequence
  Description of Artificial Sequence: Synthetic oligonucleotide
uggcaucagacuggggaca

SEQ ID NO: 909170 - RNA, 19 nt, Artificial Sequence
  Description of Artificial Sequence: Synthetic oligonucleotide
uccccaggcauagacgauc

SEQ ID NO: 909171 - RNA, 19 nt, Artificial Sequence
  Description of Artificial Sequence: Synthetic oligonucleotide
cugggacaaaggacauggc

SEQ ID NO: 909172 - RNA, 19 nt, Artificial Sequence
  Description of Artificial Sequence: Synthetic oligonucleotide
caguccgaaacacucccca

SEQ ID NO: 909173 - RNA, 19 nt, Artificial Sequence
  Description of Artificial Sequence: Synthetic oligonucleotide
gguacccgcgggucggucg

SEQ ID NO: 909174 - RNA, 19 nt, Artificial Sequence
  Description of Artificial Sequence: Synthetic oligonucleotide
uggugggaccaugaggguc

SEQ ID NO: 909175 - RNA, 19 nt, Artificial Sequence
  Description of Artificial Sequence: Synthetic oligonucleotide
ugcccacgguacaccuugg

SEQ ID NO: 909176 - RNA, 19 nt, Artificial Sequence
  Description of Artificial Sequence: Synthetic oligonucleotide
gugacacguuccucaauga

SEQ ID NO: 909177 - RNA, 19 nt, Artificial Sequence
  Description of Artificial Sequence: Synthetic oligonucleotide
cagcacccgggaauguggc

SEQ ID NO: 909178 - RNA, 19 nt, Artificial Sequence
  Description of Artificial Sequence: Synthetic oligonucleotide
cuggaaucgcaggcgacug

SEQ ID NO: 909179 - RNA, 19 nt, Artificial Sequence
  Description of Artificial Sequence: Synthetic oligonucleotide
ucggucggcauagcuagaa

SEQ ID NO: 909180 - RNA, 19 nt, Artificial Sequence
  Description of Artificial Sequence: Synthetic oligonucleotide
ugccaguugguaggagagc

SEQ ID NO: 909181 - RNA, 19 nt, Artificial Sequence
  Description of Artificial Sequence: Synthetic oligonucleotide
aguuccgaaccugccuuug

SEQ ID NO: 909182 - RNA, 19 nt, Artificial Sequence
  Description of Artificial Sequence: Synthetic oligonucleotide
ggugaagcuggcugggaca

SEQ ID NO: 909183 - RNA, 19 nt, Artificial Sequence
  Description of Artificial Sequence: Synthetic oligonucleotide
gcuauugucgguucaggcu

SEQ ID NO: 909184 - RNA, 19 nt, Artificial Sequence
  Description of Artificial Sequence: Synthetic oligonucleotide
agcuggaaucgcaggcgac

SEQ ID NO: 909185 - RNA, 19 nt, Artificial Sequence
  Description of Artificial Sequence: Synthetic oligonucleotide
aggggcgauccccaggcau

SEQ ID NO: 909186 - RNA, 19 nt, Artificial Sequence
  Description of Artificial Sequence: Synthetic oligonucleotide
cacguuuggggugcugcag

SEQ ID NO: 909187 - RNA, 19 nt, Artificial Sequence
  Description of Artificial Sequence: Synthetic oligonucleotide
caagcgccucugcuggaag

SEQ ID NO: 909188 - RNA, 19 nt, Artificial Sequence
  Description of Artificial Sequence: Synthetic oligonucleotide
auaccuccuccagaguggu

SEQ ID NO: 909189 - RNA, 19 nt, Artificial Sequence
  Description of Artificial Sequence: Synthetic oligonucleotide
aggcgacugccaugcaucu

SEQ ID NO: 909190 - RNA, 19 nt, Artificial Sequence
  Description of Artificial Sequence: Synthetic oligonucleotide
caggaaucggcugacacgu

SEQ ID NO: 909191 - RNA, 19 nt, Artificial Sequence
  Description of Artificial Sequence: Synthetic oligonucleotide
ugugcgacgugagcaccac

SEQ ID NO: 909192 - RNA, 19 nt, Artificial Sequence
  Description of Artificial Sequence: Synthetic oligonucleotide
gcgauccccaggcauagac

SEQ ID NO: 909193 - RNA, 19 nt, Artificial Sequence
  Description of Artificial Sequence: Synthetic oligonucleotide
guagcaguuucgguuugga

SEQ ID NO: 909194 - RNA, 19 nt, Artificial Sequence
  Description of Artificial Sequence: Synthetic oligonucleotide
acauggcgaagaccacaca

SEQ ID NO: 909195 - RNA, 19 nt, Artificial Sequence
  Description of Artificial Sequence: Synthetic oligonucleotide
gcuucgcauuccuccaugc

SEQ ID NO: 909196 - RNA, 19 nt, Artificial Sequence
  Description of Artificial Sequence: Synthetic oligonucleotide
cugaaccgcccguucacca

SEQ ID NO: 909197 - RNA, 19 nt, Artificial Sequence
  Description of Artificial Sequence: Synthetic oligonucleotide
agagcgcuucgcauuccuc

SEQ ID NO: 909198 - RNA, 19 nt, Artificial Sequence
  Description of Artificial Sequence: Synthetic oligonucleotide
ugccccauugacgcccagc

SEQ ID NO: 909199 - RNA, 19 nt, Artificial Sequence
  Description of Artificial Sequence: Synthetic oligonucleotide
cugccaugcaucucccgga

SEQ ID NO: 909200 - RNA, 19 nt, Artificial Sequence
  Description of Artificial Sequence: Synthetic oligonucleotide
guuccgaaccugccuuuga

SEQ ID NO: 909201 - RNA, 19 nt, Artificial Sequence
  Description of Artificial Sequence: Synthetic oligonucleotide
gcgcaaacagcuccaggug

SEQ ID NO: 909202 - RNA, 19 nt, Artificial Sequence
  Description of Artificial Sequence: Synthetic oligonucleotide
guauaggguuuggggcagg

SEQ ID NO: 909203 - RNA, 19 nt, Artificial Sequence
  Description of Artificial Sequence: Synthetic oligonucleotide
ccaaguaguuacacauguc

SEQ ID NO: 909204 - RNA, 19 nt, Artificial Sequence
  Description of Artificial Sequence: Synthetic oligonucleotide
cacggaaagcaagcuguuc

SEQ ID NO: 909205 - RNA, 19 nt, Artificial Sequence
  Description of Artificial Sequence: Synthetic oligonucleotide
ccagcgaaggggugacugg

SEQ ID NO: 909206 - RNA, 19 nt, Artificial Sequence
  Description of Artificial Sequence: Synthetic oligonucleotide
aggggugacuggaauugcu

SEQ ID NO: 909207 - RNA, 19 nt, Artificial Sequence
  Description of Artificial Sequence: Synthetic oligonucleotide
cuguagguacccgcggguc

SEQ ID NO: 909208 - RNA, 19 nt, Artificial Sequence
  Description of Artificial Sequence: Synthetic oligonucleotide
cacgccgugauccuugccu

SEQ ID NO: 909209 - RNA, 19 nt, Artificial Sequence
  Description of Artificial Sequence: Synthetic oligonucleotide
cgggaauguggccaugacg

SEQ ID NO: 909210 - RNA, 19 nt, Artificial Sequence
  Description of Artificial Sequence: Synthetic oligonucleotide
gugcgacgugagcaccacg

SEQ ID NO: 909211 - RNA, 19 nt, Artificial Sequence
  Description of Artificial Sequence: Synthetic oligonucleotide
caucagacuggggacagua

SEQ ID NO: 909212 - RNA, 19 nt, Artificial Sequence
  Description of Artificial Sequence: Synthetic oligonucleotide
cacguuccucaaugaggac

SEQ ID NO: 909213 - RNA, 19 nt, Artificial Sequence
  Description of Artificial Sequence: Synthetic oligonucleotide
ccucgugcaccacggaaag

SEQ ID NO: 909214 - RNA, 19 nt, Artificial Sequence
  Description of Artificial Sequence: Synthetic oligonucleotide
cuggguccccaaccagagc

SEQ ID NO: 909215 - RNA, 19 nt, Artificial Sequence
  Description of Artificial Sequence: Synthetic oligonucleotide
gacgaaggcuauugucggu

SEQ ID NO: 909216 - RNA, 19 nt, Artificial Sequence
  Description of Artificial Sequence: Synthetic oligonucleotide
cuuuaccacucaggccaag

SEQ ID NO: 909217 - RNA, 19 nt, Artificial Sequence
  Description of Artificial Sequence: Synthetic oligonucleotide
ggucgaagauggcaucaga

SEQ ID NO: 909218 - RNA, 19 nt, Artificial Sequence
  Description of Artificial Sequence: Synthetic oligonucleotide
acgccgugauccuugccuu

SEQ ID NO: 909219 - RNA, 19 nt, Artificial Sequence
  Description of Artificial Sequence: Synthetic oligonucleotide
gcauguaggaguccauugu

SEQ ID NO: 909220 - RNA, 19 nt, Artificial Sequence
  Description of Artificial Sequence: Synthetic oligonucleotide
ucuugccgaugacguccca

SEQ ID NO: 909221 - RNA, 19 nt, Artificial Sequence
  Description of Artificial Sequence: Synthetic oligonucleotide
cugugcgacgugagcacca

SEQ ID NO: 909222 - RNA, 19 nt, Artificial Sequence
  Description of Artificial Sequence: Synthetic oligonucleotide
ugccuccgcuguagguacc

SEQ ID NO: 909223 - RNA, 19 nt, Artificial Sequence
  Description of Artificial Sequence: Synthetic oligonucleotide
ccaccaaguaguuacacau

SEQ ID NO: 909224 - RNA, 19 nt, Artificial Sequence
  Description of Artificial Sequence: Synthetic oligonucleotide
gggucccuggaccaccaug

SEQ ID NO: 909225 - RNA, 19 nt, Artificial Sequence
  Description of Artificial Sequence: Synthetic oligonucleotide
aaccgcccguucaccauga

SEQ ID NO: 909226 - RNA, 19 nt, Artificial Sequence
  Description of Artificial Sequence: Synthetic oligonucleotide
ggccaaggcaggcaugcuc

SEQ ID NO: 909227 - RNA, 19 nt, Artificial Sequence
  Description of Artificial Sequence: Synthetic oligonucleotide
caccugaaccgcccguuca

SEQ ID NO: 909228 - RNA, 19 nt, Artificial Sequence
  Description of Artificial Sequence: Synthetic oligonucleotide
ggacauggcgaagaccaca

SEQ ID NO: 909229 - RNA, 19 nt, Artificial Sequence
  Description of Artificial Sequence: Synthetic oligonucleotide
gaaucgcaggcgacugcca

SEQ ID NO: 909230 - RNA, 19 nt, Artificial Sequence
  Description of Artificial Sequence: Synthetic oligonucleotide
ugccuugcgcagccagcuc

SEQ ID NO: 909231 - RNA, 19 nt, Artificial Sequence
  Description of Artificial Sequence: Synthetic oligonucleotide
gcagcguguccccugucac

SEQ ID NO: 909232 - RNA, 19 nt, Artificial Sequence
  Description of Artificial Sequence: Synthetic oligonucleotide
ggagagcgcugucugggca

SEQ ID NO: 909233 - RNA, 19 nt, Artificial Sequence
  Description of Artificial Sequence: Synthetic oligonucleotide
cucgugcaccacggaaagc

SEQ ID NO: 909234 - RNA, 19 nt, Artificial Sequence
  Description of Artificial Sequence: Synthetic oligonucleotide
ugacacguuuggggugcug

SEQ ID NO: 909235 - RNA, 19 nt, Artificial Sequence
  Description of Artificial Sequence: Synthetic oligonucleotide
ccggagagcgcugucuggg

SEQ ID NO: 909236 - RNA, 19 nt, Artificial Sequence
  Description of Artificial Sequence: Synthetic oligonucleotide
uugucgguucaggcuguuc

SEQ ID NO: 909237 - RNA, 19 nt, Artificial Sequence
  Description of Artificial Sequence: Synthetic oligonucleotide
acgguacaccuuggucagg

SEQ ID NO: 909238 - RNA, 19 nt, Artificial Sequence
  Description of Artificial Sequence: Synthetic oligonucleotide
gacgucccagcgaaggggu

SEQ ID NO: 909239 - RNA, 19 nt, Artificial Sequence
  Description of Artificial Sequence: Synthetic oligonucleotide
gccggagagcgcugucugg

SEQ ID NO: 909240 - RNA, 19 nt, Artificial Sequence
  Description of Artificial Sequence: Synthetic oligonucleotide
gguggaaagcucccaggcu

SEQ ID NO: 909241 - RNA, 19 nt, Artificial Sequence
  Description of Artificial Sequence: Synthetic oligonucleotide
cccacgguacaccuugguc

SEQ ID NO: 909242 - RNA, 19 nt, Artificial Sequence
  Description of Artificial Sequence: Synthetic oligonucleotide
cagcgaaggggugacugga

SEQ ID NO: 909243 - RNA, 19 nt, Artificial Sequence
  Description of Artificial Sequence: Synthetic oligonucleotide
ggcgaagaccacacauaug

SEQ ID NO: 909244 - RNA, 19 nt, Artificial Sequence
  Description of Artificial Sequence: Synthetic oligonucleotide
ggagaugauugcggugcug

SEQ ID NO: 909245 - RNA, 19 nt, Artificial Sequence
  Description of Artificial Sequence: Synthetic oligonucleotide
caucaaggccgagggccac

SEQ ID NO: 909246 - RNA, 19 nt, Artificial Sequence
  Description of Artificial Sequence: Synthetic oligonucleotide
caguaagcaggucgaagau

SEQ ID NO: 909247 - RNA, 19 nt, Artificial Sequence
  Description of Artificial Sequence: Synthetic oligonucleotide
gcgcgcaaacagcuccagg

SEQ ID NO: 909248 - RNA, 19 nt, Artificial Sequence
  Description of Artificial Sequence: Synthetic oligonucleotide
cuucgcauuccuccaugcu

SEQ ID NO: 909249 - RNA, 19 nt, Artificial Sequence
  Description of Artificial Sequence: Synthetic oligonucleotide
gacgauccacagccgggcu

SEQ ID NO: 909250 - RNA, 19 nt, Artificial Sequence
  Description of Artificial Sequence: Synthetic oligonucleotide
ggcuaacugagaagucuuc

SEQ ID NO: 909251 - RNA, 19 nt, Artificial Sequence
  Description of Artificial Sequence: Synthetic oligonucleotide
gccgaugacgucccagcga

SEQ ID NO: 909252 - RNA, 19 nt, Artificial Sequence
  Description of Artificial Sequence: Synthetic oligonucleotide
cuugcgcagccagcucuug

SEQ ID NO: 909253 - RNA, 19 nt, Artificial Sequence
  Description of Artificial Sequence: Synthetic oligonucleotide
ugacgcccagcaguccgaa

SEQ ID NO: 909254 - RNA, 19 nt, Artificial Sequence
  Description of Artificial Sequence: Synthetic oligonucleotide
gcucagagcacggucucca

SEQ ID NO: 909255 - RNA, 19 nt, Artificial Sequence
  Description of Artificial Sequence: Synthetic oligonucleotide
gcacccgggaauguggcca

SEQ ID NO: 909256 - RNA, 19 nt, Artificial Sequence
  Description of Artificial Sequence: Synthetic oligonucleotide
cccagcgaaggggugacug

SEQ ID NO: 909257 - RNA, 19 nt, Artificial Sequence
  Description of Artificial Sequence: Synthetic oligonucleotide
cgugauccuugccuugcgc

SEQ ID NO: 909258 - RNA, 19 nt, Artificial Sequence
  Description of Artificial Sequence: Synthetic oligonucleotide
gcgcgcuuggauccaugcc

SEQ ID NO: 909259 - RNA, 19 nt, Artificial Sequence
  Description of Artificial Sequence: Synthetic oligonucleotide
gcaggcaugcucagagcac

SEQ ID NO: 909260 - RNA, 19 nt, Artificial Sequence
  Description of Artificial Sequence: Synthetic oligonucleotide
accacggagcggcccucgu

SEQ ID NO: 909261 - RNA, 19 nt, Artificial Sequence
  Description of Artificial Sequence: Synthetic oligonucleotide
caccacggagcggcccucg

SEQ ID NO: 909262 - RNA, 19 nt, Artificial Sequence
  Description of Artificial Sequence: Synthetic oligonucleotide
gcugugcgacgugagcacc

SEQ ID NO: 909263 - RNA, 19 nt, Artificial Sequence
  Description of Artificial Sequence: Synthetic oligonucleotide
agguacccgcgggucgguc

SEQ ID NO: 909264 - RNA, 19 nt, Artificial Sequence
  Description of Artificial Sequence: Synthetic oligonucleotide
ggaaucggcugacacguuu

SEQ ID NO: 909265 - RNA, 19 nt, Artificial Sequence
  Description of Artificial Sequence: Synthetic oligonucleotide
ucgugccagggugcagcug

SEQ ID NO: 909266 - RNA, 19 nt, Artificial Sequence
  Description of Artificial Sequence: Synthetic oligonucleotide
gggcgauccccaggcauag

SEQ ID NO: 909267 - RNA, 19 nt, Artificial Sequence
  Description of Artificial Sequence: Synthetic oligonucleotide
gugcagagcgcuucgcauu

SEQ ID NO: 909268 - RNA, 19 nt, Artificial Sequence
  Description of Artificial Sequence: Synthetic oligonucleotide
ccugaaccgcccguucacc

SEQ ID NO: 909269 - RNA, 19 nt, Artificial Sequence
  Description of Artificial Sequence: Synthetic oligonucleotide
ccgugauccuugccuugcg

SEQ ID NO: 909270 - RNA, 19 nt, Artificial Sequence
  Description of Artificial Sequence: Synthetic oligonucleotide
gccaugcaucucccggagc

SEQ ID NO: 909271 - RNA, 19 nt, Artificial Sequence
  Description of Artificial Sequence: Synthetic oligonucleotide
gcgcgugcagagcgcuucg

SEQ ID NO: 909272 - RNA, 19 nt, Artificial Sequence
  Description of Artificial Sequence: Synthetic oligonucleotide
gcauagcuagaaaggccca

SEQ ID NO: 909273 - RNA, 19 nt, Artificial Sequence
  Description of Artificial Sequence: Synthetic oligonucleotide
cccugccccauugacgccc

SEQ ID NO: 909274 - RNA, 19 nt, Artificial Sequence
  Description of Artificial Sequence: Synthetic oligonucleotide
aggcgcgcaaacagcucca

SEQ ID NO: 909275 - RNA, 19 nt, Artificial Sequence
  Description of Artificial Sequence: Synthetic oligonucleotide
gagcgcugucugggcagcc

SEQ ID NO: 909276 - RNA, 19 nt, Artificial Sequence
  Description of Artificial Sequence: Synthetic oligonucleotide
ccaccgaggaggccaucag

SEQ ID NO: 909277 - RNA, 19 nt, Artificial Sequence
  Description of Artificial Sequence: Synthetic oligonucleotide
gacaccugaaccgcccguu

SEQ ID NO: 909278 - RNA, 19 nt, Artificial Sequence
  Description of Artificial Sequence: Synthetic oligonucleotide
gugggaccaugagggucag

SEQ ID NO: 909279 - RNA, 19 nt, Artificial Sequence
  Description of Artificial Sequence: Synthetic oligonucleotide
ccgcuguagguacccgcgg

SEQ ID NO: 909280 - RNA, 19 nt, Artificial Sequence
  Description of Artificial Sequence: Synthetic oligonucleotide
uagguacccgcgggucggu

SEQ ID NO: 909281 - RNA, 19 nt, Artificial Sequence
  Description of Artificial Sequence: Synthetic oligonucleotide
aaccugccuuugaggugcu

SEQ ID NO: 909282 - RNA, 19 nt, Artificial Sequence
  Description of Artificial Sequence: Synthetic oligonucleotide
caaugaggaccagggugaa

SEQ ID NO: 909283 - RNA, 19 nt, Artificial Sequence
  Description of Artificial Sequence: Synthetic oligonucleotide
cauugccaccaaguaguua

SEQ ID NO: 909284 - RNA, 19 nt, Artificial Sequence
  Description of Artificial Sequence: Synthetic oligonucleotide
cccucgugcaccacggaaa

SEQ ID NO: 909285 - RNA, 19 nt, Artificial Sequence
  Description of Artificial Sequence: Synthetic oligonucleotide
cgaaggcuauugucgguuc

SEQ ID NO: 909286 - RNA, 19 nt, Artificial Sequence
  Description of Artificial Sequence: Synthetic oligonucleotide
cgcgcaaacagcuccaggu

SEQ ID NO: 909287 - RNA, 19 nt, Artificial Sequence
  Description of Artificial Sequence: Synthetic oligonucleotide
gacgcccagcaguccgaaa

SEQ ID NO: 909288 - RNA, 19 nt, Artificial Sequence
  Description of Artificial Sequence: Synthetic oligonucleotide
cgcgcgcuuggauccaugc

SEQ ID NO: 909289 - RNA, 19 nt, Artificial Sequence
  Description of Artificial Sequence: Synthetic oligonucleotide
ggcucuugagcuacauugu

SEQ ID NO: 909290 - RNA, 19 nt, Artificial Sequence
  Description of Artificial Sequence: Synthetic oligonucleotide
gcuggaaucgcaggcgacu

SEQ ID NO: 909291 - RNA, 19 nt, Artificial Sequence
  Description of Artificial Sequence: Synthetic oligonucleotide
auugucgguucaggcuguu

SEQ ID NO: 909292 - RNA, 19 nt, Artificial Sequence
  Description of Artificial Sequence: Synthetic oligonucleotide
gcaugccagcccuuguugu

SEQ ID NO: 909293 - RNA, 19 nt, Artificial Sequence
  Description of Artificial Sequence: Synthetic oligonucleotide
gcgacgugagcaccacgga

SEQ ID NO: 909294 - RNA, 19 nt, Artificial Sequence
  Description of Artificial Sequence: Synthetic oligonucleotide
ggcgcgugcagagcgcuuc

SEQ ID NO: 909295 - RNA, 19 nt, Artificial Sequence
  Description of Artificial Sequence: Synthetic oligonucleotide
cagagcgcuucgcauuccu

SEQ ID NO: 909296 - RNA, 19 nt, Artificial Sequence
  Description of Artificial Sequence: Synthetic oligonucleotide
caccgaggaggccaucagu

SEQ ID NO: 909297 - RNA, 19 nt, Artificial Sequence
  Description of Artificial Sequence: Synthetic oligonucleotide
ccgggaauguggccaugac

SEQ ID NO: 909298 - RNA, 19 nt, Artificial Sequence
  Description of Artificial Sequence: Synthetic oligonucleotide
gccuccgcuguagguaccc

SEQ ID NO: 909299 - RNA, 19 nt, Artificial Sequence
  Description of Artificial Sequence: Synthetic oligonucleotide
ccccauugacgcccagcag

SEQ ID NO: 909300 - RNA, 19 nt, Artificial Sequence
  Description of Artificial Sequence: Synthetic oligonucleotide
auccaccgaggaggccauc

SEQ ID NO: 909301 - RNA, 19 nt, Artificial Sequence
  Description of Artificial Sequence: Synthetic oligonucleotide
auccccaggcauagacgau

SEQ ID NO: 909302 - RNA, 19 nt, Artificial Sequence
  Description of Artificial Sequence: Synthetic oligonucleotide
gauugcggugcuggaggau

SEQ ID NO: 909303 - RNA, 19 nt, Artificial Sequence
  Description of Artificial Sequence: Synthetic oligonucleotide
gggucggucggcauagcua

SEQ ID NO: 909304 - RNA, 19 nt, Artificial Sequence
  Description of Artificial Sequence: Synthetic oligonucleotide
gcccucgugcaccacggaa

SEQ ID NO: 909305 - RNA, 19 nt, Artificial Sequence
  Description of Artificial Sequence: Synthetic oligonucleotide
ggucuuccaggaaucggcu

SEQ ID NO: 909306 - RNA, 19 nt, Artificial Sequence
  Description of Artificial Sequence: Synthetic oligonucleotide
gcaucucccggagcacagc

SEQ ID NO: 909307 - RNA, 19 nt, Artificial Sequence
  Description of Artificial Sequence: Synthetic oligonucleotide
caggccggagagcgcuguc

SEQ ID NO: 909308 - RNA, 19 nt, Artificial Sequence
  Description of Artificial Sequence: Synthetic oligonucleotide
ucccagcgaaggggugacu

SEQ ID NO: 909309 - RNA, 19 nt, Artificial Sequence
  Description of Artificial Sequence: Synthetic oligonucleotide
ccucucccaggggugguag

SEQ ID NO: 909310 - RNA, 19 nt, Artificial Sequence
  Description of Artificial Sequence: Synthetic oligonucleotide
cagguguucccggccagua

SEQ ID NO: 909311 - RNA, 19 nt, Artificial Sequence
  Description of Artificial Sequence: Synthetic oligonucleotide
cgacugccaugcaucuccc

SEQ ID NO: 909312 - RNA, 19 nt, Artificial Sequence
  Description of Artificial Sequence: Synthetic oligonucleotide
agcggcccucgugcaccac

SEQ ID NO: 909313 - RNA, 19 nt, Artificial Sequence
  Description of Artificial Sequence: Synthetic oligonucleotide
caccaggccggagagcgcu

SEQ ID NO: 909314 - RNA, 19 nt, Artificial Sequence
  Description of Artificial Sequence: Synthetic oligonucleotide
ugggaccaugagggucagu

SEQ ID NO: 909315 - RNA, 19 nt, Artificial Sequence
  Description of Artificial Sequence: Synthetic oligonucleotide
guccauuguuggcucgguu

SEQ ID NO: 909316 - RNA, 19 nt, Artificial Sequence
  Description of Artificial Sequence: Synthetic oligonucleotide
cgcuucgcauuccuccaug

SEQ ID NO: 909317 - RNA, 19 nt, Artificial Sequence
  Description of Artificial Sequence: Synthetic oligonucleotide
cgcgcuuggauccaugccu

SEQ ID NO: 909318 - RNA, 19 nt, Artificial Sequence
  Description of Artificial Sequence: Synthetic oligonucleotide
gcaggcgacugccaugcau

SEQ ID NO: 909319 - RNA, 19 nt, Artificial Sequence
  Description of Artificial Sequence: Synthetic oligonucleotide
uccgcgcgcuuggauccau

SEQ ID NO: 909320 - RNA, 19 nt, Artificial Sequence
  Description of Artificial Sequence: Synthetic oligonucleotide
caaggccgagggccacuga

SEQ ID NO: 909321 - RNA, 19 nt, Artificial Sequence
  Description of Artificial Sequence: Synthetic oligonucleotide
accaggccggagagcgcug

SEQ ID NO: 909322 - RNA, 19 nt, Artificial Sequence
  Description of Artificial Sequence: Synthetic oligonucleotide
gcgaaggggugacuggaau

SEQ ID NO: 909323 - RNA, 19 nt, Artificial Sequence
  Description of Artificial Sequence: Synthetic oligonucleotide
accgcccguucaccaugau

SEQ ID NO: 909324 - RNA, 19 nt, Artificial Sequence
  Description of Artificial Sequence: Synthetic oligonucleotide
acccgggaauguggccaug

SEQ ID NO: 909325 - RNA, 19 nt, Artificial Sequence
  Description of Artificial Sequence: Synthetic oligonucleotide
cugccccauugacgcccag

SEQ ID NO: 909326 - RNA, 19 nt, Artificial Sequence
  Description of Artificial Sequence: Synthetic oligonucleotide
gucggucggcauagcuaga

SEQ ID NO: 909327 - RNA, 19 nt, Artificial Sequence
  Description of Artificial Sequence: Synthetic oligonucleotide
ccuccgcuguagguacccg

SEQ ID NO: 909328 - RNA, 19 nt, Artificial Sequence
  Description of Artificial Sequence: Synthetic oligonucleotide
aggaaucggcugacacguu

SEQ ID NO: 909329 - RNA, 19 nt, Artificial Sequence
  Description of Artificial Sequence: Synthetic oligonucleotide
gcuuuaccacucaggccaa

SEQ ID NO: 909330 - RNA, 19 nt, Artificial Sequence
  Description of Artificial Sequence: Synthetic oligonucleotide
caggcgcaccaggccggag

SEQ ID NO: 909331 - RNA, 19 nt, Artificial Sequence
  Description of Artificial Sequence: Synthetic oligonucleotide
ggcgacugccaugcaucuc

SEQ ID NO: 909332 - RNA, 19 nt, Artificial Sequence
  Description of Artificial Sequence: Synthetic oligonucleotide
cgcgggucggucggcauag

SEQ ID NO: 909333 - RNA, 19 nt, Artificial Sequence
  Description of Artificial Sequence: Synthetic oligonucleotide
ccgggcuccucugcccacg

SEQ ID NO: 909334 - RNA, 19 nt, Artificial Sequence
  Description of Artificial Sequence: Synthetic oligonucleotide
caguuccgaaccugccuuu

SEQ ID NO: 909335 - RNA, 19 nt, Artificial Sequence
  Description of Artificial Sequence: Synthetic oligonucleotide
ccauagagcuggggucuuc

SEQ ID NO: 909336 - RNA, 19 nt, Artificial Sequence
  Description of Artificial Sequence: Synthetic oligonucleotide
cacccgggaauguggccau

SEQ ID NO: 909337 - RNA, 19 nt, Artificial Sequence
  Description of Artificial Sequence: Synthetic oligonucleotide
caggcgcgugcagagcgcu

SEQ ID NO: 909338 - RNA, 19 nt, Artificial Sequence
  Description of Artificial Sequence: Synthetic oligonucleotide
ggucagugugugaccaguu

SEQ ID NO: 909339 - RNA, 19 nt, Artificial Sequence
  Description of Artificial Sequence: Synthetic oligonucleotide
ggcccucgugcaccacgga

SEQ ID NO: 909340 - RNA, 19 nt, Artificial Sequence
  Description of Artificial Sequence: Synthetic oligonucleotide
cgugcagagcgcuucgcau

SEQ ID NO: 909341 - RNA, 19 nt, Artificial Sequence
  Description of Artificial Sequence: Synthetic oligonucleotide
caguuucgguuuggauugu

SEQ ID NO: 909342 - RNA, 19 nt, Artificial Sequence
  Description of Artificial Sequence: Synthetic oligonucleotide
cuccgcgcgcuuggaucca

SEQ ID NO: 909343 - RNA, 19 nt, Artificial Sequence
  Description of Artificial Sequence: Synthetic oligonucleotide
ccgcgcgcuuggauccaug

SEQ ID NO: 909344 - RNA, 19 nt, Artificial Sequence
  Description of Artificial Sequence: Synthetic oligonucleotide
gugcggcagcuggcucuug

SEQ ID NO: 909345 - RNA, 19 nt, Artificial Sequence
  Description of Artificial Sequence: Synthetic oligonucleotide
cuuccacgccgugauccuu

SEQ ID NO: 909346 - RNA, 19 nt, Artificial Sequence
  Description of Artificial Sequence: Synthetic oligonucleotide
ccaagccaguauaggguuu

SEQ ID NO: 909347 - RNA, 19 nt, Artificial Sequence
  Description of Artificial Sequence: Synthetic oligonucleotide
ggcgauccccaggcauaga

SEQ ID NO: 909348 - RNA, 19 nt, Artificial Sequence
  Description of Artificial Sequence: Synthetic oligonucleotide
aggcgcgugcagagcgcuu

SEQ ID NO: 909349 - RNA, 19 nt, Artificial Sequence
  Description of Artificial Sequence: Synthetic oligonucleotide
cugacacguuuggggugcu

SEQ ID NO: 909350 - RNA, 19 nt, Artificial Sequence
  Description of Artificial Sequence: Synthetic oligonucleotide
cggucggcauagcuagaaa

SEQ ID NO: 909351 - RNA, 19 nt, Artificial Sequence
  Description of Artificial Sequence: Synthetic oligonucleotide
gcaucagacuggggacagu

SEQ ID NO: 909352 - RNA, 19 nt, Artificial Sequence
  Description of Artificial Sequence: Synthetic oligonucleotide
gcgggucggucggcauagc

SEQ ID NO: 909353 - RNA, 19 nt, Artificial Sequence
  Description of Artificial Sequence: Synthetic oligonucleotide
gcacagcacccgggaaugu

SEQ ID NO: 909354 - RNA, 19 nt, Artificial Sequence
  Description of Artificial Sequence: Synthetic oligonucleotide
caccacugcugggcagcgu

SEQ ID NO: 909355 - RNA, 19 nt, Artificial Sequence
  Description of Artificial Sequence: Synthetic oligonucleotide
cgggucggucggcauagcu

SEQ ID NO: 909356 - RNA, 19 nt, Artificial Sequence
  Description of Artificial Sequence: Synthetic oligonucleotide
gcguguccccugucaccau

SEQ ID NO: 909357 - RNA, 19 nt, Artificial Sequence
  Description of Artificial Sequence: Synthetic oligonucleotide
aagaucuaaauaccgauac

SEQ ID NO: 909358 - RNA, 19 nt, Artificial Sequence
  Description of Artificial Sequence: Synthetic oligonucleotide
cuuaauauggugaugagug

SEQ ID NO: 909359 - RNA, 19 nt, Artificial Sequence
  Description of Artificial Sequence: Synthetic oligonucleotide
acacauauagcuuugacag

SEQ ID NO: 909360 - RNA, 19 nt, Artificial Sequence
  Description of Artificial Sequence: Synthetic oligonucleotide
auagucuaaagccuggagc

SEQ ID NO: 909361 - RNA, 19 nt, Artificial Sequence
  Description of Artificial Sequence: Synthetic oligonucleotide
uuaucaguuccauaggugg

SEQ ID NO: 909362 - RNA, 19 nt, Artificial Sequence
  Description of Artificial Sequence: Synthetic oligonucleotide
agauaacugucccagauac

SEQ ID NO: 909363 - RNA, 19 nt, Artificial Sequence
  Description of Artificial Sequence: Synthetic oligonucleotide
uagauuacaaagauauucc

SEQ ID NO: 909364 - RNA, 19 nt, Artificial Sequence
  Description of Artificial Sequence: Synthetic oligonucleotide
uucuuaaguacuuugcucc

SEQ ID NO: 909365 - RNA, 19 nt, Artificial Sequence
  Description of Artificial Sequence: Synthetic oligonucleotide
uccuuaguaaggaagagug

SEQ ID NO: 909366 - RNA, 19 nt, Artificial Sequence
  Description of Artificial Sequence: Synthetic oligonucleotide
aaucugguuaguuccaguc

SEQ ID NO: 909367 - RNA, 19 nt, Artificial Sequence
  Description of Artificial Sequence: Synthetic oligonucleotide
ugaauuuagcaaaugguga

SEQ ID NO: 909368 - RNA, 19 nt, Artificial Sequence
  Description of Artificial Sequence: Synthetic oligonucleotide
aaucucaccagauaacugu

SEQ ID NO: 909369 - RNA, 19 nt, Artificial Sequence
  Description of Artificial Sequence: Synthetic oligonucleotide
uggauauuagguuuggcag

SEQ ID NO: 909370 - RNA, 19 nt, Artificial Sequence
  Description of Artificial Sequence: Synthetic oligonucleotide
uucgaagaucuaaauaccg

SEQ ID NO: 909371 - RNA, 19 nt, Artificial Sequence
  Description of Artificial Sequence: Synthetic oligonucleotide
aacgcaauucuccacaugu

SEQ ID NO: 909372 - RNA, 19 nt, Artificial Sequence
  Description of Artificial Sequence: Synthetic oligonucleotide
aauaccgauacugcaaacg

SEQ ID NO: 909373 - RNA, 19 nt, Artificial Sequence
  Description of Artificial Sequence: Synthetic oligonucleotide
cucaauuaaacgcugaaug

SEQ ID NO: 909374 - RNA, 19 nt, Artificial Sequence
  Description of Artificial Sequence: Synthetic oligonucleotide
aaacucucuaaugagcucg

SEQ ID NO: 909375 - RNA, 19 nt, Artificial Sequence
  Description of Artificial Sequence: Synthetic oligonucleotide
uuuaaaaccaagucguagu

SEQ ID NO: 909376 - RNA, 19 nt, Artificial Sequence
  Description of Artificial Sequence: Synthetic oligonucleotide
uuggcguuuaggaauauag

SEQ ID NO: 909377 - RNA, 19 nt, Artificial Sequence
  Description of Artificial Sequence: Synthetic oligonucleotide
gauagaaccaccuccuacc

SEQ ID NO: 909378 - RNA, 19 nt, Artificial Sequence
  Description of Artificial Sequence: Synthetic oligonucleotide
ucagcgaaagucauggaag

SEQ ID NO: 909379 - RNA, 19 nt, Artificial Sequence
  Description of Artificial Sequence: Synthetic oligonucleotide
aaacuuaagaguucaaguu

SEQ ID NO: 909380 - RNA, 19 nt, Artificial Sequence
  Description of Artificial Sequence: Synthetic oligonucleotide
uuucuuaauauggugauga

SEQ ID NO: 909381 - RNA, 19 nt, Artificial Sequence
  Description of Artificial Sequence: Synthetic oligonucleotide
ucucuaaugagcucgacgu

SEQ ID NO: 909382 - RNA, 19 nt, Artificial Sequence
  Description of Artificial Sequence: Synthetic oligonucleotide
aguacuacuccucucaucu

SEQ ID NO: 909383 - RNA, 19 nt, Artificial Sequence
  Description of Artificial Sequence: Synthetic oligonucleotide
gaucuaaauaccgauacug

SEQ ID NO: 909384 - RNA, 19 nt, Artificial Sequence
  Description of Artificial Sequence: Synthetic oligonucleotide
aacuuagacuucuggagag

SEQ ID NO: 909385 - RNA, 19 nt, Artificial Sequence
  Description of Artificial Sequence: Synthetic oligonucleotide
uucgguauugaauccaucc

SEQ ID NO: 909386 - RNA, 19 nt, Artificial Sequence
  Description of Artificial Sequence: Synthetic oligonucleotide
uucggauagaaccaccucc

SEQ ID NO: 909387 - RNA, 19 nt, Artificial Sequence
  Description of Artificial Sequence: Synthetic oligonucleotide
auauagcuuugacaguucc

SEQ ID NO: 909388 - RNA, 19 nt, Artificial Sequence
  Description of Artificial Sequence: Synthetic oligonucleotide
ucuaaauaccgauacugca

SEQ ID NO: 909389 - RNA, 19 nt, Artificial Sequence
  Description of Artificial Sequence: Synthetic oligonucleotide
caucaaucugguuaguucc

SEQ ID NO: 909390 - RNA, 19 nt, Artificial Sequence
  Description of Artificial Sequence: Synthetic oligonucleotide
uagucuaaagccuggagca

SEQ ID NO: 909391 - RNA, 19 nt, Artificial Sequence
  Description of Artificial Sequence: Synthetic oligonucleotide
uuugacaguuccuuggggc

SEQ ID NO: 909392 - RNA, 19 nt, Artificial Sequence
  Description of Artificial Sequence: Synthetic oligonucleotide
ugccccauagucuaaagcc

SEQ ID NO: 909393 - RNA, 19 nt, Artificial Sequence
  Description of Artificial Sequence: Synthetic oligonucleotide
uccucgauaggauuugggg

SEQ ID NO: 909394 - RNA, 19 nt, Artificial Sequence
  Description of Artificial Sequence: Synthetic oligonucleotide
aaaaccaagucguaguguu

SEQ ID NO: 909395 - RNA, 19 nt, Artificial Sequence
  Description of Artificial Sequence: Synthetic oligonucleotide
guuauacugcauuuggaag

SEQ ID NO: 909396 - RNA, 19 nt, Artificial Sequence
  Description of Artificial Sequence: Synthetic oligonucleotide
aagaacgcaauucuccaca

SEQ ID NO: 909397 - RNA, 19 nt, Artificial Sequence
  Description of Artificial Sequence: Synthetic oligonucleotide
aaucguaacuuccccaaca

SEQ ID NO: 909398 - RNA, 19 nt, Artificial Sequence
  Description of Artificial Sequence: Synthetic oligonucleotide
aaguacuuugcuccuucac

SEQ ID NO: 909399 - RNA, 19 nt, Artificial Sequence
  Description of Artificial Sequence: Synthetic oligonucleotide
agucuguuggccaugagac

SEQ ID NO: 909400 - RNA, 19 nt, Artificial Sequence
  Description of Artificial Sequence: Synthetic oligonucleotide
uauucccgcauuuucauga

SEQ ID NO: 909401 - RNA, 19 nt, Artificial Sequence
  Description of Artificial Sequence: Synthetic oligonucleotide
uggggagucuuuccgaugg

SEQ ID NO: 909402 - RNA, 19 nt, Artificial Sequence
  Description of Artificial Sequence: Synthetic oligonucleotide
uuccugacuauaaugguga

SEQ ID NO: 909403 - RNA, 19 nt, Artificial Sequence
  Description of Artificial Sequence: Synthetic oligonucleotide
aaccaagucguaguguugg

SEQ ID NO: 909404 - RNA, 19 nt, Artificial Sequence
  Description of Artificial Sequence: Synthetic oligonucleotide
aggggcuucacauaauauc

SEQ ID NO: 909405 - RNA, 19 nt, Artificial Sequence
  Description of Artificial Sequence: Synthetic oligonucleotide
aaauaccgauacugcaaac

SEQ ID NO: 909406 - RNA, 19 nt, Artificial Sequence
  Description of Artificial Sequence: Synthetic oligonucleotide
ucaaaggguagcuucuugc

SEQ ID NO: 909407 - RNA, 19 nt, Artificial Sequence
  Description of Artificial Sequence: Synthetic oligonucleotide
gaauauagguaagacuucc

SEQ ID NO: 909408 - RNA, 19 nt, Artificial Sequence
  Description of Artificial Sequence: Synthetic oligonucleotide
caauuaaacgcugaaugcc

SEQ ID NO: 909409 - RNA, 19 nt, Artificial Sequence
  Description of Artificial Sequence: Synthetic oligonucleotide
auuuaaaaccaagucguag

SEQ ID NO: 909410 - RNA, 19 nt, Artificial Sequence
  Description of Artificial Sequence: Synthetic oligonucleotide
aacgcugaaugccagucug

SEQ ID NO: 909411 - RNA, 19 nt, Artificial Sequence
  Description of Artificial Sequence: Synthetic oligonucleotide
aucuaaauaccgauacugc

SEQ ID NO: 909412 - RNA, 19 nt, Artificial Sequence
  Description of Artificial Sequence: Synthetic oligonucleotide
aggaauauagguaagacuu

SEQ ID NO: 909413 - RNA, 19 nt, Artificial Sequence
  Description of Artificial Sequence: Synthetic oligonucleotide
uaaauaccgauacugcaaa

SEQ ID NO: 909414 - RNA, 19 nt, Artificial Sequence
  Description of Artificial Sequence: Synthetic oligonucleotide
auuucuaugucaaucugag

SEQ ID NO: 909415 - RNA, 19 nt, Artificial Sequence
  Description of Artificial Sequence: Synthetic oligonucleotide
uuggccacgaaccuuuuca

SEQ ID NO: 909416 - RNA, 19 nt, Artificial Sequence
  Description of Artificial Sequence: Synthetic oligonucleotide
aauuaaacgcugaaugcca

SEQ ID NO: 909417 - RNA, 19 nt, Artificial Sequence
  Description of Artificial Sequence: Synthetic oligonucleotide
agaaccaccuccuaccuca

SEQ ID NO: 909418 - RNA, 19 nt, Artificial Sequence
  Description of Artificial Sequence: Synthetic oligonucleotide
gauauuagguuuggcagag

SEQ ID NO: 909419 - RNA, 19 nt, Artificial Sequence
  Description of Artificial Sequence: Synthetic oligonucleotide
aaagcgaauaucuggcuua

SEQ ID NO: 909420 - RNA, 19 nt, Artificial Sequence
  Description of Artificial Sequence: Synthetic oligonucleotide
aagagugggaaguccacca

SEQ ID NO: 909421 - RNA, 19 nt, Artificial Sequence
  Description of Artificial Sequence: Synthetic oligonucleotide
acugcaaacgaagagccuc

SEQ ID NO: 909422 - RNA, 19 nt, Artificial Sequence
  Description of Artificial Sequence: Synthetic oligonucleotide
uuugccuucgguauugaau

SEQ ID NO: 909423 - RNA, 19 nt, Artificial Sequence
  Description of Artificial Sequence: Synthetic oligonucleotide
uggcguuuaggaauauagg

SEQ ID NO: 909424 - RNA, 19 nt, Artificial Sequence
  Description of Artificial Sequence: Synthetic oligonucleotide
uuuaggaauauagguaaga

SEQ ID NO: 909425 - RNA, 19 nt, Artificial Sequence
  Description of Artificial Sequence: Synthetic oligonucleotide
uuaauauggugaugagugc

SEQ ID NO: 909426 - RNA, 19 nt, Artificial Sequence
  Description of Artificial Sequence: Synthetic oligonucleotide
cagguuauacugcauuugg

SEQ ID NO: 909427 - RNA, 19 nt, Artificial Sequence
  Description of Artificial Sequence: Synthetic oligonucleotide
gaaucuggggcauugcuca

SEQ ID NO: 909428 - RNA, 19 nt, Artificial Sequence
  Description of Artificial Sequence: Synthetic oligonucleotide
ugucaaucugaguaaacuc

SEQ ID NO: 909429 - RNA, 19 nt, Artificial Sequence
  Description of Artificial Sequence: Synthetic oligonucleotide
gauaaaccccugcauagac

SEQ ID NO: 909430 - RNA, 19 nt, Artificial Sequence
  Description of Artificial Sequence: Synthetic oligonucleotide
uugccuucgguauugaauc

SEQ ID NO: 909431 - RNA, 19 nt, Artificial Sequence
  Description of Artificial Sequence: Synthetic oligonucleotide
ugauccuucaucucgccgu

SEQ ID NO: 909432 - RNA, 19 nt, Artificial Sequence
  Description of Artificial Sequence: Synthetic oligonucleotide
agagcaugcuuucucaugu

SEQ ID NO: 909433 - RNA, 19 nt, Artificial Sequence
  Description of Artificial Sequence: Synthetic oligonucleotide
cuuuucagguuccguaugg

SEQ ID NO: 909434 - RNA, 19 nt, Artificial Sequence
  Description of Artificial Sequence: Synthetic oligonucleotide
uuagguuuggcagagcaaa

SEQ ID NO: 909435 - RNA, 19 nt, Artificial Sequence
  Description of Artificial Sequence: Synthetic oligonucleotide
ucaaucucaccagauaacu

SEQ ID NO: 909436 - RNA, 19 nt, Artificial Sequence
  Description of Artificial Sequence: Synthetic oligonucleotide
ucuaaugagcucgacgucu

SEQ ID NO: 909437 - RNA, 19 nt, Artificial Sequence
  Description of Artificial Sequence: Synthetic oligonucleotide
cuucuuaaguacuuugcuc

SEQ ID NO: 909438 - RNA, 19 nt, Artificial Sequence
  Description of Artificial Sequence: Synthetic oligonucleotide
uaauauggugaugagugcu

SEQ ID NO: 909439 - RNA, 19 nt, Artificial Sequence
  Description of Artificial Sequence: Synthetic oligonucleotide
ucccgcauuuucaugacca

SEQ ID NO: 909440 - RNA, 19 nt, Artificial Sequence
  Description of Artificial Sequence: Synthetic oligonucleotide
uaucaguuccauagguggc

SEQ ID NO: 909441 - RNA, 19 nt, Artificial Sequence
  Description of Artificial Sequence: Synthetic oligonucleotide
ucgguauugaauccaucca

SEQ ID NO: 909442 - RNA, 19 nt, Artificial Sequence
  Description of Artificial Sequence: Synthetic oligonucleotide
gaggcuugacucuaaaguc

SEQ ID NO: 909443 - RNA, 19 nt, Artificial Sequence
  Description of Artificial Sequence: Synthetic oligonucleotide
auaccgauacugcaaacga

SEQ ID NO: 909444 - RNA, 19 nt, Artificial Sequence
  Description of Artificial Sequence: Synthetic oligonucleotide
acauguguugguccgagca

SEQ ID NO: 909445 - RNA, 19 nt, Artificial Sequence
  Description of Artificial Sequence: Synthetic oligonucleotide
ucuuaauauggugaugagu

SEQ ID NO: 909446 - RNA, 19 nt, Artificial Sequence
  Description of Artificial Sequence: Synthetic oligonucleotide
cucucuaaugagcucgacg

SEQ ID NO: 909447 - RNA, 19 nt, Artificial Sequence
  Description of Artificial Sequence: Synthetic oligonucleotide
uugauccuucaucucgccg

SEQ ID NO: 909448 - RNA, 19 nt, Artificial Sequence
  Description of Artificial Sequence: Synthetic oligonucleotide
aacgaagagccucuguuuu

SEQ ID NO: 909449 - RNA, 19 nt, Artificial Sequence
  Description of Artificial Sequence: Synthetic oligonucleotide
aaccuuuucagguuccgua

SEQ ID NO: 909450 - RNA, 19 nt, Artificial Sequence
  Description of Artificial Sequence: Synthetic oligonucleotide
ucggauagaaccaccuccu

SEQ ID NO: 909451 - RNA, 19 nt, Artificial Sequence
  Description of Artificial Sequence: Synthetic oligonucleotide
uauagcuuugacaguuccu

SEQ ID NO: 909452 - RNA, 19 nt, Artificial Sequence
  Description of Artificial Sequence: Synthetic oligonucleotide
ugagaccuggaugugguag

SEQ ID NO: 909453 - RNA, 19 nt, Artificial Sequence
  Description of Artificial Sequence: Synthetic oligonucleotide
uucuuaauauggugaugag

SEQ ID NO: 909454 - RNA, 19 nt, Artificial Sequence
  Description of Artificial Sequence: Synthetic oligonucleotide
gagaccuggaugugguagg

SEQ ID NO: 909455 - RNA, 19 nt, Artificial Sequence
  Description of Artificial Sequence: Synthetic oligonucleotide
aauucggauagaaccaccu

SEQ ID NO: 909456 - RNA, 19 nt, Artificial Sequence
  Description of Artificial Sequence: Synthetic oligonucleotide
ugauaagacacagcagucu

SEQ ID NO: 909457 - RNA, 19 nt, Artificial Sequence
  Description of Artificial Sequence: Synthetic oligonucleotide
uuccguauggaggagguga

SEQ ID NO: 909458 - RNA, 19 nt, Artificial Sequence
  Description of Artificial Sequence: Synthetic oligonucleotide
aaacgaagagccucuguuu

SEQ ID NO: 909459 - RNA, 19 nt, Artificial Sequence
  Description of Artificial Sequence: Synthetic oligonucleotide
acauuucuaugucaaucug

SEQ ID NO: 909460 - RNA, 19 nt, Artificial Sequence
  Description of Artificial Sequence: Synthetic oligonucleotide
uccacauggaggcuugacu

SEQ ID NO: 909461 - RNA, 19 nt, Artificial Sequence
  Description of Artificial Sequence: Synthetic oligonucleotide
cagcgaaagucauggaagg

SEQ ID NO: 909462 - RNA, 19 nt, Artificial Sequence
  Description of Artificial Sequence: Synthetic oligonucleotide
auucggauagaaccaccuc

SEQ ID NO: 909463 - RNA, 19 nt, Artificial Sequence
  Description of Artificial Sequence: Synthetic oligonucleotide
agguuuggcagagcaaagc

SEQ ID NO: 909464 - RNA, 19 nt, Artificial Sequence
  Description of Artificial Sequence: Synthetic oligonucleotide
agcaaacccucaauuaaac

SEQ ID NO: 909465 - RNA, 19 nt, Artificial Sequence
  Description of Artificial Sequence: Synthetic oligonucleotide
cuagcccuaaggcaauucc

SEQ ID NO: 909466 - RNA, 19 nt, Artificial Sequence
  Description of Artificial Sequence: Synthetic oligonucleotide
gaauaucuggcuuaucagu

SEQ ID NO: 909467 - RNA, 19 nt, Artificial Sequence
  Description of Artificial Sequence: Synthetic oligonucleotide
accgauacugcaaacgaag

SEQ ID NO: 909468 - RNA, 19 nt, Artificial Sequence
  Description of Artificial Sequence: Synthetic oligonucleotide
ucuuaaguacuuugcuccu

SEQ ID NO: 909469 - RNA, 19 nt, Artificial Sequence
  Description of Artificial Sequence: Synthetic oligonucleotide
uaccaaaccacaguugggu

SEQ ID NO: 909470 - RNA, 19 nt, Artificial Sequence
  Description of Artificial Sequence: Synthetic oligonucleotide
ugcaaucguaacuucccca

SEQ ID NO: 909471 - RNA, 19 nt, Artificial Sequence
  Description of Artificial Sequence: Synthetic oligonucleotide
guauugaauccauccacac

SEQ ID NO: 909472 - RNA, 19 nt, Artificial Sequence
  Description of Artificial Sequence: Synthetic oligonucleotide
ugggucuggauaaaccccu

SEQ ID NO: 909473 - RNA, 19 nt, Artificial Sequence
  Description of Artificial Sequence: Synthetic oligonucleotide
uugacaguuccuuggggcu

SEQ ID NO: 909474 - RNA, 19 nt, Artificial Sequence
  Description of Artificial Sequence: Synthetic oligonucleotide
agaaaguccuaguggguca

SEQ ID NO: 909475 - RNA, 19 nt, Artificial Sequence
  Description of Artificial Sequence: Synthetic oligonucleotide
ugguccgagcaacaaagcu

SEQ ID NO: 909476 - RNA, 19 nt, Artificial Sequence
  Description of Artificial Sequence: Synthetic oligonucleotide
agagugggaaguccaccac

SEQ ID NO: 909477 - RNA, 19 nt, Artificial Sequence
  Description of Artificial Sequence: Synthetic oligonucleotide
aauauagguaagacuuccu

SEQ ID NO: 909478 - RNA, 19 nt, Artificial Sequence
  Description of Artificial Sequence: Synthetic oligonucleotide
guacuuugcuccuucacga

SEQ ID NO: 909479 - RNA, 19 nt, Artificial Sequence
  Description of Artificial Sequence: Synthetic oligonucleotide
uuggggcuuagccaguaca

SEQ ID NO: 909480 - RNA, 19 nt, Artificial Sequence
  Description of Artificial Sequence: Synthetic oligonucleotide
acauauagcuuugacaguu

SEQ ID NO: 909481 - RNA, 19 nt, Artificial Sequence
  Description of Artificial Sequence: Synthetic oligonucleotide
agaucuaaauaccgauacu

SEQ ID NO: 909482 - RNA, 19 nt, Artificial Sequence
  Description of Artificial Sequence: Synthetic oligonucleotide
uagugggucacauuaccaa

SEQ ID NO: 909483 - RNA, 19 nt, Artificial Sequence
  Description of Artificial Sequence: Synthetic oligonucleotide
gaagaacgcaauucuccac

SEQ ID NO: 909484 - RNA, 19 nt, Artificial Sequence
  Description of Artificial Sequence: Synthetic oligonucleotide
auucccgcauuuucaugac

SEQ ID NO: 909485 - RNA, 19 nt, Artificial Sequence
  Description of Artificial Sequence: Synthetic oligonucleotide
caugugggaccucagccgc

SEQ ID NO: 909486 - RNA, 19 nt, Artificial Sequence
  Description of Artificial Sequence: Synthetic oligonucleotide
caaucucaccagauaacug

SEQ ID NO: 909487 - RNA, 19 nt, Artificial Sequence
  Description of Artificial Sequence: Synthetic oligonucleotide
accaagucguaguguuggc

SEQ ID NO: 909488 - RNA, 19 nt, Artificial Sequence
  Description of Artificial Sequence: Synthetic oligonucleotide
gguggcuagugccucagcg

SEQ ID NO: 909489 - RNA, 19 nt, Artificial Sequence
  Description of Artificial Sequence: Synthetic oligonucleotide
cagguauucaggagcucgg

SEQ ID NO: 909490 - RNA, 19 nt, Artificial Sequence
  Description of Artificial Sequence: Synthetic oligonucleotide
auaaaccccugcauagacg

SEQ ID NO: 909491 - RNA, 19 nt, Artificial Sequence
  Description of Artificial Sequence: Synthetic oligonucleotide
aagcuucgaagaucuaaau

SEQ ID NO: 909492 - RNA, 19 nt, Artificial Sequence
  Description of Artificial Sequence: Synthetic oligonucleotide
gugaaugucacugggguga

SEQ ID NO: 909493 - RNA, 19 nt, Artificial Sequence
  Description of Artificial Sequence: Synthetic oligonucleotide
ucaaucugguuaguuccag

SEQ ID NO: 909494 - RNA, 19 nt, Artificial Sequence
  Description of Artificial Sequence: Synthetic oligonucleotide
ugggucacggaguacuacu

SEQ ID NO: 909495 - RNA, 19 nt, Artificial Sequence
  Description of Artificial Sequence: Synthetic oligonucleotide
acgaagagccucuguuuuc

SEQ ID NO: 909496 - RNA, 19 nt, Artificial Sequence
  Description of Artificial Sequence: Synthetic oligonucleotide
auagaaccaccuccuaccu

SEQ ID NO: 909497 - RNA, 19 nt, Artificial Sequence
  Description of Artificial Sequence: Synthetic oligonucleotide
ccuucacgaacacauauag

SEQ ID NO: 909498 - RNA, 19 nt, Artificial Sequence
  Description of Artificial Sequence: Synthetic oligonucleotide
ucacgaacacauauagcuu

SEQ ID NO: 909499 - RNA, 19 nt, Artificial Sequence
  Description of Artificial Sequence: Synthetic oligonucleotide
uuccuuaguaaggaagagu

SEQ ID NO: 909500 - RNA, 19 nt, Artificial Sequence
  Description of Artificial Sequence: Synthetic oligonucleotide
auuaaacgcugaaugccag

SEQ ID NO: 909501 - RNA, 19 nt, Artificial Sequence
  Description of Artificial Sequence: Synthetic oligonucleotide
uagcccuaaggcaauuccu

SEQ ID NO: 909502 - RNA, 19 nt, Artificial Sequence
  Description of Artificial Sequence: Synthetic oligonucleotide
cucgauaggauuuggggaa

SEQ ID NO: 909503 - RNA, 19 nt, Artificial Sequence
  Description of Artificial Sequence: Synthetic oligonucleotide
aaccccagaucggaugggg

SEQ ID NO: 909504 - RNA, 19 nt, Artificial Sequence
  Description of Artificial Sequence: Synthetic oligonucleotide
uuccgaugggucuggauaa

SEQ ID NO: 909505 - RNA, 19 nt, Artificial Sequence
  Description of Artificial Sequence: Synthetic oligonucleotide
ccagugauaagacacagca

SEQ ID NO: 909506 - RNA, 19 nt, Artificial Sequence
  Description of Artificial Sequence: Synthetic oligonucleotide
cagugauaagacacagcag

SEQ ID NO: 909507 - RNA, 19 nt, Artificial Sequence
  Description of Artificial Sequence: Synthetic oligonucleotide
agcuucgaagaucuaaaua

SEQ ID NO: 909508 - RNA, 19 nt, Artificial Sequence
  Description of Artificial Sequence: Synthetic oligonucleotide
gcgaauaucuggcuuauca

SEQ ID NO: 909509 - RNA, 19 nt, Artificial Sequence
  Description of Artificial Sequence: Synthetic oligonucleotide
guugccagaauguaccucu

SEQ ID NO: 909510 - RNA, 19 nt, Artificial Sequence
  Description of Artificial Sequence: Synthetic oligonucleotide
agugggucacauuaccaaa

SEQ ID NO: 909511 - RNA, 19 nt, Artificial Sequence
  Description of Artificial Sequence: Synthetic oligonucleotide
agguauucaggagcucggc

SEQ ID NO: 909512 - RNA, 19 nt, Artificial Sequence
  Description of Artificial Sequence: Synthetic oligonucleotide
auauucccgcauuuucaug

SEQ ID NO: 909513 - RNA, 19 nt, Artificial Sequence
  Description of Artificial Sequence: Synthetic oligonucleotide
cccaaagcgaauaucuggc

SEQ ID NO: 909514 - RNA, 19 nt, Artificial Sequence
  Description of Artificial Sequence: Synthetic oligonucleotide
uccuucacgaacacauaua

SEQ ID NO: 909515 - RNA, 19 nt, Artificial Sequence
  Description of Artificial Sequence: Synthetic oligonucleotide
agcucgacgucuugccuuc

SEQ ID NO: 909516 - RNA, 19 nt, Artificial Sequence
  Description of Artificial Sequence: Synthetic oligonucleotide
gaauucggauagaaccacc

SEQ ID NO: 909517 - RNA, 19 nt, Artificial Sequence
  Description of Artificial Sequence: Synthetic oligonucleotide
gauccuucaucucgccgug

SEQ ID NO: 909518 - RNA, 19 nt, Artificial Sequence
  Description of Artificial Sequence: Synthetic oligonucleotide
uucaucccaaagcgaauau

SEQ ID NO: 909519 - RNA, 19 nt, Artificial Sequence
  Description of Artificial Sequence: Synthetic oligonucleotide
cuugauccuucaucucgcc

SEQ ID NO: 909520 - RNA, 19 nt, Artificial Sequence
  Description of Artificial Sequence: Synthetic oligonucleotide
uaccgauacugcaaacgaa

SEQ ID NO: 909521 - RNA, 19 nt, Artificial Sequence
  Description of Artificial Sequence: Synthetic oligonucleotide
uugguccgagcaacaaagc

SEQ ID NO: 909522 - RNA, 19 nt, Artificial Sequence
  Description of Artificial Sequence: Synthetic oligonucleotide
guccgagcaacaaagcuac

SEQ ID NO: 909523 - RNA, 19 nt, Artificial Sequence
  Description of Artificial Sequence: Synthetic oligonucleotide
ucggcuguuuuaacuuuga

SEQ ID NO: 909524 - RNA, 19 nt, Artificial Sequence
  Description of Artificial Sequence: Synthetic oligonucleotide
ggccuaagugggaagaacg

SEQ ID NO: 909525 - RNA, 19 nt, Artificial Sequence
  Description of Artificial Sequence: Synthetic oligonucleotide
accuuuucagguuccguau

SEQ ID NO: 909526 - RNA, 19 nt, Artificial Sequence
  Description of Artificial Sequence: Synthetic oligonucleotide
gcagguauucaggagcucg

SEQ ID NO: 909527 - RNA, 19 nt, Artificial Sequence
  Description of Artificial Sequence: Synthetic oligonucleotide
gaauacugcagcaaacccu

SEQ ID NO: 909528 - RNA, 19 nt, Artificial Sequence
  Description of Artificial Sequence: Synthetic oligonucleotide
aggagcaccaugucuuccu

SEQ ID NO: 909529 - RNA, 19 nt, Artificial Sequence
  Description of Artificial Sequence: Synthetic oligonucleotide
aaaccaagucguaguguug

SEQ ID NO: 909530 - RNA, 19 nt, Artificial Sequence
  Description of Artificial Sequence: Synthetic oligonucleotide
ggauauuagguuuggcaga

SEQ ID NO: 909531 - RNA, 19 nt, Artificial Sequence
  Description of Artificial Sequence: Synthetic oligonucleotide
gauuuggggaaggcuauca

SEQ ID NO: 909532 - RNA, 19 nt, Artificial Sequence
  Description of Artificial Sequence: Synthetic oligonucleotide
uccuagugggucacauuac

SEQ ID NO: 909533 - RNA, 19 nt, Artificial Sequence
  Description of Artificial Sequence: Synthetic oligonucleotide
cugcaaucguaacuucccc

SEQ ID NO: 909534 - RNA, 19 nt, Artificial Sequence
  Description of Artificial Sequence: Synthetic oligonucleotide
uaaacuccggcugucuauc

SEQ ID NO: 909535 - RNA, 19 nt, Artificial Sequence
  Description of Artificial Sequence: Synthetic oligonucleotide
ucggauggggagucuuucc

SEQ ID NO: 909536 - RNA, 19 nt, Artificial Sequence
  Description of Artificial Sequence: Synthetic oligonucleotide
ggauagaaccaccuccuac

SEQ ID NO: 909537 - RNA, 19 nt, Artificial Sequence
  Description of Artificial Sequence: Synthetic oligonucleotide
caucucgccguguagauua

SEQ ID NO: 909538 - RNA, 19 nt, Artificial Sequence
  Description of Artificial Sequence: Synthetic oligonucleotide
ugacuauaauggugagcug

SEQ ID NO: 909539 - RNA, 19 nt, Artificial Sequence
  Description of Artificial Sequence: Synthetic oligonucleotide
ggaagaacgcaauucucca

SEQ ID NO: 909540 - RNA, 19 nt, Artificial Sequence
  Description of Artificial Sequence: Synthetic oligonucleotide
auauuagguuuggcagagc

SEQ ID NO: 909541 - RNA, 19 nt, Artificial Sequence
  Description of Artificial Sequence: Synthetic oligonucleotide
uaaugagcucgacgucuug

SEQ ID NO: 909542 - RNA, 19 nt, Artificial Sequence
  Description of Artificial Sequence: Synthetic oligonucleotide
gaaggcuaucacaucucug

SEQ ID NO: 909543 - RNA, 19 nt, Artificial Sequence
  Description of Artificial Sequence: Synthetic oligonucleotide
ggaggcuugacucuaaagu

SEQ ID NO: 909544 - RNA, 19 nt, Artificial Sequence
  Description of Artificial Sequence: Synthetic oligonucleotide
ugcacacugcaaucguaac

SEQ ID NO: 909545 - RNA, 19 nt, Artificial Sequence
  Description of Artificial Sequence: Synthetic oligonucleotide
gaacgcaauucuccacaug

SEQ ID NO: 909546 - RNA, 19 nt, Artificial Sequence
  Description of Artificial Sequence: Synthetic oligonucleotide
uucccgcauuuucaugacc

SEQ ID NO: 909547 - RNA, 19 nt, Artificial Sequence
  Description of Artificial Sequence: Synthetic oligonucleotide
aaacuccggcugucuaucu

SEQ ID NO: 909548 - RNA, 19 nt, Artificial Sequence
  Description of Artificial Sequence: Synthetic oligonucleotide
ggcuuaucaguuccauagg

SEQ ID NO: 909549 - RNA, 19 nt, Artificial Sequence
  Description of Artificial Sequence: Synthetic oligonucleotide
cuagugggucacauuacca

SEQ ID NO: 909550 - RNA, 19 nt, Artificial Sequence
  Description of Artificial Sequence: Synthetic oligonucleotide
cucagcgaaagucauggaa

SEQ ID NO: 909551 - RNA, 19 nt, Artificial Sequence
  Description of Artificial Sequence: Synthetic oligonucleotide
aacccucaauuaaacgcug

SEQ ID NO: 909552 - RNA, 19 nt, Artificial Sequence
  Description of Artificial Sequence: Synthetic oligonucleotide
uucaucucgccguguagau

SEQ ID NO: 909553 - RNA, 19 nt, Artificial Sequence
  Description of Artificial Sequence: Synthetic oligonucleotide
gguuaguuccagucuuucc

SEQ ID NO: 909554 - RNA, 19 nt, Artificial Sequence
  Description of Artificial Sequence: Synthetic oligonucleotide
ggcguuuaggaauauaggu

SEQ ID NO: 909555 - RNA, 19 nt, Artificial Sequence
  Description of Artificial Sequence: Synthetic oligonucleotide
ugccuucgguauugaaucc

SEQ ID NO: 909556 - RNA, 19 nt, Artificial Sequence
  Description of Artificial Sequence: Synthetic oligonucleotide
guaaggaagagugggaagu

SEQ ID NO: 909557 - RNA, 19 nt, Artificial Sequence
  Description of Artificial Sequence: Synthetic oligonucleotide
cacgaaccuuuucagguuc

SEQ ID NO: 909558 - RNA, 19 nt, Artificial Sequence
  Description of Artificial Sequence: Synthetic oligonucleotide
ugaaugucacuggggugag

SEQ ID NO: 909559 - RNA, 19 nt, Artificial Sequence
  Description of Artificial Sequence: Synthetic oligonucleotide
ucauguccucgauaggauu

SEQ ID NO: 909560 - RNA, 19 nt, Artificial Sequence
  Description of Artificial Sequence: Synthetic oligonucleotide
uccguauggaggaggugaa

SEQ ID NO: 909561 - RNA, 19 nt, Artificial Sequence
  Description of Artificial Sequence: Synthetic oligonucleotide
aucggauggggagucuuuc

SEQ ID NO: 909562 - RNA, 19 nt, Artificial Sequence
  Description of Artificial Sequence: Synthetic oligonucleotide
gaguacuacuccucucauc

SEQ ID NO: 909563 - RNA, 19 nt, Artificial Sequence
  Description of Artificial Sequence: Synthetic oligonucleotide
gugccccauagucuaaagc

SEQ ID NO: 909564 - RNA, 19 nt, Artificial Sequence
  Description of Artificial Sequence: Synthetic oligonucleotide
acgaaccuuuucagguucc

SEQ ID NO: 909565 - RNA, 19 nt, Artificial Sequence
  Description of Artificial Sequence: Synthetic oligonucleotide
ccaaaccacaguuggguag

SEQ ID NO: 909566 - RNA, 19 nt, Artificial Sequence
  Description of Artificial Sequence: Synthetic oligonucleotide
agucuaaagccuggagcag

SEQ ID NO: 909567 - RNA, 19 nt, Artificial Sequence
  Description of Artificial Sequence: Synthetic oligonucleotide
ggcuucacauaauaucuuc

SEQ ID NO: 909568 - RNA, 19 nt, Artificial Sequence
  Description of Artificial Sequence: Synthetic oligonucleotide
gaaaguccuagugggucac

SEQ ID NO: 909569 - RNA, 19 nt, Artificial Sequence
  Description of Artificial Sequence: Synthetic oligonucleotide
aggucauguccucgauagg

SEQ ID NO: 909570 - RNA, 19 nt, Artificial Sequence
  Description of Artificial Sequence: Synthetic oligonucleotide
cuaaggcaauuccuccaug

SEQ ID NO: 909571 - RNA, 19 nt, Artificial Sequence
  Description of Artificial Sequence: Synthetic oligonucleotide
guagcugugcaucaugaau

SEQ ID NO: 909572 - RNA, 19 nt, Artificial Sequence
  Description of Artificial Sequence: Synthetic oligonucleotide
gugauaagacacagcaguc

SEQ ID NO: 909573 - RNA, 19 nt, Artificial Sequence
  Description of Artificial Sequence: Synthetic oligonucleotide
ccuagugggucacauuacc

SEQ ID NO: 909574 - RNA, 19 nt, Artificial Sequence
  Description of Artificial Sequence: Synthetic oligonucleotide
caaucguaacuuccccaac

SEQ ID NO: 909575 - RNA, 19 nt, Artificial Sequence
  Description of Artificial Sequence: Synthetic oligonucleotide
ggggaaugauaauuugaac

SEQ ID NO: 909576 - RNA, 19 nt, Artificial Sequence
  Description of Artificial Sequence: Synthetic oligonucleotide
uucggagucuguuggccau

SEQ ID NO: 909577 - RNA, 19 nt, Artificial Sequence
  Description of Artificial Sequence: Synthetic oligonucleotide
ggugaaugucacuggggug

SEQ ID NO: 909578 - RNA, 19 nt, Artificial Sequence
  Description of Artificial Sequence: Synthetic oligonucleotide
cgccguguagauuacaaag

SEQ ID NO: 909579 - RNA, 19 nt, Artificial Sequence
  Description of Artificial Sequence: Synthetic oligonucleotide
cuaccucacagccauuuaa

SEQ ID NO: 909580 - RNA, 19 nt, Artificial Sequence
  Description of Artificial Sequence: Synthetic oligonucleotide
uagaaccaccuccuaccuc

SEQ ID NO: 909581 - RNA, 19 nt, Artificial Sequence
  Description of Artificial Sequence: Synthetic oligonucleotide
ugaguaaacuccggcuguc

SEQ ID NO: 909582 - RNA, 19 nt, Artificial Sequence
  Description of Artificial Sequence: Synthetic oligonucleotide
cgaauaucuggcuuaucag

SEQ ID NO: 909583 - RNA, 19 nt, Artificial Sequence
  Description of Artificial Sequence: Synthetic oligonucleotide
agguuccguauggaggagg

SEQ ID NO: 909584 - RNA, 19 nt, Artificial Sequence
  Description of Artificial Sequence: Synthetic oligonucleotide
ugaaugccagucuggucua

SEQ ID NO: 909585 - RNA, 19 nt, Artificial Sequence
  Description of Artificial Sequence: Synthetic oligonucleotide
uccaucaaucugguuaguu

SEQ ID NO: 909586 - RNA, 19 nt, Artificial Sequence
  Description of Artificial Sequence: Synthetic oligonucleotide
cucuaaugagcucgacguc

SEQ ID NO: 909587 - RNA, 19 nt, Artificial Sequence
  Description of Artificial Sequence: Synthetic oligonucleotide
acgaacacauauagcuuug

SEQ ID NO: 909588 - RNA, 19 nt, Artificial Sequence
  Description of Artificial Sequence: Synthetic oligonucleotide
guccucgauaggauuuggg

SEQ ID NO: 909589 - RNA, 19 nt, Artificial Sequence
  Description of Artificial Sequence: Synthetic oligonucleotide
agguuauacugcauuugga

SEQ ID NO: 909590 - RNA, 19 nt, Artificial Sequence
  Description of Artificial Sequence: Synthetic oligonucleotide
auggggagucuuuccgaug

SEQ ID NO: 909591 - RNA, 19 nt, Artificial Sequence
  Description of Artificial Sequence: Synthetic oligonucleotide
cguuuaggaauauagguaa

SEQ ID NO: 909592 - RNA, 19 nt, Artificial Sequence
  Description of Artificial Sequence: Synthetic oligonucleotide
cucaugaggucauguccuc

SEQ ID NO: 909593 - RNA, 19 nt, Artificial Sequence
  Description of Artificial Sequence: Synthetic oligonucleotide
cuggaugugguaggguuuc

SEQ ID NO: 909594 - RNA, 19 nt, Artificial Sequence
  Description of Artificial Sequence: Synthetic oligonucleotide
gcaaucguaacuuccccaa

SEQ ID NO: 909595 - RNA, 19 nt, Artificial Sequence
  Description of Artificial Sequence: Synthetic oligonucleotide
guaccucuguagcugugca

SEQ ID NO: 909596 - RNA, 19 nt, Artificial Sequence
  Description of Artificial Sequence: Synthetic oligonucleotide
uccuaccucacagccauuu

SEQ ID NO: 909597 - RNA, 19 nt, Artificial Sequence
  Description of Artificial Sequence: Synthetic oligonucleotide
agcgaaagucauggaagga

SEQ ID NO: 909598 - RNA, 19 nt, Artificial Sequence
  Description of Artificial Sequence: Synthetic oligonucleotide
ggaauauagguaagacuuc

SEQ ID NO: 909599 - RNA, 19 nt, Artificial Sequence
  Description of Artificial Sequence: Synthetic oligonucleotide
cacauguguugguccgagc

SEQ ID NO: 909600 - RNA, 19 nt, Artificial Sequence
  Description of Artificial Sequence: Synthetic oligonucleotide
caaacgaagagccucuguu

SEQ ID NO: 909601 - RNA, 19 nt, Artificial Sequence
  Description of Artificial Sequence: Synthetic oligonucleotide
cucgccguguagauuacaa

SEQ ID NO: 909602 - RNA, 19 nt, Artificial Sequence
  Description of Artificial Sequence: Synthetic oligonucleotide
gugguaggguuucagcucu

SEQ ID NO: 909603 - RNA, 19 nt, Artificial Sequence
  Description of Artificial Sequence: Synthetic oligonucleotide
gaaugucacuggggugagg

SEQ ID NO: 909604 - RNA, 19 nt, Artificial Sequence
  Description of Artificial Sequence: Synthetic oligonucleotide
cacgaacacauauagcuuu

SEQ ID NO: 909605 - RNA, 19 nt, Artificial Sequence
  Description of Artificial Sequence: Synthetic oligonucleotide
aaaguccuagugggucaca

SEQ ID NO: 909606 - RNA, 19 nt, Artificial Sequence
  Description of Artificial Sequence: Synthetic oligonucleotide
ccucgauaggauuugggga

SEQ ID NO: 909607 - RNA, 19 nt, Artificial Sequence
  Description of Artificial Sequence: Synthetic oligonucleotide
acuacuccucucaucucca

SEQ ID NO: 909608 - RNA, 19 nt, Artificial Sequence
  Description of Artificial Sequence: Synthetic oligonucleotide
acgcugaaugccagucugg

SEQ ID NO: 909609 - RNA, 19 nt, Artificial Sequence
  Description of Artificial Sequence: Synthetic oligonucleotide
uccacauguguugguccga

SEQ ID NO: 909610 - RNA, 19 nt, Artificial Sequence
  Description of Artificial Sequence: Synthetic oligonucleotide
cgaugggucuggauaaacc

SEQ ID NO: 909611 - RNA, 19 nt, Artificial Sequence
  Description of Artificial Sequence: Synthetic oligonucleotide
acgcaauucuccacaugug

SEQ ID NO: 909612 - RNA, 19 nt, Artificial Sequence
  Description of Artificial Sequence: Synthetic oligonucleotide
ggagagggaaccccagauc

SEQ ID NO: 909613 - RNA, 19 nt, Artificial Sequence
  Description of Artificial Sequence: Synthetic oligonucleotide
cagauaacugucccagaua

SEQ ID NO: 909614 - RNA, 19 nt, Artificial Sequence
  Description of Artificial Sequence: Synthetic oligonucleotide
ggugccccauagucuaaag

SEQ ID NO: 909615 - RNA, 19 nt, Artificial Sequence
  Description of Artificial Sequence: Synthetic oligonucleotide
cucuuggcguuuaggaaua

SEQ ID NO: 909616 - RNA, 19 nt, Artificial Sequence
  Description of Artificial Sequence: Synthetic oligonucleotide
ccugacuauaauggugagc

SEQ ID NO: 909617 - RNA, 19 nt, Artificial Sequence
  Description of Artificial Sequence: Synthetic oligonucleotide
gcaaucucuuaggacuaag

SEQ ID NO: 909618 - RNA, 19 nt, Artificial Sequence
  Description of Artificial Sequence: Synthetic oligonucleotide
cugaguaaacuccggcugu

SEQ ID NO: 909619 - RNA, 19 nt, Artificial Sequence
  Description of Artificial Sequence: Synthetic oligonucleotide
ggagucuuuccgauggguc

SEQ ID NO: 909620 - RNA, 19 nt, Artificial Sequence
  Description of Artificial Sequence: Synthetic oligonucleotide
ccaugagaccuggaugugg

SEQ ID NO: 909621 - RNA, 19 nt, Artificial Sequence
  Description of Artificial Sequence: Synthetic oligonucleotide
gcguuuaggaauauaggua

SEQ ID NO: 909622 - RNA, 19 nt, Artificial Sequence
  Description of Artificial Sequence: Synthetic oligonucleotide
gccguguagauuacaaaga

SEQ ID NO: 909623 - RNA, 19 nt, Artificial Sequence
  Description of Artificial Sequence: Synthetic oligonucleotide
ggauggggagucuuuccga

SEQ ID NO: 909624 - RNA, 19 nt, Artificial Sequence
  Description of Artificial Sequence: Synthetic oligonucleotide
uccgagcaacaaagcuacu

SEQ ID NO: 909625 - RNA, 19 nt, Artificial Sequence
  Description of Artificial Sequence: Synthetic oligonucleotide
gguccgagcaacaaagcua

SEQ ID NO: 909626 - RNA, 19 nt, Artificial Sequence
  Description of Artificial Sequence: Synthetic oligonucleotide
gauaacugucccagauacu

SEQ ID NO: 909627 - RNA, 19 nt, Artificial Sequence
  Description of Artificial Sequence: Synthetic oligonucleotide
gaauggguggugggcugac

SEQ ID NO: 909628 - RNA, 19 nt, Artificial Sequence
  Description of Artificial Sequence: Synthetic oligonucleotide
ucggagucuguuggccaug

SEQ ID NO: 909629 - RNA, 19 nt, Artificial Sequence
  Description of Artificial Sequence: Synthetic oligonucleotide
caaagcgaauaucuggcuu

SEQ ID NO: 909630 - RNA, 19 nt, Artificial Sequence
  Description of Artificial Sequence: Synthetic oligonucleotide
ggauaaaccccugcauaga

SEQ ID NO: 909631 - RNA, 19 nt, Artificial Sequence
  Description of Artificial Sequence: Synthetic oligonucleotide
cuccuucacgaacacauau

SEQ ID NO: 909632 - RNA, 19 nt, Artificial Sequence
  Description of Artificial Sequence: Synthetic oligonucleotide
ucucgccguguagauuaca

SEQ ID NO: 909633 - RNA, 19 nt, Artificial Sequence
  Description of Artificial Sequence: Synthetic oligonucleotide
agaucggauggggagucuu

SEQ ID NO: 909634 - RNA, 19 nt, Artificial Sequence
  Description of Artificial Sequence: Synthetic oligonucleotide
cacauauagcuuugacagu

SEQ ID NO: 909635 - RNA, 19 nt, Artificial Sequence
  Description of Artificial Sequence: Synthetic oligonucleotide
acccucaauuaaacgcuga

SEQ ID NO: 909636 - RNA, 19 nt, Artificial Sequence
  Description of Artificial Sequence: Synthetic oligonucleotide
cagaaucuggggcauugcu

SEQ ID NO: 909637 - RNA, 19 nt, Artificial Sequence
  Description of Artificial Sequence: Synthetic oligonucleotide
uccggcugucuaucugguc

SEQ ID NO: 909638 - RNA, 19 nt, Artificial Sequence
  Description of Artificial Sequence: Synthetic oligonucleotide
gguauucaggagcucggcu

SEQ ID NO: 909639 - RNA, 19 nt, Artificial Sequence
  Description of Artificial Sequence: Synthetic oligonucleotide
aucucgccguguagauuac

SEQ ID NO: 909640 - RNA, 19 nt, Artificial Sequence
  Description of Artificial Sequence: Synthetic oligonucleotide
guuccguauggaggaggug

SEQ ID NO: 909641 - RNA, 19 nt, Artificial Sequence
  Description of Artificial Sequence: Synthetic oligonucleotide
ucguaguguuggccacgaa

SEQ ID NO: 909642 - RNA, 19 nt, Artificial Sequence
  Description of Artificial Sequence: Synthetic oligonucleotide
cacggaguacuacuccucu

SEQ ID NO: 909643 - RNA, 19 nt, Artificial Sequence
  Description of Artificial Sequence: Synthetic oligonucleotide
cuauaauggugagcugcaa

SEQ ID NO: 909644 - RNA, 19 nt, Artificial Sequence
  Description of Artificial Sequence: Synthetic oligonucleotide
ggagcucggcuguuuuaac

SEQ ID NO: 909645 - RNA, 19 nt, Artificial Sequence
  Description of Artificial Sequence: Synthetic oligonucleotide
gcacacugcaaucguaacu

SEQ ID NO: 909646 - RNA, 19 nt, Artificial Sequence
  Description of Artificial Sequence: Synthetic oligonucleotide
cucuaaagucuggcagcuc

SEQ ID NO: 909647 - RNA, 19 nt, Artificial Sequence
  Description of Artificial Sequence: Synthetic oligonucleotide
cuaaugagcucgacgucuu

SEQ ID NO: 909648 - RNA, 19 nt, Artificial Sequence
  Description of Artificial Sequence: Synthetic oligonucleotide
ccgauacugcaaacgaaga

SEQ ID NO: 909649 - RNA, 19 nt, Artificial Sequence
  Description of Artificial Sequence: Synthetic oligonucleotide
cgagcaacaaagcuacuaa

SEQ ID NO: 909650 - RNA, 19 nt, Artificial Sequence
  Description of Artificial Sequence: Synthetic oligonucleotide
ucuuggcguuuaggaauau

SEQ ID NO: 909651 - RNA, 19 nt, Artificial Sequence
  Description of Artificial Sequence: Synthetic oligonucleotide
cagguuccguauggaggag

SEQ ID NO: 909652 - RNA, 19 nt, Artificial Sequence
  Description of Artificial Sequence: Synthetic oligonucleotide
ugguaggguuucagcucuu

SEQ ID NO: 909653 - RNA, 19 nt, Artificial Sequence
  Description of Artificial Sequence: Synthetic oligonucleotide
ccacauguguugguccgag

SEQ ID NO: 909654 - RNA, 19 nt, Artificial Sequence
  Description of Artificial Sequence: Synthetic oligonucleotide
guguugguccgagcaacaa

SEQ ID NO: 909655 - RNA, 19 nt, Artificial Sequence
  Description of Artificial Sequence: Synthetic oligonucleotide
cgaagaucuaaauaccgau

SEQ ID NO: 909656 - RNA, 19 nt, Artificial Sequence
  Description of Artificial Sequence: Synthetic oligonucleotide
cagcucuggauauuagguu

SEQ ID NO: 909657 - RNA, 19 nt, Artificial Sequence
  Description of Artificial Sequence: Synthetic oligonucleotide
ccgcauuuucaugaccaug

SEQ ID NO: 909658 - RNA, 19 nt, Artificial Sequence
  Description of Artificial Sequence: Synthetic oligonucleotide
cuuggcguuuaggaauaua

SEQ ID NO: 909659 - RNA, 19 nt, Artificial Sequence
  Description of Artificial Sequence: Synthetic oligonucleotide
gccuucgguauugaaucca

SEQ ID NO: 909660 - RNA, 19 nt, Artificial Sequence
  Description of Artificial Sequence: Synthetic oligonucleotide
gggucacggaguacuacuc

SEQ ID NO: 909661 - RNA, 19 nt, Artificial Sequence
  Description of Artificial Sequence: Synthetic oligonucleotide
cgucuugccuucuuaagua

SEQ ID NO: 909662 - RNA, 19 nt, Artificial Sequence
  Description of Artificial Sequence: Synthetic oligonucleotide
cccucaauuaaacgcugaa

SEQ ID NO: 909663 - RNA, 19 nt, Artificial Sequence
  Description of Artificial Sequence: Synthetic oligonucleotide
cgauaggauuuggggaagg

SEQ ID NO: 909664 - RNA, 19 nt, Artificial Sequence
  Description of Artificial Sequence: Synthetic oligonucleotide
ggauuuggggaaggcuauc

SEQ ID NO: 909665 - RNA, 19 nt, Artificial Sequence
  Description of Artificial Sequence: Synthetic oligonucleotide
gagcaugcuuucucauguu

SEQ ID NO: 909666 - RNA, 19 nt, Artificial Sequence
  Description of Artificial Sequence: Synthetic oligonucleotide
agggaaccccagaucggau

SEQ ID NO: 909667 - RNA, 19 nt, Artificial Sequence
  Description of Artificial Sequence: Synthetic oligonucleotide
caguuggguagcuucuguu

SEQ ID NO: 909668 - RNA, 19 nt, Artificial Sequence
  Description of Artificial Sequence: Synthetic oligonucleotide
ccguguagauuacaaagau

SEQ ID NO: 909669 - RNA, 19 nt, Artificial Sequence
  Description of Artificial Sequence: Synthetic oligonucleotide
gguuccguauggaggaggu

SEQ ID NO: 909670 - RNA, 19 nt, Artificial Sequence
  Description of Artificial Sequence: Synthetic oligonucleotide
auacugcauuuggaagcuu

SEQ ID NO: 909671 - RNA, 19 nt, Artificial Sequence
  Description of Artificial Sequence: Synthetic oligonucleotide
gccaugagaccuggaugug

SEQ ID NO: 909672 - RNA, 19 nt, Artificial Sequence
  Description of Artificial Sequence: Synthetic oligonucleotide
ggaguacuacuccucucau

SEQ ID NO: 909673 - RNA, 19 nt, Artificial Sequence
  Description of Artificial Sequence: Synthetic oligonucleotide
gaucggauggggagucuuu

SEQ ID NO: 909674 - RNA, 19 nt, Artificial Sequence
  Description of Artificial Sequence: Synthetic oligonucleotide
cgcaauucuccacaugugu

SEQ ID NO: 909675 - RNA, 19 nt, Artificial Sequence
  Description of Artificial Sequence: Synthetic oligonucleotide
ccaaagcgaauaucuggcu

SEQ ID NO: 909676 - RNA, 19 nt, Artificial Sequence
  Description of Artificial Sequence: Synthetic oligonucleotide
ccgagcaacaaagcuacua

SEQ ID NO: 909677 - RNA, 19 nt, Artificial Sequence
  Description of Artificial Sequence: Synthetic oligonucleotide
ccuaaggcaauuccuccau

SEQ ID NO: 909678 - RNA, 19 nt, Artificial Sequence
  Description of Artificial Sequence: Synthetic oligonucleotide
cuccggcugucuaucuggu

SEQ ID NO: 909679 - RNA, 19 nt, Artificial Sequence
  Description of Artificial Sequence: Synthetic oligonucleotide
ccucagccgcagguuauac

SEQ ID NO: 909680 - RNA, 19 nt, Artificial Sequence
  Description of Artificial Sequence: Synthetic oligonucleotide
gggagucuuuccgaugggu

SEQ ID NO: 909681 - RNA, 19 nt, Artificial Sequence
  Description of Artificial Sequence: Synthetic oligonucleotide
ccacaaucuucaucccaaa

SEQ ID NO: 909682 - RNA, 19 nt, Artificial Sequence
  Description of Artificial Sequence: Synthetic oligonucleotide
cccaacaaagagcaugcuu

SEQ ID NO: 909683 - RNA, 19 nt, Artificial Sequence
  Description of Artificial Sequence: Synthetic oligonucleotide
ccucaauuaaacgcugaau

SEQ ID NO: 909684 - RNA, 19 nt, Artificial Sequence
  Description of Artificial Sequence: Synthetic oligonucleotide
ccuucgguauugaauccau

SEQ ID NO: 909685 - RNA, 19 nt, Artificial Sequence
  Description of Artificial Sequence: Synthetic oligonucleotide
cgacgucuugccuucuuaa

SEQ ID NO: 909686 - RNA, 19 nt, Artificial Sequence
  Description of Artificial Sequence: Synthetic oligonucleotide
gggugccccauagucuaaa

SEQ ID NO: 909687 - RNA, 19 nt, Artificial Sequence
  Description of Artificial Sequence: Synthetic oligonucleotide
cugacucauccuggggaau

SEQ ID NO: 909688 - RNA, 19 nt, Artificial Sequence
  Description of Artificial Sequence: Synthetic oligonucleotide
cucgacgucuugccuucuu

SEQ ID NO: 909689 - RNA, 19 nt, Artificial Sequence
  Description of Artificial Sequence: Synthetic oligonucleotide
ccacgaaccuuuucagguu

SEQ ID NO: 909690 - RNA, 19 nt, Artificial Sequence
  Description of Artificial Sequence: Synthetic oligonucleotide
ccgcagguuauacugcauu

SEQ ID NO: 909691 - RNA, 19 nt, Artificial Sequence
  Description of Artificial Sequence: Synthetic oligonucleotide
cccagaucggauggggagu

SEQ ID NO: 909692 - RNA, 19 nt, Artificial Sequence
  Description of Artificial Sequence: Synthetic oligonucleotide
cagaucggauggggagucu

SEQ ID NO: 909693 - RNA, 19 nt, Artificial Sequence
  Description of Artificial Sequence: Synthetic oligonucleotide
cccgcauuuucaugaccau

SEQ ID NO: 909694 - RNA, 19 nt, Artificial Sequence
  Description of Artificial Sequence: Synthetic oligonucleotide
cggagucuguuggccauga

SEQ ID NO: 909695 - RNA, 19 nt, Artificial Sequence
  Description of Artificial Sequence: Synthetic oligonucleotide
ccguauggaggaggugaau

SEQ ID NO: 909696 - RNA, 19 nt, Artificial Sequence
  Description of Artificial Sequence: Synthetic oligonucleotide
gcucgacgucuugccuucu

SEQ ID NO: 909697 - RNA, 19 nt, Artificial Sequence
  Description of Artificial Sequence: Synthetic oligonucleotide
ucuaaaagaaauuugaugu

SEQ ID NO: 909698 - RNA, 19 nt, Artificial Sequence
  Description of Artificial Sequence: Synthetic oligonucleotide
acauuugaggacuaaaugc

SEQ ID NO: 909699 - RNA, 19 nt, Artificial Sequence
  Description of Artificial Sequence: Synthetic oligonucleotide
aaacgguacucauugaccc

SEQ ID NO: 909700 - RNA, 19 nt, Artificial Sequence
  Description of Artificial Sequence: Synthetic oligonucleotide
aaugcugcaagaaugauuc

SEQ ID NO: 909701 - RNA, 19 nt, Artificial Sequence
  Description of Artificial Sequence: Synthetic oligonucleotide
ucuaauaugauagcgaaug

SEQ ID NO: 909702 - RNA, 19 nt, Artificial Sequence
  Description of Artificial Sequence: Synthetic oligonucleotide
uggucaucuaauaugauag

SEQ ID NO: 909703 - RNA, 19 nt, Artificial Sequence
  Description of Artificial Sequence: Synthetic oligonucleotide
uugauauuggaguugaaag

SEQ ID NO: 909704 - RNA, 19 nt, Artificial Sequence
  Description of Artificial Sequence: Synthetic oligonucleotide
aauguuucuccacagaccu

SEQ ID NO: 909705 - RNA, 19 nt, Artificial Sequence
  Description of Artificial Sequence: Synthetic oligonucleotide
aaauucgcaaucuucagca

SEQ ID NO: 909706 - RNA, 19 nt, Artificial Sequence
  Description of Artificial Sequence: Synthetic oligonucleotide
guaauauuucccuagauac

SEQ ID NO: 909707 - RNA, 19 nt, Artificial Sequence
  Description of Artificial Sequence: Synthetic oligonucleotide
aaaccuuuggauaaauucg

SEQ ID NO: 909708 - RNA, 19 nt, Artificial Sequence
  Description of Artificial Sequence: Synthetic oligonucleotide
ugaacuauauucaucaaau

SEQ ID NO: 909709 - RNA, 19 nt, Artificial Sequence
  Description of Artificial Sequence: Synthetic oligonucleotide
aaugcugacacgcugguga

SEQ ID NO: 909710 - RNA, 19 nt, Artificial Sequence
  Description of Artificial Sequence: Synthetic oligonucleotide
uccaaaauuucucagauuu

SEQ ID NO: 909711 - RNA, 19 nt, Artificial Sequence
  Description of Artificial Sequence: Synthetic oligonucleotide
uuuucuaggaaauuacgga

SEQ ID NO: 909712 - RNA, 19 nt, Artificial Sequence
  Description of Artificial Sequence: Synthetic oligonucleotide
aaaacgguacucauugacc

SEQ ID NO: 909713 - RNA, 19 nt, Artificial Sequence
  Description of Artificial Sequence: Synthetic oligonucleotide
aauuacggaaugcugcaag

SEQ ID NO: 909714 - RNA, 19 nt, Artificial Sequence
  Description of Artificial Sequence: Synthetic oligonucleotide
aacgguaauauuucccuag

SEQ ID NO: 909715 - RNA, 19 nt, Artificial Sequence
  Description of Artificial Sequence: Synthetic oligonucleotide
aaguaacgguaauauuucc

SEQ ID NO: 909716 - RNA, 19 nt, Artificial Sequence
  Description of Artificial Sequence: Synthetic oligonucleotide
caucaaaugagcuaagguc

SEQ ID NO: 909717 - RNA, 19 nt, Artificial Sequence
  Description of Artificial Sequence: Synthetic oligonucleotide
aaccuuuggauaaauucgc

SEQ ID NO: 909718 - RNA, 19 nt, Artificial Sequence
  Description of Artificial Sequence: Synthetic oligonucleotide
ucaucuaauaugauagcga

SEQ ID NO: 909719 - RNA, 19 nt, Artificial Sequence
  Description of Artificial Sequence: Synthetic oligonucleotide
caaaacgcccauuauacag

SEQ ID NO: 909720 - RNA, 19 nt, Artificial Sequence
  Description of Artificial Sequence: Synthetic oligonucleotide
agaaaguauggccaggcag

SEQ ID NO: 909721 - RNA, 19 nt, Artificial Sequence
  Description of Artificial Sequence: Synthetic oligonucleotide
uaaauucgcaaucuucagc

SEQ ID NO: 909722 - RNA, 19 nt, Artificial Sequence
  Description of Artificial Sequence: Synthetic oligonucleotide
uuuaccccgaggauaaugc

SEQ ID NO: 909723 - RNA, 19 nt, Artificial Sequence
  Description of Artificial Sequence: Synthetic oligonucleotide
aauuuaagucacugccuuc

SEQ ID NO: 909724 - RNA, 19 nt, Artificial Sequence
  Description of Artificial Sequence: Synthetic oligonucleotide
cucuauaacccguuuaccc

SEQ ID NO: 909725 - RNA, 19 nt, Artificial Sequence
  Description of Artificial Sequence: Synthetic oligonucleotide
gauaaauucgcaaucuuca

SEQ ID NO: 909726 - RNA, 19 nt, Artificial Sequence
  Description of Artificial Sequence: Synthetic oligonucleotide
uaaguaacgguaauauuuc

SEQ ID NO: 909727 - RNA, 19 nt, Artificial Sequence
  Description of Artificial Sequence: Synthetic oligonucleotide
uuuggauaaauucgcaauc

SEQ ID NO: 909728 - RNA, 19 nt, Artificial Sequence
  Description of Artificial Sequence: Synthetic oligonucleotide
guuaguauguacugcacug

SEQ ID NO: 909729 - RNA, 19 nt, Artificial Sequence
  Description of Artificial Sequence: Synthetic oligonucleotide
aauaugauagcgaauguuu

SEQ ID NO: 909730 - RNA, 19 nt, Artificial Sequence
  Description of Artificial Sequence: Synthetic oligonucleotide
agucugaagcaucucuugc

SEQ ID NO: 909731 - RNA, 19 nt, Artificial Sequence
  Description of Artificial Sequence: Synthetic oligonucleotide
aguaacgguaauauuuccc

SEQ ID NO: 909732 - RNA, 19 nt, Artificial Sequence
  Description of Artificial Sequence: Synthetic oligonucleotide
aaugauauuguagcggcga

SEQ ID NO: 909733 - RNA, 19 nt, Artificial Sequence
  Description of Artificial Sequence: Synthetic oligonucleotide
aacuucggcagccuuagcu

SEQ ID NO: 909734 - RNA, 19 nt, Artificial Sequence
  Description of Artificial Sequence: Synthetic oligonucleotide
uacaguucaccccaucugc

SEQ ID NO: 909735 - RNA, 19 nt, Artificial Sequence
  Description of Artificial Sequence: Synthetic oligonucleotide
uauaaauguuuuagcacac

SEQ ID NO: 909736 - RNA, 19 nt, Artificial Sequence
  Description of Artificial Sequence: Synthetic oligonucleotide
cacuuguuacucaaaacgc

SEQ ID NO: 909737 - RNA, 19 nt, Artificial Sequence
  Description of Artificial Sequence: Synthetic oligonucleotide
aggaauuaccacuacaaaa

SEQ ID NO: 909738 - RNA, 19 nt, Artificial Sequence
  Description of Artificial Sequence: Synthetic oligonucleotide
uauaagcaauguaaguaac

SEQ ID NO: 909739 - RNA, 19 nt, Artificial Sequence
  Description of Artificial Sequence: Synthetic oligonucleotide
uauuucccuagauacagac

SEQ ID NO: 909740 - RNA, 19 nt, Artificial Sequence
  Description of Artificial Sequence: Synthetic oligonucleotide
auaaauucgcaaucuucag

SEQ ID NO: 909741 - RNA, 19 nt, Artificial Sequence
  Description of Artificial Sequence: Synthetic oligonucleotide
gucaucuaauaugauagcg

SEQ ID NO: 909742 - RNA, 19 nt, Artificial Sequence
  Description of Artificial Sequence: Synthetic oligonucleotide
ucaacauuggcagaaagua

SEQ ID NO: 909743 - RNA, 19 nt, Artificial Sequence
  Description of Artificial Sequence: Synthetic oligonucleotide
ugcucuauaacccguuuac

SEQ ID NO: 909744 - RNA, 19 nt, Artificial Sequence
  Description of Artificial Sequence: Synthetic oligonucleotide
uguuacuuucucuuugaca

SEQ ID NO: 909745 - RNA, 19 nt, Artificial Sequence
  Description of Artificial Sequence: Synthetic oligonucleotide
uaauuuaagucacugccuu

SEQ ID NO: 909746 - RNA, 19 nt, Artificial Sequence
  Description of Artificial Sequence: Synthetic oligonucleotide
auagcgaauguuucuccac

SEQ ID NO: 909747 - RNA, 19 nt, Artificial Sequence
  Description of Artificial Sequence: Synthetic oligonucleotide
gagguucucacuccagugg

SEQ ID NO: 909748 - RNA, 19 nt, Artificial Sequence
  Description of Artificial Sequence: Synthetic oligonucleotide
ucagcugaguuuuaaucca

SEQ ID NO: 909749 - RNA, 19 nt, Artificial Sequence
  Description of Artificial Sequence: Synthetic oligonucleotide
uggcgauucaacauuggca

SEQ ID NO: 909750 - RNA, 19 nt, Artificial Sequence
  Description of Artificial Sequence: Synthetic oligonucleotide
ggcgauucaacauuggcag

SEQ ID NO: 909751 - RNA, 19 nt, Artificial Sequence
  Description of Artificial Sequence: Synthetic oligonucleotide
ugacccuaaggacugaggu

SEQ ID NO: 909752 - RNA, 19 nt, Artificial Sequence
  Description of Artificial Sequence: Synthetic oligonucleotide
cuuguggaucaucugauac

SEQ ID NO: 909753 - RNA, 19 nt, Artificial Sequence
  Description of Artificial Sequence: Synthetic oligonucleotide
uaccccgaggauaaugccg

SEQ ID NO: 909754 - RNA, 19 nt, Artificial Sequence
  Description of Artificial Sequence: Synthetic oligonucleotide
accgcuaccacgaaguuuc

SEQ ID NO: 909755 - RNA, 19 nt, Artificial Sequence
  Description of Artificial Sequence: Synthetic oligonucleotide
ugcagcauaucaucaacca

SEQ ID NO: 909756 - RNA, 19 nt, Artificial Sequence
  Description of Artificial Sequence: Synthetic oligonucleotide
uauuguagcggcgaaggug

SEQ ID NO: 909757 - RNA, 19 nt, Artificial Sequence
  Description of Artificial Sequence: Synthetic oligonucleotide
aagcaauguaaguaacggu

SEQ ID NO: 909758 - RNA, 19 nt, Artificial Sequence
  Description of Artificial Sequence: Synthetic oligonucleotide
uguacaggacuccauucca

SEQ ID NO: 909759 - RNA, 19 nt, Artificial Sequence
  Description of Artificial Sequence: Synthetic oligonucleotide
aguauggccaggcagugcu

SEQ ID NO: 909760 - RNA, 19 nt, Artificial Sequence
  Description of Artificial Sequence: Synthetic oligonucleotide
ucugauaccucuagaaguu

SEQ ID NO: 909761 - RNA, 19 nt, Artificial Sequence
  Description of Artificial Sequence: Synthetic oligonucleotide
agacuuguggaucaucuga

SEQ ID NO: 909762 - RNA, 19 nt, Artificial Sequence
  Description of Artificial Sequence: Synthetic oligonucleotide
ucuagaaguuuugucaaga

SEQ ID NO: 909763 - RNA, 19 nt, Artificial Sequence
  Description of Artificial Sequence: Synthetic oligonucleotide
caaaacgguacucauugac

SEQ ID NO: 909764 - RNA, 19 nt, Artificial Sequence
  Description of Artificial Sequence: Synthetic oligonucleotide
ggcaaaacgguacucauug

SEQ ID NO: 909765 - RNA, 19 nt, Artificial Sequence
  Description of Artificial Sequence: Synthetic oligonucleotide
acccuaaggacugagguuc

SEQ ID NO: 909766 - RNA, 19 nt, Artificial Sequence
  Description of Artificial Sequence: Synthetic oligonucleotide
ucgaauguccauuuugguc

SEQ ID NO: 909767 - RNA, 19 nt, Artificial Sequence
  Description of Artificial Sequence: Synthetic oligonucleotide
aauucgcaaucuucagcag

SEQ ID NO: 909768 - RNA, 19 nt, Artificial Sequence
  Description of Artificial Sequence: Synthetic oligonucleotide
cuaucacuugaagagauug

SEQ ID NO: 909769 - RNA, 19 nt, Artificial Sequence
  Description of Artificial Sequence: Synthetic oligonucleotide
cuuccacccaggcaaaacg

SEQ ID NO: 909770 - RNA, 19 nt, Artificial Sequence
  Description of Artificial Sequence: Synthetic oligonucleotide
gagacccggagcaaaagcg

SEQ ID NO: 909771 - RNA, 19 nt, Artificial Sequence
  Description of Artificial Sequence: Synthetic oligonucleotide
agcaccuacuuuuauacaa

SEQ ID NO: 909772 - RNA, 19 nt, Artificial Sequence
  Description of Artificial Sequence: Synthetic oligonucleotide
caguuuacuuuguuggccc

SEQ ID NO: 909773 - RNA, 19 nt, Artificial Sequence
  Description of Artificial Sequence: Synthetic oligonucleotide
caggaaugauauuguagcg

SEQ ID NO: 909774 - RNA, 19 nt, Artificial Sequence
  Description of Artificial Sequence: Synthetic oligonucleotide
uucgcaaucuucagcagaa

SEQ ID NO: 909775 - RNA, 19 nt, Artificial Sequence
  Description of Artificial Sequence: Synthetic oligonucleotide
acgcccauuauacaguuca

SEQ ID NO: 909776 - RNA, 19 nt, Artificial Sequence
  Description of Artificial Sequence: Synthetic oligonucleotide
ggaaauuacggaaugcugc

SEQ ID NO: 909777 - RNA, 19 nt, Artificial Sequence
  Description of Artificial Sequence: Synthetic oligonucleotide
augauagcgaauguuucuc

SEQ ID NO: 909778 - RNA, 19 nt, Artificial Sequence
  Description of Artificial Sequence: Synthetic oligonucleotide
aagacuuguggaucaucug

SEQ ID NO: 909779 - RNA, 19 nt, Artificial Sequence
  Description of Artificial Sequence: Synthetic oligonucleotide
aucggaggugcagaaaagc

SEQ ID NO: 909780 - RNA, 19 nt, Artificial Sequence
  Description of Artificial Sequence: Synthetic oligonucleotide
uccauuccaaccuuccaga

SEQ ID NO: 909781 - RNA, 19 nt, Artificial Sequence
  Description of Artificial Sequence: Synthetic oligonucleotide
ucaugaugcaugugguuca

SEQ ID NO: 909782 - RNA, 19 nt, Artificial Sequence
  Description of Artificial Sequence: Synthetic oligonucleotide
ccuagauacagacagcacc

SEQ ID NO: 909783 - RNA, 19 nt, Artificial Sequence
  Description of Artificial Sequence: Synthetic oligonucleotide
uuggauaaauucgcaaucu

SEQ ID NO: 909784 - RNA, 19 nt, Artificial Sequence
  Description of Artificial Sequence: Synthetic oligonucleotide
cucagauuuguguacagga

SEQ ID NO: 909785 - RNA, 19 nt, Artificial Sequence
  Description of Artificial Sequence: Synthetic oligonucleotide
uaucacuugaagagauugu

SEQ ID NO: 909786 - RNA, 19 nt, Artificial Sequence
  Description of Artificial Sequence: Synthetic oligonucleotide
aacaccgcuaccacgaagu

SEQ ID NO: 909787 - RNA, 19 nt, Artificial Sequence
  Description of Artificial Sequence: Synthetic oligonucleotide
uugacagauucuugaagga

SEQ ID NO: 909788 - RNA, 19 nt, Artificial Sequence
  Description of Artificial Sequence: Synthetic oligonucleotide
ucaagauuuucaagaguuc

SEQ ID NO: 909789 - RNA, 19 nt, Artificial Sequence
  Description of Artificial Sequence: Synthetic oligonucleotide
aucaaccaugguuaguaug

SEQ ID NO: 909790 - RNA, 19 nt, Artificial Sequence
  Description of Artificial Sequence: Synthetic oligonucleotide
ccauaugaacaguaaaggg

SEQ ID NO: 909791 - RNA, 19 nt, Artificial Sequence
  Description of Artificial Sequence: Synthetic oligonucleotide
ugauagcgaauguuucucc

SEQ ID NO: 909792 - RNA, 19 nt, Artificial Sequence
  Description of Artificial Sequence: Synthetic oligonucleotide
augagcuaagguccuggac

SEQ ID NO: 909793 - RNA, 19 nt, Artificial Sequence
  Description of Artificial Sequence: Synthetic oligonucleotide
aaugagcuaagguccugga

SEQ ID NO: 909794 - RNA, 19 nt, Artificial Sequence
  Description of Artificial Sequence: Synthetic oligonucleotide
aaaacgcccauuauacagu

SEQ ID NO: 909795 - RNA, 19 nt, Artificial Sequence
  Description of Artificial Sequence: Synthetic oligonucleotide
guuaguugggacugcagca

SEQ ID NO: 909796 - RNA, 19 nt, Artificial Sequence
  Description of Artificial Sequence: Synthetic oligonucleotide
aguuuacuuuguuggcccg

SEQ ID NO: 909797 - RNA, 19 nt, Artificial Sequence
  Description of Artificial Sequence: Synthetic oligonucleotide
acucaaaacgcccauuaua

SEQ ID NO: 909798 - RNA, 19 nt, Artificial Sequence
  Description of Artificial Sequence: Synthetic oligonucleotide
accucgaauguccauuuug

SEQ ID NO: 909799 - RNA, 19 nt, Artificial Sequence
  Description of Artificial Sequence: Synthetic oligonucleotide
caucuaauaugauagcgaa

SEQ ID NO: 909800 - RNA, 19 nt, Artificial Sequence
  Description of Artificial Sequence: Synthetic oligonucleotide
auuacggaaugcugcaaga

SEQ ID NO: 909801 - RNA, 19 nt, Artificial Sequence
  Description of Artificial Sequence: Synthetic oligonucleotide
ucacgggagacccggagca

SEQ ID NO: 909802 - RNA, 19 nt, Artificial Sequence
  Description of Artificial Sequence: Synthetic oligonucleotide
gauagcgaauguuucucca

SEQ ID NO: 909803 - RNA, 19 nt, Artificial Sequence
  Description of Artificial Sequence: Synthetic oligonucleotide
ucccuagauacagacagca

SEQ ID NO: 909804 - RNA, 19 nt, Artificial Sequence
  Description of Artificial Sequence: Synthetic oligonucleotide
cagauuuaagcucugaacu

SEQ ID NO: 909805 - RNA, 19 nt, Artificial Sequence
  Description of Artificial Sequence: Synthetic oligonucleotide
ucaaaacgcccauuauaca

SEQ ID NO: 909806 - RNA, 19 nt, Artificial Sequence
  Description of Artificial Sequence: Synthetic oligonucleotide
auucgcaaucuucagcaga

SEQ ID NO: 909807 - RNA, 19 nt, Artificial Sequence
  Description of Artificial Sequence: Synthetic oligonucleotide
ucaguugcagacagccagc

SEQ ID NO: 909808 - RNA, 19 nt, Artificial Sequence
  Description of Artificial Sequence: Synthetic oligonucleotide
agcaauguaaguaacggua

SEQ ID NO: 909809 - RNA, 19 nt, Artificial Sequence
  Description of Artificial Sequence: Synthetic oligonucleotide
augauguuaguugggacug

SEQ ID NO: 909810 - RNA, 19 nt, Artificial Sequence
  Description of Artificial Sequence: Synthetic oligonucleotide
agagcauuguagcggaccu

SEQ ID NO: 909811 - RNA, 19 nt, Artificial Sequence
  Description of Artificial Sequence: Synthetic oligonucleotide
auuguagcggcgaaggugu

SEQ ID NO: 909812 - RNA, 19 nt, Artificial Sequence
  Description of Artificial Sequence: Synthetic oligonucleotide
aggauaaugccgaacauau

SEQ ID NO: 909813 - RNA, 19 nt, Artificial Sequence
  Description of Artificial Sequence: Synthetic oligonucleotide
ugcuaacuuggcaauaauu

SEQ ID NO: 909814 - RNA, 19 nt, Artificial Sequence
  Description of Artificial Sequence: Synthetic oligonucleotide
guacucauugacccggagc

SEQ ID NO: 909815 - RNA, 19 nt, Artificial Sequence
  Description of Artificial Sequence: Synthetic oligonucleotide
gaaugauauuguagcggcg

SEQ ID NO: 909816 - RNA, 19 nt, Artificial Sequence
  Description of Artificial Sequence: Synthetic oligonucleotide
uaguauguacugcacuguc

SEQ ID NO: 909817 - RNA, 19 nt, Artificial Sequence
  Description of Artificial Sequence: Synthetic oligonucleotide
caugguuaguauguacugc

SEQ ID NO: 909818 - RNA, 19 nt, Artificial Sequence
  Description of Artificial Sequence: Synthetic oligonucleotide
uacggaaugcugcaagaau

SEQ ID NO: 909819 - RNA, 19 nt, Artificial Sequence
  Description of Artificial Sequence: Synthetic oligonucleotide
agcgaauguuucuccacag

SEQ ID NO: 909820 - RNA, 19 nt, Artificial Sequence
  Description of Artificial Sequence: Synthetic oligonucleotide
acgaaguuucugugaacuc

SEQ ID NO: 909821 - RNA, 19 nt, Artificial Sequence
  Description of Artificial Sequence: Synthetic oligonucleotide
guaacgguaauauuucccu

SEQ ID NO: 909822 - RNA, 19 nt, Artificial Sequence
  Description of Artificial Sequence: Synthetic oligonucleotide
uaacccguuuaccccgagg

SEQ ID NO: 909823 - RNA, 19 nt, Artificial Sequence
  Description of Artificial Sequence: Synthetic oligonucleotide
gcuaacuuggcaauaauuc

SEQ ID NO: 909824 - RNA, 19 nt, Artificial Sequence
  Description of Artificial Sequence: Synthetic oligonucleotide
uuaguauguacugcacugu

SEQ ID NO: 909825 - RNA, 19 nt, Artificial Sequence
  Description of Artificial Sequence: Synthetic oligonucleotide
uaaugccgaacauauucuc

SEQ ID NO: 909826 - RNA, 19 nt, Artificial Sequence
  Description of Artificial Sequence: Synthetic oligonucleotide
uguuacucaaaacgcccau

SEQ ID NO: 909827 - RNA, 19 nt, Artificial Sequence
  Description of Artificial Sequence: Synthetic oligonucleotide
cuggcgauucaacauuggc

SEQ ID NO: 909828 - RNA, 19 nt, Artificial Sequence
  Description of Artificial Sequence: Synthetic oligonucleotide
aacucagcugaguuuuaau

SEQ ID NO: 909829 - RNA, 19 nt, Artificial Sequence
  Description of Artificial Sequence: Synthetic oligonucleotide
uggcagaaaguauggccag

SEQ ID NO: 909830 - RNA, 19 nt, Artificial Sequence
  Description of Artificial Sequence: Synthetic oligonucleotide
aaacgcccauuauacaguu

SEQ ID NO: 909831 - RNA, 19 nt, Artificial Sequence
  Description of Artificial Sequence: Synthetic oligonucleotide
ugauaccucuagaaguuuu

SEQ ID NO: 909832 - RNA, 19 nt, Artificial Sequence
  Description of Artificial Sequence: Synthetic oligonucleotide
uccuggcgauucaacauug

SEQ ID NO: 909833 - RNA, 19 nt, Artificial Sequence
  Description of Artificial Sequence: Synthetic oligonucleotide
uuugacccuaaggacugag

SEQ ID NO: 909834 - RNA, 19 nt, Artificial Sequence
  Description of Artificial Sequence: Synthetic oligonucleotide
cucauucaaccucacagca

SEQ ID NO: 909835 - RNA, 19 nt, Artificial Sequence
  Description of Artificial Sequence: Synthetic oligonucleotide
gacccggagcaucaguugc

SEQ ID NO: 909836 - RNA, 19 nt, Artificial Sequence
  Description of Artificial Sequence: Synthetic oligonucleotide
uggauaaauucgcaaucuu

SEQ ID NO: 909837 - RNA, 19 nt, Artificial Sequence
  Description of Artificial Sequence: Synthetic oligonucleotide
gguaauauuucccuagaua

SEQ ID NO: 909838 - RNA, 19 nt, Artificial Sequence
  Description of Artificial Sequence: Synthetic oligonucleotide
acgguacucauugacccgg

SEQ ID NO: 909839 - RNA, 19 nt, Artificial Sequence
  Description of Artificial Sequence: Synthetic oligonucleotide
uuggcccgaacuucggcag

SEQ ID NO: 909840 - RNA, 19 nt, Artificial Sequence
  Description of Artificial Sequence: Synthetic oligonucleotide
aggaaauuacggaaugcug

SEQ ID NO: 909841 - RNA, 19 nt, Artificial Sequence
  Description of Artificial Sequence: Synthetic oligonucleotide
uggcgaguuucucuuucag

SEQ ID NO: 909842 - RNA, 19 nt, Artificial Sequence
  Description of Artificial Sequence: Synthetic oligonucleotide
cuagauacagacagcaccu

SEQ ID NO: 909843 - RNA, 19 nt, Artificial Sequence
  Description of Artificial Sequence: Synthetic oligonucleotide
cugaacuauauucaucaaa

SEQ ID NO: 909844 - RNA, 19 nt, Artificial Sequence
  Description of Artificial Sequence: Synthetic oligonucleotide
cuaacuuggcaauaauucu

SEQ ID NO: 909845 - RNA, 19 nt, Artificial Sequence
  Description of Artificial Sequence: Synthetic oligonucleotide
gaguugaaagccacacuug

SEQ ID NO: 909846 - RNA, 19 nt, Artificial Sequence
  Description of Artificial Sequence: Synthetic oligonucleotide
uuaccccgaggauaaugcc

SEQ ID NO: 909847 - RNA, 19 nt, Artificial Sequence
  Description of Artificial Sequence: Synthetic oligonucleotide
acagauucuugaaggaugu

SEQ ID NO: 909848 - RNA, 19 nt, Artificial Sequence
  Description of Artificial Sequence: Synthetic oligonucleotide
cuaccacgaaguuucugug

SEQ ID NO: 909849 - RNA, 19 nt, Artificial Sequence
  Description of Artificial Sequence: Synthetic oligonucleotide
uguuggcccgaacuucggc

SEQ ID NO: 909850 - RNA, 19 nt, Artificial Sequence
  Description of Artificial Sequence: Synthetic oligonucleotide
ccauuauacaguucacccc

SEQ ID NO: 909851 - RNA, 19 nt, Artificial Sequence
  Description of Artificial Sequence: Synthetic oligonucleotide
uugacccggagcaucaguu

SEQ ID NO: 909852 - RNA, 19 nt, Artificial Sequence
  Description of Artificial Sequence: Synthetic oligonucleotide
agguaagacugccaguuua

SEQ ID NO: 909853 - RNA, 19 nt, Artificial Sequence
  Description of Artificial Sequence: Synthetic oligonucleotide
acgguaauauuucccuaga

SEQ ID NO: 909854 - RNA, 19 nt, Artificial Sequence
  Description of Artificial Sequence: Synthetic oligonucleotide
agcaacaccgcuaccacga

SEQ ID NO: 909855 - RNA, 19 nt, Artificial Sequence
  Description of Artificial Sequence: Synthetic oligonucleotide
uuguuggcccgaacuucgg

SEQ ID NO: 909856 - RNA, 19 nt, Artificial Sequence
  Description of Artificial Sequence: Synthetic oligonucleotide
gcaucaguugcagacagcc

SEQ ID NO: 909857 - RNA, 19 nt, Artificial Sequence
  Description of Artificial Sequence: Synthetic oligonucleotide
ggacuaaaugccaggagcc

SEQ ID NO: 909858 - RNA, 19 nt, Artificial Sequence
  Description of Artificial Sequence: Synthetic oligonucleotide
uuaguugggacugcagcau

SEQ ID NO: 909859 - RNA, 19 nt, Artificial Sequence
  Description of Artificial Sequence: Synthetic oligonucleotide
caaaagcgaagacgacucc

SEQ ID NO: 909860 - RNA, 19 nt, Artificial Sequence
  Description of Artificial Sequence: Synthetic oligonucleotide
auuugaggacuaaaugcca

SEQ ID NO: 909861 - RNA, 19 nt, Artificial Sequence
  Description of Artificial Sequence: Synthetic oligonucleotide
acacauuugaggacuaaau

SEQ ID NO: 909862 - RNA, 19 nt, Artificial Sequence
  Description of Artificial Sequence: Synthetic oligonucleotide
ggauaaauucgcaaucuuc

SEQ ID NO: 909863 - RNA, 19 nt, Artificial Sequence
  Description of Artificial Sequence: Synthetic oligonucleotide
cagagcauuguagcggacc

SEQ ID NO: 909864 - RNA, 19 nt, Artificial Sequence
  Description of Artificial Sequence: Synthetic oligonucleotide
auauuguagcggcgaaggu

SEQ ID NO: 909865 - RNA, 19 nt, Artificial Sequence
  Description of Artificial Sequence: Synthetic oligonucleotide
gacagcaccuacuuuuaua

SEQ ID NO: 909866 - RNA, 19 nt, Artificial Sequence
  Description of Artificial Sequence: Synthetic oligonucleotide
ugcacauacugagaacuau

SEQ ID NO: 909867 - RNA, 19 nt, Artificial Sequence
  Description of Artificial Sequence: Synthetic oligonucleotide
guuuaccccgaggauaaug

SEQ ID NO: 909868 - RNA, 19 nt, Artificial Sequence
  Description of Artificial Sequence: Synthetic oligonucleotide
uaacgguaauauuucccua

SEQ ID NO: 909869 - RNA, 19 nt, Artificial Sequence
  Description of Artificial Sequence: Synthetic oligonucleotide
uuacggaaugcugcaagaa

SEQ ID NO: 909870 - RNA, 19 nt, Artificial Sequence
  Description of Artificial Sequence: Synthetic oligonucleotide
caucggaggugcagaaaag

SEQ ID NO: 909871 - RNA, 19 nt, Artificial Sequence
  Description of Artificial Sequence: Synthetic oligonucleotide
ugacccggagcaucaguug

SEQ ID NO: 909872 - RNA, 19 nt, Artificial Sequence
  Description of Artificial Sequence: Synthetic oligonucleotide
aaauuacggaaugcugcaa

SEQ ID NO: 909873 - RNA, 19 nt, Artificial Sequence
  Description of Artificial Sequence: Synthetic oligonucleotide
gucaagauuuucaagaguu

SEQ ID NO: 909874 - RNA, 19 nt, Artificial Sequence
  Description of Artificial Sequence: Synthetic oligonucleotide
gauguuaguugggacugca

SEQ ID NO: 909875 - RNA, 19 nt, Artificial Sequence
  Description of Artificial Sequence: Synthetic oligonucleotide
uuggcgaguuucucuuuca

SEQ ID NO: 909876 - RNA, 19 nt, Artificial Sequence
  Description of Artificial Sequence: Synthetic oligonucleotide
aguauguacugcacugucu

SEQ ID NO: 909877 - RNA, 19 nt, Artificial Sequence
  Description of Artificial Sequence: Synthetic oligonucleotide
ggucaucuaauaugauagc

SEQ ID NO: 909878 - RNA, 19 nt, Artificial Sequence
  Description of Artificial Sequence: Synthetic oligonucleotide
gauuuaagcucugaacuau

SEQ ID NO: 909879 - RNA, 19 nt, Artificial Sequence
  Description of Artificial Sequence: Synthetic oligonucleotide
gauacagacagcaccuacu

SEQ ID NO: 909880 - RNA, 19 nt, Artificial Sequence
  Description of Artificial Sequence: Synthetic oligonucleotide
uggacugccgcggggacgc

SEQ ID NO: 909881 - RNA, 19 nt, Artificial Sequence
  Description of Artificial Sequence: Synthetic oligonucleotide
gaggauaaugccgaacaua

SEQ ID NO: 909882 - RNA, 19 nt, Artificial Sequence
  Description of Artificial Sequence: Synthetic oligonucleotide
guaauuuaagucacugccu

SEQ ID NO: 909883 - RNA, 19 nt, Artificial Sequence
  Description of Artificial Sequence: Synthetic oligonucleotide
cuuggcaauaauucuugcu

SEQ ID NO: 909884 - RNA, 19 nt, Artificial Sequence
  Description of Artificial Sequence: Synthetic oligonucleotide
auccuggcgauucaacauu

SEQ ID NO: 909885 - RNA, 19 nt, Artificial Sequence
  Description of Artificial Sequence: Synthetic oligonucleotide
uuggagugagaauccuuua

SEQ ID NO: 909886 - RNA, 19 nt, Artificial Sequence
  Description of Artificial Sequence: Synthetic oligonucleotide
aggucagcucagcuccggg

SEQ ID NO: 909887 - RNA, 19 nt, Artificial Sequence
  Description of Artificial Sequence: Synthetic oligonucleotide
ggagacccggagcaaaagc

SEQ ID NO: 909888 - RNA, 19 nt, Artificial Sequence
  Description of Artificial Sequence: Synthetic oligonucleotide
agaccuggacugccgcggg

SEQ ID NO: 909889 - RNA, 19 nt, Artificial Sequence
  Description of Artificial Sequence: Synthetic oligonucleotide
ccuguuucaacagcaacac

SEQ ID NO: 909890 - RNA, 19 nt, Artificial Sequence
  Description of Artificial Sequence: Synthetic oligonucleotide
ccaaaauuucucagauuug

SEQ ID NO: 909891 - RNA, 19 nt, Artificial Sequence
  Description of Artificial Sequence: Synthetic oligonucleotide
aacgcccauuauacaguuc

SEQ ID NO: 909892 - RNA, 19 nt, Artificial Sequence
  Description of Artificial Sequence: Synthetic oligonucleotide
ggaguugaaagccacacuu

SEQ ID NO: 909893 - RNA, 19 nt, Artificial Sequence
  Description of Artificial Sequence: Synthetic oligonucleotide
guagcggcgaagguguuca

SEQ ID NO: 909894 - RNA, 19 nt, Artificial Sequence
  Description of Artificial Sequence: Synthetic oligonucleotide
gcuguuugccaagauauuc

SEQ ID NO: 909895 - RNA, 19 nt, Artificial Sequence
  Description of Artificial Sequence: Synthetic oligonucleotide
acgcgagggccgcacgggc

SEQ ID NO: 909896 - RNA, 19 nt, Artificial Sequence
  Description of Artificial Sequence: Synthetic oligonucleotide
ccaggaauuaccacuacaa

SEQ ID NO: 909897 - RNA, 19 nt, Artificial Sequence
  Description of Artificial Sequence: Synthetic oligonucleotide
gguaagacugccaguuuac

SEQ ID NO: 909898 - RNA, 19 nt, Artificial Sequence
  Description of Artificial Sequence: Synthetic oligonucleotide
caacaccgcuaccacgaag

SEQ ID NO: 909899 - RNA, 19 nt, Artificial Sequence
  Description of Artificial Sequence: Synthetic oligonucleotide
cagacgccggucgagcucc

SEQ ID NO: 909900 - RNA, 19 nt, Artificial Sequence
  Description of Artificial Sequence: Synthetic oligonucleotide
cuaagacuuguggaucauc

SEQ ID NO: 909901 - RNA, 19 nt, Artificial Sequence
  Description of Artificial Sequence: Synthetic oligonucleotide
caggaauuaccacuacaaa

SEQ ID NO: 909902 - RNA, 19 nt, Artificial Sequence
  Description of Artificial Sequence: Synthetic oligonucleotide
ucacugccuuccaucaauu

SEQ ID NO: 909903 - RNA, 19 nt, Artificial Sequence
  Description of Artificial Sequence: Synthetic oligonucleotide
gcuaccacgaaguuucugu

SEQ ID NO: 909904 - RNA, 19 nt, Artificial Sequence
  Description of Artificial Sequence: Synthetic oligonucleotide
auaacccguuuaccccgag

SEQ ID NO: 909905 - RNA, 19 nt, Artificial Sequence
  Description of Artificial Sequence: Synthetic oligonucleotide
cuaauaugauagcgaaugu

SEQ ID NO: 909906 - RNA, 19 nt, Artificial Sequence
  Description of Artificial Sequence: Synthetic oligonucleotide
aagcugcucuauaacccgu

SEQ ID NO: 909907 - RNA, 19 nt, Artificial Sequence
  Description of Artificial Sequence: Synthetic oligonucleotide
aucuaauaugauagcgaau

SEQ ID NO: 909908 - RNA, 19 nt, Artificial Sequence
  Description of Artificial Sequence: Synthetic oligonucleotide
gcggcgaagguguucacac

SEQ ID NO: 909909 - RNA, 19 nt, Artificial Sequence
  Description of Artificial Sequence: Synthetic oligonucleotide
gguuaguauguacugcacu

SEQ ID NO: 909910 - RNA, 19 nt, Artificial Sequence
  Description of Artificial Sequence: Synthetic oligonucleotide
agacccggagcaaaagcga

SEQ ID NO: 909911 - RNA, 19 nt, Artificial Sequence
  Description of Artificial Sequence: Synthetic oligonucleotide
uguagcggcgaagguguuc

SEQ ID NO: 909912 - RNA, 19 nt, Artificial Sequence
  Description of Artificial Sequence: Synthetic oligonucleotide
accucacagcauucucucu

SEQ ID NO: 909913 - RNA, 19 nt, Artificial Sequence
  Description of Artificial Sequence: Synthetic oligonucleotide
ccgaggauaaugccgaaca

SEQ ID NO: 909914 - RNA, 19 nt, Artificial Sequence
  Description of Artificial Sequence: Synthetic oligonucleotide
guuuacuuuguuggcccga

SEQ ID NO: 909915 - RNA, 19 nt, Artificial Sequence
  Description of Artificial Sequence: Synthetic oligonucleotide
caucaguugcagacagcca

SEQ ID NO: 909916 - RNA, 19 nt, Artificial Sequence
  Description of Artificial Sequence: Synthetic oligonucleotide
uagauacagacagcaccua

SEQ ID NO: 909917 - RNA, 19 nt, Artificial Sequence
  Description of Artificial Sequence: Synthetic oligonucleotide
cacacauuugaggacuaaa

SEQ ID NO: 909918 - RNA, 19 nt, Artificial Sequence
  Description of Artificial Sequence: Synthetic oligonucleotide
gcucuauaacccguuuacc

SEQ ID NO: 909919 - RNA, 19 nt, Artificial Sequence
  Description of Artificial Sequence: Synthetic oligonucleotide
accuacuuuuauacaacuu

SEQ ID NO: 909920 - RNA, 19 nt, Artificial Sequence
  Description of Artificial Sequence: Synthetic oligonucleotide
guagcggaccugcuggucu

SEQ ID NO: 909921 - RNA, 19 nt, Artificial Sequence
  Description of Artificial Sequence: Synthetic oligonucleotide
gcaauguaaguaacgguaa

SEQ ID NO: 909922 - RNA, 19 nt, Artificial Sequence
  Description of Artificial Sequence: Synthetic oligonucleotide
ggucacgggagacccggag

SEQ ID NO: 909923 - RNA, 19 nt, Artificial Sequence
  Description of Artificial Sequence: Synthetic oligonucleotide
gcgaguuucucuuucaguu

SEQ ID NO: 909924 - RNA, 19 nt, Artificial Sequence
  Description of Artificial Sequence: Synthetic oligonucleotide
gaacuucggcagccuuagc

SEQ ID NO: 909925 - RNA, 19 nt, Artificial Sequence
  Description of Artificial Sequence: Synthetic oligonucleotide
caccuacuuuuauacaacu

SEQ ID NO: 909926 - RNA, 19 nt, Artificial Sequence
  Description of Artificial Sequence: Synthetic oligonucleotide
caacauuggcagaaaguau

SEQ ID NO: 909927 - RNA, 19 nt, Artificial Sequence
  Description of Artificial Sequence: Synthetic oligonucleotide
gcaccuacuuuuauacaac

SEQ ID NO: 909928 - RNA, 19 nt, Artificial Sequence
  Description of Artificial Sequence: Synthetic oligonucleotide
acccggagcaaaagcgaag

SEQ ID NO: 909929 - RNA, 19 nt, Artificial Sequence
  Description of Artificial Sequence: Synthetic oligonucleotide
gcaacagcuaagacuugug

SEQ ID NO: 909930 - RNA, 19 nt, Artificial Sequence
  Description of Artificial Sequence: Synthetic oligonucleotide
acuaucacuugaagagauu

SEQ ID NO: 909931 - RNA, 19 nt, Artificial Sequence
  Description of Artificial Sequence: Synthetic oligonucleotide
uccaucggaggugcagaaa

SEQ ID NO: 909932 - RNA, 19 nt, Artificial Sequence
  Description of Artificial Sequence: Synthetic oligonucleotide
ccuggcgauucaacauugg

SEQ ID NO: 909933 - RNA, 19 nt, Artificial Sequence
  Description of Artificial Sequence: Synthetic oligonucleotide
gacccuaaggacugagguu

SEQ ID NO: 909934 - RNA, 19 nt, Artificial Sequence
  Description of Artificial Sequence: Synthetic oligonucleotide
caauguaaguaacgguaau

SEQ ID NO: 909935 - RNA, 19 nt, Artificial Sequence
  Description of Artificial Sequence: Synthetic oligonucleotide
agcggcgaagguguucaca

SEQ ID NO: 909936 - RNA, 19 nt, Artificial Sequence
  Description of Artificial Sequence: Synthetic oligonucleotide
gacccggagcaaaagcgaa

SEQ ID NO: 909937 - RNA, 19 nt, Artificial Sequence
  Description of Artificial Sequence: Synthetic oligonucleotide
cugcaagaaugauucuugu

SEQ ID NO: 909938 - RNA, 19 nt, Artificial Sequence
  Description of Artificial Sequence: Synthetic oligonucleotide
cugcucuauaacccguuua

SEQ ID NO: 909939 - RNA, 19 nt, Artificial Sequence
  Description of Artificial Sequence: Synthetic oligonucleotide
cauugacccggagcaucag

SEQ ID NO: 909940 - RNA, 19 nt, Artificial Sequence
  Description of Artificial Sequence: Synthetic oligonucleotide
cugcacauacugagaacua

SEQ ID NO: 909941 - RNA, 19 nt, Artificial Sequence
  Description of Artificial Sequence: Synthetic oligonucleotide
ccaucggaggugcagaaaa

SEQ ID NO: 909942 - RNA, 19 nt, Artificial Sequence
  Description of Artificial Sequence: Synthetic oligonucleotide
gcgaauguuucuccacaga

SEQ ID NO: 909943 - RNA, 19 nt, Artificial Sequence
  Description of Artificial Sequence: Synthetic oligonucleotide
auuugauauuggaguugaa

SEQ ID NO: 909944 - RNA, 19 nt, Artificial Sequence
  Description of Artificial Sequence: Synthetic oligonucleotide
uagcggaccugcuggucuu

SEQ ID NO: 909945 - RNA, 19 nt, Artificial Sequence
  Description of Artificial Sequence: Synthetic oligonucleotide
ggucgagcuccgcggcucg

SEQ ID NO: 909946 - RNA, 19 nt, Artificial Sequence
  Description of Artificial Sequence: Synthetic oligonucleotide
gcugcuaacuuggcaauaa

SEQ ID NO: 909947 - RNA, 19 nt, Artificial Sequence
  Description of Artificial Sequence: Synthetic oligonucleotide
cccuagauacagacagcac

SEQ ID NO: 909948 - RNA, 19 nt, Artificial Sequence
  Description of Artificial Sequence: Synthetic oligonucleotide
cagauucuugaaggauguc

SEQ ID NO: 909949 - RNA, 19 nt, Artificial Sequence
  Description of Artificial Sequence: Synthetic oligonucleotide
gcaaaacgguacucauuga

SEQ ID NO: 909950 - RNA, 19 nt, Artificial Sequence
  Description of Artificial Sequence: Synthetic oligonucleotide
ucgcaaucuucagcagaaa

SEQ ID NO: 909951 - RNA, 19 nt, Artificial Sequence
  Description of Artificial Sequence: Synthetic oligonucleotide
aggcaaaacgguacucauu

SEQ ID NO: 909952 - RNA, 19 nt, Artificial Sequence
  Description of Artificial Sequence: Synthetic oligonucleotide
ccacacuuguuacucaaaa

SEQ ID NO: 909953 - RNA, 19 nt, Artificial Sequence
  Description of Artificial Sequence: Synthetic oligonucleotide
cacgggcgggcagacgccg

SEQ ID NO: 909954 - RNA, 19 nt, Artificial Sequence
  Description of Artificial Sequence: Synthetic oligonucleotide
guccaucggaggugcagaa

SEQ ID NO: 909955 - RNA, 19 nt, Artificial Sequence
  Description of Artificial Sequence: Synthetic oligonucleotide
cacggccagcagagcauug

SEQ ID NO: 909956 - RNA, 19 nt, Artificial Sequence
  Description of Artificial Sequence: Synthetic oligonucleotide
caggcaaaacgguacucau

SEQ ID NO: 909957 - RNA, 19 nt, Artificial Sequence
  Description of Artificial Sequence: Synthetic oligonucleotide
cgaacuucggcagccuuag

SEQ ID NO: 909958 - RNA, 19 nt, Artificial Sequence
  Description of Artificial Sequence: Synthetic oligonucleotide
acccggagcaucaguugca

SEQ ID NO: 909959 - RNA, 19 nt, Artificial Sequence
  Description of Artificial Sequence: Synthetic oligonucleotide
ccguuuaccccgaggauaa

SEQ ID NO: 909960 - RNA, 19 nt, Artificial Sequence
  Description of Artificial Sequence: Synthetic oligonucleotide
gguccaucggaggugcaga

SEQ ID NO: 909961 - RNA, 19 nt, Artificial Sequence
  Description of Artificial Sequence: Synthetic oligonucleotide
gggagacccggagcaaaag

SEQ ID NO: 909962 - RNA, 19 nt, Artificial Sequence
  Description of Artificial Sequence: Synthetic oligonucleotide
gcuuccacccaggcaaaac

SEQ ID NO: 909963 - RNA, 19 nt, Artificial Sequence
  Description of Artificial Sequence: Synthetic oligonucleotide
agcugcuaacuuggcaaua

SEQ ID NO: 909964 - RNA, 19 nt, Artificial Sequence
  Description of Artificial Sequence: Synthetic oligonucleotide
uuguagcggcgaagguguu

SEQ ID NO: 909965 - RNA, 19 nt, Artificial Sequence
  Description of Artificial Sequence: Synthetic oligonucleotide
gcgauucaacauuggcaga

SEQ ID NO: 909966 - RNA, 19 nt, Artificial Sequence
  Description of Artificial Sequence: Synthetic oligonucleotide
agcugcucuauaacccguu

SEQ ID NO: 909967 - RNA, 19 nt, Artificial Sequence
  Description of Artificial Sequence: Synthetic oligonucleotide
ggcccgaacuucggcagcc

SEQ ID NO: 909968 - RNA, 19 nt, Artificial Sequence
  Description of Artificial Sequence: Synthetic oligonucleotide
caucaaccaugguuaguau

SEQ ID NO: 909969 - RNA, 19 nt, Artificial Sequence
  Description of Artificial Sequence: Synthetic oligonucleotide
uagcggcgaagguguucac

SEQ ID NO: 909970 - RNA, 19 nt, Artificial Sequence
  Description of Artificial Sequence: Synthetic oligonucleotide
gcagacgccggucgagcuc

SEQ ID NO: 909971 - RNA, 19 nt, Artificial Sequence
  Description of Artificial Sequence: Synthetic oligonucleotide
guauggccaggcagugcuc

SEQ ID NO: 909972 - RNA, 19 nt, Artificial Sequence
  Description of Artificial Sequence: Synthetic oligonucleotide
cucuugcuucguuuugcau

SEQ ID NO: 909973 - RNA, 19 nt, Artificial Sequence
  Description of Artificial Sequence: Synthetic oligonucleotide
gccggucgagcuccgcggc

SEQ ID NO: 909974 - RNA, 19 nt, Artificial Sequence
  Description of Artificial Sequence: Synthetic oligonucleotide
gggcagacgccggucgagc

SEQ ID NO: 909975 - RNA, 19 nt, Artificial Sequence
  Description of Artificial Sequence: Synthetic oligonucleotide
cccgaggauaaugccgaac

SEQ ID NO: 909976 - RNA, 19 nt, Artificial Sequence
  Description of Artificial Sequence: Synthetic oligonucleotide
gacgccggucgagcuccgc

SEQ ID NO: 909977 - RNA, 19 nt, Artificial Sequence
  Description of Artificial Sequence: Synthetic oligonucleotide
cgcccauuauacaguucac

SEQ ID NO: 909978 - RNA, 19 nt, Artificial Sequence
  Description of Artificial Sequence: Synthetic oligonucleotide
cccguuuaccccgaggaua

SEQ ID NO: 909979 - RNA, 19 nt, Artificial Sequence
  Description of Artificial Sequence: Synthetic oligonucleotide
cgcgagggccgcacgggcg

SEQ ID NO: 909980 - RNA, 19 nt, Artificial Sequence
  Description of Artificial Sequence: Synthetic oligonucleotide
ccgaacuucggcagccuua

SEQ ID NO: 909981 - RNA, 19 nt, Artificial Sequence
  Description of Artificial Sequence: Synthetic oligonucleotide
ccuaaggacugagguucuc

SEQ ID NO: 909982 - RNA, 19 nt, Artificial Sequence
  Description of Artificial Sequence: Synthetic oligonucleotide
cgcggggacgcgagggccg

SEQ ID NO: 909983 - RNA, 19 nt, Artificial Sequence
  Description of Artificial Sequence: Synthetic oligonucleotide
gcaacaccgcuaccacgaa

SEQ ID NO: 909984 - RNA, 19 nt, Artificial Sequence
  Description of Artificial Sequence: Synthetic oligonucleotide
agacgccggucgagcuccg

SEQ ID NO: 909985 - RNA, 19 nt, Artificial Sequence
  Description of Artificial Sequence: Synthetic oligonucleotide
gcaccucgaauguccauuu

SEQ ID NO: 909986 - RNA, 19 nt, Artificial Sequence
  Description of Artificial Sequence: Synthetic oligonucleotide
gcugcucuauaacccguuu

SEQ ID NO: 909987 - RNA, 19 nt, Artificial Sequence
  Description of Artificial Sequence: Synthetic oligonucleotide
ggggacgcgagggccgcac

SEQ ID NO: 909988 - RNA, 19 nt, Artificial Sequence
  Description of Artificial Sequence: Synthetic oligonucleotide
cacgggagacccggagcaa

SEQ ID NO: 909989 - RNA, 19 nt, Artificial Sequence
  Description of Artificial Sequence: Synthetic oligonucleotide
ccauuccaaccuuccagau

SEQ ID NO: 909990 - RNA, 19 nt, Artificial Sequence
  Description of Artificial Sequence: Synthetic oligonucleotide
gcgggcagacgccggucga

SEQ ID NO: 909991 - RNA, 19 nt, Artificial Sequence
  Description of Artificial Sequence: Synthetic oligonucleotide
gugguccaucggaggugca

SEQ ID NO: 909992 - RNA, 19 nt, Artificial Sequence
  Description of Artificial Sequence: Synthetic oligonucleotide
ccgcggggacgcgagggcc

SEQ ID NO: 909993 - RNA, 19 nt, Artificial Sequence
  Description of Artificial Sequence: Synthetic oligonucleotide
gcggggacgcgagggccgc

SEQ ID NO: 909994 - RNA, 19 nt, Artificial Sequence
  Description of Artificial Sequence: Synthetic oligonucleotide
caccucgaauguccauuuu

SEQ ID NO: 909995 - RNA, 19 nt, Artificial Sequence
  Description of Artificial Sequence: Synthetic oligonucleotide
cccuaaggacugagguucu

SEQ ID NO: 909996 - RNA, 19 nt, Artificial Sequence
  Description of Artificial Sequence: Synthetic oligonucleotide
ggccgcacgggcgggcaga

SEQ ID NO: 909997 - RNA, 19 nt, Artificial Sequence
  Description of Artificial Sequence: Synthetic oligonucleotide
cgggcagacgccggucgag

SEQ ID NO: 909998 - RNA, 19 nt, Artificial Sequence
  Description of Artificial Sequence: Synthetic oligonucleotide
cgaggauaaugccgaacau

SEQ ID NO: 909999 - RNA, 19 nt, Artificial Sequence
  Description of Artificial Sequence: Synthetic oligonucleotide
cggcgaagguguucacaca

SEQ ID NO: 910000 - RNA, 19 nt, Artificial Sequence
  Description of Artificial Sequence: Synthetic oligonucleotide
cgguacucauugacccgga

SEQ ID NO: 910001 - RNA, 19 nt, Artificial Sequence
  Description of Artificial Sequence: Synthetic oligonucleotide
ggacugccgcggggacgcg

SEQ ID NO: 910002 - RNA, 19 nt, Artificial Sequence
  Description of Artificial Sequence: Synthetic oligonucleotide
cggucgagcuccgcggcuc

SEQ ID NO: 910003 - RNA, 19 nt, Artificial Sequence
  Description of Artificial Sequence: Synthetic oligonucleotide
gcgaagguguucacacauu

SEQ ID NO: 910004 - RNA, 19 nt, Artificial Sequence
  Description of Artificial Sequence: Synthetic oligonucleotide
ccccgaggauaaugccgaa

SEQ ID NO: 910005 - RNA, 19 nt, Artificial Sequence
  Description of Artificial Sequence: Synthetic oligonucleotide
cccgaacuucggcagccuu

SEQ ID NO: 910006 - RNA, 19 nt, Artificial Sequence
  Description of Artificial Sequence: Synthetic oligonucleotide
gcccgaacuucggcagccu

SEQ ID NO: 910007 - RNA, 19 nt, Artificial Sequence
  Description of Artificial Sequence: Synthetic oligonucleotide
ccggucgagcuccgcggcu

SEQ ID NO: 910008 - RNA, 19 nt, Artificial Sequence
  Description of Artificial Sequence: Synthetic oligonucleotide
ccgcuaccacgaaguuucu

SEQ ID NO: 910009 - RNA, 19 nt, Artificial Sequence
  Description of Artificial Sequence: Synthetic oligonucleotide
gcuccgcggcucggcgguc

SEQ ID NO: 910010 - RNA, 19 nt, Artificial Sequence
  Description of Artificial Sequence: Synthetic oligonucleotide
cguuuaccccgaggauaau

SEQ ID NO: 910011 - RNA, 19 nt, Artificial Sequence
  Description of Artificial Sequence: Synthetic oligonucleotide
aaauauuauacacugcaac

SEQ ID NO: 910012 - RNA, 19 nt, Artificial Sequence
  Description of Artificial Sequence: Synthetic oligonucleotide
uuugacaaaaucaucagug

SEQ ID NO: 910013 - RNA, 19 nt, Artificial Sequence
  Description of Artificial Sequence: Synthetic oligonucleotide
gaaaacugaauuuagcuag

SEQ ID NO: 910014 - RNA, 19 nt, Artificial Sequence
  Description of Artificial Sequence: Synthetic oligonucleotide
ucaauaauaaaguugccag

SEQ ID NO: 910015 - RNA, 19 nt, Artificial Sequence
  Description of Artificial Sequence: Synthetic oligonucleotide
aauagcacuaagcaaacug

SEQ ID NO: 910016 - RNA, 19 nt, Artificial Sequence
  Description of Artificial Sequence: Synthetic oligonucleotide
uuuaacgacaucaucacug

SEQ ID NO: 910017 - RNA, 19 nt, Artificial Sequence
  Description of Artificial Sequence: Synthetic oligonucleotide
agaucaagaaaccauguac

SEQ ID NO: 910018 - RNA, 19 nt, Artificial Sequence
  Description of Artificial Sequence: Synthetic oligonucleotide
acuacuauauggcauaagg

SEQ ID NO: 910019 - RNA, 19 nt, Artificial Sequence
  Description of Artificial Sequence: Synthetic oligonucleotide
agauccuccaagcauaucc

SEQ ID NO: 910020 - RNA, 19 nt, Artificial Sequence
  Description of Artificial Sequence: Synthetic oligonucleotide
aaagcaaugacugaaauaa

SEQ ID NO: 910021 - RNA, 19 nt, Artificial Sequence
  Description of Artificial Sequence: Synthetic oligonucleotide
aauuguuuauuccuucuuc

SEQ ID NO: 910022 - RNA, 19 nt, Artificial Sequence
  Description of Artificial Sequence: Synthetic oligonucleotide
ucuacauuggcuuucaaca

SEQ ID NO: 910023 - RNA, 19 nt, Artificial Sequence
  Description of Artificial Sequence: Synthetic oligonucleotide
aaauggaauaugcagcauc

SEQ ID NO: 910024 - RNA, 19 nt, Artificial Sequence
  Description of Artificial Sequence: Synthetic oligonucleotide
ugagauuaagaauaugugc

SEQ ID NO: 910025 - RNA, 19 nt, Artificial Sequence
  Description of Artificial Sequence: Synthetic oligonucleotide
aauaaugucagcuuuucua

SEQ ID NO: 910026 - RNA, 19 nt, Artificial Sequence
  Description of Artificial Sequence: Synthetic oligonucleotide
auaaugucagcuuuucuac

SEQ ID NO: 910027 - RNA, 19 nt, Artificial Sequence
  Description of Artificial Sequence: Synthetic oligonucleotide
aguucaaacugauagacug

SEQ ID NO: 910028 - RNA, 19 nt, Artificial Sequence
  Description of Artificial Sequence: Synthetic oligonucleotide
acaacagaacuuuaacugc

SEQ ID NO: 910029 - RNA, 19 nt, Artificial Sequence
  Description of Artificial Sequence: Synthetic oligonucleotide
uguaccaccaucuucaccu

SEQ ID NO: 910030 - RNA, 19 nt, Artificial Sequence
  Description of Artificial Sequence: Synthetic oligonucleotide
aauaugugcuacuuugcuc

SEQ ID NO: 910031 - RNA, 19 nt, Artificial Sequence
  Description of Artificial Sequence: Synthetic oligonucleotide
aaugguguaagcacagugc

SEQ ID NO: 910032 - RNA, 19 nt, Artificial Sequence
  Description of Artificial Sequence: Synthetic oligonucleotide
uuggauguaagguaggugc

SEQ ID NO: 910033 - RNA, 19 nt, Artificial Sequence
  Description of Artificial Sequence: Synthetic oligonucleotide
ugauuagucauucaugacu

SEQ ID NO: 910034 - RNA, 19 nt, Artificial Sequence
  Description of Artificial Sequence: Synthetic oligonucleotide
uagaauaguaucaauaaua

SEQ ID NO: 910035 - RNA, 19 nt, Artificial Sequence
  Description of Artificial Sequence: Synthetic oligonucleotide
aagucuuauagauacagaa

SEQ ID NO: 910036 - RNA, 19 nt, Artificial Sequence
  Description of Artificial Sequence: Synthetic oligonucleotide
auugauuagucauucauga

SEQ ID NO: 910037 - RNA, 19 nt, Artificial Sequence
  Description of Artificial Sequence: Synthetic oligonucleotide
ucaguggucauacucauca

SEQ ID NO: 910038 - RNA, 19 nt, Artificial Sequence
  Description of Artificial Sequence: Synthetic oligonucleotide
uauauauuagcacuugaaa

SEQ ID NO: 910039 - RNA, 19 nt, Artificial Sequence
  Description of Artificial Sequence: Synthetic oligonucleotide
uucaugucugucauaauag

SEQ ID NO: 910040 - RNA, 19 nt, Artificial Sequence
  Description of Artificial Sequence: Synthetic oligonucleotide
gacaauauuugcuccaucc

SEQ ID NO: 910041 - RNA, 19 nt, Artificial Sequence
  Description of Artificial Sequence: Synthetic oligonucleotide
agaauaguaucaauaauac

SEQ ID NO: 910042 - RNA, 19 nt, Artificial Sequence
  Description of Artificial Sequence: Synthetic oligonucleotide
agauaucuagaauaguauc

SEQ ID NO: 910043 - RNA, 19 nt, Artificial Sequence
  Description of Artificial Sequence: Synthetic oligonucleotide
auugacugcaauuucaccu

SEQ ID NO: 910044 - RNA, 19 nt, Artificial Sequence
  Description of Artificial Sequence: Synthetic oligonucleotide
caucuaagaagaaaucugg

SEQ ID NO: 910045 - RNA, 19 nt, Artificial Sequence
  Description of Artificial Sequence: Synthetic oligonucleotide
gacaucaucacugagcgag

SEQ ID NO: 910046 - RNA, 19 nt, Artificial Sequence
  Description of Artificial Sequence: Synthetic oligonucleotide
uuuuacaugagaaguuuug

SEQ ID NO: 910047 - RNA, 19 nt, Artificial Sequence
  Description of Artificial Sequence: Synthetic oligonucleotide
cacuuaaugaaacuugucc

SEQ ID NO: 910048 - RNA, 19 nt, Artificial Sequence
  Description of Artificial Sequence: Synthetic oligonucleotide
uugccaguaaaacuuuucg

SEQ ID NO: 910049 - RNA, 19 nt, Artificial Sequence
  Description of Artificial Sequence: Synthetic oligonucleotide
auauauuagcacuugaaaa

SEQ ID NO: 910050 - RNA, 19 nt, Artificial Sequence
  Description of Artificial Sequence: Synthetic oligonucleotide
acgacaucaucacugagcg

SEQ ID NO: 910051 - RNA, 19 nt, Artificial Sequence
  Description of Artificial Sequence: Synthetic oligonucleotide
uccuuauaagacaauggag

SEQ ID NO: 910052 - RNA, 19 nt, Artificial Sequence
  Description of Artificial Sequence: Synthetic oligonucleotide
uuauagauacagaaauucu

SEQ ID NO: 910053 - RNA, 19 nt, Artificial Sequence
  Description of Artificial Sequence: Synthetic oligonucleotide
aaacuuuucggccuuuuga

SEQ ID NO: 910054 - RNA, 19 nt, Artificial Sequence
  Description of Artificial Sequence: Synthetic oligonucleotide
aauuaauuacauuucuaua

SEQ ID NO: 910055 - RNA, 19 nt, Artificial Sequence
  Description of Artificial Sequence: Synthetic oligonucleotide
uuaugauaaguuaaagaaa

SEQ ID NO: 910056 - RNA, 19 nt, Artificial Sequence
  Description of Artificial Sequence: Synthetic oligonucleotide
cuaaauguuucuuccacag

SEQ ID NO: 910057 - RNA, 19 nt, Artificial Sequence
  Description of Artificial Sequence: Synthetic oligonucleotide
agauaaaguaacuucauuu

SEQ ID NO: 910058 - RNA, 19 nt, Artificial Sequence
  Description of Artificial Sequence: Synthetic oligonucleotide
aauaucaauuccuccaaau

SEQ ID NO: 910059 - RNA, 19 nt, Artificial Sequence
  Description of Artificial Sequence: Synthetic oligonucleotide
uguaggaguauccaaugug

SEQ ID NO: 910060 - RNA, 19 nt, Artificial Sequence
  Description of Artificial Sequence: Synthetic oligonucleotide
uucugguacaaaaucaugu

SEQ ID NO: 910061 - RNA, 19 nt, Artificial Sequence
  Description of Artificial Sequence: Synthetic oligonucleotide
uugccugcaaauauuauac

SEQ ID NO: 910062 - RNA, 19 nt, Artificial Sequence
  Description of Artificial Sequence: Synthetic oligonucleotide
uguuuuaggccauaaggca

SEQ ID NO: 910063 - RNA, 19 nt, Artificial Sequence
  Description of Artificial Sequence: Synthetic oligonucleotide
auagcagcaguauguaugg

SEQ ID NO: 910064 - RNA, 19 nt, Artificial Sequence
  Description of Artificial Sequence: Synthetic oligonucleotide
aaaagucugcugaaggugg

SEQ ID NO: 910065 - RNA, 19 nt, Artificial Sequence
  Description of Artificial Sequence: Synthetic oligonucleotide
ucaagucuuauagauacag

SEQ ID NO: 910066 - RNA, 19 nt, Artificial Sequence
  Description of Artificial Sequence: Synthetic oligonucleotide
uauuauacacugcaacugu

SEQ ID NO: 910067 - RNA, 19 nt, Artificial Sequence
  Description of Artificial Sequence: Synthetic oligonucleotide
gaucaagaaaccauguacc

SEQ ID NO: 910068 - RNA, 19 nt, Artificial Sequence
  Description of Artificial Sequence: Synthetic oligonucleotide
gaggauuuagguucagggg

SEQ ID NO: 910069 - RNA, 19 nt, Artificial Sequence
  Description of Artificial Sequence: Synthetic oligonucleotide
uguuggucaagcuaauagc

SEQ ID NO: 910070 - RNA, 19 nt, Artificial Sequence
  Description of Artificial Sequence: Synthetic oligonucleotide
aaaggaauacaugcuuugg

SEQ ID NO: 910071 - RNA, 19 nt, Artificial Sequence
  Description of Artificial Sequence: Synthetic oligonucleotide
gauuagucauucaugacug

SEQ ID NO: 910072 - RNA, 19 nt, Artificial Sequence
  Description of Artificial Sequence: Synthetic oligonucleotide
aauagcacuugcauuguuc

SEQ ID NO: 910073 - RNA, 19 nt, Artificial Sequence
  Description of Artificial Sequence: Synthetic oligonucleotide
uaaagaaaauuuugccugc

SEQ ID NO: 910074 - RNA, 19 nt, Artificial Sequence
  Description of Artificial Sequence: Synthetic oligonucleotide
ucugguacaaaaucaugug

SEQ ID NO: 910075 - RNA, 19 nt, Artificial Sequence
  Description of Artificial Sequence: Synthetic oligonucleotide
agaaguuuuguaaauagcu

SEQ ID NO: 910076 - RNA, 19 nt, Artificial Sequence
  Description of Artificial Sequence: Synthetic oligonucleotide
aggauuuagguucaggggu

SEQ ID NO: 910077 - RNA, 19 nt, Artificial Sequence
  Description of Artificial Sequence: Synthetic oligonucleotide
auauugauuagucauucau

SEQ ID NO: 910078 - RNA, 19 nt, Artificial Sequence
  Description of Artificial Sequence: Synthetic oligonucleotide
uuuugacaaaaucaucagu

SEQ ID NO: 910079 - RNA, 19 nt, Artificial Sequence
  Description of Artificial Sequence: Synthetic oligonucleotide
gcuaauagcacuugcauug

SEQ ID NO: 910080 - RNA, 19 nt, Artificial Sequence
  Description of Artificial Sequence: Synthetic oligonucleotide
gauaucuagaauaguauca

SEQ ID NO: 910081 - RNA, 19 nt, Artificial Sequence
  Description of Artificial Sequence: Synthetic oligonucleotide
ucuauauauuagcacuuga

SEQ ID NO: 910082 - RNA, 19 nt, Artificial Sequence
  Description of Artificial Sequence: Synthetic oligonucleotide
uccuugauugguuaguugu

SEQ ID NO: 910083 - RNA, 19 nt, Artificial Sequence
  Description of Artificial Sequence: Synthetic oligonucleotide
auguccaacuuucccaccc

SEQ ID NO: 910084 - RNA, 19 nt, Artificial Sequence
  Description of Artificial Sequence: Synthetic oligonucleotide
ugaauuuagcuaggcaugg

SEQ ID NO: 910085 - RNA, 19 nt, Artificial Sequence
  Description of Artificial Sequence: Synthetic oligonucleotide
ugacaaaaucaucaguggu

SEQ ID NO: 910086 - RNA, 19 nt, Artificial Sequence
  Description of Artificial Sequence: Synthetic oligonucleotide
ugccaguaaaacuuuucgg

SEQ ID NO: 910087 - RNA, 19 nt, Artificial Sequence
  Description of Artificial Sequence: Synthetic oligonucleotide
cucuauaacugcaucuggg

SEQ ID NO: 910088 - RNA, 19 nt, Artificial Sequence
  Description of Artificial Sequence: Synthetic oligonucleotide
ucuauaacugcaucuggga

SEQ ID NO: 910089 - RNA, 19 nt, Artificial Sequence
  Description of Artificial Sequence: Synthetic oligonucleotide
aauguguuggucaagcuaa

SEQ ID NO: 910090 - RNA, 19 nt, Artificial Sequence
  Description of Artificial Sequence: Synthetic oligonucleotide
uccaagcauauccauagca

SEQ ID NO: 910091 - RNA, 19 nt, Artificial Sequence
  Description of Artificial Sequence: Synthetic oligonucleotide
uaaacuacuauauggcaua

SEQ ID NO: 910092 - RNA, 19 nt, Artificial Sequence
  Description of Artificial Sequence: Synthetic oligonucleotide
ucuaagaagaaaucuggua

SEQ ID NO: 910093 - RNA, 19 nt, Artificial Sequence
  Description of Artificial Sequence: Synthetic oligonucleotide
aacuuuucggccuuuugaa

SEQ ID NO: 910094 - RNA, 19 nt, Artificial Sequence
  Description of Artificial Sequence: Synthetic oligonucleotide
uccaacuugauugccagag

SEQ ID NO: 910095 - RNA, 19 nt, Artificial Sequence
  Description of Artificial Sequence: Synthetic oligonucleotide
uucaccucuaaauucuucu

SEQ ID NO: 910096 - RNA, 19 nt, Artificial Sequence
  Description of Artificial Sequence: Synthetic oligonucleotide
guguuggucaagcuaauag

SEQ ID NO: 910097 - RNA, 19 nt, Artificial Sequence
  Description of Artificial Sequence: Synthetic oligonucleotide
caacuugauugccagagcc

SEQ ID NO: 910098 - RNA, 19 nt, Artificial Sequence
  Description of Artificial Sequence: Synthetic oligonucleotide
uuacucuucagaucaagaa

SEQ ID NO: 910099 - RNA, 19 nt, Artificial Sequence
  Description of Artificial Sequence: Synthetic oligonucleotide
gaaaccauguaccaccauc

SEQ ID NO: 910100 - RNA, 19 nt, Artificial Sequence
  Description of Artificial Sequence: Synthetic oligonucleotide
ucuaaauguuucuuccaca

SEQ ID NO: 910101 - RNA, 19 nt, Artificial Sequence
  Description of Artificial Sequence: Synthetic oligonucleotide
uauaacugcaucugggaau

SEQ ID NO: 910102 - RNA, 19 nt, Artificial Sequence
  Description of Artificial Sequence: Synthetic oligonucleotide
uaagaagaaaucugguauc

SEQ ID NO: 910103 - RNA, 19 nt, Artificial Sequence
  Description of Artificial Sequence: Synthetic oligonucleotide
cugaauuuagcuaggcaug

SEQ ID NO: 910104 - RNA, 19 nt, Artificial Sequence
  Description of Artificial Sequence: Synthetic oligonucleotide
aaggccaguugaguuaccc

SEQ ID NO: 910105 - RNA, 19 nt, Artificial Sequence
  Description of Artificial Sequence: Synthetic oligonucleotide
ucucuuuguaggaguaucc

SEQ ID NO: 910106 - RNA, 19 nt, Artificial Sequence
  Description of Artificial Sequence: Synthetic oligonucleotide
  modified_base (18)..(18): a, c, u, g, unknown or other
guuugggugguuuucgcng

SEQ ID NO: 910107 - RNA, 19 nt, Artificial Sequence
  Description of Artificial Sequence: Synthetic oligonucleotide
gcaaauauuauacacugca

SEQ ID NO: 910108 - RNA, 19 nt, Artificial Sequence
  Description of Artificial Sequence: Synthetic oligonucleotide
uaggccauaaggcauugac

SEQ ID NO: 910109 - RNA, 19 nt, Artificial Sequence
  Description of Artificial Sequence: Synthetic oligonucleotide
acacauguguccuuauaag

SEQ ID NO: 910110 - RNA, 19 nt, Artificial Sequence
  Description of Artificial Sequence: Synthetic oligonucleotide
auuuagcuaggcauggugg

SEQ ID NO: 910111 - RNA, 19 nt, Artificial Sequence
  Description of Artificial Sequence: Synthetic oligonucleotide
ugguuaguuguuuuaauua

SEQ ID NO: 910112 - RNA, 19 nt, Artificial Sequence
  Description of Artificial Sequence: Synthetic oligonucleotide
uggugaguagauuaaacua

SEQ ID NO: 910113 - RNA, 19 nt, Artificial Sequence
  Description of Artificial Sequence: Synthetic oligonucleotide
agcaaugacugaaauaaag

SEQ ID NO: 910114 - RNA, 19 nt, Artificial Sequence
  Description of Artificial Sequence: Synthetic oligonucleotide
agaauaugugcuacuuugc

SEQ ID NO: 910115 - RNA, 19 nt, Artificial Sequence
  Description of Artificial Sequence: Synthetic oligonucleotide
uagacaugccauauuuggc

SEQ ID NO: 910116 - RNA, 19 nt, Artificial Sequence
  Description of Artificial Sequence: Synthetic oligonucleotide
uuugccugcaaauauuaua

SEQ ID NO: 910117 - RNA, 19 nt, Artificial Sequence
  Description of Artificial Sequence: Synthetic oligonucleotide
aaguaacuucauuuuacau

SEQ ID NO: 910118 - RNA, 19 nt, Artificial Sequence
  Description of Artificial Sequence: Synthetic oligonucleotide
uucuacauuggcuuucaac

SEQ ID NO: 910119 - RNA, 19 nt, Artificial Sequence
  Description of Artificial Sequence: Synthetic oligonucleotide
auagcacuugcauuguuca

SEQ ID NO: 910120 - RNA, 19 nt, Artificial Sequence
  Description of Artificial Sequence: Synthetic oligonucleotide
uucggccuuuugaaaaugg

SEQ ID NO: 910121 - RNA, 19 nt, Artificial Sequence
  Description of Artificial Sequence: Synthetic oligonucleotide
gaauacaugcuuuggaugu

SEQ ID NO: 910122 - RNA, 19 nt, Artificial Sequence
  Description of Artificial Sequence: Synthetic oligonucleotide
guaagcacagugcuguuug

SEQ ID NO: 910123 - RNA, 19 nt, Artificial Sequence
  Description of Artificial Sequence: Synthetic oligonucleotide
aagauaucuagaauaguau

SEQ ID NO: 910124 - RNA, 19 nt, Artificial Sequence
  Description of Artificial Sequence: Synthetic oligonucleotide
acauagacaugccauauuu

SEQ ID NO: 910125 - RNA, 19 nt, Artificial Sequence
  Description of Artificial Sequence: Synthetic oligonucleotide
uguguuugggugguuuucg

SEQ ID NO: 910126 - RNA, 19 nt, Artificial Sequence
  Description of Artificial Sequence: Synthetic oligonucleotide
uggucaagcuaauagcacu

SEQ ID NO: 910127 - RNA, 19 nt, Artificial Sequence
  Description of Artificial Sequence: Synthetic oligonucleotide
uccuuuaaucuucaguuuu

SEQ ID NO: 910128 - RNA, 19 nt, Artificial Sequence
  Description of Artificial Sequence: Synthetic oligonucleotide
auaauagcacuaagcaaac

SEQ ID NO: 910129 - RNA, 19 nt, Artificial Sequence
  Description of Artificial Sequence: Synthetic oligonucleotide
uguuuccucuauaacugca

SEQ ID NO: 910130 - RNA, 19 nt, Artificial Sequence
  Description of Artificial Sequence: Synthetic oligonucleotide
ugugauauuguuuccucua

SEQ ID NO: 910131 - RNA, 19 nt, Artificial Sequence
  Description of Artificial Sequence: Synthetic oligonucleotide
uuuagcuaggcaugguggu

SEQ ID NO: 910132 - RNA, 19 nt, Artificial Sequence
  Description of Artificial Sequence: Synthetic oligonucleotide
ggccauaaggcauugacug

SEQ ID NO: 910133 - RNA, 19 nt, Artificial Sequence
  Description of Artificial Sequence: Synthetic oligonucleotide
gccaguaaaacuuuucggc

SEQ ID NO: 910134 - RNA, 19 nt, Artificial Sequence
  Description of Artificial Sequence: Synthetic oligonucleotide
ugauauugauuagucauuc

SEQ ID NO: 910135 - RNA, 19 nt, Artificial Sequence
  Description of Artificial Sequence: Synthetic oligonucleotide
uucuauugcuugauauuga

SEQ ID NO: 910136 - RNA, 19 nt, Artificial Sequence
  Description of Artificial Sequence: Synthetic oligonucleotide
cuugauauugauuagucau

SEQ ID NO: 910137 - RNA, 19 nt, Artificial Sequence
  Description of Artificial Sequence: Synthetic oligonucleotide
cuuugugaagauaaaguaa

SEQ ID NO: 910138 - RNA, 19 nt, Artificial Sequence
  Description of Artificial Sequence: Synthetic oligonucleotide
uugauauugauuagucauu

SEQ ID NO: 910139 - RNA, 19 nt, Artificial Sequence
  Description of Artificial Sequence: Synthetic oligonucleotide
  modified_base (7)..(7): a, c, u, g, unknown or other
uuucgcngcaaugacaaua

SEQ ID NO: 910140 - RNA, 19 nt, Artificial Sequence
  Description of Artificial Sequence: Synthetic oligonucleotide
aaacuuguccuugauuggu

SEQ ID NO: 910141 - RNA, 19 nt, Artificial Sequence
  Description of Artificial Sequence: Synthetic oligonucleotide
aggaguauccaauguguug

SEQ ID NO: 910142 - RNA, 19 nt, Artificial Sequence
  Description of Artificial Sequence: Synthetic oligonucleotide
uuacaugagaaguuuugua

SEQ ID NO: 910143 - RNA, 19 nt, Artificial Sequence
  Description of Artificial Sequence: Synthetic oligonucleotide
acaugagaaguuuuguaaa

SEQ ID NO: 910144 - RNA, 19 nt, Artificial Sequence
  Description of Artificial Sequence: Synthetic oligonucleotide
aguuuucccgacaugaaug

SEQ ID NO: 910145 - RNA, 19 nt, Artificial Sequence
  Description of Artificial Sequence: Synthetic oligonucleotide
gcaaugacugaaauaaagg

SEQ ID NO: 910146 - RNA, 19 nt, Artificial Sequence
  Description of Artificial Sequence: Synthetic oligonucleotide
uuagcacuugaaaacugaa

SEQ ID NO: 910147 - RNA, 19 nt, Artificial Sequence
  Description of Artificial Sequence: Synthetic oligonucleotide
cuuauaagacaauggagaa

SEQ ID NO: 910148 - RNA, 19 nt, Artificial Sequence
  Description of Artificial Sequence: Synthetic oligonucleotide
guuuucccgacaugaaugc

SEQ ID NO: 910149 - RNA, 19 nt, Artificial Sequence
  Description of Artificial Sequence: Synthetic oligonucleotide
ugcuuaugauaaguuaaag

SEQ ID NO: 910150 - RNA, 19 nt, Artificial Sequence
  Description of Artificial Sequence: Synthetic oligonucleotide
  modified_base (6)..(6): a, c, u, g, unknown or other
uucgcngcaaugacaauau

SEQ ID NO: 910151 - RNA, 19 nt, Artificial Sequence
  Description of Artificial Sequence: Synthetic oligonucleotide
ugugaagauaaaguaacuu

SEQ ID NO: 910152 - RNA, 19 nt, Artificial Sequence
  Description of Artificial Sequence: Synthetic oligonucleotide
uucgcugcuuucaauugca

SEQ ID NO: 910153 - RNA, 19 nt, Artificial Sequence
  Description of Artificial Sequence: Synthetic oligonucleotide
uugugaagauaaaguaacu

SEQ ID NO: 910154 - RNA, 19 nt, Artificial Sequence
  Description of Artificial Sequence: Synthetic oligonucleotide
caaugguguaagcacagug

SEQ ID NO: 910155 - RNA, 19 nt, Artificial Sequence
  Description of Artificial Sequence: Synthetic oligonucleotide
ccuuauaagacaauggaga

SEQ ID NO: 910156 - RNA, 19 nt, Artificial Sequence
  Description of Artificial Sequence: Synthetic oligonucleotide
uugguuaguuguuuuaauu

SEQ ID NO: 910157 - RNA, 19 nt, Artificial Sequence
  Description of Artificial Sequence: Synthetic oligonucleotide
agucauucaugacuguagu

SEQ ID NO: 910158 - RNA, 19 nt, Artificial Sequence
  Description of Artificial Sequence: Synthetic oligonucleotide
gacugaccugaguucaagg

SEQ ID NO: 910159 - RNA, 19 nt, Artificial Sequence
  Description of Artificial Sequence: Synthetic oligonucleotide
uuggucaagcuaauagcac

SEQ ID NO: 910160 - RNA, 19 nt, Artificial Sequence
  Description of Artificial Sequence: Synthetic oligonucleotide
uucuccaacuugauugcca

SEQ ID NO: 910161 - RNA, 19 nt, Artificial Sequence
  Description of Artificial Sequence: Synthetic oligonucleotide
cacgucaacaacacauggc

SEQ ID NO: 910162 - RNA, 19 nt, Artificial Sequence
  Description of Artificial Sequence: Synthetic oligonucleotide
auaauaaaguugccaguaa

SEQ ID NO: 910163 - RNA, 19 nt, Artificial Sequence
  Description of Artificial Sequence: Synthetic oligonucleotide
caccucuaaauucuucugc

SEQ ID NO: 910164 - RNA, 19 nt, Artificial Sequence
  Description of Artificial Sequence: Synthetic oligonucleotide
cuaagaagaaaucugguau

SEQ ID NO: 910165 - RNA, 19 nt, Artificial Sequence
  Description of Artificial Sequence: Synthetic oligonucleotide
  modified_base (3)..(3): a, c, u, g, unknown or other
gcngcaaugacaauauuug

SEQ ID NO: 910166 - RNA, 19 nt, Artificial Sequence
  Description of Artificial Sequence: Synthetic oligonucleotide
uaagaauaugugcuacuuu

SEQ ID NO: 910167 - RNA, 19 nt, Artificial Sequence
  Description of Artificial Sequence: Synthetic oligonucleotide
  modified_base (2)..(2): a, c, u, g, unknown or other
cngcaaugacaauauuugc

SEQ ID NO: 910168 - RNA, 19 nt, Artificial Sequence
  Description of Artificial Sequence: Synthetic oligonucleotide
cuuguguggcuuuaacgac

SEQ ID NO: 910169 - RNA, 19 nt, Artificial Sequence
  Description of Artificial Sequence: Synthetic oligonucleotide
aaaucaugugauauuguuu

SEQ ID NO: 910170 - RNA, 19 nt, Artificial Sequence
  Description of Artificial Sequence: Synthetic oligonucleotide
auuauacacugcaacuguc

SEQ ID NO: 910171 - RNA, 19 nt, Artificial Sequence
  Description of Artificial Sequence: Synthetic oligonucleotide
ucugguaucaagggauggc

SEQ ID NO: 910172 - RNA, 19 nt, Artificial Sequence
  Description of Artificial Sequence: Synthetic oligonucleotide
uauccaauguguuggucaa

SEQ ID NO: 910173 - RNA, 19 nt, Artificial Sequence
  Description of Artificial Sequence: Synthetic oligonucleotide
cuguuugaaccacagagga

SEQ ID NO: 910174 - RNA, 19 nt, Artificial Sequence
  Description of Artificial Sequence: Synthetic oligonucleotide
gauauugauuagucauuca

SEQ ID NO: 910175 - RNA, 19 nt, Artificial Sequence
  Description of Artificial Sequence: Synthetic oligonucleotide
aggccaguugaguuacccc

SEQ ID NO: 910176 - RNA, 19 nt, Artificial Sequence
  Description of Artificial Sequence: Synthetic oligonucleotide
gauagacugcuuguguggc

SEQ ID NO: 910177 - RNA, 19 nt, Artificial Sequence
  Description of Artificial Sequence: Synthetic oligonucleotide
auaucuagaauaguaucaa

SEQ ID NO: 910178 - RNA, 19 nt, Artificial Sequence
  Description of Artificial Sequence: Synthetic oligonucleotide
  modified_base (19)..(19): a, c, u, g, unknown or other
uguuugggugguuuucgcn

SEQ ID NO: 910179 - RNA, 19 nt, Artificial Sequence
  Description of Artificial Sequence: Synthetic oligonucleotide
acauuucuauauauuagca

SEQ ID NO: 910180 - RNA, 19 nt, Artificial Sequence
  Description of Artificial Sequence: Synthetic oligonucleotide
gauguaagguaggugcccc

SEQ ID NO: 910181 - RNA, 19 nt, Artificial Sequence
  Description of Artificial Sequence: Synthetic oligonucleotide
gcuuaugauaaguuaaaga

SEQ ID NO: 910182 - RNA, 19 nt, Artificial Sequence
  Description of Artificial Sequence: Synthetic oligonucleotide
auagcacuaagcaaacuga

SEQ ID NO: 910183 - RNA, 19 nt, Artificial Sequence
  Description of Artificial Sequence: Synthetic oligonucleotide
guuggucaagcuaauagca

SEQ ID NO: 910184 - RNA, 19 nt, Artificial Sequence
  Description of Artificial Sequence: Synthetic oligonucleotide
uccugcaagaaagcaauga

SEQ ID NO: 910185 - RNA, 19 nt, Artificial Sequence
  Description of Artificial Sequence: Synthetic oligonucleotide
gaacuuuaacugcugagcu

SEQ ID NO: 910186 - RNA, 19 nt, Artificial Sequence
  Description of Artificial Sequence: Synthetic oligonucleotide
gauuuagguucaggggugg

SEQ ID NO: 910187 - RNA, 19 nt, Artificial Sequence
  Description of Artificial Sequence: Synthetic oligonucleotide
ggugaguagauuaaacuac

SEQ ID NO: 910188 - RNA, 19 nt, Artificial Sequence
  Description of Artificial Sequence: Synthetic oligonucleotide
uacaugcuuuggauguaag

SEQ ID NO: 910189 - RNA, 19 nt, Artificial Sequence
  Description of Artificial Sequence: Synthetic oligonucleotide
auauuaggaugccacuuaa

SEQ ID NO: 910190 - RNA, 19 nt, Artificial Sequence
  Description of Artificial Sequence: Synthetic oligonucleotide
acagaacuuuaacugcuga

SEQ ID NO: 910191 - RNA, 19 nt, Artificial Sequence
  Description of Artificial Sequence: Synthetic oligonucleotide
ugauauuguuuccucuaua

SEQ ID NO: 910192 - RNA, 19 nt, Artificial Sequence
  Description of Artificial Sequence: Synthetic oligonucleotide
aggaggacugaccugaguu

SEQ ID NO: 910193 - RNA, 19 nt, Artificial Sequence
  Description of Artificial Sequence: Synthetic oligonucleotide
  modified_base (11)..(11): a, c, u, g, unknown or other
ugguuuucgcngcaaugac

SEQ ID NO: 910194 - RNA, 19 nt, Artificial Sequence
  Description of Artificial Sequence: Synthetic oligonucleotide
acuauauggcauaaggcau

SEQ ID NO: 910195 - RNA, 19 nt, Artificial Sequence
  Description of Artificial Sequence: Synthetic oligonucleotide
gcuuguguggcuuuaacga

SEQ ID NO: 910196 - RNA, 19 nt, Artificial Sequence
  Description of Artificial Sequence: Synthetic oligonucleotide
agcuccaaaauguggucug

SEQ ID NO: 910197 - RNA, 19 nt, Artificial Sequence
  Description of Artificial Sequence: Synthetic oligonucleotide
agcacuaagcaaacugagg

SEQ ID NO: 910198 - RNA, 19 nt, Artificial Sequence
  Description of Artificial Sequence: Synthetic oligonucleotide
uuuucggccuuuugaaaau

SEQ ID NO: 910199 - RNA, 19 nt, Artificial Sequence
  Description of Artificial Sequence: Synthetic oligonucleotide
ugaguagauuaaacuacua

SEQ ID NO: 910200 - RNA, 19 nt, Artificial Sequence
  Description of Artificial Sequence: Synthetic oligonucleotide
cugguaucaagggauggcc

SEQ ID NO: 910201 - RNA, 19 nt, Artificial Sequence
  Description of Artificial Sequence: Synthetic oligonucleotide
aaacacauguguccuuaua

SEQ ID NO: 910202 - RNA, 19 nt, Artificial Sequence
  Description of Artificial Sequence: Synthetic oligonucleotide
uaucuagaauaguaucaau

SEQ ID NO: 910203 - RNA, 19 nt, Artificial Sequence
  Description of Artificial Sequence: Synthetic oligonucleotide
uauauggcauaaggcauac

SEQ ID NO: 910204 - RNA, 19 nt, Artificial Sequence
  Description of Artificial Sequence: Synthetic oligonucleotide
  modified_base (9)..(9): a, c, u, g, unknown or other
guuuucgcngcaaugacaa

SEQ ID NO: 910205 - RNA, 19 nt, Artificial Sequence
  Description of Artificial Sequence: Synthetic oligonucleotide
uugaguuaccccagcugga

SEQ ID NO: 910206 - RNA, 19 nt, Artificial Sequence
  Description of Artificial Sequence: Synthetic oligonucleotide
auuagcacuugaaaacuga

SEQ ID NO: 910207 - RNA, 19 nt, Artificial Sequence
  Description of Artificial Sequence: Synthetic oligonucleotide
ucggccuuuugaaaaugga

SEQ ID NO: 910208 - RNA, 19 nt, Artificial Sequence
  Description of Artificial Sequence: Synthetic oligonucleotide
guaagguaggugccccugg

SEQ ID NO: 910209 - RNA, 19 nt, Artificial Sequence
  Description of Artificial Sequence: Synthetic oligonucleotide
aggcauugacugcaauuuc

SEQ ID NO: 910210 - RNA, 19 nt, Artificial Sequence
  Description of Artificial Sequence: Synthetic oligonucleotide
ugauugguuaguuguuuua

SEQ ID NO: 910211 - RNA, 19 nt, Artificial Sequence
  Description of Artificial Sequence: Synthetic oligonucleotide
ugguaucaagggauggccu

SEQ ID NO: 910212 - RNA, 19 nt, Artificial Sequence
  Description of Artificial Sequence: Synthetic oligonucleotide
uguuugaaccacagaggau

SEQ ID NO: 910213 - RNA, 19 nt, Artificial Sequence
  Description of Artificial Sequence: Synthetic oligonucleotide
cugucauaauagcacuaag

SEQ ID NO: 910214 - RNA, 19 nt, Artificial Sequence
  Description of Artificial Sequence: Synthetic oligonucleotide
gauuucggguguguuuggg

SEQ ID NO: 910215 - RNA, 19 nt, Artificial Sequence
  Description of Artificial Sequence: Synthetic oligonucleotide
aguuaccccagcuggacaa

SEQ ID NO: 910216 - RNA, 19 nt, Artificial Sequence
  Description of Artificial Sequence: Synthetic oligonucleotide
ugcuuucaauugcaauagc

SEQ ID NO: 910217 - RNA, 19 nt, Artificial Sequence
  Description of Artificial Sequence: Synthetic oligonucleotide
uauuaggaugccacuuaau

SEQ ID NO: 910218 - RNA, 19 nt, Artificial Sequence
  Description of Artificial Sequence: Synthetic oligonucleotide
uauuugcuccauccuucgc

SEQ ID NO: 910219 - RNA, 19 nt, Artificial Sequence
  Description of Artificial Sequence: Synthetic oligonucleotide
caaauauuauacacugcaa

SEQ ID NO: 910220 - RNA, 19 nt, Artificial Sequence
  Description of Artificial Sequence: Synthetic oligonucleotide
auccgcaauaaugucagcu

SEQ ID NO: 910221 - RNA, 19 nt, Artificial Sequence
  Description of Artificial Sequence: Synthetic oligonucleotide
uccgcaauaaugucagcuu

SEQ ID NO: 910222 - RNA, 19 nt, Artificial Sequence
  Description of Artificial Sequence: Synthetic oligonucleotide
aacuugauugccagagcca

SEQ ID NO: 910223 - RNA, 19 nt, Artificial Sequence
  Description of Artificial Sequence: Synthetic oligonucleotide
acaauauauuaggaugcca

SEQ ID NO: 910224 - RNA, 19 nt, Artificial Sequence
  Description of Artificial Sequence: Synthetic oligonucleotide
uuugaaccacagaggauuu

SEQ ID NO: 910225 - RNA, 19 nt, Artificial Sequence
  Description of Artificial Sequence: Synthetic oligonucleotide
gcuuuaacgacaucaucac

SEQ ID NO: 910226 - RNA, 19 nt, Artificial Sequence
  Description of Artificial Sequence: Synthetic oligonucleotide
uguaagguaggugccccug

SEQ ID NO: 910227 - RNA, 19 nt, Artificial Sequence
  Description of Artificial Sequence: Synthetic oligonucleotide
gaguccuuaagaauucuaa

SEQ ID NO: 910228 - RNA, 19 nt, Artificial Sequence
  Description of Artificial Sequence: Synthetic oligonucleotide
auuucggguguguuugggu

SEQ ID NO: 910229 - RNA, 19 nt, Artificial Sequence
  Description of Artificial Sequence: Synthetic oligonucleotide
gguaucaagggauggccug

SEQ ID NO: 910230 - RNA, 19 nt, Artificial Sequence
  Description of Artificial Sequence: Synthetic oligonucleotide
agagccauguuuccuuuaa

SEQ ID NO: 910231 - RNA, 19 nt, Artificial Sequence
  Description of Artificial Sequence: Synthetic oligonucleotide
caauuucaagucuuauaga

SEQ ID NO: 910232 - RNA, 19 nt, Artificial Sequence
  Description of Artificial Sequence: Synthetic oligonucleotide
gccugcaaauauuauacac

SEQ ID NO: 910233 - RNA, 19 nt, Artificial Sequence
  Description of Artificial Sequence: Synthetic oligonucleotide
ugacugaaauaaaggcuua

SEQ ID NO: 910234 - RNA, 19 nt, Artificial Sequence
  Description of Artificial Sequence: Synthetic oligonucleotide
ugacugcaauuucaccucu

SEQ ID NO: 910235 - RNA, 19 nt, Artificial Sequence
  Description of Artificial Sequence: Synthetic oligonucleotide
aucugguaucaagggaugg

SEQ ID NO: 910236 - RNA, 19 nt, Artificial Sequence
  Description of Artificial Sequence: Synthetic oligonucleotide
auauccauagcagcaguau

SEQ ID NO: 910237 - RNA, 19 nt, Artificial Sequence
  Description of Artificial Sequence: Synthetic oligonucleotide
auaacugcaucugggaauu

SEQ ID NO: 910238 - RNA, 19 nt, Artificial Sequence
  Description of Artificial Sequence: Synthetic oligonucleotide
auuagucauucaugacugu

SEQ ID NO: 910239 - RNA, 19 nt, Artificial Sequence
  Description of Artificial Sequence: Synthetic oligonucleotide
uuccuuuaaucuucaguuu

SEQ ID NO: 910240 - RNA, 19 nt, Artificial Sequence
  Description of Artificial Sequence: Synthetic oligonucleotide
ugacaauauuugcuccauc

SEQ ID NO: 910241 - RNA, 19 nt, Artificial Sequence
  Description of Artificial Sequence: Synthetic oligonucleotide
guggugaguagauuaaacu

SEQ ID NO: 910242 - RNA, 19 nt, Artificial Sequence
  Description of Artificial Sequence: Synthetic oligonucleotide
ugaguuaccccagcuggac

SEQ ID NO: 910243 - RNA, 19 nt, Artificial Sequence
  Description of Artificial Sequence: Synthetic oligonucleotide
ugccugcaaauauuauaca

SEQ ID NO: 910244 - RNA, 19 nt, Artificial Sequence
  Description of Artificial Sequence: Synthetic oligonucleotide
ucaaguccacucucuuugu

SEQ ID NO: 910245 - RNA, 19 nt, Artificial Sequence
  Description of Artificial Sequence: Synthetic oligonucleotide
acuugauugccagagccau

SEQ ID NO: 910246 - RNA, 19 nt, Artificial Sequence
  Description of Artificial Sequence: Synthetic oligonucleotide
aguucaaggccaguugagu

SEQ ID NO: 910247 - RNA, 19 nt, Artificial Sequence
  Description of Artificial Sequence: Synthetic oligonucleotide
ccauguaccaccaucuuca

SEQ ID NO: 910248 - RNA, 19 nt, Artificial Sequence
  Description of Artificial Sequence: Synthetic oligonucleotide
auuugcuguucaucucuca

SEQ ID NO: 910249 - RNA, 19 nt, Artificial Sequence
  Description of Artificial Sequence: Synthetic oligonucleotide
uucccgacaugaaugccau

SEQ ID NO: 910250 - RNA, 19 nt, Artificial Sequence
  Description of Artificial Sequence: Synthetic oligonucleotide
agcauccgcaauaauguca

SEQ ID NO: 910251 - RNA, 19 nt, Artificial Sequence
  Description of Artificial Sequence: Synthetic oligonucleotide
uuuucccgacaugaaugcc

SEQ ID NO: 910252 - RNA, 19 nt, Artificial Sequence
  Description of Artificial Sequence: Synthetic oligonucleotide
cuauaacugcaucugggaa

SEQ ID NO: 910253 - RNA, 19 nt, Artificial Sequence
  Description of Artificial Sequence: Synthetic oligonucleotide
caguguagauugugccugg

SEQ ID NO: 910254 - RNA, 19 nt, Artificial Sequence
  Description of Artificial Sequence: Synthetic oligonucleotide
cuuuguaggaguauccaau

SEQ ID NO: 910255 - RNA, 19 nt, Artificial Sequence
  Description of Artificial Sequence: Synthetic oligonucleotide
guuugaaccacagaggauu

SEQ ID NO: 910256 - RNA, 19 nt, Artificial Sequence
  Description of Artificial Sequence: Synthetic oligonucleotide
caagucuuauagauacaga

SEQ ID NO: 910257 - RNA, 19 nt, Artificial Sequence
  Description of Artificial Sequence: Synthetic oligonucleotide
cccgacaugaaugccaugg

SEQ ID NO: 910258 - RNA, 19 nt, Artificial Sequence
  Description of Artificial Sequence: Synthetic oligonucleotide
acaccagauccuccaagca

SEQ ID NO: 910259 - RNA, 19 nt, Artificial Sequence
  Description of Artificial Sequence: Synthetic oligonucleotide
uuuaggccauaaggcauug

SEQ ID NO: 910260 - RNA, 19 nt, Artificial Sequence
  Description of Artificial Sequence: Synthetic oligonucleotide
cuauauggcauaaggcaua

SEQ ID NO: 910261 - RNA, 19 nt, Artificial Sequence
  Description of Artificial Sequence: Synthetic oligonucleotide
gcugagauuaagaauaugu

SEQ ID NO: 910262 - RNA, 19 nt, Artificial Sequence
  Description of Artificial Sequence: Synthetic oligonucleotide
gaggacugaccugaguuca

SEQ ID NO: 910263 - RNA, 19 nt, Artificial Sequence
  Description of Artificial Sequence: Synthetic oligonucleotide
uccaacuuucccacccuua

SEQ ID NO: 910264 - RNA, 19 nt, Artificial Sequence
  Description of Artificial Sequence: Synthetic oligonucleotide
aauacaugcuuuggaugua

SEQ ID NO: 910265 - RNA, 19 nt, Artificial Sequence
  Description of Artificial Sequence: Synthetic oligonucleotide
ggaauaugcagcauccgca

SEQ ID NO: 910266 - RNA, 19 nt, Artificial Sequence
  Description of Artificial Sequence: Synthetic oligonucleotide
gcauccgcaauaaugucag

SEQ ID NO: 910267 - RNA, 19 nt, Artificial Sequence
  Description of Artificial Sequence: Synthetic oligonucleotide
aaccauguaccaccaucuu

SEQ ID NO: 910268 - RNA, 19 nt, Artificial Sequence
  Description of Artificial Sequence: Synthetic oligonucleotide
cacugagcgaguccuuaag

SEQ ID NO: 910269 - RNA, 19 nt, Artificial Sequence
  Description of Artificial Sequence: Synthetic oligonucleotide
auagacugcuuguguggcu

SEQ ID NO: 910270 - RNA, 19 nt, Artificial Sequence
  Description of Artificial Sequence: Synthetic oligonucleotide
caauaauaaaguugccagu

SEQ ID NO: 910271 - RNA, 19 nt, Artificial Sequence
  Description of Artificial Sequence: Synthetic oligonucleotide
auuucaagucuuauagaua

SEQ ID NO: 910272 - RNA, 19 nt, Artificial Sequence
  Description of Artificial Sequence: Synthetic oligonucleotide
ugggauuucggguguguuu

SEQ ID NO: 910273 - RNA, 19 nt, Artificial Sequence
  Description of Artificial Sequence: Synthetic oligonucleotide
aguguagauugugccuggg

SEQ ID NO: 910274 - RNA, 19 nt, Artificial Sequence
  Description of Artificial Sequence: Synthetic oligonucleotide
caacaacacauggcaaggc

SEQ ID NO: 910275 - RNA, 19 nt, Artificial Sequence
  Description of Artificial Sequence: Synthetic oligonucleotide
uaauagcacuugcauuguu

SEQ ID NO: 910276 - RNA, 19 nt, Artificial Sequence
  Description of Artificial Sequence: Synthetic oligonucleotide
caaaauguggucugcugcu

SEQ ID NO: 910277 - RNA, 19 nt, Artificial Sequence
  Description of Artificial Sequence: Synthetic oligonucleotide
cugcaagaaagcaaugacu

SEQ ID NO: 910278 - RNA, 19 nt, Artificial Sequence
  Description of Artificial Sequence: Synthetic oligonucleotide
uagcuaggcauggugguuc

SEQ ID NO: 910279 - RNA, 19 nt, Artificial Sequence
  Description of Artificial Sequence: Synthetic oligonucleotide
caacagaacuuuaacugcu

SEQ ID NO: 910280 - RNA, 19 nt, Artificial Sequence
  Description of Artificial Sequence: Synthetic oligonucleotide
guguuugggugguuuucgc

SEQ ID NO: 910281 - RNA, 19 nt, Artificial Sequence
  Description of Artificial Sequence: Synthetic oligonucleotide
ggccaguugaguuacccca

SEQ ID NO: 910282 - RNA, 19 nt, Artificial Sequence
  Description of Artificial Sequence: Synthetic oligonucleotide
gcaguguagauugugccug

SEQ ID NO: 910283 - RNA, 19 nt, Artificial Sequence
  Description of Artificial Sequence: Synthetic oligonucleotide
gcuugauauugauuaguca

SEQ ID NO: 910284 - RNA, 19 nt, Artificial Sequence
  Description of Artificial Sequence: Synthetic oligonucleotide
auuuuacaugagaaguuuu

SEQ ID NO: 910285 - RNA, 19 nt, Artificial Sequence
  Description of Artificial Sequence: Synthetic oligonucleotide
uaccaccaucuucaccuga

SEQ ID NO: 910286 - RNA, 19 nt, Artificial Sequence
  Description of Artificial Sequence: Synthetic oligonucleotide
gccugguguaauugcauag

SEQ ID NO: 910287 - RNA, 19 nt, Artificial Sequence
  Description of Artificial Sequence: Synthetic oligonucleotide
augcuuaugauaaguuaaa

SEQ ID NO: 910288 - RNA, 19 nt, Artificial Sequence
  Description of Artificial Sequence: Synthetic oligonucleotide
caccacgucugcccgcucg

SEQ ID NO: 910289 - RNA, 19 nt, Artificial Sequence
  Description of Artificial Sequence: Synthetic oligonucleotide
ucacugagcgaguccuuaa

SEQ ID NO: 910290 - RNA, 19 nt, Artificial Sequence
  Description of Artificial Sequence: Synthetic oligonucleotide
caugaaugccaugguuggc

SEQ ID NO: 910291 - RNA, 19 nt, Artificial Sequence
  Description of Artificial Sequence: Synthetic oligonucleotide
ccucuauaacugcaucugg

SEQ ID NO: 910292 - RNA, 19 nt, Artificial Sequence
  Description of Artificial Sequence: Synthetic oligonucleotide
ggauuuagguucaggggug

SEQ ID NO: 910293 - RNA, 19 nt, Artificial Sequence
  Description of Artificial Sequence: Synthetic oligonucleotide
gucaagcuaauagcacuug

SEQ ID NO: 910294 - RNA, 19 nt, Artificial Sequence
  Description of Artificial Sequence: Synthetic oligonucleotide
  modified_base (10)..(10): a, c, u, g, unknown or other
gguuuucgcngcaaugaca

SEQ ID NO: 910295 - RNA, 19 nt, Artificial Sequence
  Description of Artificial Sequence: Synthetic oligonucleotide
gguggugaguagauuaaac

SEQ ID NO: 910296 - RNA, 19 nt, Artificial Sequence
  Description of Artificial Sequence: Synthetic oligonucleotide
uggcuuuaguuucccugaa

SEQ ID NO: 910297 - RNA, 19 nt, Artificial Sequence
  Description of Artificial Sequence: Synthetic oligonucleotide
ccuuaagaauucuaaaugu

SEQ ID NO: 910298 - RNA, 19 nt, Artificial Sequence
  Description of Artificial Sequence: Synthetic oligonucleotide
acauggcaaggccuuuccu

SEQ ID NO: 910299 - RNA, 19 nt, Artificial Sequence
  Description of Artificial Sequence: Synthetic oligonucleotide
caugagaaguuuuguaaau

SEQ ID NO: 910300 - RNA, 19 nt, Artificial Sequence
  Description of Artificial Sequence: Synthetic oligonucleotide
auguaagguaggugccccu

SEQ ID NO: 910301 - RNA, 19 nt, Artificial Sequence
  Description of Artificial Sequence: Synthetic oligonucleotide
gacugaaauaaaggcuuaa

SEQ ID NO: 910302 - RNA, 19 nt, Artificial Sequence
  Description of Artificial Sequence: Synthetic oligonucleotide
cacacauagacaugccaua

SEQ ID NO: 910303 - RNA, 19 nt, Artificial Sequence
  Description of Artificial Sequence: Synthetic oligonucleotide
gauugccagagccauguuu

SEQ ID NO: 910304 - RNA, 19 nt, Artificial Sequence
  Description of Artificial Sequence: Synthetic oligonucleotide
ccaacuuucccacccuuac

SEQ ID NO: 910305 - RNA, 19 nt, Artificial Sequence
  Description of Artificial Sequence: Synthetic oligonucleotide
aaguugccaguaaaacuuu

SEQ ID NO: 910306 - RNA, 19 nt, Artificial Sequence
  Description of Artificial Sequence: Synthetic oligonucleotide
uaucaagggauggccuggu

SEQ ID NO: 910307 - RNA, 19 nt, Artificial Sequence
  Description of Artificial Sequence: Synthetic oligonucleotide
ggcauugacugcaauuuca

SEQ ID NO: 910308 - RNA, 19 nt, Artificial Sequence
  Description of Artificial Sequence: Synthetic oligonucleotide
gcucggaggacucuccaug

SEQ ID NO: 910309 - RNA, 19 nt, Artificial Sequence
  Description of Artificial Sequence: Synthetic oligonucleotide
aggccauaaggcauugacu

SEQ ID NO: 910310 - RNA, 19 nt, Artificial Sequence
  Description of Artificial Sequence: Synthetic oligonucleotide
ggauguaagguaggugccc

SEQ ID NO: 910311 - RNA, 19 nt, Artificial Sequence
  Description of Artificial Sequence: Synthetic oligonucleotide
aucaguggucauacucauc

SEQ ID NO: 910312 - RNA, 19 nt, Artificial Sequence
  Description of Artificial Sequence: Synthetic oligonucleotide
uguguuggucaagcuaaua

SEQ ID NO: 910313 - RNA, 19 nt, Artificial Sequence
  Description of Artificial Sequence: Synthetic oligonucleotide
aucaagggauggccuggug

SEQ ID NO: 910314 - RNA, 19 nt, Artificial Sequence
  Description of Artificial Sequence: Synthetic oligonucleotide
cagaucaagaaaccaugua

SEQ ID NO: 910315 - RNA, 19 nt, Artificial Sequence
  Description of Artificial Sequence: Synthetic oligonucleotide
caauauuugcuccauccuu

SEQ ID NO: 910316 - RNA, 19 nt, Artificial Sequence
  Description of Artificial Sequence: Synthetic oligonucleotide
cauacucaucaccacgucu

SEQ ID NO: 910317 - RNA, 19 nt, Artificial Sequence
  Description of Artificial Sequence: Synthetic oligonucleotide
ggaugccacuuaaugaaac

SEQ ID NO: 910318 - RNA, 19 nt, Artificial Sequence
  Description of Artificial Sequence: Synthetic oligonucleotide
agaaaccauguaccaccau

SEQ ID NO: 910319 - RNA, 19 nt, Artificial Sequence
  Description of Artificial Sequence: Synthetic oligonucleotide
gagcgaguccuuaagaauu

SEQ ID NO: 910320 - RNA, 19 nt, Artificial Sequence
  Description of Artificial Sequence: Synthetic oligonucleotide
cauucaugacuguaguuuu

SEQ ID NO: 910321 - RNA, 19 nt, Artificial Sequence
  Description of Artificial Sequence: Synthetic oligonucleotide
  modified_base (8)..(8): a, c, u, g, unknown or other
uuuucgcngcaaugacaau

SEQ ID NO: 910322 - RNA, 19 nt, Artificial Sequence
  Description of Artificial Sequence: Synthetic oligonucleotide
guguaauugcauagacauc

SEQ ID NO: 910323 - RNA, 19 nt, Artificial Sequence
  Description of Artificial Sequence: Synthetic oligonucleotide
gcauugacugcaauuucac

SEQ ID NO: 910324 - RNA, 19 nt, Artificial Sequence
  Description of Artificial Sequence: Synthetic oligonucleotide
auggccugguguaauugca

SEQ ID NO: 910325 - RNA, 19 nt, Artificial Sequence
  Description of Artificial Sequence: Synthetic oligonucleotide
cacgucugcccgcucggag

SEQ ID NO: 910326 - RNA, 19 nt, Artificial Sequence
  Description of Artificial Sequence: Synthetic oligonucleotide
gugauauuguuuccucuau

SEQ ID NO: 910327 - RNA, 19 nt, Artificial Sequence
  Description of Artificial Sequence: Synthetic oligonucleotide
cauccgcaauaaugucagc

SEQ ID NO: 910328 - RNA, 19 nt, Artificial Sequence
  Description of Artificial Sequence: Synthetic oligonucleotide
ucggguguguuuggguggu

SEQ ID NO: 910329 - RNA, 19 nt, Artificial Sequence
  Description of Artificial Sequence: Synthetic oligonucleotide
cuuuaacgacaucaucacu

SEQ ID NO: 910330 - RNA, 19 nt, Artificial Sequence
  Description of Artificial Sequence: Synthetic oligonucleotide
aucacugagcgaguccuua

SEQ ID NO: 910331 - RNA, 19 nt, Artificial Sequence
  Description of Artificial Sequence: Synthetic oligonucleotide
ccacuuaaugaaacuuguc

SEQ ID NO: 910332 - RNA, 19 nt, Artificial Sequence
  Description of Artificial Sequence: Synthetic oligonucleotide
ccaacuugauugccagagc

SEQ ID NO: 910333 - RNA, 19 nt, Artificial Sequence
  Description of Artificial Sequence: Synthetic oligonucleotide
guguguuugggugguuuuc

SEQ ID NO: 910334 - RNA, 19 nt, Artificial Sequence
  Description of Artificial Sequence: Synthetic oligonucleotide
agaagacaacagaacuuua

SEQ ID NO: 910335 - RNA, 19 nt, Artificial Sequence
  Description of Artificial Sequence: Synthetic oligonucleotide
caauaaugucagcuuuucu

SEQ ID NO: 910336 - RNA, 19 nt, Artificial Sequence
  Description of Artificial Sequence: Synthetic oligonucleotide
acucucuuuguaggaguau

SEQ ID NO: 910337 - RNA, 19 nt, Artificial Sequence
  Description of Artificial Sequence: Synthetic oligonucleotide
gaauuuagcuaggcauggu

SEQ ID NO: 910338 - RNA, 19 nt, Artificial Sequence
  Description of Artificial Sequence: Synthetic oligonucleotide
ggauggccugguguaauug

SEQ ID NO: 910339 - RNA, 19 nt, Artificial Sequence
  Description of Artificial Sequence: Synthetic oligonucleotide
cugagaguucaaacugaua

SEQ ID NO: 910340 - RNA, 19 nt, Artificial Sequence
  Description of Artificial Sequence: Synthetic oligonucleotide
  modified_base (5)..(5): a, c, u, g, unknown or other
ucgcngcaaugacaauauu

SEQ ID NO: 910341 - RNA, 19 nt, Artificial Sequence
  Description of Artificial Sequence: Synthetic oligonucleotide
uggcuguuuuaggccauaa

SEQ ID NO: 910342 - RNA, 19 nt, Artificial Sequence
  Description of Artificial Sequence: Synthetic oligonucleotide
ggaggacucuccaugucca

SEQ ID NO: 910343 - RNA, 19 nt, Artificial Sequence
  Description of Artificial Sequence: Synthetic oligonucleotide
cugcugaagguggugagua

SEQ ID NO: 910344 - RNA, 19 nt, Artificial Sequence
  Description of Artificial Sequence: Synthetic oligonucleotide
ucccgacaugaaugccaug

SEQ ID NO: 910345 - RNA, 19 nt, Artificial Sequence
  Description of Artificial Sequence: Synthetic oligonucleotide
auauggcauaaggcauacu

SEQ ID NO: 910346 - RNA, 19 nt, Artificial Sequence
  Description of Artificial Sequence: Synthetic oligonucleotide
cuaauagcacuugcauugu

SEQ ID NO: 910347 - RNA, 19 nt, Artificial Sequence
  Description of Artificial Sequence: Synthetic oligonucleotide
caccagauccuccaagcau

SEQ ID NO: 910348 - RNA, 19 nt, Artificial Sequence
  Description of Artificial Sequence: Synthetic oligonucleotide
cucggaggacucuccaugu

SEQ ID NO: 910349 - RNA, 19 nt, Artificial Sequence
  Description of Artificial Sequence: Synthetic oligonucleotide
augccaugguuggcuuuag

SEQ ID NO: 910350 - RNA, 19 nt, Artificial Sequence
  Description of Artificial Sequence: Synthetic oligonucleotide
aggugccccugguguucac

SEQ ID NO: 910351 - RNA, 19 nt, Artificial Sequence
  Description of Artificial Sequence: Synthetic oligonucleotide
gccacuuaaugaaacuugu

SEQ ID NO: 910352 - RNA, 19 nt, Artificial Sequence
  Description of Artificial Sequence: Synthetic oligonucleotide
ggcuuuaguuucccugaaa

SEQ ID NO: 910353 - RNA, 19 nt, Artificial Sequence
  Description of Artificial Sequence: Synthetic oligonucleotide
gccaugguuggcuuuaguu

SEQ ID NO: 910354 - RNA, 19 nt, Artificial Sequence
  Description of Artificial Sequence: Synthetic oligonucleotide
caguugaguuaccccagcu

SEQ ID NO: 910355 - RNA, 19 nt, Artificial Sequence
  Description of Artificial Sequence: Synthetic oligonucleotide
auguguuggucaagcuaau

SEQ ID NO: 910356 - RNA, 19 nt, Artificial Sequence
  Description of Artificial Sequence: Synthetic oligonucleotide
guuaccccagcuggacaaa

SEQ ID NO: 910357 - RNA, 19 nt, Artificial Sequence
  Description of Artificial Sequence: Synthetic oligonucleotide
aggacugaccugaguucaa

SEQ ID NO: 910358 - RNA, 19 nt, Artificial Sequence
  Description of Artificial Sequence: Synthetic oligonucleotide
gguucaggggugggcugag

SEQ ID NO: 910359 - RNA, 19 nt, Artificial Sequence
  Description of Artificial Sequence: Synthetic oligonucleotide
  modified_base (4)..(4): a, c, u, g, unknown or other
cgcngcaaugacaauauuu

SEQ ID NO: 910360 - RNA, 19 nt, Artificial Sequence
  Description of Artificial Sequence: Synthetic oligonucleotide
auggcuguuuuaggccaua

SEQ ID NO: 910361 - RNA, 19 nt, Artificial Sequence
  Description of Artificial Sequence: Synthetic oligonucleotide
ccacccuuacucuucagau

SEQ ID NO: 910362 - RNA, 19 nt, Artificial Sequence
  Description of Artificial Sequence: Synthetic oligonucleotide
gguguguuugggugguuuu

SEQ ID NO: 910363 - RNA, 19 nt, Artificial Sequence
  Description of Artificial Sequence: Synthetic oligonucleotide
gugcuacuuugcucuuucu

SEQ ID NO: 910364 - RNA, 19 nt, Artificial Sequence
  Description of Artificial Sequence: Synthetic oligonucleotide
  modified_base (14)..(14): a, c, u, g, unknown or other
gggugguuuucgcngcaau

SEQ ID NO: 910365 - RNA, 19 nt, Artificial Sequence
  Description of Artificial Sequence: Synthetic oligonucleotide
ugcccgcucggaggacucu

SEQ ID NO: 910366 - RNA, 19 nt, Artificial Sequence
  Description of Artificial Sequence: Synthetic oligonucleotide
caggaggacugaccugagu

SEQ ID NO: 910367 - RNA, 19 nt, Artificial Sequence
  Description of Artificial Sequence: Synthetic oligonucleotide
cgaguccuuaagaauucua

SEQ ID NO: 910368 - RNA, 19 nt, Artificial Sequence
  Description of Artificial Sequence: Synthetic oligonucleotide
aggggugggcugagauuaa

SEQ ID NO: 910369 - RNA, 19 nt, Artificial Sequence
  Description of Artificial Sequence: Synthetic oligonucleotide
gcaaugguguaagcacagu

SEQ ID NO: 910370 - RNA, 19 nt, Artificial Sequence
  Description of Artificial Sequence: Synthetic oligonucleotide
ccgcaauaaugucagcuuu

SEQ ID NO: 910371 - RNA, 19 nt, Artificial Sequence
  Description of Artificial Sequence: Synthetic oligonucleotide
ccgacaugaaugccauggu

SEQ ID NO: 910372 - RNA, 19 nt, Artificial Sequence
  Description of Artificial Sequence: Synthetic oligonucleotide
gucugcccgcucggaggac

SEQ ID NO: 910373 - RNA, 19 nt, Artificial Sequence
  Description of Artificial Sequence: Synthetic oligonucleotide
gcaguauguauggcuguuu

SEQ ID NO: 910374 - RNA, 19 nt, Artificial Sequence
  Description of Artificial Sequence: Synthetic oligonucleotide
cgucugcccgcucggagga

SEQ ID NO: 910375 - RNA, 19 nt, Artificial Sequence
  Description of Artificial Sequence: Synthetic oligonucleotide
cccuuacucuucagaucaa

SEQ ID NO: 910376 - RNA, 19 nt, Artificial Sequence
  Description of Artificial Sequence: Synthetic oligonucleotide
cgacaugaaugccaugguu

SEQ ID NO: 910377 - RNA, 19 nt, Artificial Sequence
  Description of Artificial Sequence: Synthetic oligonucleotide
cgacaucaucacugagcga

SEQ ID NO: 910378 - RNA, 19 nt, Artificial Sequence
  Description of Artificial Sequence: Synthetic oligonucleotide
cgcugcuuucaauugcaau

SEQ ID NO: 910379 - RNA, 19 nt, Artificial Sequence
  Description of Artificial Sequence: Synthetic oligonucleotide
ccgcucggaggacucucca

SEQ ID NO: 910380 - RNA, 19 nt, Artificial Sequence
  Description of Artificial Sequence: Synthetic oligonucleotide
uuuauuaagggucccaagg

SEQ ID NO: 910381 - RNA, 19 nt, Artificial Sequence
  Description of Artificial Sequence: Synthetic oligonucleotide
uaugcugugucaaacaagg

SEQ ID NO: 910382 - RNA, 19 nt, Artificial Sequence
  Description of Artificial Sequence: Synthetic oligonucleotide
aaauugagacaaaagauuc

SEQ ID NO: 910383 - RNA, 19 nt, Artificial Sequence
  Description of Artificial Sequence: Synthetic oligonucleotide
acuaccauaagccagacau

SEQ ID NO: 910384 - RNA, 19 nt, Artificial Sequence
  Description of Artificial Sequence: Synthetic oligonucleotide
ugagacaugcgcuugagag

SEQ ID NO: 910385 - RNA, 19 nt, Artificial Sequence
  Description of Artificial Sequence: Synthetic oligonucleotide
aaaacgacaaguucuguga

SEQ ID NO: 910386 - RNA, 19 nt, Artificial Sequence
  Description of Artificial Sequence: Synthetic oligonucleotide
gauaugagcguacacgggg

SEQ ID NO: 910387 - RNA, 19 nt, Artificial Sequence
  Description of Artificial Sequence: Synthetic oligonucleotide
agcucuauugcauggauac

SEQ ID NO: 910388 - RNA, 19 nt, Artificial Sequence
  Description of Artificial Sequence: Synthetic oligonucleotide
uuuaaaacgacaaguucug

SEQ ID NO: 910389 - RNA, 19 nt, Artificial Sequence
  Description of Artificial Sequence: Synthetic oligonucleotide
aguuaguugucauuaacuc

SEQ ID NO: 910390 - RNA, 19 nt, Artificial Sequence
  Description of Artificial Sequence: Synthetic oligonucleotide
ugggcuuagacccauaaca

SEQ ID NO: 910391 - RNA, 19 nt, Artificial Sequence
  Description of Artificial Sequence: Synthetic oligonucleotide
agcguauugcauuuugugc

SEQ ID NO: 910392 - RNA, 19 nt, Artificial Sequence
  Description of Artificial Sequence: Synthetic oligonucleotide
gauaccacaacccugcuga

SEQ ID NO: 910393 - RNA, 19 nt, Artificial Sequence
  Description of Artificial Sequence: Synthetic oligonucleotide
uuuugugccacacaccacu

SEQ ID NO: 910394 - RNA, 19 nt, Artificial Sequence
  Description of Artificial Sequence: Synthetic oligonucleotide
gaaaucaauguccgaaaag

SEQ ID NO: 910395 - RNA, 19 nt, Artificial Sequence
  Description of Artificial Sequence: Synthetic oligonucleotide
gugauaugagcguacacgg

SEQ ID NO: 910396 - RNA, 19 nt, Artificial Sequence
  Description of Artificial Sequence: Synthetic oligonucleotide
uuugggagaaaguuaguug

SEQ ID NO: 910397 - RNA, 19 nt, Artificial Sequence
  Description of Artificial Sequence: Synthetic oligonucleotide
uaaaacgacaaguucugug

SEQ ID NO: 910398 - RNA, 19 nt, Artificial Sequence
  Description of Artificial Sequence: Synthetic oligonucleotide
uugccuaugauucaaccac

SEQ ID NO: 910399 - RNA, 19 nt, Artificial Sequence
  Description of Artificial Sequence: Synthetic oligonucleotide
aauguccgaaaaguaauuc

SEQ ID NO: 910400 - RNA, 19 nt, Artificial Sequence
  Description of Artificial Sequence: Synthetic oligonucleotide
agacaugcgcuugagagcc

SEQ ID NO: 910401 - RNA, 19 nt, Artificial Sequence
  Description of Artificial Sequence: Synthetic oligonucleotide
aaacugcgggcccugagcg

SEQ ID NO: 910402 - RNA, 19 nt, Artificial Sequence
  Description of Artificial Sequence: Synthetic oligonucleotide
ugcguaaccauguaacacc

SEQ ID NO: 910403 - RNA, 19 nt, Artificial Sequence
  Description of Artificial Sequence: Synthetic oligonucleotide
auagcaccuauuuaucuag

SEQ ID NO: 910404 - RNA, 19 nt, Artificial Sequence
  Description of Artificial Sequence: Synthetic oligonucleotide
ggaugauuauucuaaaacc

SEQ ID NO: 910405 - RNA, 19 nt, Artificial Sequence
  Description of Artificial Sequence: Synthetic oligonucleotide
cauagaaccaucccgugag

SEQ ID NO: 910406 - RNA, 19 nt, Artificial Sequence
  Description of Artificial Sequence: Synthetic oligonucleotide
ucgacaauauggcaauuug

SEQ ID NO: 910407 - RNA, 19 nt, Artificial Sequence
  Description of Artificial Sequence: Synthetic oligonucleotide
aaagcauccuacucaagau

SEQ ID NO: 910408 - RNA, 19 nt, Artificial Sequence
  Description of Artificial Sequence: Synthetic oligonucleotide
uucacuaccauaagccaga

SEQ ID NO: 910409 - RNA, 19 nt, Artificial Sequence
  Description of Artificial Sequence: Synthetic oligonucleotide
auggauaccacaacccugc

SEQ ID NO: 910410 - RNA, 19 nt, Artificial Sequence
  Description of Artificial Sequence: Synthetic oligonucleotide
auucucucgacaauauggc

SEQ ID NO: 910411 - RNA, 19 nt, Artificial Sequence
  Description of Artificial Sequence: Synthetic oligonucleotide
agucccauagaaccauccc

SEQ ID NO: 910412 - RNA, 19 nt, Artificial Sequence
  Description of Artificial Sequence: Synthetic oligonucleotide
agguaguacaccaaggauc

SEQ ID NO: 910413 - RNA, 19 nt, Artificial Sequence
  Description of Artificial Sequence: Synthetic oligonucleotide
agacauacauucucucgac

SEQ ID NO: 910414 - RNA, 19 nt, Artificial Sequence
  Description of Artificial Sequence: Synthetic oligonucleotide
ugauaugagcguacacggg

SEQ ID NO: 910415 - RNA, 19 nt, Artificial Sequence
  Description of Artificial Sequence: Synthetic oligonucleotide
ucucucgacaauauggcaa

SEQ ID NO: 910416 - RNA, 19 nt, Artificial Sequence
  Description of Artificial Sequence: Synthetic oligonucleotide
ugacguuggacgauggcug

SEQ ID NO: 910417 - RNA, 19 nt, Artificial Sequence
  Description of Artificial Sequence: Synthetic oligonucleotide
uagacccauaacaagcuga

SEQ ID NO: 910418 - RNA, 19 nt, Artificial Sequence
  Description of Artificial Sequence: Synthetic oligonucleotide
gaagaaaucaauguccgaa

SEQ ID NO: 910419 - RNA, 19 nt, Artificial Sequence
  Description of Artificial Sequence: Synthetic oligonucleotide
aaagagcuucguuccggac

SEQ ID NO: 910420 - RNA, 19 nt, Artificial Sequence
  Description of Artificial Sequence: Synthetic oligonucleotide
gucccauagaaccaucccg

SEQ ID NO: 910421 - RNA, 19 nt, Artificial Sequence
  Description of Artificial Sequence: Synthetic oligonucleotide
acugaucggaucccacugc

SEQ ID NO: 910422 - RNA, 19 nt, Artificial Sequence
  Description of Artificial Sequence: Synthetic oligonucleotide
cacacaggaucuaauguag

SEQ ID NO: 910423 - RNA, 19 nt, Artificial Sequence
  Description of Artificial Sequence: Synthetic oligonucleotide
ggggauauccuuuaaggcc

SEQ ID NO: 910424 - RNA, 19 nt, Artificial Sequence
  Description of Artificial Sequence: Synthetic oligonucleotide
gagcguauugcauuuugug

SEQ ID NO: 910425 - RNA, 19 nt, Artificial Sequence
  Description of Artificial Sequence: Synthetic oligonucleotide
aagagcuuagacaauguau

SEQ ID NO: 910426 - RNA, 19 nt, Artificial Sequence
  Description of Artificial Sequence: Synthetic oligonucleotide
ugauucaaccacugagaag

SEQ ID NO: 910427 - RNA, 19 nt, Artificial Sequence
  Description of Artificial Sequence: Synthetic oligonucleotide
cagaaugggaaucuuggug

SEQ ID NO: 910428 - RNA, 19 nt, Artificial Sequence
  Description of Artificial Sequence: Synthetic oligonucleotide
gacgagucguagcaguggg

SEQ ID NO: 910429 - RNA, 19 nt, Artificial Sequence
  Description of Artificial Sequence: Synthetic oligonucleotide
uaaccauguaacacccgag

SEQ ID NO: 910430 - RNA, 19 nt, Artificial Sequence
  Description of Artificial Sequence: Synthetic oligonucleotide
uagauuaugggaugauuau

SEQ ID NO: 910431 - RNA, 19 nt, Artificial Sequence
  Description of Artificial Sequence: Synthetic oligonucleotide
cuuuauuaagggucccaag

SEQ ID NO: 910432 - RNA, 19 nt, Artificial Sequence
  Description of Artificial Sequence: Synthetic oligonucleotide
uguaacacccgagaguagu

SEQ ID NO: 910433 - RNA, 19 nt, Artificial Sequence
  Description of Artificial Sequence: Synthetic oligonucleotide
uuagacccauaacaagcug

SEQ ID NO: 910434 - RNA, 19 nt, Artificial Sequence
  Description of Artificial Sequence: Synthetic oligonucleotide
cuagauuaugggaugauua

SEQ ID NO: 910435 - RNA, 19 nt, Artificial Sequence
  Description of Artificial Sequence: Synthetic oligonucleotide
guaucguugauccaugcaa

SEQ ID NO: 910436 - RNA, 19 nt, Artificial Sequence
  Description of Artificial Sequence: Synthetic oligonucleotide
aacgacaaguucugugaga

SEQ ID NO: 910437 - RNA, 19 nt, Artificial Sequence
  Description of Artificial Sequence: Synthetic oligonucleotide
auagaaccaucccgugagc

SEQ ID NO: 910438 - RNA, 19 nt, Artificial Sequence
  Description of Artificial Sequence: Synthetic oligonucleotide
caaagcauccuacucaaga

SEQ ID NO: 910439 - RNA, 19 nt, Artificial Sequence
  Description of Artificial Sequence: Synthetic oligonucleotide
guaaccauguaacacccga

SEQ ID NO: 910440 - RNA, 19 nt, Artificial Sequence
  Description of Artificial Sequence: Synthetic oligonucleotide
agaaaucaauguccgaaaa

SEQ ID NO: 910441 - RNA, 19 nt, Artificial Sequence
  Description of Artificial Sequence: Synthetic oligonucleotide
uugacguuggacgauggcu

SEQ ID NO: 910442 - RNA, 19 nt, Artificial Sequence
  Description of Artificial Sequence: Synthetic oligonucleotide
acaaagagcuucguuccgg

SEQ ID NO: 910443 - RNA, 19 nt, Artificial Sequence
  Description of Artificial Sequence: Synthetic oligonucleotide
gacaauauggcaauuuggu

SEQ ID NO: 910444 - RNA, 19 nt, Artificial Sequence
  Description of Artificial Sequence: Synthetic oligonucleotide
agagcuucguuccggacga

SEQ ID NO: 910445 - RNA, 19 nt, Artificial Sequence
  Description of Artificial Sequence: Synthetic oligonucleotide
aacgcccgcaccuugcagu

SEQ ID NO: 910446 - RNA, 19 nt, Artificial Sequence
  Description of Artificial Sequence: Synthetic oligonucleotide
uuccggacgagucguagca

SEQ ID NO: 910447 - RNA, 19 nt, Artificial Sequence
  Description of Artificial Sequence: Synthetic oligonucleotide
uuuccgcuugugcagcgag

SEQ ID NO: 910448 - RNA, 19 nt, Artificial Sequence
  Description of Artificial Sequence: Synthetic oligonucleotide
gaucuaauguaggcagccg

SEQ ID NO: 910449 - RNA, 19 nt, Artificial Sequence
  Description of Artificial Sequence: Synthetic oligonucleotide
agccgauagauggcgaggc

SEQ ID NO: 910450 - RNA, 19 nt, Artificial Sequence
  Description of Artificial Sequence: Synthetic oligonucleotide
guggauccaagaaugagac

SEQ ID NO: 910451 - RNA, 19 nt, Artificial Sequence
  Description of Artificial Sequence: Synthetic oligonucleotide
gaguguucuagaaggauuc

SEQ ID NO: 910452 - RNA, 19 nt, Artificial Sequence
  Description of Artificial Sequence: Synthetic oligonucleotide
gacuggugacacauuaugc

SEQ ID NO: 910453 - RNA, 19 nt, Artificial Sequence
  Description of Artificial Sequence: Synthetic oligonucleotide
agcccuugccaguaguuag

SEQ ID NO: 910454 - RNA, 19 nt, Artificial Sequence
  Description of Artificial Sequence: Synthetic oligonucleotide
gcuuagacccauaacaagc

SEQ ID NO: 910455 - RNA, 19 nt, Artificial Sequence
  Description of Artificial Sequence: Synthetic oligonucleotide
guggcuaggaguguucuag

SEQ ID NO: 910456 - RNA, 19 nt, Artificial Sequence
  Description of Artificial Sequence: Synthetic oligonucleotide
ugagcguacacggggacug

SEQ ID NO: 910457 - RNA, 19 nt, Artificial Sequence
  Description of Artificial Sequence: Synthetic oligonucleotide
gucaguacguaccggggcc

SEQ ID NO: 910458 - RNA, 19 nt, Artificial Sequence
  Description of Artificial Sequence: Synthetic oligonucleotide
uucucucgacaauauggca

SEQ ID NO: 910459 - RNA, 19 nt, Artificial Sequence
  Description of Artificial Sequence: Synthetic oligonucleotide
cuucguuccggacgagucg

SEQ ID NO: 910460 - RNA, 19 nt, Artificial Sequence
  Description of Artificial Sequence: Synthetic oligonucleotide
caaacugcgggcccugagc

SEQ ID NO: 910461 - RNA, 19 nt, Artificial Sequence
  Description of Artificial Sequence: Synthetic oligonucleotide
uccuacucaagauuuuguu

SEQ ID NO: 910462 - RNA, 19 nt, Artificial Sequence
  Description of Artificial Sequence: Synthetic oligonucleotide
ucacugaucggaucccacu

SEQ ID NO: 910463 - RNA, 19 nt, Artificial Sequence
  Description of Artificial Sequence: Synthetic oligonucleotide
ugccuaugauucaaccacu

SEQ ID NO: 910464 - RNA, 19 nt, Artificial Sequence
  Description of Artificial Sequence: Synthetic oligonucleotide
ugagugauaugagcguaca

SEQ ID NO: 910465 - RNA, 19 nt, Artificial Sequence
  Description of Artificial Sequence: Synthetic oligonucleotide
ugugcucggauaucauaga

SEQ ID NO: 910466 - RNA, 19 nt, Artificial Sequence
  Description of Artificial Sequence: Synthetic oligonucleotide
acacuuuauuaaggguccc

SEQ ID NO: 910467 - RNA, 19 nt, Artificial Sequence
  Description of Artificial Sequence: Synthetic oligonucleotide
ggguuuguaucuuccuugg

SEQ ID NO: 910468 - RNA, 19 nt, Artificial Sequence
  Description of Artificial Sequence: Synthetic oligonucleotide
aggaucuaauguaggcagc

SEQ ID NO: 910469 - RNA, 19 nt, Artificial Sequence
  Description of Artificial Sequence: Synthetic oligonucleotide
uaugagcguacacggggac

SEQ ID NO: 910470 - RNA, 19 nt, Artificial Sequence
  Description of Artificial Sequence: Synthetic oligonucleotide
gacggggucaguacguacc

SEQ ID NO: 910471 - RNA, 19 nt, Artificial Sequence
  Description of Artificial Sequence: Synthetic oligonucleotide
cugaucggaucccacugcc

SEQ ID NO: 910472 - RNA, 19 nt, Artificial Sequence
  Description of Artificial Sequence: Synthetic oligonucleotide
agacacaccuccagguucg

SEQ ID NO: 910473 - RNA, 19 nt, Artificial Sequence
  Description of Artificial Sequence: Synthetic oligonucleotide
ggacuggugacacauuaug

SEQ ID NO: 910474 - RNA, 19 nt, Artificial Sequence
  Description of Artificial Sequence: Synthetic oligonucleotide
cuuucgugcgcccggcccg

SEQ ID NO: 910475 - RNA, 19 nt, Artificial Sequence
  Description of Artificial Sequence: Synthetic oligonucleotide
ucgcggucuuucagaaugg

SEQ ID NO: 910476 - RNA, 19 nt, Artificial Sequence
  Description of Artificial Sequence: Synthetic oligonucleotide
agacccauaacaagcugag

SEQ ID NO: 910477 - RNA, 19 nt, Artificial Sequence
  Description of Artificial Sequence: Synthetic oligonucleotide
uggcaauuugguggaaaag

SEQ ID NO: 910478 - RNA, 19 nt, Artificial Sequence
  Description of Artificial Sequence: Synthetic oligonucleotide
ucuagauuaugggaugauu

SEQ ID NO: 910479 - RNA, 19 nt, Artificial Sequence
  Description of Artificial Sequence: Synthetic oligonucleotide
gaaugagacaugcgcuuga

SEQ ID NO: 910480 - RNA, 19 nt, Artificial Sequence
  Description of Artificial Sequence: Synthetic oligonucleotide
uuaaaacgacaaguucugu

SEQ ID NO: 910481 - RNA, 19 nt, Artificial Sequence
  Description of Artificial Sequence: Synthetic oligonucleotide
uggugacacauuaugccuu

SEQ ID NO: 910482 - RNA, 19 nt, Artificial Sequence
  Description of Artificial Sequence: Synthetic oligonucleotide
cgcguaaagggaaaggagg

SEQ ID NO: 910483 - RNA, 19 nt, Artificial Sequence
  Description of Artificial Sequence: Synthetic oligonucleotide
guguucuagaaggauucag

SEQ ID NO: 910484 - RNA, 19 nt, Artificial Sequence
  Description of Artificial Sequence: Synthetic oligonucleotide
uaguacaccaaggaucuuu

SEQ ID NO: 910485 - RNA, 19 nt, Artificial Sequence
  Description of Artificial Sequence: Synthetic oligonucleotide
ggggucaguacguaccggg

SEQ ID NO: 910486 - RNA, 19 nt, Artificial Sequence
  Description of Artificial Sequence: Synthetic oligonucleotide
ucaaagagaggcgcguaaa

SEQ ID NO: 910487 - RNA, 19 nt, Artificial Sequence
  Description of Artificial Sequence: Synthetic oligonucleotide
cacugaucggaucccacug

SEQ ID NO: 910488 - RNA, 19 nt, Artificial Sequence
  Description of Artificial Sequence: Synthetic oligonucleotide
ggcuuagacccauaacaag

SEQ ID NO: 910489 - RNA, 19 nt, Artificial Sequence
  Description of Artificial Sequence: Synthetic oligonucleotide
caagaaugagacaugcgcu

SEQ ID NO: 910490 - RNA, 19 nt, Artificial Sequence
  Description of Artificial Sequence: Synthetic oligonucleotide
uaacacccgagaguaguug

SEQ ID NO: 910491 - RNA, 19 nt, Artificial Sequence
  Description of Artificial Sequence: Synthetic oligonucleotide
cugcguaaccauguaacac

SEQ ID NO: 910492 - RNA, 19 nt, Artificial Sequence
  Description of Artificial Sequence: Synthetic oligonucleotide
cuugacguuggacgauggc

SEQ ID NO: 910493 - RNA, 19 nt, Artificial Sequence
  Description of Artificial Sequence: Synthetic oligonucleotide
agcugaucaaagagaggcg

SEQ ID NO: 910494 - RNA, 19 nt, Artificial Sequence
  Description of Artificial Sequence: Synthetic oligonucleotide
auaguaucguugauccaug

SEQ ID NO: 910495 - RNA, 19 nt, Artificial Sequence
  Description of Artificial Sequence: Synthetic oligonucleotide
aaaccgagggugguaaguu

SEQ ID NO: 910496 - RNA, 19 nt, Artificial Sequence
  Description of Artificial Sequence: Synthetic oligonucleotide
gcguaaagggaaaggaggg

SEQ ID NO: 910497 - RNA, 19 nt, Artificial Sequence
  Description of Artificial Sequence: Synthetic oligonucleotide
ggaucuaauguaggcagcc

SEQ ID NO: 910498 - RNA, 19 nt, Artificial Sequence
  Description of Artificial Sequence: Synthetic oligonucleotide
agcucacugaucggauccc

SEQ ID NO: 910499 - RNA, 19 nt, Artificial Sequence
  Description of Artificial Sequence: Synthetic oligonucleotide
cuuagacccauaacaagcu

SEQ ID NO: 910500 - RNA, 19 nt, Artificial Sequence
  Description of Artificial Sequence: Synthetic oligonucleotide
agguucgcggucuuucaga

SEQ ID NO: 910501 - RNA, 19 nt, Artificial Sequence
  Description of Artificial Sequence: Synthetic oligonucleotide
agauuaugggaugauuauu

SEQ ID NO: 910502 - RNA, 19 nt, Artificial Sequence
  Description of Artificial Sequence: Synthetic oligonucleotide
uucguuccggacgagucgu

SEQ ID NO: 910503 - RNA, 19 nt, Artificial Sequence
  Description of Artificial Sequence: Synthetic oligonucleotide
accgagggugguaaguuag

SEQ ID NO: 910504 - RNA, 19 nt, Artificial Sequence
  Description of Artificial Sequence: Synthetic oligonucleotide
agcauccuacucaagauuu

SEQ ID NO: 910505 - RNA, 19 nt, Artificial Sequence
  Description of Artificial Sequence: Synthetic oligonucleotide
ggucaauacaucaucuguc

SEQ ID NO: 910506 - RNA, 19 nt, Artificial Sequence
  Description of Artificial Sequence: Synthetic oligonucleotide
agcgagugaucccagccaa

SEQ ID NO: 910507 - RNA, 19 nt, Artificial Sequence
  Description of Artificial Sequence: Synthetic oligonucleotide
agcuuagacaauguauuuu

SEQ ID NO: 910508 - RNA, 19 nt, Artificial Sequence
  Description of Artificial Sequence: Synthetic oligonucleotide
cauaguaucguugauccau

SEQ ID NO: 910509 - RNA, 19 nt, Artificial Sequence
  Description of Artificial Sequence: Synthetic oligonucleotide
uaacgcccgcaccuugcag

SEQ ID NO: 910510 - RNA, 19 nt, Artificial Sequence
  Description of Artificial Sequence: Synthetic oligonucleotide
guuccggacgagucguagc

SEQ ID NO: 910511 - RNA, 19 nt, Artificial Sequence
  Description of Artificial Sequence: Synthetic oligonucleotide
aaccgagggugguaaguua

SEQ ID NO: 910512 - RNA, 19 nt, Artificial Sequence
  Description of Artificial Sequence: Synthetic oligonucleotide
ucaguacguaccggggccc

SEQ ID NO: 910513 - RNA, 19 nt, Artificial Sequence
  Description of Artificial Sequence: Synthetic oligonucleotide
cagcauuggggaagaaauc

SEQ ID NO: 910514 - RNA, 19 nt, Artificial Sequence
  Description of Artificial Sequence: Synthetic oligonucleotide
augagacaugcgcuugaga

SEQ ID NO: 910515 - RNA, 19 nt, Artificial Sequence
  Description of Artificial Sequence: Synthetic oligonucleotide
ggucaguacguaccggggc

SEQ ID NO: 910516 - RNA, 19 nt, Artificial Sequence
  Description of Artificial Sequence: Synthetic oligonucleotide
auaccacaacccugcugag

SEQ ID NO: 910517 - RNA, 19 nt, Artificial Sequence
  Description of Artificial Sequence: Synthetic oligonucleotide
agagaggcgcguaaaggga

SEQ ID NO: 910518 - RNA, 19 nt, Artificial Sequence
  Description of Artificial Sequence: Synthetic oligonucleotide
gacacugccauaguaucgu

SEQ ID NO: 910519 - RNA, 19 nt, Artificial Sequence
  Description of Artificial Sequence: Synthetic oligonucleotide
caaagagcuucguuccgga

SEQ ID NO: 910520 - RNA, 19 nt, Artificial Sequence
  Description of Artificial Sequence: Synthetic oligonucleotide
gguaguacaccaaggaucu

SEQ ID NO: 910521 - RNA, 19 nt, Artificial Sequence
  Description of Artificial Sequence: Synthetic oligonucleotide
ugcagcgagugaucccagc

SEQ ID NO: 910522 - RNA, 19 nt, Artificial Sequence
  Description of Artificial Sequence: Synthetic oligonucleotide
acguuggacgauggcugcc

SEQ ID NO: 910523 - RNA, 19 nt, Artificial Sequence
  Description of Artificial Sequence: Synthetic oligonucleotide
gcagcgagugaucccagcc

SEQ ID NO: 910524 - RNA, 19 nt, Artificial Sequence
  Description of Artificial Sequence: Synthetic oligonucleotide
acuugacguuggacgaugg

SEQ ID NO: 910525 - RNA, 19 nt, Artificial Sequence
  Description of Artificial Sequence: Synthetic oligonucleotide
aucucugugcucggauauc

SEQ ID NO: 910526 - RNA, 19 nt, Artificial Sequence
  Description of Artificial Sequence: Synthetic oligonucleotide
aggcgcguaaagggaaagg

SEQ ID NO: 910527 - RNA, 19 nt, Artificial Sequence
  Description of Artificial Sequence: Synthetic oligonucleotide
uuaugccuugcaucacuuu

SEQ ID NO: 910528 - RNA, 19 nt, Artificial Sequence
  Description of Artificial Sequence: Synthetic oligonucleotide
auccuacucaagauuuugu

SEQ ID NO: 910529 - RNA, 19 nt, Artificial Sequence
  Description of Artificial Sequence: Synthetic oligonucleotide
aacugcgggcccugagcgu

SEQ ID NO: 910530 - RNA, 19 nt, Artificial Sequence
  Description of Artificial Sequence: Synthetic oligonucleotide
guacacggggacuggugac

SEQ ID NO: 910531 - RNA, 19 nt, Artificial Sequence
  Description of Artificial Sequence: Synthetic oligonucleotide
cagguucgcggucuuucag

SEQ ID NO: 910532 - RNA, 19 nt, Artificial Sequence
  Description of Artificial Sequence: Synthetic oligonucleotide
guccgaaaaguaauuccuc

SEQ ID NO: 910533 - RNA, 19 nt, Artificial Sequence
  Description of Artificial Sequence: Synthetic oligonucleotide
uacguaccggggccccggg

SEQ ID NO: 910534 - RNA, 19 nt, Artificial Sequence
  Description of Artificial Sequence: Synthetic oligonucleotide
gaggcgcguaaagggaaag

SEQ ID NO: 910535 - RNA, 19 nt, Artificial Sequence
  Description of Artificial Sequence: Synthetic oligonucleotide
cagccgauagauggcgagg

SEQ ID NO: 910536 - RNA, 19 nt, Artificial Sequence
  Description of Artificial Sequence: Synthetic oligonucleotide
gacggucuggccacggcac

SEQ ID NO: 910537 - RNA, 19 nt, Artificial Sequence
  Description of Artificial Sequence: Synthetic oligonucleotide
aaagagcguauugcauuuu

SEQ ID NO: 910538 - RNA, 19 nt, Artificial Sequence
  Description of Artificial Sequence: Synthetic oligonucleotide
uuucgugcgcccggcccgg

SEQ ID NO: 910539 - RNA, 19 nt, Artificial Sequence
  Description of Artificial Sequence: Synthetic oligonucleotide
uuuuccgcuugugcagcga

SEQ ID NO: 910540 - RNA, 19 nt, Artificial Sequence
  Description of Artificial Sequence: Synthetic oligonucleotide
gugcucggauaucauagaa

SEQ ID NO: 910541 - RNA, 19 nt, Artificial Sequence
  Description of Artificial Sequence: Synthetic oligonucleotide
gauacggcucccaacuccu

SEQ ID NO: 910542 - RNA, 19 nt, Artificial Sequence
  Description of Artificial Sequence: Synthetic oligonucleotide
cauuaugccuugcaucacu

SEQ ID NO: 910543 - RNA, 19 nt, Artificial Sequence
  Description of Artificial Sequence: Synthetic oligonucleotide
aucuagauuaugggaugau

SEQ ID NO: 910544 - RNA, 19 nt, Artificial Sequence
  Description of Artificial Sequence: Synthetic oligonucleotide
gaaaccgagggugguaagu

SEQ ID NO: 910545 - RNA, 19 nt, Artificial Sequence
  Description of Artificial Sequence: Synthetic oligonucleotide
acugaccauucacuaccau

SEQ ID NO: 910546 - RNA, 19 nt, Artificial Sequence
  Description of Artificial Sequence: Synthetic oligonucleotide
aguacguaccggggccccg

SEQ ID NO: 910547 - RNA, 19 nt, Artificial Sequence
  Description of Artificial Sequence: Synthetic oligonucleotide
gcguaaccauguaacaccc

SEQ ID NO: 910548 - RNA, 19 nt, Artificial Sequence
  Description of Artificial Sequence: Synthetic oligonucleotide
cacuuuauuaaggguccca

SEQ ID NO: 910549 - RNA, 19 nt, Artificial Sequence
  Description of Artificial Sequence: Synthetic oligonucleotide
guacguaccggggccccgg

SEQ ID NO: 910550 - RNA, 19 nt, Artificial Sequence
  Description of Artificial Sequence: Synthetic oligonucleotide
gagaggcgcguaaagggaa

SEQ ID NO: 910551 - RNA, 19 nt, Artificial Sequence
  Description of Artificial Sequence: Synthetic oligonucleotide
augagcguacacggggacu

SEQ ID NO: 910552 - RNA, 19 nt, Artificial Sequence
  Description of Artificial Sequence: Synthetic oligonucleotide
caaagagcguauugcauuu

SEQ ID NO: 910553 - RNA, 19 nt, Artificial Sequence
  Description of Artificial Sequence: Synthetic oligonucleotide
ggcgcguaaagggaaagga

SEQ ID NO: 910554 - RNA, 19 nt, Artificial Sequence
  Description of Artificial Sequence: Synthetic oligonucleotide
ggguagucuuuuccgcuug

SEQ ID NO: 910555 - RNA, 19 nt, Artificial Sequence
  Description of Artificial Sequence: Synthetic oligonucleotide
gcgcguaaagggaaaggag

SEQ ID NO: 910556 - RNA, 19 nt, Artificial Sequence
  Description of Artificial Sequence: Synthetic oligonucleotide
ggaaaccgagggugguaag

SEQ ID NO: 910557 - RNA, 19 nt, Artificial Sequence
  Description of Artificial Sequence: Synthetic oligonucleotide
cacugaccauucacuacca

SEQ ID NO: 910558 - RNA, 19 nt, Artificial Sequence
  Description of Artificial Sequence: Synthetic oligonucleotide
uaagggucccaaggugaaa

SEQ ID NO: 910559 - RNA, 19 nt, Artificial Sequence
  Description of Artificial Sequence: Synthetic oligonucleotide
gggcgacggggucaguacg

SEQ ID NO: 910560 - RNA, 19 nt, Artificial Sequence
  Description of Artificial Sequence: Synthetic oligonucleotide
aggcgcuuuccgcuuccug

SEQ ID NO: 910561 - RNA, 19 nt, Artificial Sequence
  Description of Artificial Sequence: Synthetic oligonucleotide
agcuucguuccggacgagu

SEQ ID NO: 910562 - RNA, 19 nt, Artificial Sequence
  Description of Artificial Sequence: Synthetic oligonucleotide
cuaacgcccgcaccuugca

SEQ ID NO: 910563 - RNA, 19 nt, Artificial Sequence
  Description of Artificial Sequence: Synthetic oligonucleotide
gcauggauaccacaacccu

SEQ ID NO: 910564 - RNA, 19 nt, Artificial Sequence
  Description of Artificial Sequence: Synthetic oligonucleotide
gacccauaacaagcugaga

SEQ ID NO: 910565 - RNA, 19 nt, Artificial Sequence
  Description of Artificial Sequence: Synthetic oligonucleotide
acggucuggccacggcaca

SEQ ID NO: 910566 - RNA, 19 nt, Artificial Sequence
  Description of Artificial Sequence: Synthetic oligonucleotide
caauguccgaaaaguaauu

SEQ ID NO: 910567 - RNA, 19 nt, Artificial Sequence
  Description of Artificial Sequence: Synthetic oligonucleotide
gcgcuugagagcccacugc

SEQ ID NO: 910568 - RNA, 19 nt, Artificial Sequence
  Description of Artificial Sequence: Synthetic oligonucleotide
gggcuuagacccauaacaa

SEQ ID NO: 910569 - RNA, 19 nt, Artificial Sequence
  Description of Artificial Sequence: Synthetic oligonucleotide
ccggcccggaaaauggccc

SEQ ID NO: 910570 - RNA, 19 nt, Artificial Sequence
  Description of Artificial Sequence: Synthetic oligonucleotide
ccuaugauucaaccacuga

SEQ ID NO: 910571 - RNA, 19 nt, Artificial Sequence
  Description of Artificial Sequence: Synthetic oligonucleotide
ccacugcauacacugacca

SEQ ID NO: 910572 - RNA, 19 nt, Artificial Sequence
  Description of Artificial Sequence: Synthetic oligonucleotide
guaauuccuccagguuuca

SEQ ID NO: 910573 - RNA, 19 nt, Artificial Sequence
  Description of Artificial Sequence: Synthetic oligonucleotide
cguugauccaugcaaugga

SEQ ID NO: 910574 - RNA, 19 nt, Artificial Sequence
  Description of Artificial Sequence: Synthetic oligonucleotide
cguaaccauguaacacccg

SEQ ID NO: 910575 - RNA, 19 nt, Artificial Sequence
  Description of Artificial Sequence: Synthetic oligonucleotide
caguacguaccggggcccc

SEQ ID NO: 910576 - RNA, 19 nt, Artificial Sequence
  Description of Artificial Sequence: Synthetic oligonucleotide
gcuucguuccggacgaguc

SEQ ID NO: 910577 - RNA, 19 nt, Artificial Sequence
  Description of Artificial Sequence: Synthetic oligonucleotide
gcucuauugcauggauacc

SEQ ID NO: 910578 - RNA, 19 nt, Artificial Sequence
  Description of Artificial Sequence: Synthetic oligonucleotide
ccauagaaccaucccguga

SEQ ID NO: 910579 - RNA, 19 nt, Artificial Sequence
  Description of Artificial Sequence: Synthetic oligonucleotide
ccguggauccaagaaugag

SEQ ID NO: 910580 - RNA, 19 nt, Artificial Sequence
  Description of Artificial Sequence: Synthetic oligonucleotide
gugguaaguuaguguaaau

SEQ ID NO: 910581 - RNA, 19 nt, Artificial Sequence
  Description of Artificial Sequence: Synthetic oligonucleotide
gacaugcgcuugagagccc

SEQ ID NO: 910582 - RNA, 19 nt, Artificial Sequence
  Description of Artificial Sequence: Synthetic oligonucleotide
gacacaccuccagguucgc

SEQ ID NO: 910583 - RNA, 19 nt, Artificial Sequence
  Description of Artificial Sequence: Synthetic oligonucleotide
agaggcgcguaaagggaaa

SEQ ID NO: 910584 - RNA, 19 nt, Artificial Sequence
  Description of Artificial Sequence: Synthetic oligonucleotide
cacuaccauaagccagaca

SEQ ID NO: 910585 - RNA, 19 nt, Artificial Sequence
  Description of Artificial Sequence: Synthetic oligonucleotide
ucguuccggacgagucgua

SEQ ID NO: 910586 - RNA, 19 nt, Artificial Sequence
  Description of Artificial Sequence: Synthetic oligonucleotide
cgaggcaggcgcuuuccgc

SEQ ID NO: 910587 - RNA, 19 nt, Artificial Sequence
  Description of Artificial Sequence: Synthetic oligonucleotide
cguuggacgauggcugccg

SEQ ID NO: 910588 - RNA, 19 nt, Artificial Sequence
  Description of Artificial Sequence: Synthetic oligonucleotide
ggaguguucuagaaggauu

SEQ ID NO: 910589 - RNA, 19 nt, Artificial Sequence
  Description of Artificial Sequence: Synthetic oligonucleotide
ggggccgcgcgcuuucgug

SEQ ID NO: 910590 - RNA, 19 nt, Artificial Sequence
  Description of Artificial Sequence: Synthetic oligonucleotide
cagugauaauguguucaua

SEQ ID NO: 910591 - RNA, 19 nt, Artificial Sequence
  Description of Artificial Sequence: Synthetic oligonucleotide
ggcccggaaaauggcccgg

SEQ ID NO: 910592 - RNA, 19 nt, Artificial Sequence
  Description of Artificial Sequence: Synthetic oligonucleotide
gcaggcgcuuuccgcuucc

SEQ ID NO: 910593 - RNA, 19 nt, Artificial Sequence
  Description of Artificial Sequence: Synthetic oligonucleotide
ucgugcgcccggcccggaa

SEQ ID NO: 910594 - RNA, 19 nt, Artificial Sequence
  Description of Artificial Sequence: Synthetic oligonucleotide
cccugagcgucgcucccgg

SEQ ID NO: 910595 - RNA, 19 nt, Artificial Sequence
  Description of Artificial Sequence: Synthetic oligonucleotide
guaacacccgagaguaguu

SEQ ID NO: 910596 - RNA, 19 nt, Artificial Sequence
  Description of Artificial Sequence: Synthetic oligonucleotide
gagcuucguuccggacgag

SEQ ID NO: 910597 - RNA, 19 nt, Artificial Sequence
  Description of Artificial Sequence: Synthetic oligonucleotide
gguagucuuuuccgcuugu

SEQ ID NO: 910598 - RNA, 19 nt, Artificial Sequence
  Description of Artificial Sequence: Synthetic oligonucleotide
gcccacagugauaaugugu

SEQ ID NO: 910599 - RNA, 19 nt, Artificial Sequence
  Description of Artificial Sequence: Synthetic oligonucleotide
cgcgcuuucgugcgcccgg

SEQ ID NO: 910600 - RNA, 19 nt, Artificial Sequence
  Description of Artificial Sequence: Synthetic oligonucleotide
ccagguucgcggucuuuca

SEQ ID NO: 910601 - RNA, 19 nt, Artificial Sequence
  Description of Artificial Sequence: Synthetic oligonucleotide
gugcgcccggcccggaaaa

SEQ ID NO: 910602 - RNA, 19 nt, Artificial Sequence
  Description of Artificial Sequence: Synthetic oligonucleotide
cacggggacuggugacaca

SEQ ID NO: 910603 - RNA, 19 nt, Artificial Sequence
  Description of Artificial Sequence: Synthetic oligonucleotide
cguuccggacgagucguag

SEQ ID NO: 910604 - RNA, 19 nt, Artificial Sequence
  Description of Artificial Sequence: Synthetic oligonucleotide
guucgcggucuuucagaau

SEQ ID NO: 910605 - RNA, 19 nt, Artificial Sequence
  Description of Artificial Sequence: Synthetic oligonucleotide
ccgagaguaguugguuuca

SEQ ID NO: 910606 - RNA, 19 nt, Artificial Sequence
  Description of Artificial Sequence: Synthetic oligonucleotide
ugcgcccggcccggaaaau

SEQ ID NO: 910607 - RNA, 19 nt, Artificial Sequence
  Description of Artificial Sequence: Synthetic oligonucleotide
gcgcgcuuucgugcgcccg

SEQ ID NO: 910608 - RNA, 19 nt, Artificial Sequence
  Description of Artificial Sequence: Synthetic oligonucleotide
ggcagccgauagauggcga

SEQ ID NO: 910609 - RNA, 19 nt, Artificial Sequence
  Description of Artificial Sequence: Synthetic oligonucleotide
gcgcccggcccggaaaaug

SEQ ID NO: 910610 - RNA, 19 nt, Artificial Sequence
  Description of Artificial Sequence: Synthetic oligonucleotide
ccggacgagucguagcagu

SEQ ID NO: 910611 - RNA, 19 nt, Artificial Sequence
  Description of Artificial Sequence: Synthetic oligonucleotide
cacccgagaguaguugguu

SEQ ID NO: 910612 - RNA, 19 nt, Artificial Sequence
  Description of Artificial Sequence: Synthetic oligonucleotide
cggggucaguacguaccgg

SEQ ID NO: 910613 - RNA, 19 nt, Artificial Sequence
  Description of Artificial Sequence: Synthetic oligonucleotide
ccgcgcgcuuucgugcgcc

SEQ ID NO: 910614 - RNA, 19 nt, Artificial Sequence
  Description of Artificial Sequence: Synthetic oligonucleotide
gccgcgcgcuuucgugcgc

SEQ ID NO: 910615 - RNA, 19 nt, Artificial Sequence
  Description of Artificial Sequence: Synthetic oligonucleotide
ccuguucauagcaccuauu

SEQ ID NO: 910616 - RNA, 19 nt, Artificial Sequence
  Description of Artificial Sequence: Synthetic oligonucleotide
ccggggcggcagcugauca

SEQ ID NO: 910617 - RNA, 19 nt, Artificial Sequence
  Description of Artificial Sequence: Synthetic oligonucleotide
ccgagggugguaaguuagu

SEQ ID NO: 910618 - RNA, 19 nt, Artificial Sequence
  Description of Artificial Sequence: Synthetic oligonucleotide
gccaaacugcgggcccuga

SEQ ID NO: 910619 - RNA, 19 nt, Artificial Sequence
  Description of Artificial Sequence: Synthetic oligonucleotide
cgcgcgcuuucgugcgccc

SEQ ID NO: 910620 - RNA, 19 nt, Artificial Sequence
  Description of Artificial Sequence: Synthetic oligonucleotide
cccggggcggcagcugauc

SEQ ID NO: 910621 - RNA, 19 nt, Artificial Sequence
  Description of Artificial Sequence: Synthetic oligonucleotide
caggcgcuuuccgcuuccu

SEQ ID NO: 910622 - RNA, 19 nt, Artificial Sequence
  Description of Artificial Sequence: Synthetic oligonucleotide
cggggccgcgcgcuuucgu

SEQ ID NO: 910623 - RNA, 19 nt, Artificial Sequence
  Description of Artificial Sequence: Synthetic oligonucleotide
aacugaaucaaaauuaugc

SEQ ID NO: 910624 - RNA, 19 nt, Artificial Sequence
  Description of Artificial Sequence: Synthetic oligonucleotide
aaauagagcucucccaaac

SEQ ID NO: 910625 - RNA, 19 nt, Artificial Sequence
  Description of Artificial Sequence: Synthetic oligonucleotide
gacuuaacgaugcugaccc

SEQ ID NO: 910626 - RNA, 19 nt, Artificial Sequence
  Description of Artificial Sequence: Synthetic oligonucleotide
agcacuugcgucuacaagg

SEQ ID NO: 910627 - RNA, 19 nt, Artificial Sequence
  Description of Artificial Sequence: Synthetic oligonucleotide
uuugucuacgccaaucucc

SEQ ID NO: 910628 - RNA, 19 nt, Artificial Sequence
  Description of Artificial Sequence: Synthetic oligonucleotide
ucugacuuaacgaugcuga

SEQ ID NO: 910629 - RNA, 19 nt, Artificial Sequence
  Description of Artificial Sequence: Synthetic oligonucleotide
auaagcgugaccauggucg

SEQ ID NO: 910630 - RNA, 19 nt, Artificial Sequence
  Description of Artificial Sequence: Synthetic oligonucleotide
aaggacaccgcguucuggc

SEQ ID NO: 910631 - RNA, 19 nt, Artificial Sequence
  Description of Artificial Sequence: Synthetic oligonucleotide
uuauagcucugacuuaacg

SEQ ID NO: 910632 - RNA, 19 nt, Artificial Sequence
  Description of Artificial Sequence: Synthetic oligonucleotide
ucuagaaccacguuuaaua

SEQ ID NO: 910633 - RNA, 19 nt, Artificial Sequence
  Description of Artificial Sequence: Synthetic oligonucleotide
aaccacguuuaauagaaug

SEQ ID NO: 910634 - RNA, 19 nt, Artificial Sequence
  Description of Artificial Sequence: Synthetic oligonucleotide
acaucagaaggcucaagcc

SEQ ID NO: 910635 - RNA, 19 nt, Artificial Sequence
  Description of Artificial Sequence: Synthetic oligonucleotide
uuuaauagaaugcccucug

SEQ ID NO: 910636 - RNA, 19 nt, Artificial Sequence
  Description of Artificial Sequence: Synthetic oligonucleotide
ucugagcuaaaacucgggg

SEQ ID NO: 910637 - RNA, 19 nt, Artificial Sequence
  Description of Artificial Sequence: Synthetic oligonucleotide
uacgccaaucuccaaaggg

SEQ ID NO: 910638 - RNA, 19 nt, Artificial Sequence
  Description of Artificial Sequence: Synthetic oligonucleotide
aauagaaugcccucugaaa

SEQ ID NO: 910639 - RNA, 19 nt, Artificial Sequence
  Description of Artificial Sequence: Synthetic oligonucleotide
ucaguggugagguagggcc

SEQ ID NO: 910640 - RNA, 19 nt, Artificial Sequence
  Description of Artificial Sequence: Synthetic oligonucleotide
acgaugcugacccauuucc

SEQ ID NO: 910641 - RNA, 19 nt, Artificial Sequence
  Description of Artificial Sequence: Synthetic oligonucleotide
ucuacgaagaaaacuggcu

SEQ ID NO: 910642 - RNA, 19 nt, Artificial Sequence
  Description of Artificial Sequence: Synthetic oligonucleotide
aaaacuggcuucggaauac

SEQ ID NO: 910643 - RNA, 19 nt, Artificial Sequence
  Description of Artificial Sequence: Synthetic oligonucleotide
ucuagcgaaacacggcccg

SEQ ID NO: 910644 - RNA, 19 nt, Artificial Sequence
  Description of Artificial Sequence: Synthetic oligonucleotide
ucaaaauagagcucuccca

SEQ ID NO: 910645 - RNA, 19 nt, Artificial Sequence
  Description of Artificial Sequence: Synthetic oligonucleotide
uggucaggcaccaagguga

SEQ ID NO: 910646 - RNA, 19 nt, Artificial Sequence
  Description of Artificial Sequence: Synthetic oligonucleotide
cauccaauacacaaggcug

SEQ ID NO: 910647 - RNA, 19 nt, Artificial Sequence
  Description of Artificial Sequence: Synthetic oligonucleotide
aaaacccauuucaaaauag

SEQ ID NO: 910648 - RNA, 19 nt, Artificial Sequence
  Description of Artificial Sequence: Synthetic oligonucleotide
aguuauuuccacuggucag

SEQ ID NO: 910649 - RNA, 19 nt, Artificial Sequence
  Description of Artificial Sequence: Synthetic oligonucleotide
cauguaaggccuuccaggg

SEQ ID NO: 910650 - RNA, 19 nt, Artificial Sequence
  Description of Artificial Sequence: Synthetic oligonucleotide
accacguuuaauagaaugc

SEQ ID NO: 910651 - RNA, 19 nt, Artificial Sequence
  Description of Artificial Sequence: Synthetic oligonucleotide
acuugcgucuacaaggugc

SEQ ID NO: 910652 - RNA, 19 nt, Artificial Sequence
  Description of Artificial Sequence: Synthetic oligonucleotide
gaaaguccaaggaugggcg

SEQ ID NO: 910653 - RNA, 19 nt, Artificial Sequence
  Description of Artificial Sequence: Synthetic oligonucleotide
ucggaauacacuuccaagu

SEQ ID NO: 910654 - RNA, 19 nt, Artificial Sequence
  Description of Artificial Sequence: Synthetic oligonucleotide
uaaaacucgggguuauagc

SEQ ID NO: 910655 - RNA, 19 nt, Artificial Sequence
  Description of Artificial Sequence: Synthetic oligonucleotide
ugagcuaaaacucgggguu

SEQ ID NO: 910656 - RNA, 19 nt, Artificial Sequence
  Description of Artificial Sequence: Synthetic oligonucleotide
aucaggucugagcuaaaac

SEQ ID NO: 910657 - RNA, 19 nt, Artificial Sequence
  Description of Artificial Sequence: Synthetic oligonucleotide
auagcucugacuuaacgau

SEQ ID NO: 910658 - RNA, 19 nt, Artificial Sequence
  Description of Artificial Sequence: Synthetic oligonucleotide
guuauuuccacuggucagg

SEQ ID NO: 910659 - RNA, 19 nt, Artificial Sequence
  Description of Artificial Sequence: Synthetic oligonucleotide
ugauaaugcucacaagguc

SEQ ID NO: 910660 - RNA, 19 nt, Artificial Sequence
  Description of Artificial Sequence: Synthetic oligonucleotide
uugggcuagagccuggugu

SEQ ID NO: 910661 - RNA, 19 nt, Artificial Sequence
  Description of Artificial Sequence: Synthetic oligonucleotide
ucagucuacgaagaaaacu

SEQ ID NO: 910662 - RNA, 19 nt, Artificial Sequence
  Description of Artificial Sequence: Synthetic oligonucleotide
uccuucgaguuacaugggg

SEQ ID NO: 910663 - RNA, 19 nt, Artificial Sequence
  Description of Artificial Sequence: Synthetic oligonucleotide
guacgggccagccucaugg

SEQ ID NO: 910664 - RNA, 19 nt, Artificial Sequence
  Description of Artificial Sequence: Synthetic oligonucleotide
uuaauagaaugcccucuga

SEQ ID NO: 910665 - RNA, 19 nt, Artificial Sequence
  Description of Artificial Sequence: Synthetic oligonucleotide
agggacuuuugucuacgcc

SEQ ID NO: 910666 - RNA, 19 nt, Artificial Sequence
  Description of Artificial Sequence: Synthetic oligonucleotide
aacucgggguuauagcucu

SEQ ID NO: 910667 - RNA, 19 nt, Artificial Sequence
  Description of Artificial Sequence: Synthetic oligonucleotide
ugugauaagcgugaccaug

SEQ ID NO: 910668 - RNA, 19 nt, Artificial Sequence
  Description of Artificial Sequence: Synthetic oligonucleotide
uccauguaaggccuuccag

SEQ ID NO: 910669 - RNA, 19 nt, Artificial Sequence
  Description of Artificial Sequence: Synthetic oligonucleotide
auggugucggccuaguuca

SEQ ID NO: 910670 - RNA, 19 nt, Artificial Sequence
  Description of Artificial Sequence: Synthetic oligonucleotide
gaacaaauggccacuuuug

SEQ ID NO: 910671 - RNA, 19 nt, Artificial Sequence
  Description of Artificial Sequence: Synthetic oligonucleotide
aaaacgagcaggguccuga

SEQ ID NO: 910672 - RNA, 19 nt, Artificial Sequence
  Description of Artificial Sequence: Synthetic oligonucleotide
cuaaaacucgggguuauag

SEQ ID NO: 910673 - RNA, 19 nt, Artificial Sequence
  Description of Artificial Sequence: Synthetic oligonucleotide
gaugcugacccauuuccac

SEQ ID NO: 910674 - RNA, 19 nt, Artificial Sequence
  Description of Artificial Sequence: Synthetic oligonucleotide
agcaaaggcucuuugaguu

SEQ ID NO: 910675 - RNA, 19 nt, Artificial Sequence
  Description of Artificial Sequence: Synthetic oligonucleotide
uuaugccucaauuuucaaa

SEQ ID NO: 910676 - RNA, 19 nt, Artificial Sequence
  Description of Artificial Sequence: Synthetic oligonucleotide
uacgaagaaaacuggcuuc

SEQ ID NO: 910677 - RNA, 19 nt, Artificial Sequence
  Description of Artificial Sequence: Synthetic oligonucleotide
gacccauuuccacagacuc

SEQ ID NO: 910678 - RNA, 19 nt, Artificial Sequence
  Description of Artificial Sequence: Synthetic oligonucleotide
uacuagggcgccaugggga

SEQ ID NO: 910679 - RNA, 19 nt, Artificial Sequence
  Description of Artificial Sequence: Synthetic oligonucleotide
acgaagaaaacuggcuucg

SEQ ID NO: 910680 - RNA, 19 nt, Artificial Sequence
  Description of Artificial Sequence: Synthetic oligonucleotide
gugauaagcgugaccaugg

SEQ ID NO: 910681 - RNA, 19 nt, Artificial Sequence
  Description of Artificial Sequence: Synthetic oligonucleotide
aaacugaaucaaaauuaug

SEQ ID NO: 910682 - RNA, 19 nt, Artificial Sequence
  Description of Artificial Sequence: Synthetic oligonucleotide
uagaaccacguuuaauaga

SEQ ID NO: 910683 - RNA, 19 nt, Artificial Sequence
  Description of Artificial Sequence: Synthetic oligonucleotide
ugugagagagacagucggc

SEQ ID NO: 910684 - RNA, 19 nt, Artificial Sequence
  Description of Artificial Sequence: Synthetic oligonucleotide
uccucuuagagaugggagu

SEQ ID NO: 910685 - RNA, 19 nt, Artificial Sequence
  Description of Artificial Sequence: Synthetic oligonucleotide
agaaccacguuuaauagaa

SEQ ID NO: 910686 - RNA, 19 nt, Artificial Sequence
  Description of Artificial Sequence: Synthetic oligonucleotide
gagagagacagucggcgcc

SEQ ID NO: 910687 - RNA, 19 nt, Artificial Sequence
  Description of Artificial Sequence: Synthetic oligonucleotide
uaaaguccgugucauuuuc

SEQ ID NO: 910688 - RNA, 19 nt, Artificial Sequence
  Description of Artificial Sequence: Synthetic oligonucleotide
uaagcgugaccauggucgg

SEQ ID NO: 910689 - RNA, 19 nt, Artificial Sequence
  Description of Artificial Sequence: Synthetic oligonucleotide
gugagagagacagucggcg

SEQ ID NO: 910690 - RNA, 19 nt, Artificial Sequence
  Description of Artificial Sequence: Synthetic oligonucleotide
aucaaaauuaugccucaau

SEQ ID NO: 910691 - RNA, 19 nt, Artificial Sequence
  Description of Artificial Sequence: Synthetic oligonucleotide
aaacucgggguuauagcuc

SEQ ID NO: 910692 - RNA, 19 nt, Artificial Sequence
  Description of Artificial Sequence: Synthetic oligonucleotide
caggucugagcuaaaacuc

SEQ ID NO: 910693 - RNA, 19 nt, Artificial Sequence
  Description of Artificial Sequence: Synthetic oligonucleotide
uggggagcggcaucgagcc

SEQ ID NO: 910694 - RNA, 19 nt, Artificial Sequence
  Description of Artificial Sequence: Synthetic oligonucleotide
uuuugucuacgccaaucuc

SEQ ID NO: 910695 - RNA, 19 nt, Artificial Sequence
  Description of Artificial Sequence: Synthetic oligonucleotide
agaaagccaagguggaccu

SEQ ID NO: 910696 - RNA, 19 nt, Artificial Sequence
  Description of Artificial Sequence: Synthetic oligonucleotide
cauggugucggccuaguuc

SEQ ID NO: 910697 - RNA, 19 nt, Artificial Sequence
  Description of Artificial Sequence: Synthetic oligonucleotide
cacuacuggcugaagcugg

SEQ ID NO: 910698 - RNA, 19 nt, Artificial Sequence
  Description of Artificial Sequence: Synthetic oligonucleotide
agacaguaaccacugcuca

SEQ ID NO: 910699 - RNA, 19 nt, Artificial Sequence
  Description of Artificial Sequence: Synthetic oligonucleotide
cucacggagguccaagaag

SEQ ID NO: 910700 - RNA, 19 nt, Artificial Sequence
  Description of Artificial Sequence: Synthetic oligonucleotide
ucggguaaggucauccaaa

SEQ ID NO: 910701 - RNA, 19 nt, Artificial Sequence
  Description of Artificial Sequence: Synthetic oligonucleotide
ugggccuagauuucccugc

SEQ ID NO: 910702 - RNA, 19 nt, Artificial Sequence
  Description of Artificial Sequence: Synthetic oligonucleotide
acauggggaggacacaaca

SEQ ID NO: 910703 - RNA, 19 nt, Artificial Sequence
  Description of Artificial Sequence: Synthetic oligonucleotide
ugagagagacagucggcgc

SEQ ID NO: 910704 - RNA, 19 nt, Artificial Sequence
  Description of Artificial Sequence: Synthetic oligonucleotide
ugggcuagagccuggugug

SEQ ID NO: 910705 - RNA, 19 nt, Artificial Sequence
  Description of Artificial Sequence: Synthetic oligonucleotide
aaggcucaagccaucaggu

SEQ ID NO: 910706 - RNA, 19 nt, Artificial Sequence
  Description of Artificial Sequence: Synthetic oligonucleotide
cagaguacgggccagccuc

SEQ ID NO: 910707 - RNA, 19 nt, Artificial Sequence
  Description of Artificial Sequence: Synthetic oligonucleotide
uucagucuacgaagaaaac

SEQ ID NO: 910708 - RNA, 19 nt, Artificial Sequence
  Description of Artificial Sequence: Synthetic oligonucleotide
uagcucugacuuaacgaug

SEQ ID NO: 910709 - RNA, 19 nt, Artificial Sequence
  Description of Artificial Sequence: Synthetic oligonucleotide
cacaccuuggagcuacuag

SEQ ID NO: 910710 - RNA, 19 nt, Artificial Sequence
  Description of Artificial Sequence: Synthetic oligonucleotide
ggacacuccggacugacag

SEQ ID NO: 910711 - RNA, 19 nt, Artificial Sequence
  Description of Artificial Sequence: Synthetic oligonucleotide
gauaagcgugaccaugguc

SEQ ID NO: 910712 - RNA, 19 nt, Artificial Sequence
  Description of Artificial Sequence: Synthetic oligonucleotide
uuugagaccuucgcuguga

SEQ ID NO: 910713 - RNA, 19 nt, Artificial Sequence
  Description of Artificial Sequence: Synthetic oligonucleotide
ucuuagagaugggagucca

SEQ ID NO: 910714 - RNA, 19 nt, Artificial Sequence
  Description of Artificial Sequence: Synthetic oligonucleotide
caucgagccagcuccuccg

SEQ ID NO: 910715 - RNA, 19 nt, Artificial Sequence
  Description of Artificial Sequence: Synthetic oligonucleotide
uucggguaaggucauccaa

SEQ ID NO: 910716 - RNA, 19 nt, Artificial Sequence
  Description of Artificial Sequence: Synthetic oligonucleotide
agcucucccaaacuguaga

SEQ ID NO: 910717 - RNA, 19 nt, Artificial Sequence
  Description of Artificial Sequence: Synthetic oligonucleotide
agugucgcuuggucggugg

SEQ ID NO: 910718 - RNA, 19 nt, Artificial Sequence
  Description of Artificial Sequence: Synthetic oligonucleotide
aacuggcuucggaauacac

SEQ ID NO: 910719 - RNA, 19 nt, Artificial Sequence
  Description of Artificial Sequence: Synthetic oligonucleotide
cugaaucaaaauuaugccu

SEQ ID NO: 910720 - RNA, 19 nt, Artificial Sequence
  Description of Artificial Sequence: Synthetic oligonucleotide
cuacuagggcgccaugggg

SEQ ID NO: 910721 - RNA, 19 nt, Artificial Sequence
  Description of Artificial Sequence: Synthetic oligonucleotide
uuacauggggaggacacaa

SEQ ID NO: 910722 - RNA, 19 nt, Artificial Sequence
  Description of Artificial Sequence: Synthetic oligonucleotide
uccacagacucuucagggu

SEQ ID NO: 910723 - RNA, 19 nt, Artificial Sequence
  Description of Artificial Sequence: Synthetic oligonucleotide
agcgugaccauggucgggg

SEQ ID NO: 910724 - RNA, 19 nt, Artificial Sequence
  Description of Artificial Sequence: Synthetic oligonucleotide
ucuccucuuagagauggga

SEQ ID NO: 910725 - RNA, 19 nt, Artificial Sequence
  Description of Artificial Sequence: Synthetic oligonucleotide
gggacuuuugucuacgcca

SEQ ID NO: 910726 - RNA, 19 nt, Artificial Sequence
  Description of Artificial Sequence: Synthetic oligonucleotide
acuagggcgccauggggag

SEQ ID NO: 910727 - RNA, 19 nt, Artificial Sequence
  Description of Artificial Sequence: Synthetic oligonucleotide
ugcgucuacaaggugcucu

SEQ ID NO: 910728 - RNA, 19 nt, Artificial Sequence
  Description of Artificial Sequence: Synthetic oligonucleotide
cuucgcuugggugucgucc

SEQ ID NO: 910729 - RNA, 19 nt, Artificial Sequence
  Description of Artificial Sequence: Synthetic oligonucleotide
ucccaaacuguagaagcca

SEQ ID NO: 910730 - RNA, 19 nt, Artificial Sequence
  Description of Artificial Sequence: Synthetic oligonucleotide
aggugcucuugugagagag

SEQ ID NO: 910731 - RNA, 19 nt, Artificial Sequence
  Description of Artificial Sequence: Synthetic oligonucleotide
cucuagcgaaacacggccc

SEQ ID NO: 910732 - RNA, 19 nt, Artificial Sequence
  Description of Artificial Sequence: Synthetic oligonucleotide
aucuaugggcacuggauuu

SEQ ID NO: 910733 - RNA, 19 nt, Artificial Sequence
  Description of Artificial Sequence: Synthetic oligonucleotide
ugauaagcgugaccauggu

SEQ ID NO: 910734 - RNA, 19 nt, Artificial Sequence
  Description of Artificial Sequence: Synthetic oligonucleotide
uuaacgaugcugacccauu

SEQ ID NO: 910735 - RNA, 19 nt, Artificial Sequence
  Description of Artificial Sequence: Synthetic oligonucleotide
auaaugcucacaagguccu

SEQ ID NO: 910736 - RNA, 19 nt, Artificial Sequence
  Description of Artificial Sequence: Synthetic oligonucleotide
ucucacggagguccaagaa

SEQ ID NO: 910737 - RNA, 19 nt, Artificial Sequence
  Description of Artificial Sequence: Synthetic oligonucleotide
ugucccaaucacuggguuc

SEQ ID NO: 910738 - RNA, 19 nt, Artificial Sequence
  Description of Artificial Sequence: Synthetic oligonucleotide
aggacacaacagucuucgc

SEQ ID NO: 910739 - RNA, 19 nt, Artificial Sequence
  Description of Artificial Sequence: Synthetic oligonucleotide
uucgcuugggugucguccu

SEQ ID NO: 910740 - RNA, 19 nt, Artificial Sequence
  Description of Artificial Sequence: Synthetic oligonucleotide
ggcuucggaauacacuucc

SEQ ID NO: 910741 - RNA, 19 nt, Artificial Sequence
  Description of Artificial Sequence: Synthetic oligonucleotide
cuuccacggguccuugggg

SEQ ID NO: 910742 - RNA, 19 nt, Artificial Sequence
  Description of Artificial Sequence: Synthetic oligonucleotide
ggugcucuagcgaaacacg

SEQ ID NO: 910743 - RNA, 19 nt, Artificial Sequence
  Description of Artificial Sequence: Synthetic oligonucleotide
aggcucaagccaucagguc

SEQ ID NO: 910744 - RNA, 19 nt, Artificial Sequence
  Description of Artificial Sequence: Synthetic oligonucleotide
cugacccauuuccacagac

SEQ ID NO: 910745 - RNA, 19 nt, Artificial Sequence
  Description of Artificial Sequence: Synthetic oligonucleotide
gacaccgcguucuggcggc

SEQ ID NO: 910746 - RNA, 19 nt, Artificial Sequence
  Description of Artificial Sequence: Synthetic oligonucleotide
ugcaccgggcucucgacgu

SEQ ID NO: 910747 - RNA, 19 nt, Artificial Sequence
  Description of Artificial Sequence: Synthetic oligonucleotide
cuccgguucugacagggac

SEQ ID NO: 910748 - RNA, 19 nt, Artificial Sequence
  Description of Artificial Sequence: Synthetic oligonucleotide
caguaaccacugcucagcc

SEQ ID NO: 910749 - RNA, 19 nt, Artificial Sequence
  Description of Artificial Sequence: Synthetic oligonucleotide
gcuacuagggcgccauggg

SEQ ID NO: 910750 - RNA, 19 nt, Artificial Sequence
  Description of Artificial Sequence: Synthetic oligonucleotide
ccacguuuaauagaaugcc

SEQ ID NO: 910751 - RNA, 19 nt, Artificial Sequence
  Description of Artificial Sequence: Synthetic oligonucleotide
uucuagaaccacguuuaau

SEQ ID NO: 910752 - RNA, 19 nt, Artificial Sequence
  Description of Artificial Sequence: Synthetic oligonucleotide
auuaugccucaauuuucaa

SEQ ID NO: 910753 - RNA, 19 nt, Artificial Sequence
  Description of Artificial Sequence: Synthetic oligonucleotide
ucggccuaguucaggugug

SEQ ID NO: 910754 - RNA, 19 nt, Artificial Sequence
  Description of Artificial Sequence: Synthetic oligonucleotide
cuacgccaaucuccaaagg

SEQ ID NO: 910755 - RNA, 19 nt, Artificial Sequence
  Description of Artificial Sequence: Synthetic oligonucleotide
cucugacuuaacgaugcug

SEQ ID NO: 910756 - RNA, 19 nt, Artificial Sequence
  Description of Artificial Sequence: Synthetic oligonucleotide
cugugagcggcaccggagc

SEQ ID NO: 910757 - RNA, 19 nt, Artificial Sequence
  Description of Artificial Sequence: Synthetic oligonucleotide
cuccucccauccaauacac

SEQ ID NO: 910758 - RNA, 19 nt, Artificial Sequence
  Description of Artificial Sequence: Synthetic oligonucleotide
acucccaccacuguugcau

SEQ ID NO: 910759 - RNA, 19 nt, Artificial Sequence
  Description of Artificial Sequence: Synthetic oligonucleotide
agcgaaacacggcccggag

SEQ ID NO: 910760 - RNA, 19 nt, Artificial Sequence
  Description of Artificial Sequence: Synthetic oligonucleotide
acgccaaucuccaaaggga

SEQ ID NO: 910761 - RNA, 19 nt, Artificial Sequence
  Description of Artificial Sequence: Synthetic oligonucleotide
ucgggguuauagcucugac

SEQ ID NO: 910762 - RNA, 19 nt, Artificial Sequence
  Description of Artificial Sequence: Synthetic oligonucleotide
agacagucggcgccuggag

SEQ ID NO: 910763 - RNA, 19 nt, Artificial Sequence
  Description of Artificial Sequence: Synthetic oligonucleotide
aaacgagcaggguccugaa

SEQ ID NO: 910764 - RNA, 19 nt, Artificial Sequence
  Description of Artificial Sequence: Synthetic oligonucleotide
ggucugagcuaaaacucgg

SEQ ID NO: 910765 - RNA, 19 nt, Artificial Sequence
  Description of Artificial Sequence: Synthetic oligonucleotide
agguagggcccgcagguga

SEQ ID NO: 910766 - RNA, 19 nt, Artificial Sequence
  Description of Artificial Sequence: Synthetic oligonucleotide
gggguuauagcucugacuu

SEQ ID NO: 910767 - RNA, 19 nt, Artificial Sequence
  Description of Artificial Sequence: Synthetic oligonucleotide
gucuacgccaaucuccaaa

SEQ ID NO: 910768 - RNA, 19 nt, Artificial Sequence
  Description of Artificial Sequence: Synthetic oligonucleotide
uccgugucauuuucagaaa

SEQ ID NO: 910769 - RNA, 19 nt, Artificial Sequence
  Description of Artificial Sequence: Synthetic oligonucleotide
aaacuggcuucggaauaca

SEQ ID NO: 910770 - RNA, 19 nt, Artificial Sequence
  Description of Artificial Sequence: Synthetic oligonucleotide
cuucggaauacacuuccaa

SEQ ID NO: 910771 - RNA, 19 nt, Artificial Sequence
  Description of Artificial Sequence: Synthetic oligonucleotide
uugcgccggacccuccucc

SEQ ID NO: 910772 - RNA, 19 nt, Artificial Sequence
  Description of Artificial Sequence: Synthetic oligonucleotide
gaccuucgcugugagacac

SEQ ID NO: 910773 - RNA, 19 nt, Artificial Sequence
  Description of Artificial Sequence: Synthetic oligonucleotide
ccuaguucagguguggaug

SEQ ID NO: 910774 - RNA, 19 nt, Artificial Sequence
  Description of Artificial Sequence: Synthetic oligonucleotide
gugauaaugcucacaaggu

SEQ ID NO: 910775 - RNA, 19 nt, Artificial Sequence
  Description of Artificial Sequence: Synthetic oligonucleotide
gguuauagcucugacuuaa

SEQ ID NO: 910776 - RNA, 19 nt, Artificial Sequence
  Description of Artificial Sequence: Synthetic oligonucleotide
cugagcuaaaacucggggu

SEQ ID NO: 910777 - RNA, 19 nt, Artificial Sequence
  Description of Artificial Sequence: Synthetic oligonucleotide
ugucggccuaguucaggug

SEQ ID NO: 910778 - RNA, 19 nt, Artificial Sequence
  Description of Artificial Sequence: Synthetic oligonucleotide
cugggccuagauuucccug

SEQ ID NO: 910779 - RNA, 19 nt, Artificial Sequence
  Description of Artificial Sequence: Synthetic oligonucleotide
ucuaugggcacuggauuuu

SEQ ID NO: 910780 - RNA, 19 nt, Artificial Sequence
  Description of Artificial Sequence: Synthetic oligonucleotide
aagcgugaccauggucggg

SEQ ID NO: 910781 - RNA, 19 nt, Artificial Sequence
  Description of Artificial Sequence: Synthetic oligonucleotide
gucgcuuggucgguggugc

SEQ ID NO: 910782 - RNA, 19 nt, Artificial Sequence
  Description of Artificial Sequence: Synthetic oligonucleotide
cauggggagcggcaucgag

SEQ ID NO: 910783 - RNA, 19 nt, Artificial Sequence
  Description of Artificial Sequence: Synthetic oligonucleotide
cuccgcuugcgccggaccc

SEQ ID NO: 910784 - RNA, 19 nt, Artificial Sequence
  Description of Artificial Sequence: Synthetic oligonucleotide
cuagcgaaacacggcccgg

SEQ ID NO: 910785 - RNA, 19 nt, Artificial Sequence
  Description of Artificial Sequence: Synthetic oligonucleotide
agaccuucgcugugagaca

SEQ ID NO: 910786 - RNA, 19 nt, Artificial Sequence
  Description of Artificial Sequence: Synthetic oligonucleotide
augggcguguccaccuggc

SEQ ID NO: 910787 - RNA, 19 nt, Artificial Sequence
  Description of Artificial Sequence: Synthetic oligonucleotide
gguaggguucccaaggcca

SEQ ID NO: 910788 - RNA, 19 nt, Artificial Sequence
  Description of Artificial Sequence: Synthetic oligonucleotide
uccggacugacagcacaag

SEQ ID NO: 910789 - RNA, 19 nt, Artificial Sequence
  Description of Artificial Sequence: Synthetic oligonucleotide
gccucaugggcccuucggg

SEQ ID NO: 910790 - RNA, 19 nt, Artificial Sequence
  Description of Artificial Sequence: Synthetic oligonucleotide
guggcggugcucuagcgaa

SEQ ID NO: 910791 - RNA, 19 nt, Artificial Sequence
  Description of Artificial Sequence: Synthetic oligonucleotide
uccucccauccaauacaca

SEQ ID NO: 910792 - RNA, 19 nt, Artificial Sequence
  Description of Artificial Sequence: Synthetic oligonucleotide
ugucgcuuggucgguggug

SEQ ID NO: 910793 - RNA, 19 nt, Artificial Sequence
  Description of Artificial Sequence: Synthetic oligonucleotide
cuacgaagaaaacuggcuu

SEQ ID NO: 910794 - RNA, 19 nt, Artificial Sequence
  Description of Artificial Sequence: Synthetic oligonucleotide
cacacaaguuauuuccacu

SEQ ID NO: 910795 - RNA, 19 nt, Artificial Sequence
  Description of Artificial Sequence: Synthetic oligonucleotide
cuaguucagguguggaugu

SEQ ID NO: 910796 - RNA, 19 nt, Artificial Sequence
  Description of Artificial Sequence: Synthetic oligonucleotide
ccgugucauuuucagaaag

SEQ ID NO: 910797 - RNA, 19 nt, Artificial Sequence
  Description of Artificial Sequence: Synthetic oligonucleotide
uagcgaaacacggcccgga

SEQ ID NO: 910798 - RNA, 19 nt, Artificial Sequence
  Description of Artificial Sequence: Synthetic oligonucleotide
aguccaaggaugggcgugu

SEQ ID NO: 910799 - RNA, 19 nt, Artificial Sequence
  Description of Artificial Sequence: Synthetic oligonucleotide
acuuaacgaugcugaccca

SEQ ID NO: 910800 - RNA, 19 nt, Artificial Sequence
  Description of Artificial Sequence: Synthetic oligonucleotide
guuauagcucugacuuaac

SEQ ID NO: 910801 - RNA, 19 nt, Artificial Sequence
  Description of Artificial Sequence: Synthetic oligonucleotide
ggcucaagccaucaggucu

SEQ ID NO: 910802 - RNA, 19 nt, Artificial Sequence
  Description of Artificial Sequence: Synthetic oligonucleotide
cuucggguaaggucaucca

SEQ ID NO: 910803 - RNA, 19 nt, Artificial Sequence
  Description of Artificial Sequence: Synthetic oligonucleotide
gugaccauggucggggcuc

SEQ ID NO: 910804 - RNA, 19 nt, Artificial Sequence
  Description of Artificial Sequence: Synthetic oligonucleotide
gacgugcggacacuccgga

SEQ ID NO: 910805 - RNA, 19 nt, Artificial Sequence
  Description of Artificial Sequence: Synthetic oligonucleotide
caaggcugugagcggcacc

SEQ ID NO: 910806 - RNA, 19 nt, Artificial Sequence
  Description of Artificial Sequence: Synthetic oligonucleotide
ggaacaaauggccacuuuu

SEQ ID NO: 910807 - RNA, 19 nt, Artificial Sequence
  Description of Artificial Sequence: Synthetic oligonucleotide
ggcccuucggguaagguca

SEQ ID NO: 910808 - RNA, 19 nt, Artificial Sequence
  Description of Artificial Sequence: Synthetic oligonucleotide
gggagcggcaucgagccag

SEQ ID NO: 910809 - RNA, 19 nt, Artificial Sequence
  Description of Artificial Sequence: Synthetic oligonucleotide
uggugucggccuaguucag

SEQ ID NO: 910810 - RNA, 19 nt, Artificial Sequence
  Description of Artificial Sequence: Synthetic oligonucleotide
ggugagguagggcccgcag

SEQ ID NO: 910811 - RNA, 19 nt, Artificial Sequence
  Description of Artificial Sequence: Synthetic oligonucleotide
gucggccuaguucaggugu

SEQ ID NO: 910812 - RNA, 19 nt, Artificial Sequence
  Description of Artificial Sequence: Synthetic oligonucleotide
ugcccucugaaaacccauu

SEQ ID NO: 910813 - RNA, 19 nt, Artificial Sequence
  Description of Artificial Sequence: Synthetic oligonucleotide
gagacagucggcgccugga

SEQ ID NO: 910814 - RNA, 19 nt, Artificial Sequence
  Description of Artificial Sequence: Synthetic oligonucleotide
uggguuccccacugcuccc

SEQ ID NO: 910815 - RNA, 19 nt, Artificial Sequence
  Description of Artificial Sequence: Synthetic oligonucleotide
cuaugggcacuggauuuuc

SEQ ID NO: 910816 - RNA, 19 nt, Artificial Sequence
  Description of Artificial Sequence: Synthetic oligonucleotide
ccaaucuccaaagggaaca

SEQ ID NO: 910817 - RNA, 19 nt, Artificial Sequence
  Description of Artificial Sequence: Synthetic oligonucleotide
ccgguucugacagggaccg

SEQ ID NO: 910818 - RNA, 19 nt, Artificial Sequence
  Description of Artificial Sequence: Synthetic oligonucleotide
agguuucuagaaccacguu

SEQ ID NO: 910819 - RNA, 19 nt, Artificial Sequence
  Description of Artificial Sequence: Synthetic oligonucleotide
uuggagcuacuagggcgcc

SEQ ID NO: 910820 - RNA, 19 nt, Artificial Sequence
  Description of Artificial Sequence: Synthetic oligonucleotide
gcugcggcguugcaccggg

SEQ ID NO: 910821 - RNA, 19 nt, Artificial Sequence
  Description of Artificial Sequence: Synthetic oligonucleotide
uagggcccgcaggugauac

SEQ ID NO: 910822 - RNA, 19 nt, Artificial Sequence
  Description of Artificial Sequence: Synthetic oligonucleotide
ccucuuagagaugggaguc

SEQ ID NO: 910823 - RNA, 19 nt, Artificial Sequence
  Description of Artificial Sequence: Synthetic oligonucleotide
ccgacgugcggacacuccg

SEQ ID NO: 910824 - RNA, 19 nt, Artificial Sequence
  Description of Artificial Sequence: Synthetic oligonucleotide
ggcggccggaguuuguggc

SEQ ID NO: 910825 - RNA, 19 nt, Artificial Sequence
  Description of Artificial Sequence: Synthetic oligonucleotide
ggugucggccuaguucagg

SEQ ID NO: 910826 - RNA, 19 nt, Artificial Sequence
  Description of Artificial Sequence: Synthetic oligonucleotide
cucucgacgugcggcugcg

SEQ ID NO: 910827 - RNA, 19 nt, Artificial Sequence
  Description of Artificial Sequence: Synthetic oligonucleotide
ccauccaauacacaaggcu

SEQ ID NO: 910828 - RNA, 19 nt, Artificial Sequence
  Description of Artificial Sequence: Synthetic oligonucleotide
ucuggcggccggaguuugu

SEQ ID NO: 910829 - RNA, 19 nt, Artificial Sequence
  Description of Artificial Sequence: Synthetic oligonucleotide
ugucuacgccaaucuccaa

SEQ ID NO: 910830 - RNA, 19 nt, Artificial Sequence
  Description of Artificial Sequence: Synthetic oligonucleotide
gagcuaaaacucgggguua

SEQ ID NO: 910831 - RNA, 19 nt, Artificial Sequence
  Description of Artificial Sequence: Synthetic oligonucleotide
ggcgccuggaggaaaacga

SEQ ID NO: 910832 - RNA, 19 nt, Artificial Sequence
  Description of Artificial Sequence: Synthetic oligonucleotide
gcgaaacacggcccggagc

SEQ ID NO: 910833 - RNA, 19 nt, Artificial Sequence
  Description of Artificial Sequence: Synthetic oligonucleotide
cuuaacgaugcugacccau

SEQ ID NO: 910834 - RNA, 19 nt, Artificial Sequence
  Description of Artificial Sequence: Synthetic oligonucleotide
ucuucgcuugggugucguc

SEQ ID NO: 910835 - RNA, 19 nt, Artificial Sequence
  Description of Artificial Sequence: Synthetic oligonucleotide
cucccaccacuguugcauc

SEQ ID NO: 910836 - RNA, 19 nt, Artificial Sequence
  Description of Artificial Sequence: Synthetic oligonucleotide
gccacuacuggcugaagcu

SEQ ID NO: 910837 - RNA, 19 nt, Artificial Sequence
  Description of Artificial Sequence: Synthetic oligonucleotide
ggaccggcagugucgcuug

SEQ ID NO: 910838 - RNA, 19 nt, Artificial Sequence
  Description of Artificial Sequence: Synthetic oligonucleotide
cuugggugucguccucauc

SEQ ID NO: 910839 - RNA, 19 nt, Artificial Sequence
  Description of Artificial Sequence: Synthetic oligonucleotide
uccgcuugcgccggacccu

SEQ ID NO: 910840 - RNA, 19 nt, Artificial Sequence
  Description of Artificial Sequence: Synthetic oligonucleotide
cacaaggacaccgcguucu

SEQ ID NO: 910841 - RNA, 19 nt, Artificial Sequence
  Description of Artificial Sequence: Synthetic oligonucleotide
cagucuucgcuuggguguc

SEQ ID NO: 910842 - RNA, 19 nt, Artificial Sequence
  Description of Artificial Sequence: Synthetic oligonucleotide
cacaagguccuucgaguua

SEQ ID NO: 910843 - RNA, 19 nt, Artificial Sequence
  Description of Artificial Sequence: Synthetic oligonucleotide
ggacuuuugucuacgccaa

SEQ ID NO: 910844 - RNA, 19 nt, Artificial Sequence
  Description of Artificial Sequence: Synthetic oligonucleotide
gcggccggaguuuguggcg

SEQ ID NO: 910845 - RNA, 19 nt, Artificial Sequence
  Description of Artificial Sequence: Synthetic oligonucleotide
cagaaggcucaagccauca

SEQ ID NO: 910846 - RNA, 19 nt, Artificial Sequence
  Description of Artificial Sequence: Synthetic oligonucleotide
cuccggacugacagcacaa

SEQ ID NO: 910847 - RNA, 19 nt, Artificial Sequence
  Description of Artificial Sequence: Synthetic oligonucleotide
uggcggugcucuagcgaaa

SEQ ID NO: 910848 - RNA, 19 nt, Artificial Sequence
  Description of Artificial Sequence: Synthetic oligonucleotide
uggagcuacuagggcgcca

SEQ ID NO: 910849 - RNA, 19 nt, Artificial Sequence
  Description of Artificial Sequence: Synthetic oligonucleotide
caucaggucugagcuaaaa

SEQ ID NO: 910850 - RNA, 19 nt, Artificial Sequence
  Description of Artificial Sequence: Synthetic oligonucleotide
agaguacgggccagccuca

SEQ ID NO: 910851 - RNA, 19 nt, Artificial Sequence
  Description of Artificial Sequence: Synthetic oligonucleotide
caccgggcucucgacgugc

SEQ ID NO: 910852 - RNA, 19 nt, Artificial Sequence
  Description of Artificial Sequence: Synthetic oligonucleotide
cuugcgccggacccuccuc

SEQ ID NO: 910853 - RNA, 19 nt, Artificial Sequence
  Description of Artificial Sequence: Synthetic oligonucleotide
gcucucacggagguccaag

SEQ ID NO: 910854 - RNA, 19 nt, Artificial Sequence
  Description of Artificial Sequence: Synthetic oligonucleotide
cucuccgcgaggccggcga

SEQ ID NO: 910855 - RNA, 19 nt, Artificial Sequence
  Description of Artificial Sequence: Synthetic oligonucleotide
cagccucaugggcccuucg

SEQ ID NO: 910856 - RNA, 19 nt, Artificial Sequence
  Description of Artificial Sequence: Synthetic oligonucleotide
ucgcuuggucgguggugcu

SEQ ID NO: 910857 - RNA, 19 nt, Artificial Sequence
  Description of Artificial Sequence: Synthetic oligonucleotide
gacgugcggcugcgcggcg

SEQ ID NO: 910858 - RNA, 19 nt, Artificial Sequence
  Description of Artificial Sequence: Synthetic oligonucleotide
gcucucgacgugcggcugc

SEQ ID NO: 910859 - RNA, 19 nt, Artificial Sequence
  Description of Artificial Sequence: Synthetic oligonucleotide
accgggcucucgacgugcg

SEQ ID NO: 910860 - RNA, 19 nt, Artificial Sequence
  Description of Artificial Sequence: Synthetic oligonucleotide
gcaagcacuugcgucuaca

SEQ ID NO: 910861 - RNA, 19 nt, Artificial Sequence
  Description of Artificial Sequence: Synthetic oligonucleotide
gguguuccgcgcgcugcgg

SEQ ID NO: 910862 - RNA, 19 nt, Artificial Sequence
  Description of Artificial Sequence: Synthetic oligonucleotide
gcacucuccgcgaggccgg

SEQ ID NO: 910863 - RNA, 19 nt, Artificial Sequence
  Description of Artificial Sequence: Synthetic oligonucleotide
cggugcucuagcgaaacac

SEQ ID NO: 910864 - RNA, 19 nt, Artificial Sequence
  Description of Artificial Sequence: Synthetic oligonucleotide
ggcggugcucuagcgaaac

SEQ ID NO: 910865 - RNA, 19 nt, Artificial Sequence
  Description of Artificial Sequence: Synthetic oligonucleotide
gggccuagauuucccugca

SEQ ID NO: 910866 - RNA, 19 nt, Artificial Sequence
  Description of Artificial Sequence: Synthetic oligonucleotide
cgacgugcggacacuccgg

SEQ ID NO: 910867 - RNA, 19 nt, Artificial Sequence
  Description of Artificial Sequence: Synthetic oligonucleotide
ggguuauagcucugacuua

SEQ ID NO: 910868 - RNA, 19 nt, Artificial Sequence
  Description of Artificial Sequence: Synthetic oligonucleotide
cacggcccggagcacucuc

SEQ ID NO: 910869 - RNA, 19 nt, Artificial Sequence
  Description of Artificial Sequence: Synthetic oligonucleotide
caccgcguucuggcggccg

SEQ ID NO: 910870 - RNA, 19 nt, Artificial Sequence
  Description of Artificial Sequence: Synthetic oligonucleotide
gcaccggagcaggccaugg

SEQ ID NO: 910871 - RNA, 19 nt, Artificial Sequence
  Description of Artificial Sequence: Synthetic oligonucleotide
ccggaguuuguggcggugc

SEQ ID NO: 910872 - RNA, 19 nt, Artificial Sequence
  Description of Artificial Sequence: Synthetic oligonucleotide
agaugggaguccacaccuu

SEQ ID NO: 910873 - RNA, 19 nt, Artificial Sequence
  Description of Artificial Sequence: Synthetic oligonucleotide
uugcgucuacaaggugcuc

SEQ ID NO: 910874 - RNA, 19 nt, Artificial Sequence
  Description of Artificial Sequence: Synthetic oligonucleotide
ggguaaggucauccaaacu

SEQ ID NO: 910875 - RNA, 19 nt, Artificial Sequence
  Description of Artificial Sequence: Synthetic oligonucleotide
cagugucgcuuggucggug

SEQ ID NO: 910876 - RNA, 19 nt, Artificial Sequence
  Description of Artificial Sequence: Synthetic oligonucleotide
cagacucuucaggguugug

SEQ ID NO: 910877 - RNA, 19 nt, Artificial Sequence
  Description of Artificial Sequence: Synthetic oligonucleotide
cacggagguccaagaagcu

SEQ ID NO: 910878 - RNA, 19 nt, Artificial Sequence
  Description of Artificial Sequence: Synthetic oligonucleotide
cacucccaccacuguugca

SEQ ID NO: 910879 - RNA, 19 nt, Artificial Sequence
  Description of Artificial Sequence: Synthetic oligonucleotide
gaaccacguuuaauagaau

SEQ ID NO: 910880 - RNA, 19 nt, Artificial Sequence
  Description of Artificial Sequence: Synthetic oligonucleotide
gcccuggagaugccagcug

SEQ ID NO: 910881 - RNA, 19 nt, Artificial Sequence
  Description of Artificial Sequence: Synthetic oligonucleotide
gccggggugucagugguga

SEQ ID NO: 910882 - RNA, 19 nt, Artificial Sequence
  Description of Artificial Sequence: Synthetic oligonucleotide
cugugauaagcgugaccau

SEQ ID NO: 910883 - RNA, 19 nt, Artificial Sequence
  Description of Artificial Sequence: Synthetic oligonucleotide
cauggucggggcucuuccu

SEQ ID NO: 910884 - RNA, 19 nt, Artificial Sequence
  Description of Artificial Sequence: Synthetic oligonucleotide
gcacuugcgucuacaaggu

SEQ ID NO: 910885 - RNA, 19 nt, Artificial Sequence
  Description of Artificial Sequence: Synthetic oligonucleotide
gucggcgccuggaggaaaa

SEQ ID NO: 910886 - RNA, 19 nt, Artificial Sequence
  Description of Artificial Sequence: Synthetic oligonucleotide
agucggcgccuggaggaaa

SEQ ID NO: 910887 - RNA, 19 nt, Artificial Sequence
  Description of Artificial Sequence: Synthetic oligonucleotide
cucaagccaucaggucuga

SEQ ID NO: 910888 - RNA, 19 nt, Artificial Sequence
  Description of Artificial Sequence: Synthetic oligonucleotide
gcgugaccauggucggggc

SEQ ID NO: 910889 - RNA, 19 nt, Artificial Sequence
  Description of Artificial Sequence: Synthetic oligonucleotide
agguggaccugagcuugua

SEQ ID NO: 910890 - RNA, 19 nt, Artificial Sequence
  Description of Artificial Sequence: Synthetic oligonucleotide
gcggcguugcaccgggcuc

SEQ ID NO: 910891 - RNA, 19 nt, Artificial Sequence
  Description of Artificial Sequence: Synthetic oligonucleotide
gucuccgcuugcgccggac

SEQ ID NO: 910892 - RNA, 19 nt, Artificial Sequence
  Description of Artificial Sequence: Synthetic oligonucleotide
ggccuaguucaggugugga

SEQ ID NO: 910893 - RNA, 19 nt, Artificial Sequence
  Description of Artificial Sequence: Synthetic oligonucleotide
uuccgcgcgcugcggcguu

SEQ ID NO: 910894 - RNA, 19 nt, Artificial Sequence
  Description of Artificial Sequence: Synthetic oligonucleotide
ggagcggcaucgagccagc

SEQ ID NO: 910895 - RNA, 19 nt, Artificial Sequence
  Description of Artificial Sequence: Synthetic oligonucleotide
cugcggcguugcaccgggc

SEQ ID NO: 910896 - RNA, 19 nt, Artificial Sequence
  Description of Artificial Sequence: Synthetic oligonucleotide
cgggcucucgacgugcggc

SEQ ID NO: 910897 - RNA, 19 nt, Artificial Sequence
  Description of Artificial Sequence: Synthetic oligonucleotide
cacucuccgcgaggccggc

SEQ ID NO: 910898 - RNA, 19 nt, Artificial Sequence
  Description of Artificial Sequence: Synthetic oligonucleotide
cgcgaggccggcgagcgcc

SEQ ID NO: 910899 - RNA, 19 nt, Artificial Sequence
  Description of Artificial Sequence: Synthetic oligonucleotide
gugucgcuuggucgguggu

SEQ ID NO: 910900 - RNA, 19 nt, Artificial Sequence
  Description of Artificial Sequence: Synthetic oligonucleotide
ccuaugcuggccucuggcu

SEQ ID NO: 910901 - RNA, 19 nt, Artificial Sequence
  Description of Artificial Sequence: Synthetic oligonucleotide
ggagcuacuagggcgccau

SEQ ID NO: 910902 - RNA, 19 nt, Artificial Sequence
  Description of Artificial Sequence: Synthetic oligonucleotide
cggagcacucuccgcgagg

SEQ ID NO: 910903 - RNA, 19 nt, Artificial Sequence
  Description of Artificial Sequence: Synthetic oligonucleotide
cugucccaaucacuggguu

SEQ ID NO: 910904 - RNA, 19 nt, Artificial Sequence
  Description of Artificial Sequence: Synthetic oligonucleotide
uccgcgcgcugcggcguug

SEQ ID NO: 910905 - RNA, 19 nt, Artificial Sequence
  Description of Artificial Sequence: Synthetic oligonucleotide
ccggcgagcgccgggcucc

SEQ ID NO: 910906 - RNA, 19 nt, Artificial Sequence
  Description of Artificial Sequence: Synthetic oligonucleotide
gccgacgugcggacacucc

SEQ ID NO: 910907 - RNA, 19 nt, Artificial Sequence
  Description of Artificial Sequence: Synthetic oligonucleotide
ggcaccggagcaggccaug

SEQ ID NO: 910908 - RNA, 19 nt, Artificial Sequence
  Description of Artificial Sequence: Synthetic oligonucleotide
gcaccgggcucucgacgug

SEQ ID NO: 910909 - RNA, 19 nt, Artificial Sequence
  Description of Artificial Sequence: Synthetic oligonucleotide
gcccucugaaaacccauuu

SEQ ID NO: 910910 - RNA, 19 nt, Artificial Sequence
  Description of Artificial Sequence: Synthetic oligonucleotide
ggcucucgacgugcggcug

SEQ ID NO: 910911 - RNA, 19 nt, Artificial Sequence
  Description of Artificial Sequence: Synthetic oligonucleotide
gcggugcucuagcgaaaca

SEQ ID NO: 910912 - RNA, 19 nt, Artificial Sequence
  Description of Artificial Sequence: Synthetic oligonucleotide
cacggguccuuggggagua

SEQ ID NO: 910913 - RNA, 19 nt, Artificial Sequence
  Description of Artificial Sequence: Synthetic oligonucleotide
cggcccggagcacucuccg

SEQ ID NO: 910914 - RNA, 19 nt, Artificial Sequence
  Description of Artificial Sequence: Synthetic oligonucleotide
gcuaaaacucgggguuaua

SEQ ID NO: 910915 - RNA, 19 nt, Artificial Sequence
  Description of Artificial Sequence: Synthetic oligonucleotide
gucuucgcuugggugucgu

SEQ ID NO: 910916 - RNA, 19 nt, Artificial Sequence
  Description of Artificial Sequence: Synthetic oligonucleotide
cggccggaguuuguggcgg

SEQ ID NO: 910917 - RNA, 19 nt, Artificial Sequence
  Description of Artificial Sequence: Synthetic oligonucleotide
gcgucuacaaggugcucuu

SEQ ID NO: 910918 - RNA, 19 nt, Artificial Sequence
  Description of Artificial Sequence: Synthetic oligonucleotide
gggcucucgacgugcggcu

SEQ ID NO: 910919 - RNA, 19 nt, Artificial Sequence
  Description of Artificial Sequence: Synthetic oligonucleotide
ccgggcucucgacgugcgg

SEQ ID NO: 910920 - RNA, 19 nt, Artificial Sequence
  Description of Artificial Sequence: Synthetic oligonucleotide
caccggagcaggccauggu

SEQ ID NO: 910921 - RNA, 19 nt, Artificial Sequence
  Description of Artificial Sequence: Synthetic oligonucleotide
guucuggcggccggaguuu

SEQ ID NO: 910922 - RNA, 19 nt, Artificial Sequence
  Description of Artificial Sequence: Synthetic oligonucleotide
ccaaugggaaggggccuga

SEQ ID NO: 910923 - RNA, 19 nt, Artificial Sequence
  Description of Artificial Sequence: Synthetic oligonucleotide
ggccgacgugcggacacuc

SEQ ID NO: 910924 - RNA, 19 nt, Artificial Sequence
  Description of Artificial Sequence: Synthetic oligonucleotide
ggcuagagccuggugugau

SEQ ID NO: 910925 - RNA, 19 nt, Artificial Sequence
  Description of Artificial Sequence: Synthetic oligonucleotide
gcuugcgccggacccuccu

SEQ ID NO: 910926 - RNA, 19 nt, Artificial Sequence
  Description of Artificial Sequence: Synthetic oligonucleotide
guuccgcgcgcugcggcgu

SEQ ID NO: 910927 - RNA, 19 nt, Artificial Sequence
  Description of Artificial Sequence: Synthetic oligonucleotide
cagucggcgccuggaggaa

SEQ ID NO: 910928 - RNA, 19 nt, Artificial Sequence
  Description of Artificial Sequence: Synthetic oligonucleotide
cgucuacaaggugcucuug

SEQ ID NO: 910929 - RNA, 19 nt, Artificial Sequence
  Description of Artificial Sequence: Synthetic oligonucleotide
gcgcgcugcggcguugcac

SEQ ID NO: 910930 - RNA, 19 nt, Artificial Sequence
  Description of Artificial Sequence: Synthetic oligonucleotide
gggcgccauggggagcggc

SEQ ID NO: 910931 - RNA, 19 nt, Artificial Sequence
  Description of Artificial Sequence: Synthetic oligonucleotide
ggggagcggcaucgagcca

SEQ ID NO: 910932 - RNA, 19 nt, Artificial Sequence
  Description of Artificial Sequence: Synthetic oligonucleotide
acggguccuuggggaguau

SEQ ID NO: 910933 - RNA, 19 nt, Artificial Sequence
  Description of Artificial Sequence: Synthetic oligonucleotide
gagcggcaucgagccagcu

SEQ ID NO: 910934 - RNA, 19 nt, Artificial Sequence
  Description of Artificial Sequence: Synthetic oligonucleotide
cgcguucuggcggccggag

SEQ ID NO: 910935 - RNA, 19 nt, Artificial Sequence
  Description of Artificial Sequence: Synthetic oligonucleotide
ccgcuugcgccggacccuc

SEQ ID NO: 910936 - RNA, 19 nt, Artificial Sequence
  Description of Artificial Sequence: Synthetic oligonucleotide
gcagugucgcuuggucggu

SEQ ID NO: 910937 - RNA, 19 nt, Artificial Sequence
  Description of Artificial Sequence: Synthetic oligonucleotide
ccaaugggccauccuccau

SEQ ID NO: 910938 - RNA, 19 nt, Artificial Sequence
  Description of Artificial Sequence: Synthetic oligonucleotide
ccgcgcgcugcggcguugc

SEQ ID NO: 910939 - RNA, 19 nt, Artificial Sequence
  Description of Artificial Sequence: Synthetic oligonucleotide
cgcuugcgccggacccucc

SEQ ID NO: 910940 - RNA, 19 nt, Artificial Sequence
  Description of Artificial Sequence: Synthetic oligonucleotide
gccggccgacgugcggaca

SEQ ID NO: 910941 - RNA, 19 nt, Artificial Sequence
  Description of Artificial Sequence: Synthetic oligonucleotide
gcccuucggguaaggucau

SEQ ID NO: 910942 - RNA, 19 nt, Artificial Sequence
  Description of Artificial Sequence: Synthetic oligonucleotide
cggcaucgagccagcuccu

SEQ ID NO: 910943 - RNA, 19 nt, Artificial Sequence
  Description of Artificial Sequence: Synthetic oligonucleotide
cgccggacccuccucccau

SEQ ID NO: 910944 - RNA, 19 nt, Artificial Sequence
  Description of Artificial Sequence: Synthetic oligonucleotide
cgcgcgcugcggcguugca

SEQ ID NO: 910945 - RNA, 19 nt, Artificial Sequence
  Description of Artificial Sequence: Synthetic oligonucleotide
cggcaccggagcaggccau

SEQ ID NO: 910946 - RNA, 19 nt, Artificial Sequence
  Description of Artificial Sequence: Synthetic oligonucleotide
cggccgacgugcggacacu

SEQ ID NO: 910947 - RNA, 19 nt, Artificial Sequence
  Description of Artificial Sequence: Synthetic oligonucleotide
uuugacuuaaauuuuaacg

SEQ ID NO: 910948 - RNA, 19 nt, Artificial Sequence
  Description of Artificial Sequence: Synthetic oligonucleotide
aacugaaauaaacuguccc

SEQ ID NO: 910949 - RNA, 19 nt, Artificial Sequence
  Description of Artificial Sequence: Synthetic oligonucleotide
uuaaauuuuaacgagggag

SEQ ID NO: 910950 - RNA, 19 nt, Artificial Sequence
  Description of Artificial Sequence: Synthetic oligonucleotide
uugacuuaaauuuuaacga

SEQ ID NO: 910951 - RNA, 19 nt, Artificial Sequence
  Description of Artificial Sequence: Synthetic oligonucleotide
cuaacuauccaguuaaugc

SEQ ID NO: 910952 - RNA, 19 nt, Artificial Sequence
  Description of Artificial Sequence: Synthetic oligonucleotide
acauauuccauacuucggc

SEQ ID NO: 910953 - RNA, 19 nt, Artificial Sequence
  Description of Artificial Sequence: Synthetic oligonucleotide
uuaacuuaguuucaucucc

SEQ ID NO: 910954 - RNA, 19 nt, Artificial Sequence
  Description of Artificial Sequence: Synthetic oligonucleotide
uuuaacaggaucuggagca

SEQ ID NO: 910955 - RNA, 19 nt, Artificial Sequence
  Description of Artificial Sequence: Synthetic oligonucleotide
uauuagaguauuuuaaaga

SEQ ID NO: 910956 - RNA, 19 nt, Artificial Sequence
  Description of Artificial Sequence: Synthetic oligonucleotide
uuuguagucaauaaccaga

SEQ ID NO: 910957 - RNA, 19 nt, Artificial Sequence
  Description of Artificial Sequence: Synthetic oligonucleotide
auuauauggaauguggugg

SEQ ID NO: 910958 - RNA, 19 nt, Artificial Sequence
  Description of Artificial Sequence: Synthetic oligonucleotide
aaugauacagcaugcucuc

SEQ ID NO: 910959 - RNA, 19 nt, Artificial Sequence
  Description of Artificial Sequence: Synthetic oligonucleotide
uaaacugucccuuagugca

SEQ ID NO: 910960 - RNA, 19 nt, Artificial Sequence
  Description of Artificial Sequence: Synthetic oligonucleotide
acucaauauaaacugccgc

SEQ ID NO: 910961 - RNA, 19 nt, Artificial Sequence
  Description of Artificial Sequence: Synthetic oligonucleotide
aaugcucuaugaucugucc

SEQ ID NO: 910962 - RNA, 19 nt, Artificial Sequence
  Description of Artificial Sequence: Synthetic oligonucleotide
auugacuucaaagggaccc

SEQ ID NO: 910963 - RNA, 19 nt, Artificial Sequence
  Description of Artificial Sequence: Synthetic oligonucleotide
aaugucauaguucguaccu

SEQ ID NO: 910964 - RNA, 19 nt, Artificial Sequence
  Description of Artificial Sequence: Synthetic oligonucleotide
uagucaauaaccagaaaug

SEQ ID NO: 910965 - RNA, 19 nt, Artificial Sequence
  Description of Artificial Sequence: Synthetic oligonucleotide
uuuaagcucauguuggccc

SEQ ID NO: 910966 - RNA, 19 nt, Artificial Sequence
  Description of Artificial Sequence: Synthetic oligonucleotide
ugucugauugacuucaaag

SEQ ID NO: 910967 - RNA, 19 nt, Artificial Sequence
  Description of Artificial Sequence: Synthetic oligonucleotide
agaaugauaaauggagacc

SEQ ID NO: 910968 - RNA, 19 nt, Artificial Sequence
  Description of Artificial Sequence: Synthetic oligonucleotide
ugacuuaaauuuuaacgag

SEQ ID NO: 910969 - RNA, 19 nt, Artificial Sequence
  Description of Artificial Sequence: Synthetic oligonucleotide
cucaauauaaacugccgcc

SEQ ID NO: 910970 - RNA, 19 nt, Artificial Sequence
  Description of Artificial Sequence: Synthetic oligonucleotide
aguguuaacuuuucugaac

SEQ ID NO: 910971 - RNA, 19 nt, Artificial Sequence
  Description of Artificial Sequence: Synthetic oligonucleotide
uaccucagaacuaggaagg

SEQ ID NO: 910972 - RNA, 19 nt, Artificial Sequence
  Description of Artificial Sequence: Synthetic oligonucleotide
agauauaugcacaucuacc

SEQ ID NO: 910973 - RNA, 19 nt, Artificial Sequence
  Description of Artificial Sequence: Synthetic oligonucleotide
aaguuuaaugucauaguuc

SEQ ID NO: 910974 - RNA, 19 nt, Artificial Sequence
  Description of Artificial Sequence: Synthetic oligonucleotide
uuaaauaccacagagucuu

SEQ ID NO: 910975 - RNA, 19 nt, Artificial Sequence
  Description of Artificial Sequence: Synthetic oligonucleotide
uuaaacagucccaucaccu

SEQ ID NO: 910976 - RNA, 19 nt, Artificial Sequence
  Description of Artificial Sequence: Synthetic oligonucleotide
auaaauggagaccucaaga

SEQ ID NO: 910977 - RNA, 19 nt, Artificial Sequence
  Description of Artificial Sequence: Synthetic oligonucleotide
aaucccuuuuaguuggauc

SEQ ID NO: 910978 - RNA, 19 nt, Artificial Sequence
  Description of Artificial Sequence: Synthetic oligonucleotide
aguuguacuuguuuuaucu

SEQ ID NO: 910979 - RNA, 19 nt, Artificial Sequence
  Description of Artificial Sequence: Synthetic oligonucleotide
caacuaacuugauauaugc

SEQ ID NO: 910980 - RNA, 19 nt, Artificial Sequence
  Description of Artificial Sequence: Synthetic oligonucleotide
aaagggacccuacuuuggg

SEQ ID NO: 910981 - RNA, 19 nt, Artificial Sequence
  Description of Artificial Sequence: Synthetic oligonucleotide
uaacuauccaguuaaugcu

SEQ ID NO: 910982 - RNA, 19 nt, Artificial Sequence
  Description of Artificial Sequence: Synthetic oligonucleotide
uggcuuagcagaaugauaa

SEQ ID NO: 910983 - RNA, 19 nt, Artificial Sequence
  Description of Artificial Sequence: Synthetic oligonucleotide
acaaugauacagcaugcuc

SEQ ID NO: 910984 - RNA, 19 nt, Artificial Sequence
  Description of Artificial Sequence: Synthetic oligonucleotide
aguacacgcagcgagaacg

SEQ ID NO: 910985 - RNA, 19 nt, Artificial Sequence
  Description of Artificial Sequence: Synthetic oligonucleotide
cugagucugacauacaaug

SEQ ID NO: 910986 - RNA, 19 nt, Artificial Sequence
  Description of Artificial Sequence: Synthetic oligonucleotide
uccguuuucuucaugauua

SEQ ID NO: 910987 - RNA, 19 nt, Artificial Sequence
  Description of Artificial Sequence: Synthetic oligonucleotide
gauaaauggagaccucaag

SEQ ID NO: 910988 - RNA, 19 nt, Artificial Sequence
  Description of Artificial Sequence: Synthetic oligonucleotide
auaacucaauauaaacugc

SEQ ID NO: 910989 - RNA, 19 nt, Artificial Sequence
  Description of Artificial Sequence: Synthetic oligonucleotide
uuacucaguaucuuuauau

SEQ ID NO: 910990 - RNA, 19 nt, Artificial Sequence
  Description of Artificial Sequence: Synthetic oligonucleotide
aguguuauguuuucaucag

SEQ ID NO: 910991 - RNA, 19 nt, Artificial Sequence
  Description of Artificial Sequence: Synthetic oligonucleotide
uagauauaugcacaucuac

SEQ ID NO: 910992 - RNA, 19 nt, Artificial Sequence
  Description of Artificial Sequence: Synthetic oligonucleotide
acugaaauaaacugucccu

SEQ ID NO: 910993 - RNA, 19 nt, Artificial Sequence
  Description of Artificial Sequence: Synthetic oligonucleotide
acagcgauggcacauucuc

SEQ ID NO: 910994 - RNA, 19 nt, Artificial Sequence
  Description of Artificial Sequence: Synthetic oligonucleotide
auauaugcacaucuaccuc

SEQ ID NO: 910995 - RNA, 19 nt, Artificial Sequence
  Description of Artificial Sequence: Synthetic oligonucleotide
ucaccuagugcauaaauau

SEQ ID NO: 910996 - RNA, 19 nt, Artificial Sequence
  Description of Artificial Sequence: Synthetic oligonucleotide
uucuucaugauuaaaccuu

SEQ ID NO: 910997 - RNA, 19 nt, Artificial Sequence
  Description of Artificial Sequence: Synthetic oligonucleotide
uuuuaucucuuaauuucca

SEQ ID NO: 910998 - RNA, 19 nt, Artificial Sequence
  Description of Artificial Sequence: Synthetic oligonucleotide
aucccuuuuaguuggauca

SEQ ID NO: 910999 - RNA, 19 nt, Artificial Sequence
  Description of Artificial Sequence: Synthetic oligonucleotide
cuauguugaccuuuuguag

SEQ ID NO: 911000 - RNA, 19 nt, Artificial Sequence
  Description of Artificial Sequence: Synthetic oligonucleotide
ccuuuuguagucaauaacc

SEQ ID NO: 911001 - RNA, 19 nt, Artificial Sequence
  Description of Artificial Sequence: Synthetic oligonucleotide
ucuaugaucugucccagaa

SEQ ID NO: 911002 - RNA, 19 nt, Artificial Sequence
  Description of Artificial Sequence: Synthetic oligonucleotide
auuuuaacgagggaggcug

SEQ ID NO: 911003 - RNA, 19 nt, Artificial Sequence
  Description of Artificial Sequence: Synthetic oligonucleotide
auuggagucagugucaucu

SEQ ID NO: 911004 - RNA, 19 nt, Artificial Sequence
  Description of Artificial Sequence: Synthetic oligonucleotide
acuagugucacaugaacaa

SEQ ID NO: 911005 - RNA, 19 nt, Artificial Sequence
  Description of Artificial Sequence: Synthetic oligonucleotide
uuugccgcuguacauauuc

SEQ ID NO: 911006 - RNA, 19 nt, Artificial Sequence
  Description of Artificial Sequence: Synthetic oligonucleotide
uuguacuuguuuuaucucu

SEQ ID NO: 911007 - RNA, 19 nt, Artificial Sequence
  Description of Artificial Sequence: Synthetic oligonucleotide
cauuagacaauuacagcug

SEQ ID NO: 911008 - RNA, 19 nt, Artificial Sequence
  Description of Artificial Sequence: Synthetic oligonucleotide
aacaucccguaauacaacu

SEQ ID NO: 911009 - RNA, 19 nt, Artificial Sequence
  Description of Artificial Sequence: Synthetic oligonucleotide
gauauaugcacaucuaccu

SEQ ID NO: 911010 - RNA, 19 nt, Artificial Sequence
  Description of Artificial Sequence: Synthetic oligonucleotide
uacugucuuguuuagaaaa

SEQ ID NO: 911011 - RNA, 19 nt, Artificial Sequence
  Description of Artificial Sequence: Synthetic oligonucleotide
ugauacagcaugcucucug

SEQ ID NO: 911012 - RNA, 19 nt, Artificial Sequence
  Description of Artificial Sequence: Synthetic oligonucleotide
uuccuuagauauuugccgc

SEQ ID NO: 911013 - RNA, 19 nt, Artificial Sequence
  Description of Artificial Sequence: Synthetic oligonucleotide
aacaggcuaaaacccucac

SEQ ID NO: 911014 - RNA, 19 nt, Artificial Sequence
  Description of Artificial Sequence: Synthetic oligonucleotide
augauaccaggcaagauuc

SEQ ID NO: 911015 - RNA, 19 nt, Artificial Sequence
  Description of Artificial Sequence: Synthetic oligonucleotide
cuguaaaugcucuaugauc

SEQ ID NO: 911016 - RNA, 19 nt, Artificial Sequence
  Description of Artificial Sequence: Synthetic oligonucleotide
auauuccauacuucggcuc

SEQ ID NO: 911017 - RNA, 19 nt, Artificial Sequence
  Description of Artificial Sequence: Synthetic oligonucleotide
uacguagcagcacauacau

SEQ ID NO: 911018 - RNA, 19 nt, Artificial Sequence
  Description of Artificial Sequence: Synthetic oligonucleotide
ucuaccucagaacuaggaa

SEQ ID NO: 911019 - RNA, 19 nt, Artificial Sequence
  Description of Artificial Sequence: Synthetic oligonucleotide
ugacaugucugauugacuu

SEQ ID NO: 911020 - RNA, 19 nt, Artificial Sequence
  Description of Artificial Sequence: Synthetic oligonucleotide
uaccgacguauuaagaugu

SEQ ID NO: 911021 - RNA, 19 nt, Artificial Sequence
  Description of Artificial Sequence: Synthetic oligonucleotide
uuauauggaaugugguggu

SEQ ID NO: 911022 - RNA, 19 nt, Artificial Sequence
  Description of Artificial Sequence: Synthetic oligonucleotide
augauuuaguuguacuugu

SEQ ID NO: 911023 - RNA, 19 nt, Artificial Sequence
  Description of Artificial Sequence: Synthetic oligonucleotide
aauaaguguuauguuuuca

SEQ ID NO: 911024 - RNA, 19 nt, Artificial Sequence
  Description of Artificial Sequence: Synthetic oligonucleotide
uggcaguacacgcagcgag

SEQ ID NO: 911025 - RNA, 19 nt, Artificial Sequence
  Description of Artificial Sequence: Synthetic oligonucleotide
agggacccuacuuugggac

SEQ ID NO: 911026 - RNA, 19 nt, Artificial Sequence
  Description of Artificial Sequence: Synthetic oligonucleotide
auucucaaagguacguagc

SEQ ID NO: 911027 - RNA, 19 nt, Artificial Sequence
  Description of Artificial Sequence: Synthetic oligonucleotide
auacaaugauacagcaugc

SEQ ID NO: 911028 - RNA, 19 nt, Artificial Sequence
  Description of Artificial Sequence: Synthetic oligonucleotide
aucucuuaauuuccaagug

SEQ ID NO: 911029 - RNA, 19 nt, Artificial Sequence
  Description of Artificial Sequence: Synthetic oligonucleotide
uaacuuaguuucaucucca

SEQ ID NO: 911030 - RNA, 19 nt, Artificial Sequence
  Description of Artificial Sequence: Synthetic oligonucleotide
agauaauaacucaauauaa

SEQ ID NO: 911031 - RNA, 19 nt, Artificial Sequence
  Description of Artificial Sequence: Synthetic oligonucleotide
uauaaacugccgccaaaga

SEQ ID NO: 911032 - RNA, 19 nt, Artificial Sequence
  Description of Artificial Sequence: Synthetic oligonucleotide
aguuagcuaauuccuggag

SEQ ID NO: 911033 - RNA, 19 nt, Artificial Sequence
  Description of Artificial Sequence: Synthetic oligonucleotide
aauauuggagucaguguca

SEQ ID NO: 911034 - RNA, 19 nt, Artificial Sequence
  Description of Artificial Sequence: Synthetic oligonucleotide
aaacaucccguaauacaac

SEQ ID NO: 911035 - RNA, 19 nt, Artificial Sequence
  Description of Artificial Sequence: Synthetic oligonucleotide
guagucaauaaccagaaau

SEQ ID NO: 911036 - RNA, 19 nt, Artificial Sequence
  Description of Artificial Sequence: Synthetic oligonucleotide
aaugauaaauggagaccuc

SEQ ID NO: 911037 - RNA, 19 nt, Artificial Sequence
  Description of Artificial Sequence: Synthetic oligonucleotide
acaacuaauaaaugauuua

SEQ ID NO: 911038 - RNA, 19 nt, Artificial Sequence
  Description of Artificial Sequence: Synthetic oligonucleotide
aaaucacagcaacugucga

SEQ ID NO: 911039 - RNA, 19 nt, Artificial Sequence
  Description of Artificial Sequence: Synthetic oligonucleotide
uuuaucucuuaauuuccaa

SEQ ID NO: 911040 - RNA, 19 nt, Artificial Sequence
  Description of Artificial Sequence: Synthetic oligonucleotide
uguaguccgcauaccgacg

SEQ ID NO: 911041 - RNA, 19 nt, Artificial Sequence
  Description of Artificial Sequence: Synthetic oligonucleotide
gaaugauaaauggagaccu

SEQ ID NO: 911042 - RNA, 19 nt, Artificial Sequence
  Description of Artificial Sequence: Synthetic oligonucleotide
acuauccaguuaaugcucc

SEQ ID NO: 911043 - RNA, 19 nt, Artificial Sequence
  Description of Artificial Sequence: Synthetic oligonucleotide
cucagaacuaggaagggca

SEQ ID NO: 911044 - RNA, 19 nt, Artificial Sequence
  Description of Artificial Sequence: Synthetic oligonucleotide
ucugacauacaaugauaca

SEQ ID NO: 911045 - RNA, 19 nt, Artificial Sequence
  Description of Artificial Sequence: Synthetic oligonucleotide
aaaccuuuccuggcaguac

SEQ ID NO: 911046 - RNA, 19 nt, Artificial Sequence
  Description of Artificial Sequence: Synthetic oligonucleotide
cagauaauaacucaauaua

SEQ ID NO: 911047 - RNA, 19 nt, Artificial Sequence
  Description of Artificial Sequence: Synthetic oligonucleotide
auggcuagcaucuguaaau

SEQ ID NO: 911048 - RNA, 19 nt, Artificial Sequence
  Description of Artificial Sequence: Synthetic oligonucleotide
aacuagaguguuaaauacu

SEQ ID NO: 911049 - RNA, 19 nt, Artificial Sequence
  Description of Artificial Sequence: Synthetic oligonucleotide
augucucgaggguuuauuc

SEQ ID NO: 911050 - RNA, 19 nt, Artificial Sequence
  Description of Artificial Sequence: Synthetic oligonucleotide
accaggcaagauuccauac

SEQ ID NO: 911051 - RNA, 19 nt, Artificial Sequence
  Description of Artificial Sequence: Synthetic oligonucleotide
uuuaggcucccacauuccu

SEQ ID NO: 911052 - RNA, 19 nt, Artificial Sequence
  Description of Artificial Sequence: Synthetic oligonucleotide
acuaacuauccaguuaaug

SEQ ID NO: 911053 - RNA, 19 nt, Artificial Sequence
  Description of Artificial Sequence: Synthetic oligonucleotide
ugcaacuaacuugauauau

SEQ ID NO: 911054 - RNA, 19 nt, Artificial Sequence
  Description of Artificial Sequence: Synthetic oligonucleotide
auauggaauguggugguag

SEQ ID NO: 911055 - RNA, 19 nt, Artificial Sequence
  Description of Artificial Sequence: Synthetic oligonucleotide
agacaauuacagcugugcu

SEQ ID NO: 911056 - RNA, 19 nt, Artificial Sequence
  Description of Artificial Sequence: Synthetic oligonucleotide
gaaaguuuaaugucauagu

SEQ ID NO: 911057 - RNA, 19 nt, Artificial Sequence
  Description of Artificial Sequence: Synthetic oligonucleotide
caagggucagaaaagucuc

SEQ ID NO: 911058 - RNA, 19 nt, Artificial Sequence
  Description of Artificial Sequence: Synthetic oligonucleotide
augucuaggccuugcugac

SEQ ID NO: 911059 - RNA, 19 nt, Artificial Sequence
  Description of Artificial Sequence: Synthetic oligonucleotide
uauucuauguugaccuuuu

SEQ ID NO: 911060 - RNA, 19 nt, Artificial Sequence
  Description of Artificial Sequence: Synthetic oligonucleotide
uccggaugucuguaguccg

SEQ ID NO: 911061 - RNA, 19 nt, Artificial Sequence
  Description of Artificial Sequence: Synthetic oligonucleotide
ucuuaauuuccaaguguua

SEQ ID NO: 911062 - RNA, 19 nt, Artificial Sequence
  Description of Artificial Sequence: Synthetic oligonucleotide
uguacuuguuuuaucucuu

SEQ ID NO: 911063 - RNA, 19 nt, Artificial Sequence
  Description of Artificial Sequence: Synthetic oligonucleotide
uaaugcuccugccuuguaa

SEQ ID NO: 911064 - RNA, 19 nt, Artificial Sequence
  Description of Artificial Sequence: Synthetic oligonucleotide
ugucucgaggguuuauucu

SEQ ID NO: 911065 - RNA, 19 nt, Artificial Sequence
  Description of Artificial Sequence: Synthetic oligonucleotide
uaagaugucucgaggguuu

SEQ ID NO: 911066 - RNA, 19 nt, Artificial Sequence
  Description of Artificial Sequence: Synthetic oligonucleotide
acugccgccaaagagaaau

SEQ ID NO: 911067 - RNA, 19 nt, Artificial Sequence
  Description of Artificial Sequence: Synthetic oligonucleotide
auaucauaccacucuguaa

SEQ ID NO: 911068 - RNA, 19 nt, Artificial Sequence
  Description of Artificial Sequence: Synthetic oligonucleotide
uuagauauuugccgcugua

SEQ ID NO: 911069 - RNA, 19 nt, Artificial Sequence
  Description of Artificial Sequence: Synthetic oligonucleotide
agccuuauguuucccacca

SEQ ID NO: 911070 - RNA, 19 nt, Artificial Sequence
  Description of Artificial Sequence: Synthetic oligonucleotide
cuuugggacuuuaggcucc

SEQ ID NO: 911071 - RNA, 19 nt, Artificial Sequence
  Description of Artificial Sequence: Synthetic oligonucleotide
gucacuugaggcuauuaga

SEQ ID NO: 911072 - RNA, 19 nt, Artificial Sequence
  Description of Artificial Sequence: Synthetic oligonucleotide
uccaaguguuaacuuuucu

SEQ ID NO: 911073 - RNA, 19 nt, Artificial Sequence
  Description of Artificial Sequence: Synthetic oligonucleotide
aacuaacuugauauaugca

SEQ ID NO: 911074 - RNA, 19 nt, Artificial Sequence
  Description of Artificial Sequence: Synthetic oligonucleotide
ggcaagaaaguuuaauguc

SEQ ID NO: 911075 - RNA, 19 nt, Artificial Sequence
  Description of Artificial Sequence: Synthetic oligonucleotide
caaugauacagcaugcucu

SEQ ID NO: 911076 - RNA, 19 nt, Artificial Sequence
  Description of Artificial Sequence: Synthetic oligonucleotide
ucguaccuuacauuuaguu

SEQ ID NO: 911077 - RNA, 19 nt, Artificial Sequence
  Description of Artificial Sequence: Synthetic oligonucleotide
agcgagaacguuccccauc

SEQ ID NO: 911078 - RNA, 19 nt, Artificial Sequence
  Description of Artificial Sequence: Synthetic oligonucleotide
uuaaagaguuuagguuucc

SEQ ID NO: 911079 - RNA, 19 nt, Artificial Sequence
  Description of Artificial Sequence: Synthetic oligonucleotide
uacaaugauacagcaugcu

SEQ ID NO: 911080 - RNA, 19 nt, Artificial Sequence
  Description of Artificial Sequence: Synthetic oligonucleotide
uauuugccgcuguacauau

SEQ ID NO: 911081 - RNA, 19 nt, Artificial Sequence
  Description of Artificial Sequence: Synthetic oligonucleotide
ugauaccaggcaagauucc

SEQ ID NO: 911082 - RNA, 19 nt, Artificial Sequence
  Description of Artificial Sequence: Synthetic oligonucleotide
gguacguagcagcacauac

SEQ ID NO: 911083 - RNA, 19 nt, Artificial Sequence
  Description of Artificial Sequence: Synthetic oligonucleotide
uuaaaccuuuccuggcagu

SEQ ID NO: 911084 - RNA, 19 nt, Artificial Sequence
  Description of Artificial Sequence: Synthetic oligonucleotide
aggaggaaacucugaaaga

SEQ ID NO: 911085 - RNA, 19 nt, Artificial Sequence
  Description of Artificial Sequence: Synthetic oligonucleotide
guuguacuuguuuuaucuc

SEQ ID NO: 911086 - RNA, 19 nt, Artificial Sequence
  Description of Artificial Sequence: Synthetic oligonucleotide
uccuuagauauuugccgcu

SEQ ID NO: 911087 - RNA, 19 nt, Artificial Sequence
  Description of Artificial Sequence: Synthetic oligonucleotide
guaaaugcucuaugaucug

SEQ ID NO: 911088 - RNA, 19 nt, Artificial Sequence
  Description of Artificial Sequence: Synthetic oligonucleotide
aagggacccuacuuuggga

SEQ ID NO: 911089 - RNA, 19 nt, Artificial Sequence
  Description of Artificial Sequence: Synthetic oligonucleotide
ugggacuuuaggcucccac

SEQ ID NO: 911090 - RNA, 19 nt, Artificial Sequence
  Description of Artificial Sequence: Synthetic oligonucleotide
ucccguaauacaacugcuc

SEQ ID NO: 911091 - RNA, 19 nt, Artificial Sequence
  Description of Artificial Sequence: Synthetic oligonucleotide
ugucccuuagugcacuuuu

SEQ ID NO: 911092 - RNA, 19 nt, Artificial Sequence
  Description of Artificial Sequence: Synthetic oligonucleotide
acaggcuaaaacccucacu

SEQ ID NO: 911093 - RNA, 19 nt, Artificial Sequence
  Description of Artificial Sequence: Synthetic oligonucleotide
agaacguuccccauccucu

SEQ ID NO: 911094 - RNA, 19 nt, Artificial Sequence
  Description of Artificial Sequence: Synthetic oligonucleotide
uuccguuuucuucaugauu

SEQ ID NO: 911095 - RNA, 19 nt, Artificial Sequence
  Description of Artificial Sequence: Synthetic oligonucleotide
gauaccaggcaagauucca

SEQ ID NO: 911096 - RNA, 19 nt, Artificial Sequence
  Description of Artificial Sequence: Synthetic oligonucleotide
auguuuacucaguaucuuu

SEQ ID NO: 911097 - RNA, 19 nt, Artificial Sequence
  Description of Artificial Sequence: Synthetic oligonucleotide
ugccgcuguacauauucca

SEQ ID NO: 911098 - RNA, 19 nt, Artificial Sequence
  Description of Artificial Sequence: Synthetic oligonucleotide
ucuggcuuagcagaaugau

SEQ ID NO: 911099 - RNA, 19 nt, Artificial Sequence
  Description of Artificial Sequence: Synthetic oligonucleotide
gagaacguuccccauccuc

SEQ ID NO: 911100 - RNA, 19 nt, Artificial Sequence
  Description of Artificial Sequence: Synthetic oligonucleotide
ucuugaaagcugacauguc

SEQ ID NO: 911101 - RNA, 19 nt, Artificial Sequence
  Description of Artificial Sequence: Synthetic oligonucleotide
ggcuaaccaucuuaggcag

SEQ ID NO: 911102 - RNA, 19 nt, Artificial Sequence
  Description of Artificial Sequence: Synthetic oligonucleotide
cuugcugguugaauaccac

SEQ ID NO: 911103 - RNA, 19 nt, Artificial Sequence
  Description of Artificial Sequence: Synthetic oligonucleotide
uuuuaacgagggaggcugu

SEQ ID NO: 911104 - RNA, 19 nt, Artificial Sequence
  Description of Artificial Sequence: Synthetic oligonucleotide
aacaacuugcugguugaau

SEQ ID NO: 911105 - RNA, 19 nt, Artificial Sequence
  Description of Artificial Sequence: Synthetic oligonucleotide
cuaugaucugucccagaac

SEQ ID NO: 911106 - RNA, 19 nt, Artificial Sequence
  Description of Artificial Sequence: Synthetic oligonucleotide
cacuagugucacaugaaca

SEQ ID NO: 911107 - RNA, 19 nt, Artificial Sequence
  Description of Artificial Sequence: Synthetic oligonucleotide
cugucuuguuuagaaaaug

SEQ ID NO: 911108 - RNA, 19 nt, Artificial Sequence
  Description of Artificial Sequence: Synthetic oligonucleotide
gcuauuagaguauuuuaaa

SEQ ID NO: 911109 - RNA, 19 nt, Artificial Sequence
  Description of Artificial Sequence: Synthetic oligonucleotide
ugauuuaguuguacuuguu

SEQ ID NO: 911110 - RNA, 19 nt, Artificial Sequence
  Description of Artificial Sequence: Synthetic oligonucleotide
uucggcucugaaugucuag

SEQ ID NO: 911111 - RNA, 19 nt, Artificial Sequence
  Description of Artificial Sequence: Synthetic oligonucleotide
cugugucuuaaauaccaca

SEQ ID NO: 911112 - RNA, 19 nt, Artificial Sequence
  Description of Artificial Sequence: Synthetic oligonucleotide
uaccuuacauuuaguuaaa

SEQ ID NO: 911113 - RNA, 19 nt, Artificial Sequence
  Description of Artificial Sequence: Synthetic oligonucleotide
uuccaaguguuaacuuuuc

SEQ ID NO: 911114 - RNA, 19 nt, Artificial Sequence
  Description of Artificial Sequence: Synthetic oligonucleotide
guaaaucaaacaucccgua

SEQ ID NO: 911115 - RNA, 19 nt, Artificial Sequence
  Description of Artificial Sequence: Synthetic oligonucleotide
ggcuaaaacccucacuuuc

SEQ ID NO: 911116 - RNA, 19 nt, Artificial Sequence
  Description of Artificial Sequence: Synthetic oligonucleotide
uuuaacgagggaggcugug

SEQ ID NO: 911117 - RNA, 19 nt, Artificial Sequence
  Description of Artificial Sequence: Synthetic oligonucleotide
cguauuaagaugucucgag

SEQ ID NO: 911118 - RNA, 19 nt, Artificial Sequence
  Description of Artificial Sequence: Synthetic oligonucleotide
gauauuugccgcuguacau

SEQ ID NO: 911119 - RNA, 19 nt, Artificial Sequence
  Description of Artificial Sequence: Synthetic oligonucleotide
ucgaggguuuauucugaca

SEQ ID NO: 911120 - RNA, 19 nt, Artificial Sequence
  Description of Artificial Sequence: Synthetic oligonucleotide
gagucugacauacaaugau

SEQ ID NO: 911121 - RNA, 19 nt, Artificial Sequence
  Description of Artificial Sequence: Synthetic oligonucleotide
uuaacgagggaggcugugu

SEQ ID NO: 911122 - RNA, 19 nt, Artificial Sequence
  Description of Artificial Sequence: Synthetic oligonucleotide
acguauuaagaugucucga

SEQ ID NO: 911123 - RNA, 19 nt, Artificial Sequence
  Description of Artificial Sequence: Synthetic oligonucleotide
cauaccgacguauuaagau

SEQ ID NO: 911124 - RNA, 19 nt, Artificial Sequence
  Description of Artificial Sequence: Synthetic oligonucleotide
ggaaacugcucacacuaac

SEQ ID NO: 911125 - RNA, 19 nt, Artificial Sequence
  Description of Artificial Sequence: Synthetic oligonucleotide
gggcuaaccaucuuaggca

SEQ ID NO: 911126 - RNA, 19 nt, Artificial Sequence
  Description of Artificial Sequence: Synthetic oligonucleotide
ugcucacacuaacuaucca

SEQ ID NO: 911127 - RNA, 19 nt, Artificial Sequence
  Description of Artificial Sequence: Synthetic oligonucleotide
uucguaccuuacauuuagu

SEQ ID NO: 911128 - RNA, 19 nt, Artificial Sequence
  Description of Artificial Sequence: Synthetic oligonucleotide
aucuuaggcagaacuuguc

SEQ ID NO: 911129 - RNA, 19 nt, Artificial Sequence
  Description of Artificial Sequence: Synthetic oligonucleotide
cacacgccucgccacagcg

SEQ ID NO: 911130 - RNA, 19 nt, Artificial Sequence
  Description of Artificial Sequence: Synthetic oligonucleotide
cagccuuauguuucccacc

SEQ ID NO: 911131 - RNA, 19 nt, Artificial Sequence
  Description of Artificial Sequence: Synthetic oligonucleotide
acacgcagcgagaacguuc

SEQ ID NO: 911132 - RNA, 19 nt, Artificial Sequence
  Description of Artificial Sequence: Synthetic oligonucleotide
cguaauacaacugcucugc

SEQ ID NO: 911133 - RNA, 19 nt, Artificial Sequence
  Description of Artificial Sequence: Synthetic oligonucleotide
aacagucccaucaccuagu

SEQ ID NO: 911134 - RNA, 19 nt, Artificial Sequence
  Description of Artificial Sequence: Synthetic oligonucleotide
cauguccggaugucuguag

SEQ ID NO: 911135 - RNA, 19 nt, Artificial Sequence
  Description of Artificial Sequence: Synthetic oligonucleotide
aaacccucacuuucuucua

SEQ ID NO: 911136 - RNA, 19 nt, Artificial Sequence
  Description of Artificial Sequence: Synthetic oligonucleotide
auauuugccgcuguacaua

SEQ ID NO: 911137 - RNA, 19 nt, Artificial Sequence
  Description of Artificial Sequence: Synthetic oligonucleotide
auacuucggcucugaaugu

SEQ ID NO: 911138 - RNA, 19 nt, Artificial Sequence
  Description of Artificial Sequence: Synthetic oligonucleotide
uccgcauaccgacguauua

SEQ ID NO: 911139 - RNA, 19 nt, Artificial Sequence
  Description of Artificial Sequence: Synthetic oligonucleotide
accucaagaggaaacugcu

SEQ ID NO: 911140 - RNA, 19 nt, Artificial Sequence
  Description of Artificial Sequence: Synthetic oligonucleotide
cucauguuggcccuggacu

SEQ ID NO: 911141 - RNA, 19 nt, Artificial Sequence
  Description of Artificial Sequence: Synthetic oligonucleotide
cauaguucguaccuuacau

SEQ ID NO: 911142 - RNA, 19 nt, Artificial Sequence
  Description of Artificial Sequence: Synthetic oligonucleotide
gcaacuaacuugauauaug

SEQ ID NO: 911143 - RNA, 19 nt, Artificial Sequence
  Description of Artificial Sequence: Synthetic oligonucleotide
guguuauguuuucaucaga

SEQ ID NO: 911144 - RNA, 19 nt, Artificial Sequence
  Description of Artificial Sequence: Synthetic oligonucleotide
acagucccaucaccuagug

SEQ ID NO: 911145 - RNA, 19 nt, Artificial Sequence
  Description of Artificial Sequence: Synthetic oligonucleotide
ggaucauauucuauguuga

SEQ ID NO: 911146 - RNA, 19 nt, Artificial Sequence
  Description of Artificial Sequence: Synthetic oligonucleotide
cugaaugucuaggccuugc

SEQ ID NO: 911147 - RNA, 19 nt, Artificial Sequence
  Description of Artificial Sequence: Synthetic oligonucleotide
guccggaugucuguagucc

SEQ ID NO: 911148 - RNA, 19 nt, Artificial Sequence
  Description of Artificial Sequence: Synthetic oligonucleotide
aucuaccucagaacuagga

SEQ ID NO: 911149 - RNA, 19 nt, Artificial Sequence
  Description of Artificial Sequence: Synthetic oligonucleotide
gcgagaacguuccccaucc

SEQ ID NO: 911150 - RNA, 19 nt, Artificial Sequence
  Description of Artificial Sequence: Synthetic oligonucleotide
uggccccaaugauaccagg

SEQ ID NO: 911151 - RNA, 19 nt, Artificial Sequence
  Description of Artificial Sequence: Synthetic oligonucleotide
ugaggcuauuagaguauuu

SEQ ID NO: 911152 - RNA, 19 nt, Artificial Sequence
  Description of Artificial Sequence: Synthetic oligonucleotide
cucuuaauuuccaaguguu

SEQ ID NO: 911153 - RNA, 19 nt, Artificial Sequence
  Description of Artificial Sequence: Synthetic oligonucleotide
uggcuagcaucuguaaauc

SEQ ID NO: 911154 - RNA, 19 nt, Artificial Sequence
  Description of Artificial Sequence: Synthetic oligonucleotide
aucaccuagugcauaaaua

SEQ ID NO: 911155 - RNA, 19 nt, Artificial Sequence
  Description of Artificial Sequence: Synthetic oligonucleotide
gcugacaugucugauugac

SEQ ID NO: 911156 - RNA, 19 nt, Artificial Sequence
  Description of Artificial Sequence: Synthetic oligonucleotide
ggcuauuagaguauuuuaa

SEQ ID NO: 911157 - RNA, 19 nt, Artificial Sequence
  Description of Artificial Sequence: Synthetic oligonucleotide
cauauuccauacuucggcu

SEQ ID NO: 911158 - RNA, 19 nt, Artificial Sequence
  Description of Artificial Sequence: Synthetic oligonucleotide
cucgaggguuuauucugac

SEQ ID NO: 911159 - RNA, 19 nt, Artificial Sequence
  Description of Artificial Sequence: Synthetic oligonucleotide
cagaacuaggaagggcaag

SEQ ID NO: 911160 - RNA, 19 nt, Artificial Sequence
  Description of Artificial Sequence: Synthetic oligonucleotide
uuaacaggaucuggagcau

SEQ ID NO: 911161 - RNA, 19 nt, Artificial Sequence
  Description of Artificial Sequence: Synthetic oligonucleotide
agucugacauacaaugaua

SEQ ID NO: 911162 - RNA, 19 nt, Artificial Sequence
  Description of Artificial Sequence: Synthetic oligonucleotide
guagauauaugcacaucua

SEQ ID NO: 911163 - RNA, 19 nt, Artificial Sequence
  Description of Artificial Sequence: Synthetic oligonucleotide
guacguagcagcacauaca

SEQ ID NO: 911164 - RNA, 19 nt, Artificial Sequence
  Description of Artificial Sequence: Synthetic oligonucleotide
uguguacauucuggcuuag

SEQ ID NO: 911165 - RNA, 19 nt, Artificial Sequence
  Description of Artificial Sequence: Synthetic oligonucleotide
aggcauggcuagcaucugu

SEQ ID NO: 911166 - RNA, 19 nt, Artificial Sequence
  Description of Artificial Sequence: Synthetic oligonucleotide
augcaacuaacuugauaua

SEQ ID NO: 911167 - RNA, 19 nt, Artificial Sequence
  Description of Artificial Sequence: Synthetic oligonucleotide
ggaauauuggagucagugu

SEQ ID NO: 911168 - RNA, 19 nt, Artificial Sequence
  Description of Artificial Sequence: Synthetic oligonucleotide
acaucccguaauacaacug

SEQ ID NO: 911169 - RNA, 19 nt, Artificial Sequence
  Description of Artificial Sequence: Synthetic oligonucleotide
aacguuccccauccucuuu

SEQ ID NO: 911170 - RNA, 19 nt, Artificial Sequence
  Description of Artificial Sequence: Synthetic oligonucleotide
gagucagugucaucucucu

SEQ ID NO: 911171 - RNA, 19 nt, Artificial Sequence
  Description of Artificial Sequence: Synthetic oligonucleotide
uacuucggcucugaauguc

SEQ ID NO: 911172 - RNA, 19 nt, Artificial Sequence
  Description of Artificial Sequence: Synthetic oligonucleotide
augcacccagggaaacacc

SEQ ID NO: 911173 - RNA, 19 nt, Artificial Sequence
  Description of Artificial Sequence: Synthetic oligonucleotide
uauuggagucagugucauc

SEQ ID NO: 911174 - RNA, 19 nt, Artificial Sequence
  Description of Artificial Sequence: Synthetic oligonucleotide
ggagaccucaagaggaaac

SEQ ID NO: 911175 - RNA, 19 nt, Artificial Sequence
  Description of Artificial Sequence: Synthetic oligonucleotide
uugaggcuauuagaguauu

SEQ ID NO: 911176 - RNA, 19 nt, Artificial Sequence
  Description of Artificial Sequence: Synthetic oligonucleotide
acagagcaugcaacuaacu

SEQ ID NO: 911177 - RNA, 19 nt, Artificial Sequence
  Description of Artificial Sequence: Synthetic oligonucleotide
cuggcuuagcagaaugaua

SEQ ID NO: 911178 - RNA, 19 nt, Artificial Sequence
  Description of Artificial Sequence: Synthetic oligonucleotide
aagguacguagcagcacau

SEQ ID NO: 911179 - RNA, 19 nt, Artificial Sequence
  Description of Artificial Sequence: Synthetic oligonucleotide
cagaaaagucucccucuga

SEQ ID NO: 911180 - RNA, 19 nt, Artificial Sequence
  Description of Artificial Sequence: Synthetic oligonucleotide
ccguaauacaacugcucug

SEQ ID NO: 911181 - RNA, 19 nt, Artificial Sequence
  Description of Artificial Sequence: Synthetic oligonucleotide
accgacguauuaagauguc

SEQ ID NO: 911182 - RNA, 19 nt, Artificial Sequence
  Description of Artificial Sequence: Synthetic oligonucleotide
ccuuauguuucccaccaca

SEQ ID NO: 911183 - RNA, 19 nt, Artificial Sequence
  Description of Artificial Sequence: Synthetic oligonucleotide
uucacccagcagccuuaug

SEQ ID NO: 911184 - RNA, 19 nt, Artificial Sequence
  Description of Artificial Sequence: Synthetic oligonucleotide
guaguccgcauaccgacgu

SEQ ID NO: 911185 - RNA, 19 nt, Artificial Sequence
  Description of Artificial Sequence: Synthetic oligonucleotide
acguuccccauccucuuuu

SEQ ID NO: 911186 - RNA, 19 nt, Artificial Sequence
  Description of Artificial Sequence: Synthetic oligonucleotide
ugucuaggccuugcugacu

SEQ ID NO: 911187 - RNA, 19 nt, Artificial Sequence
  Description of Artificial Sequence: Synthetic oligonucleotide
ucccuuuuaguuggaucau

SEQ ID NO: 911188 - RNA, 19 nt, Artificial Sequence
  Description of Artificial Sequence: Synthetic oligonucleotide
cucccucugagucugacau

SEQ ID NO: 911189 - RNA, 19 nt, Artificial Sequence
  Description of Artificial Sequence: Synthetic oligonucleotide
aagaugucucgaggguuua

SEQ ID NO: 911190 - RNA, 19 nt, Artificial Sequence
  Description of Artificial Sequence: Synthetic oligonucleotide
acgcagcgagaacguuccc

SEQ ID NO: 911191 - RNA, 19 nt, Artificial Sequence
  Description of Artificial Sequence: Synthetic oligonucleotide
cgcauaccgacguauuaag

SEQ ID NO: 911192 - RNA, 19 nt, Artificial Sequence
  Description of Artificial Sequence: Synthetic oligonucleotide
caguacacgcagcgagaac

SEQ ID NO: 911193 - RNA, 19 nt, Artificial Sequence
  Description of Artificial Sequence: Synthetic oligonucleotide
guguacauucuggcuuagc

SEQ ID NO: 911194 - RNA, 19 nt, Artificial Sequence
  Description of Artificial Sequence: Synthetic oligonucleotide
gcucauguuggcccuggac

SEQ ID NO: 911195 - RNA, 19 nt, Artificial Sequence
  Description of Artificial Sequence: Synthetic oligonucleotide
aguucguaccuuacauuua

SEQ ID NO: 911196 - RNA, 19 nt, Artificial Sequence
  Description of Artificial Sequence: Synthetic oligonucleotide
cagagcaugcaacuaacuu

SEQ ID NO: 911197 - RNA, 19 nt, Artificial Sequence
  Description of Artificial Sequence: Synthetic oligonucleotide
caugaacaagggucagaaa

SEQ ID NO: 911198 - RNA, 19 nt, Artificial Sequence
  Description of Artificial Sequence: Synthetic oligonucleotide
ggccccaaugauaccaggc

SEQ ID NO: 911199 - RNA, 19 nt, Artificial Sequence
  Description of Artificial Sequence: Synthetic oligonucleotide
cagcgauggcacauucuca

SEQ ID NO: 911200 - RNA, 19 nt, Artificial Sequence
  Description of Artificial Sequence: Synthetic oligonucleotide
cucuaugaucugucccaga

SEQ ID NO: 911201 - RNA, 19 nt, Artificial Sequence
  Description of Artificial Sequence: Synthetic oligonucleotide
ccuagugcauaaauaugaa

SEQ ID NO: 911202 - RNA, 19 nt, Artificial Sequence
  Description of Artificial Sequence: Synthetic oligonucleotide
uaguccgcauaccgacgua

SEQ ID NO: 911203 - RNA, 19 nt, Artificial Sequence
  Description of Artificial Sequence: Synthetic oligonucleotide
gugucacaugaacaagggu

SEQ ID NO: 911204 - RNA, 19 nt, Artificial Sequence
  Description of Artificial Sequence: Synthetic oligonucleotide
acgagggaggcugugucuu

SEQ ID NO: 911205 - RNA, 19 nt, Artificial Sequence
  Description of Artificial Sequence: Synthetic oligonucleotide
caucaccuagugcauaaau

SEQ ID NO: 911206 - RNA, 19 nt, Artificial Sequence
  Description of Artificial Sequence: Synthetic oligonucleotide
gcaugcaacuaacuugaua

SEQ ID NO: 911207 - RNA, 19 nt, Artificial Sequence
  Description of Artificial Sequence: Synthetic oligonucleotide
uggucacuugaggcuauua

SEQ ID NO: 911208 - RNA, 19 nt, Artificial Sequence
  Description of Artificial Sequence: Synthetic oligonucleotide
gaugucucgaggguuuauu

SEQ ID NO: 911209 - RNA, 19 nt, Artificial Sequence
  Description of Artificial Sequence: Synthetic oligonucleotide
ggacuuuaggcucccacau

SEQ ID NO: 911210 - RNA, 19 nt, Artificial Sequence
  Description of Artificial Sequence: Synthetic oligonucleotide
uccuccacgcauggcccca

SEQ ID NO: 911211 - RNA, 19 nt, Artificial Sequence
  Description of Artificial Sequence: Synthetic oligonucleotide
acauguccggaugucugua

SEQ ID NO: 911212 - RNA, 19 nt, Artificial Sequence
  Description of Artificial Sequence: Synthetic oligonucleotide
cccuacuuugggacuuuag

SEQ ID NO: 911213 - RNA, 19 nt, Artificial Sequence
  Description of Artificial Sequence: Synthetic oligonucleotide
ucccucugagucugacaua

SEQ ID NO: 911214 - RNA, 19 nt, Artificial Sequence
  Description of Artificial Sequence: Synthetic oligonucleotide
caacugucgaguucuguuu

SEQ ID NO: 911215 - RNA, 19 nt, Artificial Sequence
  Description of Artificial Sequence: Synthetic oligonucleotide
cucugaaugucuaggccuu

SEQ ID NO: 911216 - RNA, 19 nt, Artificial Sequence
  Description of Artificial Sequence: Synthetic oligonucleotide
acguagcagcacauacaug

SEQ ID NO: 911217 - RNA, 19 nt, Artificial Sequence
  Description of Artificial Sequence: Synthetic oligonucleotide
cacauguccggaugucugu

SEQ ID NO: 911218 - RNA, 19 nt, Artificial Sequence
  Description of Artificial Sequence: Synthetic oligonucleotide
agaugucucgaggguuuau

SEQ ID NO: 911219 - RNA, 19 nt, Artificial Sequence
  Description of Artificial Sequence: Synthetic oligonucleotide
gaacguuccccauccucuu

SEQ ID NO: 911220 - RNA, 19 nt, Artificial Sequence
  Description of Artificial Sequence: Synthetic oligonucleotide
cccguaauacaacugcucu

SEQ ID NO: 911221 - RNA, 19 nt, Artificial Sequence
  Description of Artificial Sequence: Synthetic oligonucleotide
uacacgcagcgagaacguu

SEQ ID NO: 911222 - RNA, 19 nt, Artificial Sequence
  Description of Artificial Sequence: Synthetic oligonucleotide
agguacguagcagcacaua

SEQ ID NO: 911223 - RNA, 19 nt, Artificial Sequence
  Description of Artificial Sequence: Synthetic oligonucleotide
gcauaccgacguauuaaga

SEQ ID NO: 911224 - RNA, 19 nt, Artificial Sequence
  Description of Artificial Sequence: Synthetic oligonucleotide
gcauggcuagcaucuguaa

SEQ ID NO: 911225 - RNA, 19 nt, Artificial Sequence
  Description of Artificial Sequence: Synthetic oligonucleotide
ggcaguacacgcagcgaga

SEQ ID NO: 911226 - RNA, 19 nt, Artificial Sequence
  Description of Artificial Sequence: Synthetic oligonucleotide
caggcauggcuagcaucug

SEQ ID NO: 911227 - RNA, 19 nt, Artificial Sequence
  Description of Artificial Sequence: Synthetic oligonucleotide
uugggacuuuaggcuccca

SEQ ID NO: 911228 - RNA, 19 nt, Artificial Sequence
  Description of Artificial Sequence: Synthetic oligonucleotide
gcaguacacgcagcgagaa

SEQ ID NO: 911229 - RNA, 19 nt, Artificial Sequence
  Description of Artificial Sequence: Synthetic oligonucleotide
guacacgcagcgagaacgu

SEQ ID NO: 911230 - RNA, 19 nt, Artificial Sequence
  Description of Artificial Sequence: Synthetic oligonucleotide
acacgccucgccacagcga

SEQ ID NO: 911231 - RNA, 19 nt, Artificial Sequence
  Description of Artificial Sequence: Synthetic oligonucleotide
cacgccucgccacagcgau

SEQ ID NO: 911232 - RNA, 19 nt, Artificial Sequence
  Description of Artificial Sequence: Synthetic oligonucleotide
gccuuauguuucccaccac

SEQ ID NO: 911233 - RNA, 19 nt, Artificial Sequence
  Description of Artificial Sequence: Synthetic oligonucleotide
aacugccgccaaagagaaa

SEQ ID NO: 911234 - RNA, 19 nt, Artificial Sequence
  Description of Artificial Sequence: Synthetic oligonucleotide
gcauggccccaaugauacc

SEQ ID NO: 911235 - RNA, 19 nt, Artificial Sequence
  Description of Artificial Sequence: Synthetic oligonucleotide
gcgauggcacauucucaaa

SEQ ID NO: 911236 - RNA, 19 nt, Artificial Sequence
  Description of Artificial Sequence: Synthetic oligonucleotide
auuugccgcuguacauauu

SEQ ID NO: 911237 - RNA, 19 nt, Artificial Sequence
  Description of Artificial Sequence: Synthetic oligonucleotide
ccgcauaccgacguauuaa

SEQ ID NO: 911238 - RNA, 19 nt, Artificial Sequence
  Description of Artificial Sequence: Synthetic oligonucleotide
cagcacccacacgccucgc

SEQ ID NO: 911239 - RNA, 19 nt, Artificial Sequence
  Description of Artificial Sequence: Synthetic oligonucleotide
ggaugucuguaguccgcau

SEQ ID NO: 911240 - RNA, 19 nt, Artificial Sequence
  Description of Artificial Sequence: Synthetic oligonucleotide
ccucgccacagcgauggca

SEQ ID NO: 911241 - RNA, 19 nt, Artificial Sequence
  Description of Artificial Sequence: Synthetic oligonucleotide
ccgacguauuaagaugucu

SEQ ID NO: 911242 - RNA, 19 nt, Artificial Sequence
  Description of Artificial Sequence: Synthetic oligonucleotide
ggacccuacuuugggacuu

SEQ ID NO: 911243 - RNA, 19 nt, Artificial Sequence
  Description of Artificial Sequence: Synthetic oligonucleotide
cccuuuuaguuggaucaua

SEQ ID NO: 911244 - RNA, 19 nt, Artificial Sequence
  Description of Artificial Sequence: Synthetic oligonucleotide
gacccuacuuugggacuuu

SEQ ID NO: 911245 - RNA, 19 nt, Artificial Sequence
  Description of Artificial Sequence: Synthetic oligonucleotide
cgagaacguuccccauccu

SEQ ID NO: 911246 - RNA, 19 nt, Artificial Sequence
  Description of Artificial Sequence: Synthetic oligonucleotide
ccuccacgcauggccccaa

SEQ ID NO: 911247 - RNA, 19 nt, Artificial Sequence
  Description of Artificial Sequence: Synthetic oligonucleotide
aauaaauuaaguguccucc

SEQ ID NO: 911248 - RNA, 19 nt, Artificial Sequence
  Description of Artificial Sequence: Synthetic oligonucleotide
aauaaauagagugaguauc

SEQ ID NO: 911249 - RNA, 19 nt, Artificial Sequence
  Description of Artificial Sequence: Synthetic oligonucleotide
ucuuuggugguccacuucg

SEQ ID NO: 911250 - RNA, 19 nt, Artificial Sequence
  Description of Artificial Sequence: Synthetic oligonucleotide
auaaauagagugaguaucc

SEQ ID NO: 911251 - RNA, 19 nt, Artificial Sequence
  Description of Artificial Sequence: Synthetic oligonucleotide
caaauucccaacaaugucc

SEQ ID NO: 911252 - RNA, 19 nt, Artificial Sequence
  Description of Artificial Sequence: Synthetic oligonucleotide
ugggcuuagaccccgaggg

SEQ ID NO: 911253 - RNA, 19 nt, Artificial Sequence
  Description of Artificial Sequence: Synthetic oligonucleotide
uuguguucaaauccggagg

SEQ ID NO: 911254 - RNA, 19 nt, Artificial Sequence
  Description of Artificial Sequence: Synthetic oligonucleotide
aauuaaguguccuccccuc

SEQ ID NO: 911255 - RNA, 19 nt, Artificial Sequence
  Description of Artificial Sequence: Synthetic oligonucleotide
aaauagagugaguauccug

SEQ ID NO: 911256 - RNA, 19 nt, Artificial Sequence
  Description of Artificial Sequence: Synthetic oligonucleotide
ugguuagugagcuccaggg

SEQ ID NO: 911257 - RNA, 19 nt, Artificial Sequence
  Description of Artificial Sequence: Synthetic oligonucleotide
uaaauuaaguguccucccc

SEQ ID NO: 911258 - RNA, 19 nt, Artificial Sequence
  Description of Artificial Sequence: Synthetic oligonucleotide
aaauuaaguguccuccccu

SEQ ID NO: 911259 - RNA, 19 nt, Artificial Sequence
  Description of Artificial Sequence: Synthetic oligonucleotide
uuuaaugcuguguuuugug

SEQ ID NO: 911260 - RNA, 19 nt, Artificial Sequence
  Description of Artificial Sequence: Synthetic oligonucleotide
ugaguguccggccaaagga

SEQ ID NO: 911261 - RNA, 19 nt, Artificial Sequence
  Description of Artificial Sequence: Synthetic oligonucleotide
uggggcgcuacauucaugg

SEQ ID NO: 911262 - RNA, 19 nt, Artificial Sequence
  Description of Artificial Sequence: Synthetic oligonucleotide
uuaaugcuguguuuugugc

SEQ ID NO: 911263 - RNA, 19 nt, Artificial Sequence
  Description of Artificial Sequence: Synthetic oligonucleotide
gagggaagcggccaggccg

SEQ ID NO: 911264 - RNA, 19 nt, Artificial Sequence
  Description of Artificial Sequence: Synthetic oligonucleotide
aagucgagggaagucaagg

SEQ ID NO: 911265 - RNA, 19 nt, Artificial Sequence
  Description of Artificial Sequence: Synthetic oligonucleotide
uguagaguugcaauccgac

SEQ ID NO: 911266 - RNA, 19 nt, Artificial Sequence
  Description of Artificial Sequence: Synthetic oligonucleotide
uacgauguccaucucgcgc

SEQ ID NO: 911267 - RNA, 19 nt, Artificial Sequence
  Description of Artificial Sequence: Synthetic oligonucleotide
uccccaauaaauagaguga

SEQ ID NO: 911268 - RNA, 19 nt, Artificial Sequence
  Description of Artificial Sequence: Synthetic oligonucleotide
cagggguuaccuuuaaugc

SEQ ID NO: 911269 - RNA, 19 nt, Artificial Sequence
  Description of Artificial Sequence: Synthetic oligonucleotide
aagcggcugcguuugaagg

SEQ ID NO: 911270 - RNA, 19 nt, Artificial Sequence
  Description of Artificial Sequence: Synthetic oligonucleotide
aaauccggagggcaggcug

SEQ ID NO: 911271 - RNA, 19 nt, Artificial Sequence
  Description of Artificial Sequence: Synthetic oligonucleotide
ucacguucuacgaugucca

SEQ ID NO: 911272 - RNA, 19 nt, Artificial Sequence
  Description of Artificial Sequence: Synthetic oligonucleotide
uccgcaaacucuuccaucu

SEQ ID NO: 911273 - RNA, 19 nt, Artificial Sequence
  Description of Artificial Sequence: Synthetic oligonucleotide
agcuugagcaagcggcugc

SEQ ID NO: 911274 - RNA, 19 nt, Artificial Sequence
  Description of Artificial Sequence: Synthetic oligonucleotide
acggguggggaacaaggcc

SEQ ID NO: 911275 - RNA, 19 nt, Artificial Sequence
  Description of Artificial Sequence: Synthetic oligonucleotide
aucgcggcgauucccaggg

SEQ ID NO: 911276 - RNA, 19 nt, Artificial Sequence
  Description of Artificial Sequence: Synthetic oligonucleotide
cauugaggcucgcaaagcc

SEQ ID NO: 911277 - RNA, 19 nt, Artificial Sequence
  Description of Artificial Sequence: Synthetic oligonucleotide
uugggcuuagaccccgagg

SEQ ID NO: 911278 - RNA, 19 nt, Artificial Sequence
  Description of Artificial Sequence: Synthetic oligonucleotide
uguucaaauccggagggca

SEQ ID NO: 911279 - RNA, 19 nt, Artificial Sequence
  Description of Artificial Sequence: Synthetic oligonucleotide
aaggagcguguagaguugc

SEQ ID NO: 911280 - RNA, 19 nt, Artificial Sequence
  Description of Artificial Sequence: Synthetic oligonucleotide
ucagcgccccauccgaugg

SEQ ID NO: 911281 - RNA, 19 nt, Artificial Sequence
  Description of Artificial Sequence: Synthetic oligonucleotide
ucgaggaccaugguuagug

SEQ ID NO: 911282 - RNA, 19 nt, Artificial Sequence
  Description of Artificial Sequence: Synthetic oligonucleotide
ugaguaucccugcccaccc

SEQ ID NO: 911283 - RNA, 19 nt, Artificial Sequence
  Description of Artificial Sequence: Synthetic oligonucleotide
agggucgggaagucgaggg

SEQ ID NO: 911284 - RNA, 19 nt, Artificial Sequence
  Description of Artificial Sequence: Synthetic oligonucleotide
aggaccaugguuagugagc

SEQ ID NO: 911285 - RNA, 19 nt, Artificial Sequence
  Description of Artificial Sequence: Synthetic oligonucleotide
uggacggugaucuuguguu

SEQ ID NO: 911286 - RNA, 19 nt, Artificial Sequence
  Description of Artificial Sequence: Synthetic oligonucleotide
ugugucaucgcggcgauuc

SEQ ID NO: 911287 - RNA, 19 nt, Artificial Sequence
  Description of Artificial Sequence: Synthetic oligonucleotide
gaugguguccgccuguguc

SEQ ID NO: 911288 - RNA, 19 nt, Artificial Sequence
  Description of Artificial Sequence: Synthetic oligonucleotide
augauacuggggcuggcag

SEQ ID NO: 911289 - RNA, 19 nt, Artificial Sequence
  Description of Artificial Sequence: Synthetic oligonucleotide
aauccgacacagaggacag

SEQ ID NO: 911290 - RNA, 19 nt, Artificial Sequence
  Description of Artificial Sequence: Synthetic oligonucleotide
agggguuaccuuuaaugcu

SEQ ID NO: 911291 - RNA, 19 nt, Artificial Sequence
  Description of Artificial Sequence: Synthetic oligonucleotide
ugacccuccauguccaugu

SEQ ID NO: 911292 - RNA, 19 nt, Artificial Sequence
  Description of Artificial Sequence: Synthetic oligonucleotide
acgcgcuucggccacgucg

SEQ ID NO: 911293 - RNA, 19 nt, Artificial Sequence
  Description of Artificial Sequence: Synthetic oligonucleotide
uaaauagagugaguauccu

SEQ ID NO: 911294 - RNA, 19 nt, Artificial Sequence
  Description of Artificial Sequence: Synthetic oligonucleotide
ugcguuugcggacccuggg

SEQ ID NO: 911295 - RNA, 19 nt, Artificial Sequence
  Description of Artificial Sequence: Synthetic oligonucleotide
ugggagucaagcgaauggc

SEQ ID NO: 911296 - RNA, 19 nt, Artificial Sequence
  Description of Artificial Sequence: Synthetic oligonucleotide
uuugugccaaauucccaac

SEQ ID NO: 911297 - RNA, 19 nt, Artificial Sequence
  Description of Artificial Sequence: Synthetic oligonucleotide
gaagcggccaggccgcggg

SEQ ID NO: 911298 - RNA, 19 nt, Artificial Sequence
  Description of Artificial Sequence: Synthetic oligonucleotide
guguccccgacucacggcg

SEQ ID NO: 911299 - RNA, 19 nt, Artificial Sequence
  Description of Artificial Sequence: Synthetic oligonucleotide
cagugagagccguaggccc

SEQ ID NO: 911300 - RNA, 19 nt, Artificial Sequence
  Description of Artificial Sequence: Synthetic oligonucleotide
agcgaauggcccucagccg

SEQ ID NO: 911301 - RNA, 19 nt, Artificial Sequence
  Description of Artificial Sequence: Synthetic oligonucleotide
cccgguugggcuuagaccc

SEQ ID NO: 911302 - RNA, 19 nt, Artificial Sequence
  Description of Artificial Sequence: Synthetic oligonucleotide
agccuggggcgcuacauuc

SEQ ID NO: 911303 - RNA, 19 nt, Artificial Sequence
  Description of Artificial Sequence: Synthetic oligonucleotide
ggaggcgagaugcugagug

SEQ ID NO: 911304 - RNA, 19 nt, Artificial Sequence
  Description of Artificial Sequence: Synthetic oligonucleotide
ggggaacaaggccugaggg

SEQ ID NO: 911305 - RNA, 19 nt, Artificial Sequence
  Description of Artificial Sequence: Synthetic oligonucleotide
acggccagggaacuccagg

SEQ ID NO: 911306 - RNA, 19 nt, Artificial Sequence
  Description of Artificial Sequence: Synthetic oligonucleotide
ucucgaggaccaugguuag

SEQ ID NO: 911307 - RNA, 19 nt, Artificial Sequence
  Description of Artificial Sequence: Synthetic oligonucleotide
gugcagcucacguucuacg

SEQ ID NO: 911308 - RNA, 19 nt, Artificial Sequence
  Description of Artificial Sequence: Synthetic oligonucleotide
agcgccaggucgcagcguc

SEQ ID NO: 911309 - RNA, 19 nt, Artificial Sequence
  Description of Artificial Sequence: Synthetic oligonucleotide
gguuagugagcuccagggg

SEQ ID NO: 911310 - RNA, 19 nt, Artificial Sequence
  Description of Artificial Sequence: Synthetic oligonucleotide
uugcguuugcggacccugg

SEQ ID NO: 911311 - RNA, 19 nt, Artificial Sequence
  Description of Artificial Sequence: Synthetic oligonucleotide
ugagcgacuggcgaggguc

SEQ ID NO: 911312 - RNA, 19 nt, Artificial Sequence
  Description of Artificial Sequence: Synthetic oligonucleotide
gaguguccggccaaaggag

SEQ ID NO: 911313 - RNA, 19 nt, Artificial Sequence
  Description of Artificial Sequence: Synthetic oligonucleotide
ucccugaguaucccugccc

SEQ ID NO: 911314 - RNA, 19 nt, Artificial Sequence
  Description of Artificial Sequence: Synthetic oligonucleotide
ugagggucgggaagucgag

SEQ ID NO: 911315 - RNA, 19 nt, Artificial Sequence
  Description of Artificial Sequence: Synthetic oligonucleotide
ugccucagcgccccauccg

SEQ ID NO: 911316 - RNA, 19 nt, Artificial Sequence
  Description of Artificial Sequence: Synthetic oligonucleotide
gaaggggucgcagccggcg

SEQ ID NO: 911317 - RNA, 19 nt, Artificial Sequence
  Description of Artificial Sequence: Synthetic oligonucleotide
cagcucacguucuacgaug

SEQ ID NO: 911318 - RNA, 19 nt, Artificial Sequence
  Description of Artificial Sequence: Synthetic oligonucleotide
agcuggacggggucguggg

SEQ ID NO: 911319 - RNA, 19 nt, Artificial Sequence
  Description of Artificial Sequence: Synthetic oligonucleotide
guagaguugcaauccgaca

SEQ ID NO: 911320 - RNA, 19 nt, Artificial Sequence
  Description of Artificial Sequence: Synthetic oligonucleotide
agcuccguguccuggccgg

SEQ ID NO: 911321 - RNA, 19 nt, Artificial Sequence
  Description of Artificial Sequence: Synthetic oligonucleotide
ucugcgagcuccguguccu

SEQ ID NO: 911322 - RNA, 19 nt, Artificial Sequence
  Description of Artificial Sequence: Synthetic oligonucleotide
uccaucucgcgcucggcca

SEQ ID NO: 911323 - RNA, 19 nt, Artificial Sequence
  Description of Artificial Sequence: Synthetic oligonucleotide
ugggaggcgagaugcugag

SEQ ID NO: 911324 - RNA, 19 nt, Artificial Sequence
  Description of Artificial Sequence: Synthetic oligonucleotide
guccaugggagucaagcga

SEQ ID NO: 911325 - RNA, 19 nt, Artificial Sequence
  Description of Artificial Sequence: Synthetic oligonucleotide
ucaaauccggagggcaggc

SEQ ID NO: 911326 - RNA, 19 nt, Artificial Sequence
  Description of Artificial Sequence: Synthetic oligonucleotide
caagcgaauggcccucagc

SEQ ID NO: 911327 - RNA, 19 nt, Artificial Sequence
  Description of Artificial Sequence: Synthetic oligonucleotide
ggugacgacgccuggggag

SEQ ID NO: 911328 - RNA, 19 nt, Artificial Sequence
  Description of Artificial Sequence: Synthetic oligonucleotide
cuacgauguccaucucgcg

SEQ ID NO: 911329 - RNA, 19 nt, Artificial Sequence
  Description of Artificial Sequence: Synthetic oligonucleotide
ucaagcgaauggcccucag

SEQ ID NO: 911330 - RNA, 19 nt, Artificial Sequence
  Description of Artificial Sequence: Synthetic oligonucleotide
acguucuacgauguccauc

SEQ ID NO: 911331 - RNA, 19 nt, Artificial Sequence
  Description of Artificial Sequence: Synthetic oligonucleotide
cuguguccccgacucacgg

SEQ ID NO: 911332 - RNA, 19 nt, Artificial Sequence
  Description of Artificial Sequence: Synthetic oligonucleotide
cugucccugaguaucccug

SEQ ID NO: 911333 - RNA, 19 nt, Artificial Sequence
  Description of Artificial Sequence: Synthetic oligonucleotide
agucaagcgaauggcccuc

SEQ ID NO: 911334 - RNA, 19 nt, Artificial Sequence
  Description of Artificial Sequence: Synthetic oligonucleotide
gggguuaccuuuaaugcug

SEQ ID NO: 911335 - RNA, 19 nt, Artificial Sequence
  Description of Artificial Sequence: Synthetic oligonucleotide
cacuucggcuccacguucc

SEQ ID NO: 911336 - RNA, 19 nt, Artificial Sequence
  Description of Artificial Sequence: Synthetic oligonucleotide
gcaaggagagggcucggcg

SEQ ID NO: 911337 - RNA, 19 nt, Artificial Sequence
  Description of Artificial Sequence: Synthetic oligonucleotide
cugucggagcgcagcaagg

SEQ ID NO: 911338 - RNA, 19 nt, Artificial Sequence
  Description of Artificial Sequence: Synthetic oligonucleotide
gaagucgagggaagucaag

SEQ ID NO: 911339 - RNA, 19 nt, Artificial Sequence
  Description of Artificial Sequence: Synthetic oligonucleotide
aggcgagaugcugaguguc

SEQ ID NO: 911340 - RNA, 19 nt, Artificial Sequence
  Description of Artificial Sequence: Synthetic oligonucleotide
cucgccguccccagcacgc

SEQ ID NO: 911341 - RNA, 19 nt, Artificial Sequence
  Description of Artificial Sequence: Synthetic oligonucleotide
gaugauacuggggcuggca

SEQ ID NO: 911342 - RNA, 19 nt, Artificial Sequence
  Description of Artificial Sequence: Synthetic oligonucleotide
uguguccccgacucacggc

SEQ ID NO: 911343 - RNA, 19 nt, Artificial Sequence
  Description of Artificial Sequence: Synthetic oligonucleotide
ccaaauucccaacaauguc

SEQ ID NO: 911344 - RNA, 19 nt, Artificial Sequence
  Description of Artificial Sequence: Synthetic oligonucleotide
ugucaucgcggcgauuccc

SEQ ID NO: 911345 - RNA, 19 nt, Artificial Sequence
  Description of Artificial Sequence: Synthetic oligonucleotide
gccaaaggagaccaguuuc

SEQ ID NO: 911346 - RNA, 19 nt, Artificial Sequence
  Description of Artificial Sequence: Synthetic oligonucleotide
cucccauggcgccugcgcg

SEQ ID NO: 911347 - RNA, 19 nt, Artificial Sequence
  Description of Artificial Sequence: Synthetic oligonucleotide
gucucgaggaccaugguua

SEQ ID NO: 911348 - RNA, 19 nt, Artificial Sequence
  Description of Artificial Sequence: Synthetic oligonucleotide
gagcuccguguccuggccg

SEQ ID NO: 911349 - RNA, 19 nt, Artificial Sequence
  Description of Artificial Sequence: Synthetic oligonucleotide
ucggauccuuuccucuugu

SEQ ID NO: 911350 - RNA, 19 nt, Artificial Sequence
  Description of Artificial Sequence: Synthetic oligonucleotide
ucccaacaauguccugucc

SEQ ID NO: 911351 - RNA, 19 nt, Artificial Sequence
  Description of Artificial Sequence: Synthetic oligonucleotide
ugucggagcgcagcaagga

SEQ ID NO: 911352 - RNA, 19 nt, Artificial Sequence
  Description of Artificial Sequence: Synthetic oligonucleotide
gagcgcagcaaggagcgug

SEQ ID NO: 911353 - RNA, 19 nt, Artificial Sequence
  Description of Artificial Sequence: Synthetic oligonucleotide
aggccugagggucgggaag

SEQ ID NO: 911354 - RNA, 19 nt, Artificial Sequence
  Description of Artificial Sequence: Synthetic oligonucleotide
ggcgcuacauucauggcug

SEQ ID NO: 911355 - RNA, 19 nt, Artificial Sequence
  Description of Artificial Sequence: Synthetic oligonucleotide
caggucucagugagagccg

SEQ ID NO: 911356 - RNA, 19 nt, Artificial Sequence
  Description of Artificial Sequence: Synthetic oligonucleotide
auugaggcucgcaaagccu

SEQ ID NO: 911357 - RNA, 19 nt, Artificial Sequence
  Description of Artificial Sequence: Synthetic oligonucleotide
cuugcguuugcggacccug

SEQ ID NO: 911358 - RNA, 19 nt, Artificial Sequence
  Description of Artificial Sequence: Synthetic oligonucleotide
ggcacccaagcccacggcg

SEQ ID NO: 911359 - RNA, 19 nt, Artificial Sequence
  Description of Artificial Sequence: Synthetic oligonucleotide
aggcucgcaaagccugggg

SEQ ID NO: 911360 - RNA, 19 nt, Artificial Sequence
  Description of Artificial Sequence: Synthetic oligonucleotide
ugcgcggcggugacauggg

SEQ ID NO: 911361 - RNA, 19 nt, Artificial Sequence
  Description of Artificial Sequence: Synthetic oligonucleotide
cucgaggaccacugcuugc

SEQ ID NO: 911362 - RNA, 19 nt, Artificial Sequence
  Description of Artificial Sequence: Synthetic oligonucleotide
caucgcggcgauucccagg

SEQ ID NO: 911363 - RNA, 19 nt, Artificial Sequence
  Description of Artificial Sequence: Synthetic oligonucleotide
guccaucucgcgcucggcc

SEQ ID NO: 911364 - RNA, 19 nt, Artificial Sequence
  Description of Artificial Sequence: Synthetic oligonucleotide
aauccggagggcaggcuga

SEQ ID NO: 911365 - RNA, 19 nt, Artificial Sequence
  Description of Artificial Sequence: Synthetic oligonucleotide
cagccggcggcucccaugg

SEQ ID NO: 911366 - RNA, 19 nt, Artificial Sequence
  Description of Artificial Sequence: Synthetic oligonucleotide
caugggagucaagcgaaug

SEQ ID NO: 911367 - RNA, 19 nt, Artificial Sequence
  Description of Artificial Sequence: Synthetic oligonucleotide
acgacgccuggggagaggg

SEQ ID NO: 911368 - RNA, 19 nt, Artificial Sequence
  Description of Artificial Sequence: Synthetic oligonucleotide
uguccggccaaaggagacc

SEQ ID NO: 911369 - RNA, 19 nt, Artificial Sequence
  Description of Artificial Sequence: Synthetic oligonucleotide
gugcgcggcggugacaugg

SEQ ID NO: 911370 - RNA, 19 nt, Artificial Sequence
  Description of Artificial Sequence: Synthetic oligonucleotide
ugcgagcuccguguccugg

SEQ ID NO: 911371 - RNA, 19 nt, Artificial Sequence
  Description of Artificial Sequence: Synthetic oligonucleotide
ugccgccacaguccauggg

SEQ ID NO: 911372 - RNA, 19 nt, Artificial Sequence
  Description of Artificial Sequence: Synthetic oligonucleotide
ucaucgcggcgauucccag

SEQ ID NO: 911373 - RNA, 19 nt, Artificial Sequence
  Description of Artificial Sequence: Synthetic oligonucleotide
gaggaccacugcuugcauc

SEQ ID NO: 911374 - RNA, 19 nt, Artificial Sequence
  Description of Artificial Sequence: Synthetic oligonucleotide
gagcaagcggcugcguuug

SEQ ID NO: 911375 - RNA, 19 nt, Artificial Sequence
  Description of Artificial Sequence: Synthetic oligonucleotide
gugggcgugagcgacuggc

SEQ ID NO: 911376 - RNA, 19 nt, Artificial Sequence
  Description of Artificial Sequence: Synthetic oligonucleotide
caggccgcgggaagaagag

SEQ ID NO: 911377 - RNA, 19 nt, Artificial Sequence
  Description of Artificial Sequence: Synthetic oligonucleotide
gagggucgggaagucgagg

SEQ ID NO: 911378 - RNA, 19 nt, Artificial Sequence
  Description of Artificial Sequence: Synthetic oligonucleotide
uccgaugguguccgccugu

SEQ ID NO: 911379 - RNA, 19 nt, Artificial Sequence
  Description of Artificial Sequence: Synthetic oligonucleotide
gcugucggagcgcagcaag

SEQ ID NO: 911380 - RNA, 19 nt, Artificial Sequence
  Description of Artificial Sequence: Synthetic oligonucleotide
uccacguuccgccgccgcu

SEQ ID NO: 911381 - RNA, 19 nt, Artificial Sequence
  Description of Artificial Sequence: Synthetic oligonucleotide
ucguggggcaaaggugagg

SEQ ID NO: 911382 - RNA, 19 nt, Artificial Sequence
  Description of Artificial Sequence: Synthetic oligonucleotide
ugacacuaggguggccgag

SEQ ID NO: 911383 - RNA, 19 nt, Artificial Sequence
  Description of Artificial Sequence: Synthetic oligonucleotide
gaggcucgcaaagccuggg

SEQ ID NO: 911384 - RNA, 19 nt, Artificial Sequence
  Description of Artificial Sequence: Synthetic oligonucleotide
acucacggcgugcgcggcg

SEQ ID NO: 911385 - RNA, 19 nt, Artificial Sequence
  Description of Artificial Sequence: Synthetic oligonucleotide
gagggcgguggggagggcg

SEQ ID NO: 911386 - RNA, 19 nt, Artificial Sequence
  Description of Artificial Sequence: Synthetic oligonucleotide
caugguuagugagcuccag

SEQ ID NO: 911387 - RNA, 19 nt, Artificial Sequence
  Description of Artificial Sequence: Synthetic oligonucleotide
aggucgcagcgucugcgag

SEQ ID NO: 911388 - RNA, 19 nt, Artificial Sequence
  Description of Artificial Sequence: Synthetic oligonucleotide
ucgcugucggagcgcagca

SEQ ID NO: 911389 - RNA, 19 nt, Artificial Sequence
  Description of Artificial Sequence: Synthetic oligonucleotide
ggcucgcaaagccuggggc

SEQ ID NO: 911390 - RNA, 19 nt, Artificial Sequence
  Description of Artificial Sequence: Synthetic oligonucleotide
uuugcggacccugggcuuc

SEQ ID NO: 911391 - RNA, 19 nt, Artificial Sequence
  Description of Artificial Sequence: Synthetic oligonucleotide
gcguguagaguugcaaucc

SEQ ID NO: 911392 - RNA, 19 nt, Artificial Sequence
  Description of Artificial Sequence: Synthetic oligonucleotide
agcaaggagcguguagagu

SEQ ID NO: 911393 - RNA, 19 nt, Artificial Sequence
  Description of Artificial Sequence: Synthetic oligonucleotide
ccguaggccccacacaggg

SEQ ID NO: 911394 - RNA, 19 nt, Artificial Sequence
  Description of Artificial Sequence: Synthetic oligonucleotide
gcgaggguccuucuugaag

SEQ ID NO: 911395 - RNA, 19 nt, Artificial Sequence
  Description of Artificial Sequence: Synthetic oligonucleotide
gucccugaguaucccugcc

SEQ ID NO: 911396 - RNA, 19 nt, Artificial Sequence
  Description of Artificial Sequence: Synthetic oligonucleotide
ggcgugagcgacuggcgag

SEQ ID NO: 911397 - RNA, 19 nt, Artificial Sequence
  Description of Artificial Sequence: Synthetic oligonucleotide
guguucaaauccggagggc

SEQ ID NO: 911398 - RNA, 19 nt, Artificial Sequence
  Description of Artificial Sequence: Synthetic oligonucleotide
uccgccuguguccccgacu

SEQ ID NO: 911399 - RNA, 19 nt, Artificial Sequence
  Description of Artificial Sequence: Synthetic oligonucleotide
ggucguggggcaaagguga

SEQ ID NO: 911400 - RNA, 19 nt, Artificial Sequence
  Description of Artificial Sequence: Synthetic oligonucleotide
ugcgcgcaaggagagggcu

SEQ ID NO: 911401 - RNA, 19 nt, Artificial Sequence
  Description of Artificial Sequence: Synthetic oligonucleotide
gcagcaaggagcguguaga

SEQ ID NO: 911402 - RNA, 19 nt, Artificial Sequence
  Description of Artificial Sequence: Synthetic oligonucleotide
gagcguguagaguugcaau

SEQ ID NO: 911403 - RNA, 19 nt, Artificial Sequence
  Description of Artificial Sequence: Synthetic oligonucleotide
aguauccugcccagggccu

SEQ ID NO: 911404 - RNA, 19 nt, Artificial Sequence
  Description of Artificial Sequence: Synthetic oligonucleotide
gggaugauacuggggcugg

SEQ ID NO: 911405 - RNA, 19 nt, Artificial Sequence
  Description of Artificial Sequence: Synthetic oligonucleotide
ucgggaagucgagggaagu

SEQ ID NO: 911406 - RNA, 19 nt, Artificial Sequence
  Description of Artificial Sequence: Synthetic oligonucleotide
uccggcccgcuccuucugc

SEQ ID NO: 911407 - RNA, 19 nt, Artificial Sequence
  Description of Artificial Sequence: Synthetic oligonucleotide
gaggccguccagccagcgc

SEQ ID NO: 911408 - RNA, 19 nt, Artificial Sequence
  Description of Artificial Sequence: Synthetic oligonucleotide
gucgggaagucgagggaag

SEQ ID NO: 911409 - RNA, 19 nt, Artificial Sequence
  Description of Artificial Sequence: Synthetic oligonucleotide
gcuucggccacgucggcac

SEQ ID NO: 911410 - RNA, 19 nt, Artificial Sequence
  Description of Artificial Sequence: Synthetic oligonucleotide
ccugcgcgcaaggagaggg

SEQ ID NO: 911411 - RNA, 19 nt, Artificial Sequence
  Description of Artificial Sequence: Synthetic oligonucleotide
cagcgugggcugcacacug

SEQ ID NO: 911412 - RNA, 19 nt, Artificial Sequence
  Description of Artificial Sequence: Synthetic oligonucleotide
aggagagggcucggcgggc

SEQ ID NO: 911413 - RNA, 19 nt, Artificial Sequence
  Description of Artificial Sequence: Synthetic oligonucleotide
cguguagaguugcaauccg

SEQ ID NO: 911414 - RNA, 19 nt, Artificial Sequence
  Description of Artificial Sequence: Synthetic oligonucleotide
ggccgcgggaagaagaggc

SEQ ID NO: 911415 - RNA, 19 nt, Artificial Sequence
  Description of Artificial Sequence: Synthetic oligonucleotide
gucugcgagcuccgugucc

SEQ ID NO: 911416 - RNA, 19 nt, Artificial Sequence
  Description of Artificial Sequence: Synthetic oligonucleotide
guguccgccuguguccccg

SEQ ID NO: 911417 - RNA, 19 nt, Artificial Sequence
  Description of Artificial Sequence: Synthetic oligonucleotide
acggugaucuuguguucaa

SEQ ID NO: 911418 - RNA, 19 nt, Artificial Sequence
  Description of Artificial Sequence: Synthetic oligonucleotide
gugucaucgcggcgauucc

SEQ ID NO: 911419 - RNA, 19 nt, Artificial Sequence
  Description of Artificial Sequence: Synthetic oligonucleotide
cucacggcgugcgcggcgg

SEQ ID NO: 911420 - RNA, 19 nt, Artificial Sequence
  Description of Artificial Sequence: Synthetic oligonucleotide
uccugucccugaguauccc

SEQ ID NO: 911421 - RNA, 19 nt, Artificial Sequence
  Description of Artificial Sequence: Synthetic oligonucleotide
agcucacguucuacgaugu

SEQ ID NO: 911422 - RNA, 19 nt, Artificial Sequence
  Description of Artificial Sequence: Synthetic oligonucleotide
agccucuccucgccuccgg

SEQ ID NO: 911423 - RNA, 19 nt, Artificial Sequence
  Description of Artificial Sequence: Synthetic oligonucleotide
gcuuagaccccgagggaag

SEQ ID NO: 911424 - RNA, 19 nt, Artificial Sequence
  Description of Artificial Sequence: Synthetic oligonucleotide
gccgccacaguccauggga

SEQ ID NO: 911425 - RNA, 19 nt, Artificial Sequence
  Description of Artificial Sequence: Synthetic oligonucleotide
ggucgcagcgucugcgagc

SEQ ID NO: 911426 - RNA, 19 nt, Artificial Sequence
  Description of Artificial Sequence: Synthetic oligonucleotide
acccaagcccacggcgccc

SEQ ID NO: 911427 - RNA, 19 nt, Artificial Sequence
  Description of Artificial Sequence: Synthetic oligonucleotide
gagcgacuggcgagggucc

SEQ ID NO: 911428 - RNA, 19 nt, Artificial Sequence
  Description of Artificial Sequence: Synthetic oligonucleotide
cugcgcgcaaggagagggc

SEQ ID NO: 911429 - RNA, 19 nt, Artificial Sequence
  Description of Artificial Sequence: Synthetic oligonucleotide
gagccguaggccccacaca

SEQ ID NO: 911430 - RNA, 19 nt, Artificial Sequence
  Description of Artificial Sequence: Synthetic oligonucleotide
gugacacuaggguggccga

SEQ ID NO: 911431 - RNA, 19 nt, Artificial Sequence
  Description of Artificial Sequence: Synthetic oligonucleotide
ggugggacggccagggaac

SEQ ID NO: 911432 - RNA, 19 nt, Artificial Sequence
  Description of Artificial Sequence: Synthetic oligonucleotide
gucaucgcggcgauuccca

SEQ ID NO: 911433 - RNA, 19 nt, Artificial Sequence
  Description of Artificial Sequence: Synthetic oligonucleotide
ugggugggcgugagcgacu

SEQ ID NO: 911434 - RNA, 19 nt, Artificial Sequence
  Description of Artificial Sequence: Synthetic oligonucleotide
auucccagggcgcccgguu

SEQ ID NO: 911435 - RNA, 19 nt, Artificial Sequence
  Description of Artificial Sequence: Synthetic oligonucleotide
cucgcaaagccuggggcca

SEQ ID NO: 911436 - RNA, 19 nt, Artificial Sequence
  Description of Artificial Sequence: Synthetic oligonucleotide
augcugaguguccggccaa

SEQ ID NO: 911437 - RNA, 19 nt, Artificial Sequence
  Description of Artificial Sequence: Synthetic oligonucleotide
gacgacgccuggggagagg

SEQ ID NO: 911438 - RNA, 19 nt, Artificial Sequence
  Description of Artificial Sequence: Synthetic oligonucleotide
gaggcgagaugcugagugu

SEQ ID NO: 911439 - RNA, 19 nt, Artificial Sequence
  Description of Artificial Sequence: Synthetic oligonucleotide
gcggugacaugggugggcg

SEQ ID NO: 911440 - RNA, 19 nt, Artificial Sequence
  Description of Artificial Sequence: Synthetic oligonucleotide
guaggacgggguggaguag

SEQ ID NO: 911441 - RNA, 19 nt, Artificial Sequence
  Description of Artificial Sequence: Synthetic oligonucleotide
gguccacuucggcuccacg

SEQ ID NO: 911442 - RNA, 19 nt, Artificial Sequence
  Description of Artificial Sequence: Synthetic oligonucleotide
ugacgacgccuggggagag

SEQ ID NO: 911443 - RNA, 19 nt, Artificial Sequence
  Description of Artificial Sequence: Synthetic oligonucleotide
gcguuugcggacccugggc

SEQ ID NO: 911444 - RNA, 19 nt, Artificial Sequence
  Description of Artificial Sequence: Synthetic oligonucleotide
agaggccguccagccagcg

SEQ ID NO: 911445 - RNA, 19 nt, Artificial Sequence
  Description of Artificial Sequence: Synthetic oligonucleotide
agcgcagcaaggagcgugu

SEQ ID NO: 911446 - RNA, 19 nt, Artificial Sequence
  Description of Artificial Sequence: Synthetic oligonucleotide
gggucguggggcaaaggug

SEQ ID NO: 911447 - RNA, 19 nt, Artificial Sequence
  Description of Artificial Sequence: Synthetic oligonucleotide
gugacgacgccuggggaga

SEQ ID NO: 911448 - RNA, 19 nt, Artificial Sequence
  Description of Artificial Sequence: Synthetic oligonucleotide
cuggggcgcuacauucaug

SEQ ID NO: 911449 - RNA, 19 nt, Artificial Sequence
  Description of Artificial Sequence: Synthetic oligonucleotide
cuccacguuccgccgccgc

SEQ ID NO: 911450 - RNA, 19 nt, Artificial Sequence
  Description of Artificial Sequence: Synthetic oligonucleotide
gccccaucggauccuuucc

SEQ ID NO: 911451 - RNA, 19 nt, Artificial Sequence
  Description of Artificial Sequence: Synthetic oligonucleotide
aggccgcgggaagaagagg

SEQ ID NO: 911452 - RNA, 19 nt, Artificial Sequence
  Description of Artificial Sequence: Synthetic oligonucleotide
cgcgcuucggccacgucgg

SEQ ID NO: 911453 - RNA, 19 nt, Artificial Sequence
  Description of Artificial Sequence: Synthetic oligonucleotide
cggccagggaacuccaggg

SEQ ID NO: 911454 - RNA, 19 nt, Artificial Sequence
  Description of Artificial Sequence: Synthetic oligonucleotide
ccgggaaggggucgcagcc

SEQ ID NO: 911455 - RNA, 19 nt, Artificial Sequence
  Description of Artificial Sequence: Synthetic oligonucleotide
gggcgcuacauucauggcu

SEQ ID NO: 911456 - RNA, 19 nt, Artificial Sequence
  Description of Artificial Sequence: Synthetic oligonucleotide
ggccccaucggauccuuuc

SEQ ID NO: 911457 - RNA, 19 nt, Artificial Sequence
  Description of Artificial Sequence: Synthetic oligonucleotide
uccucgccguccccagcac

SEQ ID NO: 911458 - RNA, 19 nt, Artificial Sequence
  Description of Artificial Sequence: Synthetic oligonucleotide
guccccgacucacggcgug

SEQ ID NO: 911459 - RNA, 19 nt, Artificial Sequence
  Description of Artificial Sequence: Synthetic oligonucleotide
cucggcgggcagaggcacc

SEQ ID NO: 911460 - RNA, 19 nt, Artificial Sequence
  Description of Artificial Sequence: Synthetic oligonucleotide
ggcuuagaccccgagggaa

SEQ ID NO: 911461 - RNA, 19 nt, Artificial Sequence
  Description of Artificial Sequence: Synthetic oligonucleotide
uccccgacucacggcgugc

SEQ ID NO: 911462 - RNA, 19 nt, Artificial Sequence
  Description of Artificial Sequence: Synthetic oligonucleotide
gcugcguuugaaggugccc

SEQ ID NO: 911463 - RNA, 19 nt, Artificial Sequence
  Description of Artificial Sequence: Synthetic oligonucleotide
gacggccagggaacuccag

SEQ ID NO: 911464 - RNA, 19 nt, Artificial Sequence
  Description of Artificial Sequence: Synthetic oligonucleotide
gcggcugcguuugaaggug

SEQ ID NO: 911465 - RNA, 19 nt, Artificial Sequence
  Description of Artificial Sequence: Synthetic oligonucleotide
ccgacucacggcgugcgcg

SEQ ID NO: 911466 - RNA, 19 nt, Artificial Sequence
  Description of Artificial Sequence: Synthetic oligonucleotide
aagcggccaggccgcggga

SEQ ID NO: 911467 - RNA, 19 nt, Artificial Sequence
  Description of Artificial Sequence: Synthetic oligonucleotide
gcugggugacgacgccugg

SEQ ID NO: 911468 - RNA, 19 nt, Artificial Sequence
  Description of Artificial Sequence: Synthetic oligonucleotide
augcuguguuuugugccaa

SEQ ID NO: 911469 - RNA, 19 nt, Artificial Sequence
  Description of Artificial Sequence: Synthetic oligonucleotide
cuuccccaauaaauagagu

SEQ ID NO: 911470 - RNA, 19 nt, Artificial Sequence
  Description of Artificial Sequence: Synthetic oligonucleotide
cuggccgggaaggggucgc

SEQ ID NO: 911471 - RNA, 19 nt, Artificial Sequence
  Description of Artificial Sequence: Synthetic oligonucleotide
ggccuggacggugaucuug

SEQ ID NO: 911472 - RNA, 19 nt, Artificial Sequence
  Description of Artificial Sequence: Synthetic oligonucleotide
gucgcagcgucugcgagcu

SEQ ID NO: 911473 - RNA, 19 nt, Artificial Sequence
  Description of Artificial Sequence: Synthetic oligonucleotide
caggucgcagcgucugcga

SEQ ID NO: 911474 - RNA, 19 nt, Artificial Sequence
  Description of Artificial Sequence: Synthetic oligonucleotide
ggggucguggggcaaaggu

SEQ ID NO: 911475 - RNA, 19 nt, Artificial Sequence
  Description of Artificial Sequence: Synthetic oligonucleotide
gacucacggcgugcgcggc

SEQ ID NO: 911476 - RNA, 19 nt, Artificial Sequence
  Description of Artificial Sequence: Synthetic oligonucleotide
cgcggcgauucccagggcg

SEQ ID NO: 911477 - RNA, 19 nt, Artificial Sequence
  Description of Artificial Sequence: Synthetic oligonucleotide
ggucgggaagucgagggaa

SEQ ID NO: 911478 - RNA, 19 nt, Artificial Sequence
  Description of Artificial Sequence: Synthetic oligonucleotide
cagcacgcgcuucggccac

SEQ ID NO: 911479 - RNA, 19 nt, Artificial Sequence
  Description of Artificial Sequence: Synthetic oligonucleotide
ccauccgaugguguccgcc

SEQ ID NO: 911480 - RNA, 19 nt, Artificial Sequence
  Description of Artificial Sequence: Synthetic oligonucleotide
ugguccacuucggcuccac

SEQ ID NO: 911481 - RNA, 19 nt, Artificial Sequence
  Description of Artificial Sequence: Synthetic oligonucleotide
ggggcgcuacauucauggc

SEQ ID NO: 911482 - RNA, 19 nt, Artificial Sequence
  Description of Artificial Sequence: Synthetic oligonucleotide
guggcggagccuggggcgc

SEQ ID NO: 911483 - RNA, 19 nt, Artificial Sequence
  Description of Artificial Sequence: Synthetic oligonucleotide
ccgcgggaagaagaggccg

SEQ ID NO: 911484 - RNA, 19 nt, Artificial Sequence
  Description of Artificial Sequence: Synthetic oligonucleotide
aggagcguguagaguugca

SEQ ID NO: 911485 - RNA, 19 nt, Artificial Sequence
  Description of Artificial Sequence: Synthetic oligonucleotide
cgcagcgucugcgagcucc

SEQ ID NO: 911486 - RNA, 19 nt, Artificial Sequence
  Description of Artificial Sequence: Synthetic oligonucleotide
ggcggugacaugggugggc

SEQ ID NO: 911487 - RNA, 19 nt, Artificial Sequence
  Description of Artificial Sequence: Synthetic oligonucleotide
acggggucguggggcaaag

SEQ ID NO: 911488 - RNA, 19 nt, Artificial Sequence
  Description of Artificial Sequence: Synthetic oligonucleotide
ucgcggcgauucccagggc

SEQ ID NO: 911489 - RNA, 19 nt, Artificial Sequence
  Description of Artificial Sequence: Synthetic oligonucleotide
cgcgcaaggagagggcucg

SEQ ID NO: 911490 - RNA, 19 nt, Artificial Sequence
  Description of Artificial Sequence: Synthetic oligonucleotide
ccaucucgcgcucggccag

SEQ ID NO: 911491 - RNA, 19 nt, Artificial Sequence
  Description of Artificial Sequence: Synthetic oligonucleotide
caucucgcgcucggccagc

SEQ ID NO: 911492 - RNA, 19 nt, Artificial Sequence
  Description of Artificial Sequence: Synthetic oligonucleotide
ccccauccgaugguguccg

SEQ ID NO: 911493 - RNA, 19 nt, Artificial Sequence
  Description of Artificial Sequence: Synthetic oligonucleotide
gccucagcgccccauccga

SEQ ID NO: 911494 - RNA, 19 nt, Artificial Sequence
  Description of Artificial Sequence: Synthetic oligonucleotide
gucaagcgaauggcccuca

SEQ ID NO: 911495 - RNA, 19 nt, Artificial Sequence
  Description of Artificial Sequence: Synthetic oligonucleotide
gaguaucccugcccacccu

SEQ ID NO: 911496 - RNA, 19 nt, Artificial Sequence
  Description of Artificial Sequence: Synthetic oligonucleotide
gugagagccguaggcccca

SEQ ID NO: 911497 - RNA, 19 nt, Artificial Sequence
  Description of Artificial Sequence: Synthetic oligonucleotide
agcacgcgcuucggccacg

SEQ ID NO: 911498 - RNA, 19 nt, Artificial Sequence
  Description of Artificial Sequence: Synthetic oligonucleotide
gcggcgauucccagggcgc

SEQ ID NO: 911499 - RNA, 19 nt, Artificial Sequence
  Description of Artificial Sequence: Synthetic oligonucleotide
gcagccggcggcucccaug

SEQ ID NO: 911500 - RNA, 19 nt, Artificial Sequence
  Description of Artificial Sequence: Synthetic oligonucleotide
gaggcaccuugagguagga

SEQ ID NO: 911501 - RNA, 19 nt, Artificial Sequence
  Description of Artificial Sequence: Synthetic oligonucleotide
cgacucacggcgugcgcgg

SEQ ID NO: 911502 - RNA, 19 nt, Artificial Sequence
  Description of Artificial Sequence: Synthetic oligonucleotide
ggcugcguuugaaggugcc

SEQ ID NO: 911503 - RNA, 19 nt, Artificial Sequence
  Description of Artificial Sequence: Synthetic oligonucleotide
gggucgggaagucgaggga

SEQ ID NO: 911504 - RNA, 19 nt, Artificial Sequence
  Description of Artificial Sequence: Synthetic oligonucleotide
agggcgcccgguugggcuu

SEQ ID NO: 911505 - RNA, 19 nt, Artificial Sequence
  Description of Artificial Sequence: Synthetic oligonucleotide
ggccacgucggcacccaag

SEQ ID NO: 911506 - RNA, 19 nt, Artificial Sequence
  Description of Artificial Sequence: Synthetic oligonucleotide
gggcuuagaccccgaggga

SEQ ID NO: 911507 - RNA, 19 nt, Artificial Sequence
  Description of Artificial Sequence: Synthetic oligonucleotide
auccgacacagaggacagu

SEQ ID NO: 911508 - RNA, 19 nt, Artificial Sequence
  Description of Artificial Sequence: Synthetic oligonucleotide
gcgucugcgagcuccgugu

SEQ ID NO: 911509 - RNA, 19 nt, Artificial Sequence
  Description of Artificial Sequence: Synthetic oligonucleotide
ggucucgaggaccaugguu

SEQ ID NO: 911510 - RNA, 19 nt, Artificial Sequence
  Description of Artificial Sequence: Synthetic oligonucleotide
ccgcagcuugagcaagcgg

SEQ ID NO: 911511 - RNA, 19 nt, Artificial Sequence
  Description of Artificial Sequence: Synthetic oligonucleotide
ucgcaaagccuggggccau

SEQ ID NO: 911512 - RNA, 19 nt, Artificial Sequence
  Description of Artificial Sequence: Synthetic oligonucleotide
ccacuucggcuccacguuc

SEQ ID NO: 911513 - RNA, 19 nt, Artificial Sequence
  Description of Artificial Sequence: Synthetic oligonucleotide
cagugacacuaggguggcc

SEQ ID NO: 911514 - RNA, 19 nt, Artificial Sequence
  Description of Artificial Sequence: Synthetic oligonucleotide
cugcgagcuccguguccug

SEQ ID NO: 911515 - RNA, 19 nt, Artificial Sequence
  Description of Artificial Sequence: Synthetic oligonucleotide
cguaggccccacacagggg

SEQ ID NO: 911516 - RNA, 19 nt, Artificial Sequence
  Description of Artificial Sequence: Synthetic oligonucleotide
cccgcagcuugagcaagcg

SEQ ID NO: 911517 - RNA, 19 nt, Artificial Sequence
  Description of Artificial Sequence: Synthetic oligonucleotide
gcccuugcguuugcggacc

SEQ ID NO: 911518 - RNA, 19 nt, Artificial Sequence
  Description of Artificial Sequence: Synthetic oligonucleotide
ggugggcgugagcgacugg

SEQ ID NO: 911519 - RNA, 19 nt, Artificial Sequence
  Description of Artificial Sequence: Synthetic oligonucleotide
guuugcggacccugggcuu

SEQ ID NO: 911520 - RNA, 19 nt, Artificial Sequence
  Description of Artificial Sequence: Synthetic oligonucleotide
ccucgccguccccagcacg

SEQ ID NO: 911521 - RNA, 19 nt, Artificial Sequence
  Description of Artificial Sequence: Synthetic oligonucleotide
ccaugguuagugagcucca

SEQ ID NO: 911522 - RNA, 19 nt, Artificial Sequence
  Description of Artificial Sequence: Synthetic oligonucleotide
gccgcgggaagaagaggcc

SEQ ID NO: 911523 - RNA, 19 nt, Artificial Sequence
  Description of Artificial Sequence: Synthetic oligonucleotide
gggugacgacgccugggga

SEQ ID NO: 911524 - RNA, 19 nt, Artificial Sequence
  Description of Artificial Sequence: Synthetic oligonucleotide
aucucgcgcucggccagcu

SEQ ID NO: 911525 - RNA, 19 nt, Artificial Sequence
  Description of Artificial Sequence: Synthetic oligonucleotide
gcucacguucuacgauguc

SEQ ID NO: 911526 - RNA, 19 nt, Artificial Sequence
  Description of Artificial Sequence: Synthetic oligonucleotide
gccaggucgcagcgucugc

SEQ ID NO: 911527 - RNA, 19 nt, Artificial Sequence
  Description of Artificial Sequence: Synthetic oligonucleotide
gcgccugcgcgcaaggaga

SEQ ID NO: 911528 - RNA, 19 nt, Artificial Sequence
  Description of Artificial Sequence: Synthetic oligonucleotide
ggggccggcgacggguggg

SEQ ID NO: 911529 - RNA, 19 nt, Artificial Sequence
  Description of Artificial Sequence: Synthetic oligonucleotide
gccgagcugcuccuccuga

SEQ ID NO: 911530 - RNA, 19 nt, Artificial Sequence
  Description of Artificial Sequence: Synthetic oligonucleotide
gcggacccugggcuucucc

SEQ ID NO: 911531 - RNA, 19 nt, Artificial Sequence
  Description of Artificial Sequence: Synthetic oligonucleotide
gcgacggguggggaacaag

SEQ ID NO: 911532 - RNA, 19 nt, Artificial Sequence
  Description of Artificial Sequence: Synthetic oligonucleotide
gguguccgccugugucccc

SEQ ID NO: 911533 - RNA, 19 nt, Artificial Sequence
  Description of Artificial Sequence: Synthetic oligonucleotide
auccggagggcaggcugau

SEQ ID NO: 911534 - RNA, 19 nt, Artificial Sequence
  Description of Artificial Sequence: Synthetic oligonucleotide
ccaucggauccuuuccucu

SEQ ID NO: 911535 - RNA, 19 nt, Artificial Sequence
  Description of Artificial Sequence: Synthetic oligonucleotide
uggccccaucggauccuuu

SEQ ID NO: 911536 - RNA, 19 nt, Artificial Sequence
  Description of Artificial Sequence: Synthetic oligonucleotide
cgagcuccguguccuggcc

SEQ ID NO: 911537 - RNA, 19 nt, Artificial Sequence
  Description of Artificial Sequence: Synthetic oligonucleotide
ccuggacggugaucuugug

SEQ ID NO: 911538 - RNA, 19 nt, Artificial Sequence
  Description of Artificial Sequence: Synthetic oligonucleotide
ccgcaaacucuuccaucuc

SEQ ID NO: 911539 - RNA, 19 nt, Artificial Sequence
  Description of Artificial Sequence: Synthetic oligonucleotide
gauucccagggcgcccggu

SEQ ID NO: 911540 - RNA, 19 nt, Artificial Sequence
  Description of Artificial Sequence: Synthetic oligonucleotide
ccuggccgggaaggggucg

SEQ ID NO: 911541 - RNA, 19 nt, Artificial Sequence
  Description of Artificial Sequence: Synthetic oligonucleotide
cgcccgguugggcuuagac

SEQ ID NO: 911542 - RNA, 19 nt, Artificial Sequence
  Description of Artificial Sequence: Synthetic oligonucleotide
ccccgacucacggcgugcg

SEQ ID NO: 911543 - RNA, 19 nt, Artificial Sequence
  Description of Artificial Sequence: Synthetic oligonucleotide
gggcgcagccucgucgcug

SEQ ID NO: 911544 - RNA, 19 nt, Artificial Sequence
  Description of Artificial Sequence: Synthetic oligonucleotide
gcucggcgggcagaggcac

SEQ ID NO: 911545 - RNA, 19 nt, Artificial Sequence
  Description of Artificial Sequence: Synthetic oligonucleotide
ccguguccuggccgggaag

SEQ ID NO: 911546 - RNA, 19 nt, Artificial Sequence
  Description of Artificial Sequence: Synthetic oligonucleotide
gcgggaagaagaggccguc

SEQ ID NO: 911547 - RNA, 19 nt, Artificial Sequence
  Description of Artificial Sequence: Synthetic oligonucleotide
gugagcgacuggcgagggu

SEQ ID NO: 911548 - RNA, 19 nt, Artificial Sequence
  Description of Artificial Sequence: Synthetic oligonucleotide
ccggcgacggguggggaac

SEQ ID NO: 911549 - RNA, 19 nt, Artificial Sequence
  Description of Artificial Sequence: Synthetic oligonucleotide
gcaagcggcugcguuugaa

SEQ ID NO: 911550 - RNA, 19 nt, Artificial Sequence
  Description of Artificial Sequence: Synthetic oligonucleotide
gcuccguguccuggccggg

SEQ ID NO: 911551 - RNA, 19 nt, Artificial Sequence
  Description of Artificial Sequence: Synthetic oligonucleotide
cacguucuacgauguccau

SEQ ID NO: 911552 - RNA, 19 nt, Artificial Sequence
  Description of Artificial Sequence: Synthetic oligonucleotide
caaauccggagggcaggcu

SEQ ID NO: 911553 - RNA, 19 nt, Artificial Sequence
  Description of Artificial Sequence: Synthetic oligonucleotide
cgugagcgacuggcgaggg

SEQ ID NO: 911554 - RNA, 19 nt, Artificial Sequence
  Description of Artificial Sequence: Synthetic oligonucleotide
cgccugcgcgcaaggagag

SEQ ID NO: 911555 - RNA, 19 nt, Artificial Sequence
  Description of Artificial Sequence: Synthetic oligonucleotide
gccuggggcgcuacauuca

SEQ ID NO: 911556 - RNA, 19 nt, Artificial Sequence
  Description of Artificial Sequence: Synthetic oligonucleotide
cccgacucacggcgugcgc

SEQ ID NO: 911557 - RNA, 19 nt, Artificial Sequence
  Description of Artificial Sequence: Synthetic oligonucleotide
cggcugcguuugaaggugc

SEQ ID NO: 911558 - RNA, 19 nt, Artificial Sequence
  Description of Artificial Sequence: Synthetic oligonucleotide
cgaggaccaugguuaguga

SEQ ID NO: 911559 - RNA, 19 nt, Artificial Sequence
  Description of Artificial Sequence: Synthetic oligonucleotide
cgggaagucgagggaaguc

SEQ ID NO: 911560 - RNA, 19 nt, Artificial Sequence
  Description of Artificial Sequence: Synthetic oligonucleotide
ggggcacgcuguugccuuc

SEQ ID NO: 911561 - RNA, 19 nt, Artificial Sequence
  Description of Artificial Sequence: Synthetic oligonucleotide
gccuggacggugaucuugu

SEQ ID NO: 911562 - RNA, 19 nt, Artificial Sequence
  Description of Artificial Sequence: Synthetic oligonucleotide
cacgcgcuucggccacguc

SEQ ID NO: 911563 - RNA, 19 nt, Artificial Sequence
  Description of Artificial Sequence: Synthetic oligonucleotide
cguuugcggacccugggcu

SEQ ID NO: 911564 - RNA, 19 nt, Artificial Sequence
  Description of Artificial Sequence: Synthetic oligonucleotide
gccaggccgcgggaagaag

SEQ ID NO: 911565 - RNA, 19 nt, Artificial Sequence
  Description of Artificial Sequence: Synthetic oligonucleotide
gcgcaaggagagggcucgg

SEQ ID NO: 911566 - RNA, 19 nt, Artificial Sequence
  Description of Artificial Sequence: Synthetic oligonucleotide
ggcagggguuaccuuuaau

SEQ ID NO: 911567 - RNA, 19 nt, Artificial Sequence
  Description of Artificial Sequence: Synthetic oligonucleotide
gcgguggggagggcgcagc

SEQ ID NO: 911568 - RNA, 19 nt, Artificial Sequence
  Description of Artificial Sequence: Synthetic oligonucleotide
cggauccuuuccucuuguc

SEQ ID NO: 911569 - RNA, 19 nt, Artificial Sequence
  Description of Artificial Sequence: Synthetic oligonucleotide
gguugggcuuagaccccga

SEQ ID NO: 911570 - RNA, 19 nt, Artificial Sequence
  Description of Artificial Sequence: Synthetic oligonucleotide
cucgaggaccaugguuagu

SEQ ID NO: 911571 - RNA, 19 nt, Artificial Sequence
  Description of Artificial Sequence: Synthetic oligonucleotide
gcugugucaucgcggcgau

SEQ ID NO: 911572 - RNA, 19 nt, Artificial Sequence
  Description of Artificial Sequence: Synthetic oligonucleotide
cugcucccgucgccgagcu

SEQ ID NO: 911573 - RNA, 19 nt, Artificial Sequence
  Description of Artificial Sequence: Synthetic oligonucleotide
gcgcgcaaggagagggcuc

SEQ ID NO: 911574 - RNA, 19 nt, Artificial Sequence
  Description of Artificial Sequence: Synthetic oligonucleotide
gcgcagcgggcgcagccuc

SEQ ID NO: 911575 - RNA, 19 nt, Artificial Sequence
  Description of Artificial Sequence: Synthetic oligonucleotide
ggucucagugagagccgua

SEQ ID NO: 911576 - RNA, 19 nt, Artificial Sequence
  Description of Artificial Sequence: Synthetic oligonucleotide
cgucugcgagcuccguguc

SEQ ID NO: 911577 - RNA, 19 nt, Artificial Sequence
  Description of Artificial Sequence: Synthetic oligonucleotide
gggucucgaggaccauggu

SEQ ID NO: 911578 - RNA, 19 nt, Artificial Sequence
  Description of Artificial Sequence: Synthetic oligonucleotide
gcgcuucggccacgucggc

SEQ ID NO: 911579 - RNA, 19 nt, Artificial Sequence
  Description of Artificial Sequence: Synthetic oligonucleotide
ccccaucggauccuuuccu

SEQ ID NO: 911580 - RNA, 19 nt, Artificial Sequence
  Description of Artificial Sequence: Synthetic oligonucleotide
cgccguccccagcacgcgc

SEQ ID NO: 911581 - RNA, 19 nt, Artificial Sequence
  Description of Artificial Sequence: Synthetic oligonucleotide
ccuggggcgcuacauucau

SEQ ID NO: 911582 - RNA, 19 nt, Artificial Sequence
  Description of Artificial Sequence: Synthetic oligonucleotide
ggggcgcucgaggaccacu

SEQ ID NO: 911583 - RNA, 19 nt, Artificial Sequence
  Description of Artificial Sequence: Synthetic oligonucleotide
ccaugggagucaagcgaau

SEQ ID NO: 911584 - RNA, 19 nt, Artificial Sequence
  Description of Artificial Sequence: Synthetic oligonucleotide
ggcgacggguggggaacaa

SEQ ID NO: 911585 - RNA, 19 nt, Artificial Sequence
  Description of Artificial Sequence: Synthetic oligonucleotide
gccguccccagcacgcgcu

SEQ ID NO: 911586 - RNA, 19 nt, Artificial Sequence
  Description of Artificial Sequence: Synthetic oligonucleotide
cggggucguggggcaaagg

SEQ ID NO: 911587 - RNA, 19 nt, Artificial Sequence
  Description of Artificial Sequence: Synthetic oligonucleotide
ccgagggcgccaggcccag

SEQ ID NO: 911588 - RNA, 19 nt, Artificial Sequence
  Description of Artificial Sequence: Synthetic oligonucleotide
cggcggugacauggguggg

SEQ ID NO: 911589 - RNA, 19 nt, Artificial Sequence
  Description of Artificial Sequence: Synthetic oligonucleotide
cgucggcacccaagcccac

SEQ ID NO: 911590 - RNA, 19 nt, Artificial Sequence
  Description of Artificial Sequence: Synthetic oligonucleotide
gcggagccuggggcgcuac

SEQ ID NO: 911591 - RNA, 19 nt, Artificial Sequence
  Description of Artificial Sequence: Synthetic oligonucleotide
ggccccacguccugcccuu

SEQ ID NO: 911592 - RNA, 19 nt, Artificial Sequence
  Description of Artificial Sequence: Synthetic oligonucleotide
gggaggcgagaugcugagu

SEQ ID NO: 911593 - RNA, 19 nt, Artificial Sequence
  Description of Artificial Sequence: Synthetic oligonucleotide
gggucgcagccggcggcuc

SEQ ID NO: 911594 - RNA, 19 nt, Artificial Sequence
  Description of Artificial Sequence: Synthetic oligonucleotide
cgcuucggccacgucggca

SEQ ID NO: 911595 - RNA, 19 nt, Artificial Sequence
  Description of Artificial Sequence: Synthetic oligonucleotide
ccucagcgccccauccgau

SEQ ID NO: 911596 - RNA, 19 nt, Artificial Sequence
  Description of Artificial Sequence: Synthetic oligonucleotide
gcgccccauccgauggugu

SEQ ID NO: 911597 - RNA, 19 nt, Artificial Sequence
  Description of Artificial Sequence: Synthetic oligonucleotide
gcgcagcaaggagcgugua

SEQ ID NO: 911598 - RNA, 19 nt, Artificial Sequence
  Description of Artificial Sequence: Synthetic oligonucleotide
gcacgcgcuucggccacgu

SEQ ID NO: 911599 - RNA, 19 nt, Artificial Sequence
  Description of Artificial Sequence: Synthetic oligonucleotide
cugugucaucgcggcgauu

SEQ ID NO: 911600 - RNA, 19 nt, Artificial Sequence
  Description of Artificial Sequence: Synthetic oligonucleotide
cgccuguguccccgacuca

SEQ ID NO: 911601 - RNA, 19 nt, Artificial Sequence
  Description of Artificial Sequence: Synthetic oligonucleotide
ccuugcguuugcggacccu

SEQ ID NO: 911602 - RNA, 19 nt, Artificial Sequence
  Description of Artificial Sequence: Synthetic oligonucleotide
gggcgcccgguugggcuua

SEQ ID NO: 911603 - RNA, 19 nt, Artificial Sequence
  Description of Artificial Sequence: Synthetic oligonucleotide
cgaggaccacugcuugcau

SEQ ID NO: 911604 - RNA, 19 nt, Artificial Sequence
  Description of Artificial Sequence: Synthetic oligonucleotide
gcgccaggucgcagcgucu

SEQ ID NO: 911605 - RNA, 19 nt, Artificial Sequence
  Description of Artificial Sequence: Synthetic oligonucleotide
cggcgacggguggggaaca

SEQ ID NO: 911606 - RNA, 19 nt, Artificial Sequence
  Description of Artificial Sequence: Synthetic oligonucleotide
gcgcccgguugggcuuaga

SEQ ID NO: 911607 - RNA, 19 nt, Artificial Sequence
  Description of Artificial Sequence: Synthetic oligonucleotide
cggccacgucggcacccaa

SEQ ID NO: 911608 - RNA, 19 nt, Artificial Sequence
  Description of Artificial Sequence: Synthetic oligonucleotide
aaguuaaacaaauaacugc

SEQ ID NO: 911609 - RNA, 19 nt, Artificial Sequence
  Description of Artificial Sequence: Synthetic oligonucleotide
aaugaugccaucuauuuuc

SEQ ID NO: 911610 - RNA, 19 nt, Artificial Sequence
  Description of Artificial Sequence: Synthetic oligonucleotide
ugaaaauccccuauaaugg

SEQ ID NO: 911611 - RNA, 19 nt, Artificial Sequence
  Description of Artificial Sequence: Synthetic oligonucleotide
ugagauuugauuacgacag

SEQ ID NO: 911612 - RNA, 19 nt, Artificial Sequence
  Description of Artificial Sequence: Synthetic oligonucleotide
aauucagaaacgcucgggc

SEQ ID NO: 911613 - RNA, 19 nt, Artificial Sequence
  Description of Artificial Sequence: Synthetic oligonucleotide
auguuuaugucauucaagc

SEQ ID NO: 911614 - RNA, 19 nt, Artificial Sequence
  Description of Artificial Sequence: Synthetic oligonucleotide
uuaaguaaguacuuuaacc

SEQ ID NO: 911615 - RNA, 19 nt, Artificial Sequence
  Description of Artificial Sequence: Synthetic oligonucleotide
uauaagaaauguuacauac

SEQ ID NO: 911616 - RNA, 19 nt, Artificial Sequence
  Description of Artificial Sequence: Synthetic oligonucleotide
uugaaaauccccuauaaug

SEQ ID NO: 911617 - RNA, 19 nt, Artificial Sequence
  Description of Artificial Sequence: Synthetic oligonucleotide
uuaagaauugguuuggagc

SEQ ID NO: 911618 - RNA, 19 nt, Artificial Sequence
  Description of Artificial Sequence: Synthetic oligonucleotide
acaaggauuaauuagcaag

SEQ ID NO: 911619 - RNA, 19 nt, Artificial Sequence
  Description of Artificial Sequence: Synthetic oligonucleotide
uaaguaaguacuuuaacca

SEQ ID NO: 911620 - RNA, 19 nt, Artificial Sequence
  Description of Artificial Sequence: Synthetic oligonucleotide
ugauuuauaagaaauguua

SEQ ID NO: 911621 - RNA, 19 nt, Artificial Sequence
  Description of Artificial Sequence: Synthetic oligonucleotide
agagauuuccucuuccucc

SEQ ID NO: 911622 - RNA, 19 nt, Artificial Sequence
  Description of Artificial Sequence: Synthetic oligonucleotide
agcaucaaaauuuaauguc

SEQ ID NO: 911623 - RNA, 19 nt, Artificial Sequence
  Description of Artificial Sequence: Synthetic oligonucleotide
uuuacuguguuucuguggc

SEQ ID NO: 911624 - RNA, 19 nt, Artificial Sequence
  Description of Artificial Sequence: Synthetic oligonucleotide
aguuaaagugcacaccagc

SEQ ID NO: 911625 - RNA, 19 nt, Artificial Sequence
  Description of Artificial Sequence: Synthetic oligonucleotide
auuaaguaaguacuuuaac

SEQ ID NO: 911626 - RNA, 19 nt, Artificial Sequence
  Description of Artificial Sequence: Synthetic oligonucleotide
aacugagugauguuuaugu

SEQ ID NO: 911627 - RNA, 19 nt, Artificial Sequence
  Description of Artificial Sequence: Synthetic oligonucleotide
aaauaguuccuccagaaua

SEQ ID NO: 911628 - RNA, 19 nt, Artificial Sequence
  Description of Artificial Sequence: Synthetic oligonucleotide
uuaauuagcaaguucuaga

SEQ ID NO: 911629 - RNA, 19 nt, Artificial Sequence
  Description of Artificial Sequence: Synthetic oligonucleotide
auucugauaguaauuaggc

SEQ ID NO: 911630 - RNA, 19 nt, Artificial Sequence
  Description of Artificial Sequence: Synthetic oligonucleotide
uaagaauugguuuggagcu

SEQ ID NO: 911631 - RNA, 19 nt, Artificial Sequence
  Description of Artificial Sequence: Synthetic oligonucleotide
augcgguagaaauaguucc

SEQ ID NO: 911632 - RNA, 19 nt, Artificial Sequence
  Description of Artificial Sequence: Synthetic oligonucleotide
aagaaauuauguugccaac

SEQ ID NO: 911633 - RNA, 19 nt, Artificial Sequence
  Description of Artificial Sequence: Synthetic oligonucleotide
uuuauaagaaauguuacau

SEQ ID NO: 911634 - RNA, 19 nt, Artificial Sequence
  Description of Artificial Sequence: Synthetic oligonucleotide
aagcaucaaaauuuaaugu

SEQ ID NO: 911635 - RNA, 19 nt, Artificial Sequence
  Description of Artificial Sequence: Synthetic oligonucleotide
augaucacauucuaugaac

SEQ ID NO: 911636 - RNA, 19 nt, Artificial Sequence
  Description of Artificial Sequence: Synthetic oligonucleotide
agcugauagagccaaaauc

SEQ ID NO: 911637 - RNA, 19 nt, Artificial Sequence
  Description of Artificial Sequence: Synthetic oligonucleotide
aauuauguugccaaccuug

SEQ ID NO: 911638 - RNA, 19 nt, Artificial Sequence
  Description of Artificial Sequence: Synthetic oligonucleotide
uucgauuauuccaauagcu

SEQ ID NO: 911639 - RNA, 19 nt, Artificial Sequence
  Description of Artificial Sequence: Synthetic oligonucleotide
uuaauuagggagaugcggu

SEQ ID NO: 911640 - RNA, 19 nt, Artificial Sequence
  Description of Artificial Sequence: Synthetic oligonucleotide
uuugagcaugaccagggcg

SEQ ID NO: 911641 - RNA, 19 nt, Artificial Sequence
  Description of Artificial Sequence: Synthetic oligonucleotide
auguuuaggaacgagggcg

SEQ ID NO: 911642 - RNA, 19 nt, Artificial Sequence
  Description of Artificial Sequence: Synthetic oligonucleotide
auuuauaagaaauguuaca

SEQ ID NO: 911643 - RNA, 19 nt, Artificial Sequence
  Description of Artificial Sequence: Synthetic oligonucleotide
uugagauuugauuacgaca

SEQ ID NO: 911644 - RNA, 19 nt, Artificial Sequence
  Description of Artificial Sequence: Synthetic oligonucleotide
guuuaugucauucaagcga

SEQ ID NO: 911645 - RNA, 19 nt, Artificial Sequence
  Description of Artificial Sequence: Synthetic oligonucleotide
uuuaugucauucaagcgaa

SEQ ID NO: 911646 - RNA, 19 nt, Artificial Sequence
  Description of Artificial Sequence: Synthetic oligonucleotide
aucacugacaaauucagaa

SEQ ID NO: 911647 - RNA, 19 nt, Artificial Sequence
  Description of Artificial Sequence: Synthetic oligonucleotide
cuuaauuagggagaugcgg

SEQ ID NO: 911648 - RNA, 19 nt, Artificial Sequence
  Description of Artificial Sequence: Synthetic oligonucleotide
aaucccggaacaucccgcc

SEQ ID NO: 911649 - RNA, 19 nt, Artificial Sequence
  Description of Artificial Sequence: Synthetic oligonucleotide
uuucaaacagaacuuuaga

SEQ ID NO: 911650 - RNA, 19 nt, Artificial Sequence
  Description of Artificial Sequence: Synthetic oligonucleotide
gauuuauaagaaauguuac

SEQ ID NO: 911651 - RNA, 19 nt, Artificial Sequence
  Description of Artificial Sequence: Synthetic oligonucleotide
ucgauuauuccaauagcug

SEQ ID NO: 911652 - RNA, 19 nt, Artificial Sequence
  Description of Artificial Sequence: Synthetic oligonucleotide
uuucgauuauuccaauagc

SEQ ID NO: 911653 - RNA, 19 nt, Artificial Sequence
  Description of Artificial Sequence: Synthetic oligonucleotide
uacuacuucauacuccuga

SEQ ID NO: 911654 - RNA, 19 nt, Artificial Sequence
  Description of Artificial Sequence: Synthetic oligonucleotide
aguaauuaggccauuaagu

SEQ ID NO: 911655 - RNA, 19 nt, Artificial Sequence
  Description of Artificial Sequence: Synthetic oligonucleotide
aaccaacugcucccaaucc

SEQ ID NO: 911656 - RNA, 19 nt, Artificial Sequence
  Description of Artificial Sequence: Synthetic oligonucleotide
aggauuaauuagcaaguuc

SEQ ID NO: 911657 - RNA, 19 nt, Artificial Sequence
  Description of Artificial Sequence: Synthetic oligonucleotide
uuaaagugcacaccagcug

SEQ ID NO: 911658 - RNA, 19 nt, Artificial Sequence
  Description of Artificial Sequence: Synthetic oligonucleotide
aaaggcgcugugaaaauac

SEQ ID NO: 911659 - RNA, 19 nt, Artificial Sequence
  Description of Artificial Sequence: Synthetic oligonucleotide
agaggcaaguuuuagcuug

SEQ ID NO: 911660 - RNA, 19 nt, Artificial Sequence
  Description of Artificial Sequence: Synthetic oligonucleotide
auucaagcgaacuuaauua

SEQ ID NO: 911661 - RNA, 19 nt, Artificial Sequence
  Description of Artificial Sequence: Synthetic oligonucleotide
aaauucagaaacgcucggg

SEQ ID NO: 911662 - RNA, 19 nt, Artificial Sequence
  Description of Artificial Sequence: Synthetic oligonucleotide
cacauguuuaggaacgagg

SEQ ID NO: 911663 - RNA, 19 nt, Artificial Sequence
  Description of Artificial Sequence: Synthetic oligonucleotide
uacuuucugaucaccaagc

SEQ ID NO: 911664 - RNA, 19 nt, Artificial Sequence
  Description of Artificial Sequence: Synthetic oligonucleotide
uaggccauuaaguaaguac

SEQ ID NO: 911665 - RNA, 19 nt, Artificial Sequence
  Description of Artificial Sequence: Synthetic oligonucleotide
ugaucacauucuaugaaca

SEQ ID NO: 911666 - RNA, 19 nt, Artificial Sequence
  Description of Artificial Sequence: Synthetic oligonucleotide
cuucacgggucuuugaggg

SEQ ID NO: 911667 - RNA, 19 nt, Artificial Sequence
  Description of Artificial Sequence: Synthetic oligonucleotide
aacuuaauuaucucagcuu

SEQ ID NO: 911668 - RNA, 19 nt, Artificial Sequence
  Description of Artificial Sequence: Synthetic oligonucleotide
ucugcuacuacuucauacu

SEQ ID NO: 911669 - RNA, 19 nt, Artificial Sequence
  Description of Artificial Sequence: Synthetic oligonucleotide
acauguuuaggaacgaggg

SEQ ID NO: 911670 - RNA, 19 nt, Artificial Sequence
  Description of Artificial Sequence: Synthetic oligonucleotide
uucagaaacgcucgggcug

SEQ ID NO: 911671 - RNA, 19 nt, Artificial Sequence
  Description of Artificial Sequence: Synthetic oligonucleotide
auuaauuagcaaguucuag

SEQ ID NO: 911672 - RNA, 19 nt, Artificial Sequence
  Description of Artificial Sequence: Synthetic oligonucleotide
ggcauagccgaauacaagg

SEQ ID NO: 911673 - RNA, 19 nt, Artificial Sequence
  Description of Artificial Sequence: Synthetic oligonucleotide
caucaaaauuuaaugucag

SEQ ID NO: 911674 - RNA, 19 nt, Artificial Sequence
  Description of Artificial Sequence: Synthetic oligonucleotide
uggcuaucaacccauggug

SEQ ID NO: 911675 - RNA, 19 nt, Artificial Sequence
  Description of Artificial Sequence: Synthetic oligonucleotide
guuaagaauugguuuggag

SEQ ID NO: 911676 - RNA, 19 nt, Artificial Sequence
  Description of Artificial Sequence: Synthetic oligonucleotide
caauagcuguucuauauac

SEQ ID NO: 911677 - RNA, 19 nt, Artificial Sequence
  Description of Artificial Sequence: Synthetic oligonucleotide
ugaguaugcuuagaaaacc

SEQ ID NO: 911678 - RNA, 19 nt, Artificial Sequence
  Description of Artificial Sequence: Synthetic oligonucleotide
uuauuaccccuuaugaaau

SEQ ID NO: 911679 - RNA, 19 nt, Artificial Sequence
  Description of Artificial Sequence: Synthetic oligonucleotide
uucugauaguaauuaggcc

SEQ ID NO: 911680 - RNA, 19 nt, Artificial Sequence
  Description of Artificial Sequence: Synthetic oligonucleotide
aagcgaacuuaauuaucuc

SEQ ID NO: 911681 - RNA, 19 nt, Artificial Sequence
  Description of Artificial Sequence: Synthetic oligonucleotide
uugauuuauaagaaauguu

SEQ ID NO: 911682 - RNA, 19 nt, Artificial Sequence
  Description of Artificial Sequence: Synthetic oligonucleotide
aagucaaaguuaaagugca

SEQ ID NO: 911683 - RNA, 19 nt, Artificial Sequence
  Description of Artificial Sequence: Synthetic oligonucleotide
uuauaagaaauguuacaua

SEQ ID NO: 911684 - RNA, 19 nt, Artificial Sequence
  Description of Artificial Sequence: Synthetic oligonucleotide
ccccuuaugaaauaaaggc

SEQ ID NO: 911685 - RNA, 19 nt, Artificial Sequence
  Description of Artificial Sequence: Synthetic oligonucleotide
augaguaugcuuagaaaac

SEQ ID NO: 911686 - RNA, 19 nt, Artificial Sequence
  Description of Artificial Sequence: Synthetic oligonucleotide
ugaaauaaaggcgcuguga

SEQ ID NO: 911687 - RNA, 19 nt, Artificial Sequence
  Description of Artificial Sequence: Synthetic oligonucleotide
ucauucugauaguaauuag

SEQ ID NO: 911688 - RNA, 19 nt, Artificial Sequence
  Description of Artificial Sequence: Synthetic oligonucleotide
aauuagggagaugcgguag

SEQ ID NO: 911689 - RNA, 19 nt, Artificial Sequence
  Description of Artificial Sequence: Synthetic oligonucleotide
uucccaaucggcagaaucu

SEQ ID NO: 911690 - RNA, 19 nt, Artificial Sequence
  Description of Artificial Sequence: Synthetic oligonucleotide
auagcuguucuauauacuu

SEQ ID NO: 911691 - RNA, 19 nt, Artificial Sequence
  Description of Artificial Sequence: Synthetic oligonucleotide
ucuaacauuaaaucaccuu

SEQ ID NO: 911692 - RNA, 19 nt, Artificial Sequence
  Description of Artificial Sequence: Synthetic oligonucleotide
ugacaaauucagaaacgcu

SEQ ID NO: 911693 - RNA, 19 nt, Artificial Sequence
  Description of Artificial Sequence: Synthetic oligonucleotide
ugguuuaaguugcagguau

SEQ ID NO: 911694 - RNA, 19 nt, Artificial Sequence
  Description of Artificial Sequence: Synthetic oligonucleotide
agcgaacuuaauuaucuca

SEQ ID NO: 911695 - RNA, 19 nt, Artificial Sequence
  Description of Artificial Sequence: Synthetic oligonucleotide
uucuuugguauaauuuggu

SEQ ID NO: 911696 - RNA, 19 nt, Artificial Sequence
  Description of Artificial Sequence: Synthetic oligonucleotide
ugcuacuacuucauacucc

SEQ ID NO: 911697 - RNA, 19 nt, Artificial Sequence
  Description of Artificial Sequence: Synthetic oligonucleotide
uuugagggagacuggccgg

SEQ ID NO: 911698 - RNA, 19 nt, Artificial Sequence
  Description of Artificial Sequence: Synthetic oligonucleotide
caucuugcauuuuaucaag

SEQ ID NO: 911699 - RNA, 19 nt, Artificial Sequence
  Description of Artificial Sequence: Synthetic oligonucleotide
gaaacgcucgggcugguag

SEQ ID NO: 911700 - RNA, 19 nt, Artificial Sequence
  Description of Artificial Sequence: Synthetic oligonucleotide
auaguuuugaaagugcuuu

SEQ ID NO: 911701 - RNA, 19 nt, Artificial Sequence
  Description of Artificial Sequence: Synthetic oligonucleotide
ucccaaucccggaacaucc

SEQ ID NO: 911702 - RNA, 19 nt, Artificial Sequence
  Description of Artificial Sequence: Synthetic oligonucleotide
uaauuguccuccugcagca

SEQ ID NO: 911703 - RNA, 19 nt, Artificial Sequence
  Description of Artificial Sequence: Synthetic oligonucleotide
aguaugcuuagaaaaccac

SEQ ID NO: 911704 - RNA, 19 nt, Artificial Sequence
  Description of Artificial Sequence: Synthetic oligonucleotide
auuauuccaauagcuguuc

SEQ ID NO: 911705 - RNA, 19 nt, Artificial Sequence
  Description of Artificial Sequence: Synthetic oligonucleotide
acgagggcgaaucucaucu

SEQ ID NO: 911706 - RNA, 19 nt, Artificial Sequence
  Description of Artificial Sequence: Synthetic oligonucleotide
auggcuaucaacccauggu

SEQ ID NO: 911707 - RNA, 19 nt, Artificial Sequence
  Description of Artificial Sequence: Synthetic oligonucleotide
ugcuuaguagcucauccuc

SEQ ID NO: 911708 - RNA, 19 nt, Artificial Sequence
  Description of Artificial Sequence: Synthetic oligonucleotide
uguggcauagcuagcucug

SEQ ID NO: 911709 - RNA, 19 nt, Artificial Sequence
  Description of Artificial Sequence: Synthetic oligonucleotide
uuauugucugagcuguuuc

SEQ ID NO: 911710 - RNA, 19 nt, Artificial Sequence
  Description of Artificial Sequence: Synthetic oligonucleotide
uguuuaggaacgagggcga

SEQ ID NO: 911711 - RNA, 19 nt, Artificial Sequence
  Description of Artificial Sequence: Synthetic oligonucleotide
uauugucugagcuguuuca

SEQ ID NO: 911712 - RNA, 19 nt, Artificial Sequence
  Description of Artificial Sequence: Synthetic oligonucleotide
uugauuacgacagguggug

SEQ ID NO: 911713 - RNA, 19 nt, Artificial Sequence
  Description of Artificial Sequence: Synthetic oligonucleotide
aaauaaaggcgcugugaaa

SEQ ID NO: 911714 - RNA, 19 nt, Artificial Sequence
  Description of Artificial Sequence: Synthetic oligonucleotide
aucggcagaaucuucuucu

SEQ ID NO: 911715 - RNA, 19 nt, Artificial Sequence
  Description of Artificial Sequence: Synthetic oligonucleotide
ucacccaagagcucugcag

SEQ ID NO: 911716 - RNA, 19 nt, Artificial Sequence
  Description of Artificial Sequence: Synthetic oligonucleotide
agcacucgcaaaguuaaac

SEQ ID NO: 911717 - RNA, 19 nt, Artificial Sequence
  Description of Artificial Sequence: Synthetic oligonucleotide
uguuuugggccguacugcc

SEQ ID NO: 911718 - RNA, 19 nt, Artificial Sequence
  Description of Artificial Sequence: Synthetic oligonucleotide
uucaagcgaacuuaauuau

SEQ ID NO: 911719 - RNA, 19 nt, Artificial Sequence
  Description of Artificial Sequence: Synthetic oligonucleotide
uucuagugcaauuguuuca

SEQ ID NO: 911720 - RNA, 19 nt, Artificial Sequence
  Description of Artificial Sequence: Synthetic oligonucleotide
uaugucauucaagcgaacu

SEQ ID NO: 911721 - RNA, 19 nt, Artificial Sequence
  Description of Artificial Sequence: Synthetic oligonucleotide
ugcgacuggacuucacggg

SEQ ID NO: 911722 - RNA, 19 nt, Artificial Sequence
  Description of Artificial Sequence: Synthetic oligonucleotide
guugagauuugauuacgac

SEQ ID NO: 911723 - RNA, 19 nt, Artificial Sequence
  Description of Artificial Sequence: Synthetic oligonucleotide
ugugaguugggcugacugc

SEQ ID NO: 911724 - RNA, 19 nt, Artificial Sequence
  Description of Artificial Sequence: Synthetic oligonucleotide
gaaauuauguugccaaccu

SEQ ID NO: 911725 - RNA, 19 nt, Artificial Sequence
  Description of Artificial Sequence: Synthetic oligonucleotide
uucuaacauuaaaucaccu

SEQ ID NO: 911726 - RNA, 19 nt, Artificial Sequence
  Description of Artificial Sequence: Synthetic oligonucleotide
ucaagcgaacuuaauuauc

SEQ ID NO: 911727 - RNA, 19 nt, Artificial Sequence
  Description of Artificial Sequence: Synthetic oligonucleotide
caaaguuaaagugcacacc

SEQ ID NO: 911728 - RNA, 19 nt, Artificial Sequence
  Description of Artificial Sequence: Synthetic oligonucleotide
agggagaugcgguagaaau

SEQ ID NO: 911729 - RNA, 19 nt, Artificial Sequence
  Description of Artificial Sequence: Synthetic oligonucleotide
uggucauucugauaguaau

SEQ ID NO: 911730 - RNA, 19 nt, Artificial Sequence
  Description of Artificial Sequence: Synthetic oligonucleotide
augacaacauugcuaauuu

SEQ ID NO: 911731 - RNA, 19 nt, Artificial Sequence
  Description of Artificial Sequence: Synthetic oligonucleotide
gguaucaaaggcaucacug

SEQ ID NO: 911732 - RNA, 19 nt, Artificial Sequence
  Description of Artificial Sequence: Synthetic oligonucleotide
ucccggaacaucccgcccg

SEQ ID NO: 911733 - RNA, 19 nt, Artificial Sequence
  Description of Artificial Sequence: Synthetic oligonucleotide
gguacaucuggucaaaguc

SEQ ID NO: 911734 - RNA, 19 nt, Artificial Sequence
  Description of Artificial Sequence: Synthetic oligonucleotide
ucagaaacgcucgggcugg

SEQ ID NO: 911735 - RNA, 19 nt, Artificial Sequence
  Description of Artificial Sequence: Synthetic oligonucleotide
ugguuuggagcuaauuguc

SEQ ID NO: 911736 - RNA, 19 nt, Artificial Sequence
  Description of Artificial Sequence: Synthetic oligonucleotide
cauguuuaggaacgagggc

SEQ ID NO: 911737 - RNA, 19 nt, Artificial Sequence
  Description of Artificial Sequence: Synthetic oligonucleotide
ggagaugcgguagaaauag

SEQ ID NO: 911738 - RNA, 19 nt, Artificial Sequence
  Description of Artificial Sequence: Synthetic oligonucleotide
uagccgaauacaaggauua

SEQ ID NO: 911739 - RNA, 19 nt, Artificial Sequence
  Description of Artificial Sequence: Synthetic oligonucleotide
caaauucagaaacgcucgg

SEQ ID NO: 911740 - RNA, 19 nt, Artificial Sequence
  Description of Artificial Sequence: Synthetic oligonucleotide
ucuagugcaauuguuucau

SEQ ID NO: 911741 - RNA, 19 nt, Artificial Sequence
  Description of Artificial Sequence: Synthetic oligonucleotide
uuaggaacgagggcgaauc

SEQ ID NO: 911742 - RNA, 19 nt, Artificial Sequence
  Description of Artificial Sequence: Synthetic oligonucleotide
aauagcuguucuauauacu

SEQ ID NO: 911743 - RNA, 19 nt, Artificial Sequence
  Description of Artificial Sequence: Synthetic oligonucleotide
ugucauucaagcgaacuua

SEQ ID NO: 911744 - RNA, 19 nt, Artificial Sequence
  Description of Artificial Sequence: Synthetic oligonucleotide
agauuugauuacgacaggu

SEQ ID NO: 911745 - RNA, 19 nt, Artificial Sequence
  Description of Artificial Sequence: Synthetic oligonucleotide
uggcauagccgaauacaag

SEQ ID NO: 911746 - RNA, 19 nt, Artificial Sequence
  Description of Artificial Sequence: Synthetic oligonucleotide
aacccaugguggcacagcu

SEQ ID NO: 911747 - RNA, 19 nt, Artificial Sequence
  Description of Artificial Sequence: Synthetic oligonucleotide
aguacaaguugcuccauuu

SEQ ID NO: 911748 - RNA, 19 nt, Artificial Sequence
  Description of Artificial Sequence: Synthetic oligonucleotide
uuuugggccguacugccuc

SEQ ID NO: 911749 - RNA, 19 nt, Artificial Sequence
  Description of Artificial Sequence: Synthetic oligonucleotide
agcuguucuauauacuuua

SEQ ID NO: 911750 - RNA, 19 nt, Artificial Sequence
  Description of Artificial Sequence: Synthetic oligonucleotide
accccuuaugaaauaaagg

SEQ ID NO: 911751 - RNA, 19 nt, Artificial Sequence
  Description of Artificial Sequence: Synthetic oligonucleotide
aaacugagugauguuuaug

SEQ ID NO: 911752 - RNA, 19 nt, Artificial Sequence
  Description of Artificial Sequence: Synthetic oligonucleotide
gacaggugguguuuugggc

SEQ ID NO: 911753 - RNA, 19 nt, Artificial Sequence
  Description of Artificial Sequence: Synthetic oligonucleotide
augaaauaaaggcgcugug

SEQ ID NO: 911754 - RNA, 19 nt, Artificial Sequence
  Description of Artificial Sequence: Synthetic oligonucleotide
uugcagguaucaaaggcau

SEQ ID NO: 911755 - RNA, 19 nt, Artificial Sequence
  Description of Artificial Sequence: Synthetic oligonucleotide
uuauuccaauagcuguucu

SEQ ID NO: 911756 - RNA, 19 nt, Artificial Sequence
  Description of Artificial Sequence: Synthetic oligonucleotide
guuacauacaauauccugu

SEQ ID NO: 911757 - RNA, 19 nt, Artificial Sequence
  Description of Artificial Sequence: Synthetic oligonucleotide
uuagaagaggcaaguuuua

SEQ ID NO: 911758 - RNA, 19 nt, Artificial Sequence
  Description of Artificial Sequence: Synthetic oligonucleotide
uaauggucuuaucaaugau

SEQ ID NO: 911759 - RNA, 19 nt, Artificial Sequence
  Description of Artificial Sequence: Synthetic oligonucleotide
uggcccaaccaacugcucc

SEQ ID NO: 911760 - RNA, 19 nt, Artificial Sequence
  Description of Artificial Sequence: Synthetic oligonucleotide
aggccauuaaguaaguacu

SEQ ID NO: 911761 - RNA, 19 nt, Artificial Sequence
  Description of Artificial Sequence: Synthetic oligonucleotide
aaauuccucuugucagcug

SEQ ID NO: 911762 - RNA, 19 nt, Artificial Sequence
  Description of Artificial Sequence: Synthetic oligonucleotide
gugcacaccagcugguggg

SEQ ID NO: 911763 - RNA, 19 nt, Artificial Sequence
  Description of Artificial Sequence: Synthetic oligonucleotide
cugcgacuggacuucacgg

SEQ ID NO: 911764 - RNA, 19 nt, Artificial Sequence
  Description of Artificial Sequence: Synthetic oligonucleotide
ugacaacauugcuaauuug

SEQ ID NO: 911765 - RNA, 19 nt, Artificial Sequence
  Description of Artificial Sequence: Synthetic oligonucleotide
ugucagcacaaaguuaaga

SEQ ID NO: 911766 - RNA, 19 nt, Artificial Sequence
  Description of Artificial Sequence: Synthetic oligonucleotide
uuuggagcuaauuguccuc

SEQ ID NO: 911767 - RNA, 19 nt, Artificial Sequence
  Description of Artificial Sequence: Synthetic oligonucleotide
acuuucugaucaccaagca

SEQ ID NO: 911768 - RNA, 19 nt, Artificial Sequence
  Description of Artificial Sequence: Synthetic oligonucleotide
acuacuucauacuccugaa

SEQ ID NO: 911769 - RNA, 19 nt, Artificial Sequence
  Description of Artificial Sequence: Synthetic oligonucleotide
auuagggagaugcgguaga

SEQ ID NO: 911770 - RNA, 19 nt, Artificial Sequence
  Description of Artificial Sequence: Synthetic oligonucleotide
ggauuaauuagcaaguucu

SEQ ID NO: 911771 - RNA, 19 nt, Artificial Sequence
  Description of Artificial Sequence: Synthetic oligonucleotide
ugaguucuuugguauaauu

SEQ ID NO: 911772 - RNA, 19 nt, Artificial Sequence
  Description of Artificial Sequence: Synthetic oligonucleotide
ggaaauuccucuugucagc

SEQ ID NO: 911773 - RNA, 19 nt, Artificial Sequence
  Description of Artificial Sequence: Synthetic oligonucleotide
cugugaguugggcugacug

SEQ ID NO: 911774 - RNA, 19 nt, Artificial Sequence
  Description of Artificial Sequence: Synthetic oligonucleotide
aaacgcucgggcugguaga

SEQ ID NO: 911775 - RNA, 19 nt, Artificial Sequence
  Description of Artificial Sequence: Synthetic oligonucleotide
uugcuuaguagcucauccu

SEQ ID NO: 911776 - RNA, 19 nt, Artificial Sequence
  Description of Artificial Sequence: Synthetic oligonucleotide
uuuaaguugcagguaucaa

SEQ ID NO: 911777 - RNA, 19 nt, Artificial Sequence
  Description of Artificial Sequence: Synthetic oligonucleotide
gguguuuugggccguacug

SEQ ID NO: 911778 - RNA, 19 nt, Artificial Sequence
  Description of Artificial Sequence: Synthetic oligonucleotide
caaggauuaauuagcaagu

SEQ ID NO: 911779 - RNA, 19 nt, Artificial Sequence
  Description of Artificial Sequence: Synthetic oligonucleotide
ugcgucuccugccaacggc

SEQ ID NO: 911780 - RNA, 19 nt, Artificial Sequence
  Description of Artificial Sequence: Synthetic oligonucleotide
caagcgaacuuaauuaucu

SEQ ID NO: 911781 - RNA, 19 nt, Artificial Sequence
  Description of Artificial Sequence: Synthetic oligonucleotide
uuaccccuuaugaaauaaa

SEQ ID NO: 911782 - RNA, 19 nt, Artificial Sequence
  Description of Artificial Sequence: Synthetic oligonucleotide
cauagcuagcucugcugcc

SEQ ID NO: 911783 - RNA, 19 nt, Artificial Sequence
  Description of Artificial Sequence: Synthetic oligonucleotide
uaauuagggagaugcggua

SEQ ID NO: 911784 - RNA, 19 nt, Artificial Sequence
  Description of Artificial Sequence: Synthetic oligonucleotide
aagaggcaaguuuuagcuu

SEQ ID NO: 911785 - RNA, 19 nt, Artificial Sequence
  Description of Artificial Sequence: Synthetic oligonucleotide
augucauucaagcgaacuu

SEQ ID NO: 911786 - RNA, 19 nt, Artificial Sequence
  Description of Artificial Sequence: Synthetic oligonucleotide
guaugcuuagaaaaccaca

SEQ ID NO: 911787 - RNA, 19 nt, Artificial Sequence
  Description of Artificial Sequence: Synthetic oligonucleotide
gaguaugcuuagaaaacca

SEQ ID NO: 911788 - RNA, 19 nt, Artificial Sequence
  Description of Artificial Sequence: Synthetic oligonucleotide
ggcgacaggguacaucugg

SEQ ID NO: 911789 - RNA, 19 nt, Artificial Sequence
  Description of Artificial Sequence: Synthetic oligonucleotide
uuaaaucaccuuccucuuu

SEQ ID NO: 911790 - RNA, 19 nt, Artificial Sequence
  Description of Artificial Sequence: Synthetic oligonucleotide
cuuaaauccuccugguuua

SEQ ID NO: 911791 - RNA, 19 nt, Artificial Sequence
  Description of Artificial Sequence: Synthetic oligonucleotide
gcgaacuuaauuaucucag

SEQ ID NO: 911792 - RNA, 19 nt, Artificial Sequence
  Description of Artificial Sequence: Synthetic oligonucleotide
guugccaaccuugugaaaa

SEQ ID NO: 911793 - RNA, 19 nt, Artificial Sequence
  Description of Artificial Sequence: Synthetic oligonucleotide
gguagagauuuccucuucc

SEQ ID NO: 911794 - RNA, 19 nt, Artificial Sequence
  Description of Artificial Sequence: Synthetic oligonucleotide
aaguacaaguugcuccauu

SEQ ID NO: 911795 - RNA, 19 nt, Artificial Sequence
  Description of Artificial Sequence: Synthetic oligonucleotide
uaucaaguacaaguugcuc

SEQ ID NO: 911796 - RNA, 19 nt, Artificial Sequence
  Description of Artificial Sequence: Synthetic oligonucleotide
aagaaauguuacauacaau

SEQ ID NO: 911797 - RNA, 19 nt, Artificial Sequence
  Description of Artificial Sequence: Synthetic oligonucleotide
uuuggucauucugauagua

SEQ ID NO: 911798 - RNA, 19 nt, Artificial Sequence
  Description of Artificial Sequence: Synthetic oligonucleotide
caaucccggaacaucccgc

SEQ ID NO: 911799 - RNA, 19 nt, Artificial Sequence
  Description of Artificial Sequence: Synthetic oligonucleotide
cuaacugcccugcgacugg

SEQ ID NO: 911800 - RNA, 19 nt, Artificial Sequence
  Description of Artificial Sequence: Synthetic oligonucleotide
gcugacugcuuaauuaggg

SEQ ID NO: 911801 - RNA, 19 nt, Artificial Sequence
  Description of Artificial Sequence: Synthetic oligonucleotide
acaggguacaucuggucaa

SEQ ID NO: 911802 - RNA, 19 nt, Artificial Sequence
  Description of Artificial Sequence: Synthetic oligonucleotide
uucguggcagcacucgcaa

SEQ ID NO: 911803 - RNA, 19 nt, Artificial Sequence
  Description of Artificial Sequence: Synthetic oligonucleotide
uaucaacccaugguggcac

SEQ ID NO: 911804 - RNA, 19 nt, Artificial Sequence
  Description of Artificial Sequence: Synthetic oligonucleotide
aucccaguuuucaucucgc

SEQ ID NO: 911805 - RNA, 19 nt, Artificial Sequence
  Description of Artificial Sequence: Synthetic oligonucleotide
auuauguugccaaccuugu

SEQ ID NO: 911806 - RNA, 19 nt, Artificial Sequence
  Description of Artificial Sequence: Synthetic oligonucleotide
uccccuauaauggucuuau

SEQ ID NO: 911807 - RNA, 19 nt, Artificial Sequence
  Description of Artificial Sequence: Synthetic oligonucleotide
ucauucaagcgaacuuaau

SEQ ID NO: 911808 - RNA, 19 nt, Artificial Sequence
  Description of Artificial Sequence: Synthetic oligonucleotide
aggaacgagggcgaaucuc

SEQ ID NO: 911809 - RNA, 19 nt, Artificial Sequence
  Description of Artificial Sequence: Synthetic oligonucleotide
gauuaauuagcaaguucua

SEQ ID NO: 911810 - RNA, 19 nt, Artificial Sequence
  Description of Artificial Sequence: Synthetic oligonucleotide
ugguguuuugggccguacu

SEQ ID NO: 911811 - RNA, 19 nt, Artificial Sequence
  Description of Artificial Sequence: Synthetic oligonucleotide
agucaaaguuaaagugcac

SEQ ID NO: 911812 - RNA, 19 nt, Artificial Sequence
  Description of Artificial Sequence: Synthetic oligonucleotide
gcuaucaacccaugguggc

SEQ ID NO: 911813 - RNA, 19 nt, Artificial Sequence
  Description of Artificial Sequence: Synthetic oligonucleotide
acugccgcgguccccucac

SEQ ID NO: 911814 - RNA, 19 nt, Artificial Sequence
  Description of Artificial Sequence: Synthetic oligonucleotide
aucccggaacaucccgccc

SEQ ID NO: 911815 - RNA, 19 nt, Artificial Sequence
  Description of Artificial Sequence: Synthetic oligonucleotide
acgacaggugguguuuugg

SEQ ID NO: 911816 - RNA, 19 nt, Artificial Sequence
  Description of Artificial Sequence: Synthetic oligonucleotide
gcuucuccgacucugcuac

SEQ ID NO: 911817 - RNA, 19 nt, Artificial Sequence
  Description of Artificial Sequence: Synthetic oligonucleotide
acugcuuaauuagggagau

SEQ ID NO: 911818 - RNA, 19 nt, Artificial Sequence
  Description of Artificial Sequence: Synthetic oligonucleotide
cugcuacuacuucauacuc

SEQ ID NO: 911819 - RNA, 19 nt, Artificial Sequence
  Description of Artificial Sequence: Synthetic oligonucleotide
cuuuuggcuuucaaacaga

SEQ ID NO: 911820 - RNA, 19 nt, Artificial Sequence
  Description of Artificial Sequence: Synthetic oligonucleotide
gcaucacugacaaauucag

SEQ ID NO: 911821 - RNA, 19 nt, Artificial Sequence
  Description of Artificial Sequence: Synthetic oligonucleotide
cugacugcuuaauuaggga

SEQ ID NO: 911822 - RNA, 19 nt, Artificial Sequence
  Description of Artificial Sequence: Synthetic oligonucleotide
aggugaaugcuaguuauuu

SEQ ID NO: 911823 - RNA, 19 nt, Artificial Sequence
  Description of Artificial Sequence: Synthetic oligonucleotide
uccgccggugacuuggagu

SEQ ID NO: 911824 - RNA, 19 nt, Artificial Sequence
  Description of Artificial Sequence: Synthetic oligonucleotide
ccuauaauggucuuaucaa

SEQ ID NO: 911825 - RNA, 19 nt, Artificial Sequence
  Description of Artificial Sequence: Synthetic oligonucleotide
aguugagauuugauuacga

SEQ ID NO: 911826 - RNA, 19 nt, Artificial Sequence
  Description of Artificial Sequence: Synthetic oligonucleotide
ggcuaucaacccauggugg

SEQ ID NO: 911827 - RNA, 19 nt, Artificial Sequence
  Description of Artificial Sequence: Synthetic oligonucleotide
cuguucuauauacuuuaga

SEQ ID NO: 911828 - RNA, 19 nt, Artificial Sequence
  Description of Artificial Sequence: Synthetic oligonucleotide
auagcuagcucugcugccu

SEQ ID NO: 911829 - RNA, 19 nt, Artificial Sequence
  Description of Artificial Sequence: Synthetic oligonucleotide
uuaguagcucauccucuuu

SEQ ID NO: 911830 - RNA, 19 nt, Artificial Sequence
  Description of Artificial Sequence: Synthetic oligonucleotide
ugaccagggcgacagggua

SEQ ID NO: 911831 - RNA, 19 nt, Artificial Sequence
  Description of Artificial Sequence: Synthetic oligonucleotide
gcaaugaguaugcuuagaa

SEQ ID NO: 911832 - RNA, 19 nt, Artificial Sequence
  Description of Artificial Sequence: Synthetic oligonucleotide
ugcucccaaucccggaaca

SEQ ID NO: 911833 - RNA, 19 nt, Artificial Sequence
  Description of Artificial Sequence: Synthetic oligonucleotide
guuuggagcuaauuguccu

SEQ ID NO: 911834 - RNA, 19 nt, Artificial Sequence
  Description of Artificial Sequence: Synthetic oligonucleotide
guaaguacuuuaaccaugu

SEQ ID NO: 911835 - RNA, 19 nt, Artificial Sequence
  Description of Artificial Sequence: Synthetic oligonucleotide
aggugcgucuccugccaac

SEQ ID NO: 911836 - RNA, 19 nt, Artificial Sequence
  Description of Artificial Sequence: Synthetic oligonucleotide
aguuaagaauugguuugga

SEQ ID NO: 911837 - RNA, 19 nt, Artificial Sequence
  Description of Artificial Sequence: Synthetic oligonucleotide
gguccccucacccaagagc

SEQ ID NO: 911838 - RNA, 19 nt, Artificial Sequence
  Description of Artificial Sequence: Synthetic oligonucleotide
agaauugguuuggagcuaa

SEQ ID NO: 911839 - RNA, 19 nt, Artificial Sequence
  Description of Artificial Sequence: Synthetic oligonucleotide
ucauggcuaucaacccaug

SEQ ID NO: 911840 - RNA, 19 nt, Artificial Sequence
  Description of Artificial Sequence: Synthetic oligonucleotide
auagccgaauacaaggauu

SEQ ID NO: 911841 - RNA, 19 nt, Artificial Sequence
  Description of Artificial Sequence: Synthetic oligonucleotide
agaugcgguagaaauaguu

SEQ ID NO: 911842 - RNA, 19 nt, Artificial Sequence
  Description of Artificial Sequence: Synthetic oligonucleotide
agauuuccuuauugucuga

SEQ ID NO: 911843 - RNA, 19 nt, Artificial Sequence
  Description of Artificial Sequence: Synthetic oligonucleotide
uacgacaggugguguuuug

SEQ ID NO: 911844 - RNA, 19 nt, Artificial Sequence
  Description of Artificial Sequence: Synthetic oligonucleotide
ucaacccaugguggcacag

SEQ ID NO: 911845 - RNA, 19 nt, Artificial Sequence
  Description of Artificial Sequence: Synthetic oligonucleotide
gguuuggagcuaauugucc

SEQ ID NO: 911846 - RNA, 19 nt, Artificial Sequence
  Description of Artificial Sequence: Synthetic oligonucleotide
gcuuaauuagggagaugcg

SEQ ID NO: 911847 - RNA, 19 nt, Artificial Sequence
  Description of Artificial Sequence: Synthetic oligonucleotide
aauccccuauaauggucuu

SEQ ID NO: 911848 - RNA, 19 nt, Artificial Sequence
  Description of Artificial Sequence: Synthetic oligonucleotide
uuuaggaacgagggcgaau

SEQ ID NO: 911849 - RNA, 19 nt, Artificial Sequence
  Description of Artificial Sequence: Synthetic oligonucleotide
uaggaacgagggcgaaucu

SEQ ID NO: 911850 - RNA, 19 nt, Artificial Sequence
  Description of Artificial Sequence: Synthetic oligonucleotide
guucuagaaacugagugau

SEQ ID NO: 911851 - RNA, 19 nt, Artificial Sequence
  Description of Artificial Sequence: Synthetic oligonucleotide
uaaaggcgcugugaaaaua

SEQ ID NO: 911852 - RNA, 19 nt, Artificial Sequence
  Description of Artificial Sequence: Synthetic oligonucleotide
auuacgacaggugguguuu

SEQ ID NO: 911853 - RNA, 19 nt, Artificial Sequence
  Description of Artificial Sequence: Synthetic oligonucleotide
gaaauuccucuugucagcu

SEQ ID NO: 911854 - RNA, 19 nt, Artificial Sequence
  Description of Artificial Sequence: Synthetic oligonucleotide
auugcuaauuugauuuaua

SEQ ID NO: 911855 - RNA, 19 nt, Artificial Sequence
  Description of Artificial Sequence: Synthetic oligonucleotide
gcacucgcaaaguuaaaca

SEQ ID NO: 911856 - RNA, 19 nt, Artificial Sequence
  Description of Artificial Sequence: Synthetic oligonucleotide
gcuacuacuucauacuccu

SEQ ID NO: 911857 - RNA, 19 nt, Artificial Sequence
  Description of Artificial Sequence: Synthetic oligonucleotide
agcaacagacucaguuauc

SEQ ID NO: 911858 - RNA, 19 nt, Artificial Sequence
  Description of Artificial Sequence: Synthetic oligonucleotide
uucacgggucuuugaggga

SEQ ID NO: 911859 - RNA, 19 nt, Artificial Sequence
  Description of Artificial Sequence: Synthetic oligonucleotide
ugcucgaccucggugggcu

SEQ ID NO: 911860 - RNA, 19 nt, Artificial Sequence
  Description of Artificial Sequence: Synthetic oligonucleotide
ugauuacgacagguggugu

SEQ ID NO: 911861 - RNA, 19 nt, Artificial Sequence
  Description of Artificial Sequence: Synthetic oligonucleotide
guagagauuuccucuuccu

SEQ ID NO: 911862 - RNA, 19 nt, Artificial Sequence
  Description of Artificial Sequence: Synthetic oligonucleotide
gaaacugagugauguuuau

SEQ ID NO: 911863 - RNA, 19 nt, Artificial Sequence
  Description of Artificial Sequence: Synthetic oligonucleotide
aaggcgcugugaaaauaca

SEQ ID NO: 911864 - RNA, 19 nt, Artificial Sequence
  Description of Artificial Sequence: Synthetic oligonucleotide
uuaaauccuccugguuuaa

SEQ ID NO: 911865 - RNA, 19 nt, Artificial Sequence
  Description of Artificial Sequence: Synthetic oligonucleotide
ugccgcgguccccucaccc

SEQ ID NO: 911866 - RNA, 19 nt, Artificial Sequence
  Description of Artificial Sequence: Synthetic oligonucleotide
uggagcuaauuguccuccu

SEQ ID NO: 911867 - RNA, 19 nt, Artificial Sequence
  Description of Artificial Sequence: Synthetic oligonucleotide
cgaacuuaauuaucucagc

SEQ ID NO: 911868 - RNA, 19 nt, Artificial Sequence
  Description of Artificial Sequence: Synthetic oligonucleotide
ccugcgacuggacuucacg

SEQ ID NO: 911869 - RNA, 19 nt, Artificial Sequence
  Description of Artificial Sequence: Synthetic oligonucleotide
ucuccugccaacggcuggu

SEQ ID NO: 911870 - RNA, 19 nt, Artificial Sequence
  Description of Artificial Sequence: Synthetic oligonucleotide
cuacuacuucauacuccug

SEQ ID NO: 911871 - RNA, 19 nt, Artificial Sequence
  Description of Artificial Sequence: Synthetic oligonucleotide
ggaacgagggcgaaucuca

SEQ ID NO: 911872 - RNA, 19 nt, Artificial Sequence
  Description of Artificial Sequence: Synthetic oligonucleotide
cuucguggcagcacucgca

SEQ ID NO: 911873 - RNA, 19 nt, Artificial Sequence
  Description of Artificial Sequence: Synthetic oligonucleotide
aaggcaucacugacaaauu

SEQ ID NO: 911874 - RNA, 19 nt, Artificial Sequence
  Description of Artificial Sequence: Synthetic oligonucleotide
ucggcagaaucuucuucua

SEQ ID NO: 911875 - RNA, 19 nt, Artificial Sequence
  Description of Artificial Sequence: Synthetic oligonucleotide
gcuaacugcccugcgacug

SEQ ID NO: 911876 - RNA, 19 nt, Artificial Sequence
  Description of Artificial Sequence: Synthetic oligonucleotide
gauuacgacaggugguguu

SEQ ID NO: 911877 - RNA, 19 nt, Artificial Sequence
  Description of Artificial Sequence: Synthetic oligonucleotide
uuaggccauuaaguaagua

SEQ ID NO: 911878 - RNA, 19 nt, Artificial Sequence
  Description of Artificial Sequence: Synthetic oligonucleotide
ccaaucccggaacaucccg

SEQ ID NO: 911879 - RNA, 19 nt, Artificial Sequence
  Description of Artificial Sequence: Synthetic oligonucleotide
gucauucaagcgaacuuaa

SEQ ID NO: 911880 - RNA, 19 nt, Artificial Sequence
  Description of Artificial Sequence: Synthetic oligonucleotide
auuaggccauuaaguaagu

SEQ ID NO: 911881 - RNA, 19 nt, Artificial Sequence
  Description of Artificial Sequence: Synthetic oligonucleotide
gguauaauuuggucauucu

SEQ ID NO: 911882 - RNA, 19 nt, Artificial Sequence
  Description of Artificial Sequence: Synthetic oligonucleotide
ggugcgucuccugccaacg

SEQ ID NO: 911883 - RNA, 19 nt, Artificial Sequence
  Description of Artificial Sequence: Synthetic oligonucleotide
uuugggccguacugccucu

SEQ ID NO: 911884 - RNA, 19 nt, Artificial Sequence
  Description of Artificial Sequence: Synthetic oligonucleotide
cuucuucguggcagcacuc

SEQ ID NO: 911885 - RNA, 19 nt, Artificial Sequence
  Description of Artificial Sequence: Synthetic oligonucleotide
gcgcugugaaaauacaaaa

SEQ ID NO: 911886 - RNA, 19 nt, Artificial Sequence
  Description of Artificial Sequence: Synthetic oligonucleotide
ggcugguagagauuuccuc

SEQ ID NO: 911887 - RNA, 19 nt, Artificial Sequence
  Description of Artificial Sequence: Synthetic oligonucleotide
gaucaccaagcaucaaaau

SEQ ID NO: 911888 - RNA, 19 nt, Artificial Sequence
  Description of Artificial Sequence: Synthetic oligonucleotide
gcuggcauagccgaauaca

SEQ ID NO: 911889 - RNA, 19 nt, Artificial Sequence
  Description of Artificial Sequence: Synthetic oligonucleotide
cuaucaacccaugguggca

SEQ ID NO: 911890 - RNA, 19 nt, Artificial Sequence
  Description of Artificial Sequence: Synthetic oligonucleotide
gcuguucuauauacuuuag

SEQ ID NO: 911891 - RNA, 19 nt, Artificial Sequence
  Description of Artificial Sequence: Synthetic oligonucleotide
caccaagcaucaaaauuua

SEQ ID NO: 911892 - RNA, 19 nt, Artificial Sequence
  Description of Artificial Sequence: Synthetic oligonucleotide
gugcgucuccugccaacgg

SEQ ID NO: 911893 - RNA, 19 nt, Artificial Sequence
  Description of Artificial Sequence: Synthetic oligonucleotide
uucuccgacucugcuacua

SEQ ID NO: 911894 - RNA, 19 nt, Artificial Sequence
  Description of Artificial Sequence: Synthetic oligonucleotide
gaggcaaguuuuagcuuga

SEQ ID NO: 911895 - RNA, 19 nt, Artificial Sequence
  Description of Artificial Sequence: Synthetic oligonucleotide
caaguucuagaaacugagu

SEQ ID NO: 911896 - RNA, 19 nt, Artificial Sequence
  Description of Artificial Sequence: Synthetic oligonucleotide
ccugguuuaaguugcaggu

SEQ ID NO: 911897 - RNA, 19 nt, Artificial Sequence
  Description of Artificial Sequence: Synthetic oligonucleotide
aggguacaucuggucaaag

SEQ ID NO: 911898 - RNA, 19 nt, Artificial Sequence
  Description of Artificial Sequence: Synthetic oligonucleotide
aacaucccgcccgcggggu

SEQ ID NO: 911899 - RNA, 19 nt, Artificial Sequence
  Description of Artificial Sequence: Synthetic oligonucleotide
aucaacccaugguggcaca

SEQ ID NO: 911900 - RNA, 19 nt, Artificial Sequence
  Description of Artificial Sequence: Synthetic oligonucleotide
gccaaaaucuguuguugaa

SEQ ID NO: 911901 - RNA, 19 nt, Artificial Sequence
  Description of Artificial Sequence: Synthetic oligonucleotide
gaccagggcgacaggguac

SEQ ID NO: 911902 - RNA, 19 nt, Artificial Sequence
  Description of Artificial Sequence: Synthetic oligonucleotide
ccgccggugacuuggagug

SEQ ID NO: 911903 - RNA, 19 nt, Artificial Sequence
  Description of Artificial Sequence: Synthetic oligonucleotide
cgaaucucaucuugcuuag

SEQ ID NO: 911904 - RNA, 19 nt, Artificial Sequence
  Description of Artificial Sequence: Synthetic oligonucleotide
ggcgcugugaaaauacaaa

SEQ ID NO: 911905 - RNA, 19 nt, Artificial Sequence
  Description of Artificial Sequence: Synthetic oligonucleotide
ggucuuugagggagacugg

SEQ ID NO: 911906 - RNA, 19 nt, Artificial Sequence
  Description of Artificial Sequence: Synthetic oligonucleotide
cucgaccucggugggcucc

SEQ ID NO: 911907 - RNA, 19 nt, Artificial Sequence
  Description of Artificial Sequence: Synthetic oligonucleotide
guggcauagcuagcucugc

SEQ ID NO: 911908 - RNA, 19 nt, Artificial Sequence
  Description of Artificial Sequence: Synthetic oligonucleotide
uuacgacaggugguguuuu

SEQ ID NO: 911909 - RNA, 19 nt, Artificial Sequence
  Description of Artificial Sequence: Synthetic oligonucleotide
guacugccucugucagagg

SEQ ID NO: 911910 - RNA, 19 nt, Artificial Sequence
  Description of Artificial Sequence: Synthetic oligonucleotide
gcagcacucgcaaaguuaa

SEQ ID NO: 911911 - RNA, 19 nt, Artificial Sequence
  Description of Artificial Sequence: Synthetic oligonucleotide
cgacaggugguguuuuggg

SEQ ID NO: 911912 - RNA, 19 nt, Artificial Sequence
  Description of Artificial Sequence: Synthetic oligonucleotide
gauuucuuugugugcuguu

SEQ ID NO: 911913 - RNA, 19 nt, Artificial Sequence
  Description of Artificial Sequence: Synthetic oligonucleotide
cauagccgaauacaaggau

SEQ ID NO: 911914 - RNA, 19 nt, Artificial Sequence
  Description of Artificial Sequence: Synthetic oligonucleotide
gaccucggugggcuccgcc

SEQ ID NO: 911915 - RNA, 19 nt, Artificial Sequence
  Description of Artificial Sequence: Synthetic oligonucleotide
ccgaauacaaggauuaauu

SEQ ID NO: 911916 - RNA, 19 nt, Artificial Sequence
  Description of Artificial Sequence: Synthetic oligonucleotide
caucccgcccgcggggucg

SEQ ID NO: 911917 - RNA, 19 nt, Artificial Sequence
  Description of Artificial Sequence: Synthetic oligonucleotide
ggccguacugccucuguca

SEQ ID NO: 911918 - RNA, 19 nt, Artificial Sequence
  Description of Artificial Sequence: Synthetic oligonucleotide
gccuaugacaacauugcua

SEQ ID NO: 911919 - RNA, 19 nt, Artificial Sequence
  Description of Artificial Sequence: Synthetic oligonucleotide
gguuuaaguugcagguauc

SEQ ID NO: 911920 - RNA, 19 nt, Artificial Sequence
  Description of Artificial Sequence: Synthetic oligonucleotide
gcugcucgaccucgguggg

SEQ ID NO: 911921 - RNA, 19 nt, Artificial Sequence
  Description of Artificial Sequence: Synthetic oligonucleotide
gcauagccgaauacaagga

SEQ ID NO: 911922 - RNA, 19 nt, Artificial Sequence
  Description of Artificial Sequence: Synthetic oligonucleotide
ccgcuaacugcccugcgac

SEQ ID NO: 911923 - RNA, 19 nt, Artificial Sequence
  Description of Artificial Sequence: Synthetic oligonucleotide
aucucgcuucuccgacucu

SEQ ID NO: 911924 - RNA, 19 nt, Artificial Sequence
  Description of Artificial Sequence: Synthetic oligonucleotide
cgaauacaaggauuaauua

SEQ ID NO: 911925 - RNA, 19 nt, Artificial Sequence
  Description of Artificial Sequence: Synthetic oligonucleotide
ccaacggcugguccgcgcc

SEQ ID NO: 911926 - RNA, 19 nt, Artificial Sequence
  Description of Artificial Sequence: Synthetic oligonucleotide
cucagcuuuuggcuuucaa

SEQ ID NO: 911927 - RNA, 19 nt, Artificial Sequence
  Description of Artificial Sequence: Synthetic oligonucleotide
ggaggugcgucuccugcca

SEQ ID NO: 911928 - RNA, 19 nt, Artificial Sequence
  Description of Artificial Sequence: Synthetic oligonucleotide
cagccgcuaacugcccugc

SEQ ID NO: 911929 - RNA, 19 nt, Artificial Sequence
  Description of Artificial Sequence: Synthetic oligonucleotide
cccaaucccggaacauccc

SEQ ID NO: 911930 - RNA, 19 nt, Artificial Sequence
  Description of Artificial Sequence: Synthetic oligonucleotide
ggguacaucuggucaaagu

SEQ ID NO: 911931 - RNA, 19 nt, Artificial Sequence
  Description of Artificial Sequence: Synthetic oligonucleotide
cugguuuaaguugcaggua

SEQ ID NO: 911932 - RNA, 19 nt, Artificial Sequence
  Description of Artificial Sequence: Synthetic oligonucleotide
agccgaauacaaggauuaa

SEQ ID NO: 911933 - RNA, 19 nt, Artificial Sequence
  Description of Artificial Sequence: Synthetic oligonucleotide
uuuucccaaucggcagaau

SEQ ID NO: 911934 - RNA, 19 nt, Artificial Sequence
  Description of Artificial Sequence: Synthetic oligonucleotide
acggcugguccgcgccggg

SEQ ID NO: 911935 - RNA, 19 nt, Artificial Sequence
  Description of Artificial Sequence: Synthetic oligonucleotide
ugagggagacuggccggaa

SEQ ID NO: 911936 - RNA, 19 nt, Artificial Sequence
  Description of Artificial Sequence: Synthetic oligonucleotide
ugggcuccgccggugacuu

SEQ ID NO: 911937 - RNA, 19 nt, Artificial Sequence
  Description of Artificial Sequence: Synthetic oligonucleotide
cugguagagauuuccucuu

SEQ ID NO: 911938 - RNA, 19 nt, Artificial Sequence
  Description of Artificial Sequence: Synthetic oligonucleotide
uugggccguacugccucug

SEQ ID NO: 911939 - RNA, 19 nt, Artificial Sequence
  Description of Artificial Sequence: Synthetic oligonucleotide
guuuaggaacgagggcgaa

SEQ ID NO: 911940 - RNA, 19 nt, Artificial Sequence
  Description of Artificial Sequence: Synthetic oligonucleotide
cuggcccaaccaacugcuc

SEQ ID NO: 911941 - RNA, 19 nt, Artificial Sequence
  Description of Artificial Sequence: Synthetic oligonucleotide
cacgaaggaaauuccucuu

SEQ ID NO: 911942 - RNA, 19 nt, Artificial Sequence
  Description of Artificial Sequence: Synthetic oligonucleotide
gagcgcuggguccuccgua

SEQ ID NO: 911943 - RNA, 19 nt, Artificial Sequence
  Description of Artificial Sequence: Synthetic oligonucleotide
cugguccgcgccgggcugg

SEQ ID NO: 911944 - RNA, 19 nt, Artificial Sequence
  Description of Artificial Sequence: Synthetic oligonucleotide
cccaaucggcagaaucuuc

SEQ ID NO: 911945 - RNA, 19 nt, Artificial Sequence
  Description of Artificial Sequence: Synthetic oligonucleotide
gccgcuaacugcccugcga

SEQ ID NO: 911946 - RNA, 19 nt, Artificial Sequence
  Description of Artificial Sequence: Synthetic oligonucleotide
gaggugcgucuccugccaa

SEQ ID NO: 911947 - RNA, 19 nt, Artificial Sequence
  Description of Artificial Sequence: Synthetic oligonucleotide
gugguguuuugggccguac

SEQ ID NO: 911948 - RNA, 19 nt, Artificial Sequence
  Description of Artificial Sequence: Synthetic oligonucleotide
ccucggugggcuccgccgg

SEQ ID NO: 911949 - RNA, 19 nt, Artificial Sequence
  Description of Artificial Sequence: Synthetic oligonucleotide
cggaacaucccgcccgcgg

SEQ ID NO: 911950 - RNA, 19 nt, Artificial Sequence
  Description of Artificial Sequence: Synthetic oligonucleotide
cuccgccggugacuuggag

SEQ ID NO: 911951 - RNA, 19 nt, Artificial Sequence
  Description of Artificial Sequence: Synthetic oligonucleotide
gcuuaguagcucauccucu

SEQ ID NO: 911952 - RNA, 19 nt, Artificial Sequence
  Description of Artificial Sequence: Synthetic oligonucleotide
cacgggucuuugagggaga

SEQ ID NO: 911953 - RNA, 19 nt, Artificial Sequence
  Description of Artificial Sequence: Synthetic oligonucleotide
gcgacuggacuucacgggu

SEQ ID NO: 911954 - RNA, 19 nt, Artificial Sequence
  Description of Artificial Sequence: Synthetic oligonucleotide
gcaugaccagggcgacagg

SEQ ID NO: 911955 - RNA, 19 nt, Artificial Sequence
  Description of Artificial Sequence: Synthetic oligonucleotide
aggcaaguuuuagcuugaa

SEQ ID NO: 911956 - RNA, 19 nt, Artificial Sequence
  Description of Artificial Sequence: Synthetic oligonucleotide
aucccgcccgcggggucgc

SEQ ID NO: 911957 - RNA, 19 nt, Artificial Sequence
  Description of Artificial Sequence: Synthetic oligonucleotide
gggagaugcgguagaaaua

SEQ ID NO: 911958 - RNA, 19 nt, Artificial Sequence
  Description of Artificial Sequence: Synthetic oligonucleotide
cugcucgaccucggugggc

SEQ ID NO: 911959 - RNA, 19 nt, Artificial Sequence
  Description of Artificial Sequence: Synthetic oligonucleotide
cucgggcugguagagauuu

SEQ ID NO: 911960 - RNA, 19 nt, Artificial Sequence
  Description of Artificial Sequence: Synthetic oligonucleotide
ggucauucugauaguaauu

SEQ ID NO: 911961 - RNA, 19 nt, Artificial Sequence
  Description of Artificial Sequence: Synthetic oligonucleotide
gggcgaaucucaucuugcu

SEQ ID NO: 911962 - RNA, 19 nt, Artificial Sequence
  Description of Artificial Sequence: Synthetic oligonucleotide
caaucggcagaaucuucuu

SEQ ID NO: 911963 - RNA, 19 nt, Artificial Sequence
  Description of Artificial Sequence: Synthetic oligonucleotide
caggguacaucuggucaaa

SEQ ID NO: 911964 - RNA, 19 nt, Artificial Sequence
  Description of Artificial Sequence: Synthetic oligonucleotide
guuuugggccguacugccu

SEQ ID NO: 911965 - RNA, 19 nt, Artificial Sequence
  Description of Artificial Sequence: Synthetic oligonucleotide
agaaacgcucgggcuggua

SEQ ID NO: 911966 - RNA, 19 nt, Artificial Sequence
  Description of Artificial Sequence: Synthetic oligonucleotide
cccggaacaucccgcccgc

SEQ ID NO: 911967 - RNA, 19 nt, Artificial Sequence
  Description of Artificial Sequence: Synthetic oligonucleotide
gccaacggcugguccgcgc

SEQ ID NO: 911968 - RNA, 19 nt, Artificial Sequence
  Description of Artificial Sequence: Synthetic oligonucleotide
gccgaauacaaggauuaau

SEQ ID NO: 911969 - RNA, 19 nt, Artificial Sequence
  Description of Artificial Sequence: Synthetic oligonucleotide
cagcacucgcaaaguuaaa

SEQ ID NO: 911970 - RNA, 19 nt, Artificial Sequence
  Description of Artificial Sequence: Synthetic oligonucleotide
gggccguacugccucuguc

SEQ ID NO: 911971 - RNA, 19 nt, Artificial Sequence
  Description of Artificial Sequence: Synthetic oligonucleotide
ggugggcuccgccggugac

SEQ ID NO: 911972 - RNA, 19 nt, Artificial Sequence
  Description of Artificial Sequence: Synthetic oligonucleotide
gaacgagggcgaaucucau

SEQ ID NO: 911973 - RNA, 19 nt, Artificial Sequence
  Description of Artificial Sequence: Synthetic oligonucleotide
acuggacuucacgggucuu

SEQ ID NO: 911974 - RNA, 19 nt, Artificial Sequence
  Description of Artificial Sequence: Synthetic oligonucleotide
ggcgaaucucaucuugcuu

SEQ ID NO: 911975 - RNA, 19 nt, Artificial Sequence
  Description of Artificial Sequence: Synthetic oligonucleotide
gaauugguuuggagcuaau

SEQ ID NO: 911976 - RNA, 19 nt, Artificial Sequence
  Description of Artificial Sequence: Synthetic oligonucleotide
cugcccugcgacuggacuu

SEQ ID NO: 911977 - RNA, 19 nt, Artificial Sequence
  Description of Artificial Sequence: Synthetic oligonucleotide
cugccgcgguccccucacc

SEQ ID NO: 911978 - RNA, 19 nt, Artificial Sequence
  Description of Artificial Sequence: Synthetic oligonucleotide
ccucacccaagagcucugc

SEQ ID NO: 911979 - RNA, 19 nt, Artificial Sequence
  Description of Artificial Sequence: Synthetic oligonucleotide
ccuccguaggcugcugcug

SEQ ID NO: 911980 - RNA, 19 nt, Artificial Sequence
  Description of Artificial Sequence: Synthetic oligonucleotide
ccccuauaauggucuuauc

SEQ ID NO: 911981 - RNA, 19 nt, Artificial Sequence
  Description of Artificial Sequence: Synthetic oligonucleotide
gccgcgguccccucaccca

SEQ ID NO: 911982 - RNA, 19 nt, Artificial Sequence
  Description of Artificial Sequence: Synthetic oligonucleotide
acgcucgggcugguagaga

SEQ ID NO: 911983 - RNA, 19 nt, Artificial Sequence
  Description of Artificial Sequence: Synthetic oligonucleotide
cacugccgcgguccccuca

SEQ ID NO: 911984 - RNA, 19 nt, Artificial Sequence
  Description of Artificial Sequence: Synthetic oligonucleotide
ccaaccaacugcucccaau

SEQ ID NO: 911985 - RNA, 19 nt, Artificial Sequence
  Description of Artificial Sequence: Synthetic oligonucleotide
gcggccagugcugugaguu

SEQ ID NO: 911986 - RNA, 19 nt, Artificial Sequence
  Description of Artificial Sequence: Synthetic oligonucleotide
gcgacaggguacaucuggu

SEQ ID NO: 911987 - RNA, 19 nt, Artificial Sequence
  Description of Artificial Sequence: Synthetic oligonucleotide
gccggugacuuggagugcu

SEQ ID NO: 911988 - RNA, 19 nt, Artificial Sequence
  Description of Artificial Sequence: Synthetic oligonucleotide
gcgucuccugccaacggcu

SEQ ID NO: 911989 - RNA, 19 nt, Artificial Sequence
  Description of Artificial Sequence: Synthetic oligonucleotide
gggcgacaggguacaucug

SEQ ID NO: 911990 - RNA, 19 nt, Artificial Sequence
  Description of Artificial Sequence: Synthetic oligonucleotide
cccugcgacuggacuucac

SEQ ID NO: 911991 - RNA, 19 nt, Artificial Sequence
  Description of Artificial Sequence: Synthetic oligonucleotide
ccguacugccucugucaga

SEQ ID NO: 911992 - RNA, 19 nt, Artificial Sequence
  Description of Artificial Sequence: Synthetic oligonucleotide
ccggaacaucccgcccgcg

SEQ ID NO: 911993 - RNA, 19 nt, Artificial Sequence
  Description of Artificial Sequence: Synthetic oligonucleotide
ggugguguuuugggccgua

SEQ ID NO: 911994 - RNA, 19 nt, Artificial Sequence
  Description of Artificial Sequence: Synthetic oligonucleotide
cucggugggcuccgccggu

SEQ ID NO: 911995 - RNA, 19 nt, Artificial Sequence
  Description of Artificial Sequence: Synthetic oligonucleotide
cgguccccucacccaagag

SEQ ID NO: 911996 - RNA, 19 nt, Artificial Sequence
  Description of Artificial Sequence: Synthetic oligonucleotide
cgcgguccccucacccaag

SEQ ID NO: 911997 - RNA, 19 nt, Artificial Sequence
  Description of Artificial Sequence: Synthetic oligonucleotide
cccaaccaacugcucccaa

SEQ ID NO: 911998 - RNA, 19 nt, Artificial Sequence
  Description of Artificial Sequence: Synthetic oligonucleotide
ccgcgguccccucacccaa

SEQ ID NO: 911999 - RNA, 19 nt, Artificial Sequence
  Description of Artificial Sequence: Synthetic oligonucleotide
gggcuccgccggugacuug

SEQ ID NO: 912000 - RNA, 19 nt, Artificial Sequence
  Description of Artificial Sequence: Synthetic oligonucleotide
ccuuauugucugagcuguu

SEQ ID NO: 912001 - RNA, 19 nt, Artificial Sequence
  Description of Artificial Sequence: Synthetic oligonucleotide
gcuccgccggugacuugga

SEQ ID NO: 912002 - RNA, 19 nt, Artificial Sequence
  Description of Artificial Sequence: Synthetic oligonucleotide
cgccggugacuuggagugc

SEQ ID NO: 912003 - RNA, 19 nt, Artificial Sequence
  Description of Artificial Sequence: Synthetic oligonucleotide
cgagggcgaaucucaucuu

SEQ ID NO: 912004 - RNA, 19 nt, Artificial Sequence
  Description of Artificial Sequence: Synthetic oligonucleotide
ccgcgccgggcuggcccaa

SEQ ID NO: 912005 - RNA, 19 nt, Artificial Sequence
  Description of Artificial Sequence: Synthetic oligonucleotide
acuuuauagaaauauagag

SEQ ID NO: 912006 - RNA, 19 nt, Artificial Sequence
  Description of Artificial Sequence: Synthetic oligonucleotide
uguaugaaugaacaguugg

SEQ ID NO: 912007 - RNA, 19 nt, Artificial Sequence
  Description of Artificial Sequence: Synthetic oligonucleotide
uguucaaucugauuggucg

SEQ ID NO: 912008 - RNA, 19 nt, Artificial Sequence
  Description of Artificial Sequence: Synthetic oligonucleotide
auuguugcgauucauuggc

SEQ ID NO: 912009 - RNA, 19 nt, Artificial Sequence
  Description of Artificial Sequence: Synthetic oligonucleotide
aaugucuuccaguaccacc

SEQ ID NO: 912010 - RNA, 19 nt, Artificial Sequence
  Description of Artificial Sequence: Synthetic oligonucleotide
ugauugguaauucuuauug

SEQ ID NO: 912011 - RNA, 19 nt, Artificial Sequence
  Description of Artificial Sequence: Synthetic oligonucleotide
ugaaucuagaaacuuuucc

SEQ ID NO: 912012 - RNA, 19 nt, Artificial Sequence
  Description of Artificial Sequence: Synthetic oligonucleotide
aaauucuacagcccgucgg

SEQ ID NO: 912013 - RNA, 19 nt, Artificial Sequence
  Description of Artificial Sequence: Synthetic oligonucleotide
uuaggcgugaggaagaugu

SEQ ID NO: 912014 - RNA, 19 nt, Artificial Sequence
  Description of Artificial Sequence: Synthetic oligonucleotide
agagauaacuuagagacag

SEQ ID NO: 912015 - RNA, 19 nt, Artificial Sequence
  Description of Artificial Sequence: Synthetic oligonucleotide
ggaacaaugaaguugggcc

SEQ ID NO: 912016 - RNA, 19 nt, Artificial Sequence
  Description of Artificial Sequence: Synthetic oligonucleotide
ucgaguuaggggcugacgg

SEQ ID NO: 912017 - RNA, 19 nt, Artificial Sequence
  Description of Artificial Sequence: Synthetic oligonucleotide
uaagguuuggcuguagacg

SEQ ID NO: 912018 - RNA, 19 nt, Artificial Sequence
  Description of Artificial Sequence: Synthetic oligonucleotide
cuuuauagaaauauagaga

SEQ ID NO: 912019 - RNA, 19 nt, Artificial Sequence
  Description of Artificial Sequence: Synthetic oligonucleotide
cuagaaacuuuucccaugg

SEQ ID NO: 912020 - RNA, 19 nt, Artificial Sequence
  Description of Artificial Sequence: Synthetic oligonucleotide
uuuguuaggcgugaggaag

SEQ ID NO: 912021 - RNA, 19 nt, Artificial Sequence
  Description of Artificial Sequence: Synthetic oligonucleotide
auuucaugggaggugaugg

SEQ ID NO: 912022 - RNA, 19 nt, Artificial Sequence
  Description of Artificial Sequence: Synthetic oligonucleotide
aggcuuuuaacuccuuccc

SEQ ID NO: 912023 - RNA, 19 nt, Artificial Sequence
  Description of Artificial Sequence: Synthetic oligonucleotide
uccuuugaggcuuuuaacu

SEQ ID NO: 912024 - RNA, 19 nt, Artificial Sequence
  Description of Artificial Sequence: Synthetic oligonucleotide
aaggauguaugaaugaaca

SEQ ID NO: 912025 - RNA, 19 nt, Artificial Sequence
  Description of Artificial Sequence: Synthetic oligonucleotide
uggacgguuggaauggagg

SEQ ID NO: 912026 - RNA, 19 nt, Artificial Sequence
  Description of Artificial Sequence: Synthetic oligonucleotide
gaacaaugaaguugggccc

SEQ ID NO: 912027 - RNA, 19 nt, Artificial Sequence
  Description of Artificial Sequence: Synthetic oligonucleotide
aauucuacagcccgucgga

SEQ ID NO: 912028 - RNA, 19 nt, Artificial Sequence
  Description of Artificial Sequence: Synthetic oligonucleotide
aaucagagucccauugcgc

SEQ ID NO: 912029 - RNA, 19 nt, Artificial Sequence
  Description of Artificial Sequence: Synthetic oligonucleotide
ucugaaucuagaaacuuuu

SEQ ID NO: 912030 - RNA, 19 nt, Artificial Sequence
  Description of Artificial Sequence: Synthetic oligonucleotide
aggacuacggccaggacgc

SEQ ID NO: 912031 - RNA, 19 nt, Artificial Sequence
  Description of Artificial Sequence: Synthetic oligonucleotide
ucuagaaacuuuucccaug

SEQ ID NO: 912032 - RNA, 19 nt, Artificial Sequence
  Description of Artificial Sequence: Synthetic oligonucleotide
gauuggucgaggcagcccc

SEQ ID NO: 912033 - RNA, 19 nt, Artificial Sequence
  Description of Artificial Sequence: Synthetic oligonucleotide
ucggcacaaaugcaguggg

SEQ ID NO: 912034 - RNA, 19 nt, Artificial Sequence
  Description of Artificial Sequence: Synthetic oligonucleotide
gaaauucuacagcccgucg

SEQ ID NO: 912035 - RNA, 19 nt, Artificial Sequence
  Description of Artificial Sequence: Synthetic oligonucleotide
uaacgcaggugacugacug

SEQ ID NO: 912036 - RNA, 19 nt, Artificial Sequence
  Description of Artificial Sequence: Synthetic oligonucleotide
aguuggagcuccuagaguu

SEQ ID NO: 912037 - RNA, 19 nt, Artificial Sequence
  Description of Artificial Sequence: Synthetic oligonucleotide
gagguucuaguucucuggg

SEQ ID NO: 912038 - RNA, 19 nt, Artificial Sequence
  Description of Artificial Sequence: Synthetic oligonucleotide
uugguugaacccaaucugu

SEQ ID NO: 912039 - RNA, 19 nt, Artificial Sequence
  Description of Artificial Sequence: Synthetic oligonucleotide
ggaguaaggguccugcugg

SEQ ID NO: 912040 - RNA, 19 nt, Artificial Sequence
  Description of Artificial Sequence: Synthetic oligonucleotide
auagugcucgaguuagggg

SEQ ID NO: 912041 - RNA, 19 nt, Artificial Sequence
  Description of Artificial Sequence: Synthetic oligonucleotide
uuugaggcuuuuaacuccu

SEQ ID NO: 912042 - RNA, 19 nt, Artificial Sequence
  Description of Artificial Sequence: Synthetic oligonucleotide
uguagccacgacaucuucc

SEQ ID NO: 912043 - RNA, 19 nt, Artificial Sequence
  Description of Artificial Sequence: Synthetic oligonucleotide
uguaagguuuggcuguaga

SEQ ID NO: 912044 - RNA, 19 nt, Artificial Sequence
  Description of Artificial Sequence: Synthetic oligonucleotide
ucgcagaagaaggaagugg

SEQ ID NO: 912045 - RNA, 19 nt, Artificial Sequence
  Description of Artificial Sequence: Synthetic oligonucleotide
aaguugggaguaagggucc

SEQ ID NO: 912046 - RNA, 19 nt, Artificial Sequence
  Description of Artificial Sequence: Synthetic oligonucleotide
ucuaguugugggugauugg

SEQ ID NO: 912047 - RNA, 19 nt, Artificial Sequence
  Description of Artificial Sequence: Synthetic oligonucleotide
agaguggacgguuggaaug

SEQ ID NO: 912048 - RNA, 19 nt, Artificial Sequence
  Description of Artificial Sequence: Synthetic oligonucleotide
aauuucaugggaggugaug

SEQ ID NO: 912049 - RNA, 19 nt, Artificial Sequence
  Description of Artificial Sequence: Synthetic oligonucleotide
acaggaguccuccguauuc

SEQ ID NO: 912050 - RNA, 19 nt, Artificial Sequence
  Description of Artificial Sequence: Synthetic oligonucleotide
gucagcgaagcucucaagc

SEQ ID NO: 912051 - RNA, 19 nt, Artificial Sequence
  Description of Artificial Sequence: Synthetic oligonucleotide
aggauguaugaaugaacag

SEQ ID NO: 912052 - RNA, 19 nt, Artificial Sequence
  Description of Artificial Sequence: Synthetic oligonucleotide
uggucgacgggaucgaggc

SEQ ID NO: 912053 - RNA, 19 nt, Artificial Sequence
  Description of Artificial Sequence: Synthetic oligonucleotide
agauaacuuagagacaggu

SEQ ID NO: 912054 - RNA, 19 nt, Artificial Sequence
  Description of Artificial Sequence: Synthetic oligonucleotide
caaucugauuggucgaggc

SEQ ID NO: 912055 - RNA, 19 nt, Artificial Sequence
  Description of Artificial Sequence: Synthetic oligonucleotide
ggcguaaaaggcuggacgg

SEQ ID NO: 912056 - RNA, 19 nt, Artificial Sequence
  Description of Artificial Sequence: Synthetic oligonucleotide
ucagcgaagcucucaagcu

SEQ ID NO: 912057 - RNA, 19 nt, Artificial Sequence
  Description of Artificial Sequence: Synthetic oligonucleotide
gugaagggcucucugcugg

SEQ ID NO: 912058 - RNA, 19 nt, Artificial Sequence
  Description of Artificial Sequence: Synthetic oligonucleotide
ucccauugcgcucccgugg

SEQ ID NO: 912059 - RNA, 19 nt, Artificial Sequence
  Description of Artificial Sequence: Synthetic oligonucleotide
acgguguuggggucaaugg

SEQ ID NO: 912060 - RNA, 19 nt, Artificial Sequence
  Description of Artificial Sequence: Synthetic oligonucleotide
uggcugaugaacuuuuguc

SEQ ID NO: 912061 - RNA, 19 nt, Artificial Sequence
  Description of Artificial Sequence: Synthetic oligonucleotide
ugguugaacccaaucugug

SEQ ID NO: 912062 - RNA, 19 nt, Artificial Sequence
  Description of Artificial Sequence: Synthetic oligonucleotide
gugauggucgacgggaucg

SEQ ID NO: 912063 - RNA, 19 nt, Artificial Sequence
  Description of Artificial Sequence: Synthetic oligonucleotide
uguugcgauucauuggccu

SEQ ID NO: 912064 - RNA, 19 nt, Artificial Sequence
  Description of Artificial Sequence: Synthetic oligonucleotide
guuggaauggagguucuag

SEQ ID NO: 912065 - RNA, 19 nt, Artificial Sequence
  Description of Artificial Sequence: Synthetic oligonucleotide
gagcuccuagaguugacag

SEQ ID NO: 912066 - RNA, 19 nt, Artificial Sequence
  Description of Artificial Sequence: Synthetic oligonucleotide
ugguccaucuuuugugaag

SEQ ID NO: 912067 - RNA, 19 nt, Artificial Sequence
  Description of Artificial Sequence: Synthetic oligonucleotide
aacaaugaaguugggccca

SEQ ID NO: 912068 - RNA, 19 nt, Artificial Sequence
  Description of Artificial Sequence: Synthetic oligonucleotide
aucgaggcaugcuacuguc

SEQ ID NO: 912069 - RNA, 19 nt, Artificial Sequence
  Description of Artificial Sequence: Synthetic oligonucleotide
ugccaaguugggaguaagg

SEQ ID NO: 912070 - RNA, 19 nt, Artificial Sequence
  Description of Artificial Sequence: Synthetic oligonucleotide
auugcgcucccgugguucc

SEQ ID NO: 912071 - RNA, 19 nt, Artificial Sequence
  Description of Artificial Sequence: Synthetic oligonucleotide
gcuuggaucggacggaacg

SEQ ID NO: 912072 - RNA, 19 nt, Artificial Sequence
  Description of Artificial Sequence: Synthetic oligonucleotide
cugaugauuguugcgauuc

SEQ ID NO: 912073 - RNA, 19 nt, Artificial Sequence
  Description of Artificial Sequence: Synthetic oligonucleotide
uuguuaggcgugaggaaga

SEQ ID NO: 912074 - RNA, 19 nt, Artificial Sequence
  Description of Artificial Sequence: Synthetic oligonucleotide
ucaaucugauuggucgagg

SEQ ID NO: 912075 - RNA, 19 nt, Artificial Sequence
  Description of Artificial Sequence: Synthetic oligonucleotide
cuguagacggacaggaguc

SEQ ID NO: 912076 - RNA, 19 nt, Artificial Sequence
  Description of Artificial Sequence: Synthetic oligonucleotide
aaggguucucggcacaaau

SEQ ID NO: 912077 - RNA, 19 nt, Artificial Sequence
  Description of Artificial Sequence: Synthetic oligonucleotide
aggugcuagggaauugucc

SEQ ID NO: 912078 - RNA, 19 nt, Artificial Sequence
  Description of Artificial Sequence: Synthetic oligonucleotide
gaguggacgguuggaaugg

SEQ ID NO: 912079 - RNA, 19 nt, Artificial Sequence
  Description of Artificial Sequence: Synthetic oligonucleotide
guagcuucggcccagagau

SEQ ID NO: 912080 - RNA, 19 nt, Artificial Sequence
  Description of Artificial Sequence: Synthetic oligonucleotide
ggucuuuucgggcucuugg

SEQ ID NO: 912081 - RNA, 19 nt, Artificial Sequence
  Description of Artificial Sequence: Synthetic oligonucleotide
agacggacaggaguccucc

SEQ ID NO: 912082 - RNA, 19 nt, Artificial Sequence
  Description of Artificial Sequence: Synthetic oligonucleotide
ugaugauuguugcgauuca

SEQ ID NO: 912083 - RNA, 19 nt, Artificial Sequence
  Description of Artificial Sequence: Synthetic oligonucleotide
guugcgauucauuggccug

SEQ ID NO: 912084 - RNA, 19 nt, Artificial Sequence
  Description of Artificial Sequence: Synthetic oligonucleotide
agagauucuccccuccccu

SEQ ID NO: 912085 - RNA, 19 nt, Artificial Sequence
  Description of Artificial Sequence: Synthetic oligonucleotide
acuacggccaggacgcgcc

SEQ ID NO: 912086 - RNA, 19 nt, Artificial Sequence
  Description of Artificial Sequence: Synthetic oligonucleotide
cuuggaucggacggaacgg

SEQ ID NO: 912087 - RNA, 19 nt, Artificial Sequence
  Description of Artificial Sequence: Synthetic oligonucleotide
gaucggacggaacggaaga

SEQ ID NO: 912088 - RNA, 19 nt, Artificial Sequence
  Description of Artificial Sequence: Synthetic oligonucleotide
caaugggaccuccagaaca

SEQ ID NO: 912089 - RNA, 19 nt, Artificial Sequence
  Description of Artificial Sequence: Synthetic oligonucleotide
gguccaucuuuugugaagg

SEQ ID NO: 912090 - RNA, 19 nt, Artificial Sequence
  Description of Artificial Sequence: Synthetic oligonucleotide
aauuguccugaguccgcca

SEQ ID NO: 912091 - RNA, 19 nt, Artificial Sequence
  Description of Artificial Sequence: Synthetic oligonucleotide
ugcggaccccucgugaugg

SEQ ID NO: 912092 - RNA, 19 nt, Artificial Sequence
  Description of Artificial Sequence: Synthetic oligonucleotide
uggugcuuuguuaggcgug

SEQ ID NO: 912093 - RNA, 19 nt, Artificial Sequence
  Description of Artificial Sequence: Synthetic oligonucleotide
ugggaccuccagaacagga

SEQ ID NO: 912094 - RNA, 19 nt, Artificial Sequence
  Description of Artificial Sequence: Synthetic oligonucleotide
gauguaugaaugaacaguu

SEQ ID NO: 912095 - RNA, 19 nt, Artificial Sequence
  Description of Artificial Sequence: Synthetic oligonucleotide
gaggcaugcuacugucccg

SEQ ID NO: 912096 - RNA, 19 nt, Artificial Sequence
  Description of Artificial Sequence: Synthetic oligonucleotide
gucggaguuuccuagagcu

SEQ ID NO: 912097 - RNA, 19 nt, Artificial Sequence
  Description of Artificial Sequence: Synthetic oligonucleotide
gagauaacuuagagacagg

SEQ ID NO: 912098 - RNA, 19 nt, Artificial Sequence
  Description of Artificial Sequence: Synthetic oligonucleotide
gucuuuucgggcucuuggc

SEQ ID NO: 912099 - RNA, 19 nt, Artificial Sequence
  Description of Artificial Sequence: Synthetic oligonucleotide
uugaacccaaucuguguuc

SEQ ID NO: 912100 - RNA, 19 nt, Artificial Sequence
  Description of Artificial Sequence: Synthetic oligonucleotide
aggagcaaggcaucuaguu

SEQ ID NO: 912101 - RNA, 19 nt, Artificial Sequence
  Description of Artificial Sequence: Synthetic oligonucleotide
ugaacccaaucuguguucu

SEQ ID NO: 912102 - RNA, 19 nt, Artificial Sequence
  Description of Artificial Sequence: Synthetic oligonucleotide
uuguugcgauucauuggcc

SEQ ID NO: 912103 - RNA, 19 nt, Artificial Sequence
  Description of Artificial Sequence: Synthetic oligonucleotide
ugaagggcucucugcuggg

SEQ ID NO: 912104 - RNA, 19 nt, Artificial Sequence
  Description of Artificial Sequence: Synthetic oligonucleotide
agccucggucuuuucgggc

SEQ ID NO: 912105 - RNA, 19 nt, Artificial Sequence
  Description of Artificial Sequence: Synthetic oligonucleotide
gaauuguccugaguccgcc

SEQ ID NO: 912106 - RNA, 19 nt, Artificial Sequence
  Description of Artificial Sequence: Synthetic oligonucleotide
cacaaaugcagugggucag

SEQ ID NO: 912107 - RNA, 19 nt, Artificial Sequence
  Description of Artificial Sequence: Synthetic oligonucleotide
guaauucuuauugguauaa

SEQ ID NO: 912108 - RNA, 19 nt, Artificial Sequence
  Description of Artificial Sequence: Synthetic oligonucleotide
aggacgaaggggucccuag

SEQ ID NO: 912109 - RNA, 19 nt, Artificial Sequence
  Description of Artificial Sequence: Synthetic oligonucleotide
cccgaaauucuacagcccg

SEQ ID NO: 912110 - RNA, 19 nt, Artificial Sequence
  Description of Artificial Sequence: Synthetic oligonucleotide
aacuuuugucauaggcuca

SEQ ID NO: 912111 - RNA, 19 nt, Artificial Sequence
  Description of Artificial Sequence: Synthetic oligonucleotide
ugcuagggaauuguccuga

SEQ ID NO: 912112 - RNA, 19 nt, Artificial Sequence
  Description of Artificial Sequence: Synthetic oligonucleotide
cagagauucuccccucccc

SEQ ID NO: 912113 - RNA, 19 nt, Artificial Sequence
  Description of Artificial Sequence: Synthetic oligonucleotide
gauccagagauucuccccu

SEQ ID NO: 912114 - RNA, 19 nt, Artificial Sequence
  Description of Artificial Sequence: Synthetic oligonucleotide
acuugacuugcuggggugg

SEQ ID NO: 912115 - RNA, 19 nt, Artificial Sequence
  Description of Artificial Sequence: Synthetic oligonucleotide
uguagacggacaggagucc

SEQ ID NO: 912116 - RNA, 19 nt, Artificial Sequence
  Description of Artificial Sequence: Synthetic oligonucleotide
guucaaucugauuggucga

SEQ ID NO: 912117 - RNA, 19 nt, Artificial Sequence
  Description of Artificial Sequence: Synthetic oligonucleotide
ugggguccgggccaucucc

SEQ ID NO: 912118 - RNA, 19 nt, Artificial Sequence
  Description of Artificial Sequence: Synthetic oligonucleotide
aguagcccuggacugcuca

SEQ ID NO: 912119 - RNA, 19 nt, Artificial Sequence
  Description of Artificial Sequence: Synthetic oligonucleotide
gacgguguuggggucaaug

SEQ ID NO: 912120 - RNA, 19 nt, Artificial Sequence
  Description of Artificial Sequence: Synthetic oligonucleotide
agaguccugaugauuguug

SEQ ID NO: 912121 - RNA, 19 nt, Artificial Sequence
  Description of Artificial Sequence: Synthetic oligonucleotide
gagauucuccccuccccug

SEQ ID NO: 912122 - RNA, 19 nt, Artificial Sequence
  Description of Artificial Sequence: Synthetic oligonucleotide
ucuaguucucuggguguag

SEQ ID NO: 912123 - RNA, 19 nt, Artificial Sequence
  Description of Artificial Sequence: Synthetic oligonucleotide
auccagagauucuccccuc

SEQ ID NO: 912124 - RNA, 19 nt, Artificial Sequence
  Description of Artificial Sequence: Synthetic oligonucleotide
agucccauugcgcucccgu

SEQ ID NO: 912125 - RNA, 19 nt, Artificial Sequence
  Description of Artificial Sequence: Synthetic oligonucleotide
ucgaggcaugcuacugucc

SEQ ID NO: 912126 - RNA, 19 nt, Artificial Sequence
  Description of Artificial Sequence: Synthetic oligonucleotide
gcaagauguagugagagaa

SEQ ID NO: 912127 - RNA, 19 nt, Artificial Sequence
  Description of Artificial Sequence: Synthetic oligonucleotide
acagaguccugaugauugu

SEQ ID NO: 912128 - RNA, 19 nt, Artificial Sequence
  Description of Artificial Sequence: Synthetic oligonucleotide
uguuuguagccacgacauc

SEQ ID NO: 912129 - RNA, 19 nt, Artificial Sequence
  Description of Artificial Sequence: Synthetic oligonucleotide
gguucgcagaagaaggaag

SEQ ID NO: 912130 - RNA, 19 nt, Artificial Sequence
  Description of Artificial Sequence: Synthetic oligonucleotide
ugugggugauugguaauuc

SEQ ID NO: 912131 - RNA, 19 nt, Artificial Sequence
  Description of Artificial Sequence: Synthetic oligonucleotide
ugauuggucgaggcagccc

SEQ ID NO: 912132 - RNA, 19 nt, Artificial Sequence
  Description of Artificial Sequence: Synthetic oligonucleotide
auguaugaaugaacaguug

SEQ ID NO: 912133 - RNA, 19 nt, Artificial Sequence
  Description of Artificial Sequence: Synthetic oligonucleotide
gaagcucucaagcuuggau

SEQ ID NO: 912134 - RNA, 19 nt, Artificial Sequence
  Description of Artificial Sequence: Synthetic oligonucleotide
gucuccggggccuggacug

SEQ ID NO: 912135 - RNA, 19 nt, Artificial Sequence
  Description of Artificial Sequence: Synthetic oligonucleotide
ggauguaugaaugaacagu

SEQ ID NO: 912136 - RNA, 19 nt, Artificial Sequence
  Description of Artificial Sequence: Synthetic oligonucleotide
agccccauugguguaaggu

SEQ ID NO: 912137 - RNA, 19 nt, Artificial Sequence
  Description of Artificial Sequence: Synthetic oligonucleotide
gcuuuguuaggcgugagga

SEQ ID NO: 912138 - RNA, 19 nt, Artificial Sequence
  Description of Artificial Sequence: Synthetic oligonucleotide
gaguuaggggcugacggca

SEQ ID NO: 912139 - RNA, 19 nt, Artificial Sequence
  Description of Artificial Sequence: Synthetic oligonucleotide
ucggacggaacggaagaga

SEQ ID NO: 912140 - RNA, 19 nt, Artificial Sequence
  Description of Artificial Sequence: Synthetic oligonucleotide
ugucuccggggccuggacu

SEQ ID NO: 912141 - RNA, 19 nt, Artificial Sequence
  Description of Artificial Sequence: Synthetic oligonucleotide
ggugcuagggaauuguccu

SEQ ID NO: 912142 - RNA, 19 nt, Artificial Sequence
  Description of Artificial Sequence: Synthetic oligonucleotide
agguucuaguucucugggu

SEQ ID NO: 912143 - RNA, 19 nt, Artificial Sequence
  Description of Artificial Sequence: Synthetic oligonucleotide
uugacagggguguucccua

SEQ ID NO: 912144 - RNA, 19 nt, Artificial Sequence
  Description of Artificial Sequence: Synthetic oligonucleotide
gaucuggggcugguagugg

SEQ ID NO: 912145 - RNA, 19 nt, Artificial Sequence
  Description of Artificial Sequence: Synthetic oligonucleotide
uuggaucggacggaacgga

SEQ ID NO: 912146 - RNA, 19 nt, Artificial Sequence
  Description of Artificial Sequence: Synthetic oligonucleotide
guccuucuaguugugggug

SEQ ID NO: 912147 - RNA, 19 nt, Artificial Sequence
  Description of Artificial Sequence: Synthetic oligonucleotide
gacggacaggaguccuccg

SEQ ID NO: 912148 - RNA, 19 nt, Artificial Sequence
  Description of Artificial Sequence: Synthetic oligonucleotide
ccuaucuaucuccuccucc

SEQ ID NO: 912149 - RNA, 19 nt, Artificial Sequence
  Description of Artificial Sequence: Synthetic oligonucleotide
auggucgacgggaucgagg

SEQ ID NO: 912150 - RNA, 19 nt, Artificial Sequence
  Description of Artificial Sequence: Synthetic oligonucleotide
cucucaguagcccuggacu

SEQ ID NO: 912151 - RNA, 19 nt, Artificial Sequence
  Description of Artificial Sequence: Synthetic oligonucleotide
uagccacgacaucuuccag

SEQ ID NO: 912152 - RNA, 19 nt, Artificial Sequence
  Description of Artificial Sequence: Synthetic oligonucleotide
ugguucgcagaagaaggaa

SEQ ID NO: 912153 - RNA, 19 nt, Artificial Sequence
  Description of Artificial Sequence: Synthetic oligonucleotide
cucgugauggucgacggga

SEQ ID NO: 912154 - RNA, 19 nt, Artificial Sequence
  Description of Artificial Sequence: Synthetic oligonucleotide
uugugggugauugguaauu

SEQ ID NO: 912155 - RNA, 19 nt, Artificial Sequence
  Description of Artificial Sequence: Synthetic oligonucleotide
ggucgaggcagccccauug

SEQ ID NO: 912156 - RNA, 19 nt, Artificial Sequence
  Description of Artificial Sequence: Synthetic oligonucleotide
uagacggacaggaguccuc

SEQ ID NO: 912157 - RNA, 19 nt, Artificial Sequence
  Description of Artificial Sequence: Synthetic oligonucleotide
cucgaguuaggggcugacg

SEQ ID NO: 912158 - RNA, 19 nt, Artificial Sequence
  Description of Artificial Sequence: Synthetic oligonucleotide
cuuuguuaggcgugaggaa

SEQ ID NO: 912159 - RNA, 19 nt, Artificial Sequence
  Description of Artificial Sequence: Synthetic oligonucleotide
agugcggaccccucgugau

SEQ ID NO: 912160 - RNA, 19 nt, Artificial Sequence
  Description of Artificial Sequence: Synthetic oligonucleotide
aggaguccuccguauucug

SEQ ID NO: 912161 - RNA, 19 nt, Artificial Sequence
  Description of Artificial Sequence: Synthetic oligonucleotide
guugaacccaaucuguguu

SEQ ID NO: 912162 - RNA, 19 nt, Artificial Sequence
  Description of Artificial Sequence: Synthetic oligonucleotide
auucuacagcccgucggag

SEQ ID NO: 912163 - RNA, 19 nt, Artificial Sequence
  Description of Artificial Sequence: Synthetic oligonucleotide
augucuccggggccuggac

SEQ ID NO: 912164 - RNA, 19 nt, Artificial Sequence
  Description of Artificial Sequence: Synthetic oligonucleotide
aguuaggggcugacggcac

SEQ ID NO: 912165 - RNA, 19 nt, Artificial Sequence
  Description of Artificial Sequence: Synthetic oligonucleotide
acgggaucgaggcaugcua

SEQ ID NO: 912166 - RNA, 19 nt, Artificial Sequence
  Description of Artificial Sequence: Synthetic oligonucleotide
gugcuagggaauuguccug

SEQ ID NO: 912167 - RNA, 19 nt, Artificial Sequence
  Description of Artificial Sequence: Synthetic oligonucleotide
gggucaaugggaccuccag

SEQ ID NO: 912168 - RNA, 19 nt, Artificial Sequence
  Description of Artificial Sequence: Synthetic oligonucleotide
gaucgaggcaugcuacugu

SEQ ID NO: 912169 - RNA, 19 nt, Artificial Sequence
  Description of Artificial Sequence: Synthetic oligonucleotide
uccccuugguugaacccaa

SEQ ID NO: 912170 - RNA, 19 nt, Artificial Sequence
  Description of Artificial Sequence: Synthetic oligonucleotide
uucggcccagagauaacuu

SEQ ID NO: 912171 - RNA, 19 nt, Artificial Sequence
  Description of Artificial Sequence: Synthetic oligonucleotide
ggcucaaggguucucggca

SEQ ID NO: 912172 - RNA, 19 nt, Artificial Sequence
  Description of Artificial Sequence: Synthetic oligonucleotide
gcaauucucucaguagccc

SEQ ID NO: 912173 - RNA, 19 nt, Artificial Sequence
  Description of Artificial Sequence: Synthetic oligonucleotide
ggacgaaggggucccuagg

SEQ ID NO: 912174 - RNA, 19 nt, Artificial Sequence
  Description of Artificial Sequence: Synthetic oligonucleotide
ugguaacgcaggugacuga

SEQ ID NO: 912175 - RNA, 19 nt, Artificial Sequence
  Description of Artificial Sequence: Synthetic oligonucleotide
ucgacgggaucgaggcaug

SEQ ID NO: 912176 - RNA, 19 nt, Artificial Sequence
  Description of Artificial Sequence: Synthetic oligonucleotide
aucggacggaacggaagag

SEQ ID NO: 912177 - RNA, 19 nt, Artificial Sequence
  Description of Artificial Sequence: Synthetic oligonucleotide
cuagaguugacaggggugu

SEQ ID NO: 912178 - RNA, 19 nt, Artificial Sequence
  Description of Artificial Sequence: Synthetic oligonucleotide
cugguucgcagaagaagga

SEQ ID NO: 912179 - RNA, 19 nt, Artificial Sequence
  Description of Artificial Sequence: Synthetic oligonucleotide
cuucaaggugggagaggac

SEQ ID NO: 912180 - RNA, 19 nt, Artificial Sequence
  Description of Artificial Sequence: Synthetic oligonucleotide
gauggucgacgggaucgag

SEQ ID NO: 912181 - RNA, 19 nt, Artificial Sequence
  Description of Artificial Sequence: Synthetic oligonucleotide
ugcgauucauuggccuggc

SEQ ID NO: 912182 - RNA, 19 nt, Artificial Sequence
  Description of Artificial Sequence: Synthetic oligonucleotide
cauugcgcucccgugguuc

SEQ ID NO: 912183 - RNA, 19 nt, Artificial Sequence
  Description of Artificial Sequence: Synthetic oligonucleotide
ucgugauggucgacgggau

SEQ ID NO: 912184 - RNA, 19 nt, Artificial Sequence
  Description of Artificial Sequence: Synthetic oligonucleotide
uguuaggcgugaggaagau

SEQ ID NO: 912185 - RNA, 19 nt, Artificial Sequence
  Description of Artificial Sequence: Synthetic oligonucleotide
ugauggucgacgggaucga

SEQ ID NO: 912186 - RNA, 19 nt, Artificial Sequence
  Description of Artificial Sequence: Synthetic oligonucleotide
uaugucuccggggccugga

SEQ ID NO: 912187 - RNA, 19 nt, Artificial Sequence
  Description of Artificial Sequence: Synthetic oligonucleotide
aggacugguggguccggcu

SEQ ID NO: 912188 - RNA, 19 nt, Artificial Sequence
  Description of Artificial Sequence: Synthetic oligonucleotide
uaggcgugaggaagauguc

SEQ ID NO: 912189 - RNA, 19 nt, Artificial Sequence
  Description of Artificial Sequence: Synthetic oligonucleotide
uacagcuaccugggccagg

SEQ ID NO: 912190 - RNA, 19 nt, Artificial Sequence
  Description of Artificial Sequence: Synthetic oligonucleotide
guucgcagaagaaggaagu

SEQ ID NO: 912191 - RNA, 19 nt, Artificial Sequence
  Description of Artificial Sequence: Synthetic oligonucleotide
gucccauugcgcucccgug

SEQ ID NO: 912192 - RNA, 19 nt, Artificial Sequence
  Description of Artificial Sequence: Synthetic oligonucleotide
agugcucgaguuaggggcu

SEQ ID NO: 912193 - RNA, 19 nt, Artificial Sequence
  Description of Artificial Sequence: Synthetic oligonucleotide
ggaucggacggaacggaag

SEQ ID NO: 912194 - RNA, 19 nt, Artificial Sequence
  Description of Artificial Sequence: Synthetic oligonucleotide
gacuacggccaggacgcgc

SEQ ID NO: 912195 - RNA, 19 nt, Artificial Sequence
  Description of Artificial Sequence: Synthetic oligonucleotide
ggucccuaggggcugcagc

SEQ ID NO: 912196 - RNA, 19 nt, Artificial Sequence
  Description of Artificial Sequence: Synthetic oligonucleotide
gugccaaguugggaguaag

SEQ ID NO: 912197 - RNA, 19 nt, Artificial Sequence
  Description of Artificial Sequence: Synthetic oligonucleotide
aguccuccguauucugaau

SEQ ID NO: 912198 - RNA, 19 nt, Artificial Sequence
  Description of Artificial Sequence: Synthetic oligonucleotide
gcuguagacggacaggagu

SEQ ID NO: 912199 - RNA, 19 nt, Artificial Sequence
  Description of Artificial Sequence: Synthetic oligonucleotide
ccacaguaugucuccgggg

SEQ ID NO: 912200 - RNA, 19 nt, Artificial Sequence
  Description of Artificial Sequence: Synthetic oligonucleotide
ggaacggaagagaggggcc

SEQ ID NO: 912201 - RNA, 19 nt, Artificial Sequence
  Description of Artificial Sequence: Synthetic oligonucleotide
aacccucagcugguugucu

SEQ ID NO: 912202 - RNA, 19 nt, Artificial Sequence
  Description of Artificial Sequence: Synthetic oligonucleotide
cgaggcaugcuacuguccc

SEQ ID NO: 912203 - RNA, 19 nt, Artificial Sequence
  Description of Artificial Sequence: Synthetic oligonucleotide
caacuccaauuucauggga

SEQ ID NO: 912204 - RNA, 19 nt, Artificial Sequence
  Description of Artificial Sequence: Synthetic oligonucleotide
gaugauuguugcgauucau

SEQ ID NO: 912205 - RNA, 19 nt, Artificial Sequence
  Description of Artificial Sequence: Synthetic oligonucleotide
gguguucccuaucuaucuc

SEQ ID NO: 912206 - RNA, 19 nt, Artificial Sequence
  Description of Artificial Sequence: Synthetic oligonucleotide
guuaggcgugaggaagaug

SEQ ID NO: 912207 - RNA, 19 nt, Artificial Sequence
  Description of Artificial Sequence: Synthetic oligonucleotide
acgcaggugacugacugua

SEQ ID NO: 912208 - RNA, 19 nt, Artificial Sequence
  Description of Artificial Sequence: Synthetic oligonucleotide
ccgugguuccucaaagaug

SEQ ID NO: 912209 - RNA, 19 nt, Artificial Sequence
  Description of Artificial Sequence: Synthetic oligonucleotide
guggacgguuggaauggag

SEQ ID NO: 912210 - RNA, 19 nt, Artificial Sequence
  Description of Artificial Sequence: Synthetic oligonucleotide
cggacggaacggaagagag

SEQ ID NO: 912211 - RNA, 19 nt, Artificial Sequence
  Description of Artificial Sequence: Synthetic oligonucleotide
ggacggaacggaagagagg

SEQ ID NO: 912212 - RNA, 19 nt, Artificial Sequence
  Description of Artificial Sequence: Synthetic oligonucleotide
caggggcuguccuugaucu

SEQ ID NO: 912213 - RNA, 19 nt, Artificial Sequence
  Description of Artificial Sequence: Synthetic oligonucleotide
ggaucgaggcaugcuacug

SEQ ID NO: 912214 - RNA, 19 nt, Artificial Sequence
  Description of Artificial Sequence: Synthetic oligonucleotide
agcuuggaucggacggaac

SEQ ID NO: 912215 - RNA, 19 nt, Artificial Sequence
  Description of Artificial Sequence: Synthetic oligonucleotide
gcuagggaauuguccugag

SEQ ID NO: 912216 - RNA, 19 nt, Artificial Sequence
  Description of Artificial Sequence: Synthetic oligonucleotide
acuggcugaugaacuuuug

SEQ ID NO: 912217 - RNA, 19 nt, Artificial Sequence
  Description of Artificial Sequence: Synthetic oligonucleotide
agccguucuugcagcagag

SEQ ID NO: 912218 - RNA, 19 nt, Artificial Sequence
  Description of Artificial Sequence: Synthetic oligonucleotide
uacagcccgucggaguuuc

SEQ ID NO: 912219 - RNA, 19 nt, Artificial Sequence
  Description of Artificial Sequence: Synthetic oligonucleotide
ccagagauucuccccuccc

SEQ ID NO: 912220 - RNA, 19 nt, Artificial Sequence
  Description of Artificial Sequence: Synthetic oligonucleotide
ccccacaacccacaguaug

SEQ ID NO: 912221 - RNA, 19 nt, Artificial Sequence
  Description of Artificial Sequence: Synthetic oligonucleotide
cccauugguguaagguuug

SEQ ID NO: 912222 - RNA, 19 nt, Artificial Sequence
  Description of Artificial Sequence: Synthetic oligonucleotide
acccuguuuguagccacga

SEQ ID NO: 912223 - RNA, 19 nt, Artificial Sequence
  Description of Artificial Sequence: Synthetic oligonucleotide
aaggacgaaggggucccua

SEQ ID NO: 912224 - RNA, 19 nt, Artificial Sequence
  Description of Artificial Sequence: Synthetic oligonucleotide
gugggugauugguaauucu

SEQ ID NO: 912225 - RNA, 19 nt, Artificial Sequence
  Description of Artificial Sequence: Synthetic oligonucleotide
gaucagggcaggaguagcu

SEQ ID NO: 912226 - RNA, 19 nt, Artificial Sequence
  Description of Artificial Sequence: Synthetic oligonucleotide
cuggcugaugaacuuuugu

SEQ ID NO: 912227 - RNA, 19 nt, Artificial Sequence
  Description of Artificial Sequence: Synthetic oligonucleotide
gaaggggucccuaggggcu

SEQ ID NO: 912228 - RNA, 19 nt, Artificial Sequence
  Description of Artificial Sequence: Synthetic oligonucleotide
ggacgguuggaauggaggu

SEQ ID NO: 912229 - RNA, 19 nt, Artificial Sequence
  Description of Artificial Sequence: Synthetic oligonucleotide
uccccacaacccacaguau

SEQ ID NO: 912230 - RNA, 19 nt, Artificial Sequence
  Description of Artificial Sequence: Synthetic oligonucleotide
cgaguuaggggcugacggc

SEQ ID NO: 912231 - RNA, 19 nt, Artificial Sequence
  Description of Artificial Sequence: Synthetic oligonucleotide
cccucgugauggucgacgg

SEQ ID NO: 912232 - RNA, 19 nt, Artificial Sequence
  Description of Artificial Sequence: Synthetic oligonucleotide
gcccgucggaguuuccuag

SEQ ID NO: 912233 - RNA, 19 nt, Artificial Sequence
  Description of Artificial Sequence: Synthetic oligonucleotide
guacagcuaccugggccag

SEQ ID NO: 912234 - RNA, 19 nt, Artificial Sequence
  Description of Artificial Sequence: Synthetic oligonucleotide
gugcggaccccucgugaug

SEQ ID NO: 912235 - RNA, 19 nt, Artificial Sequence
  Description of Artificial Sequence: Synthetic oligonucleotide
cggaacggaagagaggggc

SEQ ID NO: 912236 - RNA, 19 nt, Artificial Sequence
  Description of Artificial Sequence: Synthetic oligonucleotide
ggguguucccuaucuaucu

SEQ ID NO: 912237 - RNA, 19 nt, Artificial Sequence
  Description of Artificial Sequence: Synthetic oligonucleotide
ccauagugcucgaguuagg

SEQ ID NO: 912238 - RNA, 19 nt, Artificial Sequence
  Description of Artificial Sequence: Synthetic oligonucleotide
cuacggccaggacgcgccg

SEQ ID NO: 912239 - RNA, 19 nt, Artificial Sequence
  Description of Artificial Sequence: Synthetic oligonucleotide
gcgccgagaggccuuuucc

SEQ ID NO: 912240 - RNA, 19 nt, Artificial Sequence
  Description of Artificial Sequence: Synthetic oligonucleotide
ugcucgaguuaggggcuga

SEQ ID NO: 912241 - RNA, 19 nt, Artificial Sequence
  Description of Artificial Sequence: Synthetic oligonucleotide
cguaaaaggcuggacggug

SEQ ID NO: 912242 - RNA, 19 nt, Artificial Sequence
  Description of Artificial Sequence: Synthetic oligonucleotide
aaggaccacuugacuugcu

SEQ ID NO: 912243 - RNA, 19 nt, Artificial Sequence
  Description of Artificial Sequence: Synthetic oligonucleotide
acaaugaaguugggcccau

SEQ ID NO: 912244 - RNA, 19 nt, Artificial Sequence
  Description of Artificial Sequence: Synthetic oligonucleotide
agcccgucggaguuuccua

SEQ ID NO: 912245 - RNA, 19 nt, Artificial Sequence
  Description of Artificial Sequence: Synthetic oligonucleotide
ccguauucugaaucuagaa

SEQ ID NO: 912246 - RNA, 19 nt, Artificial Sequence
  Description of Artificial Sequence: Synthetic oligonucleotide
gccaggacgcgccgagagg

SEQ ID NO: 912247 - RNA, 19 nt, Artificial Sequence
  Description of Artificial Sequence: Synthetic oligonucleotide
gggguguucccuaucuauc

SEQ ID NO: 912248 - RNA, 19 nt, Artificial Sequence
  Description of Artificial Sequence: Synthetic oligonucleotide
cagccccauugguguaagg

SEQ ID NO: 912249 - RNA, 19 nt, Artificial Sequence
  Description of Artificial Sequence: Synthetic oligonucleotide
gucgacgggaucgaggcau

SEQ ID NO: 912250 - RNA, 19 nt, Artificial Sequence
  Description of Artificial Sequence: Synthetic oligonucleotide
gggcugacagaugcaauuc

SEQ ID NO: 912251 - RNA, 19 nt, Artificial Sequence
  Description of Artificial Sequence: Synthetic oligonucleotide
cuucggcccagagauaacu

SEQ ID NO: 912252 - RNA, 19 nt, Artificial Sequence
  Description of Artificial Sequence: Synthetic oligonucleotide
cuagggaauuguccugagu

SEQ ID NO: 912253 - RNA, 19 nt, Artificial Sequence
  Description of Artificial Sequence: Synthetic oligonucleotide
cagugcggaccccucguga

SEQ ID NO: 912254 - RNA, 19 nt, Artificial Sequence
  Description of Artificial Sequence: Synthetic oligonucleotide
ccgucggaguuuccuagag

SEQ ID NO: 912255 - RNA, 19 nt, Artificial Sequence
  Description of Artificial Sequence: Synthetic oligonucleotide
uccuuccccuugguugaac

SEQ ID NO: 912256 - RNA, 19 nt, Artificial Sequence
  Description of Artificial Sequence: Synthetic oligonucleotide
aggacgcgccgagaggccu

SEQ ID NO: 912257 - RNA, 19 nt, Artificial Sequence
  Description of Artificial Sequence: Synthetic oligonucleotide
ggcuggacgguguuggggu

SEQ ID NO: 912258 - RNA, 19 nt, Artificial Sequence
  Description of Artificial Sequence: Synthetic oligonucleotide
gagucccauugcgcucccg

SEQ ID NO: 912259 - RNA, 19 nt, Artificial Sequence
  Description of Artificial Sequence: Synthetic oligonucleotide
auuggucgaggcagcccca

SEQ ID NO: 912260 - RNA, 19 nt, Artificial Sequence
  Description of Artificial Sequence: Synthetic oligonucleotide
ccggcucaaggguucucgg

SEQ ID NO: 912261 - RNA, 19 nt, Artificial Sequence
  Description of Artificial Sequence: Synthetic oligonucleotide
gcgaagcucucaagcuugg

SEQ ID NO: 912262 - RNA, 19 nt, Artificial Sequence
  Description of Artificial Sequence: Synthetic oligonucleotide
guagacggacaggaguccu

SEQ ID NO: 912263 - RNA, 19 nt, Artificial Sequence
  Description of Artificial Sequence: Synthetic oligonucleotide
ccucgugauggucgacggg

SEQ ID NO: 912264 - RNA, 19 nt, Artificial Sequence
  Description of Artificial Sequence: Synthetic oligonucleotide
ccccucgugauggucgacg

SEQ ID NO: 912265 - RNA, 19 nt, Artificial Sequence
  Description of Artificial Sequence: Synthetic oligonucleotide
uacggccaggacgcgccga

SEQ ID NO: 912266 - RNA, 19 nt, Artificial Sequence
  Description of Artificial Sequence: Synthetic oligonucleotide
gaguuuccuagagcuggua

SEQ ID NO: 912267 - RNA, 19 nt, Artificial Sequence
  Description of Artificial Sequence: Synthetic oligonucleotide
gccguucuugcagcagagg

SEQ ID NO: 912268 - RNA, 19 nt, Artificial Sequence
  Description of Artificial Sequence: Synthetic oligonucleotide
acagcccgucggaguuucc

SEQ ID NO: 912269 - RNA, 19 nt, Artificial Sequence
  Description of Artificial Sequence: Synthetic oligonucleotide
ggugguaacgcaggugacu

SEQ ID NO: 912270 - RNA, 19 nt, Artificial Sequence
  Description of Artificial Sequence: Synthetic oligonucleotide
cuggacgguguugggguca

SEQ ID NO: 912271 - RNA, 19 nt, Artificial Sequence
  Description of Artificial Sequence: Synthetic oligonucleotide
cgggaucgaggcaugcuac

SEQ ID NO: 912272 - RNA, 19 nt, Artificial Sequence
  Description of Artificial Sequence: Synthetic oligonucleotide
gacgggaucgaggcaugcu

SEQ ID NO: 912273 - RNA, 19 nt, Artificial Sequence
  Description of Artificial Sequence: Synthetic oligonucleotide
cgucggaguuuccuagagc

SEQ ID NO: 912274 - RNA, 19 nt, Artificial Sequence
  Description of Artificial Sequence: Synthetic oligonucleotide
cccacaacccacaguaugu

SEQ ID NO: 912275 - RNA, 19 nt, Artificial Sequence
  Description of Artificial Sequence: Synthetic oligonucleotide
ggggcugacagaugcaauu

SEQ ID NO: 912276 - RNA, 19 nt, Artificial Sequence
  Description of Artificial Sequence: Synthetic oligonucleotide
caguuggagcuccuagagu

SEQ ID NO: 912277 - RNA, 19 nt, Artificial Sequence
  Description of Artificial Sequence: Synthetic oligonucleotide
gugcucgaguuaggggcug

SEQ ID NO: 912278 - RNA, 19 nt, Artificial Sequence
  Description of Artificial Sequence: Synthetic oligonucleotide
accccucgugauggucgac

SEQ ID NO: 912279 - RNA, 19 nt, Artificial Sequence
  Description of Artificial Sequence: Synthetic oligonucleotide
caggaguccuccguauucu

SEQ ID NO: 912280 - RNA, 19 nt, Artificial Sequence
  Description of Artificial Sequence: Synthetic oligonucleotide
ccguucuugcagcagaggu

SEQ ID NO: 912281 - RNA, 19 nt, Artificial Sequence
  Description of Artificial Sequence: Synthetic oligonucleotide
gcaugcuacugucccgaaa

SEQ ID NO: 912282 - RNA, 19 nt, Artificial Sequence
  Description of Artificial Sequence: Synthetic oligonucleotide
ggguccgggccaucucccc

SEQ ID NO: 912283 - RNA, 19 nt, Artificial Sequence
  Description of Artificial Sequence: Synthetic oligonucleotide
cagcgaagcucucaagcuu

SEQ ID NO: 912284 - RNA, 19 nt, Artificial Sequence
  Description of Artificial Sequence: Synthetic oligonucleotide
cuugacuugcugggguggu

SEQ ID NO: 912285 - RNA, 19 nt, Artificial Sequence
  Description of Artificial Sequence: Synthetic oligonucleotide
guaacgcaggugacugacu

SEQ ID NO: 912286 - RNA, 19 nt, Artificial Sequence
  Description of Artificial Sequence: Synthetic oligonucleotide
cggcucaaggguucucggc

SEQ ID NO: 912287 - RNA, 19 nt, Artificial Sequence
  Description of Artificial Sequence: Synthetic oligonucleotide
cuccggggccuggacuggc

SEQ ID NO: 912288 - RNA, 19 nt, Artificial Sequence
  Description of Artificial Sequence: Synthetic oligonucleotide
caccuccaagagggaagac

SEQ ID NO: 912289 - RNA, 19 nt, Artificial Sequence
  Description of Artificial Sequence: Synthetic oligonucleotide
gggaucgaggcaugcuacu

SEQ ID NO: 912290 - RNA, 19 nt, Artificial Sequence
  Description of Artificial Sequence: Synthetic oligonucleotide
gcuggacgguguugggguc

SEQ ID NO: 912291 - RNA, 19 nt, Artificial Sequence
  Description of Artificial Sequence: Synthetic oligonucleotide
caaggguucucggcacaaa

SEQ ID NO: 912292 - RNA, 19 nt, Artificial Sequence
  Description of Artificial Sequence: Synthetic oligonucleotide
gggugguaacgcaggugac

SEQ ID NO: 912293 - RNA, 19 nt, Artificial Sequence
  Description of Artificial Sequence: Synthetic oligonucleotide
cagggguguucccuaucua

SEQ ID NO: 912294 - RNA, 19 nt, Artificial Sequence
  Description of Artificial Sequence: Synthetic oligonucleotide
ggugccaaguugggaguaa

SEQ ID NO: 912295 - RNA, 19 nt, Artificial Sequence
  Description of Artificial Sequence: Synthetic oligonucleotide
ggucgacgggaucgaggca

SEQ ID NO: 912296 - RNA, 19 nt, Artificial Sequence
  Description of Artificial Sequence: Synthetic oligonucleotide
ggacaggaguccuccguau

SEQ ID NO: 912297 - RNA, 19 nt, Artificial Sequence
  Description of Artificial Sequence: Synthetic oligonucleotide
cugguggguccggcucaag

SEQ ID NO: 912298 - RNA, 19 nt, Artificial Sequence
  Description of Artificial Sequence: Synthetic oligonucleotide
cgugauggucgacgggauc

SEQ ID NO: 912299 - RNA, 19 nt, Artificial Sequence
  Description of Artificial Sequence: Synthetic oligonucleotide
ggacuacggccaggacgcg

SEQ ID NO: 912300 - RNA, 19 nt, Artificial Sequence
  Description of Artificial Sequence: Synthetic oligonucleotide
ccccauugguguaagguuu

SEQ ID NO: 912301 - RNA, 19 nt, Artificial Sequence
  Description of Artificial Sequence: Synthetic oligonucleotide
gcucgaguuaggggcugac

SEQ ID NO: 912302 - RNA, 19 nt, Artificial Sequence
  Description of Artificial Sequence: Synthetic oligonucleotide
ggggucaaugggaccucca

SEQ ID NO: 912303 - RNA, 19 nt, Artificial Sequence
  Description of Artificial Sequence: Synthetic oligonucleotide
ggcaugcuacugucccgaa

SEQ ID NO: 912304 - RNA, 19 nt, Artificial Sequence
  Description of Artificial Sequence: Synthetic oligonucleotide
gcgauucauuggccuggca

SEQ ID NO: 912305 - RNA, 19 nt, Artificial Sequence
  Description of Artificial Sequence: Synthetic oligonucleotide
gguuggaauggagguucua

SEQ ID NO: 912306 - RNA, 19 nt, Artificial Sequence
  Description of Artificial Sequence: Synthetic oligonucleotide
gcguaaaaggcuggacggu

SEQ ID NO: 912307 - RNA, 19 nt, Artificial Sequence
  Description of Artificial Sequence: Synthetic oligonucleotide
cagaguccugaugauuguu

SEQ ID NO: 912308 - RNA, 19 nt, Artificial Sequence
  Description of Artificial Sequence: Synthetic oligonucleotide
gcuucggcccagagauaac

SEQ ID NO: 912309 - RNA, 19 nt, Artificial Sequence
  Description of Artificial Sequence: Synthetic oligonucleotide
cgccgagaggccuuuucca

SEQ ID NO: 912310 - RNA, 19 nt, Artificial Sequence
  Description of Artificial Sequence: Synthetic oligonucleotide
cccgucggaguuuccuaga

SEQ ID NO: 912311 - RNA, 19 nt, Artificial Sequence
  Description of Artificial Sequence: Synthetic oligonucleotide
gggucccuaggggcugcag

SEQ ID NO: 912312 - RNA, 19 nt, Artificial Sequence
  Description of Artificial Sequence: Synthetic oligonucleotide
cagcccgucggaguuuccu

SEQ ID NO: 912313 - RNA, 19 nt, Artificial Sequence
  Description of Artificial Sequence: Synthetic oligonucleotide
aguccgccacuggcggaua

SEQ ID NO: 912314 - RNA, 19 nt, Artificial Sequence
  Description of Artificial Sequence: Synthetic oligonucleotide
gggugccaaguugggagua

SEQ ID NO: 912315 - RNA, 19 nt, Artificial Sequence
  Description of Artificial Sequence: Synthetic oligonucleotide
cccauugcgcucccguggu

SEQ ID NO: 912316 - RNA, 19 nt, Artificial Sequence
  Description of Artificial Sequence: Synthetic oligonucleotide
ccuccguauucugaaucua

SEQ ID NO: 912317 - RNA, 19 nt, Artificial Sequence
  Description of Artificial Sequence: Synthetic oligonucleotide
cgcgccgagaggccuuuuc

SEQ ID NO: 912318 - RNA, 19 nt, Artificial Sequence
  Description of Artificial Sequence: Synthetic oligonucleotide
cggacaggaguccuccgua

SEQ ID NO: 912319 - RNA, 19 nt, Artificial Sequence
  Description of Artificial Sequence: Synthetic oligonucleotide
cgacgggaucgaggcaugc

SEQ ID NO: 912320 - RNA, 19 nt, Artificial Sequence
  Description of Artificial Sequence: Synthetic oligonucleotide
gacgcgccgagaggccuuu

SEQ ID NO: 912321 - RNA, 19 nt, Artificial Sequence
  Description of Artificial Sequence: Synthetic oligonucleotide
gggcugguagugggcucuc

SEQ ID NO: 912322 - RNA, 19 nt, Artificial Sequence
  Description of Artificial Sequence: Synthetic oligonucleotide
gguccggcucaaggguucu

SEQ ID NO: 912323 - RNA, 19 nt, Artificial Sequence
  Description of Artificial Sequence: Synthetic oligonucleotide
gccccagaucagggcagga

SEQ ID NO: 912324 - RNA, 19 nt, Artificial Sequence
  Description of Artificial Sequence: Synthetic oligonucleotide
acgcgccgagaggccuuuu

SEQ ID NO: 912325 - RNA, 19 nt, Artificial Sequence
  Description of Artificial Sequence: Synthetic oligonucleotide
gcggaccccucgugauggu

SEQ ID NO: 912326 - RNA, 19 nt, Artificial Sequence
  Description of Artificial Sequence: Synthetic oligonucleotide
ggacgcgccgagaggccuu

SEQ ID NO: 912327 - RNA, 19 nt, Artificial Sequence
  Description of Artificial Sequence: Synthetic oligonucleotide
ccauugcgcucccgugguu

SEQ ID NO: 912328 - RNA, 19 nt, Artificial Sequence
  Description of Artificial Sequence: Synthetic oligonucleotide
ggacgguguuggggucaau

SEQ ID NO: 912329 - RNA, 19 nt, Artificial Sequence
  Description of Artificial Sequence: Synthetic oligonucleotide
ugguggaugaauuauaagg

SEQ ID NO: 912330 - RNA, 19 nt, Artificial Sequence
  Description of Artificial Sequence: Synthetic oligonucleotide
gaagucagaggcuugaucg

SEQ ID NO: 912331 - RNA, 19 nt, Artificial Sequence
  Description of Artificial Sequence: Synthetic oligonucleotide
auagaucaaaaguucaacc

SEQ ID NO: 912332 - RNA, 19 nt, Artificial Sequence
  Description of Artificial Sequence: Synthetic oligonucleotide
ugaagcaugacauuaaugu

SEQ ID NO: 912333 - RNA, 19 nt, Artificial Sequence
  Description of Artificial Sequence: Synthetic oligonucleotide
guuacagggaacuuuaagg

SEQ ID NO: 912334 - RNA, 19 nt, Artificial Sequence
  Description of Artificial Sequence: Synthetic oligonucleotide
uuaauaaguuuauauacug

SEQ ID NO: 912335 - RNA, 19 nt, Artificial Sequence
  Description of Artificial Sequence: Synthetic oligonucleotide
uucgguugcacuauaaucc

SEQ ID NO: 912336 - RNA, 19 nt, Artificial Sequence
  Description of Artificial Sequence: Synthetic oligonucleotide
aauauuuggugcuacccag

SEQ ID NO: 912337 - RNA, 19 nt, Artificial Sequence
  Description of Artificial Sequence: Synthetic oligonucleotide
acuacaagcgcuuacaacu

SEQ ID NO: 912338 - RNA, 19 nt, Artificial Sequence
  Description of Artificial Sequence: Synthetic oligonucleotide
uguuuuaauuuguagaccu

SEQ ID NO: 912339 - RNA, 19 nt, Artificial Sequence
  Description of Artificial Sequence: Synthetic oligonucleotide
aauuuguagaccucuauau

SEQ ID NO: 912340 - RNA, 19 nt, Artificial Sequence
  Description of Artificial Sequence: Synthetic oligonucleotide
uauaaucccaccuugugug

SEQ ID NO: 912341 - RNA, 19 nt, Artificial Sequence
  Description of Artificial Sequence: Synthetic oligonucleotide
gaguaauaucuguagaagg

SEQ ID NO: 912342 - RNA, 19 nt, Artificial Sequence
  Description of Artificial Sequence: Synthetic oligonucleotide
guauuuuacaacuccagcc

SEQ ID NO: 912343 - RNA, 19 nt, Artificial Sequence
  Description of Artificial Sequence: Synthetic oligonucleotide
ugcgauuuaaagaugccag

SEQ ID NO: 912344 - RNA, 19 nt, Artificial Sequence
  Description of Artificial Sequence: Synthetic oligonucleotide
auagucaugcgauuuaaag

SEQ ID NO: 912345 - RNA, 19 nt, Artificial Sequence
  Description of Artificial Sequence: Synthetic oligonucleotide
ucuuacucauucaucauug

SEQ ID NO: 912346 - RNA, 19 nt, Artificial Sequence
  Description of Artificial Sequence: Synthetic oligonucleotide
aaaguccagccauagauca

SEQ ID NO: 912347 - RNA, 19 nt, Artificial Sequence
  Description of Artificial Sequence: Synthetic oligonucleotide
aaauauuuggugcuaccca

SEQ ID NO: 912348 - RNA, 19 nt, Artificial Sequence
  Description of Artificial Sequence: Synthetic oligonucleotide
agucucguagaucuugucc

SEQ ID NO: 912349 - RNA, 19 nt, Artificial Sequence
  Description of Artificial Sequence: Synthetic oligonucleotide
uauucaugucacuacaagc

SEQ ID NO: 912350 - RNA, 19 nt, Artificial Sequence
  Description of Artificial Sequence: Synthetic oligonucleotide
accuuuucgauagucaugc

SEQ ID NO: 912351 - RNA, 19 nt, Artificial Sequence
  Description of Artificial Sequence: Synthetic oligonucleotide
ucaugcgauuuaaagaugc

SEQ ID NO: 912352 - RNA, 19 nt, Artificial Sequence
  Description of Artificial Sequence: Synthetic oligonucleotide
uccagccaaaccuaaauag

SEQ ID NO: 912353 - RNA, 19 nt, Artificial Sequence
  Description of Artificial Sequence: Synthetic oligonucleotide
agucaugcgauuuaaagau

SEQ ID NO: 912354 - RNA, 19 nt, Artificial Sequence
  Description of Artificial Sequence: Synthetic oligonucleotide
uuuucgauagucaugcgau

SEQ ID NO: 912355 - RNA, 19 nt, Artificial Sequence
  Description of Artificial Sequence: Synthetic oligonucleotide
uuacagggaacuuuaaggu

SEQ ID NO: 912356 - RNA, 19 nt, Artificial Sequence
  Description of Artificial Sequence: Synthetic oligonucleotide
aagauugugagcacugggg

SEQ ID NO: 912357 - RNA, 19 nt, Artificial Sequence
  Description of Artificial Sequence: Synthetic oligonucleotide
auaaguccuucucaucccc

SEQ ID NO: 912358 - RNA, 19 nt, Artificial Sequence
  Description of Artificial Sequence: Synthetic oligonucleotide
uaaauauuuggugcuaccc

SEQ ID NO: 912359 - RNA, 19 nt, Artificial Sequence
  Description of Artificial Sequence: Synthetic oligonucleotide
gaauauaucuacaggcugc

SEQ ID NO: 912360 - RNA, 19 nt, Artificial Sequence
  Description of Artificial Sequence: Synthetic oligonucleotide
cauacuacauacaucacca

SEQ ID NO: 912361 - RNA, 19 nt, Artificial Sequence
  Description of Artificial Sequence: Synthetic oligonucleotide
ugggaacucagauaagucc

SEQ ID NO: 912362 - RNA, 19 nt, Artificial Sequence
  Description of Artificial Sequence: Synthetic oligonucleotide
aaugaccuuuucgauaguc

SEQ ID NO: 912363 - RNA, 19 nt, Artificial Sequence
  Description of Artificial Sequence: Synthetic oligonucleotide
cucauguucauuacugagc

SEQ ID NO: 912364 - RNA, 19 nt, Artificial Sequence
  Description of Artificial Sequence: Synthetic oligonucleotide
cauacucuaaguacucagg

SEQ ID NO: 912365 - RNA, 19 nt, Artificial Sequence
  Description of Artificial Sequence: Synthetic oligonucleotide
guggaugaauuauaagggg

SEQ ID NO: 912366 - RNA, 19 nt, Artificial Sequence
  Description of Artificial Sequence: Synthetic oligonucleotide
uggagaaugggaugcauca

SEQ ID NO: 912367 - RNA, 19 nt, Artificial Sequence
  Description of Artificial Sequence: Synthetic oligonucleotide
acagaaggcguauucaugu

SEQ ID NO: 912368 - RNA, 19 nt, Artificial Sequence
  Description of Artificial Sequence: Synthetic oligonucleotide
ucauuacugagccucuuca

SEQ ID NO: 912369 - RNA, 19 nt, Artificial Sequence
  Description of Artificial Sequence: Synthetic oligonucleotide
ucuauuucuaacaccugaa

SEQ ID NO: 912370 - RNA, 19 nt, Artificial Sequence
  Description of Artificial Sequence: Synthetic oligonucleotide
uaacaagcagcugucaugc

SEQ ID NO: 912371 - RNA, 19 nt, Artificial Sequence
  Description of Artificial Sequence: Synthetic oligonucleotide
ucuacaggcugcuucaacu

SEQ ID NO: 912372 - RNA, 19 nt, Artificial Sequence
  Description of Artificial Sequence: Synthetic oligonucleotide
uagaccucuauauuucuca

SEQ ID NO: 912373 - RNA, 19 nt, Artificial Sequence
  Description of Artificial Sequence: Synthetic oligonucleotide
aguuacagggaacuuuaag

SEQ ID NO: 912374 - RNA, 19 nt, Artificial Sequence
  Description of Artificial Sequence: Synthetic oligonucleotide
agaguaauaucuguagaag

SEQ ID NO: 912375 - RNA, 19 nt, Artificial Sequence
  Description of Artificial Sequence: Synthetic oligonucleotide
ucuaacaccugaagaaagu

SEQ ID NO: 912376 - RNA, 19 nt, Artificial Sequence
  Description of Artificial Sequence: Synthetic oligonucleotide
uauuuggugcuacccagcc

SEQ ID NO: 912377 - RNA, 19 nt, Artificial Sequence
  Description of Artificial Sequence: Synthetic oligonucleotide
uacaucaccaagacaaguc

SEQ ID NO: 912378 - RNA, 19 nt, Artificial Sequence
  Description of Artificial Sequence: Synthetic oligonucleotide
ugugugguaagcauuuguc

SEQ ID NO: 912379 - RNA, 19 nt, Artificial Sequence
  Description of Artificial Sequence: Synthetic oligonucleotide
guauucaugucacuacaag

SEQ ID NO: 912380 - RNA, 19 nt, Artificial Sequence
  Description of Artificial Sequence: Synthetic oligonucleotide
uacucuaaguacucaggag

SEQ ID NO: 912381 - RNA, 19 nt, Artificial Sequence
  Description of Artificial Sequence: Synthetic oligonucleotide
ugcggauugauccugugaa

SEQ ID NO: 912382 - RNA, 19 nt, Artificial Sequence
  Description of Artificial Sequence: Synthetic oligonucleotide
ggauuaauggaggacaggg

SEQ ID NO: 912383 - RNA, 19 nt, Artificial Sequence
  Description of Artificial Sequence: Synthetic oligonucleotide
cucgguauuuuacaacucc

SEQ ID NO: 912384 - RNA, 19 nt, Artificial Sequence
  Description of Artificial Sequence: Synthetic oligonucleotide
aaagucucugugugguaag

SEQ ID NO: 912385 - RNA, 19 nt, Artificial Sequence
  Description of Artificial Sequence: Synthetic oligonucleotide
uuaauuuguagaccucuau

SEQ ID NO: 912386 - RNA, 19 nt, Artificial Sequence
  Description of Artificial Sequence: Synthetic oligonucleotide
cuugaucggaagaagguuc

SEQ ID NO: 912387 - RNA, 19 nt, Artificial Sequence
  Description of Artificial Sequence: Synthetic oligonucleotide
aauucaguggucugcggau

SEQ ID NO: 912388 - RNA, 19 nt, Artificial Sequence
  Description of Artificial Sequence: Synthetic oligonucleotide
augauauauacuccuuaug

SEQ ID NO: 912389 - RNA, 19 nt, Artificial Sequence
  Description of Artificial Sequence: Synthetic oligonucleotide
uuucaggcauauuccacag

SEQ ID NO: 912390 - RNA, 19 nt, Artificial Sequence
  Description of Artificial Sequence: Synthetic oligonucleotide
aauauaucuacaggcugcu

SEQ ID NO: 912391 - RNA, 19 nt, Artificial Sequence
  Description of Artificial Sequence: Synthetic oligonucleotide
aagacugauacagaaccga

SEQ ID NO: 912392 - RNA, 19 nt, Artificial Sequence
  Description of Artificial Sequence: Synthetic oligonucleotide
uuauuacaaaguccagcca

SEQ ID NO: 912393 - RNA, 19 nt, Artificial Sequence
  Description of Artificial Sequence: Synthetic oligonucleotide
cuacccagccaccauaggg

SEQ ID NO: 912394 - RNA, 19 nt, Artificial Sequence
  Description of Artificial Sequence: Synthetic oligonucleotide
uugaucggaagaagguucc

SEQ ID NO: 912395 - RNA, 19 nt, Artificial Sequence
  Description of Artificial Sequence: Synthetic oligonucleotide
agauccacgggucccgggc

SEQ ID NO: 912396 - RNA, 19 nt, Artificial Sequence
  Description of Artificial Sequence: Synthetic oligonucleotide
uuaaugucugugaugccaa

SEQ ID NO: 912397 - RNA, 19 nt, Artificial Sequence
  Description of Artificial Sequence: Synthetic oligonucleotide
cauguucuauuucuaacac

SEQ ID NO: 912398 - RNA, 19 nt, Artificial Sequence
  Description of Artificial Sequence: Synthetic oligonucleotide
agcauuaucucaucgggau

SEQ ID NO: 912399 - RNA, 19 nt, Artificial Sequence
  Description of Artificial Sequence: Synthetic oligonucleotide
cauaaugauauauacuucu

SEQ ID NO: 912400 - RNA, 19 nt, Artificial Sequence
  Description of Artificial Sequence: Synthetic oligonucleotide
ugucaugcugaaguuacag

SEQ ID NO: 912401 - RNA, 19 nt, Artificial Sequence
  Description of Artificial Sequence: Synthetic oligonucleotide
guaaauauuuggugcuacc

SEQ ID NO: 912402 - RNA, 19 nt, Artificial Sequence
  Description of Artificial Sequence: Synthetic oligonucleotide
gauugugagcacuggggcc

SEQ ID NO: 912403 - RNA, 19 nt, Artificial Sequence
  Description of Artificial Sequence: Synthetic oligonucleotide
accucgguauuuuacaacu

SEQ ID NO: 912404 - RNA, 19 nt, Artificial Sequence
  Description of Artificial Sequence: Synthetic oligonucleotide
agaccucuauauuucucac

SEQ ID NO: 912405 - RNA, 19 nt, Artificial Sequence
  Description of Artificial Sequence: Synthetic oligonucleotide
accgaaauuccaccguuuc

SEQ ID NO: 912406 - RNA, 19 nt, Artificial Sequence
  Description of Artificial Sequence: Synthetic oligonucleotide
ucauugucgucaucuacug

SEQ ID NO: 912407 - RNA, 19 nt, Artificial Sequence
  Description of Artificial Sequence: Synthetic oligonucleotide
cuucgguugcacuauaauc

SEQ ID NO: 912408 - RNA, 19 nt, Artificial Sequence
  Description of Artificial Sequence: Synthetic oligonucleotide
uacaccucgguauuuuaca

SEQ ID NO: 912409 - RNA, 19 nt, Artificial Sequence
  Description of Artificial Sequence: Synthetic oligonucleotide
aagaagcugcuucuuauuu

SEQ ID NO: 912410 - RNA, 19 nt, Artificial Sequence
  Description of Artificial Sequence: Synthetic oligonucleotide
ugcacuauaaucccaccuu

SEQ ID NO: 912411 - RNA, 19 nt, Artificial Sequence
  Description of Artificial Sequence: Synthetic oligonucleotide
ucaugucacuacaagcgcu

SEQ ID NO: 912412 - RNA, 19 nt, Artificial Sequence
  Description of Artificial Sequence: Synthetic oligonucleotide
cauagaucaaaaguucaac

SEQ ID NO: 912413 - RNA, 19 nt, Artificial Sequence
  Description of Artificial Sequence: Synthetic oligonucleotide
uauacuucuuggccaguca

SEQ ID NO: 912414 - RNA, 19 nt, Artificial Sequence
  Description of Artificial Sequence: Synthetic oligonucleotide
ucgggauuaauggaggaca

SEQ ID NO: 912415 - RNA, 19 nt, Artificial Sequence
  Description of Artificial Sequence: Synthetic oligonucleotide
ugaagauugugagcacugg

SEQ ID NO: 912416 - RNA, 19 nt, Artificial Sequence
  Description of Artificial Sequence: Synthetic oligonucleotide
uugcacuauaaucccaccu

SEQ ID NO: 912417 - RNA, 19 nt, Artificial Sequence
  Description of Artificial Sequence: Synthetic oligonucleotide
acaagcgcuuacaacuucc

SEQ ID NO: 912418 - RNA, 19 nt, Artificial Sequence
  Description of Artificial Sequence: Synthetic oligonucleotide
ucgguugcacuauaauccc

SEQ ID NO: 912419 - RNA, 19 nt, Artificial Sequence
  Description of Artificial Sequence: Synthetic oligonucleotide
ucuauauuucucacaugau

SEQ ID NO: 912420 - RNA, 19 nt, Artificial Sequence
  Description of Artificial Sequence: Synthetic oligonucleotide
gauugauccugugaaccag

SEQ ID NO: 912421 - RNA, 19 nt, Artificial Sequence
  Description of Artificial Sequence: Synthetic oligonucleotide
caucaccaagacaaguccc

SEQ ID NO: 912422 - RNA, 19 nt, Artificial Sequence
  Description of Artificial Sequence: Synthetic oligonucleotide
uuaugguggaugaauuaua

SEQ ID NO: 912423 - RNA, 19 nt, Artificial Sequence
  Description of Artificial Sequence: Synthetic oligonucleotide
uuacaccucgguauuuuac

SEQ ID NO: 912424 - RNA, 19 nt, Artificial Sequence
  Description of Artificial Sequence: Synthetic oligonucleotide
gauuaauggaggacagggc

SEQ ID NO: 912425 - RNA, 19 nt, Artificial Sequence
  Description of Artificial Sequence: Synthetic oligonucleotide
aaucccaccuugugugcag

SEQ ID NO: 912426 - RNA, 19 nt, Artificial Sequence
  Description of Artificial Sequence: Synthetic oligonucleotide
gaugccagagaucccacca

SEQ ID NO: 912427 - RNA, 19 nt, Artificial Sequence
  Description of Artificial Sequence: Synthetic oligonucleotide
ugaccuuuucgauagucau

SEQ ID NO: 912428 - RNA, 19 nt, Artificial Sequence
  Description of Artificial Sequence: Synthetic oligonucleotide
agaaggcguauucauguca

SEQ ID NO: 912429 - RNA, 19 nt, Artificial Sequence
  Description of Artificial Sequence: Synthetic oligonucleotide
uggcccugagaauaguaag

SEQ ID NO: 912430 - RNA, 19 nt, Artificial Sequence
  Description of Artificial Sequence: Synthetic oligonucleotide
cauacaucaccaagacaag

SEQ ID NO: 912431 - RNA, 19 nt, Artificial Sequence
  Description of Artificial Sequence: Synthetic oligonucleotide
caccaauccuuacaccucg

SEQ ID NO: 912432 - RNA, 19 nt, Artificial Sequence
  Description of Artificial Sequence: Synthetic oligonucleotide
uucaggcauauuccacagg

SEQ ID NO: 912433 - RNA, 19 nt, Artificial Sequence
  Description of Artificial Sequence: Synthetic oligonucleotide
uuacaacuccagccaaacc

SEQ ID NO: 912434 - RNA, 19 nt, Artificial Sequence
  Description of Artificial Sequence: Synthetic oligonucleotide
cugaagcaugacauuaaug

SEQ ID NO: 912435 - RNA, 19 nt, Artificial Sequence
  Description of Artificial Sequence: Synthetic oligonucleotide
ugcagaaaaccaguaggug

SEQ ID NO: 912436 - RNA, 19 nt, Artificial Sequence
  Description of Artificial Sequence: Synthetic oligonucleotide
caugcgauuuaaagaugcc

SEQ ID NO: 912437 - RNA, 19 nt, Artificial Sequence
  Description of Artificial Sequence: Synthetic oligonucleotide
agaccauuauuuucaggca

SEQ ID NO: 912438 - RNA, 19 nt, Artificial Sequence
  Description of Artificial Sequence: Synthetic oligonucleotide
acaugauauauacuccuua

SEQ ID NO: 912439 - RNA, 19 nt, Artificial Sequence
  Description of Artificial Sequence: Synthetic oligonucleotide
uccaccguuucauuauuac

SEQ ID NO: 912440 - RNA, 19 nt, Artificial Sequence
  Description of Artificial Sequence: Synthetic oligonucleotide
agaaccgaaauuccaccgu

SEQ ID NO: 912441 - RNA, 19 nt, Artificial Sequence
  Description of Artificial Sequence: Synthetic oligonucleotide
gcuuacuaggaucauaaca

SEQ ID NO: 912442 - RNA, 19 nt, Artificial Sequence
  Description of Artificial Sequence: Synthetic oligonucleotide
ugggaugcaucaucagaag

SEQ ID NO: 912443 - RNA, 19 nt, Artificial Sequence
  Description of Artificial Sequence: Synthetic oligonucleotide
acugggaacucagauaagu

SEQ ID NO: 912444 - RNA, 19 nt, Artificial Sequence
  Description of Artificial Sequence: Synthetic oligonucleotide
ucucguagaucuuguccag

SEQ ID NO: 912445 - RNA, 19 nt, Artificial Sequence
  Description of Artificial Sequence: Synthetic oligonucleotide
uucaguggucugcggauug

SEQ ID NO: 912446 - RNA, 19 nt, Artificial Sequence
  Description of Artificial Sequence: Synthetic oligonucleotide
cagaguaauaucuguagaa

SEQ ID NO: 912447 - RNA, 19 nt, Artificial Sequence
  Description of Artificial Sequence: Synthetic oligonucleotide
uuggccagucaugagauaa

SEQ ID NO: 912448 - RNA, 19 nt, Artificial Sequence
  Description of Artificial Sequence: Synthetic oligonucleotide
aaggucugcauguggcggu

SEQ ID NO: 912449 - RNA, 19 nt, Artificial Sequence
  Description of Artificial Sequence: Synthetic oligonucleotide
agaaaaccaguaggugggc

SEQ ID NO: 912450 - RNA, 19 nt, Artificial Sequence
  Description of Artificial Sequence: Synthetic oligonucleotide
gaaggcguauucaugucac

SEQ ID NO: 912451 - RNA, 19 nt, Artificial Sequence
  Description of Artificial Sequence: Synthetic oligonucleotide
uacaaaguccagccauaga

SEQ ID NO: 912452 - RNA, 19 nt, Artificial Sequence
  Description of Artificial Sequence: Synthetic oligonucleotide
ugcagaccauuauuuucag

SEQ ID NO: 912453 - RNA, 19 nt, Artificial Sequence
  Description of Artificial Sequence: Synthetic oligonucleotide
uuccgcaccgccuggaagu

SEQ ID NO: 912454 - RNA, 19 nt, Artificial Sequence
  Description of Artificial Sequence: Synthetic oligonucleotide
ugucacuacaagcgcuuac

SEQ ID NO: 912455 - RNA, 19 nt, Artificial Sequence
  Description of Artificial Sequence: Synthetic oligonucleotide
cauuacugagccucuucac

SEQ ID NO: 912456 - RNA, 19 nt, Artificial Sequence
  Description of Artificial Sequence: Synthetic oligonucleotide
uagcguguuguuuuccacu

SEQ ID NO: 912457 - RNA, 19 nt, Artificial Sequence
  Description of Artificial Sequence: Synthetic oligonucleotide
aagcauuuguccaaagcua

SEQ ID NO: 912458 - RNA, 19 nt, Artificial Sequence
  Description of Artificial Sequence: Synthetic oligonucleotide
uccuuaugguggaugaauu

SEQ ID NO: 912459 - RNA, 19 nt, Artificial Sequence
  Description of Artificial Sequence: Synthetic oligonucleotide
cacagaaggcguauucaug

SEQ ID NO: 912460 - RNA, 19 nt, Artificial Sequence
  Description of Artificial Sequence: Synthetic oligonucleotide
cacuacaagcgcuuacaac

SEQ ID NO: 912461 - RNA, 19 nt, Artificial Sequence
  Description of Artificial Sequence: Synthetic oligonucleotide
ucacuacaagcgcuuacaa

SEQ ID NO: 912462 - RNA, 19 nt, Artificial Sequence
  Description of Artificial Sequence: Synthetic oligonucleotide
gcucauguucauuacugag

SEQ ID NO: 912463 - RNA, 19 nt, Artificial Sequence
  Description of Artificial Sequence: Synthetic oligonucleotide
ggccaugcagcgcaggucg

SEQ ID NO: 912464 - RNA, 19 nt, Artificial Sequence
  Description of Artificial Sequence: Synthetic oligonucleotide
ucgauagucaugcgauuua

SEQ ID NO: 912465 - RNA, 19 nt, Artificial Sequence
  Description of Artificial Sequence: Synthetic oligonucleotide
uggccagucaugagauaag

SEQ ID NO: 912466 - RNA, 19 nt, Artificial Sequence
  Description of Artificial Sequence: Synthetic oligonucleotide
ugagaauaguaagccacuc

SEQ ID NO: 912467 - RNA, 19 nt, Artificial Sequence
  Description of Artificial Sequence: Synthetic oligonucleotide
augcgauuuaaagaugcca

SEQ ID NO: 912468 - RNA, 19 nt, Artificial Sequence
  Description of Artificial Sequence: Synthetic oligonucleotide
aggcuugaucggaagaagg

SEQ ID NO: 912469 - RNA, 19 nt, Artificial Sequence
  Description of Artificial Sequence: Synthetic oligonucleotide
augggaugcaucaucagaa

SEQ ID NO: 912470 - RNA, 19 nt, Artificial Sequence
  Description of Artificial Sequence: Synthetic oligonucleotide
augaagauugugagcacug

SEQ ID NO: 912471 - RNA, 19 nt, Artificial Sequence
  Description of Artificial Sequence: Synthetic oligonucleotide
uucgauagucaugcgauuu

SEQ ID NO: 912472 - RNA, 19 nt, Artificial Sequence
  Description of Artificial Sequence: Synthetic oligonucleotide
guugcacuauaaucccacc

SEQ ID NO: 912473 - RNA, 19 nt, Artificial Sequence
  Description of Artificial Sequence: Synthetic oligonucleotide
ucaucgguccccacaucac

SEQ ID NO: 912474 - RNA, 19 nt, Artificial Sequence
  Description of Artificial Sequence: Synthetic oligonucleotide
aaggcguauucaugucacu

SEQ ID NO: 912475 - RNA, 19 nt, Artificial Sequence
  Description of Artificial Sequence: Synthetic oligonucleotide
agccacucaacaucauacu

SEQ ID NO: 912476 - RNA, 19 nt, Artificial Sequence
  Description of Artificial Sequence: Synthetic oligonucleotide
caucgguccccacaucacc

SEQ ID NO: 912477 - RNA, 19 nt, Artificial Sequence
  Description of Artificial Sequence: Synthetic oligonucleotide
uacaagcgcuuacaacuuc

SEQ ID NO: 912478 - RNA, 19 nt, Artificial Sequence
  Description of Artificial Sequence: Synthetic oligonucleotide
ugguuugaggcuucaugau

SEQ ID NO: 912479 - RNA, 19 nt, Artificial Sequence
  Description of Artificial Sequence: Synthetic oligonucleotide
gaccucuauauuucucaca

SEQ ID NO: 912480 - RNA, 19 nt, Artificial Sequence
  Description of Artificial Sequence: Synthetic oligonucleotide
agcucgccauggcagcagc

SEQ ID NO: 912481 - RNA, 19 nt, Artificial Sequence
  Description of Artificial Sequence: Synthetic oligonucleotide
ugcaucaaggcugcaaauu

SEQ ID NO: 912482 - RNA, 19 nt, Artificial Sequence
  Description of Artificial Sequence: Synthetic oligonucleotide
cauaggguaacuccugcaa

SEQ ID NO: 912483 - RNA, 19 nt, Artificial Sequence
  Description of Artificial Sequence: Synthetic oligonucleotide
cauugucgucaucuacugc

SEQ ID NO: 912484 - RNA, 19 nt, Artificial Sequence
  Description of Artificial Sequence: Synthetic oligonucleotide
agcauuuguccaaagcuaa

SEQ ID NO: 912485 - RNA, 19 nt, Artificial Sequence
  Description of Artificial Sequence: Synthetic oligonucleotide
cagauggcgcucuuccuug

SEQ ID NO: 912486 - RNA, 19 nt, Artificial Sequence
  Description of Artificial Sequence: Synthetic oligonucleotide
caacaucauacucuaagua

SEQ ID NO: 912487 - RNA, 19 nt, Artificial Sequence
  Description of Artificial Sequence: Synthetic oligonucleotide
agcgccagagucucguaga

SEQ ID NO: 912488 - RNA, 19 nt, Artificial Sequence
  Description of Artificial Sequence: Synthetic oligonucleotide
cauuaucucaucgggauua

SEQ ID NO: 912489 - RNA, 19 nt, Artificial Sequence
  Description of Artificial Sequence: Synthetic oligonucleotide
agaaaagcuuguggagaag

SEQ ID NO: 912490 - RNA, 19 nt, Artificial Sequence
  Description of Artificial Sequence: Synthetic oligonucleotide
auuuggugcuacccagcca

SEQ ID NO: 912491 - RNA, 19 nt, Artificial Sequence
  Description of Artificial Sequence: Synthetic oligonucleotide
ggcaggacucccuagcgug

SEQ ID NO: 912492 - RNA, 19 nt, Artificial Sequence
  Description of Artificial Sequence: Synthetic oligonucleotide
ggagucauguucuauuucu

SEQ ID NO: 912493 - RNA, 19 nt, Artificial Sequence
  Description of Artificial Sequence: Synthetic oligonucleotide
gucacuacaagcgcuuaca

SEQ ID NO: 912494 - RNA, 19 nt, Artificial Sequence
  Description of Artificial Sequence: Synthetic oligonucleotide
gcacuauaaucccaccuug

SEQ ID NO: 912495 - RNA, 19 nt, Artificial Sequence
  Description of Artificial Sequence: Synthetic oligonucleotide
ugugaaccagcugcacuug

SEQ ID NO: 912496 - RNA, 19 nt, Artificial Sequence
  Description of Artificial Sequence: Synthetic oligonucleotide
agcguguuguuuuccacuu

SEQ ID NO: 912497 - RNA, 19 nt, Artificial Sequence
  Description of Artificial Sequence: Synthetic oligonucleotide
uggucugcggauugauccu

SEQ ID NO: 912498 - RNA, 19 nt, Artificial Sequence
  Description of Artificial Sequence: Synthetic oligonucleotide
cacauacuacauacaucac

SEQ ID NO: 912499 - RNA, 19 nt, Artificial Sequence
  Description of Artificial Sequence: Synthetic oligonucleotide
caccucgguauuuuacaac

SEQ ID NO: 912500 - RNA, 19 nt, Artificial Sequence
  Description of Artificial Sequence: Synthetic oligonucleotide
augaccuuuucgauaguca

SEQ ID NO: 912501 - RNA, 19 nt, Artificial Sequence
  Description of Artificial Sequence: Synthetic oligonucleotide
aaaccaguaggugggcuuu

SEQ ID NO: 912502 - RNA, 19 nt, Artificial Sequence
  Description of Artificial Sequence: Synthetic oligonucleotide
guuuuaauuuguagaccuc

SEQ ID NO: 912503 - RNA, 19 nt, Artificial Sequence
  Description of Artificial Sequence: Synthetic oligonucleotide
ggcguauucaugucacuac

SEQ ID NO: 912504 - RNA, 19 nt, Artificial Sequence
  Description of Artificial Sequence: Synthetic oligonucleotide
cuauaaucccaccuugugu

SEQ ID NO: 912505 - RNA, 19 nt, Artificial Sequence
  Description of Artificial Sequence: Synthetic oligonucleotide
auacuccuuaugguggaug

SEQ ID NO: 912506 - RNA, 19 nt, Artificial Sequence
  Description of Artificial Sequence: Synthetic oligonucleotide
ucugcggauugauccugug

SEQ ID NO: 912507 - RNA, 19 nt, Artificial Sequence
  Description of Artificial Sequence: Synthetic oligonucleotide
ugcaagugguuugaggcuu

SEQ ID NO: 912508 - RNA, 19 nt, Artificial Sequence
  Description of Artificial Sequence: Synthetic oligonucleotide
cauggagcuuggcaaguuc

SEQ ID NO: 912509 - RNA, 19 nt, Artificial Sequence
  Description of Artificial Sequence: Synthetic oligonucleotide
ccauaaugauauauacuuc

SEQ ID NO: 912510 - RNA, 19 nt, Artificial Sequence
  Description of Artificial Sequence: Synthetic oligonucleotide
guacuugggcggcacggcc

SEQ ID NO: 912511 - RNA, 19 nt, Artificial Sequence
  Description of Artificial Sequence: Synthetic oligonucleotide
uuucgauagucaugcgauu

SEQ ID NO: 912512 - RNA, 19 nt, Artificial Sequence
  Description of Artificial Sequence: Synthetic oligonucleotide
auacuacauacaucaccaa

SEQ ID NO: 912513 - RNA, 19 nt, Artificial Sequence
  Description of Artificial Sequence: Synthetic oligonucleotide
ucccaccaauccuuacacc

SEQ ID NO: 912514 - RNA, 19 nt, Artificial Sequence
  Description of Artificial Sequence: Synthetic oligonucleotide
gagauccacgggucccggg

SEQ ID NO: 912515 - RNA, 19 nt, Artificial Sequence
  Description of Artificial Sequence: Synthetic oligonucleotide
ggauugauccugugaacca

SEQ ID NO: 912516 - RNA, 19 nt, Artificial Sequence
  Description of Artificial Sequence: Synthetic oligonucleotide
gguaagcauuuguccaaag

SEQ ID NO: 912517 - RNA, 19 nt, Artificial Sequence
  Description of Artificial Sequence: Synthetic oligonucleotide
agccaaaccuaaauaguaa

SEQ ID NO: 912518 - RNA, 19 nt, Artificial Sequence
  Description of Artificial Sequence: Synthetic oligonucleotide
agggucuuaaagucacaua

SEQ ID NO: 912519 - RNA, 19 nt, Artificial Sequence
  Description of Artificial Sequence: Synthetic oligonucleotide
caguaggugggcuuuaggu

SEQ ID NO: 912520 - RNA, 19 nt, Artificial Sequence
  Description of Artificial Sequence: Synthetic oligonucleotide
agucaucgguccccacauc

SEQ ID NO: 912521 - RNA, 19 nt, Artificial Sequence
  Description of Artificial Sequence: Synthetic oligonucleotide
gauagucaugcgauuuaaa

SEQ ID NO: 912522 - RNA, 19 nt, Artificial Sequence
  Description of Artificial Sequence: Synthetic oligonucleotide
uccuccuccuccuccucca

SEQ ID NO: 912523 - RNA, 19 nt, Artificial Sequence
  Description of Artificial Sequence: Synthetic oligonucleotide
gucaugcgauuuaaagaug

SEQ ID NO: 912524 - RNA, 19 nt, Artificial Sequence
  Description of Artificial Sequence: Synthetic oligonucleotide
cagaaggcguauucauguc

SEQ ID NO: 912525 - RNA, 19 nt, Artificial Sequence
  Description of Artificial Sequence: Synthetic oligonucleotide
gcuugauuccuccucuuga

SEQ ID NO: 912526 - RNA, 19 nt, Artificial Sequence
  Description of Artificial Sequence: Synthetic oligonucleotide
auccuuacaccucgguauu

SEQ ID NO: 912527 - RNA, 19 nt, Artificial Sequence
  Description of Artificial Sequence: Synthetic oligonucleotide
agucucugugugguaagca

SEQ ID NO: 912528 - RNA, 19 nt, Artificial Sequence
  Description of Artificial Sequence: Synthetic oligonucleotide
ugguaagcauuuguccaaa

SEQ ID NO: 912529 - RNA, 19 nt, Artificial Sequence
  Description of Artificial Sequence: Synthetic oligonucleotide
uuggugcuacccagccacc

SEQ ID NO: 912530 - RNA, 19 nt, Artificial Sequence
  Description of Artificial Sequence: Synthetic oligonucleotide
cagcauuaucucaucggga

SEQ ID NO: 912531 - RNA, 19 nt, Artificial Sequence
  Description of Artificial Sequence: Synthetic oligonucleotide
ugaucggaagaagguucca

SEQ ID NO: 912532 - RNA, 19 nt, Artificial Sequence
  Description of Artificial Sequence: Synthetic oligonucleotide
ggcccugagaauaguaagc

SEQ ID NO: 912533 - RNA, 19 nt, Artificial Sequence
  Description of Artificial Sequence: Synthetic oligonucleotide
cuuaugguggaugaauuau

SEQ ID NO: 912534 - RNA, 19 nt, Artificial Sequence
  Description of Artificial Sequence: Synthetic oligonucleotide
agagucucguagaucuugu

SEQ ID NO: 912535 - RNA, 19 nt, Artificial Sequence
  Description of Artificial Sequence: Synthetic oligonucleotide
cuggaagucgccgcagcac

SEQ ID NO: 912536 - RNA, 19 nt, Artificial Sequence
  Description of Artificial Sequence: Synthetic oligonucleotide
accauuauuuucaggcaua

SEQ ID NO: 912537 - RNA, 19 nt, Artificial Sequence
  Description of Artificial Sequence: Synthetic oligonucleotide
cugagaauaguaagccacu

SEQ ID NO: 912538 - RNA, 19 nt, Artificial Sequence
  Description of Artificial Sequence: Synthetic oligonucleotide
gggauuaauggaggacagg

SEQ ID NO: 912539 - RNA, 19 nt, Artificial Sequence
  Description of Artificial Sequence: Synthetic oligonucleotide
caucgggauuaauggagga

SEQ ID NO: 912540 - RNA, 19 nt, Artificial Sequence
  Description of Artificial Sequence: Synthetic oligonucleotide
cagcgccagagucucguag

SEQ ID NO: 912541 - RNA, 19 nt, Artificial Sequence
  Description of Artificial Sequence: Synthetic oligonucleotide
gucacauuaaucaggucau

SEQ ID NO: 912542 - RNA, 19 nt, Artificial Sequence
  Description of Artificial Sequence: Synthetic oligonucleotide
gcgauuuaaagaugccaga

SEQ ID NO: 912543 - RNA, 19 nt, Artificial Sequence
  Description of Artificial Sequence: Synthetic oligonucleotide
ggcacggccaugcagcgca

SEQ ID NO: 912544 - RNA, 19 nt, Artificial Sequence
  Description of Artificial Sequence: Synthetic oligonucleotide
aggcguauucaugucacua

SEQ ID NO: 912545 - RNA, 19 nt, Artificial Sequence
  Description of Artificial Sequence: Synthetic oligonucleotide
gcguauucaugucacuaca

SEQ ID NO: 912546 - RNA, 19 nt, Artificial Sequence
  Description of Artificial Sequence: Synthetic oligonucleotide
acgggucccgggccgcgcc

SEQ ID NO: 912547 - RNA, 19 nt, Artificial Sequence
  Description of Artificial Sequence: Synthetic oligonucleotide
aaccgaaauuccaccguuu

SEQ ID NO: 912548 - RNA, 19 nt, Artificial Sequence
  Description of Artificial Sequence: Synthetic oligonucleotide
cuaaguacucaggagcacu

SEQ ID NO: 912549 - RNA, 19 nt, Artificial Sequence
  Description of Artificial Sequence: Synthetic oligonucleotide
gaaccgaaauuccaccguu

SEQ ID NO: 912550 - RNA, 19 nt, Artificial Sequence
  Description of Artificial Sequence: Synthetic oligonucleotide
gucuuacucauucaucauu

SEQ ID NO: 912551 - RNA, 19 nt, Artificial Sequence
  Description of Artificial Sequence: Synthetic oligonucleotide
cuccuccuccuccuccucc

SEQ ID NO: 912552 - RNA, 19 nt, Artificial Sequence
  Description of Artificial Sequence: Synthetic oligonucleotide
gagucaucgguccccacau

SEQ ID NO: 912553 - RNA, 19 nt, Artificial Sequence
  Description of Artificial Sequence: Synthetic oligonucleotide
cggauugauccugugaacc

SEQ ID NO: 912554 - RNA, 19 nt, Artificial Sequence
  Description of Artificial Sequence: Synthetic oligonucleotide
gccauagaucaaaaguuca

SEQ ID NO: 912555 - RNA, 19 nt, Artificial Sequence
  Description of Artificial Sequence: Synthetic oligonucleotide
accaauccuuacaccucgg

SEQ ID NO: 912556 - RNA, 19 nt, Artificial Sequence
  Description of Artificial Sequence: Synthetic oligonucleotide
aggacucccuagcguguug

SEQ ID NO: 912557 - RNA, 19 nt, Artificial Sequence
  Description of Artificial Sequence: Synthetic oligonucleotide
ccauagaucaaaaguucaa

SEQ ID NO: 912558 - RNA, 19 nt, Artificial Sequence
  Description of Artificial Sequence: Synthetic oligonucleotide
ucccuagcguguuguuuuc

SEQ ID NO: 912559 - RNA, 19 nt, Artificial Sequence
  Description of Artificial Sequence: Synthetic oligonucleotide
acuugggcggcacggccau

SEQ ID NO: 912560 - RNA, 19 nt, Artificial Sequence
  Description of Artificial Sequence: Synthetic oligonucleotide
gucaugagauaagaauaua

SEQ ID NO: 912561 - RNA, 19 nt, Artificial Sequence
  Description of Artificial Sequence: Synthetic oligonucleotide
cugcggauugauccuguga

SEQ ID NO: 912562 - RNA, 19 nt, Artificial Sequence
  Description of Artificial Sequence: Synthetic oligonucleotide
ggcggcaggacucccuagc

SEQ ID NO: 912563 - RNA, 19 nt, Artificial Sequence
  Description of Artificial Sequence: Synthetic oligonucleotide
cuuacucauucaucauugu

SEQ ID NO: 912564 - RNA, 19 nt, Artificial Sequence
  Description of Artificial Sequence: Synthetic oligonucleotide
uccugugaaccagcugcac

SEQ ID NO: 912565 - RNA, 19 nt, Artificial Sequence
  Description of Artificial Sequence: Synthetic oligonucleotide
gcugaaguuacagggaacu

SEQ ID NO: 912566 - RNA, 19 nt, Artificial Sequence
  Description of Artificial Sequence: Synthetic oligonucleotide
uccgaggcggcaggacucc

SEQ ID NO: 912567 - RNA, 19 nt, Artificial Sequence
  Description of Artificial Sequence: Synthetic oligonucleotide
gcggcaggacucccuagcg

SEQ ID NO: 912568 - RNA, 19 nt, Artificial Sequence
  Description of Artificial Sequence: Synthetic oligonucleotide
ggaucauaacaagcagcug

SEQ ID NO: 912569 - RNA, 19 nt, Artificial Sequence
  Description of Artificial Sequence: Synthetic oligonucleotide
gcauguggcgguacuuggg

SEQ ID NO: 912570 - RNA, 19 nt, Artificial Sequence
  Description of Artificial Sequence: Synthetic oligonucleotide
ccaguaggugggcuuuagg

SEQ ID NO: 912571 - RNA, 19 nt, Artificial Sequence
  Description of Artificial Sequence: Synthetic oligonucleotide
ggcuuacuaggaucauaac

SEQ ID NO: 912572 - RNA, 19 nt, Artificial Sequence
  Description of Artificial Sequence: Synthetic oligonucleotide
gcaaguuccugaugucaga

SEQ ID NO: 912573 - RNA, 19 nt, Artificial Sequence
  Description of Artificial Sequence: Synthetic oligonucleotide
cugucaugcugaaguuaca

SEQ ID NO: 912574 - RNA, 19 nt, Artificial Sequence
  Description of Artificial Sequence: Synthetic oligonucleotide
gggccgcggaacuccaccg

SEQ ID NO: 912575 - RNA, 19 nt, Artificial Sequence
  Description of Artificial Sequence: Synthetic oligonucleotide
ucuccuccuccuccuccuc

SEQ ID NO: 912576 - RNA, 19 nt, Artificial Sequence
  Description of Artificial Sequence: Synthetic oligonucleotide
gcuacccagccaccauagg

SEQ ID NO: 912577 - RNA, 19 nt, Artificial Sequence
  Description of Artificial Sequence: Synthetic oligonucleotide
caugucacuacaagcgcuu

SEQ ID NO: 912578 - RNA, 19 nt, Artificial Sequence
  Description of Artificial Sequence: Synthetic oligonucleotide
ccaccaauccuuacaccuc

SEQ ID NO: 912579 - RNA, 19 nt, Artificial Sequence
  Description of Artificial Sequence: Synthetic oligonucleotide
aguggcccugagaauagua

SEQ ID NO: 912580 - RNA, 19 nt, Artificial Sequence
  Description of Artificial Sequence: Synthetic oligonucleotide
acucccuagcguguuguuu

SEQ ID NO: 912581 - RNA, 19 nt, Artificial Sequence
  Description of Artificial Sequence: Synthetic oligonucleotide
gcggauugauccugugaac

SEQ ID NO: 912582 - RNA, 19 nt, Artificial Sequence
  Description of Artificial Sequence: Synthetic oligonucleotide
cuugugugcagaccauuau

SEQ ID NO: 912583 - RNA, 19 nt, Artificial Sequence
  Description of Artificial Sequence: Synthetic oligonucleotide
ccaccguuucauuauuaca

SEQ ID NO: 912584 - RNA, 19 nt, Artificial Sequence
  Description of Artificial Sequence: Synthetic oligonucleotide
acuccuuaugguggaugaa

SEQ ID NO: 912585 - RNA, 19 nt, Artificial Sequence
  Description of Artificial Sequence: Synthetic oligonucleotide
cucccuagcguguuguuuu

SEQ ID NO: 912586 - RNA, 19 nt, Artificial Sequence
  Description of Artificial Sequence: Synthetic oligonucleotide
gaggcggcaggacucccua

SEQ ID NO: 912587 - RNA, 19 nt, Artificial Sequence
  Description of Artificial Sequence: Synthetic oligonucleotide
uccuuacaccucgguauuu

SEQ ID NO: 912588 - RNA, 19 nt, Artificial Sequence
  Description of Artificial Sequence: Synthetic oligonucleotide
agucgccgcagcacaggag

SEQ ID NO: 912589 - RNA, 19 nt, Artificial Sequence
  Description of Artificial Sequence: Synthetic oligonucleotide
gguuugaggcuucaugauu

SEQ ID NO: 912590 - RNA, 19 nt, Artificial Sequence
  Description of Artificial Sequence: Synthetic oligonucleotide
gugcuacccagccaccaua

SEQ ID NO: 912591 - RNA, 19 nt, Artificial Sequence
  Description of Artificial Sequence: Synthetic oligonucleotide
cuacaagcgcuuacaacuu

SEQ ID NO: 912592 - RNA, 19 nt, Artificial Sequence
  Description of Artificial Sequence: Synthetic oligonucleotide
caagcgcuuacaacuuccu

SEQ ID NO: 912593 - RNA, 19 nt, Artificial Sequence
  Description of Artificial Sequence: Synthetic oligonucleotide
ccuagcguguuguuuucca

SEQ ID NO: 912594 - RNA, 19 nt, Artificial Sequence
  Description of Artificial Sequence: Synthetic oligonucleotide
ccucgguauuuuacaacuc

SEQ ID NO: 912595 - RNA, 19 nt, Artificial Sequence
  Description of Artificial Sequence: Synthetic oligonucleotide
ggucugcggauugauccug

SEQ ID NO: 912596 - RNA, 19 nt, Artificial Sequence
  Description of Artificial Sequence: Synthetic oligonucleotide
cuccuuaugguggaugaau

SEQ ID NO: 912597 - RNA, 19 nt, Artificial Sequence
  Description of Artificial Sequence: Synthetic oligonucleotide
aaccaguaggugggcuuua

SEQ ID NO: 912598 - RNA, 19 nt, Artificial Sequence
  Description of Artificial Sequence: Synthetic oligonucleotide
guggcuuacuaggaucaua

SEQ ID NO: 912599 - RNA, 19 nt, Artificial Sequence
  Description of Artificial Sequence: Synthetic oligonucleotide
ccagccaaaccuaaauagu

SEQ ID NO: 912600 - RNA, 19 nt, Artificial Sequence
  Description of Artificial Sequence: Synthetic oligonucleotide
ucguuccgcaccgccugga

SEQ ID NO: 912601 - RNA, 19 nt, Artificial Sequence
  Description of Artificial Sequence: Synthetic oligonucleotide
ggagauccacgggucccgg

SEQ ID NO: 912602 - RNA, 19 nt, Artificial Sequence
  Description of Artificial Sequence: Synthetic oligonucleotide
ggugggcuuuaggugcucc

SEQ ID NO: 912603 - RNA, 19 nt, Artificial Sequence
  Description of Artificial Sequence: Synthetic oligonucleotide
ccucuccuccuccuccucc

SEQ ID NO: 912604 - RNA, 19 nt, Artificial Sequence
  Description of Artificial Sequence: Synthetic oligonucleotide
augucacuacaagcgcuua

SEQ ID NO: 912605 - RNA, 19 nt, Artificial Sequence
  Description of Artificial Sequence: Synthetic oligonucleotide
ccauaggguaacuccugca

SEQ ID NO: 912606 - RNA, 19 nt, Artificial Sequence
  Description of Artificial Sequence: Synthetic oligonucleotide
ggcuugaucggaagaaggu

SEQ ID NO: 912607 - RNA, 19 nt, Artificial Sequence
  Description of Artificial Sequence: Synthetic oligonucleotide
aucccaccuugugugcaga

SEQ ID NO: 912608 - RNA, 19 nt, Artificial Sequence
  Description of Artificial Sequence: Synthetic oligonucleotide
gucugcauguggcgguacu

SEQ ID NO: 912609 - RNA, 19 nt, Artificial Sequence
  Description of Artificial Sequence: Synthetic oligonucleotide
cguauucaugucacuacaa

SEQ ID NO: 912610 - RNA, 19 nt, Artificial Sequence
  Description of Artificial Sequence: Synthetic oligonucleotide
gggcggcacggccaugcag

SEQ ID NO: 912611 - RNA, 19 nt, Artificial Sequence
  Description of Artificial Sequence: Synthetic oligonucleotide
ggccgcggaacuccaccgc

SEQ ID NO: 912612 - RNA, 19 nt, Artificial Sequence
  Description of Artificial Sequence: Synthetic oligonucleotide
cucuccuccuccuccuccu

SEQ ID NO: 912613 - RNA, 19 nt, Artificial Sequence
  Description of Artificial Sequence: Synthetic oligonucleotide
cuuggccagucaugagaua

SEQ ID NO: 912614 - RNA, 19 nt, Artificial Sequence
  Description of Artificial Sequence: Synthetic oligonucleotide
gccagucaugagauaagaa

SEQ ID NO: 912615 - RNA, 19 nt, Artificial Sequence
  Description of Artificial Sequence: Synthetic oligonucleotide
cugcaucaaggcugcaaau

SEQ ID NO: 912616 - RNA, 19 nt, Artificial Sequence
  Description of Artificial Sequence: Synthetic oligonucleotide
gccgcggaacuccaccgca

SEQ ID NO: 912617 - RNA, 19 nt, Artificial Sequence
  Description of Artificial Sequence: Synthetic oligonucleotide
agccacccgcauggugccg

SEQ ID NO: 912618 - RNA, 19 nt, Artificial Sequence
  Description of Artificial Sequence: Synthetic oligonucleotide
ugccgacgggccgcggaac

SEQ ID NO: 912619 - RNA, 19 nt, Artificial Sequence
  Description of Artificial Sequence: Synthetic oligonucleotide
cacccgcauggugccgacg

SEQ ID NO: 912620 - RNA, 19 nt, Artificial Sequence
  Description of Artificial Sequence: Synthetic oligonucleotide
agguucccggucacauuaa

SEQ ID NO: 912621 - RNA, 19 nt, Artificial Sequence
  Description of Artificial Sequence: Synthetic oligonucleotide
gcuugaucggaagaagguu

SEQ ID NO: 912622 - RNA, 19 nt, Artificial Sequence
  Description of Artificial Sequence: Synthetic oligonucleotide
caggcauauuccacagguu

SEQ ID NO: 912623 - RNA, 19 nt, Artificial Sequence
  Description of Artificial Sequence: Synthetic oligonucleotide
cccuagcguguuguuuucc

SEQ ID NO: 912624 - RNA, 19 nt, Artificial Sequence
  Description of Artificial Sequence: Synthetic oligonucleotide
gcuccgaggcggcaggacu

SEQ ID NO: 912625 - RNA, 19 nt, Artificial Sequence
  Description of Artificial Sequence: Synthetic oligonucleotide
gcauuaucucaucgggauu

SEQ ID NO: 912626 - RNA, 19 nt, Artificial Sequence
  Description of Artificial Sequence: Synthetic oligonucleotide
cuugugucuguggcuuacu

SEQ ID NO: 912627 - RNA, 19 nt, Artificial Sequence
  Description of Artificial Sequence: Synthetic oligonucleotide
gcugggcacaaaauucagu

SEQ ID NO: 912628 - RNA, 19 nt, Artificial Sequence
  Description of Artificial Sequence: Synthetic oligonucleotide
cugaaguuacagggaacuu

SEQ ID NO: 912629 - RNA, 19 nt, Artificial Sequence
  Description of Artificial Sequence: Synthetic oligonucleotide
gcuucuucgguugcacuau

SEQ ID NO: 912630 - RNA, 19 nt, Artificial Sequence
  Description of Artificial Sequence: Synthetic oligonucleotide
cacgggucccgggccgcgc

SEQ ID NO: 912631 - RNA, 19 nt, Artificial Sequence
  Description of Artificial Sequence: Synthetic oligonucleotide
uggugccgacgggccgcgg

SEQ ID NO: 912632 - RNA, 19 nt, Artificial Sequence
  Description of Artificial Sequence: Synthetic oligonucleotide
gucugcggauugauccugu

SEQ ID NO: 912633 - RNA, 19 nt, Artificial Sequence
  Description of Artificial Sequence: Synthetic oligonucleotide
gguucccggucacauuaau

SEQ ID NO: 912634 - RNA, 19 nt, Artificial Sequence
  Description of Artificial Sequence: Synthetic oligonucleotide
ccuccuccuccuccuccag

SEQ ID NO: 912635 - RNA, 19 nt, Artificial Sequence
  Description of Artificial Sequence: Synthetic oligonucleotide
cuugggcggcacggccaug

SEQ ID NO: 912636 - RNA, 19 nt, Artificial Sequence
  Description of Artificial Sequence: Synthetic oligonucleotide
ccaauccuuacaccucggu

SEQ ID NO: 912637 - RNA, 19 nt, Artificial Sequence
  Description of Artificial Sequence: Synthetic oligonucleotide
cgacgggccgcggaacucc

SEQ ID NO: 912638 - RNA, 19 nt, Artificial Sequence
  Description of Artificial Sequence: Synthetic oligonucleotide
caguggucugcggauugau

SEQ ID NO: 912639 - RNA, 19 nt, Artificial Sequence
  Description of Artificial Sequence: Synthetic oligonucleotide
ccacccgcauggugccgac

SEQ ID NO: 912640 - RNA, 19 nt, Artificial Sequence
  Description of Artificial Sequence: Synthetic oligonucleotide
gcgccagagucucguagau

SEQ ID NO: 912641 - RNA, 19 nt, Artificial Sequence
  Description of Artificial Sequence: Synthetic oligonucleotide
gcaggacucccuagcgugu

SEQ ID NO: 912642 - RNA, 19 nt, Artificial Sequence
  Description of Artificial Sequence: Synthetic oligonucleotide
cuccaccgucucaccagau

SEQ ID NO: 912643 - RNA, 19 nt, Artificial Sequence
  Description of Artificial Sequence: Synthetic oligonucleotide
cccucuccuccuccuccuc

SEQ ID NO: 912644 - RNA, 19 nt, Artificial Sequence
  Description of Artificial Sequence: Synthetic oligonucleotide
gcacggccaugcagcgcag

SEQ ID NO: 912645 - RNA, 19 nt, Artificial Sequence
  Description of Artificial Sequence: Synthetic oligonucleotide
ccgcggaacuccaccgcaa

SEQ ID NO: 912646 - RNA, 19 nt, Artificial Sequence
  Description of Artificial Sequence: Synthetic oligonucleotide
ccacgggucccgggccgcg

SEQ ID NO: 912647 - RNA, 19 nt, Artificial Sequence
  Description of Artificial Sequence: Synthetic oligonucleotide
ccgaggcggcaggacuccc

SEQ ID NO: 912648 - RNA, 19 nt, Artificial Sequence
  Description of Artificial Sequence: Synthetic oligonucleotide
ccagcgccagagucucgua

SEQ ID NO: 912649 - RNA, 19 nt, Artificial Sequence
  Description of Artificial Sequence: Synthetic oligonucleotide
ccgcagcacaggaggagau

SEQ ID NO: 912650 - RNA, 19 nt, Artificial Sequence
  Description of Artificial Sequence: Synthetic oligonucleotide
auaaauauaguguuauugc

SEQ ID NO: 912651 - RNA, 19 nt, Artificial Sequence
  Description of Artificial Sequence: Synthetic oligonucleotide
aauauaguguuauugcucu

SEQ ID NO: 912652 - RNA, 19 nt, Artificial Sequence
  Description of Artificial Sequence: Synthetic oligonucleotide
uacauuauggcuugcaagg

SEQ ID NO: 912653 - RNA, 19 nt, Artificial Sequence
  Description of Artificial Sequence: Synthetic oligonucleotide
auagagucucuguacagcc

SEQ ID NO: 912654 - RNA, 19 nt, Artificial Sequence
  Description of Artificial Sequence: Synthetic oligonucleotide
aaauauaguguuauugcuc

SEQ ID NO: 912655 - RNA, 19 nt, Artificial Sequence
  Description of Artificial Sequence: Synthetic oligonucleotide
agcaccuccauccacacac

SEQ ID NO: 912656 - RNA, 19 nt, Artificial Sequence
  Description of Artificial Sequence: Synthetic oligonucleotide
aguacugacaucugguccg

SEQ ID NO: 912657 - RNA, 19 nt, Artificial Sequence
  Description of Artificial Sequence: Synthetic oligonucleotide
agcgguuucucuuugcagc

SEQ ID NO: 912658 - RNA, 19 nt, Artificial Sequence
  Description of Artificial Sequence: Synthetic oligonucleotide
ucaauaugcacagagucag

SEQ ID NO: 912659 - RNA, 19 nt, Artificial Sequence
  Description of Artificial Sequence: Synthetic oligonucleotide
aaaggucgcaaagaguggc

SEQ ID NO: 912660 - RNA, 19 nt, Artificial Sequence
  Description of Artificial Sequence: Synthetic oligonucleotide
uuaaaauagagucucugua

SEQ ID NO: 912661 - RNA, 19 nt, Artificial Sequence
  Description of Artificial Sequence: Synthetic oligonucleotide
agcaaaugccagcucaucc

SEQ ID NO: 912662 - RNA, 19 nt, Artificial Sequence
  Description of Artificial Sequence: Synthetic oligonucleotide
gaagcggcaagccugacag

SEQ ID NO: 912663 - RNA, 19 nt, Artificial Sequence
  Description of Artificial Sequence: Synthetic oligonucleotide
gaguuauugcuucaagggg

SEQ ID NO: 912664 - RNA, 19 nt, Artificial Sequence
  Description of Artificial Sequence: Synthetic oligonucleotide
uggaguuauugcuucaagg

SEQ ID NO: 912665 - RNA, 19 nt, Artificial Sequence
  Description of Artificial Sequence: Synthetic oligonucleotide
ucggacacgguccagacgc

SEQ ID NO: 912666 - RNA, 19 nt, Artificial Sequence
  Description of Artificial Sequence: Synthetic oligonucleotide
ggaguuauugcuucaaggg

SEQ ID NO: 912667 - RNA, 19 nt, Artificial Sequence
  Description of Artificial Sequence: Synthetic oligonucleotide
uucaauaugcacagaguca

SEQ ID NO: 912668 - RNA, 19 nt, Artificial Sequence
  Description of Artificial Sequence: Synthetic oligonucleotide
aaaagcgguuucucuuugc

SEQ ID NO: 912669 - RNA, 19 nt, Artificial Sequence
  Description of Artificial Sequence: Synthetic oligonucleotide
cucagcgucuucaauaugc

SEQ ID NO: 912670 - RNA, 19 nt, Artificial Sequence
  Description of Artificial Sequence: Synthetic oligonucleotide
aaugcgaaugaggagagga

SEQ ID NO: 912671 - RNA, 19 nt, Artificial Sequence
  Description of Artificial Sequence: Synthetic oligonucleotide
uuugccugcugucuggcgg

SEQ ID NO: 912672 - RNA, 19 nt, Artificial Sequence
  Description of Artificial Sequence: Synthetic oligonucleotide
aaugcgccaggacuuugcc

SEQ ID NO: 912673 - RNA, 19 nt, Artificial Sequence
  Description of Artificial Sequence: Synthetic oligonucleotide
cuucaauaugcacagaguc

SEQ ID NO: 912674 - RNA, 19 nt, Artificial Sequence
  Description of Artificial Sequence: Synthetic oligonucleotide
ucucuguacagccaagggc

SEQ ID NO: 912675 - RNA, 19 nt, Artificial Sequence
  Description of Artificial Sequence: Synthetic oligonucleotide
agggcaugaagccuacucc

SEQ ID NO: 912676 - RNA, 19 nt, Artificial Sequence
  Description of Artificial Sequence: Synthetic oligonucleotide
ucagaauuggcaagggcca

SEQ ID NO: 912677 - RNA, 19 nt, Artificial Sequence
  Description of Artificial Sequence: Synthetic oligonucleotide
auuauggcuugcaaggggc

SEQ ID NO: 912678 - RNA, 19 nt, Artificial Sequence
  Description of Artificial Sequence: Synthetic oligonucleotide
agcaguacauacuccuccc

SEQ ID NO: 912679 - RNA, 19 nt, Artificial Sequence
  Description of Artificial Sequence: Synthetic oligonucleotide
gaagccuacucccaggggc

SEQ ID NO: 912680 - RNA, 19 nt, Artificial Sequence
  Description of Artificial Sequence: Synthetic oligonucleotide
uguuuagucuccauaguau

SEQ ID NO: 912681 - RNA, 19 nt, Artificial Sequence
  Description of Artificial Sequence: Synthetic oligonucleotide
ugcccaaugcgaaugagga

SEQ ID NO: 912682 - RNA, 19 nt, Artificial Sequence
  Description of Artificial Sequence: Synthetic oligonucleotide
guacauuauggcuugcaag

SEQ ID NO: 912683 - RNA, 19 nt, Artificial Sequence
  Description of Artificial Sequence: Synthetic oligonucleotide
uaguacugacaucuggucc

SEQ ID NO: 912684 - RNA, 19 nt, Artificial Sequence
  Description of Artificial Sequence: Synthetic oligonucleotide
agucagaauuggcaagggc

SEQ ID NO: 912685 - RNA, 19 nt, Artificial Sequence
  Description of Artificial Sequence: Synthetic oligonucleotide
gucagaauuggcaagggcc

SEQ ID NO: 912686 - RNA, 19 nt, Artificial Sequence
  Description of Artificial Sequence: Synthetic oligonucleotide
uuugcagcaaauauacauu

SEQ ID NO: 912687 - RNA, 19 nt, Artificial Sequence
  Description of Artificial Sequence: Synthetic oligonucleotide
agcuuugccccguuggggc

SEQ ID NO: 912688 - RNA, 19 nt, Artificial Sequence
  Description of Artificial Sequence: Synthetic oligonucleotide
gaggcguuugggcagagag

SEQ ID NO: 912689 - RNA, 19 nt, Artificial Sequence
  Description of Artificial Sequence: Synthetic oligonucleotide
ucuucaauaugcacagagu

SEQ ID NO: 912690 - RNA, 19 nt, Artificial Sequence
  Description of Artificial Sequence: Synthetic oligonucleotide
cauagugguagccggaagc

SEQ ID NO: 912691 - RNA, 19 nt, Artificial Sequence
  Description of Artificial Sequence: Synthetic oligonucleotide
aaagcgguuucucuuugca

SEQ ID NO: 912692 - RNA, 19 nt, Artificial Sequence
  Description of Artificial Sequence: Synthetic oligonucleotide
ucucacacucauuggaggc

SEQ ID NO: 912693 - RNA, 19 nt, Artificial Sequence
  Description of Artificial Sequence: Synthetic oligonucleotide
ggcacuaaugcccaaugcg

SEQ ID NO: 912694 - RNA, 19 nt, Artificial Sequence
  Description of Artificial Sequence: Synthetic oligonucleotide
uuuagucuccauaguauau

SEQ ID NO: 912695 - RNA, 19 nt, Artificial Sequence
  Description of Artificial Sequence: Synthetic oligonucleotide
uuuguuuagucuccauagu

SEQ ID NO: 912696 - RNA, 19 nt, Artificial Sequence
  Description of Artificial Sequence: Synthetic oligonucleotide
aauaugcacagagucagaa

SEQ ID NO: 912697 - RNA, 19 nt, Artificial Sequence
  Description of Artificial Sequence: Synthetic oligonucleotide
aaaugcgccaggacuuugc

SEQ ID NO: 912698 - RNA, 19 nt, Artificial Sequence
  Description of Artificial Sequence: Synthetic oligonucleotide
cauuauggcuugcaagggg

SEQ ID NO: 912699 - RNA, 19 nt, Artificial Sequence
  Description of Artificial Sequence: Synthetic oligonucleotide
augaagccuacucccaggg

SEQ ID NO: 912700 - RNA, 19 nt, Artificial Sequence
  Description of Artificial Sequence: Synthetic oligonucleotide
ugcacagagucagaauugg

SEQ ID NO: 912701 - RNA, 19 nt, Artificial Sequence
  Description of Artificial Sequence: Synthetic oligonucleotide
acaccauagugguagccgg

SEQ ID NO: 912702 - RNA, 19 nt, Artificial Sequence
  Description of Artificial Sequence: Synthetic oligonucleotide
ugccuaguccaucauggcc

SEQ ID NO: 912703 - RNA, 19 nt, Artificial Sequence
  Description of Artificial Sequence: Synthetic oligonucleotide
uuggaguuauugcuucaag

SEQ ID NO: 912704 - RNA, 19 nt, Artificial Sequence
  Description of Artificial Sequence: Synthetic oligonucleotide
aaaaggucgcaaagagugg

SEQ ID NO: 912705 - RNA, 19 nt, Artificial Sequence
  Description of Artificial Sequence: Synthetic oligonucleotide
acccgugcugggcagaccc

SEQ ID NO: 912706 - RNA, 19 nt, Artificial Sequence
  Description of Artificial Sequence: Synthetic oligonucleotide
ugaugggaggcccuggcca

SEQ ID NO: 912707 - RNA, 19 nt, Artificial Sequence
  Description of Artificial Sequence: Synthetic oligonucleotide
guagccggaagccacgucc

SEQ ID NO: 912708 - RNA, 19 nt, Artificial Sequence
  Description of Artificial Sequence: Synthetic oligonucleotide
acagagucagaauuggcaa

SEQ ID NO: 912709 - RNA, 19 nt, Artificial Sequence
  Description of Artificial Sequence: Synthetic oligonucleotide
acacgguccagacgcacgc

SEQ ID NO: 912710 - RNA, 19 nt, Artificial Sequence
  Description of Artificial Sequence: Synthetic oligonucleotide
uagaaaugcgccaggacuu

SEQ ID NO: 912711 - RNA, 19 nt, Artificial Sequence
  Description of Artificial Sequence: Synthetic oligonucleotide
uccuugagcaugcccaccc

SEQ ID NO: 912712 - RNA, 19 nt, Artificial Sequence
  Description of Artificial Sequence: Synthetic oligonucleotide
cugggaaaggcaauggguc

SEQ ID NO: 912713 - RNA, 19 nt, Artificial Sequence
  Description of Artificial Sequence: Synthetic oligonucleotide
cuguaguacugacaucugg

SEQ ID NO: 912714 - RNA, 19 nt, Artificial Sequence
  Description of Artificial Sequence: Synthetic oligonucleotide
uccaagaccagguccucag

SEQ ID NO: 912715 - RNA, 19 nt, Artificial Sequence
  Description of Artificial Sequence: Synthetic oligonucleotide
agcuucaccccguagaaau

SEQ ID NO: 912716 - RNA, 19 nt, Artificial Sequence
  Description of Artificial Sequence: Synthetic oligonucleotide
aguacauacuccucccgcu

SEQ ID NO: 912717 - RNA, 19 nt, Artificial Sequence
  Description of Artificial Sequence: Synthetic oligonucleotide
uugcagcaaauauacauua

SEQ ID NO: 912718 - RNA, 19 nt, Artificial Sequence
  Description of Artificial Sequence: Synthetic oligonucleotide
ugguccgacagugacagug

SEQ ID NO: 912719 - RNA, 19 nt, Artificial Sequence
  Description of Artificial Sequence: Synthetic oligonucleotide
uuggugaucucacacucau

SEQ ID NO: 912720 - RNA, 19 nt, Artificial Sequence
  Description of Artificial Sequence: Synthetic oligonucleotide
uuggaggccggacagcugu

SEQ ID NO: 912721 - RNA, 19 nt, Artificial Sequence
  Description of Artificial Sequence: Synthetic oligonucleotide
aaggucgcaaagaguggcc

SEQ ID NO: 912722 - RNA, 19 nt, Artificial Sequence
  Description of Artificial Sequence: Synthetic oligonucleotide
agggcauagaggcagugcu

SEQ ID NO: 912723 - RNA, 19 nt, Artificial Sequence
  Description of Artificial Sequence: Synthetic oligonucleotide
ugcgaaugaggagaggagc

SEQ ID NO: 912724 - RNA, 19 nt, Artificial Sequence
  Description of Artificial Sequence: Synthetic oligonucleotide
aggaguggcagugugagca

SEQ ID NO: 912725 - RNA, 19 nt, Artificial Sequence
  Description of Artificial Sequence: Synthetic oligonucleotide
uucaccccguagaaaugcg

SEQ ID NO: 912726 - RNA, 19 nt, Artificial Sequence
  Description of Artificial Sequence: Synthetic oligonucleotide
ugcugggucaggcauggca

SEQ ID NO: 912727 - RNA, 19 nt, Artificial Sequence
  Description of Artificial Sequence: Synthetic oligonucleotide
guuauugcucugcagggca

SEQ ID NO: 912728 - RNA, 19 nt, Artificial Sequence
  Description of Artificial Sequence: Synthetic oligonucleotide
caugaagccuacucccagg

SEQ ID NO: 912729 - RNA, 19 nt, Artificial Sequence
  Description of Artificial Sequence: Synthetic oligonucleotide
gagcgaaggggacaggggc

SEQ ID NO: 912730 - RNA, 19 nt, Artificial Sequence
  Description of Artificial Sequence: Synthetic oligonucleotide
acagacaaggcagaggcgu

SEQ ID NO: 912731 - RNA, 19 nt, Artificial Sequence
  Description of Artificial Sequence: Synthetic oligonucleotide
ucagcgucuucaauaugca

SEQ ID NO: 912732 - RNA, 19 nt, Artificial Sequence
  Description of Artificial Sequence: Synthetic oligonucleotide
gaugccacaccauaguggu

SEQ ID NO: 912733 - RNA, 19 nt, Artificial Sequence
  Description of Artificial Sequence: Synthetic oligonucleotide
gacaucugguccgacagug

SEQ ID NO: 912734 - RNA, 19 nt, Artificial Sequence
  Description of Artificial Sequence: Synthetic oligonucleotide
agcgucuucaauaugcaca

SEQ ID NO: 912735 - RNA, 19 nt, Artificial Sequence
  Description of Artificial Sequence: Synthetic oligonucleotide
augaggagaggagcgaagg

SEQ ID NO: 912736 - RNA, 19 nt, Artificial Sequence
  Description of Artificial Sequence: Synthetic oligonucleotide
ugaagccuacucccagggg

SEQ ID NO: 912737 - RNA, 19 nt, Artificial Sequence
  Description of Artificial Sequence: Synthetic oligonucleotide
cagcaguacauacuccucc

SEQ ID NO: 912738 - RNA, 19 nt, Artificial Sequence
  Description of Artificial Sequence: Synthetic oligonucleotide
acauuauggcuugcaaggg

SEQ ID NO: 912739 - RNA, 19 nt, Artificial Sequence
  Description of Artificial Sequence: Synthetic oligonucleotide
uguuauugcucugcagggc

SEQ ID NO: 912740 - RNA, 19 nt, Artificial Sequence
  Description of Artificial Sequence: Synthetic oligonucleotide
cuaaugcccaaugcgaaug

SEQ ID NO: 912741 - RNA, 19 nt, Artificial Sequence
  Description of Artificial Sequence: Synthetic oligonucleotide
gaggagaagccugggaugc

SEQ ID NO: 912742 - RNA, 19 nt, Artificial Sequence
  Description of Artificial Sequence: Synthetic oligonucleotide
uaaugcccaaugcgaauga

SEQ ID NO: 912743 - RNA, 19 nt, Artificial Sequence
  Description of Artificial Sequence: Synthetic oligonucleotide
caguacauacuccucccgc

SEQ ID NO: 912744 - RNA, 19 nt, Artificial Sequence
  Description of Artificial Sequence: Synthetic oligonucleotide
acaccagagcauucacugg

SEQ ID NO: 912745 - RNA, 19 nt, Artificial Sequence
  Description of Artificial Sequence: Synthetic oligonucleotide
agaucaguuucugccuccc

SEQ ID NO: 912746 - RNA, 19 nt, Artificial Sequence
  Description of Artificial Sequence: Synthetic oligonucleotide
ugcagcaaauauacauuaa

SEQ ID NO: 912747 - RNA, 19 nt, Artificial Sequence
  Description of Artificial Sequence: Synthetic oligonucleotide
agagucucuguacagccaa

SEQ ID NO: 912748 - RNA, 19 nt, Artificial Sequence
  Description of Artificial Sequence: Synthetic oligonucleotide
gagggcaugaagccuacuc
